United States Patent Application Publication US 2014/0004565 A1 - sequence listing, part 74

SEQ ID NO: 1804956 - RNA, 19 nt, Artificial Sequence
  Description of Artificial Sequence: Synthetic oligonucleotide
aaccaaggaaugauaacag

SEQ ID NO: 1804957 - RNA, 19 nt, Artificial Sequence
  Description of Artificial Sequence: Synthetic oligonucleotide
gagguaguugcacagucug

SEQ ID NO: 1804958 - RNA, 19 nt, Artificial Sequence
  Description of Artificial Sequence: Synthetic oligonucleotide
uacauaugccauuucauuu

SEQ ID NO: 1804959 - RNA, 19 nt, Artificial Sequence
  Description of Artificial Sequence: Synthetic oligonucleotide
gaauuaccaaaaucuuuug

SEQ ID NO: 1804960 - RNA, 19 nt, Artificial Sequence
  Description of Artificial Sequence: Synthetic oligonucleotide
agcuagaccagucugcaca

SEQ ID NO: 1804961 - RNA, 19 nt, Artificial Sequence
  Description of Artificial Sequence: Synthetic oligonucleotide
uccuuuguaaggcacguau

SEQ ID NO: 1804962 - RNA, 19 nt, Artificial Sequence
  Description of Artificial Sequence: Synthetic oligonucleotide
acucugccuuuacauaugc

SEQ ID NO: 1804963 - RNA, 19 nt, Artificial Sequence
  Description of Artificial Sequence: Synthetic oligonucleotide
caguuccugaacuagcuag

SEQ ID NO: 1804964 - RNA, 19 nt, Artificial Sequence
  Description of Artificial Sequence: Synthetic oligonucleotide
uaagguuccacaacgcuuu

SEQ ID NO: 1804965 - RNA, 19 nt, Artificial Sequence
  Description of Artificial Sequence: Synthetic oligonucleotide
ucgcaguacacuuucuuug

SEQ ID NO: 1804966 - RNA, 19 nt, Artificial Sequence
  Description of Artificial Sequence: Synthetic oligonucleotide
ggguaaacagacuuugggg

SEQ ID NO: 1804967 - RNA, 19 nt, Artificial Sequence
  Description of Artificial Sequence: Synthetic oligonucleotide
gaaggagggauauuagaca

SEQ ID NO: 1804968 - RNA, 19 nt, Artificial Sequence
  Description of Artificial Sequence: Synthetic oligonucleotide
acacguauaauuuuccaua

SEQ ID NO: 1804969 - RNA, 19 nt, Artificial Sequence
  Description of Artificial Sequence: Synthetic oligonucleotide
uuaagguuccacaacgcuu

SEQ ID NO: 1804970 - RNA, 19 nt, Artificial Sequence
  Description of Artificial Sequence: Synthetic oligonucleotide
aauacaugcaccaguuccu

SEQ ID NO: 1804971 - RNA, 19 nt, Artificial Sequence
  Description of Artificial Sequence: Synthetic oligonucleotide
gagaguaacacguauaauu

SEQ ID NO: 1804972 - RNA, 19 nt, Artificial Sequence
  Description of Artificial Sequence: Synthetic oligonucleotide
uuacauaugccauuucauu

SEQ ID NO: 1804973 - RNA, 19 nt, Artificial Sequence
  Description of Artificial Sequence: Synthetic oligonucleotide
ugaacuagcuagaccaguc

SEQ ID NO: 1804974 - RNA, 19 nt, Artificial Sequence
  Description of Artificial Sequence: Synthetic oligonucleotide
aaaacggugcaauggggaa

SEQ ID NO: 1804975 - RNA, 19 nt, Artificial Sequence
  Description of Artificial Sequence: Synthetic oligonucleotide
caacgcuuuccacauaggg

SEQ ID NO: 1804976 - RNA, 19 nt, Artificial Sequence
  Description of Artificial Sequence: Synthetic oligonucleotide
caucaagucccucucgagg

SEQ ID NO: 1804977 - RNA, 19 nt, Artificial Sequence
  Description of Artificial Sequence: Synthetic oligonucleotide
acuagcuagaccagucugc

SEQ ID NO: 1804978 - RNA, 19 nt, Artificial Sequence
  Description of Artificial Sequence: Synthetic oligonucleotide
uuccuuaauuacaaacuaa

SEQ ID NO: 1804979 - RNA, 19 nt, Artificial Sequence
  Description of Artificial Sequence: Synthetic oligonucleotide
uuccauacauuuucugccc

SEQ ID NO: 1804980 - RNA, 19 nt, Artificial Sequence
  Description of Artificial Sequence: Synthetic oligonucleotide
auuccuuaauuacaaacua

SEQ ID NO: 1804981 - RNA, 19 nt, Artificial Sequence
  Description of Artificial Sequence: Synthetic oligonucleotide
cuuuacauaugccauuuca

SEQ ID NO: 1804982 - RNA, 19 nt, Artificial Sequence
  Description of Artificial Sequence: Synthetic oligonucleotide
ccauuaagaugauucaugg

SEQ ID NO: 1804983 - RNA, 19 nt, Artificial Sequence
  Description of Artificial Sequence: Synthetic oligonucleotide
  modified_base (3)..(3): a, c, u, g, unknown or other
ucngaacagucaauaggug

SEQ ID NO: 1804984 - RNA, 19 nt, Artificial Sequence
  Description of Artificial Sequence: Synthetic oligonucleotide
aucacuuguugucuuaaga

SEQ ID NO: 1804985 - RNA, 19 nt, Artificial Sequence
  Description of Artificial Sequence: Synthetic oligonucleotide
acugucuuucuuauuguac

SEQ ID NO: 1804986 - RNA, 19 nt, Artificial Sequence
  Description of Artificial Sequence: Synthetic oligonucleotide
gaccagauuugugagauac

SEQ ID NO: 1804987 - RNA, 19 nt, Artificial Sequence
  Description of Artificial Sequence: Synthetic oligonucleotide
aaauaauaaaacagacaau

SEQ ID NO: 1804988 - RNA, 19 nt, Artificial Sequence
  Description of Artificial Sequence: Synthetic oligonucleotide
acagucaauaggugaugac

SEQ ID NO: 1804989 - RNA, 19 nt, Artificial Sequence
  Description of Artificial Sequence: Synthetic oligonucleotide
uguccuaguaaaugcacaa

SEQ ID NO: 1804990 - RNA, 19 nt, Artificial Sequence
  Description of Artificial Sequence: Synthetic oligonucleotide
uuacuuagugcugacauuu

SEQ ID NO: 1804991 - RNA, 19 nt, Artificial Sequence
  Description of Artificial Sequence: Synthetic oligonucleotide
cacaacgcuuuccacauag

SEQ ID NO: 1804992 - RNA, 19 nt, Artificial Sequence
  Description of Artificial Sequence: Synthetic oligonucleotide
uaacacguauaauuuucca

SEQ ID NO: 1804993 - RNA, 19 nt, Artificial Sequence
  Description of Artificial Sequence: Synthetic oligonucleotide
auaugauacgucccacaag

SEQ ID NO: 1804994 - RNA, 19 nt, Artificial Sequence
  Description of Artificial Sequence: Synthetic oligonucleotide
aaccaacaggacuguauug

SEQ ID NO: 1804995 - RNA, 19 nt, Artificial Sequence
  Description of Artificial Sequence: Synthetic oligonucleotide
uuuaacuaaugccuacauu

SEQ ID NO: 1804996 - RNA, 19 nt, Artificial Sequence
  Description of Artificial Sequence: Synthetic oligonucleotide
aucaagucccucucgaggu

SEQ ID NO: 1804997 - RNA, 19 nt, Artificial Sequence
  Description of Artificial Sequence: Synthetic oligonucleotide
gaaacauagcaguuaguaa

SEQ ID NO: 1804998 - RNA, 19 nt, Artificial Sequence
  Description of Artificial Sequence: Synthetic oligonucleotide
cacguauaauuuuccauac

SEQ ID NO: 1804999 - RNA, 19 nt, Artificial Sequence
  Description of Artificial Sequence: Synthetic oligonucleotide
gagagaguaacacguauaa

SEQ ID NO: 1805000 - RNA, 19 nt, Artificial Sequence
  Description of Artificial Sequence: Synthetic oligonucleotide
aacuaaugccuacauucau

SEQ ID NO: 1805001 - RNA, 19 nt, Artificial Sequence
  Description of Artificial Sequence: Synthetic oligonucleotide
uccaggcauacccacucgg

SEQ ID NO: 1805002 - RNA, 19 nt, Artificial Sequence
  Description of Artificial Sequence: Synthetic oligonucleotide
auaggugaugacaccaaac

SEQ ID NO: 1805003 - RNA, 19 nt, Artificial Sequence
  Description of Artificial Sequence: Synthetic oligonucleotide
uugcccauaaucuuccauc

SEQ ID NO: 1805004 - RNA, 19 nt, Artificial Sequence
  Description of Artificial Sequence: Synthetic oligonucleotide
gugaugacaccaaacaaug

SEQ ID NO: 1805005 - RNA, 19 nt, Artificial Sequence
  Description of Artificial Sequence: Synthetic oligonucleotide
auaaacaccgaagagggua

SEQ ID NO: 1805006 - RNA, 19 nt, Artificial Sequence
  Description of Artificial Sequence: Synthetic oligonucleotide
uaugccauuucauuuuaua

SEQ ID NO: 1805007 - RNA, 19 nt, Artificial Sequence
  Description of Artificial Sequence: Synthetic oligonucleotide
caucuuguuaauuuuaacu

SEQ ID NO: 1805008 - RNA, 19 nt, Artificial Sequence
  Description of Artificial Sequence: Synthetic oligonucleotide
uagggcucaaacuuacaga

SEQ ID NO: 1805009 - RNA, 19 nt, Artificial Sequence
  Description of Artificial Sequence: Synthetic oligonucleotide
uacauuuucugcccauuaa

SEQ ID NO: 1805010 - RNA, 19 nt, Artificial Sequence
  Description of Artificial Sequence: Synthetic oligonucleotide
ccuuaauuacaaacuaagg

SEQ ID NO: 1805011 - RNA, 19 nt, Artificial Sequence
  Description of Artificial Sequence: Synthetic oligonucleotide
caaacuuacagaaaucacu

SEQ ID NO: 1805012 - RNA, 19 nt, Artificial Sequence
  Description of Artificial Sequence: Synthetic oligonucleotide
aaacuaaggauggcaauau

SEQ ID NO: 1805013 - RNA, 19 nt, Artificial Sequence
  Description of Artificial Sequence: Synthetic oligonucleotide
aacaccgaagaggguaaac

SEQ ID NO: 1805014 - RNA, 19 nt, Artificial Sequence
  Description of Artificial Sequence: Synthetic oligonucleotide
aucugcuacagaaggaggg

SEQ ID NO: 1805015 - RNA, 19 nt, Artificial Sequence
  Description of Artificial Sequence: Synthetic oligonucleotide
uaaggcacguaugucaacu

SEQ ID NO: 1805016 - RNA, 19 nt, Artificial Sequence
  Description of Artificial Sequence: Synthetic oligonucleotide
aauccacaaccauuuucca

SEQ ID NO: 1805017 - RNA, 19 nt, Artificial Sequence
  Description of Artificial Sequence: Synthetic oligonucleotide
augccauuucauuuuauaa

SEQ ID NO: 1805018 - RNA, 19 nt, Artificial Sequence
  Description of Artificial Sequence: Synthetic oligonucleotide
aaugugauuugcccauaau

SEQ ID NO: 1805019 - RNA, 19 nt, Artificial Sequence
  Description of Artificial Sequence: Synthetic oligonucleotide
aacagucaauaggugauga

SEQ ID NO: 1805020 - RNA, 19 nt, Artificial Sequence
  Description of Artificial Sequence: Synthetic oligonucleotide
uagagagaguaacacguau

SEQ ID NO: 1805021 - RNA, 19 nt, Artificial Sequence
  Description of Artificial Sequence: Synthetic oligonucleotide
aaggcccaauucuuuuguc

SEQ ID NO: 1805022 - RNA, 19 nt, Artificial Sequence
  Description of Artificial Sequence: Synthetic oligonucleotide
ugaucaucaagucccucuc

SEQ ID NO: 1805023 - RNA, 19 nt, Artificial Sequence
  Description of Artificial Sequence: Synthetic oligonucleotide
uaagucaugucaacuucaa

SEQ ID NO: 1805024 - RNA, 19 nt, Artificial Sequence
  Description of Artificial Sequence: Synthetic oligonucleotide
uuuauaugauacgucccac

SEQ ID NO: 1805025 - RNA, 19 nt, Artificial Sequence
  Description of Artificial Sequence: Synthetic oligonucleotide
agaggguaaacagacuuug

SEQ ID NO: 1805026 - RNA, 19 nt, Artificial Sequence
  Description of Artificial Sequence: Synthetic oligonucleotide
aaucuuuuguuagcccuug

SEQ ID NO: 1805027 - RNA, 19 nt, Artificial Sequence
  Description of Artificial Sequence: Synthetic oligonucleotide
auuuuaacuaaugccuaca

SEQ ID NO: 1805028 - RNA, 19 nt, Artificial Sequence
  Description of Artificial Sequence: Synthetic oligonucleotide
acuaaggauggcaauauau

SEQ ID NO: 1805029 - RNA, 19 nt, Artificial Sequence
  Description of Artificial Sequence: Synthetic oligonucleotide
aagacauuacuuagugcug

SEQ ID NO: 1805030 - RNA, 19 nt, Artificial Sequence
  Description of Artificial Sequence: Synthetic oligonucleotide
cuaaugccuacauucauaa

SEQ ID NO: 1805031 - RNA, 19 nt, Artificial Sequence
  Description of Artificial Sequence: Synthetic oligonucleotide
auauucagccacaaacaag

SEQ ID NO: 1805032 - RNA, 19 nt, Artificial Sequence
  Description of Artificial Sequence: Synthetic oligonucleotide
cauuuucugcccauuaaga

SEQ ID NO: 1805033 - RNA, 19 nt, Artificial Sequence
  Description of Artificial Sequence: Synthetic oligonucleotide
aucaucaagucccucucga

SEQ ID NO: 1805034 - RNA, 19 nt, Artificial Sequence
  Description of Artificial Sequence: Synthetic oligonucleotide
ugcccauuaagaugauuca

SEQ ID NO: 1805035 - RNA, 19 nt, Artificial Sequence
  Description of Artificial Sequence: Synthetic oligonucleotide
  modified_base (2)..(2): a, c, u, g, unknown or other
cngaacagucaauagguga

SEQ ID NO: 1805036 - RNA, 19 nt, Artificial Sequence
  Description of Artificial Sequence: Synthetic oligonucleotide
ugcccauaaucuuccaucu

SEQ ID NO: 1805037 - RNA, 19 nt, Artificial Sequence
  Description of Artificial Sequence: Synthetic oligonucleotide
uauugccaccagcugagac

SEQ ID NO: 1805038 - RNA, 19 nt, Artificial Sequence
  Description of Artificial Sequence: Synthetic oligonucleotide
agcaacacuaguuuuccuu

SEQ ID NO: 1805039 - RNA, 19 nt, Artificial Sequence
  Description of Artificial Sequence: Synthetic oligonucleotide
cauuuggaauagccaaagg

SEQ ID NO: 1805040 - RNA, 19 nt, Artificial Sequence
  Description of Artificial Sequence: Synthetic oligonucleotide
ugacaccaaacaaugugau

SEQ ID NO: 1805041 - RNA, 19 nt, Artificial Sequence
  Description of Artificial Sequence: Synthetic oligonucleotide
guaacacguauaauuuucc

SEQ ID NO: 1805042 - RNA, 19 nt, Artificial Sequence
  Description of Artificial Sequence: Synthetic oligonucleotide
ugcaauggggaauuaccaa

SEQ ID NO: 1805043 - RNA, 19 nt, Artificial Sequence
  Description of Artificial Sequence: Synthetic oligonucleotide
caucugcuacagaaggagg

SEQ ID NO: 1805044 - RNA, 19 nt, Artificial Sequence
  Description of Artificial Sequence: Synthetic oligonucleotide
acuguauugccaccagcug

SEQ ID NO: 1805045 - RNA, 19 nt, Artificial Sequence
  Description of Artificial Sequence: Synthetic oligonucleotide
acaggacuguauugccacc

SEQ ID NO: 1805046 - RNA, 19 nt, Artificial Sequence
  Description of Artificial Sequence: Synthetic oligonucleotide
acauagggcucaaacuuac

SEQ ID NO: 1805047 - RNA, 19 nt, Artificial Sequence
  Description of Artificial Sequence: Synthetic oligonucleotide
accaucucuucauuuaaau

SEQ ID NO: 1805048 - RNA, 19 nt, Artificial Sequence
  Description of Artificial Sequence: Synthetic oligonucleotide
ucccacaagaguguguaca

SEQ ID NO: 1805049 - RNA, 19 nt, Artificial Sequence
  Description of Artificial Sequence: Synthetic oligonucleotide
guuuucgcaguacacuuuc

SEQ ID NO: 1805050 - RNA, 19 nt, Artificial Sequence
  Description of Artificial Sequence: Synthetic oligonucleotide
ugaugacaccaaacaaugu

SEQ ID NO: 1805051 - RNA, 19 nt, Artificial Sequence
  Description of Artificial Sequence: Synthetic oligonucleotide
ccuauagaacagaugaaac

SEQ ID NO: 1805052 - RNA, 19 nt, Artificial Sequence
  Description of Artificial Sequence: Synthetic oligonucleotide
ucgagguaguugcacaguc

SEQ ID NO: 1805053 - RNA, 19 nt, Artificial Sequence
  Description of Artificial Sequence: Synthetic oligonucleotide
uuagagagaguaacacgua

SEQ ID NO: 1805054 - RNA, 19 nt, Artificial Sequence
  Description of Artificial Sequence: Synthetic oligonucleotide
uaguaacucugccuuuaca

SEQ ID NO: 1805055 - RNA, 19 nt, Artificial Sequence
  Description of Artificial Sequence: Synthetic oligonucleotide
accauuuuccaaaauuccu

SEQ ID NO: 1805056 - RNA, 19 nt, Artificial Sequence
  Description of Artificial Sequence: Synthetic oligonucleotide
acaaacuaaggauggcaau

SEQ ID NO: 1805057 - RNA, 19 nt, Artificial Sequence
  Description of Artificial Sequence: Synthetic oligonucleotide
ucugauguuuagagagagu

SEQ ID NO: 1805058 - RNA, 19 nt, Artificial Sequence
  Description of Artificial Sequence: Synthetic oligonucleotide
cuaaggauggcaauauaua

SEQ ID NO: 1805059 - RNA, 19 nt, Artificial Sequence
  Description of Artificial Sequence: Synthetic oligonucleotide
gucaauaggugaugacacc

SEQ ID NO: 1805060 - RNA, 19 nt, Artificial Sequence
  Description of Artificial Sequence: Synthetic oligonucleotide
aaggauggcaauauauauu

SEQ ID NO: 1805061 - RNA, 19 nt, Artificial Sequence
  Description of Artificial Sequence: Synthetic oligonucleotide
gaagaggguaaacagacuu

SEQ ID NO: 1805062 - RNA, 19 nt, Artificial Sequence
  Description of Artificial Sequence: Synthetic oligonucleotide
cauuuaaauugcuaaccaa

SEQ ID NO: 1805063 - RNA, 19 nt, Artificial Sequence
  Description of Artificial Sequence: Synthetic oligonucleotide
uauuagacaggugcagggu

SEQ ID NO: 1805064 - RNA, 19 nt, Artificial Sequence
  Description of Artificial Sequence: Synthetic oligonucleotide
uacccacucggccagcggc

SEQ ID NO: 1805065 - RNA, 19 nt, Artificial Sequence
  Description of Artificial Sequence: Synthetic oligonucleotide
augccuacauucauaacug

SEQ ID NO: 1805066 - RNA, 19 nt, Artificial Sequence
  Description of Artificial Sequence: Synthetic oligonucleotide
uuucgcaguacacuuucuu

SEQ ID NO: 1805067 - RNA, 19 nt, Artificial Sequence
  Description of Artificial Sequence: Synthetic oligonucleotide
uuuguaaggcacguauguc

SEQ ID NO: 1805068 - RNA, 19 nt, Artificial Sequence
  Description of Artificial Sequence: Synthetic oligonucleotide
agacauuacuuagugcuga

SEQ ID NO: 1805069 - RNA, 19 nt, Artificial Sequence
  Description of Artificial Sequence: Synthetic oligonucleotide
ucugcuacagaaggaggga

SEQ ID NO: 1805070 - RNA, 19 nt, Artificial Sequence
  Description of Artificial Sequence: Synthetic oligonucleotide
aacugaaucuagaccagau

SEQ ID NO: 1805071 - RNA, 19 nt, Artificial Sequence
  Description of Artificial Sequence: Synthetic oligonucleotide
guaaccaucucuucauuua

SEQ ID NO: 1805072 - RNA, 19 nt, Artificial Sequence
  Description of Artificial Sequence: Synthetic oligonucleotide
uucgcaguacacuuucuuu

SEQ ID NO: 1805073 - RNA, 19 nt, Artificial Sequence
  Description of Artificial Sequence: Synthetic oligonucleotide
gacauuacuuagugcugac

SEQ ID NO: 1805074 - RNA, 19 nt, Artificial Sequence
  Description of Artificial Sequence: Synthetic oligonucleotide
uaaacagacuuuggggcgu

SEQ ID NO: 1805075 - RNA, 19 nt, Artificial Sequence
  Description of Artificial Sequence: Synthetic oligonucleotide
caccaaacaaugugauuug

SEQ ID NO: 1805076 - RNA, 19 nt, Artificial Sequence
  Description of Artificial Sequence: Synthetic oligonucleotide
aggugaugacaccaaacaa

SEQ ID NO: 1805077 - RNA, 19 nt, Artificial Sequence
  Description of Artificial Sequence: Synthetic oligonucleotide
cagcauuuggaauagccaa

SEQ ID NO: 1805078 - RNA, 19 nt, Artificial Sequence
  Description of Artificial Sequence: Synthetic oligonucleotide
acguauaauuuuccauaca

SEQ ID NO: 1805079 - RNA, 19 nt, Artificial Sequence
  Description of Artificial Sequence: Synthetic oligonucleotide
caggcauacccacucggcc

SEQ ID NO: 1805080 - RNA, 19 nt, Artificial Sequence
  Description of Artificial Sequence: Synthetic oligonucleotide
cccauuaagaugauucaug

SEQ ID NO: 1805081 - RNA, 19 nt, Artificial Sequence
  Description of Artificial Sequence: Synthetic oligonucleotide
acaccgaagaggguaaaca

SEQ ID NO: 1805082 - RNA, 19 nt, Artificial Sequence
  Description of Artificial Sequence: Synthetic oligonucleotide
augcacaacagcaacacua

SEQ ID NO: 1805083 - RNA, 19 nt, Artificial Sequence
  Description of Artificial Sequence: Synthetic oligonucleotide
aaucuuccugcaaguuuuc

SEQ ID NO: 1805084 - RNA, 19 nt, Artificial Sequence
  Description of Artificial Sequence: Synthetic oligonucleotide
ccgaagaggguaaacagac

SEQ ID NO: 1805085 - RNA, 19 nt, Artificial Sequence
  Description of Artificial Sequence: Synthetic oligonucleotide
cuguauugccaccagcuga

SEQ ID NO: 1805086 - RNA, 19 nt, Artificial Sequence
  Description of Artificial Sequence: Synthetic oligonucleotide
aacuaaggauggcaauaua

SEQ ID NO: 1805087 - RNA, 19 nt, Artificial Sequence
  Description of Artificial Sequence: Synthetic oligonucleotide
aaaucuuuuguuagcccuu

SEQ ID NO: 1805088 - RNA, 19 nt, Artificial Sequence
  Description of Artificial Sequence: Synthetic oligonucleotide
uccugcaaguuuucgcagu

SEQ ID NO: 1805089 - RNA, 19 nt, Artificial Sequence
  Description of Artificial Sequence: Synthetic oligonucleotide
uuuucgcaguacacuuucu

SEQ ID NO: 1805090 - RNA, 19 nt, Artificial Sequence
  Description of Artificial Sequence: Synthetic oligonucleotide
gaacagucaauaggugaug

SEQ ID NO: 1805091 - RNA, 19 nt, Artificial Sequence
  Description of Artificial Sequence: Synthetic oligonucleotide
caccaguuccugaacuagc

SEQ ID NO: 1805092 - RNA, 19 nt, Artificial Sequence
  Description of Artificial Sequence: Synthetic oligonucleotide
cagucaauaggugaugaca

SEQ ID NO: 1805093 - RNA, 19 nt, Artificial Sequence
  Description of Artificial Sequence: Synthetic oligonucleotide
cuuuguaaggcacguaugu

SEQ ID NO: 1805094 - RNA, 19 nt, Artificial Sequence
  Description of Artificial Sequence: Synthetic oligonucleotide
cacuuguugucuuaagaaa

SEQ ID NO: 1805095 - RNA, 19 nt, Artificial Sequence
  Description of Artificial Sequence: Synthetic oligonucleotide
aacucugccuuuacauaug

SEQ ID NO: 1805096 - RNA, 19 nt, Artificial Sequence
  Description of Artificial Sequence: Synthetic oligonucleotide
agaugaaacauagcaguua

SEQ ID NO: 1805097 - RNA, 19 nt, Artificial Sequence
  Description of Artificial Sequence: Synthetic oligonucleotide
guaguugcacagucugaug

SEQ ID NO: 1805098 - RNA, 19 nt, Artificial Sequence
  Description of Artificial Sequence: Synthetic oligonucleotide
uggggcguaaccaucucuu

SEQ ID NO: 1805099 - RNA, 19 nt, Artificial Sequence
  Description of Artificial Sequence: Synthetic oligonucleotide
cugaaucuagaccagauuu

SEQ ID NO: 1805100 - RNA, 19 nt, Artificial Sequence
  Description of Artificial Sequence: Synthetic oligonucleotide
auccacaaccauuuuccaa

SEQ ID NO: 1805101 - RNA, 19 nt, Artificial Sequence
  Description of Artificial Sequence: Synthetic oligonucleotide
acagacuuuggggcguaac

SEQ ID NO: 1805102 - RNA, 19 nt, Artificial Sequence
  Description of Artificial Sequence: Synthetic oligonucleotide
gaaucuagaccagauuugu

SEQ ID NO: 1805103 - RNA, 19 nt, Artificial Sequence
  Description of Artificial Sequence: Synthetic oligonucleotide
uuggggcguaaccaucucu

SEQ ID NO: 1805104 - RNA, 19 nt, Artificial Sequence
  Description of Artificial Sequence: Synthetic oligonucleotide
gaccagucugcacaugcuc

SEQ ID NO: 1805105 - RNA, 19 nt, Artificial Sequence
  Description of Artificial Sequence: Synthetic oligonucleotide
aacggugcaauggggaauu

SEQ ID NO: 1805106 - RNA, 19 nt, Artificial Sequence
  Description of Artificial Sequence: Synthetic oligonucleotide
agguuccacaacgcuuucc

SEQ ID NO: 1805107 - RNA, 19 nt, Artificial Sequence
  Description of Artificial Sequence: Synthetic oligonucleotide
uaaugccuacauucauaac

SEQ ID NO: 1805108 - RNA, 19 nt, Artificial Sequence
  Description of Artificial Sequence: Synthetic oligonucleotide
aaacggugcaauggggaau

SEQ ID NO: 1805109 - RNA, 19 nt, Artificial Sequence
  Description of Artificial Sequence: Synthetic oligonucleotide
aagaggguaaacagacuuu

SEQ ID NO: 1805110 - RNA, 19 nt, Artificial Sequence
  Description of Artificial Sequence: Synthetic oligonucleotide
auucagccacaaacaagac

SEQ ID NO: 1805111 - RNA, 19 nt, Artificial Sequence
  Description of Artificial Sequence: Synthetic oligonucleotide
acuaaugccuacauucaua

SEQ ID NO: 1805112 - RNA, 19 nt, Artificial Sequence
  Description of Artificial Sequence: Synthetic oligonucleotide
acuuuggggcguaaccauc

SEQ ID NO: 1805113 - RNA, 19 nt, Artificial Sequence
  Description of Artificial Sequence: Synthetic oligonucleotide
gcacguaugucaacuaaag

SEQ ID NO: 1805114 - RNA, 19 nt, Artificial Sequence
  Description of Artificial Sequence: Synthetic oligonucleotide
caaggaaugauaacagcau

SEQ ID NO: 1805115 - RNA, 19 nt, Artificial Sequence
  Description of Artificial Sequence: Synthetic oligonucleotide
uacuuagugcugacauuua

SEQ ID NO: 1805116 - RNA, 19 nt, Artificial Sequence
  Description of Artificial Sequence: Synthetic oligonucleotide
ugccuuuacauaugccauu

SEQ ID NO: 1805117 - RNA, 19 nt, Artificial Sequence
  Description of Artificial Sequence: Synthetic oligonucleotide
aggagggauauuagacagg

SEQ ID NO: 1805118 - RNA, 19 nt, Artificial Sequence
  Description of Artificial Sequence: Synthetic oligonucleotide
cuagaccagauuugugaga

SEQ ID NO: 1805119 - RNA, 19 nt, Artificial Sequence
  Description of Artificial Sequence: Synthetic oligonucleotide
accgaagaggguaaacaga

SEQ ID NO: 1805120 - RNA, 19 nt, Artificial Sequence
  Description of Artificial Sequence: Synthetic oligonucleotide
aggcacguaugucaacuaa

SEQ ID NO: 1805121 - RNA, 19 nt, Artificial Sequence
  Description of Artificial Sequence: Synthetic oligonucleotide
gcaauggggaauuaccaaa

SEQ ID NO: 1805122 - RNA, 19 nt, Artificial Sequence
  Description of Artificial Sequence: Synthetic oligonucleotide
acauuacuuagugcugaca

SEQ ID NO: 1805123 - RNA, 19 nt, Artificial Sequence
  Description of Artificial Sequence: Synthetic oligonucleotide
auagaacagaugaaacaua

SEQ ID NO: 1805124 - RNA, 19 nt, Artificial Sequence
  Description of Artificial Sequence: Synthetic oligonucleotide
acacuaguuuuccuuugua

SEQ ID NO: 1805125 - RNA, 19 nt, Artificial Sequence
  Description of Artificial Sequence: Synthetic oligonucleotide
gaacuagcuagaccagucu

SEQ ID NO: 1805126 - RNA, 19 nt, Artificial Sequence
  Description of Artificial Sequence: Synthetic oligonucleotide
gugcaauggggaauuacca

SEQ ID NO: 1805127 - RNA, 19 nt, Artificial Sequence
  Description of Artificial Sequence: Synthetic oligonucleotide
cuaaccaacaggacuguau

SEQ ID NO: 1805128 - RNA, 19 nt, Artificial Sequence
  Description of Artificial Sequence: Synthetic oligonucleotide
caagucccucucgagguag

SEQ ID NO: 1805129 - RNA, 19 nt, Artificial Sequence
  Description of Artificial Sequence: Synthetic oligonucleotide
agagagaguaacacguaua

SEQ ID NO: 1805130 - RNA, 19 nt, Artificial Sequence
  Description of Artificial Sequence: Synthetic oligonucleotide
ucaagucccucucgaggua

SEQ ID NO: 1805131 - RNA, 19 nt, Artificial Sequence
  Description of Artificial Sequence: Synthetic oligonucleotide
guuccugaacuagcuagac

SEQ ID NO: 1805132 - RNA, 19 nt, Artificial Sequence
  Description of Artificial Sequence: Synthetic oligonucleotide
gguuaagguuccacaacgc

SEQ ID NO: 1805133 - RNA, 19 nt, Artificial Sequence
  Description of Artificial Sequence: Synthetic oligonucleotide
cuuacagaaaucacuuguu

SEQ ID NO: 1805134 - RNA, 19 nt, Artificial Sequence
  Description of Artificial Sequence: Synthetic oligonucleotide
agucugauguuuagagaga

SEQ ID NO: 1805135 - RNA, 19 nt, Artificial Sequence
  Description of Artificial Sequence: Synthetic oligonucleotide
caauaggugaugacaccaa

SEQ ID NO: 1805136 - RNA, 19 nt, Artificial Sequence
  Description of Artificial Sequence: Synthetic oligonucleotide
cauacccacucggccagcg

SEQ ID NO: 1805137 - RNA, 19 nt, Artificial Sequence
  Description of Artificial Sequence: Synthetic oligonucleotide
agagaguaacacguauaau

SEQ ID NO: 1805138 - RNA, 19 nt, Artificial Sequence
  Description of Artificial Sequence: Synthetic oligonucleotide
agcauuuggaauagccaaa

SEQ ID NO: 1805139 - RNA, 19 nt, Artificial Sequence
  Description of Artificial Sequence: Synthetic oligonucleotide
cguaugucaacuaaaguua

SEQ ID NO: 1805140 - RNA, 19 nt, Artificial Sequence
  Description of Artificial Sequence: Synthetic oligonucleotide
cacaacagcaacacuaguu

SEQ ID NO: 1805141 - RNA, 19 nt, Artificial Sequence
  Description of Artificial Sequence: Synthetic oligonucleotide
uacgucccacaagagugug

SEQ ID NO: 1805142 - RNA, 19 nt, Artificial Sequence
  Description of Artificial Sequence: Synthetic oligonucleotide
acaacgcuuuccacauagg

SEQ ID NO: 1805143 - RNA, 19 nt, Artificial Sequence
  Description of Artificial Sequence: Synthetic oligonucleotide
ggcauacccacucggccag

SEQ ID NO: 1805144 - RNA, 19 nt, Artificial Sequence
  Description of Artificial Sequence: Synthetic oligonucleotide
gaguaacacguauaauuuu

SEQ ID NO: 1805145 - RNA, 19 nt, Artificial Sequence
  Description of Artificial Sequence: Synthetic oligonucleotide
cagauuugugagauacaaa

SEQ ID NO: 1805146 - RNA, 19 nt, Artificial Sequence
  Description of Artificial Sequence: Synthetic oligonucleotide
cagagcacugucuuucuua

SEQ ID NO: 1805147 - RNA, 19 nt, Artificial Sequence
  Description of Artificial Sequence: Synthetic oligonucleotide
guaaggcacguaugucaac

SEQ ID NO: 1805148 - RNA, 19 nt, Artificial Sequence
  Description of Artificial Sequence: Synthetic oligonucleotide
augauacgucccacaagag

SEQ ID NO: 1805149 - RNA, 19 nt, Artificial Sequence
  Description of Artificial Sequence: Synthetic oligonucleotide
gauucauggcgagcuguga

SEQ ID NO: 1805150 - RNA, 19 nt, Artificial Sequence
  Description of Artificial Sequence: Synthetic oligonucleotide
aaacugccacaaaauuaau

SEQ ID NO: 1805151 - RNA, 19 nt, Artificial Sequence
  Description of Artificial Sequence: Synthetic oligonucleotide
gggauauuagacaggugca

SEQ ID NO: 1805152 - RNA, 19 nt, Artificial Sequence
  Description of Artificial Sequence: Synthetic oligonucleotide
ggacuguauugccaccagc

SEQ ID NO: 1805153 - RNA, 19 nt, Artificial Sequence
  Description of Artificial Sequence: Synthetic oligonucleotide
ugcuaaccaacaggacugu

SEQ ID NO: 1805154 - RNA, 19 nt, Artificial Sequence
  Description of Artificial Sequence: Synthetic oligonucleotide
uagcuagaccagucugcac

SEQ ID NO: 1805155 - RNA, 19 nt, Artificial Sequence
  Description of Artificial Sequence: Synthetic oligonucleotide
auacgucccacaagagugu

SEQ ID NO: 1805156 - RNA, 19 nt, Artificial Sequence
  Description of Artificial Sequence: Synthetic oligonucleotide
gacuuuggggcguaaccau

SEQ ID NO: 1805157 - RNA, 19 nt, Artificial Sequence
  Description of Artificial Sequence: Synthetic oligonucleotide
cuuuggggcguaaccaucu

SEQ ID NO: 1805158 - RNA, 19 nt, Artificial Sequence
  Description of Artificial Sequence: Synthetic oligonucleotide
gugauuugcccauaaucuu

SEQ ID NO: 1805159 - RNA, 19 nt, Artificial Sequence
  Description of Artificial Sequence: Synthetic oligonucleotide
augaaacauagcaguuagu

SEQ ID NO: 1805160 - RNA, 19 nt, Artificial Sequence
  Description of Artificial Sequence: Synthetic oligonucleotide
cacauaagucaugucaacu

SEQ ID NO: 1805161 - RNA, 19 nt, Artificial Sequence
  Description of Artificial Sequence: Synthetic oligonucleotide
aaacaccgaagaggguaaa

SEQ ID NO: 1805162 - RNA, 19 nt, Artificial Sequence
  Description of Artificial Sequence: Synthetic oligonucleotide
ccugaacuagcuagaccag

SEQ ID NO: 1805163 - RNA, 19 nt, Artificial Sequence
  Description of Artificial Sequence: Synthetic oligonucleotide
cauagggcucaaacuuaca

SEQ ID NO: 1805164 - RNA, 19 nt, Artificial Sequence
  Description of Artificial Sequence: Synthetic oligonucleotide
ggaauagccaaaggacuga

SEQ ID NO: 1805165 - RNA, 19 nt, Artificial Sequence
  Description of Artificial Sequence: Synthetic oligonucleotide
ccagucugcacaugcucag

SEQ ID NO: 1805166 - RNA, 19 nt, Artificial Sequence
  Description of Artificial Sequence: Synthetic oligonucleotide
ccaggcauacccacucggc

SEQ ID NO: 1805167 - RNA, 19 nt, Artificial Sequence
  Description of Artificial Sequence: Synthetic oligonucleotide
ggagggauauuagacaggu

SEQ ID NO: 1805168 - RNA, 19 nt, Artificial Sequence
  Description of Artificial Sequence: Synthetic oligonucleotide
gggcguaaccaucucuuca

SEQ ID NO: 1805169 - RNA, 19 nt, Artificial Sequence
  Description of Artificial Sequence: Synthetic oligonucleotide
cccaauucuuuuguccuag

SEQ ID NO: 1805170 - RNA, 19 nt, Artificial Sequence
  Description of Artificial Sequence: Synthetic oligonucleotide
aguuuucgcaguacacuuu

SEQ ID NO: 1805171 - RNA, 19 nt, Artificial Sequence
  Description of Artificial Sequence: Synthetic oligonucleotide
cugccuuuacauaugccau

SEQ ID NO: 1805172 - RNA, 19 nt, Artificial Sequence
  Description of Artificial Sequence: Synthetic oligonucleotide
accagauuugugagauaca

SEQ ID NO: 1805173 - RNA, 19 nt, Artificial Sequence
  Description of Artificial Sequence: Synthetic oligonucleotide
caggacuguauugccacca

SEQ ID NO: 1805174 - RNA, 19 nt, Artificial Sequence
  Description of Artificial Sequence: Synthetic oligonucleotide
gacaccaaacaaugugauu

SEQ ID NO: 1805175 - RNA, 19 nt, Artificial Sequence
  Description of Artificial Sequence: Synthetic oligonucleotide
ccagauuugugagauacaa

SEQ ID NO: 1805176 - RNA, 19 nt, Artificial Sequence
  Description of Artificial Sequence: Synthetic oligonucleotide
aaacagacuuuggggcgua

SEQ ID NO: 1805177 - RNA, 19 nt, Artificial Sequence
  Description of Artificial Sequence: Synthetic oligonucleotide
cacguaugucaacuaaagu

SEQ ID NO: 1805178 - RNA, 19 nt, Artificial Sequence
  Description of Artificial Sequence: Synthetic oligonucleotide
gcucagaaauccacaacca

SEQ ID NO: 1805179 - RNA, 19 nt, Artificial Sequence
  Description of Artificial Sequence: Synthetic oligonucleotide
agguaguugcacagucuga

SEQ ID NO: 1805180 - RNA, 19 nt, Artificial Sequence
  Description of Artificial Sequence: Synthetic oligonucleotide
gucccucucgagguaguug

SEQ ID NO: 1805181 - RNA, 19 nt, Artificial Sequence
  Description of Artificial Sequence: Synthetic oligonucleotide
ggcccaauucuuuuguccu

SEQ ID NO: 1805182 - RNA, 19 nt, Artificial Sequence
  Description of Artificial Sequence: Synthetic oligonucleotide
cccuauagaacagaugaaa

SEQ ID NO: 1805183 - RNA, 19 nt, Artificial Sequence
  Description of Artificial Sequence: Synthetic oligonucleotide
auaugccauuucauuuuau

SEQ ID NO: 1805184 - RNA, 19 nt, Artificial Sequence
  Description of Artificial Sequence: Synthetic oligonucleotide
uucacgcgcugcacaucuc

SEQ ID NO: 1805185 - RNA, 19 nt, Artificial Sequence
  Description of Artificial Sequence: Synthetic oligonucleotide
uuccuuuguaaggcacgua

SEQ ID NO: 1805186 - RNA, 19 nt, Artificial Sequence
  Description of Artificial Sequence: Synthetic oligonucleotide
gucccacaagaguguguac

SEQ ID NO: 1805187 - RNA, 19 nt, Artificial Sequence
  Description of Artificial Sequence: Synthetic oligonucleotide
caaacucugguccccacuu

SEQ ID NO: 1805188 - RNA, 19 nt, Artificial Sequence
  Description of Artificial Sequence: Synthetic oligonucleotide
agaccagauuugugagaua

SEQ ID NO: 1805189 - RNA, 19 nt, Artificial Sequence
  Description of Artificial Sequence: Synthetic oligonucleotide
cuagaccagucugcacaug

SEQ ID NO: 1805190 - RNA, 19 nt, Artificial Sequence
  Description of Artificial Sequence: Synthetic oligonucleotide
ggcacguaugucaacuaaa

SEQ ID NO: 1805191 - RNA, 19 nt, Artificial Sequence
  Description of Artificial Sequence: Synthetic oligonucleotide
gccuacauucauaacugaa

SEQ ID NO: 1805192 - RNA, 19 nt, Artificial Sequence
  Description of Artificial Sequence: Synthetic oligonucleotide
aacagacuuuggggcguaa

SEQ ID NO: 1805193 - RNA, 19 nt, Artificial Sequence
  Description of Artificial Sequence: Synthetic oligonucleotide
ggcguaaccaucucuucau

SEQ ID NO: 1805194 - RNA, 19 nt, Artificial Sequence
  Description of Artificial Sequence: Synthetic oligonucleotide
gcaacacuaguuuuccuuu

SEQ ID NO: 1805195 - RNA, 19 nt, Artificial Sequence
  Description of Artificial Sequence: Synthetic oligonucleotide
gggaauuaccaaaaucuuu

SEQ ID NO: 1805196 - RNA, 19 nt, Artificial Sequence
  Description of Artificial Sequence: Synthetic oligonucleotide
caacagcaacacuaguuuu

SEQ ID NO: 1805197 - RNA, 19 nt, Artificial Sequence
  Description of Artificial Sequence: Synthetic oligonucleotide
guaucagagcacugucuuu

SEQ ID NO: 1805198 - RNA, 19 nt, Artificial Sequence
  Description of Artificial Sequence: Synthetic oligonucleotide
cugaacuagcuagaccagu

SEQ ID NO: 1805199 - RNA, 19 nt, Artificial Sequence
  Description of Artificial Sequence: Synthetic oligonucleotide
ccacauagggcucaaacuu

SEQ ID NO: 1805200 - RNA, 19 nt, Artificial Sequence
  Description of Artificial Sequence: Synthetic oligonucleotide
guuagcccuugaucaucaa

SEQ ID NO: 1805201 - RNA, 19 nt, Artificial Sequence
  Description of Artificial Sequence: Synthetic oligonucleotide
ggggcguaaccaucucuuc

SEQ ID NO: 1805202 - RNA, 19 nt, Artificial Sequence
  Description of Artificial Sequence: Synthetic oligonucleotide
cccacaagaguguguacaa

SEQ ID NO: 1805203 - RNA, 19 nt, Artificial Sequence
  Description of Artificial Sequence: Synthetic oligonucleotide
acgucccacaagagugugu

SEQ ID NO: 1805204 - RNA, 19 nt, Artificial Sequence
  Description of Artificial Sequence: Synthetic oligonucleotide
gcacagucugauguuuaga

SEQ ID NO: 1805205 - RNA, 19 nt, Artificial Sequence
  Description of Artificial Sequence: Synthetic oligonucleotide
guauugccaccagcugaga

SEQ ID NO: 1805206 - RNA, 19 nt, Artificial Sequence
  Description of Artificial Sequence: Synthetic oligonucleotide
ccucucgagguaguugcac

SEQ ID NO: 1805207 - RNA, 19 nt, Artificial Sequence
  Description of Artificial Sequence: Synthetic oligonucleotide
ggggaauuaccaaaaucuu

SEQ ID NO: 1805208 - RNA, 19 nt, Artificial Sequence
  Description of Artificial Sequence: Synthetic oligonucleotide
cacaaccauuuuccaaaau

SEQ ID NO: 1805209 - RNA, 19 nt, Artificial Sequence
  Description of Artificial Sequence: Synthetic oligonucleotide
ggauggcaauauauauuua

SEQ ID NO: 1805210 - RNA, 19 nt, Artificial Sequence
  Description of Artificial Sequence: Synthetic oligonucleotide
ccccuauagaacagaugaa

SEQ ID NO: 1805211 - RNA, 19 nt, Artificial Sequence
  Description of Artificial Sequence: Synthetic oligonucleotide
gcccaauucuuuuguccua

SEQ ID NO: 1805212 - RNA, 19 nt, Artificial Sequence
  Description of Artificial Sequence: Synthetic oligonucleotide
cucgagguaguugcacagu

SEQ ID NO: 1805213 - RNA, 19 nt, Artificial Sequence
  Description of Artificial Sequence: Synthetic oligonucleotide
cagcaacacuaguuuuccu

SEQ ID NO: 1805214 - RNA, 19 nt, Artificial Sequence
  Description of Artificial Sequence: Synthetic oligonucleotide
cugcuacagaaggagggau

SEQ ID NO: 1805215 - RNA, 19 nt, Artificial Sequence
  Description of Artificial Sequence: Synthetic oligonucleotide
gccuuuacauaugccauuu

SEQ ID NO: 1805216 - RNA, 19 nt, Artificial Sequence
  Description of Artificial Sequence: Synthetic oligonucleotide
gcccauuaagaugauucau

SEQ ID NO: 1805217 - RNA, 19 nt, Artificial Sequence
  Description of Artificial Sequence: Synthetic oligonucleotide
cgcaguacacuuucuuugu

SEQ ID NO: 1805218 - RNA, 19 nt, Artificial Sequence
  Description of Artificial Sequence: Synthetic oligonucleotide
ccuugaucaucaagucccu

SEQ ID NO: 1805219 - RNA, 19 nt, Artificial Sequence
  Description of Artificial Sequence: Synthetic oligonucleotide
gcuaaccaacaggacugua

SEQ ID NO: 1805220 - RNA, 19 nt, Artificial Sequence
  Description of Artificial Sequence: Synthetic oligonucleotide
cgucccacaagagugugua

SEQ ID NO: 1805221 - RNA, 19 nt, Artificial Sequence
  Description of Artificial Sequence: Synthetic oligonucleotide
acggugcaauggggaauua

SEQ ID NO: 1805222 - RNA, 19 nt, Artificial Sequence
  Description of Artificial Sequence: Synthetic oligonucleotide
gcauacccacucggccagc

SEQ ID NO: 1805223 - RNA, 19 nt, Artificial Sequence
  Description of Artificial Sequence: Synthetic oligonucleotide
cgagguaguugcacagucu

SEQ ID NO: 1805224 - RNA, 19 nt, Artificial Sequence
  Description of Artificial Sequence: Synthetic oligonucleotide
cuacagaaggagggauauu

SEQ ID NO: 1805225 - RNA, 19 nt, Artificial Sequence
  Description of Artificial Sequence: Synthetic oligonucleotide
cccucucgagguaguugca

SEQ ID NO: 1805226 - RNA, 19 nt, Artificial Sequence
  Description of Artificial Sequence: Synthetic oligonucleotide
gcguaaccaucucuucauu

SEQ ID NO: 1805227 - RNA, 19 nt, Artificial Sequence
  Description of Artificial Sequence: Synthetic oligonucleotide
ccacaacgcuuuccacaua

SEQ ID NO: 1805228 - RNA, 19 nt, Artificial Sequence
  Description of Artificial Sequence: Synthetic oligonucleotide
  modified_base (1)..(1): a, c, u, g, unknown or other
ngaacagucaauaggugau

SEQ ID NO: 1805229 - RNA, 19 nt, Artificial Sequence
  Description of Artificial Sequence: Synthetic oligonucleotide
aaagcaagacuguaagucc

SEQ ID NO: 1805230 - RNA, 19 nt, Artificial Sequence
  Description of Artificial Sequence: Synthetic oligonucleotide
aaugauaucagauuccuua

SEQ ID NO: 1805231 - RNA, 19 nt, Artificial Sequence
  Description of Artificial Sequence: Synthetic oligonucleotide
cauauuuucauuuagggga

SEQ ID NO: 1805232 - RNA, 19 nt, Artificial Sequence
  Description of Artificial Sequence: Synthetic oligonucleotide
acuagaguaucccauagac

SEQ ID NO: 1805233 - RNA, 19 nt, Artificial Sequence
  Description of Artificial Sequence: Synthetic oligonucleotide
auuacuagaauguguugcc

SEQ ID NO: 1805234 - RNA, 19 nt, Artificial Sequence
  Description of Artificial Sequence: Synthetic oligonucleotide
ucuaguaaagcuuugugac

SEQ ID NO: 1805235 - RNA, 19 nt, Artificial Sequence
  Description of Artificial Sequence: Synthetic oligonucleotide
aaucaucacgaguaucacc

SEQ ID NO: 1805236 - RNA, 19 nt, Artificial Sequence
  Description of Artificial Sequence: Synthetic oligonucleotide
aacuaacgaagacaaaauc

SEQ ID NO: 1805237 - RNA, 19 nt, Artificial Sequence
  Description of Artificial Sequence: Synthetic oligonucleotide
ucuauugucaguugaaaga

SEQ ID NO: 1805238 - RNA, 19 nt, Artificial Sequence
  Description of Artificial Sequence: Synthetic oligonucleotide
aguauccucauuuucauug

SEQ ID NO: 1805239 - RNA, 19 nt, Artificial Sequence
  Description of Artificial Sequence: Synthetic oligonucleotide
uuugugaacauauuucuga

SEQ ID NO: 1805240 - RNA, 19 nt, Artificial Sequence
  Description of Artificial Sequence: Synthetic oligonucleotide
acauauuuucauuuagggg

SEQ ID NO: 1805241 - RNA, 19 nt, Artificial Sequence
  Description of Artificial Sequence: Synthetic oligonucleotide
uggacuaaacuauugguag

SEQ ID NO: 1805242 - RNA, 19 nt, Artificial Sequence
  Description of Artificial Sequence: Synthetic oligonucleotide
ugaaugaacagacuaagau

SEQ ID NO: 1805243 - RNA, 19 nt, Artificial Sequence
  Description of Artificial Sequence: Synthetic oligonucleotide
acauauuucugauaaaagu

SEQ ID NO: 1805244 - RNA, 19 nt, Artificial Sequence
  Description of Artificial Sequence: Synthetic oligonucleotide
uuuucauuguuccaucagc

SEQ ID NO: 1805245 - RNA, 19 nt, Artificial Sequence
  Description of Artificial Sequence: Synthetic oligonucleotide
uuaugaauaauucuugcuu

SEQ ID NO: 1805246 - RNA, 19 nt, Artificial Sequence
  Description of Artificial Sequence: Synthetic oligonucleotide
aaaggcaguaaugauauca

SEQ ID NO: 1805247 - RNA, 19 nt, Artificial Sequence
  Description of Artificial Sequence: Synthetic oligonucleotide
uacaauccgaaauaguuca

SEQ ID NO: 1805248 - RNA, 19 nt, Artificial Sequence
  Description of Artificial Sequence: Synthetic oligonucleotide
uguacaucauggcuggagg

SEQ ID NO: 1805249 - RNA, 19 nt, Artificial Sequence
  Description of Artificial Sequence: Synthetic oligonucleotide
ugaaaggaguguuuguagg

SEQ ID NO: 1805250 - RNA, 19 nt, Artificial Sequence
  Description of Artificial Sequence: Synthetic oligonucleotide
uguuucaccaaguacugcc

SEQ ID NO: 1805251 - RNA, 19 nt, Artificial Sequence
  Description of Artificial Sequence: Synthetic oligonucleotide
ugcuaaaucaucacgagua

SEQ ID NO: 1805252 - RNA, 19 nt, Artificial Sequence
  Description of Artificial Sequence: Synthetic oligonucleotide
aaaaucauuggcugucuug

SEQ ID NO: 1805253 - RNA, 19 nt, Artificial Sequence
  Description of Artificial Sequence: Synthetic oligonucleotide
aaagcagguaauaaaucac

SEQ ID NO: 1805254 - RNA, 19 nt, Artificial Sequence
  Description of Artificial Sequence: Synthetic oligonucleotide
acgaguaucaccaagaagu

SEQ ID NO: 1805255 - RNA, 19 nt, Artificial Sequence
  Description of Artificial Sequence: Synthetic oligonucleotide
aaguaugcguugucgaagg

SEQ ID NO: 1805256 - RNA, 19 nt, Artificial Sequence
  Description of Artificial Sequence: Synthetic oligonucleotide
aaacugauccggcaguauc

SEQ ID NO: 1805257 - RNA, 19 nt, Artificial Sequence
  Description of Artificial Sequence: Synthetic oligonucleotide
aaagcauuagcuuacccuu

SEQ ID NO: 1805258 - RNA, 19 nt, Artificial Sequence
  Description of Artificial Sequence: Synthetic oligonucleotide
uuaacaccucguuuaaagg

SEQ ID NO: 1805259 - RNA, 19 nt, Artificial Sequence
  Description of Artificial Sequence: Synthetic oligonucleotide
uaguaaagcuuugugacgg

SEQ ID NO: 1805260 - RNA, 19 nt, Artificial Sequence
  Description of Artificial Sequence: Synthetic oligonucleotide
uaugcuaaaacuguggcuc

SEQ ID NO: 1805261 - RNA, 19 nt, Artificial Sequence
  Description of Artificial Sequence: Synthetic oligonucleotide
cauguauagaucugugugg

SEQ ID NO: 1805262 - RNA, 19 nt, Artificial Sequence
  Description of Artificial Sequence: Synthetic oligonucleotide
aacaccucguuuaaagggc

SEQ ID NO: 1805263 - RNA, 19 nt, Artificial Sequence
  Description of Artificial Sequence: Synthetic oligonucleotide
uccgaaauaguucauuacu

SEQ ID NO: 1805264 - RNA, 19 nt, Artificial Sequence
  Description of Artificial Sequence: Synthetic oligonucleotide
uuuaccuccaggauauccc

SEQ ID NO: 1805265 - RNA, 19 nt, Artificial Sequence
  Description of Artificial Sequence: Synthetic oligonucleotide
uguagguucuaguaaagcu

SEQ ID NO: 1805266 - RNA, 19 nt, Artificial Sequence
  Description of Artificial Sequence: Synthetic oligonucleotide
uaugcguugucgaagguca

SEQ ID NO: 1805267 - RNA, 19 nt, Artificial Sequence
  Description of Artificial Sequence: Synthetic oligonucleotide
ucgaaggucaaauauacau

SEQ ID NO: 1805268 - RNA, 19 nt, Artificial Sequence
  Description of Artificial Sequence: Synthetic oligonucleotide
uaguucauuacuagaaugu

SEQ ID NO: 1805269 - RNA, 19 nt, Artificial Sequence
  Description of Artificial Sequence: Synthetic oligonucleotide
auaaaaguaugcguugucg

SEQ ID NO: 1805270 - RNA, 19 nt, Artificial Sequence
  Description of Artificial Sequence: Synthetic oligonucleotide
cuaaacuauugguaggugc

SEQ ID NO: 1805271 - RNA, 19 nt, Artificial Sequence
  Description of Artificial Sequence: Synthetic oligonucleotide
uucuaguaaagcuuuguga

SEQ ID NO: 1805272 - RNA, 19 nt, Artificial Sequence
  Description of Artificial Sequence: Synthetic oligonucleotide
uuacccuuaguacagggga

SEQ ID NO: 1805273 - RNA, 19 nt, Artificial Sequence
  Description of Artificial Sequence: Synthetic oligonucleotide
ugucgaaggucaaauauac

SEQ ID NO: 1805274 - RNA, 19 nt, Artificial Sequence
  Description of Artificial Sequence: Synthetic oligonucleotide
uagacauauguuucuauug

SEQ ID NO: 1805275 - RNA, 19 nt, Artificial Sequence
  Description of Artificial Sequence: Synthetic oligonucleotide
ugugacggaguauugcagg

SEQ ID NO: 1805276 - RNA, 19 nt, Artificial Sequence
  Description of Artificial Sequence: Synthetic oligonucleotide
uguuaugacacugccaagc

SEQ ID NO: 1805277 - RNA, 19 nt, Artificial Sequence
  Description of Artificial Sequence: Synthetic oligonucleotide
agacuguaaguccugauug

SEQ ID NO: 1805278 - RNA, 19 nt, Artificial Sequence
  Description of Artificial Sequence: Synthetic oligonucleotide
guaguugaugguuugggag

SEQ ID NO: 1805279 - RNA, 19 nt, Artificial Sequence
  Description of Artificial Sequence: Synthetic oligonucleotide
uucauuuaggggaugggcu

SEQ ID NO: 1805280 - RNA, 19 nt, Artificial Sequence
  Description of Artificial Sequence: Synthetic oligonucleotide
aacugauccggcaguaucc

SEQ ID NO: 1805281 - RNA, 19 nt, Artificial Sequence
  Description of Artificial Sequence: Synthetic oligonucleotide
augggguugaaccuuggac

SEQ ID NO: 1805282 - RNA, 19 nt, Artificial Sequence
  Description of Artificial Sequence: Synthetic oligonucleotide
auguauagaucuguguggc

SEQ ID NO: 1805283 - RNA, 19 nt, Artificial Sequence
  Description of Artificial Sequence: Synthetic oligonucleotide
cauaugcuaaaacuguggc

SEQ ID NO: 1805284 - RNA, 19 nt, Artificial Sequence
  Description of Artificial Sequence: Synthetic oligonucleotide
acaugugaaaccuuuucug

SEQ ID NO: 1805285 - RNA, 19 nt, Artificial Sequence
  Description of Artificial Sequence: Synthetic oligonucleotide
uuugugacggaguauugca

SEQ ID NO: 1805286 - RNA, 19 nt, Artificial Sequence
  Description of Artificial Sequence: Synthetic oligonucleotide
aaaguaugcguugucgaag

SEQ ID NO: 1805287 - RNA, 19 nt, Artificial Sequence
  Description of Artificial Sequence: Synthetic oligonucleotide
auuucacaaagcaagacug

SEQ ID NO: 1805288 - RNA, 19 nt, Artificial Sequence
  Description of Artificial Sequence: Synthetic oligonucleotide
uacaugugaaaccuuuucu

SEQ ID NO: 1805289 - RNA, 19 nt, Artificial Sequence
  Description of Artificial Sequence: Synthetic oligonucleotide
cuaugcaauuucuauuugc

SEQ ID NO: 1805290 - RNA, 19 nt, Artificial Sequence
  Description of Artificial Sequence: Synthetic oligonucleotide
ucguuuaaagggcuaaacu

SEQ ID NO: 1805291 - RNA, 19 nt, Artificial Sequence
  Description of Artificial Sequence: Synthetic oligonucleotide
aagggcuaaacugauccgg

SEQ ID NO: 1805292 - RNA, 19 nt, Artificial Sequence
  Description of Artificial Sequence: Synthetic oligonucleotide
aaaaguaugcguugucgaa

SEQ ID NO: 1805293 - RNA, 19 nt, Artificial Sequence
  Description of Artificial Sequence: Synthetic oligonucleotide
acuaacgaagacaaaauca

SEQ ID NO: 1805294 - RNA, 19 nt, Artificial Sequence
  Description of Artificial Sequence: Synthetic oligonucleotide
cuaguaaagcuuugugacg

SEQ ID NO: 1805295 - RNA, 19 nt, Artificial Sequence
  Description of Artificial Sequence: Synthetic oligonucleotide
ugggguugaaccuuggaca

SEQ ID NO: 1805296 - RNA, 19 nt, Artificial Sequence
  Description of Artificial Sequence: Synthetic oligonucleotide
aaugugauuugcugguccu

SEQ ID NO: 1805297 - RNA, 19 nt, Artificial Sequence
  Description of Artificial Sequence: Synthetic oligonucleotide
agacauauguuucuauugu

SEQ ID NO: 1805298 - RNA, 19 nt, Artificial Sequence
  Description of Artificial Sequence: Synthetic oligonucleotide
aauccgaaauaguucauua

SEQ ID NO: 1805299 - RNA, 19 nt, Artificial Sequence
  Description of Artificial Sequence: Synthetic oligonucleotide
cuuguuaugacacugccaa

SEQ ID NO: 1805300 - RNA, 19 nt, Artificial Sequence
  Description of Artificial Sequence: Synthetic oligonucleotide
uguuuguagguucuaguaa

SEQ ID NO: 1805301 - RNA, 19 nt, Artificial Sequence
  Description of Artificial Sequence: Synthetic oligonucleotide
aacuauugguaggugcuac

SEQ ID NO: 1805302 - RNA, 19 nt, Artificial Sequence
  Description of Artificial Sequence: Synthetic oligonucleotide
uacuagaauguguugccag

SEQ ID NO: 1805303 - RNA, 19 nt, Artificial Sequence
  Description of Artificial Sequence: Synthetic oligonucleotide
auccgaaauaguucauuac

SEQ ID NO: 1805304 - RNA, 19 nt, Artificial Sequence
  Description of Artificial Sequence: Synthetic oligonucleotide
aguacaggggauuacugca

SEQ ID NO: 1805305 - RNA, 19 nt, Artificial Sequence
  Description of Artificial Sequence: Synthetic oligonucleotide
guaucuguuggccacuucc

SEQ ID NO: 1805306 - RNA, 19 nt, Artificial Sequence
  Description of Artificial Sequence: Synthetic oligonucleotide
uuucauuuaggggaugggc

SEQ ID NO: 1805307 - RNA, 19 nt, Artificial Sequence
  Description of Artificial Sequence: Synthetic oligonucleotide
gugagaauuucacaaagca

SEQ ID NO: 1805308 - RNA, 19 nt, Artificial Sequence
  Description of Artificial Sequence: Synthetic oligonucleotide
cauacuguaucuguuggcc

SEQ ID NO: 1805309 - RNA, 19 nt, Artificial Sequence
  Description of Artificial Sequence: Synthetic oligonucleotide
gaaggucaaauauacaugu

SEQ ID NO: 1805310 - RNA, 19 nt, Artificial Sequence
  Description of Artificial Sequence: Synthetic oligonucleotide
uuaguacaggggauuacug

SEQ ID NO: 1805311 - RNA, 19 nt, Artificial Sequence
  Description of Artificial Sequence: Synthetic oligonucleotide
caagucugccucuaucucg

SEQ ID NO: 1805312 - RNA, 19 nt, Artificial Sequence
  Description of Artificial Sequence: Synthetic oligonucleotide
aucaucacgaguaucacca

SEQ ID NO: 1805313 - RNA, 19 nt, Artificial Sequence
  Description of Artificial Sequence: Synthetic oligonucleotide
aaggcaguaaugauaucag

SEQ ID NO: 1805314 - RNA, 19 nt, Artificial Sequence
  Description of Artificial Sequence: Synthetic oligonucleotide
uugguaggugcuacuagag

SEQ ID NO: 1805315 - RNA, 19 nt, Artificial Sequence
  Description of Artificial Sequence: Synthetic oligonucleotide
ucaccagaagaauucaaaa

SEQ ID NO: 1805316 - RNA, 19 nt, Artificial Sequence
  Description of Artificial Sequence: Synthetic oligonucleotide
cuuacccuuaguacagggg

SEQ ID NO: 1805317 - RNA, 19 nt, Artificial Sequence
  Description of Artificial Sequence: Synthetic oligonucleotide
augcuaaaacuguggcucc

SEQ ID NO: 1805318 - RNA, 19 nt, Artificial Sequence
  Description of Artificial Sequence: Synthetic oligonucleotide
uaguacaggggauuacugc

SEQ ID NO: 1805319 - RNA, 19 nt, Artificial Sequence
  Description of Artificial Sequence: Synthetic oligonucleotide
cuacaauccgaaauaguuc

SEQ ID NO: 1805320 - RNA, 19 nt, Artificial Sequence
  Description of Artificial Sequence: Synthetic oligonucleotide
cucguuuagacaucguuuc

SEQ ID NO: 1805321 - RNA, 19 nt, Artificial Sequence
  Description of Artificial Sequence: Synthetic oligonucleotide
ucuuguuaugacacugcca

SEQ ID NO: 1805322 - RNA, 19 nt, Artificial Sequence
  Description of Artificial Sequence: Synthetic oligonucleotide
uguugccagcccaugaaug

SEQ ID NO: 1805323 - RNA, 19 nt, Artificial Sequence
  Description of Artificial Sequence: Synthetic oligonucleotide
uauuaguaguugaugguuu

SEQ ID NO: 1805324 - RNA, 19 nt, Artificial Sequence
  Description of Artificial Sequence: Synthetic oligonucleotide
ucucguuuagacaucguuu

SEQ ID NO: 1805325 - RNA, 19 nt, Artificial Sequence
  Description of Artificial Sequence: Synthetic oligonucleotide
acugauaaaaguaugcguu

SEQ ID NO: 1805326 - RNA, 19 nt, Artificial Sequence
  Description of Artificial Sequence: Synthetic oligonucleotide
cagacuaagauacacugca

SEQ ID NO: 1805327 - RNA, 19 nt, Artificial Sequence
  Description of Artificial Sequence: Synthetic oligonucleotide
guucuaguaaagcuuugug

SEQ ID NO: 1805328 - RNA, 19 nt, Artificial Sequence
  Description of Artificial Sequence: Synthetic oligonucleotide
aguauugcaggacccgcag

SEQ ID NO: 1805329 - RNA, 19 nt, Artificial Sequence
  Description of Artificial Sequence: Synthetic oligonucleotide
cagugagaauuucacaaag

SEQ ID NO: 1805330 - RNA, 19 nt, Artificial Sequence
  Description of Artificial Sequence: Synthetic oligonucleotide
uguaugggguugaaccuug

SEQ ID NO: 1805331 - RNA, 19 nt, Artificial Sequence
  Description of Artificial Sequence: Synthetic oligonucleotide
auagacauauguuucuauu

SEQ ID NO: 1805332 - RNA, 19 nt, Artificial Sequence
  Description of Artificial Sequence: Synthetic oligonucleotide
ucccauagacauauguuuc

SEQ ID NO: 1805333 - RNA, 19 nt, Artificial Sequence
  Description of Artificial Sequence: Synthetic oligonucleotide
ucauuacuagaauguguug

SEQ ID NO: 1805334 - RNA, 19 nt, Artificial Sequence
  Description of Artificial Sequence: Synthetic oligonucleotide
aagcagguaauaaaucaca

SEQ ID NO: 1805335 - RNA, 19 nt, Artificial Sequence
  Description of Artificial Sequence: Synthetic oligonucleotide
uugugacggaguauugcag

SEQ ID NO: 1805336 - RNA, 19 nt, Artificial Sequence
  Description of Artificial Sequence: Synthetic oligonucleotide
gccacuuccacaaagcagg

SEQ ID NO: 1805337 - RNA, 19 nt, Artificial Sequence
  Description of Artificial Sequence: Synthetic oligonucleotide
aggggauuacugcauacug

SEQ ID NO: 1805338 - RNA, 19 nt, Artificial Sequence
  Description of Artificial Sequence: Synthetic oligonucleotide
uuaugacacugccaagcca

SEQ ID NO: 1805339 - RNA, 19 nt, Artificial Sequence
  Description of Artificial Sequence: Synthetic oligonucleotide
agcugaauuagacaacuua

SEQ ID NO: 1805340 - RNA, 19 nt, Artificial Sequence
  Description of Artificial Sequence: Synthetic oligonucleotide
gauauuaguaguugauggu

SEQ ID NO: 1805341 - RNA, 19 nt, Artificial Sequence
  Description of Artificial Sequence: Synthetic oligonucleotide
uagguucuaguaaagcuuu

SEQ ID NO: 1805342 - RNA, 19 nt, Artificial Sequence
  Description of Artificial Sequence: Synthetic oligonucleotide
uuguacaucauggcuggag

SEQ ID NO: 1805343 - RNA, 19 nt, Artificial Sequence
  Description of Artificial Sequence: Synthetic oligonucleotide
uacuguaucuguuggccac

SEQ ID NO: 1805344 - RNA, 19 nt, Artificial Sequence
  Description of Artificial Sequence: Synthetic oligonucleotide
aggauaucccaagucugcc

SEQ ID NO: 1805345 - RNA, 19 nt, Artificial Sequence
  Description of Artificial Sequence: Synthetic oligonucleotide
aguucauuacuagaaugug

SEQ ID NO: 1805346 - RNA, 19 nt, Artificial Sequence
  Description of Artificial Sequence: Synthetic oligonucleotide
acauauguuucuauuguca

SEQ ID NO: 1805347 - RNA, 19 nt, Artificial Sequence
  Description of Artificial Sequence: Synthetic oligonucleotide
agauacacugcagugagaa

SEQ ID NO: 1805348 - RNA, 19 nt, Artificial Sequence
  Description of Artificial Sequence: Synthetic oligonucleotide
cuacuagaguaucccauag

SEQ ID NO: 1805349 - RNA, 19 nt, Artificial Sequence
  Description of Artificial Sequence: Synthetic oligonucleotide
cugauauuaguaguugaug

SEQ ID NO: 1805350 - RNA, 19 nt, Artificial Sequence
  Description of Artificial Sequence: Synthetic oligonucleotide
aggggaugggcuacaaucc

SEQ ID NO: 1805351 - RNA, 19 nt, Artificial Sequence
  Description of Artificial Sequence: Synthetic oligonucleotide
uacuagaguaucccauaga

SEQ ID NO: 1805352 - RNA, 19 nt, Artificial Sequence
  Description of Artificial Sequence: Synthetic oligonucleotide
cuaucucguuuagacaucg

SEQ ID NO: 1805353 - RNA, 19 nt, Artificial Sequence
  Description of Artificial Sequence: Synthetic oligonucleotide
gcguguaugggguugaacc

SEQ ID NO: 1805354 - RNA, 19 nt, Artificial Sequence
  Description of Artificial Sequence: Synthetic oligonucleotide
gacauguacuccuccacca

SEQ ID NO: 1805355 - RNA, 19 nt, Artificial Sequence
  Description of Artificial Sequence: Synthetic oligonucleotide
cuuuaccuccaggauaucc

SEQ ID NO: 1805356 - RNA, 19 nt, Artificial Sequence
  Description of Artificial Sequence: Synthetic oligonucleotide
uguauagaucuguguggcc

SEQ ID NO: 1805357 - RNA, 19 nt, Artificial Sequence
  Description of Artificial Sequence: Synthetic oligonucleotide
augauaucagauuccuuau

SEQ ID NO: 1805358 - RNA, 19 nt, Artificial Sequence
  Description of Artificial Sequence: Synthetic oligonucleotide
aucagauuccuuaugaaua

SEQ ID NO: 1805359 - RNA, 19 nt, Artificial Sequence
  Description of Artificial Sequence: Synthetic oligonucleotide
gucuuguuaugacacugcc

SEQ ID NO: 1805360 - RNA, 19 nt, Artificial Sequence
  Description of Artificial Sequence: Synthetic oligonucleotide
uuguagguucuaguaaagc

SEQ ID NO: 1805361 - RNA, 19 nt, Artificial Sequence
  Description of Artificial Sequence: Synthetic oligonucleotide
auacacugcagugagaauu

SEQ ID NO: 1805362 - RNA, 19 nt, Artificial Sequence
  Description of Artificial Sequence: Synthetic oligonucleotide
cuuugugacggaguauugc

SEQ ID NO: 1805363 - RNA, 19 nt, Artificial Sequence
  Description of Artificial Sequence: Synthetic oligonucleotide
gacaucguuucuuugugaa

SEQ ID NO: 1805364 - RNA, 19 nt, Artificial Sequence
  Description of Artificial Sequence: Synthetic oligonucleotide
ggacuaaacuauugguagg

SEQ ID NO: 1805365 - RNA, 19 nt, Artificial Sequence
  Description of Artificial Sequence: Synthetic oligonucleotide
uuaccuccaggauauccca

SEQ ID NO: 1805366 - RNA, 19 nt, Artificial Sequence
  Description of Artificial Sequence: Synthetic oligonucleotide
auauuaguaguugaugguu

SEQ ID NO: 1805367 - RNA, 19 nt, Artificial Sequence
  Description of Artificial Sequence: Synthetic oligonucleotide
auaucagauuccuuaugaa

SEQ ID NO: 1805368 - RNA, 19 nt, Artificial Sequence
  Description of Artificial Sequence: Synthetic oligonucleotide
ucauuuaggggaugggcua

SEQ ID NO: 1805369 - RNA, 19 nt, Artificial Sequence
  Description of Artificial Sequence: Synthetic oligonucleotide
ccauguauagaucugugug

SEQ ID NO: 1805370 - RNA, 19 nt, Artificial Sequence
  Description of Artificial Sequence: Synthetic oligonucleotide
acaaagcaagacuguaagu

SEQ ID NO: 1805371 - RNA, 19 nt, Artificial Sequence
  Description of Artificial Sequence: Synthetic oligonucleotide
guauagaucuguguggcca

SEQ ID NO: 1805372 - RNA, 19 nt, Artificial Sequence
  Description of Artificial Sequence: Synthetic oligonucleotide
aaaccuuuucugccaccug

SEQ ID NO: 1805373 - RNA, 19 nt, Artificial Sequence
  Description of Artificial Sequence: Synthetic oligonucleotide
accugauauuaguaguuga

SEQ ID NO: 1805374 - RNA, 19 nt, Artificial Sequence
  Description of Artificial Sequence: Synthetic oligonucleotide
aagcaagacuguaaguccu

SEQ ID NO: 1805375 - RNA, 19 nt, Artificial Sequence
  Description of Artificial Sequence: Synthetic oligonucleotide
aucauccacccauguauag

SEQ ID NO: 1805376 - RNA, 19 nt, Artificial Sequence
  Description of Artificial Sequence: Synthetic oligonucleotide
cuaacgaagacaaaaucau

SEQ ID NO: 1805377 - RNA, 19 nt, Artificial Sequence
  Description of Artificial Sequence: Synthetic oligonucleotide
ucacgaguaucaccaagaa

SEQ ID NO: 1805378 - RNA, 19 nt, Artificial Sequence
  Description of Artificial Sequence: Synthetic oligonucleotide
uguggccagaauuccagaa

SEQ ID NO: 1805379 - RNA, 19 nt, Artificial Sequence
  Description of Artificial Sequence: Synthetic oligonucleotide
ugugauuugcugguccugu

SEQ ID NO: 1805380 - RNA, 19 nt, Artificial Sequence
  Description of Artificial Sequence: Synthetic oligonucleotide
uaacgaagacaaaaucauu

SEQ ID NO: 1805381 - RNA, 19 nt, Artificial Sequence
  Description of Artificial Sequence: Synthetic oligonucleotide
aauagacugucgagcaugu

SEQ ID NO: 1805382 - RNA, 19 nt, Artificial Sequence
  Description of Artificial Sequence: Synthetic oligonucleotide
ugaacauauuucugauaaa

SEQ ID NO: 1805383 - RNA, 19 nt, Artificial Sequence
  Description of Artificial Sequence: Synthetic oligonucleotide
agggcuaaacugauccggc

SEQ ID NO: 1805384 - RNA, 19 nt, Artificial Sequence
  Description of Artificial Sequence: Synthetic oligonucleotide
uaugggguugaaccuugga

SEQ ID NO: 1805385 - RNA, 19 nt, Artificial Sequence
  Description of Artificial Sequence: Synthetic oligonucleotide
ugggagcauaugcuaaaac

SEQ ID NO: 1805386 - RNA, 19 nt, Artificial Sequence
  Description of Artificial Sequence: Synthetic oligonucleotide
accuccaggauaucccaag

SEQ ID NO: 1805387 - RNA, 19 nt, Artificial Sequence
  Description of Artificial Sequence: Synthetic oligonucleotide
aaaggaguguuuguagguu

SEQ ID NO: 1805388 - RNA, 19 nt, Artificial Sequence
  Description of Artificial Sequence: Synthetic oligonucleotide
caucacgaguaucaccaag

SEQ ID NO: 1805389 - RNA, 19 nt, Artificial Sequence
  Description of Artificial Sequence: Synthetic oligonucleotide
ucguuuagacaucguuucu

SEQ ID NO: 1805390 - RNA, 19 nt, Artificial Sequence
  Description of Artificial Sequence: Synthetic oligonucleotide
ucuaucucguuuagacauc

SEQ ID NO: 1805391 - RNA, 19 nt, Artificial Sequence
  Description of Artificial Sequence: Synthetic oligonucleotide
aucucguuuagacaucguu

SEQ ID NO: 1805392 - RNA, 19 nt, Artificial Sequence
  Description of Artificial Sequence: Synthetic oligonucleotide
guucacugauaaaaguaug

SEQ ID NO: 1805393 - RNA, 19 nt, Artificial Sequence
  Description of Artificial Sequence: Synthetic oligonucleotide
uuguuaugacacugccaag

SEQ ID NO: 1805394 - RNA, 19 nt, Artificial Sequence
  Description of Artificial Sequence: Synthetic oligonucleotide
ugguaggugcuacuagagu

SEQ ID NO: 1805395 - RNA, 19 nt, Artificial Sequence
  Description of Artificial Sequence: Synthetic oligonucleotide
auauacaugugaaaccuuu

SEQ ID NO: 1805396 - RNA, 19 nt, Artificial Sequence
  Description of Artificial Sequence: Synthetic oligonucleotide
gccucuaucucguuuagac

SEQ ID NO: 1805397 - RNA, 19 nt, Artificial Sequence
  Description of Artificial Sequence: Synthetic oligonucleotide
cacgaguaucaccaagaag

SEQ ID NO: 1805398 - RNA, 19 nt, Artificial Sequence
  Description of Artificial Sequence: Synthetic oligonucleotide
agacugucgagcauguuca

SEQ ID NO: 1805399 - RNA, 19 nt, Artificial Sequence
  Description of Artificial Sequence: Synthetic oligonucleotide
acuauugguaggugcuacu

SEQ ID NO: 1805400 - RNA, 19 nt, Artificial Sequence
  Description of Artificial Sequence: Synthetic oligonucleotide
gcauaugcuaaaacugugg

SEQ ID NO: 1805401 - RNA, 19 nt, Artificial Sequence
  Description of Artificial Sequence: Synthetic oligonucleotide
cuagaguaucccauagaca

SEQ ID NO: 1805402 - RNA, 19 nt, Artificial Sequence
  Description of Artificial Sequence: Synthetic oligonucleotide
cucuaucucguuuagacau

SEQ ID NO: 1805403 - RNA, 19 nt, Artificial Sequence
  Description of Artificial Sequence: Synthetic oligonucleotide
aucacgaguaucaccaaga

SEQ ID NO: 1805404 - RNA, 19 nt, Artificial Sequence
  Description of Artificial Sequence: Synthetic oligonucleotide
cagcaucaauuuuacauca

SEQ ID NO: 1805405 - RNA, 19 nt, Artificial Sequence
  Description of Artificial Sequence: Synthetic oligonucleotide
guugucgaaggucaaauau

SEQ ID NO: 1805406 - RNA, 19 nt, Artificial Sequence
  Description of Artificial Sequence: Synthetic oligonucleotide
guugccagcccaugaauga

SEQ ID NO: 1805407 - RNA, 19 nt, Artificial Sequence
  Description of Artificial Sequence: Synthetic oligonucleotide
guaaagcuuugugacggag

SEQ ID NO: 1805408 - RNA, 19 nt, Artificial Sequence
  Description of Artificial Sequence: Synthetic oligonucleotide
cugucuuguuaugacacug

SEQ ID NO: 1805409 - RNA, 19 nt, Artificial Sequence
  Description of Artificial Sequence: Synthetic oligonucleotide
agcauaugcuaaaacugug

SEQ ID NO: 1805410 - RNA, 19 nt, Artificial Sequence
  Description of Artificial Sequence: Synthetic oligonucleotide
ggugcuacuagaguauccc

SEQ ID NO: 1805411 - RNA, 19 nt, Artificial Sequence
  Description of Artificial Sequence: Synthetic oligonucleotide
ggcuaaacugauccggcag

SEQ ID NO: 1805412 - RNA, 19 nt, Artificial Sequence
  Description of Artificial Sequence: Synthetic oligonucleotide
uccacuaucauggcaggua

SEQ ID NO: 1805413 - RNA, 19 nt, Artificial Sequence
  Description of Artificial Sequence: Synthetic oligonucleotide
cgaaauaguucauuacuag

SEQ ID NO: 1805414 - RNA, 19 nt, Artificial Sequence
  Description of Artificial Sequence: Synthetic oligonucleotide
gguaggugcuacuagagua

SEQ ID NO: 1805415 - RNA, 19 nt, Artificial Sequence
  Description of Artificial Sequence: Synthetic oligonucleotide
gggguugaaccuuggacag

SEQ ID NO: 1805416 - RNA, 19 nt, Artificial Sequence
  Description of Artificial Sequence: Synthetic oligonucleotide
acuaaacuauugguaggug

SEQ ID NO: 1805417 - RNA, 19 nt, Artificial Sequence
  Description of Artificial Sequence: Synthetic oligonucleotide
uaaugauaucagauuccuu

SEQ ID NO: 1805418 - RNA, 19 nt, Artificial Sequence
  Description of Artificial Sequence: Synthetic oligonucleotide
aggugcuacuagaguaucc

SEQ ID NO: 1805419 - RNA, 19 nt, Artificial Sequence
  Description of Artificial Sequence: Synthetic oligonucleotide
auggacuaaacuauuggua

SEQ ID NO: 1805420 - RNA, 19 nt, Artificial Sequence
  Description of Artificial Sequence: Synthetic oligonucleotide
ucgagcauguucacugaua

SEQ ID NO: 1805421 - RNA, 19 nt, Artificial Sequence
  Description of Artificial Sequence: Synthetic oligonucleotide
agacaucguuucuuuguga

SEQ ID NO: 1805422 - RNA, 19 nt, Artificial Sequence
  Description of Artificial Sequence: Synthetic oligonucleotide
ggcagguaaaagcauggac

SEQ ID NO: 1805423 - RNA, 19 nt, Artificial Sequence
  Description of Artificial Sequence: Synthetic oligonucleotide
aggcaguaaugauaucaga

SEQ ID NO: 1805424 - RNA, 19 nt, Artificial Sequence
  Description of Artificial Sequence: Synthetic oligonucleotide
gacuaaacuauugguaggu

SEQ ID NO: 1805425 - RNA, 19 nt, Artificial Sequence
  Description of Artificial Sequence: Synthetic oligonucleotide
gcuuacccuuaguacaggg

SEQ ID NO: 1805426 - RNA, 19 nt, Artificial Sequence
  Description of Artificial Sequence: Synthetic oligonucleotide
ugucgagcauguucacuga

SEQ ID NO: 1805427 - RNA, 19 nt, Artificial Sequence
  Description of Artificial Sequence: Synthetic oligonucleotide
ugccagcccaugaaugaac

SEQ ID NO: 1805428 - RNA, 19 nt, Artificial Sequence
  Description of Artificial Sequence: Synthetic oligonucleotide
uacccuuaguacaggggau

SEQ ID NO: 1805429 - RNA, 19 nt, Artificial Sequence
  Description of Artificial Sequence: Synthetic oligonucleotide
ucccaagucugccucuauc

SEQ ID NO: 1805430 - RNA, 19 nt, Artificial Sequence
  Description of Artificial Sequence: Synthetic oligonucleotide
caccaaguacugccaaagc

SEQ ID NO: 1805431 - RNA, 19 nt, Artificial Sequence
  Description of Artificial Sequence: Synthetic oligonucleotide
gagcauaugcuaaaacugu

SEQ ID NO: 1805432 - RNA, 19 nt, Artificial Sequence
  Description of Artificial Sequence: Synthetic oligonucleotide
aaacuauugguaggugcua

SEQ ID NO: 1805433 - RNA, 19 nt, Artificial Sequence
  Description of Artificial Sequence: Synthetic oligonucleotide
agacuaagauacacugcag

SEQ ID NO: 1805434 - RNA, 19 nt, Artificial Sequence
  Description of Artificial Sequence: Synthetic oligonucleotide
gugaaaccuuuucugccac

SEQ ID NO: 1805435 - RNA, 19 nt, Artificial Sequence
  Description of Artificial Sequence: Synthetic oligonucleotide
gggagcauaugcuaaaacu

SEQ ID NO: 1805436 - RNA, 19 nt, Artificial Sequence
  Description of Artificial Sequence: Synthetic oligonucleotide
uuucugccaccugauauua

SEQ ID NO: 1805437 - RNA, 19 nt, Artificial Sequence
  Description of Artificial Sequence: Synthetic oligonucleotide
cacugauaaaaguaugcgu

SEQ ID NO: 1805438 - RNA, 19 nt, Artificial Sequence
  Description of Artificial Sequence: Synthetic oligonucleotide
uguagcuaucagagaggaa

SEQ ID NO: 1805439 - RNA, 19 nt, Artificial Sequence
  Description of Artificial Sequence: Synthetic oligonucleotide
cuuggacagcugcuaaauc

SEQ ID NO: 1805440 - RNA, 19 nt, Artificial Sequence
  Description of Artificial Sequence: Synthetic oligonucleotide
gaguaucccauagacauau

SEQ ID NO: 1805441 - RNA, 19 nt, Artificial Sequence
  Description of Artificial Sequence: Synthetic oligonucleotide
gaggcaauugcuaugcaau

SEQ ID NO: 1805442 - RNA, 19 nt, Artificial Sequence
  Description of Artificial Sequence: Synthetic oligonucleotide
ggcaguauccucauuuuca

SEQ ID NO: 1805443 - RNA, 19 nt, Artificial Sequence
  Description of Artificial Sequence: Synthetic oligonucleotide
gggauuacugcauacugua

SEQ ID NO: 1805444 - RNA, 19 nt, Artificial Sequence
  Description of Artificial Sequence: Synthetic oligonucleotide
uuaggggaugggcuacaau

SEQ ID NO: 1805445 - RNA, 19 nt, Artificial Sequence
  Description of Artificial Sequence: Synthetic oligonucleotide
gaaaccuuuucugccaccu

SEQ ID NO: 1805446 - RNA, 19 nt, Artificial Sequence
  Description of Artificial Sequence: Synthetic oligonucleotide
uaucucguuuagacaucgu

SEQ ID NO: 1805447 - RNA, 19 nt, Artificial Sequence
  Description of Artificial Sequence: Synthetic oligonucleotide
guaugcguugucgaagguc

SEQ ID NO: 1805448 - RNA, 19 nt, Artificial Sequence
  Description of Artificial Sequence: Synthetic oligonucleotide
uguaucuguuggccacuuc

SEQ ID NO: 1805449 - RNA, 19 nt, Artificial Sequence
  Description of Artificial Sequence: Synthetic oligonucleotide
gugacggaguauugcagga

SEQ ID NO: 1805450 - RNA, 19 nt, Artificial Sequence
  Description of Artificial Sequence: Synthetic oligonucleotide
aggcaauugcuaugcaauu

SEQ ID NO: 1805451 - RNA, 19 nt, Artificial Sequence
  Description of Artificial Sequence: Synthetic oligonucleotide
ugugcguguaugggguuga

SEQ ID NO: 1805452 - RNA, 19 nt, Artificial Sequence
  Description of Artificial Sequence: Synthetic oligonucleotide
ccuguuucaccaaguacug

SEQ ID NO: 1805453 - RNA, 19 nt, Artificial Sequence
  Description of Artificial Sequence: Synthetic oligonucleotide
ugacggaguauugcaggac

SEQ ID NO: 1805454 - RNA, 19 nt, Artificial Sequence
  Description of Artificial Sequence: Synthetic oligonucleotide
aguaugcguugucgaaggu

SEQ ID NO: 1805455 - RNA, 19 nt, Artificial Sequence
  Description of Artificial Sequence: Synthetic oligonucleotide
aguacugccaaagccucuu

SEQ ID NO: 1805456 - RNA, 19 nt, Artificial Sequence
  Description of Artificial Sequence: Synthetic oligonucleotide
uaaacugauccggcaguau

SEQ ID NO: 1805457 - RNA, 19 nt, Artificial Sequence
  Description of Artificial Sequence: Synthetic oligonucleotide
agaccagcuguagcuauca

SEQ ID NO: 1805458 - RNA, 19 nt, Artificial Sequence
  Description of Artificial Sequence: Synthetic oligonucleotide
acugauccggcaguauccu

SEQ ID NO: 1805459 - RNA, 19 nt, Artificial Sequence
  Description of Artificial Sequence: Synthetic oligonucleotide
guuucaccaaguacugcca

SEQ ID NO: 1805460 - RNA, 19 nt, Artificial Sequence
  Description of Artificial Sequence: Synthetic oligonucleotide
gaguauugcaggacccgca

SEQ ID NO: 1805461 - RNA, 19 nt, Artificial Sequence
  Description of Artificial Sequence: Synthetic oligonucleotide
cagcccaugaaugaacaga

SEQ ID NO: 1805462 - RNA, 19 nt, Artificial Sequence
  Description of Artificial Sequence: Synthetic oligonucleotide
cuuaguacaggggauuacu

SEQ ID NO: 1805463 - RNA, 19 nt, Artificial Sequence
  Description of Artificial Sequence: Synthetic oligonucleotide
cauuggcugucuuguuaug

SEQ ID NO: 1805464 - RNA, 19 nt, Artificial Sequence
  Description of Artificial Sequence: Synthetic oligonucleotide
uggaggcaauugcuaugca

SEQ ID NO: 1805465 - RNA, 19 nt, Artificial Sequence
  Description of Artificial Sequence: Synthetic oligonucleotide
agcuuacccuuaguacagg

SEQ ID NO: 1805466 - RNA, 19 nt, Artificial Sequence
  Description of Artificial Sequence: Synthetic oligonucleotide
uggcagguaaaagcaugga

SEQ ID NO: 1805467 - RNA, 19 nt, Artificial Sequence
  Description of Artificial Sequence: Synthetic oligonucleotide
gaccagcuguagcuaucag

SEQ ID NO: 1805468 - RNA, 19 nt, Artificial Sequence
  Description of Artificial Sequence: Synthetic oligonucleotide
cugcagugagaauuucaca

SEQ ID NO: 1805469 - RNA, 19 nt, Artificial Sequence
  Description of Artificial Sequence: Synthetic oligonucleotide
cugaauuagacaacuuauu

SEQ ID NO: 1805470 - RNA, 19 nt, Artificial Sequence
  Description of Artificial Sequence: Synthetic oligonucleotide
uaccuccaggauaucccaa

SEQ ID NO: 1805471 - RNA, 19 nt, Artificial Sequence
  Description of Artificial Sequence: Synthetic oligonucleotide
augugauuugcugguccug

SEQ ID NO: 1805472 - RNA, 19 nt, Artificial Sequence
  Description of Artificial Sequence: Synthetic oligonucleotide
ggaguauugcaggacccgc

SEQ ID NO: 1805473 - RNA, 19 nt, Artificial Sequence
  Description of Artificial Sequence: Synthetic oligonucleotide
acuguaucuguuggccacu

SEQ ID NO: 1805474 - RNA, 19 nt, Artificial Sequence
  Description of Artificial Sequence: Synthetic oligonucleotide
acccauguauagaucugug

SEQ ID NO: 1805475 - RNA, 19 nt, Artificial Sequence
  Description of Artificial Sequence: Synthetic oligonucleotide
gacuccaguuccaauauuu

SEQ ID NO: 1805476 - RNA, 19 nt, Artificial Sequence
  Description of Artificial Sequence: Synthetic oligonucleotide
ggaggcaauugcuaugcaa

SEQ ID NO: 1805477 - RNA, 19 nt, Artificial Sequence
  Description of Artificial Sequence: Synthetic oligonucleotide
gcuacaauccgaaauaguu

SEQ ID NO: 1805478 - RNA, 19 nt, Artificial Sequence
  Description of Artificial Sequence: Synthetic oligonucleotide
caauugcuaugcaauuucu

SEQ ID NO: 1805479 - RNA, 19 nt, Artificial Sequence
  Description of Artificial Sequence: Synthetic oligonucleotide
guaauaaaucacacacccu

SEQ ID NO: 1805480 - RNA, 19 nt, Artificial Sequence
  Description of Artificial Sequence: Synthetic oligonucleotide
augaacagacuaagauaca

SEQ ID NO: 1805481 - RNA, 19 nt, Artificial Sequence
  Description of Artificial Sequence: Synthetic oligonucleotide
guaugggguugaaccuugg

SEQ ID NO: 1805482 - RNA, 19 nt, Artificial Sequence
  Description of Artificial Sequence: Synthetic oligonucleotide
ugcguguaugggguugaac

SEQ ID NO: 1805483 - RNA, 19 nt, Artificial Sequence
  Description of Artificial Sequence: Synthetic oligonucleotide
ugcguugucgaaggucaaa

SEQ ID NO: 1805484 - RNA, 19 nt, Artificial Sequence
  Description of Artificial Sequence: Synthetic oligonucleotide
agcuaucagagaggaagaa

SEQ ID NO: 1805485 - RNA, 19 nt, Artificial Sequence
  Description of Artificial Sequence: Synthetic oligonucleotide
ccaugaaugaacagacuaa

SEQ ID NO: 1805486 - RNA, 19 nt, Artificial Sequence
  Description of Artificial Sequence: Synthetic oligonucleotide
auuuaggggaugggcuaca

SEQ ID NO: 1805487 - RNA, 19 nt, Artificial Sequence
  Description of Artificial Sequence: Synthetic oligonucleotide
guaucaccaagaagucuuc

SEQ ID NO: 1805488 - RNA, 19 nt, Artificial Sequence
  Description of Artificial Sequence: Synthetic oligonucleotide
accucguuuaaagggcuaa

SEQ ID NO: 1805489 - RNA, 19 nt, Artificial Sequence
  Description of Artificial Sequence: Synthetic oligonucleotide
cccaugaaugaacagacua

SEQ ID NO: 1805490 - RNA, 19 nt, Artificial Sequence
  Description of Artificial Sequence: Synthetic oligonucleotide
ggcaguaaugauaucagau

SEQ ID NO: 1805491 - RNA, 19 nt, Artificial Sequence
  Description of Artificial Sequence: Synthetic oligonucleotide
ccaaguacugccaaagccu

SEQ ID NO: 1805492 - RNA, 19 nt, Artificial Sequence
  Description of Artificial Sequence: Synthetic oligonucleotide
cauagacauauguuucuau

SEQ ID NO: 1805493 - RNA, 19 nt, Artificial Sequence
  Description of Artificial Sequence: Synthetic oligonucleotide
gcugaauuagacaacuuau

SEQ ID NO: 1805494 - RNA, 19 nt, Artificial Sequence
  Description of Artificial Sequence: Synthetic oligonucleotide
acaccucguuuaaagggcu

SEQ ID NO: 1805495 - RNA, 19 nt, Artificial Sequence
  Description of Artificial Sequence: Synthetic oligonucleotide
gcuacuagaguaucccaua

SEQ ID NO: 1805496 - RNA, 19 nt, Artificial Sequence
  Description of Artificial Sequence: Synthetic oligonucleotide
agguaaaagcauggacuaa

SEQ ID NO: 1805497 - RNA, 19 nt, Artificial Sequence
  Description of Artificial Sequence: Synthetic oligonucleotide
cuauugguaggugcuacua

SEQ ID NO: 1805498 - RNA, 19 nt, Artificial Sequence
  Description of Artificial Sequence: Synthetic oligonucleotide
uugcugguccugucucaac

SEQ ID NO: 1805499 - RNA, 19 nt, Artificial Sequence
  Description of Artificial Sequence: Synthetic oligonucleotide
cugugcguguaugggguug

SEQ ID NO: 1805500 - RNA, 19 nt, Artificial Sequence
  Description of Artificial Sequence: Synthetic oligonucleotide
ccgaaauaguucauuacua

SEQ ID NO: 1805501 - RNA, 19 nt, Artificial Sequence
  Description of Artificial Sequence: Synthetic oligonucleotide
gucgaaggucaaauauaca

SEQ ID NO: 1805502 - RNA, 19 nt, Artificial Sequence
  Description of Artificial Sequence: Synthetic oligonucleotide
gguugaaccuuggacagcu

SEQ ID NO: 1805503 - RNA, 19 nt, Artificial Sequence
  Description of Artificial Sequence: Synthetic oligonucleotide
aggguugcugugcguguau

SEQ ID NO: 1805504 - RNA, 19 nt, Artificial Sequence
  Description of Artificial Sequence: Synthetic oligonucleotide
acacacccucuugugaaaa

SEQ ID NO: 1805505 - RNA, 19 nt, Artificial Sequence
  Description of Artificial Sequence: Synthetic oligonucleotide
cugauccggcaguauccuc

SEQ ID NO: 1805506 - RNA, 19 nt, Artificial Sequence
  Description of Artificial Sequence: Synthetic oligonucleotide
gcuaaacugauccggcagu

SEQ ID NO: 1805507 - RNA, 19 nt, Artificial Sequence
  Description of Artificial Sequence: Synthetic oligonucleotide
guguggccagaauuccaga

SEQ ID NO: 1805508 - RNA, 19 nt, Artificial Sequence
  Description of Artificial Sequence: Synthetic oligonucleotide
acccuuaguacaggggauu

SEQ ID NO: 1805509 - RNA, 19 nt, Artificial Sequence
  Description of Artificial Sequence: Synthetic oligonucleotide
aguaucccauagacauaug

SEQ ID NO: 1805510 - RNA, 19 nt, Artificial Sequence
  Description of Artificial Sequence: Synthetic oligonucleotide
cgaguaucaccaagaaguc

SEQ ID NO: 1805511 - RNA, 19 nt, Artificial Sequence
  Description of Artificial Sequence: Synthetic oligonucleotide
agaguaucccauagacaua

SEQ ID NO: 1805512 - RNA, 19 nt, Artificial Sequence
  Description of Artificial Sequence: Synthetic oligonucleotide
cagauaccaggguugcugu

SEQ ID NO: 1805513 - RNA, 19 nt, Artificial Sequence
  Description of Artificial Sequence: Synthetic oligonucleotide
gggcuaaacugauccggca

SEQ ID NO: 1805514 - RNA, 19 nt, Artificial Sequence
  Description of Artificial Sequence: Synthetic oligonucleotide
gguucuaguaaagcuuugu

SEQ ID NO: 1805515 - RNA, 19 nt, Artificial Sequence
  Description of Artificial Sequence: Synthetic oligonucleotide
ccugauauuaguaguugau

SEQ ID NO: 1805516 - RNA, 19 nt, Artificial Sequence
  Description of Artificial Sequence: Synthetic oligonucleotide
ccacccauguauagaucug

SEQ ID NO: 1805517 - RNA, 19 nt, Artificial Sequence
  Description of Artificial Sequence: Synthetic oligonucleotide
cacuaucauggcagguaaa

SEQ ID NO: 1805518 - RNA, 19 nt, Artificial Sequence
  Description of Artificial Sequence: Synthetic oligonucleotide
cugucucaacuugacucca

SEQ ID NO: 1805519 - RNA, 19 nt, Artificial Sequence
  Description of Artificial Sequence: Synthetic oligonucleotide
ggauaucccaagucugccu

SEQ ID NO: 1805520 - RNA, 19 nt, Artificial Sequence
  Description of Artificial Sequence: Synthetic oligonucleotide
aucccaagucugccucuau

SEQ ID NO: 1805521 - RNA, 19 nt, Artificial Sequence
  Description of Artificial Sequence: Synthetic oligonucleotide
acccucuugugaaaauguu

SEQ ID NO: 1805522 - RNA, 19 nt, Artificial Sequence
  Description of Artificial Sequence: Synthetic oligonucleotide
gauccggcaguauccucau

SEQ ID NO: 1805523 - RNA, 19 nt, Artificial Sequence
  Description of Artificial Sequence: Synthetic oligonucleotide
gcaguauccucauuuucau

SEQ ID NO: 1805524 - RNA, 19 nt, Artificial Sequence
  Description of Artificial Sequence: Synthetic oligonucleotide
caucaucauccacccaugu

SEQ ID NO: 1805525 - RNA, 19 nt, Artificial Sequence
  Description of Artificial Sequence: Synthetic oligonucleotide
cccucuugugaaaauguua

SEQ ID NO: 1805526 - RNA, 19 nt, Artificial Sequence
  Description of Artificial Sequence: Synthetic oligonucleotide
ccuuaguacaggggauuac

SEQ ID NO: 1805527 - RNA, 19 nt, Artificial Sequence
  Description of Artificial Sequence: Synthetic oligonucleotide
ccacuaucauggcagguaa

SEQ ID NO: 1805528 - RNA, 19 nt, Artificial Sequence
  Description of Artificial Sequence: Synthetic oligonucleotide
cacccauguauagaucugu

SEQ ID NO: 1805529 - RNA, 19 nt, Artificial Sequence
  Description of Artificial Sequence: Synthetic oligonucleotide
caauccgaaauaguucauu

SEQ ID NO: 1805530 - RNA, 19 nt, Artificial Sequence
  Description of Artificial Sequence: Synthetic oligonucleotide
ggggauuacugcauacugu

SEQ ID NO: 1805531 - RNA, 19 nt, Artificial Sequence
  Description of Artificial Sequence: Synthetic oligonucleotide
ggguugaaccuuggacagc

SEQ ID NO: 1805532 - RNA, 19 nt, Artificial Sequence
  Description of Artificial Sequence: Synthetic oligonucleotide
caggggauuacugcauacu

SEQ ID NO: 1805533 - RNA, 19 nt, Artificial Sequence
  Description of Artificial Sequence: Synthetic oligonucleotide
guacaggggauuacugcau

SEQ ID NO: 1805534 - RNA, 19 nt, Artificial Sequence
  Description of Artificial Sequence: Synthetic oligonucleotide
ggcuggaggcaauugcuau

SEQ ID NO: 1805535 - RNA, 19 nt, Artificial Sequence
  Description of Artificial Sequence: Synthetic oligonucleotide
ggguugcugugcguguaug

SEQ ID NO: 1805536 - RNA, 19 nt, Artificial Sequence
  Description of Artificial Sequence: Synthetic oligonucleotide
caccucguuuaaagggcua

SEQ ID NO: 1805537 - RNA, 19 nt, Artificial Sequence
  Description of Artificial Sequence: Synthetic oligonucleotide
ggcaauugcuaugcaauuu

SEQ ID NO: 1805538 - RNA, 19 nt, Artificial Sequence
  Description of Artificial Sequence: Synthetic oligonucleotide
ggcuacaauccgaaauagu

SEQ ID NO: 1805539 - RNA, 19 nt, Artificial Sequence
  Description of Artificial Sequence: Synthetic oligonucleotide
cccgcagacauguacuccu

SEQ ID NO: 1805540 - RNA, 19 nt, Artificial Sequence
  Description of Artificial Sequence: Synthetic oligonucleotide
augcguugucgaaggucaa

SEQ ID NO: 1805541 - RNA, 19 nt, Artificial Sequence
  Description of Artificial Sequence: Synthetic oligonucleotide
cguguaugggguugaaccu

SEQ ID NO: 1805542 - RNA, 19 nt, Artificial Sequence
  Description of Artificial Sequence: Synthetic oligonucleotide
ccgcagacauguacuccuc

SEQ ID NO: 1805543 - RNA, 19 nt, Artificial Sequence
  Description of Artificial Sequence: Synthetic oligonucleotide
ggauuacugcauacuguau

SEQ ID NO: 1805544 - RNA, 19 nt, Artificial Sequence
  Description of Artificial Sequence: Synthetic oligonucleotide
auccggcaguauccucauu

SEQ ID NO: 1805545 - RNA, 19 nt, Artificial Sequence
  Description of Artificial Sequence: Synthetic oligonucleotide
cuccacuaucauggcaggu

SEQ ID NO: 1805546 - RNA, 19 nt, Artificial Sequence
  Description of Artificial Sequence: Synthetic oligonucleotide
cguugucgaaggucaaaua

SEQ ID NO: 1805547 - RNA, 19 nt, Artificial Sequence
  Description of Artificial Sequence: Synthetic oligonucleotide
ccucguuuaaagggcuaaa

SEQ ID NO: 1805548 - RNA, 19 nt, Artificial Sequence
  Description of Artificial Sequence: Synthetic oligonucleotide
cccuuaguacaggggauua

SEQ ID NO: 1805549 - RNA, 19 nt, Artificial Sequence
  Description of Artificial Sequence: Synthetic oligonucleotide
gugcguguaugggguugaa

SEQ ID NO: 1805550 - RNA, 19 nt, Artificial Sequence
  Description of Artificial Sequence: Synthetic oligonucleotide
cuguaucuguuggccacuu

SEQ ID NO: 1805551 - RNA, 19 nt, Artificial Sequence
  Description of Artificial Sequence: Synthetic oligonucleotide
gcuuuaccuccaggauauc

SEQ ID NO: 1805552 - RNA, 19 nt, Artificial Sequence
  Description of Artificial Sequence: Synthetic oligonucleotide
ccggcaguauccucauuuu

SEQ ID NO: 1805553 - RNA, 19 nt, Artificial Sequence
  Description of Artificial Sequence: Synthetic oligonucleotide
gccagauaccaggguugcu

SEQ ID NO: 1805554 - RNA, 19 nt, Artificial Sequence
  Description of Artificial Sequence: Synthetic oligonucleotide
uaccaugugaggcagaacg

SEQ ID NO: 1805555 - RNA, 19 nt, Artificial Sequence
  Description of Artificial Sequence: Synthetic oligonucleotide
auaagaugugucuggaucc

SEQ ID NO: 1805556 - RNA, 19 nt, Artificial Sequence
  Description of Artificial Sequence: Synthetic oligonucleotide
auuagcauuagccggacac

SEQ ID NO: 1805557 - RNA, 19 nt, Artificial Sequence
  Description of Artificial Sequence: Synthetic oligonucleotide
aguaguucaaauuuaucag

SEQ ID NO: 1805558 - RNA, 19 nt, Artificial Sequence
  Description of Artificial Sequence: Synthetic oligonucleotide
uccaaguuuagauaacugg

SEQ ID NO: 1805559 - RNA, 19 nt, Artificial Sequence
  Description of Artificial Sequence: Synthetic oligonucleotide
aacgcugggaucuuccacc

SEQ ID NO: 1805560 - RNA, 19 nt, Artificial Sequence
  Description of Artificial Sequence: Synthetic oligonucleotide
ugaauagaaauuuguauca

SEQ ID NO: 1805561 - RNA, 19 nt, Artificial Sequence
  Description of Artificial Sequence: Synthetic oligonucleotide
uggauauuggauaagcuca

SEQ ID NO: 1805562 - RNA, 19 nt, Artificial Sequence
  Description of Artificial Sequence: Synthetic oligonucleotide
uugaauagaaauuuguauc

SEQ ID NO: 1805563 - RNA, 19 nt, Artificial Sequence
  Description of Artificial Sequence: Synthetic oligonucleotide
uauaccauuccucaugggc

SEQ ID NO: 1805564 - RNA, 19 nt, Artificial Sequence
  Description of Artificial Sequence: Synthetic oligonucleotide
uguuauaagaugugucugg

SEQ ID NO: 1805565 - RNA, 19 nt, Artificial Sequence
  Description of Artificial Sequence: Synthetic oligonucleotide
uguguaagcuuacuaaugc

SEQ ID NO: 1805566 - RNA, 19 nt, Artificial Sequence
  Description of Artificial Sequence: Synthetic oligonucleotide
auccaaaccauucuuaaag

SEQ ID NO: 1805567 - RNA, 19 nt, Artificial Sequence
  Description of Artificial Sequence: Synthetic oligonucleotide
ugcagaacggcuuugguag

SEQ ID NO: 1805568 - RNA, 19 nt, Artificial Sequence
  Description of Artificial Sequence: Synthetic oligonucleotide
uuauucauuacauauugaa

SEQ ID NO: 1805569 - RNA, 19 nt, Artificial Sequence
  Description of Artificial Sequence: Synthetic oligonucleotide
uggagauuagcauuagccg

SEQ ID NO: 1805570 - RNA, 19 nt, Artificial Sequence
  Description of Artificial Sequence: Synthetic oligonucleotide
uauaagaugugucuggauc

SEQ ID NO: 1805571 - RNA, 19 nt, Artificial Sequence
  Description of Artificial Sequence: Synthetic oligonucleotide
aguuuagauaacuggagag

SEQ ID NO: 1805572 - RNA, 19 nt, Artificial Sequence
  Description of Artificial Sequence: Synthetic oligonucleotide
uugguuucuagaacuaagg

SEQ ID NO: 1805573 - RNA, 19 nt, Artificial Sequence
  Description of Artificial Sequence: Synthetic oligonucleotide
uguaagcuuacuaaugcug

SEQ ID NO: 1805574 - RNA, 19 nt, Artificial Sequence
  Description of Artificial Sequence: Synthetic oligonucleotide
uguaagacugaucuauacc

SEQ ID NO: 1805575 - RNA, 19 nt, Artificial Sequence
  Description of Artificial Sequence: Synthetic oligonucleotide
auucucaacaaguggcucc

SEQ ID NO: 1805576 - RNA, 19 nt, Artificial Sequence
  Description of Artificial Sequence: Synthetic oligonucleotide
auugaauagaaauuuguau

SEQ ID NO: 1805577 - RNA, 19 nt, Artificial Sequence
  Description of Artificial Sequence: Synthetic oligonucleotide
uuuagauaacuggagagcc

SEQ ID NO: 1805578 - RNA, 19 nt, Artificial Sequence
  Description of Artificial Sequence: Synthetic oligonucleotide
guuucuagaacuaaggaac

SEQ ID NO: 1805579 - RNA, 19 nt, Artificial Sequence
  Description of Artificial Sequence: Synthetic oligonucleotide
ugaucuauaccauuccuca

SEQ ID NO: 1805580 - RNA, 19 nt, Artificial Sequence
  Description of Artificial Sequence: Synthetic oligonucleotide
aaaauguuauuccuggaua

SEQ ID NO: 1805581 - RNA, 19 nt, Artificial Sequence
  Description of Artificial Sequence: Synthetic oligonucleotide
aaauguuauuccuggauau

SEQ ID NO: 1805582 - RNA, 19 nt, Artificial Sequence
  Description of Artificial Sequence: Synthetic oligonucleotide
gauaagcucacauuggaga

SEQ ID NO: 1805583 - RNA, 19 nt, Artificial Sequence
  Description of Artificial Sequence: Synthetic oligonucleotide
aaaucauuggccauggaga

SEQ ID NO: 1805584 - RNA, 19 nt, Artificial Sequence
  Description of Artificial Sequence: Synthetic oligonucleotide
aaguuuagauaacuggaga

SEQ ID NO: 1805585 - RNA, 19 nt, Artificial Sequence
  Description of Artificial Sequence: Synthetic oligonucleotide
aauagaaauuuguaucaaa

SEQ ID NO: 1805586 - RNA, 19 nt, Artificial Sequence
  Description of Artificial Sequence: Synthetic oligonucleotide
ugcgaugagcggaagacgg

SEQ ID NO: 1805587 - RNA, 19 nt, Artificial Sequence
  Description of Artificial Sequence: Synthetic oligonucleotide
uagaacuaaggaacgcugg

SEQ ID NO: 1805588 - RNA, 19 nt, Artificial Sequence
  Description of Artificial Sequence: Synthetic oligonucleotide
guaagacugaucuauacca

SEQ ID NO: 1805589 - RNA, 19 nt, Artificial Sequence
  Description of Artificial Sequence: Synthetic oligonucleotide
uauugaauagaaauuugua

SEQ ID NO: 1805590 - RNA, 19 nt, Artificial Sequence
  Description of Artificial Sequence: Synthetic oligonucleotide
cauaacaacgucaggucgg

SEQ ID NO: 1805591 - RNA, 19 nt, Artificial Sequence
  Description of Artificial Sequence: Synthetic oligonucleotide
uaguucaaauuuaucagcu

SEQ ID NO: 1805592 - RNA, 19 nt, Artificial Sequence
  Description of Artificial Sequence: Synthetic oligonucleotide
aacgcacuuggucaaggac

SEQ ID NO: 1805593 - RNA, 19 nt, Artificial Sequence
  Description of Artificial Sequence: Synthetic oligonucleotide
auaagcucacauuggagag

SEQ ID NO: 1805594 - RNA, 19 nt, Artificial Sequence
  Description of Artificial Sequence: Synthetic oligonucleotide
auuagccggacacagcgac

SEQ ID NO: 1805595 - RNA, 19 nt, Artificial Sequence
  Description of Artificial Sequence: Synthetic oligonucleotide
guaguucaaauuuaucagc

SEQ ID NO: 1805596 - RNA, 19 nt, Artificial Sequence
  Description of Artificial Sequence: Synthetic oligonucleotide
uaaacguugcaaaauguua

SEQ ID NO: 1805597 - RNA, 19 nt, Artificial Sequence
  Description of Artificial Sequence: Synthetic oligonucleotide
caucaagacagggugaucg

SEQ ID NO: 1805598 - RNA, 19 nt, Artificial Sequence
  Description of Artificial Sequence: Synthetic oligonucleotide
ggagauuagcauuagccgg

SEQ ID NO: 1805599 - RNA, 19 nt, Artificial Sequence
  Description of Artificial Sequence: Synthetic oligonucleotide
ucuuccaccauuguugacc

SEQ ID NO: 1805600 - RNA, 19 nt, Artificial Sequence
  Description of Artificial Sequence: Synthetic oligonucleotide
agaaagcagucacggaccc

SEQ ID NO: 1805601 - RNA, 19 nt, Artificial Sequence
  Description of Artificial Sequence: Synthetic oligonucleotide
augugucuggauccaaacc

SEQ ID NO: 1805602 - RNA, 19 nt, Artificial Sequence
  Description of Artificial Sequence: Synthetic oligonucleotide
uuucaaucccucuuugucu

SEQ ID NO: 1805603 - RNA, 19 nt, Artificial Sequence
  Description of Artificial Sequence: Synthetic oligonucleotide
aggaucagcgcacacagug

SEQ ID NO: 1805604 - RNA, 19 nt, Artificial Sequence
  Description of Artificial Sequence: Synthetic oligonucleotide
ugucggucaggucaagggg

SEQ ID NO: 1805605 - RNA, 19 nt, Artificial Sequence
  Description of Artificial Sequence: Synthetic oligonucleotide
uuuaaauugccagucucca

SEQ ID NO: 1805606 - RNA, 19 nt, Artificial Sequence
  Description of Artificial Sequence: Synthetic oligonucleotide
aacuaaggaacgcugggau

SEQ ID NO: 1805607 - RNA, 19 nt, Artificial Sequence
  Description of Artificial Sequence: Synthetic oligonucleotide
uccccaucaagacagggug

SEQ ID NO: 1805608 - RNA, 19 nt, Artificial Sequence
  Description of Artificial Sequence: Synthetic oligonucleotide
agagacuccaaguuuagau

SEQ ID NO: 1805609 - RNA, 19 nt, Artificial Sequence
  Description of Artificial Sequence: Synthetic oligonucleotide
aagacggucggcgccagcc

SEQ ID NO: 1805610 - RNA, 19 nt, Artificial Sequence
  Description of Artificial Sequence: Synthetic oligonucleotide
ugaucggagauccaaacuu

SEQ ID NO: 1805611 - RNA, 19 nt, Artificial Sequence
  Description of Artificial Sequence: Synthetic oligonucleotide
cuggauauuggauaagcuc

SEQ ID NO: 1805612 - RNA, 19 nt, Artificial Sequence
  Description of Artificial Sequence: Synthetic oligonucleotide
aaggacaccgucccuaagu

SEQ ID NO: 1805613 - RNA, 19 nt, Artificial Sequence
  Description of Artificial Sequence: Synthetic oligonucleotide
uggauaagcucacauugga

SEQ ID NO: 1805614 - RNA, 19 nt, Artificial Sequence
  Description of Artificial Sequence: Synthetic oligonucleotide
cagguuggcauauacugcc

SEQ ID NO: 1805615 - RNA, 19 nt, Artificial Sequence
  Description of Artificial Sequence: Synthetic oligonucleotide
uguguguaagcuuacuaau

SEQ ID NO: 1805616 - RNA, 19 nt, Artificial Sequence
  Description of Artificial Sequence: Synthetic oligonucleotide
aacaacgucaggucggcau

SEQ ID NO: 1805617 - RNA, 19 nt, Artificial Sequence
  Description of Artificial Sequence: Synthetic oligonucleotide
ggcuccgacauccagaggg

SEQ ID NO: 1805618 - RNA, 19 nt, Artificial Sequence
  Description of Artificial Sequence: Synthetic oligonucleotide
uuaaauugccagucuccag

SEQ ID NO: 1805619 - RNA, 19 nt, Artificial Sequence
  Description of Artificial Sequence: Synthetic oligonucleotide
cuagaacuaaggaacgcug

SEQ ID NO: 1805620 - RNA, 19 nt, Artificial Sequence
  Description of Artificial Sequence: Synthetic oligonucleotide
ucuagaacuaaggaacgcu

SEQ ID NO: 1805621 - RNA, 19 nt, Artificial Sequence
  Description of Artificial Sequence: Synthetic oligonucleotide
uugaccaaaaugucaauuu

SEQ ID NO: 1805622 - RNA, 19 nt, Artificial Sequence
  Description of Artificial Sequence: Synthetic oligonucleotide
uuagauaacuggagagcca

SEQ ID NO: 1805623 - RNA, 19 nt, Artificial Sequence
  Description of Artificial Sequence: Synthetic oligonucleotide
guuuagauaacuggagagc

SEQ ID NO: 1805624 - RNA, 19 nt, Artificial Sequence
  Description of Artificial Sequence: Synthetic oligonucleotide
cacucggcccauaacaacg

SEQ ID NO: 1805625 - RNA, 19 nt, Artificial Sequence
  Description of Artificial Sequence: Synthetic oligonucleotide
ugccacucggcccauaaca

SEQ ID NO: 1805626 - RNA, 19 nt, Artificial Sequence
  Description of Artificial Sequence: Synthetic oligonucleotide
guuucaaucccucuuuguc

SEQ ID NO: 1805627 - RNA, 19 nt, Artificial Sequence
  Description of Artificial Sequence: Synthetic oligonucleotide
cucaugggaaucugugucg

SEQ ID NO: 1805628 - RNA, 19 nt, Artificial Sequence
  Description of Artificial Sequence: Synthetic oligonucleotide
uuaguuacuucuucaguua

SEQ ID NO: 1805629 - RNA, 19 nt, Artificial Sequence
  Description of Artificial Sequence: Synthetic oligonucleotide
agagcauguuugcuggcac

SEQ ID NO: 1805630 - RNA, 19 nt, Artificial Sequence
  Description of Artificial Sequence: Synthetic oligonucleotide
gaucagcgcacacagugcc

SEQ ID NO: 1805631 - RNA, 19 nt, Artificial Sequence
  Description of Artificial Sequence: Synthetic oligonucleotide
cugacaguaccagagagac

SEQ ID NO: 1805632 - RNA, 19 nt, Artificial Sequence
  Description of Artificial Sequence: Synthetic oligonucleotide
cagaaagcagucacggacc

SEQ ID NO: 1805633 - RNA, 19 nt, Artificial Sequence
  Description of Artificial Sequence: Synthetic oligonucleotide
auaacaacgucaggucggc

SEQ ID NO: 1805634 - RNA, 19 nt, Artificial Sequence
  Description of Artificial Sequence: Synthetic oligonucleotide
agacuccaaguuuagauaa

SEQ ID NO: 1805635 - RNA, 19 nt, Artificial Sequence
  Description of Artificial Sequence: Synthetic oligonucleotide
cuuacuaaugcuguuuguc

SEQ ID NO: 1805636 - RNA, 19 nt, Artificial Sequence
  Description of Artificial Sequence: Synthetic oligonucleotide
agaugcaauccccgcagcg

SEQ ID NO: 1805637 - RNA, 19 nt, Artificial Sequence
  Description of Artificial Sequence: Synthetic oligonucleotide
uccaaaccauucuuaaagu

SEQ ID NO: 1805638 - RNA, 19 nt, Artificial Sequence
  Description of Artificial Sequence: Synthetic oligonucleotide
cucauugcuguccccaccg

SEQ ID NO: 1805639 - RNA, 19 nt, Artificial Sequence
  Description of Artificial Sequence: Synthetic oligonucleotide
uucucaacaaguggcuccg

SEQ ID NO: 1805640 - RNA, 19 nt, Artificial Sequence
  Description of Artificial Sequence: Synthetic oligonucleotide
auauuggauaagcucacau

SEQ ID NO: 1805641 - RNA, 19 nt, Artificial Sequence
  Description of Artificial Sequence: Synthetic oligonucleotide
cauuggagagcauugaaaa

SEQ ID NO: 1805642 - RNA, 19 nt, Artificial Sequence
  Description of Artificial Sequence: Synthetic oligonucleotide
gugucggucaggucaaggg

SEQ ID NO: 1805643 - RNA, 19 nt, Artificial Sequence
  Description of Artificial Sequence: Synthetic oligonucleotide
cugaucuauaccauuccuc

SEQ ID NO: 1805644 - RNA, 19 nt, Artificial Sequence
  Description of Artificial Sequence: Synthetic oligonucleotide
ucugcgaugagcggaagac

SEQ ID NO: 1805645 - RNA, 19 nt, Artificial Sequence
  Description of Artificial Sequence: Synthetic oligonucleotide
aucaagacagggugaucgg

SEQ ID NO: 1805646 - RNA, 19 nt, Artificial Sequence
  Description of Artificial Sequence: Synthetic oligonucleotide
auuuuaccaaacuccugca

SEQ ID NO: 1805647 - RNA, 19 nt, Artificial Sequence
  Description of Artificial Sequence: Synthetic oligonucleotide
acaacgucaggucggcauc

SEQ ID NO: 1805648 - RNA, 19 nt, Artificial Sequence
  Description of Artificial Sequence: Synthetic oligonucleotide
gacacagcgacucguuggc

SEQ ID NO: 1805649 - RNA, 19 nt, Artificial Sequence
  Description of Artificial Sequence: Synthetic oligonucleotide
uccuggauauuggauaagc

SEQ ID NO: 1805650 - RNA, 19 nt, Artificial Sequence
  Description of Artificial Sequence: Synthetic oligonucleotide
aguaacaaucuucccuugu

SEQ ID NO: 1805651 - RNA, 19 nt, Artificial Sequence
  Description of Artificial Sequence: Synthetic oligonucleotide
uaagacugaucuauaccau

SEQ ID NO: 1805652 - RNA, 19 nt, Artificial Sequence
  Description of Artificial Sequence: Synthetic oligonucleotide
aacaaguggcuccgacauc

SEQ ID NO: 1805653 - RNA, 19 nt, Artificial Sequence
  Description of Artificial Sequence: Synthetic oligonucleotide
ugccucaugggaaucugug

SEQ ID NO: 1805654 - RNA, 19 nt, Artificial Sequence
  Description of Artificial Sequence: Synthetic oligonucleotide
uacuaaugcuguuugucau

SEQ ID NO: 1805655 - RNA, 19 nt, Artificial Sequence
  Description of Artificial Sequence: Synthetic oligonucleotide
uuccucaugggcuuaguua

SEQ ID NO: 1805656 - RNA, 19 nt, Artificial Sequence
  Description of Artificial Sequence: Synthetic oligonucleotide
uaacaaucuucccuuguuu

SEQ ID NO: 1805657 - RNA, 19 nt, Artificial Sequence
  Description of Artificial Sequence: Synthetic oligonucleotide
uagcauuagccggacacag

SEQ ID NO: 1805658 - RNA, 19 nt, Artificial Sequence
  Description of Artificial Sequence: Synthetic oligonucleotide
gaugagcggaagacggucg

SEQ ID NO: 1805659 - RNA, 19 nt, Artificial Sequence
  Description of Artificial Sequence: Synthetic oligonucleotide
cuucaaaucauuggccaug

SEQ ID NO: 1805660 - RNA, 19 nt, Artificial Sequence
  Description of Artificial Sequence: Synthetic oligonucleotide
agucagcucccauucuggg

SEQ ID NO: 1805661 - RNA, 19 nt, Artificial Sequence
  Description of Artificial Sequence: Synthetic oligonucleotide
guuauuccuggauauugga

SEQ ID NO: 1805662 - RNA, 19 nt, Artificial Sequence
  Description of Artificial Sequence: Synthetic oligonucleotide
uucuagaacuaaggaacgc

SEQ ID NO: 1805663 - RNA, 19 nt, Artificial Sequence
  Description of Artificial Sequence: Synthetic oligonucleotide
auaccauuccucaugggcu

SEQ ID NO: 1805664 - RNA, 19 nt, Artificial Sequence
  Description of Artificial Sequence: Synthetic oligonucleotide
aaggggcaaaaccaguaua

SEQ ID NO: 1805665 - RNA, 19 nt, Artificial Sequence
  Description of Artificial Sequence: Synthetic oligonucleotide
agggcaagguuuuauuuau

SEQ ID NO: 1805666 - RNA, 19 nt, Artificial Sequence
  Description of Artificial Sequence: Synthetic oligonucleotide
uuagcauuagccggacaca

SEQ ID NO: 1805667 - RNA, 19 nt, Artificial Sequence
  Description of Artificial Sequence: Synthetic oligonucleotide
agcggaagacggucggcgc

SEQ ID NO: 1805668 - RNA, 19 nt, Artificial Sequence
  Description of Artificial Sequence: Synthetic oligonucleotide
ugggcuuaguuacuucuuc

SEQ ID NO: 1805669 - RNA, 19 nt, Artificial Sequence
  Description of Artificial Sequence: Synthetic oligonucleotide
guggcuccgacauccagag

SEQ ID NO: 1805670 - RNA, 19 nt, Artificial Sequence
  Description of Artificial Sequence: Synthetic oligonucleotide
aguuacuucuucaguuagg

SEQ ID NO: 1805671 - RNA, 19 nt, Artificial Sequence
  Description of Artificial Sequence: Synthetic oligonucleotide
ggguaaacguugcaaaaug

SEQ ID NO: 1805672 - RNA, 19 nt, Artificial Sequence
  Description of Artificial Sequence: Synthetic oligonucleotide
augagcggaagacggucgg

SEQ ID NO: 1805673 - RNA, 19 nt, Artificial Sequence
  Description of Artificial Sequence: Synthetic oligonucleotide
cacuggaugcuccagucac

SEQ ID NO: 1805674 - RNA, 19 nt, Artificial Sequence
  Description of Artificial Sequence: Synthetic oligonucleotide
caugugaggcagaacgcac

SEQ ID NO: 1805675 - RNA, 19 nt, Artificial Sequence
  Description of Artificial Sequence: Synthetic oligonucleotide
gagauuagcauuagccgga

SEQ ID NO: 1805676 - RNA, 19 nt, Artificial Sequence
  Description of Artificial Sequence: Synthetic oligonucleotide
aaguggcuccgacauccag

SEQ ID NO: 1805677 - RNA, 19 nt, Artificial Sequence
  Description of Artificial Sequence: Synthetic oligonucleotide
ggacacagcgacucguugg

SEQ ID NO: 1805678 - RNA, 19 nt, Artificial Sequence
  Description of Artificial Sequence: Synthetic oligonucleotide
accaugugaggcagaacgc

SEQ ID NO: 1805679 - RNA, 19 nt, Artificial Sequence
  Description of Artificial Sequence: Synthetic oligonucleotide
cuaaugcuguuugucauuc

SEQ ID NO: 1805680 - RNA, 19 nt, Artificial Sequence
  Description of Artificial Sequence: Synthetic oligonucleotide
aguacccacuggaaagggc

SEQ ID NO: 1805681 - RNA, 19 nt, Artificial Sequence
  Description of Artificial Sequence: Synthetic oligonucleotide
uccaccauuguugaccaaa

SEQ ID NO: 1805682 - RNA, 19 nt, Artificial Sequence
  Description of Artificial Sequence: Synthetic oligonucleotide
gagauccaaacuuccuuca

SEQ ID NO: 1805683 - RNA, 19 nt, Artificial Sequence
  Description of Artificial Sequence: Synthetic oligonucleotide
acagcgacucguuggcauc

SEQ ID NO: 1805684 - RNA, 19 nt, Artificial Sequence
  Description of Artificial Sequence: Synthetic oligonucleotide
acuccaaguuuagauaacu

SEQ ID NO: 1805685 - RNA, 19 nt, Artificial Sequence
  Description of Artificial Sequence: Synthetic oligonucleotide
ucauugcuguccccaccgg

SEQ ID NO: 1805686 - RNA, 19 nt, Artificial Sequence
  Description of Artificial Sequence: Synthetic oligonucleotide
ucuaccaugugaggcagaa

SEQ ID NO: 1805687 - RNA, 19 nt, Artificial Sequence
  Description of Artificial Sequence: Synthetic oligonucleotide
ucugugucggucaggucaa

SEQ ID NO: 1805688 - RNA, 19 nt, Artificial Sequence
  Description of Artificial Sequence: Synthetic oligonucleotide
guguguaagcuuacuaaug

SEQ ID NO: 1805689 - RNA, 19 nt, Artificial Sequence
  Description of Artificial Sequence: Synthetic oligonucleotide
aauugccagucuccaggca

SEQ ID NO: 1805690 - RNA, 19 nt, Artificial Sequence
  Description of Artificial Sequence: Synthetic oligonucleotide
ucccuaaguaguucaaauu

SEQ ID NO: 1805691 - RNA, 19 nt, Artificial Sequence
  Description of Artificial Sequence: Synthetic oligonucleotide
gucaggucggcaucggccc

SEQ ID NO: 1805692 - RNA, 19 nt, Artificial Sequence
  Description of Artificial Sequence: Synthetic oligonucleotide
auuauucauuacauauuga

SEQ ID NO: 1805693 - RNA, 19 nt, Artificial Sequence
  Description of Artificial Sequence: Synthetic oligonucleotide
auuggccauggagauuagc

SEQ ID NO: 1805694 - RNA, 19 nt, Artificial Sequence
  Description of Artificial Sequence: Synthetic oligonucleotide
ucggcaucggcccgcagga

SEQ ID NO: 1805695 - RNA, 19 nt, Artificial Sequence
  Description of Artificial Sequence: Synthetic oligonucleotide
uuggcauauacugccacau

SEQ ID NO: 1805696 - RNA, 19 nt, Artificial Sequence
  Description of Artificial Sequence: Synthetic oligonucleotide
cccagguuggcauauacug

SEQ ID NO: 1805697 - RNA, 19 nt, Artificial Sequence
  Description of Artificial Sequence: Synthetic oligonucleotide
agauuagcauuagccggac

SEQ ID NO: 1805698 - RNA, 19 nt, Artificial Sequence
  Description of Artificial Sequence: Synthetic oligonucleotide
ccauaacaacgucaggucg

SEQ ID NO: 1805699 - RNA, 19 nt, Artificial Sequence
  Description of Artificial Sequence: Synthetic oligonucleotide
ucguuggcaucuuguaaga

SEQ ID NO: 1805700 - RNA, 19 nt, Artificial Sequence
  Description of Artificial Sequence: Synthetic oligonucleotide
uggguaaacguugcaaaau

SEQ ID NO: 1805701 - RNA, 19 nt, Artificial Sequence
  Description of Artificial Sequence: Synthetic oligonucleotide
ucacggacccgucuucugu

SEQ ID NO: 1805702 - RNA, 19 nt, Artificial Sequence
  Description of Artificial Sequence: Synthetic oligonucleotide
aggaacgcugggaucuucc

SEQ ID NO: 1805703 - RNA, 19 nt, Artificial Sequence
  Description of Artificial Sequence: Synthetic oligonucleotide
uggcauauacugccacaug

SEQ ID NO: 1805704 - RNA, 19 nt, Artificial Sequence
  Description of Artificial Sequence: Synthetic oligonucleotide
agaacgcacuuggucaagg

SEQ ID NO: 1805705 - RNA, 19 nt, Artificial Sequence
  Description of Artificial Sequence: Synthetic oligonucleotide
acuaaugcuguuugucauu

SEQ ID NO: 1805706 - RNA, 19 nt, Artificial Sequence
  Description of Artificial Sequence: Synthetic oligonucleotide
uguccccaucaagacaggg

SEQ ID NO: 1805707 - RNA, 19 nt, Artificial Sequence
  Description of Artificial Sequence: Synthetic oligonucleotide
ucacauuggagagcauuga

SEQ ID NO: 1805708 - RNA, 19 nt, Artificial Sequence
  Description of Artificial Sequence: Synthetic oligonucleotide
ucaagacagggugaucgga

SEQ ID NO: 1805709 - RNA, 19 nt, Artificial Sequence
  Description of Artificial Sequence: Synthetic oligonucleotide
accauucuuaaaguuuugu

SEQ ID NO: 1805710 - RNA, 19 nt, Artificial Sequence
  Description of Artificial Sequence: Synthetic oligonucleotide
accgucccuaaguaguuca

SEQ ID NO: 1805711 - RNA, 19 nt, Artificial Sequence
  Description of Artificial Sequence: Synthetic oligonucleotide
gaucggagauccaaacuuc

SEQ ID NO: 1805712 - RNA, 19 nt, Artificial Sequence
  Description of Artificial Sequence: Synthetic oligonucleotide
uccugcagaacggcuuugg

SEQ ID NO: 1805713 - RNA, 19 nt, Artificial Sequence
  Description of Artificial Sequence: Synthetic oligonucleotide
gauaacuggagagccagcu

SEQ ID NO: 1805714 - RNA, 19 nt, Artificial Sequence
  Description of Artificial Sequence: Synthetic oligonucleotide
gaacgcugggaucuuccac

SEQ ID NO: 1805715 - RNA, 19 nt, Artificial Sequence
  Description of Artificial Sequence: Synthetic oligonucleotide
acucguuggcaucuuguaa

SEQ ID NO: 1805716 - RNA, 19 nt, Artificial Sequence
  Description of Artificial Sequence: Synthetic oligonucleotide
agcauuagccggacacagc

SEQ ID NO: 1805717 - RNA, 19 nt, Artificial Sequence
  Description of Artificial Sequence: Synthetic oligonucleotide
agauaacuggagagccagc

SEQ ID NO: 1805718 - RNA, 19 nt, Artificial Sequence
  Description of Artificial Sequence: Synthetic oligonucleotide
acgcacuuggucaaggaca

SEQ ID NO: 1805719 - RNA, 19 nt, Artificial Sequence
  Description of Artificial Sequence: Synthetic oligonucleotide
guauguccccaucaagaca

SEQ ID NO: 1805720 - RNA, 19 nt, Artificial Sequence
  Description of Artificial Sequence: Synthetic oligonucleotide
cuuggucaaggacaccguc

SEQ ID NO: 1805721 - RNA, 19 nt, Artificial Sequence
  Description of Artificial Sequence: Synthetic oligonucleotide
ggugaucggagauccaaac

SEQ ID NO: 1805722 - RNA, 19 nt, Artificial Sequence
  Description of Artificial Sequence: Synthetic oligonucleotide
gucggucaggucaaggggc

SEQ ID NO: 1805723 - RNA, 19 nt, Artificial Sequence
  Description of Artificial Sequence: Synthetic oligonucleotide
uucgggcugacaguaccag

SEQ ID NO: 1805724 - RNA, 19 nt, Artificial Sequence
  Description of Artificial Sequence: Synthetic oligonucleotide
ucaaaucauuggccaugga

SEQ ID NO: 1805725 - RNA, 19 nt, Artificial Sequence
  Description of Artificial Sequence: Synthetic oligonucleotide
aauccccgcagcgcuguuc

SEQ ID NO: 1805726 - RNA, 19 nt, Artificial Sequence
  Description of Artificial Sequence: Synthetic oligonucleotide
cagagagacuccaaguuua

SEQ ID NO: 1805727 - RNA, 19 nt, Artificial Sequence
  Description of Artificial Sequence: Synthetic oligonucleotide
acauuggagagcauugaaa

SEQ ID NO: 1805728 - RNA, 19 nt, Artificial Sequence
  Description of Artificial Sequence: Synthetic oligonucleotide
ugggcgucgcccuugccac

SEQ ID NO: 1805729 - RNA, 19 nt, Artificial Sequence
  Description of Artificial Sequence: Synthetic oligonucleotide
uuacagcagaaagcaguca

SEQ ID NO: 1805730 - RNA, 19 nt, Artificial Sequence
  Description of Artificial Sequence: Synthetic oligonucleotide
gauauuggauaagcucaca

SEQ ID NO: 1805731 - RNA, 19 nt, Artificial Sequence
  Description of Artificial Sequence: Synthetic oligonucleotide
ugcucugcgaugagcggaa

SEQ ID NO: 1805732 - RNA, 19 nt, Artificial Sequence
  Description of Artificial Sequence: Synthetic oligonucleotide
uuagccggacacagcgacu

SEQ ID NO: 1805733 - RNA, 19 nt, Artificial Sequence
  Description of Artificial Sequence: Synthetic oligonucleotide
aggggcaaaaccaguauau

SEQ ID NO: 1805734 - RNA, 19 nt, Artificial Sequence
  Description of Artificial Sequence: Synthetic oligonucleotide
ggauaagcucacauuggag

SEQ ID NO: 1805735 - RNA, 19 nt, Artificial Sequence
  Description of Artificial Sequence: Synthetic oligonucleotide
aacgucaggucggcaucgg

SEQ ID NO: 1805736 - RNA, 19 nt, Artificial Sequence
  Description of Artificial Sequence: Synthetic oligonucleotide
gcaacucccagcucauugc

SEQ ID NO: 1805737 - RNA, 19 nt, Artificial Sequence
  Description of Artificial Sequence: Synthetic oligonucleotide
agagagacuccaaguuuag

SEQ ID NO: 1805738 - RNA, 19 nt, Artificial Sequence
  Description of Artificial Sequence: Synthetic oligonucleotide
cuaaggaacgcugggaucu

SEQ ID NO: 1805739 - RNA, 19 nt, Artificial Sequence
  Description of Artificial Sequence: Synthetic oligonucleotide
gacaccgucccuaaguagu

SEQ ID NO: 1805740 - RNA, 19 nt, Artificial Sequence
  Description of Artificial Sequence: Synthetic oligonucleotide
ugacaguaccagagagacu

SEQ ID NO: 1805741 - RNA, 19 nt, Artificial Sequence
  Description of Artificial Sequence: Synthetic oligonucleotide
ccagauguuauaagaugug

SEQ ID NO: 1805742 - RNA, 19 nt, Artificial Sequence
  Description of Artificial Sequence: Synthetic oligonucleotide
ugcuccagucacccacacc

SEQ ID NO: 1805743 - RNA, 19 nt, Artificial Sequence
  Description of Artificial Sequence: Synthetic oligonucleotide
ggcaagguuuuauuuauua

SEQ ID NO: 1805744 - RNA, 19 nt, Artificial Sequence
  Description of Artificial Sequence: Synthetic oligonucleotide
uccccaacuuggaggucag

SEQ ID NO: 1805745 - RNA, 19 nt, Artificial Sequence
  Description of Artificial Sequence: Synthetic oligonucleotide
auccccgcagcgcuguuca

SEQ ID NO: 1805746 - RNA, 19 nt, Artificial Sequence
  Description of Artificial Sequence: Synthetic oligonucleotide
cauucucaacaaguggcuc

SEQ ID NO: 1805747 - RNA, 19 nt, Artificial Sequence
  Description of Artificial Sequence: Synthetic oligonucleotide
cuggguaaacguugcaaaa

SEQ ID NO: 1805748 - RNA, 19 nt, Artificial Sequence
  Description of Artificial Sequence: Synthetic oligonucleotide
gagagcauguuugcuggca

SEQ ID NO: 1805749 - RNA, 19 nt, Artificial Sequence
  Description of Artificial Sequence: Synthetic oligonucleotide
cugcgaugagcggaagacg

SEQ ID NO: 1805750 - RNA, 19 nt, Artificial Sequence
  Description of Artificial Sequence: Synthetic oligonucleotide
cuuguaagacugaucuaua

SEQ ID NO: 1805751 - RNA, 19 nt, Artificial Sequence
  Description of Artificial Sequence: Synthetic oligonucleotide
caacgucaggucggcaucg

SEQ ID NO: 1805752 - RNA, 19 nt, Artificial Sequence
  Description of Artificial Sequence: Synthetic oligonucleotide
ggucaaggggcaaaaccag

SEQ ID NO: 1805753 - RNA, 19 nt, Artificial Sequence
  Description of Artificial Sequence: Synthetic oligonucleotide
uagccggacacagcgacuc

SEQ ID NO: 1805754 - RNA, 19 nt, Artificial Sequence
  Description of Artificial Sequence: Synthetic oligonucleotide
caugggcuuaguuacuucu

SEQ ID NO: 1805755 - RNA, 19 nt, Artificial Sequence
  Description of Artificial Sequence: Synthetic oligonucleotide
cccauaacaacgucagguc

SEQ ID NO: 1805756 - RNA, 19 nt, Artificial Sequence
  Description of Artificial Sequence: Synthetic oligonucleotide
uucccuuguuuccucucua

SEQ ID NO: 1805757 - RNA, 19 nt, Artificial Sequence
  Description of Artificial Sequence: Synthetic oligonucleotide
gauuagcauuagccggaca

SEQ ID NO: 1805758 - RNA, 19 nt, Artificial Sequence
  Description of Artificial Sequence: Synthetic oligonucleotide
guguaagcuuacuaaugcu

SEQ ID NO: 1805759 - RNA, 19 nt, Artificial Sequence
  Description of Artificial Sequence: Synthetic oligonucleotide
ggauauuggauaagcucac

SEQ ID NO: 1805760 - RNA, 19 nt, Artificial Sequence
  Description of Artificial Sequence: Synthetic oligonucleotide
gggcaaaaccaguauaucu

SEQ ID NO: 1805761 - RNA, 19 nt, Artificial Sequence
  Description of Artificial Sequence: Synthetic oligonucleotide
cacggacccgucuucugug

SEQ ID NO: 1805762 - RNA, 19 nt, Artificial Sequence
  Description of Artificial Sequence: Synthetic oligonucleotide
gccauaaggcccagguugg

SEQ ID NO: 1805763 - RNA, 19 nt, Artificial Sequence
  Description of Artificial Sequence: Synthetic oligonucleotide
cggagagcauguuugcugg

SEQ ID NO: 1805764 - RNA, 19 nt, Artificial Sequence
  Description of Artificial Sequence: Synthetic oligonucleotide
caggaagcgcaggaacugc

SEQ ID NO: 1805765 - RNA, 19 nt, Artificial Sequence
  Description of Artificial Sequence: Synthetic oligonucleotide
ugagcggaagacggucggc

SEQ ID NO: 1805766 - RNA, 19 nt, Artificial Sequence
  Description of Artificial Sequence: Synthetic oligonucleotide
caacaaguggcuccgacau

SEQ ID NO: 1805767 - RNA, 19 nt, Artificial Sequence
  Description of Artificial Sequence: Synthetic oligonucleotide
aagaugugucuggauccaa

SEQ ID NO: 1805768 - RNA, 19 nt, Artificial Sequence
  Description of Artificial Sequence: Synthetic oligonucleotide
acuuggaggucagccauaa

SEQ ID NO: 1805769 - RNA, 19 nt, Artificial Sequence
  Description of Artificial Sequence: Synthetic oligonucleotide
guaaacguugcaaaauguu

SEQ ID NO: 1805770 - RNA, 19 nt, Artificial Sequence
  Description of Artificial Sequence: Synthetic oligonucleotide
auacagggcaagguuuuau

SEQ ID NO: 1805771 - RNA, 19 nt, Artificial Sequence
  Description of Artificial Sequence: Synthetic oligonucleotide
agaacggcuuugguagcug

SEQ ID NO: 1805772 - RNA, 19 nt, Artificial Sequence
  Description of Artificial Sequence: Synthetic oligonucleotide
uugccacucggcccauaac

SEQ ID NO: 1805773 - RNA, 19 nt, Artificial Sequence
  Description of Artificial Sequence: Synthetic oligonucleotide
acgcugggaucuuccacca

SEQ ID NO: 1805774 - RNA, 19 nt, Artificial Sequence
  Description of Artificial Sequence: Synthetic oligonucleotide
ccggagagcauguuugcug

SEQ ID NO: 1805775 - RNA, 19 nt, Artificial Sequence
  Description of Artificial Sequence: Synthetic oligonucleotide
gugaucggagauccaaacu

SEQ ID NO: 1805776 - RNA, 19 nt, Artificial Sequence
  Description of Artificial Sequence: Synthetic oligonucleotide
agaugugucuggauccaaa

SEQ ID NO: 1805777 - RNA, 19 nt, Artificial Sequence
  Description of Artificial Sequence: Synthetic oligonucleotide
gagagacuccaaguuuaga

SEQ ID NO: 1805778 - RNA, 19 nt, Artificial Sequence
  Description of Artificial Sequence: Synthetic oligonucleotide
ccuucgggcugacaguacc

SEQ ID NO: 1805779 - RNA, 19 nt, Artificial Sequence
  Description of Artificial Sequence: Synthetic oligonucleotide
cugggcgucgcccuugcca

SEQ ID NO: 1805780 - RNA, 19 nt, Artificial Sequence
  Description of Artificial Sequence: Synthetic oligonucleotide
ccuaaguaguucaaauuua

SEQ ID NO: 1805781 - RNA, 19 nt, Artificial Sequence
  Description of Artificial Sequence: Synthetic oligonucleotide
uaaggcccagguuggcaua

SEQ ID NO: 1805782 - RNA, 19 nt, Artificial Sequence
  Description of Artificial Sequence: Synthetic oligonucleotide
cuuggaggucagccauaag

SEQ ID NO: 1805783 - RNA, 19 nt, Artificial Sequence
  Description of Artificial Sequence: Synthetic oligonucleotide
uuagggcauucuucacaau

SEQ ID NO: 1805784 - RNA, 19 nt, Artificial Sequence
  Description of Artificial Sequence: Synthetic oligonucleotide
cagauguuauaagaugugu

SEQ ID NO: 1805785 - RNA, 19 nt, Artificial Sequence
  Description of Artificial Sequence: Synthetic oligonucleotide
gucacggacccgucuucug

SEQ ID NO: 1805786 - RNA, 19 nt, Artificial Sequence
  Description of Artificial Sequence: Synthetic oligonucleotide
caaggacaccgucccuaag

SEQ ID NO: 1805787 - RNA, 19 nt, Artificial Sequence
  Description of Artificial Sequence: Synthetic oligonucleotide
aguaccagagagacuccaa

SEQ ID NO: 1805788 - RNA, 19 nt, Artificial Sequence
  Description of Artificial Sequence: Synthetic oligonucleotide
agucacggacccgucuucu

SEQ ID NO: 1805789 - RNA, 19 nt, Artificial Sequence
  Description of Artificial Sequence: Synthetic oligonucleotide
aagcagucacggacccguc

SEQ ID NO: 1805790 - RNA, 19 nt, Artificial Sequence
  Description of Artificial Sequence: Synthetic oligonucleotide
cauuagccggacacagcga

SEQ ID NO: 1805791 - RNA, 19 nt, Artificial Sequence
  Description of Artificial Sequence: Synthetic oligonucleotide
gucaaggacaccgucccua

SEQ ID NO: 1805792 - RNA, 19 nt, Artificial Sequence
  Description of Artificial Sequence: Synthetic oligonucleotide
aucggcccgcaggaagcgc

SEQ ID NO: 1805793 - RNA, 19 nt, Artificial Sequence
  Description of Artificial Sequence: Synthetic oligonucleotide
acggacccgucuucugugu

SEQ ID NO: 1805794 - RNA, 19 nt, Artificial Sequence
  Description of Artificial Sequence: Synthetic oligonucleotide
gguaaacguugcaaaaugu

SEQ ID NO: 1805795 - RNA, 19 nt, Artificial Sequence
  Description of Artificial Sequence: Synthetic oligonucleotide
gcccauaacaacgucaggu

SEQ ID NO: 1805796 - RNA, 19 nt, Artificial Sequence
  Description of Artificial Sequence: Synthetic oligonucleotide
caucggcccgcaggaagcg

SEQ ID NO: 1805797 - RNA, 19 nt, Artificial Sequence
  Description of Artificial Sequence: Synthetic oligonucleotide
uaacaacgucaggucggca

SEQ ID NO: 1805798 - RNA, 19 nt, Artificial Sequence
  Description of Artificial Sequence: Synthetic oligonucleotide
acucggcccauaacaacgu

SEQ ID NO: 1805799 - RNA, 19 nt, Artificial Sequence
  Description of Artificial Sequence: Synthetic oligonucleotide
gguuguuucaaucccucuu

SEQ ID NO: 1805800 - RNA, 19 nt, Artificial Sequence
  Description of Artificial Sequence: Synthetic oligonucleotide
gaagacggucggcgccagc

SEQ ID NO: 1805801 - RNA, 19 nt, Artificial Sequence
  Description of Artificial Sequence: Synthetic oligonucleotide
cgcacuuggucaaggacac

SEQ ID NO: 1805802 - RNA, 19 nt, Artificial Sequence
  Description of Artificial Sequence: Synthetic oligonucleotide
ggagagcauguuugcuggc

SEQ ID NO: 1805803 - RNA, 19 nt, Artificial Sequence
  Description of Artificial Sequence: Synthetic oligonucleotide
ggcccauaacaacgucagg

SEQ ID NO: 1805804 - RNA, 19 nt, Artificial Sequence
  Description of Artificial Sequence: Synthetic oligonucleotide
cagaacgcacuuggucaag

SEQ ID NO: 1805805 - RNA, 19 nt, Artificial Sequence
  Description of Artificial Sequence: Synthetic oligonucleotide
cccgcagcgcuguucacag

SEQ ID NO: 1805806 - RNA, 19 nt, Artificial Sequence
  Description of Artificial Sequence: Synthetic oligonucleotide
ggagagccagcuccucgcc

SEQ ID NO: 1805807 - RNA, 19 nt, Artificial Sequence
  Description of Artificial Sequence: Synthetic oligonucleotide
gcggaagacggucggcgcc

SEQ ID NO: 1805808 - RNA, 19 nt, Artificial Sequence
  Description of Artificial Sequence: Synthetic oligonucleotide
cucggcccauaacaacguc

SEQ ID NO: 1805809 - RNA, 19 nt, Artificial Sequence
  Description of Artificial Sequence: Synthetic oligonucleotide
cagucacggacccgucuuc

SEQ ID NO: 1805810 - RNA, 19 nt, Artificial Sequence
  Description of Artificial Sequence: Synthetic oligonucleotide
agguuggcauauacugcca

SEQ ID NO: 1805811 - RNA, 19 nt, Artificial Sequence
  Description of Artificial Sequence: Synthetic oligonucleotide
gccccggagagcauguuug

SEQ ID NO: 1805812 - RNA, 19 nt, Artificial Sequence
  Description of Artificial Sequence: Synthetic oligonucleotide
caguaccagagagacucca

SEQ ID NO: 1805813 - RNA, 19 nt, Artificial Sequence
  Description of Artificial Sequence: Synthetic oligonucleotide
gguugguuucuagaacuaa

SEQ ID NO: 1805814 - RNA, 19 nt, Artificial Sequence
  Description of Artificial Sequence: Synthetic oligonucleotide
ggggcaaaaccaguauauc

SEQ ID NO: 1805815 - RNA, 19 nt, Artificial Sequence
  Description of Artificial Sequence: Synthetic oligonucleotide
acccuucgggcugacagua

SEQ ID NO: 1805816 - RNA, 19 nt, Artificial Sequence
  Description of Artificial Sequence: Synthetic oligonucleotide
agguugguuucuagaacua

SEQ ID NO: 1805817 - RNA, 19 nt, Artificial Sequence
  Description of Artificial Sequence: Synthetic oligonucleotide
cuucaguuagggcauucuu

SEQ ID NO: 1805818 - RNA, 19 nt, Artificial Sequence
  Description of Artificial Sequence: Synthetic oligonucleotide
cuggauccaaaccauucuu

SEQ ID NO: 1805819 - RNA, 19 nt, Artificial Sequence
  Description of Artificial Sequence: Synthetic oligonucleotide
caaggggcaaaaccaguau

SEQ ID NO: 1805820 - RNA, 19 nt, Artificial Sequence
  Description of Artificial Sequence: Synthetic oligonucleotide
ccacucggcccauaacaac

SEQ ID NO: 1805821 - RNA, 19 nt, Artificial Sequence
  Description of Artificial Sequence: Synthetic oligonucleotide
caaguggcuccgacaucca

SEQ ID NO: 1805822 - RNA, 19 nt, Artificial Sequence
  Description of Artificial Sequence: Synthetic oligonucleotide
caacucccagcucauugcu

SEQ ID NO: 1805823 - RNA, 19 nt, Artificial Sequence
  Description of Artificial Sequence: Synthetic oligonucleotide
cacagcgacucguuggcau

SEQ ID NO: 1805824 - RNA, 19 nt, Artificial Sequence
  Description of Artificial Sequence: Synthetic oligonucleotide
ccaccgguccugcucugcg

SEQ ID NO: 1805825 - RNA, 19 nt, Artificial Sequence
  Description of Artificial Sequence: Synthetic oligonucleotide
gucgcccuugccacucggc

SEQ ID NO: 1805826 - RNA, 19 nt, Artificial Sequence
  Description of Artificial Sequence: Synthetic oligonucleotide
acacagcgacucguuggca

SEQ ID NO: 1805827 - RNA, 19 nt, Artificial Sequence
  Description of Artificial Sequence: Synthetic oligonucleotide
uuccaccauuguugaccaa

SEQ ID NO: 1805828 - RNA, 19 nt, Artificial Sequence
  Description of Artificial Sequence: Synthetic oligonucleotide
gcccuugccacucggccca

SEQ ID NO: 1805829 - RNA, 19 nt, Artificial Sequence
  Description of Artificial Sequence: Synthetic oligonucleotide
acaccgucccuaaguaguu

SEQ ID NO: 1805830 - RNA, 19 nt, Artificial Sequence
  Description of Artificial Sequence: Synthetic oligonucleotide
gcgcacacagugccagcag

SEQ ID NO: 1805831 - RNA, 19 nt, Artificial Sequence
  Description of Artificial Sequence: Synthetic oligonucleotide
ccacauguauguccccauc

SEQ ID NO: 1805832 - RNA, 19 nt, Artificial Sequence
  Description of Artificial Sequence: Synthetic oligonucleotide
caccgucccuaaguaguuc

SEQ ID NO: 1805833 - RNA, 19 nt, Artificial Sequence
  Description of Artificial Sequence: Synthetic oligonucleotide
ccuggauauuggauaagcu

SEQ ID NO: 1805834 - RNA, 19 nt, Artificial Sequence
  Description of Artificial Sequence: Synthetic oligonucleotide
ccccggagagcauguuugc

SEQ ID NO: 1805835 - RNA, 19 nt, Artificial Sequence
  Description of Artificial Sequence: Synthetic oligonucleotide
gcugggaucuuccaccauu

SEQ ID NO: 1805836 - RNA, 19 nt, Artificial Sequence
  Description of Artificial Sequence: Synthetic oligonucleotide
gcgacucguuggcaucuug

SEQ ID NO: 1805837 - RNA, 19 nt, Artificial Sequence
  Description of Artificial Sequence: Synthetic oligonucleotide
ugcacccuucgggcugaca

SEQ ID NO: 1805838 - RNA, 19 nt, Artificial Sequence
  Description of Artificial Sequence: Synthetic oligonucleotide
caccgguccugcucugcga

SEQ ID NO: 1805839 - RNA, 19 nt, Artificial Sequence
  Description of Artificial Sequence: Synthetic oligonucleotide
gccucaugggaaucugugu

SEQ ID NO: 1805840 - RNA, 19 nt, Artificial Sequence
  Description of Artificial Sequence: Synthetic oligonucleotide
cgaugagcggaagacgguc

SEQ ID NO: 1805841 - RNA, 19 nt, Artificial Sequence
  Description of Artificial Sequence: Synthetic oligonucleotide
ggguuguuucaaucccucu

SEQ ID NO: 1805842 - RNA, 19 nt, Artificial Sequence
  Description of Artificial Sequence: Synthetic oligonucleotide
cugugucggucaggucaag

SEQ ID NO: 1805843 - RNA, 19 nt, Artificial Sequence
  Description of Artificial Sequence: Synthetic oligonucleotide
cgcccuugccacucggccc

SEQ ID NO: 1805844 - RNA, 19 nt, Artificial Sequence
  Description of Artificial Sequence: Synthetic oligonucleotide
gggugaucggagauccaaa

SEQ ID NO: 1805845 - RNA, 19 nt, Artificial Sequence
  Description of Artificial Sequence: Synthetic oligonucleotide
ggaagacggucggcgccag

SEQ ID NO: 1805846 - RNA, 19 nt, Artificial Sequence
  Description of Artificial Sequence: Synthetic oligonucleotide
cacccuucgggcugacagu

SEQ ID NO: 1805847 - RNA, 19 nt, Artificial Sequence
  Description of Artificial Sequence: Synthetic oligonucleotide
uccccgcagcgcuguucac

SEQ ID NO: 1805848 - RNA, 19 nt, Artificial Sequence
  Description of Artificial Sequence: Synthetic oligonucleotide
ccccaucaagacaggguga

SEQ ID NO: 1805849 - RNA, 19 nt, Artificial Sequence
  Description of Artificial Sequence: Synthetic oligonucleotide
caccuucucuucacccgcu

SEQ ID NO: 1805850 - RNA, 19 nt, Artificial Sequence
  Description of Artificial Sequence: Synthetic oligonucleotide
aggucggcaucggcccgca

SEQ ID NO: 1805851 - RNA, 19 nt, Artificial Sequence
  Description of Artificial Sequence: Synthetic oligonucleotide
gcgucgcccuugccacucg

SEQ ID NO: 1805852 - RNA, 19 nt, Artificial Sequence
  Description of Artificial Sequence: Synthetic oligonucleotide
ggcgucgcccuugccacuc

SEQ ID NO: 1805853 - RNA, 19 nt, Artificial Sequence
  Description of Artificial Sequence: Synthetic oligonucleotide
ccaucaagacagggugauc

SEQ ID NO: 1805854 - RNA, 19 nt, Artificial Sequence
  Description of Artificial Sequence: Synthetic oligonucleotide
cccuucgggcugacaguac

SEQ ID NO: 1805855 - RNA, 19 nt, Artificial Sequence
  Description of Artificial Sequence: Synthetic oligonucleotide
gcacuuggucaaggacacc

SEQ ID NO: 1805856 - RNA, 19 nt, Artificial Sequence
  Description of Artificial Sequence: Synthetic oligonucleotide
ggucaaggacaccgucccu

SEQ ID NO: 1805857 - RNA, 19 nt, Artificial Sequence
  Description of Artificial Sequence: Synthetic oligonucleotide
cgucgcccuugccacucgg

SEQ ID NO: 1805858 - RNA, 19 nt, Artificial Sequence
  Description of Artificial Sequence: Synthetic oligonucleotide
gcuuugguagcugccucau

SEQ ID NO: 1805859 - RNA, 19 nt, Artificial Sequence
  Description of Artificial Sequence: Synthetic oligonucleotide
cccaccgguccugcucugc

SEQ ID NO: 1805860 - RNA, 19 nt, Artificial Sequence
  Description of Artificial Sequence: Synthetic oligonucleotide
cggacccgucuucugugug

SEQ ID NO: 1805861 - RNA, 19 nt, Artificial Sequence
  Description of Artificial Sequence: Synthetic oligonucleotide
ccgucccuaaguaguucaa

SEQ ID NO: 1805862 - RNA, 19 nt, Artificial Sequence
  Description of Artificial Sequence: Synthetic oligonucleotide
ggucggcaucggcccgcag

SEQ ID NO: 1805863 - RNA, 19 nt, Artificial Sequence
  Description of Artificial Sequence: Synthetic oligonucleotide
cagcucccauucugggcgu

SEQ ID NO: 1805864 - RNA, 19 nt, Artificial Sequence
  Description of Artificial Sequence: Synthetic oligonucleotide
aggcccagguuggcauaua

SEQ ID NO: 1805865 - RNA, 19 nt, Artificial Sequence
  Description of Artificial Sequence: Synthetic oligonucleotide
cggagauccaaacuuccuu

SEQ ID NO: 1805866 - RNA, 19 nt, Artificial Sequence
  Description of Artificial Sequence: Synthetic oligonucleotide
gccggacacagcgacucgu

SEQ ID NO: 1805867 - RNA, 19 nt, Artificial Sequence
  Description of Artificial Sequence: Synthetic oligonucleotide
gcgaugagcggaagacggu

SEQ ID NO: 1805868 - RNA, 19 nt, Artificial Sequence
  Description of Artificial Sequence: Synthetic oligonucleotide
cgucccuaaguaguucaaa

SEQ ID NO: 1805869 - RNA, 19 nt, Artificial Sequence
  Description of Artificial Sequence: Synthetic oligonucleotide
ccccgcagcgcuguucaca

SEQ ID NO: 1805870 - RNA, 19 nt, Artificial Sequence
  Description of Artificial Sequence: Synthetic oligonucleotide
ccccaacuuggaggucagc

SEQ ID NO: 1805871 - RNA, 19 nt, Artificial Sequence
  Description of Artificial Sequence: Synthetic oligonucleotide
cggaagacggucggcgcca

SEQ ID NO: 1805872 - RNA, 19 nt, Artificial Sequence
  Description of Artificial Sequence: Synthetic oligonucleotide
cugcacccuucgggcugac

SEQ ID NO: 1805873 - RNA, 19 nt, Artificial Sequence
  Description of Artificial Sequence: Synthetic oligonucleotide
cccacaccaccaugucagu

SEQ ID NO: 1805874 - RNA, 19 nt, Artificial Sequence
  Description of Artificial Sequence: Synthetic oligonucleotide
ccggacacagcgacucguu

SEQ ID NO: 1805875 - RNA, 19 nt, Artificial Sequence
  Description of Artificial Sequence: Synthetic oligonucleotide
gggcgucgcccuugccacu

SEQ ID NO: 1805876 - RNA, 19 nt, Artificial Sequence
  Description of Artificial Sequence: Synthetic oligonucleotide
ccgcagcgcuguucacagu

SEQ ID NO: 1805877 - RNA, 19 nt, Artificial Sequence
  Description of Artificial Sequence: Synthetic oligonucleotide
agucgaacaugucacaucc

SEQ ID NO: 1805878 - RNA, 19 nt, Artificial Sequence
  Description of Artificial Sequence: Synthetic oligonucleotide
agugagauggugcagugcc

SEQ ID NO: 1805879 - RNA, 19 nt, Artificial Sequence
  Description of Artificial Sequence: Synthetic oligonucleotide
aaaguaagaauccuucagu

SEQ ID NO: 1805880 - RNA, 19 nt, Artificial Sequence
  Description of Artificial Sequence: Synthetic oligonucleotide
agggacaccaucuggaagc

SEQ ID NO: 1805881 - RNA, 19 nt, Artificial Sequence
  Description of Artificial Sequence: Synthetic oligonucleotide
aaagucaggaaagcgcugc

SEQ ID NO: 1805882 - RNA, 19 nt, Artificial Sequence
  Description of Artificial Sequence: Synthetic oligonucleotide
ugaaguuccgcacaaaguc

SEQ ID NO: 1805883 - RNA, 19 nt, Artificial Sequence
  Description of Artificial Sequence: Synthetic oligonucleotide
guuuaugggacugaaaucc

SEQ ID NO: 1805884 - RNA, 19 nt, Artificial Sequence
  Description of Artificial Sequence: Synthetic oligonucleotide
ucggacagggagaacaggg

SEQ ID NO: 1805885 - RNA, 19 nt, Artificial Sequence
  Description of Artificial Sequence: Synthetic oligonucleotide
uuguccuuaggcagcaugg

SEQ ID NO: 1805886 - RNA, 19 nt, Artificial Sequence
  Description of Artificial Sequence: Synthetic oligonucleotide
aguuuaugggacugaaauc

SEQ ID NO: 1805887 - RNA, 19 nt, Artificial Sequence
  Description of Artificial Sequence: Synthetic oligonucleotide
auucaguccacccuggugu

SEQ ID NO: 1805888 - RNA, 19 nt, Artificial Sequence
  Description of Artificial Sequence: Synthetic oligonucleotide
ugugcaguagggcaugcag

SEQ ID NO: 1805889 - RNA, 19 nt, Artificial Sequence
  Description of Artificial Sequence: Synthetic oligonucleotide
uacauggugcgcaugaagu

SEQ ID NO: 1805890 - RNA, 19 nt, Artificial Sequence
  Description of Artificial Sequence: Synthetic oligonucleotide
guagguguugcccaggcag

SEQ ID NO: 1805891 - RNA, 19 nt, Artificial Sequence
  Description of Artificial Sequence: Synthetic oligonucleotide
aaguaagaauccuucagua

SEQ ID NO: 1805892 - RNA, 19 nt, Artificial Sequence
  Description of Artificial Sequence: Synthetic oligonucleotide
uaugggacugaaauccuug

SEQ ID NO: 1805893 - RNA, 19 nt, Artificial Sequence
  Description of Artificial Sequence: Synthetic oligonucleotide
uccgugaggagguugugcg

SEQ ID NO: 1805894 - RNA, 19 nt, Artificial Sequence
  Description of Artificial Sequence: Synthetic oligonucleotide
uuaggcagcauggaggugc

SEQ ID NO: 1805895 - RNA, 19 nt, Artificial Sequence
  Description of Artificial Sequence: Synthetic oligonucleotide
uaagaauccuucaguauuc

SEQ ID NO: 1805896 - RNA, 19 nt, Artificial Sequence
  Description of Artificial Sequence: Synthetic oligonucleotide
ugugggguauacacagucg

SEQ ID NO: 1805897 - RNA, 19 nt, Artificial Sequence
  Description of Artificial Sequence: Synthetic oligonucleotide
aagugguccgcagaucggc

SEQ ID NO: 1805898 - RNA, 19 nt, Artificial Sequence
  Description of Artificial Sequence: Synthetic oligonucleotide
agacuaccaugucaguggc

SEQ ID NO: 1805899 - RNA, 19 nt, Artificial Sequence
  Description of Artificial Sequence: Synthetic oligonucleotide
uucuggaucagcuccgggc

SEQ ID NO: 1805900 - RNA, 19 nt, Artificial Sequence
  Description of Artificial Sequence: Synthetic oligonucleotide
aacuguuccuugcucucuc

SEQ ID NO: 1805901 - RNA, 19 nt, Artificial Sequence
  Description of Artificial Sequence: Synthetic oligonucleotide
ucgaacaugucacauccaa

SEQ ID NO: 1805902 - RNA, 19 nt, Artificial Sequence
  Description of Artificial Sequence: Synthetic oligonucleotide
cuuucaggcaagugguccg

SEQ ID NO: 1805903 - RNA, 19 nt, Artificial Sequence
  Description of Artificial Sequence: Synthetic oligonucleotide
uucuggaucugcacggacc

SEQ ID NO: 1805904 - RNA, 19 nt, Artificial Sequence
  Description of Artificial Sequence: Synthetic oligonucleotide
ucuggaucugcacggaccu

SEQ ID NO: 1805905 - RNA, 19 nt, Artificial Sequence
  Description of Artificial Sequence: Synthetic oligonucleotide
agugccgcgguguugucac

SEQ ID NO: 1805906 - RNA, 19 nt, Artificial Sequence
  Description of Artificial Sequence: Synthetic oligonucleotide
ugcaguagggcaugcagga

SEQ ID NO: 1805907 - RNA, 19 nt, Artificial Sequence
  Description of Artificial Sequence: Synthetic oligonucleotide
ggacacucagaguuuaugg

SEQ ID NO: 1805908 - RNA, 19 nt, Artificial Sequence
  Description of Artificial Sequence: Synthetic oligonucleotide
aagagccacgcagacuacc

SEQ ID NO: 1805909 - RNA, 19 nt, Artificial Sequence
  Description of Artificial Sequence: Synthetic oligonucleotide
agugccgugcggcagccgc

SEQ ID NO: 1805910 - RNA, 19 nt, Artificial Sequence
  Description of Artificial Sequence: Synthetic oligonucleotide
gaugcugcuucgaagguug

SEQ ID NO: 1805911 - RNA, 19 nt, Artificial Sequence
  Description of Artificial Sequence: Synthetic oligonucleotide
uuuaugggacugaaauccu

SEQ ID NO: 1805912 - RNA, 19 nt, Artificial Sequence
  Description of Artificial Sequence: Synthetic oligonucleotide
gaagcggacgcccuccucc

SEQ ID NO: 1805913 - RNA, 19 nt, Artificial Sequence
  Description of Artificial Sequence: Synthetic oligonucleotide
ucucuuggccgucguaggg

SEQ ID NO: 1805914 - RNA, 19 nt, Artificial Sequence
  Description of Artificial Sequence: Synthetic oligonucleotide
agccaaagcgcgcuguccg

SEQ ID NO: 1805915 - RNA, 19 nt, Artificial Sequence
  Description of Artificial Sequence: Synthetic oligonucleotide
ucuuggccgucguagggcg

SEQ ID NO: 1805916 - RNA, 19 nt, Artificial Sequence
  Description of Artificial Sequence: Synthetic oligonucleotide
caccacgucauccaacugc

SEQ ID NO: 1805917 - RNA, 19 nt, Artificial Sequence
  Description of Artificial Sequence: Synthetic oligonucleotide
gacaccaucuggaagccgc

SEQ ID NO: 1805918 - RNA, 19 nt, Artificial Sequence
  Description of Artificial Sequence: Synthetic oligonucleotide
aaguuccgcacaaagucag

SEQ ID NO: 1805919 - RNA, 19 nt, Artificial Sequence
  Description of Artificial Sequence: Synthetic oligonucleotide
acaggcaugaacaccgggg

SEQ ID NO: 1805920 - RNA, 19 nt, Artificial Sequence
  Description of Artificial Sequence: Synthetic oligonucleotide
gccgugaugcccuucaugg

SEQ ID NO: 1805921 - RNA, 19 nt, Artificial Sequence
  Description of Artificial Sequence: Synthetic oligonucleotide
cugcauucggccaccagcc

SEQ ID NO: 1805922 - RNA, 19 nt, Artificial Sequence
  Description of Artificial Sequence: Synthetic oligonucleotide
agaacagggacaccaucug

SEQ ID NO: 1805923 - RNA, 19 nt, Artificial Sequence
  Description of Artificial Sequence: Synthetic oligonucleotide
aaccaggucaugugagugu

SEQ ID NO: 1805924 - RNA, 19 nt, Artificial Sequence
  Description of Artificial Sequence: Synthetic oligonucleotide
cacucagaguuuaugggac

SEQ ID NO: 1805925 - RNA, 19 nt, Artificial Sequence
  Description of Artificial Sequence: Synthetic oligonucleotide
ugggacugaaauccuuggc

SEQ ID NO: 1805926 - RNA, 19 nt, Artificial Sequence
  Description of Artificial Sequence: Synthetic oligonucleotide
ucugcacggaccucuccgg

SEQ ID NO: 1805927 - RNA, 19 nt, Artificial Sequence
  Description of Artificial Sequence: Synthetic oligonucleotide
uggaagccgccacuguccg

SEQ ID NO: 1805928 - RNA, 19 nt, Artificial Sequence
  Description of Artificial Sequence: Synthetic oligonucleotide
ucaugugagugugauuccc

SEQ ID NO: 1805929 - RNA, 19 nt, Artificial Sequence
  Description of Artificial Sequence: Synthetic oligonucleotide
ucaccauacauggugcgca

SEQ ID NO: 1805930 - RNA, 19 nt, Artificial Sequence
  Description of Artificial Sequence: Synthetic oligonucleotide
acuaccccagugucccucc

SEQ ID NO: 1805931 - RNA, 19 nt, Artificial Sequence
  Description of Artificial Sequence: Synthetic oligonucleotide
caguagggcaugcaggaag

SEQ ID NO: 1805932 - RNA, 19 nt, Artificial Sequence
  Description of Artificial Sequence: Synthetic oligonucleotide
gugugauucccacggaggc

SEQ ID NO: 1805933 - RNA, 19 nt, Artificial Sequence
  Description of Artificial Sequence: Synthetic oligonucleotide
auccaagagccacgcagac

SEQ ID NO: 1805934 - RNA, 19 nt, Artificial Sequence
  Description of Artificial Sequence: Synthetic oligonucleotide
ugcggccaguccaugaagc

SEQ ID NO: 1805935 - RNA, 19 nt, Artificial Sequence
  Description of Artificial Sequence: Synthetic oligonucleotide
uccaagaugcugcuucgaa

SEQ ID NO: 1805936 - RNA, 19 nt, Artificial Sequence
  Description of Artificial Sequence: Synthetic oligonucleotide
aucucuuggccgucguagg

SEQ ID NO: 1805937 - RNA, 19 nt, Artificial Sequence
  Description of Artificial Sequence: Synthetic oligonucleotide
cccacaggcaugaacaccg

SEQ ID NO: 1805938 - RNA, 19 nt, Artificial Sequence
  Description of Artificial Sequence: Synthetic oligonucleotide
aguagggcaugcaggaagg

SEQ ID NO: 1805939 - RNA, 19 nt, Artificial Sequence
  Description of Artificial Sequence: Synthetic oligonucleotide
acuaccaugucaguggcau

SEQ ID NO: 1805940 - RNA, 19 nt, Artificial Sequence
  Description of Artificial Sequence: Synthetic oligonucleotide
agggagaacagggacacca

SEQ ID NO: 1805941 - RNA, 19 nt, Artificial Sequence
  Description of Artificial Sequence: Synthetic oligonucleotide
cuuguccuuaggcagcaug

SEQ ID NO: 1805942 - RNA, 19 nt, Artificial Sequence
  Description of Artificial Sequence: Synthetic oligonucleotide
auacugcuucuucuucaac

SEQ ID NO: 1805943 - RNA, 19 nt, Artificial Sequence
  Description of Artificial Sequence: Synthetic oligonucleotide
aagcggacgcccuccuccg

SEQ ID NO: 1805944 - RNA, 19 nt, Artificial Sequence
  Description of Artificial Sequence: Synthetic oligonucleotide
ugcuucaacggcccaggca

SEQ ID NO: 1805945 - RNA, 19 nt, Artificial Sequence
  Description of Artificial Sequence: Synthetic oligonucleotide
ugcgcaugaaguuccgcac

SEQ ID NO: 1805946 - RNA, 19 nt, Artificial Sequence
  Description of Artificial Sequence: Synthetic oligonucleotide
gaagccgccacuguccgug

SEQ ID NO: 1805947 - RNA, 19 nt, Artificial Sequence
  Description of Artificial Sequence: Synthetic oligonucleotide
guccgugugggguauacac

SEQ ID NO: 1805948 - RNA, 19 nt, Artificial Sequence
  Description of Artificial Sequence: Synthetic oligonucleotide
uccgugugggguauacaca

SEQ ID NO: 1805949 - RNA, 19 nt, Artificial Sequence
  Description of Artificial Sequence: Synthetic oligonucleotide
ggcaugaacaccggggugg

SEQ ID NO: 1805950 - RNA, 19 nt, Artificial Sequence
  Description of Artificial Sequence: Synthetic oligonucleotide
cagaucggcauucagucca

SEQ ID NO: 1805951 - RNA, 19 nt, Artificial Sequence
  Description of Artificial Sequence: Synthetic oligonucleotide
aagucaggaaagcgcugcu

SEQ ID NO: 1805952 - RNA, 19 nt, Artificial Sequence
  Description of Artificial Sequence: Synthetic oligonucleotide
uuaugggacugaaauccuu

SEQ ID NO: 1805953 - RNA, 19 nt, Artificial Sequence
  Description of Artificial Sequence: Synthetic oligonucleotide
gagauggugcagugccgcg

SEQ ID NO: 1805954 - RNA, 19 nt, Artificial Sequence
  Description of Artificial Sequence: Synthetic oligonucleotide
agaccuccgauggcaaagc

SEQ ID NO: 1805955 - RNA, 19 nt, Artificial Sequence
  Description of Artificial Sequence: Synthetic oligonucleotide
uagguguugcccaggcaga

SEQ ID NO: 1805956 - RNA, 19 nt, Artificial Sequence
  Description of Artificial Sequence: Synthetic oligonucleotide
gugggguauacacagucga

SEQ ID NO: 1805957 - RNA, 19 nt, Artificial Sequence
  Description of Artificial Sequence: Synthetic oligonucleotide
ugcauucggccaccagccg

SEQ ID NO: 1805958 - RNA, 19 nt, Artificial Sequence
  Description of Artificial Sequence: Synthetic oligonucleotide
agcugauaggcaauguugu

SEQ ID NO: 1805959 - RNA, 19 nt, Artificial Sequence
  Description of Artificial Sequence: Synthetic oligonucleotide
uggaucugcacggaccucu

SEQ ID NO: 1805960 - RNA, 19 nt, Artificial Sequence
  Description of Artificial Sequence: Synthetic oligonucleotide
cauucaguccacccuggug

SEQ ID NO: 1805961 - RNA, 19 nt, Artificial Sequence
  Description of Artificial Sequence: Synthetic oligonucleotide
ugugcggccaguccaugaa

SEQ ID NO: 1805962 - RNA, 19 nt, Artificial Sequence
  Description of Artificial Sequence: Synthetic oligonucleotide
gggacugaaauccuuggca

SEQ ID NO: 1805963 - RNA, 19 nt, Artificial Sequence
  Description of Artificial Sequence: Synthetic oligonucleotide
ucguagggcgagcggaagc

SEQ ID NO: 1805964 - RNA, 19 nt, Artificial Sequence
  Description of Artificial Sequence: Synthetic oligonucleotide
agccacgcagacuaccaug

SEQ ID NO: 1805965 - RNA, 19 nt, Artificial Sequence
  Description of Artificial Sequence: Synthetic oligonucleotide
gugugggguauacacaguc

SEQ ID NO: 1805966 - RNA, 19 nt, Artificial Sequence
  Description of Artificial Sequence: Synthetic oligonucleotide
ugggguauacacagucgaa

SEQ ID NO: 1805967 - RNA, 19 nt, Artificial Sequence
  Description of Artificial Sequence: Synthetic oligonucleotide
ugcuucgaagguugcucag

SEQ ID NO: 1805968 - RNA, 19 nt, Artificial Sequence
  Description of Artificial Sequence: Synthetic oligonucleotide
augaacaccgggguggcca

SEQ ID NO: 1805969 - RNA, 19 nt, Artificial Sequence
  Description of Artificial Sequence: Synthetic oligonucleotide
ugagugugauucccacgga

SEQ ID NO: 1805970 - RNA, 19 nt, Artificial Sequence
  Description of Artificial Sequence: Synthetic oligonucleotide
acucagaguuuaugggacu

SEQ ID NO: 1805971 - RNA, 19 nt, Artificial Sequence
  Description of Artificial Sequence: Synthetic oligonucleotide
uuaacgccaccaucuucca

SEQ ID NO: 1805972 - RNA, 19 nt, Artificial Sequence
  Description of Artificial Sequence: Synthetic oligonucleotide
uccgccgugaugcccuuca

SEQ ID NO: 1805973 - RNA, 19 nt, Artificial Sequence
  Description of Artificial Sequence: Synthetic oligonucleotide
gugucuagccagcggacug

SEQ ID NO: 1805974 - RNA, 19 nt, Artificial Sequence
  Description of Artificial Sequence: Synthetic oligonucleotide
cucagaguuuaugggacug

SEQ ID NO: 1805975 - RNA, 19 nt, Artificial Sequence
  Description of Artificial Sequence: Synthetic oligonucleotide
cauggugcgcaugaaguuc

SEQ ID NO: 1805976 - RNA, 19 nt, Artificial Sequence
  Description of Artificial Sequence: Synthetic oligonucleotide
gucaugugagugugauucc

SEQ ID NO: 1805977 - RNA, 19 nt, Artificial Sequence
  Description of Artificial Sequence: Synthetic oligonucleotide
ggguauacacagucgaaca

SEQ ID NO: 1805978 - RNA, 19 nt, Artificial Sequence
  Description of Artificial Sequence: Synthetic oligonucleotide
gauaggcaauguugugcac

SEQ ID NO: 1805979 - RNA, 19 nt, Artificial Sequence
  Description of Artificial Sequence: Synthetic oligonucleotide
aacaccgggguggccacag

SEQ ID NO: 1805980 - RNA, 19 nt, Artificial Sequence
  Description of Artificial Sequence: Synthetic oligonucleotide
ccuccgauggcaaagccug

SEQ ID NO: 1805981 - RNA, 19 nt, Artificial Sequence
  Description of Artificial Sequence: Synthetic oligonucleotide
uuccgcacaaagucaggaa

SEQ ID NO: 1805982 - RNA, 19 nt, Artificial Sequence
  Description of Artificial Sequence: Synthetic oligonucleotide
ugaugcgcggagcggacuc

SEQ ID NO: 1805983 - RNA, 19 nt, Artificial Sequence
  Description of Artificial Sequence: Synthetic oligonucleotide
uuucaggcaagugguccgc

SEQ ID NO: 1805984 - RNA, 19 nt, Artificial Sequence
  Description of Artificial Sequence: Synthetic oligonucleotide
acucgagcgaagccgggcu

SEQ ID NO: 1805985 - RNA, 19 nt, Artificial Sequence
  Description of Artificial Sequence: Synthetic oligonucleotide
cauccaagagccacgcaga

SEQ ID NO: 1805986 - RNA, 19 nt, Artificial Sequence
  Description of Artificial Sequence: Synthetic oligonucleotide
cuguuccuugcucucuccc

SEQ ID NO: 1805987 - RNA, 19 nt, Artificial Sequence
  Description of Artificial Sequence: Synthetic oligonucleotide
cuggugucuagccagcgga

SEQ ID NO: 1805988 - RNA, 19 nt, Artificial Sequence
  Description of Artificial Sequence: Synthetic oligonucleotide
aggcaaccaggucauguga

SEQ ID NO: 1805989 - RNA, 19 nt, Artificial Sequence
  Description of Artificial Sequence: Synthetic oligonucleotide
caaccaggucaugugagug

SEQ ID NO: 1805990 - RNA, 19 nt, Artificial Sequence
  Description of Artificial Sequence: Synthetic oligonucleotide
cagucgaacaugucacauc

SEQ ID NO: 1805991 - RNA, 19 nt, Artificial Sequence
  Description of Artificial Sequence: Synthetic oligonucleotide
cacaggcaugaacaccggg

SEQ ID NO: 1805992 - RNA, 19 nt, Artificial Sequence
  Description of Artificial Sequence: Synthetic oligonucleotide
gagaacagggacaccaucu

SEQ ID NO: 1805993 - RNA, 19 nt, Artificial Sequence
  Description of Artificial Sequence: Synthetic oligonucleotide
gugcgcaugaaguuccgca

SEQ ID NO: 1805994 - RNA, 19 nt, Artificial Sequence
  Description of Artificial Sequence: Synthetic oligonucleotide
gcguucuggaucugcacgg

SEQ ID NO: 1805995 - RNA, 19 nt, Artificial Sequence
  Description of Artificial Sequence: Synthetic oligonucleotide
cacgcagacuaccauguca

SEQ ID NO: 1805996 - RNA, 19 nt, Artificial Sequence
  Description of Artificial Sequence: Synthetic oligonucleotide
accccagugucccucccag

SEQ ID NO: 1805997 - RNA, 19 nt, Artificial Sequence
  Description of Artificial Sequence: Synthetic oligonucleotide
caggacaaaggcugugguc

SEQ ID NO: 1805998 - RNA, 19 nt, Artificial Sequence
  Description of Artificial Sequence: Synthetic oligonucleotide
ggucaccauacauggugcg

SEQ ID NO: 1805999 - RNA, 19 nt, Artificial Sequence
  Description of Artificial Sequence: Synthetic oligonucleotide
agccgcaugaugcgcggag

SEQ ID NO: 1806000 - RNA, 19 nt, Artificial Sequence
  Description of Artificial Sequence: Synthetic oligonucleotide
gaagccguggaggccgcgg

SEQ ID NO: 1806001 - RNA, 19 nt, Artificial Sequence
  Description of Artificial Sequence: Synthetic oligonucleotide
acauggugcgcaugaaguu

SEQ ID NO: 1806002 - RNA, 19 nt, Artificial Sequence
  Description of Artificial Sequence: Synthetic oligonucleotide
caugugagugugauuccca

SEQ ID NO: 1806003 - RNA, 19 nt, Artificial Sequence
  Description of Artificial Sequence: Synthetic oligonucleotide
cagaccuccgauggcaaag

SEQ ID NO: 1806004 - RNA, 19 nt, Artificial Sequence
  Description of Artificial Sequence: Synthetic oligonucleotide
uggugucuagccagcggac

SEQ ID NO: 1806005 - RNA, 19 nt, Artificial Sequence
  Description of Artificial Sequence: Synthetic oligonucleotide
gugauucccacggaggcca

SEQ ID NO: 1806006 - RNA, 19 nt, Artificial Sequence
  Description of Artificial Sequence: Synthetic oligonucleotide
ccacucagaccuccgaugg

SEQ ID NO: 1806007 - RNA, 19 nt, Artificial Sequence
  Description of Artificial Sequence: Synthetic oligonucleotide
ugucuagccagcggacuga

SEQ ID NO: 1806008 - RNA, 19 nt, Artificial Sequence
  Description of Artificial Sequence: Synthetic oligonucleotide
cuucaacggcccaggcagg

SEQ ID NO: 1806009 - RNA, 19 nt, Artificial Sequence
  Description of Artificial Sequence: Synthetic oligonucleotide
aggcaugaacaccggggug

SEQ ID NO: 1806010 - RNA, 19 nt, Artificial Sequence
  Description of Artificial Sequence: Synthetic oligonucleotide
ggugcuuaacgccaccauc

SEQ ID NO: 1806011 - RNA, 19 nt, Artificial Sequence
  Description of Artificial Sequence: Synthetic oligonucleotide
ccgugugggguauacacag

SEQ ID NO: 1806012 - RNA, 19 nt, Artificial Sequence
  Description of Artificial Sequence: Synthetic oligonucleotide
acagucgaacaugucacau

SEQ ID NO: 1806013 - RNA, 19 nt, Artificial Sequence
  Description of Artificial Sequence: Synthetic oligonucleotide
gucaccauacauggugcgc

SEQ ID NO: 1806014 - RNA, 19 nt, Artificial Sequence
  Description of Artificial Sequence: Synthetic oligonucleotide
acugugcaguagggcaugc

SEQ ID NO: 1806015 - RNA, 19 nt, Artificial Sequence
  Description of Artificial Sequence: Synthetic oligonucleotide
agcagagccaaagcgcgcu

SEQ ID NO: 1806016 - RNA, 19 nt, Artificial Sequence
  Description of Artificial Sequence: Synthetic oligonucleotide
uugugcggccaguccauga

SEQ ID NO: 1806017 - RNA, 19 nt, Artificial Sequence
  Description of Artificial Sequence: Synthetic oligonucleotide
gacugaaauccuuggcaua

SEQ ID NO: 1806018 - RNA, 19 nt, Artificial Sequence
  Description of Artificial Sequence: Synthetic oligonucleotide
uuggccgucguagggcgag

SEQ ID NO: 1806019 - RNA, 19 nt, Artificial Sequence
  Description of Artificial Sequence: Synthetic oligonucleotide
ucuagccagcggacugacc

SEQ ID NO: 1806020 - RNA, 19 nt, Artificial Sequence
  Description of Artificial Sequence: Synthetic oligonucleotide
ugaacaccgggguggccac

SEQ ID NO: 1806021 - RNA, 19 nt, Artificial Sequence
  Description of Artificial Sequence: Synthetic oligonucleotide
ugcuuaacgccaccaucuu

SEQ ID NO: 1806022 - RNA, 19 nt, Artificial Sequence
  Description of Artificial Sequence: Synthetic oligonucleotide
gcagacuaccaugucagug

SEQ ID NO: 1806023 - RNA, 19 nt, Artificial Sequence
  Description of Artificial Sequence: Synthetic oligonucleotide
caugaugcgcggagcggac

SEQ ID NO: 1806024 - RNA, 19 nt, Artificial Sequence
  Description of Artificial Sequence: Synthetic oligonucleotide
gggguauacacagucgaac

SEQ ID NO: 1806025 - RNA, 19 nt, Artificial Sequence
  Description of Artificial Sequence: Synthetic oligonucleotide
accagccgcaugaugcgcg

SEQ ID NO: 1806026 - RNA, 19 nt, Artificial Sequence
  Description of Artificial Sequence: Synthetic oligonucleotide
gaugcgcggagcggacucg

SEQ ID NO: 1806027 - RNA, 19 nt, Artificial Sequence
  Description of Artificial Sequence: Synthetic oligonucleotide
ggucaucucuuucaggcaa

SEQ ID NO: 1806028 - RNA, 19 nt, Artificial Sequence
  Description of Artificial Sequence: Synthetic oligonucleotide
guuccgcacaaagucagga

SEQ ID NO: 1806029 - RNA, 19 nt, Artificial Sequence
  Description of Artificial Sequence: Synthetic oligonucleotide
gcggacucgagcgaagccg

SEQ ID NO: 1806030 - RNA, 19 nt, Artificial Sequence
  Description of Artificial Sequence: Synthetic oligonucleotide
ucgagcgaagccgggcugc

SEQ ID NO: 1806031 - RNA, 19 nt, Artificial Sequence
  Description of Artificial Sequence: Synthetic oligonucleotide
uccaagagccacgcagacu

SEQ ID NO: 1806032 - RNA, 19 nt, Artificial Sequence
  Description of Artificial Sequence: Synthetic oligonucleotide
gacucgagcgaagccgggc

SEQ ID NO: 1806033 - RNA, 19 nt, Artificial Sequence
  Description of Artificial Sequence: Synthetic oligonucleotide
cucuuucaggcaagugguc

SEQ ID NO: 1806034 - RNA, 19 nt, Artificial Sequence
  Description of Artificial Sequence: Synthetic oligonucleotide
uagccagcggacugaccug

SEQ ID NO: 1806035 - RNA, 19 nt, Artificial Sequence
  Description of Artificial Sequence: Synthetic oligonucleotide
agaucggcauucaguccac

SEQ ID NO: 1806036 - RNA, 19 nt, Artificial Sequence
  Description of Artificial Sequence: Synthetic oligonucleotide
aguuccgcacaaagucagg

SEQ ID NO: 1806037 - RNA, 19 nt, Artificial Sequence
  Description of Artificial Sequence: Synthetic oligonucleotide
gagccaaagcgcgcugucc

SEQ ID NO: 1806038 - RNA, 19 nt, Artificial Sequence
  Description of Artificial Sequence: Synthetic oligonucleotide
uaccccagugucccuccca

SEQ ID NO: 1806039 - RNA, 19 nt, Artificial Sequence
  Description of Artificial Sequence: Synthetic oligonucleotide
caucuggaagccgccacug

SEQ ID NO: 1806040 - RNA, 19 nt, Artificial Sequence
  Description of Artificial Sequence: Synthetic oligonucleotide
auacacagucgaacauguc

SEQ ID NO: 1806041 - RNA, 19 nt, Artificial Sequence
  Description of Artificial Sequence: Synthetic oligonucleotide
uucccacggaggccagugc

SEQ ID NO: 1806042 - RNA, 19 nt, Artificial Sequence
  Description of Artificial Sequence: Synthetic oligonucleotide
cuccgauggcaaagccugg

SEQ ID NO: 1806043 - RNA, 19 nt, Artificial Sequence
  Description of Artificial Sequence: Synthetic oligonucleotide
agcggacugaccugugcau

SEQ ID NO: 1806044 - RNA, 19 nt, Artificial Sequence
  Description of Artificial Sequence: Synthetic oligonucleotide
aggugcuuaacgccaccau

SEQ ID NO: 1806045 - RNA, 19 nt, Artificial Sequence
  Description of Artificial Sequence: Synthetic oligonucleotide
cugcuucgaagguugcuca

SEQ ID NO: 1806046 - RNA, 19 nt, Artificial Sequence
  Description of Artificial Sequence: Synthetic oligonucleotide
gcuucgaagguugcucagg

SEQ ID NO: 1806047 - RNA, 19 nt, Artificial Sequence
  Description of Artificial Sequence: Synthetic oligonucleotide
cacucagaccuccgauggc

SEQ ID NO: 1806048 - RNA, 19 nt, Artificial Sequence
  Description of Artificial Sequence: Synthetic oligonucleotide
acuguccgugaggagguug

SEQ ID NO: 1806049 - RNA, 19 nt, Artificial Sequence
  Description of Artificial Sequence: Synthetic oligonucleotide
agcgcgcuguccguguggg

SEQ ID NO: 1806050 - RNA, 19 nt, Artificial Sequence
  Description of Artificial Sequence: Synthetic oligonucleotide
ggcaaccaggucaugugag

SEQ ID NO: 1806051 - RNA, 19 nt, Artificial Sequence
  Description of Artificial Sequence: Synthetic oligonucleotide
aucuggaagccgccacugu

SEQ ID NO: 1806052 - RNA, 19 nt, Artificial Sequence
  Description of Artificial Sequence: Synthetic oligonucleotide
agguguugcccaggcagag

SEQ ID NO: 1806053 - RNA, 19 nt, Artificial Sequence
  Description of Artificial Sequence: Synthetic oligonucleotide
auggcaaagccuggcacau

SEQ ID NO: 1806054 - RNA, 19 nt, Artificial Sequence
  Description of Artificial Sequence: Synthetic oligonucleotide
cgcagaucggcauucaguc

SEQ ID NO: 1806055 - RNA, 19 nt, Artificial Sequence
  Description of Artificial Sequence: Synthetic oligonucleotide
gcauucggccaccagccgc

SEQ ID NO: 1806056 - RNA, 19 nt, Artificial Sequence
  Description of Artificial Sequence: Synthetic oligonucleotide
uggugcagugccgcggugu

SEQ ID NO: 1806057 - RNA, 19 nt, Artificial Sequence
  Description of Artificial Sequence: Synthetic oligonucleotide
gagcggacucgagcgaagc

SEQ ID NO: 1806058 - RNA, 19 nt, Artificial Sequence
  Description of Artificial Sequence: Synthetic oligonucleotide
cacagucgaacaugucaca

SEQ ID NO: 1806059 - RNA, 19 nt, Artificial Sequence
  Description of Artificial Sequence: Synthetic oligonucleotide
guagggcgagcggaagcgg

SEQ ID NO: 1806060 - RNA, 19 nt, Artificial Sequence
  Description of Artificial Sequence: Synthetic oligonucleotide
gggacacucagaguuuaug

SEQ ID NO: 1806061 - RNA, 19 nt, Artificial Sequence
  Description of Artificial Sequence: Synthetic oligonucleotide
ugccgcgguguugucacug

SEQ ID NO: 1806062 - RNA, 19 nt, Artificial Sequence
  Description of Artificial Sequence: Synthetic oligonucleotide
ugucccucccaggcaacca

SEQ ID NO: 1806063 - RNA, 19 nt, Artificial Sequence
  Description of Artificial Sequence: Synthetic oligonucleotide
agcaucucuuggccgucgu

SEQ ID NO: 1806064 - RNA, 19 nt, Artificial Sequence
  Description of Artificial Sequence: Synthetic oligonucleotide
gucaccucggacagggaga

SEQ ID NO: 1806065 - RNA, 19 nt, Artificial Sequence
  Description of Artificial Sequence: Synthetic oligonucleotide
gcagaucggcauucagucc

SEQ ID NO: 1806066 - RNA, 19 nt, Artificial Sequence
  Description of Artificial Sequence: Synthetic oligonucleotide
agggcgagcggaagcggac

SEQ ID NO: 1806067 - RNA, 19 nt, Artificial Sequence
  Description of Artificial Sequence: Synthetic oligonucleotide
ugguccgcagaucggcauu

SEQ ID NO: 1806068 - RNA, 19 nt, Artificial Sequence
  Description of Artificial Sequence: Synthetic oligonucleotide
cgcggagcggacucgagcg

SEQ ID NO: 1806069 - RNA, 19 nt, Artificial Sequence
  Description of Artificial Sequence: Synthetic oligonucleotide
ugcgcggagcggacucgag

SEQ ID NO: 1806070 - RNA, 19 nt, Artificial Sequence
  Description of Artificial Sequence: Synthetic oligonucleotide
ggcgcggcugugcuuuugg

SEQ ID NO: 1806071 - RNA, 19 nt, Artificial Sequence
  Description of Artificial Sequence: Synthetic oligonucleotide
uguccgugugggguauaca

SEQ ID NO: 1806072 - RNA, 19 nt, Artificial Sequence
  Description of Artificial Sequence: Synthetic oligonucleotide
cagcggacugaccugugca

SEQ ID NO: 1806073 - RNA, 19 nt, Artificial Sequence
  Description of Artificial Sequence: Synthetic oligonucleotide
cucgagcgaagccgggcug

SEQ ID NO: 1806074 - RNA, 19 nt, Artificial Sequence
  Description of Artificial Sequence: Synthetic oligonucleotide
ggacugaaauccuuggcau

SEQ ID NO: 1806075 - RNA, 19 nt, Artificial Sequence
  Description of Artificial Sequence: Synthetic oligonucleotide
gagcagagccaaagcgcgc

SEQ ID NO: 1806076 - RNA, 19 nt, Artificial Sequence
  Description of Artificial Sequence: Synthetic oligonucleotide
ccauacauggugcgcauga

SEQ ID NO: 1806077 - RNA, 19 nt, Artificial Sequence
  Description of Artificial Sequence: Synthetic oligonucleotide
caacggcccaggcaggaca

SEQ ID NO: 1806078 - RNA, 19 nt, Artificial Sequence
  Description of Artificial Sequence: Synthetic oligonucleotide
aacggcccaggcaggacaa

SEQ ID NO: 1806079 - RNA, 19 nt, Artificial Sequence
  Description of Artificial Sequence: Synthetic oligonucleotide
gaucggcauucaguccacc

SEQ ID NO: 1806080 - RNA, 19 nt, Artificial Sequence
  Description of Artificial Sequence: Synthetic oligonucleotide
ucaacggcccaggcaggac

SEQ ID NO: 1806081 - RNA, 19 nt, Artificial Sequence
  Description of Artificial Sequence: Synthetic oligonucleotide
uguccgugaggagguugug

SEQ ID NO: 1806082 - RNA, 19 nt, Artificial Sequence
  Description of Artificial Sequence: Synthetic oligonucleotide
gacgcccuccuccgucacc

SEQ ID NO: 1806083 - RNA, 19 nt, Artificial Sequence
  Description of Artificial Sequence: Synthetic oligonucleotide
cagaguuuaugggacugaa

SEQ ID NO: 1806084 - RNA, 19 nt, Artificial Sequence
  Description of Artificial Sequence: Synthetic oligonucleotide
guagggcaugcaggaaggc

SEQ ID NO: 1806085 - RNA, 19 nt, Artificial Sequence
  Description of Artificial Sequence: Synthetic oligonucleotide
gguguugcccaggcagagg

SEQ ID NO: 1806086 - RNA, 19 nt, Artificial Sequence
  Description of Artificial Sequence: Synthetic oligonucleotide
ucaguccacccuggugucu

SEQ ID NO: 1806087 - RNA, 19 nt, Artificial Sequence
  Description of Artificial Sequence: Synthetic oligonucleotide
acgccaccaucuuccagaa

SEQ ID NO: 1806088 - RNA, 19 nt, Artificial Sequence
  Description of Artificial Sequence: Synthetic oligonucleotide
ugccgugcggcagccgcag

SEQ ID NO: 1806089 - RNA, 19 nt, Artificial Sequence
  Description of Artificial Sequence: Synthetic oligonucleotide
caggcaugaacaccggggu

SEQ ID NO: 1806090 - RNA, 19 nt, Artificial Sequence
  Description of Artificial Sequence: Synthetic oligonucleotide
aagccgccacuguccguga

SEQ ID NO: 1806091 - RNA, 19 nt, Artificial Sequence
  Description of Artificial Sequence: Synthetic oligonucleotide
gucguagggcgagcggaag

SEQ ID NO: 1806092 - RNA, 19 nt, Artificial Sequence
  Description of Artificial Sequence: Synthetic oligonucleotide
cuccgggcucaacagcauc

SEQ ID NO: 1806093 - RNA, 19 nt, Artificial Sequence
  Description of Artificial Sequence: Synthetic oligonucleotide
ccuccgucaccucggacag

SEQ ID NO: 1806094 - RNA, 19 nt, Artificial Sequence
  Description of Artificial Sequence: Synthetic oligonucleotide
ccgcaugaugcgcggagcg

SEQ ID NO: 1806095 - RNA, 19 nt, Artificial Sequence
  Description of Artificial Sequence: Synthetic oligonucleotide
agccagcggacugaccugu

SEQ ID NO: 1806096 - RNA, 19 nt, Artificial Sequence
  Description of Artificial Sequence: Synthetic oligonucleotide
gggcaugcaggaaggcgcg

SEQ ID NO: 1806097 - RNA, 19 nt, Artificial Sequence
  Description of Artificial Sequence: Synthetic oligonucleotide
guaucugggcuuguccuua

SEQ ID NO: 1806098 - RNA, 19 nt, Artificial Sequence
  Description of Artificial Sequence: Synthetic oligonucleotide
agugguccgcagaucggca

SEQ ID NO: 1806099 - RNA, 19 nt, Artificial Sequence
  Description of Artificial Sequence: Synthetic oligonucleotide
cuguccgugugggguauac

SEQ ID NO: 1806100 - RNA, 19 nt, Artificial Sequence
  Description of Artificial Sequence: Synthetic oligonucleotide
gugcuucaacggcccaggc

SEQ ID NO: 1806101 - RNA, 19 nt, Artificial Sequence
  Description of Artificial Sequence: Synthetic oligonucleotide
gcggccaguccaugaagcc

SEQ ID NO: 1806102 - RNA, 19 nt, Artificial Sequence
  Description of Artificial Sequence: Synthetic oligonucleotide
gaacuguuccuugcucucu

SEQ ID NO: 1806103 - RNA, 19 nt, Artificial Sequence
  Description of Artificial Sequence: Synthetic oligonucleotide
gcagaggcggcaacccagg

SEQ ID NO: 1806104 - RNA, 19 nt, Artificial Sequence
  Description of Artificial Sequence: Synthetic oligonucleotide
cacuaccccagugucccuc

SEQ ID NO: 1806105 - RNA, 19 nt, Artificial Sequence
  Description of Artificial Sequence: Synthetic oligonucleotide
aggcaggacaaaggcugug

SEQ ID NO: 1806106 - RNA, 19 nt, Artificial Sequence
  Description of Artificial Sequence: Synthetic oligonucleotide
cuaccccagugucccuccc

SEQ ID NO: 1806107 - RNA, 19 nt, Artificial Sequence
  Description of Artificial Sequence: Synthetic oligonucleotide
gcaacccaggccgugcagc

SEQ ID NO: 1806108 - RNA, 19 nt, Artificial Sequence
  Description of Artificial Sequence: Synthetic oligonucleotide
cggacucgagcgaagccgg

SEQ ID NO: 1806109 - RNA, 19 nt, Artificial Sequence
  Description of Artificial Sequence: Synthetic oligonucleotide
cguagggcgagcggaagcg

SEQ ID NO: 1806110 - RNA, 19 nt, Artificial Sequence
  Description of Artificial Sequence: Synthetic oligonucleotide
gacuaccaugucaguggca

SEQ ID NO: 1806111 - RNA, 19 nt, Artificial Sequence
  Description of Artificial Sequence: Synthetic oligonucleotide
ggcgagcggaagcggacgc

SEQ ID NO: 1806112 - RNA, 19 nt, Artificial Sequence
  Description of Artificial Sequence: Synthetic oligonucleotide
agccgccacuguccgugag

SEQ ID NO: 1806113 - RNA, 19 nt, Artificial Sequence
  Description of Artificial Sequence: Synthetic oligonucleotide
cgcgguguugucacugugc

SEQ ID NO: 1806114 - RNA, 19 nt, Artificial Sequence
  Description of Artificial Sequence: Synthetic oligonucleotide
auggugcagugccgcggug

SEQ ID NO: 1806115 - RNA, 19 nt, Artificial Sequence
  Description of Artificial Sequence: Synthetic oligonucleotide
augaugcgcggagcggacu

SEQ ID NO: 1806116 - RNA, 19 nt, Artificial Sequence
  Description of Artificial Sequence: Synthetic oligonucleotide
guugugcggccaguccaug

SEQ ID NO: 1806117 - RNA, 19 nt, Artificial Sequence
  Description of Artificial Sequence: Synthetic oligonucleotide
gggacaccaucuggaagcc

SEQ ID NO: 1806118 - RNA, 19 nt, Artificial Sequence
  Description of Artificial Sequence: Synthetic oligonucleotide
cauacauggugcgcaugaa

SEQ ID NO: 1806119 - RNA, 19 nt, Artificial Sequence
  Description of Artificial Sequence: Synthetic oligonucleotide
gcaugaugcgcggagcgga

SEQ ID NO: 1806120 - RNA, 19 nt, Artificial Sequence
  Description of Artificial Sequence: Synthetic oligonucleotide
gcgcaugaaguuccgcaca

SEQ ID NO: 1806121 - RNA, 19 nt, Artificial Sequence
  Description of Artificial Sequence: Synthetic oligonucleotide
ccgugaggagguugugcgg

SEQ ID NO: 1806122 - RNA, 19 nt, Artificial Sequence
  Description of Artificial Sequence: Synthetic oligonucleotide
ggcagcauggaggugcuua

SEQ ID NO: 1806123 - RNA, 19 nt, Artificial Sequence
  Description of Artificial Sequence: Synthetic oligonucleotide
ccagccgcaugaugcgcgg

SEQ ID NO: 1806124 - RNA, 19 nt, Artificial Sequence
  Description of Artificial Sequence: Synthetic oligonucleotide
ccucuuggucaucucuuuc

SEQ ID NO: 1806125 - RNA, 19 nt, Artificial Sequence
  Description of Artificial Sequence: Synthetic oligonucleotide
ccagcggacugaccugugc

SEQ ID NO: 1806126 - RNA, 19 nt, Artificial Sequence
  Description of Artificial Sequence: Synthetic oligonucleotide
ccgggguggccacagugcc

SEQ ID NO: 1806127 - RNA, 19 nt, Artificial Sequence
  Description of Artificial Sequence: Synthetic oligonucleotide
gcagcauggaggugcuuaa

SEQ ID NO: 1806128 - RNA, 19 nt, Artificial Sequence
  Description of Artificial Sequence: Synthetic oligonucleotide
ccacaggcaugaacaccgg

SEQ ID NO: 1806129 - RNA, 19 nt, Artificial Sequence
  Description of Artificial Sequence: Synthetic oligonucleotide
ccccacuaccccagugucc

SEQ ID NO: 1806130 - RNA, 19 nt, Artificial Sequence
  Description of Artificial Sequence: Synthetic oligonucleotide
gccgucguagggcgagcgg

SEQ ID NO: 1806131 - RNA, 19 nt, Artificial Sequence
  Description of Artificial Sequence: Synthetic oligonucleotide
caggaaagcgcugcuccaa

SEQ ID NO: 1806132 - RNA, 19 nt, Artificial Sequence
  Description of Artificial Sequence: Synthetic oligonucleotide
gggcgagcggaagcggacg

SEQ ID NO: 1806133 - RNA, 19 nt, Artificial Sequence
  Description of Artificial Sequence: Synthetic oligonucleotide
ggugcgcaugaaguuccgc

SEQ ID NO: 1806134 - RNA, 19 nt, Artificial Sequence
  Description of Artificial Sequence: Synthetic oligonucleotide
gcggacugaccugugcaug

SEQ ID NO: 1806135 - RNA, 19 nt, Artificial Sequence
  Description of Artificial Sequence: Synthetic oligonucleotide
cagguucccagugggcaca

SEQ ID NO: 1806136 - RNA, 19 nt, Artificial Sequence
  Description of Artificial Sequence: Synthetic oligonucleotide
cugcuccgccgugaugccc

SEQ ID NO: 1806137 - RNA, 19 nt, Artificial Sequence
  Description of Artificial Sequence: Synthetic oligonucleotide
gcgcggagcggacucgagc

SEQ ID NO: 1806138 - RNA, 19 nt, Artificial Sequence
  Description of Artificial Sequence: Synthetic oligonucleotide
acggaccucuccgggcuca

SEQ ID NO: 1806139 - RNA, 19 nt, Artificial Sequence
  Description of Artificial Sequence: Synthetic oligonucleotide
gaucagcuccgggcccggc

SEQ ID NO: 1806140 - RNA, 19 nt, Artificial Sequence
  Description of Artificial Sequence: Synthetic oligonucleotide
cuccuccgucaccucggac

SEQ ID NO: 1806141 - RNA, 19 nt, Artificial Sequence
  Description of Artificial Sequence: Synthetic oligonucleotide
guccacccuggugucuagc

SEQ ID NO: 1806142 - RNA, 19 nt, Artificial Sequence
  Description of Artificial Sequence: Synthetic oligonucleotide
caaagcgcgcuguccgugu

SEQ ID NO: 1806143 - RNA, 19 nt, Artificial Sequence
  Description of Artificial Sequence: Synthetic oligonucleotide
cacauccaagagccacgca

SEQ ID NO: 1806144 - RNA, 19 nt, Artificial Sequence
  Description of Artificial Sequence: Synthetic oligonucleotide
uggcaaagccuggcacauc

SEQ ID NO: 1806145 - RNA, 19 nt, Artificial Sequence
  Description of Artificial Sequence: Synthetic oligonucleotide
ggagcggacucgagcgaag

SEQ ID NO: 1806146 - RNA, 19 nt, Artificial Sequence
  Description of Artificial Sequence: Synthetic oligonucleotide
caacccaggccgugcagcu

SEQ ID NO: 1806147 - RNA, 19 nt, Artificial Sequence
  Description of Artificial Sequence: Synthetic oligonucleotide
cuaccaugucaguggcaua

SEQ ID NO: 1806148 - RNA, 19 nt, Artificial Sequence
  Description of Artificial Sequence: Synthetic oligonucleotide
ggccgucguagggcgagcg

SEQ ID NO: 1806149 - RNA, 19 nt, Artificial Sequence
  Description of Artificial Sequence: Synthetic oligonucleotide
cuuggccgucguagggcga

SEQ ID NO: 1806150 - RNA, 19 nt, Artificial Sequence
  Description of Artificial Sequence: Synthetic oligonucleotide
aaggcgcggcugugcuuuu

SEQ ID NO: 1806151 - RNA, 19 nt, Artificial Sequence
  Description of Artificial Sequence: Synthetic oligonucleotide
ggcaugcaggaaggcgcgg

SEQ ID NO: 1806152 - RNA, 19 nt, Artificial Sequence
  Description of Artificial Sequence: Synthetic oligonucleotide
gguccgcagaucggcauuc

SEQ ID NO: 1806153 - RNA, 19 nt, Artificial Sequence
  Description of Artificial Sequence: Synthetic oligonucleotide
cagggacacucagaguuua

SEQ ID NO: 1806154 - RNA, 19 nt, Artificial Sequence
  Description of Artificial Sequence: Synthetic oligonucleotide
cggccaguccaugaagccg

SEQ ID NO: 1806155 - RNA, 19 nt, Artificial Sequence
  Description of Artificial Sequence: Synthetic oligonucleotide
augcgcggagcggacucga

SEQ ID NO: 1806156 - RNA, 19 nt, Artificial Sequence
  Description of Artificial Sequence: Synthetic oligonucleotide
ggacucgagcgaagccggg

SEQ ID NO: 1806157 - RNA, 19 nt, Artificial Sequence
  Description of Artificial Sequence: Synthetic oligonucleotide
agggacacucagaguuuau

SEQ ID NO: 1806158 - RNA, 19 nt, Artificial Sequence
  Description of Artificial Sequence: Synthetic oligonucleotide
gccgcgggccuucuggauc

SEQ ID NO: 1806159 - RNA, 19 nt, Artificial Sequence
  Description of Artificial Sequence: Synthetic oligonucleotide
ggccaguccaugaagccgu

SEQ ID NO: 1806160 - RNA, 19 nt, Artificial Sequence
  Description of Artificial Sequence: Synthetic oligonucleotide
cuccgucaccucggacagg

SEQ ID NO: 1806161 - RNA, 19 nt, Artificial Sequence
  Description of Artificial Sequence: Synthetic oligonucleotide
cugugcaguagggcaugca

SEQ ID NO: 1806162 - RNA, 19 nt, Artificial Sequence
  Description of Artificial Sequence: Synthetic oligonucleotide
ccaaagcgcgcuguccgug

SEQ ID NO: 1806163 - RNA, 19 nt, Artificial Sequence
  Description of Artificial Sequence: Synthetic oligonucleotide
ucgcccgcccgggcucugg

SEQ ID NO: 1806164 - RNA, 19 nt, Artificial Sequence
  Description of Artificial Sequence: Synthetic oligonucleotide
gccacugcauucggccacc

SEQ ID NO: 1806165 - RNA, 19 nt, Artificial Sequence
  Description of Artificial Sequence: Synthetic oligonucleotide
cgagcggaagcggacgccc

SEQ ID NO: 1806166 - RNA, 19 nt, Artificial Sequence
  Description of Artificial Sequence: Synthetic oligonucleotide
uggccgucguagggcgagc

SEQ ID NO: 1806167 - RNA, 19 nt, Artificial Sequence
  Description of Artificial Sequence: Synthetic oligonucleotide
gccgcaugaugcgcggagc

SEQ ID NO: 1806168 - RNA, 19 nt, Artificial Sequence
  Description of Artificial Sequence: Synthetic oligonucleotide
ggaucagcuccgggcccgg

SEQ ID NO: 1806169 - RNA, 19 nt, Artificial Sequence
  Description of Artificial Sequence: Synthetic oligonucleotide
gugguccgcagaucggcau

SEQ ID NO: 1806170 - RNA, 19 nt, Artificial Sequence
  Description of Artificial Sequence: Synthetic oligonucleotide
caguccacccuggugucua

SEQ ID NO: 1806171 - RNA, 19 nt, Artificial Sequence
  Description of Artificial Sequence: Synthetic oligonucleotide
cagugccgcgguguuguca

SEQ ID NO: 1806172 - RNA, 19 nt, Artificial Sequence
  Description of Artificial Sequence: Synthetic oligonucleotide
ggugucuagccagcggacu

SEQ ID NO: 1806173 - RNA, 19 nt, Artificial Sequence
  Description of Artificial Sequence: Synthetic oligonucleotide
gaacaccgggguggccaca

SEQ ID NO: 1806174 - RNA, 19 nt, Artificial Sequence
  Description of Artificial Sequence: Synthetic oligonucleotide
cgcaugaugcgcggagcgg

SEQ ID NO: 1806175 - RNA, 19 nt, Artificial Sequence
  Description of Artificial Sequence: Synthetic oligonucleotide
caccauacauggugcgcau

SEQ ID NO: 1806176 - RNA, 19 nt, Artificial Sequence
  Description of Artificial Sequence: Synthetic oligonucleotide
gcggcaacccaggccgugc

SEQ ID NO: 1806177 - RNA, 19 nt, Artificial Sequence
  Description of Artificial Sequence: Synthetic oligonucleotide
gggguggccacagugccgu

SEQ ID NO: 1806178 - RNA, 19 nt, Artificial Sequence
  Description of Artificial Sequence: Synthetic oligonucleotide
aggcgcggcugugcuuuug

SEQ ID NO: 1806179 - RNA, 19 nt, Artificial Sequence
  Description of Artificial Sequence: Synthetic oligonucleotide
gaccugugcauggccuccu

SEQ ID NO: 1806180 - RNA, 19 nt, Artificial Sequence
  Description of Artificial Sequence: Synthetic oligonucleotide
gauucccacggaggccagu

SEQ ID NO: 1806181 - RNA, 19 nt, Artificial Sequence
  Description of Artificial Sequence: Synthetic oligonucleotide
ccgcagaucggcauucagu

SEQ ID NO: 1806182 - RNA, 19 nt, Artificial Sequence
  Description of Artificial Sequence: Synthetic oligonucleotide
ggacagggacacucagagu

SEQ ID NO: 1806183 - RNA, 19 nt, Artificial Sequence
  Description of Artificial Sequence: Synthetic oligonucleotide
cgggguggccacagugccg

SEQ ID NO: 1806184 - RNA, 19 nt, Artificial Sequence
  Description of Artificial Sequence: Synthetic oligonucleotide
cgccgugaugcccuucaug

SEQ ID NO: 1806185 - RNA, 19 nt, Artificial Sequence
  Description of Artificial Sequence: Synthetic oligonucleotide
cagugccgugcggcagccg

SEQ ID NO: 1806186 - RNA, 19 nt, Artificial Sequence
  Description of Artificial Sequence: Synthetic oligonucleotide
cacaucccucuuggucauc

SEQ ID NO: 1806187 - RNA, 19 nt, Artificial Sequence
  Description of Artificial Sequence: Synthetic oligonucleotide
cccagggcguucuggaucu

SEQ ID NO: 1806188 - RNA, 19 nt, Artificial Sequence
  Description of Artificial Sequence: Synthetic oligonucleotide
ccgucguagggcgagcgga

SEQ ID NO: 1806189 - RNA, 19 nt, Artificial Sequence
  Description of Artificial Sequence: Synthetic oligonucleotide
gccgugcagcugcuccgcc

SEQ ID NO: 1806190 - RNA, 19 nt, Artificial Sequence
  Description of Artificial Sequence: Synthetic oligonucleotide
gcaugaaguuccgcacaaa

SEQ ID NO: 1806191 - RNA, 19 nt, Artificial Sequence
  Description of Artificial Sequence: Synthetic oligonucleotide
gcauucaguccacccuggu

SEQ ID NO: 1806192 - RNA, 19 nt, Artificial Sequence
  Description of Artificial Sequence: Synthetic oligonucleotide
ccacgcagacuaccauguc

SEQ ID NO: 1806193 - RNA, 19 nt, Artificial Sequence
  Description of Artificial Sequence: Synthetic oligonucleotide
ccgcgggccuucuggauca

SEQ ID NO: 1806194 - RNA, 19 nt, Artificial Sequence
  Description of Artificial Sequence: Synthetic oligonucleotide
ggcggcaacccaggccgug

SEQ ID NO: 1806195 - RNA, 19 nt, Artificial Sequence
  Description of Artificial Sequence: Synthetic oligonucleotide
ccacuguccgugaggaggu

SEQ ID NO: 1806196 - RNA, 19 nt, Artificial Sequence
  Description of Artificial Sequence: Synthetic oligonucleotide
gcgcugcuccaagaugcug

SEQ ID NO: 1806197 - RNA, 19 nt, Artificial Sequence
  Description of Artificial Sequence: Synthetic oligonucleotide
gcaucucuuggccgucgua

SEQ ID NO: 1806198 - RNA, 19 nt, Artificial Sequence
  Description of Artificial Sequence: Synthetic oligonucleotide
ggacgcccuccuccgucac

SEQ ID NO: 1806199 - RNA, 19 nt, Artificial Sequence
  Description of Artificial Sequence: Synthetic oligonucleotide
gguucccagugggcacaag

SEQ ID NO: 1806200 - RNA, 19 nt, Artificial Sequence
  Description of Artificial Sequence: Synthetic oligonucleotide
ccaggcaaccaggucaugu

SEQ ID NO: 1806201 - RNA, 19 nt, Artificial Sequence
  Description of Artificial Sequence: Synthetic oligonucleotide
ccgcgguguugucacugug

SEQ ID NO: 1806202 - RNA, 19 nt, Artificial Sequence
  Description of Artificial Sequence: Synthetic oligonucleotide
gugccgugcggcagccgca

SEQ ID NO: 1806203 - RNA, 19 nt, Artificial Sequence
  Description of Artificial Sequence: Synthetic oligonucleotide
gcaguagggcaugcaggaa

SEQ ID NO: 1806204 - RNA, 19 nt, Artificial Sequence
  Description of Artificial Sequence: Synthetic oligonucleotide
gcggagcggacucgagcga

SEQ ID NO: 1806205 - RNA, 19 nt, Artificial Sequence
  Description of Artificial Sequence: Synthetic oligonucleotide
gcgcgcuguccgugugggg

SEQ ID NO: 1806206 - RNA, 19 nt, Artificial Sequence
  Description of Artificial Sequence: Synthetic oligonucleotide
gguugugcggccaguccau

SEQ ID NO: 1806207 - RNA, 19 nt, Artificial Sequence
  Description of Artificial Sequence: Synthetic oligonucleotide
gccaaagcgcgcuguccgu

SEQ ID NO: 1806208 - RNA, 19 nt, Artificial Sequence
  Description of Artificial Sequence: Synthetic oligonucleotide
gcacaucccucuuggucau

SEQ ID NO: 1806209 - RNA, 19 nt, Artificial Sequence
  Description of Artificial Sequence: Synthetic oligonucleotide
gcccgcccgggcucuggag

SEQ ID NO: 1806210 - RNA, 19 nt, Artificial Sequence
  Description of Artificial Sequence: Synthetic oligonucleotide
acggcccaggcaggacaaa

SEQ ID NO: 1806211 - RNA, 19 nt, Artificial Sequence
  Description of Artificial Sequence: Synthetic oligonucleotide
gcgcuguccguguggggua

SEQ ID NO: 1806212 - RNA, 19 nt, Artificial Sequence
  Description of Artificial Sequence: Synthetic oligonucleotide
aggcggcaacccaggccgu

SEQ ID NO: 1806213 - RNA, 19 nt, Artificial Sequence
  Description of Artificial Sequence: Synthetic oligonucleotide
gccagcggacugaccugug

SEQ ID NO: 1806214 - RNA, 19 nt, Artificial Sequence
  Description of Artificial Sequence: Synthetic oligonucleotide
cgagcgaagccgggcugcc

SEQ ID NO: 1806215 - RNA, 19 nt, Artificial Sequence
  Description of Artificial Sequence: Synthetic oligonucleotide
cagccgcaugaugcgcgga

SEQ ID NO: 1806216 - RNA, 19 nt, Artificial Sequence
  Description of Artificial Sequence: Synthetic oligonucleotide
cagcucgcccgcccgggcu

SEQ ID NO: 1806217 - RNA, 19 nt, Artificial Sequence
  Description of Artificial Sequence: Synthetic oligonucleotide
cuccgccgugaugcccuuc

SEQ ID NO: 1806218 - RNA, 19 nt, Artificial Sequence
  Description of Artificial Sequence: Synthetic oligonucleotide
gccgcgguguugucacugu

SEQ ID NO: 1806219 - RNA, 19 nt, Artificial Sequence
  Description of Artificial Sequence: Synthetic oligonucleotide
cgucguagggcgagcggaa

SEQ ID NO: 1806220 - RNA, 19 nt, Artificial Sequence
  Description of Artificial Sequence: Synthetic oligonucleotide
ggaagccgccacuguccgu

SEQ ID NO: 1806221 - RNA, 19 nt, Artificial Sequence
  Description of Artificial Sequence: Synthetic oligonucleotide
gccgugcggcagccgcagc

SEQ ID NO: 1806222 - RNA, 19 nt, Artificial Sequence
  Description of Artificial Sequence: Synthetic oligonucleotide
ccgugaugcccuucauggu

SEQ ID NO: 1806223 - RNA, 19 nt, Artificial Sequence
  Description of Artificial Sequence: Synthetic oligonucleotide
cgaagccgggcugcccgcc

SEQ ID NO: 1806224 - RNA, 19 nt, Artificial Sequence
  Description of Artificial Sequence: Synthetic oligonucleotide
ggaaggcgcggcugugcuu

SEQ ID NO: 1806225 - RNA, 19 nt, Artificial Sequence
  Description of Artificial Sequence: Synthetic oligonucleotide
cggacgcccuccuccguca

SEQ ID NO: 1806226 - RNA, 19 nt, Artificial Sequence
  Description of Artificial Sequence: Synthetic oligonucleotide
gugccgcgguguugucacu

SEQ ID NO: 1806227 - RNA, 19 nt, Artificial Sequence
  Description of Artificial Sequence: Synthetic oligonucleotide
ccgugcggcagccgcagcu

SEQ ID NO: 1806228 - RNA, 19 nt, Artificial Sequence
  Description of Artificial Sequence: Synthetic oligonucleotide
cucgcccgcccgggcucug

SEQ ID NO: 1806229 - RNA, 19 nt, Artificial Sequence
  Description of Artificial Sequence: Synthetic oligonucleotide
cgcgcuguccguguggggu

SEQ ID NO: 1806230 - RNA, 19 nt, Artificial Sequence
  Description of Artificial Sequence: Synthetic oligonucleotide
ggccgcgggccuucuggau

SEQ ID NO: 1806231 - RNA, 19 nt, Artificial Sequence
  Description of Artificial Sequence: Synthetic oligonucleotide
ccgucaccucggacaggga

SEQ ID NO: 1806232 - RNA, 19 nt, Artificial Sequence
  Description of Artificial Sequence: Synthetic oligonucleotide
cgcagacuaccaugucagu

SEQ ID NO: 1806233 - RNA, 19 nt, Artificial Sequence
  Description of Artificial Sequence: Synthetic oligonucleotide
cacuguccgugaggagguu

SEQ ID NO: 1806234 - RNA, 19 nt, Artificial Sequence
  Description of Artificial Sequence: Synthetic oligonucleotide
ccacuaccccagugucccu

SEQ ID NO: 1806235 - RNA, 19 nt, Artificial Sequence
  Description of Artificial Sequence: Synthetic oligonucleotide
cgcgggccuucuggaucag

SEQ ID NO: 1806236 - RNA, 19 nt, Artificial Sequence
  Description of Artificial Sequence: Synthetic oligonucleotide
cccaggccgugcagcugcu

SEQ ID NO: 1806237 - RNA, 19 nt, Artificial Sequence
  Description of Artificial Sequence: Synthetic oligonucleotide
gcucgcccgcccgggcucu

SEQ ID NO: 1806238 - RNA, 19 nt, Artificial Sequence
  Description of Artificial Sequence: Synthetic oligonucleotide
cgcccgcccgggcucugga

SEQ ID NO: 1806239 - RNA, 19 nt, Artificial Sequence
  Description of Artificial Sequence: Synthetic oligonucleotide
ccgccgugaugcccuucau

SEQ ID NO: 1806240 - RNA, 19 nt, Artificial Sequence
  Description of Artificial Sequence: Synthetic oligonucleotide
cgcuguccgugugggguau

SEQ ID NO: 1806241 - RNA, 19 nt, Artificial Sequence
  Description of Artificial Sequence: Synthetic oligonucleotide
auaaggaucaaauauacac

SEQ ID NO: 1806242 - RNA, 19 nt, Artificial Sequence
  Description of Artificial Sequence: Synthetic oligonucleotide
aaaaguaacauucucuuuc

SEQ ID NO: 1806243 - RNA, 19 nt, Artificial Sequence
  Description of Artificial Sequence: Synthetic oligonucleotide
aauucauaguaauauacac

SEQ ID NO: 1806244 - RNA, 19 nt, Artificial Sequence
  Description of Artificial Sequence: Synthetic oligonucleotide
aaugcuaaucaucaacacc

SEQ ID NO: 1806245 - RNA, 19 nt, Artificial Sequence
  Description of Artificial Sequence: Synthetic oligonucleotide
aauuacaauaagcauaaca

SEQ ID NO: 1806246 - RNA, 19 nt, Artificial Sequence
  Description of Artificial Sequence: Synthetic oligonucleotide
acaauuuacauuaauagac

SEQ ID NO: 1806247 - RNA, 19 nt, Artificial Sequence
  Description of Artificial Sequence: Synthetic oligonucleotide
uauuuauaggaaaaugagg

SEQ ID NO: 1806248 - RNA, 19 nt, Artificial Sequence
  Description of Artificial Sequence: Synthetic oligonucleotide
aaaguucauacccagagug

SEQ ID NO: 1806249 - RNA, 19 nt, Artificial Sequence
  Description of Artificial Sequence: Synthetic oligonucleotide
ucucaauaaagaaacaaag

SEQ ID NO: 1806250 - RNA, 19 nt, Artificial Sequence
  Description of Artificial Sequence: Synthetic oligonucleotide
aauuacuaaaugcuaauca

SEQ ID NO: 1806251 - RNA, 19 nt, Artificial Sequence
  Description of Artificial Sequence: Synthetic oligonucleotide
aucaaauauacacaauccc

SEQ ID NO: 1806252 - RNA, 19 nt, Artificial Sequence
  Description of Artificial Sequence: Synthetic oligonucleotide
aauaaagaaacaaaguuca

SEQ ID NO: 1806253 - RNA, 19 nt, Artificial Sequence
  Description of Artificial Sequence: Synthetic oligonucleotide
auaguauguuuauacaugc

SEQ ID NO: 1806254 - RNA, 19 nt, Artificial Sequence
  Description of Artificial Sequence: Synthetic oligonucleotide
aauguggguaacaacaugc

SEQ ID NO: 1806255 - RNA, 19 nt, Artificial Sequence
  Description of Artificial Sequence: Synthetic oligonucleotide
aaucauauucucuugguca

SEQ ID NO: 1806256 - RNA, 19 nt, Artificial Sequence
  Description of Artificial Sequence: Synthetic oligonucleotide
uauuaauauauauaggcgu

SEQ ID NO: 1806257 - RNA, 19 nt, Artificial Sequence
  Description of Artificial Sequence: Synthetic oligonucleotide
aacaaacagaguccaaggc

SEQ ID NO: 1806258 - RNA, 19 nt, Artificial Sequence
  Description of Artificial Sequence: Synthetic oligonucleotide
aacaaacaaacuuuuaccu

SEQ ID NO: 1806259 - RNA, 19 nt, Artificial Sequence
  Description of Artificial Sequence: Synthetic oligonucleotide
uuuacauuaauagacauuc

SEQ ID NO: 1806260 - RNA, 19 nt, Artificial Sequence
  Description of Artificial Sequence: Synthetic oligonucleotide
auugucgcaacauuuggcc

SEQ ID NO: 1806261 - RNA, 19 nt, Artificial Sequence
  Description of Artificial Sequence: Synthetic oligonucleotide
auuaauagacauuccaguc

SEQ ID NO: 1806262 - RNA, 19 nt, Artificial Sequence
  Description of Artificial Sequence: Synthetic oligonucleotide
caaacuaauauuuauagga

SEQ ID NO: 1806263 - RNA, 19 nt, Artificial Sequence
  Description of Artificial Sequence: Synthetic oligonucleotide
ucauccuuaaucuaaaagu

SEQ ID NO: 1806264 - RNA, 19 nt, Artificial Sequence
  Description of Artificial Sequence: Synthetic oligonucleotide
uuaaucuaaaaguaguugu

SEQ ID NO: 1806265 - RNA, 19 nt, Artificial Sequence
  Description of Artificial Sequence: Synthetic oligonucleotide
uauaguauguuuauacaug

SEQ ID NO: 1806266 - RNA, 19 nt, Artificial Sequence
  Description of Artificial Sequence: Synthetic oligonucleotide
augcuaaucaucaacaccc

SEQ ID NO: 1806267 - RNA, 19 nt, Artificial Sequence
  Description of Artificial Sequence: Synthetic oligonucleotide
auauacuccugacacaggc

SEQ ID NO: 1806268 - RNA, 19 nt, Artificial Sequence
  Description of Artificial Sequence: Synthetic oligonucleotide
auuacuuuguaaucauggc

SEQ ID NO: 1806269 - RNA, 19 nt, Artificial Sequence
  Description of Artificial Sequence: Synthetic oligonucleotide
aauauacacaaucccaaug

SEQ ID NO: 1806270 - RNA, 19 nt, Artificial Sequence
  Description of Artificial Sequence: Synthetic oligonucleotide
uacuuuguaaucauggcug

SEQ ID NO: 1806271 - RNA, 19 nt, Artificial Sequence
  Description of Artificial Sequence: Synthetic oligonucleotide
aaaucauauucucuugguc

SEQ ID NO: 1806272 - RNA, 19 nt, Artificial Sequence
  Description of Artificial Sequence: Synthetic oligonucleotide
uacuaaaugcuaaucauca

SEQ ID NO: 1806273 - RNA, 19 nt, Artificial Sequence
  Description of Artificial Sequence: Synthetic oligonucleotide
aaggguuuugcuuaagcag

SEQ ID NO: 1806274 - RNA, 19 nt, Artificial Sequence
  Description of Artificial Sequence: Synthetic oligonucleotide
aauuguuaacauucaaaug

SEQ ID NO: 1806275 - RNA, 19 nt, Artificial Sequence
  Description of Artificial Sequence: Synthetic oligonucleotide
aaaugcuaaucaucaacac

SEQ ID NO: 1806276 - RNA, 19 nt, Artificial Sequence
  Description of Artificial Sequence: Synthetic oligonucleotide
aaauugucgcaacauuugg

SEQ ID NO: 1806277 - RNA, 19 nt, Artificial Sequence
  Description of Artificial Sequence: Synthetic oligonucleotide
uucuuuagcuaauucauag

SEQ ID NO: 1806278 - RNA, 19 nt, Artificial Sequence
  Description of Artificial Sequence: Synthetic oligonucleotide
uguuuauacaugcuaagcu

SEQ ID NO: 1806279 - RNA, 19 nt, Artificial Sequence
  Description of Artificial Sequence: Synthetic oligonucleotide
uguaagaagcacaaagccc

SEQ ID NO: 1806280 - RNA, 19 nt, Artificial Sequence
  Description of Artificial Sequence: Synthetic oligonucleotide
aucuaaaaguaguuguagc

SEQ ID NO: 1806281 - RNA, 19 nt, Artificial Sequence
  Description of Artificial Sequence: Synthetic oligonucleotide
uuuucugagagaaaauugu

SEQ ID NO: 1806282 - RNA, 19 nt, Artificial Sequence
  Description of Artificial Sequence: Synthetic oligonucleotide
uuaauagacauuccaguca

SEQ ID NO: 1806283 - RNA, 19 nt, Artificial Sequence
  Description of Artificial Sequence: Synthetic oligonucleotide
uacaauaagcauaacacau

SEQ ID NO: 1806284 - RNA, 19 nt, Artificial Sequence
  Description of Artificial Sequence: Synthetic oligonucleotide
caauaaaugguuaagucuc

SEQ ID NO: 1806285 - RNA, 19 nt, Artificial Sequence
  Description of Artificial Sequence: Synthetic oligonucleotide
ucuaaaaguaguuguagcu

SEQ ID NO: 1806286 - RNA, 19 nt, Artificial Sequence
  Description of Artificial Sequence: Synthetic oligonucleotide
aaugguuaagucucaauaa

SEQ ID NO: 1806287 - RNA, 19 nt, Artificial Sequence
  Description of Artificial Sequence: Synthetic oligonucleotide
ugaggcaauuacuaaaugc

SEQ ID NO: 1806288 - RNA, 19 nt, Artificial Sequence
  Description of Artificial Sequence: Synthetic oligonucleotide
uaaggaucaaauauacaca

SEQ ID NO: 1806289 - RNA, 19 nt, Artificial Sequence
  Description of Artificial Sequence: Synthetic oligonucleotide
ugagagaaaauuguuaaca

SEQ ID NO: 1806290 - RNA, 19 nt, Artificial Sequence
  Description of Artificial Sequence: Synthetic oligonucleotide
auacuccugacacaggcgc

SEQ ID NO: 1806291 - RNA, 19 nt, Artificial Sequence
  Description of Artificial Sequence: Synthetic oligonucleotide
agauuuuacauacaaugcu

SEQ ID NO: 1806292 - RNA, 19 nt, Artificial Sequence
  Description of Artificial Sequence: Synthetic oligonucleotide
aaauucaaguuauaaggau

SEQ ID NO: 1806293 - RNA, 19 nt, Artificial Sequence
  Description of Artificial Sequence: Synthetic oligonucleotide
uucaaauguaaaacaaaca

SEQ ID NO: 1806294 - RNA, 19 nt, Artificial Sequence
  Description of Artificial Sequence: Synthetic oligonucleotide
aaacgcacuuuucuuuagc

SEQ ID NO: 1806295 - RNA, 19 nt, Artificial Sequence
  Description of Artificial Sequence: Synthetic oligonucleotide
uaaucaucaacacccaaac

SEQ ID NO: 1806296 - RNA, 19 nt, Artificial Sequence
  Description of Artificial Sequence: Synthetic oligonucleotide
aaacugaccagauuuuaca

SEQ ID NO: 1806297 - RNA, 19 nt, Artificial Sequence
  Description of Artificial Sequence: Synthetic oligonucleotide
uuacuuuguaaucauggcu

SEQ ID NO: 1806298 - RNA, 19 nt, Artificial Sequence
  Description of Artificial Sequence: Synthetic oligonucleotide
auauuuauaggaaaaugag

SEQ ID NO: 1806299 - RNA, 19 nt, Artificial Sequence
  Description of Artificial Sequence: Synthetic oligonucleotide
cuaagcucagagaugaggc

SEQ ID NO: 1806300 - RNA, 19 nt, Artificial Sequence
  Description of Artificial Sequence: Synthetic oligonucleotide
auacuaauaucuuuaaaau

SEQ ID NO: 1806301 - RNA, 19 nt, Artificial Sequence
  Description of Artificial Sequence: Synthetic oligonucleotide
aaaguaacauucucuuuca

SEQ ID NO: 1806302 - RNA, 19 nt, Artificial Sequence
  Description of Artificial Sequence: Synthetic oligonucleotide
aaaauucaaguuauaagga

SEQ ID NO: 1806303 - RNA, 19 nt, Artificial Sequence
  Description of Artificial Sequence: Synthetic oligonucleotide
aacauucucuuucauaaaa

SEQ ID NO: 1806304 - RNA, 19 nt, Artificial Sequence
  Description of Artificial Sequence: Synthetic oligonucleotide
ugguuaagucucaauaaag

SEQ ID NO: 1806305 - RNA, 19 nt, Artificial Sequence
  Description of Artificial Sequence: Synthetic oligonucleotide
aucauauucucuuggucac

SEQ ID NO: 1806306 - RNA, 19 nt, Artificial Sequence
  Description of Artificial Sequence: Synthetic oligonucleotide
aguuguagcuuuccaaacg

SEQ ID NO: 1806307 - RNA, 19 nt, Artificial Sequence
  Description of Artificial Sequence: Synthetic oligonucleotide
aauacaauuuacauuaaua

SEQ ID NO: 1806308 - RNA, 19 nt, Artificial Sequence
  Description of Artificial Sequence: Synthetic oligonucleotide
uauguuuauacaugcuaag

SEQ ID NO: 1806309 - RNA, 19 nt, Artificial Sequence
  Description of Artificial Sequence: Synthetic oligonucleotide
aaaguaguuguagcuuucc

SEQ ID NO: 1806310 - RNA, 19 nt, Artificial Sequence
  Description of Artificial Sequence: Synthetic oligonucleotide
auuacuaaaugcuaaucau

SEQ ID NO: 1806311 - RNA, 19 nt, Artificial Sequence
  Description of Artificial Sequence: Synthetic oligonucleotide
uacacaaucccaauguuau

SEQ ID NO: 1806312 - RNA, 19 nt, Artificial Sequence
  Description of Artificial Sequence: Synthetic oligonucleotide
uuaagcagaaacuucuuau

SEQ ID NO: 1806313 - RNA, 19 nt, Artificial Sequence
  Description of Artificial Sequence: Synthetic oligonucleotide
auguuuauacaugcuaagc

SEQ ID NO: 1806314 - RNA, 19 nt, Artificial Sequence
  Description of Artificial Sequence: Synthetic oligonucleotide
auacaugcuaagcucagag

SEQ ID NO: 1806315 - RNA, 19 nt, Artificial Sequence
  Description of Artificial Sequence: Synthetic oligonucleotide
aaugaggcaggaauucccc

SEQ ID NO: 1806316 - RNA, 19 nt, Artificial Sequence
  Description of Artificial Sequence: Synthetic oligonucleotide
uccuaaaagguuauuaaua

SEQ ID NO: 1806317 - RNA, 19 nt, Artificial Sequence
  Description of Artificial Sequence: Synthetic oligonucleotide
aggaaaaugaggcaggaau

SEQ ID NO: 1806318 - RNA, 19 nt, Artificial Sequence
  Description of Artificial Sequence: Synthetic oligonucleotide
uaugcaauaaaugguuaag

SEQ ID NO: 1806319 - RNA, 19 nt, Artificial Sequence
  Description of Artificial Sequence: Synthetic oligonucleotide
uaauagacauuccagucaa

SEQ ID NO: 1806320 - RNA, 19 nt, Artificial Sequence
  Description of Artificial Sequence: Synthetic oligonucleotide
ucaacacccaaacuaauau

SEQ ID NO: 1806321 - RNA, 19 nt, Artificial Sequence
  Description of Artificial Sequence: Synthetic oligonucleotide
cugaccagauuuuacauac

SEQ ID NO: 1806322 - RNA, 19 nt, Artificial Sequence
  Description of Artificial Sequence: Synthetic oligonucleotide
ucacugaugucuuaggggu

SEQ ID NO: 1806323 - RNA, 19 nt, Artificial Sequence
  Description of Artificial Sequence: Synthetic oligonucleotide
uuuagcuaauucauaguaa

SEQ ID NO: 1806324 - RNA, 19 nt, Artificial Sequence
  Description of Artificial Sequence: Synthetic oligonucleotide
ugucuucuuaaauugucgc

SEQ ID NO: 1806325 - RNA, 19 nt, Artificial Sequence
  Description of Artificial Sequence: Synthetic oligonucleotide
aaucccaauguuauguaag

SEQ ID NO: 1806326 - RNA, 19 nt, Artificial Sequence
  Description of Artificial Sequence: Synthetic oligonucleotide
cuuggucacauauaguaug

SEQ ID NO: 1806327 - RNA, 19 nt, Artificial Sequence
  Description of Artificial Sequence: Synthetic oligonucleotide
uaaggguuuugcuuaagca

SEQ ID NO: 1806328 - RNA, 19 nt, Artificial Sequence
  Description of Artificial Sequence: Synthetic oligonucleotide
ucuuauuuggcauucccau

SEQ ID NO: 1806329 - RNA, 19 nt, Artificial Sequence
  Description of Artificial Sequence: Synthetic oligonucleotide
uucuaugcaauaaaugguu

SEQ ID NO: 1806330 - RNA, 19 nt, Artificial Sequence
  Description of Artificial Sequence: Synthetic oligonucleotide
acauacaaugcucagcccu

SEQ ID NO: 1806331 - RNA, 19 nt, Artificial Sequence
  Description of Artificial Sequence: Synthetic oligonucleotide
ucaaaauacuaauaucuuu

SEQ ID NO: 1806332 - RNA, 19 nt, Artificial Sequence
  Description of Artificial Sequence: Synthetic oligonucleotide
uauacuccugacacaggcg

SEQ ID NO: 1806333 - RNA, 19 nt, Artificial Sequence
  Description of Artificial Sequence: Synthetic oligonucleotide
gacacaggcgcucuguuag

SEQ ID NO: 1806334 - RNA, 19 nt, Artificial Sequence
  Description of Artificial Sequence: Synthetic oligonucleotide
uucagcaacuuucaugaac

SEQ ID NO: 1806335 - RNA, 19 nt, Artificial Sequence
  Description of Artificial Sequence: Synthetic oligonucleotide
uauauauaggcguuuucaa

SEQ ID NO: 1806336 - RNA, 19 nt, Artificial Sequence
  Description of Artificial Sequence: Synthetic oligonucleotide
cuuaaucuaaaaguaguug

SEQ ID NO: 1806337 - RNA, 19 nt, Artificial Sequence
  Description of Artificial Sequence: Synthetic oligonucleotide
aaugcucagcccuugcugu

SEQ ID NO: 1806338 - RNA, 19 nt, Artificial Sequence
  Description of Artificial Sequence: Synthetic oligonucleotide
acaugcuaagcucagagau

SEQ ID NO: 1806339 - RNA, 19 nt, Artificial Sequence
  Description of Artificial Sequence: Synthetic oligonucleotide
aaauauacacaaucccaau

SEQ ID NO: 1806340 - RNA, 19 nt, Artificial Sequence
  Description of Artificial Sequence: Synthetic oligonucleotide
aaaacaguauuuaucucca

SEQ ID NO: 1806341 - RNA, 19 nt, Artificial Sequence
  Description of Artificial Sequence: Synthetic oligonucleotide
auaggcguuuucaaaauac

SEQ ID NO: 1806342 - RNA, 19 nt, Artificial Sequence
  Description of Artificial Sequence: Synthetic oligonucleotide
gcuaguuucucguuuacgg

SEQ ID NO: 1806343 - RNA, 19 nt, Artificial Sequence
  Description of Artificial Sequence: Synthetic oligonucleotide
ucauggcuggguauaaaag

SEQ ID NO: 1806344 - RNA, 19 nt, Artificial Sequence
  Description of Artificial Sequence: Synthetic oligonucleotide
uaguuucucguuuacgggc

SEQ ID NO: 1806345 - RNA, 19 nt, Artificial Sequence
  Description of Artificial Sequence: Synthetic oligonucleotide
gauuuuacauacaaugcuc

SEQ ID NO: 1806346 - RNA, 19 nt, Artificial Sequence
  Description of Artificial Sequence: Synthetic oligonucleotide
uuuacgggccucucgauca

SEQ ID NO: 1806347 - RNA, 19 nt, Artificial Sequence
  Description of Artificial Sequence: Synthetic oligonucleotide
acaaaacagugccuggcac

SEQ ID NO: 1806348 - RNA, 19 nt, Artificial Sequence
  Description of Artificial Sequence: Synthetic oligonucleotide
uuauacaugcuaagcucag

SEQ ID NO: 1806349 - RNA, 19 nt, Artificial Sequence
  Description of Artificial Sequence: Synthetic oligonucleotide
uguagcuuuccaaacgcac

SEQ ID NO: 1806350 - RNA, 19 nt, Artificial Sequence
  Description of Artificial Sequence: Synthetic oligonucleotide
guagccuaugaacaggugc

SEQ ID NO: 1806351 - RNA, 19 nt, Artificial Sequence
  Description of Artificial Sequence: Synthetic oligonucleotide
uagccuaugaacaggugca

SEQ ID NO: 1806352 - RNA, 19 nt, Artificial Sequence
  Description of Artificial Sequence: Synthetic oligonucleotide
ugucuauuuugcacaaccc

SEQ ID NO: 1806353 - RNA, 19 nt, Artificial Sequence
  Description of Artificial Sequence: Synthetic oligonucleotide
auuccuaaaagguuauuaa

SEQ ID NO: 1806354 - RNA, 19 nt, Artificial Sequence
  Description of Artificial Sequence: Synthetic oligonucleotide
cuaguuucucguuuacggg

SEQ ID NO: 1806355 - RNA, 19 nt, Artificial Sequence
  Description of Artificial Sequence: Synthetic oligonucleotide
uuauuacuuuguaaucaug

SEQ ID NO: 1806356 - RNA, 19 nt, Artificial Sequence
  Description of Artificial Sequence: Synthetic oligonucleotide
auagacauuccagucaaag

SEQ ID NO: 1806357 - RNA, 19 nt, Artificial Sequence
  Description of Artificial Sequence: Synthetic oligonucleotide
aacgcacuuuucuuuagcu

SEQ ID NO: 1806358 - RNA, 19 nt, Artificial Sequence
  Description of Artificial Sequence: Synthetic oligonucleotide
guuguagcuuuccaaacgc

SEQ ID NO: 1806359 - RNA, 19 nt, Artificial Sequence
  Description of Artificial Sequence: Synthetic oligonucleotide
caaaguagccuaugaacag

SEQ ID NO: 1806360 - RNA, 19 nt, Artificial Sequence
  Description of Artificial Sequence: Synthetic oligonucleotide
aacuucuuauuuggcauuc

SEQ ID NO: 1806361 - RNA, 19 nt, Artificial Sequence
  Description of Artificial Sequence: Synthetic oligonucleotide
ugucaagagacuucugugu

SEQ ID NO: 1806362 - RNA, 19 nt, Artificial Sequence
  Description of Artificial Sequence: Synthetic oligonucleotide
cuucuuccugucaagagac

SEQ ID NO: 1806363 - RNA, 19 nt, Artificial Sequence
  Description of Artificial Sequence: Synthetic oligonucleotide
uaaaaguaguuguagcuuu

SEQ ID NO: 1806364 - RNA, 19 nt, Artificial Sequence
  Description of Artificial Sequence: Synthetic oligonucleotide
ucuucuuaaauugucgcaa

SEQ ID NO: 1806365 - RNA, 19 nt, Artificial Sequence
  Description of Artificial Sequence: Synthetic oligonucleotide
gagacuucuguguugccgc

SEQ ID NO: 1806366 - RNA, 19 nt, Artificial Sequence
  Description of Artificial Sequence: Synthetic oligonucleotide
ugcuucaucccagugaaug

SEQ ID NO: 1806367 - RNA, 19 nt, Artificial Sequence
  Description of Artificial Sequence: Synthetic oligonucleotide
agcuaauucauaguaauau

SEQ ID NO: 1806368 - RNA, 19 nt, Artificial Sequence
  Description of Artificial Sequence: Synthetic oligonucleotide
uuggcauucccauuucagc

SEQ ID NO: 1806369 - RNA, 19 nt, Artificial Sequence
  Description of Artificial Sequence: Synthetic oligonucleotide
uucuuaaauugucgcaaca

SEQ ID NO: 1806370 - RNA, 19 nt, Artificial Sequence
  Description of Artificial Sequence: Synthetic oligonucleotide
uucugagagaaaauuguua

SEQ ID NO: 1806371 - RNA, 19 nt, Artificial Sequence
  Description of Artificial Sequence: Synthetic oligonucleotide
acaacaugcccuccucccc

SEQ ID NO: 1806372 - RNA, 19 nt, Artificial Sequence
  Description of Artificial Sequence: Synthetic oligonucleotide
aaacaaaaguccuggccaa

SEQ ID NO: 1806373 - RNA, 19 nt, Artificial Sequence
  Description of Artificial Sequence: Synthetic oligonucleotide
aaguucauacccagagugg

SEQ ID NO: 1806374 - RNA, 19 nt, Artificial Sequence
  Description of Artificial Sequence: Synthetic oligonucleotide
uuuguaaucauggcugggu

SEQ ID NO: 1806375 - RNA, 19 nt, Artificial Sequence
  Description of Artificial Sequence: Synthetic oligonucleotide
aacacccaaacuaauauuu

SEQ ID NO: 1806376 - RNA, 19 nt, Artificial Sequence
  Description of Artificial Sequence: Synthetic oligonucleotide
auggaauguggguaacaac

SEQ ID NO: 1806377 - RNA, 19 nt, Artificial Sequence
  Description of Artificial Sequence: Synthetic oligonucleotide
ugucgcaacauuuggccgc

SEQ ID NO: 1806378 - RNA, 19 nt, Artificial Sequence
  Description of Artificial Sequence: Synthetic oligonucleotide
uuguuaacauucaaaugua

SEQ ID NO: 1806379 - RNA, 19 nt, Artificial Sequence
  Description of Artificial Sequence: Synthetic oligonucleotide
cuucuuauuuggcauuccc

SEQ ID NO: 1806380 - RNA, 19 nt, Artificial Sequence
  Description of Artificial Sequence: Synthetic oligonucleotide
aaucaucaacacccaaacu

SEQ ID NO: 1806381 - RNA, 19 nt, Artificial Sequence
  Description of Artificial Sequence: Synthetic oligonucleotide
uguuaacauucaaauguaa

SEQ ID NO: 1806382 - RNA, 19 nt, Artificial Sequence
  Description of Artificial Sequence: Synthetic oligonucleotide
aguaguuguagcuuuccaa

SEQ ID NO: 1806383 - RNA, 19 nt, Artificial Sequence
  Description of Artificial Sequence: Synthetic oligonucleotide
uuccuaaaagguuauuaau

SEQ ID NO: 1806384 - RNA, 19 nt, Artificial Sequence
  Description of Artificial Sequence: Synthetic oligonucleotide
uuggucacauauaguaugu

SEQ ID NO: 1806385 - RNA, 19 nt, Artificial Sequence
  Description of Artificial Sequence: Synthetic oligonucleotide
cauauaguauguuuauaca

SEQ ID NO: 1806386 - RNA, 19 nt, Artificial Sequence
  Description of Artificial Sequence: Synthetic oligonucleotide
guauaaaagucaaaucuca

SEQ ID NO: 1806387 - RNA, 19 nt, Artificial Sequence
  Description of Artificial Sequence: Synthetic oligonucleotide
gguuauuaauauauauagg

SEQ ID NO: 1806388 - RNA, 19 nt, Artificial Sequence
  Description of Artificial Sequence: Synthetic oligonucleotide
aggaauuccccaaacugac

SEQ ID NO: 1806389 - RNA, 19 nt, Artificial Sequence
  Description of Artificial Sequence: Synthetic oligonucleotide
uugucgcaacauuuggccg

SEQ ID NO: 1806390 - RNA, 19 nt, Artificial Sequence
  Description of Artificial Sequence: Synthetic oligonucleotide
aguuucucguuuacgggcc

SEQ ID NO: 1806391 - RNA, 19 nt, Artificial Sequence
  Description of Artificial Sequence: Synthetic oligonucleotide
gaaaaugaggcaggaauuc

SEQ ID NO: 1806392 - RNA, 19 nt, Artificial Sequence
  Description of Artificial Sequence: Synthetic oligonucleotide
uagacauuccagucaaagu

SEQ ID NO: 1806393 - RNA, 19 nt, Artificial Sequence
  Description of Artificial Sequence: Synthetic oligonucleotide
aguaacauucucuuucaua

SEQ ID NO: 1806394 - RNA, 19 nt, Artificial Sequence
  Description of Artificial Sequence: Synthetic oligonucleotide
uggguauaaaagucaaauc

SEQ ID NO: 1806395 - RNA, 19 nt, Artificial Sequence
  Description of Artificial Sequence: Synthetic oligonucleotide
ucuuaaauugucgcaacau

SEQ ID NO: 1806396 - RNA, 19 nt, Artificial Sequence
  Description of Artificial Sequence: Synthetic oligonucleotide
caaacugaccagauuuuac

SEQ ID NO: 1806397 - RNA, 19 nt, Artificial Sequence
  Description of Artificial Sequence: Synthetic oligonucleotide
cugaaagcgccacucgugg

SEQ ID NO: 1806398 - RNA, 19 nt, Artificial Sequence
  Description of Artificial Sequence: Synthetic oligonucleotide
gaauguggguaacaacaug

SEQ ID NO: 1806399 - RNA, 19 nt, Artificial Sequence
  Description of Artificial Sequence: Synthetic oligonucleotide
agagaaaauuguuaacauu

SEQ ID NO: 1806400 - RNA, 19 nt, Artificial Sequence
  Description of Artificial Sequence: Synthetic oligonucleotide
ggguauaaaagucaaaucu

SEQ ID NO: 1806401 - RNA, 19 nt, Artificial Sequence
  Description of Artificial Sequence: Synthetic oligonucleotide
guaaggguuuugcuuaagc

SEQ ID NO: 1806402 - RNA, 19 nt, Artificial Sequence
  Description of Artificial Sequence: Synthetic oligonucleotide
aaagcgccacucgugguac

SEQ ID NO: 1806403 - RNA, 19 nt, Artificial Sequence
  Description of Artificial Sequence: Synthetic oligonucleotide
augguuaagucucaauaaa

SEQ ID NO: 1806404 - RNA, 19 nt, Artificial Sequence
  Description of Artificial Sequence: Synthetic oligonucleotide
aagagacuucuguguugcc

SEQ ID NO: 1806405 - RNA, 19 nt, Artificial Sequence
  Description of Artificial Sequence: Synthetic oligonucleotide
aucugccggagcuaguuuc

SEQ ID NO: 1806406 - RNA, 19 nt, Artificial Sequence
  Description of Artificial Sequence: Synthetic oligonucleotide
uaacaacaugcccuccucc

SEQ ID NO: 1806407 - RNA, 19 nt, Artificial Sequence
  Description of Artificial Sequence: Synthetic oligonucleotide
aauaaaugguuaagucuca

SEQ ID NO: 1806408 - RNA, 19 nt, Artificial Sequence
  Description of Artificial Sequence: Synthetic oligonucleotide
uuucugagagaaaauuguu

SEQ ID NO: 1806409 - RNA, 19 nt, Artificial Sequence
  Description of Artificial Sequence: Synthetic oligonucleotide
ucuaugcaauaaaugguua

SEQ ID NO: 1806410 - RNA, 19 nt, Artificial Sequence
  Description of Artificial Sequence: Synthetic oligonucleotide
ucguuuacgggccucucga

SEQ ID NO: 1806411 - RNA, 19 nt, Artificial Sequence
  Description of Artificial Sequence: Synthetic oligonucleotide
agucaaaucucagauggga

SEQ ID NO: 1806412 - RNA, 19 nt, Artificial Sequence
  Description of Artificial Sequence: Synthetic oligonucleotide
ucuuggucacauauaguau

SEQ ID NO: 1806413 - RNA, 19 nt, Artificial Sequence
  Description of Artificial Sequence: Synthetic oligonucleotide
cucuuggucacauauagua

SEQ ID NO: 1806414 - RNA, 19 nt, Artificial Sequence
  Description of Artificial Sequence: Synthetic oligonucleotide
guaguuguagcuuuccaaa

SEQ ID NO: 1806415 - RNA, 19 nt, Artificial Sequence
  Description of Artificial Sequence: Synthetic oligonucleotide
uaggcguuuucaaaauacu

SEQ ID NO: 1806416 - RNA, 19 nt, Artificial Sequence
  Description of Artificial Sequence: Synthetic oligonucleotide
cuaaucaucaacacccaaa

SEQ ID NO: 1806417 - RNA, 19 nt, Artificial Sequence
  Description of Artificial Sequence: Synthetic oligonucleotide
auggcuggguauaaaaguc

SEQ ID NO: 1806418 - RNA, 19 nt, Artificial Sequence
  Description of Artificial Sequence: Synthetic oligonucleotide
auuaauauauauaggcguu

SEQ ID NO: 1806419 - RNA, 19 nt, Artificial Sequence
  Description of Artificial Sequence: Synthetic oligonucleotide
cuucuuaaauugucgcaac

SEQ ID NO: 1806420 - RNA, 19 nt, Artificial Sequence
  Description of Artificial Sequence: Synthetic oligonucleotide
ugaacaggugcauucuguc

SEQ ID NO: 1806421 - RNA, 19 nt, Artificial Sequence
  Description of Artificial Sequence: Synthetic oligonucleotide
cugagagaaaauuguuaac

SEQ ID NO: 1806422 - RNA, 19 nt, Artificial Sequence
  Description of Artificial Sequence: Synthetic oligonucleotide
ccaaacuaauauuuauagg

SEQ ID NO: 1806423 - RNA, 19 nt, Artificial Sequence
  Description of Artificial Sequence: Synthetic oligonucleotide
uuucuguaaggguuuugcu

SEQ ID NO: 1806424 - RNA, 19 nt, Artificial Sequence
  Description of Artificial Sequence: Synthetic oligonucleotide
uugcuuaagcagaaacuuc

SEQ ID NO: 1806425 - RNA, 19 nt, Artificial Sequence
  Description of Artificial Sequence: Synthetic oligonucleotide
guaagaagcacaaagcccu

SEQ ID NO: 1806426 - RNA, 19 nt, Artificial Sequence
  Description of Artificial Sequence: Synthetic oligonucleotide
auguggguaacaacaugcc

SEQ ID NO: 1806427 - RNA, 19 nt, Artificial Sequence
  Description of Artificial Sequence: Synthetic oligonucleotide
augcuaagcucagagauga

SEQ ID NO: 1806428 - RNA, 19 nt, Artificial Sequence
  Description of Artificial Sequence: Synthetic oligonucleotide
aucccaauguuauguaaga

SEQ ID NO: 1806429 - RNA, 19 nt, Artificial Sequence
  Description of Artificial Sequence: Synthetic oligonucleotide
uucucauccuuaaucuaaa

SEQ ID NO: 1806430 - RNA, 19 nt, Artificial Sequence
  Description of Artificial Sequence: Synthetic oligonucleotide
ggccucucgaucaugaugg

SEQ ID NO: 1806431 - RNA, 19 nt, Artificial Sequence
  Description of Artificial Sequence: Synthetic oligonucleotide
gguauaaaagucaaaucuc

SEQ ID NO: 1806432 - RNA, 19 nt, Artificial Sequence
  Description of Artificial Sequence: Synthetic oligonucleotide
uacaugcuaagcucagaga

SEQ ID NO: 1806433 - RNA, 19 nt, Artificial Sequence
  Description of Artificial Sequence: Synthetic oligonucleotide
gaggcaauuacuaaaugcu

SEQ ID NO: 1806434 - RNA, 19 nt, Artificial Sequence
  Description of Artificial Sequence: Synthetic oligonucleotide
gcaggaauuccccaaacug

SEQ ID NO: 1806435 - RNA, 19 nt, Artificial Sequence
  Description of Artificial Sequence: Synthetic oligonucleotide
caugcuaagcucagagaug

SEQ ID NO: 1806436 - RNA, 19 nt, Artificial Sequence
  Description of Artificial Sequence: Synthetic oligonucleotide
uguaaucauggcuggguau

SEQ ID NO: 1806437 - RNA, 19 nt, Artificial Sequence
  Description of Artificial Sequence: Synthetic oligonucleotide
auauaggcguuuucaaaau

SEQ ID NO: 1806438 - RNA, 19 nt, Artificial Sequence
  Description of Artificial Sequence: Synthetic oligonucleotide
aagucaaaucucagauggg

SEQ ID NO: 1806439 - RNA, 19 nt, Artificial Sequence
  Description of Artificial Sequence: Synthetic oligonucleotide
uauaggcguuuucaaaaua

SEQ ID NO: 1806440 - RNA, 19 nt, Artificial Sequence
  Description of Artificial Sequence: Synthetic oligonucleotide
augcaauaaaugguuaagu

SEQ ID NO: 1806441 - RNA, 19 nt, Artificial Sequence
  Description of Artificial Sequence: Synthetic oligonucleotide
acuucuuauuuggcauucc

SEQ ID NO: 1806442 - RNA, 19 nt, Artificial Sequence
  Description of Artificial Sequence: Synthetic oligonucleotide
gucaaaucucagaugggag

SEQ ID NO: 1806443 - RNA, 19 nt, Artificial Sequence
  Description of Artificial Sequence: Synthetic oligonucleotide
ugcuaaucaucaacaccca

SEQ ID NO: 1806444 - RNA, 19 nt, Artificial Sequence
  Description of Artificial Sequence: Synthetic oligonucleotide
caauguuauguaagaagca

SEQ ID NO: 1806445 - RNA, 19 nt, Artificial Sequence
  Description of Artificial Sequence: Synthetic oligonucleotide
uccaaacgcacuuuucuuu

SEQ ID NO: 1806446 - RNA, 19 nt, Artificial Sequence
  Description of Artificial Sequence: Synthetic oligonucleotide
aaguagccuaugaacaggu

SEQ ID NO: 1806447 - RNA, 19 nt, Artificial Sequence
  Description of Artificial Sequence: Synthetic oligonucleotide
caggaauuccccaaacuga

SEQ ID NO: 1806448 - RNA, 19 nt, Artificial Sequence
  Description of Artificial Sequence: Synthetic oligonucleotide
caaacagaguccaaggcua

SEQ ID NO: 1806449 - RNA, 19 nt, Artificial Sequence
  Description of Artificial Sequence: Synthetic oligonucleotide
cauauacuccugacacagg

SEQ ID NO: 1806450 - RNA, 19 nt, Artificial Sequence
  Description of Artificial Sequence: Synthetic oligonucleotide
uagcuaauucauaguaaua

SEQ ID NO: 1806451 - RNA, 19 nt, Artificial Sequence
  Description of Artificial Sequence: Synthetic oligonucleotide
augaggcaauuacuaaaug

SEQ ID NO: 1806452 - RNA, 19 nt, Artificial Sequence
  Description of Artificial Sequence: Synthetic oligonucleotide
uguugccgcugaaagcgcc

SEQ ID NO: 1806453 - RNA, 19 nt, Artificial Sequence
  Description of Artificial Sequence: Synthetic oligonucleotide
agcauaacacauauaaaua

SEQ ID NO: 1806454 - RNA, 19 nt, Artificial Sequence
  Description of Artificial Sequence: Synthetic oligonucleotide
aaagcacaaaacagugccu

SEQ ID NO: 1806455 - RNA, 19 nt, Artificial Sequence
  Description of Artificial Sequence: Synthetic oligonucleotide
ugucccuuugccugaacaa

SEQ ID NO: 1806456 - RNA, 19 nt, Artificial Sequence
  Description of Artificial Sequence: Synthetic oligonucleotide
caaugcucagcccuugcug

SEQ ID NO: 1806457 - RNA, 19 nt, Artificial Sequence
  Description of Artificial Sequence: Synthetic oligonucleotide
agagaugaggcaauuacua

SEQ ID NO: 1806458 - RNA, 19 nt, Artificial Sequence
  Description of Artificial Sequence: Synthetic oligonucleotide
uggguaacaacaugcccuc

SEQ ID NO: 1806459 - RNA, 19 nt, Artificial Sequence
  Description of Artificial Sequence: Synthetic oligonucleotide
acuaaaugcuaaucaucaa

SEQ ID NO: 1806460 - RNA, 19 nt, Artificial Sequence
  Description of Artificial Sequence: Synthetic oligonucleotide
aacauuuggccgcuuucuu

SEQ ID NO: 1806461 - RNA, 19 nt, Artificial Sequence
  Description of Artificial Sequence: Synthetic oligonucleotide
cuuugccugaacaaacaga

SEQ ID NO: 1806462 - RNA, 19 nt, Artificial Sequence
  Description of Artificial Sequence: Synthetic oligonucleotide
aggguuuugcuuaagcaga

SEQ ID NO: 1806463 - RNA, 19 nt, Artificial Sequence
  Description of Artificial Sequence: Synthetic oligonucleotide
uacauacaaugcucagccc

SEQ ID NO: 1806464 - RNA, 19 nt, Artificial Sequence
  Description of Artificial Sequence: Synthetic oligonucleotide
cagaguccaaggcuaaaac

SEQ ID NO: 1806465 - RNA, 19 nt, Artificial Sequence
  Description of Artificial Sequence: Synthetic oligonucleotide
uacaaugcucagcccuugc

SEQ ID NO: 1806466 - RNA, 19 nt, Artificial Sequence
  Description of Artificial Sequence: Synthetic oligonucleotide
gagagaaaauuguuaacau

SEQ ID NO: 1806467 - RNA, 19 nt, Artificial Sequence
  Description of Artificial Sequence: Synthetic oligonucleotide
uuuauccaucugccggagc

SEQ ID NO: 1806468 - RNA, 19 nt, Artificial Sequence
  Description of Artificial Sequence: Synthetic oligonucleotide
cuucuaugcaauaaauggu

SEQ ID NO: 1806469 - RNA, 19 nt, Artificial Sequence
  Description of Artificial Sequence: Synthetic oligonucleotide
agugaaugcugucuucuua

SEQ ID NO: 1806470 - RNA, 19 nt, Artificial Sequence
  Description of Artificial Sequence: Synthetic oligonucleotide
ugccggagcuaguuucucg

SEQ ID NO: 1806471 - RNA, 19 nt, Artificial Sequence
  Description of Artificial Sequence: Synthetic oligonucleotide
uauuuggcauucccauuuc

SEQ ID NO: 1806472 - RNA, 19 nt, Artificial Sequence
  Description of Artificial Sequence: Synthetic oligonucleotide
aaacaguauuuaucuccau

SEQ ID NO: 1806473 - RNA, 19 nt, Artificial Sequence
  Description of Artificial Sequence: Synthetic oligonucleotide
aaguaacauucucuuucau

SEQ ID NO: 1806474 - RNA, 19 nt, Artificial Sequence
  Description of Artificial Sequence: Synthetic oligonucleotide
gcuaagcucagagaugagg

SEQ ID NO: 1806475 - RNA, 19 nt, Artificial Sequence
  Description of Artificial Sequence: Synthetic oligonucleotide
ucaucccagugaaugcugu

SEQ ID NO: 1806476 - RNA, 19 nt, Artificial Sequence
  Description of Artificial Sequence: Synthetic oligonucleotide
gagaugaggcaauuacuaa

SEQ ID NO: 1806477 - RNA, 19 nt, Artificial Sequence
  Description of Artificial Sequence: Synthetic oligonucleotide
aaggacucuuguuucugua

SEQ ID NO: 1806478 - RNA, 19 nt, Artificial Sequence
  Description of Artificial Sequence: Synthetic oligonucleotide
cucguuuacgggccucucg

SEQ ID NO: 1806479 - RNA, 19 nt, Artificial Sequence
  Description of Artificial Sequence: Synthetic oligonucleotide
cuuuguaaucauggcuggg

SEQ ID NO: 1806480 - RNA, 19 nt, Artificial Sequence
  Description of Artificial Sequence: Synthetic oligonucleotide
cuguguugccgcugaaagc

SEQ ID NO: 1806481 - RNA, 19 nt, Artificial Sequence
  Description of Artificial Sequence: Synthetic oligonucleotide
auuuggcauucccauuuca

SEQ ID NO: 1806482 - RNA, 19 nt, Artificial Sequence
  Description of Artificial Sequence: Synthetic oligonucleotide
cuaaaagguuauuaauaua

SEQ ID NO: 1806483 - RNA, 19 nt, Artificial Sequence
  Description of Artificial Sequence: Synthetic oligonucleotide
acaaugcucagcccuugcu

SEQ ID NO: 1806484 - RNA, 19 nt, Artificial Sequence
  Description of Artificial Sequence: Synthetic oligonucleotide
caaacgcacuuuucuuuag

SEQ ID NO: 1806485 - RNA, 19 nt, Artificial Sequence
  Description of Artificial Sequence: Synthetic oligonucleotide
ucugccggagcuaguuucu

SEQ ID NO: 1806486 - RNA, 19 nt, Artificial Sequence
  Description of Artificial Sequence: Synthetic oligonucleotide
acugaccagauuuuacaua

SEQ ID NO: 1806487 - RNA, 19 nt, Artificial Sequence
  Description of Artificial Sequence: Synthetic oligonucleotide
uccugcauauacuccugac

SEQ ID NO: 1806488 - RNA, 19 nt, Artificial Sequence
  Description of Artificial Sequence: Synthetic oligonucleotide
ugaccagauuuuacauaca

SEQ ID NO: 1806489 - RNA, 19 nt, Artificial Sequence
  Description of Artificial Sequence: Synthetic oligonucleotide
aggugcauucuguccuugg

SEQ ID NO: 1806490 - RNA, 19 nt, Artificial Sequence
  Description of Artificial Sequence: Synthetic oligonucleotide
guuauuacuuuguaaucau

SEQ ID NO: 1806491 - RNA, 19 nt, Artificial Sequence
  Description of Artificial Sequence: Synthetic oligonucleotide
uuagggguuccuugucuac

SEQ ID NO: 1806492 - RNA, 19 nt, Artificial Sequence
  Description of Artificial Sequence: Synthetic oligonucleotide
ccuaugaacaggugcauuc

SEQ ID NO: 1806493 - RNA, 19 nt, Artificial Sequence
  Description of Artificial Sequence: Synthetic oligonucleotide
auaggaaaaugaggcagga

SEQ ID NO: 1806494 - RNA, 19 nt, Artificial Sequence
  Description of Artificial Sequence: Synthetic oligonucleotide
uguuaggcacucugcucug

SEQ ID NO: 1806495 - RNA, 19 nt, Artificial Sequence
  Description of Artificial Sequence: Synthetic oligonucleotide
caaaucucagaugggagga

SEQ ID NO: 1806496 - RNA, 19 nt, Artificial Sequence
  Description of Artificial Sequence: Synthetic oligonucleotide
aguggguuauuacuuugua

SEQ ID NO: 1806497 - RNA, 19 nt, Artificial Sequence
  Description of Artificial Sequence: Synthetic oligonucleotide
ugaaugcugucuucuuaaa

SEQ ID NO: 1806498 - RNA, 19 nt, Artificial Sequence
  Description of Artificial Sequence: Synthetic oligonucleotide
acucgugguacuuuucauu

SEQ ID NO: 1806499 - RNA, 19 nt, Artificial Sequence
  Description of Artificial Sequence: Synthetic oligonucleotide
ugucuacaaaguagccuau

SEQ ID NO: 1806500 - RNA, 19 nt, Artificial Sequence
  Description of Artificial Sequence: Synthetic oligonucleotide
acaauaagcauaacacaua

SEQ ID NO: 1806501 - RNA, 19 nt, Artificial Sequence
  Description of Artificial Sequence: Synthetic oligonucleotide
uguaaggguuuugcuuaag

SEQ ID NO: 1806502 - RNA, 19 nt, Artificial Sequence
  Description of Artificial Sequence: Synthetic oligonucleotide
acaaucccaauguuaugua

SEQ ID NO: 1806503 - RNA, 19 nt, Artificial Sequence
  Description of Artificial Sequence: Synthetic oligonucleotide
aggacucuuguuucuguaa

SEQ ID NO: 1806504 - RNA, 19 nt, Artificial Sequence
  Description of Artificial Sequence: Synthetic oligonucleotide
cauggcuggguauaaaagu

SEQ ID NO: 1806505 - RNA, 19 nt, Artificial Sequence
  Description of Artificial Sequence: Synthetic oligonucleotide
cuuaagcagaaacuucuua

SEQ ID NO: 1806506 - RNA, 19 nt, Artificial Sequence
  Description of Artificial Sequence: Synthetic oligonucleotide
caggcgcucuguuaggcac

SEQ ID NO: 1806507 - RNA, 19 nt, Artificial Sequence
  Description of Artificial Sequence: Synthetic oligonucleotide
gaaagcgccacucguggua

SEQ ID NO: 1806508 - RNA, 19 nt, Artificial Sequence
  Description of Artificial Sequence: Synthetic oligonucleotide
guggguuauuacuuuguaa

SEQ ID NO: 1806509 - RNA, 19 nt, Artificial Sequence
  Description of Artificial Sequence: Synthetic oligonucleotide
agaugggaggaaaucagaa

SEQ ID NO: 1806510 - RNA, 19 nt, Artificial Sequence
  Description of Artificial Sequence: Synthetic oligonucleotide
uugccugaacaaacagagu

SEQ ID NO: 1806511 - RNA, 19 nt, Artificial Sequence
  Description of Artificial Sequence: Synthetic oligonucleotide
guggguaacaacaugcccu

SEQ ID NO: 1806512 - RNA, 19 nt, Artificial Sequence
  Description of Artificial Sequence: Synthetic oligonucleotide
ucauauucucuuggucaca

SEQ ID NO: 1806513 - RNA, 19 nt, Artificial Sequence
  Description of Artificial Sequence: Synthetic oligonucleotide
guuuacgggccucucgauc

SEQ ID NO: 1806514 - RNA, 19 nt, Artificial Sequence
  Description of Artificial Sequence: Synthetic oligonucleotide
augaacaggugcauucugu

SEQ ID NO: 1806515 - RNA, 19 nt, Artificial Sequence
  Description of Artificial Sequence: Synthetic oligonucleotide
uucccauuucagcaacuuu

SEQ ID NO: 1806516 - RNA, 19 nt, Artificial Sequence
  Description of Artificial Sequence: Synthetic oligonucleotide
ugaaagcgccacucguggu

SEQ ID NO: 1806517 - RNA, 19 nt, Artificial Sequence
  Description of Artificial Sequence: Synthetic oligonucleotide
cacucugcucugugaaggc

SEQ ID NO: 1806518 - RNA, 19 nt, Artificial Sequence
  Description of Artificial Sequence: Synthetic oligonucleotide
acacaggcgcucuguuagg

SEQ ID NO: 1806519 - RNA, 19 nt, Artificial Sequence
  Description of Artificial Sequence: Synthetic oligonucleotide
ugcuaagcucagagaugag

SEQ ID NO: 1806520 - RNA, 19 nt, Artificial Sequence
  Description of Artificial Sequence: Synthetic oligonucleotide
ggguuauuacuuuguaauc

SEQ ID NO: 1806521 - RNA, 19 nt, Artificial Sequence
  Description of Artificial Sequence: Synthetic oligonucleotide
uacuccugacacaggcgcu

SEQ ID NO: 1806522 - RNA, 19 nt, Artificial Sequence
  Description of Artificial Sequence: Synthetic oligonucleotide
ucccaauguuauguaagaa

SEQ ID NO: 1806523 - RNA, 19 nt, Artificial Sequence
  Description of Artificial Sequence: Synthetic oligonucleotide
cuggguauaaaagucaaau

SEQ ID NO: 1806524 - RNA, 19 nt, Artificial Sequence
  Description of Artificial Sequence: Synthetic oligonucleotide
uagggguuccuugucuaca

SEQ ID NO: 1806525 - RNA, 19 nt, Artificial Sequence
  Description of Artificial Sequence: Synthetic oligonucleotide
aaaucucagaugggaggaa

SEQ ID NO: 1806526 - RNA, 19 nt, Artificial Sequence
  Description of Artificial Sequence: Synthetic oligonucleotide
cuguuaggcacucugcucu

SEQ ID NO: 1806527 - RNA, 19 nt, Artificial Sequence
  Description of Artificial Sequence: Synthetic oligonucleotide
uccuggccaaggaauggaa

SEQ ID NO: 1806528 - RNA, 19 nt, Artificial Sequence
  Description of Artificial Sequence: Synthetic oligonucleotide
uaaucauggcuggguauaa

SEQ ID NO: 1806529 - RNA, 19 nt, Artificial Sequence
  Description of Artificial Sequence: Synthetic oligonucleotide
guaaucauggcuggguaua

SEQ ID NO: 1806530 - RNA, 19 nt, Artificial Sequence
  Description of Artificial Sequence: Synthetic oligonucleotide
gagcuaguuucucguuuac

SEQ ID NO: 1806531 - RNA, 19 nt, Artificial Sequence
  Description of Artificial Sequence: Synthetic oligonucleotide
uucaaguuauaaggaucaa

SEQ ID NO: 1806532 - RNA, 19 nt, Artificial Sequence
  Description of Artificial Sequence: Synthetic oligonucleotide
uuggccgcuuucuuuggau

SEQ ID NO: 1806533 - RNA, 19 nt, Artificial Sequence
  Description of Artificial Sequence: Synthetic oligonucleotide
ggcaauuacuaaaugcuaa

SEQ ID NO: 1806534 - RNA, 19 nt, Artificial Sequence
  Description of Artificial Sequence: Synthetic oligonucleotide
aaacagaguccaaggcuaa

SEQ ID NO: 1806535 - RNA, 19 nt, Artificial Sequence
  Description of Artificial Sequence: Synthetic oligonucleotide
aaucauggcuggguauaaa

SEQ ID NO: 1806536 - RNA, 19 nt, Artificial Sequence
  Description of Artificial Sequence: Synthetic oligonucleotide
acccaaacuaauauuuaua

SEQ ID NO: 1806537 - RNA, 19 nt, Artificial Sequence
  Description of Artificial Sequence: Synthetic oligonucleotide
agggguuccuugucuacaa

SEQ ID NO: 1806538 - RNA, 19 nt, Artificial Sequence
  Description of Artificial Sequence: Synthetic oligonucleotide
uucuguccuugguuuggcu

SEQ ID NO: 1806539 - RNA, 19 nt, Artificial Sequence
  Description of Artificial Sequence: Synthetic oligonucleotide
acgcacuuuucuuuagcua

SEQ ID NO: 1806540 - RNA, 19 nt, Artificial Sequence
  Description of Artificial Sequence: Synthetic oligonucleotide
ucauacccagaguggguua

SEQ ID NO: 1806541 - RNA, 19 nt, Artificial Sequence
  Description of Artificial Sequence: Synthetic oligonucleotide
uucucguuuacgggccucu

SEQ ID NO: 1806542 - RNA, 19 nt, Artificial Sequence
  Description of Artificial Sequence: Synthetic oligonucleotide
uccugucaagagacuucug

SEQ ID NO: 1806543 - RNA, 19 nt, Artificial Sequence
  Description of Artificial Sequence: Synthetic oligonucleotide
gccaaggaauggaaugugg

SEQ ID NO: 1806544 - RNA, 19 nt, Artificial Sequence
  Description of Artificial Sequence: Synthetic oligonucleotide
ucugucuauuuugcacaac

SEQ ID NO: 1806545 - RNA, 19 nt, Artificial Sequence
  Description of Artificial Sequence: Synthetic oligonucleotide
auacaaugcucagcccuug

SEQ ID NO: 1806546 - RNA, 19 nt, Artificial Sequence
  Description of Artificial Sequence: Synthetic oligonucleotide
accagauuuuacauacaau

SEQ ID NO: 1806547 - RNA, 19 nt, Artificial Sequence
  Description of Artificial Sequence: Synthetic oligonucleotide
cagagaugaggcaauuacu

SEQ ID NO: 1806548 - RNA, 19 nt, Artificial Sequence
  Description of Artificial Sequence: Synthetic oligonucleotide
aauagacauuccagucaaa

SEQ ID NO: 1806549 - RNA, 19 nt, Artificial Sequence
  Description of Artificial Sequence: Synthetic oligonucleotide
aggcguuuucaaaauacua

SEQ ID NO: 1806550 - RNA, 19 nt, Artificial Sequence
  Description of Artificial Sequence: Synthetic oligonucleotide
cuaaaaguaguuguagcuu

SEQ ID NO: 1806551 - RNA, 19 nt, Artificial Sequence
  Description of Artificial Sequence: Synthetic oligonucleotide
cauauuccuaaaagguuau

SEQ ID NO: 1806552 - RNA, 19 nt, Artificial Sequence
  Description of Artificial Sequence: Synthetic oligonucleotide
auucccauuucagcaacuu

SEQ ID NO: 1806553 - RNA, 19 nt, Artificial Sequence
  Description of Artificial Sequence: Synthetic oligonucleotide
aggcaauuacuaaaugcua

SEQ ID NO: 1806554 - RNA, 19 nt, Artificial Sequence
  Description of Artificial Sequence: Synthetic oligonucleotide
cacaggcgcucuguuaggc

SEQ ID NO: 1806555 - RNA, 19 nt, Artificial Sequence
  Description of Artificial Sequence: Synthetic oligonucleotide
gggccucucgaucaugaug

SEQ ID NO: 1806556 - RNA, 19 nt, Artificial Sequence
  Description of Artificial Sequence: Synthetic oligonucleotide
ucgugguacuuuucauuuu

SEQ ID NO: 1806557 - RNA, 19 nt, Artificial Sequence
  Description of Artificial Sequence: Synthetic oligonucleotide
cucgugguacuuuucauuu

SEQ ID NO: 1806558 - RNA, 19 nt, Artificial Sequence
  Description of Artificial Sequence: Synthetic oligonucleotide
gguaacaacaugcccuccu

SEQ ID NO: 1806559 - RNA, 19 nt, Artificial Sequence
  Description of Artificial Sequence: Synthetic oligonucleotide
aggaucaaauauacacaau

SEQ ID NO: 1806560 - RNA, 19 nt, Artificial Sequence
  Description of Artificial Sequence: Synthetic oligonucleotide
gcaacauuuggccgcuuuc

SEQ ID NO: 1806561 - RNA, 19 nt, Artificial Sequence
  Description of Artificial Sequence: Synthetic oligonucleotide
gucaagagacuucuguguu

SEQ ID NO: 1806562 - RNA, 19 nt, Artificial Sequence
  Description of Artificial Sequence: Synthetic oligonucleotide
gcauucuguccuugguuug

SEQ ID NO: 1806563 - RNA, 19 nt, Artificial Sequence
  Description of Artificial Sequence: Synthetic oligonucleotide
uacccagaguggguuauua

SEQ ID NO: 1806564 - RNA, 19 nt, Artificial Sequence
  Description of Artificial Sequence: Synthetic oligonucleotide
cucuguuaggcacucugcu

SEQ ID NO: 1806565 - RNA, 19 nt, Artificial Sequence
  Description of Artificial Sequence: Synthetic oligonucleotide
gcaauuacuaaaugcuaau

SEQ ID NO: 1806566 - RNA, 19 nt, Artificial Sequence
  Description of Artificial Sequence: Synthetic oligonucleotide
ggaauuccccaaacugacc

SEQ ID NO: 1806567 - RNA, 19 nt, Artificial Sequence
  Description of Artificial Sequence: Synthetic oligonucleotide
auucucuuggucacauaua

SEQ ID NO: 1806568 - RNA, 19 nt, Artificial Sequence
  Description of Artificial Sequence: Synthetic oligonucleotide
uuacgggccucucgaucau

SEQ ID NO: 1806569 - RNA, 19 nt, Artificial Sequence
  Description of Artificial Sequence: Synthetic oligonucleotide
ccugcauauacuccugaca

SEQ ID NO: 1806570 - RNA, 19 nt, Artificial Sequence
  Description of Artificial Sequence: Synthetic oligonucleotide
gaguggguuauuacuuugu

SEQ ID NO: 1806571 - RNA, 19 nt, Artificial Sequence
  Description of Artificial Sequence: Synthetic oligonucleotide
auauuccuaaaagguuauu

SEQ ID NO: 1806572 - RNA, 19 nt, Artificial Sequence
  Description of Artificial Sequence: Synthetic oligonucleotide
cgcacuuuucuuuagcuaa

SEQ ID NO: 1806573 - RNA, 19 nt, Artificial Sequence
  Description of Artificial Sequence: Synthetic oligonucleotide
cuuauuuggcauucccauu

SEQ ID NO: 1806574 - RNA, 19 nt, Artificial Sequence
  Description of Artificial Sequence: Synthetic oligonucleotide
aagcgccacucgugguacu

SEQ ID NO: 1806575 - RNA, 19 nt, Artificial Sequence
  Description of Artificial Sequence: Synthetic oligonucleotide
cauacaaugcucagcccuu

SEQ ID NO: 1806576 - RNA, 19 nt, Artificial Sequence
  Description of Artificial Sequence: Synthetic oligonucleotide
ggcugaaggacucuuguuu

SEQ ID NO: 1806577 - RNA, 19 nt, Artificial Sequence
  Description of Artificial Sequence: Synthetic oligonucleotide
gcucuguuaggcacucugc

SEQ ID NO: 1806578 - RNA, 19 nt, Artificial Sequence
  Description of Artificial Sequence: Synthetic oligonucleotide
uugccgcugaaagcgccac

SEQ ID NO: 1806579 - RNA, 19 nt, Artificial Sequence
  Description of Artificial Sequence: Synthetic oligonucleotide
gguuccuugucuacaaagu

SEQ ID NO: 1806580 - RNA, 19 nt, Artificial Sequence
  Description of Artificial Sequence: Synthetic oligonucleotide
ucucguuuacgggccucuc

SEQ ID NO: 1806581 - RNA, 19 nt, Artificial Sequence
  Description of Artificial Sequence: Synthetic oligonucleotide
agccuaugaacaggugcau

SEQ ID NO: 1806582 - RNA, 19 nt, Artificial Sequence
  Description of Artificial Sequence: Synthetic oligonucleotide
caacacccaaacuaauauu

SEQ ID NO: 1806583 - RNA, 19 nt, Artificial Sequence
  Description of Artificial Sequence: Synthetic oligonucleotide
guugccgcugaaagcgcca

SEQ ID NO: 1806584 - RNA, 19 nt, Artificial Sequence
  Description of Artificial Sequence: Synthetic oligonucleotide
ccugucaagagacuucugu

SEQ ID NO: 1806585 - RNA, 19 nt, Artificial Sequence
  Description of Artificial Sequence: Synthetic oligonucleotide
uacgggccucucgaucaug

SEQ ID NO: 1806586 - RNA, 19 nt, Artificial Sequence
  Description of Artificial Sequence: Synthetic oligonucleotide
ccaaacgcacuuuucuuua

SEQ ID NO: 1806587 - RNA, 19 nt, Artificial Sequence
  Description of Artificial Sequence: Synthetic oligonucleotide
caucaacacccaaacuaau

SEQ ID NO: 1806588 - RNA, 19 nt, Artificial Sequence
  Description of Artificial Sequence: Synthetic oligonucleotide
ggcuggguauaaaagucaa

SEQ ID NO: 1806589 - RNA, 19 nt, Artificial Sequence
  Description of Artificial Sequence: Synthetic oligonucleotide
ccuuaaucuaaaaguaguu

SEQ ID NO: 1806590 - RNA, 19 nt, Artificial Sequence
  Description of Artificial Sequence: Synthetic oligonucleotide
cucagagaugaggcaauua

SEQ ID NO: 1806591 - RNA, 19 nt, Artificial Sequence
  Description of Artificial Sequence: Synthetic oligonucleotide
cccagaguggguuauuacu

SEQ ID NO: 1806592 - RNA, 19 nt, Artificial Sequence
  Description of Artificial Sequence: Synthetic oligonucleotide
caggugcauucuguccuug

SEQ ID NO: 1806593 - RNA, 19 nt, Artificial Sequence
  Description of Artificial Sequence: Synthetic oligonucleotide
guuucucguuuacgggccu

SEQ ID NO: 1806594 - RNA, 19 nt, Artificial Sequence
  Description of Artificial Sequence: Synthetic oligonucleotide
cccagugaaugcugucuuc

SEQ ID NO: 1806595 - RNA, 19 nt, Artificial Sequence
  Description of Artificial Sequence: Synthetic oligonucleotide
ggaauguggguaacaacau

SEQ ID NO: 1806596 - RNA, 19 nt, Artificial Sequence
  Description of Artificial Sequence: Synthetic oligonucleotide
ggguuuugcuuaagcagaa

SEQ ID NO: 1806597 - RNA, 19 nt, Artificial Sequence
  Description of Artificial Sequence: Synthetic oligonucleotide
aggcgcucuguuaggcacu

SEQ ID NO: 1806598 - RNA, 19 nt, Artificial Sequence
  Description of Artificial Sequence: Synthetic oligonucleotide
cacucgugguacuuuucau

SEQ ID NO: 1806599 - RNA, 19 nt, Artificial Sequence
  Description of Artificial Sequence: Synthetic oligonucleotide
ggguaacaacaugcccucc

SEQ ID NO: 1806600 - RNA, 19 nt, Artificial Sequence
  Description of Artificial Sequence: Synthetic oligonucleotide
agcgccacucgugguacuu

SEQ ID NO: 1806601 - RNA, 19 nt, Artificial Sequence
  Description of Artificial Sequence: Synthetic oligonucleotide
gccggagcuaguuucucgu

SEQ ID NO: 1806602 - RNA, 19 nt, Artificial Sequence
  Description of Artificial Sequence: Synthetic oligonucleotide
auacccagaguggguuauu

SEQ ID NO: 1806603 - RNA, 19 nt, Artificial Sequence
  Description of Artificial Sequence: Synthetic oligonucleotide
cugccggagcuaguuucuc

SEQ ID NO: 1806604 - RNA, 19 nt, Artificial Sequence
  Description of Artificial Sequence: Synthetic oligonucleotide
gcuggguauaaaagucaaa

SEQ ID NO: 1806605 - RNA, 19 nt, Artificial Sequence
  Description of Artificial Sequence: Synthetic oligonucleotide
gucgcaacauuuggccgcu

SEQ ID NO: 1806606 - RNA, 19 nt, Artificial Sequence
  Description of Artificial Sequence: Synthetic oligonucleotide
ggcacuuuucugagagaaa

SEQ ID NO: 1806607 - RNA, 19 nt, Artificial Sequence
  Description of Artificial Sequence: Synthetic oligonucleotide
ggccgcuuucuuuggauuu

SEQ ID NO: 1806608 - RNA, 19 nt, Artificial Sequence
  Description of Artificial Sequence: Synthetic oligonucleotide
ggcgcucuguuaggcacuc

SEQ ID NO: 1806609 - RNA, 19 nt, Artificial Sequence
  Description of Artificial Sequence: Synthetic oligonucleotide
cugacacaggcgcucuguu

SEQ ID NO: 1806610 - RNA, 19 nt, Artificial Sequence
  Description of Artificial Sequence: Synthetic oligonucleotide
gccucucgaucaugaugga

SEQ ID NO: 1806611 - RNA, 19 nt, Artificial Sequence
  Description of Artificial Sequence: Synthetic oligonucleotide
caucugccggagcuaguuu

SEQ ID NO: 1806612 - RNA, 19 nt, Artificial Sequence
  Description of Artificial Sequence: Synthetic oligonucleotide
cccaaacugaccagauuuu

SEQ ID NO: 1806613 - RNA, 19 nt, Artificial Sequence
  Description of Artificial Sequence: Synthetic oligonucleotide
ucgcaacauuuggccgcuu

SEQ ID NO: 1806614 - RNA, 19 nt, Artificial Sequence
  Description of Artificial Sequence: Synthetic oligonucleotide
gccuaugaacaggugcauu

SEQ ID NO: 1806615 - RNA, 19 nt, Artificial Sequence
  Description of Artificial Sequence: Synthetic oligonucleotide
cggagcuaguuucucguuu

SEQ ID NO: 1806616 - RNA, 19 nt, Artificial Sequence
  Description of Artificial Sequence: Synthetic oligonucleotide
cgcaacauuuggccgcuuu

SEQ ID NO: 1806617 - RNA, 19 nt, Artificial Sequence
  Description of Artificial Sequence: Synthetic oligonucleotide
cguuuacgggccucucgau

SEQ ID NO: 1806618 - RNA, 19 nt, Artificial Sequence
  Description of Artificial Sequence: Synthetic oligonucleotide
ccggagcuaguuucucguu

SEQ ID NO: 1806619 - RNA, 19 nt, Artificial Sequence
  Description of Artificial Sequence: Synthetic oligonucleotide
gcgccacucgugguacuuu

SEQ ID NO: 1806620 - RNA, 19 nt, Artificial Sequence
  Description of Artificial Sequence: Synthetic oligonucleotide
gcgcucuguuaggcacucu

SEQ ID NO: 1806621 - RNA, 19 nt, Artificial Sequence
  Description of Artificial Sequence: Synthetic oligonucleotide
aaacuaauuacccaaaugg

SEQ ID NO: 1806622 - RNA, 19 nt, Artificial Sequence
  Description of Artificial Sequence: Synthetic oligonucleotide
aacuacuucauucuugucc

SEQ ID NO: 1806623 - RNA, 19 nt, Artificial Sequence
  Description of Artificial Sequence: Synthetic oligonucleotide
aguaauuaguuauuuagcc

SEQ ID NO: 1806624 - RNA, 19 nt, Artificial Sequence
  Description of Artificial Sequence: Synthetic oligonucleotide
aacaauauuagcuuuaaga

SEQ ID NO: 1806625 - RNA, 19 nt, Artificial Sequence
  Description of Artificial Sequence: Synthetic oligonucleotide
aauacugaagguuaaaacu

SEQ ID NO: 1806626 - RNA, 19 nt, Artificial Sequence
  Description of Artificial Sequence: Synthetic oligonucleotide
uauuuguucaaccaagagg

SEQ ID NO: 1806627 - RNA, 19 nt, Artificial Sequence
  Description of Artificial Sequence: Synthetic oligonucleotide
aguuauuuagccucaaaac

SEQ ID NO: 1806628 - RNA, 19 nt, Artificial Sequence
  Description of Artificial Sequence: Synthetic oligonucleotide
aagauaagcaccuuccaag

SEQ ID NO: 1806629 - RNA, 19 nt, Artificial Sequence
  Description of Artificial Sequence: Synthetic oligonucleotide
uauuauacugccaaaacuc

SEQ ID NO: 1806630 - RNA, 19 nt, Artificial Sequence
  Description of Artificial Sequence: Synthetic oligonucleotide
aaugaauucauucggagua

SEQ ID NO: 1806631 - RNA, 19 nt, Artificial Sequence
  Description of Artificial Sequence: Synthetic oligonucleotide
uuuaucucagaaaagggga

SEQ ID NO: 1806632 - RNA, 19 nt, Artificial Sequence
  Description of Artificial Sequence: Synthetic oligonucleotide
uuugcauagauacucaagu

SEQ ID NO: 1806633 - RNA, 19 nt, Artificial Sequence
  Description of Artificial Sequence: Synthetic oligonucleotide
aucaauagguggcagaggg

SEQ ID NO: 1806634 - RNA, 19 nt, Artificial Sequence
  Description of Artificial Sequence: Synthetic oligonucleotide
uuuacacucuuuuaaaaca

SEQ ID NO: 1806635 - RNA, 19 nt, Artificial Sequence
  Description of Artificial Sequence: Synthetic oligonucleotide
uuuaaaacaauauuagcuu

SEQ ID NO: 1806636 - RNA, 19 nt, Artificial Sequence
  Description of Artificial Sequence: Synthetic oligonucleotide
acuggaauguauuauacug

SEQ ID NO: 1806637 - RNA, 19 nt, Artificial Sequence
  Description of Artificial Sequence: Synthetic oligonucleotide
uguucaaccaagaggagcc

SEQ ID NO: 1806638 - RNA, 19 nt, Artificial Sequence
  Description of Artificial Sequence: Synthetic oligonucleotide
acaauauuagcuuuaagaa

SEQ ID NO: 1806639 - RNA, 19 nt, Artificial Sequence
  Description of Artificial Sequence: Synthetic oligonucleotide
uaauuaguuauuuagccuc

SEQ ID NO: 1806640 - RNA, 19 nt, Artificial Sequence
  Description of Artificial Sequence: Synthetic oligonucleotide
aguugucucaaauucaaag

SEQ ID NO: 1806641 - RNA, 19 nt, Artificial Sequence
  Description of Artificial Sequence: Synthetic oligonucleotide
cuagaaaguauuuucuuag

SEQ ID NO: 1806642 - RNA, 19 nt, Artificial Sequence
  Description of Artificial Sequence: Synthetic oligonucleotide
uuauuuagccucaaaacuc

SEQ ID NO: 1806643 - RNA, 19 nt, Artificial Sequence
  Description of Artificial Sequence: Synthetic oligonucleotide
uguacuagaaaguauuuuc

SEQ ID NO: 1806644 - RNA, 19 nt, Artificial Sequence
  Description of Artificial Sequence: Synthetic oligonucleotide
uucaguaguaauuaguuau

SEQ ID NO: 1806645 - RNA, 19 nt, Artificial Sequence
  Description of Artificial Sequence: Synthetic oligonucleotide
uagcauuuuaauaaacagc

SEQ ID NO: 1806646 - RNA, 19 nt, Artificial Sequence
  Description of Artificial Sequence: Synthetic oligonucleotide
aagaggagccaauaaaaug

SEQ ID NO: 1806647 - RNA, 19 nt, Artificial Sequence
  Description of Artificial Sequence: Synthetic oligonucleotide
aaugaaagagcugagugcu

SEQ ID NO: 1806648 - RNA, 19 nt, Artificial Sequence
  Description of Artificial Sequence: Synthetic oligonucleotide
uaaaugaauucauucggag

SEQ ID NO: 1806649 - RNA, 19 nt, Artificial Sequence
  Description of Artificial Sequence: Synthetic oligonucleotide
gucaauuucaacuacuuca

SEQ ID NO: 1806650 - RNA, 19 nt, Artificial Sequence
  Description of Artificial Sequence: Synthetic oligonucleotide
aauucauucggaguaccac

SEQ ID NO: 1806651 - RNA, 19 nt, Artificial Sequence
  Description of Artificial Sequence: Synthetic oligonucleotide
ucucauauuuuaauuuugc

SEQ ID NO: 1806652 - RNA, 19 nt, Artificial Sequence
  Description of Artificial Sequence: Synthetic oligonucleotide
ugcauagauacucaagucu

SEQ ID NO: 1806653 - RNA, 19 nt, Artificial Sequence
  Description of Artificial Sequence: Synthetic oligonucleotide
uaauuacccaaauggaaag

SEQ ID NO: 1806654 - RNA, 19 nt, Artificial Sequence
  Description of Artificial Sequence: Synthetic oligonucleotide
uguauuauacugccaaaac

SEQ ID NO: 1806655 - RNA, 19 nt, Artificial Sequence
  Description of Artificial Sequence: Synthetic oligonucleotide
auaaacagcaaauacugaa

SEQ ID NO: 1806656 - RNA, 19 nt, Artificial Sequence
  Description of Artificial Sequence: Synthetic oligonucleotide
cuuagcaucagucauauaa

SEQ ID NO: 1806657 - RNA, 19 nt, Artificial Sequence
  Description of Artificial Sequence: Synthetic oligonucleotide
uuuugcauagauacucaag

SEQ ID NO: 1806658 - RNA, 19 nt, Artificial Sequence
  Description of Artificial Sequence: Synthetic oligonucleotide
gaaugaaagagcugagugc

SEQ ID NO: 1806659 - RNA, 19 nt, Artificial Sequence
  Description of Artificial Sequence: Synthetic oligonucleotide
aagucuauuuguucaacca

SEQ ID NO: 1806660 - RNA, 19 nt, Artificial Sequence
  Description of Artificial Sequence: Synthetic oligonucleotide
uccauuaggauauucagua

SEQ ID NO: 1806661 - RNA, 19 nt, Artificial Sequence
  Description of Artificial Sequence: Synthetic oligonucleotide
uggaauguauuauacugcc

SEQ ID NO: 1806662 - RNA, 19 nt, Artificial Sequence
  Description of Artificial Sequence: Synthetic oligonucleotide
aaaaucuccauuaggauau

SEQ ID NO: 1806663 - RNA, 19 nt, Artificial Sequence
  Description of Artificial Sequence: Synthetic oligonucleotide
uaguuauuuagccucaaaa

SEQ ID NO: 1806664 - RNA, 19 nt, Artificial Sequence
  Description of Artificial Sequence: Synthetic oligonucleotide
acaggcaucuacuucuuac

SEQ ID NO: 1806665 - RNA, 19 nt, Artificial Sequence
  Description of Artificial Sequence: Synthetic oligonucleotide
uaauuuugcauagauacuc

SEQ ID NO: 1806666 - RNA, 19 nt, Artificial Sequence
  Description of Artificial Sequence: Synthetic oligonucleotide
uccacaaaguauuuugccc

SEQ ID NO: 1806667 - RNA, 19 nt, Artificial Sequence
  Description of Artificial Sequence: Synthetic oligonucleotide
gacggcgggacccagagcg

SEQ ID NO: 1806668 - RNA, 19 nt, Artificial Sequence
  Description of Artificial Sequence: Synthetic oligonucleotide
uauuuagccucaaaacucu

SEQ ID NO: 1806669 - RNA, 19 nt, Artificial Sequence
  Description of Artificial Sequence: Synthetic oligonucleotide
caaauucaaagaauccugc

SEQ ID NO: 1806670 - RNA, 19 nt, Artificial Sequence
  Description of Artificial Sequence: Synthetic oligonucleotide
gaauguauuauacugccaa

SEQ ID NO: 1806671 - RNA, 19 nt, Artificial Sequence
  Description of Artificial Sequence: Synthetic oligonucleotide
uucggaguaccacagauaa

SEQ ID NO: 1806672 - RNA, 19 nt, Artificial Sequence
  Description of Artificial Sequence: Synthetic oligonucleotide
agaaaguauuuucuuagca

SEQ ID NO: 1806673 - RNA, 19 nt, Artificial Sequence
  Description of Artificial Sequence: Synthetic oligonucleotide
aguaucaugucaaguaugg

SEQ ID NO: 1806674 - RNA, 19 nt, Artificial Sequence
  Description of Artificial Sequence: Synthetic oligonucleotide
agucucauuaauuuaaauu

SEQ ID NO: 1806675 - RNA, 19 nt, Artificial Sequence
  Description of Artificial Sequence: Synthetic oligonucleotide
aaugcauccacaaaguauu

SEQ ID NO: 1806676 - RNA, 19 nt, Artificial Sequence
  Description of Artificial Sequence: Synthetic oligonucleotide
ucaauuucaacuacuucau

SEQ ID NO: 1806677 - RNA, 19 nt, Artificial Sequence
  Description of Artificial Sequence: Synthetic oligonucleotide
uucaacuacuucauucuug

SEQ ID NO: 1806678 - RNA, 19 nt, Artificial Sequence
  Description of Artificial Sequence: Synthetic oligonucleotide
uccgcauuugcacacaagu

SEQ ID NO: 1806679 - RNA, 19 nt, Artificial Sequence
  Description of Artificial Sequence: Synthetic oligonucleotide
aaacaauauuagcuuuaag

SEQ ID NO: 1806680 - RNA, 19 nt, Artificial Sequence
  Description of Artificial Sequence: Synthetic oligonucleotide
cagauaagcuuucuggugc

SEQ ID NO: 1806681 - RNA, 19 nt, Artificial Sequence
  Description of Artificial Sequence: Synthetic oligonucleotide
uuaaaacuaauuacccaaa

SEQ ID NO: 1806682 - RNA, 19 nt, Artificial Sequence
  Description of Artificial Sequence: Synthetic oligonucleotide
auuuucuuagcaucaguca

SEQ ID NO: 1806683 - RNA, 19 nt, Artificial Sequence
  Description of Artificial Sequence: Synthetic oligonucleotide
uucauucggaguaccacag

SEQ ID NO: 1806684 - RNA, 19 nt, Artificial Sequence
  Description of Artificial Sequence: Synthetic oligonucleotide
cuggaauguauuauacugc

SEQ ID NO: 1806685 - RNA, 19 nt, Artificial Sequence
  Description of Artificial Sequence: Synthetic oligonucleotide
uuccaaggcacgcggaacg

SEQ ID NO: 1806686 - RNA, 19 nt, Artificial Sequence
  Description of Artificial Sequence: Synthetic oligonucleotide
agaggagccaauaaaaugu

SEQ ID NO: 1806687 - RNA, 19 nt, Artificial Sequence
  Description of Artificial Sequence: Synthetic oligonucleotide
ucucauuaauuuaaauuua

SEQ ID NO: 1806688 - RNA, 19 nt, Artificial Sequence
  Description of Artificial Sequence: Synthetic oligonucleotide
aacgugagcggcucagccg

SEQ ID NO: 1806689 - RNA, 19 nt, Artificial Sequence
  Description of Artificial Sequence: Synthetic oligonucleotide
cagagcacgaaugaaagag

SEQ ID NO: 1806690 - RNA, 19 nt, Artificial Sequence
  Description of Artificial Sequence: Synthetic oligonucleotide
aguauggaaaauaacauuu

SEQ ID NO: 1806691 - RNA, 19 nt, Artificial Sequence
  Description of Artificial Sequence: Synthetic oligonucleotide
guuauuuagccucaaaacu

SEQ ID NO: 1806692 - RNA, 19 nt, Artificial Sequence
  Description of Artificial Sequence: Synthetic oligonucleotide
auaacaguaucaugucaag

SEQ ID NO: 1806693 - RNA, 19 nt, Artificial Sequence
  Description of Artificial Sequence: Synthetic oligonucleotide
uagaaaguauuuucuuagc

SEQ ID NO: 1806694 - RNA, 19 nt, Artificial Sequence
  Description of Artificial Sequence: Synthetic oligonucleotide
aauguauuauacugccaaa

SEQ ID NO: 1806695 - RNA, 19 nt, Artificial Sequence
  Description of Artificial Sequence: Synthetic oligonucleotide
acgugagcggcucagccgc

SEQ ID NO: 1806696 - RNA, 19 nt, Artificial Sequence
  Description of Artificial Sequence: Synthetic oligonucleotide
acagauaagcuuucuggug

SEQ ID NO: 1806697 - RNA, 19 nt, Artificial Sequence
  Description of Artificial Sequence: Synthetic oligonucleotide
cuaauuacccaaauggaaa

SEQ ID NO: 1806698 - RNA, 19 nt, Artificial Sequence
  Description of Artificial Sequence: Synthetic oligonucleotide
caagucuauuuguucaacc

SEQ ID NO: 1806699 - RNA, 19 nt, Artificial Sequence
  Description of Artificial Sequence: Synthetic oligonucleotide
agccucaaaacucuuccuc

SEQ ID NO: 1806700 - RNA, 19 nt, Artificial Sequence
  Description of Artificial Sequence: Synthetic oligonucleotide
gauaacaguaucaugucaa

SEQ ID NO: 1806701 - RNA, 19 nt, Artificial Sequence
  Description of Artificial Sequence: Synthetic oligonucleotide
uaggauauucaguaguaau

SEQ ID NO: 1806702 - RNA, 19 nt, Artificial Sequence
  Description of Artificial Sequence: Synthetic oligonucleotide
aucuacuucuuacuguucu

SEQ ID NO: 1806703 - RNA, 19 nt, Artificial Sequence
  Description of Artificial Sequence: Synthetic oligonucleotide
uuacccaaauggaaagucu

SEQ ID NO: 1806704 - RNA, 19 nt, Artificial Sequence
  Description of Artificial Sequence: Synthetic oligonucleotide
gaaagucucauuaauuuaa

SEQ ID NO: 1806705 - RNA, 19 nt, Artificial Sequence
  Description of Artificial Sequence: Synthetic oligonucleotide
acuagaaaguauuuucuua

SEQ ID NO: 1806706 - RNA, 19 nt, Artificial Sequence
  Description of Artificial Sequence: Synthetic oligonucleotide
auucauucggaguaccaca

SEQ ID NO: 1806707 - RNA, 19 nt, Artificial Sequence
  Description of Artificial Sequence: Synthetic oligonucleotide
ugcacacaagucuucaaga

SEQ ID NO: 1806708 - RNA, 19 nt, Artificial Sequence
  Description of Artificial Sequence: Synthetic oligonucleotide
cuauuuguucaaccaagag

SEQ ID NO: 1806709 - RNA, 19 nt, Artificial Sequence
  Description of Artificial Sequence: Synthetic oligonucleotide
agaucaauagguggcagag

SEQ ID NO: 1806710 - RNA, 19 nt, Artificial Sequence
  Description of Artificial Sequence: Synthetic oligonucleotide
acacaagucuucaagagcu

SEQ ID NO: 1806711 - RNA, 19 nt, Artificial Sequence
  Description of Artificial Sequence: Synthetic oligonucleotide
aacauuuccuuuaguuguc

SEQ ID NO: 1806712 - RNA, 19 nt, Artificial Sequence
  Description of Artificial Sequence: Synthetic oligonucleotide
uuguucaaccaagaggagc

SEQ ID NO: 1806713 - RNA, 19 nt, Artificial Sequence
  Description of Artificial Sequence: Synthetic oligonucleotide
auagguggcagaggguucc

SEQ ID NO: 1806714 - RNA, 19 nt, Artificial Sequence
  Description of Artificial Sequence: Synthetic oligonucleotide
auaagcaccuuccaaguua

SEQ ID NO: 1806715 - RNA, 19 nt, Artificial Sequence
  Description of Artificial Sequence: Synthetic oligonucleotide
uugauaacaguaucauguc

SEQ ID NO: 1806716 - RNA, 19 nt, Artificial Sequence
  Description of Artificial Sequence: Synthetic oligonucleotide
guuugauaacaguaucaug

SEQ ID NO: 1806717 - RNA, 19 nt, Artificial Sequence
  Description of Artificial Sequence: Synthetic oligonucleotide
cacacaagucuucaagagc

SEQ ID NO: 1806718 - RNA, 19 nt, Artificial Sequence
  Description of Artificial Sequence: Synthetic oligonucleotide
aguuagagcaugaacaaaa

SEQ ID NO: 1806719 - RNA, 19 nt, Artificial Sequence
  Description of Artificial Sequence: Synthetic oligonucleotide
uacugaagguuaaaacuaa

SEQ ID NO: 1806720 - RNA, 19 nt, Artificial Sequence
  Description of Artificial Sequence: Synthetic oligonucleotide
uacccaaauggaaagucuc

SEQ ID NO: 1806721 - RNA, 19 nt, Artificial Sequence
  Description of Artificial Sequence: Synthetic oligonucleotide
aauuaguuauuuagccuca

SEQ ID NO: 1806722 - RNA, 19 nt, Artificial Sequence
  Description of Artificial Sequence: Synthetic oligonucleotide
acaguaucaugucaaguau

SEQ ID NO: 1806723 - RNA, 19 nt, Artificial Sequence
  Description of Artificial Sequence: Synthetic oligonucleotide
gaaaguauuuucuuagcau

SEQ ID NO: 1806724 - RNA, 19 nt, Artificial Sequence
  Description of Artificial Sequence: Synthetic oligonucleotide
aauuacccaaauggaaagu

SEQ ID NO: 1806725 - RNA, 19 nt, Artificial Sequence
  Description of Artificial Sequence: Synthetic oligonucleotide
agagcacgaaugaaagagc

SEQ ID NO: 1806726 - RNA, 19 nt, Artificial Sequence
  Description of Artificial Sequence: Synthetic oligonucleotide
ccaaguuagagcaugaaca

SEQ ID NO: 1806727 - RNA, 19 nt, Artificial Sequence
  Description of Artificial Sequence: Synthetic oligonucleotide
ucggggaagucgcugagca

SEQ ID NO: 1806728 - RNA, 19 nt, Artificial Sequence
  Description of Artificial Sequence: Synthetic oligonucleotide
uccucuaaagcugccaaca

SEQ ID NO: 1806729 - RNA, 19 nt, Artificial Sequence
  Description of Artificial Sequence: Synthetic oligonucleotide
acuaauuacccaaauggaa

SEQ ID NO: 1806730 - RNA, 19 nt, Artificial Sequence
  Description of Artificial Sequence: Synthetic oligonucleotide
ucaguaguaauuaguuauu

SEQ ID NO: 1806731 - RNA, 19 nt, Artificial Sequence
  Description of Artificial Sequence: Synthetic oligonucleotide
caaauggaaagucucauua

SEQ ID NO: 1806732 - RNA, 19 nt, Artificial Sequence
  Description of Artificial Sequence: Synthetic oligonucleotide
agcuauacuauauccuuaa

SEQ ID NO: 1806733 - RNA, 19 nt, Artificial Sequence
  Description of Artificial Sequence: Synthetic oligonucleotide
uagaucaauagguggcaga

SEQ ID NO: 1806734 - RNA, 19 nt, Artificial Sequence
  Description of Artificial Sequence: Synthetic oligonucleotide
gaagucgcugagcaagagc

SEQ ID NO: 1806735 - RNA, 19 nt, Artificial Sequence
  Description of Artificial Sequence: Synthetic oligonucleotide
guauuauacugccaaaacu

SEQ ID NO: 1806736 - RNA, 19 nt, Artificial Sequence
  Description of Artificial Sequence: Synthetic oligonucleotide
auacuauauccuuaacaaa

SEQ ID NO: 1806737 - RNA, 19 nt, Artificial Sequence
  Description of Artificial Sequence: Synthetic oligonucleotide
agcaccuuccaaguuagag

SEQ ID NO: 1806738 - RNA, 19 nt, Artificial Sequence
  Description of Artificial Sequence: Synthetic oligonucleotide
uccauugccgauagcauuu

SEQ ID NO: 1806739 - RNA, 19 nt, Artificial Sequence
  Description of Artificial Sequence: Synthetic oligonucleotide
ucaugucaaguauggaaaa

SEQ ID NO: 1806740 - RNA, 19 nt, Artificial Sequence
  Description of Artificial Sequence: Synthetic oligonucleotide
gcaagagccgcuuccaagg

SEQ ID NO: 1806741 - RNA, 19 nt, Artificial Sequence
  Description of Artificial Sequence: Synthetic oligonucleotide
gagcugcuagaucaauagg

SEQ ID NO: 1806742 - RNA, 19 nt, Artificial Sequence
  Description of Artificial Sequence: Synthetic oligonucleotide
ccacaaaguauuuugcccc

SEQ ID NO: 1806743 - RNA, 19 nt, Artificial Sequence
  Description of Artificial Sequence: Synthetic oligonucleotide
agcugcuagaucaauaggu

SEQ ID NO: 1806744 - RNA, 19 nt, Artificial Sequence
  Description of Artificial Sequence: Synthetic oligonucleotide
gccgauagcauuuuaauaa

SEQ ID NO: 1806745 - RNA, 19 nt, Artificial Sequence
  Description of Artificial Sequence: Synthetic oligonucleotide
gccaauaaaauguacuaga

SEQ ID NO: 1806746 - RNA, 19 nt, Artificial Sequence
  Description of Artificial Sequence: Synthetic oligonucleotide
ugaauucauucggaguacc

SEQ ID NO: 1806747 - RNA, 19 nt, Artificial Sequence
  Description of Artificial Sequence: Synthetic oligonucleotide
uccugaaguguuucuguca

SEQ ID NO: 1806748 - RNA, 19 nt, Artificial Sequence
  Description of Artificial Sequence: Synthetic oligonucleotide
acagcaaauacugaagguu

SEQ ID NO: 1806749 - RNA, 19 nt, Artificial Sequence
  Description of Artificial Sequence: Synthetic oligonucleotide
gaacgugagcggcucagcc

SEQ ID NO: 1806750 - RNA, 19 nt, Artificial Sequence
  Description of Artificial Sequence: Synthetic oligonucleotide
gguuaaaacuaauuaccca

SEQ ID NO: 1806751 - RNA, 19 nt, Artificial Sequence
  Description of Artificial Sequence: Synthetic oligonucleotide
uugccgauagcauuuuaau

SEQ ID NO: 1806752 - RNA, 19 nt, Artificial Sequence
  Description of Artificial Sequence: Synthetic oligonucleotide
accgagccgccccagacgg

SEQ ID NO: 1806753 - RNA, 19 nt, Artificial Sequence
  Description of Artificial Sequence: Synthetic oligonucleotide
uccgccaugauccccgcgu

SEQ ID NO: 1806754 - RNA, 19 nt, Artificial Sequence
  Description of Artificial Sequence: Synthetic oligonucleotide
agagccgcuuccaaggcac

SEQ ID NO: 1806755 - RNA, 19 nt, Artificial Sequence
  Description of Artificial Sequence: Synthetic oligonucleotide
gaucaauagguggcagagg

SEQ ID NO: 1806756 - RNA, 19 nt, Artificial Sequence
  Description of Artificial Sequence: Synthetic oligonucleotide
uggaugggcgccccgucgg

SEQ ID NO: 1806757 - RNA, 19 nt, Artificial Sequence
  Description of Artificial Sequence: Synthetic oligonucleotide
uaacaguaucaugucaagu

SEQ ID NO: 1806758 - RNA, 19 nt, Artificial Sequence
  Description of Artificial Sequence: Synthetic oligonucleotide
auguauuauacugccaaaa

SEQ ID NO: 1806759 - RNA, 19 nt, Artificial Sequence
  Description of Artificial Sequence: Synthetic oligonucleotide
uuaggauauucaguaguaa

SEQ ID NO: 1806760 - RNA, 19 nt, Artificial Sequence
  Description of Artificial Sequence: Synthetic oligonucleotide
agauaagcuuucuggugca

SEQ ID NO: 1806761 - RNA, 19 nt, Artificial Sequence
  Description of Artificial Sequence: Synthetic oligonucleotide
ucaauagguggcagagggu

SEQ ID NO: 1806762 - RNA, 19 nt, Artificial Sequence
  Description of Artificial Sequence: Synthetic oligonucleotide
ugccgauagcauuuuaaua

SEQ ID NO: 1806763 - RNA, 19 nt, Artificial Sequence
  Description of Artificial Sequence: Synthetic oligonucleotide
guacuggaauguauuauac

SEQ ID NO: 1806764 - RNA, 19 nt, Artificial Sequence
  Description of Artificial Sequence: Synthetic oligonucleotide
aucuccauuaggauauuca

SEQ ID NO: 1806765 - RNA, 19 nt, Artificial Sequence
  Description of Artificial Sequence: Synthetic oligonucleotide
ucaagucuauuuguucaac

SEQ ID NO: 1806766 - RNA, 19 nt, Artificial Sequence
  Description of Artificial Sequence: Synthetic oligonucleotide
aagagccgcuuccaaggca

SEQ ID NO: 1806767 - RNA, 19 nt, Artificial Sequence
  Description of Artificial Sequence: Synthetic oligonucleotide
aggauauucaguaguaauu

SEQ ID NO: 1806768 - RNA, 19 nt, Artificial Sequence
  Description of Artificial Sequence: Synthetic oligonucleotide
guuugcgggaccgagccgc

SEQ ID NO: 1806769 - RNA, 19 nt, Artificial Sequence
  Description of Artificial Sequence: Synthetic oligonucleotide
gucaaguauggaaaauaac

SEQ ID NO: 1806770 - RNA, 19 nt, Artificial Sequence
  Description of Artificial Sequence: Synthetic oligonucleotide
aaguuagagcaugaacaaa

SEQ ID NO: 1806771 - RNA, 19 nt, Artificial Sequence
  Description of Artificial Sequence: Synthetic oligonucleotide
cucuccgggcuccaggccg

SEQ ID NO: 1806772 - RNA, 19 nt, Artificial Sequence
  Description of Artificial Sequence: Synthetic oligonucleotide
ggugcagagggacauuggc

SEQ ID NO: 1806773 - RNA, 19 nt, Artificial Sequence
  Description of Artificial Sequence: Synthetic oligonucleotide
ucggaguaccacagauaag

SEQ ID NO: 1806774 - RNA, 19 nt, Artificial Sequence
  Description of Artificial Sequence: Synthetic oligonucleotide
aggagccaauaaaauguac

SEQ ID NO: 1806775 - RNA, 19 nt, Artificial Sequence
  Description of Artificial Sequence: Synthetic oligonucleotide
agccgcacgccgcuuggcc

SEQ ID NO: 1806776 - RNA, 19 nt, Artificial Sequence
  Description of Artificial Sequence: Synthetic oligonucleotide
cuagaucaauagguggcag

SEQ ID NO: 1806777 - RNA, 19 nt, Artificial Sequence
  Description of Artificial Sequence: Synthetic oligonucleotide
ucuacuucuuacuguucuu

SEQ ID NO: 1806778 - RNA, 19 nt, Artificial Sequence
  Description of Artificial Sequence: Synthetic oligonucleotide
cuucagcuccuccugucag

SEQ ID NO: 1806779 - RNA, 19 nt, Artificial Sequence
  Description of Artificial Sequence: Synthetic oligonucleotide
cggaguaccacagauaagc

SEQ ID NO: 1806780 - RNA, 19 nt, Artificial Sequence
  Description of Artificial Sequence: Synthetic oligonucleotide
caugggccggggaugggcg

SEQ ID NO: 1806781 - RNA, 19 nt, Artificial Sequence
  Description of Artificial Sequence: Synthetic oligonucleotide
gaccgagccgccccagacg

SEQ ID NO: 1806782 - RNA, 19 nt, Artificial Sequence
  Description of Artificial Sequence: Synthetic oligonucleotide
auccauugccgauagcauu

SEQ ID NO: 1806783 - RNA, 19 nt, Artificial Sequence
  Description of Artificial Sequence: Synthetic oligonucleotide
auugccgauagcauuuuaa

SEQ ID NO: 1806784 - RNA, 19 nt, Artificial Sequence
  Description of Artificial Sequence: Synthetic oligonucleotide
acgccgcuuggccaugggc

SEQ ID NO: 1806785 - RNA, 19 nt, Artificial Sequence
  Description of Artificial Sequence: Synthetic oligonucleotide
aucagucauauaaaugaau

SEQ ID NO: 1806786 - RNA, 19 nt, Artificial Sequence
  Description of Artificial Sequence: Synthetic oligonucleotide
gucgcuugcggggagcagg

SEQ ID NO: 1806787 - RNA, 19 nt, Artificial Sequence
  Description of Artificial Sequence: Synthetic oligonucleotide
acgaaugaaagagcugagu

SEQ ID NO: 1806788 - RNA, 19 nt, Artificial Sequence
  Description of Artificial Sequence: Synthetic oligonucleotide
auguacuagaaaguauuuu

SEQ ID NO: 1806789 - RNA, 19 nt, Artificial Sequence
  Description of Artificial Sequence: Synthetic oligonucleotide
aggcacgcggaacgugagc

SEQ ID NO: 1806790 - RNA, 19 nt, Artificial Sequence
  Description of Artificial Sequence: Synthetic oligonucleotide
gcauccauugccgauagca

SEQ ID NO: 1806791 - RNA, 19 nt, Artificial Sequence
  Description of Artificial Sequence: Synthetic oligonucleotide
auagauacucaagucuauu

SEQ ID NO: 1806792 - RNA, 19 nt, Artificial Sequence
  Description of Artificial Sequence: Synthetic oligonucleotide
guacuagaaaguauuuucu

SEQ ID NO: 1806793 - RNA, 19 nt, Artificial Sequence
  Description of Artificial Sequence: Synthetic oligonucleotide
cuguccgcacuccccaccg

SEQ ID NO: 1806794 - RNA, 19 nt, Artificial Sequence
  Description of Artificial Sequence: Synthetic oligonucleotide
caugucaauuucaacuacu

SEQ ID NO: 1806795 - RNA, 19 nt, Artificial Sequence
  Description of Artificial Sequence: Synthetic oligonucleotide
ggcacgcggaacgugagcg

SEQ ID NO: 1806796 - RNA, 19 nt, Artificial Sequence
  Description of Artificial Sequence: Synthetic oligonucleotide
guccgcacuccccaccgcg

SEQ ID NO: 1806797 - RNA, 19 nt, Artificial Sequence
  Description of Artificial Sequence: Synthetic oligonucleotide
uccuccugcucgccgggag

SEQ ID NO: 1806798 - RNA, 19 nt, Artificial Sequence
  Description of Artificial Sequence: Synthetic oligonucleotide
caaaacucuucacugggcu

SEQ ID NO: 1806799 - RNA, 19 nt, Artificial Sequence
  Description of Artificial Sequence: Synthetic oligonucleotide
gcugcuagaucaauaggug

SEQ ID NO: 1806800 - RNA, 19 nt, Artificial Sequence
  Description of Artificial Sequence: Synthetic oligonucleotide
cacagauaagcuuucuggu

SEQ ID NO: 1806801 - RNA, 19 nt, Artificial Sequence
  Description of Artificial Sequence: Synthetic oligonucleotide
ucgcuugcggggagcaggc

SEQ ID NO: 1806802 - RNA, 19 nt, Artificial Sequence
  Description of Artificial Sequence: Synthetic oligonucleotide
gucgcugagcaagagccgc

SEQ ID NO: 1806803 - RNA, 19 nt, Artificial Sequence
  Description of Artificial Sequence: Synthetic oligonucleotide
cagacggcgggacccagag

SEQ ID NO: 1806804 - RNA, 19 nt, Artificial Sequence
  Description of Artificial Sequence: Synthetic oligonucleotide
gccagagcacgaaugaaag

SEQ ID NO: 1806805 - RNA, 19 nt, Artificial Sequence
  Description of Artificial Sequence: Synthetic oligonucleotide
ccggguuuccuccugcucg

SEQ ID NO: 1806806 - RNA, 19 nt, Artificial Sequence
  Description of Artificial Sequence: Synthetic oligonucleotide
uucaaccaagaggagccaa

SEQ ID NO: 1806807 - RNA, 19 nt, Artificial Sequence
  Description of Artificial Sequence: Synthetic oligonucleotide
caaggcacgcggaacguga

SEQ ID NO: 1806808 - RNA, 19 nt, Artificial Sequence
  Description of Artificial Sequence: Synthetic oligonucleotide
augucaauuucaacuacuu

SEQ ID NO: 1806809 - RNA, 19 nt, Artificial Sequence
  Description of Artificial Sequence: Synthetic oligonucleotide
uuugcgggaccgagccgcc

SEQ ID NO: 1806810 - RNA, 19 nt, Artificial Sequence
  Description of Artificial Sequence: Synthetic oligonucleotide
caggccauccgcauuugca

SEQ ID NO: 1806811 - RNA, 19 nt, Artificial Sequence
  Description of Artificial Sequence: Synthetic oligonucleotide
gagcacgaaugaaagagcu

SEQ ID NO: 1806812 - RNA, 19 nt, Artificial Sequence
  Description of Artificial Sequence: Synthetic oligonucleotide
ccaagaggagccaauaaaa

SEQ ID NO: 1806813 - RNA, 19 nt, Artificial Sequence
  Description of Artificial Sequence: Synthetic oligonucleotide
ccaaaacucuucacugggc

SEQ ID NO: 1806814 - RNA, 19 nt, Artificial Sequence
  Description of Artificial Sequence: Synthetic oligonucleotide
auacucaagucuauuuguu

SEQ ID NO: 1806815 - RNA, 19 nt, Artificial Sequence
  Description of Artificial Sequence: Synthetic oligonucleotide
agccgcuuccaaggcacgc

SEQ ID NO: 1806816 - RNA, 19 nt, Artificial Sequence
  Description of Artificial Sequence: Synthetic oligonucleotide
auuaguuauuuagccucaa

SEQ ID NO: 1806817 - RNA, 19 nt, Artificial Sequence
  Description of Artificial Sequence: Synthetic oligonucleotide
agcaaauacugaagguuaa

SEQ ID NO: 1806818 - RNA, 19 nt, Artificial Sequence
  Description of Artificial Sequence: Synthetic oligonucleotide
gguuuccuccugcucgccg

SEQ ID NO: 1806819 - RNA, 19 nt, Artificial Sequence
  Description of Artificial Sequence: Synthetic oligonucleotide
gcguuugcgggaccgagcc

SEQ ID NO: 1806820 - RNA, 19 nt, Artificial Sequence
  Description of Artificial Sequence: Synthetic oligonucleotide
aaggcacgcggaacgugag

SEQ ID NO: 1806821 - RNA, 19 nt, Artificial Sequence
  Description of Artificial Sequence: Synthetic oligonucleotide
cugaagguuaaaacuaauu

SEQ ID NO: 1806822 - RNA, 19 nt, Artificial Sequence
  Description of Artificial Sequence: Synthetic oligonucleotide
caagaggagccaauaaaau

SEQ ID NO: 1806823 - RNA, 19 nt, Artificial Sequence
  Description of Artificial Sequence: Synthetic oligonucleotide
cacgcggaacgugagcggc

SEQ ID NO: 1806824 - RNA, 19 nt, Artificial Sequence
  Description of Artificial Sequence: Synthetic oligonucleotide
uggcguuugcgggaccgag

SEQ ID NO: 1806825 - RNA, 19 nt, Artificial Sequence
  Description of Artificial Sequence: Synthetic oligonucleotide
caacuacuucauucuuguc

SEQ ID NO: 1806826 - RNA, 19 nt, Artificial Sequence
  Description of Artificial Sequence: Synthetic oligonucleotide
gacauuggccagagcacga

SEQ ID NO: 1806827 - RNA, 19 nt, Artificial Sequence
  Description of Artificial Sequence: Synthetic oligonucleotide
gcauagauacucaagucua

SEQ ID NO: 1806828 - RNA, 19 nt, Artificial Sequence
  Description of Artificial Sequence: Synthetic oligonucleotide
aggguuccuccaguacugg

SEQ ID NO: 1806829 - RNA, 19 nt, Artificial Sequence
  Description of Artificial Sequence: Synthetic oligonucleotide
cauucggaguaccacagau

SEQ ID NO: 1806830 - RNA, 19 nt, Artificial Sequence
  Description of Artificial Sequence: Synthetic oligonucleotide
gauaagcaccuuccaaguu

SEQ ID NO: 1806831 - RNA, 19 nt, Artificial Sequence
  Description of Artificial Sequence: Synthetic oligonucleotide
guccccgcagccucgucgc

SEQ ID NO: 1806832 - RNA, 19 nt, Artificial Sequence
  Description of Artificial Sequence: Synthetic oligonucleotide
ggugccagcgggcgggcgg

SEQ ID NO: 1806833 - RNA, 19 nt, Artificial Sequence
  Description of Artificial Sequence: Synthetic oligonucleotide
ugcauccauugccgauagc

SEQ ID NO: 1806834 - RNA, 19 nt, Artificial Sequence
  Description of Artificial Sequence: Synthetic oligonucleotide
uccgcacuccccaccgcgu

SEQ ID NO: 1806835 - RNA, 19 nt, Artificial Sequence
  Description of Artificial Sequence: Synthetic oligonucleotide
cagcuauacuauauccuua

SEQ ID NO: 1806836 - RNA, 19 nt, Artificial Sequence
  Description of Artificial Sequence: Synthetic oligonucleotide
gcuugcggggagcaggcgc

SEQ ID NO: 1806837 - RNA, 19 nt, Artificial Sequence
  Description of Artificial Sequence: Synthetic oligonucleotide
uccaaggcacgcggaacgu

SEQ ID NO: 1806838 - RNA, 19 nt, Artificial Sequence
  Description of Artificial Sequence: Synthetic oligonucleotide
gguuugauaacaguaucau

SEQ ID NO: 1806839 - RNA, 19 nt, Artificial Sequence
  Description of Artificial Sequence: Synthetic oligonucleotide
cauagauacucaagucuau

SEQ ID NO: 1806840 - RNA, 19 nt, Artificial Sequence
  Description of Artificial Sequence: Synthetic oligonucleotide
gacccagagcggcggcucc

SEQ ID NO: 1806841 - RNA, 19 nt, Artificial Sequence
  Description of Artificial Sequence: Synthetic oligonucleotide
gcuagaucaauagguggca

SEQ ID NO: 1806842 - RNA, 19 nt, Artificial Sequence
  Description of Artificial Sequence: Synthetic oligonucleotide
auucggaguaccacagaua

SEQ ID NO: 1806843 - RNA, 19 nt, Artificial Sequence
  Description of Artificial Sequence: Synthetic oligonucleotide
aaaucuccauuaggauauu

SEQ ID NO: 1806844 - RNA, 19 nt, Artificial Sequence
  Description of Artificial Sequence: Synthetic oligonucleotide
ucucgcuccuggccgccgu

SEQ ID NO: 1806845 - RNA, 19 nt, Artificial Sequence
  Description of Artificial Sequence: Synthetic oligonucleotide
ggaauguauuauacugcca

SEQ ID NO: 1806846 - RNA, 19 nt, Artificial Sequence
  Description of Artificial Sequence: Synthetic oligonucleotide
cucagccgcacgccgcuug

SEQ ID NO: 1806847 - RNA, 19 nt, Artificial Sequence
  Description of Artificial Sequence: Synthetic oligonucleotide
auccgcauuugcacacaag

SEQ ID NO: 1806848 - RNA, 19 nt, Artificial Sequence
  Description of Artificial Sequence: Synthetic oligonucleotide
ccgcauuugcacacaaguc

SEQ ID NO: 1806849 - RNA, 19 nt, Artificial Sequence
  Description of Artificial Sequence: Synthetic oligonucleotide
aggcuccgccaugaucccc

SEQ ID NO: 1806850 - RNA, 19 nt, Artificial Sequence
  Description of Artificial Sequence: Synthetic oligonucleotide
ccucuaaagcugccaacac

SEQ ID NO: 1806851 - RNA, 19 nt, Artificial Sequence
  Description of Artificial Sequence: Synthetic oligonucleotide
guaccacagauaagcuuuc

SEQ ID NO: 1806852 - RNA, 19 nt, Artificial Sequence
  Description of Artificial Sequence: Synthetic oligonucleotide
cacgcgggugccagcgggc

SEQ ID NO: 1806853 - RNA, 19 nt, Artificial Sequence
  Description of Artificial Sequence: Synthetic oligonucleotide
gagcaagagccgcuuccaa

SEQ ID NO: 1806854 - RNA, 19 nt, Artificial Sequence
  Description of Artificial Sequence: Synthetic oligonucleotide
gcaucuacuucuuacuguu

SEQ ID NO: 1806855 - RNA, 19 nt, Artificial Sequence
  Description of Artificial Sequence: Synthetic oligonucleotide
ggaagucgcugagcaagag

SEQ ID NO: 1806856 - RNA, 19 nt, Artificial Sequence
  Description of Artificial Sequence: Synthetic oligonucleotide
ucgucgcuugcggggagca

SEQ ID NO: 1806857 - RNA, 19 nt, Artificial Sequence
  Description of Artificial Sequence: Synthetic oligonucleotide
cugcucgccgggagguggc

SEQ ID NO: 1806858 - RNA, 19 nt, Artificial Sequence
  Description of Artificial Sequence: Synthetic oligonucleotide
ucuuagcaucagucauaua

SEQ ID NO: 1806859 - RNA, 19 nt, Artificial Sequence
  Description of Artificial Sequence: Synthetic oligonucleotide
cauccauugccgauagcau

SEQ ID NO: 1806860 - RNA, 19 nt, Artificial Sequence
  Description of Artificial Sequence: Synthetic oligonucleotide
gcacgcgggugccagcggg

SEQ ID NO: 1806861 - RNA, 19 nt, Artificial Sequence
  Description of Artificial Sequence: Synthetic oligonucleotide
auuuagccucaaaacucuu

SEQ ID NO: 1806862 - RNA, 19 nt, Artificial Sequence
  Description of Artificial Sequence: Synthetic oligonucleotide
cgccgcuuggccaugggcc

SEQ ID NO: 1806863 - RNA, 19 nt, Artificial Sequence
  Description of Artificial Sequence: Synthetic oligonucleotide
gcacgcggaacgugagcgg

SEQ ID NO: 1806864 - RNA, 19 nt, Artificial Sequence
  Description of Artificial Sequence: Synthetic oligonucleotide
gggaugggcggcacgcggg

SEQ ID NO: 1806865 - RNA, 19 nt, Artificial Sequence
  Description of Artificial Sequence: Synthetic oligonucleotide
uccccaccgcguccgccgc

SEQ ID NO: 1806866 - RNA, 19 nt, Artificial Sequence
  Description of Artificial Sequence: Synthetic oligonucleotide
ggccauccgcauuugcaca

SEQ ID NO: 1806867 - RNA, 19 nt, Artificial Sequence
  Description of Artificial Sequence: Synthetic oligonucleotide
cuccccgcgggcuguccgc

SEQ ID NO: 1806868 - RNA, 19 nt, Artificial Sequence
  Description of Artificial Sequence: Synthetic oligonucleotide
caaccaagaggagccaaua

SEQ ID NO: 1806869 - RNA, 19 nt, Artificial Sequence
  Description of Artificial Sequence: Synthetic oligonucleotide
ggaccgagccgccccagac

SEQ ID NO: 1806870 - RNA, 19 nt, Artificial Sequence
  Description of Artificial Sequence: Synthetic oligonucleotide
ggccagagcacgaaugaaa

SEQ ID NO: 1806871 - RNA, 19 nt, Artificial Sequence
  Description of Artificial Sequence: Synthetic oligonucleotide
caugucaaguauggaaaau

SEQ ID NO: 1806872 - RNA, 19 nt, Artificial Sequence
  Description of Artificial Sequence: Synthetic oligonucleotide
ccuggcguuugcgggaccg

SEQ ID NO: 1806873 - RNA, 19 nt, Artificial Sequence
  Description of Artificial Sequence: Synthetic oligonucleotide
cucgucgcuugcggggagc

SEQ ID NO: 1806874 - RNA, 19 nt, Artificial Sequence
  Description of Artificial Sequence: Synthetic oligonucleotide
ccgcuuccaaggcacgcgg

SEQ ID NO: 1806875 - RNA, 19 nt, Artificial Sequence
  Description of Artificial Sequence: Synthetic oligonucleotide
cauccgcauuugcacacaa

SEQ ID NO: 1806876 - RNA, 19 nt, Artificial Sequence
  Description of Artificial Sequence: Synthetic oligonucleotide
ccagcuauacuauauccuu

SEQ ID NO: 1806877 - RNA, 19 nt, Artificial Sequence
  Description of Artificial Sequence: Synthetic oligonucleotide
ggaacgugagcggcucagc

SEQ ID NO: 1806878 - RNA, 19 nt, Artificial Sequence
  Description of Artificial Sequence: Synthetic oligonucleotide
cacgccgcuuggccauggg

SEQ ID NO: 1806879 - RNA, 19 nt, Artificial Sequence
  Description of Artificial Sequence: Synthetic oligonucleotide
aagcaccuuccaaguuaga

SEQ ID NO: 1806880 - RNA, 19 nt, Artificial Sequence
  Description of Artificial Sequence: Synthetic oligonucleotide
cagggcuccaugucaauuu

SEQ ID NO: 1806881 - RNA, 19 nt, Artificial Sequence
  Description of Artificial Sequence: Synthetic oligonucleotide
augaaagagcugagugcuu

SEQ ID NO: 1806882 - RNA, 19 nt, Artificial Sequence
  Description of Artificial Sequence: Synthetic oligonucleotide
ccugcucgccgggaggugg

SEQ ID NO: 1806883 - RNA, 19 nt, Artificial Sequence
  Description of Artificial Sequence: Synthetic oligonucleotide
ggcguuugcgggaccgagc

SEQ ID NO: 1806884 - RNA, 19 nt, Artificial Sequence
  Description of Artificial Sequence: Synthetic oligonucleotide
acggcgggacccagagcgg

SEQ ID NO: 1806885 - RNA, 19 nt, Artificial Sequence
  Description of Artificial Sequence: Synthetic oligonucleotide
gcugcauccauugccgaua

SEQ ID NO: 1806886 - RNA, 19 nt, Artificial Sequence
  Description of Artificial Sequence: Synthetic oligonucleotide
gucaggccauccgcauuug

SEQ ID NO: 1806887 - RNA, 19 nt, Artificial Sequence
  Description of Artificial Sequence: Synthetic oligonucleotide
cauugccgauagcauuuua

SEQ ID NO: 1806888 - RNA, 19 nt, Artificial Sequence
  Description of Artificial Sequence: Synthetic oligonucleotide
uccugcucgccgggaggug

SEQ ID NO: 1806889 - RNA, 19 nt, Artificial Sequence
  Description of Artificial Sequence: Synthetic oligonucleotide
uugcgggaccgagccgccc

SEQ ID NO: 1806890 - RNA, 19 nt, Artificial Sequence
  Description of Artificial Sequence: Synthetic oligonucleotide
ggaugggcgccccgucggc

SEQ ID NO: 1806891 - RNA, 19 nt, Artificial Sequence
  Description of Artificial Sequence: Synthetic oligonucleotide
ggaguaccacagauaagcu

SEQ ID NO: 1806892 - RNA, 19 nt, Artificial Sequence
  Description of Artificial Sequence: Synthetic oligonucleotide
ccaugggccggggaugggc

SEQ ID NO: 1806893 - RNA, 19 nt, Artificial Sequence
  Description of Artificial Sequence: Synthetic oligonucleotide
gggaagucgcugagcaaga

SEQ ID NO: 1806894 - RNA, 19 nt, Artificial Sequence
  Description of Artificial Sequence: Synthetic oligonucleotide
cggguuuccuccugcucgc

SEQ ID NO: 1806895 - RNA, 19 nt, Artificial Sequence
  Description of Artificial Sequence: Synthetic oligonucleotide
ggcgggacccagagcggcg

SEQ ID NO: 1806896 - RNA, 19 nt, Artificial Sequence
  Description of Artificial Sequence: Synthetic oligonucleotide
uccccgcgggcuguccgca

SEQ ID NO: 1806897 - RNA, 19 nt, Artificial Sequence
  Description of Artificial Sequence: Synthetic oligonucleotide
gcgggacccagagcggcgg

SEQ ID NO: 1806898 - RNA, 19 nt, Artificial Sequence
  Description of Artificial Sequence: Synthetic oligonucleotide
cucgcuccuggccgccguc

SEQ ID NO: 1806899 - RNA, 19 nt, Artificial Sequence
  Description of Artificial Sequence: Synthetic oligonucleotide
ggcggcacgcgggugccag

SEQ ID NO: 1806900 - RNA, 19 nt, Artificial Sequence
  Description of Artificial Sequence: Synthetic oligonucleotide
cucgccgggagguggcucu

SEQ ID NO: 1806901 - RNA, 19 nt, Artificial Sequence
  Description of Artificial Sequence: Synthetic oligonucleotide
ccggggaugggcggcacgc

SEQ ID NO: 1806902 - RNA, 19 nt, Artificial Sequence
  Description of Artificial Sequence: Synthetic oligonucleotide
ccgggagguggcucuccgg

SEQ ID NO: 1806903 - RNA, 19 nt, Artificial Sequence
  Description of Artificial Sequence: Synthetic oligonucleotide
ugcucgccgggagguggcu

SEQ ID NO: 1806904 - RNA, 19 nt, Artificial Sequence
  Description of Artificial Sequence: Synthetic oligonucleotide
ggcgcaggcuccgccauga

SEQ ID NO: 1806905 - RNA, 19 nt, Artificial Sequence
  Description of Artificial Sequence: Synthetic oligonucleotide
gcccgcccggguuuccucc

SEQ ID NO: 1806906 - RNA, 19 nt, Artificial Sequence
  Description of Artificial Sequence: Synthetic oligonucleotide
auacagcuuuuggcugcau

SEQ ID NO: 1806907 - RNA, 19 nt, Artificial Sequence
  Description of Artificial Sequence: Synthetic oligonucleotide
ccagagcggcggcuccucg

SEQ ID NO: 1806908 - RNA, 19 nt, Artificial Sequence
  Description of Artificial Sequence: Synthetic oligonucleotide
gccgcacgccgcuuggcca

SEQ ID NO: 1806909 - RNA, 19 nt, Artificial Sequence
  Description of Artificial Sequence: Synthetic oligonucleotide
cccucucgcuccuggccgc

SEQ ID NO: 1806910 - RNA, 19 nt, Artificial Sequence
  Description of Artificial Sequence: Synthetic oligonucleotide
cccgucggcuccccgcggg

SEQ ID NO: 1806911 - RNA, 19 nt, Artificial Sequence
  Description of Artificial Sequence: Synthetic oligonucleotide
gaugggcgccccgucggcu

SEQ ID NO: 1806912 - RNA, 19 nt, Artificial Sequence
  Description of Artificial Sequence: Synthetic oligonucleotide
ccucaaaacucuuccucau

SEQ ID NO: 1806913 - RNA, 19 nt, Artificial Sequence
  Description of Artificial Sequence: Synthetic oligonucleotide
ggacccagagcggcggcuc

SEQ ID NO: 1806914 - RNA, 19 nt, Artificial Sequence
  Description of Artificial Sequence: Synthetic oligonucleotide
cagccgcacgccgcuuggc

SEQ ID NO: 1806915 - RNA, 19 nt, Artificial Sequence
  Description of Artificial Sequence: Synthetic oligonucleotide
cguuugcgggaccgagccg

SEQ ID NO: 1806916 - RNA, 19 nt, Artificial Sequence
  Description of Artificial Sequence: Synthetic oligonucleotide
ggcugcauccauugccgau

SEQ ID NO: 1806917 - RNA, 19 nt, Artificial Sequence
  Description of Artificial Sequence: Synthetic oligonucleotide
gggcuggaugggcgccccg

SEQ ID NO: 1806918 - RNA, 19 nt, Artificial Sequence
  Description of Artificial Sequence: Synthetic oligonucleotide
cuggcguuugcgggaccga

SEQ ID NO: 1806919 - RNA, 19 nt, Artificial Sequence
  Description of Artificial Sequence: Synthetic oligonucleotide
gucagggcuccaugucaau

SEQ ID NO: 1806920 - RNA, 19 nt, Artificial Sequence
  Description of Artificial Sequence: Synthetic oligonucleotide
ugccagcgggcgggcggag

SEQ ID NO: 1806921 - RNA, 19 nt, Artificial Sequence
  Description of Artificial Sequence: Synthetic oligonucleotide
gugccagcgggcgggcgga

SEQ ID NO: 1806922 - RNA, 19 nt, Artificial Sequence
  Description of Artificial Sequence: Synthetic oligonucleotide
cuccgggcuccaggccggg

SEQ ID NO: 1806923 - RNA, 19 nt, Artificial Sequence
  Description of Artificial Sequence: Synthetic oligonucleotide
cccggguuuccuccugcuc

SEQ ID NO: 1806924 - RNA, 19 nt, Artificial Sequence
  Description of Artificial Sequence: Synthetic oligonucleotide
ggaugggcggcacgcgggu

SEQ ID NO: 1806925 - RNA, 19 nt, Artificial Sequence
  Description of Artificial Sequence: Synthetic oligonucleotide
cgcaggcuccgccaugauc

SEQ ID NO: 1806926 - RNA, 19 nt, Artificial Sequence
  Description of Artificial Sequence: Synthetic oligonucleotide
ccgccaugauccccgcguc

SEQ ID NO: 1806927 - RNA, 19 nt, Artificial Sequence
  Description of Artificial Sequence: Synthetic oligonucleotide
gggaccgagccgccccaga

SEQ ID NO: 1806928 - RNA, 19 nt, Artificial Sequence
  Description of Artificial Sequence: Synthetic oligonucleotide
gcacgccgcuuggccaugg

SEQ ID NO: 1806929 - RNA, 19 nt, Artificial Sequence
  Description of Artificial Sequence: Synthetic oligonucleotide
gccucgucgcuugcgggga

SEQ ID NO: 1806930 - RNA, 19 nt, Artificial Sequence
  Description of Artificial Sequence: Synthetic oligonucleotide
ccucgucgcuugcggggag

SEQ ID NO: 1806931 - RNA, 19 nt, Artificial Sequence
  Description of Artificial Sequence: Synthetic oligonucleotide
ccgcacuccccaccgcguc

SEQ ID NO: 1806932 - RNA, 19 nt, Artificial Sequence
  Description of Artificial Sequence: Synthetic oligonucleotide
gcggaacgugagcggcuca

SEQ ID NO: 1806933 - RNA, 19 nt, Artificial Sequence
  Description of Artificial Sequence: Synthetic oligonucleotide
cgccccgucggcuccccgc

SEQ ID NO: 1806934 - RNA, 19 nt, Artificial Sequence
  Description of Artificial Sequence: Synthetic oligonucleotide
ccagacggcgggacccaga

SEQ ID NO: 1806935 - RNA, 19 nt, Artificial Sequence
  Description of Artificial Sequence: Synthetic oligonucleotide
ccauccgcauuugcacaca

SEQ ID NO: 1806936 - RNA, 19 nt, Artificial Sequence
  Description of Artificial Sequence: Synthetic oligonucleotide
gcggcacgcgggugccagc

SEQ ID NO: 1806937 - RNA, 19 nt, Artificial Sequence
  Description of Artificial Sequence: Synthetic oligonucleotide
ccgagccgccccagacggc

SEQ ID NO: 1806938 - RNA, 19 nt, Artificial Sequence
  Description of Artificial Sequence: Synthetic oligonucleotide
gcgggaccgagccgcccca

SEQ ID NO: 1806939 - RNA, 19 nt, Artificial Sequence
  Description of Artificial Sequence: Synthetic oligonucleotide
cggcgggacccagagcggc

SEQ ID NO: 1806940 - RNA, 19 nt, Artificial Sequence
  Description of Artificial Sequence: Synthetic oligonucleotide
caggcgcaggcuccgccau

SEQ ID NO: 1806941 - RNA, 19 nt, Artificial Sequence
  Description of Artificial Sequence: Synthetic oligonucleotide
cgcggaacgugagcggcuc

SEQ ID NO: 1806942 - RNA, 19 nt, Artificial Sequence
  Description of Artificial Sequence: Synthetic oligonucleotide
ggcuggaugggcgccccgu

SEQ ID NO: 1806943 - RNA, 19 nt, Artificial Sequence
  Description of Artificial Sequence: Synthetic oligonucleotide
cgcgggugccagcgggcgg

SEQ ID NO: 1806944 - RNA, 19 nt, Artificial Sequence
  Description of Artificial Sequence: Synthetic oligonucleotide
ggcggcuccucggggaagu

SEQ ID NO: 1806945 - RNA, 19 nt, Artificial Sequence
  Description of Artificial Sequence: Synthetic oligonucleotide
ccgcgggcuguccgcacuc

SEQ ID NO: 1806946 - RNA, 19 nt, Artificial Sequence
  Description of Artificial Sequence: Synthetic oligonucleotide
cggggaugggcggcacgcg

SEQ ID NO: 1806947 - RNA, 19 nt, Artificial Sequence
  Description of Artificial Sequence: Synthetic oligonucleotide
cccagacggcgggacccag

SEQ ID NO: 1806948 - RNA, 19 nt, Artificial Sequence
  Description of Artificial Sequence: Synthetic oligonucleotide
cccagagcggcggcuccuc

SEQ ID NO: 1806949 - RNA, 19 nt, Artificial Sequence
  Description of Artificial Sequence: Synthetic oligonucleotide
ccccgucggcuccccgcgg

SEQ ID NO: 1806950 - RNA, 19 nt, Artificial Sequence
  Description of Artificial Sequence: Synthetic oligonucleotide
cccuggcguuugcgggacc

SEQ ID NO: 1806951 - RNA, 19 nt, Artificial Sequence
  Description of Artificial Sequence: Synthetic oligonucleotide
cgggacccagagcggcggc

SEQ ID NO: 1806952 - RNA, 19 nt, Artificial Sequence
  Description of Artificial Sequence: Synthetic oligonucleotide
gcgccccgucggcuccccg

SEQ ID NO: 1806953 - RNA, 19 nt, Artificial Sequence
  Description of Artificial Sequence: Synthetic oligonucleotide
ccgcccggguuuccuccug

SEQ ID NO: 1806954 - RNA, 19 nt, Artificial Sequence
  Description of Artificial Sequence: Synthetic oligonucleotide
gggacccagagcggcggcu

SEQ ID NO: 1806955 - RNA, 19 nt, Artificial Sequence
  Description of Artificial Sequence: Synthetic oligonucleotide
cgcuugcggggagcaggcg

SEQ ID NO: 1806956 - RNA, 19 nt, Artificial Sequence
  Description of Artificial Sequence: Synthetic oligonucleotide
cgucgcuugcggggagcag

SEQ ID NO: 1806957 - RNA, 19 nt, Artificial Sequence
  Description of Artificial Sequence: Synthetic oligonucleotide
ccgccccagacggcgggac

SEQ ID NO: 1806958 - RNA, 19 nt, Artificial Sequence
  Description of Artificial Sequence: Synthetic oligonucleotide
ccaccgcguccgccgccgc

SEQ ID NO: 1806959 - RNA, 19 nt, Artificial Sequence
  Description of Artificial Sequence: Synthetic oligonucleotide
cggggaagucgcugagcaa

SEQ ID NO: 1806960 - RNA, 19 nt, Artificial Sequence
  Description of Artificial Sequence: Synthetic oligonucleotide
cgcgggcuguccgcacucc

SEQ ID NO: 1806961 - RNA, 19 nt, Artificial Sequence
  Description of Artificial Sequence: Synthetic oligonucleotide
ccccgcgggcuguccgcac

SEQ ID NO: 1806962 - RNA, 19 nt, Artificial Sequence
  Description of Artificial Sequence: Synthetic oligonucleotide
cgugagcggcucagccgca

SEQ ID NO: 1806963 - RNA, 19 nt, Artificial Sequence
  Description of Artificial Sequence: Synthetic oligonucleotide
gcggcuccucggggaaguc

SEQ ID NO: 1806964 - RNA, 19 nt, Artificial Sequence
  Description of Artificial Sequence: Synthetic oligonucleotide
cgcccgcccggguuuccuc

SEQ ID NO: 1806965 - RNA, 19 nt, Artificial Sequence
  Description of Artificial Sequence: Synthetic oligonucleotide
ccauugccgauagcauuuu

SEQ ID NO: 1806966 - RNA, 19 nt, Artificial Sequence
  Description of Artificial Sequence: Synthetic oligonucleotide
cgggaccgagccgccccag

SEQ ID NO: 1806967 - RNA, 19 nt, Artificial Sequence
  Description of Artificial Sequence: Synthetic oligonucleotide
ccguccccgcagccucguc

SEQ ID NO: 1806968 - RNA, 19 nt, Artificial Sequence
  Description of Artificial Sequence: Synthetic oligonucleotide
cccgcgggcuguccgcacu

SEQ ID NO: 1806969 - RNA, 19 nt, Artificial Sequence
  Description of Artificial Sequence: Synthetic oligonucleotide
cggcggcuccucggggaag

SEQ ID NO: 1806970 - RNA, 19 nt, Artificial Sequence
  Description of Artificial Sequence: Synthetic oligonucleotide
cccgcccggguuuccuccu

SEQ ID NO: 1806971 - RNA, 19 nt, Artificial Sequence
  Description of Artificial Sequence: Synthetic oligonucleotide
gcgcaggcuccgccaugau

SEQ ID NO: 1806972 - RNA, 19 nt, Artificial Sequence
  Description of Artificial Sequence: Synthetic oligonucleotide
cgucggcuccccgcgggcu

SEQ ID NO: 1806973 - RNA, 19 nt, Artificial Sequence
  Description of Artificial Sequence: Synthetic oligonucleotide
cgccgcccgcccggguuuc

SEQ ID NO: 1806974 - RNA, 19 nt, Artificial Sequence
  Description of Artificial Sequence: Synthetic oligonucleotide
ccgccgcccgcccggguuu

SEQ ID NO: 1806975 - RNA, 19 nt, Artificial Sequence
  Description of Artificial Sequence: Synthetic oligonucleotide
uuucuuuucuugaucagcg

SEQ ID NO: 1806976 - RNA, 19 nt, Artificial Sequence
  Description of Artificial Sequence: Synthetic oligonucleotide
agaaaugagggaaaucucc

SEQ ID NO: 1806977 - RNA, 19 nt, Artificial Sequence
  Description of Artificial Sequence: Synthetic oligonucleotide
ucuuccaacccguugagcc

SEQ ID NO: 1806978 - RNA, 19 nt, Artificial Sequence
  Description of Artificial Sequence: Synthetic oligonucleotide
acagaaaugagggaaaucu

SEQ ID NO: 1806979 - RNA, 19 nt, Artificial Sequence
  Description of Artificial Sequence: Synthetic oligonucleotide
gaaaaggcgagguggacag

SEQ ID NO: 1806980 - RNA, 19 nt, Artificial Sequence
  Description of Artificial Sequence: Synthetic oligonucleotide
augcuuagaaugccggugc

SEQ ID NO: 1806981 - RNA, 19 nt, Artificial Sequence
  Description of Artificial Sequence: Synthetic oligonucleotide
uuuguagcgcaagaggacg

SEQ ID NO: 1806982 - RNA, 19 nt, Artificial Sequence
  Description of Artificial Sequence: Synthetic oligonucleotide
aaaagcuccgcggaagccg

SEQ ID NO: 1806983 - RNA, 19 nt, Artificial Sequence
  Description of Artificial Sequence: Synthetic oligonucleotide
gaagcgcccgccuacaccg

SEQ ID NO: 1806984 - RNA, 19 nt, Artificial Sequence
  Description of Artificial Sequence: Synthetic oligonucleotide
ucuuguuccaccggcaccg

SEQ ID NO: 1806985 - RNA, 19 nt, Artificial Sequence
  Description of Artificial Sequence: Synthetic oligonucleotide
cagaagaugcuuagaaugc

SEQ ID NO: 1806986 - RNA, 19 nt, Artificial Sequence
  Description of Artificial Sequence: Synthetic oligonucleotide
uggcccaugaggcagcgcg

SEQ ID NO: 1806987 - RNA, 19 nt, Artificial Sequence
  Description of Artificial Sequence: Synthetic oligonucleotide
aaucggggccacgaaaagc

SEQ ID NO: 1806988 - RNA, 19 nt, Artificial Sequence
  Description of Artificial Sequence: Synthetic oligonucleotide
caucuggucgcuaaucggg

SEQ ID NO: 1806989 - RNA, 19 nt, Artificial Sequence
  Description of Artificial Sequence: Synthetic oligonucleotide
ggcaaaaccgugcagaggc

SEQ ID NO: 1806990 - RNA, 19 nt, Artificial Sequence
  Description of Artificial Sequence: Synthetic oligonucleotide
agcaccagagguuucuccg

SEQ ID NO: 1806991 - RNA, 19 nt, Artificial Sequence
  Description of Artificial Sequence: Synthetic oligonucleotide
aagaugcuuagaaugccgg

SEQ ID NO: 1806992 - RNA, 19 nt, Artificial Sequence
  Description of Artificial Sequence: Synthetic oligonucleotide
gaaaugagggaaaucuccc

SEQ ID NO: 1806993 - RNA, 19 nt, Artificial Sequence
  Description of Artificial Sequence: Synthetic oligonucleotide
cacuuuguagcgcaagagg

SEQ ID NO: 1806994 - RNA, 19 nt, Artificial Sequence
  Description of Artificial Sequence: Synthetic oligonucleotide
cuuagaaugccggugcccg

SEQ ID NO: 1806995 - RNA, 19 nt, Artificial Sequence
  Description of Artificial Sequence: Synthetic oligonucleotide
ucggaccuuccgaagaagg

SEQ ID NO: 1806996 - RNA, 19 nt, Artificial Sequence
  Description of Artificial Sequence: Synthetic oligonucleotide
uccgaguggcccaugaggc

SEQ ID NO: 1806997 - RNA, 19 nt, Artificial Sequence
  Description of Artificial Sequence: Synthetic oligonucleotide
aaugagggaaaucucccuu

SEQ ID NO: 1806998 - RNA, 19 nt, Artificial Sequence
  Description of Artificial Sequence: Synthetic oligonucleotide
cauuccagcaucuggucgc

SEQ ID NO: 1806999 - RNA, 19 nt, Artificial Sequence
  Description of Artificial Sequence: Synthetic oligonucleotide
uuccgaagaaggugggugg

SEQ ID NO: 1807000 - RNA, 19 nt, Artificial Sequence
  Description of Artificial Sequence: Synthetic oligonucleotide
aaaaccgugcagaggcgcc

SEQ ID NO: 1807001 - RNA, 19 nt, Artificial Sequence
  Description of Artificial Sequence: Synthetic oligonucleotide
auagugcugcuucaccugg

SEQ ID NO: 1807002 - RNA, 19 nt, Artificial Sequence
  Description of Artificial Sequence: Synthetic oligonucleotide
aaugccggugcccgcgccc

SEQ ID NO: 1807003 - RNA, 19 nt, Artificial Sequence
  Description of Artificial Sequence: Synthetic oligonucleotide
accgccuuccuucagccac

SEQ ID NO: 1807004 - RNA, 19 nt, Artificial Sequence
  Description of Artificial Sequence: Synthetic oligonucleotide
gcuccagaaacccagacgc

SEQ ID NO: 1807005 - RNA, 19 nt, Artificial Sequence
  Description of Artificial Sequence: Synthetic oligonucleotide
agcagagugaucucuccag

SEQ ID NO: 1807006 - RNA, 19 nt, Artificial Sequence
  Description of Artificial Sequence: Synthetic oligonucleotide
augagggaaaucucccuuc

SEQ ID NO: 1807007 - RNA, 19 nt, Artificial Sequence
  Description of Artificial Sequence: Synthetic oligonucleotide
gaugcuuagaaugccggug

SEQ ID NO: 1807008 - RNA, 19 nt, Artificial Sequence
  Description of Artificial Sequence: Synthetic oligonucleotide
ucuucggaccuuccgaaga

SEQ ID NO: 1807009 - RNA, 19 nt, Artificial Sequence
  Description of Artificial Sequence: Synthetic oligonucleotide
uacaccggccuccagcucc

SEQ ID NO: 1807010 - RNA, 19 nt, Artificial Sequence
  Description of Artificial Sequence: Synthetic oligonucleotide
ugagggaaaucucccuucc

SEQ ID NO: 1807011 - RNA, 19 nt, Artificial Sequence
  Description of Artificial Sequence: Synthetic oligonucleotide
ggcucauucagguagagga

SEQ ID NO: 1807012 - RNA, 19 nt, Artificial Sequence
  Description of Artificial Sequence: Synthetic oligonucleotide
aaacccagacgccauucca

SEQ ID NO: 1807013 - RNA, 19 nt, Artificial Sequence
  Description of Artificial Sequence: Synthetic oligonucleotide
auguccacgccauagugcu

SEQ ID NO: 1807014 - RNA, 19 nt, Artificial Sequence
  Description of Artificial Sequence: Synthetic oligonucleotide
ucguaguacagcugguccc

SEQ ID NO: 1807015 - RNA, 19 nt, Artificial Sequence
  Description of Artificial Sequence: Synthetic oligonucleotide
cucguaguacagcuggucc

SEQ ID NO: 1807016 - RNA, 19 nt, Artificial Sequence
  Description of Artificial Sequence: Synthetic oligonucleotide
cuuuguagcgcaagaggac

SEQ ID NO: 1807017 - RNA, 19 nt, Artificial Sequence
  Description of Artificial Sequence: Synthetic oligonucleotide
ugaaaaggcgagguggaca

SEQ ID NO: 1807018 - RNA, 19 nt, Artificial Sequence
  Description of Artificial Sequence: Synthetic oligonucleotide
ugccauuuuauuugccaca

SEQ ID NO: 1807019 - RNA, 19 nt, Artificial Sequence
  Description of Artificial Sequence: Synthetic oligonucleotide
acccagacgccauuccagc

SEQ ID NO: 1807020 - RNA, 19 nt, Artificial Sequence
  Description of Artificial Sequence: Synthetic oligonucleotide
ucgagcugggcaaagcgcu

SEQ ID NO: 1807021 - RNA, 19 nt, Artificial Sequence
  Description of Artificial Sequence: Synthetic oligonucleotide
uccucguggaccgagacgu

SEQ ID NO: 1807022 - RNA, 19 nt, Artificial Sequence
  Description of Artificial Sequence: Synthetic oligonucleotide
cauggacucgugcaggagc

SEQ ID NO: 1807023 - RNA, 19 nt, Artificial Sequence
  Description of Artificial Sequence: Synthetic oligonucleotide
gaggagaccgccuuccuuc

SEQ ID NO: 1807024 - RNA, 19 nt, Artificial Sequence
  Description of Artificial Sequence: Synthetic oligonucleotide
uccucuucggaccuuccga

SEQ ID NO: 1807025 - RNA, 19 nt, Artificial Sequence
  Description of Artificial Sequence: Synthetic oligonucleotide
cuuccaacccguugagccg

SEQ ID NO: 1807026 - RNA, 19 nt, Artificial Sequence
  Description of Artificial Sequence: Synthetic oligonucleotide
uaaucggggccacgaaaag

SEQ ID NO: 1807027 - RNA, 19 nt, Artificial Sequence
  Description of Artificial Sequence: Synthetic oligonucleotide
ggaaccagauggcaaaacc

SEQ ID NO: 1807028 - RNA, 19 nt, Artificial Sequence
  Description of Artificial Sequence: Synthetic oligonucleotide
uccaccgucuccacggggc

SEQ ID NO: 1807029 - RNA, 19 nt, Artificial Sequence
  Description of Artificial Sequence: Synthetic oligonucleotide
ugccagauggcgcuggccu

SEQ ID NO: 1807030 - RNA, 19 nt, Artificial Sequence
  Description of Artificial Sequence: Synthetic oligonucleotide
ucuccgaguccccuccagg

SEQ ID NO: 1807031 - RNA, 19 nt, Artificial Sequence
  Description of Artificial Sequence: Synthetic oligonucleotide
uagcacucguaguacagcu

SEQ ID NO: 1807032 - RNA, 19 nt, Artificial Sequence
  Description of Artificial Sequence: Synthetic oligonucleotide
acggucuugccucgcagcg

SEQ ID NO: 1807033 - RNA, 19 nt, Artificial Sequence
  Description of Artificial Sequence: Synthetic oligonucleotide
uccagaaacccagacgcca

SEQ ID NO: 1807034 - RNA, 19 nt, Artificial Sequence
  Description of Artificial Sequence: Synthetic oligonucleotide
cacgauggcguccaccugc

SEQ ID NO: 1807035 - RNA, 19 nt, Artificial Sequence
  Description of Artificial Sequence: Synthetic oligonucleotide
gaaacccagacgccauucc

SEQ ID NO: 1807036 - RNA, 19 nt, Artificial Sequence
  Description of Artificial Sequence: Synthetic oligonucleotide
gacgcgcagacguucgggg

SEQ ID NO: 1807037 - RNA, 19 nt, Artificial Sequence
  Description of Artificial Sequence: Synthetic oligonucleotide
accgagacgucggaguagc

SEQ ID NO: 1807038 - RNA, 19 nt, Artificial Sequence
  Description of Artificial Sequence: Synthetic oligonucleotide
ucguggaccgagacgucgg

SEQ ID NO: 1807039 - RNA, 19 nt, Artificial Sequence
  Description of Artificial Sequence: Synthetic oligonucleotide
gcacucguaguacagcugg

SEQ ID NO: 1807040 - RNA, 19 nt, Artificial Sequence
  Description of Artificial Sequence: Synthetic oligonucleotide
uguagcgcaagaggacgcg

SEQ ID NO: 1807041 - RNA, 19 nt, Artificial Sequence
  Description of Artificial Sequence: Synthetic oligonucleotide
ugcaggagcccguagccca

SEQ ID NO: 1807042 - RNA, 19 nt, Artificial Sequence
  Description of Artificial Sequence: Synthetic oligonucleotide
guccucgccggacagaccc

SEQ ID NO: 1807043 - RNA, 19 nt, Artificial Sequence
  Description of Artificial Sequence: Synthetic oligonucleotide
ucgugcaggagcccguagc

SEQ ID NO: 1807044 - RNA, 19 nt, Artificial Sequence
  Description of Artificial Sequence: Synthetic oligonucleotide
uucuuuucuugaucagcga

SEQ ID NO: 1807045 - RNA, 19 nt, Artificial Sequence
  Description of Artificial Sequence: Synthetic oligonucleotide
aaaccgugcagaggcgccg

SEQ ID NO: 1807046 - RNA, 19 nt, Artificial Sequence
  Description of Artificial Sequence: Synthetic oligonucleotide
ugcuuagaaugccggugcc

SEQ ID NO: 1807047 - RNA, 19 nt, Artificial Sequence
  Description of Artificial Sequence: Synthetic oligonucleotide
guuucuccgaguccccucc

SEQ ID NO: 1807048 - RNA, 19 nt, Artificial Sequence
  Description of Artificial Sequence: Synthetic oligonucleotide
cucgagcugggcaaagcgc

SEQ ID NO: 1807049 - RNA, 19 nt, Artificial Sequence
  Description of Artificial Sequence: Synthetic oligonucleotide
uggaccgagacgucggagu

SEQ ID NO: 1807050 - RNA, 19 nt, Artificial Sequence
  Description of Artificial Sequence: Synthetic oligonucleotide
aacccguugagccgcacua

SEQ ID NO: 1807051 - RNA, 19 nt, Artificial Sequence
  Description of Artificial Sequence: Synthetic oligonucleotide
aaaaggcgagguggacagc

SEQ ID NO: 1807052 - RNA, 19 nt, Artificial Sequence
  Description of Artificial Sequence: Synthetic oligonucleotide
gagaccgccuuccuucagc

SEQ ID NO: 1807053 - RNA, 19 nt, Artificial Sequence
  Description of Artificial Sequence: Synthetic oligonucleotide
cacgcggucuuccaacccg

SEQ ID NO: 1807054 - RNA, 19 nt, Artificial Sequence
  Description of Artificial Sequence: Synthetic oligonucleotide
uaggcgucggugcggacgc

SEQ ID NO: 1807055 - RNA, 19 nt, Artificial Sequence
  Description of Artificial Sequence: Synthetic oligonucleotide
cacgccauagugcugcuuc

SEQ ID NO: 1807056 - RNA, 19 nt, Artificial Sequence
  Description of Artificial Sequence: Synthetic oligonucleotide
cuaaucggggccacgaaaa

SEQ ID NO: 1807057 - RNA, 19 nt, Artificial Sequence
  Description of Artificial Sequence: Synthetic oligonucleotide
aguagcacucguaguacag

SEQ ID NO: 1807058 - RNA, 19 nt, Artificial Sequence
  Description of Artificial Sequence: Synthetic oligonucleotide
acucguaguacagcugguc

SEQ ID NO: 1807059 - RNA, 19 nt, Artificial Sequence
  Description of Artificial Sequence: Synthetic oligonucleotide
ggucuugccucgcagcgcg

SEQ ID NO: 1807060 - RNA, 19 nt, Artificial Sequence
  Description of Artificial Sequence: Synthetic oligonucleotide
agaaugccggugcccgcgc

SEQ ID NO: 1807061 - RNA, 19 nt, Artificial Sequence
  Description of Artificial Sequence: Synthetic oligonucleotide
ucuggucgcuaaucggggc

SEQ ID NO: 1807062 - RNA, 19 nt, Artificial Sequence
  Description of Artificial Sequence: Synthetic oligonucleotide
acgaaaagcuccgcggaag

SEQ ID NO: 1807063 - RNA, 19 nt, Artificial Sequence
  Description of Artificial Sequence: Synthetic oligonucleotide
gaggcgccgagccauagca

SEQ ID NO: 1807064 - RNA, 19 nt, Artificial Sequence
  Description of Artificial Sequence: Synthetic oligonucleotide
agugaucucuccagaaaug

SEQ ID NO: 1807065 - RNA, 19 nt, Artificial Sequence
  Description of Artificial Sequence: Synthetic oligonucleotide
caaaaccgugcagaggcgc

SEQ ID NO: 1807066 - RNA, 19 nt, Artificial Sequence
  Description of Artificial Sequence: Synthetic oligonucleotide
cuggucgcuaaucggggcc

SEQ ID NO: 1807067 - RNA, 19 nt, Artificial Sequence
  Description of Artificial Sequence: Synthetic oligonucleotide
gaaaagcuccgcggaagcc

SEQ ID NO: 1807068 - RNA, 19 nt, Artificial Sequence
  Description of Artificial Sequence: Synthetic oligonucleotide
uagcgcaagaggacgcgca

SEQ ID NO: 1807069 - RNA, 19 nt, Artificial Sequence
  Description of Artificial Sequence: Synthetic oligonucleotide
guaggcgucggugcggacg

SEQ ID NO: 1807070 - RNA, 19 nt, Artificial Sequence
  Description of Artificial Sequence: Synthetic oligonucleotide
ggcuccagaaacccagacg

SEQ ID NO: 1807071 - RNA, 19 nt, Artificial Sequence
  Description of Artificial Sequence: Synthetic oligonucleotide
caaggcucaguccuccaug

SEQ ID NO: 1807072 - RNA, 19 nt, Artificial Sequence
  Description of Artificial Sequence: Synthetic oligonucleotide
uccagcaucuggucgcuaa

SEQ ID NO: 1807073 - RNA, 19 nt, Artificial Sequence
  Description of Artificial Sequence: Synthetic oligonucleotide
ugggcaaagcgcugcggcc

SEQ ID NO: 1807074 - RNA, 19 nt, Artificial Sequence
  Description of Artificial Sequence: Synthetic oligonucleotide
uuagaaugccggugcccgc

SEQ ID NO: 1807075 - RNA, 19 nt, Artificial Sequence
  Description of Artificial Sequence: Synthetic oligonucleotide
gacucaagcuuucuuuucu

SEQ ID NO: 1807076 - RNA, 19 nt, Artificial Sequence
  Description of Artificial Sequence: Synthetic oligonucleotide
aggagcccguagcccaucc

SEQ ID NO: 1807077 - RNA, 19 nt, Artificial Sequence
  Description of Artificial Sequence: Synthetic oligonucleotide
gagacgucggaguagcacu

SEQ ID NO: 1807078 - RNA, 19 nt, Artificial Sequence
  Description of Artificial Sequence: Synthetic oligonucleotide
gagcccguagcccauccac

SEQ ID NO: 1807079 - RNA, 19 nt, Artificial Sequence
  Description of Artificial Sequence: Synthetic oligonucleotide
guagaggagcgccugcuuc

SEQ ID NO: 1807080 - RNA, 19 nt, Artificial Sequence
  Description of Artificial Sequence: Synthetic oligonucleotide
ugcguggccgggugaaaag

SEQ ID NO: 1807081 - RNA, 19 nt, Artificial Sequence
  Description of Artificial Sequence: Synthetic oligonucleotide
uucuccgaguccccuccag

SEQ ID NO: 1807082 - RNA, 19 nt, Artificial Sequence
  Description of Artificial Sequence: Synthetic oligonucleotide
uuccaacccguugagccgc

SEQ ID NO: 1807083 - RNA, 19 nt, Artificial Sequence
  Description of Artificial Sequence: Synthetic oligonucleotide
ucuccucguggaccgagac

SEQ ID NO: 1807084 - RNA, 19 nt, Artificial Sequence
  Description of Artificial Sequence: Synthetic oligonucleotide
gagugaucucuccagaaau

SEQ ID NO: 1807085 - RNA, 19 nt, Artificial Sequence
  Description of Artificial Sequence: Synthetic oligonucleotide
agaggacgcgcagacguuc

SEQ ID NO: 1807086 - RNA, 19 nt, Artificial Sequence
  Description of Artificial Sequence: Synthetic oligonucleotide
ggcgaagcuuuccaggcag

SEQ ID NO: 1807087 - RNA, 19 nt, Artificial Sequence
  Description of Artificial Sequence: Synthetic oligonucleotide
gaugcccaggcgguaggcg

SEQ ID NO: 1807088 - RNA, 19 nt, Artificial Sequence
  Description of Artificial Sequence: Synthetic oligonucleotide
gaguagcacucguaguaca

SEQ ID NO: 1807089 - RNA, 19 nt, Artificial Sequence
  Description of Artificial Sequence: Synthetic oligonucleotide
aaggcaaggcucaguccuc

SEQ ID NO: 1807090 - RNA, 19 nt, Artificial Sequence
  Description of Artificial Sequence: Synthetic oligonucleotide
aaggucaccuggaaccaga

SEQ ID NO: 1807091 - RNA, 19 nt, Artificial Sequence
  Description of Artificial Sequence: Synthetic oligonucleotide
agcgcaagaggacgcgcag

SEQ ID NO: 1807092 - RNA, 19 nt, Artificial Sequence
  Description of Artificial Sequence: Synthetic oligonucleotide
ucggaguagcacucguagu

SEQ ID NO: 1807093 - RNA, 19 nt, Artificial Sequence
  Description of Artificial Sequence: Synthetic oligonucleotide
gcaucuggucgcuaaucgg

SEQ ID NO: 1807094 - RNA, 19 nt, Artificial Sequence
  Description of Artificial Sequence: Synthetic oligonucleotide
cucguggaccgagacgucg

SEQ ID NO: 1807095 - RNA, 19 nt, Artificial Sequence
  Description of Artificial Sequence: Synthetic oligonucleotide
guagcacucguaguacagc

SEQ ID NO: 1807096 - RNA, 19 nt, Artificial Sequence
  Description of Artificial Sequence: Synthetic oligonucleotide
acuugguccgcgcguggag

SEQ ID NO: 1807097 - RNA, 19 nt, Artificial Sequence
  Description of Artificial Sequence: Synthetic oligonucleotide
cuccagaaacccagacgcc

SEQ ID NO: 1807098 - RNA, 19 nt, Artificial Sequence
  Description of Artificial Sequence: Synthetic oligonucleotide
cagagguuucuccgagucc

SEQ ID NO: 1807099 - RNA, 19 nt, Artificial Sequence
  Description of Artificial Sequence: Synthetic oligonucleotide
guccgugucuuguuccacc

SEQ ID NO: 1807100 - RNA, 19 nt, Artificial Sequence
  Description of Artificial Sequence: Synthetic oligonucleotide
gucggugcggacgcggucg

SEQ ID NO: 1807101 - RNA, 19 nt, Artificial Sequence
  Description of Artificial Sequence: Synthetic oligonucleotide
cacggucuugccucgcagc

SEQ ID NO: 1807102 - RNA, 19 nt, Artificial Sequence
  Description of Artificial Sequence: Synthetic oligonucleotide
agcucgagcugggcaaagc

SEQ ID NO: 1807103 - RNA, 19 nt, Artificial Sequence
  Description of Artificial Sequence: Synthetic oligonucleotide
caagaggacgcgcagacgu

SEQ ID NO: 1807104 - RNA, 19 nt, Artificial Sequence
  Description of Artificial Sequence: Synthetic oligonucleotide
ugcuuccagugcguggccg

SEQ ID NO: 1807105 - RNA, 19 nt, Artificial Sequence
  Description of Artificial Sequence: Synthetic oligonucleotide
cuccacggcguacacgcgc

SEQ ID NO: 1807106 - RNA, 19 nt, Artificial Sequence
  Description of Artificial Sequence: Synthetic oligonucleotide
aaggcgagguggacagcac

SEQ ID NO: 1807107 - RNA, 19 nt, Artificial Sequence
  Description of Artificial Sequence: Synthetic oligonucleotide
gaggacgcgcagacguucg

SEQ ID NO: 1807108 - RNA, 19 nt, Artificial Sequence
  Description of Artificial Sequence: Synthetic oligonucleotide
acggcguacacgcgccggg

SEQ ID NO: 1807109 - RNA, 19 nt, Artificial Sequence
  Description of Artificial Sequence: Synthetic oligonucleotide
uucggaccuuccgaagaag

SEQ ID NO: 1807110 - RNA, 19 nt, Artificial Sequence
  Description of Artificial Sequence: Synthetic oligonucleotide
cucuucggaccuuccgaag

SEQ ID NO: 1807111 - RNA, 19 nt, Artificial Sequence
  Description of Artificial Sequence: Synthetic oligonucleotide
auguccgugucuuguucca

SEQ ID NO: 1807112 - RNA, 19 nt, Artificial Sequence
  Description of Artificial Sequence: Synthetic oligonucleotide
cuccucguggaccgagacg

SEQ ID NO: 1807113 - RNA, 19 nt, Artificial Sequence
  Description of Artificial Sequence: Synthetic oligonucleotide
ugggcgcagaagaugcuua

SEQ ID NO: 1807114 - RNA, 19 nt, Artificial Sequence
  Description of Artificial Sequence: Synthetic oligonucleotide
gacgucggaguagcacucg

SEQ ID NO: 1807115 - RNA, 19 nt, Artificial Sequence
  Description of Artificial Sequence: Synthetic oligonucleotide
cauucagguagaggagcgc

SEQ ID NO: 1807116 - RNA, 19 nt, Artificial Sequence
  Description of Artificial Sequence: Synthetic oligonucleotide
ucgcuaaucggggccacga

SEQ ID NO: 1807117 - RNA, 19 nt, Artificial Sequence
  Description of Artificial Sequence: Synthetic oligonucleotide
uugguccgcgcguggagca

SEQ ID NO: 1807118 - RNA, 19 nt, Artificial Sequence
  Description of Artificial Sequence: Synthetic oligonucleotide
uggaaccagauggcaaaac

SEQ ID NO: 1807119 - RNA, 19 nt, Artificial Sequence
  Description of Artificial Sequence: Synthetic oligonucleotide
guggccgggugaaaaggcg

SEQ ID NO: 1807120 - RNA, 19 nt, Artificial Sequence
  Description of Artificial Sequence: Synthetic oligonucleotide
cuugguccgcgcguggagc

SEQ ID NO: 1807121 - RNA, 19 nt, Artificial Sequence
  Description of Artificial Sequence: Synthetic oligonucleotide
cagaaauguccgugucuug

SEQ ID NO: 1807122 - RNA, 19 nt, Artificial Sequence
  Description of Artificial Sequence: Synthetic oligonucleotide
agacgucggaguagcacuc

SEQ ID NO: 1807123 - RNA, 19 nt, Artificial Sequence
  Description of Artificial Sequence: Synthetic oligonucleotide
cacagaaaugagggaaauc

SEQ ID NO: 1807124 - RNA, 19 nt, Artificial Sequence
  Description of Artificial Sequence: Synthetic oligonucleotide
aggagcgccugcuuccagu

SEQ ID NO: 1807125 - RNA, 19 nt, Artificial Sequence
  Description of Artificial Sequence: Synthetic oligonucleotide
ucggugcggacgcggucgg

SEQ ID NO: 1807126 - RNA, 19 nt, Artificial Sequence
  Description of Artificial Sequence: Synthetic oligonucleotide
aggacgcgcagacguucgg

SEQ ID NO: 1807127 - RNA, 19 nt, Artificial Sequence
  Description of Artificial Sequence: Synthetic oligonucleotide
gcucauguccacgccauag

SEQ ID NO: 1807128 - RNA, 19 nt, Artificial Sequence
  Description of Artificial Sequence: Synthetic oligonucleotide
uguccacgccauagugcug

SEQ ID NO: 1807129 - RNA, 19 nt, Artificial Sequence
  Description of Artificial Sequence: Synthetic oligonucleotide
ucgccggacagacccugca

SEQ ID NO: 1807130 - RNA, 19 nt, Artificial Sequence
  Description of Artificial Sequence: Synthetic oligonucleotide
gugcacgcggucuuccaac

SEQ ID NO: 1807131 - RNA, 19 nt, Artificial Sequence
  Description of Artificial Sequence: Synthetic oligonucleotide
cagacgccauuccagcauc

SEQ ID NO: 1807132 - RNA, 19 nt, Artificial Sequence
  Description of Artificial Sequence: Synthetic oligonucleotide
gacgcggucggcgaucauc

SEQ ID NO: 1807133 - RNA, 19 nt, Artificial Sequence
  Description of Artificial Sequence: Synthetic oligonucleotide
cagacccugcaccacgauc

SEQ ID NO: 1807134 - RNA, 19 nt, Artificial Sequence
  Description of Artificial Sequence: Synthetic oligonucleotide
gaccgagacgucggaguag

SEQ ID NO: 1807135 - RNA, 19 nt, Artificial Sequence
  Description of Artificial Sequence: Synthetic oligonucleotide
gcgaucaucuccucgugga

SEQ ID NO: 1807136 - RNA, 19 nt, Artificial Sequence
  Description of Artificial Sequence: Synthetic oligonucleotide
cguggcgaagcuuuccagg

SEQ ID NO: 1807137 - RNA, 19 nt, Artificial Sequence
  Description of Artificial Sequence: Synthetic oligonucleotide
gugaucucuccagaaaugu

SEQ ID NO: 1807138 - RNA, 19 nt, Artificial Sequence
  Description of Artificial Sequence: Synthetic oligonucleotide
gacgccauuccagcaucug

SEQ ID NO: 1807139 - RNA, 19 nt, Artificial Sequence
  Description of Artificial Sequence: Synthetic oligonucleotide
aggagaccgccuuccuuca

SEQ ID NO: 1807140 - RNA, 19 nt, Artificial Sequence
  Description of Artificial Sequence: Synthetic oligonucleotide
acccguugagccgcacuac

SEQ ID NO: 1807141 - RNA, 19 nt, Artificial Sequence
  Description of Artificial Sequence: Synthetic oligonucleotide
ggaagcgcccgccuacacc

SEQ ID NO: 1807142 - RNA, 19 nt, Artificial Sequence
  Description of Artificial Sequence: Synthetic oligonucleotide
ggugcccgcgcccacgucc

SEQ ID NO: 1807143 - RNA, 19 nt, Artificial Sequence
  Description of Artificial Sequence: Synthetic oligonucleotide
cacggagcucagcauggac

SEQ ID NO: 1807144 - RNA, 19 nt, Artificial Sequence
  Description of Artificial Sequence: Synthetic oligonucleotide
agccacuugguccgcgcgu

SEQ ID NO: 1807145 - RNA, 19 nt, Artificial Sequence
  Description of Artificial Sequence: Synthetic oligonucleotide
cagguagaggagcgccugc

SEQ ID NO: 1807146 - RNA, 19 nt, Artificial Sequence
  Description of Artificial Sequence: Synthetic oligonucleotide
ggccuguugccagauggcg

SEQ ID NO: 1807147 - RNA, 19 nt, Artificial Sequence
  Description of Artificial Sequence: Synthetic oligonucleotide
gccuacaccggccuccagc

SEQ ID NO: 1807148 - RNA, 19 nt, Artificial Sequence
  Description of Artificial Sequence: Synthetic oligonucleotide
ucgcucacgauggcgucca

SEQ ID NO: 1807149 - RNA, 19 nt, Artificial Sequence
  Description of Artificial Sequence: Synthetic oligonucleotide
ggugaaaaggcgaggugga

SEQ ID NO: 1807150 - RNA, 19 nt, Artificial Sequence
  Description of Artificial Sequence: Synthetic oligonucleotide
agcacggucuugccucgca

SEQ ID NO: 1807151 - RNA, 19 nt, Artificial Sequence
  Description of Artificial Sequence: Synthetic oligonucleotide
gaaugccggugcccgcgcc

SEQ ID NO: 1807152 - RNA, 19 nt, Artificial Sequence
  Description of Artificial Sequence: Synthetic oligonucleotide
gccggacagacccugcacc

SEQ ID NO: 1807153 - RNA, 19 nt, Artificial Sequence
  Description of Artificial Sequence: Synthetic oligonucleotide
acgucggaguagcacucgu

SEQ ID NO: 1807154 - RNA, 19 nt, Artificial Sequence
  Description of Artificial Sequence: Synthetic oligonucleotide
ccagagguuucuccgaguc

SEQ ID NO: 1807155 - RNA, 19 nt, Artificial Sequence
  Description of Artificial Sequence: Synthetic oligonucleotide
guagcgcaagaggacgcgc

SEQ ID NO: 1807156 - RNA, 19 nt, Artificial Sequence
  Description of Artificial Sequence: Synthetic oligonucleotide
uccgcggaagccggcagga

SEQ ID NO: 1807157 - RNA, 19 nt, Artificial Sequence
  Description of Artificial Sequence: Synthetic oligonucleotide
cuccgcggaagccggcagg

SEQ ID NO: 1807158 - RNA, 19 nt, Artificial Sequence
  Description of Artificial Sequence: Synthetic oligonucleotide
acgccauagugcugcuuca

SEQ ID NO: 1807159 - RNA, 19 nt, Artificial Sequence
  Description of Artificial Sequence: Synthetic oligonucleotide
agcacucguaguacagcug

SEQ ID NO: 1807160 - RNA, 19 nt, Artificial Sequence
  Description of Artificial Sequence: Synthetic oligonucleotide
gacgugcacgcggucuucc

SEQ ID NO: 1807161 - RNA, 19 nt, Artificial Sequence
  Description of Artificial Sequence: Synthetic oligonucleotide
caccacgaucuccgagugg

SEQ ID NO: 1807162 - RNA, 19 nt, Artificial Sequence
  Description of Artificial Sequence: Synthetic oligonucleotide
ggacucgugcaggagcccg

SEQ ID NO: 1807163 - RNA, 19 nt, Artificial Sequence
  Description of Artificial Sequence: Synthetic oligonucleotide
ggugcggacgcggucggcg

SEQ ID NO: 1807164 - RNA, 19 nt, Artificial Sequence
  Description of Artificial Sequence: Synthetic oligonucleotide
gcggucggcgaucaucucc

SEQ ID NO: 1807165 - RNA, 19 nt, Artificial Sequence
  Description of Artificial Sequence: Synthetic oligonucleotide
aguggcccaugaggcagcg

SEQ ID NO: 1807166 - RNA, 19 nt, Artificial Sequence
  Description of Artificial Sequence: Synthetic oligonucleotide
cucgcucacgauggcgucc

SEQ ID NO: 1807167 - RNA, 19 nt, Artificial Sequence
  Description of Artificial Sequence: Synthetic oligonucleotide
caucuccucguggaccgag

SEQ ID NO: 1807168 - RNA, 19 nt, Artificial Sequence
  Description of Artificial Sequence: Synthetic oligonucleotide
cauagcagcugcagcggaa

SEQ ID NO: 1807169 - RNA, 19 nt, Artificial Sequence
  Description of Artificial Sequence: Synthetic oligonucleotide
accuuccgaagaagguggg

SEQ ID NO: 1807170 - RNA, 19 nt, Artificial Sequence
  Description of Artificial Sequence: Synthetic oligonucleotide
uugccucgcagcgcggccc

SEQ ID NO: 1807171 - RNA, 19 nt, Artificial Sequence
  Description of Artificial Sequence: Synthetic oligonucleotide
gcgcagaagaugcuuagaa

SEQ ID NO: 1807172 - RNA, 19 nt, Artificial Sequence
  Description of Artificial Sequence: Synthetic oligonucleotide
uguccgugucuuguuccac

SEQ ID NO: 1807173 - RNA, 19 nt, Artificial Sequence
  Description of Artificial Sequence: Synthetic oligonucleotide
gugaaaaggcgagguggac

SEQ ID NO: 1807174 - RNA, 19 nt, Artificial Sequence
  Description of Artificial Sequence: Synthetic oligonucleotide
ucggcucccuccccuccug

SEQ ID NO: 1807175 - RNA, 19 nt, Artificial Sequence
  Description of Artificial Sequence: Synthetic oligonucleotide
cuccaccgucuccacgggg

SEQ ID NO: 1807176 - RNA, 19 nt, Artificial Sequence
  Description of Artificial Sequence: Synthetic oligonucleotide
aaccgugcagaggcgccga

SEQ ID NO: 1807177 - RNA, 19 nt, Artificial Sequence
  Description of Artificial Sequence: Synthetic oligonucleotide
acacgcgccgggcgccggc

SEQ ID NO: 1807178 - RNA, 19 nt, Artificial Sequence
  Description of Artificial Sequence: Synthetic oligonucleotide
agcgcggcccaguuccgca

SEQ ID NO: 1807179 - RNA, 19 nt, Artificial Sequence
  Description of Artificial Sequence: Synthetic oligonucleotide
gcuuagaaugccggugccc

SEQ ID NO: 1807180 - RNA, 19 nt, Artificial Sequence
  Description of Artificial Sequence: Synthetic oligonucleotide
gcuaaucggggccacgaaa

SEQ ID NO: 1807181 - RNA, 19 nt, Artificial Sequence
  Description of Artificial Sequence: Synthetic oligonucleotide
ucggggccacgaaaagcuc

SEQ ID NO: 1807182 - RNA, 19 nt, Artificial Sequence
  Description of Artificial Sequence: Synthetic oligonucleotide
aggcagcgcguggcgaagc

SEQ ID NO: 1807183 - RNA, 19 nt, Artificial Sequence
  Description of Artificial Sequence: Synthetic oligonucleotide
cucgcgcuugguccuccgg

SEQ ID NO: 1807184 - RNA, 19 nt, Artificial Sequence
  Description of Artificial Sequence: Synthetic oligonucleotide
acgcggucggcgaucaucu

SEQ ID NO: 1807185 - RNA, 19 nt, Artificial Sequence
  Description of Artificial Sequence: Synthetic oligonucleotide
uccggggucguggcggggc

SEQ ID NO: 1807186 - RNA, 19 nt, Artificial Sequence
  Description of Artificial Sequence: Synthetic oligonucleotide
ggcguacacgcgccgggcg

SEQ ID NO: 1807187 - RNA, 19 nt, Artificial Sequence
  Description of Artificial Sequence: Synthetic oligonucleotide
gucgcuaaucggggccacg

SEQ ID NO: 1807188 - RNA, 19 nt, Artificial Sequence
  Description of Artificial Sequence: Synthetic oligonucleotide
gcaaaaccgugcagaggcg

SEQ ID NO: 1807189 - RNA, 19 nt, Artificial Sequence
  Description of Artificial Sequence: Synthetic oligonucleotide
gcagcucauguccacgcca

SEQ ID NO: 1807190 - RNA, 19 nt, Artificial Sequence
  Description of Artificial Sequence: Synthetic oligonucleotide
ugccucgcagcgcggccca

SEQ ID NO: 1807191 - RNA, 19 nt, Artificial Sequence
  Description of Artificial Sequence: Synthetic oligonucleotide
uccaacccguugagccgca

SEQ ID NO: 1807192 - RNA, 19 nt, Artificial Sequence
  Description of Artificial Sequence: Synthetic oligonucleotide
cacggcguacacgcgccgg

SEQ ID NO: 1807193 - RNA, 19 nt, Artificial Sequence
  Description of Artificial Sequence: Synthetic oligonucleotide
cgcagcgcggcccaguucc

SEQ ID NO: 1807194 - RNA, 19 nt, Artificial Sequence
  Description of Artificial Sequence: Synthetic oligonucleotide
guggaccgagacgucggag

SEQ ID NO: 1807195 - RNA, 19 nt, Artificial Sequence
  Description of Artificial Sequence: Synthetic oligonucleotide
cacgaaaagcuccgcggaa

SEQ ID NO: 1807196 - RNA, 19 nt, Artificial Sequence
  Description of Artificial Sequence: Synthetic oligonucleotide
gaggcagcgcguggcgaag

SEQ ID NO: 1807197 - RNA, 19 nt, Artificial Sequence
  Description of Artificial Sequence: Synthetic oligonucleotide
uccaggccggcgcgggcca

SEQ ID NO: 1807198 - RNA, 19 nt, Artificial Sequence
  Description of Artificial Sequence: Synthetic oligonucleotide
uggacucgugcaggagccc

SEQ ID NO: 1807199 - RNA, 19 nt, Artificial Sequence
  Description of Artificial Sequence: Synthetic oligonucleotide
cucgccggacagacccugc

SEQ ID NO: 1807200 - RNA, 19 nt, Artificial Sequence
  Description of Artificial Sequence: Synthetic oligonucleotide
cacucgcucacgauggcgu

SEQ ID NO: 1807201 - RNA, 19 nt, Artificial Sequence
  Description of Artificial Sequence: Synthetic oligonucleotide
uuccaccggcaccggcuca

SEQ ID NO: 1807202 - RNA, 19 nt, Artificial Sequence
  Description of Artificial Sequence: Synthetic oligonucleotide
cucgugcaggagcccguag

SEQ ID NO: 1807203 - RNA, 19 nt, Artificial Sequence
  Description of Artificial Sequence: Synthetic oligonucleotide
caguuccgcaggaugccca

SEQ ID NO: 1807204 - RNA, 19 nt, Artificial Sequence
  Description of Artificial Sequence: Synthetic oligonucleotide
gucguggcggggcugccuc

SEQ ID NO: 1807205 - RNA, 19 nt, Artificial Sequence
  Description of Artificial Sequence: Synthetic oligonucleotide
ugcggccgggccagcacgu

SEQ ID NO: 1807206 - RNA, 19 nt, Artificial Sequence
  Description of Artificial Sequence: Synthetic oligonucleotide
gguuucuccgaguccccuc

SEQ ID NO: 1807207 - RNA, 19 nt, Artificial Sequence
  Description of Artificial Sequence: Synthetic oligonucleotide
agaggagcgccugcuucca

SEQ ID NO: 1807208 - RNA, 19 nt, Artificial Sequence
  Description of Artificial Sequence: Synthetic oligonucleotide
agauggcgcuggccuccac

SEQ ID NO: 1807209 - RNA, 19 nt, Artificial Sequence
  Description of Artificial Sequence: Synthetic oligonucleotide
ggacgcgcagacguucggg

SEQ ID NO: 1807210 - RNA, 19 nt, Artificial Sequence
  Description of Artificial Sequence: Synthetic oligonucleotide
agguuucuccgaguccccu

SEQ ID NO: 1807211 - RNA, 19 nt, Artificial Sequence
  Description of Artificial Sequence: Synthetic oligonucleotide
guuccgcaggaugcccagg

SEQ ID NO: 1807212 - RNA, 19 nt, Artificial Sequence
  Description of Artificial Sequence: Synthetic oligonucleotide
gcaccacgaucuccgagug

SEQ ID NO: 1807213 - RNA, 19 nt, Artificial Sequence
  Description of Artificial Sequence: Synthetic oligonucleotide
acgugcacgcggucuucca

SEQ ID NO: 1807214 - RNA, 19 nt, Artificial Sequence
  Description of Artificial Sequence: Synthetic oligonucleotide
uccucgccggacagacccu

SEQ ID NO: 1807215 - RNA, 19 nt, Artificial Sequence
  Description of Artificial Sequence: Synthetic oligonucleotide
cccguugagccgcacuacc

SEQ ID NO: 1807216 - RNA, 19 nt, Artificial Sequence
  Description of Artificial Sequence: Synthetic oligonucleotide
acagacccugcaccacgau

SEQ ID NO: 1807217 - RNA, 19 nt, Artificial Sequence
  Description of Artificial Sequence: Synthetic oligonucleotide
ggcaccggcucauucaggu

SEQ ID NO: 1807218 - RNA, 19 nt, Artificial Sequence
  Description of Artificial Sequence: Synthetic oligonucleotide
ugcuccccgccaucuuccu

SEQ ID NO: 1807219 - RNA, 19 nt, Artificial Sequence
  Description of Artificial Sequence: Synthetic oligonucleotide
gccuguugccagauggcgc

SEQ ID NO: 1807220 - RNA, 19 nt, Artificial Sequence
  Description of Artificial Sequence: Synthetic oligonucleotide
cccguagcccauccacucg

SEQ ID NO: 1807221 - RNA, 19 nt, Artificial Sequence
  Description of Artificial Sequence: Synthetic oligonucleotide
gcacggucuugccucgcag

SEQ ID NO: 1807222 - RNA, 19 nt, Artificial Sequence
  Description of Artificial Sequence: Synthetic oligonucleotide
gcguggcgaagcuuuccag

SEQ ID NO: 1807223 - RNA, 19 nt, Artificial Sequence
  Description of Artificial Sequence: Synthetic oligonucleotide
agcccguagcccauccacu

SEQ ID NO: 1807224 - RNA, 19 nt, Artificial Sequence
  Description of Artificial Sequence: Synthetic oligonucleotide
guugucccgggagggcagc

SEQ ID NO: 1807225 - RNA, 19 nt, Artificial Sequence
  Description of Artificial Sequence: Synthetic oligonucleotide
ucguggcggggcugccucc

SEQ ID NO: 1807226 - RNA, 19 nt, Artificial Sequence
  Description of Artificial Sequence: Synthetic oligonucleotide
gcguggagcacggagcuca

SEQ ID NO: 1807227 - RNA, 19 nt, Artificial Sequence
  Description of Artificial Sequence: Synthetic oligonucleotide
cguggccgggugaaaaggc

SEQ ID NO: 1807228 - RNA, 19 nt, Artificial Sequence
  Description of Artificial Sequence: Synthetic oligonucleotide
gaccgccuuccuucagcca

SEQ ID NO: 1807229 - RNA, 19 nt, Artificial Sequence
  Description of Artificial Sequence: Synthetic oligonucleotide
ggcgagguggacagcacca

SEQ ID NO: 1807230 - RNA, 19 nt, Artificial Sequence
  Description of Artificial Sequence: Synthetic oligonucleotide
cgcggaagccggcaggagg

SEQ ID NO: 1807231 - RNA, 19 nt, Artificial Sequence
  Description of Artificial Sequence: Synthetic oligonucleotide
ucaucuccucguggaccga

SEQ ID NO: 1807232 - RNA, 19 nt, Artificial Sequence
  Description of Artificial Sequence: Synthetic oligonucleotide
ccagcacggucuugccucg

SEQ ID NO: 1807233 - RNA, 19 nt, Artificial Sequence
  Description of Artificial Sequence: Synthetic oligonucleotide
gcaccagagguuucuccga

SEQ ID NO: 1807234 - RNA, 19 nt, Artificial Sequence
  Description of Artificial Sequence: Synthetic oligonucleotide
agcgcguggcgaagcuuuc

SEQ ID NO: 1807235 - RNA, 19 nt, Artificial Sequence
  Description of Artificial Sequence: Synthetic oligonucleotide
gcguacacgcgccgggcgc

SEQ ID NO: 1807236 - RNA, 19 nt, Artificial Sequence
  Description of Artificial Sequence: Synthetic oligonucleotide
guacacgcgccgggcgccg

SEQ ID NO: 1807237 - RNA, 19 nt, Artificial Sequence
  Description of Artificial Sequence: Synthetic oligonucleotide
agacgccauuccagcaucu

SEQ ID NO: 1807238 - RNA, 19 nt, Artificial Sequence
  Description of Artificial Sequence: Synthetic oligonucleotide
gguugucccgggagggcag

SEQ ID NO: 1807239 - RNA, 19 nt, Artificial Sequence
  Description of Artificial Sequence: Synthetic oligonucleotide
gcccguagcccauccacuc

SEQ ID NO: 1807240 - RNA, 19 nt, Artificial Sequence
  Description of Artificial Sequence: Synthetic oligonucleotide
ccggcaccggcucauucag

SEQ ID NO: 1807241 - RNA, 19 nt, Artificial Sequence
  Description of Artificial Sequence: Synthetic oligonucleotide
uugucccgggagggcagca

SEQ ID NO: 1807242 - RNA, 19 nt, Artificial Sequence
  Description of Artificial Sequence: Synthetic oligonucleotide
gguccgcgcguggagcacg

SEQ ID NO: 1807243 - RNA, 19 nt, Artificial Sequence
  Description of Artificial Sequence: Synthetic oligonucleotide
ccacucgcucacgauggcg

SEQ ID NO: 1807244 - RNA, 19 nt, Artificial Sequence
  Description of Artificial Sequence: Synthetic oligonucleotide
agcucauguccacgccaua

SEQ ID NO: 1807245 - RNA, 19 nt, Artificial Sequence
  Description of Artificial Sequence: Synthetic oligonucleotide
cccacuuuguagcgcaaga

SEQ ID NO: 1807246 - RNA, 19 nt, Artificial Sequence
  Description of Artificial Sequence: Synthetic oligonucleotide
gccacagaaaugagggaaa

SEQ ID NO: 1807247 - RNA, 19 nt, Artificial Sequence
  Description of Artificial Sequence: Synthetic oligonucleotide
cagaggcgccgagccauag

SEQ ID NO: 1807248 - RNA, 19 nt, Artificial Sequence
  Description of Artificial Sequence: Synthetic oligonucleotide
cguugagccgcacuaccuc

SEQ ID NO: 1807249 - RNA, 19 nt, Artificial Sequence
  Description of Artificial Sequence: Synthetic oligonucleotide
ggaccgagacgucggagua

SEQ ID NO: 1807250 - RNA, 19 nt, Artificial Sequence
  Description of Artificial Sequence: Synthetic oligonucleotide
cuacaccggccuccagcuc

SEQ ID NO: 1807251 - RNA, 19 nt, Artificial Sequence
  Description of Artificial Sequence: Synthetic oligonucleotide
ucgcagcgcggcccaguuc

SEQ ID NO: 1807252 - RNA, 19 nt, Artificial Sequence
  Description of Artificial Sequence: Synthetic oligonucleotide
gccgggugaaaaggcgagg

SEQ ID NO: 1807253 - RNA, 19 nt, Artificial Sequence
  Description of Artificial Sequence: Synthetic oligonucleotide
ggcgucggugcggacgcgg

SEQ ID NO: 1807254 - RNA, 19 nt, Artificial Sequence
  Description of Artificial Sequence: Synthetic oligonucleotide
aucuccucguggaccgaga

SEQ ID NO: 1807255 - RNA, 19 nt, Artificial Sequence
  Description of Artificial Sequence: Synthetic oligonucleotide
uccugcuccccgccaucuu

SEQ ID NO: 1807256 - RNA, 19 nt, Artificial Sequence
  Description of Artificial Sequence: Synthetic oligonucleotide
gcgcccacguccagcacgg

SEQ ID NO: 1807257 - RNA, 19 nt, Artificial Sequence
  Description of Artificial Sequence: Synthetic oligonucleotide
gcggaagccggcaggagga

SEQ ID NO: 1807258 - RNA, 19 nt, Artificial Sequence
  Description of Artificial Sequence: Synthetic oligonucleotide
aggucaccuggaaccagau

SEQ ID NO: 1807259 - RNA, 19 nt, Artificial Sequence
  Description of Artificial Sequence: Synthetic oligonucleotide
ccuguugccagauggcgcu

SEQ ID NO: 1807260 - RNA, 19 nt, Artificial Sequence
  Description of Artificial Sequence: Synthetic oligonucleotide
cgacucaagcuuucuuuuc

SEQ ID NO: 1807261 - RNA, 19 nt, Artificial Sequence
  Description of Artificial Sequence: Synthetic oligonucleotide
guccgcgcguggagcacgg

SEQ ID NO: 1807262 - RNA, 19 nt, Artificial Sequence
  Description of Artificial Sequence: Synthetic oligonucleotide
acgcggucuuccaacccgu

SEQ ID NO: 1807263 - RNA, 19 nt, Artificial Sequence
  Description of Artificial Sequence: Synthetic oligonucleotide
ccgugucuuguuccaccgg

SEQ ID NO: 1807264 - RNA, 19 nt, Artificial Sequence
  Description of Artificial Sequence: Synthetic oligonucleotide
ggaaaucucccuuccucuu

SEQ ID NO: 1807265 - RNA, 19 nt, Artificial Sequence
  Description of Artificial Sequence: Synthetic oligonucleotide
cgagacgucggaguagcac

SEQ ID NO: 1807266 - RNA, 19 nt, Artificial Sequence
  Description of Artificial Sequence: Synthetic oligonucleotide
cagcacguccucgccggac

SEQ ID NO: 1807267 - RNA, 19 nt, Artificial Sequence
  Description of Artificial Sequence: Synthetic oligonucleotide
gaucuccgaguggcccaug

SEQ ID NO: 1807268 - RNA, 19 nt, Artificial Sequence
  Description of Artificial Sequence: Synthetic oligonucleotide
aguccccuccagggaaggu

SEQ ID NO: 1807269 - RNA, 19 nt, Artificial Sequence
  Description of Artificial Sequence: Synthetic oligonucleotide
cagcucgagcugggcaaag

SEQ ID NO: 1807270 - RNA, 19 nt, Artificial Sequence
  Description of Artificial Sequence: Synthetic oligonucleotide
cagcucauguccacgccau

SEQ ID NO: 1807271 - RNA, 19 nt, Artificial Sequence
  Description of Artificial Sequence: Synthetic oligonucleotide
gugcguggccgggugaaaa

SEQ ID NO: 1807272 - RNA, 19 nt, Artificial Sequence
  Description of Artificial Sequence: Synthetic oligonucleotide
cacuugguccgcgcgugga

SEQ ID NO: 1807273 - RNA, 19 nt, Artificial Sequence
  Description of Artificial Sequence: Synthetic oligonucleotide
cugcagcggaagcgcccgc

SEQ ID NO: 1807274 - RNA, 19 nt, Artificial Sequence
  Description of Artificial Sequence: Synthetic oligonucleotide
ccaccgucuccacggggcc

SEQ ID NO: 1807275 - RNA, 19 nt, Artificial Sequence
  Description of Artificial Sequence: Synthetic oligonucleotide
cccgccuacaccggccucc

SEQ ID NO: 1807276 - RNA, 19 nt, Artificial Sequence
  Description of Artificial Sequence: Synthetic oligonucleotide
ccuacaccggccuccagcu

SEQ ID NO: 1807277 - RNA, 19 nt, Artificial Sequence
  Description of Artificial Sequence: Synthetic oligonucleotide
gcccacguccagcacgguc

SEQ ID NO: 1807278 - RNA, 19 nt, Artificial Sequence
  Description of Artificial Sequence: Synthetic oligonucleotide
acuaccucccgggccuguu

SEQ ID NO: 1807279 - RNA, 19 nt, Artificial Sequence
  Description of Artificial Sequence: Synthetic oligonucleotide
cacucguaguacagcuggu

SEQ ID NO: 1807280 - RNA, 19 nt, Artificial Sequence
  Description of Artificial Sequence: Synthetic oligonucleotide
ccggcaggaggagaccgcc

SEQ ID NO: 1807281 - RNA, 19 nt, Artificial Sequence
  Description of Artificial Sequence: Synthetic oligonucleotide
agcuuuccaggcagcucau

SEQ ID NO: 1807282 - RNA, 19 nt, Artificial Sequence
  Description of Artificial Sequence: Synthetic oligonucleotide
cagcgcguggcgaagcuuu

SEQ ID NO: 1807283 - RNA, 19 nt, Artificial Sequence
  Description of Artificial Sequence: Synthetic oligonucleotide
gcucgcgcuugguccuccg

SEQ ID NO: 1807284 - RNA, 19 nt, Artificial Sequence
  Description of Artificial Sequence: Synthetic oligonucleotide
cugcuccaggccggcgcgg

SEQ ID NO: 1807285 - RNA, 19 nt, Artificial Sequence
  Description of Artificial Sequence: Synthetic oligonucleotide
ccacuugguccgcgcgugg

SEQ ID NO: 1807286 - RNA, 19 nt, Artificial Sequence
  Description of Artificial Sequence: Synthetic oligonucleotide
agugcguggccgggugaaa

SEQ ID NO: 1807287 - RNA, 19 nt, Artificial Sequence
  Description of Artificial Sequence: Synthetic oligonucleotide
caacccguugagccgcacu

SEQ ID NO: 1807288 - RNA, 19 nt, Artificial Sequence
  Description of Artificial Sequence: Synthetic oligonucleotide
ccccacuuuguagcgcaag

SEQ ID NO: 1807289 - RNA, 19 nt, Artificial Sequence
  Description of Artificial Sequence: Synthetic oligonucleotide
ccuccacggcguacacgcg

SEQ ID NO: 1807290 - RNA, 19 nt, Artificial Sequence
  Description of Artificial Sequence: Synthetic oligonucleotide
ccuccggggucguggcggg

SEQ ID NO: 1807291 - RNA, 19 nt, Artificial Sequence
  Description of Artificial Sequence: Synthetic oligonucleotide
cagcacggucuugccucgc

SEQ ID NO: 1807292 - RNA, 19 nt, Artificial Sequence
  Description of Artificial Sequence: Synthetic oligonucleotide
cagugcguggccgggugaa

SEQ ID NO: 1807293 - RNA, 19 nt, Artificial Sequence
  Description of Artificial Sequence: Synthetic oligonucleotide
cccagacgccauuccagca

SEQ ID NO: 1807294 - RNA, 19 nt, Artificial Sequence
  Description of Artificial Sequence: Synthetic oligonucleotide
gcccggcaggacgugcacg

SEQ ID NO: 1807295 - RNA, 19 nt, Artificial Sequence
  Description of Artificial Sequence: Synthetic oligonucleotide
cccgacucaagcuuucuuu

SEQ ID NO: 1807296 - RNA, 19 nt, Artificial Sequence
  Description of Artificial Sequence: Synthetic oligonucleotide
ggagcacggagcucagcau

SEQ ID NO: 1807297 - RNA, 19 nt, Artificial Sequence
  Description of Artificial Sequence: Synthetic oligonucleotide
ccgaguccccuccagggaa

SEQ ID NO: 1807298 - RNA, 19 nt, Artificial Sequence
  Description of Artificial Sequence: Synthetic oligonucleotide
cggcucauucagguagagg

SEQ ID NO: 1807299 - RNA, 19 nt, Artificial Sequence
  Description of Artificial Sequence: Synthetic oligonucleotide
cccuccagggaaggucacc

SEQ ID NO: 1807300 - RNA, 19 nt, Artificial Sequence
  Description of Artificial Sequence: Synthetic oligonucleotide
caggagcccguagcccauc

SEQ ID NO: 1807301 - RNA, 19 nt, Artificial Sequence
  Description of Artificial Sequence: Synthetic oligonucleotide
ggucgcuaaucggggccac

SEQ ID NO: 1807302 - RNA, 19 nt, Artificial Sequence
  Description of Artificial Sequence: Synthetic oligonucleotide
ggaggagaccgccuuccuu

SEQ ID NO: 1807303 - RNA, 19 nt, Artificial Sequence
  Description of Artificial Sequence: Synthetic oligonucleotide
gcgcguggcgaagcuuucc

SEQ ID NO: 1807304 - RNA, 19 nt, Artificial Sequence
  Description of Artificial Sequence: Synthetic oligonucleotide
cguacacgcgccgggcgcc

SEQ ID NO: 1807305 - RNA, 19 nt, Artificial Sequence
  Description of Artificial Sequence: Synthetic oligonucleotide
uccgcgcguggagcacgga

SEQ ID NO: 1807306 - RNA, 19 nt, Artificial Sequence
  Description of Artificial Sequence: Synthetic oligonucleotide
ccgacucaagcuuucuuuu

SEQ ID NO: 1807307 - RNA, 19 nt, Artificial Sequence
  Description of Artificial Sequence: Synthetic oligonucleotide
ccggcucauucagguagag

SEQ ID NO: 1807308 - RNA, 19 nt, Artificial Sequence
  Description of Artificial Sequence: Synthetic oligonucleotide
cacguccucgccggacaga

SEQ ID NO: 1807309 - RNA, 19 nt, Artificial Sequence
  Description of Artificial Sequence: Synthetic oligonucleotide
gguaggcgucggugcggac

SEQ ID NO: 1807310 - RNA, 19 nt, Artificial Sequence
  Description of Artificial Sequence: Synthetic oligonucleotide
ccgugcagaggcgccgagc

SEQ ID NO: 1807311 - RNA, 19 nt, Artificial Sequence
  Description of Artificial Sequence: Synthetic oligonucleotide
gggccacgaaaagcuccgc

SEQ ID NO: 1807312 - RNA, 19 nt, Artificial Sequence
  Description of Artificial Sequence: Synthetic oligonucleotide
gcagcgcggcccaguuccg

SEQ ID NO: 1807313 - RNA, 19 nt, Artificial Sequence
  Description of Artificial Sequence: Synthetic oligonucleotide
gcgcaagaggacgcgcaga

SEQ ID NO: 1807314 - RNA, 19 nt, Artificial Sequence
  Description of Artificial Sequence: Synthetic oligonucleotide
cagcggaagcgcccgccua

SEQ ID NO: 1807315 - RNA, 19 nt, Artificial Sequence
  Description of Artificial Sequence: Synthetic oligonucleotide
ccagacgccauuccagcau

SEQ ID NO: 1807316 - RNA, 19 nt, Artificial Sequence
  Description of Artificial Sequence: Synthetic oligonucleotide
ccucgccggacagacccug

SEQ ID NO: 1807317 - RNA, 19 nt, Artificial Sequence
  Description of Artificial Sequence: Synthetic oligonucleotide
cugggcgcagaagaugcuu

SEQ ID NO: 1807318 - RNA, 19 nt, Artificial Sequence
  Description of Artificial Sequence: Synthetic oligonucleotide
cgcguggcgaagcuuucca

SEQ ID NO: 1807319 - RNA, 19 nt, Artificial Sequence
  Description of Artificial Sequence: Synthetic oligonucleotide
cgcggcccaguuccgcagg

SEQ ID NO: 1807320 - RNA, 19 nt, Artificial Sequence
  Description of Artificial Sequence: Synthetic oligonucleotide
ccguugagccgcacuaccu

SEQ ID NO: 1807321 - RNA, 19 nt, Artificial Sequence
  Description of Artificial Sequence: Synthetic oligonucleotide
ccucguggaccgagacguc

SEQ ID NO: 1807322 - RNA, 19 nt, Artificial Sequence
  Description of Artificial Sequence: Synthetic oligonucleotide
cuccugcuccccgccaucu

SEQ ID NO: 1807323 - RNA, 19 nt, Artificial Sequence
  Description of Artificial Sequence: Synthetic oligonucleotide
ggcagcgcguggcgaagcu

SEQ ID NO: 1807324 - RNA, 19 nt, Artificial Sequence
  Description of Artificial Sequence: Synthetic oligonucleotide
gcggcccaguuccgcagga

SEQ ID NO: 1807325 - RNA, 19 nt, Artificial Sequence
  Description of Artificial Sequence: Synthetic oligonucleotide
cggucuugccucgcagcgc

SEQ ID NO: 1807326 - RNA, 19 nt, Artificial Sequence
  Description of Artificial Sequence: Synthetic oligonucleotide
cucgcagcgcggcccaguu

SEQ ID NO: 1807327 - RNA, 19 nt, Artificial Sequence
  Description of Artificial Sequence: Synthetic oligonucleotide
cguccucgccggacagacc

SEQ ID NO: 1807328 - RNA, 19 nt, Artificial Sequence
  Description of Artificial Sequence: Synthetic oligonucleotide
gcggaagcgcccgccuaca

SEQ ID NO: 1807329 - RNA, 19 nt, Artificial Sequence
  Description of Artificial Sequence: Synthetic oligonucleotide
gcccgcgcccacguccagc

SEQ ID NO: 1807330 - RNA, 19 nt, Artificial Sequence
  Description of Artificial Sequence: Synthetic oligonucleotide
cgugcacgcggucuuccaa

SEQ ID NO: 1807331 - RNA, 19 nt, Artificial Sequence
  Description of Artificial Sequence: Synthetic oligonucleotide
cgucggaguagcacucgua

SEQ ID NO: 1807332 - RNA, 19 nt, Artificial Sequence
  Description of Artificial Sequence: Synthetic oligonucleotide
cggaagcgcccgccuacac

SEQ ID NO: 1807333 - RNA, 19 nt, Artificial Sequence
  Description of Artificial Sequence: Synthetic oligonucleotide
cguggaccgagacgucgga

SEQ ID NO: 1807334 - RNA, 19 nt, Artificial Sequence
  Description of Artificial Sequence: Synthetic oligonucleotide
gcaggaugcccaggcggua

SEQ ID NO: 1807335 - RNA, 19 nt, Artificial Sequence
  Description of Artificial Sequence: Synthetic oligonucleotide
cggcguacacgcgccgggc

SEQ ID NO: 1807336 - RNA, 19 nt, Artificial Sequence
  Description of Artificial Sequence: Synthetic oligonucleotide
ccgagacgucggaguagca

SEQ ID NO: 1807337 - RNA, 19 nt, Artificial Sequence
  Description of Artificial Sequence: Synthetic oligonucleotide
ccgggccuguugccagaug

SEQ ID NO: 1807338 - RNA, 19 nt, Artificial Sequence
  Description of Artificial Sequence: Synthetic oligonucleotide
ccaacccguugagccgcac

SEQ ID NO: 1807339 - RNA, 19 nt, Artificial Sequence
  Description of Artificial Sequence: Synthetic oligonucleotide
ccgcggaagccggcaggag

SEQ ID NO: 1807340 - RNA, 19 nt, Artificial Sequence
  Description of Artificial Sequence: Synthetic oligonucleotide
caccggccuccagcuccug

SEQ ID NO: 1807341 - RNA, 19 nt, Artificial Sequence
  Description of Artificial Sequence: Synthetic oligonucleotide
cgcuaaucggggccacgaa

SEQ ID NO: 1807342 - RNA, 19 nt, Artificial Sequence
  Description of Artificial Sequence: Synthetic oligonucleotide
gcccgccuacaccggccuc

SEQ ID NO: 1807343 - RNA, 19 nt, Artificial Sequence
  Description of Artificial Sequence: Synthetic oligonucleotide
ccugggcgcagaagaugcu

SEQ ID NO: 1807344 - RNA, 19 nt, Artificial Sequence
  Description of Artificial Sequence: Synthetic oligonucleotide
ggucguggcggggcugccu

SEQ ID NO: 1807345 - RNA, 19 nt, Artificial Sequence
  Description of Artificial Sequence: Synthetic oligonucleotide
gcagaggcgccgagccaua

SEQ ID NO: 1807346 - RNA, 19 nt, Artificial Sequence
  Description of Artificial Sequence: Synthetic oligonucleotide
cgcggucggcgaucaucuc

SEQ ID NO: 1807347 - RNA, 19 nt, Artificial Sequence
  Description of Artificial Sequence: Synthetic oligonucleotide
gccucgcagcgcggcccag

SEQ ID NO: 1807348 - RNA, 19 nt, Artificial Sequence
  Description of Artificial Sequence: Synthetic oligonucleotide
ccgccuacaccggccucca

SEQ ID NO: 1807349 - RNA, 19 nt, Artificial Sequence
  Description of Artificial Sequence: Synthetic oligonucleotide
ccgucuccacggggcccgg

SEQ ID NO: 1807350 - RNA, 19 nt, Artificial Sequence
  Description of Artificial Sequence: Synthetic oligonucleotide
ccgcgcccacguccagcac

SEQ ID NO: 1807351 - RNA, 19 nt, Artificial Sequence
  Description of Artificial Sequence: Synthetic oligonucleotide
ccaggccggcgcgggccag

SEQ ID NO: 1807352 - RNA, 19 nt, Artificial Sequence
  Description of Artificial Sequence: Synthetic oligonucleotide
gcgucggugcggacgcggu

SEQ ID NO: 1807353 - RNA, 19 nt, Artificial Sequence
  Description of Artificial Sequence: Synthetic oligonucleotide
ccccgacucaagcuuucuu

SEQ ID NO: 1807354 - RNA, 19 nt, Artificial Sequence
  Description of Artificial Sequence: Synthetic oligonucleotide
cgccuacaccggccuccag

SEQ ID NO: 1807355 - RNA, 19 nt, Artificial Sequence
  Description of Artificial Sequence: Synthetic oligonucleotide
ggucccgcucgcgcuuggu

SEQ ID NO: 1807356 - RNA, 19 nt, Artificial Sequence
  Description of Artificial Sequence: Synthetic oligonucleotide
cgcguggagcacggagcuc

SEQ ID NO: 1807357 - RNA, 19 nt, Artificial Sequence
  Description of Artificial Sequence: Synthetic oligonucleotide
gcagcgcguggcgaagcuu

SEQ ID NO: 1807358 - RNA, 19 nt, Artificial Sequence
  Description of Artificial Sequence: Synthetic oligonucleotide
ccgcucgcgcuugguccuc

SEQ ID NO: 1807359 - RNA, 19 nt, Artificial Sequence
  Description of Artificial Sequence: Synthetic oligonucleotide
cggugcggacgcggucggc

SEQ ID NO: 1807360 - RNA, 19 nt, Artificial Sequence
  Description of Artificial Sequence: Synthetic oligonucleotide
gcgccggccugggcgcaga

SEQ ID NO: 1807361 - RNA, 19 nt, Artificial Sequence
  Description of Artificial Sequence: Synthetic oligonucleotide
ccucgcagcgcggcccagu

SEQ ID NO: 1807362 - RNA, 19 nt, Artificial Sequence
  Description of Artificial Sequence: Synthetic oligonucleotide
cgaucuccgaguggcccau

SEQ ID NO: 1807363 - RNA, 19 nt, Artificial Sequence
  Description of Artificial Sequence: Synthetic oligonucleotide
cggugcccgcgcccacguc

SEQ ID NO: 1807364 - RNA, 19 nt, Artificial Sequence
  Description of Artificial Sequence: Synthetic oligonucleotide
cgcccgccuacaccggccu

SEQ ID NO: 1807365 - RNA, 19 nt, Artificial Sequence
  Description of Artificial Sequence: Synthetic oligonucleotide
cguggcggggcugccuccu

SEQ ID NO: 1807366 - RNA, 19 nt, Artificial Sequence
  Description of Artificial Sequence: Synthetic oligonucleotide
cggggcccggcaggacgug

SEQ ID NO: 1807367 - RNA, 19 nt, Artificial Sequence
  Description of Artificial Sequence: Synthetic oligonucleotide
cgccggccugggcgcagaa

SEQ ID NO: 1807368 - RNA, 19 nt, Artificial Sequence
  Description of Artificial Sequence: Synthetic oligonucleotide
cgcccacguccagcacggu

SEQ ID NO: 1807369 - RNA, 19 nt, Artificial Sequence
  Description of Artificial Sequence: Synthetic oligonucleotide
cauuuuacaaguuauaucc

SEQ ID NO: 1807370 - RNA, 19 nt, Artificial Sequence
  Description of Artificial Sequence: Synthetic oligonucleotide
aauggcaacucucaggccc

SEQ ID NO: 1807371 - RNA, 19 nt, Artificial Sequence
  Description of Artificial Sequence: Synthetic oligonucleotide
uauaucaucagaucaaagc

SEQ ID NO: 1807372 - RNA, 19 nt, Artificial Sequence
  Description of Artificial Sequence: Synthetic oligonucleotide
uucaucaacaaaacaaggg

SEQ ID NO: 1807373 - RNA, 19 nt, Artificial Sequence
  Description of Artificial Sequence: Synthetic oligonucleotide
acagcuguguauuagacac

SEQ ID NO: 1807374 - RNA, 19 nt, Artificial Sequence
  Description of Artificial Sequence: Synthetic oligonucleotide
ucauaaagcauuuugagaa

SEQ ID NO: 1807375 - RNA, 19 nt, Artificial Sequence
  Description of Artificial Sequence: Synthetic oligonucleotide
uccauaauaaacuagugac

SEQ ID NO: 1807376 - RNA, 19 nt, Artificial Sequence
  Description of Artificial Sequence: Synthetic oligonucleotide
uguaaauuuuccaauacac

SEQ ID NO: 1807377 - RNA, 19 nt, Artificial Sequence
  Description of Artificial Sequence: Synthetic oligonucleotide
aauacugcaacauucugca

SEQ ID NO: 1807378 - RNA, 19 nt, Artificial Sequence
  Description of Artificial Sequence: Synthetic oligonucleotide
auauacucaaacaagaagg

SEQ ID NO: 1807379 - RNA, 19 nt, Artificial Sequence
  Description of Artificial Sequence: Synthetic oligonucleotide
aaauccaauacacaccaag

SEQ ID NO: 1807380 - RNA, 19 nt, Artificial Sequence
  Description of Artificial Sequence: Synthetic oligonucleotide
aauauagguguucuuauca

SEQ ID NO: 1807381 - RNA, 19 nt, Artificial Sequence
  Description of Artificial Sequence: Synthetic oligonucleotide
aaguuauucaugcuacugg

SEQ ID NO: 1807382 - RNA, 19 nt, Artificial Sequence
  Description of Artificial Sequence: Synthetic oligonucleotide
uucauaacgaauauaggug

SEQ ID NO: 1807383 - RNA, 19 nt, Artificial Sequence
  Description of Artificial Sequence: Synthetic oligonucleotide
aaguucauaacgaauauag

SEQ ID NO: 1807384 - RNA, 19 nt, Artificial Sequence
  Description of Artificial Sequence: Synthetic oligonucleotide
uguauuagacacaaaauaa

SEQ ID NO: 1807385 - RNA, 19 nt, Artificial Sequence
  Description of Artificial Sequence: Synthetic oligonucleotide
gaaugauuaugcuacauug

SEQ ID NO: 1807386 - RNA, 19 nt, Artificial Sequence
  Description of Artificial Sequence: Synthetic oligonucleotide
aauacuuuaccaaaguucu

SEQ ID NO: 1807387 - RNA, 19 nt, Artificial Sequence
  Description of Artificial Sequence: Synthetic oligonucleotide
ugcguuacagcauagaugu

SEQ ID NO: 1807388 - RNA, 19 nt, Artificial Sequence
  Description of Artificial Sequence: Synthetic oligonucleotide
acaagauauagucaaguuc

SEQ ID NO: 1807389 - RNA, 19 nt, Artificial Sequence
  Description of Artificial Sequence: Synthetic oligonucleotide
aacuauguaauguuuauuu

SEQ ID NO: 1807390 - RNA, 19 nt, Artificial Sequence
  Description of Artificial Sequence: Synthetic oligonucleotide
aaguuuauaucaucagauc

SEQ ID NO: 1807391 - RNA, 19 nt, Artificial Sequence
  Description of Artificial Sequence: Synthetic oligonucleotide
gauauagucaaguucauaa

SEQ ID NO: 1807392 - RNA, 19 nt, Artificial Sequence
  Description of Artificial Sequence: Synthetic oligonucleotide
aaacuagugacagaaaaug

SEQ ID NO: 1807393 - RNA, 19 nt, Artificial Sequence
  Description of Artificial Sequence: Synthetic oligonucleotide
uuuaugcccguucauaaag

SEQ ID NO: 1807394 - RNA, 19 nt, Artificial Sequence
  Description of Artificial Sequence: Synthetic oligonucleotide
uacucaaacaagaaggaga

SEQ ID NO: 1807395 - RNA, 19 nt, Artificial Sequence
  Description of Artificial Sequence: Synthetic oligonucleotide
aguuuauaucaucagauca

SEQ ID NO: 1807396 - RNA, 19 nt, Artificial Sequence
  Description of Artificial Sequence: Synthetic oligonucleotide
gauggaaugauuaugcuac

SEQ ID NO: 1807397 - RNA, 19 nt, Artificial Sequence
  Description of Artificial Sequence: Synthetic oligonucleotide
ucuaugaccagcucuauac

SEQ ID NO: 1807398 - RNA, 19 nt, Artificial Sequence
  Description of Artificial Sequence: Synthetic oligonucleotide
uacuuuucuauggugaugg

SEQ ID NO: 1807399 - RNA, 19 nt, Artificial Sequence
  Description of Artificial Sequence: Synthetic oligonucleotide
  modified_base (3)..(3): a, c, u, g, unknown or other
cunaccaauauacucaaac

SEQ ID NO: 1807400 - RNA, 19 nt, Artificial Sequence
  Description of Artificial Sequence: Synthetic oligonucleotide
acuauguuccauaauaaac

SEQ ID NO: 1807401 - RNA, 19 nt, Artificial Sequence
  Description of Artificial Sequence: Synthetic oligonucleotide
aaacaagggacuuuugaca

SEQ ID NO: 1807402 - RNA, 19 nt, Artificial Sequence
  Description of Artificial Sequence: Synthetic oligonucleotide
uuaucaucauuguagauuc

SEQ ID NO: 1807403 - RNA, 19 nt, Artificial Sequence
  Description of Artificial Sequence: Synthetic oligonucleotide
uuuucuauggugauggaau

SEQ ID NO: 1807404 - RNA, 19 nt, Artificial Sequence
  Description of Artificial Sequence: Synthetic oligonucleotide
cacauuaggccauacauag

SEQ ID NO: 1807405 - RNA, 19 nt, Artificial Sequence
  Description of Artificial Sequence: Synthetic oligonucleotide
uuuccugaacuuuagaggu

SEQ ID NO: 1807406 - RNA, 19 nt, Artificial Sequence
  Description of Artificial Sequence: Synthetic oligonucleotide
cauuuugagaaaucaagag

SEQ ID NO: 1807407 - RNA, 19 nt, Artificial Sequence
  Description of Artificial Sequence: Synthetic oligonucleotide
aagugcuacuuuucuaugg

SEQ ID NO: 1807408 - RNA, 19 nt, Artificial Sequence
  Description of Artificial Sequence: Synthetic oligonucleotide
  modified_base (6)..(6): a, c, u, g, unknown or other
aaucunaccaauauacuca

SEQ ID NO: 1807409 - RNA, 19 nt, Artificial Sequence
  Description of Artificial Sequence: Synthetic oligonucleotide
augauuaugcuacauugag

SEQ ID NO: 1807410 - RNA, 19 nt, Artificial Sequence
  Description of Artificial Sequence: Synthetic oligonucleotide
  modified_base (7)..(7): a, c, u, g, unknown or other
caaucunaccaauauacuc

SEQ ID NO: 1807411 - RNA, 19 nt, Artificial Sequence
  Description of Artificial Sequence: Synthetic oligonucleotide
uuccauaauaaacuaguga

SEQ ID NO: 1807412 - RNA, 19 nt, Artificial Sequence
  Description of Artificial Sequence: Synthetic oligonucleotide
uccaauacacaccaaguga

SEQ ID NO: 1807413 - RNA, 19 nt, Artificial Sequence
  Description of Artificial Sequence: Synthetic oligonucleotide
uggacaugauuuaaaauac

SEQ ID NO: 1807414 - RNA, 19 nt, Artificial Sequence
  Description of Artificial Sequence: Synthetic oligonucleotide
  modified_base (2)..(2): a, c, u, g, unknown or other
  modified_base (15)..(15): a, c, u, g, unknown or other
gnuuuucccaaucunacca

SEQ ID NO: 1807415 - RNA, 19 nt, Artificial Sequence
  Description of Artificial Sequence: Synthetic oligonucleotide
acuauguaauguuuauuuc

SEQ ID NO: 1807416 - RNA, 19 nt, Artificial Sequence
  Description of Artificial Sequence: Synthetic oligonucleotide
ugucucaaacacauuaggc

SEQ ID NO: 1807417 - RNA, 19 nt, Artificial Sequence
  Description of Artificial Sequence: Synthetic oligonucleotide
auaaacuagugacagaaaa

SEQ ID NO: 1807418 - RNA, 19 nt, Artificial Sequence
  Description of Artificial Sequence: Synthetic oligonucleotide
ucauaacgaauauaggugu

SEQ ID NO: 1807419 - RNA, 19 nt, Artificial Sequence
  Description of Artificial Sequence: Synthetic oligonucleotide
ugacaugugcguuacagca

SEQ ID NO: 1807420 - RNA, 19 nt, Artificial Sequence
  Description of Artificial Sequence: Synthetic oligonucleotide
  modified_base (2)..(2): a, c, u, g, unknown or other
unaccaauauacucaaaca

SEQ ID NO: 1807421 - RNA, 19 nt, Artificial Sequence
  Description of Artificial Sequence: Synthetic oligonucleotide
aaguuuaaggugugaaaca

SEQ ID NO: 1807422 - RNA, 19 nt, Artificial Sequence
  Description of Artificial Sequence: Synthetic oligonucleotide
uauacugaucugcuaaugu

SEQ ID NO: 1807423 - RNA, 19 nt, Artificial Sequence
  Description of Artificial Sequence: Synthetic oligonucleotide
aaaguuauucaugcuacug

SEQ ID NO: 1807424 - RNA, 19 nt, Artificial Sequence
  Description of Artificial Sequence: Synthetic oligonucleotide
uauggugauggaaugauua

SEQ ID NO: 1807425 - RNA, 19 nt, Artificial Sequence
  Description of Artificial Sequence: Synthetic oligonucleotide
ugaagggugagcauguuuc

SEQ ID NO: 1807426 - RNA, 19 nt, Artificial Sequence
  Description of Artificial Sequence: Synthetic oligonucleotide
ggacuuuugacaaagaggc

SEQ ID NO: 1807427 - RNA, 19 nt, Artificial Sequence
  Description of Artificial Sequence: Synthetic oligonucleotide
  modified_base (4)..(4): a, c, u, g, unknown or other
  modified_base (17)..(17): a, c, u, g, unknown or other
uagnuuuucccaaucunac

SEQ ID NO: 1807428 - RNA, 19 nt, Artificial Sequence
  Description of Artificial Sequence: Synthetic oligonucleotide
aauggcaauugcuacagua

SEQ ID NO: 1807429 - RNA, 19 nt, Artificial Sequence
  Description of Artificial Sequence: Synthetic oligonucleotide
aacaauggcaauugcuaca

SEQ ID NO: 1807430 - RNA, 19 nt, Artificial Sequence
  Description of Artificial Sequence: Synthetic oligonucleotide
uguaacuauguaauguuua

SEQ ID NO: 1807431 - RNA, 19 nt, Artificial Sequence
  Description of Artificial Sequence: Synthetic oligonucleotide
uacuuuaccaaaguucugc

SEQ ID NO: 1807432 - RNA, 19 nt, Artificial Sequence
  Description of Artificial Sequence: Synthetic oligonucleotide
uucugcaugguccaauggc

SEQ ID NO: 1807433 - RNA, 19 nt, Artificial Sequence
  Description of Artificial Sequence: Synthetic oligonucleotide
uuuuaacacuccauucugc

SEQ ID NO: 1807434 - RNA, 19 nt, Artificial Sequence
  Description of Artificial Sequence: Synthetic oligonucleotide
acagccaaauccaauacac

SEQ ID NO: 1807435 - RNA, 19 nt, Artificial Sequence
  Description of Artificial Sequence: Synthetic oligonucleotide
gacaguucaguaaaagugc

SEQ ID NO: 1807436 - RNA, 19 nt, Artificial Sequence
  Description of Artificial Sequence: Synthetic oligonucleotide
ucagaucaaagcaaguuua

SEQ ID NO: 1807437 - RNA, 19 nt, Artificial Sequence
  Description of Artificial Sequence: Synthetic oligonucleotide
uuuguaacuauguaauguu

SEQ ID NO: 1807438 - RNA, 19 nt, Artificial Sequence
  Description of Artificial Sequence: Synthetic oligonucleotide
uccaauacacaucucugac

SEQ ID NO: 1807439 - RNA, 19 nt, Artificial Sequence
  Description of Artificial Sequence: Synthetic oligonucleotide
aguuauucaugcuacugga

SEQ ID NO: 1807440 - RNA, 19 nt, Artificial Sequence
  Description of Artificial Sequence: Synthetic oligonucleotide
aguuuaaggugugaaacag

SEQ ID NO: 1807441 - RNA, 19 nt, Artificial Sequence
  Description of Artificial Sequence: Synthetic oligonucleotide
aauauucagacaguucagu

SEQ ID NO: 1807442 - RNA, 19 nt, Artificial Sequence
  Description of Artificial Sequence: Synthetic oligonucleotide
uauucagacaguucaguaa

SEQ ID NO: 1807443 - RNA, 19 nt, Artificial Sequence
  Description of Artificial Sequence: Synthetic oligonucleotide
uggguaaugugcuaugaga

SEQ ID NO: 1807444 - RNA, 19 nt, Artificial Sequence
  Description of Artificial Sequence: Synthetic oligonucleotide
ugcuacuggauuucuaccc

SEQ ID NO: 1807445 - RNA, 19 nt, Artificial Sequence
  Description of Artificial Sequence: Synthetic oligonucleotide
guucauaacgaauauaggu

SEQ ID NO: 1807446 - RNA, 19 nt, Artificial Sequence
  Description of Artificial Sequence: Synthetic oligonucleotide
  modified_base (6)..(6): a, c, u, g, unknown or other
  modified_base (19)..(19): a, c, u, g, unknown or other
uguagnuuuucccaaucun

SEQ ID NO: 1807447 - RNA, 19 nt, Artificial Sequence
  Description of Artificial Sequence: Synthetic oligonucleotide
auguggagaugucucaaac

SEQ ID NO: 1807448 - RNA, 19 nt, Artificial Sequence
  Description of Artificial Sequence: Synthetic oligonucleotide
cacuuauucuacacaaacc

SEQ ID NO: 1807449 - RNA, 19 nt, Artificial Sequence
  Description of Artificial Sequence: Synthetic oligonucleotide
aguucaauuaagugauuca

SEQ ID NO: 1807450 - RNA, 19 nt, Artificial Sequence
  Description of Artificial Sequence: Synthetic oligonucleotide
aaagugcuacuuuucuaug

SEQ ID NO: 1807451 - RNA, 19 nt, Artificial Sequence
  Description of Artificial Sequence: Synthetic oligonucleotide
uuuauuuaucuggugguac

SEQ ID NO: 1807452 - RNA, 19 nt, Artificial Sequence
  Description of Artificial Sequence: Synthetic oligonucleotide
auccaauacacaccaagug

SEQ ID NO: 1807453 - RNA, 19 nt, Artificial Sequence
  Description of Artificial Sequence: Synthetic oligonucleotide
agggacuuuugacaaagag

SEQ ID NO: 1807454 - RNA, 19 nt, Artificial Sequence
  Description of Artificial Sequence: Synthetic oligonucleotide
aaugauuaugcuacauuga

SEQ ID NO: 1807455 - RNA, 19 nt, Artificial Sequence
  Description of Artificial Sequence: Synthetic oligonucleotide
uuacauguggagaugucuc

SEQ ID NO: 1807456 - RNA, 19 nt, Artificial Sequence
  Description of Artificial Sequence: Synthetic oligonucleotide
augcuacuggauuucuacc

SEQ ID NO: 1807457 - RNA, 19 nt, Artificial Sequence
  Description of Artificial Sequence: Synthetic oligonucleotide
uuacaagauauagucaagu

SEQ ID NO: 1807458 - RNA, 19 nt, Artificial Sequence
  Description of Artificial Sequence: Synthetic oligonucleotide
agugacaugugcguuacag

SEQ ID NO: 1807459 - RNA, 19 nt, Artificial Sequence
  Description of Artificial Sequence: Synthetic oligonucleotide
gugaaacagacccuguaag

SEQ ID NO: 1807460 - RNA, 19 nt, Artificial Sequence
  Description of Artificial Sequence: Synthetic oligonucleotide
uuggguaaugugcuaugag

SEQ ID NO: 1807461 - RNA, 19 nt, Artificial Sequence
  Description of Artificial Sequence: Synthetic oligonucleotide
auggaguuguaaauuuucc

SEQ ID NO: 1807462 - RNA, 19 nt, Artificial Sequence
  Description of Artificial Sequence: Synthetic oligonucleotide
  modified_base (9)..(9): a, c, u, g, unknown or other
cccaaucunaccaauauac

SEQ ID NO: 1807463 - RNA, 19 nt, Artificial Sequence
  Description of Artificial Sequence: Synthetic oligonucleotide
auaacgaauauagguguuc

SEQ ID NO: 1807464 - RNA, 19 nt, Artificial Sequence
  Description of Artificial Sequence: Synthetic oligonucleotide
uuucuauggugauggaaug

SEQ ID NO: 1807465 - RNA, 19 nt, Artificial Sequence
  Description of Artificial Sequence: Synthetic oligonucleotide
ugugcguuacagcauagau

SEQ ID NO: 1807466 - RNA, 19 nt, Artificial Sequence
  Description of Artificial Sequence: Synthetic oligonucleotide
aaugugcuaugagagcauc

SEQ ID NO: 1807467 - RNA, 19 nt, Artificial Sequence
  Description of Artificial Sequence: Synthetic oligonucleotide
aaucaagaggugaaaggug

SEQ ID NO: 1807468 - RNA, 19 nt, Artificial Sequence
  Description of Artificial Sequence: Synthetic oligonucleotide
acaaaccaauacuuuacca

SEQ ID NO: 1807469 - RNA, 19 nt, Artificial Sequence
  Description of Artificial Sequence: Synthetic oligonucleotide
uuuauaucaucagaucaaa

SEQ ID NO: 1807470 - RNA, 19 nt, Artificial Sequence
  Description of Artificial Sequence: Synthetic oligonucleotide
  modified_base (7)..(7): a, c, u, g, unknown or other
auguagnuuuucccaaucu

SEQ ID NO: 1807471 - RNA, 19 nt, Artificial Sequence
  Description of Artificial Sequence: Synthetic oligonucleotide
ugauggaaugauuaugcua

SEQ ID NO: 1807472 - RNA, 19 nt, Artificial Sequence
  Description of Artificial Sequence: Synthetic oligonucleotide
cuguaagcaauacugcaac

SEQ ID NO: 1807473 - RNA, 19 nt, Artificial Sequence
  Description of Artificial Sequence: Synthetic oligonucleotide
uacauugaggggagcaccc

SEQ ID NO: 1807474 - RNA, 19 nt, Artificial Sequence
  Description of Artificial Sequence: Synthetic oligonucleotide
gcauguuucagcaacaaug

SEQ ID NO: 1807475 - RNA, 19 nt, Artificial Sequence
  Description of Artificial Sequence: Synthetic oligonucleotide
uguucuuaucaucauugua

SEQ ID NO: 1807476 - RNA, 19 nt, Artificial Sequence
  Description of Artificial Sequence: Synthetic oligonucleotide
acaugaugcucacagggca

SEQ ID NO: 1807477 - RNA, 19 nt, Artificial Sequence
  Description of Artificial Sequence: Synthetic oligonucleotide
acauccuuuaugcccguuc

SEQ ID NO: 1807478 - RNA, 19 nt, Artificial Sequence
  Description of Artificial Sequence: Synthetic oligonucleotide
cuguguauuagacacaaaa

SEQ ID NO: 1807479 - RNA, 19 nt, Artificial Sequence
  Description of Artificial Sequence: Synthetic oligonucleotide
gaaacagcuguguauuaga

SEQ ID NO: 1807480 - RNA, 19 nt, Artificial Sequence
  Description of Artificial Sequence: Synthetic oligonucleotide
uaagcaauacugcaacauu

SEQ ID NO: 1807481 - RNA, 19 nt, Artificial Sequence
  Description of Artificial Sequence: Synthetic oligonucleotide
  modified_base (11)..(11): a, c, u, g, unknown or other
uucccaaucunaccaauau

SEQ ID NO: 1807482 - RNA, 19 nt, Artificial Sequence
  Description of Artificial Sequence: Synthetic oligonucleotide
gugagcauguuucagcaac

SEQ ID NO: 1807483 - RNA, 19 nt, Artificial Sequence
  Description of Artificial Sequence: Synthetic oligonucleotide
aguucaggaacucuguauu

SEQ ID NO: 1807484 - RNA, 19 nt, Artificial Sequence
  Description of Artificial Sequence: Synthetic oligonucleotide
ggugauggaaugauuaugc

SEQ ID NO: 1807485 - RNA, 19 nt, Artificial Sequence
  Description of Artificial Sequence: Synthetic oligonucleotide
gauggaguuguaaauuuuc

SEQ ID NO: 1807486 - RNA, 19 nt, Artificial Sequence
  Description of Artificial Sequence: Synthetic oligonucleotide
auuacauguggagaugucu

SEQ ID NO: 1807487 - RNA, 19 nt, Artificial Sequence
  Description of Artificial Sequence: Synthetic oligonucleotide
ugugcuaugagagcauccu

SEQ ID NO: 1807488 - RNA, 19 nt, Artificial Sequence
  Description of Artificial Sequence: Synthetic oligonucleotide
  modified_base (8)..(8): a, c, u, g, unknown or other
gauguagnuuuucccaauc

SEQ ID NO: 1807489 - RNA, 19 nt, Artificial Sequence
  Description of Artificial Sequence: Synthetic oligonucleotide
uaugcccguucauaaagca

SEQ ID NO: 1807490 - RNA, 19 nt, Artificial Sequence
  Description of Artificial Sequence: Synthetic oligonucleotide
uacaagauauagucaaguu

SEQ ID NO: 1807491 - RNA, 19 nt, Artificial Sequence
  Description of Artificial Sequence: Synthetic oligonucleotide
uaacgaauauagguguucu

SEQ ID NO: 1807492 - RNA, 19 nt, Artificial Sequence
  Description of Artificial Sequence: Synthetic oligonucleotide
acugugaagggugagcaug

SEQ ID NO: 1807493 - RNA, 19 nt, Artificial Sequence
  Description of Artificial Sequence: Synthetic oligonucleotide
agaggccaucacuuuauag

SEQ ID NO: 1807494 - RNA, 19 nt, Artificial Sequence
  Description of Artificial Sequence: Synthetic oligonucleotide
auauagguguucuuaucau

SEQ ID NO: 1807495 - RNA, 19 nt, Artificial Sequence
  Description of Artificial Sequence: Synthetic oligonucleotide
  modified_base (5)..(5): a, c, u, g, unknown or other
aucunaccaauauacucaa

SEQ ID NO: 1807496 - RNA, 19 nt, Artificial Sequence
  Description of Artificial Sequence: Synthetic oligonucleotide
ugcccguucauaaagcauu

SEQ ID NO: 1807497 - RNA, 19 nt, Artificial Sequence
  Description of Artificial Sequence: Synthetic oligonucleotide
auacucaaacaagaaggag

SEQ ID NO: 1807498 - RNA, 19 nt, Artificial Sequence
  Description of Artificial Sequence: Synthetic oligonucleotide
auuguagauucuuggguaa

SEQ ID NO: 1807499 - RNA, 19 nt, Artificial Sequence
  Description of Artificial Sequence: Synthetic oligonucleotide
uacauguggagaugucuca

SEQ ID NO: 1807500 - RNA, 19 nt, Artificial Sequence
  Description of Artificial Sequence: Synthetic oligonucleotide
aauacaauauagacagcuu

SEQ ID NO: 1807501 - RNA, 19 nt, Artificial Sequence
  Description of Artificial Sequence: Synthetic oligonucleotide
caagggacuuuugacaaag

SEQ ID NO: 1807502 - RNA, 19 nt, Artificial Sequence
  Description of Artificial Sequence: Synthetic oligonucleotide
uuguaacuauguaauguuu

SEQ ID NO: 1807503 - RNA, 19 nt, Artificial Sequence
  Description of Artificial Sequence: Synthetic oligonucleotide
  modified_base (10)..(10): a, c, u, g, unknown or other
ucccaaucunaccaauaua

SEQ ID NO: 1807504 - RNA, 19 nt, Artificial Sequence
  Description of Artificial Sequence: Synthetic oligonucleotide
cugcacauuaaguucagga

SEQ ID NO: 1807505 - RNA, 19 nt, Artificial Sequence
  Description of Artificial Sequence: Synthetic oligonucleotide
auuucuaccccuccucuau

SEQ ID NO: 1807506 - RNA, 19 nt, Artificial Sequence
  Description of Artificial Sequence: Synthetic oligonucleotide
ucuauacugaucugcuaau

SEQ ID NO: 1807507 - RNA, 19 nt, Artificial Sequence
  Description of Artificial Sequence: Synthetic oligonucleotide
ucuauggugauggaaugau

SEQ ID NO: 1807508 - RNA, 19 nt, Artificial Sequence
  Description of Artificial Sequence: Synthetic oligonucleotide
auacacaccaagugacaug

SEQ ID NO: 1807509 - RNA, 19 nt, Artificial Sequence
  Description of Artificial Sequence: Synthetic oligonucleotide
guuuauaucaucagaucaa

SEQ ID NO: 1807510 - RNA, 19 nt, Artificial Sequence
  Description of Artificial Sequence: Synthetic oligonucleotide
uggugauggaaugauuaug

SEQ ID NO: 1807511 - RNA, 19 nt, Artificial Sequence
  Description of Artificial Sequence: Synthetic oligonucleotide
ucaucagaucaaagcaagu

SEQ ID NO: 1807512 - RNA, 19 nt, Artificial Sequence
  Description of Artificial Sequence: Synthetic oligonucleotide
auggcaauugcuacaguag

SEQ ID NO: 1807513 - RNA, 19 nt, Artificial Sequence
  Description of Artificial Sequence: Synthetic oligonucleotide
caccauacaacaaauuuua

SEQ ID NO: 1807514 - RNA, 19 nt, Artificial Sequence
  Description of Artificial Sequence: Synthetic oligonucleotide
augaugcucacagggcacc

SEQ ID NO: 1807515 - RNA, 19 nt, Artificial Sequence
  Description of Artificial Sequence: Synthetic oligonucleotide
  modified_base (5)..(5): a, c, u, g, unknown or other
  modified_base (18)..(18): a, c, u, g, unknown or other
guagnuuuucccaaucuna

SEQ ID NO: 1807516 - RNA, 19 nt, Artificial Sequence
  Description of Artificial Sequence: Synthetic oligonucleotide
ggaguuguaaauuuuccaa

SEQ ID NO: 1807517 - RNA, 19 nt, Artificial Sequence
  Description of Artificial Sequence: Synthetic oligonucleotide
cucuauacugaucugcuaa

SEQ ID NO: 1807518 - RNA, 19 nt, Artificial Sequence
  Description of Artificial Sequence: Synthetic oligonucleotide
ucauucauuaaggcaggga

SEQ ID NO: 1807519 - RNA, 19 nt, Artificial Sequence
  Description of Artificial Sequence: Synthetic oligonucleotide
ucccauaacugccuggauu

SEQ ID NO: 1807520 - RNA, 19 nt, Artificial Sequence
  Description of Artificial Sequence: Synthetic oligonucleotide
cuacauugaggggagcacc

SEQ ID NO: 1807521 - RNA, 19 nt, Artificial Sequence
  Description of Artificial Sequence: Synthetic oligonucleotide
ugcuaacuauguuccauaa

SEQ ID NO: 1807522 - RNA, 19 nt, Artificial Sequence
  Description of Artificial Sequence: Synthetic oligonucleotide
uccgagcugggugaaacag

SEQ ID NO: 1807523 - RNA, 19 nt, Artificial Sequence
  Description of Artificial Sequence: Synthetic oligonucleotide
acccuguaagcaauacugc

SEQ ID NO: 1807524 - RNA, 19 nt, Artificial Sequence
  Description of Artificial Sequence: Synthetic oligonucleotide
acauuaaguucaggaacuc

SEQ ID NO: 1807525 - RNA, 19 nt, Artificial Sequence
  Description of Artificial Sequence: Synthetic oligonucleotide
ugguccaauggcaacucuc

SEQ ID NO: 1807526 - RNA, 19 nt, Artificial Sequence
  Description of Artificial Sequence: Synthetic oligonucleotide
aggggagcaccccaaaagu

SEQ ID NO: 1807527 - RNA, 19 nt, Artificial Sequence
  Description of Artificial Sequence: Synthetic oligonucleotide
acgaauauagguguucuua

SEQ ID NO: 1807528 - RNA, 19 nt, Artificial Sequence
  Description of Artificial Sequence: Synthetic oligonucleotide
uucuauggugauggaauga

SEQ ID NO: 1807529 - RNA, 19 nt, Artificial Sequence
  Description of Artificial Sequence: Synthetic oligonucleotide
aacgaauauagguguucuu

SEQ ID NO: 1807530 - RNA, 19 nt, Artificial Sequence
  Description of Artificial Sequence: Synthetic oligonucleotide
gugacaugugcguuacagc

SEQ ID NO: 1807531 - RNA, 19 nt, Artificial Sequence
  Description of Artificial Sequence: Synthetic oligonucleotide
augugcuaugagagcaucc

SEQ ID NO: 1807532 - RNA, 19 nt, Artificial Sequence
  Description of Artificial Sequence: Synthetic oligonucleotide
caugaugcucacagggcac

SEQ ID NO: 1807533 - RNA, 19 nt, Artificial Sequence
  Description of Artificial Sequence: Synthetic oligonucleotide
  modified_base (9)..(9): a, c, u, g, unknown or other
agauguagnuuuucccaau

SEQ ID NO: 1807534 - RNA, 19 nt, Artificial Sequence
  Description of Artificial Sequence: Synthetic oligonucleotide
gcaauugcuacaguagugc

SEQ ID NO: 1807535 - RNA, 19 nt, Artificial Sequence
  Description of Artificial Sequence: Synthetic oligonucleotide
uucuaccccuccucuauga

SEQ ID NO: 1807536 - RNA, 19 nt, Artificial Sequence
  Description of Artificial Sequence: Synthetic oligonucleotide
cucaauuaaacauucccau

SEQ ID NO: 1807537 - RNA, 19 nt, Artificial Sequence
  Description of Artificial Sequence: Synthetic oligonucleotide
uuuccgagcugggugaaac

SEQ ID NO: 1807538 - RNA, 19 nt, Artificial Sequence
  Description of Artificial Sequence: Synthetic oligonucleotide
gacuuuccgagcuggguga

SEQ ID NO: 1807539 - RNA, 19 nt, Artificial Sequence
  Description of Artificial Sequence: Synthetic oligonucleotide
  modified_base (4)..(4): a, c, u, g, unknown or other
ucunaccaauauacucaaa

SEQ ID NO: 1807540 - RNA, 19 nt, Artificial Sequence
  Description of Artificial Sequence: Synthetic oligonucleotide
cacauuaaguucaggaacu

SEQ ID NO: 1807541 - RNA, 19 nt, Artificial Sequence
  Description of Artificial Sequence: Synthetic oligonucleotide
uggauuacauguggagaug

SEQ ID NO: 1807542 - RNA, 19 nt, Artificial Sequence
  Description of Artificial Sequence: Synthetic oligonucleotide
acaugugcguuacagcaua

SEQ ID NO: 1807543 - RNA, 19 nt, Artificial Sequence
  Description of Artificial Sequence: Synthetic oligonucleotide
  modified_base (18)..(18): a, c, u, g, unknown or other
uuacagcauagauguagnu

SEQ ID NO: 1807544 - RNA, 19 nt, Artificial Sequence
  Description of Artificial Sequence: Synthetic oligonucleotide
acauugaggggagcacccc

SEQ ID NO: 1807545 - RNA, 19 nt, Artificial Sequence
  Description of Artificial Sequence: Synthetic oligonucleotide
gugcguuacagcauagaug

SEQ ID NO: 1807546 - RNA, 19 nt, Artificial Sequence
  Description of Artificial Sequence: Synthetic oligonucleotide
auuaaggcagggaguacug

SEQ ID NO: 1807547 - RNA, 19 nt, Artificial Sequence
  Description of Artificial Sequence: Synthetic oligonucleotide
guaacuauguaauguuuau

SEQ ID NO: 1807548 - RNA, 19 nt, Artificial Sequence
  Description of Artificial Sequence: Synthetic oligonucleotide
uaggccauacauaguucaa

SEQ ID NO: 1807549 - RNA, 19 nt, Artificial Sequence
  Description of Artificial Sequence: Synthetic oligonucleotide
uaacuauguaauguuuauu

SEQ ID NO: 1807550 - RNA, 19 nt, Artificial Sequence
  Description of Artificial Sequence: Synthetic oligonucleotide
agccaauguagauggaguu

SEQ ID NO: 1807551 - RNA, 19 nt, Artificial Sequence
  Description of Artificial Sequence: Synthetic oligonucleotide
agcuguguauuagacacaa

SEQ ID NO: 1807552 - RNA, 19 nt, Artificial Sequence
  Description of Artificial Sequence: Synthetic oligonucleotide
acaguucaguaaaagugcu

SEQ ID NO: 1807553 - RNA, 19 nt, Artificial Sequence
  Description of Artificial Sequence: Synthetic oligonucleotide
aucaucauuguagauucuu

SEQ ID NO: 1807554 - RNA, 19 nt, Artificial Sequence
  Description of Artificial Sequence: Synthetic oligonucleotide
gcuacuggauuucuacccc

SEQ ID NO: 1807555 - RNA, 19 nt, Artificial Sequence
  Description of Artificial Sequence: Synthetic oligonucleotide
guacugugaagggugagca

SEQ ID NO: 1807556 - RNA, 19 nt, Artificial Sequence
  Description of Artificial Sequence: Synthetic oligonucleotide
gggaguacugugaagggug

SEQ ID NO: 1807557 - RNA, 19 nt, Artificial Sequence
  Description of Artificial Sequence: Synthetic oligonucleotide
cauuaggccauacauaguu

SEQ ID NO: 1807558 - RNA, 19 nt, Artificial Sequence
  Description of Artificial Sequence: Synthetic oligonucleotide
ugaccagcucuauacugau

SEQ ID NO: 1807559 - RNA, 19 nt, Artificial Sequence
  Description of Artificial Sequence: Synthetic oligonucleotide
caauacacaccaagugaca

SEQ ID NO: 1807560 - RNA, 19 nt, Artificial Sequence
  Description of Artificial Sequence: Synthetic oligonucleotide
auggaaugauuaugcuaca

SEQ ID NO: 1807561 - RNA, 19 nt, Artificial Sequence
  Description of Artificial Sequence: Synthetic oligonucleotide
caauugcuacaguagugca

SEQ ID NO: 1807562 - RNA, 19 nt, Artificial Sequence
  Description of Artificial Sequence: Synthetic oligonucleotide
uggaaugauuaugcuacau

SEQ ID NO: 1807563 - RNA, 19 nt, Artificial Sequence
  Description of Artificial Sequence: Synthetic oligonucleotide
uaacugccuggauuacaug

SEQ ID NO: 1807564 - RNA, 19 nt, Artificial Sequence
  Description of Artificial Sequence: Synthetic oligonucleotide
agcauguuucagcaacaau

SEQ ID NO: 1807565 - RNA, 19 nt, Artificial Sequence
  Description of Artificial Sequence: Synthetic oligonucleotide
aagauauagucaaguucau

SEQ ID NO: 1807566 - RNA, 19 nt, Artificial Sequence
  Description of Artificial Sequence: Synthetic oligonucleotide
caagugacaugugcguuac

SEQ ID NO: 1807567 - RNA, 19 nt, Artificial Sequence
  Description of Artificial Sequence: Synthetic oligonucleotide
cacaucucugacuuuccga

SEQ ID NO: 1807568 - RNA, 19 nt, Artificial Sequence
  Description of Artificial Sequence: Synthetic oligonucleotide
gauuacauguggagauguc

SEQ ID NO: 1807569 - RNA, 19 nt, Artificial Sequence
  Description of Artificial Sequence: Synthetic oligonucleotide
caugugcguuacagcauag

SEQ ID NO: 1807570 - RNA, 19 nt, Artificial Sequence
  Description of Artificial Sequence: Synthetic oligonucleotide
ggugaaacagacccuguaa

SEQ ID NO: 1807571 - RNA, 19 nt, Artificial Sequence
  Description of Artificial Sequence: Synthetic oligonucleotide
gugcuaugagagcauccug

SEQ ID NO: 1807572 - RNA, 19 nt, Artificial Sequence
  Description of Artificial Sequence: Synthetic oligonucleotide
aggugugaaacagcugugu

SEQ ID NO: 1807573 - RNA, 19 nt, Artificial Sequence
  Description of Artificial Sequence: Synthetic oligonucleotide
caauggcaacucucaggcc

SEQ ID NO: 1807574 - RNA, 19 nt, Artificial Sequence
  Description of Artificial Sequence: Synthetic oligonucleotide
aagaggccaucacuuuaua

SEQ ID NO: 1807575 - RNA, 19 nt, Artificial Sequence
  Description of Artificial Sequence: Synthetic oligonucleotide
ucauuaaggcagggaguac

SEQ ID NO: 1807576 - RNA, 19 nt, Artificial Sequence
  Description of Artificial Sequence: Synthetic oligonucleotide
uuccgagcugggugaaaca

SEQ ID NO: 1807577 - RNA, 19 nt, Artificial Sequence
  Description of Artificial Sequence: Synthetic oligonucleotide
acacauuaggccauacaua

SEQ ID NO: 1807578 - RNA, 19 nt, Artificial Sequence
  Description of Artificial Sequence: Synthetic oligonucleotide
ggcaauugcuacaguagug

SEQ ID NO: 1807579 - RNA, 19 nt, Artificial Sequence
  Description of Artificial Sequence: Synthetic oligonucleotide
cagggcaccauacaacaaa

SEQ ID NO: 1807580 - RNA, 19 nt, Artificial Sequence
  Description of Artificial Sequence: Synthetic oligonucleotide
cccuuucuaaacacaggcc

SEQ ID NO: 1807581 - RNA, 19 nt, Artificial Sequence
  Description of Artificial Sequence: Synthetic oligonucleotide
agauauagucaaguucaua

SEQ ID NO: 1807582 - RNA, 19 nt, Artificial Sequence
  Description of Artificial Sequence: Synthetic oligonucleotide
agggaguacugugaagggu

SEQ ID NO: 1807583 - RNA, 19 nt, Artificial Sequence
  Description of Artificial Sequence: Synthetic oligonucleotide
gaguuggacaugauuuaaa

SEQ ID NO: 1807584 - RNA, 19 nt, Artificial Sequence
  Description of Artificial Sequence: Synthetic oligonucleotide
caacucucaggcccuccag

SEQ ID NO: 1807585 - RNA, 19 nt, Artificial Sequence
  Description of Artificial Sequence: Synthetic oligonucleotide
guacucucuucaucaacaa

SEQ ID NO: 1807586 - RNA, 19 nt, Artificial Sequence
  Description of Artificial Sequence: Synthetic oligonucleotide
cuuggguaaugugcuauga

SEQ ID NO: 1807587 - RNA, 19 nt, Artificial Sequence
  Description of Artificial Sequence: Synthetic oligonucleotide
uugaggggagcaccccaaa

SEQ ID NO: 1807588 - RNA, 19 nt, Artificial Sequence
  Description of Artificial Sequence: Synthetic oligonucleotide
uuuugacaaagaggccauc

SEQ ID NO: 1807589 - RNA, 19 nt, Artificial Sequence
  Description of Artificial Sequence: Synthetic oligonucleotide
aagugacaugugcguuaca

SEQ ID NO: 1807590 - RNA, 19 nt, Artificial Sequence
  Description of Artificial Sequence: Synthetic oligonucleotide
cauugaggggagcacccca

SEQ ID NO: 1807591 - RNA, 19 nt, Artificial Sequence
  Description of Artificial Sequence: Synthetic oligonucleotide
aggccauacauaguucaau

SEQ ID NO: 1807592 - RNA, 19 nt, Artificial Sequence
  Description of Artificial Sequence: Synthetic oligonucleotide
agauggaguuguaaauuuu

SEQ ID NO: 1807593 - RNA, 19 nt, Artificial Sequence
  Description of Artificial Sequence: Synthetic oligonucleotide
augguccaauggcaacucu

SEQ ID NO: 1807594 - RNA, 19 nt, Artificial Sequence
  Description of Artificial Sequence: Synthetic oligonucleotide
aacauucugcaugguccaa

SEQ ID NO: 1807595 - RNA, 19 nt, Artificial Sequence
  Description of Artificial Sequence: Synthetic oligonucleotide
uugcuacaguagugcaaac

SEQ ID NO: 1807596 - RNA, 19 nt, Artificial Sequence
  Description of Artificial Sequence: Synthetic oligonucleotide
auccuuuaugcccguucau

SEQ ID NO: 1807597 - RNA, 19 nt, Artificial Sequence
  Description of Artificial Sequence: Synthetic oligonucleotide
cauuaaggcagggaguacu

SEQ ID NO: 1807598 - RNA, 19 nt, Artificial Sequence
  Description of Artificial Sequence: Synthetic oligonucleotide
cugcuaacuauguuccaua

SEQ ID NO: 1807599 - RNA, 19 nt, Artificial Sequence
  Description of Artificial Sequence: Synthetic oligonucleotide
gccaauguagauggaguug

SEQ ID NO: 1807600 - RNA, 19 nt, Artificial Sequence
  Description of Artificial Sequence: Synthetic oligonucleotide
cauguggagaugucucaaa

SEQ ID NO: 1807601 - RNA, 19 nt, Artificial Sequence
  Description of Artificial Sequence: Synthetic oligonucleotide
agucuguguucugcuaacu

SEQ ID NO: 1807602 - RNA, 19 nt, Artificial Sequence
  Description of Artificial Sequence: Synthetic oligonucleotide
cacaggcccaucaagaguu

SEQ ID NO: 1807603 - RNA, 19 nt, Artificial Sequence
  Description of Artificial Sequence: Synthetic oligonucleotide
caggcccaucaagaguugg

SEQ ID NO: 1807604 - RNA, 19 nt, Artificial Sequence
  Description of Artificial Sequence: Synthetic oligonucleotide
ccuguaagcaauacugcaa

SEQ ID NO: 1807605 - RNA, 19 nt, Artificial Sequence
  Description of Artificial Sequence: Synthetic oligonucleotide
guguucuuaucaucauugu

SEQ ID NO: 1807606 - RNA, 19 nt, Artificial Sequence
  Description of Artificial Sequence: Synthetic oligonucleotide
cagacccuguaagcaauac

SEQ ID NO: 1807607 - RNA, 19 nt, Artificial Sequence
  Description of Artificial Sequence: Synthetic oligonucleotide
ggaaugauuaugcuacauu

SEQ ID NO: 1807608 - RNA, 19 nt, Artificial Sequence
  Description of Artificial Sequence: Synthetic oligonucleotide
augugcguuacagcauaga

SEQ ID NO: 1807609 - RNA, 19 nt, Artificial Sequence
  Description of Artificial Sequence: Synthetic oligonucleotide
acauuaggccauacauagu

SEQ ID NO: 1807610 - RNA, 19 nt, Artificial Sequence
  Description of Artificial Sequence: Synthetic oligonucleotide
accaagugacaugugcguu

SEQ ID NO: 1807611 - RNA, 19 nt, Artificial Sequence
  Description of Artificial Sequence: Synthetic oligonucleotide
gcuacauugaggggagcac

SEQ ID NO: 1807612 - RNA, 19 nt, Artificial Sequence
  Description of Artificial Sequence: Synthetic oligonucleotide
auugaggggagcaccccaa

SEQ ID NO: 1807613 - RNA, 19 nt, Artificial Sequence
  Description of Artificial Sequence: Synthetic oligonucleotide
auggcaacucucaggcccu

SEQ ID NO: 1807614 - RNA, 19 nt, Artificial Sequence
  Description of Artificial Sequence: Synthetic oligonucleotide
gccauacauaguucaauua

SEQ ID NO: 1807615 - RNA, 19 nt, Artificial Sequence
  Description of Artificial Sequence: Synthetic oligonucleotide
cuaugaccagcucuauacu

SEQ ID NO: 1807616 - RNA, 19 nt, Artificial Sequence
  Description of Artificial Sequence: Synthetic oligonucleotide
cauuaaguucaggaacucu

SEQ ID NO: 1807617 - RNA, 19 nt, Artificial Sequence
  Description of Artificial Sequence: Synthetic oligonucleotide
cauaacgaauauagguguu

SEQ ID NO: 1807618 - RNA, 19 nt, Artificial Sequence
  Description of Artificial Sequence: Synthetic oligonucleotide
ggcccaucaagaguuggac

SEQ ID NO: 1807619 - RNA, 19 nt, Artificial Sequence
  Description of Artificial Sequence: Synthetic oligonucleotide
aggcccaucaagaguugga

SEQ ID NO: 1807620 - RNA, 19 nt, Artificial Sequence
  Description of Artificial Sequence: Synthetic oligonucleotide
augcccguucauaaagcau

SEQ ID NO: 1807621 - RNA, 19 nt, Artificial Sequence
  Description of Artificial Sequence: Synthetic oligonucleotide
cucuaugaccagcucuaua

SEQ ID NO: 1807622 - RNA, 19 nt, Artificial Sequence
  Description of Artificial Sequence: Synthetic oligonucleotide
cuggauuucuaccccuccu

SEQ ID NO: 1807623 - RNA, 19 nt, Artificial Sequence
  Description of Artificial Sequence: Synthetic oligonucleotide
guuauucaugcuacuggau

SEQ ID NO: 1807624 - RNA, 19 nt, Artificial Sequence
  Description of Artificial Sequence: Synthetic oligonucleotide
cagcuguguauuagacaca

SEQ ID NO: 1807625 - RNA, 19 nt, Artificial Sequence
  Description of Artificial Sequence: Synthetic oligonucleotide
ugugaagggugagcauguu

SEQ ID NO: 1807626 - RNA, 19 nt, Artificial Sequence
  Description of Artificial Sequence: Synthetic oligonucleotide
auaguucaauuaagugauu

SEQ ID NO: 1807627 - RNA, 19 nt, Artificial Sequence
  Description of Artificial Sequence: Synthetic oligonucleotide
gcaacucucaggcccucca

SEQ ID NO: 1807628 - RNA, 19 nt, Artificial Sequence
  Description of Artificial Sequence: Synthetic oligonucleotide
gcucccauaacugccugga

SEQ ID NO: 1807629 - RNA, 19 nt, Artificial Sequence
  Description of Artificial Sequence: Synthetic oligonucleotide
gcccaucaagaguuggaca

SEQ ID NO: 1807630 - RNA, 19 nt, Artificial Sequence
  Description of Artificial Sequence: Synthetic oligonucleotide
  modified_base (8)..(8): a, c, u, g, unknown or other
ccaaucunaccaauauacu

SEQ ID NO: 1807631 - RNA, 19 nt, Artificial Sequence
  Description of Artificial Sequence: Synthetic oligonucleotide
ggccauacauaguucaauu

SEQ ID NO: 1807632 - RNA, 19 nt, Artificial Sequence
  Description of Artificial Sequence: Synthetic oligonucleotide
gcaaacucuguucugccuu

SEQ ID NO: 1807633 - RNA, 19 nt, Artificial Sequence
  Description of Artificial Sequence: Synthetic oligonucleotide
gcaccauacaacaaauuuu

SEQ ID NO: 1807634 - RNA, 19 nt, Artificial Sequence
  Description of Artificial Sequence: Synthetic oligonucleotide
ccaagugacaugugcguua

SEQ ID NO: 1807635 - RNA, 19 nt, Artificial Sequence
  Description of Artificial Sequence: Synthetic oligonucleotide
acagggcaccauacaacaa

SEQ ID NO: 1807636 - RNA, 19 nt, Artificial Sequence
  Description of Artificial Sequence: Synthetic oligonucleotide
caaacucuguucugccuuu

SEQ ID NO: 1807637 - RNA, 19 nt, Artificial Sequence
  Description of Artificial Sequence: Synthetic oligonucleotide
gcucuauacugaucugcua

SEQ ID NO: 1807638 - RNA, 19 nt, Artificial Sequence
  Description of Artificial Sequence: Synthetic oligonucleotide
guguucugcuaacuauguu

SEQ ID NO: 1807639 - RNA, 19 nt, Artificial Sequence
  Description of Artificial Sequence: Synthetic oligonucleotide
caagaaggagagugacuuu

SEQ ID NO: 1807640 - RNA, 19 nt, Artificial Sequence
  Description of Artificial Sequence: Synthetic oligonucleotide
ggcaacucucaggcccucc

SEQ ID NO: 1807641 - RNA, 19 nt, Artificial Sequence
  Description of Artificial Sequence: Synthetic oligonucleotide
ccauaacugccuggauuac

SEQ ID NO: 1807642 - RNA, 19 nt, Artificial Sequence
  Description of Artificial Sequence: Synthetic oligonucleotide
ccgagcugggugaaacaga

SEQ ID NO: 1807643 - RNA, 19 nt, Artificial Sequence
  Description of Artificial Sequence: Synthetic oligonucleotide
cucccauaacugccuggau

SEQ ID NO: 1807644 - RNA, 19 nt, Artificial Sequence
  Description of Artificial Sequence: Synthetic oligonucleotide
ccaucacuuuauagucugu

SEQ ID NO: 1807645 - RNA, 19 nt, Artificial Sequence
  Description of Artificial Sequence: Synthetic oligonucleotide
gcccguucauaaagcauuu

SEQ ID NO: 1807646 - RNA, 19 nt, Artificial Sequence
  Description of Artificial Sequence: Synthetic oligonucleotide
gcguuacagcauagaugua

SEQ ID NO: 1807647 - RNA, 19 nt, Artificial Sequence
  Description of Artificial Sequence: Synthetic oligonucleotide
cccguucauaaagcauuuu

SEQ ID NO: 1807648 - RNA, 19 nt, Artificial Sequence
  Description of Artificial Sequence: Synthetic oligonucleotide
aauuaaaccaaacuuuaac

SEQ ID NO: 1807649 - RNA, 19 nt, Artificial Sequence
  Description of Artificial Sequence: Synthetic oligonucleotide
aauacaaacucucagccuc

SEQ ID NO: 1807650 - RNA, 19 nt, Artificial Sequence
  Description of Artificial Sequence: Synthetic oligonucleotide
aaaucuuauagccacuguc

SEQ ID NO: 1807651 - RNA, 19 nt, Artificial Sequence
  Description of Artificial Sequence: Synthetic oligonucleotide
uuuaacuugagagagagca

SEQ ID NO: 1807652 - RNA, 19 nt, Artificial Sequence
  Description of Artificial Sequence: Synthetic oligonucleotide
aaacucgcuguccaaagcc

SEQ ID NO: 1807653 - RNA, 19 nt, Artificial Sequence
  Description of Artificial Sequence: Synthetic oligonucleotide
uccacuuugaucugcaugg

SEQ ID NO: 1807654 - RNA, 19 nt, Artificial Sequence
  Description of Artificial Sequence: Synthetic oligonucleotide
uucaaauacaaacucucag

SEQ ID NO: 1807655 - RNA, 19 nt, Artificial Sequence
  Description of Artificial Sequence: Synthetic oligonucleotide
agcacuccuguuuugaagc

SEQ ID NO: 1807656 - RNA, 19 nt, Artificial Sequence
  Description of Artificial Sequence: Synthetic oligonucleotide
aaucucuugagcgagacca

SEQ ID NO: 1807657 - RNA, 19 nt, Artificial Sequence
  Description of Artificial Sequence: Synthetic oligonucleotide
aaacgagcuccacaguagc

SEQ ID NO: 1807658 - RNA, 19 nt, Artificial Sequence
  Description of Artificial Sequence: Synthetic oligonucleotide
cuauacaccaggcagagug

SEQ ID NO: 1807659 - RNA, 19 nt, Artificial Sequence
  Description of Artificial Sequence: Synthetic oligonucleotide
gaaggaacugcccauguag

SEQ ID NO: 1807660 - RNA, 19 nt, Artificial Sequence
  Description of Artificial Sequence: Synthetic oligonucleotide
ucuuuuggcuaucacaucu

SEQ ID NO: 1807661 - RNA, 19 nt, Artificial Sequence
  Description of Artificial Sequence: Synthetic oligonucleotide
uuggcuaucacaucugcag

SEQ ID NO: 1807662 - RNA, 19 nt, Artificial Sequence
  Description of Artificial Sequence: Synthetic oligonucleotide
acugucuuugacuuccagc

SEQ ID NO: 1807663 - RNA, 19 nt, Artificial Sequence
  Description of Artificial Sequence: Synthetic oligonucleotide
aagggugcacuucuggaac

SEQ ID NO: 1807664 - RNA, 19 nt, Artificial Sequence
  Description of Artificial Sequence: Synthetic oligonucleotide
ugcucauccacaaacgagc

SEQ ID NO: 1807665 - RNA, 19 nt, Artificial Sequence
  Description of Artificial Sequence: Synthetic oligonucleotide
cugacuauacaccaggcag

SEQ ID NO: 1807666 - RNA, 19 nt, Artificial Sequence
  Description of Artificial Sequence: Synthetic oligonucleotide
uguggaauuacugaguuuc

SEQ ID NO: 1807667 - RNA, 19 nt, Artificial Sequence
  Description of Artificial Sequence: Synthetic oligonucleotide
uccacaguagccuuggaug

SEQ ID NO: 1807668 - RNA, 19 nt, Artificial Sequence
  Description of Artificial Sequence: Synthetic oligonucleotide
agugagggcgaucaaguac

SEQ ID NO: 1807669 - RNA, 19 nt, Artificial Sequence
  Description of Artificial Sequence: Synthetic oligonucleotide
agcuaauuaaaccaaacuu

SEQ ID NO: 1807670 - RNA, 19 nt, Artificial Sequence
  Description of Artificial Sequence: Synthetic oligonucleotide
ugaaaguacacagcugugg

SEQ ID NO: 1807671 - RNA, 19 nt, Artificial Sequence
  Description of Artificial Sequence: Synthetic oligonucleotide
uugaauguucgucaccugc

SEQ ID NO: 1807672 - RNA, 19 nt, Artificial Sequence
  Description of Artificial Sequence: Synthetic oligonucleotide
gcuaugaaucucuugagcg

SEQ ID NO: 1807673 - RNA, 19 nt, Artificial Sequence
  Description of Artificial Sequence: Synthetic oligonucleotide
acuacagugaaaugacauc

SEQ ID NO: 1807674 - RNA, 19 nt, Artificial Sequence
  Description of Artificial Sequence: Synthetic oligonucleotide
uggagauucggcaugguac

SEQ ID NO: 1807675 - RNA, 19 nt, Artificial Sequence
  Description of Artificial Sequence: Synthetic oligonucleotide
agaugcagcucccagcuac

SEQ ID NO: 1807676 - RNA, 19 nt, Artificial Sequence
  Description of Artificial Sequence: Synthetic oligonucleotide
aaauacaaacucucagccu

SEQ ID NO: 1807677 - RNA, 19 nt, Artificial Sequence
  Description of Artificial Sequence: Synthetic oligonucleotide
ucaugcucauccacaaacg

SEQ ID NO: 1807678 - RNA, 19 nt, Artificial Sequence
  Description of Artificial Sequence: Synthetic oligonucleotide
ucggaaaucuuauagccac

SEQ ID NO: 1807679 - RNA, 19 nt, Artificial Sequence
  Description of Artificial Sequence: Synthetic oligonucleotide
aucacagggaacuuguucu

SEQ ID NO: 1807680 - RNA, 19 nt, Artificial Sequence
  Description of Artificial Sequence: Synthetic oligonucleotide
uguguggcaaggcggaagg

SEQ ID NO: 1807681 - RNA, 19 nt, Artificial Sequence
  Description of Artificial Sequence: Synthetic oligonucleotide
agcagcucggcuuuuaaag

SEQ ID NO: 1807682 - RNA, 19 nt, Artificial Sequence
  Description of Artificial Sequence: Synthetic oligonucleotide
aaucuuauagccacugucu

SEQ ID NO: 1807683 - RNA, 19 nt, Artificial Sequence
  Description of Artificial Sequence: Synthetic oligonucleotide
uugaugaccgagaugcagc

SEQ ID NO: 1807684 - RNA, 19 nt, Artificial Sequence
  Description of Artificial Sequence: Synthetic oligonucleotide
aaugaaccauaccuggggu

SEQ ID NO: 1807685 - RNA, 19 nt, Artificial Sequence
  Description of Artificial Sequence: Synthetic oligonucleotide
uuggccuugauucggagcu

SEQ ID NO: 1807686 - RNA, 19 nt, Artificial Sequence
  Description of Artificial Sequence: Synthetic oligonucleotide
gucaccugcacugagaaag

SEQ ID NO: 1807687 - RNA, 19 nt, Artificial Sequence
  Description of Artificial Sequence: Synthetic oligonucleotide
cagugaaaugacaucagag

SEQ ID NO: 1807688 - RNA, 19 nt, Artificial Sequence
  Description of Artificial Sequence: Synthetic oligonucleotide
uaugaaucucuugagcgag

SEQ ID NO: 1807689 - RNA, 19 nt, Artificial Sequence
  Description of Artificial Sequence: Synthetic oligonucleotide
ggacacaucggacagagag

SEQ ID NO: 1807690 - RNA, 19 nt, Artificial Sequence
  Description of Artificial Sequence: Synthetic oligonucleotide
uguuuugaagcuacucuga

SEQ ID NO: 1807691 - RNA, 19 nt, Artificial Sequence
  Description of Artificial Sequence: Synthetic oligonucleotide
acacaaggacaccagacag

SEQ ID NO: 1807692 - RNA, 19 nt, Artificial Sequence
  Description of Artificial Sequence: Synthetic oligonucleotide
aaguacuucagcgugugca

SEQ ID NO: 1807693 - RNA, 19 nt, Artificial Sequence
  Description of Artificial Sequence: Synthetic oligonucleotide
ucugcaugccuucaaacuc

SEQ ID NO: 1807694 - RNA, 19 nt, Artificial Sequence
  Description of Artificial Sequence: Synthetic oligonucleotide
aauuacugaguuucuggau

SEQ ID NO: 1807695 - RNA, 19 nt, Artificial Sequence
  Description of Artificial Sequence: Synthetic oligonucleotide
ucuugaauguucgucaccu

SEQ ID NO: 1807696 - RNA, 19 nt, Artificial Sequence
  Description of Artificial Sequence: Synthetic oligonucleotide
gacaucagagguccagugg

SEQ ID NO: 1807697 - RNA, 19 nt, Artificial Sequence
  Description of Artificial Sequence: Synthetic oligonucleotide
ugagggaccaaucuugaau

SEQ ID NO: 1807698 - RNA, 19 nt, Artificial Sequence
  Description of Artificial Sequence: Synthetic oligonucleotide
ucaguuggcaggcauuuac

SEQ ID NO: 1807699 - RNA, 19 nt, Artificial Sequence
  Description of Artificial Sequence: Synthetic oligonucleotide
agggaacuuguucucaggg

SEQ ID NO: 1807700 - RNA, 19 nt, Artificial Sequence
  Description of Artificial Sequence: Synthetic oligonucleotide
cuuauagccacugucuuug

SEQ ID NO: 1807701 - RNA, 19 nt, Artificial Sequence
  Description of Artificial Sequence: Synthetic oligonucleotide
cagugcucugguuugaggg

SEQ ID NO: 1807702 - RNA, 19 nt, Artificial Sequence
  Description of Artificial Sequence: Synthetic oligonucleotide
ucugacuauacaccaggca

SEQ ID NO: 1807703 - RNA, 19 nt, Artificial Sequence
  Description of Artificial Sequence: Synthetic oligonucleotide
gcuacucugaguuuugccg

SEQ ID NO: 1807704 - RNA, 19 nt, Artificial Sequence
  Description of Artificial Sequence: Synthetic oligonucleotide
gaauuacugaguuucugga

SEQ ID NO: 1807705 - RNA, 19 nt, Artificial Sequence
  Description of Artificial Sequence: Synthetic oligonucleotide
ugacuauacaccaggcaga

SEQ ID NO: 1807706 - RNA, 19 nt, Artificial Sequence
  Description of Artificial Sequence: Synthetic oligonucleotide
cuguuuugaagcuacucug

SEQ ID NO: 1807707 - RNA, 19 nt, Artificial Sequence
  Description of Artificial Sequence: Synthetic oligonucleotide
uuuuggcuaucacaucugc

SEQ ID NO: 1807708 - RNA, 19 nt, Artificial Sequence
  Description of Artificial Sequence: Synthetic oligonucleotide
agcuacucugaguuuugcc

SEQ ID NO: 1807709 - RNA, 19 nt, Artificial Sequence
  Description of Artificial Sequence: Synthetic oligonucleotide
acagcuguggaauuacuga

SEQ ID NO: 1807710 - RNA, 19 nt, Artificial Sequence
  Description of Artificial Sequence: Synthetic oligonucleotide
agggcgaucaaguacuuca

SEQ ID NO: 1807711 - RNA, 19 nt, Artificial Sequence
  Description of Artificial Sequence: Synthetic oligonucleotide
uuugacuuccagcacuccu

SEQ ID NO: 1807712 - RNA, 19 nt, Artificial Sequence
  Description of Artificial Sequence: Synthetic oligonucleotide
cacacuacagugaaaugac

SEQ ID NO: 1807713 - RNA, 19 nt, Artificial Sequence
  Description of Artificial Sequence: Synthetic oligonucleotide
auuacugaguuucuggauu

SEQ ID NO: 1807714 - RNA, 19 nt, Artificial Sequence
  Description of Artificial Sequence: Synthetic oligonucleotide
guggcuaugaaucucuuga

SEQ ID NO: 1807715 - RNA, 19 nt, Artificial Sequence
  Description of Artificial Sequence: Synthetic oligonucleotide
gaaaguacacagcugugga

SEQ ID NO: 1807716 - RNA, 19 nt, Artificial Sequence
  Description of Artificial Sequence: Synthetic oligonucleotide
agccucggaaaucuuauag

SEQ ID NO: 1807717 - RNA, 19 nt, Artificial Sequence
  Description of Artificial Sequence: Synthetic oligonucleotide
uggcuaucacaucugcagg

SEQ ID NO: 1807718 - RNA, 19 nt, Artificial Sequence
  Description of Artificial Sequence: Synthetic oligonucleotide
cugucuuugacuuccagca

SEQ ID NO: 1807719 - RNA, 19 nt, Artificial Sequence
  Description of Artificial Sequence: Synthetic oligonucleotide
uaugccguggagcuaauua

SEQ ID NO: 1807720 - RNA, 19 nt, Artificial Sequence
  Description of Artificial Sequence: Synthetic oligonucleotide
ugaguuuugccguucaguu

SEQ ID NO: 1807721 - RNA, 19 nt, Artificial Sequence
  Description of Artificial Sequence: Synthetic oligonucleotide
acaucagagguccagugga

SEQ ID NO: 1807722 - RNA, 19 nt, Artificial Sequence
  Description of Artificial Sequence: Synthetic oligonucleotide
auguucgucaccugcacug

SEQ ID NO: 1807723 - RNA, 19 nt, Artificial Sequence
  Description of Artificial Sequence: Synthetic oligonucleotide
uucugcaugccuucaaacu

SEQ ID NO: 1807724 - RNA, 19 nt, Artificial Sequence
  Description of Artificial Sequence: Synthetic oligonucleotide
ugaaccauaccuggggugc

SEQ ID NO: 1807725 - RNA, 19 nt, Artificial Sequence
  Description of Artificial Sequence: Synthetic oligonucleotide
uuugagggaccaaucuuga

SEQ ID NO: 1807726 - RNA, 19 nt, Artificial Sequence
  Description of Artificial Sequence: Synthetic oligonucleotide
gaauggauggggcccuugg

SEQ ID NO: 1807727 - RNA, 19 nt, Artificial Sequence
  Description of Artificial Sequence: Synthetic oligonucleotide
aaacucucagccucggaaa

SEQ ID NO: 1807728 - RNA, 19 nt, Artificial Sequence
  Description of Artificial Sequence: Synthetic oligonucleotide
ugguaguccugaaaguaca

SEQ ID NO: 1807729 - RNA, 19 nt, Artificial Sequence
  Description of Artificial Sequence: Synthetic oligonucleotide
cugcaugccuucaaacucg

SEQ ID NO: 1807730 - RNA, 19 nt, Artificial Sequence
  Description of Artificial Sequence: Synthetic oligonucleotide
gcgaucaaguacuucagcg

SEQ ID NO: 1807731 - RNA, 19 nt, Artificial Sequence
  Description of Artificial Sequence: Synthetic oligonucleotide
caaucuugaauguucguca

SEQ ID NO: 1807732 - RNA, 19 nt, Artificial Sequence
  Description of Artificial Sequence: Synthetic oligonucleotide
aggugaggagaguuucugc

SEQ ID NO: 1807733 - RNA, 19 nt, Artificial Sequence
  Description of Artificial Sequence: Synthetic oligonucleotide
uuuggcuaucacaucugca

SEQ ID NO: 1807734 - RNA, 19 nt, Artificial Sequence
  Description of Artificial Sequence: Synthetic oligonucleotide
aauguucgucaccugcacu

SEQ ID NO: 1807735 - RNA, 19 nt, Artificial Sequence
  Description of Artificial Sequence: Synthetic oligonucleotide
agugucuuuuggcuaucac

SEQ ID NO: 1807736 - RNA, 19 nt, Artificial Sequence
  Description of Artificial Sequence: Synthetic oligonucleotide
gaccaaucuugaauguucg

SEQ ID NO: 1807737 - RNA, 19 nt, Artificial Sequence
  Description of Artificial Sequence: Synthetic oligonucleotide
aaaguacacagcuguggaa

SEQ ID NO: 1807738 - RNA, 19 nt, Artificial Sequence
  Description of Artificial Sequence: Synthetic oligonucleotide
gaucacagggaacuuguuc

SEQ ID NO: 1807739 - RNA, 19 nt, Artificial Sequence
  Description of Artificial Sequence: Synthetic oligonucleotide
auuuaccuggagucugagg

SEQ ID NO: 1807740 - RNA, 19 nt, Artificial Sequence
  Description of Artificial Sequence: Synthetic oligonucleotide
ucggcuuuuaaaguggcgu

SEQ ID NO: 1807741 - RNA, 19 nt, Artificial Sequence
  Description of Artificial Sequence: Synthetic oligonucleotide
ugugcacacaaggacacca

SEQ ID NO: 1807742 - RNA, 19 nt, Artificial Sequence
  Description of Artificial Sequence: Synthetic oligonucleotide
ggaggaaugaaccauaccu

SEQ ID NO: 1807743 - RNA, 19 nt, Artificial Sequence
  Description of Artificial Sequence: Synthetic oligonucleotide
acaaguuugccauccccug

SEQ ID NO: 1807744 - RNA, 19 nt, Artificial Sequence
  Description of Artificial Sequence: Synthetic oligonucleotide
uggagaguguuugaugacc

SEQ ID NO: 1807745 - RNA, 19 nt, Artificial Sequence
  Description of Artificial Sequence: Synthetic oligonucleotide
augccuucaaacucgcugu

SEQ ID NO: 1807746 - RNA, 19 nt, Artificial Sequence
  Description of Artificial Sequence: Synthetic oligonucleotide
uccgucagaggacuugccc

SEQ ID NO: 1807747 - RNA, 19 nt, Artificial Sequence
  Description of Artificial Sequence: Synthetic oligonucleotide
gacuauacaccaggcagag

SEQ ID NO: 1807748 - RNA, 19 nt, Artificial Sequence
  Description of Artificial Sequence: Synthetic oligonucleotide
agaguguuugaugaccgag

SEQ ID NO: 1807749 - RNA, 19 nt, Artificial Sequence
  Description of Artificial Sequence: Synthetic oligonucleotide
agggugcacuucuggaacc

SEQ ID NO: 1807750 - RNA, 19 nt, Artificial Sequence
  Description of Artificial Sequence: Synthetic oligonucleotide
ucuuugacuuccagcacuc

SEQ ID NO: 1807751 - RNA, 19 nt, Artificial Sequence
  Description of Artificial Sequence: Synthetic oligonucleotide
ugacaucagagguccagug

SEQ ID NO: 1807752 - RNA, 19 nt, Artificial Sequence
  Description of Artificial Sequence: Synthetic oligonucleotide
ucggacacaucggacagag

SEQ ID NO: 1807753 - RNA, 19 nt, Artificial Sequence
  Description of Artificial Sequence: Synthetic oligonucleotide
gugaaaugacaucagaggu

SEQ ID NO: 1807754 - RNA, 19 nt, Artificial Sequence
  Description of Artificial Sequence: Synthetic oligonucleotide
uggcuaugaaucucuugag

SEQ ID NO: 1807755 - RNA, 19 nt, Artificial Sequence
  Description of Artificial Sequence: Synthetic oligonucleotide
uugagcgagaccaccucug

SEQ ID NO: 1807756 - RNA, 19 nt, Artificial Sequence
  Description of Artificial Sequence: Synthetic oligonucleotide
gguuguguggcuaugaauc

SEQ ID NO: 1807757 - RNA, 19 nt, Artificial Sequence
  Description of Artificial Sequence: Synthetic oligonucleotide
cagcuguggaauuacugag

SEQ ID NO: 1807758 - RNA, 19 nt, Artificial Sequence
  Description of Artificial Sequence: Synthetic oligonucleotide
cugguaguccugaaaguac

SEQ ID NO: 1807759 - RNA, 19 nt, Artificial Sequence
  Description of Artificial Sequence: Synthetic oligonucleotide
ucagccucggaaaucuuau

SEQ ID NO: 1807760 - RNA, 19 nt, Artificial Sequence
  Description of Artificial Sequence: Synthetic oligonucleotide
cuccacagaggacaccucg

SEQ ID NO: 1807761 - RNA, 19 nt, Artificial Sequence
  Description of Artificial Sequence: Synthetic oligonucleotide
cacgacacccucaucggcc

SEQ ID NO: 1807762 - RNA, 19 nt, Artificial Sequence
  Description of Artificial Sequence: Synthetic oligonucleotide
ccucggaaaucuuauagcc

SEQ ID NO: 1807763 - RNA, 19 nt, Artificial Sequence
  Description of Artificial Sequence: Synthetic oligonucleotide
gagagcucuguggagagug

SEQ ID NO: 1807764 - RNA, 19 nt, Artificial Sequence
  Description of Artificial Sequence: Synthetic oligonucleotide
uggagcuaauuaaaccaaa

SEQ ID NO: 1807765 - RNA, 19 nt, Artificial Sequence
  Description of Artificial Sequence: Synthetic oligonucleotide
ugaugaccgagaugcagcu

SEQ ID NO: 1807766 - RNA, 19 nt, Artificial Sequence
  Description of Artificial Sequence: Synthetic oligonucleotide
augaaccauaccuggggug

SEQ ID NO: 1807767 - RNA, 19 nt, Artificial Sequence
  Description of Artificial Sequence: Synthetic oligonucleotide
cccugcuucaaauacaaac

SEQ ID NO: 1807768 - RNA, 19 nt, Artificial Sequence
  Description of Artificial Sequence: Synthetic oligonucleotide
gaauguucgucaccugcac

SEQ ID NO: 1807769 - RNA, 19 nt, Artificial Sequence
  Description of Artificial Sequence: Synthetic oligonucleotide
gagcuaauuaaaccaaacu

SEQ ID NO: 1807770 - RNA, 19 nt, Artificial Sequence
  Description of Artificial Sequence: Synthetic oligonucleotide
ugaagcuacucugaguuuu

SEQ ID NO: 1807771 - RNA, 19 nt, Artificial Sequence
  Description of Artificial Sequence: Synthetic oligonucleotide
acagacaccguugugcaca

SEQ ID NO: 1807772 - RNA, 19 nt, Artificial Sequence
  Description of Artificial Sequence: Synthetic oligonucleotide
cuaugaaucucuugagcga

SEQ ID NO: 1807773 - RNA, 19 nt, Artificial Sequence
  Description of Artificial Sequence: Synthetic oligonucleotide
uccccugcuucaaauacaa

SEQ ID NO: 1807774 - RNA, 19 nt, Artificial Sequence
  Description of Artificial Sequence: Synthetic oligonucleotide
gauucggagcuuguguggc

SEQ ID NO: 1807775 - RNA, 19 nt, Artificial Sequence
  Description of Artificial Sequence: Synthetic oligonucleotide
uguagcucugguagaugga

SEQ ID NO: 1807776 - RNA, 19 nt, Artificial Sequence
  Description of Artificial Sequence: Synthetic oligonucleotide
uguggcgugcacccgcugc

SEQ ID NO: 1807777 - RNA, 19 nt, Artificial Sequence
  Description of Artificial Sequence: Synthetic oligonucleotide
uucagcgugugcacacaag

SEQ ID NO: 1807778 - RNA, 19 nt, Artificial Sequence
  Description of Artificial Sequence: Synthetic oligonucleotide
aacucucagccucggaaau

SEQ ID NO: 1807779 - RNA, 19 nt, Artificial Sequence
  Description of Artificial Sequence: Synthetic oligonucleotide
guuggcaggcauuuaccug

SEQ ID NO: 1807780 - RNA, 19 nt, Artificial Sequence
  Description of Artificial Sequence: Synthetic oligonucleotide
ugagcgagaccaccucugc

SEQ ID NO: 1807781 - RNA, 19 nt, Artificial Sequence
  Description of Artificial Sequence: Synthetic oligonucleotide
cauccccugcuucaaauac

SEQ ID NO: 1807782 - RNA, 19 nt, Artificial Sequence
  Description of Artificial Sequence: Synthetic oligonucleotide
ugaaucucuugagcgagac

SEQ ID NO: 1807783 - RNA, 19 nt, Artificial Sequence
  Description of Artificial Sequence: Synthetic oligonucleotide
cuuuaacuugagagagagc

SEQ ID NO: 1807784 - RNA, 19 nt, Artificial Sequence
  Description of Artificial Sequence: Synthetic oligonucleotide
gcccacgacacccucaucg

SEQ ID NO: 1807785 - RNA, 19 nt, Artificial Sequence
  Description of Artificial Sequence: Synthetic oligonucleotide
ucgucaccugcacugagaa

SEQ ID NO: 1807786 - RNA, 19 nt, Artificial Sequence
  Description of Artificial Sequence: Synthetic oligonucleotide
ucggacagagagcucugug

SEQ ID NO: 1807787 - RNA, 19 nt, Artificial Sequence
  Description of Artificial Sequence: Synthetic oligonucleotide
agcucuccaacuccaccgg

SEQ ID NO: 1807788 - RNA, 19 nt, Artificial Sequence
  Description of Artificial Sequence: Synthetic oligonucleotide
ucuuauagccacugucuuu

SEQ ID NO: 1807789 - RNA, 19 nt, Artificial Sequence
  Description of Artificial Sequence: Synthetic oligonucleotide
caaacucgcuguccaaagc

SEQ ID NO: 1807790 - RNA, 19 nt, Artificial Sequence
  Description of Artificial Sequence: Synthetic oligonucleotide
uucgucaccugcacugaga

SEQ ID NO: 1807791 - RNA, 19 nt, Artificial Sequence
  Description of Artificial Sequence: Synthetic oligonucleotide
gucaaagugucuuuuggcu

SEQ ID NO: 1807792 - RNA, 19 nt, Artificial Sequence
  Description of Artificial Sequence: Synthetic oligonucleotide
aaagugucuuuuggcuauc

SEQ ID NO: 1807793 - RNA, 19 nt, Artificial Sequence
  Description of Artificial Sequence: Synthetic oligonucleotide
gacacaucggacagagagc

SEQ ID NO: 1807794 - RNA, 19 nt, Artificial Sequence
  Description of Artificial Sequence: Synthetic oligonucleotide
gaggacuugcccacgacac

SEQ ID NO: 1807795 - RNA, 19 nt, Artificial Sequence
  Description of Artificial Sequence: Synthetic oligonucleotide
gauucggcaugguacccac

SEQ ID NO: 1807796 - RNA, 19 nt, Artificial Sequence
  Description of Artificial Sequence: Synthetic oligonucleotide
uacuucagcgugugcacac

SEQ ID NO: 1807797 - RNA, 19 nt, Artificial Sequence
  Description of Artificial Sequence: Synthetic oligonucleotide
gaagggugcacuucuggaa

SEQ ID NO: 1807798 - RNA, 19 nt, Artificial Sequence
  Description of Artificial Sequence: Synthetic oligonucleotide
ucagaggacuugcccacga

SEQ ID NO: 1807799 - RNA, 19 nt, Artificial Sequence
  Description of Artificial Sequence: Synthetic oligonucleotide
ucaucggccucugagguuc

SEQ ID NO: 1807800 - RNA, 19 nt, Artificial Sequence
  Description of Artificial Sequence: Synthetic oligonucleotide
ucuucuccgucagaggacu

SEQ ID NO: 1807801 - RNA, 19 nt, Artificial Sequence
  Description of Artificial Sequence: Synthetic oligonucleotide
ccacaaacgagcuccacag

SEQ ID NO: 1807802 - RNA, 19 nt, Artificial Sequence
  Description of Artificial Sequence: Synthetic oligonucleotide
agcuuguguggcaaggcgg

SEQ ID NO: 1807803 - RNA, 19 nt, Artificial Sequence
  Description of Artificial Sequence: Synthetic oligonucleotide
agugcucugguuugaggga

SEQ ID NO: 1807804 - RNA, 19 nt, Artificial Sequence
  Description of Artificial Sequence: Synthetic oligonucleotide
uguggcaaggcggaagggu

SEQ ID NO: 1807805 - RNA, 19 nt, Artificial Sequence
  Description of Artificial Sequence: Synthetic oligonucleotide
uguucucagggcuccggca

SEQ ID NO: 1807806 - RNA, 19 nt, Artificial Sequence
  Description of Artificial Sequence: Synthetic oligonucleotide
gaaucucuugagcgagacc

SEQ ID NO: 1807807 - RNA, 19 nt, Artificial Sequence
  Description of Artificial Sequence: Synthetic oligonucleotide
ugcacacuacagugaaaug

SEQ ID NO: 1807808 - RNA, 19 nt, Artificial Sequence
  Description of Artificial Sequence: Synthetic oligonucleotide
auacaaacucucagccucg

SEQ ID NO: 1807809 - RNA, 19 nt, Artificial Sequence
  Description of Artificial Sequence: Synthetic oligonucleotide
aucuuauagccacugucuu

SEQ ID NO: 1807810 - RNA, 19 nt, Artificial Sequence
  Description of Artificial Sequence: Synthetic oligonucleotide
aacuuuaacuugagagaga

SEQ ID NO: 1807811 - RNA, 19 nt, Artificial Sequence
  Description of Artificial Sequence: Synthetic oligonucleotide
ucacaucugcaggugagga

SEQ ID NO: 1807812 - RNA, 19 nt, Artificial Sequence
  Description of Artificial Sequence: Synthetic oligonucleotide
ggcuaugaaucucuugagc

SEQ ID NO: 1807813 - RNA, 19 nt, Artificial Sequence
  Description of Artificial Sequence: Synthetic oligonucleotide
accaaacuuuaacuugaga

SEQ ID NO: 1807814 - RNA, 19 nt, Artificial Sequence
  Description of Artificial Sequence: Synthetic oligonucleotide
cagcucggcuuuuaaagug

SEQ ID NO: 1807815 - RNA, 19 nt, Artificial Sequence
  Description of Artificial Sequence: Synthetic oligonucleotide
caaacucucagccucggaa

SEQ ID NO: 1807816 - RNA, 19 nt, Artificial Sequence
  Description of Artificial Sequence: Synthetic oligonucleotide
ugccguggagcuaauuaaa

SEQ ID NO: 1807817 - RNA, 19 nt, Artificial Sequence
  Description of Artificial Sequence: Synthetic oligonucleotide
ugcaugccuucaaacucgc

SEQ ID NO: 1807818 - RNA, 19 nt, Artificial Sequence
  Description of Artificial Sequence: Synthetic oligonucleotide
accgagaugcagcucccag

SEQ ID NO: 1807819 - RNA, 19 nt, Artificial Sequence
  Description of Artificial Sequence: Synthetic oligonucleotide
augcucauccacaaacgag

SEQ ID NO: 1807820 - RNA, 19 nt, Artificial Sequence
  Description of Artificial Sequence: Synthetic oligonucleotide
uacaaacucucagccucgg

SEQ ID NO: 1807821 - RNA, 19 nt, Artificial Sequence
  Description of Artificial Sequence: Synthetic oligonucleotide
cuggggaauggauggggcc

SEQ ID NO: 1807822 - RNA, 19 nt, Artificial Sequence
  Description of Artificial Sequence: Synthetic oligonucleotide
gagguucucggggaguugc

SEQ ID NO: 1807823 - RNA, 19 nt, Artificial Sequence
  Description of Artificial Sequence: Synthetic oligonucleotide
ucucuugagcgagaccacc

SEQ ID NO: 1807824 - RNA, 19 nt, Artificial Sequence
  Description of Artificial Sequence: Synthetic oligonucleotide
cucggcuuuuaaaguggcg

SEQ ID NO: 1807825 - RNA, 19 nt, Artificial Sequence
  Description of Artificial Sequence: Synthetic oligonucleotide
ggcauaggcaccccguucc

SEQ ID NO: 1807826 - RNA, 19 nt, Artificial Sequence
  Description of Artificial Sequence: Synthetic oligonucleotide
uuguguggcaaggcggaag

SEQ ID NO: 1807827 - RNA, 19 nt, Artificial Sequence
  Description of Artificial Sequence: Synthetic oligonucleotide
augccguggagcuaauuaa

SEQ ID NO: 1807828 - RNA, 19 nt, Artificial Sequence
  Description of Artificial Sequence: Synthetic oligonucleotide
gacaccguugugcacacua

SEQ ID NO: 1807829 - RNA, 19 nt, Artificial Sequence
  Description of Artificial Sequence: Synthetic oligonucleotide
cagggaacuuguucucagg

SEQ ID NO: 1807830 - RNA, 19 nt, Artificial Sequence
  Description of Artificial Sequence: Synthetic oligonucleotide
aguucuuuguggugccagu

SEQ ID NO: 1807831 - RNA, 19 nt, Artificial Sequence
  Description of Artificial Sequence: Synthetic oligonucleotide
accaucguggguucaugcu

SEQ ID NO: 1807832 - RNA, 19 nt, Artificial Sequence
  Description of Artificial Sequence: Synthetic oligonucleotide
ggaaaucuuauagccacug

SEQ ID NO: 1807833 - RNA, 19 nt, Artificial Sequence
  Description of Artificial Sequence: Synthetic oligonucleotide
cucggaaaucuuauagcca

SEQ ID NO: 1807834 - RNA, 19 nt, Artificial Sequence
  Description of Artificial Sequence: Synthetic oligonucleotide
ugcuguucaucuucuccgu

SEQ ID NO: 1807835 - RNA, 19 nt, Artificial Sequence
  Description of Artificial Sequence: Synthetic oligonucleotide
acaccagacagacaccguu

SEQ ID NO: 1807836 - RNA, 19 nt, Artificial Sequence
  Description of Artificial Sequence: Synthetic oligonucleotide
agggaggaaugaaccauac

SEQ ID NO: 1807837 - RNA, 19 nt, Artificial Sequence
  Description of Artificial Sequence: Synthetic oligonucleotide
uggaugucugguaguccug

SEQ ID NO: 1807838 - RNA, 19 nt, Artificial Sequence
  Description of Artificial Sequence: Synthetic oligonucleotide
accguugugcacacuacag

SEQ ID NO: 1807839 - RNA, 19 nt, Artificial Sequence
  Description of Artificial Sequence: Synthetic oligonucleotide
uaccuggagucugaggcug

SEQ ID NO: 1807840 - RNA, 19 nt, Artificial Sequence
  Description of Artificial Sequence: Synthetic oligonucleotide
uccuguuuugaagcuacuc

SEQ ID NO: 1807841 - RNA, 19 nt, Artificial Sequence
  Description of Artificial Sequence: Synthetic oligonucleotide
caugcucauccacaaacga

SEQ ID NO: 1807842 - RNA, 19 nt, Artificial Sequence
  Description of Artificial Sequence: Synthetic oligonucleotide
cagcucccagcuaccaucg

SEQ ID NO: 1807843 - RNA, 19 nt, Artificial Sequence
  Description of Artificial Sequence: Synthetic oligonucleotide
cuugaauguucgucaccug

SEQ ID NO: 1807844 - RNA, 19 nt, Artificial Sequence
  Description of Artificial Sequence: Synthetic oligonucleotide
ugagauggguuguguggcu

SEQ ID NO: 1807845 - RNA, 19 nt, Artificial Sequence
  Description of Artificial Sequence: Synthetic oligonucleotide
uccuccacgcacagcucag

SEQ ID NO: 1807846 - RNA, 19 nt, Artificial Sequence
  Description of Artificial Sequence: Synthetic oligonucleotide
cugguuugagggaccaauc

SEQ ID NO: 1807847 - RNA, 19 nt, Artificial Sequence
  Description of Artificial Sequence: Synthetic oligonucleotide
cuuggaugucugguagucc

SEQ ID NO: 1807848 - RNA, 19 nt, Artificial Sequence
  Description of Artificial Sequence: Synthetic oligonucleotide
cuuguucucagggcuccgg

SEQ ID NO: 1807849 - RNA, 19 nt, Artificial Sequence
  Description of Artificial Sequence: Synthetic oligonucleotide
agguccaguggagauucgg

SEQ ID NO: 1807850 - RNA, 19 nt, Artificial Sequence
  Description of Artificial Sequence: Synthetic oligonucleotide
gcacacuacagugaaauga

SEQ ID NO: 1807851 - RNA, 19 nt, Artificial Sequence
  Description of Artificial Sequence: Synthetic oligonucleotide
gaacugcccauguagcucu

SEQ ID NO: 1807852 - RNA, 19 nt, Artificial Sequence
  Description of Artificial Sequence: Synthetic oligonucleotide
accaaucuugaauguucgu

SEQ ID NO: 1807853 - RNA, 19 nt, Artificial Sequence
  Description of Artificial Sequence: Synthetic oligonucleotide
cuugauucggagcuugugu

SEQ ID NO: 1807854 - RNA, 19 nt, Artificial Sequence
  Description of Artificial Sequence: Synthetic oligonucleotide
gggaacuuguucucagggc

SEQ ID NO: 1807855 - RNA, 19 nt, Artificial Sequence
  Description of Artificial Sequence: Synthetic oligonucleotide
caucguggguucaugcuca

SEQ ID NO: 1807856 - RNA, 19 nt, Artificial Sequence
  Description of Artificial Sequence: Synthetic oligonucleotide
gaaaucuuauagccacugu

SEQ ID NO: 1807857 - RNA, 19 nt, Artificial Sequence
  Description of Artificial Sequence: Synthetic oligonucleotide
acgagcuccacaguagccu

SEQ ID NO: 1807858 - RNA, 19 nt, Artificial Sequence
  Description of Artificial Sequence: Synthetic oligonucleotide
gccucggaaaucuuauagc

SEQ ID NO: 1807859 - RNA, 19 nt, Artificial Sequence
  Description of Artificial Sequence: Synthetic oligonucleotide
ggaacuuguucucagggcu

SEQ ID NO: 1807860 - RNA, 19 nt, Artificial Sequence
  Description of Artificial Sequence: Synthetic oligonucleotide
ucggccucugagguucucg

SEQ ID NO: 1807861 - RNA, 19 nt, Artificial Sequence
  Description of Artificial Sequence: Synthetic oligonucleotide
agggaccaaucuugaaugu

SEQ ID NO: 1807862 - RNA, 19 nt, Artificial Sequence
  Description of Artificial Sequence: Synthetic oligonucleotide
cacagaggacaccucggac

SEQ ID NO: 1807863 - RNA, 19 nt, Artificial Sequence
  Description of Artificial Sequence: Synthetic oligonucleotide
agguggcauaggcaccccg

SEQ ID NO: 1807864 - RNA, 19 nt, Artificial Sequence
  Description of Artificial Sequence: Synthetic oligonucleotide
gccguucaguucuuugugg

SEQ ID NO: 1807865 - RNA, 19 nt, Artificial Sequence
  Description of Artificial Sequence: Synthetic oligonucleotide
uguucgucaccugcacuga

SEQ ID NO: 1807866 - RNA, 19 nt, Artificial Sequence
  Description of Artificial Sequence: Synthetic oligonucleotide
ccguggagcuaauuaaacc

SEQ ID NO: 1807867 - RNA, 19 nt, Artificial Sequence
  Description of Artificial Sequence: Synthetic oligonucleotide
uggcauaggcaccccguuc

SEQ ID NO: 1807868 - RNA, 19 nt, Artificial Sequence
  Description of Artificial Sequence: Synthetic oligonucleotide
cugagaaaggagugaggga

SEQ ID NO: 1807869 - RNA, 19 nt, Artificial Sequence
  Description of Artificial Sequence: Synthetic oligonucleotide
cguggagcuaauuaaacca

SEQ ID NO: 1807870 - RNA, 19 nt, Artificial Sequence
  Description of Artificial Sequence: Synthetic oligonucleotide
gcugguggagccauggacc

SEQ ID NO: 1807871 - RNA, 19 nt, Artificial Sequence
  Description of Artificial Sequence: Synthetic oligonucleotide
gaugcagcucccagcuacc

SEQ ID NO: 1807872 - RNA, 19 nt, Artificial Sequence
  Description of Artificial Sequence: Synthetic oligonucleotide
gagaguguuugaugaccga

SEQ ID NO: 1807873 - RNA, 19 nt, Artificial Sequence
  Description of Artificial Sequence: Synthetic oligonucleotide
cacuacagugaaaugacau

SEQ ID NO: 1807874 - RNA, 19 nt, Artificial Sequence
  Description of Artificial Sequence: Synthetic oligonucleotide
caguucuuuguggugccag

SEQ ID NO: 1807875 - RNA, 19 nt, Artificial Sequence
  Description of Artificial Sequence: Synthetic oligonucleotide
acaccguugugcacacuac

SEQ ID NO: 1807876 - RNA, 19 nt, Artificial Sequence
  Description of Artificial Sequence: Synthetic oligonucleotide
aaggcggaagggugcacuu

SEQ ID NO: 1807877 - RNA, 19 nt, Artificial Sequence
  Description of Artificial Sequence: Synthetic oligonucleotide
ggaccaaucuugaauguuc

SEQ ID NO: 1807878 - RNA, 19 nt, Artificial Sequence
  Description of Artificial Sequence: Synthetic oligonucleotide
guucgucaccugcacugag

SEQ ID NO: 1807879 - RNA, 19 nt, Artificial Sequence
  Description of Artificial Sequence: Synthetic oligonucleotide
aucucuugagcgagaccac

SEQ ID NO: 1807880 - RNA, 19 nt, Artificial Sequence
  Description of Artificial Sequence: Synthetic oligonucleotide
agauggguuguguggcuau

SEQ ID NO: 1807881 - RNA, 19 nt, Artificial Sequence
  Description of Artificial Sequence: Synthetic oligonucleotide
uugagggaccaaucuugaa

SEQ ID NO: 1807882 - RNA, 19 nt, Artificial Sequence
  Description of Artificial Sequence: Synthetic oligonucleotide
ugaggcugagauggguugu

SEQ ID NO: 1807883 - RNA, 19 nt, Artificial Sequence
  Description of Artificial Sequence: Synthetic oligonucleotide
uccggcagccucccugagc

SEQ ID NO: 1807884 - RNA, 19 nt, Artificial Sequence
  Description of Artificial Sequence: Synthetic oligonucleotide
gagauucggcaugguaccc

SEQ ID NO: 1807885 - RNA, 19 nt, Artificial Sequence
  Description of Artificial Sequence: Synthetic oligonucleotide
gguggagccauggaccugc

SEQ ID NO: 1807886 - RNA, 19 nt, Artificial Sequence
  Description of Artificial Sequence: Synthetic oligonucleotide
aaccauaccuggggugcug

SEQ ID NO: 1807887 - RNA, 19 nt, Artificial Sequence
  Description of Artificial Sequence: Synthetic oligonucleotide
agauucggcaugguaccca

SEQ ID NO: 1807888 - RNA, 19 nt, Artificial Sequence
  Description of Artificial Sequence: Synthetic oligonucleotide
agcuguggaauuacugagu

SEQ ID NO: 1807889 - RNA, 19 nt, Artificial Sequence
  Description of Artificial Sequence: Synthetic oligonucleotide
uugaagcuacucugaguuu

SEQ ID NO: 1807890 - RNA, 19 nt, Artificial Sequence
  Description of Artificial Sequence: Synthetic oligonucleotide
caaagugucuuuuggcuau

SEQ ID NO: 1807891 - RNA, 19 nt, Artificial Sequence
  Description of Artificial Sequence: Synthetic oligonucleotide
gggagugggaguagguggg

SEQ ID NO: 1807892 - RNA, 19 nt, Artificial Sequence
  Description of Artificial Sequence: Synthetic oligonucleotide
guuguguggcuaugaaucu

SEQ ID NO: 1807893 - RNA, 19 nt, Artificial Sequence
  Description of Artificial Sequence: Synthetic oligonucleotide
caaguacuucagcgugugc

SEQ ID NO: 1807894 - RNA, 19 nt, Artificial Sequence
  Description of Artificial Sequence: Synthetic oligonucleotide
ucggagcuuguguggcaag

SEQ ID NO: 1807895 - RNA, 19 nt, Artificial Sequence
  Description of Artificial Sequence: Synthetic oligonucleotide
gugagggcgaucaaguacu

SEQ ID NO: 1807896 - RNA, 19 nt, Artificial Sequence
  Description of Artificial Sequence: Synthetic oligonucleotide
cuacucugaguuuugccgu

SEQ ID NO: 1807897 - RNA, 19 nt, Artificial Sequence
  Description of Artificial Sequence: Synthetic oligonucleotide
guggagcuaauuaaaccaa

SEQ ID NO: 1807898 - RNA, 19 nt, Artificial Sequence
  Description of Artificial Sequence: Synthetic oligonucleotide
cauguagcucugguagaug

SEQ ID NO: 1807899 - RNA, 19 nt, Artificial Sequence
  Description of Artificial Sequence: Synthetic oligonucleotide
aggcauuuaccuggagucu

SEQ ID NO: 1807900 - RNA, 19 nt, Artificial Sequence
  Description of Artificial Sequence: Synthetic oligonucleotide
cuuugacuuccagcacucc

SEQ ID NO: 1807901 - RNA, 19 nt, Artificial Sequence
  Description of Artificial Sequence: Synthetic oligonucleotide
uggcaggcauuuaccugga

SEQ ID NO: 1807902 - RNA, 19 nt, Artificial Sequence
  Description of Artificial Sequence: Synthetic oligonucleotide
gggaggaaugaaccauacc

SEQ ID NO: 1807903 - RNA, 19 nt, Artificial Sequence
  Description of Artificial Sequence: Synthetic oligonucleotide
caucggacagagagcucug

SEQ ID NO: 1807904 - RNA, 19 nt, Artificial Sequence
  Description of Artificial Sequence: Synthetic oligonucleotide
ggcugagauggguugugug

SEQ ID NO: 1807905 - RNA, 19 nt, Artificial Sequence
  Description of Artificial Sequence: Synthetic oligonucleotide
ucggacucccuggcaaagc

SEQ ID NO: 1807906 - RNA, 19 nt, Artificial Sequence
  Description of Artificial Sequence: Synthetic oligonucleotide
ggcagagugagggcgauca

SEQ ID NO: 1807907 - RNA, 19 nt, Artificial Sequence
  Description of Artificial Sequence: Synthetic oligonucleotide
cccucaucggccucugagg

SEQ ID NO: 1807908 - RNA, 19 nt, Artificial Sequence
  Description of Artificial Sequence: Synthetic oligonucleotide
acuuguucucagggcuccg

SEQ ID NO: 1807909 - RNA, 19 nt, Artificial Sequence
  Description of Artificial Sequence: Synthetic oligonucleotide
gagaguuucugcaugccuu

SEQ ID NO: 1807910 - RNA, 19 nt, Artificial Sequence
  Description of Artificial Sequence: Synthetic oligonucleotide
gugcacacuacagugaaau

SEQ ID NO: 1807911 - RNA, 19 nt, Artificial Sequence
  Description of Artificial Sequence: Synthetic oligonucleotide
acacuacagugaaaugaca

SEQ ID NO: 1807912 - RNA, 19 nt, Artificial Sequence
  Description of Artificial Sequence: Synthetic oligonucleotide
cuccgucagaggacuugcc

SEQ ID NO: 1807913 - RNA, 19 nt, Artificial Sequence
  Description of Artificial Sequence: Synthetic oligonucleotide
auggguuguguggcuauga

SEQ ID NO: 1807914 - RNA, 19 nt, Artificial Sequence
  Description of Artificial Sequence: Synthetic oligonucleotide
aaaugacaucagaggucca

SEQ ID NO: 1807915 - RNA, 19 nt, Artificial Sequence
  Description of Artificial Sequence: Synthetic oligonucleotide
cagacaccguugugcacac

SEQ ID NO: 1807916 - RNA, 19 nt, Artificial Sequence
  Description of Artificial Sequence: Synthetic oligonucleotide
caccucggacacaucggac

SEQ ID NO: 1807917 - RNA, 19 nt, Artificial Sequence
  Description of Artificial Sequence: Synthetic oligonucleotide
gguccaguggagauucggc

SEQ ID NO: 1807918 - RNA, 19 nt, Artificial Sequence
  Description of Artificial Sequence: Synthetic oligonucleotide
gcucccagcuaccaucgug

SEQ ID NO: 1807919 - RNA, 19 nt, Artificial Sequence
  Description of Artificial Sequence: Synthetic oligonucleotide
uugggcaccugcuguucau

SEQ ID NO: 1807920 - RNA, 19 nt, Artificial Sequence
  Description of Artificial Sequence: Synthetic oligonucleotide
cucagccucggaaaucuua

SEQ ID NO: 1807921 - RNA, 19 nt, Artificial Sequence
  Description of Artificial Sequence: Synthetic oligonucleotide
gagggaggaaugaaccaua

SEQ ID NO: 1807922 - RNA, 19 nt, Artificial Sequence
  Description of Artificial Sequence: Synthetic oligonucleotide
caccguugugcacacuaca

SEQ ID NO: 1807923 - RNA, 19 nt, Artificial Sequence
  Description of Artificial Sequence: Synthetic oligonucleotide
gagugagggcgaucaagua

SEQ ID NO: 1807924 - RNA, 19 nt, Artificial Sequence
  Description of Artificial Sequence: Synthetic oligonucleotide
cagaggacuugcccacgac

SEQ ID NO: 1807925 - RNA, 19 nt, Artificial Sequence
  Description of Artificial Sequence: Synthetic oligonucleotide
ccgagaugcagcucccagc

SEQ ID NO: 1807926 - RNA, 19 nt, Artificial Sequence
  Description of Artificial Sequence: Synthetic oligonucleotide
auccccugcuucaaauaca

SEQ ID NO: 1807927 - RNA, 19 nt, Artificial Sequence
  Description of Artificial Sequence: Synthetic oligonucleotide
cuaccaucguggguucaug

SEQ ID NO: 1807928 - RNA, 19 nt, Artificial Sequence
  Description of Artificial Sequence: Synthetic oligonucleotide
ucucggggaguugcuggug

SEQ ID NO: 1807929 - RNA, 19 nt, Artificial Sequence
  Description of Artificial Sequence: Synthetic oligonucleotide
gguaguccugaaaguacac

SEQ ID NO: 1807930 - RNA, 19 nt, Artificial Sequence
  Description of Artificial Sequence: Synthetic oligonucleotide
ccaucguggguucaugcuc

SEQ ID NO: 1807931 - RNA, 19 nt, Artificial Sequence
  Description of Artificial Sequence: Synthetic oligonucleotide
cucggacucccuggcaaag

SEQ ID NO: 1807932 - RNA, 19 nt, Artificial Sequence
  Description of Artificial Sequence: Synthetic oligonucleotide
acuucagcgugugcacaca

SEQ ID NO: 1807933 - RNA, 19 nt, Artificial Sequence
  Description of Artificial Sequence: Synthetic oligonucleotide
ccuguuuugaagcuacucu

SEQ ID NO: 1807934 - RNA, 19 nt, Artificial Sequence
  Description of Artificial Sequence: Synthetic oligonucleotide
aggcggaagggugcacuuc

SEQ ID NO: 1807935 - RNA, 19 nt, Artificial Sequence
  Description of Artificial Sequence: Synthetic oligonucleotide
cauggaccugcaggagggg

SEQ ID NO: 1807936 - RNA, 19 nt, Artificial Sequence
  Description of Artificial Sequence: Synthetic oligonucleotide
ugagggcgaucaaguacuu

SEQ ID NO: 1807937 - RNA, 19 nt, Artificial Sequence
  Description of Artificial Sequence: Synthetic oligonucleotide
acgcacagcucaguuggca

SEQ ID NO: 1807938 - RNA, 19 nt, Artificial Sequence
  Description of Artificial Sequence: Synthetic oligonucleotide
gaugaccgagaugcagcuc

SEQ ID NO: 1807939 - RNA, 19 nt, Artificial Sequence
  Description of Artificial Sequence: Synthetic oligonucleotide
guacuucagcgugugcaca

SEQ ID NO: 1807940 - RNA, 19 nt, Artificial Sequence
  Description of Artificial Sequence: Synthetic oligonucleotide
cucuugagcgagaccaccu

SEQ ID NO: 1807941 - RNA, 19 nt, Artificial Sequence
  Description of Artificial Sequence: Synthetic oligonucleotide
guguggcaaggcggaaggg

SEQ ID NO: 1807942 - RNA, 19 nt, Artificial Sequence
  Description of Artificial Sequence: Synthetic oligonucleotide
ccugcacugagaaaggagu

SEQ ID NO: 1807943 - RNA, 19 nt, Artificial Sequence
  Description of Artificial Sequence: Synthetic oligonucleotide
accauaccuggggugcugu

SEQ ID NO: 1807944 - RNA, 19 nt, Artificial Sequence
  Description of Artificial Sequence: Synthetic oligonucleotide
ggccuuggccuugauucgg

SEQ ID NO: 1807945 - RNA, 19 nt, Artificial Sequence
  Description of Artificial Sequence: Synthetic oligonucleotide
acuauacaccaggcagagu

SEQ ID NO: 1807946 - RNA, 19 nt, Artificial Sequence
  Description of Artificial Sequence: Synthetic oligonucleotide
gaaaggagugagggaggaa

SEQ ID NO: 1807947 - RNA, 19 nt, Artificial Sequence
  Description of Artificial Sequence: Synthetic oligonucleotide
cacagggaacuuguucuca

SEQ ID NO: 1807948 - RNA, 19 nt, Artificial Sequence
  Description of Artificial Sequence: Synthetic oligonucleotide
gggcgaucaaguacuucag

SEQ ID NO: 1807949 - RNA, 19 nt, Artificial Sequence
  Description of Artificial Sequence: Synthetic oligonucleotide
gugaggagaguuucugcau

SEQ ID NO: 1807950 - RNA, 19 nt, Artificial Sequence
  Description of Artificial Sequence: Synthetic oligonucleotide
gagguccaguggagauucg

SEQ ID NO: 1807951 - RNA, 19 nt, Artificial Sequence
  Description of Artificial Sequence: Synthetic oligonucleotide
ggagaguuucugcaugccu

SEQ ID NO: 1807952 - RNA, 19 nt, Artificial Sequence
  Description of Artificial Sequence: Synthetic oligonucleotide
ugcacccgcugcaguucca

SEQ ID NO: 1807953 - RNA, 19 nt, Artificial Sequence
  Description of Artificial Sequence: Synthetic oligonucleotide
gagauggguuguguggcua

SEQ ID NO: 1807954 - RNA, 19 nt, Artificial Sequence
  Description of Artificial Sequence: Synthetic oligonucleotide
cacaucggacagagagcuc

SEQ ID NO: 1807955 - RNA, 19 nt, Artificial Sequence
  Description of Artificial Sequence: Synthetic oligonucleotide
gcgugugcacacaaggaca

SEQ ID NO: 1807956 - RNA, 19 nt, Artificial Sequence
  Description of Artificial Sequence: Synthetic oligonucleotide
gccguggagcuaauuaaac

SEQ ID NO: 1807957 - RNA, 19 nt, Artificial Sequence
  Description of Artificial Sequence: Synthetic oligonucleotide
ccuuggaugucugguaguc

SEQ ID NO: 1807958 - RNA, 19 nt, Artificial Sequence
  Description of Artificial Sequence: Synthetic oligonucleotide
gcuuguguggcaaggcgga

SEQ ID NO: 1807959 - RNA, 19 nt, Artificial Sequence
  Description of Artificial Sequence: Synthetic oligonucleotide
guacccacagcacccuccu

SEQ ID NO: 1807960 - RNA, 19 nt, Artificial Sequence
  Description of Artificial Sequence: Synthetic oligonucleotide
ugggcaccugcuguucauc

SEQ ID NO: 1807961 - RNA, 19 nt, Artificial Sequence
  Description of Artificial Sequence: Synthetic oligonucleotide
ccgucagaggacuugccca

SEQ ID NO: 1807962 - RNA, 19 nt, Artificial Sequence
  Description of Artificial Sequence: Synthetic oligonucleotide
gcuguggaauuacugaguu

SEQ ID NO: 1807963 - RNA, 19 nt, Artificial Sequence
  Description of Artificial Sequence: Synthetic oligonucleotide
gaccaccucugcagacaag

SEQ ID NO: 1807964 - RNA, 19 nt, Artificial Sequence
  Description of Artificial Sequence: Synthetic oligonucleotide
ggccuugauucggagcuug

SEQ ID NO: 1807965 - RNA, 19 nt, Artificial Sequence
  Description of Artificial Sequence: Synthetic oligonucleotide
cguucaguucuuuguggug

SEQ ID NO: 1807966 - RNA, 19 nt, Artificial Sequence
  Description of Artificial Sequence: Synthetic oligonucleotide
uuuugccguucaguucuuu

SEQ ID NO: 1807967 - RNA, 19 nt, Artificial Sequence
  Description of Artificial Sequence: Synthetic oligonucleotide
caaggacaccagacagaca

SEQ ID NO: 1807968 - RNA, 19 nt, Artificial Sequence
  Description of Artificial Sequence: Synthetic oligonucleotide
cggaagggugcacuucugg

SEQ ID NO: 1807969 - RNA, 19 nt, Artificial Sequence
  Description of Artificial Sequence: Synthetic oligonucleotide
aucguggguucaugcucau

SEQ ID NO: 1807970 - RNA, 19 nt, Artificial Sequence
  Description of Artificial Sequence: Synthetic oligonucleotide
gcucggcuuuuaaaguggc

SEQ ID NO: 1807971 - RNA, 19 nt, Artificial Sequence
  Description of Artificial Sequence: Synthetic oligonucleotide
ccuugauucggagcuugug

SEQ ID NO: 1807972 - RNA, 19 nt, Artificial Sequence
  Description of Artificial Sequence: Synthetic oligonucleotide
ggaaggaacugcccaugua

SEQ ID NO: 1807973 - RNA, 19 nt, Artificial Sequence
  Description of Artificial Sequence: Synthetic oligonucleotide
gcagcucggcuuuuaaagu

SEQ ID NO: 1807974 - RNA, 19 nt, Artificial Sequence
  Description of Artificial Sequence: Synthetic oligonucleotide
agcucaguuggcaggcauu

SEQ ID NO: 1807975 - RNA, 19 nt, Artificial Sequence
  Description of Artificial Sequence: Synthetic oligonucleotide
acagcucaguuggcaggca

SEQ ID NO: 1807976 - RNA, 19 nt, Artificial Sequence
  Description of Artificial Sequence: Synthetic oligonucleotide
guggaauuacugaguuucu

SEQ ID NO: 1807977 - RNA, 19 nt, Artificial Sequence
  Description of Artificial Sequence: Synthetic oligonucleotide
ggcggaagggugcacuucu

SEQ ID NO: 1807978 - RNA, 19 nt, Artificial Sequence
  Description of Artificial Sequence: Synthetic oligonucleotide
caccucugcagacaaguuu

SEQ ID NO: 1807979 - RNA, 19 nt, Artificial Sequence
  Description of Artificial Sequence: Synthetic oligonucleotide
gagaugcagcucccagcua

SEQ ID NO: 1807980 - RNA, 19 nt, Artificial Sequence
  Description of Artificial Sequence: Synthetic oligonucleotide
ucguggguucaugcucauc

SEQ ID NO: 1807981 - RNA, 19 nt, Artificial Sequence
  Description of Artificial Sequence: Synthetic oligonucleotide
ggaauggauggggcccuug

SEQ ID NO: 1807982 - RNA, 19 nt, Artificial Sequence
  Description of Artificial Sequence: Synthetic oligonucleotide
gaccgagaugcagcuccca

SEQ ID NO: 1807983 - RNA, 19 nt, Artificial Sequence
  Description of Artificial Sequence: Synthetic oligonucleotide
gaaccauaccuggggugcu

SEQ ID NO: 1807984 - RNA, 19 nt, Artificial Sequence
  Description of Artificial Sequence: Synthetic oligonucleotide
caccugcacugagaaagga

SEQ ID NO: 1807985 - RNA, 19 nt, Artificial Sequence
  Description of Artificial Sequence: Synthetic oligonucleotide
agguucucggggaguugcu

SEQ ID NO: 1807986 - RNA, 19 nt, Artificial Sequence
  Description of Artificial Sequence: Synthetic oligonucleotide
guuccacuggggaauggau

SEQ ID NO: 1807987 - RNA, 19 nt, Artificial Sequence
  Description of Artificial Sequence: Synthetic oligonucleotide
auaugccguggagcuaauu

SEQ ID NO: 1807988 - RNA, 19 nt, Artificial Sequence
  Description of Artificial Sequence: Synthetic oligonucleotide
agcuaccaucguggguuca

SEQ ID NO: 1807989 - RNA, 19 nt, Artificial Sequence
  Description of Artificial Sequence: Synthetic oligonucleotide
ggguuguguggcuaugaau

SEQ ID NO: 1807990 - RNA, 19 nt, Artificial Sequence
  Description of Artificial Sequence: Synthetic oligonucleotide
auucggcaugguacccaca

SEQ ID NO: 1807991 - RNA, 19 nt, Artificial Sequence
  Description of Artificial Sequence: Synthetic oligonucleotide
aggacaccucggacacauc

SEQ ID NO: 1807992 - RNA, 19 nt, Artificial Sequence
  Description of Artificial Sequence: Synthetic oligonucleotide
ccagcuaccaucguggguu

SEQ ID NO: 1807993 - RNA, 19 nt, Artificial Sequence
  Description of Artificial Sequence: Synthetic oligonucleotide
ccacagaggacaccucgga

SEQ ID NO: 1807994 - RNA, 19 nt, Artificial Sequence
  Description of Artificial Sequence: Synthetic oligonucleotide
caaggcggaagggugcacu

SEQ ID NO: 1807995 - RNA, 19 nt, Artificial Sequence
  Description of Artificial Sequence: Synthetic oligonucleotide
cacaaacgagcuccacagu

SEQ ID NO: 1807996 - RNA, 19 nt, Artificial Sequence
  Description of Artificial Sequence: Synthetic oligonucleotide
cgaucaaguacuucagcgu

SEQ ID NO: 1807997 - RNA, 19 nt, Artificial Sequence
  Description of Artificial Sequence: Synthetic oligonucleotide
cuguggcgugcacccgcug

SEQ ID NO: 1807998 - RNA, 19 nt, Artificial Sequence
  Description of Artificial Sequence: Synthetic oligonucleotide
ggcaaggcggaagggugca

SEQ ID NO: 1807999 - RNA, 19 nt, Artificial Sequence
  Description of Artificial Sequence: Synthetic oligonucleotide
cuguggaauuacugaguuu

SEQ ID NO: 1808000 - RNA, 19 nt, Artificial Sequence
  Description of Artificial Sequence: Synthetic oligonucleotide
cgagaccaccucugcagac

SEQ ID NO: 1808001 - RNA, 19 nt, Artificial Sequence
  Description of Artificial Sequence: Synthetic oligonucleotide
cagccucggaaaucuuaua

SEQ ID NO: 1808002 - RNA, 19 nt, Artificial Sequence
  Description of Artificial Sequence: Synthetic oligonucleotide
uggccuugauucggagcuu

SEQ ID NO: 1808003 - RNA, 19 nt, Artificial Sequence
  Description of Artificial Sequence: Synthetic oligonucleotide
cuuguguggcaaggcggaa

SEQ ID NO: 1808004 - RNA, 19 nt, Artificial Sequence
  Description of Artificial Sequence: Synthetic oligonucleotide
guggcauaggcaccccguu

SEQ ID NO: 1808005 - RNA, 19 nt, Artificial Sequence
  Description of Artificial Sequence: Synthetic oligonucleotide
gcucugguuugagggacca

SEQ ID NO: 1808006 - RNA, 19 nt, Artificial Sequence
  Description of Artificial Sequence: Synthetic oligonucleotide
cagccucccugagcagggc

SEQ ID NO: 1808007 - RNA, 19 nt, Artificial Sequence
  Description of Artificial Sequence: Synthetic oligonucleotide
ccguuccucccucggacuc

SEQ ID NO: 1808008 - RNA, 19 nt, Artificial Sequence
  Description of Artificial Sequence: Synthetic oligonucleotide
gggcaccugcuguucaucu

SEQ ID NO: 1808009 - RNA, 19 nt, Artificial Sequence
  Description of Artificial Sequence: Synthetic oligonucleotide
cuccuguuuugaagcuacu

SEQ ID NO: 1808010 - RNA, 19 nt, Artificial Sequence
  Description of Artificial Sequence: Synthetic oligonucleotide
ccucaucggccucugaggu

SEQ ID NO: 1808011 - RNA, 19 nt, Artificial Sequence
  Description of Artificial Sequence: Synthetic oligonucleotide
agacaccguugugcacacu

SEQ ID NO: 1808012 - RNA, 19 nt, Artificial Sequence
  Description of Artificial Sequence: Synthetic oligonucleotide
gcacccgcugcaguuccac

SEQ ID NO: 1808013 - RNA, 19 nt, Artificial Sequence
  Description of Artificial Sequence: Synthetic oligonucleotide
cuccacgcacagcucaguu

SEQ ID NO: 1808014 - RNA, 19 nt, Artificial Sequence
  Description of Artificial Sequence: Synthetic oligonucleotide
ccauccccugcuucaaaua

SEQ ID NO: 1808015 - RNA, 19 nt, Artificial Sequence
  Description of Artificial Sequence: Synthetic oligonucleotide
gggaccaaucuugaauguu

SEQ ID NO: 1808016 - RNA, 19 nt, Artificial Sequence
  Description of Artificial Sequence: Synthetic oligonucleotide
cucaucggccucugagguu

SEQ ID NO: 1808017 - RNA, 19 nt, Artificial Sequence
  Description of Artificial Sequence: Synthetic oligonucleotide
gcagagugagggcgaucaa

SEQ ID NO: 1808018 - RNA, 19 nt, Artificial Sequence
  Description of Artificial Sequence: Synthetic oligonucleotide
gcucaguuggcaggcauuu

SEQ ID NO: 1808019 - RNA, 19 nt, Artificial Sequence
  Description of Artificial Sequence: Synthetic oligonucleotide
ccacuguggcgugcacccg

SEQ ID NO: 1808020 - RNA, 19 nt, Artificial Sequence
  Description of Artificial Sequence: Synthetic oligonucleotide
gggugcacuucuggaaccu

SEQ ID NO: 1808021 - RNA, 19 nt, Artificial Sequence
  Description of Artificial Sequence: Synthetic oligonucleotide
cauaugccguggagcuaau

SEQ ID NO: 1808022 - RNA, 19 nt, Artificial Sequence
  Description of Artificial Sequence: Synthetic oligonucleotide
gcaaggcggaagggugcac

SEQ ID NO: 1808023 - RNA, 19 nt, Artificial Sequence
  Description of Artificial Sequence: Synthetic oligonucleotide
cgugcacccgcugcaguuc

SEQ ID NO: 1808024 - RNA, 19 nt, Artificial Sequence
  Description of Artificial Sequence: Synthetic oligonucleotide
cuucuccgucagaggacuu

SEQ ID NO: 1808025 - RNA, 19 nt, Artificial Sequence
  Description of Artificial Sequence: Synthetic oligonucleotide
guguggcuaugaaucucuu

SEQ ID NO: 1808026 - RNA, 19 nt, Artificial Sequence
  Description of Artificial Sequence: Synthetic oligonucleotide
caucggccucugagguucu

SEQ ID NO: 1808027 - RNA, 19 nt, Artificial Sequence
  Description of Artificial Sequence: Synthetic oligonucleotide
guuuugccguucaguucuu

SEQ ID NO: 1808028 - RNA, 19 nt, Artificial Sequence
  Description of Artificial Sequence: Synthetic oligonucleotide
cggaaaucuuauagccacu

SEQ ID NO: 1808029 - RNA, 19 nt, Artificial Sequence
  Description of Artificial Sequence: Synthetic oligonucleotide
cccugagcagggcuuuccu

SEQ ID NO: 1808030 - RNA, 19 nt, Artificial Sequence
  Description of Artificial Sequence: Synthetic oligonucleotide
ggugcacuucuggaaccuu

SEQ ID NO: 1808031 - RNA, 19 nt, Artificial Sequence
  Description of Artificial Sequence: Synthetic oligonucleotide
gccuugauucggagcuugu

SEQ ID NO: 1808032 - RNA, 19 nt, Artificial Sequence
  Description of Artificial Sequence: Synthetic oligonucleotide
cccguuccucccucggacu

SEQ ID NO: 1808033 - RNA, 19 nt, Artificial Sequence
  Description of Artificial Sequence: Synthetic oligonucleotide
gcaugccuucaaacucgcu

SEQ ID NO: 1808034 - RNA, 19 nt, Artificial Sequence
  Description of Artificial Sequence: Synthetic oligonucleotide
cgacacccucaucggccuc

SEQ ID NO: 1808035 - RNA, 19 nt, Artificial Sequence
  Description of Artificial Sequence: Synthetic oligonucleotide
cggacacaucggacagaga

SEQ ID NO: 1808036 - RNA, 19 nt, Artificial Sequence
  Description of Artificial Sequence: Synthetic oligonucleotide
ccuccacgcacagcucagu

SEQ ID NO: 1808037 - RNA, 19 nt, Artificial Sequence
  Description of Artificial Sequence: Synthetic oligonucleotide
aauacgagcaaccucuugc

SEQ ID NO: 1808038 - RNA, 19 nt, Artificial Sequence
  Description of Artificial Sequence: Synthetic oligonucleotide
agaaacaucgagcagugug

SEQ ID NO: 1808039 - RNA, 19 nt, Artificial Sequence
  Description of Artificial Sequence: Synthetic oligonucleotide
uucuucgcuaaccacagcc

SEQ ID NO: 1808040 - RNA, 19 nt, Artificial Sequence
  Description of Artificial Sequence: Synthetic oligonucleotide
uucagcaagaggcaccgcg

SEQ ID NO: 1808041 - RNA, 19 nt, Artificial Sequence
  Description of Artificial Sequence: Synthetic oligonucleotide
guugauaggacccucgccc

SEQ ID NO: 1808042 - RNA, 19 nt, Artificial Sequence
  Description of Artificial Sequence: Synthetic oligonucleotide
aaggcgauuucguucuucg

SEQ ID NO: 1808043 - RNA, 19 nt, Artificial Sequence
  Description of Artificial Sequence: Synthetic oligonucleotide
ugugagagcaaccucauuu

SEQ ID NO: 1808044 - RNA, 19 nt, Artificial Sequence
  Description of Artificial Sequence: Synthetic oligonucleotide
uaaaucgcgggccaccccg

SEQ ID NO: 1808045 - RNA, 19 nt, Artificial Sequence
  Description of Artificial Sequence: Synthetic oligonucleotide
aaagaucccugcccggggc

SEQ ID NO: 1808046 - RNA, 19 nt, Artificial Sequence
  Description of Artificial Sequence: Synthetic oligonucleotide
aaucagagaguagagcguc

SEQ ID NO: 1808047 - RNA, 19 nt, Artificial Sequence
  Description of Artificial Sequence: Synthetic oligonucleotide
gaaacaucgagcagugugg

SEQ ID NO: 1808048 - RNA, 19 nt, Artificial Sequence
  Description of Artificial Sequence: Synthetic oligonucleotide
aguaaggguugccaucucc

SEQ ID NO: 1808049 - RNA, 19 nt, Artificial Sequence
  Description of Artificial Sequence: Synthetic oligonucleotide
uuuucguugguccaggcua

SEQ ID NO: 1808050 - RNA, 19 nt, Artificial Sequence
  Description of Artificial Sequence: Synthetic oligonucleotide
uagugcucccgccagacgg

SEQ ID NO: 1808051 - RNA, 19 nt, Artificial Sequence
  Description of Artificial Sequence: Synthetic oligonucleotide
ucuugcauagcaccccgcg

SEQ ID NO: 1808052 - RNA, 19 nt, Artificial Sequence
  Description of Artificial Sequence: Synthetic oligonucleotide
uaggcgaacagcacauugg

SEQ ID NO: 1808053 - RNA, 19 nt, Artificial Sequence
  Description of Artificial Sequence: Synthetic oligonucleotide
aaacaucgagcaguguggc

SEQ ID NO: 1808054 - RNA, 19 nt, Artificial Sequence
  Description of Artificial Sequence: Synthetic oligonucleotide
gagagugugagcguaggcg

SEQ ID NO: 1808055 - RNA, 19 nt, Artificial Sequence
  Description of Artificial Sequence: Synthetic oligonucleotide
acauugggcagcuggaauc

SEQ ID NO: 1808056 - RNA, 19 nt, Artificial Sequence
  Description of Artificial Sequence: Synthetic oligonucleotide
cuaaccacagccuguuucc

SEQ ID NO: 1808057 - RNA, 19 nt, Artificial Sequence
  Description of Artificial Sequence: Synthetic oligonucleotide
agaaaggccguucggccgc

SEQ ID NO: 1808058 - RNA, 19 nt, Artificial Sequence
  Description of Artificial Sequence: Synthetic oligonucleotide
agagaguagagcgucgucg

SEQ ID NO: 1808059 - RNA, 19 nt, Artificial Sequence
  Description of Artificial Sequence: Synthetic oligonucleotide
aguagagcgucgucguccc

SEQ ID NO: 1808060 - RNA, 19 nt, Artificial Sequence
  Description of Artificial Sequence: Synthetic oligonucleotide
uauuaauaccacacaccca

SEQ ID NO: 1808061 - RNA, 19 nt, Artificial Sequence
  Description of Artificial Sequence: Synthetic oligonucleotide
uccuccauaaaucgcgggc

SEQ ID NO: 1808062 - RNA, 19 nt, Artificial Sequence
  Description of Artificial Sequence: Synthetic oligonucleotide
uuucguucuucgcuaacca

SEQ ID NO: 1808063 - RNA, 19 nt, Artificial Sequence
  Description of Artificial Sequence: Synthetic oligonucleotide
acagauucgggcgcggugc

SEQ ID NO: 1808064 - RNA, 19 nt, Artificial Sequence
  Description of Artificial Sequence: Synthetic oligonucleotide
acagcuuuauuaauaccac

SEQ ID NO: 1808065 - RNA, 19 nt, Artificial Sequence
  Description of Artificial Sequence: Synthetic oligonucleotide
ucaaagacuugcugggcgc

SEQ ID NO: 1808066 - RNA, 19 nt, Artificial Sequence
  Description of Artificial Sequence: Synthetic oligonucleotide
aguccagaaaggccguucg

SEQ ID NO: 1808067 - RNA, 19 nt, Artificial Sequence
  Description of Artificial Sequence: Synthetic oligonucleotide
agagcaaccucauuuucgu

SEQ ID NO: 1808068 - RNA, 19 nt, Artificial Sequence
  Description of Artificial Sequence: Synthetic oligonucleotide
aggcgaacagcacauuggg

SEQ ID NO: 1808069 - RNA, 19 nt, Artificial Sequence
  Description of Artificial Sequence: Synthetic oligonucleotide
uccguagagucaaagacuu

SEQ ID NO: 1808070 - RNA, 19 nt, Artificial Sequence
  Description of Artificial Sequence: Synthetic oligonucleotide
uucucagccggugacaagc

SEQ ID NO: 1808071 - RNA, 19 nt, Artificial Sequence
  Description of Artificial Sequence: Synthetic oligonucleotide
aguagggcgcguugcagcg

SEQ ID NO: 1808072 - RNA, 19 nt, Artificial Sequence
  Description of Artificial Sequence: Synthetic oligonucleotide
agagccaguggugugagag

SEQ ID NO: 1808073 - RNA, 19 nt, Artificial Sequence
  Description of Artificial Sequence: Synthetic oligonucleotide
aaucgcacgaguggcgagg

SEQ ID NO: 1808074 - RNA, 19 nt, Artificial Sequence
  Description of Artificial Sequence: Synthetic oligonucleotide
aacgccgccuucucagccg

SEQ ID NO: 1808075 - RNA, 19 nt, Artificial Sequence
  Description of Artificial Sequence: Synthetic oligonucleotide
uggaaucgcacgaguggcg

SEQ ID NO: 1808076 - RNA, 19 nt, Artificial Sequence
  Description of Artificial Sequence: Synthetic oligonucleotide
aaaucagagaguagagcgu

SEQ ID NO: 1808077 - RNA, 19 nt, Artificial Sequence
  Description of Artificial Sequence: Synthetic oligonucleotide
auaaaucgcgggccacccc

SEQ ID NO: 1808078 - RNA, 19 nt, Artificial Sequence
  Description of Artificial Sequence: Synthetic oligonucleotide
aaaggcgauuucguucuuc

SEQ ID NO: 1808079 - RNA, 19 nt, Artificial Sequence
  Description of Artificial Sequence: Synthetic oligonucleotide
cagaauacgagcaaccucu

SEQ ID NO: 1808080 - RNA, 19 nt, Artificial Sequence
  Description of Artificial Sequence: Synthetic oligonucleotide
ucgcccagcagaauacgag

SEQ ID NO: 1808081 - RNA, 19 nt, Artificial Sequence
  Description of Artificial Sequence: Synthetic oligonucleotide
ucuucgcuaaccacagccu

SEQ ID NO: 1808082 - RNA, 19 nt, Artificial Sequence
  Description of Artificial Sequence: Synthetic oligonucleotide
aagccgcagagcccuacgg

SEQ ID NO: 1808083 - RNA, 19 nt, Artificial Sequence
  Description of Artificial Sequence: Synthetic oligonucleotide
cagaaaggccguucggccg

SEQ ID NO: 1808084 - RNA, 19 nt, Artificial Sequence
  Description of Artificial Sequence: Synthetic oligonucleotide
ugguugauaggacccucgc

SEQ ID NO: 1808085 - RNA, 19 nt, Artificial Sequence
  Description of Artificial Sequence: Synthetic oligonucleotide
auacgagcaaccucuugca

SEQ ID NO: 1808086 - RNA, 19 nt, Artificial Sequence
  Description of Artificial Sequence: Synthetic oligonucleotide
uugcauagcaccccgcgua

SEQ ID NO: 1808087 - RNA, 19 nt, Artificial Sequence
  Description of Artificial Sequence: Synthetic oligonucleotide
gaguagagcgucgucgucc

SEQ ID NO: 1808088 - RNA, 19 nt, Artificial Sequence
  Description of Artificial Sequence: Synthetic oligonucleotide
ucuagagccagugguguga

SEQ ID NO: 1808089 - RNA, 19 nt, Artificial Sequence
  Description of Artificial Sequence: Synthetic oligonucleotide
uagggcgcguugcagcgcg

SEQ ID NO: 1808090 - RNA, 19 nt, Artificial Sequence
  Description of Artificial Sequence: Synthetic oligonucleotide
gcaaccucauuuucguugg

SEQ ID NO: 1808091 - RNA, 19 nt, Artificial Sequence
  Description of Artificial Sequence: Synthetic oligonucleotide
cugguugauaggacccucg

SEQ ID NO: 1808092 - RNA, 19 nt, Artificial Sequence
  Description of Artificial Sequence: Synthetic oligonucleotide
uuccgagcccgguaaaggc

SEQ ID NO: 1808093 - RNA, 19 nt, Artificial Sequence
  Description of Artificial Sequence: Synthetic oligonucleotide
gcuggaaucgcacgagugg

SEQ ID NO: 1808094 - RNA, 19 nt, Artificial Sequence
  Description of Artificial Sequence: Synthetic oligonucleotide
uugauaggacccucgccca

SEQ ID NO: 1808095 - RNA, 19 nt, Artificial Sequence
  Description of Artificial Sequence: Synthetic oligonucleotide
cuccgaaagaucccugccc

SEQ ID NO: 1808096 - RNA, 19 nt, Artificial Sequence
  Description of Artificial Sequence: Synthetic oligonucleotide
cauagcaccccgcguaccc

SEQ ID NO: 1808097 - RNA, 19 nt, Artificial Sequence
  Description of Artificial Sequence: Synthetic oligonucleotide
gaauacgagcaaccucuug

SEQ ID NO: 1808098 - RNA, 19 nt, Artificial Sequence
  Description of Artificial Sequence: Synthetic oligonucleotide
uccuccguagagucaaaga

SEQ ID NO: 1808099 - RNA, 19 nt, Artificial Sequence
  Description of Artificial Sequence: Synthetic oligonucleotide
gcgaacagcacauugggca

SEQ ID NO: 1808100 - RNA, 19 nt, Artificial Sequence
  Description of Artificial Sequence: Synthetic oligonucleotide
agcaagaggcaccgcggcg

SEQ ID NO: 1808101 - RNA, 19 nt, Artificial Sequence
  Description of Artificial Sequence: Synthetic oligonucleotide
ugaggccuauuuccucggg

SEQ ID NO: 1808102 - RNA, 19 nt, Artificial Sequence
  Description of Artificial Sequence: Synthetic oligonucleotide
aggcgauuucguucuucgc

SEQ ID NO: 1808103 - RNA, 19 nt, Artificial Sequence
  Description of Artificial Sequence: Synthetic oligonucleotide
cuggaaucgcacgaguggc

SEQ ID NO: 1808104 - RNA, 19 nt, Artificial Sequence
  Description of Artificial Sequence: Synthetic oligonucleotide
auuuccucgggcucauccu

SEQ ID NO: 1808105 - RNA, 19 nt, Artificial Sequence
  Description of Artificial Sequence: Synthetic oligonucleotide
gaagccgcagagcccuacg

SEQ ID NO: 1808106 - RNA, 19 nt, Artificial Sequence
  Description of Artificial Sequence: Synthetic oligonucleotide
aaagccgcuccagcucccc

SEQ ID NO: 1808107 - RNA, 19 nt, Artificial Sequence
  Description of Artificial Sequence: Synthetic oligonucleotide
cucggcugugacagcaugg

SEQ ID NO: 1808108 - RNA, 19 nt, Artificial Sequence
  Description of Artificial Sequence: Synthetic oligonucleotide
aacaucgagcaguguggca

SEQ ID NO: 1808109 - RNA, 19 nt, Artificial Sequence
  Description of Artificial Sequence: Synthetic oligonucleotide
agccuuucugguugauagg

SEQ ID NO: 1808110 - RNA, 19 nt, Artificial Sequence
  Description of Artificial Sequence: Synthetic oligonucleotide
gaggccuauuuccucgggc

SEQ ID NO: 1808111 - RNA, 19 nt, Artificial Sequence
  Description of Artificial Sequence: Synthetic oligonucleotide
cauaaaucgcgggccaccc

SEQ ID NO: 1808112 - RNA, 19 nt, Artificial Sequence
  Description of Artificial Sequence: Synthetic oligonucleotide
ugugagcguaggcgaacag

SEQ ID NO: 1808113 - RNA, 19 nt, Artificial Sequence
  Description of Artificial Sequence: Synthetic oligonucleotide
cacagaaaucagagaguag

SEQ ID NO: 1808114 - RNA, 19 nt, Artificial Sequence
  Description of Artificial Sequence: Synthetic oligonucleotide
agcaugggcucgguggacc

SEQ ID NO: 1808115 - RNA, 19 nt, Artificial Sequence
  Description of Artificial Sequence: Synthetic oligonucleotide
gucgcgguagaagucuucg

SEQ ID NO: 1808116 - RNA, 19 nt, Artificial Sequence
  Description of Artificial Sequence: Synthetic oligonucleotide
ugcauagcaccccgcguac

SEQ ID NO: 1808117 - RNA, 19 nt, Artificial Sequence
  Description of Artificial Sequence: Synthetic oligonucleotide
cuuccgagcccgguaaagg

SEQ ID NO: 1808118 - RNA, 19 nt, Artificial Sequence
  Description of Artificial Sequence: Synthetic oligonucleotide
accccgcguacccaagggc

SEQ ID NO: 1808119 - RNA, 19 nt, Artificial Sequence
  Description of Artificial Sequence: Synthetic oligonucleotide
cacagucuagagccagugg

SEQ ID NO: 1808120 - RNA, 19 nt, Artificial Sequence
  Description of Artificial Sequence: Synthetic oligonucleotide
aaucgcgggccaccccgcg

SEQ ID NO: 1808121 - RNA, 19 nt, Artificial Sequence
  Description of Artificial Sequence: Synthetic oligonucleotide
caguagggcgcguugcagc

SEQ ID NO: 1808122 - RNA, 19 nt, Artificial Sequence
  Description of Artificial Sequence: Synthetic oligonucleotide
agcagaauacgagcaaccu

SEQ ID NO: 1808123 - RNA, 19 nt, Artificial Sequence
  Description of Artificial Sequence: Synthetic oligonucleotide
ccuccguagagucaaagac

SEQ ID NO: 1808124 - RNA, 19 nt, Artificial Sequence
  Description of Artificial Sequence: Synthetic oligonucleotide
aaggccguucggccgcggg

SEQ ID NO: 1808125 - RNA, 19 nt, Artificial Sequence
  Description of Artificial Sequence: Synthetic oligonucleotide
gauuucguucuucgcuaac

SEQ ID NO: 1808126 - RNA, 19 nt, Artificial Sequence
  Description of Artificial Sequence: Synthetic oligonucleotide
ucgcgguagaagucuucgg

SEQ ID NO: 1808127 - RNA, 19 nt, Artificial Sequence
  Description of Artificial Sequence: Synthetic oligonucleotide
aaaucgcgggccaccccgc

SEQ ID NO: 1808128 - RNA, 19 nt, Artificial Sequence
  Description of Artificial Sequence: Synthetic oligonucleotide
aagaucccugcccggggca

SEQ ID NO: 1808129 - RNA, 19 nt, Artificial Sequence
  Description of Artificial Sequence: Synthetic oligonucleotide
gaaucgcacgaguggcgag

SEQ ID NO: 1808130 - RNA, 19 nt, Artificial Sequence
  Description of Artificial Sequence: Synthetic oligonucleotide
acgagcaaccucuugcaua

SEQ ID NO: 1808131 - RNA, 19 nt, Artificial Sequence
  Description of Artificial Sequence: Synthetic oligonucleotide
caccgcggcggcaucaucc

SEQ ID NO: 1808132 - RNA, 19 nt, Artificial Sequence
  Description of Artificial Sequence: Synthetic oligonucleotide
agucuagagccaguggugu

SEQ ID NO: 1808133 - RNA, 19 nt, Artificial Sequence
  Description of Artificial Sequence: Synthetic oligonucleotide
cuguuuccgggcucggccc

SEQ ID NO: 1808134 - RNA, 19 nt, Artificial Sequence
  Description of Artificial Sequence: Synthetic oligonucleotide
gaacgccgccuucucagcc

SEQ ID NO: 1808135 - RNA, 19 nt, Artificial Sequence
  Description of Artificial Sequence: Synthetic oligonucleotide
ggagccaugcgcccgguag

SEQ ID NO: 1808136 - RNA, 19 nt, Artificial Sequence
  Description of Artificial Sequence: Synthetic oligonucleotide
cugaggccuauuuccucgg

SEQ ID NO: 1808137 - RNA, 19 nt, Artificial Sequence
  Description of Artificial Sequence: Synthetic oligonucleotide
guagccggcguagugcucc

SEQ ID NO: 1808138 - RNA, 19 nt, Artificial Sequence
  Description of Artificial Sequence: Synthetic oligonucleotide
aggccguucggccgcgggc

SEQ ID NO: 1808139 - RNA, 19 nt, Artificial Sequence
  Description of Artificial Sequence: Synthetic oligonucleotide
ccguuguucgcguagccgg

SEQ ID NO: 1808140 - RNA, 19 nt, Artificial Sequence
  Description of Artificial Sequence: Synthetic oligonucleotide
gguugauaggacccucgcc

SEQ ID NO: 1808141 - RNA, 19 nt, Artificial Sequence
  Description of Artificial Sequence: Synthetic oligonucleotide
gucgucguccccuccauga

SEQ ID NO: 1808142 - RNA, 19 nt, Artificial Sequence
  Description of Artificial Sequence: Synthetic oligonucleotide
uccggcuccgaaagauccc

SEQ ID NO: 1808143 - RNA, 19 nt, Artificial Sequence
  Description of Artificial Sequence: Synthetic oligonucleotide
ucuggggcggucuccggcu

SEQ ID NO: 1808144 - RNA, 19 nt, Artificial Sequence
  Description of Artificial Sequence: Synthetic oligonucleotide
guacccaagggcccaggug

SEQ ID NO: 1808145 - RNA, 19 nt, Artificial Sequence
  Description of Artificial Sequence: Synthetic oligonucleotide
agagcgucgucguccccuc

SEQ ID NO: 1808146 - RNA, 19 nt, Artificial Sequence
  Description of Artificial Sequence: Synthetic oligonucleotide
uaccgggccuccccaaagc

SEQ ID NO: 1808147 - RNA, 19 nt, Artificial Sequence
  Description of Artificial Sequence: Synthetic oligonucleotide
gugagcguaggcgaacagc

SEQ ID NO: 1808148 - RNA, 19 nt, Artificial Sequence
  Description of Artificial Sequence: Synthetic oligonucleotide
uccccaguaaggguugcca

SEQ ID NO: 1808149 - RNA, 19 nt, Artificial Sequence
  Description of Artificial Sequence: Synthetic oligonucleotide
ucucagccggugacaagcu

SEQ ID NO: 1808150 - RNA, 19 nt, Artificial Sequence
  Description of Artificial Sequence: Synthetic oligonucleotide
acuccuccauaaaucgcgg

SEQ ID NO: 1808151 - RNA, 19 nt, Artificial Sequence
  Description of Artificial Sequence: Synthetic oligonucleotide
cgagcaaccucuugcauag

SEQ ID NO: 1808152 - RNA, 19 nt, Artificial Sequence
  Description of Artificial Sequence: Synthetic oligonucleotide
ugggauacgggagggcacu

SEQ ID NO: 1808153 - RNA, 19 nt, Artificial Sequence
  Description of Artificial Sequence: Synthetic oligonucleotide
uguagcgcgccggcaaagc

SEQ ID NO: 1808154 - RNA, 19 nt, Artificial Sequence
  Description of Artificial Sequence: Synthetic oligonucleotide
uacgagcaaccucuugcau

SEQ ID NO: 1808155 - RNA, 19 nt, Artificial Sequence
  Description of Artificial Sequence: Synthetic oligonucleotide
gucguccccuccaugauac

SEQ ID NO: 1808156 - RNA, 19 nt, Artificial Sequence
  Description of Artificial Sequence: Synthetic oligonucleotide
ucuccggcuccgaaagauc

SEQ ID NO: 1808157 - RNA, 19 nt, Artificial Sequence
  Description of Artificial Sequence: Synthetic oligonucleotide
ucccguuguucgcguagcc

SEQ ID NO: 1808158 - RNA, 19 nt, Artificial Sequence
  Description of Artificial Sequence: Synthetic oligonucleotide
guuguucgcguagccggcg

SEQ ID NO: 1808159 - RNA, 19 nt, Artificial Sequence
  Description of Artificial Sequence: Synthetic oligonucleotide
cccgguaaaggcgauuucg

SEQ ID NO: 1808160 - RNA, 19 nt, Artificial Sequence
  Description of Artificial Sequence: Synthetic oligonucleotide
gcaagaggcaccgcggcgg

SEQ ID NO: 1808161 - RNA, 19 nt, Artificial Sequence
  Description of Artificial Sequence: Synthetic oligonucleotide
uccauaaaucgcgggccac

SEQ ID NO: 1808162 - RNA, 19 nt, Artificial Sequence
  Description of Artificial Sequence: Synthetic oligonucleotide
agcuggaaucgcacgagug

SEQ ID NO: 1808163 - RNA, 19 nt, Artificial Sequence
  Description of Artificial Sequence: Synthetic oligonucleotide
ucauccucggucucccguu

SEQ ID NO: 1808164 - RNA, 19 nt, Artificial Sequence
  Description of Artificial Sequence: Synthetic oligonucleotide
agaagccgcagagcccuac

SEQ ID NO: 1808165 - RNA, 19 nt, Artificial Sequence
  Description of Artificial Sequence: Synthetic oligonucleotide
cacagauucgggcgcggug

SEQ ID NO: 1808166 - RNA, 19 nt, Artificial Sequence
  Description of Artificial Sequence: Synthetic oligonucleotide
agcgcgccggcaaagcuuc

SEQ ID NO: 1808167 - RNA, 19 nt, Artificial Sequence
  Description of Artificial Sequence: Synthetic oligonucleotide
cucgggcucauccucgguc

SEQ ID NO: 1808168 - RNA, 19 nt, Artificial Sequence
  Description of Artificial Sequence: Synthetic oligonucleotide
uuguucgcguagccggcgu

SEQ ID NO: 1808169 - RNA, 19 nt, Artificial Sequence
  Description of Artificial Sequence: Synthetic oligonucleotide
ggcggcaucauccacagau

SEQ ID NO: 1808170 - RNA, 19 nt, Artificial Sequence
  Description of Artificial Sequence: Synthetic oligonucleotide
ccuguuuccgggcucggcc

SEQ ID NO: 1808171 - RNA, 19 nt, Artificial Sequence
  Description of Artificial Sequence: Synthetic oligonucleotide
cuccguagagucaaagacu

SEQ ID NO: 1808172 - RNA, 19 nt, Artificial Sequence
  Description of Artificial Sequence: Synthetic oligonucleotide
aucgcacgaguggcgaggg

SEQ ID NO: 1808173 - RNA, 19 nt, Artificial Sequence
  Description of Artificial Sequence: Synthetic oligonucleotide
auccacagauucgggcgcg

SEQ ID NO: 1808174 - RNA, 19 nt, Artificial Sequence
  Description of Artificial Sequence: Synthetic oligonucleotide
ucggucucccguuguucgc

SEQ ID NO: 1808175 - RNA, 19 nt, Artificial Sequence
  Description of Artificial Sequence: Synthetic oligonucleotide
cagcgcugggauacgggag

SEQ ID NO: 1808176 - RNA, 19 nt, Artificial Sequence
  Description of Artificial Sequence: Synthetic oligonucleotide
gagcaguagggcgcguugc

SEQ ID NO: 1808177 - RNA, 19 nt, Artificial Sequence
  Description of Artificial Sequence: Synthetic oligonucleotide
agguguagcgcgccggcaa

SEQ ID NO: 1808178 - RNA, 19 nt, Artificial Sequence
  Description of Artificial Sequence: Synthetic oligonucleotide
uucguugguccaggcuagg

SEQ ID NO: 1808179 - RNA, 19 nt, Artificial Sequence
  Description of Artificial Sequence: Synthetic oligonucleotide
uccagcacgugggcugcgg

SEQ ID NO: 1808180 - RNA, 19 nt, Artificial Sequence
  Description of Artificial Sequence: Synthetic oligonucleotide
ccucaaugagaguccuugg

SEQ ID NO: 1808181 - RNA, 19 nt, Artificial Sequence
  Description of Artificial Sequence: Synthetic oligonucleotide
uccacagauucgggcgcgg

SEQ ID NO: 1808182 - RNA, 19 nt, Artificial Sequence
  Description of Artificial Sequence: Synthetic oligonucleotide
ggcgauuucguucuucgcu

SEQ ID NO: 1808183 - RNA, 19 nt, Artificial Sequence
  Description of Artificial Sequence: Synthetic oligonucleotide
cguucuucgcuaaccacag

SEQ ID NO: 1808184 - RNA, 19 nt, Artificial Sequence
  Description of Artificial Sequence: Synthetic oligonucleotide
ucgggcgcggugcucucug

SEQ ID NO: 1808185 - RNA, 19 nt, Artificial Sequence
  Description of Artificial Sequence: Synthetic oligonucleotide
gguagaagucuucggcgca

SEQ ID NO: 1808186 - RNA, 19 nt, Artificial Sequence
  Description of Artificial Sequence: Synthetic oligonucleotide
guucgcguagccggcguag

SEQ ID NO: 1808187 - RNA, 19 nt, Artificial Sequence
  Description of Artificial Sequence: Synthetic oligonucleotide
aucgcgggccaccccgcgg

SEQ ID NO: 1808188 - RNA, 19 nt, Artificial Sequence
  Description of Artificial Sequence: Synthetic oligonucleotide
cuccauaaaucgcgggcca

SEQ ID NO: 1808189 - RNA, 19 nt, Artificial Sequence
  Description of Artificial Sequence: Synthetic oligonucleotide
ucggcgcaggagccaugcg

SEQ ID NO: 1808190 - RNA, 19 nt, Artificial Sequence
  Description of Artificial Sequence: Synthetic oligonucleotide
acgaguggcgagggcgggc

SEQ ID NO: 1808191 - RNA, 19 nt, Artificial Sequence
  Description of Artificial Sequence: Synthetic oligonucleotide
uucuuccgagcccgguaaa

SEQ ID NO: 1808192 - RNA, 19 nt, Artificial Sequence
  Description of Artificial Sequence: Synthetic oligonucleotide
cagccuguuuccgggcucg

SEQ ID NO: 1808193 - RNA, 19 nt, Artificial Sequence
  Description of Artificial Sequence: Synthetic oligonucleotide
guaaggguugccaucuccu

SEQ ID NO: 1808194 - RNA, 19 nt, Artificial Sequence
  Description of Artificial Sequence: Synthetic oligonucleotide
gcucccgccagacggcugg

SEQ ID NO: 1808195 - RNA, 19 nt, Artificial Sequence
  Description of Artificial Sequence: Synthetic oligonucleotide
guucuucgcuaaccacagc

SEQ ID NO: 1808196 - RNA, 19 nt, Artificial Sequence
  Description of Artificial Sequence: Synthetic oligonucleotide
gcguccagcaucgccacgg

SEQ ID NO: 1808197 - RNA, 19 nt, Artificial Sequence
  Description of Artificial Sequence: Synthetic oligonucleotide
cagagaguagagcgucguc

SEQ ID NO: 1808198 - RNA, 19 nt, Artificial Sequence
  Description of Artificial Sequence: Synthetic oligonucleotide
ucgucguccccuccaugau

SEQ ID NO: 1808199 - RNA, 19 nt, Artificial Sequence
  Description of Artificial Sequence: Synthetic oligonucleotide
gaaaggccguucggccgcg

SEQ ID NO: 1808200 - RNA, 19 nt, Artificial Sequence
  Description of Artificial Sequence: Synthetic oligonucleotide
ggcguagugcucccgccag

SEQ ID NO: 1808201 - RNA, 19 nt, Artificial Sequence
  Description of Artificial Sequence: Synthetic oligonucleotide
cgaacagcacauugggcag

SEQ ID NO: 1808202 - RNA, 19 nt, Artificial Sequence
  Description of Artificial Sequence: Synthetic oligonucleotide
cggggcacgauccaacucc

SEQ ID NO: 1808203 - RNA, 19 nt, Artificial Sequence
  Description of Artificial Sequence: Synthetic oligonucleotide
uguucgcguagccggcgua

SEQ ID NO: 1808204 - RNA, 19 nt, Artificial Sequence
  Description of Artificial Sequence: Synthetic oligonucleotide
guuugggccaggugcccca

SEQ ID NO: 1808205 - RNA, 19 nt, Artificial Sequence
  Description of Artificial Sequence: Synthetic oligonucleotide
ggcgcaggagccaugcgcc

SEQ ID NO: 1808206 - RNA, 19 nt, Artificial Sequence
  Description of Artificial Sequence: Synthetic oligonucleotide
ggcgcggugcucucugggg

SEQ ID NO: 1808207 - RNA, 19 nt, Artificial Sequence
  Description of Artificial Sequence: Synthetic oligonucleotide
ucgccacggcucagcagcc

SEQ ID NO: 1808208 - RNA, 19 nt, Artificial Sequence
  Description of Artificial Sequence: Synthetic oligonucleotide
cucgcccagcagaauacga

SEQ ID NO: 1808209 - RNA, 19 nt, Artificial Sequence
  Description of Artificial Sequence: Synthetic oligonucleotide
cucccguuguucgcguagc

SEQ ID NO: 1808210 - RNA, 19 nt, Artificial Sequence
  Description of Artificial Sequence: Synthetic oligonucleotide
caucgagcaguguggcaca

SEQ ID NO: 1808211 - RNA, 19 nt, Artificial Sequence
  Description of Artificial Sequence: Synthetic oligonucleotide
cucgcagcaccuggucgcg

SEQ ID NO: 1808212 - RNA, 19 nt, Artificial Sequence
  Description of Artificial Sequence: Synthetic oligonucleotide
uggggcggucuccggcucc

SEQ ID NO: 1808213 - RNA, 19 nt, Artificial Sequence
  Description of Artificial Sequence: Synthetic oligonucleotide
cugugacagcaugggcucg

SEQ ID NO: 1808214 - RNA, 19 nt, Artificial Sequence
  Description of Artificial Sequence: Synthetic oligonucleotide
uagcaccccgcguacccaa

SEQ ID NO: 1808215 - RNA, 19 nt, Artificial Sequence
  Description of Artificial Sequence: Synthetic oligonucleotide
ccccgcguacccaagggcc

SEQ ID NO: 1808216 - RNA, 19 nt, Artificial Sequence
  Description of Artificial Sequence: Synthetic oligonucleotide
auucgggcgcggugcucuc

SEQ ID NO: 1808217 - RNA, 19 nt, Artificial Sequence
  Description of Artificial Sequence: Synthetic oligonucleotide
gauucgggcgcggugcucu

SEQ ID NO: 1808218 - RNA, 19 nt, Artificial Sequence
  Description of Artificial Sequence: Synthetic oligonucleotide
augggcucgguggacccug

SEQ ID NO: 1808219 - RNA, 19 nt, Artificial Sequence
  Description of Artificial Sequence: Synthetic oligonucleotide
uaaaggcgauuucguucuu

SEQ ID NO: 1808220 - RNA, 19 nt, Artificial Sequence
  Description of Artificial Sequence: Synthetic oligonucleotide
ccugcccggggcacgaucc

SEQ ID NO: 1808221 - RNA, 19 nt, Artificial Sequence
  Description of Artificial Sequence: Synthetic oligonucleotide
gccggcaaagcuuccccgc

SEQ ID NO: 1808222 - RNA, 19 nt, Artificial Sequence
  Description of Artificial Sequence: Synthetic oligonucleotide
gcgauuucguucuucgcua

SEQ ID NO: 1808223 - RNA, 19 nt, Artificial Sequence
  Description of Artificial Sequence: Synthetic oligonucleotide
aaaggccguucggccgcgg

SEQ ID NO: 1808224 - RNA, 19 nt, Artificial Sequence
  Description of Artificial Sequence: Synthetic oligonucleotide
auagcaccccgcguaccca

SEQ ID NO: 1808225 - RNA, 19 nt, Artificial Sequence
  Description of Artificial Sequence: Synthetic oligonucleotide
ccggugacaagcuuuccca

SEQ ID NO: 1808226 - RNA, 19 nt, Artificial Sequence
  Description of Artificial Sequence: Synthetic oligonucleotide
auccucggucucccguugu

SEQ ID NO: 1808227 - RNA, 19 nt, Artificial Sequence
  Description of Artificial Sequence: Synthetic oligonucleotide
uagagccaguggugugaga

SEQ ID NO: 1808228 - RNA, 19 nt, Artificial Sequence
  Description of Artificial Sequence: Synthetic oligonucleotide
ggagaggcacuccggccgc

SEQ ID NO: 1808229 - RNA, 19 nt, Artificial Sequence
  Description of Artificial Sequence: Synthetic oligonucleotide
ggaaucgcacgaguggcga

SEQ ID NO: 1808230 - RNA, 19 nt, Artificial Sequence
  Description of Artificial Sequence: Synthetic oligonucleotide
agauucgggcgcggugcuc

SEQ ID NO: 1808231 - RNA, 19 nt, Artificial Sequence
  Description of Artificial Sequence: Synthetic oligonucleotide
uucgcguagccggcguagu

SEQ ID NO: 1808232 - RNA, 19 nt, Artificial Sequence
  Description of Artificial Sequence: Synthetic oligonucleotide
agccaugcgcccgguagca

SEQ ID NO: 1808233 - RNA, 19 nt, Artificial Sequence
  Description of Artificial Sequence: Synthetic oligonucleotide
gcugggauacgggagggca

SEQ ID NO: 1808234 - RNA, 19 nt, Artificial Sequence
  Description of Artificial Sequence: Synthetic oligonucleotide
cgcccagcagaauacgagc

SEQ ID NO: 1808235 - RNA, 19 nt, Artificial Sequence
  Description of Artificial Sequence: Synthetic oligonucleotide
ucgcacgaguggcgagggc

SEQ ID NO: 1808236 - RNA, 19 nt, Artificial Sequence
  Description of Artificial Sequence: Synthetic oligonucleotide
ggcagguguagcgcgccgg

SEQ ID NO: 1808237 - RNA, 19 nt, Artificial Sequence
  Description of Artificial Sequence: Synthetic oligonucleotide
ccgaaagaucccugcccgg

SEQ ID NO: 1808238 - RNA, 19 nt, Artificial Sequence
  Description of Artificial Sequence: Synthetic oligonucleotide
ugcucccgccagacggcug

SEQ ID NO: 1808239 - RNA, 19 nt, Artificial Sequence
  Description of Artificial Sequence: Synthetic oligonucleotide
uggucgcgguagaagucuu

SEQ ID NO: 1808240 - RNA, 19 nt, Artificial Sequence
  Description of Artificial Sequence: Synthetic oligonucleotide
ggcgaacagcacauugggc

SEQ ID NO: 1808241 - RNA, 19 nt, Artificial Sequence
  Description of Artificial Sequence: Synthetic oligonucleotide
gugugagcguaggcgaaca

SEQ ID NO: 1808242 - RNA, 19 nt, Artificial Sequence
  Description of Artificial Sequence: Synthetic oligonucleotide
gcagguguagcgcgccggc

SEQ ID NO: 1808243 - RNA, 19 nt, Artificial Sequence
  Description of Artificial Sequence: Synthetic oligonucleotide
gugguaccgggccucccca

SEQ ID NO: 1808244 - RNA, 19 nt, Artificial Sequence
  Description of Artificial Sequence: Synthetic oligonucleotide
guguagcgcgccggcaaag

SEQ ID NO: 1808245 - RNA, 19 nt, Artificial Sequence
  Description of Artificial Sequence: Synthetic oligonucleotide
cgcacgaguggcgagggcg

SEQ ID NO: 1808246 - RNA, 19 nt, Artificial Sequence
  Description of Artificial Sequence: Synthetic oligonucleotide
uagccggcguagugcuccc

SEQ ID NO: 1808247 - RNA, 19 nt, Artificial Sequence
  Description of Artificial Sequence: Synthetic oligonucleotide
cuccucggcugugacagca

SEQ ID NO: 1808248 - RNA, 19 nt, Artificial Sequence
  Description of Artificial Sequence: Synthetic oligonucleotide
cucgaacgccgccuucuca

SEQ ID NO: 1808249 - RNA, 19 nt, Artificial Sequence
  Description of Artificial Sequence: Synthetic oligonucleotide
agaauacgagcaaccucuu

SEQ ID NO: 1808250 - RNA, 19 nt, Artificial Sequence
  Description of Artificial Sequence: Synthetic oligonucleotide
cacgaguggcgagggcggg

SEQ ID NO: 1808251 - RNA, 19 nt, Artificial Sequence
  Description of Artificial Sequence: Synthetic oligonucleotide
cccguuguucgcguagccg

SEQ ID NO: 1808252 - RNA, 19 nt, Artificial Sequence
  Description of Artificial Sequence: Synthetic oligonucleotide
ggccgcggagcucucgcag

SEQ ID NO: 1808253 - RNA, 19 nt, Artificial Sequence
  Description of Artificial Sequence: Synthetic oligonucleotide
ugguaccgggccuccccaa

SEQ ID NO: 1808254 - RNA, 19 nt, Artificial Sequence
  Description of Artificial Sequence: Synthetic oligonucleotide
ucguccccuccaugauaca

SEQ ID NO: 1808255 - RNA, 19 nt, Artificial Sequence
  Description of Artificial Sequence: Synthetic oligonucleotide
guagagcgucgucgucccc

SEQ ID NO: 1808256 - RNA, 19 nt, Artificial Sequence
  Description of Artificial Sequence: Synthetic oligonucleotide
ggauacgggagggcacugc

SEQ ID NO: 1808257 - RNA, 19 nt, Artificial Sequence
  Description of Artificial Sequence: Synthetic oligonucleotide
cuucagcaagaggcaccgc

SEQ ID NO: 1808258 - RNA, 19 nt, Artificial Sequence
  Description of Artificial Sequence: Synthetic oligonucleotide
aggugccccagugcuguca

SEQ ID NO: 1808259 - RNA, 19 nt, Artificial Sequence
  Description of Artificial Sequence: Synthetic oligonucleotide
gaggcacuccggccgcgga

SEQ ID NO: 1808260 - RNA, 19 nt, Artificial Sequence
  Description of Artificial Sequence: Synthetic oligonucleotide
gcgcggugcucucuggggc

SEQ ID NO: 1808261 - RNA, 19 nt, Artificial Sequence
  Description of Artificial Sequence: Synthetic oligonucleotide
cccgcguacccaagggccc

SEQ ID NO: 1808262 - RNA, 19 nt, Artificial Sequence
  Description of Artificial Sequence: Synthetic oligonucleotide
gagcgucgucguccccucc

SEQ ID NO: 1808263 - RNA, 19 nt, Artificial Sequence
  Description of Artificial Sequence: Synthetic oligonucleotide
guuuccgggcucggcccag

SEQ ID NO: 1808264 - RNA, 19 nt, Artificial Sequence
  Description of Artificial Sequence: Synthetic oligonucleotide
guagcgcgccggcaaagcu

SEQ ID NO: 1808265 - RNA, 19 nt, Artificial Sequence
  Description of Artificial Sequence: Synthetic oligonucleotide
gagcaaccucuugcauagc

SEQ ID NO: 1808266 - RNA, 19 nt, Artificial Sequence
  Description of Artificial Sequence: Synthetic oligonucleotide
cuucggcgcaggagccaug

SEQ ID NO: 1808267 - RNA, 19 nt, Artificial Sequence
  Description of Artificial Sequence: Synthetic oligonucleotide
cguuguucgcguagccggc

SEQ ID NO: 1808268 - RNA, 19 nt, Artificial Sequence
  Description of Artificial Sequence: Synthetic oligonucleotide
ggcacagaaaucagagagu

SEQ ID NO: 1808269 - RNA, 19 nt, Artificial Sequence
  Description of Artificial Sequence: Synthetic oligonucleotide
gcgccggcaaagcuucccc

SEQ ID NO: 1808270 - RNA, 19 nt, Artificial Sequence
  Description of Artificial Sequence: Synthetic oligonucleotide
agggcgggcagcggcucag

SEQ ID NO: 1808271 - RNA, 19 nt, Artificial Sequence
  Description of Artificial Sequence: Synthetic oligonucleotide
gccggcguagugcucccgc

SEQ ID NO: 1808272 - RNA, 19 nt, Artificial Sequence
  Description of Artificial Sequence: Synthetic oligonucleotide
gucagcguguagccuuucu

SEQ ID NO: 1808273 - RNA, 19 nt, Artificial Sequence
  Description of Artificial Sequence: Synthetic oligonucleotide
ccagcgcugggauacggga

SEQ ID NO: 1808274 - RNA, 19 nt, Artificial Sequence
  Description of Artificial Sequence: Synthetic oligonucleotide
gccagcgcugggauacggg

SEQ ID NO: 1808275 - RNA, 19 nt, Artificial Sequence
  Description of Artificial Sequence: Synthetic oligonucleotide
gggcagguguagcgcgccg

SEQ ID NO: 1808276 - RNA, 19 nt, Artificial Sequence
  Description of Artificial Sequence: Synthetic oligonucleotide
gucuccggcuccgaaagau

SEQ ID NO: 1808277 - RNA, 19 nt, Artificial Sequence
  Description of Artificial Sequence: Synthetic oligonucleotide
gguguagcgcgccggcaaa

SEQ ID NO: 1808278 - RNA, 19 nt, Artificial Sequence
  Description of Artificial Sequence: Synthetic oligonucleotide
ugucagcguguagccuuuc

SEQ ID NO: 1808279 - RNA, 19 nt, Artificial Sequence
  Description of Artificial Sequence: Synthetic oligonucleotide
agcaccccgcguacccaag

SEQ ID NO: 1808280 - RNA, 19 nt, Artificial Sequence
  Description of Artificial Sequence: Synthetic oligonucleotide
ccucggcugugacagcaug

SEQ ID NO: 1808281 - RNA, 19 nt, Artificial Sequence
  Description of Artificial Sequence: Synthetic oligonucleotide
ccucgcccagcagaauacg

SEQ ID NO: 1808282 - RNA, 19 nt, Artificial Sequence
  Description of Artificial Sequence: Synthetic oligonucleotide
cacggcggcagcugagucu

SEQ ID NO: 1808283 - RNA, 19 nt, Artificial Sequence
  Description of Artificial Sequence: Synthetic oligonucleotide
cgcggugcucucuggggcg

SEQ ID NO: 1808284 - RNA, 19 nt, Artificial Sequence
  Description of Artificial Sequence: Synthetic oligonucleotide
ggcgcguugcagcgcgggc

SEQ ID NO: 1808285 - RNA, 19 nt, Artificial Sequence
  Description of Artificial Sequence: Synthetic oligonucleotide
cgcgggcagguguagcgcg

SEQ ID NO: 1808286 - RNA, 19 nt, Artificial Sequence
  Description of Artificial Sequence: Synthetic oligonucleotide
ccagcacgugggcugcggc

SEQ ID NO: 1808287 - RNA, 19 nt, Artificial Sequence
  Description of Artificial Sequence: Synthetic oligonucleotide
ccagcaucgccacggcuca

SEQ ID NO: 1808288 - RNA, 19 nt, Artificial Sequence
  Description of Artificial Sequence: Synthetic oligonucleotide
gucuucggcgcaggagcca

SEQ ID NO: 1808289 - RNA, 19 nt, Artificial Sequence
  Description of Artificial Sequence: Synthetic oligonucleotide
gcauagcaccccgcguacc

SEQ ID NO: 1808290 - RNA, 19 nt, Artificial Sequence
  Description of Artificial Sequence: Synthetic oligonucleotide
aucccugcccggggcacga

SEQ ID NO: 1808291 - RNA, 19 nt, Artificial Sequence
  Description of Artificial Sequence: Synthetic oligonucleotide
ccggcguagugcucccgcc

SEQ ID NO: 1808292 - RNA, 19 nt, Artificial Sequence
  Description of Artificial Sequence: Synthetic oligonucleotide
cgccagacggcugggagag

SEQ ID NO: 1808293 - RNA, 19 nt, Artificial Sequence
  Description of Artificial Sequence: Synthetic oligonucleotide
cuggggcggucuccggcuc

SEQ ID NO: 1808294 - RNA, 19 nt, Artificial Sequence
  Description of Artificial Sequence: Synthetic oligonucleotide
gaggcaccgcggcggcauc

SEQ ID NO: 1808295 - RNA, 19 nt, Artificial Sequence
  Description of Artificial Sequence: Synthetic oligonucleotide
gggcgcguugcagcgcggg

SEQ ID NO: 1808296 - RNA, 19 nt, Artificial Sequence
  Description of Artificial Sequence: Synthetic oligonucleotide
cgccggcaaagcuuccccg

SEQ ID NO: 1808297 - RNA, 19 nt, Artificial Sequence
  Description of Artificial Sequence: Synthetic oligonucleotide
cgaacgccgccuucucagc

SEQ ID NO: 1808298 - RNA, 19 nt, Artificial Sequence
  Description of Artificial Sequence: Synthetic oligonucleotide
ccgguaaaggcgauuucgu

SEQ ID NO: 1808299 - RNA, 19 nt, Artificial Sequence
  Description of Artificial Sequence: Synthetic oligonucleotide
aggagccaugcgcccggua

SEQ ID NO: 1808300 - RNA, 19 nt, Artificial Sequence
  Description of Artificial Sequence: Synthetic oligonucleotide
cucccgccagacggcuggg

SEQ ID NO: 1808301 - RNA, 19 nt, Artificial Sequence
  Description of Artificial Sequence: Synthetic oligonucleotide
gcggugcucucuggggcgg

SEQ ID NO: 1808302 - RNA, 19 nt, Artificial Sequence
  Description of Artificial Sequence: Synthetic oligonucleotide
gccgccuucucagccggug

SEQ ID NO: 1808303 - RNA, 19 nt, Artificial Sequence
  Description of Artificial Sequence: Synthetic oligonucleotide
gggauacgggagggcacug

SEQ ID NO: 1808304 - RNA, 19 nt, Artificial Sequence
  Description of Artificial Sequence: Synthetic oligonucleotide
ccccgccugggcagaagcc

SEQ ID NO: 1808305 - RNA, 19 nt, Artificial Sequence
  Description of Artificial Sequence: Synthetic oligonucleotide
cggucucccguuguucgcg

SEQ ID NO: 1808306 - RNA, 19 nt, Artificial Sequence
  Description of Artificial Sequence: Synthetic oligonucleotide
cagguguagcgcgccggca

SEQ ID NO: 1808307 - RNA, 19 nt, Artificial Sequence
  Description of Artificial Sequence: Synthetic oligonucleotide
ggacccucgcccagcagaa

SEQ ID NO: 1808308 - RNA, 19 nt, Artificial Sequence
  Description of Artificial Sequence: Synthetic oligonucleotide
ggucgcgguagaagucuuc

SEQ ID NO: 1808309 - RNA, 19 nt, Artificial Sequence
  Description of Artificial Sequence: Synthetic oligonucleotide
ggucuccggcuccgaaaga

SEQ ID NO: 1808310 - RNA, 19 nt, Artificial Sequence
  Description of Artificial Sequence: Synthetic oligonucleotide
gcacggcggcagcugaguc

SEQ ID NO: 1808311 - RNA, 19 nt, Artificial Sequence
  Description of Artificial Sequence: Synthetic oligonucleotide
gucucccguuguucgcgua

SEQ ID NO: 1808312 - RNA, 19 nt, Artificial Sequence
  Description of Artificial Sequence: Synthetic oligonucleotide
gcccgguaaaggcgauuuc

SEQ ID NO: 1808313 - RNA, 19 nt, Artificial Sequence
  Description of Artificial Sequence: Synthetic oligonucleotide
cagauucgggcgcggugcu

SEQ ID NO: 1808314 - RNA, 19 nt, Artificial Sequence
  Description of Artificial Sequence: Synthetic oligonucleotide
ggcggcacggcggcagcug

SEQ ID NO: 1808315 - RNA, 19 nt, Artificial Sequence
  Description of Artificial Sequence: Synthetic oligonucleotide
gcgcguugcagcgcgggca

SEQ ID NO: 1808316 - RNA, 19 nt, Artificial Sequence
  Description of Artificial Sequence: Synthetic oligonucleotide
cugucagcguguagccuuu

SEQ ID NO: 1808317 - RNA, 19 nt, Artificial Sequence
  Description of Artificial Sequence: Synthetic oligonucleotide
gcguagugcucccgccaga

SEQ ID NO: 1808318 - RNA, 19 nt, Artificial Sequence
  Description of Artificial Sequence: Synthetic oligonucleotide
agagcccuacgggcuccau

SEQ ID NO: 1808319 - RNA, 19 nt, Artificial Sequence
  Description of Artificial Sequence: Synthetic oligonucleotide
ccgccagacggcugggaga

SEQ ID NO: 1808320 - RNA, 19 nt, Artificial Sequence
  Description of Artificial Sequence: Synthetic oligonucleotide
cgauuucguucuucgcuaa

SEQ ID NO: 1808321 - RNA, 19 nt, Artificial Sequence
  Description of Artificial Sequence: Synthetic oligonucleotide
gcguguagccuuucugguu

SEQ ID NO: 1808322 - RNA, 19 nt, Artificial Sequence
  Description of Artificial Sequence: Synthetic oligonucleotide
agcgagcaguagggcgcgu

SEQ ID NO: 1808323 - RNA, 19 nt, Artificial Sequence
  Description of Artificial Sequence: Synthetic oligonucleotide
gcggcacggcggcagcuga

SEQ ID NO: 1808324 - RNA, 19 nt, Artificial Sequence
  Description of Artificial Sequence: Synthetic oligonucleotide
gcgcagcgagcaguagggc

SEQ ID NO: 1808325 - RNA, 19 nt, Artificial Sequence
  Description of Artificial Sequence: Synthetic oligonucleotide
ggcggucuccggcuccgaa

SEQ ID NO: 1808326 - RNA, 19 nt, Artificial Sequence
  Description of Artificial Sequence: Synthetic oligonucleotide
ggucucccguuguucgcgu

SEQ ID NO: 1808327 - RNA, 19 nt, Artificial Sequence
  Description of Artificial Sequence: Synthetic oligonucleotide
gcagcggcucaggcuggcc

SEQ ID NO: 1808328 - RNA, 19 nt, Artificial Sequence
  Description of Artificial Sequence: Synthetic oligonucleotide
cacccgcuuccagcacgug

SEQ ID NO: 1808329 - RNA, 19 nt, Artificial Sequence
  Description of Artificial Sequence: Synthetic oligonucleotide
ccgcggagcucucgcagca

SEQ ID NO: 1808330 - RNA, 19 nt, Artificial Sequence
  Description of Artificial Sequence: Synthetic oligonucleotide
cgcgccggcaaagcuuccc

SEQ ID NO: 1808331 - RNA, 19 nt, Artificial Sequence
  Description of Artificial Sequence: Synthetic oligonucleotide
guucggccgcgggccgggc

SEQ ID NO: 1808332 - RNA, 19 nt, Artificial Sequence
  Description of Artificial Sequence: Synthetic oligonucleotide
gccagacggcugggagagg

SEQ ID NO: 1808333 - RNA, 19 nt, Artificial Sequence
  Description of Artificial Sequence: Synthetic oligonucleotide
ccgccuucucagccgguga

SEQ ID NO: 1808334 - RNA, 19 nt, Artificial Sequence
  Description of Artificial Sequence: Synthetic oligonucleotide
cccugcccggggcacgauc

SEQ ID NO: 1808335 - RNA, 19 nt, Artificial Sequence
  Description of Artificial Sequence: Synthetic oligonucleotide
cgucgucguccccuccaug

SEQ ID NO: 1808336 - RNA, 19 nt, Artificial Sequence
  Description of Artificial Sequence: Synthetic oligonucleotide
ccccaguaaggguugccau

SEQ ID NO: 1808337 - RNA, 19 nt, Artificial Sequence
  Description of Artificial Sequence: Synthetic oligonucleotide
cguucggccgcgggccggg

SEQ ID NO: 1808338 - RNA, 19 nt, Artificial Sequence
  Description of Artificial Sequence: Synthetic oligonucleotide
gcuuccccgccugggcaga

SEQ ID NO: 1808339 - RNA, 19 nt, Artificial Sequence
  Description of Artificial Sequence: Synthetic oligonucleotide
gcaccgcggcggcaucauc

SEQ ID NO: 1808340 - RNA, 19 nt, Artificial Sequence
  Description of Artificial Sequence: Synthetic oligonucleotide
cgaguggcgagggcgggca

SEQ ID NO: 1808341 - RNA, 19 nt, Artificial Sequence
  Description of Artificial Sequence: Synthetic oligonucleotide
ccguucggccgcgggccgg

SEQ ID NO: 1808342 - RNA, 19 nt, Artificial Sequence
  Description of Artificial Sequence: Synthetic oligonucleotide
cuccggccgcggagcucuc

SEQ ID NO: 1808343 - RNA, 19 nt, Artificial Sequence
  Description of Artificial Sequence: Synthetic oligonucleotide
cuuccccgccugggcagaa

SEQ ID NO: 1808344 - RNA, 19 nt, Artificial Sequence
  Description of Artificial Sequence: Synthetic oligonucleotide
cggcguagugcucccgcca

SEQ ID NO: 1808345 - RNA, 19 nt, Artificial Sequence
  Description of Artificial Sequence: Synthetic oligonucleotide
ccggcuccgaaagaucccu

SEQ ID NO: 1808346 - RNA, 19 nt, Artificial Sequence
  Description of Artificial Sequence: Synthetic oligonucleotide
cgguaaaggcgauuucguu

SEQ ID NO: 1808347 - RNA, 19 nt, Artificial Sequence
  Description of Artificial Sequence: Synthetic oligonucleotide
cgucguccccuccaugaua

SEQ ID NO: 1808348 - RNA, 19 nt, Artificial Sequence
  Description of Artificial Sequence: Synthetic oligonucleotide
gggcgcccagggcuccaga

SEQ ID NO: 1808349 - RNA, 19 nt, Artificial Sequence
  Description of Artificial Sequence: Synthetic oligonucleotide
cguacccaagggcccaggu

SEQ ID NO: 1808350 - RNA, 19 nt, Artificial Sequence
  Description of Artificial Sequence: Synthetic oligonucleotide
cgcguacccaagggcccag

SEQ ID NO: 1808351 - RNA, 19 nt, Artificial Sequence
  Description of Artificial Sequence: Synthetic oligonucleotide
cgcggagcucucgcagcac

SEQ ID NO: 1808352 - RNA, 19 nt, Artificial Sequence
  Description of Artificial Sequence: Synthetic oligonucleotide
gcgagcaguagggcgcguu

SEQ ID NO: 1808353 - RNA, 19 nt, Artificial Sequence
  Description of Artificial Sequence: Synthetic oligonucleotide
ccacagauucgggcgcggu

SEQ ID NO: 1808354 - RNA, 19 nt, Artificial Sequence
  Description of Artificial Sequence: Synthetic oligonucleotide
cguugcagcgcgggcaggu

SEQ ID NO: 1808355 - RNA, 19 nt, Artificial Sequence
  Description of Artificial Sequence: Synthetic oligonucleotide
gcgcgccggcaaagcuucc

SEQ ID NO: 1808356 - RNA, 19 nt, Artificial Sequence
  Description of Artificial Sequence: Synthetic oligonucleotide
ggcaccgcggcggcaucau

SEQ ID NO: 1808357 - RNA, 19 nt, Artificial Sequence
  Description of Artificial Sequence: Synthetic oligonucleotide
ccgggccugaggccuauuu

SEQ ID NO: 1808358 - RNA, 19 nt, Artificial Sequence
  Description of Artificial Sequence: Synthetic oligonucleotide
gggcggucuccggcuccga

SEQ ID NO: 1808359 - RNA, 19 nt, Artificial Sequence
  Description of Artificial Sequence: Synthetic oligonucleotide
cgcuuccagcacgugggcu

SEQ ID NO: 1808360 - RNA, 19 nt, Artificial Sequence
  Description of Artificial Sequence: Synthetic oligonucleotide
gccgggccugaggccuauu

SEQ ID NO: 1808361 - RNA, 19 nt, Artificial Sequence
  Description of Artificial Sequence: Synthetic oligonucleotide
aaaagucacagccuuaccc

SEQ ID NO: 1808362 - RNA, 19 nt, Artificial Sequence
  Description of Artificial Sequence: Synthetic oligonucleotide
aacuuuggcaaauuaauac

SEQ ID NO: 1808363 - RNA, 19 nt, Artificial Sequence
  Description of Artificial Sequence: Synthetic oligonucleotide
uuuuauacaaauuaauggc

SEQ ID NO: 1808364 - RNA, 19 nt, Artificial Sequence
  Description of Artificial Sequence: Synthetic oligonucleotide
agaaauaauagacucuacc

SEQ ID NO: 1808365 - RNA, 19 nt, Artificial Sequence
  Description of Artificial Sequence: Synthetic oligonucleotide
uugaucaaaagucacagcc

SEQ ID NO: 1808366 - RNA, 19 nt, Artificial Sequence
  Description of Artificial Sequence: Synthetic oligonucleotide
aauaagagacuucacaaug

SEQ ID NO: 1808367 - RNA, 19 nt, Artificial Sequence
  Description of Artificial Sequence: Synthetic oligonucleotide
uuuacuaagucacaaaacu

SEQ ID NO: 1808368 - RNA, 19 nt, Artificial Sequence
  Description of Artificial Sequence: Synthetic oligonucleotide
uaucuuuuaaauaacaaau

SEQ ID NO: 1808369 - RNA, 19 nt, Artificial Sequence
  Description of Artificial Sequence: Synthetic oligonucleotide
uuuucaguuaacauaacca

SEQ ID NO: 1808370 - RNA, 19 nt, Artificial Sequence
  Description of Artificial Sequence: Synthetic oligonucleotide
aaugccuuuacuaagucac

SEQ ID NO: 1808371 - RNA, 19 nt, Artificial Sequence
  Description of Artificial Sequence: Synthetic oligonucleotide
ugcgaaaucacaaaguaca

SEQ ID NO: 1808372 - RNA, 19 nt, Artificial Sequence
  Description of Artificial Sequence: Synthetic oligonucleotide
uuuaaaguugaguuccucg

SEQ ID NO: 1808373 - RNA, 19 nt, Artificial Sequence
  Description of Artificial Sequence: Synthetic oligonucleotide
aaccauuucccauggaugg

SEQ ID NO: 1808374 - RNA, 19 nt, Artificial Sequence
  Description of Artificial Sequence: Synthetic oligonucleotide
aauaauagacucuaccuaa

SEQ ID NO: 1808375 - RNA, 19 nt, Artificial Sequence
  Description of Artificial Sequence: Synthetic oligonucleotide
aauucaaggaagggaaugc

SEQ ID NO: 1808376 - RNA, 19 nt, Artificial Sequence
  Description of Artificial Sequence: Synthetic oligonucleotide
uuucaguuaacauaaccag

SEQ ID NO: 1808377 - RNA, 19 nt, Artificial Sequence
  Description of Artificial Sequence: Synthetic oligonucleotide
uuauggaucacccauucca

SEQ ID NO: 1808378 - RNA, 19 nt, Artificial Sequence
  Description of Artificial Sequence: Synthetic oligonucleotide
uagacucuaccuaaaauag

SEQ ID NO: 1808379 - RNA, 19 nt, Artificial Sequence
  Description of Artificial Sequence: Synthetic oligonucleotide
auauuuguaaaugagauau

SEQ ID NO: 1808380 - RNA, 19 nt, Artificial Sequence
  Description of Artificial Sequence: Synthetic oligonucleotide
uuguaaaugagauauuggu

SEQ ID NO: 1808381 - RNA, 19 nt, Artificial Sequence
  Description of Artificial Sequence: Synthetic oligonucleotide
aaauuaauacaguacccgu

SEQ ID NO: 1808382 - RNA, 19 nt, Artificial Sequence
  Description of Artificial Sequence: Synthetic oligonucleotide
auauugguggacuugagcu

SEQ ID NO: 1808383 - RNA, 19 nt, Artificial Sequence
  Description of Artificial Sequence: Synthetic oligonucleotide
aaauaauagacucuaccua

SEQ ID NO: 1808384 - RNA, 19 nt, Artificial Sequence
  Description of Artificial Sequence: Synthetic oligonucleotide
ggcauuugaaauuauacag

SEQ ID NO: 1808385 - RNA, 19 nt, Artificial Sequence
  Description of Artificial Sequence: Synthetic oligonucleotide
uuuugcuggagucauauau

SEQ ID NO: 1808386 - RNA, 19 nt, Artificial Sequence
  Description of Artificial Sequence: Synthetic oligonucleotide
caaauuaauacaguacccg

SEQ ID NO: 1808387 - RNA, 19 nt, Artificial Sequence
  Description of Artificial Sequence: Synthetic oligonucleotide
gagacuucacaauggaagg

SEQ ID NO: 1808388 - RNA, 19 nt, Artificial Sequence
  Description of Artificial Sequence: Synthetic oligonucleotide
agggcaaguuauuuuauac

SEQ ID NO: 1808389 - RNA, 19 nt, Artificial Sequence
  Description of Artificial Sequence: Synthetic oligonucleotide
auacaguacccguuaauac

SEQ ID NO: 1808390 - RNA, 19 nt, Artificial Sequence
  Description of Artificial Sequence: Synthetic oligonucleotide
ucuugcggcaccaauaaga

SEQ ID NO: 1808391 - RNA, 19 nt, Artificial Sequence
  Description of Artificial Sequence: Synthetic oligonucleotide
uucaguuaacauaaccagc

SEQ ID NO: 1808392 - RNA, 19 nt, Artificial Sequence
  Description of Artificial Sequence: Synthetic oligonucleotide
aaguacaaauucaaggaag

SEQ ID NO: 1808393 - RNA, 19 nt, Artificial Sequence
  Description of Artificial Sequence: Synthetic oligonucleotide
ggcaaauuaauacaguacc

SEQ ID NO: 1808394 - RNA, 19 nt, Artificial Sequence
  Description of Artificial Sequence: Synthetic oligonucleotide
gacucuaccuaaaauagcc

SEQ ID NO: 1808395 - RNA, 19 nt, Artificial Sequence
  Description of Artificial Sequence: Synthetic oligonucleotide
aaagacgugcuccgaaguc

SEQ ID NO: 1808396 - RNA, 19 nt, Artificial Sequence
  Description of Artificial Sequence: Synthetic oligonucleotide
caugaguccuucaagguag

SEQ ID NO: 1808397 - RNA, 19 nt, Artificial Sequence
  Description of Artificial Sequence: Synthetic oligonucleotide
agagacuucacaauggaag

SEQ ID NO: 1808398 - RNA, 19 nt, Artificial Sequence
  Description of Artificial Sequence: Synthetic oligonucleotide
aagacgugcuccgaagucc

SEQ ID NO: 1808399 - RNA, 19 nt, Artificial Sequence
  Description of Artificial Sequence: Synthetic oligonucleotide
aguacaaauucaaggaagg

SEQ ID NO: 1808400 - RNA, 19 nt, Artificial Sequence
  Description of Artificial Sequence: Synthetic oligonucleotide
uacaaauucaaggaaggga

SEQ ID NO: 1808401 - RNA, 19 nt, Artificial Sequence
  Description of Artificial Sequence: Synthetic oligonucleotide
uaaccauuucccauggaug

SEQ ID NO: 1808402 - RNA, 19 nt, Artificial Sequence
  Description of Artificial Sequence: Synthetic oligonucleotide
aacgaggcacaguacuucg

SEQ ID NO: 1808403 - RNA, 19 nt, Artificial Sequence
  Description of Artificial Sequence: Synthetic oligonucleotide
ucaagguagcugcugaggc

SEQ ID NO: 1808404 - RNA, 19 nt, Artificial Sequence
  Description of Artificial Sequence: Synthetic oligonucleotide
aagucuucaaucucagcgu

SEQ ID NO: 1808405 - RNA, 19 nt, Artificial Sequence
  Description of Artificial Sequence: Synthetic oligonucleotide
gaagauauggugcuugcca

SEQ ID NO: 1808406 - RNA, 19 nt, Artificial Sequence
  Description of Artificial Sequence: Synthetic oligonucleotide
aaugagauauugguggacu

SEQ ID NO: 1808407 - RNA, 19 nt, Artificial Sequence
  Description of Artificial Sequence: Synthetic oligonucleotide
uaacauaaccagcccacag

SEQ ID NO: 1808408 - RNA, 19 nt, Artificial Sequence
  Description of Artificial Sequence: Synthetic oligonucleotide
aaaugagauauugguggac

SEQ ID NO: 1808409 - RNA, 19 nt, Artificial Sequence
  Description of Artificial Sequence: Synthetic oligonucleotide
ucacaaaguacaaauucaa

SEQ ID NO: 1808410 - RNA, 19 nt, Artificial Sequence
  Description of Artificial Sequence: Synthetic oligonucleotide
cuaagucacaaaacuuugg

SEQ ID NO: 1808411 - RNA, 19 nt, Artificial Sequence
  Description of Artificial Sequence: Synthetic oligonucleotide
uaagagacuucacaaugga

SEQ ID NO: 1808412 - RNA, 19 nt, Artificial Sequence
  Description of Artificial Sequence: Synthetic oligonucleotide
uuguaugugagccucucgu

SEQ ID NO: 1808413 - RNA, 19 nt, Artificial Sequence
  Description of Artificial Sequence: Synthetic oligonucleotide
aaauaugaugucagcuugg

SEQ ID NO: 1808414 - RNA, 19 nt, Artificial Sequence
  Description of Artificial Sequence: Synthetic oligonucleotide
agacaguuuucucuggguc

SEQ ID NO: 1808415 - RNA, 19 nt, Artificial Sequence
  Description of Artificial Sequence: Synthetic oligonucleotide
uggcaaauuaauacaguac

SEQ ID NO: 1808416 - RNA, 19 nt, Artificial Sequence
  Description of Artificial Sequence: Synthetic oligonucleotide
agccguaucuuuuaaauaa

SEQ ID NO: 1808417 - RNA, 19 nt, Artificial Sequence
  Description of Artificial Sequence: Synthetic oligonucleotide
agcaugcgaaaucacaaag

SEQ ID NO: 1808418 - RNA, 19 nt, Artificial Sequence
  Description of Artificial Sequence: Synthetic oligonucleotide
aauacaguacccguuaaua

SEQ ID NO: 1808419 - RNA, 19 nt, Artificial Sequence
  Description of Artificial Sequence: Synthetic oligonucleotide
acaaauuaauggcauuuga

SEQ ID NO: 1808420 - RNA, 19 nt, Artificial Sequence
  Description of Artificial Sequence: Synthetic oligonucleotide
aagagggcaaguuauuuua

SEQ ID NO: 1808421 - RNA, 19 nt, Artificial Sequence
  Description of Artificial Sequence: Synthetic oligonucleotide
aguuaacauaaccagccca

SEQ ID NO: 1808422 - RNA, 19 nt, Artificial Sequence
  Description of Artificial Sequence: Synthetic oligonucleotide
ucaacgcccacuacacugg

SEQ ID NO: 1808423 - RNA, 19 nt, Artificial Sequence
  Description of Artificial Sequence: Synthetic oligonucleotide
aaaauagccguaucuuuua

SEQ ID NO: 1808424 - RNA, 19 nt, Artificial Sequence
  Description of Artificial Sequence: Synthetic oligonucleotide
uaaaugagauauuggugga

SEQ ID NO: 1808425 - RNA, 19 nt, Artificial Sequence
  Description of Artificial Sequence: Synthetic oligonucleotide
auagccguaucuuuuaaau

SEQ ID NO: 1808426 - RNA, 19 nt, Artificial Sequence
  Description of Artificial Sequence: Synthetic oligonucleotide
ucaccuuagugcuaauuug

SEQ ID NO: 1808427 - RNA, 19 nt, Artificial Sequence
  Description of Artificial Sequence: Synthetic oligonucleotide
uuggcaaauuaauacagua

SEQ ID NO: 1808428 - RNA, 19 nt, Artificial Sequence
  Description of Artificial Sequence: Synthetic oligonucleotide
uggauggucaaagacgugc

SEQ ID NO: 1808429 - RNA, 19 nt, Artificial Sequence
  Description of Artificial Sequence: Synthetic oligonucleotide
uggaucacccauuccauug

SEQ ID NO: 1808430 - RNA, 19 nt, Artificial Sequence
  Description of Artificial Sequence: Synthetic oligonucleotide
uaccgggucgaccacagag

SEQ ID NO: 1808431 - RNA, 19 nt, Artificial Sequence
  Description of Artificial Sequence: Synthetic oligonucleotide
ucaaagacgugcuccgaag

SEQ ID NO: 1808432 - RNA, 19 nt, Artificial Sequence
  Description of Artificial Sequence: Synthetic oligonucleotide
uuuguuagcauuggaagau

SEQ ID NO: 1808433 - RNA, 19 nt, Artificial Sequence
  Description of Artificial Sequence: Synthetic oligonucleotide
gaccauauuuguaaaugag

SEQ ID NO: 1808434 - RNA, 19 nt, Artificial Sequence
  Description of Artificial Sequence: Synthetic oligonucleotide
uuugaucaaaagucacagc

SEQ ID NO: 1808435 - RNA, 19 nt, Artificial Sequence
  Description of Artificial Sequence: Synthetic oligonucleotide
uacccguuaauacaauuaa

SEQ ID NO: 1808436 - RNA, 19 nt, Artificial Sequence
  Description of Artificial Sequence: Synthetic oligonucleotide
caccuuagugcuaauuugc

SEQ ID NO: 1808437 - RNA, 19 nt, Artificial Sequence
  Description of Artificial Sequence: Synthetic oligonucleotide
cuugcggcaccaauaagag

SEQ ID NO: 1808438 - RNA, 19 nt, Artificial Sequence
  Description of Artificial Sequence: Synthetic oligonucleotide
agaccauauuuguaaauga

SEQ ID NO: 1808439 - RNA, 19 nt, Artificial Sequence
  Description of Artificial Sequence: Synthetic oligonucleotide
uugcuggagucauauauca

SEQ ID NO: 1808440 - RNA, 19 nt, Artificial Sequence
  Description of Artificial Sequence: Synthetic oligonucleotide
aggcugaccccuuucacgg

SEQ ID NO: 1808441 - RNA, 19 nt, Artificial Sequence
  Description of Artificial Sequence: Synthetic oligonucleotide
uuaauggcauuugaaauua

SEQ ID NO: 1808442 - RNA, 19 nt, Artificial Sequence
  Description of Artificial Sequence: Synthetic oligonucleotide
uuuauggaucacccauucc

SEQ ID NO: 1808443 - RNA, 19 nt, Artificial Sequence
  Description of Artificial Sequence: Synthetic oligonucleotide
uacaaauuaauggcauuug

SEQ ID NO: 1808444 - RNA, 19 nt, Artificial Sequence
  Description of Artificial Sequence: Synthetic oligonucleotide
acagccuuaccccagcuca

SEQ ID NO: 1808445 - RNA, 19 nt, Artificial Sequence
  Description of Artificial Sequence: Synthetic oligonucleotide
uucaaggaagggaaugccu

SEQ ID NO: 1808446 - RNA, 19 nt, Artificial Sequence
  Description of Artificial Sequence: Synthetic oligonucleotide
aguacagcaugcgaaauca

SEQ ID NO: 1808447 - RNA, 19 nt, Artificial Sequence
  Description of Artificial Sequence: Synthetic oligonucleotide
aauaugaugucagcuugga

SEQ ID NO: 1808448 - RNA, 19 nt, Artificial Sequence
  Description of Artificial Sequence: Synthetic oligonucleotide
uucaagguagcugcugagg

SEQ ID NO: 1808449 - RNA, 19 nt, Artificial Sequence
  Description of Artificial Sequence: Synthetic oligonucleotide
gucaacgcccacuacacug

SEQ ID NO: 1808450 - RNA, 19 nt, Artificial Sequence
  Description of Artificial Sequence: Synthetic oligonucleotide
uuuaccgggucgaccacag

SEQ ID NO: 1808451 - RNA, 19 nt, Artificial Sequence
  Description of Artificial Sequence: Synthetic oligonucleotide
guuaacauaaccagcccac

SEQ ID NO: 1808452 - RNA, 19 nt, Artificial Sequence
  Description of Artificial Sequence: Synthetic oligonucleotide
agggaaugccuuuacuaag

SEQ ID NO: 1808453 - RNA, 19 nt, Artificial Sequence
  Description of Artificial Sequence: Synthetic oligonucleotide
gcuggagucauauaucacc

SEQ ID NO: 1808454 - RNA, 19 nt, Artificial Sequence
  Description of Artificial Sequence: Synthetic oligonucleotide
uauggugcuugccaugagu

SEQ ID NO: 1808455 - RNA, 19 nt, Artificial Sequence
  Description of Artificial Sequence: Synthetic oligonucleotide
uucacggugaugauggcuu

SEQ ID NO: 1808456 - RNA, 19 nt, Artificial Sequence
  Description of Artificial Sequence: Synthetic oligonucleotide
ucugguugguccauaccca

SEQ ID NO: 1808457 - RNA, 19 nt, Artificial Sequence
  Description of Artificial Sequence: Synthetic oligonucleotide
cacagagugcuccugcacg

SEQ ID NO: 1808458 - RNA, 19 nt, Artificial Sequence
  Description of Artificial Sequence: Synthetic oligonucleotide
aaguugaguuccucgggca

SEQ ID NO: 1808459 - RNA, 19 nt, Artificial Sequence
  Description of Artificial Sequence: Synthetic oligonucleotide
ucuaccuaaaauagccgua

SEQ ID NO: 1808460 - RNA, 19 nt, Artificial Sequence
  Description of Artificial Sequence: Synthetic oligonucleotide
uuuccaagagggcaaguua

SEQ ID NO: 1808461 - RNA, 19 nt, Artificial Sequence
  Description of Artificial Sequence: Synthetic oligonucleotide
aauuaauacaguacccguu

SEQ ID NO: 1808462 - RNA, 19 nt, Artificial Sequence
  Description of Artificial Sequence: Synthetic oligonucleotide
caagacaguuuucucuggg

SEQ ID NO: 1808463 - RNA, 19 nt, Artificial Sequence
  Description of Artificial Sequence: Synthetic oligonucleotide
ugcggcuuguaugugagcc

SEQ ID NO: 1808464 - RNA, 19 nt, Artificial Sequence
  Description of Artificial Sequence: Synthetic oligonucleotide
ucggccuuuguuagcauug

SEQ ID NO: 1808465 - RNA, 19 nt, Artificial Sequence
  Description of Artificial Sequence: Synthetic oligonucleotide
agugcuaauuugcacucca

SEQ ID NO: 1808466 - RNA, 19 nt, Artificial Sequence
  Description of Artificial Sequence: Synthetic oligonucleotide
caaauuaauggcauuugaa

SEQ ID NO: 1808467 - RNA, 19 nt, Artificial Sequence
  Description of Artificial Sequence: Synthetic oligonucleotide
agucauauaucaccuuagu

SEQ ID NO: 1808468 - RNA, 19 nt, Artificial Sequence
  Description of Artificial Sequence: Synthetic oligonucleotide
uguuagcauuggaagauau

SEQ ID NO: 1808469 - RNA, 19 nt, Artificial Sequence
  Description of Artificial Sequence: Synthetic oligonucleotide
ccauggauggucaaagacg

SEQ ID NO: 1808470 - RNA, 19 nt, Artificial Sequence
  Description of Artificial Sequence: Synthetic oligonucleotide
cauauaucaccuuagugcu

SEQ ID NO: 1808471 - RNA, 19 nt, Artificial Sequence
  Description of Artificial Sequence: Synthetic oligonucleotide
uguucuugcggcaccaaua

SEQ ID NO: 1808472 - RNA, 19 nt, Artificial Sequence
  Description of Artificial Sequence: Synthetic oligonucleotide
uguccagcacgucaacgcc

SEQ ID NO: 1808473 - RNA, 19 nt, Artificial Sequence
  Description of Artificial Sequence: Synthetic oligonucleotide
uagcauuggaagauauggu

SEQ ID NO: 1808474 - RNA, 19 nt, Artificial Sequence
  Description of Artificial Sequence: Synthetic oligonucleotide
cuuagugcuaauuugcacu

SEQ ID NO: 1808475 - RNA, 19 nt, Artificial Sequence
  Description of Artificial Sequence: Synthetic oligonucleotide
agacucuaccuaaaauagc

SEQ ID NO: 1808476 - RNA, 19 nt, Artificial Sequence
  Description of Artificial Sequence: Synthetic oligonucleotide
aggcacaguacuucgccgg

SEQ ID NO: 1808477 - RNA, 19 nt, Artificial Sequence
  Description of Artificial Sequence: Synthetic oligonucleotide
uuaauacaguacccguuaa

SEQ ID NO: 1808478 - RNA, 19 nt, Artificial Sequence
  Description of Artificial Sequence: Synthetic oligonucleotide
acuaagucacaaaacuuug

SEQ ID NO: 1808479 - RNA, 19 nt, Artificial Sequence
  Description of Artificial Sequence: Synthetic oligonucleotide
cagauacuguuccaguccc

SEQ ID NO: 1808480 - RNA, 19 nt, Artificial Sequence
  Description of Artificial Sequence: Synthetic oligonucleotide
ucaguuuauggaucaccca

SEQ ID NO: 1808481 - RNA, 19 nt, Artificial Sequence
  Description of Artificial Sequence: Synthetic oligonucleotide
uguguggacuugagggcgg

SEQ ID NO: 1808482 - RNA, 19 nt, Artificial Sequence
  Description of Artificial Sequence: Synthetic oligonucleotide
gagucauauaucaccuuag

SEQ ID NO: 1808483 - RNA, 19 nt, Artificial Sequence
  Description of Artificial Sequence: Synthetic oligonucleotide
agagugcuccugcacguac

SEQ ID NO: 1808484 - RNA, 19 nt, Artificial Sequence
  Description of Artificial Sequence: Synthetic oligonucleotide
uaauacaguacccguuaau

SEQ ID NO: 1808485 - RNA, 19 nt, Artificial Sequence
  Description of Artificial Sequence: Synthetic oligonucleotide
uccgaaguccagaucuuca

SEQ ID NO: 1808486 - RNA, 19 nt, Artificial Sequence
  Description of Artificial Sequence: Synthetic oligonucleotide
uggacuugagcuccauugu

SEQ ID NO: 1808487 - RNA, 19 nt, Artificial Sequence
  Description of Artificial Sequence: Synthetic oligonucleotide
aaguccagaucuucauggu

SEQ ID NO: 1808488 - RNA, 19 nt, Artificial Sequence
  Description of Artificial Sequence: Synthetic oligonucleotide
augcgaaaucacaaaguac

SEQ ID NO: 1808489 - RNA, 19 nt, Artificial Sequence
  Description of Artificial Sequence: Synthetic oligonucleotide
uucugcauugcagccgugg

SEQ ID NO: 1808490 - RNA, 19 nt, Artificial Sequence
  Description of Artificial Sequence: Synthetic oligonucleotide
guuuauggaucacccauuc

SEQ ID NO: 1808491 - RNA, 19 nt, Artificial Sequence
  Description of Artificial Sequence: Synthetic oligonucleotide
ugggucaagacaguuuucu

SEQ ID NO: 1808492 - RNA, 19 nt, Artificial Sequence
  Description of Artificial Sequence: Synthetic oligonucleotide
acauaaccagcccacagua

SEQ ID NO: 1808493 - RNA, 19 nt, Artificial Sequence
  Description of Artificial Sequence: Synthetic oligonucleotide
uggaagauauggugcuugc

SEQ ID NO: 1808494 - RNA, 19 nt, Artificial Sequence
  Description of Artificial Sequence: Synthetic oligonucleotide
cuacacugggauucauggg

SEQ ID NO: 1808495 - RNA, 19 nt, Artificial Sequence
  Description of Artificial Sequence: Synthetic oligonucleotide
ucgucuacugagaccauau

SEQ ID NO: 1808496 - RNA, 19 nt, Artificial Sequence
  Description of Artificial Sequence: Synthetic oligonucleotide
uggacuugagggcggccgg

SEQ ID NO: 1808497 - RNA, 19 nt, Artificial Sequence
  Description of Artificial Sequence: Synthetic oligonucleotide
uguaugugagccucucguc

SEQ ID NO: 1808498 - RNA, 19 nt, Artificial Sequence
  Description of Artificial Sequence: Synthetic oligonucleotide
aauggcauuugaaauuaua

SEQ ID NO: 1808499 - RNA, 19 nt, Artificial Sequence
  Description of Artificial Sequence: Synthetic oligonucleotide
gauauggugcuugccauga

SEQ ID NO: 1808500 - RNA, 19 nt, Artificial Sequence
  Description of Artificial Sequence: Synthetic oligonucleotide
auggugcuugccaugaguc

SEQ ID NO: 1808501 - RNA, 19 nt, Artificial Sequence
  Description of Artificial Sequence: Synthetic oligonucleotide
uuaacauaaccagcccaca

SEQ ID NO: 1808502 - RNA, 19 nt, Artificial Sequence
  Description of Artificial Sequence: Synthetic oligonucleotide
ugagccucucgucuacuga

SEQ ID NO: 1808503 - RNA, 19 nt, Artificial Sequence
  Description of Artificial Sequence: Synthetic oligonucleotide
agauauggugcuugccaug

SEQ ID NO: 1808504 - RNA, 19 nt, Artificial Sequence
  Description of Artificial Sequence: Synthetic oligonucleotide
caugcgaaaucacaaagua

SEQ ID NO: 1808505 - RNA, 19 nt, Artificial Sequence
  Description of Artificial Sequence: Synthetic oligonucleotide
ugcuucucggccuuuguua

SEQ ID NO: 1808506 - RNA, 19 nt, Artificial Sequence
  Description of Artificial Sequence: Synthetic oligonucleotide
acucuaccuaaaauagccg

SEQ ID NO: 1808507 - RNA, 19 nt, Artificial Sequence
  Description of Artificial Sequence: Synthetic oligonucleotide
gacaacgaggcacaguacu

SEQ ID NO: 1808508 - RNA, 19 nt, Artificial Sequence
  Description of Artificial Sequence: Synthetic oligonucleotide
uuccauugcuucucggccu

SEQ ID NO: 1808509 - RNA, 19 nt, Artificial Sequence
  Description of Artificial Sequence: Synthetic oligonucleotide
cuguguggacuugagggcg

SEQ ID NO: 1808510 - RNA, 19 nt, Artificial Sequence
  Description of Artificial Sequence: Synthetic oligonucleotide
gcaaauuaauacaguaccc

SEQ ID NO: 1808511 - RNA, 19 nt, Artificial Sequence
  Description of Artificial Sequence: Synthetic oligonucleotide
auugcagccgugguaacca

SEQ ID NO: 1808512 - RNA, 19 nt, Artificial Sequence
  Description of Artificial Sequence: Synthetic oligonucleotide
ccuuucuucugguuggucc

SEQ ID NO: 1808513 - RNA, 19 nt, Artificial Sequence
  Description of Artificial Sequence: Synthetic oligonucleotide
acaguacuucgccggcccc

SEQ ID NO: 1808514 - RNA, 19 nt, Artificial Sequence
  Description of Artificial Sequence: Synthetic oligonucleotide
uccauacccagauacuguu

SEQ ID NO: 1808515 - RNA, 19 nt, Artificial Sequence
  Description of Artificial Sequence: Synthetic oligonucleotide
acgucaacgcccacuacac

SEQ ID NO: 1808516 - RNA, 19 nt, Artificial Sequence
  Description of Artificial Sequence: Synthetic oligonucleotide
cauggauggucaaagacgu

SEQ ID NO: 1808517 - RNA, 19 nt, Artificial Sequence
  Description of Artificial Sequence: Synthetic oligonucleotide
ugcuccugcacguacguuu

SEQ ID NO: 1808518 - RNA, 19 nt, Artificial Sequence
  Description of Artificial Sequence: Synthetic oligonucleotide
gaccacagagugcuccugc

SEQ ID NO: 1808519 - RNA, 19 nt, Artificial Sequence
  Description of Artificial Sequence: Synthetic oligonucleotide
caaaagucacagccuuacc

SEQ ID NO: 1808520 - RNA, 19 nt, Artificial Sequence
  Description of Artificial Sequence: Synthetic oligonucleotide
uacugagaccauauuugua

SEQ ID NO: 1808521 - RNA, 19 nt, Artificial Sequence
  Description of Artificial Sequence: Synthetic oligonucleotide
uaugugagccucucgucua

SEQ ID NO: 1808522 - RNA, 19 nt, Artificial Sequence
  Description of Artificial Sequence: Synthetic oligonucleotide
uuucacggugaugauggcu

SEQ ID NO: 1808523 - RNA, 19 nt, Artificial Sequence
  Description of Artificial Sequence: Synthetic oligonucleotide
gauucaugggguuggggua

SEQ ID NO: 1808524 - RNA, 19 nt, Artificial Sequence
  Description of Artificial Sequence: Synthetic oligonucleotide
acagagugcuccugcacgu

SEQ ID NO: 1808525 - RNA, 19 nt, Artificial Sequence
  Description of Artificial Sequence: Synthetic oligonucleotide
cacaguacuucgccggccc

SEQ ID NO: 1808526 - RNA, 19 nt, Artificial Sequence
  Description of Artificial Sequence: Synthetic oligonucleotide
uucuugcggcaccaauaag

SEQ ID NO: 1808527 - RNA, 19 nt, Artificial Sequence
  Description of Artificial Sequence: Synthetic oligonucleotide
guuagcauuggaagauaug

SEQ ID NO: 1808528 - RNA, 19 nt, Artificial Sequence
  Description of Artificial Sequence: Synthetic oligonucleotide
ugguccauacccagauacu

SEQ ID NO: 1808529 - RNA, 19 nt, Artificial Sequence
  Description of Artificial Sequence: Synthetic oligonucleotide
gcauuggaagauauggugc

SEQ ID NO: 1808530 - RNA, 19 nt, Artificial Sequence
  Description of Artificial Sequence: Synthetic oligonucleotide
aguacuucgccggccccgc

SEQ ID NO: 1808531 - RNA, 19 nt, Artificial Sequence
  Description of Artificial Sequence: Synthetic oligonucleotide
guaaccauuucccauggau

SEQ ID NO: 1808532 - RNA, 19 nt, Artificial Sequence
  Description of Artificial Sequence: Synthetic oligonucleotide
acagcaugcgaaaucacaa

SEQ ID NO: 1808533 - RNA, 19 nt, Artificial Sequence
  Description of Artificial Sequence: Synthetic oligonucleotide
cauaaccagcccacaguac

SEQ ID NO: 1808534 - RNA, 19 nt, Artificial Sequence
  Description of Artificial Sequence: Synthetic oligonucleotide
aguacccguuaauacaauu

SEQ ID NO: 1808535 - RNA, 19 nt, Artificial Sequence
  Description of Artificial Sequence: Synthetic oligonucleotide
ccaauaagagacuucacaa

SEQ ID NO: 1808536 - RNA, 19 nt, Artificial Sequence
  Description of Artificial Sequence: Synthetic oligonucleotide
uaccuaaaauagccguauc

SEQ ID NO: 1808537 - RNA, 19 nt, Artificial Sequence
  Description of Artificial Sequence: Synthetic oligonucleotide
uagccguaucuuuuaaaua

SEQ ID NO: 1808538 - RNA, 19 nt, Artificial Sequence
  Description of Artificial Sequence: Synthetic oligonucleotide
acaguuuucucuggguccu

SEQ ID NO: 1808539 - RNA, 19 nt, Artificial Sequence
  Description of Artificial Sequence: Synthetic oligonucleotide
acaguacccguuaauacaa

SEQ ID NO: 1808540 - RNA, 19 nt, Artificial Sequence
  Description of Artificial Sequence: Synthetic oligonucleotide
guucuugcggcaccaauaa

SEQ ID NO: 1808541 - RNA, 19 nt, Artificial Sequence
  Description of Artificial Sequence: Synthetic oligonucleotide
cacuacacugggauucaug

SEQ ID NO: 1808542 - RNA, 19 nt, Artificial Sequence
  Description of Artificial Sequence: Synthetic oligonucleotide
ugccuuuacuaagucacaa

SEQ ID NO: 1808543 - RNA, 19 nt, Artificial Sequence
  Description of Artificial Sequence: Synthetic oligonucleotide
acgcccacuacacugggau

SEQ ID NO: 1808544 - RNA, 19 nt, Artificial Sequence
  Description of Artificial Sequence: Synthetic oligonucleotide
cuucugguugguccauacc

SEQ ID NO: 1808545 - RNA, 19 nt, Artificial Sequence
  Description of Artificial Sequence: Synthetic oligonucleotide
aagagacuucacaauggaa

SEQ ID NO: 1808546 - RNA, 19 nt, Artificial Sequence
  Description of Artificial Sequence: Synthetic oligonucleotide
cuucuuuaccgggucgacc

SEQ ID NO: 1808547 - RNA, 19 nt, Artificial Sequence
  Description of Artificial Sequence: Synthetic oligonucleotide
cacgucaacgcccacuaca

SEQ ID NO: 1808548 - RNA, 19 nt, Artificial Sequence
  Description of Artificial Sequence: Synthetic oligonucleotide
acagcagcgggcaacugug

SEQ ID NO: 1808549 - RNA, 19 nt, Artificial Sequence
  Description of Artificial Sequence: Synthetic oligonucleotide
acugggauucaugggguug

SEQ ID NO: 1808550 - RNA, 19 nt, Artificial Sequence
  Description of Artificial Sequence: Synthetic oligonucleotide
cccguuaauacaauuaaaa

SEQ ID NO: 1808551 - RNA, 19 nt, Artificial Sequence
  Description of Artificial Sequence: Synthetic oligonucleotide
cauuggaagauauggugcu

SEQ ID NO: 1808552 - RNA, 19 nt, Artificial Sequence
  Description of Artificial Sequence: Synthetic oligonucleotide
gggacaacgaggcacagua

SEQ ID NO: 1808553 - RNA, 19 nt, Artificial Sequence
  Description of Artificial Sequence: Synthetic oligonucleotide
agcacgucaacgcccacua

SEQ ID NO: 1808554 - RNA, 19 nt, Artificial Sequence
  Description of Artificial Sequence: Synthetic oligonucleotide
cauugcagccgugguaacc

SEQ ID NO: 1808555 - RNA, 19 nt, Artificial Sequence
  Description of Artificial Sequence: Synthetic oligonucleotide
augagauauugguggacuu

SEQ ID NO: 1808556 - RNA, 19 nt, Artificial Sequence
  Description of Artificial Sequence: Synthetic oligonucleotide
cucuaccuaaaauagccgu

SEQ ID NO: 1808557 - RNA, 19 nt, Artificial Sequence
  Description of Artificial Sequence: Synthetic oligonucleotide
uaauggcauuugaaauuau

SEQ ID NO: 1808558 - RNA, 19 nt, Artificial Sequence
  Description of Artificial Sequence: Synthetic oligonucleotide
auauggugcuugccaugag

SEQ ID NO: 1808559 - RNA, 19 nt, Artificial Sequence
  Description of Artificial Sequence: Synthetic oligonucleotide
ugaugcugccaagucuuca

SEQ ID NO: 1808560 - RNA, 19 nt, Artificial Sequence
  Description of Artificial Sequence: Synthetic oligonucleotide
auaauagacucuaccuaaa

SEQ ID NO: 1808561 - RNA, 19 nt, Artificial Sequence
  Description of Artificial Sequence: Synthetic oligonucleotide
ccauugucuucuuuaccgg

SEQ ID NO: 1808562 - RNA, 19 nt, Artificial Sequence
  Description of Artificial Sequence: Synthetic oligonucleotide
ucccgggacaacgaggcac

SEQ ID NO: 1808563 - RNA, 19 nt, Artificial Sequence
  Description of Artificial Sequence: Synthetic oligonucleotide
guaugugagccucucgucu

SEQ ID NO: 1808564 - RNA, 19 nt, Artificial Sequence
  Description of Artificial Sequence: Synthetic oligonucleotide
ucgaccacagagugcuccu

SEQ ID NO: 1808565 - RNA, 19 nt, Artificial Sequence
  Description of Artificial Sequence: Synthetic oligonucleotide
gucgaccacagagugcucc

SEQ ID NO: 1808566 - RNA, 19 nt, Artificial Sequence
  Description of Artificial Sequence: Synthetic oligonucleotide
augaguccuucaagguagc

SEQ ID NO: 1808567 - RNA, 19 nt, Artificial Sequence
  Description of Artificial Sequence: Synthetic oligonucleotide
ucccauggauggucaaaga

SEQ ID NO: 1808568 - RNA, 19 nt, Artificial Sequence
  Description of Artificial Sequence: Synthetic oligonucleotide
ucuuuaccgggucgaccac

SEQ ID NO: 1808569 - RNA, 19 nt, Artificial Sequence
  Description of Artificial Sequence: Synthetic oligonucleotide
uagugcuaauuugcacucc

SEQ ID NO: 1808570 - RNA, 19 nt, Artificial Sequence
  Description of Artificial Sequence: Synthetic oligonucleotide
uggugccagccgcugcgcg

SEQ ID NO: 1808571 - RNA, 19 nt, Artificial Sequence
  Description of Artificial Sequence: Synthetic oligonucleotide
ccuuuacuaagucacaaaa

SEQ ID NO: 1808572 - RNA, 19 nt, Artificial Sequence
  Description of Artificial Sequence: Synthetic oligonucleotide
cuuaccccagcucauuaaa

SEQ ID NO: 1808573 - RNA, 19 nt, Artificial Sequence
  Description of Artificial Sequence: Synthetic oligonucleotide
accacagagugcuccugca

SEQ ID NO: 1808574 - RNA, 19 nt, Artificial Sequence
  Description of Artificial Sequence: Synthetic oligonucleotide
caccaauaagagacuucac

SEQ ID NO: 1808575 - RNA, 19 nt, Artificial Sequence
  Description of Artificial Sequence: Synthetic oligonucleotide
cuggagucauauaucaccu

SEQ ID NO: 1808576 - RNA, 19 nt, Artificial Sequence
  Description of Artificial Sequence: Synthetic oligonucleotide
acgaggcacaguacuucgc

SEQ ID NO: 1808577 - RNA, 19 nt, Artificial Sequence
  Description of Artificial Sequence: Synthetic oligonucleotide
accuuagugcuaauuugca

SEQ ID NO: 1808578 - RNA, 19 nt, Artificial Sequence
  Description of Artificial Sequence: Synthetic oligonucleotide
cugguuuccaagagggcaa

SEQ ID NO: 1808579 - RNA, 19 nt, Artificial Sequence
  Description of Artificial Sequence: Synthetic oligonucleotide
caauaagagacuucacaau

SEQ ID NO: 1808580 - RNA, 19 nt, Artificial Sequence
  Description of Artificial Sequence: Synthetic oligonucleotide
caguuuauggaucacccau

SEQ ID NO: 1808581 - RNA, 19 nt, Artificial Sequence
  Description of Artificial Sequence: Synthetic oligonucleotide
guacccguuaauacaauua

SEQ ID NO: 1808582 - RNA, 19 nt, Artificial Sequence
  Description of Artificial Sequence: Synthetic oligonucleotide
ggauucaugggguuggggu

SEQ ID NO: 1808583 - RNA, 19 nt, Artificial Sequence
  Description of Artificial Sequence: Synthetic oligonucleotide
uccauugcuucucggccuu

SEQ ID NO: 1808584 - RNA, 19 nt, Artificial Sequence
  Description of Artificial Sequence: Synthetic oligonucleotide
cccauggauggucaaagac

SEQ ID NO: 1808585 - RNA, 19 nt, Artificial Sequence
  Description of Artificial Sequence: Synthetic oligonucleotide
ccuuagugcuaauuugcac

SEQ ID NO: 1808586 - RNA, 19 nt, Artificial Sequence
  Description of Artificial Sequence: Synthetic oligonucleotide
caacgaggcacaguacuuc

SEQ ID NO: 1808587 - RNA, 19 nt, Artificial Sequence
  Description of Artificial Sequence: Synthetic oligonucleotide
uugcggcaccaauaagaga

SEQ ID NO: 1808588 - RNA, 19 nt, Artificial Sequence
  Description of Artificial Sequence: Synthetic oligonucleotide
uaucaccuuagugcuaauu

SEQ ID NO: 1808589 - RNA, 19 nt, Artificial Sequence
  Description of Artificial Sequence: Synthetic oligonucleotide
auucaugggguugggguau

SEQ ID NO: 1808590 - RNA, 19 nt, Artificial Sequence
  Description of Artificial Sequence: Synthetic oligonucleotide
cuacugagaccauauuugu

SEQ ID NO: 1808591 - RNA, 19 nt, Artificial Sequence
  Description of Artificial Sequence: Synthetic oligonucleotide
aguuuauggaucacccauu

SEQ ID NO: 1808592 - RNA, 19 nt, Artificial Sequence
  Description of Artificial Sequence: Synthetic oligonucleotide
uuguuagcauuggaagaua

SEQ ID NO: 1808593 - RNA, 19 nt, Artificial Sequence
  Description of Artificial Sequence: Synthetic oligonucleotide
gacacucagguaaugacuu

SEQ ID NO: 1808594 - RNA, 19 nt, Artificial Sequence
  Description of Artificial Sequence: Synthetic oligonucleotide
caguacuucgccggccccg

SEQ ID NO: 1808595 - RNA, 19 nt, Artificial Sequence
  Description of Artificial Sequence: Synthetic oligonucleotide
guuccagucccugcuuuug

SEQ ID NO: 1808596 - RNA, 19 nt, Artificial Sequence
  Description of Artificial Sequence: Synthetic oligonucleotide
cguuaauacaauuaaaauu

SEQ ID NO: 1808597 - RNA, 19 nt, Artificial Sequence
  Description of Artificial Sequence: Synthetic oligonucleotide
gccgugguaaccauuuccc

SEQ ID NO: 1808598 - RNA, 19 nt, Artificial Sequence
  Description of Artificial Sequence: Synthetic oligonucleotide
auggaucacccauuccauu

SEQ ID NO: 1808599 - RNA, 19 nt, Artificial Sequence
  Description of Artificial Sequence: Synthetic oligonucleotide
agggauccacaugucuguc

SEQ ID NO: 1808600 - RNA, 19 nt, Artificial Sequence
  Description of Artificial Sequence: Synthetic oligonucleotide
caacgcccacuacacuggg

SEQ ID NO: 1808601 - RNA, 19 nt, Artificial Sequence
  Description of Artificial Sequence: Synthetic oligonucleotide
uggagucauauaucaccuu

SEQ ID NO: 1808602 - RNA, 19 nt, Artificial Sequence
  Description of Artificial Sequence: Synthetic oligonucleotide
gcuuugaucaaaagucaca

SEQ ID NO: 1808603 - RNA, 19 nt, Artificial Sequence
  Description of Artificial Sequence: Synthetic oligonucleotide
ggaaugccuuuacuaaguc

SEQ ID NO: 1808604 - RNA, 19 nt, Artificial Sequence
  Description of Artificial Sequence: Synthetic oligonucleotide
ggaagauauggugcuugcc

SEQ ID NO: 1808605 - RNA, 19 nt, Artificial Sequence
  Description of Artificial Sequence: Synthetic oligonucleotide
gggauccacaugucugucc

SEQ ID NO: 1808606 - RNA, 19 nt, Artificial Sequence
  Description of Artificial Sequence: Synthetic oligonucleotide
ggugcggcuuguaugugag

SEQ ID NO: 1808607 - RNA, 19 nt, Artificial Sequence
  Description of Artificial Sequence: Synthetic oligonucleotide
gaggagucuguggcugugc

SEQ ID NO: 1808608 - RNA, 19 nt, Artificial Sequence
  Description of Artificial Sequence: Synthetic oligonucleotide
ugaguccuucaagguagcu

SEQ ID NO: 1808609 - RNA, 19 nt, Artificial Sequence
  Description of Artificial Sequence: Synthetic oligonucleotide
acggugaugauggcuuccu

SEQ ID NO: 1808610 - RNA, 19 nt, Artificial Sequence
  Description of Artificial Sequence: Synthetic oligonucleotide
cacggugaugauggcuucc

SEQ ID NO: 1808611 - RNA, 19 nt, Artificial Sequence
  Description of Artificial Sequence: Synthetic oligonucleotide
agacgugcuccgaagucca

SEQ ID NO: 1808612 - RNA, 19 nt, Artificial Sequence
  Description of Artificial Sequence: Synthetic oligonucleotide
cauugcuucucggccuuug

SEQ ID NO: 1808613 - RNA, 19 nt, Artificial Sequence
  Description of Artificial Sequence: Synthetic oligonucleotide
gaucacccauuccauugcu

SEQ ID NO: 1808614 - RNA, 19 nt, Artificial Sequence
  Description of Artificial Sequence: Synthetic oligonucleotide
cacagccuuaccccagcuc

SEQ ID NO: 1808615 - RNA, 19 nt, Artificial Sequence
  Description of Artificial Sequence: Synthetic oligonucleotide
acccguuaauacaauuaaa

SEQ ID NO: 1808616 - RNA, 19 nt, Artificial Sequence
  Description of Artificial Sequence: Synthetic oligonucleotide
auuggaagauauggugcuu

SEQ ID NO: 1808617 - RNA, 19 nt, Artificial Sequence
  Description of Artificial Sequence: Synthetic oligonucleotide
ugccaucggcguccguaug

SEQ ID NO: 1808618 - RNA, 19 nt, Artificial Sequence
  Description of Artificial Sequence: Synthetic oligonucleotide
acaacgaggcacaguacuu

SEQ ID NO: 1808619 - RNA, 19 nt, Artificial Sequence
  Description of Artificial Sequence: Synthetic oligonucleotide
ggcacaguacuucgccggc

SEQ ID NO: 1808620 - RNA, 19 nt, Artificial Sequence
  Description of Artificial Sequence: Synthetic oligonucleotide
cagcaugcgaaaucacaaa

SEQ ID NO: 1808621 - RNA, 19 nt, Artificial Sequence
  Description of Artificial Sequence: Synthetic oligonucleotide
gcugaccccuuucacggug

SEQ ID NO: 1808622 - RNA, 19 nt, Artificial Sequence
  Description of Artificial Sequence: Synthetic oligonucleotide
uggcuuccugggucaagac

SEQ ID NO: 1808623 - RNA, 19 nt, Artificial Sequence
  Description of Artificial Sequence: Synthetic oligonucleotide
gccaucggcguccguaugc

SEQ ID NO: 1808624 - RNA, 19 nt, Artificial Sequence
  Description of Artificial Sequence: Synthetic oligonucleotide
guugggguauuucugcauu

SEQ ID NO: 1808625 - RNA, 19 nt, Artificial Sequence
  Description of Artificial Sequence: Synthetic oligonucleotide
uguggacuugagggcggcc

SEQ ID NO: 1808626 - RNA, 19 nt, Artificial Sequence
  Description of Artificial Sequence: Synthetic oligonucleotide
cgucccgggacaacgaggc

SEQ ID NO: 1808627 - RNA, 19 nt, Artificial Sequence
  Description of Artificial Sequence: Synthetic oligonucleotide
uuaccgggucgaccacaga

SEQ ID NO: 1808628 - RNA, 19 nt, Artificial Sequence
  Description of Artificial Sequence: Synthetic oligonucleotide
gucagcuuggagaguccug

SEQ ID NO: 1808629 - RNA, 19 nt, Artificial Sequence
  Description of Artificial Sequence: Synthetic oligonucleotide
ugcagccgugguaaccauu

SEQ ID NO: 1808630 - RNA, 19 nt, Artificial Sequence
  Description of Artificial Sequence: Synthetic oligonucleotide
ugugagccucucgucuacu

SEQ ID NO: 1808631 - RNA, 19 nt, Artificial Sequence
  Description of Artificial Sequence: Synthetic oligonucleotide
cgaggcacaguacuucgcc

SEQ ID NO: 1808632 - RNA, 19 nt, Artificial Sequence
  Description of Artificial Sequence: Synthetic oligonucleotide
caaagacgugcuccgaagu

SEQ ID NO: 1808633 - RNA, 19 nt, Artificial Sequence
  Description of Artificial Sequence: Synthetic oligonucleotide
ugaugucagcuuggagagu

SEQ ID NO: 1808634 - RNA, 19 nt, Artificial Sequence
  Description of Artificial Sequence: Synthetic oligonucleotide
augccuuuacuaagucaca

SEQ ID NO: 1808635 - RNA, 19 nt, Artificial Sequence
  Description of Artificial Sequence: Synthetic oligonucleotide
ccaagucuucaaucucagc

SEQ ID NO: 1808636 - RNA, 19 nt, Artificial Sequence
  Description of Artificial Sequence: Synthetic oligonucleotide
agcgggcaacuguguggac

SEQ ID NO: 1808637 - RNA, 19 nt, Artificial Sequence
  Description of Artificial Sequence: Synthetic oligonucleotide
cccauuccauugcuucucg

SEQ ID NO: 1808638 - RNA, 19 nt, Artificial Sequence
  Description of Artificial Sequence: Synthetic oligonucleotide
caagagggcaaguuauuuu

SEQ ID NO: 1808639 - RNA, 19 nt, Artificial Sequence
  Description of Artificial Sequence: Synthetic oligonucleotide
gccguaucuuuuaaauaac

SEQ ID NO: 1808640 - RNA, 19 nt, Artificial Sequence
  Description of Artificial Sequence: Synthetic oligonucleotide
cacucagguaaugacuuua

SEQ ID NO: 1808641 - RNA, 19 nt, Artificial Sequence
  Description of Artificial Sequence: Synthetic oligonucleotide
ucucagcguucaguuuaug

SEQ ID NO: 1808642 - RNA, 19 nt, Artificial Sequence
  Description of Artificial Sequence: Synthetic oligonucleotide
ccucucgucuacugagacc

SEQ ID NO: 1808643 - RNA, 19 nt, Artificial Sequence
  Description of Artificial Sequence: Synthetic oligonucleotide
aacgcccacuacacuggga

SEQ ID NO: 1808644 - RNA, 19 nt, Artificial Sequence
  Description of Artificial Sequence: Synthetic oligonucleotide
caagguagcugcugaggcu

SEQ ID NO: 1808645 - RNA, 19 nt, Artificial Sequence
  Description of Artificial Sequence: Synthetic oligonucleotide
agauacuguuccagucccu

SEQ ID NO: 1808646 - RNA, 19 nt, Artificial Sequence
  Description of Artificial Sequence: Synthetic oligonucleotide
ccauuccauugcuucucgg

SEQ ID NO: 1808647 - RNA, 19 nt, Artificial Sequence
  Description of Artificial Sequence: Synthetic oligonucleotide
auauaucaccuuagugcua

SEQ ID NO: 1808648 - RNA, 19 nt, Artificial Sequence
  Description of Artificial Sequence: Synthetic oligonucleotide
cuuuaccgggucgaccaca

SEQ ID NO: 1808649 - RNA, 19 nt, Artificial Sequence
  Description of Artificial Sequence: Synthetic oligonucleotide
auaucaccuuagugcuaau

SEQ ID NO: 1808650 - RNA, 19 nt, Artificial Sequence
  Description of Artificial Sequence: Synthetic oligonucleotide
guuuccaagagggcaaguu

SEQ ID NO: 1808651 - RNA, 19 nt, Artificial Sequence
  Description of Artificial Sequence: Synthetic oligonucleotide
gccucucgucuacugagac

SEQ ID NO: 1808652 - RNA, 19 nt, Artificial Sequence
  Description of Artificial Sequence: Synthetic oligonucleotide
gggucgaccacagagugcu

SEQ ID NO: 1808653 - RNA, 19 nt, Artificial Sequence
  Description of Artificial Sequence: Synthetic oligonucleotide
gacgugcuccgaaguccag

SEQ ID NO: 1808654 - RNA, 19 nt, Artificial Sequence
  Description of Artificial Sequence: Synthetic oligonucleotide
ggguugggguauuucugca

SEQ ID NO: 1808655 - RNA, 19 nt, Artificial Sequence
  Description of Artificial Sequence: Synthetic oligonucleotide
cagcgggcaacugugugga

SEQ ID NO: 1808656 - RNA, 19 nt, Artificial Sequence
  Description of Artificial Sequence: Synthetic oligonucleotide
ggcgucccgggacaacgag

SEQ ID NO: 1808657 - RNA, 19 nt, Artificial Sequence
  Description of Artificial Sequence: Synthetic oligonucleotide
guccauacccagauacugu

SEQ ID NO: 1808658 - RNA, 19 nt, Artificial Sequence
  Description of Artificial Sequence: Synthetic oligonucleotide
ccauacccagauacuguuc

SEQ ID NO: 1808659 - RNA, 19 nt, Artificial Sequence
  Description of Artificial Sequence: Synthetic oligonucleotide
ccauuucccauggaugguc

SEQ ID NO: 1808660 - RNA, 19 nt, Artificial Sequence
  Description of Artificial Sequence: Synthetic oligonucleotide
uugcagccgugguaaccau

SEQ ID NO: 1808661 - RNA, 19 nt, Artificial Sequence
  Description of Artificial Sequence: Synthetic oligonucleotide
gugcggcuuguaugugagc

SEQ ID NO: 1808662 - RNA, 19 nt, Artificial Sequence
  Description of Artificial Sequence: Synthetic oligonucleotide
ccgggucgaccacagagug

SEQ ID NO: 1808663 - RNA, 19 nt, Artificial Sequence
  Description of Artificial Sequence: Synthetic oligonucleotide
cccugcuuuugcuuugauc

SEQ ID NO: 1808664 - RNA, 19 nt, Artificial Sequence
  Description of Artificial Sequence: Synthetic oligonucleotide
gggaaugccuuuacuaagu

SEQ ID NO: 1808665 - RNA, 19 nt, Artificial Sequence
  Description of Artificial Sequence: Synthetic oligonucleotide
ggaagggaaugccuuuacu

SEQ ID NO: 1808666 - RNA, 19 nt, Artificial Sequence
  Description of Artificial Sequence: Synthetic oligonucleotide
cugcauugcagccguggua

SEQ ID NO: 1808667 - RNA, 19 nt, Artificial Sequence
  Description of Artificial Sequence: Synthetic oligonucleotide
gccgcggcugccaucggcg

SEQ ID NO: 1808668 - RNA, 19 nt, Artificial Sequence
  Description of Artificial Sequence: Synthetic oligonucleotide
guguggacuugagggcggc

SEQ ID NO: 1808669 - RNA, 19 nt, Artificial Sequence
  Description of Artificial Sequence: Synthetic oligonucleotide
ugcuugccaugaguccuuc

SEQ ID NO: 1808670 - RNA, 19 nt, Artificial Sequence
  Description of Artificial Sequence: Synthetic oligonucleotide
gggugcggcuuguauguga

SEQ ID NO: 1808671 - RNA, 19 nt, Artificial Sequence
  Description of Artificial Sequence: Synthetic oligonucleotide
ccaugaguccuucaaggua

SEQ ID NO: 1808672 - RNA, 19 nt, Artificial Sequence
  Description of Artificial Sequence: Synthetic oligonucleotide
gguaaccauuucccaugga

SEQ ID NO: 1808673 - RNA, 19 nt, Artificial Sequence
  Description of Artificial Sequence: Synthetic oligonucleotide
gcaugcgaaaucacaaagu

SEQ ID NO: 1808674 - RNA, 19 nt, Artificial Sequence
  Description of Artificial Sequence: Synthetic oligonucleotide
gcgaaaucacaaaguacaa

SEQ ID NO: 1808675 - RNA, 19 nt, Artificial Sequence
  Description of Artificial Sequence: Synthetic oligonucleotide
cuguggcugugcagcuuuc

SEQ ID NO: 1808676 - RNA, 19 nt, Artificial Sequence
  Description of Artificial Sequence: Synthetic oligonucleotide
ggccuuuguuagcauugga

SEQ ID NO: 1808677 - RNA, 19 nt, Artificial Sequence
  Description of Artificial Sequence: Synthetic oligonucleotide
cugcacacccaucuccacu

SEQ ID NO: 1808678 - RNA, 19 nt, Artificial Sequence
  Description of Artificial Sequence: Synthetic oligonucleotide
gcgucccgggacaacgagg

SEQ ID NO: 1808679 - RNA, 19 nt, Artificial Sequence
  Description of Artificial Sequence: Synthetic oligonucleotide
guacuucgccggccccgcc

SEQ ID NO: 1808680 - RNA, 19 nt, Artificial Sequence
  Description of Artificial Sequence: Synthetic oligonucleotide
ggcccugaagcugcacacc

SEQ ID NO: 1808681 - RNA, 19 nt, Artificial Sequence
  Description of Artificial Sequence: Synthetic oligonucleotide
cucgucuacugagaccaua

SEQ ID NO: 1808682 - RNA, 19 nt, Artificial Sequence
  Description of Artificial Sequence: Synthetic oligonucleotide
uucaugggguugggguauu

SEQ ID NO: 1808683 - RNA, 19 nt, Artificial Sequence
  Description of Artificial Sequence: Synthetic oligonucleotide
ccggcgucccgggacaacg

SEQ ID NO: 1808684 - RNA, 19 nt, Artificial Sequence
  Description of Artificial Sequence: Synthetic oligonucleotide
gcacaguacuucgccggcc

SEQ ID NO: 1808685 - RNA, 19 nt, Artificial Sequence
  Description of Artificial Sequence: Synthetic oligonucleotide
agccuuaccccagcucauu

SEQ ID NO: 1808686 - RNA, 19 nt, Artificial Sequence
  Description of Artificial Sequence: Synthetic oligonucleotide
ucaugggguugggguauuu

SEQ ID NO: 1808687 - RNA, 19 nt, Artificial Sequence
  Description of Artificial Sequence: Synthetic oligonucleotide
ggacaacgaggcacaguac

SEQ ID NO: 1808688 - RNA, 19 nt, Artificial Sequence
  Description of Artificial Sequence: Synthetic oligonucleotide
ugguggacuugagcuccau

SEQ ID NO: 1808689 - RNA, 19 nt, Artificial Sequence
  Description of Artificial Sequence: Synthetic oligonucleotide
ccaccaaggcugccgcggc

SEQ ID NO: 1808690 - RNA, 19 nt, Artificial Sequence
  Description of Artificial Sequence: Synthetic oligonucleotide
ggacuugagggcggccggc

SEQ ID NO: 1808691 - RNA, 19 nt, Artificial Sequence
  Description of Artificial Sequence: Synthetic oligonucleotide
ggucaaagacgugcuccga

SEQ ID NO: 1808692 - RNA, 19 nt, Artificial Sequence
  Description of Artificial Sequence: Synthetic oligonucleotide
ccuuaccccagcucauuaa

SEQ ID NO: 1808693 - RNA, 19 nt, Artificial Sequence
  Description of Artificial Sequence: Synthetic oligonucleotide
ccgugguaaccauuuccca

SEQ ID NO: 1808694 - RNA, 19 nt, Artificial Sequence
  Description of Artificial Sequence: Synthetic oligonucleotide
cccgggacaacgaggcaca

SEQ ID NO: 1808695 - RNA, 19 nt, Artificial Sequence
  Description of Artificial Sequence: Synthetic oligonucleotide
gucccgggacaacgaggca

SEQ ID NO: 1808696 - RNA, 19 nt, Artificial Sequence
  Description of Artificial Sequence: Synthetic oligonucleotide
gccuuaccccagcucauua

SEQ ID NO: 1808697 - RNA, 19 nt, Artificial Sequence
  Description of Artificial Sequence: Synthetic oligonucleotide
cugccaucggcguccguau

SEQ ID NO: 1808698 - RNA, 19 nt, Artificial Sequence
  Description of Artificial Sequence: Synthetic oligonucleotide
cgggucgaccacagagugc

SEQ ID NO: 1808699 - RNA, 19 nt, Artificial Sequence
  Description of Artificial Sequence: Synthetic oligonucleotide
cggccuuuguuagcauugg

SEQ ID NO: 1808700 - RNA, 19 nt, Artificial Sequence
  Description of Artificial Sequence: Synthetic oligonucleotide
gcggccggccuuucuucug

SEQ ID NO: 1808701 - RNA, 19 nt, Artificial Sequence
  Description of Artificial Sequence: Synthetic oligonucleotide
gcacgucaacgcccacuac

SEQ ID NO: 1808702 - RNA, 19 nt, Artificial Sequence
  Description of Artificial Sequence: Synthetic oligonucleotide
caguacccguuaauacaau

SEQ ID NO: 1808703 - RNA, 19 nt, Artificial Sequence
  Description of Artificial Sequence: Synthetic oligonucleotide
cggcuuguaugugagccuc

SEQ ID NO: 1808704 - RNA, 19 nt, Artificial Sequence
  Description of Artificial Sequence: Synthetic oligonucleotide
cagccgcugcgcggugucc

SEQ ID NO: 1808705 - RNA, 19 nt, Artificial Sequence
  Description of Artificial Sequence: Synthetic oligonucleotide
cagcacgucaacgcccacu

SEQ ID NO: 1808706 - RNA, 19 nt, Artificial Sequence
  Description of Artificial Sequence: Synthetic oligonucleotide
gccgcugcgcggugucccc

SEQ ID NO: 1808707 - RNA, 19 nt, Artificial Sequence
  Description of Artificial Sequence: Synthetic oligonucleotide
cuugagggcggccggccuu

SEQ ID NO: 1808708 - RNA, 19 nt, Artificial Sequence
  Description of Artificial Sequence: Synthetic oligonucleotide
gcgggcaacuguguggacu

SEQ ID NO: 1808709 - RNA, 19 nt, Artificial Sequence
  Description of Artificial Sequence: Synthetic oligonucleotide
cagagugcuccugcacgua

SEQ ID NO: 1808710 - RNA, 19 nt, Artificial Sequence
  Description of Artificial Sequence: Synthetic oligonucleotide
cugccgcggcugccaucgg

SEQ ID NO: 1808711 - RNA, 19 nt, Artificial Sequence
  Description of Artificial Sequence: Synthetic oligonucleotide
cagccuuaccccagcucau

SEQ ID NO: 1808712 - RNA, 19 nt, Artificial Sequence
  Description of Artificial Sequence: Synthetic oligonucleotide
ugagggcggccggccuuuc

SEQ ID NO: 1808713 - RNA, 19 nt, Artificial Sequence
  Description of Artificial Sequence: Synthetic oligonucleotide
gagggcggccggccuuucu

SEQ ID NO: 1808714 - RNA, 19 nt, Artificial Sequence
  Description of Artificial Sequence: Synthetic oligonucleotide
ggggugcggcuuguaugug

SEQ ID NO: 1808715 - RNA, 19 nt, Artificial Sequence
  Description of Artificial Sequence: Synthetic oligonucleotide
gguggacuugagcuccauu

SEQ ID NO: 1808716 - RNA, 19 nt, Artificial Sequence
  Description of Artificial Sequence: Synthetic oligonucleotide
cccacuacacugggauuca

SEQ ID NO: 1808717 - RNA, 19 nt, Artificial Sequence
  Description of Artificial Sequence: Synthetic oligonucleotide
ccagccgcugcgcgguguc

SEQ ID NO: 1808718 - RNA, 19 nt, Artificial Sequence
  Description of Artificial Sequence: Synthetic oligonucleotide
ccaagagggcaaguuauuu

SEQ ID NO: 1808719 - RNA, 19 nt, Artificial Sequence
  Description of Artificial Sequence: Synthetic oligonucleotide
ccguaugcuuccucuugcu

SEQ ID NO: 1808720 - RNA, 19 nt, Artificial Sequence
  Description of Artificial Sequence: Synthetic oligonucleotide
ggcggccggccuuucuucu

SEQ ID NO: 1808721 - RNA, 19 nt, Artificial Sequence
  Description of Artificial Sequence: Synthetic oligonucleotide
ccgggacaacgaggcacag

SEQ ID NO: 1808722 - RNA, 19 nt, Artificial Sequence
  Description of Artificial Sequence: Synthetic oligonucleotide
ggucgaccacagagugcuc

SEQ ID NO: 1808723 - RNA, 19 nt, Artificial Sequence
  Description of Artificial Sequence: Synthetic oligonucleotide
ccaucggcguccguaugcu

SEQ ID NO: 1808724 - RNA, 19 nt, Artificial Sequence
  Description of Artificial Sequence: Synthetic oligonucleotide
gcuccgaaguccagaucuu

SEQ ID NO: 1808725 - RNA, 19 nt, Artificial Sequence
  Description of Artificial Sequence: Synthetic oligonucleotide
gccggccuuucuucugguu

SEQ ID NO: 1808726 - RNA, 19 nt, Artificial Sequence
  Description of Artificial Sequence: Synthetic oligonucleotide
cgucaacgcccacuacacu

SEQ ID NO: 1808727 - RNA, 19 nt, Artificial Sequence
  Description of Artificial Sequence: Synthetic oligonucleotide
cccggcgucccgggacaac

SEQ ID NO: 1808728 - RNA, 19 nt, Artificial Sequence
  Description of Artificial Sequence: Synthetic oligonucleotide
cggcgucccgggacaacga

SEQ ID NO: 1808729 - RNA, 19 nt, Artificial Sequence
  Description of Artificial Sequence: Synthetic oligonucleotide
cgucuacugagaccauauu

SEQ ID NO: 1808730 - RNA, 19 nt, Artificial Sequence
  Description of Artificial Sequence: Synthetic oligonucleotide
ccacuacacugggauucau

SEQ ID NO: 1808731 - RNA, 19 nt, Artificial Sequence
  Description of Artificial Sequence: Synthetic oligonucleotide
cgcccacuacacugggauu

SEQ ID NO: 1808732 - RNA, 19 nt, Artificial Sequence
  Description of Artificial Sequence: Synthetic oligonucleotide
ccauugcuucucggccuuu

SEQ ID NO: 1808733 - RNA, 19 nt, Artificial Sequence
  Description of Artificial Sequence: Synthetic oligonucleotide
ccccggcgucccgggacaa

SEQ ID NO: 1808734 - RNA, 19 nt, Artificial Sequence
  Description of Artificial Sequence: Synthetic oligonucleotide
aagacuuugggccaggcag

SEQ ID NO: 1808735 - RNA, 19 nt, Artificial Sequence
  Description of Artificial Sequence: Synthetic oligonucleotide
aauggacuuggccuuagcc

SEQ ID NO: 1808736 - RNA, 19 nt, Artificial Sequence
  Description of Artificial Sequence: Synthetic oligonucleotide
auugcuaucauccugccug

SEQ ID NO: 1808737 - RNA, 19 nt, Artificial Sequence
  Description of Artificial Sequence: Synthetic oligonucleotide
agagucacugcauagcagc

SEQ ID NO: 1808738 - RNA, 19 nt, Artificial Sequence
  Description of Artificial Sequence: Synthetic oligonucleotide
auucuagacucauugacuc

SEQ ID NO: 1808739 - RNA, 19 nt, Artificial Sequence
  Description of Artificial Sequence: Synthetic oligonucleotide
ucagguauggaaaauggac

SEQ ID NO: 1808740 - RNA, 19 nt, Artificial Sequence
  Description of Artificial Sequence: Synthetic oligonucleotide
uccuagaugccucagaaga

SEQ ID NO: 1808741 - RNA, 19 nt, Artificial Sequence
  Description of Artificial Sequence: Synthetic oligonucleotide
cuucuugugagauaucugc

SEQ ID NO: 1808742 - RNA, 19 nt, Artificial Sequence
  Description of Artificial Sequence: Synthetic oligonucleotide
ucucagguauggaaaaugg

SEQ ID NO: 1808743 - RNA, 19 nt, Artificial Sequence
  Description of Artificial Sequence: Synthetic oligonucleotide
acaaauccaggcuccaugc

SEQ ID NO: 1808744 - RNA, 19 nt, Artificial Sequence
  Description of Artificial Sequence: Synthetic oligonucleotide
ucaacaguggcugagaacu

SEQ ID NO: 1808745 - RNA, 19 nt, Artificial Sequence
  Description of Artificial Sequence: Synthetic oligonucleotide
aaguaguacacauugcuau

SEQ ID NO: 1808746 - RNA, 19 nt, Artificial Sequence
  Description of Artificial Sequence: Synthetic oligonucleotide
gacucauugacucaggcca

SEQ ID NO: 1808747 - RNA, 19 nt, Artificial Sequence
  Description of Artificial Sequence: Synthetic oligonucleotide
uggguuaacucccaugucc

SEQ ID NO: 1808748 - RNA, 19 nt, Artificial Sequence
  Description of Artificial Sequence: Synthetic oligonucleotide
uaagucagcaccuaggaua

SEQ ID NO: 1808749 - RNA, 19 nt, Artificial Sequence
  Description of Artificial Sequence: Synthetic oligonucleotide
ugcacauuagaagaggugc

SEQ ID NO: 1808750 - RNA, 19 nt, Artificial Sequence
  Description of Artificial Sequence: Synthetic oligonucleotide
gauacuggcuccuuccuag

SEQ ID NO: 1808751 - RNA, 19 nt, Artificial Sequence
  Description of Artificial Sequence: Synthetic oligonucleotide
uauucuagacucauugacu

SEQ ID NO: 1808752 - RNA, 19 nt, Artificial Sequence
  Description of Artificial Sequence: Synthetic oligonucleotide
gaagacagggaucaaagga

SEQ ID NO: 1808753 - RNA, 19 nt, Artificial Sequence
  Description of Artificial Sequence: Synthetic oligonucleotide
aaucguacuuucuucuucu

SEQ ID NO: 1808754 - RNA, 19 nt, Artificial Sequence
  Description of Artificial Sequence: Synthetic oligonucleotide
gaugccucagaagacaggg

SEQ ID NO: 1808755 - RNA, 19 nt, Artificial Sequence
  Description of Artificial Sequence: Synthetic oligonucleotide
aucaugacccuugucagcc

SEQ ID NO: 1808756 - RNA, 19 nt, Artificial Sequence
  Description of Artificial Sequence: Synthetic oligonucleotide
agacucauugacucaggcc

SEQ ID NO: 1808757 - RNA, 19 nt, Artificial Sequence
  Description of Artificial Sequence: Synthetic oligonucleotide
uugagacccacuauucuag

SEQ ID NO: 1808758 - RNA, 19 nt, Artificial Sequence
  Description of Artificial Sequence: Synthetic oligonucleotide
cuauucuagacucauugac

SEQ ID NO: 1808759 - RNA, 19 nt, Artificial Sequence
  Description of Artificial Sequence: Synthetic oligonucleotide
acuauacuggaaguugucc

SEQ ID NO: 1808760 - RNA, 19 nt, Artificial Sequence
  Description of Artificial Sequence: Synthetic oligonucleotide
uucaauagggcacacucuc

SEQ ID NO: 1808761 - RNA, 19 nt, Artificial Sequence
  Description of Artificial Sequence: Synthetic oligonucleotide
aauagggcacacucucagg

SEQ ID NO: 1808762 - RNA, 19 nt, Artificial Sequence
  Description of Artificial Sequence: Synthetic oligonucleotide
cacuauucuagacucauug

SEQ ID NO: 1808763 - RNA, 19 nt, Artificial Sequence
  Description of Artificial Sequence: Synthetic oligonucleotide
aagccugccuuucaauagg

SEQ ID NO: 1808764 - RNA, 19 nt, Artificial Sequence
  Description of Artificial Sequence: Synthetic oligonucleotide
uuauauuaugauucauaac

SEQ ID NO: 1808765 - RNA, 19 nt, Artificial Sequence
  Description of Artificial Sequence: Synthetic oligonucleotide
aguaguacacauugcuauc

SEQ ID NO: 1808766 - RNA, 19 nt, Artificial Sequence
  Description of Artificial Sequence: Synthetic oligonucleotide
aaugucacuuccaauguca

SEQ ID NO: 1808767 - RNA, 19 nt, Artificial Sequence
  Description of Artificial Sequence: Synthetic oligonucleotide
uguucugucaacuggguua

SEQ ID NO: 1808768 - RNA, 19 nt, Artificial Sequence
  Description of Artificial Sequence: Synthetic oligonucleotide
auugacucaggccaggccu

SEQ ID NO: 1808769 - RNA, 19 nt, Artificial Sequence
  Description of Artificial Sequence: Synthetic oligonucleotide
acuggguuaacucccaugu

SEQ ID NO: 1808770 - RNA, 19 nt, Artificial Sequence
  Description of Artificial Sequence: Synthetic oligonucleotide
uguccauugcacauuagaa

SEQ ID NO: 1808771 - RNA, 19 nt, Artificial Sequence
  Description of Artificial Sequence: Synthetic oligonucleotide
guccaaguaagucagcacc

SEQ ID NO: 1808772 - RNA, 19 nt, Artificial Sequence
  Description of Artificial Sequence: Synthetic oligonucleotide
aagucagcaccuaggauac

SEQ ID NO: 1808773 - RNA, 19 nt, Artificial Sequence
  Description of Artificial Sequence: Synthetic oligonucleotide
ugucaacuggguuaacucc

SEQ ID NO: 1808774 - RNA, 19 nt, Artificial Sequence
  Description of Artificial Sequence: Synthetic oligonucleotide
agcaacaucuuguucuguc

SEQ ID NO: 1808775 - RNA, 19 nt, Artificial Sequence
  Description of Artificial Sequence: Synthetic oligonucleotide
agaggauacaggaggaggc

SEQ ID NO: 1808776 - RNA, 19 nt, Artificial Sequence
  Description of Artificial Sequence: Synthetic oligonucleotide
uuguccauugcacauuaga

SEQ ID NO: 1808777 - RNA, 19 nt, Artificial Sequence
  Description of Artificial Sequence: Synthetic oligonucleotide
aaguaagucagcaccuagg

SEQ ID NO: 1808778 - RNA, 19 nt, Artificial Sequence
  Description of Artificial Sequence: Synthetic oligonucleotide
ugguaguccauuuccaucu

SEQ ID NO: 1808779 - RNA, 19 nt, Artificial Sequence
  Description of Artificial Sequence: Synthetic oligonucleotide
aaauggacuuggccuuagc

SEQ ID NO: 1808780 - RNA, 19 nt, Artificial Sequence
  Description of Artificial Sequence: Synthetic oligonucleotide
guauggaaaauggacuugg

SEQ ID NO: 1808781 - RNA, 19 nt, Artificial Sequence
  Description of Artificial Sequence: Synthetic oligonucleotide
aguaagucagcaccuagga

SEQ ID NO: 1808782 - RNA, 19 nt, Artificial Sequence
  Description of Artificial Sequence: Synthetic oligonucleotide
gugacagcaagacuuuggg

SEQ ID NO: 1808783 - RNA, 19 nt, Artificial Sequence
  Description of Artificial Sequence: Synthetic oligonucleotide
gacacuauacuggaaguug

SEQ ID NO: 1808784 - RNA, 19 nt, Artificial Sequence
  Description of Artificial Sequence: Synthetic oligonucleotide
aacaguggcugagaacucg

SEQ ID NO: 1808785 - RNA, 19 nt, Artificial Sequence
  Description of Artificial Sequence: Synthetic oligonucleotide
gaucaaaggauggagagaa

SEQ ID NO: 1808786 - RNA, 19 nt, Artificial Sequence
  Description of Artificial Sequence: Synthetic oligonucleotide
ucagggaucaugacccuug

SEQ ID NO: 1808787 - RNA, 19 nt, Artificial Sequence
  Description of Artificial Sequence: Synthetic oligonucleotide
aguccaaguaagucagcac

SEQ ID NO: 1808788 - RNA, 19 nt, Artificial Sequence
  Description of Artificial Sequence: Synthetic oligonucleotide
ucugcugaaacagaggaua

SEQ ID NO: 1808789 - RNA, 19 nt, Artificial Sequence
  Description of Artificial Sequence: Synthetic oligonucleotide
cuggcuccuuccuagaugc

SEQ ID NO: 1808790 - RNA, 19 nt, Artificial Sequence
  Description of Artificial Sequence: Synthetic oligonucleotide
ucugcuucuugugagauau

SEQ ID NO: 1808791 - RNA, 19 nt, Artificial Sequence
  Description of Artificial Sequence: Synthetic oligonucleotide
uaggccgaguccaaguaag

SEQ ID NO: 1808792 - RNA, 19 nt, Artificial Sequence
  Description of Artificial Sequence: Synthetic oligonucleotide
cuguagguucgccugaucc

SEQ ID NO: 1808793 - RNA, 19 nt, Artificial Sequence
  Description of Artificial Sequence: Synthetic oligonucleotide
gugcuuaaggauccgaggc

SEQ ID NO: 1808794 - RNA, 19 nt, Artificial Sequence
  Description of Artificial Sequence: Synthetic oligonucleotide
acuaaguaguacacauugc

SEQ ID NO: 1808795 - RNA, 19 nt, Artificial Sequence
  Description of Artificial Sequence: Synthetic oligonucleotide
uuucaauagggcacacucu

SEQ ID NO: 1808796 - RNA, 19 nt, Artificial Sequence
  Description of Artificial Sequence: Synthetic oligonucleotide
ucgaucacugagcuggaca

SEQ ID NO: 1808797 - RNA, 19 nt, Artificial Sequence
  Description of Artificial Sequence: Synthetic oligonucleotide
caugcacuaaguaguacac

SEQ ID NO: 1808798 - RNA, 19 nt, Artificial Sequence
  Description of Artificial Sequence: Synthetic oligonucleotide
auagggcacacucucaggu

SEQ ID NO: 1808799 - RNA, 19 nt, Artificial Sequence
  Description of Artificial Sequence: Synthetic oligonucleotide
uagacucauugacucaggc

SEQ ID NO: 1808800 - RNA, 19 nt, Artificial Sequence
  Description of Artificial Sequence: Synthetic oligonucleotide
acauuagaagaggugcugg

SEQ ID NO: 1808801 - RNA, 19 nt, Artificial Sequence
  Description of Artificial Sequence: Synthetic oligonucleotide
uggcuguagugccucaggg

SEQ ID NO: 1808802 - RNA, 19 nt, Artificial Sequence
  Description of Artificial Sequence: Synthetic oligonucleotide
aaggauccgaggcugggga

SEQ ID NO: 1808803 - RNA, 19 nt, Artificial Sequence
  Description of Artificial Sequence: Synthetic oligonucleotide
aagacagggaucaaaggau

SEQ ID NO: 1808804 - RNA, 19 nt, Artificial Sequence
  Description of Artificial Sequence: Synthetic oligonucleotide
uugcacauuagaagaggug

SEQ ID NO: 1808805 - RNA, 19 nt, Artificial Sequence
  Description of Artificial Sequence: Synthetic oligonucleotide
cuugugagauaucugcuuc

SEQ ID NO: 1808806 - RNA, 19 nt, Artificial Sequence
  Description of Artificial Sequence: Synthetic oligonucleotide
uguagugccucagggauca

SEQ ID NO: 1808807 - RNA, 19 nt, Artificial Sequence
  Description of Artificial Sequence: Synthetic oligonucleotide
gaagacggggcccaacagc

SEQ ID NO: 1808808 - RNA, 19 nt, Artificial Sequence
  Description of Artificial Sequence: Synthetic oligonucleotide
ucguacuuucuucuucuug

SEQ ID NO: 1808809 - RNA, 19 nt, Artificial Sequence
  Description of Artificial Sequence: Synthetic oligonucleotide
cauugcacauuagaagagg

SEQ ID NO: 1808810 - RNA, 19 nt, Artificial Sequence
  Description of Artificial Sequence: Synthetic oligonucleotide
cugccuuucaauagggcac

SEQ ID NO: 1808811 - RNA, 19 nt, Artificial Sequence
  Description of Artificial Sequence: Synthetic oligonucleotide
acauugcuaucauccugcc

SEQ ID NO: 1808812 - RNA, 19 nt, Artificial Sequence
  Description of Artificial Sequence: Synthetic oligonucleotide
uuaacucccaugucccaug

SEQ ID NO: 1808813 - RNA, 19 nt, Artificial Sequence
  Description of Artificial Sequence: Synthetic oligonucleotide
uggacaagagcucgucacc

SEQ ID NO: 1808814 - RNA, 19 nt, Artificial Sequence
  Description of Artificial Sequence: Synthetic oligonucleotide
gaaucguacuuucuucuuc

SEQ ID NO: 1808815 - RNA, 19 nt, Artificial Sequence
  Description of Artificial Sequence: Synthetic oligonucleotide
agacucugcuucuugugag

SEQ ID NO: 1808816 - RNA, 19 nt, Artificial Sequence
  Description of Artificial Sequence: Synthetic oligonucleotide
ugcuuaaggauccgaggcu

SEQ ID NO: 1808817 - RNA, 19 nt, Artificial Sequence
  Description of Artificial Sequence: Synthetic oligonucleotide
auuagaagaggugcuggag

SEQ ID NO: 1808818 - RNA, 19 nt, Artificial Sequence
  Description of Artificial Sequence: Synthetic oligonucleotide
acccuugucagccaagccu

SEQ ID NO: 1808819 - RNA, 19 nt, Artificial Sequence
  Description of Artificial Sequence: Synthetic oligonucleotide
caucuggagaaucacagga

SEQ ID NO: 1808820 - RNA, 19 nt, Artificial Sequence
  Description of Artificial Sequence: Synthetic oligonucleotide
gauccugacucuucauggc

SEQ ID NO: 1808821 - RNA, 19 nt, Artificial Sequence
  Description of Artificial Sequence: Synthetic oligonucleotide
agugacagcaagacuuugg

SEQ ID NO: 1808822 - RNA, 19 nt, Artificial Sequence
  Description of Artificial Sequence: Synthetic oligonucleotide
cuuaaggauccgaggcugg

SEQ ID NO: 1808823 - RNA, 19 nt, Artificial Sequence
  Description of Artificial Sequence: Synthetic oligonucleotide
gaucaugacccuugucagc

SEQ ID NO: 1808824 - RNA, 19 nt, Artificial Sequence
  Description of Artificial Sequence: Synthetic oligonucleotide
cguacuuucuucuucuugg

SEQ ID NO: 1808825 - RNA, 19 nt, Artificial Sequence
  Description of Artificial Sequence: Synthetic oligonucleotide
cuagcagcgagagucacug

SEQ ID NO: 1808826 - RNA, 19 nt, Artificial Sequence
  Description of Artificial Sequence: Synthetic oligonucleotide
gguauagccauggagaauc

SEQ ID NO: 1808827 - RNA, 19 nt, Artificial Sequence
  Description of Artificial Sequence: Synthetic oligonucleotide
uggggacuuggacaggacc

SEQ ID NO: 1808828 - RNA, 19 nt, Artificial Sequence
  Description of Artificial Sequence: Synthetic oligonucleotide
caagagcucgucaccagag

SEQ ID NO: 1808829 - RNA, 19 nt, Artificial Sequence
  Description of Artificial Sequence: Synthetic oligonucleotide
ggugcuuaaggauccgagg

SEQ ID NO: 1808830 - RNA, 19 nt, Artificial Sequence
  Description of Artificial Sequence: Synthetic oligonucleotide
caaguaagucagcaccuag

SEQ ID NO: 1808831 - RNA, 19 nt, Artificial Sequence
  Description of Artificial Sequence: Synthetic oligonucleotide
uccugacucuucauggcug

SEQ ID NO: 1808832 - RNA, 19 nt, Artificial Sequence
  Description of Artificial Sequence: Synthetic oligonucleotide
uauuuauauuaugauucau

SEQ ID NO: 1808833 - RNA, 19 nt, Artificial Sequence
  Description of Artificial Sequence: Synthetic oligonucleotide
cacaaauccaggcuccaug

SEQ ID NO: 1808834 - RNA, 19 nt, Artificial Sequence
  Description of Artificial Sequence: Synthetic oligonucleotide
cagaggauacaggaggagg

SEQ ID NO: 1808835 - RNA, 19 nt, Artificial Sequence
  Description of Artificial Sequence: Synthetic oligonucleotide
cuaaguaguacacauugcu

SEQ ID NO: 1808836 - RNA, 19 nt, Artificial Sequence
  Description of Artificial Sequence: Synthetic oligonucleotide
uggccuuagccacuggcug

SEQ ID NO: 1808837 - RNA, 19 nt, Artificial Sequence
  Description of Artificial Sequence: Synthetic oligonucleotide
uuggccuuagccacuggcu

SEQ ID NO: 1808838 - RNA, 19 nt, Artificial Sequence
  Description of Artificial Sequence: Synthetic oligonucleotide
uuccaucuggagaaucaca

SEQ ID NO: 1808839 - RNA, 19 nt, Artificial Sequence
  Description of Artificial Sequence: Synthetic oligonucleotide
ucauggcuggguauagcca

SEQ ID NO: 1808840 - RNA, 19 nt, Artificial Sequence
  Description of Artificial Sequence: Synthetic oligonucleotide
acagcaagacuuugggcca

SEQ ID NO: 1808841 - RNA, 19 nt, Artificial Sequence
  Description of Artificial Sequence: Synthetic oligonucleotide
cauggagaaucguacuuuc

SEQ ID NO: 1808842 - RNA, 19 nt, Artificial Sequence
  Description of Artificial Sequence: Synthetic oligonucleotide
uggguauagccauggagaa

SEQ ID NO: 1808843 - RNA, 19 nt, Artificial Sequence
  Description of Artificial Sequence: Synthetic oligonucleotide
uuccuagaugccucagaag

SEQ ID NO: 1808844 - RNA, 19 nt, Artificial Sequence
  Description of Artificial Sequence: Synthetic oligonucleotide
cuuggccuuagccacuggc

SEQ ID NO: 1808845 - RNA, 19 nt, Artificial Sequence
  Description of Artificial Sequence: Synthetic oligonucleotide
agcgagagucacugcauag

SEQ ID NO: 1808846 - RNA, 19 nt, Artificial Sequence
  Description of Artificial Sequence: Synthetic oligonucleotide
cuuugggccaggcaggguc

SEQ ID NO: 1808847 - RNA, 19 nt, Artificial Sequence
  Description of Artificial Sequence: Synthetic oligonucleotide
gucaacuggguuaacuccc

SEQ ID NO: 1808848 - RNA, 19 nt, Artificial Sequence
  Description of Artificial Sequence: Synthetic oligonucleotide
guucgccugauccugacuc

SEQ ID NO: 1808849 - RNA, 19 nt, Artificial Sequence
  Description of Artificial Sequence: Synthetic oligonucleotide
aauccaggcuccaugcacu

SEQ ID NO: 1808850 - RNA, 19 nt, Artificial Sequence
  Description of Artificial Sequence: Synthetic oligonucleotide
acaucuuguucugucaacu

SEQ ID NO: 1808851 - RNA, 19 nt, Artificial Sequence
  Description of Artificial Sequence: Synthetic oligonucleotide
ucagaagacagggaucaaa

SEQ ID NO: 1808852 - RNA, 19 nt, Artificial Sequence
  Description of Artificial Sequence: Synthetic oligonucleotide
gacaagagcucgucaccag

SEQ ID NO: 1808853 - RNA, 19 nt, Artificial Sequence
  Description of Artificial Sequence: Synthetic oligonucleotide
ugaccucacagcaccugcc

SEQ ID NO: 1808854 - RNA, 19 nt, Artificial Sequence
  Description of Artificial Sequence: Synthetic oligonucleotide
cacacucaucaacaguggc

SEQ ID NO: 1808855 - RNA, 19 nt, Artificial Sequence
  Description of Artificial Sequence: Synthetic oligonucleotide
gauggagagaagagcaaca

SEQ ID NO: 1808856 - RNA, 19 nt, Artificial Sequence
  Description of Artificial Sequence: Synthetic oligonucleotide
cuggcuggacccauaggcc

SEQ ID NO: 1808857 - RNA, 19 nt, Artificial Sequence
  Description of Artificial Sequence: Synthetic oligonucleotide
agcccuguuguccccuccc

SEQ ID NO: 1808858 - RNA, 19 nt, Artificial Sequence
  Description of Artificial Sequence: Synthetic oligonucleotide
gagaaucguacuuucuucu

SEQ ID NO: 1808859 - RNA, 19 nt, Artificial Sequence
  Description of Artificial Sequence: Synthetic oligonucleotide
caucuuguucugucaacug

SEQ ID NO: 1808860 - RNA, 19 nt, Artificial Sequence
  Description of Artificial Sequence: Synthetic oligonucleotide
acucggcccacucucgauc

SEQ ID NO: 1808861 - RNA, 19 nt, Artificial Sequence
  Description of Artificial Sequence: Synthetic oligonucleotide
auuuccaucuggagaauca

SEQ ID NO: 1808862 - RNA, 19 nt, Artificial Sequence
  Description of Artificial Sequence: Synthetic oligonucleotide
auugcacauuagaagaggu

SEQ ID NO: 1808863 - RNA, 19 nt, Artificial Sequence
  Description of Artificial Sequence: Synthetic oligonucleotide
uucuucuuggggacuugga

SEQ ID NO: 1808864 - RNA, 19 nt, Artificial Sequence
  Description of Artificial Sequence: Synthetic oligonucleotide
caaggcucuccugaggacc

SEQ ID NO: 1808865 - RNA, 19 nt, Artificial Sequence
  Description of Artificial Sequence: Synthetic oligonucleotide
gcuggguauagccauggag

SEQ ID NO: 1808866 - RNA, 19 nt, Artificial Sequence
  Description of Artificial Sequence: Synthetic oligonucleotide
auccugacucuucauggcu

SEQ ID NO: 1808867 - RNA, 19 nt, Artificial Sequence
  Description of Artificial Sequence: Synthetic oligonucleotide
uguuguccccuccccuggg

SEQ ID NO: 1808868 - RNA, 19 nt, Artificial Sequence
  Description of Artificial Sequence: Synthetic oligonucleotide
guugagacccacuauucua

SEQ ID NO: 1808869 - RNA, 19 nt, Artificial Sequence
  Description of Artificial Sequence: Synthetic oligonucleotide
cucucagguauggaaaaug

SEQ ID NO: 1808870 - RNA, 19 nt, Artificial Sequence
  Description of Artificial Sequence: Synthetic oligonucleotide
aggccuaggaaagcugugg

SEQ ID NO: 1808871 - RNA, 19 nt, Artificial Sequence
  Description of Artificial Sequence: Synthetic oligonucleotide
cugaccucacagcaccugc

SEQ ID NO: 1808872 - RNA, 19 nt, Artificial Sequence
  Description of Artificial Sequence: Synthetic oligonucleotide
guaguacacauugcuauca

SEQ ID NO: 1808873 - RNA, 19 nt, Artificial Sequence
  Description of Artificial Sequence: Synthetic oligonucleotide
cauugacucaggccaggcc

SEQ ID NO: 1808874 - RNA, 19 nt, Artificial Sequence
  Description of Artificial Sequence: Synthetic oligonucleotide
acucccaugucccaugcuu

SEQ ID NO: 1808875 - RNA, 19 nt, Artificial Sequence
  Description of Artificial Sequence: Synthetic oligonucleotide
cucaucaacaguggcugag

SEQ ID NO: 1808876 - RNA, 19 nt, Artificial Sequence
  Description of Artificial Sequence: Synthetic oligonucleotide
uaguacacauugcuaucau

SEQ ID NO: 1808877 - RNA, 19 nt, Artificial Sequence
  Description of Artificial Sequence: Synthetic oligonucleotide
cugcugaaacagaggauac

SEQ ID NO: 1808878 - RNA, 19 nt, Artificial Sequence
  Description of Artificial Sequence: Synthetic oligonucleotide
aguuguccauugcacauua

SEQ ID NO: 1808879 - RNA, 19 nt, Artificial Sequence
  Description of Artificial Sequence: Synthetic oligonucleotide
gucagcaccuaggauacug

SEQ ID NO: 1808880 - RNA, 19 nt, Artificial Sequence
  Description of Artificial Sequence: Synthetic oligonucleotide
ggagaaucguacuuucuuc

SEQ ID NO: 1808881 - RNA, 19 nt, Artificial Sequence
  Description of Artificial Sequence: Synthetic oligonucleotide
ucaucaacaguggcugaga

SEQ ID NO: 1808882 - RNA, 19 nt, Artificial Sequence
  Description of Artificial Sequence: Synthetic oligonucleotide
cuaucauccugccugaccu

SEQ ID NO: 1808883 - RNA, 19 nt, Artificial Sequence
  Description of Artificial Sequence: Synthetic oligonucleotide
ggaccugcugaccagcugc

SEQ ID NO: 1808884 - RNA, 19 nt, Artificial Sequence
  Description of Artificial Sequence: Synthetic oligonucleotide
ugggcaaggcucuccugag

SEQ ID NO: 1808885 - RNA, 19 nt, Artificial Sequence
  Description of Artificial Sequence: Synthetic oligonucleotide
ugagacccacuauucuaga

SEQ ID NO: 1808886 - RNA, 19 nt, Artificial Sequence
  Description of Artificial Sequence: Synthetic oligonucleotide
caaugucacuggacaagag

SEQ ID NO: 1808887 - RNA, 19 nt, Artificial Sequence
  Description of Artificial Sequence: Synthetic oligonucleotide
cacauuagaagaggugcug

SEQ ID NO: 1808888 - RNA, 19 nt, Artificial Sequence
  Description of Artificial Sequence: Synthetic oligonucleotide
ugacccuugucagccaagc

SEQ ID NO: 1808889 - RNA, 19 nt, Artificial Sequence
  Description of Artificial Sequence: Synthetic oligonucleotide
guagguucgccugauccug

SEQ ID NO: 1808890 - RNA, 19 nt, Artificial Sequence
  Description of Artificial Sequence: Synthetic oligonucleotide
guggcuguagugccucagg

SEQ ID NO: 1808891 - RNA, 19 nt, Artificial Sequence
  Description of Artificial Sequence: Synthetic oligonucleotide
gcuccuagcagcgagaguc

SEQ ID NO: 1808892 - RNA, 19 nt, Artificial Sequence
  Description of Artificial Sequence: Synthetic oligonucleotide
ugcugaaacagaggauaca

SEQ ID NO: 1808893 - RNA, 19 nt, Artificial Sequence
  Description of Artificial Sequence: Synthetic oligonucleotide
cacacucucagguauggaa

SEQ ID NO: 1808894 - RNA, 19 nt, Artificial Sequence
  Description of Artificial Sequence: Synthetic oligonucleotide
agcuaugaagucacaauaa

SEQ ID NO: 1808895 - RNA, 19 nt, Artificial Sequence
  Description of Artificial Sequence: Synthetic oligonucleotide
agaaucguacuuucuucuu

SEQ ID NO: 1808896 - RNA, 19 nt, Artificial Sequence
  Description of Artificial Sequence: Synthetic oligonucleotide
gacuuugggccaggcaggg

SEQ ID NO: 1808897 - RNA, 19 nt, Artificial Sequence
  Description of Artificial Sequence: Synthetic oligonucleotide
ggaaguuguccauugcaca

SEQ ID NO: 1808898 - RNA, 19 nt, Artificial Sequence
  Description of Artificial Sequence: Synthetic oligonucleotide
cacuauacuggaaguuguc

SEQ ID NO: 1808899 - RNA, 19 nt, Artificial Sequence
  Description of Artificial Sequence: Synthetic oligonucleotide
cuagaugccucagaagaca

SEQ ID NO: 1808900 - RNA, 19 nt, Artificial Sequence
  Description of Artificial Sequence: Synthetic oligonucleotide
ucauugacucaggccaggc

SEQ ID NO: 1808901 - RNA, 19 nt, Artificial Sequence
  Description of Artificial Sequence: Synthetic oligonucleotide
acacuauacuggaaguugu

SEQ ID NO: 1808902 - RNA, 19 nt, Artificial Sequence
  Description of Artificial Sequence: Synthetic oligonucleotide
uugcuaucauccugccuga

SEQ ID NO: 1808903 - RNA, 19 nt, Artificial Sequence
  Description of Artificial Sequence: Synthetic oligonucleotide
cagguauggaaaauggacu

SEQ ID NO: 1808904 - RNA, 19 nt, Artificial Sequence
  Description of Artificial Sequence: Synthetic oligonucleotide
caaugucacuuccaauguc

SEQ ID NO: 1808905 - RNA, 19 nt, Artificial Sequence
  Description of Artificial Sequence: Synthetic oligonucleotide
uggcuggguauagccaugg

SEQ ID NO: 1808906 - RNA, 19 nt, Artificial Sequence
  Description of Artificial Sequence: Synthetic oligonucleotide
agccauggagaaucguacu

SEQ ID NO: 1808907 - RNA, 19 nt, Artificial Sequence
  Description of Artificial Sequence: Synthetic oligonucleotide
agccacguccuccaacuca

SEQ ID NO: 1808908 - RNA, 19 nt, Artificial Sequence
  Description of Artificial Sequence: Synthetic oligonucleotide
gcaccuaggauacuggcuc

SEQ ID NO: 1808909 - RNA, 19 nt, Artificial Sequence
  Description of Artificial Sequence: Synthetic oligonucleotide
cagcaccuaggauacuggc

SEQ ID NO: 1808910 - RNA, 19 nt, Artificial Sequence
  Description of Artificial Sequence: Synthetic oligonucleotide
aggugcuuaaggauccgag

SEQ ID NO: 1808911 - RNA, 19 nt, Artificial Sequence
  Description of Artificial Sequence: Synthetic oligonucleotide
auagccauggagaaucgua

SEQ ID NO: 1808912 - RNA, 19 nt, Artificial Sequence
  Description of Artificial Sequence: Synthetic oligonucleotide
cuuccaaugucacuuccaa

SEQ ID NO: 1808913 - RNA, 19 nt, Artificial Sequence
  Description of Artificial Sequence: Synthetic oligonucleotide
acaguggcugagaacucgg

SEQ ID NO: 1808914 - RNA, 19 nt, Artificial Sequence
  Description of Artificial Sequence: Synthetic oligonucleotide
caggaccugggcaaggcuc

SEQ ID NO: 1808915 - RNA, 19 nt, Artificial Sequence
  Description of Artificial Sequence: Synthetic oligonucleotide
gacccauaggccgagucca

SEQ ID NO: 1808916 - RNA, 19 nt, Artificial Sequence
  Description of Artificial Sequence: Synthetic oligonucleotide
acagaggauacaggaggag

SEQ ID NO: 1808917 - RNA, 19 nt, Artificial Sequence
  Description of Artificial Sequence: Synthetic oligonucleotide
auaggccgaguccaaguaa

SEQ ID NO: 1808918 - RNA, 19 nt, Artificial Sequence
  Description of Artificial Sequence: Synthetic oligonucleotide
agguucgccugauccugac

SEQ ID NO: 1808919 - RNA, 19 nt, Artificial Sequence
  Description of Artificial Sequence: Synthetic oligonucleotide
cagcuaugaagucacaaua

SEQ ID NO: 1808920 - RNA, 19 nt, Artificial Sequence
  Description of Artificial Sequence: Synthetic oligonucleotide
aggauacuggcuccuuccu

SEQ ID NO: 1808921 - RNA, 19 nt, Artificial Sequence
  Description of Artificial Sequence: Synthetic oligonucleotide
cuguuguccccuccccugg

SEQ ID NO: 1808922 - RNA, 19 nt, Artificial Sequence
  Description of Artificial Sequence: Synthetic oligonucleotide
guauagccauggagaaucg

SEQ ID NO: 1808923 - RNA, 19 nt, Artificial Sequence
  Description of Artificial Sequence: Synthetic oligonucleotide
uggacccauaggccgaguc

SEQ ID NO: 1808924 - RNA, 19 nt, Artificial Sequence
  Description of Artificial Sequence: Synthetic oligonucleotide
ggagaaucacaggacagac

SEQ ID NO: 1808925 - RNA, 19 nt, Artificial Sequence
  Description of Artificial Sequence: Synthetic oligonucleotide
uuccaaugucacuuccaau

SEQ ID NO: 1808926 - RNA, 19 nt, Artificial Sequence
  Description of Artificial Sequence: Synthetic oligonucleotide
cugaugcuguccugagagc

SEQ ID NO: 1808927 - RNA, 19 nt, Artificial Sequence
  Description of Artificial Sequence: Synthetic oligonucleotide
caccuaggauacuggcucc

SEQ ID NO: 1808928 - RNA, 19 nt, Artificial Sequence
  Description of Artificial Sequence: Synthetic oligonucleotide
uauagccauggagaaucgu

SEQ ID NO: 1808929 - RNA, 19 nt, Artificial Sequence
  Description of Artificial Sequence: Synthetic oligonucleotide
gacccuugucagccaagcc

SEQ ID NO: 1808930 - RNA, 19 nt, Artificial Sequence
  Description of Artificial Sequence: Synthetic oligonucleotide
gacucugcuucuugugaga

SEQ ID NO: 1808931 - RNA, 19 nt, Artificial Sequence
  Description of Artificial Sequence: Synthetic oligonucleotide
uugacucaggccaggccua

SEQ ID NO: 1808932 - RNA, 19 nt, Artificial Sequence
  Description of Artificial Sequence: Synthetic oligonucleotide
cucauugacucaggccagg

SEQ ID NO: 1808933 - RNA, 19 nt, Artificial Sequence
  Description of Artificial Sequence: Synthetic oligonucleotide
agggaucaaaggauggaga

SEQ ID NO: 1808934 - RNA, 19 nt, Artificial Sequence
  Description of Artificial Sequence: Synthetic oligonucleotide
ugggguuaggaaggguggc

SEQ ID NO: 1808935 - RNA, 19 nt, Artificial Sequence
  Description of Artificial Sequence: Synthetic oligonucleotide
ccuaggaaagcuguggcug

SEQ ID NO: 1808936 - RNA, 19 nt, Artificial Sequence
  Description of Artificial Sequence: Synthetic oligonucleotide
uuguccccuccccugggga

SEQ ID NO: 1808937 - RNA, 19 nt, Artificial Sequence
  Description of Artificial Sequence: Synthetic oligonucleotide
gccgaguccaaguaaguca

SEQ ID NO: 1808938 - RNA, 19 nt, Artificial Sequence
  Description of Artificial Sequence: Synthetic oligonucleotide
uucgccugauccugacucu

SEQ ID NO: 1808939 - RNA, 19 nt, Artificial Sequence
  Description of Artificial Sequence: Synthetic oligonucleotide
aaguuguccauugcacauu

SEQ ID NO: 1808940 - RNA, 19 nt, Artificial Sequence
  Description of Artificial Sequence: Synthetic oligonucleotide
ccauugcacauuagaagag

SEQ ID NO: 1808941 - RNA, 19 nt, Artificial Sequence
  Description of Artificial Sequence: Synthetic oligonucleotide
ggccuuagccacuggcugg

SEQ ID NO: 1808942 - RNA, 19 nt, Artificial Sequence
  Description of Artificial Sequence: Synthetic oligonucleotide
aacucggcccacucucgau

SEQ ID NO: 1808943 - RNA, 19 nt, Artificial Sequence
  Description of Artificial Sequence: Synthetic oligonucleotide
cucgucaccagaggccagg

SEQ ID NO: 1808944 - RNA, 19 nt, Artificial Sequence
  Description of Artificial Sequence: Synthetic oligonucleotide
uagguucgccugauccuga

SEQ ID NO: 1808945 - RNA, 19 nt, Artificial Sequence
  Description of Artificial Sequence: Synthetic oligonucleotide
ggguuaacucccauguccc

SEQ ID NO: 1808946 - RNA, 19 nt, Artificial Sequence
  Description of Artificial Sequence: Synthetic oligonucleotide
ggacccauaggccgagucc

SEQ ID NO: 1808947 - RNA, 19 nt, Artificial Sequence
  Description of Artificial Sequence: Synthetic oligonucleotide
acuuccaaugucacuucca

SEQ ID NO: 1808948 - RNA, 19 nt, Artificial Sequence
  Description of Artificial Sequence: Synthetic oligonucleotide
agcucgucaccagaggcca

SEQ ID NO: 1808949 - RNA, 19 nt, Artificial Sequence
  Description of Artificial Sequence: Synthetic oligonucleotide
gcuuaaggauccgaggcug

SEQ ID NO: 1808950 - RNA, 19 nt, Artificial Sequence
  Description of Artificial Sequence: Synthetic oligonucleotide
cccaacagccacagcaucc

SEQ ID NO: 1808951 - RNA, 19 nt, Artificial Sequence
  Description of Artificial Sequence: Synthetic oligonucleotide
cauuuccaucuggagaauc

SEQ ID NO: 1808952 - RNA, 19 nt, Artificial Sequence
  Description of Artificial Sequence: Synthetic oligonucleotide
ggauggagagaagagcaac

SEQ ID NO: 1808953 - RNA, 19 nt, Artificial Sequence
  Description of Artificial Sequence: Synthetic oligonucleotide
ucucgaucacugagcugga

SEQ ID NO: 1808954 - RNA, 19 nt, Artificial Sequence
  Description of Artificial Sequence: Synthetic oligonucleotide
uagugccucagggaucaug

SEQ ID NO: 1808955 - RNA, 19 nt, Artificial Sequence
  Description of Artificial Sequence: Synthetic oligonucleotide
agcaccuaggauacuggcu

SEQ ID NO: 1808956 - RNA, 19 nt, Artificial Sequence
  Description of Artificial Sequence: Synthetic oligonucleotide
gcuggagugacagcaagac

SEQ ID NO: 1808957 - RNA, 19 nt, Artificial Sequence
  Description of Artificial Sequence: Synthetic oligonucleotide
agccugccuuucaauaggg

SEQ ID NO: 1808958 - RNA, 19 nt, Artificial Sequence
  Description of Artificial Sequence: Synthetic oligonucleotide
uaucauccugccugaccuc

SEQ ID NO: 1808959 - RNA, 19 nt, Artificial Sequence
  Description of Artificial Sequence: Synthetic oligonucleotide
acucaucaacaguggcuga

SEQ ID NO: 1808960 - RNA, 19 nt, Artificial Sequence
  Description of Artificial Sequence: Synthetic oligonucleotide
caugcuucaccaggccagc

SEQ ID NO: 1808961 - RNA, 19 nt, Artificial Sequence
  Description of Artificial Sequence: Synthetic oligonucleotide
caguggcugagaacucggc

SEQ ID NO: 1808962 - RNA, 19 nt, Artificial Sequence
  Description of Artificial Sequence: Synthetic oligonucleotide
agucugggguuaggaaggg

SEQ ID NO: 1808963 - RNA, 19 nt, Artificial Sequence
  Description of Artificial Sequence: Synthetic oligonucleotide
augcacuaaguaguacaca

SEQ ID NO: 1808964 - RNA, 19 nt, Artificial Sequence
  Description of Artificial Sequence: Synthetic oligonucleotide
ucagccaagccugccuuuc

SEQ ID NO: 1808965 - RNA, 19 nt, Artificial Sequence
  Description of Artificial Sequence: Synthetic oligonucleotide
cccacucucgaucacugag

SEQ ID NO: 1808966 - RNA, 19 nt, Artificial Sequence
  Description of Artificial Sequence: Synthetic oligonucleotide
auacuggcuccuuccuaga

SEQ ID NO: 1808967 - RNA, 19 nt, Artificial Sequence
  Description of Artificial Sequence: Synthetic oligonucleotide
aggcagggucuucacaaau

SEQ ID NO: 1808968 - RNA, 19 nt, Artificial Sequence
  Description of Artificial Sequence: Synthetic oligonucleotide
cugagaacucggcccacuc

SEQ ID NO: 1808969 - RNA, 19 nt, Artificial Sequence
  Description of Artificial Sequence: Synthetic oligonucleotide
cacugucacuuccaauguc

SEQ ID NO: 1808970 - RNA, 19 nt, Artificial Sequence
  Description of Artificial Sequence: Synthetic oligonucleotide
cagcugcccagugaagagg

SEQ ID NO: 1808971 - RNA, 19 nt, Artificial Sequence
  Description of Artificial Sequence: Synthetic oligonucleotide
ggaagacggggcccaacag

SEQ ID NO: 1808972 - RNA, 19 nt, Artificial Sequence
  Description of Artificial Sequence: Synthetic oligonucleotide
cacucucagguauggaaaa

SEQ ID NO: 1808973 - RNA, 19 nt, Artificial Sequence
  Description of Artificial Sequence: Synthetic oligonucleotide
aggaccugcugaccagcug

SEQ ID NO: 1808974 - RNA, 19 nt, Artificial Sequence
  Description of Artificial Sequence: Synthetic oligonucleotide
ccaggcuccaugcacuaag

SEQ ID NO: 1808975 - RNA, 19 nt, Artificial Sequence
  Description of Artificial Sequence: Synthetic oligonucleotide
aagaggccacacucaucaa

SEQ ID NO: 1808976 - RNA, 19 nt, Artificial Sequence
  Description of Artificial Sequence: Synthetic oligonucleotide
ccacucucgaucacugagc

SEQ ID NO: 1808977 - RNA, 19 nt, Artificial Sequence
  Description of Artificial Sequence: Synthetic oligonucleotide
aucaaaggauggagagaag

SEQ ID NO: 1808978 - RNA, 19 nt, Artificial Sequence
  Description of Artificial Sequence: Synthetic oligonucleotide
gaacucggcccacucucga

SEQ ID NO: 1808979 - RNA, 19 nt, Artificial Sequence
  Description of Artificial Sequence: Synthetic oligonucleotide
gauacaggaggaggcaggu

SEQ ID NO: 1808980 - RNA, 19 nt, Artificial Sequence
  Description of Artificial Sequence: Synthetic oligonucleotide
cagcugcugagcagccacg

SEQ ID NO: 1808981 - RNA, 19 nt, Artificial Sequence
  Description of Artificial Sequence: Synthetic oligonucleotide
cuggguuaacucccauguc

SEQ ID NO: 1808982 - RNA, 19 nt, Artificial Sequence
  Description of Artificial Sequence: Synthetic oligonucleotide
auggagaaucguacuuucu

SEQ ID NO: 1808983 - RNA, 19 nt, Artificial Sequence
  Description of Artificial Sequence: Synthetic oligonucleotide
gguuaggaaggguggccug

SEQ ID NO: 1808984 - RNA, 19 nt, Artificial Sequence
  Description of Artificial Sequence: Synthetic oligonucleotide
caagacuuugggccaggca

SEQ ID NO: 1808985 - RNA, 19 nt, Artificial Sequence
  Description of Artificial Sequence: Synthetic oligonucleotide
caacaguggcugagaacuc

SEQ ID NO: 1808986 - RNA, 19 nt, Artificial Sequence
  Description of Artificial Sequence: Synthetic oligonucleotide
agcaagacuuugggccagg

SEQ ID NO: 1808987 - RNA, 19 nt, Artificial Sequence
  Description of Artificial Sequence: Synthetic oligonucleotide
cucccugguaguccauuuc

SEQ ID NO: 1808988 - RNA, 19 nt, Artificial Sequence
  Description of Artificial Sequence: Synthetic oligonucleotide
agcagcuuccaggcucagg

SEQ ID NO: 1808989 - RNA, 19 nt, Artificial Sequence
  Description of Artificial Sequence: Synthetic oligonucleotide
ggaaaauggacuuggccuu

SEQ ID NO: 1808990 - RNA, 19 nt, Artificial Sequence
  Description of Artificial Sequence: Synthetic oligonucleotide
gguaguccauuuccaucug

SEQ ID NO: 1808991 - RNA, 19 nt, Artificial Sequence
  Description of Artificial Sequence: Synthetic oligonucleotide
cagggucuucacaaaucca

SEQ ID NO: 1808992 - RNA, 19 nt, Artificial Sequence
  Description of Artificial Sequence: Synthetic oligonucleotide
cauaggccgaguccaagua

SEQ ID NO: 1808993 - RNA, 19 nt, Artificial Sequence
  Description of Artificial Sequence: Synthetic oligonucleotide
cauggcuggguauagccau

SEQ ID NO: 1808994 - RNA, 19 nt, Artificial Sequence
  Description of Artificial Sequence: Synthetic oligonucleotide
uuaggaaggguggccugua

SEQ ID NO: 1808995 - RNA, 19 nt, Artificial Sequence
  Description of Artificial Sequence: Synthetic oligonucleotide
cugacucuucauggcuggg

SEQ ID NO: 1808996 - RNA, 19 nt, Artificial Sequence
  Description of Artificial Sequence: Synthetic oligonucleotide
guuguccauugcacauuag

SEQ ID NO: 1808997 - RNA, 19 nt, Artificial Sequence
  Description of Artificial Sequence: Synthetic oligonucleotide
ugcugaccagcugcugagc

SEQ ID NO: 1808998 - RNA, 19 nt, Artificial Sequence
  Description of Artificial Sequence: Synthetic oligonucleotide
uccaacucacagcccuguu

SEQ ID NO: 1808999 - RNA, 19 nt, Artificial Sequence
  Description of Artificial Sequence: Synthetic oligonucleotide
gcgagagucacugcauagc

SEQ ID NO: 1809000 - RNA, 19 nt, Artificial Sequence
  Description of Artificial Sequence: Synthetic oligonucleotide
aucguacuuucuucuucuu

SEQ ID NO: 1809001 - RNA, 19 nt, Artificial Sequence
  Description of Artificial Sequence: Synthetic oligonucleotide
ggaucaaaggauggagaga

SEQ ID NO: 1809002 - RNA, 19 nt, Artificial Sequence
  Description of Artificial Sequence: Synthetic oligonucleotide
gcuguagugccucagggau

SEQ ID NO: 1809003 - RNA, 19 nt, Artificial Sequence
  Description of Artificial Sequence: Synthetic oligonucleotide
cuaggaaagcuguggcugu

SEQ ID NO: 1809004 - RNA, 19 nt, Artificial Sequence
  Description of Artificial Sequence: Synthetic oligonucleotide
acucucagguauggaaaau

SEQ ID NO: 1809005 - RNA, 19 nt, Artificial Sequence
  Description of Artificial Sequence: Synthetic oligonucleotide
acggcucccugaugcuguc

SEQ ID NO: 1809006 - RNA, 19 nt, Artificial Sequence
  Description of Artificial Sequence: Synthetic oligonucleotide
gggaagacggggcccaaca

SEQ ID NO: 1809007 - RNA, 19 nt, Artificial Sequence
  Description of Artificial Sequence: Synthetic oligonucleotide
ucgucaccagaggccaggc

SEQ ID NO: 1809008 - RNA, 19 nt, Artificial Sequence
  Description of Artificial Sequence: Synthetic oligonucleotide
cucggcccacucucgauca

SEQ ID NO: 1809009 - RNA, 19 nt, Artificial Sequence
  Description of Artificial Sequence: Synthetic oligonucleotide
cuuguucugucaacugggu

SEQ ID NO: 1809010 - RNA, 19 nt, Artificial Sequence
  Description of Artificial Sequence: Synthetic oligonucleotide
gagaaucacaggacagacu

SEQ ID NO: 1809011 - RNA, 19 nt, Artificial Sequence
  Description of Artificial Sequence: Synthetic oligonucleotide
ccuguuguccccuccccug

SEQ ID NO: 1809012 - RNA, 19 nt, Artificial Sequence
  Description of Artificial Sequence: Synthetic oligonucleotide
guaagucagcaccuaggau

SEQ ID NO: 1809013 - RNA, 19 nt, Artificial Sequence
  Description of Artificial Sequence: Synthetic oligonucleotide
gacucaggccaggccuagg

SEQ ID NO: 1809014 - RNA, 19 nt, Artificial Sequence
  Description of Artificial Sequence: Synthetic oligonucleotide
cacuggacaagagcucguc

SEQ ID NO: 1809015 - RNA, 19 nt, Artificial Sequence
  Description of Artificial Sequence: Synthetic oligonucleotide
ggcuguagugccucaggga

SEQ ID NO: 1809016 - RNA, 19 nt, Artificial Sequence
  Description of Artificial Sequence: Synthetic oligonucleotide
uagcagcgagagucacugc

SEQ ID NO: 1809017 - RNA, 19 nt, Artificial Sequence
  Description of Artificial Sequence: Synthetic oligonucleotide
aggcuccaugcacuaagua

SEQ ID NO: 1809018 - RNA, 19 nt, Artificial Sequence
  Description of Artificial Sequence: Synthetic oligonucleotide
accuaggauacuggcuccu

SEQ ID NO: 1809019 - RNA, 19 nt, Artificial Sequence
  Description of Artificial Sequence: Synthetic oligonucleotide
gggcaaggcucuccugagg

SEQ ID NO: 1809020 - RNA, 19 nt, Artificial Sequence
  Description of Artificial Sequence: Synthetic oligonucleotide
caugacccuugucagccaa

SEQ ID NO: 1809021 - RNA, 19 nt, Artificial Sequence
  Description of Artificial Sequence: Synthetic oligonucleotide
gguugagacccacuauucu

SEQ ID NO: 1809022 - RNA, 19 nt, Artificial Sequence
  Description of Artificial Sequence: Synthetic oligonucleotide
cuccaugcacuaaguagua

SEQ ID NO: 1809023 - RNA, 19 nt, Artificial Sequence
  Description of Artificial Sequence: Synthetic oligonucleotide
cuccuagcagcgagaguca

SEQ ID NO: 1809024 - RNA, 19 nt, Artificial Sequence
  Description of Artificial Sequence: Synthetic oligonucleotide
cagcaagacuuugggccag

SEQ ID NO: 1809025 - RNA, 19 nt, Artificial Sequence
  Description of Artificial Sequence: Synthetic oligonucleotide
gggguuaggaaggguggcc

SEQ ID NO: 1809026 - RNA, 19 nt, Artificial Sequence
  Description of Artificial Sequence: Synthetic oligonucleotide
guuaacucccaugucccau

SEQ ID NO: 1809027 - RNA, 19 nt, Artificial Sequence
  Description of Artificial Sequence: Synthetic oligonucleotide
cacuuccaaugucacugga

SEQ ID NO: 1809028 - RNA, 19 nt, Artificial Sequence
  Description of Artificial Sequence: Synthetic oligonucleotide
gaaucacaggacagacucu

SEQ ID NO: 1809029 - RNA, 19 nt, Artificial Sequence
  Description of Artificial Sequence: Synthetic oligonucleotide
gggacuuggacaggaccug

SEQ ID NO: 1809030 - RNA, 19 nt, Artificial Sequence
  Description of Artificial Sequence: Synthetic oligonucleotide
auggcuggguauagccaug

SEQ ID NO: 1809031 - RNA, 19 nt, Artificial Sequence
  Description of Artificial Sequence: Synthetic oligonucleotide
guuaggaaggguggccugu

SEQ ID NO: 1809032 - RNA, 19 nt, Artificial Sequence
  Description of Artificial Sequence: Synthetic oligonucleotide
gccacguccuccaacucac

SEQ ID NO: 1809033 - RNA, 19 nt, Artificial Sequence
  Description of Artificial Sequence: Synthetic oligonucleotide
cucgaucacugagcuggac

SEQ ID NO: 1809034 - RNA, 19 nt, Artificial Sequence
  Description of Artificial Sequence: Synthetic oligonucleotide
ccagccugcaagaggccac

SEQ ID NO: 1809035 - RNA, 19 nt, Artificial Sequence
  Description of Artificial Sequence: Synthetic oligonucleotide
ucgccugauccugacucuu

SEQ ID NO: 1809036 - RNA, 19 nt, Artificial Sequence
  Description of Artificial Sequence: Synthetic oligonucleotide
gcaaggcucuccugaggac

SEQ ID NO: 1809037 - RNA, 19 nt, Artificial Sequence
  Description of Artificial Sequence: Synthetic oligonucleotide
augccucagaagacaggga

SEQ ID NO: 1809038 - RNA, 19 nt, Artificial Sequence
  Description of Artificial Sequence: Synthetic oligonucleotide
cgagagucacugcauagca

SEQ ID NO: 1809039 - RNA, 19 nt, Artificial Sequence
  Description of Artificial Sequence: Synthetic oligonucleotide
ggacaggaccugggcaagg

SEQ ID NO: 1809040 - RNA, 19 nt, Artificial Sequence
  Description of Artificial Sequence: Synthetic oligonucleotide
acccacuauucuagacuca

SEQ ID NO: 1809041 - RNA, 19 nt, Artificial Sequence
  Description of Artificial Sequence: Synthetic oligonucleotide
cauugcuaucauccugccu

SEQ ID NO: 1809042 - RNA, 19 nt, Artificial Sequence
  Description of Artificial Sequence: Synthetic oligonucleotide
ggauacuggcuccuuccua

SEQ ID NO: 1809043 - RNA, 19 nt, Artificial Sequence
  Description of Artificial Sequence: Synthetic oligonucleotide
cuggagugacagcaagacu

SEQ ID NO: 1809044 - RNA, 19 nt, Artificial Sequence
  Description of Artificial Sequence: Synthetic oligonucleotide
ccaagccugccuuucaaua

SEQ ID NO: 1809045 - RNA, 19 nt, Artificial Sequence
  Description of Artificial Sequence: Synthetic oligonucleotide
ggaggaggcaggugcuuaa

SEQ ID NO: 1809046 - RNA, 19 nt, Artificial Sequence
  Description of Artificial Sequence: Synthetic oligonucleotide
cucugcugaaacagaggau

SEQ ID NO: 1809047 - RNA, 19 nt, Artificial Sequence
  Description of Artificial Sequence: Synthetic oligonucleotide
aggccgaguccaaguaagu

SEQ ID NO: 1809048 - RNA, 19 nt, Artificial Sequence
  Description of Artificial Sequence: Synthetic oligonucleotide
gcaggugcuuaaggauccg

SEQ ID NO: 1809049 - RNA, 19 nt, Artificial Sequence
  Description of Artificial Sequence: Synthetic oligonucleotide
caggugcuuaaggauccga

SEQ ID NO: 1809050 - RNA, 19 nt, Artificial Sequence
  Description of Artificial Sequence: Synthetic oligonucleotide
ccaaugucacuuccaaugu

SEQ ID NO: 1809051 - RNA, 19 nt, Artificial Sequence
  Description of Artificial Sequence: Synthetic oligonucleotide
cagcgagagucacugcaua

SEQ ID NO: 1809052 - RNA, 19 nt, Artificial Sequence
  Description of Artificial Sequence: Synthetic oligonucleotide
acuuugggccaggcagggu

SEQ ID NO: 1809053 - RNA, 19 nt, Artificial Sequence
  Description of Artificial Sequence: Synthetic oligonucleotide
cacggcucccugaugcugu

SEQ ID NO: 1809054 - RNA, 19 nt, Artificial Sequence
  Description of Artificial Sequence: Synthetic oligonucleotide
gcaagacuuugggccaggc

SEQ ID NO: 1809055 - RNA, 19 nt, Artificial Sequence
  Description of Artificial Sequence: Synthetic oligonucleotide
cagccaagccugccuuuca

SEQ ID NO: 1809056 - RNA, 19 nt, Artificial Sequence
  Description of Artificial Sequence: Synthetic oligonucleotide
gcccuguuguccccucccc

SEQ ID NO: 1809057 - RNA, 19 nt, Artificial Sequence
  Description of Artificial Sequence: Synthetic oligonucleotide
caggcuccaugcacuaagu

SEQ ID NO: 1809058 - RNA, 19 nt, Artificial Sequence
  Description of Artificial Sequence: Synthetic oligonucleotide
gccuaggaaagcuguggcu

SEQ ID NO: 1809059 - RNA, 19 nt, Artificial Sequence
  Description of Artificial Sequence: Synthetic oligonucleotide
gccaggccuaggaaagcug

SEQ ID NO: 1809060 - RNA, 19 nt, Artificial Sequence
  Description of Artificial Sequence: Synthetic oligonucleotide
cccaugcuucaccaggcca

SEQ ID NO: 1809061 - RNA, 19 nt, Artificial Sequence
  Description of Artificial Sequence: Synthetic oligonucleotide
gcuggacccauaggccgag

SEQ ID NO: 1809062 - RNA, 19 nt, Artificial Sequence
  Description of Artificial Sequence: Synthetic oligonucleotide
ggcucccugaugcuguccu

SEQ ID NO: 1809063 - RNA, 19 nt, Artificial Sequence
  Description of Artificial Sequence: Synthetic oligonucleotide
agucagcaccuaggauacu

SEQ ID NO: 1809064 - RNA, 19 nt, Artificial Sequence
  Description of Artificial Sequence: Synthetic oligonucleotide
agacggggcccaacagcca

SEQ ID NO: 1809065 - RNA, 19 nt, Artificial Sequence
  Description of Artificial Sequence: Synthetic oligonucleotide
ggccuguagguucgccuga

SEQ ID NO: 1809066 - RNA, 19 nt, Artificial Sequence
  Description of Artificial Sequence: Synthetic oligonucleotide
gaggaccugcugaccagcu

SEQ ID NO: 1809067 - RNA, 19 nt, Artificial Sequence
  Description of Artificial Sequence: Synthetic oligonucleotide
ggguuaggaaggguggccu

SEQ ID NO: 1809068 - RNA, 19 nt, Artificial Sequence
  Description of Artificial Sequence: Synthetic oligonucleotide
gcaagaggccacacucauc

SEQ ID NO: 1809069 - RNA, 19 nt, Artificial Sequence
  Description of Artificial Sequence: Synthetic oligonucleotide
cagccugcaagaggccaca

SEQ ID NO: 1809070 - RNA, 19 nt, Artificial Sequence
  Description of Artificial Sequence: Synthetic oligonucleotide
ggccagucugggguuagga

SEQ ID NO: 1809071 - RNA, 19 nt, Artificial Sequence
  Description of Artificial Sequence: Synthetic oligonucleotide
cagggaucaugacccuugu

SEQ ID NO: 1809072 - RNA, 19 nt, Artificial Sequence
  Description of Artificial Sequence: Synthetic oligonucleotide
ggacacuauacuggaaguu

SEQ ID NO: 1809073 - RNA, 19 nt, Artificial Sequence
  Description of Artificial Sequence: Synthetic oligonucleotide
cucagaagacagggaucaa

SEQ ID NO: 1809074 - RNA, 19 nt, Artificial Sequence
  Description of Artificial Sequence: Synthetic oligonucleotide
cuccaacucacagcccugu

SEQ ID NO: 1809075 - RNA, 19 nt, Artificial Sequence
  Description of Artificial Sequence: Synthetic oligonucleotide
ccauaggccgaguccaagu

SEQ ID NO: 1809076 - RNA, 19 nt, Artificial Sequence
  Description of Artificial Sequence: Synthetic oligonucleotide
acccauaggccgaguccaa

SEQ ID NO: 1809077 - RNA, 19 nt, Artificial Sequence
  Description of Artificial Sequence: Synthetic oligonucleotide
ccuguagguucgccugauc

SEQ ID NO: 1809078 - RNA, 19 nt, Artificial Sequence
  Description of Artificial Sequence: Synthetic oligonucleotide
ggggccagucugggguuag

SEQ ID NO: 1809079 - RNA, 19 nt, Artificial Sequence
  Description of Artificial Sequence: Synthetic oligonucleotide
gggccagucugggguuagg

SEQ ID NO: 1809080 - RNA, 19 nt, Artificial Sequence
  Description of Artificial Sequence: Synthetic oligonucleotide
gguucgccugauccugacu

SEQ ID NO: 1809081 - RNA, 19 nt, Artificial Sequence
  Description of Artificial Sequence: Synthetic oligonucleotide
ccacggcucccugaugcug

SEQ ID NO: 1809082 - RNA, 19 nt, Artificial Sequence
  Description of Artificial Sequence: Synthetic oligonucleotide
gccuuucaauagggcacac

SEQ ID NO: 1809083 - RNA, 19 nt, Artificial Sequence
  Description of Artificial Sequence: Synthetic oligonucleotide
caacuggguuaacucccau

SEQ ID NO: 1809084 - RNA, 19 nt, Artificial Sequence
  Description of Artificial Sequence: Synthetic oligonucleotide
gcucgucaccagaggccag

SEQ ID NO: 1809085 - RNA, 19 nt, Artificial Sequence
  Description of Artificial Sequence: Synthetic oligonucleotide
cccacuauucuagacucau

SEQ ID NO: 1809086 - RNA, 19 nt, Artificial Sequence
  Description of Artificial Sequence: Synthetic oligonucleotide
ggccaggccuaggaaagcu

SEQ ID NO: 1809087 - RNA, 19 nt, Artificial Sequence
  Description of Artificial Sequence: Synthetic oligonucleotide
ccuagcagcgagagucacu

SEQ ID NO: 1809088 - RNA, 19 nt, Artificial Sequence
  Description of Artificial Sequence: Synthetic oligonucleotide
ggguauagccauggagaau

SEQ ID NO: 1809089 - RNA, 19 nt, Artificial Sequence
  Description of Artificial Sequence: Synthetic oligonucleotide
gcagcgagagucacugcau

SEQ ID NO: 1809090 - RNA, 19 nt, Artificial Sequence
  Description of Artificial Sequence: Synthetic oligonucleotide
gcugagaacucggcccacu

SEQ ID NO: 1809091 - RNA, 19 nt, Artificial Sequence
  Description of Artificial Sequence: Synthetic oligonucleotide
ggacuuggccuuagccacu

SEQ ID NO: 1809092 - RNA, 19 nt, Artificial Sequence
  Description of Artificial Sequence: Synthetic oligonucleotide
ccuuucaauagggcacacu

SEQ ID NO: 1809093 - RNA, 19 nt, Artificial Sequence
  Description of Artificial Sequence: Synthetic oligonucleotide
ggcuccuagcagcgagagu

SEQ ID NO: 1809094 - RNA, 19 nt, Artificial Sequence
  Description of Artificial Sequence: Synthetic oligonucleotide
ccuuagccacuggcuggac

SEQ ID NO: 1809095 - RNA, 19 nt, Artificial Sequence
  Description of Artificial Sequence: Synthetic oligonucleotide
ccacguccuccaacucaca

SEQ ID NO: 1809096 - RNA, 19 nt, Artificial Sequence
  Description of Artificial Sequence: Synthetic oligonucleotide
ccacuauucuagacucauu

SEQ ID NO: 1809097 - RNA, 19 nt, Artificial Sequence
  Description of Artificial Sequence: Synthetic oligonucleotide
ggguggccuguagguucgc

SEQ ID NO: 1809098 - RNA, 19 nt, Artificial Sequence
  Description of Artificial Sequence: Synthetic oligonucleotide
cccuguuguccccuccccu

SEQ ID NO: 1809099 - RNA, 19 nt, Artificial Sequence
  Description of Artificial Sequence: Synthetic oligonucleotide
gccacuggcuggacccaua

SEQ ID NO: 1809100 - RNA, 19 nt, Artificial Sequence
  Description of Artificial Sequence: Synthetic oligonucleotide
gccuguagguucgccugau

SEQ ID NO: 1809101 - RNA, 19 nt, Artificial Sequence
  Description of Artificial Sequence: Synthetic oligonucleotide
cggcucccugaugcugucc

SEQ ID NO: 1809102 - RNA, 19 nt, Artificial Sequence
  Description of Artificial Sequence: Synthetic oligonucleotide
ccauuuccaucuggagaau

SEQ ID NO: 1809103 - RNA, 19 nt, Artificial Sequence
  Description of Artificial Sequence: Synthetic oligonucleotide
ccccucccugguaguccau

SEQ ID NO: 1809104 - RNA, 19 nt, Artificial Sequence
  Description of Artificial Sequence: Synthetic oligonucleotide
uaagugguaguacagaugg

SEQ ID NO: 1809105 - RNA, 19 nt, Artificial Sequence
  Description of Artificial Sequence: Synthetic oligonucleotide
uaaaucauugugcagcgcg

SEQ ID NO: 1809106 - RNA, 19 nt, Artificial Sequence
  Description of Artificial Sequence: Synthetic oligonucleotide
uugucauaaacacauuucc

SEQ ID NO: 1809107 - RNA, 19 nt, Artificial Sequence
  Description of Artificial Sequence: Synthetic oligonucleotide
uuuaaaucauugugcagcg

SEQ ID NO: 1809108 - RNA, 19 nt, Artificial Sequence
  Description of Artificial Sequence: Synthetic oligonucleotide
agacugaaggcccuuagcc

SEQ ID NO: 1809109 - RNA, 19 nt, Artificial Sequence
  Description of Artificial Sequence: Synthetic oligonucleotide
agacagauugguuugcagc

SEQ ID NO: 1809110 - RNA, 19 nt, Artificial Sequence
  Description of Artificial Sequence: Synthetic oligonucleotide
ugaggacugauucaagacg

SEQ ID NO: 1809111 - RNA, 19 nt, Artificial Sequence
  Description of Artificial Sequence: Synthetic oligonucleotide
auaggagugagaaaguacc

SEQ ID NO: 1809112 - RNA, 19 nt, Artificial Sequence
  Description of Artificial Sequence: Synthetic oligonucleotide
ugucccauuacccacaaga

SEQ ID NO: 1809113 - RNA, 19 nt, Artificial Sequence
  Description of Artificial Sequence: Synthetic oligonucleotide
cuuacuugacuucugaaag

SEQ ID NO: 1809114 - RNA, 19 nt, Artificial Sequence
  Description of Artificial Sequence: Synthetic oligonucleotide
uuccauuuaugcuugaugu

SEQ ID NO: 1809115 - RNA, 19 nt, Artificial Sequence
  Description of Artificial Sequence: Synthetic oligonucleotide
cauucauccauuccaaugc

SEQ ID NO: 1809116 - RNA, 19 nt, Artificial Sequence
  Description of Artificial Sequence: Synthetic oligonucleotide
auuccaaugcucuccuucc

SEQ ID NO: 1809117 - RNA, 19 nt, Artificial Sequence
  Description of Artificial Sequence: Synthetic oligonucleotide
uauuagacagauugguuug

SEQ ID NO: 1809118 - RNA, 19 nt, Artificial Sequence
  Description of Artificial Sequence: Synthetic oligonucleotide
ugucauaaacacauuuccc

SEQ ID NO: 1809119 - RNA, 19 nt, Artificial Sequence
  Description of Artificial Sequence: Synthetic oligonucleotide
aguacuugucccauuaccc

SEQ ID NO: 1809120 - RNA, 19 nt, Artificial Sequence
  Description of Artificial Sequence: Synthetic oligonucleotide
cacaagagaagacauuugg

SEQ ID NO: 1809121 - RNA, 19 nt, Artificial Sequence
  Description of Artificial Sequence: Synthetic oligonucleotide
auuguuaagugguaguaca

SEQ ID NO: 1809122 - RNA, 19 nt, Artificial Sequence
  Description of Artificial Sequence: Synthetic oligonucleotide
ugaucaaggaacagaaccu

SEQ ID NO: 1809123 - RNA, 19 nt, Artificial Sequence
  Description of Artificial Sequence: Synthetic oligonucleotide
ucuccuuaggggaaggugc

SEQ ID NO: 1809124 - RNA, 19 nt, Artificial Sequence
  Description of Artificial Sequence: Synthetic oligonucleotide
uucacgauggacacacggg

SEQ ID NO: 1809125 - RNA, 19 nt, Artificial Sequence
  Description of Artificial Sequence: Synthetic oligonucleotide
caagacgacagcuaccucc

SEQ ID NO: 1809126 - RNA, 19 nt, Artificial Sequence
  Description of Artificial Sequence: Synthetic oligonucleotide
uuacuugacuucugaaagg

SEQ ID NO: 1809127 - RNA, 19 nt, Artificial Sequence
  Description of Artificial Sequence: Synthetic oligonucleotide
acaucccugauuucugucc

SEQ ID NO: 1809128 - RNA, 19 nt, Artificial Sequence
  Description of Artificial Sequence: Synthetic oligonucleotide
gaagcguugucacuaaaug

SEQ ID NO: 1809129 - RNA, 19 nt, Artificial Sequence
  Description of Artificial Sequence: Synthetic oligonucleotide
caagagaagacauuugguc

SEQ ID NO: 1809130 - RNA, 19 nt, Artificial Sequence
  Description of Artificial Sequence: Synthetic oligonucleotide
ucagagauggcuuuccacu

SEQ ID NO: 1809131 - RNA, 19 nt, Artificial Sequence
  Description of Artificial Sequence: Synthetic oligonucleotide
ucccguuuugccaugaugu

SEQ ID NO: 1809132 - RNA, 19 nt, Artificial Sequence
  Description of Artificial Sequence: Synthetic oligonucleotide
uguaaagccucaucgcugc

SEQ ID NO: 1809133 - RNA, 19 nt, Artificial Sequence
  Description of Artificial Sequence: Synthetic oligonucleotide
uuuuggguaucccugauuu

SEQ ID NO: 1809134 - RNA, 19 nt, Artificial Sequence
  Description of Artificial Sequence: Synthetic oligonucleotide
uuaagugguaguacagaug

SEQ ID NO: 1809135 - RNA, 19 nt, Artificial Sequence
  Description of Artificial Sequence: Synthetic oligonucleotide
ugacuagucuaccucaaca

SEQ ID NO: 1809136 - RNA, 19 nt, Artificial Sequence
  Description of Artificial Sequence: Synthetic oligonucleotide
uuugcagcagacugaaggc

SEQ ID NO: 1809137 - RNA, 19 nt, Artificial Sequence
  Description of Artificial Sequence: Synthetic oligonucleotide
cauuuggucuccuuagggg

SEQ ID NO: 1809138 - RNA, 19 nt, Artificial Sequence
  Description of Artificial Sequence: Synthetic oligonucleotide
agcacaguagcuuuaagaa

SEQ ID NO: 1809139 - RNA, 19 nt, Artificial Sequence
  Description of Artificial Sequence: Synthetic oligonucleotide
ugacguacuugucauaaac

SEQ ID NO: 1809140 - RNA, 19 nt, Artificial Sequence
  Description of Artificial Sequence: Synthetic oligonucleotide
acugguucacgauggacac

SEQ ID NO: 1809141 - RNA, 19 nt, Artificial Sequence
  Description of Artificial Sequence: Synthetic oligonucleotide
acauuuggucuccuuaggg

SEQ ID NO: 1809142 - RNA, 19 nt, Artificial Sequence
  Description of Artificial Sequence: Synthetic oligonucleotide
acauucauccauuccaaug

SEQ ID NO: 1809143 - RNA, 19 nt, Artificial Sequence
  Description of Artificial Sequence: Synthetic oligonucleotide
acgacuucaaauucuucuc

SEQ ID NO: 1809144 - RNA, 19 nt, Artificial Sequence
  Description of Artificial Sequence: Synthetic oligonucleotide
aaaguccucacugggcagc

SEQ ID NO: 1809145 - RNA, 19 nt, Artificial Sequence
  Description of Artificial Sequence: Synthetic oligonucleotide
gaaaguaccuccagcacag

SEQ ID NO: 1809146 - RNA, 19 nt, Artificial Sequence
  Description of Artificial Sequence: Synthetic oligonucleotide
aaaccagaugucuuccuca

SEQ ID NO: 1809147 - RNA, 19 nt, Artificial Sequence
  Description of Artificial Sequence: Synthetic oligonucleotide
cuagucuaccucaacacac

SEQ ID NO: 1809148 - RNA, 19 nt, Artificial Sequence
  Description of Artificial Sequence: Synthetic oligonucleotide
uuugucaggccgccaaagg

SEQ ID NO: 1809149 - RNA, 19 nt, Artificial Sequence
  Description of Artificial Sequence: Synthetic oligonucleotide
aaggcccuuagccuggauc

SEQ ID NO: 1809150 - RNA, 19 nt, Artificial Sequence
  Description of Artificial Sequence: Synthetic oligonucleotide
aagcguugucacuaaaugu

SEQ ID NO: 1809151 - RNA, 19 nt, Artificial Sequence
  Description of Artificial Sequence: Synthetic oligonucleotide
aaggacauaggagugagaa

SEQ ID NO: 1809152 - RNA, 19 nt, Artificial Sequence
  Description of Artificial Sequence: Synthetic oligonucleotide
accuuuaaaucauugugca

SEQ ID NO: 1809153 - RNA, 19 nt, Artificial Sequence
  Description of Artificial Sequence: Synthetic oligonucleotide
aaacauagacacugcagaa

SEQ ID NO: 1809154 - RNA, 19 nt, Artificial Sequence
  Description of Artificial Sequence: Synthetic oligonucleotide
ugcccuucaacauuucugc

SEQ ID NO: 1809155 - RNA, 19 nt, Artificial Sequence
  Description of Artificial Sequence: Synthetic oligonucleotide
agcguugucacuaaauguc

SEQ ID NO: 1809156 - RNA, 19 nt, Artificial Sequence
  Description of Artificial Sequence: Synthetic oligonucleotide
agagauggcuuuccacucc

SEQ ID NO: 1809157 - RNA, 19 nt, Artificial Sequence
  Description of Artificial Sequence: Synthetic oligonucleotide
ggacauaggagugagaaag

SEQ ID NO: 1809158 - RNA, 19 nt, Artificial Sequence
  Description of Artificial Sequence: Synthetic oligonucleotide
aguuguuucagagauggcu

SEQ ID NO: 1809159 - RNA, 19 nt, Artificial Sequence
  Description of Artificial Sequence: Synthetic oligonucleotide
aaggcuuuugucaggccgc

SEQ ID NO: 1809160 - RNA, 19 nt, Artificial Sequence
  Description of Artificial Sequence: Synthetic oligonucleotide
agauggucagcaaacauag

SEQ ID NO: 1809161 - RNA, 19 nt, Artificial Sequence
  Description of Artificial Sequence: Synthetic oligonucleotide
aaccucacaucccugauuu

SEQ ID NO: 1809162 - RNA, 19 nt, Artificial Sequence
  Description of Artificial Sequence: Synthetic oligonucleotide
acuaaauguccucuucuug

SEQ ID NO: 1809163 - RNA, 19 nt, Artificial Sequence
  Description of Artificial Sequence: Synthetic oligonucleotide
guucacgauggacacacgg

SEQ ID NO: 1809164 - RNA, 19 nt, Artificial Sequence
  Description of Artificial Sequence: Synthetic oligonucleotide
agguucucaggccguaucc

SEQ ID NO: 1809165 - RNA, 19 nt, Artificial Sequence
  Description of Artificial Sequence: Synthetic oligonucleotide
aaccagaugucuuccucag

SEQ ID NO: 1809166 - RNA, 19 nt, Artificial Sequence
  Description of Artificial Sequence: Synthetic oligonucleotide
auuuggucuccuuagggga

SEQ ID NO: 1809167 - RNA, 19 nt, Artificial Sequence
  Description of Artificial Sequence: Synthetic oligonucleotide
gacagauugguuugcagca

SEQ ID NO: 1809168 - RNA, 19 nt, Artificial Sequence
  Description of Artificial Sequence: Synthetic oligonucleotide
uucauuguuaagugguagu

SEQ ID NO: 1809169 - RNA, 19 nt, Artificial Sequence
  Description of Artificial Sequence: Synthetic oligonucleotide
uuagccuggaucccuuaag

SEQ ID NO: 1809170 - RNA, 19 nt, Artificial Sequence
  Description of Artificial Sequence: Synthetic oligonucleotide
cauaggagugagaaaguac

SEQ ID NO: 1809171 - RNA, 19 nt, Artificial Sequence
  Description of Artificial Sequence: Synthetic oligonucleotide
uucuucacgacuucaaauu

SEQ ID NO: 1809172 - RNA, 19 nt, Artificial Sequence
  Description of Artificial Sequence: Synthetic oligonucleotide
uucaagacgacagcuaccu

SEQ ID NO: 1809173 - RNA, 19 nt, Artificial Sequence
  Description of Artificial Sequence: Synthetic oligonucleotide
gacauuuggucuccuuagg

SEQ ID NO: 1809174 - RNA, 19 nt, Artificial Sequence
  Description of Artificial Sequence: Synthetic oligonucleotide
ugccaagcaaaggacauag

SEQ ID NO: 1809175 - RNA, 19 nt, Artificial Sequence
  Description of Artificial Sequence: Synthetic oligonucleotide
uugucaggccgccaaaggc

SEQ ID NO: 1809176 - RNA, 19 nt, Artificial Sequence
  Description of Artificial Sequence: Synthetic oligonucleotide
uuugccaagcaaaggacau

SEQ ID NO: 1809177 - RNA, 19 nt, Artificial Sequence
  Description of Artificial Sequence: Synthetic oligonucleotide
auuagacagauugguuugc

SEQ ID NO: 1809178 - RNA, 19 nt, Artificial Sequence
  Description of Artificial Sequence: Synthetic oligonucleotide
gaauuuucucagaaaguug

SEQ ID NO: 1809179 - RNA, 19 nt, Artificial Sequence
  Description of Artificial Sequence: Synthetic oligonucleotide
auccauuccaaugcucucc

SEQ ID NO: 1809180 - RNA, 19 nt, Artificial Sequence
  Description of Artificial Sequence: Synthetic oligonucleotide
uguauuagacagauugguu

SEQ ID NO: 1809181 - RNA, 19 nt, Artificial Sequence
  Description of Artificial Sequence: Synthetic oligonucleotide
auccccagaauuuucucag

SEQ ID NO: 1809182 - RNA, 19 nt, Artificial Sequence
  Description of Artificial Sequence: Synthetic oligonucleotide
ugaugagaagcguugucac

SEQ ID NO: 1809183 - RNA, 19 nt, Artificial Sequence
  Description of Artificial Sequence: Synthetic oligonucleotide
cacaucaucaaaccagaug

SEQ ID NO: 1809184 - RNA, 19 nt, Artificial Sequence
  Description of Artificial Sequence: Synthetic oligonucleotide
ugcucuucugucccagccg

SEQ ID NO: 1809185 - RNA, 19 nt, Artificial Sequence
  Description of Artificial Sequence: Synthetic oligonucleotide
aaugcucucccacucccgu

SEQ ID NO: 1809186 - RNA, 19 nt, Artificial Sequence
  Description of Artificial Sequence: Synthetic oligonucleotide
uguuaagugguaguacaga

SEQ ID NO: 1809187 - RNA, 19 nt, Artificial Sequence
  Description of Artificial Sequence: Synthetic oligonucleotide
uuuaugcuugauguccucc

SEQ ID NO: 1809188 - RNA, 19 nt, Artificial Sequence
  Description of Artificial Sequence: Synthetic oligonucleotide
ggagugagaaaguaccucc

SEQ ID NO: 1809189 - RNA, 19 nt, Artificial Sequence
  Description of Artificial Sequence: Synthetic oligonucleotide
ucccauuacccacaagaga

SEQ ID NO: 1809190 - RNA, 19 nt, Artificial Sequence
  Description of Artificial Sequence: Synthetic oligonucleotide
acuagucuaccucaacaca

SEQ ID NO: 1809191 - RNA, 19 nt, Artificial Sequence
  Description of Artificial Sequence: Synthetic oligonucleotide
aaugcucugccugcuggac

SEQ ID NO: 1809192 - RNA, 19 nt, Artificial Sequence
  Description of Artificial Sequence: Synthetic oligonucleotide
agcauggcugccucugggc

SEQ ID NO: 1809193 - RNA, 19 nt, Artificial Sequence
  Description of Artificial Sequence: Synthetic oligonucleotide
gaccgaacaaugcucugcc

SEQ ID NO: 1809194 - RNA, 19 nt, Artificial Sequence
  Description of Artificial Sequence: Synthetic oligonucleotide
uggcuugacguacuuguca

SEQ ID NO: 1809195 - RNA, 19 nt, Artificial Sequence
  Description of Artificial Sequence: Synthetic oligonucleotide
ggaacagaaccuuuaaauc

SEQ ID NO: 1809196 - RNA, 19 nt, Artificial Sequence
  Description of Artificial Sequence: Synthetic oligonucleotide
uguccuguagucugucacc

SEQ ID NO: 1809197 - RNA, 19 nt, Artificial Sequence
  Description of Artificial Sequence: Synthetic oligonucleotide
acgacagcuaccuccuuag

SEQ ID NO: 1809198 - RNA, 19 nt, Artificial Sequence
  Description of Artificial Sequence: Synthetic oligonucleotide
uccuggaccgaacaaugcu

SEQ ID NO: 1809199 - RNA, 19 nt, Artificial Sequence
  Description of Artificial Sequence: Synthetic oligonucleotide
uagucuaccucaacacaca

SEQ ID NO: 1809200 - RNA, 19 nt, Artificial Sequence
  Description of Artificial Sequence: Synthetic oligonucleotide
ugguucacgauggacacac

SEQ ID NO: 1809201 - RNA, 19 nt, Artificial Sequence
  Description of Artificial Sequence: Synthetic oligonucleotide
ugguaucugacuagucuac

SEQ ID NO: 1809202 - RNA, 19 nt, Artificial Sequence
  Description of Artificial Sequence: Synthetic oligonucleotide
uaugcuugauguccuccug

SEQ ID NO: 1809203 - RNA, 19 nt, Artificial Sequence
  Description of Artificial Sequence: Synthetic oligonucleotide
cauuccaaugcucuccuuc

SEQ ID NO: 1809204 - RNA, 19 nt, Artificial Sequence
  Description of Artificial Sequence: Synthetic oligonucleotide
aucaucaaaccagaugucu

SEQ ID NO: 1809205 - RNA, 19 nt, Artificial Sequence
  Description of Artificial Sequence: Synthetic oligonucleotide
uuggguaucccugauuuuc

SEQ ID NO: 1809206 - RNA, 19 nt, Artificial Sequence
  Description of Artificial Sequence: Synthetic oligonucleotide
cagaacauucauccauucc

SEQ ID NO: 1809207 - RNA, 19 nt, Artificial Sequence
  Description of Artificial Sequence: Synthetic oligonucleotide
auucaagacgacagcuacc

SEQ ID NO: 1809208 - RNA, 19 nt, Artificial Sequence
  Description of Artificial Sequence: Synthetic oligonucleotide
gagaaaguaccuccagcac

SEQ ID NO: 1809209 - RNA, 19 nt, Artificial Sequence
  Description of Artificial Sequence: Synthetic oligonucleotide
aagugcagcaguacuuguc

SEQ ID NO: 1809210 - RNA, 19 nt, Artificial Sequence
  Description of Artificial Sequence: Synthetic oligonucleotide
cuuuccacuccuuacuuga

SEQ ID NO: 1809211 - RNA, 19 nt, Artificial Sequence
  Description of Artificial Sequence: Synthetic oligonucleotide
guucauuguuaagugguag

SEQ ID NO: 1809212 - RNA, 19 nt, Artificial Sequence
  Description of Artificial Sequence: Synthetic oligonucleotide
cagcugcuguauuagacag

SEQ ID NO: 1809213 - RNA, 19 nt, Artificial Sequence
  Description of Artificial Sequence: Synthetic oligonucleotide
uacuugucccauuacccac

SEQ ID NO: 1809214 - RNA, 19 nt, Artificial Sequence
  Description of Artificial Sequence: Synthetic oligonucleotide
agucuaccucaacacacag

SEQ ID NO: 1809215 - RNA, 19 nt, Artificial Sequence
  Description of Artificial Sequence: Synthetic oligonucleotide
uuuugucaggccgccaaag

SEQ ID NO: 1809216 - RNA, 19 nt, Artificial Sequence
  Description of Artificial Sequence: Synthetic oligonucleotide
aggagugagaaaguaccuc

SEQ ID NO: 1809217 - RNA, 19 nt, Artificial Sequence
  Description of Artificial Sequence: Synthetic oligonucleotide
aaucauugugcagcgcgug

SEQ ID NO: 1809218 - RNA, 19 nt, Artificial Sequence
  Description of Artificial Sequence: Synthetic oligonucleotide
gugaggacugauucaagac

SEQ ID NO: 1809219 - RNA, 19 nt, Artificial Sequence
  Description of Artificial Sequence: Synthetic oligonucleotide
cauccuggaccgaacaaug

SEQ ID NO: 1809220 - RNA, 19 nt, Artificial Sequence
  Description of Artificial Sequence: Synthetic oligonucleotide
gauccccagaauuuucuca

SEQ ID NO: 1809221 - RNA, 19 nt, Artificial Sequence
  Description of Artificial Sequence: Synthetic oligonucleotide
uucacgacuucaaauucuu

SEQ ID NO: 1809222 - RNA, 19 nt, Artificial Sequence
  Description of Artificial Sequence: Synthetic oligonucleotide
gaggacugauucaagacga

SEQ ID NO: 1809223 - RNA, 19 nt, Artificial Sequence
  Description of Artificial Sequence: Synthetic oligonucleotide
ucauuguuaagugguagua

SEQ ID NO: 1809224 - RNA, 19 nt, Artificial Sequence
  Description of Artificial Sequence: Synthetic oligonucleotide
ggauccacaucaucaaacc

SEQ ID NO: 1809225 - RNA, 19 nt, Artificial Sequence
  Description of Artificial Sequence: Synthetic oligonucleotide
uguucauuguuaaguggua

SEQ ID NO: 1809226 - RNA, 19 nt, Artificial Sequence
  Description of Artificial Sequence: Synthetic oligonucleotide
aucccuuaagugcagcagu

SEQ ID NO: 1809227 - RNA, 19 nt, Artificial Sequence
  Description of Artificial Sequence: Synthetic oligonucleotide
uguuaaccucacaucccug

SEQ ID NO: 1809228 - RNA, 19 nt, Artificial Sequence
  Description of Artificial Sequence: Synthetic oligonucleotide
cauuguuaagugguaguac

SEQ ID NO: 1809229 - RNA, 19 nt, Artificial Sequence
  Description of Artificial Sequence: Synthetic oligonucleotide
uccauuuaugcuugauguc

SEQ ID NO: 1809230 - RNA, 19 nt, Artificial Sequence
  Description of Artificial Sequence: Synthetic oligonucleotide
uugucacuaaauguccucu

SEQ ID NO: 1809231 - RNA, 19 nt, Artificial Sequence
  Description of Artificial Sequence: Synthetic oligonucleotide
guauuagacagauugguuu

SEQ ID NO: 1809232 - RNA, 19 nt, Artificial Sequence
  Description of Artificial Sequence: Synthetic oligonucleotide
uccuguccuguuaaccuca

SEQ ID NO: 1809233 - RNA, 19 nt, Artificial Sequence
  Description of Artificial Sequence: Synthetic oligonucleotide
ucccugauuucuguccugg

SEQ ID NO: 1809234 - RNA, 19 nt, Artificial Sequence
  Description of Artificial Sequence: Synthetic oligonucleotide
aaaucauugugcagcgcgu

SEQ ID NO: 1809235 - RNA, 19 nt, Artificial Sequence
  Description of Artificial Sequence: Synthetic oligonucleotide
ugcagcaguacuuguccca

SEQ ID NO: 1809236 - RNA, 19 nt, Artificial Sequence
  Description of Artificial Sequence: Synthetic oligonucleotide
aaguuguuucagagauggc

SEQ ID NO: 1809237 - RNA, 19 nt, Artificial Sequence
  Description of Artificial Sequence: Synthetic oligonucleotide
uaggugaggacugauucaa

SEQ ID NO: 1809238 - RNA, 19 nt, Artificial Sequence
  Description of Artificial Sequence: Synthetic oligonucleotide
aagacgacagcuaccuccu

SEQ ID NO: 1809239 - RNA, 19 nt, Artificial Sequence
  Description of Artificial Sequence: Synthetic oligonucleotide
ggccguaucccacugacug

SEQ ID NO: 1809240 - RNA, 19 nt, Artificial Sequence
  Description of Artificial Sequence: Synthetic oligonucleotide
uuagacagauugguuugca

SEQ ID NO: 1809241 - RNA, 19 nt, Artificial Sequence
  Description of Artificial Sequence: Synthetic oligonucleotide
guacuugucccauuaccca

SEQ ID NO: 1809242 - RNA, 19 nt, Artificial Sequence
  Description of Artificial Sequence: Synthetic oligonucleotide
uggacccugauccccagaa

SEQ ID NO: 1809243 - RNA, 19 nt, Artificial Sequence
  Description of Artificial Sequence: Synthetic oligonucleotide
guacuugucauaaacacau

SEQ ID NO: 1809244 - RNA, 19 nt, Artificial Sequence
  Description of Artificial Sequence: Synthetic oligonucleotide
uccacuccuuacuugacuu

SEQ ID NO: 1809245 - RNA, 19 nt, Artificial Sequence
  Description of Artificial Sequence: Synthetic oligonucleotide
agauugguuugcagcagac

SEQ ID NO: 1809246 - RNA, 19 nt, Artificial Sequence
  Description of Artificial Sequence: Synthetic oligonucleotide
gacguacuugucauaaaca

SEQ ID NO: 1809247 - RNA, 19 nt, Artificial Sequence
  Description of Artificial Sequence: Synthetic oligonucleotide
caaaccagaugucuuccuc

SEQ ID NO: 1809248 - RNA, 19 nt, Artificial Sequence
  Description of Artificial Sequence: Synthetic oligonucleotide
cucuguucugguccagagg

SEQ ID NO: 1809249 - RNA, 19 nt, Artificial Sequence
  Description of Artificial Sequence: Synthetic oligonucleotide
ucaguuggcuugacguacu

SEQ ID NO: 1809250 - RNA, 19 nt, Artificial Sequence
  Description of Artificial Sequence: Synthetic oligonucleotide
gucacuaaauguccucuuc

SEQ ID NO: 1809251 - RNA, 19 nt, Artificial Sequence
  Description of Artificial Sequence: Synthetic oligonucleotide
uuaaaucauugugcagcgc

SEQ ID NO: 1809252 - RNA, 19 nt, Artificial Sequence
  Description of Artificial Sequence: Synthetic oligonucleotide
gcuguauuagacagauugg

SEQ ID NO: 1809253 - RNA, 19 nt, Artificial Sequence
  Description of Artificial Sequence: Synthetic oligonucleotide
cucaguuggcuugacguac

SEQ ID NO: 1809254 - RNA, 19 nt, Artificial Sequence
  Description of Artificial Sequence: Synthetic oligonucleotide
auguaaagccucaucgcug

SEQ ID NO: 1809255 - RNA, 19 nt, Artificial Sequence
  Description of Artificial Sequence: Synthetic oligonucleotide
agcaaaggacauaggagug

SEQ ID NO: 1809256 - RNA, 19 nt, Artificial Sequence
  Description of Artificial Sequence: Synthetic oligonucleotide
augagaagcguugucacua

SEQ ID NO: 1809257 - RNA, 19 nt, Artificial Sequence
  Description of Artificial Sequence: Synthetic oligonucleotide
guuaagugguaguacagau

SEQ ID NO: 1809258 - RNA, 19 nt, Artificial Sequence
  Description of Artificial Sequence: Synthetic oligonucleotide
uucucaggccguaucccac

SEQ ID NO: 1809259 - RNA, 19 nt, Artificial Sequence
  Description of Artificial Sequence: Synthetic oligonucleotide
cacgacuucaaauucuucu

SEQ ID NO: 1809260 - RNA, 19 nt, Artificial Sequence
  Description of Artificial Sequence: Synthetic oligonucleotide
uuuccacuccuuacuugac

SEQ ID NO: 1809261 - RNA, 19 nt, Artificial Sequence
  Description of Artificial Sequence: Synthetic oligonucleotide
uucuguccugguaucugac

SEQ ID NO: 1809262 - RNA, 19 nt, Artificial Sequence
  Description of Artificial Sequence: Synthetic oligonucleotide
cagacugaaggcccuuagc

SEQ ID NO: 1809263 - RNA, 19 nt, Artificial Sequence
  Description of Artificial Sequence: Synthetic oligonucleotide
uccuuacuugacuucugaa

SEQ ID NO: 1809264 - RNA, 19 nt, Artificial Sequence
  Description of Artificial Sequence: Synthetic oligonucleotide
ugcccaaccaggguucugc

SEQ ID NO: 1809265 - RNA, 19 nt, Artificial Sequence
  Description of Artificial Sequence: Synthetic oligonucleotide
gucccauuacccacaagag

SEQ ID NO: 1809266 - RNA, 19 nt, Artificial Sequence
  Description of Artificial Sequence: Synthetic oligonucleotide
ugagugcccuggcugaauc

SEQ ID NO: 1809267 - RNA, 19 nt, Artificial Sequence
  Description of Artificial Sequence: Synthetic oligonucleotide
guacucuugcucuucuguc

SEQ ID NO: 1809268 - RNA, 19 nt, Artificial Sequence
  Description of Artificial Sequence: Synthetic oligonucleotide
caaugcucucccacucccg

SEQ ID NO: 1809269 - RNA, 19 nt, Artificial Sequence
  Description of Artificial Sequence: Synthetic oligonucleotide
cuugacguacuugucauaa

SEQ ID NO: 1809270 - RNA, 19 nt, Artificial Sequence
  Description of Artificial Sequence: Synthetic oligonucleotide
gaacauucauccauuccaa

SEQ ID NO: 1809271 - RNA, 19 nt, Artificial Sequence
  Description of Artificial Sequence: Synthetic oligonucleotide
cccauuacccacaagagaa

SEQ ID NO: 1809272 - RNA, 19 nt, Artificial Sequence
  Description of Artificial Sequence: Synthetic oligonucleotide
uccguaccagcauggcugc

SEQ ID NO: 1809273 - RNA, 19 nt, Artificial Sequence
  Description of Artificial Sequence: Synthetic oligonucleotide
ggugaggacugauucaaga

SEQ ID NO: 1809274 - RNA, 19 nt, Artificial Sequence
  Description of Artificial Sequence: Synthetic oligonucleotide
acagauugguuugcagcag

SEQ ID NO: 1809275 - RNA, 19 nt, Artificial Sequence
  Description of Artificial Sequence: Synthetic oligonucleotide
auagacacugcagaacauu

SEQ ID NO: 1809276 - RNA, 19 nt, Artificial Sequence
  Description of Artificial Sequence: Synthetic oligonucleotide
uaaccucacaucccugauu

SEQ ID NO: 1809277 - RNA, 19 nt, Artificial Sequence
  Description of Artificial Sequence: Synthetic oligonucleotide
acgccuaccaucucacaau

SEQ ID NO: 1809278 - RNA, 19 nt, Artificial Sequence
  Description of Artificial Sequence: Synthetic oligonucleotide
cugguaucugacuagucua

SEQ ID NO: 1809279 - RNA, 19 nt, Artificial Sequence
  Description of Artificial Sequence: Synthetic oligonucleotide
guccuguuaaccucacauc

SEQ ID NO: 1809280 - RNA, 19 nt, Artificial Sequence
  Description of Artificial Sequence: Synthetic oligonucleotide
ugucacuaaauguccucuu

SEQ ID NO: 1809281 - RNA, 19 nt, Artificial Sequence
  Description of Artificial Sequence: Synthetic oligonucleotide
caggguucugcccuucaac

SEQ ID NO: 1809282 - RNA, 19 nt, Artificial Sequence
  Description of Artificial Sequence: Synthetic oligonucleotide
ccaagcaaaggacauagga

SEQ ID NO: 1809283 - RNA, 19 nt, Artificial Sequence
  Description of Artificial Sequence: Synthetic oligonucleotide
ccuguuaaccucacauccc

SEQ ID NO: 1809284 - RNA, 19 nt, Artificial Sequence
  Description of Artificial Sequence: Synthetic oligonucleotide
uuggcuugacguacuuguc

SEQ ID NO: 1809285 - RNA, 19 nt, Artificial Sequence
  Description of Artificial Sequence: Synthetic oligonucleotide
agcuuuccauuuaugcuug

SEQ ID NO: 1809286 - RNA, 19 nt, Artificial Sequence
  Description of Artificial Sequence: Synthetic oligonucleotide
ugauguccuccugaugaga

SEQ ID NO: 1809287 - RNA, 19 nt, Artificial Sequence
  Description of Artificial Sequence: Synthetic oligonucleotide
ucacgacuucaaauucuuc

SEQ ID NO: 1809288 - RNA, 19 nt, Artificial Sequence
  Description of Artificial Sequence: Synthetic oligonucleotide
acacugcagaacauucauc

SEQ ID NO: 1809289 - RNA, 19 nt, Artificial Sequence
  Description of Artificial Sequence: Synthetic oligonucleotide
gugguaguacagaugguca

SEQ ID NO: 1809290 - RNA, 19 nt, Artificial Sequence
  Description of Artificial Sequence: Synthetic oligonucleotide
gaugguacucuugcucuuc

SEQ ID NO: 1809291 - RNA, 19 nt, Artificial Sequence
  Description of Artificial Sequence: Synthetic oligonucleotide
agaagcguugucacuaaau

SEQ ID NO: 1809292 - RNA, 19 nt, Artificial Sequence
  Description of Artificial Sequence: Synthetic oligonucleotide
gccgccaaaggccuguucc

SEQ ID NO: 1809293 - RNA, 19 nt, Artificial Sequence
  Description of Artificial Sequence: Synthetic oligonucleotide
gacugaaggcccuuagccu

SEQ ID NO: 1809294 - RNA, 19 nt, Artificial Sequence
  Description of Artificial Sequence: Synthetic oligonucleotide
aggcuuuugucaggccgcc

SEQ ID NO: 1809295 - RNA, 19 nt, Artificial Sequence
  Description of Artificial Sequence: Synthetic oligonucleotide
aggacauaggagugagaaa

SEQ ID NO: 1809296 - RNA, 19 nt, Artificial Sequence
  Description of Artificial Sequence: Synthetic oligonucleotide
acauaggagugagaaagua

SEQ ID NO: 1809297 - RNA, 19 nt, Artificial Sequence
  Description of Artificial Sequence: Synthetic oligonucleotide
uugacguacuugucauaaa

SEQ ID NO: 1809298 - RNA, 19 nt, Artificial Sequence
  Description of Artificial Sequence: Synthetic oligonucleotide
gagugcccuggcugaaucc

SEQ ID NO: 1809299 - RNA, 19 nt, Artificial Sequence
  Description of Artificial Sequence: Synthetic oligonucleotide
cugacuagucuaccucaac

SEQ ID NO: 1809300 - RNA, 19 nt, Artificial Sequence
  Description of Artificial Sequence: Synthetic oligonucleotide
cuuccuguccuguuaaccu

SEQ ID NO: 1809301 - RNA, 19 nt, Artificial Sequence
  Description of Artificial Sequence: Synthetic oligonucleotide
cauuacccacaagagaaga

SEQ ID NO: 1809302 - RNA, 19 nt, Artificial Sequence
  Description of Artificial Sequence: Synthetic oligonucleotide
gaugagaagcguugucacu

SEQ ID NO: 1809303 - RNA, 19 nt, Artificial Sequence
  Description of Artificial Sequence: Synthetic oligonucleotide
gucuccuuaggggaaggug

SEQ ID NO: 1809304 - RNA, 19 nt, Artificial Sequence
  Description of Artificial Sequence: Synthetic oligonucleotide
aggccuguuccuucaccag

SEQ ID NO: 1809305 - RNA, 19 nt, Artificial Sequence
  Description of Artificial Sequence: Synthetic oligonucleotide
agccucaauaucaucugga

SEQ ID NO: 1809306 - RNA, 19 nt, Artificial Sequence
  Description of Artificial Sequence: Synthetic oligonucleotide
cugcgaugcucucuucccc

SEQ ID NO: 1809307 - RNA, 19 nt, Artificial Sequence
  Description of Artificial Sequence: Synthetic oligonucleotide
gagugagaaaguaccucca

SEQ ID NO: 1809308 - RNA, 19 nt, Artificial Sequence
  Description of Artificial Sequence: Synthetic oligonucleotide
guaucugacuagucuaccu

SEQ ID NO: 1809309 - RNA, 19 nt, Artificial Sequence
  Description of Artificial Sequence: Synthetic oligonucleotide
uuccucaguaggugaggac

SEQ ID NO: 1809310 - RNA, 19 nt, Artificial Sequence
  Description of Artificial Sequence: Synthetic oligonucleotide
uggaccgaacaaugcucug

SEQ ID NO: 1809311 - RNA, 19 nt, Artificial Sequence
  Description of Artificial Sequence: Synthetic oligonucleotide
uuuggguaucccugauuuu

SEQ ID NO: 1809312 - RNA, 19 nt, Artificial Sequence
  Description of Artificial Sequence: Synthetic oligonucleotide
uccccagaauuuucucaga

SEQ ID NO: 1809313 - RNA, 19 nt, Artificial Sequence
  Description of Artificial Sequence: Synthetic oligonucleotide
cuguauuagacagauuggu

SEQ ID NO: 1809314 - RNA, 19 nt, Artificial Sequence
  Description of Artificial Sequence: Synthetic oligonucleotide
gacgacagcuaccuccuua

SEQ ID NO: 1809315 - RNA, 19 nt, Artificial Sequence
  Description of Artificial Sequence: Synthetic oligonucleotide
cacaucccugauuucuguc

SEQ ID NO: 1809316 - RNA, 19 nt, Artificial Sequence
  Description of Artificial Sequence: Synthetic oligonucleotide
uccugaugagaagcguugu

SEQ ID NO: 1809317 - RNA, 19 nt, Artificial Sequence
  Description of Artificial Sequence: Synthetic oligonucleotide
cuuaagugcagcaguacuu

SEQ ID NO: 1809318 - RNA, 19 nt, Artificial Sequence
  Description of Artificial Sequence: Synthetic oligonucleotide
gcaaugcucucccacuccc

SEQ ID NO: 1809319 - RNA, 19 nt, Artificial Sequence
  Description of Artificial Sequence: Synthetic oligonucleotide
uaguacagauggucagcaa

SEQ ID NO: 1809320 - RNA, 19 nt, Artificial Sequence
  Description of Artificial Sequence: Synthetic oligonucleotide
ccgaacaaugcucugccug

SEQ ID NO: 1809321 - RNA, 19 nt, Artificial Sequence
  Description of Artificial Sequence: Synthetic oligonucleotide
uaccuccuuagcuuuccau

SEQ ID NO: 1809322 - RNA, 19 nt, Artificial Sequence
  Description of Artificial Sequence: Synthetic oligonucleotide
aaaggacauaggagugaga

SEQ ID NO: 1809323 - RNA, 19 nt, Artificial Sequence
  Description of Artificial Sequence: Synthetic oligonucleotide
cuaccucaacacacaggug

SEQ ID NO: 1809324 - RNA, 19 nt, Artificial Sequence
  Description of Artificial Sequence: Synthetic oligonucleotide
uacuugucauaaacacauu

SEQ ID NO: 1809325 - RNA, 19 nt, Artificial Sequence
  Description of Artificial Sequence: Synthetic oligonucleotide
cgaacaaugcucugccugc

SEQ ID NO: 1809326 - RNA, 19 nt, Artificial Sequence
  Description of Artificial Sequence: Synthetic oligonucleotide
gcugccucugggccuaugg

SEQ ID NO: 1809327 - RNA, 19 nt, Artificial Sequence
  Description of Artificial Sequence: Synthetic oligonucleotide
gcugcgaugcucucuuccc

SEQ ID NO: 1809328 - RNA, 19 nt, Artificial Sequence
  Description of Artificial Sequence: Synthetic oligonucleotide
uccugguaucugacuaguc

SEQ ID NO: 1809329 - RNA, 19 nt, Artificial Sequence
  Description of Artificial Sequence: Synthetic oligonucleotide
aguuggcuugacguacuug

SEQ ID NO: 1809330 - RNA, 19 nt, Artificial Sequence
  Description of Artificial Sequence: Synthetic oligonucleotide
ucaagacgacagcuaccuc

SEQ ID NO: 1809331 - RNA, 19 nt, Artificial Sequence
  Description of Artificial Sequence: Synthetic oligonucleotide
uccagcacaguagcuuuaa

SEQ ID NO: 1809332 - RNA, 19 nt, Artificial Sequence
  Description of Artificial Sequence: Synthetic oligonucleotide
acacacaggugcaggagcu

SEQ ID NO: 1809333 - RNA, 19 nt, Artificial Sequence
  Description of Artificial Sequence: Synthetic oligonucleotide
gcuguguucauuguuaagu

SEQ ID NO: 1809334 - RNA, 19 nt, Artificial Sequence
  Description of Artificial Sequence: Synthetic oligonucleotide
gguaucugacuagucuacc

SEQ ID NO: 1809335 - RNA, 19 nt, Artificial Sequence
  Description of Artificial Sequence: Synthetic oligonucleotide
cuccuuacuugacuucuga

SEQ ID NO: 1809336 - RNA, 19 nt, Artificial Sequence
  Description of Artificial Sequence: Synthetic oligonucleotide
uugucccauuacccacaag

SEQ ID NO: 1809337 - RNA, 19 nt, Artificial Sequence
  Description of Artificial Sequence: Synthetic oligonucleotide
ggcucaguuggcuugacgu

SEQ ID NO: 1809338 - RNA, 19 nt, Artificial Sequence
  Description of Artificial Sequence: Synthetic oligonucleotide
gacccugauccccagaauu

SEQ ID NO: 1809339 - RNA, 19 nt, Artificial Sequence
  Description of Artificial Sequence: Synthetic oligonucleotide
ccuuacuugacuucugaaa

SEQ ID NO: 1809340 - RNA, 19 nt, Artificial Sequence
  Description of Artificial Sequence: Synthetic oligonucleotide
ucaguaggugaggacugau

SEQ ID NO: 1809341 - RNA, 19 nt, Artificial Sequence
  Description of Artificial Sequence: Synthetic oligonucleotide
cuguuaaccucacaucccu

SEQ ID NO: 1809342 - RNA, 19 nt, Artificial Sequence
  Description of Artificial Sequence: Synthetic oligonucleotide
ccuggaucccuuaagugca

SEQ ID NO: 1809343 - RNA, 19 nt, Artificial Sequence
  Description of Artificial Sequence: Synthetic oligonucleotide
agcgcgugcccaaccaggg

SEQ ID NO: 1809344 - RNA, 19 nt, Artificial Sequence
  Description of Artificial Sequence: Synthetic oligonucleotide
ccucaauaucaucuggauc

SEQ ID NO: 1809345 - RNA, 19 nt, Artificial Sequence
  Description of Artificial Sequence: Synthetic oligonucleotide
uccuccugaugagaagcgu

SEQ ID NO: 1809346 - RNA, 19 nt, Artificial Sequence
  Description of Artificial Sequence: Synthetic oligonucleotide
cacgccuaccaucucacaa

SEQ ID NO: 1809347 - RNA, 19 nt, Artificial Sequence
  Description of Artificial Sequence: Synthetic oligonucleotide
aagugguaguacagauggu

SEQ ID NO: 1809348 - RNA, 19 nt, Artificial Sequence
  Description of Artificial Sequence: Synthetic oligonucleotide
gcagacugaaggcccuuag

SEQ ID NO: 1809349 - RNA, 19 nt, Artificial Sequence
  Description of Artificial Sequence: Synthetic oligonucleotide
guuguuucagagauggcuu

SEQ ID NO: 1809350 - RNA, 19 nt, Artificial Sequence
  Description of Artificial Sequence: Synthetic oligonucleotide
cugauucaagacgacagcu

SEQ ID NO: 1809351 - RNA, 19 nt, Artificial Sequence
  Description of Artificial Sequence: Synthetic oligonucleotide
accgaacaaugcucugccu

SEQ ID NO: 1809352 - RNA, 19 nt, Artificial Sequence
  Description of Artificial Sequence: Synthetic oligonucleotide
gguacucuugcucuucugu

SEQ ID NO: 1809353 - RNA, 19 nt, Artificial Sequence
  Description of Artificial Sequence: Synthetic oligonucleotide
gcguugucacuaaaugucc

SEQ ID NO: 1809354 - RNA, 19 nt, Artificial Sequence
  Description of Artificial Sequence: Synthetic oligonucleotide
ccugauuuucuucuuugga

SEQ ID NO: 1809355 - RNA, 19 nt, Artificial Sequence
  Description of Artificial Sequence: Synthetic oligonucleotide
gguucucaggccguauccc

SEQ ID NO: 1809356 - RNA, 19 nt, Artificial Sequence
  Description of Artificial Sequence: Synthetic oligonucleotide
gccuauggcagccucaaua

SEQ ID NO: 1809357 - RNA, 19 nt, Artificial Sequence
  Description of Artificial Sequence: Synthetic oligonucleotide
ccacaagagaagacauuug

SEQ ID NO: 1809358 - RNA, 19 nt, Artificial Sequence
  Description of Artificial Sequence: Synthetic oligonucleotide
uccuuaggggaaggugcug

SEQ ID NO: 1809359 - RNA, 19 nt, Artificial Sequence
  Description of Artificial Sequence: Synthetic oligonucleotide
ggaucccuuaagugcagca

SEQ ID NO: 1809360 - RNA, 19 nt, Artificial Sequence
  Description of Artificial Sequence: Synthetic oligonucleotide
cuuccucaguaggugagga

SEQ ID NO: 1809361 - RNA, 19 nt, Artificial Sequence
  Description of Artificial Sequence: Synthetic oligonucleotide
gcacaguagcuuuaagaaa

SEQ ID NO: 1809362 - RNA, 19 nt, Artificial Sequence
  Description of Artificial Sequence: Synthetic oligonucleotide
ccucaguaggugaggacug

SEQ ID NO: 1809363 - RNA, 19 nt, Artificial Sequence
  Description of Artificial Sequence: Synthetic oligonucleotide
cuuagccuggaucccuuaa

SEQ ID NO: 1809364 - RNA, 19 nt, Artificial Sequence
  Description of Artificial Sequence: Synthetic oligonucleotide
acuccuuacuugacuucug

SEQ ID NO: 1809365 - RNA, 19 nt, Artificial Sequence
  Description of Artificial Sequence: Synthetic oligonucleotide
gacauaggagugagaaagu

SEQ ID NO: 1809366 - RNA, 19 nt, Artificial Sequence
  Description of Artificial Sequence: Synthetic oligonucleotide
gagaagcguugucacuaaa

SEQ ID NO: 1809367 - RNA, 19 nt, Artificial Sequence
  Description of Artificial Sequence: Synthetic oligonucleotide
uugccaagcaaaggacaua

SEQ ID NO: 1809368 - RNA, 19 nt, Artificial Sequence
  Description of Artificial Sequence: Synthetic oligonucleotide
gauggucagcaaacauaga

SEQ ID NO: 1809369 - RNA, 19 nt, Artificial Sequence
  Description of Artificial Sequence: Synthetic oligonucleotide
ccuuagcuuuccauuuaug

SEQ ID NO: 1809370 - RNA, 19 nt, Artificial Sequence
  Description of Artificial Sequence: Synthetic oligonucleotide
ugugcagcgcgugcccaac

SEQ ID NO: 1809371 - RNA, 19 nt, Artificial Sequence
  Description of Artificial Sequence: Synthetic oligonucleotide
ccggucugcagcaaugcuc

SEQ ID NO: 1809372 - RNA, 19 nt, Artificial Sequence
  Description of Artificial Sequence: Synthetic oligonucleotide
cagggccaaggcuuuuguc

SEQ ID NO: 1809373 - RNA, 19 nt, Artificial Sequence
  Description of Artificial Sequence: Synthetic oligonucleotide
cguacuugucauaaacaca

SEQ ID NO: 1809374 - RNA, 19 nt, Artificial Sequence
  Description of Artificial Sequence: Synthetic oligonucleotide
aggugaggacugauucaag

SEQ ID NO: 1809375 - RNA, 19 nt, Artificial Sequence
  Description of Artificial Sequence: Synthetic oligonucleotide
agaagacauuuggucuccu

SEQ ID NO: 1809376 - RNA, 19 nt, Artificial Sequence
  Description of Artificial Sequence: Synthetic oligonucleotide
ugaauccagcuguguucau

SEQ ID NO: 1809377 - RNA, 19 nt, Artificial Sequence
  Description of Artificial Sequence: Synthetic oligonucleotide
cuuuugucaggccgccaaa

SEQ ID NO: 1809378 - RNA, 19 nt, Artificial Sequence
  Description of Artificial Sequence: Synthetic oligonucleotide
aucucacaauccagggcca

SEQ ID NO: 1809379 - RNA, 19 nt, Artificial Sequence
  Description of Artificial Sequence: Synthetic oligonucleotide
gcuaccuccuuagcuuucc

SEQ ID NO: 1809380 - RNA, 19 nt, Artificial Sequence
  Description of Artificial Sequence: Synthetic oligonucleotide
gccguaucccacugacugc

SEQ ID NO: 1809381 - RNA, 19 nt, Artificial Sequence
  Description of Artificial Sequence: Synthetic oligonucleotide
caucgcugccugggcaucc

SEQ ID NO: 1809382 - RNA, 19 nt, Artificial Sequence
  Description of Artificial Sequence: Synthetic oligonucleotide
acccugauccccagaauuu

SEQ ID NO: 1809383 - RNA, 19 nt, Artificial Sequence
  Description of Artificial Sequence: Synthetic oligonucleotide
ccugaugagaagcguuguc

SEQ ID NO: 1809384 - RNA, 19 nt, Artificial Sequence
  Description of Artificial Sequence: Synthetic oligonucleotide
cacuaaauguccucuucuu

SEQ ID NO: 1809385 - RNA, 19 nt, Artificial Sequence
  Description of Artificial Sequence: Synthetic oligonucleotide
ccagcuguguucauuguua

SEQ ID NO: 1809386 - RNA, 19 nt, Artificial Sequence
  Description of Artificial Sequence: Synthetic oligonucleotide
cuugucccauuacccacaa

SEQ ID NO: 1809387 - RNA, 19 nt, Artificial Sequence
  Description of Artificial Sequence: Synthetic oligonucleotide
ugcuguccuguagucuguc

SEQ ID NO: 1809388 - RNA, 19 nt, Artificial Sequence
  Description of Artificial Sequence: Synthetic oligonucleotide
cacgauggacacacgggcu

SEQ ID NO: 1809389 - RNA, 19 nt, Artificial Sequence
  Description of Artificial Sequence: Synthetic oligonucleotide
cacauuucccauacugguu

SEQ ID NO: 1809390 - RNA, 19 nt, Artificial Sequence
  Description of Artificial Sequence: Synthetic oligonucleotide
cuccuuaggggaaggugcu

SEQ ID NO: 1809391 - RNA, 19 nt, Artificial Sequence
  Description of Artificial Sequence: Synthetic oligonucleotide
gccaagcaaaggacauagg

SEQ ID NO: 1809392 - RNA, 19 nt, Artificial Sequence
  Description of Artificial Sequence: Synthetic oligonucleotide
ggcuugacguacuugucau

SEQ ID NO: 1809393 - RNA, 19 nt, Artificial Sequence
  Description of Artificial Sequence: Synthetic oligonucleotide
gcagcgcgugcccaaccag

SEQ ID NO: 1809394 - RNA, 19 nt, Artificial Sequence
  Description of Artificial Sequence: Synthetic oligonucleotide
gccaugauguaaagccuca

SEQ ID NO: 1809395 - RNA, 19 nt, Artificial Sequence
  Description of Artificial Sequence: Synthetic oligonucleotide
ccuuaagugcagcaguacu

SEQ ID NO: 1809396 - RNA, 19 nt, Artificial Sequence
  Description of Artificial Sequence: Synthetic oligonucleotide
accggcucaguuggcuuga

SEQ ID NO: 1809397 - RNA, 19 nt, Artificial Sequence
  Description of Artificial Sequence: Synthetic oligonucleotide
ccagcacaguagcuuuaag

SEQ ID NO: 1809398 - RNA, 19 nt, Artificial Sequence
  Description of Artificial Sequence: Synthetic oligonucleotide
acgggcugcgaugcucucu

SEQ ID NO: 1809399 - RNA, 19 nt, Artificial Sequence
  Description of Artificial Sequence: Synthetic oligonucleotide
ggcauccuggaccgaacaa

SEQ ID NO: 1809400 - RNA, 19 nt, Artificial Sequence
  Description of Artificial Sequence: Synthetic oligonucleotide
ccacuccuuacuugacuuc

SEQ ID NO: 1809401 - RNA, 19 nt, Artificial Sequence
  Description of Artificial Sequence: Synthetic oligonucleotide
gguucacgauggacacacg

SEQ ID NO: 1809402 - RNA, 19 nt, Artificial Sequence
  Description of Artificial Sequence: Synthetic oligonucleotide
cccuuaagugcagcaguac

SEQ ID NO: 1809403 - RNA, 19 nt, Artificial Sequence
  Description of Artificial Sequence: Synthetic oligonucleotide
aucgcugccugggcauccu

SEQ ID NO: 1809404 - RNA, 19 nt, Artificial Sequence
  Description of Artificial Sequence: Synthetic oligonucleotide
gucaggccgccaaaggccu

SEQ ID NO: 1809405 - RNA, 19 nt, Artificial Sequence
  Description of Artificial Sequence: Synthetic oligonucleotide
gucaccggcucaguuggcu

SEQ ID NO: 1809406 - RNA, 19 nt, Artificial Sequence
  Description of Artificial Sequence: Synthetic oligonucleotide
caguaggugaggacugauu

SEQ ID NO: 1809407 - RNA, 19 nt, Artificial Sequence
  Description of Artificial Sequence: Synthetic oligonucleotide
cugguucacgauggacaca

SEQ ID NO: 1809408 - RNA, 19 nt, Artificial Sequence
  Description of Artificial Sequence: Synthetic oligonucleotide
agacgacagcuaccuccuu

SEQ ID NO: 1809409 - RNA, 19 nt, Artificial Sequence
  Description of Artificial Sequence: Synthetic oligonucleotide
cuucaacauuucugccacu

SEQ ID NO: 1809410 - RNA, 19 nt, Artificial Sequence
  Description of Artificial Sequence: Synthetic oligonucleotide
ccgcuuccguaccagcaug

SEQ ID NO: 1809411 - RNA, 19 nt, Artificial Sequence
  Description of Artificial Sequence: Synthetic oligonucleotide
cgccuaccaucucacaauc

SEQ ID NO: 1809412 - RNA, 19 nt, Artificial Sequence
  Description of Artificial Sequence: Synthetic oligonucleotide
ggcccuuagccuggauccc

SEQ ID NO: 1809413 - RNA, 19 nt, Artificial Sequence
  Description of Artificial Sequence: Synthetic oligonucleotide
cuggacccugauccccaga

SEQ ID NO: 1809414 - RNA, 19 nt, Artificial Sequence
  Description of Artificial Sequence: Synthetic oligonucleotide
ggguucugcccuucaacau

SEQ ID NO: 1809415 - RNA, 19 nt, Artificial Sequence
  Description of Artificial Sequence: Synthetic oligonucleotide
gcauccuggaccgaacaau

SEQ ID NO: 1809416 - RNA, 19 nt, Artificial Sequence
  Description of Artificial Sequence: Synthetic oligonucleotide
ccucaucgcugccugggca

SEQ ID NO: 1809417 - RNA, 19 nt, Artificial Sequence
  Description of Artificial Sequence: Synthetic oligonucleotide
gcuugacguacuugucaua

SEQ ID NO: 1809418 - RNA, 19 nt, Artificial Sequence
  Description of Artificial Sequence: Synthetic oligonucleotide
gugcccaaccaggguucug

SEQ ID NO: 1809419 - RNA, 19 nt, Artificial Sequence
  Description of Artificial Sequence: Synthetic oligonucleotide
gggccuauggcagccucaa

SEQ ID NO: 1809420 - RNA, 19 nt, Artificial Sequence
  Description of Artificial Sequence: Synthetic oligonucleotide
cacucccguuuugccauga

SEQ ID NO: 1809421 - RNA, 19 nt, Artificial Sequence
  Description of Artificial Sequence: Synthetic oligonucleotide
cggcucaguuggcuugacg

SEQ ID NO: 1809422 - RNA, 19 nt, Artificial Sequence
  Description of Artificial Sequence: Synthetic oligonucleotide
gcgccggucugcagcaaug

SEQ ID NO: 1809423 - RNA, 19 nt, Artificial Sequence
  Description of Artificial Sequence: Synthetic oligonucleotide
cccguuuugccaugaugua

SEQ ID NO: 1809424 - RNA, 19 nt, Artificial Sequence
  Description of Artificial Sequence: Synthetic oligonucleotide
cgacagcuaccuccuuagc

SEQ ID NO: 1809425 - RNA, 19 nt, Artificial Sequence
  Description of Artificial Sequence: Synthetic oligonucleotide
gcgugcccaaccaggguuc

SEQ ID NO: 1809426 - RNA, 19 nt, Artificial Sequence
  Description of Artificial Sequence: Synthetic oligonucleotide
cacugacugcuguccugua

SEQ ID NO: 1809427 - RNA, 19 nt, Artificial Sequence
  Description of Artificial Sequence: Synthetic oligonucleotide
cguaucccacugacugcug

SEQ ID NO: 1809428 - RNA, 19 nt, Artificial Sequence
  Description of Artificial Sequence: Synthetic oligonucleotide
cccacucccguuuugccau

SEQ ID NO: 1809429 - RNA, 19 nt, Artificial Sequence
  Description of Artificial Sequence: Synthetic oligonucleotide
gaaggcccuuagccuggau

SEQ ID NO: 1809430 - RNA, 19 nt, Artificial Sequence
  Description of Artificial Sequence: Synthetic oligonucleotide
gccgcuuccguaccagcau

SEQ ID NO: 1809431 - RNA, 19 nt, Artificial Sequence
  Description of Artificial Sequence: Synthetic oligonucleotide
ccguaucccacugacugcu

SEQ ID NO: 1809432 - RNA, 19 nt, Artificial Sequence
  Description of Artificial Sequence: Synthetic oligonucleotide
ggccgccaaaggccuguuc

SEQ ID NO: 1809433 - RNA, 19 nt, Artificial Sequence
  Description of Artificial Sequence: Synthetic oligonucleotide
ccacucccguuuugccaug

SEQ ID NO: 1809434 - RNA, 19 nt, Artificial Sequence
  Description of Artificial Sequence: Synthetic oligonucleotide
ggcuuuugucaggccgcca

SEQ ID NO: 1809435 - RNA, 19 nt, Artificial Sequence
  Description of Artificial Sequence: Synthetic oligonucleotide
gccggucugcagcaaugcu

SEQ ID NO: 1809436 - RNA, 19 nt, Artificial Sequence
  Description of Artificial Sequence: Synthetic oligonucleotide
cacugggcagcugcuguau

SEQ ID NO: 1809437 - RNA, 19 nt, Artificial Sequence
  Description of Artificial Sequence: Synthetic oligonucleotide
ggacccugauccccagaau

SEQ ID NO: 1809438 - RNA, 19 nt, Artificial Sequence
  Description of Artificial Sequence: Synthetic oligonucleotide
caguuggcuugacguacuu

SEQ ID NO: 1809439 - RNA, 19 nt, Artificial Sequence
  Description of Artificial Sequence: Synthetic oligonucleotide
caaccaggguucugcccuu

SEQ ID NO: 1809440 - RNA, 19 nt, Artificial Sequence
  Description of Artificial Sequence: Synthetic oligonucleotide
cugcuguauuagacagauu

SEQ ID NO: 1809441 - RNA, 19 nt, Artificial Sequence
  Description of Artificial Sequence: Synthetic oligonucleotide
ggucuccuuaggggaaggu

SEQ ID NO: 1809442 - RNA, 19 nt, Artificial Sequence
  Description of Artificial Sequence: Synthetic oligonucleotide
ccgccaaaggccuguuccu

SEQ ID NO: 1809443 - RNA, 19 nt, Artificial Sequence
  Description of Artificial Sequence: Synthetic oligonucleotide
cugucccagccgcuuccgu

SEQ ID NO: 1809444 - RNA, 19 nt, Artificial Sequence
  Description of Artificial Sequence: Synthetic oligonucleotide
ccacgccuaccaucucaca

SEQ ID NO: 1809445 - RNA, 19 nt, Artificial Sequence
  Description of Artificial Sequence: Synthetic oligonucleotide
ccuuagccuggaucccuua

SEQ ID NO: 1809446 - RNA, 19 nt, Artificial Sequence
  Description of Artificial Sequence: Synthetic oligonucleotide
cugagugcccuggcugaau

SEQ ID NO: 1809447 - RNA, 19 nt, Artificial Sequence
  Description of Artificial Sequence: Synthetic oligonucleotide
gcccuuagccuggaucccu

SEQ ID NO: 1809448 - RNA, 19 nt, Artificial Sequence
  Description of Artificial Sequence: Synthetic oligonucleotide
ccagggagaugguacucuu

SEQ ID NO: 1809449 - RNA, 19 nt, Artificial Sequence
  Description of Artificial Sequence: Synthetic oligonucleotide
ggcgccggucugcagcaau

SEQ ID NO: 1809450 - RNA, 19 nt, Artificial Sequence
  Description of Artificial Sequence: Synthetic oligonucleotide
ccguaccagcauggcugcc

SEQ ID NO: 1809451 - RNA, 19 nt, Artificial Sequence
  Description of Artificial Sequence: Synthetic oligonucleotide
ggcugccucugggccuaug

SEQ ID NO: 1809452 - RNA, 19 nt, Artificial Sequence
  Description of Artificial Sequence: Synthetic oligonucleotide
gcgcgugcccaaccagggu

SEQ ID NO: 1809453 - RNA, 19 nt, Artificial Sequence
  Description of Artificial Sequence: Synthetic oligonucleotide
cccugauccccagaauuuu

SEQ ID NO: 1809454 - RNA, 19 nt, Artificial Sequence
  Description of Artificial Sequence: Synthetic oligonucleotide
cgcgugcccaaccaggguu

SEQ ID NO: 1809455 - RNA, 19 nt, Artificial Sequence
  Description of Artificial Sequence: Synthetic oligonucleotide
ccggcucaguuggcuugac

SEQ ID NO: 1809456 - RNA, 19 nt, Artificial Sequence
  Description of Artificial Sequence: Synthetic oligonucleotide
ggccuauggcagccucaau

SEQ ID NO: 1809457 - RNA, 19 nt, Artificial Sequence
  Description of Artificial Sequence: Synthetic oligonucleotide
cccuuagccuggaucccuu

SEQ ID NO: 1809458 - RNA, 19 nt, Artificial Sequence
  Description of Artificial Sequence: Synthetic oligonucleotide
cgggcugcgaugcucucuu

SEQ ID NO: 1809459 - RNA, 19 nt, Artificial Sequence
  Description of Artificial Sequence: Synthetic oligonucleotide
cgugcccaaccaggguucu

SEQ ID NO: 1809460 - RNA, 19 nt, Artificial Sequence
  Description of Artificial Sequence: Synthetic oligonucleotide
ucuagcauuguauugacag

SEQ ID NO: 1809461 - RNA, 19 nt, Artificial Sequence
  Description of Artificial Sequence: Synthetic oligonucleotide
ugucauaauggaaagcugg

SEQ ID NO: 1809462 - RNA, 19 nt, Artificial Sequence
  Description of Artificial Sequence: Synthetic oligonucleotide
uggauuauggugaagacca

SEQ ID NO: 1809463 - RNA, 19 nt, Artificial Sequence
  Description of Artificial Sequence: Synthetic oligonucleotide
aacuccuuaggauuuggcc

SEQ ID NO: 1809464 - RNA, 19 nt, Artificial Sequence
  Description of Artificial Sequence: Synthetic oligonucleotide
agcaaggcuguucagaucc

SEQ ID NO: 1809465 - RNA, 19 nt, Artificial Sequence
  Description of Artificial Sequence: Synthetic oligonucleotide
auaaacuuggauuauggug

SEQ ID NO: 1809466 - RNA, 19 nt, Artificial Sequence
  Description of Artificial Sequence: Synthetic oligonucleotide
auuguauugacagaguccg

SEQ ID NO: 1809467 - RNA, 19 nt, Artificial Sequence
  Description of Artificial Sequence: Synthetic oligonucleotide
gauaccuuuagguaaggag

SEQ ID NO: 1809468 - RNA, 19 nt, Artificial Sequence
  Description of Artificial Sequence: Synthetic oligonucleotide
acagccuuaguguaggacc

SEQ ID NO: 1809469 - RNA, 19 nt, Artificial Sequence
  Description of Artificial Sequence: Synthetic oligonucleotide
aucuagaugggucaaacuc

SEQ ID NO: 1809470 - RNA, 19 nt, Artificial Sequence
  Description of Artificial Sequence: Synthetic oligonucleotide
aacugugauaccuuuaggu

SEQ ID NO: 1809471 - RNA, 19 nt, Artificial Sequence
  Description of Artificial Sequence: Synthetic oligonucleotide
gauauagugaaagaucucc

SEQ ID NO: 1809472 - RNA, 19 nt, Artificial Sequence
  Description of Artificial Sequence: Synthetic oligonucleotide
ucgaaagaaagcaaggcug

SEQ ID NO: 1809473 - RNA, 19 nt, Artificial Sequence
  Description of Artificial Sequence: Synthetic oligonucleotide
aagacucgugccuugcucc

SEQ ID NO: 1809474 - RNA, 19 nt, Artificial Sequence
  Description of Artificial Sequence: Synthetic oligonucleotide
ucauucgaaagaaagcaag

SEQ ID NO: 1809475 - RNA, 19 nt, Artificial Sequence
  Description of Artificial Sequence: Synthetic oligonucleotide
uggugaagaccauaaaugg

SEQ ID NO: 1809476 - RNA, 19 nt, Artificial Sequence
  Description of Artificial Sequence: Synthetic oligonucleotide
uuaggauuuggccauaaac

SEQ ID NO: 1809477 - RNA, 19 nt, Artificial Sequence
  Description of Artificial Sequence: Synthetic oligonucleotide
ucugacauaggguuugagg

SEQ ID NO: 1809478 - RNA, 19 nt, Artificial Sequence
  Description of Artificial Sequence: Synthetic oligonucleotide
aagaaucuggugcaaaucu

SEQ ID NO: 1809479 - RNA, 19 nt, Artificial Sequence
  Description of Artificial Sequence: Synthetic oligonucleotide
ugucauugaagagauauag

SEQ ID NO: 1809480 - RNA, 19 nt, Artificial Sequence
  Description of Artificial Sequence: Synthetic oligonucleotide
ucuagaugggucaaacucc

SEQ ID NO: 1809481 - RNA, 19 nt, Artificial Sequence
  Description of Artificial Sequence: Synthetic oligonucleotide
uagugaaagaucuccagag

SEQ ID NO: 1809482 - RNA, 19 nt, Artificial Sequence
  Description of Artificial Sequence: Synthetic oligonucleotide
gguaucaugaccuucaaac

SEQ ID NO: 1809483 - RNA, 19 nt, Artificial Sequence
  Description of Artificial Sequence: Synthetic oligonucleotide
auucaacagaagcaaaccg

SEQ ID NO: 1809484 - RNA, 19 nt, Artificial Sequence
  Description of Artificial Sequence: Synthetic oligonucleotide
aaaucuagaugggucaaac

SEQ ID NO: 1809485 - RNA, 19 nt, Artificial Sequence
  Description of Artificial Sequence: Synthetic oligonucleotide
gagauugcaacugugauac

SEQ ID NO: 1809486 - RNA, 19 nt, Artificial Sequence
  Description of Artificial Sequence: Synthetic oligonucleotide
acuguaagcaggcacuugg

SEQ ID NO: 1809487 - RNA, 19 nt, Artificial Sequence
  Description of Artificial Sequence: Synthetic oligonucleotide
ugugccgagaagaaucugg

SEQ ID NO: 1809488 - RNA, 19 nt, Artificial Sequence
  Description of Artificial Sequence: Synthetic oligonucleotide
caaaccguaaccaauccag

SEQ ID NO: 1809489 - RNA, 19 nt, Artificial Sequence
  Description of Artificial Sequence: Synthetic oligonucleotide
gugaaagaucuccagaggg

SEQ ID NO: 1809490 - RNA, 19 nt, Artificial Sequence
  Description of Artificial Sequence: Synthetic oligonucleotide
uaccuuuagguaaggagcg

SEQ ID NO: 1809491 - RNA, 19 nt, Artificial Sequence
  Description of Artificial Sequence: Synthetic oligonucleotide
uguccaggaaauccaagcg

SEQ ID NO: 1809492 - RNA, 19 nt, Artificial Sequence
  Description of Artificial Sequence: Synthetic oligonucleotide
ucuggugcaaaucuagaug

SEQ ID NO: 1809493 - RNA, 19 nt, Artificial Sequence
  Description of Artificial Sequence: Synthetic oligonucleotide
ugugauaccuuuagguaag

SEQ ID NO: 1809494 - RNA, 19 nt, Artificial Sequence
  Description of Artificial Sequence: Synthetic oligonucleotide
aaccguaaccaauccaggg

SEQ ID NO: 1809495 - RNA, 19 nt, Artificial Sequence
  Description of Artificial Sequence: Synthetic oligonucleotide
auaauggaaagcugggguc

SEQ ID NO: 1809496 - RNA, 19 nt, Artificial Sequence
  Description of Artificial Sequence: Synthetic oligonucleotide
uauggugaagaccauaaau

SEQ ID NO: 1809497 - RNA, 19 nt, Artificial Sequence
  Description of Artificial Sequence: Synthetic oligonucleotide
uauagugaaagaucuccag

SEQ ID NO: 1809498 - RNA, 19 nt, Artificial Sequence
  Description of Artificial Sequence: Synthetic oligonucleotide
auucgaaagaaagcaaggc

SEQ ID NO: 1809499 - RNA, 19 nt, Artificial Sequence
  Description of Artificial Sequence: Synthetic oligonucleotide
uucaacagaagcaaaccgu

SEQ ID NO: 1809500 - RNA, 19 nt, Artificial Sequence
  Description of Artificial Sequence: Synthetic oligonucleotide
agagauauagugaaagauc

SEQ ID NO: 1809501 - RNA, 19 nt, Artificial Sequence
  Description of Artificial Sequence: Synthetic oligonucleotide
uucgaaagaaagcaaggcu

SEQ ID NO: 1809502 - RNA, 19 nt, Artificial Sequence
  Description of Artificial Sequence: Synthetic oligonucleotide
ugugguaucaugaccuuca

SEQ ID NO: 1809503 - RNA, 19 nt, Artificial Sequence
  Description of Artificial Sequence: Synthetic oligonucleotide
cuucccauucaacagaagc

SEQ ID NO: 1809504 - RNA, 19 nt, Artificial Sequence
  Description of Artificial Sequence: Synthetic oligonucleotide
aucagaggacauuuuauag

SEQ ID NO: 1809505 - RNA, 19 nt, Artificial Sequence
  Description of Artificial Sequence: Synthetic oligonucleotide
cauucgaaagaaagcaagg

SEQ ID NO: 1809506 - RNA, 19 nt, Artificial Sequence
  Description of Artificial Sequence: Synthetic oligonucleotide
uccaggaaauccaagcgcc

SEQ ID NO: 1809507 - RNA, 19 nt, Artificial Sequence
  Description of Artificial Sequence: Synthetic oligonucleotide
ugaaagaucuccagagggc

SEQ ID NO: 1809508 - RNA, 19 nt, Artificial Sequence
  Description of Artificial Sequence: Synthetic oligonucleotide
uucauaacaguguccagug

SEQ ID NO: 1809509 - RNA, 19 nt, Artificial Sequence
  Description of Artificial Sequence: Synthetic oligonucleotide
ucauagaaggcacuccuca

SEQ ID NO: 1809510 - RNA, 19 nt, Artificial Sequence
  Description of Artificial Sequence: Synthetic oligonucleotide
guaaggagcguccaucugg

SEQ ID NO: 1809511 - RNA, 19 nt, Artificial Sequence
  Description of Artificial Sequence: Synthetic oligonucleotide
cacgguagaaccaacggcc

SEQ ID NO: 1809512 - RNA, 19 nt, Artificial Sequence
  Description of Artificial Sequence: Synthetic oligonucleotide
ccagauaagaaucugcucg

SEQ ID NO: 1809513 - RNA, 19 nt, Artificial Sequence
  Description of Artificial Sequence: Synthetic oligonucleotide
cauagagcaagacucgugc

SEQ ID NO: 1809514 - RNA, 19 nt, Artificial Sequence
  Description of Artificial Sequence: Synthetic oligonucleotide
uccauaaauuccagaagcc

SEQ ID NO: 1809515 - RNA, 19 nt, Artificial Sequence
  Description of Artificial Sequence: Synthetic oligonucleotide
aagagauauagugaaagau

SEQ ID NO: 1809516 - RNA, 19 nt, Artificial Sequence
  Description of Artificial Sequence: Synthetic oligonucleotide
aaagcaaggcuguucagau

SEQ ID NO: 1809517 - RNA, 19 nt, Artificial Sequence
  Description of Artificial Sequence: Synthetic oligonucleotide
auaagaaucugcucgaguu

SEQ ID NO: 1809518 - RNA, 19 nt, Artificial Sequence
  Description of Artificial Sequence: Synthetic oligonucleotide
acagaguccgccaugauuc

SEQ ID NO: 1809519 - RNA, 19 nt, Artificial Sequence
  Description of Artificial Sequence: Synthetic oligonucleotide
uucccauucaacagaagca

SEQ ID NO: 1809520 - RNA, 19 nt, Artificial Sequence
  Description of Artificial Sequence: Synthetic oligonucleotide
aauuccuugcuccuccuga

SEQ ID NO: 1809521 - RNA, 19 nt, Artificial Sequence
  Description of Artificial Sequence: Synthetic oligonucleotide
uuauucucauagaaggcac

SEQ ID NO: 1809522 - RNA, 19 nt, Artificial Sequence
  Description of Artificial Sequence: Synthetic oligonucleotide
aaugcaauuccuugcuccu

SEQ ID NO: 1809523 - RNA, 19 nt, Artificial Sequence
  Description of Artificial Sequence: Synthetic oligonucleotide
gugaagaccauaaauggag

SEQ ID NO: 1809524 - RNA, 19 nt, Artificial Sequence
  Description of Artificial Sequence: Synthetic oligonucleotide
uuuauagaugguguuauuc

SEQ ID NO: 1809525 - RNA, 19 nt, Artificial Sequence
  Description of Artificial Sequence: Synthetic oligonucleotide
gaaucaucuucacauaguc

SEQ ID NO: 1809526 - RNA, 19 nt, Artificial Sequence
  Description of Artificial Sequence: Synthetic oligonucleotide
uguauugacagaguccgcc

SEQ ID NO: 1809527 - RNA, 19 nt, Artificial Sequence
  Description of Artificial Sequence: Synthetic oligonucleotide
uagcauuguauugacagag

SEQ ID NO: 1809528 - RNA, 19 nt, Artificial Sequence
  Description of Artificial Sequence: Synthetic oligonucleotide
caaugcaauuccuugcucc

SEQ ID NO: 1809529 - RNA, 19 nt, Artificial Sequence
  Description of Artificial Sequence: Synthetic oligonucleotide
uuggccauaaacuuggauu

SEQ ID NO: 1809530 - RNA, 19 nt, Artificial Sequence
  Description of Artificial Sequence: Synthetic oligonucleotide
uaaggagcguccaucuggg

SEQ ID NO: 1809531 - RNA, 19 nt, Artificial Sequence
  Description of Artificial Sequence: Synthetic oligonucleotide
auagucagcgucauagagc

SEQ ID NO: 1809532 - RNA, 19 nt, Artificial Sequence
  Description of Artificial Sequence: Synthetic oligonucleotide
gaugggucaaacuccuuag

SEQ ID NO: 1809533 - RNA, 19 nt, Artificial Sequence
  Description of Artificial Sequence: Synthetic oligonucleotide
auagagcaagacucgugcc

SEQ ID NO: 1809534 - RNA, 19 nt, Artificial Sequence
  Description of Artificial Sequence: Synthetic oligonucleotide
auccucaacagccuuagug

SEQ ID NO: 1809535 - RNA, 19 nt, Artificial Sequence
  Description of Artificial Sequence: Synthetic oligonucleotide
ucucauagaaggcacuccu

SEQ ID NO: 1809536 - RNA, 19 nt, Artificial Sequence
  Description of Artificial Sequence: Synthetic oligonucleotide
augauucugacauaggguu

SEQ ID NO: 1809537 - RNA, 19 nt, Artificial Sequence
  Description of Artificial Sequence: Synthetic oligonucleotide
aggaccuggaauuuucauc

SEQ ID NO: 1809538 - RNA, 19 nt, Artificial Sequence
  Description of Artificial Sequence: Synthetic oligonucleotide
ugggaauuccucuacccag

SEQ ID NO: 1809539 - RNA, 19 nt, Artificial Sequence
  Description of Artificial Sequence: Synthetic oligonucleotide
uaaauggagauugcaacug

SEQ ID NO: 1809540 - RNA, 19 nt, Artificial Sequence
  Description of Artificial Sequence: Synthetic oligonucleotide
uuaguguaggaccuggaau

SEQ ID NO: 1809541 - RNA, 19 nt, Artificial Sequence
  Description of Artificial Sequence: Synthetic oligonucleotide
agcaaaccguaaccaaucc

SEQ ID NO: 1809542 - RNA, 19 nt, Artificial Sequence
  Description of Artificial Sequence: Synthetic oligonucleotide
aguccauaaauuccagaag

SEQ ID NO: 1809543 - RNA, 19 nt, Artificial Sequence
  Description of Artificial Sequence: Synthetic oligonucleotide
gugcucaugagcaagcugg

SEQ ID NO: 1809544 - RNA, 19 nt, Artificial Sequence
  Description of Artificial Sequence: Synthetic oligonucleotide
uggaauuuucauccaguug

SEQ ID NO: 1809545 - RNA, 19 nt, Artificial Sequence
  Description of Artificial Sequence: Synthetic oligonucleotide
uuguccuucaguuggugcc

SEQ ID NO: 1809546 - RNA, 19 nt, Artificial Sequence
  Description of Artificial Sequence: Synthetic oligonucleotide
gaucacuccaucugugugc

SEQ ID NO: 1809547 - RNA, 19 nt, Artificial Sequence
  Description of Artificial Sequence: Synthetic oligonucleotide
cugacauaggguuugagga

SEQ ID NO: 1809548 - RNA, 19 nt, Artificial Sequence
  Description of Artificial Sequence: Synthetic oligonucleotide
ucauaauggaaagcugggg

SEQ ID NO: 1809549 - RNA, 19 nt, Artificial Sequence
  Description of Artificial Sequence: Synthetic oligonucleotide
gaguccauaaauuccagaa

SEQ ID NO: 1809550 - RNA, 19 nt, Artificial Sequence
  Description of Artificial Sequence: Synthetic oligonucleotide
auagugaaagaucuccaga

SEQ ID NO: 1809551 - RNA, 19 nt, Artificial Sequence
  Description of Artificial Sequence: Synthetic oligonucleotide
ucaacagaagcaaaccgua

SEQ ID NO: 1809552 - RNA, 19 nt, Artificial Sequence
  Description of Artificial Sequence: Synthetic oligonucleotide
ggaccuggaauuuucaucc

SEQ ID NO: 1809553 - RNA, 19 nt, Artificial Sequence
  Description of Artificial Sequence: Synthetic oligonucleotide
aagcaaaccguaaccaauc

SEQ ID NO: 1809554 - RNA, 19 nt, Artificial Sequence
  Description of Artificial Sequence: Synthetic oligonucleotide
acuugggaauuccucuacc

SEQ ID NO: 1809555 - RNA, 19 nt, Artificial Sequence
  Description of Artificial Sequence: Synthetic oligonucleotide
ucuacccagauaagaaucu

SEQ ID NO: 1809556 - RNA, 19 nt, Artificial Sequence
  Description of Artificial Sequence: Synthetic oligonucleotide
cauaacaguguccaguguc

SEQ ID NO: 1809557 - RNA, 19 nt, Artificial Sequence
  Description of Artificial Sequence: Synthetic oligonucleotide
gaaucuggugcaaaucuag

SEQ ID NO: 1809558 - RNA, 19 nt, Artificial Sequence
  Description of Artificial Sequence: Synthetic oligonucleotide
agaaccaacggccaucaga

SEQ ID NO: 1809559 - RNA, 19 nt, Artificial Sequence
  Description of Artificial Sequence: Synthetic oligonucleotide
caauccagggagcaaagag

SEQ ID NO: 1809560 - RNA, 19 nt, Artificial Sequence
  Description of Artificial Sequence: Synthetic oligonucleotide
cauagucagcgucauagag

SEQ ID NO: 1809561 - RNA, 19 nt, Artificial Sequence
  Description of Artificial Sequence: Synthetic oligonucleotide
aaucuagaugggucaaacu

SEQ ID NO: 1809562 - RNA, 19 nt, Artificial Sequence
  Description of Artificial Sequence: Synthetic oligonucleotide
guuugaggaugucauaaug

SEQ ID NO: 1809563 - RNA, 19 nt, Artificial Sequence
  Description of Artificial Sequence: Synthetic oligonucleotide
cucaugagcaagcuggcag

SEQ ID NO: 1809564 - RNA, 19 nt, Artificial Sequence
  Description of Artificial Sequence: Synthetic oligonucleotide
cuuuagguaaggagcgucc

SEQ ID NO: 1809565 - RNA, 19 nt, Artificial Sequence
  Description of Artificial Sequence: Synthetic oligonucleotide
ucaugaccuucaaacauga

SEQ ID NO: 1809566 - RNA, 19 nt, Artificial Sequence
  Description of Artificial Sequence: Synthetic oligonucleotide
ugaagaccauaaauggaga

SEQ ID NO: 1809567 - RNA, 19 nt, Artificial Sequence
  Description of Artificial Sequence: Synthetic oligonucleotide
gaugucauaauggaaagcu

SEQ ID NO: 1809568 - RNA, 19 nt, Artificial Sequence
  Description of Artificial Sequence: Synthetic oligonucleotide
uuggauuauggugaagacc

SEQ ID NO: 1809569 - RNA, 19 nt, Artificial Sequence
  Description of Artificial Sequence: Synthetic oligonucleotide
uucaguuggugccccaaag

SEQ ID NO: 1809570 - RNA, 19 nt, Artificial Sequence
  Description of Artificial Sequence: Synthetic oligonucleotide
uucccaaugcaauuccuug

SEQ ID NO: 1809571 - RNA, 19 nt, Artificial Sequence
  Description of Artificial Sequence: Synthetic oligonucleotide
acuuggauuauggugaaga

SEQ ID NO: 1809572 - RNA, 19 nt, Artificial Sequence
  Description of Artificial Sequence: Synthetic oligonucleotide
uacccagauaagaaucugc

SEQ ID NO: 1809573 - RNA, 19 nt, Artificial Sequence
  Description of Artificial Sequence: Synthetic oligonucleotide
cagaaucaucuucacauag

SEQ ID NO: 1809574 - RNA, 19 nt, Artificial Sequence
  Description of Artificial Sequence: Synthetic oligonucleotide
ucauagagcaagacucgug

SEQ ID NO: 1809575 - RNA, 19 nt, Artificial Sequence
  Description of Artificial Sequence: Synthetic oligonucleotide
uaguguaggaccuggaauu

SEQ ID NO: 1809576 - RNA, 19 nt, Artificial Sequence
  Description of Artificial Sequence: Synthetic oligonucleotide
uaggguuugaggaugucau

SEQ ID NO: 1809577 - RNA, 19 nt, Artificial Sequence
  Description of Artificial Sequence: Synthetic oligonucleotide
uguaggaccuggaauuuuc

SEQ ID NO: 1809578 - RNA, 19 nt, Artificial Sequence
  Description of Artificial Sequence: Synthetic oligonucleotide
aaagccaaugggaaggcgu

SEQ ID NO: 1809579 - RNA, 19 nt, Artificial Sequence
  Description of Artificial Sequence: Synthetic oligonucleotide
uccucuacccagauaagaa

SEQ ID NO: 1809580 - RNA, 19 nt, Artificial Sequence
  Description of Artificial Sequence: Synthetic oligonucleotide
aguuccuuguccuucaguu

SEQ ID NO: 1809581 - RNA, 19 nt, Artificial Sequence
  Description of Artificial Sequence: Synthetic oligonucleotide
ugguauucagggugugugg

SEQ ID NO: 1809582 - RNA, 19 nt, Artificial Sequence
  Description of Artificial Sequence: Synthetic oligonucleotide
uagagcaagacucgugccu

SEQ ID NO: 1809583 - RNA, 19 nt, Artificial Sequence
  Description of Artificial Sequence: Synthetic oligonucleotide
guuauucucauagaaggca

SEQ ID NO: 1809584 - RNA, 19 nt, Artificial Sequence
  Description of Artificial Sequence: Synthetic oligonucleotide
ugugugcucaugagcaagc

SEQ ID NO: 1809585 - RNA, 19 nt, Artificial Sequence
  Description of Artificial Sequence: Synthetic oligonucleotide
gagauauagugaaagaucu

SEQ ID NO: 1809586 - RNA, 19 nt, Artificial Sequence
  Description of Artificial Sequence: Synthetic oligonucleotide
auuuuauagaugguguuau

SEQ ID NO: 1809587 - RNA, 19 nt, Artificial Sequence
  Description of Artificial Sequence: Synthetic oligonucleotide
accaacggccaucagagga

SEQ ID NO: 1809588 - RNA, 19 nt, Artificial Sequence
  Description of Artificial Sequence: Synthetic oligonucleotide
ugaaagcacacuucauaac

SEQ ID NO: 1809589 - RNA, 19 nt, Artificial Sequence
  Description of Artificial Sequence: Synthetic oligonucleotide
gucauaauggaaagcuggg

SEQ ID NO: 1809590 - RNA, 19 nt, Artificial Sequence
  Description of Artificial Sequence: Synthetic oligonucleotide
aaaccguaaccaauccagg

SEQ ID NO: 1809591 - RNA, 19 nt, Artificial Sequence
  Description of Artificial Sequence: Synthetic oligonucleotide
acugugauaccuuuaggua

SEQ ID NO: 1809592 - RNA, 19 nt, Artificial Sequence
  Description of Artificial Sequence: Synthetic oligonucleotide
uaagcaggcacuugggaau

SEQ ID NO: 1809593 - RNA, 19 nt, Artificial Sequence
  Description of Artificial Sequence: Synthetic oligonucleotide
caguuggugccccaaagcc

SEQ ID NO: 1809594 - RNA, 19 nt, Artificial Sequence
  Description of Artificial Sequence: Synthetic oligonucleotide
auucucauagaaggcacuc

SEQ ID NO: 1809595 - RNA, 19 nt, Artificial Sequence
  Description of Artificial Sequence: Synthetic oligonucleotide
aggauuuggccauaaacuu

SEQ ID NO: 1809596 - RNA, 19 nt, Artificial Sequence
  Description of Artificial Sequence: Synthetic oligonucleotide
agcgucauagagcaagacu

SEQ ID NO: 1809597 - RNA, 19 nt, Artificial Sequence
  Description of Artificial Sequence: Synthetic oligonucleotide
ucccaaugcaauuccuugc

SEQ ID NO: 1809598 - RNA, 19 nt, Artificial Sequence
  Description of Artificial Sequence: Synthetic oligonucleotide
agagccacuguaagcaggc

SEQ ID NO: 1809599 - RNA, 19 nt, Artificial Sequence
  Description of Artificial Sequence: Synthetic oligonucleotide
cuuuggaucugaucucccc

SEQ ID NO: 1809600 - RNA, 19 nt, Artificial Sequence
  Description of Artificial Sequence: Synthetic oligonucleotide
aauggagauugcaacugug

SEQ ID NO: 1809601 - RNA, 19 nt, Artificial Sequence
  Description of Artificial Sequence: Synthetic oligonucleotide
uggagauugcaacugugau

SEQ ID NO: 1809602 - RNA, 19 nt, Artificial Sequence
  Description of Artificial Sequence: Synthetic oligonucleotide
cuuggauuauggugaagac

SEQ ID NO: 1809603 - RNA, 19 nt, Artificial Sequence
  Description of Artificial Sequence: Synthetic oligonucleotide
uggugcaaaucuagauggg

SEQ ID NO: 1809604 - RNA, 19 nt, Artificial Sequence
  Description of Artificial Sequence: Synthetic oligonucleotide
auuccagaagccuuuggau

SEQ ID NO: 1809605 - RNA, 19 nt, Artificial Sequence
  Description of Artificial Sequence: Synthetic oligonucleotide
guggccagagcauagaaaa

SEQ ID NO: 1809606 - RNA, 19 nt, Artificial Sequence
  Description of Artificial Sequence: Synthetic oligonucleotide
accguaaccaauccaggga

SEQ ID NO: 1809607 - RNA, 19 nt, Artificial Sequence
  Description of Artificial Sequence: Synthetic oligonucleotide
gcaacugugauaccuuuag

SEQ ID NO: 1809608 - RNA, 19 nt, Artificial Sequence
  Description of Artificial Sequence: Synthetic oligonucleotide
cuguucagauccucaacag

SEQ ID NO: 1809609 - RNA, 19 nt, Artificial Sequence
  Description of Artificial Sequence: Synthetic oligonucleotide
aacuguuucccaaugcaau

SEQ ID NO: 1809610 - RNA, 19 nt, Artificial Sequence
  Description of Artificial Sequence: Synthetic oligonucleotide
guaucaugaccuucaaaca

SEQ ID NO: 1809611 - RNA, 19 nt, Artificial Sequence
  Description of Artificial Sequence: Synthetic oligonucleotide
cuugaucacuccaucugug

SEQ ID NO: 1809612 - RNA, 19 nt, Artificial Sequence
  Description of Artificial Sequence: Synthetic oligonucleotide
aggguguguggccagagca

SEQ ID NO: 1809613 - RNA, 19 nt, Artificial Sequence
  Description of Artificial Sequence: Synthetic oligonucleotide
acauuuuauagaugguguu

SEQ ID NO: 1809614 - RNA, 19 nt, Artificial Sequence
  Description of Artificial Sequence: Synthetic oligonucleotide
agaagcaaaccguaaccaa

SEQ ID NO: 1809615 - RNA, 19 nt, Artificial Sequence
  Description of Artificial Sequence: Synthetic oligonucleotide
aagaccauaaauggagauu

SEQ ID NO: 1809616 - RNA, 19 nt, Artificial Sequence
  Description of Artificial Sequence: Synthetic oligonucleotide
agacucgugccuugcuccc

SEQ ID NO: 1809617 - RNA, 19 nt, Artificial Sequence
  Description of Artificial Sequence: Synthetic oligonucleotide
cugaaagcacacuucauaa

SEQ ID NO: 1809618 - RNA, 19 nt, Artificial Sequence
  Description of Artificial Sequence: Synthetic oligonucleotide
ucucccaucugucuagcau

SEQ ID NO: 1809619 - RNA, 19 nt, Artificial Sequence
  Description of Artificial Sequence: Synthetic oligonucleotide
uugaucacuccaucugugu

SEQ ID NO: 1809620 - RNA, 19 nt, Artificial Sequence
  Description of Artificial Sequence: Synthetic oligonucleotide
uugaagagauauagugaaa

SEQ ID NO: 1809621 - RNA, 19 nt, Artificial Sequence
  Description of Artificial Sequence: Synthetic oligonucleotide
cuggggucaacauccgccg

SEQ ID NO: 1809622 - RNA, 19 nt, Artificial Sequence
  Description of Artificial Sequence: Synthetic oligonucleotide
accuggaauuuucauccag

SEQ ID NO: 1809623 - RNA, 19 nt, Artificial Sequence
  Description of Artificial Sequence: Synthetic oligonucleotide
agaaggcacuccucauucg

SEQ ID NO: 1809624 - RNA, 19 nt, Artificial Sequence
  Description of Artificial Sequence: Synthetic oligonucleotide
uuuagguaaggagcgucca

SEQ ID NO: 1809625 - RNA, 19 nt, Artificial Sequence
  Description of Artificial Sequence: Synthetic oligonucleotide
auugacagaguccgccaug

SEQ ID NO: 1809626 - RNA, 19 nt, Artificial Sequence
  Description of Artificial Sequence: Synthetic oligonucleotide
uuuggccauaaacuuggau

SEQ ID NO: 1809627 - RNA, 19 nt, Artificial Sequence
  Description of Artificial Sequence: Synthetic oligonucleotide
gacacugcccuggugacug

SEQ ID NO: 1809628 - RNA, 19 nt, Artificial Sequence
  Description of Artificial Sequence: Synthetic oligonucleotide
uuauggugaagaccauaaa

SEQ ID NO: 1809629 - RNA, 19 nt, Artificial Sequence
  Description of Artificial Sequence: Synthetic oligonucleotide
cuguaagcaggcacuuggg

SEQ ID NO: 1809630 - RNA, 19 nt, Artificial Sequence
  Description of Artificial Sequence: Synthetic oligonucleotide
auagaugguguuauucuca

SEQ ID NO: 1809631 - RNA, 19 nt, Artificial Sequence
  Description of Artificial Sequence: Synthetic oligonucleotide
aaagaucuccagagggcag

SEQ ID NO: 1809632 - RNA, 19 nt, Artificial Sequence
  Description of Artificial Sequence: Synthetic oligonucleotide
ugacauaggguuugaggau

SEQ ID NO: 1809633 - RNA, 19 nt, Artificial Sequence
  Description of Artificial Sequence: Synthetic oligonucleotide
aaccaauccagggagcaaa

SEQ ID NO: 1809634 - RNA, 19 nt, Artificial Sequence
  Description of Artificial Sequence: Synthetic oligonucleotide
gcaguucucaccaucaagc

SEQ ID NO: 1809635 - RNA, 19 nt, Artificial Sequence
  Description of Artificial Sequence: Synthetic oligonucleotide
gaaggcacuccucauucga

SEQ ID NO: 1809636 - RNA, 19 nt, Artificial Sequence
  Description of Artificial Sequence: Synthetic oligonucleotide
aucuggugcaaaucuagau

SEQ ID NO: 1809637 - RNA, 19 nt, Artificial Sequence
  Description of Artificial Sequence: Synthetic oligonucleotide
acacuucauaacagugucc

SEQ ID NO: 1809638 - RNA, 19 nt, Artificial Sequence
  Description of Artificial Sequence: Synthetic oligonucleotide
cugugauaccuuuagguaa

SEQ ID NO: 1809639 - RNA, 19 nt, Artificial Sequence
  Description of Artificial Sequence: Synthetic oligonucleotide
guaagcaggcacuugggaa

SEQ ID NO: 1809640 - RNA, 19 nt, Artificial Sequence
  Description of Artificial Sequence: Synthetic oligonucleotide
uucucauagaaggcacucc

SEQ ID NO: 1809641 - RNA, 19 nt, Artificial Sequence
  Description of Artificial Sequence: Synthetic oligonucleotide
uauugacagaguccgccau

SEQ ID NO: 1809642 - RNA, 19 nt, Artificial Sequence
  Description of Artificial Sequence: Synthetic oligonucleotide
ugcucgaguuccuuguccu

SEQ ID NO: 1809643 - RNA, 19 nt, Artificial Sequence
  Description of Artificial Sequence: Synthetic oligonucleotide
aggaaauccaagcgccucu

SEQ ID NO: 1809644 - RNA, 19 nt, Artificial Sequence
  Description of Artificial Sequence: Synthetic oligonucleotide
cugguauucagggugugug

SEQ ID NO: 1809645 - RNA, 19 nt, Artificial Sequence
  Description of Artificial Sequence: Synthetic oligonucleotide
uuccucuacccagauaaga

SEQ ID NO: 1809646 - RNA, 19 nt, Artificial Sequence
  Description of Artificial Sequence: Synthetic oligonucleotide
auauagugaaagaucucca

SEQ ID NO: 1809647 - RNA, 19 nt, Artificial Sequence
  Description of Artificial Sequence: Synthetic oligonucleotide
caacugugauaccuuuagg

SEQ ID NO: 1809648 - RNA, 19 nt, Artificial Sequence
  Description of Artificial Sequence: Synthetic oligonucleotide
ucagcgucauagagcaaga

SEQ ID NO: 1809649 - RNA, 19 nt, Artificial Sequence
  Description of Artificial Sequence: Synthetic oligonucleotide
cauaauggaaagcuggggu

SEQ ID NO: 1809650 - RNA, 19 nt, Artificial Sequence
  Description of Artificial Sequence: Synthetic oligonucleotide
agguaaggagcguccaucu

SEQ ID NO: 1809651 - RNA, 19 nt, Artificial Sequence
  Description of Artificial Sequence: Synthetic oligonucleotide
cacuucauaacagugucca

SEQ ID NO: 1809652 - RNA, 19 nt, Artificial Sequence
  Description of Artificial Sequence: Synthetic oligonucleotide
acuucauaacaguguccag

SEQ ID NO: 1809653 - RNA, 19 nt, Artificial Sequence
  Description of Artificial Sequence: Synthetic oligonucleotide
uugacagaguccgccauga

SEQ ID NO: 1809654 - RNA, 19 nt, Artificial Sequence
  Description of Artificial Sequence: Synthetic oligonucleotide
gauugcaacugugauaccu

SEQ ID NO: 1809655 - RNA, 19 nt, Artificial Sequence
  Description of Artificial Sequence: Synthetic oligonucleotide
cauagcugugccgagaaga

SEQ ID NO: 1809656 - RNA, 19 nt, Artificial Sequence
  Description of Artificial Sequence: Synthetic oligonucleotide
agcacacuucauaacagug

SEQ ID NO: 1809657 - RNA, 19 nt, Artificial Sequence
  Description of Artificial Sequence: Synthetic oligonucleotide
auaacaguguccaguguca

SEQ ID NO: 1809658 - RNA, 19 nt, Artificial Sequence
  Description of Artificial Sequence: Synthetic oligonucleotide
guauucaggguguguggcc

SEQ ID NO: 1809659 - RNA, 19 nt, Artificial Sequence
  Description of Artificial Sequence: Synthetic oligonucleotide
ggcacgguagaaccaacgg

SEQ ID NO: 1809660 - RNA, 19 nt, Artificial Sequence
  Description of Artificial Sequence: Synthetic oligonucleotide
aaucuggugcaaaucuaga

SEQ ID NO: 1809661 - RNA, 19 nt, Artificial Sequence
  Description of Artificial Sequence: Synthetic oligonucleotide
ucauaacaguguccagugu

SEQ ID NO: 1809662 - RNA, 19 nt, Artificial Sequence
  Description of Artificial Sequence: Synthetic oligonucleotide
auagaaggcacuccucauu

SEQ ID NO: 1809663 - RNA, 19 nt, Artificial Sequence
  Description of Artificial Sequence: Synthetic oligonucleotide
uuagguaaggagcguccau

SEQ ID NO: 1809664 - RNA, 19 nt, Artificial Sequence
  Description of Artificial Sequence: Synthetic oligonucleotide
guuccaucucccaggaugc

SEQ ID NO: 1809665 - RNA, 19 nt, Artificial Sequence
  Description of Artificial Sequence: Synthetic oligonucleotide
guuccuuguccuucaguug

SEQ ID NO: 1809666 - RNA, 19 nt, Artificial Sequence
  Description of Artificial Sequence: Synthetic oligonucleotide
agaaucaucuucacauagu

SEQ ID NO: 1809667 - RNA, 19 nt, Artificial Sequence
  Description of Artificial Sequence: Synthetic oligonucleotide
uuuuauagaugguguuauu

SEQ ID NO: 1809668 - RNA, 19 nt, Artificial Sequence
  Description of Artificial Sequence: Synthetic oligonucleotide
agcaagacucgugccuugc

SEQ ID NO: 1809669 - RNA, 19 nt, Artificial Sequence
  Description of Artificial Sequence: Synthetic oligonucleotide
agauugcaacugugauacc

SEQ ID NO: 1809670 - RNA, 19 nt, Artificial Sequence
  Description of Artificial Sequence: Synthetic oligonucleotide
uuguauugacagaguccgc

SEQ ID NO: 1809671 - RNA, 19 nt, Artificial Sequence
  Description of Artificial Sequence: Synthetic oligonucleotide
agauaagaaucugcucgag

SEQ ID NO: 1809672 - RNA, 19 nt, Artificial Sequence
  Description of Artificial Sequence: Synthetic oligonucleotide
ucgaguuccuuguccuuca

SEQ ID NO: 1809673 - RNA, 19 nt, Artificial Sequence
  Description of Artificial Sequence: Synthetic oligonucleotide
cugucuagcauuguauuga

SEQ ID NO: 1809674 - RNA, 19 nt, Artificial Sequence
  Description of Artificial Sequence: Synthetic oligonucleotide
augguguuauucucauaga

SEQ ID NO: 1809675 - RNA, 19 nt, Artificial Sequence
  Description of Artificial Sequence: Synthetic oligonucleotide
ggaaagcauagcugugccg

SEQ ID NO: 1809676 - RNA, 19 nt, Artificial Sequence
  Description of Artificial Sequence: Synthetic oligonucleotide
aggagcguccaucugggaa

SEQ ID NO: 1809677 - RNA, 19 nt, Artificial Sequence
  Description of Artificial Sequence: Synthetic oligonucleotide
ucauccaguuggacacugc

SEQ ID NO: 1809678 - RNA, 19 nt, Artificial Sequence
  Description of Artificial Sequence: Synthetic oligonucleotide
gaauuuucauccaguugga

SEQ ID NO: 1809679 - RNA, 19 nt, Artificial Sequence
  Description of Artificial Sequence: Synthetic oligonucleotide
agcauagcugugccgagaa

SEQ ID NO: 1809680 - RNA, 19 nt, Artificial Sequence
  Description of Artificial Sequence: Synthetic oligonucleotide
acccagauaagaaucugcu

SEQ ID NO: 1809681 - RNA, 19 nt, Artificial Sequence
  Description of Artificial Sequence: Synthetic oligonucleotide
gcauuguauugacagaguc

SEQ ID NO: 1809682 - RNA, 19 nt, Artificial Sequence
  Description of Artificial Sequence: Synthetic oligonucleotide
guauugacagaguccgcca

SEQ ID NO: 1809683 - RNA, 19 nt, Artificial Sequence
  Description of Artificial Sequence: Synthetic oligonucleotide
aguccgccaugauucugac

SEQ ID NO: 1809684 - RNA, 19 nt, Artificial Sequence
  Description of Artificial Sequence: Synthetic oligonucleotide
cuagcauuguauugacaga

SEQ ID NO: 1809685 - RNA, 19 nt, Artificial Sequence
  Description of Artificial Sequence: Synthetic oligonucleotide
caucagaggacauuuuaua

SEQ ID NO: 1809686 - RNA, 19 nt, Artificial Sequence
  Description of Artificial Sequence: Synthetic oligonucleotide
uggggucaacauccgccgg

SEQ ID NO: 1809687 - RNA, 19 nt, Artificial Sequence
  Description of Artificial Sequence: Synthetic oligonucleotide
agcaaagaguccauaaauu

SEQ ID NO: 1809688 - RNA, 19 nt, Artificial Sequence
  Description of Artificial Sequence: Synthetic oligonucleotide
gcgucauagagcaagacuc

SEQ ID NO: 1809689 - RNA, 19 nt, Artificial Sequence
  Description of Artificial Sequence: Synthetic oligonucleotide
ugguaucaugaccuucaaa

SEQ ID NO: 1809690 - RNA, 19 nt, Artificial Sequence
  Description of Artificial Sequence: Synthetic oligonucleotide
accaucaagcuucucccau

SEQ ID NO: 1809691 - RNA, 19 nt, Artificial Sequence
  Description of Artificial Sequence: Synthetic oligonucleotide
guaaccaauccagggagca

SEQ ID NO: 1809692 - RNA, 19 nt, Artificial Sequence
  Description of Artificial Sequence: Synthetic oligonucleotide
cucauagaaggcacuccuc

SEQ ID NO: 1809693 - RNA, 19 nt, Artificial Sequence
  Description of Artificial Sequence: Synthetic oligonucleotide
aacaguguccagugucauu

SEQ ID NO: 1809694 - RNA, 19 nt, Artificial Sequence
  Description of Artificial Sequence: Synthetic oligonucleotide
gacagagguuccaucuccc

SEQ ID NO: 1809695 - RNA, 19 nt, Artificial Sequence
  Description of Artificial Sequence: Synthetic oligonucleotide
ggugccccaaagccaaugg

SEQ ID NO: 1809696 - RNA, 19 nt, Artificial Sequence
  Description of Artificial Sequence: Synthetic oligonucleotide
caagacucgugccuugcuc

SEQ ID NO: 1809697 - RNA, 19 nt, Artificial Sequence
  Description of Artificial Sequence: Synthetic oligonucleotide
augucauaauggaaagcug

SEQ ID NO: 1809698 - RNA, 19 nt, Artificial Sequence
  Description of Artificial Sequence: Synthetic oligonucleotide
ugccgagaagaaucuggug

SEQ ID NO: 1809699 - RNA, 19 nt, Artificial Sequence
  Description of Artificial Sequence: Synthetic oligonucleotide
gaagaccauaaauggagau

SEQ ID NO: 1809700 - RNA, 19 nt, Artificial Sequence
  Description of Artificial Sequence: Synthetic oligonucleotide
aucuucacauagucagcgu

SEQ ID NO: 1809701 - RNA, 19 nt, Artificial Sequence
  Description of Artificial Sequence: Synthetic oligonucleotide
ggauuuggccauaaacuug

SEQ ID NO: 1809702 - RNA, 19 nt, Artificial Sequence
  Description of Artificial Sequence: Synthetic oligonucleotide
cucauucgaaagaaagcaa

SEQ ID NO: 1809703 - RNA, 19 nt, Artificial Sequence
  Description of Artificial Sequence: Synthetic oligonucleotide
cuguuucccaaugcaauuc

SEQ ID NO: 1809704 - RNA, 19 nt, Artificial Sequence
  Description of Artificial Sequence: Synthetic oligonucleotide
ccauuuuggcaaacaagag

SEQ ID NO: 1809705 - RNA, 19 nt, Artificial Sequence
  Description of Artificial Sequence: Synthetic oligonucleotide
cagaggacauuuuauagau

SEQ ID NO: 1809706 - RNA, 19 nt, Artificial Sequence
  Description of Artificial Sequence: Synthetic oligonucleotide
gaccauaaauggagauugc

SEQ ID NO: 1809707 - RNA, 19 nt, Artificial Sequence
  Description of Artificial Sequence: Synthetic oligonucleotide
cugugugcucaugagcaag

SEQ ID NO: 1809708 - RNA, 19 nt, Artificial Sequence
  Description of Artificial Sequence: Synthetic oligonucleotide
aauggaaagcuggggucaa

SEQ ID NO: 1809709 - RNA, 19 nt, Artificial Sequence
  Description of Artificial Sequence: Synthetic oligonucleotide
auccgccggugcuggaacc

SEQ ID NO: 1809710 - RNA, 19 nt, Artificial Sequence
  Description of Artificial Sequence: Synthetic oligonucleotide
gauuauggugaagaccaua

SEQ ID NO: 1809711 - RNA, 19 nt, Artificial Sequence
  Description of Artificial Sequence: Synthetic oligonucleotide
auucaggguguguggccag

SEQ ID NO: 1809712 - RNA, 19 nt, Artificial Sequence
  Description of Artificial Sequence: Synthetic oligonucleotide
uucugacauaggguuugag

SEQ ID NO: 1809713 - RNA, 19 nt, Artificial Sequence
  Description of Artificial Sequence: Synthetic oligonucleotide
gcacgguagaaccaacggc

SEQ ID NO: 1809714 - RNA, 19 nt, Artificial Sequence
  Description of Artificial Sequence: Synthetic oligonucleotide
gaagcaaaccguaaccaau

SEQ ID NO: 1809715 - RNA, 19 nt, Artificial Sequence
  Description of Artificial Sequence: Synthetic oligonucleotide
aagcauagcugugccgaga

SEQ ID NO: 1809716 - RNA, 19 nt, Artificial Sequence
  Description of Artificial Sequence: Synthetic oligonucleotide
ccguaaccaauccagggag

SEQ ID NO: 1809717 - RNA, 19 nt, Artificial Sequence
  Description of Artificial Sequence: Synthetic oligonucleotide
cuucauaacaguguccagu

SEQ ID NO: 1809718 - RNA, 19 nt, Artificial Sequence
  Description of Artificial Sequence: Synthetic oligonucleotide
aguuggugccccaaagcca

SEQ ID NO: 1809719 - RNA, 19 nt, Artificial Sequence
  Description of Artificial Sequence: Synthetic oligonucleotide
caaagccaaugggaaggcg

SEQ ID NO: 1809720 - RNA, 19 nt, Artificial Sequence
  Description of Artificial Sequence: Synthetic oligonucleotide
ccugagagccacuguaagc

SEQ ID NO: 1809721 - RNA, 19 nt, Artificial Sequence
  Description of Artificial Sequence: Synthetic oligonucleotide
cuacccagauaagaaucug

SEQ ID NO: 1809722 - RNA, 19 nt, Artificial Sequence
  Description of Artificial Sequence: Synthetic oligonucleotide
ccucauucgaaagaaagca

SEQ ID NO: 1809723 - RNA, 19 nt, Artificial Sequence
  Description of Artificial Sequence: Synthetic oligonucleotide
cuagaugggucaaacuccu

SEQ ID NO: 1809724 - RNA, 19 nt, Artificial Sequence
  Description of Artificial Sequence: Synthetic oligonucleotide
guuggugccccaaagccaa

SEQ ID NO: 1809725 - RNA, 19 nt, Artificial Sequence
  Description of Artificial Sequence: Synthetic oligonucleotide
gaguccgccaugauucuga

SEQ ID NO: 1809726 - RNA, 19 nt, Artificial Sequence
  Description of Artificial Sequence: Synthetic oligonucleotide
ggugaagaccauaaaugga

SEQ ID NO: 1809727 - RNA, 19 nt, Artificial Sequence
  Description of Artificial Sequence: Synthetic oligonucleotide
cuugcucccugagagccac

SEQ ID NO: 1809728 - RNA, 19 nt, Artificial Sequence
  Description of Artificial Sequence: Synthetic oligonucleotide
aggcacgguagaaccaacg

SEQ ID NO: 1809729 - RNA, 19 nt, Artificial Sequence
  Description of Artificial Sequence: Synthetic oligonucleotide
ggagcaaagaguccauaaa

SEQ ID NO: 1809730 - RNA, 19 nt, Artificial Sequence
  Description of Artificial Sequence: Synthetic oligonucleotide
ggugacagagguuccaucu

SEQ ID NO: 1809731 - RNA, 19 nt, Artificial Sequence
  Description of Artificial Sequence: Synthetic oligonucleotide
gagcguccaucugggaagg

SEQ ID NO: 1809732 - RNA, 19 nt, Artificial Sequence
  Description of Artificial Sequence: Synthetic oligonucleotide
ucaggguguguggccagag

SEQ ID NO: 1809733 - RNA, 19 nt, Artificial Sequence
  Description of Artificial Sequence: Synthetic oligonucleotide
cucgaguuccuuguccuuc

SEQ ID NO: 1809734 - RNA, 19 nt, Artificial Sequence
  Description of Artificial Sequence: Synthetic oligonucleotide
auugcaacugugauaccuu

SEQ ID NO: 1809735 - RNA, 19 nt, Artificial Sequence
  Description of Artificial Sequence: Synthetic oligonucleotide
acucgugccuugcucccug

SEQ ID NO: 1809736 - RNA, 19 nt, Artificial Sequence
  Description of Artificial Sequence: Synthetic oligonucleotide
ugccuugcucccugagagc

SEQ ID NO: 1809737 - RNA, 19 nt, Artificial Sequence
  Description of Artificial Sequence: Synthetic oligonucleotide
auagcugugccgagaagaa

SEQ ID NO: 1809738 - RNA, 19 nt, Artificial Sequence
  Description of Artificial Sequence: Synthetic oligonucleotide
cgucauagagcaagacucg

SEQ ID NO: 1809739 - RNA, 19 nt, Artificial Sequence
  Description of Artificial Sequence: Synthetic oligonucleotide
ggagauugcaacugugaua

SEQ ID NO: 1809740 - RNA, 19 nt, Artificial Sequence
  Description of Artificial Sequence: Synthetic oligonucleotide
uagaaccaacggccaucag

SEQ ID NO: 1809741 - RNA, 19 nt, Artificial Sequence
  Description of Artificial Sequence: Synthetic oligonucleotide
ucgugccuugcucccugag

SEQ ID NO: 1809742 - RNA, 19 nt, Artificial Sequence
  Description of Artificial Sequence: Synthetic oligonucleotide
aguuggacacugcccuggu

SEQ ID NO: 1809743 - RNA, 19 nt, Artificial Sequence
  Description of Artificial Sequence: Synthetic oligonucleotide
caacauccgccggugcugg

SEQ ID NO: 1809744 - RNA, 19 nt, Artificial Sequence
  Description of Artificial Sequence: Synthetic oligonucleotide
agagcaagacucgugccuu

SEQ ID NO: 1809745 - RNA, 19 nt, Artificial Sequence
  Description of Artificial Sequence: Synthetic oligonucleotide
agccaaugggaaggcgugg

SEQ ID NO: 1809746 - RNA, 19 nt, Artificial Sequence
  Description of Artificial Sequence: Synthetic oligonucleotide
aaggcacuccucauucgaa

SEQ ID NO: 1809747 - RNA, 19 nt, Artificial Sequence
  Description of Artificial Sequence: Synthetic oligonucleotide
accaauccagggagcaaag

SEQ ID NO: 1809748 - RNA, 19 nt, Artificial Sequence
  Description of Artificial Sequence: Synthetic oligonucleotide
agaaucuggugcaaaucua

SEQ ID NO: 1809749 - RNA, 19 nt, Artificial Sequence
  Description of Artificial Sequence: Synthetic oligonucleotide
gacagaguccgccaugauu

SEQ ID NO: 1809750 - RNA, 19 nt, Artificial Sequence
  Description of Artificial Sequence: Synthetic oligonucleotide
aaggagcguccaucuggga

SEQ ID NO: 1809751 - RNA, 19 nt, Artificial Sequence
  Description of Artificial Sequence: Synthetic oligonucleotide
auuccucuacccagauaag

SEQ ID NO: 1809752 - RNA, 19 nt, Artificial Sequence
  Description of Artificial Sequence: Synthetic oligonucleotide
caucugucuagcauuguau

SEQ ID NO: 1809753 - RNA, 19 nt, Artificial Sequence
  Description of Artificial Sequence: Synthetic oligonucleotide
guuggacacugcccuggug

SEQ ID NO: 1809754 - RNA, 19 nt, Artificial Sequence
  Description of Artificial Sequence: Synthetic oligonucleotide
ccaucugugugcucaugag

SEQ ID NO: 1809755 - RNA, 19 nt, Artificial Sequence
  Description of Artificial Sequence: Synthetic oligonucleotide
uggugccccaaagccaaug

SEQ ID NO: 1809756 - RNA, 19 nt, Artificial Sequence
  Description of Artificial Sequence: Synthetic oligonucleotide
acauaggguuugaggaugu

SEQ ID NO: 1809757 - RNA, 19 nt, Artificial Sequence
  Description of Artificial Sequence: Synthetic oligonucleotide
aguguaggaccuggaauuu

SEQ ID NO: 1809758 - RNA, 19 nt, Artificial Sequence
  Description of Artificial Sequence: Synthetic oligonucleotide
gcaaaccguaaccaaucca

SEQ ID NO: 1809759 - RNA, 19 nt, Artificial Sequence
  Description of Artificial Sequence: Synthetic oligonucleotide
ccaacggccaucagaggac

SEQ ID NO: 1809760 - RNA, 19 nt, Artificial Sequence
  Description of Artificial Sequence: Synthetic oligonucleotide
ggguuugaggaugucauaa

SEQ ID NO: 1809761 - RNA, 19 nt, Artificial Sequence
  Description of Artificial Sequence: Synthetic oligonucleotide
uggugacugaaagcacacu

SEQ ID NO: 1809762 - RNA, 19 nt, Artificial Sequence
  Description of Artificial Sequence: Synthetic oligonucleotide
gccuuaguguaggaccugg

SEQ ID NO: 1809763 - RNA, 19 nt, Artificial Sequence
  Description of Artificial Sequence: Synthetic oligonucleotide
caggguguguggccagagc

SEQ ID NO: 1809764 - RNA, 19 nt, Artificial Sequence
  Description of Artificial Sequence: Synthetic oligonucleotide
gaauuccucuacccagaua

SEQ ID NO: 1809765 - RNA, 19 nt, Artificial Sequence
  Description of Artificial Sequence: Synthetic oligonucleotide
cacuccucauucgaaagaa

SEQ ID NO: 1809766 - RNA, 19 nt, Artificial Sequence
  Description of Artificial Sequence: Synthetic oligonucleotide
cauccgccggugcuggaac

SEQ ID NO: 1809767 - RNA, 19 nt, Artificial Sequence
  Description of Artificial Sequence: Synthetic oligonucleotide
gccuugcucccugagagcc

SEQ ID NO: 1809768 - RNA, 19 nt, Artificial Sequence
  Description of Artificial Sequence: Synthetic oligonucleotide
cugugguaucaugaccuuc

SEQ ID NO: 1809769 - RNA, 19 nt, Artificial Sequence
  Description of Artificial Sequence: Synthetic oligonucleotide
gcccuggugacugaaagca

SEQ ID NO: 1809770 - RNA, 19 nt, Artificial Sequence
  Description of Artificial Sequence: Synthetic oligonucleotide
guaggaccuggaauuuuca

SEQ ID NO: 1809771 - RNA, 19 nt, Artificial Sequence
  Description of Artificial Sequence: Synthetic oligonucleotide
agaugguguuauucucaua

SEQ ID NO: 1809772 - RNA, 19 nt, Artificial Sequence
  Description of Artificial Sequence: Synthetic oligonucleotide
gccuuuggaucugaucucc

SEQ ID NO: 1809773 - RNA, 19 nt, Artificial Sequence
  Description of Artificial Sequence: Synthetic oligonucleotide
acgguagaaccaacggcca

SEQ ID NO: 1809774 - RNA, 19 nt, Artificial Sequence
  Description of Artificial Sequence: Synthetic oligonucleotide
agaguccgccaugauucug

SEQ ID NO: 1809775 - RNA, 19 nt, Artificial Sequence
  Description of Artificial Sequence: Synthetic oligonucleotide
gugcuggaaccacuucuuc

SEQ ID NO: 1809776 - RNA, 19 nt, Artificial Sequence
  Description of Artificial Sequence: Synthetic oligonucleotide
accuuuagguaaggagcgu

SEQ ID NO: 1809777 - RNA, 19 nt, Artificial Sequence
  Description of Artificial Sequence: Synthetic oligonucleotide
aacauccgccggugcugga

SEQ ID NO: 1809778 - RNA, 19 nt, Artificial Sequence
  Description of Artificial Sequence: Synthetic oligonucleotide
cacuguaagcaggcacuug

SEQ ID NO: 1809779 - RNA, 19 nt, Artificial Sequence
  Description of Artificial Sequence: Synthetic oligonucleotide
cuccuuaggauuuggccau

SEQ ID NO: 1809780 - RNA, 19 nt, Artificial Sequence
  Description of Artificial Sequence: Synthetic oligonucleotide
caggcacgguagaaccaac

SEQ ID NO: 1809781 - RNA, 19 nt, Artificial Sequence
  Description of Artificial Sequence: Synthetic oligonucleotide
ccuuuggaucugaucuccc

SEQ ID NO: 1809782 - RNA, 19 nt, Artificial Sequence
  Description of Artificial Sequence: Synthetic oligonucleotide
caguucucaccaucaagcu

SEQ ID NO: 1809783 - RNA, 19 nt, Artificial Sequence
  Description of Artificial Sequence: Synthetic oligonucleotide
uagaugggucaaacuccuu

SEQ ID NO: 1809784 - RNA, 19 nt, Artificial Sequence
  Description of Artificial Sequence: Synthetic oligonucleotide
uccgccggugcuggaacca

SEQ ID NO: 1809785 - RNA, 19 nt, Artificial Sequence
  Description of Artificial Sequence: Synthetic oligonucleotide
ccuuuagguaaggagcguc

SEQ ID NO: 1809786 - RNA, 19 nt, Artificial Sequence
  Description of Artificial Sequence: Synthetic oligonucleotide
cccugagagccacuguaag

SEQ ID NO: 1809787 - RNA, 19 nt, Artificial Sequence
  Description of Artificial Sequence: Synthetic oligonucleotide
cauagaaggcacuccucau

SEQ ID NO: 1809788 - RNA, 19 nt, Artificial Sequence
  Description of Artificial Sequence: Synthetic oligonucleotide
gugucauugaagagauaua

SEQ ID NO: 1809789 - RNA, 19 nt, Artificial Sequence
  Description of Artificial Sequence: Synthetic oligonucleotide
ccaucaagcuucucccauc

SEQ ID NO: 1809790 - RNA, 19 nt, Artificial Sequence
  Description of Artificial Sequence: Synthetic oligonucleotide
cguaaccaauccagggagc

SEQ ID NO: 1809791 - RNA, 19 nt, Artificial Sequence
  Description of Artificial Sequence: Synthetic oligonucleotide
gugguaucaugaccuucaa

SEQ ID NO: 1809792 - RNA, 19 nt, Artificial Sequence
  Description of Artificial Sequence: Synthetic oligonucleotide
gucaaacuccuuaggauuu

SEQ ID NO: 1809793 - RNA, 19 nt, Artificial Sequence
  Description of Artificial Sequence: Synthetic oligonucleotide
gucauagagcaagacucgu

SEQ ID NO: 1809794 - RNA, 19 nt, Artificial Sequence
  Description of Artificial Sequence: Synthetic oligonucleotide
cauaggguuugaggauguc

SEQ ID NO: 1809795 - RNA, 19 nt, Artificial Sequence
  Description of Artificial Sequence: Synthetic oligonucleotide
cagcgucauagagcaagac

SEQ ID NO: 1809796 - RNA, 19 nt, Artificial Sequence
  Description of Artificial Sequence: Synthetic oligonucleotide
gucuagcauuguauugaca

SEQ ID NO: 1809797 - RNA, 19 nt, Artificial Sequence
  Description of Artificial Sequence: Synthetic oligonucleotide
ggugcaaaucuagaugggu

SEQ ID NO: 1809798 - RNA, 19 nt, Artificial Sequence
  Description of Artificial Sequence: Synthetic oligonucleotide
agccuuaguguaggaccug

SEQ ID NO: 1809799 - RNA, 19 nt, Artificial Sequence
  Description of Artificial Sequence: Synthetic oligonucleotide
cucccaucugucuagcauu

SEQ ID NO: 1809800 - RNA, 19 nt, Artificial Sequence
  Description of Artificial Sequence: Synthetic oligonucleotide
ggucaacauccgccggugc

SEQ ID NO: 1809801 - RNA, 19 nt, Artificial Sequence
  Description of Artificial Sequence: Synthetic oligonucleotide
ccacuucuucccauucaac

SEQ ID NO: 1809802 - RNA, 19 nt, Artificial Sequence
  Description of Artificial Sequence: Synthetic oligonucleotide
caugaccuucaaacaugaa

SEQ ID NO: 1809803 - RNA, 19 nt, Artificial Sequence
  Description of Artificial Sequence: Synthetic oligonucleotide
gcauagcugugccgagaag

SEQ ID NO: 1809804 - RNA, 19 nt, Artificial Sequence
  Description of Artificial Sequence: Synthetic oligonucleotide
ccaaugcaauuccuugcuc

SEQ ID NO: 1809805 - RNA, 19 nt, Artificial Sequence
  Description of Artificial Sequence: Synthetic oligonucleotide
acggccaucagaggacauu

SEQ ID NO: 1809806 - RNA, 19 nt, Artificial Sequence
  Description of Artificial Sequence: Synthetic oligonucleotide
cugugccgagaagaaucug

SEQ ID NO: 1809807 - RNA, 19 nt, Artificial Sequence
  Description of Artificial Sequence: Synthetic oligonucleotide
guuucccaaugcaauuccu

SEQ ID NO: 1809808 - RNA, 19 nt, Artificial Sequence
  Description of Artificial Sequence: Synthetic oligonucleotide
gcguccaucugggaaggug

SEQ ID NO: 1809809 - RNA, 19 nt, Artificial Sequence
  Description of Artificial Sequence: Synthetic oligonucleotide
gguuugaggaugucauaau

SEQ ID NO: 1809810 - RNA, 19 nt, Artificial Sequence
  Description of Artificial Sequence: Synthetic oligonucleotide
gugccgagaagaaucuggu

SEQ ID NO: 1809811 - RNA, 19 nt, Artificial Sequence
  Description of Artificial Sequence: Synthetic oligonucleotide
uuggugccccaaagccaau

SEQ ID NO: 1809812 - RNA, 19 nt, Artificial Sequence
  Description of Artificial Sequence: Synthetic oligonucleotide
aacggccaucagaggacau

SEQ ID NO: 1809813 - RNA, 19 nt, Artificial Sequence
  Description of Artificial Sequence: Synthetic oligonucleotide
caacggccaucagaggaca

SEQ ID NO: 1809814 - RNA, 19 nt, Artificial Sequence
  Description of Artificial Sequence: Synthetic oligonucleotide
caacagccuuaguguagga

SEQ ID NO: 1809815 - RNA, 19 nt, Artificial Sequence
  Description of Artificial Sequence: Synthetic oligonucleotide
ccauaaauuccagaagccu

SEQ ID NO: 1809816 - RNA, 19 nt, Artificial Sequence
  Description of Artificial Sequence: Synthetic oligonucleotide
agggagcaaagaguccaua

SEQ ID NO: 1809817 - RNA, 19 nt, Artificial Sequence
  Description of Artificial Sequence: Synthetic oligonucleotide
gcacuugggaauuccucua

SEQ ID NO: 1809818 - RNA, 19 nt, Artificial Sequence
  Description of Artificial Sequence: Synthetic oligonucleotide
ccaguuggacacugcccug

SEQ ID NO: 1809819 - RNA, 19 nt, Artificial Sequence
  Description of Artificial Sequence: Synthetic oligonucleotide
gccacuguaagcaggcacu

SEQ ID NO: 1809820 - RNA, 19 nt, Artificial Sequence
  Description of Artificial Sequence: Synthetic oligonucleotide
ucacuccaucugugugcuc

SEQ ID NO: 1809821 - RNA, 19 nt, Artificial Sequence
  Description of Artificial Sequence: Synthetic oligonucleotide
gccaaugggaaggcgugga

SEQ ID NO: 1809822 - RNA, 19 nt, Artificial Sequence
  Description of Artificial Sequence: Synthetic oligonucleotide
caggcacuugggaauuccu

SEQ ID NO: 1809823 - RNA, 19 nt, Artificial Sequence
  Description of Artificial Sequence: Synthetic oligonucleotide
gguguguggccagagcaua

SEQ ID NO: 1809824 - RNA, 19 nt, Artificial Sequence
  Description of Artificial Sequence: Synthetic oligonucleotide
gcaggcacgguagaaccaa

SEQ ID NO: 1809825 - RNA, 19 nt, Artificial Sequence
  Description of Artificial Sequence: Synthetic oligonucleotide
ccucaacagccuuagugua

SEQ ID NO: 1809826 - RNA, 19 nt, Artificial Sequence
  Description of Artificial Sequence: Synthetic oligonucleotide
cccaaugcaauuccuugcu

SEQ ID NO: 1809827 - RNA, 19 nt, Artificial Sequence
  Description of Artificial Sequence: Synthetic oligonucleotide
ccuuaguguaggaccugga

SEQ ID NO: 1809828 - RNA, 19 nt, Artificial Sequence
  Description of Artificial Sequence: Synthetic oligonucleotide
ggggucaacauccgccggu

SEQ ID NO: 1809829 - RNA, 19 nt, Artificial Sequence
  Description of Artificial Sequence: Synthetic oligonucleotide
cagaguccgccaugauucu

SEQ ID NO: 1809830 - RNA, 19 nt, Artificial Sequence
  Description of Artificial Sequence: Synthetic oligonucleotide
cucgugccuugcucccuga

SEQ ID NO: 1809831 - RNA, 19 nt, Artificial Sequence
  Description of Artificial Sequence: Synthetic oligonucleotide
ccucuacccagauaagaau

SEQ ID NO: 1809832 - RNA, 19 nt, Artificial Sequence
  Description of Artificial Sequence: Synthetic oligonucleotide
gcugugccgagaagaaucu

SEQ ID NO: 1809833 - RNA, 19 nt, Artificial Sequence
  Description of Artificial Sequence: Synthetic oligonucleotide
cagggagcaaagaguccau

SEQ ID NO: 1809834 - RNA, 19 nt, Artificial Sequence
  Description of Artificial Sequence: Synthetic oligonucleotide
gacucgugccuugcucccu

SEQ ID NO: 1809835 - RNA, 19 nt, Artificial Sequence
  Description of Artificial Sequence: Synthetic oligonucleotide
agcguccaucugggaaggu

SEQ ID NO: 1809836 - RNA, 19 nt, Artificial Sequence
  Description of Artificial Sequence: Synthetic oligonucleotide
gcaagacucgugccuugcu

SEQ ID NO: 1809837 - RNA, 19 nt, Artificial Sequence
  Description of Artificial Sequence: Synthetic oligonucleotide
cagugucauugaagagaua

SEQ ID NO: 1809838 - RNA, 19 nt, Artificial Sequence
  Description of Artificial Sequence: Synthetic oligonucleotide
gcuggcaggcacgguagaa

SEQ ID NO: 1809839 - RNA, 19 nt, Artificial Sequence
  Description of Artificial Sequence: Synthetic oligonucleotide
gcugguauucagggugugu

SEQ ID NO: 1809840 - RNA, 19 nt, Artificial Sequence
  Description of Artificial Sequence: Synthetic oligonucleotide
agucagcgucauagagcaa

SEQ ID NO: 1809841 - RNA, 19 nt, Artificial Sequence
  Description of Artificial Sequence: Synthetic oligonucleotide
cgugccuugcucccugaga

SEQ ID NO: 1809842 - RNA, 19 nt, Artificial Sequence
  Description of Artificial Sequence: Synthetic oligonucleotide
cacugcccuggugacugaa

SEQ ID NO: 1809843 - RNA, 19 nt, Artificial Sequence
  Description of Artificial Sequence: Synthetic oligonucleotide
ccuugcucccugagagcca

SEQ ID NO: 1809844 - RNA, 19 nt, Artificial Sequence
  Description of Artificial Sequence: Synthetic oligonucleotide
gcugugguaucaugaccuu

SEQ ID NO: 1809845 - RNA, 19 nt, Artificial Sequence
  Description of Artificial Sequence: Synthetic oligonucleotide
ggccauaaacuuggauuau

SEQ ID NO: 1809846 - RNA, 19 nt, Artificial Sequence
  Description of Artificial Sequence: Synthetic oligonucleotide
ggguguguggccagagcau

SEQ ID NO: 1809847 - RNA, 19 nt, Artificial Sequence
  Description of Artificial Sequence: Synthetic oligonucleotide
ggauuauggugaagaccau

SEQ ID NO: 1809848 - RNA, 19 nt, Artificial Sequence
  Description of Artificial Sequence: Synthetic oligonucleotide
ccuucaguuggugccccaa

SEQ ID NO: 1809849 - RNA, 19 nt, Artificial Sequence
  Description of Artificial Sequence: Synthetic oligonucleotide
ccgccggugcuggaaccac

SEQ ID NO: 1809850 - RNA, 19 nt, Artificial Sequence
  Description of Artificial Sequence: Synthetic oligonucleotide
gccggugcuggaaccacuu

SEQ ID NO: 1809851 - RNA, 19 nt, Artificial Sequence
  Description of Artificial Sequence: Synthetic oligonucleotide
cgguagaaccaacggccau

SEQ ID NO: 1809852 - RNA, 19 nt, Artificial Sequence
  Description of Artificial Sequence: Synthetic oligonucleotide
cccaucugucuagcauugu

SEQ ID NO: 1809853 - RNA, 19 nt, Artificial Sequence
  Description of Artificial Sequence: Synthetic oligonucleotide
cgccggugcuggaaccacu

SEQ ID NO: 1809854 - RNA, 19 nt, Artificial Sequence
  Description of Artificial Sequence: Synthetic oligonucleotide
aauguaaauggucaggacc

SEQ ID NO: 1809855 - RNA, 19 nt, Artificial Sequence
  Description of Artificial Sequence: Synthetic oligonucleotide
auaaauagcagguaaaacu

SEQ ID NO: 1809856 - RNA, 19 nt, Artificial Sequence
  Description of Artificial Sequence: Synthetic oligonucleotide
augaugaugggccauaucg

SEQ ID NO: 1809857 - RNA, 19 nt, Artificial Sequence
  Description of Artificial Sequence: Synthetic oligonucleotide
aguauuaccacaaugauga

SEQ ID NO: 1809858 - RNA, 19 nt, Artificial Sequence
  Description of Artificial Sequence: Synthetic oligonucleotide
aaggucaaaaguccagagc

SEQ ID NO: 1809859 - RNA, 19 nt, Artificial Sequence
  Description of Artificial Sequence: Synthetic oligonucleotide
uccgcagucaccaaggcgg

SEQ ID NO: 1809860 - RNA, 19 nt, Artificial Sequence
  Description of Artificial Sequence: Synthetic oligonucleotide
guacucaauaaauagcagg

SEQ ID NO: 1809861 - RNA, 19 nt, Artificial Sequence
  Description of Artificial Sequence: Synthetic oligonucleotide
auaucggagauuuuggaag

SEQ ID NO: 1809862 - RNA, 19 nt, Artificial Sequence
  Description of Artificial Sequence: Synthetic oligonucleotide
uacucaauaaauagcaggu

SEQ ID NO: 1809863 - RNA, 19 nt, Artificial Sequence
  Description of Artificial Sequence: Synthetic oligonucleotide
ucagauucugcugagaccc

SEQ ID NO: 1809864 - RNA, 19 nt, Artificial Sequence
  Description of Artificial Sequence: Synthetic oligonucleotide
ugcgacaugagaaauuggc

SEQ ID NO: 1809865 - RNA, 19 nt, Artificial Sequence
  Description of Artificial Sequence: Synthetic oligonucleotide
aauuguagaugcucaaagu

SEQ ID NO: 1809866 - RNA, 19 nt, Artificial Sequence
  Description of Artificial Sequence: Synthetic oligonucleotide
auuaccacaaugaugauga

SEQ ID NO: 1809867 - RNA, 19 nt, Artificial Sequence
  Description of Artificial Sequence: Synthetic oligonucleotide
agcacguggaguuucaggg

SEQ ID NO: 1809868 - RNA, 19 nt, Artificial Sequence
  Description of Artificial Sequence: Synthetic oligonucleotide
aggucaaaaguccagagcu

SEQ ID NO: 1809869 - RNA, 19 nt, Artificial Sequence
  Description of Artificial Sequence: Synthetic oligonucleotide
aaauagcagguaaaacucc

SEQ ID NO: 1809870 - RNA, 19 nt, Artificial Sequence
  Description of Artificial Sequence: Synthetic oligonucleotide
aguuauccgggcuucagcg

SEQ ID NO: 1809871 - RNA, 19 nt, Artificial Sequence
  Description of Artificial Sequence: Synthetic oligonucleotide
uuuuggaagcacuuucagg

SEQ ID NO: 1809872 - RNA, 19 nt, Artificial Sequence
  Description of Artificial Sequence: Synthetic oligonucleotide
gaagauucgcucgugaucc

SEQ ID NO: 1809873 - RNA, 19 nt, Artificial Sequence
  Description of Artificial Sequence: Synthetic oligonucleotide
acucagauucugcugagac

SEQ ID NO: 1809874 - RNA, 19 nt, Artificial Sequence
  Description of Artificial Sequence: Synthetic oligonucleotide
auaaauguaaauggucagg

SEQ ID NO: 1809875 - RNA, 19 nt, Artificial Sequence
  Description of Artificial Sequence: Synthetic oligonucleotide
guagguaccguucauggcc

SEQ ID NO: 1809876 - RNA, 19 nt, Artificial Sequence
  Description of Artificial Sequence: Synthetic oligonucleotide
ugaugaugggccauaucgg

SEQ ID NO: 1809877 - RNA, 19 nt, Artificial Sequence
  Description of Artificial Sequence: Synthetic oligonucleotide
agagcuggcauucagcgug

SEQ ID NO: 1809878 - RNA, 19 nt, Artificial Sequence
  Description of Artificial Sequence: Synthetic oligonucleotide
ugcgcuucacacuucacag

SEQ ID NO: 1809879 - RNA, 19 nt, Artificial Sequence
  Description of Artificial Sequence: Synthetic oligonucleotide
gagacauucgggaacagug

SEQ ID NO: 1809880 - RNA, 19 nt, Artificial Sequence
  Description of Artificial Sequence: Synthetic oligonucleotide
ucgcucgugauccucagag

SEQ ID NO: 1809881 - RNA, 19 nt, Artificial Sequence
  Description of Artificial Sequence: Synthetic oligonucleotide
ucucuggcgguuauaaaug

SEQ ID NO: 1809882 - RNA, 19 nt, Artificial Sequence
  Description of Artificial Sequence: Synthetic oligonucleotide
gaaggucaaaaguccagag

SEQ ID NO: 1809883 - RNA, 19 nt, Artificial Sequence
  Description of Artificial Sequence: Synthetic oligonucleotide
guuauaaauguaaaugguc

SEQ ID NO: 1809884 - RNA, 19 nt, Artificial Sequence
  Description of Artificial Sequence: Synthetic oligonucleotide
acguagguaccguucaugg

SEQ ID NO: 1809885 - RNA, 19 nt, Artificial Sequence
  Description of Artificial Sequence: Synthetic oligonucleotide
ugugcgacaugagaaauug

SEQ ID NO: 1809886 - RNA, 19 nt, Artificial Sequence
  Description of Artificial Sequence: Synthetic oligonucleotide
uuguauauccugaucuuuc

SEQ ID NO: 1809887 - RNA, 19 nt, Artificial Sequence
  Description of Artificial Sequence: Synthetic oligonucleotide
agagcaagugaagauucgc

SEQ ID NO: 1809888 - RNA, 19 nt, Artificial Sequence
  Description of Artificial Sequence: Synthetic oligonucleotide
ugauauuuccaugggagcu

SEQ ID NO: 1809889 - RNA, 19 nt, Artificial Sequence
  Description of Artificial Sequence: Synthetic oligonucleotide
uuuaacagcuccugcccag

SEQ ID NO: 1809890 - RNA, 19 nt, Artificial Sequence
  Description of Artificial Sequence: Synthetic oligonucleotide
agcuccacgcuucucaggg

SEQ ID NO: 1809891 - RNA, 19 nt, Artificial Sequence
  Description of Artificial Sequence: Synthetic oligonucleotide
uucucuggcgguuauaaau

SEQ ID NO: 1809892 - RNA, 19 nt, Artificial Sequence
  Description of Artificial Sequence: Synthetic oligonucleotide
uaucggagauuuuggaagc

SEQ ID NO: 1809893 - RNA, 19 nt, Artificial Sequence
  Description of Artificial Sequence: Synthetic oligonucleotide
uugacggagaguuggcucc

SEQ ID NO: 1809894 - RNA, 19 nt, Artificial Sequence
  Description of Artificial Sequence: Synthetic oligonucleotide
ggugauauuuccaugggag

SEQ ID NO: 1809895 - RNA, 19 nt, Artificial Sequence
  Description of Artificial Sequence: Synthetic oligonucleotide
uuuuaacagcuccugccca

SEQ ID NO: 1809896 - RNA, 19 nt, Artificial Sequence
  Description of Artificial Sequence: Synthetic oligonucleotide
uucauggcccaugugacag

SEQ ID NO: 1809897 - RNA, 19 nt, Artificial Sequence
  Description of Artificial Sequence: Synthetic oligonucleotide
aauagcagguaaaacuccu

SEQ ID NO: 1809898 - RNA, 19 nt, Artificial Sequence
  Description of Artificial Sequence: Synthetic oligonucleotide
aguucugugcgacaugaga

SEQ ID NO: 1809899 - RNA, 19 nt, Artificial Sequence
  Description of Artificial Sequence: Synthetic oligonucleotide
aaaauuguagaugcucaaa

SEQ ID NO: 1809900 - RNA, 19 nt, Artificial Sequence
  Description of Artificial Sequence: Synthetic oligonucleotide
cacaguagccaguauuacc

SEQ ID NO: 1809901 - RNA, 19 nt, Artificial Sequence
  Description of Artificial Sequence: Synthetic oligonucleotide
uggcucagggucaggaccg

SEQ ID NO: 1809902 - RNA, 19 nt, Artificial Sequence
  Description of Artificial Sequence: Synthetic oligonucleotide
gaugaugggccauaucgga

SEQ ID NO: 1809903 - RNA, 19 nt, Artificial Sequence
  Description of Artificial Sequence: Synthetic oligonucleotide
ucgugauccucagagcugg

SEQ ID NO: 1809904 - RNA, 19 nt, Artificial Sequence
  Description of Artificial Sequence: Synthetic oligonucleotide
aaggcgguggcugacacca

SEQ ID NO: 1809905 - RNA, 19 nt, Artificial Sequence
  Description of Artificial Sequence: Synthetic oligonucleotide
uccaugggagcucacggca

SEQ ID NO: 1809906 - RNA, 19 nt, Artificial Sequence
  Description of Artificial Sequence: Synthetic oligonucleotide
cacggcauggcacacguag

SEQ ID NO: 1809907 - RNA, 19 nt, Artificial Sequence
  Description of Artificial Sequence: Synthetic oligonucleotide
uucgggaacagugcuagcc

SEQ ID NO: 1809908 - RNA, 19 nt, Artificial Sequence
  Description of Artificial Sequence: Synthetic oligonucleotide
agcggcaggaaacaggccu

SEQ ID NO: 1809909 - RNA, 19 nt, Artificial Sequence
  Description of Artificial Sequence: Synthetic oligonucleotide
cgguuauaaauguaaaugg

SEQ ID NO: 1809910 - RNA, 19 nt, Artificial Sequence
  Description of Artificial Sequence: Synthetic oligonucleotide
gugauauuuccaugggagc

SEQ ID NO: 1809911 - RNA, 19 nt, Artificial Sequence
  Description of Artificial Sequence: Synthetic oligonucleotide
gcgguuauaaauguaaaug

SEQ ID NO: 1809912 - RNA, 19 nt, Artificial Sequence
  Description of Artificial Sequence: Synthetic oligonucleotide
ucgggaacagugcuagccc

SEQ ID NO: 1809913 - RNA, 19 nt, Artificial Sequence
  Description of Artificial Sequence: Synthetic oligonucleotide
uuuuccggcugcagguuag

SEQ ID NO: 1809914 - RNA, 19 nt, Artificial Sequence
  Description of Artificial Sequence: Synthetic oligonucleotide
ucugcuugccagcaccgug

SEQ ID NO: 1809915 - RNA, 19 nt, Artificial Sequence
  Description of Artificial Sequence: Synthetic oligonucleotide
ugugguuugugcucuugga

SEQ ID NO: 1809916 - RNA, 19 nt, Artificial Sequence
  Description of Artificial Sequence: Synthetic oligonucleotide
cuucccuggugauauuucc

SEQ ID NO: 1809917 - RNA, 19 nt, Artificial Sequence
  Description of Artificial Sequence: Synthetic oligonucleotide
gguucuugcccacagguug

SEQ ID NO: 1809918 - RNA, 19 nt, Artificial Sequence
  Description of Artificial Sequence: Synthetic oligonucleotide
cagucguucucauccagcc

SEQ ID NO: 1809919 - RNA, 19 nt, Artificial Sequence
  Description of Artificial Sequence: Synthetic oligonucleotide
cucagauucugcugagacc

SEQ ID NO: 1809920 - RNA, 19 nt, Artificial Sequence
  Description of Artificial Sequence: Synthetic oligonucleotide
uccuugaguuucauggccu

SEQ ID NO: 1809921 - RNA, 19 nt, Artificial Sequence
  Description of Artificial Sequence: Synthetic oligonucleotide
uggugucccaccauccacc

SEQ ID NO: 1809922 - RNA, 19 nt, Artificial Sequence
  Description of Artificial Sequence: Synthetic oligonucleotide
uccugaucuuucucuggcg

SEQ ID NO: 1809923 - RNA, 19 nt, Artificial Sequence
  Description of Artificial Sequence: Synthetic oligonucleotide
uagguaccguucauggccc

SEQ ID NO: 1809924 - RNA, 19 nt, Artificial Sequence
  Description of Artificial Sequence: Synthetic oligonucleotide
cauucgggaacagugcuag

SEQ ID NO: 1809925 - RNA, 19 nt, Artificial Sequence
  Description of Artificial Sequence: Synthetic oligonucleotide
gaccccucgggccaggucc

SEQ ID NO: 1809926 - RNA, 19 nt, Artificial Sequence
  Description of Artificial Sequence: Synthetic oligonucleotide
ccucggagcagcuugacgg

SEQ ID NO: 1809927 - RNA, 19 nt, Artificial Sequence
  Description of Artificial Sequence: Synthetic oligonucleotide
gauuuuggaagcacuuuca

SEQ ID NO: 1809928 - RNA, 19 nt, Artificial Sequence
  Description of Artificial Sequence: Synthetic oligonucleotide
ugacagucuucacuucccc

SEQ ID NO: 1809929 - RNA, 19 nt, Artificial Sequence
  Description of Artificial Sequence: Synthetic oligonucleotide
gcagguaaaacuccuugag

SEQ ID NO: 1809930 - RNA, 19 nt, Artificial Sequence
  Description of Artificial Sequence: Synthetic oligonucleotide
cuggugauauuuccauggg

SEQ ID NO: 1809931 - RNA, 19 nt, Artificial Sequence
  Description of Artificial Sequence: Synthetic oligonucleotide
guucccaaaagccuggcaa

SEQ ID NO: 1809932 - RNA, 19 nt, Artificial Sequence
  Description of Artificial Sequence: Synthetic oligonucleotide
agugaagauucgcucguga

SEQ ID NO: 1809933 - RNA, 19 nt, Artificial Sequence
  Description of Artificial Sequence: Synthetic oligonucleotide
ucaggaccggagcugaaaa

SEQ ID NO: 1809934 - RNA, 19 nt, Artificial Sequence
  Description of Artificial Sequence: Synthetic oligonucleotide
gaguuauccgggcuucagc

SEQ ID NO: 1809935 - RNA, 19 nt, Artificial Sequence
  Description of Artificial Sequence: Synthetic oligonucleotide
cuucacuuccccgaugggc

SEQ ID NO: 1809936 - RNA, 19 nt, Artificial Sequence
  Description of Artificial Sequence: Synthetic oligonucleotide
guuauccgggcuucagcgg

SEQ ID NO: 1809937 - RNA, 19 nt, Artificial Sequence
  Description of Artificial Sequence: Synthetic oligonucleotide
agucguucucauccagccg

SEQ ID NO: 1809938 - RNA, 19 nt, Artificial Sequence
  Description of Artificial Sequence: Synthetic oligonucleotide
ucggcucggucacaggaag

SEQ ID NO: 1809939 - RNA, 19 nt, Artificial Sequence
  Description of Artificial Sequence: Synthetic oligonucleotide
cauggcacacguagguacc

SEQ ID NO: 1809940 - RNA, 19 nt, Artificial Sequence
  Description of Artificial Sequence: Synthetic oligonucleotide
gauauuuccaugggagcuc

SEQ ID NO: 1809941 - RNA, 19 nt, Artificial Sequence
  Description of Artificial Sequence: Synthetic oligonucleotide
acaugagaaauuggcuccg

SEQ ID NO: 1809942 - RNA, 19 nt, Artificial Sequence
  Description of Artificial Sequence: Synthetic oligonucleotide
uucugugcgacaugagaaa

SEQ ID NO: 1809943 - RNA, 19 nt, Artificial Sequence
  Description of Artificial Sequence: Synthetic oligonucleotide
uucugcugagaccccucgg

SEQ ID NO: 1809944 - RNA, 19 nt, Artificial Sequence
  Description of Artificial Sequence: Synthetic oligonucleotide
cuggaguccacacccacug

SEQ ID NO: 1809945 - RNA, 19 nt, Artificial Sequence
  Description of Artificial Sequence: Synthetic oligonucleotide
cuggcaacucagauucugc

SEQ ID NO: 1809946 - RNA, 19 nt, Artificial Sequence
  Description of Artificial Sequence: Synthetic oligonucleotide
cagagcaagugaagauucg

SEQ ID NO: 1809947 - RNA, 19 nt, Artificial Sequence
  Description of Artificial Sequence: Synthetic oligonucleotide
cagugcuagcccuuguggc

SEQ ID NO: 1809948 - RNA, 19 nt, Artificial Sequence
  Description of Artificial Sequence: Synthetic oligonucleotide
uuccaugggagcucacggc

SEQ ID NO: 1809949 - RNA, 19 nt, Artificial Sequence
  Description of Artificial Sequence: Synthetic oligonucleotide
uggcaacucagauucugcu

SEQ ID NO: 1809950 - RNA, 19 nt, Artificial Sequence
  Description of Artificial Sequence: Synthetic oligonucleotide
cagcuugacggagaguugg

SEQ ID NO: 1809951 - RNA, 19 nt, Artificial Sequence
  Description of Artificial Sequence: Synthetic oligonucleotide
aguccagagcugccuaauc

SEQ ID NO: 1809952 - RNA, 19 nt, Artificial Sequence
  Description of Artificial Sequence: Synthetic oligonucleotide
cugugguuugugcucuugg

SEQ ID NO: 1809953 - RNA, 19 nt, Artificial Sequence
  Description of Artificial Sequence: Synthetic oligonucleotide
cauaucggagauuuuggaa

SEQ ID NO: 1809954 - RNA, 19 nt, Artificial Sequence
  Description of Artificial Sequence: Synthetic oligonucleotide
caagcuucggcucggucac

SEQ ID NO: 1809955 - RNA, 19 nt, Artificial Sequence
  Description of Artificial Sequence: Synthetic oligonucleotide
ugggccauaucggagauuu

SEQ ID NO: 1809956 - RNA, 19 nt, Artificial Sequence
  Description of Artificial Sequence: Synthetic oligonucleotide
uccagaguuauccgggcuu

SEQ ID NO: 1809957 - RNA, 19 nt, Artificial Sequence
  Description of Artificial Sequence: Synthetic oligonucleotide
ucguucucauccagccggg

SEQ ID NO: 1809958 - RNA, 19 nt, Artificial Sequence
  Description of Artificial Sequence: Synthetic oligonucleotide
gacaccaagucucuguggu

SEQ ID NO: 1809959 - RNA, 19 nt, Artificial Sequence
  Description of Artificial Sequence: Synthetic oligonucleotide
aguguguggccucccagcu

SEQ ID NO: 1809960 - RNA, 19 nt, Artificial Sequence
  Description of Artificial Sequence: Synthetic oligonucleotide
agggugagguucuugccca

SEQ ID NO: 1809961 - RNA, 19 nt, Artificial Sequence
  Description of Artificial Sequence: Synthetic oligonucleotide
aagaccacaguagccagua

SEQ ID NO: 1809962 - RNA, 19 nt, Artificial Sequence
  Description of Artificial Sequence: Synthetic oligonucleotide
cuggcgguuauaaauguaa

SEQ ID NO: 1809963 - RNA, 19 nt, Artificial Sequence
  Description of Artificial Sequence: Synthetic oligonucleotide
uggaguccacacccacugg

SEQ ID NO: 1809964 - RNA, 19 nt, Artificial Sequence
  Description of Artificial Sequence: Synthetic oligonucleotide
uggcgguuauaaauguaaa

SEQ ID NO: 1809965 - RNA, 19 nt, Artificial Sequence
  Description of Artificial Sequence: Synthetic oligonucleotide
cagcacguggaguuucagg

SEQ ID NO: 1809966 - RNA, 19 nt, Artificial Sequence
  Description of Artificial Sequence: Synthetic oligonucleotide
aacuggaccugcgcuucac

SEQ ID NO: 1809967 - RNA, 19 nt, Artificial Sequence
  Description of Artificial Sequence: Synthetic oligonucleotide
caguguguggccucccagc

SEQ ID NO: 1809968 - RNA, 19 nt, Artificial Sequence
  Description of Artificial Sequence: Synthetic oligonucleotide
gcaacucagauucugcuga

SEQ ID NO: 1809969 - RNA, 19 nt, Artificial Sequence
  Description of Artificial Sequence: Synthetic oligonucleotide
cucggucacaggaagguca

SEQ ID NO: 1809970 - RNA, 19 nt, Artificial Sequence
  Description of Artificial Sequence: Synthetic oligonucleotide
auucgggaacagugcuagc

SEQ ID NO: 1809971 - RNA, 19 nt, Artificial Sequence
  Description of Artificial Sequence: Synthetic oligonucleotide
aucuccgcagucaccaagg

SEQ ID NO: 1809972 - RNA, 19 nt, Artificial Sequence
  Description of Artificial Sequence: Synthetic oligonucleotide
auacagcacguggaguuuc

SEQ ID NO: 1809973 - RNA, 19 nt, Artificial Sequence
  Description of Artificial Sequence: Synthetic oligonucleotide
uuaacagcuccugcccagc

SEQ ID NO: 1809974 - RNA, 19 nt, Artificial Sequence
  Description of Artificial Sequence: Synthetic oligonucleotide
cacguggaguuucaggguc

SEQ ID NO: 1809975 - RNA, 19 nt, Artificial Sequence
  Description of Artificial Sequence: Synthetic oligonucleotide
guucugugcgacaugagaa

SEQ ID NO: 1809976 - RNA, 19 nt, Artificial Sequence
  Description of Artificial Sequence: Synthetic oligonucleotide
uacagcacguggaguuuca

SEQ ID NO: 1809977 - RNA, 19 nt, Artificial Sequence
  Description of Artificial Sequence: Synthetic oligonucleotide
ccugaucuuucucuggcgg

SEQ ID NO: 1809978 - RNA, 19 nt, Artificial Sequence
  Description of Artificial Sequence: Synthetic oligonucleotide
accucggagcagcuugacg

SEQ ID NO: 1809979 - RNA, 19 nt, Artificial Sequence
  Description of Artificial Sequence: Synthetic oligonucleotide
ucuggcgguuauaaaugua

SEQ ID NO: 1809980 - RNA, 19 nt, Artificial Sequence
  Description of Artificial Sequence: Synthetic oligonucleotide
aaauuggcuccguggucau

SEQ ID NO: 1809981 - RNA, 19 nt, Artificial Sequence
  Description of Artificial Sequence: Synthetic oligonucleotide
cucgugauccucagagcug

SEQ ID NO: 1809982 - RNA, 19 nt, Artificial Sequence
  Description of Artificial Sequence: Synthetic oligonucleotide
caucuccgcagucaccaag

SEQ ID NO: 1809983 - RNA, 19 nt, Artificial Sequence
  Description of Artificial Sequence: Synthetic oligonucleotide
ucugugcgacaugagaaau

SEQ ID NO: 1809984 - RNA, 19 nt, Artificial Sequence
  Description of Artificial Sequence: Synthetic oligonucleotide
uaccguucauggcccaugu

SEQ ID NO: 1809985 - RNA, 19 nt, Artificial Sequence
  Description of Artificial Sequence: Synthetic oligonucleotide
cuccgcagucaccaaggcg

SEQ ID NO: 1809986 - RNA, 19 nt, Artificial Sequence
  Description of Artificial Sequence: Synthetic oligonucleotide
auauuuccaugggagcuca

SEQ ID NO: 1809987 - RNA, 19 nt, Artificial Sequence
  Description of Artificial Sequence: Synthetic oligonucleotide
gacauucgggaacagugcu

SEQ ID NO: 1809988 - RNA, 19 nt, Artificial Sequence
  Description of Artificial Sequence: Synthetic oligonucleotide
ugaacuggaccugcgcuuc

SEQ ID NO: 1809989 - RNA, 19 nt, Artificial Sequence
  Description of Artificial Sequence: Synthetic oligonucleotide
uagcccuuguggccugagg

SEQ ID NO: 1809990 - RNA, 19 nt, Artificial Sequence
  Description of Artificial Sequence: Synthetic oligonucleotide
ggaguccacacccacuggc

SEQ ID NO: 1809991 - RNA, 19 nt, Artificial Sequence
  Description of Artificial Sequence: Synthetic oligonucleotide
ucuccgcagucaccaaggc

SEQ ID NO: 1809992 - RNA, 19 nt, Artificial Sequence
  Description of Artificial Sequence: Synthetic oligonucleotide
uggcccaugugacagucuu

SEQ ID NO: 1809993 - RNA, 19 nt, Artificial Sequence
  Description of Artificial Sequence: Synthetic oligonucleotide
caacucagauucugcugag

SEQ ID NO: 1809994 - RNA, 19 nt, Artificial Sequence
  Description of Artificial Sequence: Synthetic oligonucleotide
guagccaguauuaccacaa

SEQ ID NO: 1809995 - RNA, 19 nt, Artificial Sequence
  Description of Artificial Sequence: Synthetic oligonucleotide
uccguggucaucucugcuu

SEQ ID NO: 1809996 - RNA, 19 nt, Artificial Sequence
  Description of Artificial Sequence: Synthetic oligonucleotide
augaugggccauaucggag

SEQ ID NO: 1809997 - RNA, 19 nt, Artificial Sequence
  Description of Artificial Sequence: Synthetic oligonucleotide
gccauaucggagauuuugg

SEQ ID NO: 1809998 - RNA, 19 nt, Artificial Sequence
  Description of Artificial Sequence: Synthetic oligonucleotide
auucgcucgugauccucag

SEQ ID NO: 1809999 - RNA, 19 nt, Artificial Sequence
  Description of Artificial Sequence: Synthetic oligonucleotide
aagauucgcucgugauccu

SEQ ID NO: 1810000 - RNA, 19 nt, Artificial Sequence
  Description of Artificial Sequence: Synthetic oligonucleotide
accaagucucugugguuug

SEQ ID NO: 1810001 - RNA, 19 nt, Artificial Sequence
  Description of Artificial Sequence: Synthetic oligonucleotide
gaaacaggccuccgaggga

SEQ ID NO: 1810002 - RNA, 19 nt, Artificial Sequence
  Description of Artificial Sequence: Synthetic oligonucleotide
uucggcucggucacaggaa

SEQ ID NO: 1810003 - RNA, 19 nt, Artificial Sequence
  Description of Artificial Sequence: Synthetic oligonucleotide
gcauggcacacguagguac

SEQ ID NO: 1810004 - RNA, 19 nt, Artificial Sequence
  Description of Artificial Sequence: Synthetic oligonucleotide
agggccgcagagcaaguga

SEQ ID NO: 1810005 - RNA, 19 nt, Artificial Sequence
  Description of Artificial Sequence: Synthetic oligonucleotide
gggcccauacagcacgugg

SEQ ID NO: 1810006 - RNA, 19 nt, Artificial Sequence
  Description of Artificial Sequence: Synthetic oligonucleotide
aagcacuuucaggaacacu

SEQ ID NO: 1810007 - RNA, 19 nt, Artificial Sequence
  Description of Artificial Sequence: Synthetic oligonucleotide
uuucucuggcgguuauaaa

SEQ ID NO: 1810008 - RNA, 19 nt, Artificial Sequence
  Description of Artificial Sequence: Synthetic oligonucleotide
ugacggagaguuggcuccg

SEQ ID NO: 1810009 - RNA, 19 nt, Artificial Sequence
  Description of Artificial Sequence: Synthetic oligonucleotide
gcuccaucuguuuuccggc

SEQ ID NO: 1810010 - RNA, 19 nt, Artificial Sequence
  Description of Artificial Sequence: Synthetic oligonucleotide
cgacaugagaaauuggcuc

SEQ ID NO: 1810011 - RNA, 19 nt, Artificial Sequence
  Description of Artificial Sequence: Synthetic oligonucleotide
caggaaggucaaaagucca

SEQ ID NO: 1810012 - RNA, 19 nt, Artificial Sequence
  Description of Artificial Sequence: Synthetic oligonucleotide
gauucgcucgugauccuca

SEQ ID NO: 1810013 - RNA, 19 nt, Artificial Sequence
  Description of Artificial Sequence: Synthetic oligonucleotide
accacaguagccaguauua

SEQ ID NO: 1810014 - RNA, 19 nt, Artificial Sequence
  Description of Artificial Sequence: Synthetic oligonucleotide
cuuucucuggcgguuauaa

SEQ ID NO: 1810015 - RNA, 19 nt, Artificial Sequence
  Description of Artificial Sequence: Synthetic oligonucleotide
uguggccugagguccaguu

SEQ ID NO: 1810016 - RNA, 19 nt, Artificial Sequence
  Description of Artificial Sequence: Synthetic oligonucleotide
agucaccuggcucccuucu

SEQ ID NO: 1810017 - RNA, 19 nt, Artificial Sequence
  Description of Artificial Sequence: Synthetic oligonucleotide
caccaggcagcgcagggug

SEQ ID NO: 1810018 - RNA, 19 nt, Artificial Sequence
  Description of Artificial Sequence: Synthetic oligonucleotide
cacacguagguaccguuca

SEQ ID NO: 1810019 - RNA, 19 nt, Artificial Sequence
  Description of Artificial Sequence: Synthetic oligonucleotide
uauccgggcuucagcggca

SEQ ID NO: 1810020 - RNA, 19 nt, Artificial Sequence
  Description of Artificial Sequence: Synthetic oligonucleotide
cugcgcuucacacuucaca

SEQ ID NO: 1810021 - RNA, 19 nt, Artificial Sequence
  Description of Artificial Sequence: Synthetic oligonucleotide
accugcgcuucacacuuca

SEQ ID NO: 1810022 - RNA, 19 nt, Artificial Sequence
  Description of Artificial Sequence: Synthetic oligonucleotide
ugcagcaccuccccaccuc

SEQ ID NO: 1810023 - RNA, 19 nt, Artificial Sequence
  Description of Artificial Sequence: Synthetic oligonucleotide
ccggcugcagguuagcuug

SEQ ID NO: 1810024 - RNA, 19 nt, Artificial Sequence
  Description of Artificial Sequence: Synthetic oligonucleotide
augggagcucacggcaugg

SEQ ID NO: 1810025 - RNA, 19 nt, Artificial Sequence
  Description of Artificial Sequence: Synthetic oligonucleotide
cacguagguaccguucaug

SEQ ID NO: 1810026 - RNA, 19 nt, Artificial Sequence
  Description of Artificial Sequence: Synthetic oligonucleotide
aaguccagagcugccuaau

SEQ ID NO: 1810027 - RNA, 19 nt, Artificial Sequence
  Description of Artificial Sequence: Synthetic oligonucleotide
uucgcucgugauccucaga

SEQ ID NO: 1810028 - RNA, 19 nt, Artificial Sequence
  Description of Artificial Sequence: Synthetic oligonucleotide
ugcuugccagcaccgugac

SEQ ID NO: 1810029 - RNA, 19 nt, Artificial Sequence
  Description of Artificial Sequence: Synthetic oligonucleotide
ggguggguucccaaaagcc

SEQ ID NO: 1810030 - RNA, 19 nt, Artificial Sequence
  Description of Artificial Sequence: Synthetic oligonucleotide
cugcuugccagcaccguga

SEQ ID NO: 1810031 - RNA, 19 nt, Artificial Sequence
  Description of Artificial Sequence: Synthetic oligonucleotide
cagauucugcugagacccc

SEQ ID NO: 1810032 - RNA, 19 nt, Artificial Sequence
  Description of Artificial Sequence: Synthetic oligonucleotide
uucccuccaucuccgcagu

SEQ ID NO: 1810033 - RNA, 19 nt, Artificial Sequence
  Description of Artificial Sequence: Synthetic oligonucleotide
ugaugaugaugggccauau

SEQ ID NO: 1810034 - RNA, 19 nt, Artificial Sequence
  Description of Artificial Sequence: Synthetic oligonucleotide
ggaagcacuuucaggaaca

SEQ ID NO: 1810035 - RNA, 19 nt, Artificial Sequence
  Description of Artificial Sequence: Synthetic oligonucleotide
gaccacaguagccaguauu

SEQ ID NO: 1810036 - RNA, 19 nt, Artificial Sequence
  Description of Artificial Sequence: Synthetic oligonucleotide
uccggcugcagguuagcuu

SEQ ID NO: 1810037 - RNA, 19 nt, Artificial Sequence
  Description of Artificial Sequence: Synthetic oligonucleotide
acuggaccugcgcuucaca

SEQ ID NO: 1810038 - RNA, 19 nt, Artificial Sequence
  Description of Artificial Sequence: Synthetic oligonucleotide
ggaaggucaaaaguccaga

SEQ ID NO: 1810039 - RNA, 19 nt, Artificial Sequence
  Description of Artificial Sequence: Synthetic oligonucleotide
guugccaggugggcagacg

SEQ ID NO: 1810040 - RNA, 19 nt, Artificial Sequence
  Description of Artificial Sequence: Synthetic oligonucleotide
acggcauggcacacguagg

SEQ ID NO: 1810041 - RNA, 19 nt, Artificial Sequence
  Description of Artificial Sequence: Synthetic oligonucleotide
gcagagcaagugaagauuc

SEQ ID NO: 1810042 - RNA, 19 nt, Artificial Sequence
  Description of Artificial Sequence: Synthetic oligonucleotide
caaggcgguggcugacacc

SEQ ID NO: 1810043 - RNA, 19 nt, Artificial Sequence
  Description of Artificial Sequence: Synthetic oligonucleotide
caguucugugcgacaugag

SEQ ID NO: 1810044 - RNA, 19 nt, Artificial Sequence
  Description of Artificial Sequence: Synthetic oligonucleotide
caccuggcucccuucugag

SEQ ID NO: 1810045 - RNA, 19 nt, Artificial Sequence
  Description of Artificial Sequence: Synthetic oligonucleotide
gugcgacaugagaaauugg

SEQ ID NO: 1810046 - RNA, 19 nt, Artificial Sequence
  Description of Artificial Sequence: Synthetic oligonucleotide
cauggcccaugugacaguc

SEQ ID NO: 1810047 - RNA, 19 nt, Artificial Sequence
  Description of Artificial Sequence: Synthetic oligonucleotide
aucggagauuuuggaagca

SEQ ID NO: 1810048 - RNA, 19 nt, Artificial Sequence
  Description of Artificial Sequence: Synthetic oligonucleotide
gugucaagcuucggcucgg

SEQ ID NO: 1810049 - RNA, 19 nt, Artificial Sequence
  Description of Artificial Sequence: Synthetic oligonucleotide
acggagaguuggcuccgug

SEQ ID NO: 1810050 - RNA, 19 nt, Artificial Sequence
  Description of Artificial Sequence: Synthetic oligonucleotide
cuccgagggagcacaucac

SEQ ID NO: 1810051 - RNA, 19 nt, Artificial Sequence
  Description of Artificial Sequence: Synthetic oligonucleotide
agcgugaacuggaccugcg

SEQ ID NO: 1810052 - RNA, 19 nt, Artificial Sequence
  Description of Artificial Sequence: Synthetic oligonucleotide
guaccguucauggcccaug

SEQ ID NO: 1810053 - RNA, 19 nt, Artificial Sequence
  Description of Artificial Sequence: Synthetic oligonucleotide
cuucagcggcaggaaacag

SEQ ID NO: 1810054 - RNA, 19 nt, Artificial Sequence
  Description of Artificial Sequence: Synthetic oligonucleotide
caagugaagauucgcucgu

SEQ ID NO: 1810055 - RNA, 19 nt, Artificial Sequence
  Description of Artificial Sequence: Synthetic oligonucleotide
gguuugugcucuuggaggu

SEQ ID NO: 1810056 - RNA, 19 nt, Artificial Sequence
  Description of Artificial Sequence: Synthetic oligonucleotide
ggagcucacggcauggcac

SEQ ID NO: 1810057 - RNA, 19 nt, Artificial Sequence
  Description of Artificial Sequence: Synthetic oligonucleotide
augaugaugaugggccaua

SEQ ID NO: 1810058 - RNA, 19 nt, Artificial Sequence
  Description of Artificial Sequence: Synthetic oligonucleotide
ccguucauggcccauguga

SEQ ID NO: 1810059 - RNA, 19 nt, Artificial Sequence
  Description of Artificial Sequence: Synthetic oligonucleotide
uuaccacaaugaugaugau

SEQ ID NO: 1810060 - RNA, 19 nt, Artificial Sequence
  Description of Artificial Sequence: Synthetic oligonucleotide
agaccccucgggccagguc

SEQ ID NO: 1810061 - RNA, 19 nt, Artificial Sequence
  Description of Artificial Sequence: Synthetic oligonucleotide
cguucauggcccaugugac

SEQ ID NO: 1810062 - RNA, 19 nt, Artificial Sequence
  Description of Artificial Sequence: Synthetic oligonucleotide
ggcagucguucucauccag

SEQ ID NO: 1810063 - RNA, 19 nt, Artificial Sequence
  Description of Artificial Sequence: Synthetic oligonucleotide
gugaagauucgcucgugau

SEQ ID NO: 1810064 - RNA, 19 nt, Artificial Sequence
  Description of Artificial Sequence: Synthetic oligonucleotide
acacguagguaccguucau

SEQ ID NO: 1810065 - RNA, 19 nt, Artificial Sequence
  Description of Artificial Sequence: Synthetic oligonucleotide
gcucgugauccucagagcu

SEQ ID NO: 1810066 - RNA, 19 nt, Artificial Sequence
  Description of Artificial Sequence: Synthetic oligonucleotide
uguuuuccggcugcagguu

SEQ ID NO: 1810067 - RNA, 19 nt, Artificial Sequence
  Description of Artificial Sequence: Synthetic oligonucleotide
accguucauggcccaugug

SEQ ID NO: 1810068 - RNA, 19 nt, Artificial Sequence
  Description of Artificial Sequence: Synthetic oligonucleotide
ggaacagugcuagcccuug

SEQ ID NO: 1810069 - RNA, 19 nt, Artificial Sequence
  Description of Artificial Sequence: Synthetic oligonucleotide
ggcgguggcugacaccaag

SEQ ID NO: 1810070 - RNA, 19 nt, Artificial Sequence
  Description of Artificial Sequence: Synthetic oligonucleotide
ugggagcucacggcauggc

SEQ ID NO: 1810071 - RNA, 19 nt, Artificial Sequence
  Description of Artificial Sequence: Synthetic oligonucleotide
ucagggccgcagagcaagu

SEQ ID NO: 1810072 - RNA, 19 nt, Artificial Sequence
  Description of Artificial Sequence: Synthetic oligonucleotide
ugugcucuuggaggucagu

SEQ ID NO: 1810073 - RNA, 19 nt, Artificial Sequence
  Description of Artificial Sequence: Synthetic oligonucleotide
cucggagcagcuugacgga

SEQ ID NO: 1810074 - RNA, 19 nt, Artificial Sequence
  Description of Artificial Sequence: Synthetic oligonucleotide
uccgggcuucagcggcagg

SEQ ID NO: 1810075 - RNA, 19 nt, Artificial Sequence
  Description of Artificial Sequence: Synthetic oligonucleotide
cagcgugaacuggaccugc

SEQ ID NO: 1810076 - RNA, 19 nt, Artificial Sequence
  Description of Artificial Sequence: Synthetic oligonucleotide
guuuuccggcugcagguua

SEQ ID NO: 1810077 - RNA, 19 nt, Artificial Sequence
  Description of Artificial Sequence: Synthetic oligonucleotide
agcugccuaaucacagaga

SEQ ID NO: 1810078 - RNA, 19 nt, Artificial Sequence
  Description of Artificial Sequence: Synthetic oligonucleotide
ugcuagcccuuguggccug

SEQ ID NO: 1810079 - RNA, 19 nt, Artificial Sequence
  Description of Artificial Sequence: Synthetic oligonucleotide
cacccacuggcuccuggug

SEQ ID NO: 1810080 - RNA, 19 nt, Artificial Sequence
  Description of Artificial Sequence: Synthetic oligonucleotide
gaguuggcuccgugguguc

SEQ ID NO: 1810081 - RNA, 19 nt, Artificial Sequence
  Description of Artificial Sequence: Synthetic oligonucleotide
gaugggccauaucggagau

SEQ ID NO: 1810082 - RNA, 19 nt, Artificial Sequence
  Description of Artificial Sequence: Synthetic oligonucleotide
ggcgguuauaaauguaaau

SEQ ID NO: 1810083 - RNA, 19 nt, Artificial Sequence
  Description of Artificial Sequence: Synthetic oligonucleotide
ccggggcccauacagcacg

SEQ ID NO: 1810084 - RNA, 19 nt, Artificial Sequence
  Description of Artificial Sequence: Synthetic oligonucleotide
gcagucguucucauccagc

SEQ ID NO: 1810085 - RNA, 19 nt, Artificial Sequence
  Description of Artificial Sequence: Synthetic oligonucleotide
gcauucagcgugaacugga

SEQ ID NO: 1810086 - RNA, 19 nt, Artificial Sequence
  Description of Artificial Sequence: Synthetic oligonucleotide
ccuccgagggagcacauca

SEQ ID NO: 1810087 - RNA, 19 nt, Artificial Sequence
  Description of Artificial Sequence: Synthetic oligonucleotide
cuuguggccugagguccag

SEQ ID NO: 1810088 - RNA, 19 nt, Artificial Sequence
  Description of Artificial Sequence: Synthetic oligonucleotide
cugaucuuucucuggcggu

SEQ ID NO: 1810089 - RNA, 19 nt, Artificial Sequence
  Description of Artificial Sequence: Synthetic oligonucleotide
cucuggcgguuauaaaugu

SEQ ID NO: 1810090 - RNA, 19 nt, Artificial Sequence
  Description of Artificial Sequence: Synthetic oligonucleotide
gguggcugacaccaagucu

SEQ ID NO: 1810091 - RNA, 19 nt, Artificial Sequence
  Description of Artificial Sequence: Synthetic oligonucleotide
acauucgggaacagugcua

SEQ ID NO: 1810092 - RNA, 19 nt, Artificial Sequence
  Description of Artificial Sequence: Synthetic oligonucleotide
aggccuccgagggagcaca

SEQ ID NO: 1810093 - RNA, 19 nt, Artificial Sequence
  Description of Artificial Sequence: Synthetic oligonucleotide
ggugucccaccauccacca

SEQ ID NO: 1810094 - RNA, 19 nt, Artificial Sequence
  Description of Artificial Sequence: Synthetic oligonucleotide
gcgugaacuggaccugcgc

SEQ ID NO: 1810095 - RNA, 19 nt, Artificial Sequence
  Description of Artificial Sequence: Synthetic oligonucleotide
gugucccaccauccaccag

SEQ ID NO: 1810096 - RNA, 19 nt, Artificial Sequence
  Description of Artificial Sequence: Synthetic oligonucleotide
agaccacaguagccaguau

SEQ ID NO: 1810097 - RNA, 19 nt, Artificial Sequence
  Description of Artificial Sequence: Synthetic oligonucleotide
gguggguucccaaaagccu

SEQ ID NO: 1810098 - RNA, 19 nt, Artificial Sequence
  Description of Artificial Sequence: Synthetic oligonucleotide
gcuccguggucaucucugc

SEQ ID NO: 1810099 - RNA, 19 nt, Artificial Sequence
  Description of Artificial Sequence: Synthetic oligonucleotide
cuccacgcuucucagggcu

SEQ ID NO: 1810100 - RNA, 19 nt, Artificial Sequence
  Description of Artificial Sequence: Synthetic oligonucleotide
gccgcagagcaagugaaga

SEQ ID NO: 1810101 - RNA, 19 nt, Artificial Sequence
  Description of Artificial Sequence: Synthetic oligonucleotide
ccaguucugugcgacauga

SEQ ID NO: 1810102 - RNA, 19 nt, Artificial Sequence
  Description of Artificial Sequence: Synthetic oligonucleotide
caggugggcagacggucca

SEQ ID NO: 1810103 - RNA, 19 nt, Artificial Sequence
  Description of Artificial Sequence: Synthetic oligonucleotide
uuggcuccguggucaucuc

SEQ ID NO: 1810104 - RNA, 19 nt, Artificial Sequence
  Description of Artificial Sequence: Synthetic oligonucleotide
gaacagugcuagcccuugu

SEQ ID NO: 1810105 - RNA, 19 nt, Artificial Sequence
  Description of Artificial Sequence: Synthetic oligonucleotide
ggcccauacagcacgugga

SEQ ID NO: 1810106 - RNA, 19 nt, Artificial Sequence
  Description of Artificial Sequence: Synthetic oligonucleotide
gcuccaagacacagcgcag

SEQ ID NO: 1810107 - RNA, 19 nt, Artificial Sequence
  Description of Artificial Sequence: Synthetic oligonucleotide
gucaggaccggagcugaaa

SEQ ID NO: 1810108 - RNA, 19 nt, Artificial Sequence
  Description of Artificial Sequence: Synthetic oligonucleotide
ccaugugacagucuucacu

SEQ ID NO: 1810109 - RNA, 19 nt, Artificial Sequence
  Description of Artificial Sequence: Synthetic oligonucleotide
ucccuccaucuccgcaguc

SEQ ID NO: 1810110 - RNA, 19 nt, Artificial Sequence
  Description of Artificial Sequence: Synthetic oligonucleotide
cucgggccagguccaguuc

SEQ ID NO: 1810111 - RNA, 19 nt, Artificial Sequence
  Description of Artificial Sequence: Synthetic oligonucleotide
ccagcaccgugacugugac

SEQ ID NO: 1810112 - RNA, 19 nt, Artificial Sequence
  Description of Artificial Sequence: Synthetic oligonucleotide
ggaccugcgcuucacacuu

SEQ ID NO: 1810113 - RNA, 19 nt, Artificial Sequence
  Description of Artificial Sequence: Synthetic oligonucleotide
cuggggugucaagcuucgg

SEQ ID NO: 1810114 - RNA, 19 nt, Artificial Sequence
  Description of Artificial Sequence: Synthetic oligonucleotide
gcacacguagguaccguuc

SEQ ID NO: 1810115 - RNA, 19 nt, Artificial Sequence
  Description of Artificial Sequence: Synthetic oligonucleotide
ggagauuuuggaagcacuu

SEQ ID NO: 1810116 - RNA, 19 nt, Artificial Sequence
  Description of Artificial Sequence: Synthetic oligonucleotide
ggugggcagacgguccagc

SEQ ID NO: 1810117 - RNA, 19 nt, Artificial Sequence
  Description of Artificial Sequence: Synthetic oligonucleotide
ucacggcauggcacacgua

SEQ ID NO: 1810118 - RNA, 19 nt, Artificial Sequence
  Description of Artificial Sequence: Synthetic oligonucleotide
ccaaggcgguggcugacac

SEQ ID NO: 1810119 - RNA, 19 nt, Artificial Sequence
  Description of Artificial Sequence: Synthetic oligonucleotide
guuccccgggcagucguuc

SEQ ID NO: 1810120 - RNA, 19 nt, Artificial Sequence
  Description of Artificial Sequence: Synthetic oligonucleotide
gaccuccuugggguuccug

SEQ ID NO: 1810121 - RNA, 19 nt, Artificial Sequence
  Description of Artificial Sequence: Synthetic oligonucleotide
caccaagucucugugguuu

SEQ ID NO: 1810122 - RNA, 19 nt, Artificial Sequence
  Description of Artificial Sequence: Synthetic oligonucleotide
gcccucuguagcuuguaua

SEQ ID NO: 1810123 - RNA, 19 nt, Artificial Sequence
  Description of Artificial Sequence: Synthetic oligonucleotide
aagcuucggcucggucaca

SEQ ID NO: 1810124 - RNA, 19 nt, Artificial Sequence
  Description of Artificial Sequence: Synthetic oligonucleotide
cuccagaguuauccgggcu

SEQ ID NO: 1810125 - RNA, 19 nt, Artificial Sequence
  Description of Artificial Sequence: Synthetic oligonucleotide
ggccgcagagcaagugaag

SEQ ID NO: 1810126 - RNA, 19 nt, Artificial Sequence
  Description of Artificial Sequence: Synthetic oligonucleotide
cugugcgacaugagaaauu

SEQ ID NO: 1810127 - RNA, 19 nt, Artificial Sequence
  Description of Artificial Sequence: Synthetic oligonucleotide
cuggcuccuggugcagcac

SEQ ID NO: 1810128 - RNA, 19 nt, Artificial Sequence
  Description of Artificial Sequence: Synthetic oligonucleotide
guccaguucugugcgacau

SEQ ID NO: 1810129 - RNA, 19 nt, Artificial Sequence
  Description of Artificial Sequence: Synthetic oligonucleotide
gugcuagcccuuguggccu

SEQ ID NO: 1810130 - RNA, 19 nt, Artificial Sequence
  Description of Artificial Sequence: Synthetic oligonucleotide
caccaaggcgguggcugac

SEQ ID NO: 1810131 - RNA, 19 nt, Artificial Sequence
  Description of Artificial Sequence: Synthetic oligonucleotide
auggcccaugugacagucu

SEQ ID NO: 1810132 - RNA, 19 nt, Artificial Sequence
  Description of Artificial Sequence: Synthetic oligonucleotide
gggucaggaccggagcuga

SEQ ID NO: 1810133 - RNA, 19 nt, Artificial Sequence
  Description of Artificial Sequence: Synthetic oligonucleotide
cccaugugacagucuucac

SEQ ID NO: 1810134 - RNA, 19 nt, Artificial Sequence
  Description of Artificial Sequence: Synthetic oligonucleotide
cgcucgugauccucagagc

SEQ ID NO: 1810135 - RNA, 19 nt, Artificial Sequence
  Description of Artificial Sequence: Synthetic oligonucleotide
acgcuucucagggcuggau

SEQ ID NO: 1810136 - RNA, 19 nt, Artificial Sequence
  Description of Artificial Sequence: Synthetic oligonucleotide
agguugccaggugggcaga

SEQ ID NO: 1810137 - RNA, 19 nt, Artificial Sequence
  Description of Artificial Sequence: Synthetic oligonucleotide
ggcucggucacaggaaggu

SEQ ID NO: 1810138 - RNA, 19 nt, Artificial Sequence
  Description of Artificial Sequence: Synthetic oligonucleotide
ccucuguagcuuguauauc

SEQ ID NO: 1810139 - RNA, 19 nt, Artificial Sequence
  Description of Artificial Sequence: Synthetic oligonucleotide
caugagaaauuggcuccgu

SEQ ID NO: 1810140 - RNA, 19 nt, Artificial Sequence
  Description of Artificial Sequence: Synthetic oligonucleotide
gcacguggaguuucagggu

SEQ ID NO: 1810141 - RNA, 19 nt, Artificial Sequence
  Description of Artificial Sequence: Synthetic oligonucleotide
ccugcgcuucacacuucac

SEQ ID NO: 1810142 - RNA, 19 nt, Artificial Sequence
  Description of Artificial Sequence: Synthetic oligonucleotide
cggcucggucacaggaagg

SEQ ID NO: 1810143 - RNA, 19 nt, Artificial Sequence
  Description of Artificial Sequence: Synthetic oligonucleotide
cuccguggucaucucugcu

SEQ ID NO: 1810144 - RNA, 19 nt, Artificial Sequence
  Description of Artificial Sequence: Synthetic oligonucleotide
augggccauaucggagauu

SEQ ID NO: 1810145 - RNA, 19 nt, Artificial Sequence
  Description of Artificial Sequence: Synthetic oligonucleotide
caguuccccgggcagucgu

SEQ ID NO: 1810146 - RNA, 19 nt, Artificial Sequence
  Description of Artificial Sequence: Synthetic oligonucleotide
ggccugagguccaguucug

SEQ ID NO: 1810147 - RNA, 19 nt, Artificial Sequence
  Description of Artificial Sequence: Synthetic oligonucleotide
gccacccucagggccgcag

SEQ ID NO: 1810148 - RNA, 19 nt, Artificial Sequence
  Description of Artificial Sequence: Synthetic oligonucleotide
ccuuguggccugaggucca

SEQ ID NO: 1810149 - RNA, 19 nt, Artificial Sequence
  Description of Artificial Sequence: Synthetic oligonucleotide
cuuccccgaugggcagcag

SEQ ID NO: 1810150 - RNA, 19 nt, Artificial Sequence
  Description of Artificial Sequence: Synthetic oligonucleotide
aguuccccgggcagucguu

SEQ ID NO: 1810151 - RNA, 19 nt, Artificial Sequence
  Description of Artificial Sequence: Synthetic oligonucleotide
gcgcuucacacuucacagu

SEQ ID NO: 1810152 - RNA, 19 nt, Artificial Sequence
  Description of Artificial Sequence: Synthetic oligonucleotide
ggcacacguagguaccguu

SEQ ID NO: 1810153 - RNA, 19 nt, Artificial Sequence
  Description of Artificial Sequence: Synthetic oligonucleotide
cguucucauccagccgggg

SEQ ID NO: 1810154 - RNA, 19 nt, Artificial Sequence
  Description of Artificial Sequence: Synthetic oligonucleotide
ggucuggggugucaagcuu

SEQ ID NO: 1810155 - RNA, 19 nt, Artificial Sequence
  Description of Artificial Sequence: Synthetic oligonucleotide
ccgggcuucagcggcagga

SEQ ID NO: 1810156 - RNA, 19 nt, Artificial Sequence
  Description of Artificial Sequence: Synthetic oligonucleotide
cacgcuucucagggcugga

SEQ ID NO: 1810157 - RNA, 19 nt, Artificial Sequence
  Description of Artificial Sequence: Synthetic oligonucleotide
ccuggaguccacacccacu

SEQ ID NO: 1810158 - RNA, 19 nt, Artificial Sequence
  Description of Artificial Sequence: Synthetic oligonucleotide
ccgcagagcaagugaagau

SEQ ID NO: 1810159 - RNA, 19 nt, Artificial Sequence
  Description of Artificial Sequence: Synthetic oligonucleotide
cauccagccggggcccaua

SEQ ID NO: 1810160 - RNA, 19 nt, Artificial Sequence
  Description of Artificial Sequence: Synthetic oligonucleotide
ccgagggagcacaucacuu

SEQ ID NO: 1810161 - RNA, 19 nt, Artificial Sequence
  Description of Artificial Sequence: Synthetic oligonucleotide
gagaccccucgggccaggu

SEQ ID NO: 1810162 - RNA, 19 nt, Artificial Sequence
  Description of Artificial Sequence: Synthetic oligonucleotide
gcucagggucaggaccgga

SEQ ID NO: 1810163 - RNA, 19 nt, Artificial Sequence
  Description of Artificial Sequence: Synthetic oligonucleotide
gcgguggcugacaccaagu

SEQ ID NO: 1810164 - RNA, 19 nt, Artificial Sequence
  Description of Artificial Sequence: Synthetic oligonucleotide
gguaccguucauggcccau

SEQ ID NO: 1810165 - RNA, 19 nt, Artificial Sequence
  Description of Artificial Sequence: Synthetic oligonucleotide
gggaacagugcuagcccuu

SEQ ID NO: 1810166 - RNA, 19 nt, Artificial Sequence
  Description of Artificial Sequence: Synthetic oligonucleotide
cgggaacagugcuagcccu

SEQ ID NO: 1810167 - RNA, 19 nt, Artificial Sequence
  Description of Artificial Sequence: Synthetic oligonucleotide
cggcauggcacacguaggu

SEQ ID NO: 1810168 - RNA, 19 nt, Artificial Sequence
  Description of Artificial Sequence: Synthetic oligonucleotide
ccaucuccgcagucaccaa

SEQ ID NO: 1810169 - RNA, 19 nt, Artificial Sequence
  Description of Artificial Sequence: Synthetic oligonucleotide
cgcagagcaagugaagauu

SEQ ID NO: 1810170 - RNA, 19 nt, Artificial Sequence
  Description of Artificial Sequence: Synthetic oligonucleotide
gcuagcccuuguggccuga

SEQ ID NO: 1810171 - RNA, 19 nt, Artificial Sequence
  Description of Artificial Sequence: Synthetic oligonucleotide
ccccgggcagucguucuca

SEQ ID NO: 1810172 - RNA, 19 nt, Artificial Sequence
  Description of Artificial Sequence: Synthetic oligonucleotide
ccaagucucugugguuugu

SEQ ID NO: 1810173 - RNA, 19 nt, Artificial Sequence
  Description of Artificial Sequence: Synthetic oligonucleotide
gcgcagcugcugaguuccc

SEQ ID NO: 1810174 - RNA, 19 nt, Artificial Sequence
  Description of Artificial Sequence: Synthetic oligonucleotide
cgcagucaccaaggcggug

SEQ ID NO: 1810175 - RNA, 19 nt, Artificial Sequence
  Description of Artificial Sequence: Synthetic oligonucleotide
ccgcagucaccaaggcggu

SEQ ID NO: 1810176 - RNA, 19 nt, Artificial Sequence
  Description of Artificial Sequence: Synthetic oligonucleotide
gggcccucuguagcuugua

SEQ ID NO: 1810177 - RNA, 19 nt, Artificial Sequence
  Description of Artificial Sequence: Synthetic oligonucleotide
gccuaaucacagagacauu

SEQ ID NO: 1810178 - RNA, 19 nt, Artificial Sequence
  Description of Artificial Sequence: Synthetic oligonucleotide
gggccauaucggagauuuu

SEQ ID NO: 1810179 - RNA, 19 nt, Artificial Sequence
  Description of Artificial Sequence: Synthetic oligonucleotide
cccgggcagucguucucau

SEQ ID NO: 1810180 - RNA, 19 nt, Artificial Sequence
  Description of Artificial Sequence: Synthetic oligonucleotide
ggccuccgagggagcacau

SEQ ID NO: 1810181 - RNA, 19 nt, Artificial Sequence
  Description of Artificial Sequence: Synthetic oligonucleotide
uaaagguaugacaagaacc

SEQ ID NO: 1810182 - RNA, 19 nt, Artificial Sequence
  Description of Artificial Sequence: Synthetic oligonucleotide
aggaaugugguucuuaugg

SEQ ID NO: 1810183 - RNA, 19 nt, Artificial Sequence
  Description of Artificial Sequence: Synthetic oligonucleotide
guaauuaucauuuggcacc

SEQ ID NO: 1810184 - RNA, 19 nt, Artificial Sequence
  Description of Artificial Sequence: Synthetic oligonucleotide
auauagacagcauagucag

SEQ ID NO: 1810185 - RNA, 19 nt, Artificial Sequence
  Description of Artificial Sequence: Synthetic oligonucleotide
uuuauucuagagaugcugc

SEQ ID NO: 1810186 - RNA, 19 nt, Artificial Sequence
  Description of Artificial Sequence: Synthetic oligonucleotide
gagucgaaggucuucaacg

SEQ ID NO: 1810187 - RNA, 19 nt, Artificial Sequence
  Description of Artificial Sequence: Synthetic oligonucleotide
cauaccuccaccaaggaug

SEQ ID NO: 1810188 - RNA, 19 nt, Artificial Sequence
  Description of Artificial Sequence: Synthetic oligonucleotide
gaagucguaacccugcacc

SEQ ID NO: 1810189 - RNA, 19 nt, Artificial Sequence
  Description of Artificial Sequence: Synthetic oligonucleotide
ugucuuagccaccagcagg

SEQ ID NO: 1810190 - RNA, 19 nt, Artificial Sequence
  Description of Artificial Sequence: Synthetic oligonucleotide
uucaacgauguccagaacu

SEQ ID NO: 1810191 - RNA, 19 nt, Artificial Sequence
  Description of Artificial Sequence: Synthetic oligonucleotide
ugugcauccauccggaucu

SEQ ID NO: 1810192 - RNA, 19 nt, Artificial Sequence
  Description of Artificial Sequence: Synthetic oligonucleotide
uguaaagguaauaaauaaa

SEQ ID NO: 1810193 - RNA, 19 nt, Artificial Sequence
  Description of Artificial Sequence: Synthetic oligonucleotide
gaacugaugagguuggaug

SEQ ID NO: 1810194 - RNA, 19 nt, Artificial Sequence
  Description of Artificial Sequence: Synthetic oligonucleotide
aaaguugguagccuggaau

SEQ ID NO: 1810195 - RNA, 19 nt, Artificial Sequence
  Description of Artificial Sequence: Synthetic oligonucleotide
uuagcguuggcaauguggu

SEQ ID NO: 1810196 - RNA, 19 nt, Artificial Sequence
  Description of Artificial Sequence: Synthetic oligonucleotide
uaugggcccaauaauacac

SEQ ID NO: 1810197 - RNA, 19 nt, Artificial Sequence
  Description of Artificial Sequence: Synthetic oligonucleotide
guagcgaauggucucacgg

SEQ ID NO: 1810198 - RNA, 19 nt, Artificial Sequence
  Description of Artificial Sequence: Synthetic oligonucleotide
gaugcugcugaccaagaag

SEQ ID NO: 1810199 - RNA, 19 nt, Artificial Sequence
  Description of Artificial Sequence: Synthetic oligonucleotide
aaacuugcaguaauuauca

SEQ ID NO: 1810200 - RNA, 19 nt, Artificial Sequence
  Description of Artificial Sequence: Synthetic oligonucleotide
agaccagagaagcaucagc

SEQ ID NO: 1810201 - RNA, 19 nt, Artificial Sequence
  Description of Artificial Sequence: Synthetic oligonucleotide
aacugaugagguuggaugu

SEQ ID NO: 1810202 - RNA, 19 nt, Artificial Sequence
  Description of Artificial Sequence: Synthetic oligonucleotide
auaugugggugccaggcac

SEQ ID NO: 1810203 - RNA, 19 nt, Artificial Sequence
  Description of Artificial Sequence: Synthetic oligonucleotide
agauaugugggugccaggc

SEQ ID NO: 1810204 - RNA, 19 nt, Artificial Sequence
  Description of Artificial Sequence: Synthetic oligonucleotide
aaguguaaagguaauaaau

SEQ ID NO: 1810205 - RNA, 19 nt, Artificial Sequence
  Description of Artificial Sequence: Synthetic oligonucleotide
aaggcgucugccuuuuggg

SEQ ID NO: 1810206 - RNA, 19 nt, Artificial Sequence
  Description of Artificial Sequence: Synthetic oligonucleotide
agcguuggcaauguggugc

SEQ ID NO: 1810207 - RNA, 19 nt, Artificial Sequence
  Description of Artificial Sequence: Synthetic oligonucleotide
aaggaugaucaucccagag

SEQ ID NO: 1810208 - RNA, 19 nt, Artificial Sequence
  Description of Artificial Sequence: Synthetic oligonucleotide
uguugauauagacagcaua

SEQ ID NO: 1810209 - RNA, 19 nt, Artificial Sequence
  Description of Artificial Sequence: Synthetic oligonucleotide
gaaugugguucuuaugggc

SEQ ID NO: 1810210 - RNA, 19 nt, Artificial Sequence
  Description of Artificial Sequence: Synthetic oligonucleotide
auuuauucuagagaugcug

SEQ ID NO: 1810211 - RNA, 19 nt, Artificial Sequence
  Description of Artificial Sequence: Synthetic oligonucleotide
agacagcauagucagcccc

SEQ ID NO: 1810212 - RNA, 19 nt, Artificial Sequence
  Description of Artificial Sequence: Synthetic oligonucleotide
aaugucuuagccaccagca

SEQ ID NO: 1810213 - RNA, 19 nt, Artificial Sequence
  Description of Artificial Sequence: Synthetic oligonucleotide
cuuaugggcccaauaauac

SEQ ID NO: 1810214 - RNA, 19 nt, Artificial Sequence
  Description of Artificial Sequence: Synthetic oligonucleotide
ucuuaugggcccaauaaua

SEQ ID NO: 1810215 - RNA, 19 nt, Artificial Sequence
  Description of Artificial Sequence: Synthetic oligonucleotide
cccaauaauacacagauuc

SEQ ID NO: 1810216 - RNA, 19 nt, Artificial Sequence
  Description of Artificial Sequence: Synthetic oligonucleotide
aagguaugacaagaacccc

SEQ ID NO: 1810217 - RNA, 19 nt, Artificial Sequence
  Description of Artificial Sequence: Synthetic oligonucleotide
guugaucccauucucccgg

SEQ ID NO: 1810218 - RNA, 19 nt, Artificial Sequence
  Description of Artificial Sequence: Synthetic oligonucleotide
uccaaaguugguagccugg

SEQ ID NO: 1810219 - RNA, 19 nt, Artificial Sequence
  Description of Artificial Sequence: Synthetic oligonucleotide
guuagcguuggcaaugugg

SEQ ID NO: 1810220 - RNA, 19 nt, Artificial Sequence
  Description of Artificial Sequence: Synthetic oligonucleotide
guagccuggaauccggugg

SEQ ID NO: 1810221 - RNA, 19 nt, Artificial Sequence
  Description of Artificial Sequence: Synthetic oligonucleotide
ggcgugauaauccacgccg

SEQ ID NO: 1810222 - RNA, 19 nt, Artificial Sequence
  Description of Artificial Sequence: Synthetic oligonucleotide
cauggcguugacuugcugc

SEQ ID NO: 1810223 - RNA, 19 nt, Artificial Sequence
  Description of Artificial Sequence: Synthetic oligonucleotide
uguugaucccauucucccg

SEQ ID NO: 1810224 - RNA, 19 nt, Artificial Sequence
  Description of Artificial Sequence: Synthetic oligonucleotide
gaaggcgucugccuuuugg

SEQ ID NO: 1810225 - RNA, 19 nt, Artificial Sequence
  Description of Artificial Sequence: Synthetic oligonucleotide
ucuuaguccucauucuucu

SEQ ID NO: 1810226 - RNA, 19 nt, Artificial Sequence
  Description of Artificial Sequence: Synthetic oligonucleotide
uuuugggcgaaugucuuag

SEQ ID NO: 1810227 - RNA, 19 nt, Artificial Sequence
  Description of Artificial Sequence: Synthetic oligonucleotide
aagggcgugauaauccacg

SEQ ID NO: 1810228 - RNA, 19 nt, Artificial Sequence
  Description of Artificial Sequence: Synthetic oligonucleotide
auucuagagaugcugcuga

SEQ ID NO: 1810229 - RNA, 19 nt, Artificial Sequence
  Description of Artificial Sequence: Synthetic oligonucleotide
ugauaauccacgccgcggu

SEQ ID NO: 1810230 - RNA, 19 nt, Artificial Sequence
  Description of Artificial Sequence: Synthetic oligonucleotide
guugacuugcugcaccgcg

SEQ ID NO: 1810231 - RNA, 19 nt, Artificial Sequence
  Description of Artificial Sequence: Synthetic oligonucleotide
aauaaagguaugacaagaa

SEQ ID NO: 1810232 - RNA, 19 nt, Artificial Sequence
  Description of Artificial Sequence: Synthetic oligonucleotide
cagcauagaccuuuacugg

SEQ ID NO: 1810233 - RNA, 19 nt, Artificial Sequence
  Description of Artificial Sequence: Synthetic oligonucleotide
aauggucucacggaugccu

SEQ ID NO: 1810234 - RNA, 19 nt, Artificial Sequence
  Description of Artificial Sequence: Synthetic oligonucleotide
ucaacgauguccagaacua

SEQ ID NO: 1810235 - RNA, 19 nt, Artificial Sequence
  Description of Artificial Sequence: Synthetic oligonucleotide
guguaaagguaauaaauaa

SEQ ID NO: 1810236 - RNA, 19 nt, Artificial Sequence
  Description of Artificial Sequence: Synthetic oligonucleotide
gucaccaacacauccacca

SEQ ID NO: 1810237 - RNA, 19 nt, Artificial Sequence
  Description of Artificial Sequence: Synthetic oligonucleotide
uugggcgaaugucuuagcc

SEQ ID NO: 1810238 - RNA, 19 nt, Artificial Sequence
  Description of Artificial Sequence: Synthetic oligonucleotide
uggcugugcauccauccgg

SEQ ID NO: 1810239 - RNA, 19 nt, Artificial Sequence
  Description of Artificial Sequence: Synthetic oligonucleotide
cuguugaucccauucuccc

SEQ ID NO: 1810240 - RNA, 19 nt, Artificial Sequence
  Description of Artificial Sequence: Synthetic oligonucleotide
guaacccugcaccugggcg

SEQ ID NO: 1810241 - RNA, 19 nt, Artificial Sequence
  Description of Artificial Sequence: Synthetic oligonucleotide
uuauucuagagaugcugcu

SEQ ID NO: 1810242 - RNA, 19 nt, Artificial Sequence
  Description of Artificial Sequence: Synthetic oligonucleotide
aagauaugugggugccagg

SEQ ID NO: 1810243 - RNA, 19 nt, Artificial Sequence
  Description of Artificial Sequence: Synthetic oligonucleotide
uucccacugaggcugaacu

SEQ ID NO: 1810244 - RNA, 19 nt, Artificial Sequence
  Description of Artificial Sequence: Synthetic oligonucleotide
uauucuagagaugcugcug

SEQ ID NO: 1810245 - RNA, 19 nt, Artificial Sequence
  Description of Artificial Sequence: Synthetic oligonucleotide
ucucacggaugccugaacu

SEQ ID NO: 1810246 - RNA, 19 nt, Artificial Sequence
  Description of Artificial Sequence: Synthetic oligonucleotide
cuuggcgaaaauagccugc

SEQ ID NO: 1810247 - RNA, 19 nt, Artificial Sequence
  Description of Artificial Sequence: Synthetic oligonucleotide
caugagccagucuucaaac

SEQ ID NO: 1810248 - RNA, 19 nt, Artificial Sequence
  Description of Artificial Sequence: Synthetic oligonucleotide
aagucguaacccugcaccu

SEQ ID NO: 1810249 - RNA, 19 nt, Artificial Sequence
  Description of Artificial Sequence: Synthetic oligonucleotide
guguagcccaagaaaaugg

SEQ ID NO: 1810250 - RNA, 19 nt, Artificial Sequence
  Description of Artificial Sequence: Synthetic oligonucleotide
uucuuaugggcccaauaau

SEQ ID NO: 1810251 - RNA, 19 nt, Artificial Sequence
  Description of Artificial Sequence: Synthetic oligonucleotide
caugauggucuucaccuag

SEQ ID NO: 1810252 - RNA, 19 nt, Artificial Sequence
  Description of Artificial Sequence: Synthetic oligonucleotide
aguguaaagguaauaaaua

SEQ ID NO: 1810253 - RNA, 19 nt, Artificial Sequence
  Description of Artificial Sequence: Synthetic oligonucleotide
gagcgcuuggcgaaaauag

SEQ ID NO: 1810254 - RNA, 19 nt, Artificial Sequence
  Description of Artificial Sequence: Synthetic oligonucleotide
agggcgugauaauccacgc

SEQ ID NO: 1810255 - RNA, 19 nt, Artificial Sequence
  Description of Artificial Sequence: Synthetic oligonucleotide
uaacccugcaccugggcgc

SEQ ID NO: 1810256 - RNA, 19 nt, Artificial Sequence
  Description of Artificial Sequence: Synthetic oligonucleotide
gucuuagccaccagcaggg

SEQ ID NO: 1810257 - RNA, 19 nt, Artificial Sequence
  Description of Artificial Sequence: Synthetic oligonucleotide
caagaaguggggugggccc

SEQ ID NO: 1810258 - RNA, 19 nt, Artificial Sequence
  Description of Artificial Sequence: Synthetic oligonucleotide
caagauaugugggugccag

SEQ ID NO: 1810259 - RNA, 19 nt, Artificial Sequence
  Description of Artificial Sequence: Synthetic oligonucleotide
ugaggcugaacucgccaag

SEQ ID NO: 1810260 - RNA, 19 nt, Artificial Sequence
  Description of Artificial Sequence: Synthetic oligonucleotide
ugggcgaaugucuuagcca

SEQ ID NO: 1810261 - RNA, 19 nt, Artificial Sequence
  Description of Artificial Sequence: Synthetic oligonucleotide
ugggcccaauaauacacag

SEQ ID NO: 1810262 - RNA, 19 nt, Artificial Sequence
  Description of Artificial Sequence: Synthetic oligonucleotide
ggaaugugguucuuauggg

SEQ ID NO: 1810263 - RNA, 19 nt, Artificial Sequence
  Description of Artificial Sequence: Synthetic oligonucleotide
ugaacucgccaagauaugu

SEQ ID NO: 1810264 - RNA, 19 nt, Artificial Sequence
  Description of Artificial Sequence: Synthetic oligonucleotide
uuccgcaugagguuagcgu

SEQ ID NO: 1810265 - RNA, 19 nt, Artificial Sequence
  Description of Artificial Sequence: Synthetic oligonucleotide
agcacagcggccaacgccg

SEQ ID NO: 1810266 - RNA, 19 nt, Artificial Sequence
  Description of Artificial Sequence: Synthetic oligonucleotide
uugacuugcugcaccgcgc

SEQ ID NO: 1810267 - RNA, 19 nt, Artificial Sequence
  Description of Artificial Sequence: Synthetic oligonucleotide
agucgaaggucuucaacga

SEQ ID NO: 1810268 - RNA, 19 nt, Artificial Sequence
  Description of Artificial Sequence: Synthetic oligonucleotide
ggcgaaaauagccugcaug

SEQ ID NO: 1810269 - RNA, 19 nt, Artificial Sequence
  Description of Artificial Sequence: Synthetic oligonucleotide
ucuucgucagguccucaug

SEQ ID NO: 1810270 - RNA, 19 nt, Artificial Sequence
  Description of Artificial Sequence: Synthetic oligonucleotide
uggauguguagcccaagaa

SEQ ID NO: 1810271 - RNA, 19 nt, Artificial Sequence
  Description of Artificial Sequence: Synthetic oligonucleotide
uguugaugagucgaagguc

SEQ ID NO: 1810272 - RNA, 19 nt, Artificial Sequence
  Description of Artificial Sequence: Synthetic oligonucleotide
ucgucagguccucaugaug

SEQ ID NO: 1810273 - RNA, 19 nt, Artificial Sequence
  Description of Artificial Sequence: Synthetic oligonucleotide
gaugagucgaaggucuuca

SEQ ID NO: 1810274 - RNA, 19 nt, Artificial Sequence
  Description of Artificial Sequence: Synthetic oligonucleotide
uaauccacgccgcgguuga

SEQ ID NO: 1810275 - RNA, 19 nt, Artificial Sequence
  Description of Artificial Sequence: Synthetic oligonucleotide
gugauaauccacgccgcgg

SEQ ID NO: 1810276 - RNA, 19 nt, Artificial Sequence
  Description of Artificial Sequence: Synthetic oligonucleotide
caagguagcgaauggucuc

SEQ ID NO: 1810277 - RNA, 19 nt, Artificial Sequence
  Description of Artificial Sequence: Synthetic oligonucleotide
augucuuagccaccagcag

SEQ ID NO: 1810278 - RNA, 19 nt, Artificial Sequence
  Description of Artificial Sequence: Synthetic oligonucleotide
gagcacagcggccaacgcc

SEQ ID NO: 1810279 - RNA, 19 nt, Artificial Sequence
  Description of Artificial Sequence: Synthetic oligonucleotide
agcgcuuggcgaaaauagc

SEQ ID NO: 1810280 - RNA, 19 nt, Artificial Sequence
  Description of Artificial Sequence: Synthetic oligonucleotide
ggcaauguggugcuugacc

SEQ ID NO: 1810281 - RNA, 19 nt, Artificial Sequence
  Description of Artificial Sequence: Synthetic oligonucleotide
uagcgaauggucucacgga

SEQ ID NO: 1810282 - RNA, 19 nt, Artificial Sequence
  Description of Artificial Sequence: Synthetic oligonucleotide
cagugagccaucugugagc

SEQ ID NO: 1810283 - RNA, 19 nt, Artificial Sequence
  Description of Artificial Sequence: Synthetic oligonucleotide
aucaugucacccagugagc

SEQ ID NO: 1810284 - RNA, 19 nt, Artificial Sequence
  Description of Artificial Sequence: Synthetic oligonucleotide
ucacggaugccugaacuga

SEQ ID NO: 1810285 - RNA, 19 nt, Artificial Sequence
  Description of Artificial Sequence: Synthetic oligonucleotide
gagaagcaucagcauagac

SEQ ID NO: 1810286 - RNA, 19 nt, Artificial Sequence
  Description of Artificial Sequence: Synthetic oligonucleotide
aggucuucaacgaugucca

SEQ ID NO: 1810287 - RNA, 19 nt, Artificial Sequence
  Description of Artificial Sequence: Synthetic oligonucleotide
ucaccuagugccagcggcu

SEQ ID NO: 1810288 - RNA, 19 nt, Artificial Sequence
  Description of Artificial Sequence: Synthetic oligonucleotide
gaacucgccaagauaugug

SEQ ID NO: 1810289 - RNA, 19 nt, Artificial Sequence
  Description of Artificial Sequence: Synthetic oligonucleotide
cugggcuguguugauauag

SEQ ID NO: 1810290 - RNA, 19 nt, Artificial Sequence
  Description of Artificial Sequence: Synthetic oligonucleotide
acaagguagcgaauggucu

SEQ ID NO: 1810291 - RNA, 19 nt, Artificial Sequence
  Description of Artificial Sequence: Synthetic oligonucleotide
cauagaccuuuacuggcug

SEQ ID NO: 1810292 - RNA, 19 nt, Artificial Sequence
  Description of Artificial Sequence: Synthetic oligonucleotide
gaaaauggugcagccugug

SEQ ID NO: 1810293 - RNA, 19 nt, Artificial Sequence
  Description of Artificial Sequence: Synthetic oligonucleotide
cucacggaugccugaacug

SEQ ID NO: 1810294 - RNA, 19 nt, Artificial Sequence
  Description of Artificial Sequence: Synthetic oligonucleotide
cuugaccauaccuccacca

SEQ ID NO: 1810295 - RNA, 19 nt, Artificial Sequence
  Description of Artificial Sequence: Synthetic oligonucleotide
ggcgucugccuuuugggcg

SEQ ID NO: 1810296 - RNA, 19 nt, Artificial Sequence
  Description of Artificial Sequence: Synthetic oligonucleotide
gauaugugggugccaggca

SEQ ID NO: 1810297 - RNA, 19 nt, Artificial Sequence
  Description of Artificial Sequence: Synthetic oligonucleotide
guaggaguggaagaagauc

SEQ ID NO: 1810298 - RNA, 19 nt, Artificial Sequence
  Description of Artificial Sequence: Synthetic oligonucleotide
accuagugccagcggcucc

SEQ ID NO: 1810299 - RNA, 19 nt, Artificial Sequence
  Description of Artificial Sequence: Synthetic oligonucleotide
ucgccaagauaugugggug

SEQ ID NO: 1810300 - RNA, 19 nt, Artificial Sequence
  Description of Artificial Sequence: Synthetic oligonucleotide
gcaauguggugcuugacca

SEQ ID NO: 1810301 - RNA, 19 nt, Artificial Sequence
  Description of Artificial Sequence: Synthetic oligonucleotide
guuggcaauguggugcuug

SEQ ID NO: 1810302 - RNA, 19 nt, Artificial Sequence
  Description of Artificial Sequence: Synthetic oligonucleotide
ucugugagcgcagggcuca

SEQ ID NO: 1810303 - RNA, 19 nt, Artificial Sequence
  Description of Artificial Sequence: Synthetic oligonucleotide
cacgccgcgguugaagucg

SEQ ID NO: 1810304 - RNA, 19 nt, Artificial Sequence
  Description of Artificial Sequence: Synthetic oligonucleotide
auagaccuuuacuggcugu

SEQ ID NO: 1810305 - RNA, 19 nt, Artificial Sequence
  Description of Artificial Sequence: Synthetic oligonucleotide
uuugggcgaaugucuuagc

SEQ ID NO: 1810306 - RNA, 19 nt, Artificial Sequence
  Description of Artificial Sequence: Synthetic oligonucleotide
auaauccacgccgcgguug

SEQ ID NO: 1810307 - RNA, 19 nt, Artificial Sequence
  Description of Artificial Sequence: Synthetic oligonucleotide
gggcgaaugucuuagccac

SEQ ID NO: 1810308 - RNA, 19 nt, Artificial Sequence
  Description of Artificial Sequence: Synthetic oligonucleotide
cuccuugccaagccgggag

SEQ ID NO: 1810309 - RNA, 19 nt, Artificial Sequence
  Description of Artificial Sequence: Synthetic oligonucleotide
caaucauggcguugacuug

SEQ ID NO: 1810310 - RNA, 19 nt, Artificial Sequence
  Description of Artificial Sequence: Synthetic oligonucleotide
auccgguggugccgaaggc

SEQ ID NO: 1810311 - RNA, 19 nt, Artificial Sequence
  Description of Artificial Sequence: Synthetic oligonucleotide
uucuagagaugcugcugac

SEQ ID NO: 1810312 - RNA, 19 nt, Artificial Sequence
  Description of Artificial Sequence: Synthetic oligonucleotide
ucguaacccugcaccuggg

SEQ ID NO: 1810313 - RNA, 19 nt, Artificial Sequence
  Description of Artificial Sequence: Synthetic oligonucleotide
auuccgcaugagguuagcg

SEQ ID NO: 1810314 - RNA, 19 nt, Artificial Sequence
  Description of Artificial Sequence: Synthetic oligonucleotide
ugcaccgcgcguccaaagu

SEQ ID NO: 1810315 - RNA, 19 nt, Artificial Sequence
  Description of Artificial Sequence: Synthetic oligonucleotide
cuucgucagguccucauga

SEQ ID NO: 1810316 - RNA, 19 nt, Artificial Sequence
  Description of Artificial Sequence: Synthetic oligonucleotide
ccuguugaucccauucucc

SEQ ID NO: 1810317 - RNA, 19 nt, Artificial Sequence
  Description of Artificial Sequence: Synthetic oligonucleotide
gagucugaaccaucaaacu

SEQ ID NO: 1810318 - RNA, 19 nt, Artificial Sequence
  Description of Artificial Sequence: Synthetic oligonucleotide
cuugcugcaccgcgcgucc

SEQ ID NO: 1810319 - RNA, 19 nt, Artificial Sequence
  Description of Artificial Sequence: Synthetic oligonucleotide
acucgccaagauauguggg

SEQ ID NO: 1810320 - RNA, 19 nt, Artificial Sequence
  Description of Artificial Sequence: Synthetic oligonucleotide
cugugcauccauccggauc

SEQ ID NO: 1810321 - RNA, 19 nt, Artificial Sequence
  Description of Artificial Sequence: Synthetic oligonucleotide
cacagauucuggguuguug

SEQ ID NO: 1810322 - RNA, 19 nt, Artificial Sequence
  Description of Artificial Sequence: Synthetic oligonucleotide
ugagcacagcggccaacgc

SEQ ID NO: 1810323 - RNA, 19 nt, Artificial Sequence
  Description of Artificial Sequence: Synthetic oligonucleotide
uccgguggugccgaaggcc

SEQ ID NO: 1810324 - RNA, 19 nt, Artificial Sequence
  Description of Artificial Sequence: Synthetic oligonucleotide
accaagaaguggggugggc

SEQ ID NO: 1810325 - RNA, 19 nt, Artificial Sequence
  Description of Artificial Sequence: Synthetic oligonucleotide
ugugaaggcgucugccuuu

SEQ ID NO: 1810326 - RNA, 19 nt, Artificial Sequence
  Description of Artificial Sequence: Synthetic oligonucleotide
uacacagauucuggguugu

SEQ ID NO: 1810327 - RNA, 19 nt, Artificial Sequence
  Description of Artificial Sequence: Synthetic oligonucleotide
uccacgccgcgguugaagu

SEQ ID NO: 1810328 - RNA, 19 nt, Artificial Sequence
  Description of Artificial Sequence: Synthetic oligonucleotide
accuuuacuggcugugcau

SEQ ID NO: 1810329 - RNA, 19 nt, Artificial Sequence
  Description of Artificial Sequence: Synthetic oligonucleotide
ggcccaauaauacacagau

SEQ ID NO: 1810330 - RNA, 19 nt, Artificial Sequence
  Description of Artificial Sequence: Synthetic oligonucleotide
gcgaaaauagccugcaugu

SEQ ID NO: 1810331 - RNA, 19 nt, Artificial Sequence
  Description of Artificial Sequence: Synthetic oligonucleotide
gcuuggcgaaaauagccug

SEQ ID NO: 1810332 - RNA, 19 nt, Artificial Sequence
  Description of Artificial Sequence: Synthetic oligonucleotide
uucgucagguccucaugau

SEQ ID NO: 1810333 - RNA, 19 nt, Artificial Sequence
  Description of Artificial Sequence: Synthetic oligonucleotide
gucagccccauuccgcaug

SEQ ID NO: 1810334 - RNA, 19 nt, Artificial Sequence
  Description of Artificial Sequence: Synthetic oligonucleotide
ucccagagcgcuuggcgaa

SEQ ID NO: 1810335 - RNA, 19 nt, Artificial Sequence
  Description of Artificial Sequence: Synthetic oligonucleotide
aacgccgagcugugcuuga

SEQ ID NO: 1810336 - RNA, 19 nt, Artificial Sequence
  Description of Artificial Sequence: Synthetic oligonucleotide
caccgcgcguccaaaguug

SEQ ID NO: 1810337 - RNA, 19 nt, Artificial Sequence
  Description of Artificial Sequence: Synthetic oligonucleotide
cugcauguugaugagucga

SEQ ID NO: 1810338 - RNA, 19 nt, Artificial Sequence
  Description of Artificial Sequence: Synthetic oligonucleotide
acaccuccagccgugguca

SEQ ID NO: 1810339 - RNA, 19 nt, Artificial Sequence
  Description of Artificial Sequence: Synthetic oligonucleotide
uagcguuggcaauguggug

SEQ ID NO: 1810340 - RNA, 19 nt, Artificial Sequence
  Description of Artificial Sequence: Synthetic oligonucleotide
ugggcggcggcucuucguc

SEQ ID NO: 1810341 - RNA, 19 nt, Artificial Sequence
  Description of Artificial Sequence: Synthetic oligonucleotide
agaaaauggugcagccugu

SEQ ID NO: 1810342 - RNA, 19 nt, Artificial Sequence
  Description of Artificial Sequence: Synthetic oligonucleotide
uggaauccgguggugccga

SEQ ID NO: 1810343 - RNA, 19 nt, Artificial Sequence
  Description of Artificial Sequence: Synthetic oligonucleotide
acugaaguguaaagguaau

SEQ ID NO: 1810344 - RNA, 19 nt, Artificial Sequence
  Description of Artificial Sequence: Synthetic oligonucleotide
ccagugagccaucugugag

SEQ ID NO: 1810345 - RNA, 19 nt, Artificial Sequence
  Description of Artificial Sequence: Synthetic oligonucleotide
uugaugagucgaaggucuu

SEQ ID NO: 1810346 - RNA, 19 nt, Artificial Sequence
  Description of Artificial Sequence: Synthetic oligonucleotide
cuccaaucuucuuaguccu

SEQ ID NO: 1810347 - RNA, 19 nt, Artificial Sequence
  Description of Artificial Sequence: Synthetic oligonucleotide
gcgguugaagucguaaccc

SEQ ID NO: 1810348 - RNA, 19 nt, Artificial Sequence
  Description of Artificial Sequence: Synthetic oligonucleotide
gguugaagucguaacccug

SEQ ID NO: 1810349 - RNA, 19 nt, Artificial Sequence
  Description of Artificial Sequence: Synthetic oligonucleotide
auaccuccaccaaggauga

SEQ ID NO: 1810350 - RNA, 19 nt, Artificial Sequence
  Description of Artificial Sequence: Synthetic oligonucleotide
gaauccgguggugccgaag

SEQ ID NO: 1810351 - RNA, 19 nt, Artificial Sequence
  Description of Artificial Sequence: Synthetic oligonucleotide
gcguugacuugcugcaccg

SEQ ID NO: 1810352 - RNA, 19 nt, Artificial Sequence
  Description of Artificial Sequence: Synthetic oligonucleotide
caccaaggaugaucauccc

SEQ ID NO: 1810353 - RNA, 19 nt, Artificial Sequence
  Description of Artificial Sequence: Synthetic oligonucleotide
gaagggcgugauaauccac

SEQ ID NO: 1810354 - RNA, 19 nt, Artificial Sequence
  Description of Artificial Sequence: Synthetic oligonucleotide
ugaucaucccagagcgcuu

SEQ ID NO: 1810355 - RNA, 19 nt, Artificial Sequence
  Description of Artificial Sequence: Synthetic oligonucleotide
uccagccguggucaccaac

SEQ ID NO: 1810356 - RNA, 19 nt, Artificial Sequence
  Description of Artificial Sequence: Synthetic oligonucleotide
cagccugugagugggcggc

SEQ ID NO: 1810357 - RNA, 19 nt, Artificial Sequence
  Description of Artificial Sequence: Synthetic oligonucleotide
gcgcuuggcgaaaauagcc

SEQ ID NO: 1810358 - RNA, 19 nt, Artificial Sequence
  Description of Artificial Sequence: Synthetic oligonucleotide
ugguagccuggaauccggu

SEQ ID NO: 1810359 - RNA, 19 nt, Artificial Sequence
  Description of Artificial Sequence: Synthetic oligonucleotide
cguggucaccaacacaucc

SEQ ID NO: 1810360 - RNA, 19 nt, Artificial Sequence
  Description of Artificial Sequence: Synthetic oligonucleotide
cacugaggcugaacucgcc

SEQ ID NO: 1810361 - RNA, 19 nt, Artificial Sequence
  Description of Artificial Sequence: Synthetic oligonucleotide
gguagccuggaauccggug

SEQ ID NO: 1810362 - RNA, 19 nt, Artificial Sequence
  Description of Artificial Sequence: Synthetic oligonucleotide
agagaagcaucagcauaga

SEQ ID NO: 1810363 - RNA, 19 nt, Artificial Sequence
  Description of Artificial Sequence: Synthetic oligonucleotide
caaggaugaucaucccaga

SEQ ID NO: 1810364 - RNA, 19 nt, Artificial Sequence
  Description of Artificial Sequence: Synthetic oligonucleotide
ccuggaauccgguggugcc

SEQ ID NO: 1810365 - RNA, 19 nt, Artificial Sequence
  Description of Artificial Sequence: Synthetic oligonucleotide
aggucuucuuccacaccuc

SEQ ID NO: 1810366 - RNA, 19 nt, Artificial Sequence
  Description of Artificial Sequence: Synthetic oligonucleotide
auguguagcccaagaaaau

SEQ ID NO: 1810367 - RNA, 19 nt, Artificial Sequence
  Description of Artificial Sequence: Synthetic oligonucleotide
gcgcguccaaaguugguag

SEQ ID NO: 1810368 - RNA, 19 nt, Artificial Sequence
  Description of Artificial Sequence: Synthetic oligonucleotide
ccugcauguugaugagucg

SEQ ID NO: 1810369 - RNA, 19 nt, Artificial Sequence
  Description of Artificial Sequence: Synthetic oligonucleotide
gcugaacucgccaagauau

SEQ ID NO: 1810370 - RNA, 19 nt, Artificial Sequence
  Description of Artificial Sequence: Synthetic oligonucleotide
gcggcucuucgucaggucc

SEQ ID NO: 1810371 - RNA, 19 nt, Artificial Sequence
  Description of Artificial Sequence: Synthetic oligonucleotide
aacccugcaccugggcgcu

SEQ ID NO: 1810372 - RNA, 19 nt, Artificial Sequence
  Description of Artificial Sequence: Synthetic oligonucleotide
agagcgcuuggcgaaaaua

SEQ ID NO: 1810373 - RNA, 19 nt, Artificial Sequence
  Description of Artificial Sequence: Synthetic oligonucleotide
aggcugaacucgccaagau

SEQ ID NO: 1810374 - RNA, 19 nt, Artificial Sequence
  Description of Artificial Sequence: Synthetic oligonucleotide
ucuccuugccaagccggga

SEQ ID NO: 1810375 - RNA, 19 nt, Artificial Sequence
  Description of Artificial Sequence: Synthetic oligonucleotide
augagucgaaggucuucaa

SEQ ID NO: 1810376 - RNA, 19 nt, Artificial Sequence
  Description of Artificial Sequence: Synthetic oligonucleotide
ccaagaaguggggugggcc

SEQ ID NO: 1810377 - RNA, 19 nt, Artificial Sequence
  Description of Artificial Sequence: Synthetic oligonucleotide
auccacgccgcgguugaag

SEQ ID NO: 1810378 - RNA, 19 nt, Artificial Sequence
  Description of Artificial Sequence: Synthetic oligonucleotide
uggcgaaaauagccugcau

SEQ ID NO: 1810379 - RNA, 19 nt, Artificial Sequence
  Description of Artificial Sequence: Synthetic oligonucleotide
ugcauccauccggaucuug

SEQ ID NO: 1810380 - RNA, 19 nt, Artificial Sequence
  Description of Artificial Sequence: Synthetic oligonucleotide
cucgccaagauaugugggu

SEQ ID NO: 1810381 - RNA, 19 nt, Artificial Sequence
  Description of Artificial Sequence: Synthetic oligonucleotide
accgcgcguccaaaguugg

SEQ ID NO: 1810382 - RNA, 19 nt, Artificial Sequence
  Description of Artificial Sequence: Synthetic oligonucleotide
agguuagcguuggcaaugu

SEQ ID NO: 1810383 - RNA, 19 nt, Artificial Sequence
  Description of Artificial Sequence: Synthetic oligonucleotide
ggaagaccagagaagcauc

SEQ ID NO: 1810384 - RNA, 19 nt, Artificial Sequence
  Description of Artificial Sequence: Synthetic oligonucleotide
ugcugcaccgcgcguccaa

SEQ ID NO: 1810385 - RNA, 19 nt, Artificial Sequence
  Description of Artificial Sequence: Synthetic oligonucleotide
gcuugaccauaccuccacc

SEQ ID NO: 1810386 - RNA, 19 nt, Artificial Sequence
  Description of Artificial Sequence: Synthetic oligonucleotide
cgugauaauccacgccgcg

SEQ ID NO: 1810387 - RNA, 19 nt, Artificial Sequence
  Description of Artificial Sequence: Synthetic oligonucleotide
gcguccaaaguugguagcc

SEQ ID NO: 1810388 - RNA, 19 nt, Artificial Sequence
  Description of Artificial Sequence: Synthetic oligonucleotide
gggcgugauaauccacgcc

SEQ ID NO: 1810389 - RNA, 19 nt, Artificial Sequence
  Description of Artificial Sequence: Synthetic oligonucleotide
acggaugccugaacugaug

SEQ ID NO: 1810390 - RNA, 19 nt, Artificial Sequence
  Description of Artificial Sequence: Synthetic oligonucleotide
cuuuugggcgaaugucuua

SEQ ID NO: 1810391 - RNA, 19 nt, Artificial Sequence
  Description of Artificial Sequence: Synthetic oligonucleotide
cugcaccgcgcguccaaag

SEQ ID NO: 1810392 - RNA, 19 nt, Artificial Sequence
  Description of Artificial Sequence: Synthetic oligonucleotide
agcgcagggcucagcacag

SEQ ID NO: 1810393 - RNA, 19 nt, Artificial Sequence
  Description of Artificial Sequence: Synthetic oligonucleotide
gguucuuaugggcccaaua

SEQ ID NO: 1810394 - RNA, 19 nt, Artificial Sequence
  Description of Artificial Sequence: Synthetic oligonucleotide
gucucacggaugccugaac

SEQ ID NO: 1810395 - RNA, 19 nt, Artificial Sequence
  Description of Artificial Sequence: Synthetic oligonucleotide
cagccguggucaccaacac

SEQ ID NO: 1810396 - RNA, 19 nt, Artificial Sequence
  Description of Artificial Sequence: Synthetic oligonucleotide
cugaaguguaaagguaaua

SEQ ID NO: 1810397 - RNA, 19 nt, Artificial Sequence
  Description of Artificial Sequence: Synthetic oligonucleotide
cuucuuaguccucauucuu

SEQ ID NO: 1810398 - RNA, 19 nt, Artificial Sequence
  Description of Artificial Sequence: Synthetic oligonucleotide
ccaauaauacacagauucu

SEQ ID NO: 1810399 - RNA, 19 nt, Artificial Sequence
  Description of Artificial Sequence: Synthetic oligonucleotide
caacgccgagcugugcuug

SEQ ID NO: 1810400 - RNA, 19 nt, Artificial Sequence
  Description of Artificial Sequence: Synthetic oligonucleotide
agucagccccauuccgcau

SEQ ID NO: 1810401 - RNA, 19 nt, Artificial Sequence
  Description of Artificial Sequence: Synthetic oligonucleotide
ugucacccagugagccauc

SEQ ID NO: 1810402 - RNA, 19 nt, Artificial Sequence
  Description of Artificial Sequence: Synthetic oligonucleotide
gguggugccgaaggccucc

SEQ ID NO: 1810403 - RNA, 19 nt, Artificial Sequence
  Description of Artificial Sequence: Synthetic oligonucleotide
ccauuccgcaugagguuag

SEQ ID NO: 1810404 - RNA, 19 nt, Artificial Sequence
  Description of Artificial Sequence: Synthetic oligonucleotide
aucauggcguugacuugcu

SEQ ID NO: 1810405 - RNA, 19 nt, Artificial Sequence
  Description of Artificial Sequence: Synthetic oligonucleotide
gauaauccacgccgcgguu

SEQ ID NO: 1810406 - RNA, 19 nt, Artificial Sequence
  Description of Artificial Sequence: Synthetic oligonucleotide
gcggccaacgccgcggcgg

SEQ ID NO: 1810407 - RNA, 19 nt, Artificial Sequence
  Description of Artificial Sequence: Synthetic oligonucleotide
gguuagcguuggcaaugug

SEQ ID NO: 1810408 - RNA, 19 nt, Artificial Sequence
  Description of Artificial Sequence: Synthetic oligonucleotide
ggcugaacucgccaagaua

SEQ ID NO: 1810409 - RNA, 19 nt, Artificial Sequence
  Description of Artificial Sequence: Synthetic oligonucleotide
caccuagugccagcggcuc

SEQ ID NO: 1810410 - RNA, 19 nt, Artificial Sequence
  Description of Artificial Sequence: Synthetic oligonucleotide
gcgugauaauccacgccgc

SEQ ID NO: 1810411 - RNA, 19 nt, Artificial Sequence
  Description of Artificial Sequence: Synthetic oligonucleotide
aacgccgcggcgggcgcca

SEQ ID NO: 1810412 - RNA, 19 nt, Artificial Sequence
  Description of Artificial Sequence: Synthetic oligonucleotide
caacgauguccagaacuaa

SEQ ID NO: 1810413 - RNA, 19 nt, Artificial Sequence
  Description of Artificial Sequence: Synthetic oligonucleotide
gccuggaauccgguggugc

SEQ ID NO: 1810414 - RNA, 19 nt, Artificial Sequence
  Description of Artificial Sequence: Synthetic oligonucleotide
ccgagucugaaccaucaaa

SEQ ID NO: 1810415 - RNA, 19 nt, Artificial Sequence
  Description of Artificial Sequence: Synthetic oligonucleotide
gcgucugccuuuugggcga

SEQ ID NO: 1810416 - RNA, 19 nt, Artificial Sequence
  Description of Artificial Sequence: Synthetic oligonucleotide
ccgcgguugaagucguaac

SEQ ID NO: 1810417 - RNA, 19 nt, Artificial Sequence
  Description of Artificial Sequence: Synthetic oligonucleotide
ggcaacgccgagcugugcu

SEQ ID NO: 1810418 - RNA, 19 nt, Artificial Sequence
  Description of Artificial Sequence: Synthetic oligonucleotide
cuagugccagcggcuccag

SEQ ID NO: 1810419 - RNA, 19 nt, Artificial Sequence
  Description of Artificial Sequence: Synthetic oligonucleotide
ugguucuuaugggcccaau

SEQ ID NO: 1810420 - RNA, 19 nt, Artificial Sequence
  Description of Artificial Sequence: Synthetic oligonucleotide
ccauguugugcugcacaag

SEQ ID NO: 1810421 - RNA, 19 nt, Artificial Sequence
  Description of Artificial Sequence: Synthetic oligonucleotide
ggcgaaugucuuagccacc

SEQ ID NO: 1810422 - RNA, 19 nt, Artificial Sequence
  Description of Artificial Sequence: Synthetic oligonucleotide
acgccgagcugugcuugag

SEQ ID NO: 1810423 - RNA, 19 nt, Artificial Sequence
  Description of Artificial Sequence: Synthetic oligonucleotide
cagauucuggguuguugau

SEQ ID NO: 1810424 - RNA, 19 nt, Artificial Sequence
  Description of Artificial Sequence: Synthetic oligonucleotide
gggcccaauaauacacaga

SEQ ID NO: 1810425 - RNA, 19 nt, Artificial Sequence
  Description of Artificial Sequence: Synthetic oligonucleotide
agccuggaauccgguggug

SEQ ID NO: 1810426 - RNA, 19 nt, Artificial Sequence
  Description of Artificial Sequence: Synthetic oligonucleotide
cucuucgucagguccucau

SEQ ID NO: 1810427 - RNA, 19 nt, Artificial Sequence
  Description of Artificial Sequence: Synthetic oligonucleotide
ggcggcaacgccgagcugu

SEQ ID NO: 1810428 - RNA, 19 nt, Artificial Sequence
  Description of Artificial Sequence: Synthetic oligonucleotide
caauguggugcuugaccau

SEQ ID NO: 1810429 - RNA, 19 nt, Artificial Sequence
  Description of Artificial Sequence: Synthetic oligonucleotide
cccagugagccaucuguga

SEQ ID NO: 1810430 - RNA, 19 nt, Artificial Sequence
  Description of Artificial Sequence: Synthetic oligonucleotide
cgcaugagguuagcguugg

SEQ ID NO: 1810431 - RNA, 19 nt, Artificial Sequence
  Description of Artificial Sequence: Synthetic oligonucleotide
aauccacgccgcgguugaa

SEQ ID NO: 1810432 - RNA, 19 nt, Artificial Sequence
  Description of Artificial Sequence: Synthetic oligonucleotide
cgcguccaaaguugguagc

SEQ ID NO: 1810433 - RNA, 19 nt, Artificial Sequence
  Description of Artificial Sequence: Synthetic oligonucleotide
ggggaagaccagagaagca

SEQ ID NO: 1810434 - RNA, 19 nt, Artificial Sequence
  Description of Artificial Sequence: Synthetic oligonucleotide
gcauagaccuuuacuggcu

SEQ ID NO: 1810435 - RNA, 19 nt, Artificial Sequence
  Description of Artificial Sequence: Synthetic oligonucleotide
cgagcugugcuugagcaca

SEQ ID NO: 1810436 - RNA, 19 nt, Artificial Sequence
  Description of Artificial Sequence: Synthetic oligonucleotide
ccgagcugugcuugagcac

SEQ ID NO: 1810437 - RNA, 19 nt, Artificial Sequence
  Description of Artificial Sequence: Synthetic oligonucleotide
gguuggauguguagcccaa

SEQ ID NO: 1810438 - RNA, 19 nt, Artificial Sequence
  Description of Artificial Sequence: Synthetic oligonucleotide
ggcaugagccagucuucaa

SEQ ID NO: 1810439 - RNA, 19 nt, Artificial Sequence
  Description of Artificial Sequence: Synthetic oligonucleotide
uugcugcaccgcgcgucca

SEQ ID NO: 1810440 - RNA, 19 nt, Artificial Sequence
  Description of Artificial Sequence: Synthetic oligonucleotide
gcaugagguuagcguuggc

SEQ ID NO: 1810441 - RNA, 19 nt, Artificial Sequence
  Description of Artificial Sequence: Synthetic oligonucleotide
gagugggcggcggcucuuc

SEQ ID NO: 1810442 - RNA, 19 nt, Artificial Sequence
  Description of Artificial Sequence: Synthetic oligonucleotide
cacggaugccugaacugau

SEQ ID NO: 1810443 - RNA, 19 nt, Artificial Sequence
  Description of Artificial Sequence: Synthetic oligonucleotide
caccuccagccguggucac

SEQ ID NO: 1810444 - RNA, 19 nt, Artificial Sequence
  Description of Artificial Sequence: Synthetic oligonucleotide
gccugugagugggcggcgg

SEQ ID NO: 1810445 - RNA, 19 nt, Artificial Sequence
  Description of Artificial Sequence: Synthetic oligonucleotide
cugugagcgcagggcucag

SEQ ID NO: 1810446 - RNA, 19 nt, Artificial Sequence
  Description of Artificial Sequence: Synthetic oligonucleotide
cugggcgcucucgggcggc

SEQ ID NO: 1810447 - RNA, 19 nt, Artificial Sequence
  Description of Artificial Sequence: Synthetic oligonucleotide
cgaaugucuuagccaccag

SEQ ID NO: 1810448 - RNA, 19 nt, Artificial Sequence
  Description of Artificial Sequence: Synthetic oligonucleotide
ccggagcuccuucccacug

SEQ ID NO: 1810449 - RNA, 19 nt, Artificial Sequence
  Description of Artificial Sequence: Synthetic oligonucleotide
gugagugggcggcggcucu

SEQ ID NO: 1810450 - RNA, 19 nt, Artificial Sequence
  Description of Artificial Sequence: Synthetic oligonucleotide
ccuagugccagcggcucca

SEQ ID NO: 1810451 - RNA, 19 nt, Artificial Sequence
  Description of Artificial Sequence: Synthetic oligonucleotide
ugggcgcucucgggcggca

SEQ ID NO: 1810452 - RNA, 19 nt, Artificial Sequence
  Description of Artificial Sequence: Synthetic oligonucleotide
gcguuggcaauguggugcu

SEQ ID NO: 1810453 - RNA, 19 nt, Artificial Sequence
  Description of Artificial Sequence: Synthetic oligonucleotide
gugguucuuaugggcccaa

SEQ ID NO: 1810454 - RNA, 19 nt, Artificial Sequence
  Description of Artificial Sequence: Synthetic oligonucleotide
gccgcgguugaagucguaa

SEQ ID NO: 1810455 - RNA, 19 nt, Artificial Sequence
  Description of Artificial Sequence: Synthetic oligonucleotide
gccaagccgggagaucauc

SEQ ID NO: 1810456 - RNA, 19 nt, Artificial Sequence
  Description of Artificial Sequence: Synthetic oligonucleotide
gugcagccugugagugggc

SEQ ID NO: 1810457 - RNA, 19 nt, Artificial Sequence
  Description of Artificial Sequence: Synthetic oligonucleotide
ccguggucaccaacacauc

SEQ ID NO: 1810458 - RNA, 19 nt, Artificial Sequence
  Description of Artificial Sequence: Synthetic oligonucleotide
cccauuccgcaugagguua

SEQ ID NO: 1810459 - RNA, 19 nt, Artificial Sequence
  Description of Artificial Sequence: Synthetic oligonucleotide
acgccgcgguugaagucgu

SEQ ID NO: 1810460 - RNA, 19 nt, Artificial Sequence
  Description of Artificial Sequence: Synthetic oligonucleotide
ccauccggaucuugcccca

SEQ ID NO: 1810461 - RNA, 19 nt, Artificial Sequence
  Description of Artificial Sequence: Synthetic oligonucleotide
gcggcaacgccgagcugug

SEQ ID NO: 1810462 - RNA, 19 nt, Artificial Sequence
  Description of Artificial Sequence: Synthetic oligonucleotide
ccuuuugggcgaaugucuu

SEQ ID NO: 1810463 - RNA, 19 nt, Artificial Sequence
  Description of Artificial Sequence: Synthetic oligonucleotide
cgccgagcugugcuugagc

SEQ ID NO: 1810464 - RNA, 19 nt, Artificial Sequence
  Description of Artificial Sequence: Synthetic oligonucleotide
ccauaccuccaccaaggau

SEQ ID NO: 1810465 - RNA, 19 nt, Artificial Sequence
  Description of Artificial Sequence: Synthetic oligonucleotide
ccaacgccgcggcgggcgc

SEQ ID NO: 1810466 - RNA, 19 nt, Artificial Sequence
  Description of Artificial Sequence: Synthetic oligonucleotide
cauccggaucuugccccaa

SEQ ID NO: 1810467 - RNA, 19 nt, Artificial Sequence
  Description of Artificial Sequence: Synthetic oligonucleotide
gcgcagggcucagcacagg

SEQ ID NO: 1810468 - RNA, 19 nt, Artificial Sequence
  Description of Artificial Sequence: Synthetic oligonucleotide
gcaccgcgcguccaaaguu

SEQ ID NO: 1810469 - RNA, 19 nt, Artificial Sequence
  Description of Artificial Sequence: Synthetic oligonucleotide
cgguugaagucguaacccu

SEQ ID NO: 1810470 - RNA, 19 nt, Artificial Sequence
  Description of Artificial Sequence: Synthetic oligonucleotide
gcaacgccgagcugugcuu

SEQ ID NO: 1810471 - RNA, 19 nt, Artificial Sequence
  Description of Artificial Sequence: Synthetic oligonucleotide
ggagaucaucuuggauggu

SEQ ID NO: 1810472 - RNA, 19 nt, Artificial Sequence
  Description of Artificial Sequence: Synthetic oligonucleotide
ccuggcucccgagucugaa

SEQ ID NO: 1810473 - RNA, 19 nt, Artificial Sequence
  Description of Artificial Sequence: Synthetic oligonucleotide
cgcgcguccaaaguuggua

SEQ ID NO: 1810474 - RNA, 19 nt, Artificial Sequence
  Description of Artificial Sequence: Synthetic oligonucleotide
ccgggagaucaucuuggau

SEQ ID NO: 1810475 - RNA, 19 nt, Artificial Sequence
  Description of Artificial Sequence: Synthetic oligonucleotide
cguccaaaguugguagccu

SEQ ID NO: 1810476 - RNA, 19 nt, Artificial Sequence
  Description of Artificial Sequence: Synthetic oligonucleotide
cgaaaauagccugcauguu

SEQ ID NO: 1810477 - RNA, 19 nt, Artificial Sequence
  Description of Artificial Sequence: Synthetic oligonucleotide
cccagagcgcuuggcgaaa

SEQ ID NO: 1810478 - RNA, 19 nt, Artificial Sequence
  Description of Artificial Sequence: Synthetic oligonucleotide
gugcauccauccggaucuu

SEQ ID NO: 1810479 - RNA, 19 nt, Artificial Sequence
  Description of Artificial Sequence: Synthetic oligonucleotide
ccgggucuucuccaaucuu

SEQ ID NO: 1810480 - RNA, 19 nt, Artificial Sequence
  Description of Artificial Sequence: Synthetic oligonucleotide
ccccaagagacagccucau

SEQ ID NO: 1810481 - RNA, 19 nt, Artificial Sequence
  Description of Artificial Sequence: Synthetic oligonucleotide
ccgcgcguccaaaguuggu

SEQ ID NO: 1810482 - RNA, 19 nt, Artificial Sequence
  Description of Artificial Sequence: Synthetic oligonucleotide
aagaucacacuuuauaucc

SEQ ID NO: 1810483 - RNA, 19 nt, Artificial Sequence
  Description of Artificial Sequence: Synthetic oligonucleotide
aauguagaaacccauauag

SEQ ID NO: 1810484 - RNA, 19 nt, Artificial Sequence
  Description of Artificial Sequence: Synthetic oligonucleotide
aaagaaugugcccacaugc

SEQ ID NO: 1810485 - RNA, 19 nt, Artificial Sequence
  Description of Artificial Sequence: Synthetic oligonucleotide
ucuugugagauuuugaugg

SEQ ID NO: 1810486 - RNA, 19 nt, Artificial Sequence
  Description of Artificial Sequence: Synthetic oligonucleotide
aaaugaauaaucgggaucg

SEQ ID NO: 1810487 - RNA, 19 nt, Artificial Sequence
  Description of Artificial Sequence: Synthetic oligonucleotide
agaaggucuauacugaccc

SEQ ID NO: 1810488 - RNA, 19 nt, Artificial Sequence
  Description of Artificial Sequence: Synthetic oligonucleotide
uauaagauccugauaaucc

SEQ ID NO: 1810489 - RNA, 19 nt, Artificial Sequence
  Description of Artificial Sequence: Synthetic oligonucleotide
ugaauagacacccaaagac

SEQ ID NO: 1810490 - RNA, 19 nt, Artificial Sequence
  Description of Artificial Sequence: Synthetic oligonucleotide
ugaacugaggacuuggugg

SEQ ID NO: 1810491 - RNA, 19 nt, Artificial Sequence
  Description of Artificial Sequence: Synthetic oligonucleotide
cuuaaugcugaauagacac

SEQ ID NO: 1810492 - RNA, 19 nt, Artificial Sequence
  Description of Artificial Sequence: Synthetic oligonucleotide
ugaauaaucgggaucguag

SEQ ID NO: 1810493 - RNA, 19 nt, Artificial Sequence
  Description of Artificial Sequence: Synthetic oligonucleotide
uguuuauuaaugcaaaguc

SEQ ID NO: 1810494 - RNA, 19 nt, Artificial Sequence
  Description of Artificial Sequence: Synthetic oligonucleotide
cauuguagaauccauaggc

SEQ ID NO: 1810495 - RNA, 19 nt, Artificial Sequence
  Description of Artificial Sequence: Synthetic oligonucleotide
aguacagauacacagaaga

SEQ ID NO: 1810496 - RNA, 19 nt, Artificial Sequence
  Description of Artificial Sequence: Synthetic oligonucleotide
cuuacugcggccuucaucc

SEQ ID NO: 1810497 - RNA, 19 nt, Artificial Sequence
  Description of Artificial Sequence: Synthetic oligonucleotide
gaaacgacaauacuuggag

SEQ ID NO: 1810498 - RNA, 19 nt, Artificial Sequence
  Description of Artificial Sequence: Synthetic oligonucleotide
aaaggaugacaccuuauag

SEQ ID NO: 1810499 - RNA, 19 nt, Artificial Sequence
  Description of Artificial Sequence: Synthetic oligonucleotide
ugaacuggcucacaguugg

SEQ ID NO: 1810500 - RNA, 19 nt, Artificial Sequence
  Description of Artificial Sequence: Synthetic oligonucleotide
aacuguaaaggaugacacc

SEQ ID NO: 1810501 - RNA, 19 nt, Artificial Sequence
  Description of Artificial Sequence: Synthetic oligonucleotide
ugguuuaucagguggaucc

SEQ ID NO: 1810502 - RNA, 19 nt, Artificial Sequence
  Description of Artificial Sequence: Synthetic oligonucleotide
uccucggucuauaagaucc

SEQ ID NO: 1810503 - RNA, 19 nt, Artificial Sequence
  Description of Artificial Sequence: Synthetic oligonucleotide
augucuaucacacccacag

SEQ ID NO: 1810504 - RNA, 19 nt, Artificial Sequence
  Description of Artificial Sequence: Synthetic oligonucleotide
agauuuugauggcugaaac

SEQ ID NO: 1810505 - RNA, 19 nt, Artificial Sequence
  Description of Artificial Sequence: Synthetic oligonucleotide
uguagaaacccauauagua

SEQ ID NO: 1810506 - RNA, 19 nt, Artificial Sequence
  Description of Artificial Sequence: Synthetic oligonucleotide
aacgacaauacuuggagau

SEQ ID NO: 1810507 - RNA, 19 nt, Artificial Sequence
  Description of Artificial Sequence: Synthetic oligonucleotide
aauaaucaucugguaacgc

SEQ ID NO: 1810508 - RNA, 19 nt, Artificial Sequence
  Description of Artificial Sequence: Synthetic oligonucleotide
aaaucuccccuuuagccag

SEQ ID NO: 1810509 - RNA, 19 nt, Artificial Sequence
  Description of Artificial Sequence: Synthetic oligonucleotide
agacauaugucucaggaca

SEQ ID NO: 1810510 - RNA, 19 nt, Artificial Sequence
  Description of Artificial Sequence: Synthetic oligonucleotide
ggugaaaggagccauaucc

SEQ ID NO: 1810511 - RNA, 19 nt, Artificial Sequence
  Description of Artificial Sequence: Synthetic oligonucleotide
aacaccguaaggcagggca

SEQ ID NO: 1810512 - RNA, 19 nt, Artificial Sequence
  Description of Artificial Sequence: Synthetic oligonucleotide
uuaagaucacacuuuauau

SEQ ID NO: 1810513 - RNA, 19 nt, Artificial Sequence
  Description of Artificial Sequence: Synthetic oligonucleotide
agauacacagaagacacac

SEQ ID NO: 1810514 - RNA, 19 nt, Artificial Sequence
  Description of Artificial Sequence: Synthetic oligonucleotide
gucuauaagauccugauaa

SEQ ID NO: 1810515 - RNA, 19 nt, Artificial Sequence
  Description of Artificial Sequence: Synthetic oligonucleotide
uguaaaguacccguacucg

SEQ ID NO: 1810516 - RNA, 19 nt, Artificial Sequence
  Description of Artificial Sequence: Synthetic oligonucleotide
ugagaugcgaacuuugacu

SEQ ID NO: 1810517 - RNA, 19 nt, Artificial Sequence
  Description of Artificial Sequence: Synthetic oligonucleotide
uauacugacccuuguaucu

SEQ ID NO: 1810518 - RNA, 19 nt, Artificial Sequence
  Description of Artificial Sequence: Synthetic oligonucleotide
uaauccugcacugucaaag

SEQ ID NO: 1810519 - RNA, 19 nt, Artificial Sequence
  Description of Artificial Sequence: Synthetic oligonucleotide
augaauuaauucuuuagau

SEQ ID NO: 1810520 - RNA, 19 nt, Artificial Sequence
  Description of Artificial Sequence: Synthetic oligonucleotide
uauagaccugguaagacuc

SEQ ID NO: 1810521 - RNA, 19 nt, Artificial Sequence
  Description of Artificial Sequence: Synthetic oligonucleotide
aaaguacccguacucgguc

SEQ ID NO: 1810522 - RNA, 19 nt, Artificial Sequence
  Description of Artificial Sequence: Synthetic oligonucleotide
ucuauacugacccuuguau

SEQ ID NO: 1810523 - RNA, 19 nt, Artificial Sequence
  Description of Artificial Sequence: Synthetic oligonucleotide
gagaugcgaacuuugacug

SEQ ID NO: 1810524 - RNA, 19 nt, Artificial Sequence
  Description of Artificial Sequence: Synthetic oligonucleotide
guugaaacgacaauacuug

SEQ ID NO: 1810525 - RNA, 19 nt, Artificial Sequence
  Description of Artificial Sequence: Synthetic oligonucleotide
uucgaaaucuccccuuuag

SEQ ID NO: 1810526 - RNA, 19 nt, Artificial Sequence
  Description of Artificial Sequence: Synthetic oligonucleotide
uaugcuuccuuugagguca

SEQ ID NO: 1810527 - RNA, 19 nt, Artificial Sequence
  Description of Artificial Sequence: Synthetic oligonucleotide
aagaaugugcccacaugcc

SEQ ID NO: 1810528 - RNA, 19 nt, Artificial Sequence
  Description of Artificial Sequence: Synthetic oligonucleotide
gaaaugaauaaucgggauc

SEQ ID NO: 1810529 - RNA, 19 nt, Artificial Sequence
  Description of Artificial Sequence: Synthetic oligonucleotide
auaaucaucugguaacgcu

SEQ ID NO: 1810530 - RNA, 19 nt, Artificial Sequence
  Description of Artificial Sequence: Synthetic oligonucleotide
uguucgauucaugacaggc

SEQ ID NO: 1810531 - RNA, 19 nt, Artificial Sequence
  Description of Artificial Sequence: Synthetic oligonucleotide
ugaaacgacaauacuugga

SEQ ID NO: 1810532 - RNA, 19 nt, Artificial Sequence
  Description of Artificial Sequence: Synthetic oligonucleotide
aacccauauaguaauagcu

SEQ ID NO: 1810533 - RNA, 19 nt, Artificial Sequence
  Description of Artificial Sequence: Synthetic oligonucleotide
auaaucgggaucguaguac

SEQ ID NO: 1810534 - RNA, 19 nt, Artificial Sequence
  Description of Artificial Sequence: Synthetic oligonucleotide
guaaaguacccguacucgg

SEQ ID NO: 1810535 - RNA, 19 nt, Artificial Sequence
  Description of Artificial Sequence: Synthetic oligonucleotide
ucuaugcuuccuuugaggu

SEQ ID NO: 1810536 - RNA, 19 nt, Artificial Sequence
  Description of Artificial Sequence: Synthetic oligonucleotide
uggaguagaucucaccacc

SEQ ID NO: 1810537 - RNA, 19 nt, Artificial Sequence
  Description of Artificial Sequence: Synthetic oligonucleotide
caucugguaacgcuuauag

SEQ ID NO: 1810538 - RNA, 19 nt, Artificial Sequence
  Description of Artificial Sequence: Synthetic oligonucleotide
uaagaucacacuuuauauc

SEQ ID NO: 1810539 - RNA, 19 nt, Artificial Sequence
  Description of Artificial Sequence: Synthetic oligonucleotide
uacagauacacagaagaca

SEQ ID NO: 1810540 - RNA, 19 nt, Artificial Sequence
  Description of Artificial Sequence: Synthetic oligonucleotide
uuaaugcugaauagacacc

SEQ ID NO: 1810541 - RNA, 19 nt, Artificial Sequence
  Description of Artificial Sequence: Synthetic oligonucleotide
uugaaacgacaauacuugg

SEQ ID NO: 1810542 - RNA, 19 nt, Artificial Sequence
  Description of Artificial Sequence: Synthetic oligonucleotide
agcauguucgauucaugac

SEQ ID NO: 1810543 - RNA, 19 nt, Artificial Sequence
  Description of Artificial Sequence: Synthetic oligonucleotide
aguaauagcugaguugcgg

SEQ ID NO: 1810544 - RNA, 19 nt, Artificial Sequence
  Description of Artificial Sequence: Synthetic oligonucleotide
ugacccuuguaucucaucu

SEQ ID NO: 1810545 - RNA, 19 nt, Artificial Sequence
  Description of Artificial Sequence: Synthetic oligonucleotide
gaucguaguacagauacac

SEQ ID NO: 1810546 - RNA, 19 nt, Artificial Sequence
  Description of Artificial Sequence: Synthetic oligonucleotide
auaagauccugauaauccu

SEQ ID NO: 1810547 - RNA, 19 nt, Artificial Sequence
  Description of Artificial Sequence: Synthetic oligonucleotide
uuuaucagguggauccuug

SEQ ID NO: 1810548 - RNA, 19 nt, Artificial Sequence
  Description of Artificial Sequence: Synthetic oligonucleotide
cuuguuuauuaaugcaaag

SEQ ID NO: 1810549 - RNA, 19 nt, Artificial Sequence
  Description of Artificial Sequence: Synthetic oligonucleotide
uaagauccugauaauccug

SEQ ID NO: 1810550 - RNA, 19 nt, Artificial Sequence
  Description of Artificial Sequence: Synthetic oligonucleotide
gugaugguucaccagagcc

SEQ ID NO: 1810551 - RNA, 19 nt, Artificial Sequence
  Description of Artificial Sequence: Synthetic oligonucleotide
uugccuuucgaaaucuccc

SEQ ID NO: 1810552 - RNA, 19 nt, Artificial Sequence
  Description of Artificial Sequence: Synthetic oligonucleotide
ggaugaauuaauucuuuag

SEQ ID NO: 1810553 - RNA, 19 nt, Artificial Sequence
  Description of Artificial Sequence: Synthetic oligonucleotide
cauguucgauucaugacag

SEQ ID NO: 1810554 - RNA, 19 nt, Artificial Sequence
  Description of Artificial Sequence: Synthetic oligonucleotide
uagaaacccauauaguaau

SEQ ID NO: 1810555 - RNA, 19 nt, Artificial Sequence
  Description of Artificial Sequence: Synthetic oligonucleotide
gaaaucuccccuuuagcca

SEQ ID NO: 1810556 - RNA, 19 nt, Artificial Sequence
  Description of Artificial Sequence: Synthetic oligonucleotide
uugaacugaggacuuggug

SEQ ID NO: 1810557 - RNA, 19 nt, Artificial Sequence
  Description of Artificial Sequence: Synthetic oligonucleotide
ugauaauccugcacuguca

SEQ ID NO: 1810558 - RNA, 19 nt, Artificial Sequence
  Description of Artificial Sequence: Synthetic oligonucleotide
auaaacaccguaaggcagg

SEQ ID NO: 1810559 - RNA, 19 nt, Artificial Sequence
  Description of Artificial Sequence: Synthetic oligonucleotide
uuguagaauccauaggcuc

SEQ ID NO: 1810560 - RNA, 19 nt, Artificial Sequence
  Description of Artificial Sequence: Synthetic oligonucleotide
auccuugugaauaaucauc

SEQ ID NO: 1810561 - RNA, 19 nt, Artificial Sequence
  Description of Artificial Sequence: Synthetic oligonucleotide
aaacgacaauacuuggaga

SEQ ID NO: 1810562 - RNA, 19 nt, Artificial Sequence
  Description of Artificial Sequence: Synthetic oligonucleotide
uaaaguacccguacucggu

SEQ ID NO: 1810563 - RNA, 19 nt, Artificial Sequence
  Description of Artificial Sequence: Synthetic oligonucleotide
agaaaugaauaaucgggau

SEQ ID NO: 1810564 - RNA, 19 nt, Artificial Sequence
  Description of Artificial Sequence: Synthetic oligonucleotide
aauaaucgggaucguagua

SEQ ID NO: 1810565 - RNA, 19 nt, Artificial Sequence
  Description of Artificial Sequence: Synthetic oligonucleotide
uucucuauagcuuguggau

SEQ ID NO: 1810566 - RNA, 19 nt, Artificial Sequence
  Description of Artificial Sequence: Synthetic oligonucleotide
agcccaacuucucuauagc

SEQ ID NO: 1810567 - RNA, 19 nt, Artificial Sequence
  Description of Artificial Sequence: Synthetic oligonucleotide
ugcgaacuuugacugaaug

SEQ ID NO: 1810568 - RNA, 19 nt, Artificial Sequence
  Description of Artificial Sequence: Synthetic oligonucleotide
agugucuuaagaucacacu

SEQ ID NO: 1810569 - RNA, 19 nt, Artificial Sequence
  Description of Artificial Sequence: Synthetic oligonucleotide
aggagccauauccacacuc

SEQ ID NO: 1810570 - RNA, 19 nt, Artificial Sequence
  Description of Artificial Sequence: Synthetic oligonucleotide
uaaucaucugguaacgcuu

SEQ ID NO: 1810571 - RNA, 19 nt, Artificial Sequence
  Description of Artificial Sequence: Synthetic oligonucleotide
auauaguaauagcugaguu

SEQ ID NO: 1810572 - RNA, 19 nt, Artificial Sequence
  Description of Artificial Sequence: Synthetic oligonucleotide
ucucuuaaugcugaauaga

SEQ ID NO: 1810573 - RNA, 19 nt, Artificial Sequence
  Description of Artificial Sequence: Synthetic oligonucleotide
guauacugaggacagcaug

SEQ ID NO: 1810574 - RNA, 19 nt, Artificial Sequence
  Description of Artificial Sequence: Synthetic oligonucleotide
ugucuuaagaucacacuuu

SEQ ID NO: 1810575 - RNA, 19 nt, Artificial Sequence
  Description of Artificial Sequence: Synthetic oligonucleotide
ugggcacccagacauaugu

SEQ ID NO: 1810576 - RNA, 19 nt, Artificial Sequence
  Description of Artificial Sequence: Synthetic oligonucleotide
uaacuugugagaugcgaac

SEQ ID NO: 1810577 - RNA, 19 nt, Artificial Sequence
  Description of Artificial Sequence: Synthetic oligonucleotide
gggaucguaguacagauac

SEQ ID NO: 1810578 - RNA, 19 nt, Artificial Sequence
  Description of Artificial Sequence: Synthetic oligonucleotide
acgcuuauagaccugguaa

SEQ ID NO: 1810579 - RNA, 19 nt, Artificial Sequence
  Description of Artificial Sequence: Synthetic oligonucleotide
gaauagacacccaaagaca

SEQ ID NO: 1810580 - RNA, 19 nt, Artificial Sequence
  Description of Artificial Sequence: Synthetic oligonucleotide
aauagcugaguugcggugu

SEQ ID NO: 1810581 - RNA, 19 nt, Artificial Sequence
  Description of Artificial Sequence: Synthetic oligonucleotide
uguggguccugguugaaac

SEQ ID NO: 1810582 - RNA, 19 nt, Artificial Sequence
  Description of Artificial Sequence: Synthetic oligonucleotide
uucgauucaugacaggcuu

SEQ ID NO: 1810583 - RNA, 19 nt, Artificial Sequence
  Description of Artificial Sequence: Synthetic oligonucleotide
uauccaacuuguuuauuaa

SEQ ID NO: 1810584 - RNA, 19 nt, Artificial Sequence
  Description of Artificial Sequence: Synthetic oligonucleotide
guaacgcuuauagaccugg

SEQ ID NO: 1810585 - RNA, 19 nt, Artificial Sequence
  Description of Artificial Sequence: Synthetic oligonucleotide
gaaugugaugguucaccag

SEQ ID NO: 1810586 - RNA, 19 nt, Artificial Sequence
  Description of Artificial Sequence: Synthetic oligonucleotide
ugguaacgcuuauagaccu

SEQ ID NO: 1810587 - RNA, 19 nt, Artificial Sequence
  Description of Artificial Sequence: Synthetic oligonucleotide
uaauagcugaguugcggug

SEQ ID NO: 1810588 - RNA, 19 nt, Artificial Sequence
  Description of Artificial Sequence: Synthetic oligonucleotide
aaauguggcuuugaacuga

SEQ ID NO: 1810589 - RNA, 19 nt, Artificial Sequence
  Description of Artificial Sequence: Synthetic oligonucleotide
uaaucgggaucguaguaca

SEQ ID NO: 1810590 - RNA, 19 nt, Artificial Sequence
  Description of Artificial Sequence: Synthetic oligonucleotide
caguugucuaguaaaagca

SEQ ID NO: 1810591 - RNA, 19 nt, Artificial Sequence
  Description of Artificial Sequence: Synthetic oligonucleotide
gcaguugucuaguaaaagc

SEQ ID NO: 1810592 - RNA, 19 nt, Artificial Sequence
  Description of Artificial Sequence: Synthetic oligonucleotide
uugucuaguaaaagcaauu

SEQ ID NO: 1810593 - RNA, 19 nt, Artificial Sequence
  Description of Artificial Sequence: Synthetic oligonucleotide
uaguaauagcugaguugcg

SEQ ID NO: 1810594 - RNA, 19 nt, Artificial Sequence
  Description of Artificial Sequence: Synthetic oligonucleotide
ugguaagacuccugaaaug

SEQ ID NO: 1810595 - RNA, 19 nt, Artificial Sequence
  Description of Artificial Sequence: Synthetic oligonucleotide
cuauacugacccuuguauc

SEQ ID NO: 1810596 - RNA, 19 nt, Artificial Sequence
  Description of Artificial Sequence: Synthetic oligonucleotide
uccauccucggucuauaag

SEQ ID NO: 1810597 - RNA, 19 nt, Artificial Sequence
  Description of Artificial Sequence: Synthetic oligonucleotide
cuuauagaccugguaagac

SEQ ID NO: 1810598 - RNA, 19 nt, Artificial Sequence
  Description of Artificial Sequence: Synthetic oligonucleotide
ugguugaaacgacaauacu

SEQ ID NO: 1810599 - RNA, 19 nt, Artificial Sequence
  Description of Artificial Sequence: Synthetic oligonucleotide
ucuauaagauccugauaau

SEQ ID NO: 1810600 - RNA, 19 nt, Artificial Sequence
  Description of Artificial Sequence: Synthetic oligonucleotide
ucggucuauaagauccuga

SEQ ID NO: 1810601 - RNA, 19 nt, Artificial Sequence
  Description of Artificial Sequence: Synthetic oligonucleotide
cacaucgccuguaaaguac

SEQ ID NO: 1810602 - RNA, 19 nt, Artificial Sequence
  Description of Artificial Sequence: Synthetic oligonucleotide
ugccuuucgaaaucucccc

SEQ ID NO: 1810603 - RNA, 19 nt, Artificial Sequence
  Description of Artificial Sequence: Synthetic oligonucleotide
uccugauaauccugcacug

SEQ ID NO: 1810604 - RNA, 19 nt, Artificial Sequence
  Description of Artificial Sequence: Synthetic oligonucleotide
cugauaauccugcacuguc

SEQ ID NO: 1810605 - RNA, 19 nt, Artificial Sequence
  Description of Artificial Sequence: Synthetic oligonucleotide
aacgcuuauagaccuggua

SEQ ID NO: 1810606 - RNA, 19 nt, Artificial Sequence
  Description of Artificial Sequence: Synthetic oligonucleotide
agaucucaccacccucacc

SEQ ID NO: 1810607 - RNA, 19 nt, Artificial Sequence
  Description of Artificial Sequence: Synthetic oligonucleotide
cuguaaaguacccguacuc

SEQ ID NO: 1810608 - RNA, 19 nt, Artificial Sequence
  Description of Artificial Sequence: Synthetic oligonucleotide
caucaagccaguacugcug

SEQ ID NO: 1810609 - RNA, 19 nt, Artificial Sequence
  Description of Artificial Sequence: Synthetic oligonucleotide
uggauccuugugaauaauc

SEQ ID NO: 1810610 - RNA, 19 nt, Artificial Sequence
  Description of Artificial Sequence: Synthetic oligonucleotide
ucgccuguaaaguacccgu

SEQ ID NO: 1810611 - RNA, 19 nt, Artificial Sequence
  Description of Artificial Sequence: Synthetic oligonucleotide
auuguagaauccauaggcu

SEQ ID NO: 1810612 - RNA, 19 nt, Artificial Sequence
  Description of Artificial Sequence: Synthetic oligonucleotide
auaguauacugaggacagc

SEQ ID NO: 1810613 - RNA, 19 nt, Artificial Sequence
  Description of Artificial Sequence: Synthetic oligonucleotide
cuuguacacauauuuccca

SEQ ID NO: 1810614 - RNA, 19 nt, Artificial Sequence
  Description of Artificial Sequence: Synthetic oligonucleotide
uaaacaccguaaggcaggg

SEQ ID NO: 1810615 - RNA, 19 nt, Artificial Sequence
  Description of Artificial Sequence: Synthetic oligonucleotide
ugucuaguaaaagcaauuu

SEQ ID NO: 1810616 - RNA, 19 nt, Artificial Sequence
  Description of Artificial Sequence: Synthetic oligonucleotide
acccauauaguaauagcug

SEQ ID NO: 1810617 - RNA, 19 nt, Artificial Sequence
  Description of Artificial Sequence: Synthetic oligonucleotide
ugggaggaugucuaucaca

SEQ ID NO: 1810618 - RNA, 19 nt, Artificial Sequence
  Description of Artificial Sequence: Synthetic oligonucleotide
cauaugucucaggacacag

SEQ ID NO: 1810619 - RNA, 19 nt, Artificial Sequence
  Description of Artificial Sequence: Synthetic oligonucleotide
auaugucucaggacacagc

SEQ ID NO: 1810620 - RNA, 19 nt, Artificial Sequence
  Description of Artificial Sequence: Synthetic oligonucleotide
uggaugaauuaauucuuua

SEQ ID NO: 1810621 - RNA, 19 nt, Artificial Sequence
  Description of Artificial Sequence: Synthetic oligonucleotide
uccugcacugucaaagaau

SEQ ID NO: 1810622 - RNA, 19 nt, Artificial Sequence
  Description of Artificial Sequence: Synthetic oligonucleotide
ugaguugcgguguuuucuc

SEQ ID NO: 1810623 - RNA, 19 nt, Artificial Sequence
  Description of Artificial Sequence: Synthetic oligonucleotide
ugucuaucacacccacagc

SEQ ID NO: 1810624 - RNA, 19 nt, Artificial Sequence
  Description of Artificial Sequence: Synthetic oligonucleotide
ucgauucaugacaggcuug

SEQ ID NO: 1810625 - RNA, 19 nt, Artificial Sequence
  Description of Artificial Sequence: Synthetic oligonucleotide
guagaaacccauauaguaa

SEQ ID NO: 1810626 - RNA, 19 nt, Artificial Sequence
  Description of Artificial Sequence: Synthetic oligonucleotide
gcauguucgauucaugaca

SEQ ID NO: 1810627 - RNA, 19 nt, Artificial Sequence
  Description of Artificial Sequence: Synthetic oligonucleotide
aaguacccguacucgguca

SEQ ID NO: 1810628 - RNA, 19 nt, Artificial Sequence
  Description of Artificial Sequence: Synthetic oligonucleotide
cagacauaugucucaggac

SEQ ID NO: 1810629 - RNA, 19 nt, Artificial Sequence
  Description of Artificial Sequence: Synthetic oligonucleotide
auagaccugguaagacucc

SEQ ID NO: 1810630 - RNA, 19 nt, Artificial Sequence
  Description of Artificial Sequence: Synthetic oligonucleotide
acaauacuuggagauguca

SEQ ID NO: 1810631 - RNA, 19 nt, Artificial Sequence
  Description of Artificial Sequence: Synthetic oligonucleotide
gaauaaucgggaucguagu

SEQ ID NO: 1810632 - RNA, 19 nt, Artificial Sequence
  Description of Artificial Sequence: Synthetic oligonucleotide
uuaucagguggauccuugu

SEQ ID NO: 1810633 - RNA, 19 nt, Artificial Sequence
  Description of Artificial Sequence: Synthetic oligonucleotide
ucgggaucguaguacagau

SEQ ID NO: 1810634 - RNA, 19 nt, Artificial Sequence
  Description of Artificial Sequence: Synthetic oligonucleotide
cgaaaucuccccuuuagcc

SEQ ID NO: 1810635 - RNA, 19 nt, Artificial Sequence
  Description of Artificial Sequence: Synthetic oligonucleotide
gacauaugucucaggacac

SEQ ID NO: 1810636 - RNA, 19 nt, Artificial Sequence
  Description of Artificial Sequence: Synthetic oligonucleotide
aguacccguacucggucag

SEQ ID NO: 1810637 - RNA, 19 nt, Artificial Sequence
  Description of Artificial Sequence: Synthetic oligonucleotide
aaugggcacccagacauau

SEQ ID NO: 1810638 - RNA, 19 nt, Artificial Sequence
  Description of Artificial Sequence: Synthetic oligonucleotide
gguucuucuuauaaacacc

SEQ ID NO: 1810639 - RNA, 19 nt, Artificial Sequence
  Description of Artificial Sequence: Synthetic oligonucleotide
ucccaucaagccaguacug

SEQ ID NO: 1810640 - RNA, 19 nt, Artificial Sequence
  Description of Artificial Sequence: Synthetic oligonucleotide
aaggucuauacugacccuu

SEQ ID NO: 1810641 - RNA, 19 nt, Artificial Sequence
  Description of Artificial Sequence: Synthetic oligonucleotide
ugguggaguagaucucacc

SEQ ID NO: 1810642 - RNA, 19 nt, Artificial Sequence
  Description of Artificial Sequence: Synthetic oligonucleotide
aaugaauaaucgggaucgu

SEQ ID NO: 1810643 - RNA, 19 nt, Artificial Sequence
  Description of Artificial Sequence: Synthetic oligonucleotide
aucgccuguaaaguacccg

SEQ ID NO: 1810644 - RNA, 19 nt, Artificial Sequence
  Description of Artificial Sequence: Synthetic oligonucleotide
guacagauacacagaagac

SEQ ID NO: 1810645 - RNA, 19 nt, Artificial Sequence
  Description of Artificial Sequence: Synthetic oligonucleotide
auccucggucuauaagauc

SEQ ID NO: 1810646 - RNA, 19 nt, Artificial Sequence
  Description of Artificial Sequence: Synthetic oligonucleotide
gaauccauaggcucauccu

SEQ ID NO: 1810647 - RNA, 19 nt, Artificial Sequence
  Description of Artificial Sequence: Synthetic oligonucleotide
uacccguacucggucaggg

SEQ ID NO: 1810648 - RNA, 19 nt, Artificial Sequence
  Description of Artificial Sequence: Synthetic oligonucleotide
aaacaccguaaggcagggc

SEQ ID NO: 1810649 - RNA, 19 nt, Artificial Sequence
  Description of Artificial Sequence: Synthetic oligonucleotide
acaguaugggaggaugucu

SEQ ID NO: 1810650 - RNA, 19 nt, Artificial Sequence
  Description of Artificial Sequence: Synthetic oligonucleotide
augacaccuuauaguauac

SEQ ID NO: 1810651 - RNA, 19 nt, Artificial Sequence
  Description of Artificial Sequence: Synthetic oligonucleotide
gaugcgaacuuugacugaa

SEQ ID NO: 1810652 - RNA, 19 nt, Artificial Sequence
  Description of Artificial Sequence: Synthetic oligonucleotide
aggcuuguacacauauuuc

SEQ ID NO: 1810653 - RNA, 19 nt, Artificial Sequence
  Description of Artificial Sequence: Synthetic oligonucleotide
aucugguaacgcuuauaga

SEQ ID NO: 1810654 - RNA, 19 nt, Artificial Sequence
  Description of Artificial Sequence: Synthetic oligonucleotide
uuagcagggugcucugccu

SEQ ID NO: 1810655 - RNA, 19 nt, Artificial Sequence
  Description of Artificial Sequence: Synthetic oligonucleotide
auguucgauucaugacagg

SEQ ID NO: 1810656 - RNA, 19 nt, Artificial Sequence
  Description of Artificial Sequence: Synthetic oligonucleotide
gcaauuucucuuaaugcug

SEQ ID NO: 1810657 - RNA, 19 nt, Artificial Sequence
  Description of Artificial Sequence: Synthetic oligonucleotide
cagcauguucgauucauga

SEQ ID NO: 1810658 - RNA, 19 nt, Artificial Sequence
  Description of Artificial Sequence: Synthetic oligonucleotide
cguaaggcagggcacaucg

SEQ ID NO: 1810659 - RNA, 19 nt, Artificial Sequence
  Description of Artificial Sequence: Synthetic oligonucleotide
cugagugucuuaagaucac

SEQ ID NO: 1810660 - RNA, 19 nt, Artificial Sequence
  Description of Artificial Sequence: Synthetic oligonucleotide
uacugacccuuguaucuca

SEQ ID NO: 1810661 - RNA, 19 nt, Artificial Sequence
  Description of Artificial Sequence: Synthetic oligonucleotide
aaucgggaucguaguacag

SEQ ID NO: 1810662 - RNA, 19 nt, Artificial Sequence
  Description of Artificial Sequence: Synthetic oligonucleotide
aguugucuaguaaaagcaa

SEQ ID NO: 1810663 - RNA, 19 nt, Artificial Sequence
  Description of Artificial Sequence: Synthetic oligonucleotide
auguagaaacccauauagu

SEQ ID NO: 1810664 - RNA, 19 nt, Artificial Sequence
  Description of Artificial Sequence: Synthetic oligonucleotide
guaagacuccugaaaugug

SEQ ID NO: 1810665 - RNA, 19 nt, Artificial Sequence
  Description of Artificial Sequence: Synthetic oligonucleotide
cucuaacuugugagaugcg

SEQ ID NO: 1810666 - RNA, 19 nt, Artificial Sequence
  Description of Artificial Sequence: Synthetic oligonucleotide
acgacaauacuuggagaug

SEQ ID NO: 1810667 - RNA, 19 nt, Artificial Sequence
  Description of Artificial Sequence: Synthetic oligonucleotide
cucucuaugcuuccuuuga

SEQ ID NO: 1810668 - RNA, 19 nt, Artificial Sequence
  Description of Artificial Sequence: Synthetic oligonucleotide
uaacgcuuauagaccuggu

SEQ ID NO: 1810669 - RNA, 19 nt, Artificial Sequence
  Description of Artificial Sequence: Synthetic oligonucleotide
aguaugggaggaugucuau

SEQ ID NO: 1810670 - RNA, 19 nt, Artificial Sequence
  Description of Artificial Sequence: Synthetic oligonucleotide
ugcccuacaaggucugcau

SEQ ID NO: 1810671 - RNA, 19 nt, Artificial Sequence
  Description of Artificial Sequence: Synthetic oligonucleotide
uugguuuaucagguggauc

SEQ ID NO: 1810672 - RNA, 19 nt, Artificial Sequence
  Description of Artificial Sequence: Synthetic oligonucleotide
aguugcgguguuuucucau

SEQ ID NO: 1810673 - RNA, 19 nt, Artificial Sequence
  Description of Artificial Sequence: Synthetic oligonucleotide
augugaugguucaccagag

SEQ ID NO: 1810674 - RNA, 19 nt, Artificial Sequence
  Description of Artificial Sequence: Synthetic oligonucleotide
agaugcgaacuuugacuga

SEQ ID NO: 1810675 - RNA, 19 nt, Artificial Sequence
  Description of Artificial Sequence: Synthetic oligonucleotide
gugaaaggagccauaucca

SEQ ID NO: 1810676 - RNA, 19 nt, Artificial Sequence
  Description of Artificial Sequence: Synthetic oligonucleotide
gucaggguccuuacugcgg

SEQ ID NO: 1810677 - RNA, 19 nt, Artificial Sequence
  Description of Artificial Sequence: Synthetic oligonucleotide
acaccguaaggcagggcac

SEQ ID NO: 1810678 - RNA, 19 nt, Artificial Sequence
  Description of Artificial Sequence: Synthetic oligonucleotide
gguaagacuccugaaaugu

SEQ ID NO: 1810679 - RNA, 19 nt, Artificial Sequence
  Description of Artificial Sequence: Synthetic oligonucleotide
ccauccucggucuauaaga

SEQ ID NO: 1810680 - RNA, 19 nt, Artificial Sequence
  Description of Artificial Sequence: Synthetic oligonucleotide
cccuacaaggucugcauac

SEQ ID NO: 1810681 - RNA, 19 nt, Artificial Sequence
  Description of Artificial Sequence: Synthetic oligonucleotide
uucacucucuaugcuuccu

SEQ ID NO: 1810682 - RNA, 19 nt, Artificial Sequence
  Description of Artificial Sequence: Synthetic oligonucleotide
agaucacacuuuauaucca

SEQ ID NO: 1810683 - RNA, 19 nt, Artificial Sequence
  Description of Artificial Sequence: Synthetic oligonucleotide
ggaugucuaucacacccac

SEQ ID NO: 1810684 - RNA, 19 nt, Artificial Sequence
  Description of Artificial Sequence: Synthetic oligonucleotide
augaauguagaaacccaua

SEQ ID NO: 1810685 - RNA, 19 nt, Artificial Sequence
  Description of Artificial Sequence: Synthetic oligonucleotide
augaauaaucgggaucgua

SEQ ID NO: 1810686 - RNA, 19 nt, Artificial Sequence
  Description of Artificial Sequence: Synthetic oligonucleotide
aggucuauacugacccuug

SEQ ID NO: 1810687 - RNA, 19 nt, Artificial Sequence
  Description of Artificial Sequence: Synthetic oligonucleotide
caggcuuguacacauauuu

SEQ ID NO: 1810688 - RNA, 19 nt, Artificial Sequence
  Description of Artificial Sequence: Synthetic oligonucleotide
agcgaccuccucccuuggg

SEQ ID NO: 1810689 - RNA, 19 nt, Artificial Sequence
  Description of Artificial Sequence: Synthetic oligonucleotide
gcaaaggaaucuugugaac

SEQ ID NO: 1810690 - RNA, 19 nt, Artificial Sequence
  Description of Artificial Sequence: Synthetic oligonucleotide
gaggacagcauguucgauu

SEQ ID NO: 1810691 - RNA, 19 nt, Artificial Sequence
  Description of Artificial Sequence: Synthetic oligonucleotide
gguugaaacgacaauacuu

SEQ ID NO: 1810692 - RNA, 19 nt, Artificial Sequence
  Description of Artificial Sequence: Synthetic oligonucleotide
gugaacuggcucacaguug

SEQ ID NO: 1810693 - RNA, 19 nt, Artificial Sequence
  Description of Artificial Sequence: Synthetic oligonucleotide
caguaugggaggaugucua

SEQ ID NO: 1810694 - RNA, 19 nt, Artificial Sequence
  Description of Artificial Sequence: Synthetic oligonucleotide
gucuauacugacccuugua

SEQ ID NO: 1810695 - RNA, 19 nt, Artificial Sequence
  Description of Artificial Sequence: Synthetic oligonucleotide
ucuauagcuuguggaugaa

SEQ ID NO: 1810696 - RNA, 19 nt, Artificial Sequence
  Description of Artificial Sequence: Synthetic oligonucleotide
cgcuuauagaccugguaag

SEQ ID NO: 1810697 - RNA, 19 nt, Artificial Sequence
  Description of Artificial Sequence: Synthetic oligonucleotide
gaguugcgguguuuucuca

SEQ ID NO: 1810698 - RNA, 19 nt, Artificial Sequence
  Description of Artificial Sequence: Synthetic oligonucleotide
agcuuguggaugaauuaau

SEQ ID NO: 1810699 - RNA, 19 nt, Artificial Sequence
  Description of Artificial Sequence: Synthetic oligonucleotide
guugucuaguaaaagcaau

SEQ ID NO: 1810700 - RNA, 19 nt, Artificial Sequence
  Description of Artificial Sequence: Synthetic oligonucleotide
gccuccaauggugagcugc

SEQ ID NO: 1810701 - RNA, 19 nt, Artificial Sequence
  Description of Artificial Sequence: Synthetic oligonucleotide
cucggucuauaagauccug

SEQ ID NO: 1810702 - RNA, 19 nt, Artificial Sequence
  Description of Artificial Sequence: Synthetic oligonucleotide
cucaaugggcacccagaca

SEQ ID NO: 1810703 - RNA, 19 nt, Artificial Sequence
  Description of Artificial Sequence: Synthetic oligonucleotide
gcuuauagaccugguaaga

SEQ ID NO: 1810704 - RNA, 19 nt, Artificial Sequence
  Description of Artificial Sequence: Synthetic oligonucleotide
cccuuuagccagaaauuuc

SEQ ID NO: 1810705 - RNA, 19 nt, Artificial Sequence
  Description of Artificial Sequence: Synthetic oligonucleotide
acugcggccuucauccacu

SEQ ID NO: 1810706 - RNA, 19 nt, Artificial Sequence
  Description of Artificial Sequence: Synthetic oligonucleotide
cuucugcccuacaaggucu

SEQ ID NO: 1810707 - RNA, 19 nt, Artificial Sequence
  Description of Artificial Sequence: Synthetic oligonucleotide
ggcacccagacauaugucu

SEQ ID NO: 1810708 - RNA, 19 nt, Artificial Sequence
  Description of Artificial Sequence: Synthetic oligonucleotide
guucgauucaugacaggcu

SEQ ID NO: 1810709 - RNA, 19 nt, Artificial Sequence
  Description of Artificial Sequence: Synthetic oligonucleotide
ucugcccuacaaggucugc

SEQ ID NO: 1810710 - RNA, 19 nt, Artificial Sequence
  Description of Artificial Sequence: Synthetic oligonucleotide
agccaguacugcuggugaa

SEQ ID NO: 1810711 - RNA, 19 nt, Artificial Sequence
  Description of Artificial Sequence: Synthetic oligonucleotide
agagcccaacuucucuaua

SEQ ID NO: 1810712 - RNA, 19 nt, Artificial Sequence
  Description of Artificial Sequence: Synthetic oligonucleotide
ccugguaagacuccugaaa

SEQ ID NO: 1810713 - RNA, 19 nt, Artificial Sequence
  Description of Artificial Sequence: Synthetic oligonucleotide
agaaacccauauaguaaua

SEQ ID NO: 1810714 - RNA, 19 nt, Artificial Sequence
  Description of Artificial Sequence: Synthetic oligonucleotide
cuggcucacaguugguuua

SEQ ID NO: 1810715 - RNA, 19 nt, Artificial Sequence
  Description of Artificial Sequence: Synthetic oligonucleotide
uuguggguccugguugaaa

SEQ ID NO: 1810716 - RNA, 19 nt, Artificial Sequence
  Description of Artificial Sequence: Synthetic oligonucleotide
guaaggcagggcacaucgc

SEQ ID NO: 1810717 - RNA, 19 nt, Artificial Sequence
  Description of Artificial Sequence: Synthetic oligonucleotide
ggucuauaagauccugaua

SEQ ID NO: 1810718 - RNA, 19 nt, Artificial Sequence
  Description of Artificial Sequence: Synthetic oligonucleotide
guccugguugaaacgacaa

SEQ ID NO: 1810719 - RNA, 19 nt, Artificial Sequence
  Description of Artificial Sequence: Synthetic oligonucleotide
aaucuccccuuuagccaga

SEQ ID NO: 1810720 - RNA, 19 nt, Artificial Sequence
  Description of Artificial Sequence: Synthetic oligonucleotide
gguaacgcuuauagaccug

SEQ ID NO: 1810721 - RNA, 19 nt, Artificial Sequence
  Description of Artificial Sequence: Synthetic oligonucleotide
acccguacucggucagggu

SEQ ID NO: 1810722 - RNA, 19 nt, Artificial Sequence
  Description of Artificial Sequence: Synthetic oligonucleotide
cccguacucggucaggguc

SEQ ID NO: 1810723 - RNA, 19 nt, Artificial Sequence
  Description of Artificial Sequence: Synthetic oligonucleotide
auguggcuuugaacugagg

SEQ ID NO: 1810724 - RNA, 19 nt, Artificial Sequence
  Description of Artificial Sequence: Synthetic oligonucleotide
ccuuacugcggccuucauc

SEQ ID NO: 1810725 - RNA, 19 nt, Artificial Sequence
  Description of Artificial Sequence: Synthetic oligonucleotide
cuaucacacccacagcaau

SEQ ID NO: 1810726 - RNA, 19 nt, Artificial Sequence
  Description of Artificial Sequence: Synthetic oligonucleotide
cauccucggucuauaagau

SEQ ID NO: 1810727 - RNA, 19 nt, Artificial Sequence
  Description of Artificial Sequence: Synthetic oligonucleotide
cugaguugcgguguuuucu

SEQ ID NO: 1810728 - RNA, 19 nt, Artificial Sequence
  Description of Artificial Sequence: Synthetic oligonucleotide
ggugagcugcaaaggaauc

SEQ ID NO: 1810729 - RNA, 19 nt, Artificial Sequence
  Description of Artificial Sequence: Synthetic oligonucleotide
ucuccccuuuagccagaaa

SEQ ID NO: 1810730 - RNA, 19 nt, Artificial Sequence
  Description of Artificial Sequence: Synthetic oligonucleotide
cccagacauaugucucagg

SEQ ID NO: 1810731 - RNA, 19 nt, Artificial Sequence
  Description of Artificial Sequence: Synthetic oligonucleotide
uagaauccauaggcucauc

SEQ ID NO: 1810732 - RNA, 19 nt, Artificial Sequence
  Description of Artificial Sequence: Synthetic oligonucleotide
acaggcuuguacacauauu

SEQ ID NO: 1810733 - RNA, 19 nt, Artificial Sequence
  Description of Artificial Sequence: Synthetic oligonucleotide
gcugaguugcgguguuuuc

SEQ ID NO: 1810734 - RNA, 19 nt, Artificial Sequence
  Description of Artificial Sequence: Synthetic oligonucleotide
cugcccuacaaggucugca

SEQ ID NO: 1810735 - RNA, 19 nt, Artificial Sequence
  Description of Artificial Sequence: Synthetic oligonucleotide
guugguuuaucagguggau

SEQ ID NO: 1810736 - RNA, 19 nt, Artificial Sequence
  Description of Artificial Sequence: Synthetic oligonucleotide
augucucaggacacagcaa

SEQ ID NO: 1810737 - RNA, 19 nt, Artificial Sequence
  Description of Artificial Sequence: Synthetic oligonucleotide
caccguaaggcagggcaca

SEQ ID NO: 1810738 - RNA, 19 nt, Artificial Sequence
  Description of Artificial Sequence: Synthetic oligonucleotide
cugcggccuucauccacug

SEQ ID NO: 1810739 - RNA, 19 nt, Artificial Sequence
  Description of Artificial Sequence: Synthetic oligonucleotide
acugacccuuguaucucau

SEQ ID NO: 1810740 - RNA, 19 nt, Artificial Sequence
  Description of Artificial Sequence: Synthetic oligonucleotide
ccauuagcagggugcucug

SEQ ID NO: 1810741 - RNA, 19 nt, Artificial Sequence
  Description of Artificial Sequence: Synthetic oligonucleotide
cuugugagaugcgaacuuu

SEQ ID NO: 1810742 - RNA, 19 nt, Artificial Sequence
  Description of Artificial Sequence: Synthetic oligonucleotide
cacucucuaugcuuccuuu

SEQ ID NO: 1810743 - RNA, 19 nt, Artificial Sequence
  Description of Artificial Sequence: Synthetic oligonucleotide
gcauccuccauuguagaau

SEQ ID NO: 1810744 - RNA, 19 nt, Artificial Sequence
  Description of Artificial Sequence: Synthetic oligonucleotide
guuuaucagguggauccuu

SEQ ID NO: 1810745 - RNA, 19 nt, Artificial Sequence
  Description of Artificial Sequence: Synthetic oligonucleotide
cagggcacaucgccuguaa

SEQ ID NO: 1810746 - RNA, 19 nt, Artificial Sequence
  Description of Artificial Sequence: Synthetic oligonucleotide
ggucuauacugacccuugu

SEQ ID NO: 1810747 - RNA, 19 nt, Artificial Sequence
  Description of Artificial Sequence: Synthetic oligonucleotide
gguucaccagagcccaacu

SEQ ID NO: 1810748 - RNA, 19 nt, Artificial Sequence
  Description of Artificial Sequence: Synthetic oligonucleotide
cagagcccaacuucucuau

SEQ ID NO: 1810749 - RNA, 19 nt, Artificial Sequence
  Description of Artificial Sequence: Synthetic oligonucleotide
ggguccugguugaaacgac

SEQ ID NO: 1810750 - RNA, 19 nt, Artificial Sequence
  Description of Artificial Sequence: Synthetic oligonucleotide
cuauagcuuguggaugaau

SEQ ID NO: 1810751 - RNA, 19 nt, Artificial Sequence
  Description of Artificial Sequence: Synthetic oligonucleotide
gguuuaucagguggauccu

SEQ ID NO: 1810752 - RNA, 19 nt, Artificial Sequence
  Description of Artificial Sequence: Synthetic oligonucleotide
cccuugggucuucuuggug

SEQ ID NO: 1810753 - RNA, 19 nt, Artificial Sequence
  Description of Artificial Sequence: Synthetic oligonucleotide
gcgaccuccucccuugggu

SEQ ID NO: 1810754 - RNA, 19 nt, Artificial Sequence
  Description of Artificial Sequence: Synthetic oligonucleotide
gccaguacugcuggugaaa

SEQ ID NO: 1810755 - RNA, 19 nt, Artificial Sequence
  Description of Artificial Sequence: Synthetic oligonucleotide
gcuuguggaugaauuaauu

SEQ ID NO: 1810756 - RNA, 19 nt, Artificial Sequence
  Description of Artificial Sequence: Synthetic oligonucleotide
cgacaauacuuggagaugu

SEQ ID NO: 1810757 - RNA, 19 nt, Artificial Sequence
  Description of Artificial Sequence: Synthetic oligonucleotide
gaacuggcucacaguuggu

SEQ ID NO: 1810758 - RNA, 19 nt, Artificial Sequence
  Description of Artificial Sequence: Synthetic oligonucleotide
cucggucaggguccuuacu

SEQ ID NO: 1810759 - RNA, 19 nt, Artificial Sequence
  Description of Artificial Sequence: Synthetic oligonucleotide
cuuguggguccugguugaa

SEQ ID NO: 1810760 - RNA, 19 nt, Artificial Sequence
  Description of Artificial Sequence: Synthetic oligonucleotide
gcccuacaaggucugcaua

SEQ ID NO: 1810761 - RNA, 19 nt, Artificial Sequence
  Description of Artificial Sequence: Synthetic oligonucleotide
gccagaaauuucagcauuu

SEQ ID NO: 1810762 - RNA, 19 nt, Artificial Sequence
  Description of Artificial Sequence: Synthetic oligonucleotide
ccauaggcucauccucaca

SEQ ID NO: 1810763 - RNA, 19 nt, Artificial Sequence
  Description of Artificial Sequence: Synthetic oligonucleotide
gcuggugaaaggagccaua

SEQ ID NO: 1810764 - RNA, 19 nt, Artificial Sequence
  Description of Artificial Sequence: Synthetic oligonucleotide
ccugauaauccugcacugu

SEQ ID NO: 1810765 - RNA, 19 nt, Artificial Sequence
  Description of Artificial Sequence: Synthetic oligonucleotide
augguucaccagagcccaa

SEQ ID NO: 1810766 - RNA, 19 nt, Artificial Sequence
  Description of Artificial Sequence: Synthetic oligonucleotide
ccacccucaccucuaacuu

SEQ ID NO: 1810767 - RNA, 19 nt, Artificial Sequence
  Description of Artificial Sequence: Synthetic oligonucleotide
ccguaaggcagggcacauc

SEQ ID NO: 1810768 - RNA, 19 nt, Artificial Sequence
  Description of Artificial Sequence: Synthetic oligonucleotide
ggucacugcugagugucuu

SEQ ID NO: 1810769 - RNA, 19 nt, Artificial Sequence
  Description of Artificial Sequence: Synthetic oligonucleotide
cgccuguaaaguacccgua

SEQ ID NO: 1810770 - RNA, 19 nt, Artificial Sequence
  Description of Artificial Sequence: Synthetic oligonucleotide
cgggaucguaguacagaua

SEQ ID NO: 1810771 - RNA, 19 nt, Artificial Sequence
  Description of Artificial Sequence: Synthetic oligonucleotide
gcacagcgaccuccucccu

SEQ ID NO: 1810772 - RNA, 19 nt, Artificial Sequence
  Description of Artificial Sequence: Synthetic oligonucleotide
aaaagaauuaucuaaaccc

SEQ ID NO: 1810773 - RNA, 19 nt, Artificial Sequence
  Description of Artificial Sequence: Synthetic oligonucleotide
uuuauuuuaaugaagcugg

SEQ ID NO: 1810774 - RNA, 19 nt, Artificial Sequence
  Description of Artificial Sequence: Synthetic oligonucleotide
ucuuuuaucaucacaaacg

SEQ ID NO: 1810775 - RNA, 19 nt, Artificial Sequence
  Description of Artificial Sequence: Synthetic oligonucleotide
aauucagauuaccagaugg

SEQ ID NO: 1810776 - RNA, 19 nt, Artificial Sequence
  Description of Artificial Sequence: Synthetic oligonucleotide
auuuuaaugaagcugguac

SEQ ID NO: 1810777 - RNA, 19 nt, Artificial Sequence
  Description of Artificial Sequence: Synthetic oligonucleotide
uuuaucaucacaaacguga

SEQ ID NO: 1810778 - RNA, 19 nt, Artificial Sequence
  Description of Artificial Sequence: Synthetic oligonucleotide
aauaaugaauauugaacac

SEQ ID NO: 1810779 - RNA, 19 nt, Artificial Sequence
  Description of Artificial Sequence: Synthetic oligonucleotide
uuuaaaaguagcuucaagc

SEQ ID NO: 1810780 - RNA, 19 nt, Artificial Sequence
  Description of Artificial Sequence: Synthetic oligonucleotide
aauucucugaccuucaaag

SEQ ID NO: 1810781 - RNA, 19 nt, Artificial Sequence
  Description of Artificial Sequence: Synthetic oligonucleotide
aauaacuguuacuaacugc

SEQ ID NO: 1810782 - RNA, 19 nt, Artificial Sequence
  Description of Artificial Sequence: Synthetic oligonucleotide
auaacuuugaguuuaaugu

SEQ ID NO: 1810783 - RNA, 19 nt, Artificial Sequence
  Description of Artificial Sequence: Synthetic oligonucleotide
uggaguaugauuaucagca

SEQ ID NO: 1810784 - RNA, 19 nt, Artificial Sequence
  Description of Artificial Sequence: Synthetic oligonucleotide
aauauugaacacuagaauu

SEQ ID NO: 1810785 - RNA, 19 nt, Artificial Sequence
  Description of Artificial Sequence: Synthetic oligonucleotide
aaaaucacaguccaggagu

SEQ ID NO: 1810786 - RNA, 19 nt, Artificial Sequence
  Description of Artificial Sequence: Synthetic oligonucleotide
aaucaaaaggagcaguguc

SEQ ID NO: 1810787 - RNA, 19 nt, Artificial Sequence
  Description of Artificial Sequence: Synthetic oligonucleotide
ugaaacaacugcaugcugg

SEQ ID NO: 1810788 - RNA, 19 nt, Artificial Sequence
  Description of Artificial Sequence: Synthetic oligonucleotide
aaggucauaggaaagcucc

SEQ ID NO: 1810789 - RNA, 19 nt, Artificial Sequence
  Description of Artificial Sequence: Synthetic oligonucleotide
gacaguaugacucuuugag

SEQ ID NO: 1810790 - RNA, 19 nt, Artificial Sequence
  Description of Artificial Sequence: Synthetic oligonucleotide
auguauuucacugcuaucc

SEQ ID NO: 1810791 - RNA, 19 nt, Artificial Sequence
  Description of Artificial Sequence: Synthetic oligonucleotide
uuaaaaguagcuucaagcu

SEQ ID NO: 1810792 - RNA, 19 nt, Artificial Sequence
  Description of Artificial Sequence: Synthetic oligonucleotide
uguccaauaacuuugaguu

SEQ ID NO: 1810793 - RNA, 19 nt, Artificial Sequence
  Description of Artificial Sequence: Synthetic oligonucleotide
uuaucuaaacccucgaaug

SEQ ID NO: 1810794 - RNA, 19 nt, Artificial Sequence
  Description of Artificial Sequence: Synthetic oligonucleotide
ucaagcugaggaaagauca

SEQ ID NO: 1810795 - RNA, 19 nt, Artificial Sequence
  Description of Artificial Sequence: Synthetic oligonucleotide
cuucuuauccccuaagucc

SEQ ID NO: 1810796 - RNA, 19 nt, Artificial Sequence
  Description of Artificial Sequence: Synthetic oligonucleotide
aagaagggcaauauuaagg

SEQ ID NO: 1810797 - RNA, 19 nt, Artificial Sequence
  Description of Artificial Sequence: Synthetic oligonucleotide
uaccagauggucuaaagag

SEQ ID NO: 1810798 - RNA, 19 nt, Artificial Sequence
  Description of Artificial Sequence: Synthetic oligonucleotide
aaaugcacaguccugaaaa

SEQ ID NO: 1810799 - RNA, 19 nt, Artificial Sequence
  Description of Artificial Sequence: Synthetic oligonucleotide
aauucauuggaacucccug

SEQ ID NO: 1810800 - RNA, 19 nt, Artificial Sequence
  Description of Artificial Sequence: Synthetic oligonucleotide
aaaucugucucuuccccac

SEQ ID NO: 1810801 - RNA, 19 nt, Artificial Sequence
  Description of Artificial Sequence: Synthetic oligonucleotide
aauauuaagggagcugagg

SEQ ID NO: 1810802 - RNA, 19 nt, Artificial Sequence
  Description of Artificial Sequence: Synthetic oligonucleotide
aaauguauuucacugcuau

SEQ ID NO: 1810803 - RNA, 19 nt, Artificial Sequence
  Description of Artificial Sequence: Synthetic oligonucleotide
uuuaauguauucuccuucc

SEQ ID NO: 1810804 - RNA, 19 nt, Artificial Sequence
  Description of Artificial Sequence: Synthetic oligonucleotide
ugcacaguccugaaaaggg

SEQ ID NO: 1810805 - RNA, 19 nt, Artificial Sequence
  Description of Artificial Sequence: Synthetic oligonucleotide
augauuaucagcaauucuc

SEQ ID NO: 1810806 - RNA, 19 nt, Artificial Sequence
  Description of Artificial Sequence: Synthetic oligonucleotide
caauaaugaauauugaaca

SEQ ID NO: 1810807 - RNA, 19 nt, Artificial Sequence
  Description of Artificial Sequence: Synthetic oligonucleotide
uucucugaccuucaaagag

SEQ ID NO: 1810808 - RNA, 19 nt, Artificial Sequence
  Description of Artificial Sequence: Synthetic oligonucleotide
acuaguugaucuuuuauca

SEQ ID NO: 1810809 - RNA, 19 nt, Artificial Sequence
  Description of Artificial Sequence: Synthetic oligonucleotide
uucauuuugaacaccacau

SEQ ID NO: 1810810 - RNA, 19 nt, Artificial Sequence
  Description of Artificial Sequence: Synthetic oligonucleotide
uccuugauaaacuucaauc

SEQ ID NO: 1810811 - RNA, 19 nt, Artificial Sequence
  Description of Artificial Sequence: Synthetic oligonucleotide
augaagcugguacagacgg

SEQ ID NO: 1810812 - RNA, 19 nt, Artificial Sequence
  Description of Artificial Sequence: Synthetic oligonucleotide
ucuacaaacgugauauucu

SEQ ID NO: 1810813 - RNA, 19 nt, Artificial Sequence
  Description of Artificial Sequence: Synthetic oligonucleotide
acaaaucugucucuucccc

SEQ ID NO: 1810814 - RNA, 19 nt, Artificial Sequence
  Description of Artificial Sequence: Synthetic oligonucleotide
acaaacgugaaaugcacag

SEQ ID NO: 1810815 - RNA, 19 nt, Artificial Sequence
  Description of Artificial Sequence: Synthetic oligonucleotide
uagaauucagauuaccaga

SEQ ID NO: 1810816 - RNA, 19 nt, Artificial Sequence
  Description of Artificial Sequence: Synthetic oligonucleotide
uguuacuaacugcugauga

SEQ ID NO: 1810817 - RNA, 19 nt, Artificial Sequence
  Description of Artificial Sequence: Synthetic oligonucleotide
aacucccugucuuugacag

SEQ ID NO: 1810818 - RNA, 19 nt, Artificial Sequence
  Description of Artificial Sequence: Synthetic oligonucleotide
aagggcaauauuaagggag

SEQ ID NO: 1810819 - RNA, 19 nt, Artificial Sequence
  Description of Artificial Sequence: Synthetic oligonucleotide
ucuaaagagauggagugcc

SEQ ID NO: 1810820 - RNA, 19 nt, Artificial Sequence
  Description of Artificial Sequence: Synthetic oligonucleotide
acaaacgugauauucuucu

SEQ ID NO: 1810821 - RNA, 19 nt, Artificial Sequence
  Description of Artificial Sequence: Synthetic oligonucleotide
auauuaagggagcugaggu

SEQ ID NO: 1810822 - RNA, 19 nt, Artificial Sequence
  Description of Artificial Sequence: Synthetic oligonucleotide
uuugaguuucuugagaugu

SEQ ID NO: 1810823 - RNA, 19 nt, Artificial Sequence
  Description of Artificial Sequence: Synthetic oligonucleotide
uaaugaauauugaacacua

SEQ ID NO: 1810824 - RNA, 19 nt, Artificial Sequence
  Description of Artificial Sequence: Synthetic oligonucleotide
augaauauugaacacuaga

SEQ ID NO: 1810825 - RNA, 19 nt, Artificial Sequence
  Description of Artificial Sequence: Synthetic oligonucleotide
uuuuaaugaagcugguaca

SEQ ID NO: 1810826 - RNA, 19 nt, Artificial Sequence
  Description of Artificial Sequence: Synthetic oligonucleotide
aaccugagugaauucauug

SEQ ID NO: 1810827 - RNA, 19 nt, Artificial Sequence
  Description of Artificial Sequence: Synthetic oligonucleotide
agugaauucauuggaacuc

SEQ ID NO: 1810828 - RNA, 19 nt, Artificial Sequence
  Description of Artificial Sequence: Synthetic oligonucleotide
ucagauuaccagauggucu

SEQ ID NO: 1810829 - RNA, 19 nt, Artificial Sequence
  Description of Artificial Sequence: Synthetic oligonucleotide
aaaaguuccgucucccacu

SEQ ID NO: 1810830 - RNA, 19 nt, Artificial Sequence
  Description of Artificial Sequence: Synthetic oligonucleotide
auuaucuaaacccucgaau

SEQ ID NO: 1810831 - RNA, 19 nt, Artificial Sequence
  Description of Artificial Sequence: Synthetic oligonucleotide
cuugauaaacuucaaucac

SEQ ID NO: 1810832 - RNA, 19 nt, Artificial Sequence
  Description of Artificial Sequence: Synthetic oligonucleotide
uugaacacuagaauucaga

SEQ ID NO: 1810833 - RNA, 19 nt, Artificial Sequence
  Description of Artificial Sequence: Synthetic oligonucleotide
aguuaguuguuacucucac

SEQ ID NO: 1810834 - RNA, 19 nt, Artificial Sequence
  Description of Artificial Sequence: Synthetic oligonucleotide
ugaagguuuugccuccugg

SEQ ID NO: 1810835 - RNA, 19 nt, Artificial Sequence
  Description of Artificial Sequence: Synthetic oligonucleotide
cugaccuucaaagagaaac

SEQ ID NO: 1810836 - RNA, 19 nt, Artificial Sequence
  Description of Artificial Sequence: Synthetic oligonucleotide
auuuugaacaccacauuac

SEQ ID NO: 1810837 - RNA, 19 nt, Artificial Sequence
  Description of Artificial Sequence: Synthetic oligonucleotide
uaucuaaacccucgaauga

SEQ ID NO: 1810838 - RNA, 19 nt, Artificial Sequence
  Description of Artificial Sequence: Synthetic oligonucleotide
ucuuaggacacuuucuuuc

SEQ ID NO: 1810839 - RNA, 19 nt, Artificial Sequence
  Description of Artificial Sequence: Synthetic oligonucleotide
uaaugaagcugguacagac

SEQ ID NO: 1810840 - RNA, 19 nt, Artificial Sequence
  Description of Artificial Sequence: Synthetic oligonucleotide
agaauuaucuaaacccucg

SEQ ID NO: 1810841 - RNA, 19 nt, Artificial Sequence
  Description of Artificial Sequence: Synthetic oligonucleotide
aaaauaagaagggcaauau

SEQ ID NO: 1810842 - RNA, 19 nt, Artificial Sequence
  Description of Artificial Sequence: Synthetic oligonucleotide
uucuuauccccuaaguccu

SEQ ID NO: 1810843 - RNA, 19 nt, Artificial Sequence
  Description of Artificial Sequence: Synthetic oligonucleotide
ugaccuucaaagagaaacc

SEQ ID NO: 1810844 - RNA, 19 nt, Artificial Sequence
  Description of Artificial Sequence: Synthetic oligonucleotide
acuuccgcuacguauugcg

SEQ ID NO: 1810845 - RNA, 19 nt, Artificial Sequence
  Description of Artificial Sequence: Synthetic oligonucleotide
aauuaucuaaacccucgaa

SEQ ID NO: 1810846 - RNA, 19 nt, Artificial Sequence
  Description of Artificial Sequence: Synthetic oligonucleotide
auaaugaauauugaacacu

SEQ ID NO: 1810847 - RNA, 19 nt, Artificial Sequence
  Description of Artificial Sequence: Synthetic oligonucleotide
uugaucuuuuaucaucaca

SEQ ID NO: 1810848 - RNA, 19 nt, Artificial Sequence
  Description of Artificial Sequence: Synthetic oligonucleotide
ugagugaauucauuggaac

SEQ ID NO: 1810849 - RNA, 19 nt, Artificial Sequence
  Description of Artificial Sequence: Synthetic oligonucleotide
uggucuaaagagauggagu

SEQ ID NO: 1810850 - RNA, 19 nt, Artificial Sequence
  Description of Artificial Sequence: Synthetic oligonucleotide
ucuaaacccucgaaugacc

SEQ ID NO: 1810851 - RNA, 19 nt, Artificial Sequence
  Description of Artificial Sequence: Synthetic oligonucleotide
cuaaguccucaguugaagg

SEQ ID NO: 1810852 - RNA, 19 nt, Artificial Sequence
  Description of Artificial Sequence: Synthetic oligonucleotide
gaaagcucccacuaguuga

SEQ ID NO: 1810853 - RNA, 19 nt, Artificial Sequence
  Description of Artificial Sequence: Synthetic oligonucleotide
uguugcauacacuucugca

SEQ ID NO: 1810854 - RNA, 19 nt, Artificial Sequence
  Description of Artificial Sequence: Synthetic oligonucleotide
uuggaguaugauuaucagc

SEQ ID NO: 1810855 - RNA, 19 nt, Artificial Sequence
  Description of Artificial Sequence: Synthetic oligonucleotide
aacgugaaaugcacagucc

SEQ ID NO: 1810856 - RNA, 19 nt, Artificial Sequence
  Description of Artificial Sequence: Synthetic oligonucleotide
uugacaguaugacucuuug

SEQ ID NO: 1810857 - RNA, 19 nt, Artificial Sequence
  Description of Artificial Sequence: Synthetic oligonucleotide
aaugaagcugguacagacg

SEQ ID NO: 1810858 - RNA, 19 nt, Artificial Sequence
  Description of Artificial Sequence: Synthetic oligonucleotide
aaagagaaaccugagugaa

SEQ ID NO: 1810859 - RNA, 19 nt, Artificial Sequence
  Description of Artificial Sequence: Synthetic oligonucleotide
ucugagguuuacaaaucug

SEQ ID NO: 1810860 - RNA, 19 nt, Artificial Sequence
  Description of Artificial Sequence: Synthetic oligonucleotide
gaggaaagaucauuuuccc

SEQ ID NO: 1810861 - RNA, 19 nt, Artificial Sequence
  Description of Artificial Sequence: Synthetic oligonucleotide
ucacaaacgugaaaugcac

SEQ ID NO: 1810862 - RNA, 19 nt, Artificial Sequence
  Description of Artificial Sequence: Synthetic oligonucleotide
accacauuacaaaagaacu

SEQ ID NO: 1810863 - RNA, 19 nt, Artificial Sequence
  Description of Artificial Sequence: Synthetic oligonucleotide
cucaguugaagguuuugcc

SEQ ID NO: 1810864 - RNA, 19 nt, Artificial Sequence
  Description of Artificial Sequence: Synthetic oligonucleotide
aacgugauauucuucuuuu

SEQ ID NO: 1810865 - RNA, 19 nt, Artificial Sequence
  Description of Artificial Sequence: Synthetic oligonucleotide
auuaagggagcugaggucu

SEQ ID NO: 1810866 - RNA, 19 nt, Artificial Sequence
  Description of Artificial Sequence: Synthetic oligonucleotide
uaaaauaagaagggcaaua

SEQ ID NO: 1810867 - RNA, 19 nt, Artificial Sequence
  Description of Artificial Sequence: Synthetic oligonucleotide
uuacucuuaggacacuuuc

SEQ ID NO: 1810868 - RNA, 19 nt, Artificial Sequence
  Description of Artificial Sequence: Synthetic oligonucleotide
aaacgugauauucuucuuu

SEQ ID NO: 1810869 - RNA, 19 nt, Artificial Sequence
  Description of Artificial Sequence: Synthetic oligonucleotide
cuaaacccucgaaugaccc

SEQ ID NO: 1810870 - RNA, 19 nt, Artificial Sequence
  Description of Artificial Sequence: Synthetic oligonucleotide
agaucauuuucccacaguu

SEQ ID NO: 1810871 - RNA, 19 nt, Artificial Sequence
  Description of Artificial Sequence: Synthetic oligonucleotide
uccaauaacuuugaguuua

SEQ ID NO: 1810872 - RNA, 19 nt, Artificial Sequence
  Description of Artificial Sequence: Synthetic oligonucleotide
cacaguccugaaaagggcg

SEQ ID NO: 1810873 - RNA, 19 nt, Artificial Sequence
  Description of Artificial Sequence: Synthetic oligonucleotide
aucuaaacccucgaaugac

SEQ ID NO: 1810874 - RNA, 19 nt, Artificial Sequence
  Description of Artificial Sequence: Synthetic oligonucleotide
uuuggaguuaguuguuacu

SEQ ID NO: 1810875 - RNA, 19 nt, Artificial Sequence
  Description of Artificial Sequence: Synthetic oligonucleotide
ggucuaaagagauggagug

SEQ ID NO: 1810876 - RNA, 19 nt, Artificial Sequence
  Description of Artificial Sequence: Synthetic oligonucleotide
aaugaauauugaacacuag

SEQ ID NO: 1810877 - RNA, 19 nt, Artificial Sequence
  Description of Artificial Sequence: Synthetic oligonucleotide
uugaaaacccaugucccag

SEQ ID NO: 1810878 - RNA, 19 nt, Artificial Sequence
  Description of Artificial Sequence: Synthetic oligonucleotide
uaacuuugaguuuaaugua

SEQ ID NO: 1810879 - RNA, 19 nt, Artificial Sequence
  Description of Artificial Sequence: Synthetic oligonucleotide
uccuggucagacaugguga

SEQ ID NO: 1810880 - RNA, 19 nt, Artificial Sequence
  Description of Artificial Sequence: Synthetic oligonucleotide
cacuaguugaucuuuuauc

SEQ ID NO: 1810881 - RNA, 19 nt, Artificial Sequence
  Description of Artificial Sequence: Synthetic oligonucleotide
caucuugucuacaaacgug

SEQ ID NO: 1810882 - RNA, 19 nt, Artificial Sequence
  Description of Artificial Sequence: Synthetic oligonucleotide
uaaagagauggagugccag

SEQ ID NO: 1810883 - RNA, 19 nt, Artificial Sequence
  Description of Artificial Sequence: Synthetic oligonucleotide
agcacaacaccgcggcugc

SEQ ID NO: 1810884 - RNA, 19 nt, Artificial Sequence
  Description of Artificial Sequence: Synthetic oligonucleotide
aauuggaaggucauaggaa

SEQ ID NO: 1810885 - RNA, 19 nt, Artificial Sequence
  Description of Artificial Sequence: Synthetic oligonucleotide
ucugcaugaauaacuguua

SEQ ID NO: 1810886 - RNA, 19 nt, Artificial Sequence
  Description of Artificial Sequence: Synthetic oligonucleotide
uguuacucucacuguaucu

SEQ ID NO: 1810887 - RNA, 19 nt, Artificial Sequence
  Description of Artificial Sequence: Synthetic oligonucleotide
acggugucccuugaaaacc

SEQ ID NO: 1810888 - RNA, 19 nt, Artificial Sequence
  Description of Artificial Sequence: Synthetic oligonucleotide
ugucccuugaaaacccaug

SEQ ID NO: 1810889 - RNA, 19 nt, Artificial Sequence
  Description of Artificial Sequence: Synthetic oligonucleotide
uuauuuuaaugaagcuggu

SEQ ID NO: 1810890 - RNA, 19 nt, Artificial Sequence
  Description of Artificial Sequence: Synthetic oligonucleotide
uuaucaucacaaacgugaa

SEQ ID NO: 1810891 - RNA, 19 nt, Artificial Sequence
  Description of Artificial Sequence: Synthetic oligonucleotide
uuucacugcuauccugucc

SEQ ID NO: 1810892 - RNA, 19 nt, Artificial Sequence
  Description of Artificial Sequence: Synthetic oligonucleotide
ugcaugaauaacuguuacu

SEQ ID NO: 1810893 - RNA, 19 nt, Artificial Sequence
  Description of Artificial Sequence: Synthetic oligonucleotide
uucauuggaacucccuguc

SEQ ID NO: 1810894 - RNA, 19 nt, Artificial Sequence
  Description of Artificial Sequence: Synthetic oligonucleotide
aacuuugaguuuaauguau

SEQ ID NO: 1810895 - RNA, 19 nt, Artificial Sequence
  Description of Artificial Sequence: Synthetic oligonucleotide
cuucaaagagaaaccugag

SEQ ID NO: 1810896 - RNA, 19 nt, Artificial Sequence
  Description of Artificial Sequence: Synthetic oligonucleotide
uacuaacugcugaugaaaa

SEQ ID NO: 1810897 - RNA, 19 nt, Artificial Sequence
  Description of Artificial Sequence: Synthetic oligonucleotide
gaauauugaacacuagaau

SEQ ID NO: 1810898 - RNA, 19 nt, Artificial Sequence
  Description of Artificial Sequence: Synthetic oligonucleotide
acgugaaaugcacaguccu

SEQ ID NO: 1810899 - RNA, 19 nt, Artificial Sequence
  Description of Artificial Sequence: Synthetic oligonucleotide
aagggcggccucucugugc

SEQ ID NO: 1810900 - RNA, 19 nt, Artificial Sequence
  Description of Artificial Sequence: Synthetic oligonucleotide
uccccacagcacaacaccg

SEQ ID NO: 1810901 - RNA, 19 nt, Artificial Sequence
  Description of Artificial Sequence: Synthetic oligonucleotide
agacccucagauuuuaaaa

SEQ ID NO: 1810902 - RNA, 19 nt, Artificial Sequence
  Description of Artificial Sequence: Synthetic oligonucleotide
uauuaagggagcugagguc

SEQ ID NO: 1810903 - RNA, 19 nt, Artificial Sequence
  Description of Artificial Sequence: Synthetic oligonucleotide
agaacuauuuuaaaauaaa

SEQ ID NO: 1810904 - RNA, 19 nt, Artificial Sequence
  Description of Artificial Sequence: Synthetic oligonucleotide
agugaaacaacugcaugcu

SEQ ID NO: 1810905 - RNA, 19 nt, Artificial Sequence
  Description of Artificial Sequence: Synthetic oligonucleotide
uauccuguccaauaacuuu

SEQ ID NO: 1810906 - RNA, 19 nt, Artificial Sequence
  Description of Artificial Sequence: Synthetic oligonucleotide
aguugaucuuuuaucauca

SEQ ID NO: 1810907 - RNA, 19 nt, Artificial Sequence
  Description of Artificial Sequence: Synthetic oligonucleotide
auggucuaaagagauggag

SEQ ID NO: 1810908 - RNA, 19 nt, Artificial Sequence
  Description of Artificial Sequence: Synthetic oligonucleotide
aaaaggagcagugucuguu

SEQ ID NO: 1810909 - RNA, 19 nt, Artificial Sequence
  Description of Artificial Sequence: Synthetic oligonucleotide
gaaaagggcggccucucug

SEQ ID NO: 1810910 - RNA, 19 nt, Artificial Sequence
  Description of Artificial Sequence: Synthetic oligonucleotide
uccauucccaguucuuuug

SEQ ID NO: 1810911 - RNA, 19 nt, Artificial Sequence
  Description of Artificial Sequence: Synthetic oligonucleotide
gaacaccacauuacaaaag

SEQ ID NO: 1810912 - RNA, 19 nt, Artificial Sequence
  Description of Artificial Sequence: Synthetic oligonucleotide
agaaaccugagugaauuca

SEQ ID NO: 1810913 - RNA, 19 nt, Artificial Sequence
  Description of Artificial Sequence: Synthetic oligonucleotide
cuuuggaguuaguuguuac

SEQ ID NO: 1810914 - RNA, 19 nt, Artificial Sequence
  Description of Artificial Sequence: Synthetic oligonucleotide
gaauuaucuaaacccucga

SEQ ID NO: 1810915 - RNA, 19 nt, Artificial Sequence
  Description of Artificial Sequence: Synthetic oligonucleotide
gaauucagauuaccagaug

SEQ ID NO: 1810916 - RNA, 19 nt, Artificial Sequence
  Description of Artificial Sequence: Synthetic oligonucleotide
caauuggaaggucauagga

SEQ ID NO: 1810917 - RNA, 19 nt, Artificial Sequence
  Description of Artificial Sequence: Synthetic oligonucleotide
cacagcacaacaccgcggc

SEQ ID NO: 1810918 - RNA, 19 nt, Artificial Sequence
  Description of Artificial Sequence: Synthetic oligonucleotide
uggaguuaguuguuacucu

SEQ ID NO: 1810919 - RNA, 19 nt, Artificial Sequence
  Description of Artificial Sequence: Synthetic oligonucleotide
aguuguuacucucacugua

SEQ ID NO: 1810920 - RNA, 19 nt, Artificial Sequence
  Description of Artificial Sequence: Synthetic oligonucleotide
cugucuuugacaguaugac

SEQ ID NO: 1810921 - RNA, 19 nt, Artificial Sequence
  Description of Artificial Sequence: Synthetic oligonucleotide
uucagauuaccagaugguc

SEQ ID NO: 1810922 - RNA, 19 nt, Artificial Sequence
  Description of Artificial Sequence: Synthetic oligonucleotide
uugaguuucuugagaugug

SEQ ID NO: 1810923 - RNA, 19 nt, Artificial Sequence
  Description of Artificial Sequence: Synthetic oligonucleotide
gacggugucccuugaaaac

SEQ ID NO: 1810924 - RNA, 19 nt, Artificial Sequence
  Description of Artificial Sequence: Synthetic oligonucleotide
agugccaguauucaaucuu

SEQ ID NO: 1810925 - RNA, 19 nt, Artificial Sequence
  Description of Artificial Sequence: Synthetic oligonucleotide
aguaugauuaucagcaauu

SEQ ID NO: 1810926 - RNA, 19 nt, Artificial Sequence
  Description of Artificial Sequence: Synthetic oligonucleotide
auuucacugcuauccuguc

SEQ ID NO: 1810927 - RNA, 19 nt, Artificial Sequence
  Description of Artificial Sequence: Synthetic oligonucleotide
guauuucacugcuauccug

SEQ ID NO: 1810928 - RNA, 19 nt, Artificial Sequence
  Description of Artificial Sequence: Synthetic oligonucleotide
augcacaguccugaaaagg

SEQ ID NO: 1810929 - RNA, 19 nt, Artificial Sequence
  Description of Artificial Sequence: Synthetic oligonucleotide
uaaacccucgaaugacccc

SEQ ID NO: 1810930 - RNA, 19 nt, Artificial Sequence
  Description of Artificial Sequence: Synthetic oligonucleotide
acugcuauccuguccaaua

SEQ ID NO: 1810931 - RNA, 19 nt, Artificial Sequence
  Description of Artificial Sequence: Synthetic oligonucleotide
uuguuacucucacuguauc

SEQ ID NO: 1810932 - RNA, 19 nt, Artificial Sequence
  Description of Artificial Sequence: Synthetic oligonucleotide
uuugacaguaugacucuuu

SEQ ID NO: 1810933 - RNA, 19 nt, Artificial Sequence
  Description of Artificial Sequence: Synthetic oligonucleotide
aucaaaaggagcagugucu

SEQ ID NO: 1810934 - RNA, 19 nt, Artificial Sequence
  Description of Artificial Sequence: Synthetic oligonucleotide
acaaccaauaaugaauauu

SEQ ID NO: 1810935 - RNA, 19 nt, Artificial Sequence
  Description of Artificial Sequence: Synthetic oligonucleotide
cuuuuaucaucacaaacgu

SEQ ID NO: 1810936 - RNA, 19 nt, Artificial Sequence
  Description of Artificial Sequence: Synthetic oligonucleotide
aaccaauaaugaauauuga

SEQ ID NO: 1810937 - RNA, 19 nt, Artificial Sequence
  Description of Artificial Sequence: Synthetic oligonucleotide
gugaauucauuggaacucc

SEQ ID NO: 1810938 - RNA, 19 nt, Artificial Sequence
  Description of Artificial Sequence: Synthetic oligonucleotide
aagccaucuuuggaguuag

SEQ ID NO: 1810939 - RNA, 19 nt, Artificial Sequence
  Description of Artificial Sequence: Synthetic oligonucleotide
gucuacaaacgugauauuc

SEQ ID NO: 1810940 - RNA, 19 nt, Artificial Sequence
  Description of Artificial Sequence: Synthetic oligonucleotide
uuucuugagauguguuguc

SEQ ID NO: 1810941 - RNA, 19 nt, Artificial Sequence
  Description of Artificial Sequence: Synthetic oligonucleotide
gaguuuaauguauucuccu

SEQ ID NO: 1810942 - RNA, 19 nt, Artificial Sequence
  Description of Artificial Sequence: Synthetic oligonucleotide
ugacaguaugacucuuuga

SEQ ID NO: 1810943 - RNA, 19 nt, Artificial Sequence
  Description of Artificial Sequence: Synthetic oligonucleotide
uauuuuaaugaagcuggua

SEQ ID NO: 1810944 - RNA, 19 nt, Artificial Sequence
  Description of Artificial Sequence: Synthetic oligonucleotide
gaucuuuuaucaucacaaa

SEQ ID NO: 1810945 - RNA, 19 nt, Artificial Sequence
  Description of Artificial Sequence: Synthetic oligonucleotide
ggaacuucagggccaauug

SEQ ID NO: 1810946 - RNA, 19 nt, Artificial Sequence
  Description of Artificial Sequence: Synthetic oligonucleotide
ugcuauccuguccaauaac

SEQ ID NO: 1810947 - RNA, 19 nt, Artificial Sequence
  Description of Artificial Sequence: Synthetic oligonucleotide
gauaaacuucaaucacauc

SEQ ID NO: 1810948 - RNA, 19 nt, Artificial Sequence
  Description of Artificial Sequence: Synthetic oligonucleotide
aguccugaaaagggcggcc

SEQ ID NO: 1810949 - RNA, 19 nt, Artificial Sequence
  Description of Artificial Sequence: Synthetic oligonucleotide
agauggagugccaguauuc

SEQ ID NO: 1810950 - RNA, 19 nt, Artificial Sequence
  Description of Artificial Sequence: Synthetic oligonucleotide
uucuugagauguguuguca

SEQ ID NO: 1810951 - RNA, 19 nt, Artificial Sequence
  Description of Artificial Sequence: Synthetic oligonucleotide
acuaacugcugaugaaaau

SEQ ID NO: 1810952 - RNA, 19 nt, Artificial Sequence
  Description of Artificial Sequence: Synthetic oligonucleotide
agaauucagauuaccagau

SEQ ID NO: 1810953 - RNA, 19 nt, Artificial Sequence
  Description of Artificial Sequence: Synthetic oligonucleotide
ugccaguauucaaucuuca

SEQ ID NO: 1810954 - RNA, 19 nt, Artificial Sequence
  Description of Artificial Sequence: Synthetic oligonucleotide
aguuccgucucccacugaa

SEQ ID NO: 1810955 - RNA, 19 nt, Artificial Sequence
  Description of Artificial Sequence: Synthetic oligonucleotide
agggacuuccgcuacguau

SEQ ID NO: 1810956 - RNA, 19 nt, Artificial Sequence
  Description of Artificial Sequence: Synthetic oligonucleotide
ccucagauuuuaaaaguag

SEQ ID NO: 1810957 - RNA, 19 nt, Artificial Sequence
  Description of Artificial Sequence: Synthetic oligonucleotide
ccuugauaaacuucaauca

SEQ ID NO: 1810958 - RNA, 19 nt, Artificial Sequence
  Description of Artificial Sequence: Synthetic oligonucleotide
guuacuaacugcugaugaa

SEQ ID NO: 1810959 - RNA, 19 nt, Artificial Sequence
  Description of Artificial Sequence: Synthetic oligonucleotide
guaugauuaucagcaauuc

SEQ ID NO: 1810960 - RNA, 19 nt, Artificial Sequence
  Description of Artificial Sequence: Synthetic oligonucleotide
cucacucugagguuuacaa

SEQ ID NO: 1810961 - RNA, 19 nt, Artificial Sequence
  Description of Artificial Sequence: Synthetic oligonucleotide
gccaauuggaaggucauag

SEQ ID NO: 1810962 - RNA, 19 nt, Artificial Sequence
  Description of Artificial Sequence: Synthetic oligonucleotide
cacuagaauucagauuacc

SEQ ID NO: 1810963 - RNA, 19 nt, Artificial Sequence
  Description of Artificial Sequence: Synthetic oligonucleotide
acaacaccgcggcugcagg

SEQ ID NO: 1810964 - RNA, 19 nt, Artificial Sequence
  Description of Artificial Sequence: Synthetic oligonucleotide
ggagugaaacaacugcaug

SEQ ID NO: 1810965 - RNA, 19 nt, Artificial Sequence
  Description of Artificial Sequence: Synthetic oligonucleotide
auacacuucugcaugaaua

SEQ ID NO: 1810966 - RNA, 19 nt, Artificial Sequence
  Description of Artificial Sequence: Synthetic oligonucleotide
gcaauauuaagggagcuga

SEQ ID NO: 1810967 - RNA, 19 nt, Artificial Sequence
  Description of Artificial Sequence: Synthetic oligonucleotide
ccaucuuuggaguuaguug

SEQ ID NO: 1810968 - RNA, 19 nt, Artificial Sequence
  Description of Artificial Sequence: Synthetic oligonucleotide
aguaugacucuuugaguuu

SEQ ID NO: 1810969 - RNA, 19 nt, Artificial Sequence
  Description of Artificial Sequence: Synthetic oligonucleotide
ugucuguugcauacacuuc

SEQ ID NO: 1810970 - RNA, 19 nt, Artificial Sequence
  Description of Artificial Sequence: Synthetic oligonucleotide
cuugaaaacccauguccca

SEQ ID NO: 1810971 - RNA, 19 nt, Artificial Sequence
  Description of Artificial Sequence: Synthetic oligonucleotide
uuugguccagacccucaga

SEQ ID NO: 1810972 - RNA, 19 nt, Artificial Sequence
  Description of Artificial Sequence: Synthetic oligonucleotide
agcucccacuaguugaucu

SEQ ID NO: 1810973 - RNA, 19 nt, Artificial Sequence
  Description of Artificial Sequence: Synthetic oligonucleotide
acuguaucugucaucuugu

SEQ ID NO: 1810974 - RNA, 19 nt, Artificial Sequence
  Description of Artificial Sequence: Synthetic oligonucleotide
uuccgcuacguauugcguc

SEQ ID NO: 1810975 - RNA, 19 nt, Artificial Sequence
  Description of Artificial Sequence: Synthetic oligonucleotide
auucagauuaccagauggu

SEQ ID NO: 1810976 - RNA, 19 nt, Artificial Sequence
  Description of Artificial Sequence: Synthetic oligonucleotide
cuuugaaauguauuucacu

SEQ ID NO: 1810977 - RNA, 19 nt, Artificial Sequence
  Description of Artificial Sequence: Synthetic oligonucleotide
ucccaguucuuuuggagua

SEQ ID NO: 1810978 - RNA, 19 nt, Artificial Sequence
  Description of Artificial Sequence: Synthetic oligonucleotide
aguauucaaucuucauuuu

SEQ ID NO: 1810979 - RNA, 19 nt, Artificial Sequence
  Description of Artificial Sequence: Synthetic oligonucleotide
ugcagggacuuccgcuacg

SEQ ID NO: 1810980 - RNA, 19 nt, Artificial Sequence
  Description of Artificial Sequence: Synthetic oligonucleotide
uuauccccuaaguccucag

SEQ ID NO: 1810981 - RNA, 19 nt, Artificial Sequence
  Description of Artificial Sequence: Synthetic oligonucleotide
uucuuuugguccagacccu

SEQ ID NO: 1810982 - RNA, 19 nt, Artificial Sequence
  Description of Artificial Sequence: Synthetic oligonucleotide
aguccaggagugaaacaac

SEQ ID NO: 1810983 - RNA, 19 nt, Artificial Sequence
  Description of Artificial Sequence: Synthetic oligonucleotide
agacggugucccuugaaaa

SEQ ID NO: 1810984 - RNA, 19 nt, Artificial Sequence
  Description of Artificial Sequence: Synthetic oligonucleotide
ccacugaaaaucacagucc

SEQ ID NO: 1810985 - RNA, 19 nt, Artificial Sequence
  Description of Artificial Sequence: Synthetic oligonucleotide
ucccuugaaaacccauguc

SEQ ID NO: 1810986 - RNA, 19 nt, Artificial Sequence
  Description of Artificial Sequence: Synthetic oligonucleotide
acgugauauucuucuuuug

SEQ ID NO: 1810987 - RNA, 19 nt, Artificial Sequence
  Description of Artificial Sequence: Synthetic oligonucleotide
gucuaaagagauggagugc

SEQ ID NO: 1810988 - RNA, 19 nt, Artificial Sequence
  Description of Artificial Sequence: Synthetic oligonucleotide
gaaaugcacaguccugaaa

SEQ ID NO: 1810989 - RNA, 19 nt, Artificial Sequence
  Description of Artificial Sequence: Synthetic oligonucleotide
cauaggaaagcucccacua

SEQ ID NO: 1810990 - RNA, 19 nt, Artificial Sequence
  Description of Artificial Sequence: Synthetic oligonucleotide
gcaugaauaacuguuacua

SEQ ID NO: 1810991 - RNA, 19 nt, Artificial Sequence
  Description of Artificial Sequence: Synthetic oligonucleotide
ugaaaagggcggccucucu

SEQ ID NO: 1810992 - RNA, 19 nt, Artificial Sequence
  Description of Artificial Sequence: Synthetic oligonucleotide
cagauuaccagauggucua

SEQ ID NO: 1810993 - RNA, 19 nt, Artificial Sequence
  Description of Artificial Sequence: Synthetic oligonucleotide
guugcauacacuucugcau

SEQ ID NO: 1810994 - RNA, 19 nt, Artificial Sequence
  Description of Artificial Sequence: Synthetic oligonucleotide
ggaguuaguuguuacucuc

SEQ ID NO: 1810995 - RNA, 19 nt, Artificial Sequence
  Description of Artificial Sequence: Synthetic oligonucleotide
uugaagguuuugccuccug

SEQ ID NO: 1810996 - RNA, 19 nt, Artificial Sequence
  Description of Artificial Sequence: Synthetic oligonucleotide
gaagguuuugccuccuggu

SEQ ID NO: 1810997 - RNA, 19 nt, Artificial Sequence
  Description of Artificial Sequence: Synthetic oligonucleotide
gaaggucauaggaaagcuc

SEQ ID NO: 1810998 - RNA, 19 nt, Artificial Sequence
  Description of Artificial Sequence: Synthetic oligonucleotide
guugaucuuuuaucaucac

SEQ ID NO: 1810999 - RNA, 19 nt, Artificial Sequence
  Description of Artificial Sequence: Synthetic oligonucleotide
uccggcaggcagaaccuca

SEQ ID NO: 1811000 - RNA, 19 nt, Artificial Sequence
  Description of Artificial Sequence: Synthetic oligonucleotide
aaagcucccacuaguugau

SEQ ID NO: 1811001 - RNA, 19 nt, Artificial Sequence
  Description of Artificial Sequence: Synthetic oligonucleotide
guaugacucuuugaguuuc

SEQ ID NO: 1811002 - RNA, 19 nt, Artificial Sequence
  Description of Artificial Sequence: Synthetic oligonucleotide
acugaaaaucacaguccag

SEQ ID NO: 1811003 - RNA, 19 nt, Artificial Sequence
  Description of Artificial Sequence: Synthetic oligonucleotide
ggaaagcucccacuaguug

SEQ ID NO: 1811004 - RNA, 19 nt, Artificial Sequence
  Description of Artificial Sequence: Synthetic oligonucleotide
guacagacggugucccuug

SEQ ID NO: 1811005 - RNA, 19 nt, Artificial Sequence
  Description of Artificial Sequence: Synthetic oligonucleotide
agggagcugaggucugauc

SEQ ID NO: 1811006 - RNA, 19 nt, Artificial Sequence
  Description of Artificial Sequence: Synthetic oligonucleotide
ucuuacucuuaggacacuu

SEQ ID NO: 1811007 - RNA, 19 nt, Artificial Sequence
  Description of Artificial Sequence: Synthetic oligonucleotide
gaguaugauuaucagcaau

SEQ ID NO: 1811008 - RNA, 19 nt, Artificial Sequence
  Description of Artificial Sequence: Synthetic oligonucleotide
guuucuugagauguguugu

SEQ ID NO: 1811009 - RNA, 19 nt, Artificial Sequence
  Description of Artificial Sequence: Synthetic oligonucleotide
caggcagaaccucacucug

SEQ ID NO: 1811010 - RNA, 19 nt, Artificial Sequence
  Description of Artificial Sequence: Synthetic oligonucleotide
gaguuaguuguuacucuca

SEQ ID NO: 1811011 - RNA, 19 nt, Artificial Sequence
  Description of Artificial Sequence: Synthetic oligonucleotide
agagauggagugccaguau

SEQ ID NO: 1811012 - RNA, 19 nt, Artificial Sequence
  Description of Artificial Sequence: Synthetic oligonucleotide
cacucugagguuuacaaau

SEQ ID NO: 1811013 - RNA, 19 nt, Artificial Sequence
  Description of Artificial Sequence: Synthetic oligonucleotide
gggucuccgcaccacagcg

SEQ ID NO: 1811014 - RNA, 19 nt, Artificial Sequence
  Description of Artificial Sequence: Synthetic oligonucleotide
uuuugccuccuggucagac

SEQ ID NO: 1811015 - RNA, 19 nt, Artificial Sequence
  Description of Artificial Sequence: Synthetic oligonucleotide
guugucauuuucacuuuga

SEQ ID NO: 1811016 - RNA, 19 nt, Artificial Sequence
  Description of Artificial Sequence: Synthetic oligonucleotide
aacaccgcggcugcaggga

SEQ ID NO: 1811017 - RNA, 19 nt, Artificial Sequence
  Description of Artificial Sequence: Synthetic oligonucleotide
gaaucaaaaggagcagugu

SEQ ID NO: 1811018 - RNA, 19 nt, Artificial Sequence
  Description of Artificial Sequence: Synthetic oligonucleotide
ugaagccaucuuuggaguu

SEQ ID NO: 1811019 - RNA, 19 nt, Artificial Sequence
  Description of Artificial Sequence: Synthetic oligonucleotide
aaaccugagugaauucauu

SEQ ID NO: 1811020 - RNA, 19 nt, Artificial Sequence
  Description of Artificial Sequence: Synthetic oligonucleotide
agggcggccucucugugca

SEQ ID NO: 1811021 - RNA, 19 nt, Artificial Sequence
  Description of Artificial Sequence: Synthetic oligonucleotide
gccuccggcaggcagaacc

SEQ ID NO: 1811022 - RNA, 19 nt, Artificial Sequence
  Description of Artificial Sequence: Synthetic oligonucleotide
uccugaaaagggcggccuc

SEQ ID NO: 1811023 - RNA, 19 nt, Artificial Sequence
  Description of Artificial Sequence: Synthetic oligonucleotide
caacaccgcggcugcaggg

SEQ ID NO: 1811024 - RNA, 19 nt, Artificial Sequence
  Description of Artificial Sequence: Synthetic oligonucleotide
ggcaauauuaagggagcug

SEQ ID NO: 1811025 - RNA, 19 nt, Artificial Sequence
  Description of Artificial Sequence: Synthetic oligonucleotide
ggacacuuucuuucucucc

SEQ ID NO: 1811026 - RNA, 19 nt, Artificial Sequence
  Description of Artificial Sequence: Synthetic oligonucleotide
uucagacagccugucuuac

SEQ ID NO: 1811027 - RNA, 19 nt, Artificial Sequence
  Description of Artificial Sequence: Synthetic oligonucleotide
cuaaagagauggagugcca

SEQ ID NO: 1811028 - RNA, 19 nt, Artificial Sequence
  Description of Artificial Sequence: Synthetic oligonucleotide
gauggucuaaagagaugga

SEQ ID NO: 1811029 - RNA, 19 nt, Artificial Sequence
  Description of Artificial Sequence: Synthetic oligonucleotide
ucuuauccccuaaguccuc

SEQ ID NO: 1811030 - RNA, 19 nt, Artificial Sequence
  Description of Artificial Sequence: Synthetic oligonucleotide
agggccaauuggaagguca

SEQ ID NO: 1811031 - RNA, 19 nt, Artificial Sequence
  Description of Artificial Sequence: Synthetic oligonucleotide
cugcaugcuggaacuucag

SEQ ID NO: 1811032 - RNA, 19 nt, Artificial Sequence
  Description of Artificial Sequence: Synthetic oligonucleotide
gaccuucaaagagaaaccu

SEQ ID NO: 1811033 - RNA, 19 nt, Artificial Sequence
  Description of Artificial Sequence: Synthetic oligonucleotide
gucccuugaaaacccaugu

SEQ ID NO: 1811034 - RNA, 19 nt, Artificial Sequence
  Description of Artificial Sequence: Synthetic oligonucleotide
acauuacaaaagaacuauu

SEQ ID NO: 1811035 - RNA, 19 nt, Artificial Sequence
  Description of Artificial Sequence: Synthetic oligonucleotide
cuaacugcugaugaaaauu

SEQ ID NO: 1811036 - RNA, 19 nt, Artificial Sequence
  Description of Artificial Sequence: Synthetic oligonucleotide
gugccaguauucaaucuuc

SEQ ID NO: 1811037 - RNA, 19 nt, Artificial Sequence
  Description of Artificial Sequence: Synthetic oligonucleotide
acuuugaguuuaauguauu

SEQ ID NO: 1811038 - RNA, 19 nt, Artificial Sequence
  Description of Artificial Sequence: Synthetic oligonucleotide
gaauucauuggaacucccu

SEQ ID NO: 1811039 - RNA, 19 nt, Artificial Sequence
  Description of Artificial Sequence: Synthetic oligonucleotide
cuuuugguccagacccuca

SEQ ID NO: 1811040 - RNA, 19 nt, Artificial Sequence
  Description of Artificial Sequence: Synthetic oligonucleotide
cacaacaccgcggcugcag

SEQ ID NO: 1811041 - RNA, 19 nt, Artificial Sequence
  Description of Artificial Sequence: Synthetic oligonucleotide
guuaguuguuacucucacu

SEQ ID NO: 1811042 - RNA, 19 nt, Artificial Sequence
  Description of Artificial Sequence: Synthetic oligonucleotide
ggaacucccugucuuugac

SEQ ID NO: 1811043 - RNA, 19 nt, Artificial Sequence
  Description of Artificial Sequence: Synthetic oligonucleotide
ccugagugaauucauugga

SEQ ID NO: 1811044 - RNA, 19 nt, Artificial Sequence
  Description of Artificial Sequence: Synthetic oligonucleotide
cuucagacagccugucuua

SEQ ID NO: 1811045 - RNA, 19 nt, Artificial Sequence
  Description of Artificial Sequence: Synthetic oligonucleotide
cauucccaguucuuuugga

SEQ ID NO: 1811046 - RNA, 19 nt, Artificial Sequence
  Description of Artificial Sequence: Synthetic oligonucleotide
gauuaccagauggucuaaa

SEQ ID NO: 1811047 - RNA, 19 nt, Artificial Sequence
  Description of Artificial Sequence: Synthetic oligonucleotide
ccuaaguccucaguugaag

SEQ ID NO: 1811048 - RNA, 19 nt, Artificial Sequence
  Description of Artificial Sequence: Synthetic oligonucleotide
agcggccuccggcaggcag

SEQ ID NO: 1811049 - RNA, 19 nt, Artificial Sequence
  Description of Artificial Sequence: Synthetic oligonucleotide
ugggaucuucagacagccu

SEQ ID NO: 1811050 - RNA, 19 nt, Artificial Sequence
  Description of Artificial Sequence: Synthetic oligonucleotide
ucccacuaguugaucuuuu

SEQ ID NO: 1811051 - RNA, 19 nt, Artificial Sequence
  Description of Artificial Sequence: Synthetic oligonucleotide
cugaggucugaucaccaaa

SEQ ID NO: 1811052 - RNA, 19 nt, Artificial Sequence
  Description of Artificial Sequence: Synthetic oligonucleotide
caguucuuuuggaguauga

SEQ ID NO: 1811053 - RNA, 19 nt, Artificial Sequence
  Description of Artificial Sequence: Synthetic oligonucleotide
acaccacauuacaaaagaa

SEQ ID NO: 1811054 - RNA, 19 nt, Artificial Sequence
  Description of Artificial Sequence: Synthetic oligonucleotide
cucugagguuuacaaaucu

SEQ ID NO: 1811055 - RNA, 19 nt, Artificial Sequence
  Description of Artificial Sequence: Synthetic oligonucleotide
cuaguugaucuuuuaucau

SEQ ID NO: 1811056 - RNA, 19 nt, Artificial Sequence
  Description of Artificial Sequence: Synthetic oligonucleotide
ccugucuuugacaguauga

SEQ ID NO: 1811057 - RNA, 19 nt, Artificial Sequence
  Description of Artificial Sequence: Synthetic oligonucleotide
cuacaaacgugauauucuu

SEQ ID NO: 1811058 - RNA, 19 nt, Artificial Sequence
  Description of Artificial Sequence: Synthetic oligonucleotide
ucuccgcaccacagcggcc

SEQ ID NO: 1811059 - RNA, 19 nt, Artificial Sequence
  Description of Artificial Sequence: Synthetic oligonucleotide
gacuuccgcuacguauugc

SEQ ID NO: 1811060 - RNA, 19 nt, Artificial Sequence
  Description of Artificial Sequence: Synthetic oligonucleotide
cagacggugucccuugaaa

SEQ ID NO: 1811061 - RNA, 19 nt, Artificial Sequence
  Description of Artificial Sequence: Synthetic oligonucleotide
gcagaaccucacucugagg

SEQ ID NO: 1811062 - RNA, 19 nt, Artificial Sequence
  Description of Artificial Sequence: Synthetic oligonucleotide
acagcacaacaccgcggcu

SEQ ID NO: 1811063 - RNA, 19 nt, Artificial Sequence
  Description of Artificial Sequence: Synthetic oligonucleotide
aaguuccgucucccacuga

SEQ ID NO: 1811064 - RNA, 19 nt, Artificial Sequence
  Description of Artificial Sequence: Synthetic oligonucleotide
uccagacccucagauuuua

SEQ ID NO: 1811065 - RNA, 19 nt, Artificial Sequence
  Description of Artificial Sequence: Synthetic oligonucleotide
cugcuauccuguccaauaa

SEQ ID NO: 1811066 - RNA, 19 nt, Artificial Sequence
  Description of Artificial Sequence: Synthetic oligonucleotide
gcacaguccugaaaagggc

SEQ ID NO: 1811067 - RNA, 19 nt, Artificial Sequence
  Description of Artificial Sequence: Synthetic oligonucleotide
gagugccaguauucaaucu

SEQ ID NO: 1811068 - RNA, 19 nt, Artificial Sequence
  Description of Artificial Sequence: Synthetic oligonucleotide
accucacucugagguuuac

SEQ ID NO: 1811069 - RNA, 19 nt, Artificial Sequence
  Description of Artificial Sequence: Synthetic oligonucleotide
ccacauuacaaaagaacua

SEQ ID NO: 1811070 - RNA, 19 nt, Artificial Sequence
  Description of Artificial Sequence: Synthetic oligonucleotide
cugaaaagggcggccucuc

SEQ ID NO: 1811071 - RNA, 19 nt, Artificial Sequence
  Description of Artificial Sequence: Synthetic oligonucleotide
aggaaagcucccacuaguu

SEQ ID NO: 1811072 - RNA, 19 nt, Artificial Sequence
  Description of Artificial Sequence: Synthetic oligonucleotide
ggucauaggaaagcuccca

SEQ ID NO: 1811073 - RNA, 19 nt, Artificial Sequence
  Description of Artificial Sequence: Synthetic oligonucleotide
cuuccuucuuauccccuaa

SEQ ID NO: 1811074 - RNA, 19 nt, Artificial Sequence
  Description of Artificial Sequence: Synthetic oligonucleotide
ucacugcuauccuguccaa

SEQ ID NO: 1811075 - RNA, 19 nt, Artificial Sequence
  Description of Artificial Sequence: Synthetic oligonucleotide
ggaguaugauuaucagcaa

SEQ ID NO: 1811076 - RNA, 19 nt, Artificial Sequence
  Description of Artificial Sequence: Synthetic oligonucleotide
cuauccuguccaauaacuu

SEQ ID NO: 1811077 - RNA, 19 nt, Artificial Sequence
  Description of Artificial Sequence: Synthetic oligonucleotide
ggacuuccgcuacguauug

SEQ ID NO: 1811078 - RNA, 19 nt, Artificial Sequence
  Description of Artificial Sequence: Synthetic oligonucleotide
cauuggaacucccugucuu

SEQ ID NO: 1811079 - RNA, 19 nt, Artificial Sequence
  Description of Artificial Sequence: Synthetic oligonucleotide
gcuauccuguccaauaacu

SEQ ID NO: 1811080 - RNA, 19 nt, Artificial Sequence
  Description of Artificial Sequence: Synthetic oligonucleotide
ccacagcacaacaccgcgg

SEQ ID NO: 1811081 - RNA, 19 nt, Artificial Sequence
  Description of Artificial Sequence: Synthetic oligonucleotide
ccgucucccacugaaaauc

SEQ ID NO: 1811082 - RNA, 19 nt, Artificial Sequence
  Description of Artificial Sequence: Synthetic oligonucleotide
ucccugucuuugacaguau

SEQ ID NO: 1811083 - RNA, 19 nt, Artificial Sequence
  Description of Artificial Sequence: Synthetic oligonucleotide
agauuaccagauggucuaa

SEQ ID NO: 1811084 - RNA, 19 nt, Artificial Sequence
  Description of Artificial Sequence: Synthetic oligonucleotide
cuugagauguguugucauu

SEQ ID NO: 1811085 - RNA, 19 nt, Artificial Sequence
  Description of Artificial Sequence: Synthetic oligonucleotide
ccccacagcacaacaccgc

SEQ ID NO: 1811086 - RNA, 19 nt, Artificial Sequence
  Description of Artificial Sequence: Synthetic oligonucleotide
caaacgugaaaugcacagu

SEQ ID NO: 1811087 - RNA, 19 nt, Artificial Sequence
  Description of Artificial Sequence: Synthetic oligonucleotide
aacccaugucccaggccaa

SEQ ID NO: 1811088 - RNA, 19 nt, Artificial Sequence
  Description of Artificial Sequence: Synthetic oligonucleotide
cauacacuucugcaugaau

SEQ ID NO: 1811089 - RNA, 19 nt, Artificial Sequence
  Description of Artificial Sequence: Synthetic oligonucleotide
aaccucacucugagguuua

SEQ ID NO: 1811090 - RNA, 19 nt, Artificial Sequence
  Description of Artificial Sequence: Synthetic oligonucleotide
caaaaggagcagugucugu

SEQ ID NO: 1811091 - RNA, 19 nt, Artificial Sequence
  Description of Artificial Sequence: Synthetic oligonucleotide
caagcugaggaaagaucau

SEQ ID NO: 1811092 - RNA, 19 nt, Artificial Sequence
  Description of Artificial Sequence: Synthetic oligonucleotide
cggugucccuugaaaaccc

SEQ ID NO: 1811093 - RNA, 19 nt, Artificial Sequence
  Description of Artificial Sequence: Synthetic oligonucleotide
cccugucuuugacaguaug

SEQ ID NO: 1811094 - RNA, 19 nt, Artificial Sequence
  Description of Artificial Sequence: Synthetic oligonucleotide
cucuuaggacacuuucuuu

SEQ ID NO: 1811095 - RNA, 19 nt, Artificial Sequence
  Description of Artificial Sequence: Synthetic oligonucleotide
cuuccgcuacguauugcgu

SEQ ID NO: 1811096 - RNA, 19 nt, Artificial Sequence
  Description of Artificial Sequence: Synthetic oligonucleotide
caaacgugauauucuucuu

SEQ ID NO: 1811097 - RNA, 19 nt, Artificial Sequence
  Description of Artificial Sequence: Synthetic oligonucleotide
acagccugucuuacucuua

SEQ ID NO: 1811098 - RNA, 19 nt, Artificial Sequence
  Description of Artificial Sequence: Synthetic oligonucleotide
ccggcaggcagaaccucac

SEQ ID NO: 1811099 - RNA, 19 nt, Artificial Sequence
  Description of Artificial Sequence: Synthetic oligonucleotide
cuccggcaggcagaaccuc

SEQ ID NO: 1811100 - RNA, 19 nt, Artificial Sequence
  Description of Artificial Sequence: Synthetic oligonucleotide
cuccgcaccacagcggccu

SEQ ID NO: 1811101 - RNA, 19 nt, Artificial Sequence
  Description of Artificial Sequence: Synthetic oligonucleotide
cccgguuuguuccuugaua

SEQ ID NO: 1811102 - RNA, 19 nt, Artificial Sequence
  Description of Artificial Sequence: Synthetic oligonucleotide
gguacagacggugucccuu

SEQ ID NO: 1811103 - RNA, 19 nt, Artificial Sequence
  Description of Artificial Sequence: Synthetic oligonucleotide
gggacuuccgcuacguauu

SEQ ID NO: 1811104 - RNA, 19 nt, Artificial Sequence
  Description of Artificial Sequence: Synthetic oligonucleotide
cgucucccacugaaaauca

SEQ ID NO: 1811105 - RNA, 19 nt, Artificial Sequence
  Description of Artificial Sequence: Synthetic oligonucleotide
ccacuaguugaucuuuuau

SEQ ID NO: 1811106 - RNA, 19 nt, Artificial Sequence
  Description of Artificial Sequence: Synthetic oligonucleotide
cccacuaguugaucuuuua

SEQ ID NO: 1811107 - RNA, 19 nt, Artificial Sequence
  Description of Artificial Sequence: Synthetic oligonucleotide
gugucccuugaaaacccau

SEQ ID NO: 1811108 - RNA, 19 nt, Artificial Sequence
  Description of Artificial Sequence: Synthetic oligonucleotide
gggcaauauuaagggagcu

SEQ ID NO: 1811109 - RNA, 19 nt, Artificial Sequence
  Description of Artificial Sequence: Synthetic oligonucleotide
ggcggccucucugugcaca

SEQ ID NO: 1811110 - RNA, 19 nt, Artificial Sequence
  Description of Artificial Sequence: Synthetic oligonucleotide
cccuaaguccucaguugaa

SEQ ID NO: 1811111 - RNA, 19 nt, Artificial Sequence
  Description of Artificial Sequence: Synthetic oligonucleotide
cucccacuaguugaucuuu

SEQ ID NO: 1811112 - RNA, 19 nt, Artificial Sequence
  Description of Artificial Sequence: Synthetic oligonucleotide
gucuuacucuuaggacacu

SEQ ID NO: 1811113 - RNA, 19 nt, Artificial Sequence
  Description of Artificial Sequence: Synthetic oligonucleotide
cagggacuuccgcuacgua

SEQ ID NO: 1811114 - RNA, 19 nt, Artificial Sequence
  Description of Artificial Sequence: Synthetic oligonucleotide
ggccaauuggaaggucaua

SEQ ID NO: 1811115 - RNA, 19 nt, Artificial Sequence
  Description of Artificial Sequence: Synthetic oligonucleotide
ccucacucugagguuuaca

SEQ ID NO: 1811116 - RNA, 19 nt, Artificial Sequence
  Description of Artificial Sequence: Synthetic oligonucleotide
gcagggacuuccgcuacgu

SEQ ID NO: 1811117 - RNA, 19 nt, Artificial Sequence
  Description of Artificial Sequence: Synthetic oligonucleotide
ccugaaaagggcggccucu

SEQ ID NO: 1811118 - RNA, 19 nt, Artificial Sequence
  Description of Artificial Sequence: Synthetic oligonucleotide
ccagacccucagauuuuaa

SEQ ID NO: 1811119 - RNA, 19 nt, Artificial Sequence
  Description of Artificial Sequence: Synthetic oligonucleotide
guccagacccucagauuuu

SEQ ID NO: 1811120 - RNA, 19 nt, Artificial Sequence
  Description of Artificial Sequence: Synthetic oligonucleotide
gggccaauuggaaggucau

SEQ ID NO: 1811121 - RNA, 19 nt, Artificial Sequence
  Description of Artificial Sequence: Synthetic oligonucleotide
ccuccggcaggcagaaccu

SEQ ID NO: 1811122 - RNA, 19 nt, Artificial Sequence
  Description of Artificial Sequence: Synthetic oligonucleotide
caccgcggcugcagggacu

SEQ ID NO: 1811123 - RNA, 19 nt, Artificial Sequence
  Description of Artificial Sequence: Synthetic oligonucleotide
gggcggccucucugugcac

SEQ ID NO: 1811124 - RNA, 19 nt, Artificial Sequence
  Description of Artificial Sequence: Synthetic oligonucleotide
cuggaacuucagggccaau

SEQ ID NO: 1811125 - RNA, 19 nt, Artificial Sequence
  Description of Artificial Sequence: Synthetic oligonucleotide
ccccgguuuguuccuugau

SEQ ID NO: 1811126 - RNA, 19 nt, Artificial Sequence
  Description of Artificial Sequence: Synthetic oligonucleotide
ggccuccggcaggcagaac

SEQ ID NO: 1811127 - RNA, 19 nt, Artificial Sequence
  Description of Artificial Sequence: Synthetic oligonucleotide
cggccuccggcaggcagaa

SEQ ID NO: 1811128 - RNA, 19 nt, Artificial Sequence
  Description of Artificial Sequence: Synthetic oligonucleotide
ccgcggcugcagggacuuc

SEQ ID NO: 1811129 - RNA, 19 nt, Artificial Sequence
  Description of Artificial Sequence: Synthetic oligonucleotide
cucaaauugauguaguucc

SEQ ID NO: 1811130 - RNA, 19 nt, Artificial Sequence
  Description of Artificial Sequence: Synthetic oligonucleotide
aaaaguaaaaggcggcuag

SEQ ID NO: 1811131 - RNA, 19 nt, Artificial Sequence
  Description of Artificial Sequence: Synthetic oligonucleotide
aauguuaagaaaaggacug

SEQ ID NO: 1811132 - RNA, 19 nt, Artificial Sequence
  Description of Artificial Sequence: Synthetic oligonucleotide
gacacugucgaacuggucg

SEQ ID NO: 1811133 - RNA, 19 nt, Artificial Sequence
  Description of Artificial Sequence: Synthetic oligonucleotide
gauggagacgaucucagcg

SEQ ID NO: 1811134 - RNA, 19 nt, Artificial Sequence
  Description of Artificial Sequence: Synthetic oligonucleotide
gacacuacuagucagguuc

SEQ ID NO: 1811135 - RNA, 19 nt, Artificial Sequence
  Description of Artificial Sequence: Synthetic oligonucleotide
aagaaaaguaaaaggcggc

SEQ ID NO: 1811136 - RNA, 19 nt, Artificial Sequence
  Description of Artificial Sequence: Synthetic oligonucleotide
gaaugugaugcccacaacc

SEQ ID NO: 1811137 - RNA, 19 nt, Artificial Sequence
  Description of Artificial Sequence: Synthetic oligonucleotide
aacacgaucacucgggaga

SEQ ID NO: 1811138 - RNA, 19 nt, Artificial Sequence
  Description of Artificial Sequence: Synthetic oligonucleotide
aaauugauguaguuccuca

SEQ ID NO: 1811139 - RNA, 19 nt, Artificial Sequence
  Description of Artificial Sequence: Synthetic oligonucleotide
uuuaugaaugugaugccca

SEQ ID NO: 1811140 - RNA, 19 nt, Artificial Sequence
  Description of Artificial Sequence: Synthetic oligonucleotide
aaaguaaaaggcggcuagc

SEQ ID NO: 1811141 - RNA, 19 nt, Artificial Sequence
  Description of Artificial Sequence: Synthetic oligonucleotide
aaaggcggcuagcaacucc

SEQ ID NO: 1811142 - RNA, 19 nt, Artificial Sequence
  Description of Artificial Sequence: Synthetic oligonucleotide
aguuccuguccauaggugg

SEQ ID NO: 1811143 - RNA, 19 nt, Artificial Sequence
  Description of Artificial Sequence: Synthetic oligonucleotide
ugguacuuauagcagagca

SEQ ID NO: 1811144 - RNA, 19 nt, Artificial Sequence
  Description of Artificial Sequence: Synthetic oligonucleotide
agaaggucccaguacacgg

SEQ ID NO: 1811145 - RNA, 19 nt, Artificial Sequence
  Description of Artificial Sequence: Synthetic oligonucleotide
cacguaaccacucuggcag

SEQ ID NO: 1811146 - RNA, 19 nt, Artificial Sequence
  Description of Artificial Sequence: Synthetic oligonucleotide
aaaggcgugaacuggaguu

SEQ ID NO: 1811147 - RNA, 19 nt, Artificial Sequence
  Description of Artificial Sequence: Synthetic oligonucleotide
gaucucagcguccacgggg

SEQ ID NO: 1811148 - RNA, 19 nt, Artificial Sequence
  Description of Artificial Sequence: Synthetic oligonucleotide
aucauucccacucaggaga

SEQ ID NO: 1811149 - RNA, 19 nt, Artificial Sequence
  Description of Artificial Sequence: Synthetic oligonucleotide
ugcagaacuguccaugucu

SEQ ID NO: 1811150 - RNA, 19 nt, Artificial Sequence
  Description of Artificial Sequence: Synthetic oligonucleotide
ucuccugaguccuuuauga

SEQ ID NO: 1811151 - RNA, 19 nt, Artificial Sequence
  Description of Artificial Sequence: Synthetic oligonucleotide
agguuucggacaucaagcc

SEQ ID NO: 1811152 - RNA, 19 nt, Artificial Sequence
  Description of Artificial Sequence: Synthetic oligonucleotide
ugggaagagguuuuccacg

SEQ ID NO: 1811153 - RNA, 19 nt, Artificial Sequence
  Description of Artificial Sequence: Synthetic oligonucleotide
cagguuucggacaucaagc

SEQ ID NO: 1811154 - RNA, 19 nt, Artificial Sequence
  Description of Artificial Sequence: Synthetic oligonucleotide
uaaaaggcggcuagcaacu

SEQ ID NO: 1811155 - RNA, 19 nt, Artificial Sequence
  Description of Artificial Sequence: Synthetic oligonucleotide
uucugguuguccaucuagg

SEQ ID NO: 1811156 - RNA, 19 nt, Artificial Sequence
  Description of Artificial Sequence: Synthetic oligonucleotide
ucggacaucaagccagagg

SEQ ID NO: 1811157 - RNA, 19 nt, Artificial Sequence
  Description of Artificial Sequence: Synthetic oligonucleotide
gucaagaccagcuccgagg

SEQ ID NO: 1811158 - RNA, 19 nt, Artificial Sequence
  Description of Artificial Sequence: Synthetic oligonucleotide
aacuggaaaggcgugaacu

SEQ ID NO: 1811159 - RNA, 19 nt, Artificial Sequence
  Description of Artificial Sequence: Synthetic oligonucleotide
acacugucgaacuggucgc

SEQ ID NO: 1811160 - RNA, 19 nt, Artificial Sequence
  Description of Artificial Sequence: Synthetic oligonucleotide
ucauucuccuuguagagau

SEQ ID NO: 1811161 - RNA, 19 nt, Artificial Sequence
  Description of Artificial Sequence: Synthetic oligonucleotide
agcaccuugccuuuaaaga

SEQ ID NO: 1811162 - RNA, 19 nt, Artificial Sequence
  Description of Artificial Sequence: Synthetic oligonucleotide
gaagagguuuuccacgggc

SEQ ID NO: 1811163 - RNA, 19 nt, Artificial Sequence
  Description of Artificial Sequence: Synthetic oligonucleotide
cagacuguauccuuccugc

SEQ ID NO: 1811164 - RNA, 19 nt, Artificial Sequence
  Description of Artificial Sequence: Synthetic oligonucleotide
aaggcggcuagcaacuccc

SEQ ID NO: 1811165 - RNA, 19 nt, Artificial Sequence
  Description of Artificial Sequence: Synthetic oligonucleotide
acagaggacacugucgaac

SEQ ID NO: 1811166 - RNA, 19 nt, Artificial Sequence
  Description of Artificial Sequence: Synthetic oligonucleotide
uggaucauucccacucagg

SEQ ID NO: 1811167 - RNA, 19 nt, Artificial Sequence
  Description of Artificial Sequence: Synthetic oligonucleotide
aauugauguaguuccucau

SEQ ID NO: 1811168 - RNA, 19 nt, Artificial Sequence
  Description of Artificial Sequence: Synthetic oligonucleotide
ucgaacuggucgcugcugg

SEQ ID NO: 1811169 - RNA, 19 nt, Artificial Sequence
  Description of Artificial Sequence: Synthetic oligonucleotide
acuagucagguucgugagc

SEQ ID NO: 1811170 - RNA, 19 nt, Artificial Sequence
  Description of Artificial Sequence: Synthetic oligonucleotide
uggcacaacuggaaaggcg

SEQ ID NO: 1811171 - RNA, 19 nt, Artificial Sequence
  Description of Artificial Sequence: Synthetic oligonucleotide
uacuagucagguucgugag

SEQ ID NO: 1811172 - RNA, 19 nt, Artificial Sequence
  Description of Artificial Sequence: Synthetic oligonucleotide
gauguaguuccucauucuc

SEQ ID NO: 1811173 - RNA, 19 nt, Artificial Sequence
  Description of Artificial Sequence: Synthetic oligonucleotide
uccacggggauguaguuga

SEQ ID NO: 1811174 - RNA, 19 nt, Artificial Sequence
  Description of Artificial Sequence: Synthetic oligonucleotide
gaucaggcugugcuggagg

SEQ ID NO: 1811175 - RNA, 19 nt, Artificial Sequence
  Description of Artificial Sequence: Synthetic oligonucleotide
agaggacacuacuagucag

SEQ ID NO: 1811176 - RNA, 19 nt, Artificial Sequence
  Description of Artificial Sequence: Synthetic oligonucleotide
gaacuggaguuccaaauuc

SEQ ID NO: 1811177 - RNA, 19 nt, Artificial Sequence
  Description of Artificial Sequence: Synthetic oligonucleotide
gcuggcaacaagcagacug

SEQ ID NO: 1811178 - RNA, 19 nt, Artificial Sequence
  Description of Artificial Sequence: Synthetic oligonucleotide
cuggaguuccaaauucagg

SEQ ID NO: 1811179 - RNA, 19 nt, Artificial Sequence
  Description of Artificial Sequence: Synthetic oligonucleotide
ucaaauugauguaguuccu

SEQ ID NO: 1811180 - RNA, 19 nt, Artificial Sequence
  Description of Artificial Sequence: Synthetic oligonucleotide
aaguaaaaggcggcuagca

SEQ ID NO: 1811181 - RNA, 19 nt, Artificial Sequence
  Description of Artificial Sequence: Synthetic oligonucleotide
gaggacacugucgaacugg

SEQ ID NO: 1811182 - RNA, 19 nt, Artificial Sequence
  Description of Artificial Sequence: Synthetic oligonucleotide
cugucggaggucuugguag

SEQ ID NO: 1811183 - RNA, 19 nt, Artificial Sequence
  Description of Artificial Sequence: Synthetic oligonucleotide
cagcaugcuggcaacaagc

SEQ ID NO: 1811184 - RNA, 19 nt, Artificial Sequence
  Description of Artificial Sequence: Synthetic oligonucleotide
gaaggugucgauggagacg

SEQ ID NO: 1811185 - RNA, 19 nt, Artificial Sequence
  Description of Artificial Sequence: Synthetic oligonucleotide
agccagaggacacuacuag

SEQ ID NO: 1811186 - RNA, 19 nt, Artificial Sequence
  Description of Artificial Sequence: Synthetic oligonucleotide
ccagguuguacucugagcc

SEQ ID NO: 1811187 - RNA, 19 nt, Artificial Sequence
  Description of Artificial Sequence: Synthetic oligonucleotide
uauagcagagcaguuccug

SEQ ID NO: 1811188 - RNA, 19 nt, Artificial Sequence
  Description of Artificial Sequence: Synthetic oligonucleotide
gagcaccuugccuuuaaag

SEQ ID NO: 1811189 - RNA, 19 nt, Artificial Sequence
  Description of Artificial Sequence: Synthetic oligonucleotide
gguccuacgccacaguagg

SEQ ID NO: 1811190 - RNA, 19 nt, Artificial Sequence
  Description of Artificial Sequence: Synthetic oligonucleotide
agucacaguaaauguuaag

SEQ ID NO: 1811191 - RNA, 19 nt, Artificial Sequence
  Description of Artificial Sequence: Synthetic oligonucleotide
acuucugcguggcacaacu

SEQ ID NO: 1811192 - RNA, 19 nt, Artificial Sequence
  Description of Artificial Sequence: Synthetic oligonucleotide
uuaugaaugugaugcccac

SEQ ID NO: 1811193 - RNA, 19 nt, Artificial Sequence
  Description of Artificial Sequence: Synthetic oligonucleotide
gacuguauccuuccugcug

SEQ ID NO: 1811194 - RNA, 19 nt, Artificial Sequence
  Description of Artificial Sequence: Synthetic oligonucleotide
gucgacgugagccacgcgc

SEQ ID NO: 1811195 - RNA, 19 nt, Artificial Sequence
  Description of Artificial Sequence: Synthetic oligonucleotide
gaggacacuacuagucagg

SEQ ID NO: 1811196 - RNA, 19 nt, Artificial Sequence
  Description of Artificial Sequence: Synthetic oligonucleotide
ugauguaguuccucauucu

SEQ ID NO: 1811197 - RNA, 19 nt, Artificial Sequence
  Description of Artificial Sequence: Synthetic oligonucleotide
ucgugguacuuauagcaga

SEQ ID NO: 1811198 - RNA, 19 nt, Artificial Sequence
  Description of Artificial Sequence: Synthetic oligonucleotide
ucuugguagcggaagccga

SEQ ID NO: 1811199 - RNA, 19 nt, Artificial Sequence
  Description of Artificial Sequence: Synthetic oligonucleotide
cuacuagucagguucguga

SEQ ID NO: 1811200 - RNA, 19 nt, Artificial Sequence
  Description of Artificial Sequence: Synthetic oligonucleotide
cucgugguacuuauagcag

SEQ ID NO: 1811201 - RNA, 19 nt, Artificial Sequence
  Description of Artificial Sequence: Synthetic oligonucleotide
agccaggcagguuucggac

SEQ ID NO: 1811202 - RNA, 19 nt, Artificial Sequence
  Description of Artificial Sequence: Synthetic oligonucleotide
ugaacacgaucacucggga

SEQ ID NO: 1811203 - RNA, 19 nt, Artificial Sequence
  Description of Artificial Sequence: Synthetic oligonucleotide
uguccaucuagguccacgu

SEQ ID NO: 1811204 - RNA, 19 nt, Artificial Sequence
  Description of Artificial Sequence: Synthetic oligonucleotide
aggcugaacacgaucacuc

SEQ ID NO: 1811205 - RNA, 19 nt, Artificial Sequence
  Description of Artificial Sequence: Synthetic oligonucleotide
uccugaguccuuuaugaau

SEQ ID NO: 1811206 - RNA, 19 nt, Artificial Sequence
  Description of Artificial Sequence: Synthetic oligonucleotide
gaacacgaucacucgggag

SEQ ID NO: 1811207 - RNA, 19 nt, Artificial Sequence
  Description of Artificial Sequence: Synthetic oligonucleotide
aucacucgggagaugggcc

SEQ ID NO: 1811208 - RNA, 19 nt, Artificial Sequence
  Description of Artificial Sequence: Synthetic oligonucleotide
gaguccuuuaugaauguga

SEQ ID NO: 1811209 - RNA, 19 nt, Artificial Sequence
  Description of Artificial Sequence: Synthetic oligonucleotide
auucaggcagcucucugca

SEQ ID NO: 1811210 - RNA, 19 nt, Artificial Sequence
  Description of Artificial Sequence: Synthetic oligonucleotide
ucagugaccaggccacaga

SEQ ID NO: 1811211 - RNA, 19 nt, Artificial Sequence
  Description of Artificial Sequence: Synthetic oligonucleotide
aaggucccaguacacggca

SEQ ID NO: 1811212 - RNA, 19 nt, Artificial Sequence
  Description of Artificial Sequence: Synthetic oligonucleotide
ucucgauucuucuggucga

SEQ ID NO: 1811213 - RNA, 19 nt, Artificial Sequence
  Description of Artificial Sequence: Synthetic oligonucleotide
ucaggagaaagacggucuc

SEQ ID NO: 1811214 - RNA, 19 nt, Artificial Sequence
  Description of Artificial Sequence: Synthetic oligonucleotide
gaucacucgggagaugggc

SEQ ID NO: 1811215 - RNA, 19 nt, Artificial Sequence
  Description of Artificial Sequence: Synthetic oligonucleotide
cugggaagagguuuuccac

SEQ ID NO: 1811216 - RNA, 19 nt, Artificial Sequence
  Description of Artificial Sequence: Synthetic oligonucleotide
cuugguagcggaagccgag

SEQ ID NO: 1811217 - RNA, 19 nt, Artificial Sequence
  Description of Artificial Sequence: Synthetic oligonucleotide
caugucugcaagaucucuc

SEQ ID NO: 1811218 - RNA, 19 nt, Artificial Sequence
  Description of Artificial Sequence: Synthetic oligonucleotide
cuggaaaggcgugaacugg

SEQ ID NO: 1811219 - RNA, 19 nt, Artificial Sequence
  Description of Artificial Sequence: Synthetic oligonucleotide
acggucuccagcuggucuc

SEQ ID NO: 1811220 - RNA, 19 nt, Artificial Sequence
  Description of Artificial Sequence: Synthetic oligonucleotide
uccgaggccuggaucaggc

SEQ ID NO: 1811221 - RNA, 19 nt, Artificial Sequence
  Description of Artificial Sequence: Synthetic oligonucleotide
ggaucauucccacucagga

SEQ ID NO: 1811222 - RNA, 19 nt, Artificial Sequence
  Description of Artificial Sequence: Synthetic oligonucleotide
guucagaaggucccaguac

SEQ ID NO: 1811223 - RNA, 19 nt, Artificial Sequence
  Description of Artificial Sequence: Synthetic oligonucleotide
gacgaagccgggucaagac

SEQ ID NO: 1811224 - RNA, 19 nt, Artificial Sequence
  Description of Artificial Sequence: Synthetic oligonucleotide
ugcccuugucuccugaguc

SEQ ID NO: 1811225 - RNA, 19 nt, Artificial Sequence
  Description of Artificial Sequence: Synthetic oligonucleotide
uccuacgccacaguaggug

SEQ ID NO: 1811226 - RNA, 19 nt, Artificial Sequence
  Description of Artificial Sequence: Synthetic oligonucleotide
augccgacgaagccggguc

SEQ ID NO: 1811227 - RNA, 19 nt, Artificial Sequence
  Description of Artificial Sequence: Synthetic oligonucleotide
guagcggaagccgagcacc

SEQ ID NO: 1811228 - RNA, 19 nt, Artificial Sequence
  Description of Artificial Sequence: Synthetic oligonucleotide
aagagguuuuccacgggcu

SEQ ID NO: 1811229 - RNA, 19 nt, Artificial Sequence
  Description of Artificial Sequence: Synthetic oligonucleotide
cacaguagguggaagccuc

SEQ ID NO: 1811230 - RNA, 19 nt, Artificial Sequence
  Description of Artificial Sequence: Synthetic oligonucleotide
gaguccagguuguacucug

SEQ ID NO: 1811231 - RNA, 19 nt, Artificial Sequence
  Description of Artificial Sequence: Synthetic oligonucleotide
ugagccacgcgcacguaac

SEQ ID NO: 1811232 - RNA, 19 nt, Artificial Sequence
  Description of Artificial Sequence: Synthetic oligonucleotide
ucacucgggagaugggccc

SEQ ID NO: 1811233 - RNA, 19 nt, Artificial Sequence
  Description of Artificial Sequence: Synthetic oligonucleotide
uagcaacuccccucgcccg

SEQ ID NO: 1811234 - RNA, 19 nt, Artificial Sequence
  Description of Artificial Sequence: Synthetic oligonucleotide
ucgacgugagccacgcgca

SEQ ID NO: 1811235 - RNA, 19 nt, Artificial Sequence
  Description of Artificial Sequence: Synthetic oligonucleotide
acgucagugaccaggccac

SEQ ID NO: 1811236 - RNA, 19 nt, Artificial Sequence
  Description of Artificial Sequence: Synthetic oligonucleotide
gcucgugguacuuauagca

SEQ ID NO: 1811237 - RNA, 19 nt, Artificial Sequence
  Description of Artificial Sequence: Synthetic oligonucleotide
cugguuguccaucuagguc

SEQ ID NO: 1811238 - RNA, 19 nt, Artificial Sequence
  Description of Artificial Sequence: Synthetic oligonucleotide
gguacuuauagcagagcag

SEQ ID NO: 1811239 - RNA, 19 nt, Artificial Sequence
  Description of Artificial Sequence: Synthetic oligonucleotide
aaagguccuacgccacagu

SEQ ID NO: 1811240 - RNA, 19 nt, Artificial Sequence
  Description of Artificial Sequence: Synthetic oligonucleotide
acguaaccacucuggcagc

SEQ ID NO: 1811241 - RNA, 19 nt, Artificial Sequence
  Description of Artificial Sequence: Synthetic oligonucleotide
uggacuucugcguggcaca

SEQ ID NO: 1811242 - RNA, 19 nt, Artificial Sequence
  Description of Artificial Sequence: Synthetic oligonucleotide
ugucggaggucuugguagc

SEQ ID NO: 1811243 - RNA, 19 nt, Artificial Sequence
  Description of Artificial Sequence: Synthetic oligonucleotide
uuggccacgggccggauuu

SEQ ID NO: 1811244 - RNA, 19 nt, Artificial Sequence
  Description of Artificial Sequence: Synthetic oligonucleotide
uaugaaugugaugcccaca

SEQ ID NO: 1811245 - RNA, 19 nt, Artificial Sequence
  Description of Artificial Sequence: Synthetic oligonucleotide
aggcgugaacuggaguucc

SEQ ID NO: 1811246 - RNA, 19 nt, Artificial Sequence
  Description of Artificial Sequence: Synthetic oligonucleotide
cuugccuuuaaagaaaagu

SEQ ID NO: 1811247 - RNA, 19 nt, Artificial Sequence
  Description of Artificial Sequence: Synthetic oligonucleotide
uucgugagcucugggaaga

SEQ ID NO: 1811248 - RNA, 19 nt, Artificial Sequence
  Description of Artificial Sequence: Synthetic oligonucleotide
caaauugauguaguuccuc

SEQ ID NO: 1811249 - RNA, 19 nt, Artificial Sequence
  Description of Artificial Sequence: Synthetic oligonucleotide
ugucugcaagaucucucga

SEQ ID NO: 1811250 - RNA, 19 nt, Artificial Sequence
  Description of Artificial Sequence: Synthetic oligonucleotide
augcuggcaacaagcagac

SEQ ID NO: 1811251 - RNA, 19 nt, Artificial Sequence
  Description of Artificial Sequence: Synthetic oligonucleotide
cagaaggucccaguacacg

SEQ ID NO: 1811252 - RNA, 19 nt, Artificial Sequence
  Description of Artificial Sequence: Synthetic oligonucleotide
uucuggucgacgugagcca

SEQ ID NO: 1811253 - RNA, 19 nt, Artificial Sequence
  Description of Artificial Sequence: Synthetic oligonucleotide
agguccacgucagugacca

SEQ ID NO: 1811254 - RNA, 19 nt, Artificial Sequence
  Description of Artificial Sequence: Synthetic oligonucleotide
cugucgaacuggucgcugc

SEQ ID NO: 1811255 - RNA, 19 nt, Artificial Sequence
  Description of Artificial Sequence: Synthetic oligonucleotide
ucgauucuucuggucgacg

SEQ ID NO: 1811256 - RNA, 19 nt, Artificial Sequence
  Description of Artificial Sequence: Synthetic oligonucleotide
acacuacuagucagguucg

SEQ ID NO: 1811257 - RNA, 19 nt, Artificial Sequence
  Description of Artificial Sequence: Synthetic oligonucleotide
ugucgaacuggucgcugcu

SEQ ID NO: 1811258 - RNA, 19 nt, Artificial Sequence
  Description of Artificial Sequence: Synthetic oligonucleotide
ugcucgguugcgucggggc

SEQ ID NO: 1811259 - RNA, 19 nt, Artificial Sequence
  Description of Artificial Sequence: Synthetic oligonucleotide
uccucaaauugauguaguu

SEQ ID NO: 1811260 - RNA, 19 nt, Artificial Sequence
  Description of Artificial Sequence: Synthetic oligonucleotide
acuacuagucagguucgug

SEQ ID NO: 1811261 - RNA, 19 nt, Artificial Sequence
  Description of Artificial Sequence: Synthetic oligonucleotide
caaagguccuacgccacag

SEQ ID NO: 1811262 - RNA, 19 nt, Artificial Sequence
  Description of Artificial Sequence: Synthetic oligonucleotide
ucggaggucuugguagcgg

SEQ ID NO: 1811263 - RNA, 19 nt, Artificial Sequence
  Description of Artificial Sequence: Synthetic oligonucleotide
uucuccuuguagagaugga

SEQ ID NO: 1811264 - RNA, 19 nt, Artificial Sequence
  Description of Artificial Sequence: Synthetic oligonucleotide
ugcuccucaaauugaugua

SEQ ID NO: 1811265 - RNA, 19 nt, Artificial Sequence
  Description of Artificial Sequence: Synthetic oligonucleotide
guugcgucggggcuggaca

SEQ ID NO: 1811266 - RNA, 19 nt, Artificial Sequence
  Description of Artificial Sequence: Synthetic oligonucleotide
cuggaucauucccacucag

SEQ ID NO: 1811267 - RNA, 19 nt, Artificial Sequence
  Description of Artificial Sequence: Synthetic oligonucleotide
guuccuguccauagguggc

SEQ ID NO: 1811268 - RNA, 19 nt, Artificial Sequence
  Description of Artificial Sequence: Synthetic oligonucleotide
ucugcuccacaugccgacg

SEQ ID NO: 1811269 - RNA, 19 nt, Artificial Sequence
  Description of Artificial Sequence: Synthetic oligonucleotide
acgggccggauuuucuguc

SEQ ID NO: 1811270 - RNA, 19 nt, Artificial Sequence
  Description of Artificial Sequence: Synthetic oligonucleotide
gaacuggucgcugcugggc

SEQ ID NO: 1811271 - RNA, 19 nt, Artificial Sequence
  Description of Artificial Sequence: Synthetic oligonucleotide
aguacacggcagccggcuc

SEQ ID NO: 1811272 - RNA, 19 nt, Artificial Sequence
  Description of Artificial Sequence: Synthetic oligonucleotide
ugguucagaaggucccagu

SEQ ID NO: 1811273 - RNA, 19 nt, Artificial Sequence
  Description of Artificial Sequence: Synthetic oligonucleotide
cuggacaggcugaacacga

SEQ ID NO: 1811274 - RNA, 19 nt, Artificial Sequence
  Description of Artificial Sequence: Synthetic oligonucleotide
ccagaggacacuacuaguc

SEQ ID NO: 1811275 - RNA, 19 nt, Artificial Sequence
  Description of Artificial Sequence: Synthetic oligonucleotide
ggcugaacacgaucacucg

SEQ ID NO: 1811276 - RNA, 19 nt, Artificial Sequence
  Description of Artificial Sequence: Synthetic oligonucleotide
cucugcuccacaugccgac

SEQ ID NO: 1811277 - RNA, 19 nt, Artificial Sequence
  Description of Artificial Sequence: Synthetic oligonucleotide
cacgucagugaccaggcca

SEQ ID NO: 1811278 - RNA, 19 nt, Artificial Sequence
  Description of Artificial Sequence: Synthetic oligonucleotide
uugcgucggggcuggacag

SEQ ID NO: 1811279 - RNA, 19 nt, Artificial Sequence
  Description of Artificial Sequence: Synthetic oligonucleotide
acggcagccggcuccagca

SEQ ID NO: 1811280 - RNA, 19 nt, Artificial Sequence
  Description of Artificial Sequence: Synthetic oligonucleotide
cuggacuucugcguggcac

SEQ ID NO: 1811281 - RNA, 19 nt, Artificial Sequence
  Description of Artificial Sequence: Synthetic oligonucleotide
gacgugagccacgcgcacg

SEQ ID NO: 1811282 - RNA, 19 nt, Artificial Sequence
  Description of Artificial Sequence: Synthetic oligonucleotide
ugucgauggagacgaucuc

SEQ ID NO: 1811283 - RNA, 19 nt, Artificial Sequence
  Description of Artificial Sequence: Synthetic oligonucleotide
cugcuccucaaauugaugu

SEQ ID NO: 1811284 - RNA, 19 nt, Artificial Sequence
  Description of Artificial Sequence: Synthetic oligonucleotide
aucucucgauucuucuggu

SEQ ID NO: 1811285 - RNA, 19 nt, Artificial Sequence
  Description of Artificial Sequence: Synthetic oligonucleotide
cugccgauguuuccucugc

SEQ ID NO: 1811286 - RNA, 19 nt, Artificial Sequence
  Description of Artificial Sequence: Synthetic oligonucleotide
accaggccccgcuuugggg

SEQ ID NO: 1811287 - RNA, 19 nt, Artificial Sequence
  Description of Artificial Sequence: Synthetic oligonucleotide
ccuuuaugaaugugaugcc

SEQ ID NO: 1811288 - RNA, 19 nt, Artificial Sequence
  Description of Artificial Sequence: Synthetic oligonucleotide
uuccuguccauagguggcc

SEQ ID NO: 1811289 - RNA, 19 nt, Artificial Sequence
  Description of Artificial Sequence: Synthetic oligonucleotide
ccuacgccacaguaggugg

SEQ ID NO: 1811290 - RNA, 19 nt, Artificial Sequence
  Description of Artificial Sequence: Synthetic oligonucleotide
guuguacucugagccaggc

SEQ ID NO: 1811291 - RNA, 19 nt, Artificial Sequence
  Description of Artificial Sequence: Synthetic oligonucleotide
caguuccuguccauaggug

SEQ ID NO: 1811292 - RNA, 19 nt, Artificial Sequence
  Description of Artificial Sequence: Synthetic oligonucleotide
ccgauguuuccucugcucc

SEQ ID NO: 1811293 - RNA, 19 nt, Artificial Sequence
  Description of Artificial Sequence: Synthetic oligonucleotide
gucgauggagacgaucuca

SEQ ID NO: 1811294 - RNA, 19 nt, Artificial Sequence
  Description of Artificial Sequence: Synthetic oligonucleotide
caggagaaagacggucucc

SEQ ID NO: 1811295 - RNA, 19 nt, Artificial Sequence
  Description of Artificial Sequence: Synthetic oligonucleotide
ugaugcccacaaccaggcc

SEQ ID NO: 1811296 - RNA, 19 nt, Artificial Sequence
  Description of Artificial Sequence: Synthetic oligonucleotide
ugugcucgguugcgucggg

SEQ ID NO: 1811297 - RNA, 19 nt, Artificial Sequence
  Description of Artificial Sequence: Synthetic oligonucleotide
agguccuacgccacaguag

SEQ ID NO: 1811298 - RNA, 19 nt, Artificial Sequence
  Description of Artificial Sequence: Synthetic oligonucleotide
acgugagccacgcgcacgu

SEQ ID NO: 1811299 - RNA, 19 nt, Artificial Sequence
  Description of Artificial Sequence: Synthetic oligonucleotide
cauagucacaguaaauguu

SEQ ID NO: 1811300 - RNA, 19 nt, Artificial Sequence
  Description of Artificial Sequence: Synthetic oligonucleotide
guagguggaagccucugcu

SEQ ID NO: 1811301 - RNA, 19 nt, Artificial Sequence
  Description of Artificial Sequence: Synthetic oligonucleotide
acaacuggaaaggcgugaa

SEQ ID NO: 1811302 - RNA, 19 nt, Artificial Sequence
  Description of Artificial Sequence: Synthetic oligonucleotide
aagacggucuccagcuggu

SEQ ID NO: 1811303 - RNA, 19 nt, Artificial Sequence
  Description of Artificial Sequence: Synthetic oligonucleotide
ugccgauguuuccucugcu

SEQ ID NO: 1811304 - RNA, 19 nt, Artificial Sequence
  Description of Artificial Sequence: Synthetic oligonucleotide
cauucuccuuguagagaug

SEQ ID NO: 1811305 - RNA, 19 nt, Artificial Sequence
  Description of Artificial Sequence: Synthetic oligonucleotide
cuguccauagguggccacc

SEQ ID NO: 1811306 - RNA, 19 nt, Artificial Sequence
  Description of Artificial Sequence: Synthetic oligonucleotide
uggucgacgugagccacgc

SEQ ID NO: 1811307 - RNA, 19 nt, Artificial Sequence
  Description of Artificial Sequence: Synthetic oligonucleotide
cucaggagaaagacggucu

SEQ ID NO: 1811308 - RNA, 19 nt, Artificial Sequence
  Description of Artificial Sequence: Synthetic oligonucleotide
ucuggucgacgugagccac

SEQ ID NO: 1811309 - RNA, 19 nt, Artificial Sequence
  Description of Artificial Sequence: Synthetic oligonucleotide
uagcggaagccgagcaccu

SEQ ID NO: 1811310 - RNA, 19 nt, Artificial Sequence
  Description of Artificial Sequence: Synthetic oligonucleotide
gcugugcucgguugcgucg

SEQ ID NO: 1811311 - RNA, 19 nt, Artificial Sequence
  Description of Artificial Sequence: Synthetic oligonucleotide
gcuagcaacuccccucgcc

SEQ ID NO: 1811312 - RNA, 19 nt, Artificial Sequence
  Description of Artificial Sequence: Synthetic oligonucleotide
caccuugccuuuaaagaaa

SEQ ID NO: 1811313 - RNA, 19 nt, Artificial Sequence
  Description of Artificial Sequence: Synthetic oligonucleotide
agacgaucucagcguccac

SEQ ID NO: 1811314 - RNA, 19 nt, Artificial Sequence
  Description of Artificial Sequence: Synthetic oligonucleotide
agcaugcuggcaacaagca

SEQ ID NO: 1811315 - RNA, 19 nt, Artificial Sequence
  Description of Artificial Sequence: Synthetic oligonucleotide
ugccgacgaagccggguca

SEQ ID NO: 1811316 - RNA, 19 nt, Artificial Sequence
  Description of Artificial Sequence: Synthetic oligonucleotide
aagccagaggacacuacua

SEQ ID NO: 1811317 - RNA, 19 nt, Artificial Sequence
  Description of Artificial Sequence: Synthetic oligonucleotide
ugcaccccuuucagggaca

SEQ ID NO: 1811318 - RNA, 19 nt, Artificial Sequence
  Description of Artificial Sequence: Synthetic oligonucleotide
ucgguugcgucggggcugg

SEQ ID NO: 1811319 - RNA, 19 nt, Artificial Sequence
  Description of Artificial Sequence: Synthetic oligonucleotide
gguuucggacaucaagcca

SEQ ID NO: 1811320 - RNA, 19 nt, Artificial Sequence
  Description of Artificial Sequence: Synthetic oligonucleotide
gagccacgcgcacguaacc

SEQ ID NO: 1811321 - RNA, 19 nt, Artificial Sequence
  Description of Artificial Sequence: Synthetic oligonucleotide
gcaugcuggcaacaagcag

SEQ ID NO: 1811322 - RNA, 19 nt, Artificial Sequence
  Description of Artificial Sequence: Synthetic oligonucleotide
uaguugaacugcagcucuu

SEQ ID NO: 1811323 - RNA, 19 nt, Artificial Sequence
  Description of Artificial Sequence: Synthetic oligonucleotide
aggcagguuucggacauca

SEQ ID NO: 1811324 - RNA, 19 nt, Artificial Sequence
  Description of Artificial Sequence: Synthetic oligonucleotide
acaugggccauggccagca

SEQ ID NO: 1811325 - RNA, 19 nt, Artificial Sequence
  Description of Artificial Sequence: Synthetic oligonucleotide
gaaaggcgugaacuggagu

SEQ ID NO: 1811326 - RNA, 19 nt, Artificial Sequence
  Description of Artificial Sequence: Synthetic oligonucleotide
ccggauuuucugucggagg

SEQ ID NO: 1811327 - RNA, 19 nt, Artificial Sequence
  Description of Artificial Sequence: Synthetic oligonucleotide
ggcucauagucacaguaaa

SEQ ID NO: 1811328 - RNA, 19 nt, Artificial Sequence
  Description of Artificial Sequence: Synthetic oligonucleotide
gugucgauggagacgaucu

SEQ ID NO: 1811329 - RNA, 19 nt, Artificial Sequence
  Description of Artificial Sequence: Synthetic oligonucleotide
ucggggcuggacaggcuga

SEQ ID NO: 1811330 - RNA, 19 nt, Artificial Sequence
  Description of Artificial Sequence: Synthetic oligonucleotide
agcaacuccccucgcccgu

SEQ ID NO: 1811331 - RNA, 19 nt, Artificial Sequence
  Description of Artificial Sequence: Synthetic oligonucleotide
gugguacuuauagcagagc

SEQ ID NO: 1811332 - RNA, 19 nt, Artificial Sequence
  Description of Artificial Sequence: Synthetic oligonucleotide
gcucuuuggccacgggccg

SEQ ID NO: 1811333 - RNA, 19 nt, Artificial Sequence
  Description of Artificial Sequence: Synthetic oligonucleotide
gugcaccccuuucagggac

SEQ ID NO: 1811334 - RNA, 19 nt, Artificial Sequence
  Description of Artificial Sequence: Synthetic oligonucleotide
ugcuccacaugccgacgaa

SEQ ID NO: 1811335 - RNA, 19 nt, Artificial Sequence
  Description of Artificial Sequence: Synthetic oligonucleotide
ggcucgugguacuuauagc

SEQ ID NO: 1811336 - RNA, 19 nt, Artificial Sequence
  Description of Artificial Sequence: Synthetic oligonucleotide
cagguucgugagcucuggg

SEQ ID NO: 1811337 - RNA, 19 nt, Artificial Sequence
  Description of Artificial Sequence: Synthetic oligonucleotide
agauggauggcuggaucau

SEQ ID NO: 1811338 - RNA, 19 nt, Artificial Sequence
  Description of Artificial Sequence: Synthetic oligonucleotide
gcuggacaggcugaacacg

SEQ ID NO: 1811339 - RNA, 19 nt, Artificial Sequence
  Description of Artificial Sequence: Synthetic oligonucleotide
acugucgaacuggucgcug

SEQ ID NO: 1811340 - RNA, 19 nt, Artificial Sequence
  Description of Artificial Sequence: Synthetic oligonucleotide
gucggaggucuugguagcg

SEQ ID NO: 1811341 - RNA, 19 nt, Artificial Sequence
  Description of Artificial Sequence: Synthetic oligonucleotide
caagaccagcuccgaggcc

SEQ ID NO: 1811342 - RNA, 19 nt, Artificial Sequence
  Description of Artificial Sequence: Synthetic oligonucleotide
aucucagcguccacgggga

SEQ ID NO: 1811343 - RNA, 19 nt, Artificial Sequence
  Description of Artificial Sequence: Synthetic oligonucleotide
uacgccacaguagguggaa

SEQ ID NO: 1811344 - RNA, 19 nt, Artificial Sequence
  Description of Artificial Sequence: Synthetic oligonucleotide
ggugacuuguugaaggugu

SEQ ID NO: 1811345 - RNA, 19 nt, Artificial Sequence
  Description of Artificial Sequence: Synthetic oligonucleotide
ggaaaggcgugaacuggag

SEQ ID NO: 1811346 - RNA, 19 nt, Artificial Sequence
  Description of Artificial Sequence: Synthetic oligonucleotide
cucuuuggccacgggccgg

SEQ ID NO: 1811347 - RNA, 19 nt, Artificial Sequence
  Description of Artificial Sequence: Synthetic oligonucleotide
aggcucauagucacaguaa

SEQ ID NO: 1811348 - RNA, 19 nt, Artificial Sequence
  Description of Artificial Sequence: Synthetic oligonucleotide
accuugccuuuaaagaaaa

SEQ ID NO: 1811349 - RNA, 19 nt, Artificial Sequence
  Description of Artificial Sequence: Synthetic oligonucleotide
ccgggucaagaccagcucc

SEQ ID NO: 1811350 - RNA, 19 nt, Artificial Sequence
  Description of Artificial Sequence: Synthetic oligonucleotide
gggccggauuuucugucgg

SEQ ID NO: 1811351 - RNA, 19 nt, Artificial Sequence
  Description of Artificial Sequence: Synthetic oligonucleotide
gguagcggaagccgagcac

SEQ ID NO: 1811352 - RNA, 19 nt, Artificial Sequence
  Description of Artificial Sequence: Synthetic oligonucleotide
cugcagaacuguccauguc

SEQ ID NO: 1811353 - RNA, 19 nt, Artificial Sequence
  Description of Artificial Sequence: Synthetic oligonucleotide
cagaggacacugucgaacu

SEQ ID NO: 1811354 - RNA, 19 nt, Artificial Sequence
  Description of Artificial Sequence: Synthetic oligonucleotide
aggacacugucgaacuggu

SEQ ID NO: 1811355 - RNA, 19 nt, Artificial Sequence
  Description of Artificial Sequence: Synthetic oligonucleotide
cucgauucuucuggucgac

SEQ ID NO: 1811356 - RNA, 19 nt, Artificial Sequence
  Description of Artificial Sequence: Synthetic oligonucleotide
cacgcgcacguaaccacuc

SEQ ID NO: 1811357 - RNA, 19 nt, Artificial Sequence
  Description of Artificial Sequence: Synthetic oligonucleotide
acacgaucacucgggagau

SEQ ID NO: 1811358 - RNA, 19 nt, Artificial Sequence
  Description of Artificial Sequence: Synthetic oligonucleotide
gcgcacguaaccacucugg

SEQ ID NO: 1811359 - RNA, 19 nt, Artificial Sequence
  Description of Artificial Sequence: Synthetic oligonucleotide
gcccuugucuccugagucc

SEQ ID NO: 1811360 - RNA, 19 nt, Artificial Sequence
  Description of Artificial Sequence: Synthetic oligonucleotide
gcggaagccgagcaccuug

SEQ ID NO: 1811361 - RNA, 19 nt, Artificial Sequence
  Description of Artificial Sequence: Synthetic oligonucleotide
uuuggccacgggccggauu

SEQ ID NO: 1811362 - RNA, 19 nt, Artificial Sequence
  Description of Artificial Sequence: Synthetic oligonucleotide
acgggcugcuccucaaauu

SEQ ID NO: 1811363 - RNA, 19 nt, Artificial Sequence
  Description of Artificial Sequence: Synthetic oligonucleotide
cucagcguccacggggaug

SEQ ID NO: 1811364 - RNA, 19 nt, Artificial Sequence
  Description of Artificial Sequence: Synthetic oligonucleotide
agccacgcgcacguaacca

SEQ ID NO: 1811365 - RNA, 19 nt, Artificial Sequence
  Description of Artificial Sequence: Synthetic oligonucleotide
cucgguugcgucggggcug

SEQ ID NO: 1811366 - RNA, 19 nt, Artificial Sequence
  Description of Artificial Sequence: Synthetic oligonucleotide
gcacguaaccacucuggca

SEQ ID NO: 1811367 - RNA, 19 nt, Artificial Sequence
  Description of Artificial Sequence: Synthetic oligonucleotide
cacggggauguaguugaac

SEQ ID NO: 1811368 - RNA, 19 nt, Artificial Sequence
  Description of Artificial Sequence: Synthetic oligonucleotide
cuacgccacaguaggugga

SEQ ID NO: 1811369 - RNA, 19 nt, Artificial Sequence
  Description of Artificial Sequence: Synthetic oligonucleotide
gccggauuuucugucggag

SEQ ID NO: 1811370 - RNA, 19 nt, Artificial Sequence
  Description of Artificial Sequence: Synthetic oligonucleotide
cuccugaguccuuuaugaa

SEQ ID NO: 1811371 - RNA, 19 nt, Artificial Sequence
  Description of Artificial Sequence: Synthetic oligonucleotide
gucgaacuggucgcugcug

SEQ ID NO: 1811372 - RNA, 19 nt, Artificial Sequence
  Description of Artificial Sequence: Synthetic oligonucleotide
uagucagguucgugagcuc

SEQ ID NO: 1811373 - RNA, 19 nt, Artificial Sequence
  Description of Artificial Sequence: Synthetic oligonucleotide
guccaucuagguccacguc

SEQ ID NO: 1811374 - RNA, 19 nt, Artificial Sequence
  Description of Artificial Sequence: Synthetic oligonucleotide
acgcgcacguaaccacucu

SEQ ID NO: 1811375 - RNA, 19 nt, Artificial Sequence
  Description of Artificial Sequence: Synthetic oligonucleotide
gcggcuagcaacuccccuc

SEQ ID NO: 1811376 - RNA, 19 nt, Artificial Sequence
  Description of Artificial Sequence: Synthetic oligonucleotide
gugagccacgcgcacguaa

SEQ ID NO: 1811377 - RNA, 19 nt, Artificial Sequence
  Description of Artificial Sequence: Synthetic oligonucleotide
ccagcaugcuggcaacaag

SEQ ID NO: 1811378 - RNA, 19 nt, Artificial Sequence
  Description of Artificial Sequence: Synthetic oligonucleotide
caguagguggaagccucug

SEQ ID NO: 1811379 - RNA, 19 nt, Artificial Sequence
  Description of Artificial Sequence: Synthetic oligonucleotide
uggcaacaagcagacugua

SEQ ID NO: 1811380 - RNA, 19 nt, Artificial Sequence
  Description of Artificial Sequence: Synthetic oligonucleotide
cccacuccuguccccaagg

SEQ ID NO: 1811381 - RNA, 19 nt, Artificial Sequence
  Description of Artificial Sequence: Synthetic oligonucleotide
cggcucgugguacuuauag

SEQ ID NO: 1811382 - RNA, 19 nt, Artificial Sequence
  Description of Artificial Sequence: Synthetic oligonucleotide
gacugcccuugucuccuga

SEQ ID NO: 1811383 - RNA, 19 nt, Artificial Sequence
  Description of Artificial Sequence: Synthetic oligonucleotide
gggcccauccugcagaacu

SEQ ID NO: 1811384 - RNA, 19 nt, Artificial Sequence
  Description of Artificial Sequence: Synthetic oligonucleotide
gggugacuuguugaaggug

SEQ ID NO: 1811385 - RNA, 19 nt, Artificial Sequence
  Description of Artificial Sequence: Synthetic oligonucleotide
gcuggaucauucccacuca

SEQ ID NO: 1811386 - RNA, 19 nt, Artificial Sequence
  Description of Artificial Sequence: Synthetic oligonucleotide
cucaggcggcucgugguac

SEQ ID NO: 1811387 - RNA, 19 nt, Artificial Sequence
  Description of Artificial Sequence: Synthetic oligonucleotide
ggugucgauggagacgauc

SEQ ID NO: 1811388 - RNA, 19 nt, Artificial Sequence
  Description of Artificial Sequence: Synthetic oligonucleotide
uccccaaggcccugccgau

SEQ ID NO: 1811389 - RNA, 19 nt, Artificial Sequence
  Description of Artificial Sequence: Synthetic oligonucleotide
cuccgaggccuggaucagg

SEQ ID NO: 1811390 - RNA, 19 nt, Artificial Sequence
  Description of Artificial Sequence: Synthetic oligonucleotide
uacucugagccaggcucau

SEQ ID NO: 1811391 - RNA, 19 nt, Artificial Sequence
  Description of Artificial Sequence: Synthetic oligonucleotide
gcaaagguccuacgccaca

SEQ ID NO: 1811392 - RNA, 19 nt, Artificial Sequence
  Description of Artificial Sequence: Synthetic oligonucleotide
aggucccaguacacggcag

SEQ ID NO: 1811393 - RNA, 19 nt, Artificial Sequence
  Description of Artificial Sequence: Synthetic oligonucleotide
aguccagguuguacucuga

SEQ ID NO: 1811394 - RNA, 19 nt, Artificial Sequence
  Description of Artificial Sequence: Synthetic oligonucleotide
cgaagccgggucaagacca

SEQ ID NO: 1811395 - RNA, 19 nt, Artificial Sequence
  Description of Artificial Sequence: Synthetic oligonucleotide
gcuccacaugccgacgaag

SEQ ID NO: 1811396 - RNA, 19 nt, Artificial Sequence
  Description of Artificial Sequence: Synthetic oligonucleotide
gagagccgccgggaugagc

SEQ ID NO: 1811397 - RNA, 19 nt, Artificial Sequence
  Description of Artificial Sequence: Synthetic oligonucleotide
gugcucgguugcgucgggg

SEQ ID NO: 1811398 - RNA, 19 nt, Artificial Sequence
  Description of Artificial Sequence: Synthetic oligonucleotide
cacaugggccauggccagc

SEQ ID NO: 1811399 - RNA, 19 nt, Artificial Sequence
  Description of Artificial Sequence: Synthetic oligonucleotide
cgcacguaaccacucuggc

SEQ ID NO: 1811400 - RNA, 19 nt, Artificial Sequence
  Description of Artificial Sequence: Synthetic oligonucleotide
agccgccgggaugagccag

SEQ ID NO: 1811401 - RNA, 19 nt, Artificial Sequence
  Description of Artificial Sequence: Synthetic oligonucleotide
ggcaaagguccuacgccac

SEQ ID NO: 1811402 - RNA, 19 nt, Artificial Sequence
  Description of Artificial Sequence: Synthetic oligonucleotide
cggcuagcaacuccccucg

SEQ ID NO: 1811403 - RNA, 19 nt, Artificial Sequence
  Description of Artificial Sequence: Synthetic oligonucleotide
ggcugugcucgguugcguc

SEQ ID NO: 1811404 - RNA, 19 nt, Artificial Sequence
  Description of Artificial Sequence: Synthetic oligonucleotide
caaauucaggcagcucucu

SEQ ID NO: 1811405 - RNA, 19 nt, Artificial Sequence
  Description of Artificial Sequence: Synthetic oligonucleotide
agccgagcaccuugccuuu

SEQ ID NO: 1811406 - RNA, 19 nt, Artificial Sequence
  Description of Artificial Sequence: Synthetic oligonucleotide
cuguccaugucugcaagau

SEQ ID NO: 1811407 - RNA, 19 nt, Artificial Sequence
  Description of Artificial Sequence: Synthetic oligonucleotide
ccaguacacggcagccggc

SEQ ID NO: 1811408 - RNA, 19 nt, Artificial Sequence
  Description of Artificial Sequence: Synthetic oligonucleotide
ccacgggccggauuuucug

SEQ ID NO: 1811409 - RNA, 19 nt, Artificial Sequence
  Description of Artificial Sequence: Synthetic oligonucleotide
gguuguccaucuaggucca

SEQ ID NO: 1811410 - RNA, 19 nt, Artificial Sequence
  Description of Artificial Sequence: Synthetic oligonucleotide
gauggauggcuggaucauu

SEQ ID NO: 1811411 - RNA, 19 nt, Artificial Sequence
  Description of Artificial Sequence: Synthetic oligonucleotide
gcccagagcugagagccgc

SEQ ID NO: 1811412 - RNA, 19 nt, Artificial Sequence
  Description of Artificial Sequence: Synthetic oligonucleotide
ugcuggcaacaagcagacu

SEQ ID NO: 1811413 - RNA, 19 nt, Artificial Sequence
  Description of Artificial Sequence: Synthetic oligonucleotide
gccagaggacacuacuagu

SEQ ID NO: 1811414 - RNA, 19 nt, Artificial Sequence
  Description of Artificial Sequence: Synthetic oligonucleotide
cguaaccacucuggcagcc

SEQ ID NO: 1811415 - RNA, 19 nt, Artificial Sequence
  Description of Artificial Sequence: Synthetic oligonucleotide
cuggaggaugugcaccccu

SEQ ID NO: 1811416 - RNA, 19 nt, Artificial Sequence
  Description of Artificial Sequence: Synthetic oligonucleotide
cacgaucacucgggagaug

SEQ ID NO: 1811417 - RNA, 19 nt, Artificial Sequence
  Description of Artificial Sequence: Synthetic oligonucleotide
auuuucugucggaggucuu

SEQ ID NO: 1811418 - RNA, 19 nt, Artificial Sequence
  Description of Artificial Sequence: Synthetic oligonucleotide
cgggccggauuuucugucg

SEQ ID NO: 1811419 - RNA, 19 nt, Artificial Sequence
  Description of Artificial Sequence: Synthetic oligonucleotide
gccgggucaagaccagcuc

SEQ ID NO: 1811420 - RNA, 19 nt, Artificial Sequence
  Description of Artificial Sequence: Synthetic oligonucleotide
acaugccgacgaagccggg

SEQ ID NO: 1811421 - RNA, 19 nt, Artificial Sequence
  Description of Artificial Sequence: Synthetic oligonucleotide
ggucgacgugagccacgcg

SEQ ID NO: 1811422 - RNA, 19 nt, Artificial Sequence
  Description of Artificial Sequence: Synthetic oligonucleotide
agcuggucuccaaccugga

SEQ ID NO: 1811423 - RNA, 19 nt, Artificial Sequence
  Description of Artificial Sequence: Synthetic oligonucleotide
caucaagccagaggacacu

SEQ ID NO: 1811424 - RNA, 19 nt, Artificial Sequence
  Description of Artificial Sequence: Synthetic oligonucleotide
cacgggccggauuuucugu

SEQ ID NO: 1811425 - RNA, 19 nt, Artificial Sequence
  Description of Artificial Sequence: Synthetic oligonucleotide
gggcuggcaaagguccuac

SEQ ID NO: 1811426 - RNA, 19 nt, Artificial Sequence
  Description of Artificial Sequence: Synthetic oligonucleotide
cgauguuuccucugcucca

SEQ ID NO: 1811427 - RNA, 19 nt, Artificial Sequence
  Description of Artificial Sequence: Synthetic oligonucleotide
gguugcgucggggcuggac

SEQ ID NO: 1811428 - RNA, 19 nt, Artificial Sequence
  Description of Artificial Sequence: Synthetic oligonucleotide
ggcuagcaacuccccucgc

SEQ ID NO: 1811429 - RNA, 19 nt, Artificial Sequence
  Description of Artificial Sequence: Synthetic oligonucleotide
ggccggauuuucugucgga

SEQ ID NO: 1811430 - RNA, 19 nt, Artificial Sequence
  Description of Artificial Sequence: Synthetic oligonucleotide
cucccgcagcccaucccca

SEQ ID NO: 1811431 - RNA, 19 nt, Artificial Sequence
  Description of Artificial Sequence: Synthetic oligonucleotide
guuguccaucuagguccac

SEQ ID NO: 1811432 - RNA, 19 nt, Artificial Sequence
  Description of Artificial Sequence: Synthetic oligonucleotide
caguacacggcagccggcu

SEQ ID NO: 1811433 - RNA, 19 nt, Artificial Sequence
  Description of Artificial Sequence: Synthetic oligonucleotide
cgaucucagcguccacggg

SEQ ID NO: 1811434 - RNA, 19 nt, Artificial Sequence
  Description of Artificial Sequence: Synthetic oligonucleotide
cacucgggagaugggccca

SEQ ID NO: 1811435 - RNA, 19 nt, Artificial Sequence
  Description of Artificial Sequence: Synthetic oligonucleotide
gcgucggggcuggacaggc

SEQ ID NO: 1811436 - RNA, 19 nt, Artificial Sequence
  Description of Artificial Sequence: Synthetic oligonucleotide
cgugaacuggaguuccaaa

SEQ ID NO: 1811437 - RNA, 19 nt, Artificial Sequence
  Description of Artificial Sequence: Synthetic oligonucleotide
caugccgacgaagccgggu

SEQ ID NO: 1811438 - RNA, 19 nt, Artificial Sequence
  Description of Artificial Sequence: Synthetic oligonucleotide
cgcgcacguaaccacucug

SEQ ID NO: 1811439 - RNA, 19 nt, Artificial Sequence
  Description of Artificial Sequence: Synthetic oligonucleotide
agcggaagccgagcaccuu

SEQ ID NO: 1811440 - RNA, 19 nt, Artificial Sequence
  Description of Artificial Sequence: Synthetic oligonucleotide
ggacugcccuugucuccug

SEQ ID NO: 1811441 - RNA, 19 nt, Artificial Sequence
  Description of Artificial Sequence: Synthetic oligonucleotide
gggagugcucaggagggcu

SEQ ID NO: 1811442 - RNA, 19 nt, Artificial Sequence
  Description of Artificial Sequence: Synthetic oligonucleotide
caggcagguuucggacauc

SEQ ID NO: 1811443 - RNA, 19 nt, Artificial Sequence
  Description of Artificial Sequence: Synthetic oligonucleotide
gccgccgggaugagccagg

SEQ ID NO: 1811444 - RNA, 19 nt, Artificial Sequence
  Description of Artificial Sequence: Synthetic oligonucleotide
gcgugaacuggaguuccaa

SEQ ID NO: 1811445 - RNA, 19 nt, Artificial Sequence
  Description of Artificial Sequence: Synthetic oligonucleotide
cacaaccaggccccgcuuu

SEQ ID NO: 1811446 - RNA, 19 nt, Artificial Sequence
  Description of Artificial Sequence: Synthetic oligonucleotide
ggacacugucgaacugguc

SEQ ID NO: 1811447 - RNA, 19 nt, Artificial Sequence
  Description of Artificial Sequence: Synthetic oligonucleotide
cauucccacucaggagaaa

SEQ ID NO: 1811448 - RNA, 19 nt, Artificial Sequence
  Description of Artificial Sequence: Synthetic oligonucleotide
gcccugccgauguuuccuc

SEQ ID NO: 1811449 - RNA, 19 nt, Artificial Sequence
  Description of Artificial Sequence: Synthetic oligonucleotide
ggcaacaagcagacuguau

SEQ ID NO: 1811450 - RNA, 19 nt, Artificial Sequence
  Description of Artificial Sequence: Synthetic oligonucleotide
gcaccccuuucagggacac

SEQ ID NO: 1811451 - RNA, 19 nt, Artificial Sequence
  Description of Artificial Sequence: Synthetic oligonucleotide
ggcggcuagcaacuccccu

SEQ ID NO: 1811452 - RNA, 19 nt, Artificial Sequence
  Description of Artificial Sequence: Synthetic oligonucleotide
ggcgugaacuggaguucca

SEQ ID NO: 1811453 - RNA, 19 nt, Artificial Sequence
  Description of Artificial Sequence: Synthetic oligonucleotide
ggcggcucgugguacuuau

SEQ ID NO: 1811454 - RNA, 19 nt, Artificial Sequence
  Description of Artificial Sequence: Synthetic oligonucleotide
ggacacuacuagucagguu

SEQ ID NO: 1811455 - RNA, 19 nt, Artificial Sequence
  Description of Artificial Sequence: Synthetic oligonucleotide
gcguccacggggauguagu

SEQ ID NO: 1811456 - RNA, 19 nt, Artificial Sequence
  Description of Artificial Sequence: Synthetic oligonucleotide
ggcccugccgauguuuccu

SEQ ID NO: 1811457 - RNA, 19 nt, Artificial Sequence
  Description of Artificial Sequence: Synthetic oligonucleotide
cacuacuagucagguucgu

SEQ ID NO: 1811458 - RNA, 19 nt, Artificial Sequence
  Description of Artificial Sequence: Synthetic oligonucleotide
aggcggcucgugguacuua

SEQ ID NO: 1811459 - RNA, 19 nt, Artificial Sequence
  Description of Artificial Sequence: Synthetic oligonucleotide
cacugucgaacuggucgcu

SEQ ID NO: 1811460 - RNA, 19 nt, Artificial Sequence
  Description of Artificial Sequence: Synthetic oligonucleotide
ccgacgaagccgggucaag

SEQ ID NO: 1811461 - RNA, 19 nt, Artificial Sequence
  Description of Artificial Sequence: Synthetic oligonucleotide
guccuacgccacaguaggu

SEQ ID NO: 1811462 - RNA, 19 nt, Artificial Sequence
  Description of Artificial Sequence: Synthetic oligonucleotide
uggccacgggccggauuuu

SEQ ID NO: 1811463 - RNA, 19 nt, Artificial Sequence
  Description of Artificial Sequence: Synthetic oligonucleotide
ggccacgggccggauuuuc

SEQ ID NO: 1811464 - RNA, 19 nt, Artificial Sequence
  Description of Artificial Sequence: Synthetic oligonucleotide
cgacgugagccacgcgcac

SEQ ID NO: 1811465 - RNA, 19 nt, Artificial Sequence
  Description of Artificial Sequence: Synthetic oligonucleotide
ggccuggaucaggcugugc

SEQ ID NO: 1811466 - RNA, 19 nt, Artificial Sequence
  Description of Artificial Sequence: Synthetic oligonucleotide
cugugggcugugcucgguu

SEQ ID NO: 1811467 - RNA, 19 nt, Artificial Sequence
  Description of Artificial Sequence: Synthetic oligonucleotide
ggggcuggcaaagguccua

SEQ ID NO: 1811468 - RNA, 19 nt, Artificial Sequence
  Description of Artificial Sequence: Synthetic oligonucleotide
gccgacgaagccgggucaa

SEQ ID NO: 1811469 - RNA, 19 nt, Artificial Sequence
  Description of Artificial Sequence: Synthetic oligonucleotide
ccgagcaccuugccuuuaa

SEQ ID NO: 1811470 - RNA, 19 nt, Artificial Sequence
  Description of Artificial Sequence: Synthetic oligonucleotide
ccacgcgcacguaaccacu

SEQ ID NO: 1811471 - RNA, 19 nt, Artificial Sequence
  Description of Artificial Sequence: Synthetic oligonucleotide
aggugucgauggagacgau

SEQ ID NO: 1811472 - RNA, 19 nt, Artificial Sequence
  Description of Artificial Sequence: Synthetic oligonucleotide
ggccuggggcccacuccug

SEQ ID NO: 1811473 - RNA, 19 nt, Artificial Sequence
  Description of Artificial Sequence: Synthetic oligonucleotide
ccucaggcggcucguggua

SEQ ID NO: 1811474 - RNA, 19 nt, Artificial Sequence
  Description of Artificial Sequence: Synthetic oligonucleotide
ccccaaggcccugccgaug

SEQ ID NO: 1811475 - RNA, 19 nt, Artificial Sequence
  Description of Artificial Sequence: Synthetic oligonucleotide
ccgccgggaugagccaggc

SEQ ID NO: 1811476 - RNA, 19 nt, Artificial Sequence
  Description of Artificial Sequence: Synthetic oligonucleotide
gccacgggccggauuuucu

SEQ ID NO: 1811477 - RNA, 19 nt, Artificial Sequence
  Description of Artificial Sequence: Synthetic oligonucleotide
cgagcaccuugccuuuaaa

SEQ ID NO: 1811478 - RNA, 19 nt, Artificial Sequence
  Description of Artificial Sequence: Synthetic oligonucleotide
cccugccgauguuuccucu

SEQ ID NO: 1811479 - RNA, 19 nt, Artificial Sequence
  Description of Artificial Sequence: Synthetic oligonucleotide
gggcugugcucgguugcgu

SEQ ID NO: 1811480 - RNA, 19 nt, Artificial Sequence
  Description of Artificial Sequence: Synthetic oligonucleotide
gggaugagccaggcagguu

SEQ ID NO: 1811481 - RNA, 19 nt, Artificial Sequence
  Description of Artificial Sequence: Synthetic oligonucleotide
caggcggcucgugguacuu

SEQ ID NO: 1811482 - RNA, 19 nt, Artificial Sequence
  Description of Artificial Sequence: Synthetic oligonucleotide
gcggcucgugguacuuaua

SEQ ID NO: 1811483 - RNA, 19 nt, Artificial Sequence
  Description of Artificial Sequence: Synthetic oligonucleotide
gccgagcaccuugccuuua

SEQ ID NO: 1811484 - RNA, 19 nt, Artificial Sequence
  Description of Artificial Sequence: Synthetic oligonucleotide
ccgaggccuggaucaggcu

SEQ ID NO: 1811485 - RNA, 19 nt, Artificial Sequence
  Description of Artificial Sequence: Synthetic oligonucleotide
cguccacggggauguaguu

SEQ ID NO: 1811486 - RNA, 19 nt, Artificial Sequence
  Description of Artificial Sequence: Synthetic oligonucleotide
ccacaaccaggccccgcuu

SEQ ID NO: 1811487 - RNA, 19 nt, Artificial Sequence
  Description of Artificial Sequence: Synthetic oligonucleotide
cagcguccacggggaugua

SEQ ID NO: 1811488 - RNA, 19 nt, Artificial Sequence
  Description of Artificial Sequence: Synthetic oligonucleotide
cgugagccacgcgcacgua

SEQ ID NO: 1811489 - RNA, 19 nt, Artificial Sequence
  Description of Artificial Sequence: Synthetic oligonucleotide
cgguugcgucggggcugga

SEQ ID NO: 1811490 - RNA, 19 nt, Artificial Sequence
  Description of Artificial Sequence: Synthetic oligonucleotide
aauaucaagauauagaaua

SEQ ID NO: 1811491 - RNA, 19 nt, Artificial Sequence
  Description of Artificial Sequence: Synthetic oligonucleotide
uaaaauaucaagauauaga

SEQ ID NO: 1811492 - RNA, 19 nt, Artificial Sequence
  Description of Artificial Sequence: Synthetic oligonucleotide
aaacaauucaaaauggagg

SEQ ID NO: 1811493 - RNA, 19 nt, Artificial Sequence
  Description of Artificial Sequence: Synthetic oligonucleotide
auauauucugcauuugccc

SEQ ID NO: 1811494 - RNA, 19 nt, Artificial Sequence
  Description of Artificial Sequence: Synthetic oligonucleotide
uauuauaauguucagguaa

SEQ ID NO: 1811495 - RNA, 19 nt, Artificial Sequence
  Description of Artificial Sequence: Synthetic oligonucleotide
caaaaugugguucaaaggc

SEQ ID NO: 1811496 - RNA, 19 nt, Artificial Sequence
  Description of Artificial Sequence: Synthetic oligonucleotide
acaaagaacauguauauga

SEQ ID NO: 1811497 - RNA, 19 nt, Artificial Sequence
  Description of Artificial Sequence: Synthetic oligonucleotide
ucuacaucuucuaagaccu

SEQ ID NO: 1811498 - RNA, 19 nt, Artificial Sequence
  Description of Artificial Sequence: Synthetic oligonucleotide
uauaugcucauaaagaaau

SEQ ID NO: 1811499 - RNA, 19 nt, Artificial Sequence
  Description of Artificial Sequence: Synthetic oligonucleotide
agaaguaaugauguguucc

SEQ ID NO: 1811500 - RNA, 19 nt, Artificial Sequence
  Description of Artificial Sequence: Synthetic oligonucleotide
uggaccaacgcucagacgc

SEQ ID NO: 1811501 - RNA, 19 nt, Artificial Sequence
  Description of Artificial Sequence: Synthetic oligonucleotide
aauagcacuguucaauucu

SEQ ID NO: 1811502 - RNA, 19 nt, Artificial Sequence
  Description of Artificial Sequence: Synthetic oligonucleotide
aaaaugugguucaaaggcc

SEQ ID NO: 1811503 - RNA, 19 nt, Artificial Sequence
  Description of Artificial Sequence: Synthetic oligonucleotide
uauaaggucgcauuuucag

SEQ ID NO: 1811504 - RNA, 19 nt, Artificial Sequence
  Description of Artificial Sequence: Synthetic oligonucleotide
uugacuaauuccauguaag

SEQ ID NO: 1811505 - RNA, 19 nt, Artificial Sequence
  Description of Artificial Sequence: Synthetic oligonucleotide
uaaaauucuaagacaaccu

SEQ ID NO: 1811506 - RNA, 19 nt, Artificial Sequence
  Description of Artificial Sequence: Synthetic oligonucleotide
ucccacaugaauaaaaggu

SEQ ID NO: 1811507 - RNA, 19 nt, Artificial Sequence
  Description of Artificial Sequence: Synthetic oligonucleotide
acuaauugacauaaaauuc

SEQ ID NO: 1811508 - RNA, 19 nt, Artificial Sequence
  Description of Artificial Sequence: Synthetic oligonucleotide
aagagaauggcccuuggcu

SEQ ID NO: 1811509 - RNA, 19 nt, Artificial Sequence
  Description of Artificial Sequence: Synthetic oligonucleotide
uucugauaggccaaaaugu

SEQ ID NO: 1811510 - RNA, 19 nt, Artificial Sequence
  Description of Artificial Sequence: Synthetic oligonucleotide
uuaguugcugauauaaggu

SEQ ID NO: 1811511 - RNA, 19 nt, Artificial Sequence
  Description of Artificial Sequence: Synthetic oligonucleotide
uccauaucuggcaugagug

SEQ ID NO: 1811512 - RNA, 19 nt, Artificial Sequence
  Description of Artificial Sequence: Synthetic oligonucleotide
ugcauugucagaaagcaaa

SEQ ID NO: 1811513 - RNA, 19 nt, Artificial Sequence
  Description of Artificial Sequence: Synthetic oligonucleotide
uacuugauuucccacauga

SEQ ID NO: 1811514 - RNA, 19 nt, Artificial Sequence
  Description of Artificial Sequence: Synthetic oligonucleotide
uuuaacuucccacugcuuc

SEQ ID NO: 1811515 - RNA, 19 nt, Artificial Sequence
  Description of Artificial Sequence: Synthetic oligonucleotide
uuaacgaacuggacuauag

SEQ ID NO: 1811516 - RNA, 19 nt, Artificial Sequence
  Description of Artificial Sequence: Synthetic oligonucleotide
uacaaauggccaaacacca

SEQ ID NO: 1811517 - RNA, 19 nt, Artificial Sequence
  Description of Artificial Sequence: Synthetic oligonucleotide
aaauagcacuguucaauuc

SEQ ID NO: 1811518 - RNA, 19 nt, Artificial Sequence
  Description of Artificial Sequence: Synthetic oligonucleotide
ucugauaggccaaaaugug

SEQ ID NO: 1811519 - RNA, 19 nt, Artificial Sequence
  Description of Artificial Sequence: Synthetic oligonucleotide
aaggagauccauaucuggc

SEQ ID NO: 1811520 - RNA, 19 nt, Artificial Sequence
  Description of Artificial Sequence: Synthetic oligonucleotide
uaaggucgcauuuucaggc

SEQ ID NO: 1811521 - RNA, 19 nt, Artificial Sequence
  Description of Artificial Sequence: Synthetic oligonucleotide
uguguucccagucuuuggg

SEQ ID NO: 1811522 - RNA, 19 nt, Artificial Sequence
  Description of Artificial Sequence: Synthetic oligonucleotide
gaaguaaugauguguuccc

SEQ ID NO: 1811523 - RNA, 19 nt, Artificial Sequence
  Description of Artificial Sequence: Synthetic oligonucleotide
aacagcauauuguugacua

SEQ ID NO: 1811524 - RNA, 19 nt, Artificial Sequence
  Description of Artificial Sequence: Synthetic oligonucleotide
uugauuucccacaugaaua

SEQ ID NO: 1811525 - RNA, 19 nt, Artificial Sequence
  Description of Artificial Sequence: Synthetic oligonucleotide
uugucagaaagcaaaauuu

SEQ ID NO: 1811526 - RNA, 19 nt, Artificial Sequence
  Description of Artificial Sequence: Synthetic oligonucleotide
uuauugaagaaguaaugau

SEQ ID NO: 1811527 - RNA, 19 nt, Artificial Sequence
  Description of Artificial Sequence: Synthetic oligonucleotide
ugauaggccaaaauguggu

SEQ ID NO: 1811528 - RNA, 19 nt, Artificial Sequence
  Description of Artificial Sequence: Synthetic oligonucleotide
aagaaguaaugauguguuc

SEQ ID NO: 1811529 - RNA, 19 nt, Artificial Sequence
  Description of Artificial Sequence: Synthetic oligonucleotide
ugaagaaguaaugaugugu

SEQ ID NO: 1811530 - RNA, 19 nt, Artificial Sequence
  Description of Artificial Sequence: Synthetic oligonucleotide
cuucugauaggccaaaaug

SEQ ID NO: 1811531 - RNA, 19 nt, Artificial Sequence
  Description of Artificial Sequence: Synthetic oligonucleotide
uccagauggagacauauau

SEQ ID NO: 1811532 - RNA, 19 nt, Artificial Sequence
  Description of Artificial Sequence: Synthetic oligonucleotide
uugguuuugaaauucugaa

SEQ ID NO: 1811533 - RNA, 19 nt, Artificial Sequence
  Description of Artificial Sequence: Synthetic oligonucleotide
auaaggucgcauuuucagg

SEQ ID NO: 1811534 - RNA, 19 nt, Artificial Sequence
  Description of Artificial Sequence: Synthetic oligonucleotide
cugaucuucaaaauagcac

SEQ ID NO: 1811535 - RNA, 19 nt, Artificial Sequence
  Description of Artificial Sequence: Synthetic oligonucleotide
aaggucgcauuuucaggcc

SEQ ID NO: 1811536 - RNA, 19 nt, Artificial Sequence
  Description of Artificial Sequence: Synthetic oligonucleotide
ucugaaacuauuaucuauu

SEQ ID NO: 1811537 - RNA, 19 nt, Artificial Sequence
  Description of Artificial Sequence: Synthetic oligonucleotide
uauaauguucagguaauac

SEQ ID NO: 1811538 - RNA, 19 nt, Artificial Sequence
  Description of Artificial Sequence: Synthetic oligonucleotide
ugagugaucuccccuacug

SEQ ID NO: 1811539 - RNA, 19 nt, Artificial Sequence
  Description of Artificial Sequence: Synthetic oligonucleotide
uggagguggacacaaauaa

SEQ ID NO: 1811540 - RNA, 19 nt, Artificial Sequence
  Description of Artificial Sequence: Synthetic oligonucleotide
aaagguacuuuuccagaug

SEQ ID NO: 1811541 - RNA, 19 nt, Artificial Sequence
  Description of Artificial Sequence: Synthetic oligonucleotide
acaaccugccuuuacacug

SEQ ID NO: 1811542 - RNA, 19 nt, Artificial Sequence
  Description of Artificial Sequence: Synthetic oligonucleotide
aguaaugauguguucccag

SEQ ID NO: 1811543 - RNA, 19 nt, Artificial Sequence
  Description of Artificial Sequence: Synthetic oligonucleotide
aagacaaccugccuuuaca

SEQ ID NO: 1811544 - RNA, 19 nt, Artificial Sequence
  Description of Artificial Sequence: Synthetic oligonucleotide
ucuuaguugcugauauaag

SEQ ID NO: 1811545 - RNA, 19 nt, Artificial Sequence
  Description of Artificial Sequence: Synthetic oligonucleotide
gauauaaggucgcauuuuc

SEQ ID NO: 1811546 - RNA, 19 nt, Artificial Sequence
  Description of Artificial Sequence: Synthetic oligonucleotide
uguuaccccacccaauagc

SEQ ID NO: 1811547 - RNA, 19 nt, Artificial Sequence
  Description of Artificial Sequence: Synthetic oligonucleotide
agacaaccugccuuuacac

SEQ ID NO: 1811548 - RNA, 19 nt, Artificial Sequence
  Description of Artificial Sequence: Synthetic oligonucleotide
cugauaggccaaaaugugg

SEQ ID NO: 1811549 - RNA, 19 nt, Artificial Sequence
  Description of Artificial Sequence: Synthetic oligonucleotide
acacugaucuucaaaauag

SEQ ID NO: 1811550 - RNA, 19 nt, Artificial Sequence
  Description of Artificial Sequence: Synthetic oligonucleotide
ugugguucaaaggccaagg

SEQ ID NO: 1811551 - RNA, 19 nt, Artificial Sequence
  Description of Artificial Sequence: Synthetic oligonucleotide
ucugcauuugcccuacacu

SEQ ID NO: 1811552 - RNA, 19 nt, Artificial Sequence
  Description of Artificial Sequence: Synthetic oligonucleotide
aguugcugauauaaggucg

SEQ ID NO: 1811553 - RNA, 19 nt, Artificial Sequence
  Description of Artificial Sequence: Synthetic oligonucleotide
aacgcuuccgccaccaggg

SEQ ID NO: 1811554 - RNA, 19 nt, Artificial Sequence
  Description of Artificial Sequence: Synthetic oligonucleotide
gagcaucaaguucaguagg

SEQ ID NO: 1811555 - RNA, 19 nt, Artificial Sequence
  Description of Artificial Sequence: Synthetic oligonucleotide
gaaugguguacaaauggcc

SEQ ID NO: 1811556 - RNA, 19 nt, Artificial Sequence
  Description of Artificial Sequence: Synthetic oligonucleotide
uucugaaacuauuaucuau

SEQ ID NO: 1811557 - RNA, 19 nt, Artificial Sequence
  Description of Artificial Sequence: Synthetic oligonucleotide
cuauuaucuauuauaaugu

SEQ ID NO: 1811558 - RNA, 19 nt, Artificial Sequence
  Description of Artificial Sequence: Synthetic oligonucleotide
aggauaaggagauccauau

SEQ ID NO: 1811559 - RNA, 19 nt, Artificial Sequence
  Description of Artificial Sequence: Synthetic oligonucleotide
guagguugcuuauugaaga

SEQ ID NO: 1811560 - RNA, 19 nt, Artificial Sequence
  Description of Artificial Sequence: Synthetic oligonucleotide
ugaaacuauuaucuauuau

SEQ ID NO: 1811561 - RNA, 19 nt, Artificial Sequence
  Description of Artificial Sequence: Synthetic oligonucleotide
ugauuucccacaugaauaa

SEQ ID NO: 1811562 - RNA, 19 nt, Artificial Sequence
  Description of Artificial Sequence: Synthetic oligonucleotide
cuuauugaagaaguaauga

SEQ ID NO: 1811563 - RNA, 19 nt, Artificial Sequence
  Description of Artificial Sequence: Synthetic oligonucleotide
caucaaguucaguagguug

SEQ ID NO: 1811564 - RNA, 19 nt, Artificial Sequence
  Description of Artificial Sequence: Synthetic oligonucleotide
uggacuauaggaccaaguu

SEQ ID NO: 1811565 - RNA, 19 nt, Artificial Sequence
  Description of Artificial Sequence: Synthetic oligonucleotide
gacuauaggaccaaguucu

SEQ ID NO: 1811566 - RNA, 19 nt, Artificial Sequence
  Description of Artificial Sequence: Synthetic oligonucleotide
acgaacuggacuauaggac

SEQ ID NO: 1811567 - RNA, 19 nt, Artificial Sequence
  Description of Artificial Sequence: Synthetic oligonucleotide
ugcugcauugucagaaagc

SEQ ID NO: 1811568 - RNA, 19 nt, Artificial Sequence
  Description of Artificial Sequence: Synthetic oligonucleotide
ugcagucaacagcauauug

SEQ ID NO: 1811569 - RNA, 19 nt, Artificial Sequence
  Description of Artificial Sequence: Synthetic oligonucleotide
aaaugugguucaaaggcca

SEQ ID NO: 1811570 - RNA, 19 nt, Artificial Sequence
  Description of Artificial Sequence: Synthetic oligonucleotide
uaagagaauggcccuuggc

SEQ ID NO: 1811571 - RNA, 19 nt, Artificial Sequence
  Description of Artificial Sequence: Synthetic oligonucleotide
aaguucaguagguugcuua

SEQ ID NO: 1811572 - RNA, 19 nt, Artificial Sequence
  Description of Artificial Sequence: Synthetic oligonucleotide
uccguuuaacuucccacug

SEQ ID NO: 1811573 - RNA, 19 nt, Artificial Sequence
  Description of Artificial Sequence: Synthetic oligonucleotide
cuuccguuuaacuucccac

SEQ ID NO: 1811574 - RNA, 19 nt, Artificial Sequence
  Description of Artificial Sequence: Synthetic oligonucleotide
agacauauauucugcauuu

SEQ ID NO: 1811575 - RNA, 19 nt, Artificial Sequence
  Description of Artificial Sequence: Synthetic oligonucleotide
uauuaucuauuauaauguu

SEQ ID NO: 1811576 - RNA, 19 nt, Artificial Sequence
  Description of Artificial Sequence: Synthetic oligonucleotide
ugcauuugcccuacacucc

SEQ ID NO: 1811577 - RNA, 19 nt, Artificial Sequence
  Description of Artificial Sequence: Synthetic oligonucleotide
auaggccaaaaugugguuc

SEQ ID NO: 1811578 - RNA, 19 nt, Artificial Sequence
  Description of Artificial Sequence: Synthetic oligonucleotide
aaauggccaaacaccagag

SEQ ID NO: 1811579 - RNA, 19 nt, Artificial Sequence
  Description of Artificial Sequence: Synthetic oligonucleotide
gauacaacucugcagucaa

SEQ ID NO: 1811580 - RNA, 19 nt, Artificial Sequence
  Description of Artificial Sequence: Synthetic oligonucleotide
uaggccaaaaugugguuca

SEQ ID NO: 1811581 - RNA, 19 nt, Artificial Sequence
  Description of Artificial Sequence: Synthetic oligonucleotide
uucagguaauacauauuuc

SEQ ID NO: 1811582 - RNA, 19 nt, Artificial Sequence
  Description of Artificial Sequence: Synthetic oligonucleotide
gccaaaaugugguucaaag

SEQ ID NO: 1811583 - RNA, 19 nt, Artificial Sequence
  Description of Artificial Sequence: Synthetic oligonucleotide
cauccaacccaucacuaag

SEQ ID NO: 1811584 - RNA, 19 nt, Artificial Sequence
  Description of Artificial Sequence: Synthetic oligonucleotide
aguagguugcuuauugaag

SEQ ID NO: 1811585 - RNA, 19 nt, Artificial Sequence
  Description of Artificial Sequence: Synthetic oligonucleotide
accauaguugcuuaagguu

SEQ ID NO: 1811586 - RNA, 19 nt, Artificial Sequence
  Description of Artificial Sequence: Synthetic oligonucleotide
agcaagagaugcugcauug

SEQ ID NO: 1811587 - RNA, 19 nt, Artificial Sequence
  Description of Artificial Sequence: Synthetic oligonucleotide
gaacauguauaugaaauua

SEQ ID NO: 1811588 - RNA, 19 nt, Artificial Sequence
  Description of Artificial Sequence: Synthetic oligonucleotide
aggagauccauaucuggca

SEQ ID NO: 1811589 - RNA, 19 nt, Artificial Sequence
  Description of Artificial Sequence: Synthetic oligonucleotide
acgcgcagagcacaccucc

SEQ ID NO: 1811590 - RNA, 19 nt, Artificial Sequence
  Description of Artificial Sequence: Synthetic oligonucleotide
aaggccugcacagcaagag

SEQ ID NO: 1811591 - RNA, 19 nt, Artificial Sequence
  Description of Artificial Sequence: Synthetic oligonucleotide
auccauaucuggcaugagu

SEQ ID NO: 1811592 - RNA, 19 nt, Artificial Sequence
  Description of Artificial Sequence: Synthetic oligonucleotide
ugguucaaaggccaaggau

SEQ ID NO: 1811593 - RNA, 19 nt, Artificial Sequence
  Description of Artificial Sequence: Synthetic oligonucleotide
gacaugucggcugcgaggc

SEQ ID NO: 1811594 - RNA, 19 nt, Artificial Sequence
  Description of Artificial Sequence: Synthetic oligonucleotide
uccagagucuuguuacccc

SEQ ID NO: 1811595 - RNA, 19 nt, Artificial Sequence
  Description of Artificial Sequence: Synthetic oligonucleotide
uuguuaccccacccaauag

SEQ ID NO: 1811596 - RNA, 19 nt, Artificial Sequence
  Description of Artificial Sequence: Synthetic oligonucleotide
acaaccauaguugcuuaag

SEQ ID NO: 1811597 - RNA, 19 nt, Artificial Sequence
  Description of Artificial Sequence: Synthetic oligonucleotide
agacgaacgcuuccgccac

SEQ ID NO: 1811598 - RNA, 19 nt, Artificial Sequence
  Description of Artificial Sequence: Synthetic oligonucleotide
ucaaaauagcacuguucaa

SEQ ID NO: 1811599 - RNA, 19 nt, Artificial Sequence
  Description of Artificial Sequence: Synthetic oligonucleotide
uucugcauuugcccuacac

SEQ ID NO: 1811600 - RNA, 19 nt, Artificial Sequence
  Description of Artificial Sequence: Synthetic oligonucleotide
ccaaaaugugguucaaagg

SEQ ID NO: 1811601 - RNA, 19 nt, Artificial Sequence
  Description of Artificial Sequence: Synthetic oligonucleotide
aauugacauaaaauucuaa

SEQ ID NO: 1811602 - RNA, 19 nt, Artificial Sequence
  Description of Artificial Sequence: Synthetic oligonucleotide
guugacuaauuccauguaa

SEQ ID NO: 1811603 - RNA, 19 nt, Artificial Sequence
  Description of Artificial Sequence: Synthetic oligonucleotide
uaagacaaccugccuuuac

SEQ ID NO: 1811604 - RNA, 19 nt, Artificial Sequence
  Description of Artificial Sequence: Synthetic oligonucleotide
aauucaaaauggaggugga

SEQ ID NO: 1811605 - RNA, 19 nt, Artificial Sequence
  Description of Artificial Sequence: Synthetic oligonucleotide
auuauaauguucagguaau

SEQ ID NO: 1811606 - RNA, 19 nt, Artificial Sequence
  Description of Artificial Sequence: Synthetic oligonucleotide
auucaaaauggagguggac

SEQ ID NO: 1811607 - RNA, 19 nt, Artificial Sequence
  Description of Artificial Sequence: Synthetic oligonucleotide
aucacuggucaacugugug

SEQ ID NO: 1811608 - RNA, 19 nt, Artificial Sequence
  Description of Artificial Sequence: Synthetic oligonucleotide
ucacuaagagaauggcccu

SEQ ID NO: 1811609 - RNA, 19 nt, Artificial Sequence
  Description of Artificial Sequence: Synthetic oligonucleotide
caaauggccaaacaccaga

SEQ ID NO: 1811610 - RNA, 19 nt, Artificial Sequence
  Description of Artificial Sequence: Synthetic oligonucleotide
agucuuguuaccccaccca

SEQ ID NO: 1811611 - RNA, 19 nt, Artificial Sequence
  Description of Artificial Sequence: Synthetic oligonucleotide
agagaauggcccuuggcuu

SEQ ID NO: 1811612 - RNA, 19 nt, Artificial Sequence
  Description of Artificial Sequence: Synthetic oligonucleotide
gagucuuguuaccccaccc

SEQ ID NO: 1811613 - RNA, 19 nt, Artificial Sequence
  Description of Artificial Sequence: Synthetic oligonucleotide
aauggcccuuggcuuuaac

SEQ ID NO: 1811614 - RNA, 19 nt, Artificial Sequence
  Description of Artificial Sequence: Synthetic oligonucleotide
agcuaacgagccucgcugg

SEQ ID NO: 1811615 - RNA, 19 nt, Artificial Sequence
  Description of Artificial Sequence: Synthetic oligonucleotide
uggucaacugugugguaag

SEQ ID NO: 1811616 - RNA, 19 nt, Artificial Sequence
  Description of Artificial Sequence: Synthetic oligonucleotide
auguguucccagucuuugg

SEQ ID NO: 1811617 - RNA, 19 nt, Artificial Sequence
  Description of Artificial Sequence: Synthetic oligonucleotide
ggagauacaacucugcagu

SEQ ID NO: 1811618 - RNA, 19 nt, Artificial Sequence
  Description of Artificial Sequence: Synthetic oligonucleotide
ugggagacgaacgcuuccg

SEQ ID NO: 1811619 - RNA, 19 nt, Artificial Sequence
  Description of Artificial Sequence: Synthetic oligonucleotide
auaggaccaaguucugaca

SEQ ID NO: 1811620 - RNA, 19 nt, Artificial Sequence
  Description of Artificial Sequence: Synthetic oligonucleotide
cacccaauagcuuucaucu

SEQ ID NO: 1811621 - RNA, 19 nt, Artificial Sequence
  Description of Artificial Sequence: Synthetic oligonucleotide
guaacaacuaauugacaua

SEQ ID NO: 1811622 - RNA, 19 nt, Artificial Sequence
  Description of Artificial Sequence: Synthetic oligonucleotide
guucagguaauacauauuu

SEQ ID NO: 1811623 - RNA, 19 nt, Artificial Sequence
  Description of Artificial Sequence: Synthetic oligonucleotide
aguucaguagguugcuuau

SEQ ID NO: 1811624 - RNA, 19 nt, Artificial Sequence
  Description of Artificial Sequence: Synthetic oligonucleotide
uguucccagucuuugggaa

SEQ ID NO: 1811625 - RNA, 19 nt, Artificial Sequence
  Description of Artificial Sequence: Synthetic oligonucleotide
agauccauaucuggcauga

SEQ ID NO: 1811626 - RNA, 19 nt, Artificial Sequence
  Description of Artificial Sequence: Synthetic oligonucleotide
uguugacuaauuccaugua

SEQ ID NO: 1811627 - RNA, 19 nt, Artificial Sequence
  Description of Artificial Sequence: Synthetic oligonucleotide
acaugaauaaaagguacuu

SEQ ID NO: 1811628 - RNA, 19 nt, Artificial Sequence
  Description of Artificial Sequence: Synthetic oligonucleotide
uugcccuacacuccacucu

SEQ ID NO: 1811629 - RNA, 19 nt, Artificial Sequence
  Description of Artificial Sequence: Synthetic oligonucleotide
cuaagagaauggcccuugg

SEQ ID NO: 1811630 - RNA, 19 nt, Artificial Sequence
  Description of Artificial Sequence: Synthetic oligonucleotide
gagauccauaucuggcaug

SEQ ID NO: 1811631 - RNA, 19 nt, Artificial Sequence
  Description of Artificial Sequence: Synthetic oligonucleotide
gacuaauuccauguaagcu

SEQ ID NO: 1811632 - RNA, 19 nt, Artificial Sequence
  Description of Artificial Sequence: Synthetic oligonucleotide
cagcuaacgagccucgcug

SEQ ID NO: 1811633 - RNA, 19 nt, Artificial Sequence
  Description of Artificial Sequence: Synthetic oligonucleotide
cugacacuacuugauuucc

SEQ ID NO: 1811634 - RNA, 19 nt, Artificial Sequence
  Description of Artificial Sequence: Synthetic oligonucleotide
auaucuggcaugagugauc

SEQ ID NO: 1811635 - RNA, 19 nt, Artificial Sequence
  Description of Artificial Sequence: Synthetic oligonucleotide
gccaaggauaaggagaucc

SEQ ID NO: 1811636 - RNA, 19 nt, Artificial Sequence
  Description of Artificial Sequence: Synthetic oligonucleotide
ugauauaaggucgcauuuu

SEQ ID NO: 1811637 - RNA, 19 nt, Artificial Sequence
  Description of Artificial Sequence: Synthetic oligonucleotide
aaggauaaggagauccaua

SEQ ID NO: 1811638 - RNA, 19 nt, Artificial Sequence
  Description of Artificial Sequence: Synthetic oligonucleotide
ucuuguuaccccacccaau

SEQ ID NO: 1811639 - RNA, 19 nt, Artificial Sequence
  Description of Artificial Sequence: Synthetic oligonucleotide
gcuuuaacgaacuggacua

SEQ ID NO: 1811640 - RNA, 19 nt, Artificial Sequence
  Description of Artificial Sequence: Synthetic oligonucleotide
uuugcccuacacuccacuc

SEQ ID NO: 1811641 - RNA, 19 nt, Artificial Sequence
  Description of Artificial Sequence: Synthetic oligonucleotide
cccaucacuaagagaaugg

SEQ ID NO: 1811642 - RNA, 19 nt, Artificial Sequence
  Description of Artificial Sequence: Synthetic oligonucleotide
cucuuaguugcugauauaa

SEQ ID NO: 1811643 - RNA, 19 nt, Artificial Sequence
  Description of Artificial Sequence: Synthetic oligonucleotide
cacuacuugauuucccaca

SEQ ID NO: 1811644 - RNA, 19 nt, Artificial Sequence
  Description of Artificial Sequence: Synthetic oligonucleotide
auuugcccuacacuccacu

SEQ ID NO: 1811645 - RNA, 19 nt, Artificial Sequence
  Description of Artificial Sequence: Synthetic oligonucleotide
cagagcacaccuccgcugc

SEQ ID NO: 1811646 - RNA, 19 nt, Artificial Sequence
  Description of Artificial Sequence: Synthetic oligonucleotide
acauguauaugaaauuaua

SEQ ID NO: 1811647 - RNA, 19 nt, Artificial Sequence
  Description of Artificial Sequence: Synthetic oligonucleotide
uaccccacccaauagcuuu

SEQ ID NO: 1811648 - RNA, 19 nt, Artificial Sequence
  Description of Artificial Sequence: Synthetic oligonucleotide
agacgcgcagagcacaccu

SEQ ID NO: 1811649 - RNA, 19 nt, Artificial Sequence
  Description of Artificial Sequence: Synthetic oligonucleotide
ggacuauaggaccaaguuc

SEQ ID NO: 1811650 - RNA, 19 nt, Artificial Sequence
  Description of Artificial Sequence: Synthetic oligonucleotide
agccucgcuggaccaacgc

SEQ ID NO: 1811651 - RNA, 19 nt, Artificial Sequence
  Description of Artificial Sequence: Synthetic oligonucleotide
gaagaaguaaugauguguu

SEQ ID NO: 1811652 - RNA, 19 nt, Artificial Sequence
  Description of Artificial Sequence: Synthetic oligonucleotide
ggacaugucggcugcgagg

SEQ ID NO: 1811653 - RNA, 19 nt, Artificial Sequence
  Description of Artificial Sequence: Synthetic oligonucleotide
cagguaauacauauuucaa

SEQ ID NO: 1811654 - RNA, 19 nt, Artificial Sequence
  Description of Artificial Sequence: Synthetic oligonucleotide
cgaacuggacuauaggacc

SEQ ID NO: 1811655 - RNA, 19 nt, Artificial Sequence
  Description of Artificial Sequence: Synthetic oligonucleotide
ucgcauuuucaggccaagg

SEQ ID NO: 1811656 - RNA, 19 nt, Artificial Sequence
  Description of Artificial Sequence: Synthetic oligonucleotide
aguucugacacuacuugau

SEQ ID NO: 1811657 - RNA, 19 nt, Artificial Sequence
  Description of Artificial Sequence: Synthetic oligonucleotide
aacgagccucgcuggacca

SEQ ID NO: 1811658 - RNA, 19 nt, Artificial Sequence
  Description of Artificial Sequence: Synthetic oligonucleotide
aaagggcuugacagcacug

SEQ ID NO: 1811659 - RNA, 19 nt, Artificial Sequence
  Description of Artificial Sequence: Synthetic oligonucleotide
acccaucacuaagagaaug

SEQ ID NO: 1811660 - RNA, 19 nt, Artificial Sequence
  Description of Artificial Sequence: Synthetic oligonucleotide
cuuguuaccccacccaaua

SEQ ID NO: 1811661 - RNA, 19 nt, Artificial Sequence
  Description of Artificial Sequence: Synthetic oligonucleotide
caugagugaucuccccuac

SEQ ID NO: 1811662 - RNA, 19 nt, Artificial Sequence
  Description of Artificial Sequence: Synthetic oligonucleotide
gaacuggacuauaggacca

SEQ ID NO: 1811663 - RNA, 19 nt, Artificial Sequence
  Description of Artificial Sequence: Synthetic oligonucleotide
guagcuucaucacaccacu

SEQ ID NO: 1811664 - RNA, 19 nt, Artificial Sequence
  Description of Artificial Sequence: Synthetic oligonucleotide
ugguaagaaugguguacaa

SEQ ID NO: 1811665 - RNA, 19 nt, Artificial Sequence
  Description of Artificial Sequence: Synthetic oligonucleotide
caguagguugcuuauugaa

SEQ ID NO: 1811666 - RNA, 19 nt, Artificial Sequence
  Description of Artificial Sequence: Synthetic oligonucleotide
agcaucaaguucaguaggu

SEQ ID NO: 1811667 - RNA, 19 nt, Artificial Sequence
  Description of Artificial Sequence: Synthetic oligonucleotide
guucaaaggccaaggauaa

SEQ ID NO: 1811668 - RNA, 19 nt, Artificial Sequence
  Description of Artificial Sequence: Synthetic oligonucleotide
acaaauggccaaacaccag

SEQ ID NO: 1811669 - RNA, 19 nt, Artificial Sequence
  Description of Artificial Sequence: Synthetic oligonucleotide
ucggcccgcaagguuaccg

SEQ ID NO: 1811670 - RNA, 19 nt, Artificial Sequence
  Description of Artificial Sequence: Synthetic oligonucleotide
gcugcauugucagaaagca

SEQ ID NO: 1811671 - RNA, 19 nt, Artificial Sequence
  Description of Artificial Sequence: Synthetic oligonucleotide
guaaugauguguucccagu

SEQ ID NO: 1811672 - RNA, 19 nt, Artificial Sequence
  Description of Artificial Sequence: Synthetic oligonucleotide
cuauuauaauguucaggua

SEQ ID NO: 1811673 - RNA, 19 nt, Artificial Sequence
  Description of Artificial Sequence: Synthetic oligonucleotide
uucaaaggccaaggauaag

SEQ ID NO: 1811674 - RNA, 19 nt, Artificial Sequence
  Description of Artificial Sequence: Synthetic oligonucleotide
uuccagauggagacauaua

SEQ ID NO: 1811675 - RNA, 19 nt, Artificial Sequence
  Description of Artificial Sequence: Synthetic oligonucleotide
acagcauauuguugacuaa

SEQ ID NO: 1811676 - RNA, 19 nt, Artificial Sequence
  Description of Artificial Sequence: Synthetic oligonucleotide
ccagucuuugggaaagggc

SEQ ID NO: 1811677 - RNA, 19 nt, Artificial Sequence
  Description of Artificial Sequence: Synthetic oligonucleotide
ugguguacaaauggccaaa

SEQ ID NO: 1811678 - RNA, 19 nt, Artificial Sequence
  Description of Artificial Sequence: Synthetic oligonucleotide
uaauuccauguaagcuuuc

SEQ ID NO: 1811679 - RNA, 19 nt, Artificial Sequence
  Description of Artificial Sequence: Synthetic oligonucleotide
ggcuuuaacgaacuggacu

SEQ ID NO: 1811680 - RNA, 19 nt, Artificial Sequence
  Description of Artificial Sequence: Synthetic oligonucleotide
aaugugguucaaaggccaa

SEQ ID NO: 1811681 - RNA, 19 nt, Artificial Sequence
  Description of Artificial Sequence: Synthetic oligonucleotide
ggagacgaacgcuuccgcc

SEQ ID NO: 1811682 - RNA, 19 nt, Artificial Sequence
  Description of Artificial Sequence: Synthetic oligonucleotide
cugggagacgaacgcuucc

SEQ ID NO: 1811683 - RNA, 19 nt, Artificial Sequence
  Description of Artificial Sequence: Synthetic oligonucleotide
aggucgcauuuucaggcca

SEQ ID NO: 1811684 - RNA, 19 nt, Artificial Sequence
  Description of Artificial Sequence: Synthetic oligonucleotide
uucuaagaccugguccaga

SEQ ID NO: 1811685 - RNA, 19 nt, Artificial Sequence
  Description of Artificial Sequence: Synthetic oligonucleotide
augagugaucuccccuacu

SEQ ID NO: 1811686 - RNA, 19 nt, Artificial Sequence
  Description of Artificial Sequence: Synthetic oligonucleotide
aacaacuaauugacauaaa

SEQ ID NO: 1811687 - RNA, 19 nt, Artificial Sequence
  Description of Artificial Sequence: Synthetic oligonucleotide
cuguagcuucaucacacca

SEQ ID NO: 1811688 - RNA, 19 nt, Artificial Sequence
  Description of Artificial Sequence: Synthetic oligonucleotide
gucuuguuaccccacccaa

SEQ ID NO: 1811689 - RNA, 19 nt, Artificial Sequence
  Description of Artificial Sequence: Synthetic oligonucleotide
cuacuugauuucccacaug

SEQ ID NO: 1811690 - RNA, 19 nt, Artificial Sequence
  Description of Artificial Sequence: Synthetic oligonucleotide
gacaaccugccuuuacacu

SEQ ID NO: 1811691 - RNA, 19 nt, Artificial Sequence
  Description of Artificial Sequence: Synthetic oligonucleotide
aggccaaggauaaggagau

SEQ ID NO: 1811692 - RNA, 19 nt, Artificial Sequence
  Description of Artificial Sequence: Synthetic oligonucleotide
cuaauuccauguaagcuuu

SEQ ID NO: 1811693 - RNA, 19 nt, Artificial Sequence
  Description of Artificial Sequence: Synthetic oligonucleotide
aagcaaggagguugcuaua

SEQ ID NO: 1811694 - RNA, 19 nt, Artificial Sequence
  Description of Artificial Sequence: Synthetic oligonucleotide
cuaacgagccucgcuggac

SEQ ID NO: 1811695 - RNA, 19 nt, Artificial Sequence
  Description of Artificial Sequence: Synthetic oligonucleotide
cuggaccaacgcucagacg

SEQ ID NO: 1811696 - RNA, 19 nt, Artificial Sequence
  Description of Artificial Sequence: Synthetic oligonucleotide
cacaccuccgcugccgcgg

SEQ ID NO: 1811697 - RNA, 19 nt, Artificial Sequence
  Description of Artificial Sequence: Synthetic oligonucleotide
aacuggacuauaggaccaa

SEQ ID NO: 1811698 - RNA, 19 nt, Artificial Sequence
  Description of Artificial Sequence: Synthetic oligonucleotide
ucggcugcgaggcccugac

SEQ ID NO: 1811699 - RNA, 19 nt, Artificial Sequence
  Description of Artificial Sequence: Synthetic oligonucleotide
gcuggaccaacgcucagac

SEQ ID NO: 1811700 - RNA, 19 nt, Artificial Sequence
  Description of Artificial Sequence: Synthetic oligonucleotide
acuauaggaccaaguucug

SEQ ID NO: 1811701 - RNA, 19 nt, Artificial Sequence
  Description of Artificial Sequence: Synthetic oligonucleotide
ccaucacuaagagaauggc

SEQ ID NO: 1811702 - RNA, 19 nt, Artificial Sequence
  Description of Artificial Sequence: Synthetic oligonucleotide
ccauguaagcuuucauuuc

SEQ ID NO: 1811703 - RNA, 19 nt, Artificial Sequence
  Description of Artificial Sequence: Synthetic oligonucleotide
ucccgcgcgaccucgcgac

SEQ ID NO: 1811704 - RNA, 19 nt, Artificial Sequence
  Description of Artificial Sequence: Synthetic oligonucleotide
gauccauaucuggcaugag

SEQ ID NO: 1811705 - RNA, 19 nt, Artificial Sequence
  Description of Artificial Sequence: Synthetic oligonucleotide
guguucccagucuuuggga

SEQ ID NO: 1811706 - RNA, 19 nt, Artificial Sequence
  Description of Artificial Sequence: Synthetic oligonucleotide
cuauaggaccaaguucuga

SEQ ID NO: 1811707 - RNA, 19 nt, Artificial Sequence
  Description of Artificial Sequence: Synthetic oligonucleotide
caaccugccuuuacacuga

SEQ ID NO: 1811708 - RNA, 19 nt, Artificial Sequence
  Description of Artificial Sequence: Synthetic oligonucleotide
ggcuugacagcacuggucu

SEQ ID NO: 1811709 - RNA, 19 nt, Artificial Sequence
  Description of Artificial Sequence: Synthetic oligonucleotide
ggauaaggagauccauauc

SEQ ID NO: 1811710 - RNA, 19 nt, Artificial Sequence
  Description of Artificial Sequence: Synthetic oligonucleotide
gcauuugcccuacacucca

SEQ ID NO: 1811711 - RNA, 19 nt, Artificial Sequence
  Description of Artificial Sequence: Synthetic oligonucleotide
gcucauaaagaaauaaaau

SEQ ID NO: 1811712 - RNA, 19 nt, Artificial Sequence
  Description of Artificial Sequence: Synthetic oligonucleotide
ccacccaauagcuuucauc

SEQ ID NO: 1811713 - RNA, 19 nt, Artificial Sequence
  Description of Artificial Sequence: Synthetic oligonucleotide
gguaagaaugguguacaaa

SEQ ID NO: 1811714 - RNA, 19 nt, Artificial Sequence
  Description of Artificial Sequence: Synthetic oligonucleotide
gaggcccugaccgcgcgcc

SEQ ID NO: 1811715 - RNA, 19 nt, Artificial Sequence
  Description of Artificial Sequence: Synthetic oligonucleotide
auaugcucauaaagaaaua

SEQ ID NO: 1811716 - RNA, 19 nt, Artificial Sequence
  Description of Artificial Sequence: Synthetic oligonucleotide
uacagaaagcaaggagguu

SEQ ID NO: 1811717 - RNA, 19 nt, Artificial Sequence
  Description of Artificial Sequence: Synthetic oligonucleotide
gagugaucuccccuacugu

SEQ ID NO: 1811718 - RNA, 19 nt, Artificial Sequence
  Description of Artificial Sequence: Synthetic oligonucleotide
gucaacugugugguaagaa

SEQ ID NO: 1811719 - RNA, 19 nt, Artificial Sequence
  Description of Artificial Sequence: Synthetic oligonucleotide
ccguuuaacuucccacugc

SEQ ID NO: 1811720 - RNA, 19 nt, Artificial Sequence
  Description of Artificial Sequence: Synthetic oligonucleotide
gcugauauaaggucgcauu

SEQ ID NO: 1811721 - RNA, 19 nt, Artificial Sequence
  Description of Artificial Sequence: Synthetic oligonucleotide
aaauggagguggacacaaa

SEQ ID NO: 1811722 - RNA, 19 nt, Artificial Sequence
  Description of Artificial Sequence: Synthetic oligonucleotide
cccacaugaauaaaaggua

SEQ ID NO: 1811723 - RNA, 19 nt, Artificial Sequence
  Description of Artificial Sequence: Synthetic oligonucleotide
gggacaugucggcugcgag

SEQ ID NO: 1811724 - RNA, 19 nt, Artificial Sequence
  Description of Artificial Sequence: Synthetic oligonucleotide
gacgaacgcuuccgccacc

SEQ ID NO: 1811725 - RNA, 19 nt, Artificial Sequence
  Description of Artificial Sequence: Synthetic oligonucleotide
gucgcauuuucaggccaag

SEQ ID NO: 1811726 - RNA, 19 nt, Artificial Sequence
  Description of Artificial Sequence: Synthetic oligonucleotide
gcagagcacaccuccgcug

SEQ ID NO: 1811727 - RNA, 19 nt, Artificial Sequence
  Description of Artificial Sequence: Synthetic oligonucleotide
cugcgaggcccugaccgcg

SEQ ID NO: 1811728 - RNA, 19 nt, Artificial Sequence
  Description of Artificial Sequence: Synthetic oligonucleotide
aucuggcaugagugaucuc

SEQ ID NO: 1811729 - RNA, 19 nt, Artificial Sequence
  Description of Artificial Sequence: Synthetic oligonucleotide
ggaccaacgcucagacgcg

SEQ ID NO: 1811730 - RNA, 19 nt, Artificial Sequence
  Description of Artificial Sequence: Synthetic oligonucleotide
cuggacuauaggaccaagu

SEQ ID NO: 1811731 - RNA, 19 nt, Artificial Sequence
  Description of Artificial Sequence: Synthetic oligonucleotide
ggagacauauauucugcau

SEQ ID NO: 1811732 - RNA, 19 nt, Artificial Sequence
  Description of Artificial Sequence: Synthetic oligonucleotide
gagccucgcuggaccaacg

SEQ ID NO: 1811733 - RNA, 19 nt, Artificial Sequence
  Description of Artificial Sequence: Synthetic oligonucleotide
cugcauugucagaaagcaa

SEQ ID NO: 1811734 - RNA, 19 nt, Artificial Sequence
  Description of Artificial Sequence: Synthetic oligonucleotide
acgaacgcuuccgccacca

SEQ ID NO: 1811735 - RNA, 19 nt, Artificial Sequence
  Description of Artificial Sequence: Synthetic oligonucleotide
accccacccaauagcuuuc

SEQ ID NO: 1811736 - RNA, 19 nt, Artificial Sequence
  Description of Artificial Sequence: Synthetic oligonucleotide
gggagacgaacgcuuccgc

SEQ ID NO: 1811737 - RNA, 19 nt, Artificial Sequence
  Description of Artificial Sequence: Synthetic oligonucleotide
cugcgcuccgcgguccucg

SEQ ID NO: 1811738 - RNA, 19 nt, Artificial Sequence
  Description of Artificial Sequence: Synthetic oligonucleotide
ccaaggauaaggagaucca

SEQ ID NO: 1811739 - RNA, 19 nt, Artificial Sequence
  Description of Artificial Sequence: Synthetic oligonucleotide
cucagacgcgcagagcaca

SEQ ID NO: 1811740 - RNA, 19 nt, Artificial Sequence
  Description of Artificial Sequence: Synthetic oligonucleotide
agguacuuuuccagaugga

SEQ ID NO: 1811741 - RNA, 19 nt, Artificial Sequence
  Description of Artificial Sequence: Synthetic oligonucleotide
cauaucuggcaugagugau

SEQ ID NO: 1811742 - RNA, 19 nt, Artificial Sequence
  Description of Artificial Sequence: Synthetic oligonucleotide
cucugcagucaacagcaua

SEQ ID NO: 1811743 - RNA, 19 nt, Artificial Sequence
  Description of Artificial Sequence: Synthetic oligonucleotide
gccaagguucuguggcugc

SEQ ID NO: 1811744 - RNA, 19 nt, Artificial Sequence
  Description of Artificial Sequence: Synthetic oligonucleotide
gcaugagugaucuccccua

SEQ ID NO: 1811745 - RNA, 19 nt, Artificial Sequence
  Description of Artificial Sequence: Synthetic oligonucleotide
gcauuuucaggccaagguu

SEQ ID NO: 1811746 - RNA, 19 nt, Artificial Sequence
  Description of Artificial Sequence: Synthetic oligonucleotide
cccagucuuugggaaaggg

SEQ ID NO: 1811747 - RNA, 19 nt, Artificial Sequence
  Description of Artificial Sequence: Synthetic oligonucleotide
ccauaucuggcaugaguga

SEQ ID NO: 1811748 - RNA, 19 nt, Artificial Sequence
  Description of Artificial Sequence: Synthetic oligonucleotide
ggaccaaguucugacacua

SEQ ID NO: 1811749 - RNA, 19 nt, Artificial Sequence
  Description of Artificial Sequence: Synthetic oligonucleotide
gcuuccgccaccagggaca

SEQ ID NO: 1811750 - RNA, 19 nt, Artificial Sequence
  Description of Artificial Sequence: Synthetic oligonucleotide
cagcauauuguugacuaau

SEQ ID NO: 1811751 - RNA, 19 nt, Artificial Sequence
  Description of Artificial Sequence: Synthetic oligonucleotide
ggcccgcaagguuaccgcc

SEQ ID NO: 1811752 - RNA, 19 nt, Artificial Sequence
  Description of Artificial Sequence: Synthetic oligonucleotide
agaauggcccuuggcuuua

SEQ ID NO: 1811753 - RNA, 19 nt, Artificial Sequence
  Description of Artificial Sequence: Synthetic oligonucleotide
gauaggcagauuacacauu

SEQ ID NO: 1811754 - RNA, 19 nt, Artificial Sequence
  Description of Artificial Sequence: Synthetic oligonucleotide
gcugcgaggcccugaccgc

SEQ ID NO: 1811755 - RNA, 19 nt, Artificial Sequence
  Description of Artificial Sequence: Synthetic oligonucleotide
accugccuuuacacugauc

SEQ ID NO: 1811756 - RNA, 19 nt, Artificial Sequence
  Description of Artificial Sequence: Synthetic oligonucleotide
caaggauaaggagauccau

SEQ ID NO: 1811757 - RNA, 19 nt, Artificial Sequence
  Description of Artificial Sequence: Synthetic oligonucleotide
gaccgcgcgccugcgcucc

SEQ ID NO: 1811758 - RNA, 19 nt, Artificial Sequence
  Description of Artificial Sequence: Synthetic oligonucleotide
gcuaacgagccucgcugga

SEQ ID NO: 1811759 - RNA, 19 nt, Artificial Sequence
  Description of Artificial Sequence: Synthetic oligonucleotide
gacgcgcagagcacaccuc

SEQ ID NO: 1811760 - RNA, 19 nt, Artificial Sequence
  Description of Artificial Sequence: Synthetic oligonucleotide
ccaacccaucacuaagaga

SEQ ID NO: 1811761 - RNA, 19 nt, Artificial Sequence
  Description of Artificial Sequence: Synthetic oligonucleotide
ggaaagggcuugacagcac

SEQ ID NO: 1811762 - RNA, 19 nt, Artificial Sequence
  Description of Artificial Sequence: Synthetic oligonucleotide
cccgcagcuaacgagccuc

SEQ ID NO: 1811763 - RNA, 19 nt, Artificial Sequence
  Description of Artificial Sequence: Synthetic oligonucleotide
ugaccgcgcgccugcgcuc

SEQ ID NO: 1811764 - RNA, 19 nt, Artificial Sequence
  Description of Artificial Sequence: Synthetic oligonucleotide
cagggacaugucggcugcg

SEQ ID NO: 1811765 - RNA, 19 nt, Artificial Sequence
  Description of Artificial Sequence: Synthetic oligonucleotide
caacagcauauuguugacu

SEQ ID NO: 1811766 - RNA, 19 nt, Artificial Sequence
  Description of Artificial Sequence: Synthetic oligonucleotide
gcacaccuccgcugccgcg

SEQ ID NO: 1811767 - RNA, 19 nt, Artificial Sequence
  Description of Artificial Sequence: Synthetic oligonucleotide
gcagcuaacgagccucgcu

SEQ ID NO: 1811768 - RNA, 19 nt, Artificial Sequence
  Description of Artificial Sequence: Synthetic oligonucleotide
cagcaagagaugcugcauu

SEQ ID NO: 1811769 - RNA, 19 nt, Artificial Sequence
  Description of Artificial Sequence: Synthetic oligonucleotide
cuccgcgguccucggcgcc

SEQ ID NO: 1811770 - RNA, 19 nt, Artificial Sequence
  Description of Artificial Sequence: Synthetic oligonucleotide
ccgcagcuaacgagccucg

SEQ ID NO: 1811771 - RNA, 19 nt, Artificial Sequence
  Description of Artificial Sequence: Synthetic oligonucleotide
ggucaacugugugguaaga

SEQ ID NO: 1811772 - RNA, 19 nt, Artificial Sequence
  Description of Artificial Sequence: Synthetic oligonucleotide
cugaccgcgcgccugcgcu

SEQ ID NO: 1811773 - RNA, 19 nt, Artificial Sequence
  Description of Artificial Sequence: Synthetic oligonucleotide
cuuuaacgaacuggacuau

SEQ ID NO: 1811774 - RNA, 19 nt, Artificial Sequence
  Description of Artificial Sequence: Synthetic oligonucleotide
cuaagacaaccugccuuua

SEQ ID NO: 1811775 - RNA, 19 nt, Artificial Sequence
  Description of Artificial Sequence: Synthetic oligonucleotide
gcaaggagguugcuauagu

SEQ ID NO: 1811776 - RNA, 19 nt, Artificial Sequence
  Description of Artificial Sequence: Synthetic oligonucleotide
cguuuaacuucccacugcu

SEQ ID NO: 1811777 - RNA, 19 nt, Artificial Sequence
  Description of Artificial Sequence: Synthetic oligonucleotide
cccucuuaguugcugauau

SEQ ID NO: 1811778 - RNA, 19 nt, Artificial Sequence
  Description of Artificial Sequence: Synthetic oligonucleotide
cgcgcagagcacaccuccg

SEQ ID NO: 1811779 - RNA, 19 nt, Artificial Sequence
  Description of Artificial Sequence: Synthetic oligonucleotide
ggucgcauuuucaggccaa

SEQ ID NO: 1811780 - RNA, 19 nt, Artificial Sequence
  Description of Artificial Sequence: Synthetic oligonucleotide
aggcccugaccgcgcgccu

SEQ ID NO: 1811781 - RNA, 19 nt, Artificial Sequence
  Description of Artificial Sequence: Synthetic oligonucleotide
guucaguagguugcuuauu

SEQ ID NO: 1811782 - RNA, 19 nt, Artificial Sequence
  Description of Artificial Sequence: Synthetic oligonucleotide
gcuccgcgguccucggcgc

SEQ ID NO: 1811783 - RNA, 19 nt, Artificial Sequence
  Description of Artificial Sequence: Synthetic oligonucleotide
ugucggcugcgaggcccug

SEQ ID NO: 1811784 - RNA, 19 nt, Artificial Sequence
  Description of Artificial Sequence: Synthetic oligonucleotide
gcccugaccgcgcgccugc

SEQ ID NO: 1811785 - RNA, 19 nt, Artificial Sequence
  Description of Artificial Sequence: Synthetic oligonucleotide
acgagccucgcuggaccaa

SEQ ID NO: 1811786 - RNA, 19 nt, Artificial Sequence
  Description of Artificial Sequence: Synthetic oligonucleotide
cucccgcgcgaccucgcga

SEQ ID NO: 1811787 - RNA, 19 nt, Artificial Sequence
  Description of Artificial Sequence: Synthetic oligonucleotide
cggcccgcaagguuaccgc

SEQ ID NO: 1811788 - RNA, 19 nt, Artificial Sequence
  Description of Artificial Sequence: Synthetic oligonucleotide
cugcgaucugggagacgaa

SEQ ID NO: 1811789 - RNA, 19 nt, Artificial Sequence
  Description of Artificial Sequence: Synthetic oligonucleotide
cucggcccgcaagguuacc

SEQ ID NO: 1811790 - RNA, 19 nt, Artificial Sequence
  Description of Artificial Sequence: Synthetic oligonucleotide
ccucccgcgcgaccucgcg

SEQ ID NO: 1811791 - RNA, 19 nt, Artificial Sequence
  Description of Artificial Sequence: Synthetic oligonucleotide
gcuugacagcacuggucua

SEQ ID NO: 1811792 - RNA, 19 nt, Artificial Sequence
  Description of Artificial Sequence: Synthetic oligonucleotide
gccucgcuggaccaacgcu

SEQ ID NO: 1811793 - RNA, 19 nt, Artificial Sequence
  Description of Artificial Sequence: Synthetic oligonucleotide
gcccgcaagguuaccgcca

SEQ ID NO: 1811794 - RNA, 19 nt, Artificial Sequence
  Description of Artificial Sequence: Synthetic oligonucleotide
gcaucaaguucaguagguu

SEQ ID NO: 1811795 - RNA, 19 nt, Artificial Sequence
  Description of Artificial Sequence: Synthetic oligonucleotide
ggcccugaccgcgcgccug

SEQ ID NO: 1811796 - RNA, 19 nt, Artificial Sequence
  Description of Artificial Sequence: Synthetic oligonucleotide
gcccucccgcgcgaccucg

SEQ ID NO: 1811797 - RNA, 19 nt, Artificial Sequence
  Description of Artificial Sequence: Synthetic oligonucleotide
caaguucaguagguugcuu

SEQ ID NO: 1811798 - RNA, 19 nt, Artificial Sequence
  Description of Artificial Sequence: Synthetic oligonucleotide
ccgcgcgaccucgcgaccc

SEQ ID NO: 1811799 - RNA, 19 nt, Artificial Sequence
  Description of Artificial Sequence: Synthetic oligonucleotide
cgagccucgcuggaccaac

SEQ ID NO: 1811800 - RNA, 19 nt, Artificial Sequence
  Description of Artificial Sequence: Synthetic oligonucleotide
cgcgcgaccucgcgacccc

SEQ ID NO: 1811801 - RNA, 19 nt, Artificial Sequence
  Description of Artificial Sequence: Synthetic oligonucleotide
cgcagcuaacgagccucgc

SEQ ID NO: 1811802 - RNA, 19 nt, Artificial Sequence
  Description of Artificial Sequence: Synthetic oligonucleotide
ccgcggcucggcccgcaag

SEQ ID NO: 1811803 - RNA, 19 nt, Artificial Sequence
  Description of Artificial Sequence: Synthetic oligonucleotide
gcccuacacuccacucuga

SEQ ID NO: 1811804 - RNA, 19 nt, Artificial Sequence
  Description of Artificial Sequence: Synthetic oligonucleotide
cccuacacuccacucugau

SEQ ID NO: 1811805 - RNA, 19 nt, Artificial Sequence
  Description of Artificial Sequence: Synthetic oligonucleotide
cccgcgcgaccucgcgacc

SEQ ID NO: 1811806 - RNA, 19 nt, Artificial Sequence
  Description of Artificial Sequence: Synthetic oligonucleotide
cccugaccgcgcgccugcg

SEQ ID NO: 1811807 - RNA, 19 nt, Artificial Sequence
  Description of Artificial Sequence: Synthetic oligonucleotide
ccccucuuaguugcugaua

SEQ ID NO: 1811808 - RNA, 19 nt, Artificial Sequence
  Description of Artificial Sequence: Synthetic oligonucleotide
cugccgcggcucggcccgc

SEQ ID NO: 1811809 - RNA, 19 nt, Artificial Sequence
  Description of Artificial Sequence: Synthetic oligonucleotide
gcgcccucccgcgcgaccu

SEQ ID NO: 1811810 - RNA, 19 nt, Artificial Sequence
  Description of Artificial Sequence: Synthetic oligonucleotide
ccugcgcuccgcgguccuc

SEQ ID NO: 1811811 - RNA, 19 nt, Artificial Sequence
  Description of Artificial Sequence: Synthetic oligonucleotide
cccacccaauagcuuucau

SEQ ID NO: 1811812 - RNA, 19 nt, Artificial Sequence
  Description of Artificial Sequence: Synthetic oligonucleotide
cgcgccugcgcuccgcggu

SEQ ID NO: 1811813 - RNA, 19 nt, Artificial Sequence
  Description of Artificial Sequence: Synthetic oligonucleotide
ccccgcagcuaacgagccu

SEQ ID NO: 1811814 - RNA, 19 nt, Artificial Sequence
  Description of Artificial Sequence: Synthetic oligonucleotide
cggcucggcccgcaagguu

SEQ ID NO: 1811815 - RNA, 19 nt, Artificial Sequence
  Description of Artificial Sequence: Synthetic oligonucleotide
aacugaauugcuuugcugc

SEQ ID NO: 1811816 - RNA, 19 nt, Artificial Sequence
  Description of Artificial Sequence: Synthetic oligonucleotide
uuuaguuuaccuaacaucu

SEQ ID NO: 1811817 - RNA, 19 nt, Artificial Sequence
  Description of Artificial Sequence: Synthetic oligonucleotide
uuaaacauuaaacaccugc

SEQ ID NO: 1811818 - RNA, 19 nt, Artificial Sequence
  Description of Artificial Sequence: Synthetic oligonucleotide
aaauggaaauuaaugaggc

SEQ ID NO: 1811819 - RNA, 19 nt, Artificial Sequence
  Description of Artificial Sequence: Synthetic oligonucleotide
ucuaauaucaauuuauaau

SEQ ID NO: 1811820 - RNA, 19 nt, Artificial Sequence
  Description of Artificial Sequence: Synthetic oligonucleotide
aaugcuggaccuuaggauc

SEQ ID NO: 1811821 - RNA, 19 nt, Artificial Sequence
  Description of Artificial Sequence: Synthetic oligonucleotide
ucaauuuauaaucuuccag

SEQ ID NO: 1811822 - RNA, 19 nt, Artificial Sequence
  Description of Artificial Sequence: Synthetic oligonucleotide
acauuaaacaccugcaggg

SEQ ID NO: 1811823 - RNA, 19 nt, Artificial Sequence
  Description of Artificial Sequence: Synthetic oligonucleotide
aacaucucuucuuuuaauc

SEQ ID NO: 1811824 - RNA, 19 nt, Artificial Sequence
  Description of Artificial Sequence: Synthetic oligonucleotide
uauuauuuggauuuugaac

SEQ ID NO: 1811825 - RNA, 19 nt, Artificial Sequence
  Description of Artificial Sequence: Synthetic oligonucleotide
ucucauacaacucugcucu

SEQ ID NO: 1811826 - RNA, 19 nt, Artificial Sequence
  Description of Artificial Sequence: Synthetic oligonucleotide
uuagguauuccucaucuag

SEQ ID NO: 1811827 - RNA, 19 nt, Artificial Sequence
  Description of Artificial Sequence: Synthetic oligonucleotide
uagguaaucucauacaagc

SEQ ID NO: 1811828 - RNA, 19 nt, Artificial Sequence
  Description of Artificial Sequence: Synthetic oligonucleotide
auuuauaaucuuccagugc

SEQ ID NO: 1811829 - RNA, 19 nt, Artificial Sequence
  Description of Artificial Sequence: Synthetic oligonucleotide
aaugaggcucauuacauca

SEQ ID NO: 1811830 - RNA, 19 nt, Artificial Sequence
  Description of Artificial Sequence: Synthetic oligonucleotide
aucuauuauuauuauuugg

SEQ ID NO: 1811831 - RNA, 19 nt, Artificial Sequence
  Description of Artificial Sequence: Synthetic oligonucleotide
uguaagaacucucagcuuc

SEQ ID NO: 1811832 - RNA, 19 nt, Artificial Sequence
  Description of Artificial Sequence: Synthetic oligonucleotide
aacagaccgaucuuucugg

SEQ ID NO: 1811833 - RNA, 19 nt, Artificial Sequence
  Description of Artificial Sequence: Synthetic oligonucleotide
aaccaagaacagcagcugc

SEQ ID NO: 1811834 - RNA, 19 nt, Artificial Sequence
  Description of Artificial Sequence: Synthetic oligonucleotide
uuuaguagcuugcucuggg

SEQ ID NO: 1811835 - RNA, 19 nt, Artificial Sequence
  Description of Artificial Sequence: Synthetic oligonucleotide
uaauaucaauuuauaaucu

SEQ ID NO: 1811836 - RNA, 19 nt, Artificial Sequence
  Description of Artificial Sequence: Synthetic oligonucleotide
aauuugcuuagguaaucuc

SEQ ID NO: 1811837 - RNA, 19 nt, Artificial Sequence
  Description of Artificial Sequence: Synthetic oligonucleotide
uugugaacaguucauggcc

SEQ ID NO: 1811838 - RNA, 19 nt, Artificial Sequence
  Description of Artificial Sequence: Synthetic oligonucleotide
uccucucuuaaacuguucg

SEQ ID NO: 1811839 - RNA, 19 nt, Artificial Sequence
  Description of Artificial Sequence: Synthetic oligonucleotide
ucugcucuccucaauauug

SEQ ID NO: 1811840 - RNA, 19 nt, Artificial Sequence
  Description of Artificial Sequence: Synthetic oligonucleotide
uacuacacagcuuucuuag

SEQ ID NO: 1811841 - RNA, 19 nt, Artificial Sequence
  Description of Artificial Sequence: Synthetic oligonucleotide
cucggaaucuacuacacag

SEQ ID NO: 1811842 - RNA, 19 nt, Artificial Sequence
  Description of Artificial Sequence: Synthetic oligonucleotide
uccuaguucaguuagguau

SEQ ID NO: 1811843 - RNA, 19 nt, Artificial Sequence
  Description of Artificial Sequence: Synthetic oligonucleotide
uuagguaaucucauacaag

SEQ ID NO: 1811844 - RNA, 19 nt, Artificial Sequence
  Description of Artificial Sequence: Synthetic oligonucleotide
aauaucaauuuauaaucuu

SEQ ID NO: 1811845 - RNA, 19 nt, Artificial Sequence
  Description of Artificial Sequence: Synthetic oligonucleotide
uaucuauuauuauuauuug

SEQ ID NO: 1811846 - RNA, 19 nt, Artificial Sequence
  Description of Artificial Sequence: Synthetic oligonucleotide
aguugauggaguaggagcc

SEQ ID NO: 1811847 - RNA, 19 nt, Artificial Sequence
  Description of Artificial Sequence: Synthetic oligonucleotide
aaccauugaacagaucuuc

SEQ ID NO: 1811848 - RNA, 19 nt, Artificial Sequence
  Description of Artificial Sequence: Synthetic oligonucleotide
aggucgaagaacuaaguug

SEQ ID NO: 1811849 - RNA, 19 nt, Artificial Sequence
  Description of Artificial Sequence: Synthetic oligonucleotide
auugcacggauguagcugg

SEQ ID NO: 1811850 - RNA, 19 nt, Artificial Sequence
  Description of Artificial Sequence: Synthetic oligonucleotide
agaagaauccugcuugauc

SEQ ID NO: 1811851 - RNA, 19 nt, Artificial Sequence
  Description of Artificial Sequence: Synthetic oligonucleotide
ucugacuucucacccaugc

SEQ ID NO: 1811852 - RNA, 19 nt, Artificial Sequence
  Description of Artificial Sequence: Synthetic oligonucleotide
ugaucuggaaauuuucugu

SEQ ID NO: 1811853 - RNA, 19 nt, Artificial Sequence
  Description of Artificial Sequence: Synthetic oligonucleotide
aaaaggucgaagaacuaag

SEQ ID NO: 1811854 - RNA, 19 nt, Artificial Sequence
  Description of Artificial Sequence: Synthetic oligonucleotide
uuuaccuaacaucucuucu

SEQ ID NO: 1811855 - RNA, 19 nt, Artificial Sequence
  Description of Artificial Sequence: Synthetic oligonucleotide
cauugaacagaucuucggg

SEQ ID NO: 1811856 - RNA, 19 nt, Artificial Sequence
  Description of Artificial Sequence: Synthetic oligonucleotide
auuaaacaccugcaggguc

SEQ ID NO: 1811857 - RNA, 19 nt, Artificial Sequence
  Description of Artificial Sequence: Synthetic oligonucleotide
uugacuguaagaacucuca

SEQ ID NO: 1811858 - RNA, 19 nt, Artificial Sequence
  Description of Artificial Sequence: Synthetic oligonucleotide
uucaguuagguauuccuca

SEQ ID NO: 1811859 - RNA, 19 nt, Artificial Sequence
  Description of Artificial Sequence: Synthetic oligonucleotide
ugcuuagguaaucucauac

SEQ ID NO: 1811860 - RNA, 19 nt, Artificial Sequence
  Description of Artificial Sequence: Synthetic oligonucleotide
uuaaacaccugcagggucu

SEQ ID NO: 1811861 - RNA, 19 nt, Artificial Sequence
  Description of Artificial Sequence: Synthetic oligonucleotide
uuugucuguuuucucauac

SEQ ID NO: 1811862 - RNA, 19 nt, Artificial Sequence
  Description of Artificial Sequence: Synthetic oligonucleotide
agcagcucuauuugaaaac

SEQ ID NO: 1811863 - RNA, 19 nt, Artificial Sequence
  Description of Artificial Sequence: Synthetic oligonucleotide
uaguuuaccuaacaucucu

SEQ ID NO: 1811864 - RNA, 19 nt, Artificial Sequence
  Description of Artificial Sequence: Synthetic oligonucleotide
ucuguggagagcccaaaag

SEQ ID NO: 1811865 - RNA, 19 nt, Artificial Sequence
  Description of Artificial Sequence: Synthetic oligonucleotide
cuugugaacaguucauggc

SEQ ID NO: 1811866 - RNA, 19 nt, Artificial Sequence
  Description of Artificial Sequence: Synthetic oligonucleotide
agaacucucagcuucuaug

SEQ ID NO: 1811867 - RNA, 19 nt, Artificial Sequence
  Description of Artificial Sequence: Synthetic oligonucleotide
uucuaauaucaauuuauaa

SEQ ID NO: 1811868 - RNA, 19 nt, Artificial Sequence
  Description of Artificial Sequence: Synthetic oligonucleotide
uguggagagcccaaaaggu

SEQ ID NO: 1811869 - RNA, 19 nt, Artificial Sequence
  Description of Artificial Sequence: Synthetic oligonucleotide
caucugaagggcuugacug

SEQ ID NO: 1811870 - RNA, 19 nt, Artificial Sequence
  Description of Artificial Sequence: Synthetic oligonucleotide
uuauuauuuggauuuugaa

SEQ ID NO: 1811871 - RNA, 19 nt, Artificial Sequence
  Description of Artificial Sequence: Synthetic oligonucleotide
ucuuuuaguuuaccuaaca

SEQ ID NO: 1811872 - RNA, 19 nt, Artificial Sequence
  Description of Artificial Sequence: Synthetic oligonucleotide
ugggguuuaacugaauugc

SEQ ID NO: 1811873 - RNA, 19 nt, Artificial Sequence
  Description of Artificial Sequence: Synthetic oligonucleotide
uccacccuaaucauaaaac

SEQ ID NO: 1811874 - RNA, 19 nt, Artificial Sequence
  Description of Artificial Sequence: Synthetic oligonucleotide
uugaucuggaaauuuucug

SEQ ID NO: 1811875 - RNA, 19 nt, Artificial Sequence
  Description of Artificial Sequence: Synthetic oligonucleotide
guaaucuccucucuuaaac

SEQ ID NO: 1811876 - RNA, 19 nt, Artificial Sequence
  Description of Artificial Sequence: Synthetic oligonucleotide
ucuuaaacuguucguuccc

SEQ ID NO: 1811877 - RNA, 19 nt, Artificial Sequence
  Description of Artificial Sequence: Synthetic oligonucleotide
auugaacagaucuucggga

SEQ ID NO: 1811878 - RNA, 19 nt, Artificial Sequence
  Description of Artificial Sequence: Synthetic oligonucleotide
aaaguugauggaguaggag

SEQ ID NO: 1811879 - RNA, 19 nt, Artificial Sequence
  Description of Artificial Sequence: Synthetic oligonucleotide
aucuucgggaaccuuacag

SEQ ID NO: 1811880 - RNA, 19 nt, Artificial Sequence
  Description of Artificial Sequence: Synthetic oligonucleotide
uuugcuuagguaaucucau

SEQ ID NO: 1811881 - RNA, 19 nt, Artificial Sequence
  Description of Artificial Sequence: Synthetic oligonucleotide
cuguggagagcccaaaagg

SEQ ID NO: 1811882 - RNA, 19 nt, Artificial Sequence
  Description of Artificial Sequence: Synthetic oligonucleotide
uaguuuagugcucucuucu

SEQ ID NO: 1811883 - RNA, 19 nt, Artificial Sequence
  Description of Artificial Sequence: Synthetic oligonucleotide
cuugauguauugauggauc

SEQ ID NO: 1811884 - RNA, 19 nt, Artificial Sequence
  Description of Artificial Sequence: Synthetic oligonucleotide
cuuccugagaaucuguaac

SEQ ID NO: 1811885 - RNA, 19 nt, Artificial Sequence
  Description of Artificial Sequence: Synthetic oligonucleotide
caauauugcacggauguag

SEQ ID NO: 1811886 - RNA, 19 nt, Artificial Sequence
  Description of Artificial Sequence: Synthetic oligonucleotide
ucauccuuuaguagcuugc

SEQ ID NO: 1811887 - RNA, 19 nt, Artificial Sequence
  Description of Artificial Sequence: Synthetic oligonucleotide
ucaggaggcacauuccacc

SEQ ID NO: 1811888 - RNA, 19 nt, Artificial Sequence
  Description of Artificial Sequence: Synthetic oligonucleotide
uacaacucugcucuccuca

SEQ ID NO: 1811889 - RNA, 19 nt, Artificial Sequence
  Description of Artificial Sequence: Synthetic oligonucleotide
uuucucauacaacucugcu

SEQ ID NO: 1811890 - RNA, 19 nt, Artificial Sequence
  Description of Artificial Sequence: Synthetic oligonucleotide
uuuaguuuagugcucucuu

SEQ ID NO: 1811891 - RNA, 19 nt, Artificial Sequence
  Description of Artificial Sequence: Synthetic oligonucleotide
agaucuuuuaguuuaccua

SEQ ID NO: 1811892 - RNA, 19 nt, Artificial Sequence
  Description of Artificial Sequence: Synthetic oligonucleotide
ucucauacaagcuucucuu

SEQ ID NO: 1811893 - RNA, 19 nt, Artificial Sequence
  Description of Artificial Sequence: Synthetic oligonucleotide
aucaauuuauaaucuucca

SEQ ID NO: 1811894 - RNA, 19 nt, Artificial Sequence
  Description of Artificial Sequence: Synthetic oligonucleotide
ucgggaaccuuacaguucu

SEQ ID NO: 1811895 - RNA, 19 nt, Artificial Sequence
  Description of Artificial Sequence: Synthetic oligonucleotide
gaaccagacucaucagugg

SEQ ID NO: 1811896 - RNA, 19 nt, Artificial Sequence
  Description of Artificial Sequence: Synthetic oligonucleotide
ugagaaucuguaacuuuca

SEQ ID NO: 1811897 - RNA, 19 nt, Artificial Sequence
  Description of Artificial Sequence: Synthetic oligonucleotide
ucuucaauuugcuuaggua

SEQ ID NO: 1811898 - RNA, 19 nt, Artificial Sequence
  Description of Artificial Sequence: Synthetic oligonucleotide
ugaggcuaaaugucccacg

SEQ ID NO: 1811899 - RNA, 19 nt, Artificial Sequence
  Description of Artificial Sequence: Synthetic oligonucleotide
ucuguaacuuucaaaccau

SEQ ID NO: 1811900 - RNA, 19 nt, Artificial Sequence
  Description of Artificial Sequence: Synthetic oligonucleotide
ucuaguucagaggaaccag

SEQ ID NO: 1811901 - RNA, 19 nt, Artificial Sequence
  Description of Artificial Sequence: Synthetic oligonucleotide
aagggcuugacuguaagaa

SEQ ID NO: 1811902 - RNA, 19 nt, Artificial Sequence
  Description of Artificial Sequence: Synthetic oligonucleotide
ugacuguaagaacucucag

SEQ ID NO: 1811903 - RNA, 19 nt, Artificial Sequence
  Description of Artificial Sequence: Synthetic oligonucleotide
uucaauuugcuuagguaau

SEQ ID NO: 1811904 - RNA, 19 nt, Artificial Sequence
  Description of Artificial Sequence: Synthetic oligonucleotide
uucuauguaaucuccucuc

SEQ ID NO: 1811905 - RNA, 19 nt, Artificial Sequence
  Description of Artificial Sequence: Synthetic oligonucleotide
ggcuaaaugucccacgccg

SEQ ID NO: 1811906 - RNA, 19 nt, Artificial Sequence
  Description of Artificial Sequence: Synthetic oligonucleotide
ggcucauuacaucaggagg

SEQ ID NO: 1811907 - RNA, 19 nt, Artificial Sequence
  Description of Artificial Sequence: Synthetic oligonucleotide
ucuauguaaucuccucucu

SEQ ID NO: 1811908 - RNA, 19 nt, Artificial Sequence
  Description of Artificial Sequence: Synthetic oligonucleotide
cuacagucaugaaacauuc

SEQ ID NO: 1811909 - RNA, 19 nt, Artificial Sequence
  Description of Artificial Sequence: Synthetic oligonucleotide
acuacuguuaguucuguua

SEQ ID NO: 1811910 - RNA, 19 nt, Artificial Sequence
  Description of Artificial Sequence: Synthetic oligonucleotide
uggaaauuuucuguggaga

SEQ ID NO: 1811911 - RNA, 19 nt, Artificial Sequence
  Description of Artificial Sequence: Synthetic oligonucleotide
uugauguauugauggaucu

SEQ ID NO: 1811912 - RNA, 19 nt, Artificial Sequence
  Description of Artificial Sequence: Synthetic oligonucleotide
gaggcuaaaugucccacgc

SEQ ID NO: 1811913 - RNA, 19 nt, Artificial Sequence
  Description of Artificial Sequence: Synthetic oligonucleotide
aguuuagugcucucuucuc

SEQ ID NO: 1811914 - RNA, 19 nt, Artificial Sequence
  Description of Artificial Sequence: Synthetic oligonucleotide
ggaccuuaggaucagagac

SEQ ID NO: 1811915 - RNA, 19 nt, Artificial Sequence
  Description of Artificial Sequence: Synthetic oligonucleotide
acccuaaucauaaaacaag

SEQ ID NO: 1811916 - RNA, 19 nt, Artificial Sequence
  Description of Artificial Sequence: Synthetic oligonucleotide
ucggaaucuacuacacagc

SEQ ID NO: 1811917 - RNA, 19 nt, Artificial Sequence
  Description of Artificial Sequence: Synthetic oligonucleotide
aagaacuaaguugccaaga

SEQ ID NO: 1811918 - RNA, 19 nt, Artificial Sequence
  Description of Artificial Sequence: Synthetic oligonucleotide
uaacugaauugcuuugcug

SEQ ID NO: 1811919 - RNA, 19 nt, Artificial Sequence
  Description of Artificial Sequence: Synthetic oligonucleotide
gaaccuuacaguucucuga

SEQ ID NO: 1811920 - RNA, 19 nt, Artificial Sequence
  Description of Artificial Sequence: Synthetic oligonucleotide
ugaauugcuuugcugcagu

SEQ ID NO: 1811921 - RNA, 19 nt, Artificial Sequence
  Description of Artificial Sequence: Synthetic oligonucleotide
aucuaguuugucuguuuuc

SEQ ID NO: 1811922 - RNA, 19 nt, Artificial Sequence
  Description of Artificial Sequence: Synthetic oligonucleotide
ucaucuaguucagaggaac

SEQ ID NO: 1811923 - RNA, 19 nt, Artificial Sequence
  Description of Artificial Sequence: Synthetic oligonucleotide
gaucuuucuggaaacagga

SEQ ID NO: 1811924 - RNA, 19 nt, Artificial Sequence
  Description of Artificial Sequence: Synthetic oligonucleotide
uguuaucuauuauuauuau

SEQ ID NO: 1811925 - RNA, 19 nt, Artificial Sequence
  Description of Artificial Sequence: Synthetic oligonucleotide
ucuacuuccugagaaucug

SEQ ID NO: 1811926 - RNA, 19 nt, Artificial Sequence
  Description of Artificial Sequence: Synthetic oligonucleotide
ucucuuaaacuguucguuc

SEQ ID NO: 1811927 - RNA, 19 nt, Artificial Sequence
  Description of Artificial Sequence: Synthetic oligonucleotide
aaggucgaagaacuaaguu

SEQ ID NO: 1811928 - RNA, 19 nt, Artificial Sequence
  Description of Artificial Sequence: Synthetic oligonucleotide
ucuucgggaaccuuacagu

SEQ ID NO: 1811929 - RNA, 19 nt, Artificial Sequence
  Description of Artificial Sequence: Synthetic oligonucleotide
ugaaaacagaacagaccga

SEQ ID NO: 1811930 - RNA, 19 nt, Artificial Sequence
  Description of Artificial Sequence: Synthetic oligonucleotide
uucagaggaaccagacuca

SEQ ID NO: 1811931 - RNA, 19 nt, Artificial Sequence
  Description of Artificial Sequence: Synthetic oligonucleotide
ggucgaagaacuaaguugc

SEQ ID NO: 1811932 - RNA, 19 nt, Artificial Sequence
  Description of Artificial Sequence: Synthetic oligonucleotide
uauugcacggauguagcug

SEQ ID NO: 1811933 - RNA, 19 nt, Artificial Sequence
  Description of Artificial Sequence: Synthetic oligonucleotide
auuugcuuagguaaucuca

SEQ ID NO: 1811934 - RNA, 19 nt, Artificial Sequence
  Description of Artificial Sequence: Synthetic oligonucleotide
uccugcuugaucuggaaau

SEQ ID NO: 1811935 - RNA, 19 nt, Artificial Sequence
  Description of Artificial Sequence: Synthetic oligonucleotide
aaaacagaacagaccgauc

SEQ ID NO: 1811936 - RNA, 19 nt, Artificial Sequence
  Description of Artificial Sequence: Synthetic oligonucleotide
agaacuaaguugccaagau

SEQ ID NO: 1811937 - RNA, 19 nt, Artificial Sequence
  Description of Artificial Sequence: Synthetic oligonucleotide
augggcacaucugaagggc

SEQ ID NO: 1811938 - RNA, 19 nt, Artificial Sequence
  Description of Artificial Sequence: Synthetic oligonucleotide
uggaguaggagccgguaga

SEQ ID NO: 1811939 - RNA, 19 nt, Artificial Sequence
  Description of Artificial Sequence: Synthetic oligonucleotide
uuuaaacauuaaacaccug

SEQ ID NO: 1811940 - RNA, 19 nt, Artificial Sequence
  Description of Artificial Sequence: Synthetic oligonucleotide
aaucucauacaagcuucuc

SEQ ID NO: 1811941 - RNA, 19 nt, Artificial Sequence
  Description of Artificial Sequence: Synthetic oligonucleotide
ugcauagauaccaccuuaa

SEQ ID NO: 1811942 - RNA, 19 nt, Artificial Sequence
  Description of Artificial Sequence: Synthetic oligonucleotide
ggcacuacagucaugaaac

SEQ ID NO: 1811943 - RNA, 19 nt, Artificial Sequence
  Description of Artificial Sequence: Synthetic oligonucleotide
cuuagguaaucucauacaa

SEQ ID NO: 1811944 - RNA, 19 nt, Artificial Sequence
  Description of Artificial Sequence: Synthetic oligonucleotide
uuuccuaguucaguuaggu

SEQ ID NO: 1811945 - RNA, 19 nt, Artificial Sequence
  Description of Artificial Sequence: Synthetic oligonucleotide
uuaguucuguuaucuauua

SEQ ID NO: 1811946 - RNA, 19 nt, Artificial Sequence
  Description of Artificial Sequence: Synthetic oligonucleotide
uaaucucauacaagcuucu

SEQ ID NO: 1811947 - RNA, 19 nt, Artificial Sequence
  Description of Artificial Sequence: Synthetic oligonucleotide
aagaauccugcuugaucug

SEQ ID NO: 1811948 - RNA, 19 nt, Artificial Sequence
  Description of Artificial Sequence: Synthetic oligonucleotide
guaaucucauacaagcuuc

SEQ ID NO: 1811949 - RNA, 19 nt, Artificial Sequence
  Description of Artificial Sequence: Synthetic oligonucleotide
uuaguuuaccuaacaucuc

SEQ ID NO: 1811950 - RNA, 19 nt, Artificial Sequence
  Description of Artificial Sequence: Synthetic oligonucleotide
aggcuaaaugucccacgcc

SEQ ID NO: 1811951 - RNA, 19 nt, Artificial Sequence
  Description of Artificial Sequence: Synthetic oligonucleotide
ugaacagaucuucgggaac

SEQ ID NO: 1811952 - RNA, 19 nt, Artificial Sequence
  Description of Artificial Sequence: Synthetic oligonucleotide
ucuacuacacagcuuucuu

SEQ ID NO: 1811953 - RNA, 19 nt, Artificial Sequence
  Description of Artificial Sequence: Synthetic oligonucleotide
cuggaaauuuucuguggag

SEQ ID NO: 1811954 - RNA, 19 nt, Artificial Sequence
  Description of Artificial Sequence: Synthetic oligonucleotide
guagcugggguuuaacuga

SEQ ID NO: 1811955 - RNA, 19 nt, Artificial Sequence
  Description of Artificial Sequence: Synthetic oligonucleotide
aguugccaagaucuuuuag

SEQ ID NO: 1811956 - RNA, 19 nt, Artificial Sequence
  Description of Artificial Sequence: Synthetic oligonucleotide
caucuaguucagaggaacc

SEQ ID NO: 1811957 - RNA, 19 nt, Artificial Sequence
  Description of Artificial Sequence: Synthetic oligonucleotide
agaccgaucuuucuggaaa

SEQ ID NO: 1811958 - RNA, 19 nt, Artificial Sequence
  Description of Artificial Sequence: Synthetic oligonucleotide
ugucccacgccgcaagacc

SEQ ID NO: 1811959 - RNA, 19 nt, Artificial Sequence
  Description of Artificial Sequence: Synthetic oligonucleotide
ucauacaacucugcucucc

SEQ ID NO: 1811960 - RNA, 19 nt, Artificial Sequence
  Description of Artificial Sequence: Synthetic oligonucleotide
uguccuguuucauccuugc

SEQ ID NO: 1811961 - RNA, 19 nt, Artificial Sequence
  Description of Artificial Sequence: Synthetic oligonucleotide
uucucacccaugcugaguu

SEQ ID NO: 1811962 - RNA, 19 nt, Artificial Sequence
  Description of Artificial Sequence: Synthetic oligonucleotide
aaggaggcacuacagucau

SEQ ID NO: 1811963 - RNA, 19 nt, Artificial Sequence
  Description of Artificial Sequence: Synthetic oligonucleotide
gaacuaaguugccaagauc

SEQ ID NO: 1811964 - RNA, 19 nt, Artificial Sequence
  Description of Artificial Sequence: Synthetic oligonucleotide
cauuccacccuaaucauaa

SEQ ID NO: 1811965 - RNA, 19 nt, Artificial Sequence
  Description of Artificial Sequence: Synthetic oligonucleotide
uacagucaugaaacauucc

SEQ ID NO: 1811966 - RNA, 19 nt, Artificial Sequence
  Description of Artificial Sequence: Synthetic oligonucleotide
cucaauauugcacggaugu

SEQ ID NO: 1811967 - RNA, 19 nt, Artificial Sequence
  Description of Artificial Sequence: Synthetic oligonucleotide
uggaccuuaggaucagaga

SEQ ID NO: 1811968 - RNA, 19 nt, Artificial Sequence
  Description of Artificial Sequence: Synthetic oligonucleotide
aaaggucgaagaacuaagu

SEQ ID NO: 1811969 - RNA, 19 nt, Artificial Sequence
  Description of Artificial Sequence: Synthetic oligonucleotide
agaucuucgggaaccuuac

SEQ ID NO: 1811970 - RNA, 19 nt, Artificial Sequence
  Description of Artificial Sequence: Synthetic oligonucleotide
gagcccaaaaggucgaaga

SEQ ID NO: 1811971 - RNA, 19 nt, Artificial Sequence
  Description of Artificial Sequence: Synthetic oligonucleotide
uguaaucuccucucuuaaa

SEQ ID NO: 1811972 - RNA, 19 nt, Artificial Sequence
  Description of Artificial Sequence: Synthetic oligonucleotide
cagucaugaaacauuccuc

SEQ ID NO: 1811973 - RNA, 19 nt, Artificial Sequence
  Description of Artificial Sequence: Synthetic oligonucleotide
uucuguuaucuauuauuau

SEQ ID NO: 1811974 - RNA, 19 nt, Artificial Sequence
  Description of Artificial Sequence: Synthetic oligonucleotide
acaagcuucucuugcuuga

SEQ ID NO: 1811975 - RNA, 19 nt, Artificial Sequence
  Description of Artificial Sequence: Synthetic oligonucleotide
ccuaaucauaaaacaagag

SEQ ID NO: 1811976 - RNA, 19 nt, Artificial Sequence
  Description of Artificial Sequence: Synthetic oligonucleotide
ucgaaggaggcacuacagu

SEQ ID NO: 1811977 - RNA, 19 nt, Artificial Sequence
  Description of Artificial Sequence: Synthetic oligonucleotide
uuaugacuacuguuaguuc

SEQ ID NO: 1811978 - RNA, 19 nt, Artificial Sequence
  Description of Artificial Sequence: Synthetic oligonucleotide
guugccaagaucuuuuagu

SEQ ID NO: 1811979 - RNA, 19 nt, Artificial Sequence
  Description of Artificial Sequence: Synthetic oligonucleotide
aacagaacagaccgaucuu

SEQ ID NO: 1811980 - RNA, 19 nt, Artificial Sequence
  Description of Artificial Sequence: Synthetic oligonucleotide
cucgaaggaggcacuacag

SEQ ID NO: 1811981 - RNA, 19 nt, Artificial Sequence
  Description of Artificial Sequence: Synthetic oligonucleotide
ucgaagaacuaaguugcca

SEQ ID NO: 1811982 - RNA, 19 nt, Artificial Sequence
  Description of Artificial Sequence: Synthetic oligonucleotide
uaaugaggcucauuacauc

SEQ ID NO: 1811983 - RNA, 19 nt, Artificial Sequence
  Description of Artificial Sequence: Synthetic oligonucleotide
uaguagcuugcucugggaa

SEQ ID NO: 1811984 - RNA, 19 nt, Artificial Sequence
  Description of Artificial Sequence: Synthetic oligonucleotide
ccuugugaacaguucaugg

SEQ ID NO: 1811985 - RNA, 19 nt, Artificial Sequence
  Description of Artificial Sequence: Synthetic oligonucleotide
uuuagugcucucuucucuu

SEQ ID NO: 1811986 - RNA, 19 nt, Artificial Sequence
  Description of Artificial Sequence: Synthetic oligonucleotide
caguucauggccucccagc

SEQ ID NO: 1811987 - RNA, 19 nt, Artificial Sequence
  Description of Artificial Sequence: Synthetic oligonucleotide
aagacccacgacguucuuc

SEQ ID NO: 1811988 - RNA, 19 nt, Artificial Sequence
  Description of Artificial Sequence: Synthetic oligonucleotide
guuuaccuaacaucucuuc

SEQ ID NO: 1811989 - RNA, 19 nt, Artificial Sequence
  Description of Artificial Sequence: Synthetic oligonucleotide
cugggaaugggcuccauca

SEQ ID NO: 1811990 - RNA, 19 nt, Artificial Sequence
  Description of Artificial Sequence: Synthetic oligonucleotide
aguucagaggaaccagacu

SEQ ID NO: 1811991 - RNA, 19 nt, Artificial Sequence
  Description of Artificial Sequence: Synthetic oligonucleotide
uuaguagcuugcucuggga

SEQ ID NO: 1811992 - RNA, 19 nt, Artificial Sequence
  Description of Artificial Sequence: Synthetic oligonucleotide
aagaacucucagcuucuau

SEQ ID NO: 1811993 - RNA, 19 nt, Artificial Sequence
  Description of Artificial Sequence: Synthetic oligonucleotide
gcucauuacaucaggaggc

SEQ ID NO: 1811994 - RNA, 19 nt, Artificial Sequence
  Description of Artificial Sequence: Synthetic oligonucleotide
accauugaacagaucuucg

SEQ ID NO: 1811995 - RNA, 19 nt, Artificial Sequence
  Description of Artificial Sequence: Synthetic oligonucleotide
cuuacaguucucugacuuc

SEQ ID NO: 1811996 - RNA, 19 nt, Artificial Sequence
  Description of Artificial Sequence: Synthetic oligonucleotide
aucuuuuaguuuaccuaac

SEQ ID NO: 1811997 - RNA, 19 nt, Artificial Sequence
  Description of Artificial Sequence: Synthetic oligonucleotide
gaccuuaggaucagagacc

SEQ ID NO: 1811998 - RNA, 19 nt, Artificial Sequence
  Description of Artificial Sequence: Synthetic oligonucleotide
acgacguucuucccaagcu

SEQ ID NO: 1811999 - RNA, 19 nt, Artificial Sequence
  Description of Artificial Sequence: Synthetic oligonucleotide
aguagcuugcucugggaau

SEQ ID NO: 1812000 - RNA, 19 nt, Artificial Sequence
  Description of Artificial Sequence: Synthetic oligonucleotide
ucaguuagguauuccucau

SEQ ID NO: 1812001 - RNA, 19 nt, Artificial Sequence
  Description of Artificial Sequence: Synthetic oligonucleotide
aggcacuacagucaugaaa

SEQ ID NO: 1812002 - RNA, 19 nt, Artificial Sequence
  Description of Artificial Sequence: Synthetic oligonucleotide
acuacagucaugaaacauu

SEQ ID NO: 1812003 - RNA, 19 nt, Artificial Sequence
  Description of Artificial Sequence: Synthetic oligonucleotide
ucaauuugcuuagguaauc

SEQ ID NO: 1812004 - RNA, 19 nt, Artificial Sequence
  Description of Artificial Sequence: Synthetic oligonucleotide
gaacucucagcuucuaugu

SEQ ID NO: 1812005 - RNA, 19 nt, Artificial Sequence
  Description of Artificial Sequence: Synthetic oligonucleotide
aucuaguucagaggaacca

SEQ ID NO: 1812006 - RNA, 19 nt, Artificial Sequence
  Description of Artificial Sequence: Synthetic oligonucleotide
cagccaaaaccaagaacag

SEQ ID NO: 1812007 - RNA, 19 nt, Artificial Sequence
  Description of Artificial Sequence: Synthetic oligonucleotide
gaaaacagaacagaccgau

SEQ ID NO: 1812008 - RNA, 19 nt, Artificial Sequence
  Description of Artificial Sequence: Synthetic oligonucleotide
auguaaucuccucucuuaa

SEQ ID NO: 1812009 - RNA, 19 nt, Artificial Sequence
  Description of Artificial Sequence: Synthetic oligonucleotide
agucauugauggccauuuc

SEQ ID NO: 1812010 - RNA, 19 nt, Artificial Sequence
  Description of Artificial Sequence: Synthetic oligonucleotide
aaugggcuccaucauccuu

SEQ ID NO: 1812011 - RNA, 19 nt, Artificial Sequence
  Description of Artificial Sequence: Synthetic oligonucleotide
auacaacucugcucuccuc

SEQ ID NO: 1812012 - RNA, 19 nt, Artificial Sequence
  Description of Artificial Sequence: Synthetic oligonucleotide
guagcuugcucugggaaug

SEQ ID NO: 1812013 - RNA, 19 nt, Artificial Sequence
  Description of Artificial Sequence: Synthetic oligonucleotide
uucgggaaccuuacaguuc

SEQ ID NO: 1812014 - RNA, 19 nt, Artificial Sequence
  Description of Artificial Sequence: Synthetic oligonucleotide
aaucuuucauuacguucuu

SEQ ID NO: 1812015 - RNA, 19 nt, Artificial Sequence
  Description of Artificial Sequence: Synthetic oligonucleotide
accuuaggaucagagaccu

SEQ ID NO: 1812016 - RNA, 19 nt, Artificial Sequence
  Description of Artificial Sequence: Synthetic oligonucleotide
cugcucuccucaauauugc

SEQ ID NO: 1812017 - RNA, 19 nt, Artificial Sequence
  Description of Artificial Sequence: Synthetic oligonucleotide
gaccgaucuuucuggaaac

SEQ ID NO: 1812018 - RNA, 19 nt, Artificial Sequence
  Description of Artificial Sequence: Synthetic oligonucleotide
ggaaugggcuccaucaucc

SEQ ID NO: 1812019 - RNA, 19 nt, Artificial Sequence
  Description of Artificial Sequence: Synthetic oligonucleotide
cacccuaaucauaaaacaa

SEQ ID NO: 1812020 - RNA, 19 nt, Artificial Sequence
  Description of Artificial Sequence: Synthetic oligonucleotide
caggaggcacauuccaccc

SEQ ID NO: 1812021 - RNA, 19 nt, Artificial Sequence
  Description of Artificial Sequence: Synthetic oligonucleotide
aaaccauugaacagaucuu

SEQ ID NO: 1812022 - RNA, 19 nt, Artificial Sequence
  Description of Artificial Sequence: Synthetic oligonucleotide
aucaggaggcacauuccac

SEQ ID NO: 1812023 - RNA, 19 nt, Artificial Sequence
  Description of Artificial Sequence: Synthetic oligonucleotide
aaugucccacgccgcaaga

SEQ ID NO: 1812024 - RNA, 19 nt, Artificial Sequence
  Description of Artificial Sequence: Synthetic oligonucleotide
agggucuugcccuugugaa

SEQ ID NO: 1812025 - RNA, 19 nt, Artificial Sequence
  Description of Artificial Sequence: Synthetic oligonucleotide
agcucuauuugaaaacaga

SEQ ID NO: 1812026 - RNA, 19 nt, Artificial Sequence
  Description of Artificial Sequence: Synthetic oligonucleotide
auuacaucaggaggcacau

SEQ ID NO: 1812027 - RNA, 19 nt, Artificial Sequence
  Description of Artificial Sequence: Synthetic oligonucleotide
gaacaguucauggccuccc

SEQ ID NO: 1812028 - RNA, 19 nt, Artificial Sequence
  Description of Artificial Sequence: Synthetic oligonucleotide
cuaguucagaggaaccaga

SEQ ID NO: 1812029 - RNA, 19 nt, Artificial Sequence
  Description of Artificial Sequence: Synthetic oligonucleotide
caagaucuuuuaguuuacc

SEQ ID NO: 1812030 - RNA, 19 nt, Artificial Sequence
  Description of Artificial Sequence: Synthetic oligonucleotide
uaguucuguuaucuauuau

SEQ ID NO: 1812031 - RNA, 19 nt, Artificial Sequence
  Description of Artificial Sequence: Synthetic oligonucleotide
uuagugcucucuucucuuc

SEQ ID NO: 1812032 - RNA, 19 nt, Artificial Sequence
  Description of Artificial Sequence: Synthetic oligonucleotide
ggaaccuuacaguucucug

SEQ ID NO: 1812033 - RNA, 19 nt, Artificial Sequence
  Description of Artificial Sequence: Synthetic oligonucleotide
ugcucuccucaauauugca

SEQ ID NO: 1812034 - RNA, 19 nt, Artificial Sequence
  Description of Artificial Sequence: Synthetic oligonucleotide
gccaagaucuuuuaguuua

SEQ ID NO: 1812035 - RNA, 19 nt, Artificial Sequence
  Description of Artificial Sequence: Synthetic oligonucleotide
aucuacuacacagcuuucu

SEQ ID NO: 1812036 - RNA, 19 nt, Artificial Sequence
  Description of Artificial Sequence: Synthetic oligonucleotide
cacgacguucuucccaagc

SEQ ID NO: 1812037 - RNA, 19 nt, Artificial Sequence
  Description of Artificial Sequence: Synthetic oligonucleotide
agccuuuaugacuacuguu

SEQ ID NO: 1812038 - RNA, 19 nt, Artificial Sequence
  Description of Artificial Sequence: Synthetic oligonucleotide
cuugaucuggaaauuuucu

SEQ ID NO: 1812039 - RNA, 19 nt, Artificial Sequence
  Description of Artificial Sequence: Synthetic oligonucleotide
aaggcggcucggaaucuac

SEQ ID NO: 1812040 - RNA, 19 nt, Artificial Sequence
  Description of Artificial Sequence: Synthetic oligonucleotide
aacucucagcuucuaugua

SEQ ID NO: 1812041 - RNA, 19 nt, Artificial Sequence
  Description of Artificial Sequence: Synthetic oligonucleotide
guucaguuagguauuccuc

SEQ ID NO: 1812042 - RNA, 19 nt, Artificial Sequence
  Description of Artificial Sequence: Synthetic oligonucleotide
augacuacuguuaguucug

SEQ ID NO: 1812043 - RNA, 19 nt, Artificial Sequence
  Description of Artificial Sequence: Synthetic oligonucleotide
ccuuuaugacuacuguuag

SEQ ID NO: 1812044 - RNA, 19 nt, Artificial Sequence
  Description of Artificial Sequence: Synthetic oligonucleotide
caaaaggucgaagaacuaa

SEQ ID NO: 1812045 - RNA, 19 nt, Artificial Sequence
  Description of Artificial Sequence: Synthetic oligonucleotide
agcccaaaaggucgaagaa

SEQ ID NO: 1812046 - RNA, 19 nt, Artificial Sequence
  Description of Artificial Sequence: Synthetic oligonucleotide
acuacacagcuuucuuaga

SEQ ID NO: 1812047 - RNA, 19 nt, Artificial Sequence
  Description of Artificial Sequence: Synthetic oligonucleotide
auacaagcuucucuugcuu

SEQ ID NO: 1812048 - RNA, 19 nt, Artificial Sequence
  Description of Artificial Sequence: Synthetic oligonucleotide
gaauugcuuugcugcaguc

SEQ ID NO: 1812049 - RNA, 19 nt, Artificial Sequence
  Description of Artificial Sequence: Synthetic oligonucleotide
uacuguuaguucuguuauc

SEQ ID NO: 1812050 - RNA, 19 nt, Artificial Sequence
  Description of Artificial Sequence: Synthetic oligonucleotide
aaguugccaagaucuuuua

SEQ ID NO: 1812051 - RNA, 19 nt, Artificial Sequence
  Description of Artificial Sequence: Synthetic oligonucleotide
ucauuacguucuucaauuu

SEQ ID NO: 1812052 - RNA, 19 nt, Artificial Sequence
  Description of Artificial Sequence: Synthetic oligonucleotide
cugaauugcuuugcugcag

SEQ ID NO: 1812053 - RNA, 19 nt, Artificial Sequence
  Description of Artificial Sequence: Synthetic oligonucleotide
cagcugcauagauaccacc

SEQ ID NO: 1812054 - RNA, 19 nt, Artificial Sequence
  Description of Artificial Sequence: Synthetic oligonucleotide
gcuuagguaaucucauaca

SEQ ID NO: 1812055 - RNA, 19 nt, Artificial Sequence
  Description of Artificial Sequence: Synthetic oligonucleotide
ugccaagaucuuuuaguuu

SEQ ID NO: 1812056 - RNA, 19 nt, Artificial Sequence
  Description of Artificial Sequence: Synthetic oligonucleotide
cgaucuuucuggaaacagg

SEQ ID NO: 1812057 - RNA, 19 nt, Artificial Sequence
  Description of Artificial Sequence: Synthetic oligonucleotide
acagaccgaucuuucugga

SEQ ID NO: 1812058 - RNA, 19 nt, Artificial Sequence
  Description of Artificial Sequence: Synthetic oligonucleotide
acagaacagaccgaucuuu

SEQ ID NO: 1812059 - RNA, 19 nt, Artificial Sequence
  Description of Artificial Sequence: Synthetic oligonucleotide
agguaaucucauacaagcu

SEQ ID NO: 1812060 - RNA, 19 nt, Artificial Sequence
  Description of Artificial Sequence: Synthetic oligonucleotide
ucaauauugcacggaugua

SEQ ID NO: 1812061 - RNA, 19 nt, Artificial Sequence
  Description of Artificial Sequence: Synthetic oligonucleotide
agagcccaaaaggucgaag

SEQ ID NO: 1812062 - RNA, 19 nt, Artificial Sequence
  Description of Artificial Sequence: Synthetic oligonucleotide
cuucuauguaaucuccucu

SEQ ID NO: 1812063 - RNA, 19 nt, Artificial Sequence
  Description of Artificial Sequence: Synthetic oligonucleotide
gcuggcugacucuacuucc

SEQ ID NO: 1812064 - RNA, 19 nt, Artificial Sequence
  Description of Artificial Sequence: Synthetic oligonucleotide
uuccuaguucaguuaggua

SEQ ID NO: 1812065 - RNA, 19 nt, Artificial Sequence
  Description of Artificial Sequence: Synthetic oligonucleotide
uugucacagcagccaaaac

SEQ ID NO: 1812066 - RNA, 19 nt, Artificial Sequence
  Description of Artificial Sequence: Synthetic oligonucleotide
ggcacauuccacccuaauc

SEQ ID NO: 1812067 - RNA, 19 nt, Artificial Sequence
  Description of Artificial Sequence: Synthetic oligonucleotide
augaggcucauuacaucag

SEQ ID NO: 1812068 - RNA, 19 nt, Artificial Sequence
  Description of Artificial Sequence: Synthetic oligonucleotide
aaaaggcggcucggaaucu

SEQ ID NO: 1812069 - RNA, 19 nt, Artificial Sequence
  Description of Artificial Sequence: Synthetic oligonucleotide
uucaucuaguuugucuguu

SEQ ID NO: 1812070 - RNA, 19 nt, Artificial Sequence
  Description of Artificial Sequence: Synthetic oligonucleotide
uaaaugucccacgccgcaa

SEQ ID NO: 1812071 - RNA, 19 nt, Artificial Sequence
  Description of Artificial Sequence: Synthetic oligonucleotide
acaacucugcucuccucaa

SEQ ID NO: 1812072 - RNA, 19 nt, Artificial Sequence
  Description of Artificial Sequence: Synthetic oligonucleotide
aggagccgguagaagaauc

SEQ ID NO: 1812073 - RNA, 19 nt, Artificial Sequence
  Description of Artificial Sequence: Synthetic oligonucleotide
gguaaucucauacaagcuu

SEQ ID NO: 1812074 - RNA, 19 nt, Artificial Sequence
  Description of Artificial Sequence: Synthetic oligonucleotide
augucccacgccgcaagac

SEQ ID NO: 1812075 - RNA, 19 nt, Artificial Sequence
  Description of Artificial Sequence: Synthetic oligonucleotide
gaguaggagccgguagaag

SEQ ID NO: 1812076 - RNA, 19 nt, Artificial Sequence
  Description of Artificial Sequence: Synthetic oligonucleotide
ucucagcuucuauguaauc

SEQ ID NO: 1812077 - RNA, 19 nt, Artificial Sequence
  Description of Artificial Sequence: Synthetic oligonucleotide
gugaacaguucauggccuc

SEQ ID NO: 1812078 - RNA, 19 nt, Artificial Sequence
  Description of Artificial Sequence: Synthetic oligonucleotide
uggaaacaggaugggcaca

SEQ ID NO: 1812079 - RNA, 19 nt, Artificial Sequence
  Description of Artificial Sequence: Synthetic oligonucleotide
ccuuuaguagcuugcucug

SEQ ID NO: 1812080 - RNA, 19 nt, Artificial Sequence
  Description of Artificial Sequence: Synthetic oligonucleotide
uggccauuuccuucuuguc

SEQ ID NO: 1812081 - RNA, 19 nt, Artificial Sequence
  Description of Artificial Sequence: Synthetic oligonucleotide
caguuagguauuccucauc

SEQ ID NO: 1812082 - RNA, 19 nt, Artificial Sequence
  Description of Artificial Sequence: Synthetic oligonucleotide
cuaguucaguuagguauuc

SEQ ID NO: 1812083 - RNA, 19 nt, Artificial Sequence
  Description of Artificial Sequence: Synthetic oligonucleotide
cgaaggaggcacuacaguc

SEQ ID NO: 1812084 - RNA, 19 nt, Artificial Sequence
  Description of Artificial Sequence: Synthetic oligonucleotide
cuucccaagcucguagcuc

SEQ ID NO: 1812085 - RNA, 19 nt, Artificial Sequence
  Description of Artificial Sequence: Synthetic oligonucleotide
cuuuaugacuacuguuagu

SEQ ID NO: 1812086 - RNA, 19 nt, Artificial Sequence
  Description of Artificial Sequence: Synthetic oligonucleotide
ccacccuaaucauaaaaca

SEQ ID NO: 1812087 - RNA, 19 nt, Artificial Sequence
  Description of Artificial Sequence: Synthetic oligonucleotide
cagccagccuuuaugacua

SEQ ID NO: 1812088 - RNA, 19 nt, Artificial Sequence
  Description of Artificial Sequence: Synthetic oligonucleotide
gucgaagaacuaaguugcc

SEQ ID NO: 1812089 - RNA, 19 nt, Artificial Sequence
  Description of Artificial Sequence: Synthetic oligonucleotide
ggagccgguagaagaaucc

SEQ ID NO: 1812090 - RNA, 19 nt, Artificial Sequence
  Description of Artificial Sequence: Synthetic oligonucleotide
gaucuucgggaaccuuaca

SEQ ID NO: 1812091 - RNA, 19 nt, Artificial Sequence
  Description of Artificial Sequence: Synthetic oligonucleotide
aguuuaccuaacaucucuu

SEQ ID NO: 1812092 - RNA, 19 nt, Artificial Sequence
  Description of Artificial Sequence: Synthetic oligonucleotide
cccaugcugaguucagggg

SEQ ID NO: 1812093 - RNA, 19 nt, Artificial Sequence
  Description of Artificial Sequence: Synthetic oligonucleotide
cuacacagcuuucuuagau

SEQ ID NO: 1812094 - RNA, 19 nt, Artificial Sequence
  Description of Artificial Sequence: Synthetic oligonucleotide
cugcauagauaccaccuua

SEQ ID NO: 1812095 - RNA, 19 nt, Artificial Sequence
  Description of Artificial Sequence: Synthetic oligonucleotide
gucccacgccgcaagaccc

SEQ ID NO: 1812096 - RNA, 19 nt, Artificial Sequence
  Description of Artificial Sequence: Synthetic oligonucleotide
agccgguagaagaauccug

SEQ ID NO: 1812097 - RNA, 19 nt, Artificial Sequence
  Description of Artificial Sequence: Synthetic oligonucleotide
acggauguagcugggguuu

SEQ ID NO: 1812098 - RNA, 19 nt, Artificial Sequence
  Description of Artificial Sequence: Synthetic oligonucleotide
cuguuucauccuugcagca

SEQ ID NO: 1812099 - RNA, 19 nt, Artificial Sequence
  Description of Artificial Sequence: Synthetic oligonucleotide
gcuugaucuggaaauuuuc

SEQ ID NO: 1812100 - RNA, 19 nt, Artificial Sequence
  Description of Artificial Sequence: Synthetic oligonucleotide
gccuuuaugacuacuguua

SEQ ID NO: 1812101 - RNA, 19 nt, Artificial Sequence
  Description of Artificial Sequence: Synthetic oligonucleotide
guaggagccgguagaagaa

SEQ ID NO: 1812102 - RNA, 19 nt, Artificial Sequence
  Description of Artificial Sequence: Synthetic oligonucleotide
accuaacaucucuucuuuu

SEQ ID NO: 1812103 - RNA, 19 nt, Artificial Sequence
  Description of Artificial Sequence: Synthetic oligonucleotide
guucauggccucccagcca

SEQ ID NO: 1812104 - RNA, 19 nt, Artificial Sequence
  Description of Artificial Sequence: Synthetic oligonucleotide
gucuugcccuugugaacag

SEQ ID NO: 1812105 - RNA, 19 nt, Artificial Sequence
  Description of Artificial Sequence: Synthetic oligonucleotide
ucccacgccgcaagaccca

SEQ ID NO: 1812106 - RNA, 19 nt, Artificial Sequence
  Description of Artificial Sequence: Synthetic oligonucleotide
cucauacaacucugcucuc

SEQ ID NO: 1812107 - RNA, 19 nt, Artificial Sequence
  Description of Artificial Sequence: Synthetic oligonucleotide
ccaagaucuuuuaguuuac

SEQ ID NO: 1812108 - RNA, 19 nt, Artificial Sequence
  Description of Artificial Sequence: Synthetic oligonucleotide
cucacccaugcugaguuca

SEQ ID NO: 1812109 - RNA, 19 nt, Artificial Sequence
  Description of Artificial Sequence: Synthetic oligonucleotide
caugguccuccugggaaug

SEQ ID NO: 1812110 - RNA, 19 nt, Artificial Sequence
  Description of Artificial Sequence: Synthetic oligonucleotide
gacucuacuuccugagaau

SEQ ID NO: 1812111 - RNA, 19 nt, Artificial Sequence
  Description of Artificial Sequence: Synthetic oligonucleotide
cauacaacucugcucuccu

SEQ ID NO: 1812112 - RNA, 19 nt, Artificial Sequence
  Description of Artificial Sequence: Synthetic oligonucleotide
uagcuugcucugggaaugc

SEQ ID NO: 1812113 - RNA, 19 nt, Artificial Sequence
  Description of Artificial Sequence: Synthetic oligonucleotide
cucaucuaguucagaggaa

SEQ ID NO: 1812114 - RNA, 19 nt, Artificial Sequence
  Description of Artificial Sequence: Synthetic oligonucleotide
auuccacccuaaucauaaa

SEQ ID NO: 1812115 - RNA, 19 nt, Artificial Sequence
  Description of Artificial Sequence: Synthetic oligonucleotide
ggugaggcuaaauguccca

SEQ ID NO: 1812116 - RNA, 19 nt, Artificial Sequence
  Description of Artificial Sequence: Synthetic oligonucleotide
ccuaacaucucuucuuuua

SEQ ID NO: 1812117 - RNA, 19 nt, Artificial Sequence
  Description of Artificial Sequence: Synthetic oligonucleotide
cacccaugcugaguucagg

SEQ ID NO: 1812118 - RNA, 19 nt, Artificial Sequence
  Description of Artificial Sequence: Synthetic oligonucleotide
accgaucuuucuggaaaca

SEQ ID NO: 1812119 - RNA, 19 nt, Artificial Sequence
  Description of Artificial Sequence: Synthetic oligonucleotide
uccucgaaggaggcacuac

SEQ ID NO: 1812120 - RNA, 19 nt, Artificial Sequence
  Description of Artificial Sequence: Synthetic oligonucleotide
uucguuccccugcuccuuu

SEQ ID NO: 1812121 - RNA, 19 nt, Artificial Sequence
  Description of Artificial Sequence: Synthetic oligonucleotide
cucuacuuccugagaaucu

SEQ ID NO: 1812122 - RNA, 19 nt, Artificial Sequence
  Description of Artificial Sequence: Synthetic oligonucleotide
agccagccuuuaugacuac

SEQ ID NO: 1812123 - RNA, 19 nt, Artificial Sequence
  Description of Artificial Sequence: Synthetic oligonucleotide
cgccgcaagacccacgacg

SEQ ID NO: 1812124 - RNA, 19 nt, Artificial Sequence
  Description of Artificial Sequence: Synthetic oligonucleotide
cacgccgcaagacccacga

SEQ ID NO: 1812125 - RNA, 19 nt, Artificial Sequence
  Description of Artificial Sequence: Synthetic oligonucleotide
cuucgggaaccuuacaguu

SEQ ID NO: 1812126 - RNA, 19 nt, Artificial Sequence
  Description of Artificial Sequence: Synthetic oligonucleotide
uaggagccgguagaagaau

SEQ ID NO: 1812127 - RNA, 19 nt, Artificial Sequence
  Description of Artificial Sequence: Synthetic oligonucleotide
cacaucugaagggcuugac

SEQ ID NO: 1812128 - RNA, 19 nt, Artificial Sequence
  Description of Artificial Sequence: Synthetic oligonucleotide
cgaagaacuaaguugccaa

SEQ ID NO: 1812129 - RNA, 19 nt, Artificial Sequence
  Description of Artificial Sequence: Synthetic oligonucleotide
ucucacccaugcugaguuc

SEQ ID NO: 1812130 - RNA, 19 nt, Artificial Sequence
  Description of Artificial Sequence: Synthetic oligonucleotide
gcucuccucaauauugcac

SEQ ID NO: 1812131 - RNA, 19 nt, Artificial Sequence
  Description of Artificial Sequence: Synthetic oligonucleotide
auguauugauggaucuuuu

SEQ ID NO: 1812132 - RNA, 19 nt, Artificial Sequence
  Description of Artificial Sequence: Synthetic oligonucleotide
uucauccuugcagcagcuc

SEQ ID NO: 1812133 - RNA, 19 nt, Artificial Sequence
  Description of Artificial Sequence: Synthetic oligonucleotide
caggaugggcacaucugaa

SEQ ID NO: 1812134 - RNA, 19 nt, Artificial Sequence
  Description of Artificial Sequence: Synthetic oligonucleotide
gauuuugaacaaaguugau

SEQ ID NO: 1812135 - RNA, 19 nt, Artificial Sequence
  Description of Artificial Sequence: Synthetic oligonucleotide
guaagaacucucagcuucu

SEQ ID NO: 1812136 - RNA, 19 nt, Artificial Sequence
  Description of Artificial Sequence: Synthetic oligonucleotide
acgccgcaagacccacgac

SEQ ID NO: 1812137 - RNA, 19 nt, Artificial Sequence
  Description of Artificial Sequence: Synthetic oligonucleotide
caccaucugugccccuggc

SEQ ID NO: 1812138 - RNA, 19 nt, Artificial Sequence
  Description of Artificial Sequence: Synthetic oligonucleotide
cucucagcuucuauguaau

SEQ ID NO: 1812139 - RNA, 19 nt, Artificial Sequence
  Description of Artificial Sequence: Synthetic oligonucleotide
cuauguaaucuccucucuu

SEQ ID NO: 1812140 - RNA, 19 nt, Artificial Sequence
  Description of Artificial Sequence: Synthetic oligonucleotide
cucucuuaaacuguucguu

SEQ ID NO: 1812141 - RNA, 19 nt, Artificial Sequence
  Description of Artificial Sequence: Synthetic oligonucleotide
gcggcucggaaucuacuac

SEQ ID NO: 1812142 - RNA, 19 nt, Artificial Sequence
  Description of Artificial Sequence: Synthetic oligonucleotide
gaaugggcuccaucauccu

SEQ ID NO: 1812143 - RNA, 19 nt, Artificial Sequence
  Description of Artificial Sequence: Synthetic oligonucleotide
acauuccacccuaaucaua

SEQ ID NO: 1812144 - RNA, 19 nt, Artificial Sequence
  Description of Artificial Sequence: Synthetic oligonucleotide
gcagcagcucuauuugaaa

SEQ ID NO: 1812145 - RNA, 19 nt, Artificial Sequence
  Description of Artificial Sequence: Synthetic oligonucleotide
cacauuccacccuaaucau

SEQ ID NO: 1812146 - RNA, 19 nt, Artificial Sequence
  Description of Artificial Sequence: Synthetic oligonucleotide
ggcucggaaucuacuacac

SEQ ID NO: 1812147 - RNA, 19 nt, Artificial Sequence
  Description of Artificial Sequence: Synthetic oligonucleotide
cagaccgaucuuucuggaa

SEQ ID NO: 1812148 - RNA, 19 nt, Artificial Sequence
  Description of Artificial Sequence: Synthetic oligonucleotide
gaggcacuacagucaugaa

SEQ ID NO: 1812149 - RNA, 19 nt, Artificial Sequence
  Description of Artificial Sequence: Synthetic oligonucleotide
gagccgguagaagaauccu

SEQ ID NO: 1812150 - RNA, 19 nt, Artificial Sequence
  Description of Artificial Sequence: Synthetic oligonucleotide
cauccuuuaguagcuugcu

SEQ ID NO: 1812151 - RNA, 19 nt, Artificial Sequence
  Description of Artificial Sequence: Synthetic oligonucleotide
agcuugcucugggaaugcu

SEQ ID NO: 1812152 - RNA, 19 nt, Artificial Sequence
  Description of Artificial Sequence: Synthetic oligonucleotide
acguucuucccaagcucgu

SEQ ID NO: 1812153 - RNA, 19 nt, Artificial Sequence
  Description of Artificial Sequence: Synthetic oligonucleotide
cacuacagucaugaaacau

SEQ ID NO: 1812154 - RNA, 19 nt, Artificial Sequence
  Description of Artificial Sequence: Synthetic oligonucleotide
gcucggaaucuacuacaca

SEQ ID NO: 1812155 - RNA, 19 nt, Artificial Sequence
  Description of Artificial Sequence: Synthetic oligonucleotide
ccuuuaguuuagugcucuc

SEQ ID NO: 1812156 - RNA, 19 nt, Artificial Sequence
  Description of Artificial Sequence: Synthetic oligonucleotide
ucguuccccugcuccuuua

SEQ ID NO: 1812157 - RNA, 19 nt, Artificial Sequence
  Description of Artificial Sequence: Synthetic oligonucleotide
ggaguaggagccgguagaa

SEQ ID NO: 1812158 - RNA, 19 nt, Artificial Sequence
  Description of Artificial Sequence: Synthetic oligonucleotide
cuguaacuuucaaaccauu

SEQ ID NO: 1812159 - RNA, 19 nt, Artificial Sequence
  Description of Artificial Sequence: Synthetic oligonucleotide
cagucauugauggccauuu

SEQ ID NO: 1812160 - RNA, 19 nt, Artificial Sequence
  Description of Artificial Sequence: Synthetic oligonucleotide
ggagagcccaaaaggucga

SEQ ID NO: 1812161 - RNA, 19 nt, Artificial Sequence
  Description of Artificial Sequence: Synthetic oligonucleotide
ggcggcucggaaucuacua

SEQ ID NO: 1812162 - RNA, 19 nt, Artificial Sequence
  Description of Artificial Sequence: Synthetic oligonucleotide
ggaaacaggaugggcacau

SEQ ID NO: 1812163 - RNA, 19 nt, Artificial Sequence
  Description of Artificial Sequence: Synthetic oligonucleotide
cgacguucuucccaagcuc

SEQ ID NO: 1812164 - RNA, 19 nt, Artificial Sequence
  Description of Artificial Sequence: Synthetic oligonucleotide
gagagcccaaaaggucgaa

SEQ ID NO: 1812165 - RNA, 19 nt, Artificial Sequence
  Description of Artificial Sequence: Synthetic oligonucleotide
cuguaagaacucucagcuu

SEQ ID NO: 1812166 - RNA, 19 nt, Artificial Sequence
  Description of Artificial Sequence: Synthetic oligonucleotide
gggguuuaacugaauugcu

SEQ ID NO: 1812167 - RNA, 19 nt, Artificial Sequence
  Description of Artificial Sequence: Synthetic oligonucleotide
cccuggcugcuccuccucg

SEQ ID NO: 1812168 - RNA, 19 nt, Artificial Sequence
  Description of Artificial Sequence: Synthetic oligonucleotide
aggcggcucggaaucuacu

SEQ ID NO: 1812169 - RNA, 19 nt, Artificial Sequence
  Description of Artificial Sequence: Synthetic oligonucleotide
cccacgacguucuucccaa

SEQ ID NO: 1812170 - RNA, 19 nt, Artificial Sequence
  Description of Artificial Sequence: Synthetic oligonucleotide
aggaggcacuacagucaug

SEQ ID NO: 1812171 - RNA, 19 nt, Artificial Sequence
  Description of Artificial Sequence: Synthetic oligonucleotide
ggguuuaacugaauugcuu

SEQ ID NO: 1812172 - RNA, 19 nt, Artificial Sequence
  Description of Artificial Sequence: Synthetic oligonucleotide
ccuaguucaguuagguauu

SEQ ID NO: 1812173 - RNA, 19 nt, Artificial Sequence
  Description of Artificial Sequence: Synthetic oligonucleotide
ccucucuuaaacuguucgu

SEQ ID NO: 1812174 - RNA, 19 nt, Artificial Sequence
  Description of Artificial Sequence: Synthetic oligonucleotide
ccaaaaggucgaagaacua

SEQ ID NO: 1812175 - RNA, 19 nt, Artificial Sequence
  Description of Artificial Sequence: Synthetic oligonucleotide
cggaaucuacuacacagcu

SEQ ID NO: 1812176 - RNA, 19 nt, Artificial Sequence
  Description of Artificial Sequence: Synthetic oligonucleotide
gccgcaagacccacgacgu

SEQ ID NO: 1812177 - RNA, 19 nt, Artificial Sequence
  Description of Artificial Sequence: Synthetic oligonucleotide
gggcuccaucauccuuuag

SEQ ID NO: 1812178 - RNA, 19 nt, Artificial Sequence
  Description of Artificial Sequence: Synthetic oligonucleotide
cggcucggaaucuacuaca

SEQ ID NO: 1812179 - RNA, 19 nt, Artificial Sequence
  Description of Artificial Sequence: Synthetic oligonucleotide
cugcuugaucuggaaauuu

SEQ ID NO: 1812180 - RNA, 19 nt, Artificial Sequence
  Description of Artificial Sequence: Synthetic oligonucleotide
ggaaucuacuacacagcuu

SEQ ID NO: 1812181 - RNA, 19 nt, Artificial Sequence
  Description of Artificial Sequence: Synthetic oligonucleotide
ccacgccgcaagacccacg

SEQ ID NO: 1812182 - RNA, 19 nt, Artificial Sequence
  Description of Artificial Sequence: Synthetic oligonucleotide
gcacaucugaagggcuuga

SEQ ID NO: 1812183 - RNA, 19 nt, Artificial Sequence
  Description of Artificial Sequence: Synthetic oligonucleotide
ggauguagcugggguuuaa

SEQ ID NO: 1812184 - RNA, 19 nt, Artificial Sequence
  Description of Artificial Sequence: Synthetic oligonucleotide
caacucugcucuccucaau

SEQ ID NO: 1812185 - RNA, 19 nt, Artificial Sequence
  Description of Artificial Sequence: Synthetic oligonucleotide
ccacgacguucuucccaag

SEQ ID NO: 1812186 - RNA, 19 nt, Artificial Sequence
  Description of Artificial Sequence: Synthetic oligonucleotide
cuccucgaaggaggcacua

SEQ ID NO: 1812187 - RNA, 19 nt, Artificial Sequence
  Description of Artificial Sequence: Synthetic oligonucleotide
cuccugggaaugggcucca

SEQ ID NO: 1812188 - RNA, 19 nt, Artificial Sequence
  Description of Artificial Sequence: Synthetic oligonucleotide
guucguuccccugcuccuu

SEQ ID NO: 1812189 - RNA, 19 nt, Artificial Sequence
  Description of Artificial Sequence: Synthetic oligonucleotide
gcuggaccuuaggaucaga

SEQ ID NO: 1812190 - RNA, 19 nt, Artificial Sequence
  Description of Artificial Sequence: Synthetic oligonucleotide
ccgguagaagaauccugcu

SEQ ID NO: 1812191 - RNA, 19 nt, Artificial Sequence
  Description of Artificial Sequence: Synthetic oligonucleotide
cccacgccgcaagacccac

SEQ ID NO: 1812192 - RNA, 19 nt, Artificial Sequence
  Description of Artificial Sequence: Synthetic oligonucleotide
gcagucauugauggccauu

SEQ ID NO: 1812193 - RNA, 19 nt, Artificial Sequence
  Description of Artificial Sequence: Synthetic oligonucleotide
cgguagaagaauccugcuu

SEQ ID NO: 1812194 - RNA, 19 nt, Artificial Sequence
  Description of Artificial Sequence: Synthetic oligonucleotide
cgggaaccuuacaguucuc

SEQ ID NO: 1812195 - RNA, 19 nt, Artificial Sequence
  Description of Artificial Sequence: Synthetic oligonucleotide
ccuccucgaaggaggcacu

SEQ ID NO: 1812196 - RNA, 19 nt, Artificial Sequence
  Description of Artificial Sequence: Synthetic oligonucleotide
cguucuucccaagcucgua

SEQ ID NO: 1812197 - RNA, 19 nt, Artificial Sequence
  Description of Artificial Sequence: Synthetic oligonucleotide
cggauguagcugggguuua

SEQ ID NO: 1812198 - RNA, 19 nt, Artificial Sequence
  Description of Artificial Sequence: Synthetic oligonucleotide
ccgcaagacccacgacguu

SEQ ID NO: 1812199 - RNA, 19 nt, Artificial Sequence
  Description of Artificial Sequence: Synthetic oligonucleotide
gaugauucgaaguucaggg

SEQ ID NO: 1812200 - RNA, 19 nt, Artificial Sequence
  Description of Artificial Sequence: Synthetic oligonucleotide
aaaggagcgauguucaggg

SEQ ID NO: 1812201 - RNA, 19 nt, Artificial Sequence
  Description of Artificial Sequence: Synthetic oligonucleotide
aaugcaagcggccucauug

SEQ ID NO: 1812202 - RNA, 19 nt, Artificial Sequence
  Description of Artificial Sequence: Synthetic oligonucleotide
aauuucuucugacaccagg

SEQ ID NO: 1812203 - RNA, 19 nt, Artificial Sequence
  Description of Artificial Sequence: Synthetic oligonucleotide
uuaguucugaacaaaugag

SEQ ID NO: 1812204 - RNA, 19 nt, Artificial Sequence
  Description of Artificial Sequence: Synthetic oligonucleotide
ugaacuuccggucaagcag

SEQ ID NO: 1812205 - RNA, 19 nt, Artificial Sequence
  Description of Artificial Sequence: Synthetic oligonucleotide
acuaguaaucuccuccucc

SEQ ID NO: 1812206 - RNA, 19 nt, Artificial Sequence
  Description of Artificial Sequence: Synthetic oligonucleotide
auugugaccagacagguca

SEQ ID NO: 1812207 - RNA, 19 nt, Artificial Sequence
  Description of Artificial Sequence: Synthetic oligonucleotide
accuguaaagaccacgccc

SEQ ID NO: 1812208 - RNA, 19 nt, Artificial Sequence
  Description of Artificial Sequence: Synthetic oligonucleotide
ugagguagcgaccauuuag

SEQ ID NO: 1812209 - RNA, 19 nt, Artificial Sequence
  Description of Artificial Sequence: Synthetic oligonucleotide
auuacgguaucgcaggagg

SEQ ID NO: 1812210 - RNA, 19 nt, Artificial Sequence
  Description of Artificial Sequence: Synthetic oligonucleotide
ucauaugucuccauggggu

SEQ ID NO: 1812211 - RNA, 19 nt, Artificial Sequence
  Description of Artificial Sequence: Synthetic oligonucleotide
guuagcguguuccacaggg

SEQ ID NO: 1812212 - RNA, 19 nt, Artificial Sequence
  Description of Artificial Sequence: Synthetic oligonucleotide
aaucacaacaguugcugug

SEQ ID NO: 1812213 - RNA, 19 nt, Artificial Sequence
  Description of Artificial Sequence: Synthetic oligonucleotide
uguacaauuucuucugaca

SEQ ID NO: 1812214 - RNA, 19 nt, Artificial Sequence
  Description of Artificial Sequence: Synthetic oligonucleotide
ugauggucaaggcagaguc

SEQ ID NO: 1812215 - RNA, 19 nt, Artificial Sequence
  Description of Artificial Sequence: Synthetic oligonucleotide
ugaacaaaugagcuugaac

SEQ ID NO: 1812216 - RNA, 19 nt, Artificial Sequence
  Description of Artificial Sequence: Synthetic oligonucleotide
agaaccaucacguagccuu

SEQ ID NO: 1812217 - RNA, 19 nt, Artificial Sequence
  Description of Artificial Sequence: Synthetic oligonucleotide
aauucauugcugagguagc

SEQ ID NO: 1812218 - RNA, 19 nt, Artificial Sequence
  Description of Artificial Sequence: Synthetic oligonucleotide
acaacaguugcugugcugg

SEQ ID NO: 1812219 - RNA, 19 nt, Artificial Sequence
  Description of Artificial Sequence: Synthetic oligonucleotide
ugauucgaaguucagggaa

SEQ ID NO: 1812220 - RNA, 19 nt, Artificial Sequence
  Description of Artificial Sequence: Synthetic oligonucleotide
ugaaacacuugacugugcu

SEQ ID NO: 1812221 - RNA, 19 nt, Artificial Sequence
  Description of Artificial Sequence: Synthetic oligonucleotide
ugaugauucgaaguucagg

SEQ ID NO: 1812222 - RNA, 19 nt, Artificial Sequence
  Description of Artificial Sequence: Synthetic oligonucleotide
guaggaaacaugcugcaug

SEQ ID NO: 1812223 - RNA, 19 nt, Artificial Sequence
  Description of Artificial Sequence: Synthetic oligonucleotide
aucacaacaguugcugugc

SEQ ID NO: 1812224 - RNA, 19 nt, Artificial Sequence
  Description of Artificial Sequence: Synthetic oligonucleotide
guacaauuucuucugacac

SEQ ID NO: 1812225 - RNA, 19 nt, Artificial Sequence
  Description of Artificial Sequence: Synthetic oligonucleotide
caaaugagcuugaacuucc

SEQ ID NO: 1812226 - RNA, 19 nt, Artificial Sequence
  Description of Artificial Sequence: Synthetic oligonucleotide
acaccagggacucuugaac

SEQ ID NO: 1812227 - RNA, 19 nt, Artificial Sequence
  Description of Artificial Sequence: Synthetic oligonucleotide
cugacuggagcuugcaugg

SEQ ID NO: 1812228 - RNA, 19 nt, Artificial Sequence
  Description of Artificial Sequence: Synthetic oligonucleotide
ugugcuggggacaacggca

SEQ ID NO: 1812229 - RNA, 19 nt, Artificial Sequence
  Description of Artificial Sequence: Synthetic oligonucleotide
cucggcacuaguaaucucc

SEQ ID NO: 1812230 - RNA, 19 nt, Artificial Sequence
  Description of Artificial Sequence: Synthetic oligonucleotide
augggguuuacggugaugg

SEQ ID NO: 1812231 - RNA, 19 nt, Artificial Sequence
  Description of Artificial Sequence: Synthetic oligonucleotide
cagguaggaaacaugcugc

SEQ ID NO: 1812232 - RNA, 19 nt, Artificial Sequence
  Description of Artificial Sequence: Synthetic oligonucleotide
cagauugugaccagacagg

SEQ ID NO: 1812233 - RNA, 19 nt, Artificial Sequence
  Description of Artificial Sequence: Synthetic oligonucleotide
ucgaguucagguaggaaac

SEQ ID NO: 1812234 - RNA, 19 nt, Artificial Sequence
  Description of Artificial Sequence: Synthetic oligonucleotide
aacggcaaaagggugagga

SEQ ID NO: 1812235 - RNA, 19 nt, Artificial Sequence
  Description of Artificial Sequence: Synthetic oligonucleotide
gugauuuugagccugcgga

SEQ ID NO: 1812236 - RNA, 19 nt, Artificial Sequence
  Description of Artificial Sequence: Synthetic oligonucleotide
acucaggcugaucuugggc

SEQ ID NO: 1812237 - RNA, 19 nt, Artificial Sequence
  Description of Artificial Sequence: Synthetic oligonucleotide
guagcgaccauuuaguucu

SEQ ID NO: 1812238 - RNA, 19 nt, Artificial Sequence
  Description of Artificial Sequence: Synthetic oligonucleotide
aaggucaacaccgccugac

SEQ ID NO: 1812239 - RNA, 19 nt, Artificial Sequence
  Description of Artificial Sequence: Synthetic oligonucleotide
aggguggacgaacuguggc

SEQ ID NO: 1812240 - RNA, 19 nt, Artificial Sequence
  Description of Artificial Sequence: Synthetic oligonucleotide
ugcaaaaccuccucauagc

SEQ ID NO: 1812241 - RNA, 19 nt, Artificial Sequence
  Description of Artificial Sequence: Synthetic oligonucleotide
caagcggccucauugaaac

SEQ ID NO: 1812242 - RNA, 19 nt, Artificial Sequence
  Description of Artificial Sequence: Synthetic oligonucleotide
uuaucgagcucuccgacau

SEQ ID NO: 1812243 - RNA, 19 nt, Artificial Sequence
  Description of Artificial Sequence: Synthetic oligonucleotide
ugugccaauuacgguaucg

SEQ ID NO: 1812244 - RNA, 19 nt, Artificial Sequence
  Description of Artificial Sequence: Synthetic oligonucleotide
ugggcucucaaacucagaa

SEQ ID NO: 1812245 - RNA, 19 nt, Artificial Sequence
  Description of Artificial Sequence: Synthetic oligonucleotide
ugcagcucggauucgaaac

SEQ ID NO: 1812246 - RNA, 19 nt, Artificial Sequence
  Description of Artificial Sequence: Synthetic oligonucleotide
caugugguuagcguguucc

SEQ ID NO: 1812247 - RNA, 19 nt, Artificial Sequence
  Description of Artificial Sequence: Synthetic oligonucleotide
auggucaaggcagagucgg

SEQ ID NO: 1812248 - RNA, 19 nt, Artificial Sequence
  Description of Artificial Sequence: Synthetic oligonucleotide
ucauugcugagguagcgac

SEQ ID NO: 1812249 - RNA, 19 nt, Artificial Sequence
  Description of Artificial Sequence: Synthetic oligonucleotide
acuucucuggugaugguac

SEQ ID NO: 1812250 - RNA, 19 nt, Artificial Sequence
  Description of Artificial Sequence: Synthetic oligonucleotide
aauuacgguaucgcaggag

SEQ ID NO: 1812251 - RNA, 19 nt, Artificial Sequence
  Description of Artificial Sequence: Synthetic oligonucleotide
ugcguucugaccaucccca

SEQ ID NO: 1812252 - RNA, 19 nt, Artificial Sequence
  Description of Artificial Sequence: Synthetic oligonucleotide
agguguccaggucauguac

SEQ ID NO: 1812253 - RNA, 19 nt, Artificial Sequence
  Description of Artificial Sequence: Synthetic oligonucleotide
ugguggaccccacucaggc

SEQ ID NO: 1812254 - RNA, 19 nt, Artificial Sequence
  Description of Artificial Sequence: Synthetic oligonucleotide
gaagagggaaaacacccuc

SEQ ID NO: 1812255 - RNA, 19 nt, Artificial Sequence
  Description of Artificial Sequence: Synthetic oligonucleotide
aucacguagccuucaacug

SEQ ID NO: 1812256 - RNA, 19 nt, Artificial Sequence
  Description of Artificial Sequence: Synthetic oligonucleotide
uggugugccaauuacggua

SEQ ID NO: 1812257 - RNA, 19 nt, Artificial Sequence
  Description of Artificial Sequence: Synthetic oligonucleotide
gauucgaaguucagggaag

SEQ ID NO: 1812258 - RNA, 19 nt, Artificial Sequence
  Description of Artificial Sequence: Synthetic oligonucleotide
cucuccgacaucaucuccc

SEQ ID NO: 1812259 - RNA, 19 nt, Artificial Sequence
  Description of Artificial Sequence: Synthetic oligonucleotide
ggcacuaguaaucuccucc

SEQ ID NO: 1812260 - RNA, 19 nt, Artificial Sequence
  Description of Artificial Sequence: Synthetic oligonucleotide
agggaagagggaaaacacc

SEQ ID NO: 1812261 - RNA, 19 nt, Artificial Sequence
  Description of Artificial Sequence: Synthetic oligonucleotide
ggaaacaugcugcauggcc

SEQ ID NO: 1812262 - RNA, 19 nt, Artificial Sequence
  Description of Artificial Sequence: Synthetic oligonucleotide
agcggccucauugaaacac

SEQ ID NO: 1812263 - RNA, 19 nt, Artificial Sequence
  Description of Artificial Sequence: Synthetic oligonucleotide
uugcguucugaccaucccc

SEQ ID NO: 1812264 - RNA, 19 nt, Artificial Sequence
  Description of Artificial Sequence: Synthetic oligonucleotide
ccaauuacgguaucgcagg

SEQ ID NO: 1812265 - RNA, 19 nt, Artificial Sequence
  Description of Artificial Sequence: Synthetic oligonucleotide
aaacucagaagcagcccgg

SEQ ID NO: 1812266 - RNA, 19 nt, Artificial Sequence
  Description of Artificial Sequence: Synthetic oligonucleotide
gaaacacuugacugugcug

SEQ ID NO: 1812267 - RNA, 19 nt, Artificial Sequence
  Description of Artificial Sequence: Synthetic oligonucleotide
aggagcgauguucagggug

SEQ ID NO: 1812268 - RNA, 19 nt, Artificial Sequence
  Description of Artificial Sequence: Synthetic oligonucleotide
accuugaauucauugcuga

SEQ ID NO: 1812269 - RNA, 19 nt, Artificial Sequence
  Description of Artificial Sequence: Synthetic oligonucleotide
auuuaguucugaacaaaug

SEQ ID NO: 1812270 - RNA, 19 nt, Artificial Sequence
  Description of Artificial Sequence: Synthetic oligonucleotide
uguaaagaccacgcccagg

SEQ ID NO: 1812271 - RNA, 19 nt, Artificial Sequence
  Description of Artificial Sequence: Synthetic oligonucleotide
ccagauugugaccagacag

SEQ ID NO: 1812272 - RNA, 19 nt, Artificial Sequence
  Description of Artificial Sequence: Synthetic oligonucleotide
gaugguacugaugauucga

SEQ ID NO: 1812273 - RNA, 19 nt, Artificial Sequence
  Description of Artificial Sequence: Synthetic oligonucleotide
ugguuagcguguuccacag

SEQ ID NO: 1812274 - RNA, 19 nt, Artificial Sequence
  Description of Artificial Sequence: Synthetic oligonucleotide
agaguggcucgcuucaaug

SEQ ID NO: 1812275 - RNA, 19 nt, Artificial Sequence
  Description of Artificial Sequence: Synthetic oligonucleotide
cugcagaaccaucacguag

SEQ ID NO: 1812276 - RNA, 19 nt, Artificial Sequence
  Description of Artificial Sequence: Synthetic oligonucleotide
acgguaucgcaggaggugc

SEQ ID NO: 1812277 - RNA, 19 nt, Artificial Sequence
  Description of Artificial Sequence: Synthetic oligonucleotide
ucccaauccaucucauucu

SEQ ID NO: 1812278 - RNA, 19 nt, Artificial Sequence
  Description of Artificial Sequence: Synthetic oligonucleotide
uguucaggguggacgaacu

SEQ ID NO: 1812279 - RNA, 19 nt, Artificial Sequence
  Description of Artificial Sequence: Synthetic oligonucleotide
acucuccuccuccuccucc

SEQ ID NO: 1812280 - RNA, 19 nt, Artificial Sequence
  Description of Artificial Sequence: Synthetic oligonucleotide
  modified_base (4)..(4): a, c, u, g, unknown or other
ggunuggggaacugccucg

SEQ ID NO: 1812281 - RNA, 19 nt, Artificial Sequence
  Description of Artificial Sequence: Synthetic oligonucleotide
gauuuugagccugcggaug

SEQ ID NO: 1812282 - RNA, 19 nt, Artificial Sequence
  Description of Artificial Sequence: Synthetic oligonucleotide
auucauugcugagguagcg

SEQ ID NO: 1812283 - RNA, 19 nt, Artificial Sequence
  Description of Artificial Sequence: Synthetic oligonucleotide
cucgaguucagguaggaaa

SEQ ID NO: 1812284 - RNA, 19 nt, Artificial Sequence
  Description of Artificial Sequence: Synthetic oligonucleotide
cacguagccuucaacuggc

SEQ ID NO: 1812285 - RNA, 19 nt, Artificial Sequence
  Description of Artificial Sequence: Synthetic oligonucleotide
ccuggugugccaauuacgg

SEQ ID NO: 1812286 - RNA, 19 nt, Artificial Sequence
  Description of Artificial Sequence: Synthetic oligonucleotide
ugacucggcacuaguaauc

SEQ ID NO: 1812287 - RNA, 19 nt, Artificial Sequence
  Description of Artificial Sequence: Synthetic oligonucleotide
uuccggucaagcagggacc

SEQ ID NO: 1812288 - RNA, 19 nt, Artificial Sequence
  Description of Artificial Sequence: Synthetic oligonucleotide
uucagguaggaaacaugcu

SEQ ID NO: 1812289 - RNA, 19 nt, Artificial Sequence
  Description of Artificial Sequence: Synthetic oligonucleotide
aaaugagcuugaacuuccg

SEQ ID NO: 1812290 - RNA, 19 nt, Artificial Sequence
  Description of Artificial Sequence: Synthetic oligonucleotide
acggcaaaagggugaggac

SEQ ID NO: 1812291 - RNA, 19 nt, Artificial Sequence
  Description of Artificial Sequence: Synthetic oligonucleotide
cuccaugggguuuacggug

SEQ ID NO: 1812292 - RNA, 19 nt, Artificial Sequence
  Description of Artificial Sequence: Synthetic oligonucleotide
ugccaauuacgguaucgca

SEQ ID NO: 1812293 - RNA, 19 nt, Artificial Sequence
  Description of Artificial Sequence: Synthetic oligonucleotide
accauuuaguucugaacaa

SEQ ID NO: 1812294 - RNA, 19 nt, Artificial Sequence
  Description of Artificial Sequence: Synthetic oligonucleotide
cucggauucgaaacacccc

SEQ ID NO: 1812295 - RNA, 19 nt, Artificial Sequence
  Description of Artificial Sequence: Synthetic oligonucleotide
uguccacaccuguaaagac

SEQ ID NO: 1812296 - RNA, 19 nt, Artificial Sequence
  Description of Artificial Sequence: Synthetic oligonucleotide
uugaaacacuugacugugc

SEQ ID NO: 1812297 - RNA, 19 nt, Artificial Sequence
  Description of Artificial Sequence: Synthetic oligonucleotide
ugauuuugagccugcggau

SEQ ID NO: 1812298 - RNA, 19 nt, Artificial Sequence
  Description of Artificial Sequence: Synthetic oligonucleotide
ucgccagguguccagguca

SEQ ID NO: 1812299 - RNA, 19 nt, Artificial Sequence
  Description of Artificial Sequence: Synthetic oligonucleotide
ggugauuuugagccugcgg

SEQ ID NO: 1812300 - RNA, 19 nt, Artificial Sequence
  Description of Artificial Sequence: Synthetic oligonucleotide
augauucgaaguucaggga

SEQ ID NO: 1812301 - RNA, 19 nt, Artificial Sequence
  Description of Artificial Sequence: Synthetic oligonucleotide
uccaugggguuuacgguga

SEQ ID NO: 1812302 - RNA, 19 nt, Artificial Sequence
  Description of Artificial Sequence: Synthetic oligonucleotide
guaaagaccacgcccaggu

SEQ ID NO: 1812303 - RNA, 19 nt, Artificial Sequence
  Description of Artificial Sequence: Synthetic oligonucleotide
uuacgguaucgcaggaggu

SEQ ID NO: 1812304 - RNA, 19 nt, Artificial Sequence
  Description of Artificial Sequence: Synthetic oligonucleotide
uggggaacugccucgaguu

SEQ ID NO: 1812305 - RNA, 19 nt, Artificial Sequence
  Description of Artificial Sequence: Synthetic oligonucleotide
aagaccacgcccaggucag

SEQ ID NO: 1812306 - RNA, 19 nt, Artificial Sequence
  Description of Artificial Sequence: Synthetic oligonucleotide
agauugugaccagacaggu

SEQ ID NO: 1812307 - RNA, 19 nt, Artificial Sequence
  Description of Artificial Sequence: Synthetic oligonucleotide
uacgguaucgcaggaggug

SEQ ID NO: 1812308 - RNA, 19 nt, Artificial Sequence
  Description of Artificial Sequence: Synthetic oligonucleotide
ggccauauccaccuccagg

SEQ ID NO: 1812309 - RNA, 19 nt, Artificial Sequence
  Description of Artificial Sequence: Synthetic oligonucleotide
ucaacaaaggagcgauguu

SEQ ID NO: 1812310 - RNA, 19 nt, Artificial Sequence
  Description of Artificial Sequence: Synthetic oligonucleotide
cacaggguuggcugugugg

SEQ ID NO: 1812311 - RNA, 19 nt, Artificial Sequence
  Description of Artificial Sequence: Synthetic oligonucleotide
gggacucuugaacuguggg

SEQ ID NO: 1812312 - RNA, 19 nt, Artificial Sequence
  Description of Artificial Sequence: Synthetic oligonucleotide
cauugcugagguagcgacc

SEQ ID NO: 1812313 - RNA, 19 nt, Artificial Sequence
  Description of Artificial Sequence: Synthetic oligonucleotide
acaacggcaaaagggugag

SEQ ID NO: 1812314 - RNA, 19 nt, Artificial Sequence
  Description of Artificial Sequence: Synthetic oligonucleotide
gguguccacaccuguaaag

SEQ ID NO: 1812315 - RNA, 19 nt, Artificial Sequence
  Description of Artificial Sequence: Synthetic oligonucleotide
cauugaaacacuugacugu

SEQ ID NO: 1812316 - RNA, 19 nt, Artificial Sequence
  Description of Artificial Sequence: Synthetic oligonucleotide
ucggcacuaguaaucuccu

SEQ ID NO: 1812317 - RNA, 19 nt, Artificial Sequence
  Description of Artificial Sequence: Synthetic oligonucleotide
acuggagcuugcauggauc

SEQ ID NO: 1812318 - RNA, 19 nt, Artificial Sequence
  Description of Artificial Sequence: Synthetic oligonucleotide
cugccucgaguucagguag

SEQ ID NO: 1812319 - RNA, 19 nt, Artificial Sequence
  Description of Artificial Sequence: Synthetic oligonucleotide
agucggucccaauccaucu

SEQ ID NO: 1812320 - RNA, 19 nt, Artificial Sequence
  Description of Artificial Sequence: Synthetic oligonucleotide
acaggucaacaaaggagcg

SEQ ID NO: 1812321 - RNA, 19 nt, Artificial Sequence
  Description of Artificial Sequence: Synthetic oligonucleotide
uucauugcugagguagcga

SEQ ID NO: 1812322 - RNA, 19 nt, Artificial Sequence
  Description of Artificial Sequence: Synthetic oligonucleotide
caccuugaauucauugcug

SEQ ID NO: 1812323 - RNA, 19 nt, Artificial Sequence
  Description of Artificial Sequence: Synthetic oligonucleotide
gacaacggcaaaaggguga

SEQ ID NO: 1812324 - RNA, 19 nt, Artificial Sequence
  Description of Artificial Sequence: Synthetic oligonucleotide
uuagcguguuccacagggu

SEQ ID NO: 1812325 - RNA, 19 nt, Artificial Sequence
  Description of Artificial Sequence: Synthetic oligonucleotide
agguaggaaacaugcugca

SEQ ID NO: 1812326 - RNA, 19 nt, Artificial Sequence
  Description of Artificial Sequence: Synthetic oligonucleotide
uccaggucauguacaauuu

SEQ ID NO: 1812327 - RNA, 19 nt, Artificial Sequence
  Description of Artificial Sequence: Synthetic oligonucleotide
caucacguagccuucaacu

SEQ ID NO: 1812328 - RNA, 19 nt, Artificial Sequence
  Description of Artificial Sequence: Synthetic oligonucleotide
uguggaucacauucaccuc

SEQ ID NO: 1812329 - RNA, 19 nt, Artificial Sequence
  Description of Artificial Sequence: Synthetic oligonucleotide
cagccaugugguuagcgug

SEQ ID NO: 1812330 - RNA, 19 nt, Artificial Sequence
  Description of Artificial Sequence: Synthetic oligonucleotide
  modified_base (2)..(2): a, c, u, g, unknown or other
unuggggaacugccucgag

SEQ ID NO: 1812331 - RNA, 19 nt, Artificial Sequence
  Description of Artificial Sequence: Synthetic oligonucleotide
gaaacaugcugcauggccu

SEQ ID NO: 1812332 - RNA, 19 nt, Artificial Sequence
  Description of Artificial Sequence: Synthetic oligonucleotide
gggaaaacacccucugggc

SEQ ID NO: 1812333 - RNA, 19 nt, Artificial Sequence
  Description of Artificial Sequence: Synthetic oligonucleotide
ucacaacaguugcugugcu

SEQ ID NO: 1812334 - RNA, 19 nt, Artificial Sequence
  Description of Artificial Sequence: Synthetic oligonucleotide
gguacugaugauucgaagu

SEQ ID NO: 1812335 - RNA, 19 nt, Artificial Sequence
  Description of Artificial Sequence: Synthetic oligonucleotide
uacugaugauucgaaguuc

SEQ ID NO: 1812336 - RNA, 19 nt, Artificial Sequence
  Description of Artificial Sequence: Synthetic oligonucleotide
ugccucgaguucagguagg

SEQ ID NO: 1812337 - RNA, 19 nt, Artificial Sequence
  Description of Artificial Sequence: Synthetic oligonucleotide
uagcguguuccacaggguu

SEQ ID NO: 1812338 - RNA, 19 nt, Artificial Sequence
  Description of Artificial Sequence: Synthetic oligonucleotide
gccaauuacgguaucgcag

SEQ ID NO: 1812339 - RNA, 19 nt, Artificial Sequence
  Description of Artificial Sequence: Synthetic oligonucleotide
aaaccuccucauagcuggc

SEQ ID NO: 1812340 - RNA, 19 nt, Artificial Sequence
  Description of Artificial Sequence: Synthetic oligonucleotide
aucgagcucuccgacauca

SEQ ID NO: 1812341 - RNA, 19 nt, Artificial Sequence
  Description of Artificial Sequence: Synthetic oligonucleotide
aggugcaaaaccuccucau

SEQ ID NO: 1812342 - RNA, 19 nt, Artificial Sequence
  Description of Artificial Sequence: Synthetic oligonucleotide
acgcccaggucagaguggc

SEQ ID NO: 1812343 - RNA, 19 nt, Artificial Sequence
  Description of Artificial Sequence: Synthetic oligonucleotide
cucuugaacuguggggucc

SEQ ID NO: 1812344 - RNA, 19 nt, Artificial Sequence
  Description of Artificial Sequence: Synthetic oligonucleotide
gguagcgaccauuuaguuc

SEQ ID NO: 1812345 - RNA, 19 nt, Artificial Sequence
  Description of Artificial Sequence: Synthetic oligonucleotide
gaucugcacaccucugcca

SEQ ID NO: 1812346 - RNA, 19 nt, Artificial Sequence
  Description of Artificial Sequence: Synthetic oligonucleotide
  modified_base (14)..(14): a, c, u, g, unknown or other
gcggaugccgggunugggg

SEQ ID NO: 1812347 - RNA, 19 nt, Artificial Sequence
  Description of Artificial Sequence: Synthetic oligonucleotide
ccugacuggagcuugcaug

SEQ ID NO: 1812348 - RNA, 19 nt, Artificial Sequence
  Description of Artificial Sequence: Synthetic oligonucleotide
ccucauaugucuccauggg

SEQ ID NO: 1812349 - RNA, 19 nt, Artificial Sequence
  Description of Artificial Sequence: Synthetic oligonucleotide
agcucggauucgaaacacc

SEQ ID NO: 1812350 - RNA, 19 nt, Artificial Sequence
  Description of Artificial Sequence: Synthetic oligonucleotide
gugccaauuacgguaucgc

SEQ ID NO: 1812351 - RNA, 19 nt, Artificial Sequence
  Description of Artificial Sequence: Synthetic oligonucleotide
caaaagggugaggacuggc

SEQ ID NO: 1812352 - RNA, 19 nt, Artificial Sequence
  Description of Artificial Sequence: Synthetic oligonucleotide
ggaucugcacaccucugcc

SEQ ID NO: 1812353 - RNA, 19 nt, Artificial Sequence
  Description of Artificial Sequence: Synthetic oligonucleotide
accuggugugccaauuacg

SEQ ID NO: 1812354 - RNA, 19 nt, Artificial Sequence
  Description of Artificial Sequence: Synthetic oligonucleotide
uggacgaacuguggcuggg

SEQ ID NO: 1812355 - RNA, 19 nt, Artificial Sequence
  Description of Artificial Sequence: Synthetic oligonucleotide
cuggggacaacggcaaaag

SEQ ID NO: 1812356 - RNA, 19 nt, Artificial Sequence
  Description of Artificial Sequence: Synthetic oligonucleotide
agaccaggaagcugacaca

SEQ ID NO: 1812357 - RNA, 19 nt, Artificial Sequence
  Description of Artificial Sequence: Synthetic oligonucleotide
cuuaucgagcucuccgaca

SEQ ID NO: 1812358 - RNA, 19 nt, Artificial Sequence
  Description of Artificial Sequence: Synthetic oligonucleotide
caauccaucucauucuccu

SEQ ID NO: 1812359 - RNA, 19 nt, Artificial Sequence
  Description of Artificial Sequence: Synthetic oligonucleotide
guggacgaacuguggcugg

SEQ ID NO: 1812360 - RNA, 19 nt, Artificial Sequence
  Description of Artificial Sequence: Synthetic oligonucleotide
uggugauuuugagccugcg

SEQ ID NO: 1812361 - RNA, 19 nt, Artificial Sequence
  Description of Artificial Sequence: Synthetic oligonucleotide
caccucaaugcaagcggcc

SEQ ID NO: 1812362 - RNA, 19 nt, Artificial Sequence
  Description of Artificial Sequence: Synthetic oligonucleotide
auucgaaguucagggaaga

SEQ ID NO: 1812363 - RNA, 19 nt, Artificial Sequence
  Description of Artificial Sequence: Synthetic oligonucleotide
gacgaacuguggcugggca

SEQ ID NO: 1812364 - RNA, 19 nt, Artificial Sequence
  Description of Artificial Sequence: Synthetic oligonucleotide
caccuguaaagaccacgcc

SEQ ID NO: 1812365 - RNA, 19 nt, Artificial Sequence
  Description of Artificial Sequence: Synthetic oligonucleotide
cuaguaaucuccuccuccu

SEQ ID NO: 1812366 - RNA, 19 nt, Artificial Sequence
  Description of Artificial Sequence: Synthetic oligonucleotide
uucugaccauccccagggc

SEQ ID NO: 1812367 - RNA, 19 nt, Artificial Sequence
  Description of Artificial Sequence: Synthetic oligonucleotide
agcuugcauggaucugcac

SEQ ID NO: 1812368 - RNA, 19 nt, Artificial Sequence
  Description of Artificial Sequence: Synthetic oligonucleotide
acaccacaaucacaacagu

SEQ ID NO: 1812369 - RNA, 19 nt, Artificial Sequence
  Description of Artificial Sequence: Synthetic oligonucleotide
acucggcacuaguaaucuc

SEQ ID NO: 1812370 - RNA, 19 nt, Artificial Sequence
  Description of Artificial Sequence: Synthetic oligonucleotide
cuguaaagaccacgcccag

SEQ ID NO: 1812371 - RNA, 19 nt, Artificial Sequence
  Description of Artificial Sequence: Synthetic oligonucleotide
uaaagaccacgcccagguc

SEQ ID NO: 1812372 - RNA, 19 nt, Artificial Sequence
  Description of Artificial Sequence: Synthetic oligonucleotide
agcagcccgggcaaagugg

SEQ ID NO: 1812373 - RNA, 19 nt, Artificial Sequence
  Description of Artificial Sequence: Synthetic oligonucleotide
ccuguaaagaccacgccca

SEQ ID NO: 1812374 - RNA, 19 nt, Artificial Sequence
  Description of Artificial Sequence: Synthetic oligonucleotide
cacaacaguugcugugcug

SEQ ID NO: 1812375 - RNA, 19 nt, Artificial Sequence
  Description of Artificial Sequence: Synthetic oligonucleotide
ugcaagcggccucauugaa

SEQ ID NO: 1812376 - RNA, 19 nt, Artificial Sequence
  Description of Artificial Sequence: Synthetic oligonucleotide
  modified_base (7)..(7): a, c, u, g, unknown or other
ccgggunuggggaacugcc

SEQ ID NO: 1812377 - RNA, 19 nt, Artificial Sequence
  Description of Artificial Sequence: Synthetic oligonucleotide
ugguguccacaccuguaaa

SEQ ID NO: 1812378 - RNA, 19 nt, Artificial Sequence
  Description of Artificial Sequence: Synthetic oligonucleotide
gucaacaaaggagcgaugu

SEQ ID NO: 1812379 - RNA, 19 nt, Artificial Sequence
  Description of Artificial Sequence: Synthetic oligonucleotide
aggcgggccauauccaccu

SEQ ID NO: 1812380 - RNA, 19 nt, Artificial Sequence
  Description of Artificial Sequence: Synthetic oligonucleotide
ggcaaaagggugaggacug

SEQ ID NO: 1812381 - RNA, 19 nt, Artificial Sequence
  Description of Artificial Sequence: Synthetic oligonucleotide
guacugaugauucgaaguu

SEQ ID NO: 1812382 - RNA, 19 nt, Artificial Sequence
  Description of Artificial Sequence: Synthetic oligonucleotide
caauuucuucugacaccag

SEQ ID NO: 1812383 - RNA, 19 nt, Artificial Sequence
  Description of Artificial Sequence: Synthetic oligonucleotide
augugguuagcguguucca

SEQ ID NO: 1812384 - RNA, 19 nt, Artificial Sequence
  Description of Artificial Sequence: Synthetic oligonucleotide
ugguucgcuggugugcagc

SEQ ID NO: 1812385 - RNA, 19 nt, Artificial Sequence
  Description of Artificial Sequence: Synthetic oligonucleotide
gacuggccagauugugacc

SEQ ID NO: 1812386 - RNA, 19 nt, Artificial Sequence
  Description of Artificial Sequence: Synthetic oligonucleotide
aaggagcgauguucagggu

SEQ ID NO: 1812387 - RNA, 19 nt, Artificial Sequence
  Description of Artificial Sequence: Synthetic oligonucleotide
gggaccugcagguccagcc

SEQ ID NO: 1812388 - RNA, 19 nt, Artificial Sequence
  Description of Artificial Sequence: Synthetic oligonucleotide
uggcucgcuucaaugcccu

SEQ ID NO: 1812389 - RNA, 19 nt, Artificial Sequence
  Description of Artificial Sequence: Synthetic oligonucleotide
ggguuuacggugaugguca

SEQ ID NO: 1812390 - RNA, 19 nt, Artificial Sequence
  Description of Artificial Sequence: Synthetic oligonucleotide
accucaaugcaagcggccu

SEQ ID NO: 1812391 - RNA, 19 nt, Artificial Sequence
  Description of Artificial Sequence: Synthetic oligonucleotide
uugaacugugggguccucu

SEQ ID NO: 1812392 - RNA, 19 nt, Artificial Sequence
  Description of Artificial Sequence: Synthetic oligonucleotide
gagguagcgaccauuuagu

SEQ ID NO: 1812393 - RNA, 19 nt, Artificial Sequence
  Description of Artificial Sequence: Synthetic oligonucleotide
gggcucucaaacucagaag

SEQ ID NO: 1812394 - RNA, 19 nt, Artificial Sequence
  Description of Artificial Sequence: Synthetic oligonucleotide
ucgcuggugugcagcucgg

SEQ ID NO: 1812395 - RNA, 19 nt, Artificial Sequence
  Description of Artificial Sequence: Synthetic oligonucleotide
uugugaccagacaggucaa

SEQ ID NO: 1812396 - RNA, 19 nt, Artificial Sequence
  Description of Artificial Sequence: Synthetic oligonucleotide
ucccgcaugguucgcuggu

SEQ ID NO: 1812397 - RNA, 19 nt, Artificial Sequence
  Description of Artificial Sequence: Synthetic oligonucleotide
gauugugaccagacagguc

SEQ ID NO: 1812398 - RNA, 19 nt, Artificial Sequence
  Description of Artificial Sequence: Synthetic oligonucleotide
  modified_base (15)..(15): a, c, u, g, unknown or other
ugcggaugccgggunuggg

SEQ ID NO: 1812399 - RNA, 19 nt, Artificial Sequence
  Description of Artificial Sequence: Synthetic oligonucleotide
agcguguuccacaggguug

SEQ ID NO: 1812400 - RNA, 19 nt, Artificial Sequence
  Description of Artificial Sequence: Synthetic oligonucleotide
ugcuggugauuuugagccu

SEQ ID NO: 1812401 - RNA, 19 nt, Artificial Sequence
  Description of Artificial Sequence: Synthetic oligonucleotide
gaccacgcccaggucagag

SEQ ID NO: 1812402 - RNA, 19 nt, Artificial Sequence
  Description of Artificial Sequence: Synthetic oligonucleotide
uccuccuccuccuccuccu

SEQ ID NO: 1812403 - RNA, 19 nt, Artificial Sequence
  Description of Artificial Sequence: Synthetic oligonucleotide
ggcuccacuucucugguga

SEQ ID NO: 1812404 - RNA, 19 nt, Artificial Sequence
  Description of Artificial Sequence: Synthetic oligonucleotide
uccuccuccuccuccucac

SEQ ID NO: 1812405 - RNA, 19 nt, Artificial Sequence
  Description of Artificial Sequence: Synthetic oligonucleotide
aaccaucacguagccuuca

SEQ ID NO: 1812406 - RNA, 19 nt, Artificial Sequence
  Description of Artificial Sequence: Synthetic oligonucleotide
ugggguuuacggugauggu

SEQ ID NO: 1812407 - RNA, 19 nt, Artificial Sequence
  Description of Artificial Sequence: Synthetic oligonucleotide
cacgcccaggucagagugg

SEQ ID NO: 1812408 - RNA, 19 nt, Artificial Sequence
  Description of Artificial Sequence: Synthetic oligonucleotide
gguggacgaacuguggcug

SEQ ID NO: 1812409 - RNA, 19 nt, Artificial Sequence
  Description of Artificial Sequence: Synthetic oligonucleotide
cacuaguaaucuccuccuc

SEQ ID NO: 1812410 - RNA, 19 nt, Artificial Sequence
  Description of Artificial Sequence: Synthetic oligonucleotide
agcgauguucaggguggac

SEQ ID NO: 1812411 - RNA, 19 nt, Artificial Sequence
  Description of Artificial Sequence: Synthetic oligonucleotide
  modified_base (11)..(11): a, c, u, g, unknown or other
gaugccgggunuggggaac

SEQ ID NO: 1812412 - RNA, 19 nt, Artificial Sequence
  Description of Artificial Sequence: Synthetic oligonucleotide
aguucagggaagagggaaa

SEQ ID NO: 1812413 - RNA, 19 nt, Artificial Sequence
  Description of Artificial Sequence: Synthetic oligonucleotide
gcguguuccacaggguugg

SEQ ID NO: 1812414 - RNA, 19 nt, Artificial Sequence
  Description of Artificial Sequence: Synthetic oligonucleotide
agguagcgaccauuuaguu

SEQ ID NO: 1812415 - RNA, 19 nt, Artificial Sequence
  Description of Artificial Sequence: Synthetic oligonucleotide
uccggucaagcagggaccu

SEQ ID NO: 1812416 - RNA, 19 nt, Artificial Sequence
  Description of Artificial Sequence: Synthetic oligonucleotide
uggucaaggcagagucggu

SEQ ID NO: 1812417 - RNA, 19 nt, Artificial Sequence
  Description of Artificial Sequence: Synthetic oligonucleotide
gagucggucccaauccauc

SEQ ID NO: 1812418 - RNA, 19 nt, Artificial Sequence
  Description of Artificial Sequence: Synthetic oligonucleotide
  modified_base (5)..(5): a, c, u, g, unknown or other
gggunuggggaacugccuc

SEQ ID NO: 1812419 - RNA, 19 nt, Artificial Sequence
  Description of Artificial Sequence: Synthetic oligonucleotide
guggcucgcuucaaugccc

SEQ ID NO: 1812420 - RNA, 19 nt, Artificial Sequence
  Description of Artificial Sequence: Synthetic oligonucleotide
agccaugugguuagcgugu

SEQ ID NO: 1812421 - RNA, 19 nt, Artificial Sequence
  Description of Artificial Sequence: Synthetic oligonucleotide
aggacuggccagauuguga

SEQ ID NO: 1812422 - RNA, 19 nt, Artificial Sequence
  Description of Artificial Sequence: Synthetic oligonucleotide
ccuggucccgcaugguucg

SEQ ID NO: 1812423 - RNA, 19 nt, Artificial Sequence
  Description of Artificial Sequence: Synthetic oligonucleotide
uggagcuugcauggaucug

SEQ ID NO: 1812424 - RNA, 19 nt, Artificial Sequence
  Description of Artificial Sequence: Synthetic oligonucleotide
cuccuccuccuccuccucc

SEQ ID NO: 1812425 - RNA, 19 nt, Artificial Sequence
  Description of Artificial Sequence: Synthetic oligonucleotide
ccaauccaucucauucucc

SEQ ID NO: 1812426 - RNA, 19 nt, Artificial Sequence
  Description of Artificial Sequence: Synthetic oligonucleotide
ggcggcaccucaaugcaag

SEQ ID NO: 1812427 - RNA, 19 nt, Artificial Sequence
  Description of Artificial Sequence: Synthetic oligonucleotide
gaaccaucacguagccuuc

SEQ ID NO: 1812428 - RNA, 19 nt, Artificial Sequence
  Description of Artificial Sequence: Synthetic oligonucleotide
ucacugcugugcugguccu

SEQ ID NO: 1812429 - RNA, 19 nt, Artificial Sequence
  Description of Artificial Sequence: Synthetic oligonucleotide
uaucgagcucuccgacauc

SEQ ID NO: 1812430 - RNA, 19 nt, Artificial Sequence
  Description of Artificial Sequence: Synthetic oligonucleotide
caugguucgcuggugugca

SEQ ID NO: 1812431 - RNA, 19 nt, Artificial Sequence
  Description of Artificial Sequence: Synthetic oligonucleotide
gggguuuacggugaugguc

SEQ ID NO: 1812432 - RNA, 19 nt, Artificial Sequence
  Description of Artificial Sequence: Synthetic oligonucleotide
cagcucggauucgaaacac

SEQ ID NO: 1812433 - RNA, 19 nt, Artificial Sequence
  Description of Artificial Sequence: Synthetic oligonucleotide
caugcugcauggccuuauc

SEQ ID NO: 1812434 - RNA, 19 nt, Artificial Sequence
  Description of Artificial Sequence: Synthetic oligonucleotide
cgaccauuuaguucugaac

SEQ ID NO: 1812435 - RNA, 19 nt, Artificial Sequence
  Description of Artificial Sequence: Synthetic oligonucleotide
caguugcugugcuggggac

SEQ ID NO: 1812436 - RNA, 19 nt, Artificial Sequence
  Description of Artificial Sequence: Synthetic oligonucleotide
gacucggcacuaguaaucu

SEQ ID NO: 1812437 - RNA, 19 nt, Artificial Sequence
  Description of Artificial Sequence: Synthetic oligonucleotide
cacaaucacaacaguugcu

SEQ ID NO: 1812438 - RNA, 19 nt, Artificial Sequence
  Description of Artificial Sequence: Synthetic oligonucleotide
accaucacguagccuucaa

SEQ ID NO: 1812439 - RNA, 19 nt, Artificial Sequence
  Description of Artificial Sequence: Synthetic oligonucleotide
caauuacgguaucgcagga

SEQ ID NO: 1812440 - RNA, 19 nt, Artificial Sequence
  Description of Artificial Sequence: Synthetic oligonucleotide
gugguggaccccacucagg

SEQ ID NO: 1812441 - RNA, 19 nt, Artificial Sequence
  Description of Artificial Sequence: Synthetic oligonucleotide
gguuagcguguuccacagg

SEQ ID NO: 1812442 - RNA, 19 nt, Artificial Sequence
  Description of Artificial Sequence: Synthetic oligonucleotide
cuggcggcaccucaaugca

SEQ ID NO: 1812443 - RNA, 19 nt, Artificial Sequence
  Description of Artificial Sequence: Synthetic oligonucleotide
uagcgaccauuuaguucug

SEQ ID NO: 1812444 - RNA, 19 nt, Artificial Sequence
  Description of Artificial Sequence: Synthetic oligonucleotide
gucggucccaauccaucuc

SEQ ID NO: 1812445 - RNA, 19 nt, Artificial Sequence
  Description of Artificial Sequence: Synthetic oligonucleotide
cucucugacucggcacuag

SEQ ID NO: 1812446 - RNA, 19 nt, Artificial Sequence
  Description of Artificial Sequence: Synthetic oligonucleotide
auggccuuaucgagcucuc

SEQ ID NO: 1812447 - RNA, 19 nt, Artificial Sequence
  Description of Artificial Sequence: Synthetic oligonucleotide
accgccugacuggagcuug

SEQ ID NO: 1812448 - RNA, 19 nt, Artificial Sequence
  Description of Artificial Sequence: Synthetic oligonucleotide
cccaggucagaguggcucg

SEQ ID NO: 1812449 - RNA, 19 nt, Artificial Sequence
  Description of Artificial Sequence: Synthetic oligonucleotide
augguucgcuggugugcag

SEQ ID NO: 1812450 - RNA, 19 nt, Artificial Sequence
  Description of Artificial Sequence: Synthetic oligonucleotide
gggacaacggcaaaagggu

SEQ ID NO: 1812451 - RNA, 19 nt, Artificial Sequence
  Description of Artificial Sequence: Synthetic oligonucleotide
ccuuaucgagcucuccgac

SEQ ID NO: 1812452 - RNA, 19 nt, Artificial Sequence
  Description of Artificial Sequence: Synthetic oligonucleotide
gcagcucggauucgaaaca

SEQ ID NO: 1812453 - RNA, 19 nt, Artificial Sequence
  Description of Artificial Sequence: Synthetic oligonucleotide
gugaccucgccaggugucc

SEQ ID NO: 1812454 - RNA, 19 nt, Artificial Sequence
  Description of Artificial Sequence: Synthetic oligonucleotide
ggacaacggcaaaagggug

SEQ ID NO: 1812455 - RNA, 19 nt, Artificial Sequence
  Description of Artificial Sequence: Synthetic oligonucleotide
uggccuuaucgagcucucc

SEQ ID NO: 1812456 - RNA, 19 nt, Artificial Sequence
  Description of Artificial Sequence: Synthetic oligonucleotide
  modified_base (3)..(3): a, c, u, g, unknown or other
gunuggggaacugccucga

SEQ ID NO: 1812457 - RNA, 19 nt, Artificial Sequence
  Description of Artificial Sequence: Synthetic oligonucleotide
cuccacuucucuggugaug

SEQ ID NO: 1812458 - RNA, 19 nt, Artificial Sequence
  Description of Artificial Sequence: Synthetic oligonucleotide
aacacccucugggcucuca

SEQ ID NO: 1812459 - RNA, 19 nt, Artificial Sequence
  Description of Artificial Sequence: Synthetic oligonucleotide
ggaggcgggccauauccac

SEQ ID NO: 1812460 - RNA, 19 nt, Artificial Sequence
  Description of Artificial Sequence: Synthetic oligonucleotide
gcaugguucgcuggugugc

SEQ ID NO: 1812461 - RNA, 19 nt, Artificial Sequence
  Description of Artificial Sequence: Synthetic oligonucleotide
cucgccagguguccagguc

SEQ ID NO: 1812462 - RNA, 19 nt, Artificial Sequence
  Description of Artificial Sequence: Synthetic oligonucleotide
ggaacugccucgaguucag

SEQ ID NO: 1812463 - RNA, 19 nt, Artificial Sequence
  Description of Artificial Sequence: Synthetic oligonucleotide
uggcggcaccucaaugcaa

SEQ ID NO: 1812464 - RNA, 19 nt, Artificial Sequence
  Description of Artificial Sequence: Synthetic oligonucleotide
ugacuggagcuugcaugga

SEQ ID NO: 1812465 - RNA, 19 nt, Artificial Sequence
  Description of Artificial Sequence: Synthetic oligonucleotide
cauggccuuaucgagcucu

SEQ ID NO: 1812466 - RNA, 19 nt, Artificial Sequence
  Description of Artificial Sequence: Synthetic oligonucleotide
guuggcuguguggaucaca

SEQ ID NO: 1812467 - RNA, 19 nt, Artificial Sequence
  Description of Artificial Sequence: Synthetic oligonucleotide
gagcuugcauggaucugca

SEQ ID NO: 1812468 - RNA, 19 nt, Artificial Sequence
  Description of Artificial Sequence: Synthetic oligonucleotide
ggcagccaugugguuagcg

SEQ ID NO: 1812469 - RNA, 19 nt, Artificial Sequence
  Description of Artificial Sequence: Synthetic oligonucleotide
ggcaaagugguggacccca

SEQ ID NO: 1812470 - RNA, 19 nt, Artificial Sequence
  Description of Artificial Sequence: Synthetic oligonucleotide
ggucaaggcagagucgguc

SEQ ID NO: 1812471 - RNA, 19 nt, Artificial Sequence
  Description of Artificial Sequence: Synthetic oligonucleotide
ggugcaaaaccuccucaua

SEQ ID NO: 1812472 - RNA, 19 nt, Artificial Sequence
  Description of Artificial Sequence: Synthetic oligonucleotide
caucaucucccuccaaggu

SEQ ID NO: 1812473 - RNA, 19 nt, Artificial Sequence
  Description of Artificial Sequence: Synthetic oligonucleotide
gccuuaucgagcucuccga

SEQ ID NO: 1812474 - RNA, 19 nt, Artificial Sequence
  Description of Artificial Sequence: Synthetic oligonucleotide
ggcugcagaaccaucacgu

SEQ ID NO: 1812475 - RNA, 19 nt, Artificial Sequence
  Description of Artificial Sequence: Synthetic oligonucleotide
caugggguuuacggugaug

SEQ ID NO: 1812476 - RNA, 19 nt, Artificial Sequence
  Description of Artificial Sequence: Synthetic oligonucleotide
aggucagaguggcucgcuu

SEQ ID NO: 1812477 - RNA, 19 nt, Artificial Sequence
  Description of Artificial Sequence: Synthetic oligonucleotide
ucuccuccuccuccuccuc

SEQ ID NO: 1812478 - RNA, 19 nt, Artificial Sequence
  Description of Artificial Sequence: Synthetic oligonucleotide
ucagaguggcucgcuucaa

SEQ ID NO: 1812479 - RNA, 19 nt, Artificial Sequence
  Description of Artificial Sequence: Synthetic oligonucleotide
cguagccuucaacuggcgg

SEQ ID NO: 1812480 - RNA, 19 nt, Artificial Sequence
  Description of Artificial Sequence: Synthetic oligonucleotide
ugaccucgccaggugucca

SEQ ID NO: 1812481 - RNA, 19 nt, Artificial Sequence
  Description of Artificial Sequence: Synthetic oligonucleotide
cucgcuucaaugcccuucu

SEQ ID NO: 1812482 - RNA, 19 nt, Artificial Sequence
  Description of Artificial Sequence: Synthetic oligonucleotide
agagucggucccaauccau

SEQ ID NO: 1812483 - RNA, 19 nt, Artificial Sequence
  Description of Artificial Sequence: Synthetic oligonucleotide
ccuccaaggucaacaccgc

SEQ ID NO: 1812484 - RNA, 19 nt, Artificial Sequence
  Description of Artificial Sequence: Synthetic oligonucleotide
ucgagcucuccgacaucau

SEQ ID NO: 1812485 - RNA, 19 nt, Artificial Sequence
  Description of Artificial Sequence: Synthetic oligonucleotide
ccacgcccaggucagagug

SEQ ID NO: 1812486 - RNA, 19 nt, Artificial Sequence
  Description of Artificial Sequence: Synthetic oligonucleotide
cccaauccaucucauucuc

SEQ ID NO: 1812487 - RNA, 19 nt, Artificial Sequence
  Description of Artificial Sequence: Synthetic oligonucleotide
  modified_base (10)..(10): a, c, u, g, unknown or other
augccgggunuggggaacu

SEQ ID NO: 1812488 - RNA, 19 nt, Artificial Sequence
  Description of Artificial Sequence: Synthetic oligonucleotide
aacaugcugcauggccuua

SEQ ID NO: 1812489 - RNA, 19 nt, Artificial Sequence
  Description of Artificial Sequence: Synthetic oligonucleotide
gcgggccauauccaccucc

SEQ ID NO: 1812490 - RNA, 19 nt, Artificial Sequence
  Description of Artificial Sequence: Synthetic oligonucleotide
gcucuccgacaucaucucc

SEQ ID NO: 1812491 - RNA, 19 nt, Artificial Sequence
  Description of Artificial Sequence: Synthetic oligonucleotide
caacggcaaaagggugagg

SEQ ID NO: 1812492 - RNA, 19 nt, Artificial Sequence
  Description of Artificial Sequence: Synthetic oligonucleotide
ggucccgcaugguucgcug

SEQ ID NO: 1812493 - RNA, 19 nt, Artificial Sequence
  Description of Artificial Sequence: Synthetic oligonucleotide
acguagccuucaacuggcg

SEQ ID NO: 1812494 - RNA, 19 nt, Artificial Sequence
  Description of Artificial Sequence: Synthetic oligonucleotide
ggccagauugugaccagac

SEQ ID NO: 1812495 - RNA, 19 nt, Artificial Sequence
  Description of Artificial Sequence: Synthetic oligonucleotide
cugacucggcacuaguaau

SEQ ID NO: 1812496 - RNA, 19 nt, Artificial Sequence
  Description of Artificial Sequence: Synthetic oligonucleotide
gcgaccauuuaguucugaa

SEQ ID NO: 1812497 - RNA, 19 nt, Artificial Sequence
  Description of Artificial Sequence: Synthetic oligonucleotide
gcuugaacuuccggucaag

SEQ ID NO: 1812498 - RNA, 19 nt, Artificial Sequence
  Description of Artificial Sequence: Synthetic oligonucleotide
cggucaagcagggaccugg

SEQ ID NO: 1812499 - RNA, 19 nt, Artificial Sequence
  Description of Artificial Sequence: Synthetic oligonucleotide
aaacacccucugggcucuc

SEQ ID NO: 1812500 - RNA, 19 nt, Artificial Sequence
  Description of Artificial Sequence: Synthetic oligonucleotide
uggucccgcaugguucgcu

SEQ ID NO: 1812501 - RNA, 19 nt, Artificial Sequence
  Description of Artificial Sequence: Synthetic oligonucleotide
  modified_base (9)..(9): a, c, u, g, unknown or other
ugccgggunuggggaacug

SEQ ID NO: 1812502 - RNA, 19 nt, Artificial Sequence
  Description of Artificial Sequence: Synthetic oligonucleotide
ccaccuugaauucauugcu

SEQ ID NO: 1812503 - RNA, 19 nt, Artificial Sequence
  Description of Artificial Sequence: Synthetic oligonucleotide
agcgaccauuuaguucuga

SEQ ID NO: 1812504 - RNA, 19 nt, Artificial Sequence
  Description of Artificial Sequence: Synthetic oligonucleotide
cacuucucuggugauggua

SEQ ID NO: 1812505 - RNA, 19 nt, Artificial Sequence
  Description of Artificial Sequence: Synthetic oligonucleotide
caaggucaacaccgccuga

SEQ ID NO: 1812506 - RNA, 19 nt, Artificial Sequence
  Description of Artificial Sequence: Synthetic oligonucleotide
gcagccaugugguuagcgu

SEQ ID NO: 1812507 - RNA, 19 nt, Artificial Sequence
  Description of Artificial Sequence: Synthetic oligonucleotide
cuggugugccaauuacggu

SEQ ID NO: 1812508 - RNA, 19 nt, Artificial Sequence
  Description of Artificial Sequence: Synthetic oligonucleotide
cagguguccaggucaugua

SEQ ID NO: 1812509 - RNA, 19 nt, Artificial Sequence
  Description of Artificial Sequence: Synthetic oligonucleotide
ccucaaugcaagcggccuc

SEQ ID NO: 1812510 - RNA, 19 nt, Artificial Sequence
  Description of Artificial Sequence: Synthetic oligonucleotide
cuucaacuggcggcaccuc

SEQ ID NO: 1812511 - RNA, 19 nt, Artificial Sequence
  Description of Artificial Sequence: Synthetic oligonucleotide
ggguggacgaacuguggcu

SEQ ID NO: 1812512 - RNA, 19 nt, Artificial Sequence
  Description of Artificial Sequence: Synthetic oligonucleotide
guaucgcaggaggugcaaa

SEQ ID NO: 1812513 - RNA, 19 nt, Artificial Sequence
  Description of Artificial Sequence: Synthetic oligonucleotide
gcguucugaccauccccag

SEQ ID NO: 1812514 - RNA, 19 nt, Artificial Sequence
  Description of Artificial Sequence: Synthetic oligonucleotide
cuccuccuccuccuccuca

SEQ ID NO: 1812515 - RNA, 19 nt, Artificial Sequence
  Description of Artificial Sequence: Synthetic oligonucleotide
ggacgaacuguggcugggc

SEQ ID NO: 1812516 - RNA, 19 nt, Artificial Sequence
  Description of Artificial Sequence: Synthetic oligonucleotide
cugggcucucaaacucaga

SEQ ID NO: 1812517 - RNA, 19 nt, Artificial Sequence
  Description of Artificial Sequence: Synthetic oligonucleotide
ccauuuaguucugaacaaa

SEQ ID NO: 1812518 - RNA, 19 nt, Artificial Sequence
  Description of Artificial Sequence: Synthetic oligonucleotide
agggaccuggugugccaau

SEQ ID NO: 1812519 - RNA, 19 nt, Artificial Sequence
  Description of Artificial Sequence: Synthetic oligonucleotide
ggugugcagcucggauucg

SEQ ID NO: 1812520 - RNA, 19 nt, Artificial Sequence
  Description of Artificial Sequence: Synthetic oligonucleotide
ggaagagggaaaacacccu

SEQ ID NO: 1812521 - RNA, 19 nt, Artificial Sequence
  Description of Artificial Sequence: Synthetic oligonucleotide
cuugaacugugggguccuc

SEQ ID NO: 1812522 - RNA, 19 nt, Artificial Sequence
  Description of Artificial Sequence: Synthetic oligonucleotide
ggggaacugccucgaguuc

SEQ ID NO: 1812523 - RNA, 19 nt, Artificial Sequence
  Description of Artificial Sequence: Synthetic oligonucleotide
cagcccgggcaaaguggug

SEQ ID NO: 1812524 - RNA, 19 nt, Artificial Sequence
  Description of Artificial Sequence: Synthetic oligonucleotide
cucuccuccuccuccuccu

SEQ ID NO: 1812525 - RNA, 19 nt, Artificial Sequence
  Description of Artificial Sequence: Synthetic oligonucleotide
gagcgauguucagggugga

SEQ ID NO: 1812526 - RNA, 19 nt, Artificial Sequence
  Description of Artificial Sequence: Synthetic oligonucleotide
gcggcaccucaaugcaagc

SEQ ID NO: 1812527 - RNA, 19 nt, Artificial Sequence
  Description of Artificial Sequence: Synthetic oligonucleotide
  modified_base (8)..(8): a, c, u, g, unknown or other
gccgggunuggggaacugc

SEQ ID NO: 1812528 - RNA, 19 nt, Artificial Sequence
  Description of Artificial Sequence: Synthetic oligonucleotide
gguucgcuggugugcagcu

SEQ ID NO: 1812529 - RNA, 19 nt, Artificial Sequence
  Description of Artificial Sequence: Synthetic oligonucleotide
ggugugccaauuacgguau

SEQ ID NO: 1812530 - RNA, 19 nt, Artificial Sequence
  Description of Artificial Sequence: Synthetic oligonucleotide
cggcaccucaaugcaagcg

SEQ ID NO: 1812531 - RNA, 19 nt, Artificial Sequence
  Description of Artificial Sequence: Synthetic oligonucleotide
gcaagcggccucauugaaa

SEQ ID NO: 1812532 - RNA, 19 nt, Artificial Sequence
  Description of Artificial Sequence: Synthetic oligonucleotide
  modified_base (12)..(12): a, c, u, g, unknown or other
ggaugccgggunuggggaa

SEQ ID NO: 1812533 - RNA, 19 nt, Artificial Sequence
  Description of Artificial Sequence: Synthetic oligonucleotide
gaccccacucaggcugauc

SEQ ID NO: 1812534 - RNA, 19 nt, Artificial Sequence
  Description of Artificial Sequence: Synthetic oligonucleotide
cacugcugugcugguccuc

SEQ ID NO: 1812535 - RNA, 19 nt, Artificial Sequence
  Description of Artificial Sequence: Synthetic oligonucleotide
gagccugcggaugccgggu

SEQ ID NO: 1812536 - RNA, 19 nt, Artificial Sequence
  Description of Artificial Sequence: Synthetic oligonucleotide
cgcaugguucgcuggugug

SEQ ID NO: 1812537 - RNA, 19 nt, Artificial Sequence
  Description of Artificial Sequence: Synthetic oligonucleotide
gguaggaaacaugcugcau

SEQ ID NO: 1812538 - RNA, 19 nt, Artificial Sequence
  Description of Artificial Sequence: Synthetic oligonucleotide
cacugugaccucgccaggu

SEQ ID NO: 1812539 - RNA, 19 nt, Artificial Sequence
  Description of Artificial Sequence: Synthetic oligonucleotide
cuggucccgcaugguucgc

SEQ ID NO: 1812540 - RNA, 19 nt, Artificial Sequence
  Description of Artificial Sequence: Synthetic oligonucleotide
gcaaagugguggaccccac

SEQ ID NO: 1812541 - RNA, 19 nt, Artificial Sequence
  Description of Artificial Sequence: Synthetic oligonucleotide
ccacaggguuggcugugug

SEQ ID NO: 1812542 - RNA, 19 nt, Artificial Sequence
  Description of Artificial Sequence: Synthetic oligonucleotide
  modified_base (13)..(13): a, c, u, g, unknown or other
cggaugccgggunugggga

SEQ ID NO: 1812543 - RNA, 19 nt, Artificial Sequence
  Description of Artificial Sequence: Synthetic oligonucleotide
gguggaccccacucaggcu

SEQ ID NO: 1812544 - RNA, 19 nt, Artificial Sequence
  Description of Artificial Sequence: Synthetic oligonucleotide
cagccccuccuugcaggug

SEQ ID NO: 1812545 - RNA, 19 nt, Artificial Sequence
  Description of Artificial Sequence: Synthetic oligonucleotide
ccagguguccaggucaugu

SEQ ID NO: 1812546 - RNA, 19 nt, Artificial Sequence
  Description of Artificial Sequence: Synthetic oligonucleotide
agaccacgcccaggucaga

SEQ ID NO: 1812547 - RNA, 19 nt, Artificial Sequence
  Description of Artificial Sequence: Synthetic oligonucleotide
cuugacugugcuggugauu

SEQ ID NO: 1812548 - RNA, 19 nt, Artificial Sequence
  Description of Artificial Sequence: Synthetic oligonucleotide
gccucgaguucagguagga

SEQ ID NO: 1812549 - RNA, 19 nt, Artificial Sequence
  Description of Artificial Sequence: Synthetic oligonucleotide
caggcugaucuugggcucu

SEQ ID NO: 1812550 - RNA, 19 nt, Artificial Sequence
  Description of Artificial Sequence: Synthetic oligonucleotide
aggcugaucuugggcucuu

SEQ ID NO: 1812551 - RNA, 19 nt, Artificial Sequence
  Description of Artificial Sequence: Synthetic oligonucleotide
gguccucauaugucuccau

SEQ ID NO: 1812552 - RNA, 19 nt, Artificial Sequence
  Description of Artificial Sequence: Synthetic oligonucleotide
ggucccaauccaucucauu

SEQ ID NO: 1812553 - RNA, 19 nt, Artificial Sequence
  Description of Artificial Sequence: Synthetic oligonucleotide
ccuucaacuggcggcaccu

SEQ ID NO: 1812554 - RNA, 19 nt, Artificial Sequence
  Description of Artificial Sequence: Synthetic oligonucleotide
cccucugggcucucaaacu

SEQ ID NO: 1812555 - RNA, 19 nt, Artificial Sequence
  Description of Artificial Sequence: Synthetic oligonucleotide
caaugcaagcggccucauu

SEQ ID NO: 1812556 - RNA, 19 nt, Artificial Sequence
  Description of Artificial Sequence: Synthetic oligonucleotide
cgaguucagguaggaaaca

SEQ ID NO: 1812557 - RNA, 19 nt, Artificial Sequence
  Description of Artificial Sequence: Synthetic oligonucleotide
cccgcaugguucgcuggug

SEQ ID NO: 1812558 - RNA, 19 nt, Artificial Sequence
  Description of Artificial Sequence: Synthetic oligonucleotide
ggguugcguucugaccauc

SEQ ID NO: 1812559 - RNA, 19 nt, Artificial Sequence
  Description of Artificial Sequence: Synthetic oligonucleotide
ggucaagcagggaccuggu

SEQ ID NO: 1812560 - RNA, 19 nt, Artificial Sequence
  Description of Artificial Sequence: Synthetic oligonucleotide
ccauauccaccuccaggcu

SEQ ID NO: 1812561 - RNA, 19 nt, Artificial Sequence
  Description of Artificial Sequence: Synthetic oligonucleotide
cggcacuaguaaucuccuc

SEQ ID NO: 1812562 - RNA, 19 nt, Artificial Sequence
  Description of Artificial Sequence: Synthetic oligonucleotide
gcggccucauugaaacacu

SEQ ID NO: 1812563 - RNA, 19 nt, Artificial Sequence
  Description of Artificial Sequence: Synthetic oligonucleotide
ccuccuccuccuccuccuc

SEQ ID NO: 1812564 - RNA, 19 nt, Artificial Sequence
  Description of Artificial Sequence: Synthetic oligonucleotide
gcuccacuucucuggugau

SEQ ID NO: 1812565 - RNA, 19 nt, Artificial Sequence
  Description of Artificial Sequence: Synthetic oligonucleotide
ccucgaguucagguaggaa

SEQ ID NO: 1812566 - RNA, 19 nt, Artificial Sequence
  Description of Artificial Sequence: Synthetic oligonucleotide
ccgcaugguucgcuggugu

SEQ ID NO: 1812567 - RNA, 19 nt, Artificial Sequence
  Description of Artificial Sequence: Synthetic oligonucleotide
gggaccuggugugccaauu

SEQ ID NO: 1812568 - RNA, 19 nt, Artificial Sequence
  Description of Artificial Sequence: Synthetic oligonucleotide
ccggucaagcagggaccug

SEQ ID NO: 1812569 - RNA, 19 nt, Artificial Sequence
  Description of Artificial Sequence: Synthetic oligonucleotide
  modified_base (6)..(6): a, c, u, g, unknown or other
cgggunuggggaacugccu

SEQ ID NO: 1812570 - RNA, 19 nt, Artificial Sequence
  Description of Artificial Sequence: Synthetic oligonucleotide
  modified_base (18)..(18): a, c, u, g, unknown or other
gccugcggaugccgggunu

SEQ ID NO: 1812571 - RNA, 19 nt, Artificial Sequence
  Description of Artificial Sequence: Synthetic oligonucleotide
ccucgccagguguccaggu

SEQ ID NO: 1812572 - RNA, 19 nt, Artificial Sequence
  Description of Artificial Sequence: Synthetic oligonucleotide
cugcuggaggcgggccaua

SEQ ID NO: 1812573 - RNA, 19 nt, Artificial Sequence
  Description of Artificial Sequence: Synthetic oligonucleotide
gccaugugguuagcguguu

SEQ ID NO: 1812574 - RNA, 19 nt, Artificial Sequence
  Description of Artificial Sequence: Synthetic oligonucleotide
ggcucgcuucaaugcccuu

SEQ ID NO: 1812575 - RNA, 19 nt, Artificial Sequence
  Description of Artificial Sequence: Synthetic oligonucleotide
cgccugacuggagcuugca

SEQ ID NO: 1812576 - RNA, 19 nt, Artificial Sequence
  Description of Artificial Sequence: Synthetic oligonucleotide
cggguugcguucugaccau

SEQ ID NO: 1812577 - RNA, 19 nt, Artificial Sequence
  Description of Artificial Sequence: Synthetic oligonucleotide
ggaccccacucaggcugau

SEQ ID NO: 1812578 - RNA, 19 nt, Artificial Sequence
  Description of Artificial Sequence: Synthetic oligonucleotide
cgcccaggucagaguggcu

SEQ ID NO: 1812579 - RNA, 19 nt, Artificial Sequence
  Description of Artificial Sequence: Synthetic oligonucleotide
aauaccacaagacuguggu

SEQ ID NO: 1812580 - RNA, 19 nt, Artificial Sequence
  Description of Artificial Sequence: Synthetic oligonucleotide
uucacuagggccaagucag

SEQ ID NO: 1812581 - RNA, 19 nt, Artificial Sequence
  Description of Artificial Sequence: Synthetic oligonucleotide
uacagaugguucuaggugg

SEQ ID NO: 1812582 - RNA, 19 nt, Artificial Sequence
  Description of Artificial Sequence: Synthetic oligonucleotide
augacaggccaccagaggc

SEQ ID NO: 1812583 - RNA, 19 nt, Artificial Sequence
  Description of Artificial Sequence: Synthetic oligonucleotide
ugugaucugagacugguga

SEQ ID NO: 1812584 - RNA, 19 nt, Artificial Sequence
  Description of Artificial Sequence: Synthetic oligonucleotide
gugaccaucagccaggcag

SEQ ID NO: 1812585 - RNA, 19 nt, Artificial Sequence
  Description of Artificial Sequence: Synthetic oligonucleotide
gauguuguguacaaagucc

SEQ ID NO: 1812586 - RNA, 19 nt, Artificial Sequence
  Description of Artificial Sequence: Synthetic oligonucleotide
uucuaggugggucuguggg

SEQ ID NO: 1812587 - RNA, 19 nt, Artificial Sequence
  Description of Artificial Sequence: Synthetic oligonucleotide
ugucauaaguaccagucac

SEQ ID NO: 1812588 - RNA, 19 nt, Artificial Sequence
  Description of Artificial Sequence: Synthetic oligonucleotide
gaucucgggaaccugacag

SEQ ID NO: 1812589 - RNA, 19 nt, Artificial Sequence
  Description of Artificial Sequence: Synthetic oligonucleotide
cuugaucucgccaaacugc

SEQ ID NO: 1812590 - RNA, 19 nt, Artificial Sequence
  Description of Artificial Sequence: Synthetic oligonucleotide
uggacugcagcgacgagcg

SEQ ID NO: 1812591 - RNA, 19 nt, Artificial Sequence
  Description of Artificial Sequence: Synthetic oligonucleotide
agacuggugacccacauca

SEQ ID NO: 1812592 - RNA, 19 nt, Artificial Sequence
  Description of Artificial Sequence: Synthetic oligonucleotide
aacacauugugguggcuuc

SEQ ID NO: 1812593 - RNA, 19 nt, Artificial Sequence
  Description of Artificial Sequence: Synthetic oligonucleotide
ucggcgaucaaauaccaca

SEQ ID NO: 1812594 - RNA, 19 nt, Artificial Sequence
  Description of Artificial Sequence: Synthetic oligonucleotide
aacacugcaucaauggaag

SEQ ID NO: 1812595 - RNA, 19 nt, Artificial Sequence
  Description of Artificial Sequence: Synthetic oligonucleotide
uaccacaagacuguggucc

SEQ ID NO: 1812596 - RNA, 19 nt, Artificial Sequence
  Description of Artificial Sequence: Synthetic oligonucleotide
gaucucgccaaacugcugc

SEQ ID NO: 1812597 - RNA, 19 nt, Artificial Sequence
  Description of Artificial Sequence: Synthetic oligonucleotide
auguuguguacaaaguccc

SEQ ID NO: 1812598 - RNA, 19 nt, Artificial Sequence
  Description of Artificial Sequence: Synthetic oligonucleotide
agagccggagcacacacgg

SEQ ID NO: 1812599 - RNA, 19 nt, Artificial Sequence
  Description of Artificial Sequence: Synthetic oligonucleotide
cuagcgaccacacccagcc

SEQ ID NO: 1812600 - RNA, 19 nt, Artificial Sequence
  Description of Artificial Sequence: Synthetic oligonucleotide
ugucccaagagccggagca

SEQ ID NO: 1812601 - RNA, 19 nt, Artificial Sequence
  Description of Artificial Sequence: Synthetic oligonucleotide
ucauaaguaccagucacca

SEQ ID NO: 1812602 - RNA, 19 nt, Artificial Sequence
  Description of Artificial Sequence: Synthetic oligonucleotide
cagaccuccaaugacaggc

SEQ ID NO: 1812603 - RNA, 19 nt, Artificial Sequence
  Description of Artificial Sequence: Synthetic oligonucleotide
guacagaugguucuaggug

SEQ ID NO: 1812604 - RNA, 19 nt, Artificial Sequence
  Description of Artificial Sequence: Synthetic oligonucleotide
uagauguuguguacaaagu

SEQ ID NO: 1812605 - RNA, 19 nt, Artificial Sequence
  Description of Artificial Sequence: Synthetic oligonucleotide
gacacuauuggcucggcga

SEQ ID NO: 1812606 - RNA, 19 nt, Artificial Sequence
  Description of Artificial Sequence: Synthetic oligonucleotide
uacucggcgacacgcacgg

SEQ ID NO: 1812607 - RNA, 19 nt, Artificial Sequence
  Description of Artificial Sequence: Synthetic oligonucleotide
uggugacccacaucaaagg

SEQ ID NO: 1812608 - RNA, 19 nt, Artificial Sequence
  Description of Artificial Sequence: Synthetic oligonucleotide
acagaucccauucaacaca

SEQ ID NO: 1812609 - RNA, 19 nt, Artificial Sequence
  Description of Artificial Sequence: Synthetic oligonucleotide
agucgccccacccuggagc

SEQ ID NO: 1812610 - RNA, 19 nt, Artificial Sequence
  Description of Artificial Sequence: Synthetic oligonucleotide
acugcccgagaugauaugc

SEQ ID NO: 1812611 - RNA, 19 nt, Artificial Sequence
  Description of Artificial Sequence: Synthetic oligonucleotide
acucaucaucacaagagcg

SEQ ID NO: 1812612 - RNA, 19 nt, Artificial Sequence
  Description of Artificial Sequence: Synthetic oligonucleotide
aagcacgacccgcgcaucc

SEQ ID NO: 1812613 - RNA, 19 nt, Artificial Sequence
  Description of Artificial Sequence: Synthetic oligonucleotide
gaucaaauaccacaagacu

SEQ ID NO: 1812614 - RNA, 19 nt, Artificial Sequence
  Description of Artificial Sequence: Synthetic oligonucleotide
gaaguacucggcgacacgc

SEQ ID NO: 1812615 - RNA, 19 nt, Artificial Sequence
  Description of Artificial Sequence: Synthetic oligonucleotide
cuucuugucauaaguacca

SEQ ID NO: 1812616 - RNA, 19 nt, Artificial Sequence
  Description of Artificial Sequence: Synthetic oligonucleotide
aggaugucagguugguagg

SEQ ID NO: 1812617 - RNA, 19 nt, Artificial Sequence
  Description of Artificial Sequence: Synthetic oligonucleotide
gcugcuagcgaccacaccc

SEQ ID NO: 1812618 - RNA, 19 nt, Artificial Sequence
  Description of Artificial Sequence: Synthetic oligonucleotide
aaacugcugcccaucggcc

SEQ ID NO: 1812619 - RNA, 19 nt, Artificial Sequence
  Description of Artificial Sequence: Synthetic oligonucleotide
gacauugcgaucucgggaa

SEQ ID NO: 1812620 - RNA, 19 nt, Artificial Sequence
  Description of Artificial Sequence: Synthetic oligonucleotide
aguacucggcgacacgcac

SEQ ID NO: 1812621 - RNA, 19 nt, Artificial Sequence
  Description of Artificial Sequence: Synthetic oligonucleotide
uguuguguacaaagucccc

SEQ ID NO: 1812622 - RNA, 19 nt, Artificial Sequence
  Description of Artificial Sequence: Synthetic oligonucleotide
caagcuggaagcaaccauc

SEQ ID NO: 1812623 - RNA, 19 nt, Artificial Sequence
  Description of Artificial Sequence: Synthetic oligonucleotide
uucaacacauugugguggc

SEQ ID NO: 1812624 - RNA, 19 nt, Artificial Sequence
  Description of Artificial Sequence: Synthetic oligonucleotide
aucaucacaagagcgagga

SEQ ID NO: 1812625 - RNA, 19 nt, Artificial Sequence
  Description of Artificial Sequence: Synthetic oligonucleotide
aacgucaggguccgggucu

SEQ ID NO: 1812626 - RNA, 19 nt, Artificial Sequence
  Description of Artificial Sequence: Synthetic oligonucleotide
ugaucugagacuggugacc

SEQ ID NO: 1812627 - RNA, 19 nt, Artificial Sequence
  Description of Artificial Sequence: Synthetic oligonucleotide
acaagagcgaggauccucg

SEQ ID NO: 1812628 - RNA, 19 nt, Artificial Sequence
  Description of Artificial Sequence: Synthetic oligonucleotide
cccuaaaugucguaggucc

SEQ ID NO: 1812629 - RNA, 19 nt, Artificial Sequence
  Description of Artificial Sequence: Synthetic oligonucleotide
uacaaaguccccagagagu

SEQ ID NO: 1812630 - RNA, 19 nt, Artificial Sequence
  Description of Artificial Sequence: Synthetic oligonucleotide
cagaacucggcuaggcucc

SEQ ID NO: 1812631 - RNA, 19 nt, Artificial Sequence
  Description of Artificial Sequence: Synthetic oligonucleotide
ugguacagaugguucuagg

SEQ ID NO: 1812632 - RNA, 19 nt, Artificial Sequence
  Description of Artificial Sequence: Synthetic oligonucleotide
uucccuaaaugucguaggu

SEQ ID NO: 1812633 - RNA, 19 nt, Artificial Sequence
  Description of Artificial Sequence: Synthetic oligonucleotide
uugucaguagauguugugu

SEQ ID NO: 1812634 - RNA, 19 nt, Artificial Sequence
  Description of Artificial Sequence: Synthetic oligonucleotide
guccugguaagacaugcag

SEQ ID NO: 1812635 - RNA, 19 nt, Artificial Sequence
  Description of Artificial Sequence: Synthetic oligonucleotide
aagcaaccaucucgguugg

SEQ ID NO: 1812636 - RNA, 19 nt, Artificial Sequence
  Description of Artificial Sequence: Synthetic oligonucleotide
uggcucggcgaucaaauac

SEQ ID NO: 1812637 - RNA, 19 nt, Artificial Sequence
  Description of Artificial Sequence: Synthetic oligonucleotide
ccugguaagacaugcagag

SEQ ID NO: 1812638 - RNA, 19 nt, Artificial Sequence
  Description of Artificial Sequence: Synthetic oligonucleotide
cugacagacacagucgccc

SEQ ID NO: 1812639 - RNA, 19 nt, Artificial Sequence
  Description of Artificial Sequence: Synthetic oligonucleotide
gaucugagacuggugaccc

SEQ ID NO: 1812640 - RNA, 19 nt, Artificial Sequence
  Description of Artificial Sequence: Synthetic oligonucleotide
gagcacgcgggcuacguag

SEQ ID NO: 1812641 - RNA, 19 nt, Artificial Sequence
  Description of Artificial Sequence: Synthetic oligonucleotide
acagcgcuugagugcagcc

SEQ ID NO: 1812642 - RNA, 19 nt, Artificial Sequence
  Description of Artificial Sequence: Synthetic oligonucleotide
ugaagcacgacccgcgcau

SEQ ID NO: 1812643 - RNA, 19 nt, Artificial Sequence
  Description of Artificial Sequence: Synthetic oligonucleotide
aucucgccaaacugcugcc

SEQ ID NO: 1812644 - RNA, 19 nt, Artificial Sequence
  Description of Artificial Sequence: Synthetic oligonucleotide
cuacguaggccucagccug

SEQ ID NO: 1812645 - RNA, 19 nt, Artificial Sequence
  Description of Artificial Sequence: Synthetic oligonucleotide
uaggcuccuucccuaaaug

SEQ ID NO: 1812646 - RNA, 19 nt, Artificial Sequence
  Description of Artificial Sequence: Synthetic oligonucleotide
cuugucaguagauguugug

SEQ ID NO: 1812647 - RNA, 19 nt, Artificial Sequence
  Description of Artificial Sequence: Synthetic oligonucleotide
ggcacgugaacccgaaugg

SEQ ID NO: 1812648 - RNA, 19 nt, Artificial Sequence
  Description of Artificial Sequence: Synthetic oligonucleotide
acagccuuucgcuccggcg

SEQ ID NO: 1812649 - RNA, 19 nt, Artificial Sequence
  Description of Artificial Sequence: Synthetic oligonucleotide
agaaguacucggcgacacg

SEQ ID NO: 1812650 - RNA, 19 nt, Artificial Sequence
  Description of Artificial Sequence: Synthetic oligonucleotide
gacccgcgcauccagguag

SEQ ID NO: 1812651 - RNA, 19 nt, Artificial Sequence
  Description of Artificial Sequence: Synthetic oligonucleotide
cauccagcuguuuaggcca

SEQ ID NO: 1812652 - RNA, 19 nt, Artificial Sequence
  Description of Artificial Sequence: Synthetic oligonucleotide
cauaaguaccagucaccag

SEQ ID NO: 1812653 - RNA, 19 nt, Artificial Sequence
  Description of Artificial Sequence: Synthetic oligonucleotide
agacacuauuggcucggcg

SEQ ID NO: 1812654 - RNA, 19 nt, Artificial Sequence
  Description of Artificial Sequence: Synthetic oligonucleotide
agccugaacgucagggucc

SEQ ID NO: 1812655 - RNA, 19 nt, Artificial Sequence
  Description of Artificial Sequence: Synthetic oligonucleotide
aucucgguuggcgaagacg

SEQ ID NO: 1812656 - RNA, 19 nt, Artificial Sequence
  Description of Artificial Sequence: Synthetic oligonucleotide
gauaugccugucaucugcc

SEQ ID NO: 1812657 - RNA, 19 nt, Artificial Sequence
  Description of Artificial Sequence: Synthetic oligonucleotide
cacagugcugucccaagag

SEQ ID NO: 1812658 - RNA, 19 nt, Artificial Sequence
  Description of Artificial Sequence: Synthetic oligonucleotide
gucauaaguaccagucacc

SEQ ID NO: 1812659 - RNA, 19 nt, Artificial Sequence
  Description of Artificial Sequence: Synthetic oligonucleotide
agccggagcacacacggug

SEQ ID NO: 1812660 - RNA, 19 nt, Artificial Sequence
  Description of Artificial Sequence: Synthetic oligonucleotide
gacugcagcgacgagcgcc

SEQ ID NO: 1812661 - RNA, 19 nt, Artificial Sequence
  Description of Artificial Sequence: Synthetic oligonucleotide
aagacacuauuggcucggc

SEQ ID NO: 1812662 - RNA, 19 nt, Artificial Sequence
  Description of Artificial Sequence: Synthetic oligonucleotide
ucccugugaucugagacug

SEQ ID NO: 1812663 - RNA, 19 nt, Artificial Sequence
  Description of Artificial Sequence: Synthetic oligonucleotide
agcgaccacacccagcccu

SEQ ID NO: 1812664 - RNA, 19 nt, Artificial Sequence
  Description of Artificial Sequence: Synthetic oligonucleotide
cugaacgucaggguccggg

SEQ ID NO: 1812665 - RNA, 19 nt, Artificial Sequence
  Description of Artificial Sequence: Synthetic oligonucleotide
acuauuggcucggcgauca

SEQ ID NO: 1812666 - RNA, 19 nt, Artificial Sequence
  Description of Artificial Sequence: Synthetic oligonucleotide
uugcccuugaucucgccaa

SEQ ID NO: 1812667 - RNA, 19 nt, Artificial Sequence
  Description of Artificial Sequence: Synthetic oligonucleotide
ggcuacguaggccucagcc

SEQ ID NO: 1812668 - RNA, 19 nt, Artificial Sequence
  Description of Artificial Sequence: Synthetic oligonucleotide
gaugguucuaggugggucu

SEQ ID NO: 1812669 - RNA, 19 nt, Artificial Sequence
  Description of Artificial Sequence: Synthetic oligonucleotide
ucggcgacacgcacggcag

SEQ ID NO: 1812670 - RNA, 19 nt, Artificial Sequence
  Description of Artificial Sequence: Synthetic oligonucleotide
uccugugcugcuagcgacc

SEQ ID NO: 1812671 - RNA, 19 nt, Artificial Sequence
  Description of Artificial Sequence: Synthetic oligonucleotide
ucaggguccgggucuagcu

SEQ ID NO: 1812672 - RNA, 19 nt, Artificial Sequence
  Description of Artificial Sequence: Synthetic oligonucleotide
agcgaggauccucgcaccg

SEQ ID NO: 1812673 - RNA, 19 nt, Artificial Sequence
  Description of Artificial Sequence: Synthetic oligonucleotide
ugcccaucggccugcaugu

SEQ ID NO: 1812674 - RNA, 19 nt, Artificial Sequence
  Description of Artificial Sequence: Synthetic oligonucleotide
ugugugcuauugcccuggg

SEQ ID NO: 1812675 - RNA, 19 nt, Artificial Sequence
  Description of Artificial Sequence: Synthetic oligonucleotide
cgaucaaauaccacaagac

SEQ ID NO: 1812676 - RNA, 19 nt, Artificial Sequence
  Description of Artificial Sequence: Synthetic oligonucleotide
guucuaggugggucugugg

SEQ ID NO: 1812677 - RNA, 19 nt, Artificial Sequence
  Description of Artificial Sequence: Synthetic oligonucleotide
acauugcgaucucgggaac

SEQ ID NO: 1812678 - RNA, 19 nt, Artificial Sequence
  Description of Artificial Sequence: Synthetic oligonucleotide
ucucgggaaccugacagac

SEQ ID NO: 1812679 - RNA, 19 nt, Artificial Sequence
  Description of Artificial Sequence: Synthetic oligonucleotide
acacuauuggcucggcgau

SEQ ID NO: 1812680 - RNA, 19 nt, Artificial Sequence
  Description of Artificial Sequence: Synthetic oligonucleotide
ccucgcaccgcccugaggg

SEQ ID NO: 1812681 - RNA, 19 nt, Artificial Sequence
  Description of Artificial Sequence: Synthetic oligonucleotide
cacgugaacccgaaugguc

SEQ ID NO: 1812682 - RNA, 19 nt, Artificial Sequence
  Description of Artificial Sequence: Synthetic oligonucleotide
cacguugcccucagcacag

SEQ ID NO: 1812683 - RNA, 19 nt, Artificial Sequence
  Description of Artificial Sequence: Synthetic oligonucleotide
cugcccgagaugauaugcc

SEQ ID NO: 1812684 - RNA, 19 nt, Artificial Sequence
  Description of Artificial Sequence: Synthetic oligonucleotide
accgcuagcacagcgcuug

SEQ ID NO: 1812685 - RNA, 19 nt, Artificial Sequence
  Description of Artificial Sequence: Synthetic oligonucleotide
cugcccaucggccugcaug

SEQ ID NO: 1812686 - RNA, 19 nt, Artificial Sequence
  Description of Artificial Sequence: Synthetic oligonucleotide
gacaugcagagcagauagg

SEQ ID NO: 1812687 - RNA, 19 nt, Artificial Sequence
  Description of Artificial Sequence: Synthetic oligonucleotide
gcgaucaaauaccacaaga

SEQ ID NO: 1812688 - RNA, 19 nt, Artificial Sequence
  Description of Artificial Sequence: Synthetic oligonucleotide
agaccuccaaugacaggcc

SEQ ID NO: 1812689 - RNA, 19 nt, Artificial Sequence
  Description of Artificial Sequence: Synthetic oligonucleotide
guaggcggcagaucuccag

SEQ ID NO: 1812690 - RNA, 19 nt, Artificial Sequence
  Description of Artificial Sequence: Synthetic oligonucleotide
caugaagcacgacccgcgc

SEQ ID NO: 1812691 - RNA, 19 nt, Artificial Sequence
  Description of Artificial Sequence: Synthetic oligonucleotide
gcaaccaucucgguuggcg

SEQ ID NO: 1812692 - RNA, 19 nt, Artificial Sequence
  Description of Artificial Sequence: Synthetic oligonucleotide
ggaccggacaagcuggaag

SEQ ID NO: 1812693 - RNA, 19 nt, Artificial Sequence
  Description of Artificial Sequence: Synthetic oligonucleotide
agccuuucgcuccggcgcg

SEQ ID NO: 1812694 - RNA, 19 nt, Artificial Sequence
  Description of Artificial Sequence: Synthetic oligonucleotide
ugaucucgccaaacugcug

SEQ ID NO: 1812695 - RNA, 19 nt, Artificial Sequence
  Description of Artificial Sequence: Synthetic oligonucleotide
auugcgaucucgggaaccu

SEQ ID NO: 1812696 - RNA, 19 nt, Artificial Sequence
  Description of Artificial Sequence: Synthetic oligonucleotide
acccacaucaaaggaccgg

SEQ ID NO: 1812697 - RNA, 19 nt, Artificial Sequence
  Description of Artificial Sequence: Synthetic oligonucleotide
ugugggcacgugaacccga

SEQ ID NO: 1812698 - RNA, 19 nt, Artificial Sequence
  Description of Artificial Sequence: Synthetic oligonucleotide
gcuguuuaggccagcagcc

SEQ ID NO: 1812699 - RNA, 19 nt, Artificial Sequence
  Description of Artificial Sequence: Synthetic oligonucleotide
acgugaacccgaauggucu

SEQ ID NO: 1812700 - RNA, 19 nt, Artificial Sequence
  Description of Artificial Sequence: Synthetic oligonucleotide
acggcaggacaugaagcac

SEQ ID NO: 1812701 - RNA, 19 nt, Artificial Sequence
  Description of Artificial Sequence: Synthetic oligonucleotide
aggcagaaguacucggcga

SEQ ID NO: 1812702 - RNA, 19 nt, Artificial Sequence
  Description of Artificial Sequence: Synthetic oligonucleotide
ugcuagcgaccacacccag

SEQ ID NO: 1812703 - RNA, 19 nt, Artificial Sequence
  Description of Artificial Sequence: Synthetic oligonucleotide
gggcacgugaacccgaaug

SEQ ID NO: 1812704 - RNA, 19 nt, Artificial Sequence
  Description of Artificial Sequence: Synthetic oligonucleotide
ucccuaaaugucguagguc

SEQ ID NO: 1812705 - RNA, 19 nt, Artificial Sequence
  Description of Artificial Sequence: Synthetic oligonucleotide
cugcaagacacuauuggcu

SEQ ID NO: 1812706 - RNA, 19 nt, Artificial Sequence
  Description of Artificial Sequence: Synthetic oligonucleotide
cauugcgaucucgggaacc

SEQ ID NO: 1812707 - RNA, 19 nt, Artificial Sequence
  Description of Artificial Sequence: Synthetic oligonucleotide
accacacccagcccuggug

SEQ ID NO: 1812708 - RNA, 19 nt, Artificial Sequence
  Description of Artificial Sequence: Synthetic oligonucleotide
ucacuagggccaagucagc

SEQ ID NO: 1812709 - RNA, 19 nt, Artificial Sequence
  Description of Artificial Sequence: Synthetic oligonucleotide
gaaggcucagcaggcccgg

SEQ ID NO: 1812710 - RNA, 19 nt, Artificial Sequence
  Description of Artificial Sequence: Synthetic oligonucleotide
guaagacaugcagagcaga

SEQ ID NO: 1812711 - RNA, 19 nt, Artificial Sequence
  Description of Artificial Sequence: Synthetic oligonucleotide
auggaagcaaagugaccau

SEQ ID NO: 1812712 - RNA, 19 nt, Artificial Sequence
  Description of Artificial Sequence: Synthetic oligonucleotide
acgcgggcuacguaggccu

SEQ ID NO: 1812713 - RNA, 19 nt, Artificial Sequence
  Description of Artificial Sequence: Synthetic oligonucleotide
gacccacaucaaaggaccg

SEQ ID NO: 1812714 - RNA, 19 nt, Artificial Sequence
  Description of Artificial Sequence: Synthetic oligonucleotide
ugaacccgaauggucuugu

SEQ ID NO: 1812715 - RNA, 19 nt, Artificial Sequence
  Description of Artificial Sequence: Synthetic oligonucleotide
gagcgaggauccucgcacc

SEQ ID NO: 1812716 - RNA, 19 nt, Artificial Sequence
  Description of Artificial Sequence: Synthetic oligonucleotide
guacucggcgacacgcacg

SEQ ID NO: 1812717 - RNA, 19 nt, Artificial Sequence
  Description of Artificial Sequence: Synthetic oligonucleotide
cagaaguacucggcgacac

SEQ ID NO: 1812718 - RNA, 19 nt, Artificial Sequence
  Description of Artificial Sequence: Synthetic oligonucleotide
guccugugcugcuagcgac

SEQ ID NO: 1812719 - RNA, 19 nt, Artificial Sequence
  Description of Artificial Sequence: Synthetic oligonucleotide
cucggcuaggcuccuuccc

SEQ ID NO: 1812720 - RNA, 19 nt, Artificial Sequence
  Description of Artificial Sequence: Synthetic oligonucleotide
ggcagaaguacucggcgac

SEQ ID NO: 1812721 - RNA, 19 nt, Artificial Sequence
  Description of Artificial Sequence: Synthetic oligonucleotide
aguccccagagaguguuug

SEQ ID NO: 1812722 - RNA, 19 nt, Artificial Sequence
  Description of Artificial Sequence: Synthetic oligonucleotide
cugguaagacaugcagagc

SEQ ID NO: 1812723 - RNA, 19 nt, Artificial Sequence
  Description of Artificial Sequence: Synthetic oligonucleotide
caccacguugcccucagca

SEQ ID NO: 1812724 - RNA, 19 nt, Artificial Sequence
  Description of Artificial Sequence: Synthetic oligonucleotide
ccuugaucucgccaaacug

SEQ ID NO: 1812725 - RNA, 19 nt, Artificial Sequence
  Description of Artificial Sequence: Synthetic oligonucleotide
ugcugcuagcgaccacacc

SEQ ID NO: 1812726 - RNA, 19 nt, Artificial Sequence
  Description of Artificial Sequence: Synthetic oligonucleotide
cugguacagaugguucuag

SEQ ID NO: 1812727 - RNA, 19 nt, Artificial Sequence
  Description of Artificial Sequence: Synthetic oligonucleotide
acgcggagagcguggacug

SEQ ID NO: 1812728 - RNA, 19 nt, Artificial Sequence
  Description of Artificial Sequence: Synthetic oligonucleotide
ucaccagaacucggcuagg

SEQ ID NO: 1812729 - RNA, 19 nt, Artificial Sequence
  Description of Artificial Sequence: Synthetic oligonucleotide
aaguacucggcgacacgca

SEQ ID NO: 1812730 - RNA, 19 nt, Artificial Sequence
  Description of Artificial Sequence: Synthetic oligonucleotide
ggcucggcgaucaaauacc

SEQ ID NO: 1812731 - RNA, 19 nt, Artificial Sequence
  Description of Artificial Sequence: Synthetic oligonucleotide
aggauccucgcaccgcccu

SEQ ID NO: 1812732 - RNA, 19 nt, Artificial Sequence
  Description of Artificial Sequence: Synthetic oligonucleotide
cacaagagcgaggauccuc

SEQ ID NO: 1812733 - RNA, 19 nt, Artificial Sequence
  Description of Artificial Sequence: Synthetic oligonucleotide
cuugcccuugaucucgcca

SEQ ID NO: 1812734 - RNA, 19 nt, Artificial Sequence
  Description of Artificial Sequence: Synthetic oligonucleotide
ggcgaucaaauaccacaag

SEQ ID NO: 1812735 - RNA, 19 nt, Artificial Sequence
  Description of Artificial Sequence: Synthetic oligonucleotide
cacagucgccccacccugg

SEQ ID NO: 1812736 - RNA, 19 nt, Artificial Sequence
  Description of Artificial Sequence: Synthetic oligonucleotide
gacacagucgccccacccu

SEQ ID NO: 1812737 - RNA, 19 nt, Artificial Sequence
  Description of Artificial Sequence: Synthetic oligonucleotide
accaucucgguuggcgaag

SEQ ID NO: 1812738 - RNA, 19 nt, Artificial Sequence
  Description of Artificial Sequence: Synthetic oligonucleotide
caagagcgaggauccucgc

SEQ ID NO: 1812739 - RNA, 19 nt, Artificial Sequence
  Description of Artificial Sequence: Synthetic oligonucleotide
ucucgccaaacugcugccc

SEQ ID NO: 1812740 - RNA, 19 nt, Artificial Sequence
  Description of Artificial Sequence: Synthetic oligonucleotide
cagcaccgcuagcacagcg

SEQ ID NO: 1812741 - RNA, 19 nt, Artificial Sequence
  Description of Artificial Sequence: Synthetic oligonucleotide
uuucgcuccggcgcgucca

SEQ ID NO: 1812742 - RNA, 19 nt, Artificial Sequence
  Description of Artificial Sequence: Synthetic oligonucleotide
cucggcgaucaaauaccac

SEQ ID NO: 1812743 - RNA, 19 nt, Artificial Sequence
  Description of Artificial Sequence: Synthetic oligonucleotide
caaccaucucgguuggcga

SEQ ID NO: 1812744 - RNA, 19 nt, Artificial Sequence
  Description of Artificial Sequence: Synthetic oligonucleotide
uccucgcaccgcccugagg

SEQ ID NO: 1812745 - RNA, 19 nt, Artificial Sequence
  Description of Artificial Sequence: Synthetic oligonucleotide
cucggcgacacgcacggca

SEQ ID NO: 1812746 - RNA, 19 nt, Artificial Sequence
  Description of Artificial Sequence: Synthetic oligonucleotide
uuuaggccagcagccucca

SEQ ID NO: 1812747 - RNA, 19 nt, Artificial Sequence
  Description of Artificial Sequence: Synthetic oligonucleotide
gguugacauugcgaucucg

SEQ ID NO: 1812748 - RNA, 19 nt, Artificial Sequence
  Description of Artificial Sequence: Synthetic oligonucleotide
agcgacgagcgccgcgggg

SEQ ID NO: 1812749 - RNA, 19 nt, Artificial Sequence
  Description of Artificial Sequence: Synthetic oligonucleotide
guguuugaucccugugauc

SEQ ID NO: 1812750 - RNA, 19 nt, Artificial Sequence
  Description of Artificial Sequence: Synthetic oligonucleotide
gcaacacugcaucaaugga

SEQ ID NO: 1812751 - RNA, 19 nt, Artificial Sequence
  Description of Artificial Sequence: Synthetic oligonucleotide
gagaguguuugaucccugu

SEQ ID NO: 1812752 - RNA, 19 nt, Artificial Sequence
  Description of Artificial Sequence: Synthetic oligonucleotide
gggaucauagauggucacc

SEQ ID NO: 1812753 - RNA, 19 nt, Artificial Sequence
  Description of Artificial Sequence: Synthetic oligonucleotide
cuagggccaagucagcucu

SEQ ID NO: 1812754 - RNA, 19 nt, Artificial Sequence
  Description of Artificial Sequence: Synthetic oligonucleotide
acgacccgcgcauccaggu

SEQ ID NO: 1812755 - RNA, 19 nt, Artificial Sequence
  Description of Artificial Sequence: Synthetic oligonucleotide
uggggcguccugguaagac

SEQ ID NO: 1812756 - RNA, 19 nt, Artificial Sequence
  Description of Artificial Sequence: Synthetic oligonucleotide
caccagaacucggcuaggc

SEQ ID NO: 1812757 - RNA, 19 nt, Artificial Sequence
  Description of Artificial Sequence: Synthetic oligonucleotide
uucgcuccggcgcguccag

SEQ ID NO: 1812758 - RNA, 19 nt, Artificial Sequence
  Description of Artificial Sequence: Synthetic oligonucleotide
cacgacccgcgcauccagg

SEQ ID NO: 1812759 - RNA, 19 nt, Artificial Sequence
  Description of Artificial Sequence: Synthetic oligonucleotide
ccaucggccugcauguccc

SEQ ID NO: 1812760 - RNA, 19 nt, Artificial Sequence
  Description of Artificial Sequence: Synthetic oligonucleotide
augguucuaggugggucug

SEQ ID NO: 1812761 - RNA, 19 nt, Artificial Sequence
  Description of Artificial Sequence: Synthetic oligonucleotide
ggccaagucagcucuggga

SEQ ID NO: 1812762 - RNA, 19 nt, Artificial Sequence
  Description of Artificial Sequence: Synthetic oligonucleotide
cacagcgcuugagugcagc

SEQ ID NO: 1812763 - RNA, 19 nt, Artificial Sequence
  Description of Artificial Sequence: Synthetic oligonucleotide
uccggguccgacucaucau

SEQ ID NO: 1812764 - RNA, 19 nt, Artificial Sequence
  Description of Artificial Sequence: Synthetic oligonucleotide
cugcuagcgaccacaccca

SEQ ID NO: 1812765 - RNA, 19 nt, Artificial Sequence
  Description of Artificial Sequence: Synthetic oligonucleotide
acagucgccccacccugga

SEQ ID NO: 1812766 - RNA, 19 nt, Artificial Sequence
  Description of Artificial Sequence: Synthetic oligonucleotide
agcacgcgggcuacguagg

SEQ ID NO: 1812767 - RNA, 19 nt, Artificial Sequence
  Description of Artificial Sequence: Synthetic oligonucleotide
ugcccuugaucucgccaaa

SEQ ID NO: 1812768 - RNA, 19 nt, Artificial Sequence
  Description of Artificial Sequence: Synthetic oligonucleotide
gacgcggagagcguggacu

SEQ ID NO: 1812769 - RNA, 19 nt, Artificial Sequence
  Description of Artificial Sequence: Synthetic oligonucleotide
uuggcucggcgaucaaaua

SEQ ID NO: 1812770 - RNA, 19 nt, Artificial Sequence
  Description of Artificial Sequence: Synthetic oligonucleotide
cuuucgcuccggcgcgucc

SEQ ID NO: 1812771 - RNA, 19 nt, Artificial Sequence
  Description of Artificial Sequence: Synthetic oligonucleotide
ggcgggacucuggagacag

SEQ ID NO: 1812772 - RNA, 19 nt, Artificial Sequence
  Description of Artificial Sequence: Synthetic oligonucleotide
gaacccgaauggucuuguc

SEQ ID NO: 1812773 - RNA, 19 nt, Artificial Sequence
  Description of Artificial Sequence: Synthetic oligonucleotide
ugagcacgcgggcuacgua

SEQ ID NO: 1812774 - RNA, 19 nt, Artificial Sequence
  Description of Artificial Sequence: Synthetic oligonucleotide
agcaaccaucucgguuggc

SEQ ID NO: 1812775 - RNA, 19 nt, Artificial Sequence
  Description of Artificial Sequence: Synthetic oligonucleotide
ccugacagacacagucgcc

SEQ ID NO: 1812776 - RNA, 19 nt, Artificial Sequence
  Description of Artificial Sequence: Synthetic oligonucleotide
uagcgaccacacccagccc

SEQ ID NO: 1812777 - RNA, 19 nt, Artificial Sequence
  Description of Artificial Sequence: Synthetic oligonucleotide
gcuugagugcagccuccgg

SEQ ID NO: 1812778 - RNA, 19 nt, Artificial Sequence
  Description of Artificial Sequence: Synthetic oligonucleotide
ucgccaaacugcugcccau

SEQ ID NO: 1812779 - RNA, 19 nt, Artificial Sequence
  Description of Artificial Sequence: Synthetic oligonucleotide
gcguccugguaagacaugc

SEQ ID NO: 1812780 - RNA, 19 nt, Artificial Sequence
  Description of Artificial Sequence: Synthetic oligonucleotide
gggucuagcuccggguccg

SEQ ID NO: 1812781 - RNA, 19 nt, Artificial Sequence
  Description of Artificial Sequence: Synthetic oligonucleotide
cacgcgggcuacguaggcc

SEQ ID NO: 1812782 - RNA, 19 nt, Artificial Sequence
  Description of Artificial Sequence: Synthetic oligonucleotide
agggacgcggagagcgugg

SEQ ID NO: 1812783 - RNA, 19 nt, Artificial Sequence
  Description of Artificial Sequence: Synthetic oligonucleotide
agugaccaucagccaggca

SEQ ID NO: 1812784 - RNA, 19 nt, Artificial Sequence
  Description of Artificial Sequence: Synthetic oligonucleotide
uugcgaucucgggaaccug

SEQ ID NO: 1812785 - RNA, 19 nt, Artificial Sequence
  Description of Artificial Sequence: Synthetic oligonucleotide
gguccugugcugcuagcga

SEQ ID NO: 1812786 - RNA, 19 nt, Artificial Sequence
  Description of Artificial Sequence: Synthetic oligonucleotide
ucacaagagcgaggauccu

SEQ ID NO: 1812787 - RNA, 19 nt, Artificial Sequence
  Description of Artificial Sequence: Synthetic oligonucleotide
gucaggguccgggucuagc

SEQ ID NO: 1812788 - RNA, 19 nt, Artificial Sequence
  Description of Artificial Sequence: Synthetic oligonucleotide
gaggauccucgcaccgccc

SEQ ID NO: 1812789 - RNA, 19 nt, Artificial Sequence
  Description of Artificial Sequence: Synthetic oligonucleotide
auccucgcaccgcccugag

SEQ ID NO: 1812790 - RNA, 19 nt, Artificial Sequence
  Description of Artificial Sequence: Synthetic oligonucleotide
ugguucuaggugggucugu

SEQ ID NO: 1812791 - RNA, 19 nt, Artificial Sequence
  Description of Artificial Sequence: Synthetic oligonucleotide
caucucgguuggcgaagac

SEQ ID NO: 1812792 - RNA, 19 nt, Artificial Sequence
  Description of Artificial Sequence: Synthetic oligonucleotide
gguuggcgaagacgugcag

SEQ ID NO: 1812793 - RNA, 19 nt, Artificial Sequence
  Description of Artificial Sequence: Synthetic oligonucleotide
gccggagcacacacggugg

SEQ ID NO: 1812794 - RNA, 19 nt, Artificial Sequence
  Description of Artificial Sequence: Synthetic oligonucleotide
acacgcacggcaggacaug

SEQ ID NO: 1812795 - RNA, 19 nt, Artificial Sequence
  Description of Artificial Sequence: Synthetic oligonucleotide
cacgggcgggacucuggag

SEQ ID NO: 1812796 - RNA, 19 nt, Artificial Sequence
  Description of Artificial Sequence: Synthetic oligonucleotide
cucacugcccgagaugaua

SEQ ID NO: 1812797 - RNA, 19 nt, Artificial Sequence
  Description of Artificial Sequence: Synthetic oligonucleotide
gucaucugccagcaccgcu

SEQ ID NO: 1812798 - RNA, 19 nt, Artificial Sequence
  Description of Artificial Sequence: Synthetic oligonucleotide
gcuacguaggccucagccu

SEQ ID NO: 1812799 - RNA, 19 nt, Artificial Sequence
  Description of Artificial Sequence: Synthetic oligonucleotide
gccugaacgucaggguccg

SEQ ID NO: 1812800 - RNA, 19 nt, Artificial Sequence
  Description of Artificial Sequence: Synthetic oligonucleotide
cagagaguguuugaucccu

SEQ ID NO: 1812801 - RNA, 19 nt, Artificial Sequence
  Description of Artificial Sequence: Synthetic oligonucleotide
cacuauuggcucggcgauc

SEQ ID NO: 1812802 - RNA, 19 nt, Artificial Sequence
  Description of Artificial Sequence: Synthetic oligonucleotide
gaagcacgacccgcgcauc

SEQ ID NO: 1812803 - RNA, 19 nt, Artificial Sequence
  Description of Artificial Sequence: Synthetic oligonucleotide
cgaggauccucgcaccgcc

SEQ ID NO: 1812804 - RNA, 19 nt, Artificial Sequence
  Description of Artificial Sequence: Synthetic oligonucleotide
ugggcacgugaacccgaau

SEQ ID NO: 1812805 - RNA, 19 nt, Artificial Sequence
  Description of Artificial Sequence: Synthetic oligonucleotide
gucccaagagccggagcac

SEQ ID NO: 1812806 - RNA, 19 nt, Artificial Sequence
  Description of Artificial Sequence: Synthetic oligonucleotide
cagggacgcggagagcgug

SEQ ID NO: 1812807 - RNA, 19 nt, Artificial Sequence
  Description of Artificial Sequence: Synthetic oligonucleotide
cuaggcuccuucccuaaau

SEQ ID NO: 1812808 - RNA, 19 nt, Artificial Sequence
  Description of Artificial Sequence: Synthetic oligonucleotide
ccaagucagcucugggauc

SEQ ID NO: 1812809 - RNA, 19 nt, Artificial Sequence
  Description of Artificial Sequence: Synthetic oligonucleotide
acccgcgcauccagguagg

SEQ ID NO: 1812810 - RNA, 19 nt, Artificial Sequence
  Description of Artificial Sequence: Synthetic oligonucleotide
ccacguugcccucagcaca

SEQ ID NO: 1812811 - RNA, 19 nt, Artificial Sequence
  Description of Artificial Sequence: Synthetic oligonucleotide
ucgcaccgcccugagggaa

SEQ ID NO: 1812812 - RNA, 19 nt, Artificial Sequence
  Description of Artificial Sequence: Synthetic oligonucleotide
ggauccucgcaccgcccug

SEQ ID NO: 1812813 - RNA, 19 nt, Artificial Sequence
  Description of Artificial Sequence: Synthetic oligonucleotide
gacgugcagcaggcccugg

SEQ ID NO: 1812814 - RNA, 19 nt, Artificial Sequence
  Description of Artificial Sequence: Synthetic oligonucleotide
cgggacucuggagacagcc

SEQ ID NO: 1812815 - RNA, 19 nt, Artificial Sequence
  Description of Artificial Sequence: Synthetic oligonucleotide
gcacgacccgcgcauccag

SEQ ID NO: 1812816 - RNA, 19 nt, Artificial Sequence
  Description of Artificial Sequence: Synthetic oligonucleotide
agacagccuuucgcuccgg

SEQ ID NO: 1812817 - RNA, 19 nt, Artificial Sequence
  Description of Artificial Sequence: Synthetic oligonucleotide
agaacucggcuaggcuccu

SEQ ID NO: 1812818 - RNA, 19 nt, Artificial Sequence
  Description of Artificial Sequence: Synthetic oligonucleotide
ggguccgacucaucaucac

SEQ ID NO: 1812819 - RNA, 19 nt, Artificial Sequence
  Description of Artificial Sequence: Synthetic oligonucleotide
ccggguccgacucaucauc

SEQ ID NO: 1812820 - RNA, 19 nt, Artificial Sequence
  Description of Artificial Sequence: Synthetic oligonucleotide
cagucgccccacccuggag

SEQ ID NO: 1812821 - RNA, 19 nt, Artificial Sequence
  Description of Artificial Sequence: Synthetic oligonucleotide
cuccuucccuaaaugucgu

SEQ ID NO: 1812822 - RNA, 19 nt, Artificial Sequence
  Description of Artificial Sequence: Synthetic oligonucleotide
gcuagcgaccacacccagc

SEQ ID NO: 1812823 - RNA, 19 nt, Artificial Sequence
  Description of Artificial Sequence: Synthetic oligonucleotide
acggccgccuugcccuuga

SEQ ID NO: 1812824 - RNA, 19 nt, Artificial Sequence
  Description of Artificial Sequence: Synthetic oligonucleotide
gguugguaggagaggcaca

SEQ ID NO: 1812825 - RNA, 19 nt, Artificial Sequence
  Description of Artificial Sequence: Synthetic oligonucleotide
cccggcaggcgcacgggcg

SEQ ID NO: 1812826 - RNA, 19 nt, Artificial Sequence
  Description of Artificial Sequence: Synthetic oligonucleotide
acucggcgacacgcacggc

SEQ ID NO: 1812827 - RNA, 19 nt, Artificial Sequence
  Description of Artificial Sequence: Synthetic oligonucleotide
gacacgcacggcaggacau

SEQ ID NO: 1812828 - RNA, 19 nt, Artificial Sequence
  Description of Artificial Sequence: Synthetic oligonucleotide
ccagguuugggugggguga

SEQ ID NO: 1812829 - RNA, 19 nt, Artificial Sequence
  Description of Artificial Sequence: Synthetic oligonucleotide
caacacauugugguggcuu

SEQ ID NO: 1812830 - RNA, 19 nt, Artificial Sequence
  Description of Artificial Sequence: Synthetic oligonucleotide
cacgcacggcaggacauga

SEQ ID NO: 1812831 - RNA, 19 nt, Artificial Sequence
  Description of Artificial Sequence: Synthetic oligonucleotide
gagcgccgcggggucaggc

SEQ ID NO: 1812832 - RNA, 19 nt, Artificial Sequence
  Description of Artificial Sequence: Synthetic oligonucleotide
ccgcugcaagacacuauug

SEQ ID NO: 1812833 - RNA, 19 nt, Artificial Sequence
  Description of Artificial Sequence: Synthetic oligonucleotide
cucgcaccgcccugaggga

SEQ ID NO: 1812834 - RNA, 19 nt, Artificial Sequence
  Description of Artificial Sequence: Synthetic oligonucleotide
ucgcuccggcgcguccagg

SEQ ID NO: 1812835 - RNA, 19 nt, Artificial Sequence
  Description of Artificial Sequence: Synthetic oligonucleotide
cacuagggccaagucagcu

SEQ ID NO: 1812836 - RNA, 19 nt, Artificial Sequence
  Description of Artificial Sequence: Synthetic oligonucleotide
cccgagaugauaugccugu

SEQ ID NO: 1812837 - RNA, 19 nt, Artificial Sequence
  Description of Artificial Sequence: Synthetic oligonucleotide
gcgaggauccucgcaccgc

SEQ ID NO: 1812838 - RNA, 19 nt, Artificial Sequence
  Description of Artificial Sequence: Synthetic oligonucleotide
gcccuggugugugcuauug

SEQ ID NO: 1812839 - RNA, 19 nt, Artificial Sequence
  Description of Artificial Sequence: Synthetic oligonucleotide
aggaccggacaagcuggaa

SEQ ID NO: 1812840 - RNA, 19 nt, Artificial Sequence
  Description of Artificial Sequence: Synthetic oligonucleotide
gcacgcgggcuacguaggc

SEQ ID NO: 1812841 - RNA, 19 nt, Artificial Sequence
  Description of Artificial Sequence: Synthetic oligonucleotide
gcucggcgaucaaauacca

SEQ ID NO: 1812842 - RNA, 19 nt, Artificial Sequence
  Description of Artificial Sequence: Synthetic oligonucleotide
ccgggucuagcuccggguc

SEQ ID NO: 1812843 - RNA, 19 nt, Artificial Sequence
  Description of Artificial Sequence: Synthetic oligonucleotide
ggcgacacgcacggcagga

SEQ ID NO: 1812844 - RNA, 19 nt, Artificial Sequence
  Description of Artificial Sequence: Synthetic oligonucleotide
gccgcugcaagacacuauu

SEQ ID NO: 1812845 - RNA, 19 nt, Artificial Sequence
  Description of Artificial Sequence: Synthetic oligonucleotide
agcccuggugugugcuauu

SEQ ID NO: 1812846 - RNA, 19 nt, Artificial Sequence
  Description of Artificial Sequence: Synthetic oligonucleotide
gugugcuauugcccugggu

SEQ ID NO: 1812847 - RNA, 19 nt, Artificial Sequence
  Description of Artificial Sequence: Synthetic oligonucleotide
gcgaccacacccagcccug

SEQ ID NO: 1812848 - RNA, 19 nt, Artificial Sequence
  Description of Artificial Sequence: Synthetic oligonucleotide
gcggagagcguggacugca

SEQ ID NO: 1812849 - RNA, 19 nt, Artificial Sequence
  Description of Artificial Sequence: Synthetic oligonucleotide
cggcgaucaaauaccacaa

SEQ ID NO: 1812850 - RNA, 19 nt, Artificial Sequence
  Description of Artificial Sequence: Synthetic oligonucleotide
cggccugcaugucccaaag

SEQ ID NO: 1812851 - RNA, 19 nt, Artificial Sequence
  Description of Artificial Sequence: Synthetic oligonucleotide
gugggcacgugaacccgaa

SEQ ID NO: 1812852 - RNA, 19 nt, Artificial Sequence
  Description of Artificial Sequence: Synthetic oligonucleotide
cuauuggcucggcgaucaa

SEQ ID NO: 1812853 - RNA, 19 nt, Artificial Sequence
  Description of Artificial Sequence: Synthetic oligonucleotide
gcccuugaucucgccaaac

SEQ ID NO: 1812854 - RNA, 19 nt, Artificial Sequence
  Description of Artificial Sequence: Synthetic oligonucleotide
ggacugcagcgacgagcgc

SEQ ID NO: 1812855 - RNA, 19 nt, Artificial Sequence
  Description of Artificial Sequence: Synthetic oligonucleotide
gcgcuugagugcagccucc

SEQ ID NO: 1812856 - RNA, 19 nt, Artificial Sequence
  Description of Artificial Sequence: Synthetic oligonucleotide
ggacgcggagagcguggac

SEQ ID NO: 1812857 - RNA, 19 nt, Artificial Sequence
  Description of Artificial Sequence: Synthetic oligonucleotide
cgggcgggacucuggagac

SEQ ID NO: 1812858 - RNA, 19 nt, Artificial Sequence
  Description of Artificial Sequence: Synthetic oligonucleotide
acgucaggguccgggucua

SEQ ID NO: 1812859 - RNA, 19 nt, Artificial Sequence
  Description of Artificial Sequence: Synthetic oligonucleotide
acgcacggcaggacaugaa

SEQ ID NO: 1812860 - RNA, 19 nt, Artificial Sequence
  Description of Artificial Sequence: Synthetic oligonucleotide
ccgaauggucuugucagua

SEQ ID NO: 1812861 - RNA, 19 nt, Artificial Sequence
  Description of Artificial Sequence: Synthetic oligonucleotide
gguccgggucuagcuccgg

SEQ ID NO: 1812862 - RNA, 19 nt, Artificial Sequence
  Description of Artificial Sequence: Synthetic oligonucleotide
acguugcccucagcacaga

SEQ ID NO: 1812863 - RNA, 19 nt, Artificial Sequence
  Description of Artificial Sequence: Synthetic oligonucleotide
cagccgcugcaagacacua

SEQ ID NO: 1812864 - RNA, 19 nt, Artificial Sequence
  Description of Artificial Sequence: Synthetic oligonucleotide
gggcuacguaggccucagc

SEQ ID NO: 1812865 - RNA, 19 nt, Artificial Sequence
  Description of Artificial Sequence: Synthetic oligonucleotide
gguaggcggcagaucucca

SEQ ID NO: 1812866 - RNA, 19 nt, Artificial Sequence
  Description of Artificial Sequence: Synthetic oligonucleotide
gcacgugaacccgaauggu

SEQ ID NO: 1812867 - RNA, 19 nt, Artificial Sequence
  Description of Artificial Sequence: Synthetic oligonucleotide
caggcccggcaggcgcacg

SEQ ID NO: 1812868 - RNA, 19 nt, Artificial Sequence
  Description of Artificial Sequence: Synthetic oligonucleotide
cgcuugagugcagccuccg

SEQ ID NO: 1812869 - RNA, 19 nt, Artificial Sequence
  Description of Artificial Sequence: Synthetic oligonucleotide
gggcguccugguaagacau

SEQ ID NO: 1812870 - RNA, 19 nt, Artificial Sequence
  Description of Artificial Sequence: Synthetic oligonucleotide
gcaggacaugaagcacgac

SEQ ID NO: 1812871 - RNA, 19 nt, Artificial Sequence
  Description of Artificial Sequence: Synthetic oligonucleotide
cgacacgcacggcaggaca

SEQ ID NO: 1812872 - RNA, 19 nt, Artificial Sequence
  Description of Artificial Sequence: Synthetic oligonucleotide
gcgacacgcacggcaggac

SEQ ID NO: 1812873 - RNA, 19 nt, Artificial Sequence
  Description of Artificial Sequence: Synthetic oligonucleotide
gcgccgcggggucaggcca

SEQ ID NO: 1812874 - RNA, 19 nt, Artificial Sequence
  Description of Artificial Sequence: Synthetic oligonucleotide
gagccggagcacacacggu

SEQ ID NO: 1812875 - RNA, 19 nt, Artificial Sequence
  Description of Artificial Sequence: Synthetic oligonucleotide
ccacacccagcccuggugu

SEQ ID NO: 1812876 - RNA, 19 nt, Artificial Sequence
  Description of Artificial Sequence: Synthetic oligonucleotide
cacggccgccuugcccuug

SEQ ID NO: 1812877 - RNA, 19 nt, Artificial Sequence
  Description of Artificial Sequence: Synthetic oligonucleotide
ccaucucgguuggcgaaga

SEQ ID NO: 1812878 - RNA, 19 nt, Artificial Sequence
  Description of Artificial Sequence: Synthetic oligonucleotide
cgaucucgggaaccugaca

SEQ ID NO: 1812879 - RNA, 19 nt, Artificial Sequence
  Description of Artificial Sequence: Synthetic oligonucleotide
cuggggcguccugguaaga

SEQ ID NO: 1812880 - RNA, 19 nt, Artificial Sequence
  Description of Artificial Sequence: Synthetic oligonucleotide
cgcuagcacagcgcuugag

SEQ ID NO: 1812881 - RNA, 19 nt, Artificial Sequence
  Description of Artificial Sequence: Synthetic oligonucleotide
gcgggcuacguaggccuca

SEQ ID NO: 1812882 - RNA, 19 nt, Artificial Sequence
  Description of Artificial Sequence: Synthetic oligonucleotide
cggcgacacgcacggcagg

SEQ ID NO: 1812883 - RNA, 19 nt, Artificial Sequence
  Description of Artificial Sequence: Synthetic oligonucleotide
cgccaaacugcugcccauc

SEQ ID NO: 1812884 - RNA, 19 nt, Artificial Sequence
  Description of Artificial Sequence: Synthetic oligonucleotide
ccugaacgucaggguccgg

SEQ ID NO: 1812885 - RNA, 19 nt, Artificial Sequence
  Description of Artificial Sequence: Synthetic oligonucleotide
ccuuucgcuccggcgcguc

SEQ ID NO: 1812886 - RNA, 19 nt, Artificial Sequence
  Description of Artificial Sequence: Synthetic oligonucleotide
cccgcgcauccagguaggc

SEQ ID NO: 1812887 - RNA, 19 nt, Artificial Sequence
  Description of Artificial Sequence: Synthetic oligonucleotide
cggagcacacacggugguc

SEQ ID NO: 1812888 - RNA, 19 nt, Artificial Sequence
  Description of Artificial Sequence: Synthetic oligonucleotide
gaacucggcuaggcuccuu

SEQ ID NO: 1812889 - RNA, 19 nt, Artificial Sequence
  Description of Artificial Sequence: Synthetic oligonucleotide
cgggaaccugacagacaca

SEQ ID NO: 1812890 - RNA, 19 nt, Artificial Sequence
  Description of Artificial Sequence: Synthetic oligonucleotide
ccggagcacacacgguggu

SEQ ID NO: 1812891 - RNA, 19 nt, Artificial Sequence
  Description of Artificial Sequence: Synthetic oligonucleotide
ccggcgcguccagggacgc

SEQ ID NO: 1812892 - RNA, 19 nt, Artificial Sequence
  Description of Artificial Sequence: Synthetic oligonucleotide
cgcgggcuacguaggccuc

SEQ ID NO: 1812893 - RNA, 19 nt, Artificial Sequence
  Description of Artificial Sequence: Synthetic oligonucleotide
cgugaacccgaauggucuu

SEQ ID NO: 1812894 - RNA, 19 nt, Artificial Sequence
  Description of Artificial Sequence: Synthetic oligonucleotide
gcccaucggccugcauguc

SEQ ID NO: 1812895 - RNA, 19 nt, Artificial Sequence
  Description of Artificial Sequence: Synthetic oligonucleotide
gcgcguccagggacgcgga

SEQ ID NO: 1812896 - RNA, 19 nt, Artificial Sequence
  Description of Artificial Sequence: Synthetic oligonucleotide
cgucaggguccgggucuag

SEQ ID NO: 1812897 - RNA, 19 nt, Artificial Sequence
  Description of Artificial Sequence: Synthetic oligonucleotide
ccucacugcccgagaugau

SEQ ID NO: 1812898 - RNA, 19 nt, Artificial Sequence
  Description of Artificial Sequence: Synthetic oligonucleotide
cgacccgcgcauccaggua

SEQ ID NO: 1812899 - RNA, 19 nt, Artificial Sequence
  Description of Artificial Sequence: Synthetic oligonucleotide
gccuuucgcuccggcgcgu

SEQ ID NO: 1812900 - RNA, 19 nt, Artificial Sequence
  Description of Artificial Sequence: Synthetic oligonucleotide
ccgcccagagcuggggcgu

SEQ ID NO: 1812901 - RNA, 19 nt, Artificial Sequence
  Description of Artificial Sequence: Synthetic oligonucleotide
cgagcgccgcggggucagg

SEQ ID NO: 1812902 - RNA, 19 nt, Artificial Sequence
  Description of Artificial Sequence: Synthetic oligonucleotide
ggcgcacgggcgggacucu

SEQ ID NO: 1812903 - RNA, 19 nt, Artificial Sequence
  Description of Artificial Sequence: Synthetic oligonucleotide
ccgcggggucaggccaggu

SEQ ID NO: 1812904 - RNA, 19 nt, Artificial Sequence
  Description of Artificial Sequence: Synthetic oligonucleotide
agauuuguagaucuuaacc

SEQ ID NO: 1812905 - RNA, 19 nt, Artificial Sequence
  Description of Artificial Sequence: Synthetic oligonucleotide
acugauaaaacagacaagc

SEQ ID NO: 1812906 - RNA, 19 nt, Artificial Sequence
  Description of Artificial Sequence: Synthetic oligonucleotide
uguacugacacauuaaagc

SEQ ID NO: 1812907 - RNA, 19 nt, Artificial Sequence
  Description of Artificial Sequence: Synthetic oligonucleotide
aaucccaucagauuuguag

SEQ ID NO: 1812908 - RNA, 19 nt, Artificial Sequence
  Description of Artificial Sequence: Synthetic oligonucleotide
ugauaaaacagacaagccc

SEQ ID NO: 1812909 - RNA, 19 nt, Artificial Sequence
  Description of Artificial Sequence: Synthetic oligonucleotide
aagacaagcacaaaggcac

SEQ ID NO: 1812910 - RNA, 19 nt, Artificial Sequence
  Description of Artificial Sequence: Synthetic oligonucleotide
uuugcagugucauagauac

SEQ ID NO: 1812911 - RNA, 19 nt, Artificial Sequence
  Description of Artificial Sequence: Synthetic oligonucleotide
uacaagacaagcacaaagg

SEQ ID NO: 1812912 - RNA, 19 nt, Artificial Sequence
  Description of Artificial Sequence: Synthetic oligonucleotide
aaaggauaggaagucaggc

SEQ ID NO: 1812913 - RNA, 19 nt, Artificial Sequence
  Description of Artificial Sequence: Synthetic oligonucleotide
aauauaauugagucccauc

SEQ ID NO: 1812914 - RNA, 19 nt, Artificial Sequence
  Description of Artificial Sequence: Synthetic oligonucleotide
aaaccuaagacauaauuau

SEQ ID NO: 1812915 - RNA, 19 nt, Artificial Sequence
  Description of Artificial Sequence: Synthetic oligonucleotide
uuugaauucccuuucagcu

SEQ ID NO: 1812916 - RNA, 19 nt, Artificial Sequence
  Description of Artificial Sequence: Synthetic oligonucleotide
aauuauguguacuucuuga

SEQ ID NO: 1812917 - RNA, 19 nt, Artificial Sequence
  Description of Artificial Sequence: Synthetic oligonucleotide
uaagacauaauuaugugua

SEQ ID NO: 1812918 - RNA, 19 nt, Artificial Sequence
  Description of Artificial Sequence: Synthetic oligonucleotide
acaagacaagcacaaaggc

SEQ ID NO: 1812919 - RNA, 19 nt, Artificial Sequence
  Description of Artificial Sequence: Synthetic oligonucleotide
uauguguacuucuugaucu

SEQ ID NO: 1812920 - RNA, 19 nt, Artificial Sequence
  Description of Artificial Sequence: Synthetic oligonucleotide
caaaguagcgccaaaacug

SEQ ID NO: 1812921 - RNA, 19 nt, Artificial Sequence
  Description of Artificial Sequence: Synthetic oligonucleotide
uuuucaacugguaaguagu

SEQ ID NO: 1812922 - RNA, 19 nt, Artificial Sequence
  Description of Artificial Sequence: Synthetic oligonucleotide
uacacaaagcacaaggaug

SEQ ID NO: 1812923 - RNA, 19 nt, Artificial Sequence
  Description of Artificial Sequence: Synthetic oligonucleotide
aucuuaaccaggcagucac

SEQ ID NO: 1812924 - RNA, 19 nt, Artificial Sequence
  Description of Artificial Sequence: Synthetic oligonucleotide
auacaagacaagcacaaag

SEQ ID NO: 1812925 - RNA, 19 nt, Artificial Sequence
  Description of Artificial Sequence: Synthetic oligonucleotide
auuuguagaucuuaaccag

SEQ ID NO: 1812926 - RNA, 19 nt, Artificial Sequence
  Description of Artificial Sequence: Synthetic oligonucleotide
uguauuguacaacaugccu

SEQ ID NO: 1812927 - RNA, 19 nt, Artificial Sequence
  Description of Artificial Sequence: Synthetic oligonucleotide
uaccaaaguaggcagcucg

SEQ ID NO: 1812928 - RNA, 19 nt, Artificial Sequence
  Description of Artificial Sequence: Synthetic oligonucleotide
uaugguguauuguacaaca

SEQ ID NO: 1812929 - RNA, 19 nt, Artificial Sequence
  Description of Artificial Sequence: Synthetic oligonucleotide
uguauuuaucuuugaaggc

SEQ ID NO: 1812930 - RNA, 19 nt, Artificial Sequence
  Description of Artificial Sequence: Synthetic oligonucleotide
aaguaguugccacugauaa

SEQ ID NO: 1812931 - RNA, 19 nt, Artificial Sequence
  Description of Artificial Sequence: Synthetic oligonucleotide
guagaucuuaaccaggcag

SEQ ID NO: 1812932 - RNA, 19 nt, Artificial Sequence
  Description of Artificial Sequence: Synthetic oligonucleotide
ugaauucccuuucagcucc

SEQ ID NO: 1812933 - RNA, 19 nt, Artificial Sequence
  Description of Artificial Sequence: Synthetic oligonucleotide
agcaacagcagugacagac

SEQ ID NO: 1812934 - RNA, 19 nt, Artificial Sequence
  Description of Artificial Sequence: Synthetic oligonucleotide
ucaucauacaagacaagca

SEQ ID NO: 1812935 - RNA, 19 nt, Artificial Sequence
  Description of Artificial Sequence: Synthetic oligonucleotide
gugucaaaaggauaggaag

SEQ ID NO: 1812936 - RNA, 19 nt, Artificial Sequence
  Description of Artificial Sequence: Synthetic oligonucleotide
aaccacgcagucuauaaug

SEQ ID NO: 1812937 - RNA, 19 nt, Artificial Sequence
  Description of Artificial Sequence: Synthetic oligonucleotide
aaagcacaaggauguggcc

SEQ ID NO: 1812938 - RNA, 19 nt, Artificial Sequence
  Description of Artificial Sequence: Synthetic oligonucleotide
uagauaccaaaguaggcag

SEQ ID NO: 1812939 - RNA, 19 nt, Artificial Sequence
  Description of Artificial Sequence: Synthetic oligonucleotide
acgggcaaaaucaagaggg

SEQ ID NO: 1812940 - RNA, 19 nt, Artificial Sequence
  Description of Artificial Sequence: Synthetic oligonucleotide
cuuguauugcuuaucugcc

SEQ ID NO: 1812941 - RNA, 19 nt, Artificial Sequence
  Description of Artificial Sequence: Synthetic oligonucleotide
ucuauaaugcccuuguauu

SEQ ID NO: 1812942 - RNA, 19 nt, Artificial Sequence
  Description of Artificial Sequence: Synthetic oligonucleotide
guacugacacauuaaagcc

SEQ ID NO: 1812943 - RNA, 19 nt, Artificial Sequence
  Description of Artificial Sequence: Synthetic oligonucleotide
aagauaugguguauuguac

SEQ ID NO: 1812944 - RNA, 19 nt, Artificial Sequence
  Description of Artificial Sequence: Synthetic oligonucleotide
caucauacaagacaagcac

SEQ ID NO: 1812945 - RNA, 19 nt, Artificial Sequence
  Description of Artificial Sequence: Synthetic oligonucleotide
aaaguagcgccaaaacugg

SEQ ID NO: 1812946 - RNA, 19 nt, Artificial Sequence
  Description of Artificial Sequence: Synthetic oligonucleotide
ucauacaagacaagcacaa

SEQ ID NO: 1812947 - RNA, 19 nt, Artificial Sequence
  Description of Artificial Sequence: Synthetic oligonucleotide
cuuugaauucccuuucagc

SEQ ID NO: 1812948 - RNA, 19 nt, Artificial Sequence
  Description of Artificial Sequence: Synthetic oligonucleotide
caaaaggauaggaagucag

SEQ ID NO: 1812949 - RNA, 19 nt, Artificial Sequence
  Description of Artificial Sequence: Synthetic oligonucleotide
aaccgugucaaaaggauag

SEQ ID NO: 1812950 - RNA, 19 nt, Artificial Sequence
  Description of Artificial Sequence: Synthetic oligonucleotide
agcacaaggauguggcccc

SEQ ID NO: 1812951 - RNA, 19 nt, Artificial Sequence
  Description of Artificial Sequence: Synthetic oligonucleotide
uuggggagaaaccuaagac

SEQ ID NO: 1812952 - RNA, 19 nt, Artificial Sequence
  Description of Artificial Sequence: Synthetic oligonucleotide
auagauaccaaaguaggca

SEQ ID NO: 1812953 - RNA, 19 nt, Artificial Sequence
  Description of Artificial Sequence: Synthetic oligonucleotide
ugguguauuguacaacaug

SEQ ID NO: 1812954 - RNA, 19 nt, Artificial Sequence
  Description of Artificial Sequence: Synthetic oligonucleotide
uucaagauaugguguauug

SEQ ID NO: 1812955 - RNA, 19 nt, Artificial Sequence
  Description of Artificial Sequence: Synthetic oligonucleotide
aaaaggauaggaagucagg

SEQ ID NO: 1812956 - RNA, 19 nt, Artificial Sequence
  Description of Artificial Sequence: Synthetic oligonucleotide
gucauagauaccaaaguag

SEQ ID NO: 1812957 - RNA, 19 nt, Artificial Sequence
  Description of Artificial Sequence: Synthetic oligonucleotide
uguauugcuuaucugccgu

SEQ ID NO: 1812958 - RNA, 19 nt, Artificial Sequence
  Description of Artificial Sequence: Synthetic oligonucleotide
gauaaugcccuguacugac

SEQ ID NO: 1812959 - RNA, 19 nt, Artificial Sequence
  Description of Artificial Sequence: Synthetic oligonucleotide
uacgggcaaaaucaagagg

SEQ ID NO: 1812960 - RNA, 19 nt, Artificial Sequence
  Description of Artificial Sequence: Synthetic oligonucleotide
uauaaugcccuuguauugc

SEQ ID NO: 1812961 - RNA, 19 nt, Artificial Sequence
  Description of Artificial Sequence: Synthetic oligonucleotide
cauagauaccaaaguaggc

SEQ ID NO: 1812962 - RNA, 19 nt, Artificial Sequence
  Description of Artificial Sequence: Synthetic oligonucleotide
aagucaggccagcaacagc

SEQ ID NO: 1812963 - RNA, 19 nt, Artificial Sequence
  Description of Artificial Sequence: Synthetic oligonucleotide
uagaucuuaaccaggcagu

SEQ ID NO: 1812964 - RNA, 19 nt, Artificial Sequence
  Description of Artificial Sequence: Synthetic oligonucleotide
cucaucauacaagacaagc

SEQ ID NO: 1812965 - RNA, 19 nt, Artificial Sequence
  Description of Artificial Sequence: Synthetic oligonucleotide
uuauguguacuucuugauc

SEQ ID NO: 1812966 - RNA, 19 nt, Artificial Sequence
  Description of Artificial Sequence: Synthetic oligonucleotide
agcuugacccgcucgaugg

SEQ ID NO: 1812967 - RNA, 19 nt, Artificial Sequence
  Description of Artificial Sequence: Synthetic oligonucleotide
cugauaaaacagacaagcc

SEQ ID NO: 1812968 - RNA, 19 nt, Artificial Sequence
  Description of Artificial Sequence: Synthetic oligonucleotide
agaaaccuaagacauaauu

SEQ ID NO: 1812969 - RNA, 19 nt, Artificial Sequence
  Description of Artificial Sequence: Synthetic oligonucleotide
uuaucuuugaaggcaaagu

SEQ ID NO: 1812970 - RNA, 19 nt, Artificial Sequence
  Description of Artificial Sequence: Synthetic oligonucleotide
ucgguagaugauaaugccc

SEQ ID NO: 1812971 - RNA, 19 nt, Artificial Sequence
  Description of Artificial Sequence: Synthetic oligonucleotide
gacgaaccgugucaaaagg

SEQ ID NO: 1812972 - RNA, 19 nt, Artificial Sequence
  Description of Artificial Sequence: Synthetic oligonucleotide
uuguauugcuuaucugccg

SEQ ID NO: 1812973 - RNA, 19 nt, Artificial Sequence
  Description of Artificial Sequence: Synthetic oligonucleotide
agugucauagauaccaaag

SEQ ID NO: 1812974 - RNA, 19 nt, Artificial Sequence
  Description of Artificial Sequence: Synthetic oligonucleotide
ggguacacaaagcacaagg

SEQ ID NO: 1812975 - RNA, 19 nt, Artificial Sequence
  Description of Artificial Sequence: Synthetic oligonucleotide
ucagauuuguagaucuuaa

SEQ ID NO: 1812976 - RNA, 19 nt, Artificial Sequence
  Description of Artificial Sequence: Synthetic oligonucleotide
cuauaaugcccuuguauug

SEQ ID NO: 1812977 - RNA, 19 nt, Artificial Sequence
  Description of Artificial Sequence: Synthetic oligonucleotide
uuccuuggggauacgaacc

SEQ ID NO: 1812978 - RNA, 19 nt, Artificial Sequence
  Description of Artificial Sequence: Synthetic oligonucleotide
agauaugguguauuguaca

SEQ ID NO: 1812979 - RNA, 19 nt, Artificial Sequence
  Description of Artificial Sequence: Synthetic oligonucleotide
gaugauaaugcccuguacu

SEQ ID NO: 1812980 - RNA, 19 nt, Artificial Sequence
  Description of Artificial Sequence: Synthetic oligonucleotide
ucaagaggguacacaaagc

SEQ ID NO: 1812981 - RNA, 19 nt, Artificial Sequence
  Description of Artificial Sequence: Synthetic oligonucleotide
gguguauuguacaacaugc

SEQ ID NO: 1812982 - RNA, 19 nt, Artificial Sequence
  Description of Artificial Sequence: Synthetic oligonucleotide
agaugauaaugcccuguac

SEQ ID NO: 1812983 - RNA, 19 nt, Artificial Sequence
  Description of Artificial Sequence: Synthetic oligonucleotide
gaacguuggaccaugcacc

SEQ ID NO: 1812984 - RNA, 19 nt, Artificial Sequence
  Description of Artificial Sequence: Synthetic oligonucleotide
uacugacacauuaaagccu

SEQ ID NO: 1812985 - RNA, 19 nt, Artificial Sequence
  Description of Artificial Sequence: Synthetic oligonucleotide
uuugcuugcuggcaugcug

SEQ ID NO: 1812986 - RNA, 19 nt, Artificial Sequence
  Description of Artificial Sequence: Synthetic oligonucleotide
acauaauuauguguacuuc

SEQ ID NO: 1812987 - RNA, 19 nt, Artificial Sequence
  Description of Artificial Sequence: Synthetic oligonucleotide
uuaaagccuugguacaggc

SEQ ID NO: 1812988 - RNA, 19 nt, Artificial Sequence
  Description of Artificial Sequence: Synthetic oligonucleotide
ugcaaaguagcgccaaaac

SEQ ID NO: 1812989 - RNA, 19 nt, Artificial Sequence
  Description of Artificial Sequence: Synthetic oligonucleotide
ccuuguauugcuuaucugc

SEQ ID NO: 1812990 - RNA, 19 nt, Artificial Sequence
  Description of Artificial Sequence: Synthetic oligonucleotide
guauuguacaacaugccug

SEQ ID NO: 1812991 - RNA, 19 nt, Artificial Sequence
  Description of Artificial Sequence: Synthetic oligonucleotide
ucccuuugcagugucauag

SEQ ID NO: 1812992 - RNA, 19 nt, Artificial Sequence
  Description of Artificial Sequence: Synthetic oligonucleotide
ucugccgugauuugcuugc

SEQ ID NO: 1812993 - RNA, 19 nt, Artificial Sequence
  Description of Artificial Sequence: Synthetic oligonucleotide
cacgcagucuauaaugccc

SEQ ID NO: 1812994 - RNA, 19 nt, Artificial Sequence
  Description of Artificial Sequence: Synthetic oligonucleotide
guauuuaucuuugaaggca

SEQ ID NO: 1812995 - RNA, 19 nt, Artificial Sequence
  Description of Artificial Sequence: Synthetic oligonucleotide
uaccacgccagaaggacag

SEQ ID NO: 1812996 - RNA, 19 nt, Artificial Sequence
  Description of Artificial Sequence: Synthetic oligonucleotide
gaaaccuaagacauaauua

SEQ ID NO: 1812997 - RNA, 19 nt, Artificial Sequence
  Description of Artificial Sequence: Synthetic oligonucleotide
cucgguagaugauaaugcc

SEQ ID NO: 1812998 - RNA, 19 nt, Artificial Sequence
  Description of Artificial Sequence: Synthetic oligonucleotide
accuaagacauaauuaugu

SEQ ID NO: 1812999 - RNA, 19 nt, Artificial Sequence
  Description of Artificial Sequence: Synthetic oligonucleotide
acauuaaagccuugguaca

SEQ ID NO: 1813000 - RNA, 19 nt, Artificial Sequence
  Description of Artificial Sequence: Synthetic oligonucleotide
ggggauacgaaccacgcag

SEQ ID NO: 1813001 - RNA, 19 nt, Artificial Sequence
  Description of Artificial Sequence: Synthetic oligonucleotide
aaugcccuuguauugcuua

SEQ ID NO: 1813002 - RNA, 19 nt, Artificial Sequence
  Description of Artificial Sequence: Synthetic oligonucleotide
aagaucugcuuguauuuau

SEQ ID NO: 1813003 - RNA, 19 nt, Artificial Sequence
  Description of Artificial Sequence: Synthetic oligonucleotide
cuucgcacuuuucaacugg

SEQ ID NO: 1813004 - RNA, 19 nt, Artificial Sequence
  Description of Artificial Sequence: Synthetic oligonucleotide
guaguugccacugauaaaa

SEQ ID NO: 1813005 - RNA, 19 nt, Artificial Sequence
  Description of Artificial Sequence: Synthetic oligonucleotide
auaugguguauuguacaac

SEQ ID NO: 1813006 - RNA, 19 nt, Artificial Sequence
  Description of Artificial Sequence: Synthetic oligonucleotide
auuauguguacuucuugau

SEQ ID NO: 1813007 - RNA, 19 nt, Artificial Sequence
  Description of Artificial Sequence: Synthetic oligonucleotide
uuggggauacgaaccacgc

SEQ ID NO: 1813008 - RNA, 19 nt, Artificial Sequence
  Description of Artificial Sequence: Synthetic oligonucleotide
uaaugcccuguacugacac

SEQ ID NO: 1813009 - RNA, 19 nt, Artificial Sequence
  Description of Artificial Sequence: Synthetic oligonucleotide
guacgggcaaaaucaagag

SEQ ID NO: 1813010 - RNA, 19 nt, Artificial Sequence
  Description of Artificial Sequence: Synthetic oligonucleotide
uugccacugauaaaacaga

SEQ ID NO: 1813011 - RNA, 19 nt, Artificial Sequence
  Description of Artificial Sequence: Synthetic oligonucleotide
ugccacugauaaaacagac

SEQ ID NO: 1813012 - RNA, 19 nt, Artificial Sequence
  Description of Artificial Sequence: Synthetic oligonucleotide
auacgaaccacgcagucua

SEQ ID NO: 1813013 - RNA, 19 nt, Artificial Sequence
  Description of Artificial Sequence: Synthetic oligonucleotide
acacauuaaagccuuggua

SEQ ID NO: 1813014 - RNA, 19 nt, Artificial Sequence
  Description of Artificial Sequence: Synthetic oligonucleotide
agaauguucaagauauggu

SEQ ID NO: 1813015 - RNA, 19 nt, Artificial Sequence
  Description of Artificial Sequence: Synthetic oligonucleotide
aaccuaagacauaauuaug

SEQ ID NO: 1813016 - RNA, 19 nt, Artificial Sequence
  Description of Artificial Sequence: Synthetic oligonucleotide
agaggguacacaaagcaca

SEQ ID NO: 1813017 - RNA, 19 nt, Artificial Sequence
  Description of Artificial Sequence: Synthetic oligonucleotide
ugcuucgcacuuuucaacu

SEQ ID NO: 1813018 - RNA, 19 nt, Artificial Sequence
  Description of Artificial Sequence: Synthetic oligonucleotide
caagaggguacacaaagca

SEQ ID NO: 1813019 - RNA, 19 nt, Artificial Sequence
  Description of Artificial Sequence: Synthetic oligonucleotide
caagauaugguguauugua

SEQ ID NO: 1813020 - RNA, 19 nt, Artificial Sequence
  Description of Artificial Sequence: Synthetic oligonucleotide
ucaagauaugguguauugu

SEQ ID NO: 1813021 - RNA, 19 nt, Artificial Sequence
  Description of Artificial Sequence: Synthetic oligonucleotide
uugaauucccuuucagcuc

SEQ ID NO: 1813022 - RNA, 19 nt, Artificial Sequence
  Description of Artificial Sequence: Synthetic oligonucleotide
ucucaucauacaagacaag

SEQ ID NO: 1813023 - RNA, 19 nt, Artificial Sequence
  Description of Artificial Sequence: Synthetic oligonucleotide
uaaguaguugccacugaua

SEQ ID NO: 1813024 - RNA, 19 nt, Artificial Sequence
  Description of Artificial Sequence: Synthetic oligonucleotide
aguugccacugauaaaaca

SEQ ID NO: 1813025 - RNA, 19 nt, Artificial Sequence
  Description of Artificial Sequence: Synthetic oligonucleotide
guuccuuggggauacgaac

SEQ ID NO: 1813026 - RNA, 19 nt, Artificial Sequence
  Description of Artificial Sequence: Synthetic oligonucleotide
cuuaucugccgugauuugc

SEQ ID NO: 1813027 - RNA, 19 nt, Artificial Sequence
  Description of Artificial Sequence: Synthetic oligonucleotide
uagaugauaaugcccugua

SEQ ID NO: 1813028 - RNA, 19 nt, Artificial Sequence
  Description of Artificial Sequence: Synthetic oligonucleotide
agcucgguagaugauaaug

SEQ ID NO: 1813029 - RNA, 19 nt, Artificial Sequence
  Description of Artificial Sequence: Synthetic oligonucleotide
uccucuuguccacaccacc

SEQ ID NO: 1813030 - RNA, 19 nt, Artificial Sequence
  Description of Artificial Sequence: Synthetic oligonucleotide
uguuccuuggggauacgaa

SEQ ID NO: 1813031 - RNA, 19 nt, Artificial Sequence
  Description of Artificial Sequence: Synthetic oligonucleotide
ugaucucaucauacaagac

SEQ ID NO: 1813032 - RNA, 19 nt, Artificial Sequence
  Description of Artificial Sequence: Synthetic oligonucleotide
cacugauaaaacagacaag

SEQ ID NO: 1813033 - RNA, 19 nt, Artificial Sequence
  Description of Artificial Sequence: Synthetic oligonucleotide
ucgaugggcgcuaccgccg

SEQ ID NO: 1813034 - RNA, 19 nt, Artificial Sequence
  Description of Artificial Sequence: Synthetic oligonucleotide
agauaccaaaguaggcagc

SEQ ID NO: 1813035 - RNA, 19 nt, Artificial Sequence
  Description of Artificial Sequence: Synthetic oligonucleotide
aucucaucauacaagacaa

SEQ ID NO: 1813036 - RNA, 19 nt, Artificial Sequence
  Description of Artificial Sequence: Synthetic oligonucleotide
uuguacaacaugccugcuc

SEQ ID NO: 1813037 - RNA, 19 nt, Artificial Sequence
  Description of Artificial Sequence: Synthetic oligonucleotide
agaucuuaaccaggcaguc

SEQ ID NO: 1813038 - RNA, 19 nt, Artificial Sequence
  Description of Artificial Sequence: Synthetic oligonucleotide
cagacaagcccagagaauc

SEQ ID NO: 1813039 - RNA, 19 nt, Artificial Sequence
  Description of Artificial Sequence: Synthetic oligonucleotide
ugauaaugcccuguacuga

SEQ ID NO: 1813040 - RNA, 19 nt, Artificial Sequence
  Description of Artificial Sequence: Synthetic oligonucleotide
acggguacgggcaaaauca

SEQ ID NO: 1813041 - RNA, 19 nt, Artificial Sequence
  Description of Artificial Sequence: Synthetic oligonucleotide
agucaggccagcaacagca

SEQ ID NO: 1813042 - RNA, 19 nt, Artificial Sequence
  Description of Artificial Sequence: Synthetic oligonucleotide
agcuuuacccacaucagcu

SEQ ID NO: 1813043 - RNA, 19 nt, Artificial Sequence
  Description of Artificial Sequence: Synthetic oligonucleotide
cagauuuguagaucuuaac

SEQ ID NO: 1813044 - RNA, 19 nt, Artificial Sequence
  Description of Artificial Sequence: Synthetic oligonucleotide
aaagccuugcuuccuucau

SEQ ID NO: 1813045 - RNA, 19 nt, Artificial Sequence
  Description of Artificial Sequence: Synthetic oligonucleotide
ugcucuuggggagaaaccu

SEQ ID NO: 1813046 - RNA, 19 nt, Artificial Sequence
  Description of Artificial Sequence: Synthetic oligonucleotide
caagcacaaaggcaccacc

SEQ ID NO: 1813047 - RNA, 19 nt, Artificial Sequence
  Description of Artificial Sequence: Synthetic oligonucleotide
ugcuuaucugccgugauuu

SEQ ID NO: 1813048 - RNA, 19 nt, Artificial Sequence
  Description of Artificial Sequence: Synthetic oligonucleotide
cuaagacauaauuaugugu

SEQ ID NO: 1813049 - RNA, 19 nt, Artificial Sequence
  Description of Artificial Sequence: Synthetic oligonucleotide
accgccguuuuggagaugg

SEQ ID NO: 1813050 - RNA, 19 nt, Artificial Sequence
  Description of Artificial Sequence: Synthetic oligonucleotide
acaagcacaaaggcaccac

SEQ ID NO: 1813051 - RNA, 19 nt, Artificial Sequence
  Description of Artificial Sequence: Synthetic oligonucleotide
ucuuggggagaaaccuaag

SEQ ID NO: 1813052 - RNA, 19 nt, Artificial Sequence
  Description of Artificial Sequence: Synthetic oligonucleotide
ucuuaaccaggcagucacc

SEQ ID NO: 1813053 - RNA, 19 nt, Artificial Sequence
  Description of Artificial Sequence: Synthetic oligonucleotide
uauugcuuaucugccguga

SEQ ID NO: 1813054 - RNA, 19 nt, Artificial Sequence
  Description of Artificial Sequence: Synthetic oligonucleotide
aagccuugguacaggcccc

SEQ ID NO: 1813055 - RNA, 19 nt, Artificial Sequence
  Description of Artificial Sequence: Synthetic oligonucleotide
auaaugcccuuguauugcu

SEQ ID NO: 1813056 - RNA, 19 nt, Artificial Sequence
  Description of Artificial Sequence: Synthetic oligonucleotide
auguucaagauauggugua

SEQ ID NO: 1813057 - RNA, 19 nt, Artificial Sequence
  Description of Artificial Sequence: Synthetic oligonucleotide
gaagucaggccagcaacag

SEQ ID NO: 1813058 - RNA, 19 nt, Artificial Sequence
  Description of Artificial Sequence: Synthetic oligonucleotide
agcacaaaggcaccaccca

SEQ ID NO: 1813059 - RNA, 19 nt, Artificial Sequence
  Description of Artificial Sequence: Synthetic oligonucleotide
auaaaacagacaagcccag

SEQ ID NO: 1813060 - RNA, 19 nt, Artificial Sequence
  Description of Artificial Sequence: Synthetic oligonucleotide
uugcuucgcacuuuucaac

SEQ ID NO: 1813061 - RNA, 19 nt, Artificial Sequence
  Description of Artificial Sequence: Synthetic oligonucleotide
aucauacaagacaagcaca

SEQ ID NO: 1813062 - RNA, 19 nt, Artificial Sequence
  Description of Artificial Sequence: Synthetic oligonucleotide
gacauaauuauguguacuu

SEQ ID NO: 1813063 - RNA, 19 nt, Artificial Sequence
  Description of Artificial Sequence: Synthetic oligonucleotide
cucgaugggcgcuaccgcc

SEQ ID NO: 1813064 - RNA, 19 nt, Artificial Sequence
  Description of Artificial Sequence: Synthetic oligonucleotide
uuaccacgccagaaggaca

SEQ ID NO: 1813065 - RNA, 19 nt, Artificial Sequence
  Description of Artificial Sequence: Synthetic oligonucleotide
caugccugcucuuggggag

SEQ ID NO: 1813066 - RNA, 19 nt, Artificial Sequence
  Description of Artificial Sequence: Synthetic oligonucleotide
caacaugccugcucuuggg

SEQ ID NO: 1813067 - RNA, 19 nt, Artificial Sequence
  Description of Artificial Sequence: Synthetic oligonucleotide
uucgcacuuuucaacuggu

SEQ ID NO: 1813068 - RNA, 19 nt, Artificial Sequence
  Description of Artificial Sequence: Synthetic oligonucleotide
gacggguacgggcaaaauc

SEQ ID NO: 1813069 - RNA, 19 nt, Artificial Sequence
  Description of Artificial Sequence: Synthetic oligonucleotide
aaugcccuguacugacaca

SEQ ID NO: 1813070 - RNA, 19 nt, Artificial Sequence
  Description of Artificial Sequence: Synthetic oligonucleotide
aaagaucugcuuguauuua

SEQ ID NO: 1813071 - RNA, 19 nt, Artificial Sequence
  Description of Artificial Sequence: Synthetic oligonucleotide
gccgugauuugcuugcugg

SEQ ID NO: 1813072 - RNA, 19 nt, Artificial Sequence
  Description of Artificial Sequence: Synthetic oligonucleotide
cagcuuuacccacaucagc

SEQ ID NO: 1813073 - RNA, 19 nt, Artificial Sequence
  Description of Artificial Sequence: Synthetic oligonucleotide
cagguucccugcaaaguag

SEQ ID NO: 1813074 - RNA, 19 nt, Artificial Sequence
  Description of Artificial Sequence: Synthetic oligonucleotide
gaucugcuuguauuuaucu

SEQ ID NO: 1813075 - RNA, 19 nt, Artificial Sequence
  Description of Artificial Sequence: Synthetic oligonucleotide
guguauuguacaacaugcc

SEQ ID NO: 1813076 - RNA, 19 nt, Artificial Sequence
  Description of Artificial Sequence: Synthetic oligonucleotide
ucgacgaaccgugucaaaa

SEQ ID NO: 1813077 - RNA, 19 nt, Artificial Sequence
  Description of Artificial Sequence: Synthetic oligonucleotide
ugagaacguuggaccaugc

SEQ ID NO: 1813078 - RNA, 19 nt, Artificial Sequence
  Description of Artificial Sequence: Synthetic oligonucleotide
guagcgccaaaacuggguc

SEQ ID NO: 1813079 - RNA, 19 nt, Artificial Sequence
  Description of Artificial Sequence: Synthetic oligonucleotide
aaguagcgccaaaacuggg

SEQ ID NO: 1813080 - RNA, 19 nt, Artificial Sequence
  Description of Artificial Sequence: Synthetic oligonucleotide
uggggauacgaaccacgca

SEQ ID NO: 1813081 - RNA, 19 nt, Artificial Sequence
  Description of Artificial Sequence: Synthetic oligonucleotide
uagcgccaaaacugggucc

SEQ ID NO: 1813082 - RNA, 19 nt, Artificial Sequence
  Description of Artificial Sequence: Synthetic oligonucleotide
uggaccaugcacccuugaa

SEQ ID NO: 1813083 - RNA, 19 nt, Artificial Sequence
  Description of Artificial Sequence: Synthetic oligonucleotide
gauaggaagucaggccagc

SEQ ID NO: 1813084 - RNA, 19 nt, Artificial Sequence
  Description of Artificial Sequence: Synthetic oligonucleotide
gacacauuaaagccuuggu

SEQ ID NO: 1813085 - RNA, 19 nt, Artificial Sequence
  Description of Artificial Sequence: Synthetic oligonucleotide
accaaaguaggcagcucgg

SEQ ID NO: 1813086 - RNA, 19 nt, Artificial Sequence
  Description of Artificial Sequence: Synthetic oligonucleotide
gauaccaaaguaggcagcu

SEQ ID NO: 1813087 - RNA, 19 nt, Artificial Sequence
  Description of Artificial Sequence: Synthetic oligonucleotide
ugcuuguauuuaucuuuga

SEQ ID NO: 1813088 - RNA, 19 nt, Artificial Sequence
  Description of Artificial Sequence: Synthetic oligonucleotide
aucagauuuguagaucuua

SEQ ID NO: 1813089 - RNA, 19 nt, Artificial Sequence
  Description of Artificial Sequence: Synthetic oligonucleotide
aguaguugccacugauaaa

SEQ ID NO: 1813090 - RNA, 19 nt, Artificial Sequence
  Description of Artificial Sequence: Synthetic oligonucleotide
gguacgggcaaaaucaaga

SEQ ID NO: 1813091 - RNA, 19 nt, Artificial Sequence
  Description of Artificial Sequence: Synthetic oligonucleotide
guucccugcaaaguagcgc

SEQ ID NO: 1813092 - RNA, 19 nt, Artificial Sequence
  Description of Artificial Sequence: Synthetic oligonucleotide
uuaaccaggcagucaccaa

SEQ ID NO: 1813093 - RNA, 19 nt, Artificial Sequence
  Description of Artificial Sequence: Synthetic oligonucleotide
gucuauaaugcccuuguau

SEQ ID NO: 1813094 - RNA, 19 nt, Artificial Sequence
  Description of Artificial Sequence: Synthetic oligonucleotide
aucugccgugauuugcuug

SEQ ID NO: 1813095 - RNA, 19 nt, Artificial Sequence
  Description of Artificial Sequence: Synthetic oligonucleotide
acugacacauuaaagccuu

SEQ ID NO: 1813096 - RNA, 19 nt, Artificial Sequence
  Description of Artificial Sequence: Synthetic oligonucleotide
aaucaagaggguacacaaa

SEQ ID NO: 1813097 - RNA, 19 nt, Artificial Sequence
  Description of Artificial Sequence: Synthetic oligonucleotide
ggcgcuaccgccguuuugg

SEQ ID NO: 1813098 - RNA, 19 nt, Artificial Sequence
  Description of Artificial Sequence: Synthetic oligonucleotide
auugcuuaucugccgugau

SEQ ID NO: 1813099 - RNA, 19 nt, Artificial Sequence
  Description of Artificial Sequence: Synthetic oligonucleotide
gggaucuggaagcauuccc

SEQ ID NO: 1813100 - RNA, 19 nt, Artificial Sequence
  Description of Artificial Sequence: Synthetic oligonucleotide
uguucaagauaugguguau

SEQ ID NO: 1813101 - RNA, 19 nt, Artificial Sequence
  Description of Artificial Sequence: Synthetic oligonucleotide
gcuaccgccguuuuggaga

SEQ ID NO: 1813102 - RNA, 19 nt, Artificial Sequence
  Description of Artificial Sequence: Synthetic oligonucleotide
agcugcuagacggguacgg

SEQ ID NO: 1813103 - RNA, 19 nt, Artificial Sequence
  Description of Artificial Sequence: Synthetic oligonucleotide
aguagcgccaaaacugggu

SEQ ID NO: 1813104 - RNA, 19 nt, Artificial Sequence
  Description of Artificial Sequence: Synthetic oligonucleotide
cuuaaccaggcagucacca

SEQ ID NO: 1813105 - RNA, 19 nt, Artificial Sequence
  Description of Artificial Sequence: Synthetic oligonucleotide
uacccacaucagcugcuag

SEQ ID NO: 1813106 - RNA, 19 nt, Artificial Sequence
  Description of Artificial Sequence: Synthetic oligonucleotide
caugccccugagaacguug

SEQ ID NO: 1813107 - RNA, 19 nt, Artificial Sequence
  Description of Artificial Sequence: Synthetic oligonucleotide
guacacaaagcacaaggau

SEQ ID NO: 1813108 - RNA, 19 nt, Artificial Sequence
  Description of Artificial Sequence: Synthetic oligonucleotide
gagaacguuggaccaugca

SEQ ID NO: 1813109 - RNA, 19 nt, Artificial Sequence
  Description of Artificial Sequence: Synthetic oligonucleotide
uugcuuaucugccgugauu

SEQ ID NO: 1813110 - RNA, 19 nt, Artificial Sequence
  Description of Artificial Sequence: Synthetic oligonucleotide
gcucgguagaugauaaugc

SEQ ID NO: 1813111 - RNA, 19 nt, Artificial Sequence
  Description of Artificial Sequence: Synthetic oligonucleotide
acaucagcugcuagacggg

SEQ ID NO: 1813112 - RNA, 19 nt, Artificial Sequence
  Description of Artificial Sequence: Synthetic oligonucleotide
auucccuuugcagugucau

SEQ ID NO: 1813113 - RNA, 19 nt, Artificial Sequence
  Description of Artificial Sequence: Synthetic oligonucleotide
cuuugcagugucauagaua

SEQ ID NO: 1813114 - RNA, 19 nt, Artificial Sequence
  Description of Artificial Sequence: Synthetic oligonucleotide
agcgccaaaacuggguccu

SEQ ID NO: 1813115 - RNA, 19 nt, Artificial Sequence
  Description of Artificial Sequence: Synthetic oligonucleotide
aaggcaaaguugagagccu

SEQ ID NO: 1813116 - RNA, 19 nt, Artificial Sequence
  Description of Artificial Sequence: Synthetic oligonucleotide
cacgccagaaggacaggac

SEQ ID NO: 1813117 - RNA, 19 nt, Artificial Sequence
  Description of Artificial Sequence: Synthetic oligonucleotide
cugaugccagguucccugc

SEQ ID NO: 1813118 - RNA, 19 nt, Artificial Sequence
  Description of Artificial Sequence: Synthetic oligonucleotide
ccucuuguccacaccaccc

SEQ ID NO: 1813119 - RNA, 19 nt, Artificial Sequence
  Description of Artificial Sequence: Synthetic oligonucleotide
ugccgugauuugcuugcug

SEQ ID NO: 1813120 - RNA, 19 nt, Artificial Sequence
  Description of Artificial Sequence: Synthetic oligonucleotide
cugagaacguuggaccaug

SEQ ID NO: 1813121 - RNA, 19 nt, Artificial Sequence
  Description of Artificial Sequence: Synthetic oligonucleotide
uugcagugucauagauacc

SEQ ID NO: 1813122 - RNA, 19 nt, Artificial Sequence
  Description of Artificial Sequence: Synthetic oligonucleotide
ccuaaucccaucagauuug

SEQ ID NO: 1813123 - RNA, 19 nt, Artificial Sequence
  Description of Artificial Sequence: Synthetic oligonucleotide
cucuuggggagaaaccuaa

SEQ ID NO: 1813124 - RNA, 19 nt, Artificial Sequence
  Description of Artificial Sequence: Synthetic oligonucleotide
caccaaggccuuugaauuc

SEQ ID NO: 1813125 - RNA, 19 nt, Artificial Sequence
  Description of Artificial Sequence: Synthetic oligonucleotide
uucuugggaucuggaagca

SEQ ID NO: 1813126 - RNA, 19 nt, Artificial Sequence
  Description of Artificial Sequence: Synthetic oligonucleotide
cuugacccgcucgaugggc

SEQ ID NO: 1813127 - RNA, 19 nt, Artificial Sequence
  Description of Artificial Sequence: Synthetic oligonucleotide
gguacacaaagcacaagga

SEQ ID NO: 1813128 - RNA, 19 nt, Artificial Sequence
  Description of Artificial Sequence: Synthetic oligonucleotide
caugcugcaccugcagcag

SEQ ID NO: 1813129 - RNA, 19 nt, Artificial Sequence
  Description of Artificial Sequence: Synthetic oligonucleotide
guaaguaguugccacugau

SEQ ID NO: 1813130 - RNA, 19 nt, Artificial Sequence
  Description of Artificial Sequence: Synthetic oligonucleotide
gcuuuacccacaucagcug

SEQ ID NO: 1813131 - RNA, 19 nt, Artificial Sequence
  Description of Artificial Sequence: Synthetic oligonucleotide
gauacgaaccacgcagucu

SEQ ID NO: 1813132 - RNA, 19 nt, Artificial Sequence
  Description of Artificial Sequence: Synthetic oligonucleotide
gaugccagguucccugcaa

SEQ ID NO: 1813133 - RNA, 19 nt, Artificial Sequence
  Description of Artificial Sequence: Synthetic oligonucleotide
ccguuuuggagauggcugc

SEQ ID NO: 1813134 - RNA, 19 nt, Artificial Sequence
  Description of Artificial Sequence: Synthetic oligonucleotide
ccagcuuuacccacaucag

SEQ ID NO: 1813135 - RNA, 19 nt, Artificial Sequence
  Description of Artificial Sequence: Synthetic oligonucleotide
aggcaaaguugagagccug

SEQ ID NO: 1813136 - RNA, 19 nt, Artificial Sequence
  Description of Artificial Sequence: Synthetic oligonucleotide
caaaacuggguccucuugu

SEQ ID NO: 1813137 - RNA, 19 nt, Artificial Sequence
  Description of Artificial Sequence: Synthetic oligonucleotide
acgaaccgugucaaaagga

SEQ ID NO: 1813138 - RNA, 19 nt, Artificial Sequence
  Description of Artificial Sequence: Synthetic oligonucleotide
auaggaagucaggccagca

SEQ ID NO: 1813139 - RNA, 19 nt, Artificial Sequence
  Description of Artificial Sequence: Synthetic oligonucleotide
gccguuuuggagauggcug

SEQ ID NO: 1813140 - RNA, 19 nt, Artificial Sequence
  Description of Artificial Sequence: Synthetic oligonucleotide
agucuauaaugcccuugua

SEQ ID NO: 1813141 - RNA, 19 nt, Artificial Sequence
  Description of Artificial Sequence: Synthetic oligonucleotide
ggaccaugcacccuugaaa

SEQ ID NO: 1813142 - RNA, 19 nt, Artificial Sequence
  Description of Artificial Sequence: Synthetic oligonucleotide
ucccugcaaaguagcgcca

SEQ ID NO: 1813143 - RNA, 19 nt, Artificial Sequence
  Description of Artificial Sequence: Synthetic oligonucleotide
ggcaaaguugagagccugg

SEQ ID NO: 1813144 - RNA, 19 nt, Artificial Sequence
  Description of Artificial Sequence: Synthetic oligonucleotide
ggauaggaagucaggccag

SEQ ID NO: 1813145 - RNA, 19 nt, Artificial Sequence
  Description of Artificial Sequence: Synthetic oligonucleotide
ugacccgcucgaugggcgc

SEQ ID NO: 1813146 - RNA, 19 nt, Artificial Sequence
  Description of Artificial Sequence: Synthetic oligonucleotide
ucgcacuuuucaacuggua

SEQ ID NO: 1813147 - RNA, 19 nt, Artificial Sequence
  Description of Artificial Sequence: Synthetic oligonucleotide
cuuucagcuccagcuuuac

SEQ ID NO: 1813148 - RNA, 19 nt, Artificial Sequence
  Description of Artificial Sequence: Synthetic oligonucleotide
acaggccccuaaucccauc

SEQ ID NO: 1813149 - RNA, 19 nt, Artificial Sequence
  Description of Artificial Sequence: Synthetic oligonucleotide
gguucccugcaaaguagcg

SEQ ID NO: 1813150 - RNA, 19 nt, Artificial Sequence
  Description of Artificial Sequence: Synthetic oligonucleotide
cagucuauaaugcccuugu

SEQ ID NO: 1813151 - RNA, 19 nt, Artificial Sequence
  Description of Artificial Sequence: Synthetic oligonucleotide
augcccuuguauugcuuau

SEQ ID NO: 1813152 - RNA, 19 nt, Artificial Sequence
  Description of Artificial Sequence: Synthetic oligonucleotide
cugacacauuaaagccuug

SEQ ID NO: 1813153 - RNA, 19 nt, Artificial Sequence
  Description of Artificial Sequence: Synthetic oligonucleotide
guacaggccccuaauccca

SEQ ID NO: 1813154 - RNA, 19 nt, Artificial Sequence
  Description of Artificial Sequence: Synthetic oligonucleotide
guagaugauaaugcccugu

SEQ ID NO: 1813155 - RNA, 19 nt, Artificial Sequence
  Description of Artificial Sequence: Synthetic oligonucleotide
aggguacacaaagcacaag

SEQ ID NO: 1813156 - RNA, 19 nt, Artificial Sequence
  Description of Artificial Sequence: Synthetic oligonucleotide
gaaccgugucaaaaggaua

SEQ ID NO: 1813157 - RNA, 19 nt, Artificial Sequence
  Description of Artificial Sequence: Synthetic oligonucleotide
acuuuucaacugguaagua

SEQ ID NO: 1813158 - RNA, 19 nt, Artificial Sequence
  Description of Artificial Sequence: Synthetic oligonucleotide
cacuuuucaacugguaagu

SEQ ID NO: 1813159 - RNA, 19 nt, Artificial Sequence
  Description of Artificial Sequence: Synthetic oligonucleotide
cagcuugacccgcucgaug

SEQ ID NO: 1813160 - RNA, 19 nt, Artificial Sequence
  Description of Artificial Sequence: Synthetic oligonucleotide
uaucugccgugauuugcuu

SEQ ID NO: 1813161 - RNA, 19 nt, Artificial Sequence
  Description of Artificial Sequence: Synthetic oligonucleotide
cuugggaucuggaagcauu

SEQ ID NO: 1813162 - RNA, 19 nt, Artificial Sequence
  Description of Artificial Sequence: Synthetic oligonucleotide
auuguacaacaugccugcu

SEQ ID NO: 1813163 - RNA, 19 nt, Artificial Sequence
  Description of Artificial Sequence: Synthetic oligonucleotide
gaucuggaagcauucccuu

SEQ ID NO: 1813164 - RNA, 19 nt, Artificial Sequence
  Description of Artificial Sequence: Synthetic oligonucleotide
auaaugcccuguacugaca

SEQ ID NO: 1813165 - RNA, 19 nt, Artificial Sequence
  Description of Artificial Sequence: Synthetic oligonucleotide
uagacggguacgggcaaaa

SEQ ID NO: 1813166 - RNA, 19 nt, Artificial Sequence
  Description of Artificial Sequence: Synthetic oligonucleotide
gcuucgcacuuuucaacug

SEQ ID NO: 1813167 - RNA, 19 nt, Artificial Sequence
  Description of Artificial Sequence: Synthetic oligonucleotide
ggauacgaaccacgcaguc

SEQ ID NO: 1813168 - RNA, 19 nt, Artificial Sequence
  Description of Artificial Sequence: Synthetic oligonucleotide
uucccuuugcagugucaua

SEQ ID NO: 1813169 - RNA, 19 nt, Artificial Sequence
  Description of Artificial Sequence: Synthetic oligonucleotide
gugauuugcuugcuggcau

SEQ ID NO: 1813170 - RNA, 19 nt, Artificial Sequence
  Description of Artificial Sequence: Synthetic oligonucleotide
gguaaguaguugccacuga

SEQ ID NO: 1813171 - RNA, 19 nt, Artificial Sequence
  Description of Artificial Sequence: Synthetic oligonucleotide
auuugcuugcuggcaugcu

SEQ ID NO: 1813172 - RNA, 19 nt, Artificial Sequence
  Description of Artificial Sequence: Synthetic oligonucleotide
ugcccuuguauugcuuauc

SEQ ID NO: 1813173 - RNA, 19 nt, Artificial Sequence
  Description of Artificial Sequence: Synthetic oligonucleotide
uacgaaccacgcagucuau

SEQ ID NO: 1813174 - RNA, 19 nt, Artificial Sequence
  Description of Artificial Sequence: Synthetic oligonucleotide
ccaucagauuuguagaucu

SEQ ID NO: 1813175 - RNA, 19 nt, Artificial Sequence
  Description of Artificial Sequence: Synthetic oligonucleotide
ucuugggaucuggaagcau

SEQ ID NO: 1813176 - RNA, 19 nt, Artificial Sequence
  Description of Artificial Sequence: Synthetic oligonucleotide
gcugcuagacggguacggg

SEQ ID NO: 1813177 - RNA, 19 nt, Artificial Sequence
  Description of Artificial Sequence: Synthetic oligonucleotide
ccaaaacuggguccucuug

SEQ ID NO: 1813178 - RNA, 19 nt, Artificial Sequence
  Description of Artificial Sequence: Synthetic oligonucleotide
cacccaugccccugagaac

SEQ ID NO: 1813179 - RNA, 19 nt, Artificial Sequence
  Description of Artificial Sequence: Synthetic oligonucleotide
cacaaagcacaaggaugug

SEQ ID NO: 1813180 - RNA, 19 nt, Artificial Sequence
  Description of Artificial Sequence: Synthetic oligonucleotide
cgacgaaccgugucaaaag

SEQ ID NO: 1813181 - RNA, 19 nt, Artificial Sequence
  Description of Artificial Sequence: Synthetic oligonucleotide
gcagucuauaaugcccuug

SEQ ID NO: 1813182 - RNA, 19 nt, Artificial Sequence
  Description of Artificial Sequence: Synthetic oligonucleotide
gaaccacgcagucuauaau

SEQ ID NO: 1813183 - RNA, 19 nt, Artificial Sequence
  Description of Artificial Sequence: Synthetic oligonucleotide
gcuuaucugccgugauuug

SEQ ID NO: 1813184 - RNA, 19 nt, Artificial Sequence
  Description of Artificial Sequence: Synthetic oligonucleotide
caggccccuaaucccauca

SEQ ID NO: 1813185 - RNA, 19 nt, Artificial Sequence
  Description of Artificial Sequence: Synthetic oligonucleotide
cauacaagacaagcacaaa

SEQ ID NO: 1813186 - RNA, 19 nt, Artificial Sequence
  Description of Artificial Sequence: Synthetic oligonucleotide
gcuugacccgcucgauggg

SEQ ID NO: 1813187 - RNA, 19 nt, Artificial Sequence
  Description of Artificial Sequence: Synthetic oligonucleotide
cauucccuuugcaguguca

SEQ ID NO: 1813188 - RNA, 19 nt, Artificial Sequence
  Description of Artificial Sequence: Synthetic oligonucleotide
ccuguacugacacauuaaa

SEQ ID NO: 1813189 - RNA, 19 nt, Artificial Sequence
  Description of Artificial Sequence: Synthetic oligonucleotide
cugcaaaguagcgccaaaa

SEQ ID NO: 1813190 - RNA, 19 nt, Artificial Sequence
  Description of Artificial Sequence: Synthetic oligonucleotide
caaaguugagagccugggu

SEQ ID NO: 1813191 - RNA, 19 nt, Artificial Sequence
  Description of Artificial Sequence: Synthetic oligonucleotide
guuggaccaugcacccuug

SEQ ID NO: 1813192 - RNA, 19 nt, Artificial Sequence
  Description of Artificial Sequence: Synthetic oligonucleotide
ggguacgggcaaaaucaag

SEQ ID NO: 1813193 - RNA, 19 nt, Artificial Sequence
  Description of Artificial Sequence: Synthetic oligonucleotide
caccugaugccagguuccc

SEQ ID NO: 1813194 - RNA, 19 nt, Artificial Sequence
  Description of Artificial Sequence: Synthetic oligonucleotide
ugcccuguacugacacauu

SEQ ID NO: 1813195 - RNA, 19 nt, Artificial Sequence
  Description of Artificial Sequence: Synthetic oligonucleotide
cuugguacaggccccuaau

SEQ ID NO: 1813196 - RNA, 19 nt, Artificial Sequence
  Description of Artificial Sequence: Synthetic oligonucleotide
ccacaucagcugcuagacg

SEQ ID NO: 1813197 - RNA, 19 nt, Artificial Sequence
  Description of Artificial Sequence: Synthetic oligonucleotide
gcucgaugggcgcuaccgc

SEQ ID NO: 1813198 - RNA, 19 nt, Artificial Sequence
  Description of Artificial Sequence: Synthetic oligonucleotide
cccuuguauugcuuaucug

SEQ ID NO: 1813199 - RNA, 19 nt, Artificial Sequence
  Description of Artificial Sequence: Synthetic oligonucleotide
accacgccagaaggacagg

SEQ ID NO: 1813200 - RNA, 19 nt, Artificial Sequence
  Description of Artificial Sequence: Synthetic oligonucleotide
guucaagauaugguguauu

SEQ ID NO: 1813201 - RNA, 19 nt, Artificial Sequence
  Description of Artificial Sequence: Synthetic oligonucleotide
guccucuuguccacaccac

SEQ ID NO: 1813202 - RNA, 19 nt, Artificial Sequence
  Description of Artificial Sequence: Synthetic oligonucleotide
cuguuccuuggggauacga

SEQ ID NO: 1813203 - RNA, 19 nt, Artificial Sequence
  Description of Artificial Sequence: Synthetic oligonucleotide
cuaaucccaucagauuugu

SEQ ID NO: 1813204 - RNA, 19 nt, Artificial Sequence
  Description of Artificial Sequence: Synthetic oligonucleotide
ggccccuaaucccaucaga

SEQ ID NO: 1813205 - RNA, 19 nt, Artificial Sequence
  Description of Artificial Sequence: Synthetic oligonucleotide
cgcggcaccaccugaugcc

SEQ ID NO: 1813206 - RNA, 19 nt, Artificial Sequence
  Description of Artificial Sequence: Synthetic oligonucleotide
accugaugccagguucccu

SEQ ID NO: 1813207 - RNA, 19 nt, Artificial Sequence
  Description of Artificial Sequence: Synthetic oligonucleotide
cccuaaucccaucagauuu

SEQ ID NO: 1813208 - RNA, 19 nt, Artificial Sequence
  Description of Artificial Sequence: Synthetic oligonucleotide
cgcucgaugggcgcuaccg

SEQ ID NO: 1813209 - RNA, 19 nt, Artificial Sequence
  Description of Artificial Sequence: Synthetic oligonucleotide
augccugcucuuggggaga

SEQ ID NO: 1813210 - RNA, 19 nt, Artificial Sequence
  Description of Artificial Sequence: Synthetic oligonucleotide
acgaaccacgcagucuaua

SEQ ID NO: 1813211 - RNA, 19 nt, Artificial Sequence
  Description of Artificial Sequence: Synthetic oligonucleotide
ugggcgcuaccgccguuuu

SEQ ID NO: 1813212 - RNA, 19 nt, Artificial Sequence
  Description of Artificial Sequence: Synthetic oligonucleotide
gggcaaaaucaagagggua

SEQ ID NO: 1813213 - RNA, 19 nt, Artificial Sequence
  Description of Artificial Sequence: Synthetic oligonucleotide
ccagguucccugcaaagua

SEQ ID NO: 1813214 - RNA, 19 nt, Artificial Sequence
  Description of Artificial Sequence: Synthetic oligonucleotide
cuuugacucccgggcucug

SEQ ID NO: 1813215 - RNA, 19 nt, Artificial Sequence
  Description of Artificial Sequence: Synthetic oligonucleotide
agacggguacgggcaaaau

SEQ ID NO: 1813216 - RNA, 19 nt, Artificial Sequence
  Description of Artificial Sequence: Synthetic oligonucleotide
augggcgcuaccgccguuu

SEQ ID NO: 1813217 - RNA, 19 nt, Artificial Sequence
  Description of Artificial Sequence: Synthetic oligonucleotide
acguuggaccaugcacccu

SEQ ID NO: 1813218 - RNA, 19 nt, Artificial Sequence
  Description of Artificial Sequence: Synthetic oligonucleotide
gucgacgaaccgugucaaa

SEQ ID NO: 1813219 - RNA, 19 nt, Artificial Sequence
  Description of Artificial Sequence: Synthetic oligonucleotide
cgaaccacgcagucuauaa

SEQ ID NO: 1813220 - RNA, 19 nt, Artificial Sequence
  Description of Artificial Sequence: Synthetic oligonucleotide
ugccugcucuuggggagaa

SEQ ID NO: 1813221 - RNA, 19 nt, Artificial Sequence
  Description of Artificial Sequence: Synthetic oligonucleotide
ccgcggcaccaccugaugc

SEQ ID NO: 1813222 - RNA, 19 nt, Artificial Sequence
  Description of Artificial Sequence: Synthetic oligonucleotide
ggcagcucgguagaugaua

SEQ ID NO: 1813223 - RNA, 19 nt, Artificial Sequence
  Description of Artificial Sequence: Synthetic oligonucleotide
ggccagcaacagcagugac

SEQ ID NO: 1813224 - RNA, 19 nt, Artificial Sequence
  Description of Artificial Sequence: Synthetic oligonucleotide
gccuggguggggaaguauc

SEQ ID NO: 1813225 - RNA, 19 nt, Artificial Sequence
  Description of Artificial Sequence: Synthetic oligonucleotide
caccacccaugccccugag

SEQ ID NO: 1813226 - RNA, 19 nt, Artificial Sequence
  Description of Artificial Sequence: Synthetic oligonucleotide
aggcaccacccaugccccu

SEQ ID NO: 1813227 - RNA, 19 nt, Artificial Sequence
  Description of Artificial Sequence: Synthetic oligonucleotide
cuaccgccguuuuggagau

SEQ ID NO: 1813228 - RNA, 19 nt, Artificial Sequence
  Description of Artificial Sequence: Synthetic oligonucleotide
cuagacggguacgggcaaa

SEQ ID NO: 1813229 - RNA, 19 nt, Artificial Sequence
  Description of Artificial Sequence: Synthetic oligonucleotide
gcuagacggguacgggcaa

SEQ ID NO: 1813230 - RNA, 19 nt, Artificial Sequence
  Description of Artificial Sequence: Synthetic oligonucleotide
cgugauuugcuugcuggca

SEQ ID NO: 1813231 - RNA, 19 nt, Artificial Sequence
  Description of Artificial Sequence: Synthetic oligonucleotide
cgaaccgugucaaaaggau

SEQ ID NO: 1813232 - RNA, 19 nt, Artificial Sequence
  Description of Artificial Sequence: Synthetic oligonucleotide
gggauacgaaccacgcagu

SEQ ID NO: 1813233 - RNA, 19 nt, Artificial Sequence
  Description of Artificial Sequence: Synthetic oligonucleotide
gccccuaaucccaucagau

SEQ ID NO: 1813234 - RNA, 19 nt, Artificial Sequence
  Description of Artificial Sequence: Synthetic oligonucleotide
cgcuaccgccguuuuggag

SEQ ID NO: 1813235 - RNA, 19 nt, Artificial Sequence
  Description of Artificial Sequence: Synthetic oligonucleotide
gggcgcuaccgccguuuug

SEQ ID NO: 1813236 - RNA, 19 nt, Artificial Sequence
  Description of Artificial Sequence: Synthetic oligonucleotide
uaccgccguuuuggagaug

SEQ ID NO: 1813237 - RNA, 19 nt, Artificial Sequence
  Description of Artificial Sequence: Synthetic oligonucleotide
ccacgccagaaggacagga

SEQ ID NO: 1813238 - RNA, 19 nt, Artificial Sequence
  Description of Artificial Sequence: Synthetic oligonucleotide
ccugcaaaguagcgccaaa

SEQ ID NO: 1813239 - RNA, 19 nt, Artificial Sequence
  Description of Artificial Sequence: Synthetic oligonucleotide
gcuuugacucccgggcucu

SEQ ID NO: 1813240 - RNA, 19 nt, Artificial Sequence
  Description of Artificial Sequence: Synthetic oligonucleotide
gagccuggguggggaagua

SEQ ID NO: 1813241 - RNA, 19 nt, Artificial Sequence
  Description of Artificial Sequence: Synthetic oligonucleotide
gcggcaccaccugaugcca

SEQ ID NO: 1813242 - RNA, 19 nt, Artificial Sequence
  Description of Artificial Sequence: Synthetic oligonucleotide
gacccgcucgaugggcgcu

SEQ ID NO: 1813243 - RNA, 19 nt, Artificial Sequence
  Description of Artificial Sequence: Synthetic oligonucleotide
ccgccguuuuggagauggc

SEQ ID NO: 1813244 - RNA, 19 nt, Artificial Sequence
  Description of Artificial Sequence: Synthetic oligonucleotide
cccgcggcaccaccugaug

SEQ ID NO: 1813245 - RNA, 19 nt, Artificial Sequence
  Description of Artificial Sequence: Synthetic oligonucleotide
gcgcuaccgccguuuugga

SEQ ID NO: 1813246 - RNA, 19 nt, Artificial Sequence
  Description of Artificial Sequence: Synthetic oligonucleotide
ccaaaguaggcagcucggu

SEQ ID NO: 1813247 - RNA, 19 nt, Artificial Sequence
  Description of Artificial Sequence: Synthetic oligonucleotide
gaugggcgcuaccgccguu

SEQ ID NO: 1813248 - RNA, 19 nt, Artificial Sequence
  Description of Artificial Sequence: Synthetic oligonucleotide
cguuggaccaugcacccuu

SEQ ID NO: 1813249 - RNA, 19 nt, Artificial Sequence
  Description of Artificial Sequence: Synthetic oligonucleotide
cggguacgggcaaaaucaa

SEQ ID NO: 1813250 - RNA, 19 nt, Artificial Sequence
  Description of Artificial Sequence: Synthetic oligonucleotide
cccugcaaaguagcgccaa

SEQ ID NO: 1813251 - RNA, 19 nt, Artificial Sequence
  Description of Artificial Sequence: Synthetic oligonucleotide
ccccuaaucccaucagauu

SEQ ID NO: 1813252 - RNA, 19 nt, Artificial Sequence
  Description of Artificial Sequence: Synthetic oligonucleotide
cgggcaaaaucaagagggu

SEQ ID NO: 1813253 - RNA, 19 nt, Artificial Sequence
  Description of Artificial Sequence: Synthetic oligonucleotide
cugccgugauuugcuugcu

SEQ ID NO: 1813254 - RNA, 19 nt, Artificial Sequence
  Description of Artificial Sequence: Synthetic oligonucleotide
ccgcucgaugggcgcuacc

SEQ ID NO: 1813255 - RNA, 19 nt, Artificial Sequence
  Description of Artificial Sequence: Synthetic oligonucleotide
gcaccaccugaugccaggu

SEQ ID NO: 1813256 - RNA, 19 nt, Artificial Sequence
  Description of Artificial Sequence: Synthetic oligonucleotide
gcgccaaaacuggguccuc

SEQ ID NO: 1813257 - RNA, 19 nt, Artificial Sequence
  Description of Artificial Sequence: Synthetic oligonucleotide
cgccguuuuggagauggcu

SEQ ID NO: 1813258 - RNA, 19 nt, Artificial Sequence
  Description of Artificial Sequence: Synthetic oligonucleotide
cccgcucgaugggcgcuac

SEQ ID NO: 1813259 - RNA, 19 nt, Artificial Sequence
  Description of Artificial Sequence: Synthetic oligonucleotide
cgccaaaacuggguccucu

SEQ ID NO: 1813260 - RNA, 19 nt, Artificial Sequence
  Description of Artificial Sequence: Synthetic oligonucleotide
cgaugggcgcuaccgccgu

SEQ ID NO: 1813261 - RNA, 19 nt, Artificial Sequence
  Description of Artificial Sequence: Synthetic oligonucleotide
ccccgcggcaccaccugau

SEQ ID NO: 1813262 - RNA, 19 nt, Artificial Sequence
  Description of Artificial Sequence: Synthetic oligonucleotide
ccaugccccugagaacguu

SEQ ID NO: 1813263 - RNA, 19 nt, Artificial Sequence
  Description of Artificial Sequence: Synthetic oligonucleotide
cuuguuucaaccacgaugg

SEQ ID NO: 1813264 - RNA, 19 nt, Artificial Sequence
  Description of Artificial Sequence: Synthetic oligonucleotide
auaccuauuaccuaguaag

SEQ ID NO: 1813265 - RNA, 19 nt, Artificial Sequence
  Description of Artificial Sequence: Synthetic oligonucleotide
aacuauaccuauuaccuag

SEQ ID NO: 1813266 - RNA, 19 nt, Artificial Sequence
  Description of Artificial Sequence: Synthetic oligonucleotide
guuaaaaucaaaagcaacg

SEQ ID NO: 1813267 - RNA, 19 nt, Artificial Sequence
  Description of Artificial Sequence: Synthetic oligonucleotide
aauguuguggucaaagugg

SEQ ID NO: 1813268 - RNA, 19 nt, Artificial Sequence
  Description of Artificial Sequence: Synthetic oligonucleotide
aacggauacacaugagugc

SEQ ID NO: 1813269 - RNA, 19 nt, Artificial Sequence
  Description of Artificial Sequence: Synthetic oligonucleotide
auguuaauggcauucuucg

SEQ ID NO: 1813270 - RNA, 19 nt, Artificial Sequence
  Description of Artificial Sequence: Synthetic oligonucleotide
uuuauucccagcaauugcc

SEQ ID NO: 1813271 - RNA, 19 nt, Artificial Sequence
  Description of Artificial Sequence: Synthetic oligonucleotide
aucacaauguuuucugggc

SEQ ID NO: 1813272 - RNA, 19 nt, Artificial Sequence
  Description of Artificial Sequence: Synthetic oligonucleotide
agaacaggguacaagaugc

SEQ ID NO: 1813273 - RNA, 19 nt, Artificial Sequence
  Description of Artificial Sequence: Synthetic oligonucleotide
gacaacuauaccuauuacc

SEQ ID NO: 1813274 - RNA, 19 nt, Artificial Sequence
  Description of Artificial Sequence: Synthetic oligonucleotide
acuuguuucaaccacgaug

SEQ ID NO: 1813275 - RNA, 19 nt, Artificial Sequence
  Description of Artificial Sequence: Synthetic oligonucleotide
uuucauaaaccgaaggcca

SEQ ID NO: 1813276 - RNA, 19 nt, Artificial Sequence
  Description of Artificial Sequence: Synthetic oligonucleotide
cuuagcauccuucaggggc

SEQ ID NO: 1813277 - RNA, 19 nt, Artificial Sequence
  Description of Artificial Sequence: Synthetic oligonucleotide
uaugaaaugaauccuguuu

SEQ ID NO: 1813278 - RNA, 19 nt, Artificial Sequence
  Description of Artificial Sequence: Synthetic oligonucleotide
aguaagugcaaccccugcc

SEQ ID NO: 1813279 - RNA, 19 nt, Artificial Sequence
  Description of Artificial Sequence: Synthetic oligonucleotide
ugaaaugaauccuguuugg

SEQ ID NO: 1813280 - RNA, 19 nt, Artificial Sequence
  Description of Artificial Sequence: Synthetic oligonucleotide
uaaaccgaaggccauguug

SEQ ID NO: 1813281 - RNA, 19 nt, Artificial Sequence
  Description of Artificial Sequence: Synthetic oligonucleotide
agcuccucgauguuaaugg

SEQ ID NO: 1813282 - RNA, 19 nt, Artificial Sequence
  Description of Artificial Sequence: Synthetic oligonucleotide
auacacaugagugcgaggg

SEQ ID NO: 1813283 - RNA, 19 nt, Artificial Sequence
  Description of Artificial Sequence: Synthetic oligonucleotide
aaagugguccuggacaaac

SEQ ID NO: 1813284 - RNA, 19 nt, Artificial Sequence
  Description of Artificial Sequence: Synthetic oligonucleotide
ucucuuuagggaauguccc

SEQ ID NO: 1813285 - RNA, 19 nt, Artificial Sequence
  Description of Artificial Sequence: Synthetic oligonucleotide
aauguuuucugggccgugc

SEQ ID NO: 1813286 - RNA, 19 nt, Artificial Sequence
  Description of Artificial Sequence: Synthetic oligonucleotide
acaacuauaccuauuaccu

SEQ ID NO: 1813287 - RNA, 19 nt, Artificial Sequence
  Description of Artificial Sequence: Synthetic oligonucleotide
uagaacaggguacaagaug

SEQ ID NO: 1813288 - RNA, 19 nt, Artificial Sequence
  Description of Artificial Sequence: Synthetic oligonucleotide
ucccguaucgccaucaugu

SEQ ID NO: 1813289 - RNA, 19 nt, Artificial Sequence
  Description of Artificial Sequence: Synthetic oligonucleotide
guuucauaaaccgaaggcc

SEQ ID NO: 1813290 - RNA, 19 nt, Artificial Sequence
  Description of Artificial Sequence: Synthetic oligonucleotide
gaaguucguuuccacaagg

SEQ ID NO: 1813291 - RNA, 19 nt, Artificial Sequence
  Description of Artificial Sequence: Synthetic oligonucleotide
guaagugcaaccccugccg

SEQ ID NO: 1813292 - RNA, 19 nt, Artificial Sequence
  Description of Artificial Sequence: Synthetic oligonucleotide
aaugguggggcuaauguug

SEQ ID NO: 1813293 - RNA, 19 nt, Artificial Sequence
  Description of Artificial Sequence: Synthetic oligonucleotide
uuaccuaguaagugcaacc

SEQ ID NO: 1813294 - RNA, 19 nt, Artificial Sequence
  Description of Artificial Sequence: Synthetic oligonucleotide
aggcgcaaaaccugggucc

SEQ ID NO: 1813295 - RNA, 19 nt, Artificial Sequence
  Description of Artificial Sequence: Synthetic oligonucleotide
caucacaauguuuucuggg

SEQ ID NO: 1813296 - RNA, 19 nt, Artificial Sequence
  Description of Artificial Sequence: Synthetic oligonucleotide
agaaacaccaggaagggug

SEQ ID NO: 1813297 - RNA, 19 nt, Artificial Sequence
  Description of Artificial Sequence: Synthetic oligonucleotide
uacacuaugacggcugcgg

SEQ ID NO: 1813298 - RNA, 19 nt, Artificial Sequence
  Description of Artificial Sequence: Synthetic oligonucleotide
acuuugagcucccguaucg

SEQ ID NO: 1813299 - RNA, 19 nt, Artificial Sequence
  Description of Artificial Sequence: Synthetic oligonucleotide
ucauacacuaugacggcug

SEQ ID NO: 1813300 - RNA, 19 nt, Artificial Sequence
  Description of Artificial Sequence: Synthetic oligonucleotide
aagcaacggauacacauga

SEQ ID NO: 1813301 - RNA, 19 nt, Artificial Sequence
  Description of Artificial Sequence: Synthetic oligonucleotide
gaugcgaagguccuaggug

SEQ ID NO: 1813302 - RNA, 19 nt, Artificial Sequence
  Description of Artificial Sequence: Synthetic oligonucleotide
caacggauacacaugagug

SEQ ID NO: 1813303 - RNA, 19 nt, Artificial Sequence
  Description of Artificial Sequence: Synthetic oligonucleotide
aaacucguagaacagggua

SEQ ID NO: 1813304 - RNA, 19 nt, Artificial Sequence
  Description of Artificial Sequence: Synthetic oligonucleotide
ucacguucaugcaaaauuc

SEQ ID NO: 1813305 - RNA, 19 nt, Artificial Sequence
  Description of Artificial Sequence: Synthetic oligonucleotide
uggacaaaccgacacacaa

SEQ ID NO: 1813306 - RNA, 19 nt, Artificial Sequence
  Description of Artificial Sequence: Synthetic oligonucleotide
guuaauggcauucuucgca

SEQ ID NO: 1813307 - RNA, 19 nt, Artificial Sequence
  Description of Artificial Sequence: Synthetic oligonucleotide
gguuaggugaguuuucccg

SEQ ID NO: 1813308 - RNA, 19 nt, Artificial Sequence
  Description of Artificial Sequence: Synthetic oligonucleotide
ucacaauguuuucugggcc

SEQ ID NO: 1813309 - RNA, 19 nt, Artificial Sequence
  Description of Artificial Sequence: Synthetic oligonucleotide
uguuuccauuuucaugggg

SEQ ID NO: 1813310 - RNA, 19 nt, Artificial Sequence
  Description of Artificial Sequence: Synthetic oligonucleotide
uauaccuauuaccuaguaa

SEQ ID NO: 1813311 - RNA, 19 nt, Artificial Sequence
  Description of Artificial Sequence: Synthetic oligonucleotide
gauccucgguaguacaugg

SEQ ID NO: 1813312 - RNA, 19 nt, Artificial Sequence
  Description of Artificial Sequence: Synthetic oligonucleotide
auuaccuaguaagugcaac

SEQ ID NO: 1813313 - RNA, 19 nt, Artificial Sequence
  Description of Artificial Sequence: Synthetic oligonucleotide
aggaacccuucacagaaac

SEQ ID NO: 1813314 - RNA, 19 nt, Artificial Sequence
  Description of Artificial Sequence: Synthetic oligonucleotide
acaaggcacaguuuugguc

SEQ ID NO: 1813315 - RNA, 19 nt, Artificial Sequence
  Description of Artificial Sequence: Synthetic oligonucleotide
ucccuaauaucugagaggu

SEQ ID NO: 1813316 - RNA, 19 nt, Artificial Sequence
  Description of Artificial Sequence: Synthetic oligonucleotide
gugugcguuucauaaaccg

SEQ ID NO: 1813317 - RNA, 19 nt, Artificial Sequence
  Description of Artificial Sequence: Synthetic oligonucleotide
ugugugauggcaugacugc

SEQ ID NO: 1813318 - RNA, 19 nt, Artificial Sequence
  Description of Artificial Sequence: Synthetic oligonucleotide
accuaguaagugcaacccc

SEQ ID NO: 1813319 - RNA, 19 nt, Artificial Sequence
  Description of Artificial Sequence: Synthetic oligonucleotide
cacgauggcaccuauggac

SEQ ID NO: 1813320 - RNA, 19 nt, Artificial Sequence
  Description of Artificial Sequence: Synthetic oligonucleotide
cacaauguuuucugggccg

SEQ ID NO: 1813321 - RNA, 19 nt, Artificial Sequence
  Description of Artificial Sequence: Synthetic oligonucleotide
cuucgcacuuguuucaacc

SEQ ID NO: 1813322 - RNA, 19 nt, Artificial Sequence
  Description of Artificial Sequence: Synthetic oligonucleotide
ugugcguuucauaaaccga

SEQ ID NO: 1813323 - RNA, 19 nt, Artificial Sequence
  Description of Artificial Sequence: Synthetic oligonucleotide
uuucccgaguuuucuaucc

SEQ ID NO: 1813324 - RNA, 19 nt, Artificial Sequence
  Description of Artificial Sequence: Synthetic oligonucleotide
acggauacacaugagugcg

SEQ ID NO: 1813325 - RNA, 19 nt, Artificial Sequence
  Description of Artificial Sequence: Synthetic oligonucleotide
cacacaaugcuugauuucc

SEQ ID NO: 1813326 - RNA, 19 nt, Artificial Sequence
  Description of Artificial Sequence: Synthetic oligonucleotide
aaaccgaaggccauguugu

SEQ ID NO: 1813327 - RNA, 19 nt, Artificial Sequence
  Description of Artificial Sequence: Synthetic oligonucleotide
ucuauccucucuuuaggga

SEQ ID NO: 1813328 - RNA, 19 nt, Artificial Sequence
  Description of Artificial Sequence: Synthetic oligonucleotide
uuagcauccuucaggggca

SEQ ID NO: 1813329 - RNA, 19 nt, Artificial Sequence
  Description of Artificial Sequence: Synthetic oligonucleotide
gauguuaauggcauucuuc

SEQ ID NO: 1813330 - RNA, 19 nt, Artificial Sequence
  Description of Artificial Sequence: Synthetic oligonucleotide
aacccuucacagaaacacc

SEQ ID NO: 1813331 - RNA, 19 nt, Artificial Sequence
  Description of Artificial Sequence: Synthetic oligonucleotide
augacaacuauaccuauua

SEQ ID NO: 1813332 - RNA, 19 nt, Artificial Sequence
  Description of Artificial Sequence: Synthetic oligonucleotide
augagugcgagggaaacuc

SEQ ID NO: 1813333 - RNA, 19 nt, Artificial Sequence
  Description of Artificial Sequence: Synthetic oligonucleotide
aaagcaacggauacacaug

SEQ ID NO: 1813334 - RNA, 19 nt, Artificial Sequence
  Description of Artificial Sequence: Synthetic oligonucleotide
ugucuaggcgcaaaaccug

SEQ ID NO: 1813335 - RNA, 19 nt, Artificial Sequence
  Description of Artificial Sequence: Synthetic oligonucleotide
acuaugacggcugcggccg

SEQ ID NO: 1813336 - RNA, 19 nt, Artificial Sequence
  Description of Artificial Sequence: Synthetic oligonucleotide
aaaucaaaagcaacggaua

SEQ ID NO: 1813337 - RNA, 19 nt, Artificial Sequence
  Description of Artificial Sequence: Synthetic oligonucleotide
cacaaugcuugauuucccg

SEQ ID NO: 1813338 - RNA, 19 nt, Artificial Sequence
  Description of Artificial Sequence: Synthetic oligonucleotide
guuaggguccuucugugug

SEQ ID NO: 1813339 - RNA, 19 nt, Artificial Sequence
  Description of Artificial Sequence: Synthetic oligonucleotide
ugcaaaauucagccacugc

SEQ ID NO: 1813340 - RNA, 19 nt, Artificial Sequence
  Description of Artificial Sequence: Synthetic oligonucleotide
uuaggugaguuuucccgag

SEQ ID NO: 1813341 - RNA, 19 nt, Artificial Sequence
  Description of Artificial Sequence: Synthetic oligonucleotide
uguuaauggcauucuucgc

SEQ ID NO: 1813342 - RNA, 19 nt, Artificial Sequence
  Description of Artificial Sequence: Synthetic oligonucleotide
caugcuacuggucucccag

SEQ ID NO: 1813343 - RNA, 19 nt, Artificial Sequence
  Description of Artificial Sequence: Synthetic oligonucleotide
acacacaaugcuugauuuc

SEQ ID NO: 1813344 - RNA, 19 nt, Artificial Sequence
  Description of Artificial Sequence: Synthetic oligonucleotide
caugcaaugcugcucacuc

SEQ ID NO: 1813345 - RNA, 19 nt, Artificial Sequence
  Description of Artificial Sequence: Synthetic oligonucleotide
uaccuauuaccuaguaagu

SEQ ID NO: 1813346 - RNA, 19 nt, Artificial Sequence
  Description of Artificial Sequence: Synthetic oligonucleotide
uuugagcucccguaucgcc

SEQ ID NO: 1813347 - RNA, 19 nt, Artificial Sequence
  Description of Artificial Sequence: Synthetic oligonucleotide
ugcguuucauaaaccgaag

SEQ ID NO: 1813348 - RNA, 19 nt, Artificial Sequence
  Description of Artificial Sequence: Synthetic oligonucleotide
uacaagaugcgaagguccu

SEQ ID NO: 1813349 - RNA, 19 nt, Artificial Sequence
  Description of Artificial Sequence: Synthetic oligonucleotide
ucuaggcgcaaaaccuggg

SEQ ID NO: 1813350 - RNA, 19 nt, Artificial Sequence
  Description of Artificial Sequence: Synthetic oligonucleotide
uggcccuuggguuagcagc

SEQ ID NO: 1813351 - RNA, 19 nt, Artificial Sequence
  Description of Artificial Sequence: Synthetic oligonucleotide
uccucgauguuaauggcau

SEQ ID NO: 1813352 - RNA, 19 nt, Artificial Sequence
  Description of Artificial Sequence: Synthetic oligonucleotide
aauggcauucuucgcacuu

SEQ ID NO: 1813353 - RNA, 19 nt, Artificial Sequence
  Description of Artificial Sequence: Synthetic oligonucleotide
cuauuaccuaguaagugca

SEQ ID NO: 1813354 - RNA, 19 nt, Artificial Sequence
  Description of Artificial Sequence: Synthetic oligonucleotide
augcgaagguccuaggugu

SEQ ID NO: 1813355 - RNA, 19 nt, Artificial Sequence
  Description of Artificial Sequence: Synthetic oligonucleotide
uaccuaguaagugcaaccc

SEQ ID NO: 1813356 - RNA, 19 nt, Artificial Sequence
  Description of Artificial Sequence: Synthetic oligonucleotide
guacaagaugcgaaggucc

SEQ ID NO: 1813357 - RNA, 19 nt, Artificial Sequence
  Description of Artificial Sequence: Synthetic oligonucleotide
gauacacaugagugcgagg

SEQ ID NO: 1813358 - RNA, 19 nt, Artificial Sequence
  Description of Artificial Sequence: Synthetic oligonucleotide
ugagugcgagggaaacucg

SEQ ID NO: 1813359 - RNA, 19 nt, Artificial Sequence
  Description of Artificial Sequence: Synthetic oligonucleotide
ugguccuggacaaaccgac

SEQ ID NO: 1813360 - RNA, 19 nt, Artificial Sequence
  Description of Artificial Sequence: Synthetic oligonucleotide
uccagcccaagcaggaacc

SEQ ID NO: 1813361 - RNA, 19 nt, Artificial Sequence
  Description of Artificial Sequence: Synthetic oligonucleotide
ugacaacuauaccuauuac

SEQ ID NO: 1813362 - RNA, 19 nt, Artificial Sequence
  Description of Artificial Sequence: Synthetic oligonucleotide
uuggguuagcagcaccgcc

SEQ ID NO: 1813363 - RNA, 19 nt, Artificial Sequence
  Description of Artificial Sequence: Synthetic oligonucleotide
guucguuuccacaaggcac

SEQ ID NO: 1813364 - RNA, 19 nt, Artificial Sequence
  Description of Artificial Sequence: Synthetic oligonucleotide
ccagcaggcaguuaguccg

SEQ ID NO: 1813365 - RNA, 19 nt, Artificial Sequence
  Description of Artificial Sequence: Synthetic oligonucleotide
aagugguccuggacaaacc

SEQ ID NO: 1813366 - RNA, 19 nt, Artificial Sequence
  Description of Artificial Sequence: Synthetic oligonucleotide
uccuccgagcuucauuugc

SEQ ID NO: 1813367 - RNA, 19 nt, Artificial Sequence
  Description of Artificial Sequence: Synthetic oligonucleotide
guuaguccggagguuaggg

SEQ ID NO: 1813368 - RNA, 19 nt, Artificial Sequence
  Description of Artificial Sequence: Synthetic oligonucleotide
aagccugaucccuccacug

SEQ ID NO: 1813369 - RNA, 19 nt, Artificial Sequence
  Description of Artificial Sequence: Synthetic oligonucleotide
ucacauuuauucccagcaa

SEQ ID NO: 1813370 - RNA, 19 nt, Artificial Sequence
  Description of Artificial Sequence: Synthetic oligonucleotide
ugcaacccaguccaaauuu

SEQ ID NO: 1813371 - RNA, 19 nt, Artificial Sequence
  Description of Artificial Sequence: Synthetic oligonucleotide
uuaggguccuucugugugc

SEQ ID NO: 1813372 - RNA, 19 nt, Artificial Sequence
  Description of Artificial Sequence: Synthetic oligonucleotide
uugagcucccguaucgcca

SEQ ID NO: 1813373 - RNA, 19 nt, Artificial Sequence
  Description of Artificial Sequence: Synthetic oligonucleotide
accuauuaccuaguaagug

SEQ ID NO: 1813374 - RNA, 19 nt, Artificial Sequence
  Description of Artificial Sequence: Synthetic oligonucleotide
guacaugggcgccagugag

SEQ ID NO: 1813375 - RNA, 19 nt, Artificial Sequence
  Description of Artificial Sequence: Synthetic oligonucleotide
cuuuagggaaugucccagc

SEQ ID NO: 1813376 - RNA, 19 nt, Artificial Sequence
  Description of Artificial Sequence: Synthetic oligonucleotide
caagaugcgaagguccuag

SEQ ID NO: 1813377 - RNA, 19 nt, Artificial Sequence
  Description of Artificial Sequence: Synthetic oligonucleotide
gacggcucgggcuucuucc

SEQ ID NO: 1813378 - RNA, 19 nt, Artificial Sequence
  Description of Artificial Sequence: Synthetic oligonucleotide
ucguagaacaggguacaag

SEQ ID NO: 1813379 - RNA, 19 nt, Artificial Sequence
  Description of Artificial Sequence: Synthetic oligonucleotide
aaccgacacacaaugcuug

SEQ ID NO: 1813380 - RNA, 19 nt, Artificial Sequence
  Description of Artificial Sequence: Synthetic oligonucleotide
ugccgugugcguuucauaa

SEQ ID NO: 1813381 - RNA, 19 nt, Artificial Sequence
  Description of Artificial Sequence: Synthetic oligonucleotide
acaaaccgacacacaaugc

SEQ ID NO: 1813382 - RNA, 19 nt, Artificial Sequence
  Description of Artificial Sequence: Synthetic oligonucleotide
acaugagugcgagggaaac

SEQ ID NO: 1813383 - RNA, 19 nt, Artificial Sequence
  Description of Artificial Sequence: Synthetic oligonucleotide
aacaggguacaagaugcga

SEQ ID NO: 1813384 - RNA, 19 nt, Artificial Sequence
  Description of Artificial Sequence: Synthetic oligonucleotide
uaguccggagguuaggguc

SEQ ID NO: 1813385 - RNA, 19 nt, Artificial Sequence
  Description of Artificial Sequence: Synthetic oligonucleotide
caacggugggaucuggcgg

SEQ ID NO: 1813386 - RNA, 19 nt, Artificial Sequence
  Description of Artificial Sequence: Synthetic oligonucleotide
gugaaguucguuuccacaa

SEQ ID NO: 1813387 - RNA, 19 nt, Artificial Sequence
  Description of Artificial Sequence: Synthetic oligonucleotide
gaagguccuaggugucugg

SEQ ID NO: 1813388 - RNA, 19 nt, Artificial Sequence
  Description of Artificial Sequence: Synthetic oligonucleotide
acaaugcuugauuucccga

SEQ ID NO: 1813389 - RNA, 19 nt, Artificial Sequence
  Description of Artificial Sequence: Synthetic oligonucleotide
guuaggugaguuuucccga

SEQ ID NO: 1813390 - RNA, 19 nt, Artificial Sequence
  Description of Artificial Sequence: Synthetic oligonucleotide
ugcuacuggucucccagca

SEQ ID NO: 1813391 - RNA, 19 nt, Artificial Sequence
  Description of Artificial Sequence: Synthetic oligonucleotide
uccccgagaagacacacuu

SEQ ID NO: 1813392 - RNA, 19 nt, Artificial Sequence
  Description of Artificial Sequence: Synthetic oligonucleotide
agguaugaaaugaauccug

SEQ ID NO: 1813393 - RNA, 19 nt, Artificial Sequence
  Description of Artificial Sequence: Synthetic oligonucleotide
cuaguaagugcaaccccug

SEQ ID NO: 1813394 - RNA, 19 nt, Artificial Sequence
  Description of Artificial Sequence: Synthetic oligonucleotide
gcuaauguuguggucaaag

SEQ ID NO: 1813395 - RNA, 19 nt, Artificial Sequence
  Description of Artificial Sequence: Synthetic oligonucleotide
aguccggagguuagggucc

SEQ ID NO: 1813396 - RNA, 19 nt, Artificial Sequence
  Description of Artificial Sequence: Synthetic oligonucleotide
ugcgagggaaacucguaga

SEQ ID NO: 1813397 - RNA, 19 nt, Artificial Sequence
  Description of Artificial Sequence: Synthetic oligonucleotide
aagugcaaccccugccgug

SEQ ID NO: 1813398 - RNA, 19 nt, Artificial Sequence
  Description of Artificial Sequence: Synthetic oligonucleotide
uaggcgcaaaaccuggguc

SEQ ID NO: 1813399 - RNA, 19 nt, Artificial Sequence
  Description of Artificial Sequence: Synthetic oligonucleotide
cauacacuaugacggcugc

SEQ ID NO: 1813400 - RNA, 19 nt, Artificial Sequence
  Description of Artificial Sequence: Synthetic oligonucleotide
ucauaaaccgaaggccaug

SEQ ID NO: 1813401 - RNA, 19 nt, Artificial Sequence
  Description of Artificial Sequence: Synthetic oligonucleotide
ggagggguugucuaggcgc

SEQ ID NO: 1813402 - RNA, 19 nt, Artificial Sequence
  Description of Artificial Sequence: Synthetic oligonucleotide
agaugcgaagguccuaggu

SEQ ID NO: 1813403 - RNA, 19 nt, Artificial Sequence
  Description of Artificial Sequence: Synthetic oligonucleotide
augcuacuggucucccagc

SEQ ID NO: 1813404 - RNA, 19 nt, Artificial Sequence
  Description of Artificial Sequence: Synthetic oligonucleotide
uauuaccuaguaagugcaa

SEQ ID NO: 1813405 - RNA, 19 nt, Artificial Sequence
  Description of Artificial Sequence: Synthetic oligonucleotide
cacuaugacggcugcggcc

SEQ ID NO: 1813406 - RNA, 19 nt, Artificial Sequence
  Description of Artificial Sequence: Synthetic oligonucleotide
acugcaacccaguccaaau

SEQ ID NO: 1813407 - RNA, 19 nt, Artificial Sequence
  Description of Artificial Sequence: Synthetic oligonucleotide
uaauaucugagaggucaca

SEQ ID NO: 1813408 - RNA, 19 nt, Artificial Sequence
  Description of Artificial Sequence: Synthetic oligonucleotide
cuauccucucuuuagggaa

SEQ ID NO: 1813409 - RNA, 19 nt, Artificial Sequence
  Description of Artificial Sequence: Synthetic oligonucleotide
uaagugcaaccccugccgu

SEQ ID NO: 1813410 - RNA, 19 nt, Artificial Sequence
  Description of Artificial Sequence: Synthetic oligonucleotide
aggcaguuaguccggaggu

SEQ ID NO: 1813411 - RNA, 19 nt, Artificial Sequence
  Description of Artificial Sequence: Synthetic oligonucleotide
ugguuaggugaguuuuccc

SEQ ID NO: 1813412 - RNA, 19 nt, Artificial Sequence
  Description of Artificial Sequence: Synthetic oligonucleotide
caaaaccuggguccagccc

SEQ ID NO: 1813413 - RNA, 19 nt, Artificial Sequence
  Description of Artificial Sequence: Synthetic oligonucleotide
cguuucauaaaccgaaggc

SEQ ID NO: 1813414 - RNA, 19 nt, Artificial Sequence
  Description of Artificial Sequence: Synthetic oligonucleotide
gaacaggguacaagaugcg

SEQ ID NO: 1813415 - RNA, 19 nt, Artificial Sequence
  Description of Artificial Sequence: Synthetic oligonucleotide
uuaguccggagguuagggu

SEQ ID NO: 1813416 - RNA, 19 nt, Artificial Sequence
  Description of Artificial Sequence: Synthetic oligonucleotide
gugcgagggaaacucguag

SEQ ID NO: 1813417 - RNA, 19 nt, Artificial Sequence
  Description of Artificial Sequence: Synthetic oligonucleotide
ccuaauaucugagagguca

SEQ ID NO: 1813418 - RNA, 19 nt, Artificial Sequence
  Description of Artificial Sequence: Synthetic oligonucleotide
aaccgaaggccauguugug

SEQ ID NO: 1813419 - RNA, 19 nt, Artificial Sequence
  Description of Artificial Sequence: Synthetic oligonucleotide
ucuggcggcugauuccuug

SEQ ID NO: 1813420 - RNA, 19 nt, Artificial Sequence
  Description of Artificial Sequence: Synthetic oligonucleotide
uugugaaguucguuuccac

SEQ ID NO: 1813421 - RNA, 19 nt, Artificial Sequence
  Description of Artificial Sequence: Synthetic oligonucleotide
accuauggacucagcauac

SEQ ID NO: 1813422 - RNA, 19 nt, Artificial Sequence
  Description of Artificial Sequence: Synthetic oligonucleotide
gaugccccaaugguggggc

SEQ ID NO: 1813423 - RNA, 19 nt, Artificial Sequence
  Description of Artificial Sequence: Synthetic oligonucleotide
gucuaggcgcaaaaccugg

SEQ ID NO: 1813424 - RNA, 19 nt, Artificial Sequence
  Description of Artificial Sequence: Synthetic oligonucleotide
uauccucucuuuagggaau

SEQ ID NO: 1813425 - RNA, 19 nt, Artificial Sequence
  Description of Artificial Sequence: Synthetic oligonucleotide
gcguuucauaaaccgaagg

SEQ ID NO: 1813426 - RNA, 19 nt, Artificial Sequence
  Description of Artificial Sequence: Synthetic oligonucleotide
agguuaggguccuucugug

SEQ ID NO: 1813427 - RNA, 19 nt, Artificial Sequence
  Description of Artificial Sequence: Synthetic oligonucleotide
gaucccuccacuguuucca

SEQ ID NO: 1813428 - RNA, 19 nt, Artificial Sequence
  Description of Artificial Sequence: Synthetic oligonucleotide
aaaccgacacacaaugcuu

SEQ ID NO: 1813429 - RNA, 19 nt, Artificial Sequence
  Description of Artificial Sequence: Synthetic oligonucleotide
cagcccagcaugcuacugg

SEQ ID NO: 1813430 - RNA, 19 nt, Artificial Sequence
  Description of Artificial Sequence: Synthetic oligonucleotide
ucgauguuaauggcauucu

SEQ ID NO: 1813431 - RNA, 19 nt, Artificial Sequence
  Description of Artificial Sequence: Synthetic oligonucleotide
uggcaugacugcuggguca

SEQ ID NO: 1813432 - RNA, 19 nt, Artificial Sequence
  Description of Artificial Sequence: Synthetic oligonucleotide
uucaggggcaccucccuaa

SEQ ID NO: 1813433 - RNA, 19 nt, Artificial Sequence
  Description of Artificial Sequence: Synthetic oligonucleotide
ugugugcaccugacacugg

SEQ ID NO: 1813434 - RNA, 19 nt, Artificial Sequence
  Description of Artificial Sequence: Synthetic oligonucleotide
accgaaggccauguugugg

SEQ ID NO: 1813435 - RNA, 19 nt, Artificial Sequence
  Description of Artificial Sequence: Synthetic oligonucleotide
ugaucccuccacuguuucc

SEQ ID NO: 1813436 - RNA, 19 nt, Artificial Sequence
  Description of Artificial Sequence: Synthetic oligonucleotide
gguggggcuaauguugugg

SEQ ID NO: 1813437 - RNA, 19 nt, Artificial Sequence
  Description of Artificial Sequence: Synthetic oligonucleotide
caaaccgacacacaaugcu

SEQ ID NO: 1813438 - RNA, 19 nt, Artificial Sequence
  Description of Artificial Sequence: Synthetic oligonucleotide
uacaugggcgccagugagu

SEQ ID NO: 1813439 - RNA, 19 nt, Artificial Sequence
  Description of Artificial Sequence: Synthetic oligonucleotide
ccucccuaauaucugagag

SEQ ID NO: 1813440 - RNA, 19 nt, Artificial Sequence
  Description of Artificial Sequence: Synthetic oligonucleotide
ccaucaugugcucugggcc

SEQ ID NO: 1813441 - RNA, 19 nt, Artificial Sequence
  Description of Artificial Sequence: Synthetic oligonucleotide
aguuaguccggagguuagg

SEQ ID NO: 1813442 - RNA, 19 nt, Artificial Sequence
  Description of Artificial Sequence: Synthetic oligonucleotide
uucccgaguuuucuauccu

SEQ ID NO: 1813443 - RNA, 19 nt, Artificial Sequence
  Description of Artificial Sequence: Synthetic oligonucleotide
ccuuggguuagcagcaccg

SEQ ID NO: 1813444 - RNA, 19 nt, Artificial Sequence
  Description of Artificial Sequence: Synthetic oligonucleotide
uuguuucaaccacgauggc

SEQ ID NO: 1813445 - RNA, 19 nt, Artificial Sequence
  Description of Artificial Sequence: Synthetic oligonucleotide
acucguagaacaggguaca

SEQ ID NO: 1813446 - RNA, 19 nt, Artificial Sequence
  Description of Artificial Sequence: Synthetic oligonucleotide
uggugguuaggugaguuuu

SEQ ID NO: 1813447 - RNA, 19 nt, Artificial Sequence
  Description of Artificial Sequence: Synthetic oligonucleotide
acauuuauucccagcaauu

SEQ ID NO: 1813448 - RNA, 19 nt, Artificial Sequence
  Description of Artificial Sequence: Synthetic oligonucleotide
ggauacacaugagugcgag

SEQ ID NO: 1813449 - RNA, 19 nt, Artificial Sequence
  Description of Artificial Sequence: Synthetic oligonucleotide
acacacuuugagcucccgu

SEQ ID NO: 1813450 - RNA, 19 nt, Artificial Sequence
  Description of Artificial Sequence: Synthetic oligonucleotide
augaauccuguuuggugau

SEQ ID NO: 1813451 - RNA, 19 nt, Artificial Sequence
  Description of Artificial Sequence: Synthetic oligonucleotide
uaauggcauucuucgcacu

SEQ ID NO: 1813452 - RNA, 19 nt, Artificial Sequence
  Description of Artificial Sequence: Synthetic oligonucleotide
auacacuaugacggcugcg

SEQ ID NO: 1813453 - RNA, 19 nt, Artificial Sequence
  Description of Artificial Sequence: Synthetic oligonucleotide
accucccuaauaucugaga

SEQ ID NO: 1813454 - RNA, 19 nt, Artificial Sequence
  Description of Artificial Sequence: Synthetic oligonucleotide
uaggugaguuuucccgagu

SEQ ID NO: 1813455 - RNA, 19 nt, Artificial Sequence
  Description of Artificial Sequence: Synthetic oligonucleotide
cuuggguuagcagcaccgc

SEQ ID NO: 1813456 - RNA, 19 nt, Artificial Sequence
  Description of Artificial Sequence: Synthetic oligonucleotide
cuuugagcucccguaucgc

SEQ ID NO: 1813457 - RNA, 19 nt, Artificial Sequence
  Description of Artificial Sequence: Synthetic oligonucleotide
agugcaaccccugccgugu

SEQ ID NO: 1813458 - RNA, 19 nt, Artificial Sequence
  Description of Artificial Sequence: Synthetic oligonucleotide
ucccgaguuuucuauccuc

SEQ ID NO: 1813459 - RNA, 19 nt, Artificial Sequence
  Description of Artificial Sequence: Synthetic oligonucleotide
aucaugugcucugggccgg

SEQ ID NO: 1813460 - RNA, 19 nt, Artificial Sequence
  Description of Artificial Sequence: Synthetic oligonucleotide
uguuguggucaaagugguc

SEQ ID NO: 1813461 - RNA, 19 nt, Artificial Sequence
  Description of Artificial Sequence: Synthetic oligonucleotide
augggcgccagugagugga

SEQ ID NO: 1813462 - RNA, 19 nt, Artificial Sequence
  Description of Artificial Sequence: Synthetic oligonucleotide
ccucgguaguacaugggcg

SEQ ID NO: 1813463 - RNA, 19 nt, Artificial Sequence
  Description of Artificial Sequence: Synthetic oligonucleotide
gugcguuucauaaaccgaa

SEQ ID NO: 1813464 - RNA, 19 nt, Artificial Sequence
  Description of Artificial Sequence: Synthetic oligonucleotide
ugacggcugcggccgaucc

SEQ ID NO: 1813465 - RNA, 19 nt, Artificial Sequence
  Description of Artificial Sequence: Synthetic oligonucleotide
gcggcugauuccuuggaag

SEQ ID NO: 1813466 - RNA, 19 nt, Artificial Sequence
  Description of Artificial Sequence: Synthetic oligonucleotide
aacccaguccaaauuuaaa

SEQ ID NO: 1813467 - RNA, 19 nt, Artificial Sequence
  Description of Artificial Sequence: Synthetic oligonucleotide
accgacacacaaugcuuga

SEQ ID NO: 1813468 - RNA, 19 nt, Artificial Sequence
  Description of Artificial Sequence: Synthetic oligonucleotide
ugagcucccguaucgccau

SEQ ID NO: 1813469 - RNA, 19 nt, Artificial Sequence
  Description of Artificial Sequence: Synthetic oligonucleotide
aggugaguuuucccgaguu

SEQ ID NO: 1813470 - RNA, 19 nt, Artificial Sequence
  Description of Artificial Sequence: Synthetic oligonucleotide
caccucccuaauaucugag

SEQ ID NO: 1813471 - RNA, 19 nt, Artificial Sequence
  Description of Artificial Sequence: Synthetic oligonucleotide
agcaugcaaugcugcucac

SEQ ID NO: 1813472 - RNA, 19 nt, Artificial Sequence
  Description of Artificial Sequence: Synthetic oligonucleotide
auggcccuuggguuagcag

SEQ ID NO: 1813473 - RNA, 19 nt, Artificial Sequence
  Description of Artificial Sequence: Synthetic oligonucleotide
acgauggcaccuauggacu

SEQ ID NO: 1813474 - RNA, 19 nt, Artificial Sequence
  Description of Artificial Sequence: Synthetic oligonucleotide
acggcugcggccgauccuc

SEQ ID NO: 1813475 - RNA, 19 nt, Artificial Sequence
  Description of Artificial Sequence: Synthetic oligonucleotide
agcaugcuacuggucuccc

SEQ ID NO: 1813476 - RNA, 19 nt, Artificial Sequence
  Description of Artificial Sequence: Synthetic oligonucleotide
gguacaagaugcgaagguc

SEQ ID NO: 1813477 - RNA, 19 nt, Artificial Sequence
  Description of Artificial Sequence: Synthetic oligonucleotide
acuauaccuauuaccuagu

SEQ ID NO: 1813478 - RNA, 19 nt, Artificial Sequence
  Description of Artificial Sequence: Synthetic oligonucleotide
cuccucgauguuaauggca

SEQ ID NO: 1813479 - RNA, 19 nt, Artificial Sequence
  Description of Artificial Sequence: Synthetic oligonucleotide
caugacugcugggucacug

SEQ ID NO: 1813480 - RNA, 19 nt, Artificial Sequence
  Description of Artificial Sequence: Synthetic oligonucleotide
agacggcucgggcuucuuc

SEQ ID NO: 1813481 - RNA, 19 nt, Artificial Sequence
  Description of Artificial Sequence: Synthetic oligonucleotide
augcaaugcugcucacucu

SEQ ID NO: 1813482 - RNA, 19 nt, Artificial Sequence
  Description of Artificial Sequence: Synthetic oligonucleotide
guccuaggugucuggggag

SEQ ID NO: 1813483 - RNA, 19 nt, Artificial Sequence
  Description of Artificial Sequence: Synthetic oligonucleotide
agccugaucccuccacugu

SEQ ID NO: 1813484 - RNA, 19 nt, Artificial Sequence
  Description of Artificial Sequence: Synthetic oligonucleotide
ggcaccuauggacucagca

SEQ ID NO: 1813485 - RNA, 19 nt, Artificial Sequence
  Description of Artificial Sequence: Synthetic oligonucleotide
caccuauggacucagcaua

SEQ ID NO: 1813486 - RNA, 19 nt, Artificial Sequence
  Description of Artificial Sequence: Synthetic oligonucleotide
guccagcccaagcaggaac

SEQ ID NO: 1813487 - RNA, 19 nt, Artificial Sequence
  Description of Artificial Sequence: Synthetic oligonucleotide
caucguccgggccgcaccg

SEQ ID NO: 1813488 - RNA, 19 nt, Artificial Sequence
  Description of Artificial Sequence: Synthetic oligonucleotide
uguccccgagaagacacac

SEQ ID NO: 1813489 - RNA, 19 nt, Artificial Sequence
  Description of Artificial Sequence: Synthetic oligonucleotide
ggguuagcagcaccgccgg

SEQ ID NO: 1813490 - RNA, 19 nt, Artificial Sequence
  Description of Artificial Sequence: Synthetic oligonucleotide
ugauuccuuggaagagcuc

SEQ ID NO: 1813491 - RNA, 19 nt, Artificial Sequence
  Description of Artificial Sequence: Synthetic oligonucleotide
ggggcuaauguugugguca

SEQ ID NO: 1813492 - RNA, 19 nt, Artificial Sequence
  Description of Artificial Sequence: Synthetic oligonucleotide
aggaauuugugaaguucgu

SEQ ID NO: 1813493 - RNA, 19 nt, Artificial Sequence
  Description of Artificial Sequence: Synthetic oligonucleotide
ucgccaucaugugcucugg

SEQ ID NO: 1813494 - RNA, 19 nt, Artificial Sequence
  Description of Artificial Sequence: Synthetic oligonucleotide
ugucacguucaugcaaaau

SEQ ID NO: 1813495 - RNA, 19 nt, Artificial Sequence
  Description of Artificial Sequence: Synthetic oligonucleotide
cagcaggcaguuaguccgg

SEQ ID NO: 1813496 - RNA, 19 nt, Artificial Sequence
  Description of Artificial Sequence: Synthetic oligonucleotide
gcaauugccaucacaaugu

SEQ ID NO: 1813497 - RNA, 19 nt, Artificial Sequence
  Description of Artificial Sequence: Synthetic oligonucleotide
caacccaguccaaauuuaa

SEQ ID NO: 1813498 - RNA, 19 nt, Artificial Sequence
  Description of Artificial Sequence: Synthetic oligonucleotide
cuucauuugccauggcccu

SEQ ID NO: 1813499 - RNA, 19 nt, Artificial Sequence
  Description of Artificial Sequence: Synthetic oligonucleotide
caacuauaccuauuaccua

SEQ ID NO: 1813500 - RNA, 19 nt, Artificial Sequence
  Description of Artificial Sequence: Synthetic oligonucleotide
guuuucccgaguuuucuau

SEQ ID NO: 1813501 - RNA, 19 nt, Artificial Sequence
  Description of Artificial Sequence: Synthetic oligonucleotide
ggcgccagugaguggaacc

SEQ ID NO: 1813502 - RNA, 19 nt, Artificial Sequence
  Description of Artificial Sequence: Synthetic oligonucleotide
ccgugugcguuucauaaac

SEQ ID NO: 1813503 - RNA, 19 nt, Artificial Sequence
  Description of Artificial Sequence: Synthetic oligonucleotide
cacuggagacggcucgggc

SEQ ID NO: 1813504 - RNA, 19 nt, Artificial Sequence
  Description of Artificial Sequence: Synthetic oligonucleotide
cuuccuccgagcuucauuu

SEQ ID NO: 1813505 - RNA, 19 nt, Artificial Sequence
  Description of Artificial Sequence: Synthetic oligonucleotide
ucugggccgugcucuuuca

SEQ ID NO: 1813506 - RNA, 19 nt, Artificial Sequence
  Description of Artificial Sequence: Synthetic oligonucleotide
gccgugcucuuucagcucc

SEQ ID NO: 1813507 - RNA, 19 nt, Artificial Sequence
  Description of Artificial Sequence: Synthetic oligonucleotide
auaaaccgaaggccauguu

SEQ ID NO: 1813508 - RNA, 19 nt, Artificial Sequence
  Description of Artificial Sequence: Synthetic oligonucleotide
uggggcuaauguugugguc

SEQ ID NO: 1813509 - RNA, 19 nt, Artificial Sequence
  Description of Artificial Sequence: Synthetic oligonucleotide
gcaacggauacacaugagu

SEQ ID NO: 1813510 - RNA, 19 nt, Artificial Sequence
  Description of Artificial Sequence: Synthetic oligonucleotide
uaucgccaucaugugcucu

SEQ ID NO: 1813511 - RNA, 19 nt, Artificial Sequence
  Description of Artificial Sequence: Synthetic oligonucleotide
agcaacggauacacaugag

SEQ ID NO: 1813512 - RNA, 19 nt, Artificial Sequence
  Description of Artificial Sequence: Synthetic oligonucleotide
cucccguaucgccaucaug

SEQ ID NO: 1813513 - RNA, 19 nt, Artificial Sequence
  Description of Artificial Sequence: Synthetic oligonucleotide
augguggggcuaauguugu

SEQ ID NO: 1813514 - RNA, 19 nt, Artificial Sequence
  Description of Artificial Sequence: Synthetic oligonucleotide
cuauaccuauuaccuagua

SEQ ID NO: 1813515 - RNA, 19 nt, Artificial Sequence
  Description of Artificial Sequence: Synthetic oligonucleotide
gagggguugucuaggcgca

SEQ ID NO: 1813516 - RNA, 19 nt, Artificial Sequence
  Description of Artificial Sequence: Synthetic oligonucleotide
cgagcuucauuugccaugg

SEQ ID NO: 1813517 - RNA, 19 nt, Artificial Sequence
  Description of Artificial Sequence: Synthetic oligonucleotide
guaugaaaugaauccuguu

SEQ ID NO: 1813518 - RNA, 19 nt, Artificial Sequence
  Description of Artificial Sequence: Synthetic oligonucleotide
gcuccucgauguuaauggc

SEQ ID NO: 1813519 - RNA, 19 nt, Artificial Sequence
  Description of Artificial Sequence: Synthetic oligonucleotide
ggugucacguucaugcaaa

SEQ ID NO: 1813520 - RNA, 19 nt, Artificial Sequence
  Description of Artificial Sequence: Synthetic oligonucleotide
ugguggggcuaauguugug

SEQ ID NO: 1813521 - RNA, 19 nt, Artificial Sequence
  Description of Artificial Sequence: Synthetic oligonucleotide
gaucuggcggcugauuccu

SEQ ID NO: 1813522 - RNA, 19 nt, Artificial Sequence
  Description of Artificial Sequence: Synthetic oligonucleotide
gguugucuaggcgcaaaac

SEQ ID NO: 1813523 - RNA, 19 nt, Artificial Sequence
  Description of Artificial Sequence: Synthetic oligonucleotide
caugggcgccagugagugg

SEQ ID NO: 1813524 - RNA, 19 nt, Artificial Sequence
  Description of Artificial Sequence: Synthetic oligonucleotide
gcgccagugaguggaaccg

SEQ ID NO: 1813525 - RNA, 19 nt, Artificial Sequence
  Description of Artificial Sequence: Synthetic oligonucleotide
cauaaaccgaaggccaugu

SEQ ID NO: 1813526 - RNA, 19 nt, Artificial Sequence
  Description of Artificial Sequence: Synthetic oligonucleotide
cguguccccgagaagacac

SEQ ID NO: 1813527 - RNA, 19 nt, Artificial Sequence
  Description of Artificial Sequence: Synthetic oligonucleotide
gaaugucccagcccagcau

SEQ ID NO: 1813528 - RNA, 19 nt, Artificial Sequence
  Description of Artificial Sequence: Synthetic oligonucleotide
acggcucgggcuucuuccu

SEQ ID NO: 1813529 - RNA, 19 nt, Artificial Sequence
  Description of Artificial Sequence: Synthetic oligonucleotide
ccguaucgccaucaugugc

SEQ ID NO: 1813530 - RNA, 19 nt, Artificial Sequence
  Description of Artificial Sequence: Synthetic oligonucleotide
augacggcugcggccgauc

SEQ ID NO: 1813531 - RNA, 19 nt, Artificial Sequence
  Description of Artificial Sequence: Synthetic oligonucleotide
guggggcuaauguuguggu

SEQ ID NO: 1813532 - RNA, 19 nt, Artificial Sequence
  Description of Artificial Sequence: Synthetic oligonucleotide
ccuaguaagugcaaccccu

SEQ ID NO: 1813533 - RNA, 19 nt, Artificial Sequence
  Description of Artificial Sequence: Synthetic oligonucleotide
caauguuuucugggccgug

SEQ ID NO: 1813534 - RNA, 19 nt, Artificial Sequence
  Description of Artificial Sequence: Synthetic oligonucleotide
ccuuagcauccuucagggg

SEQ ID NO: 1813535 - RNA, 19 nt, Artificial Sequence
  Description of Artificial Sequence: Synthetic oligonucleotide
guaucgccaucaugugcuc

SEQ ID NO: 1813536 - RNA, 19 nt, Artificial Sequence
  Description of Artificial Sequence: Synthetic oligonucleotide
gaagggugauggucugugu

SEQ ID NO: 1813537 - RNA, 19 nt, Artificial Sequence
  Description of Artificial Sequence: Synthetic oligonucleotide
gucauacacuaugacggcu

SEQ ID NO: 1813538 - RNA, 19 nt, Artificial Sequence
  Description of Artificial Sequence: Synthetic oligonucleotide
ggguacaagaugcgaaggu

SEQ ID NO: 1813539 - RNA, 19 nt, Artificial Sequence
  Description of Artificial Sequence: Synthetic oligonucleotide
cuaggcgcaaaaccugggu

SEQ ID NO: 1813540 - RNA, 19 nt, Artificial Sequence
  Description of Artificial Sequence: Synthetic oligonucleotide
cgugugcguuucauaaacc

SEQ ID NO: 1813541 - RNA, 19 nt, Artificial Sequence
  Description of Artificial Sequence: Synthetic oligonucleotide
aucugagaggucacauuua

SEQ ID NO: 1813542 - RNA, 19 nt, Artificial Sequence
  Description of Artificial Sequence: Synthetic oligonucleotide
gcaccucccuaauaucuga

SEQ ID NO: 1813543 - RNA, 19 nt, Artificial Sequence
  Description of Artificial Sequence: Synthetic oligonucleotide
agugcgagggaaacucgua

SEQ ID NO: 1813544 - RNA, 19 nt, Artificial Sequence
  Description of Artificial Sequence: Synthetic oligonucleotide
agagcuccucgauguuaau

SEQ ID NO: 1813545 - RNA, 19 nt, Artificial Sequence
  Description of Artificial Sequence: Synthetic oligonucleotide
guagaacaggguacaagau

SEQ ID NO: 1813546 - RNA, 19 nt, Artificial Sequence
  Description of Artificial Sequence: Synthetic oligonucleotide
guccaacggugggaucugg

SEQ ID NO: 1813547 - RNA, 19 nt, Artificial Sequence
  Description of Artificial Sequence: Synthetic oligonucleotide
acaagaugcgaagguccua

SEQ ID NO: 1813548 - RNA, 19 nt, Artificial Sequence
  Description of Artificial Sequence: Synthetic oligonucleotide
gcaucguccgggccgcacc

SEQ ID NO: 1813549 - RNA, 19 nt, Artificial Sequence
  Description of Artificial Sequence: Synthetic oligonucleotide
aaccuggguccagcccaag

SEQ ID NO: 1813550 - RNA, 19 nt, Artificial Sequence
  Description of Artificial Sequence: Synthetic oligonucleotide
ggugguuaggugaguuuuc

SEQ ID NO: 1813551 - RNA, 19 nt, Artificial Sequence
  Description of Artificial Sequence: Synthetic oligonucleotide
cguaucgccaucaugugcu

SEQ ID NO: 1813552 - RNA, 19 nt, Artificial Sequence
  Description of Artificial Sequence: Synthetic oligonucleotide
gggugucacguucaugcaa

SEQ ID NO: 1813553 - RNA, 19 nt, Artificial Sequence
  Description of Artificial Sequence: Synthetic oligonucleotide
gagugcgagggaaacucgu

SEQ ID NO: 1813554 - RNA, 19 nt, Artificial Sequence
  Description of Artificial Sequence: Synthetic oligonucleotide
ggcaugacugcugggucac

SEQ ID NO: 1813555 - RNA, 19 nt, Artificial Sequence
  Description of Artificial Sequence: Synthetic oligonucleotide
gugcucugggccgggcccg

SEQ ID NO: 1813556 - RNA, 19 nt, Artificial Sequence
  Description of Artificial Sequence: Synthetic oligonucleotide
ccagcaugcuacuggucuc

SEQ ID NO: 1813557 - RNA, 19 nt, Artificial Sequence
  Description of Artificial Sequence: Synthetic oligonucleotide
caagccugaucccuccacu

SEQ ID NO: 1813558 - RNA, 19 nt, Artificial Sequence
  Description of Artificial Sequence: Synthetic oligonucleotide
ugcaagcucugggucccaa

SEQ ID NO: 1813559 - RNA, 19 nt, Artificial Sequence
  Description of Artificial Sequence: Synthetic oligonucleotide
gcaccuauggacucagcau

SEQ ID NO: 1813560 - RNA, 19 nt, Artificial Sequence
  Description of Artificial Sequence: Synthetic oligonucleotide
gugucacguucaugcaaaa

SEQ ID NO: 1813561 - RNA, 19 nt, Artificial Sequence
  Description of Artificial Sequence: Synthetic oligonucleotide
ugccccaaugguggggcua

SEQ ID NO: 1813562 - RNA, 19 nt, Artificial Sequence
  Description of Artificial Sequence: Synthetic oligonucleotide
accccugccgugugcguuu

SEQ ID NO: 1813563 - RNA, 19 nt, Artificial Sequence
  Description of Artificial Sequence: Synthetic oligonucleotide
cccguaucgccaucaugug

SEQ ID NO: 1813564 - RNA, 19 nt, Artificial Sequence
  Description of Artificial Sequence: Synthetic oligonucleotide
ugggcgccagugaguggaa

SEQ ID NO: 1813565 - RNA, 19 nt, Artificial Sequence
  Description of Artificial Sequence: Synthetic oligonucleotide
cccuuggguuagcagcacc

SEQ ID NO: 1813566 - RNA, 19 nt, Artificial Sequence
  Description of Artificial Sequence: Synthetic oligonucleotide
augccccaaugguggggcu

SEQ ID NO: 1813567 - RNA, 19 nt, Artificial Sequence
  Description of Artificial Sequence: Synthetic oligonucleotide
ggucugugugauggcauga

SEQ ID NO: 1813568 - RNA, 19 nt, Artificial Sequence
  Description of Artificial Sequence: Synthetic oligonucleotide
gugugauggcaugacugcu

SEQ ID NO: 1813569 - RNA, 19 nt, Artificial Sequence
  Description of Artificial Sequence: Synthetic oligonucleotide
ggggcaccucccuaauauc

SEQ ID NO: 1813570 - RNA, 19 nt, Artificial Sequence
  Description of Artificial Sequence: Synthetic oligonucleotide
gguuagcagcaccgccggc

SEQ ID NO: 1813571 - RNA, 19 nt, Artificial Sequence
  Description of Artificial Sequence: Synthetic oligonucleotide
gugcaaccccugccgugug

SEQ ID NO: 1813572 - RNA, 19 nt, Artificial Sequence
  Description of Artificial Sequence: Synthetic oligonucleotide
ggcccuuggguuagcagca

SEQ ID NO: 1813573 - RNA, 19 nt, Artificial Sequence
  Description of Artificial Sequence: Synthetic oligonucleotide
ggguugucuaggcgcaaaa

SEQ ID NO: 1813574 - RNA, 19 nt, Artificial Sequence
  Description of Artificial Sequence: Synthetic oligonucleotide
gucccagcccagcaugcua

SEQ ID NO: 1813575 - RNA, 19 nt, Artificial Sequence
  Description of Artificial Sequence: Synthetic oligonucleotide
gguuaggguccuucugugu

SEQ ID NO: 1813576 - RNA, 19 nt, Artificial Sequence
  Description of Artificial Sequence: Synthetic oligonucleotide
ggcgcaaaaccugggucca

SEQ ID NO: 1813577 - RNA, 19 nt, Artificial Sequence
  Description of Artificial Sequence: Synthetic oligonucleotide
gcagcaucguccgggccgc

SEQ ID NO: 1813578 - RNA, 19 nt, Artificial Sequence
  Description of Artificial Sequence: Synthetic oligonucleotide
gccauggcccuuggguuag

SEQ ID NO: 1813579 - RNA, 19 nt, Artificial Sequence
  Description of Artificial Sequence: Synthetic oligonucleotide
gccgauccucgguaguaca

SEQ ID NO: 1813580 - RNA, 19 nt, Artificial Sequence
  Description of Artificial Sequence: Synthetic oligonucleotide
caugagugcgagggaaacu

SEQ ID NO: 1813581 - RNA, 19 nt, Artificial Sequence
  Description of Artificial Sequence: Synthetic oligonucleotide
ggcugcggccgauccucgg

SEQ ID NO: 1813582 - RNA, 19 nt, Artificial Sequence
  Description of Artificial Sequence: Synthetic oligonucleotide
cgcaaaaccuggguccagc

SEQ ID NO: 1813583 - RNA, 19 nt, Artificial Sequence
  Description of Artificial Sequence: Synthetic oligonucleotide
cgagggaaacucguagaac

SEQ ID NO: 1813584 - RNA, 19 nt, Artificial Sequence
  Description of Artificial Sequence: Synthetic oligonucleotide
cauggcccuuggguuagca

SEQ ID NO: 1813585 - RNA, 19 nt, Artificial Sequence
  Description of Artificial Sequence: Synthetic oligonucleotide
cucguagaacaggguacaa

SEQ ID NO: 1813586 - RNA, 19 nt, Artificial Sequence
  Description of Artificial Sequence: Synthetic oligonucleotide
gggcaccucccuaauaucu

SEQ ID NO: 1813587 - RNA, 19 nt, Artificial Sequence
  Description of Artificial Sequence: Synthetic oligonucleotide
cccguguccccgagaagac

SEQ ID NO: 1813588 - RNA, 19 nt, Artificial Sequence
  Description of Artificial Sequence: Synthetic oligonucleotide
uggagacggcucgggcuuc

SEQ ID NO: 1813589 - RNA, 19 nt, Artificial Sequence
  Description of Artificial Sequence: Synthetic oligonucleotide
cuggagacggcucgggcuu

SEQ ID NO: 1813590 - RNA, 19 nt, Artificial Sequence
  Description of Artificial Sequence: Synthetic oligonucleotide
caaagugguccuggacaaa

SEQ ID NO: 1813591 - RNA, 19 nt, Artificial Sequence
  Description of Artificial Sequence: Synthetic oligonucleotide
cugagaggucacauuuauu

SEQ ID NO: 1813592 - RNA, 19 nt, Artificial Sequence
  Description of Artificial Sequence: Synthetic oligonucleotide
gcaacccaguccaaauuua

SEQ ID NO: 1813593 - RNA, 19 nt, Artificial Sequence
  Description of Artificial Sequence: Synthetic oligonucleotide
cccuaauaucugagagguc

SEQ ID NO: 1813594 - RNA, 19 nt, Artificial Sequence
  Description of Artificial Sequence: Synthetic oligonucleotide
gcaugcuacuggucuccca

SEQ ID NO: 1813595 - RNA, 19 nt, Artificial Sequence
  Description of Artificial Sequence: Synthetic oligonucleotide
gguccuggacaaaccgaca

SEQ ID NO: 1813596 - RNA, 19 nt, Artificial Sequence
  Description of Artificial Sequence: Synthetic oligonucleotide
ggccgauccucgguaguac

SEQ ID NO: 1813597 - RNA, 19 nt, Artificial Sequence
  Description of Artificial Sequence: Synthetic oligonucleotide
ggucccaagccugaucccu

SEQ ID NO: 1813598 - RNA, 19 nt, Artificial Sequence
  Description of Artificial Sequence: Synthetic oligonucleotide
cccaaugguggggcuaaug

SEQ ID NO: 1813599 - RNA, 19 nt, Artificial Sequence
  Description of Artificial Sequence: Synthetic oligonucleotide
gacggcugcggccgauccu

SEQ ID NO: 1813600 - RNA, 19 nt, Artificial Sequence
  Description of Artificial Sequence: Synthetic oligonucleotide
acggugggaucuggcggcu

SEQ ID NO: 1813601 - RNA, 19 nt, Artificial Sequence
  Description of Artificial Sequence: Synthetic oligonucleotide
cgauccucgguaguacaug

SEQ ID NO: 1813602 - RNA, 19 nt, Artificial Sequence
  Description of Artificial Sequence: Synthetic oligonucleotide
cugccgugugcguuucaua

SEQ ID NO: 1813603 - RNA, 19 nt, Artificial Sequence
  Description of Artificial Sequence: Synthetic oligonucleotide
guguccccgagaagacaca

SEQ ID NO: 1813604 - RNA, 19 nt, Artificial Sequence
  Description of Artificial Sequence: Synthetic oligonucleotide
cggcugauuccuuggaaga

SEQ ID NO: 1813605 - RNA, 19 nt, Artificial Sequence
  Description of Artificial Sequence: Synthetic oligonucleotide
gccgugugcguuucauaaa

SEQ ID NO: 1813606 - RNA, 19 nt, Artificial Sequence
  Description of Artificial Sequence: Synthetic oligonucleotide
ggacaaaccgacacacaau

SEQ ID NO: 1813607 - RNA, 19 nt, Artificial Sequence
  Description of Artificial Sequence: Synthetic oligonucleotide
cuaugacggcugcggccga

SEQ ID NO: 1813608 - RNA, 19 nt, Artificial Sequence
  Description of Artificial Sequence: Synthetic oligonucleotide
cugcggccgauccucggua

SEQ ID NO: 1813609 - RNA, 19 nt, Artificial Sequence
  Description of Artificial Sequence: Synthetic oligonucleotide
agggguugucuaggcgcaa

SEQ ID NO: 1813610 - RNA, 19 nt, Artificial Sequence
  Description of Artificial Sequence: Synthetic oligonucleotide
cacuuguuucaaccacgau

SEQ ID NO: 1813611 - RNA, 19 nt, Artificial Sequence
  Description of Artificial Sequence: Synthetic oligonucleotide
gggguugucuaggcgcaaa

SEQ ID NO: 1813612 - RNA, 19 nt, Artificial Sequence
  Description of Artificial Sequence: Synthetic oligonucleotide
gcgcaaaaccuggguccag

SEQ ID NO: 1813613 - RNA, 19 nt, Artificial Sequence
  Description of Artificial Sequence: Synthetic oligonucleotide
guccccgagaagacacacu

SEQ ID NO: 1813614 - RNA, 19 nt, Artificial Sequence
  Description of Artificial Sequence: Synthetic oligonucleotide
gcaugcaaugcugcucacu

SEQ ID NO: 1813615 - RNA, 19 nt, Artificial Sequence
  Description of Artificial Sequence: Synthetic oligonucleotide
caggggcaccucccuaaua

SEQ ID NO: 1813616 - RNA, 19 nt, Artificial Sequence
  Description of Artificial Sequence: Synthetic oligonucleotide
ccagcccagcaugcuacug

SEQ ID NO: 1813617 - RNA, 19 nt, Artificial Sequence
  Description of Artificial Sequence: Synthetic oligonucleotide
gcugcggccgauccucggu

SEQ ID NO: 1813618 - RNA, 19 nt, Artificial Sequence
  Description of Artificial Sequence: Synthetic oligonucleotide
gccagugaguggaaccgcu

SEQ ID NO: 1813619 - RNA, 19 nt, Artificial Sequence
  Description of Artificial Sequence: Synthetic oligonucleotide
cccaagcaggaacccuuca

SEQ ID NO: 1813620 - RNA, 19 nt, Artificial Sequence
  Description of Artificial Sequence: Synthetic oligonucleotide
gccugaucccuccacuguu

SEQ ID NO: 1813621 - RNA, 19 nt, Artificial Sequence
  Description of Artificial Sequence: Synthetic oligonucleotide
gguccagcccaagcaggaa

SEQ ID NO: 1813622 - RNA, 19 nt, Artificial Sequence
  Description of Artificial Sequence: Synthetic oligonucleotide
caaccacgauggcaccuau

SEQ ID NO: 1813623 - RNA, 19 nt, Artificial Sequence
  Description of Artificial Sequence: Synthetic oligonucleotide
ggcuaauguuguggucaaa

SEQ ID NO: 1813624 - RNA, 19 nt, Artificial Sequence
  Description of Artificial Sequence: Synthetic oligonucleotide
cagcuccuuaacccauuuu

SEQ ID NO: 1813625 - RNA, 19 nt, Artificial Sequence
  Description of Artificial Sequence: Synthetic oligonucleotide
cgacacacaaugcuugauu

SEQ ID NO: 1813626 - RNA, 19 nt, Artificial Sequence
  Description of Artificial Sequence: Synthetic oligonucleotide
gggcgccagugaguggaac

SEQ ID NO: 1813627 - RNA, 19 nt, Artificial Sequence
  Description of Artificial Sequence: Synthetic oligonucleotide
gcccuuggguuagcagcac

SEQ ID NO: 1813628 - RNA, 19 nt, Artificial Sequence
  Description of Artificial Sequence: Synthetic oligonucleotide
caaccccugccgugugcgu

SEQ ID NO: 1813629 - RNA, 19 nt, Artificial Sequence
  Description of Artificial Sequence: Synthetic oligonucleotide
guccggagguuaggguccu

SEQ ID NO: 1813630 - RNA, 19 nt, Artificial Sequence
  Description of Artificial Sequence: Synthetic oligonucleotide
ccgauccucgguaguacau

SEQ ID NO: 1813631 - RNA, 19 nt, Artificial Sequence
  Description of Artificial Sequence: Synthetic oligonucleotide
ggcaguuaguccggagguu

SEQ ID NO: 1813632 - RNA, 19 nt, Artificial Sequence
  Description of Artificial Sequence: Synthetic oligonucleotide
ccguguccccgagaagaca

SEQ ID NO: 1813633 - RNA, 19 nt, Artificial Sequence
  Description of Artificial Sequence: Synthetic oligonucleotide
gcggccgauccucgguagu

SEQ ID NO: 1813634 - RNA, 19 nt, Artificial Sequence
  Description of Artificial Sequence: Synthetic oligonucleotide
cagcaccgccggcuggccu

SEQ ID NO: 1813635 - RNA, 19 nt, Artificial Sequence
  Description of Artificial Sequence: Synthetic oligonucleotide
ggagacggcucgggcuucu

SEQ ID NO: 1813636 - RNA, 19 nt, Artificial Sequence
  Description of Artificial Sequence: Synthetic oligonucleotide
ccauggcccuuggguuagc

SEQ ID NO: 1813637 - RNA, 19 nt, Artificial Sequence
  Description of Artificial Sequence: Synthetic oligonucleotide
ccgacacacaaugcuugau

SEQ ID NO: 1813638 - RNA, 19 nt, Artificial Sequence
  Description of Artificial Sequence: Synthetic oligonucleotide
cccagcccagcaugcuacu

SEQ ID NO: 1813639 - RNA, 19 nt, Artificial Sequence
  Description of Artificial Sequence: Synthetic oligonucleotide
ccccgagaagacacacuuu

SEQ ID NO: 1813640 - RNA, 19 nt, Artificial Sequence
  Description of Artificial Sequence: Synthetic oligonucleotide
cagcaucguccgggccgca

SEQ ID NO: 1813641 - RNA, 19 nt, Artificial Sequence
  Description of Artificial Sequence: Synthetic oligonucleotide
ccgugcucuuucagcuccu

SEQ ID NO: 1813642 - RNA, 19 nt, Artificial Sequence
  Description of Artificial Sequence: Synthetic oligonucleotide
ccccugccgugugcguuuc

SEQ ID NO: 1813643 - RNA, 19 nt, Artificial Sequence
  Description of Artificial Sequence: Synthetic oligonucleotide
cggugggaucuggcggcug

SEQ ID NO: 1813644 - RNA, 19 nt, Artificial Sequence
  Description of Artificial Sequence: Synthetic oligonucleotide
cggccgauccucgguagua

SEQ ID NO: 1813645 - RNA, 19 nt, Artificial Sequence
  Description of Artificial Sequence: Synthetic oligonucleotide
cguuuccacaaggcacagu

SEQ ID NO: 1813646 - RNA, 19 nt, Artificial Sequence
  Description of Artificial Sequence: Synthetic oligonucleotide
caccgccggcuggccugca

SEQ ID NO: 1813647 - RNA, 19 nt, Artificial Sequence
  Description of Artificial Sequence: Synthetic oligonucleotide
cggggcucagcagcaucgu

SEQ ID NO: 1813648 - RNA, 19 nt, Artificial Sequence
  Description of Artificial Sequence: Synthetic oligonucleotide
agaaauacaagucugcugc

SEQ ID NO: 1813649 - RNA, 19 nt, Artificial Sequence
  Description of Artificial Sequence: Synthetic oligonucleotide
uuaauaauuauccuauggg

SEQ ID NO: 1813650 - RNA, 19 nt, Artificial Sequence
  Description of Artificial Sequence: Synthetic oligonucleotide
aauuguuacuucuugcgcc

SEQ ID NO: 1813651 - RNA, 19 nt, Artificial Sequence
  Description of Artificial Sequence: Synthetic oligonucleotide
  modified_base (7)..(7): a, c, u, g, unknown or other
agaaaunugaacugaaguc

SEQ ID NO: 1813652 - RNA, 19 nt, Artificial Sequence
  Description of Artificial Sequence: Synthetic oligonucleotide
uuugaaaguaaauaaaccc

SEQ ID NO: 1813653 - RNA, 19 nt, Artificial Sequence
  Description of Artificial Sequence: Synthetic oligonucleotide
auaaugcuacguuaaaucc

SEQ ID NO: 1813654 - RNA, 19 nt, Artificial Sequence
  Description of Artificial Sequence: Synthetic oligonucleotide
ucuuggagagaccugaucg

SEQ ID NO: 1813655 - RNA, 19 nt, Artificial Sequence
  Description of Artificial Sequence: Synthetic oligonucleotide
aauucgaggagucgagucc

SEQ ID NO: 1813656 - RNA, 19 nt, Artificial Sequence
  Description of Artificial Sequence: Synthetic oligonucleotide
uaauaauuauccuaugggc

SEQ ID NO: 1813657 - RNA, 19 nt, Artificial Sequence
  Description of Artificial Sequence: Synthetic oligonucleotide
guuaauaauuauccuaugg

SEQ ID NO: 1813658 - RNA, 19 nt, Artificial Sequence
  Description of Artificial Sequence: Synthetic oligonucleotide
uauccuaugggcuucagag

SEQ ID NO: 1813659 - RNA, 19 nt, Artificial Sequence
  Description of Artificial Sequence: Synthetic oligonucleotide
uugaaaguaaauaaaccca

SEQ ID NO: 1813660 - RNA, 19 nt, Artificial Sequence
  Description of Artificial Sequence: Synthetic oligonucleotide
auucaaaaggcacaggcuc

SEQ ID NO: 1813661 - RNA, 19 nt, Artificial Sequence
  Description of Artificial Sequence: Synthetic oligonucleotide
uggagaucaauucaaaaca

SEQ ID NO: 1813662 - RNA, 19 nt, Artificial Sequence
  Description of Artificial Sequence: Synthetic oligonucleotide
auuugguauaccauaaugc

SEQ ID NO: 1813663 - RNA, 19 nt, Artificial Sequence
  Description of Artificial Sequence: Synthetic oligonucleotide
uuaucuuagggacuggcag

SEQ ID NO: 1813664 - RNA, 19 nt, Artificial Sequence
  Description of Artificial Sequence: Synthetic oligonucleotide
uauuugguauaccauaaug

SEQ ID NO: 1813665 - RNA, 19 nt, Artificial Sequence
  Description of Artificial Sequence: Synthetic oligonucleotide
aaguaaauaaacccauucu

SEQ ID NO: 1813666 - RNA, 19 nt, Artificial Sequence
  Description of Artificial Sequence: Synthetic oligonucleotide
uaugaaaccuuguaaaagu

SEQ ID NO: 1813667 - RNA, 19 nt, Artificial Sequence
  Description of Artificial Sequence: Synthetic oligonucleotide
ugaacauaccguaauuugc

SEQ ID NO: 1813668 - RNA, 19 nt, Artificial Sequence
  Description of Artificial Sequence: Synthetic oligonucleotide
uacguuaaaucccauggag

SEQ ID NO: 1813669 - RNA, 19 nt, Artificial Sequence
  Description of Artificial Sequence: Synthetic oligonucleotide
aaugugucaguccacuuga

SEQ ID NO: 1813670 - RNA, 19 nt, Artificial Sequence
  Description of Artificial Sequence: Synthetic oligonucleotide
  modified_base (9)..(9): a, c, u, g, unknown or other
ucagaaaunugaacugaag

SEQ ID NO: 1813671 - RNA, 19 nt, Artificial Sequence
  Description of Artificial Sequence: Synthetic oligonucleotide
uaaugcuacguuaaauccc

SEQ ID NO: 1813672 - RNA, 19 nt, Artificial Sequence
  Description of Artificial Sequence: Synthetic oligonucleotide
ugaaaguaaauaaacccau

SEQ ID NO: 1813673 - RNA, 19 nt, Artificial Sequence
  Description of Artificial Sequence: Synthetic oligonucleotide
auaaaguaugaucugcucu

SEQ ID NO: 1813674 - RNA, 19 nt, Artificial Sequence
  Description of Artificial Sequence: Synthetic oligonucleotide
acgugugacaucuuaagag

SEQ ID NO: 1813675 - RNA, 19 nt, Artificial Sequence
  Description of Artificial Sequence: Synthetic oligonucleotide
aucguuuccggauuuacag

SEQ ID NO: 1813676 - RNA, 19 nt, Artificial Sequence
  Description of Artificial Sequence: Synthetic oligonucleotide
aguaugaucugcucucugg

SEQ ID NO: 1813677 - RNA, 19 nt, Artificial Sequence
  Description of Artificial Sequence: Synthetic oligonucleotide
caaaucagugaacaauucg

SEQ ID NO: 1813678 - RNA, 19 nt, Artificial Sequence
  Description of Artificial Sequence: Synthetic oligonucleotide
gguaacaauaugcauaggc

SEQ ID NO: 1813679 - RNA, 19 nt, Artificial Sequence
  Description of Artificial Sequence: Synthetic oligonucleotide
gaugaucucaaaucauugc

SEQ ID NO: 1813680 - RNA, 19 nt, Artificial Sequence
  Description of Artificial Sequence: Synthetic oligonucleotide
uaaaguaugaucugcucuc

SEQ ID NO: 1813681 - RNA, 19 nt, Artificial Sequence
  Description of Artificial Sequence: Synthetic oligonucleotide
gacguaagcgucuaugagc

SEQ ID NO: 1813682 - RNA, 19 nt, Artificial Sequence
  Description of Artificial Sequence: Synthetic oligonucleotide
aaguuaauaauuauccuau

SEQ ID NO: 1813683 - RNA, 19 nt, Artificial Sequence
  Description of Artificial Sequence: Synthetic oligonucleotide
auaucugguuccuuuacag

SEQ ID NO: 1813684 - RNA, 19 nt, Artificial Sequence
  Description of Artificial Sequence: Synthetic oligonucleotide
auuucuaagcacgugugac

SEQ ID NO: 1813685 - RNA, 19 nt, Artificial Sequence
  Description of Artificial Sequence: Synthetic oligonucleotide
uuuagcagaguacgcaggc

SEQ ID NO: 1813686 - RNA, 19 nt, Artificial Sequence
  Description of Artificial Sequence: Synthetic oligonucleotide
uuccgaaagaacaaguguc

SEQ ID NO: 1813687 - RNA, 19 nt, Artificial Sequence
  Description of Artificial Sequence: Synthetic oligonucleotide
  modified_base (3)..(3): a, c, u, g, unknown or other
aunugaacugaaguccugc

SEQ ID NO: 1813688 - RNA, 19 nt, Artificial Sequence
  Description of Artificial Sequence: Synthetic oligonucleotide
gcuacguuaaaucccaugg

SEQ ID NO: 1813689 - RNA, 19 nt, Artificial Sequence
  Description of Artificial Sequence: Synthetic oligonucleotide
ggauuuacagcucaaauca

SEQ ID NO: 1813690 - RNA, 19 nt, Artificial Sequence
  Description of Artificial Sequence: Synthetic oligonucleotide
uauaccauaaugcuacguu

SEQ ID NO: 1813691 - RNA, 19 nt, Artificial Sequence
  Description of Artificial Sequence: Synthetic oligonucleotide
ugcagcuuaucuuagggac

SEQ ID NO: 1813692 - RNA, 19 nt, Artificial Sequence
  Description of Artificial Sequence: Synthetic oligonucleotide
cucucucugacauuugucc

SEQ ID NO: 1813693 - RNA, 19 nt, Artificial Sequence
  Description of Artificial Sequence: Synthetic oligonucleotide
acguaagcgucuaugagcc

SEQ ID NO: 1813694 - RNA, 19 nt, Artificial Sequence
  Description of Artificial Sequence: Synthetic oligonucleotide
agugagcacucauaggagg

SEQ ID NO: 1813695 - RNA, 19 nt, Artificial Sequence
  Description of Artificial Sequence: Synthetic oligonucleotide
auacaagucugcugcauuc

SEQ ID NO: 1813696 - RNA, 19 nt, Artificial Sequence
  Description of Artificial Sequence: Synthetic oligonucleotide
aaucagugaacaauucgag

SEQ ID NO: 1813697 - RNA, 19 nt, Artificial Sequence
  Description of Artificial Sequence: Synthetic oligonucleotide
aaugcuacguuaaauccca

SEQ ID NO: 1813698 - RNA, 19 nt, Artificial Sequence
  Description of Artificial Sequence: Synthetic oligonucleotide
  modified_base (5)..(5): a, c, u, g, unknown or other
aaaunugaacugaaguccu

SEQ ID NO: 1813699 - RNA, 19 nt, Artificial Sequence
  Description of Artificial Sequence: Synthetic oligonucleotide
uggaacauggccuugcaau

SEQ ID NO: 1813700 - RNA, 19 nt, Artificial Sequence
  Description of Artificial Sequence: Synthetic oligonucleotide
auacucuuugcacagggcu

SEQ ID NO: 1813701 - RNA, 19 nt, Artificial Sequence
  Description of Artificial Sequence: Synthetic oligonucleotide
agccucuaaguccuggccc

SEQ ID NO: 1813702 - RNA, 19 nt, Artificial Sequence
  Description of Artificial Sequence: Synthetic oligonucleotide
ugucaguccacuugaaacu

SEQ ID NO: 1813703 - RNA, 19 nt, Artificial Sequence
  Description of Artificial Sequence: Synthetic oligonucleotide
cugaacauaccguaauuug

SEQ ID NO: 1813704 - RNA, 19 nt, Artificial Sequence
  Description of Artificial Sequence: Synthetic oligonucleotide
ucuuaagagacagagcauc

SEQ ID NO: 1813705 - RNA, 19 nt, Artificial Sequence
  Description of Artificial Sequence: Synthetic oligonucleotide
gaucaaaugcagccaacgc

SEQ ID NO: 1813706 - RNA, 19 nt, Artificial Sequence
  Description of Artificial Sequence: Synthetic oligonucleotide
aaacucugaacauaccgua

SEQ ID NO: 1813707 - RNA, 19 nt, Artificial Sequence
  Description of Artificial Sequence: Synthetic oligonucleotide
cauuuagcagaguacgcag

SEQ ID NO: 1813708 - RNA, 19 nt, Artificial Sequence
  Description of Artificial Sequence: Synthetic oligonucleotide
uggauaaaguaugaucugc

SEQ ID NO: 1813709 - RNA, 19 nt, Artificial Sequence
  Description of Artificial Sequence: Synthetic oligonucleotide
auaauuauccuaugggcuu

SEQ ID NO: 1813710 - RNA, 19 nt, Artificial Sequence
  Description of Artificial Sequence: Synthetic oligonucleotide
ugguguaagaaguuugggu

SEQ ID NO: 1813711 - RNA, 19 nt, Artificial Sequence
  Description of Artificial Sequence: Synthetic oligonucleotide
cuccauuuagcagaguacg

SEQ ID NO: 1813712 - RNA, 19 nt, Artificial Sequence
  Description of Artificial Sequence: Synthetic oligonucleotide
uauaugacuuuccuuuaaa

SEQ ID NO: 1813713 - RNA, 19 nt, Artificial Sequence
  Description of Artificial Sequence: Synthetic oligonucleotide
uuuggguuugacacuguca

SEQ ID NO: 1813714 - RNA, 19 nt, Artificial Sequence
  Description of Artificial Sequence: Synthetic oligonucleotide
agaucaaaugcagccaacg

SEQ ID NO: 1813715 - RNA, 19 nt, Artificial Sequence
  Description of Artificial Sequence: Synthetic oligonucleotide
ugaucucaaaucauugcaa

SEQ ID NO: 1813716 - RNA, 19 nt, Artificial Sequence
  Description of Artificial Sequence: Synthetic oligonucleotide
uuucauaggcaagagcagc

SEQ ID NO: 1813717 - RNA, 19 nt, Artificial Sequence
  Description of Artificial Sequence: Synthetic oligonucleotide
uaucuuagggacuggcagc

SEQ ID NO: 1813718 - RNA, 19 nt, Artificial Sequence
  Description of Artificial Sequence: Synthetic oligonucleotide
ugacauuuguccagggugu

SEQ ID NO: 1813719 - RNA, 19 nt, Artificial Sequence
  Description of Artificial Sequence: Synthetic oligonucleotide
ugagaucaaaugcagccaa

SEQ ID NO: 1813720 - RNA, 19 nt, Artificial Sequence
  Description of Artificial Sequence: Synthetic oligonucleotide
ugaacaauucgaggagucg

SEQ ID NO: 1813721 - RNA, 19 nt, Artificial Sequence
  Description of Artificial Sequence: Synthetic oligonucleotide
agcgagauuucuaagcacg

SEQ ID NO: 1813722 - RNA, 19 nt, Artificial Sequence
  Description of Artificial Sequence: Synthetic oligonucleotide
gaauuuaugaaaccuugua

SEQ ID NO: 1813723 - RNA, 19 nt, Artificial Sequence
  Description of Artificial Sequence: Synthetic oligonucleotide
uucgauggacuucuuuugc

SEQ ID NO: 1813724 - RNA, 19 nt, Artificial Sequence
  Description of Artificial Sequence: Synthetic oligonucleotide
gugucaguccacuugaaac

SEQ ID NO: 1813725 - RNA, 19 nt, Artificial Sequence
  Description of Artificial Sequence: Synthetic oligonucleotide
agcgucuaugagccgagcc

SEQ ID NO: 1813726 - RNA, 19 nt, Artificial Sequence
  Description of Artificial Sequence: Synthetic oligonucleotide
caauuguuacuucuugcgc

SEQ ID NO: 1813727 - RNA, 19 nt, Artificial Sequence
  Description of Artificial Sequence: Synthetic oligonucleotide
acacuuaucacuagccaac

SEQ ID NO: 1813728 - RNA, 19 nt, Artificial Sequence
  Description of Artificial Sequence: Synthetic oligonucleotide
uaugagccgagccucuaag

SEQ ID NO: 1813729 - RNA, 19 nt, Artificial Sequence
  Description of Artificial Sequence: Synthetic oligonucleotide
caggguguucuucacaagg

SEQ ID NO: 1813730 - RNA, 19 nt, Artificial Sequence
  Description of Artificial Sequence: Synthetic oligonucleotide
uuuuaggcuucgauggacu

SEQ ID NO: 1813731 - RNA, 19 nt, Artificial Sequence
  Description of Artificial Sequence: Synthetic oligonucleotide
cuugcaaugugucagucca

SEQ ID NO: 1813732 - RNA, 19 nt, Artificial Sequence
  Description of Artificial Sequence: Synthetic oligonucleotide
ugcugguguaagaaguuug

SEQ ID NO: 1813733 - RNA, 19 nt, Artificial Sequence
  Description of Artificial Sequence: Synthetic oligonucleotide
aguuaauaauuauccuaug

SEQ ID NO: 1813734 - RNA, 19 nt, Artificial Sequence
  Description of Artificial Sequence: Synthetic oligonucleotide
gugaauuuaugaaaccuug

SEQ ID NO: 1813735 - RNA, 19 nt, Artificial Sequence
  Description of Artificial Sequence: Synthetic oligonucleotide
cauaccguaauuugcuuuc

SEQ ID NO: 1813736 - RNA, 19 nt, Artificial Sequence
  Description of Artificial Sequence: Synthetic oligonucleotide
uaccauaaugcuacguuaa

SEQ ID NO: 1813737 - RNA, 19 nt, Artificial Sequence
  Description of Artificial Sequence: Synthetic oligonucleotide
ugagaaauacaagucugcu

SEQ ID NO: 1813738 - RNA, 19 nt, Artificial Sequence
  Description of Artificial Sequence: Synthetic oligonucleotide
  modified_base (2)..(2): a, c, u, g, unknown or other
unugaacugaaguccugca

SEQ ID NO: 1813739 - RNA, 19 nt, Artificial Sequence
  Description of Artificial Sequence: Synthetic oligonucleotide
uccauuuagcagaguacgc

SEQ ID NO: 1813740 - RNA, 19 nt, Artificial Sequence
  Description of Artificial Sequence: Synthetic oligonucleotide
auuguuacuucuugcgccu

SEQ ID NO: 1813741 - RNA, 19 nt, Artificial Sequence
  Description of Artificial Sequence: Synthetic oligonucleotide
uaggccguguaaaagcaca

SEQ ID NO: 1813742 - RNA, 19 nt, Artificial Sequence
  Description of Artificial Sequence: Synthetic oligonucleotide
ucaagugaagguacuuccu

SEQ ID NO: 1813743 - RNA, 19 nt, Artificial Sequence
  Description of Artificial Sequence: Synthetic oligonucleotide
uccuccauuuagcagagua

SEQ ID NO: 1813744 - RNA, 19 nt, Artificial Sequence
  Description of Artificial Sequence: Synthetic oligonucleotide
ugagguuugauaucugguu

SEQ ID NO: 1813745 - RNA, 19 nt, Artificial Sequence
  Description of Artificial Sequence: Synthetic oligonucleotide
ucccauggagaucaauuca

SEQ ID NO: 1813746 - RNA, 19 nt, Artificial Sequence
  Description of Artificial Sequence: Synthetic oligonucleotide
aaacccauucucucucuga

SEQ ID NO: 1813747 - RNA, 19 nt, Artificial Sequence
  Description of Artificial Sequence: Synthetic oligonucleotide
aacaauucgaggagucgag

SEQ ID NO: 1813748 - RNA, 19 nt, Artificial Sequence
  Description of Artificial Sequence: Synthetic oligonucleotide
uugguauaccauaaugcua

SEQ ID NO: 1813749 - RNA, 19 nt, Artificial Sequence
  Description of Artificial Sequence: Synthetic oligonucleotide
uggaugaucucaaaucauu

SEQ ID NO: 1813750 - RNA, 19 nt, Artificial Sequence
  Description of Artificial Sequence: Synthetic oligonucleotide
cuuggagagaccugaucgc

SEQ ID NO: 1813751 - RNA, 19 nt, Artificial Sequence
  Description of Artificial Sequence: Synthetic oligonucleotide
uuacagcucaaaucaguga

SEQ ID NO: 1813752 - RNA, 19 nt, Artificial Sequence
  Description of Artificial Sequence: Synthetic oligonucleotide
acaucuuaagagacagagc

SEQ ID NO: 1813753 - RNA, 19 nt, Artificial Sequence
  Description of Artificial Sequence: Synthetic oligonucleotide
  modified_base (4)..(4): a, c, u, g, unknown or other
aaunugaacugaaguccug

SEQ ID NO: 1813754 - RNA, 19 nt, Artificial Sequence
  Description of Artificial Sequence: Synthetic oligonucleotide
gguagaaucgcccagugaa

SEQ ID NO: 1813755 - RNA, 19 nt, Artificial Sequence
  Description of Artificial Sequence: Synthetic oligonucleotide
caaugugucaguccacuug

SEQ ID NO: 1813756 - RNA, 19 nt, Artificial Sequence
  Description of Artificial Sequence: Synthetic oligonucleotide
guuugguuuccccauacuc

SEQ ID NO: 1813757 - RNA, 19 nt, Artificial Sequence
  Description of Artificial Sequence: Synthetic oligonucleotide
aguuguggggcuucuguug

SEQ ID NO: 1813758 - RNA, 19 nt, Artificial Sequence
  Description of Artificial Sequence: Synthetic oligonucleotide
auaugacuuuccuuuaaau

SEQ ID NO: 1813759 - RNA, 19 nt, Artificial Sequence
  Description of Artificial Sequence: Synthetic oligonucleotide
uccguuauguuuucuuuuc

SEQ ID NO: 1813760 - RNA, 19 nt, Artificial Sequence
  Description of Artificial Sequence: Synthetic oligonucleotide
ugagccgagccucuaaguc

SEQ ID NO: 1813761 - RNA, 19 nt, Artificial Sequence
  Description of Artificial Sequence: Synthetic oligonucleotide
cuagccaacagagucuggc

SEQ ID NO: 1813762 - RNA, 19 nt, Artificial Sequence
  Description of Artificial Sequence: Synthetic oligonucleotide
gauaucugguuccuuuaca

SEQ ID NO: 1813763 - RNA, 19 nt, Artificial Sequence
  Description of Artificial Sequence: Synthetic oligonucleotide
ucucucugacauuugucca

SEQ ID NO: 1813764 - RNA, 19 nt, Artificial Sequence
  Description of Artificial Sequence: Synthetic oligonucleotide
cuucgauggacuucuuuug

SEQ ID NO: 1813765 - RNA, 19 nt, Artificial Sequence
  Description of Artificial Sequence: Synthetic oligonucleotide
uccagugagcacucauagg

SEQ ID NO: 1813766 - RNA, 19 nt, Artificial Sequence
  Description of Artificial Sequence: Synthetic oligonucleotide
uucuucaucguuuccggau

SEQ ID NO: 1813767 - RNA, 19 nt, Artificial Sequence
  Description of Artificial Sequence: Synthetic oligonucleotide
ugcagcucaauugcgcggg

SEQ ID NO: 1813768 - RNA, 19 nt, Artificial Sequence
  Description of Artificial Sequence: Synthetic oligonucleotide
aucuuagggacuggcagcg

SEQ ID NO: 1813769 - RNA, 19 nt, Artificial Sequence
  Description of Artificial Sequence: Synthetic oligonucleotide
ucgcccagugaauuuauga

SEQ ID NO: 1813770 - RNA, 19 nt, Artificial Sequence
  Description of Artificial Sequence: Synthetic oligonucleotide
ucucugacauuuguccagg

SEQ ID NO: 1813771 - RNA, 19 nt, Artificial Sequence
  Description of Artificial Sequence: Synthetic oligonucleotide
gagauuucuaagcacgugu

SEQ ID NO: 1813772 - RNA, 19 nt, Artificial Sequence
  Description of Artificial Sequence: Synthetic oligonucleotide
uuauccuaugggcuucaga

SEQ ID NO: 1813773 - RNA, 19 nt, Artificial Sequence
  Description of Artificial Sequence: Synthetic oligonucleotide
auaccauaaugcuacguua

SEQ ID NO: 1813774 - RNA, 19 nt, Artificial Sequence
  Description of Artificial Sequence: Synthetic oligonucleotide
aggguguucuucacaaggc

SEQ ID NO: 1813775 - RNA, 19 nt, Artificial Sequence
  Description of Artificial Sequence: Synthetic oligonucleotide
gauuucuaagcacguguga

SEQ ID NO: 1813776 - RNA, 19 nt, Artificial Sequence
  Description of Artificial Sequence: Synthetic oligonucleotide
uaccagcccauaauuuugc

SEQ ID NO: 1813777 - RNA, 19 nt, Artificial Sequence
  Description of Artificial Sequence: Synthetic oligonucleotide
ugcuacguuaaaucccaug

SEQ ID NO: 1813778 - RNA, 19 nt, Artificial Sequence
  Description of Artificial Sequence: Synthetic oligonucleotide
agcgaugagucccggggcg

SEQ ID NO: 1813779 - RNA, 19 nt, Artificial Sequence
  Description of Artificial Sequence: Synthetic oligonucleotide
uggccuugcaaugugucag

SEQ ID NO: 1813780 - RNA, 19 nt, Artificial Sequence
  Description of Artificial Sequence: Synthetic oligonucleotide
ucugaacauaccguaauuu

SEQ ID NO: 1813781 - RNA, 19 nt, Artificial Sequence
  Description of Artificial Sequence: Synthetic oligonucleotide
auuuagcagaguacgcagg

SEQ ID NO: 1813782 - RNA, 19 nt, Artificial Sequence
  Description of Artificial Sequence: Synthetic oligonucleotide
gaacaauucgaggagucga

SEQ ID NO: 1813783 - RNA, 19 nt, Artificial Sequence
  Description of Artificial Sequence: Synthetic oligonucleotide
aaaguaugaucugcucucu

SEQ ID NO: 1813784 - RNA, 19 nt, Artificial Sequence
  Description of Artificial Sequence: Synthetic oligonucleotide
acuuaucacuagccaacag

SEQ ID NO: 1813785 - RNA, 19 nt, Artificial Sequence
  Description of Artificial Sequence: Synthetic oligonucleotide
ugugucaguccacuugaaa

SEQ ID NO: 1813786 - RNA, 19 nt, Artificial Sequence
  Description of Artificial Sequence: Synthetic oligonucleotide
cuuagggacuggcagcgag

SEQ ID NO: 1813787 - RNA, 19 nt, Artificial Sequence
  Description of Artificial Sequence: Synthetic oligonucleotide
ccguaauuugcuuucuugg

SEQ ID NO: 1813788 - RNA, 19 nt, Artificial Sequence
  Description of Artificial Sequence: Synthetic oligonucleotide
ucguuuccggauuuacagc

SEQ ID NO: 1813789 - RNA, 19 nt, Artificial Sequence
  Description of Artificial Sequence: Synthetic oligonucleotide
uguccuguuugguuucccc

SEQ ID NO: 1813790 - RNA, 19 nt, Artificial Sequence
  Description of Artificial Sequence: Synthetic oligonucleotide
aacauaccguaauuugcuu

SEQ ID NO: 1813791 - RNA, 19 nt, Artificial Sequence
  Description of Artificial Sequence: Synthetic oligonucleotide
aaauacaagucugcugcau

SEQ ID NO: 1813792 - RNA, 19 nt, Artificial Sequence
  Description of Artificial Sequence: Synthetic oligonucleotide
auaugcauaggccguguaa

SEQ ID NO: 1813793 - RNA, 19 nt, Artificial Sequence
  Description of Artificial Sequence: Synthetic oligonucleotide
aucucaaaucauugcaaau

SEQ ID NO: 1813794 - RNA, 19 nt, Artificial Sequence
  Description of Artificial Sequence: Synthetic oligonucleotide
aguacgcaggcuccaaacu

SEQ ID NO: 1813795 - RNA, 19 nt, Artificial Sequence
  Description of Artificial Sequence: Synthetic oligonucleotide
ucgauggacuucuuuugcu

SEQ ID NO: 1813796 - RNA, 19 nt, Artificial Sequence
  Description of Artificial Sequence: Synthetic oligonucleotide
uucuaagcacgugugacau

SEQ ID NO: 1813797 - RNA, 19 nt, Artificial Sequence
  Description of Artificial Sequence: Synthetic oligonucleotide
gaguacgcaggcuccaaac

SEQ ID NO: 1813798 - RNA, 19 nt, Artificial Sequence
  Description of Artificial Sequence: Synthetic oligonucleotide
gcauaggccguguaaaagc

SEQ ID NO: 1813799 - RNA, 19 nt, Artificial Sequence
  Description of Artificial Sequence: Synthetic oligonucleotide
  modified_base (8)..(8): a, c, u, g, unknown or other
cagaaaunugaacugaagu

SEQ ID NO: 1813800 - RNA, 19 nt, Artificial Sequence
  Description of Artificial Sequence: Synthetic oligonucleotide
agauuucuaagcacgugug

SEQ ID NO: 1813801 - RNA, 19 nt, Artificial Sequence
  Description of Artificial Sequence: Synthetic oligonucleotide
uuagggacuggcagcgaga

SEQ ID NO: 1813802 - RNA, 19 nt, Artificial Sequence
  Description of Artificial Sequence: Synthetic oligonucleotide
uagccaacagagucuggcc

SEQ ID NO: 1813803 - RNA, 19 nt, Artificial Sequence
  Description of Artificial Sequence: Synthetic oligonucleotide
ucuggccaugguaacaaua

SEQ ID NO: 1813804 - RNA, 19 nt, Artificial Sequence
  Description of Artificial Sequence: Synthetic oligonucleotide
augaaaccuuguaaaagug

SEQ ID NO: 1813805 - RNA, 19 nt, Artificial Sequence
  Description of Artificial Sequence: Synthetic oligonucleotide
cuuggguagaaucgcccag

SEQ ID NO: 1813806 - RNA, 19 nt, Artificial Sequence
  Description of Artificial Sequence: Synthetic oligonucleotide
ggcagcgagauuucuaagc

SEQ ID NO: 1813807 - RNA, 19 nt, Artificial Sequence
  Description of Artificial Sequence: Synthetic oligonucleotide
uguuugguuuccccauacu

SEQ ID NO: 1813808 - RNA, 19 nt, Artificial Sequence
  Description of Artificial Sequence: Synthetic oligonucleotide
cuuaucuuagggacuggca

SEQ ID NO: 1813809 - RNA, 19 nt, Artificial Sequence
  Description of Artificial Sequence: Synthetic oligonucleotide
gaccugaucgcuucuccac

SEQ ID NO: 1813810 - RNA, 19 nt, Artificial Sequence
  Description of Artificial Sequence: Synthetic oligonucleotide
ucaauugcgcgggcaauug

SEQ ID NO: 1813811 - RNA, 19 nt, Artificial Sequence
  Description of Artificial Sequence: Synthetic oligonucleotide
gguacuuccuccauuuagc

SEQ ID NO: 1813812 - RNA, 19 nt, Artificial Sequence
  Description of Artificial Sequence: Synthetic oligonucleotide
aauaugcauaggccgugua

SEQ ID NO: 1813813 - RNA, 19 nt, Artificial Sequence
  Description of Artificial Sequence: Synthetic oligonucleotide
acagcucaaaucagugaac

SEQ ID NO: 1813814 - RNA, 19 nt, Artificial Sequence
  Description of Artificial Sequence: Synthetic oligonucleotide
uggguagaaucgcccagug

SEQ ID NO: 1813815 - RNA, 19 nt, Artificial Sequence
  Description of Artificial Sequence: Synthetic oligonucleotide
aggagucgaguccuggaug

SEQ ID NO: 1813816 - RNA, 19 nt, Artificial Sequence
  Description of Artificial Sequence: Synthetic oligonucleotide
guaauuugcuuucuugggu

SEQ ID NO: 1813817 - RNA, 19 nt, Artificial Sequence
  Description of Artificial Sequence: Synthetic oligonucleotide
acauaccguaauuugcuuu

SEQ ID NO: 1813818 - RNA, 19 nt, Artificial Sequence
  Description of Artificial Sequence: Synthetic oligonucleotide
uguccagugagcacucaua

SEQ ID NO: 1813819 - RNA, 19 nt, Artificial Sequence
  Description of Artificial Sequence: Synthetic oligonucleotide
cauaggccguguaaaagca

SEQ ID NO: 1813820 - RNA, 19 nt, Artificial Sequence
  Description of Artificial Sequence: Synthetic oligonucleotide
aacaaguguccuguuuggu

SEQ ID NO: 1813821 - RNA, 19 nt, Artificial Sequence
  Description of Artificial Sequence: Synthetic oligonucleotide
gagccucuaaguccuggcc

SEQ ID NO: 1813822 - RNA, 19 nt, Artificial Sequence
  Description of Artificial Sequence: Synthetic oligonucleotide
gaacauaccguaauuugcu

SEQ ID NO: 1813823 - RNA, 19 nt, Artificial Sequence
  Description of Artificial Sequence: Synthetic oligonucleotide
cguaauuugcuuucuuggg

SEQ ID NO: 1813824 - RNA, 19 nt, Artificial Sequence
  Description of Artificial Sequence: Synthetic oligonucleotide
ucaguccacuugaaacucu

SEQ ID NO: 1813825 - RNA, 19 nt, Artificial Sequence
  Description of Artificial Sequence: Synthetic oligonucleotide
cacacuuaucacuagccaa

SEQ ID NO: 1813826 - RNA, 19 nt, Artificial Sequence
  Description of Artificial Sequence: Synthetic oligonucleotide
cugguguaagaaguuuggg

SEQ ID NO: 1813827 - RNA, 19 nt, Artificial Sequence
  Description of Artificial Sequence: Synthetic oligonucleotide
aagcacgugugacaucuua

SEQ ID NO: 1813828 - RNA, 19 nt, Artificial Sequence
  Description of Artificial Sequence: Synthetic oligonucleotide
uccaagcuuccgaaagaac

SEQ ID NO: 1813829 - RNA, 19 nt, Artificial Sequence
  Description of Artificial Sequence: Synthetic oligonucleotide
ugcacagggcuucugccuc

SEQ ID NO: 1813830 - RNA, 19 nt, Artificial Sequence
  Description of Artificial Sequence: Synthetic oligonucleotide
acaauaugcauaggccgug

SEQ ID NO: 1813831 - RNA, 19 nt, Artificial Sequence
  Description of Artificial Sequence: Synthetic oligonucleotide
uguaagaaguuuggguaua

SEQ ID NO: 1813832 - RNA, 19 nt, Artificial Sequence
  Description of Artificial Sequence: Synthetic oligonucleotide
uuggagagaccugaucgcu

SEQ ID NO: 1813833 - RNA, 19 nt, Artificial Sequence
  Description of Artificial Sequence: Synthetic oligonucleotide
auaggcaagagcagcgaug

SEQ ID NO: 1813834 - RNA, 19 nt, Artificial Sequence
  Description of Artificial Sequence: Synthetic oligonucleotide
ggaugaucucaaaucauug

SEQ ID NO: 1813835 - RNA, 19 nt, Artificial Sequence
  Description of Artificial Sequence: Synthetic oligonucleotide
uugcgccucagccuggcac

SEQ ID NO: 1813836 - RNA, 19 nt, Artificial Sequence
  Description of Artificial Sequence: Synthetic oligonucleotide
uccuguuugguuuccccau

SEQ ID NO: 1813837 - RNA, 19 nt, Artificial Sequence
  Description of Artificial Sequence: Synthetic oligonucleotide
acguuaaaucccauggaga

SEQ ID NO: 1813838 - RNA, 19 nt, Artificial Sequence
  Description of Artificial Sequence: Synthetic oligonucleotide
uuccaagcuuccgaaagaa

SEQ ID NO: 1813839 - RNA, 19 nt, Artificial Sequence
  Description of Artificial Sequence: Synthetic oligonucleotide
guaagcgucuaugagccga

SEQ ID NO: 1813840 - RNA, 19 nt, Artificial Sequence
  Description of Artificial Sequence: Synthetic oligonucleotide
guacuuccuccauuuagca

SEQ ID NO: 1813841 - RNA, 19 nt, Artificial Sequence
  Description of Artificial Sequence: Synthetic oligonucleotide
aauugcgcgggcaauuguu

SEQ ID NO: 1813842 - RNA, 19 nt, Artificial Sequence
  Description of Artificial Sequence: Synthetic oligonucleotide
auccuaugggcuucagaga

SEQ ID NO: 1813843 - RNA, 19 nt, Artificial Sequence
  Description of Artificial Sequence: Synthetic oligonucleotide
aguguccuguuugguuucc

SEQ ID NO: 1813844 - RNA, 19 nt, Artificial Sequence
  Description of Artificial Sequence: Synthetic oligonucleotide
accauaaugcuacguuaaa

SEQ ID NO: 1813845 - RNA, 19 nt, Artificial Sequence
  Description of Artificial Sequence: Synthetic oligonucleotide
cagcuuaucuuagggacug

SEQ ID NO: 1813846 - RNA, 19 nt, Artificial Sequence
  Description of Artificial Sequence: Synthetic oligonucleotide
auucgaggagucgaguccu

SEQ ID NO: 1813847 - RNA, 19 nt, Artificial Sequence
  Description of Artificial Sequence: Synthetic oligonucleotide
cuuccgguguccagugagc

SEQ ID NO: 1813848 - RNA, 19 nt, Artificial Sequence
  Description of Artificial Sequence: Synthetic oligonucleotide
gguauaccauaaugcuacg

SEQ ID NO: 1813849 - RNA, 19 nt, Artificial Sequence
  Description of Artificial Sequence: Synthetic oligonucleotide
agaccugaucgcuucucca

SEQ ID NO: 1813850 - RNA, 19 nt, Artificial Sequence
  Description of Artificial Sequence: Synthetic oligonucleotide
cuacguuaaaucccaugga

SEQ ID NO: 1813851 - RNA, 19 nt, Artificial Sequence
  Description of Artificial Sequence: Synthetic oligonucleotide
gcacgugugacaucuuaag

SEQ ID NO: 1813852 - RNA, 19 nt, Artificial Sequence
  Description of Artificial Sequence: Synthetic oligonucleotide
uuggguagaaucgcccagu

SEQ ID NO: 1813853 - RNA, 19 nt, Artificial Sequence
  Description of Artificial Sequence: Synthetic oligonucleotide
auaggccguguaaaagcac

SEQ ID NO: 1813854 - RNA, 19 nt, Artificial Sequence
  Description of Artificial Sequence: Synthetic oligonucleotide
aagcgucuaugagccgagc

SEQ ID NO: 1813855 - RNA, 19 nt, Artificial Sequence
  Description of Artificial Sequence: Synthetic oligonucleotide
guuuggguuugacacuguc

SEQ ID NO: 1813856 - RNA, 19 nt, Artificial Sequence
  Description of Artificial Sequence: Synthetic oligonucleotide
ucgaggagucgaguccugg

SEQ ID NO: 1813857 - RNA, 19 nt, Artificial Sequence
  Description of Artificial Sequence: Synthetic oligonucleotide
agagcagcgaugagucccg

SEQ ID NO: 1813858 - RNA, 19 nt, Artificial Sequence
  Description of Artificial Sequence: Synthetic oligonucleotide
agaaucgcccagugaauuu

SEQ ID NO: 1813859 - RNA, 19 nt, Artificial Sequence
  Description of Artificial Sequence: Synthetic oligonucleotide
uagaaucgcccagugaauu

SEQ ID NO: 1813860 - RNA, 19 nt, Artificial Sequence
  Description of Artificial Sequence: Synthetic oligonucleotide
cuaagcacgugugacaucu

SEQ ID NO: 1813861 - RNA, 19 nt, Artificial Sequence
  Description of Artificial Sequence: Synthetic oligonucleotide
agcucaauugcgcgggcaa

SEQ ID NO: 1813862 - RNA, 19 nt, Artificial Sequence
  Description of Artificial Sequence: Synthetic oligonucleotide
cagcgagauuucuaagcac

SEQ ID NO: 1813863 - RNA, 19 nt, Artificial Sequence
  Description of Artificial Sequence: Synthetic oligonucleotide
ugcgccucagccuggcacu

SEQ ID NO: 1813864 - RNA, 19 nt, Artificial Sequence
  Description of Artificial Sequence: Synthetic oligonucleotide
guuaaaucccauggagauc

SEQ ID NO: 1813865 - RNA, 19 nt, Artificial Sequence
  Description of Artificial Sequence: Synthetic oligonucleotide
uggcagcgagauuucuaag

SEQ ID NO: 1813866 - RNA, 19 nt, Artificial Sequence
  Description of Artificial Sequence: Synthetic oligonucleotide
ugguaacaauaugcauagg

SEQ ID NO: 1813867 - RNA, 19 nt, Artificial Sequence
  Description of Artificial Sequence: Synthetic oligonucleotide
ugcgcgggcaauuguuacu

SEQ ID NO: 1813868 - RNA, 19 nt, Artificial Sequence
  Description of Artificial Sequence: Synthetic oligonucleotide
gcagcgagauuucuaagca

SEQ ID NO: 1813869 - RNA, 19 nt, Artificial Sequence
  Description of Artificial Sequence: Synthetic oligonucleotide
caucguuuccggauuuaca

SEQ ID NO: 1813870 - RNA, 19 nt, Artificial Sequence
  Description of Artificial Sequence: Synthetic oligonucleotide
gugaacaauucgaggaguc

SEQ ID NO: 1813871 - RNA, 19 nt, Artificial Sequence
  Description of Artificial Sequence: Synthetic oligonucleotide
caagagcagcgaugagucc

SEQ ID NO: 1813872 - RNA, 19 nt, Artificial Sequence
  Description of Artificial Sequence: Synthetic oligonucleotide
cuuccaagcuuccgaaaga

SEQ ID NO: 1813873 - RNA, 19 nt, Artificial Sequence
  Description of Artificial Sequence: Synthetic oligonucleotide
gcuuccgguguccagugag

SEQ ID NO: 1813874 - RNA, 19 nt, Artificial Sequence
  Description of Artificial Sequence: Synthetic oligonucleotide
uugcgcgggcaauuguuac

SEQ ID NO: 1813875 - RNA, 19 nt, Artificial Sequence
  Description of Artificial Sequence: Synthetic oligonucleotide
cacgugugacaucuuaaga

SEQ ID NO: 1813876 - RNA, 19 nt, Artificial Sequence
  Description of Artificial Sequence: Synthetic oligonucleotide
gggcaauuguuacuucuug

SEQ ID NO: 1813877 - RNA, 19 nt, Artificial Sequence
  Description of Artificial Sequence: Synthetic oligonucleotide
uuccgguguccagugagca

SEQ ID NO: 1813878 - RNA, 19 nt, Artificial Sequence
  Description of Artificial Sequence: Synthetic oligonucleotide
ggagucgaguccuggauga

SEQ ID NO: 1813879 - RNA, 19 nt, Artificial Sequence
  Description of Artificial Sequence: Synthetic oligonucleotide
uugggucucuuggugagau

SEQ ID NO: 1813880 - RNA, 19 nt, Artificial Sequence
  Description of Artificial Sequence: Synthetic oligonucleotide
gcagccaacgcuuccggug

SEQ ID NO: 1813881 - RNA, 19 nt, Artificial Sequence
  Description of Artificial Sequence: Synthetic oligonucleotide
agucuggccaugguaacaa

SEQ ID NO: 1813882 - RNA, 19 nt, Artificial Sequence
  Description of Artificial Sequence: Synthetic oligonucleotide
cagcucaaaucagugaaca

SEQ ID NO: 1813883 - RNA, 19 nt, Artificial Sequence
  Description of Artificial Sequence: Synthetic oligonucleotide
ugagcacucauaggaggaa

SEQ ID NO: 1813884 - RNA, 19 nt, Artificial Sequence
  Description of Artificial Sequence: Synthetic oligonucleotide
acaauucgaggagucgagu

SEQ ID NO: 1813885 - RNA, 19 nt, Artificial Sequence
  Description of Artificial Sequence: Synthetic oligonucleotide
agcacaucuucaagugaag

SEQ ID NO: 1813886 - RNA, 19 nt, Artificial Sequence
  Description of Artificial Sequence: Synthetic oligonucleotide
uggagagaccugaucgcuu

SEQ ID NO: 1813887 - RNA, 19 nt, Artificial Sequence
  Description of Artificial Sequence: Synthetic oligonucleotide
uccggauuuacagcucaaa

SEQ ID NO: 1813888 - RNA, 19 nt, Artificial Sequence
  Description of Artificial Sequence: Synthetic oligonucleotide
agcuuccgaaagaacaagu

SEQ ID NO: 1813889 - RNA, 19 nt, Artificial Sequence
  Description of Artificial Sequence: Synthetic oligonucleotide
ggagagaccugaucgcuuc

SEQ ID NO: 1813890 - RNA, 19 nt, Artificial Sequence
  Description of Artificial Sequence: Synthetic oligonucleotide
cagcccauaauuuugcuuu

SEQ ID NO: 1813891 - RNA, 19 nt, Artificial Sequence
  Description of Artificial Sequence: Synthetic oligonucleotide
gugagcacucauaggagga

SEQ ID NO: 1813892 - RNA, 19 nt, Artificial Sequence
  Description of Artificial Sequence: Synthetic oligonucleotide
cugcagcuuaucuuaggga

SEQ ID NO: 1813893 - RNA, 19 nt, Artificial Sequence
  Description of Artificial Sequence: Synthetic oligonucleotide
cagugaauuuaugaaaccu

SEQ ID NO: 1813894 - RNA, 19 nt, Artificial Sequence
  Description of Artificial Sequence: Synthetic oligonucleotide
cagcgaugagucccggggc

SEQ ID NO: 1813895 - RNA, 19 nt, Artificial Sequence
  Description of Artificial Sequence: Synthetic oligonucleotide
agaguacgcaggcuccaaa

SEQ ID NO: 1813896 - RNA, 19 nt, Artificial Sequence
  Description of Artificial Sequence: Synthetic oligonucleotide
cuucugagguuugauaucu

SEQ ID NO: 1813897 - RNA, 19 nt, Artificial Sequence
  Description of Artificial Sequence: Synthetic oligonucleotide
gaaucgcccagugaauuua

SEQ ID NO: 1813898 - RNA, 19 nt, Artificial Sequence
  Description of Artificial Sequence: Synthetic oligonucleotide
ccuugcaaugugucagucc

SEQ ID NO: 1813899 - RNA, 19 nt, Artificial Sequence
  Description of Artificial Sequence: Synthetic oligonucleotide
uggguuugacacugucauc

SEQ ID NO: 1813900 - RNA, 19 nt, Artificial Sequence
  Description of Artificial Sequence: Synthetic oligonucleotide
uuccggauuuacagcucaa

SEQ ID NO: 1813901 - RNA, 19 nt, Artificial Sequence
  Description of Artificial Sequence: Synthetic oligonucleotide
aaucgcccagugaauuuau

SEQ ID NO: 1813902 - RNA, 19 nt, Artificial Sequence
  Description of Artificial Sequence: Synthetic oligonucleotide
ggcacuggaugacguaagc

SEQ ID NO: 1813903 - RNA, 19 nt, Artificial Sequence
  Description of Artificial Sequence: Synthetic oligonucleotide
gcuuaucuuagggacuggc

SEQ ID NO: 1813904 - RNA, 19 nt, Artificial Sequence
  Description of Artificial Sequence: Synthetic oligonucleotide
aucuuaagagacagagcau

SEQ ID NO: 1813905 - RNA, 19 nt, Artificial Sequence
  Description of Artificial Sequence: Synthetic oligonucleotide
auaccguaauuugcuuucu

SEQ ID NO: 1813906 - RNA, 19 nt, Artificial Sequence
  Description of Artificial Sequence: Synthetic oligonucleotide
ugguuccuuuacagguuuc

SEQ ID NO: 1813907 - RNA, 19 nt, Artificial Sequence
  Description of Artificial Sequence: Synthetic oligonucleotide
gccguguaaaagcacaucu

SEQ ID NO: 1813908 - RNA, 19 nt, Artificial Sequence
  Description of Artificial Sequence: Synthetic oligonucleotide
gaugagucccggggcgugc

SEQ ID NO: 1813909 - RNA, 19 nt, Artificial Sequence
  Description of Artificial Sequence: Synthetic oligonucleotide
caaguguccuguuugguuu

SEQ ID NO: 1813910 - RNA, 19 nt, Artificial Sequence
  Description of Artificial Sequence: Synthetic oligonucleotide
ggcacuuggaacauggccu

SEQ ID NO: 1813911 - RNA, 19 nt, Artificial Sequence
  Description of Artificial Sequence: Synthetic oligonucleotide
agcuuaucuuagggacugg

SEQ ID NO: 1813912 - RNA, 19 nt, Artificial Sequence
  Description of Artificial Sequence: Synthetic oligonucleotide
gagucuggccaugguaaca

SEQ ID NO: 1813913 - RNA, 19 nt, Artificial Sequence
  Description of Artificial Sequence: Synthetic oligonucleotide
acgcuuccgguguccagug

SEQ ID NO: 1813914 - RNA, 19 nt, Artificial Sequence
  Description of Artificial Sequence: Synthetic oligonucleotide
ccguuauguuuucuuuucc

SEQ ID NO: 1813915 - RNA, 19 nt, Artificial Sequence
  Description of Artificial Sequence: Synthetic oligonucleotide
agcacucauaggaggaaau

SEQ ID NO: 1813916 - RNA, 19 nt, Artificial Sequence
  Description of Artificial Sequence: Synthetic oligonucleotide
uggaugacguaagcgucua

SEQ ID NO: 1813917 - RNA, 19 nt, Artificial Sequence
  Description of Artificial Sequence: Synthetic oligonucleotide
agcacgugugacaucuuaa

SEQ ID NO: 1813918 - RNA, 19 nt, Artificial Sequence
  Description of Artificial Sequence: Synthetic oligonucleotide
ccaaucuugaagcauauuu

SEQ ID NO: 1813919 - RNA, 19 nt, Artificial Sequence
  Description of Artificial Sequence: Synthetic oligonucleotide
caaaaggcacaggcucuac

SEQ ID NO: 1813920 - RNA, 19 nt, Artificial Sequence
  Description of Artificial Sequence: Synthetic oligonucleotide
ggauaaaguaugaucugcu

SEQ ID NO: 1813921 - RNA, 19 nt, Artificial Sequence
  Description of Artificial Sequence: Synthetic oligonucleotide
agcauccaguguccuucug

SEQ ID NO: 1813922 - RNA, 19 nt, Artificial Sequence
  Description of Artificial Sequence: Synthetic oligonucleotide
cacuuaucacuagccaaca

SEQ ID NO: 1813923 - RNA, 19 nt, Artificial Sequence
  Description of Artificial Sequence: Synthetic oligonucleotide
caacgcuuccgguguccag

SEQ ID NO: 1813924 - RNA, 19 nt, Artificial Sequence
  Description of Artificial Sequence: Synthetic oligonucleotide
agccaacgcuuccgguguc

SEQ ID NO: 1813925 - RNA, 19 nt, Artificial Sequence
  Description of Artificial Sequence: Synthetic oligonucleotide
ccuucugagguuugauauc

SEQ ID NO: 1813926 - RNA, 19 nt, Artificial Sequence
  Description of Artificial Sequence: Synthetic oligonucleotide
ucuaugagccgagccucua

SEQ ID NO: 1813927 - RNA, 19 nt, Artificial Sequence
  Description of Artificial Sequence: Synthetic oligonucleotide
gagcacucauaggaggaaa

SEQ ID NO: 1813928 - RNA, 19 nt, Artificial Sequence
  Description of Artificial Sequence: Synthetic oligonucleotide
aggcucuaccagcccauaa

SEQ ID NO: 1813929 - RNA, 19 nt, Artificial Sequence
  Description of Artificial Sequence: Synthetic oligonucleotide
acuagccaacagagucugg

SEQ ID NO: 1813930 - RNA, 19 nt, Artificial Sequence
  Description of Artificial Sequence: Synthetic oligonucleotide
ccauuuagcagaguacgca

SEQ ID NO: 1813931 - RNA, 19 nt, Artificial Sequence
  Description of Artificial Sequence: Synthetic oligonucleotide
guuuccggauuuacagcuc

SEQ ID NO: 1813932 - RNA, 19 nt, Artificial Sequence
  Description of Artificial Sequence: Synthetic oligonucleotide
uggcccuuuucugcuggug

SEQ ID NO: 1813933 - RNA, 19 nt, Artificial Sequence
  Description of Artificial Sequence: Synthetic oligonucleotide
gaucgcuucuccacacuua

SEQ ID NO: 1813934 - RNA, 19 nt, Artificial Sequence
  Description of Artificial Sequence: Synthetic oligonucleotide
ucuuagggacuggcagcga

SEQ ID NO: 1813935 - RNA, 19 nt, Artificial Sequence
  Description of Artificial Sequence: Synthetic oligonucleotide
guauaccauaaugcuacgu

SEQ ID NO: 1813936 - RNA, 19 nt, Artificial Sequence
  Description of Artificial Sequence: Synthetic oligonucleotide
cccauggagaucaauucaa

SEQ ID NO: 1813937 - RNA, 19 nt, Artificial Sequence
  Description of Artificial Sequence: Synthetic oligonucleotide
auugcgcgggcaauuguua

SEQ ID NO: 1813938 - RNA, 19 nt, Artificial Sequence
  Description of Artificial Sequence: Synthetic oligonucleotide
cuaugagccgagccucuaa

SEQ ID NO: 1813939 - RNA, 19 nt, Artificial Sequence
  Description of Artificial Sequence: Synthetic oligonucleotide
cuaugggcuucagagaaau

SEQ ID NO: 1813940 - RNA, 19 nt, Artificial Sequence
  Description of Artificial Sequence: Synthetic oligonucleotide
ccacacuuaucacuagcca

SEQ ID NO: 1813941 - RNA, 19 nt, Artificial Sequence
  Description of Artificial Sequence: Synthetic oligonucleotide
aucgcccagugaauuuaug

SEQ ID NO: 1813942 - RNA, 19 nt, Artificial Sequence
  Description of Artificial Sequence: Synthetic oligonucleotide
cguuaaaucccauggagau

SEQ ID NO: 1813943 - RNA, 19 nt, Artificial Sequence
  Description of Artificial Sequence: Synthetic oligonucleotide
aguuccaguuguggggcuu

SEQ ID NO: 1813944 - RNA, 19 nt, Artificial Sequence
  Description of Artificial Sequence: Synthetic oligonucleotide
ggguguucuucacaaggcu

SEQ ID NO: 1813945 - RNA, 19 nt, Artificial Sequence
  Description of Artificial Sequence: Synthetic oligonucleotide
gagcagcgaugagucccgg

SEQ ID NO: 1813946 - RNA, 19 nt, Artificial Sequence
  Description of Artificial Sequence: Synthetic oligonucleotide
cauaggcaagagcagcgau

SEQ ID NO: 1813947 - RNA, 19 nt, Artificial Sequence
  Description of Artificial Sequence: Synthetic oligonucleotide
gacuuuccuuuaaauguuu

SEQ ID NO: 1813948 - RNA, 19 nt, Artificial Sequence
  Description of Artificial Sequence: Synthetic oligonucleotide
cacuuggaacauggccuug

SEQ ID NO: 1813949 - RNA, 19 nt, Artificial Sequence
  Description of Artificial Sequence: Synthetic oligonucleotide
gcgucuaugagccgagccu

SEQ ID NO: 1813950 - RNA, 19 nt, Artificial Sequence
  Description of Artificial Sequence: Synthetic oligonucleotide
aggccguguaaaagcacau

SEQ ID NO: 1813951 - RNA, 19 nt, Artificial Sequence
  Description of Artificial Sequence: Synthetic oligonucleotide
guagaaucgcccagugaau

SEQ ID NO: 1813952 - RNA, 19 nt, Artificial Sequence
  Description of Artificial Sequence: Synthetic oligonucleotide
cguuuccggauuuacagcu

SEQ ID NO: 1813953 - RNA, 19 nt, Artificial Sequence
  Description of Artificial Sequence: Synthetic oligonucleotide
gcgggcaauuguuacuucu

SEQ ID NO: 1813954 - RNA, 19 nt, Artificial Sequence
  Description of Artificial Sequence: Synthetic oligonucleotide
cgagauuucuaagcacgug

SEQ ID NO: 1813955 - RNA, 19 nt, Artificial Sequence
  Description of Artificial Sequence: Synthetic oligonucleotide
cugguuccuuuacagguuu

SEQ ID NO: 1813956 - RNA, 19 nt, Artificial Sequence
  Description of Artificial Sequence: Synthetic oligonucleotide
gguuugauaucugguuccu

SEQ ID NO: 1813957 - RNA, 19 nt, Artificial Sequence
  Description of Artificial Sequence: Synthetic oligonucleotide
cccauacucuuugcacagg

SEQ ID NO: 1813958 - RNA, 19 nt, Artificial Sequence
  Description of Artificial Sequence: Synthetic oligonucleotide
caauaugcauaggccgugu

SEQ ID NO: 1813959 - RNA, 19 nt, Artificial Sequence
  Description of Artificial Sequence: Synthetic oligonucleotide
ggccguguaaaagcacauc

SEQ ID NO: 1813960 - RNA, 19 nt, Artificial Sequence
  Description of Artificial Sequence: Synthetic oligonucleotide
augugucaguccacuugaa

SEQ ID NO: 1813961 - RNA, 19 nt, Artificial Sequence
  Description of Artificial Sequence: Synthetic oligonucleotide
caauugcgcgggcaauugu

SEQ ID NO: 1813962 - RNA, 19 nt, Artificial Sequence
  Description of Artificial Sequence: Synthetic oligonucleotide
gcagcucaauugcgcgggc

SEQ ID NO: 1813963 - RNA, 19 nt, Artificial Sequence
  Description of Artificial Sequence: Synthetic oligonucleotide
cgcccagugaauuuaugaa

SEQ ID NO: 1813964 - RNA, 19 nt, Artificial Sequence
  Description of Artificial Sequence: Synthetic oligonucleotide
cguaagcgucuaugagccg

SEQ ID NO: 1813965 - RNA, 19 nt, Artificial Sequence
  Description of Artificial Sequence: Synthetic oligonucleotide
uuccuccauuuagcagagu

SEQ ID NO: 1813966 - RNA, 19 nt, Artificial Sequence
  Description of Artificial Sequence: Synthetic oligonucleotide
cagcucaauugcgcgggca

SEQ ID NO: 1813967 - RNA, 19 nt, Artificial Sequence
  Description of Artificial Sequence: Synthetic oligonucleotide
ccgagccucuaaguccugg

SEQ ID NO: 1813968 - RNA, 19 nt, Artificial Sequence
  Description of Artificial Sequence: Synthetic oligonucleotide
gccaacgcuuccggugucc

SEQ ID NO: 1813969 - RNA, 19 nt, Artificial Sequence
  Description of Artificial Sequence: Synthetic oligonucleotide
cucaauugcgcgggcaauu

SEQ ID NO: 1813970 - RNA, 19 nt, Artificial Sequence
  Description of Artificial Sequence: Synthetic oligonucleotide
gcagaguacgcaggcucca

SEQ ID NO: 1813971 - RNA, 19 nt, Artificial Sequence
  Description of Artificial Sequence: Synthetic oligonucleotide
aggcuccaaacuggauaaa

SEQ ID NO: 1813972 - RNA, 19 nt, Artificial Sequence
  Description of Artificial Sequence: Synthetic oligonucleotide
ccggauuuacagcucaaau

SEQ ID NO: 1813973 - RNA, 19 nt, Artificial Sequence
  Description of Artificial Sequence: Synthetic oligonucleotide
cagaguacgcaggcuccaa

SEQ ID NO: 1813974 - RNA, 19 nt, Artificial Sequence
  Description of Artificial Sequence: Synthetic oligonucleotide
gccuugcaaugugucaguc

SEQ ID NO: 1813975 - RNA, 19 nt, Artificial Sequence
  Description of Artificial Sequence: Synthetic oligonucleotide
gcacuuggaacauggccuu

SEQ ID NO: 1813976 - RNA, 19 nt, Artificial Sequence
  Description of Artificial Sequence: Synthetic oligonucleotide
augcuacguuaaaucccau

SEQ ID NO: 1813977 - RNA, 19 nt, Artificial Sequence
  Description of Artificial Sequence: Synthetic oligonucleotide
ggccuugcaaugugucagu

SEQ ID NO: 1813978 - RNA, 19 nt, Artificial Sequence
  Description of Artificial Sequence: Synthetic oligonucleotide
ggucucuuggugagaucaa

SEQ ID NO: 1813979 - RNA, 19 nt, Artificial Sequence
  Description of Artificial Sequence: Synthetic oligonucleotide
gcgagauuucuaagcacgu

SEQ ID NO: 1813980 - RNA, 19 nt, Artificial Sequence
  Description of Artificial Sequence: Synthetic oligonucleotide
gucuggccaugguaacaau

SEQ ID NO: 1813981 - RNA, 19 nt, Artificial Sequence
  Description of Artificial Sequence: Synthetic oligonucleotide
ccguguaaaagcacaucuu

SEQ ID NO: 1813982 - RNA, 19 nt, Artificial Sequence
  Description of Artificial Sequence: Synthetic oligonucleotide
ccgaaagaacaaguguccu

SEQ ID NO: 1813983 - RNA, 19 nt, Artificial Sequence
  Description of Artificial Sequence: Synthetic oligonucleotide
ccagcccauaauuuugcuu

SEQ ID NO: 1813984 - RNA, 19 nt, Artificial Sequence
  Description of Artificial Sequence: Synthetic oligonucleotide
ccuggcacuggaugacgua

SEQ ID NO: 1813985 - RNA, 19 nt, Artificial Sequence
  Description of Artificial Sequence: Synthetic oligonucleotide
ccaacgcuuccggugucca

SEQ ID NO: 1813986 - RNA, 19 nt, Artificial Sequence
  Description of Artificial Sequence: Synthetic oligonucleotide
ccagccaaucuugaagcau

SEQ ID NO: 1813987 - RNA, 19 nt, Artificial Sequence
  Description of Artificial Sequence: Synthetic oligonucleotide
cggggcgugcugcagcuca

SEQ ID NO: 1813988 - RNA, 19 nt, Artificial Sequence
  Description of Artificial Sequence: Synthetic oligonucleotide
cgaugagucccggggcgug

SEQ ID NO: 1813989 - RNA, 19 nt, Artificial Sequence
  Description of Artificial Sequence: Synthetic oligonucleotide
ggaugacguaagcgucuau

SEQ ID NO: 1813990 - RNA, 19 nt, Artificial Sequence
  Description of Artificial Sequence: Synthetic oligonucleotide
ggcgugcugcagcucaauu

SEQ ID NO: 1813991 - RNA, 19 nt, Artificial Sequence
  Description of Artificial Sequence: Synthetic oligonucleotide
caggcucuaccagcccaua

SEQ ID NO: 1813992 - RNA, 19 nt, Artificial Sequence
  Description of Artificial Sequence: Synthetic oligonucleotide
gguuuggguuugacacugu

SEQ ID NO: 1813993 - RNA, 19 nt, Artificial Sequence
  Description of Artificial Sequence: Synthetic oligonucleotide
gcucaauugcgcgggcaau

SEQ ID NO: 1813994 - RNA, 19 nt, Artificial Sequence
  Description of Artificial Sequence: Synthetic oligonucleotide
cgcgggcaauuguuacuuc

SEQ ID NO: 1813995 - RNA, 19 nt, Artificial Sequence
  Description of Artificial Sequence: Synthetic oligonucleotide
gcgcgggcaauuguuacuu

SEQ ID NO: 1813996 - RNA, 19 nt, Artificial Sequence
  Description of Artificial Sequence: Synthetic oligonucleotide
cgggcaauuguuacuucuu

SEQ ID NO: 1813997 - RNA, 19 nt, Artificial Sequence
  Description of Artificial Sequence: Synthetic oligonucleotide
gcgaugagucccggggcgu

SEQ ID NO: 1813998 - RNA, 19 nt, Artificial Sequence
  Description of Artificial Sequence: Synthetic oligonucleotide
gccgagccucuaaguccug

SEQ ID NO: 1813999 - RNA, 19 nt, Artificial Sequence
  Description of Artificial Sequence: Synthetic oligonucleotide
gccaaucuugaagcauauu

SEQ ID NO: 1814000 - RNA, 19 nt, Artificial Sequence
  Description of Artificial Sequence: Synthetic oligonucleotide
ggggcgugcugcagcucaa

SEQ ID NO: 1814001 - RNA, 19 nt, Artificial Sequence
  Description of Artificial Sequence: Synthetic oligonucleotide
cccggggcgugcugcagcu

SEQ ID NO: 1814002 - RNA, 19 nt, Artificial Sequence
  Description of Artificial Sequence: Synthetic oligonucleotide
cgcuuccgguguccaguga

SEQ ID NO: 1814003 - RNA, 19 nt, Artificial Sequence
  Description of Artificial Sequence: Synthetic oligonucleotide
ccggggcgugcugcagcuc

SEQ ID NO: 1814004 - RNA, 19 nt, Artificial Sequence
  Description of Artificial Sequence: Synthetic oligonucleotide
uuaaguauccuuuaacucg

SEQ ID NO: 1814005 - RNA, 19 nt, Artificial Sequence
  Description of Artificial Sequence: Synthetic oligonucleotide
ugaaggaacgagaagaccg

SEQ ID NO: 1814006 - RNA, 19 nt, Artificial Sequence
  Description of Artificial Sequence: Synthetic oligonucleotide
aguaaucccacauuguccc

SEQ ID NO: 1814007 - RNA, 19 nt, Artificial Sequence
  Description of Artificial Sequence: Synthetic oligonucleotide
gaugcaaagucauucaagg

SEQ ID NO: 1814008 - RNA, 19 nt, Artificial Sequence
  Description of Artificial Sequence: Synthetic oligonucleotide
uguugcuauguucacaaag

SEQ ID NO: 1814009 - RNA, 19 nt, Artificial Sequence
  Description of Artificial Sequence: Synthetic oligonucleotide
aaaauugguggaugguagg

SEQ ID NO: 1814010 - RNA, 19 nt, Artificial Sequence
  Description of Artificial Sequence: Synthetic oligonucleotide
gacaggauaauauugaucu

SEQ ID NO: 1814011 - RNA, 19 nt, Artificial Sequence
  Description of Artificial Sequence: Synthetic oligonucleotide
aaggaaaccucguucagug

SEQ ID NO: 1814012 - RNA, 19 nt, Artificial Sequence
  Description of Artificial Sequence: Synthetic oligonucleotide
uucagauccaugaaggaac

SEQ ID NO: 1814013 - RNA, 19 nt, Artificial Sequence
  Description of Artificial Sequence: Synthetic oligonucleotide
ucacacugaauucuagccg

SEQ ID NO: 1814014 - RNA, 19 nt, Artificial Sequence
  Description of Artificial Sequence: Synthetic oligonucleotide
uuaacucgcucuaucauug

SEQ ID NO: 1814015 - RNA, 19 nt, Artificial Sequence
  Description of Artificial Sequence: Synthetic oligonucleotide
ucuaucauuguugccaggg

SEQ ID NO: 1814016 - RNA, 19 nt, Artificial Sequence
  Description of Artificial Sequence: Synthetic oligonucleotide
uaaguauccuuuaacucgc

SEQ ID NO: 1814017 - RNA, 19 nt, Artificial Sequence
  Description of Artificial Sequence: Synthetic oligonucleotide
augagagcgaugcaaaguc

SEQ ID NO: 1814018 - RNA, 19 nt, Artificial Sequence
  Description of Artificial Sequence: Synthetic oligonucleotide
ugugggauaguuaggagcu

SEQ ID NO: 1814019 - RNA, 19 nt, Artificial Sequence
  Description of Artificial Sequence: Synthetic oligonucleotide
guauggggagaguagaugg

SEQ ID NO: 1814020 - RNA, 19 nt, Artificial Sequence
  Description of Artificial Sequence: Synthetic oligonucleotide
agcaucauaggccguaugg

SEQ ID NO: 1814021 - RNA, 19 nt, Artificial Sequence
  Description of Artificial Sequence: Synthetic oligonucleotide
uccagugaaagaauuucag

SEQ ID NO: 1814022 - RNA, 19 nt, Artificial Sequence
  Description of Artificial Sequence: Synthetic oligonucleotide
agaagugacagaaacaucu

SEQ ID NO: 1814023 - RNA, 19 nt, Artificial Sequence
  Description of Artificial Sequence: Synthetic oligonucleotide
ugaagaucggaaaggaaac

SEQ ID NO: 1814024 - RNA, 19 nt, Artificial Sequence
  Description of Artificial Sequence: Synthetic oligonucleotide
uaauauugaucuuauucuc

SEQ ID NO: 1814025 - RNA, 19 nt, Artificial Sequence
  Description of Artificial Sequence: Synthetic oligonucleotide
uaguuaggagcucuggaag

SEQ ID NO: 1814026 - RNA, 19 nt, Artificial Sequence
  Description of Artificial Sequence: Synthetic oligonucleotide
cuaagcgaagaugagaaag

SEQ ID NO: 1814027 - RNA, 19 nt, Artificial Sequence
  Description of Artificial Sequence: Synthetic oligonucleotide
ugaucuuauucuccaagug

SEQ ID NO: 1814028 - RNA, 19 nt, Artificial Sequence
  Description of Artificial Sequence: Synthetic oligonucleotide
auucuagccggugagcucc

SEQ ID NO: 1814029 - RNA, 19 nt, Artificial Sequence
  Description of Artificial Sequence: Synthetic oligonucleotide
ugugagguaaaggucagcc

SEQ ID NO: 1814030 - RNA, 19 nt, Artificial Sequence
  Description of Artificial Sequence: Synthetic oligonucleotide
aaugagaucugccuucuuu

SEQ ID NO: 1814031 - RNA, 19 nt, Artificial Sequence
  Description of Artificial Sequence: Synthetic oligonucleotide
ucaucaucacaccuagcag

SEQ ID NO: 1814032 - RNA, 19 nt, Artificial Sequence
  Description of Artificial Sequence: Synthetic oligonucleotide
aauucuagccggugagcuc

SEQ ID NO: 1814033 - RNA, 19 nt, Artificial Sequence
  Description of Artificial Sequence: Synthetic oligonucleotide
ugcagaugacagcauacag

SEQ ID NO: 1814034 - RNA, 19 nt, Artificial Sequence
  Description of Artificial Sequence: Synthetic oligonucleotide
auucuaaggucuucccuac

SEQ ID NO: 1814035 - RNA, 19 nt, Artificial Sequence
  Description of Artificial Sequence: Synthetic oligonucleotide
cauggugggacauuucacc

SEQ ID NO: 1814036 - RNA, 19 nt, Artificial Sequence
  Description of Artificial Sequence: Synthetic oligonucleotide
gaucggaaaggaaaccucg

SEQ ID NO: 1814037 - RNA, 19 nt, Artificial Sequence
  Description of Artificial Sequence: Synthetic oligonucleotide
ugguaggagagaaugagau

SEQ ID NO: 1814038 - RNA, 19 nt, Artificial Sequence
  Description of Artificial Sequence: Synthetic oligonucleotide
caucauaggccguaugggg

SEQ ID NO: 1814039 - RNA, 19 nt, Artificial Sequence
  Description of Artificial Sequence: Synthetic oligonucleotide
ugauacaguugucuguucu

SEQ ID NO: 1814040 - RNA, 19 nt, Artificial Sequence
  Description of Artificial Sequence: Synthetic oligonucleotide
cugugggauaguuaggagc

SEQ ID NO: 1814041 - RNA, 19 nt, Artificial Sequence
  Description of Artificial Sequence: Synthetic oligonucleotide
uugaucuuauucuccaagu

SEQ ID NO: 1814042 - RNA, 19 nt, Artificial Sequence
  Description of Artificial Sequence: Synthetic oligonucleotide
aaugagagcgaugcaaagu

SEQ ID NO: 1814043 - RNA, 19 nt, Artificial Sequence
  Description of Artificial Sequence: Synthetic oligonucleotide
ugcacaaccgucccauucc

SEQ ID NO: 1814044 - RNA, 19 nt, Artificial Sequence
  Description of Artificial Sequence: Synthetic oligonucleotide
caagucguuggucaggaag

SEQ ID NO: 1814045 - RNA, 19 nt, Artificial Sequence
  Description of Artificial Sequence: Synthetic oligonucleotide
aagaucggaaaggaaaccu

SEQ ID NO: 1814046 - RNA, 19 nt, Artificial Sequence
  Description of Artificial Sequence: Synthetic oligonucleotide
aacucucagcaaaugagag

SEQ ID NO: 1814047 - RNA, 19 nt, Artificial Sequence
  Description of Artificial Sequence: Synthetic oligonucleotide
caguaaucccacauugucc

SEQ ID NO: 1814048 - RNA, 19 nt, Artificial Sequence
  Description of Artificial Sequence: Synthetic oligonucleotide
ggacauuucaccugugagg

SEQ ID NO: 1814049 - RNA, 19 nt, Artificial Sequence
  Description of Artificial Sequence: Synthetic oligonucleotide
uauccagaagcaaaggcuu

SEQ ID NO: 1814050 - RNA, 19 nt, Artificial Sequence
  Description of Artificial Sequence: Synthetic oligonucleotide
ucuaaggucuucccuacuc

SEQ ID NO: 1814051 - RNA, 19 nt, Artificial Sequence
  Description of Artificial Sequence: Synthetic oligonucleotide
agauccaugaaggaacgag

SEQ ID NO: 1814052 - RNA, 19 nt, Artificial Sequence
  Description of Artificial Sequence: Synthetic oligonucleotide
auaguuaggagcucuggaa

SEQ ID NO: 1814053 - RNA, 19 nt, Artificial Sequence
  Description of Artificial Sequence: Synthetic oligonucleotide
agauucauccagugugcac

SEQ ID NO: 1814054 - RNA, 19 nt, Artificial Sequence
  Description of Artificial Sequence: Synthetic oligonucleotide
ugucccaacucucagcaaa

SEQ ID NO: 1814055 - RNA, 19 nt, Artificial Sequence
  Description of Artificial Sequence: Synthetic oligonucleotide
uuuaacucgcucuaucauu

SEQ ID NO: 1814056 - RNA, 19 nt, Artificial Sequence
  Description of Artificial Sequence: Synthetic oligonucleotide
gaaggaacgagaagaccgg

SEQ ID NO: 1814057 - RNA, 19 nt, Artificial Sequence
  Description of Artificial Sequence: Synthetic oligonucleotide
gauaguuaggagcucugga

SEQ ID NO: 1814058 - RNA, 19 nt, Artificial Sequence
  Description of Artificial Sequence: Synthetic oligonucleotide
ucauaggccguauggggag

SEQ ID NO: 1814059 - RNA, 19 nt, Artificial Sequence
  Description of Artificial Sequence: Synthetic oligonucleotide
aaaccucguucaguguugc

SEQ ID NO: 1814060 - RNA, 19 nt, Artificial Sequence
  Description of Artificial Sequence: Synthetic oligonucleotide
cugaguacaguucagacua

SEQ ID NO: 1814061 - RNA, 19 nt, Artificial Sequence
  Description of Artificial Sequence: Synthetic oligonucleotide
gacuaauccguguuuguuc

SEQ ID NO: 1814062 - RNA, 19 nt, Artificial Sequence
  Description of Artificial Sequence: Synthetic oligonucleotide
cucgcucuaucauuguugc

SEQ ID NO: 1814063 - RNA, 19 nt, Artificial Sequence
  Description of Artificial Sequence: Synthetic oligonucleotide
aaauugguggaugguagga

SEQ ID NO: 1814064 - RNA, 19 nt, Artificial Sequence
  Description of Artificial Sequence: Synthetic oligonucleotide
aaggaacgagaagaccggc

SEQ ID NO: 1814065 - RNA, 19 nt, Artificial Sequence
  Description of Artificial Sequence: Synthetic oligonucleotide
gagaaugagaucugccuuc

SEQ ID NO: 1814066 - RNA, 19 nt, Artificial Sequence
  Description of Artificial Sequence: Synthetic oligonucleotide
ucagacuaauccguguuug

SEQ ID NO: 1814067 - RNA, 19 nt, Artificial Sequence
  Description of Artificial Sequence: Synthetic oligonucleotide
augacagcauacagaaacc

SEQ ID NO: 1814068 - RNA, 19 nt, Artificial Sequence
  Description of Artificial Sequence: Synthetic oligonucleotide
ugcuauguucacaaagaau

SEQ ID NO: 1814069 - RNA, 19 nt, Artificial Sequence
  Description of Artificial Sequence: Synthetic oligonucleotide
uauccuuuaacucgcucua

SEQ ID NO: 1814070 - RNA, 19 nt, Artificial Sequence
  Description of Artificial Sequence: Synthetic oligonucleotide
guuaugugcuucauggccc

SEQ ID NO: 1814071 - RNA, 19 nt, Artificial Sequence
  Description of Artificial Sequence: Synthetic oligonucleotide
aguauccuuuaacucgcuc

SEQ ID NO: 1814072 - RNA, 19 nt, Artificial Sequence
  Description of Artificial Sequence: Synthetic oligonucleotide
uucugauacaguugucugu

SEQ ID NO: 1814073 - RNA, 19 nt, Artificial Sequence
  Description of Artificial Sequence: Synthetic oligonucleotide
acugaauucuagccgguga

SEQ ID NO: 1814074 - RNA, 19 nt, Artificial Sequence
  Description of Artificial Sequence: Synthetic oligonucleotide
gaccggcagauccaggacg

SEQ ID NO: 1814075 - RNA, 19 nt, Artificial Sequence
  Description of Artificial Sequence: Synthetic oligonucleotide
acaccuagcagcaaaagaa

SEQ ID NO: 1814076 - RNA, 19 nt, Artificial Sequence
  Description of Artificial Sequence: Synthetic oligonucleotide
uaaggucuucccuacucca

SEQ ID NO: 1814077 - RNA, 19 nt, Artificial Sequence
  Description of Artificial Sequence: Synthetic oligonucleotide
uugcuauguucacaaagaa

SEQ ID NO: 1814078 - RNA, 19 nt, Artificial Sequence
  Description of Artificial Sequence: Synthetic oligonucleotide
ucagcaaaugagagcgaug

SEQ ID NO: 1814079 - RNA, 19 nt, Artificial Sequence
  Description of Artificial Sequence: Synthetic oligonucleotide
uccaccaguaaucccacau

SEQ ID NO: 1814080 - RNA, 19 nt, Artificial Sequence
  Description of Artificial Sequence: Synthetic oligonucleotide
caguuguugacucccuggg

SEQ ID NO: 1814081 - RNA, 19 nt, Artificial Sequence
  Description of Artificial Sequence: Synthetic oligonucleotide
agacaggauaauauugauc

SEQ ID NO: 1814082 - RNA, 19 nt, Artificial Sequence
  Description of Artificial Sequence: Synthetic oligonucleotide
ucugugggauaguuaggag

SEQ ID NO: 1814083 - RNA, 19 nt, Artificial Sequence
  Description of Artificial Sequence: Synthetic oligonucleotide
uccagugugcacaaccguc

SEQ ID NO: 1814084 - RNA, 19 nt, Artificial Sequence
  Description of Artificial Sequence: Synthetic oligonucleotide
agagaaugagaucugccuu

SEQ ID NO: 1814085 - RNA, 19 nt, Artificial Sequence
  Description of Artificial Sequence: Synthetic oligonucleotide
aacgagaagaccggcagau

SEQ ID NO: 1814086 - RNA, 19 nt, Artificial Sequence
  Description of Artificial Sequence: Synthetic oligonucleotide
ucaaagcuuucugaguaca

SEQ ID NO: 1814087 - RNA, 19 nt, Artificial Sequence
  Description of Artificial Sequence: Synthetic oligonucleotide
caccaguaaucccacauug

SEQ ID NO: 1814088 - RNA, 19 nt, Artificial Sequence
  Description of Artificial Sequence: Synthetic oligonucleotide
aagcgaagaugagaaagcu

SEQ ID NO: 1814089 - RNA, 19 nt, Artificial Sequence
  Description of Artificial Sequence: Synthetic oligonucleotide
gaagaucggaaaggaaacc

SEQ ID NO: 1814090 - RNA, 19 nt, Artificial Sequence
  Description of Artificial Sequence: Synthetic oligonucleotide
uucugggagagaaaagcua

SEQ ID NO: 1814091 - RNA, 19 nt, Artificial Sequence
  Description of Artificial Sequence: Synthetic oligonucleotide
ugaacacccagcauuuguu

SEQ ID NO: 1814092 - RNA, 19 nt, Artificial Sequence
  Description of Artificial Sequence: Synthetic oligonucleotide
ucacuaugauguccugugc

SEQ ID NO: 1814093 - RNA, 19 nt, Artificial Sequence
  Description of Artificial Sequence: Synthetic oligonucleotide
acaaccgucccauuccagu

SEQ ID NO: 1814094 - RNA, 19 nt, Artificial Sequence
  Description of Artificial Sequence: Synthetic oligonucleotide
aguucagacuaauccgugu

SEQ ID NO: 1814095 - RNA, 19 nt, Artificial Sequence
  Description of Artificial Sequence: Synthetic oligonucleotide
ugggacauuucaccuguga

SEQ ID NO: 1814096 - RNA, 19 nt, Artificial Sequence
  Description of Artificial Sequence: Synthetic oligonucleotide
ggaacgagaagaccggcag

SEQ ID NO: 1814097 - RNA, 19 nt, Artificial Sequence
  Description of Artificial Sequence: Synthetic oligonucleotide
ugggagagaaaagcuagca

SEQ ID NO: 1814098 - RNA, 19 nt, Artificial Sequence
  Description of Artificial Sequence: Synthetic oligonucleotide
ugacagaaacaucuccaau

SEQ ID NO: 1814099 - RNA, 19 nt, Artificial Sequence
  Description of Artificial Sequence: Synthetic oligonucleotide
acaacuuugacuggggauu

SEQ ID NO: 1814100 - RNA, 19 nt, Artificial Sequence
  Description of Artificial Sequence: Synthetic oligonucleotide
agcgaugcaaagucauuca

SEQ ID NO: 1814101 - RNA, 19 nt, Artificial Sequence
  Description of Artificial Sequence: Synthetic oligonucleotide
auggggagaguagauggcg

SEQ ID NO: 1814102 - RNA, 19 nt, Artificial Sequence
  Description of Artificial Sequence: Synthetic oligonucleotide
agaucggaaaggaaaccuc

SEQ ID NO: 1814103 - RNA, 19 nt, Artificial Sequence
  Description of Artificial Sequence: Synthetic oligonucleotide
gacauuucaccugugaggu

SEQ ID NO: 1814104 - RNA, 19 nt, Artificial Sequence
  Description of Artificial Sequence: Synthetic oligonucleotide
uuccaaguuaugugcuuca

SEQ ID NO: 1814105 - RNA, 19 nt, Artificial Sequence
  Description of Artificial Sequence: Synthetic oligonucleotide
uuguugacucccuggggug

SEQ ID NO: 1814106 - RNA, 19 nt, Artificial Sequence
  Description of Artificial Sequence: Synthetic oligonucleotide
caucaaagcuuucugagua

SEQ ID NO: 1814107 - RNA, 19 nt, Artificial Sequence
  Description of Artificial Sequence: Synthetic oligonucleotide
ugaauucuagccggugagc

SEQ ID NO: 1814108 - RNA, 19 nt, Artificial Sequence
  Description of Artificial Sequence: Synthetic oligonucleotide
augagaucugccuucuuuu

SEQ ID NO: 1814109 - RNA, 19 nt, Artificial Sequence
  Description of Artificial Sequence: Synthetic oligonucleotide
gauccaugaaggaacgaga

SEQ ID NO: 1814110 - RNA, 19 nt, Artificial Sequence
  Description of Artificial Sequence: Synthetic oligonucleotide
aggugugcagaugacagca

SEQ ID NO: 1814111 - RNA, 19 nt, Artificial Sequence
  Description of Artificial Sequence: Synthetic oligonucleotide
guaaaggucagccuccacu

SEQ ID NO: 1814112 - RNA, 19 nt, Artificial Sequence
  Description of Artificial Sequence: Synthetic oligonucleotide
gaaaccucguucaguguug

SEQ ID NO: 1814113 - RNA, 19 nt, Artificial Sequence
  Description of Artificial Sequence: Synthetic oligonucleotide
agaccggcagauccaggac

SEQ ID NO: 1814114 - RNA, 19 nt, Artificial Sequence
  Description of Artificial Sequence: Synthetic oligonucleotide
gucggacacuuguagguag

SEQ ID NO: 1814115 - RNA, 19 nt, Artificial Sequence
  Description of Artificial Sequence: Synthetic oligonucleotide
caaaugagagcgaugcaaa

SEQ ID NO: 1814116 - RNA, 19 nt, Artificial Sequence
  Description of Artificial Sequence: Synthetic oligonucleotide
caagagcuaagcgaagaug

SEQ ID NO: 1814117 - RNA, 19 nt, Artificial Sequence
  Description of Artificial Sequence: Synthetic oligonucleotide
ucggacacuuguagguagc

SEQ ID NO: 1814118 - RNA, 19 nt, Artificial Sequence
  Description of Artificial Sequence: Synthetic oligonucleotide
caacucucagcaaaugaga

SEQ ID NO: 1814119 - RNA, 19 nt, Artificial Sequence
  Description of Artificial Sequence: Synthetic oligonucleotide
gagcgaugcaaagucauuc

SEQ ID NO: 1814120 - RNA, 19 nt, Artificial Sequence
  Description of Artificial Sequence: Synthetic oligonucleotide
ugggauaguuaggagcucu

SEQ ID NO: 1814121 - RNA, 19 nt, Artificial Sequence
  Description of Artificial Sequence: Synthetic oligonucleotide
uccacuccuuguagaacgc

SEQ ID NO: 1814122 - RNA, 19 nt, Artificial Sequence
  Description of Artificial Sequence: Synthetic oligonucleotide
ucaguguugcuauguucac

SEQ ID NO: 1814123 - RNA, 19 nt, Artificial Sequence
  Description of Artificial Sequence: Synthetic oligonucleotide
uagguagcaggugugcaga

SEQ ID NO: 1814124 - RNA, 19 nt, Artificial Sequence
  Description of Artificial Sequence: Synthetic oligonucleotide
ggugagcucccucuguggg

SEQ ID NO: 1814125 - RNA, 19 nt, Artificial Sequence
  Description of Artificial Sequence: Synthetic oligonucleotide
acuggggauucuaaggucu

SEQ ID NO: 1814126 - RNA, 19 nt, Artificial Sequence
  Description of Artificial Sequence: Synthetic oligonucleotide
ugucacuaugauguccugu

SEQ ID NO: 1814127 - RNA, 19 nt, Artificial Sequence
  Description of Artificial Sequence: Synthetic oligonucleotide
guuguugacucccuggggu

SEQ ID NO: 1814128 - RNA, 19 nt, Artificial Sequence
  Description of Artificial Sequence: Synthetic oligonucleotide
ucggaaaggaaaccucguu

SEQ ID NO: 1814129 - RNA, 19 nt, Artificial Sequence
  Description of Artificial Sequence: Synthetic oligonucleotide
ucacaccuagcagcaaaag

SEQ ID NO: 1814130 - RNA, 19 nt, Artificial Sequence
  Description of Artificial Sequence: Synthetic oligonucleotide
cacuaugauguccugugca

SEQ ID NO: 1814131 - RNA, 19 nt, Artificial Sequence
  Description of Artificial Sequence: Synthetic oligonucleotide
accgucccauuccaguauc

SEQ ID NO: 1814132 - RNA, 19 nt, Artificial Sequence
  Description of Artificial Sequence: Synthetic oligonucleotide
aaccgucccauuccaguau

SEQ ID NO: 1814133 - RNA, 19 nt, Artificial Sequence
  Description of Artificial Sequence: Synthetic oligonucleotide
aggauaauauugaucuuau

SEQ ID NO: 1814134 - RNA, 19 nt, Artificial Sequence
  Description of Artificial Sequence: Synthetic oligonucleotide
agaagaccggcagauccag

SEQ ID NO: 1814135 - RNA, 19 nt, Artificial Sequence
  Description of Artificial Sequence: Synthetic oligonucleotide
acaugacuuuguccagguc

SEQ ID NO: 1814136 - RNA, 19 nt, Artificial Sequence
  Description of Artificial Sequence: Synthetic oligonucleotide
caguucagacuaauccgug

SEQ ID NO: 1814137 - RNA, 19 nt, Artificial Sequence
  Description of Artificial Sequence: Synthetic oligonucleotide
ugguucacacugaauucua

SEQ ID NO: 1814138 - RNA, 19 nt, Artificial Sequence
  Description of Artificial Sequence: Synthetic oligonucleotide
aucauaggccguaugggga

SEQ ID NO: 1814139 - RNA, 19 nt, Artificial Sequence
  Description of Artificial Sequence: Synthetic oligonucleotide
ggagaguagauggcgaccc

SEQ ID NO: 1814140 - RNA, 19 nt, Artificial Sequence
  Description of Artificial Sequence: Synthetic oligonucleotide
cacaaggccacaacuuuga

SEQ ID NO: 1814141 - RNA, 19 nt, Artificial Sequence
  Description of Artificial Sequence: Synthetic oligonucleotide
uguugacucccuggggugc

SEQ ID NO: 1814142 - RNA, 19 nt, Artificial Sequence
  Description of Artificial Sequence: Synthetic oligonucleotide
caggauaauauugaucuua

SEQ ID NO: 1814143 - RNA, 19 nt, Artificial Sequence
  Description of Artificial Sequence: Synthetic oligonucleotide
agagcuaagcgaagaugag

SEQ ID NO: 1814144 - RNA, 19 nt, Artificial Sequence
  Description of Artificial Sequence: Synthetic oligonucleotide
gagcuaagcgaagaugaga

SEQ ID NO: 1814145 - RNA, 19 nt, Artificial Sequence
  Description of Artificial Sequence: Synthetic oligonucleotide
gcaucauaggccguauggg

SEQ ID NO: 1814146 - RNA, 19 nt, Artificial Sequence
  Description of Artificial Sequence: Synthetic oligonucleotide
caagugaacacccagcauu

SEQ ID NO: 1814147 - RNA, 19 nt, Artificial Sequence
  Description of Artificial Sequence: Synthetic oligonucleotide
agcaaaugagagcgaugca

SEQ ID NO: 1814148 - RNA, 19 nt, Artificial Sequence
  Description of Artificial Sequence: Synthetic oligonucleotide
gaauucuagccggugagcu

SEQ ID NO: 1814149 - RNA, 19 nt, Artificial Sequence
  Description of Artificial Sequence: Synthetic oligonucleotide
ccaguaaucccacauuguc

SEQ ID NO: 1814150 - RNA, 19 nt, Artificial Sequence
  Description of Artificial Sequence: Synthetic oligonucleotide
ggauaguuaggagcucugg

SEQ ID NO: 1814151 - RNA, 19 nt, Artificial Sequence
  Description of Artificial Sequence: Synthetic oligonucleotide
ccggaaaauugguggaugg

SEQ ID NO: 1814152 - RNA, 19 nt, Artificial Sequence
  Description of Artificial Sequence: Synthetic oligonucleotide
cucugugggauaguuagga

SEQ ID NO: 1814153 - RNA, 19 nt, Artificial Sequence
  Description of Artificial Sequence: Synthetic oligonucleotide
gaacgagaagaccggcaga

SEQ ID NO: 1814154 - RNA, 19 nt, Artificial Sequence
  Description of Artificial Sequence: Synthetic oligonucleotide
cucuaucauuguugccagg

SEQ ID NO: 1814155 - RNA, 19 nt, Artificial Sequence
  Description of Artificial Sequence: Synthetic oligonucleotide
accggcagauccaggacgg

SEQ ID NO: 1814156 - RNA, 19 nt, Artificial Sequence
  Description of Artificial Sequence: Synthetic oligonucleotide
gggagagaaaagcuagcac

SEQ ID NO: 1814157 - RNA, 19 nt, Artificial Sequence
  Description of Artificial Sequence: Synthetic oligonucleotide
ccagugugcacaaccgucc

SEQ ID NO: 1814158 - RNA, 19 nt, Artificial Sequence
  Description of Artificial Sequence: Synthetic oligonucleotide
ugaguacaguucagacuaa

SEQ ID NO: 1814159 - RNA, 19 nt, Artificial Sequence
  Description of Artificial Sequence: Synthetic oligonucleotide
uggaaggguggaugggccu

SEQ ID NO: 1814160 - RNA, 19 nt, Artificial Sequence
  Description of Artificial Sequence: Synthetic oligonucleotide
auccaugaaggaacgagaa

SEQ ID NO: 1814161 - RNA, 19 nt, Artificial Sequence
  Description of Artificial Sequence: Synthetic oligonucleotide
uguugccagggagacagau

SEQ ID NO: 1814162 - RNA, 19 nt, Artificial Sequence
  Description of Artificial Sequence: Synthetic oligonucleotide
accuagcagcaaaagaagu

SEQ ID NO: 1814163 - RNA, 19 nt, Artificial Sequence
  Description of Artificial Sequence: Synthetic oligonucleotide
agugugcacaaccguccca

SEQ ID NO: 1814164 - RNA, 19 nt, Artificial Sequence
  Description of Artificial Sequence: Synthetic oligonucleotide
gccagucggacacuuguag

SEQ ID NO: 1814165 - RNA, 19 nt, Artificial Sequence
  Description of Artificial Sequence: Synthetic oligonucleotide
gacaugacuuuguccaggu

SEQ ID NO: 1814166 - RNA, 19 nt, Artificial Sequence
  Description of Artificial Sequence: Synthetic oligonucleotide
acaggauaauauugaucuu

SEQ ID NO: 1814167 - RNA, 19 nt, Artificial Sequence
  Description of Artificial Sequence: Synthetic oligonucleotide
agagggucccugucugucu

SEQ ID NO: 1814168 - RNA, 19 nt, Artificial Sequence
  Description of Artificial Sequence: Synthetic oligonucleotide
gggugcagcaucauaggcc

SEQ ID NO: 1814169 - RNA, 19 nt, Artificial Sequence
  Description of Artificial Sequence: Synthetic oligonucleotide
gcaaaugagagcgaugcaa

SEQ ID NO: 1814170 - RNA, 19 nt, Artificial Sequence
  Description of Artificial Sequence: Synthetic oligonucleotide
ccagucggacacuuguagg

SEQ ID NO: 1814171 - RNA, 19 nt, Artificial Sequence
  Description of Artificial Sequence: Synthetic oligonucleotide
gugcacaaccgucccauuc

SEQ ID NO: 1814172 - RNA, 19 nt, Artificial Sequence
  Description of Artificial Sequence: Synthetic oligonucleotide
agacuaauccguguuuguu

SEQ ID NO: 1814173 - RNA, 19 nt, Artificial Sequence
  Description of Artificial Sequence: Synthetic oligonucleotide
caucacaccuagcagcaaa

SEQ ID NO: 1814174 - RNA, 19 nt, Artificial Sequence
  Description of Artificial Sequence: Synthetic oligonucleotide
gguaggagagaaugagauc

SEQ ID NO: 1814175 - RNA, 19 nt, Artificial Sequence
  Description of Artificial Sequence: Synthetic oligonucleotide
acaucauggugggacauuu

SEQ ID NO: 1814176 - RNA, 19 nt, Artificial Sequence
  Description of Artificial Sequence: Synthetic oligonucleotide
acaguauggggagggcuug

SEQ ID NO: 1814177 - RNA, 19 nt, Artificial Sequence
  Description of Artificial Sequence: Synthetic oligonucleotide
aggaaaccucguucagugu

SEQ ID NO: 1814178 - RNA, 19 nt, Artificial Sequence
  Description of Artificial Sequence: Synthetic oligonucleotide
aacuuugacuggggauucu

SEQ ID NO: 1814179 - RNA, 19 nt, Artificial Sequence
  Description of Artificial Sequence: Synthetic oligonucleotide
cgaugcaaagucauucaag

SEQ ID NO: 1814180 - RNA, 19 nt, Artificial Sequence
  Description of Artificial Sequence: Synthetic oligonucleotide
ucgcucuaucauuguugcc

SEQ ID NO: 1814181 - RNA, 19 nt, Artificial Sequence
  Description of Artificial Sequence: Synthetic oligonucleotide
gucaagucguuggucagga

SEQ ID NO: 1814182 - RNA, 19 nt, Artificial Sequence
  Description of Artificial Sequence: Synthetic oligonucleotide
accucguucaguguugcua

SEQ ID NO: 1814183 - RNA, 19 nt, Artificial Sequence
  Description of Artificial Sequence: Synthetic oligonucleotide
gauguccugugcauuuuaa

SEQ ID NO: 1814184 - RNA, 19 nt, Artificial Sequence
  Description of Artificial Sequence: Synthetic oligonucleotide
cacaaccgucccauuccag

SEQ ID NO: 1814185 - RNA, 19 nt, Artificial Sequence
  Description of Artificial Sequence: Synthetic oligonucleotide
aggacggggccagucggac

SEQ ID NO: 1814186 - RNA, 19 nt, Artificial Sequence
  Description of Artificial Sequence: Synthetic oligonucleotide
aucggaaaggaaaccucgu

SEQ ID NO: 1814187 - RNA, 19 nt, Artificial Sequence
  Description of Artificial Sequence: Synthetic oligonucleotide
cugauacaguugucuguuc

SEQ ID NO: 1814188 - RNA, 19 nt, Artificial Sequence
  Description of Artificial Sequence: Synthetic oligonucleotide
agcucccucugugggauag

SEQ ID NO: 1814189 - RNA, 19 nt, Artificial Sequence
  Description of Artificial Sequence: Synthetic oligonucleotide
caacuuugacuggggauuc

SEQ ID NO: 1814190 - RNA, 19 nt, Artificial Sequence
  Description of Artificial Sequence: Synthetic oligonucleotide
caucauggugggacauuuc

SEQ ID NO: 1814191 - RNA, 19 nt, Artificial Sequence
  Description of Artificial Sequence: Synthetic oligonucleotide
aggcgcuccuuccagguuu

SEQ ID NO: 1814192 - RNA, 19 nt, Artificial Sequence
  Description of Artificial Sequence: Synthetic oligonucleotide
gguucacacugaauucuag

SEQ ID NO: 1814193 - RNA, 19 nt, Artificial Sequence
  Description of Artificial Sequence: Synthetic oligonucleotide
agccuccacuccuuguaga

SEQ ID NO: 1814194 - RNA, 19 nt, Artificial Sequence
  Description of Artificial Sequence: Synthetic oligonucleotide
aggaacgagaagaccggca

SEQ ID NO: 1814195 - RNA, 19 nt, Artificial Sequence
  Description of Artificial Sequence: Synthetic oligonucleotide
acgagaagaccggcagauc

SEQ ID NO: 1814196 - RNA, 19 nt, Artificial Sequence
  Description of Artificial Sequence: Synthetic oligonucleotide
gcauuuuaaaccacaugaa

SEQ ID NO: 1814197 - RNA, 19 nt, Artificial Sequence
  Description of Artificial Sequence: Synthetic oligonucleotide
cagucggacacuuguaggu

SEQ ID NO: 1814198 - RNA, 19 nt, Artificial Sequence
  Description of Artificial Sequence: Synthetic oligonucleotide
guucagacuaauccguguu

SEQ ID NO: 1814199 - RNA, 19 nt, Artificial Sequence
  Description of Artificial Sequence: Synthetic oligonucleotide
gugguucacacugaauucu

SEQ ID NO: 1814200 - RNA, 19 nt, Artificial Sequence
  Description of Artificial Sequence: Synthetic oligonucleotide
aucacaccuagcagcaaaa

SEQ ID NO: 1814201 - RNA, 19 nt, Artificial Sequence
  Description of Artificial Sequence: Synthetic oligonucleotide
aguauggggagggcuuggu

SEQ ID NO: 1814202 - RNA, 19 nt, Artificial Sequence
  Description of Artificial Sequence: Synthetic oligonucleotide
ucaagucguuggucaggaa

SEQ ID NO: 1814203 - RNA, 19 nt, Artificial Sequence
  Description of Artificial Sequence: Synthetic oligonucleotide
gugucacuaugauguccug

SEQ ID NO: 1814204 - RNA, 19 nt, Artificial Sequence
  Description of Artificial Sequence: Synthetic oligonucleotide
ggugggacauuucaccugu

SEQ ID NO: 1814205 - RNA, 19 nt, Artificial Sequence
  Description of Artificial Sequence: Synthetic oligonucleotide
cggaaaggaaaccucguuc

SEQ ID NO: 1814206 - RNA, 19 nt, Artificial Sequence
  Description of Artificial Sequence: Synthetic oligonucleotide
caguauggggagggcuugg

SEQ ID NO: 1814207 - RNA, 19 nt, Artificial Sequence
  Description of Artificial Sequence: Synthetic oligonucleotide
uugucccaacucucagcaa

SEQ ID NO: 1814208 - RNA, 19 nt, Artificial Sequence
  Description of Artificial Sequence: Synthetic oligonucleotide
agucggacacuuguaggua

SEQ ID NO: 1814209 - RNA, 19 nt, Artificial Sequence
  Description of Artificial Sequence: Synthetic oligonucleotide
ggaaaccucguucaguguu

SEQ ID NO: 1814210 - RNA, 19 nt, Artificial Sequence
  Description of Artificial Sequence: Synthetic oligonucleotide
agguagcaggugugcagau

SEQ ID NO: 1814211 - RNA, 19 nt, Artificial Sequence
  Description of Artificial Sequence: Synthetic oligonucleotide
cagacaggauaauauugau

SEQ ID NO: 1814212 - RNA, 19 nt, Artificial Sequence
  Description of Artificial Sequence: Synthetic oligonucleotide
ggucuucccuacuccaaga

SEQ ID NO: 1814213 - RNA, 19 nt, Artificial Sequence
  Description of Artificial Sequence: Synthetic oligonucleotide
ccacauugucccaacucuc

SEQ ID NO: 1814214 - RNA, 19 nt, Artificial Sequence
  Description of Artificial Sequence: Synthetic oligonucleotide
ggaaggguggaugggccug

SEQ ID NO: 1814215 - RNA, 19 nt, Artificial Sequence
  Description of Artificial Sequence: Synthetic oligonucleotide
acauuucaccugugaggua

SEQ ID NO: 1814216 - RNA, 19 nt, Artificial Sequence
  Description of Artificial Sequence: Synthetic oligonucleotide
agccggugagcucccucug

SEQ ID NO: 1814217 - RNA, 19 nt, Artificial Sequence
  Description of Artificial Sequence: Synthetic oligonucleotide
agcuagcaccugcaucaaa

SEQ ID NO: 1814218 - RNA, 19 nt, Artificial Sequence
  Description of Artificial Sequence: Synthetic oligonucleotide
cagauucauccagugugca

SEQ ID NO: 1814219 - RNA, 19 nt, Artificial Sequence
  Description of Artificial Sequence: Synthetic oligonucleotide
guucacaaagaaugacauu

SEQ ID NO: 1814220 - RNA, 19 nt, Artificial Sequence
  Description of Artificial Sequence: Synthetic oligonucleotide
ggaugguaggagagaauga

SEQ ID NO: 1814221 - RNA, 19 nt, Artificial Sequence
  Description of Artificial Sequence: Synthetic oligonucleotide
gaagagggucccugucugu

SEQ ID NO: 1814222 - RNA, 19 nt, Artificial Sequence
  Description of Artificial Sequence: Synthetic oligonucleotide
cgcucuaucauuguugcca

SEQ ID NO: 1814223 - RNA, 19 nt, Artificial Sequence
  Description of Artificial Sequence: Synthetic oligonucleotide
uucauccagugugcacaac

SEQ ID NO: 1814224 - RNA, 19 nt, Artificial Sequence
  Description of Artificial Sequence: Synthetic oligonucleotide
gggauaguuaggagcucug

SEQ ID NO: 1814225 - RNA, 19 nt, Artificial Sequence
  Description of Artificial Sequence: Synthetic oligonucleotide
aggccguauggggagagua

SEQ ID NO: 1814226 - RNA, 19 nt, Artificial Sequence
  Description of Artificial Sequence: Synthetic oligonucleotide
agagcgaugcaaagucauu

SEQ ID NO: 1814227 - RNA, 19 nt, Artificial Sequence
  Description of Artificial Sequence: Synthetic oligonucleotide
ggccguauggggagaguag

SEQ ID NO: 1814228 - RNA, 19 nt, Artificial Sequence
  Description of Artificial Sequence: Synthetic oligonucleotide
ggcccggaaaauuggugga

SEQ ID NO: 1814229 - RNA, 19 nt, Artificial Sequence
  Description of Artificial Sequence: Synthetic oligonucleotide
cagacuaauccguguuugu

SEQ ID NO: 1814230 - RNA, 19 nt, Artificial Sequence
  Description of Artificial Sequence: Synthetic oligonucleotide
gcgaugcaaagucauucaa

SEQ ID NO: 1814231 - RNA, 19 nt, Artificial Sequence
  Description of Artificial Sequence: Synthetic oligonucleotide
guugacucccuggggugca

SEQ ID NO: 1814232 - RNA, 19 nt, Artificial Sequence
  Description of Artificial Sequence: Synthetic oligonucleotide
gguggaugggccugguacu

SEQ ID NO: 1814233 - RNA, 19 nt, Artificial Sequence
  Description of Artificial Sequence: Synthetic oligonucleotide
cucagcaaaugagagcgau

SEQ ID NO: 1814234 - RNA, 19 nt, Artificial Sequence
  Description of Artificial Sequence: Synthetic oligonucleotide
gaacaucauggugggacau

SEQ ID NO: 1814235 - RNA, 19 nt, Artificial Sequence
  Description of Artificial Sequence: Synthetic oligonucleotide
gcuaagcgaagaugagaaa

SEQ ID NO: 1814236 - RNA, 19 nt, Artificial Sequence
  Description of Artificial Sequence: Synthetic oligonucleotide
cguauggggagaguagaug

SEQ ID NO: 1814237 - RNA, 19 nt, Artificial Sequence
  Description of Artificial Sequence: Synthetic oligonucleotide
cccggaaaauugguggaug

SEQ ID NO: 1814238 - RNA, 19 nt, Artificial Sequence
  Description of Artificial Sequence: Synthetic oligonucleotide
ggucagccuccacuccuug

SEQ ID NO: 1814239 - RNA, 19 nt, Artificial Sequence
  Description of Artificial Sequence: Synthetic oligonucleotide
gcacaaccgucccauucca

SEQ ID NO: 1814240 - RNA, 19 nt, Artificial Sequence
  Description of Artificial Sequence: Synthetic oligonucleotide
gccguauggggagaguaga

SEQ ID NO: 1814241 - RNA, 19 nt, Artificial Sequence
  Description of Artificial Sequence: Synthetic oligonucleotide
uaggccguauggggagagu

SEQ ID NO: 1814242 - RNA, 19 nt, Artificial Sequence
  Description of Artificial Sequence: Synthetic oligonucleotide
cauuguugccagggagaca

SEQ ID NO: 1814243 - RNA, 19 nt, Artificial Sequence
  Description of Artificial Sequence: Synthetic oligonucleotide
gugggauaguuaggagcuc

SEQ ID NO: 1814244 - RNA, 19 nt, Artificial Sequence
  Description of Artificial Sequence: Synthetic oligonucleotide
ccgucccauuccaguaucc

SEQ ID NO: 1814245 - RNA, 19 nt, Artificial Sequence
  Description of Artificial Sequence: Synthetic oligonucleotide
agccaguuguugacucccu

SEQ ID NO: 1814246 - RNA, 19 nt, Artificial Sequence
  Description of Artificial Sequence: Synthetic oligonucleotide
caggacggggccagucgga

SEQ ID NO: 1814247 - RNA, 19 nt, Artificial Sequence
  Description of Artificial Sequence: Synthetic oligonucleotide
ccggugagcucccucugug

SEQ ID NO: 1814248 - RNA, 19 nt, Artificial Sequence
  Description of Artificial Sequence: Synthetic oligonucleotide
cauaggccguauggggaga

SEQ ID NO: 1814249 - RNA, 19 nt, Artificial Sequence
  Description of Artificial Sequence: Synthetic oligonucleotide
cagauccaugaaggaacga

SEQ ID NO: 1814250 - RNA, 19 nt, Artificial Sequence
  Description of Artificial Sequence: Synthetic oligonucleotide
ggauaauauugaucuuauu

SEQ ID NO: 1814251 - RNA, 19 nt, Artificial Sequence
  Description of Artificial Sequence: Synthetic oligonucleotide
gugggacauuucaccugug

SEQ ID NO: 1814252 - RNA, 19 nt, Artificial Sequence
  Description of Artificial Sequence: Synthetic oligonucleotide
gaaugagaucugccuucuu

SEQ ID NO: 1814253 - RNA, 19 nt, Artificial Sequence
  Description of Artificial Sequence: Synthetic oligonucleotide
ccucguucaguguugcuau

SEQ ID NO: 1814254 - RNA, 19 nt, Artificial Sequence
  Description of Artificial Sequence: Synthetic oligonucleotide
cuggggauucuaaggucuu

SEQ ID NO: 1814255 - RNA, 19 nt, Artificial Sequence
  Description of Artificial Sequence: Synthetic oligonucleotide
cccuuuggccagccaguug

SEQ ID NO: 1814256 - RNA, 19 nt, Artificial Sequence
  Description of Artificial Sequence: Synthetic oligonucleotide
cgacccuguucuccagugc

SEQ ID NO: 1814257 - RNA, 19 nt, Artificial Sequence
  Description of Artificial Sequence: Synthetic oligonucleotide
ggacggggccagucggaca

SEQ ID NO: 1814258 - RNA, 19 nt, Artificial Sequence
  Description of Artificial Sequence: Synthetic oligonucleotide
gcacacaaggccacaacuu

SEQ ID NO: 1814259 - RNA, 19 nt, Artificial Sequence
  Description of Artificial Sequence: Synthetic oligonucleotide
ccaagagcuaagcgaagau

SEQ ID NO: 1814260 - RNA, 19 nt, Artificial Sequence
  Description of Artificial Sequence: Synthetic oligonucleotide
ccaagcccuuuggccagcc

SEQ ID NO: 1814261 - RNA, 19 nt, Artificial Sequence
  Description of Artificial Sequence: Synthetic oligonucleotide
gagcucccucugugggaua

SEQ ID NO: 1814262 - RNA, 19 nt, Artificial Sequence
  Description of Artificial Sequence: Synthetic oligonucleotide
ggugugguucacacugaau

SEQ ID NO: 1814263 - RNA, 19 nt, Artificial Sequence
  Description of Artificial Sequence: Synthetic oligonucleotide
ggggccagucggacacuug

SEQ ID NO: 1814264 - RNA, 19 nt, Artificial Sequence
  Description of Artificial Sequence: Synthetic oligonucleotide
ccggcagauccaggacggg

SEQ ID NO: 1814265 - RNA, 19 nt, Artificial Sequence
  Description of Artificial Sequence: Synthetic oligonucleotide
gauccaggacggggccagu

SEQ ID NO: 1814266 - RNA, 19 nt, Artificial Sequence
  Description of Artificial Sequence: Synthetic oligonucleotide
gccggugagcucccucugu

SEQ ID NO: 1814267 - RNA, 19 nt, Artificial Sequence
  Description of Artificial Sequence: Synthetic oligonucleotide
cguuggucaggaagagugu

SEQ ID NO: 1814268 - RNA, 19 nt, Artificial Sequence
  Description of Artificial Sequence: Synthetic oligonucleotide
ccguauggggagaguagau

SEQ ID NO: 1814269 - RNA, 19 nt, Artificial Sequence
  Description of Artificial Sequence: Synthetic oligonucleotide
gcccggaaaauugguggau

SEQ ID NO: 1814270 - RNA, 19 nt, Artificial Sequence
  Description of Artificial Sequence: Synthetic oligonucleotide
cggaaaauugguggauggu

SEQ ID NO: 1814271 - RNA, 19 nt, Artificial Sequence
  Description of Artificial Sequence: Synthetic oligonucleotide
cguucaguguugcuauguu

SEQ ID NO: 1814272 - RNA, 19 nt, Artificial Sequence
  Description of Artificial Sequence: Synthetic oligonucleotide
gcccuuuggccagccaguu

SEQ ID NO: 1814273 - RNA, 19 nt, Artificial Sequence
  Description of Artificial Sequence: Synthetic oligonucleotide
gcucccucugugggauagu

SEQ ID NO: 1814274 - RNA, 19 nt, Artificial Sequence
  Description of Artificial Sequence: Synthetic oligonucleotide
aaaagguuaacuuuuacag

SEQ ID NO: 1814275 - RNA, 19 nt, Artificial Sequence
  Description of Artificial Sequence: Synthetic oligonucleotide
aaaguuugaagugaaaccc

SEQ ID NO: 1814276 - RNA, 19 nt, Artificial Sequence
  Description of Artificial Sequence: Synthetic oligonucleotide
aauucuagguuuucuaagc

SEQ ID NO: 1814277 - RNA, 19 nt, Artificial Sequence
  Description of Artificial Sequence: Synthetic oligonucleotide
uguaauguagcucuuagag

SEQ ID NO: 1814278 - RNA, 19 nt, Artificial Sequence
  Description of Artificial Sequence: Synthetic oligonucleotide
aacacauuagcucaaacug

SEQ ID NO: 1814279 - RNA, 19 nt, Artificial Sequence
  Description of Artificial Sequence: Synthetic oligonucleotide
uguaaaagcagcaauguca

SEQ ID NO: 1814280 - RNA, 19 nt, Artificial Sequence
  Description of Artificial Sequence: Synthetic oligonucleotide
ugcgaaaauaaauagaaug

SEQ ID NO: 1814281 - RNA, 19 nt, Artificial Sequence
  Description of Artificial Sequence: Synthetic oligonucleotide
aaaauaucuguaauguagc

SEQ ID NO: 1814282 - RNA, 19 nt, Artificial Sequence
  Description of Artificial Sequence: Synthetic oligonucleotide
aaauggguacaccuguucc

SEQ ID NO: 1814283 - RNA, 19 nt, Artificial Sequence
  Description of Artificial Sequence: Synthetic oligonucleotide
aaauguaaaagacuauuca

SEQ ID NO: 1814284 - RNA, 19 nt, Artificial Sequence
  Description of Artificial Sequence: Synthetic oligonucleotide
aauuacauuugcucccucc

SEQ ID NO: 1814285 - RNA, 19 nt, Artificial Sequence
  Description of Artificial Sequence: Synthetic oligonucleotide
uauaaaauuuccuuccugc

SEQ ID NO: 1814286 - RNA, 19 nt, Artificial Sequence
  Description of Artificial Sequence: Synthetic oligonucleotide
uuugaagugaaacccaaag

SEQ ID NO: 1814287 - RNA, 19 nt, Artificial Sequence
  Description of Artificial Sequence: Synthetic oligonucleotide
aaagcaaucuuccucaagu

SEQ ID NO: 1814288 - RNA, 19 nt, Artificial Sequence
  Description of Artificial Sequence: Synthetic oligonucleotide
ugcuuucaaacacaaaugg

SEQ ID NO: 1814289 - RNA, 19 nt, Artificial Sequence
  Description of Artificial Sequence: Synthetic oligonucleotide
uaauguagcucuuagagac

SEQ ID NO: 1814290 - RNA, 19 nt, Artificial Sequence
  Description of Artificial Sequence: Synthetic oligonucleotide
uacuuuuccaacaucacgc

SEQ ID NO: 1814291 - RNA, 19 nt, Artificial Sequence
  Description of Artificial Sequence: Synthetic oligonucleotide
uuuaagguagugcacacug

SEQ ID NO: 1814292 - RNA, 19 nt, Artificial Sequence
  Description of Artificial Sequence: Synthetic oligonucleotide
augaaguucagguucauag

SEQ ID NO: 1814293 - RNA, 19 nt, Artificial Sequence
  Description of Artificial Sequence: Synthetic oligonucleotide
auaucuguaauguagcucu

SEQ ID NO: 1814294 - RNA, 19 nt, Artificial Sequence
  Description of Artificial Sequence: Synthetic oligonucleotide
uguguuuugaguccaaugu

SEQ ID NO: 1814295 - RNA, 19 nt, Artificial Sequence
  Description of Artificial Sequence: Synthetic oligonucleotide
guaauuaaaauguccaaug

SEQ ID NO: 1814296 - RNA, 19 nt, Artificial Sequence
  Description of Artificial Sequence: Synthetic oligonucleotide
uuuccugaggaccaaauug

SEQ ID NO: 1814297 - RNA, 19 nt, Artificial Sequence
  Description of Artificial Sequence: Synthetic oligonucleotide
aaaacuuaguuucccacca

SEQ ID NO: 1814298 - RNA, 19 nt, Artificial Sequence
  Description of Artificial Sequence: Synthetic oligonucleotide
uccaacaucacgcuuauaa

SEQ ID NO: 1814299 - RNA, 19 nt, Artificial Sequence
  Description of Artificial Sequence: Synthetic oligonucleotide
caaaguuugaagugaaacc

SEQ ID NO: 1814300 - RNA, 19 nt, Artificial Sequence
  Description of Artificial Sequence: Synthetic oligonucleotide
aaauagaauguccuuuugu

SEQ ID NO: 1814301 - RNA, 19 nt, Artificial Sequence
  Description of Artificial Sequence: Synthetic oligonucleotide
aacuuaguuucccaccacg

SEQ ID NO: 1814302 - RNA, 19 nt, Artificial Sequence
  Description of Artificial Sequence: Synthetic oligonucleotide
aaaccuaguuucugcagac

SEQ ID NO: 1814303 - RNA, 19 nt, Artificial Sequence
  Description of Artificial Sequence: Synthetic oligonucleotide
uucauuaauacuuuuccaa

SEQ ID NO: 1814304 - RNA, 19 nt, Artificial Sequence
  Description of Artificial Sequence: Synthetic oligonucleotide
uuucaaggugcucaguuag

SEQ ID NO: 1814305 - RNA, 19 nt, Artificial Sequence
  Description of Artificial Sequence: Synthetic oligonucleotide
uguaaaagacuauucacaa

SEQ ID NO: 1814306 - RNA, 19 nt, Artificial Sequence
  Description of Artificial Sequence: Synthetic oligonucleotide
aaaauuuccuuccugcuuu

SEQ ID NO: 1814307 - RNA, 19 nt, Artificial Sequence
  Description of Artificial Sequence: Synthetic oligonucleotide
aaguucaaauggcaucucg

SEQ ID NO: 1814308 - RNA, 19 nt, Artificial Sequence
  Description of Artificial Sequence: Synthetic oligonucleotide
uaaaauguccaaugcaaca

SEQ ID NO: 1814309 - RNA, 19 nt, Artificial Sequence
  Description of Artificial Sequence: Synthetic oligonucleotide
uuacugcgaaaauaaauag

SEQ ID NO: 1814310 - RNA, 19 nt, Artificial Sequence
  Description of Artificial Sequence: Synthetic oligonucleotide
acauucacaaccuuaaaau

SEQ ID NO: 1814311 - RNA, 19 nt, Artificial Sequence
  Description of Artificial Sequence: Synthetic oligonucleotide
aaacugccaaaacauucac

SEQ ID NO: 1814312 - RNA, 19 nt, Artificial Sequence
  Description of Artificial Sequence: Synthetic oligonucleotide
uaauucuagguuuucuaag

SEQ ID NO: 1814313 - RNA, 19 nt, Artificial Sequence
  Description of Artificial Sequence: Synthetic oligonucleotide
uggcaaacggauuucaaag

SEQ ID NO: 1814314 - RNA, 19 nt, Artificial Sequence
  Description of Artificial Sequence: Synthetic oligonucleotide
aauaaauagaauguccuuu

SEQ ID NO: 1814315 - RNA, 19 nt, Artificial Sequence
  Description of Artificial Sequence: Synthetic oligonucleotide
guuacaaacugccaaaaca

SEQ ID NO: 1814316 - RNA, 19 nt, Artificial Sequence
  Description of Artificial Sequence: Synthetic oligonucleotide
cucuuagagacuuuauccg

SEQ ID NO: 1814317 - RNA, 19 nt, Artificial Sequence
  Description of Artificial Sequence: Synthetic oligonucleotide
uauccgauagcacacggca

SEQ ID NO: 1814318 - RNA, 19 nt, Artificial Sequence
  Description of Artificial Sequence: Synthetic oligonucleotide
aaauaucuguaauguagcu

SEQ ID NO: 1814319 - RNA, 19 nt, Artificial Sequence
  Description of Artificial Sequence: Synthetic oligonucleotide
uuuccuuguguuuugaguc

SEQ ID NO: 1814320 - RNA, 19 nt, Artificial Sequence
  Description of Artificial Sequence: Synthetic oligonucleotide
uuuauccgauagcacacgg

SEQ ID NO: 1814321 - RNA, 19 nt, Artificial Sequence
  Description of Artificial Sequence: Synthetic oligonucleotide
uuugaguccaaugugcagc

SEQ ID NO: 1814322 - RNA, 19 nt, Artificial Sequence
  Description of Artificial Sequence: Synthetic oligonucleotide
uuacagcaaaguuugaagu

SEQ ID NO: 1814323 - RNA, 19 nt, Artificial Sequence
  Description of Artificial Sequence: Synthetic oligonucleotide
uccgauagcacacggcagg

SEQ ID NO: 1814324 - RNA, 19 nt, Artificial Sequence
  Description of Artificial Sequence: Synthetic oligonucleotide
auuagcucaaacuggaaaa

SEQ ID NO: 1814325 - RNA, 19 nt, Artificial Sequence
  Description of Artificial Sequence: Synthetic oligonucleotide
uaagguagugcacacugug

SEQ ID NO: 1814326 - RNA, 19 nt, Artificial Sequence
  Description of Artificial Sequence: Synthetic oligonucleotide
caaauuguagcuguaauuc

SEQ ID NO: 1814327 - RNA, 19 nt, Artificial Sequence
  Description of Artificial Sequence: Synthetic oligonucleotide
gacuuuauccgauagcaca

SEQ ID NO: 1814328 - RNA, 19 nt, Artificial Sequence
  Description of Artificial Sequence: Synthetic oligonucleotide
ggacaugagaauuacugcg

SEQ ID NO: 1814329 - RNA, 19 nt, Artificial Sequence
  Description of Artificial Sequence: Synthetic oligonucleotide
agguagugcacacugugac

SEQ ID NO: 1814330 - RNA, 19 nt, Artificial Sequence
  Description of Artificial Sequence: Synthetic oligonucleotide
aauuacugcgaaaauaaau

SEQ ID NO: 1814331 - RNA, 19 nt, Artificial Sequence
  Description of Artificial Sequence: Synthetic oligonucleotide
aguuucugcagacuacggg

SEQ ID NO: 1814332 - RNA, 19 nt, Artificial Sequence
  Description of Artificial Sequence: Synthetic oligonucleotide
uguaauuaaaauguccaau

SEQ ID NO: 1814333 - RNA, 19 nt, Artificial Sequence
  Description of Artificial Sequence: Synthetic oligonucleotide
uguugaaaauaucuguaau

SEQ ID NO: 1814334 - RNA, 19 nt, Artificial Sequence
  Description of Artificial Sequence: Synthetic oligonucleotide
uucuaagcuucauuaauac

SEQ ID NO: 1814335 - RNA, 19 nt, Artificial Sequence
  Description of Artificial Sequence: Synthetic oligonucleotide
ucaguuagagacuaaccaa

SEQ ID NO: 1814336 - RNA, 19 nt, Artificial Sequence
  Description of Artificial Sequence: Synthetic oligonucleotide
aaacuuaguuucccaccac

SEQ ID NO: 1814337 - RNA, 19 nt, Artificial Sequence
  Description of Artificial Sequence: Synthetic oligonucleotide
gagucuauuccucagucac

SEQ ID NO: 1814338 - RNA, 19 nt, Artificial Sequence
  Description of Artificial Sequence: Synthetic oligonucleotide
agcucuuagagacuuuauc

SEQ ID NO: 1814339 - RNA, 19 nt, Artificial Sequence
  Description of Artificial Sequence: Synthetic oligonucleotide
ucgggcaccaaauuuagcu

SEQ ID NO: 1814340 - RNA, 19 nt, Artificial Sequence
  Description of Artificial Sequence: Synthetic oligonucleotide
uuuuccuuguguuuugagu

SEQ ID NO: 1814341 - RNA, 19 nt, Artificial Sequence
  Description of Artificial Sequence: Synthetic oligonucleotide
aaaauguccaaugcaacau

SEQ ID NO: 1814342 - RNA, 19 nt, Artificial Sequence
  Description of Artificial Sequence: Synthetic oligonucleotide
gagacuaaccaaccaagug

SEQ ID NO: 1814343 - RNA, 19 nt, Artificial Sequence
  Description of Artificial Sequence: Synthetic oligonucleotide
ucuuggugaauucuggcaa

SEQ ID NO: 1814344 - RNA, 19 nt, Artificial Sequence
  Description of Artificial Sequence: Synthetic oligonucleotide
ucuuagagacuuuauccga

SEQ ID NO: 1814345 - RNA, 19 nt, Artificial Sequence
  Description of Artificial Sequence: Synthetic oligonucleotide
gauagcacacggcaggaug

SEQ ID NO: 1814346 - RNA, 19 nt, Artificial Sequence
  Description of Artificial Sequence: Synthetic oligonucleotide
gaggaugaugaugaggcgg

SEQ ID NO: 1814347 - RNA, 19 nt, Artificial Sequence
  Description of Artificial Sequence: Synthetic oligonucleotide
uguccaaugcaacaucacu

SEQ ID NO: 1814348 - RNA, 19 nt, Artificial Sequence
  Description of Artificial Sequence: Synthetic oligonucleotide
uguaauucuagguuuucua

SEQ ID NO: 1814349 - RNA, 19 nt, Artificial Sequence
  Description of Artificial Sequence: Synthetic oligonucleotide
gagacuuuauccgauagca

SEQ ID NO: 1814350 - RNA, 19 nt, Artificial Sequence
  Description of Artificial Sequence: Synthetic oligonucleotide
auucacaaccuuaaaaucu

SEQ ID NO: 1814351 - RNA, 19 nt, Artificial Sequence
  Description of Artificial Sequence: Synthetic oligonucleotide
aauggcaucucguucuaaa

SEQ ID NO: 1814352 - RNA, 19 nt, Artificial Sequence
  Description of Artificial Sequence: Synthetic oligonucleotide
ucuuuggugcccauauuca

SEQ ID NO: 1814353 - RNA, 19 nt, Artificial Sequence
  Description of Artificial Sequence: Synthetic oligonucleotide
uuauuugugcacauucaau

SEQ ID NO: 1814354 - RNA, 19 nt, Artificial Sequence
  Description of Artificial Sequence: Synthetic oligonucleotide
uaugaagagagaucuuuuc

SEQ ID NO: 1814355 - RNA, 19 nt, Artificial Sequence
  Description of Artificial Sequence: Synthetic oligonucleotide
acugcgaaaauaaauagaa

SEQ ID NO: 1814356 - RNA, 19 nt, Artificial Sequence
  Description of Artificial Sequence: Synthetic oligonucleotide
gcucuuagagacuuuaucc

SEQ ID NO: 1814357 - RNA, 19 nt, Artificial Sequence
  Description of Artificial Sequence: Synthetic oligonucleotide
aaacggauuucaaagggca

SEQ ID NO: 1814358 - RNA, 19 nt, Artificial Sequence
  Description of Artificial Sequence: Synthetic oligonucleotide
auuacugcgaaaauaaaua

SEQ ID NO: 1814359 - RNA, 19 nt, Artificial Sequence
  Description of Artificial Sequence: Synthetic oligonucleotide
caaacggauuucaaagggc

SEQ ID NO: 1814360 - RNA, 19 nt, Artificial Sequence
  Description of Artificial Sequence: Synthetic oligonucleotide
agcauacaaaauguaaaag

SEQ ID NO: 1814361 - RNA, 19 nt, Artificial Sequence
  Description of Artificial Sequence: Synthetic oligonucleotide
aggagucuauuccucaguc

SEQ ID NO: 1814362 - RNA, 19 nt, Artificial Sequence
  Description of Artificial Sequence: Synthetic oligonucleotide
uuuugaguccaaugugcag

SEQ ID NO: 1814363 - RNA, 19 nt, Artificial Sequence
  Description of Artificial Sequence: Synthetic oligonucleotide
acuuuauccgauagcacac

SEQ ID NO: 1814364 - RNA, 19 nt, Artificial Sequence
  Description of Artificial Sequence: Synthetic oligonucleotide
ugaggucuauuguucuugg

SEQ ID NO: 1814365 - RNA, 19 nt, Artificial Sequence
  Description of Artificial Sequence: Synthetic oligonucleotide
uguuacaaacugccaaaac

SEQ ID NO: 1814366 - RNA, 19 nt, Artificial Sequence
  Description of Artificial Sequence: Synthetic oligonucleotide
cauucacaaccuuaaaauc

SEQ ID NO: 1814367 - RNA, 19 nt, Artificial Sequence
  Description of Artificial Sequence: Synthetic oligonucleotide
cuaguuucugcagacuacg

SEQ ID NO: 1814368 - RNA, 19 nt, Artificial Sequence
  Description of Artificial Sequence: Synthetic oligonucleotide
auguaaaagacuauucaca

SEQ ID NO: 1814369 - RNA, 19 nt, Artificial Sequence
  Description of Artificial Sequence: Synthetic oligonucleotide
uuguguuuugaguccaaug

SEQ ID NO: 1814370 - RNA, 19 nt, Artificial Sequence
  Description of Artificial Sequence: Synthetic oligonucleotide
gaaaccuaguuucugcaga

SEQ ID NO: 1814371 - RNA, 19 nt, Artificial Sequence
  Description of Artificial Sequence: Synthetic oligonucleotide
cucaguuagagacuaacca

SEQ ID NO: 1814372 - RNA, 19 nt, Artificial Sequence
  Description of Artificial Sequence: Synthetic oligonucleotide
gcauacaaaauguaaaaga

SEQ ID NO: 1814373 - RNA, 19 nt, Artificial Sequence
  Description of Artificial Sequence: Synthetic oligonucleotide
augagaauuacugcgaaaa

SEQ ID NO: 1814374 - RNA, 19 nt, Artificial Sequence
  Description of Artificial Sequence: Synthetic oligonucleotide
aauguccaaugcaacauca

SEQ ID NO: 1814375 - RNA, 19 nt, Artificial Sequence
  Description of Artificial Sequence: Synthetic oligonucleotide
ugucaugucuuguaaacuu

SEQ ID NO: 1814376 - RNA, 19 nt, Artificial Sequence
  Description of Artificial Sequence: Synthetic oligonucleotide
ucuaagcuucauuaauacu

SEQ ID NO: 1814377 - RNA, 19 nt, Artificial Sequence
  Description of Artificial Sequence: Synthetic oligonucleotide
cucaaguucaaauggcauc

SEQ ID NO: 1814378 - RNA, 19 nt, Artificial Sequence
  Description of Artificial Sequence: Synthetic oligonucleotide
acauuugcucccuccaaag

SEQ ID NO: 1814379 - RNA, 19 nt, Artificial Sequence
  Description of Artificial Sequence: Synthetic oligonucleotide
gcaaacggauuucaaaggg

SEQ ID NO: 1814380 - RNA, 19 nt, Artificial Sequence
  Description of Artificial Sequence: Synthetic oligonucleotide
aaauuaccuggaaaccuag

SEQ ID NO: 1814381 - RNA, 19 nt, Artificial Sequence
  Description of Artificial Sequence: Synthetic oligonucleotide
ugagcaggagucuauuccu

SEQ ID NO: 1814382 - RNA, 19 nt, Artificial Sequence
  Description of Artificial Sequence: Synthetic oligonucleotide
acugugauacuuccuguug

SEQ ID NO: 1814383 - RNA, 19 nt, Artificial Sequence
  Description of Artificial Sequence: Synthetic oligonucleotide
gugagcaggagucuauucc

SEQ ID NO: 1814384 - RNA, 19 nt, Artificial Sequence
  Description of Artificial Sequence: Synthetic oligonucleotide
gacgcggaggaaaagcugg

SEQ ID NO: 1814385 - RNA, 19 nt, Artificial Sequence
  Description of Artificial Sequence: Synthetic oligonucleotide
guagugcacacugugacag

SEQ ID NO: 1814386 - RNA, 19 nt, Artificial Sequence
  Description of Artificial Sequence: Synthetic oligonucleotide
uuaccuggaaaccuaguuu

SEQ ID NO: 1814387 - RNA, 19 nt, Artificial Sequence
  Description of Artificial Sequence: Synthetic oligonucleotide
cuggaaaccuaguuucugc

SEQ ID NO: 1814388 - RNA, 19 nt, Artificial Sequence
  Description of Artificial Sequence: Synthetic oligonucleotide
uucacuuguugcuccagug

SEQ ID NO: 1814389 - RNA, 19 nt, Artificial Sequence
  Description of Artificial Sequence: Synthetic oligonucleotide
uccaaugugcagcagguuu

SEQ ID NO: 1814390 - RNA, 19 nt, Artificial Sequence
  Description of Artificial Sequence: Synthetic oligonucleotide
uuauccgauagcacacggc

SEQ ID NO: 1814391 - RNA, 19 nt, Artificial Sequence
  Description of Artificial Sequence: Synthetic oligonucleotide
cugucugcauccauugggg

SEQ ID NO: 1814392 - RNA, 19 nt, Artificial Sequence
  Description of Artificial Sequence: Synthetic oligonucleotide
uaaacgucgggcaccaaau

SEQ ID NO: 1814393 - RNA, 19 nt, Artificial Sequence
  Description of Artificial Sequence: Synthetic oligonucleotide
acacauuagcucaaacugg

SEQ ID NO: 1814394 - RNA, 19 nt, Artificial Sequence
  Description of Artificial Sequence: Synthetic oligonucleotide
auuaccuggaaaccuaguu

SEQ ID NO: 1814395 - RNA, 19 nt, Artificial Sequence
  Description of Artificial Sequence: Synthetic oligonucleotide
acagacuacauuuguaauu

SEQ ID NO: 1814396 - RNA, 19 nt, Artificial Sequence
  Description of Artificial Sequence: Synthetic oligonucleotide
ugaggaccaaauuguagcu

SEQ ID NO: 1814397 - RNA, 19 nt, Artificial Sequence
  Description of Artificial Sequence: Synthetic oligonucleotide
uaguuucugcagacuacgg

SEQ ID NO: 1814398 - RNA, 19 nt, Artificial Sequence
  Description of Artificial Sequence: Synthetic oligonucleotide
ucacgcuuauaaauuacau

SEQ ID NO: 1814399 - RNA, 19 nt, Artificial Sequence
  Description of Artificial Sequence: Synthetic oligonucleotide
aaaauuaccuggaaaccua

SEQ ID NO: 1814400 - RNA, 19 nt, Artificial Sequence
  Description of Artificial Sequence: Synthetic oligonucleotide
aacaucacgcuuauaaauu

SEQ ID NO: 1814401 - RNA, 19 nt, Artificial Sequence
  Description of Artificial Sequence: Synthetic oligonucleotide
uggaaaccuaguuucugca

SEQ ID NO: 1814402 - RNA, 19 nt, Artificial Sequence
  Description of Artificial Sequence: Synthetic oligonucleotide
caaacugccaaaacauuca

SEQ ID NO: 1814403 - RNA, 19 nt, Artificial Sequence
  Description of Artificial Sequence: Synthetic oligonucleotide
cuuuggugcccauauucag

SEQ ID NO: 1814404 - RNA, 19 nt, Artificial Sequence
  Description of Artificial Sequence: Synthetic oligonucleotide
uacauuugcucccuccaaa

SEQ ID NO: 1814405 - RNA, 19 nt, Artificial Sequence
  Description of Artificial Sequence: Synthetic oligonucleotide
guguuuugaguccaaugug

SEQ ID NO: 1814406 - RNA, 19 nt, Artificial Sequence
  Description of Artificial Sequence: Synthetic oligonucleotide
guaauucuagguuuucuaa

SEQ ID NO: 1814407 - RNA, 19 nt, Artificial Sequence
  Description of Artificial Sequence: Synthetic oligonucleotide
aauuguagcuguaauucua

SEQ ID NO: 1814408 - RNA, 19 nt, Artificial Sequence
  Description of Artificial Sequence: Synthetic oligonucleotide
ugcuccagugcaaauaauu

SEQ ID NO: 1814409 - RNA, 19 nt, Artificial Sequence
  Description of Artificial Sequence: Synthetic oligonucleotide
guaauguagcucuuagaga

SEQ ID NO: 1814410 - RNA, 19 nt, Artificial Sequence
  Description of Artificial Sequence: Synthetic oligonucleotide
uuaagguagugcacacugu

SEQ ID NO: 1814411 - RNA, 19 nt, Artificial Sequence
  Description of Artificial Sequence: Synthetic oligonucleotide
ggcaaacggauuucaaagg

SEQ ID NO: 1814412 - RNA, 19 nt, Artificial Sequence
  Description of Artificial Sequence: Synthetic oligonucleotide
gacuacgggcuaaacgucg

SEQ ID NO: 1814413 - RNA, 19 nt, Artificial Sequence
  Description of Artificial Sequence: Synthetic oligonucleotide
gaauguccuuuuguaaaag

SEQ ID NO: 1814414 - RNA, 19 nt, Artificial Sequence
  Description of Artificial Sequence: Synthetic oligonucleotide
guugguccaguuuuccuug

SEQ ID NO: 1814415 - RNA, 19 nt, Artificial Sequence
  Description of Artificial Sequence: Synthetic oligonucleotide
uguugguccaguuuuccuu

SEQ ID NO: 1814416 - RNA, 19 nt, Artificial Sequence
  Description of Artificial Sequence: Synthetic oligonucleotide
cacacuguagccgugagca

SEQ ID NO: 1814417 - RNA, 19 nt, Artificial Sequence
  Description of Artificial Sequence: Synthetic oligonucleotide
gaugaggcgggcccgcucc

SEQ ID NO: 1814418 - RNA, 19 nt, Artificial Sequence
  Description of Artificial Sequence: Synthetic oligonucleotide
guucuuggugaauucuggc

SEQ ID NO: 1814419 - RNA, 19 nt, Artificial Sequence
  Description of Artificial Sequence: Synthetic oligonucleotide
uaaccaaccaagugaguua

SEQ ID NO: 1814420 - RNA, 19 nt, Artificial Sequence
  Description of Artificial Sequence: Synthetic oligonucleotide
caucacgcuuauaaauuac

SEQ ID NO: 1814421 - RNA, 19 nt, Artificial Sequence
  Description of Artificial Sequence: Synthetic oligonucleotide
gcagacuacgggcuaaacg

SEQ ID NO: 1814422 - RNA, 19 nt, Artificial Sequence
  Description of Artificial Sequence: Synthetic oligonucleotide
ggggacaugagaauuacug

SEQ ID NO: 1814423 - RNA, 19 nt, Artificial Sequence
  Description of Artificial Sequence: Synthetic oligonucleotide
uuacauuugcucccuccaa

SEQ ID NO: 1814424 - RNA, 19 nt, Artificial Sequence
  Description of Artificial Sequence: Synthetic oligonucleotide
uacuuccuguugaaaauau

SEQ ID NO: 1814425 - RNA, 19 nt, Artificial Sequence
  Description of Artificial Sequence: Synthetic oligonucleotide
agggcauguuacaaacugc

SEQ ID NO: 1814426 - RNA, 19 nt, Artificial Sequence
  Description of Artificial Sequence: Synthetic oligonucleotide
uggugaauucuggcaaacg

SEQ ID NO: 1814427 - RNA, 19 nt, Artificial Sequence
  Description of Artificial Sequence: Synthetic oligonucleotide
gucuauuccucagucacug

SEQ ID NO: 1814428 - RNA, 19 nt, Artificial Sequence
  Description of Artificial Sequence: Synthetic oligonucleotide
uguggggacaugagaauua

SEQ ID NO: 1814429 - RNA, 19 nt, Artificial Sequence
  Description of Artificial Sequence: Synthetic oligonucleotide
uucaaagggcauguuacaa

SEQ ID NO: 1814430 - RNA, 19 nt, Artificial Sequence
  Description of Artificial Sequence: Synthetic oligonucleotide
ggucuauuguucuugguga

SEQ ID NO: 1814431 - RNA, 19 nt, Artificial Sequence
  Description of Artificial Sequence: Synthetic oligonucleotide
cagacuacgggcuaaacgu

SEQ ID NO: 1814432 - RNA, 19 nt, Artificial Sequence
  Description of Artificial Sequence: Synthetic oligonucleotide
gcaaaguuugaagugaaac

SEQ ID NO: 1814433 - RNA, 19 nt, Artificial Sequence
  Description of Artificial Sequence: Synthetic oligonucleotide
cagccuuuacauugggccc

SEQ ID NO: 1814434 - RNA, 19 nt, Artificial Sequence
  Description of Artificial Sequence: Synthetic oligonucleotide
gcuggcaugaggucuauug

SEQ ID NO: 1814435 - RNA, 19 nt, Artificial Sequence
  Description of Artificial Sequence: Synthetic oligonucleotide
cuuuauccgauagcacacg

SEQ ID NO: 1814436 - RNA, 19 nt, Artificial Sequence
  Description of Artificial Sequence: Synthetic oligonucleotide
uucaaggugcucaguuaga

SEQ ID NO: 1814437 - RNA, 19 nt, Artificial Sequence
  Description of Artificial Sequence: Synthetic oligonucleotide
ugcucaguuagagacuaac

SEQ ID NO: 1814438 - RNA, 19 nt, Artificial Sequence
  Description of Artificial Sequence: Synthetic oligonucleotide
gacaugagaauuacugcga

SEQ ID NO: 1814439 - RNA, 19 nt, Artificial Sequence
  Description of Artificial Sequence: Synthetic oligonucleotide
cauuugcucccuccaaagc

SEQ ID NO: 1814440 - RNA, 19 nt, Artificial Sequence
  Description of Artificial Sequence: Synthetic oligonucleotide
uucuagguuuucuaagcuu

SEQ ID NO: 1814441 - RNA, 19 nt, Artificial Sequence
  Description of Artificial Sequence: Synthetic oligonucleotide
acaucacgcuuauaaauua

SEQ ID NO: 1814442 - RNA, 19 nt, Artificial Sequence
  Description of Artificial Sequence: Synthetic oligonucleotide
uuagcucaaacuggaaaau

SEQ ID NO: 1814443 - RNA, 19 nt, Artificial Sequence
  Description of Artificial Sequence: Synthetic oligonucleotide
uuuuaagguagugcacacu

SEQ ID NO: 1814444 - RNA, 19 nt, Artificial Sequence
  Description of Artificial Sequence: Synthetic oligonucleotide
cauuagcucaaacuggaaa

SEQ ID NO: 1814445 - RNA, 19 nt, Artificial Sequence
  Description of Artificial Sequence: Synthetic oligonucleotide
ucacacuguagccgugagc

SEQ ID NO: 1814446 - RNA, 19 nt, Artificial Sequence
  Description of Artificial Sequence: Synthetic oligonucleotide
acggauuucaaagggcaug

SEQ ID NO: 1814447 - RNA, 19 nt, Artificial Sequence
  Description of Artificial Sequence: Synthetic oligonucleotide
guugcuccagugcaaauaa

SEQ ID NO: 1814448 - RNA, 19 nt, Artificial Sequence
  Description of Artificial Sequence: Synthetic oligonucleotide
ggcccugucacugugauac

SEQ ID NO: 1814449 - RNA, 19 nt, Artificial Sequence
  Description of Artificial Sequence: Synthetic oligonucleotide
cacggcaggaugaaguuca

SEQ ID NO: 1814450 - RNA, 19 nt, Artificial Sequence
  Description of Artificial Sequence: Synthetic oligonucleotide
uguagccgugagcaggagu

SEQ ID NO: 1814451 - RNA, 19 nt, Artificial Sequence
  Description of Artificial Sequence: Synthetic oligonucleotide
accuaguuucugcagacua

SEQ ID NO: 1814452 - RNA, 19 nt, Artificial Sequence
  Description of Artificial Sequence: Synthetic oligonucleotide
ucugccuguggggacauga

SEQ ID NO: 1814453 - RNA, 19 nt, Artificial Sequence
  Description of Artificial Sequence: Synthetic oligonucleotide
ucuggcaaacggauuucaa

SEQ ID NO: 1814454 - RNA, 19 nt, Artificial Sequence
  Description of Artificial Sequence: Synthetic oligonucleotide
caaauggguacaccuguuc

SEQ ID NO: 1814455 - RNA, 19 nt, Artificial Sequence
  Description of Artificial Sequence: Synthetic oligonucleotide
agcucaaacuggaaaauaa

SEQ ID NO: 1814456 - RNA, 19 nt, Artificial Sequence
  Description of Artificial Sequence: Synthetic oligonucleotide
agguucauagcuggcauga

SEQ ID NO: 1814457 - RNA, 19 nt, Artificial Sequence
  Description of Artificial Sequence: Synthetic oligonucleotide
guagccgugagcaggaguc

SEQ ID NO: 1814458 - RNA, 19 nt, Artificial Sequence
  Description of Artificial Sequence: Synthetic oligonucleotide
aauguagcucuuagagacu

SEQ ID NO: 1814459 - RNA, 19 nt, Artificial Sequence
  Description of Artificial Sequence: Synthetic oligonucleotide
uaaaagcagcaaugucaug

SEQ ID NO: 1814460 - RNA, 19 nt, Artificial Sequence
  Description of Artificial Sequence: Synthetic oligonucleotide
uguugcuccagugcaaaua

SEQ ID NO: 1814461 - RNA, 19 nt, Artificial Sequence
  Description of Artificial Sequence: Synthetic oligonucleotide
aacacagacuacauuugua

SEQ ID NO: 1814462 - RNA, 19 nt, Artificial Sequence
  Description of Artificial Sequence: Synthetic oligonucleotide
ugggaagacggggcggucg

SEQ ID NO: 1814463 - RNA, 19 nt, Artificial Sequence
  Description of Artificial Sequence: Synthetic oligonucleotide
ucggacgcggaggaaaagc

SEQ ID NO: 1814464 - RNA, 19 nt, Artificial Sequence
  Description of Artificial Sequence: Synthetic oligonucleotide
guugcgucggacgcggagg

SEQ ID NO: 1814465 - RNA, 19 nt, Artificial Sequence
  Description of Artificial Sequence: Synthetic oligonucleotide
aauuaccuggaaaccuagu

SEQ ID NO: 1814466 - RNA, 19 nt, Artificial Sequence
  Description of Artificial Sequence: Synthetic oligonucleotide
uggcaugaggucuauuguu

SEQ ID NO: 1814467 - RNA, 19 nt, Artificial Sequence
  Description of Artificial Sequence: Synthetic oligonucleotide
aguggccacagccuuuaca

SEQ ID NO: 1814468 - RNA, 19 nt, Artificial Sequence
  Description of Artificial Sequence: Synthetic oligonucleotide
agaucuuuuccaaacuuuu

SEQ ID NO: 1814469 - RNA, 19 nt, Artificial Sequence
  Description of Artificial Sequence: Synthetic oligonucleotide
aaagggcauguuacaaacu

SEQ ID NO: 1814470 - RNA, 19 nt, Artificial Sequence
  Description of Artificial Sequence: Synthetic oligonucleotide
aucacgcuuauaaauuaca

SEQ ID NO: 1814471 - RNA, 19 nt, Artificial Sequence
  Description of Artificial Sequence: Synthetic oligonucleotide
gacaacaauaaaacaauuu

SEQ ID NO: 1814472 - RNA, 19 nt, Artificial Sequence
  Description of Artificial Sequence: Synthetic oligonucleotide
gaggaccaaauuguagcug

SEQ ID NO: 1814473 - RNA, 19 nt, Artificial Sequence
  Description of Artificial Sequence: Synthetic oligonucleotide
guuuugaguccaaugugca

SEQ ID NO: 1814474 - RNA, 19 nt, Artificial Sequence
  Description of Artificial Sequence: Synthetic oligonucleotide
acgggcuaaacgucgggca

SEQ ID NO: 1814475 - RNA, 19 nt, Artificial Sequence
  Description of Artificial Sequence: Synthetic oligonucleotide
ugccgguugcgucggacgc

SEQ ID NO: 1814476 - RNA, 19 nt, Artificial Sequence
  Description of Artificial Sequence: Synthetic oligonucleotide
cacauucaauuuaaaaggu

SEQ ID NO: 1814477 - RNA, 19 nt, Artificial Sequence
  Description of Artificial Sequence: Synthetic oligonucleotide
cugugauacuuccuguuga

SEQ ID NO: 1814478 - RNA, 19 nt, Artificial Sequence
  Description of Artificial Sequence: Synthetic oligonucleotide
uacgggcuaaacgucgggc

SEQ ID NO: 1814479 - RNA, 19 nt, Artificial Sequence
  Description of Artificial Sequence: Synthetic oligonucleotide
caaugcaacaucacugucu

SEQ ID NO: 1814480 - RNA, 19 nt, Artificial Sequence
  Description of Artificial Sequence: Synthetic oligonucleotide
auccgugggaagacggggc

SEQ ID NO: 1814481 - RNA, 19 nt, Artificial Sequence
  Description of Artificial Sequence: Synthetic oligonucleotide
augucaugucuuguaaacu

SEQ ID NO: 1814482 - RNA, 19 nt, Artificial Sequence
  Description of Artificial Sequence: Synthetic oligonucleotide
acuuaguuucccaccacga

SEQ ID NO: 1814483 - RNA, 19 nt, Artificial Sequence
  Description of Artificial Sequence: Synthetic oligonucleotide
cagacuacauuuguaauua

SEQ ID NO: 1814484 - RNA, 19 nt, Artificial Sequence
  Description of Artificial Sequence: Synthetic oligonucleotide
ccaaacuuuuauuugugca

SEQ ID NO: 1814485 - RNA, 19 nt, Artificial Sequence
  Description of Artificial Sequence: Synthetic oligonucleotide
auagcacacggcaggauga

SEQ ID NO: 1814486 - RNA, 19 nt, Artificial Sequence
  Description of Artificial Sequence: Synthetic oligonucleotide
uccuuguguuuugagucca

SEQ ID NO: 1814487 - RNA, 19 nt, Artificial Sequence
  Description of Artificial Sequence: Synthetic oligonucleotide
aaacgucgggcaccaaauu

SEQ ID NO: 1814488 - RNA, 19 nt, Artificial Sequence
  Description of Artificial Sequence: Synthetic oligonucleotide
uuggugaauucuggcaaac

SEQ ID NO: 1814489 - RNA, 19 nt, Artificial Sequence
  Description of Artificial Sequence: Synthetic oligonucleotide
acuacgggcuaaacgucgg

SEQ ID NO: 1814490 - RNA, 19 nt, Artificial Sequence
  Description of Artificial Sequence: Synthetic oligonucleotide
ucauagcuggcaugagguc

SEQ ID NO: 1814491 - RNA, 19 nt, Artificial Sequence
  Description of Artificial Sequence: Synthetic oligonucleotide
aguuugaagugaaacccaa

SEQ ID NO: 1814492 - RNA, 19 nt, Artificial Sequence
  Description of Artificial Sequence: Synthetic oligonucleotide
cuagguuuucuaagcuuca

SEQ ID NO: 1814493 - RNA, 19 nt, Artificial Sequence
  Description of Artificial Sequence: Synthetic oligonucleotide
cuaaacgucgggcaccaaa

SEQ ID NO: 1814494 - RNA, 19 nt, Artificial Sequence
  Description of Artificial Sequence: Synthetic oligonucleotide
ucuauuccucagucacugu

SEQ ID NO: 1814495 - RNA, 19 nt, Artificial Sequence
  Description of Artificial Sequence: Synthetic oligonucleotide
gaagacggggcggucgcag

SEQ ID NO: 1814496 - RNA, 19 nt, Artificial Sequence
  Description of Artificial Sequence: Synthetic oligonucleotide
ugguccaguuuuccuugug

SEQ ID NO: 1814497 - RNA, 19 nt, Artificial Sequence
  Description of Artificial Sequence: Synthetic oligonucleotide
agacuacgggcuaaacguc

SEQ ID NO: 1814498 - RNA, 19 nt, Artificial Sequence
  Description of Artificial Sequence: Synthetic oligonucleotide
caacaucacgcuuauaaau

SEQ ID NO: 1814499 - RNA, 19 nt, Artificial Sequence
  Description of Artificial Sequence: Synthetic oligonucleotide
agggacuggagcucacacu

SEQ ID NO: 1814500 - RNA, 19 nt, Artificial Sequence
  Description of Artificial Sequence: Synthetic oligonucleotide
cuuaguuucccaccacgaa

SEQ ID NO: 1814501 - RNA, 19 nt, Artificial Sequence
  Description of Artificial Sequence: Synthetic oligonucleotide
uccauugggguaguuuaaa

SEQ ID NO: 1814502 - RNA, 19 nt, Artificial Sequence
  Description of Artificial Sequence: Synthetic oligonucleotide
guuucaaggugcucaguua

SEQ ID NO: 1814503 - RNA, 19 nt, Artificial Sequence
  Description of Artificial Sequence: Synthetic oligonucleotide
aaccuaguuucugcagacu

SEQ ID NO: 1814504 - RNA, 19 nt, Artificial Sequence
  Description of Artificial Sequence: Synthetic oligonucleotide
cugccgguugcgucggacg

SEQ ID NO: 1814505 - RNA, 19 nt, Artificial Sequence
  Description of Artificial Sequence: Synthetic oligonucleotide
uugcgucggacgcggagga

SEQ ID NO: 1814506 - RNA, 19 nt, Artificial Sequence
  Description of Artificial Sequence: Synthetic oligonucleotide
gucaugucuuguaaacuuc

SEQ ID NO: 1814507 - RNA, 19 nt, Artificial Sequence
  Description of Artificial Sequence: Synthetic oligonucleotide
aggaaaagcuggaggacga

SEQ ID NO: 1814508 - RNA, 19 nt, Artificial Sequence
  Description of Artificial Sequence: Synthetic oligonucleotide
cagguucauagcuggcaug

SEQ ID NO: 1814509 - RNA, 19 nt, Artificial Sequence
  Description of Artificial Sequence: Synthetic oligonucleotide
aacggauuucaaagggcau

SEQ ID NO: 1814510 - RNA, 19 nt, Artificial Sequence
  Description of Artificial Sequence: Synthetic oligonucleotide
cuacgggcuaaacgucggg

SEQ ID NO: 1814511 - RNA, 19 nt, Artificial Sequence
  Description of Artificial Sequence: Synthetic oligonucleotide
gaugaugaggcgggcccgc

SEQ ID NO: 1814512 - RNA, 19 nt, Artificial Sequence
  Description of Artificial Sequence: Synthetic oligonucleotide
auguuacaaacugccaaaa

SEQ ID NO: 1814513 - RNA, 19 nt, Artificial Sequence
  Description of Artificial Sequence: Synthetic oligonucleotide
ggggcggucgcagaggacg

SEQ ID NO: 1814514 - RNA, 19 nt, Artificial Sequence
  Description of Artificial Sequence: Synthetic oligonucleotide
uagcucaaacuggaaaaua

SEQ ID NO: 1814515 - RNA, 19 nt, Artificial Sequence
  Description of Artificial Sequence: Synthetic oligonucleotide
acacggcaggaugaaguuc

SEQ ID NO: 1814516 - RNA, 19 nt, Artificial Sequence
  Description of Artificial Sequence: Synthetic oligonucleotide
gucgcagaggacgcggcgg

SEQ ID NO: 1814517 - RNA, 19 nt, Artificial Sequence
  Description of Artificial Sequence: Synthetic oligonucleotide
aagacggggcggucgcaga

SEQ ID NO: 1814518 - RNA, 19 nt, Artificial Sequence
  Description of Artificial Sequence: Synthetic oligonucleotide
acauccgugggaagacggg

SEQ ID NO: 1814519 - RNA, 19 nt, Artificial Sequence
  Description of Artificial Sequence: Synthetic oligonucleotide
gcagcagguuucaaggugc

SEQ ID NO: 1814520 - RNA, 19 nt, Artificial Sequence
  Description of Artificial Sequence: Synthetic oligonucleotide
cacaaauggguacaccugu

SEQ ID NO: 1814521 - RNA, 19 nt, Artificial Sequence
  Description of Artificial Sequence: Synthetic oligonucleotide
gucuauuguucuuggugaa

SEQ ID NO: 1814522 - RNA, 19 nt, Artificial Sequence
  Description of Artificial Sequence: Synthetic oligonucleotide
cauggaacucccgccccgg

SEQ ID NO: 1814523 - RNA, 19 nt, Artificial Sequence
  Description of Artificial Sequence: Synthetic oligonucleotide
acuguagccgugagcagga

SEQ ID NO: 1814524 - RNA, 19 nt, Artificial Sequence
  Description of Artificial Sequence: Synthetic oligonucleotide
cugccuguggggacaugag

SEQ ID NO: 1814525 - RNA, 19 nt, Artificial Sequence
  Description of Artificial Sequence: Synthetic oligonucleotide
uguagcucuuagagacuuu

SEQ ID NO: 1814526 - RNA, 19 nt, Artificial Sequence
  Description of Artificial Sequence: Synthetic oligonucleotide
cccauauucagcauacaaa

SEQ ID NO: 1814527 - RNA, 19 nt, Artificial Sequence
  Description of Artificial Sequence: Synthetic oligonucleotide
ugggcccugucacugugau

SEQ ID NO: 1814528 - RNA, 19 nt, Artificial Sequence
  Description of Artificial Sequence: Synthetic oligonucleotide
ugcucccuccaaagcaauc

SEQ ID NO: 1814529 - RNA, 19 nt, Artificial Sequence
  Description of Artificial Sequence: Synthetic oligonucleotide
uugguccaguuuuccuugu

SEQ ID NO: 1814530 - RNA, 19 nt, Artificial Sequence
  Description of Artificial Sequence: Synthetic oligonucleotide
gcaaugucaugucuuguaa

SEQ ID NO: 1814531 - RNA, 19 nt, Artificial Sequence
  Description of Artificial Sequence: Synthetic oligonucleotide
gaacucccgccccggcccg

SEQ ID NO: 1814532 - RNA, 19 nt, Artificial Sequence
  Description of Artificial Sequence: Synthetic oligonucleotide
guggggacaugagaauuac

SEQ ID NO: 1814533 - RNA, 19 nt, Artificial Sequence
  Description of Artificial Sequence: Synthetic oligonucleotide
ggagucuauuccucaguca

SEQ ID NO: 1814534 - RNA, 19 nt, Artificial Sequence
  Description of Artificial Sequence: Synthetic oligonucleotide
ggcaugaggucuauuguuc

SEQ ID NO: 1814535 - RNA, 19 nt, Artificial Sequence
  Description of Artificial Sequence: Synthetic oligonucleotide
gagcucacacuguagccgu

SEQ ID NO: 1814536 - RNA, 19 nt, Artificial Sequence
  Description of Artificial Sequence: Synthetic oligonucleotide
cauagcuggcaugaggucu

SEQ ID NO: 1814537 - RNA, 19 nt, Artificial Sequence
  Description of Artificial Sequence: Synthetic oligonucleotide
gguacaccuguuccacagc

SEQ ID NO: 1814538 - RNA, 19 nt, Artificial Sequence
  Description of Artificial Sequence: Synthetic oligonucleotide
gguugcgucggacgcggag

SEQ ID NO: 1814539 - RNA, 19 nt, Artificial Sequence
  Description of Artificial Sequence: Synthetic oligonucleotide
gcccauauucagcauacaa

SEQ ID NO: 1814540 - RNA, 19 nt, Artificial Sequence
  Description of Artificial Sequence: Synthetic oligonucleotide
ggaggaaaagcuggaggac

SEQ ID NO: 1814541 - RNA, 19 nt, Artificial Sequence
  Description of Artificial Sequence: Synthetic oligonucleotide
cacgcuuauaaauuacauu

SEQ ID NO: 1814542 - RNA, 19 nt, Artificial Sequence
  Description of Artificial Sequence: Synthetic oligonucleotide
guuugaagugaaacccaaa

SEQ ID NO: 1814543 - RNA, 19 nt, Artificial Sequence
  Description of Artificial Sequence: Synthetic oligonucleotide
aucuguaauguagcucuua

SEQ ID NO: 1814544 - RNA, 19 nt, Artificial Sequence
  Description of Artificial Sequence: Synthetic oligonucleotide
agcuguaauucuagguuuu

SEQ ID NO: 1814545 - RNA, 19 nt, Artificial Sequence
  Description of Artificial Sequence: Synthetic oligonucleotide
ggucgcagaggacgcggcg

SEQ ID NO: 1814546 - RNA, 19 nt, Artificial Sequence
  Description of Artificial Sequence: Synthetic oligonucleotide
acgucgggcaccaaauuua

SEQ ID NO: 1814547 - RNA, 19 nt, Artificial Sequence
  Description of Artificial Sequence: Synthetic oligonucleotide
caaguucaaauggcaucuc

SEQ ID NO: 1814548 - RNA, 19 nt, Artificial Sequence
  Description of Artificial Sequence: Synthetic oligonucleotide
agucacuguugguccaguu

SEQ ID NO: 1814549 - RNA, 19 nt, Artificial Sequence
  Description of Artificial Sequence: Synthetic oligonucleotide
agcacacggcaggaugaag

SEQ ID NO: 1814550 - RNA, 19 nt, Artificial Sequence
  Description of Artificial Sequence: Synthetic oligonucleotide
acggggcggucgcagagga

SEQ ID NO: 1814551 - RNA, 19 nt, Artificial Sequence
  Description of Artificial Sequence: Synthetic oligonucleotide
cuccagugcaaauaauuuu

SEQ ID NO: 1814552 - RNA, 19 nt, Artificial Sequence
  Description of Artificial Sequence: Synthetic oligonucleotide
cacugugacagcucugccu

SEQ ID NO: 1814553 - RNA, 19 nt, Artificial Sequence
  Description of Artificial Sequence: Synthetic oligonucleotide
gguuucaaggugcucaguu

SEQ ID NO: 1814554 - RNA, 19 nt, Artificial Sequence
  Description of Artificial Sequence: Synthetic oligonucleotide
acaaauggguacaccuguu

SEQ ID NO: 1814555 - RNA, 19 nt, Artificial Sequence
  Description of Artificial Sequence: Synthetic oligonucleotide
caaugugcagcagguuuca

SEQ ID NO: 1814556 - RNA, 19 nt, Artificial Sequence
  Description of Artificial Sequence: Synthetic oligonucleotide
ugcccauauucagcauaca

SEQ ID NO: 1814557 - RNA, 19 nt, Artificial Sequence
  Description of Artificial Sequence: Synthetic oligonucleotide
agcucugccuguggggaca

SEQ ID NO: 1814558 - RNA, 19 nt, Artificial Sequence
  Description of Artificial Sequence: Synthetic oligonucleotide
agguuaacuuuuacagguu

SEQ ID NO: 1814559 - RNA, 19 nt, Artificial Sequence
  Description of Artificial Sequence: Synthetic oligonucleotide
ggugcucaguuagagacua

SEQ ID NO: 1814560 - RNA, 19 nt, Artificial Sequence
  Description of Artificial Sequence: Synthetic oligonucleotide
ccaacaucacgcuuauaaa

SEQ ID NO: 1814561 - RNA, 19 nt, Artificial Sequence
  Description of Artificial Sequence: Synthetic oligonucleotide
gaggucuauuguucuuggu

SEQ ID NO: 1814562 - RNA, 19 nt, Artificial Sequence
  Description of Artificial Sequence: Synthetic oligonucleotide
cuguaauucuagguuuucu

SEQ ID NO: 1814563 - RNA, 19 nt, Artificial Sequence
  Description of Artificial Sequence: Synthetic oligonucleotide
ccaaccaagugaguuauaa

SEQ ID NO: 1814564 - RNA, 19 nt, Artificial Sequence
  Description of Artificial Sequence: Synthetic oligonucleotide
uagccgugagcaggagucu

SEQ ID NO: 1814565 - RNA, 19 nt, Artificial Sequence
  Description of Artificial Sequence: Synthetic oligonucleotide
ccauggaacucccgccccg

SEQ ID NO: 1814566 - RNA, 19 nt, Artificial Sequence
  Description of Artificial Sequence: Synthetic oligonucleotide
ccaaugcaacaucacuguc

SEQ ID NO: 1814567 - RNA, 19 nt, Artificial Sequence
  Description of Artificial Sequence: Synthetic oligonucleotide
cuucacuuguugcuccagu

SEQ ID NO: 1814568 - RNA, 19 nt, Artificial Sequence
  Description of Artificial Sequence: Synthetic oligonucleotide
uucccaccacgaagaucac

SEQ ID NO: 1814569 - RNA, 19 nt, Artificial Sequence
  Description of Artificial Sequence: Synthetic oligonucleotide
ggcauguuacaaacugcca

SEQ ID NO: 1814570 - RNA, 19 nt, Artificial Sequence
  Description of Artificial Sequence: Synthetic oligonucleotide
gucgggcaccaaauuuagc

SEQ ID NO: 1814571 - RNA, 19 nt, Artificial Sequence
  Description of Artificial Sequence: Synthetic oligonucleotide
gggcuaaacgucgggcacc

SEQ ID NO: 1814572 - RNA, 19 nt, Artificial Sequence
  Description of Artificial Sequence: Synthetic oligonucleotide
ggacgcggaggaaaagcug

SEQ ID NO: 1814573 - RNA, 19 nt, Artificial Sequence
  Description of Artificial Sequence: Synthetic oligonucleotide
gcuguaauucuagguuuuc

SEQ ID NO: 1814574 - RNA, 19 nt, Artificial Sequence
  Description of Artificial Sequence: Synthetic oligonucleotide
agguuucaaggugcucagu

SEQ ID NO: 1814575 - RNA, 19 nt, Artificial Sequence
  Description of Artificial Sequence: Synthetic oligonucleotide
cgucgggcaccaaauuuag

SEQ ID NO: 1814576 - RNA, 19 nt, Artificial Sequence
  Description of Artificial Sequence: Synthetic oligonucleotide
gcaugaggucuauuguucu

SEQ ID NO: 1814577 - RNA, 19 nt, Artificial Sequence
  Description of Artificial Sequence: Synthetic oligonucleotide
gucggacgcggaggaaaag

SEQ ID NO: 1814578 - RNA, 19 nt, Artificial Sequence
  Description of Artificial Sequence: Synthetic oligonucleotide
ggaugaugaugaggcgggc

SEQ ID NO: 1814579 - RNA, 19 nt, Artificial Sequence
  Description of Artificial Sequence: Synthetic oligonucleotide
acggcaggaugaaguucag

SEQ ID NO: 1814580 - RNA, 19 nt, Artificial Sequence
  Description of Artificial Sequence: Synthetic oligonucleotide
cggcccguugcuaggagcc

SEQ ID NO: 1814581 - RNA, 19 nt, Artificial Sequence
  Description of Artificial Sequence: Synthetic oligonucleotide
gcggucgcagaggacgcgg

SEQ ID NO: 1814582 - RNA, 19 nt, Artificial Sequence
  Description of Artificial Sequence: Synthetic oligonucleotide
ggcuaaacgucgggcacca

SEQ ID NO: 1814583 - RNA, 19 nt, Artificial Sequence
  Description of Artificial Sequence: Synthetic oligonucleotide
ccgucuccauggaacuccc

SEQ ID NO: 1814584 - RNA, 19 nt, Artificial Sequence
  Description of Artificial Sequence: Synthetic oligonucleotide
acgcggaggaaaagcugga

SEQ ID NO: 1814585 - RNA, 19 nt, Artificial Sequence
  Description of Artificial Sequence: Synthetic oligonucleotide
cgugagcaggagucuauuc

SEQ ID NO: 1814586 - RNA, 19 nt, Artificial Sequence
  Description of Artificial Sequence: Synthetic oligonucleotide
cacacggcaggaugaaguu

SEQ ID NO: 1814587 - RNA, 19 nt, Artificial Sequence
  Description of Artificial Sequence: Synthetic oligonucleotide
agccgugagcaggagucua

SEQ ID NO: 1814588 - RNA, 19 nt, Artificial Sequence
  Description of Artificial Sequence: Synthetic oligonucleotide
ccgguugcgucggacgcgg

SEQ ID NO: 1814589 - RNA, 19 nt, Artificial Sequence
  Description of Artificial Sequence: Synthetic oligonucleotide
gcuccagugcaaauaauuu

SEQ ID NO: 1814590 - RNA, 19 nt, Artificial Sequence
  Description of Artificial Sequence: Synthetic oligonucleotide
gccgguugcgucggacgcg

SEQ ID NO: 1814591 - RNA, 19 nt, Artificial Sequence
  Description of Artificial Sequence: Synthetic oligonucleotide
cgggcuaaacgucgggcac

SEQ ID NO: 1814592 - RNA, 19 nt, Artificial Sequence
  Description of Artificial Sequence: Synthetic oligonucleotide
guucuuuggugcccauauu

SEQ ID NO: 1814593 - RNA, 19 nt, Artificial Sequence
  Description of Artificial Sequence: Synthetic oligonucleotide
cuguggggacaugagaauu

SEQ ID NO: 1814594 - RNA, 19 nt, Artificial Sequence
  Description of Artificial Sequence: Synthetic oligonucleotide
gcaacaucacugucugcau

SEQ ID NO: 1814595 - RNA, 19 nt, Artificial Sequence
  Description of Artificial Sequence: Synthetic oligonucleotide
uuccaacaucacgcuuaua

SEQ ID NO: 1814596 - RNA, 19 nt, Artificial Sequence
  Description of Artificial Sequence: Synthetic oligonucleotide
ggcggucgcagaggacgcg

SEQ ID NO: 1814597 - RNA, 19 nt, Artificial Sequence
  Description of Artificial Sequence: Synthetic oligonucleotide
ugcgucggacgcggaggaa

SEQ ID NO: 1814598 - RNA, 19 nt, Artificial Sequence
  Description of Artificial Sequence: Synthetic oligonucleotide
ccgugggaagacggggcgg

SEQ ID NO: 1814599 - RNA, 19 nt, Artificial Sequence
  Description of Artificial Sequence: Synthetic oligonucleotide
gccccggcccguugcuagg

SEQ ID NO: 1814600 - RNA, 19 nt, Artificial Sequence
  Description of Artificial Sequence: Synthetic oligonucleotide
cagcaaugucaugucuugu

SEQ ID NO: 1814601 - RNA, 19 nt, Artificial Sequence
  Description of Artificial Sequence: Synthetic oligonucleotide
cugcagacuacgggcuaaa

SEQ ID NO: 1814602 - RNA, 19 nt, Artificial Sequence
  Description of Artificial Sequence: Synthetic oligonucleotide
gggcggucgcagaggacgc

SEQ ID NO: 1814603 - RNA, 19 nt, Artificial Sequence
  Description of Artificial Sequence: Synthetic oligonucleotide
gcgucggacgcggaggaaa

SEQ ID NO: 1814604 - RNA, 19 nt, Artificial Sequence
  Description of Artificial Sequence: Synthetic oligonucleotide
cgucuccauggaacucccg

SEQ ID NO: 1814605 - RNA, 19 nt, Artificial Sequence
  Description of Artificial Sequence: Synthetic oligonucleotide
ccacgaagaucacauccgu

SEQ ID NO: 1814606 - RNA, 19 nt, Artificial Sequence
  Description of Artificial Sequence: Synthetic oligonucleotide
ggcccguugcuaggagccc

SEQ ID NO: 1814607 - RNA, 19 nt, Artificial Sequence
  Description of Artificial Sequence: Synthetic oligonucleotide
cgcggaggaaaagcuggag

SEQ ID NO: 1814608 - RNA, 19 nt, Artificial Sequence
  Description of Artificial Sequence: Synthetic oligonucleotide
gcauccauugggguaguuu

SEQ ID NO: 1814609 - RNA, 19 nt, Artificial Sequence
  Description of Artificial Sequence: Synthetic oligonucleotide
gugcucaguuagagacuaa

SEQ ID NO: 1814610 - RNA, 19 nt, Artificial Sequence
  Description of Artificial Sequence: Synthetic oligonucleotide
ccgauagcacacggcagga

SEQ ID NO: 1814611 - RNA, 19 nt, Artificial Sequence
  Description of Artificial Sequence: Synthetic oligonucleotide
agcuggcaugaggucuauu

SEQ ID NO: 1814612 - RNA, 19 nt, Artificial Sequence
  Description of Artificial Sequence: Synthetic oligonucleotide
ggacgcggcggcagcgcug

SEQ ID NO: 1814613 - RNA, 19 nt, Artificial Sequence
  Description of Artificial Sequence: Synthetic oligonucleotide
cucccgccccggcccguug

SEQ ID NO: 1814614 - RNA, 19 nt, Artificial Sequence
  Description of Artificial Sequence: Synthetic oligonucleotide
cggauuucaaagggcaugu

SEQ ID NO: 1814615 - RNA, 19 nt, Artificial Sequence
  Description of Artificial Sequence: Synthetic oligonucleotide
ggaagacggggcggucgca

SEQ ID NO: 1814616 - RNA, 19 nt, Artificial Sequence
  Description of Artificial Sequence: Synthetic oligonucleotide
cccggcccguugcuaggag

SEQ ID NO: 1814617 - RNA, 19 nt, Artificial Sequence
  Description of Artificial Sequence: Synthetic oligonucleotide
cggacgcggaggaaaagcu

SEQ ID NO: 1814618 - RNA, 19 nt, Artificial Sequence
  Description of Artificial Sequence: Synthetic oligonucleotide
cgucggacgcggaggaaaa

SEQ ID NO: 1814619 - RNA, 19 nt, Artificial Sequence
  Description of Artificial Sequence: Synthetic oligonucleotide
cagguucuuuggugcccau

SEQ ID NO: 1814620 - RNA, 19 nt, Artificial Sequence
  Description of Artificial Sequence: Synthetic oligonucleotide
gggcccugucacugugaua

SEQ ID NO: 1814621 - RNA, 19 nt, Artificial Sequence
  Description of Artificial Sequence: Synthetic oligonucleotide
gccgugagcaggagucuau

SEQ ID NO: 1814622 - RNA, 19 nt, Artificial Sequence
  Description of Artificial Sequence: Synthetic oligonucleotide
cugcauccauugggguagu

SEQ ID NO: 1814623 - RNA, 19 nt, Artificial Sequence
  Description of Artificial Sequence: Synthetic oligonucleotide
gcuaaacgucgggcaccaa

SEQ ID NO: 1814624 - RNA, 19 nt, Artificial Sequence
  Description of Artificial Sequence: Synthetic oligonucleotide
ggcagcgcugcugccgguu

SEQ ID NO: 1814625 - RNA, 19 nt, Artificial Sequence
  Description of Artificial Sequence: Synthetic oligonucleotide
ccccggcccguugcuagga

SEQ ID NO: 1814626 - RNA, 19 nt, Artificial Sequence
  Description of Artificial Sequence: Synthetic oligonucleotide
ccgugagcaggagucuauu

SEQ ID NO: 1814627 - RNA, 19 nt, Artificial Sequence
  Description of Artificial Sequence: Synthetic oligonucleotide
ccuuuacauugggcccugu

SEQ ID NO: 1814628 - RNA, 19 nt, Artificial Sequence
  Description of Artificial Sequence: Synthetic oligonucleotide
cgguugcgucggacgcgga

SEQ ID NO: 1814629 - RNA, 19 nt, Artificial Sequence
  Description of Artificial Sequence: Synthetic oligonucleotide
cccgccccggcccguugcu

SEQ ID NO: 1814630 - RNA, 19 nt, Artificial Sequence
  Description of Artificial Sequence: Synthetic oligonucleotide
ccgccccggcccguugcua

SEQ ID NO: 1814631 - RNA, 19 nt, Artificial Sequence
  Description of Artificial Sequence: Synthetic oligonucleotide
aaauauuggccccagagga

SEQ ID NO: 1814632 - RNA, 19 nt, Artificial Sequence
  Description of Artificial Sequence: Synthetic oligonucleotide
auaaauauuggccccagag

SEQ ID NO: 1814633 - RNA, 19 nt, Artificial Sequence
  Description of Artificial Sequence: Synthetic oligonucleotide
acugguuccgcuuacgggc

SEQ ID NO: 1814634 - RNA, 19 nt, Artificial Sequence
  Description of Artificial Sequence: Synthetic oligonucleotide
ugugacauggcccagccag

SEQ ID NO: 1814635 - RNA, 19 nt, Artificial Sequence
  Description of Artificial Sequence: Synthetic oligonucleotide
uuugauagagcaaccgagg

SEQ ID NO: 1814636 - RNA, 19 nt, Artificial Sequence
  Description of Artificial Sequence: Synthetic oligonucleotide
ucauuugaagaacaguacc

SEQ ID NO: 1814637 - RNA, 19 nt, Artificial Sequence
  Description of Artificial Sequence: Synthetic oligonucleotide
uaccaugucacccagcaag

SEQ ID NO: 1814638 - RNA, 19 nt, Artificial Sequence
  Description of Artificial Sequence: Synthetic oligonucleotide
agucacuccauauugaucu

SEQ ID NO: 1814639 - RNA, 19 nt, Artificial Sequence
  Description of Artificial Sequence: Synthetic oligonucleotide
aagaacaguaccaugucac

SEQ ID NO: 1814640 - RNA, 19 nt, Artificial Sequence
  Description of Artificial Sequence: Synthetic oligonucleotide
aucucacaaggauuuaugc

SEQ ID NO: 1814641 - RNA, 19 nt, Artificial Sequence
  Description of Artificial Sequence: Synthetic oligonucleotide
ucuacaaacagaccacccc

SEQ ID NO: 1814642 - RNA, 19 nt, Artificial Sequence
  Description of Artificial Sequence: Synthetic oligonucleotide
ugccucuacaaacagacca

SEQ ID NO: 1814643 - RNA, 19 nt, Artificial Sequence
  Description of Artificial Sequence: Synthetic oligonucleotide
uccauauugaucucacaag

SEQ ID NO: 1814644 - RNA, 19 nt, Artificial Sequence
  Description of Artificial Sequence: Synthetic oligonucleotide
ugcaaggucgacauggggc

SEQ ID NO: 1814645 - RNA, 19 nt, Artificial Sequence
  Description of Artificial Sequence: Synthetic oligonucleotide
cuacaaacagaccaccccg

SEQ ID NO: 1814646 - RNA, 19 nt, Artificial Sequence
  Description of Artificial Sequence: Synthetic oligonucleotide
caaccgaggacucaaauug

SEQ ID NO: 1814647 - RNA, 19 nt, Artificial Sequence
  Description of Artificial Sequence: Synthetic oligonucleotide
cucuaucgggauuugauag

SEQ ID NO: 1814648 - RNA, 19 nt, Artificial Sequence
  Description of Artificial Sequence: Synthetic oligonucleotide
agcaagucacuccauauug

SEQ ID NO: 1814649 - RNA, 19 nt, Artificial Sequence
  Description of Artificial Sequence: Synthetic oligonucleotide
uccgcuuacgggcugauca

SEQ ID NO: 1814650 - RNA, 19 nt, Artificial Sequence
  Description of Artificial Sequence: Synthetic oligonucleotide
gucgacauggggcagacag

SEQ ID NO: 1814651 - RNA, 19 nt, Artificial Sequence
  Description of Artificial Sequence: Synthetic oligonucleotide
cagguuuacaaugagggcc

SEQ ID NO: 1814652 - RNA, 19 nt, Artificial Sequence
  Description of Artificial Sequence: Synthetic oligonucleotide
aaggauuuaugccccucuc

SEQ ID NO: 1814653 - RNA, 19 nt, Artificial Sequence
  Description of Artificial Sequence: Synthetic oligonucleotide
auuugauagagcaaccgag

SEQ ID NO: 1814654 - RNA, 19 nt, Artificial Sequence
  Description of Artificial Sequence: Synthetic oligonucleotide
auauugaucucacaaggau

SEQ ID NO: 1814655 - RNA, 19 nt, Artificial Sequence
  Description of Artificial Sequence: Synthetic oligonucleotide
uaggcugaagcacugcacc

SEQ ID NO: 1814656 - RNA, 19 nt, Artificial Sequence
  Description of Artificial Sequence: Synthetic oligonucleotide
caaauuguggcucauuuga

SEQ ID NO: 1814657 - RNA, 19 nt, Artificial Sequence
  Description of Artificial Sequence: Synthetic oligonucleotide
uugauagagcaaccgagga

SEQ ID NO: 1814658 - RNA, 19 nt, Artificial Sequence
  Description of Artificial Sequence: Synthetic oligonucleotide
auuuaugccccucucuucu

SEQ ID NO: 1814659 - RNA, 19 nt, Artificial Sequence
  Description of Artificial Sequence: Synthetic oligonucleotide
gauuugauagagcaaccga

SEQ ID NO: 1814660 - RNA, 19 nt, Artificial Sequence
  Description of Artificial Sequence: Synthetic oligonucleotide
caguaucacugcaaggucg

SEQ ID NO: 1814661 - RNA, 19 nt, Artificial Sequence
  Description of Artificial Sequence: Synthetic oligonucleotide
uacaccacacuccagcagu

SEQ ID NO: 1814662 - RNA, 19 nt, Artificial Sequence
  Description of Artificial Sequence: Synthetic oligonucleotide
ucacaaggauuuaugcccc

SEQ ID NO: 1814663 - RNA, 19 nt, Artificial Sequence
  Description of Artificial Sequence: Synthetic oligonucleotide
cucauuugaagaacaguac

SEQ ID NO: 1814664 - RNA, 19 nt, Artificial Sequence
  Description of Artificial Sequence: Synthetic oligonucleotide
agguuuacaaugagggccc

SEQ ID NO: 1814665 - RNA, 19 nt, Artificial Sequence
  Description of Artificial Sequence: Synthetic oligonucleotide
guugccucuacaaacagac

SEQ ID NO: 1814666 - RNA, 19 nt, Artificial Sequence
  Description of Artificial Sequence: Synthetic oligonucleotide
uauugaucucacaaggauu

SEQ ID NO: 1814667 - RNA, 19 nt, Artificial Sequence
  Description of Artificial Sequence: Synthetic oligonucleotide
auaguagacucuugaacca

SEQ ID NO: 1814668 - RNA, 19 nt, Artificial Sequence
  Description of Artificial Sequence: Synthetic oligonucleotide
ugauagagcaaccgaggac

SEQ ID NO: 1814669 - RNA, 19 nt, Artificial Sequence
  Description of Artificial Sequence: Synthetic oligonucleotide
cauuugaagaacaguacca

SEQ ID NO: 1814670 - RNA, 19 nt, Artificial Sequence
  Description of Artificial Sequence: Synthetic oligonucleotide
ccauauugaucucacaagg

SEQ ID NO: 1814671 - RNA, 19 nt, Artificial Sequence
  Description of Artificial Sequence: Synthetic oligonucleotide
ugccucucgggucagcccg

SEQ ID NO: 1814672 - RNA, 19 nt, Artificial Sequence
  Description of Artificial Sequence: Synthetic oligonucleotide
uguaccuucccaguucaag

SEQ ID NO: 1814673 - RNA, 19 nt, Artificial Sequence
  Description of Artificial Sequence: Synthetic oligonucleotide
ucugcguccggcgagagcu

SEQ ID NO: 1814674 - RNA, 19 nt, Artificial Sequence
  Description of Artificial Sequence: Synthetic oligonucleotide
aauauuggccccagaggag

SEQ ID NO: 1814675 - RNA, 19 nt, Artificial Sequence
  Description of Artificial Sequence: Synthetic oligonucleotide
ucuaucgggauuugauaga

SEQ ID NO: 1814676 - RNA, 19 nt, Artificial Sequence
  Description of Artificial Sequence: Synthetic oligonucleotide
guaccaacaaucucaguuc

SEQ ID NO: 1814677 - RNA, 19 nt, Artificial Sequence
  Description of Artificial Sequence: Synthetic oligonucleotide
uggaugaagccuuggacaa

SEQ ID NO: 1814678 - RNA, 19 nt, Artificial Sequence
  Description of Artificial Sequence: Synthetic oligonucleotide
gauagagcaaccgaggacu

SEQ ID NO: 1814679 - RNA, 19 nt, Artificial Sequence
  Description of Artificial Sequence: Synthetic oligonucleotide
uccuguacauccuuugaaa

SEQ ID NO: 1814680 - RNA, 19 nt, Artificial Sequence
  Description of Artificial Sequence: Synthetic oligonucleotide
cuucugacggugaagccug

SEQ ID NO: 1814681 - RNA, 19 nt, Artificial Sequence
  Description of Artificial Sequence: Synthetic oligonucleotide
ucaguaucacugcaagguc

SEQ ID NO: 1814682 - RNA, 19 nt, Artificial Sequence
  Description of Artificial Sequence: Synthetic oligonucleotide
gucgcuggaguacugcgcg

SEQ ID NO: 1814683 - RNA, 19 nt, Artificial Sequence
  Description of Artificial Sequence: Synthetic oligonucleotide
gaucucacaaggauuuaug

SEQ ID NO: 1814684 - RNA, 19 nt, Artificial Sequence
  Description of Artificial Sequence: Synthetic oligonucleotide
aagucacuccauauugauc

SEQ ID NO: 1814685 - RNA, 19 nt, Artificial Sequence
  Description of Artificial Sequence: Synthetic oligonucleotide
cgcagguuuacaaugaggg

SEQ ID NO: 1814686 - RNA, 19 nt, Artificial Sequence
  Description of Artificial Sequence: Synthetic oligonucleotide
auugaucucacaaggauuu

SEQ ID NO: 1814687 - RNA, 19 nt, Artificial Sequence
  Description of Artificial Sequence: Synthetic oligonucleotide
agguccaguccccucugcc

SEQ ID NO: 1814688 - RNA, 19 nt, Artificial Sequence
  Description of Artificial Sequence: Synthetic oligonucleotide
cugaucacgucucgcgucg

SEQ ID NO: 1814689 - RNA, 19 nt, Artificial Sequence
  Description of Artificial Sequence: Synthetic oligonucleotide
gauuuaugccccucucuuc

SEQ ID NO: 1814690 - RNA, 19 nt, Artificial Sequence
  Description of Artificial Sequence: Synthetic oligonucleotide
uggcucauuugaagaacag

SEQ ID NO: 1814691 - RNA, 19 nt, Artificial Sequence
  Description of Artificial Sequence: Synthetic oligonucleotide
agcagcagcagcagcagac

SEQ ID NO: 1814692 - RNA, 19 nt, Artificial Sequence
  Description of Artificial Sequence: Synthetic oligonucleotide
guagaugacugaugcuugc

SEQ ID NO: 1814693 - RNA, 19 nt, Artificial Sequence
  Description of Artificial Sequence: Synthetic oligonucleotide
agacccugaucuucugacg

SEQ ID NO: 1814694 - RNA, 19 nt, Artificial Sequence
  Description of Artificial Sequence: Synthetic oligonucleotide
uagacucuugaaccacuug

SEQ ID NO: 1814695 - RNA, 19 nt, Artificial Sequence
  Description of Artificial Sequence: Synthetic oligonucleotide
ugaaaggcuugaugcacac

SEQ ID NO: 1814696 - RNA, 19 nt, Artificial Sequence
  Description of Artificial Sequence: Synthetic oligonucleotide
ggauuugauagagcaaccg

SEQ ID NO: 1814697 - RNA, 19 nt, Artificial Sequence
  Description of Artificial Sequence: Synthetic oligonucleotide
agaccaccccgcucuaggc

SEQ ID NO: 1814698 - RNA, 19 nt, Artificial Sequence
  Description of Artificial Sequence: Synthetic oligonucleotide
aggauuuaugccccucucu

SEQ ID NO: 1814699 - RNA, 19 nt, Artificial Sequence
  Description of Artificial Sequence: Synthetic oligonucleotide
auuccuguacauccuuuga

SEQ ID NO: 1814700 - RNA, 19 nt, Artificial Sequence
  Description of Artificial Sequence: Synthetic oligonucleotide
guugugacauggcccagcc

SEQ ID NO: 1814701 - RNA, 19 nt, Artificial Sequence
  Description of Artificial Sequence: Synthetic oligonucleotide
uuggguacauccacuccac

SEQ ID NO: 1814702 - RNA, 19 nt, Artificial Sequence
  Description of Artificial Sequence: Synthetic oligonucleotide
uuguggcucauuugaagaa

SEQ ID NO: 1814703 - RNA, 19 nt, Artificial Sequence
  Description of Artificial Sequence: Synthetic oligonucleotide
uguggcucauuugaagaac

SEQ ID NO: 1814704 - RNA, 19 nt, Artificial Sequence
  Description of Artificial Sequence: Synthetic oligonucleotide
agcguagguacaccugcuc

SEQ ID NO: 1814705 - RNA, 19 nt, Artificial Sequence
  Description of Artificial Sequence: Synthetic oligonucleotide
aggucgcuggaguacugcg

SEQ ID NO: 1814706 - RNA, 19 nt, Artificial Sequence
  Description of Artificial Sequence: Synthetic oligonucleotide
ggguacauccacuccacag

SEQ ID NO: 1814707 - RNA, 19 nt, Artificial Sequence
  Description of Artificial Sequence: Synthetic oligonucleotide
cacuccauauugaucucac

SEQ ID NO: 1814708 - RNA, 19 nt, Artificial Sequence
  Description of Artificial Sequence: Synthetic oligonucleotide
gaauuccccauguccuggc

SEQ ID NO: 1814709 - RNA, 19 nt, Artificial Sequence
  Description of Artificial Sequence: Synthetic oligonucleotide
cucgcacccaaauaguaga

SEQ ID NO: 1814710 - RNA, 19 nt, Artificial Sequence
  Description of Artificial Sequence: Synthetic oligonucleotide
uuuaugccccucucuucug

SEQ ID NO: 1814711 - RNA, 19 nt, Artificial Sequence
  Description of Artificial Sequence: Synthetic oligonucleotide
ucacgucucgcgucggcag

SEQ ID NO: 1814712 - RNA, 19 nt, Artificial Sequence
  Description of Artificial Sequence: Synthetic oligonucleotide
ugaucucacaaggauuuau

SEQ ID NO: 1814713 - RNA, 19 nt, Artificial Sequence
  Description of Artificial Sequence: Synthetic oligonucleotide
agcaguguugugacauggc

SEQ ID NO: 1814714 - RNA, 19 nt, Artificial Sequence
  Description of Artificial Sequence: Synthetic oligonucleotide
uccggcgagagcucgcacc

SEQ ID NO: 1814715 - RNA, 19 nt, Artificial Sequence
  Description of Artificial Sequence: Synthetic oligonucleotide
ucgacauggggcagacagc

SEQ ID NO: 1814716 - RNA, 19 nt, Artificial Sequence
  Description of Artificial Sequence: Synthetic oligonucleotide
gaagccugcucacccgcag

SEQ ID NO: 1814717 - RNA, 19 nt, Artificial Sequence
  Description of Artificial Sequence: Synthetic oligonucleotide
uacaaugagggccccgguu

SEQ ID NO: 1814718 - RNA, 19 nt, Artificial Sequence
  Description of Artificial Sequence: Synthetic oligonucleotide
cuggccguacaccacacuc

SEQ ID NO: 1814719 - RNA, 19 nt, Artificial Sequence
  Description of Artificial Sequence: Synthetic oligonucleotide
acaaggauuuaugccccuc

SEQ ID NO: 1814720 - RNA, 19 nt, Artificial Sequence
  Description of Artificial Sequence: Synthetic oligonucleotide
uggaguacugcgcgcucgc

SEQ ID NO: 1814721 - RNA, 19 nt, Artificial Sequence
  Description of Artificial Sequence: Synthetic oligonucleotide
agcccaucccggcucgccc

SEQ ID NO: 1814722 - RNA, 19 nt, Artificial Sequence
  Description of Artificial Sequence: Synthetic oligonucleotide
aagcguggggcacauccaa

SEQ ID NO: 1814723 - RNA, 19 nt, Artificial Sequence
  Description of Artificial Sequence: Synthetic oligonucleotide
caaauaaauauuggcccca

SEQ ID NO: 1814724 - RNA, 19 nt, Artificial Sequence
  Description of Artificial Sequence: Synthetic oligonucleotide
cucaguaucacugcaaggu

SEQ ID NO: 1814725 - RNA, 19 nt, Artificial Sequence
  Description of Artificial Sequence: Synthetic oligonucleotide
gaagacccugaucuucuga

SEQ ID NO: 1814726 - RNA, 19 nt, Artificial Sequence
  Description of Artificial Sequence: Synthetic oligonucleotide
guacaccacacuccagcag

SEQ ID NO: 1814727 - RNA, 19 nt, Artificial Sequence
  Description of Artificial Sequence: Synthetic oligonucleotide
gcaguguugugacauggcc

SEQ ID NO: 1814728 - RNA, 19 nt, Artificial Sequence
  Description of Artificial Sequence: Synthetic oligonucleotide
uaguagacucuugaaccac

SEQ ID NO: 1814729 - RNA, 19 nt, Artificial Sequence
  Description of Artificial Sequence: Synthetic oligonucleotide
agugaaguuccugguaggu

SEQ ID NO: 1814730 - RNA, 19 nt, Artificial Sequence
  Description of Artificial Sequence: Synthetic oligonucleotide
aggucccguaccaacaauc

SEQ ID NO: 1814731 - RNA, 19 nt, Artificial Sequence
  Description of Artificial Sequence: Synthetic oligonucleotide
ggguguugccucuacaaac

SEQ ID NO: 1814732 - RNA, 19 nt, Artificial Sequence
  Description of Artificial Sequence: Synthetic oligonucleotide
ucgcacccaaauaguagac

SEQ ID NO: 1814733 - RNA, 19 nt, Artificial Sequence
  Description of Artificial Sequence: Synthetic oligonucleotide
gaagaggaauuccccaugu

SEQ ID NO: 1814734 - RNA, 19 nt, Artificial Sequence
  Description of Artificial Sequence: Synthetic oligonucleotide
gcacccaaauaguagacuc

SEQ ID NO: 1814735 - RNA, 19 nt, Artificial Sequence
  Description of Artificial Sequence: Synthetic oligonucleotide
uuacaaugagggccccggu

SEQ ID NO: 1814736 - RNA, 19 nt, Artificial Sequence
  Description of Artificial Sequence: Synthetic oligonucleotide
uaugccccucucuucugca

SEQ ID NO: 1814737 - RNA, 19 nt, Artificial Sequence
  Description of Artificial Sequence: Synthetic oligonucleotide
gacggugaagccugcucac

SEQ ID NO: 1814738 - RNA, 19 nt, Artificial Sequence
  Description of Artificial Sequence: Synthetic oligonucleotide
cauguaccuucccaguuca

SEQ ID NO: 1814739 - RNA, 19 nt, Artificial Sequence
  Description of Artificial Sequence: Synthetic oligonucleotide
ccaaauaguagacucuuga

SEQ ID NO: 1814740 - RNA, 19 nt, Artificial Sequence
  Description of Artificial Sequence: Synthetic oligonucleotide
cugaaaggcuugaugcaca

SEQ ID NO: 1814741 - RNA, 19 nt, Artificial Sequence
  Description of Artificial Sequence: Synthetic oligonucleotide
cugcaaggucgacaugggg

SEQ ID NO: 1814742 - RNA, 19 nt, Artificial Sequence
  Description of Artificial Sequence: Synthetic oligonucleotide
cacaccgcaccccgcaugc

SEQ ID NO: 1814743 - RNA, 19 nt, Artificial Sequence
  Description of Artificial Sequence: Synthetic oligonucleotide
gcagcguagguacaccugc

SEQ ID NO: 1814744 - RNA, 19 nt, Artificial Sequence
  Description of Artificial Sequence: Synthetic oligonucleotide
agcauguaccuucccaguu

SEQ ID NO: 1814745 - RNA, 19 nt, Artificial Sequence
  Description of Artificial Sequence: Synthetic oligonucleotide
ugagcagcguagguacacc

SEQ ID NO: 1814746 - RNA, 19 nt, Artificial Sequence
  Description of Artificial Sequence: Synthetic oligonucleotide
uacgggcugaucacgucuc

SEQ ID NO: 1814747 - RNA, 19 nt, Artificial Sequence
  Description of Artificial Sequence: Synthetic oligonucleotide
acggugaagccugcucacc

SEQ ID NO: 1814748 - RNA, 19 nt, Artificial Sequence
  Description of Artificial Sequence: Synthetic oligonucleotide
guggggcacauccaagcug

SEQ ID NO: 1814749 - RNA, 19 nt, Artificial Sequence
  Description of Artificial Sequence: Synthetic oligonucleotide
caaacagaccaccccgcuc

SEQ ID NO: 1814750 - RNA, 19 nt, Artificial Sequence
  Description of Artificial Sequence: Synthetic oligonucleotide
agcaaccgaggacucaaau

SEQ ID NO: 1814751 - RNA, 19 nt, Artificial Sequence
  Description of Artificial Sequence: Synthetic oligonucleotide
cgaggacucaaauuguggc

SEQ ID NO: 1814752 - RNA, 19 nt, Artificial Sequence
  Description of Artificial Sequence: Synthetic oligonucleotide
gguagaugacugaugcuug

SEQ ID NO: 1814753 - RNA, 19 nt, Artificial Sequence
  Description of Artificial Sequence: Synthetic oligonucleotide
ucacuaaagcguggggcac

SEQ ID NO: 1814754 - RNA, 19 nt, Artificial Sequence
  Description of Artificial Sequence: Synthetic oligonucleotide
uccuguugggguguugccu

SEQ ID NO: 1814755 - RNA, 19 nt, Artificial Sequence
  Description of Artificial Sequence: Synthetic oligonucleotide
auagagcaaccgaggacuc

SEQ ID NO: 1814756 - RNA, 19 nt, Artificial Sequence
  Description of Artificial Sequence: Synthetic oligonucleotide
uugggccgcagguuuacaa

SEQ ID NO: 1814757 - RNA, 19 nt, Artificial Sequence
  Description of Artificial Sequence: Synthetic oligonucleotide
aguagacucuugaaccacu

SEQ ID NO: 1814758 - RNA, 19 nt, Artificial Sequence
  Description of Artificial Sequence: Synthetic oligonucleotide
gaucacgucucgcgucggc

SEQ ID NO: 1814759 - RNA, 19 nt, Artificial Sequence
  Description of Artificial Sequence: Synthetic oligonucleotide
cuggaagacccugaucuuc

SEQ ID NO: 1814760 - RNA, 19 nt, Artificial Sequence
  Description of Artificial Sequence: Synthetic oligonucleotide
accgcaccccgcaugcucc

SEQ ID NO: 1814761 - RNA, 19 nt, Artificial Sequence
  Description of Artificial Sequence: Synthetic oligonucleotide
ccgaggacucaaauugugg

SEQ ID NO: 1814762 - RNA, 19 nt, Artificial Sequence
  Description of Artificial Sequence: Synthetic oligonucleotide
cuggaguacugcgcgcucg

SEQ ID NO: 1814763 - RNA, 19 nt, Artificial Sequence
  Description of Artificial Sequence: Synthetic oligonucleotide
uggguacauccacuccaca

SEQ ID NO: 1814764 - RNA, 19 nt, Artificial Sequence
  Description of Artificial Sequence: Synthetic oligonucleotide
cugacggugaagccugcuc

SEQ ID NO: 1814765 - RNA, 19 nt, Artificial Sequence
  Description of Artificial Sequence: Synthetic oligonucleotide
ugggccgcagguuuacaau

SEQ ID NO: 1814766 - RNA, 19 nt, Artificial Sequence
  Description of Artificial Sequence: Synthetic oligonucleotide
gcguagguacaccugcucc

SEQ ID NO: 1814767 - RNA, 19 nt, Artificial Sequence
  Description of Artificial Sequence: Synthetic oligonucleotide
acccaaauaguagacucuu

SEQ ID NO: 1814768 - RNA, 19 nt, Artificial Sequence
  Description of Artificial Sequence: Synthetic oligonucleotide
cuuacgggcugaucacguc

SEQ ID NO: 1814769 - RNA, 19 nt, Artificial Sequence
  Description of Artificial Sequence: Synthetic oligonucleotide
accccgcaugcuccggccc

SEQ ID NO: 1814770 - RNA, 19 nt, Artificial Sequence
  Description of Artificial Sequence: Synthetic oligonucleotide
gguuggguacauccacucc

SEQ ID NO: 1814771 - RNA, 19 nt, Artificial Sequence
  Description of Artificial Sequence: Synthetic oligonucleotide
acgucucgcgucggcagcc

SEQ ID NO: 1814772 - RNA, 19 nt, Artificial Sequence
  Description of Artificial Sequence: Synthetic oligonucleotide
caacaaucucaguucucca

SEQ ID NO: 1814773 - RNA, 19 nt, Artificial Sequence
  Description of Artificial Sequence: Synthetic oligonucleotide
acgggcugaucacgucucg

SEQ ID NO: 1814774 - RNA, 19 nt, Artificial Sequence
  Description of Artificial Sequence: Synthetic oligonucleotide
uugugacauggcccagcca

SEQ ID NO: 1814775 - RNA, 19 nt, Artificial Sequence
  Description of Artificial Sequence: Synthetic oligonucleotide
cugagcagcguagguacac

SEQ ID NO: 1814776 - RNA, 19 nt, Artificial Sequence
  Description of Artificial Sequence: Synthetic oligonucleotide
gguguugccucuacaaaca

SEQ ID NO: 1814777 - RNA, 19 nt, Artificial Sequence
  Description of Artificial Sequence: Synthetic oligonucleotide
guagguacaccugcuccac

SEQ ID NO: 1814778 - RNA, 19 nt, Artificial Sequence
  Description of Artificial Sequence: Synthetic oligonucleotide
uccacuccacagagccugc

SEQ ID NO: 1814779 - RNA, 19 nt, Artificial Sequence
  Description of Artificial Sequence: Synthetic oligonucleotide
ucggcagcccaucccggcu

SEQ ID NO: 1814780 - RNA, 19 nt, Artificial Sequence
  Description of Artificial Sequence: Synthetic oligonucleotide
gguccaguccccucugccc

SEQ ID NO: 1814781 - RNA, 19 nt, Artificial Sequence
  Description of Artificial Sequence: Synthetic oligonucleotide
aggucgacauggggcagac

SEQ ID NO: 1814782 - RNA, 19 nt, Artificial Sequence
  Description of Artificial Sequence: Synthetic oligonucleotide
cucaaauuguggcucauuu

SEQ ID NO: 1814783 - RNA, 19 nt, Artificial Sequence
  Description of Artificial Sequence: Synthetic oligonucleotide
uagagcaaccgaggacuca

SEQ ID NO: 1814784 - RNA, 19 nt, Artificial Sequence
  Description of Artificial Sequence: Synthetic oligonucleotide
ugccccgcgcgccuccggg

SEQ ID NO: 1814785 - RNA, 19 nt, Artificial Sequence
  Description of Artificial Sequence: Synthetic oligonucleotide
gagagcucgcacccaaaua

SEQ ID NO: 1814786 - RNA, 19 nt, Artificial Sequence
  Description of Artificial Sequence: Synthetic oligonucleotide
gccccgguuggguacaucc

SEQ ID NO: 1814787 - RNA, 19 nt, Artificial Sequence
  Description of Artificial Sequence: Synthetic oligonucleotide
uugaaccacuuggccacug

SEQ ID NO: 1814788 - RNA, 19 nt, Artificial Sequence
  Description of Artificial Sequence: Synthetic oligonucleotide
gcgucggcagcccaucccg

SEQ ID NO: 1814789 - RNA, 19 nt, Artificial Sequence
  Description of Artificial Sequence: Synthetic oligonucleotide
ccugaaaggcuugaugcac

SEQ ID NO: 1814790 - RNA, 19 nt, Artificial Sequence
  Description of Artificial Sequence: Synthetic oligonucleotide
uguugggccgcagguuuac

SEQ ID NO: 1814791 - RNA, 19 nt, Artificial Sequence
  Description of Artificial Sequence: Synthetic oligonucleotide
gggauuugauagagcaacc

SEQ ID NO: 1814792 - RNA, 19 nt, Artificial Sequence
  Description of Artificial Sequence: Synthetic oligonucleotide
uucugacggugaagccugc

SEQ ID NO: 1814793 - RNA, 19 nt, Artificial Sequence
  Description of Artificial Sequence: Synthetic oligonucleotide
caagucacuccauauugau

SEQ ID NO: 1814794 - RNA, 19 nt, Artificial Sequence
  Description of Artificial Sequence: Synthetic oligonucleotide
ggcaaggaggaccucagua

SEQ ID NO: 1814795 - RNA, 19 nt, Artificial Sequence
  Description of Artificial Sequence: Synthetic oligonucleotide
gggccgcagguuuacaaug

SEQ ID NO: 1814796 - RNA, 19 nt, Artificial Sequence
  Description of Artificial Sequence: Synthetic oligonucleotide
acugcgcgcucgcgccucc

SEQ ID NO: 1814797 - RNA, 19 nt, Artificial Sequence
  Description of Artificial Sequence: Synthetic oligonucleotide
guacauccuuugaaaguca

SEQ ID NO: 1814798 - RNA, 19 nt, Artificial Sequence
  Description of Artificial Sequence: Synthetic oligonucleotide
acccgcagguagaugacug

SEQ ID NO: 1814799 - RNA, 19 nt, Artificial Sequence
  Description of Artificial Sequence: Synthetic oligonucleotide
gcucgcacccaaauaguag

SEQ ID NO: 1814800 - RNA, 19 nt, Artificial Sequence
  Description of Artificial Sequence: Synthetic oligonucleotide
ugcccacucaucagcucau

SEQ ID NO: 1814801 - RNA, 19 nt, Artificial Sequence
  Description of Artificial Sequence: Synthetic oligonucleotide
uccuggccguacaccacac

SEQ ID NO: 1814802 - RNA, 19 nt, Artificial Sequence
  Description of Artificial Sequence: Synthetic oligonucleotide
cugguaggugagaaggugu

SEQ ID NO: 1814803 - RNA, 19 nt, Artificial Sequence
  Description of Artificial Sequence: Synthetic oligonucleotide
gucccguaccaacaaucuc

SEQ ID NO: 1814804 - RNA, 19 nt, Artificial Sequence
  Description of Artificial Sequence: Synthetic oligonucleotide
aucacgucucgcgucggca

SEQ ID NO: 1814805 - RNA, 19 nt, Artificial Sequence
  Description of Artificial Sequence: Synthetic oligonucleotide
cucgggucagcccgcuccc

SEQ ID NO: 1814806 - RNA, 19 nt, Artificial Sequence
  Description of Artificial Sequence: Synthetic oligonucleotide
cacgucucgcgucggcagc

SEQ ID NO: 1814807 - RNA, 19 nt, Artificial Sequence
  Description of Artificial Sequence: Synthetic oligonucleotide
cccguaccaacaaucucag

SEQ ID NO: 1814808 - RNA, 19 nt, Artificial Sequence
  Description of Artificial Sequence: Synthetic oligonucleotide
aucccggcucgccccuggc

SEQ ID NO: 1814809 - RNA, 19 nt, Artificial Sequence
  Description of Artificial Sequence: Synthetic oligonucleotide
guccuggccguacaccaca

SEQ ID NO: 1814810 - RNA, 19 nt, Artificial Sequence
  Description of Artificial Sequence: Synthetic oligonucleotide
acuaaagcguggggcacau

SEQ ID NO: 1814811 - RNA, 19 nt, Artificial Sequence
  Description of Artificial Sequence: Synthetic oligonucleotide
ucgcuggaguacugcgcgc

SEQ ID NO: 1814812 - RNA, 19 nt, Artificial Sequence
  Description of Artificial Sequence: Synthetic oligonucleotide
ucugacggugaagccugcu

SEQ ID NO: 1814813 - RNA, 19 nt, Artificial Sequence
  Description of Artificial Sequence: Synthetic oligonucleotide
caaggauuuaugccccucu

SEQ ID NO: 1814814 - RNA, 19 nt, Artificial Sequence
  Description of Artificial Sequence: Synthetic oligonucleotide
ucucgcgucggcagcccau

SEQ ID NO: 1814815 - RNA, 19 nt, Artificial Sequence
  Description of Artificial Sequence: Synthetic oligonucleotide
uugaucucacaaggauuua

SEQ ID NO: 1814816 - RNA, 19 nt, Artificial Sequence
  Description of Artificial Sequence: Synthetic oligonucleotide
gcugaucacgucucgcguc

SEQ ID NO: 1814817 - RNA, 19 nt, Artificial Sequence
  Description of Artificial Sequence: Synthetic oligonucleotide
ggacucaaauuguggcuca

SEQ ID NO: 1814818 - RNA, 19 nt, Artificial Sequence
  Description of Artificial Sequence: Synthetic oligonucleotide
caagcugugccuccccaaa

SEQ ID NO: 1814819 - RNA, 19 nt, Artificial Sequence
  Description of Artificial Sequence: Synthetic oligonucleotide
gaccucaguaucacugcaa

SEQ ID NO: 1814820 - RNA, 19 nt, Artificial Sequence
  Description of Artificial Sequence: Synthetic oligonucleotide
gagcagcguagguacaccu

SEQ ID NO: 1814821 - RNA, 19 nt, Artificial Sequence
  Description of Artificial Sequence: Synthetic oligonucleotide
gcucgcgccucccagccag

SEQ ID NO: 1814822 - RNA, 19 nt, Artificial Sequence
  Description of Artificial Sequence: Synthetic oligonucleotide
gccucuacaaacagaccac

SEQ ID NO: 1814823 - RNA, 19 nt, Artificial Sequence
  Description of Artificial Sequence: Synthetic oligonucleotide
cacccaaauaguagacucu

SEQ ID NO: 1814824 - RNA, 19 nt, Artificial Sequence
  Description of Artificial Sequence: Synthetic oligonucleotide
gccgcagguuuacaaugag

SEQ ID NO: 1814825 - RNA, 19 nt, Artificial Sequence
  Description of Artificial Sequence: Synthetic oligonucleotide
gugccucucgggucagccc

SEQ ID NO: 1814826 - RNA, 19 nt, Artificial Sequence
  Description of Artificial Sequence: Synthetic oligonucleotide
caccccgcaugcuccggcc

SEQ ID NO: 1814827 - RNA, 19 nt, Artificial Sequence
  Description of Artificial Sequence: Synthetic oligonucleotide
ccccgcucuaggcugaagc

SEQ ID NO: 1814828 - RNA, 19 nt, Artificial Sequence
  Description of Artificial Sequence: Synthetic oligonucleotide
acucaaauuguggcucauu

SEQ ID NO: 1814829 - RNA, 19 nt, Artificial Sequence
  Description of Artificial Sequence: Synthetic oligonucleotide
caccgcaccccgcaugcuc

SEQ ID NO: 1814830 - RNA, 19 nt, Artificial Sequence
  Description of Artificial Sequence: Synthetic oligonucleotide
acagaccaccccgcucuag

SEQ ID NO: 1814831 - RNA, 19 nt, Artificial Sequence
  Description of Artificial Sequence: Synthetic oligonucleotide
caaggucgacauggggcag

SEQ ID NO: 1814832 - RNA, 19 nt, Artificial Sequence
  Description of Artificial Sequence: Synthetic oligonucleotide
agcucgcacccaaauagua

SEQ ID NO: 1814833 - RNA, 19 nt, Artificial Sequence
  Description of Artificial Sequence: Synthetic oligonucleotide
ugcgcgcucgcgccuccca

SEQ ID NO: 1814834 - RNA, 19 nt, Artificial Sequence
  Description of Artificial Sequence: Synthetic oligonucleotide
ugcucacccgcagguagau

SEQ ID NO: 1814835 - RNA, 19 nt, Artificial Sequence
  Description of Artificial Sequence: Synthetic oligonucleotide
cagguccaguccccucugc

SEQ ID NO: 1814836 - RNA, 19 nt, Artificial Sequence
  Description of Artificial Sequence: Synthetic oligonucleotide
cguaccaacaaucucaguu

SEQ ID NO: 1814837 - RNA, 19 nt, Artificial Sequence
  Description of Artificial Sequence: Synthetic oligonucleotide
augagggccccgguugggu

SEQ ID NO: 1814838 - RNA, 19 nt, Artificial Sequence
  Description of Artificial Sequence: Synthetic oligonucleotide
ccggcgagagcucgcaccc

SEQ ID NO: 1814839 - RNA, 19 nt, Artificial Sequence
  Description of Artificial Sequence: Synthetic oligonucleotide
cacuaaagcguggggcaca

SEQ ID NO: 1814840 - RNA, 19 nt, Artificial Sequence
  Description of Artificial Sequence: Synthetic oligonucleotide
gucugcguccggcgagagc

SEQ ID NO: 1814841 - RNA, 19 nt, Artificial Sequence
  Description of Artificial Sequence: Synthetic oligonucleotide
gccagcagcagcagcagca

SEQ ID NO: 1814842 - RNA, 19 nt, Artificial Sequence
  Description of Artificial Sequence: Synthetic oligonucleotide
gggcacauccaagcugugc

SEQ ID NO: 1814843 - RNA, 19 nt, Artificial Sequence
  Description of Artificial Sequence: Synthetic oligonucleotide
ggaguacugcgcgcucgcg

SEQ ID NO: 1814844 - RNA, 19 nt, Artificial Sequence
  Description of Artificial Sequence: Synthetic oligonucleotide
agccucuaucgggauuuga

SEQ ID NO: 1814845 - RNA, 19 nt, Artificial Sequence
  Description of Artificial Sequence: Synthetic oligonucleotide
caaucucaguucuccaguu

SEQ ID NO: 1814846 - RNA, 19 nt, Artificial Sequence
  Description of Artificial Sequence: Synthetic oligonucleotide
cguagguacaccugcucca

SEQ ID NO: 1814847 - RNA, 19 nt, Artificial Sequence
  Description of Artificial Sequence: Synthetic oligonucleotide
uguugggguguugccucua

SEQ ID NO: 1814848 - RNA, 19 nt, Artificial Sequence
  Description of Artificial Sequence: Synthetic oligonucleotide
cagcauguaccuucccagu

SEQ ID NO: 1814849 - RNA, 19 nt, Artificial Sequence
  Description of Artificial Sequence: Synthetic oligonucleotide
gagcucgcacccaaauagu

SEQ ID NO: 1814850 - RNA, 19 nt, Artificial Sequence
  Description of Artificial Sequence: Synthetic oligonucleotide
ggcucauuugaagaacagu

SEQ ID NO: 1814851 - RNA, 19 nt, Artificial Sequence
  Description of Artificial Sequence: Synthetic oligonucleotide
cagguagaugacugaugcu

SEQ ID NO: 1814852 - RNA, 19 nt, Artificial Sequence
  Description of Artificial Sequence: Synthetic oligonucleotide
gcaaccgaggacucaaauu

SEQ ID NO: 1814853 - RNA, 19 nt, Artificial Sequence
  Description of Artificial Sequence: Synthetic oligonucleotide
cgcagguagaugacugaug

SEQ ID NO: 1814854 - RNA, 19 nt, Artificial Sequence
  Description of Artificial Sequence: Synthetic oligonucleotide
cauguccagugaagaggaa

SEQ ID NO: 1814855 - RNA, 19 nt, Artificial Sequence
  Description of Artificial Sequence: Synthetic oligonucleotide
gcucuaggcugaagcacug

SEQ ID NO: 1814856 - RNA, 19 nt, Artificial Sequence
  Description of Artificial Sequence: Synthetic oligonucleotide
ccgcuuacgggcugaucac

SEQ ID NO: 1814857 - RNA, 19 nt, Artificial Sequence
  Description of Artificial Sequence: Synthetic oligonucleotide
ccagcagcagcagcagcag

SEQ ID NO: 1814858 - RNA, 19 nt, Artificial Sequence
  Description of Artificial Sequence: Synthetic oligonucleotide
cucgcgucggcagcccauc

SEQ ID NO: 1814859 - RNA, 19 nt, Artificial Sequence
  Description of Artificial Sequence: Synthetic oligonucleotide
cucgcgccucccagccagc

SEQ ID NO: 1814860 - RNA, 19 nt, Artificial Sequence
  Description of Artificial Sequence: Synthetic oligonucleotide
ucgcgccucccagccagca

SEQ ID NO: 1814861 - RNA, 19 nt, Artificial Sequence
  Description of Artificial Sequence: Synthetic oligonucleotide
uuccgcuuacgggcugauc

SEQ ID NO: 1814862 - RNA, 19 nt, Artificial Sequence
  Description of Artificial Sequence: Synthetic oligonucleotide
cuuggacaacaaagucacu

SEQ ID NO: 1814863 - RNA, 19 nt, Artificial Sequence
  Description of Artificial Sequence: Synthetic oligonucleotide
cguacaccacacuccagca

SEQ ID NO: 1814864 - RNA, 19 nt, Artificial Sequence
  Description of Artificial Sequence: Synthetic oligonucleotide
cacaaggauuuaugccccu

SEQ ID NO: 1814865 - RNA, 19 nt, Artificial Sequence
  Description of Artificial Sequence: Synthetic oligonucleotide
gcccaucccggcucgcccc

SEQ ID NO: 1814866 - RNA, 19 nt, Artificial Sequence
  Description of Artificial Sequence: Synthetic oligonucleotide
ccgcucuaggcugaagcac

SEQ ID NO: 1814867 - RNA, 19 nt, Artificial Sequence
  Description of Artificial Sequence: Synthetic oligonucleotide
ggcugaucacgucucgcgu

SEQ ID NO: 1814868 - RNA, 19 nt, Artificial Sequence
  Description of Artificial Sequence: Synthetic oligonucleotide
ggcccggggaccgaggcca

SEQ ID NO: 1814869 - RNA, 19 nt, Artificial Sequence
  Description of Artificial Sequence: Synthetic oligonucleotide
cucaccaccgaggucccgu

SEQ ID NO: 1814870 - RNA, 19 nt, Artificial Sequence
  Description of Artificial Sequence: Synthetic oligonucleotide
cagcagcagcagcagcaga

SEQ ID NO: 1814871 - RNA, 19 nt, Artificial Sequence
  Description of Artificial Sequence: Synthetic oligonucleotide
gacucaaauuguggcucau

SEQ ID NO: 1814872 - RNA, 19 nt, Artificial Sequence
  Description of Artificial Sequence: Synthetic oligonucleotide
cuaaagcguggggcacauc

SEQ ID NO: 1814873 - RNA, 19 nt, Artificial Sequence
  Description of Artificial Sequence: Synthetic oligonucleotide
gagcaaccgaggacucaaa

SEQ ID NO: 1814874 - RNA, 19 nt, Artificial Sequence
  Description of Artificial Sequence: Synthetic oligonucleotide
ccccgcaugcuccggcccg

SEQ ID NO: 1814875 - RNA, 19 nt, Artificial Sequence
  Description of Artificial Sequence: Synthetic oligonucleotide
gcuggaguacugcgcgcuc

SEQ ID NO: 1814876 - RNA, 19 nt, Artificial Sequence
  Description of Artificial Sequence: Synthetic oligonucleotide
cacaggucgcuggaguacu

SEQ ID NO: 1814877 - RNA, 19 nt, Artificial Sequence
  Description of Artificial Sequence: Synthetic oligonucleotide
ggucagcccgcuccccuuc

SEQ ID NO: 1814878 - RNA, 19 nt, Artificial Sequence
  Description of Artificial Sequence: Synthetic oligonucleotide
gucucgcgucggcagccca

SEQ ID NO: 1814879 - RNA, 19 nt, Artificial Sequence
  Description of Artificial Sequence: Synthetic oligonucleotide
cagcguagguacaccugcu

SEQ ID NO: 1814880 - RNA, 19 nt, Artificial Sequence
  Description of Artificial Sequence: Synthetic oligonucleotide
cugcguccggcgagagcuc

SEQ ID NO: 1814881 - RNA, 19 nt, Artificial Sequence
  Description of Artificial Sequence: Synthetic oligonucleotide
guccggcgagagcucgcac

SEQ ID NO: 1814882 - RNA, 19 nt, Artificial Sequence
  Description of Artificial Sequence: Synthetic oligonucleotide
cgcuuacgggcugaucacg

SEQ ID NO: 1814883 - RNA, 19 nt, Artificial Sequence
  Description of Artificial Sequence: Synthetic oligonucleotide
guugggccgcagguuuaca

SEQ ID NO: 1814884 - RNA, 19 nt, Artificial Sequence
  Description of Artificial Sequence: Synthetic oligonucleotide
ccggucugcguccggcgag

SEQ ID NO: 1814885 - RNA, 19 nt, Artificial Sequence
  Description of Artificial Sequence: Synthetic oligonucleotide
gccucuaucgggauuugau

SEQ ID NO: 1814886 - RNA, 19 nt, Artificial Sequence
  Description of Artificial Sequence: Synthetic oligonucleotide
agggccccgguuggguaca

SEQ ID NO: 1814887 - RNA, 19 nt, Artificial Sequence
  Description of Artificial Sequence: Synthetic oligonucleotide
auguaccuucccaguucaa

SEQ ID NO: 1814888 - RNA, 19 nt, Artificial Sequence
  Description of Artificial Sequence: Synthetic oligonucleotide
cagccucuaucgggauuug

SEQ ID NO: 1814889 - RNA, 19 nt, Artificial Sequence
  Description of Artificial Sequence: Synthetic oligonucleotide
cucucgggucagcccgcuc

SEQ ID NO: 1814890 - RNA, 19 nt, Artificial Sequence
  Description of Artificial Sequence: Synthetic oligonucleotide
gcagccucuaucgggauuu

SEQ ID NO: 1814891 - RNA, 19 nt, Artificial Sequence
  Description of Artificial Sequence: Synthetic oligonucleotide
gcuuacgggcugaucacgu

SEQ ID NO: 1814892 - RNA, 19 nt, Artificial Sequence
  Description of Artificial Sequence: Synthetic oligonucleotide
cccgcagguagaugacuga

SEQ ID NO: 1814893 - RNA, 19 nt, Artificial Sequence
  Description of Artificial Sequence: Synthetic oligonucleotide
acaccgcaccccgcaugcu

SEQ ID NO: 1814894 - RNA, 19 nt, Artificial Sequence
  Description of Artificial Sequence: Synthetic oligonucleotide
ggucugcguccggcgagag

SEQ ID NO: 1814895 - RNA, 19 nt, Artificial Sequence
  Description of Artificial Sequence: Synthetic oligonucleotide
cucgccccuggccgcccac

SEQ ID NO: 1814896 - RNA, 19 nt, Artificial Sequence
  Description of Artificial Sequence: Synthetic oligonucleotide
gggcccggggaccgaggcc

SEQ ID NO: 1814897 - RNA, 19 nt, Artificial Sequence
  Description of Artificial Sequence: Synthetic oligonucleotide
uccccauguccuggccgua

SEQ ID NO: 1814898 - RNA, 19 nt, Artificial Sequence
  Description of Artificial Sequence: Synthetic oligonucleotide
ccgcaccccgcaugcuccg

SEQ ID NO: 1814899 - RNA, 19 nt, Artificial Sequence
  Description of Artificial Sequence: Synthetic oligonucleotide
ccuggccgcccaccacagg

SEQ ID NO: 1814900 - RNA, 19 nt, Artificial Sequence
  Description of Artificial Sequence: Synthetic oligonucleotide
ccggggaccgaggccacug

SEQ ID NO: 1814901 - RNA, 19 nt, Artificial Sequence
  Description of Artificial Sequence: Synthetic oligonucleotide
gauguccuguugggguguu

SEQ ID NO: 1814902 - RNA, 19 nt, Artificial Sequence
  Description of Artificial Sequence: Synthetic oligonucleotide
gcucacccgcagguagaug

SEQ ID NO: 1814903 - RNA, 19 nt, Artificial Sequence
  Description of Artificial Sequence: Synthetic oligonucleotide
ccccgguuggguacaucca

SEQ ID NO: 1814904 - RNA, 19 nt, Artificial Sequence
  Description of Artificial Sequence: Synthetic oligonucleotide
cugcgcgcucgcgccuccc

SEQ ID NO: 1814905 - RNA, 19 nt, Artificial Sequence
  Description of Artificial Sequence: Synthetic oligonucleotide
ccgguuggguacauccacu

SEQ ID NO: 1814906 - RNA, 19 nt, Artificial Sequence
  Description of Artificial Sequence: Synthetic oligonucleotide
cacccgcagguagaugacu

SEQ ID NO: 1814907 - RNA, 19 nt, Artificial Sequence
  Description of Artificial Sequence: Synthetic oligonucleotide
gccccgcgcgccuccgggc

SEQ ID NO: 1814908 - RNA, 19 nt, Artificial Sequence
  Description of Artificial Sequence: Synthetic oligonucleotide
cggggaccgaggccacugc

SEQ ID NO: 1814909 - RNA, 19 nt, Artificial Sequence
  Description of Artificial Sequence: Synthetic oligonucleotide
cccggucugcguccggcga

SEQ ID NO: 1814910 - RNA, 19 nt, Artificial Sequence
  Description of Artificial Sequence: Synthetic oligonucleotide
gcguccggcgagagcucgc

SEQ ID NO: 1814911 - RNA, 19 nt, Artificial Sequence
  Description of Artificial Sequence: Synthetic oligonucleotide
cgcgccucccagccagcag

SEQ ID NO: 1814912 - RNA, 19 nt, Artificial Sequence
  Description of Artificial Sequence: Synthetic oligonucleotide
cgggccgcccacaccgcac

SEQ ID NO: 1814913 - RNA, 19 nt, Artificial Sequence
  Description of Artificial Sequence: Synthetic oligonucleotide
cguggggcacauccaagcu

SEQ ID NO: 1814914 - RNA, 19 nt, Artificial Sequence
  Description of Artificial Sequence: Synthetic oligonucleotide
gcgagagcucgcacccaaa

SEQ ID NO: 1814915 - RNA, 19 nt, Artificial Sequence
  Description of Artificial Sequence: Synthetic oligonucleotide
gcagcggggcgggccgggc

SEQ ID NO: 1814916 - RNA, 19 nt, Artificial Sequence
  Description of Artificial Sequence: Synthetic oligonucleotide
cgucucgcgucggcagccc

SEQ ID NO: 1814917 - RNA, 19 nt, Artificial Sequence
  Description of Artificial Sequence: Synthetic oligonucleotide
cgcacccaaauaguagacu

SEQ ID NO: 1814918 - RNA, 19 nt, Artificial Sequence
  Description of Artificial Sequence: Synthetic oligonucleotide
ccgcagguagaugacugau

SEQ ID NO: 1814919 - RNA, 19 nt, Artificial Sequence
  Description of Artificial Sequence: Synthetic oligonucleotide
gcuccggcccggucugcgu

SEQ ID NO: 1814920 - RNA, 19 nt, Artificial Sequence
  Description of Artificial Sequence: Synthetic oligonucleotide
caccccgcucuaggcugaa

SEQ ID NO: 1814921 - RNA, 19 nt, Artificial Sequence
  Description of Artificial Sequence: Synthetic oligonucleotide
ccuggccguacaccacacu

SEQ ID NO: 1814922 - RNA, 19 nt, Artificial Sequence
  Description of Artificial Sequence: Synthetic oligonucleotide
cguccggcgagagcucgca

SEQ ID NO: 1814923 - RNA, 19 nt, Artificial Sequence
  Description of Artificial Sequence: Synthetic oligonucleotide
ggccccgguuggguacauc

SEQ ID NO: 1814924 - RNA, 19 nt, Artificial Sequence
  Description of Artificial Sequence: Synthetic oligonucleotide
ccguaccaacaaucucagu

SEQ ID NO: 1814925 - RNA, 19 nt, Artificial Sequence
  Description of Artificial Sequence: Synthetic oligonucleotide
cgcuggaguacugcgcgcu

SEQ ID NO: 1814926 - RNA, 19 nt, Artificial Sequence
  Description of Artificial Sequence: Synthetic oligonucleotide
cggucugcguccggcgaga

SEQ ID NO: 1814927 - RNA, 19 nt, Artificial Sequence
  Description of Artificial Sequence: Synthetic oligonucleotide
cggcucgccccuggccgcc

SEQ ID NO: 1814928 - RNA, 19 nt, Artificial Sequence
  Description of Artificial Sequence: Synthetic oligonucleotide
ccaguccccucugcccacu

SEQ ID NO: 1814929 - RNA, 19 nt, Artificial Sequence
  Description of Artificial Sequence: Synthetic oligonucleotide
cggcgagagcucgcaccca

SEQ ID NO: 1814930 - RNA, 19 nt, Artificial Sequence
  Description of Artificial Sequence: Synthetic oligonucleotide
gggccccgguuggguacau

SEQ ID NO: 1814931 - RNA, 19 nt, Artificial Sequence
  Description of Artificial Sequence: Synthetic oligonucleotide
uguaaauacaauuagaugg

SEQ ID NO: 1814932 - RNA, 19 nt, Artificial Sequence
  Description of Artificial Sequence: Synthetic oligonucleotide
aagagauccaaacugaccc

SEQ ID NO: 1814933 - RNA, 19 nt, Artificial Sequence
  Description of Artificial Sequence: Synthetic oligonucleotide
auauaguaaauccaaaacc

SEQ ID NO: 1814934 - RNA, 19 nt, Artificial Sequence
  Description of Artificial Sequence: Synthetic oligonucleotide
  modified_base (5)..(5): a, c, u, g, unknown or other
uuaanauacguuuucauag

SEQ ID NO: 1814935 - RNA, 19 nt, Artificial Sequence
  Description of Artificial Sequence: Synthetic oligonucleotide
aaagcaacuaagucaaacc

SEQ ID NO: 1814936 - RNA, 19 nt, Artificial Sequence
  Description of Artificial Sequence: Synthetic oligonucleotide
ucuaucaugaauuauuugc

SEQ ID NO: 1814937 - RNA, 19 nt, Artificial Sequence
  Description of Artificial Sequence: Synthetic oligonucleotide
aacuuuauuaaacuucauc

SEQ ID NO: 1814938 - RNA, 19 nt, Artificial Sequence
  Description of Artificial Sequence: Synthetic oligonucleotide
uuuaccagcauucugaguc

SEQ ID NO: 1814939 - RNA, 19 nt, Artificial Sequence
  Description of Artificial Sequence: Synthetic oligonucleotide
uuuuguaucgaauaucucu

SEQ ID NO: 1814940 - RNA, 19 nt, Artificial Sequence
  Description of Artificial Sequence: Synthetic oligonucleotide
uaaaauucgagccacucug

SEQ ID NO: 1814941 - RNA, 19 nt, Artificial Sequence
  Description of Artificial Sequence: Synthetic oligonucleotide
uccuuauucuauauaaagg

SEQ ID NO: 1814942 - RNA, 19 nt, Artificial Sequence
  Description of Artificial Sequence: Synthetic oligonucleotide
cucuauuaaaauucgagcc

SEQ ID NO: 1814943 - RNA, 19 nt, Artificial Sequence
  Description of Artificial Sequence: Synthetic oligonucleotide
uauagagcauuauaaaccc

SEQ ID NO: 1814944 - RNA, 19 nt, Artificial Sequence
  Description of Artificial Sequence: Synthetic oligonucleotide
aaaagcaacuaagucaaac

SEQ ID NO: 1814945 - RNA, 19 nt, Artificial Sequence
  Description of Artificial Sequence: Synthetic oligonucleotide
aauuauuugcucuccaagu

SEQ ID NO: 1814946 - RNA, 19 nt, Artificial Sequence
  Description of Artificial Sequence: Synthetic oligonucleotide
aaaccuuaguuguuuaauc

SEQ ID NO: 1814947 - RNA, 19 nt, Artificial Sequence
  Description of Artificial Sequence: Synthetic oligonucleotide
uuauucuauauaaaggccu

SEQ ID NO: 1814948 - RNA, 19 nt, Artificial Sequence
  Description of Artificial Sequence: Synthetic oligonucleotide
aauacaauuagauggugaa

SEQ ID NO: 1814949 - RNA, 19 nt, Artificial Sequence
  Description of Artificial Sequence: Synthetic oligonucleotide
  modified_base (7)..(7): a, c, u, g, unknown or other
aauuaanauacguuuucau

SEQ ID NO: 1814950 - RNA, 19 nt, Artificial Sequence
  Description of Artificial Sequence: Synthetic oligonucleotide
ucuauuaaaauucgagcca

SEQ ID NO: 1814951 - RNA, 19 nt, Artificial Sequence
  Description of Artificial Sequence: Synthetic oligonucleotide
uuuguaucgaauaucucug

SEQ ID NO: 1814952 - RNA, 19 nt, Artificial Sequence
  Description of Artificial Sequence: Synthetic oligonucleotide
uguugauuucuguuaaugg

SEQ ID NO: 1814953 - RNA, 19 nt, Artificial Sequence
  Description of Artificial Sequence: Synthetic oligonucleotide
uaucgaauaucucugcucc

SEQ ID NO: 1814954 - RNA, 19 nt, Artificial Sequence
  Description of Artificial Sequence: Synthetic oligonucleotide
uuaugguugggccaaaggc

SEQ ID NO: 1814955 - RNA, 19 nt, Artificial Sequence
  Description of Artificial Sequence: Synthetic oligonucleotide
ucucuauuaaaauucgagc

SEQ ID NO: 1814956 - RNA, 19 nt, Artificial Sequence
  Description of Artificial Sequence: Synthetic oligonucleotide
uguauuacuccuuaagaga

SEQ ID NO: 1814957 - RNA, 19 nt, Artificial Sequence
  Description of Artificial Sequence: Synthetic oligonucleotide
aacaccaaauaccaaauau

SEQ ID NO: 1814958 - RNA, 19 nt, Artificial Sequence
  Description of Artificial Sequence: Synthetic oligonucleotide
auuacuccuuaagagaucc

SEQ ID NO: 1814959 - RNA, 19 nt, Artificial Sequence
  Description of Artificial Sequence: Synthetic oligonucleotide
gaaaaugcuacuuggccag

SEQ ID NO: 1814960 - RNA, 19 nt, Artificial Sequence
  Description of Artificial Sequence: Synthetic oligonucleotide
uaugauuugguagacuuag

SEQ ID NO: 1814961 - RNA, 19 nt, Artificial Sequence
  Description of Artificial Sequence: Synthetic oligonucleotide
  modified_base (4)..(4): a, c, u, g, unknown or other
uaanauacguuuucauagc

SEQ ID NO: 1814962 - RNA, 19 nt, Artificial Sequence
  Description of Artificial Sequence: Synthetic oligonucleotide
uaagucaaaccuuaguugu

SEQ ID NO: 1814963 - RNA, 19 nt, Artificial Sequence
  Description of Artificial Sequence: Synthetic oligonucleotide
uugauuucuguuaauggca

SEQ ID NO: 1814964 - RNA, 19 nt, Artificial Sequence
  Description of Artificial Sequence: Synthetic oligonucleotide
uuuguaggaauuuggaaac

SEQ ID NO: 1814965 - RNA, 19 nt, Artificial Sequence
  Description of Artificial Sequence: Synthetic oligonucleotide
guuauagagcauuauaaac

SEQ ID NO: 1814966 - RNA, 19 nt, Artificial Sequence
  Description of Artificial Sequence: Synthetic oligonucleotide
  modified_base (3)..(3): a, c, u, g, unknown or other
aanauacguuuucauagca

SEQ ID NO: 1814967 - RNA, 19 nt, Artificial Sequence
  Description of Artificial Sequence: Synthetic oligonucleotide
ccaaauaccaaauauuucc

SEQ ID NO: 1814968 - RNA, 19 nt, Artificial Sequence
  Description of Artificial Sequence: Synthetic oligonucleotide
uauauaaaggccuguauua

SEQ ID NO: 1814969 - RNA, 19 nt, Artificial Sequence
  Description of Artificial Sequence: Synthetic oligonucleotide
aagcaacuaagucaaaccu

SEQ ID NO: 1814970 - RNA, 19 nt, Artificial Sequence
  Description of Artificial Sequence: Synthetic oligonucleotide
auaccaaauauuuccauca

SEQ ID NO: 1814971 - RNA, 19 nt, Artificial Sequence
  Description of Artificial Sequence: Synthetic oligonucleotide
ucauguaaauacaauuaga

SEQ ID NO: 1814972 - RNA, 19 nt, Artificial Sequence
  Description of Artificial Sequence: Synthetic oligonucleotide
  modified_base (14)..(14): a, c, u, g, unknown or other
ucuucggaauuaanauacg

SEQ ID NO: 1814973 - RNA, 19 nt, Artificial Sequence
  Description of Artificial Sequence: Synthetic oligonucleotide
uguucuaucaugaauuauu

SEQ ID NO: 1814974 - RNA, 19 nt, Artificial Sequence
  Description of Artificial Sequence: Synthetic oligonucleotide
aaccuuaguuguuuaaucu

SEQ ID NO: 1814975 - RNA, 19 nt, Artificial Sequence
  Description of Artificial Sequence: Synthetic oligonucleotide
cuguauuacuccuuaagag

SEQ ID NO: 1814976 - RNA, 19 nt, Artificial Sequence
  Description of Artificial Sequence: Synthetic oligonucleotide
agaaguaugcuuucaaaga

SEQ ID NO: 1814977 - RNA, 19 nt, Artificial Sequence
  Description of Artificial Sequence: Synthetic oligonucleotide
aacuggauguucuaucaug

SEQ ID NO: 1814978 - RNA, 19 nt, Artificial Sequence
  Description of Artificial Sequence: Synthetic oligonucleotide
  modified_base (18)..(18): a, c, u, g, unknown or other
ucugucuucggaauuaana

SEQ ID NO: 1814979 - RNA, 19 nt, Artificial Sequence
  Description of Artificial Sequence: Synthetic oligonucleotide
ugaaaucucaccaccuuca

SEQ ID NO: 1814980 - RNA, 19 nt, Artificial Sequence
  Description of Artificial Sequence: Synthetic oligonucleotide
cuaagucaaaccuuaguug

SEQ ID NO: 1814981 - RNA, 19 nt, Artificial Sequence
  Description of Artificial Sequence: Synthetic oligonucleotide
  modified_base (6)..(6): a, c, u, g, unknown or other
auuaanauacguuuucaua

SEQ ID NO: 1814982 - RNA, 19 nt, Artificial Sequence
  Description of Artificial Sequence: Synthetic oligonucleotide
uguuuaaucucuuguuuca

SEQ ID NO: 1814983 - RNA, 19 nt, Artificial Sequence
  Description of Artificial Sequence: Synthetic oligonucleotide
uuaaaauucgagccacucu

SEQ ID NO: 1814984 - RNA, 19 nt, Artificial Sequence
  Description of Artificial Sequence: Synthetic oligonucleotide
agagacuucccuauuaaac

SEQ ID NO: 1814985 - RNA, 19 nt, Artificial Sequence
  Description of Artificial Sequence: Synthetic oligonucleotide
  modified_base (11)..(11): a, c, u, g, unknown or other
ucggaauuaanauacguuu

SEQ ID NO: 1814986 - RNA, 19 nt, Artificial Sequence
  Description of Artificial Sequence: Synthetic oligonucleotide
auccaaaagcaacuaaguc

SEQ ID NO: 1814987 - RNA, 19 nt, Artificial Sequence
  Description of Artificial Sequence: Synthetic oligonucleotide
acuaagucaaaccuuaguu

SEQ ID NO: 1814988 - RNA, 19 nt, Artificial Sequence
  Description of Artificial Sequence: Synthetic oligonucleotide
agguuacuguacuaaacac

SEQ ID NO: 1814989 - RNA, 19 nt, Artificial Sequence
  Description of Artificial Sequence: Synthetic oligonucleotide
ucccuauuaaacuuuauua

SEQ ID NO: 1814990 - RNA, 19 nt, Artificial Sequence
  Description of Artificial Sequence: Synthetic oligonucleotide
uccucuaugauuugguaga

SEQ ID NO: 1814991 - RNA, 19 nt, Artificial Sequence
  Description of Artificial Sequence: Synthetic oligonucleotide
aaauucgagccacucuguc

SEQ ID NO: 1814992 - RNA, 19 nt, Artificial Sequence
  Description of Artificial Sequence: Synthetic oligonucleotide
aauucuugagaauuuuguu

SEQ ID NO: 1814993 - RNA, 19 nt, Artificial Sequence
  Description of Artificial Sequence: Synthetic oligonucleotide
ucauuugccaaauguaagu

SEQ ID NO: 1814994 - RNA, 19 nt, Artificial Sequence
  Description of Artificial Sequence: Synthetic oligonucleotide
gauguuauggugcauaccu

SEQ ID NO: 1814995 - RNA, 19 nt, Artificial Sequence
  Description of Artificial Sequence: Synthetic oligonucleotide
aguaugcuuucaaagaaac

SEQ ID NO: 1814996 - RNA, 19 nt, Artificial Sequence
  Description of Artificial Sequence: Synthetic oligonucleotide
accucaacaaaauucagau

SEQ ID NO: 1814997 - RNA, 19 nt, Artificial Sequence
  Description of Artificial Sequence: Synthetic oligonucleotide
aacuaagucaaaccuuagu

SEQ ID NO: 1814998 - RNA, 19 nt, Artificial Sequence
  Description of Artificial Sequence: Synthetic oligonucleotide
auuaaaauucgagccacuc

SEQ ID NO: 1814999 - RNA, 19 nt, Artificial Sequence
  Description of Artificial Sequence: Synthetic oligonucleotide
uguuauggugcauaccucu

SEQ ID NO: 1815000 - RNA, 19 nt, Artificial Sequence
  Description of Artificial Sequence: Synthetic oligonucleotide
agauggugaaaucucacca

SEQ ID NO: 1815001 - RNA, 19 nt, Artificial Sequence
  Description of Artificial Sequence: Synthetic oligonucleotide
uucugccuuaguuuguagg

SEQ ID NO: 1815002 - RNA, 19 nt, Artificial Sequence
  Description of Artificial Sequence: Synthetic oligonucleotide
  modified_base (2)..(2): a, c, u, g, unknown or other
anauacguuuucauagcag

SEQ ID NO: 1815003 - RNA, 19 nt, Artificial Sequence
  Description of Artificial Sequence: Synthetic oligonucleotide
uccaaguaauucauuugcc

SEQ ID NO: 1815004 - RNA, 19 nt, Artificial Sequence
  Description of Artificial Sequence: Synthetic oligonucleotide
ucaccugccauauaguaaa

SEQ ID NO: 1815005 - RNA, 19 nt, Artificial Sequence
  Description of Artificial Sequence: Synthetic oligonucleotide
aauucgagccacucuguca

SEQ ID NO: 1815006 - RNA, 19 nt, Artificial Sequence
  Description of Artificial Sequence: Synthetic oligonucleotide
uguccaucuacacugccga

SEQ ID NO: 1815007 - RNA, 19 nt, Artificial Sequence
  Description of Artificial Sequence: Synthetic oligonucleotide
gauucaaaauccuggucac

SEQ ID NO: 1815008 - RNA, 19 nt, Artificial Sequence
  Description of Artificial Sequence: Synthetic oligonucleotide
gcugcuacugacuucacgg

SEQ ID NO: 1815009 - RNA, 19 nt, Artificial Sequence
  Description of Artificial Sequence: Synthetic oligonucleotide
gaccccuucauuuuaccag

SEQ ID NO: 1815010 - RNA, 19 nt, Artificial Sequence
  Description of Artificial Sequence: Synthetic oligonucleotide
aagauucugucuuacugaa

SEQ ID NO: 1815011 - RNA, 19 nt, Artificial Sequence
  Description of Artificial Sequence: Synthetic oligonucleotide
gaagcgaaggaacuguuuc

SEQ ID NO: 1815012 - RNA, 19 nt, Artificial Sequence
  Description of Artificial Sequence: Synthetic oligonucleotide
gucuuacugaaccacacug

SEQ ID NO: 1815013 - RNA, 19 nt, Artificial Sequence
  Description of Artificial Sequence: Synthetic oligonucleotide
auaaaggccuguauuacuc

SEQ ID NO: 1815014 - RNA, 19 nt, Artificial Sequence
  Description of Artificial Sequence: Synthetic oligonucleotide
ugagguuacuguacuaaac

SEQ ID NO: 1815015 - RNA, 19 nt, Artificial Sequence
  Description of Artificial Sequence: Synthetic oligonucleotide
  modified_base (12)..(12): a, c, u, g, unknown or other
uucggaauuaanauacguu

SEQ ID NO: 1815016 - RNA, 19 nt, Artificial Sequence
  Description of Artificial Sequence: Synthetic oligonucleotide
uagauggugaaaucucacc

SEQ ID NO: 1815017 - RNA, 19 nt, Artificial Sequence
  Description of Artificial Sequence: Synthetic oligonucleotide
ucuccaaguaauucauuug

SEQ ID NO: 1815018 - RNA, 19 nt, Artificial Sequence
  Description of Artificial Sequence: Synthetic oligonucleotide
uccuuaagagauccaaacu

SEQ ID NO: 1815019 - RNA, 19 nt, Artificial Sequence
  Description of Artificial Sequence: Synthetic oligonucleotide
uguaucgaauaucucugcu

SEQ ID NO: 1815020 - RNA, 19 nt, Artificial Sequence
  Description of Artificial Sequence: Synthetic oligonucleotide
uuagauggugaaaucucac

SEQ ID NO: 1815021 - RNA, 19 nt, Artificial Sequence
  Description of Artificial Sequence: Synthetic oligonucleotide
acuuuuguaucgaauaucu

SEQ ID NO: 1815022 - RNA, 19 nt, Artificial Sequence
  Description of Artificial Sequence: Synthetic oligonucleotide
  modified_base (16)..(16): a, c, u, g, unknown or other
ugucuucggaauuaanaua

SEQ ID NO: 1815023 - RNA, 19 nt, Artificial Sequence
  Description of Artificial Sequence: Synthetic oligonucleotide
uuucuugguuaucggaccc

SEQ ID NO: 1815024 - RNA, 19 nt, Artificial Sequence
  Description of Artificial Sequence: Synthetic oligonucleotide
cuccuuaagagauccaaac

SEQ ID NO: 1815025 - RNA, 19 nt, Artificial Sequence
  Description of Artificial Sequence: Synthetic oligonucleotide
uuuauucccugcauccucu

SEQ ID NO: 1815026 - RNA, 19 nt, Artificial Sequence
  Description of Artificial Sequence: Synthetic oligonucleotide
uagagcauuauaaacccuu

SEQ ID NO: 1815027 - RNA, 19 nt, Artificial Sequence
  Description of Artificial Sequence: Synthetic oligonucleotide
uuuggaaacacuguugguu

SEQ ID NO: 1815028 - RNA, 19 nt, Artificial Sequence
  Description of Artificial Sequence: Synthetic oligonucleotide
aaaggccuguauuacuccu

SEQ ID NO: 1815029 - RNA, 19 nt, Artificial Sequence
  Description of Artificial Sequence: Synthetic oligonucleotide
ugcuuucaaagaaacugga

SEQ ID NO: 1815030 - RNA, 19 nt, Artificial Sequence
  Description of Artificial Sequence: Synthetic oligonucleotide
aaugcuacuuggccagaug

SEQ ID NO: 1815031 - RNA, 19 nt, Artificial Sequence
  Description of Artificial Sequence: Synthetic oligonucleotide
aucauuggauucuguuuac

SEQ ID NO: 1815032 - RNA, 19 nt, Artificial Sequence
  Description of Artificial Sequence: Synthetic oligonucleotide
ugauuucuguuaauggcaa

SEQ ID NO: 1815033 - RNA, 19 nt, Artificial Sequence
  Description of Artificial Sequence: Synthetic oligonucleotide
ugaauuauuugcucuccaa

SEQ ID NO: 1815034 - RNA, 19 nt, Artificial Sequence
  Description of Artificial Sequence: Synthetic oligonucleotide
augcccaauucacagaugu

SEQ ID NO: 1815035 - RNA, 19 nt, Artificial Sequence
  Description of Artificial Sequence: Synthetic oligonucleotide
  modified_base (8)..(8): a, c, u, g, unknown or other
gaauuaanauacguuuuca

SEQ ID NO: 1815036 - RNA, 19 nt, Artificial Sequence
  Description of Artificial Sequence: Synthetic oligonucleotide
cuuaugguugggccaaagg

SEQ ID NO: 1815037 - RNA, 19 nt, Artificial Sequence
  Description of Artificial Sequence: Synthetic oligonucleotide
uggauguucuaucaugaau

SEQ ID NO: 1815038 - RNA, 19 nt, Artificial Sequence
  Description of Artificial Sequence: Synthetic oligonucleotide
auuauuugcucuccaagua

SEQ ID NO: 1815039 - RNA, 19 nt, Artificial Sequence
  Description of Artificial Sequence: Synthetic oligonucleotide
  modified_base (15)..(15): a, c, u, g, unknown or other
gucuucggaauuaanauac

SEQ ID NO: 1815040 - RNA, 19 nt, Artificial Sequence
  Description of Artificial Sequence: Synthetic oligonucleotide
ugagcuuaugguugggcca

SEQ ID NO: 1815041 - RNA, 19 nt, Artificial Sequence
  Description of Artificial Sequence: Synthetic oligonucleotide
uggcaaguuacuuuuguau

SEQ ID NO: 1815042 - RNA, 19 nt, Artificial Sequence
  Description of Artificial Sequence: Synthetic oligonucleotide
uucccuauuaaacuuuauu

SEQ ID NO: 1815043 - RNA, 19 nt, Artificial Sequence
  Description of Artificial Sequence: Synthetic oligonucleotide
aguuguuuaaucucuuguu

SEQ ID NO: 1815044 - RNA, 19 nt, Artificial Sequence
  Description of Artificial Sequence: Synthetic oligonucleotide
ugggccaaaggccucgaag

SEQ ID NO: 1815045 - RNA, 19 nt, Artificial Sequence
  Description of Artificial Sequence: Synthetic oligonucleotide
cuuaguuuguaggaauuug

SEQ ID NO: 1815046 - RNA, 19 nt, Artificial Sequence
  Description of Artificial Sequence: Synthetic oligonucleotide
ggacuaagccuguaggugg

SEQ ID NO: 1815047 - RNA, 19 nt, Artificial Sequence
  Description of Artificial Sequence: Synthetic oligonucleotide
ccuuaagagauccaaacug

SEQ ID NO: 1815048 - RNA, 19 nt, Artificial Sequence
  Description of Artificial Sequence: Synthetic oligonucleotide
ggaggauugggguugacug

SEQ ID NO: 1815049 - RNA, 19 nt, Artificial Sequence
  Description of Artificial Sequence: Synthetic oligonucleotide
aauucacagcucucuauua

SEQ ID NO: 1815050 - RNA, 19 nt, Artificial Sequence
  Description of Artificial Sequence: Synthetic oligonucleotide
uauuaaaauucgagccacu

SEQ ID NO: 1815051 - RNA, 19 nt, Artificial Sequence
  Description of Artificial Sequence: Synthetic oligonucleotide
gaaggaacuguuucuuuga

SEQ ID NO: 1815052 - RNA, 19 nt, Artificial Sequence
  Description of Artificial Sequence: Synthetic oligonucleotide
  modified_base (9)..(9): a, c, u, g, unknown or other
ggaauuaanauacguuuuc

SEQ ID NO: 1815053 - RNA, 19 nt, Artificial Sequence
  Description of Artificial Sequence: Synthetic oligonucleotide
uucaccugccauauaguaa

SEQ ID NO: 1815054 - RNA, 19 nt, Artificial Sequence
  Description of Artificial Sequence: Synthetic oligonucleotide
uuguaucgaauaucucugc

SEQ ID NO: 1815055 - RNA, 19 nt, Artificial Sequence
  Description of Artificial Sequence: Synthetic oligonucleotide
uguugguuaagcaccucaa

SEQ ID NO: 1815056 - RNA, 19 nt, Artificial Sequence
  Description of Artificial Sequence: Synthetic oligonucleotide
uugguuaucggaccccuuc

SEQ ID NO: 1815057 - RNA, 19 nt, Artificial Sequence
  Description of Artificial Sequence: Synthetic oligonucleotide
gagacuucccuauuaaacu

SEQ ID NO: 1815058 - RNA, 19 nt, Artificial Sequence
  Description of Artificial Sequence: Synthetic oligonucleotide
uuguuucaagugcuggcca

SEQ ID NO: 1815059 - RNA, 19 nt, Artificial Sequence
  Description of Artificial Sequence: Synthetic oligonucleotide
uguaggugggaggauuggg

SEQ ID NO: 1815060 - RNA, 19 nt, Artificial Sequence
  Description of Artificial Sequence: Synthetic oligonucleotide
aguaaauccaaaaccacuu

SEQ ID NO: 1815061 - RNA, 19 nt, Artificial Sequence
  Description of Artificial Sequence: Synthetic oligonucleotide
agauguuauggugcauacc

SEQ ID NO: 1815062 - RNA, 19 nt, Artificial Sequence
  Description of Artificial Sequence: Synthetic oligonucleotide
aacggggcagaguccacag

SEQ ID NO: 1815063 - RNA, 19 nt, Artificial Sequence
  Description of Artificial Sequence: Synthetic oligonucleotide
agagaaguaugcuuucaaa

SEQ ID NO: 1815064 - RNA, 19 nt, Artificial Sequence
  Description of Artificial Sequence: Synthetic oligonucleotide
aagagacuucccuauuaaa

SEQ ID NO: 1815065 - RNA, 19 nt, Artificial Sequence
  Description of Artificial Sequence: Synthetic oligonucleotide
agguuauagagcauuauaa

SEQ ID NO: 1815066 - RNA, 19 nt, Artificial Sequence
  Description of Artificial Sequence: Synthetic oligonucleotide
cauucauccuucaccugcc

SEQ ID NO: 1815067 - RNA, 19 nt, Artificial Sequence
  Description of Artificial Sequence: Synthetic oligonucleotide
aacuguuucuuugaaucau

SEQ ID NO: 1815068 - RNA, 19 nt, Artificial Sequence
  Description of Artificial Sequence: Synthetic oligonucleotide
agcaccucaacaaaauuca

SEQ ID NO: 1815069 - RNA, 19 nt, Artificial Sequence
  Description of Artificial Sequence: Synthetic oligonucleotide
aaacaccaaauaccaaaua

SEQ ID NO: 1815070 - RNA, 19 nt, Artificial Sequence
  Description of Artificial Sequence: Synthetic oligonucleotide
uuauggugcauaccucuaa

SEQ ID NO: 1815071 - RNA, 19 nt, Artificial Sequence
  Description of Artificial Sequence: Synthetic oligonucleotide
ugcagaugcccaauucaca

SEQ ID NO: 1815072 - RNA, 19 nt, Artificial Sequence
  Description of Artificial Sequence: Synthetic oligonucleotide
aguauccaaaagcaacuaa

SEQ ID NO: 1815073 - RNA, 19 nt, Artificial Sequence
  Description of Artificial Sequence: Synthetic oligonucleotide
guaucgaauaucucugcuc

SEQ ID NO: 1815074 - RNA, 19 nt, Artificial Sequence
  Description of Artificial Sequence: Synthetic oligonucleotide
accacgcuccaccagucac

SEQ ID NO: 1815075 - RNA, 19 nt, Artificial Sequence
  Description of Artificial Sequence: Synthetic oligonucleotide
cacagaucggucuggcugc

SEQ ID NO: 1815076 - RNA, 19 nt, Artificial Sequence
  Description of Artificial Sequence: Synthetic oligonucleotide
uucacagcucucuauuaaa

SEQ ID NO: 1815077 - RNA, 19 nt, Artificial Sequence
  Description of Artificial Sequence: Synthetic oligonucleotide
ugcuacugacuucacggcu

SEQ ID NO: 1815078 - RNA, 19 nt, Artificial Sequence
  Description of Artificial Sequence: Synthetic oligonucleotide
ucuacacugccgacagugc

SEQ ID NO: 1815079 - RNA, 19 nt, Artificial Sequence
  Description of Artificial Sequence: Synthetic oligonucleotide
acugccgacagugccuucc

SEQ ID NO: 1815080 - RNA, 19 nt, Artificial Sequence
  Description of Artificial Sequence: Synthetic oligonucleotide
gaggauugggguugacugc

SEQ ID NO: 1815081 - RNA, 19 nt, Artificial Sequence
  Description of Artificial Sequence: Synthetic oligonucleotide
guaggugggaggauugggg

SEQ ID NO: 1815082 - RNA, 19 nt, Artificial Sequence
  Description of Artificial Sequence: Synthetic oligonucleotide
aaggaacuguuucuuugaa

SEQ ID NO: 1815083 - RNA, 19 nt, Artificial Sequence
  Description of Artificial Sequence: Synthetic oligonucleotide
aaacugacccauggacaac

SEQ ID NO: 1815084 - RNA, 19 nt, Artificial Sequence
  Description of Artificial Sequence: Synthetic oligonucleotide
cuuuguguucugucuucgg

SEQ ID NO: 1815085 - RNA, 19 nt, Artificial Sequence
  Description of Artificial Sequence: Synthetic oligonucleotide
uucaagauucugucuuacu

SEQ ID NO: 1815086 - RNA, 19 nt, Artificial Sequence
  Description of Artificial Sequence: Synthetic oligonucleotide
uugagguuacuguacuaaa

SEQ ID NO: 1815087 - RNA, 19 nt, Artificial Sequence
  Description of Artificial Sequence: Synthetic oligonucleotide
gcauucauccuucaccugc

SEQ ID NO: 1815088 - RNA, 19 nt, Artificial Sequence
  Description of Artificial Sequence: Synthetic oligonucleotide
agagcauuauaaacccuuc

SEQ ID NO: 1815089 - RNA, 19 nt, Artificial Sequence
  Description of Artificial Sequence: Synthetic oligonucleotide
acagauguacuuccacacu

SEQ ID NO: 1815090 - RNA, 19 nt, Artificial Sequence
  Description of Artificial Sequence: Synthetic oligonucleotide
ugguuaucggaccccuuca

SEQ ID NO: 1815091 - RNA, 19 nt, Artificial Sequence
  Description of Artificial Sequence: Synthetic oligonucleotide
cagcaagucaguauccauc

SEQ ID NO: 1815092 - RNA, 19 nt, Artificial Sequence
  Description of Artificial Sequence: Synthetic oligonucleotide
uacuccuuaagagauccaa

SEQ ID NO: 1815093 - RNA, 19 nt, Artificial Sequence
  Description of Artificial Sequence: Synthetic oligonucleotide
cuaucaugaauuauuugcu

SEQ ID NO: 1815094 - RNA, 19 nt, Artificial Sequence
  Description of Artificial Sequence: Synthetic oligonucleotide
uacguuuucauagcagcaa

SEQ ID NO: 1815095 - RNA, 19 nt, Artificial Sequence
  Description of Artificial Sequence: Synthetic oligonucleotide
aaaauucgagccacucugu

SEQ ID NO: 1815096 - RNA, 19 nt, Artificial Sequence
  Description of Artificial Sequence: Synthetic oligonucleotide
uguguccaucuacacugcc

SEQ ID NO: 1815097 - RNA, 19 nt, Artificial Sequence
  Description of Artificial Sequence: Synthetic oligonucleotide
gguuauagagcauuauaaa

SEQ ID NO: 1815098 - RNA, 19 nt, Artificial Sequence
  Description of Artificial Sequence: Synthetic oligonucleotide
aaguuacuuuuguaucgaa

SEQ ID NO: 1815099 - RNA, 19 nt, Artificial Sequence
  Description of Artificial Sequence: Synthetic oligonucleotide
agagauccaaacugaccca

SEQ ID NO: 1815100 - RNA, 19 nt, Artificial Sequence
  Description of Artificial Sequence: Synthetic oligonucleotide
gacuaagccuguagguggg

SEQ ID NO: 1815101 - RNA, 19 nt, Artificial Sequence
  Description of Artificial Sequence: Synthetic oligonucleotide
uuucaagugcuggccagcc

SEQ ID NO: 1815102 - RNA, 19 nt, Artificial Sequence
  Description of Artificial Sequence: Synthetic oligonucleotide
uccaccagucacagaucgg

SEQ ID NO: 1815103 - RNA, 19 nt, Artificial Sequence
  Description of Artificial Sequence: Synthetic oligonucleotide
uuaccagcauucugagucu

SEQ ID NO: 1815104 - RNA, 19 nt, Artificial Sequence
  Description of Artificial Sequence: Synthetic oligonucleotide
cuuuuguaucgaauaucuc

SEQ ID NO: 1815105 - RNA, 19 nt, Artificial Sequence
  Description of Artificial Sequence: Synthetic oligonucleotide
uugaaucauuggauucugu

SEQ ID NO: 1815106 - RNA, 19 nt, Artificial Sequence
  Description of Artificial Sequence: Synthetic oligonucleotide
agucacagaucggucuggc

SEQ ID NO: 1815107 - RNA, 19 nt, Artificial Sequence
  Description of Artificial Sequence: Synthetic oligonucleotide
ggcaaguuacuuuuguauc

SEQ ID NO: 1815108 - RNA, 19 nt, Artificial Sequence
  Description of Artificial Sequence: Synthetic oligonucleotide
acuucaugugaugaagcga

SEQ ID NO: 1815109 - RNA, 19 nt, Artificial Sequence
  Description of Artificial Sequence: Synthetic oligonucleotide
guguccaucuacacugccg

SEQ ID NO: 1815110 - RNA, 19 nt, Artificial Sequence
  Description of Artificial Sequence: Synthetic oligonucleotide
aaggccucgaagagacuuc

SEQ ID NO: 1815111 - RNA, 19 nt, Artificial Sequence
  Description of Artificial Sequence: Synthetic oligonucleotide
gccuguauuacuccuuaag

SEQ ID NO: 1815112 - RNA, 19 nt, Artificial Sequence
  Description of Artificial Sequence: Synthetic oligonucleotide
caccucaacaaaauucaga

SEQ ID NO: 1815113 - RNA, 19 nt, Artificial Sequence
  Description of Artificial Sequence: Synthetic oligonucleotide
acaccaaauaccaaauauu

SEQ ID NO: 1815114 - RNA, 19 nt, Artificial Sequence
  Description of Artificial Sequence: Synthetic oligonucleotide
acuguacuaaacaccaaau

SEQ ID NO: 1815115 - RNA, 19 nt, Artificial Sequence
  Description of Artificial Sequence: Synthetic oligonucleotide
gaguucaagauucugucuu

SEQ ID NO: 1815116 - RNA, 19 nt, Artificial Sequence
  Description of Artificial Sequence: Synthetic oligonucleotide
caucaugauagaaaaugcu

SEQ ID NO: 1815117 - RNA, 19 nt, Artificial Sequence
  Description of Artificial Sequence: Synthetic oligonucleotide
ucgaauaucucugcuccau

SEQ ID NO: 1815118 - RNA, 19 nt, Artificial Sequence
  Description of Artificial Sequence: Synthetic oligonucleotide
ugacuucacggcuuugaua

SEQ ID NO: 1815119 - RNA, 19 nt, Artificial Sequence
  Description of Artificial Sequence: Synthetic oligonucleotide
auacguuuucauagcagca

SEQ ID NO: 1815120 - RNA, 19 nt, Artificial Sequence
  Description of Artificial Sequence: Synthetic oligonucleotide
uggucacuguaccacgcuc

SEQ ID NO: 1815121 - RNA, 19 nt, Artificial Sequence
  Description of Artificial Sequence: Synthetic oligonucleotide
  modified_base (13)..(13): a, c, u, g, unknown or other
cuucggaauuaanauacgu

SEQ ID NO: 1815122 - RNA, 19 nt, Artificial Sequence
  Description of Artificial Sequence: Synthetic oligonucleotide
cuugagguuacuguacuaa

SEQ ID NO: 1815123 - RNA, 19 nt, Artificial Sequence
  Description of Artificial Sequence: Synthetic oligonucleotide
aguuucauguguccaucua

SEQ ID NO: 1815124 - RNA, 19 nt, Artificial Sequence
  Description of Artificial Sequence: Synthetic oligonucleotide
accugccauauaguaaauc

SEQ ID NO: 1815125 - RNA, 19 nt, Artificial Sequence
  Description of Artificial Sequence: Synthetic oligonucleotide
agauucugucuuacugaac

SEQ ID NO: 1815126 - RNA, 19 nt, Artificial Sequence
  Description of Artificial Sequence: Synthetic oligonucleotide
auguuauggugcauaccuc

SEQ ID NO: 1815127 - RNA, 19 nt, Artificial Sequence
  Description of Artificial Sequence: Synthetic oligonucleotide
cuuacugaaccacacugcu

SEQ ID NO: 1815128 - RNA, 19 nt, Artificial Sequence
  Description of Artificial Sequence: Synthetic oligonucleotide
aaaacggggcagaguccac

SEQ ID NO: 1815129 - RNA, 19 nt, Artificial Sequence
  Description of Artificial Sequence: Synthetic oligonucleotide
augugaugaagcgaaggaa

SEQ ID NO: 1815130 - RNA, 19 nt, Artificial Sequence
  Description of Artificial Sequence: Synthetic oligonucleotide
acuguaccacgcuccacca

SEQ ID NO: 1815131 - RNA, 19 nt, Artificial Sequence
  Description of Artificial Sequence: Synthetic oligonucleotide
uuacuccuuaagagaucca

SEQ ID NO: 1815132 - RNA, 19 nt, Artificial Sequence
  Description of Artificial Sequence: Synthetic oligonucleotide
aaaugcuacuuggccagau

SEQ ID NO: 1815133 - RNA, 19 nt, Artificial Sequence
  Description of Artificial Sequence: Synthetic oligonucleotide
guauuacuccuuaagagau

SEQ ID NO: 1815134 - RNA, 19 nt, Artificial Sequence
  Description of Artificial Sequence: Synthetic oligonucleotide
aucgaauaucucugcucca

SEQ ID NO: 1815135 - RNA, 19 nt, Artificial Sequence
  Description of Artificial Sequence: Synthetic oligonucleotide
aaacggggcagaguccaca

SEQ ID NO: 1815136 - RNA, 19 nt, Artificial Sequence
  Description of Artificial Sequence: Synthetic oligonucleotide
  modified_base (17)..(17): a, c, u, g, unknown or other
cugucuucggaauuaanau

SEQ ID NO: 1815137 - RNA, 19 nt, Artificial Sequence
  Description of Artificial Sequence: Synthetic oligonucleotide
caauuagauggugaaaucu

SEQ ID NO: 1815138 - RNA, 19 nt, Artificial Sequence
  Description of Artificial Sequence: Synthetic oligonucleotide
  modified_base (19)..(19): a, c, u, g, unknown or other
uucugucuucggaauuaan

SEQ ID NO: 1815139 - RNA, 19 nt, Artificial Sequence
  Description of Artificial Sequence: Synthetic oligonucleotide
agucaaaccuuaguuguuu

SEQ ID NO: 1815140 - RNA, 19 nt, Artificial Sequence
  Description of Artificial Sequence: Synthetic oligonucleotide
cuguacuaaacaccaaaua

SEQ ID NO: 1815141 - RNA, 19 nt, Artificial Sequence
  Description of Artificial Sequence: Synthetic oligonucleotide
cagguuauagagcauuaua

SEQ ID NO: 1815142 - RNA, 19 nt, Artificial Sequence
  Description of Artificial Sequence: Synthetic oligonucleotide
agucaguauccaucauaga

SEQ ID NO: 1815143 - RNA, 19 nt, Artificial Sequence
  Description of Artificial Sequence: Synthetic oligonucleotide
cugucauguaaauacaauu

SEQ ID NO: 1815144 - RNA, 19 nt, Artificial Sequence
  Description of Artificial Sequence: Synthetic oligonucleotide
ucggaccccuucauuuuac

SEQ ID NO: 1815145 - RNA, 19 nt, Artificial Sequence
  Description of Artificial Sequence: Synthetic oligonucleotide
aaaaugcuacuuggccaga

SEQ ID NO: 1815146 - RNA, 19 nt, Artificial Sequence
  Description of Artificial Sequence: Synthetic oligonucleotide
ccaaguaauucauuugcca

SEQ ID NO: 1815147 - RNA, 19 nt, Artificial Sequence
  Description of Artificial Sequence: Synthetic oligonucleotide
gcccaauucacagauguac

SEQ ID NO: 1815148 - RNA, 19 nt, Artificial Sequence
  Description of Artificial Sequence: Synthetic oligonucleotide
uauucccugcauccucuau

SEQ ID NO: 1815149 - RNA, 19 nt, Artificial Sequence
  Description of Artificial Sequence: Synthetic oligonucleotide
gguugacugcccuguacag

SEQ ID NO: 1815150 - RNA, 19 nt, Artificial Sequence
  Description of Artificial Sequence: Synthetic oligonucleotide
ccuguauuacuccuuaaga

SEQ ID NO: 1815151 - RNA, 19 nt, Artificial Sequence
  Description of Artificial Sequence: Synthetic oligonucleotide
cuuugaaucauuggauucu

SEQ ID NO: 1815152 - RNA, 19 nt, Artificial Sequence
  Description of Artificial Sequence: Synthetic oligonucleotide
ucggucuggcugcagguua

SEQ ID NO: 1815153 - RNA, 19 nt, Artificial Sequence
  Description of Artificial Sequence: Synthetic oligonucleotide
agcaacuaagucaaaccuu

SEQ ID NO: 1815154 - RNA, 19 nt, Artificial Sequence
  Description of Artificial Sequence: Synthetic oligonucleotide
acuucacggcuuugauaag

SEQ ID NO: 1815155 - RNA, 19 nt, Artificial Sequence
  Description of Artificial Sequence: Synthetic oligonucleotide
ucgagccacucugucaugu

SEQ ID NO: 1815156 - RNA, 19 nt, Artificial Sequence
  Description of Artificial Sequence: Synthetic oligonucleotide
agguagaggcaggauggag

SEQ ID NO: 1815157 - RNA, 19 nt, Artificial Sequence
  Description of Artificial Sequence: Synthetic oligonucleotide
guacaguuucaugugucca

SEQ ID NO: 1815158 - RNA, 19 nt, Artificial Sequence
  Description of Artificial Sequence: Synthetic oligonucleotide
auagagcauuauaaacccu

SEQ ID NO: 1815159 - RNA, 19 nt, Artificial Sequence
  Description of Artificial Sequence: Synthetic oligonucleotide
aagucaaaccuuaguuguu

SEQ ID NO: 1815160 - RNA, 19 nt, Artificial Sequence
  Description of Artificial Sequence: Synthetic oligonucleotide
ucgaagagacuucccuauu

SEQ ID NO: 1815161 - RNA, 19 nt, Artificial Sequence
  Description of Artificial Sequence: Synthetic oligonucleotide
cuaugauuugguagacuua

SEQ ID NO: 1815162 - RNA, 19 nt, Artificial Sequence
  Description of Artificial Sequence: Synthetic oligonucleotide
ggaauuuggaaacacuguu

SEQ ID NO: 1815163 - RNA, 19 nt, Artificial Sequence
  Description of Artificial Sequence: Synthetic oligonucleotide
ggucacuguaccacgcucc

SEQ ID NO: 1815164 - RNA, 19 nt, Artificial Sequence
  Description of Artificial Sequence: Synthetic oligonucleotide
gcaacuaagucaaaccuua

SEQ ID NO: 1815165 - RNA, 19 nt, Artificial Sequence
  Description of Artificial Sequence: Synthetic oligonucleotide
acuaaacaccaaauaccaa

SEQ ID NO: 1815166 - RNA, 19 nt, Artificial Sequence
  Description of Artificial Sequence: Synthetic oligonucleotide
ggauguucuaucaugaauu

SEQ ID NO: 1815167 - RNA, 19 nt, Artificial Sequence
  Description of Artificial Sequence: Synthetic oligonucleotide
cucuccaaguaauucauuu

SEQ ID NO: 1815168 - RNA, 19 nt, Artificial Sequence
  Description of Artificial Sequence: Synthetic oligonucleotide
cccggacuaagccuguagg

SEQ ID NO: 1815169 - RNA, 19 nt, Artificial Sequence
  Description of Artificial Sequence: Synthetic oligonucleotide
acuguugguuaagcaccuc

SEQ ID NO: 1815170 - RNA, 19 nt, Artificial Sequence
  Description of Artificial Sequence: Synthetic oligonucleotide
ggguugacugcccuguaca

SEQ ID NO: 1815171 - RNA, 19 nt, Artificial Sequence
  Description of Artificial Sequence: Synthetic oligonucleotide
cacgcuccaccagucacag

SEQ ID NO: 1815172 - RNA, 19 nt, Artificial Sequence
  Description of Artificial Sequence: Synthetic oligonucleotide
ggugcccggacuaagccug

SEQ ID NO: 1815173 - RNA, 19 nt, Artificial Sequence
  Description of Artificial Sequence: Synthetic oligonucleotide
gagcuuaugguugggccaa

SEQ ID NO: 1815174 - RNA, 19 nt, Artificial Sequence
  Description of Artificial Sequence: Synthetic oligonucleotide
guaggaauuuggaaacacu

SEQ ID NO: 1815175 - RNA, 19 nt, Artificial Sequence
  Description of Artificial Sequence: Synthetic oligonucleotide
uuauucccugcauccucua

SEQ ID NO: 1815176 - RNA, 19 nt, Artificial Sequence
  Description of Artificial Sequence: Synthetic oligonucleotide
guucuaucaugaauuauuu

SEQ ID NO: 1815177 - RNA, 19 nt, Artificial Sequence
  Description of Artificial Sequence: Synthetic oligonucleotide
cccuguacaguuucaugug

SEQ ID NO: 1815178 - RNA, 19 nt, Artificial Sequence
  Description of Artificial Sequence: Synthetic oligonucleotide
cauccucuaugauuuggua

SEQ ID NO: 1815179 - RNA, 19 nt, Artificial Sequence
  Description of Artificial Sequence: Synthetic oligonucleotide
guagaggcaggauggaguu

SEQ ID NO: 1815180 - RNA, 19 nt, Artificial Sequence
  Description of Artificial Sequence: Synthetic oligonucleotide
aaggccuguauuacuccuu

SEQ ID NO: 1815181 - RNA, 19 nt, Artificial Sequence
  Description of Artificial Sequence: Synthetic oligonucleotide
gaucggucuggcugcaggu

SEQ ID NO: 1815182 - RNA, 19 nt, Artificial Sequence
  Description of Artificial Sequence: Synthetic oligonucleotide
gcccuguacaguuucaugu

SEQ ID NO: 1815183 - RNA, 19 nt, Artificial Sequence
  Description of Artificial Sequence: Synthetic oligonucleotide
augauuugguagacuuagu

SEQ ID NO: 1815184 - RNA, 19 nt, Artificial Sequence
  Description of Artificial Sequence: Synthetic oligonucleotide
cuggauguucuaucaugaa

SEQ ID NO: 1815185 - RNA, 19 nt, Artificial Sequence
  Description of Artificial Sequence: Synthetic oligonucleotide
ggaccccuucauuuuacca

SEQ ID NO: 1815186 - RNA, 19 nt, Artificial Sequence
  Description of Artificial Sequence: Synthetic oligonucleotide
caaaccuuaguuguuuaau

SEQ ID NO: 1815187 - RNA, 19 nt, Artificial Sequence
  Description of Artificial Sequence: Synthetic oligonucleotide
ggaguucaagauucugucu

SEQ ID NO: 1815188 - RNA, 19 nt, Artificial Sequence
  Description of Artificial Sequence: Synthetic oligonucleotide
guccaucuacacugccgac

SEQ ID NO: 1815189 - RNA, 19 nt, Artificial Sequence
  Description of Artificial Sequence: Synthetic oligonucleotide
gguagaggcaggauggagu

SEQ ID NO: 1815190 - RNA, 19 nt, Artificial Sequence
  Description of Artificial Sequence: Synthetic oligonucleotide
uugggccaaaggccucgaa

SEQ ID NO: 1815191 - RNA, 19 nt, Artificial Sequence
  Description of Artificial Sequence: Synthetic oligonucleotide
ugacugcccuguacaguuu

SEQ ID NO: 1815192 - RNA, 19 nt, Artificial Sequence
  Description of Artificial Sequence: Synthetic oligonucleotide
gcaccucaacaaaauucag

SEQ ID NO: 1815193 - RNA, 19 nt, Artificial Sequence
  Description of Artificial Sequence: Synthetic oligonucleotide
gcuacuuggccagauguua

SEQ ID NO: 1815194 - RNA, 19 nt, Artificial Sequence
  Description of Artificial Sequence: Synthetic oligonucleotide
guuaucggaccccuucauu

SEQ ID NO: 1815195 - RNA, 19 nt, Artificial Sequence
  Description of Artificial Sequence: Synthetic oligonucleotide
caggauggaguucaagauu

SEQ ID NO: 1815196 - RNA, 19 nt, Artificial Sequence
  Description of Artificial Sequence: Synthetic oligonucleotide
gcuuaugguugggccaaag

SEQ ID NO: 1815197 - RNA, 19 nt, Artificial Sequence
  Description of Artificial Sequence: Synthetic oligonucleotide
ugggguugacugcccugua

SEQ ID NO: 1815198 - RNA, 19 nt, Artificial Sequence
  Description of Artificial Sequence: Synthetic oligonucleotide
caguuucauguguccaucu

SEQ ID NO: 1815199 - RNA, 19 nt, Artificial Sequence
  Description of Artificial Sequence: Synthetic oligonucleotide
gcccggacuaagccuguag

SEQ ID NO: 1815200 - RNA, 19 nt, Artificial Sequence
  Description of Artificial Sequence: Synthetic oligonucleotide
acacugccgacagugccuu

SEQ ID NO: 1815201 - RNA, 19 nt, Artificial Sequence
  Description of Artificial Sequence: Synthetic oligonucleotide
cggacuaagccuguaggug

SEQ ID NO: 1815202 - RNA, 19 nt, Artificial Sequence
  Description of Artificial Sequence: Synthetic oligonucleotide
guaccacgcuccaccaguc

SEQ ID NO: 1815203 - RNA, 19 nt, Artificial Sequence
  Description of Artificial Sequence: Synthetic oligonucleotide
ccucuaugauuugguagac

SEQ ID NO: 1815204 - RNA, 19 nt, Artificial Sequence
  Description of Artificial Sequence: Synthetic oligonucleotide
  modified_base (10)..(10): a, c, u, g, unknown or other
cggaauuaanauacguuuu

SEQ ID NO: 1815205 - RNA, 19 nt, Artificial Sequence
  Description of Artificial Sequence: Synthetic oligonucleotide
ccagauguuauggugcaua

SEQ ID NO: 1815206 - RNA, 19 nt, Artificial Sequence
  Description of Artificial Sequence: Synthetic oligonucleotide
gggcacauauuugcauuca

SEQ ID NO: 1815207 - RNA, 19 nt, Artificial Sequence
  Description of Artificial Sequence: Synthetic oligonucleotide
cucuaugauuugguagacu

SEQ ID NO: 1815208 - RNA, 19 nt, Artificial Sequence
  Description of Artificial Sequence: Synthetic oligonucleotide
ggauugggguugacugccc

SEQ ID NO: 1815209 - RNA, 19 nt, Artificial Sequence
  Description of Artificial Sequence: Synthetic oligonucleotide
ggcacauauuugcauucau

SEQ ID NO: 1815210 - RNA, 19 nt, Artificial Sequence
  Description of Artificial Sequence: Synthetic oligonucleotide
cugcagguuauagagcauu

SEQ ID NO: 1815211 - RNA, 19 nt, Artificial Sequence
  Description of Artificial Sequence: Synthetic oligonucleotide
gguuaucggaccccuucau

SEQ ID NO: 1815212 - RNA, 19 nt, Artificial Sequence
  Description of Artificial Sequence: Synthetic oligonucleotide
gcauccucuaugauuuggu

SEQ ID NO: 1815213 - RNA, 19 nt, Artificial Sequence
  Description of Artificial Sequence: Synthetic oligonucleotide
gcagcaagucaguauccau

SEQ ID NO: 1815214 - RNA, 19 nt, Artificial Sequence
  Description of Artificial Sequence: Synthetic oligonucleotide
auccuucaccugccauaua

SEQ ID NO: 1815215 - RNA, 19 nt, Artificial Sequence
  Description of Artificial Sequence: Synthetic oligonucleotide
cgaagagacuucccuauua

SEQ ID NO: 1815216 - RNA, 19 nt, Artificial Sequence
  Description of Artificial Sequence: Synthetic oligonucleotide
ugggaggauugggguugac

SEQ ID NO: 1815217 - RNA, 19 nt, Artificial Sequence
  Description of Artificial Sequence: Synthetic oligonucleotide
cuacugacuucacggcuuu

SEQ ID NO: 1815218 - RNA, 19 nt, Artificial Sequence
  Description of Artificial Sequence: Synthetic oligonucleotide
ggccuguauuacuccuuaa

SEQ ID NO: 1815219 - RNA, 19 nt, Artificial Sequence
  Description of Artificial Sequence: Synthetic oligonucleotide
agcuuaugguugggccaaa

SEQ ID NO: 1815220 - RNA, 19 nt, Artificial Sequence
  Description of Artificial Sequence: Synthetic oligonucleotide
gcuacugacuucacggcuu

SEQ ID NO: 1815221 - RNA, 19 nt, Artificial Sequence
  Description of Artificial Sequence: Synthetic oligonucleotide
acgcuccaccagucacaga

SEQ ID NO: 1815222 - RNA, 19 nt, Artificial Sequence
  Description of Artificial Sequence: Synthetic oligonucleotide
ccggacuaagccuguaggu

SEQ ID NO: 1815223 - RNA, 19 nt, Artificial Sequence
  Description of Artificial Sequence: Synthetic oligonucleotide
gggugcccggacuaagccu

SEQ ID NO: 1815224 - RNA, 19 nt, Artificial Sequence
  Description of Artificial Sequence: Synthetic oligonucleotide
gccgacagugccuuccuuu

SEQ ID NO: 1815225 - RNA, 19 nt, Artificial Sequence
  Description of Artificial Sequence: Synthetic oligonucleotide
cuugguuaucggaccccuu

SEQ ID NO: 1815226 - RNA, 19 nt, Artificial Sequence
  Description of Artificial Sequence: Synthetic oligonucleotide
cguuuucauagcagcaagu

SEQ ID NO: 1815227 - RNA, 19 nt, Artificial Sequence
  Description of Artificial Sequence: Synthetic oligonucleotide
ugcccggacuaagccugua

SEQ ID NO: 1815228 - RNA, 19 nt, Artificial Sequence
  Description of Artificial Sequence: Synthetic oligonucleotide
gcagguuauagagcauuau

SEQ ID NO: 1815229 - RNA, 19 nt, Artificial Sequence
  Description of Artificial Sequence: Synthetic oligonucleotide
cacagggugcccggacuaa

SEQ ID NO: 1815230 - RNA, 19 nt, Artificial Sequence
  Description of Artificial Sequence: Synthetic oligonucleotide
cacugccgacagugccuuc

SEQ ID NO: 1815231 - RNA, 19 nt, Artificial Sequence
  Description of Artificial Sequence: Synthetic oligonucleotide
caaaggccucgaagagacu

SEQ ID NO: 1815232 - RNA, 19 nt, Artificial Sequence
  Description of Artificial Sequence: Synthetic oligonucleotide
ggauggaguucaagauucu

SEQ ID NO: 1815233 - RNA, 19 nt, Artificial Sequence
  Description of Artificial Sequence: Synthetic oligonucleotide
gccuuaguuuguaggaauu

SEQ ID NO: 1815234 - RNA, 19 nt, Artificial Sequence
  Description of Artificial Sequence: Synthetic oligonucleotide
ccucaacaaaauucagauu

SEQ ID NO: 1815235 - RNA, 19 nt, Artificial Sequence
  Description of Artificial Sequence: Synthetic oligonucleotide
caccugccauauaguaaau

SEQ ID NO: 1815236 - RNA, 19 nt, Artificial Sequence
  Description of Artificial Sequence: Synthetic oligonucleotide
cugcuccauauuccuuuau

SEQ ID NO: 1815237 - RNA, 19 nt, Artificial Sequence
  Description of Artificial Sequence: Synthetic oligonucleotide
cugcugcagggcacauauu

SEQ ID NO: 1815238 - RNA, 19 nt, Artificial Sequence
  Description of Artificial Sequence: Synthetic oligonucleotide
gccagauguuauggugcau

SEQ ID NO: 1815239 - RNA, 19 nt, Artificial Sequence
  Description of Artificial Sequence: Synthetic oligonucleotide
cagcuggcuugagguuacu

SEQ ID NO: 1815240 - RNA, 19 nt, Artificial Sequence
  Description of Artificial Sequence: Synthetic oligonucleotide
  modified_base (1)..(1): a, c, u, g, unknown or other
nauacguuuucauagcagc

SEQ ID NO: 1815241 - RNA, 19 nt, Artificial Sequence
  Description of Artificial Sequence: Synthetic oligonucleotide
aauagcauaagacagauuu

SEQ ID NO: 1815242 - RNA, 19 nt, Artificial Sequence
  Description of Artificial Sequence: Synthetic oligonucleotide
aaugcauaaccuuugcuac

SEQ ID NO: 1815243 - RNA, 19 nt, Artificial Sequence
  Description of Artificial Sequence: Synthetic oligonucleotide
aaugcacacacacacacac

SEQ ID NO: 1815244 - RNA, 19 nt, Artificial Sequence
  Description of Artificial Sequence: Synthetic oligonucleotide
uuaaauaccauaaaucuuc

SEQ ID NO: 1815245 - RNA, 19 nt, Artificial Sequence
  Description of Artificial Sequence: Synthetic oligonucleotide
uucacuauaauuuuaaguc

SEQ ID NO: 1815246 - RNA, 19 nt, Artificial Sequence
  Description of Artificial Sequence: Synthetic oligonucleotide
aaaaguuagcuacugaucu

SEQ ID NO: 1815247 - RNA, 19 nt, Artificial Sequence
  Description of Artificial Sequence: Synthetic oligonucleotide
aaaguacacacauauauga

SEQ ID NO: 1815248 - RNA, 19 nt, Artificial Sequence
  Description of Artificial Sequence: Synthetic oligonucleotide
ugaauaacugcauaguucc

SEQ ID NO: 1815249 - RNA, 19 nt, Artificial Sequence
  Description of Artificial Sequence: Synthetic oligonucleotide
aauaccauaaaucuucuau

SEQ ID NO: 1815250 - RNA, 19 nt, Artificial Sequence
  Description of Artificial Sequence: Synthetic oligonucleotide
acaauagagagaaacaucc

SEQ ID NO: 1815251 - RNA, 19 nt, Artificial Sequence
  Description of Artificial Sequence: Synthetic oligonucleotide
aaucuuacuuuuaucagcc

SEQ ID NO: 1815252 - RNA, 19 nt, Artificial Sequence
  Description of Artificial Sequence: Synthetic oligonucleotide
uaucuaaucauucuaguga

SEQ ID NO: 1815253 - RNA, 19 nt, Artificial Sequence
  Description of Artificial Sequence: Synthetic oligonucleotide
auagcauagacuugagucc

SEQ ID NO: 1815254 - RNA, 19 nt, Artificial Sequence
  Description of Artificial Sequence: Synthetic oligonucleotide
aaccaaauggcuugguccc

SEQ ID NO: 1815255 - RNA, 19 nt, Artificial Sequence
  Description of Artificial Sequence: Synthetic oligonucleotide
aauuaagaagacuaggaaa

SEQ ID NO: 1815256 - RNA, 19 nt, Artificial Sequence
  Description of Artificial Sequence: Synthetic oligonucleotide
aaaacagauuaacagcauc

SEQ ID NO: 1815257 - RNA, 19 nt, Artificial Sequence
  Description of Artificial Sequence: Synthetic oligonucleotide
ucagcuacuauaauuuggg

SEQ ID NO: 1815258 - RNA, 19 nt, Artificial Sequence
  Description of Artificial Sequence: Synthetic oligonucleotide
ugaucuaccucacugaccc

SEQ ID NO: 1815259 - RNA, 19 nt, Artificial Sequence
  Description of Artificial Sequence: Synthetic oligonucleotide
uauaugaaugcacacacac

SEQ ID NO: 1815260 - RNA, 19 nt, Artificial Sequence
  Description of Artificial Sequence: Synthetic oligonucleotide
uuugcuacucacaauagca

SEQ ID NO: 1815261 - RNA, 19 nt, Artificial Sequence
  Description of Artificial Sequence: Synthetic oligonucleotide
aacuaaucagacuggaaag

SEQ ID NO: 1815262 - RNA, 19 nt, Artificial Sequence
  Description of Artificial Sequence: Synthetic oligonucleotide
uuaagucuaacacauaauc

SEQ ID NO: 1815263 - RNA, 19 nt, Artificial Sequence
  Description of Artificial Sequence: Synthetic oligonucleotide
aaaguuaggagugaaaccu

SEQ ID NO: 1815264 - RNA, 19 nt, Artificial Sequence
  Description of Artificial Sequence: Synthetic oligonucleotide
acguuuuacaaguacauuc

SEQ ID NO: 1815265 - RNA, 19 nt, Artificial Sequence
  Description of Artificial Sequence: Synthetic oligonucleotide
ugauaauuccaacuaauca

SEQ ID NO: 1815266 - RNA, 19 nt, Artificial Sequence
  Description of Artificial Sequence: Synthetic oligonucleotide
uuuuaagucuaacacauaa

SEQ ID NO: 1815267 - RNA, 19 nt, Artificial Sequence
  Description of Artificial Sequence: Synthetic oligonucleotide
uuuuccauagcauagacuu

SEQ ID NO: 1815268 - RNA, 19 nt, Artificial Sequence
  Description of Artificial Sequence: Synthetic oligonucleotide
cauagcauagacuugaguc

SEQ ID NO: 1815269 - RNA, 19 nt, Artificial Sequence
  Description of Artificial Sequence: Synthetic oligonucleotide
uaauagugaaccaacagaa

SEQ ID NO: 1815270 - RNA, 19 nt, Artificial Sequence
  Description of Artificial Sequence: Synthetic oligonucleotide
aaauuguggaggucgagag

SEQ ID NO: 1815271 - RNA, 19 nt, Artificial Sequence
  Description of Artificial Sequence: Synthetic oligonucleotide
cuacauucuaggaagaagc

SEQ ID NO: 1815272 - RNA, 19 nt, Artificial Sequence
  Description of Artificial Sequence: Synthetic oligonucleotide
uuauuuagggaaaacucug

SEQ ID NO: 1815273 - RNA, 19 nt, Artificial Sequence
  Description of Artificial Sequence: Synthetic oligonucleotide
aaaugcauaaccuuugcua

SEQ ID NO: 1815274 - RNA, 19 nt, Artificial Sequence
  Description of Artificial Sequence: Synthetic oligonucleotide
aaauuaagaagacuaggaa

SEQ ID NO: 1815275 - RNA, 19 nt, Artificial Sequence
  Description of Artificial Sequence: Synthetic oligonucleotide
acagcuacauucuaggaag

SEQ ID NO: 1815276 - RNA, 19 nt, Artificial Sequence
  Description of Artificial Sequence: Synthetic oligonucleotide
ucaagcucaaccaaauggc

SEQ ID NO: 1815277 - RNA, 19 nt, Artificial Sequence
  Description of Artificial Sequence: Synthetic oligonucleotide
aagaagacuaggaaaguac

SEQ ID NO: 1815278 - RNA, 19 nt, Artificial Sequence
  Description of Artificial Sequence: Synthetic oligonucleotide
uuucacuauaauuuuaagu

SEQ ID NO: 1815279 - RNA, 19 nt, Artificial Sequence
  Description of Artificial Sequence: Synthetic oligonucleotide
uuaacuuugcucuucaaau

SEQ ID NO: 1815280 - RNA, 19 nt, Artificial Sequence
  Description of Artificial Sequence: Synthetic oligonucleotide
uaaucuuacuuuuaucagc

SEQ ID NO: 1815281 - RNA, 19 nt, Artificial Sequence
  Description of Artificial Sequence: Synthetic oligonucleotide
cauaaucuuacuuuuauca

SEQ ID NO: 1815282 - RNA, 19 nt, Artificial Sequence
  Description of Artificial Sequence: Synthetic oligonucleotide
agcguuaugcuauaagcac

SEQ ID NO: 1815283 - RNA, 19 nt, Artificial Sequence
  Description of Artificial Sequence: Synthetic oligonucleotide
agacuaggaaaguacacac

SEQ ID NO: 1815284 - RNA, 19 nt, Artificial Sequence
  Description of Artificial Sequence: Synthetic oligonucleotide
guugcuguaauagugaacc

SEQ ID NO: 1815285 - RNA, 19 nt, Artificial Sequence
  Description of Artificial Sequence: Synthetic oligonucleotide
auaccauaaaucuucuauc

SEQ ID NO: 1815286 - RNA, 19 nt, Artificial Sequence
  Description of Artificial Sequence: Synthetic oligonucleotide
uguacauagauaucuaauc

SEQ ID NO: 1815287 - RNA, 19 nt, Artificial Sequence
  Description of Artificial Sequence: Synthetic oligonucleotide
uaggaaaguacacacauau

SEQ ID NO: 1815288 - RNA, 19 nt, Artificial Sequence
  Description of Artificial Sequence: Synthetic oligonucleotide
aguuccuguacauagauau

SEQ ID NO: 1815289 - RNA, 19 nt, Artificial Sequence
  Description of Artificial Sequence: Synthetic oligonucleotide
ucauaugauaauuccaacu

SEQ ID NO: 1815290 - RNA, 19 nt, Artificial Sequence
  Description of Artificial Sequence: Synthetic oligonucleotide
cauccauaaagacacagag

SEQ ID NO: 1815291 - RNA, 19 nt, Artificial Sequence
  Description of Artificial Sequence: Synthetic oligonucleotide
uagugaaccaacagaacag

SEQ ID NO: 1815292 - RNA, 19 nt, Artificial Sequence
  Description of Artificial Sequence: Synthetic oligonucleotide
cacacauacacacacacac

SEQ ID NO: 1815293 - RNA, 19 nt, Artificial Sequence
  Description of Artificial Sequence: Synthetic oligonucleotide
uaaaucuucuaucaagcuc

SEQ ID NO: 1815294 - RNA, 19 nt, Artificial Sequence
  Description of Artificial Sequence: Synthetic oligonucleotide
ugaaugcacacacacacac

SEQ ID NO: 1815295 - RNA, 19 nt, Artificial Sequence
  Description of Artificial Sequence: Synthetic oligonucleotide
ugaaaguuaggagugaaac

SEQ ID NO: 1815296 - RNA, 19 nt, Artificial Sequence
  Description of Artificial Sequence: Synthetic oligonucleotide
auaucuaaucauucuagug

SEQ ID NO: 1815297 - RNA, 19 nt, Artificial Sequence
  Description of Artificial Sequence: Synthetic oligonucleotide
ucagcgagaauuucugagg

SEQ ID NO: 1815298 - RNA, 19 nt, Artificial Sequence
  Description of Artificial Sequence: Synthetic oligonucleotide
uaauuugggaagauuacaa

SEQ ID NO: 1815299 - RNA, 19 nt, Artificial Sequence
  Description of Artificial Sequence: Synthetic oligonucleotide
ugcagaaauaaauuaaaua

SEQ ID NO: 1815300 - RNA, 19 nt, Artificial Sequence
  Description of Artificial Sequence: Synthetic oligonucleotide
uacacacacacacacacac

SEQ ID NO: 1815301 - RNA, 19 nt, Artificial Sequence
  Description of Artificial Sequence: Synthetic oligonucleotide
auauguguuuuccauagca

SEQ ID NO: 1815302 - RNA, 19 nt, Artificial Sequence
  Description of Artificial Sequence: Synthetic oligonucleotide
uguuacuugucuccaaaug

SEQ ID NO: 1815303 - RNA, 19 nt, Artificial Sequence
  Description of Artificial Sequence: Synthetic oligonucleotide
uguuuugugaaugcuagug

SEQ ID NO: 1815304 - RNA, 19 nt, Artificial Sequence
  Description of Artificial Sequence: Synthetic oligonucleotide
aacacauaaucuuacuuuu

SEQ ID NO: 1815305 - RNA, 19 nt, Artificial Sequence
  Description of Artificial Sequence: Synthetic oligonucleotide
auagauaucuaaucauucu

SEQ ID NO: 1815306 - RNA, 19 nt, Artificial Sequence
  Description of Artificial Sequence: Synthetic oligonucleotide
cauacacacacacacacac

SEQ ID NO: 1815307 - RNA, 19 nt, Artificial Sequence
  Description of Artificial Sequence: Synthetic oligonucleotide
acucuguaaaaguuucuac

SEQ ID NO: 1815308 - RNA, 19 nt, Artificial Sequence
  Description of Artificial Sequence: Synthetic oligonucleotide
uaccauaaaucuucuauca

SEQ ID NO: 1815309 - RNA, 19 nt, Artificial Sequence
  Description of Artificial Sequence: Synthetic oligonucleotide
uccuucauaugauaauucc

SEQ ID NO: 1815310 - RNA, 19 nt, Artificial Sequence
  Description of Artificial Sequence: Synthetic oligonucleotide
aggagugaaaccuaucucu

SEQ ID NO: 1815311 - RNA, 19 nt, Artificial Sequence
  Description of Artificial Sequence: Synthetic oligonucleotide
aauuccaacuaaucagacu

SEQ ID NO: 1815312 - RNA, 19 nt, Artificial Sequence
  Description of Artificial Sequence: Synthetic oligonucleotide
aauuguggaggucgagagg

SEQ ID NO: 1815313 - RNA, 19 nt, Artificial Sequence
  Description of Artificial Sequence: Synthetic oligonucleotide
uagcaaauuguggaggucg

SEQ ID NO: 1815314 - RNA, 19 nt, Artificial Sequence
  Description of Artificial Sequence: Synthetic oligonucleotide
ucacuauaauuuuaagucu

SEQ ID NO: 1815315 - RNA, 19 nt, Artificial Sequence
  Description of Artificial Sequence: Synthetic oligonucleotide
uuagcuacugaucuuguua

SEQ ID NO: 1815316 - RNA, 19 nt, Artificial Sequence
  Description of Artificial Sequence: Synthetic oligonucleotide
auagacuugagucccagga

SEQ ID NO: 1815317 - RNA, 19 nt, Artificial Sequence
  Description of Artificial Sequence: Synthetic oligonucleotide
ugaggagccaagaacaaaa

SEQ ID NO: 1815318 - RNA, 19 nt, Artificial Sequence
  Description of Artificial Sequence: Synthetic oligonucleotide
aguagauuucuauuuguga

SEQ ID NO: 1815319 - RNA, 19 nt, Artificial Sequence
  Description of Artificial Sequence: Synthetic oligonucleotide
uccaaaauucauagugaag

SEQ ID NO: 1815320 - RNA, 19 nt, Artificial Sequence
  Description of Artificial Sequence: Synthetic oligonucleotide
ugcacacacacacacacac

SEQ ID NO: 1815321 - RNA, 19 nt, Artificial Sequence
  Description of Artificial Sequence: Synthetic oligonucleotide
uguuacguuuuacaaguac

SEQ ID NO: 1815322 - RNA, 19 nt, Artificial Sequence
  Description of Artificial Sequence: Synthetic oligonucleotide
aacauccauaaagacacag

SEQ ID NO: 1815323 - RNA, 19 nt, Artificial Sequence
  Description of Artificial Sequence: Synthetic oligonucleotide
uuaugcaugucaauguaau

SEQ ID NO: 1815324 - RNA, 19 nt, Artificial Sequence
  Description of Artificial Sequence: Synthetic oligonucleotide
cacacacacacauacacac

SEQ ID NO: 1815325 - RNA, 19 nt, Artificial Sequence
  Description of Artificial Sequence: Synthetic oligonucleotide
uuucuauuugugauucuga

SEQ ID NO: 1815326 - RNA, 19 nt, Artificial Sequence
  Description of Artificial Sequence: Synthetic oligonucleotide
ucuaucaagcucaaccaaa

SEQ ID NO: 1815327 - RNA, 19 nt, Artificial Sequence
  Description of Artificial Sequence: Synthetic oligonucleotide
ucagaaaguagauuucuau

SEQ ID NO: 1815328 - RNA, 19 nt, Artificial Sequence
  Description of Artificial Sequence: Synthetic oligonucleotide
uagauaucuaaucauucua

SEQ ID NO: 1815329 - RNA, 19 nt, Artificial Sequence
  Description of Artificial Sequence: Synthetic oligonucleotide
aagacuaggaaaguacaca

SEQ ID NO: 1815330 - RNA, 19 nt, Artificial Sequence
  Description of Artificial Sequence: Synthetic oligonucleotide
cugaauaacugcauaguuc

SEQ ID NO: 1815331 - RNA, 19 nt, Artificial Sequence
  Description of Artificial Sequence: Synthetic oligonucleotide
agugaaccaacagaacagc

SEQ ID NO: 1815332 - RNA, 19 nt, Artificial Sequence
  Description of Artificial Sequence: Synthetic oligonucleotide
uagcauaagacagauuuca

SEQ ID NO: 1815333 - RNA, 19 nt, Artificial Sequence
  Description of Artificial Sequence: Synthetic oligonucleotide
uacauagauaucuaaucau

SEQ ID NO: 1815334 - RNA, 19 nt, Artificial Sequence
  Description of Artificial Sequence: Synthetic oligonucleotide
guacauagauaucuaauca

SEQ ID NO: 1815335 - RNA, 19 nt, Artificial Sequence
  Description of Artificial Sequence: Synthetic oligonucleotide
aaguuagcuacugaucuug

SEQ ID NO: 1815336 - RNA, 19 nt, Artificial Sequence
  Description of Artificial Sequence: Synthetic oligonucleotide
uacagcuacauucuaggaa

SEQ ID NO: 1815337 - RNA, 19 nt, Artificial Sequence
  Description of Artificial Sequence: Synthetic oligonucleotide
uuacguuuuacaaguacau

SEQ ID NO: 1815338 - RNA, 19 nt, Artificial Sequence
  Description of Artificial Sequence: Synthetic oligonucleotide
cacacacacacacacauac

SEQ ID NO: 1815339 - RNA, 19 nt, Artificial Sequence
  Description of Artificial Sequence: Synthetic oligonucleotide
uugugaaugcuagugaugu

SEQ ID NO: 1815340 - RNA, 19 nt, Artificial Sequence
  Description of Artificial Sequence: Synthetic oligonucleotide
cacacacacacacacacag

SEQ ID NO: 1815341 - RNA, 19 nt, Artificial Sequence
  Description of Artificial Sequence: Synthetic oligonucleotide
uauuuagggaaaacucugu

SEQ ID NO: 1815342 - RNA, 19 nt, Artificial Sequence
  Description of Artificial Sequence: Synthetic oligonucleotide
uuuaagucuaacacauaau

SEQ ID NO: 1815343 - RNA, 19 nt, Artificial Sequence
  Description of Artificial Sequence: Synthetic oligonucleotide
agauaucuaaucauucuag

SEQ ID NO: 1815344 - RNA, 19 nt, Artificial Sequence
  Description of Artificial Sequence: Synthetic oligonucleotide
cacauacacacacacacac

SEQ ID NO: 1815345 - RNA, 19 nt, Artificial Sequence
  Description of Artificial Sequence: Synthetic oligonucleotide
guacacacauauaugaaug

SEQ ID NO: 1815346 - RNA, 19 nt, Artificial Sequence
  Description of Artificial Sequence: Synthetic oligonucleotide
uuaugcuauaagcaccuuc

SEQ ID NO: 1815347 - RNA, 19 nt, Artificial Sequence
  Description of Artificial Sequence: Synthetic oligonucleotide
accuaucucuacuacuuuc

SEQ ID NO: 1815348 - RNA, 19 nt, Artificial Sequence
  Description of Artificial Sequence: Synthetic oligonucleotide
uacauaaaugcauaaccuu

SEQ ID NO: 1815349 - RNA, 19 nt, Artificial Sequence
  Description of Artificial Sequence: Synthetic oligonucleotide
cacacacacacacauacac

SEQ ID NO: 1815350 - RNA, 19 nt, Artificial Sequence
  Description of Artificial Sequence: Synthetic oligonucleotide
agagaaacauccauaaaga

SEQ ID NO: 1815351 - RNA, 19 nt, Artificial Sequence
  Description of Artificial Sequence: Synthetic oligonucleotide
uagggcuuuacacucaaau

SEQ ID NO: 1815352 - RNA, 19 nt, Artificial Sequence
  Description of Artificial Sequence: Synthetic oligonucleotide
uuccaacuaaucagacugg

SEQ ID NO: 1815353 - RNA, 19 nt, Artificial Sequence
  Description of Artificial Sequence: Synthetic oligonucleotide
augauaauuccaacuaauc

SEQ ID NO: 1815354 - RNA, 19 nt, Artificial Sequence
  Description of Artificial Sequence: Synthetic oligonucleotide
aucuaaucauucuagugaa

SEQ ID NO: 1815355 - RNA, 19 nt, Artificial Sequence
  Description of Artificial Sequence: Synthetic oligonucleotide
agggaaaacucuguaaaag

SEQ ID NO: 1815356 - RNA, 19 nt, Artificial Sequence
  Description of Artificial Sequence: Synthetic oligonucleotide
ugaaaccuaucucuacuac

SEQ ID NO: 1815357 - RNA, 19 nt, Artificial Sequence
  Description of Artificial Sequence: Synthetic oligonucleotide
uacugaauuuuaacuuugc

SEQ ID NO: 1815358 - RNA, 19 nt, Artificial Sequence
  Description of Artificial Sequence: Synthetic oligonucleotide
ucuuacuuuuaucagccuu

SEQ ID NO: 1815359 - RNA, 19 nt, Artificial Sequence
  Description of Artificial Sequence: Synthetic oligonucleotide
ucuaaucauucuagugaag

SEQ ID NO: 1815360 - RNA, 19 nt, Artificial Sequence
  Description of Artificial Sequence: Synthetic oligonucleotide
auguucaugcuucaucuca

SEQ ID NO: 1815361 - RNA, 19 nt, Artificial Sequence
  Description of Artificial Sequence: Synthetic oligonucleotide
cacacacacacacacacac

SEQ ID NO: 1815362 - RNA, 19 nt, Artificial Sequence
  Description of Artificial Sequence: Synthetic oligonucleotide
cacacacacauacacacac

SEQ ID NO: 1815363 - RNA, 19 nt, Artificial Sequence
  Description of Artificial Sequence: Synthetic oligonucleotide
agaacaaaacagauuaaca

SEQ ID NO: 1815364 - RNA, 19 nt, Artificial Sequence
  Description of Artificial Sequence: Synthetic oligonucleotide
cuuguuacguuuuacaagu

SEQ ID NO: 1815365 - RNA, 19 nt, Artificial Sequence
  Description of Artificial Sequence: Synthetic oligonucleotide
auaauuccaacuaaucaga

SEQ ID NO: 1815366 - RNA, 19 nt, Artificial Sequence
  Description of Artificial Sequence: Synthetic oligonucleotide
uauguguuuuccauagcau

SEQ ID NO: 1815367 - RNA, 19 nt, Artificial Sequence
  Description of Artificial Sequence: Synthetic oligonucleotide
uagcuacugaucuuguuac

SEQ ID NO: 1815368 - RNA, 19 nt, Artificial Sequence
  Description of Artificial Sequence: Synthetic oligonucleotide
cauaugauaauuccaacua

SEQ ID NO: 1815369 - RNA, 19 nt, Artificial Sequence
  Description of Artificial Sequence: Synthetic oligonucleotide
auuguggaggucgagaggu

SEQ ID NO: 1815370 - RNA, 19 nt, Artificial Sequence
  Description of Artificial Sequence: Synthetic oligonucleotide
cuuugcuacucacaauagc

SEQ ID NO: 1815371 - RNA, 19 nt, Artificial Sequence
  Description of Artificial Sequence: Synthetic oligonucleotide
agucccaggauacugaauu

SEQ ID NO: 1815372 - RNA, 19 nt, Artificial Sequence
  Description of Artificial Sequence: Synthetic oligonucleotide
uauaagcaccuucauccac

SEQ ID NO: 1815373 - RNA, 19 nt, Artificial Sequence
  Description of Artificial Sequence: Synthetic oligonucleotide
uucuauuugugauucugau

SEQ ID NO: 1815374 - RNA, 19 nt, Artificial Sequence
  Description of Artificial Sequence: Synthetic oligonucleotide
cacacacauacacacacac

SEQ ID NO: 1815375 - RNA, 19 nt, Artificial Sequence
  Description of Artificial Sequence: Synthetic oligonucleotide
accuuugcuacucacaaua

SEQ ID NO: 1815376 - RNA, 19 nt, Artificial Sequence
  Description of Artificial Sequence: Synthetic oligonucleotide
ccauaaaucuucuaucaag

SEQ ID NO: 1815377 - RNA, 19 nt, Artificial Sequence
  Description of Artificial Sequence: Synthetic oligonucleotide
uauauguguuuuccauagc

SEQ ID NO: 1815378 - RNA, 19 nt, Artificial Sequence
  Description of Artificial Sequence: Synthetic oligonucleotide
agaaagacaccauuuccaa

SEQ ID NO: 1815379 - RNA, 19 nt, Artificial Sequence
  Description of Artificial Sequence: Synthetic oligonucleotide
gauuucacuauaauuuuaa

SEQ ID NO: 1815380 - RNA, 19 nt, Artificial Sequence
  Description of Artificial Sequence: Synthetic oligonucleotide
auaguuccuguacauagau

SEQ ID NO: 1815381 - RNA, 19 nt, Artificial Sequence
  Description of Artificial Sequence: Synthetic oligonucleotide
aauuugaguugcuguaaua

SEQ ID NO: 1815382 - RNA, 19 nt, Artificial Sequence
  Description of Artificial Sequence: Synthetic oligonucleotide
uucaucucagaaaguagau

SEQ ID NO: 1815383 - RNA, 19 nt, Artificial Sequence
  Description of Artificial Sequence: Synthetic oligonucleotide
cuaaucauucuagugaaga

SEQ ID NO: 1815384 - RNA, 19 nt, Artificial Sequence
  Description of Artificial Sequence: Synthetic oligonucleotide
aaaccuaucucuacuacuu

SEQ ID NO: 1815385 - RNA, 19 nt, Artificial Sequence
  Description of Artificial Sequence: Synthetic oligonucleotide
cucuacagcuacauucuag

SEQ ID NO: 1815386 - RNA, 19 nt, Artificial Sequence
  Description of Artificial Sequence: Synthetic oligonucleotide
aauucauagugaagugcag

SEQ ID NO: 1815387 - RNA, 19 nt, Artificial Sequence
  Description of Artificial Sequence: Synthetic oligonucleotide
gaguccucuuagcaaauug

SEQ ID NO: 1815388 - RNA, 19 nt, Artificial Sequence
  Description of Artificial Sequence: Synthetic oligonucleotide
uuuccauagcauagacuug

SEQ ID NO: 1815389 - RNA, 19 nt, Artificial Sequence
  Description of Artificial Sequence: Synthetic oligonucleotide
uagcauagacuugaguccc

SEQ ID NO: 1815390 - RNA, 19 nt, Artificial Sequence
  Description of Artificial Sequence: Synthetic oligonucleotide
caucaaccugaauaacugc

SEQ ID NO: 1815391 - RNA, 19 nt, Artificial Sequence
  Description of Artificial Sequence: Synthetic oligonucleotide
uguaauuugcaaaguccuu

SEQ ID NO: 1815392 - RNA, 19 nt, Artificial Sequence
  Description of Artificial Sequence: Synthetic oligonucleotide
ucuauuugugauucugauu

SEQ ID NO: 1815393 - RNA, 19 nt, Artificial Sequence
  Description of Artificial Sequence: Synthetic oligonucleotide
gaagacuaggaaaguacac

SEQ ID NO: 1815394 - RNA, 19 nt, Artificial Sequence
  Description of Artificial Sequence: Synthetic oligonucleotide
auaagacagauuucacuau

SEQ ID NO: 1815395 - RNA, 19 nt, Artificial Sequence
  Description of Artificial Sequence: Synthetic oligonucleotide
auagcauaagacagauuuc

SEQ ID NO: 1815396 - RNA, 19 nt, Artificial Sequence
  Description of Artificial Sequence: Synthetic oligonucleotide
acuaaucagacuggaaaga

SEQ ID NO: 1815397 - RNA, 19 nt, Artificial Sequence
  Description of Artificial Sequence: Synthetic oligonucleotide
accagcguuaugcuauaag

SEQ ID NO: 1815398 - RNA, 19 nt, Artificial Sequence
  Description of Artificial Sequence: Synthetic oligonucleotide
uauagggcuuuacacucaa

SEQ ID NO: 1815399 - RNA, 19 nt, Artificial Sequence
  Description of Artificial Sequence: Synthetic oligonucleotide
ccagcguuaugcuauaagc

SEQ ID NO: 1815400 - RNA, 19 nt, Artificial Sequence
  Description of Artificial Sequence: Synthetic oligonucleotide
auuuagggaaaacucugua

SEQ ID NO: 1815401 - RNA, 19 nt, Artificial Sequence
  Description of Artificial Sequence: Synthetic oligonucleotide
cuacauaaaugcauaaccu

SEQ ID NO: 1815402 - RNA, 19 nt, Artificial Sequence
  Description of Artificial Sequence: Synthetic oligonucleotide
cuuacuuuuaucagccuua

SEQ ID NO: 1815403 - RNA, 19 nt, Artificial Sequence
  Description of Artificial Sequence: Synthetic oligonucleotide
uugcuacucacaauagcau

SEQ ID NO: 1815404 - RNA, 19 nt, Artificial Sequence
  Description of Artificial Sequence: Synthetic oligonucleotide
ucuacuacuuucucuuauu

SEQ ID NO: 1815405 - RNA, 19 nt, Artificial Sequence
  Description of Artificial Sequence: Synthetic oligonucleotide
ucauucuagugaagaacuc

SEQ ID NO: 1815406 - RNA, 19 nt, Artificial Sequence
  Description of Artificial Sequence: Synthetic oligonucleotide
aucaaccugaauaacugca

SEQ ID NO: 1815407 - RNA, 19 nt, Artificial Sequence
  Description of Artificial Sequence: Synthetic oligonucleotide
agcaucaaccugaauaacu

SEQ ID NO: 1815408 - RNA, 19 nt, Artificial Sequence
  Description of Artificial Sequence: Synthetic oligonucleotide
aaauaccauaaaucuucua

SEQ ID NO: 1815409 - RNA, 19 nt, Artificial Sequence
  Description of Artificial Sequence: Synthetic oligonucleotide
agcauaagacagauuucac

SEQ ID NO: 1815410 - RNA, 19 nt, Artificial Sequence
  Description of Artificial Sequence: Synthetic oligonucleotide
agcuacugaucuuguuacg

SEQ ID NO: 1815411 - RNA, 19 nt, Artificial Sequence
  Description of Artificial Sequence: Synthetic oligonucleotide
cugaucuaccucacugacc

SEQ ID NO: 1815412 - RNA, 19 nt, Artificial Sequence
  Description of Artificial Sequence: Synthetic oligonucleotide
ugcuacucacaauagcaua

SEQ ID NO: 1815413 - RNA, 19 nt, Artificial Sequence
  Description of Artificial Sequence: Synthetic oligonucleotide
cuagugauguuucaugcaa

SEQ ID NO: 1815414 - RNA, 19 nt, Artificial Sequence
  Description of Artificial Sequence: Synthetic oligonucleotide
accauaaaucuucuaucaa

SEQ ID NO: 1815415 - RNA, 19 nt, Artificial Sequence
  Description of Artificial Sequence: Synthetic oligonucleotide
gaaaccuaucucuacuacu

SEQ ID NO: 1815416 - RNA, 19 nt, Artificial Sequence
  Description of Artificial Sequence: Synthetic oligonucleotide
uccaacuaaucagacugga

SEQ ID NO: 1815417 - RNA, 19 nt, Artificial Sequence
  Description of Artificial Sequence: Synthetic oligonucleotide
ucugaaaguuaggagugaa

SEQ ID NO: 1815418 - RNA, 19 nt, Artificial Sequence
  Description of Artificial Sequence: Synthetic oligonucleotide
uagacuugagucccaggau

SEQ ID NO: 1815419 - RNA, 19 nt, Artificial Sequence
  Description of Artificial Sequence: Synthetic oligonucleotide
ugcauaaccuuugcuacuc

SEQ ID NO: 1815420 - RNA, 19 nt, Artificial Sequence
  Description of Artificial Sequence: Synthetic oligonucleotide
agcgagaauuucugaggag

SEQ ID NO: 1815421 - RNA, 19 nt, Artificial Sequence
  Description of Artificial Sequence: Synthetic oligonucleotide
ugaucuuguuacguuuuac

SEQ ID NO: 1815422 - RNA, 19 nt, Artificial Sequence
  Description of Artificial Sequence: Synthetic oligonucleotide
acauagauaucuaaucauu

SEQ ID NO: 1815423 - RNA, 19 nt, Artificial Sequence
  Description of Artificial Sequence: Synthetic oligonucleotide
ccugauauauguguuuucc

SEQ ID NO: 1815424 - RNA, 19 nt, Artificial Sequence
  Description of Artificial Sequence: Synthetic oligonucleotide
gaccuacucuggcaucugg

SEQ ID NO: 1815425 - RNA, 19 nt, Artificial Sequence
  Description of Artificial Sequence: Synthetic oligonucleotide
auagagagaaacauccaua

SEQ ID NO: 1815426 - RNA, 19 nt, Artificial Sequence
  Description of Artificial Sequence: Synthetic oligonucleotide
ucucuuauuuagggaaaac

SEQ ID NO: 1815427 - RNA, 19 nt, Artificial Sequence
  Description of Artificial Sequence: Synthetic oligonucleotide
auaaccuuugcuacucaca

SEQ ID NO: 1815428 - RNA, 19 nt, Artificial Sequence
  Description of Artificial Sequence: Synthetic oligonucleotide
augcauaaccuuugcuacu

SEQ ID NO: 1815429 - RNA, 19 nt, Artificial Sequence
  Description of Artificial Sequence: Synthetic oligonucleotide
ggaaagaaggagcagaaau

SEQ ID NO: 1815430 - RNA, 19 nt, Artificial Sequence
  Description of Artificial Sequence: Synthetic oligonucleotide
acuauaauuugggaagauu

SEQ ID NO: 1815431 - RNA, 19 nt, Artificial Sequence
  Description of Artificial Sequence: Synthetic oligonucleotide
ugucagcgagaauuucuga

SEQ ID NO: 1815432 - RNA, 19 nt, Artificial Sequence
  Description of Artificial Sequence: Synthetic oligonucleotide
gucuaacacauaaucuuac

SEQ ID NO: 1815433 - RNA, 19 nt, Artificial Sequence
  Description of Artificial Sequence: Synthetic oligonucleotide
cuacucacaauagcauaag

SEQ ID NO: 1815434 - RNA, 19 nt, Artificial Sequence
  Description of Artificial Sequence: Synthetic oligonucleotide
gcucuucaaauuaagaaga

SEQ ID NO: 1815435 - RNA, 19 nt, Artificial Sequence
  Description of Artificial Sequence: Synthetic oligonucleotide
uuacuuuuaucagccuuaa

SEQ ID NO: 1815436 - RNA, 19 nt, Artificial Sequence
  Description of Artificial Sequence: Synthetic oligonucleotide
augcaaagagcaaaaucca

SEQ ID NO: 1815437 - RNA, 19 nt, Artificial Sequence
  Description of Artificial Sequence: Synthetic oligonucleotide
aaccuaucucuacuacuuu

SEQ ID NO: 1815438 - RNA, 19 nt, Artificial Sequence
  Description of Artificial Sequence: Synthetic oligonucleotide
gcaucaaccugaauaacug

SEQ ID NO: 1815439 - RNA, 19 nt, Artificial Sequence
  Description of Artificial Sequence: Synthetic oligonucleotide
caauagagagaaacaucca

SEQ ID NO: 1815440 - RNA, 19 nt, Artificial Sequence
  Description of Artificial Sequence: Synthetic oligonucleotide
gaggucgaccuacucuggc

SEQ ID NO: 1815441 - RNA, 19 nt, Artificial Sequence
  Description of Artificial Sequence: Synthetic oligonucleotide
acauccauaaagacacaga

SEQ ID NO: 1815442 - RNA, 19 nt, Artificial Sequence
  Description of Artificial Sequence: Synthetic oligonucleotide
cuauaagcaccuucaucca

SEQ ID NO: 1815443 - RNA, 19 nt, Artificial Sequence
  Description of Artificial Sequence: Synthetic oligonucleotide
gcgagaauuucugaggagc

SEQ ID NO: 1815444 - RNA, 19 nt, Artificial Sequence
  Description of Artificial Sequence: Synthetic oligonucleotide
gcuguaauagugaaccaac

SEQ ID NO: 1815445 - RNA, 19 nt, Artificial Sequence
  Description of Artificial Sequence: Synthetic oligonucleotide
agucuaacacauaaucuua

SEQ ID NO: 1815446 - RNA, 19 nt, Artificial Sequence
  Description of Artificial Sequence: Synthetic oligonucleotide
uucugaaaguuaggaguga

SEQ ID NO: 1815447 - RNA, 19 nt, Artificial Sequence
  Description of Artificial Sequence: Synthetic oligonucleotide
ccucuuagcaaauugugga

SEQ ID NO: 1815448 - RNA, 19 nt, Artificial Sequence
  Description of Artificial Sequence: Synthetic oligonucleotide
ucgaccuacucuggcaucu

SEQ ID NO: 1815449 - RNA, 19 nt, Artificial Sequence
  Description of Artificial Sequence: Synthetic oligonucleotide
auauaugaaugcacacaca

SEQ ID NO: 1815450 - RNA, 19 nt, Artificial Sequence
  Description of Artificial Sequence: Synthetic oligonucleotide
uucccugauauauguguuu

SEQ ID NO: 1815451 - RNA, 19 nt, Artificial Sequence
  Description of Artificial Sequence: Synthetic oligonucleotide
gacuggaaagaaggagcag

SEQ ID NO: 1815452 - RNA, 19 nt, Artificial Sequence
  Description of Artificial Sequence: Synthetic oligonucleotide
agugaagugcagaaauaaa

SEQ ID NO: 1815453 - RNA, 19 nt, Artificial Sequence
  Description of Artificial Sequence: Synthetic oligonucleotide
aagcucaaccaaauggcuu

SEQ ID NO: 1815454 - RNA, 19 nt, Artificial Sequence
  Description of Artificial Sequence: Synthetic oligonucleotide
uacguuuuacaaguacauu

SEQ ID NO: 1815455 - RNA, 19 nt, Artificial Sequence
  Description of Artificial Sequence: Synthetic oligonucleotide
acugacccuggauaaguua

SEQ ID NO: 1815456 - RNA, 19 nt, Artificial Sequence
  Description of Artificial Sequence: Synthetic oligonucleotide
caugucagcuacuauaauu

SEQ ID NO: 1815457 - RNA, 19 nt, Artificial Sequence
  Description of Artificial Sequence: Synthetic oligonucleotide
uacuuuuaucagccuuaaa

SEQ ID NO: 1815458 - RNA, 19 nt, Artificial Sequence
  Description of Artificial Sequence: Synthetic oligonucleotide
cacugaucuaccucacuga

SEQ ID NO: 1815459 - RNA, 19 nt, Artificial Sequence
  Description of Artificial Sequence: Synthetic oligonucleotide
cagcgagaauuucugagga

SEQ ID NO: 1815460 - RNA, 19 nt, Artificial Sequence
  Description of Artificial Sequence: Synthetic oligonucleotide
cucuuauuuagggaaaacu

SEQ ID NO: 1815461 - RNA, 19 nt, Artificial Sequence
  Description of Artificial Sequence: Synthetic oligonucleotide
gaggagccaagaacaaaac

SEQ ID NO: 1815462 - RNA, 19 nt, Artificial Sequence
  Description of Artificial Sequence: Synthetic oligonucleotide
ucccugauauauguguuuu

SEQ ID NO: 1815463 - RNA, 19 nt, Artificial Sequence
  Description of Artificial Sequence: Synthetic oligonucleotide
ccacugaucuaccucacug

SEQ ID NO: 1815464 - RNA, 19 nt, Artificial Sequence
  Description of Artificial Sequence: Synthetic oligonucleotide
gaggucgagaggucgaccu

SEQ ID NO: 1815465 - RNA, 19 nt, Artificial Sequence
  Description of Artificial Sequence: Synthetic oligonucleotide
cuguacauagauaucuaau

SEQ ID NO: 1815466 - RNA, 19 nt, Artificial Sequence
  Description of Artificial Sequence: Synthetic oligonucleotide
ugcauaguuccuguacaua

SEQ ID NO: 1815467 - RNA, 19 nt, Artificial Sequence
  Description of Artificial Sequence: Synthetic oligonucleotide
cuguaaaaguuucuacaua

SEQ ID NO: 1815468 - RNA, 19 nt, Artificial Sequence
  Description of Artificial Sequence: Synthetic oligonucleotide
acacacacacacauacaca

SEQ ID NO: 1815469 - RNA, 19 nt, Artificial Sequence
  Description of Artificial Sequence: Synthetic oligonucleotide
uuguuacguuuuacaagua

SEQ ID NO: 1815470 - RNA, 19 nt, Artificial Sequence
  Description of Artificial Sequence: Synthetic oligonucleotide
gaaugcacacacacacaca

SEQ ID NO: 1815471 - RNA, 19 nt, Artificial Sequence
  Description of Artificial Sequence: Synthetic oligonucleotide
cuauagggcuuuacacuca

SEQ ID NO: 1815472 - RNA, 19 nt, Artificial Sequence
  Description of Artificial Sequence: Synthetic oligonucleotide
cgagaauuucugaggagcc

SEQ ID NO: 1815473 - RNA, 19 nt, Artificial Sequence
  Description of Artificial Sequence: Synthetic oligonucleotide
acacauacacacacacaca

SEQ ID NO: 1815474 - RNA, 19 nt, Artificial Sequence
  Description of Artificial Sequence: Synthetic oligonucleotide
acauacacacacacacaca

SEQ ID NO: 1815475 - RNA, 19 nt, Artificial Sequence
  Description of Artificial Sequence: Synthetic oligonucleotide
gcguuaugcuauaagcacc

SEQ ID NO: 1815476 - RNA, 19 nt, Artificial Sequence
  Description of Artificial Sequence: Synthetic oligonucleotide
augcuauaagcaccuucau

SEQ ID NO: 1815477 - RNA, 19 nt, Artificial Sequence
  Description of Artificial Sequence: Synthetic oligonucleotide
augaaugcacacacacaca

SEQ ID NO: 1815478 - RNA, 19 nt, Artificial Sequence
  Description of Artificial Sequence: Synthetic oligonucleotide
aaacauccauaaagacaca

SEQ ID NO: 1815479 - RNA, 19 nt, Artificial Sequence
  Description of Artificial Sequence: Synthetic oligonucleotide
cagaaaguagauuucuauu

SEQ ID NO: 1815480 - RNA, 19 nt, Artificial Sequence
  Description of Artificial Sequence: Synthetic oligonucleotide
cacacacacacacacacau

SEQ ID NO: 1815481 - RNA, 19 nt, Artificial Sequence
  Description of Artificial Sequence: Synthetic oligonucleotide
ucgagaggucgaccuacuc

SEQ ID NO: 1815482 - RNA, 19 nt, Artificial Sequence
  Description of Artificial Sequence: Synthetic oligonucleotide
cugcuauuuucccugauau

SEQ ID NO: 1815483 - RNA, 19 nt, Artificial Sequence
  Description of Artificial Sequence: Synthetic oligonucleotide
gaagaacucuacagcuaca

SEQ ID NO: 1815484 - RNA, 19 nt, Artificial Sequence
  Description of Artificial Sequence: Synthetic oligonucleotide
acacacauacacacacaca

SEQ ID NO: 1815485 - RNA, 19 nt, Artificial Sequence
  Description of Artificial Sequence: Synthetic oligonucleotide
auacacacacacacacaca

SEQ ID NO: 1815486 - RNA, 19 nt, Artificial Sequence
  Description of Artificial Sequence: Synthetic oligonucleotide
aaucuucuaucaagcucaa

SEQ ID NO: 1815487 - RNA, 19 nt, Artificial Sequence
  Description of Artificial Sequence: Synthetic oligonucleotide
agcaaauuguggaggucga

SEQ ID NO: 1815488 - RNA, 19 nt, Artificial Sequence
  Description of Artificial Sequence: Synthetic oligonucleotide
agaggucgaccuacucugg

SEQ ID NO: 1815489 - RNA, 19 nt, Artificial Sequence
  Description of Artificial Sequence: Synthetic oligonucleotide
acccuggauaaguuauuuu

SEQ ID NO: 1815490 - RNA, 19 nt, Artificial Sequence
  Description of Artificial Sequence: Synthetic oligonucleotide
gcuacucacaauagcauaa

SEQ ID NO: 1815491 - RNA, 19 nt, Artificial Sequence
  Description of Artificial Sequence: Synthetic oligonucleotide
caaccugaauaacugcaua

SEQ ID NO: 1815492 - RNA, 19 nt, Artificial Sequence
  Description of Artificial Sequence: Synthetic oligonucleotide
gucaccagcguuaugcuau

SEQ ID NO: 1815493 - RNA, 19 nt, Artificial Sequence
  Description of Artificial Sequence: Synthetic oligonucleotide
acacacacacauacacaca

SEQ ID NO: 1815494 - RNA, 19 nt, Artificial Sequence
  Description of Artificial Sequence: Synthetic oligonucleotide
acacacacauacacacaca

SEQ ID NO: 1815495 - RNA, 19 nt, Artificial Sequence
  Description of Artificial Sequence: Synthetic oligonucleotide
acacauaaucuuacuuuua

SEQ ID NO: 1815496 - RNA, 19 nt, Artificial Sequence
  Description of Artificial Sequence: Synthetic oligonucleotide
ccuacucuggcaucugguc

SEQ ID NO: 1815497 - RNA, 19 nt, Artificial Sequence
  Description of Artificial Sequence: Synthetic oligonucleotide
acuugagucccaggauacu

SEQ ID NO: 1815498 - RNA, 19 nt, Artificial Sequence
  Description of Artificial Sequence: Synthetic oligonucleotide
acacacacacacacauaca

SEQ ID NO: 1815499 - RNA, 19 nt, Artificial Sequence
  Description of Artificial Sequence: Synthetic oligonucleotide
gcuguuacuugucuccaaa

SEQ ID NO: 1815500 - RNA, 19 nt, Artificial Sequence
  Description of Artificial Sequence: Synthetic oligonucleotide
accuacucuggcaucuggu

SEQ ID NO: 1815501 - RNA, 19 nt, Artificial Sequence
  Description of Artificial Sequence: Synthetic oligonucleotide
uggaggucgagaggucgac

SEQ ID NO: 1815502 - RNA, 19 nt, Artificial Sequence
  Description of Artificial Sequence: Synthetic oligonucleotide
guuuuccauagcauagacu

SEQ ID NO: 1815503 - RNA, 19 nt, Artificial Sequence
  Description of Artificial Sequence: Synthetic oligonucleotide
gugaagaacucuacagcua

SEQ ID NO: 1815504 - RNA, 19 nt, Artificial Sequence
  Description of Artificial Sequence: Synthetic oligonucleotide
acacacacacacacacaca

SEQ ID NO: 1815505 - RNA, 19 nt, Artificial Sequence
  Description of Artificial Sequence: Synthetic oligonucleotide
ucaccagcguuaugcuaua

SEQ ID NO: 1815506 - RNA, 19 nt, Artificial Sequence
  Description of Artificial Sequence: Synthetic oligonucleotide
aggaaaguacacacauaua

SEQ ID NO: 1815507 - RNA, 19 nt, Artificial Sequence
  Description of Artificial Sequence: Synthetic oligonucleotide
acacacacacacacacaga

SEQ ID NO: 1815508 - RNA, 19 nt, Artificial Sequence
  Description of Artificial Sequence: Synthetic oligonucleotide
ggucgagaggucgaccuac

SEQ ID NO: 1815509 - RNA, 19 nt, Artificial Sequence
  Description of Artificial Sequence: Synthetic oligonucleotide
aaccaacagaacagcuguu

SEQ ID NO: 1815510 - RNA, 19 nt, Artificial Sequence
  Description of Artificial Sequence: Synthetic oligonucleotide
ccuguacauagauaucuaa

SEQ ID NO: 1815511 - RNA, 19 nt, Artificial Sequence
  Description of Artificial Sequence: Synthetic oligonucleotide
gcaaauuguggaggucgag

SEQ ID NO: 1815512 - RNA, 19 nt, Artificial Sequence
  Description of Artificial Sequence: Synthetic oligonucleotide
gaauaacugcauaguuccu

SEQ ID NO: 1815513 - RNA, 19 nt, Artificial Sequence
  Description of Artificial Sequence: Synthetic oligonucleotide
gucgaccuacucuggcauc

SEQ ID NO: 1815514 - RNA, 19 nt, Artificial Sequence
  Description of Artificial Sequence: Synthetic oligonucleotide
augcacacacacacacaca

SEQ ID NO: 1815515 - RNA, 19 nt, Artificial Sequence
  Description of Artificial Sequence: Synthetic oligonucleotide
gcuacugaucuuguuacgu

SEQ ID NO: 1815516 - RNA, 19 nt, Artificial Sequence
  Description of Artificial Sequence: Synthetic oligonucleotide
ggagugaaaccuaucucua

SEQ ID NO: 1815517 - RNA, 19 nt, Artificial Sequence
  Description of Artificial Sequence: Synthetic oligonucleotide
agcauagacuugaguccca

SEQ ID NO: 1815518 - RNA, 19 nt, Artificial Sequence
  Description of Artificial Sequence: Synthetic oligonucleotide
cuguuacuugucuccaaau

SEQ ID NO: 1815519 - RNA, 19 nt, Artificial Sequence
  Description of Artificial Sequence: Synthetic oligonucleotide
ccccaugucagcuacuaua

SEQ ID NO: 1815520 - RNA, 19 nt, Artificial Sequence
  Description of Artificial Sequence: Synthetic oligonucleotide
cugcauaguuccuguacau

SEQ ID NO: 1815521 - RNA, 19 nt, Artificial Sequence
  Description of Artificial Sequence: Synthetic oligonucleotide
guggaggucgagaggucga

SEQ ID NO: 1815522 - RNA, 19 nt, Artificial Sequence
  Description of Artificial Sequence: Synthetic oligonucleotide
gacccuggauaaguuauuu

SEQ ID NO: 1815523 - RNA, 19 nt, Artificial Sequence
  Description of Artificial Sequence: Synthetic oligonucleotide
acacacacacacacacaua

SEQ ID NO: 1815524 - RNA, 19 nt, Artificial Sequence
  Description of Artificial Sequence: Synthetic oligonucleotide
agauuacaauagagagaaa

SEQ ID NO: 1815525 - RNA, 19 nt, Artificial Sequence
  Description of Artificial Sequence: Synthetic oligonucleotide
ggaggucgagaggucgacc

SEQ ID NO: 1815526 - RNA, 19 nt, Artificial Sequence
  Description of Artificial Sequence: Synthetic oligonucleotide
cguuaugcuauaagcaccu

SEQ ID NO: 1815527 - RNA, 19 nt, Artificial Sequence
  Description of Artificial Sequence: Synthetic oligonucleotide
ggucgaccuacucuggcau

SEQ ID NO: 1815528 - RNA, 19 nt, Artificial Sequence
  Description of Artificial Sequence: Synthetic oligonucleotide
gcacacacacacacacaca

SEQ ID NO: 1815529 - RNA, 19 nt, Artificial Sequence
  Description of Artificial Sequence: Synthetic oligonucleotide
cucaaaugucagcgagaau

SEQ ID NO: 1815530 - RNA, 19 nt, Artificial Sequence
  Description of Artificial Sequence: Synthetic oligonucleotide
ccauagcauagacuugagu

SEQ ID NO: 1815531 - RNA, 19 nt, Artificial Sequence
  Description of Artificial Sequence: Synthetic oligonucleotide
gucgagaggucgaccuacu

SEQ ID NO: 1815532 - RNA, 19 nt, Artificial Sequence
  Description of Artificial Sequence: Synthetic oligonucleotide
cucaaccaaauggcuuggu

SEQ ID NO: 1815533 - RNA, 19 nt, Artificial Sequence
  Description of Artificial Sequence: Synthetic oligonucleotide
caccagcguuaugcuauaa

SEQ ID NO: 1815534 - RNA, 19 nt, Artificial Sequence
  Description of Artificial Sequence: Synthetic oligonucleotide
cgaccuacucuggcaucug

SEQ ID NO: 1815535 - RNA, 19 nt, Artificial Sequence
  Description of Artificial Sequence: Synthetic oligonucleotide
aauagaaccauuauccucc

SEQ ID NO: 1815536 - RNA, 19 nt, Artificial Sequence
  Description of Artificial Sequence: Synthetic oligonucleotide
aauauaggggaacagagga

SEQ ID NO: 1815537 - RNA, 19 nt, Artificial Sequence
  Description of Artificial Sequence: Synthetic oligonucleotide
uuuugguucaaauacaaca

SEQ ID NO: 1815538 - RNA, 19 nt, Artificial Sequence
  Description of Artificial Sequence: Synthetic oligonucleotide
accaauagaaccauuaucc

SEQ ID NO: 1815539 - RNA, 19 nt, Artificial Sequence
  Description of Artificial Sequence: Synthetic oligonucleotide
accauuauccuccucagcc

SEQ ID NO: 1815540 - RNA, 19 nt, Artificial Sequence
  Description of Artificial Sequence: Synthetic oligonucleotide
aauacaacauccuugccca

SEQ ID NO: 1815541 - RNA, 19 nt, Artificial Sequence
  Description of Artificial Sequence: Synthetic oligonucleotide
aaugauuaugaguuggaug

SEQ ID NO: 1815542 - RNA, 19 nt, Artificial Sequence
  Description of Artificial Sequence: Synthetic oligonucleotide
uagaccaugguucagcgcg

SEQ ID NO: 1815543 - RNA, 19 nt, Artificial Sequence
  Description of Artificial Sequence: Synthetic oligonucleotide
gagauuaggaccuuggccc

SEQ ID NO: 1815544 - RNA, 19 nt, Artificial Sequence
  Description of Artificial Sequence: Synthetic oligonucleotide
agagauuaggaccuuggcc

SEQ ID NO: 1815545 - RNA, 19 nt, Artificial Sequence
  Description of Artificial Sequence: Synthetic oligonucleotide
aguggaaacuucuuccugc

SEQ ID NO: 1815546 - RNA, 19 nt, Artificial Sequence
  Description of Artificial Sequence: Synthetic oligonucleotide
aaaccucagagauuaggac

SEQ ID NO: 1815547 - RNA, 19 nt, Artificial Sequence
  Description of Artificial Sequence: Synthetic oligonucleotide
cuuaucuagaccaugguuc

SEQ ID NO: 1815548 - RNA, 19 nt, Artificial Sequence
  Description of Artificial Sequence: Synthetic oligonucleotide
ugguucaaauacaacaucc

SEQ ID NO: 1815549 - RNA, 19 nt, Artificial Sequence
  Description of Artificial Sequence: Synthetic oligonucleotide
uuucgcaaagacaggaagg

SEQ ID NO: 1815550 - RNA, 19 nt, Artificial Sequence
  Description of Artificial Sequence: Synthetic oligonucleotide
acugcuaggaaaguggagc

SEQ ID NO: 1815551 - RNA, 19 nt, Artificial Sequence
  Description of Artificial Sequence: Synthetic oligonucleotide
auucaaaugagcuccagga

SEQ ID NO: 1815552 - RNA, 19 nt, Artificial Sequence
  Description of Artificial Sequence: Synthetic oligonucleotide
uauaggggaacagaggagg

SEQ ID NO: 1815553 - RNA, 19 nt, Artificial Sequence
  Description of Artificial Sequence: Synthetic oligonucleotide
uuugguucaaauacaacau

SEQ ID NO: 1815554 - RNA, 19 nt, Artificial Sequence
  Description of Artificial Sequence: Synthetic oligonucleotide
aguaaugccuucuuggaca

SEQ ID NO: 1815555 - RNA, 19 nt, Artificial Sequence
  Description of Artificial Sequence: Synthetic oligonucleotide
ucagagauuaggaccuugg

SEQ ID NO: 1815556 - RNA, 19 nt, Artificial Sequence
  Description of Artificial Sequence: Synthetic oligonucleotide
ccagauuucgcaaagacag

SEQ ID NO: 1815557 - RNA, 19 nt, Artificial Sequence
  Description of Artificial Sequence: Synthetic oligonucleotide
aaugaugaagggccaagga

SEQ ID NO: 1815558 - RNA, 19 nt, Artificial Sequence
  Description of Artificial Sequence: Synthetic oligonucleotide
aagcagaaugauuaugagu

SEQ ID NO: 1815559 - RNA, 19 nt, Artificial Sequence
  Description of Artificial Sequence: Synthetic oligonucleotide
auuucgcaaagacaggaag

SEQ ID NO: 1815560 - RNA, 19 nt, Artificial Sequence
  Description of Artificial Sequence: Synthetic oligonucleotide
gaagaauccaaaagugggg

SEQ ID NO: 1815561 - RNA, 19 nt, Artificial Sequence
  Description of Artificial Sequence: Synthetic oligonucleotide
acuccugcaauauagggga

SEQ ID NO: 1815562 - RNA, 19 nt, Artificial Sequence
  Description of Artificial Sequence: Synthetic oligonucleotide
uucgcaaagacaggaaggg

SEQ ID NO: 1815563 - RNA, 19 nt, Artificial Sequence
  Description of Artificial Sequence: Synthetic oligonucleotide
gaaacuucuuccugccugg

SEQ ID NO: 1815564 - RNA, 19 nt, Artificial Sequence
  Description of Artificial Sequence: Synthetic oligonucleotide
aacagaggagguaagagga

SEQ ID NO: 1815565 - RNA, 19 nt, Artificial Sequence
  Description of Artificial Sequence: Synthetic oligonucleotide
aaccauuauccuccucagc

SEQ ID NO: 1815566 - RNA, 19 nt, Artificial Sequence
  Description of Artificial Sequence: Synthetic oligonucleotide
uuugaguggaaacuucuuc

SEQ ID NO: 1815567 - RNA, 19 nt, Artificial Sequence
  Description of Artificial Sequence: Synthetic oligonucleotide
cagguaucagaaaucaccc

SEQ ID NO: 1815568 - RNA, 19 nt, Artificial Sequence
  Description of Artificial Sequence: Synthetic oligonucleotide
ucuagaccaugguucagcg

SEQ ID NO: 1815569 - RNA, 19 nt, Artificial Sequence
  Description of Artificial Sequence: Synthetic oligonucleotide
caauauaggggaacagagg

SEQ ID NO: 1815570 - RNA, 19 nt, Artificial Sequence
  Description of Artificial Sequence: Synthetic oligonucleotide
aacauccuugcccagggcu

SEQ ID NO: 1815571 - RNA, 19 nt, Artificial Sequence
  Description of Artificial Sequence: Synthetic oligonucleotide
uuaucuagaccaugguuca

SEQ ID NO: 1815572 - RNA, 19 nt, Artificial Sequence
  Description of Artificial Sequence: Synthetic oligonucleotide
uaugaguuggaugaagaga

SEQ ID NO: 1815573 - RNA, 19 nt, Artificial Sequence
  Description of Artificial Sequence: Synthetic oligonucleotide
uuuuacuuuaaaacuguuu

SEQ ID NO: 1815574 - RNA, 19 nt, Artificial Sequence
  Description of Artificial Sequence: Synthetic oligonucleotide
uguguuucggcuacccugc

SEQ ID NO: 1815575 - RNA, 19 nt, Artificial Sequence
  Description of Artificial Sequence: Synthetic oligonucleotide
ucuuggacagagcagggcu

SEQ ID NO: 1815576 - RNA, 19 nt, Artificial Sequence
  Description of Artificial Sequence: Synthetic oligonucleotide
uacucauccuccuacuaag

SEQ ID NO: 1815577 - RNA, 19 nt, Artificial Sequence
  Description of Artificial Sequence: Synthetic oligonucleotide
agcagaaugauuaugaguu

SEQ ID NO: 1815578 - RNA, 19 nt, Artificial Sequence
  Description of Artificial Sequence: Synthetic oligonucleotide
uucuugccagccaaguggg

SEQ ID NO: 1815579 - RNA, 19 nt, Artificial Sequence
  Description of Artificial Sequence: Synthetic oligonucleotide
acaacugcuaggaaagugg

SEQ ID NO: 1815580 - RNA, 19 nt, Artificial Sequence
  Description of Artificial Sequence: Synthetic oligonucleotide
aaggguuucagggcaggcc

SEQ ID NO: 1815581 - RNA, 19 nt, Artificial Sequence
  Description of Artificial Sequence: Synthetic oligonucleotide
aguacugaugcuugaggag

SEQ ID NO: 1815582 - RNA, 19 nt, Artificial Sequence
  Description of Artificial Sequence: Synthetic oligonucleotide
agaucugagguacagguau

SEQ ID NO: 1815583 - RNA, 19 nt, Artificial Sequence
  Description of Artificial Sequence: Synthetic oligonucleotide
uuggaugaagagaucugag

SEQ ID NO: 1815584 - RNA, 19 nt, Artificial Sequence
  Description of Artificial Sequence: Synthetic oligonucleotide
uucagcgcgaguaaugccu

SEQ ID NO: 1815585 - RNA, 19 nt, Artificial Sequence
  Description of Artificial Sequence: Synthetic oligonucleotide
aacgugaggggacagcacu

SEQ ID NO: 1815586 - RNA, 19 nt, Artificial Sequence
  Description of Artificial Sequence: Synthetic oligonucleotide
aagaauccaaaagugggga

SEQ ID NO: 1815587 - RNA, 19 nt, Artificial Sequence
  Description of Artificial Sequence: Synthetic oligonucleotide
aggguuucagggcaggccg

SEQ ID NO: 1815588 - RNA, 19 nt, Artificial Sequence
  Description of Artificial Sequence: Synthetic oligonucleotide
agucucuccccaucaauac

SEQ ID NO: 1815589 - RNA, 19 nt, Artificial Sequence
  Description of Artificial Sequence: Synthetic oligonucleotide
guaguacugaugcuugagg

SEQ ID NO: 1815590 - RNA, 19 nt, Artificial Sequence
  Description of Artificial Sequence: Synthetic oligonucleotide
uaagaggaaggcagaagug

SEQ ID NO: 1815591 - RNA, 19 nt, Artificial Sequence
  Description of Artificial Sequence: Synthetic oligonucleotide
cacuccugcaauauagggg

SEQ ID NO: 1815592 - RNA, 19 nt, Artificial Sequence
  Description of Artificial Sequence: Synthetic oligonucleotide
cugccuacuucuuaagagg

SEQ ID NO: 1815593 - RNA, 19 nt, Artificial Sequence
  Description of Artificial Sequence: Synthetic oligonucleotide
ucggcuauccccaauuggu

SEQ ID NO: 1815594 - RNA, 19 nt, Artificial Sequence
  Description of Artificial Sequence: Synthetic oligonucleotide
cagggcaagagagaaaugg

SEQ ID NO: 1815595 - RNA, 19 nt, Artificial Sequence
  Description of Artificial Sequence: Synthetic oligonucleotide
acaacauccuugcccaggg

SEQ ID NO: 1815596 - RNA, 19 nt, Artificial Sequence
  Description of Artificial Sequence: Synthetic oligonucleotide
uuguccugagcccuaguag

SEQ ID NO: 1815597 - RNA, 19 nt, Artificial Sequence
  Description of Artificial Sequence: Synthetic oligonucleotide
uggucaguuaauaaauaau

SEQ ID NO: 1815598 - RNA, 19 nt, Artificial Sequence
  Description of Artificial Sequence: Synthetic oligonucleotide
ugccuacuucuuaagaggc

SEQ ID NO: 1815599 - RNA, 19 nt, Artificial Sequence
  Description of Artificial Sequence: Synthetic oligonucleotide
acacuccugcaauauaggg

SEQ ID NO: 1815600 - RNA, 19 nt, Artificial Sequence
  Description of Artificial Sequence: Synthetic oligonucleotide
uccacgcccacucuagggg

SEQ ID NO: 1815601 - RNA, 19 nt, Artificial Sequence
  Description of Artificial Sequence: Synthetic oligonucleotide
cagaaugauuaugaguugg

SEQ ID NO: 1815602 - RNA, 19 nt, Artificial Sequence
  Description of Artificial Sequence: Synthetic oligonucleotide
auucguguguuucggcuac

SEQ ID NO: 1815603 - RNA, 19 nt, Artificial Sequence
  Description of Artificial Sequence: Synthetic oligonucleotide
aauuggugaaggugugucu

SEQ ID NO: 1815604 - RNA, 19 nt, Artificial Sequence
  Description of Artificial Sequence: Synthetic oligonucleotide
aucuagaccaugguucagc

SEQ ID NO: 1815605 - RNA, 19 nt, Artificial Sequence
  Description of Artificial Sequence: Synthetic oligonucleotide
uacuaagagaagucucucc

SEQ ID NO: 1815606 - RNA, 19 nt, Artificial Sequence
  Description of Artificial Sequence: Synthetic oligonucleotide
ugucucaacacugccaccc

SEQ ID NO: 1815607 - RNA, 19 nt, Artificial Sequence
  Description of Artificial Sequence: Synthetic oligonucleotide
aaauuuugaguggaaacuu

SEQ ID NO: 1815608 - RNA, 19 nt, Artificial Sequence
  Description of Artificial Sequence: Synthetic oligonucleotide
gauuaugaguuggaugaag

SEQ ID NO: 1815609 - RNA, 19 nt, Artificial Sequence
  Description of Artificial Sequence: Synthetic oligonucleotide
ugcaauauaggggaacaga

SEQ ID NO: 1815610 - RNA, 19 nt, Artificial Sequence
  Description of Artificial Sequence: Synthetic oligonucleotide
uuugucuuuugguucaaau

SEQ ID NO: 1815611 - RNA, 19 nt, Artificial Sequence
  Description of Artificial Sequence: Synthetic oligonucleotide
aaaaguggggagccaccag

SEQ ID NO: 1815612 - RNA, 19 nt, Artificial Sequence
  Description of Artificial Sequence: Synthetic oligonucleotide
agaaaacccagggaaggac

SEQ ID NO: 1815613 - RNA, 19 nt, Artificial Sequence
  Description of Artificial Sequence: Synthetic oligonucleotide
guauguacagugcccaggc

SEQ ID NO: 1815614 - RNA, 19 nt, Artificial Sequence
  Description of Artificial Sequence: Synthetic oligonucleotide
gaaccauuauccuccucag

SEQ ID NO: 1815615 - RNA, 19 nt, Artificial Sequence
  Description of Artificial Sequence: Synthetic oligonucleotide
uugguucaaauacaacauc

SEQ ID NO: 1815616 - RNA, 19 nt, Artificial Sequence
  Description of Artificial Sequence: Synthetic oligonucleotide
agaauccaaaaguggggag

SEQ ID NO: 1815617 - RNA, 19 nt, Artificial Sequence
  Description of Artificial Sequence: Synthetic oligonucleotide
augaguuggaugaagagau

SEQ ID NO: 1815618 - RNA, 19 nt, Artificial Sequence
  Description of Artificial Sequence: Synthetic oligonucleotide
uugucuuuugguucaaaua

SEQ ID NO: 1815619 - RNA, 19 nt, Artificial Sequence
  Description of Artificial Sequence: Synthetic oligonucleotide
aaucacccuccuaucuucc

SEQ ID NO: 1815620 - RNA, 19 nt, Artificial Sequence
  Description of Artificial Sequence: Synthetic oligonucleotide
caccagagauccuggaugg

SEQ ID NO: 1815621 - RNA, 19 nt, Artificial Sequence
  Description of Artificial Sequence: Synthetic oligonucleotide
caucaauacaagccuggcc

SEQ ID NO: 1815622 - RNA, 19 nt, Artificial Sequence
  Description of Artificial Sequence: Synthetic oligonucleotide
gugacuuguucccugggag

SEQ ID NO: 1815623 - RNA, 19 nt, Artificial Sequence
  Description of Artificial Sequence: Synthetic oligonucleotide
uccuacuaagagaagucuc

SEQ ID NO: 1815624 - RNA, 19 nt, Artificial Sequence
  Description of Artificial Sequence: Synthetic oligonucleotide
aaggacaggcugucucaac

SEQ ID NO: 1815625 - RNA, 19 nt, Artificial Sequence
  Description of Artificial Sequence: Synthetic oligonucleotide
uucaaaugagcuccaggau

SEQ ID NO: 1815626 - RNA, 19 nt, Artificial Sequence
  Description of Artificial Sequence: Synthetic oligonucleotide
aauucguguguuucggcua

SEQ ID NO: 1815627 - RNA, 19 nt, Artificial Sequence
  Description of Artificial Sequence: Synthetic oligonucleotide
ugaugcuugaggaguuuca

SEQ ID NO: 1815628 - RNA, 19 nt, Artificial Sequence
  Description of Artificial Sequence: Synthetic oligonucleotide
caaaccucagagauuagga

SEQ ID NO: 1815629 - RNA, 19 nt, Artificial Sequence
  Description of Artificial Sequence: Synthetic oligonucleotide
auuaugaguuggaugaaga

SEQ ID NO: 1815630 - RNA, 19 nt, Artificial Sequence
  Description of Artificial Sequence: Synthetic oligonucleotide
gagaaggcagaaaacccag

SEQ ID NO: 1815631 - RNA, 19 nt, Artificial Sequence
  Description of Artificial Sequence: Synthetic oligonucleotide
agugccuuauugcccacag

SEQ ID NO: 1815632 - RNA, 19 nt, Artificial Sequence
  Description of Artificial Sequence: Synthetic oligonucleotide
acacacuccugcaauauag

SEQ ID NO: 1815633 - RNA, 19 nt, Artificial Sequence
  Description of Artificial Sequence: Synthetic oligonucleotide
agggcaagagagaaauggc

SEQ ID NO: 1815634 - RNA, 19 nt, Artificial Sequence
  Description of Artificial Sequence: Synthetic oligonucleotide
aacuggcacuaugagaaug

SEQ ID NO: 1815635 - RNA, 19 nt, Artificial Sequence
  Description of Artificial Sequence: Synthetic oligonucleotide
guaagaggaaggcagaagu

SEQ ID NO: 1815636 - RNA, 19 nt, Artificial Sequence
  Description of Artificial Sequence: Synthetic oligonucleotide
agauuucgcaaagacagga

SEQ ID NO: 1815637 - RNA, 19 nt, Artificial Sequence
  Description of Artificial Sequence: Synthetic oligonucleotide
cauccuccuacuaagagaa

SEQ ID NO: 1815638 - RNA, 19 nt, Artificial Sequence
  Description of Artificial Sequence: Synthetic oligonucleotide
ugacuuguucccugggagc

SEQ ID NO: 1815639 - RNA, 19 nt, Artificial Sequence
  Description of Artificial Sequence: Synthetic oligonucleotide
agcuuuggcaucuacucau

SEQ ID NO: 1815640 - RNA, 19 nt, Artificial Sequence
  Description of Artificial Sequence: Synthetic oligonucleotide
uauccugccuacuucuuaa

SEQ ID NO: 1815641 - RNA, 19 nt, Artificial Sequence
  Description of Artificial Sequence: Synthetic oligonucleotide
aguaguacugaugcuugag

SEQ ID NO: 1815642 - RNA, 19 nt, Artificial Sequence
  Description of Artificial Sequence: Synthetic oligonucleotide
gaguaaugccuucuuggac

SEQ ID NO: 1815643 - RNA, 19 nt, Artificial Sequence
  Description of Artificial Sequence: Synthetic oligonucleotide
auuggugaaggugugucug

SEQ ID NO: 1815644 - RNA, 19 nt, Artificial Sequence
  Description of Artificial Sequence: Synthetic oligonucleotide
cuuauugcccacagcuuug

SEQ ID NO: 1815645 - RNA, 19 nt, Artificial Sequence
  Description of Artificial Sequence: Synthetic oligonucleotide
uugaggaguuucagggcag

SEQ ID NO: 1815646 - RNA, 19 nt, Artificial Sequence
  Description of Artificial Sequence: Synthetic oligonucleotide
auacaagccuggccucucc

SEQ ID NO: 1815647 - RNA, 19 nt, Artificial Sequence
  Description of Artificial Sequence: Synthetic oligonucleotide
uccuccuacuaagagaagu

SEQ ID NO: 1815648 - RNA, 19 nt, Artificial Sequence
  Description of Artificial Sequence: Synthetic oligonucleotide
caucuacucauccuccuac

SEQ ID NO: 1815649 - RNA, 19 nt, Artificial Sequence
  Description of Artificial Sequence: Synthetic oligonucleotide
ucacacuuccauagaacaa

SEQ ID NO: 1815650 - RNA, 19 nt, Artificial Sequence
  Description of Artificial Sequence: Synthetic oligonucleotide
ugggcuagagucugucucc

SEQ ID NO: 1815651 - RNA, 19 nt, Artificial Sequence
  Description of Artificial Sequence: Synthetic oligonucleotide
gaugaagagaucugaggua

SEQ ID NO: 1815652 - RNA, 19 nt, Artificial Sequence
  Description of Artificial Sequence: Synthetic oligonucleotide
cacacuccugcaauauagg

SEQ ID NO: 1815653 - RNA, 19 nt, Artificial Sequence
  Description of Artificial Sequence: Synthetic oligonucleotide
uuauugcccacagcuuugg

SEQ ID NO: 1815654 - RNA, 19 nt, Artificial Sequence
  Description of Artificial Sequence: Synthetic oligonucleotide
aguuucuccaccagagauc

SEQ ID NO: 1815655 - RNA, 19 nt, Artificial Sequence
  Description of Artificial Sequence: Synthetic oligonucleotide
ggaacuggcacuaugagaa

SEQ ID NO: 1815656 - RNA, 19 nt, Artificial Sequence
  Description of Artificial Sequence: Synthetic oligonucleotide
aucacccuccuaucuuccc

SEQ ID NO: 1815657 - RNA, 19 nt, Artificial Sequence
  Description of Artificial Sequence: Synthetic oligonucleotide
acgguggucaguuaauaaa

SEQ ID NO: 1815658 - RNA, 19 nt, Artificial Sequence
  Description of Artificial Sequence: Synthetic oligonucleotide
uccuaucuucccacaacug

SEQ ID NO: 1815659 - RNA, 19 nt, Artificial Sequence
  Description of Artificial Sequence: Synthetic oligonucleotide
ucuccccaucaauacaagc

SEQ ID NO: 1815660 - RNA, 19 nt, Artificial Sequence
  Description of Artificial Sequence: Synthetic oligonucleotide
aaguggggaauucgugugu

SEQ ID NO: 1815661 - RNA, 19 nt, Artificial Sequence
  Description of Artificial Sequence: Synthetic oligonucleotide
gcucaucacacuuccauag

SEQ ID NO: 1815662 - RNA, 19 nt, Artificial Sequence
  Description of Artificial Sequence: Synthetic oligonucleotide
gggaagaauccaaaagugg

SEQ ID NO: 1815663 - RNA, 19 nt, Artificial Sequence
  Description of Artificial Sequence: Synthetic oligonucleotide
cugguucacucccugaaug

SEQ ID NO: 1815664 - RNA, 19 nt, Artificial Sequence
  Description of Artificial Sequence: Synthetic oligonucleotide
ggaguuucagggcagcacc

SEQ ID NO: 1815665 - RNA, 19 nt, Artificial Sequence
  Description of Artificial Sequence: Synthetic oligonucleotide
gaguggaaacuucuuccug

SEQ ID NO: 1815666 - RNA, 19 nt, Artificial Sequence
  Description of Artificial Sequence: Synthetic oligonucleotide
uccucaaaacucuggugac

SEQ ID NO: 1815667 - RNA, 19 nt, Artificial Sequence
  Description of Artificial Sequence: Synthetic oligonucleotide
caccucuuaagagacacac

SEQ ID NO: 1815668 - RNA, 19 nt, Artificial Sequence
  Description of Artificial Sequence: Synthetic oligonucleotide
ugguucacucccugaauga

SEQ ID NO: 1815669 - RNA, 19 nt, Artificial Sequence
  Description of Artificial Sequence: Synthetic oligonucleotide
cagauuucgcaaagacagg

SEQ ID NO: 1815670 - RNA, 19 nt, Artificial Sequence
  Description of Artificial Sequence: Synthetic oligonucleotide
uccccaauuggugaaggug

SEQ ID NO: 1815671 - RNA, 19 nt, Artificial Sequence
  Description of Artificial Sequence: Synthetic oligonucleotide
ugguucagcgcgaguaaug

SEQ ID NO: 1815672 - RNA, 19 nt, Artificial Sequence
  Description of Artificial Sequence: Synthetic oligonucleotide
gaguggggcagguauguac

SEQ ID NO: 1815673 - RNA, 19 nt, Artificial Sequence
  Description of Artificial Sequence: Synthetic oligonucleotide
uggcaucuacucauccucc

SEQ ID NO: 1815674 - RNA, 19 nt, Artificial Sequence
  Description of Artificial Sequence: Synthetic oligonucleotide
guuucggcuacccugcaga

SEQ ID NO: 1815675 - RNA, 19 nt, Artificial Sequence
  Description of Artificial Sequence: Synthetic oligonucleotide
uacagguaucagaaaucac

SEQ ID NO: 1815676 - RNA, 19 nt, Artificial Sequence
  Description of Artificial Sequence: Synthetic oligonucleotide
uguuucggcuacccugcag

SEQ ID NO: 1815677 - RNA, 19 nt, Artificial Sequence
  Description of Artificial Sequence: Synthetic oligonucleotide
gcaagagagaaauggcaag

SEQ ID NO: 1815678 - RNA, 19 nt, Artificial Sequence
  Description of Artificial Sequence: Synthetic oligonucleotide
gcuaggaaaguggagcugg

SEQ ID NO: 1815679 - RNA, 19 nt, Artificial Sequence
  Description of Artificial Sequence: Synthetic oligonucleotide
uccugccuacuucuuaaga

SEQ ID NO: 1815680 - RNA, 19 nt, Artificial Sequence
  Description of Artificial Sequence: Synthetic oligonucleotide
cagagauuaggaccuuggc

SEQ ID NO: 1815681 - RNA, 19 nt, Artificial Sequence
  Description of Artificial Sequence: Synthetic oligonucleotide
cucggcuauccccaauugg

SEQ ID NO: 1815682 - RNA, 19 nt, Artificial Sequence
  Description of Artificial Sequence: Synthetic oligonucleotide
guggucaguuaauaaauaa

SEQ ID NO: 1815683 - RNA, 19 nt, Artificial Sequence
  Description of Artificial Sequence: Synthetic oligonucleotide
ucuaggggccagauuucgc

SEQ ID NO: 1815684 - RNA, 19 nt, Artificial Sequence
  Description of Artificial Sequence: Synthetic oligonucleotide
cuaggaaaguggagcuggg

SEQ ID NO: 1815685 - RNA, 19 nt, Artificial Sequence
  Description of Artificial Sequence: Synthetic oligonucleotide
uucccugggagcugguuca

SEQ ID NO: 1815686 - RNA, 19 nt, Artificial Sequence
  Description of Artificial Sequence: Synthetic oligonucleotide
cacuuccauagaacaaacc

SEQ ID NO: 1815687 - RNA, 19 nt, Artificial Sequence
  Description of Artificial Sequence: Synthetic oligonucleotide
ucaaaacucuggugacuug

SEQ ID NO: 1815688 - RNA, 19 nt, Artificial Sequence
  Description of Artificial Sequence: Synthetic oligonucleotide
uggcacuaugagaauggga

SEQ ID NO: 1815689 - RNA, 19 nt, Artificial Sequence
  Description of Artificial Sequence: Synthetic oligonucleotide
caacacugccacccuaucc

SEQ ID NO: 1815690 - RNA, 19 nt, Artificial Sequence
  Description of Artificial Sequence: Synthetic oligonucleotide
uuucggcuacccugcagag

SEQ ID NO: 1815691 - RNA, 19 nt, Artificial Sequence
  Description of Artificial Sequence: Synthetic oligonucleotide
ggcacuaugagaaugggaa

SEQ ID NO: 1815692 - RNA, 19 nt, Artificial Sequence
  Description of Artificial Sequence: Synthetic oligonucleotide
gugaaggugugucuggguc

SEQ ID NO: 1815693 - RNA, 19 nt, Artificial Sequence
  Description of Artificial Sequence: Synthetic oligonucleotide
ucuacucauccuccuacua

SEQ ID NO: 1815694 - RNA, 19 nt, Artificial Sequence
  Description of Artificial Sequence: Synthetic oligonucleotide
gaauucguguguuucggcu

SEQ ID NO: 1815695 - RNA, 19 nt, Artificial Sequence
  Description of Artificial Sequence: Synthetic oligonucleotide
acccuauccugccuacuuc

SEQ ID NO: 1815696 - RNA, 19 nt, Artificial Sequence
  Description of Artificial Sequence: Synthetic oligonucleotide
uccaaaaguggggagccac

SEQ ID NO: 1815697 - RNA, 19 nt, Artificial Sequence
  Description of Artificial Sequence: Synthetic oligonucleotide
ucgcaaagacaggaagggg

SEQ ID NO: 1815698 - RNA, 19 nt, Artificial Sequence
  Description of Artificial Sequence: Synthetic oligonucleotide
ccugccuacuucuuaagag

SEQ ID NO: 1815699 - RNA, 19 nt, Artificial Sequence
  Description of Artificial Sequence: Synthetic oligonucleotide
uggugaaggugugucuggg

SEQ ID NO: 1815700 - RNA, 19 nt, Artificial Sequence
  Description of Artificial Sequence: Synthetic oligonucleotide
cuggagauucaaaugagcu

SEQ ID NO: 1815701 - RNA, 19 nt, Artificial Sequence
  Description of Artificial Sequence: Synthetic oligonucleotide
ugugggccuuaucuagacc

SEQ ID NO: 1815702 - RNA, 19 nt, Artificial Sequence
  Description of Artificial Sequence: Synthetic oligonucleotide
aucuucccacaacugcuag

SEQ ID NO: 1815703 - RNA, 19 nt, Artificial Sequence
  Description of Artificial Sequence: Synthetic oligonucleotide
cccacaacugcuaggaaag

SEQ ID NO: 1815704 - RNA, 19 nt, Artificial Sequence
  Description of Artificial Sequence: Synthetic oligonucleotide
aagagaagucucuccccau

SEQ ID NO: 1815705 - RNA, 19 nt, Artificial Sequence
  Description of Artificial Sequence: Synthetic oligonucleotide
uaucuucccacaacugcua

SEQ ID NO: 1815706 - RNA, 19 nt, Artificial Sequence
  Description of Artificial Sequence: Synthetic oligonucleotide
ugggguaagcagaaugauu

SEQ ID NO: 1815707 - RNA, 19 nt, Artificial Sequence
  Description of Artificial Sequence: Synthetic oligonucleotide
cuagagucugucuccucac

SEQ ID NO: 1815708 - RNA, 19 nt, Artificial Sequence
  Description of Artificial Sequence: Synthetic oligonucleotide
gaagugggcagggcaagag

SEQ ID NO: 1815709 - RNA, 19 nt, Artificial Sequence
  Description of Artificial Sequence: Synthetic oligonucleotide
cagggcagcaccucuuaag

SEQ ID NO: 1815710 - RNA, 19 nt, Artificial Sequence
  Description of Artificial Sequence: Synthetic oligonucleotide
cugggcuagagucugucuc

SEQ ID NO: 1815711 - RNA, 19 nt, Artificial Sequence
  Description of Artificial Sequence: Synthetic oligonucleotide
gagaaugggaagaauccaa

SEQ ID NO: 1815712 - RNA, 19 nt, Artificial Sequence
  Description of Artificial Sequence: Synthetic oligonucleotide
cuuguucccugggagcugg

SEQ ID NO: 1815713 - RNA, 19 nt, Artificial Sequence
  Description of Artificial Sequence: Synthetic oligonucleotide
uccaccagagauccuggau

SEQ ID NO: 1815714 - RNA, 19 nt, Artificial Sequence
  Description of Artificial Sequence: Synthetic oligonucleotide
ggggaauucguguguuucg

SEQ ID NO: 1815715 - RNA, 19 nt, Artificial Sequence
  Description of Artificial Sequence: Synthetic oligonucleotide
agguaucagaaaucacccu

SEQ ID NO: 1815716 - RNA, 19 nt, Artificial Sequence
  Description of Artificial Sequence: Synthetic oligonucleotide
cuccacgcccacucuaggg

SEQ ID NO: 1815717 - RNA, 19 nt, Artificial Sequence
  Description of Artificial Sequence: Synthetic oligonucleotide
cacuaugagaaugggaaga

SEQ ID NO: 1815718 - RNA, 19 nt, Artificial Sequence
  Description of Artificial Sequence: Synthetic oligonucleotide
guucacucccugaaugaag

SEQ ID NO: 1815719 - RNA, 19 nt, Artificial Sequence
  Description of Artificial Sequence: Synthetic oligonucleotide
gaugagguucccuccagcu

SEQ ID NO: 1815720 - RNA, 19 nt, Artificial Sequence
  Description of Artificial Sequence: Synthetic oligonucleotide
gaugaguggggcagguaug

SEQ ID NO: 1815721 - RNA, 19 nt, Artificial Sequence
  Description of Artificial Sequence: Synthetic oligonucleotide
ggggcagguauguacagug

SEQ ID NO: 1815722 - RNA, 19 nt, Artificial Sequence
  Description of Artificial Sequence: Synthetic oligonucleotide
cacaacugcuaggaaagug

SEQ ID NO: 1815723 - RNA, 19 nt, Artificial Sequence
  Description of Artificial Sequence: Synthetic oligonucleotide
ugucaggcaguuucuccac

SEQ ID NO: 1815724 - RNA, 19 nt, Artificial Sequence
  Description of Artificial Sequence: Synthetic oligonucleotide
uggggaauucguguguuuc

SEQ ID NO: 1815725 - RNA, 19 nt, Artificial Sequence
  Description of Artificial Sequence: Synthetic oligonucleotide
ugaguuggaugaagagauc

SEQ ID NO: 1815726 - RNA, 19 nt, Artificial Sequence
  Description of Artificial Sequence: Synthetic oligonucleotide
gguaagcagaaugauuaug

SEQ ID NO: 1815727 - RNA, 19 nt, Artificial Sequence
  Description of Artificial Sequence: Synthetic oligonucleotide
cuagaccaugguucagcgc

SEQ ID NO: 1815728 - RNA, 19 nt, Artificial Sequence
  Description of Artificial Sequence: Synthetic oligonucleotide
auagaaccauuauccuccu

SEQ ID NO: 1815729 - RNA, 19 nt, Artificial Sequence
  Description of Artificial Sequence: Synthetic oligonucleotide
ggccuuaucuagaccaugg

SEQ ID NO: 1815730 - RNA, 19 nt, Artificial Sequence
  Description of Artificial Sequence: Synthetic oligonucleotide
cuaucuucccacaacugcu

SEQ ID NO: 1815731 - RNA, 19 nt, Artificial Sequence
  Description of Artificial Sequence: Synthetic oligonucleotide
aguuucagggcagcaccuc

SEQ ID NO: 1815732 - RNA, 19 nt, Artificial Sequence
  Description of Artificial Sequence: Synthetic oligonucleotide
acaugcacuggaguggaga

SEQ ID NO: 1815733 - RNA, 19 nt, Artificial Sequence
  Description of Artificial Sequence: Synthetic oligonucleotide
cucuaggggccagauuucg

SEQ ID NO: 1815734 - RNA, 19 nt, Artificial Sequence
  Description of Artificial Sequence: Synthetic oligonucleotide
uccugcaauauaggggaac

SEQ ID NO: 1815735 - RNA, 19 nt, Artificial Sequence
  Description of Artificial Sequence: Synthetic oligonucleotide
ggcagcaccucuuaagaga

SEQ ID NO: 1815736 - RNA, 19 nt, Artificial Sequence
  Description of Artificial Sequence: Synthetic oligonucleotide
ugagcccuaguaguacuga

SEQ ID NO: 1815737 - RNA, 19 nt, Artificial Sequence
  Description of Artificial Sequence: Synthetic oligonucleotide
ccuggagauucaaaugagc

SEQ ID NO: 1815738 - RNA, 19 nt, Artificial Sequence
  Description of Artificial Sequence: Synthetic oligonucleotide
acaggcugucucaacacug

SEQ ID NO: 1815739 - RNA, 19 nt, Artificial Sequence
  Description of Artificial Sequence: Synthetic oligonucleotide
agauucaaaugagcuccag

SEQ ID NO: 1815740 - RNA, 19 nt, Artificial Sequence
  Description of Artificial Sequence: Synthetic oligonucleotide
agaaugggaagaauccaaa

SEQ ID NO: 1815741 - RNA, 19 nt, Artificial Sequence
  Description of Artificial Sequence: Synthetic oligonucleotide
guucagcgcgaguaaugcc

SEQ ID NO: 1815742 - RNA, 19 nt, Artificial Sequence
  Description of Artificial Sequence: Synthetic oligonucleotide
gggaauucguguguuucgg

SEQ ID NO: 1815743 - RNA, 19 nt, Artificial Sequence
  Description of Artificial Sequence: Synthetic oligonucleotide
aggggaacagaggagguaa

SEQ ID NO: 1815744 - RNA, 19 nt, Artificial Sequence
  Description of Artificial Sequence: Synthetic oligonucleotide
gggguaagcagaaugauua

SEQ ID NO: 1815745 - RNA, 19 nt, Artificial Sequence
  Description of Artificial Sequence: Synthetic oligonucleotide
gguaagaggaaggcagaag

SEQ ID NO: 1815746 - RNA, 19 nt, Artificial Sequence
  Description of Artificial Sequence: Synthetic oligonucleotide
uugccagccaaguggggaa

SEQ ID NO: 1815747 - RNA, 19 nt, Artificial Sequence
  Description of Artificial Sequence: Synthetic oligonucleotide
gucuuuugguucaaauaca

SEQ ID NO: 1815748 - RNA, 19 nt, Artificial Sequence
  Description of Artificial Sequence: Synthetic oligonucleotide
aucugagguacagguauca

SEQ ID NO: 1815749 - RNA, 19 nt, Artificial Sequence
  Description of Artificial Sequence: Synthetic oligonucleotide
gguucagcgcgaguaaugc

SEQ ID NO: 1815750 - RNA, 19 nt, Artificial Sequence
  Description of Artificial Sequence: Synthetic oligonucleotide
ugggucuggggaacuggca

SEQ ID NO: 1815751 - RNA, 19 nt, Artificial Sequence
  Description of Artificial Sequence: Synthetic oligonucleotide
cuacucauccuccuacuaa

SEQ ID NO: 1815752 - RNA, 19 nt, Artificial Sequence
  Description of Artificial Sequence: Synthetic oligonucleotide
agcucaucacacuuccaua

SEQ ID NO: 1815753 - RNA, 19 nt, Artificial Sequence
  Description of Artificial Sequence: Synthetic oligonucleotide
ugacuguggcucccauagc

SEQ ID NO: 1815754 - RNA, 19 nt, Artificial Sequence
  Description of Artificial Sequence: Synthetic oligonucleotide
gauuaggaccuuggcccag

SEQ ID NO: 1815755 - RNA, 19 nt, Artificial Sequence
  Description of Artificial Sequence: Synthetic oligonucleotide
acaagagcccugugucaug

SEQ ID NO: 1815756 - RNA, 19 nt, Artificial Sequence
  Description of Artificial Sequence: Synthetic oligonucleotide
gugucaugacuguggcucc

SEQ ID NO: 1815757 - RNA, 19 nt, Artificial Sequence
  Description of Artificial Sequence: Synthetic oligonucleotide
uucagggcagcaccucuua

SEQ ID NO: 1815758 - RNA, 19 nt, Artificial Sequence
  Description of Artificial Sequence: Synthetic oligonucleotide
gauuucgcaaagacaggaa

SEQ ID NO: 1815759 - RNA, 19 nt, Artificial Sequence
  Description of Artificial Sequence: Synthetic oligonucleotide
cacucuaggggccagauuu

SEQ ID NO: 1815760 - RNA, 19 nt, Artificial Sequence
  Description of Artificial Sequence: Synthetic oligonucleotide
uaggaaaguggagcuggga

SEQ ID NO: 1815761 - RNA, 19 nt, Artificial Sequence
  Description of Artificial Sequence: Synthetic oligonucleotide
augaguggggcagguaugu

SEQ ID NO: 1815762 - RNA, 19 nt, Artificial Sequence
  Description of Artificial Sequence: Synthetic oligonucleotide
agaagucucuccccaucaa

SEQ ID NO: 1815763 - RNA, 19 nt, Artificial Sequence
  Description of Artificial Sequence: Synthetic oligonucleotide
uaggaccuuggcccagucu

SEQ ID NO: 1815764 - RNA, 19 nt, Artificial Sequence
  Description of Artificial Sequence: Synthetic oligonucleotide
ucguguguuucggcuaccc

SEQ ID NO: 1815765 - RNA, 19 nt, Artificial Sequence
  Description of Artificial Sequence: Synthetic oligonucleotide
ggaauucguguguuucggc

SEQ ID NO: 1815766 - RNA, 19 nt, Artificial Sequence
  Description of Artificial Sequence: Synthetic oligonucleotide
gcagaaugauuaugaguug

SEQ ID NO: 1815767 - RNA, 19 nt, Artificial Sequence
  Description of Artificial Sequence: Synthetic oligonucleotide
ugucaugacuguggcuccc

SEQ ID NO: 1815768 - RNA, 19 nt, Artificial Sequence
  Description of Artificial Sequence: Synthetic oligonucleotide
cagagcucggcuaucccca

SEQ ID NO: 1815769 - RNA, 19 nt, Artificial Sequence
  Description of Artificial Sequence: Synthetic oligonucleotide
aacaaaccucagagauuag

SEQ ID NO: 1815770 - RNA, 19 nt, Artificial Sequence
  Description of Artificial Sequence: Synthetic oligonucleotide
guuguccugagcccuagua

SEQ ID NO: 1815771 - RNA, 19 nt, Artificial Sequence
  Description of Artificial Sequence: Synthetic oligonucleotide
cagccaaguggggaauucg

SEQ ID NO: 1815772 - RNA, 19 nt, Artificial Sequence
  Description of Artificial Sequence: Synthetic oligonucleotide
cacuggaguggagagggug

SEQ ID NO: 1815773 - RNA, 19 nt, Artificial Sequence
  Description of Artificial Sequence: Synthetic oligonucleotide
cuggggaacuggcacuaug

SEQ ID NO: 1815774 - RNA, 19 nt, Artificial Sequence
  Description of Artificial Sequence: Synthetic oligonucleotide
agcccuaguaguacugaug

SEQ ID NO: 1815775 - RNA, 19 nt, Artificial Sequence
  Description of Artificial Sequence: Synthetic oligonucleotide
ucagcgcgaguaaugccuu

SEQ ID NO: 1815776 - RNA, 19 nt, Artificial Sequence
  Description of Artificial Sequence: Synthetic oligonucleotide
ucagggcagcaccucuuaa

SEQ ID NO: 1815777 - RNA, 19 nt, Artificial Sequence
  Description of Artificial Sequence: Synthetic oligonucleotide
cuauccccaauuggugaag

SEQ ID NO: 1815778 - RNA, 19 nt, Artificial Sequence
  Description of Artificial Sequence: Synthetic oligonucleotide
agcucggcuauccccaauu

SEQ ID NO: 1815779 - RNA, 19 nt, Artificial Sequence
  Description of Artificial Sequence: Synthetic oligonucleotide
caggcaguuucuccaccag

SEQ ID NO: 1815780 - RNA, 19 nt, Artificial Sequence
  Description of Artificial Sequence: Synthetic oligonucleotide
cucagagauuaggaccuug

SEQ ID NO: 1815781 - RNA, 19 nt, Artificial Sequence
  Description of Artificial Sequence: Synthetic oligonucleotide
uccucaccaauagaaccau

SEQ ID NO: 1815782 - RNA, 19 nt, Artificial Sequence
  Description of Artificial Sequence: Synthetic oligonucleotide
gggaacuggcacuaugaga

SEQ ID NO: 1815783 - RNA, 19 nt, Artificial Sequence
  Description of Artificial Sequence: Synthetic oligonucleotide
cugucucaacacugccacc

SEQ ID NO: 1815784 - RNA, 19 nt, Artificial Sequence
  Description of Artificial Sequence: Synthetic oligonucleotide
cucaucacacuuccauaga

SEQ ID NO: 1815785 - RNA, 19 nt, Artificial Sequence
  Description of Artificial Sequence: Synthetic oligonucleotide
gagacacacuccugcaaua

SEQ ID NO: 1815786 - RNA, 19 nt, Artificial Sequence
  Description of Artificial Sequence: Synthetic oligonucleotide
aagugccuuauugcccaca

SEQ ID NO: 1815787 - RNA, 19 nt, Artificial Sequence
  Description of Artificial Sequence: Synthetic oligonucleotide
uuaggaccuuggcccaguc

SEQ ID NO: 1815788 - RNA, 19 nt, Artificial Sequence
  Description of Artificial Sequence: Synthetic oligonucleotide
gagauucaaaugagcucca

SEQ ID NO: 1815789 - RNA, 19 nt, Artificial Sequence
  Description of Artificial Sequence: Synthetic oligonucleotide
gacacacuccugcaauaua

SEQ ID NO: 1815790 - RNA, 19 nt, Artificial Sequence
  Description of Artificial Sequence: Synthetic oligonucleotide
auaggggaacagaggaggu

SEQ ID NO: 1815791 - RNA, 19 nt, Artificial Sequence
  Description of Artificial Sequence: Synthetic oligonucleotide
aagccuggccucuccucaa

SEQ ID NO: 1815792 - RNA, 19 nt, Artificial Sequence
  Description of Artificial Sequence: Synthetic oligonucleotide
ggcaagagagaaauggcaa

SEQ ID NO: 1815793 - RNA, 19 nt, Artificial Sequence
  Description of Artificial Sequence: Synthetic oligonucleotide
gacuuguucccugggagcu

SEQ ID NO: 1815794 - RNA, 19 nt, Artificial Sequence
  Description of Artificial Sequence: Synthetic oligonucleotide
ugccacccuauccugccua

SEQ ID NO: 1815795 - RNA, 19 nt, Artificial Sequence
  Description of Artificial Sequence: Synthetic oligonucleotide
cacgcccacucuaggggcc

SEQ ID NO: 1815796 - RNA, 19 nt, Artificial Sequence
  Description of Artificial Sequence: Synthetic oligonucleotide
agcugggaacgugagggga

SEQ ID NO: 1815797 - RNA, 19 nt, Artificial Sequence
  Description of Artificial Sequence: Synthetic oligonucleotide
ggacaggcugucucaacac

SEQ ID NO: 1815798 - RNA, 19 nt, Artificial Sequence
  Description of Artificial Sequence: Synthetic oligonucleotide
gaguggagagggugugaca

SEQ ID NO: 1815799 - RNA, 19 nt, Artificial Sequence
  Description of Artificial Sequence: Synthetic oligonucleotide
agcgcgaguaaugccuucu

SEQ ID NO: 1815800 - RNA, 19 nt, Artificial Sequence
  Description of Artificial Sequence: Synthetic oligonucleotide
ggugacuuguucccuggga

SEQ ID NO: 1815801 - RNA, 19 nt, Artificial Sequence
  Description of Artificial Sequence: Synthetic oligonucleotide
cuccuaucuucccacaacu

SEQ ID NO: 1815802 - RNA, 19 nt, Artificial Sequence
  Description of Artificial Sequence: Synthetic oligonucleotide
ggaacgugaggggacagca

SEQ ID NO: 1815803 - RNA, 19 nt, Artificial Sequence
  Description of Artificial Sequence: Synthetic oligonucleotide
cuacccugcagagcucggc

SEQ ID NO: 1815804 - RNA, 19 nt, Artificial Sequence
  Description of Artificial Sequence: Synthetic oligonucleotide
agccaaguggggaauucgu

SEQ ID NO: 1815805 - RNA, 19 nt, Artificial Sequence
  Description of Artificial Sequence: Synthetic oligonucleotide
uucccacaacugcuaggaa

SEQ ID NO: 1815806 - RNA, 19 nt, Artificial Sequence
  Description of Artificial Sequence: Synthetic oligonucleotide
cccuggagauucaaaugag

SEQ ID NO: 1815807 - RNA, 19 nt, Artificial Sequence
  Description of Artificial Sequence: Synthetic oligonucleotide
gaccaugguucagcgcgag

SEQ ID NO: 1815808 - RNA, 19 nt, Artificial Sequence
  Description of Artificial Sequence: Synthetic oligonucleotide
gaacgugaggggacagcac

SEQ ID NO: 1815809 - RNA, 19 nt, Artificial Sequence
  Description of Artificial Sequence: Synthetic oligonucleotide
gaaauggcaagugccuuau

SEQ ID NO: 1815810 - RNA, 19 nt, Artificial Sequence
  Description of Artificial Sequence: Synthetic oligonucleotide
aggggccagauuucgcaaa

SEQ ID NO: 1815811 - RNA, 19 nt, Artificial Sequence
  Description of Artificial Sequence: Synthetic oligonucleotide
caugguucagcgcgaguaa

SEQ ID NO: 1815812 - RNA, 19 nt, Artificial Sequence
  Description of Artificial Sequence: Synthetic oligonucleotide
uaggggaacagaggaggua

SEQ ID NO: 1815813 - RNA, 19 nt, Artificial Sequence
  Description of Artificial Sequence: Synthetic oligonucleotide
ugggaacgugaggggacag

SEQ ID NO: 1815814 - RNA, 19 nt, Artificial Sequence
  Description of Artificial Sequence: Synthetic oligonucleotide
uggaguggagaggguguga

SEQ ID NO: 1815815 - RNA, 19 nt, Artificial Sequence
  Description of Artificial Sequence: Synthetic oligonucleotide
gaaggacaggcugucucaa

SEQ ID NO: 1815816 - RNA, 19 nt, Artificial Sequence
  Description of Artificial Sequence: Synthetic oligonucleotide
cuggccucuccucaaaacu

SEQ ID NO: 1815817 - RNA, 19 nt, Artificial Sequence
  Description of Artificial Sequence: Synthetic oligonucleotide
cuggaguggagagggugug

SEQ ID NO: 1815818 - RNA, 19 nt, Artificial Sequence
  Description of Artificial Sequence: Synthetic oligonucleotide
aguggggaauucguguguu

SEQ ID NO: 1815819 - RNA, 19 nt, Artificial Sequence
  Description of Artificial Sequence: Synthetic oligonucleotide
aguuguccugagcccuagu

SEQ ID NO: 1815820 - RNA, 19 nt, Artificial Sequence
  Description of Artificial Sequence: Synthetic oligonucleotide
aggccggccacggugguca

SEQ ID NO: 1815821 - RNA, 19 nt, Artificial Sequence
  Description of Artificial Sequence: Synthetic oligonucleotide
cuauccugccuacuucuua

SEQ ID NO: 1815822 - RNA, 19 nt, Artificial Sequence
  Description of Artificial Sequence: Synthetic oligonucleotide
cugcuaggaaaguggagcu

SEQ ID NO: 1815823 - RNA, 19 nt, Artificial Sequence
  Description of Artificial Sequence: Synthetic oligonucleotide
ggaugaguggggcagguau

SEQ ID NO: 1815824 - RNA, 19 nt, Artificial Sequence
  Description of Artificial Sequence: Synthetic oligonucleotide
gagaucugagguacaggua

SEQ ID NO: 1815825 - RNA, 19 nt, Artificial Sequence
  Description of Artificial Sequence: Synthetic oligonucleotide
ucaggcugugggccuuauc

SEQ ID NO: 1815826 - RNA, 19 nt, Artificial Sequence
  Description of Artificial Sequence: Synthetic oligonucleotide
augguucagcgcgaguaau

SEQ ID NO: 1815827 - RNA, 19 nt, Artificial Sequence
  Description of Artificial Sequence: Synthetic oligonucleotide
uucguguguuucggcuacc

SEQ ID NO: 1815828 - RNA, 19 nt, Artificial Sequence
  Description of Artificial Sequence: Synthetic oligonucleotide
gcuauccccaauuggugaa

SEQ ID NO: 1815829 - RNA, 19 nt, Artificial Sequence
  Description of Artificial Sequence: Synthetic oligonucleotide
acgugaggggacagcacug

SEQ ID NO: 1815830 - RNA, 19 nt, Artificial Sequence
  Description of Artificial Sequence: Synthetic oligonucleotide
gggccaaggaugagugggg

SEQ ID NO: 1815831 - RNA, 19 nt, Artificial Sequence
  Description of Artificial Sequence: Synthetic oligonucleotide
guuucagggcaggccggcc

SEQ ID NO: 1815832 - RNA, 19 nt, Artificial Sequence
  Description of Artificial Sequence: Synthetic oligonucleotide
acccuccuaucuucccaca

SEQ ID NO: 1815833 - RNA, 19 nt, Artificial Sequence
  Description of Artificial Sequence: Synthetic oligonucleotide
ccccaucaauacaagccug

SEQ ID NO: 1815834 - RNA, 19 nt, Artificial Sequence
  Description of Artificial Sequence: Synthetic oligonucleotide
cuccuacuaagagaagucu

SEQ ID NO: 1815835 - RNA, 19 nt, Artificial Sequence
  Description of Artificial Sequence: Synthetic oligonucleotide
ccugcaauauaggggaaca

SEQ ID NO: 1815836 - RNA, 19 nt, Artificial Sequence
  Description of Artificial Sequence: Synthetic oligonucleotide
gcucggcuauccccaauug

SEQ ID NO: 1815837 - RNA, 19 nt, Artificial Sequence
  Description of Artificial Sequence: Synthetic oligonucleotide
ggcagggcaagagagaaau

SEQ ID NO: 1815838 - RNA, 19 nt, Artificial Sequence
  Description of Artificial Sequence: Synthetic oligonucleotide
cgaguaaugccuucuugga

SEQ ID NO: 1815839 - RNA, 19 nt, Artificial Sequence
  Description of Artificial Sequence: Synthetic oligonucleotide
ccacgcccacucuaggggc

SEQ ID NO: 1815840 - RNA, 19 nt, Artificial Sequence
  Description of Artificial Sequence: Synthetic oligonucleotide
ggacaugcacuggagugga

SEQ ID NO: 1815841 - RNA, 19 nt, Artificial Sequence
  Description of Artificial Sequence: Synthetic oligonucleotide
gguggucaguuaauaaaua

SEQ ID NO: 1815842 - RNA, 19 nt, Artificial Sequence
  Description of Artificial Sequence: Synthetic oligonucleotide
gaguuucagggcagcaccu

SEQ ID NO: 1815843 - RNA, 19 nt, Artificial Sequence
  Description of Artificial Sequence: Synthetic oligonucleotide
agaccaugguucagcgcga

SEQ ID NO: 1815844 - RNA, 19 nt, Artificial Sequence
  Description of Artificial Sequence: Synthetic oligonucleotide
gagcccuaguaguacugau

SEQ ID NO: 1815845 - RNA, 19 nt, Artificial Sequence
  Description of Artificial Sequence: Synthetic oligonucleotide
gguucacucccugaaugaa

SEQ ID NO: 1815846 - RNA, 19 nt, Artificial Sequence
  Description of Artificial Sequence: Synthetic oligonucleotide
ccaaguggggaauucgugu

SEQ ID NO: 1815847 - RNA, 19 nt, Artificial Sequence
  Description of Artificial Sequence: Synthetic oligonucleotide
ugaguggggcagguaugua

SEQ ID NO: 1815848 - RNA, 19 nt, Artificial Sequence
  Description of Artificial Sequence: Synthetic oligonucleotide
ggguuucagggcaggccgg

SEQ ID NO: 1815849 - RNA, 19 nt, Artificial Sequence
  Description of Artificial Sequence: Synthetic oligonucleotide
cagugcccaggccccuggg

SEQ ID NO: 1815850 - RNA, 19 nt, Artificial Sequence
  Description of Artificial Sequence: Synthetic oligonucleotide
gcugggaacgugaggggac

SEQ ID NO: 1815851 - RNA, 19 nt, Artificial Sequence
  Description of Artificial Sequence: Synthetic oligonucleotide
gucaugacuguggcuccca

SEQ ID NO: 1815852 - RNA, 19 nt, Artificial Sequence
  Description of Artificial Sequence: Synthetic oligonucleotide
cccuccacgcccacucuag

SEQ ID NO: 1815853 - RNA, 19 nt, Artificial Sequence
  Description of Artificial Sequence: Synthetic oligonucleotide
auccuccuacuaagagaag

SEQ ID NO: 1815854 - RNA, 19 nt, Artificial Sequence
  Description of Artificial Sequence: Synthetic oligonucleotide
ggggaacagaggagguaag

SEQ ID NO: 1815855 - RNA, 19 nt, Artificial Sequence
  Description of Artificial Sequence: Synthetic oligonucleotide
ccccaauuggugaaggugu

SEQ ID NO: 1815856 - RNA, 19 nt, Artificial Sequence
  Description of Artificial Sequence: Synthetic oligonucleotide
cugggaacgugaggggaca

SEQ ID NO: 1815857 - RNA, 19 nt, Artificial Sequence
  Description of Artificial Sequence: Synthetic oligonucleotide
gggccuuaucuagaccaug

SEQ ID NO: 1815858 - RNA, 19 nt, Artificial Sequence
  Description of Artificial Sequence: Synthetic oligonucleotide
agccaugguuggaaggguu

SEQ ID NO: 1815859 - RNA, 19 nt, Artificial Sequence
  Description of Artificial Sequence: Synthetic oligonucleotide
gugggcagggcaagagaga

SEQ ID NO: 1815860 - RNA, 19 nt, Artificial Sequence
  Description of Artificial Sequence: Synthetic oligonucleotide
ugccagccaaguggggaau

SEQ ID NO: 1815861 - RNA, 19 nt, Artificial Sequence
  Description of Artificial Sequence: Synthetic oligonucleotide
gaaugaagcccuggagauu

SEQ ID NO: 1815862 - RNA, 19 nt, Artificial Sequence
  Description of Artificial Sequence: Synthetic oligonucleotide
cagcgcgaguaaugccuuc

SEQ ID NO: 1815863 - RNA, 19 nt, Artificial Sequence
  Description of Artificial Sequence: Synthetic oligonucleotide
uggacagagcagggcuguc

SEQ ID NO: 1815864 - RNA, 19 nt, Artificial Sequence
  Description of Artificial Sequence: Synthetic oligonucleotide
gcaucuacucauccuccua

SEQ ID NO: 1815865 - RNA, 19 nt, Artificial Sequence
  Description of Artificial Sequence: Synthetic oligonucleotide
gucuggggaacuggcacua

SEQ ID NO: 1815866 - RNA, 19 nt, Artificial Sequence
  Description of Artificial Sequence: Synthetic oligonucleotide
ccaugguuggaaggguuuc

SEQ ID NO: 1815867 - RNA, 19 nt, Artificial Sequence
  Description of Artificial Sequence: Synthetic oligonucleotide
ggcaucuacucauccuccu

SEQ ID NO: 1815868 - RNA, 19 nt, Artificial Sequence
  Description of Artificial Sequence: Synthetic oligonucleotide
ccuaguaguacugaugcuu

SEQ ID NO: 1815869 - RNA, 19 nt, Artificial Sequence
  Description of Artificial Sequence: Synthetic oligonucleotide
ccaugguucagcgcgagua

SEQ ID NO: 1815870 - RNA, 19 nt, Artificial Sequence
  Description of Artificial Sequence: Synthetic oligonucleotide
cuaugagaaugggaagaau

SEQ ID NO: 1815871 - RNA, 19 nt, Artificial Sequence
  Description of Artificial Sequence: Synthetic oligonucleotide
cgcgaguaaugccuucuug

SEQ ID NO: 1815872 - RNA, 19 nt, Artificial Sequence
  Description of Artificial Sequence: Synthetic oligonucleotide
cggcuauccccaauuggug

SEQ ID NO: 1815873 - RNA, 19 nt, Artificial Sequence
  Description of Artificial Sequence: Synthetic oligonucleotide
ccuuauugcccacagcuuu

SEQ ID NO: 1815874 - RNA, 19 nt, Artificial Sequence
  Description of Artificial Sequence: Synthetic oligonucleotide
ggugaaggugugucugggu

SEQ ID NO: 1815875 - RNA, 19 nt, Artificial Sequence
  Description of Artificial Sequence: Synthetic oligonucleotide
ggccagccccuccacgccc

SEQ ID NO: 1815876 - RNA, 19 nt, Artificial Sequence
  Description of Artificial Sequence: Synthetic oligonucleotide
cuccugcaauauaggggaa

SEQ ID NO: 1815877 - RNA, 19 nt, Artificial Sequence
  Description of Artificial Sequence: Synthetic oligonucleotide
gcuuuggcaucuacucauc

SEQ ID NO: 1815878 - RNA, 19 nt, Artificial Sequence
  Description of Artificial Sequence: Synthetic oligonucleotide
ccuuaucuagaccaugguu

SEQ ID NO: 1815879 - RNA, 19 nt, Artificial Sequence
  Description of Artificial Sequence: Synthetic oligonucleotide
ggguaagcagaaugauuau

SEQ ID NO: 1815880 - RNA, 19 nt, Artificial Sequence
  Description of Artificial Sequence: Synthetic oligonucleotide
cugugucaugacuguggcu

SEQ ID NO: 1815881 - RNA, 19 nt, Artificial Sequence
  Description of Artificial Sequence: Synthetic oligonucleotide
gcuacccugcagagcucgg

SEQ ID NO: 1815882 - RNA, 19 nt, Artificial Sequence
  Description of Artificial Sequence: Synthetic oligonucleotide
gcccagggcuccacaagag

SEQ ID NO: 1815883 - RNA, 19 nt, Artificial Sequence
  Description of Artificial Sequence: Synthetic oligonucleotide
gccuuaucuagaccauggu

SEQ ID NO: 1815884 - RNA, 19 nt, Artificial Sequence
  Description of Artificial Sequence: Synthetic oligonucleotide
cugggguaagcagaaugau

SEQ ID NO: 1815885 - RNA, 19 nt, Artificial Sequence
  Description of Artificial Sequence: Synthetic oligonucleotide
gcuccacaagagcccugug

SEQ ID NO: 1815886 - RNA, 19 nt, Artificial Sequence
  Description of Artificial Sequence: Synthetic oligonucleotide
gggagccaccaggugggcc

SEQ ID NO: 1815887 - RNA, 19 nt, Artificial Sequence
  Description of Artificial Sequence: Synthetic oligonucleotide
ccugaaggguucagcucca

SEQ ID NO: 1815888 - RNA, 19 nt, Artificial Sequence
  Description of Artificial Sequence: Synthetic oligonucleotide
ggccucuccucaaaacucu

SEQ ID NO: 1815889 - RNA, 19 nt, Artificial Sequence
  Description of Artificial Sequence: Synthetic oligonucleotide
cgguggucaguuaauaaau

SEQ ID NO: 1815890 - RNA, 19 nt, Artificial Sequence
  Description of Artificial Sequence: Synthetic oligonucleotide
guggggaauucguguguuu

SEQ ID NO: 1815891 - RNA, 19 nt, Artificial Sequence
  Description of Artificial Sequence: Synthetic oligonucleotide
gcccagucugggguaagca

SEQ ID NO: 1815892 - RNA, 19 nt, Artificial Sequence
  Description of Artificial Sequence: Synthetic oligonucleotide
aucaggcugugggccuuau

SEQ ID NO: 1815893 - RNA, 19 nt, Artificial Sequence
  Description of Artificial Sequence: Synthetic oligonucleotide
ggggagccaguuguccuga

SEQ ID NO: 1815894 - RNA, 19 nt, Artificial Sequence
  Description of Artificial Sequence: Synthetic oligonucleotide
ggcuccacaagagcccugu

SEQ ID NO: 1815895 - RNA, 19 nt, Artificial Sequence
  Description of Artificial Sequence: Synthetic oligonucleotide
cauagccaggggagccagu

SEQ ID NO: 1815896 - RNA, 19 nt, Artificial Sequence
  Description of Artificial Sequence: Synthetic oligonucleotide
gagcucggcuauccccaau

SEQ ID NO: 1815897 - RNA, 19 nt, Artificial Sequence
  Description of Artificial Sequence: Synthetic oligonucleotide
gccuacuucuuaagaggcu

SEQ ID NO: 1815898 - RNA, 19 nt, Artificial Sequence
  Description of Artificial Sequence: Synthetic oligonucleotide
caggccggccacggugguc

SEQ ID NO: 1815899 - RNA, 19 nt, Artificial Sequence
  Description of Artificial Sequence: Synthetic oligonucleotide
cagccaugguuggaagggu

SEQ ID NO: 1815900 - RNA, 19 nt, Artificial Sequence
  Description of Artificial Sequence: Synthetic oligonucleotide
ccaguuguccugagcccua

SEQ ID NO: 1815901 - RNA, 19 nt, Artificial Sequence
  Description of Artificial Sequence: Synthetic oligonucleotide
gccaggggagccaguuguc

SEQ ID NO: 1815902 - RNA, 19 nt, Artificial Sequence
  Description of Artificial Sequence: Synthetic oligonucleotide
gggcuagagucugucuccu

SEQ ID NO: 1815903 - RNA, 19 nt, Artificial Sequence
  Description of Artificial Sequence: Synthetic oligonucleotide
cccuaguaguacugaugcu

SEQ ID NO: 1815904 - RNA, 19 nt, Artificial Sequence
  Description of Artificial Sequence: Synthetic oligonucleotide
gccaugguuggaaggguuu

SEQ ID NO: 1815905 - RNA, 19 nt, Artificial Sequence
  Description of Artificial Sequence: Synthetic oligonucleotide
gggcagggcaagagagaaa

SEQ ID NO: 1815906 - RNA, 19 nt, Artificial Sequence
  Description of Artificial Sequence: Synthetic oligonucleotide
ccacgguggucaguuaaua

SEQ ID NO: 1815907 - RNA, 19 nt, Artificial Sequence
  Description of Artificial Sequence: Synthetic oligonucleotide
ggccggccacgguggucag

SEQ ID NO: 1815908 - RNA, 19 nt, Artificial Sequence
  Description of Artificial Sequence: Synthetic oligonucleotide
gccacgguggucaguuaau

SEQ ID NO: 1815909 - RNA, 19 nt, Artificial Sequence
  Description of Artificial Sequence: Synthetic oligonucleotide
cugaaggguucagcuccau

SEQ ID NO: 1815910 - RNA, 19 nt, Artificial Sequence
  Description of Artificial Sequence: Synthetic oligonucleotide
gcgcgaguaaugccuucuu

SEQ ID NO: 1815911 - RNA, 19 nt, Artificial Sequence
  Description of Artificial Sequence: Synthetic oligonucleotide
gcccacucuaggggccaga

SEQ ID NO: 1815912 - RNA, 19 nt, Artificial Sequence
  Description of Artificial Sequence: Synthetic oligonucleotide
ccacaacugcuaggaaagu

SEQ ID NO: 1815913 - RNA, 19 nt, Artificial Sequence
  Description of Artificial Sequence: Synthetic oligonucleotide
ccucaccaauagaaccauu

SEQ ID NO: 1815914 - RNA, 19 nt, Artificial Sequence
  Description of Artificial Sequence: Synthetic oligonucleotide
cccacucuaggggccagau

SEQ ID NO: 1815915 - RNA, 19 nt, Artificial Sequence
  Description of Artificial Sequence: Synthetic oligonucleotide
gcaggccggccacgguggu

SEQ ID NO: 1815916 - RNA, 19 nt, Artificial Sequence
  Description of Artificial Sequence: Synthetic oligonucleotide
gccccuccacgcccacucu

SEQ ID NO: 1815917 - RNA, 19 nt, Artificial Sequence
  Description of Artificial Sequence: Synthetic oligonucleotide
cgcccacucuaggggccag

SEQ ID NO: 1815918 - RNA, 19 nt, Artificial Sequence
  Description of Artificial Sequence: Synthetic oligonucleotide
  modified_base (8)..(8): a, c, u, g, unknown or other
aauaaaanaaaauugugug

SEQ ID NO: 1815919 - RNA, 19 nt, Artificial Sequence
  Description of Artificial Sequence: Synthetic oligonucleotide
aagaaugugagcuccagac

SEQ ID NO: 1815920 - RNA, 19 nt, Artificial Sequence
  Description of Artificial Sequence: Synthetic oligonucleotide
aaugcuguuaguuccuucc

SEQ ID NO: 1815921 - RNA, 19 nt, Artificial Sequence
  Description of Artificial Sequence: Synthetic oligonucleotide
  modified_base (2)..(2): a, c, u, g, unknown or other
anaaaauuguguguggugg

SEQ ID NO: 1815922 - RNA, 19 nt, Artificial Sequence
  Description of Artificial Sequence: Synthetic oligonucleotide
  modified_base (5)..(5): a, c, u, g, unknown or other
aaaanaaaauugugugugg

SEQ ID NO: 1815923 - RNA, 19 nt, Artificial Sequence
  Description of Artificial Sequence: Synthetic oligonucleotide
  modified_base (12)..(12): a, c, u, g, unknown or other
auaaaauaaaanaaaauug

SEQ ID NO: 1815924 - RNA, 19 nt, Artificial Sequence
  Description of Artificial Sequence: Synthetic oligonucleotide
aaugggugcaucuccaggc

SEQ ID NO: 1815925 - RNA, 19 nt, Artificial Sequence
  Description of Artificial Sequence: Synthetic oligonucleotide
aaacauacuccauagcuag

SEQ ID NO: 1815926 - RNA, 19 nt, Artificial Sequence
  Description of Artificial Sequence: Synthetic oligonucleotide
ugaacaaacuugaagacug

SEQ ID NO: 1815927 - RNA, 19 nt, Artificial Sequence
  Description of Artificial Sequence: Synthetic oligonucleotide
  modified_base (6)..(6): a, c, u, g, unknown or other
uaaaanaaaauugugugug

SEQ ID NO: 1815928 - RNA, 19 nt, Artificial Sequence
  Description of Artificial Sequence: Synthetic oligonucleotide
augaaaugcuguuaguucc

SEQ ID NO: 1815929 - RNA, 19 nt, Artificial Sequence
  Description of Artificial Sequence: Synthetic oligonucleotide
uaagucaugaaacauacuc

SEQ ID NO: 1815930 - RNA, 19 nt, Artificial Sequence
  Description of Artificial Sequence: Synthetic oligonucleotide
gaaagaucaaguaaaaggc

SEQ ID NO: 1815931 - RNA, 19 nt, Artificial Sequence
  Description of Artificial Sequence: Synthetic oligonucleotide
  modified_base (9)..(9): a, c, u, g, unknown or other
aaauaaaanaaaauugugu

SEQ ID NO: 1815932 - RNA, 19 nt, Artificial Sequence
  Description of Artificial Sequence: Synthetic oligonucleotide
  modified_base (14)..(14): a, c, u, g, unknown or other
aaauaaaauaaaanaaaau

SEQ ID NO: 1815933 - RNA, 19 nt, Artificial Sequence
  Description of Artificial Sequence: Synthetic oligonucleotide
aauacuucaguagucagag

SEQ ID NO: 1815934 - RNA, 19 nt, Artificial Sequence
  Description of Artificial Sequence: Synthetic oligonucleotide
uauaacccaacacuggagg

SEQ ID NO: 1815935 - RNA, 19 nt, Artificial Sequence
  Description of Artificial Sequence: Synthetic oligonucleotide
  modified_base (7)..(7): a, c, u, g, unknown or other
auaaaanaaaauugugugu

SEQ ID NO: 1815936 - RNA, 19 nt, Artificial Sequence
  Description of Artificial Sequence: Synthetic oligonucleotide
uacuucaguagucagagcc

SEQ ID NO: 1815937 - RNA, 19 nt, Artificial Sequence
  Description of Artificial Sequence: Synthetic oligonucleotide
guagagaaaacccaaaaug

SEQ ID NO: 1815938 - RNA, 19 nt, Artificial Sequence
  Description of Artificial Sequence: Synthetic oligonucleotide
auuauucuugcucagcagg

SEQ ID NO: 1815939 - RNA, 19 nt, Artificial Sequence
  Description of Artificial Sequence: Synthetic oligonucleotide
  modified_base (3)..(3): a, c, u, g, unknown or other
aanaaaauuguguguggug

SEQ ID NO: 1815940 - RNA, 19 nt, Artificial Sequence
  Description of Artificial Sequence: Synthetic oligonucleotide
aaggcugcacaucaagacc

SEQ ID NO: 1815941 - RNA, 19 nt, Artificial Sequence
  Description of Artificial Sequence: Synthetic oligonucleotide
aacuugaagacugcgaagg

SEQ ID NO: 1815942 - RNA, 19 nt, Artificial Sequence
  Description of Artificial Sequence: Synthetic oligonucleotide
agaaccacuggauuucucc

SEQ ID NO: 1815943 - RNA, 19 nt, Artificial Sequence
  Description of Artificial Sequence: Synthetic oligonucleotide
agaauggcaacuucuuugc

SEQ ID NO: 1815944 - RNA, 19 nt, Artificial Sequence
  Description of Artificial Sequence: Synthetic oligonucleotide
aaacccaaaaugcuaagca

SEQ ID NO: 1815945 - RNA, 19 nt, Artificial Sequence
  Description of Artificial Sequence: Synthetic oligonucleotide
cuagcaagaauccugagug

SEQ ID NO: 1815946 - RNA, 19 nt, Artificial Sequence
  Description of Artificial Sequence: Synthetic oligonucleotide
uuuauaacccaacacugga

SEQ ID NO: 1815947 - RNA, 19 nt, Artificial Sequence
  Description of Artificial Sequence: Synthetic oligonucleotide
uccugagugacacauggcg

SEQ ID NO: 1815948 - RNA, 19 nt, Artificial Sequence
  Description of Artificial Sequence: Synthetic oligonucleotide
aaaacccaaaaugcuaagc

SEQ ID NO: 1815949 - RNA, 19 nt, Artificial Sequence
  Description of Artificial Sequence: Synthetic oligonucleotide
aaugcuaagcagcugggug

SEQ ID NO: 1815950 - RNA, 19 nt, Artificial Sequence
  Description of Artificial Sequence: Synthetic oligonucleotide
aauuccagagaguccaauc

SEQ ID NO: 1815951 - RNA, 19 nt, Artificial Sequence
  Description of Artificial Sequence: Synthetic oligonucleotide
uucacuauuugaaaguccu

SEQ ID NO: 1815952 - RNA, 19 nt, Artificial Sequence
  Description of Artificial Sequence: Synthetic oligonucleotide
uguguaggcagucguaacg

SEQ ID NO: 1815953 - RNA, 19 nt, Artificial Sequence
  Description of Artificial Sequence: Synthetic oligonucleotide
uccauagcuagcaagaauc

SEQ ID NO: 1815954 - RNA, 19 nt, Artificial Sequence
  Description of Artificial Sequence: Synthetic oligonucleotide
acuggauuucucccgaagc

SEQ ID NO: 1815955 - RNA, 19 nt, Artificial Sequence
  Description of Artificial Sequence: Synthetic oligonucleotide
  modified_base (4)..(4): a, c, u, g, unknown or other
aaanaaaauuguguguggu

SEQ ID NO: 1815956 - RNA, 19 nt, Artificial Sequence
  Description of Artificial Sequence: Synthetic oligonucleotide
ucaucgaauacuucaguag

SEQ ID NO: 1815957 - RNA, 19 nt, Artificial Sequence
  Description of Artificial Sequence: Synthetic oligonucleotide
cuaaaauuucuccaaugcc

SEQ ID NO: 1815958 - RNA, 19 nt, Artificial Sequence
  Description of Artificial Sequence: Synthetic oligonucleotide
gacugcugcacuuuaaacc

SEQ ID NO: 1815959 - RNA, 19 nt, Artificial Sequence
  Description of Artificial Sequence: Synthetic oligonucleotide
uuuauggccccaauacagg

SEQ ID NO: 1815960 - RNA, 19 nt, Artificial Sequence
  Description of Artificial Sequence: Synthetic oligonucleotide
cuuuauaacccaacacugg

SEQ ID NO: 1815961 - RNA, 19 nt, Artificial Sequence
  Description of Artificial Sequence: Synthetic oligonucleotide
auggcaacuucuuugcugg

SEQ ID NO: 1815962 - RNA, 19 nt, Artificial Sequence
  Description of Artificial Sequence: Synthetic oligonucleotide
aacgcuuagaaggagcauc

SEQ ID NO: 1815963 - RNA, 19 nt, Artificial Sequence
  Description of Artificial Sequence: Synthetic oligonucleotide
uugggcacacuuuauaacc

SEQ ID NO: 1815964 - RNA, 19 nt, Artificial Sequence
  Description of Artificial Sequence: Synthetic oligonucleotide
auugcagagacaaaggcag

SEQ ID NO: 1815965 - RNA, 19 nt, Artificial Sequence
  Description of Artificial Sequence: Synthetic oligonucleotide
agaaggagcaucuccuugg

SEQ ID NO: 1815966 - RNA, 19 nt, Artificial Sequence
  Description of Artificial Sequence: Synthetic oligonucleotide
uaugaaaugcuguuaguuc

SEQ ID NO: 1815967 - RNA, 19 nt, Artificial Sequence
  Description of Artificial Sequence: Synthetic oligonucleotide
ucuucugucccaaauuugu

SEQ ID NO: 1815968 - RNA, 19 nt, Artificial Sequence
  Description of Artificial Sequence: Synthetic oligonucleotide
agucaugaaacauacucca

SEQ ID NO: 1815969 - RNA, 19 nt, Artificial Sequence
  Description of Artificial Sequence: Synthetic oligonucleotide
acuuuaaacccuguguugg

SEQ ID NO: 1815970 - RNA, 19 nt, Artificial Sequence
  Description of Artificial Sequence: Synthetic oligonucleotide
aauaucaccaugaccagga

SEQ ID NO: 1815971 - RNA, 19 nt, Artificial Sequence
  Description of Artificial Sequence: Synthetic oligonucleotide
cuuggugacacauaacuuc

SEQ ID NO: 1815972 - RNA, 19 nt, Artificial Sequence
  Description of Artificial Sequence: Synthetic oligonucleotide
auaacccaacacuggaggc

SEQ ID NO: 1815973 - RNA, 19 nt, Artificial Sequence
  Description of Artificial Sequence: Synthetic oligonucleotide
ugacacauaacuucagaga

SEQ ID NO: 1815974 - RNA, 19 nt, Artificial Sequence
  Description of Artificial Sequence: Synthetic oligonucleotide
aaaauugugugugguggcg

SEQ ID NO: 1815975 - RNA, 19 nt, Artificial Sequence
  Description of Artificial Sequence: Synthetic oligonucleotide
aauacaggucccguacacc

SEQ ID NO: 1815976 - RNA, 19 nt, Artificial Sequence
  Description of Artificial Sequence: Synthetic oligonucleotide
aaacuugaagacugcgaag

SEQ ID NO: 1815977 - RNA, 19 nt, Artificial Sequence
  Description of Artificial Sequence: Synthetic oligonucleotide
uuauaacccaacacuggag

SEQ ID NO: 1815978 - RNA, 19 nt, Artificial Sequence
  Description of Artificial Sequence: Synthetic oligonucleotide
caggguaccuagaagaacc

SEQ ID NO: 1815979 - RNA, 19 nt, Artificial Sequence
  Description of Artificial Sequence: Synthetic oligonucleotide
aaggcaggggcguuguacg

SEQ ID NO: 1815980 - RNA, 19 nt, Artificial Sequence
  Description of Artificial Sequence: Synthetic oligonucleotide
ugcgauaugaccagcugug

SEQ ID NO: 1815981 - RNA, 19 nt, Artificial Sequence
  Description of Artificial Sequence: Synthetic oligonucleotide
uuauucuugcucagcaggc

SEQ ID NO: 1815982 - RNA, 19 nt, Artificial Sequence
  Description of Artificial Sequence: Synthetic oligonucleotide
aggcuuuucucuucugucc

SEQ ID NO: 1815983 - RNA, 19 nt, Artificial Sequence
  Description of Artificial Sequence: Synthetic oligonucleotide
aacaaacuugaagacugcg

SEQ ID NO: 1815984 - RNA, 19 nt, Artificial Sequence
  Description of Artificial Sequence: Synthetic oligonucleotide
aaucguuccacgaggacag

SEQ ID NO: 1815985 - RNA, 19 nt, Artificial Sequence
  Description of Artificial Sequence: Synthetic oligonucleotide
aaaggcaggggcguuguac

SEQ ID NO: 1815986 - RNA, 19 nt, Artificial Sequence
  Description of Artificial Sequence: Synthetic oligonucleotide
guuaguuccuuccacagga

SEQ ID NO: 1815987 - RNA, 19 nt, Artificial Sequence
  Description of Artificial Sequence: Synthetic oligonucleotide
ucaugaaacauacuccaua

SEQ ID NO: 1815988 - RNA, 19 nt, Artificial Sequence
  Description of Artificial Sequence: Synthetic oligonucleotide
ccaaauuuguuuauggccc

SEQ ID NO: 1815989 - RNA, 19 nt, Artificial Sequence
  Description of Artificial Sequence: Synthetic oligonucleotide
uacaaagugcaccagggua

SEQ ID NO: 1815990 - RNA, 19 nt, Artificial Sequence
  Description of Artificial Sequence: Synthetic oligonucleotide
guuuauggccccaauacag

SEQ ID NO: 1815991 - RNA, 19 nt, Artificial Sequence
  Description of Artificial Sequence: Synthetic oligonucleotide
cagaaagcuacagagaaug

SEQ ID NO: 1815992 - RNA, 19 nt, Artificial Sequence
  Description of Artificial Sequence: Synthetic oligonucleotide
uuguacggaguacagaguc

SEQ ID NO: 1815993 - RNA, 19 nt, Artificial Sequence
  Description of Artificial Sequence: Synthetic oligonucleotide
uguuuauggccccaauaca

SEQ ID NO: 1815994 - RNA, 19 nt, Artificial Sequence
  Description of Artificial Sequence: Synthetic oligonucleotide
aguagagaaaacccaaaau

SEQ ID NO: 1815995 - RNA, 19 nt, Artificial Sequence
  Description of Artificial Sequence: Synthetic oligonucleotide
aggagcaucuccuugguga

SEQ ID NO: 1815996 - RNA, 19 nt, Artificial Sequence
  Description of Artificial Sequence: Synthetic oligonucleotide
ucucaaaacaaugugucuc

SEQ ID NO: 1815997 - RNA, 19 nt, Artificial Sequence
  Description of Artificial Sequence: Synthetic oligonucleotide
cacuccacagugaagaaug

SEQ ID NO: 1815998 - RNA, 19 nt, Artificial Sequence
  Description of Artificial Sequence: Synthetic oligonucleotide
auuccagagaguccaauca

SEQ ID NO: 1815999 - RNA, 19 nt, Artificial Sequence
  Description of Artificial Sequence: Synthetic oligonucleotide
acuugaagacugcgaaggc

SEQ ID NO: 1816000 - RNA, 19 nt, Artificial Sequence
  Description of Artificial Sequence: Synthetic oligonucleotide
agagaguccaaucaggcuu

SEQ ID NO: 1816001 - RNA, 19 nt, Artificial Sequence
  Description of Artificial Sequence: Synthetic oligonucleotide
acuuuauaacccaacacug

SEQ ID NO: 1816002 - RNA, 19 nt, Artificial Sequence
  Description of Artificial Sequence: Synthetic oligonucleotide
ccuaucucaaaacagacug

SEQ ID NO: 1816003 - RNA, 19 nt, Artificial Sequence
  Description of Artificial Sequence: Synthetic oligonucleotide
uucccagauccacaugugg

SEQ ID NO: 1816004 - RNA, 19 nt, Artificial Sequence
  Description of Artificial Sequence: Synthetic oligonucleotide
cuggauuucucccgaagcg

SEQ ID NO: 1816005 - RNA, 19 nt, Artificial Sequence
  Description of Artificial Sequence: Synthetic oligonucleotide
auuucuccaaugccgauga

SEQ ID NO: 1816006 - RNA, 19 nt, Artificial Sequence
  Description of Artificial Sequence: Synthetic oligonucleotide
agaucaaguaaaaggcuac

SEQ ID NO: 1816007 - RNA, 19 nt, Artificial Sequence
  Description of Artificial Sequence: Synthetic oligonucleotide
cauguugagaaagaucaag

SEQ ID NO: 1816008 - RNA, 19 nt, Artificial Sequence
  Description of Artificial Sequence: Synthetic oligonucleotide
aaaaugcuaagcagcuggg

SEQ ID NO: 1816009 - RNA, 19 nt, Artificial Sequence
  Description of Artificial Sequence: Synthetic oligonucleotide
accuagaagaaccacugga

SEQ ID NO: 1816010 - RNA, 19 nt, Artificial Sequence
  Description of Artificial Sequence: Synthetic oligonucleotide
agacugcugcacuuuaaac

SEQ ID NO: 1816011 - RNA, 19 nt, Artificial Sequence
  Description of Artificial Sequence: Synthetic oligonucleotide
uguugagaaagaucaagua

SEQ ID NO: 1816012 - RNA, 19 nt, Artificial Sequence
  Description of Artificial Sequence: Synthetic oligonucleotide
uuuguuuauggccccaaua

SEQ ID NO: 1816013 - RNA, 19 nt, Artificial Sequence
  Description of Artificial Sequence: Synthetic oligonucleotide
ucccguacaccccagagaa

SEQ ID NO: 1816014 - RNA, 19 nt, Artificial Sequence
  Description of Artificial Sequence: Synthetic oligonucleotide
gaacccaaauaucaccaug

SEQ ID NO: 1816015 - RNA, 19 nt, Artificial Sequence
  Description of Artificial Sequence: Synthetic oligonucleotide
uaucaccaugaccaggagc

SEQ ID NO: 1816016 - RNA, 19 nt, Artificial Sequence
  Description of Artificial Sequence: Synthetic oligonucleotide
uggcguucaaggcagaauc

SEQ ID NO: 1816017 - RNA, 19 nt, Artificial Sequence
  Description of Artificial Sequence: Synthetic oligonucleotide
cuucacuauuugaaagucc

SEQ ID NO: 1816018 - RNA, 19 nt, Artificial Sequence
  Description of Artificial Sequence: Synthetic oligonucleotide
aacccaaauaucaccauga

SEQ ID NO: 1816019 - RNA, 19 nt, Artificial Sequence
  Description of Artificial Sequence: Synthetic oligonucleotide
cuuccgaguagagaaaacc

SEQ ID NO: 1816020 - RNA, 19 nt, Artificial Sequence
  Description of Artificial Sequence: Synthetic oligonucleotide
ugcacugucuuccgaguag

SEQ ID NO: 1816021 - RNA, 19 nt, Artificial Sequence
  Description of Artificial Sequence: Synthetic oligonucleotide
auagcuagcaagaauccug

SEQ ID NO: 1816022 - RNA, 19 nt, Artificial Sequence
  Description of Artificial Sequence: Synthetic oligonucleotide
cuuuaaacccuguguuggg

SEQ ID NO: 1816023 - RNA, 19 nt, Artificial Sequence
  Description of Artificial Sequence: Synthetic oligonucleotide
gacacauggcguucaaggc

SEQ ID NO: 1816024 - RNA, 19 nt, Artificial Sequence
  Description of Artificial Sequence: Synthetic oligonucleotide
aggcugcacaucaagaccc

SEQ ID NO: 1816025 - RNA, 19 nt, Artificial Sequence
  Description of Artificial Sequence: Synthetic oligonucleotide
uguugggcacacuuuauaa

SEQ ID NO: 1816026 - RNA, 19 nt, Artificial Sequence
  Description of Artificial Sequence: Synthetic oligonucleotide
uagaagaaccacuggauuu

SEQ ID NO: 1816027 - RNA, 19 nt, Artificial Sequence
  Description of Artificial Sequence: Synthetic oligonucleotide
caaauuuguuuauggcccc

SEQ ID NO: 1816028 - RNA, 19 nt, Artificial Sequence
  Description of Artificial Sequence: Synthetic oligonucleotide
ccagcagaaagcuacagag

SEQ ID NO: 1816029 - RNA, 19 nt, Artificial Sequence
  Description of Artificial Sequence: Synthetic oligonucleotide
cuaucucaaaacagacugc

SEQ ID NO: 1816030 - RNA, 19 nt, Artificial Sequence
  Description of Artificial Sequence: Synthetic oligonucleotide
ucgaauacuucaguaguca

SEQ ID NO: 1816031 - RNA, 19 nt, Artificial Sequence
  Description of Artificial Sequence: Synthetic oligonucleotide
agguaguugcuguagaaaa

SEQ ID NO: 1816032 - RNA, 19 nt, Artificial Sequence
  Description of Artificial Sequence: Synthetic oligonucleotide
gaucgacugaacaaacuug

SEQ ID NO: 1816033 - RNA, 19 nt, Artificial Sequence
  Description of Artificial Sequence: Synthetic oligonucleotide
agaucgacugaacaaacuu

SEQ ID NO: 1816034 - RNA, 19 nt, Artificial Sequence
  Description of Artificial Sequence: Synthetic oligonucleotide
caaggcugcacaucaagac

SEQ ID NO: 1816035 - RNA, 19 nt, Artificial Sequence
  Description of Artificial Sequence: Synthetic oligonucleotide
ucaagacccuaucucaaaa

SEQ ID NO: 1816036 - RNA, 19 nt, Artificial Sequence
  Description of Artificial Sequence: Synthetic oligonucleotide
gaaugugagcuccagaccu

SEQ ID NO: 1816037 - RNA, 19 nt, Artificial Sequence
  Description of Artificial Sequence: Synthetic oligonucleotide
ucccagauccacaugugga

SEQ ID NO: 1816038 - RNA, 19 nt, Artificial Sequence
  Description of Artificial Sequence: Synthetic oligonucleotide
ugcgcagaucgacugaaca

SEQ ID NO: 1816039 - RNA, 19 nt, Artificial Sequence
  Description of Artificial Sequence: Synthetic oligonucleotide
ugggcacacuuuauaaccc

SEQ ID NO: 1816040 - RNA, 19 nt, Artificial Sequence
  Description of Artificial Sequence: Synthetic oligonucleotide
agacugcgaaggcuggugc

SEQ ID NO: 1816041 - RNA, 19 nt, Artificial Sequence
  Description of Artificial Sequence: Synthetic oligonucleotide
uaccuagaagaaccacugg

SEQ ID NO: 1816042 - RNA, 19 nt, Artificial Sequence
  Description of Artificial Sequence: Synthetic oligonucleotide
cacauggcguucaaggcag

SEQ ID NO: 1816043 - RNA, 19 nt, Artificial Sequence
  Description of Artificial Sequence: Synthetic oligonucleotide
cacaucaagacccuaucuc

SEQ ID NO: 1816044 - RNA, 19 nt, Artificial Sequence
  Description of Artificial Sequence: Synthetic oligonucleotide
uucaguagucagagccucg

SEQ ID NO: 1816045 - RNA, 19 nt, Artificial Sequence
  Description of Artificial Sequence: Synthetic oligonucleotide
acccaaauaucaccaugac

SEQ ID NO: 1816046 - RNA, 19 nt, Artificial Sequence
  Description of Artificial Sequence: Synthetic oligonucleotide
ucugcgauaugaccagcug

SEQ ID NO: 1816047 - RNA, 19 nt, Artificial Sequence
  Description of Artificial Sequence: Synthetic oligonucleotide
agaaucguuccacgaggac

SEQ ID NO: 1816048 - RNA, 19 nt, Artificial Sequence
  Description of Artificial Sequence: Synthetic oligonucleotide
uguaugaaaugcuguuagu

SEQ ID NO: 1816049 - RNA, 19 nt, Artificial Sequence
  Description of Artificial Sequence: Synthetic oligonucleotide
ucucccgaagcgauuauuc

SEQ ID NO: 1816050 - RNA, 19 nt, Artificial Sequence
  Description of Artificial Sequence: Synthetic oligonucleotide
uuuaaacccuguguugggc

SEQ ID NO: 1816051 - RNA, 19 nt, Artificial Sequence
  Description of Artificial Sequence: Synthetic oligonucleotide
acacauggcguucaaggca

SEQ ID NO: 1816052 - RNA, 19 nt, Artificial Sequence
  Description of Artificial Sequence: Synthetic oligonucleotide
uuauggccccaauacaggu

SEQ ID NO: 1816053 - RNA, 19 nt, Artificial Sequence
  Description of Artificial Sequence: Synthetic oligonucleotide
uggaguggcaucugcuucc

SEQ ID NO: 1816054 - RNA, 19 nt, Artificial Sequence
  Description of Artificial Sequence: Synthetic oligonucleotide
auaugaccagcuguguuuc

SEQ ID NO: 1816055 - RNA, 19 nt, Artificial Sequence
  Description of Artificial Sequence: Synthetic oligonucleotide
gaaucguuccacgaggaca

SEQ ID NO: 1816056 - RNA, 19 nt, Artificial Sequence
  Description of Artificial Sequence: Synthetic oligonucleotide
uuaguuccuuccacaggag

SEQ ID NO: 1816057 - RNA, 19 nt, Artificial Sequence
  Description of Artificial Sequence: Synthetic oligonucleotide
gccgaugaaaauuccagag

SEQ ID NO: 1816058 - RNA, 19 nt, Artificial Sequence
  Description of Artificial Sequence: Synthetic oligonucleotide
caaacuugaagacugcgaa

SEQ ID NO: 1816059 - RNA, 19 nt, Artificial Sequence
  Description of Artificial Sequence: Synthetic oligonucleotide
aaagcgacagcugcgcaga

SEQ ID NO: 1816060 - RNA, 19 nt, Artificial Sequence
  Description of Artificial Sequence: Synthetic oligonucleotide
uguacggaguacagagucu

SEQ ID NO: 1816061 - RNA, 19 nt, Artificial Sequence
  Description of Artificial Sequence: Synthetic oligonucleotide
cagagacaaaggcaggggc

SEQ ID NO: 1816062 - RNA, 19 nt, Artificial Sequence
  Description of Artificial Sequence: Synthetic oligonucleotide
agugcaccaggguaccuag

SEQ ID NO: 1816063 - RNA, 19 nt, Artificial Sequence
  Description of Artificial Sequence: Synthetic oligonucleotide
gcagaaucguuccacgagg

SEQ ID NO: 1816064 - RNA, 19 nt, Artificial Sequence
  Description of Artificial Sequence: Synthetic oligonucleotide
ugcaaguccaaggccagcc

SEQ ID NO: 1816065 - RNA, 19 nt, Artificial Sequence
  Description of Artificial Sequence: Synthetic oligonucleotide
aucgaauacuucaguaguc

SEQ ID NO: 1816066 - RNA, 19 nt, Artificial Sequence
  Description of Artificial Sequence: Synthetic oligonucleotide
gaauacuucaguagucaga

SEQ ID NO: 1816067 - RNA, 19 nt, Artificial Sequence
  Description of Artificial Sequence: Synthetic oligonucleotide
ugggccugauguaugaaau

SEQ ID NO: 1816068 - RNA, 19 nt, Artificial Sequence
  Description of Artificial Sequence: Synthetic oligonucleotide
ugcugcacuuuaaacccug

SEQ ID NO: 1816069 - RNA, 19 nt, Artificial Sequence
  Description of Artificial Sequence: Synthetic oligonucleotide
ugccgaugaaaauuccaga

SEQ ID NO: 1816070 - RNA, 19 nt, Artificial Sequence
  Description of Artificial Sequence: Synthetic oligonucleotide
ugcacaucaagacccuauc

SEQ ID NO: 1816071 - RNA, 19 nt, Artificial Sequence
  Description of Artificial Sequence: Synthetic oligonucleotide
ugugucucagcaucuucac

SEQ ID NO: 1816072 - RNA, 19 nt, Artificial Sequence
  Description of Artificial Sequence: Synthetic oligonucleotide
caaugggugcaucuccagg

SEQ ID NO: 1816073 - RNA, 19 nt, Artificial Sequence
  Description of Artificial Sequence: Synthetic oligonucleotide
auguugagaaagaucaagu

SEQ ID NO: 1816074 - RNA, 19 nt, Artificial Sequence
  Description of Artificial Sequence: Synthetic oligonucleotide
ggaguacagagucugggcc

SEQ ID NO: 1816075 - RNA, 19 nt, Artificial Sequence
  Description of Artificial Sequence: Synthetic oligonucleotide
guugggcacacuuuauaac

SEQ ID NO: 1816076 - RNA, 19 nt, Artificial Sequence
  Description of Artificial Sequence: Synthetic oligonucleotide
uccacgaggacaggcagcc

SEQ ID NO: 1816077 - RNA, 19 nt, Artificial Sequence
  Description of Artificial Sequence: Synthetic oligonucleotide
ucaccaucccagcauugca

SEQ ID NO: 1816078 - RNA, 19 nt, Artificial Sequence
  Description of Artificial Sequence: Synthetic oligonucleotide
uucugucccaaauuuguuu

SEQ ID NO: 1816079 - RNA, 19 nt, Artificial Sequence
  Description of Artificial Sequence: Synthetic oligonucleotide
agcucugcgauaugaccag

SEQ ID NO: 1816080 - RNA, 19 nt, Artificial Sequence
  Description of Artificial Sequence: Synthetic oligonucleotide
uauucuugcucagcaggcc

SEQ ID NO: 1816081 - RNA, 19 nt, Artificial Sequence
  Description of Artificial Sequence: Synthetic oligonucleotide
aucgacugaacaaacuuga

SEQ ID NO: 1816082 - RNA, 19 nt, Artificial Sequence
  Description of Artificial Sequence: Synthetic oligonucleotide
aagacugcgaaggcuggug

SEQ ID NO: 1816083 - RNA, 19 nt, Artificial Sequence
  Description of Artificial Sequence: Synthetic oligonucleotide
cuaucucaaaacaaugugu

SEQ ID NO: 1816084 - RNA, 19 nt, Artificial Sequence
  Description of Artificial Sequence: Synthetic oligonucleotide
ugcuuccugguccuaaguc

SEQ ID NO: 1816085 - RNA, 19 nt, Artificial Sequence
  Description of Artificial Sequence: Synthetic oligonucleotide
aggccgaagaggcuuccac

SEQ ID NO: 1816086 - RNA, 19 nt, Artificial Sequence
  Description of Artificial Sequence: Synthetic oligonucleotide
uaacccaacacuggaggca

SEQ ID NO: 1816087 - RNA, 19 nt, Artificial Sequence
  Description of Artificial Sequence: Synthetic oligonucleotide
ccuaucucaaaacaaugug

SEQ ID NO: 1816088 - RNA, 19 nt, Artificial Sequence
  Description of Artificial Sequence: Synthetic oligonucleotide
aaauuuguuuauggcccca

SEQ ID NO: 1816089 - RNA, 19 nt, Artificial Sequence
  Description of Artificial Sequence: Synthetic oligonucleotide
aaaugcuaagcagcugggu

SEQ ID NO: 1816090 - RNA, 19 nt, Artificial Sequence
  Description of Artificial Sequence: Synthetic oligonucleotide
caauacaggucccguacac

SEQ ID NO: 1816091 - RNA, 19 nt, Artificial Sequence
  Description of Artificial Sequence: Synthetic oligonucleotide
guuucccggagacaugggc

SEQ ID NO: 1816092 - RNA, 19 nt, Artificial Sequence
  Description of Artificial Sequence: Synthetic oligonucleotide
cguuguacggaguacagag

SEQ ID NO: 1816093 - RNA, 19 nt, Artificial Sequence
  Description of Artificial Sequence: Synthetic oligonucleotide
uggugacacauaacuucag

SEQ ID NO: 1816094 - RNA, 19 nt, Artificial Sequence
  Description of Artificial Sequence: Synthetic oligonucleotide
ugagcuccagaccugugua

SEQ ID NO: 1816095 - RNA, 19 nt, Artificial Sequence
  Description of Artificial Sequence: Synthetic oligonucleotide
uggauuucucccgaagcga

SEQ ID NO: 1816096 - RNA, 19 nt, Artificial Sequence
  Description of Artificial Sequence: Synthetic oligonucleotide
uaggcagucguaacgcuua

SEQ ID NO: 1816097 - RNA, 19 nt, Artificial Sequence
  Description of Artificial Sequence: Synthetic oligonucleotide
acggaguacagagucuggg

SEQ ID NO: 1816098 - RNA, 19 nt, Artificial Sequence
  Description of Artificial Sequence: Synthetic oligonucleotide
gauaugaccagcuguguuu

SEQ ID NO: 1816099 - RNA, 19 nt, Artificial Sequence
  Description of Artificial Sequence: Synthetic oligonucleotide
ucuuccgaguagagaaaac

SEQ ID NO: 1816100 - RNA, 19 nt, Artificial Sequence
  Description of Artificial Sequence: Synthetic oligonucleotide
aacuucuuugcugggccug

SEQ ID NO: 1816101 - RNA, 19 nt, Artificial Sequence
  Description of Artificial Sequence: Synthetic oligonucleotide
cagucguaacgcuuagaag

SEQ ID NO: 1816102 - RNA, 19 nt, Artificial Sequence
  Description of Artificial Sequence: Synthetic oligonucleotide
uucuccaaugccgaugaaa

SEQ ID NO: 1816103 - RNA, 19 nt, Artificial Sequence
  Description of Artificial Sequence: Synthetic oligonucleotide
agaaagcuacagagaaugg

SEQ ID NO: 1816104 - RNA, 19 nt, Artificial Sequence
  Description of Artificial Sequence: Synthetic oligonucleotide
acaaacuugaagacugcga

SEQ ID NO: 1816105 - RNA, 19 nt, Artificial Sequence
  Description of Artificial Sequence: Synthetic oligonucleotide
guuccacgaggacaggcag

SEQ ID NO: 1816106 - RNA, 19 nt, Artificial Sequence
  Description of Artificial Sequence: Synthetic oligonucleotide
cagauccacauguggagug

SEQ ID NO: 1816107 - RNA, 19 nt, Artificial Sequence
  Description of Artificial Sequence: Synthetic oligonucleotide
aacccuguguugggcacac

SEQ ID NO: 1816108 - RNA, 19 nt, Artificial Sequence
  Description of Artificial Sequence: Synthetic oligonucleotide
aaggagcaucuccuuggug

SEQ ID NO: 1816109 - RNA, 19 nt, Artificial Sequence
  Description of Artificial Sequence: Synthetic oligonucleotide
uguguuucccggagacaug

SEQ ID NO: 1816110 - RNA, 19 nt, Artificial Sequence
  Description of Artificial Sequence: Synthetic oligonucleotide
aaccagcucugcgauauga

SEQ ID NO: 1816111 - RNA, 19 nt, Artificial Sequence
  Description of Artificial Sequence: Synthetic oligonucleotide
gaggagguaguugcuguag

SEQ ID NO: 1816112 - RNA, 19 nt, Artificial Sequence
  Description of Artificial Sequence: Synthetic oligonucleotide
aauuuguuuauggccccaa

SEQ ID NO: 1816113 - RNA, 19 nt, Artificial Sequence
  Description of Artificial Sequence: Synthetic oligonucleotide
ggcagaaucguuccacgag

SEQ ID NO: 1816114 - RNA, 19 nt, Artificial Sequence
  Description of Artificial Sequence: Synthetic oligonucleotide
guacggaguacagagucug

SEQ ID NO: 1816115 - RNA, 19 nt, Artificial Sequence
  Description of Artificial Sequence: Synthetic oligonucleotide
aagaauccugagugacaca

SEQ ID NO: 1816116 - RNA, 19 nt, Artificial Sequence
  Description of Artificial Sequence: Synthetic oligonucleotide
aaugugagcuccagaccug

SEQ ID NO: 1816117 - RNA, 19 nt, Artificial Sequence
  Description of Artificial Sequence: Synthetic oligonucleotide
aggcauguugagaaagauc

SEQ ID NO: 1816118 - RNA, 19 nt, Artificial Sequence
  Description of Artificial Sequence: Synthetic oligonucleotide
uguaggcagucguaacgcu

SEQ ID NO: 1816119 - RNA, 19 nt, Artificial Sequence
  Description of Artificial Sequence: Synthetic oligonucleotide
uacaggucccguacacccc

SEQ ID NO: 1816120 - RNA, 19 nt, Artificial Sequence
  Description of Artificial Sequence: Synthetic oligonucleotide
uucccggagacaugggccu

SEQ ID NO: 1816121 - RNA, 19 nt, Artificial Sequence
  Description of Artificial Sequence: Synthetic oligonucleotide
guaacgcuuagaaggagca

SEQ ID NO: 1816122 - RNA, 19 nt, Artificial Sequence
  Description of Artificial Sequence: Synthetic oligonucleotide
cagcucugcgauaugacca

SEQ ID NO: 1816123 - RNA, 19 nt, Artificial Sequence
  Description of Artificial Sequence: Synthetic oligonucleotide
ucgacugaacaaacuugaa

SEQ ID NO: 1816124 - RNA, 19 nt, Artificial Sequence
  Description of Artificial Sequence: Synthetic oligonucleotide
ugggccucaucgaauacuu

SEQ ID NO: 1816125 - RNA, 19 nt, Artificial Sequence
  Description of Artificial Sequence: Synthetic oligonucleotide
ugucuuccgaguagagaaa

SEQ ID NO: 1816126 - RNA, 19 nt, Artificial Sequence
  Description of Artificial Sequence: Synthetic oligonucleotide
ggccugauguaugaaaugc

SEQ ID NO: 1816127 - RNA, 19 nt, Artificial Sequence
  Description of Artificial Sequence: Synthetic oligonucleotide
ccagagaguccaaucaggc

SEQ ID NO: 1816128 - RNA, 19 nt, Artificial Sequence
  Description of Artificial Sequence: Synthetic oligonucleotide
ucucaccaucccagcauug

SEQ ID NO: 1816129 - RNA, 19 nt, Artificial Sequence
  Description of Artificial Sequence: Synthetic oligonucleotide
gagcuccagaccuguguag

SEQ ID NO: 1816130 - RNA, 19 nt, Artificial Sequence
  Description of Artificial Sequence: Synthetic oligonucleotide
agaacccaaauaucaccau

SEQ ID NO: 1816131 - RNA, 19 nt, Artificial Sequence
  Description of Artificial Sequence: Synthetic oligonucleotide
caaucaggcuuuucucuuc

SEQ ID NO: 1816132 - RNA, 19 nt, Artificial Sequence
  Description of Artificial Sequence: Synthetic oligonucleotide
caucgaauacuucaguagu

SEQ ID NO: 1816133 - RNA, 19 nt, Artificial Sequence
  Description of Artificial Sequence: Synthetic oligonucleotide
uucucaccaucccagcauu

SEQ ID NO: 1816134 - RNA, 19 nt, Artificial Sequence
  Description of Artificial Sequence: Synthetic oligonucleotide
auuuguuuauggccccaau

SEQ ID NO: 1816135 - RNA, 19 nt, Artificial Sequence
  Description of Artificial Sequence: Synthetic oligonucleotide
aagcuacagagaauggcaa

SEQ ID NO: 1816136 - RNA, 19 nt, Artificial Sequence
  Description of Artificial Sequence: Synthetic oligonucleotide
gguccuaagucaugaaaca

SEQ ID NO: 1816137 - RNA, 19 nt, Artificial Sequence
  Description of Artificial Sequence: Synthetic oligonucleotide
agcgucccacuccacagug

SEQ ID NO: 1816138 - RNA, 19 nt, Artificial Sequence
  Description of Artificial Sequence: Synthetic oligonucleotide
acaggucccguacacccca

SEQ ID NO: 1816139 - RNA, 19 nt, Artificial Sequence
  Description of Artificial Sequence: Synthetic oligonucleotide
aggagguaguugcuguaga

SEQ ID NO: 1816140 - RNA, 19 nt, Artificial Sequence
  Description of Artificial Sequence: Synthetic oligonucleotide
cuucaguagucagagccuc

SEQ ID NO: 1816141 - RNA, 19 nt, Artificial Sequence
  Description of Artificial Sequence: Synthetic oligonucleotide
ucacuauuugaaaguccuu

SEQ ID NO: 1816142 - RNA, 19 nt, Artificial Sequence
  Description of Artificial Sequence: Synthetic oligonucleotide
uaugaccagcuguguuucc

SEQ ID NO: 1816143 - RNA, 19 nt, Artificial Sequence
  Description of Artificial Sequence: Synthetic oligonucleotide
cuucccagauccacaugug

SEQ ID NO: 1816144 - RNA, 19 nt, Artificial Sequence
  Description of Artificial Sequence: Synthetic oligonucleotide
agaccuguguaggcagucg

SEQ ID NO: 1816145 - RNA, 19 nt, Artificial Sequence
  Description of Artificial Sequence: Synthetic oligonucleotide
ccauagcuagcaagaaucc

SEQ ID NO: 1816146 - RNA, 19 nt, Artificial Sequence
  Description of Artificial Sequence: Synthetic oligonucleotide
acuucaguagucagagccu

SEQ ID NO: 1816147 - RNA, 19 nt, Artificial Sequence
  Description of Artificial Sequence: Synthetic oligonucleotide
ucguaacgcuuagaaggag

SEQ ID NO: 1816148 - RNA, 19 nt, Artificial Sequence
  Description of Artificial Sequence: Synthetic oligonucleotide
cuguguaggcagucguaac

SEQ ID NO: 1816149 - RNA, 19 nt, Artificial Sequence
  Description of Artificial Sequence: Synthetic oligonucleotide
ugguggcguguucucacca

SEQ ID NO: 1816150 - RNA, 19 nt, Artificial Sequence
  Description of Artificial Sequence: Synthetic oligonucleotide
aggcagaaucguuccacga

SEQ ID NO: 1816151 - RNA, 19 nt, Artificial Sequence
  Description of Artificial Sequence: Synthetic oligonucleotide
cccgaagcgauuauucuug

SEQ ID NO: 1816152 - RNA, 19 nt, Artificial Sequence
  Description of Artificial Sequence: Synthetic oligonucleotide
aggacaggcagccgcuuga

SEQ ID NO: 1816153 - RNA, 19 nt, Artificial Sequence
  Description of Artificial Sequence: Synthetic oligonucleotide
acacauaacuucagagacu

SEQ ID NO: 1816154 - RNA, 19 nt, Artificial Sequence
  Description of Artificial Sequence: Synthetic oligonucleotide
gacaaaggcaggggcguug

SEQ ID NO: 1816155 - RNA, 19 nt, Artificial Sequence
  Description of Artificial Sequence: Synthetic oligonucleotide
gcagucguaacgcuuagaa

SEQ ID NO: 1816156 - RNA, 19 nt, Artificial Sequence
  Description of Artificial Sequence: Synthetic oligonucleotide
ggugacacauaacuucaga

SEQ ID NO: 1816157 - RNA, 19 nt, Artificial Sequence
  Description of Artificial Sequence: Synthetic oligonucleotide
uccacauguggaguggcau

SEQ ID NO: 1816158 - RNA, 19 nt, Artificial Sequence
  Description of Artificial Sequence: Synthetic oligonucleotide
ucguuccacgaggacaggc

SEQ ID NO: 1816159 - RNA, 19 nt, Artificial Sequence
  Description of Artificial Sequence: Synthetic oligonucleotide
ugcgaaggcuggugcacug

SEQ ID NO: 1816160 - RNA, 19 nt, Artificial Sequence
  Description of Artificial Sequence: Synthetic oligonucleotide
ugugugguggcguguucuc

SEQ ID NO: 1816161 - RNA, 19 nt, Artificial Sequence
  Description of Artificial Sequence: Synthetic oligonucleotide
gcuugaaccagcucugcga

SEQ ID NO: 1816162 - RNA, 19 nt, Artificial Sequence
  Description of Artificial Sequence: Synthetic oligonucleotide
acaaugugucucagcaucu

SEQ ID NO: 1816163 - RNA, 19 nt, Artificial Sequence
  Description of Artificial Sequence: Synthetic oligonucleotide
cauaacuucagagacuuuu

SEQ ID NO: 1816164 - RNA, 19 nt, Artificial Sequence
  Description of Artificial Sequence: Synthetic oligonucleotide
gcuuccugguccuaaguca

SEQ ID NO: 1816165 - RNA, 19 nt, Artificial Sequence
  Description of Artificial Sequence: Synthetic oligonucleotide
gucguaacgcuuagaagga

SEQ ID NO: 1816166 - RNA, 19 nt, Artificial Sequence
  Description of Artificial Sequence: Synthetic oligonucleotide
ccagcucugcgauaugacc

SEQ ID NO: 1816167 - RNA, 19 nt, Artificial Sequence
  Description of Artificial Sequence: Synthetic oligonucleotide
cguguucucaccaucccag

SEQ ID NO: 1816168 - RNA, 19 nt, Artificial Sequence
  Description of Artificial Sequence: Synthetic oligonucleotide
guaugaaaugcuguuaguu

SEQ ID NO: 1816169 - RNA, 19 nt, Artificial Sequence
  Description of Artificial Sequence: Synthetic oligonucleotide
cccagauccacauguggag

SEQ ID NO: 1816170 - RNA, 19 nt, Artificial Sequence
  Description of Artificial Sequence: Synthetic oligonucleotide
ugagugacacauggcguuc

SEQ ID NO: 1816171 - RNA, 19 nt, Artificial Sequence
  Description of Artificial Sequence: Synthetic oligonucleotide
cagaaucguuccacgagga

SEQ ID NO: 1816172 - RNA, 19 nt, Artificial Sequence
  Description of Artificial Sequence: Synthetic oligonucleotide
gacugcgaaggcuggugca

SEQ ID NO: 1816173 - RNA, 19 nt, Artificial Sequence
  Description of Artificial Sequence: Synthetic oligonucleotide
acgcuuagaaggagcaucu

SEQ ID NO: 1816174 - RNA, 19 nt, Artificial Sequence
  Description of Artificial Sequence: Synthetic oligonucleotide
cguaacgcuuagaaggagc

SEQ ID NO: 1816175 - RNA, 19 nt, Artificial Sequence
  Description of Artificial Sequence: Synthetic oligonucleotide
cccaauacaggucccguac

SEQ ID NO: 1816176 - RNA, 19 nt, Artificial Sequence
  Description of Artificial Sequence: Synthetic oligonucleotide
aagugcaccaggguaccua

SEQ ID NO: 1816177 - RNA, 19 nt, Artificial Sequence
  Description of Artificial Sequence: Synthetic oligonucleotide
aucucaaaacagacugcug

SEQ ID NO: 1816178 - RNA, 19 nt, Artificial Sequence
  Description of Artificial Sequence: Synthetic oligonucleotide
cugguccuaagucaugaaa

SEQ ID NO: 1816179 - RNA, 19 nt, Artificial Sequence
  Description of Artificial Sequence: Synthetic oligonucleotide
cacugucuuccgaguagag

SEQ ID NO: 1816180 - RNA, 19 nt, Artificial Sequence
  Description of Artificial Sequence: Synthetic oligonucleotide
aucuccaggcauguugaga

SEQ ID NO: 1816181 - RNA, 19 nt, Artificial Sequence
  Description of Artificial Sequence: Synthetic oligonucleotide
ggcguucaaggcagaaucg

SEQ ID NO: 1816182 - RNA, 19 nt, Artificial Sequence
  Description of Artificial Sequence: Synthetic oligonucleotide
auggcagcagcgucccacu

SEQ ID NO: 1816183 - RNA, 19 nt, Artificial Sequence
  Description of Artificial Sequence: Synthetic oligonucleotide
ugguuccaaagaacccaaa

SEQ ID NO: 1816184 - RNA, 19 nt, Artificial Sequence
  Description of Artificial Sequence: Synthetic oligonucleotide
aggagcugccagugaagga

SEQ ID NO: 1816185 - RNA, 19 nt, Artificial Sequence
  Description of Artificial Sequence: Synthetic oligonucleotide
caucuccaggcauguugag

SEQ ID NO: 1816186 - RNA, 19 nt, Artificial Sequence
  Description of Artificial Sequence: Synthetic oligonucleotide
ugggugcaucuccaggcau

SEQ ID NO: 1816187 - RNA, 19 nt, Artificial Sequence
  Description of Artificial Sequence: Synthetic oligonucleotide
cuaagcagcuggguguuga

SEQ ID NO: 1816188 - RNA, 19 nt, Artificial Sequence
  Description of Artificial Sequence: Synthetic oligonucleotide
ggccgaagaggcuuccacc

SEQ ID NO: 1816189 - RNA, 19 nt, Artificial Sequence
  Description of Artificial Sequence: Synthetic oligonucleotide
aggcagucguaacgcuuag

SEQ ID NO: 1816190 - RNA, 19 nt, Artificial Sequence
  Description of Artificial Sequence: Synthetic oligonucleotide
uuucucccgaagcgauuau

SEQ ID NO: 1816191 - RNA, 19 nt, Artificial Sequence
  Description of Artificial Sequence: Synthetic oligonucleotide
agugacacauggcguucaa

SEQ ID NO: 1816192 - RNA, 19 nt, Artificial Sequence
  Description of Artificial Sequence: Synthetic oligonucleotide
gucucccaggcccagcaga

SEQ ID NO: 1816193 - RNA, 19 nt, Artificial Sequence
  Description of Artificial Sequence: Synthetic oligonucleotide
gugacacauggcguucaag

SEQ ID NO: 1816194 - RNA, 19 nt, Artificial Sequence
  Description of Artificial Sequence: Synthetic oligonucleotide
gucccguacaccccagaga

SEQ ID NO: 1816195 - RNA, 19 nt, Artificial Sequence
  Description of Artificial Sequence: Synthetic oligonucleotide
gacaggcagccgcuugaac

SEQ ID NO: 1816196 - RNA, 19 nt, Artificial Sequence
  Description of Artificial Sequence: Synthetic oligonucleotide
cuagaagaaccacuggauu

SEQ ID NO: 1816197 - RNA, 19 nt, Artificial Sequence
  Description of Artificial Sequence: Synthetic oligonucleotide
uaacgcuuagaaggagcau

SEQ ID NO: 1816198 - RNA, 19 nt, Artificial Sequence
  Description of Artificial Sequence: Synthetic oligonucleotide
gaaggagcaucuccuuggu

SEQ ID NO: 1816199 - RNA, 19 nt, Artificial Sequence
  Description of Artificial Sequence: Synthetic oligonucleotide
guguugggcacacuuuaua

SEQ ID NO: 1816200 - RNA, 19 nt, Artificial Sequence
  Description of Artificial Sequence: Synthetic oligonucleotide
gcuagcaagaauccugagu

SEQ ID NO: 1816201 - RNA, 19 nt, Artificial Sequence
  Description of Artificial Sequence: Synthetic oligonucleotide
gggccugauguaugaaaug

SEQ ID NO: 1816202 - RNA, 19 nt, Artificial Sequence
  Description of Artificial Sequence: Synthetic oligonucleotide
agcugcgcagaucgacuga

SEQ ID NO: 1816203 - RNA, 19 nt, Artificial Sequence
  Description of Artificial Sequence: Synthetic oligonucleotide
gcaaugggugcaucuccag

SEQ ID NO: 1816204 - RNA, 19 nt, Artificial Sequence
  Description of Artificial Sequence: Synthetic oligonucleotide
cugggccugauguaugaaa

SEQ ID NO: 1816205 - RNA, 19 nt, Artificial Sequence
  Description of Artificial Sequence: Synthetic oligonucleotide
cuugaagacugcgaaggcu

SEQ ID NO: 1816206 - RNA, 19 nt, Artificial Sequence
  Description of Artificial Sequence: Synthetic oligonucleotide
gcaggggcguuguacggag

SEQ ID NO: 1816207 - RNA, 19 nt, Artificial Sequence
  Description of Artificial Sequence: Synthetic oligonucleotide
cuugaaccagcucugcgau

SEQ ID NO: 1816208 - RNA, 19 nt, Artificial Sequence
  Description of Artificial Sequence: Synthetic oligonucleotide
gucuuccgaguagagaaaa

SEQ ID NO: 1816209 - RNA, 19 nt, Artificial Sequence
  Description of Artificial Sequence: Synthetic oligonucleotide
gaccuguguaggcagucgu

SEQ ID NO: 1816210 - RNA, 19 nt, Artificial Sequence
  Description of Artificial Sequence: Synthetic oligonucleotide
gugagcuccagaccugugu

SEQ ID NO: 1816211 - RNA, 19 nt, Artificial Sequence
  Description of Artificial Sequence: Synthetic oligonucleotide
uuucuccaaugccgaugaa

SEQ ID NO: 1816212 - RNA, 19 nt, Artificial Sequence
  Description of Artificial Sequence: Synthetic oligonucleotide
auggcguucaaggcagaau

SEQ ID NO: 1816213 - RNA, 19 nt, Artificial Sequence
  Description of Artificial Sequence: Synthetic oligonucleotide
ggcguguucucaccauccc

SEQ ID NO: 1816214 - RNA, 19 nt, Artificial Sequence
  Description of Artificial Sequence: Synthetic oligonucleotide
agcaggccgaagaggcuuc

SEQ ID NO: 1816215 - RNA, 19 nt, Artificial Sequence
  Description of Artificial Sequence: Synthetic oligonucleotide
cgauuauucuugcucagca

SEQ ID NO: 1816216 - RNA, 19 nt, Artificial Sequence
  Description of Artificial Sequence: Synthetic oligonucleotide
cugcgauaugaccagcugu

SEQ ID NO: 1816217 - RNA, 19 nt, Artificial Sequence
  Description of Artificial Sequence: Synthetic oligonucleotide
aggguaccuagaagaacca

SEQ ID NO: 1816218 - RNA, 19 nt, Artificial Sequence
  Description of Artificial Sequence: Synthetic oligonucleotide
ccgaugaaaauuccagaga

SEQ ID NO: 1816219 - RNA, 19 nt, Artificial Sequence
  Description of Artificial Sequence: Synthetic oligonucleotide
ccaccuaaaauuucuccaa

SEQ ID NO: 1816220 - RNA, 19 nt, Artificial Sequence
  Description of Artificial Sequence: Synthetic oligonucleotide
uucucccgaagcgauuauu

SEQ ID NO: 1816221 - RNA, 19 nt, Artificial Sequence
  Description of Artificial Sequence: Synthetic oligonucleotide
ggagcaaugggugcaucuc

SEQ ID NO: 1816222 - RNA, 19 nt, Artificial Sequence
  Description of Artificial Sequence: Synthetic oligonucleotide
cugagugacacauggcguu

SEQ ID NO: 1816223 - RNA, 19 nt, Artificial Sequence
  Description of Artificial Sequence: Synthetic oligonucleotide
cagaucgacugaacaaacu

SEQ ID NO: 1816224 - RNA, 19 nt, Artificial Sequence
  Description of Artificial Sequence: Synthetic oligonucleotide
ggcguuguacggaguacag

SEQ ID NO: 1816225 - RNA, 19 nt, Artificial Sequence
  Description of Artificial Sequence: Synthetic oligonucleotide
gaagaaccacuggauuucu

SEQ ID NO: 1816226 - RNA, 19 nt, Artificial Sequence
  Description of Artificial Sequence: Synthetic oligonucleotide
gcagaucgacugaacaaac

SEQ ID NO: 1816227 - RNA, 19 nt, Artificial Sequence
  Description of Artificial Sequence: Synthetic oligonucleotide
cggaguacagagucugggc

SEQ ID NO: 1816228 - RNA, 19 nt, Artificial Sequence
  Description of Artificial Sequence: Synthetic oligonucleotide
gcagcagcgucccacucca

SEQ ID NO: 1816229 - RNA, 19 nt, Artificial Sequence
  Description of Artificial Sequence: Synthetic oligonucleotide
cuacaaagugcaccagggu

SEQ ID NO: 1816230 - RNA, 19 nt, Artificial Sequence
  Description of Artificial Sequence: Synthetic oligonucleotide
cugcgcagaucgacugaac

SEQ ID NO: 1816231 - RNA, 19 nt, Artificial Sequence
  Description of Artificial Sequence: Synthetic oligonucleotide
cauagcuagcaagaauccu

SEQ ID NO: 1816232 - RNA, 19 nt, Artificial Sequence
  Description of Artificial Sequence: Synthetic oligonucleotide
gcacacuuuauaacccaac

SEQ ID NO: 1816233 - RNA, 19 nt, Artificial Sequence
  Description of Artificial Sequence: Synthetic oligonucleotide
cuccagaccuguguaggca

SEQ ID NO: 1816234 - RNA, 19 nt, Artificial Sequence
  Description of Artificial Sequence: Synthetic oligonucleotide
cagaccuguguaggcaguc

SEQ ID NO: 1816235 - RNA, 19 nt, Artificial Sequence
  Description of Artificial Sequence: Synthetic oligonucleotide
aagcgacagcugcgcagau

SEQ ID NO: 1816236 - RNA, 19 nt, Artificial Sequence
  Description of Artificial Sequence: Synthetic oligonucleotide
gcaucuccaggcauguuga

SEQ ID NO: 1816237 - RNA, 19 nt, Artificial Sequence
  Description of Artificial Sequence: Synthetic oligonucleotide
cucugcgauaugaccagcu

SEQ ID NO: 1816238 - RNA, 19 nt, Artificial Sequence
  Description of Artificial Sequence: Synthetic oligonucleotide
cuugcucagcaggccgaag

SEQ ID NO: 1816239 - RNA, 19 nt, Artificial Sequence
  Description of Artificial Sequence: Synthetic oligonucleotide
ccgaagcgauuauucuugc

SEQ ID NO: 1816240 - RNA, 19 nt, Artificial Sequence
  Description of Artificial Sequence: Synthetic oligonucleotide
gcgcagaucgacugaacaa

SEQ ID NO: 1816241 - RNA, 19 nt, Artificial Sequence
  Description of Artificial Sequence: Synthetic oligonucleotide
ccguacaccccagagaaga

SEQ ID NO: 1816242 - RNA, 19 nt, Artificial Sequence
  Description of Artificial Sequence: Synthetic oligonucleotide
cugcacaucaagacccuau

SEQ ID NO: 1816243 - RNA, 19 nt, Artificial Sequence
  Description of Artificial Sequence: Synthetic oligonucleotide
cccuaucucaaaacaaugu

SEQ ID NO: 1816244 - RNA, 19 nt, Artificial Sequence
  Description of Artificial Sequence: Synthetic oligonucleotide
guuguacggaguacagagu

SEQ ID NO: 1816245 - RNA, 19 nt, Artificial Sequence
  Description of Artificial Sequence: Synthetic oligonucleotide
gugcacugucuuccgagua

SEQ ID NO: 1816246 - RNA, 19 nt, Artificial Sequence
  Description of Artificial Sequence: Synthetic oligonucleotide
caccuaaaauuucuccaau

SEQ ID NO: 1816247 - RNA, 19 nt, Artificial Sequence
  Description of Artificial Sequence: Synthetic oligonucleotide
gccgaagaggcuuccaccu

SEQ ID NO: 1816248 - RNA, 19 nt, Artificial Sequence
  Description of Artificial Sequence: Synthetic oligonucleotide
ccuucccagauccacaugu

SEQ ID NO: 1816249 - RNA, 19 nt, Artificial Sequence
  Description of Artificial Sequence: Synthetic oligonucleotide
gcguguucucaccauccca

SEQ ID NO: 1816250 - RNA, 19 nt, Artificial Sequence
  Description of Artificial Sequence: Synthetic oligonucleotide
cuccacagugaagaaugaa

SEQ ID NO: 1816251 - RNA, 19 nt, Artificial Sequence
  Description of Artificial Sequence: Synthetic oligonucleotide
aggucccguacaccccaga

SEQ ID NO: 1816252 - RNA, 19 nt, Artificial Sequence
  Description of Artificial Sequence: Synthetic oligonucleotide
caggucccguacaccccag

SEQ ID NO: 1816253 - RNA, 19 nt, Artificial Sequence
  Description of Artificial Sequence: Synthetic oligonucleotide
gagaguccaaucaggcuuu

SEQ ID NO: 1816254 - RNA, 19 nt, Artificial Sequence
  Description of Artificial Sequence: Synthetic oligonucleotide
cgcuugaaccagcucugcg

SEQ ID NO: 1816255 - RNA, 19 nt, Artificial Sequence
  Description of Artificial Sequence: Synthetic oligonucleotide
ccaggguaccuagaagaac

SEQ ID NO: 1816256 - RNA, 19 nt, Artificial Sequence
  Description of Artificial Sequence: Synthetic oligonucleotide
ggguaccuagaagaaccac

SEQ ID NO: 1816257 - RNA, 19 nt, Artificial Sequence
  Description of Artificial Sequence: Synthetic oligonucleotide
gacaugggccucaucgaau

SEQ ID NO: 1816258 - RNA, 19 nt, Artificial Sequence
  Description of Artificial Sequence: Synthetic oligonucleotide
gcacaucaagacccuaucu

SEQ ID NO: 1816259 - RNA, 19 nt, Artificial Sequence
  Description of Artificial Sequence: Synthetic oligonucleotide
gaagacugcgaaggcuggu

SEQ ID NO: 1816260 - RNA, 19 nt, Artificial Sequence
  Description of Artificial Sequence: Synthetic oligonucleotide
ccaauacaggucccguaca

SEQ ID NO: 1816261 - RNA, 19 nt, Artificial Sequence
  Description of Artificial Sequence: Synthetic oligonucleotide
gugugugguggcguguucu

SEQ ID NO: 1816262 - RNA, 19 nt, Artificial Sequence
  Description of Artificial Sequence: Synthetic oligonucleotide
ggcacacuuuauaacccaa

SEQ ID NO: 1816263 - RNA, 19 nt, Artificial Sequence
  Description of Artificial Sequence: Synthetic oligonucleotide
accuguguaggcagucgua

SEQ ID NO: 1816264 - RNA, 19 nt, Artificial Sequence
  Description of Artificial Sequence: Synthetic oligonucleotide
cauggcguucaaggcagaa

SEQ ID NO: 1816265 - RNA, 19 nt, Artificial Sequence
  Description of Artificial Sequence: Synthetic oligonucleotide
agacaaaggcaggggcguu

SEQ ID NO: 1816266 - RNA, 19 nt, Artificial Sequence
  Description of Artificial Sequence: Synthetic oligonucleotide
cuccaggcauguugagaaa

SEQ ID NO: 1816267 - RNA, 19 nt, Artificial Sequence
  Description of Artificial Sequence: Synthetic oligonucleotide
guacagagucugggccagc

SEQ ID NO: 1816268 - RNA, 19 nt, Artificial Sequence
  Description of Artificial Sequence: Synthetic oligonucleotide
guacaccccagagaagaau

SEQ ID NO: 1816269 - RNA, 19 nt, Artificial Sequence
  Description of Artificial Sequence: Synthetic oligonucleotide
ccugagugacacauggcgu

SEQ ID NO: 1816270 - RNA, 19 nt, Artificial Sequence
  Description of Artificial Sequence: Synthetic oligonucleotide
cguuccacgaggacaggca

SEQ ID NO: 1816271 - RNA, 19 nt, Artificial Sequence
  Description of Artificial Sequence: Synthetic oligonucleotide
guaggcagucguaacgcuu

SEQ ID NO: 1816272 - RNA, 19 nt, Artificial Sequence
  Description of Artificial Sequence: Synthetic oligonucleotide
gauuucucccgaagcgauu

SEQ ID NO: 1816273 - RNA, 19 nt, Artificial Sequence
  Description of Artificial Sequence: Synthetic oligonucleotide
ggauuucucccgaagcgau

SEQ ID NO: 1816274 - RNA, 19 nt, Artificial Sequence
  Description of Artificial Sequence: Synthetic oligonucleotide
ccuguguaggcagucguaa

SEQ ID NO: 1816275 - RNA, 19 nt, Artificial Sequence
  Description of Artificial Sequence: Synthetic oligonucleotide
cugcugcacuuuaaacccu

SEQ ID NO: 1816276 - RNA, 19 nt, Artificial Sequence
  Description of Artificial Sequence: Synthetic oligonucleotide
cagccgcuugaaccagcuc

SEQ ID NO: 1816277 - RNA, 19 nt, Artificial Sequence
  Description of Artificial Sequence: Synthetic oligonucleotide
gcugcgcagaucgacugaa

SEQ ID NO: 1816278 - RNA, 19 nt, Artificial Sequence
  Description of Artificial Sequence: Synthetic oligonucleotide
ggggcguuguacggaguac

SEQ ID NO: 1816279 - RNA, 19 nt, Artificial Sequence
  Description of Artificial Sequence: Synthetic oligonucleotide
cccguacaccccagagaag

SEQ ID NO: 1816280 - RNA, 19 nt, Artificial Sequence
  Description of Artificial Sequence: Synthetic oligonucleotide
gcguuguacggaguacaga

SEQ ID NO: 1816281 - RNA, 19 nt, Artificial Sequence
  Description of Artificial Sequence: Synthetic oligonucleotide
cgcagaucgacugaacaaa

SEQ ID NO: 1816282 - RNA, 19 nt, Artificial Sequence
  Description of Artificial Sequence: Synthetic oligonucleotide
ggcaggggcguuguacgga

SEQ ID NO: 1816283 - RNA, 19 nt, Artificial Sequence
  Description of Artificial Sequence: Synthetic oligonucleotide
gcucugcgauaugaccagc

SEQ ID NO: 1816284 - RNA, 19 nt, Artificial Sequence
  Description of Artificial Sequence: Synthetic oligonucleotide
gcguucaaggcagaaucgu

SEQ ID NO: 1816285 - RNA, 19 nt, Artificial Sequence
  Description of Artificial Sequence: Synthetic oligonucleotide
acauggcguucaaggcaga

SEQ ID NO: 1816286 - RNA, 19 nt, Artificial Sequence
  Description of Artificial Sequence: Synthetic oligonucleotide
gccucgggccacaauggca

SEQ ID NO: 1816287 - RNA, 19 nt, Artificial Sequence
  Description of Artificial Sequence: Synthetic oligonucleotide
caggcccagcagaaagcua

SEQ ID NO: 1816288 - RNA, 19 nt, Artificial Sequence
  Description of Artificial Sequence: Synthetic oligonucleotide
ggcagccgcuugaaccagc

SEQ ID NO: 1816289 - RNA, 19 nt, Artificial Sequence
  Description of Artificial Sequence: Synthetic oligonucleotide
cagcagcgucccacuccac

SEQ ID NO: 1816290 - RNA, 19 nt, Artificial Sequence
  Description of Artificial Sequence: Synthetic oligonucleotide
ggcagucguaacgcuuaga

SEQ ID NO: 1816291 - RNA, 19 nt, Artificial Sequence
  Description of Artificial Sequence: Synthetic oligonucleotide
gguggcguguucucaccau

SEQ ID NO: 1816292 - RNA, 19 nt, Artificial Sequence
  Description of Artificial Sequence: Synthetic oligonucleotide
cgucccacuccacagugaa

SEQ ID NO: 1816293 - RNA, 19 nt, Artificial Sequence
  Description of Artificial Sequence: Synthetic oligonucleotide
cagcgucccacuccacagu

SEQ ID NO: 1816294 - RNA, 19 nt, Artificial Sequence
  Description of Artificial Sequence: Synthetic oligonucleotide
ggacaggcagccgcuugaa

SEQ ID NO: 1816295 - RNA, 19 nt, Artificial Sequence
  Description of Artificial Sequence: Synthetic oligonucleotide
cugcgaaggcuggugcacu

SEQ ID NO: 1816296 - RNA, 19 nt, Artificial Sequence
  Description of Artificial Sequence: Synthetic oligonucleotide
cagcaggccgaagaggcuu

SEQ ID NO: 1816297 - RNA, 19 nt, Artificial Sequence
  Description of Artificial Sequence: Synthetic oligonucleotide
gggccucaucgaauacuuc

SEQ ID NO: 1816298 - RNA, 19 nt, Artificial Sequence
  Description of Artificial Sequence: Synthetic oligonucleotide
ccuguguugggcacacuuu

SEQ ID NO: 1816299 - RNA, 19 nt, Artificial Sequence
  Description of Artificial Sequence: Synthetic oligonucleotide
ccccaauacaggucccgua

SEQ ID NO: 1816300 - RNA, 19 nt, Artificial Sequence
  Description of Artificial Sequence: Synthetic oligonucleotide
gcgauaugaccagcugugu

SEQ ID NO: 1816301 - RNA, 19 nt, Artificial Sequence
  Description of Artificial Sequence: Synthetic oligonucleotide
ccacgaggacaggcagccg

SEQ ID NO: 1816302 - RNA, 19 nt, Artificial Sequence
  Description of Artificial Sequence: Synthetic oligonucleotide
gccagugaaggaggaggua

SEQ ID NO: 1816303 - RNA, 19 nt, Artificial Sequence
  Description of Artificial Sequence: Synthetic oligonucleotide
cccuguguugggcacacuu

SEQ ID NO: 1816304 - RNA, 19 nt, Artificial Sequence
  Description of Artificial Sequence: Synthetic oligonucleotide
acccuguguugggcacacu

SEQ ID NO: 1816305 - RNA, 19 nt, Artificial Sequence
  Description of Artificial Sequence: Synthetic oligonucleotide
gcugcacuuuaaacccugu

SEQ ID NO: 1816306 - RNA, 19 nt, Artificial Sequence
  Description of Artificial Sequence: Synthetic oligonucleotide
cgaagcgauuauucuugcu

SEQ ID NO: 1816307 - RNA, 19 nt, Artificial Sequence
  Description of Artificial Sequence: Synthetic oligonucleotide
ccacuggauuucucccgaa

SEQ ID NO: 1816308 - RNA, 19 nt, Artificial Sequence
  Description of Artificial Sequence: Synthetic oligonucleotide
cgauaugaccagcuguguu

SEQ ID NO: 1816309 - RNA, 19 nt, Artificial Sequence
  Description of Artificial Sequence: Synthetic oligonucleotide
ccgaagaggcuuccaccua

SEQ ID NO: 1816310 - RNA, 19 nt, Artificial Sequence
  Description of Artificial Sequence: Synthetic oligonucleotide
gcgucccacuccacaguga

SEQ ID NO: 1816311 - RNA, 19 nt, Artificial Sequence
  Description of Artificial Sequence: Synthetic oligonucleotide
cgcuuagaaggagcaucuc

SEQ ID NO: 1816312 - RNA, 19 nt, Artificial Sequence
  Description of Artificial Sequence: Synthetic oligonucleotide
caggggcguuguacggagu

SEQ ID NO: 1816313 - RNA, 19 nt, Artificial Sequence
  Description of Artificial Sequence: Synthetic oligonucleotide
cccggagacaugggccuca

SEQ ID NO: 1816314 - RNA, 19 nt, Artificial Sequence
  Description of Artificial Sequence: Synthetic oligonucleotide
gcgaaggcuggugcacugu

SEQ ID NO: 1816315 - RNA, 19 nt, Artificial Sequence
  Description of Artificial Sequence: Synthetic oligonucleotide
ccacuccacagugaagaau

SEQ ID NO: 1816316 - RNA, 19 nt, Artificial Sequence
  Description of Artificial Sequence: Synthetic oligonucleotide
cgacagcugcgcagaucga

SEQ ID NO: 1816317 - RNA, 19 nt, Artificial Sequence
  Description of Artificial Sequence: Synthetic oligonucleotide
  modified_base (1)..(1): a, c, u, g, unknown or other
naaaauugugugugguggc

SEQ ID NO: 1816318 - RNA, 19 nt, Artificial Sequence
  Description of Artificial Sequence: Synthetic oligonucleotide
aauuuaauuccacaaacgg

SEQ ID NO: 1816319 - RNA, 19 nt, Artificial Sequence
  Description of Artificial Sequence: Synthetic oligonucleotide
aauacugagaaacagaaau

SEQ ID NO: 1816320 - RNA, 19 nt, Artificial Sequence
  Description of Artificial Sequence: Synthetic oligonucleotide
uuuaauuccacaaacggca

SEQ ID NO: 1816321 - RNA, 19 nt, Artificial Sequence
  Description of Artificial Sequence: Synthetic oligonucleotide
agaaauacgcuaaugaugc

SEQ ID NO: 1816322 - RNA, 19 nt, Artificial Sequence
  Description of Artificial Sequence: Synthetic oligonucleotide
aaacguuuuaggcacuugg

SEQ ID NO: 1816323 - RNA, 19 nt, Artificial Sequence
  Description of Artificial Sequence: Synthetic oligonucleotide
aauguuaaaauuuguugga

SEQ ID NO: 1816324 - RNA, 19 nt, Artificial Sequence
  Description of Artificial Sequence: Synthetic oligonucleotide
ucaggauagacccugagga

SEQ ID NO: 1816325 - RNA, 19 nt, Artificial Sequence
  Description of Artificial Sequence: Synthetic oligonucleotide
aaugacuaucuacugacug

SEQ ID NO: 1816326 - RNA, 19 nt, Artificial Sequence
  Description of Artificial Sequence: Synthetic oligonucleotide
aauacgcuaaugaugcggc

SEQ ID NO: 1816327 - RNA, 19 nt, Artificial Sequence
  Description of Artificial Sequence: Synthetic oligonucleotide
gagaagugcacccacauug

SEQ ID NO: 1816328 - RNA, 19 nt, Artificial Sequence
  Description of Artificial Sequence: Synthetic oligonucleotide
aaauacgcuaaugaugcgg

SEQ ID NO: 1816329 - RNA, 19 nt, Artificial Sequence
  Description of Artificial Sequence: Synthetic oligonucleotide
auuuaauuccacaaacggc

SEQ ID NO: 1816330 - RNA, 19 nt, Artificial Sequence
  Description of Artificial Sequence: Synthetic oligonucleotide
augacuaucuacugacugc

SEQ ID NO: 1816331 - RNA, 19 nt, Artificial Sequence
  Description of Artificial Sequence: Synthetic oligonucleotide
cuggauggcacuuucaggg

SEQ ID NO: 1816332 - RNA, 19 nt, Artificial Sequence
  Description of Artificial Sequence: Synthetic oligonucleotide
aaauauuggcugcugauaa

SEQ ID NO: 1816333 - RNA, 19 nt, Artificial Sequence
  Description of Artificial Sequence: Synthetic oligonucleotide
uuuauccuuuaucuguggg

SEQ ID NO: 1816334 - RNA, 19 nt, Artificial Sequence
  Description of Artificial Sequence: Synthetic oligonucleotide
aaauuuguuggaaacaccu

SEQ ID NO: 1816335 - RNA, 19 nt, Artificial Sequence
  Description of Artificial Sequence: Synthetic oligonucleotide
uuuaaagucaggagaaguc

SEQ ID NO: 1816336 - RNA, 19 nt, Artificial Sequence
  Description of Artificial Sequence: Synthetic oligonucleotide
ggagacaucaucuaggcgc

SEQ ID NO: 1816337 - RNA, 19 nt, Artificial Sequence
  Description of Artificial Sequence: Synthetic oligonucleotide
uaaaauuuguuggaaacac

SEQ ID NO: 1816338 - RNA, 19 nt, Artificial Sequence
  Description of Artificial Sequence: Synthetic oligonucleotide
aguuccaguguauuuaaag

SEQ ID NO: 1816339 - RNA, 19 nt, Artificial Sequence
  Description of Artificial Sequence: Synthetic oligonucleotide
uggagacagguucugaggg

SEQ ID NO: 1816340 - RNA, 19 nt, Artificial Sequence
  Description of Artificial Sequence: Synthetic oligonucleotide
aggacuguguccuggaugg

SEQ ID NO: 1816341 - RNA, 19 nt, Artificial Sequence
  Description of Artificial Sequence: Synthetic oligonucleotide
gaguucuugagaaauacgc

SEQ ID NO: 1816342 - RNA, 19 nt, Artificial Sequence
  Description of Artificial Sequence: Synthetic oligonucleotide
auuuguuggaaacaccucu

SEQ ID NO: 1816343 - RNA, 19 nt, Artificial Sequence
  Description of Artificial Sequence: Synthetic oligonucleotide
uuaggccucagcagcaucg

SEQ ID NO: 1816344 - RNA, 19 nt, Artificial Sequence
  Description of Artificial Sequence: Synthetic oligonucleotide
acugcuguaagccagcggu

SEQ ID NO: 1816345 - RNA, 19 nt, Artificial Sequence
  Description of Artificial Sequence: Synthetic oligonucleotide
ugaguucuugagaaauacg

SEQ ID NO: 1816346 - RNA, 19 nt, Artificial Sequence
  Description of Artificial Sequence: Synthetic oligonucleotide
agaugaucgguguuugugg

SEQ ID NO: 1816347 - RNA, 19 nt, Artificial Sequence
  Description of Artificial Sequence: Synthetic oligonucleotide
caggaugucauucacuacc

SEQ ID NO: 1816348 - RNA, 19 nt, Artificial Sequence
  Description of Artificial Sequence: Synthetic oligonucleotide
uaagccagcgguagggacg

SEQ ID NO: 1816349 - RNA, 19 nt, Artificial Sequence
  Description of Artificial Sequence: Synthetic oligonucleotide
ucaucuaggcgcuucaaga

SEQ ID NO: 1816350 - RNA, 19 nt, Artificial Sequence
  Description of Artificial Sequence: Synthetic oligonucleotide
uuauccuuuaucugugggc

SEQ ID NO: 1816351 - RNA, 19 nt, Artificial Sequence
  Description of Artificial Sequence: Synthetic oligonucleotide
ugagaaauacgcuaaugau

SEQ ID NO: 1816352 - RNA, 19 nt, Artificial Sequence
  Description of Artificial Sequence: Synthetic oligonucleotide
uuaaagucaggagaaguca

SEQ ID NO: 1816353 - RNA, 19 nt, Artificial Sequence
  Description of Artificial Sequence: Synthetic oligonucleotide
ucuacugacugcuguaagc

SEQ ID NO: 1816354 - RNA, 19 nt, Artificial Sequence
  Description of Artificial Sequence: Synthetic oligonucleotide
aacggcaaagcagaaaugu

SEQ ID NO: 1816355 - RNA, 19 nt, Artificial Sequence
  Description of Artificial Sequence: Synthetic oligonucleotide
gugggcaucacuaauacug

SEQ ID NO: 1816356 - RNA, 19 nt, Artificial Sequence
  Description of Artificial Sequence: Synthetic oligonucleotide
ugugugugccuuuaguggc

SEQ ID NO: 1816357 - RNA, 19 nt, Artificial Sequence
  Description of Artificial Sequence: Synthetic oligonucleotide
agugcacccacauugcaag

SEQ ID NO: 1816358 - RNA, 19 nt, Artificial Sequence
  Description of Artificial Sequence: Synthetic oligonucleotide
ucuagaguggccagcaccu

SEQ ID NO: 1816359 - RNA, 19 nt, Artificial Sequence
  Description of Artificial Sequence: Synthetic oligonucleotide
aucuaggcgcuucaagagc

SEQ ID NO: 1816360 - RNA, 19 nt, Artificial Sequence
  Description of Artificial Sequence: Synthetic oligonucleotide
uggcugcugauaaacaucc

SEQ ID NO: 1816361 - RNA, 19 nt, Artificial Sequence
  Description of Artificial Sequence: Synthetic oligonucleotide
guuggaaacaccucucccc

SEQ ID NO: 1816362 - RNA, 19 nt, Artificial Sequence
  Description of Artificial Sequence: Synthetic oligonucleotide
guguauuuaaagucaggag

SEQ ID NO: 1816363 - RNA, 19 nt, Artificial Sequence
  Description of Artificial Sequence: Synthetic oligonucleotide
cacauugcaaguuccagug

SEQ ID NO: 1816364 - RNA, 19 nt, Artificial Sequence
  Description of Artificial Sequence: Synthetic oligonucleotide
uuccaguguauuuaaaguc

SEQ ID NO: 1816365 - RNA, 19 nt, Artificial Sequence
  Description of Artificial Sequence: Synthetic oligonucleotide
uauccuuuaucugugggca

SEQ ID NO: 1816366 - RNA, 19 nt, Artificial Sequence
  Description of Artificial Sequence: Synthetic oligonucleotide
gugugugugccuuuagugg

SEQ ID NO: 1816367 - RNA, 19 nt, Artificial Sequence
  Description of Artificial Sequence: Synthetic oligonucleotide
uaaugaugcggcaggagac

SEQ ID NO: 1816368 - RNA, 19 nt, Artificial Sequence
  Description of Artificial Sequence: Synthetic oligonucleotide
aauuuguuggaaacaccuc

SEQ ID NO: 1816369 - RNA, 19 nt, Artificial Sequence
  Description of Artificial Sequence: Synthetic oligonucleotide
acggggaaugacuaucuac

SEQ ID NO: 1816370 - RNA, 19 nt, Artificial Sequence
  Description of Artificial Sequence: Synthetic oligonucleotide
aaugccaggagaagugcac

SEQ ID NO: 1816371 - RNA, 19 nt, Artificial Sequence
  Description of Artificial Sequence: Synthetic oligonucleotide
ugaucgguguuuguggacg

SEQ ID NO: 1816372 - RNA, 19 nt, Artificial Sequence
  Description of Artificial Sequence: Synthetic oligonucleotide
uucuugagaaauacgcuaa

SEQ ID NO: 1816373 - RNA, 19 nt, Artificial Sequence
  Description of Artificial Sequence: Synthetic oligonucleotide
uuggagacaucaucuaggc

SEQ ID NO: 1816374 - RNA, 19 nt, Artificial Sequence
  Description of Artificial Sequence: Synthetic oligonucleotide
uguuggaaacaccucuccc

SEQ ID NO: 1816375 - RNA, 19 nt, Artificial Sequence
  Description of Artificial Sequence: Synthetic oligonucleotide
ucuaggcgcuucaagagcu

SEQ ID NO: 1816376 - RNA, 19 nt, Artificial Sequence
  Description of Artificial Sequence: Synthetic oligonucleotide
aaugacacggggaaugacu

SEQ ID NO: 1816377 - RNA, 19 nt, Artificial Sequence
  Description of Artificial Sequence: Synthetic oligonucleotide
cuucaagagcucaggauag

SEQ ID NO: 1816378 - RNA, 19 nt, Artificial Sequence
  Description of Artificial Sequence: Synthetic oligonucleotide
uuggaaacaccucucccca

SEQ ID NO: 1816379 - RNA, 19 nt, Artificial Sequence
  Description of Artificial Sequence: Synthetic oligonucleotide
acuaucuacugacugcugu

SEQ ID NO: 1816380 - RNA, 19 nt, Artificial Sequence
  Description of Artificial Sequence: Synthetic oligonucleotide
ggaaugacuaucuacugac

SEQ ID NO: 1816381 - RNA, 19 nt, Artificial Sequence
  Description of Artificial Sequence: Synthetic oligonucleotide
gaagucaguugguagcggc

SEQ ID NO: 1816382 - RNA, 19 nt, Artificial Sequence
  Description of Artificial Sequence: Synthetic oligonucleotide
uuguuggaaacaccucucc

SEQ ID NO: 1816383 - RNA, 19 nt, Artificial Sequence
  Description of Artificial Sequence: Synthetic oligonucleotide
uuuguuggaaacaccucuc

SEQ ID NO: 1816384 - RNA, 19 nt, Artificial Sequence
  Description of Artificial Sequence: Synthetic oligonucleotide
aggagaagucaguugguag

SEQ ID NO: 1816385 - RNA, 19 nt, Artificial Sequence
  Description of Artificial Sequence: Synthetic oligonucleotide
aacagaaaugccaggagaa

SEQ ID NO: 1816386 - RNA, 19 nt, Artificial Sequence
  Description of Artificial Sequence: Synthetic oligonucleotide
ugcuuggccaauaggacgu

SEQ ID NO: 1816387 - RNA, 19 nt, Artificial Sequence
  Description of Artificial Sequence: Synthetic oligonucleotide
uauuuaaagucaggagaag

SEQ ID NO: 1816388 - RNA, 19 nt, Artificial Sequence
  Description of Artificial Sequence: Synthetic oligonucleotide
cugauaggcggauuucccg

SEQ ID NO: 1816389 - RNA, 19 nt, Artificial Sequence
  Description of Artificial Sequence: Synthetic oligonucleotide
uccaaguagccauggaacu

SEQ ID NO: 1816390 - RNA, 19 nt, Artificial Sequence
  Description of Artificial Sequence: Synthetic oligonucleotide
auucacuaccaucuccaag

SEQ ID NO: 1816391 - RNA, 19 nt, Artificial Sequence
  Description of Artificial Sequence: Synthetic oligonucleotide
acguuuuaggcacuuggug

SEQ ID NO: 1816392 - RNA, 19 nt, Artificial Sequence
  Description of Artificial Sequence: Synthetic oligonucleotide
cauguugcagugcuucucc

SEQ ID NO: 1816393 - RNA, 19 nt, Artificial Sequence
  Description of Artificial Sequence: Synthetic oligonucleotide
cugcuuggccaauaggacg

SEQ ID NO: 1816394 - RNA, 19 nt, Artificial Sequence
  Description of Artificial Sequence: Synthetic oligonucleotide
uugguagcggcccaugccu

SEQ ID NO: 1816395 - RNA, 19 nt, Artificial Sequence
  Description of Artificial Sequence: Synthetic oligonucleotide
aauauuggcugcugauaaa

SEQ ID NO: 1816396 - RNA, 19 nt, Artificial Sequence
  Description of Artificial Sequence: Synthetic oligonucleotide
uguuuguggacgacggccu

SEQ ID NO: 1816397 - RNA, 19 nt, Artificial Sequence
  Description of Artificial Sequence: Synthetic oligonucleotide
aaaugacacggggaaugac

SEQ ID NO: 1816398 - RNA, 19 nt, Artificial Sequence
  Description of Artificial Sequence: Synthetic oligonucleotide
caucuaggcgcuucaagag

SEQ ID NO: 1816399 - RNA, 19 nt, Artificial Sequence
  Description of Artificial Sequence: Synthetic oligonucleotide
cuacugacugcuguaagcc

SEQ ID NO: 1816400 - RNA, 19 nt, Artificial Sequence
  Description of Artificial Sequence: Synthetic oligonucleotide
gaaauacgcuaaugaugcg

SEQ ID NO: 1816401 - RNA, 19 nt, Artificial Sequence
  Description of Artificial Sequence: Synthetic oligonucleotide
uugguggaaaugacacggg

SEQ ID NO: 1816402 - RNA, 19 nt, Artificial Sequence
  Description of Artificial Sequence: Synthetic oligonucleotide
ugcacacggucaccgagcg

SEQ ID NO: 1816403 - RNA, 19 nt, Artificial Sequence
  Description of Artificial Sequence: Synthetic oligonucleotide
gacgcugcccuccuugagg

SEQ ID NO: 1816404 - RNA, 19 nt, Artificial Sequence
  Description of Artificial Sequence: Synthetic oligonucleotide
agucaguugguagcggccc

SEQ ID NO: 1816405 - RNA, 19 nt, Artificial Sequence
  Description of Artificial Sequence: Synthetic oligonucleotide
ggugagugcccacagacag

SEQ ID NO: 1816406 - RNA, 19 nt, Artificial Sequence
  Description of Artificial Sequence: Synthetic oligonucleotide
guuuauccuuuaucugugg

SEQ ID NO: 1816407 - RNA, 19 nt, Artificial Sequence
  Description of Artificial Sequence: Synthetic oligonucleotide
uggagacaucaucuaggcg

SEQ ID NO: 1816408 - RNA, 19 nt, Artificial Sequence
  Description of Artificial Sequence: Synthetic oligonucleotide
ucccauugucuuaacaaaa

SEQ ID NO: 1816409 - RNA, 19 nt, Artificial Sequence
  Description of Artificial Sequence: Synthetic oligonucleotide
cucuagaguggccagcacc

SEQ ID NO: 1816410 - RNA, 19 nt, Artificial Sequence
  Description of Artificial Sequence: Synthetic oligonucleotide
ugacuaucuacugacugcu

SEQ ID NO: 1816411 - RNA, 19 nt, Artificial Sequence
  Description of Artificial Sequence: Synthetic oligonucleotide
uucccauugucuuaacaaa

SEQ ID NO: 1816412 - RNA, 19 nt, Artificial Sequence
  Description of Artificial Sequence: Synthetic oligonucleotide
uggacgacggccucggucu

SEQ ID NO: 1816413 - RNA, 19 nt, Artificial Sequence
  Description of Artificial Sequence: Synthetic oligonucleotide
acgcuaaugaugcggcagg

SEQ ID NO: 1816414 - RNA, 19 nt, Artificial Sequence
  Description of Artificial Sequence: Synthetic oligonucleotide
accaucuccaaguagccau

SEQ ID NO: 1816415 - RNA, 19 nt, Artificial Sequence
  Description of Artificial Sequence: Synthetic oligonucleotide
uacgcuaaugaugcggcag

SEQ ID NO: 1816416 - RNA, 19 nt, Artificial Sequence
  Description of Artificial Sequence: Synthetic oligonucleotide
agcagaaauguuaaaauuu

SEQ ID NO: 1816417 - RNA, 19 nt, Artificial Sequence
  Description of Artificial Sequence: Synthetic oligonucleotide
uuaauuccacaaacggcaa

SEQ ID NO: 1816418 - RNA, 19 nt, Artificial Sequence
  Description of Artificial Sequence: Synthetic oligonucleotide
cacacggucaccgagcggc

SEQ ID NO: 1816419 - RNA, 19 nt, Artificial Sequence
  Description of Artificial Sequence: Synthetic oligonucleotide
agaagugcacccacauugc

SEQ ID NO: 1816420 - RNA, 19 nt, Artificial Sequence
  Description of Artificial Sequence: Synthetic oligonucleotide
ugauaggcggauuucccgu

SEQ ID NO: 1816421 - RNA, 19 nt, Artificial Sequence
  Description of Artificial Sequence: Synthetic oligonucleotide
auuccacaaacggcaaagc

SEQ ID NO: 1816422 - RNA, 19 nt, Artificial Sequence
  Description of Artificial Sequence: Synthetic oligonucleotide
guuuuaggcacuuggugga

SEQ ID NO: 1816423 - RNA, 19 nt, Artificial Sequence
  Description of Artificial Sequence: Synthetic oligonucleotide
cuucccauugucuuaacaa

SEQ ID NO: 1816424 - RNA, 19 nt, Artificial Sequence
  Description of Artificial Sequence: Synthetic oligonucleotide
ugaggugugugugugugug

SEQ ID NO: 1816425 - RNA, 19 nt, Artificial Sequence
  Description of Artificial Sequence: Synthetic oligonucleotide
ugggcaucacuaauacuga

SEQ ID NO: 1816426 - RNA, 19 nt, Artificial Sequence
  Description of Artificial Sequence: Synthetic oligonucleotide
ucccuguacaagaaacacu

SEQ ID NO: 1816427 - RNA, 19 nt, Artificial Sequence
  Description of Artificial Sequence: Synthetic oligonucleotide
ugugaggugugugugugug

SEQ ID NO: 1816428 - RNA, 19 nt, Artificial Sequence
  Description of Artificial Sequence: Synthetic oligonucleotide
gaaaugccaggagaagugc

SEQ ID NO: 1816429 - RNA, 19 nt, Artificial Sequence
  Description of Artificial Sequence: Synthetic oligonucleotide
augaucgguguuuguggac

SEQ ID NO: 1816430 - RNA, 19 nt, Artificial Sequence
  Description of Artificial Sequence: Synthetic oligonucleotide
cugaguucuugagaaauac

SEQ ID NO: 1816431 - RNA, 19 nt, Artificial Sequence
  Description of Artificial Sequence: Synthetic oligonucleotide
caggauauggcagcugucc

SEQ ID NO: 1816432 - RNA, 19 nt, Artificial Sequence
  Description of Artificial Sequence: Synthetic oligonucleotide
cuugagaaauacgcuaaug

SEQ ID NO: 1816433 - RNA, 19 nt, Artificial Sequence
  Description of Artificial Sequence: Synthetic oligonucleotide
auacugagaaacagaaaug

SEQ ID NO: 1816434 - RNA, 19 nt, Artificial Sequence
  Description of Artificial Sequence: Synthetic oligonucleotide
cguuuuaggcacuuggugg

SEQ ID NO: 1816435 - RNA, 19 nt, Artificial Sequence
  Description of Artificial Sequence: Synthetic oligonucleotide
acgaggucugguuuccuag

SEQ ID NO: 1816436 - RNA, 19 nt, Artificial Sequence
  Description of Artificial Sequence: Synthetic oligonucleotide
uucuaggacuguguccugg

SEQ ID NO: 1816437 - RNA, 19 nt, Artificial Sequence
  Description of Artificial Sequence: Synthetic oligonucleotide
ggaaucacauguugcagug

SEQ ID NO: 1816438 - RNA, 19 nt, Artificial Sequence
  Description of Artificial Sequence: Synthetic oligonucleotide
aguguccuuaggccucagc

SEQ ID NO: 1816439 - RNA, 19 nt, Artificial Sequence
  Description of Artificial Sequence: Synthetic oligonucleotide
ucuugagaaauacgcuaau

SEQ ID NO: 1816440 - RNA, 19 nt, Artificial Sequence
  Description of Artificial Sequence: Synthetic oligonucleotide
uuuguggacgacggccucg

SEQ ID NO: 1816441 - RNA, 19 nt, Artificial Sequence
  Description of Artificial Sequence: Synthetic oligonucleotide
guguuuguggacgacggcc

SEQ ID NO: 1816442 - RNA, 19 nt, Artificial Sequence
  Description of Artificial Sequence: Synthetic oligonucleotide
ucgguguuuguggacgacg

SEQ ID NO: 1816443 - RNA, 19 nt, Artificial Sequence
  Description of Artificial Sequence: Synthetic oligonucleotide
ucugugaggugugugugug

SEQ ID NO: 1816444 - RNA, 19 nt, Artificial Sequence
  Description of Artificial Sequence: Synthetic oligonucleotide
ugggaaucacauguugcag

SEQ ID NO: 1816445 - RNA, 19 nt, Artificial Sequence
  Description of Artificial Sequence: Synthetic oligonucleotide
aaaacguuuuaggcacuug

SEQ ID NO: 1816446 - RNA, 19 nt, Artificial Sequence
  Description of Artificial Sequence: Synthetic oligonucleotide
ugcuguaagccagcgguag

SEQ ID NO: 1816447 - RNA, 19 nt, Artificial Sequence
  Description of Artificial Sequence: Synthetic oligonucleotide
uuggccaauaggacgucac

SEQ ID NO: 1816448 - RNA, 19 nt, Artificial Sequence
  Description of Artificial Sequence: Synthetic oligonucleotide
guugcagugcuucuccgac

SEQ ID NO: 1816449 - RNA, 19 nt, Artificial Sequence
  Description of Artificial Sequence: Synthetic oligonucleotide
agggacgaggucugguuuc

SEQ ID NO: 1816450 - RNA, 19 nt, Artificial Sequence
  Description of Artificial Sequence: Synthetic oligonucleotide
ggaaaugacacggggaaug

SEQ ID NO: 1816451 - RNA, 19 nt, Artificial Sequence
  Description of Artificial Sequence: Synthetic oligonucleotide
aguucuugagaaauacgcu

SEQ ID NO: 1816452 - RNA, 19 nt, Artificial Sequence
  Description of Artificial Sequence: Synthetic oligonucleotide
ugugugugugugccuuuag

SEQ ID NO: 1816453 - RNA, 19 nt, Artificial Sequence
  Description of Artificial Sequence: Synthetic oligonucleotide
guugguagcggcccaugcc

SEQ ID NO: 1816454 - RNA, 19 nt, Artificial Sequence
  Description of Artificial Sequence: Synthetic oligonucleotide
agcgguagggacgaggucu

SEQ ID NO: 1816455 - RNA, 19 nt, Artificial Sequence
  Description of Artificial Sequence: Synthetic oligonucleotide
uguugcagugcuucuccga

SEQ ID NO: 1816456 - RNA, 19 nt, Artificial Sequence
  Description of Artificial Sequence: Synthetic oligonucleotide
ucuaggacuguguccugga

SEQ ID NO: 1816457 - RNA, 19 nt, Artificial Sequence
  Description of Artificial Sequence: Synthetic oligonucleotide
guuccaguguauuuaaagu

SEQ ID NO: 1816458 - RNA, 19 nt, Artificial Sequence
  Description of Artificial Sequence: Synthetic oligonucleotide
caauaggacgucacugcug

SEQ ID NO: 1816459 - RNA, 19 nt, Artificial Sequence
  Description of Artificial Sequence: Synthetic oligonucleotide
aaacaccucuccccauucu

SEQ ID NO: 1816460 - RNA, 19 nt, Artificial Sequence
  Description of Artificial Sequence: Synthetic oligonucleotide
uuaguggcugcugcacacg

SEQ ID NO: 1816461 - RNA, 19 nt, Artificial Sequence
  Description of Artificial Sequence: Synthetic oligonucleotide
cagaugaucgguguuugug

SEQ ID NO: 1816462 - RNA, 19 nt, Artificial Sequence
  Description of Artificial Sequence: Synthetic oligonucleotide
cugugggcaucacuaauac

SEQ ID NO: 1816463 - RNA, 19 nt, Artificial Sequence
  Description of Artificial Sequence: Synthetic oligonucleotide
cucugauaggcggauuucc

SEQ ID NO: 1816464 - RNA, 19 nt, Artificial Sequence
  Description of Artificial Sequence: Synthetic oligonucleotide
ugugugugugugugugugc

SEQ ID NO: 1816465 - RNA, 19 nt, Artificial Sequence
  Description of Artificial Sequence: Synthetic oligonucleotide
uuaggcacuugguggaaau

SEQ ID NO: 1816466 - RNA, 19 nt, Artificial Sequence
  Description of Artificial Sequence: Synthetic oligonucleotide
uuucccgucagagcucugc

SEQ ID NO: 1816467 - RNA, 19 nt, Artificial Sequence
  Description of Artificial Sequence: Synthetic oligonucleotide
auccucacgucguuggaga

SEQ ID NO: 1816468 - RNA, 19 nt, Artificial Sequence
  Description of Artificial Sequence: Synthetic oligonucleotide
uacugacugcuguaagcca

SEQ ID NO: 1816469 - RNA, 19 nt, Artificial Sequence
  Description of Artificial Sequence: Synthetic oligonucleotide
uccuuaggccucagcagca

SEQ ID NO: 1816470 - RNA, 19 nt, Artificial Sequence
  Description of Artificial Sequence: Synthetic oligonucleotide
gacugcuguaagccagcgg

SEQ ID NO: 1816471 - RNA, 19 nt, Artificial Sequence
  Description of Artificial Sequence: Synthetic oligonucleotide
auguugcagugcuucuccg

SEQ ID NO: 1816472 - RNA, 19 nt, Artificial Sequence
  Description of Artificial Sequence: Synthetic oligonucleotide
caaacggcaaagcagaaau

SEQ ID NO: 1816473 - RNA, 19 nt, Artificial Sequence
  Description of Artificial Sequence: Synthetic oligonucleotide
uuuccuaguuuauccuuua

SEQ ID NO: 1816474 - RNA, 19 nt, Artificial Sequence
  Description of Artificial Sequence: Synthetic oligonucleotide
gccaauaggacgucacugc

SEQ ID NO: 1816475 - RNA, 19 nt, Artificial Sequence
  Description of Artificial Sequence: Synthetic oligonucleotide
aaacggcaaagcagaaaug

SEQ ID NO: 1816476 - RNA, 19 nt, Artificial Sequence
  Description of Artificial Sequence: Synthetic oligonucleotide
uggugagugcccacagaca

SEQ ID NO: 1816477 - RNA, 19 nt, Artificial Sequence
  Description of Artificial Sequence: Synthetic oligonucleotide
ugagggugggaaucacaug

SEQ ID NO: 1816478 - RNA, 19 nt, Artificial Sequence
  Description of Artificial Sequence: Synthetic oligonucleotide
agucaacaguguccuuagg

SEQ ID NO: 1816479 - RNA, 19 nt, Artificial Sequence
  Description of Artificial Sequence: Synthetic oligonucleotide
gacacggggaaugacuauc

SEQ ID NO: 1816480 - RNA, 19 nt, Artificial Sequence
  Description of Artificial Sequence: Synthetic oligonucleotide
gaaaugacacggggaauga

SEQ ID NO: 1816481 - RNA, 19 nt, Artificial Sequence
  Description of Artificial Sequence: Synthetic oligonucleotide
cuucaggcgcaugugcggg

SEQ ID NO: 1816482 - RNA, 19 nt, Artificial Sequence
  Description of Artificial Sequence: Synthetic oligonucleotide
gugugugugugugugugcc

SEQ ID NO: 1816483 - RNA, 19 nt, Artificial Sequence
  Description of Artificial Sequence: Synthetic oligonucleotide
gauaggcggauuucccguc

SEQ ID NO: 1816484 - RNA, 19 nt, Artificial Sequence
  Description of Artificial Sequence: Synthetic oligonucleotide
ugaugcggcaggagaccag

SEQ ID NO: 1816485 - RNA, 19 nt, Artificial Sequence
  Description of Artificial Sequence: Synthetic oligonucleotide
cuguacaagaaacacugcu

SEQ ID NO: 1816486 - RNA, 19 nt, Artificial Sequence
  Description of Artificial Sequence: Synthetic oligonucleotide
ugugggcaucacuaauacu

SEQ ID NO: 1816487 - RNA, 19 nt, Artificial Sequence
  Description of Artificial Sequence: Synthetic oligonucleotide
cugcacacggucaccgagc

SEQ ID NO: 1816488 - RNA, 19 nt, Artificial Sequence
  Description of Artificial Sequence: Synthetic oligonucleotide
uaggcggauuucccgucag

SEQ ID NO: 1816489 - RNA, 19 nt, Artificial Sequence
  Description of Artificial Sequence: Synthetic oligonucleotide
uccccauucuucccauugu

SEQ ID NO: 1816490 - RNA, 19 nt, Artificial Sequence
  Description of Artificial Sequence: Synthetic oligonucleotide
uucccgucagagcucugca

SEQ ID NO: 1816491 - RNA, 19 nt, Artificial Sequence
  Description of Artificial Sequence: Synthetic oligonucleotide
gcuucaagagcucaggaua

SEQ ID NO: 1816492 - RNA, 19 nt, Artificial Sequence
  Description of Artificial Sequence: Synthetic oligonucleotide
guaagccagcgguagggac

SEQ ID NO: 1816493 - RNA, 19 nt, Artificial Sequence
  Description of Artificial Sequence: Synthetic oligonucleotide
ugugugugugugugugugu

SEQ ID NO: 1816494 - RNA, 19 nt, Artificial Sequence
  Description of Artificial Sequence: Synthetic oligonucleotide
cauugcaaguuccagugua

SEQ ID NO: 1816495 - RNA, 19 nt, Artificial Sequence
  Description of Artificial Sequence: Synthetic oligonucleotide
auagacccugaggaauuuc

SEQ ID NO: 1816496 - RNA, 19 nt, Artificial Sequence
  Description of Artificial Sequence: Synthetic oligonucleotide
uguaagccagcgguaggga

SEQ ID NO: 1816497 - RNA, 19 nt, Artificial Sequence
  Description of Artificial Sequence: Synthetic oligonucleotide
uccuuuaucugugggcauc

SEQ ID NO: 1816498 - RNA, 19 nt, Artificial Sequence
  Description of Artificial Sequence: Synthetic oligonucleotide
aggugugugugugugugug

SEQ ID NO: 1816499 - RNA, 19 nt, Artificial Sequence
  Description of Artificial Sequence: Synthetic oligonucleotide
aguaggcagaugaucggug

SEQ ID NO: 1816500 - RNA, 19 nt, Artificial Sequence
  Description of Artificial Sequence: Synthetic oligonucleotide
cucggucucccgaaccagc

SEQ ID NO: 1816501 - RNA, 19 nt, Artificial Sequence
  Description of Artificial Sequence: Synthetic oligonucleotide
gugugugugugugugugug

SEQ ID NO: 1816502 - RNA, 19 nt, Artificial Sequence
  Description of Artificial Sequence: Synthetic oligonucleotide
auaggcggauuucccguca

SEQ ID NO: 1816503 - RNA, 19 nt, Artificial Sequence
  Description of Artificial Sequence: Synthetic oligonucleotide
gggaaugacuaucuacuga

SEQ ID NO: 1816504 - RNA, 19 nt, Artificial Sequence
  Description of Artificial Sequence: Synthetic oligonucleotide
cugggaacaggacgcugcc

SEQ ID NO: 1816505 - RNA, 19 nt, Artificial Sequence
  Description of Artificial Sequence: Synthetic oligonucleotide
caaguuccaguguauuuaa

SEQ ID NO: 1816506 - RNA, 19 nt, Artificial Sequence
  Description of Artificial Sequence: Synthetic oligonucleotide
ucagagcucugcacacacu

SEQ ID NO: 1816507 - RNA, 19 nt, Artificial Sequence
  Description of Artificial Sequence: Synthetic oligonucleotide
caucuccaaguagccaugg

SEQ ID NO: 1816508 - RNA, 19 nt, Artificial Sequence
  Description of Artificial Sequence: Synthetic oligonucleotide
ugugugugugugugugccu

SEQ ID NO: 1816509 - RNA, 19 nt, Artificial Sequence
  Description of Artificial Sequence: Synthetic oligonucleotide
agccauggaacugucccug

SEQ ID NO: 1816510 - RNA, 19 nt, Artificial Sequence
  Description of Artificial Sequence: Synthetic oligonucleotide
ucaccgagcggcagccaug

SEQ ID NO: 1816511 - RNA, 19 nt, Artificial Sequence
  Description of Artificial Sequence: Synthetic oligonucleotide
uagggacgaggucugguuu

SEQ ID NO: 1816512 - RNA, 19 nt, Artificial Sequence
  Description of Artificial Sequence: Synthetic oligonucleotide
auacgcuaaugaugcggca

SEQ ID NO: 1816513 - RNA, 19 nt, Artificial Sequence
  Description of Artificial Sequence: Synthetic oligonucleotide
cauggaacugucccugaga

SEQ ID NO: 1816514 - RNA, 19 nt, Artificial Sequence
  Description of Artificial Sequence: Synthetic oligonucleotide
uugcagugcuucuccgaca

SEQ ID NO: 1816515 - RNA, 19 nt, Artificial Sequence
  Description of Artificial Sequence: Synthetic oligonucleotide
ggggaaugacuaucuacug

SEQ ID NO: 1816516 - RNA, 19 nt, Artificial Sequence
  Description of Artificial Sequence: Synthetic oligonucleotide
gcuucaggcgcaugugcgg

SEQ ID NO: 1816517 - RNA, 19 nt, Artificial Sequence
  Description of Artificial Sequence: Synthetic oligonucleotide
gacuguguccuggauggca

SEQ ID NO: 1816518 - RNA, 19 nt, Artificial Sequence
  Description of Artificial Sequence: Synthetic oligonucleotide
aggacuucuaggacugugu

SEQ ID NO: 1816519 - RNA, 19 nt, Artificial Sequence
  Description of Artificial Sequence: Synthetic oligonucleotide
cuaucuacugacugcugua

SEQ ID NO: 1816520 - RNA, 19 nt, Artificial Sequence
  Description of Artificial Sequence: Synthetic oligonucleotide
acgcugcccuccuugagga

SEQ ID NO: 1816521 - RNA, 19 nt, Artificial Sequence
  Description of Artificial Sequence: Synthetic oligonucleotide
gucguuggagacaucaucu

SEQ ID NO: 1816522 - RNA, 19 nt, Artificial Sequence
  Description of Artificial Sequence: Synthetic oligonucleotide
cacgucguuggagacauca

SEQ ID NO: 1816523 - RNA, 19 nt, Artificial Sequence
  Description of Artificial Sequence: Synthetic oligonucleotide
gaucgguguuuguggacga

SEQ ID NO: 1816524 - RNA, 19 nt, Artificial Sequence
  Description of Artificial Sequence: Synthetic oligonucleotide
acaggauauggcagcuguc

SEQ ID NO: 1816525 - RNA, 19 nt, Artificial Sequence
  Description of Artificial Sequence: Synthetic oligonucleotide
acaaacggcaaagcagaaa

SEQ ID NO: 1816526 - RNA, 19 nt, Artificial Sequence
  Description of Artificial Sequence: Synthetic oligonucleotide
ucacugcuggugagugccc

SEQ ID NO: 1816527 - RNA, 19 nt, Artificial Sequence
  Description of Artificial Sequence: Synthetic oligonucleotide
caggacgcugcccuccuug

SEQ ID NO: 1816528 - RNA, 19 nt, Artificial Sequence
  Description of Artificial Sequence: Synthetic oligonucleotide
acgacggccucggucuccc

SEQ ID NO: 1816529 - RNA, 19 nt, Artificial Sequence
  Description of Artificial Sequence: Synthetic oligonucleotide
ggcggauuucccgucagag

SEQ ID NO: 1816530 - RNA, 19 nt, Artificial Sequence
  Description of Artificial Sequence: Synthetic oligonucleotide
cccugaggaauuucucugg

SEQ ID NO: 1816531 - RNA, 19 nt, Artificial Sequence
  Description of Artificial Sequence: Synthetic oligonucleotide
aucgguguuuguggacgac

SEQ ID NO: 1816532 - RNA, 19 nt, Artificial Sequence
  Description of Artificial Sequence: Synthetic oligonucleotide
agaguggccagcaccugug

SEQ ID NO: 1816533 - RNA, 19 nt, Artificial Sequence
  Description of Artificial Sequence: Synthetic oligonucleotide
uccucacgucguuggagac

SEQ ID NO: 1816534 - RNA, 19 nt, Artificial Sequence
  Description of Artificial Sequence: Synthetic oligonucleotide
gggugggaaucacauguug

SEQ ID NO: 1816535 - RNA, 19 nt, Artificial Sequence
  Description of Artificial Sequence: Synthetic oligonucleotide
ggccaauaggacgucacug

SEQ ID NO: 1816536 - RNA, 19 nt, Artificial Sequence
  Description of Artificial Sequence: Synthetic oligonucleotide
uggcugcugcacacgguca

SEQ ID NO: 1816537 - RNA, 19 nt, Artificial Sequence
  Description of Artificial Sequence: Synthetic oligonucleotide
acgucacugcuggugagug

SEQ ID NO: 1816538 - RNA, 19 nt, Artificial Sequence
  Description of Artificial Sequence: Synthetic oligonucleotide
gggcaucacuaauacugag

SEQ ID NO: 1816539 - RNA, 19 nt, Artificial Sequence
  Description of Artificial Sequence: Synthetic oligonucleotide
uggaaaugacacggggaau

SEQ ID NO: 1816540 - RNA, 19 nt, Artificial Sequence
  Description of Artificial Sequence: Synthetic oligonucleotide
augccacugcaaguugggg

SEQ ID NO: 1816541 - RNA, 19 nt, Artificial Sequence
  Description of Artificial Sequence: Synthetic oligonucleotide
cuuaggccucagcagcauc

SEQ ID NO: 1816542 - RNA, 19 nt, Artificial Sequence
  Description of Artificial Sequence: Synthetic oligonucleotide
caccgagcggcagccaugg

SEQ ID NO: 1816543 - RNA, 19 nt, Artificial Sequence
  Description of Artificial Sequence: Synthetic oligonucleotide
guggacgacggccucgguc

SEQ ID NO: 1816544 - RNA, 19 nt, Artificial Sequence
  Description of Artificial Sequence: Synthetic oligonucleotide
ggacuucuaggacuguguc

SEQ ID NO: 1816545 - RNA, 19 nt, Artificial Sequence
  Description of Artificial Sequence: Synthetic oligonucleotide
caacaguguccuuaggccu

SEQ ID NO: 1816546 - RNA, 19 nt, Artificial Sequence
  Description of Artificial Sequence: Synthetic oligonucleotide
gccaggaugucauucacua

SEQ ID NO: 1816547 - RNA, 19 nt, Artificial Sequence
  Description of Artificial Sequence: Synthetic oligonucleotide
agcggcagccauggcuugc

SEQ ID NO: 1816548 - RNA, 19 nt, Artificial Sequence
  Description of Artificial Sequence: Synthetic oligonucleotide
ucccgucagagcucugcac

SEQ ID NO: 1816549 - RNA, 19 nt, Artificial Sequence
  Description of Artificial Sequence: Synthetic oligonucleotide
ugacacggggaaugacuau

SEQ ID NO: 1816550 - RNA, 19 nt, Artificial Sequence
  Description of Artificial Sequence: Synthetic oligonucleotide
augacacggggaaugacua

SEQ ID NO: 1816551 - RNA, 19 nt, Artificial Sequence
  Description of Artificial Sequence: Synthetic oligonucleotide
guaggcagaugaucggugu

SEQ ID NO: 1816552 - RNA, 19 nt, Artificial Sequence
  Description of Artificial Sequence: Synthetic oligonucleotide
auccuuuaucugugggcau

SEQ ID NO: 1816553 - RNA, 19 nt, Artificial Sequence
  Description of Artificial Sequence: Synthetic oligonucleotide
ggcaucacuaauacugaga

SEQ ID NO: 1816554 - RNA, 19 nt, Artificial Sequence
  Description of Artificial Sequence: Synthetic oligonucleotide
gguguuuguggacgacggc

SEQ ID NO: 1816555 - RNA, 19 nt, Artificial Sequence
  Description of Artificial Sequence: Synthetic oligonucleotide
acacggggaaugacuaucu

SEQ ID NO: 1816556 - RNA, 19 nt, Artificial Sequence
  Description of Artificial Sequence: Synthetic oligonucleotide
ggucucccgaaccagcaca

SEQ ID NO: 1816557 - RNA, 19 nt, Artificial Sequence
  Description of Artificial Sequence: Synthetic oligonucleotide
ccugagagucaacaguguc

SEQ ID NO: 1816558 - RNA, 19 nt, Artificial Sequence
  Description of Artificial Sequence: Synthetic oligonucleotide
uucaggcgcaugugcgggu

SEQ ID NO: 1816559 - RNA, 19 nt, Artificial Sequence
  Description of Artificial Sequence: Synthetic oligonucleotide
agugcuucuccgacagcug

SEQ ID NO: 1816560 - RNA, 19 nt, Artificial Sequence
  Description of Artificial Sequence: Synthetic oligonucleotide
gagacaucaucuaggcgcu

SEQ ID NO: 1816561 - RNA, 19 nt, Artificial Sequence
  Description of Artificial Sequence: Synthetic oligonucleotide
gcggauuucccgucagagc

SEQ ID NO: 1816562 - RNA, 19 nt, Artificial Sequence
  Description of Artificial Sequence: Synthetic oligonucleotide
ggauggcacuuucaggguc

SEQ ID NO: 1816563 - RNA, 19 nt, Artificial Sequence
  Description of Artificial Sequence: Synthetic oligonucleotide
gcuaaugaugcggcaggag

SEQ ID NO: 1816564 - RNA, 19 nt, Artificial Sequence
  Description of Artificial Sequence: Synthetic oligonucleotide
gauuucccgucagagcucu

SEQ ID NO: 1816565 - RNA, 19 nt, Artificial Sequence
  Description of Artificial Sequence: Synthetic oligonucleotide
aggacgcugcccuccuuga

SEQ ID NO: 1816566 - RNA, 19 nt, Artificial Sequence
  Description of Artificial Sequence: Synthetic oligonucleotide
guuuguggacgacggccuc

SEQ ID NO: 1816567 - RNA, 19 nt, Artificial Sequence
  Description of Artificial Sequence: Synthetic oligonucleotide
cuucuaggacuguguccug

SEQ ID NO: 1816568 - RNA, 19 nt, Artificial Sequence
  Description of Artificial Sequence: Synthetic oligonucleotide
gcugauaaacauccacuua

SEQ ID NO: 1816569 - RNA, 19 nt, Artificial Sequence
  Description of Artificial Sequence: Synthetic oligonucleotide
acugcucugauaggcggau

SEQ ID NO: 1816570 - RNA, 19 nt, Artificial Sequence
  Description of Artificial Sequence: Synthetic oligonucleotide
gggaaucacauguugcagu

SEQ ID NO: 1816571 - RNA, 19 nt, Artificial Sequence
  Description of Artificial Sequence: Synthetic oligonucleotide
ugugugugugugugccuuu

SEQ ID NO: 1816572 - RNA, 19 nt, Artificial Sequence
  Description of Artificial Sequence: Synthetic oligonucleotide
cuaggcgcuucaagagcuc

SEQ ID NO: 1816573 - RNA, 19 nt, Artificial Sequence
  Description of Artificial Sequence: Synthetic oligonucleotide
gaaugacuaucuacugacu

SEQ ID NO: 1816574 - RNA, 19 nt, Artificial Sequence
  Description of Artificial Sequence: Synthetic oligonucleotide
cgguguuuguggacgacgg

SEQ ID NO: 1816575 - RNA, 19 nt, Artificial Sequence
  Description of Artificial Sequence: Synthetic oligonucleotide
uguguccuggauggcacuu

SEQ ID NO: 1816576 - RNA, 19 nt, Artificial Sequence
  Description of Artificial Sequence: Synthetic oligonucleotide
ugccauccucacgucguug

SEQ ID NO: 1816577 - RNA, 19 nt, Artificial Sequence
  Description of Artificial Sequence: Synthetic oligonucleotide
aggagaccaggcguguggu

SEQ ID NO: 1816578 - RNA, 19 nt, Artificial Sequence
  Description of Artificial Sequence: Synthetic oligonucleotide
aggcagaugaucgguguuu

SEQ ID NO: 1816579 - RNA, 19 nt, Artificial Sequence
  Description of Artificial Sequence: Synthetic oligonucleotide
ggcagaugaucgguguuug

SEQ ID NO: 1816580 - RNA, 19 nt, Artificial Sequence
  Description of Artificial Sequence: Synthetic oligonucleotide
gacggccucggucucccga

SEQ ID NO: 1816581 - RNA, 19 nt, Artificial Sequence
  Description of Artificial Sequence: Synthetic oligonucleotide
gaccaggcguguggucugg

SEQ ID NO: 1816582 - RNA, 19 nt, Artificial Sequence
  Description of Artificial Sequence: Synthetic oligonucleotide
gugccuuuaguggcugcug

SEQ ID NO: 1816583 - RNA, 19 nt, Artificial Sequence
  Description of Artificial Sequence: Synthetic oligonucleotide
cacugcucugauaggcgga

SEQ ID NO: 1816584 - RNA, 19 nt, Artificial Sequence
  Description of Artificial Sequence: Synthetic oligonucleotide
auaggacgucacugcuggu

SEQ ID NO: 1816585 - RNA, 19 nt, Artificial Sequence
  Description of Artificial Sequence: Synthetic oligonucleotide
ggcacuugguggaaaugac

SEQ ID NO: 1816586 - RNA, 19 nt, Artificial Sequence
  Description of Artificial Sequence: Synthetic oligonucleotide
acggcaaagcagaaauguu

SEQ ID NO: 1816587 - RNA, 19 nt, Artificial Sequence
  Description of Artificial Sequence: Synthetic oligonucleotide
ugguagcggcccaugccuu

SEQ ID NO: 1816588 - RNA, 19 nt, Artificial Sequence
  Description of Artificial Sequence: Synthetic oligonucleotide
cagugcuucuccgacagcu

SEQ ID NO: 1816589 - RNA, 19 nt, Artificial Sequence
  Description of Artificial Sequence: Synthetic oligonucleotide
aggcggauuucccgucaga

SEQ ID NO: 1816590 - RNA, 19 nt, Artificial Sequence
  Description of Artificial Sequence: Synthetic oligonucleotide
aggcgcuucaagagcucag

SEQ ID NO: 1816591 - RNA, 19 nt, Artificial Sequence
  Description of Artificial Sequence: Synthetic oligonucleotide
ugcccacagacaggauaug

SEQ ID NO: 1816592 - RNA, 19 nt, Artificial Sequence
  Description of Artificial Sequence: Synthetic oligonucleotide
cagggucauccagauggac

SEQ ID NO: 1816593 - RNA, 19 nt, Artificial Sequence
  Description of Artificial Sequence: Synthetic oligonucleotide
ggacgucacugcuggugag

SEQ ID NO: 1816594 - RNA, 19 nt, Artificial Sequence
  Description of Artificial Sequence: Synthetic oligonucleotide
ccauggaacugucccugag

SEQ ID NO: 1816595 - RNA, 19 nt, Artificial Sequence
  Description of Artificial Sequence: Synthetic oligonucleotide
gacgacggccucggucucc

SEQ ID NO: 1816596 - RNA, 19 nt, Artificial Sequence
  Description of Artificial Sequence: Synthetic oligonucleotide
gagcggcagccauggcuug

SEQ ID NO: 1816597 - RNA, 19 nt, Artificial Sequence
  Description of Artificial Sequence: Synthetic oligonucleotide
ccaggaugucauucacuac

SEQ ID NO: 1816598 - RNA, 19 nt, Artificial Sequence
  Description of Artificial Sequence: Synthetic oligonucleotide
guagggacgaggucugguu

SEQ ID NO: 1816599 - RNA, 19 nt, Artificial Sequence
  Description of Artificial Sequence: Synthetic oligonucleotide
cucacaguaggcagaugau

SEQ ID NO: 1816600 - RNA, 19 nt, Artificial Sequence
  Description of Artificial Sequence: Synthetic oligonucleotide
gcaugugcgggucuguggu

SEQ ID NO: 1816601 - RNA, 19 nt, Artificial Sequence
  Description of Artificial Sequence: Synthetic oligonucleotide
cgucguuggagacaucauc

SEQ ID NO: 1816602 - RNA, 19 nt, Artificial Sequence
  Description of Artificial Sequence: Synthetic oligonucleotide
uagcggcccaugccuuuaa

SEQ ID NO: 1816603 - RNA, 19 nt, Artificial Sequence
  Description of Artificial Sequence: Synthetic oligonucleotide
uguggacgacggccucggu

SEQ ID NO: 1816604 - RNA, 19 nt, Artificial Sequence
  Description of Artificial Sequence: Synthetic oligonucleotide
gaggucugguuuccuaguu

SEQ ID NO: 1816605 - RNA, 19 nt, Artificial Sequence
  Description of Artificial Sequence: Synthetic oligonucleotide
caggagaagucaguuggua

SEQ ID NO: 1816606 - RNA, 19 nt, Artificial Sequence
  Description of Artificial Sequence: Synthetic oligonucleotide
cucacgucguuggagacau

SEQ ID NO: 1816607 - RNA, 19 nt, Artificial Sequence
  Description of Artificial Sequence: Synthetic oligonucleotide
gaggugugugugugugugu

SEQ ID NO: 1816608 - RNA, 19 nt, Artificial Sequence
  Description of Artificial Sequence: Synthetic oligonucleotide
cccgucagagcucugcaca

SEQ ID NO: 1816609 - RNA, 19 nt, Artificial Sequence
  Description of Artificial Sequence: Synthetic oligonucleotide
gcggcccaugccuuuaauc

SEQ ID NO: 1816610 - RNA, 19 nt, Artificial Sequence
  Description of Artificial Sequence: Synthetic oligonucleotide
gcucccuguacaagaaaca

SEQ ID NO: 1816611 - RNA, 19 nt, Artificial Sequence
  Description of Artificial Sequence: Synthetic oligonucleotide
ggacgcugcccuccuugag

SEQ ID NO: 1816612 - RNA, 19 nt, Artificial Sequence
  Description of Artificial Sequence: Synthetic oligonucleotide
ccgucagagcucugcacac

SEQ ID NO: 1816613 - RNA, 19 nt, Artificial Sequence
  Description of Artificial Sequence: Synthetic oligonucleotide
caguugguagcggcccaug

SEQ ID NO: 1816614 - RNA, 19 nt, Artificial Sequence
  Description of Artificial Sequence: Synthetic oligonucleotide
gggacgaggucugguuucc

SEQ ID NO: 1816615 - RNA, 19 nt, Artificial Sequence
  Description of Artificial Sequence: Synthetic oligonucleotide
ggccucggucucccgaacc

SEQ ID NO: 1816616 - RNA, 19 nt, Artificial Sequence
  Description of Artificial Sequence: Synthetic oligonucleotide
cggauuucccgucagagcu

SEQ ID NO: 1816617 - RNA, 19 nt, Artificial Sequence
  Description of Artificial Sequence: Synthetic oligonucleotide
gacgucacugcuggugagu

SEQ ID NO: 1816618 - RNA, 19 nt, Artificial Sequence
  Description of Artificial Sequence: Synthetic oligonucleotide
aggcgcaugugcgggucug

SEQ ID NO: 1816619 - RNA, 19 nt, Artificial Sequence
  Description of Artificial Sequence: Synthetic oligonucleotide
agcggcccaugccuuuaau

SEQ ID NO: 1816620 - RNA, 19 nt, Artificial Sequence
  Description of Artificial Sequence: Synthetic oligonucleotide
gauagacccugaggaauuu

SEQ ID NO: 1816621 - RNA, 19 nt, Artificial Sequence
  Description of Artificial Sequence: Synthetic oligonucleotide
cggcaaagcagaaauguua

SEQ ID NO: 1816622 - RNA, 19 nt, Artificial Sequence
  Description of Artificial Sequence: Synthetic oligonucleotide
cacggucaccgagcggcag

SEQ ID NO: 1816623 - RNA, 19 nt, Artificial Sequence
  Description of Artificial Sequence: Synthetic oligonucleotide
cugcuguaagccagcggua

SEQ ID NO: 1816624 - RNA, 19 nt, Artificial Sequence
  Description of Artificial Sequence: Synthetic oligonucleotide
agggugggaaucacauguu

SEQ ID NO: 1816625 - RNA, 19 nt, Artificial Sequence
  Description of Artificial Sequence: Synthetic oligonucleotide
caguaggcagaugaucggu

SEQ ID NO: 1816626 - RNA, 19 nt, Artificial Sequence
  Description of Artificial Sequence: Synthetic oligonucleotide
acgucguuggagacaucau

SEQ ID NO: 1816627 - RNA, 19 nt, Artificial Sequence
  Description of Artificial Sequence: Synthetic oligonucleotide
cagcgguagggacgagguc

SEQ ID NO: 1816628 - RNA, 19 nt, Artificial Sequence
  Description of Artificial Sequence: Synthetic oligonucleotide
gugaggugugugugugugu

SEQ ID NO: 1816629 - RNA, 19 nt, Artificial Sequence
  Description of Artificial Sequence: Synthetic oligonucleotide
gcuggugagugcccacaga

SEQ ID NO: 1816630 - RNA, 19 nt, Artificial Sequence
  Description of Artificial Sequence: Synthetic oligonucleotide
gcacacggucaccgagcgg

SEQ ID NO: 1816631 - RNA, 19 nt, Artificial Sequence
  Description of Artificial Sequence: Synthetic oligonucleotide
caucaucuaggcgcuucaa

SEQ ID NO: 1816632 - RNA, 19 nt, Artificial Sequence
  Description of Artificial Sequence: Synthetic oligonucleotide
gucugggagucauccucua

SEQ ID NO: 1816633 - RNA, 19 nt, Artificial Sequence
  Description of Artificial Sequence: Synthetic oligonucleotide
ggagaccaggcgugugguc

SEQ ID NO: 1816634 - RNA, 19 nt, Artificial Sequence
  Description of Artificial Sequence: Synthetic oligonucleotide
agcuguccggauggcugca

SEQ ID NO: 1816635 - RNA, 19 nt, Artificial Sequence
  Description of Artificial Sequence: Synthetic oligonucleotide
gcggcaggagaccaggcgu

SEQ ID NO: 1816636 - RNA, 19 nt, Artificial Sequence
  Description of Artificial Sequence: Synthetic oligonucleotide
cgccucuugcaccugcuug

SEQ ID NO: 1816637 - RNA, 19 nt, Artificial Sequence
  Description of Artificial Sequence: Synthetic oligonucleotide
gugugugugugugccuuua

SEQ ID NO: 1816638 - RNA, 19 nt, Artificial Sequence
  Description of Artificial Sequence: Synthetic oligonucleotide
ggcguguggucugggaguc

SEQ ID NO: 1816639 - RNA, 19 nt, Artificial Sequence
  Description of Artificial Sequence: Synthetic oligonucleotide
cagacaggauauggcagcu

SEQ ID NO: 1816640 - RNA, 19 nt, Artificial Sequence
  Description of Artificial Sequence: Synthetic oligonucleotide
ucacgucguuggagacauc

SEQ ID NO: 1816641 - RNA, 19 nt, Artificial Sequence
  Description of Artificial Sequence: Synthetic oligonucleotide
gcgguagggacgaggucug

SEQ ID NO: 1816642 - RNA, 19 nt, Artificial Sequence
  Description of Artificial Sequence: Synthetic oligonucleotide
cacggggaaugacuaucua

SEQ ID NO: 1816643 - RNA, 19 nt, Artificial Sequence
  Description of Artificial Sequence: Synthetic oligonucleotide
gugugugugugugugccuu

SEQ ID NO: 1816644 - RNA, 19 nt, Artificial Sequence
  Description of Artificial Sequence: Synthetic oligonucleotide
ggugugugugugugugugu

SEQ ID NO: 1816645 - RNA, 19 nt, Artificial Sequence
  Description of Artificial Sequence: Synthetic oligonucleotide
cguccucccugcaugccac

SEQ ID NO: 1816646 - RNA, 19 nt, Artificial Sequence
  Description of Artificial Sequence: Synthetic oligonucleotide
gcagugcuucuccgacagc

SEQ ID NO: 1816647 - RNA, 19 nt, Artificial Sequence
  Description of Artificial Sequence: Synthetic oligonucleotide
gggagucauccucuagagu

SEQ ID NO: 1816648 - RNA, 19 nt, Artificial Sequence
  Description of Artificial Sequence: Synthetic oligonucleotide
gggucuccugcgccucuug

SEQ ID NO: 1816649 - RNA, 19 nt, Artificial Sequence
  Description of Artificial Sequence: Synthetic oligonucleotide
acacggucaccgagcggca

SEQ ID NO: 1816650 - RNA, 19 nt, Artificial Sequence
  Description of Artificial Sequence: Synthetic oligonucleotide
ggauagacccugaggaauu

SEQ ID NO: 1816651 - RNA, 19 nt, Artificial Sequence
  Description of Artificial Sequence: Synthetic oligonucleotide
guagcggcccaugccuuua

SEQ ID NO: 1816652 - RNA, 19 nt, Artificial Sequence
  Description of Artificial Sequence: Synthetic oligonucleotide
gugcacccacauugcaagu

SEQ ID NO: 1816653 - RNA, 19 nt, Artificial Sequence
  Description of Artificial Sequence: Synthetic oligonucleotide
cuaggacuguguccuggau

SEQ ID NO: 1816654 - RNA, 19 nt, Artificial Sequence
  Description of Artificial Sequence: Synthetic oligonucleotide
cugugaggugugugugugu

SEQ ID NO: 1816655 - RNA, 19 nt, Artificial Sequence
  Description of Artificial Sequence: Synthetic oligonucleotide
gcagcucccuguacaagaa

SEQ ID NO: 1816656 - RNA, 19 nt, Artificial Sequence
  Description of Artificial Sequence: Synthetic oligonucleotide
ggucugggagucauccucu

SEQ ID NO: 1816657 - RNA, 19 nt, Artificial Sequence
  Description of Artificial Sequence: Synthetic oligonucleotide
ccagcgguagggacgaggu

SEQ ID NO: 1816658 - RNA, 19 nt, Artificial Sequence
  Description of Artificial Sequence: Synthetic oligonucleotide
ggagaagugcacccacauu

SEQ ID NO: 1816659 - RNA, 19 nt, Artificial Sequence
  Description of Artificial Sequence: Synthetic oligonucleotide
auuucccgucagagcucug

SEQ ID NO: 1816660 - RNA, 19 nt, Artificial Sequence
  Description of Artificial Sequence: Synthetic oligonucleotide
gguagggacgaggucuggu

SEQ ID NO: 1816661 - RNA, 19 nt, Artificial Sequence
  Description of Artificial Sequence: Synthetic oligonucleotide
gcuguccggauggcugcag

SEQ ID NO: 1816662 - RNA, 19 nt, Artificial Sequence
  Description of Artificial Sequence: Synthetic oligonucleotide
gcagaugaucgguguuugu

SEQ ID NO: 1816663 - RNA, 19 nt, Artificial Sequence
  Description of Artificial Sequence: Synthetic oligonucleotide
agacaucaucuaggcgcuu

SEQ ID NO: 1816664 - RNA, 19 nt, Artificial Sequence
  Description of Artificial Sequence: Synthetic oligonucleotide
ggcugcugauaaacaucca

SEQ ID NO: 1816665 - RNA, 19 nt, Artificial Sequence
  Description of Artificial Sequence: Synthetic oligonucleotide
cuguggcaucagggucucc

SEQ ID NO: 1816666 - RNA, 19 nt, Artificial Sequence
  Description of Artificial Sequence: Synthetic oligonucleotide
ccgagcggcagccauggcu

SEQ ID NO: 1816667 - RNA, 19 nt, Artificial Sequence
  Description of Artificial Sequence: Synthetic oligonucleotide
ccucacgucguuggagaca

SEQ ID NO: 1816668 - RNA, 19 nt, Artificial Sequence
  Description of Artificial Sequence: Synthetic oligonucleotide
ccauccucacgucguugga

SEQ ID NO: 1816669 - RNA, 19 nt, Artificial Sequence
  Description of Artificial Sequence: Synthetic oligonucleotide
ccaggcguguggucuggga

SEQ ID NO: 1816670 - RNA, 19 nt, Artificial Sequence
  Description of Artificial Sequence: Synthetic oligonucleotide
ccggauggcugcagccguc

SEQ ID NO: 1816671 - RNA, 19 nt, Artificial Sequence
  Description of Artificial Sequence: Synthetic oligonucleotide
gcuuggccaauaggacguc

SEQ ID NO: 1816672 - RNA, 19 nt, Artificial Sequence
  Description of Artificial Sequence: Synthetic oligonucleotide
ggacgacggccucggucuc

SEQ ID NO: 1816673 - RNA, 19 nt, Artificial Sequence
  Description of Artificial Sequence: Synthetic oligonucleotide
cggucaccgagcggcagcc

SEQ ID NO: 1816674 - RNA, 19 nt, Artificial Sequence
  Description of Artificial Sequence: Synthetic oligonucleotide
cgcuucaagagcucaggau

SEQ ID NO: 1816675 - RNA, 19 nt, Artificial Sequence
  Description of Artificial Sequence: Synthetic oligonucleotide
cggucucccgaaccagcac

SEQ ID NO: 1816676 - RNA, 19 nt, Artificial Sequence
  Description of Artificial Sequence: Synthetic oligonucleotide
ggauggcugcagccguccu

SEQ ID NO: 1816677 - RNA, 19 nt, Artificial Sequence
  Description of Artificial Sequence: Synthetic oligonucleotide
caggcgcaugugcgggucu

SEQ ID NO: 1816678 - RNA, 19 nt, Artificial Sequence
  Description of Artificial Sequence: Synthetic oligonucleotide
cgagcggcagccauggcuu

SEQ ID NO: 1816679 - RNA, 19 nt, Artificial Sequence
  Description of Artificial Sequence: Synthetic oligonucleotide
ccccugaguucuugagaaa

SEQ ID NO: 1816680 - RNA, 19 nt, Artificial Sequence
  Description of Artificial Sequence: Synthetic oligonucleotide
cgcuaaugaugcggcagga

SEQ ID NO: 1816681 - RNA, 19 nt, Artificial Sequence
  Description of Artificial Sequence: Synthetic oligonucleotide
ggucaccgagcggcagcca

SEQ ID NO: 1816682 - RNA, 19 nt, Artificial Sequence
  Description of Artificial Sequence: Synthetic oligonucleotide
cgguagggacgaggucugg

SEQ ID NO: 1816683 - RNA, 19 nt, Artificial Sequence
  Description of Artificial Sequence: Synthetic oligonucleotide
ggacgaggucugguuuccu

SEQ ID NO: 1816684 - RNA, 19 nt, Artificial Sequence
  Description of Artificial Sequence: Synthetic oligonucleotide
cgcugcccuccuugaggac

SEQ ID NO: 1816685 - RNA, 19 nt, Artificial Sequence
  Description of Artificial Sequence: Synthetic oligonucleotide
ggcgcaugugcgggucugu

SEQ ID NO: 1816686 - RNA, 19 nt, Artificial Sequence
  Description of Artificial Sequence: Synthetic oligonucleotide
cgacggccucggucucccg

SEQ ID NO: 1816687 - RNA, 19 nt, Artificial Sequence
  Description of Artificial Sequence: Synthetic oligonucleotide
cugcucugauaggcggauu

SEQ ID NO: 1816688 - RNA, 19 nt, Artificial Sequence
  Description of Artificial Sequence: Synthetic oligonucleotide
cguguggucugggagucau

SEQ ID NO: 1816689 - RNA, 19 nt, Artificial Sequence
  Description of Artificial Sequence: Synthetic oligonucleotide
aaauaaacauaguaguugg

SEQ ID NO: 1816690 - RNA, 19 nt, Artificial Sequence
  Description of Artificial Sequence: Synthetic oligonucleotide
  modified_base (7)..(7): a, c, u, g, unknown or other
aaagggnugauauggaagg

SEQ ID NO: 1816691 - RNA, 19 nt, Artificial Sequence
  Description of Artificial Sequence: Synthetic oligonucleotide
auugagagcaugcucaugc

SEQ ID NO: 1816692 - RNA, 19 nt, Artificial Sequence
  Description of Artificial Sequence: Synthetic oligonucleotide
ucaaaauaaacauaguagu

SEQ ID NO: 1816693 - RNA, 19 nt, Artificial Sequence
  Description of Artificial Sequence: Synthetic oligonucleotide
ucuguagucaaaauaaaca

SEQ ID NO: 1816694 - RNA, 19 nt, Artificial Sequence
  Description of Artificial Sequence: Synthetic oligonucleotide
guagucaaaauaaacauag

SEQ ID NO: 1816695 - RNA, 19 nt, Artificial Sequence
  Description of Artificial Sequence: Synthetic oligonucleotide
gaaaaggugguguagcuag

SEQ ID NO: 1816696 - RNA, 19 nt, Artificial Sequence
  Description of Artificial Sequence: Synthetic oligonucleotide
uucaugaccacggacaugg

SEQ ID NO: 1816697 - RNA, 19 nt, Artificial Sequence
  Description of Artificial Sequence: Synthetic oligonucleotide
gucaaaauaaacauaguag

SEQ ID NO: 1816698 - RNA, 19 nt, Artificial Sequence
  Description of Artificial Sequence: Synthetic oligonucleotide
aaaauugagagcaugcuca

SEQ ID NO: 1816699 - RNA, 19 nt, Artificial Sequence
  Description of Artificial Sequence: Synthetic oligonucleotide
uccagcauaucucugaaug

SEQ ID NO: 1816700 - RNA, 19 nt, Artificial Sequence
  Description of Artificial Sequence: Synthetic oligonucleotide
  modified_base (13)..(13): a, c, u, g, unknown or other
ugaaucaaagggnugauau

SEQ ID NO: 1816701 - RNA, 19 nt, Artificial Sequence
  Description of Artificial Sequence: Synthetic oligonucleotide
auagauauucaccagcucu

SEQ ID NO: 1816702 - RNA, 19 nt, Artificial Sequence
  Description of Artificial Sequence: Synthetic oligonucleotide
aaugaaaagaaggggaaug

SEQ ID NO: 1816703 - RNA, 19 nt, Artificial Sequence
  Description of Artificial Sequence: Synthetic oligonucleotide
aacaguuucaugaccacgg

SEQ ID NO: 1816704 - RNA, 19 nt, Artificial Sequence
  Description of Artificial Sequence: Synthetic oligonucleotide
ucggggagcagccagauag

SEQ ID NO: 1816705 - RNA, 19 nt, Artificial Sequence
  Description of Artificial Sequence: Synthetic oligonucleotide
uuguuagaaacaaaguggu

SEQ ID NO: 1816706 - RNA, 19 nt, Artificial Sequence
  Description of Artificial Sequence: Synthetic oligonucleotide
gaagauguagcugagaaca

SEQ ID NO: 1816707 - RNA, 19 nt, Artificial Sequence
  Description of Artificial Sequence: Synthetic oligonucleotide
uguugcaucgcuuugucca

SEQ ID NO: 1816708 - RNA, 19 nt, Artificial Sequence
  Description of Artificial Sequence: Synthetic oligonucleotide
ugggcauagagacauagug

SEQ ID NO: 1816709 - RNA, 19 nt, Artificial Sequence
  Description of Artificial Sequence: Synthetic oligonucleotide
agguaaagauaucuuggcc

SEQ ID NO: 1816710 - RNA, 19 nt, Artificial Sequence
  Description of Artificial Sequence: Synthetic oligonucleotide
aauagauauucaccagcuc

SEQ ID NO: 1816711 - RNA, 19 nt, Artificial Sequence
  Description of Artificial Sequence: Synthetic oligonucleotide
guagcuagggguuacuccg

SEQ ID NO: 1816712 - RNA, 19 nt, Artificial Sequence
  Description of Artificial Sequence: Synthetic oligonucleotide
gauaucuuggccugucagg

SEQ ID NO: 1816713 - RNA, 19 nt, Artificial Sequence
  Description of Artificial Sequence: Synthetic oligonucleotide
aaacauaguaguuggugga

SEQ ID NO: 1816714 - RNA, 19 nt, Artificial Sequence
  Description of Artificial Sequence: Synthetic oligonucleotide
ugcacgaggaugcagacga

SEQ ID NO: 1816715 - RNA, 19 nt, Artificial Sequence
  Description of Artificial Sequence: Synthetic oligonucleotide
uaaaaugccccuuguaugu

SEQ ID NO: 1816716 - RNA, 19 nt, Artificial Sequence
  Description of Artificial Sequence: Synthetic oligonucleotide
augaaaauugagagcaugc

SEQ ID NO: 1816717 - RNA, 19 nt, Artificial Sequence
  Description of Artificial Sequence: Synthetic oligonucleotide
aauggacuacuccuucuuc

SEQ ID NO: 1816718 - RNA, 19 nt, Artificial Sequence
  Description of Artificial Sequence: Synthetic oligonucleotide
agagcaugcaaggaaaagg

SEQ ID NO: 1816719 - RNA, 19 nt, Artificial Sequence
  Description of Artificial Sequence: Synthetic oligonucleotide
gugucugaaccuuugagcc

SEQ ID NO: 1816720 - RNA, 19 nt, Artificial Sequence
  Description of Artificial Sequence: Synthetic oligonucleotide
auagguagcaccucgggga

SEQ ID NO: 1816721 - RNA, 19 nt, Artificial Sequence
  Description of Artificial Sequence: Synthetic oligonucleotide
agaaaaguuggagaaagug

SEQ ID NO: 1816722 - RNA, 19 nt, Artificial Sequence
  Description of Artificial Sequence: Synthetic oligonucleotide
cauagagacauaguguugc

SEQ ID NO: 1816723 - RNA, 19 nt, Artificial Sequence
  Description of Artificial Sequence: Synthetic oligonucleotide
ugugcaaggaaucacugua

SEQ ID NO: 1816724 - RNA, 19 nt, Artificial Sequence
  Description of Artificial Sequence: Synthetic oligonucleotide
agcacagucauuguggauc

SEQ ID NO: 1816725 - RNA, 19 nt, Artificial Sequence
  Description of Artificial Sequence: Synthetic oligonucleotide
aauguguucugguagcuuu

SEQ ID NO: 1816726 - RNA, 19 nt, Artificial Sequence
  Description of Artificial Sequence: Synthetic oligonucleotide
acagguaaagauaucuugg

SEQ ID NO: 1816727 - RNA, 19 nt, Artificial Sequence
  Description of Artificial Sequence: Synthetic oligonucleotide
aaagugccauuccuccagc

SEQ ID NO: 1816728 - RNA, 19 nt, Artificial Sequence
  Description of Artificial Sequence: Synthetic oligonucleotide
aacauaguaguugguggac

SEQ ID NO: 1816729 - RNA, 19 nt, Artificial Sequence
  Description of Artificial Sequence: Synthetic oligonucleotide
  modified_base (8)..(8): a, c, u, g, unknown or other
caaagggnugauauggaag

SEQ ID NO: 1816730 - RNA, 19 nt, Artificial Sequence
  Description of Artificial Sequence: Synthetic oligonucleotide
ucacaucuggcagacagcg

SEQ ID NO: 1816731 - RNA, 19 nt, Artificial Sequence
  Description of Artificial Sequence: Synthetic oligonucleotide
uguagucaaaauaaacaua

SEQ ID NO: 1816732 - RNA, 19 nt, Artificial Sequence
  Description of Artificial Sequence: Synthetic oligonucleotide
gauguagcugagaacagcc

SEQ ID NO: 1816733 - RNA, 19 nt, Artificial Sequence
  Description of Artificial Sequence: Synthetic oligonucleotide
ucucauagucagcacuccg

SEQ ID NO: 1816734 - RNA, 19 nt, Artificial Sequence
  Description of Artificial Sequence: Synthetic oligonucleotide
ucuuagggaagccacugca

SEQ ID NO: 1816735 - RNA, 19 nt, Artificial Sequence
  Description of Artificial Sequence: Synthetic oligonucleotide
aaagauaucuuggccuguc

SEQ ID NO: 1816736 - RNA, 19 nt, Artificial Sequence
  Description of Artificial Sequence: Synthetic oligonucleotide
uuguauguaguggucaacc

SEQ ID NO: 1816737 - RNA, 19 nt, Artificial Sequence
  Description of Artificial Sequence: Synthetic oligonucleotide
uccucguggauaaaaugcc

SEQ ID NO: 1816738 - RNA, 19 nt, Artificial Sequence
  Description of Artificial Sequence: Synthetic oligonucleotide
ucugaguacaaguuccgcu

SEQ ID NO: 1816739 - RNA, 19 nt, Artificial Sequence
  Description of Artificial Sequence: Synthetic oligonucleotide
uguagcuagggguuacucc

SEQ ID NO: 1816740 - RNA, 19 nt, Artificial Sequence
  Description of Artificial Sequence: Synthetic oligonucleotide
aaaugccccuuguauguag

SEQ ID NO: 1816741 - RNA, 19 nt, Artificial Sequence
  Description of Artificial Sequence: Synthetic oligonucleotide
aggcaaucucacuggaacc

SEQ ID NO: 1816742 - RNA, 19 nt, Artificial Sequence
  Description of Artificial Sequence: Synthetic oligonucleotide
  modified_base (2)..(2): a, c, u, g, unknown or other
gnugauauggaaggcaauc

SEQ ID NO: 1816743 - RNA, 19 nt, Artificial Sequence
  Description of Artificial Sequence: Synthetic oligonucleotide
  modified_base (6)..(6): a, c, u, g, unknown or other
aagggnugauauggaaggc

SEQ ID NO: 1816744 - RNA, 19 nt, Artificial Sequence
  Description of Artificial Sequence: Synthetic oligonucleotide
guauguaguggucaaccag

SEQ ID NO: 1816745 - RNA, 19 nt, Artificial Sequence
  Description of Artificial Sequence: Synthetic oligonucleotide
ucucugaauggacuacucc

SEQ ID NO: 1816746 - RNA, 19 nt, Artificial Sequence
  Description of Artificial Sequence: Synthetic oligonucleotide
agauaucuuggccugucag

SEQ ID NO: 1816747 - RNA, 19 nt, Artificial Sequence
  Description of Artificial Sequence: Synthetic oligonucleotide
uuguggaucggucugggaa

SEQ ID NO: 1816748 - RNA, 19 nt, Artificial Sequence
  Description of Artificial Sequence: Synthetic oligonucleotide
ugauauggaaggcaaucuc

SEQ ID NO: 1816749 - RNA, 19 nt, Artificial Sequence
  Description of Artificial Sequence: Synthetic oligonucleotide
uuauaugugcaaggaauca

SEQ ID NO: 1816750 - RNA, 19 nt, Artificial Sequence
  Description of Artificial Sequence: Synthetic oligonucleotide
acgggaagccccuagcuuc

SEQ ID NO: 1816751 - RNA, 19 nt, Artificial Sequence
  Description of Artificial Sequence: Synthetic oligonucleotide
agauaguacugguugguca

SEQ ID NO: 1816752 - RNA, 19 nt, Artificial Sequence
  Description of Artificial Sequence: Synthetic oligonucleotide
aucuuggccugucagguag

SEQ ID NO: 1816753 - RNA, 19 nt, Artificial Sequence
  Description of Artificial Sequence: Synthetic oligonucleotide
cucauagucagcacuccgc

SEQ ID NO: 1816754 - RNA, 19 nt, Artificial Sequence
  Description of Artificial Sequence: Synthetic oligonucleotide
aguuucaugaccacggaca

SEQ ID NO: 1816755 - RNA, 19 nt, Artificial Sequence
  Description of Artificial Sequence: Synthetic oligonucleotide
cucguggauaaaaugcccc

SEQ ID NO: 1816756 - RNA, 19 nt, Artificial Sequence
  Description of Artificial Sequence: Synthetic oligonucleotide
acaccaugagaaaaguugg

SEQ ID NO: 1816757 - RNA, 19 nt, Artificial Sequence
  Description of Artificial Sequence: Synthetic oligonucleotide
ugguagguauugaacauuc

SEQ ID NO: 1816758 - RNA, 19 nt, Artificial Sequence
  Description of Artificial Sequence: Synthetic oligonucleotide
uuccucaaaccacucgaag

SEQ ID NO: 1816759 - RNA, 19 nt, Artificial Sequence
  Description of Artificial Sequence: Synthetic oligonucleotide
cuucacacugacaccacag

SEQ ID NO: 1816760 - RNA, 19 nt, Artificial Sequence
  Description of Artificial Sequence: Synthetic oligonucleotide
uguauguaguggucaacca

SEQ ID NO: 1816761 - RNA, 19 nt, Artificial Sequence
  Description of Artificial Sequence: Synthetic oligonucleotide
aaaagaaggggaauguguu

SEQ ID NO: 1816762 - RNA, 19 nt, Artificial Sequence
  Description of Artificial Sequence: Synthetic oligonucleotide
uauaugugcaaggaaucac

SEQ ID NO: 1816763 - RNA, 19 nt, Artificial Sequence
  Description of Artificial Sequence: Synthetic oligonucleotide
aguguugcaucgcuuuguc

SEQ ID NO: 1816764 - RNA, 19 nt, Artificial Sequence
  Description of Artificial Sequence: Synthetic oligonucleotide
cauagguagcaccucgggg

SEQ ID NO: 1816765 - RNA, 19 nt, Artificial Sequence
  Description of Artificial Sequence: Synthetic oligonucleotide
  modified_base (9)..(9): a, c, u, g, unknown or other
ucaaagggnugauauggaa

SEQ ID NO: 1816766 - RNA, 19 nt, Artificial Sequence
  Description of Artificial Sequence: Synthetic oligonucleotide
ugaaaagaaggggaaugug

SEQ ID NO: 1816767 - RNA, 19 nt, Artificial Sequence
  Description of Artificial Sequence: Synthetic oligonucleotide
gaacaguuucaugaccacg

SEQ ID NO: 1816768 - RNA, 19 nt, Artificial Sequence
  Description of Artificial Sequence: Synthetic oligonucleotide
guaaguggggaagauguag

SEQ ID NO: 1816769 - RNA, 19 nt, Artificial Sequence
  Description of Artificial Sequence: Synthetic oligonucleotide
acuaagugcugguagguau

SEQ ID NO: 1816770 - RNA, 19 nt, Artificial Sequence
  Description of Artificial Sequence: Synthetic oligonucleotide
gagagcaugcucaugccag

SEQ ID NO: 1816771 - RNA, 19 nt, Artificial Sequence
  Description of Artificial Sequence: Synthetic oligonucleotide
aaauugagagcaugcucau

SEQ ID NO: 1816772 - RNA, 19 nt, Artificial Sequence
  Description of Artificial Sequence: Synthetic oligonucleotide
gcaauagauauucaccagc

SEQ ID NO: 1816773 - RNA, 19 nt, Artificial Sequence
  Description of Artificial Sequence: Synthetic oligonucleotide
auaucucugaauggacuac

SEQ ID NO: 1816774 - RNA, 19 nt, Artificial Sequence
  Description of Artificial Sequence: Synthetic oligonucleotide
accaugagaaaaguuggag

SEQ ID NO: 1816775 - RNA, 19 nt, Artificial Sequence
  Description of Artificial Sequence: Synthetic oligonucleotide
gaggaugcagacgagccag

SEQ ID NO: 1816776 - RNA, 19 nt, Artificial Sequence
  Description of Artificial Sequence: Synthetic oligonucleotide
aguacugguuggucagugg

SEQ ID NO: 1816777 - RNA, 19 nt, Artificial Sequence
  Description of Artificial Sequence: Synthetic oligonucleotide
gggguuugggcucuuaggg

SEQ ID NO: 1816778 - RNA, 19 nt, Artificial Sequence
  Description of Artificial Sequence: Synthetic oligonucleotide
ugggaacaguuucaugacc

SEQ ID NO: 1816779 - RNA, 19 nt, Artificial Sequence
  Description of Artificial Sequence: Synthetic oligonucleotide
aagugguuuugguuauaug

SEQ ID NO: 1816780 - RNA, 19 nt, Artificial Sequence
  Description of Artificial Sequence: Synthetic oligonucleotide
ugcaaggaaaagguggugu

SEQ ID NO: 1816781 - RNA, 19 nt, Artificial Sequence
  Description of Artificial Sequence: Synthetic oligonucleotide
acaaguuccgcuucaggau

SEQ ID NO: 1816782 - RNA, 19 nt, Artificial Sequence
  Description of Artificial Sequence: Synthetic oligonucleotide
uggauaaaaugccccuugu

SEQ ID NO: 1816783 - RNA, 19 nt, Artificial Sequence
  Description of Artificial Sequence: Synthetic oligonucleotide
agucauuguggaucggucu

SEQ ID NO: 1816784 - RNA, 19 nt, Artificial Sequence
  Description of Artificial Sequence: Synthetic oligonucleotide
ugccauuccucaaaccacu

SEQ ID NO: 1816785 - RNA, 19 nt, Artificial Sequence
  Description of Artificial Sequence: Synthetic oligonucleotide
gaucugaguacaaguuccg

SEQ ID NO: 1816786 - RNA, 19 nt, Artificial Sequence
  Description of Artificial Sequence: Synthetic oligonucleotide
aaggggaauguguucuggu

SEQ ID NO: 1816787 - RNA, 19 nt, Artificial Sequence
  Description of Artificial Sequence: Synthetic oligonucleotide
uaguugguggacugaagcu

SEQ ID NO: 1816788 - RNA, 19 nt, Artificial Sequence
  Description of Artificial Sequence: Synthetic oligonucleotide
acuguaggaggacaccaug

SEQ ID NO: 1816789 - RNA, 19 nt, Artificial Sequence
  Description of Artificial Sequence: Synthetic oligonucleotide
uagucaaaauaaacauagu

SEQ ID NO: 1816790 - RNA, 19 nt, Artificial Sequence
  Description of Artificial Sequence: Synthetic oligonucleotide
aucacuguaggaggacacc

SEQ ID NO: 1816791 - RNA, 19 nt, Artificial Sequence
  Description of Artificial Sequence: Synthetic oligonucleotide
aagauaucuuggccuguca

SEQ ID NO: 1816792 - RNA, 19 nt, Artificial Sequence
  Description of Artificial Sequence: Synthetic oligonucleotide
accacggggcaauagauau

SEQ ID NO: 1816793 - RNA, 19 nt, Artificial Sequence
  Description of Artificial Sequence: Synthetic oligonucleotide
aaagugguuuugguuauau

SEQ ID NO: 1816794 - RNA, 19 nt, Artificial Sequence
  Description of Artificial Sequence: Synthetic oligonucleotide
ucagcccacagguaaagau

SEQ ID NO: 1816795 - RNA, 19 nt, Artificial Sequence
  Description of Artificial Sequence: Synthetic oligonucleotide
guuauaugugcaaggaauc

SEQ ID NO: 1816796 - RNA, 19 nt, Artificial Sequence
  Description of Artificial Sequence: Synthetic oligonucleotide
auaucuuggccugucaggu

SEQ ID NO: 1816797 - RNA, 19 nt, Artificial Sequence
  Description of Artificial Sequence: Synthetic oligonucleotide
agacauaguguugcaucgc

SEQ ID NO: 1816798 - RNA, 19 nt, Artificial Sequence
  Description of Artificial Sequence: Synthetic oligonucleotide
acugcacgaggaugcagac

SEQ ID NO: 1816799 - RNA, 19 nt, Artificial Sequence
  Description of Artificial Sequence: Synthetic oligonucleotide
ugccuuucaggcaaaugaa

SEQ ID NO: 1816800 - RNA, 19 nt, Artificial Sequence
  Description of Artificial Sequence: Synthetic oligonucleotide
uagguagcaccucggggag

SEQ ID NO: 1816801 - RNA, 19 nt, Artificial Sequence
  Description of Artificial Sequence: Synthetic oligonucleotide
gguaaagauaucuuggccu

SEQ ID NO: 1816802 - RNA, 19 nt, Artificial Sequence
  Description of Artificial Sequence: Synthetic oligonucleotide
cagguuggguccuugguug

SEQ ID NO: 1816803 - RNA, 19 nt, Artificial Sequence
  Description of Artificial Sequence: Synthetic oligonucleotide
ggauccuccagucacacuc

SEQ ID NO: 1816804 - RNA, 19 nt, Artificial Sequence
  Description of Artificial Sequence: Synthetic oligonucleotide
gggguuacuccguaagugg

SEQ ID NO: 1816805 - RNA, 19 nt, Artificial Sequence
  Description of Artificial Sequence: Synthetic oligonucleotide
gaaaagaaggggaaugugu

SEQ ID NO: 1816806 - RNA, 19 nt, Artificial Sequence
  Description of Artificial Sequence: Synthetic oligonucleotide
agagcaugcucaugccagg

SEQ ID NO: 1816807 - RNA, 19 nt, Artificial Sequence
  Description of Artificial Sequence: Synthetic oligonucleotide
cuuagggaagccacugcac

SEQ ID NO: 1816808 - RNA, 19 nt, Artificial Sequence
  Description of Artificial Sequence: Synthetic oligonucleotide
cauuccucaaaccacucga

SEQ ID NO: 1816809 - RNA, 19 nt, Artificial Sequence
  Description of Artificial Sequence: Synthetic oligonucleotide
caaucucacuggaaccucc

SEQ ID NO: 1816810 - RNA, 19 nt, Artificial Sequence
  Description of Artificial Sequence: Synthetic oligonucleotide
uacuccguaaguggggaag

SEQ ID NO: 1816811 - RNA, 19 nt, Artificial Sequence
  Description of Artificial Sequence: Synthetic oligonucleotide
guacaaguuccgcuucagg

SEQ ID NO: 1816812 - RNA, 19 nt, Artificial Sequence
  Description of Artificial Sequence: Synthetic oligonucleotide
aucgcuuuguccaugucug

SEQ ID NO: 1816813 - RNA, 19 nt, Artificial Sequence
  Description of Artificial Sequence: Synthetic oligonucleotide
caaguuccgcuucaggaug

SEQ ID NO: 1816814 - RNA, 19 nt, Artificial Sequence
  Description of Artificial Sequence: Synthetic oligonucleotide
ucguggauaaaaugccccu

SEQ ID NO: 1816815 - RNA, 19 nt, Artificial Sequence
  Description of Artificial Sequence: Synthetic oligonucleotide
auaugugcaaggaaucacu

SEQ ID NO: 1816816 - RNA, 19 nt, Artificial Sequence
  Description of Artificial Sequence: Synthetic oligonucleotide
guagguauugaacauuccu

SEQ ID NO: 1816817 - RNA, 19 nt, Artificial Sequence
  Description of Artificial Sequence: Synthetic oligonucleotide
ucggucugggaaucggucc

SEQ ID NO: 1816818 - RNA, 19 nt, Artificial Sequence
  Description of Artificial Sequence: Synthetic oligonucleotide
cagaucugaguacaaguuc

SEQ ID NO: 1816819 - RNA, 19 nt, Artificial Sequence
  Description of Artificial Sequence: Synthetic oligonucleotide
ucccaguggaguccaguag

SEQ ID NO: 1816820 - RNA, 19 nt, Artificial Sequence
  Description of Artificial Sequence: Synthetic oligonucleotide
gucuguagucaaaauaaac

SEQ ID NO: 1816821 - RNA, 19 nt, Artificial Sequence
  Description of Artificial Sequence: Synthetic oligonucleotide
uccgcuugcccuuuggcuc

SEQ ID NO: 1816822 - RNA, 19 nt, Artificial Sequence
  Description of Artificial Sequence: Synthetic oligonucleotide
uguggaucggucugggaau

SEQ ID NO: 1816823 - RNA, 19 nt, Artificial Sequence
  Description of Artificial Sequence: Synthetic oligonucleotide
aagauguagcugagaacag

SEQ ID NO: 1816824 - RNA, 19 nt, Artificial Sequence
  Description of Artificial Sequence: Synthetic oligonucleotide
ggcacuaagugcugguagg

SEQ ID NO: 1816825 - RNA, 19 nt, Artificial Sequence
  Description of Artificial Sequence: Synthetic oligonucleotide
ugccccuuguauguagugg

SEQ ID NO: 1816826 - RNA, 19 nt, Artificial Sequence
  Description of Artificial Sequence: Synthetic oligonucleotide
caugaccacggacauggag

SEQ ID NO: 1816827 - RNA, 19 nt, Artificial Sequence
  Description of Artificial Sequence: Synthetic oligonucleotide
ugucugaaccuuugagcca

SEQ ID NO: 1816828 - RNA, 19 nt, Artificial Sequence
  Description of Artificial Sequence: Synthetic oligonucleotide
guuagaaacaaagugguuu

SEQ ID NO: 1816829 - RNA, 19 nt, Artificial Sequence
  Description of Artificial Sequence: Synthetic oligonucleotide
uguuagaaacaaagugguu

SEQ ID NO: 1816830 - RNA, 19 nt, Artificial Sequence
  Description of Artificial Sequence: Synthetic oligonucleotide
augaccacggggcaauaga

SEQ ID NO: 1816831 - RNA, 19 nt, Artificial Sequence
  Description of Artificial Sequence: Synthetic oligonucleotide
cacucgaaggccaugggca

SEQ ID NO: 1816832 - RNA, 19 nt, Artificial Sequence
  Description of Artificial Sequence: Synthetic oligonucleotide
ucagcacuccgcuugcccu

SEQ ID NO: 1816833 - RNA, 19 nt, Artificial Sequence
  Description of Artificial Sequence: Synthetic oligonucleotide
uggucaaccagcagagcau

SEQ ID NO: 1816834 - RNA, 19 nt, Artificial Sequence
  Description of Artificial Sequence: Synthetic oligonucleotide
caugucuguagucaaaaua

SEQ ID NO: 1816835 - RNA, 19 nt, Artificial Sequence
  Description of Artificial Sequence: Synthetic oligonucleotide
acugacaccacaggcucuc

SEQ ID NO: 1816836 - RNA, 19 nt, Artificial Sequence
  Description of Artificial Sequence: Synthetic oligonucleotide
agaaagugccauuccucca

SEQ ID NO: 1816837 - RNA, 19 nt, Artificial Sequence
  Description of Artificial Sequence: Synthetic oligonucleotide
aaguuccgcuucaggaugg

SEQ ID NO: 1816838 - RNA, 19 nt, Artificial Sequence
  Description of Artificial Sequence: Synthetic oligonucleotide
ggcacugcugcacagcaag

SEQ ID NO: 1816839 - RNA, 19 nt, Artificial Sequence
  Description of Artificial Sequence: Synthetic oligonucleotide
cacacucuccaccuugccc

SEQ ID NO: 1816840 - RNA, 19 nt, Artificial Sequence
  Description of Artificial Sequence: Synthetic oligonucleotide
aauugagagcaugcucaug

SEQ ID NO: 1816841 - RNA, 19 nt, Artificial Sequence
  Description of Artificial Sequence: Synthetic oligonucleotide
auagagacauaguguugca

SEQ ID NO: 1816842 - RNA, 19 nt, Artificial Sequence
  Description of Artificial Sequence: Synthetic oligonucleotide
cugccauuccucaaaccac

SEQ ID NO: 1816843 - RNA, 19 nt, Artificial Sequence
  Description of Artificial Sequence: Synthetic oligonucleotide
uagggaagccacugcacga

SEQ ID NO: 1816844 - RNA, 19 nt, Artificial Sequence
  Description of Artificial Sequence: Synthetic oligonucleotide
ggcaauagauauucaccag

SEQ ID NO: 1816845 - RNA, 19 nt, Artificial Sequence
  Description of Artificial Sequence: Synthetic oligonucleotide
cuguagucaaaauaaacau

SEQ ID NO: 1816846 - RNA, 19 nt, Artificial Sequence
  Description of Artificial Sequence: Synthetic oligonucleotide
caaggaaaaggugguguag

SEQ ID NO: 1816847 - RNA, 19 nt, Artificial Sequence
  Description of Artificial Sequence: Synthetic oligonucleotide
caggccguaccauugccag

SEQ ID NO: 1816848 - RNA, 19 nt, Artificial Sequence
  Description of Artificial Sequence: Synthetic oligonucleotide
ugccauuccuccagcauau

SEQ ID NO: 1816849 - RNA, 19 nt, Artificial Sequence
  Description of Artificial Sequence: Synthetic oligonucleotide
ugaccacggggcaauagau

SEQ ID NO: 1816850 - RNA, 19 nt, Artificial Sequence
  Description of Artificial Sequence: Synthetic oligonucleotide
ucacgggaagccccuagcu

SEQ ID NO: 1816851 - RNA, 19 nt, Artificial Sequence
  Description of Artificial Sequence: Synthetic oligonucleotide
uagggguuacuccguaagu

SEQ ID NO: 1816852 - RNA, 19 nt, Artificial Sequence
  Description of Artificial Sequence: Synthetic oligonucleotide
augugcaaggaaucacugu

SEQ ID NO: 1816853 - RNA, 19 nt, Artificial Sequence
  Description of Artificial Sequence: Synthetic oligonucleotide
agggguuacuccguaagug

SEQ ID NO: 1816854 - RNA, 19 nt, Artificial Sequence
  Description of Artificial Sequence: Synthetic oligonucleotide
uuuguccaugucuguaguc

SEQ ID NO: 1816855 - RNA, 19 nt, Artificial Sequence
  Description of Artificial Sequence: Synthetic oligonucleotide
  modified_base (10)..(10): a, c, u, g, unknown or other
aucaaagggnugauaugga

SEQ ID NO: 1816856 - RNA, 19 nt, Artificial Sequence
  Description of Artificial Sequence: Synthetic oligonucleotide
gcaugcucaugccaggccg

SEQ ID NO: 1816857 - RNA, 19 nt, Artificial Sequence
  Description of Artificial Sequence: Synthetic oligonucleotide
uaagugcugguagguauug

SEQ ID NO: 1816858 - RNA, 19 nt, Artificial Sequence
  Description of Artificial Sequence: Synthetic oligonucleotide
ggggcaauagauauucacc

SEQ ID NO: 1816859 - RNA, 19 nt, Artificial Sequence
  Description of Artificial Sequence: Synthetic oligonucleotide
gguggacugaagcuucagg

SEQ ID NO: 1816860 - RNA, 19 nt, Artificial Sequence
  Description of Artificial Sequence: Synthetic oligonucleotide
  modified_base (5)..(5): a, c, u, g, unknown or other
agggnugauauggaaggca

SEQ ID NO: 1816861 - RNA, 19 nt, Artificial Sequence
  Description of Artificial Sequence: Synthetic oligonucleotide
cacggggcaauagauauuc

SEQ ID NO: 1816862 - RNA, 19 nt, Artificial Sequence
  Description of Artificial Sequence: Synthetic oligonucleotide
cauaucucugaauggacua

SEQ ID NO: 1816863 - RNA, 19 nt, Artificial Sequence
  Description of Artificial Sequence: Synthetic oligonucleotide
cagacagcgggcacucucc

SEQ ID NO: 1816864 - RNA, 19 nt, Artificial Sequence
  Description of Artificial Sequence: Synthetic oligonucleotide
agaaggggaauguguucug

SEQ ID NO: 1816865 - RNA, 19 nt, Artificial Sequence
  Description of Artificial Sequence: Synthetic oligonucleotide
aguacaaguuccgcuucag

SEQ ID NO: 1816866 - RNA, 19 nt, Artificial Sequence
  Description of Artificial Sequence: Synthetic oligonucleotide
guuuugguuauaugugcaa

SEQ ID NO: 1816867 - RNA, 19 nt, Artificial Sequence
  Description of Artificial Sequence: Synthetic oligonucleotide
uuugggcucuuagggaagc

SEQ ID NO: 1816868 - RNA, 19 nt, Artificial Sequence
  Description of Artificial Sequence: Synthetic oligonucleotide
agauauucaccagcucuug

SEQ ID NO: 1816869 - RNA, 19 nt, Artificial Sequence
  Description of Artificial Sequence: Synthetic oligonucleotide
cucugaauggacuacuccu

SEQ ID NO: 1816870 - RNA, 19 nt, Artificial Sequence
  Description of Artificial Sequence: Synthetic oligonucleotide
gcacagucauuguggaucg

SEQ ID NO: 1816871 - RNA, 19 nt, Artificial Sequence
  Description of Artificial Sequence: Synthetic oligonucleotide
agggucucauagucagcac

SEQ ID NO: 1816872 - RNA, 19 nt, Artificial Sequence
  Description of Artificial Sequence: Synthetic oligonucleotide
gaaucacuguaggaggaca

SEQ ID NO: 1816873 - RNA, 19 nt, Artificial Sequence
  Description of Artificial Sequence: Synthetic oligonucleotide
cuguacaguggcccuagug

SEQ ID NO: 1816874 - RNA, 19 nt, Artificial Sequence
  Description of Artificial Sequence: Synthetic oligonucleotide
gggaagauguagcugagaa

SEQ ID NO: 1816875 - RNA, 19 nt, Artificial Sequence
  Description of Artificial Sequence: Synthetic oligonucleotide
acagucauuguggaucggu

SEQ ID NO: 1816876 - RNA, 19 nt, Artificial Sequence
  Description of Artificial Sequence: Synthetic oligonucleotide
cucuuagggaagccacugc

SEQ ID NO: 1816877 - RNA, 19 nt, Artificial Sequence
  Description of Artificial Sequence: Synthetic oligonucleotide
uccguaaguggggaagaug

SEQ ID NO: 1816878 - RNA, 19 nt, Artificial Sequence
  Description of Artificial Sequence: Synthetic oligonucleotide
caguuucaugaccacggac

SEQ ID NO: 1816879 - RNA, 19 nt, Artificial Sequence
  Description of Artificial Sequence: Synthetic oligonucleotide
uaguguugcaucgcuuugu

SEQ ID NO: 1816880 - RNA, 19 nt, Artificial Sequence
  Description of Artificial Sequence: Synthetic oligonucleotide
uaaagauaucuuggccugu

SEQ ID NO: 1816881 - RNA, 19 nt, Artificial Sequence
  Description of Artificial Sequence: Synthetic oligonucleotide
gaugaccacggggcaauag

SEQ ID NO: 1816882 - RNA, 19 nt, Artificial Sequence
  Description of Artificial Sequence: Synthetic oligonucleotide
gacauaguguugcaucgcu

SEQ ID NO: 1816883 - RNA, 19 nt, Artificial Sequence
  Description of Artificial Sequence: Synthetic oligonucleotide
cagucauuguggaucgguc

SEQ ID NO: 1816884 - RNA, 19 nt, Artificial Sequence
  Description of Artificial Sequence: Synthetic oligonucleotide
gauggcacugcugcacagc

SEQ ID NO: 1816885 - RNA, 19 nt, Artificial Sequence
  Description of Artificial Sequence: Synthetic oligonucleotide
aucucugaauggacuacuc

SEQ ID NO: 1816886 - RNA, 19 nt, Artificial Sequence
  Description of Artificial Sequence: Synthetic oligonucleotide
agacagcgggcacucuccg

SEQ ID NO: 1816887 - RNA, 19 nt, Artificial Sequence
  Description of Artificial Sequence: Synthetic oligonucleotide
aggcucucccaguggaguc

SEQ ID NO: 1816888 - RNA, 19 nt, Artificial Sequence
  Description of Artificial Sequence: Synthetic oligonucleotide
aaugccccuuguauguagu

SEQ ID NO: 1816889 - RNA, 19 nt, Artificial Sequence
  Description of Artificial Sequence: Synthetic oligonucleotide
cagagcaugcaaggaaaag

SEQ ID NO: 1816890 - RNA, 19 nt, Artificial Sequence
  Description of Artificial Sequence: Synthetic oligonucleotide
aggccguaccauugccagc

SEQ ID NO: 1816891 - RNA, 19 nt, Artificial Sequence
  Description of Artificial Sequence: Synthetic oligonucleotide
aaggcauguuucagggucu

SEQ ID NO: 1816892 - RNA, 19 nt, Artificial Sequence
  Description of Artificial Sequence: Synthetic oligonucleotide
accacucgaaggccauggg

SEQ ID NO: 1816893 - RNA, 19 nt, Artificial Sequence
  Description of Artificial Sequence: Synthetic oligonucleotide
gacagcgggcacucuccgg

SEQ ID NO: 1816894 - RNA, 19 nt, Artificial Sequence
  Description of Artificial Sequence: Synthetic oligonucleotide
gucaguggggauccuccag

SEQ ID NO: 1816895 - RNA, 19 nt, Artificial Sequence
  Description of Artificial Sequence: Synthetic oligonucleotide
ggagcagccagauaguacu

SEQ ID NO: 1816896 - RNA, 19 nt, Artificial Sequence
  Description of Artificial Sequence: Synthetic oligonucleotide
ucacuggaaccuccucgug

SEQ ID NO: 1816897 - RNA, 19 nt, Artificial Sequence
  Description of Artificial Sequence: Synthetic oligonucleotide
aucggucugggaaucgguc

SEQ ID NO: 1816898 - RNA, 19 nt, Artificial Sequence
  Description of Artificial Sequence: Synthetic oligonucleotide
cuuguauguaguggucaac

SEQ ID NO: 1816899 - RNA, 19 nt, Artificial Sequence
  Description of Artificial Sequence: Synthetic oligonucleotide
caugcaaggaaaagguggu

SEQ ID NO: 1816900 - RNA, 19 nt, Artificial Sequence
  Description of Artificial Sequence: Synthetic oligonucleotide
gguuauaugugcaaggaau

SEQ ID NO: 1816901 - RNA, 19 nt, Artificial Sequence
  Description of Artificial Sequence: Synthetic oligonucleotide
agggaagccacugcacgag

SEQ ID NO: 1816902 - RNA, 19 nt, Artificial Sequence
  Description of Artificial Sequence: Synthetic oligonucleotide
cucacgggaagccccuagc

SEQ ID NO: 1816903 - RNA, 19 nt, Artificial Sequence
  Description of Artificial Sequence: Synthetic oligonucleotide
gguuacuccguaagugggg

SEQ ID NO: 1816904 - RNA, 19 nt, Artificial Sequence
  Description of Artificial Sequence: Synthetic oligonucleotide
caguagcacacucuguaca

SEQ ID NO: 1816905 - RNA, 19 nt, Artificial Sequence
  Description of Artificial Sequence: Synthetic oligonucleotide
ucuggcagacagcgggcac

SEQ ID NO: 1816906 - RNA, 19 nt, Artificial Sequence
  Description of Artificial Sequence: Synthetic oligonucleotide
guugguggacugaagcuuc

SEQ ID NO: 1816907 - RNA, 19 nt, Artificial Sequence
  Description of Artificial Sequence: Synthetic oligonucleotide
cuucaggauggcacugcug

SEQ ID NO: 1816908 - RNA, 19 nt, Artificial Sequence
  Description of Artificial Sequence: Synthetic oligonucleotide
guuacuccguaagugggga

SEQ ID NO: 1816909 - RNA, 19 nt, Artificial Sequence
  Description of Artificial Sequence: Synthetic oligonucleotide
ggacauggaggcuuccaug

SEQ ID NO: 1816910 - RNA, 19 nt, Artificial Sequence
  Description of Artificial Sequence: Synthetic oligonucleotide
ugggcucuuagggaagcca

SEQ ID NO: 1816911 - RNA, 19 nt, Artificial Sequence
  Description of Artificial Sequence: Synthetic oligonucleotide
aguggggauccuccaguca

SEQ ID NO: 1816912 - RNA, 19 nt, Artificial Sequence
  Description of Artificial Sequence: Synthetic oligonucleotide
aagagccugcagaucugag

SEQ ID NO: 1816913 - RNA, 19 nt, Artificial Sequence
  Description of Artificial Sequence: Synthetic oligonucleotide
agcagagcaugcaaggaaa

SEQ ID NO: 1816914 - RNA, 19 nt, Artificial Sequence
  Description of Artificial Sequence: Synthetic oligonucleotide
ggguuacuccguaaguggg

SEQ ID NO: 1816915 - RNA, 19 nt, Artificial Sequence
  Description of Artificial Sequence: Synthetic oligonucleotide
cucuccggcacuaagugcu

SEQ ID NO: 1816916 - RNA, 19 nt, Artificial Sequence
  Description of Artificial Sequence: Synthetic oligonucleotide
aaccuccucguggauaaaa

SEQ ID NO: 1816917 - RNA, 19 nt, Artificial Sequence
  Description of Artificial Sequence: Synthetic oligonucleotide
agcaugcaaggaaaaggug

SEQ ID NO: 1816918 - RNA, 19 nt, Artificial Sequence
  Description of Artificial Sequence: Synthetic oligonucleotide
aguuggagaaagugccauu

SEQ ID NO: 1816919 - RNA, 19 nt, Artificial Sequence
  Description of Artificial Sequence: Synthetic oligonucleotide
guguugcaucgcuuugucc

SEQ ID NO: 1816920 - RNA, 19 nt, Artificial Sequence
  Description of Artificial Sequence: Synthetic oligonucleotide
ggguccuugguugauggag

SEQ ID NO: 1816921 - RNA, 19 nt, Artificial Sequence
  Description of Artificial Sequence: Synthetic oligonucleotide
aguuccgcuucaggauggc

SEQ ID NO: 1816922 - RNA, 19 nt, Artificial Sequence
  Description of Artificial Sequence: Synthetic oligonucleotide
ggcccuagugaggacagcg

SEQ ID NO: 1816923 - RNA, 19 nt, Artificial Sequence
  Description of Artificial Sequence: Synthetic oligonucleotide
ccaugagaaaaguuggaga

SEQ ID NO: 1816924 - RNA, 19 nt, Artificial Sequence
  Description of Artificial Sequence: Synthetic oligonucleotide
ugguuggucaguggggauc

SEQ ID NO: 1816925 - RNA, 19 nt, Artificial Sequence
  Description of Artificial Sequence: Synthetic oligonucleotide
cccaguggaguccaguagc

SEQ ID NO: 1816926 - RNA, 19 nt, Artificial Sequence
  Description of Artificial Sequence: Synthetic oligonucleotide
uggaucggucugggaaucg

SEQ ID NO: 1816927 - RNA, 19 nt, Artificial Sequence
  Description of Artificial Sequence: Synthetic oligonucleotide
cuugcccuuuggcuccucc

SEQ ID NO: 1816928 - RNA, 19 nt, Artificial Sequence
  Description of Artificial Sequence: Synthetic oligonucleotide
uuggccugucagguagagg

SEQ ID NO: 1816929 - RNA, 19 nt, Artificial Sequence
  Description of Artificial Sequence: Synthetic oligonucleotide
ggcauagagacauaguguu

SEQ ID NO: 1816930 - RNA, 19 nt, Artificial Sequence
  Description of Artificial Sequence: Synthetic oligonucleotide
ccuagugaggacagcgccc

SEQ ID NO: 1816931 - RNA, 19 nt, Artificial Sequence
  Description of Artificial Sequence: Synthetic oligonucleotide
auuguggaucggucuggga

SEQ ID NO: 1816932 - RNA, 19 nt, Artificial Sequence
  Description of Artificial Sequence: Synthetic oligonucleotide
ggaacaguuucaugaccac

SEQ ID NO: 1816933 - RNA, 19 nt, Artificial Sequence
  Description of Artificial Sequence: Synthetic oligonucleotide
uggagcucacgggaagccc

SEQ ID NO: 1816934 - RNA, 19 nt, Artificial Sequence
  Description of Artificial Sequence: Synthetic oligonucleotide
uccggcacuaagugcuggu

SEQ ID NO: 1816935 - RNA, 19 nt, Artificial Sequence
  Description of Artificial Sequence: Synthetic oligonucleotide
guuugggcucuuagggaag

SEQ ID NO: 1816936 - RNA, 19 nt, Artificial Sequence
  Description of Artificial Sequence: Synthetic oligonucleotide
aggaggacaccaugagaaa

SEQ ID NO: 1816937 - RNA, 19 nt, Artificial Sequence
  Description of Artificial Sequence: Synthetic oligonucleotide
augccccuuguauguagug

SEQ ID NO: 1816938 - RNA, 19 nt, Artificial Sequence
  Description of Artificial Sequence: Synthetic oligonucleotide
cucuguacaguggcccuag

SEQ ID NO: 1816939 - RNA, 19 nt, Artificial Sequence
  Description of Artificial Sequence: Synthetic oligonucleotide
caggauggcacugcugcac

SEQ ID NO: 1816940 - RNA, 19 nt, Artificial Sequence
  Description of Artificial Sequence: Synthetic oligonucleotide
cagauaguacugguugguc

SEQ ID NO: 1816941 - RNA, 19 nt, Artificial Sequence
  Description of Artificial Sequence: Synthetic oligonucleotide
caccaugagaaaaguugga

SEQ ID NO: 1816942 - RNA, 19 nt, Artificial Sequence
  Description of Artificial Sequence: Synthetic oligonucleotide
gucucauagucagcacucc

SEQ ID NO: 1816943 - RNA, 19 nt, Artificial Sequence
  Description of Artificial Sequence: Synthetic oligonucleotide
ccauuccucaaaccacucg

SEQ ID NO: 1816944 - RNA, 19 nt, Artificial Sequence
  Description of Artificial Sequence: Synthetic oligonucleotide
auguaguggucaaccagca

SEQ ID NO: 1816945 - RNA, 19 nt, Artificial Sequence
  Description of Artificial Sequence: Synthetic oligonucleotide
cauaguguugcaucgcuuu

SEQ ID NO: 1816946 - RNA, 19 nt, Artificial Sequence
  Description of Artificial Sequence: Synthetic oligonucleotide
ccuuucaggcaaaugaaaa

SEQ ID NO: 1816947 - RNA, 19 nt, Artificial Sequence
  Description of Artificial Sequence: Synthetic oligonucleotide
gguuggucaguggggaucc

SEQ ID NO: 1816948 - RNA, 19 nt, Artificial Sequence
  Description of Artificial Sequence: Synthetic oligonucleotide
cugggaaucgguccuccca

SEQ ID NO: 1816949 - RNA, 19 nt, Artificial Sequence
  Description of Artificial Sequence: Synthetic oligonucleotide
ccauagguagcaccucggg

SEQ ID NO: 1816950 - RNA, 19 nt, Artificial Sequence
  Description of Artificial Sequence: Synthetic oligonucleotide
uuacuccguaaguggggaa

SEQ ID NO: 1816951 - RNA, 19 nt, Artificial Sequence
  Description of Artificial Sequence: Synthetic oligonucleotide
agccccauagguagcaccu

SEQ ID NO: 1816952 - RNA, 19 nt, Artificial Sequence
  Description of Artificial Sequence: Synthetic oligonucleotide
guuggguccuugguugaug

SEQ ID NO: 1816953 - RNA, 19 nt, Artificial Sequence
  Description of Artificial Sequence: Synthetic oligonucleotide
gcaaugaaaagaaggggaa

SEQ ID NO: 1816954 - RNA, 19 nt, Artificial Sequence
  Description of Artificial Sequence: Synthetic oligonucleotide
ggucucauagucagcacuc

SEQ ID NO: 1816955 - RNA, 19 nt, Artificial Sequence
  Description of Artificial Sequence: Synthetic oligonucleotide
acuccguaaguggggaaga

SEQ ID NO: 1816956 - RNA, 19 nt, Artificial Sequence
  Description of Artificial Sequence: Synthetic oligonucleotide
augcaaggaaaagguggug

SEQ ID NO: 1816957 - RNA, 19 nt, Artificial Sequence
  Description of Artificial Sequence: Synthetic oligonucleotide
cccuagugaggacagcgcc

SEQ ID NO: 1816958 - RNA, 19 nt, Artificial Sequence
  Description of Artificial Sequence: Synthetic oligonucleotide
cuuggccugucagguagag

SEQ ID NO: 1816959 - RNA, 19 nt, Artificial Sequence
  Description of Artificial Sequence: Synthetic oligonucleotide
  modified_base (4)..(4): a, c, u, g, unknown or other
gggnugauauggaaggcaa

SEQ ID NO: 1816960 - RNA, 19 nt, Artificial Sequence
  Description of Artificial Sequence: Synthetic oligonucleotide
cugcacgaggaugcagacg

SEQ ID NO: 1816961 - RNA, 19 nt, Artificial Sequence
  Description of Artificial Sequence: Synthetic oligonucleotide
gguccucccagguuggguc

SEQ ID NO: 1816962 - RNA, 19 nt, Artificial Sequence
  Description of Artificial Sequence: Synthetic oligonucleotide
ggaucggucugggaaucgg

SEQ ID NO: 1816963 - RNA, 19 nt, Artificial Sequence
  Description of Artificial Sequence: Synthetic oligonucleotide
gguagguauugaacauucc

SEQ ID NO: 1816964 - RNA, 19 nt, Artificial Sequence
  Description of Artificial Sequence: Synthetic oligonucleotide
cuugguugauggagaggca

SEQ ID NO: 1816965 - RNA, 19 nt, Artificial Sequence
  Description of Artificial Sequence: Synthetic oligonucleotide
caguggggauccuccaguc

SEQ ID NO: 1816966 - RNA, 19 nt, Artificial Sequence
  Description of Artificial Sequence: Synthetic oligonucleotide
ucgcuuuguccaugucugu

SEQ ID NO: 1816967 - RNA, 19 nt, Artificial Sequence
  Description of Artificial Sequence: Synthetic oligonucleotide
ugguguagcuagggguuac

SEQ ID NO: 1816968 - RNA, 19 nt, Artificial Sequence
  Description of Artificial Sequence: Synthetic oligonucleotide
auuccucaaaccacucgaa

SEQ ID NO: 1816969 - RNA, 19 nt, Artificial Sequence
  Description of Artificial Sequence: Synthetic oligonucleotide
cauguuucagggucucaua

SEQ ID NO: 1816970 - RNA, 19 nt, Artificial Sequence
  Description of Artificial Sequence: Synthetic oligonucleotide
cagcccacagguaaagaua

SEQ ID NO: 1816971 - RNA, 19 nt, Artificial Sequence
  Description of Artificial Sequence: Synthetic oligonucleotide
cacuccgcuugcccuuugg

SEQ ID NO: 1816972 - RNA, 19 nt, Artificial Sequence
  Description of Artificial Sequence: Synthetic oligonucleotide
agguagcaccucggggagc

SEQ ID NO: 1816973 - RNA, 19 nt, Artificial Sequence
  Description of Artificial Sequence: Synthetic oligonucleotide
agccaagagccugcagauc

SEQ ID NO: 1816974 - RNA, 19 nt, Artificial Sequence
  Description of Artificial Sequence: Synthetic oligonucleotide
gagcagccagauaguacug

SEQ ID NO: 1816975 - RNA, 19 nt, Artificial Sequence
  Description of Artificial Sequence: Synthetic oligonucleotide
cucacuggaaccuccucgu

SEQ ID NO: 1816976 - RNA, 19 nt, Artificial Sequence
  Description of Artificial Sequence: Synthetic oligonucleotide
ggucaaccagcagagcaug

SEQ ID NO: 1816977 - RNA, 19 nt, Artificial Sequence
  Description of Artificial Sequence: Synthetic oligonucleotide
uugggcucuuagggaagcc

SEQ ID NO: 1816978 - RNA, 19 nt, Artificial Sequence
  Description of Artificial Sequence: Synthetic oligonucleotide
gcucuugucccuucuucac

SEQ ID NO: 1816979 - RNA, 19 nt, Artificial Sequence
  Description of Artificial Sequence: Synthetic oligonucleotide
uugcaucgcuuuguccaug

SEQ ID NO: 1816980 - RNA, 19 nt, Artificial Sequence
  Description of Artificial Sequence: Synthetic oligonucleotide
cucgaaggccaugggcacc

SEQ ID NO: 1816981 - RNA, 19 nt, Artificial Sequence
  Description of Artificial Sequence: Synthetic oligonucleotide
ccaguagcacacucuguac

SEQ ID NO: 1816982 - RNA, 19 nt, Artificial Sequence
  Description of Artificial Sequence: Synthetic oligonucleotide
uuggucaguggggauccuc

SEQ ID NO: 1816983 - RNA, 19 nt, Artificial Sequence
  Description of Artificial Sequence: Synthetic oligonucleotide
  modified_base (14)..(14): a, c, u, g, unknown or other
cugaaucaaagggnugaua

SEQ ID NO: 1816984 - RNA, 19 nt, Artificial Sequence
  Description of Artificial Sequence: Synthetic oligonucleotide
gucaaccagcagagcaugc

SEQ ID NO: 1816985 - RNA, 19 nt, Artificial Sequence
  Description of Artificial Sequence: Synthetic oligonucleotide
aucgguccucccagguugg

SEQ ID NO: 1816986 - RNA, 19 nt, Artificial Sequence
  Description of Artificial Sequence: Synthetic oligonucleotide
ggguuugggcucuuaggga

SEQ ID NO: 1816987 - RNA, 19 nt, Artificial Sequence
  Description of Artificial Sequence: Synthetic oligonucleotide
ccguaaguggggaagaugu

SEQ ID NO: 1816988 - RNA, 19 nt, Artificial Sequence
  Description of Artificial Sequence: Synthetic oligonucleotide
ggauggcacugcugcacag

SEQ ID NO: 1816989 - RNA, 19 nt, Artificial Sequence
  Description of Artificial Sequence: Synthetic oligonucleotide
cggggcaauagauauucac

SEQ ID NO: 1816990 - RNA, 19 nt, Artificial Sequence
  Description of Artificial Sequence: Synthetic oligonucleotide
auggucagccccauaggua

SEQ ID NO: 1816991 - RNA, 19 nt, Artificial Sequence
  Description of Artificial Sequence: Synthetic oligonucleotide
guguagcuagggguuacuc

SEQ ID NO: 1816992 - RNA, 19 nt, Artificial Sequence
  Description of Artificial Sequence: Synthetic oligonucleotide
acggacauggaggcuucca

SEQ ID NO: 1816993 - RNA, 19 nt, Artificial Sequence
  Description of Artificial Sequence: Synthetic oligonucleotide
cuccggcacuaagugcugg

SEQ ID NO: 1816994 - RNA, 19 nt, Artificial Sequence
  Description of Artificial Sequence: Synthetic oligonucleotide
agcuagggguuacuccgua

SEQ ID NO: 1816995 - RNA, 19 nt, Artificial Sequence
  Description of Artificial Sequence: Synthetic oligonucleotide
accuccucguggauaaaau

SEQ ID NO: 1816996 - RNA, 19 nt, Artificial Sequence
  Description of Artificial Sequence: Synthetic oligonucleotide
uuggugccuuucaggcaaa

SEQ ID NO: 1816997 - RNA, 19 nt, Artificial Sequence
  Description of Artificial Sequence: Synthetic oligonucleotide
acauaguguugcaucgcuu

SEQ ID NO: 1816998 - RNA, 19 nt, Artificial Sequence
  Description of Artificial Sequence: Synthetic oligonucleotide
ggugccuuucaggcaaaug

SEQ ID NO: 1816999 - RNA, 19 nt, Artificial Sequence
  Description of Artificial Sequence: Synthetic oligonucleotide
cucccaguggaguccagua

SEQ ID NO: 1817000 - RNA, 19 nt, Artificial Sequence
  Description of Artificial Sequence: Synthetic oligonucleotide
caagagccugcagaucuga

SEQ ID NO: 1817001 - RNA, 19 nt, Artificial Sequence
  Description of Artificial Sequence: Synthetic oligonucleotide
ugcucaugccaggccguac

SEQ ID NO: 1817002 - RNA, 19 nt, Artificial Sequence
  Description of Artificial Sequence: Synthetic oligonucleotide
gucagccccauagguagca

SEQ ID NO: 1817003 - RNA, 19 nt, Artificial Sequence
  Description of Artificial Sequence: Synthetic oligonucleotide
  modified_base (16)..(16): a, c, u, g, unknown or other
cgcugaaucaaagggnuga

SEQ ID NO: 1817004 - RNA, 19 nt, Artificial Sequence
  Description of Artificial Sequence: Synthetic oligonucleotide
uggcagacagcgggcacuc

SEQ ID NO: 1817005 - RNA, 19 nt, Artificial Sequence
  Description of Artificial Sequence: Synthetic oligonucleotide
gggucucauagucagcacu

SEQ ID NO: 1817006 - RNA, 19 nt, Artificial Sequence
  Description of Artificial Sequence: Synthetic oligonucleotide
cacagucauuguggaucgg

SEQ ID NO: 1817007 - RNA, 19 nt, Artificial Sequence
  Description of Artificial Sequence: Synthetic oligonucleotide
guugcaucgcuuuguccau

SEQ ID NO: 1817008 - RNA, 19 nt, Artificial Sequence
  Description of Artificial Sequence: Synthetic oligonucleotide
ggcaaucucacuggaaccu

SEQ ID NO: 1817009 - RNA, 19 nt, Artificial Sequence
  Description of Artificial Sequence: Synthetic oligonucleotide
gggcucuuagggaagccac

SEQ ID NO: 1817010 - RNA, 19 nt, Artificial Sequence
  Description of Artificial Sequence: Synthetic oligonucleotide
gcucacgggaagccccuag

SEQ ID NO: 1817011 - RNA, 19 nt, Artificial Sequence
  Description of Artificial Sequence: Synthetic oligonucleotide
guggaucggucugggaauc

SEQ ID NO: 1817012 - RNA, 19 nt, Artificial Sequence
  Description of Artificial Sequence: Synthetic oligonucleotide
gggagcagccagauaguac

SEQ ID NO: 1817013 - RNA, 19 nt, Artificial Sequence
  Description of Artificial Sequence: Synthetic oligonucleotide
gaccacggggcaauagaua

SEQ ID NO: 1817014 - RNA, 19 nt, Artificial Sequence
  Description of Artificial Sequence: Synthetic oligonucleotide
gggcauagagacauagugu

SEQ ID NO: 1817015 - RNA, 19 nt, Artificial Sequence
  Description of Artificial Sequence: Synthetic oligonucleotide
gaucggucugggaaucggu

SEQ ID NO: 1817016 - RNA, 19 nt, Artificial Sequence
  Description of Artificial Sequence: Synthetic oligonucleotide
ccaagagccugcagaucug

SEQ ID NO: 1817017 - RNA, 19 nt, Artificial Sequence
  Description of Artificial Sequence: Synthetic oligonucleotide
ccagcacagucauugugga

SEQ ID NO: 1817018 - RNA, 19 nt, Artificial Sequence
  Description of Artificial Sequence: Synthetic oligonucleotide
cggcacuaagugcugguag

SEQ ID NO: 1817019 - RNA, 19 nt, Artificial Sequence
  Description of Artificial Sequence: Synthetic oligonucleotide
ggcucucccaguggagucc

SEQ ID NO: 1817020 - RNA, 19 nt, Artificial Sequence
  Description of Artificial Sequence: Synthetic oligonucleotide
ccguaccauugccagcugc

SEQ ID NO: 1817021 - RNA, 19 nt, Artificial Sequence
  Description of Artificial Sequence: Synthetic oligonucleotide
gaauguguucugguagcuu

SEQ ID NO: 1817022 - RNA, 19 nt, Artificial Sequence
  Description of Artificial Sequence: Synthetic oligonucleotide
ggucaguggggauccucca

SEQ ID NO: 1817023 - RNA, 19 nt, Artificial Sequence
  Description of Artificial Sequence: Synthetic oligonucleotide
gccccuuguauguaguggu

SEQ ID NO: 1817024 - RNA, 19 nt, Artificial Sequence
  Description of Artificial Sequence: Synthetic oligonucleotide
gcaaucucacuggaaccuc

SEQ ID NO: 1817025 - RNA, 19 nt, Artificial Sequence
  Description of Artificial Sequence: Synthetic oligonucleotide
  modified_base (19)..(19): a, c, u, g, unknown or other
gcccgcugaaucaaagggn

SEQ ID NO: 1817026 - RNA, 19 nt, Artificial Sequence
  Description of Artificial Sequence: Synthetic oligonucleotide
cacucuguacaguggcccu

SEQ ID NO: 1817027 - RNA, 19 nt, Artificial Sequence
  Description of Artificial Sequence: Synthetic oligonucleotide
caugccaggccguaccauu

SEQ ID NO: 1817028 - RNA, 19 nt, Artificial Sequence
  Description of Artificial Sequence: Synthetic oligonucleotide
cacuaagugcugguaggua

SEQ ID NO: 1817029 - RNA, 19 nt, Artificial Sequence
  Description of Artificial Sequence: Synthetic oligonucleotide
cacggacauggaggcuucc

SEQ ID NO: 1817030 - RNA, 19 nt, Artificial Sequence
  Description of Artificial Sequence: Synthetic oligonucleotide
  modified_base (17)..(17): a, c, u, g, unknown or other
ccgcugaaucaaagggnug

SEQ ID NO: 1817031 - RNA, 19 nt, Artificial Sequence
  Description of Artificial Sequence: Synthetic oligonucleotide
gcaaggccccuuguagggc

SEQ ID NO: 1817032 - RNA, 19 nt, Artificial Sequence
  Description of Artificial Sequence: Synthetic oligonucleotide
cccuuguauguagugguca

SEQ ID NO: 1817033 - RNA, 19 nt, Artificial Sequence
  Description of Artificial Sequence: Synthetic oligonucleotide
gcuagggguuacuccguaa

SEQ ID NO: 1817034 - RNA, 19 nt, Artificial Sequence
  Description of Artificial Sequence: Synthetic oligonucleotide
ccccuuguauguagugguc

SEQ ID NO: 1817035 - RNA, 19 nt, Artificial Sequence
  Description of Artificial Sequence: Synthetic oligonucleotide
ccggcccgcugaaucaaag

SEQ ID NO: 1817036 - RNA, 19 nt, Artificial Sequence
  Description of Artificial Sequence: Synthetic oligonucleotide
acggggcaauagauauuca

SEQ ID NO: 1817037 - RNA, 19 nt, Artificial Sequence
  Description of Artificial Sequence: Synthetic oligonucleotide
caguggcccuagugaggac

SEQ ID NO: 1817038 - RNA, 19 nt, Artificial Sequence
  Description of Artificial Sequence: Synthetic oligonucleotide
  modified_base (18)..(18): a, c, u, g, unknown or other
cccgcugaaucaaagggnu

SEQ ID NO: 1817039 - RNA, 19 nt, Artificial Sequence
  Description of Artificial Sequence: Synthetic oligonucleotide
cggcccgcugaaucaaagg

SEQ ID NO: 1817040 - RNA, 19 nt, Artificial Sequence
  Description of Artificial Sequence: Synthetic oligonucleotide
cugguagguauugaacauu

SEQ ID NO: 1817041 - RNA, 19 nt, Artificial Sequence
  Description of Artificial Sequence: Synthetic oligonucleotide
ccaggccguaccauugcca

SEQ ID NO: 1817042 - RNA, 19 nt, Artificial Sequence
  Description of Artificial Sequence: Synthetic oligonucleotide
cacugacaccacaggcucu

SEQ ID NO: 1817043 - RNA, 19 nt, Artificial Sequence
  Description of Artificial Sequence: Synthetic oligonucleotide
cagccagauaguacugguu

SEQ ID NO: 1817044 - RNA, 19 nt, Artificial Sequence
  Description of Artificial Sequence: Synthetic oligonucleotide
cacgggaagccccuagcuu

SEQ ID NO: 1817045 - RNA, 19 nt, Artificial Sequence
  Description of Artificial Sequence: Synthetic oligonucleotide
gcacuaagugcugguaggu

SEQ ID NO: 1817046 - RNA, 19 nt, Artificial Sequence
  Description of Artificial Sequence: Synthetic oligonucleotide
  modified_base (3)..(3): a, c, u, g, unknown or other
ggnugauauggaaggcaau

SEQ ID NO: 1817047 - RNA, 19 nt, Artificial Sequence
  Description of Artificial Sequence: Synthetic oligonucleotide
gagcucacgggaagccccu

SEQ ID NO: 1817048 - RNA, 19 nt, Artificial Sequence
  Description of Artificial Sequence: Synthetic oligonucleotide
agaugaccacggggcaaua

SEQ ID NO: 1817049 - RNA, 19 nt, Artificial Sequence
  Description of Artificial Sequence: Synthetic oligonucleotide
  modified_base (15)..(15): a, c, u, g, unknown or other
gcugaaucaaagggnugau

SEQ ID NO: 1817050 - RNA, 19 nt, Artificial Sequence
  Description of Artificial Sequence: Synthetic oligonucleotide
gcacgaggaugcagacgag

SEQ ID NO: 1817051 - RNA, 19 nt, Artificial Sequence
  Description of Artificial Sequence: Synthetic oligonucleotide
cgaggaugcagacgagcca

SEQ ID NO: 1817052 - RNA, 19 nt, Artificial Sequence
  Description of Artificial Sequence: Synthetic oligonucleotide
ggggagcagccagauagua

SEQ ID NO: 1817053 - RNA, 19 nt, Artificial Sequence
  Description of Artificial Sequence: Synthetic oligonucleotide
ggaugcagacgagccaggu

SEQ ID NO: 1817054 - RNA, 19 nt, Artificial Sequence
  Description of Artificial Sequence: Synthetic oligonucleotide
cugguuggucaguggggau

SEQ ID NO: 1817055 - RNA, 19 nt, Artificial Sequence
  Description of Artificial Sequence: Synthetic oligonucleotide
gccguaccauugccagcug

SEQ ID NO: 1817056 - RNA, 19 nt, Artificial Sequence
  Description of Artificial Sequence: Synthetic oligonucleotide
cguaaguggggaagaugua

SEQ ID NO: 1817057 - RNA, 19 nt, Artificial Sequence
  Description of Artificial Sequence: Synthetic oligonucleotide
gcaccagcacagucauugu

SEQ ID NO: 1817058 - RNA, 19 nt, Artificial Sequence
  Description of Artificial Sequence: Synthetic oligonucleotide
cucggggagcagccagaua

SEQ ID NO: 1817059 - RNA, 19 nt, Artificial Sequence
  Description of Artificial Sequence: Synthetic oligonucleotide
cuccguaaguggggaagau

SEQ ID NO: 1817060 - RNA, 19 nt, Artificial Sequence
  Description of Artificial Sequence: Synthetic oligonucleotide
cagcacuccgcuugcccuu

SEQ ID NO: 1817061 - RNA, 19 nt, Artificial Sequence
  Description of Artificial Sequence: Synthetic oligonucleotide
agcucacgggaagccccua

SEQ ID NO: 1817062 - RNA, 19 nt, Artificial Sequence
  Description of Artificial Sequence: Synthetic oligonucleotide
ggucauggucagccccaua

SEQ ID NO: 1817063 - RNA, 19 nt, Artificial Sequence
  Description of Artificial Sequence: Synthetic oligonucleotide
gccccauagguagcaccuc

SEQ ID NO: 1817064 - RNA, 19 nt, Artificial Sequence
  Description of Artificial Sequence: Synthetic oligonucleotide
gcacuccgcuugcccuuug

SEQ ID NO: 1817065 - RNA, 19 nt, Artificial Sequence
  Description of Artificial Sequence: Synthetic oligonucleotide
guuggucaguggggauccu

SEQ ID NO: 1817066 - RNA, 19 nt, Artificial Sequence
  Description of Artificial Sequence: Synthetic oligonucleotide
ccuugggcauagagacaua

SEQ ID NO: 1817067 - RNA, 19 nt, Artificial Sequence
  Description of Artificial Sequence: Synthetic oligonucleotide
ccggcacuaagugcuggua

SEQ ID NO: 1817068 - RNA, 19 nt, Artificial Sequence
  Description of Artificial Sequence: Synthetic oligonucleotide
cguggauaaaaugccccuu

SEQ ID NO: 1817069 - RNA, 19 nt, Artificial Sequence
  Description of Artificial Sequence: Synthetic oligonucleotide
ggccugucagguagagguu

SEQ ID NO: 1817070 - RNA, 19 nt, Artificial Sequence
  Description of Artificial Sequence: Synthetic oligonucleotide
ccacggggcaauagauauu

SEQ ID NO: 1817071 - RNA, 19 nt, Artificial Sequence
  Description of Artificial Sequence: Synthetic oligonucleotide
cccggcccgcugaaucaaa

SEQ ID NO: 1817072 - RNA, 19 nt, Artificial Sequence
  Description of Artificial Sequence: Synthetic oligonucleotide
gggcacucuccggcacuaa

SEQ ID NO: 1817073 - RNA, 19 nt, Artificial Sequence
  Description of Artificial Sequence: Synthetic oligonucleotide
ggcagacagcgggcacucu

SEQ ID NO: 1817074 - RNA, 19 nt, Artificial Sequence
  Description of Artificial Sequence: Synthetic oligonucleotide
  modified_base (1)..(1): a, c, u, g, unknown or other
nugauauggaaggcaaucu

SEQ ID NO: 1817075 - RNA, 19 nt, Artificial Sequence
  Description of Artificial Sequence: Synthetic oligonucleotide
uucgauauaaaccacuugg

SEQ ID NO: 1817076 - RNA, 19 nt, Artificial Sequence
  Description of Artificial Sequence: Synthetic oligonucleotide
aaauauaugacuuaccaaa

SEQ ID NO: 1817077 - RNA, 19 nt, Artificial Sequence
  Description of Artificial Sequence: Synthetic oligonucleotide
uuauagaacacauugagga

SEQ ID NO: 1817078 - RNA, 19 nt, Artificial Sequence
  Description of Artificial Sequence: Synthetic oligonucleotide
acuaugaagacauacauug

SEQ ID NO: 1817079 - RNA, 19 nt, Artificial Sequence
  Description of Artificial Sequence: Synthetic oligonucleotide
ugaaagauaaguuucuuag

SEQ ID NO: 1817080 - RNA, 19 nt, Artificial Sequence
  Description of Artificial Sequence: Synthetic oligonucleotide
aaagauaaguuucuuagca

SEQ ID NO: 1817081 - RNA, 19 nt, Artificial Sequence
  Description of Artificial Sequence: Synthetic oligonucleotide
gauuauagaacacauugag

SEQ ID NO: 1817082 - RNA, 19 nt, Artificial Sequence
  Description of Artificial Sequence: Synthetic oligonucleotide
ucuucuaagacugacaucc

SEQ ID NO: 1817083 - RNA, 19 nt, Artificial Sequence
  Description of Artificial Sequence: Synthetic oligonucleotide
aguagaaaggccucaaggc

SEQ ID NO: 1817084 - RNA, 19 nt, Artificial Sequence
  Description of Artificial Sequence: Synthetic oligonucleotide
uaaagagcuauacugaaug

SEQ ID NO: 1817085 - RNA, 19 nt, Artificial Sequence
  Description of Artificial Sequence: Synthetic oligonucleotide
uaauaauauaucaaacuga

SEQ ID NO: 1817086 - RNA, 19 nt, Artificial Sequence
  Description of Artificial Sequence: Synthetic oligonucleotide
acuaauaauauaucaaacu

SEQ ID NO: 1817087 - RNA, 19 nt, Artificial Sequence
  Description of Artificial Sequence: Synthetic oligonucleotide
uuagcauaaaauuaccaca

SEQ ID NO: 1817088 - RNA, 19 nt, Artificial Sequence
  Description of Artificial Sequence: Synthetic oligonucleotide
agcaucauaaaacuagggg

SEQ ID NO: 1817089 - RNA, 19 nt, Artificial Sequence
  Description of Artificial Sequence: Synthetic oligonucleotide
aguucuaguacuaaagagc

SEQ ID NO: 1817090 - RNA, 19 nt, Artificial Sequence
  Description of Artificial Sequence: Synthetic oligonucleotide
ucuaaguagacacuuaauc

SEQ ID NO: 1817091 - RNA, 19 nt, Artificial Sequence
  Description of Artificial Sequence: Synthetic oligonucleotide
aauaugcacgccaacuucc

SEQ ID NO: 1817092 - RNA, 19 nt, Artificial Sequence
  Description of Artificial Sequence: Synthetic oligonucleotide
cuuagcauaaaauuaccac

SEQ ID NO: 1817093 - RNA, 19 nt, Artificial Sequence
  Description of Artificial Sequence: Synthetic oligonucleotide
ucucuuaagagaauuuuca

SEQ ID NO: 1817094 - RNA, 19 nt, Artificial Sequence
  Description of Artificial Sequence: Synthetic oligonucleotide
aauacgauggugcaucccu

SEQ ID NO: 1817095 - RNA, 19 nt, Artificial Sequence
  Description of Artificial Sequence: Synthetic oligonucleotide
ucuaagacugacauccucc

SEQ ID NO: 1817096 - RNA, 19 nt, Artificial Sequence
  Description of Artificial Sequence: Synthetic oligonucleotide
ugaagacauacauugaacu

SEQ ID NO: 1817097 - RNA, 19 nt, Artificial Sequence
  Description of Artificial Sequence: Synthetic oligonucleotide
uccaaagaaauccggauga

SEQ ID NO: 1817098 - RNA, 19 nt, Artificial Sequence
  Description of Artificial Sequence: Synthetic oligonucleotide
gguucagagacuuaaagcc

SEQ ID NO: 1817099 - RNA, 19 nt, Artificial Sequence
  Description of Artificial Sequence: Synthetic oligonucleotide
agcucuucgauauaaacca

SEQ ID NO: 1817100 - RNA, 19 nt, Artificial Sequence
  Description of Artificial Sequence: Synthetic oligonucleotide
auacauugaacuguguugg

SEQ ID NO: 1817101 - RNA, 19 nt, Artificial Sequence
  Description of Artificial Sequence: Synthetic oligonucleotide
uaaguagacacuuaaucuc

SEQ ID NO: 1817102 - RNA, 19 nt, Artificial Sequence
  Description of Artificial Sequence: Synthetic oligonucleotide
gaguucuaguacuaaagag

SEQ ID NO: 1817103 - RNA, 19 nt, Artificial Sequence
  Description of Artificial Sequence: Synthetic oligonucleotide
uagcucuucgauauaaacc

SEQ ID NO: 1817104 - RNA, 19 nt, Artificial Sequence
  Description of Artificial Sequence: Synthetic oligonucleotide
ucuaugagauguaacuaug

SEQ ID NO: 1817105 - RNA, 19 nt, Artificial Sequence
  Description of Artificial Sequence: Synthetic oligonucleotide
gggauaaaaccuuugaaag

SEQ ID NO: 1817106 - RNA, 19 nt, Artificial Sequence
  Description of Artificial Sequence: Synthetic oligonucleotide
ugauuauagaacacauuga

SEQ ID NO: 1817107 - RNA, 19 nt, Artificial Sequence
  Description of Artificial Sequence: Synthetic oligonucleotide
guagugaagccaaugaggg

SEQ ID NO: 1817108 - RNA, 19 nt, Artificial Sequence
  Description of Artificial Sequence: Synthetic oligonucleotide
ugaguucuaguacuaaaga

SEQ ID NO: 1817109 - RNA, 19 nt, Artificial Sequence
  Description of Artificial Sequence: Synthetic oligonucleotide
uguaacuaugaagacauac

SEQ ID NO: 1817110 - RNA, 19 nt, Artificial Sequence
  Description of Artificial Sequence: Synthetic oligonucleotide
aguuucuuagcauaaaauu

SEQ ID NO: 1817111 - RNA, 19 nt, Artificial Sequence
  Description of Artificial Sequence: Synthetic oligonucleotide
aagccaaugagggaggauc

SEQ ID NO: 1817112 - RNA, 19 nt, Artificial Sequence
  Description of Artificial Sequence: Synthetic oligonucleotide
ucuuagcauaaaauuacca

SEQ ID NO: 1817113 - RNA, 19 nt, Artificial Sequence
  Description of Artificial Sequence: Synthetic oligonucleotide
uuacuggcuacaaagugug

SEQ ID NO: 1817114 - RNA, 19 nt, Artificial Sequence
  Description of Artificial Sequence: Synthetic oligonucleotide
  modified_base (7)..(7): a, c, u, g, unknown or other
uucugcnccugauagagcu

SEQ ID NO: 1817115 - RNA, 19 nt, Artificial Sequence
  Description of Artificial Sequence: Synthetic oligonucleotide
ugugaauucuggcuguagc

SEQ ID NO: 1817116 - RNA, 19 nt, Artificial Sequence
  Description of Artificial Sequence: Synthetic oligonucleotide
aguagugaagccaaugagg

SEQ ID NO: 1817117 - RNA, 19 nt, Artificial Sequence
  Description of Artificial Sequence: Synthetic oligonucleotide
ucuaguacuaaagagcuau

SEQ ID NO: 1817118 - RNA, 19 nt, Artificial Sequence
  Description of Artificial Sequence: Synthetic oligonucleotide
uagcauaaaauuaccacaa

SEQ ID NO: 1817119 - RNA, 19 nt, Artificial Sequence
  Description of Artificial Sequence: Synthetic oligonucleotide
uaucuuguaagcugaguug

SEQ ID NO: 1817120 - RNA, 19 nt, Artificial Sequence
  Description of Artificial Sequence: Synthetic oligonucleotide
ucuggagauuucuaaguag

SEQ ID NO: 1817121 - RNA, 19 nt, Artificial Sequence
  Description of Artificial Sequence: Synthetic oligonucleotide
ugguucagagacuuaaagc

SEQ ID NO: 1817122 - RNA, 19 nt, Artificial Sequence
  Description of Artificial Sequence: Synthetic oligonucleotide
uuuugccuagccaucagca

SEQ ID NO: 1817123 - RNA, 19 nt, Artificial Sequence
  Description of Artificial Sequence: Synthetic oligonucleotide
aaugaguucuaguacuaaa

SEQ ID NO: 1817124 - RNA, 19 nt, Artificial Sequence
  Description of Artificial Sequence: Synthetic oligonucleotide
gacacuuaaucucuuaaga

SEQ ID NO: 1817125 - RNA, 19 nt, Artificial Sequence
  Description of Artificial Sequence: Synthetic oligonucleotide
auugauucccuuuccuggg

SEQ ID NO: 1817126 - RNA, 19 nt, Artificial Sequence
  Description of Artificial Sequence: Synthetic oligonucleotide
aguaguacucaucaauugu

SEQ ID NO: 1817127 - RNA, 19 nt, Artificial Sequence
  Description of Artificial Sequence: Synthetic oligonucleotide
aagagcuauacugaaugag

SEQ ID NO: 1817128 - RNA, 19 nt, Artificial Sequence
  Description of Artificial Sequence: Synthetic oligonucleotide
uucagagacuuaaagccug

SEQ ID NO: 1817129 - RNA, 19 nt, Artificial Sequence
  Description of Artificial Sequence: Synthetic oligonucleotide
aauugugaauucuggcugu

SEQ ID NO: 1817130 - RNA, 19 nt, Artificial Sequence
  Description of Artificial Sequence: Synthetic oligonucleotide
uuuugcuacucaucaauca

SEQ ID NO: 1817131 - RNA, 19 nt, Artificial Sequence
  Description of Artificial Sequence: Synthetic oligonucleotide
ugaacacuaauaauauauc

SEQ ID NO: 1817132 - RNA, 19 nt, Artificial Sequence
  Description of Artificial Sequence: Synthetic oligonucleotide
uucuuagcauaaaauuacc

SEQ ID NO: 1817133 - RNA, 19 nt, Artificial Sequence
  Description of Artificial Sequence: Synthetic oligonucleotide
aaccugugaacacuaauaa

SEQ ID NO: 1817134 - RNA, 19 nt, Artificial Sequence
  Description of Artificial Sequence: Synthetic oligonucleotide
uuaucuggucuucuaagac

SEQ ID NO: 1817135 - RNA, 19 nt, Artificial Sequence
  Description of Artificial Sequence: Synthetic oligonucleotide
cauaacuguccauuacugg

SEQ ID NO: 1817136 - RNA, 19 nt, Artificial Sequence
  Description of Artificial Sequence: Synthetic oligonucleotide
ucgauauaaaccacuugga

SEQ ID NO: 1817137 - RNA, 19 nt, Artificial Sequence
  Description of Artificial Sequence: Synthetic oligonucleotide
agcucgagaguagugaagc

SEQ ID NO: 1817138 - RNA, 19 nt, Artificial Sequence
  Description of Artificial Sequence: Synthetic oligonucleotide
agagcuauacugaaugagg

SEQ ID NO: 1817139 - RNA, 19 nt, Artificial Sequence
  Description of Artificial Sequence: Synthetic oligonucleotide
aagauaaguuucuuagcau

SEQ ID NO: 1817140 - RNA, 19 nt, Artificial Sequence
  Description of Artificial Sequence: Synthetic oligonucleotide
uguaagcugaguugguuca

SEQ ID NO: 1817141 - RNA, 19 nt, Artificial Sequence
  Description of Artificial Sequence: Synthetic oligonucleotide
aaagagcuauacugaauga

SEQ ID NO: 1817142 - RNA, 19 nt, Artificial Sequence
  Description of Artificial Sequence: Synthetic oligonucleotide
aaacuaggggauaaaaccu

SEQ ID NO: 1817143 - RNA, 19 nt, Artificial Sequence
  Description of Artificial Sequence: Synthetic oligonucleotide
ucuuaagagaauuuucauu

SEQ ID NO: 1817144 - RNA, 19 nt, Artificial Sequence
  Description of Artificial Sequence: Synthetic oligonucleotide
gaguagugaagccaaugag

SEQ ID NO: 1817145 - RNA, 19 nt, Artificial Sequence
  Description of Artificial Sequence: Synthetic oligonucleotide
uuuggcaagcuuucaaaga

SEQ ID NO: 1817146 - RNA, 19 nt, Artificial Sequence
  Description of Artificial Sequence: Synthetic oligonucleotide
uaaccugugaacacuaaua

SEQ ID NO: 1817147 - RNA, 19 nt, Artificial Sequence
  Description of Artificial Sequence: Synthetic oligonucleotide
agacacuuaaucucuuaag

SEQ ID NO: 1817148 - RNA, 19 nt, Artificial Sequence
  Description of Artificial Sequence: Synthetic oligonucleotide
uacccuacuuuucagcagc

SEQ ID NO: 1817149 - RNA, 19 nt, Artificial Sequence
  Description of Artificial Sequence: Synthetic oligonucleotide
uguguuacuugguagcuuc

SEQ ID NO: 1817150 - RNA, 19 nt, Artificial Sequence
  Description of Artificial Sequence: Synthetic oligonucleotide
  modified_base (11)..(11): a, c, u, g, unknown or other
uggcuucugcnccugauag

SEQ ID NO: 1817151 - RNA, 19 nt, Artificial Sequence
  Description of Artificial Sequence: Synthetic oligonucleotide
gagucuuguccagugaugg

SEQ ID NO: 1817152 - RNA, 19 nt, Artificial Sequence
  Description of Artificial Sequence: Synthetic oligonucleotide
gauggugcaucccuuuugc

SEQ ID NO: 1817153 - RNA, 19 nt, Artificial Sequence
  Description of Artificial Sequence: Synthetic oligonucleotide
auugaacuguguuggaugu

SEQ ID NO: 1817154 - RNA, 19 nt, Artificial Sequence
  Description of Artificial Sequence: Synthetic oligonucleotide
ggccucaaggcauugaugg

SEQ ID NO: 1817155 - RNA, 19 nt, Artificial Sequence
  Description of Artificial Sequence: Synthetic oligonucleotide
uggcaaaacauuuucugaa

SEQ ID NO: 1817156 - RNA, 19 nt, Artificial Sequence
  Description of Artificial Sequence: Synthetic oligonucleotide
ugacuuaccaaacucucua

SEQ ID NO: 1817157 - RNA, 19 nt, Artificial Sequence
  Description of Artificial Sequence: Synthetic oligonucleotide
agauaaguuucuuagcaua

SEQ ID NO: 1817158 - RNA, 19 nt, Artificial Sequence
  Description of Artificial Sequence: Synthetic oligonucleotide
ucacuccacuuuuagagca

SEQ ID NO: 1817159 - RNA, 19 nt, Artificial Sequence
  Description of Artificial Sequence: Synthetic oligonucleotide
ugugcuaggcggcuaagac

SEQ ID NO: 1817160 - RNA, 19 nt, Artificial Sequence
  Description of Artificial Sequence: Synthetic oligonucleotide
uaggggauaaaaccuuuga

SEQ ID NO: 1817161 - RNA, 19 nt, Artificial Sequence
  Description of Artificial Sequence: Synthetic oligonucleotide
ugugucuaugagauguaac

SEQ ID NO: 1817162 - RNA, 19 nt, Artificial Sequence
  Description of Artificial Sequence: Synthetic oligonucleotide
uguguucuaaccugugaac

SEQ ID NO: 1817163 - RNA, 19 nt, Artificial Sequence
  Description of Artificial Sequence: Synthetic oligonucleotide
uagacacuuaaucucuuaa

SEQ ID NO: 1817164 - RNA, 19 nt, Artificial Sequence
  Description of Artificial Sequence: Synthetic oligonucleotide
gauguaacuaugaagacau

SEQ ID NO: 1817165 - RNA, 19 nt, Artificial Sequence
  Description of Artificial Sequence: Synthetic oligonucleotide
ugaauaugcacgccaacuu

SEQ ID NO: 1817166 - RNA, 19 nt, Artificial Sequence
  Description of Artificial Sequence: Synthetic oligonucleotide
uugaaagauaaguuucuua

SEQ ID NO: 1817167 - RNA, 19 nt, Artificial Sequence
  Description of Artificial Sequence: Synthetic oligonucleotide
uuaaucucuuaagagaauu

SEQ ID NO: 1817168 - RNA, 19 nt, Artificial Sequence
  Description of Artificial Sequence: Synthetic oligonucleotide
guuacuugguagcuucucc

SEQ ID NO: 1817169 - RNA, 19 nt, Artificial Sequence
  Description of Artificial Sequence: Synthetic oligonucleotide
cuaaguagacacuuaaucu

SEQ ID NO: 1817170 - RNA, 19 nt, Artificial Sequence
  Description of Artificial Sequence: Synthetic oligonucleotide
uaccaaacucucuauuaca

SEQ ID NO: 1817171 - RNA, 19 nt, Artificial Sequence
  Description of Artificial Sequence: Synthetic oligonucleotide
ucuucgauauaaaccacuu

SEQ ID NO: 1817172 - RNA, 19 nt, Artificial Sequence
  Description of Artificial Sequence: Synthetic oligonucleotide
uugaacauaacuguccauu

SEQ ID NO: 1817173 - RNA, 19 nt, Artificial Sequence
  Description of Artificial Sequence: Synthetic oligonucleotide
acauacauugaacuguguu

SEQ ID NO: 1817174 - RNA, 19 nt, Artificial Sequence
  Description of Artificial Sequence: Synthetic oligonucleotide
ucgagaguagugaagccaa

SEQ ID NO: 1817175 - RNA, 19 nt, Artificial Sequence
  Description of Artificial Sequence: Synthetic oligonucleotide
ugauagagcucgagaguag

SEQ ID NO: 1817176 - RNA, 19 nt, Artificial Sequence
  Description of Artificial Sequence: Synthetic oligonucleotide
ugggcaaccaccccacgcc

SEQ ID NO: 1817177 - RNA, 19 nt, Artificial Sequence
  Description of Artificial Sequence: Synthetic oligonucleotide
ugauaucuuguaagcugag

SEQ ID NO: 1817178 - RNA, 19 nt, Artificial Sequence
  Description of Artificial Sequence: Synthetic oligonucleotide
ugccuagccaucagcauca

SEQ ID NO: 1817179 - RNA, 19 nt, Artificial Sequence
  Description of Artificial Sequence: Synthetic oligonucleotide
ugaacauaacuguccauua

SEQ ID NO: 1817180 - RNA, 19 nt, Artificial Sequence
  Description of Artificial Sequence: Synthetic oligonucleotide
uuguaagcugaguugguuc

SEQ ID NO: 1817181 - RNA, 19 nt, Artificial Sequence
  Description of Artificial Sequence: Synthetic oligonucleotide
caaagagucuuguccagug

SEQ ID NO: 1817182 - RNA, 19 nt, Artificial Sequence
  Description of Artificial Sequence: Synthetic oligonucleotide
ugcacgccaacuuccaagc

SEQ ID NO: 1817183 - RNA, 19 nt, Artificial Sequence
  Description of Artificial Sequence: Synthetic oligonucleotide
ggaacuguguucuaaccug

SEQ ID NO: 1817184 - RNA, 19 nt, Artificial Sequence
  Description of Artificial Sequence: Synthetic oligonucleotide
uccacuuuuagagcagcag

SEQ ID NO: 1817185 - RNA, 19 nt, Artificial Sequence
  Description of Artificial Sequence: Synthetic oligonucleotide
uuaaagccugguucuggag

SEQ ID NO: 1817186 - RNA, 19 nt, Artificial Sequence
  Description of Artificial Sequence: Synthetic oligonucleotide
uaguacuaaagagcuauac

SEQ ID NO: 1817187 - RNA, 19 nt, Artificial Sequence
  Description of Artificial Sequence: Synthetic oligonucleotide
aacuuccaagcacccauca

SEQ ID NO: 1817188 - RNA, 19 nt, Artificial Sequence
  Description of Artificial Sequence: Synthetic oligonucleotide
uucuggagauuucuaagua

SEQ ID NO: 1817189 - RNA, 19 nt, Artificial Sequence
  Description of Artificial Sequence: Synthetic oligonucleotide
uugcuacucaucaaucauc

SEQ ID NO: 1817190 - RNA, 19 nt, Artificial Sequence
  Description of Artificial Sequence: Synthetic oligonucleotide
ccuuugaaagauaaguuuc

SEQ ID NO: 1817191 - RNA, 19 nt, Artificial Sequence
  Description of Artificial Sequence: Synthetic oligonucleotide
ugaacuguguuggauguaa

SEQ ID NO: 1817192 - RNA, 19 nt, Artificial Sequence
  Description of Artificial Sequence: Synthetic oligonucleotide
augcacgccaacuuccaag

SEQ ID NO: 1817193 - RNA, 19 nt, Artificial Sequence
  Description of Artificial Sequence: Synthetic oligonucleotide
aaggccucaaggcauugau

SEQ ID NO: 1817194 - RNA, 19 nt, Artificial Sequence
  Description of Artificial Sequence: Synthetic oligonucleotide
cuggagauuucuaaguaga

SEQ ID NO: 1817195 - RNA, 19 nt, Artificial Sequence
  Description of Artificial Sequence: Synthetic oligonucleotide
gaacugcaaaguagaaagg

SEQ ID NO: 1817196 - RNA, 19 nt, Artificial Sequence
  Description of Artificial Sequence: Synthetic oligonucleotide
uugccuagccaucagcauc

SEQ ID NO: 1817197 - RNA, 19 nt, Artificial Sequence
  Description of Artificial Sequence: Synthetic oligonucleotide
uggggugcuaguccaaaga

SEQ ID NO: 1817198 - RNA, 19 nt, Artificial Sequence
  Description of Artificial Sequence: Synthetic oligonucleotide
cucacuccacuuuuagagc

SEQ ID NO: 1817199 - RNA, 19 nt, Artificial Sequence
  Description of Artificial Sequence: Synthetic oligonucleotide
uggucuucuaagacugaca

SEQ ID NO: 1817200 - RNA, 19 nt, Artificial Sequence
  Description of Artificial Sequence: Synthetic oligonucleotide
acgccaacuuccaagcacc

SEQ ID NO: 1817201 - RNA, 19 nt, Artificial Sequence
  Description of Artificial Sequence: Synthetic oligonucleotide
ugcuuaucuggucuucuaa

SEQ ID NO: 1817202 - RNA, 19 nt, Artificial Sequence
  Description of Artificial Sequence: Synthetic oligonucleotide
cuuaucuggucuucuaaga

SEQ ID NO: 1817203 - RNA, 19 nt, Artificial Sequence
  Description of Artificial Sequence: Synthetic oligonucleotide
ugaauacgauggugcaucc

SEQ ID NO: 1817204 - RNA, 19 nt, Artificial Sequence
  Description of Artificial Sequence: Synthetic oligonucleotide
gugaacacuaauaauauau

SEQ ID NO: 1817205 - RNA, 19 nt, Artificial Sequence
  Description of Artificial Sequence: Synthetic oligonucleotide
uagagcucgagaguaguga

SEQ ID NO: 1817206 - RNA, 19 nt, Artificial Sequence
  Description of Artificial Sequence: Synthetic oligonucleotide
gugucuaugagauguaacu

SEQ ID NO: 1817207 - RNA, 19 nt, Artificial Sequence
  Description of Artificial Sequence: Synthetic oligonucleotide
uucuuucuaaggaucuuuu

SEQ ID NO: 1817208 - RNA, 19 nt, Artificial Sequence
  Description of Artificial Sequence: Synthetic oligonucleotide
gugaauacgauggugcauc

SEQ ID NO: 1817209 - RNA, 19 nt, Artificial Sequence
  Description of Artificial Sequence: Synthetic oligonucleotide
gacgguacccuacuuuuca

SEQ ID NO: 1817210 - RNA, 19 nt, Artificial Sequence
  Description of Artificial Sequence: Synthetic oligonucleotide
ucuacuucccugguuauuu

SEQ ID NO: 1817211 - RNA, 19 nt, Artificial Sequence
  Description of Artificial Sequence: Synthetic oligonucleotide
aggggauaaaaccuuugaa

SEQ ID NO: 1817212 - RNA, 19 nt, Artificial Sequence
  Description of Artificial Sequence: Synthetic oligonucleotide
cuaugagauguaacuauga

SEQ ID NO: 1817213 - RNA, 19 nt, Artificial Sequence
  Description of Artificial Sequence: Synthetic oligonucleotide
uccaagcacccaucaauug

SEQ ID NO: 1817214 - RNA, 19 nt, Artificial Sequence
  Description of Artificial Sequence: Synthetic oligonucleotide
  modified_base (5)..(5): a, c, u, g, unknown or other
cugcnccugauagagcucg

SEQ ID NO: 1817215 - RNA, 19 nt, Artificial Sequence
  Description of Artificial Sequence: Synthetic oligonucleotide
ggauaaaaccuuugaaaga

SEQ ID NO: 1817216 - RNA, 19 nt, Artificial Sequence
  Description of Artificial Sequence: Synthetic oligonucleotide
acuccacuuuuagagcagc

SEQ ID NO: 1817217 - RNA, 19 nt, Artificial Sequence
  Description of Artificial Sequence: Synthetic oligonucleotide
cuucgauauaaaccacuug

SEQ ID NO: 1817218 - RNA, 19 nt, Artificial Sequence
  Description of Artificial Sequence: Synthetic oligonucleotide
uggugcaucccuuuugcau

SEQ ID NO: 1817219 - RNA, 19 nt, Artificial Sequence
  Description of Artificial Sequence: Synthetic oligonucleotide
ugucuaugagauguaacua

SEQ ID NO: 1817220 - RNA, 19 nt, Artificial Sequence
  Description of Artificial Sequence: Synthetic oligonucleotide
ucccugguuauuuaauuuu

SEQ ID NO: 1817221 - RNA, 19 nt, Artificial Sequence
  Description of Artificial Sequence: Synthetic oligonucleotide
ucuuguaagcugaguuggu

SEQ ID NO: 1817222 - RNA, 19 nt, Artificial Sequence
  Description of Artificial Sequence: Synthetic oligonucleotide
ucuguguuacuugguagcu

SEQ ID NO: 1817223 - RNA, 19 nt, Artificial Sequence
  Description of Artificial Sequence: Synthetic oligonucleotide
gcuuaucuggucuucuaag

SEQ ID NO: 1817224 - RNA, 19 nt, Artificial Sequence
  Description of Artificial Sequence: Synthetic oligonucleotide
agacauacauugaacugug

SEQ ID NO: 1817225 - RNA, 19 nt, Artificial Sequence
  Description of Artificial Sequence: Synthetic oligonucleotide
guucuaguacuaaagagcu

SEQ ID NO: 1817226 - RNA, 19 nt, Artificial Sequence
  Description of Artificial Sequence: Synthetic oligonucleotide
ggagcgaucugugaauacg

SEQ ID NO: 1817227 - RNA, 19 nt, Artificial Sequence
  Description of Artificial Sequence: Synthetic oligonucleotide
acuguccauuacuggcuac

SEQ ID NO: 1817228 - RNA, 19 nt, Artificial Sequence
  Description of Artificial Sequence: Synthetic oligonucleotide
cucucuauuacauaucuuu

SEQ ID NO: 1817229 - RNA, 19 nt, Artificial Sequence
  Description of Artificial Sequence: Synthetic oligonucleotide
  modified_base (9)..(9): a, c, u, g, unknown or other
gcuucugcnccugauagag

SEQ ID NO: 1817230 - RNA, 19 nt, Artificial Sequence
  Description of Artificial Sequence: Synthetic oligonucleotide
uucugggugggacgguacc

SEQ ID NO: 1817231 - RNA, 19 nt, Artificial Sequence
  Description of Artificial Sequence: Synthetic oligonucleotide
agagacuuaaagccugguu

SEQ ID NO: 1817232 - RNA, 19 nt, Artificial Sequence
  Description of Artificial Sequence: Synthetic oligonucleotide
uucccugguuauuuaauuu

SEQ ID NO: 1817233 - RNA, 19 nt, Artificial Sequence
  Description of Artificial Sequence: Synthetic oligonucleotide
cacgccaacuuccaagcac

SEQ ID NO: 1817234 - RNA, 19 nt, Artificial Sequence
  Description of Artificial Sequence: Synthetic oligonucleotide
caucauaaaacuaggggau

SEQ ID NO: 1817235 - RNA, 19 nt, Artificial Sequence
  Description of Artificial Sequence: Synthetic oligonucleotide
uggacauccauggucccca

SEQ ID NO: 1817236 - RNA, 19 nt, Artificial Sequence
  Description of Artificial Sequence: Synthetic oligonucleotide
acuuaccaaacucucuauu

SEQ ID NO: 1817237 - RNA, 19 nt, Artificial Sequence
  Description of Artificial Sequence: Synthetic oligonucleotide
uacauugaacuguguugga

SEQ ID NO: 1817238 - RNA, 19 nt, Artificial Sequence
  Description of Artificial Sequence: Synthetic oligonucleotide
ucuaaccugugaacacuaa

SEQ ID NO: 1817239 - RNA, 19 nt, Artificial Sequence
  Description of Artificial Sequence: Synthetic oligonucleotide
uuugccuagccaucagcau

SEQ ID NO: 1817240 - RNA, 19 nt, Artificial Sequence
  Description of Artificial Sequence: Synthetic oligonucleotide
agagcucgagaguagugaa

SEQ ID NO: 1817241 - RNA, 19 nt, Artificial Sequence
  Description of Artificial Sequence: Synthetic oligonucleotide
cuaugaagacauacauuga

SEQ ID NO: 1817242 - RNA, 19 nt, Artificial Sequence
  Description of Artificial Sequence: Synthetic oligonucleotide
accugugaacacuaauaau

SEQ ID NO: 1817243 - RNA, 19 nt, Artificial Sequence
  Description of Artificial Sequence: Synthetic oligonucleotide
aacuaggggauaaaaccuu

SEQ ID NO: 1817244 - RNA, 19 nt, Artificial Sequence
  Description of Artificial Sequence: Synthetic oligonucleotide
uugugaauucuggcuguag

SEQ ID NO: 1817245 - RNA, 19 nt, Artificial Sequence
  Description of Artificial Sequence: Synthetic oligonucleotide
aggcucacuccacuuuuag

SEQ ID NO: 1817246 - RNA, 19 nt, Artificial Sequence
  Description of Artificial Sequence: Synthetic oligonucleotide
ugugaauacgauggugcau

SEQ ID NO: 1817247 - RNA, 19 nt, Artificial Sequence
  Description of Artificial Sequence: Synthetic oligonucleotide
agaaccuccucaaaggcuu

SEQ ID NO: 1817248 - RNA, 19 nt, Artificial Sequence
  Description of Artificial Sequence: Synthetic oligonucleotide
uaagcugaguugguucaga

SEQ ID NO: 1817249 - RNA, 19 nt, Artificial Sequence
  Description of Artificial Sequence: Synthetic oligonucleotide
ucccggagcgaucugugaa

SEQ ID NO: 1817250 - RNA, 19 nt, Artificial Sequence
  Description of Artificial Sequence: Synthetic oligonucleotide
gucuaugagauguaacuau

SEQ ID NO: 1817251 - RNA, 19 nt, Artificial Sequence
  Description of Artificial Sequence: Synthetic oligonucleotide
uguuacuugguagcuucuc

SEQ ID NO: 1817252 - RNA, 19 nt, Artificial Sequence
  Description of Artificial Sequence: Synthetic oligonucleotide
gaauacgauggugcauccc

SEQ ID NO: 1817253 - RNA, 19 nt, Artificial Sequence
  Description of Artificial Sequence: Synthetic oligonucleotide
ugugugucuaugagaugua

SEQ ID NO: 1817254 - RNA, 19 nt, Artificial Sequence
  Description of Artificial Sequence: Synthetic oligonucleotide
accugauaucuuguaagcu

SEQ ID NO: 1817255 - RNA, 19 nt, Artificial Sequence
  Description of Artificial Sequence: Synthetic oligonucleotide
acgguacccuacuuuucag

SEQ ID NO: 1817256 - RNA, 19 nt, Artificial Sequence
  Description of Artificial Sequence: Synthetic oligonucleotide
agauuucuaaguagacacu

SEQ ID NO: 1817257 - RNA, 19 nt, Artificial Sequence
  Description of Artificial Sequence: Synthetic oligonucleotide
uucuaguacuaaagagcua

SEQ ID NO: 1817258 - RNA, 19 nt, Artificial Sequence
  Description of Artificial Sequence: Synthetic oligonucleotide
gugaauucuggcuguagcu

SEQ ID NO: 1817259 - RNA, 19 nt, Artificial Sequence
  Description of Artificial Sequence: Synthetic oligonucleotide
acauugaacuguguuggau

SEQ ID NO: 1817260 - RNA, 19 nt, Artificial Sequence
  Description of Artificial Sequence: Synthetic oligonucleotide
gcccagugcacucaucccg

SEQ ID NO: 1817261 - RNA, 19 nt, Artificial Sequence
  Description of Artificial Sequence: Synthetic oligonucleotide
uaugcacgccaacuuccaa

SEQ ID NO: 1817262 - RNA, 19 nt, Artificial Sequence
  Description of Artificial Sequence: Synthetic oligonucleotide
agcggugggcaaccacccc

SEQ ID NO: 1817263 - RNA, 19 nt, Artificial Sequence
  Description of Artificial Sequence: Synthetic oligonucleotide
cacuccacuuuuagagcag

SEQ ID NO: 1817264 - RNA, 19 nt, Artificial Sequence
  Description of Artificial Sequence: Synthetic oligonucleotide
  modified_base (8)..(8): a, c, u, g, unknown or other
cuucugcnccugauagagc

SEQ ID NO: 1817265 - RNA, 19 nt, Artificial Sequence
  Description of Artificial Sequence: Synthetic oligonucleotide
gacuuaaagccugguucug

SEQ ID NO: 1817266 - RNA, 19 nt, Artificial Sequence
  Description of Artificial Sequence: Synthetic oligonucleotide
gugggcaaccaccccacgc

SEQ ID NO: 1817267 - RNA, 19 nt, Artificial Sequence
  Description of Artificial Sequence: Synthetic oligonucleotide
augacuuaccaaacucucu

SEQ ID NO: 1817268 - RNA, 19 nt, Artificial Sequence
  Description of Artificial Sequence: Synthetic oligonucleotide
cuggucuucuaagacugac

SEQ ID NO: 1817269 - RNA, 19 nt, Artificial Sequence
  Description of Artificial Sequence: Synthetic oligonucleotide
gagcuauacugaaugaggu

SEQ ID NO: 1817270 - RNA, 19 nt, Artificial Sequence
  Description of Artificial Sequence: Synthetic oligonucleotide
gagcgaucugugaauacga

SEQ ID NO: 1817271 - RNA, 19 nt, Artificial Sequence
  Description of Artificial Sequence: Synthetic oligonucleotide
agucuuguccagugauggu

SEQ ID NO: 1817272 - RNA, 19 nt, Artificial Sequence
  Description of Artificial Sequence: Synthetic oligonucleotide
  modified_base (6)..(6): a, c, u, g, unknown or other
ucugcnccugauagagcuc

SEQ ID NO: 1817273 - RNA, 19 nt, Artificial Sequence
  Description of Artificial Sequence: Synthetic oligonucleotide
gagcucgagaguagugaag

SEQ ID NO: 1817274 - RNA, 19 nt, Artificial Sequence
  Description of Artificial Sequence: Synthetic oligonucleotide
cucgagaguagugaagcca

SEQ ID NO: 1817275 - RNA, 19 nt, Artificial Sequence
  Description of Artificial Sequence: Synthetic oligonucleotide
cugauagagcucgagagua

SEQ ID NO: 1817276 - RNA, 19 nt, Artificial Sequence
  Description of Artificial Sequence: Synthetic oligonucleotide
caucaaucaucuguuuuga

SEQ ID NO: 1817277 - RNA, 19 nt, Artificial Sequence
  Description of Artificial Sequence: Synthetic oligonucleotide
ugcugugcuaggcggcuaa

SEQ ID NO: 1817278 - RNA, 19 nt, Artificial Sequence
  Description of Artificial Sequence: Synthetic oligonucleotide
acuuccaagcacccaucaa

SEQ ID NO: 1817279 - RNA, 19 nt, Artificial Sequence
  Description of Artificial Sequence: Synthetic oligonucleotide
ucaucccggagcgaucugu

SEQ ID NO: 1817280 - RNA, 19 nt, Artificial Sequence
  Description of Artificial Sequence: Synthetic oligonucleotide
cuuccaagcacccaucaau

SEQ ID NO: 1817281 - RNA, 19 nt, Artificial Sequence
  Description of Artificial Sequence: Synthetic oligonucleotide
guaagcugaguugguucag

SEQ ID NO: 1817282 - RNA, 19 nt, Artificial Sequence
  Description of Artificial Sequence: Synthetic oligonucleotide
cagcugauuauagaacaca

SEQ ID NO: 1817283 - RNA, 19 nt, Artificial Sequence
  Description of Artificial Sequence: Synthetic oligonucleotide
caucccggagcgaucugug

SEQ ID NO: 1817284 - RNA, 19 nt, Artificial Sequence
  Description of Artificial Sequence: Synthetic oligonucleotide
uacuggcuacaaagugugu

SEQ ID NO: 1817285 - RNA, 19 nt, Artificial Sequence
  Description of Artificial Sequence: Synthetic oligonucleotide
ggucuucuaagacugacau

SEQ ID NO: 1817286 - RNA, 19 nt, Artificial Sequence
  Description of Artificial Sequence: Synthetic oligonucleotide
  modified_base (2)..(2): a, c, u, g, unknown or other
cnccugauagagcucgaga

SEQ ID NO: 1817287 - RNA, 19 nt, Artificial Sequence
  Description of Artificial Sequence: Synthetic oligonucleotide
  modified_base (4)..(4): a, c, u, g, unknown or other
ugcnccugauagagcucga

SEQ ID NO: 1817288 - RNA, 19 nt, Artificial Sequence
  Description of Artificial Sequence: Synthetic oligonucleotide
auaugcacgccaacuucca

SEQ ID NO: 1817289 - RNA, 19 nt, Artificial Sequence
  Description of Artificial Sequence: Synthetic oligonucleotide
ggugcuaguccaaagaaau

SEQ ID NO: 1817290 - RNA, 19 nt, Artificial Sequence
  Description of Artificial Sequence: Synthetic oligonucleotide
agccaaugagggaggaucu

SEQ ID NO: 1817291 - RNA, 19 nt, Artificial Sequence
  Description of Artificial Sequence: Synthetic oligonucleotide
gaucugugaauacgauggu

SEQ ID NO: 1817292 - RNA, 19 nt, Artificial Sequence
  Description of Artificial Sequence: Synthetic oligonucleotide
agggaguaguacucaucaa

SEQ ID NO: 1817293 - RNA, 19 nt, Artificial Sequence
  Description of Artificial Sequence: Synthetic oligonucleotide
cccagugcacucaucccgg

SEQ ID NO: 1817294 - RNA, 19 nt, Artificial Sequence
  Description of Artificial Sequence: Synthetic oligonucleotide
guucuaaccugugaacacu

SEQ ID NO: 1817295 - RNA, 19 nt, Artificial Sequence
  Description of Artificial Sequence: Synthetic oligonucleotide
gaaggcucacuccacuuuu

SEQ ID NO: 1817296 - RNA, 19 nt, Artificial Sequence
  Description of Artificial Sequence: Synthetic oligonucleotide
gacuuaccaaacucucuau

SEQ ID NO: 1817297 - RNA, 19 nt, Artificial Sequence
  Description of Artificial Sequence: Synthetic oligonucleotide
gaacuguguucuaaccugu

SEQ ID NO: 1817298 - RNA, 19 nt, Artificial Sequence
  Description of Artificial Sequence: Synthetic oligonucleotide
accccacgccccucucgcc

SEQ ID NO: 1817299 - RNA, 19 nt, Artificial Sequence
  Description of Artificial Sequence: Synthetic oligonucleotide
acgauggugcaucccuuuu

SEQ ID NO: 1817300 - RNA, 19 nt, Artificial Sequence
  Description of Artificial Sequence: Synthetic oligonucleotide
cuuaaucucuuaagagaau

SEQ ID NO: 1817301 - RNA, 19 nt, Artificial Sequence
  Description of Artificial Sequence: Synthetic oligonucleotide
gcagcggugggcaaccacc

SEQ ID NO: 1817302 - RNA, 19 nt, Artificial Sequence
  Description of Artificial Sequence: Synthetic oligonucleotide
cuaguacuaaagagcuaua

SEQ ID NO: 1817303 - RNA, 19 nt, Artificial Sequence
  Description of Artificial Sequence: Synthetic oligonucleotide
cuccacuuuuagagcagca

SEQ ID NO: 1817304 - RNA, 19 nt, Artificial Sequence
  Description of Artificial Sequence: Synthetic oligonucleotide
ggcuguagcucuucgauau

SEQ ID NO: 1817305 - RNA, 19 nt, Artificial Sequence
  Description of Artificial Sequence: Synthetic oligonucleotide
cuaaccugugaacacuaau

SEQ ID NO: 1817306 - RNA, 19 nt, Artificial Sequence
  Description of Artificial Sequence: Synthetic oligonucleotide
cucaucaauugugaauucu

SEQ ID NO: 1817307 - RNA, 19 nt, Artificial Sequence
  Description of Artificial Sequence: Synthetic oligonucleotide
gcucgagaguagugaagcc

SEQ ID NO: 1817308 - RNA, 19 nt, Artificial Sequence
  Description of Artificial Sequence: Synthetic oligonucleotide
aucccggagcgaucuguga

SEQ ID NO: 1817309 - RNA, 19 nt, Artificial Sequence
  Description of Artificial Sequence: Synthetic oligonucleotide
cuacaaagugugugugucu

SEQ ID NO: 1817310 - RNA, 19 nt, Artificial Sequence
  Description of Artificial Sequence: Synthetic oligonucleotide
gugcuaggcggcuaagacu

SEQ ID NO: 1817311 - RNA, 19 nt, Artificial Sequence
  Description of Artificial Sequence: Synthetic oligonucleotide
auugugaauucuggcugua

SEQ ID NO: 1817312 - RNA, 19 nt, Artificial Sequence
  Description of Artificial Sequence: Synthetic oligonucleotide
ggcaaaacauuuucugaau

SEQ ID NO: 1817313 - RNA, 19 nt, Artificial Sequence
  Description of Artificial Sequence: Synthetic oligonucleotide
aggccucaaggcauugaug

SEQ ID NO: 1817314 - RNA, 19 nt, Artificial Sequence
  Description of Artificial Sequence: Synthetic oligonucleotide
gaacuguguuggauguaaa

SEQ ID NO: 1817315 - RNA, 19 nt, Artificial Sequence
  Description of Artificial Sequence: Synthetic oligonucleotide
cuucccugguuauuuaauu

SEQ ID NO: 1817316 - RNA, 19 nt, Artificial Sequence
  Description of Artificial Sequence: Synthetic oligonucleotide
aaggcucacuccacuuuua

SEQ ID NO: 1817317 - RNA, 19 nt, Artificial Sequence
  Description of Artificial Sequence: Synthetic oligonucleotide
gugugucuaugagauguaa

SEQ ID NO: 1817318 - RNA, 19 nt, Artificial Sequence
  Description of Artificial Sequence: Synthetic oligonucleotide
agcgaucugugaauacgau

SEQ ID NO: 1817319 - RNA, 19 nt, Artificial Sequence
  Description of Artificial Sequence: Synthetic oligonucleotide
ggcucacuccacuuuuaga

SEQ ID NO: 1817320 - RNA, 19 nt, Artificial Sequence
  Description of Artificial Sequence: Synthetic oligonucleotide
uccuggggugcuaguccaa

SEQ ID NO: 1817321 - RNA, 19 nt, Artificial Sequence
  Description of Artificial Sequence: Synthetic oligonucleotide
gaaccuccucaaaggcuuc

SEQ ID NO: 1817322 - RNA, 19 nt, Artificial Sequence
  Description of Artificial Sequence: Synthetic oligonucleotide
ugggugggacgguacccua

SEQ ID NO: 1817323 - RNA, 19 nt, Artificial Sequence
  Description of Artificial Sequence: Synthetic oligonucleotide
  modified_base (3)..(3): a, c, u, g, unknown or other
gcnccugauagagcucgag

SEQ ID NO: 1817324 - RNA, 19 nt, Artificial Sequence
  Description of Artificial Sequence: Synthetic oligonucleotide
gggcaaccaccccacgccc

SEQ ID NO: 1817325 - RNA, 19 nt, Artificial Sequence
  Description of Artificial Sequence: Synthetic oligonucleotide
cuacuucccugguuauuua

SEQ ID NO: 1817326 - RNA, 19 nt, Artificial Sequence
  Description of Artificial Sequence: Synthetic oligonucleotide
ggugggcaaccaccccacg

SEQ ID NO: 1817327 - RNA, 19 nt, Artificial Sequence
  Description of Artificial Sequence: Synthetic oligonucleotide
ggagggaguaguacucauc

SEQ ID NO: 1817328 - RNA, 19 nt, Artificial Sequence
  Description of Artificial Sequence: Synthetic oligonucleotide
auacgauggugcaucccuu

SEQ ID NO: 1817329 - RNA, 19 nt, Artificial Sequence
  Description of Artificial Sequence: Synthetic oligonucleotide
gcggugggcaaccacccca

SEQ ID NO: 1817330 - RNA, 19 nt, Artificial Sequence
  Description of Artificial Sequence: Synthetic oligonucleotide
gacauacauugaacugugu

SEQ ID NO: 1817331 - RNA, 19 nt, Artificial Sequence
  Description of Artificial Sequence: Synthetic oligonucleotide
ccacuuuuagagcagcagu

SEQ ID NO: 1817332 - RNA, 19 nt, Artificial Sequence
  Description of Artificial Sequence: Synthetic oligonucleotide
cugugcuaggcggcuaaga

SEQ ID NO: 1817333 - RNA, 19 nt, Artificial Sequence
  Description of Artificial Sequence: Synthetic oligonucleotide
cccuagaagacugcuuauc

SEQ ID NO: 1817334 - RNA, 19 nt, Artificial Sequence
  Description of Artificial Sequence: Synthetic oligonucleotide
gcucuucgauauaaaccac

SEQ ID NO: 1817335 - RNA, 19 nt, Artificial Sequence
  Description of Artificial Sequence: Synthetic oligonucleotide
acccuacuuuucagcagcu

SEQ ID NO: 1817336 - RNA, 19 nt, Artificial Sequence
  Description of Artificial Sequence: Synthetic oligonucleotide
cucaucccggagcgaucug

SEQ ID NO: 1817337 - RNA, 19 nt, Artificial Sequence
  Description of Artificial Sequence: Synthetic oligonucleotide
ggcuaagacugugcagcug

SEQ ID NO: 1817338 - RNA, 19 nt, Artificial Sequence
  Description of Artificial Sequence: Synthetic oligonucleotide
cgauggugcaucccuuuug

SEQ ID NO: 1817339 - RNA, 19 nt, Artificial Sequence
  Description of Artificial Sequence: Synthetic oligonucleotide
ccaacuuccaagcacccau

SEQ ID NO: 1817340 - RNA, 19 nt, Artificial Sequence
  Description of Artificial Sequence: Synthetic oligonucleotide
gggacgguacccuacuuuu

SEQ ID NO: 1817341 - RNA, 19 nt, Artificial Sequence
  Description of Artificial Sequence: Synthetic oligonucleotide
ggcaaccaccccacgcccc

SEQ ID NO: 1817342 - RNA, 19 nt, Artificial Sequence
  Description of Artificial Sequence: Synthetic oligonucleotide
ggugggacgguacccuacu

SEQ ID NO: 1817343 - RNA, 19 nt, Artificial Sequence
  Description of Artificial Sequence: Synthetic oligonucleotide
ggacgguacccuacuuuuc

SEQ ID NO: 1817344 - RNA, 19 nt, Artificial Sequence
  Description of Artificial Sequence: Synthetic oligonucleotide
gccaacuuccaagcaccca

SEQ ID NO: 1817345 - RNA, 19 nt, Artificial Sequence
  Description of Artificial Sequence: Synthetic oligonucleotide
gcugugcuaggcggcuaag

SEQ ID NO: 1817346 - RNA, 19 nt, Artificial Sequence
  Description of Artificial Sequence: Synthetic oligonucleotide
gcuaucuguguuacuuggu

SEQ ID NO: 1817347 - RNA, 19 nt, Artificial Sequence
  Description of Artificial Sequence: Synthetic oligonucleotide
gcacgccaacuuccaagca

SEQ ID NO: 1817348 - RNA, 19 nt, Artificial Sequence
  Description of Artificial Sequence: Synthetic oligonucleotide
cccuacuuuucagcagcug

SEQ ID NO: 1817349 - RNA, 19 nt, Artificial Sequence
  Description of Artificial Sequence: Synthetic oligonucleotide
cggagcgaucugugaauac

SEQ ID NO: 1817350 - RNA, 19 nt, Artificial Sequence
  Description of Artificial Sequence: Synthetic oligonucleotide
cagagacuuaaagccuggu

SEQ ID NO: 1817351 - RNA, 19 nt, Artificial Sequence
  Description of Artificial Sequence: Synthetic oligonucleotide
gcuguagcucuucgauaua

SEQ ID NO: 1817352 - RNA, 19 nt, Artificial Sequence
  Description of Artificial Sequence: Synthetic oligonucleotide
gcaaccaccccacgccccu

SEQ ID NO: 1817353 - RNA, 19 nt, Artificial Sequence
  Description of Artificial Sequence: Synthetic oligonucleotide
cggugggcaaccaccccac

SEQ ID NO: 1817354 - RNA, 19 nt, Artificial Sequence
  Description of Artificial Sequence: Synthetic oligonucleotide
caaccaccccacgccccuc

SEQ ID NO: 1817355 - RNA, 19 nt, Artificial Sequence
  Description of Artificial Sequence: Synthetic oligonucleotide
ccaugguccccagcaucac

SEQ ID NO: 1817356 - RNA, 19 nt, Artificial Sequence
  Description of Artificial Sequence: Synthetic oligonucleotide
cccucucgccaccugauau

SEQ ID NO: 1817357 - RNA, 19 nt, Artificial Sequence
  Description of Artificial Sequence: Synthetic oligonucleotide
cccggagcgaucugugaau

SEQ ID NO: 1817358 - RNA, 19 nt, Artificial Sequence
  Description of Artificial Sequence: Synthetic oligonucleotide
cugcugugcuaggcggcua

SEQ ID NO: 1817359 - RNA, 19 nt, Artificial Sequence
  Description of Artificial Sequence: Synthetic oligonucleotide
ccggagcgaucugugaaua

SEQ ID NO: 1817360 - RNA, 19 nt, Artificial Sequence
  Description of Artificial Sequence: Synthetic oligonucleotide
ccccuagaagacugcuuau

SEQ ID NO: 1817361 - RNA, 19 nt, Artificial Sequence
  Description of Artificial Sequence: Synthetic oligonucleotide
cacgccccucucgccaccu

SEQ ID NO: 1817362 - RNA, 19 nt, Artificial Sequence
  Description of Artificial Sequence: Synthetic oligonucleotide
ccuuucugggugggacggu

SEQ ID NO: 1817363 - RNA, 19 nt, Artificial Sequence
  Description of Artificial Sequence: Synthetic oligonucleotide
  modified_base (1)..(1): a, c, u, g, unknown or other
nccugauagagcucgagag

SEQ ID NO: 1817364 - RNA, 19 nt, Artificial Sequence
  Description of Artificial Sequence: Synthetic oligonucleotide
uuacugaugaucuuuaugg

SEQ ID NO: 1817365 - RNA, 19 nt, Artificial Sequence
  Description of Artificial Sequence: Synthetic oligonucleotide
aagaauaacuccuaagcuc

SEQ ID NO: 1817366 - RNA, 19 nt, Artificial Sequence
  Description of Artificial Sequence: Synthetic oligonucleotide
auacucacagcuuuuaucc

SEQ ID NO: 1817367 - RNA, 19 nt, Artificial Sequence
  Description of Artificial Sequence: Synthetic oligonucleotide
ugacugaucaucuacagug

SEQ ID NO: 1817368 - RNA, 19 nt, Artificial Sequence
  Description of Artificial Sequence: Synthetic oligonucleotide
aaaccuagccuuugggucc

SEQ ID NO: 1817369 - RNA, 19 nt, Artificial Sequence
  Description of Artificial Sequence: Synthetic oligonucleotide
aagcucaguauuuacaaag

SEQ ID NO: 1817370 - RNA, 19 nt, Artificial Sequence
  Description of Artificial Sequence: Synthetic oligonucleotide
uucaguuucaacacugggg

SEQ ID NO: 1817371 - RNA, 19 nt, Artificial Sequence
  Description of Artificial Sequence: Synthetic oligonucleotide
ugacacuugagucuuaugc

SEQ ID NO: 1817372 - RNA, 19 nt, Artificial Sequence
  Description of Artificial Sequence: Synthetic oligonucleotide
uauuucuacauagugaaag

SEQ ID NO: 1817373 - RNA, 19 nt, Artificial Sequence
  Description of Artificial Sequence: Synthetic oligonucleotide
auaaaguuguauuuuccac

SEQ ID NO: 1817374 - RNA, 19 nt, Artificial Sequence
  Description of Artificial Sequence: Synthetic oligonucleotide
cagaacaauguaauaaucg

SEQ ID NO: 1817375 - RNA, 19 nt, Artificial Sequence
  Description of Artificial Sequence: Synthetic oligonucleotide
aaucccauuuucaugaagg

SEQ ID NO: 1817376 - RNA, 19 nt, Artificial Sequence
  Description of Artificial Sequence: Synthetic oligonucleotide
uuaucaguccuucuuaaca

SEQ ID NO: 1817377 - RNA, 19 nt, Artificial Sequence
  Description of Artificial Sequence: Synthetic oligonucleotide
ugaucuucuauguacacga

SEQ ID NO: 1817378 - RNA, 19 nt, Artificial Sequence
  Description of Artificial Sequence: Synthetic oligonucleotide
cuugcuauagguccgauac

SEQ ID NO: 1817379 - RNA, 19 nt, Artificial Sequence
  Description of Artificial Sequence: Synthetic oligonucleotide
gagaccauaaccuagccca

SEQ ID NO: 1817380 - RNA, 19 nt, Artificial Sequence
  Description of Artificial Sequence: Synthetic oligonucleotide
aaugcauggaugauucagc

SEQ ID NO: 1817381 - RNA, 19 nt, Artificial Sequence
  Description of Artificial Sequence: Synthetic oligonucleotide
auucgaaagugcuucuugc

SEQ ID NO: 1817382 - RNA, 19 nt, Artificial Sequence
  Description of Artificial Sequence: Synthetic oligonucleotide
uugucguuaauacagucca

SEQ ID NO: 1817383 - RNA, 19 nt, Artificial Sequence
  Description of Artificial Sequence: Synthetic oligonucleotide
uuuaaucuggauaaugcau

SEQ ID NO: 1817384 - RNA, 19 nt, Artificial Sequence
  Description of Artificial Sequence: Synthetic oligonucleotide
uauaagcucaguauuuaca

SEQ ID NO: 1817385 - RNA, 19 nt, Artificial Sequence
  Description of Artificial Sequence: Synthetic oligonucleotide
uguaaaccuagccuuuggg

SEQ ID NO: 1817386 - RNA, 19 nt, Artificial Sequence
  Description of Artificial Sequence: Synthetic oligonucleotide
auagugaaagugcaauuuc

SEQ ID NO: 1817387 - RNA, 19 nt, Artificial Sequence
  Description of Artificial Sequence: Synthetic oligonucleotide
uuuggguccacaccaacag

SEQ ID NO: 1817388 - RNA, 19 nt, Artificial Sequence
  Description of Artificial Sequence: Synthetic oligonucleotide
auaaccuagcccaaggggc

SEQ ID NO: 1817389 - RNA, 19 nt, Artificial Sequence
  Description of Artificial Sequence: Synthetic oligonucleotide
aagguggauacccacuuag

SEQ ID NO: 1817390 - RNA, 19 nt, Artificial Sequence
  Description of Artificial Sequence: Synthetic oligonucleotide
acauaaaguucucaucagg

SEQ ID NO: 1817391 - RNA, 19 nt, Artificial Sequence
  Description of Artificial Sequence: Synthetic oligonucleotide
agcuaaaagcaucugguag

SEQ ID NO: 1817392 - RNA, 19 nt, Artificial Sequence
  Description of Artificial Sequence: Synthetic oligonucleotide
agagcuugcagguugcuuc

SEQ ID NO: 1817393 - RNA, 19 nt, Artificial Sequence
  Description of Artificial Sequence: Synthetic oligonucleotide
gaaaauucgaaagugcuuc

SEQ ID NO: 1817394 - RNA, 19 nt, Artificial Sequence
  Description of Artificial Sequence: Synthetic oligonucleotide
uaucuguccagacuucagg

SEQ ID NO: 1817395 - RNA, 19 nt, Artificial Sequence
  Description of Artificial Sequence: Synthetic oligonucleotide
guagaaauagagcuugcag

SEQ ID NO: 1817396 - RNA, 19 nt, Artificial Sequence
  Description of Artificial Sequence: Synthetic oligonucleotide
acaaagguuccauucccgc

SEQ ID NO: 1817397 - RNA, 19 nt, Artificial Sequence
  Description of Artificial Sequence: Synthetic oligonucleotide
uguauaaucccauuuucau

SEQ ID NO: 1817398 - RNA, 19 nt, Artificial Sequence
  Description of Artificial Sequence: Synthetic oligonucleotide
uuacaaagguuccauuccc

SEQ ID NO: 1817399 - RNA, 19 nt, Artificial Sequence
  Description of Artificial Sequence: Synthetic oligonucleotide
ucuggauaaugcauggaug

SEQ ID NO: 1817400 - RNA, 19 nt, Artificial Sequence
  Description of Artificial Sequence: Synthetic oligonucleotide
guauucgucucuuaauucc

SEQ ID NO: 1817401 - RNA, 19 nt, Artificial Sequence
  Description of Artificial Sequence: Synthetic oligonucleotide
agagaccauaaccuagccc

SEQ ID NO: 1817402 - RNA, 19 nt, Artificial Sequence
  Description of Artificial Sequence: Synthetic oligonucleotide
uuuuaucccucccaaacaa

SEQ ID NO: 1817403 - RNA, 19 nt, Artificial Sequence
  Description of Artificial Sequence: Synthetic oligonucleotide
uaaugcauggaugauucag

SEQ ID NO: 1817404 - RNA, 19 nt, Artificial Sequence
  Description of Artificial Sequence: Synthetic oligonucleotide
cauaaccuagcccaagggg

SEQ ID NO: 1817405 - RNA, 19 nt, Artificial Sequence
  Description of Artificial Sequence: Synthetic oligonucleotide
uacaaagguuccauucccg

SEQ ID NO: 1817406 - RNA, 19 nt, Artificial Sequence
  Description of Artificial Sequence: Synthetic oligonucleotide
gacuucaggaauaaaguug

SEQ ID NO: 1817407 - RNA, 19 nt, Artificial Sequence
  Description of Artificial Sequence: Synthetic oligonucleotide
uaaaccuagccuuuggguc

SEQ ID NO: 1817408 - RNA, 19 nt, Artificial Sequence
  Description of Artificial Sequence: Synthetic oligonucleotide
auagguccgauacuuauca

SEQ ID NO: 1817409 - RNA, 19 nt, Artificial Sequence
  Description of Artificial Sequence: Synthetic oligonucleotide
uguccaaaaucagugaucu

SEQ ID NO: 1817410 - RNA, 19 nt, Artificial Sequence
  Description of Artificial Sequence: Synthetic oligonucleotide
uuaugcucagagaaaggug

SEQ ID NO: 1817411 - RNA, 19 nt, Artificial Sequence
  Description of Artificial Sequence: Synthetic oligonucleotide
auaagcucaguauuuacaa

SEQ ID NO: 1817412 - RNA, 19 nt, Artificial Sequence
  Description of Artificial Sequence: Synthetic oligonucleotide
caucaauuccagaacaaug

SEQ ID NO: 1817413 - RNA, 19 nt, Artificial Sequence
  Description of Artificial Sequence: Synthetic oligonucleotide
uccgauacuuaucaguccu

SEQ ID NO: 1817414 - RNA, 19 nt, Artificial Sequence
  Description of Artificial Sequence: Synthetic oligonucleotide
uagugaaagugcaauuuca

SEQ ID NO: 1817415 - RNA, 19 nt, Artificial Sequence
  Description of Artificial Sequence: Synthetic oligonucleotide
gagucuuaugcucagagaa

SEQ ID NO: 1817416 - RNA, 19 nt, Artificial Sequence
  Description of Artificial Sequence: Synthetic oligonucleotide
uuagacuguccaaaaucag

SEQ ID NO: 1817417 - RNA, 19 nt, Artificial Sequence
  Description of Artificial Sequence: Synthetic oligonucleotide
uuaauacaguccagauugg

SEQ ID NO: 1817418 - RNA, 19 nt, Artificial Sequence
  Description of Artificial Sequence: Synthetic oligonucleotide
ucuuaugcucagagaaagg

SEQ ID NO: 1817419 - RNA, 19 nt, Artificial Sequence
  Description of Artificial Sequence: Synthetic oligonucleotide
gagacaaggaccucaggug

SEQ ID NO: 1817420 - RNA, 19 nt, Artificial Sequence
  Description of Artificial Sequence: Synthetic oligonucleotide
aguuguauuuuccacuggu

SEQ ID NO: 1817421 - RNA, 19 nt, Artificial Sequence
  Description of Artificial Sequence: Synthetic oligonucleotide
ucucugaaauaucugucca

SEQ ID NO: 1817422 - RNA, 19 nt, Artificial Sequence
  Description of Artificial Sequence: Synthetic oligonucleotide
cuucuugagaugacaagag

SEQ ID NO: 1817423 - RNA, 19 nt, Artificial Sequence
  Description of Artificial Sequence: Synthetic oligonucleotide
aaaauucgaaagugcuucu

SEQ ID NO: 1817424 - RNA, 19 nt, Artificial Sequence
  Description of Artificial Sequence: Synthetic oligonucleotide
uuaucccucccaaacaagu

SEQ ID NO: 1817425 - RNA, 19 nt, Artificial Sequence
  Description of Artificial Sequence: Synthetic oligonucleotide
aguugucguuaauacaguc

SEQ ID NO: 1817426 - RNA, 19 nt, Artificial Sequence
  Description of Artificial Sequence: Synthetic oligonucleotide
gauaaacugacugaucauc

SEQ ID NO: 1817427 - RNA, 19 nt, Artificial Sequence
  Description of Artificial Sequence: Synthetic oligonucleotide
gaagguacuguacagcuaa

SEQ ID NO: 1817428 - RNA, 19 nt, Artificial Sequence
  Description of Artificial Sequence: Synthetic oligonucleotide
ugauguauucgucucuuaa

SEQ ID NO: 1817429 - RNA, 19 nt, Artificial Sequence
  Description of Artificial Sequence: Synthetic oligonucleotide
guauaaucccauuuucaug

SEQ ID NO: 1817430 - RNA, 19 nt, Artificial Sequence
  Description of Artificial Sequence: Synthetic oligonucleotide
aaguuguauuuuccacugg

SEQ ID NO: 1817431 - RNA, 19 nt, Artificial Sequence
  Description of Artificial Sequence: Synthetic oligonucleotide
aacuccuaagcuccagcag

SEQ ID NO: 1817432 - RNA, 19 nt, Artificial Sequence
  Description of Artificial Sequence: Synthetic oligonucleotide
uuucuacauagugaaagug

SEQ ID NO: 1817433 - RNA, 19 nt, Artificial Sequence
  Description of Artificial Sequence: Synthetic oligonucleotide
uacccacuuaggcagauga

SEQ ID NO: 1817434 - RNA, 19 nt, Artificial Sequence
  Description of Artificial Sequence: Synthetic oligonucleotide
uuuaucccucccaaacaag

SEQ ID NO: 1817435 - RNA, 19 nt, Artificial Sequence
  Description of Artificial Sequence: Synthetic oligonucleotide
cucagagaaagguggauac

SEQ ID NO: 1817436 - RNA, 19 nt, Artificial Sequence
  Description of Artificial Sequence: Synthetic oligonucleotide
accauaaccuagcccaagg

SEQ ID NO: 1817437 - RNA, 19 nt, Artificial Sequence
  Description of Artificial Sequence: Synthetic oligonucleotide
uguacacgauguaagaauu

SEQ ID NO: 1817438 - RNA, 19 nt, Artificial Sequence
  Description of Artificial Sequence: Synthetic oligonucleotide
uuaggauaaacugacugau

SEQ ID NO: 1817439 - RNA, 19 nt, Artificial Sequence
  Description of Artificial Sequence: Synthetic oligonucleotide
aaucagugaucuugauaag

SEQ ID NO: 1817440 - RNA, 19 nt, Artificial Sequence
  Description of Artificial Sequence: Synthetic oligonucleotide
ugagccgagagcaaacuuc

SEQ ID NO: 1817441 - RNA, 19 nt, Artificial Sequence
  Description of Artificial Sequence: Synthetic oligonucleotide
uucccuauaagcucaguau

SEQ ID NO: 1817442 - RNA, 19 nt, Artificial Sequence
  Description of Artificial Sequence: Synthetic oligonucleotide
agugcaauuucagaguugu

SEQ ID NO: 1817443 - RNA, 19 nt, Artificial Sequence
  Description of Artificial Sequence: Synthetic oligonucleotide
uucuucgguguaaaccuag

SEQ ID NO: 1817444 - RNA, 19 nt, Artificial Sequence
  Description of Artificial Sequence: Synthetic oligonucleotide
cuuuaaucuggauaaugca

SEQ ID NO: 1817445 - RNA, 19 nt, Artificial Sequence
  Description of Artificial Sequence: Synthetic oligonucleotide
acaauguaauaaucgucug

SEQ ID NO: 1817446 - RNA, 19 nt, Artificial Sequence
  Description of Artificial Sequence: Synthetic oligonucleotide
aagucccgguguauaaucc

SEQ ID NO: 1817447 - RNA, 19 nt, Artificial Sequence
  Description of Artificial Sequence: Synthetic oligonucleotide
uuucccuauaagcucagua

SEQ ID NO: 1817448 - RNA, 19 nt, Artificial Sequence
  Description of Artificial Sequence: Synthetic oligonucleotide
uuaccuccccacaagcacc

SEQ ID NO: 1817449 - RNA, 19 nt, Artificial Sequence
  Description of Artificial Sequence: Synthetic oligonucleotide
cagagaaagguggauaccc

SEQ ID NO: 1817450 - RNA, 19 nt, Artificial Sequence
  Description of Artificial Sequence: Synthetic oligonucleotide
gucuuaugcucagagaaag

SEQ ID NO: 1817451 - RNA, 19 nt, Artificial Sequence
  Description of Artificial Sequence: Synthetic oligonucleotide
cagaguuguuacucaaagg

SEQ ID NO: 1817452 - RNA, 19 nt, Artificial Sequence
  Description of Artificial Sequence: Synthetic oligonucleotide
ugguccaucaaagcaauac

SEQ ID NO: 1817453 - RNA, 19 nt, Artificial Sequence
  Description of Artificial Sequence: Synthetic oligonucleotide
aaauaucuguccagacuuc

SEQ ID NO: 1817454 - RNA, 19 nt, Artificial Sequence
  Description of Artificial Sequence: Synthetic oligonucleotide
uaacuccuaagcuccagca

SEQ ID NO: 1817455 - RNA, 19 nt, Artificial Sequence
  Description of Artificial Sequence: Synthetic oligonucleotide
cuauaagcucaguauuuac

SEQ ID NO: 1817456 - RNA, 19 nt, Artificial Sequence
  Description of Artificial Sequence: Synthetic oligonucleotide
uuuaagucccgguguauaa

SEQ ID NO: 1817457 - RNA, 19 nt, Artificial Sequence
  Description of Artificial Sequence: Synthetic oligonucleotide
uuaggcagaugaaaagaau

SEQ ID NO: 1817458 - RNA, 19 nt, Artificial Sequence
  Description of Artificial Sequence: Synthetic oligonucleotide
acagcuaaaagcaucuggu

SEQ ID NO: 1817459 - RNA, 19 nt, Artificial Sequence
  Description of Artificial Sequence: Synthetic oligonucleotide
agugaaagugcaauuucag

SEQ ID NO: 1817460 - RNA, 19 nt, Artificial Sequence
  Description of Artificial Sequence: Synthetic oligonucleotide
guugucguuaauacagucc

SEQ ID NO: 1817461 - RNA, 19 nt, Artificial Sequence
  Description of Artificial Sequence: Synthetic oligonucleotide
ucgucucuuaauuccuuag

SEQ ID NO: 1817462 - RNA, 19 nt, Artificial Sequence
  Description of Artificial Sequence: Synthetic oligonucleotide
uauagguccgauacuuauc

SEQ ID NO: 1817463 - RNA, 19 nt, Artificial Sequence
  Description of Artificial Sequence: Synthetic oligonucleotide
uaaccuagcccaaggggca

SEQ ID NO: 1817464 - RNA, 19 nt, Artificial Sequence
  Description of Artificial Sequence: Synthetic oligonucleotide
ucgguguaaaccuagccuu

SEQ ID NO: 1817465 - RNA, 19 nt, Artificial Sequence
  Description of Artificial Sequence: Synthetic oligonucleotide
aguccuucuuaacaguggu

SEQ ID NO: 1817466 - RNA, 19 nt, Artificial Sequence
  Description of Artificial Sequence: Synthetic oligonucleotide
uaccacauaaaguucucau

SEQ ID NO: 1817467 - RNA, 19 nt, Artificial Sequence
  Description of Artificial Sequence: Synthetic oligonucleotide
uucgaaagugcuucuugcu

SEQ ID NO: 1817468 - RNA, 19 nt, Artificial Sequence
  Description of Artificial Sequence: Synthetic oligonucleotide
gugggcguaccacauaaag

SEQ ID NO: 1817469 - RNA, 19 nt, Artificial Sequence
  Description of Artificial Sequence: Synthetic oligonucleotide
auaaacugacugaucaucu

SEQ ID NO: 1817470 - RNA, 19 nt, Artificial Sequence
  Description of Artificial Sequence: Synthetic oligonucleotide
agagccuucucugaaauau

SEQ ID NO: 1817471 - RNA, 19 nt, Artificial Sequence
  Description of Artificial Sequence: Synthetic oligonucleotide
ugagucuuaugcucagaga

SEQ ID NO: 1817472 - RNA, 19 nt, Artificial Sequence
  Description of Artificial Sequence: Synthetic oligonucleotide
caugaagguacuguacagc

SEQ ID NO: 1817473 - RNA, 19 nt, Artificial Sequence
  Description of Artificial Sequence: Synthetic oligonucleotide
cagauuggagaauccuucc

SEQ ID NO: 1817474 - RNA, 19 nt, Artificial Sequence
  Description of Artificial Sequence: Synthetic oligonucleotide
agguccgauacuuaucagu

SEQ ID NO: 1817475 - RNA, 19 nt, Artificial Sequence
  Description of Artificial Sequence: Synthetic oligonucleotide
cuguacagcuaaaagcauc

SEQ ID NO: 1817476 - RNA, 19 nt, Artificial Sequence
  Description of Artificial Sequence: Synthetic oligonucleotide
ucccuauaagcucaguauu

SEQ ID NO: 1817477 - RNA, 19 nt, Artificial Sequence
  Description of Artificial Sequence: Synthetic oligonucleotide
cuuaucaguccuucuuaac

SEQ ID NO: 1817478 - RNA, 19 nt, Artificial Sequence
  Description of Artificial Sequence: Synthetic oligonucleotide
uaagucccgguguauaauc

SEQ ID NO: 1817479 - RNA, 19 nt, Artificial Sequence
  Description of Artificial Sequence: Synthetic oligonucleotide
gguggauacccacuuaggc

SEQ ID NO: 1817480 - RNA, 19 nt, Artificial Sequence
  Description of Artificial Sequence: Synthetic oligonucleotide
ugugaucuucuauguacac

SEQ ID NO: 1817481 - RNA, 19 nt, Artificial Sequence
  Description of Artificial Sequence: Synthetic oligonucleotide
ucuucgguguaaaccuagc

SEQ ID NO: 1817482 - RNA, 19 nt, Artificial Sequence
  Description of Artificial Sequence: Synthetic oligonucleotide
cuucgguguaaaccuagcc

SEQ ID NO: 1817483 - RNA, 19 nt, Artificial Sequence
  Description of Artificial Sequence: Synthetic oligonucleotide
guggauacccacuuaggca

SEQ ID NO: 1817484 - RNA, 19 nt, Artificial Sequence
  Description of Artificial Sequence: Synthetic oligonucleotide
ccugaaaauucgaaagugc

SEQ ID NO: 1817485 - RNA, 19 nt, Artificial Sequence
  Description of Artificial Sequence: Synthetic oligonucleotide
ucuuaacagugguccauca

SEQ ID NO: 1817486 - RNA, 19 nt, Artificial Sequence
  Description of Artificial Sequence: Synthetic oligonucleotide
ucguuaauacaguccagau

SEQ ID NO: 1817487 - RNA, 19 nt, Artificial Sequence
  Description of Artificial Sequence: Synthetic oligonucleotide
aaggcaggcguuuuccuuu

SEQ ID NO: 1817488 - RNA, 19 nt, Artificial Sequence
  Description of Artificial Sequence: Synthetic oligonucleotide
agauuggagaauccuuccu

SEQ ID NO: 1817489 - RNA, 19 nt, Artificial Sequence
  Description of Artificial Sequence: Synthetic oligonucleotide
ggucgaaaagcucuccucc

SEQ ID NO: 1817490 - RNA, 19 nt, Artificial Sequence
  Description of Artificial Sequence: Synthetic oligonucleotide
uuguuacucaaaggcaggc

SEQ ID NO: 1817491 - RNA, 19 nt, Artificial Sequence
  Description of Artificial Sequence: Synthetic oligonucleotide
uccagauuggagaauccuu

SEQ ID NO: 1817492 - RNA, 19 nt, Artificial Sequence
  Description of Artificial Sequence: Synthetic oligonucleotide
uuucuuacacguucuccuc

SEQ ID NO: 1817493 - RNA, 19 nt, Artificial Sequence
  Description of Artificial Sequence: Synthetic oligonucleotide
aaaggcaggcguuuuccuu

SEQ ID NO: 1817494 - RNA, 19 nt, Artificial Sequence
  Description of Artificial Sequence: Synthetic oligonucleotide
cuuaggcagaugaaaagaa

SEQ ID NO: 1817495 - RNA, 19 nt, Artificial Sequence
  Description of Artificial Sequence: Synthetic oligonucleotide
ucuugacaagguccagagc

SEQ ID NO: 1817496 - RNA, 19 nt, Artificial Sequence
  Description of Artificial Sequence: Synthetic oligonucleotide
cugaaaauucgaaagugcu

SEQ ID NO: 1817497 - RNA, 19 nt, Artificial Sequence
  Description of Artificial Sequence: Synthetic oligonucleotide
uaggauaaacugacugauc

SEQ ID NO: 1817498 - RNA, 19 nt, Artificial Sequence
  Description of Artificial Sequence: Synthetic oligonucleotide
uaguugucguuaauacagu

SEQ ID NO: 1817499 - RNA, 19 nt, Artificial Sequence
  Description of Artificial Sequence: Synthetic oligonucleotide
ugcuauagguccgauacuu

SEQ ID NO: 1817500 - RNA, 19 nt, Artificial Sequence
  Description of Artificial Sequence: Synthetic oligonucleotide
gacacuugagucuuaugcu

SEQ ID NO: 1817501 - RNA, 19 nt, Artificial Sequence
  Description of Artificial Sequence: Synthetic oligonucleotide
cuguccaaaaucagugauc

SEQ ID NO: 1817502 - RNA, 19 nt, Artificial Sequence
  Description of Artificial Sequence: Synthetic oligonucleotide
gguguauaaucccauuuuc

SEQ ID NO: 1817503 - RNA, 19 nt, Artificial Sequence
  Description of Artificial Sequence: Synthetic oligonucleotide
ucccucccaaacaaguagu

SEQ ID NO: 1817504 - RNA, 19 nt, Artificial Sequence
  Description of Artificial Sequence: Synthetic oligonucleotide
guuguauuuuccacuggug

SEQ ID NO: 1817505 - RNA, 19 nt, Artificial Sequence
  Description of Artificial Sequence: Synthetic oligonucleotide
gagccgagagcaaacuucc

SEQ ID NO: 1817506 - RNA, 19 nt, Artificial Sequence
  Description of Artificial Sequence: Synthetic oligonucleotide
aucccauuuucaugaaggu

SEQ ID NO: 1817507 - RNA, 19 nt, Artificial Sequence
  Description of Artificial Sequence: Synthetic oligonucleotide
caauuccagaacaauguaa

SEQ ID NO: 1817508 - RNA, 19 nt, Artificial Sequence
  Description of Artificial Sequence: Synthetic oligonucleotide
uacacgauguaagaauuuu

SEQ ID NO: 1817509 - RNA, 19 nt, Artificial Sequence
  Description of Artificial Sequence: Synthetic oligonucleotide
uggccacuuucuuacacgu

SEQ ID NO: 1817510 - RNA, 19 nt, Artificial Sequence
  Description of Artificial Sequence: Synthetic oligonucleotide
acacguucuccucucaaaa

SEQ ID NO: 1817511 - RNA, 19 nt, Artificial Sequence
  Description of Artificial Sequence: Synthetic oligonucleotide
aagguuccauucccgcugu

SEQ ID NO: 1817512 - RNA, 19 nt, Artificial Sequence
  Description of Artificial Sequence: Synthetic oligonucleotide
uacacguucuccucucaaa

SEQ ID NO: 1817513 - RNA, 19 nt, Artificial Sequence
  Description of Artificial Sequence: Synthetic oligonucleotide
aaucuggauaaugcaugga

SEQ ID NO: 1817514 - RNA, 19 nt, Artificial Sequence
  Description of Artificial Sequence: Synthetic oligonucleotide
uuacacguucuccucucaa

SEQ ID NO: 1817515 - RNA, 19 nt, Artificial Sequence
  Description of Artificial Sequence: Synthetic oligonucleotide
uuacucaaaggcaggcguu

SEQ ID NO: 1817516 - RNA, 19 nt, Artificial Sequence
  Description of Artificial Sequence: Synthetic oligonucleotide
gauguauucgucucuuaau

SEQ ID NO: 1817517 - RNA, 19 nt, Artificial Sequence
  Description of Artificial Sequence: Synthetic oligonucleotide
aaagguggauacccacuua

SEQ ID NO: 1817518 - RNA, 19 nt, Artificial Sequence
  Description of Artificial Sequence: Synthetic oligonucleotide
uaucccucccaaacaagua

SEQ ID NO: 1817519 - RNA, 19 nt, Artificial Sequence
  Description of Artificial Sequence: Synthetic oligonucleotide
guaaaccuagccuuugggu

SEQ ID NO: 1817520 - RNA, 19 nt, Artificial Sequence
  Description of Artificial Sequence: Synthetic oligonucleotide
ugaucuuuauggccacuuu

SEQ ID NO: 1817521 - RNA, 19 nt, Artificial Sequence
  Description of Artificial Sequence: Synthetic oligonucleotide
ucuuacugaugaucuuuau

SEQ ID NO: 1817522 - RNA, 19 nt, Artificial Sequence
  Description of Artificial Sequence: Synthetic oligonucleotide
aaauucgaaagugcuucuu

SEQ ID NO: 1817523 - RNA, 19 nt, Artificial Sequence
  Description of Artificial Sequence: Synthetic oligonucleotide
ggugccagguaugugggcg

SEQ ID NO: 1817524 - RNA, 19 nt, Artificial Sequence
  Description of Artificial Sequence: Synthetic oligonucleotide
uccuuaggauaaacugacu

SEQ ID NO: 1817525 - RNA, 19 nt, Artificial Sequence
  Description of Artificial Sequence: Synthetic oligonucleotide
uugcuauagguccgauacu

SEQ ID NO: 1817526 - RNA, 19 nt, Artificial Sequence
  Description of Artificial Sequence: Synthetic oligonucleotide
uucuuaacagugguccauc

SEQ ID NO: 1817527 - RNA, 19 nt, Artificial Sequence
  Description of Artificial Sequence: Synthetic oligonucleotide
gauacuuaucaguccuucu

SEQ ID NO: 1817528 - RNA, 19 nt, Artificial Sequence
  Description of Artificial Sequence: Synthetic oligonucleotide
auaaugcauggaugauuca

SEQ ID NO: 1817529 - RNA, 19 nt, Artificial Sequence
  Description of Artificial Sequence: Synthetic oligonucleotide
guccgauacuuaucagucc

SEQ ID NO: 1817530 - RNA, 19 nt, Artificial Sequence
  Description of Artificial Sequence: Synthetic oligonucleotide
auuccagaacaauguaaua

SEQ ID NO: 1817531 - RNA, 19 nt, Artificial Sequence
  Description of Artificial Sequence: Synthetic oligonucleotide
ggcuucuucgguguaaacc

SEQ ID NO: 1817532 - RNA, 19 nt, Artificial Sequence
  Description of Artificial Sequence: Synthetic oligonucleotide
uucgucucuuaauuccuua

SEQ ID NO: 1817533 - RNA, 19 nt, Artificial Sequence
  Description of Artificial Sequence: Synthetic oligonucleotide
cacaagcaccacuuccaag

SEQ ID NO: 1817534 - RNA, 19 nt, Artificial Sequence
  Description of Artificial Sequence: Synthetic oligonucleotide
ccagauuggagaauccuuc

SEQ ID NO: 1817535 - RNA, 19 nt, Artificial Sequence
  Description of Artificial Sequence: Synthetic oligonucleotide
ucgaaaagcucuccuccuu

SEQ ID NO: 1817536 - RNA, 19 nt, Artificial Sequence
  Description of Artificial Sequence: Synthetic oligonucleotide
auguaauaaucgucugcau

SEQ ID NO: 1817537 - RNA, 19 nt, Artificial Sequence
  Description of Artificial Sequence: Synthetic oligonucleotide
uagguccgauacuuaucag

SEQ ID NO: 1817538 - RNA, 19 nt, Artificial Sequence
  Description of Artificial Sequence: Synthetic oligonucleotide
uuaagucccgguguauaau

SEQ ID NO: 1817539 - RNA, 19 nt, Artificial Sequence
  Description of Artificial Sequence: Synthetic oligonucleotide
cuuaugcucagagaaaggu

SEQ ID NO: 1817540 - RNA, 19 nt, Artificial Sequence
  Description of Artificial Sequence: Synthetic oligonucleotide
acggucgaaaagcucuccu

SEQ ID NO: 1817541 - RNA, 19 nt, Artificial Sequence
  Description of Artificial Sequence: Synthetic oligonucleotide
agcacggcuguacccagca

SEQ ID NO: 1817542 - RNA, 19 nt, Artificial Sequence
  Description of Artificial Sequence: Synthetic oligonucleotide
cuugauaaggcaguccucu

SEQ ID NO: 1817543 - RNA, 19 nt, Artificial Sequence
  Description of Artificial Sequence: Synthetic oligonucleotide
ggcuguacccagcaguccc

SEQ ID NO: 1817544 - RNA, 19 nt, Artificial Sequence
  Description of Artificial Sequence: Synthetic oligonucleotide
augaaaagaauaacuccua

SEQ ID NO: 1817545 - RNA, 19 nt, Artificial Sequence
  Description of Artificial Sequence: Synthetic oligonucleotide
agaauccuuccugaagaga

SEQ ID NO: 1817546 - RNA, 19 nt, Artificial Sequence
  Description of Artificial Sequence: Synthetic oligonucleotide
gguccgauacuuaucaguc

SEQ ID NO: 1817547 - RNA, 19 nt, Artificial Sequence
  Description of Artificial Sequence: Synthetic oligonucleotide
auaaucccauuuucaugaa

SEQ ID NO: 1817548 - RNA, 19 nt, Artificial Sequence
  Description of Artificial Sequence: Synthetic oligonucleotide
gguaugugggcguaccaca

SEQ ID NO: 1817549 - RNA, 19 nt, Artificial Sequence
  Description of Artificial Sequence: Synthetic oligonucleotide
agguggauacccacuuagg

SEQ ID NO: 1817550 - RNA, 19 nt, Artificial Sequence
  Description of Artificial Sequence: Synthetic oligonucleotide
gacugaucaucuacaguga

SEQ ID NO: 1817551 - RNA, 19 nt, Artificial Sequence
  Description of Artificial Sequence: Synthetic oligonucleotide
agaugacaagagaacauuu

SEQ ID NO: 1817552 - RNA, 19 nt, Artificial Sequence
  Description of Artificial Sequence: Synthetic oligonucleotide
aaccuagcccaaggggcag

SEQ ID NO: 1817553 - RNA, 19 nt, Artificial Sequence
  Description of Artificial Sequence: Synthetic oligonucleotide
acagcacggcuguacccag

SEQ ID NO: 1817554 - RNA, 19 nt, Artificial Sequence
  Description of Artificial Sequence: Synthetic oligonucleotide
uaugugggcguaccacaua

SEQ ID NO: 1817555 - RNA, 19 nt, Artificial Sequence
  Description of Artificial Sequence: Synthetic oligonucleotide
caggcguuuguuccccacc

SEQ ID NO: 1817556 - RNA, 19 nt, Artificial Sequence
  Description of Artificial Sequence: Synthetic oligonucleotide
ccauaaccuagcccaaggg

SEQ ID NO: 1817557 - RNA, 19 nt, Artificial Sequence
  Description of Artificial Sequence: Synthetic oligonucleotide
cauuucccugaaaauucga

SEQ ID NO: 1817558 - RNA, 19 nt, Artificial Sequence
  Description of Artificial Sequence: Synthetic oligonucleotide
ccugaagagaccauaaccu

SEQ ID NO: 1817559 - RNA, 19 nt, Artificial Sequence
  Description of Artificial Sequence: Synthetic oligonucleotide
uccuaagcuccagcagucc

SEQ ID NO: 1817560 - RNA, 19 nt, Artificial Sequence
  Description of Artificial Sequence: Synthetic oligonucleotide
augaucuuuauggccacuu

SEQ ID NO: 1817561 - RNA, 19 nt, Artificial Sequence
  Description of Artificial Sequence: Synthetic oligonucleotide
uugauaaggcaguccucuu

SEQ ID NO: 1817562 - RNA, 19 nt, Artificial Sequence
  Description of Artificial Sequence: Synthetic oligonucleotide
cuacauagugaaagugcaa

SEQ ID NO: 1817563 - RNA, 19 nt, Artificial Sequence
  Description of Artificial Sequence: Synthetic oligonucleotide
gcauggaugauucagcuuu

SEQ ID NO: 1817564 - RNA, 19 nt, Artificial Sequence
  Description of Artificial Sequence: Synthetic oligonucleotide
cuauagguccgauacuuau

SEQ ID NO: 1817565 - RNA, 19 nt, Artificial Sequence
  Description of Artificial Sequence: Synthetic oligonucleotide
uacucaaaggcaggcguuu

SEQ ID NO: 1817566 - RNA, 19 nt, Artificial Sequence
  Description of Artificial Sequence: Synthetic oligonucleotide
gguagaaauagagcuugca

SEQ ID NO: 1817567 - RNA, 19 nt, Artificial Sequence
  Description of Artificial Sequence: Synthetic oligonucleotide
ucccgguguauaaucccau

SEQ ID NO: 1817568 - RNA, 19 nt, Artificial Sequence
  Description of Artificial Sequence: Synthetic oligonucleotide
cucuuacugaugaucuuua

SEQ ID NO: 1817569 - RNA, 19 nt, Artificial Sequence
  Description of Artificial Sequence: Synthetic oligonucleotide
ugugggcguaccacauaaa

SEQ ID NO: 1817570 - RNA, 19 nt, Artificial Sequence
  Description of Artificial Sequence: Synthetic oligonucleotide
cgucucuuaauuccuuagg

SEQ ID NO: 1817571 - RNA, 19 nt, Artificial Sequence
  Description of Artificial Sequence: Synthetic oligonucleotide
gguugcuuccuucaggcgu

SEQ ID NO: 1817572 - RNA, 19 nt, Artificial Sequence
  Description of Artificial Sequence: Synthetic oligonucleotide
augagccgagagcaaacuu

SEQ ID NO: 1817573 - RNA, 19 nt, Artificial Sequence
  Description of Artificial Sequence: Synthetic oligonucleotide
acacggucgaaaagcucuc

SEQ ID NO: 1817574 - RNA, 19 nt, Artificial Sequence
  Description of Artificial Sequence: Synthetic oligonucleotide
ucccgcugugaucuucuau

SEQ ID NO: 1817575 - RNA, 19 nt, Artificial Sequence
  Description of Artificial Sequence: Synthetic oligonucleotide
cauagugaaagugcaauuu

SEQ ID NO: 1817576 - RNA, 19 nt, Artificial Sequence
  Description of Artificial Sequence: Synthetic oligonucleotide
cuauuucaguuucaacacu

SEQ ID NO: 1817577 - RNA, 19 nt, Artificial Sequence
  Description of Artificial Sequence: Synthetic oligonucleotide
accacacggucgaaaagcu

SEQ ID NO: 1817578 - RNA, 19 nt, Artificial Sequence
  Description of Artificial Sequence: Synthetic oligonucleotide
guaccacauaaaguucuca

SEQ ID NO: 1817579 - RNA, 19 nt, Artificial Sequence
  Description of Artificial Sequence: Synthetic oligonucleotide
cccaaacaaguaguugucg

SEQ ID NO: 1817580 - RNA, 19 nt, Artificial Sequence
  Description of Artificial Sequence: Synthetic oligonucleotide
gguccaucaaagcaauacu

SEQ ID NO: 1817581 - RNA, 19 nt, Artificial Sequence
  Description of Artificial Sequence: Synthetic oligonucleotide
gggcccauuucccugaaaa

SEQ ID NO: 1817582 - RNA, 19 nt, Artificial Sequence
  Description of Artificial Sequence: Synthetic oligonucleotide
caaacaaguaguugucguu

SEQ ID NO: 1817583 - RNA, 19 nt, Artificial Sequence
  Description of Artificial Sequence: Synthetic oligonucleotide
cguuuguuccccaccacac

SEQ ID NO: 1817584 - RNA, 19 nt, Artificial Sequence
  Description of Artificial Sequence: Synthetic oligonucleotide
gguccacaccaacaguuuc

SEQ ID NO: 1817585 - RNA, 19 nt, Artificial Sequence
  Description of Artificial Sequence: Synthetic oligonucleotide
gccgagagcaaacuuccuc

SEQ ID NO: 1817586 - RNA, 19 nt, Artificial Sequence
  Description of Artificial Sequence: Synthetic oligonucleotide
gcaggcguuuuccuuuccc

SEQ ID NO: 1817587 - RNA, 19 nt, Artificial Sequence
  Description of Artificial Sequence: Synthetic oligonucleotide
cuuacacguucuccucuca

SEQ ID NO: 1817588 - RNA, 19 nt, Artificial Sequence
  Description of Artificial Sequence: Synthetic oligonucleotide
cacggucgaaaagcucucc

SEQ ID NO: 1817589 - RNA, 19 nt, Artificial Sequence
  Description of Artificial Sequence: Synthetic oligonucleotide
cuucuauguacacgaugua

SEQ ID NO: 1817590 - RNA, 19 nt, Artificial Sequence
  Description of Artificial Sequence: Synthetic oligonucleotide
aagguacuguacagcuaaa

SEQ ID NO: 1817591 - RNA, 19 nt, Artificial Sequence
  Description of Artificial Sequence: Synthetic oligonucleotide
auacccacuuaggcagaug

SEQ ID NO: 1817592 - RNA, 19 nt, Artificial Sequence
  Description of Artificial Sequence: Synthetic oligonucleotide
gcguuuguuccccaccaca

SEQ ID NO: 1817593 - RNA, 19 nt, Artificial Sequence
  Description of Artificial Sequence: Synthetic oligonucleotide
cugacugaucaucuacagu

SEQ ID NO: 1817594 - RNA, 19 nt, Artificial Sequence
  Description of Artificial Sequence: Synthetic oligonucleotide
cacggcuguacccagcagu

SEQ ID NO: 1817595 - RNA, 19 nt, Artificial Sequence
  Description of Artificial Sequence: Synthetic oligonucleotide
cuucuucgguguaaaccua

SEQ ID NO: 1817596 - RNA, 19 nt, Artificial Sequence
  Description of Artificial Sequence: Synthetic oligonucleotide
auucgucucuuaauuccuu

SEQ ID NO: 1817597 - RNA, 19 nt, Artificial Sequence
  Description of Artificial Sequence: Synthetic oligonucleotide
ggauaaacugacugaucau

SEQ ID NO: 1817598 - RNA, 19 nt, Artificial Sequence
  Description of Artificial Sequence: Synthetic oligonucleotide
ccagguaugugggcguacc

SEQ ID NO: 1817599 - RNA, 19 nt, Artificial Sequence
  Description of Artificial Sequence: Synthetic oligonucleotide
caggcguuuuccuuucccu

SEQ ID NO: 1817600 - RNA, 19 nt, Artificial Sequence
  Description of Artificial Sequence: Synthetic oligonucleotide
caauacucacagcuuuuau

SEQ ID NO: 1817601 - RNA, 19 nt, Artificial Sequence
  Description of Artificial Sequence: Synthetic oligonucleotide
ggcguaccacauaaaguuc

SEQ ID NO: 1817602 - RNA, 19 nt, Artificial Sequence
  Description of Artificial Sequence: Synthetic oligonucleotide
agaccauaaccuagcccaa

SEQ ID NO: 1817603 - RNA, 19 nt, Artificial Sequence
  Description of Artificial Sequence: Synthetic oligonucleotide
ccuucuuaacaguggucca

SEQ ID NO: 1817604 - RNA, 19 nt, Artificial Sequence
  Description of Artificial Sequence: Synthetic oligonucleotide
ccuuucccuauaagcucag

SEQ ID NO: 1817605 - RNA, 19 nt, Artificial Sequence
  Description of Artificial Sequence: Synthetic oligonucleotide
agguuccauucccgcugug

SEQ ID NO: 1817606 - RNA, 19 nt, Artificial Sequence
  Description of Artificial Sequence: Synthetic oligonucleotide
ggauaaugcauggaugauu

SEQ ID NO: 1817607 - RNA, 19 nt, Artificial Sequence
  Description of Artificial Sequence: Synthetic oligonucleotide
ccaccacacggucgaaaag

SEQ ID NO: 1817608 - RNA, 19 nt, Artificial Sequence
  Description of Artificial Sequence: Synthetic oligonucleotide
cgauacuuaucaguccuuc

SEQ ID NO: 1817609 - RNA, 19 nt, Artificial Sequence
  Description of Artificial Sequence: Synthetic oligonucleotide
ccuauaagcucaguauuua

SEQ ID NO: 1817610 - RNA, 19 nt, Artificial Sequence
  Description of Artificial Sequence: Synthetic oligonucleotide
cccacuuaggcagaugaaa

SEQ ID NO: 1817611 - RNA, 19 nt, Artificial Sequence
  Description of Artificial Sequence: Synthetic oligonucleotide
gauacccacuuaggcagau

SEQ ID NO: 1817612 - RNA, 19 nt, Artificial Sequence
  Description of Artificial Sequence: Synthetic oligonucleotide
gcguaccacauaaaguucu

SEQ ID NO: 1817613 - RNA, 19 nt, Artificial Sequence
  Description of Artificial Sequence: Synthetic oligonucleotide
ggcguuuuccuuucccuau

SEQ ID NO: 1817614 - RNA, 19 nt, Artificial Sequence
  Description of Artificial Sequence: Synthetic oligonucleotide
gaucuucuauguacacgau

SEQ ID NO: 1817615 - RNA, 19 nt, Artificial Sequence
  Description of Artificial Sequence: Synthetic oligonucleotide
acccacuuaggcagaugaa

SEQ ID NO: 1817616 - RNA, 19 nt, Artificial Sequence
  Description of Artificial Sequence: Synthetic oligonucleotide
guugcuuccuucaggcguu

SEQ ID NO: 1817617 - RNA, 19 nt, Artificial Sequence
  Description of Artificial Sequence: Synthetic oligonucleotide
uucccgcugugaucuucua

SEQ ID NO: 1817618 - RNA, 19 nt, Artificial Sequence
  Description of Artificial Sequence: Synthetic oligonucleotide
guaugugggcguaccacau

SEQ ID NO: 1817619 - RNA, 19 nt, Artificial Sequence
  Description of Artificial Sequence: Synthetic oligonucleotide
cuagcccaaggggcaggac

SEQ ID NO: 1817620 - RNA, 19 nt, Artificial Sequence
  Description of Artificial Sequence: Synthetic oligonucleotide
cagagccuucucugaaaua

SEQ ID NO: 1817621 - RNA, 19 nt, Artificial Sequence
  Description of Artificial Sequence: Synthetic oligonucleotide
cggucgaaaagcucuccuc

SEQ ID NO: 1817622 - RNA, 19 nt, Artificial Sequence
  Description of Artificial Sequence: Synthetic oligonucleotide
guacacgauguaagaauuu

SEQ ID NO: 1817623 - RNA, 19 nt, Artificial Sequence
  Description of Artificial Sequence: Synthetic oligonucleotide
ccacacggucgaaaagcuc

SEQ ID NO: 1817624 - RNA, 19 nt, Artificial Sequence
  Description of Artificial Sequence: Synthetic oligonucleotide
cauggaugauucagcuuuu

SEQ ID NO: 1817625 - RNA, 19 nt, Artificial Sequence
  Description of Artificial Sequence: Synthetic oligonucleotide
cccaccacacggucgaaaa

SEQ ID NO: 1817626 - RNA, 19 nt, Artificial Sequence
  Description of Artificial Sequence: Synthetic oligonucleotide
agccgagagcaaacuuccu

SEQ ID NO: 1817627 - RNA, 19 nt, Artificial Sequence
  Description of Artificial Sequence: Synthetic oligonucleotide
ggcaggcguuuuccuuucc

SEQ ID NO: 1817628 - RNA, 19 nt, Artificial Sequence
  Description of Artificial Sequence: Synthetic oligonucleotide
gcuauagguccgauacuua

SEQ ID NO: 1817629 - RNA, 19 nt, Artificial Sequence
  Description of Artificial Sequence: Synthetic oligonucleotide
caucuuuaaucuggauaau

SEQ ID NO: 1817630 - RNA, 19 nt, Artificial Sequence
  Description of Artificial Sequence: Synthetic oligonucleotide
ggauacccacuuaggcaga

SEQ ID NO: 1817631 - RNA, 19 nt, Artificial Sequence
  Description of Artificial Sequence: Synthetic oligonucleotide
gcguuuuccuuucccuaua

SEQ ID NO: 1817632 - RNA, 19 nt, Artificial Sequence
  Description of Artificial Sequence: Synthetic oligonucleotide
ccacaagcaccacuuccaa

SEQ ID NO: 1817633 - RNA, 19 nt, Artificial Sequence
  Description of Artificial Sequence: Synthetic oligonucleotide
gggccgugucugcugcuuc

SEQ ID NO: 1817634 - RNA, 19 nt, Artificial Sequence
  Description of Artificial Sequence: Synthetic oligonucleotide
ggaauagagcagagcuccu

SEQ ID NO: 1817635 - RNA, 19 nt, Artificial Sequence
  Description of Artificial Sequence: Synthetic oligonucleotide
cuuucccuauaagcucagu

SEQ ID NO: 1817636 - RNA, 19 nt, Artificial Sequence
  Description of Artificial Sequence: Synthetic oligonucleotide
ggccgugucugcugcuucu

SEQ ID NO: 1817637 - RNA, 19 nt, Artificial Sequence
  Description of Artificial Sequence: Synthetic oligonucleotide
ccgguguauaaucccauuu

SEQ ID NO: 1817638 - RNA, 19 nt, Artificial Sequence
  Description of Artificial Sequence: Synthetic oligonucleotide
ccgcugugaucuucuaugu

SEQ ID NO: 1817639 - RNA, 19 nt, Artificial Sequence
  Description of Artificial Sequence: Synthetic oligonucleotide
ccuagcccaaggggcagga

SEQ ID NO: 1817640 - RNA, 19 nt, Artificial Sequence
  Description of Artificial Sequence: Synthetic oligonucleotide
ggguccacaccaacaguuu

SEQ ID NO: 1817641 - RNA, 19 nt, Artificial Sequence
  Description of Artificial Sequence: Synthetic oligonucleotide
cggcuguacccagcagucc

SEQ ID NO: 1817642 - RNA, 19 nt, Artificial Sequence
  Description of Artificial Sequence: Synthetic oligonucleotide
cccucccaaacaaguaguu

SEQ ID NO: 1817643 - RNA, 19 nt, Artificial Sequence
  Description of Artificial Sequence: Synthetic oligonucleotide
ccuagccuuuggguccaca

SEQ ID NO: 1817644 - RNA, 19 nt, Artificial Sequence
  Description of Artificial Sequence: Synthetic oligonucleotide
ccgauacuuaucaguccuu

SEQ ID NO: 1817645 - RNA, 19 nt, Artificial Sequence
  Description of Artificial Sequence: Synthetic oligonucleotide
cccgguguauaaucccauu

SEQ ID NO: 1817646 - RNA, 19 nt, Artificial Sequence
  Description of Artificial Sequence: Synthetic oligonucleotide
ggccacuuucuuacacguu

SEQ ID NO: 1817647 - RNA, 19 nt, Artificial Sequence
  Description of Artificial Sequence: Synthetic oligonucleotide
cgguguaaaccuagccuuu

SEQ ID NO: 1817648 - RNA, 19 nt, Artificial Sequence
  Description of Artificial Sequence: Synthetic oligonucleotide
ccccaccacacggucgaaa

SEQ ID NO: 1817649 - RNA, 19 nt, Artificial Sequence
  Description of Artificial Sequence: Synthetic oligonucleotide
auugguguaaucucgaagg

SEQ ID NO: 1817650 - RNA, 19 nt, Artificial Sequence
  Description of Artificial Sequence: Synthetic oligonucleotide
aauauguccuuccagagca

SEQ ID NO: 1817651 - RNA, 19 nt, Artificial Sequence
  Description of Artificial Sequence: Synthetic oligonucleotide
gaaagauagaucaagaaac

SEQ ID NO: 1817652 - RNA, 19 nt, Artificial Sequence
  Description of Artificial Sequence: Synthetic oligonucleotide
aacaauccaauucagcaag

SEQ ID NO: 1817653 - RNA, 19 nt, Artificial Sequence
  Description of Artificial Sequence: Synthetic oligonucleotide
agaaucuacaaagaggacc

SEQ ID NO: 1817654 - RNA, 19 nt, Artificial Sequence
  Description of Artificial Sequence: Synthetic oligonucleotide
agugucaauagcuuguugg

SEQ ID NO: 1817655 - RNA, 19 nt, Artificial Sequence
  Description of Artificial Sequence: Synthetic oligonucleotide
ucuuuaaagauuuggaggu

SEQ ID NO: 1817656 - RNA, 19 nt, Artificial Sequence
  Description of Artificial Sequence: Synthetic oligonucleotide
aacagcucucaacugaugg

SEQ ID NO: 1817657 - RNA, 19 nt, Artificial Sequence
  Description of Artificial Sequence: Synthetic oligonucleotide
aagaauauguccuuccaga

SEQ ID NO: 1817658 - RNA, 19 nt, Artificial Sequence
  Description of Artificial Sequence: Synthetic oligonucleotide
aaagaauauguccuuccag

SEQ ID NO: 1817659 - RNA, 19 nt, Artificial Sequence
  Description of Artificial Sequence: Synthetic oligonucleotide
aacuacaaaucaacaaucc

SEQ ID NO: 1817660 - RNA, 19 nt, Artificial Sequence
  Description of Artificial Sequence: Synthetic oligonucleotide
aaugcagaaacaaggcacc

SEQ ID NO: 1817661 - RNA, 19 nt, Artificial Sequence
  Description of Artificial Sequence: Synthetic oligonucleotide
uaaguaccaacuaauguug

SEQ ID NO: 1817662 - RNA, 19 nt, Artificial Sequence
  Description of Artificial Sequence: Synthetic oligonucleotide
uguuuaaugcagaaacaag

SEQ ID NO: 1817663 - RNA, 19 nt, Artificial Sequence
  Description of Artificial Sequence: Synthetic oligonucleotide
uucccucagaccaagaaag

SEQ ID NO: 1817664 - RNA, 19 nt, Artificial Sequence
  Description of Artificial Sequence: Synthetic oligonucleotide
aagggagucagucauguca

SEQ ID NO: 1817665 - RNA, 19 nt, Artificial Sequence
  Description of Artificial Sequence: Synthetic oligonucleotide
aggccauugucacacaucc

SEQ ID NO: 1817666 - RNA, 19 nt, Artificial Sequence
  Description of Artificial Sequence: Synthetic oligonucleotide
ucagcuauuggcuggauca

SEQ ID NO: 1817667 - RNA, 19 nt, Artificial Sequence
  Description of Artificial Sequence: Synthetic oligonucleotide
caaagaacaacaguggugc

SEQ ID NO: 1817668 - RNA, 19 nt, Artificial Sequence
  Description of Artificial Sequence: Synthetic oligonucleotide
agguuggacacuuucuugc

SEQ ID NO: 1817669 - RNA, 19 nt, Artificial Sequence
  Description of Artificial Sequence: Synthetic oligonucleotide
uuucaggcgggcaacaucc

SEQ ID NO: 1817670 - RNA, 19 nt, Artificial Sequence
  Description of Artificial Sequence: Synthetic oligonucleotide
ggugauugcauuuucaggc

SEQ ID NO: 1817671 - RNA, 19 nt, Artificial Sequence
  Description of Artificial Sequence: Synthetic oligonucleotide
uguaacucccauagguacg

SEQ ID NO: 1817672 - RNA, 19 nt, Artificial Sequence
  Description of Artificial Sequence: Synthetic oligonucleotide
ucaccaacagcucucaacu

SEQ ID NO: 1817673 - RNA, 19 nt, Artificial Sequence
  Description of Artificial Sequence: Synthetic oligonucleotide
aaagggagcuguuugugug

SEQ ID NO: 1817674 - RNA, 19 nt, Artificial Sequence
  Description of Artificial Sequence: Synthetic oligonucleotide
uuuaaagauuuggaggucc

SEQ ID NO: 1817675 - RNA, 19 nt, Artificial Sequence
  Description of Artificial Sequence: Synthetic oligonucleotide
acuaaucacacagaagcac

SEQ ID NO: 1817676 - RNA, 19 nt, Artificial Sequence
  Description of Artificial Sequence: Synthetic oligonucleotide
acuaaguaccaacuaaugu

SEQ ID NO: 1817677 - RNA, 19 nt, Artificial Sequence
  Description of Artificial Sequence: Synthetic oligonucleotide
auagguacgagcgucacag

SEQ ID NO: 1817678 - RNA, 19 nt, Artificial Sequence
  Description of Artificial Sequence: Synthetic oligonucleotide
uacaaaucaacaauccaau

SEQ ID NO: 1817679 - RNA, 19 nt, Artificial Sequence
  Description of Artificial Sequence: Synthetic oligonucleotide
cauccaacagacuaaguac

SEQ ID NO: 1817680 - RNA, 19 nt, Artificial Sequence
  Description of Artificial Sequence: Synthetic oligonucleotide
ucugaacuacaaaucaaca

SEQ ID NO: 1817681 - RNA, 19 nt, Artificial Sequence
  Description of Artificial Sequence: Synthetic oligonucleotide
aucaagaaacuaaucacac

SEQ ID NO: 1817682 - RNA, 19 nt, Artificial Sequence
  Description of Artificial Sequence: Synthetic oligonucleotide
aagguccuuuaccaagagc

SEQ ID NO: 1817683 - RNA, 19 nt, Artificial Sequence
  Description of Artificial Sequence: Synthetic oligonucleotide
agaaacuaaucacacagaa

SEQ ID NO: 1817684 - RNA, 19 nt, Artificial Sequence
  Description of Artificial Sequence: Synthetic oligonucleotide
gauugguguaaucucgaag

SEQ ID NO: 1817685 - RNA, 19 nt, Artificial Sequence
  Description of Artificial Sequence: Synthetic oligonucleotide
acaaacacccacaaguuuc

SEQ ID NO: 1817686 - RNA, 19 nt, Artificial Sequence
  Description of Artificial Sequence: Synthetic oligonucleotide
agaauauguccuuccagag

SEQ ID NO: 1817687 - RNA, 19 nt, Artificial Sequence
  Description of Artificial Sequence: Synthetic oligonucleotide
uuggacacuuucuugcuag

SEQ ID NO: 1817688 - RNA, 19 nt, Artificial Sequence
  Description of Artificial Sequence: Synthetic oligonucleotide
uaggugauugcauuuucag

SEQ ID NO: 1817689 - RNA, 19 nt, Artificial Sequence
  Description of Artificial Sequence: Synthetic oligonucleotide
uuaaagauuuggagguccc

SEQ ID NO: 1817690 - RNA, 19 nt, Artificial Sequence
  Description of Artificial Sequence: Synthetic oligonucleotide
acagcucucaacugauggc

SEQ ID NO: 1817691 - RNA, 19 nt, Artificial Sequence
  Description of Artificial Sequence: Synthetic oligonucleotide
ugauugcauuuucaggcgg

SEQ ID NO: 1817692 - RNA, 19 nt, Artificial Sequence
  Description of Artificial Sequence: Synthetic oligonucleotide
agcgucacaggaaaguucc

SEQ ID NO: 1817693 - RNA, 19 nt, Artificial Sequence
  Description of Artificial Sequence: Synthetic oligonucleotide
gaauggugagcaaaggugc

SEQ ID NO: 1817694 - RNA, 19 nt, Artificial Sequence
  Description of Artificial Sequence: Synthetic oligonucleotide
gaaucuacaaagaggacca

SEQ ID NO: 1817695 - RNA, 19 nt, Artificial Sequence
  Description of Artificial Sequence: Synthetic oligonucleotide
cagaagaccuggaaggucc

SEQ ID NO: 1817696 - RNA, 19 nt, Artificial Sequence
  Description of Artificial Sequence: Synthetic oligonucleotide
cucugaacuacaaaucaac

SEQ ID NO: 1817697 - RNA, 19 nt, Artificial Sequence
  Description of Artificial Sequence: Synthetic oligonucleotide
gaauauguccuuccagagc

SEQ ID NO: 1817698 - RNA, 19 nt, Artificial Sequence
  Description of Artificial Sequence: Synthetic oligonucleotide
auccaacagacuaaguacc

SEQ ID NO: 1817699 - RNA, 19 nt, Artificial Sequence
  Description of Artificial Sequence: Synthetic oligonucleotide
accuggaagguccuuuacc

SEQ ID NO: 1817700 - RNA, 19 nt, Artificial Sequence
  Description of Artificial Sequence: Synthetic oligonucleotide
ugacauguccagaauggug

SEQ ID NO: 1817701 - RNA, 19 nt, Artificial Sequence
  Description of Artificial Sequence: Synthetic oligonucleotide
agauuuggagguccccugc

SEQ ID NO: 1817702 - RNA, 19 nt, Artificial Sequence
  Description of Artificial Sequence: Synthetic oligonucleotide
ucauugagcaccuccacuc

SEQ ID NO: 1817703 - RNA, 19 nt, Artificial Sequence
  Description of Artificial Sequence: Synthetic oligonucleotide
uuguuuaaugcagaaacaa

SEQ ID NO: 1817704 - RNA, 19 nt, Artificial Sequence
  Description of Artificial Sequence: Synthetic oligonucleotide
agcaaggaacaacaguguc

SEQ ID NO: 1817705 - RNA, 19 nt, Artificial Sequence
  Description of Artificial Sequence: Synthetic oligonucleotide
aggugauugcauuuucagg

SEQ ID NO: 1817706 - RNA, 19 nt, Artificial Sequence
  Description of Artificial Sequence: Synthetic oligonucleotide
acagagguuggacacuuuc

SEQ ID NO: 1817707 - RNA, 19 nt, Artificial Sequence
  Description of Artificial Sequence: Synthetic oligonucleotide
uauuggcuggaucagcugu

SEQ ID NO: 1817708 - RNA, 19 nt, Artificial Sequence
  Description of Artificial Sequence: Synthetic oligonucleotide
gaaacuaaucacacagaag

SEQ ID NO: 1817709 - RNA, 19 nt, Artificial Sequence
  Description of Artificial Sequence: Synthetic oligonucleotide
ggaacaacagugucaauag

SEQ ID NO: 1817710 - RNA, 19 nt, Artificial Sequence
  Description of Artificial Sequence: Synthetic oligonucleotide
uaauguuguaccucugaac

SEQ ID NO: 1817711 - RNA, 19 nt, Artificial Sequence
  Description of Artificial Sequence: Synthetic oligonucleotide
uuggcuuuguacuuggcaa

SEQ ID NO: 1817712 - RNA, 19 nt, Artificial Sequence
  Description of Artificial Sequence: Synthetic oligonucleotide
cucuacauccaucacguac

SEQ ID NO: 1817713 - RNA, 19 nt, Artificial Sequence
  Description of Artificial Sequence: Synthetic oligonucleotide
aagauuuggagguccccug

SEQ ID NO: 1817714 - RNA, 19 nt, Artificial Sequence
  Description of Artificial Sequence: Synthetic oligonucleotide
gaauguggcaguucuggug

SEQ ID NO: 1817715 - RNA, 19 nt, Artificial Sequence
  Description of Artificial Sequence: Synthetic oligonucleotide
cuugcuagaagucaucaca

SEQ ID NO: 1817716 - RNA, 19 nt, Artificial Sequence
  Description of Artificial Sequence: Synthetic oligonucleotide
uaccaacuaauguuguacc

SEQ ID NO: 1817717 - RNA, 19 nt, Artificial Sequence
  Description of Artificial Sequence: Synthetic oligonucleotide
aucaacaauccaauucagc

SEQ ID NO: 1817718 - RNA, 19 nt, Artificial Sequence
  Description of Artificial Sequence: Synthetic oligonucleotide
uguacugaccccagaguca

SEQ ID NO: 1817719 - RNA, 19 nt, Artificial Sequence
  Description of Artificial Sequence: Synthetic oligonucleotide
accucugaacuacaaauca

SEQ ID NO: 1817720 - RNA, 19 nt, Artificial Sequence
  Description of Artificial Sequence: Synthetic oligonucleotide
uguuguaccucugaacuac

SEQ ID NO: 1817721 - RNA, 19 nt, Artificial Sequence
  Description of Artificial Sequence: Synthetic oligonucleotide
acaguuagcgcagcuauuc

SEQ ID NO: 1817722 - RNA, 19 nt, Artificial Sequence
  Description of Artificial Sequence: Synthetic oligonucleotide
agaccaagaaagaauaugu

SEQ ID NO: 1817723 - RNA, 19 nt, Artificial Sequence
  Description of Artificial Sequence: Synthetic oligonucleotide
aggaugugcacucaugggu

SEQ ID NO: 1817724 - RNA, 19 nt, Artificial Sequence
  Description of Artificial Sequence: Synthetic oligonucleotide
ucaucacaaaaguacucca

SEQ ID NO: 1817725 - RNA, 19 nt, Artificial Sequence
  Description of Artificial Sequence: Synthetic oligonucleotide
agccccaauccauuguccc

SEQ ID NO: 1817726 - RNA, 19 nt, Artificial Sequence
  Description of Artificial Sequence: Synthetic oligonucleotide
uuuucuaggugauugcauu

SEQ ID NO: 1817727 - RNA, 19 nt, Artificial Sequence
  Description of Artificial Sequence: Synthetic oligonucleotide
gugauugcauuuucaggcg

SEQ ID NO: 1817728 - RNA, 19 nt, Artificial Sequence
  Description of Artificial Sequence: Synthetic oligonucleotide
cuaugaacaguuagcgcag

SEQ ID NO: 1817729 - RNA, 19 nt, Artificial Sequence
  Description of Artificial Sequence: Synthetic oligonucleotide
acacaucccaagcagucuc

SEQ ID NO: 1817730 - RNA, 19 nt, Artificial Sequence
  Description of Artificial Sequence: Synthetic oligonucleotide
acuaauguuguaccucuga

SEQ ID NO: 1817731 - RNA, 19 nt, Artificial Sequence
  Description of Artificial Sequence: Synthetic oligonucleotide
gaacuacaaaucaacaauc

SEQ ID NO: 1817732 - RNA, 19 nt, Artificial Sequence
  Description of Artificial Sequence: Synthetic oligonucleotide
gaggaugugcacucauggg

SEQ ID NO: 1817733 - RNA, 19 nt, Artificial Sequence
  Description of Artificial Sequence: Synthetic oligonucleotide
ucagucaugucauccuccc

SEQ ID NO: 1817734 - RNA, 19 nt, Artificial Sequence
  Description of Artificial Sequence: Synthetic oligonucleotide
aacagacuaaguaccaacu

SEQ ID NO: 1817735 - RNA, 19 nt, Artificial Sequence
  Description of Artificial Sequence: Synthetic oligonucleotide
uugcuagaagucaucacaa

SEQ ID NO: 1817736 - RNA, 19 nt, Artificial Sequence
  Description of Artificial Sequence: Synthetic oligonucleotide
ucacaaaaguacuccacaa

SEQ ID NO: 1817737 - RNA, 19 nt, Artificial Sequence
  Description of Artificial Sequence: Synthetic oligonucleotide
agauagaucaagaaacuaa

SEQ ID NO: 1817738 - RNA, 19 nt, Artificial Sequence
  Description of Artificial Sequence: Synthetic oligonucleotide
ucuguaacucccauaggua

SEQ ID NO: 1817739 - RNA, 19 nt, Artificial Sequence
  Description of Artificial Sequence: Synthetic oligonucleotide
gauugcauuuucaggcggg

SEQ ID NO: 1817740 - RNA, 19 nt, Artificial Sequence
  Description of Artificial Sequence: Synthetic oligonucleotide
agagccccaauccauuguc

SEQ ID NO: 1817741 - RNA, 19 nt, Artificial Sequence
  Description of Artificial Sequence: Synthetic oligonucleotide
caacagacuaaguaccaac

SEQ ID NO: 1817742 - RNA, 19 nt, Artificial Sequence
  Description of Artificial Sequence: Synthetic oligonucleotide
uucuuuucuaggugauugc

SEQ ID NO: 1817743 - RNA, 19 nt, Artificial Sequence
  Description of Artificial Sequence: Synthetic oligonucleotide
uccaacagacuaaguacca

SEQ ID NO: 1817744 - RNA, 19 nt, Artificial Sequence
  Description of Artificial Sequence: Synthetic oligonucleotide
agcugaguuguuuaaugca

SEQ ID NO: 1817745 - RNA, 19 nt, Artificial Sequence
  Description of Artificial Sequence: Synthetic oligonucleotide
cagcuauucaucuucccac

SEQ ID NO: 1817746 - RNA, 19 nt, Artificial Sequence
  Description of Artificial Sequence: Synthetic oligonucleotide
uguaccucugaacuacaaa

SEQ ID NO: 1817747 - RNA, 19 nt, Artificial Sequence
  Description of Artificial Sequence: Synthetic oligonucleotide
auagaucaagaaacuaauc

SEQ ID NO: 1817748 - RNA, 19 nt, Artificial Sequence
  Description of Artificial Sequence: Synthetic oligonucleotide
ugaguuguuuaaugcagaa

SEQ ID NO: 1817749 - RNA, 19 nt, Artificial Sequence
  Description of Artificial Sequence: Synthetic oligonucleotide
uuagcgcagcuauucaucu

SEQ ID NO: 1817750 - RNA, 19 nt, Artificial Sequence
  Description of Artificial Sequence: Synthetic oligonucleotide
caucacaaaaguacuccac

SEQ ID NO: 1817751 - RNA, 19 nt, Artificial Sequence
  Description of Artificial Sequence: Synthetic oligonucleotide
ucaacugauggccgcugag

SEQ ID NO: 1817752 - RNA, 19 nt, Artificial Sequence
  Description of Artificial Sequence: Synthetic oligonucleotide
ucuuuucuaggugauugca

SEQ ID NO: 1817753 - RNA, 19 nt, Artificial Sequence
  Description of Artificial Sequence: Synthetic oligonucleotide
aucucgaagggagucaguc

SEQ ID NO: 1817754 - RNA, 19 nt, Artificial Sequence
  Description of Artificial Sequence: Synthetic oligonucleotide
uguaaucucgaagggaguc

SEQ ID NO: 1817755 - RNA, 19 nt, Artificial Sequence
  Description of Artificial Sequence: Synthetic oligonucleotide
gacuaaguaccaacuaaug

SEQ ID NO: 1817756 - RNA, 19 nt, Artificial Sequence
  Description of Artificial Sequence: Synthetic oligonucleotide
uaaucucgaagggagucag

SEQ ID NO: 1817757 - RNA, 19 nt, Artificial Sequence
  Description of Artificial Sequence: Synthetic oligonucleotide
aucuacaaagaggaccagg

SEQ ID NO: 1817758 - RNA, 19 nt, Artificial Sequence
  Description of Artificial Sequence: Synthetic oligonucleotide
acucaugggugcuagcuga

SEQ ID NO: 1817759 - RNA, 19 nt, Artificial Sequence
  Description of Artificial Sequence: Synthetic oligonucleotide
uaccucugaacuacaaauc

SEQ ID NO: 1817760 - RNA, 19 nt, Artificial Sequence
  Description of Artificial Sequence: Synthetic oligonucleotide
cccaagaacucacugaugc

SEQ ID NO: 1817761 - RNA, 19 nt, Artificial Sequence
  Description of Artificial Sequence: Synthetic oligonucleotide
guaccaacuaauguuguac

SEQ ID NO: 1817762 - RNA, 19 nt, Artificial Sequence
  Description of Artificial Sequence: Synthetic oligonucleotide
aacuaaucacacagaagca

SEQ ID NO: 1817763 - RNA, 19 nt, Artificial Sequence
  Description of Artificial Sequence: Synthetic oligonucleotide
ugagcugcacagcauugga

SEQ ID NO: 1817764 - RNA, 19 nt, Artificial Sequence
  Description of Artificial Sequence: Synthetic oligonucleotide
uggguuguguguacugacc

SEQ ID NO: 1817765 - RNA, 19 nt, Artificial Sequence
  Description of Artificial Sequence: Synthetic oligonucleotide
cuaaguaccaacuaauguu

SEQ ID NO: 1817766 - RNA, 19 nt, Artificial Sequence
  Description of Artificial Sequence: Synthetic oligonucleotide
ucuaggugauugcauuuuc

SEQ ID NO: 1817767 - RNA, 19 nt, Artificial Sequence
  Description of Artificial Sequence: Synthetic oligonucleotide
caggcaggggccuucauug

SEQ ID NO: 1817768 - RNA, 19 nt, Artificial Sequence
  Description of Artificial Sequence: Synthetic oligonucleotide
accaacuaauguuguaccu

SEQ ID NO: 1817769 - RNA, 19 nt, Artificial Sequence
  Description of Artificial Sequence: Synthetic oligonucleotide
cugaacuacaaaucaacaa

SEQ ID NO: 1817770 - RNA, 19 nt, Artificial Sequence
  Description of Artificial Sequence: Synthetic oligonucleotide
caugucauccuccccggcc

SEQ ID NO: 1817771 - RNA, 19 nt, Artificial Sequence
  Description of Artificial Sequence: Synthetic oligonucleotide
ugcaguccucaucauugag

SEQ ID NO: 1817772 - RNA, 19 nt, Artificial Sequence
  Description of Artificial Sequence: Synthetic oligonucleotide
uuuucaggcgggcaacauc

SEQ ID NO: 1817773 - RNA, 19 nt, Artificial Sequence
  Description of Artificial Sequence: Synthetic oligonucleotide
uucuugcuagaagucauca

SEQ ID NO: 1817774 - RNA, 19 nt, Artificial Sequence
  Description of Artificial Sequence: Synthetic oligonucleotide
gagaccaugggccuuccuc

SEQ ID NO: 1817775 - RNA, 19 nt, Artificial Sequence
  Description of Artificial Sequence: Synthetic oligonucleotide
agaacaaggaagaaagaua

SEQ ID NO: 1817776 - RNA, 19 nt, Artificial Sequence
  Description of Artificial Sequence: Synthetic oligonucleotide
guguacugaccccagaguc

SEQ ID NO: 1817777 - RNA, 19 nt, Artificial Sequence
  Description of Artificial Sequence: Synthetic oligonucleotide
acacccacaaguuucuuua

SEQ ID NO: 1817778 - RNA, 19 nt, Artificial Sequence
  Description of Artificial Sequence: Synthetic oligonucleotide
gaugugcacucaugggugc

SEQ ID NO: 1817779 - RNA, 19 nt, Artificial Sequence
  Description of Artificial Sequence: Synthetic oligonucleotide
agaccaugggccuuccucu

SEQ ID NO: 1817780 - RNA, 19 nt, Artificial Sequence
  Description of Artificial Sequence: Synthetic oligonucleotide
ucuugcuagaagucaucac

SEQ ID NO: 1817781 - RNA, 19 nt, Artificial Sequence
  Description of Artificial Sequence: Synthetic oligonucleotide
aaaguucccucuggcuugg

SEQ ID NO: 1817782 - RNA, 19 nt, Artificial Sequence
  Description of Artificial Sequence: Synthetic oligonucleotide
uaaagauuuggaggucccc

SEQ ID NO: 1817783 - RNA, 19 nt, Artificial Sequence
  Description of Artificial Sequence: Synthetic oligonucleotide
gauagaucaagaaacuaau

SEQ ID NO: 1817784 - RNA, 19 nt, Artificial Sequence
  Description of Artificial Sequence: Synthetic oligonucleotide
ugcggccucuggcagauug

SEQ ID NO: 1817785 - RNA, 19 nt, Artificial Sequence
  Description of Artificial Sequence: Synthetic oligonucleotide
gcugacauguccagaaugg

SEQ ID NO: 1817786 - RNA, 19 nt, Artificial Sequence
  Description of Artificial Sequence: Synthetic oligonucleotide
caauucagcaaggaacaac

SEQ ID NO: 1817787 - RNA, 19 nt, Artificial Sequence
  Description of Artificial Sequence: Synthetic oligonucleotide
agguacgagcgucacagga

SEQ ID NO: 1817788 - RNA, 19 nt, Artificial Sequence
  Description of Artificial Sequence: Synthetic oligonucleotide
uuucuugcuagaagucauc

SEQ ID NO: 1817789 - RNA, 19 nt, Artificial Sequence
  Description of Artificial Sequence: Synthetic oligonucleotide
agcuauuggcuggaucagc

SEQ ID NO: 1817790 - RNA, 19 nt, Artificial Sequence
  Description of Artificial Sequence: Synthetic oligonucleotide
acgggaacucccugcaguc

SEQ ID NO: 1817791 - RNA, 19 nt, Artificial Sequence
  Description of Artificial Sequence: Synthetic oligonucleotide
ugccgagugaucaccuccc

SEQ ID NO: 1817792 - RNA, 19 nt, Artificial Sequence
  Description of Artificial Sequence: Synthetic oligonucleotide
caaaggugcggccucuggc

SEQ ID NO: 1817793 - RNA, 19 nt, Artificial Sequence
  Description of Artificial Sequence: Synthetic oligonucleotide
uuggguuguguguacugac

SEQ ID NO: 1817794 - RNA, 19 nt, Artificial Sequence
  Description of Artificial Sequence: Synthetic oligonucleotide
ucagaccaagaaagaauau

SEQ ID NO: 1817795 - RNA, 19 nt, Artificial Sequence
  Description of Artificial Sequence: Synthetic oligonucleotide
gcagauugguguaaucucg

SEQ ID NO: 1817796 - RNA, 19 nt, Artificial Sequence
  Description of Artificial Sequence: Synthetic oligonucleotide
aguuagcgcagcuauucau

SEQ ID NO: 1817797 - RNA, 19 nt, Artificial Sequence
  Description of Artificial Sequence: Synthetic oligonucleotide
ucccaagcagucuccagac

SEQ ID NO: 1817798 - RNA, 19 nt, Artificial Sequence
  Description of Artificial Sequence: Synthetic oligonucleotide
guccuuuaccaagagcuag

SEQ ID NO: 1817799 - RNA, 19 nt, Artificial Sequence
  Description of Artificial Sequence: Synthetic oligonucleotide
acaaaucaacaauccaauu

SEQ ID NO: 1817800 - RNA, 19 nt, Artificial Sequence
  Description of Artificial Sequence: Synthetic oligonucleotide
ugguguaaucucgaaggga

SEQ ID NO: 1817801 - RNA, 19 nt, Artificial Sequence
  Description of Artificial Sequence: Synthetic oligonucleotide
augggccuuccucuguaac

SEQ ID NO: 1817802 - RNA, 19 nt, Artificial Sequence
  Description of Artificial Sequence: Synthetic oligonucleotide
auugucccugcuugcucac

SEQ ID NO: 1817803 - RNA, 19 nt, Artificial Sequence
  Description of Artificial Sequence: Synthetic oligonucleotide
agaauguggcaguucuggu

SEQ ID NO: 1817804 - RNA, 19 nt, Artificial Sequence
  Description of Artificial Sequence: Synthetic oligonucleotide
cagacuaaguaccaacuaa

SEQ ID NO: 1817805 - RNA, 19 nt, Artificial Sequence
  Description of Artificial Sequence: Synthetic oligonucleotide
agacuaaguaccaacuaau

SEQ ID NO: 1817806 - RNA, 19 nt, Artificial Sequence
  Description of Artificial Sequence: Synthetic oligonucleotide
gcugaguuguuuaaugcag

SEQ ID NO: 1817807 - RNA, 19 nt, Artificial Sequence
  Description of Artificial Sequence: Synthetic oligonucleotide
gaccaagaaagaauauguc

SEQ ID NO: 1817808 - RNA, 19 nt, Artificial Sequence
  Description of Artificial Sequence: Synthetic oligonucleotide
cagucuccagacacagugg

SEQ ID NO: 1817809 - RNA, 19 nt, Artificial Sequence
  Description of Artificial Sequence: Synthetic oligonucleotide
cugauggccgcugagacca

SEQ ID NO: 1817810 - RNA, 19 nt, Artificial Sequence
  Description of Artificial Sequence: Synthetic oligonucleotide
cugccgagugaucaccucc

SEQ ID NO: 1817811 - RNA, 19 nt, Artificial Sequence
  Description of Artificial Sequence: Synthetic oligonucleotide
ggugccuccucuucuuugg

SEQ ID NO: 1817812 - RNA, 19 nt, Artificial Sequence
  Description of Artificial Sequence: Synthetic oligonucleotide
gaacaguuagcgcagcuau

SEQ ID NO: 1817813 - RNA, 19 nt, Artificial Sequence
  Description of Artificial Sequence: Synthetic oligonucleotide
cuaauguuguaccucugaa

SEQ ID NO: 1817814 - RNA, 19 nt, Artificial Sequence
  Description of Artificial Sequence: Synthetic oligonucleotide
aguaccaacuaauguugua

SEQ ID NO: 1817815 - RNA, 19 nt, Artificial Sequence
  Description of Artificial Sequence: Synthetic oligonucleotide
cuaggugauugcauuuuca

SEQ ID NO: 1817816 - RNA, 19 nt, Artificial Sequence
  Description of Artificial Sequence: Synthetic oligonucleotide
caaggaacaacagugucaa

SEQ ID NO: 1817817 - RNA, 19 nt, Artificial Sequence
  Description of Artificial Sequence: Synthetic oligonucleotide
cacagaagcacacuaugaa

SEQ ID NO: 1817818 - RNA, 19 nt, Artificial Sequence
  Description of Artificial Sequence: Synthetic oligonucleotide
gagcuagugaccaggagaa

SEQ ID NO: 1817819 - RNA, 19 nt, Artificial Sequence
  Description of Artificial Sequence: Synthetic oligonucleotide
gagucagagccccaaucca

SEQ ID NO: 1817820 - RNA, 19 nt, Artificial Sequence
  Description of Artificial Sequence: Synthetic oligonucleotide
ggguuguguguacugaccc

SEQ ID NO: 1817821 - RNA, 19 nt, Artificial Sequence
  Description of Artificial Sequence: Synthetic oligonucleotide
aaguaccaacuaauguugu

SEQ ID NO: 1817822 - RNA, 19 nt, Artificial Sequence
  Description of Artificial Sequence: Synthetic oligonucleotide
uacgagcgucacaggaaag

SEQ ID NO: 1817823 - RNA, 19 nt, Artificial Sequence
  Description of Artificial Sequence: Synthetic oligonucleotide
ugaacaguuagcgcagcua

SEQ ID NO: 1817824 - RNA, 19 nt, Artificial Sequence
  Description of Artificial Sequence: Synthetic oligonucleotide
augaacaguuagcgcagcu

SEQ ID NO: 1817825 - RNA, 19 nt, Artificial Sequence
  Description of Artificial Sequence: Synthetic oligonucleotide
ugcuagaagucaucacaaa

SEQ ID NO: 1817826 - RNA, 19 nt, Artificial Sequence
  Description of Artificial Sequence: Synthetic oligonucleotide
ccucagaaucuacaaagag

SEQ ID NO: 1817827 - RNA, 19 nt, Artificial Sequence
  Description of Artificial Sequence: Synthetic oligonucleotide
ucccucagaccaagaaaga

SEQ ID NO: 1817828 - RNA, 19 nt, Artificial Sequence
  Description of Artificial Sequence: Synthetic oligonucleotide
ucgaagggagucagucaug

SEQ ID NO: 1817829 - RNA, 19 nt, Artificial Sequence
  Description of Artificial Sequence: Synthetic oligonucleotide
ugcucacucugcagaagac

SEQ ID NO: 1817830 - RNA, 19 nt, Artificial Sequence
  Description of Artificial Sequence: Synthetic oligonucleotide
ugucccugcuugcucacuc

SEQ ID NO: 1817831 - RNA, 19 nt, Artificial Sequence
  Description of Artificial Sequence: Synthetic oligonucleotide
gcuagugaccaggagaaug

SEQ ID NO: 1817832 - RNA, 19 nt, Artificial Sequence
  Description of Artificial Sequence: Synthetic oligonucleotide
uuguaccucugaacuacaa

SEQ ID NO: 1817833 - RNA, 19 nt, Artificial Sequence
  Description of Artificial Sequence: Synthetic oligonucleotide
gcuagaagucaucacaaaa

SEQ ID NO: 1817834 - RNA, 19 nt, Artificial Sequence
  Description of Artificial Sequence: Synthetic oligonucleotide
guuagcgcagcuauucauc

SEQ ID NO: 1817835 - RNA, 19 nt, Artificial Sequence
  Description of Artificial Sequence: Synthetic oligonucleotide
ucaggccauugucacacau

SEQ ID NO: 1817836 - RNA, 19 nt, Artificial Sequence
  Description of Artificial Sequence: Synthetic oligonucleotide
uaugaacaguuagcgcagc

SEQ ID NO: 1817837 - RNA, 19 nt, Artificial Sequence
  Description of Artificial Sequence: Synthetic oligonucleotide
cacaucccaagcagucucc

SEQ ID NO: 1817838 - RNA, 19 nt, Artificial Sequence
  Description of Artificial Sequence: Synthetic oligonucleotide
cagaaucuacaaagaggac

SEQ ID NO: 1817839 - RNA, 19 nt, Artificial Sequence
  Description of Artificial Sequence: Synthetic oligonucleotide
aucacguacuugccgggcu

SEQ ID NO: 1817840 - RNA, 19 nt, Artificial Sequence
  Description of Artificial Sequence: Synthetic oligonucleotide
cuuuaaagauuuggagguc

SEQ ID NO: 1817841 - RNA, 19 nt, Artificial Sequence
  Description of Artificial Sequence: Synthetic oligonucleotide
uugugugggcagagacacg

SEQ ID NO: 1817842 - RNA, 19 nt, Artificial Sequence
  Description of Artificial Sequence: Synthetic oligonucleotide
cuauuggcuggaucagcug

SEQ ID NO: 1817843 - RNA, 19 nt, Artificial Sequence
  Description of Artificial Sequence: Synthetic oligonucleotide
ugggugcuagcugaguugu

SEQ ID NO: 1817844 - RNA, 19 nt, Artificial Sequence
  Description of Artificial Sequence: Synthetic oligonucleotide
ccuuccagagcauauuuuc

SEQ ID NO: 1817845 - RNA, 19 nt, Artificial Sequence
  Description of Artificial Sequence: Synthetic oligonucleotide
cauugucccugcuugcuca

SEQ ID NO: 1817846 - RNA, 19 nt, Artificial Sequence
  Description of Artificial Sequence: Synthetic oligonucleotide
aacuaauguuguaccucug

SEQ ID NO: 1817847 - RNA, 19 nt, Artificial Sequence
  Description of Artificial Sequence: Synthetic oligonucleotide
ggcugacauguccagaaug

SEQ ID NO: 1817848 - RNA, 19 nt, Artificial Sequence
  Description of Artificial Sequence: Synthetic oligonucleotide
gacacgggcauggucaaga

SEQ ID NO: 1817849 - RNA, 19 nt, Artificial Sequence
  Description of Artificial Sequence: Synthetic oligonucleotide
aggcgggcaacauccaaca

SEQ ID NO: 1817850 - RNA, 19 nt, Artificial Sequence
  Description of Artificial Sequence: Synthetic oligonucleotide
caacuaauguuguaccucu

SEQ ID NO: 1817851 - RNA, 19 nt, Artificial Sequence
  Description of Artificial Sequence: Synthetic oligonucleotide
agaggaccaggcaggggcc

SEQ ID NO: 1817852 - RNA, 19 nt, Artificial Sequence
  Description of Artificial Sequence: Synthetic oligonucleotide
ccaagaaagaauauguccu

SEQ ID NO: 1817853 - RNA, 19 nt, Artificial Sequence
  Description of Artificial Sequence: Synthetic oligonucleotide
caggcgggcaacauccaac

SEQ ID NO: 1817854 - RNA, 19 nt, Artificial Sequence
  Description of Artificial Sequence: Synthetic oligonucleotide
agauugguguaaucucgaa

SEQ ID NO: 1817855 - RNA, 19 nt, Artificial Sequence
  Description of Artificial Sequence: Synthetic oligonucleotide
ggcagauugguguaaucuc

SEQ ID NO: 1817856 - RNA, 19 nt, Artificial Sequence
  Description of Artificial Sequence: Synthetic oligonucleotide
cuagugaccaggagaaugu

SEQ ID NO: 1817857 - RNA, 19 nt, Artificial Sequence
  Description of Artificial Sequence: Synthetic oligonucleotide
uccauugucccugcuugcu

SEQ ID NO: 1817858 - RNA, 19 nt, Artificial Sequence
  Description of Artificial Sequence: Synthetic oligonucleotide
uccuuccagagcauauuuu

SEQ ID NO: 1817859 - RNA, 19 nt, Artificial Sequence
  Description of Artificial Sequence: Synthetic oligonucleotide
uagguacgagcgucacagg

SEQ ID NO: 1817860 - RNA, 19 nt, Artificial Sequence
  Description of Artificial Sequence: Synthetic oligonucleotide
guaacucccauagguacga

SEQ ID NO: 1817861 - RNA, 19 nt, Artificial Sequence
  Description of Artificial Sequence: Synthetic oligonucleotide
gccgcugagaccaugggcc

SEQ ID NO: 1817862 - RNA, 19 nt, Artificial Sequence
  Description of Artificial Sequence: Synthetic oligonucleotide
gagcugcacagcauuggag

SEQ ID NO: 1817863 - RNA, 19 nt, Artificial Sequence
  Description of Artificial Sequence: Synthetic oligonucleotide
gguuguguguacugacccc

SEQ ID NO: 1817864 - RNA, 19 nt, Artificial Sequence
  Description of Artificial Sequence: Synthetic oligonucleotide
agcucucaacugauggccg

SEQ ID NO: 1817865 - RNA, 19 nt, Artificial Sequence
  Description of Artificial Sequence: Synthetic oligonucleotide
guacgagcgucacaggaaa

SEQ ID NO: 1817866 - RNA, 19 nt, Artificial Sequence
  Description of Artificial Sequence: Synthetic oligonucleotide
auucagcaaggaacaacag

SEQ ID NO: 1817867 - RNA, 19 nt, Artificial Sequence
  Description of Artificial Sequence: Synthetic oligonucleotide
uguuuggcugccucagauu

SEQ ID NO: 1817868 - RNA, 19 nt, Artificial Sequence
  Description of Artificial Sequence: Synthetic oligonucleotide
cagauugguguaaucucga

SEQ ID NO: 1817869 - RNA, 19 nt, Artificial Sequence
  Description of Artificial Sequence: Synthetic oligonucleotide
ggaugugcacucaugggug

SEQ ID NO: 1817870 - RNA, 19 nt, Artificial Sequence
  Description of Artificial Sequence: Synthetic oligonucleotide
acgagcgucacaggaaagu

SEQ ID NO: 1817871 - RNA, 19 nt, Artificial Sequence
  Description of Artificial Sequence: Synthetic oligonucleotide
cucaugggugcuagcugag

SEQ ID NO: 1817872 - RNA, 19 nt, Artificial Sequence
  Description of Artificial Sequence: Synthetic oligonucleotide
uggcuggaucagcuguuug

SEQ ID NO: 1817873 - RNA, 19 nt, Artificial Sequence
  Description of Artificial Sequence: Synthetic oligonucleotide
ucaggcgggcaacauccaa

SEQ ID NO: 1817874 - RNA, 19 nt, Artificial Sequence
  Description of Artificial Sequence: Synthetic oligonucleotide
auguuguaccucugaacua

SEQ ID NO: 1817875 - RNA, 19 nt, Artificial Sequence
  Description of Artificial Sequence: Synthetic oligonucleotide
acuugccgggcugacaugu

SEQ ID NO: 1817876 - RNA, 19 nt, Artificial Sequence
  Description of Artificial Sequence: Synthetic oligonucleotide
guaaucucgaagggaguca

SEQ ID NO: 1817877 - RNA, 19 nt, Artificial Sequence
  Description of Artificial Sequence: Synthetic oligonucleotide
uggacacuuucuugcuaga

SEQ ID NO: 1817878 - RNA, 19 nt, Artificial Sequence
  Description of Artificial Sequence: Synthetic oligonucleotide
caggccauugucacacauc

SEQ ID NO: 1817879 - RNA, 19 nt, Artificial Sequence
  Description of Artificial Sequence: Synthetic oligonucleotide
gaccaugggccuuccucug

SEQ ID NO: 1817880 - RNA, 19 nt, Artificial Sequence
  Description of Artificial Sequence: Synthetic oligonucleotide
cacaguggguccugccgcc

SEQ ID NO: 1817881 - RNA, 19 nt, Artificial Sequence
  Description of Artificial Sequence: Synthetic oligonucleotide
aacauccaacagacuaagu

SEQ ID NO: 1817882 - RNA, 19 nt, Artificial Sequence
  Description of Artificial Sequence: Synthetic oligonucleotide
gagcaccuccacucggccc

SEQ ID NO: 1817883 - RNA, 19 nt, Artificial Sequence
  Description of Artificial Sequence: Synthetic oligonucleotide
aguucccucuggcuugggu

SEQ ID NO: 1817884 - RNA, 19 nt, Artificial Sequence
  Description of Artificial Sequence: Synthetic oligonucleotide
acgggcuucgggugccacg

SEQ ID NO: 1817885 - RNA, 19 nt, Artificial Sequence
  Description of Artificial Sequence: Synthetic oligonucleotide
caagagcuagugaccagga

SEQ ID NO: 1817886 - RNA, 19 nt, Artificial Sequence
  Description of Artificial Sequence: Synthetic oligonucleotide
auggccgcugagaccaugg

SEQ ID NO: 1817887 - RNA, 19 nt, Artificial Sequence
  Description of Artificial Sequence: Synthetic oligonucleotide
ggcaaugauuuucucagcu

SEQ ID NO: 1817888 - RNA, 19 nt, Artificial Sequence
  Description of Artificial Sequence: Synthetic oligonucleotide
cuauucaucuucccaccaa

SEQ ID NO: 1817889 - RNA, 19 nt, Artificial Sequence
  Description of Artificial Sequence: Synthetic oligonucleotide
uacauccaucacguacuug

SEQ ID NO: 1817890 - RNA, 19 nt, Artificial Sequence
  Description of Artificial Sequence: Synthetic oligonucleotide
agcacgggcuucgggugcc

SEQ ID NO: 1817891 - RNA, 19 nt, Artificial Sequence
  Description of Artificial Sequence: Synthetic oligonucleotide
gcaaggaacaacaguguca

SEQ ID NO: 1817892 - RNA, 19 nt, Artificial Sequence
  Description of Artificial Sequence: Synthetic oligonucleotide
gagcgucacaggaaaguuc

SEQ ID NO: 1817893 - RNA, 19 nt, Artificial Sequence
  Description of Artificial Sequence: Synthetic oligonucleotide
uucaggcgggcaacaucca

SEQ ID NO: 1817894 - RNA, 19 nt, Artificial Sequence
  Description of Artificial Sequence: Synthetic oligonucleotide
ccggccacaaagaacaaca

SEQ ID NO: 1817895 - RNA, 19 nt, Artificial Sequence
  Description of Artificial Sequence: Synthetic oligonucleotide
cuccccggccacaaagaac

SEQ ID NO: 1817896 - RNA, 19 nt, Artificial Sequence
  Description of Artificial Sequence: Synthetic oligonucleotide
caucacguacuugccgggc

SEQ ID NO: 1817897 - RNA, 19 nt, Artificial Sequence
  Description of Artificial Sequence: Synthetic oligonucleotide
cagugucaauagcuuguug

SEQ ID NO: 1817898 - RNA, 19 nt, Artificial Sequence
  Description of Artificial Sequence: Synthetic oligonucleotide
aggaagaaagauagaucaa

SEQ ID NO: 1817899 - RNA, 19 nt, Artificial Sequence
  Description of Artificial Sequence: Synthetic oligonucleotide
uguccuuccagagcauauu

SEQ ID NO: 1817900 - RNA, 19 nt, Artificial Sequence
  Description of Artificial Sequence: Synthetic oligonucleotide
guacuugccgggcugacau

SEQ ID NO: 1817901 - RNA, 19 nt, Artificial Sequence
  Description of Artificial Sequence: Synthetic oligonucleotide
cuucgggugccacgggaac

SEQ ID NO: 1817902 - RNA, 19 nt, Artificial Sequence
  Description of Artificial Sequence: Synthetic oligonucleotide
uuggagguccccugcccaa

SEQ ID NO: 1817903 - RNA, 19 nt, Artificial Sequence
  Description of Artificial Sequence: Synthetic oligonucleotide
ccaacuaauguuguaccuc

SEQ ID NO: 1817904 - RNA, 19 nt, Artificial Sequence
  Description of Artificial Sequence: Synthetic oligonucleotide
agucagagccccaauccau

SEQ ID NO: 1817905 - RNA, 19 nt, Artificial Sequence
  Description of Artificial Sequence: Synthetic oligonucleotide
uucgggugccacgggaacu

SEQ ID NO: 1817906 - RNA, 19 nt, Artificial Sequence
  Description of Artificial Sequence: Synthetic oligonucleotide
uguccagaauggugagcaa

SEQ ID NO: 1817907 - RNA, 19 nt, Artificial Sequence
  Description of Artificial Sequence: Synthetic oligonucleotide
gcaaaggugcggccucugg

SEQ ID NO: 1817908 - RNA, 19 nt, Artificial Sequence
  Description of Artificial Sequence: Synthetic oligonucleotide
cuggcagauugguguaauc

SEQ ID NO: 1817909 - RNA, 19 nt, Artificial Sequence
  Description of Artificial Sequence: Synthetic oligonucleotide
cuuuucuaggugauugcau

SEQ ID NO: 1817910 - RNA, 19 nt, Artificial Sequence
  Description of Artificial Sequence: Synthetic oligonucleotide
ggcaggggccuucauugag

SEQ ID NO: 1817911 - RNA, 19 nt, Artificial Sequence
  Description of Artificial Sequence: Synthetic oligonucleotide
ggagcuguuugugugggca

SEQ ID NO: 1817912 - RNA, 19 nt, Artificial Sequence
  Description of Artificial Sequence: Synthetic oligonucleotide
gcaguucuggugcuagcug

SEQ ID NO: 1817913 - RNA, 19 nt, Artificial Sequence
  Description of Artificial Sequence: Synthetic oligonucleotide
gcgggcaacauccaacaga

SEQ ID NO: 1817914 - RNA, 19 nt, Artificial Sequence
  Description of Artificial Sequence: Synthetic oligonucleotide
aaucucgaagggagucagu

SEQ ID NO: 1817915 - RNA, 19 nt, Artificial Sequence
  Description of Artificial Sequence: Synthetic oligonucleotide
cucgaagggagucagucau

SEQ ID NO: 1817916 - RNA, 19 nt, Artificial Sequence
  Description of Artificial Sequence: Synthetic oligonucleotide
augcagaaacaaggcacca

SEQ ID NO: 1817917 - RNA, 19 nt, Artificial Sequence
  Description of Artificial Sequence: Synthetic oligonucleotide
cagcuauuggcuggaucag

SEQ ID NO: 1817918 - RNA, 19 nt, Artificial Sequence
  Description of Artificial Sequence: Synthetic oligonucleotide
ucaugggugcuagcugagu

SEQ ID NO: 1817919 - RNA, 19 nt, Artificial Sequence
  Description of Artificial Sequence: Synthetic oligonucleotide
gcuuggguuguguguacug

SEQ ID NO: 1817920 - RNA, 19 nt, Artificial Sequence
  Description of Artificial Sequence: Synthetic oligonucleotide
uggagguccccugcccaag

SEQ ID NO: 1817921 - RNA, 19 nt, Artificial Sequence
  Description of Artificial Sequence: Synthetic oligonucleotide
uacuugccgggcugacaug

SEQ ID NO: 1817922 - RNA, 19 nt, Artificial Sequence
  Description of Artificial Sequence: Synthetic oligonucleotide
cauagguacgagcgucaca

SEQ ID NO: 1817923 - RNA, 19 nt, Artificial Sequence
  Description of Artificial Sequence: Synthetic oligonucleotide
uaacucccauagguacgag

SEQ ID NO: 1817924 - RNA, 19 nt, Artificial Sequence
  Description of Artificial Sequence: Synthetic oligonucleotide
cacucggcccugccgagug

SEQ ID NO: 1817925 - RNA, 19 nt, Artificial Sequence
  Description of Artificial Sequence: Synthetic oligonucleotide
gcucucaacugauggccgc

SEQ ID NO: 1817926 - RNA, 19 nt, Artificial Sequence
  Description of Artificial Sequence: Synthetic oligonucleotide
gcuauucaucuucccacca

SEQ ID NO: 1817927 - RNA, 19 nt, Artificial Sequence
  Description of Artificial Sequence: Synthetic oligonucleotide
aguggguccugccgccgcu

SEQ ID NO: 1817928 - RNA, 19 nt, Artificial Sequence
  Description of Artificial Sequence: Synthetic oligonucleotide
ccagaauggugagcaaagg

SEQ ID NO: 1817929 - RNA, 19 nt, Artificial Sequence
  Description of Artificial Sequence: Synthetic oligonucleotide
cuggggugaucuccucuac

SEQ ID NO: 1817930 - RNA, 19 nt, Artificial Sequence
  Description of Artificial Sequence: Synthetic oligonucleotide
uggcuuggguuguguguac

SEQ ID NO: 1817931 - RNA, 19 nt, Artificial Sequence
  Description of Artificial Sequence: Synthetic oligonucleotide
gugcuagcugaguuguuua

SEQ ID NO: 1817932 - RNA, 19 nt, Artificial Sequence
  Description of Artificial Sequence: Synthetic oligonucleotide
caacugauggccgcugaga

SEQ ID NO: 1817933 - RNA, 19 nt, Artificial Sequence
  Description of Artificial Sequence: Synthetic oligonucleotide
caguuagcgcagcuauuca

SEQ ID NO: 1817934 - RNA, 19 nt, Artificial Sequence
  Description of Artificial Sequence: Synthetic oligonucleotide
cuggaagguccuuuaccaa

SEQ ID NO: 1817935 - RNA, 19 nt, Artificial Sequence
  Description of Artificial Sequence: Synthetic oligonucleotide
gaagcacacuaugaacagu

SEQ ID NO: 1817936 - RNA, 19 nt, Artificial Sequence
  Description of Artificial Sequence: Synthetic oligonucleotide
cugagagcuccagcacggg

SEQ ID NO: 1817937 - RNA, 19 nt, Artificial Sequence
  Description of Artificial Sequence: Synthetic oligonucleotide
acguacuugccgggcugac

SEQ ID NO: 1817938 - RNA, 19 nt, Artificial Sequence
  Description of Artificial Sequence: Synthetic oligonucleotide
ggccgcugagaccaugggc

SEQ ID NO: 1817939 - RNA, 19 nt, Artificial Sequence
  Description of Artificial Sequence: Synthetic oligonucleotide
auguccuuccagagcauau

SEQ ID NO: 1817940 - RNA, 19 nt, Artificial Sequence
  Description of Artificial Sequence: Synthetic oligonucleotide
gauggccgcugagaccaug

SEQ ID NO: 1817941 - RNA, 19 nt, Artificial Sequence
  Description of Artificial Sequence: Synthetic oligonucleotide
ccaucacguacuugccggg

SEQ ID NO: 1817942 - RNA, 19 nt, Artificial Sequence
  Description of Artificial Sequence: Synthetic oligonucleotide
cucaacugauggccgcuga

SEQ ID NO: 1817943 - RNA, 19 nt, Artificial Sequence
  Description of Artificial Sequence: Synthetic oligonucleotide
cugcaguccucaucauuga

SEQ ID NO: 1817944 - RNA, 19 nt, Artificial Sequence
  Description of Artificial Sequence: Synthetic oligonucleotide
cuggugcuagcuggucagg

SEQ ID NO: 1817945 - RNA, 19 nt, Artificial Sequence
  Description of Artificial Sequence: Synthetic oligonucleotide
gcauuggagucugagagcu

SEQ ID NO: 1817946 - RNA, 19 nt, Artificial Sequence
  Description of Artificial Sequence: Synthetic oligonucleotide
gcuguuugugugggcagag

SEQ ID NO: 1817947 - RNA, 19 nt, Artificial Sequence
  Description of Artificial Sequence: Synthetic oligonucleotide
gccgcugugaggaugugca

SEQ ID NO: 1817948 - RNA, 19 nt, Artificial Sequence
  Description of Artificial Sequence: Synthetic oligonucleotide
auuggcuggaucagcuguu

SEQ ID NO: 1817949 - RNA, 19 nt, Artificial Sequence
  Description of Artificial Sequence: Synthetic oligonucleotide
aaguucccucuggcuuggg

SEQ ID NO: 1817950 - RNA, 19 nt, Artificial Sequence
  Description of Artificial Sequence: Synthetic oligonucleotide
uacugaccccagagucaga

SEQ ID NO: 1817951 - RNA, 19 nt, Artificial Sequence
  Description of Artificial Sequence: Synthetic oligonucleotide
caguggguccugccgccgc

SEQ ID NO: 1817952 - RNA, 19 nt, Artificial Sequence
  Description of Artificial Sequence: Synthetic oligonucleotide
cagcaaggaacaacagugu

SEQ ID NO: 1817953 - RNA, 19 nt, Artificial Sequence
  Description of Artificial Sequence: Synthetic oligonucleotide
cuugccgggcugacauguc

SEQ ID NO: 1817954 - RNA, 19 nt, Artificial Sequence
  Description of Artificial Sequence: Synthetic oligonucleotide
gguacgagcgucacaggaa

SEQ ID NO: 1817955 - RNA, 19 nt, Artificial Sequence
  Description of Artificial Sequence: Synthetic oligonucleotide
aggggccuucauugagcug

SEQ ID NO: 1817956 - RNA, 19 nt, Artificial Sequence
  Description of Artificial Sequence: Synthetic oligonucleotide
cacgggaacucccugcagu

SEQ ID NO: 1817957 - RNA, 19 nt, Artificial Sequence
  Description of Artificial Sequence: Synthetic oligonucleotide
gcaggggccuucauugagc

SEQ ID NO: 1817958 - RNA, 19 nt, Artificial Sequence
  Description of Artificial Sequence: Synthetic oligonucleotide
gugccacgggaacucccug

SEQ ID NO: 1817959 - RNA, 19 nt, Artificial Sequence
  Description of Artificial Sequence: Synthetic oligonucleotide
guccugccgccgcugugag

SEQ ID NO: 1817960 - RNA, 19 nt, Artificial Sequence
  Description of Artificial Sequence: Synthetic oligonucleotide
gguuggacacuuucuugcu

SEQ ID NO: 1817961 - RNA, 19 nt, Artificial Sequence
  Description of Artificial Sequence: Synthetic oligonucleotide
guccuuccagagcauauuu

SEQ ID NO: 1817962 - RNA, 19 nt, Artificial Sequence
  Description of Artificial Sequence: Synthetic oligonucleotide
caugggugcuagcugaguu

SEQ ID NO: 1817963 - RNA, 19 nt, Artificial Sequence
  Description of Artificial Sequence: Synthetic oligonucleotide
gcuauuggcuggaucagcu

SEQ ID NO: 1817964 - RNA, 19 nt, Artificial Sequence
  Description of Artificial Sequence: Synthetic oligonucleotide
ggcgggcaacauccaacag

SEQ ID NO: 1817965 - RNA, 19 nt, Artificial Sequence
  Description of Artificial Sequence: Synthetic oligonucleotide
ccccaauccauugucccug

SEQ ID NO: 1817966 - RNA, 19 nt, Artificial Sequence
  Description of Artificial Sequence: Synthetic oligonucleotide
ccugccgccgcugugagga

SEQ ID NO: 1817967 - RNA, 19 nt, Artificial Sequence
  Description of Artificial Sequence: Synthetic oligonucleotide
gggcauggucaagaacaag

SEQ ID NO: 1817968 - RNA, 19 nt, Artificial Sequence
  Description of Artificial Sequence: Synthetic oligonucleotide
ccuccacucggcccugccg

SEQ ID NO: 1817969 - RNA, 19 nt, Artificial Sequence
  Description of Artificial Sequence: Synthetic oligonucleotide
gccacgggaacucccugca

SEQ ID NO: 1817970 - RNA, 19 nt, Artificial Sequence
  Description of Artificial Sequence: Synthetic oligonucleotide
gguccccugcccaagaacu

SEQ ID NO: 1817971 - RNA, 19 nt, Artificial Sequence
  Description of Artificial Sequence: Synthetic oligonucleotide
cugagaccaugggccuucc

SEQ ID NO: 1817972 - RNA, 19 nt, Artificial Sequence
  Description of Artificial Sequence: Synthetic oligonucleotide
ggacacuuucuugcuagaa

SEQ ID NO: 1817973 - RNA, 19 nt, Artificial Sequence
  Description of Artificial Sequence: Synthetic oligonucleotide
cugacauguccagaauggu

SEQ ID NO: 1817974 - RNA, 19 nt, Artificial Sequence
  Description of Artificial Sequence: Synthetic oligonucleotide
ggcuucgggugccacggga

SEQ ID NO: 1817975 - RNA, 19 nt, Artificial Sequence
  Description of Artificial Sequence: Synthetic oligonucleotide
ucucagcuauuggcuggau

SEQ ID NO: 1817976 - RNA, 19 nt, Artificial Sequence
  Description of Artificial Sequence: Synthetic oligonucleotide
gccgagugaucaccucccc

SEQ ID NO: 1817977 - RNA, 19 nt, Artificial Sequence
  Description of Artificial Sequence: Synthetic oligonucleotide
ucggcccugccgagugauc

SEQ ID NO: 1817978 - RNA, 19 nt, Artificial Sequence
  Description of Artificial Sequence: Synthetic oligonucleotide
agcuagugaccaggagaau

SEQ ID NO: 1817979 - RNA, 19 nt, Artificial Sequence
  Description of Artificial Sequence: Synthetic oligonucleotide
gguccugccgccgcuguga

SEQ ID NO: 1817980 - RNA, 19 nt, Artificial Sequence
  Description of Artificial Sequence: Synthetic oligonucleotide
ugauggccgcugagaccau

SEQ ID NO: 1817981 - RNA, 19 nt, Artificial Sequence
  Description of Artificial Sequence: Synthetic oligonucleotide
cccauagguacgagcguca

SEQ ID NO: 1817982 - RNA, 19 nt, Artificial Sequence
  Description of Artificial Sequence: Synthetic oligonucleotide
cacacaucccaagcagucu

SEQ ID NO: 1817983 - RNA, 19 nt, Artificial Sequence
  Description of Artificial Sequence: Synthetic oligonucleotide
cacguacuugccgggcuga

SEQ ID NO: 1817984 - RNA, 19 nt, Artificial Sequence
  Description of Artificial Sequence: Synthetic oligonucleotide
gcgcagcuauucaucuucc

SEQ ID NO: 1817985 - RNA, 19 nt, Artificial Sequence
  Description of Artificial Sequence: Synthetic oligonucleotide
ccauagguacgagcgucac

SEQ ID NO: 1817986 - RNA, 19 nt, Artificial Sequence
  Description of Artificial Sequence: Synthetic oligonucleotide
gcggccucuggcagauugg

SEQ ID NO: 1817987 - RNA, 19 nt, Artificial Sequence
  Description of Artificial Sequence: Synthetic oligonucleotide
ggagguccccugcccaaga

SEQ ID NO: 1817988 - RNA, 19 nt, Artificial Sequence
  Description of Artificial Sequence: Synthetic oligonucleotide
ggugcuagcugaguuguuu

SEQ ID NO: 1817989 - RNA, 19 nt, Artificial Sequence
  Description of Artificial Sequence: Synthetic oligonucleotide
cugugaggaugugcacuca

SEQ ID NO: 1817990 - RNA, 19 nt, Artificial Sequence
  Description of Artificial Sequence: Synthetic oligonucleotide
cucccauagguacgagcgu

SEQ ID NO: 1817991 - RNA, 19 nt, Artificial Sequence
  Description of Artificial Sequence: Synthetic oligonucleotide
cucucaacugauggccgcu

SEQ ID NO: 1817992 - RNA, 19 nt, Artificial Sequence
  Description of Artificial Sequence: Synthetic oligonucleotide
gcccugccgagugaucacc

SEQ ID NO: 1817993 - RNA, 19 nt, Artificial Sequence
  Description of Artificial Sequence: Synthetic oligonucleotide
cuacauccaucacguacuu

SEQ ID NO: 1817994 - RNA, 19 nt, Artificial Sequence
  Description of Artificial Sequence: Synthetic oligonucleotide
ccaacagacuaaguaccaa

SEQ ID NO: 1817995 - RNA, 19 nt, Artificial Sequence
  Description of Artificial Sequence: Synthetic oligonucleotide
gggugccacgggaacuccc

SEQ ID NO: 1817996 - RNA, 19 nt, Artificial Sequence
  Description of Artificial Sequence: Synthetic oligonucleotide
cccggccacaaagaacaac

SEQ ID NO: 1817997 - RNA, 19 nt, Artificial Sequence
  Description of Artificial Sequence: Synthetic oligonucleotide
gcuagcugaguuguuuaau

SEQ ID NO: 1817998 - RNA, 19 nt, Artificial Sequence
  Description of Artificial Sequence: Synthetic oligonucleotide
ccacgggaacucccugcag

SEQ ID NO: 1817999 - RNA, 19 nt, Artificial Sequence
  Description of Artificial Sequence: Synthetic oligonucleotide
gccccaauccauugucccu

SEQ ID NO: 1818000 - RNA, 19 nt, Artificial Sequence
  Description of Artificial Sequence: Synthetic oligonucleotide
ggugccacgggaacucccu

SEQ ID NO: 1818001 - RNA, 19 nt, Artificial Sequence
  Description of Artificial Sequence: Synthetic oligonucleotide
cacgggcuucgggugccac

SEQ ID NO: 1818002 - RNA, 19 nt, Artificial Sequence
  Description of Artificial Sequence: Synthetic oligonucleotide
gcuucgggugccacgggaa

SEQ ID NO: 1818003 - RNA, 19 nt, Artificial Sequence
  Description of Artificial Sequence: Synthetic oligonucleotide
ccgcugugaggaugugcac

SEQ ID NO: 1818004 - RNA, 19 nt, Artificial Sequence
  Description of Artificial Sequence: Synthetic oligonucleotide
caccuccacucggcccugc

SEQ ID NO: 1818005 - RNA, 19 nt, Artificial Sequence
  Description of Artificial Sequence: Synthetic oligonucleotide
cagagaggccugcuuuauu

SEQ ID NO: 1818006 - RNA, 19 nt, Artificial Sequence
  Description of Artificial Sequence: Synthetic oligonucleotide
ggggaggauggcuggguuu

SEQ ID NO: 1818007 - RNA, 19 nt, Artificial Sequence
  Description of Artificial Sequence: Synthetic oligonucleotide
gccucagauucuccaucgu

SEQ ID NO: 1818008 - RNA, 19 nt, Artificial Sequence
  Description of Artificial Sequence: Synthetic oligonucleotide
ggcuuggguuguguguacu

SEQ ID NO: 1818009 - RNA, 19 nt, Artificial Sequence
  Description of Artificial Sequence: Synthetic oligonucleotide
gccgccgcugugaggaugu

SEQ ID NO: 1818010 - RNA, 19 nt, Artificial Sequence
  Description of Artificial Sequence: Synthetic oligonucleotide
ccucuacauccaucacgua

SEQ ID NO: 1818011 - RNA, 19 nt, Artificial Sequence
  Description of Artificial Sequence: Synthetic oligonucleotide
cccugccgagugaucaccu

SEQ ID NO: 1818012 - RNA, 19 nt, Artificial Sequence
  Description of Artificial Sequence: Synthetic oligonucleotide
ccgcugagaccaugggccu

SEQ ID NO: 1818013 - RNA, 19 nt, Artificial Sequence
  Description of Artificial Sequence: Synthetic oligonucleotide
cccugcaguccucaucauu

SEQ ID NO: 1818014 - RNA, 19 nt, Artificial Sequence
  Description of Artificial Sequence: Synthetic oligonucleotide
cgagcgucacaggaaaguu

SEQ ID NO: 1818015 - RNA, 19 nt, Artificial Sequence
  Description of Artificial Sequence: Synthetic oligonucleotide
cugccgccgcugugaggau

SEQ ID NO: 1818016 - RNA, 19 nt, Artificial Sequence
  Description of Artificial Sequence: Synthetic oligonucleotide
gggugcuagcugaguuguu

SEQ ID NO: 1818017 - RNA, 19 nt, Artificial Sequence
  Description of Artificial Sequence: Synthetic oligonucleotide
ccgccgcugugaggaugug

SEQ ID NO: 1818018 - RNA, 19 nt, Artificial Sequence
  Description of Artificial Sequence: Synthetic oligonucleotide
uaaacuuagacauauuucc

SEQ ID NO: 1818019 - RNA, 19 nt, Artificial Sequence
  Description of Artificial Sequence: Synthetic oligonucleotide
aaucccacagccuagacag

SEQ ID NO: 1818020 - RNA, 19 nt, Artificial Sequence
  Description of Artificial Sequence: Synthetic oligonucleotide
uucauuacaacuucggagg

SEQ ID NO: 1818021 - RNA, 19 nt, Artificial Sequence
  Description of Artificial Sequence: Synthetic oligonucleotide
aauaaugaguuuaaucccc

SEQ ID NO: 1818022 - RNA, 19 nt, Artificial Sequence
  Description of Artificial Sequence: Synthetic oligonucleotide
uauuguguagucaggaugg

SEQ ID NO: 1818023 - RNA, 19 nt, Artificial Sequence
  Description of Artificial Sequence: Synthetic oligonucleotide
ucuuaguaaacuuagacau

SEQ ID NO: 1818024 - RNA, 19 nt, Artificial Sequence
  Description of Artificial Sequence: Synthetic oligonucleotide
aagaucaguaaauaaugag

SEQ ID NO: 1818025 - RNA, 19 nt, Artificial Sequence
  Description of Artificial Sequence: Synthetic oligonucleotide
augaguuuaauccccaaac

SEQ ID NO: 1818026 - RNA, 19 nt, Artificial Sequence
  Description of Artificial Sequence: Synthetic oligonucleotide
aauauacuuacauuaaaua

SEQ ID NO: 1818027 - RNA, 19 nt, Artificial Sequence
  Description of Artificial Sequence: Synthetic oligonucleotide
ucuuuaacaagcaacuugu

SEQ ID NO: 1818028 - RNA, 19 nt, Artificial Sequence
  Description of Artificial Sequence: Synthetic oligonucleotide
aaucacaguuuauagcggg

SEQ ID NO: 1818029 - RNA, 19 nt, Artificial Sequence
  Description of Artificial Sequence: Synthetic oligonucleotide
auuacugccaccuuuccuc

SEQ ID NO: 1818030 - RNA, 19 nt, Artificial Sequence
  Description of Artificial Sequence: Synthetic oligonucleotide
auuucaguaagaucuacag

SEQ ID NO: 1818031 - RNA, 19 nt, Artificial Sequence
  Description of Artificial Sequence: Synthetic oligonucleotide
uaauccccaaacaacaucc

SEQ ID NO: 1818032 - RNA, 19 nt, Artificial Sequence
  Description of Artificial Sequence: Synthetic oligonucleotide
caaucugccagucacaccg

SEQ ID NO: 1818033 - RNA, 19 nt, Artificial Sequence
  Description of Artificial Sequence: Synthetic oligonucleotide
uaaaauacgcauuucagua

SEQ ID NO: 1818034 - RNA, 19 nt, Artificial Sequence
  Description of Artificial Sequence: Synthetic oligonucleotide
uuagucaagcauuucaccc

SEQ ID NO: 1818035 - RNA, 19 nt, Artificial Sequence
  Description of Artificial Sequence: Synthetic oligonucleotide
cuuauugccaaucugccag

SEQ ID NO: 1818036 - RNA, 19 nt, Artificial Sequence
  Description of Artificial Sequence: Synthetic oligonucleotide
cuucaggacaacauggucg

SEQ ID NO: 1818037 - RNA, 19 nt, Artificial Sequence
  Description of Artificial Sequence: Synthetic oligonucleotide
aagaucuacagugaaugac

SEQ ID NO: 1818038 - RNA, 19 nt, Artificial Sequence
  Description of Artificial Sequence: Synthetic oligonucleotide
uuuaacaagcaacuugucu

SEQ ID NO: 1818039 - RNA, 19 nt, Artificial Sequence
  Description of Artificial Sequence: Synthetic oligonucleotide
ucucuuaguaaacuuagac

SEQ ID NO: 1818040 - RNA, 19 nt, Artificial Sequence
  Description of Artificial Sequence: Synthetic oligonucleotide
guucauuacaacuucggag

SEQ ID NO: 1818041 - RNA, 19 nt, Artificial Sequence
  Description of Artificial Sequence: Synthetic oligonucleotide
uguguagucaggauggucu

SEQ ID NO: 1818042 - RNA, 19 nt, Artificial Sequence
  Description of Artificial Sequence: Synthetic oligonucleotide
uucaauauucaguggauca

SEQ ID NO: 1818043 - RNA, 19 nt, Artificial Sequence
  Description of Artificial Sequence: Synthetic oligonucleotide
auaaaauacgcauuucagu

SEQ ID NO: 1818044 - RNA, 19 nt, Artificial Sequence
  Description of Artificial Sequence: Synthetic oligonucleotide
uuuuagucaagcauuucac

SEQ ID NO: 1818045 - RNA, 19 nt, Artificial Sequence
  Description of Artificial Sequence: Synthetic oligonucleotide
uguacuuuacauguacagg

SEQ ID NO: 1818046 - RNA, 19 nt, Artificial Sequence
  Description of Artificial Sequence: Synthetic oligonucleotide
ugaaugacuaugcauucug

SEQ ID NO: 1818047 - RNA, 19 nt, Artificial Sequence
  Description of Artificial Sequence: Synthetic oligonucleotide
ugggcuuacagucagcuga

SEQ ID NO: 1818048 - RNA, 19 nt, Artificial Sequence
  Description of Artificial Sequence: Synthetic oligonucleotide
uaaaugauguucagcagcu

SEQ ID NO: 1818049 - RNA, 19 nt, Artificial Sequence
  Description of Artificial Sequence: Synthetic oligonucleotide
ucuacagugaaugacuaug

SEQ ID NO: 1818050 - RNA, 19 nt, Artificial Sequence
  Description of Artificial Sequence: Synthetic oligonucleotide
aauugaauguucucuuagu

SEQ ID NO: 1818051 - RNA, 19 nt, Artificial Sequence
  Description of Artificial Sequence: Synthetic oligonucleotide
aguuuaauccccaaacaac

SEQ ID NO: 1818052 - RNA, 19 nt, Artificial Sequence
  Description of Artificial Sequence: Synthetic oligonucleotide
ugcuguauuguguagucag

SEQ ID NO: 1818053 - RNA, 19 nt, Artificial Sequence
  Description of Artificial Sequence: Synthetic oligonucleotide
uauagcggguuucuuauug

SEQ ID NO: 1818054 - RNA, 19 nt, Artificial Sequence
  Description of Artificial Sequence: Synthetic oligonucleotide
aggacaccgauuuuguugg

SEQ ID NO: 1818055 - RNA, 19 nt, Artificial Sequence
  Description of Artificial Sequence: Synthetic oligonucleotide
gacuaggacaaucccaagg

SEQ ID NO: 1818056 - RNA, 19 nt, Artificial Sequence
  Description of Artificial Sequence: Synthetic oligonucleotide
agcaacuugucucucacag

SEQ ID NO: 1818057 - RNA, 19 nt, Artificial Sequence
  Description of Artificial Sequence: Synthetic oligonucleotide
uguacaggguaaauuagcu

SEQ ID NO: 1818058 - RNA, 19 nt, Artificial Sequence
  Description of Artificial Sequence: Synthetic oligonucleotide
guaagaucuacagugaaug

SEQ ID NO: 1818059 - RNA, 19 nt, Artificial Sequence
  Description of Artificial Sequence: Synthetic oligonucleotide
ugaguucauuacaacuucg

SEQ ID NO: 1818060 - RNA, 19 nt, Artificial Sequence
  Description of Artificial Sequence: Synthetic oligonucleotide
uuuagucaagcauuucacc

SEQ ID NO: 1818061 - RNA, 19 nt, Artificial Sequence
  Description of Artificial Sequence: Synthetic oligonucleotide
aguaaacuuagacauauuu

SEQ ID NO: 1818062 - RNA, 19 nt, Artificial Sequence
  Description of Artificial Sequence: Synthetic oligonucleotide
ucguggaagaagcuaagag

SEQ ID NO: 1818063 - RNA, 19 nt, Artificial Sequence
  Description of Artificial Sequence: Synthetic oligonucleotide
cugaaagcaaugaagcuug

SEQ ID NO: 1818064 - RNA, 19 nt, Artificial Sequence
  Description of Artificial Sequence: Synthetic oligonucleotide
ugaguuuaauccccaaaca

SEQ ID NO: 1818065 - RNA, 19 nt, Artificial Sequence
  Description of Artificial Sequence: Synthetic oligonucleotide
acgcauuucaguaagaucu

SEQ ID NO: 1818066 - RNA, 19 nt, Artificial Sequence
  Description of Artificial Sequence: Synthetic oligonucleotide
gaagcuaagagaaugugca

SEQ ID NO: 1818067 - RNA, 19 nt, Artificial Sequence
  Description of Artificial Sequence: Synthetic oligonucleotide
uucuuauugccaaucugcc

SEQ ID NO: 1818068 - RNA, 19 nt, Artificial Sequence
  Description of Artificial Sequence: Synthetic oligonucleotide
uuaguaaacuuagacauau

SEQ ID NO: 1818069 - RNA, 19 nt, Artificial Sequence
  Description of Artificial Sequence: Synthetic oligonucleotide
agugaaugacuaugcauuc

SEQ ID NO: 1818070 - RNA, 19 nt, Artificial Sequence
  Description of Artificial Sequence: Synthetic oligonucleotide
acugaaauuuuccacccug

SEQ ID NO: 1818071 - RNA, 19 nt, Artificial Sequence
  Description of Artificial Sequence: Synthetic oligonucleotide
cagcugaaagcaaugaagc

SEQ ID NO: 1818072 - RNA, 19 nt, Artificial Sequence
  Description of Artificial Sequence: Synthetic oligonucleotide
ugacuaugcauucugggaa

SEQ ID NO: 1818073 - RNA, 19 nt, Artificial Sequence
  Description of Artificial Sequence: Synthetic oligonucleotide
uuuauagcggguuucuuau

SEQ ID NO: 1818074 - RNA, 19 nt, Artificial Sequence
  Description of Artificial Sequence: Synthetic oligonucleotide
agagacaacugugacaguc

SEQ ID NO: 1818075 - RNA, 19 nt, Artificial Sequence
  Description of Artificial Sequence: Synthetic oligonucleotide
uucaggacaacauggucgc

SEQ ID NO: 1818076 - RNA, 19 nt, Artificial Sequence
  Description of Artificial Sequence: Synthetic oligonucleotide
acaacuucggaggaauccc

SEQ ID NO: 1818077 - RNA, 19 nt, Artificial Sequence
  Description of Artificial Sequence: Synthetic oligonucleotide
gacgcgacagcacucacag

SEQ ID NO: 1818078 - RNA, 19 nt, Artificial Sequence
  Description of Artificial Sequence: Synthetic oligonucleotide
caugucauuacaucacuug

SEQ ID NO: 1818079 - RNA, 19 nt, Artificial Sequence
  Description of Artificial Sequence: Synthetic oligonucleotide
aaagaucaguaaauaauga

SEQ ID NO: 1818080 - RNA, 19 nt, Artificial Sequence
  Description of Artificial Sequence: Synthetic oligonucleotide
agaucaguaaauaaugagu

SEQ ID NO: 1818081 - RNA, 19 nt, Artificial Sequence
  Description of Artificial Sequence: Synthetic oligonucleotide
auagcggguuucuuauugc

SEQ ID NO: 1818082 - RNA, 19 nt, Artificial Sequence
  Description of Artificial Sequence: Synthetic oligonucleotide
uugaauguucucuuaguaa

SEQ ID NO: 1818083 - RNA, 19 nt, Artificial Sequence
  Description of Artificial Sequence: Synthetic oligonucleotide
uuagacauauuuccccugu

SEQ ID NO: 1818084 - RNA, 19 nt, Artificial Sequence
  Description of Artificial Sequence: Synthetic oligonucleotide
uguucucuuaguaaacuua

SEQ ID NO: 1818085 - RNA, 19 nt, Artificial Sequence
  Description of Artificial Sequence: Synthetic oligonucleotide
cagacaacgcucucgaggc

SEQ ID NO: 1818086 - RNA, 19 nt, Artificial Sequence
  Description of Artificial Sequence: Synthetic oligonucleotide
agucacaccgaacauguca

SEQ ID NO: 1818087 - RNA, 19 nt, Artificial Sequence
  Description of Artificial Sequence: Synthetic oligonucleotide
caauugaauguucucuuag

SEQ ID NO: 1818088 - RNA, 19 nt, Artificial Sequence
  Description of Artificial Sequence: Synthetic oligonucleotide
uuugaggccgucaucccgc

SEQ ID NO: 1818089 - RNA, 19 nt, Artificial Sequence
  Description of Artificial Sequence: Synthetic oligonucleotide
uuaauccccaaacaacauc

SEQ ID NO: 1818090 - RNA, 19 nt, Artificial Sequence
  Description of Artificial Sequence: Synthetic oligonucleotide
auggucgcaagacuaggac

SEQ ID NO: 1818091 - RNA, 19 nt, Artificial Sequence
  Description of Artificial Sequence: Synthetic oligonucleotide
ucacuugugcaggacaccg

SEQ ID NO: 1818092 - RNA, 19 nt, Artificial Sequence
  Description of Artificial Sequence: Synthetic oligonucleotide
acaccgaacaugucauuac

SEQ ID NO: 1818093 - RNA, 19 nt, Artificial Sequence
  Description of Artificial Sequence: Synthetic oligonucleotide
uugccaaucugccagucac

SEQ ID NO: 1818094 - RNA, 19 nt, Artificial Sequence
  Description of Artificial Sequence: Synthetic oligonucleotide
gaguucauuacaacuucgg

SEQ ID NO: 1818095 - RNA, 19 nt, Artificial Sequence
  Description of Artificial Sequence: Synthetic oligonucleotide
cucuuaguaaacuuagaca

SEQ ID NO: 1818096 - RNA, 19 nt, Artificial Sequence
  Description of Artificial Sequence: Synthetic oligonucleotide
aaacaacauccuucaaugu

SEQ ID NO: 1818097 - RNA, 19 nt, Artificial Sequence
  Description of Artificial Sequence: Synthetic oligonucleotide
gaagcagacaacgcucucg

SEQ ID NO: 1818098 - RNA, 19 nt, Artificial Sequence
  Description of Artificial Sequence: Synthetic oligonucleotide
uaacaagcaacuugucucu

SEQ ID NO: 1818099 - RNA, 19 nt, Artificial Sequence
  Description of Artificial Sequence: Synthetic oligonucleotide
agcuaagagaaugugcauc

SEQ ID NO: 1818100 - RNA, 19 nt, Artificial Sequence
  Description of Artificial Sequence: Synthetic oligonucleotide
guuuaauccccaaacaaca

SEQ ID NO: 1818101 - RNA, 19 nt, Artificial Sequence
  Description of Artificial Sequence: Synthetic oligonucleotide
acaaaucuguuccaaaaua

SEQ ID NO: 1818102 - RNA, 19 nt, Artificial Sequence
  Description of Artificial Sequence: Synthetic oligonucleotide
gaguuuaauccccaaacaa

SEQ ID NO: 1818103 - RNA, 19 nt, Artificial Sequence
  Description of Artificial Sequence: Synthetic oligonucleotide
aagaagcuaagagaaugug

SEQ ID NO: 1818104 - RNA, 19 nt, Artificial Sequence
  Description of Artificial Sequence: Synthetic oligonucleotide
aguucauuacaacuucgga

SEQ ID NO: 1818105 - RNA, 19 nt, Artificial Sequence
  Description of Artificial Sequence: Synthetic oligonucleotide
guaguaacccucaucuggg

SEQ ID NO: 1818106 - RNA, 19 nt, Artificial Sequence
  Description of Artificial Sequence: Synthetic oligonucleotide
aauuacaaaucuguuccaa

SEQ ID NO: 1818107 - RNA, 19 nt, Artificial Sequence
  Description of Artificial Sequence: Synthetic oligonucleotide
auugaauguucucuuagua

SEQ ID NO: 1818108 - RNA, 19 nt, Artificial Sequence
  Description of Artificial Sequence: Synthetic oligonucleotide
aagacuaggacaaucccaa

SEQ ID NO: 1818109 - RNA, 19 nt, Artificial Sequence
  Description of Artificial Sequence: Synthetic oligonucleotide
uacaacuucggaggaaucc

SEQ ID NO: 1818110 - RNA, 19 nt, Artificial Sequence
  Description of Artificial Sequence: Synthetic oligonucleotide
guaaacuuagacauauuuc

SEQ ID NO: 1818111 - RNA, 19 nt, Artificial Sequence
  Description of Artificial Sequence: Synthetic oligonucleotide
uaagggaagcagacaacgc

SEQ ID NO: 1818112 - RNA, 19 nt, Artificial Sequence
  Description of Artificial Sequence: Synthetic oligonucleotide
accaugcccgaccagcggc

SEQ ID NO: 1818113 - RNA, 19 nt, Artificial Sequence
  Description of Artificial Sequence: Synthetic oligonucleotide
uaagaucuacagugaauga

SEQ ID NO: 1818114 - RNA, 19 nt, Artificial Sequence
  Description of Artificial Sequence: Synthetic oligonucleotide
cacagaaacccuccgagug

SEQ ID NO: 1818115 - RNA, 19 nt, Artificial Sequence
  Description of Artificial Sequence: Synthetic oligonucleotide
ugucucguaaaugauguuc

SEQ ID NO: 1818116 - RNA, 19 nt, Artificial Sequence
  Description of Artificial Sequence: Synthetic oligonucleotide
ucuuauugccaaucugcca

SEQ ID NO: 1818117 - RNA, 19 nt, Artificial Sequence
  Description of Artificial Sequence: Synthetic oligonucleotide
caaucacaguuuauagcgg

SEQ ID NO: 1818118 - RNA, 19 nt, Artificial Sequence
  Description of Artificial Sequence: Synthetic oligonucleotide
gcuaagagaaugugcaucc

SEQ ID NO: 1818119 - RNA, 19 nt, Artificial Sequence
  Description of Artificial Sequence: Synthetic oligonucleotide
auuacaaaucuguuccaaa

SEQ ID NO: 1818120 - RNA, 19 nt, Artificial Sequence
  Description of Artificial Sequence: Synthetic oligonucleotide
ucauuacaacuucggagga

SEQ ID NO: 1818121 - RNA, 19 nt, Artificial Sequence
  Description of Artificial Sequence: Synthetic oligonucleotide
caagcgcuauccucaaugg

SEQ ID NO: 1818122 - RNA, 19 nt, Artificial Sequence
  Description of Artificial Sequence: Synthetic oligonucleotide
gaagcaagcgcuauccuca

SEQ ID NO: 1818123 - RNA, 19 nt, Artificial Sequence
  Description of Artificial Sequence: Synthetic oligonucleotide
agcaccgcgagucaggcga

SEQ ID NO: 1818124 - RNA, 19 nt, Artificial Sequence
  Description of Artificial Sequence: Synthetic oligonucleotide
uguccgggauccuuugagg

SEQ ID NO: 1818125 - RNA, 19 nt, Artificial Sequence
  Description of Artificial Sequence: Synthetic oligonucleotide
acaguuuauagcggguuuc

SEQ ID NO: 1818126 - RNA, 19 nt, Artificial Sequence
  Description of Artificial Sequence: Synthetic oligonucleotide
ucaauguccuagugggagc

SEQ ID NO: 1818127 - RNA, 19 nt, Artificial Sequence
  Description of Artificial Sequence: Synthetic oligonucleotide
ucauuacaucacuugugca

SEQ ID NO: 1818128 - RNA, 19 nt, Artificial Sequence
  Description of Artificial Sequence: Synthetic oligonucleotide
gcagacaacgcucucgagg

SEQ ID NO: 1818129 - RNA, 19 nt, Artificial Sequence
  Description of Artificial Sequence: Synthetic oligonucleotide
cuaggacaaucccaagggg

SEQ ID NO: 1818130 - RNA, 19 nt, Artificial Sequence
  Description of Artificial Sequence: Synthetic oligonucleotide
uugcuugccagcguuagca

SEQ ID NO: 1818131 - RNA, 19 nt, Artificial Sequence
  Description of Artificial Sequence: Synthetic oligonucleotide
cuuugaggccgucaucccg

SEQ ID NO: 1818132 - RNA, 19 nt, Artificial Sequence
  Description of Artificial Sequence: Synthetic oligonucleotide
aacauggucgcaagacuag

SEQ ID NO: 1818133 - RNA, 19 nt, Artificial Sequence
  Description of Artificial Sequence: Synthetic oligonucleotide
uagcguuugauguauucau

SEQ ID NO: 1818134 - RNA, 19 nt, Artificial Sequence
  Description of Artificial Sequence: Synthetic oligonucleotide
ucaucuggcauagcguuug

SEQ ID NO: 1818135 - RNA, 19 nt, Artificial Sequence
  Description of Artificial Sequence: Synthetic oligonucleotide
uucucuuaguaaacuuaga

SEQ ID NO: 1818136 - RNA, 19 nt, Artificial Sequence
  Description of Artificial Sequence: Synthetic oligonucleotide
caguaaacauguuaaggga

SEQ ID NO: 1818137 - RNA, 19 nt, Artificial Sequence
  Description of Artificial Sequence: Synthetic oligonucleotide
uguauuguguagucaggau

SEQ ID NO: 1818138 - RNA, 19 nt, Artificial Sequence
  Description of Artificial Sequence: Synthetic oligonucleotide
auuacaacuucggaggaau

SEQ ID NO: 1818139 - RNA, 19 nt, Artificial Sequence
  Description of Artificial Sequence: Synthetic oligonucleotide
acuaugcauucugggaagc

SEQ ID NO: 1818140 - RNA, 19 nt, Artificial Sequence
  Description of Artificial Sequence: Synthetic oligonucleotide
ucaauugaauguucucuua

SEQ ID NO: 1818141 - RNA, 19 nt, Artificial Sequence
  Description of Artificial Sequence: Synthetic oligonucleotide
uuuacauguacaggguaaa

SEQ ID NO: 1818142 - RNA, 19 nt, Artificial Sequence
  Description of Artificial Sequence: Synthetic oligonucleotide
aauguccuagugggagccc

SEQ ID NO: 1818143 - RNA, 19 nt, Artificial Sequence
  Description of Artificial Sequence: Synthetic oligonucleotide
gaaauuuuccacccuggua

SEQ ID NO: 1818144 - RNA, 19 nt, Artificial Sequence
  Description of Artificial Sequence: Synthetic oligonucleotide
agcgcuauccucaauggug

SEQ ID NO: 1818145 - RNA, 19 nt, Artificial Sequence
  Description of Artificial Sequence: Synthetic oligonucleotide
uacgcauuucaguaagauc

SEQ ID NO: 1818146 - RNA, 19 nt, Artificial Sequence
  Description of Artificial Sequence: Synthetic oligonucleotide
aagagaaugugcauccaau

SEQ ID NO: 1818147 - RNA, 19 nt, Artificial Sequence
  Description of Artificial Sequence: Synthetic oligonucleotide
uguauucauccacuuuguc

SEQ ID NO: 1818148 - RNA, 19 nt, Artificial Sequence
  Description of Artificial Sequence: Synthetic oligonucleotide
auguccgggauccuuugag

SEQ ID NO: 1818149 - RNA, 19 nt, Artificial Sequence
  Description of Artificial Sequence: Synthetic oligonucleotide
ucaauauucaguggaucau

SEQ ID NO: 1818150 - RNA, 19 nt, Artificial Sequence
  Description of Artificial Sequence: Synthetic oligonucleotide
uggucgcaagacuaggaca

SEQ ID NO: 1818151 - RNA, 19 nt, Artificial Sequence
  Description of Artificial Sequence: Synthetic oligonucleotide
caagacuaggacaauccca

SEQ ID NO: 1818152 - RNA, 19 nt, Artificial Sequence
  Description of Artificial Sequence: Synthetic oligonucleotide
aacuucggaggaaucccac

SEQ ID NO: 1818153 - RNA, 19 nt, Artificial Sequence
  Description of Artificial Sequence: Synthetic oligonucleotide
cagcguuagcauuacugcc

SEQ ID NO: 1818154 - RNA, 19 nt, Artificial Sequence
  Description of Artificial Sequence: Synthetic oligonucleotide
ugccagauuuuagucaagc

SEQ ID NO: 1818155 - RNA, 19 nt, Artificial Sequence
  Description of Artificial Sequence: Synthetic oligonucleotide
cuccuugucucguaaauga

SEQ ID NO: 1818156 - RNA, 19 nt, Artificial Sequence
  Description of Artificial Sequence: Synthetic oligonucleotide
agcugcuucacaucagaga

SEQ ID NO: 1818157 - RNA, 19 nt, Artificial Sequence
  Description of Artificial Sequence: Synthetic oligonucleotide
uguuuggaucaggaaaaug

SEQ ID NO: 1818158 - RNA, 19 nt, Artificial Sequence
  Description of Artificial Sequence: Synthetic oligonucleotide
uucaguggaucaucaaaau

SEQ ID NO: 1818159 - RNA, 19 nt, Artificial Sequence
  Description of Artificial Sequence: Synthetic oligonucleotide
cucguaaaugauguucagc

SEQ ID NO: 1818160 - RNA, 19 nt, Artificial Sequence
  Description of Artificial Sequence: Synthetic oligonucleotide
cauagcguuugauguauuc

SEQ ID NO: 1818161 - RNA, 19 nt, Artificial Sequence
  Description of Artificial Sequence: Synthetic oligonucleotide
aggguaaauuagcuucaag

SEQ ID NO: 1818162 - RNA, 19 nt, Artificial Sequence
  Description of Artificial Sequence: Synthetic oligonucleotide
caacuugucucucacagaa

SEQ ID NO: 1818163 - RNA, 19 nt, Artificial Sequence
  Description of Artificial Sequence: Synthetic oligonucleotide
aguaacccucaucugggcu

SEQ ID NO: 1818164 - RNA, 19 nt, Artificial Sequence
  Description of Artificial Sequence: Synthetic oligonucleotide
gaucaguaaauaaugaguu

SEQ ID NO: 1818165 - RNA, 19 nt, Artificial Sequence
  Description of Artificial Sequence: Synthetic oligonucleotide
ucacaucuaggcagggcca

SEQ ID NO: 1818166 - RNA, 19 nt, Artificial Sequence
  Description of Artificial Sequence: Synthetic oligonucleotide
aguggaucaucaaaauuca

SEQ ID NO: 1818167 - RNA, 19 nt, Artificial Sequence
  Description of Artificial Sequence: Synthetic oligonucleotide
gacaccgauuuuguugggg

SEQ ID NO: 1818168 - RNA, 19 nt, Artificial Sequence
  Description of Artificial Sequence: Synthetic oligonucleotide
aucaguaaauaaugaguuu

SEQ ID NO: 1818169 - RNA, 19 nt, Artificial Sequence
  Description of Artificial Sequence: Synthetic oligonucleotide
uagcggguuucuuauugcc

SEQ ID NO: 1818170 - RNA, 19 nt, Artificial Sequence
  Description of Artificial Sequence: Synthetic oligonucleotide
caagcaacuugucucucac

SEQ ID NO: 1818171 - RNA, 19 nt, Artificial Sequence
  Description of Artificial Sequence: Synthetic oligonucleotide
guuuauagcggguuucuua

SEQ ID NO: 1818172 - RNA, 19 nt, Artificial Sequence
  Description of Artificial Sequence: Synthetic oligonucleotide
agggaagcagacaacgcuc

SEQ ID NO: 1818173 - RNA, 19 nt, Artificial Sequence
  Description of Artificial Sequence: Synthetic oligonucleotide
ggguaaauuagcuucaagu

SEQ ID NO: 1818174 - RNA, 19 nt, Artificial Sequence
  Description of Artificial Sequence: Synthetic oligonucleotide
cuuugucacggaaauccuc

SEQ ID NO: 1818175 - RNA, 19 nt, Artificial Sequence
  Description of Artificial Sequence: Synthetic oligonucleotide
augcauucugggaagcuuc

SEQ ID NO: 1818176 - RNA, 19 nt, Artificial Sequence
  Description of Artificial Sequence: Synthetic oligonucleotide
acaagcaacuugucucuca

SEQ ID NO: 1818177 - RNA, 19 nt, Artificial Sequence
  Description of Artificial Sequence: Synthetic oligonucleotide
ugucucucacagaaacccu

SEQ ID NO: 1818178 - RNA, 19 nt, Artificial Sequence
  Description of Artificial Sequence: Synthetic oligonucleotide
aagcgcuauccucaauggu

SEQ ID NO: 1818179 - RNA, 19 nt, Artificial Sequence
  Description of Artificial Sequence: Synthetic oligonucleotide
acauguuaagggaagcaga

SEQ ID NO: 1818180 - RNA, 19 nt, Artificial Sequence
  Description of Artificial Sequence: Synthetic oligonucleotide
agacauauuuccccuguuu

SEQ ID NO: 1818181 - RNA, 19 nt, Artificial Sequence
  Description of Artificial Sequence: Synthetic oligonucleotide
gcaagcgcuauccucaaug

SEQ ID NO: 1818182 - RNA, 19 nt, Artificial Sequence
  Description of Artificial Sequence: Synthetic oligonucleotide
ugcauccaaucacaguuua

SEQ ID NO: 1818183 - RNA, 19 nt, Artificial Sequence
  Description of Artificial Sequence: Synthetic oligonucleotide
gcacccaacaccaugcccg

SEQ ID NO: 1818184 - RNA, 19 nt, Artificial Sequence
  Description of Artificial Sequence: Synthetic oligonucleotide
uuccucugagcaccgcgag

SEQ ID NO: 1818185 - RNA, 19 nt, Artificial Sequence
  Description of Artificial Sequence: Synthetic oligonucleotide
uguuuccgugauguugggg

SEQ ID NO: 1818186 - RNA, 19 nt, Artificial Sequence
  Description of Artificial Sequence: Synthetic oligonucleotide
guccgggauccuuugaggc

SEQ ID NO: 1818187 - RNA, 19 nt, Artificial Sequence
  Description of Artificial Sequence: Synthetic oligonucleotide
caauguccuagugggagcc

SEQ ID NO: 1818188 - RNA, 19 nt, Artificial Sequence
  Description of Artificial Sequence: Synthetic oligonucleotide
uugauguauucauccacuu

SEQ ID NO: 1818189 - RNA, 19 nt, Artificial Sequence
  Description of Artificial Sequence: Synthetic oligonucleotide
cuucaauauucaguggauc

SEQ ID NO: 1818190 - RNA, 19 nt, Artificial Sequence
  Description of Artificial Sequence: Synthetic oligonucleotide
ccagcguuagcauuacugc

SEQ ID NO: 1818191 - RNA, 19 nt, Artificial Sequence
  Description of Artificial Sequence: Synthetic oligonucleotide
uaaugaguuuaauccccaa

SEQ ID NO: 1818192 - RNA, 19 nt, Artificial Sequence
  Description of Artificial Sequence: Synthetic oligonucleotide
aagcuuguuuggaucagga

SEQ ID NO: 1818193 - RNA, 19 nt, Artificial Sequence
  Description of Artificial Sequence: Synthetic oligonucleotide
gaggccgucaucccgcuuc

SEQ ID NO: 1818194 - RNA, 19 nt, Artificial Sequence
  Description of Artificial Sequence: Synthetic oligonucleotide
cugccagucacaccgaaca

SEQ ID NO: 1818195 - RNA, 19 nt, Artificial Sequence
  Description of Artificial Sequence: Synthetic oligonucleotide
auaaugaguuuaaucccca

SEQ ID NO: 1818196 - RNA, 19 nt, Artificial Sequence
  Description of Artificial Sequence: Synthetic oligonucleotide
guuagcauuacugccaccu

SEQ ID NO: 1818197 - RNA, 19 nt, Artificial Sequence
  Description of Artificial Sequence: Synthetic oligonucleotide
auugccaaucugccaguca

SEQ ID NO: 1818198 - RNA, 19 nt, Artificial Sequence
  Description of Artificial Sequence: Synthetic oligonucleotide
acauggucgcaagacuagg

SEQ ID NO: 1818199 - RNA, 19 nt, Artificial Sequence
  Description of Artificial Sequence: Synthetic oligonucleotide
agcguuagcauuacugcca

SEQ ID NO: 1818200 - RNA, 19 nt, Artificial Sequence
  Description of Artificial Sequence: Synthetic oligonucleotide
aauacgcauuucaguaaga

SEQ ID NO: 1818201 - RNA, 19 nt, Artificial Sequence
  Description of Artificial Sequence: Synthetic oligonucleotide
ugguaguaacccucaucug

SEQ ID NO: 1818202 - RNA, 19 nt, Artificial Sequence
  Description of Artificial Sequence: Synthetic oligonucleotide
uggaagaagcuaagagaau

SEQ ID NO: 1818203 - RNA, 19 nt, Artificial Sequence
  Description of Artificial Sequence: Synthetic oligonucleotide
ucacggaaauccuccuugu

SEQ ID NO: 1818204 - RNA, 19 nt, Artificial Sequence
  Description of Artificial Sequence: Synthetic oligonucleotide
gagucagauguggaggcug

SEQ ID NO: 1818205 - RNA, 19 nt, Artificial Sequence
  Description of Artificial Sequence: Synthetic oligonucleotide
aguaagaucuacagugaau

SEQ ID NO: 1818206 - RNA, 19 nt, Artificial Sequence
  Description of Artificial Sequence: Synthetic oligonucleotide
uaguaacccucaucugggc

SEQ ID NO: 1818207 - RNA, 19 nt, Artificial Sequence
  Description of Artificial Sequence: Synthetic oligonucleotide
ucugccagucacaccgaac

SEQ ID NO: 1818208 - RNA, 19 nt, Artificial Sequence
  Description of Artificial Sequence: Synthetic oligonucleotide
ugauguccgggauccuuug

SEQ ID NO: 1818209 - RNA, 19 nt, Artificial Sequence
  Description of Artificial Sequence: Synthetic oligonucleotide
cagauuuuagucaagcauu

SEQ ID NO: 1818210 - RNA, 19 nt, Artificial Sequence
  Description of Artificial Sequence: Synthetic oligonucleotide
auacgcauuucaguaagau

SEQ ID NO: 1818211 - RNA, 19 nt, Artificial Sequence
  Description of Artificial Sequence: Synthetic oligonucleotide
gaggagggcuaccucgagc

SEQ ID NO: 1818212 - RNA, 19 nt, Artificial Sequence
  Description of Artificial Sequence: Synthetic oligonucleotide
gcagggccaacauucgugg

SEQ ID NO: 1818213 - RNA, 19 nt, Artificial Sequence
  Description of Artificial Sequence: Synthetic oligonucleotide
uguccuagugggagcccag

SEQ ID NO: 1818214 - RNA, 19 nt, Artificial Sequence
  Description of Artificial Sequence: Synthetic oligonucleotide
uuacaacuucggaggaauc

SEQ ID NO: 1818215 - RNA, 19 nt, Artificial Sequence
  Description of Artificial Sequence: Synthetic oligonucleotide
cugagcaccgcgagucagg

SEQ ID NO: 1818216 - RNA, 19 nt, Artificial Sequence
  Description of Artificial Sequence: Synthetic oligonucleotide
uucguggaagaagcuaaga

SEQ ID NO: 1818217 - RNA, 19 nt, Artificial Sequence
  Description of Artificial Sequence: Synthetic oligonucleotide
ucugagcaccgcgagucag

SEQ ID NO: 1818218 - RNA, 19 nt, Artificial Sequence
  Description of Artificial Sequence: Synthetic oligonucleotide
cgcgacagcacucacagcc

SEQ ID NO: 1818219 - RNA, 19 nt, Artificial Sequence
  Description of Artificial Sequence: Synthetic oligonucleotide
auauucaguggaucaucaa

SEQ ID NO: 1818220 - RNA, 19 nt, Artificial Sequence
  Description of Artificial Sequence: Synthetic oligonucleotide
ucgagcugcuucacaucag

SEQ ID NO: 1818221 - RNA, 19 nt, Artificial Sequence
  Description of Artificial Sequence: Synthetic oligonucleotide
uccuugucucguaaaugau

SEQ ID NO: 1818222 - RNA, 19 nt, Artificial Sequence
  Description of Artificial Sequence: Synthetic oligonucleotide
aaauccuccuugucucgua

SEQ ID NO: 1818223 - RNA, 19 nt, Artificial Sequence
  Description of Artificial Sequence: Synthetic oligonucleotide
aggacaaucccaaggggcu

SEQ ID NO: 1818224 - RNA, 19 nt, Artificial Sequence
  Description of Artificial Sequence: Synthetic oligonucleotide
aacauucguggaagaagcu

SEQ ID NO: 1818225 - RNA, 19 nt, Artificial Sequence
  Description of Artificial Sequence: Synthetic oligonucleotide
cuuaguaaacuuagacaua

SEQ ID NO: 1818226 - RNA, 19 nt, Artificial Sequence
  Description of Artificial Sequence: Synthetic oligonucleotide
agccgcaccggcucccggc

SEQ ID NO: 1818227 - RNA, 19 nt, Artificial Sequence
  Description of Artificial Sequence: Synthetic oligonucleotide
agacuaggacaaucccaag

SEQ ID NO: 1818228 - RNA, 19 nt, Artificial Sequence
  Description of Artificial Sequence: Synthetic oligonucleotide
uuagcauuacugccaccuu

SEQ ID NO: 1818229 - RNA, 19 nt, Artificial Sequence
  Description of Artificial Sequence: Synthetic oligonucleotide
agggccaacauucguggaa

SEQ ID NO: 1818230 - RNA, 19 nt, Artificial Sequence
  Description of Artificial Sequence: Synthetic oligonucleotide
cuugccagcguuagcauua

SEQ ID NO: 1818231 - RNA, 19 nt, Artificial Sequence
  Description of Artificial Sequence: Synthetic oligonucleotide
ugccaaucugccagucaca

SEQ ID NO: 1818232 - RNA, 19 nt, Artificial Sequence
  Description of Artificial Sequence: Synthetic oligonucleotide
gaggaaucccacagccuag

SEQ ID NO: 1818233 - RNA, 19 nt, Artificial Sequence
  Description of Artificial Sequence: Synthetic oligonucleotide
caucaauugaauguucucu

SEQ ID NO: 1818234 - RNA, 19 nt, Artificial Sequence
  Description of Artificial Sequence: Synthetic oligonucleotide
caacauggucgcaagacua

SEQ ID NO: 1818235 - RNA, 19 nt, Artificial Sequence
  Description of Artificial Sequence: Synthetic oligonucleotide
uccucagaccugcaaucuc

SEQ ID NO: 1818236 - RNA, 19 nt, Artificial Sequence
  Description of Artificial Sequence: Synthetic oligonucleotide
ggaagcaagcgcuauccuc

SEQ ID NO: 1818237 - RNA, 19 nt, Artificial Sequence
  Description of Artificial Sequence: Synthetic oligonucleotide
ugagcaccgcgagucaggc

SEQ ID NO: 1818238 - RNA, 19 nt, Artificial Sequence
  Description of Artificial Sequence: Synthetic oligonucleotide
ucuaggcagggccaacauu

SEQ ID NO: 1818239 - RNA, 19 nt, Artificial Sequence
  Description of Artificial Sequence: Synthetic oligonucleotide
ccuugucucguaaaugaug

SEQ ID NO: 1818240 - RNA, 19 nt, Artificial Sequence
  Description of Artificial Sequence: Synthetic oligonucleotide
aucuacagugaaugacuau

SEQ ID NO: 1818241 - RNA, 19 nt, Artificial Sequence
  Description of Artificial Sequence: Synthetic oligonucleotide
cucacagccgcaccggcuc

SEQ ID NO: 1818242 - RNA, 19 nt, Artificial Sequence
  Description of Artificial Sequence: Synthetic oligonucleotide
ucacaguuuauagcggguu

SEQ ID NO: 1818243 - RNA, 19 nt, Artificial Sequence
  Description of Artificial Sequence: Synthetic oligonucleotide
uuacauguacaggguaaau

SEQ ID NO: 1818244 - RNA, 19 nt, Artificial Sequence
  Description of Artificial Sequence: Synthetic oligonucleotide
uagacauauuuccccuguu

SEQ ID NO: 1818245 - RNA, 19 nt, Artificial Sequence
  Description of Artificial Sequence: Synthetic oligonucleotide
uaguaaacuuagacauauu

SEQ ID NO: 1818246 - RNA, 19 nt, Artificial Sequence
  Description of Artificial Sequence: Synthetic oligonucleotide
uacaucacuugugcaggac

SEQ ID NO: 1818247 - RNA, 19 nt, Artificial Sequence
  Description of Artificial Sequence: Synthetic oligonucleotide
uggcauagcguuugaugua

SEQ ID NO: 1818248 - RNA, 19 nt, Artificial Sequence
  Description of Artificial Sequence: Synthetic oligonucleotide
cauggucgcaagacuagga

SEQ ID NO: 1818249 - RNA, 19 nt, Artificial Sequence
  Description of Artificial Sequence: Synthetic oligonucleotide
ggaggaaucccacagccua

SEQ ID NO: 1818250 - RNA, 19 nt, Artificial Sequence
  Description of Artificial Sequence: Synthetic oligonucleotide
cgcaagacuaggacaaucc

SEQ ID NO: 1818251 - RNA, 19 nt, Artificial Sequence
  Description of Artificial Sequence: Synthetic oligonucleotide
acauucguggaagaagcua

SEQ ID NO: 1818252 - RNA, 19 nt, Artificial Sequence
  Description of Artificial Sequence: Synthetic oligonucleotide
gccagcguuagcauuacug

SEQ ID NO: 1818253 - RNA, 19 nt, Artificial Sequence
  Description of Artificial Sequence: Synthetic oligonucleotide
auguuaagggaagcagaca

SEQ ID NO: 1818254 - RNA, 19 nt, Artificial Sequence
  Description of Artificial Sequence: Synthetic oligonucleotide
gaucuacagugaaugacua

SEQ ID NO: 1818255 - RNA, 19 nt, Artificial Sequence
  Description of Artificial Sequence: Synthetic oligonucleotide
aagcaagcgcuauccucaa

SEQ ID NO: 1818256 - RNA, 19 nt, Artificial Sequence
  Description of Artificial Sequence: Synthetic oligonucleotide
accgcgagucaggcgaggc

SEQ ID NO: 1818257 - RNA, 19 nt, Artificial Sequence
  Description of Artificial Sequence: Synthetic oligonucleotide
ucgcaagacuaggacaauc

SEQ ID NO: 1818258 - RNA, 19 nt, Artificial Sequence
  Description of Artificial Sequence: Synthetic oligonucleotide
uuuccccuguuuccgugau

SEQ ID NO: 1818259 - RNA, 19 nt, Artificial Sequence
  Description of Artificial Sequence: Synthetic oligonucleotide
ucucgaggcccagacacau

SEQ ID NO: 1818260 - RNA, 19 nt, Artificial Sequence
  Description of Artificial Sequence: Synthetic oligonucleotide
cuguuuccgugauguuggg

SEQ ID NO: 1818261 - RNA, 19 nt, Artificial Sequence
  Description of Artificial Sequence: Synthetic oligonucleotide
ccgaacaugucauuacauc

SEQ ID NO: 1818262 - RNA, 19 nt, Artificial Sequence
  Description of Artificial Sequence: Synthetic oligonucleotide
aggacgcgacagcacucac

SEQ ID NO: 1818263 - RNA, 19 nt, Artificial Sequence
  Description of Artificial Sequence: Synthetic oligonucleotide
ucaucccgcuucagcuugc

SEQ ID NO: 1818264 - RNA, 19 nt, Artificial Sequence
  Description of Artificial Sequence: Synthetic oligonucleotide
uaccucgagcugcuucaca

SEQ ID NO: 1818265 - RNA, 19 nt, Artificial Sequence
  Description of Artificial Sequence: Synthetic oligonucleotide
caccgaacaugucauuaca

SEQ ID NO: 1818266 - RNA, 19 nt, Artificial Sequence
  Description of Artificial Sequence: Synthetic oligonucleotide
aucacaguuuauagcgggu

SEQ ID NO: 1818267 - RNA, 19 nt, Artificial Sequence
  Description of Artificial Sequence: Synthetic oligonucleotide
uuauagcggguuucuuauu

SEQ ID NO: 1818268 - RNA, 19 nt, Artificial Sequence
  Description of Artificial Sequence: Synthetic oligonucleotide
gauguccgggauccuuuga

SEQ ID NO: 1818269 - RNA, 19 nt, Artificial Sequence
  Description of Artificial Sequence: Synthetic oligonucleotide
cuccgaguggagucagaug

SEQ ID NO: 1818270 - RNA, 19 nt, Artificial Sequence
  Description of Artificial Sequence: Synthetic oligonucleotide
ucacagccgcaccggcucc

SEQ ID NO: 1818271 - RNA, 19 nt, Artificial Sequence
  Description of Artificial Sequence: Synthetic oligonucleotide
caacuucggaggaauccca

SEQ ID NO: 1818272 - RNA, 19 nt, Artificial Sequence
  Description of Artificial Sequence: Synthetic oligonucleotide
augcccgaccagcggcggc

SEQ ID NO: 1818273 - RNA, 19 nt, Artificial Sequence
  Description of Artificial Sequence: Synthetic oligonucleotide
cuccucuuaucaucuggca

SEQ ID NO: 1818274 - RNA, 19 nt, Artificial Sequence
  Description of Artificial Sequence: Synthetic oligonucleotide
ggucgcaagacuaggacaa

SEQ ID NO: 1818275 - RNA, 19 nt, Artificial Sequence
  Description of Artificial Sequence: Synthetic oligonucleotide
acgcgacagcacucacagc

SEQ ID NO: 1818276 - RNA, 19 nt, Artificial Sequence
  Description of Artificial Sequence: Synthetic oligonucleotide
agcggguuucuuauugcca

SEQ ID NO: 1818277 - RNA, 19 nt, Artificial Sequence
  Description of Artificial Sequence: Synthetic oligonucleotide
accgaacaugucauuacau

SEQ ID NO: 1818278 - RNA, 19 nt, Artificial Sequence
  Description of Artificial Sequence: Synthetic oligonucleotide
gggccaacauucguggaag

SEQ ID NO: 1818279 - RNA, 19 nt, Artificial Sequence
  Description of Artificial Sequence: Synthetic oligonucleotide
gagcaccgcgagucaggcg

SEQ ID NO: 1818280 - RNA, 19 nt, Artificial Sequence
  Description of Artificial Sequence: Synthetic oligonucleotide
gagucaggcgaggcgggcc

SEQ ID NO: 1818281 - RNA, 19 nt, Artificial Sequence
  Description of Artificial Sequence: Synthetic oligonucleotide
caacugugacaguccucag

SEQ ID NO: 1818282 - RNA, 19 nt, Artificial Sequence
  Description of Artificial Sequence: Synthetic oligonucleotide
ucuuaucaucuggcauagc

SEQ ID NO: 1818283 - RNA, 19 nt, Artificial Sequence
  Description of Artificial Sequence: Synthetic oligonucleotide
auguccuagugggagccca

SEQ ID NO: 1818284 - RNA, 19 nt, Artificial Sequence
  Description of Artificial Sequence: Synthetic oligonucleotide
gccagauuuuagucaagca

SEQ ID NO: 1818285 - RNA, 19 nt, Artificial Sequence
  Description of Artificial Sequence: Synthetic oligonucleotide
uugucucguaaaugauguu

SEQ ID NO: 1818286 - RNA, 19 nt, Artificial Sequence
  Description of Artificial Sequence: Synthetic oligonucleotide
gacaacugugacaguccuc

SEQ ID NO: 1818287 - RNA, 19 nt, Artificial Sequence
  Description of Artificial Sequence: Synthetic oligonucleotide
ccggcacccaacaccaugc

SEQ ID NO: 1818288 - RNA, 19 nt, Artificial Sequence
  Description of Artificial Sequence: Synthetic oligonucleotide
guaacccucaucugggcuu

SEQ ID NO: 1818289 - RNA, 19 nt, Artificial Sequence
  Description of Artificial Sequence: Synthetic oligonucleotide
uaacccucaucugggcuua

SEQ ID NO: 1818290 - RNA, 19 nt, Artificial Sequence
  Description of Artificial Sequence: Synthetic oligonucleotide
gauggggaggagggcuacc

SEQ ID NO: 1818291 - RNA, 19 nt, Artificial Sequence
  Description of Artificial Sequence: Synthetic oligonucleotide
aguuuauagcggguuucuu

SEQ ID NO: 1818292 - RNA, 19 nt, Artificial Sequence
  Description of Artificial Sequence: Synthetic oligonucleotide
ccagauuuuagucaagcau

SEQ ID NO: 1818293 - RNA, 19 nt, Artificial Sequence
  Description of Artificial Sequence: Synthetic oligonucleotide
aucugccagucacaccgaa

SEQ ID NO: 1818294 - RNA, 19 nt, Artificial Sequence
  Description of Artificial Sequence: Synthetic oligonucleotide
uugaggccgucaucccgcu

SEQ ID NO: 1818295 - RNA, 19 nt, Artificial Sequence
  Description of Artificial Sequence: Synthetic oligonucleotide
gcggguuucuuauugccaa

SEQ ID NO: 1818296 - RNA, 19 nt, Artificial Sequence
  Description of Artificial Sequence: Synthetic oligonucleotide
cacaccgaacaugucauua

SEQ ID NO: 1818297 - RNA, 19 nt, Artificial Sequence
  Description of Artificial Sequence: Synthetic oligonucleotide
gccgucaucccgcuucagc

SEQ ID NO: 1818298 - RNA, 19 nt, Artificial Sequence
  Description of Artificial Sequence: Synthetic oligonucleotide
cauuacugccaccuuuccu

SEQ ID NO: 1818299 - RNA, 19 nt, Artificial Sequence
  Description of Artificial Sequence: Synthetic oligonucleotide
gcauuucacccugggaggc

SEQ ID NO: 1818300 - RNA, 19 nt, Artificial Sequence
  Description of Artificial Sequence: Synthetic oligonucleotide
guacaggguaaauuagcuu

SEQ ID NO: 1818301 - RNA, 19 nt, Artificial Sequence
  Description of Artificial Sequence: Synthetic oligonucleotide
ucacaccgaacaugucauu

SEQ ID NO: 1818302 - RNA, 19 nt, Artificial Sequence
  Description of Artificial Sequence: Synthetic oligonucleotide
gccaaucugccagucacac

SEQ ID NO: 1818303 - RNA, 19 nt, Artificial Sequence
  Description of Artificial Sequence: Synthetic oligonucleotide
gcauuucaguaagaucuac

SEQ ID NO: 1818304 - RNA, 19 nt, Artificial Sequence
  Description of Artificial Sequence: Synthetic oligonucleotide
gucacaccgaacaugucau

SEQ ID NO: 1818305 - RNA, 19 nt, Artificial Sequence
  Description of Artificial Sequence: Synthetic oligonucleotide
uugccagcguuagcauuac

SEQ ID NO: 1818306 - RNA, 19 nt, Artificial Sequence
  Description of Artificial Sequence: Synthetic oligonucleotide
gugaaugacuaugcauucu

SEQ ID NO: 1818307 - RNA, 19 nt, Artificial Sequence
  Description of Artificial Sequence: Synthetic oligonucleotide
cacuugugcaggacaccga

SEQ ID NO: 1818308 - RNA, 19 nt, Artificial Sequence
  Description of Artificial Sequence: Synthetic oligonucleotide
gcgacagcacucacagccg

SEQ ID NO: 1818309 - RNA, 19 nt, Artificial Sequence
  Description of Artificial Sequence: Synthetic oligonucleotide
ggcuaccucgagcugcuuc

SEQ ID NO: 1818310 - RNA, 19 nt, Artificial Sequence
  Description of Artificial Sequence: Synthetic oligonucleotide
ggacaccgauuuuguuggg

SEQ ID NO: 1818311 - RNA, 19 nt, Artificial Sequence
  Description of Artificial Sequence: Synthetic oligonucleotide
aggccgucaucccgcuuca

SEQ ID NO: 1818312 - RNA, 19 nt, Artificial Sequence
  Description of Artificial Sequence: Synthetic oligonucleotide
acucacagccgcaccggcu

SEQ ID NO: 1818313 - RNA, 19 nt, Artificial Sequence
  Description of Artificial Sequence: Synthetic oligonucleotide
caugcccgaccagcggcgg

SEQ ID NO: 1818314 - RNA, 19 nt, Artificial Sequence
  Description of Artificial Sequence: Synthetic oligonucleotide
gugccagauuuuagucaag

SEQ ID NO: 1818315 - RNA, 19 nt, Artificial Sequence
  Description of Artificial Sequence: Synthetic oligonucleotide
ccaugcccgaccagcggcg

SEQ ID NO: 1818316 - RNA, 19 nt, Artificial Sequence
  Description of Artificial Sequence: Synthetic oligonucleotide
agccuagacagcagaguuu

SEQ ID NO: 1818317 - RNA, 19 nt, Artificial Sequence
  Description of Artificial Sequence: Synthetic oligonucleotide
agcaagcgcuauccucaau

SEQ ID NO: 1818318 - RNA, 19 nt, Artificial Sequence
  Description of Artificial Sequence: Synthetic oligonucleotide
cacccaacaccaugcccga

SEQ ID NO: 1818319 - RNA, 19 nt, Artificial Sequence
  Description of Artificial Sequence: Synthetic oligonucleotide
cagccuagacagcagaguu

SEQ ID NO: 1818320 - RNA, 19 nt, Artificial Sequence
  Description of Artificial Sequence: Synthetic oligonucleotide
gcuucacaucuaggcaggg

SEQ ID NO: 1818321 - RNA, 19 nt, Artificial Sequence
  Description of Artificial Sequence: Synthetic oligonucleotide
cuaccucgagcugcuucac

SEQ ID NO: 1818322 - RNA, 19 nt, Artificial Sequence
  Description of Artificial Sequence: Synthetic oligonucleotide
gcgcuauccucaaugguga

SEQ ID NO: 1818323 - RNA, 19 nt, Artificial Sequence
  Description of Artificial Sequence: Synthetic oligonucleotide
ggcaggacgcgacagcacu

SEQ ID NO: 1818324 - RNA, 19 nt, Artificial Sequence
  Description of Artificial Sequence: Synthetic oligonucleotide
caggacgcgacagcacuca

SEQ ID NO: 1818325 - RNA, 19 nt, Artificial Sequence
  Description of Artificial Sequence: Synthetic oligonucleotide
cgcgagucaggcgaggcgg

SEQ ID NO: 1818326 - RNA, 19 nt, Artificial Sequence
  Description of Artificial Sequence: Synthetic oligonucleotide
gggaggcaccauguuguag

SEQ ID NO: 1818327 - RNA, 19 nt, Artificial Sequence
  Description of Artificial Sequence: Synthetic oligonucleotide
caguuuauagcggguuucu

SEQ ID NO: 1818328 - RNA, 19 nt, Artificial Sequence
  Description of Artificial Sequence: Synthetic oligonucleotide
cacaguuuauagcggguuu

SEQ ID NO: 1818329 - RNA, 19 nt, Artificial Sequence
  Description of Artificial Sequence: Synthetic oligonucleotide
cucugagcaccgcgaguca

SEQ ID NO: 1818330 - RNA, 19 nt, Artificial Sequence
  Description of Artificial Sequence: Synthetic oligonucleotide
cacaucuaggcagggccaa

SEQ ID NO: 1818331 - RNA, 19 nt, Artificial Sequence
  Description of Artificial Sequence: Synthetic oligonucleotide
ccgaguggagucagaugug

SEQ ID NO: 1818332 - RNA, 19 nt, Artificial Sequence
  Description of Artificial Sequence: Synthetic oligonucleotide
cuaugcauucugggaagcu

SEQ ID NO: 1818333 - RNA, 19 nt, Artificial Sequence
  Description of Artificial Sequence: Synthetic oligonucleotide
ggagggcuaccucgagcug

SEQ ID NO: 1818334 - RNA, 19 nt, Artificial Sequence
  Description of Artificial Sequence: Synthetic oligonucleotide
ggcugacagggaguaugag

SEQ ID NO: 1818335 - RNA, 19 nt, Artificial Sequence
  Description of Artificial Sequence: Synthetic oligonucleotide
caucuggcauagcguuuga

SEQ ID NO: 1818336 - RNA, 19 nt, Artificial Sequence
  Description of Artificial Sequence: Synthetic oligonucleotide
caggguaaauuagcuucaa

SEQ ID NO: 1818337 - RNA, 19 nt, Artificial Sequence
  Description of Artificial Sequence: Synthetic oligonucleotide
cagggccaacauucgugga

SEQ ID NO: 1818338 - RNA, 19 nt, Artificial Sequence
  Description of Artificial Sequence: Synthetic oligonucleotide
gccaacauucguggaagaa

SEQ ID NO: 1818339 - RNA, 19 nt, Artificial Sequence
  Description of Artificial Sequence: Synthetic oligonucleotide
aggcgggccggcacccaac

SEQ ID NO: 1818340 - RNA, 19 nt, Artificial Sequence
  Description of Artificial Sequence: Synthetic oligonucleotide
ccgcgagucaggcgaggcg

SEQ ID NO: 1818341 - RNA, 19 nt, Artificial Sequence
  Description of Artificial Sequence: Synthetic oligonucleotide
ggccaacauucguggaaga

SEQ ID NO: 1818342 - RNA, 19 nt, Artificial Sequence
  Description of Artificial Sequence: Synthetic oligonucleotide
gaggcgggccggcacccaa

SEQ ID NO: 1818343 - RNA, 19 nt, Artificial Sequence
  Description of Artificial Sequence: Synthetic oligonucleotide
cugcaaucucuccucuuau

SEQ ID NO: 1818344 - RNA, 19 nt, Artificial Sequence
  Description of Artificial Sequence: Synthetic oligonucleotide
caccgcgagucaggcgagg

SEQ ID NO: 1818345 - RNA, 19 nt, Artificial Sequence
  Description of Artificial Sequence: Synthetic oligonucleotide
gcgagucaggcgaggcggg

SEQ ID NO: 1818346 - RNA, 19 nt, Artificial Sequence
  Description of Artificial Sequence: Synthetic oligonucleotide
ggacgcgacagcacucaca

SEQ ID NO: 1818347 - RNA, 19 nt, Artificial Sequence
  Description of Artificial Sequence: Synthetic oligonucleotide
cguuagcauuacugccacc

SEQ ID NO: 1818348 - RNA, 19 nt, Artificial Sequence
  Description of Artificial Sequence: Synthetic oligonucleotide
ggaagggaagcaagcgcua

SEQ ID NO: 1818349 - RNA, 19 nt, Artificial Sequence
  Description of Artificial Sequence: Synthetic oligonucleotide
cuugugcaggacaccgauu

SEQ ID NO: 1818350 - RNA, 19 nt, Artificial Sequence
  Description of Artificial Sequence: Synthetic oligonucleotide
gcuauccucaauggugagu

SEQ ID NO: 1818351 - RNA, 19 nt, Artificial Sequence
  Description of Artificial Sequence: Synthetic oligonucleotide
gggaagcaagcgcuauccu

SEQ ID NO: 1818352 - RNA, 19 nt, Artificial Sequence
  Description of Artificial Sequence: Synthetic oligonucleotide
ggcgggccggcacccaaca

SEQ ID NO: 1818353 - RNA, 19 nt, Artificial Sequence
  Description of Artificial Sequence: Synthetic oligonucleotide
gcaggacgcgacagcacuc

SEQ ID NO: 1818354 - RNA, 19 nt, Artificial Sequence
  Description of Artificial Sequence: Synthetic oligonucleotide
gcaccgcgagucaggcgag

SEQ ID NO: 1818355 - RNA, 19 nt, Artificial Sequence
  Description of Artificial Sequence: Synthetic oligonucleotide
gucgcaagacuaggacaau

SEQ ID NO: 1818356 - RNA, 19 nt, Artificial Sequence
  Description of Artificial Sequence: Synthetic oligonucleotide
cggcacccaacaccaugcc

SEQ ID NO: 1818357 - RNA, 19 nt, Artificial Sequence
  Description of Artificial Sequence: Synthetic oligonucleotide
gcauccaaucacaguuuau

SEQ ID NO: 1818358 - RNA, 19 nt, Artificial Sequence
  Description of Artificial Sequence: Synthetic oligonucleotide
gcggcggcaggacgcgaca

SEQ ID NO: 1818359 - RNA, 19 nt, Artificial Sequence
  Description of Artificial Sequence: Synthetic oligonucleotide
cgagucaggcgaggcgggc

SEQ ID NO: 1818360 - RNA, 19 nt, Artificial Sequence
  Description of Artificial Sequence: Synthetic oligonucleotide
gcccgaccagcggcggcgg

SEQ ID NO: 1818361 - RNA, 19 nt, Artificial Sequence
  Description of Artificial Sequence: Synthetic oligonucleotide
cgaccagcggcggcggcag

SEQ ID NO: 1818362 - RNA, 19 nt, Artificial Sequence
  Description of Artificial Sequence: Synthetic oligonucleotide
gcgggccggcacccaacac

SEQ ID NO: 1818363 - RNA, 19 nt, Artificial Sequence
  Description of Artificial Sequence: Synthetic oligonucleotide
cucgaggcccagacacauu

SEQ ID NO: 1818364 - RNA, 19 nt, Artificial Sequence
  Description of Artificial Sequence: Synthetic oligonucleotide
ccuccgaguggagucagau

SEQ ID NO: 1818365 - RNA, 19 nt, Artificial Sequence
  Description of Artificial Sequence: Synthetic oligonucleotide
gggauccuuugaggccguc

SEQ ID NO: 1818366 - RNA, 19 nt, Artificial Sequence
  Description of Artificial Sequence: Synthetic oligonucleotide
ccgaccagcggcggcggca

SEQ ID NO: 1818367 - RNA, 19 nt, Artificial Sequence
  Description of Artificial Sequence: Synthetic oligonucleotide
cccgaccagcggcggcggc

SEQ ID NO: 1818368 - RNA, 19 nt, Artificial Sequence
  Description of Artificial Sequence: Synthetic oligonucleotide
caccggcucccggcggcga

SEQ ID NO: 1818369 - RNA, 19 nt, Artificial Sequence
  Description of Artificial Sequence: Synthetic oligonucleotide
cggcggcaggacgcgacag

SEQ ID NO: 1818370 - RNA, 19 nt, Artificial Sequence
  Description of Artificial Sequence: Synthetic oligonucleotide
cggguuucuuauugccaau

SEQ ID NO: 1818371 - RNA, 19 nt, Artificial Sequence
  Description of Artificial Sequence: Synthetic oligonucleotide
cccugguaguaacccucau

SEQ ID NO: 1818372 - RNA, 19 nt, Artificial Sequence
  Description of Artificial Sequence: Synthetic oligonucleotide
cgggauccuuugaggccgu

SEQ ID NO: 1818373 - RNA, 19 nt, Artificial Sequence
  Description of Artificial Sequence: Synthetic oligonucleotide
agugguugaaagcagaagc

SEQ ID NO: 1818374 - RNA, 19 nt, Artificial Sequence
  Description of Artificial Sequence: Synthetic oligonucleotide
aaagauuccgauucugaac

SEQ ID NO: 1818375 - RNA, 19 nt, Artificial Sequence
  Description of Artificial Sequence: Synthetic oligonucleotide
cuuacuauaccacacgugg

SEQ ID NO: 1818376 - RNA, 19 nt, Artificial Sequence
  Description of Artificial Sequence: Synthetic oligonucleotide
ugaacuuaagaacagucug

SEQ ID NO: 1818377 - RNA, 19 nt, Artificial Sequence
  Description of Artificial Sequence: Synthetic oligonucleotide
aagauuccgauucugaacu

SEQ ID NO: 1818378 - RNA, 19 nt, Artificial Sequence
  Description of Artificial Sequence: Synthetic oligonucleotide
aaagagacucuuuccuucc

SEQ ID NO: 1818379 - RNA, 19 nt, Artificial Sequence
  Description of Artificial Sequence: Synthetic oligonucleotide
uugcauaguacacaguggg

SEQ ID NO: 1818380 - RNA, 19 nt, Artificial Sequence
  Description of Artificial Sequence: Synthetic oligonucleotide
ugucuuuacacacacacac

SEQ ID NO: 1818381 - RNA, 19 nt, Artificial Sequence
  Description of Artificial Sequence: Synthetic oligonucleotide
uuuacacacacacacacac

SEQ ID NO: 1818382 - RNA, 19 nt, Artificial Sequence
  Description of Artificial Sequence: Synthetic oligonucleotide
gaaagcagaagcuacauga

SEQ ID NO: 1818383 - RNA, 19 nt, Artificial Sequence
  Description of Artificial Sequence: Synthetic oligonucleotide
agucagaaaaggcaagagc

SEQ ID NO: 1818384 - RNA, 19 nt, Artificial Sequence
  Description of Artificial Sequence: Synthetic oligonucleotide
aaaggcaagagccucgcag

SEQ ID NO: 1818385 - RNA, 19 nt, Artificial Sequence
  Description of Artificial Sequence: Synthetic oligonucleotide
uuuacugccauagugggag

SEQ ID NO: 1818386 - RNA, 19 nt, Artificial Sequence
  Description of Artificial Sequence: Synthetic oligonucleotide
gauuuacugccauaguggg

SEQ ID NO: 1818387 - RNA, 19 nt, Artificial Sequence
  Description of Artificial Sequence: Synthetic oligonucleotide
ucuuuacacacacacacac

SEQ ID NO: 1818388 - RNA, 19 nt, Artificial Sequence
  Description of Artificial Sequence: Synthetic oligonucleotide
aacuuaagaacagucuggg

SEQ ID NO: 1818389 - RNA, 19 nt, Artificial Sequence
  Description of Artificial Sequence: Synthetic oligonucleotide
uuaagaacagucuggguac

SEQ ID NO: 1818390 - RNA, 19 nt, Artificial Sequence
  Description of Artificial Sequence: Synthetic oligonucleotide
gucagaaaaggcaagagcc

SEQ ID NO: 1818391 - RNA, 19 nt, Artificial Sequence
  Description of Artificial Sequence: Synthetic oligonucleotide
uguguauuggcccuggaaa

SEQ ID NO: 1818392 - RNA, 19 nt, Artificial Sequence
  Description of Artificial Sequence: Synthetic oligonucleotide
uacacacacacacacacac

SEQ ID NO: 1818393 - RNA, 19 nt, Artificial Sequence
  Description of Artificial Sequence: Synthetic oligonucleotide
aaugugguacuccuggccu

SEQ ID NO: 1818394 - RNA, 19 nt, Artificial Sequence
  Description of Artificial Sequence: Synthetic oligonucleotide
gauucugaacuuaagaaca

SEQ ID NO: 1818395 - RNA, 19 nt, Artificial Sequence
  Description of Artificial Sequence: Synthetic oligonucleotide
uguggauuuacugccauag

SEQ ID NO: 1818396 - RNA, 19 nt, Artificial Sequence
  Description of Artificial Sequence: Synthetic oligonucleotide
ugcugagccaaucaccagg

SEQ ID NO: 1818397 - RNA, 19 nt, Artificial Sequence
  Description of Artificial Sequence: Synthetic oligonucleotide
cacacacacacacacaucc

SEQ ID NO: 1818398 - RNA, 19 nt, Artificial Sequence
  Description of Artificial Sequence: Synthetic oligonucleotide
aacagagacugccugccuc

SEQ ID NO: 1818399 - RNA, 19 nt, Artificial Sequence
  Description of Artificial Sequence: Synthetic oligonucleotide
gaacuuaagaacagucugg

SEQ ID NO: 1818400 - RNA, 19 nt, Artificial Sequence
  Description of Artificial Sequence: Synthetic oligonucleotide
cauaguacacagugggugg

SEQ ID NO: 1818401 - RNA, 19 nt, Artificial Sequence
  Description of Artificial Sequence: Synthetic oligonucleotide
uccgauucugaacuuaaga

SEQ ID NO: 1818402 - RNA, 19 nt, Artificial Sequence
  Description of Artificial Sequence: Synthetic oligonucleotide
uacuauaccacacguggga

SEQ ID NO: 1818403 - RNA, 19 nt, Artificial Sequence
  Description of Artificial Sequence: Synthetic oligonucleotide
guucugauggcucucuagg

SEQ ID NO: 1818404 - RNA, 19 nt, Artificial Sequence
  Description of Artificial Sequence: Synthetic oligonucleotide
uccucaaagguccugcucu

SEQ ID NO: 1818405 - RNA, 19 nt, Artificial Sequence
  Description of Artificial Sequence: Synthetic oligonucleotide
uuaggggacagaauguggu

SEQ ID NO: 1818406 - RNA, 19 nt, Artificial Sequence
  Description of Artificial Sequence: Synthetic oligonucleotide
uguagauccuugauggccu

SEQ ID NO: 1818407 - RNA, 19 nt, Artificial Sequence
  Description of Artificial Sequence: Synthetic oligonucleotide
uuguccucgguccucgugg

SEQ ID NO: 1818408 - RNA, 19 nt, Artificial Sequence
  Description of Artificial Sequence: Synthetic oligonucleotide
agccuuaggggacagaaug

SEQ ID NO: 1818409 - RNA, 19 nt, Artificial Sequence
  Description of Artificial Sequence: Synthetic oligonucleotide
uccuggagcgcugacaugg

SEQ ID NO: 1818410 - RNA, 19 nt, Artificial Sequence
  Description of Artificial Sequence: Synthetic oligonucleotide
agcuacaugaguugggcug

SEQ ID NO: 1818411 - RNA, 19 nt, Artificial Sequence
  Description of Artificial Sequence: Synthetic oligonucleotide
ucaaagguccugcucuucc

SEQ ID NO: 1818412 - RNA, 19 nt, Artificial Sequence
  Description of Artificial Sequence: Synthetic oligonucleotide
acaacagagacugccugcc

SEQ ID NO: 1818413 - RNA, 19 nt, Artificial Sequence
  Description of Artificial Sequence: Synthetic oligonucleotide
ugagccaaucaccaggcac

SEQ ID NO: 1818414 - RNA, 19 nt, Artificial Sequence
  Description of Artificial Sequence: Synthetic oligonucleotide
agaaugugguacuccuggc

SEQ ID NO: 1818415 - RNA, 19 nt, Artificial Sequence
  Description of Artificial Sequence: Synthetic oligonucleotide
uguacuuuuggggaugucu

SEQ ID NO: 1818416 - RNA, 19 nt, Artificial Sequence
  Description of Artificial Sequence: Synthetic oligonucleotide
cuuaagaacagucugggua

SEQ ID NO: 1818417 - RNA, 19 nt, Artificial Sequence
  Description of Artificial Sequence: Synthetic oligonucleotide
ucugauggcucucuaggga

SEQ ID NO: 1818418 - RNA, 19 nt, Artificial Sequence
  Description of Artificial Sequence: Synthetic oligonucleotide
gaccuuacuauaccacacg

SEQ ID NO: 1818419 - RNA, 19 nt, Artificial Sequence
  Description of Artificial Sequence: Synthetic oligonucleotide
ugguggagcgcacauuccg

SEQ ID NO: 1818420 - RNA, 19 nt, Artificial Sequence
  Description of Artificial Sequence: Synthetic oligonucleotide
ucaugcugccugaugaucu

SEQ ID NO: 1818421 - RNA, 19 nt, Artificial Sequence
  Description of Artificial Sequence: Synthetic oligonucleotide
acagucuggguacaucccg

SEQ ID NO: 1818422 - RNA, 19 nt, Artificial Sequence
  Description of Artificial Sequence: Synthetic oligonucleotide
ggauuuacugccauagugg

SEQ ID NO: 1818423 - RNA, 19 nt, Artificial Sequence
  Description of Artificial Sequence: Synthetic oligonucleotide
cacacacacacacacacac

SEQ ID NO: 1818424 - RNA, 19 nt, Artificial Sequence
  Description of Artificial Sequence: Synthetic oligonucleotide
aagcagaagcuacaugagu

SEQ ID NO: 1818425 - RNA, 19 nt, Artificial Sequence
  Description of Artificial Sequence: Synthetic oligonucleotide
  modified_base (11)..(11): a, c, u, g, unknown or other
uguccugaugnggaggagg

SEQ ID NO: 1818426 - RNA, 19 nt, Artificial Sequence
  Description of Artificial Sequence: Synthetic oligonucleotide
agggugaggaauccaacag

SEQ ID NO: 1818427 - RNA, 19 nt, Artificial Sequence
  Description of Artificial Sequence: Synthetic oligonucleotide
  modified_base (4)..(4): a, c, u, g, unknown or other
augnggaggagguuggcca

SEQ ID NO: 1818428 - RNA, 19 nt, Artificial Sequence
  Description of Artificial Sequence: Synthetic oligonucleotide
ugacacuucugccuguaga

SEQ ID NO: 1818429 - RNA, 19 nt, Artificial Sequence
  Description of Artificial Sequence: Synthetic oligonucleotide
uggaccuuacuauaccaca

SEQ ID NO: 1818430 - RNA, 19 nt, Artificial Sequence
  Description of Artificial Sequence: Synthetic oligonucleotide
cuggaaagagacucuuucc

SEQ ID NO: 1818431 - RNA, 19 nt, Artificial Sequence
  Description of Artificial Sequence: Synthetic oligonucleotide
  modified_base (7)..(7): a, c, u, g, unknown or other
cugaugnggaggagguugg

SEQ ID NO: 1818432 - RNA, 19 nt, Artificial Sequence
  Description of Artificial Sequence: Synthetic oligonucleotide
uggagcgcugacaugggag

SEQ ID NO: 1818433 - RNA, 19 nt, Artificial Sequence
  Description of Artificial Sequence: Synthetic oligonucleotide
gaagcuacaugaguugggc

SEQ ID NO: 1818434 - RNA, 19 nt, Artificial Sequence
  Description of Artificial Sequence: Synthetic oligonucleotide
accaucagacuccccagac

SEQ ID NO: 1818435 - RNA, 19 nt, Artificial Sequence
  Description of Artificial Sequence: Synthetic oligonucleotide
aguggaugguucugauggc

SEQ ID NO: 1818436 - RNA, 19 nt, Artificial Sequence
  Description of Artificial Sequence: Synthetic oligonucleotide
cucgcugucuuccugucgg

SEQ ID NO: 1818437 - RNA, 19 nt, Artificial Sequence
  Description of Artificial Sequence: Synthetic oligonucleotide
guguauuggcccuggaaag

SEQ ID NO: 1818438 - RNA, 19 nt, Artificial Sequence
  Description of Artificial Sequence: Synthetic oligonucleotide
ucuagggacagcacugccu

SEQ ID NO: 1818439 - RNA, 19 nt, Artificial Sequence
  Description of Artificial Sequence: Synthetic oligonucleotide
cacacacacacacaucccc

SEQ ID NO: 1818440 - RNA, 19 nt, Artificial Sequence
  Description of Artificial Sequence: Synthetic oligonucleotide
augaucuuguccccucccg

SEQ ID NO: 1818441 - RNA, 19 nt, Artificial Sequence
  Description of Artificial Sequence: Synthetic oligonucleotide
ugucuuucaggacagccuu

SEQ ID NO: 1818442 - RNA, 19 nt, Artificial Sequence
  Description of Artificial Sequence: Synthetic oligonucleotide
auuggcccuggaaagagac

SEQ ID NO: 1818443 - RNA, 19 nt, Artificial Sequence
  Description of Artificial Sequence: Synthetic oligonucleotide
ucuucccagaugacagccg

SEQ ID NO: 1818444 - RNA, 19 nt, Artificial Sequence
  Description of Artificial Sequence: Synthetic oligonucleotide
uuuuguacuuuuggggaug

SEQ ID NO: 1818445 - RNA, 19 nt, Artificial Sequence
  Description of Artificial Sequence: Synthetic oligonucleotide
acuauaccacacgugggac

SEQ ID NO: 1818446 - RNA, 19 nt, Artificial Sequence
  Description of Artificial Sequence: Synthetic oligonucleotide
  modified_base (19)..(19): a, c, u, g, unknown or other
ucgcgcucuguccugaugn

SEQ ID NO: 1818447 - RNA, 19 nt, Artificial Sequence
  Description of Artificial Sequence: Synthetic oligonucleotide
aguggaccuuacuauacca

SEQ ID NO: 1818448 - RNA, 19 nt, Artificial Sequence
  Description of Artificial Sequence: Synthetic oligonucleotide
guguggucgauguaggcug

SEQ ID NO: 1818449 - RNA, 19 nt, Artificial Sequence
  Description of Artificial Sequence: Synthetic oligonucleotide
uguccuggagcgcugacau

SEQ ID NO: 1818450 - RNA, 19 nt, Artificial Sequence
  Description of Artificial Sequence: Synthetic oligonucleotide
cuagggacagcacugccug

SEQ ID NO: 1818451 - RNA, 19 nt, Artificial Sequence
  Description of Artificial Sequence: Synthetic oligonucleotide
acaugaguugggcugcuug

SEQ ID NO: 1818452 - RNA, 19 nt, Artificial Sequence
  Description of Artificial Sequence: Synthetic oligonucleotide
aggucauucagacccagau

SEQ ID NO: 1818453 - RNA, 19 nt, Artificial Sequence
  Description of Artificial Sequence: Synthetic oligonucleotide
cauagugggagcuccagga

SEQ ID NO: 1818454 - RNA, 19 nt, Artificial Sequence
  Description of Artificial Sequence: Synthetic oligonucleotide
uuacacacacacacacaca

SEQ ID NO: 1818455 - RNA, 19 nt, Artificial Sequence
  Description of Artificial Sequence: Synthetic oligonucleotide
uccgggcugagguaggugc

SEQ ID NO: 1818456 - RNA, 19 nt, Artificial Sequence
  Description of Artificial Sequence: Synthetic oligonucleotide
aaccucucuguggauuuac

SEQ ID NO: 1818457 - RNA, 19 nt, Artificial Sequence
  Description of Artificial Sequence: Synthetic oligonucleotide
accuuacuauaccacacgu

SEQ ID NO: 1818458 - RNA, 19 nt, Artificial Sequence
  Description of Artificial Sequence: Synthetic oligonucleotide
cucucuagggacagcacug

SEQ ID NO: 1818459 - RNA, 19 nt, Artificial Sequence
  Description of Artificial Sequence: Synthetic oligonucleotide
ugaugaucuuguccccucc

SEQ ID NO: 1818460 - RNA, 19 nt, Artificial Sequence
  Description of Artificial Sequence: Synthetic oligonucleotide
ucuuccugucggcacagcu

SEQ ID NO: 1818461 - RNA, 19 nt, Artificial Sequence
  Description of Artificial Sequence: Synthetic oligonucleotide
auagugggagcuccaggag

SEQ ID NO: 1818462 - RNA, 19 nt, Artificial Sequence
  Description of Artificial Sequence: Synthetic oligonucleotide
ugcauaguacacagugggu

SEQ ID NO: 1818463 - RNA, 19 nt, Artificial Sequence
  Description of Artificial Sequence: Synthetic oligonucleotide
cuggccuguguauuggccc

SEQ ID NO: 1818464 - RNA, 19 nt, Artificial Sequence
  Description of Artificial Sequence: Synthetic oligonucleotide
aucccgaggcacgagaggg

SEQ ID NO: 1818465 - RNA, 19 nt, Artificial Sequence
  Description of Artificial Sequence: Synthetic oligonucleotide
aagcuacaugaguugggcu

SEQ ID NO: 1818466 - RNA, 19 nt, Artificial Sequence
  Description of Artificial Sequence: Synthetic oligonucleotide
  modified_base (5)..(5): a, c, u, g, unknown or other
gaugnggaggagguuggcc

SEQ ID NO: 1818467 - RNA, 19 nt, Artificial Sequence
  Description of Artificial Sequence: Synthetic oligonucleotide
cagaagcuacaugaguugg

SEQ ID NO: 1818468 - RNA, 19 nt, Artificial Sequence
  Description of Artificial Sequence: Synthetic oligonucleotide
uuccgauucugaacuuaag

SEQ ID NO: 1818469 - RNA, 19 nt, Artificial Sequence
  Description of Artificial Sequence: Synthetic oligonucleotide
gaacggcucagcuggcggg

SEQ ID NO: 1818470 - RNA, 19 nt, Artificial Sequence
  Description of Artificial Sequence: Synthetic oligonucleotide
agugggagcuccaggaggg

SEQ ID NO: 1818471 - RNA, 19 nt, Artificial Sequence
  Description of Artificial Sequence: Synthetic oligonucleotide
augacagccgagaagaaaa

SEQ ID NO: 1818472 - RNA, 19 nt, Artificial Sequence
  Description of Artificial Sequence: Synthetic oligonucleotide
gaaaaggcaagagccucgc

SEQ ID NO: 1818473 - RNA, 19 nt, Artificial Sequence
  Description of Artificial Sequence: Synthetic oligonucleotide
gagggugaggaauccaaca

SEQ ID NO: 1818474 - RNA, 19 nt, Artificial Sequence
  Description of Artificial Sequence: Synthetic oligonucleotide
auucugaacuuaagaacag

SEQ ID NO: 1818475 - RNA, 19 nt, Artificial Sequence
  Description of Artificial Sequence: Synthetic oligonucleotide
agacuccccagacaaccuc

SEQ ID NO: 1818476 - RNA, 19 nt, Artificial Sequence
  Description of Artificial Sequence: Synthetic oligonucleotide
agaagcuacaugaguuggg

SEQ ID NO: 1818477 - RNA, 19 nt, Artificial Sequence
  Description of Artificial Sequence: Synthetic oligonucleotide
gauguaggcuguccuccag

SEQ ID NO: 1818478 - RNA, 19 nt, Artificial Sequence
  Description of Artificial Sequence: Synthetic oligonucleotide
uaaugggcuggcaguggag

SEQ ID NO: 1818479 - RNA, 19 nt, Artificial Sequence
  Description of Artificial Sequence: Synthetic oligonucleotide
aucaauggcuccaggugac

SEQ ID NO: 1818480 - RNA, 19 nt, Artificial Sequence
  Description of Artificial Sequence: Synthetic oligonucleotide
agaacagucuggguacauc

SEQ ID NO: 1818481 - RNA, 19 nt, Artificial Sequence
  Description of Artificial Sequence: Synthetic oligonucleotide
cagagugccggguuccccg

SEQ ID NO: 1818482 - RNA, 19 nt, Artificial Sequence
  Description of Artificial Sequence: Synthetic oligonucleotide
ugcugagcugauguccugg

SEQ ID NO: 1818483 - RNA, 19 nt, Artificial Sequence
  Description of Artificial Sequence: Synthetic oligonucleotide
cagacaaccucucugugga

SEQ ID NO: 1818484 - RNA, 19 nt, Artificial Sequence
  Description of Artificial Sequence: Synthetic oligonucleotide
gagagcuggggccauccgc

SEQ ID NO: 1818485 - RNA, 19 nt, Artificial Sequence
  Description of Artificial Sequence: Synthetic oligonucleotide
ucguggagugguugaaagc

SEQ ID NO: 1818486 - RNA, 19 nt, Artificial Sequence
  Description of Artificial Sequence: Synthetic oligonucleotide
gagugguugaaagcagaag

SEQ ID NO: 1818487 - RNA, 19 nt, Artificial Sequence
  Description of Artificial Sequence: Synthetic oligonucleotide
caaagguccugcucuuccc

SEQ ID NO: 1818488 - RNA, 19 nt, Artificial Sequence
  Description of Artificial Sequence: Synthetic oligonucleotide
ucuguggauuuacugccau

SEQ ID NO: 1818489 - RNA, 19 nt, Artificial Sequence
  Description of Artificial Sequence: Synthetic oligonucleotide
gggguugcauaguacacag

SEQ ID NO: 1818490 - RNA, 19 nt, Artificial Sequence
  Description of Artificial Sequence: Synthetic oligonucleotide
guauuggcccuggaaagag

SEQ ID NO: 1818491 - RNA, 19 nt, Artificial Sequence
  Description of Artificial Sequence: Synthetic oligonucleotide
gacagaaugugguacuccu

SEQ ID NO: 1818492 - RNA, 19 nt, Artificial Sequence
  Description of Artificial Sequence: Synthetic oligonucleotide
acaugggagagcuggugcu

SEQ ID NO: 1818493 - RNA, 19 nt, Artificial Sequence
  Description of Artificial Sequence: Synthetic oligonucleotide
acuuaagaacagucugggu

SEQ ID NO: 1818494 - RNA, 19 nt, Artificial Sequence
  Description of Artificial Sequence: Synthetic oligonucleotide
cauucagacccagauggac

SEQ ID NO: 1818495 - RNA, 19 nt, Artificial Sequence
  Description of Artificial Sequence: Synthetic oligonucleotide
ugcaguggaccuuacuaua

SEQ ID NO: 1818496 - RNA, 19 nt, Artificial Sequence
  Description of Artificial Sequence: Synthetic oligonucleotide
uugaaagcagaagcuacau

SEQ ID NO: 1818497 - RNA, 19 nt, Artificial Sequence
  Description of Artificial Sequence: Synthetic oligonucleotide
uggaugguucugauggcuc

SEQ ID NO: 1818498 - RNA, 19 nt, Artificial Sequence
  Description of Artificial Sequence: Synthetic oligonucleotide
gguccuaaugggcuggcag

SEQ ID NO: 1818499 - RNA, 19 nt, Artificial Sequence
  Description of Artificial Sequence: Synthetic oligonucleotide
uucugaacuuaagaacagu

SEQ ID NO: 1818500 - RNA, 19 nt, Artificial Sequence
  Description of Artificial Sequence: Synthetic oligonucleotide
ggaugcuccucaaaggucc

SEQ ID NO: 1818501 - RNA, 19 nt, Artificial Sequence
  Description of Artificial Sequence: Synthetic oligonucleotide
acacacacacacacauccc

SEQ ID NO: 1818502 - RNA, 19 nt, Artificial Sequence
  Description of Artificial Sequence: Synthetic oligonucleotide
aaaaggcaagagccucgca

SEQ ID NO: 1818503 - RNA, 19 nt, Artificial Sequence
  Description of Artificial Sequence: Synthetic oligonucleotide
gcauaguacacagugggug

SEQ ID NO: 1818504 - RNA, 19 nt, Artificial Sequence
  Description of Artificial Sequence: Synthetic oligonucleotide
caguggaccuuacuauacc

SEQ ID NO: 1818505 - RNA, 19 nt, Artificial Sequence
  Description of Artificial Sequence: Synthetic oligonucleotide
uccuaaugggcuggcagug

SEQ ID NO: 1818506 - RNA, 19 nt, Artificial Sequence
  Description of Artificial Sequence: Synthetic oligonucleotide
guacacagugggugguggg

SEQ ID NO: 1818507 - RNA, 19 nt, Artificial Sequence
  Description of Artificial Sequence: Synthetic oligonucleotide
ucagagucucagagucucc

SEQ ID NO: 1818508 - RNA, 19 nt, Artificial Sequence
  Description of Artificial Sequence: Synthetic oligonucleotide
guugaaagcagaagcuaca

SEQ ID NO: 1818509 - RNA, 19 nt, Artificial Sequence
  Description of Artificial Sequence: Synthetic oligonucleotide
guaggcggagcugugacac

SEQ ID NO: 1818510 - RNA, 19 nt, Artificial Sequence
  Description of Artificial Sequence: Synthetic oligonucleotide
cuuuacacacacacacaca

SEQ ID NO: 1818511 - RNA, 19 nt, Artificial Sequence
  Description of Artificial Sequence: Synthetic oligonucleotide
ugcugccugaugaucuugu

SEQ ID NO: 1818512 - RNA, 19 nt, Artificial Sequence
  Description of Artificial Sequence: Synthetic oligonucleotide
auucagacccagauggaca

SEQ ID NO: 1818513 - RNA, 19 nt, Artificial Sequence
  Description of Artificial Sequence: Synthetic oligonucleotide
agcgcugacaugggagagc

SEQ ID NO: 1818514 - RNA, 19 nt, Artificial Sequence
  Description of Artificial Sequence: Synthetic oligonucleotide
uuuguacuuuuggggaugu

SEQ ID NO: 1818515 - RNA, 19 nt, Artificial Sequence
  Description of Artificial Sequence: Synthetic oligonucleotide
cugaacuuaagaacagucu

SEQ ID NO: 1818516 - RNA, 19 nt, Artificial Sequence
  Description of Artificial Sequence: Synthetic oligonucleotide
acacgugggacagcggagg

SEQ ID NO: 1818517 - RNA, 19 nt, Artificial Sequence
  Description of Artificial Sequence: Synthetic oligonucleotide
gguugaaagcagaagcuac

SEQ ID NO: 1818518 - RNA, 19 nt, Artificial Sequence
  Description of Artificial Sequence: Synthetic oligonucleotide
ugguugaaagcagaagcua

SEQ ID NO: 1818519 - RNA, 19 nt, Artificial Sequence
  Description of Artificial Sequence: Synthetic oligonucleotide
uuccgccucaugcugccug

SEQ ID NO: 1818520 - RNA, 19 nt, Artificial Sequence
  Description of Artificial Sequence: Synthetic oligonucleotide
aggaauccaacagcuuguc

SEQ ID NO: 1818521 - RNA, 19 nt, Artificial Sequence
  Description of Artificial Sequence: Synthetic oligonucleotide
caggugacuggugacuggg

SEQ ID NO: 1818522 - RNA, 19 nt, Artificial Sequence
  Description of Artificial Sequence: Synthetic oligonucleotide
acagccuuaggggacagaa

SEQ ID NO: 1818523 - RNA, 19 nt, Artificial Sequence
  Description of Artificial Sequence: Synthetic oligonucleotide
gcagaagcuacaugaguug

SEQ ID NO: 1818524 - RNA, 19 nt, Artificial Sequence
  Description of Artificial Sequence: Synthetic oligonucleotide
acaaccucucuguggauuu

SEQ ID NO: 1818525 - RNA, 19 nt, Artificial Sequence
  Description of Artificial Sequence: Synthetic oligonucleotide
cagacccagauggacagag

SEQ ID NO: 1818526 - RNA, 19 nt, Artificial Sequence
  Description of Artificial Sequence: Synthetic oligonucleotide
ggugguggagcgcacauuc

SEQ ID NO: 1818527 - RNA, 19 nt, Artificial Sequence
  Description of Artificial Sequence: Synthetic oligonucleotide
ccagacaaccucucugugg

SEQ ID NO: 1818528 - RNA, 19 nt, Artificial Sequence
  Description of Artificial Sequence: Synthetic oligonucleotide
uccccgaggccccugggca

SEQ ID NO: 1818529 - RNA, 19 nt, Artificial Sequence
  Description of Artificial Sequence: Synthetic oligonucleotide
gggaugucuuuacacacac

SEQ ID NO: 1818530 - RNA, 19 nt, Artificial Sequence
  Description of Artificial Sequence: Synthetic oligonucleotide
agggugucagcaguggaug

SEQ ID NO: 1818531 - RNA, 19 nt, Artificial Sequence
  Description of Artificial Sequence: Synthetic oligonucleotide
gagcgcacauuccggcccg

SEQ ID NO: 1818532 - RNA, 19 nt, Artificial Sequence
  Description of Artificial Sequence: Synthetic oligonucleotide
ggucauucagacccagaug

SEQ ID NO: 1818533 - RNA, 19 nt, Artificial Sequence
  Description of Artificial Sequence: Synthetic oligonucleotide
uguggucgauguaggcugu

SEQ ID NO: 1818534 - RNA, 19 nt, Artificial Sequence
  Description of Artificial Sequence: Synthetic oligonucleotide
  modified_base (3)..(3): a, c, u, g, unknown or other
ugnggaggagguuggccau

SEQ ID NO: 1818535 - RNA, 19 nt, Artificial Sequence
  Description of Artificial Sequence: Synthetic oligonucleotide
uagauccuugauggccugg

SEQ ID NO: 1818536 - RNA, 19 nt, Artificial Sequence
  Description of Artificial Sequence: Synthetic oligonucleotide
ggaacggcucagcuggcgg

SEQ ID NO: 1818537 - RNA, 19 nt, Artificial Sequence
  Description of Artificial Sequence: Synthetic oligonucleotide
cuugauggccuggucgcgc

SEQ ID NO: 1818538 - RNA, 19 nt, Artificial Sequence
  Description of Artificial Sequence: Synthetic oligonucleotide
cacacgugggacagcggag

SEQ ID NO: 1818539 - RNA, 19 nt, Artificial Sequence
  Description of Artificial Sequence: Synthetic oligonucleotide
uggccuguguauuggcccu

SEQ ID NO: 1818540 - RNA, 19 nt, Artificial Sequence
  Description of Artificial Sequence: Synthetic oligonucleotide
guaaggcagugaugggagc

SEQ ID NO: 1818541 - RNA, 19 nt, Artificial Sequence
  Description of Artificial Sequence: Synthetic oligonucleotide
cucuagggacagcacugcc

SEQ ID NO: 1818542 - RNA, 19 nt, Artificial Sequence
  Description of Artificial Sequence: Synthetic oligonucleotide
caucccgaggcacgagagg

SEQ ID NO: 1818543 - RNA, 19 nt, Artificial Sequence
  Description of Artificial Sequence: Synthetic oligonucleotide
ugucggcacagcuggcucu

SEQ ID NO: 1818544 - RNA, 19 nt, Artificial Sequence
  Description of Artificial Sequence: Synthetic oligonucleotide
cacauuccggcccgggcag

SEQ ID NO: 1818545 - RNA, 19 nt, Artificial Sequence
  Description of Artificial Sequence: Synthetic oligonucleotide
aggcacgagagggaccugg

SEQ ID NO: 1818546 - RNA, 19 nt, Artificial Sequence
  Description of Artificial Sequence: Synthetic oligonucleotide
gucgauguaggcuguccuc

SEQ ID NO: 1818547 - RNA, 19 nt, Artificial Sequence
  Description of Artificial Sequence: Synthetic oligonucleotide
uggucgauguaggcugucc

SEQ ID NO: 1818548 - RNA, 19 nt, Artificial Sequence
  Description of Artificial Sequence: Synthetic oligonucleotide
cuaaugggcuggcagugga

SEQ ID NO: 1818549 - RNA, 19 nt, Artificial Sequence
  Description of Artificial Sequence: Synthetic oligonucleotide
uaggggacagaauguggua

SEQ ID NO: 1818550 - RNA, 19 nt, Artificial Sequence
  Description of Artificial Sequence: Synthetic oligonucleotide
  modified_base (8)..(8): a, c, u, g, unknown or other
ccugaugnggaggagguug

SEQ ID NO: 1818551 - RNA, 19 nt, Artificial Sequence
  Description of Artificial Sequence: Synthetic oligonucleotide
guagauccuugauggccug

SEQ ID NO: 1818552 - RNA, 19 nt, Artificial Sequence
  Description of Artificial Sequence: Synthetic oligonucleotide
uuacugccauagugggagc

SEQ ID NO: 1818553 - RNA, 19 nt, Artificial Sequence
  Description of Artificial Sequence: Synthetic oligonucleotide
augucuuuacacacacaca

SEQ ID NO: 1818554 - RNA, 19 nt, Artificial Sequence
  Description of Artificial Sequence: Synthetic oligonucleotide
ccuuacuauaccacacgug

SEQ ID NO: 1818555 - RNA, 19 nt, Artificial Sequence
  Description of Artificial Sequence: Synthetic oligonucleotide
acacacacacacacacauc

SEQ ID NO: 1818556 - RNA, 19 nt, Artificial Sequence
  Description of Artificial Sequence: Synthetic oligonucleotide
guggagugguugaaagcag

SEQ ID NO: 1818557 - RNA, 19 nt, Artificial Sequence
  Description of Artificial Sequence: Synthetic oligonucleotide
cauggcgcaggucugcaga

SEQ ID NO: 1818558 - RNA, 19 nt, Artificial Sequence
  Description of Artificial Sequence: Synthetic oligonucleotide
uguccccucccgugcagcc

SEQ ID NO: 1818559 - RNA, 19 nt, Artificial Sequence
  Description of Artificial Sequence: Synthetic oligonucleotide
accaggcacagaggcagcg

SEQ ID NO: 1818560 - RNA, 19 nt, Artificial Sequence
  Description of Artificial Sequence: Synthetic oligonucleotide
gagguaggugcugggguug

SEQ ID NO: 1818561 - RNA, 19 nt, Artificial Sequence
  Description of Artificial Sequence: Synthetic oligonucleotide
guggaccuuacuauaccac

SEQ ID NO: 1818562 - RNA, 19 nt, Artificial Sequence
  Description of Artificial Sequence: Synthetic oligonucleotide
auuuacugccauaguggga

SEQ ID NO: 1818563 - RNA, 19 nt, Artificial Sequence
  Description of Artificial Sequence: Synthetic oligonucleotide
ggcgcaggucugcagacag

SEQ ID NO: 1818564 - RNA, 19 nt, Artificial Sequence
  Description of Artificial Sequence: Synthetic oligonucleotide
gauuccgauucugaacuua

SEQ ID NO: 1818565 - RNA, 19 nt, Artificial Sequence
  Description of Artificial Sequence: Synthetic oligonucleotide
  modified_base (6)..(6): a, c, u, g, unknown or other
ugaugnggaggagguuggc

SEQ ID NO: 1818566 - RNA, 19 nt, Artificial Sequence
  Description of Artificial Sequence: Synthetic oligonucleotide
ugguacuccuggccugugu

SEQ ID NO: 1818567 - RNA, 19 nt, Artificial Sequence
  Description of Artificial Sequence: Synthetic oligonucleotide
acaucccgaggcacgagag

SEQ ID NO: 1818568 - RNA, 19 nt, Artificial Sequence
  Description of Artificial Sequence: Synthetic oligonucleotide
cacacacacacacacacau

SEQ ID NO: 1818569 - RNA, 19 nt, Artificial Sequence
  Description of Artificial Sequence: Synthetic oligonucleotide
acacacacacacaucccca

SEQ ID NO: 1818570 - RNA, 19 nt, Artificial Sequence
  Description of Artificial Sequence: Synthetic oligonucleotide
ugccauagugggagcucca

SEQ ID NO: 1818571 - RNA, 19 nt, Artificial Sequence
  Description of Artificial Sequence: Synthetic oligonucleotide
cacgugggacagcggaggg

SEQ ID NO: 1818572 - RNA, 19 nt, Artificial Sequence
  Description of Artificial Sequence: Synthetic oligonucleotide
gaugguucugauggcucuc

SEQ ID NO: 1818573 - RNA, 19 nt, Artificial Sequence
  Description of Artificial Sequence: Synthetic oligonucleotide
gucuuuacacacacacaca

SEQ ID NO: 1818574 - RNA, 19 nt, Artificial Sequence
  Description of Artificial Sequence: Synthetic oligonucleotide
gcuacaugaguugggcugc

SEQ ID NO: 1818575 - RNA, 19 nt, Artificial Sequence
  Description of Artificial Sequence: Synthetic oligonucleotide
gggugucagcaguggaugg

SEQ ID NO: 1818576 - RNA, 19 nt, Artificial Sequence
  Description of Artificial Sequence: Synthetic oligonucleotide
aacggcucagcuggcgggu

SEQ ID NO: 1818577 - RNA, 19 nt, Artificial Sequence
  Description of Artificial Sequence: Synthetic oligonucleotide
ggaccuuacuauaccacac

SEQ ID NO: 1818578 - RNA, 19 nt, Artificial Sequence
  Description of Artificial Sequence: Synthetic oligonucleotide
cuccucaaagguccugcuc

SEQ ID NO: 1818579 - RNA, 19 nt, Artificial Sequence
  Description of Artificial Sequence: Synthetic oligonucleotide
uggguacaucccgaggcac

SEQ ID NO: 1818580 - RNA, 19 nt, Artificial Sequence
  Description of Artificial Sequence: Synthetic oligonucleotide
gacagcggagggugucagc

SEQ ID NO: 1818581 - RNA, 19 nt, Artificial Sequence
  Description of Artificial Sequence: Synthetic oligonucleotide
uccgccucaugcugccuga

SEQ ID NO: 1818582 - RNA, 19 nt, Artificial Sequence
  Description of Artificial Sequence: Synthetic oligonucleotide
ucccgaggcacgagaggga

SEQ ID NO: 1818583 - RNA, 19 nt, Artificial Sequence
  Description of Artificial Sequence: Synthetic oligonucleotide
gagcgcugacaugggagag

SEQ ID NO: 1818584 - RNA, 19 nt, Artificial Sequence
  Description of Artificial Sequence: Synthetic oligonucleotide
ugugacacuucugccugua

SEQ ID NO: 1818585 - RNA, 19 nt, Artificial Sequence
  Description of Artificial Sequence: Synthetic oligonucleotide
cugucuuucaggacagccu

SEQ ID NO: 1818586 - RNA, 19 nt, Artificial Sequence
  Description of Artificial Sequence: Synthetic oligonucleotide
gcagugaugggagccgagg

SEQ ID NO: 1818587 - RNA, 19 nt, Artificial Sequence
  Description of Artificial Sequence: Synthetic oligonucleotide
cuccuggccuguguauugg

SEQ ID NO: 1818588 - RNA, 19 nt, Artificial Sequence
  Description of Artificial Sequence: Synthetic oligonucleotide
gugaggaggcuguccgggc

SEQ ID NO: 1818589 - RNA, 19 nt, Artificial Sequence
  Description of Artificial Sequence: Synthetic oligonucleotide
cuguguauuggcccuggaa

SEQ ID NO: 1818590 - RNA, 19 nt, Artificial Sequence
  Description of Artificial Sequence: Synthetic oligonucleotide
gacagggaacggcucagcu

SEQ ID NO: 1818591 - RNA, 19 nt, Artificial Sequence
  Description of Artificial Sequence: Synthetic oligonucleotide
auaccacacgugggacagc

SEQ ID NO: 1818592 - RNA, 19 nt, Artificial Sequence
  Description of Artificial Sequence: Synthetic oligonucleotide
ggacagaaugugguacucc

SEQ ID NO: 1818593 - RNA, 19 nt, Artificial Sequence
  Description of Artificial Sequence: Synthetic oligonucleotide
auccgcuucugcaguggac

SEQ ID NO: 1818594 - RNA, 19 nt, Artificial Sequence
  Description of Artificial Sequence: Synthetic oligonucleotide
gcugagccaaucaccaggc

SEQ ID NO: 1818595 - RNA, 19 nt, Artificial Sequence
  Description of Artificial Sequence: Synthetic oligonucleotide
ggguacaucccgaggcacg

SEQ ID NO: 1818596 - RNA, 19 nt, Artificial Sequence
  Description of Artificial Sequence: Synthetic oligonucleotide
agagacugccugccucaga

SEQ ID NO: 1818597 - RNA, 19 nt, Artificial Sequence
  Description of Artificial Sequence: Synthetic oligonucleotide
ggagcgcugacaugggaga

SEQ ID NO: 1818598 - RNA, 19 nt, Artificial Sequence
  Description of Artificial Sequence: Synthetic oligonucleotide
ucgguccucguggaguggu

SEQ ID NO: 1818599 - RNA, 19 nt, Artificial Sequence
  Description of Artificial Sequence: Synthetic oligonucleotide
cuggguacaucccgaggca

SEQ ID NO: 1818600 - RNA, 19 nt, Artificial Sequence
  Description of Artificial Sequence: Synthetic oligonucleotide
cugagugcggccugcagcu

SEQ ID NO: 1818601 - RNA, 19 nt, Artificial Sequence
  Description of Artificial Sequence: Synthetic oligonucleotide
guccuaaugggcuggcagu

SEQ ID NO: 1818602 - RNA, 19 nt, Artificial Sequence
  Description of Artificial Sequence: Synthetic oligonucleotide
agauuccgauucugaacuu

SEQ ID NO: 1818603 - RNA, 19 nt, Artificial Sequence
  Description of Artificial Sequence: Synthetic oligonucleotide
augggagagcuggugcucu

SEQ ID NO: 1818604 - RNA, 19 nt, Artificial Sequence
  Description of Artificial Sequence: Synthetic oligonucleotide
cacgagagggaccugggcu

SEQ ID NO: 1818605 - RNA, 19 nt, Artificial Sequence
  Description of Artificial Sequence: Synthetic oligonucleotide
ucgcugucuuccugucggc

SEQ ID NO: 1818606 - RNA, 19 nt, Artificial Sequence
  Description of Artificial Sequence: Synthetic oligonucleotide
  modified_base (2)..(2): a, c, u, g, unknown or other
gnggaggagguuggccaug

SEQ ID NO: 1818607 - RNA, 19 nt, Artificial Sequence
  Description of Artificial Sequence: Synthetic oligonucleotide
cagucuggguacaucccga

SEQ ID NO: 1818608 - RNA, 19 nt, Artificial Sequence
  Description of Artificial Sequence: Synthetic oligonucleotide
cugucggcacagcuggcuc

SEQ ID NO: 1818609 - RNA, 19 nt, Artificial Sequence
  Description of Artificial Sequence: Synthetic oligonucleotide
ccuuaggggacagaaugug

SEQ ID NO: 1818610 - RNA, 19 nt, Artificial Sequence
  Description of Artificial Sequence: Synthetic oligonucleotide
acacacacacacacacaca

SEQ ID NO: 1818611 - RNA, 19 nt, Artificial Sequence
  Description of Artificial Sequence: Synthetic oligonucleotide
  modified_base (10)..(10): a, c, u, g, unknown or other
guccugaugnggaggaggu

SEQ ID NO: 1818612 - RNA, 19 nt, Artificial Sequence
  Description of Artificial Sequence: Synthetic oligonucleotide
acagugggugguggguaag

SEQ ID NO: 1818613 - RNA, 19 nt, Artificial Sequence
  Description of Artificial Sequence: Synthetic oligonucleotide
ugcuuggguguggucgaug

SEQ ID NO: 1818614 - RNA, 19 nt, Artificial Sequence
  Description of Artificial Sequence: Synthetic oligonucleotide
ccuggccuguguauuggcc

SEQ ID NO: 1818615 - RNA, 19 nt, Artificial Sequence
  Description of Artificial Sequence: Synthetic oligonucleotide
gugccggguuccccgaggc

SEQ ID NO: 1818616 - RNA, 19 nt, Artificial Sequence
  Description of Artificial Sequence: Synthetic oligonucleotide
ugccggguuccccgaggcc

SEQ ID NO: 1818617 - RNA, 19 nt, Artificial Sequence
  Description of Artificial Sequence: Synthetic oligonucleotide
ggggaugcuccucaaaggu

SEQ ID NO: 1818618 - RNA, 19 nt, Artificial Sequence
  Description of Artificial Sequence: Synthetic oligonucleotide
gcaguggaccuuacuauac

SEQ ID NO: 1818619 - RNA, 19 nt, Artificial Sequence
  Description of Artificial Sequence: Synthetic oligonucleotide
uggggccauccgcuucugc

SEQ ID NO: 1818620 - RNA, 19 nt, Artificial Sequence
  Description of Artificial Sequence: Synthetic oligonucleotide
guuccccgaggccccuggg

SEQ ID NO: 1818621 - RNA, 19 nt, Artificial Sequence
  Description of Artificial Sequence: Synthetic oligonucleotide
gagugccggguuccccgag

SEQ ID NO: 1818622 - RNA, 19 nt, Artificial Sequence
  Description of Artificial Sequence: Synthetic oligonucleotide
ucgcaggcuccgggcaugg

SEQ ID NO: 1818623 - RNA, 19 nt, Artificial Sequence
  Description of Artificial Sequence: Synthetic oligonucleotide
ugggacagcggaggguguc

SEQ ID NO: 1818624 - RNA, 19 nt, Artificial Sequence
  Description of Artificial Sequence: Synthetic oligonucleotide
cugcaguggaccuuacuau

SEQ ID NO: 1818625 - RNA, 19 nt, Artificial Sequence
  Description of Artificial Sequence: Synthetic oligonucleotide
ggguguggucgauguaggc

SEQ ID NO: 1818626 - RNA, 19 nt, Artificial Sequence
  Description of Artificial Sequence: Synthetic oligonucleotide
uaggcggagcugugacacu

SEQ ID NO: 1818627 - RNA, 19 nt, Artificial Sequence
  Description of Artificial Sequence: Synthetic oligonucleotide
gcucgcugucuuccugucg

SEQ ID NO: 1818628 - RNA, 19 nt, Artificial Sequence
  Description of Artificial Sequence: Synthetic oligonucleotide
gugguggagcgcacauucc

SEQ ID NO: 1818629 - RNA, 19 nt, Artificial Sequence
  Description of Artificial Sequence: Synthetic oligonucleotide
gucgcgcucuguccugaug

SEQ ID NO: 1818630 - RNA, 19 nt, Artificial Sequence
  Description of Artificial Sequence: Synthetic oligonucleotide
agacaaccucucuguggau

SEQ ID NO: 1818631 - RNA, 19 nt, Artificial Sequence
  Description of Artificial Sequence: Synthetic oligonucleotide
cguggagugguugaaagca

SEQ ID NO: 1818632 - RNA, 19 nt, Artificial Sequence
  Description of Artificial Sequence: Synthetic oligonucleotide
uggguccuaaugggcuggc

SEQ ID NO: 1818633 - RNA, 19 nt, Artificial Sequence
  Description of Artificial Sequence: Synthetic oligonucleotide
cucgcugagugcggccugc

SEQ ID NO: 1818634 - RNA, 19 nt, Artificial Sequence
  Description of Artificial Sequence: Synthetic oligonucleotide
ccaggugacuggugacugg

SEQ ID NO: 1818635 - RNA, 19 nt, Artificial Sequence
  Description of Artificial Sequence: Synthetic oligonucleotide
cuggucgcgcucuguccug

SEQ ID NO: 1818636 - RNA, 19 nt, Artificial Sequence
  Description of Artificial Sequence: Synthetic oligonucleotide
gguacaucccgaggcacga

SEQ ID NO: 1818637 - RNA, 19 nt, Artificial Sequence
  Description of Artificial Sequence: Synthetic oligonucleotide
guggauuuacugccauagu

SEQ ID NO: 1818638 - RNA, 19 nt, Artificial Sequence
  Description of Artificial Sequence: Synthetic oligonucleotide
agggaacggcucagcuggc

SEQ ID NO: 1818639 - RNA, 19 nt, Artificial Sequence
  Description of Artificial Sequence: Synthetic oligonucleotide
ccuaaugggcuggcagugg

SEQ ID NO: 1818640 - RNA, 19 nt, Artificial Sequence
  Description of Artificial Sequence: Synthetic oligonucleotide
ggagggugaggaauccaac

SEQ ID NO: 1818641 - RNA, 19 nt, Artificial Sequence
  Description of Artificial Sequence: Synthetic oligonucleotide
gagugcggccugcagcucu

SEQ ID NO: 1818642 - RNA, 19 nt, Artificial Sequence
  Description of Artificial Sequence: Synthetic oligonucleotide
ggcacgagagggaccuggg

SEQ ID NO: 1818643 - RNA, 19 nt, Artificial Sequence
  Description of Artificial Sequence: Synthetic oligonucleotide
gccugaugaucuugucccc

SEQ ID NO: 1818644 - RNA, 19 nt, Artificial Sequence
  Description of Artificial Sequence: Synthetic oligonucleotide
gacaaccucucuguggauu

SEQ ID NO: 1818645 - RNA, 19 nt, Artificial Sequence
  Description of Artificial Sequence: Synthetic oligonucleotide
  modified_base (12)..(12): a, c, u, g, unknown or other
cuguccugaugnggaggag

SEQ ID NO: 1818646 - RNA, 19 nt, Artificial Sequence
  Description of Artificial Sequence: Synthetic oligonucleotide
uuguacuuuuggggauguc

SEQ ID NO: 1818647 - RNA, 19 nt, Artificial Sequence
  Description of Artificial Sequence: Synthetic oligonucleotide
ggagggugucagcagugga

SEQ ID NO: 1818648 - RNA, 19 nt, Artificial Sequence
  Description of Artificial Sequence: Synthetic oligonucleotide
cauccgcuucugcagugga

SEQ ID NO: 1818649 - RNA, 19 nt, Artificial Sequence
  Description of Artificial Sequence: Synthetic oligonucleotide
ggaugguucugauggcucu

SEQ ID NO: 1818650 - RNA, 19 nt, Artificial Sequence
  Description of Artificial Sequence: Synthetic oligonucleotide
ggagugguugaaagcagaa

SEQ ID NO: 1818651 - RNA, 19 nt, Artificial Sequence
  Description of Artificial Sequence: Synthetic oligonucleotide
gcucucuagggacagcacu

SEQ ID NO: 1818652 - RNA, 19 nt, Artificial Sequence
  Description of Artificial Sequence: Synthetic oligonucleotide
gguguggucgauguaggcu

SEQ ID NO: 1818653 - RNA, 19 nt, Artificial Sequence
  Description of Artificial Sequence: Synthetic oligonucleotide
aggcggagcugugacacuu

SEQ ID NO: 1818654 - RNA, 19 nt, Artificial Sequence
  Description of Artificial Sequence: Synthetic oligonucleotide
gggaacggcucagcuggcg

SEQ ID NO: 1818655 - RNA, 19 nt, Artificial Sequence
  Description of Artificial Sequence: Synthetic oligonucleotide
uggucgcgcucuguccuga

SEQ ID NO: 1818656 - RNA, 19 nt, Artificial Sequence
  Description of Artificial Sequence: Synthetic oligonucleotide
gguccucguggagugguug

SEQ ID NO: 1818657 - RNA, 19 nt, Artificial Sequence
  Description of Artificial Sequence: Synthetic oligonucleotide
gcacgagagggaccugggc

SEQ ID NO: 1818658 - RNA, 19 nt, Artificial Sequence
  Description of Artificial Sequence: Synthetic oligonucleotide
cagcgaggugcugagcuga

SEQ ID NO: 1818659 - RNA, 19 nt, Artificial Sequence
  Description of Artificial Sequence: Synthetic oligonucleotide
ccuggagcgcugacauggg

SEQ ID NO: 1818660 - RNA, 19 nt, Artificial Sequence
  Description of Artificial Sequence: Synthetic oligonucleotide
cuguggauuuacugccaua

SEQ ID NO: 1818661 - RNA, 19 nt, Artificial Sequence
  Description of Artificial Sequence: Synthetic oligonucleotide
ccacacgugggacagcgga

SEQ ID NO: 1818662 - RNA, 19 nt, Artificial Sequence
  Description of Artificial Sequence: Synthetic oligonucleotide
ccucgguccucguggagug

SEQ ID NO: 1818663 - RNA, 19 nt, Artificial Sequence
  Description of Artificial Sequence: Synthetic oligonucleotide
gugcugggguugcauagua

SEQ ID NO: 1818664 - RNA, 19 nt, Artificial Sequence
  Description of Artificial Sequence: Synthetic oligonucleotide
  modified_base (9)..(9): a, c, u, g, unknown or other
uccugaugnggaggagguu

SEQ ID NO: 1818665 - RNA, 19 nt, Artificial Sequence
  Description of Artificial Sequence: Synthetic oligonucleotide
accacacgugggacagcgg

SEQ ID NO: 1818666 - RNA, 19 nt, Artificial Sequence
  Description of Artificial Sequence: Synthetic oligonucleotide
cacugucuuucaggacagc

SEQ ID NO: 1818667 - RNA, 19 nt, Artificial Sequence
  Description of Artificial Sequence: Synthetic oligonucleotide
gcuuggguguggucgaugu

SEQ ID NO: 1818668 - RNA, 19 nt, Artificial Sequence
  Description of Artificial Sequence: Synthetic oligonucleotide
ggcucuguaccaucagacu

SEQ ID NO: 1818669 - RNA, 19 nt, Artificial Sequence
  Description of Artificial Sequence: Synthetic oligonucleotide
cuggagcgcugacauggga

SEQ ID NO: 1818670 - RNA, 19 nt, Artificial Sequence
  Description of Artificial Sequence: Synthetic oligonucleotide
ggggacagaaugugguacu

SEQ ID NO: 1818671 - RNA, 19 nt, Artificial Sequence
  Description of Artificial Sequence: Synthetic oligonucleotide
acgugggacagcggagggu

SEQ ID NO: 1818672 - RNA, 19 nt, Artificial Sequence
  Description of Artificial Sequence: Synthetic oligonucleotide
ccaucuuccagccaucaau

SEQ ID NO: 1818673 - RNA, 19 nt, Artificial Sequence
  Description of Artificial Sequence: Synthetic oligonucleotide
  modified_base (17)..(17): a, c, u, g, unknown or other
gcgcucuguccugaugngg

SEQ ID NO: 1818674 - RNA, 19 nt, Artificial Sequence
  Description of Artificial Sequence: Synthetic oligonucleotide
gccuggucgcgcucugucc

SEQ ID NO: 1818675 - RNA, 19 nt, Artificial Sequence
  Description of Artificial Sequence: Synthetic oligonucleotide
cucgguccucguggagugg

SEQ ID NO: 1818676 - RNA, 19 nt, Artificial Sequence
  Description of Artificial Sequence: Synthetic oligonucleotide
agacccagauggacagagu

SEQ ID NO: 1818677 - RNA, 19 nt, Artificial Sequence
  Description of Artificial Sequence: Synthetic oligonucleotide
cucgcaggcuccgggcaug

SEQ ID NO: 1818678 - RNA, 19 nt, Artificial Sequence
  Description of Artificial Sequence: Synthetic oligonucleotide
uacaugaguugggcugcuu

SEQ ID NO: 1818679 - RNA, 19 nt, Artificial Sequence
  Description of Artificial Sequence: Synthetic oligonucleotide
gaugcuccucaaagguccu

SEQ ID NO: 1818680 - RNA, 19 nt, Artificial Sequence
  Description of Artificial Sequence: Synthetic oligonucleotide
cacacacacacauccccau

SEQ ID NO: 1818681 - RNA, 19 nt, Artificial Sequence
  Description of Artificial Sequence: Synthetic oligonucleotide
gccauccgcuucugcagug

SEQ ID NO: 1818682 - RNA, 19 nt, Artificial Sequence
  Description of Artificial Sequence: Synthetic oligonucleotide
agccgaggagagagcuggg

SEQ ID NO: 1818683 - RNA, 19 nt, Artificial Sequence
  Description of Artificial Sequence: Synthetic oligonucleotide
ccguaggcggagcugugac

SEQ ID NO: 1818684 - RNA, 19 nt, Artificial Sequence
  Description of Artificial Sequence: Synthetic oligonucleotide
ggacagcggagggugucag

SEQ ID NO: 1818685 - RNA, 19 nt, Artificial Sequence
  Description of Artificial Sequence: Synthetic oligonucleotide
aggcuccgggcauggcgca

SEQ ID NO: 1818686 - RNA, 19 nt, Artificial Sequence
  Description of Artificial Sequence: Synthetic oligonucleotide
ccauccgcuucugcagugg

SEQ ID NO: 1818687 - RNA, 19 nt, Artificial Sequence
  Description of Artificial Sequence: Synthetic oligonucleotide
ccaggagggugaggaaucc

SEQ ID NO: 1818688 - RNA, 19 nt, Artificial Sequence
  Description of Artificial Sequence: Synthetic oligonucleotide
aggcugugccacugucuuu

SEQ ID NO: 1818689 - RNA, 19 nt, Artificial Sequence
  Description of Artificial Sequence: Synthetic oligonucleotide
agcgcacauuccggcccgg

SEQ ID NO: 1818690 - RNA, 19 nt, Artificial Sequence
  Description of Artificial Sequence: Synthetic oligonucleotide
cagacuccccagacaaccu

SEQ ID NO: 1818691 - RNA, 19 nt, Artificial Sequence
  Description of Artificial Sequence: Synthetic oligonucleotide
ggcagugaugggagccgag

SEQ ID NO: 1818692 - RNA, 19 nt, Artificial Sequence
  Description of Artificial Sequence: Synthetic oligonucleotide
gcuccgggcauggcgcagg

SEQ ID NO: 1818693 - RNA, 19 nt, Artificial Sequence
  Description of Artificial Sequence: Synthetic oligonucleotide
ggaugucuuuacacacaca

SEQ ID NO: 1818694 - RNA, 19 nt, Artificial Sequence
  Description of Artificial Sequence: Synthetic oligonucleotide
cuuggguguggucgaugua

SEQ ID NO: 1818695 - RNA, 19 nt, Artificial Sequence
  Description of Artificial Sequence: Synthetic oligonucleotide
ugagugcggccugcagcuc

SEQ ID NO: 1818696 - RNA, 19 nt, Artificial Sequence
  Description of Artificial Sequence: Synthetic oligonucleotide
cagcuggcgggugguggag

SEQ ID NO: 1818697 - RNA, 19 nt, Artificial Sequence
  Description of Artificial Sequence: Synthetic oligonucleotide
gggacaacagagacugccu

SEQ ID NO: 1818698 - RNA, 19 nt, Artificial Sequence
  Description of Artificial Sequence: Synthetic oligonucleotide
cuccaggugacuggugacu

SEQ ID NO: 1818699 - RNA, 19 nt, Artificial Sequence
  Description of Artificial Sequence: Synthetic oligonucleotide
cccgaggcacgagagggac

SEQ ID NO: 1818700 - RNA, 19 nt, Artificial Sequence
  Description of Artificial Sequence: Synthetic oligonucleotide
ccgaggcacgagagggacc

SEQ ID NO: 1818701 - RNA, 19 nt, Artificial Sequence
  Description of Artificial Sequence: Synthetic oligonucleotide
ggcucgcugucuuccuguc

SEQ ID NO: 1818702 - RNA, 19 nt, Artificial Sequence
  Description of Artificial Sequence: Synthetic oligonucleotide
ccgggcauggcgcaggucu

SEQ ID NO: 1818703 - RNA, 19 nt, Artificial Sequence
  Description of Artificial Sequence: Synthetic oligonucleotide
cgcacauuccggcccgggc

SEQ ID NO: 1818704 - RNA, 19 nt, Artificial Sequence
  Description of Artificial Sequence: Synthetic oligonucleotide
gaggcacgagagggaccug

SEQ ID NO: 1818705 - RNA, 19 nt, Artificial Sequence
  Description of Artificial Sequence: Synthetic oligonucleotide
caacagagacugccugccu

SEQ ID NO: 1818706 - RNA, 19 nt, Artificial Sequence
  Description of Artificial Sequence: Synthetic oligonucleotide
guggucgauguaggcuguc

SEQ ID NO: 1818707 - RNA, 19 nt, Artificial Sequence
  Description of Artificial Sequence: Synthetic oligonucleotide
uggccuggucgcgcucugu

SEQ ID NO: 1818708 - RNA, 19 nt, Artificial Sequence
  Description of Artificial Sequence: Synthetic oligonucleotide
gggcauggcgcaggucugc

SEQ ID NO: 1818709 - RNA, 19 nt, Artificial Sequence
  Description of Artificial Sequence: Synthetic oligonucleotide
agccguaggcggagcugug

SEQ ID NO: 1818710 - RNA, 19 nt, Artificial Sequence
  Description of Artificial Sequence: Synthetic oligonucleotide
gcgcaggucugcagacagg

SEQ ID NO: 1818711 - RNA, 19 nt, Artificial Sequence
  Description of Artificial Sequence: Synthetic oligonucleotide
  modified_base (18)..(18): a, c, u, g, unknown or other
cgcgcucuguccugaugng

SEQ ID NO: 1818712 - RNA, 19 nt, Artificial Sequence
  Description of Artificial Sequence: Synthetic oligonucleotide
agcgaggugcugagcugau

SEQ ID NO: 1818713 - RNA, 19 nt, Artificial Sequence
  Description of Artificial Sequence: Synthetic oligonucleotide
agugcggccugcagcucuu

SEQ ID NO: 1818714 - RNA, 19 nt, Artificial Sequence
  Description of Artificial Sequence: Synthetic oligonucleotide
gggacagcggaggguguca

SEQ ID NO: 1818715 - RNA, 19 nt, Artificial Sequence
  Description of Artificial Sequence: Synthetic oligonucleotide
cagccguaggcggagcugu

SEQ ID NO: 1818716 - RNA, 19 nt, Artificial Sequence
  Description of Artificial Sequence: Synthetic oligonucleotide
gccucgcaggcuccgggca

SEQ ID NO: 1818717 - RNA, 19 nt, Artificial Sequence
  Description of Artificial Sequence: Synthetic oligonucleotide
gccuuaggggacagaaugu

SEQ ID NO: 1818718 - RNA, 19 nt, Artificial Sequence
  Description of Artificial Sequence: Synthetic oligonucleotide
cagccuuaggggacagaau

SEQ ID NO: 1818719 - RNA, 19 nt, Artificial Sequence
  Description of Artificial Sequence: Synthetic oligonucleotide
ccagccguaggcggagcug

SEQ ID NO: 1818720 - RNA, 19 nt, Artificial Sequence
  Description of Artificial Sequence: Synthetic oligonucleotide
ggcauggcgcaggucugca

SEQ ID NO: 1818721 - RNA, 19 nt, Artificial Sequence
  Description of Artificial Sequence: Synthetic oligonucleotide
ggugcugggguugcauagu

SEQ ID NO: 1818722 - RNA, 19 nt, Artificial Sequence
  Description of Artificial Sequence: Synthetic oligonucleotide
uccgggcauggcgcagguc

SEQ ID NO: 1818723 - RNA, 19 nt, Artificial Sequence
  Description of Artificial Sequence: Synthetic oligonucleotide
caaccucucuguggauuua

SEQ ID NO: 1818724 - RNA, 19 nt, Artificial Sequence
  Description of Artificial Sequence: Synthetic oligonucleotide
cgauguaggcuguccucca

SEQ ID NO: 1818725 - RNA, 19 nt, Artificial Sequence
  Description of Artificial Sequence: Synthetic oligonucleotide
gcgaggugcugagcugaug

SEQ ID NO: 1818726 - RNA, 19 nt, Artificial Sequence
  Description of Artificial Sequence: Synthetic oligonucleotide
ccuggucgcgcucuguccu

SEQ ID NO: 1818727 - RNA, 19 nt, Artificial Sequence
  Description of Artificial Sequence: Synthetic oligonucleotide
ggcggagcugugacacuuc

SEQ ID NO: 1818728 - RNA, 19 nt, Artificial Sequence
  Description of Artificial Sequence: Synthetic oligonucleotide
cugggcucgcugucuuccu

SEQ ID NO: 1818729 - RNA, 19 nt, Artificial Sequence
  Description of Artificial Sequence: Synthetic oligonucleotide
ggagagagcuggggccauc

SEQ ID NO: 1818730 - RNA, 19 nt, Artificial Sequence
  Description of Artificial Sequence: Synthetic oligonucleotide
gccguaggcggagcuguga

SEQ ID NO: 1818731 - RNA, 19 nt, Artificial Sequence
  Description of Artificial Sequence: Synthetic oligonucleotide
cguaggcggagcugugaca

SEQ ID NO: 1818732 - RNA, 19 nt, Artificial Sequence
  Description of Artificial Sequence: Synthetic oligonucleotide
ggcuccgggcauggcgcag

SEQ ID NO: 1818733 - RNA, 19 nt, Artificial Sequence
  Description of Artificial Sequence: Synthetic oligonucleotide
ggcuguccgggcugaggua

SEQ ID NO: 1818734 - RNA, 19 nt, Artificial Sequence
  Description of Artificial Sequence: Synthetic oligonucleotide
cagcacugccuggguccug

SEQ ID NO: 1818735 - RNA, 19 nt, Artificial Sequence
  Description of Artificial Sequence: Synthetic oligonucleotide
cgggcauggcgcaggucug

SEQ ID NO: 1818736 - RNA, 19 nt, Artificial Sequence
  Description of Artificial Sequence: Synthetic oligonucleotide
ggguccuaaugggcuggca

SEQ ID NO: 1818737 - RNA, 19 nt, Artificial Sequence
  Description of Artificial Sequence: Synthetic oligonucleotide
gcucagcuggcggguggug

SEQ ID NO: 1818738 - RNA, 19 nt, Artificial Sequence
  Description of Artificial Sequence: Synthetic oligonucleotide
ccuguguauuggcccugga

SEQ ID NO: 1818739 - RNA, 19 nt, Artificial Sequence
  Description of Artificial Sequence: Synthetic oligonucleotide
cccaucuuccagccaucaa

SEQ ID NO: 1818740 - RNA, 19 nt, Artificial Sequence
  Description of Artificial Sequence: Synthetic oligonucleotide
cgaggcacgagagggaccu

SEQ ID NO: 1818741 - RNA, 19 nt, Artificial Sequence
  Description of Artificial Sequence: Synthetic oligonucleotide
ccucaugcugccugaugau

SEQ ID NO: 1818742 - RNA, 19 nt, Artificial Sequence
  Description of Artificial Sequence: Synthetic oligonucleotide
ccucguggagugguugaaa

SEQ ID NO: 1818743 - RNA, 19 nt, Artificial Sequence
  Description of Artificial Sequence: Synthetic oligonucleotide
ggaccugggcucgcugucu

SEQ ID NO: 1818744 - RNA, 19 nt, Artificial Sequence
  Description of Artificial Sequence: Synthetic oligonucleotide
gugggacagcggagggugu

SEQ ID NO: 1818745 - RNA, 19 nt, Artificial Sequence
  Description of Artificial Sequence: Synthetic oligonucleotide
cuccgggcauggcgcaggu

SEQ ID NO: 1818746 - RNA, 19 nt, Artificial Sequence
  Description of Artificial Sequence: Synthetic oligonucleotide
ggcucagcuggcggguggu

SEQ ID NO: 1818747 - RNA, 19 nt, Artificial Sequence
  Description of Artificial Sequence: Synthetic oligonucleotide
ccgcuucugcaguggaccu

SEQ ID NO: 1818748 - RNA, 19 nt, Artificial Sequence
  Description of Artificial Sequence: Synthetic oligonucleotide
ccgggcugagguaggugcu

SEQ ID NO: 1818749 - RNA, 19 nt, Artificial Sequence
  Description of Artificial Sequence: Synthetic oligonucleotide
cuuccgccucaugcugccu

SEQ ID NO: 1818750 - RNA, 19 nt, Artificial Sequence
  Description of Artificial Sequence: Synthetic oligonucleotide
cccuggaaagagacucuuu

SEQ ID NO: 1818751 - RNA, 19 nt, Artificial Sequence
  Description of Artificial Sequence: Synthetic oligonucleotide
cucuuuccuuccgccucau

SEQ ID NO: 1818752 - RNA, 19 nt, Artificial Sequence
  Description of Artificial Sequence: Synthetic oligonucleotide
ggucgcgcucuguccugau

SEQ ID NO: 1818753 - RNA, 19 nt, Artificial Sequence
  Description of Artificial Sequence: Synthetic oligonucleotide
cugcuuggguguggucgau

SEQ ID NO: 1818754 - RNA, 19 nt, Artificial Sequence
  Description of Artificial Sequence: Synthetic oligonucleotide
ccucgcaggcuccgggcau

SEQ ID NO: 1818755 - RNA, 19 nt, Artificial Sequence
  Description of Artificial Sequence: Synthetic oligonucleotide
cgguccucguggagugguu

SEQ ID NO: 1818756 - RNA, 19 nt, Artificial Sequence
  Description of Artificial Sequence: Synthetic oligonucleotide
ccgccucaugcugccugau

SEQ ID NO: 1818757 - RNA, 19 nt, Artificial Sequence
  Description of Artificial Sequence: Synthetic oligonucleotide
aguagaaacauccuccucc

SEQ ID NO: 1818758 - RNA, 19 nt, Artificial Sequence
  Description of Artificial Sequence: Synthetic oligonucleotide
ucauauaaaccacaaauug

SEQ ID NO: 1818759 - RNA, 19 nt, Artificial Sequence
  Description of Artificial Sequence: Synthetic oligonucleotide
gaaaggacaacuuggcucg

SEQ ID NO: 1818760 - RNA, 19 nt, Artificial Sequence
  Description of Artificial Sequence: Synthetic oligonucleotide
uugcauuucauauaaacca

SEQ ID NO: 1818761 - RNA, 19 nt, Artificial Sequence
  Description of Artificial Sequence: Synthetic oligonucleotide
agaaaggacaacuuggcuc

SEQ ID NO: 1818762 - RNA, 19 nt, Artificial Sequence
  Description of Artificial Sequence: Synthetic oligonucleotide
auauaaaccacaaauugcg

SEQ ID NO: 1818763 - RNA, 19 nt, Artificial Sequence
  Description of Artificial Sequence: Synthetic oligonucleotide
ucuaucuccagucuuuccg

SEQ ID NO: 1818764 - RNA, 19 nt, Artificial Sequence
  Description of Artificial Sequence: Synthetic oligonucleotide
ucucuaaauucauuguugg

SEQ ID NO: 1818765 - RNA, 19 nt, Artificial Sequence
  Description of Artificial Sequence: Synthetic oligonucleotide
ucuuccguuaaagagagag

SEQ ID NO: 1818766 - RNA, 19 nt, Artificial Sequence
  Description of Artificial Sequence: Synthetic oligonucleotide
uuuguuuccugcuugugag

SEQ ID NO: 1818767 - RNA, 19 nt, Artificial Sequence
  Description of Artificial Sequence: Synthetic oligonucleotide
aaccgagcuauauucugcc

SEQ ID NO: 1818768 - RNA, 19 nt, Artificial Sequence
  Description of Artificial Sequence: Synthetic oligonucleotide
agugccauucauuuucagc

SEQ ID NO: 1818769 - RNA, 19 nt, Artificial Sequence
  Description of Artificial Sequence: Synthetic oligonucleotide
uuaaagagagagagggccg

SEQ ID NO: 1818770 - RNA, 19 nt, Artificial Sequence
  Description of Artificial Sequence: Synthetic oligonucleotide
ucccauuccaacuuuaucu

SEQ ID NO: 1818771 - RNA, 19 nt, Artificial Sequence
  Description of Artificial Sequence: Synthetic oligonucleotide
aaacguugugaacaugcuc

SEQ ID NO: 1818772 - RNA, 19 nt, Artificial Sequence
  Description of Artificial Sequence: Synthetic oligonucleotide
guagacaucucuguuagcg

SEQ ID NO: 1818773 - RNA, 19 nt, Artificial Sequence
  Description of Artificial Sequence: Synthetic oligonucleotide
guuaaagagagagagggcc

SEQ ID NO: 1818774 - RNA, 19 nt, Artificial Sequence
  Description of Artificial Sequence: Synthetic oligonucleotide
uuccguuaaagagagagag

SEQ ID NO: 1818775 - RNA, 19 nt, Artificial Sequence
  Description of Artificial Sequence: Synthetic oligonucleotide
ugcgucagagucauagucg

SEQ ID NO: 1818776 - RNA, 19 nt, Artificial Sequence
  Description of Artificial Sequence: Synthetic oligonucleotide
aacguugugaacaugcucu

SEQ ID NO: 1818777 - RNA, 19 nt, Artificial Sequence
  Description of Artificial Sequence: Synthetic oligonucleotide
ucuucuuuagucugaauuc

SEQ ID NO: 1818778 - RNA, 19 nt, Artificial Sequence
  Description of Artificial Sequence: Synthetic oligonucleotide
agucuuaauuccuugggug

SEQ ID NO: 1818779 - RNA, 19 nt, Artificial Sequence
  Description of Artificial Sequence: Synthetic oligonucleotide
agcgucucuaaauucauug

SEQ ID NO: 1818780 - RNA, 19 nt, Artificial Sequence
  Description of Artificial Sequence: Synthetic oligonucleotide
ucuuuccguaaguuggucg

SEQ ID NO: 1818781 - RNA, 19 nt, Artificial Sequence
  Description of Artificial Sequence: Synthetic oligonucleotide
ugcauuucauauaaaccac

SEQ ID NO: 1818782 - RNA, 19 nt, Artificial Sequence
  Description of Artificial Sequence: Synthetic oligonucleotide
cuagucuuaauuccuuggg

SEQ ID NO: 1818783 - RNA, 19 nt, Artificial Sequence
  Description of Artificial Sequence: Synthetic oligonucleotide
gucuuaauuccuugggugg

SEQ ID NO: 1818784 - RNA, 19 nt, Artificial Sequence
  Description of Artificial Sequence: Synthetic oligonucleotide
uucuccuagucuuaauucc

SEQ ID NO: 1818785 - RNA, 19 nt, Artificial Sequence
  Description of Artificial Sequence: Synthetic oligonucleotide
ugcuccaucccaaacguug

SEQ ID NO: 1818786 - RNA, 19 nt, Artificial Sequence
  Description of Artificial Sequence: Synthetic oligonucleotide
uaccaaaucggcacgcucc

SEQ ID NO: 1818787 - RNA, 19 nt, Artificial Sequence
  Description of Artificial Sequence: Synthetic oligonucleotide
uuucccuccugucugagga

SEQ ID NO: 1818788 - RNA, 19 nt, Artificial Sequence
  Description of Artificial Sequence: Synthetic oligonucleotide
aagaaggguggacucgagg

SEQ ID NO: 1818789 - RNA, 19 nt, Artificial Sequence
  Description of Artificial Sequence: Synthetic oligonucleotide
ucucaaccgagcuauauuc

SEQ ID NO: 1818790 - RNA, 19 nt, Artificial Sequence
  Description of Artificial Sequence: Synthetic oligonucleotide
uagguugcagcucaccuug

SEQ ID NO: 1818791 - RNA, 19 nt, Artificial Sequence
  Description of Artificial Sequence: Synthetic oligonucleotide
agacaucucuguuagcguc

SEQ ID NO: 1818792 - RNA, 19 nt, Artificial Sequence
  Description of Artificial Sequence: Synthetic oligonucleotide
agguagacaucucuguuag

SEQ ID NO: 1818793 - RNA, 19 nt, Artificial Sequence
  Description of Artificial Sequence: Synthetic oligonucleotide
ugugagaccucuuucgccu

SEQ ID NO: 1818794 - RNA, 19 nt, Artificial Sequence
  Description of Artificial Sequence: Synthetic oligonucleotide
ucuguuagcgucucuaaau

SEQ ID NO: 1818795 - RNA, 19 nt, Artificial Sequence
  Description of Artificial Sequence: Synthetic oligonucleotide
uuggucgucaguagaaaca

SEQ ID NO: 1818796 - RNA, 19 nt, Artificial Sequence
  Description of Artificial Sequence: Synthetic oligonucleotide
ugcagugcuuuccuuuugg

SEQ ID NO: 1818797 - RNA, 19 nt, Artificial Sequence
  Description of Artificial Sequence: Synthetic oligonucleotide
uccguuaaagagagagagg

SEQ ID NO: 1818798 - RNA, 19 nt, Artificial Sequence
  Description of Artificial Sequence: Synthetic oligonucleotide
caucuuccguuaaagagag

SEQ ID NO: 1818799 - RNA, 19 nt, Artificial Sequence
  Description of Artificial Sequence: Synthetic oligonucleotide
ucuagguugcagcucaccu

SEQ ID NO: 1818800 - RNA, 19 nt, Artificial Sequence
  Description of Artificial Sequence: Synthetic oligonucleotide
gucaguagaaacauccucc

SEQ ID NO: 1818801 - RNA, 19 nt, Artificial Sequence
  Description of Artificial Sequence: Synthetic oligonucleotide
uucgugaacaccuguuacc

SEQ ID NO: 1818802 - RNA, 19 nt, Artificial Sequence
  Description of Artificial Sequence: Synthetic oligonucleotide
uuuuccucccucagcagcc

SEQ ID NO: 1818803 - RNA, 19 nt, Artificial Sequence
  Description of Artificial Sequence: Synthetic oligonucleotide
ucuuuagucugaauucuuc

SEQ ID NO: 1818804 - RNA, 19 nt, Artificial Sequence
  Description of Artificial Sequence: Synthetic oligonucleotide
ccuguuuuacuguagaaag

SEQ ID NO: 1818805 - RNA, 19 nt, Artificial Sequence
  Description of Artificial Sequence: Synthetic oligonucleotide
ugaacaugcucuucacaag

SEQ ID NO: 1818806 - RNA, 19 nt, Artificial Sequence
  Description of Artificial Sequence: Synthetic oligonucleotide
aguggugugcacuggagug

SEQ ID NO: 1818807 - RNA, 19 nt, Artificial Sequence
  Description of Artificial Sequence: Synthetic oligonucleotide
uuucuccuagucuuaauuc

SEQ ID NO: 1818808 - RNA, 19 nt, Artificial Sequence
  Description of Artificial Sequence: Synthetic oligonucleotide
gucgucaguagaaacaucc

SEQ ID NO: 1818809 - RNA, 19 nt, Artificial Sequence
  Description of Artificial Sequence: Synthetic oligonucleotide
uugaacugagucacuuucc

SEQ ID NO: 1818810 - RNA, 19 nt, Artificial Sequence
  Description of Artificial Sequence: Synthetic oligonucleotide
acaccuguuaccaaaucgg

SEQ ID NO: 1818811 - RNA, 19 nt, Artificial Sequence
  Description of Artificial Sequence: Synthetic oligonucleotide
uaaaccacaaauugcgauu

SEQ ID NO: 1818812 - RNA, 19 nt, Artificial Sequence
  Description of Artificial Sequence: Synthetic oligonucleotide
aauuccuugggugguuccg

SEQ ID NO: 1818813 - RNA, 19 nt, Artificial Sequence
  Description of Artificial Sequence: Synthetic oligonucleotide
ugagcugugccucucgcga

SEQ ID NO: 1818814 - RNA, 19 nt, Artificial Sequence
  Description of Artificial Sequence: Synthetic oligonucleotide
ucaaccgagcuauauucug

SEQ ID NO: 1818815 - RNA, 19 nt, Artificial Sequence
  Description of Artificial Sequence: Synthetic oligonucleotide
uagucuuaauuccuugggu

SEQ ID NO: 1818816 - RNA, 19 nt, Artificial Sequence
  Description of Artificial Sequence: Synthetic oligonucleotide
gguuucugaacacaugaag

SEQ ID NO: 1818817 - RNA, 19 nt, Artificial Sequence
  Description of Artificial Sequence: Synthetic oligonucleotide
uucacaagaaggguggacu

SEQ ID NO: 1818818 - RNA, 19 nt, Artificial Sequence
  Description of Artificial Sequence: Synthetic oligonucleotide
gccauaguauuccucaugg

SEQ ID NO: 1818819 - RNA, 19 nt, Artificial Sequence
  Description of Artificial Sequence: Synthetic oligonucleotide
ugaggacucuuccucuccg

SEQ ID NO: 1818820 - RNA, 19 nt, Artificial Sequence
  Description of Artificial Sequence: Synthetic oligonucleotide
ucuccuagucuuaauuccu

SEQ ID NO: 1818821 - RNA, 19 nt, Artificial Sequence
  Description of Artificial Sequence: Synthetic oligonucleotide
aacuuggcucgauauuucu

SEQ ID NO: 1818822 - RNA, 19 nt, Artificial Sequence
  Description of Artificial Sequence: Synthetic oligonucleotide
uuggcauucuucuuccgac

SEQ ID NO: 1818823 - RNA, 19 nt, Artificial Sequence
  Description of Artificial Sequence: Synthetic oligonucleotide
cucgauauuucuccuaguc

SEQ ID NO: 1818824 - RNA, 19 nt, Artificial Sequence
  Description of Artificial Sequence: Synthetic oligonucleotide
auuucuccuagucuuaauu

SEQ ID NO: 1818825 - RNA, 19 nt, Artificial Sequence
  Description of Artificial Sequence: Synthetic oligonucleotide
aucccaaacguugugaaca

SEQ ID NO: 1818826 - RNA, 19 nt, Artificial Sequence
  Description of Artificial Sequence: Synthetic oligonucleotide
uuccucucuucucuuguag

SEQ ID NO: 1818827 - RNA, 19 nt, Artificial Sequence
  Description of Artificial Sequence: Synthetic oligonucleotide
cauuccaacuuuaucuguc

SEQ ID NO: 1818828 - RNA, 19 nt, Artificial Sequence
  Description of Artificial Sequence: Synthetic oligonucleotide
cuugugagaccucuuucgc

SEQ ID NO: 1818829 - RNA, 19 nt, Artificial Sequence
  Description of Artificial Sequence: Synthetic oligonucleotide
ugugcacuggagugggagg

SEQ ID NO: 1818830 - RNA, 19 nt, Artificial Sequence
  Description of Artificial Sequence: Synthetic oligonucleotide
ccaaacguugugaacaugc

SEQ ID NO: 1818831 - RNA, 19 nt, Artificial Sequence
  Description of Artificial Sequence: Synthetic oligonucleotide
guggcucuggcuuuugcgg

SEQ ID NO: 1818832 - RNA, 19 nt, Artificial Sequence
  Description of Artificial Sequence: Synthetic oligonucleotide
auacacguugccccgcagg

SEQ ID NO: 1818833 - RNA, 19 nt, Artificial Sequence
  Description of Artificial Sequence: Synthetic oligonucleotide
uugcgucagagucauaguc

SEQ ID NO: 1818834 - RNA, 19 nt, Artificial Sequence
  Description of Artificial Sequence: Synthetic oligonucleotide
acaugcucuucacaagaag

SEQ ID NO: 1818835 - RNA, 19 nt, Artificial Sequence
  Description of Artificial Sequence: Synthetic oligonucleotide
gucucuaaauucauuguug

SEQ ID NO: 1818836 - RNA, 19 nt, Artificial Sequence
  Description of Artificial Sequence: Synthetic oligonucleotide
gucugaauucuucuugcgc

SEQ ID NO: 1818837 - RNA, 19 nt, Artificial Sequence
  Description of Artificial Sequence: Synthetic oligonucleotide
ccguuaaagagagagaggg

SEQ ID NO: 1818838 - RNA, 19 nt, Artificial Sequence
  Description of Artificial Sequence: Synthetic oligonucleotide
aaauucauuguugggguuu

SEQ ID NO: 1818839 - RNA, 19 nt, Artificial Sequence
  Description of Artificial Sequence: Synthetic oligonucleotide
gcuugugagaccucuuucg

SEQ ID NO: 1818840 - RNA, 19 nt, Artificial Sequence
  Description of Artificial Sequence: Synthetic oligonucleotide
ugcucuucccauuccaacu

SEQ ID NO: 1818841 - RNA, 19 nt, Artificial Sequence
  Description of Artificial Sequence: Synthetic oligonucleotide
ugccauaguauuccucaug

SEQ ID NO: 1818842 - RNA, 19 nt, Artificial Sequence
  Description of Artificial Sequence: Synthetic oligonucleotide
guaaguuggucgucaguag

SEQ ID NO: 1818843 - RNA, 19 nt, Artificial Sequence
  Description of Artificial Sequence: Synthetic oligonucleotide
gcugcaagggcucucaacc

SEQ ID NO: 1818844 - RNA, 19 nt, Artificial Sequence
  Description of Artificial Sequence: Synthetic oligonucleotide
uuuugucgcucuaucucca

SEQ ID NO: 1818845 - RNA, 19 nt, Artificial Sequence
  Description of Artificial Sequence: Synthetic oligonucleotide
acugcuccaucccaaacgu

SEQ ID NO: 1818846 - RNA, 19 nt, Artificial Sequence
  Description of Artificial Sequence: Synthetic oligonucleotide
cuauauucugccuacgucu

SEQ ID NO: 1818847 - RNA, 19 nt, Artificial Sequence
  Description of Artificial Sequence: Synthetic oligonucleotide
aagucgugcuucgugaaca

SEQ ID NO: 1818848 - RNA, 19 nt, Artificial Sequence
  Description of Artificial Sequence: Synthetic oligonucleotide
auuccaacuuuaucugucu

SEQ ID NO: 1818849 - RNA, 19 nt, Artificial Sequence
  Description of Artificial Sequence: Synthetic oligonucleotide
uaaagagagagagggccgc

SEQ ID NO: 1818850 - RNA, 19 nt, Artificial Sequence
  Description of Artificial Sequence: Synthetic oligonucleotide
ugagucacuuuccccacgu

SEQ ID NO: 1818851 - RNA, 19 nt, Artificial Sequence
  Description of Artificial Sequence: Synthetic oligonucleotide
uguuagcgucucuaaauuc

SEQ ID NO: 1818852 - RNA, 19 nt, Artificial Sequence
  Description of Artificial Sequence: Synthetic oligonucleotide
ucuuucgccuaugaggacu

SEQ ID NO: 1818853 - RNA, 19 nt, Artificial Sequence
  Description of Artificial Sequence: Synthetic oligonucleotide
uugagcugugccucucgcg

SEQ ID NO: 1818854 - RNA, 19 nt, Artificial Sequence
  Description of Artificial Sequence: Synthetic oligonucleotide
cuucgugaacaccuguuac

SEQ ID NO: 1818855 - RNA, 19 nt, Artificial Sequence
  Description of Artificial Sequence: Synthetic oligonucleotide
uucucuuggaggaguggug

SEQ ID NO: 1818856 - RNA, 19 nt, Artificial Sequence
  Description of Artificial Sequence: Synthetic oligonucleotide
uccuagucuuaauuccuug

SEQ ID NO: 1818857 - RNA, 19 nt, Artificial Sequence
  Description of Artificial Sequence: Synthetic oligonucleotide
guuagcgucucuaaauuca

SEQ ID NO: 1818858 - RNA, 19 nt, Artificial Sequence
  Description of Artificial Sequence: Synthetic oligonucleotide
ccuguuaccaaaucggcac

SEQ ID NO: 1818859 - RNA, 19 nt, Artificial Sequence
  Description of Artificial Sequence: Synthetic oligonucleotide
uacacguugccccgcaggu

SEQ ID NO: 1818860 - RNA, 19 nt, Artificial Sequence
  Description of Artificial Sequence: Synthetic oligonucleotide
aagggcucucaaccgagcu

SEQ ID NO: 1818861 - RNA, 19 nt, Artificial Sequence
  Description of Artificial Sequence: Synthetic oligonucleotide
agcuauauucugccuacgu

SEQ ID NO: 1818862 - RNA, 19 nt, Artificial Sequence
  Description of Artificial Sequence: Synthetic oligonucleotide
guacugcacauacacguug

SEQ ID NO: 1818863 - RNA, 19 nt, Artificial Sequence
  Description of Artificial Sequence: Synthetic oligonucleotide
ugcaagggcucucaaccga

SEQ ID NO: 1818864 - RNA, 19 nt, Artificial Sequence
  Description of Artificial Sequence: Synthetic oligonucleotide
uagucgucccuucugcacu

SEQ ID NO: 1818865 - RNA, 19 nt, Artificial Sequence
  Description of Artificial Sequence: Synthetic oligonucleotide
ucuuaauuccuuggguggu

SEQ ID NO: 1818866 - RNA, 19 nt, Artificial Sequence
  Description of Artificial Sequence: Synthetic oligonucleotide
ugucgcucuaucuccaguc

SEQ ID NO: 1818867 - RNA, 19 nt, Artificial Sequence
  Description of Artificial Sequence: Synthetic oligonucleotide
caccuguuaccaaaucggc

SEQ ID NO: 1818868 - RNA, 19 nt, Artificial Sequence
  Description of Artificial Sequence: Synthetic oligonucleotide
agucgugcuucgugaacac

SEQ ID NO: 1818869 - RNA, 19 nt, Artificial Sequence
  Description of Artificial Sequence: Synthetic oligonucleotide
uggcuugccauaguauucc

SEQ ID NO: 1818870 - RNA, 19 nt, Artificial Sequence
  Description of Artificial Sequence: Synthetic oligonucleotide
cuguuaccaaaucggcacg

SEQ ID NO: 1818871 - RNA, 19 nt, Artificial Sequence
  Description of Artificial Sequence: Synthetic oligonucleotide
uguuaccaaaucggcacgc

SEQ ID NO: 1818872 - RNA, 19 nt, Artificial Sequence
  Description of Artificial Sequence: Synthetic oligonucleotide
guaccaucuuccguuaaag

SEQ ID NO: 1818873 - RNA, 19 nt, Artificial Sequence
  Description of Artificial Sequence: Synthetic oligonucleotide
acaacuuggcucgauauuu

SEQ ID NO: 1818874 - RNA, 19 nt, Artificial Sequence
  Description of Artificial Sequence: Synthetic oligonucleotide
uggacacuuuugcauuuca

SEQ ID NO: 1818875 - RNA, 19 nt, Artificial Sequence
  Description of Artificial Sequence: Synthetic oligonucleotide
uaccaucuuccguuaaaga

SEQ ID NO: 1818876 - RNA, 19 nt, Artificial Sequence
  Description of Artificial Sequence: Synthetic oligonucleotide
ucacaagaaggguggacuc

SEQ ID NO: 1818877 - RNA, 19 nt, Artificial Sequence
  Description of Artificial Sequence: Synthetic oligonucleotide
uucccauuccaacuuuauc

SEQ ID NO: 1818878 - RNA, 19 nt, Artificial Sequence
  Description of Artificial Sequence: Synthetic oligonucleotide
uucauuguugggguuucug

SEQ ID NO: 1818879 - RNA, 19 nt, Artificial Sequence
  Description of Artificial Sequence: Synthetic oligonucleotide
ucgucaguagaaacauccu

SEQ ID NO: 1818880 - RNA, 19 nt, Artificial Sequence
  Description of Artificial Sequence: Synthetic oligonucleotide
ucuuggaggaguggugugc

SEQ ID NO: 1818881 - RNA, 19 nt, Artificial Sequence
  Description of Artificial Sequence: Synthetic oligonucleotide
uuugucgcucuaucuccag

SEQ ID NO: 1818882 - RNA, 19 nt, Artificial Sequence
  Description of Artificial Sequence: Synthetic oligonucleotide
aguugcagugcuuuccuuu

SEQ ID NO: 1818883 - RNA, 19 nt, Artificial Sequence
  Description of Artificial Sequence: Synthetic oligonucleotide
ccuagucuuaauuccuugg

SEQ ID NO: 1818884 - RNA, 19 nt, Artificial Sequence
  Description of Artificial Sequence: Synthetic oligonucleotide
ucucgcgacccuuuguuuc

SEQ ID NO: 1818885 - RNA, 19 nt, Artificial Sequence
  Description of Artificial Sequence: Synthetic oligonucleotide
cucgggcagcacaucaugg

SEQ ID NO: 1818886 - RNA, 19 nt, Artificial Sequence
  Description of Artificial Sequence: Synthetic oligonucleotide
ugcuugugagaccucuuuc

SEQ ID NO: 1818887 - RNA, 19 nt, Artificial Sequence
  Description of Artificial Sequence: Synthetic oligonucleotide
ugggguuucugaacacaug

SEQ ID NO: 1818888 - RNA, 19 nt, Artificial Sequence
  Description of Artificial Sequence: Synthetic oligonucleotide
cagugcuuuccuuuuggac

SEQ ID NO: 1818889 - RNA, 19 nt, Artificial Sequence
  Description of Artificial Sequence: Synthetic oligonucleotide
ucgccuaugaggacucuuc

SEQ ID NO: 1818890 - RNA, 19 nt, Artificial Sequence
  Description of Artificial Sequence: Synthetic oligonucleotide
uugcucuucccauuccaac

SEQ ID NO: 1818891 - RNA, 19 nt, Artificial Sequence
  Description of Artificial Sequence: Synthetic oligonucleotide
ccaagugccauucauuuuc

SEQ ID NO: 1818892 - RNA, 19 nt, Artificial Sequence
  Description of Artificial Sequence: Synthetic oligonucleotide
cucccuguuucucuuggag

SEQ ID NO: 1818893 - RNA, 19 nt, Artificial Sequence
  Description of Artificial Sequence: Synthetic oligonucleotide
gcuugcgucagagucauag

SEQ ID NO: 1818894 - RNA, 19 nt, Artificial Sequence
  Description of Artificial Sequence: Synthetic oligonucleotide
caguccaagcuggagacag

SEQ ID NO: 1818895 - RNA, 19 nt, Artificial Sequence
  Description of Artificial Sequence: Synthetic oligonucleotide
ggcucgauauuucuccuag

SEQ ID NO: 1818896 - RNA, 19 nt, Artificial Sequence
  Description of Artificial Sequence: Synthetic oligonucleotide
cugcaagggcucucaaccg

SEQ ID NO: 1818897 - RNA, 19 nt, Artificial Sequence
  Description of Artificial Sequence: Synthetic oligonucleotide
cacaagaaggguggacucg

SEQ ID NO: 1818898 - RNA, 19 nt, Artificial Sequence
  Description of Artificial Sequence: Synthetic oligonucleotide
ucuugcgccuuuuccuccc

SEQ ID NO: 1818899 - RNA, 19 nt, Artificial Sequence
  Description of Artificial Sequence: Synthetic oligonucleotide
gaagucgugcuucgugaac

SEQ ID NO: 1818900 - RNA, 19 nt, Artificial Sequence
  Description of Artificial Sequence: Synthetic oligonucleotide
uaaauucauuguugggguu

SEQ ID NO: 1818901 - RNA, 19 nt, Artificial Sequence
  Description of Artificial Sequence: Synthetic oligonucleotide
cucgcgacccuuuguuucc

SEQ ID NO: 1818902 - RNA, 19 nt, Artificial Sequence
  Description of Artificial Sequence: Synthetic oligonucleotide
gguucuagguugcagcuca

SEQ ID NO: 1818903 - RNA, 19 nt, Artificial Sequence
  Description of Artificial Sequence: Synthetic oligonucleotide
gagacagguagacaucucu

SEQ ID NO: 1818904 - RNA, 19 nt, Artificial Sequence
  Description of Artificial Sequence: Synthetic oligonucleotide
uccguaaguuggucgucag

SEQ ID NO: 1818905 - RNA, 19 nt, Artificial Sequence
  Description of Artificial Sequence: Synthetic oligonucleotide
uccuuggcuugccauagua

SEQ ID NO: 1818906 - RNA, 19 nt, Artificial Sequence
  Description of Artificial Sequence: Synthetic oligonucleotide
acucgggcagcacaucaug

SEQ ID NO: 1818907 - RNA, 19 nt, Artificial Sequence
  Description of Artificial Sequence: Synthetic oligonucleotide
uucuugcgccuuuuccucc

SEQ ID NO: 1818908 - RNA, 19 nt, Artificial Sequence
  Description of Artificial Sequence: Synthetic oligonucleotide
uggucgucaguagaaacau

SEQ ID NO: 1818909 - RNA, 19 nt, Artificial Sequence
  Description of Artificial Sequence: Synthetic oligonucleotide
cucuaucuccagucuuucc

SEQ ID NO: 1818910 - RNA, 19 nt, Artificial Sequence
  Description of Artificial Sequence: Synthetic oligonucleotide
agaacucacacuggagcug

SEQ ID NO: 1818911 - RNA, 19 nt, Artificial Sequence
  Description of Artificial Sequence: Synthetic oligonucleotide
ugucucuccugcucuuccc

SEQ ID NO: 1818912 - RNA, 19 nt, Artificial Sequence
  Description of Artificial Sequence: Synthetic oligonucleotide
cuuuuggacacuuuugcau

SEQ ID NO: 1818913 - RNA, 19 nt, Artificial Sequence
  Description of Artificial Sequence: Synthetic oligonucleotide
uuaauuccuugggugguuc

SEQ ID NO: 1818914 - RNA, 19 nt, Artificial Sequence
  Description of Artificial Sequence: Synthetic oligonucleotide
ucgggcagcacaucauggu

SEQ ID NO: 1818915 - RNA, 19 nt, Artificial Sequence
  Description of Artificial Sequence: Synthetic oligonucleotide
uccgacucccuguuucucu

SEQ ID NO: 1818916 - RNA, 19 nt, Artificial Sequence
  Description of Artificial Sequence: Synthetic oligonucleotide
acaagaaggguggacucga

SEQ ID NO: 1818917 - RNA, 19 nt, Artificial Sequence
  Description of Artificial Sequence: Synthetic oligonucleotide
accaaaucggcacgcuccu

SEQ ID NO: 1818918 - RNA, 19 nt, Artificial Sequence
  Description of Artificial Sequence: Synthetic oligonucleotide
cuuuagucugaauucuucu

SEQ ID NO: 1818919 - RNA, 19 nt, Artificial Sequence
  Description of Artificial Sequence: Synthetic oligonucleotide
ucuagcggcuucuuccuuu

SEQ ID NO: 1818920 - RNA, 19 nt, Artificial Sequence
  Description of Artificial Sequence: Synthetic oligonucleotide
cuuucgccuaugaggacuc

SEQ ID NO: 1818921 - RNA, 19 nt, Artificial Sequence
  Description of Artificial Sequence: Synthetic oligonucleotide
uuccguaaguuggucguca

SEQ ID NO: 1818922 - RNA, 19 nt, Artificial Sequence
  Description of Artificial Sequence: Synthetic oligonucleotide
cuuucccuccugucugagg

SEQ ID NO: 1818923 - RNA, 19 nt, Artificial Sequence
  Description of Artificial Sequence: Synthetic oligonucleotide
gcuauauucugccuacguc

SEQ ID NO: 1818924 - RNA, 19 nt, Artificial Sequence
  Description of Artificial Sequence: Synthetic oligonucleotide
uauuucuccuagucuuaau

SEQ ID NO: 1818925 - RNA, 19 nt, Artificial Sequence
  Description of Artificial Sequence: Synthetic oligonucleotide
agagagggccgcuuggcau

SEQ ID NO: 1818926 - RNA, 19 nt, Artificial Sequence
  Description of Artificial Sequence: Synthetic oligonucleotide
uggcauucuucuuccgacu

SEQ ID NO: 1818927 - RNA, 19 nt, Artificial Sequence
  Description of Artificial Sequence: Synthetic oligonucleotide
ugcgccuuuuccucccuca

SEQ ID NO: 1818928 - RNA, 19 nt, Artificial Sequence
  Description of Artificial Sequence: Synthetic oligonucleotide
cagcucaccuugaacugag

SEQ ID NO: 1818929 - RNA, 19 nt, Artificial Sequence
  Description of Artificial Sequence: Synthetic oligonucleotide
uugucgcucuaucuccagu

SEQ ID NO: 1818930 - RNA, 19 nt, Artificial Sequence
  Description of Artificial Sequence: Synthetic oligonucleotide
ugcacugcuuccucucuuc

SEQ ID NO: 1818931 - RNA, 19 nt, Artificial Sequence
  Description of Artificial Sequence: Synthetic oligonucleotide
ucgcuguacuccaggcuug

SEQ ID NO: 1818932 - RNA, 19 nt, Artificial Sequence
  Description of Artificial Sequence: Synthetic oligonucleotide
caacuuggcucgauauuuc

SEQ ID NO: 1818933 - RNA, 19 nt, Artificial Sequence
  Description of Artificial Sequence: Synthetic oligonucleotide
ucaccgggcagaacucaca

SEQ ID NO: 1818934 - RNA, 19 nt, Artificial Sequence
  Description of Artificial Sequence: Synthetic oligonucleotide
cccucuguuuucuagcggc

SEQ ID NO: 1818935 - RNA, 19 nt, Artificial Sequence
  Description of Artificial Sequence: Synthetic oligonucleotide
uucuagguugcagcucacc

SEQ ID NO: 1818936 - RNA, 19 nt, Artificial Sequence
  Description of Artificial Sequence: Synthetic oligonucleotide
aaaucggcacgcuccuguu

SEQ ID NO: 1818937 - RNA, 19 nt, Artificial Sequence
  Description of Artificial Sequence: Synthetic oligonucleotide
cuuccguuaaagagagaga

SEQ ID NO: 1818938 - RNA, 19 nt, Artificial Sequence
  Description of Artificial Sequence: Synthetic oligonucleotide
gaacaccuguuaccaaauc

SEQ ID NO: 1818939 - RNA, 19 nt, Artificial Sequence
  Description of Artificial Sequence: Synthetic oligonucleotide
guggggaagucgugcuucg

SEQ ID NO: 1818940 - RNA, 19 nt, Artificial Sequence
  Description of Artificial Sequence: Synthetic oligonucleotide
ccaucuuccguuaaagaga

SEQ ID NO: 1818941 - RNA, 19 nt, Artificial Sequence
  Description of Artificial Sequence: Synthetic oligonucleotide
gagcuauauucugccuacg

SEQ ID NO: 1818942 - RNA, 19 nt, Artificial Sequence
  Description of Artificial Sequence: Synthetic oligonucleotide
guagaaacauccuccuccu

SEQ ID NO: 1818943 - RNA, 19 nt, Artificial Sequence
  Description of Artificial Sequence: Synthetic oligonucleotide
aucggcacgcuccuguuuu

SEQ ID NO: 1818944 - RNA, 19 nt, Artificial Sequence
  Description of Artificial Sequence: Synthetic oligonucleotide
cugagucacuuuccccacg

SEQ ID NO: 1818945 - RNA, 19 nt, Artificial Sequence
  Description of Artificial Sequence: Synthetic oligonucleotide
cuucacaagaaggguggac

SEQ ID NO: 1818946 - RNA, 19 nt, Artificial Sequence
  Description of Artificial Sequence: Synthetic oligonucleotide
acucgagguggggaagucg

SEQ ID NO: 1818947 - RNA, 19 nt, Artificial Sequence
  Description of Artificial Sequence: Synthetic oligonucleotide
aggugagguucuagguugc

SEQ ID NO: 1818948 - RNA, 19 nt, Artificial Sequence
  Description of Artificial Sequence: Synthetic oligonucleotide
ucccaaacguugugaacau

SEQ ID NO: 1818949 - RNA, 19 nt, Artificial Sequence
  Description of Artificial Sequence: Synthetic oligonucleotide
cuuuccguaaguuggucgu

SEQ ID NO: 1818950 - RNA, 19 nt, Artificial Sequence
  Description of Artificial Sequence: Synthetic oligonucleotide
gagucauagucgucccuuc

SEQ ID NO: 1818951 - RNA, 19 nt, Artificial Sequence
  Description of Artificial Sequence: Synthetic oligonucleotide
auauuucuccuagucuuaa

SEQ ID NO: 1818952 - RNA, 19 nt, Artificial Sequence
  Description of Artificial Sequence: Synthetic oligonucleotide
gcacauacacguugccccg

SEQ ID NO: 1818953 - RNA, 19 nt, Artificial Sequence
  Description of Artificial Sequence: Synthetic oligonucleotide
ccauucauuuucagccugg

SEQ ID NO: 1818954 - RNA, 19 nt, Artificial Sequence
  Description of Artificial Sequence: Synthetic oligonucleotide
acauacacguugccccgca

SEQ ID NO: 1818955 - RNA, 19 nt, Artificial Sequence
  Description of Artificial Sequence: Synthetic oligonucleotide
ccucuuucgccuaugagga

SEQ ID NO: 1818956 - RNA, 19 nt, Artificial Sequence
  Description of Artificial Sequence: Synthetic oligonucleotide
ccgggcagaacucacacug

SEQ ID NO: 1818957 - RNA, 19 nt, Artificial Sequence
  Description of Artificial Sequence: Synthetic oligonucleotide
agaccucuuucgccuauga

SEQ ID NO: 1818958 - RNA, 19 nt, Artificial Sequence
  Description of Artificial Sequence: Synthetic oligonucleotide
aguauuccucauggugguc

SEQ ID NO: 1818959 - RNA, 19 nt, Artificial Sequence
  Description of Artificial Sequence: Synthetic oligonucleotide
cauggugguccuuccuuuc

SEQ ID NO: 1818960 - RNA, 19 nt, Artificial Sequence
  Description of Artificial Sequence: Synthetic oligonucleotide
ucuucacaagaagggugga

SEQ ID NO: 1818961 - RNA, 19 nt, Artificial Sequence
  Description of Artificial Sequence: Synthetic oligonucleotide
aaucggcacgcuccuguuu

SEQ ID NO: 1818962 - RNA, 19 nt, Artificial Sequence
  Description of Artificial Sequence: Synthetic oligonucleotide
gagguucuagguugcagcu

SEQ ID NO: 1818963 - RNA, 19 nt, Artificial Sequence
  Description of Artificial Sequence: Synthetic oligonucleotide
caagaaggguggacucgag

SEQ ID NO: 1818964 - RNA, 19 nt, Artificial Sequence
  Description of Artificial Sequence: Synthetic oligonucleotide
accuguuaccaaaucggca

SEQ ID NO: 1818965 - RNA, 19 nt, Artificial Sequence
  Description of Artificial Sequence: Synthetic oligonucleotide
ccagucuuuccguaaguug

SEQ ID NO: 1818966 - RNA, 19 nt, Artificial Sequence
  Description of Artificial Sequence: Synthetic oligonucleotide
aucuccagucuuuccguaa

SEQ ID NO: 1818967 - RNA, 19 nt, Artificial Sequence
  Description of Artificial Sequence: Synthetic oligonucleotide
aaccacaaauugcgauuuu

SEQ ID NO: 1818968 - RNA, 19 nt, Artificial Sequence
  Description of Artificial Sequence: Synthetic oligonucleotide
ucgagguggggaagucgug

SEQ ID NO: 1818969 - RNA, 19 nt, Artificial Sequence
  Description of Artificial Sequence: Synthetic oligonucleotide
caccgggcagaacucacac

SEQ ID NO: 1818970 - RNA, 19 nt, Artificial Sequence
  Description of Artificial Sequence: Synthetic oligonucleotide
aaguugcagugcuuuccuu

SEQ ID NO: 1818971 - RNA, 19 nt, Artificial Sequence
  Description of Artificial Sequence: Synthetic oligonucleotide
cucuuggaggaguggugug

SEQ ID NO: 1818972 - RNA, 19 nt, Artificial Sequence
  Description of Artificial Sequence: Synthetic oligonucleotide
aggacaacuuggcucgaua

SEQ ID NO: 1818973 - RNA, 19 nt, Artificial Sequence
  Description of Artificial Sequence: Synthetic oligonucleotide
cagguagacaucucuguua

SEQ ID NO: 1818974 - RNA, 19 nt, Artificial Sequence
  Description of Artificial Sequence: Synthetic oligonucleotide
uccagucuuuccguaaguu

SEQ ID NO: 1818975 - RNA, 19 nt, Artificial Sequence
  Description of Artificial Sequence: Synthetic oligonucleotide
ugagaccucuuucgccuau

SEQ ID NO: 1818976 - RNA, 19 nt, Artificial Sequence
  Description of Artificial Sequence: Synthetic oligonucleotide
cuugggugguuccggguuc

SEQ ID NO: 1818977 - RNA, 19 nt, Artificial Sequence
  Description of Artificial Sequence: Synthetic oligonucleotide
cauagucgucccuucugca

SEQ ID NO: 1818978 - RNA, 19 nt, Artificial Sequence
  Description of Artificial Sequence: Synthetic oligonucleotide
ucgcucuaucuccagucuu

SEQ ID NO: 1818979 - RNA, 19 nt, Artificial Sequence
  Description of Artificial Sequence: Synthetic oligonucleotide
uggacucgagguggggaag

SEQ ID NO: 1818980 - RNA, 19 nt, Artificial Sequence
  Description of Artificial Sequence: Synthetic oligonucleotide
ggagcugucguccugcgua

SEQ ID NO: 1818981 - RNA, 19 nt, Artificial Sequence
  Description of Artificial Sequence: Synthetic oligonucleotide
accgagcuauauucugccu

SEQ ID NO: 1818982 - RNA, 19 nt, Artificial Sequence
  Description of Artificial Sequence: Synthetic oligonucleotide
cagaacucacacuggagcu

SEQ ID NO: 1818983 - RNA, 19 nt, Artificial Sequence
  Description of Artificial Sequence: Synthetic oligonucleotide
agucuuuccguaaguuggu

SEQ ID NO: 1818984 - RNA, 19 nt, Artificial Sequence
  Description of Artificial Sequence: Synthetic oligonucleotide
cuuggcuugccauaguauu

SEQ ID NO: 1818985 - RNA, 19 nt, Artificial Sequence
  Description of Artificial Sequence: Synthetic oligonucleotide
gggaagucgugcuucguga

SEQ ID NO: 1818986 - RNA, 19 nt, Artificial Sequence
  Description of Artificial Sequence: Synthetic oligonucleotide
ggggaagucgugcuucgug

SEQ ID NO: 1818987 - RNA, 19 nt, Artificial Sequence
  Description of Artificial Sequence: Synthetic oligonucleotide
uacgucuuuugcguuucuc

SEQ ID NO: 1818988 - RNA, 19 nt, Artificial Sequence
  Description of Artificial Sequence: Synthetic oligonucleotide
uuggacacuuuugcauuuc

SEQ ID NO: 1818989 - RNA, 19 nt, Artificial Sequence
  Description of Artificial Sequence: Synthetic oligonucleotide
uucugccaagugccauuca

SEQ ID NO: 1818990 - RNA, 19 nt, Artificial Sequence
  Description of Artificial Sequence: Synthetic oligonucleotide
ucuggcuuuugcgggccug

SEQ ID NO: 1818991 - RNA, 19 nt, Artificial Sequence
  Description of Artificial Sequence: Synthetic oligonucleotide
gaggacucuuccucuccga

SEQ ID NO: 1818992 - RNA, 19 nt, Artificial Sequence
  Description of Artificial Sequence: Synthetic oligonucleotide
gcucaccuugaacugaguc

SEQ ID NO: 1818993 - RNA, 19 nt, Artificial Sequence
  Description of Artificial Sequence: Synthetic oligonucleotide
ccaacuuuaucugucucuc

SEQ ID NO: 1818994 - RNA, 19 nt, Artificial Sequence
  Description of Artificial Sequence: Synthetic oligonucleotide
uuuccguaaguuggucguc

SEQ ID NO: 1818995 - RNA, 19 nt, Artificial Sequence
  Description of Artificial Sequence: Synthetic oligonucleotide
uuuugcgggccuggacugc

SEQ ID NO: 1818996 - RNA, 19 nt, Artificial Sequence
  Description of Artificial Sequence: Synthetic oligonucleotide
uccucuccgacucccuguu

SEQ ID NO: 1818997 - RNA, 19 nt, Artificial Sequence
  Description of Artificial Sequence: Synthetic oligonucleotide
accuugaacugagucacuu

SEQ ID NO: 1818998 - RNA, 19 nt, Artificial Sequence
  Description of Artificial Sequence: Synthetic oligonucleotide
gaguggugugcacuggagu

SEQ ID NO: 1818999 - RNA, 19 nt, Artificial Sequence
  Description of Artificial Sequence: Synthetic oligonucleotide
gagcugugccucucgcgac

SEQ ID NO: 1819000 - RNA, 19 nt, Artificial Sequence
  Description of Artificial Sequence: Synthetic oligonucleotide
ugcgggccuggacugcugu

SEQ ID NO: 1819001 - RNA, 19 nt, Artificial Sequence
  Description of Artificial Sequence: Synthetic oligonucleotide
ugcguaccaucuuccguua

SEQ ID NO: 1819002 - RNA, 19 nt, Artificial Sequence
  Description of Artificial Sequence: Synthetic oligonucleotide
cuccaucccaaacguugug

SEQ ID NO: 1819003 - RNA, 19 nt, Artificial Sequence
  Description of Artificial Sequence: Synthetic oligonucleotide
agguccuuggcuugccaua

SEQ ID NO: 1819004 - RNA, 19 nt, Artificial Sequence
  Description of Artificial Sequence: Synthetic oligonucleotide
aaaggacaacuuggcucga

SEQ ID NO: 1819005 - RNA, 19 nt, Artificial Sequence
  Description of Artificial Sequence: Synthetic oligonucleotide
cguuaaagagagagagggc

SEQ ID NO: 1819006 - RNA, 19 nt, Artificial Sequence
  Description of Artificial Sequence: Synthetic oligonucleotide
acguugugaacaugcucuu

SEQ ID NO: 1819007 - RNA, 19 nt, Artificial Sequence
  Description of Artificial Sequence: Synthetic oligonucleotide
cuaucuccagucuuuccgu

SEQ ID NO: 1819008 - RNA, 19 nt, Artificial Sequence
  Description of Artificial Sequence: Synthetic oligonucleotide
aaggacaacuuggcucgau

SEQ ID NO: 1819009 - RNA, 19 nt, Artificial Sequence
  Description of Artificial Sequence: Synthetic oligonucleotide
aguccaagcuggagacagg

SEQ ID NO: 1819010 - RNA, 19 nt, Artificial Sequence
  Description of Artificial Sequence: Synthetic oligonucleotide
caaaucggcacgcuccugu

SEQ ID NO: 1819011 - RNA, 19 nt, Artificial Sequence
  Description of Artificial Sequence: Synthetic oligonucleotide
ugggagguccuuggcuugc

SEQ ID NO: 1819012 - RNA, 19 nt, Artificial Sequence
  Description of Artificial Sequence: Synthetic oligonucleotide
cugccuacgucuuuugcgu

SEQ ID NO: 1819013 - RNA, 19 nt, Artificial Sequence
  Description of Artificial Sequence: Synthetic oligonucleotide
guggacucgagguggggaa

SEQ ID NO: 1819014 - RNA, 19 nt, Artificial Sequence
  Description of Artificial Sequence: Synthetic oligonucleotide
acucccuguuucucuugga

SEQ ID NO: 1819015 - RNA, 19 nt, Artificial Sequence
  Description of Artificial Sequence: Synthetic oligonucleotide
uggagcugucguccugcgu

SEQ ID NO: 1819016 - RNA, 19 nt, Artificial Sequence
  Description of Artificial Sequence: Synthetic oligonucleotide
cucuguuagcgucucuaaa

SEQ ID NO: 1819017 - RNA, 19 nt, Artificial Sequence
  Description of Artificial Sequence: Synthetic oligonucleotide
cuuggaggaguggugugca

SEQ ID NO: 1819018 - RNA, 19 nt, Artificial Sequence
  Description of Artificial Sequence: Synthetic oligonucleotide
gacaacuuggcucgauauu

SEQ ID NO: 1819019 - RNA, 19 nt, Artificial Sequence
  Description of Artificial Sequence: Synthetic oligonucleotide
caaacguugugaacaugcu

SEQ ID NO: 1819020 - RNA, 19 nt, Artificial Sequence
  Description of Artificial Sequence: Synthetic oligonucleotide
cucuuucgccuaugaggac

SEQ ID NO: 1819021 - RNA, 19 nt, Artificial Sequence
  Description of Artificial Sequence: Synthetic oligonucleotide
aacucacacuggagcuguc

SEQ ID NO: 1819022 - RNA, 19 nt, Artificial Sequence
  Description of Artificial Sequence: Synthetic oligonucleotide
agggcucucaaccgagcua

SEQ ID NO: 1819023 - RNA, 19 nt, Artificial Sequence
  Description of Artificial Sequence: Synthetic oligonucleotide
accgggcagaacucacacu

SEQ ID NO: 1819024 - RNA, 19 nt, Artificial Sequence
  Description of Artificial Sequence: Synthetic oligonucleotide
cucaaccgagcuauauucu

SEQ ID NO: 1819025 - RNA, 19 nt, Artificial Sequence
  Description of Artificial Sequence: Synthetic oligonucleotide
gguagacaucucuguuagc

SEQ ID NO: 1819026 - RNA, 19 nt, Artificial Sequence
  Description of Artificial Sequence: Synthetic oligonucleotide
agagggccgcuuggcauuc

SEQ ID NO: 1819027 - RNA, 19 nt, Artificial Sequence
  Description of Artificial Sequence: Synthetic oligonucleotide
cucgagguggggaagucgu

SEQ ID NO: 1819028 - RNA, 19 nt, Artificial Sequence
  Description of Artificial Sequence: Synthetic oligonucleotide
ccuuuuggacacuuuugca

SEQ ID NO: 1819029 - RNA, 19 nt, Artificial Sequence
  Description of Artificial Sequence: Synthetic oligonucleotide
uugggugguuccggguucu

SEQ ID NO: 1819030 - RNA, 19 nt, Artificial Sequence
  Description of Artificial Sequence: Synthetic oligonucleotide
cgucaguagaaacauccuc

SEQ ID NO: 1819031 - RNA, 19 nt, Artificial Sequence
  Description of Artificial Sequence: Synthetic oligonucleotide
aggcuugcgucagagucau

SEQ ID NO: 1819032 - RNA, 19 nt, Artificial Sequence
  Description of Artificial Sequence: Synthetic oligonucleotide
cuggagugggagguccuug

SEQ ID NO: 1819033 - RNA, 19 nt, Artificial Sequence
  Description of Artificial Sequence: Synthetic oligonucleotide
uguuuucuagcggcuucuu

SEQ ID NO: 1819034 - RNA, 19 nt, Artificial Sequence
  Description of Artificial Sequence: Synthetic oligonucleotide
gggcagaacucacacugga

SEQ ID NO: 1819035 - RNA, 19 nt, Artificial Sequence
  Description of Artificial Sequence: Synthetic oligonucleotide
uucgccuaugaggacucuu

SEQ ID NO: 1819036 - RNA, 19 nt, Artificial Sequence
  Description of Artificial Sequence: Synthetic oligonucleotide
guugcagugcuuuccuuuu

SEQ ID NO: 1819037 - RNA, 19 nt, Artificial Sequence
  Description of Artificial Sequence: Synthetic oligonucleotide
uucuugagcugugccucuc

SEQ ID NO: 1819038 - RNA, 19 nt, Artificial Sequence
  Description of Artificial Sequence: Synthetic oligonucleotide
cugcguaccaucuuccguu

SEQ ID NO: 1819039 - RNA, 19 nt, Artificial Sequence
  Description of Artificial Sequence: Synthetic oligonucleotide
aggguggacucgagguggg

SEQ ID NO: 1819040 - RNA, 19 nt, Artificial Sequence
  Description of Artificial Sequence: Synthetic oligonucleotide
gucgugcuucgugaacacc

SEQ ID NO: 1819041 - RNA, 19 nt, Artificial Sequence
  Description of Artificial Sequence: Synthetic oligonucleotide
auucauuguugggguuucu

SEQ ID NO: 1819042 - RNA, 19 nt, Artificial Sequence
  Description of Artificial Sequence: Synthetic oligonucleotide
cucgcuguacuccaggcuu

SEQ ID NO: 1819043 - RNA, 19 nt, Artificial Sequence
  Description of Artificial Sequence: Synthetic oligonucleotide
cuguuagcgucucuaaauu

SEQ ID NO: 1819044 - RNA, 19 nt, Artificial Sequence
  Description of Artificial Sequence: Synthetic oligonucleotide
cuguacuccaggcuugcgu

SEQ ID NO: 1819045 - RNA, 19 nt, Artificial Sequence
  Description of Artificial Sequence: Synthetic oligonucleotide
ggcugcaagggcucucaac

SEQ ID NO: 1819046 - RNA, 19 nt, Artificial Sequence
  Description of Artificial Sequence: Synthetic oligonucleotide
gcgacccuuuguuuccugc

SEQ ID NO: 1819047 - RNA, 19 nt, Artificial Sequence
  Description of Artificial Sequence: Synthetic oligonucleotide
acacguugccccgcaggug

SEQ ID NO: 1819048 - RNA, 19 nt, Artificial Sequence
  Description of Artificial Sequence: Synthetic oligonucleotide
ugccuacgucuuuugcguu

SEQ ID NO: 1819049 - RNA, 19 nt, Artificial Sequence
  Description of Artificial Sequence: Synthetic oligonucleotide
gucuuuccguaaguugguc

SEQ ID NO: 1819050 - RNA, 19 nt, Artificial Sequence
  Description of Artificial Sequence: Synthetic oligonucleotide
gucaccgggcagaacucac

SEQ ID NO: 1819051 - RNA, 19 nt, Artificial Sequence
  Description of Artificial Sequence: Synthetic oligonucleotide
ggaagucgugcuucgugaa

SEQ ID NO: 1819052 - RNA, 19 nt, Artificial Sequence
  Description of Artificial Sequence: Synthetic oligonucleotide
gcuucgugaacaccuguua

SEQ ID NO: 1819053 - RNA, 19 nt, Artificial Sequence
  Description of Artificial Sequence: Synthetic oligonucleotide
uugcgccuuuuccucccuc

SEQ ID NO: 1819054 - RNA, 19 nt, Artificial Sequence
  Description of Artificial Sequence: Synthetic oligonucleotide
cuugcgucagagucauagu

SEQ ID NO: 1819055 - RNA, 19 nt, Artificial Sequence
  Description of Artificial Sequence: Synthetic oligonucleotide
cucacacuggagcugucgu

SEQ ID NO: 1819056 - RNA, 19 nt, Artificial Sequence
  Description of Artificial Sequence: Synthetic oligonucleotide
cuagguugcagcucaccuu

SEQ ID NO: 1819057 - RNA, 19 nt, Artificial Sequence
  Description of Artificial Sequence: Synthetic oligonucleotide
gucgcucuaucuccagucu

SEQ ID NO: 1819058 - RNA, 19 nt, Artificial Sequence
  Description of Artificial Sequence: Synthetic oligonucleotide
ggacaacuuggcucgauau

SEQ ID NO: 1819059 - RNA, 19 nt, Artificial Sequence
  Description of Artificial Sequence: Synthetic oligonucleotide
gacucgagguggggaaguc

SEQ ID NO: 1819060 - RNA, 19 nt, Artificial Sequence
  Description of Artificial Sequence: Synthetic oligonucleotide
cuucccauuccaacuuuau

SEQ ID NO: 1819061 - RNA, 19 nt, Artificial Sequence
  Description of Artificial Sequence: Synthetic oligonucleotide
gcagugcuuuccuuuugga

SEQ ID NO: 1819062 - RNA, 19 nt, Artificial Sequence
  Description of Artificial Sequence: Synthetic oligonucleotide
uuucgccuaugaggacucu

SEQ ID NO: 1819063 - RNA, 19 nt, Artificial Sequence
  Description of Artificial Sequence: Synthetic oligonucleotide
guuaccaaaucggcacgcu

SEQ ID NO: 1819064 - RNA, 19 nt, Artificial Sequence
  Description of Artificial Sequence: Synthetic oligonucleotide
uggggaagucgugcuucgu

SEQ ID NO: 1819065 - RNA, 19 nt, Artificial Sequence
  Description of Artificial Sequence: Synthetic oligonucleotide
gcgucagagucauagucgu

SEQ ID NO: 1819066 - RNA, 19 nt, Artificial Sequence
  Description of Artificial Sequence: Synthetic oligonucleotide
cucucaaccgagcuauauu

SEQ ID NO: 1819067 - RNA, 19 nt, Artificial Sequence
  Description of Artificial Sequence: Synthetic oligonucleotide
cucauggugguccuuccuu

SEQ ID NO: 1819068 - RNA, 19 nt, Artificial Sequence
  Description of Artificial Sequence: Synthetic oligonucleotide
gcgucucuaaauucauugu

SEQ ID NO: 1819069 - RNA, 19 nt, Artificial Sequence
  Description of Artificial Sequence: Synthetic oligonucleotide
cguaaguuggucgucagua

SEQ ID NO: 1819070 - RNA, 19 nt, Artificial Sequence
  Description of Artificial Sequence: Synthetic oligonucleotide
ucggcacgcuccuguuuua

SEQ ID NO: 1819071 - RNA, 19 nt, Artificial Sequence
  Description of Artificial Sequence: Synthetic oligonucleotide
guucuagguugcagcucac

SEQ ID NO: 1819072 - RNA, 19 nt, Artificial Sequence
  Description of Artificial Sequence: Synthetic oligonucleotide
cauucauuuucagccuggu

SEQ ID NO: 1819073 - RNA, 19 nt, Artificial Sequence
  Description of Artificial Sequence: Synthetic oligonucleotide
ggccgcuuggcauucuucu

SEQ ID NO: 1819074 - RNA, 19 nt, Artificial Sequence
  Description of Artificial Sequence: Synthetic oligonucleotide
cgccuaugaggacucuucc

SEQ ID NO: 1819075 - RNA, 19 nt, Artificial Sequence
  Description of Artificial Sequence: Synthetic oligonucleotide
ucgcgacccuuuguuuccu

SEQ ID NO: 1819076 - RNA, 19 nt, Artificial Sequence
  Description of Artificial Sequence: Synthetic oligonucleotide
ccuacgucuuuugcguuuc

SEQ ID NO: 1819077 - RNA, 19 nt, Artificial Sequence
  Description of Artificial Sequence: Synthetic oligonucleotide
cguccugcguaccaucuuc

SEQ ID NO: 1819078 - RNA, 19 nt, Artificial Sequence
  Description of Artificial Sequence: Synthetic oligonucleotide
gcagcucaccuugaacuga

SEQ ID NO: 1819079 - RNA, 19 nt, Artificial Sequence
  Description of Artificial Sequence: Synthetic oligonucleotide
cuccuagucuuaauuccuu

SEQ ID NO: 1819080 - RNA, 19 nt, Artificial Sequence
  Description of Artificial Sequence: Synthetic oligonucleotide
cgugcuucgugaacaccug

SEQ ID NO: 1819081 - RNA, 19 nt, Artificial Sequence
  Description of Artificial Sequence: Synthetic oligonucleotide
gcuugccauaguauuccuc

SEQ ID NO: 1819082 - RNA, 19 nt, Artificial Sequence
  Description of Artificial Sequence: Synthetic oligonucleotide
ggguuucugaacacaugaa

SEQ ID NO: 1819083 - RNA, 19 nt, Artificial Sequence
  Description of Artificial Sequence: Synthetic oligonucleotide
ccgagcuauauucugccua

SEQ ID NO: 1819084 - RNA, 19 nt, Artificial Sequence
  Description of Artificial Sequence: Synthetic oligonucleotide
gugagaccucuuucgccua

SEQ ID NO: 1819085 - RNA, 19 nt, Artificial Sequence
  Description of Artificial Sequence: Synthetic oligonucleotide
ugggugguuccggguucug

SEQ ID NO: 1819086 - RNA, 19 nt, Artificial Sequence
  Description of Artificial Sequence: Synthetic oligonucleotide
gugcuucgugaacaccugu

SEQ ID NO: 1819087 - RNA, 19 nt, Artificial Sequence
  Description of Artificial Sequence: Synthetic oligonucleotide
gccuaugaggacucuuccu

SEQ ID NO: 1819088 - RNA, 19 nt, Artificial Sequence
  Description of Artificial Sequence: Synthetic oligonucleotide
cugcuugugagaccucuuu

SEQ ID NO: 1819089 - RNA, 19 nt, Artificial Sequence
  Description of Artificial Sequence: Synthetic oligonucleotide
guugccccgcaggugaggu

SEQ ID NO: 1819090 - RNA, 19 nt, Artificial Sequence
  Description of Artificial Sequence: Synthetic oligonucleotide
cuuaauuccuugggugguu

SEQ ID NO: 1819091 - RNA, 19 nt, Artificial Sequence
  Description of Artificial Sequence: Synthetic oligonucleotide
ggagguccuuggcuugcca

SEQ ID NO: 1819092 - RNA, 19 nt, Artificial Sequence
  Description of Artificial Sequence: Synthetic oligonucleotide
ggucgucaguagaaacauc

SEQ ID NO: 1819093 - RNA, 19 nt, Artificial Sequence
  Description of Artificial Sequence: Synthetic oligonucleotide
gggcucucaaccgagcuau

SEQ ID NO: 1819094 - RNA, 19 nt, Artificial Sequence
  Description of Artificial Sequence: Synthetic oligonucleotide
acguugccccgcaggugag

SEQ ID NO: 1819095 - RNA, 19 nt, Artificial Sequence
  Description of Artificial Sequence: Synthetic oligonucleotide
ggucaccgggcagaacuca

SEQ ID NO: 1819096 - RNA, 19 nt, Artificial Sequence
  Description of Artificial Sequence: Synthetic oligonucleotide
cuagcggcuucuuccuuuu

SEQ ID NO: 1819097 - RNA, 19 nt, Artificial Sequence
  Description of Artificial Sequence: Synthetic oligonucleotide
agguugcagcucaccuuga

SEQ ID NO: 1819098 - RNA, 19 nt, Artificial Sequence
  Description of Artificial Sequence: Synthetic oligonucleotide
aggucuccuccucgcugua

SEQ ID NO: 1819099 - RNA, 19 nt, Artificial Sequence
  Description of Artificial Sequence: Synthetic oligonucleotide
uugccccgcaggugagguu

SEQ ID NO: 1819100 - RNA, 19 nt, Artificial Sequence
  Description of Artificial Sequence: Synthetic oligonucleotide
ccauuccaacuuuaucugu

SEQ ID NO: 1819101 - RNA, 19 nt, Artificial Sequence
  Description of Artificial Sequence: Synthetic oligonucleotide
aucuuccguuaaagagaga

SEQ ID NO: 1819102 - RNA, 19 nt, Artificial Sequence
  Description of Artificial Sequence: Synthetic oligonucleotide
cguaccaucuuccguuaaa

SEQ ID NO: 1819103 - RNA, 19 nt, Artificial Sequence
  Description of Artificial Sequence: Synthetic oligonucleotide
cgucccuucugcacugcuc

SEQ ID NO: 1819104 - RNA, 19 nt, Artificial Sequence
  Description of Artificial Sequence: Synthetic oligonucleotide
gagucacuuuccccacguu

SEQ ID NO: 1819105 - RNA, 19 nt, Artificial Sequence
  Description of Artificial Sequence: Synthetic oligonucleotide
gcucgauauuucuccuagu

SEQ ID NO: 1819106 - RNA, 19 nt, Artificial Sequence
  Description of Artificial Sequence: Synthetic oligonucleotide
uccuccgguggggcugcaa

SEQ ID NO: 1819107 - RNA, 19 nt, Artificial Sequence
  Description of Artificial Sequence: Synthetic oligonucleotide
gggucaccgggcagaacuc

SEQ ID NO: 1819108 - RNA, 19 nt, Artificial Sequence
  Description of Artificial Sequence: Synthetic oligonucleotide
cccgcaggugagguucuag

SEQ ID NO: 1819109 - RNA, 19 nt, Artificial Sequence
  Description of Artificial Sequence: Synthetic oligonucleotide
cucucgcgacccuuuguuu

SEQ ID NO: 1819110 - RNA, 19 nt, Artificial Sequence
  Description of Artificial Sequence: Synthetic oligonucleotide
cgucucuaaauucauuguu

SEQ ID NO: 1819111 - RNA, 19 nt, Artificial Sequence
  Description of Artificial Sequence: Synthetic oligonucleotide
guccuuggcuugccauagu

SEQ ID NO: 1819112 - RNA, 19 nt, Artificial Sequence
  Description of Artificial Sequence: Synthetic oligonucleotide
ccugcguaccaucuuccgu

SEQ ID NO: 1819113 - RNA, 19 nt, Artificial Sequence
  Description of Artificial Sequence: Synthetic oligonucleotide
cuacgucuuuugcguuucu

SEQ ID NO: 1819114 - RNA, 19 nt, Artificial Sequence
  Description of Artificial Sequence: Synthetic oligonucleotide
cuugcgccuuuuccucccu

SEQ ID NO: 1819115 - RNA, 19 nt, Artificial Sequence
  Description of Artificial Sequence: Synthetic oligonucleotide
cuccugucugaggaguuuu

SEQ ID NO: 1819116 - RNA, 19 nt, Artificial Sequence
  Description of Artificial Sequence: Synthetic oligonucleotide
gccaagugccauucauuuu

SEQ ID NO: 1819117 - RNA, 19 nt, Artificial Sequence
  Description of Artificial Sequence: Synthetic oligonucleotide
gcucucaaccgagcuauau

SEQ ID NO: 1819118 - RNA, 19 nt, Artificial Sequence
  Description of Artificial Sequence: Synthetic oligonucleotide
gccuacgucuuuugcguuu

SEQ ID NO: 1819119 - RNA, 19 nt, Artificial Sequence
  Description of Artificial Sequence: Synthetic oligonucleotide
cgcuguacuccaggcuugc

SEQ ID NO: 1819120 - RNA, 19 nt, Artificial Sequence
  Description of Artificial Sequence: Synthetic oligonucleotide
gcguaccaucuuccguuaa

SEQ ID NO: 1819121 - RNA, 19 nt, Artificial Sequence
  Description of Artificial Sequence: Synthetic oligonucleotide
gggccgcuuggcauucuuc

SEQ ID NO: 1819122 - RNA, 19 nt, Artificial Sequence
  Description of Artificial Sequence: Synthetic oligonucleotide
gcucaggaucuguggcucu

SEQ ID NO: 1819123 - RNA, 19 nt, Artificial Sequence
  Description of Artificial Sequence: Synthetic oligonucleotide
ccuccuccgguggggcugc

SEQ ID NO: 1819124 - RNA, 19 nt, Artificial Sequence
  Description of Artificial Sequence: Synthetic oligonucleotide
gcgggccuggacugcuguc

SEQ ID NO: 1819125 - RNA, 19 nt, Artificial Sequence
  Description of Artificial Sequence: Synthetic oligonucleotide
ggugugcacuggaguggga

SEQ ID NO: 1819126 - RNA, 19 nt, Artificial Sequence
  Description of Artificial Sequence: Synthetic oligonucleotide
ccuugggugguuccggguu

SEQ ID NO: 1819127 - RNA, 19 nt, Artificial Sequence
  Description of Artificial Sequence: Synthetic oligonucleotide
ccucucgcgacccuuuguu

SEQ ID NO: 1819128 - RNA, 19 nt, Artificial Sequence
  Description of Artificial Sequence: Synthetic oligonucleotide
cucuggcuuuugcgggccu

SEQ ID NO: 1819129 - RNA, 19 nt, Artificial Sequence
  Description of Artificial Sequence: Synthetic oligonucleotide
gccucucgcgacccuuugu

SEQ ID NO: 1819130 - RNA, 19 nt, Artificial Sequence
  Description of Artificial Sequence: Synthetic oligonucleotide
cgcgacccuuuguuuccug

SEQ ID NO: 1819131 - RNA, 19 nt, Artificial Sequence
  Description of Artificial Sequence: Synthetic oligonucleotide
cgacccuuuguuuccugcu

SEQ ID NO: 1819132 - RNA, 19 nt, Artificial Sequence
  Description of Artificial Sequence: Synthetic oligonucleotide
ccguaaguuggucgucagu

SEQ ID NO: 1819133 - RNA, 19 nt, Artificial Sequence
  Description of Artificial Sequence: Synthetic oligonucleotide
gggcugcaagggcucucaa

SEQ ID NO: 1819134 - RNA, 19 nt, Artificial Sequence
  Description of Artificial Sequence: Synthetic oligonucleotide
cgcucuaucuccagucuuu

SEQ ID NO: 1819135 - RNA, 19 nt, Artificial Sequence
  Description of Artificial Sequence: Synthetic oligonucleotide
cugugccucucgcgacccu

SEQ ID NO: 1819136 - RNA, 19 nt, Artificial Sequence
  Description of Artificial Sequence: Synthetic oligonucleotide
ccgacucccuguuucucuu

SEQ ID NO: 1819137 - RNA, 19 nt, Artificial Sequence
  Description of Artificial Sequence: Synthetic oligonucleotide
gagggccgcuuggcauucu

SEQ ID NO: 1819138 - RNA, 19 nt, Artificial Sequence
  Description of Artificial Sequence: Synthetic oligonucleotide
ggcucucaaccgagcuaua

SEQ ID NO: 1819139 - RNA, 19 nt, Artificial Sequence
  Description of Artificial Sequence: Synthetic oligonucleotide
gccccgcaggugagguucu

SEQ ID NO: 1819140 - RNA, 19 nt, Artificial Sequence
  Description of Artificial Sequence: Synthetic oligonucleotide
ggcuugcgucagagucaua

SEQ ID NO: 1819141 - RNA, 19 nt, Artificial Sequence
  Description of Artificial Sequence: Synthetic oligonucleotide
ccucuccgacucccuguuu

SEQ ID NO: 1819142 - RNA, 19 nt, Artificial Sequence
  Description of Artificial Sequence: Synthetic oligonucleotide
ccccgcaggugagguucua

SEQ ID NO: 1819143 - RNA, 19 nt, Artificial Sequence
  Description of Artificial Sequence: Synthetic oligonucleotide
aacaucauccuuuagaguc

SEQ ID NO: 1819144 - RNA, 19 nt, Artificial Sequence
  Description of Artificial Sequence: Synthetic oligonucleotide
ucugaauuuaaaauuaacg

SEQ ID NO: 1819145 - RNA, 19 nt, Artificial Sequence
  Description of Artificial Sequence: Synthetic oligonucleotide
aaaucauccaucuuuagag

SEQ ID NO: 1819146 - RNA, 19 nt, Artificial Sequence
  Description of Artificial Sequence: Synthetic oligonucleotide
cugaauuuaaaauuaacgg

SEQ ID NO: 1819147 - RNA, 19 nt, Artificial Sequence
  Description of Artificial Sequence: Synthetic oligonucleotide
aaauuaacggagcauaauc

SEQ ID NO: 1819148 - RNA, 19 nt, Artificial Sequence
  Description of Artificial Sequence: Synthetic oligonucleotide
aguauauucagauauacca

SEQ ID NO: 1819149 - RNA, 19 nt, Artificial Sequence
  Description of Artificial Sequence: Synthetic oligonucleotide
uuuuauauaccaaagcugu

SEQ ID NO: 1819150 - RNA, 19 nt, Artificial Sequence
  Description of Artificial Sequence: Synthetic oligonucleotide
uggauaauccucaaagucg

SEQ ID NO: 1819151 - RNA, 19 nt, Artificial Sequence
  Description of Artificial Sequence: Synthetic oligonucleotide
cagaguauuaacaucaucc

SEQ ID NO: 1819152 - RNA, 19 nt, Artificial Sequence
  Description of Artificial Sequence: Synthetic oligonucleotide
acuggcacuauucagaggg

SEQ ID NO: 1819153 - RNA, 19 nt, Artificial Sequence
  Description of Artificial Sequence: Synthetic oligonucleotide
aauuuaaaauuaacggagc

SEQ ID NO: 1819154 - RNA, 19 nt, Artificial Sequence
  Description of Artificial Sequence: Synthetic oligonucleotide
uucauuuaaacacauagua

SEQ ID NO: 1819155 - RNA, 19 nt, Artificial Sequence
  Description of Artificial Sequence: Synthetic oligonucleotide
aggaguuucagauacggac

SEQ ID NO: 1819156 - RNA, 19 nt, Artificial Sequence
  Description of Artificial Sequence: Synthetic oligonucleotide
aaucauccaucuuuagagc

SEQ ID NO: 1819157 - RNA, 19 nt, Artificial Sequence
  Description of Artificial Sequence: Synthetic oligonucleotide
uguacacucgaaaucaucc

SEQ ID NO: 1819158 - RNA, 19 nt, Artificial Sequence
  Description of Artificial Sequence: Synthetic oligonucleotide
auuaacaucauccuuuaga

SEQ ID NO: 1819159 - RNA, 19 nt, Artificial Sequence
  Description of Artificial Sequence: Synthetic oligonucleotide
aaguaauuguaggagaagg

SEQ ID NO: 1819160 - RNA, 19 nt, Artificial Sequence
  Description of Artificial Sequence: Synthetic oligonucleotide
ucacacaauauucucauug

SEQ ID NO: 1819161 - RNA, 19 nt, Artificial Sequence
  Description of Artificial Sequence: Synthetic oligonucleotide
uuugucucgugacugauag

SEQ ID NO: 1819162 - RNA, 19 nt, Artificial Sequence
  Description of Artificial Sequence: Synthetic oligonucleotide
ucuguuaguuucaugaugu

SEQ ID NO: 1819163 - RNA, 19 nt, Artificial Sequence
  Description of Artificial Sequence: Synthetic oligonucleotide
uuaaccuccaaugaaguag

SEQ ID NO: 1819164 - RNA, 19 nt, Artificial Sequence
  Description of Artificial Sequence: Synthetic oligonucleotide
aacagaacugcuuggaaca

SEQ ID NO: 1819165 - RNA, 19 nt, Artificial Sequence
  Description of Artificial Sequence: Synthetic oligonucleotide
gagugcagaguuuaggugg

SEQ ID NO: 1819166 - RNA, 19 nt, Artificial Sequence
  Description of Artificial Sequence: Synthetic oligonucleotide
aguguucuaauuuaggagu

SEQ ID NO: 1819167 - RNA, 19 nt, Artificial Sequence
  Description of Artificial Sequence: Synthetic oligonucleotide
acauggaucggacagauca

SEQ ID NO: 1819168 - RNA, 19 nt, Artificial Sequence
  Description of Artificial Sequence: Synthetic oligonucleotide
uuuagagcacaccugggag

SEQ ID NO: 1819169 - RNA, 19 nt, Artificial Sequence
  Description of Artificial Sequence: Synthetic oligonucleotide
aucguuuuaaccuccaaug

SEQ ID NO: 1819170 - RNA, 19 nt, Artificial Sequence
  Description of Artificial Sequence: Synthetic oligonucleotide
uguucugauauucucacaa

SEQ ID NO: 1819171 - RNA, 19 nt, Artificial Sequence
  Description of Artificial Sequence: Synthetic oligonucleotide
acacauccaacuccgaggc

SEQ ID NO: 1819172 - RNA, 19 nt, Artificial Sequence
  Description of Artificial Sequence: Synthetic oligonucleotide
auugcagugacuucuggag

SEQ ID NO: 1819173 - RNA, 19 nt, Artificial Sequence
  Description of Artificial Sequence: Synthetic oligonucleotide
ucuuuaaccuccauauggc

SEQ ID NO: 1819174 - RNA, 19 nt, Artificial Sequence
  Description of Artificial Sequence: Synthetic oligonucleotide
aaggucacacaauauucuc

SEQ ID NO: 1819175 - RNA, 19 nt, Artificial Sequence
  Description of Artificial Sequence: Synthetic oligonucleotide
agggaggaguuucagauac

SEQ ID NO: 1819176 - RNA, 19 nt, Artificial Sequence
  Description of Artificial Sequence: Synthetic oligonucleotide
uacgaaaccaggaauggca

SEQ ID NO: 1819177 - RNA, 19 nt, Artificial Sequence
  Description of Artificial Sequence: Synthetic oligonucleotide
auuuaggaguuguacacuc

SEQ ID NO: 1819178 - RNA, 19 nt, Artificial Sequence
  Description of Artificial Sequence: Synthetic oligonucleotide
aaagcugugggcugcguag

SEQ ID NO: 1819179 - RNA, 19 nt, Artificial Sequence
  Description of Artificial Sequence: Synthetic oligonucleotide
uuuaucacuguaaccgaag

SEQ ID NO: 1819180 - RNA, 19 nt, Artificial Sequence
  Description of Artificial Sequence: Synthetic oligonucleotide
uauuugguuuugacaaugg

SEQ ID NO: 1819181 - RNA, 19 nt, Artificial Sequence
  Description of Artificial Sequence: Synthetic oligonucleotide
guagaaggaaguuucaaac

SEQ ID NO: 1819182 - RNA, 19 nt, Artificial Sequence
  Description of Artificial Sequence: Synthetic oligonucleotide
aaagucgcuguccucgccg

SEQ ID NO: 1819183 - RNA, 19 nt, Artificial Sequence
  Description of Artificial Sequence: Synthetic oligonucleotide
ucuaauuuaggaguuguac

SEQ ID NO: 1819184 - RNA, 19 nt, Artificial Sequence
  Description of Artificial Sequence: Synthetic oligonucleotide
auuuaaaauuaacggagca

SEQ ID NO: 1819185 - RNA, 19 nt, Artificial Sequence
  Description of Artificial Sequence: Synthetic oligonucleotide
ucucauuggauaauccuca

SEQ ID NO: 1819186 - RNA, 19 nt, Artificial Sequence
  Description of Artificial Sequence: Synthetic oligonucleotide
agauauaccaaaguguucu

SEQ ID NO: 1819187 - RNA, 19 nt, Artificial Sequence
  Description of Artificial Sequence: Synthetic oligonucleotide
ggcuuaaugaaguauuugg

SEQ ID NO: 1819188 - RNA, 19 nt, Artificial Sequence
  Description of Artificial Sequence: Synthetic oligonucleotide
guaauuguaggagaagggg

SEQ ID NO: 1819189 - RNA, 19 nt, Artificial Sequence
  Description of Artificial Sequence: Synthetic oligonucleotide
uauauucagauauaccaaa

SEQ ID NO: 1819190 - RNA, 19 nt, Artificial Sequence
  Description of Artificial Sequence: Synthetic oligonucleotide
ugucucgugacugauagcc

SEQ ID NO: 1819191 - RNA, 19 nt, Artificial Sequence
  Description of Artificial Sequence: Synthetic oligonucleotide
ugugcucacauccugacuc

SEQ ID NO: 1819192 - RNA, 19 nt, Artificial Sequence
  Description of Artificial Sequence: Synthetic oligonucleotide
aaccgaagagucuuuggag

SEQ ID NO: 1819193 - RNA, 19 nt, Artificial Sequence
  Description of Artificial Sequence: Synthetic oligonucleotide
ucugauauucucacaagaa

SEQ ID NO: 1819194 - RNA, 19 nt, Artificial Sequence
  Description of Artificial Sequence: Synthetic oligonucleotide
aauuaacggagcauaaucu

SEQ ID NO: 1819195 - RNA, 19 nt, Artificial Sequence
  Description of Artificial Sequence: Synthetic oligonucleotide
uccauauggcuuaaugaag

SEQ ID NO: 1819196 - RNA, 19 nt, Artificial Sequence
  Description of Artificial Sequence: Synthetic oligonucleotide
guuaguuucaugaugucug

SEQ ID NO: 1819197 - RNA, 19 nt, Artificial Sequence
  Description of Artificial Sequence: Synthetic oligonucleotide
ugcuuuguuaauaucugga

SEQ ID NO: 1819198 - RNA, 19 nt, Artificial Sequence
  Description of Artificial Sequence: Synthetic oligonucleotide
ugaaucuugugcuuucuug

SEQ ID NO: 1819199 - RNA, 19 nt, Artificial Sequence
  Description of Artificial Sequence: Synthetic oligonucleotide
acaagaaguaauuguagga

SEQ ID NO: 1819200 - RNA, 19 nt, Artificial Sequence
  Description of Artificial Sequence: Synthetic oligonucleotide
uacuguagaaggaaguuuc

SEQ ID NO: 1819201 - RNA, 19 nt, Artificial Sequence
  Description of Artificial Sequence: Synthetic oligonucleotide
uuuaggaguuguacacucg

SEQ ID NO: 1819202 - RNA, 19 nt, Artificial Sequence
  Description of Artificial Sequence: Synthetic oligonucleotide
uaguauauucagauauacc

SEQ ID NO: 1819203 - RNA, 19 nt, Artificial Sequence
  Description of Artificial Sequence: Synthetic oligonucleotide
gagucugaacuucugagug

SEQ ID NO: 1819204 - RNA, 19 nt, Artificial Sequence
  Description of Artificial Sequence: Synthetic oligonucleotide
uaguaggagauuuucagaa

SEQ ID NO: 1819205 - RNA, 19 nt, Artificial Sequence
  Description of Artificial Sequence: Synthetic oligonucleotide
uauucucauuggauaaucc

SEQ ID NO: 1819206 - RNA, 19 nt, Artificial Sequence
  Description of Artificial Sequence: Synthetic oligonucleotide
gaaaucauccaucuuuaga

SEQ ID NO: 1819207 - RNA, 19 nt, Artificial Sequence
  Description of Artificial Sequence: Synthetic oligonucleotide
uaucacuguaaccgaagag

SEQ ID NO: 1819208 - RNA, 19 nt, Artificial Sequence
  Description of Artificial Sequence: Synthetic oligonucleotide
caagaaguaauuguaggag

SEQ ID NO: 1819209 - RNA, 19 nt, Artificial Sequence
  Description of Artificial Sequence: Synthetic oligonucleotide
uguagaaggaaguuucaaa

SEQ ID NO: 1819210 - RNA, 19 nt, Artificial Sequence
  Description of Artificial Sequence: Synthetic oligonucleotide
uauucucacaagaaguaau

SEQ ID NO: 1819211 - RNA, 19 nt, Artificial Sequence
  Description of Artificial Sequence: Synthetic oligonucleotide
acucucguagcauucaucu

SEQ ID NO: 1819212 - RNA, 19 nt, Artificial Sequence
  Description of Artificial Sequence: Synthetic oligonucleotide
uuaggaguuguacacucga

SEQ ID NO: 1819213 - RNA, 19 nt, Artificial Sequence
  Description of Artificial Sequence: Synthetic oligonucleotide
cuugacuuuccaaucuugc

SEQ ID NO: 1819214 - RNA, 19 nt, Artificial Sequence
  Description of Artificial Sequence: Synthetic oligonucleotide
uguacugucuacuguagaa

SEQ ID NO: 1819215 - RNA, 19 nt, Artificial Sequence
  Description of Artificial Sequence: Synthetic oligonucleotide
cacacauccaacuccgagg

SEQ ID NO: 1819216 - RNA, 19 nt, Artificial Sequence
  Description of Artificial Sequence: Synthetic oligonucleotide
aaguagcuagguuugaguu

SEQ ID NO: 1819217 - RNA, 19 nt, Artificial Sequence
  Description of Artificial Sequence: Synthetic oligonucleotide
aguuguacacucgaaauca

SEQ ID NO: 1819218 - RNA, 19 nt, Artificial Sequence
  Description of Artificial Sequence: Synthetic oligonucleotide
uuugacaauggauaauuuu

SEQ ID NO: 1819219 - RNA, 19 nt, Artificial Sequence
  Description of Artificial Sequence: Synthetic oligonucleotide
guaggagauuuucagaaac

SEQ ID NO: 1819220 - RNA, 19 nt, Artificial Sequence
  Description of Artificial Sequence: Synthetic oligonucleotide
auaccaaagcuguacuguc

SEQ ID NO: 1819221 - RNA, 19 nt, Artificial Sequence
  Description of Artificial Sequence: Synthetic oligonucleotide
uuuaaaauuaacggagcau

SEQ ID NO: 1819222 - RNA, 19 nt, Artificial Sequence
  Description of Artificial Sequence: Synthetic oligonucleotide
auucucauuggauaauccu

SEQ ID NO: 1819223 - RNA, 19 nt, Artificial Sequence
  Description of Artificial Sequence: Synthetic oligonucleotide
aguaauuguaggagaaggg

SEQ ID NO: 1819224 - RNA, 19 nt, Artificial Sequence
  Description of Artificial Sequence: Synthetic oligonucleotide
uuaucacuguaaccgaaga

SEQ ID NO: 1819225 - RNA, 19 nt, Artificial Sequence
  Description of Artificial Sequence: Synthetic oligonucleotide
auuggauaauccucaaagu

SEQ ID NO: 1819226 - RNA, 19 nt, Artificial Sequence
  Description of Artificial Sequence: Synthetic oligonucleotide
ugacugauagccauacuuc

SEQ ID NO: 1819227 - RNA, 19 nt, Artificial Sequence
  Description of Artificial Sequence: Synthetic oligonucleotide
ucguuuuaaccuccaauga

SEQ ID NO: 1819228 - RNA, 19 nt, Artificial Sequence
  Description of Artificial Sequence: Synthetic oligonucleotide
uuuagagucugaacuucug

SEQ ID NO: 1819229 - RNA, 19 nt, Artificial Sequence
  Description of Artificial Sequence: Synthetic oligonucleotide
auagccauacuucuggaaa

SEQ ID NO: 1819230 - RNA, 19 nt, Artificial Sequence
  Description of Artificial Sequence: Synthetic oligonucleotide
aguauuaacaucauccuuu

SEQ ID NO: 1819231 - RNA, 19 nt, Artificial Sequence
  Description of Artificial Sequence: Synthetic oligonucleotide
uuugaguugugcuuuguua

SEQ ID NO: 1819232 - RNA, 19 nt, Artificial Sequence
  Description of Artificial Sequence: Synthetic oligonucleotide
aucacuguaaccgaagagu

SEQ ID NO: 1819233 - RNA, 19 nt, Artificial Sequence
  Description of Artificial Sequence: Synthetic oligonucleotide
ucuuuagagcacaccuggg

SEQ ID NO: 1819234 - RNA, 19 nt, Artificial Sequence
  Description of Artificial Sequence: Synthetic oligonucleotide
aaguuucaaaccaggagug

SEQ ID NO: 1819235 - RNA, 19 nt, Artificial Sequence
  Description of Artificial Sequence: Synthetic oligonucleotide
uuaaccuccauauggcuua

SEQ ID NO: 1819236 - RNA, 19 nt, Artificial Sequence
  Description of Artificial Sequence: Synthetic oligonucleotide
ugccauuguauaaucuuca

SEQ ID NO: 1819237 - RNA, 19 nt, Artificial Sequence
  Description of Artificial Sequence: Synthetic oligonucleotide
ggaaguuucaaaccaggag

SEQ ID NO: 1819238 - RNA, 19 nt, Artificial Sequence
  Description of Artificial Sequence: Synthetic oligonucleotide
gaguuucagauacggaccc

SEQ ID NO: 1819239 - RNA, 19 nt, Artificial Sequence
  Description of Artificial Sequence: Synthetic oligonucleotide
accgcucaaguccaaaauc

SEQ ID NO: 1819240 - RNA, 19 nt, Artificial Sequence
  Description of Artificial Sequence: Synthetic oligonucleotide
uacggacccuucuuuaagg

SEQ ID NO: 1819241 - RNA, 19 nt, Artificial Sequence
  Description of Artificial Sequence: Synthetic oligonucleotide
ucuugacuuuccaaucuug

SEQ ID NO: 1819242 - RNA, 19 nt, Artificial Sequence
  Description of Artificial Sequence: Synthetic oligonucleotide
ucacuguaaccgaagaguc

SEQ ID NO: 1819243 - RNA, 19 nt, Artificial Sequence
  Description of Artificial Sequence: Synthetic oligonucleotide
uuaucaagcagaguauuaa

SEQ ID NO: 1819244 - RNA, 19 nt, Artificial Sequence
  Description of Artificial Sequence: Synthetic oligonucleotide
auauucucauuggauaauc

SEQ ID NO: 1819245 - RNA, 19 nt, Artificial Sequence
  Description of Artificial Sequence: Synthetic oligonucleotide
uaucaagcagaguauuaac

SEQ ID NO: 1819246 - RNA, 19 nt, Artificial Sequence
  Description of Artificial Sequence: Synthetic oligonucleotide
uggacuacgaaaccaggaa

SEQ ID NO: 1819247 - RNA, 19 nt, Artificial Sequence
  Description of Artificial Sequence: Synthetic oligonucleotide
ucuuuaucacuguaaccga

SEQ ID NO: 1819248 - RNA, 19 nt, Artificial Sequence
  Description of Artificial Sequence: Synthetic oligonucleotide
auggugaauuucugcauuc

SEQ ID NO: 1819249 - RNA, 19 nt, Artificial Sequence
  Description of Artificial Sequence: Synthetic oligonucleotide
aauuuaggaguuguacacu

SEQ ID NO: 1819250 - RNA, 19 nt, Artificial Sequence
  Description of Artificial Sequence: Synthetic oligonucleotide
auauaccaaagcuguacug

SEQ ID NO: 1819251 - RNA, 19 nt, Artificial Sequence
  Description of Artificial Sequence: Synthetic oligonucleotide
acuacgaaaccaggaaugg

SEQ ID NO: 1819252 - RNA, 19 nt, Artificial Sequence
  Description of Artificial Sequence: Synthetic oligonucleotide
uguuaguuucaugaugucu

SEQ ID NO: 1819253 - RNA, 19 nt, Artificial Sequence
  Description of Artificial Sequence: Synthetic oligonucleotide
aggaauggcaaaagaauuc

SEQ ID NO: 1819254 - RNA, 19 nt, Artificial Sequence
  Description of Artificial Sequence: Synthetic oligonucleotide
uuuaaggcugucagcugcc

SEQ ID NO: 1819255 - RNA, 19 nt, Artificial Sequence
  Description of Artificial Sequence: Synthetic oligonucleotide
gacuacgaaaccaggaaug

SEQ ID NO: 1819256 - RNA, 19 nt, Artificial Sequence
  Description of Artificial Sequence: Synthetic oligonucleotide
aguagcuagguuugaguug

SEQ ID NO: 1819257 - RNA, 19 nt, Artificial Sequence
  Description of Artificial Sequence: Synthetic oligonucleotide
ggcaaaagaauucuccuug

SEQ ID NO: 1819258 - RNA, 19 nt, Artificial Sequence
  Description of Artificial Sequence: Synthetic oligonucleotide
agaguuuagguggcaaugg

SEQ ID NO: 1819259 - RNA, 19 nt, Artificial Sequence
  Description of Artificial Sequence: Synthetic oligonucleotide
aaaauuaacggagcauaau

SEQ ID NO: 1819260 - RNA, 19 nt, Artificial Sequence
  Description of Artificial Sequence: Synthetic oligonucleotide
gaccccgcagcuuacagug

SEQ ID NO: 1819261 - RNA, 19 nt, Artificial Sequence
  Description of Artificial Sequence: Synthetic oligonucleotide
acggacccuucuuuaaggc

SEQ ID NO: 1819262 - RNA, 19 nt, Artificial Sequence
  Description of Artificial Sequence: Synthetic oligonucleotide
aacacauaguauauucaga

SEQ ID NO: 1819263 - RNA, 19 nt, Artificial Sequence
  Description of Artificial Sequence: Synthetic oligonucleotide
guaaccgaagagucuuugg

SEQ ID NO: 1819264 - RNA, 19 nt, Artificial Sequence
  Description of Artificial Sequence: Synthetic oligonucleotide
uauuaacaucauccuuuag

SEQ ID NO: 1819265 - RNA, 19 nt, Artificial Sequence
  Description of Artificial Sequence: Synthetic oligonucleotide
aguuucaaaccaggagugc

SEQ ID NO: 1819266 - RNA, 19 nt, Artificial Sequence
  Description of Artificial Sequence: Synthetic oligonucleotide
auuaacggagcauaaucuu

SEQ ID NO: 1819267 - RNA, 19 nt, Artificial Sequence
  Description of Artificial Sequence: Synthetic oligonucleotide
auggaucggacagaucacc

SEQ ID NO: 1819268 - RNA, 19 nt, Artificial Sequence
  Description of Artificial Sequence: Synthetic oligonucleotide
agagucugaacuucugagu

SEQ ID NO: 1819269 - RNA, 19 nt, Artificial Sequence
  Description of Artificial Sequence: Synthetic oligonucleotide
gaguuguacacucgaaauc

SEQ ID NO: 1819270 - RNA, 19 nt, Artificial Sequence
  Description of Artificial Sequence: Synthetic oligonucleotide
aauauucucauuggauaau

SEQ ID NO: 1819271 - RNA, 19 nt, Artificial Sequence
  Description of Artificial Sequence: Synthetic oligonucleotide
uacacucgaaaucauccau

SEQ ID NO: 1819272 - RNA, 19 nt, Artificial Sequence
  Description of Artificial Sequence: Synthetic oligonucleotide
uuaguuucaugaugucugu

SEQ ID NO: 1819273 - RNA, 19 nt, Artificial Sequence
  Description of Artificial Sequence: Synthetic oligonucleotide
uuagagcacaccugggagu

SEQ ID NO: 1819274 - RNA, 19 nt, Artificial Sequence
  Description of Artificial Sequence: Synthetic oligonucleotide
uuuauauaccaaagcugua

SEQ ID NO: 1819275 - RNA, 19 nt, Artificial Sequence
  Description of Artificial Sequence: Synthetic oligonucleotide
guuuagguggcaaugguga

SEQ ID NO: 1819276 - RNA, 19 nt, Artificial Sequence
  Description of Artificial Sequence: Synthetic oligonucleotide
cggagcauaaucuuuaacc

SEQ ID NO: 1819277 - RNA, 19 nt, Artificial Sequence
  Description of Artificial Sequence: Synthetic oligonucleotide
accuccauauggcuuaaug

SEQ ID NO: 1819278 - RNA, 19 nt, Artificial Sequence
  Description of Artificial Sequence: Synthetic oligonucleotide
caagcagaguauuaacauc

SEQ ID NO: 1819279 - RNA, 19 nt, Artificial Sequence
  Description of Artificial Sequence: Synthetic oligonucleotide
cucuguuaguuucaugaug

SEQ ID NO: 1819280 - RNA, 19 nt, Artificial Sequence
  Description of Artificial Sequence: Synthetic oligonucleotide
ccauguaccgcucaagucc

SEQ ID NO: 1819281 - RNA, 19 nt, Artificial Sequence
  Description of Artificial Sequence: Synthetic oligonucleotide
uuugugcucacauccugac

SEQ ID NO: 1819282 - RNA, 19 nt, Artificial Sequence
  Description of Artificial Sequence: Synthetic oligonucleotide
ugguuuugacaauggauaa

SEQ ID NO: 1819283 - RNA, 19 nt, Artificial Sequence
  Description of Artificial Sequence: Synthetic oligonucleotide
uucagauacggacccuucu

SEQ ID NO: 1819284 - RNA, 19 nt, Artificial Sequence
  Description of Artificial Sequence: Synthetic oligonucleotide
uucucacaagaaguaauug

SEQ ID NO: 1819285 - RNA, 19 nt, Artificial Sequence
  Description of Artificial Sequence: Synthetic oligonucleotide
guauuugguuuugacaaug

SEQ ID NO: 1819286 - RNA, 19 nt, Artificial Sequence
  Description of Artificial Sequence: Synthetic oligonucleotide
auacggacccuucuuuaag

SEQ ID NO: 1819287 - RNA, 19 nt, Artificial Sequence
  Description of Artificial Sequence: Synthetic oligonucleotide
uggaucggacagaucaccc

SEQ ID NO: 1819288 - RNA, 19 nt, Artificial Sequence
  Description of Artificial Sequence: Synthetic oligonucleotide
uggaacacauggaucggac

SEQ ID NO: 1819289 - RNA, 19 nt, Artificial Sequence
  Description of Artificial Sequence: Synthetic oligonucleotide
acauccaacuccgaggcug

SEQ ID NO: 1819290 - RNA, 19 nt, Artificial Sequence
  Description of Artificial Sequence: Synthetic oligonucleotide
acggagcauaaucuuuaac

SEQ ID NO: 1819291 - RNA, 19 nt, Artificial Sequence
  Description of Artificial Sequence: Synthetic oligonucleotide
ugcauucaguaucaguuuu

SEQ ID NO: 1819292 - RNA, 19 nt, Artificial Sequence
  Description of Artificial Sequence: Synthetic oligonucleotide
agugcagaguuuagguggc

SEQ ID NO: 1819293 - RNA, 19 nt, Artificial Sequence
  Description of Artificial Sequence: Synthetic oligonucleotide
acuuugugcucacauccug

SEQ ID NO: 1819294 - RNA, 19 nt, Artificial Sequence
  Description of Artificial Sequence: Synthetic oligonucleotide
gaucggacagaucacccuc

SEQ ID NO: 1819295 - RNA, 19 nt, Artificial Sequence
  Description of Artificial Sequence: Synthetic oligonucleotide
aucaagcagaguauuaaca

SEQ ID NO: 1819296 - RNA, 19 nt, Artificial Sequence
  Description of Artificial Sequence: Synthetic oligonucleotide
uccaaugaaguagcuaggu

SEQ ID NO: 1819297 - RNA, 19 nt, Artificial Sequence
  Description of Artificial Sequence: Synthetic oligonucleotide
uuguacacucgaaaucauc

SEQ ID NO: 1819298 - RNA, 19 nt, Artificial Sequence
  Description of Artificial Sequence: Synthetic oligonucleotide
uguucuaauuuaggaguug

SEQ ID NO: 1819299 - RNA, 19 nt, Artificial Sequence
  Description of Artificial Sequence: Synthetic oligonucleotide
accugggagucuuuaucac

SEQ ID NO: 1819300 - RNA, 19 nt, Artificial Sequence
  Description of Artificial Sequence: Synthetic oligonucleotide
cuccaaugaaguagcuagg

SEQ ID NO: 1819301 - RNA, 19 nt, Artificial Sequence
  Description of Artificial Sequence: Synthetic oligonucleotide
ugggcugcguaguaggaga

SEQ ID NO: 1819302 - RNA, 19 nt, Artificial Sequence
  Description of Artificial Sequence: Synthetic oligonucleotide
guaguaggagauuuucaga

SEQ ID NO: 1819303 - RNA, 19 nt, Artificial Sequence
  Description of Artificial Sequence: Synthetic oligonucleotide
ggauaauccucaaagucgc

SEQ ID NO: 1819304 - RNA, 19 nt, Artificial Sequence
  Description of Artificial Sequence: Synthetic oligonucleotide
agcuagguuugaguugugc

SEQ ID NO: 1819305 - RNA, 19 nt, Artificial Sequence
  Description of Artificial Sequence: Synthetic oligonucleotide
aggaguuguacacucgaaa

SEQ ID NO: 1819306 - RNA, 19 nt, Artificial Sequence
  Description of Artificial Sequence: Synthetic oligonucleotide
aacucucguagcauucauc

SEQ ID NO: 1819307 - RNA, 19 nt, Artificial Sequence
  Description of Artificial Sequence: Synthetic oligonucleotide
ucagauacggacccuucuu

SEQ ID NO: 1819308 - RNA, 19 nt, Artificial Sequence
  Description of Artificial Sequence: Synthetic oligonucleotide
uguaaccgaagagucuuug

SEQ ID NO: 1819309 - RNA, 19 nt, Artificial Sequence
  Description of Artificial Sequence: Synthetic oligonucleotide
ccuucuuuaaggcugucag

SEQ ID NO: 1819310 - RNA, 19 nt, Artificial Sequence
  Description of Artificial Sequence: Synthetic oligonucleotide
ucuggaucggguucaugcu

SEQ ID NO: 1819311 - RNA, 19 nt, Artificial Sequence
  Description of Artificial Sequence: Synthetic oligonucleotide
gacucgggagaccauguac

SEQ ID NO: 1819312 - RNA, 19 nt, Artificial Sequence
  Description of Artificial Sequence: Synthetic oligonucleotide
agaaguaauuguaggagaa

SEQ ID NO: 1819313 - RNA, 19 nt, Artificial Sequence
  Description of Artificial Sequence: Synthetic oligonucleotide
guacugucuacuguagaag

SEQ ID NO: 1819314 - RNA, 19 nt, Artificial Sequence
  Description of Artificial Sequence: Synthetic oligonucleotide
ucuagcugcuggacuacga

SEQ ID NO: 1819315 - RNA, 19 nt, Artificial Sequence
  Description of Artificial Sequence: Synthetic oligonucleotide
ggaggaguuucagauacgg

SEQ ID NO: 1819316 - RNA, 19 nt, Artificial Sequence
  Description of Artificial Sequence: Synthetic oligonucleotide
cucgggagaccauguaccg

SEQ ID NO: 1819317 - RNA, 19 nt, Artificial Sequence
  Description of Artificial Sequence: Synthetic oligonucleotide
cuuuagagcacaccuggga

SEQ ID NO: 1819318 - RNA, 19 nt, Artificial Sequence
  Description of Artificial Sequence: Synthetic oligonucleotide
agcuguacugucuacugua

SEQ ID NO: 1819319 - RNA, 19 nt, Artificial Sequence
  Description of Artificial Sequence: Synthetic oligonucleotide
agucuuuggagggaggagu

SEQ ID NO: 1819320 - RNA, 19 nt, Artificial Sequence
  Description of Artificial Sequence: Synthetic oligonucleotide
acacucgaaaucauccauc

SEQ ID NO: 1819321 - RNA, 19 nt, Artificial Sequence
  Description of Artificial Sequence: Synthetic oligonucleotide
aguuuagguggcaauggug

SEQ ID NO: 1819322 - RNA, 19 nt, Artificial Sequence
  Description of Artificial Sequence: Synthetic oligonucleotide
ugauagccauacuucugga

SEQ ID NO: 1819323 - RNA, 19 nt, Artificial Sequence
  Description of Artificial Sequence: Synthetic oligonucleotide
ugucccuauggccucucca

SEQ ID NO: 1819324 - RNA, 19 nt, Artificial Sequence
  Description of Artificial Sequence: Synthetic oligonucleotide
agucugaacuucugaguga

SEQ ID NO: 1819325 - RNA, 19 nt, Artificial Sequence
  Description of Artificial Sequence: Synthetic oligonucleotide
guuucaaaccaggagugca

SEQ ID NO: 1819326 - RNA, 19 nt, Artificial Sequence
  Description of Artificial Sequence: Synthetic oligonucleotide
aguggaaacucuggaucgg

SEQ ID NO: 1819327 - RNA, 19 nt, Artificial Sequence
  Description of Artificial Sequence: Synthetic oligonucleotide
guucaugcugaggggagcg

SEQ ID NO: 1819328 - RNA, 19 nt, Artificial Sequence
  Description of Artificial Sequence: Synthetic oligonucleotide
ggaguuucagauacggacc

SEQ ID NO: 1819329 - RNA, 19 nt, Artificial Sequence
  Description of Artificial Sequence: Synthetic oligonucleotide
uucuugacuuuccaaucuu

SEQ ID NO: 1819330 - RNA, 19 nt, Artificial Sequence
  Description of Artificial Sequence: Synthetic oligonucleotide
gaaguagcuagguuugagu

SEQ ID NO: 1819331 - RNA, 19 nt, Artificial Sequence
  Description of Artificial Sequence: Synthetic oligonucleotide
ugaguggcaucguuuuaac

SEQ ID NO: 1819332 - RNA, 19 nt, Artificial Sequence
  Description of Artificial Sequence: Synthetic oligonucleotide
ugaguugugcuuuguuaau

SEQ ID NO: 1819333 - RNA, 19 nt, Artificial Sequence
  Description of Artificial Sequence: Synthetic oligonucleotide
gauacggacccuucuuuaa

SEQ ID NO: 1819334 - RNA, 19 nt, Artificial Sequence
  Description of Artificial Sequence: Synthetic oligonucleotide
cuuaaugaaguauuugguu

SEQ ID NO: 1819335 - RNA, 19 nt, Artificial Sequence
  Description of Artificial Sequence: Synthetic oligonucleotide
acagaacugcuuggaacac

SEQ ID NO: 1819336 - RNA, 19 nt, Artificial Sequence
  Description of Artificial Sequence: Synthetic oligonucleotide
ugcguaguaggagauuuuc

SEQ ID NO: 1819337 - RNA, 19 nt, Artificial Sequence
  Description of Artificial Sequence: Synthetic oligonucleotide
cagauauaccaaaguguuc

SEQ ID NO: 1819338 - RNA, 19 nt, Artificial Sequence
  Description of Artificial Sequence: Synthetic oligonucleotide
uggcaauggugaauuucug

SEQ ID NO: 1819339 - RNA, 19 nt, Artificial Sequence
  Description of Artificial Sequence: Synthetic oligonucleotide
uaugaaucuugugcuuucu

SEQ ID NO: 1819340 - RNA, 19 nt, Artificial Sequence
  Description of Artificial Sequence: Synthetic oligonucleotide
cagaguuuagguggcaaug

SEQ ID NO: 1819341 - RNA, 19 nt, Artificial Sequence
  Description of Artificial Sequence: Synthetic oligonucleotide
auauucucacaagaaguaa

SEQ ID NO: 1819342 - RNA, 19 nt, Artificial Sequence
  Description of Artificial Sequence: Synthetic oligonucleotide
uggcaucguuuuaaccucc

SEQ ID NO: 1819343 - RNA, 19 nt, Artificial Sequence
  Description of Artificial Sequence: Synthetic oligonucleotide
cauggaucggacagaucac

SEQ ID NO: 1819344 - RNA, 19 nt, Artificial Sequence
  Description of Artificial Sequence: Synthetic oligonucleotide
auauggcuuaaugaaguau

SEQ ID NO: 1819345 - RNA, 19 nt, Artificial Sequence
  Description of Artificial Sequence: Synthetic oligonucleotide
aucggacagaucacccucc

SEQ ID NO: 1819346 - RNA, 19 nt, Artificial Sequence
  Description of Artificial Sequence: Synthetic oligonucleotide
agugacuucuggaggacug

SEQ ID NO: 1819347 - RNA, 19 nt, Artificial Sequence
  Description of Artificial Sequence: Synthetic oligonucleotide
guauuaacaucauccuuua

SEQ ID NO: 1819348 - RNA, 19 nt, Artificial Sequence
  Description of Artificial Sequence: Synthetic oligonucleotide
guacacucgaaaucaucca

SEQ ID NO: 1819349 - RNA, 19 nt, Artificial Sequence
  Description of Artificial Sequence: Synthetic oligonucleotide
accaaagcuguacugucua

SEQ ID NO: 1819350 - RNA, 19 nt, Artificial Sequence
  Description of Artificial Sequence: Synthetic oligonucleotide
uaggaguuguacacucgaa

SEQ ID NO: 1819351 - RNA, 19 nt, Artificial Sequence
  Description of Artificial Sequence: Synthetic oligonucleotide
ggagcauaaucuuuaaccu

SEQ ID NO: 1819352 - RNA, 19 nt, Artificial Sequence
  Description of Artificial Sequence: Synthetic oligonucleotide
cuacgaaaccaggaauggc

SEQ ID NO: 1819353 - RNA, 19 nt, Artificial Sequence
  Description of Artificial Sequence: Synthetic oligonucleotide
uuggaacacauggaucgga

SEQ ID NO: 1819354 - RNA, 19 nt, Artificial Sequence
  Description of Artificial Sequence: Synthetic oligonucleotide
cuuugugcucacauccuga

SEQ ID NO: 1819355 - RNA, 19 nt, Artificial Sequence
  Description of Artificial Sequence: Synthetic oligonucleotide
caucugaauuuaaaauuaa

SEQ ID NO: 1819356 - RNA, 19 nt, Artificial Sequence
  Description of Artificial Sequence: Synthetic oligonucleotide
uccugaguggcaucguuuu

SEQ ID NO: 1819357 - RNA, 19 nt, Artificial Sequence
  Description of Artificial Sequence: Synthetic oligonucleotide
aagugccauuguauaaucu

SEQ ID NO: 1819358 - RNA, 19 nt, Artificial Sequence
  Description of Artificial Sequence: Synthetic oligonucleotide
uggugaauuucugcauuca

SEQ ID NO: 1819359 - RNA, 19 nt, Artificial Sequence
  Description of Artificial Sequence: Synthetic oligonucleotide
cagcuuacaguggaaacuc

SEQ ID NO: 1819360 - RNA, 19 nt, Artificial Sequence
  Description of Artificial Sequence: Synthetic oligonucleotide
uucuagcugcuggacuacg

SEQ ID NO: 1819361 - RNA, 19 nt, Artificial Sequence
  Description of Artificial Sequence: Synthetic oligonucleotide
cuggacuacgaaaccagga

SEQ ID NO: 1819362 - RNA, 19 nt, Artificial Sequence
  Description of Artificial Sequence: Synthetic oligonucleotide
uuuccugaguggcaucguu

SEQ ID NO: 1819363 - RNA, 19 nt, Artificial Sequence
  Description of Artificial Sequence: Synthetic oligonucleotide
aagucgcuguccucgccgu

SEQ ID NO: 1819364 - RNA, 19 nt, Artificial Sequence
  Description of Artificial Sequence: Synthetic oligonucleotide
gugacugauagccauacuu

SEQ ID NO: 1819365 - RNA, 19 nt, Artificial Sequence
  Description of Artificial Sequence: Synthetic oligonucleotide
uugugcucacauccugacu

SEQ ID NO: 1819366 - RNA, 19 nt, Artificial Sequence
  Description of Artificial Sequence: Synthetic oligonucleotide
auauaccaaaguguucuaa

SEQ ID NO: 1819367 - RNA, 19 nt, Artificial Sequence
  Description of Artificial Sequence: Synthetic oligonucleotide
ucgugacugauagccauac

SEQ ID NO: 1819368 - RNA, 19 nt, Artificial Sequence
  Description of Artificial Sequence: Synthetic oligonucleotide
cauguaccgcucaagucca

SEQ ID NO: 1819369 - RNA, 19 nt, Artificial Sequence
  Description of Artificial Sequence: Synthetic oligonucleotide
agauacggacccuucuuua

SEQ ID NO: 1819370 - RNA, 19 nt, Artificial Sequence
  Description of Artificial Sequence: Synthetic oligonucleotide
acugcuuggaacacaugga

SEQ ID NO: 1819371 - RNA, 19 nt, Artificial Sequence
  Description of Artificial Sequence: Synthetic oligonucleotide
ugacucuucuuugucucgu

SEQ ID NO: 1819372 - RNA, 19 nt, Artificial Sequence
  Description of Artificial Sequence: Synthetic oligonucleotide
cacaauauucucauuggau

SEQ ID NO: 1819373 - RNA, 19 nt, Artificial Sequence
  Description of Artificial Sequence: Synthetic oligonucleotide
auucucacaagaaguaauu

SEQ ID NO: 1819374 - RNA, 19 nt, Artificial Sequence
  Description of Artificial Sequence: Synthetic oligonucleotide
cuggcacuauucagagggg

SEQ ID NO: 1819375 - RNA, 19 nt, Artificial Sequence
  Description of Artificial Sequence: Synthetic oligonucleotide
gauauaccaaaguguucua

SEQ ID NO: 1819376 - RNA, 19 nt, Artificial Sequence
  Description of Artificial Sequence: Synthetic oligonucleotide
guagcuagguuugaguugu

SEQ ID NO: 1819377 - RNA, 19 nt, Artificial Sequence
  Description of Artificial Sequence: Synthetic oligonucleotide
ccgaagagucuuuggaggg

SEQ ID NO: 1819378 - RNA, 19 nt, Artificial Sequence
  Description of Artificial Sequence: Synthetic oligonucleotide
ucccuauggccucuccacu

SEQ ID NO: 1819379 - RNA, 19 nt, Artificial Sequence
  Description of Artificial Sequence: Synthetic oligonucleotide
cugcaaaacucucguagca

SEQ ID NO: 1819380 - RNA, 19 nt, Artificial Sequence
  Description of Artificial Sequence: Synthetic oligonucleotide
uggcacuauucagagggga

SEQ ID NO: 1819381 - RNA, 19 nt, Artificial Sequence
  Description of Artificial Sequence: Synthetic oligonucleotide
ucggacagaucacccucca

SEQ ID NO: 1819382 - RNA, 19 nt, Artificial Sequence
  Description of Artificial Sequence: Synthetic oligonucleotide
ucaguacuuuuguugccuu

SEQ ID NO: 1819383 - RNA, 19 nt, Artificial Sequence
  Description of Artificial Sequence: Synthetic oligonucleotide
uuguugccuuuaugaaucu

SEQ ID NO: 1819384 - RNA, 19 nt, Artificial Sequence
  Description of Artificial Sequence: Synthetic oligonucleotide
gaucggguucaugcugagg

SEQ ID NO: 1819385 - RNA, 19 nt, Artificial Sequence
  Description of Artificial Sequence: Synthetic oligonucleotide
agguuugaguugugcuuug

SEQ ID NO: 1819386 - RNA, 19 nt, Artificial Sequence
  Description of Artificial Sequence: Synthetic oligonucleotide
gaguauuaacaucauccuu

SEQ ID NO: 1819387 - RNA, 19 nt, Artificial Sequence
  Description of Artificial Sequence: Synthetic oligonucleotide
cuguuaguuucaugauguc

SEQ ID NO: 1819388 - RNA, 19 nt, Artificial Sequence
  Description of Artificial Sequence: Synthetic oligonucleotide
ugggagucuuuaucacugu

SEQ ID NO: 1819389 - RNA, 19 nt, Artificial Sequence
  Description of Artificial Sequence: Synthetic oligonucleotide
acuguagaaggaaguuuca

SEQ ID NO: 1819390 - RNA, 19 nt, Artificial Sequence
  Description of Artificial Sequence: Synthetic oligonucleotide
uugucucgugacugauagc

SEQ ID NO: 1819391 - RNA, 19 nt, Artificial Sequence
  Description of Artificial Sequence: Synthetic oligonucleotide
cugagucacugacuuugug

SEQ ID NO: 1819392 - RNA, 19 nt, Artificial Sequence
  Description of Artificial Sequence: Synthetic oligonucleotide
cacauaguauauucagaua

SEQ ID NO: 1819393 - RNA, 19 nt, Artificial Sequence
  Description of Artificial Sequence: Synthetic oligonucleotide
auucagaggggagcuuuug

SEQ ID NO: 1819394 - RNA, 19 nt, Artificial Sequence
  Description of Artificial Sequence: Synthetic oligonucleotide
gaaagcugugggcugcgua

SEQ ID NO: 1819395 - RNA, 19 nt, Artificial Sequence
  Description of Artificial Sequence: Synthetic oligonucleotide
cuauggccucuccacuggc

SEQ ID NO: 1819396 - RNA, 19 nt, Artificial Sequence
  Description of Artificial Sequence: Synthetic oligonucleotide
agugaaggucacacaauau

SEQ ID NO: 1819397 - RNA, 19 nt, Artificial Sequence
  Description of Artificial Sequence: Synthetic oligonucleotide
gugaauuucugcauucagu

SEQ ID NO: 1819398 - RNA, 19 nt, Artificial Sequence
  Description of Artificial Sequence: Synthetic oligonucleotide
gaguuuagguggcaauggu

SEQ ID NO: 1819399 - RNA, 19 nt, Artificial Sequence
  Description of Artificial Sequence: Synthetic oligonucleotide
acacauggaucggacagau

SEQ ID NO: 1819400 - RNA, 19 nt, Artificial Sequence
  Description of Artificial Sequence: Synthetic oligonucleotide
gagaccauguaccgcucaa

SEQ ID NO: 1819401 - RNA, 19 nt, Artificial Sequence
  Description of Artificial Sequence: Synthetic oligonucleotide
ccuccauauggcuuaauga

SEQ ID NO: 1819402 - RNA, 19 nt, Artificial Sequence
  Description of Artificial Sequence: Synthetic oligonucleotide
ggcacuauucagaggggag

SEQ ID NO: 1819403 - RNA, 19 nt, Artificial Sequence
  Description of Artificial Sequence: Synthetic oligonucleotide
cauauggcuuaaugaagua

SEQ ID NO: 1819404 - RNA, 19 nt, Artificial Sequence
  Description of Artificial Sequence: Synthetic oligonucleotide
ucgggagaccauguaccgc

SEQ ID NO: 1819405 - RNA, 19 nt, Artificial Sequence
  Description of Artificial Sequence: Synthetic oligonucleotide
ccuuuaugaaucuugugcu

SEQ ID NO: 1819406 - RNA, 19 nt, Artificial Sequence
  Description of Artificial Sequence: Synthetic oligonucleotide
ggaguuguacacucgaaau

SEQ ID NO: 1819407 - RNA, 19 nt, Artificial Sequence
  Description of Artificial Sequence: Synthetic oligonucleotide
ggggucugcaaaacucucg

SEQ ID NO: 1819408 - RNA, 19 nt, Artificial Sequence
  Description of Artificial Sequence: Synthetic oligonucleotide
gcucgcagcagccgggccg

SEQ ID NO: 1819409 - RNA, 19 nt, Artificial Sequence
  Description of Artificial Sequence: Synthetic oligonucleotide
cgucucgugguccagcacg

SEQ ID NO: 1819410 - RNA, 19 nt, Artificial Sequence
  Description of Artificial Sequence: Synthetic oligonucleotide
cagaccccgcagcuuacag

SEQ ID NO: 1819411 - RNA, 19 nt, Artificial Sequence
  Description of Artificial Sequence: Synthetic oligonucleotide
uccgaggcugagucacuga

SEQ ID NO: 1819412 - RNA, 19 nt, Artificial Sequence
  Description of Artificial Sequence: Synthetic oligonucleotide
gaguugugcuuuguuaaua

SEQ ID NO: 1819413 - RNA, 19 nt, Artificial Sequence
  Description of Artificial Sequence: Synthetic oligonucleotide
cucguagcauucaucugaa

SEQ ID NO: 1819414 - RNA, 19 nt, Artificial Sequence
  Description of Artificial Sequence: Synthetic oligonucleotide
cugaguggcaucguuuuaa

SEQ ID NO: 1819415 - RNA, 19 nt, Artificial Sequence
  Description of Artificial Sequence: Synthetic oligonucleotide
gaggaguuucagauacgga

SEQ ID NO: 1819416 - RNA, 19 nt, Artificial Sequence
  Description of Artificial Sequence: Synthetic oligonucleotide
gucgcuguccucgccgucc

SEQ ID NO: 1819417 - RNA, 19 nt, Artificial Sequence
  Description of Artificial Sequence: Synthetic oligonucleotide
ggaacacauggaucggaca

SEQ ID NO: 1819418 - RNA, 19 nt, Artificial Sequence
  Description of Artificial Sequence: Synthetic oligonucleotide
ggucacacaauauucucau

SEQ ID NO: 1819419 - RNA, 19 nt, Artificial Sequence
  Description of Artificial Sequence: Synthetic oligonucleotide
ggagucuuuaucacuguaa

SEQ ID NO: 1819420 - RNA, 19 nt, Artificial Sequence
  Description of Artificial Sequence: Synthetic oligonucleotide
aguuucagauacggacccu

SEQ ID NO: 1819421 - RNA, 19 nt, Artificial Sequence
  Description of Artificial Sequence: Synthetic oligonucleotide
uugcuuuaucaagcagagu

SEQ ID NO: 1819422 - RNA, 19 nt, Artificial Sequence
  Description of Artificial Sequence: Synthetic oligonucleotide
cauccaacuccgaggcuga

SEQ ID NO: 1819423 - RNA, 19 nt, Artificial Sequence
  Description of Artificial Sequence: Synthetic oligonucleotide
gagggaggaguuucagaua

SEQ ID NO: 1819424 - RNA, 19 nt, Artificial Sequence
  Description of Artificial Sequence: Synthetic oligonucleotide
ccaucuuuagagcacaccu

SEQ ID NO: 1819425 - RNA, 19 nt, Artificial Sequence
  Description of Artificial Sequence: Synthetic oligonucleotide
cucauuggauaauccucaa

SEQ ID NO: 1819426 - RNA, 19 nt, Artificial Sequence
  Description of Artificial Sequence: Synthetic oligonucleotide
cagccgggccgucucgugg

SEQ ID NO: 1819427 - RNA, 19 nt, Artificial Sequence
  Description of Artificial Sequence: Synthetic oligonucleotide
ccauauggcuuaaugaagu

SEQ ID NO: 1819428 - RNA, 19 nt, Artificial Sequence
  Description of Artificial Sequence: Synthetic oligonucleotide
cuguagaaggaaguuucaa

SEQ ID NO: 1819429 - RNA, 19 nt, Artificial Sequence
  Description of Artificial Sequence: Synthetic oligonucleotide
gucuacuguagaaggaagu

SEQ ID NO: 1819430 - RNA, 19 nt, Artificial Sequence
  Description of Artificial Sequence: Synthetic oligonucleotide
aaccuccaaugaaguagcu

SEQ ID NO: 1819431 - RNA, 19 nt, Artificial Sequence
  Description of Artificial Sequence: Synthetic oligonucleotide
uagcuagguuugaguugug

SEQ ID NO: 1819432 - RNA, 19 nt, Artificial Sequence
  Description of Artificial Sequence: Synthetic oligonucleotide
ggguguucugauauucuca

SEQ ID NO: 1819433 - RNA, 19 nt, Artificial Sequence
  Description of Artificial Sequence: Synthetic oligonucleotide
caauggugaauuucugcau

SEQ ID NO: 1819434 - RNA, 19 nt, Artificial Sequence
  Description of Artificial Sequence: Synthetic oligonucleotide
accuccaaugaaguagcua

SEQ ID NO: 1819435 - RNA, 19 nt, Artificial Sequence
  Description of Artificial Sequence: Synthetic oligonucleotide
cauccugacucuucuuugu

SEQ ID NO: 1819436 - RNA, 19 nt, Artificial Sequence
  Description of Artificial Sequence: Synthetic oligonucleotide
cuuugucucgugacugaua

SEQ ID NO: 1819437 - RNA, 19 nt, Artificial Sequence
  Description of Artificial Sequence: Synthetic oligonucleotide
agcuuacaguggaaacucu

SEQ ID NO: 1819438 - RNA, 19 nt, Artificial Sequence
  Description of Artificial Sequence: Synthetic oligonucleotide
agccgggccgucucguggu

SEQ ID NO: 1819439 - RNA, 19 nt, Artificial Sequence
  Description of Artificial Sequence: Synthetic oligonucleotide
ugaaagcugugggcugcgu

SEQ ID NO: 1819440 - RNA, 19 nt, Artificial Sequence
  Description of Artificial Sequence: Synthetic oligonucleotide
gguucaugcugaggggagc

SEQ ID NO: 1819441 - RNA, 19 nt, Artificial Sequence
  Description of Artificial Sequence: Synthetic oligonucleotide
cacauggaucggacagauc

SEQ ID NO: 1819442 - RNA, 19 nt, Artificial Sequence
  Description of Artificial Sequence: Synthetic oligonucleotide
gacuuugugcucacauccu

SEQ ID NO: 1819443 - RNA, 19 nt, Artificial Sequence
  Description of Artificial Sequence: Synthetic oligonucleotide
ucguagcauucaucugaau

SEQ ID NO: 1819444 - RNA, 19 nt, Artificial Sequence
  Description of Artificial Sequence: Synthetic oligonucleotide
cacuguaaccgaagagucu

SEQ ID NO: 1819445 - RNA, 19 nt, Artificial Sequence
  Description of Artificial Sequence: Synthetic oligonucleotide
gauaauccucaaagucgcu

SEQ ID NO: 1819446 - RNA, 19 nt, Artificial Sequence
  Description of Artificial Sequence: Synthetic oligonucleotide
agcgcucgcagcagccggg

SEQ ID NO: 1819447 - RNA, 19 nt, Artificial Sequence
  Description of Artificial Sequence: Synthetic oligonucleotide
ggaucggguucaugcugag

SEQ ID NO: 1819448 - RNA, 19 nt, Artificial Sequence
  Description of Artificial Sequence: Synthetic oligonucleotide
cugucccuauggccucucc

SEQ ID NO: 1819449 - RNA, 19 nt, Artificial Sequence
  Description of Artificial Sequence: Synthetic oligonucleotide
gggucugcaaaacucucgu

SEQ ID NO: 1819450 - RNA, 19 nt, Artificial Sequence
  Description of Artificial Sequence: Synthetic oligonucleotide
uaaccuccauauggcuuaa

SEQ ID NO: 1819451 - RNA, 19 nt, Artificial Sequence
  Description of Artificial Sequence: Synthetic oligonucleotide
ucucgugguccagcacggc

SEQ ID NO: 1819452 - RNA, 19 nt, Artificial Sequence
  Description of Artificial Sequence: Synthetic oligonucleotide
acuauucagaggggagcuu

SEQ ID NO: 1819453 - RNA, 19 nt, Artificial Sequence
  Description of Artificial Sequence: Synthetic oligonucleotide
ccgaggcugagucacugac

SEQ ID NO: 1819454 - RNA, 19 nt, Artificial Sequence
  Description of Artificial Sequence: Synthetic oligonucleotide
cacuauucagaggggagcu

SEQ ID NO: 1819455 - RNA, 19 nt, Artificial Sequence
  Description of Artificial Sequence: Synthetic oligonucleotide
cacaggcucugucccuaug

SEQ ID NO: 1819456 - RNA, 19 nt, Artificial Sequence
  Description of Artificial Sequence: Synthetic oligonucleotide
gggaggaguuucagauacg

SEQ ID NO: 1819457 - RNA, 19 nt, Artificial Sequence
  Description of Artificial Sequence: Synthetic oligonucleotide
cuggguguucugauauucu

SEQ ID NO: 1819458 - RNA, 19 nt, Artificial Sequence
  Description of Artificial Sequence: Synthetic oligonucleotide
ggacuggguguucugauau

SEQ ID NO: 1819459 - RNA, 19 nt, Artificial Sequence
  Description of Artificial Sequence: Synthetic oligonucleotide
ucgccguccagcgcucgca

SEQ ID NO: 1819460 - RNA, 19 nt, Artificial Sequence
  Description of Artificial Sequence: Synthetic oligonucleotide
ggacuacgaaaccaggaau

SEQ ID NO: 1819461 - RNA, 19 nt, Artificial Sequence
  Description of Artificial Sequence: Synthetic oligonucleotide
aacucuggaucggguucau

SEQ ID NO: 1819462 - RNA, 19 nt, Artificial Sequence
  Description of Artificial Sequence: Synthetic oligonucleotide
cucgugacugauagccaua

SEQ ID NO: 1819463 - RNA, 19 nt, Artificial Sequence
  Description of Artificial Sequence: Synthetic oligonucleotide
cucgccguccagcgcucgc

SEQ ID NO: 1819464 - RNA, 19 nt, Artificial Sequence
  Description of Artificial Sequence: Synthetic oligonucleotide
gcaaaacucucguagcauu

SEQ ID NO: 1819465 - RNA, 19 nt, Artificial Sequence
  Description of Artificial Sequence: Synthetic oligonucleotide
cuacuguagaaggaaguuu

SEQ ID NO: 1819466 - RNA, 19 nt, Artificial Sequence
  Description of Artificial Sequence: Synthetic oligonucleotide
cugcauucaguaucaguuu

SEQ ID NO: 1819467 - RNA, 19 nt, Artificial Sequence
  Description of Artificial Sequence: Synthetic oligonucleotide
cuauucagaggggagcuuu

SEQ ID NO: 1819468 - RNA, 19 nt, Artificial Sequence
  Description of Artificial Sequence: Synthetic oligonucleotide
ggaaacucuggaucggguu

SEQ ID NO: 1819469 - RNA, 19 nt, Artificial Sequence
  Description of Artificial Sequence: Synthetic oligonucleotide
ggaucggacagaucacccu

SEQ ID NO: 1819470 - RNA, 19 nt, Artificial Sequence
  Description of Artificial Sequence: Synthetic oligonucleotide
ggaggacuggguguucuga

SEQ ID NO: 1819471 - RNA, 19 nt, Artificial Sequence
  Description of Artificial Sequence: Synthetic oligonucleotide
gcguaguaggagauuuuca

SEQ ID NO: 1819472 - RNA, 19 nt, Artificial Sequence
  Description of Artificial Sequence: Synthetic oligonucleotide
ccgcucaaguccaaaaucu

SEQ ID NO: 1819473 - RNA, 19 nt, Artificial Sequence
  Description of Artificial Sequence: Synthetic oligonucleotide
caacuccgaggcugaguca

SEQ ID NO: 1819474 - RNA, 19 nt, Artificial Sequence
  Description of Artificial Sequence: Synthetic oligonucleotide
gcauaaucuuuaaccucca

SEQ ID NO: 1819475 - RNA, 19 nt, Artificial Sequence
  Description of Artificial Sequence: Synthetic oligonucleotide
guuguacacucgaaaucau

SEQ ID NO: 1819476 - RNA, 19 nt, Artificial Sequence
  Description of Artificial Sequence: Synthetic oligonucleotide
aaccuccauauggcuuaau

SEQ ID NO: 1819477 - RNA, 19 nt, Artificial Sequence
  Description of Artificial Sequence: Synthetic oligonucleotide
cagauacggacccuucuuu

SEQ ID NO: 1819478 - RNA, 19 nt, Artificial Sequence
  Description of Artificial Sequence: Synthetic oligonucleotide
accccgcagcuuacagugg

SEQ ID NO: 1819479 - RNA, 19 nt, Artificial Sequence
  Description of Artificial Sequence: Synthetic oligonucleotide
gguuuugacaauggauaau

SEQ ID NO: 1819480 - RNA, 19 nt, Artificial Sequence
  Description of Artificial Sequence: Synthetic oligonucleotide
ggccagaccccgcagcuua

SEQ ID NO: 1819481 - RNA, 19 nt, Artificial Sequence
  Description of Artificial Sequence: Synthetic oligonucleotide
gucacacaauauucucauu

SEQ ID NO: 1819482 - RNA, 19 nt, Artificial Sequence
  Description of Artificial Sequence: Synthetic oligonucleotide
ggcaucguuuuaaccucca

SEQ ID NO: 1819483 - RNA, 19 nt, Artificial Sequence
  Description of Artificial Sequence: Synthetic oligonucleotide
gcugcguaguaggagauuu

SEQ ID NO: 1819484 - RNA, 19 nt, Artificial Sequence
  Description of Artificial Sequence: Synthetic oligonucleotide
gccgucucgugguccagca

SEQ ID NO: 1819485 - RNA, 19 nt, Artificial Sequence
  Description of Artificial Sequence: Synthetic oligonucleotide
acuccgaggcugagucacu

SEQ ID NO: 1819486 - RNA, 19 nt, Artificial Sequence
  Description of Artificial Sequence: Synthetic oligonucleotide
ccguccagcgcucgcagca

SEQ ID NO: 1819487 - RNA, 19 nt, Artificial Sequence
  Description of Artificial Sequence: Synthetic oligonucleotide
cacccuccacaccaggcau

SEQ ID NO: 1819488 - RNA, 19 nt, Artificial Sequence
  Description of Artificial Sequence: Synthetic oligonucleotide
ggacucgggagaccaugua

SEQ ID NO: 1819489 - RNA, 19 nt, Artificial Sequence
  Description of Artificial Sequence: Synthetic oligonucleotide
cuguaaccgaagagucuuu

SEQ ID NO: 1819490 - RNA, 19 nt, Artificial Sequence
  Description of Artificial Sequence: Synthetic oligonucleotide
cgggagaccauguaccgcu

SEQ ID NO: 1819491 - RNA, 19 nt, Artificial Sequence
  Description of Artificial Sequence: Synthetic oligonucleotide
gccuuuccugaguggcauc

SEQ ID NO: 1819492 - RNA, 19 nt, Artificial Sequence
  Description of Artificial Sequence: Synthetic oligonucleotide
cugcguaguaggagauuuu

SEQ ID NO: 1819493 - RNA, 19 nt, Artificial Sequence
  Description of Artificial Sequence: Synthetic oligonucleotide
gguuugaguugugcuuugu

SEQ ID NO: 1819494 - RNA, 19 nt, Artificial Sequence
  Description of Artificial Sequence: Synthetic oligonucleotide
ccaaugaaguagcuagguu

SEQ ID NO: 1819495 - RNA, 19 nt, Artificial Sequence
  Description of Artificial Sequence: Synthetic oligonucleotide
cuuuccugaguggcaucgu

SEQ ID NO: 1819496 - RNA, 19 nt, Artificial Sequence
  Description of Artificial Sequence: Synthetic oligonucleotide
cacugacuuugugcucaca

SEQ ID NO: 1819497 - RNA, 19 nt, Artificial Sequence
  Description of Artificial Sequence: Synthetic oligonucleotide
cacauccaacuccgaggcu

SEQ ID NO: 1819498 - RNA, 19 nt, Artificial Sequence
  Description of Artificial Sequence: Synthetic oligonucleotide
auguaccgcucaaguccaa

SEQ ID NO: 1819499 - RNA, 19 nt, Artificial Sequence
  Description of Artificial Sequence: Synthetic oligonucleotide
ggggagcuuuugauggucu

SEQ ID NO: 1819500 - RNA, 19 nt, Artificial Sequence
  Description of Artificial Sequence: Synthetic oligonucleotide
cucgcagcagccgggccgu

SEQ ID NO: 1819501 - RNA, 19 nt, Artificial Sequence
  Description of Artificial Sequence: Synthetic oligonucleotide
gcggccagaccccgcagcu

SEQ ID NO: 1819502 - RNA, 19 nt, Artificial Sequence
  Description of Artificial Sequence: Synthetic oligonucleotide
gcgcucgcagcagccgggc

SEQ ID NO: 1819503 - RNA, 19 nt, Artificial Sequence
  Description of Artificial Sequence: Synthetic oligonucleotide
ccgcagcuuacaguggaaa

SEQ ID NO: 1819504 - RNA, 19 nt, Artificial Sequence
  Description of Artificial Sequence: Synthetic oligonucleotide
gccagaccccgcagcuuac

SEQ ID NO: 1819505 - RNA, 19 nt, Artificial Sequence
  Description of Artificial Sequence: Synthetic oligonucleotide
gggccgucucgugguccag

SEQ ID NO: 1819506 - RNA, 19 nt, Artificial Sequence
  Description of Artificial Sequence: Synthetic oligonucleotide
ccagaccccgcagcuuaca

SEQ ID NO: 1819507 - RNA, 19 nt, Artificial Sequence
  Description of Artificial Sequence: Synthetic oligonucleotide
cgggccgucucguggucca

SEQ ID NO: 1819508 - RNA, 19 nt, Artificial Sequence
  Description of Artificial Sequence: Synthetic oligonucleotide
gccgggccgucucgugguc

SEQ ID NO: 1819509 - RNA, 19 nt, Artificial Sequence
  Description of Artificial Sequence: Synthetic oligonucleotide
gggcugcguaguaggagau

SEQ ID NO: 1819510 - RNA, 19 nt, Artificial Sequence
  Description of Artificial Sequence: Synthetic oligonucleotide
ggcugcguaguaggagauu

SEQ ID NO: 1819511 - RNA, 19 nt, Artificial Sequence
  Description of Artificial Sequence: Synthetic oligonucleotide
gccucuccacuggcacuau

SEQ ID NO: 1819512 - RNA, 19 nt, Artificial Sequence
  Description of Artificial Sequence: Synthetic oligonucleotide
ugcaaauacagaaacaugg

SEQ ID NO: 1819513 - RNA, 19 nt, Artificial Sequence
  Description of Artificial Sequence: Synthetic oligonucleotide
aacagcaaaacaauaaacc

SEQ ID NO: 1819514 - RNA, 19 nt, Artificial Sequence
  Description of Artificial Sequence: Synthetic oligonucleotide
aaaguggcaaaauccaggg

SEQ ID NO: 1819515 - RNA, 19 nt, Artificial Sequence
  Description of Artificial Sequence: Synthetic oligonucleotide
aaguaucugaccaucagcc

SEQ ID NO: 1819516 - RNA, 19 nt, Artificial Sequence
  Description of Artificial Sequence: Synthetic oligonucleotide
aacuguuccccacaggggc

SEQ ID NO: 1819517 - RNA, 19 nt, Artificial Sequence
  Description of Artificial Sequence: Synthetic oligonucleotide
aguaacaacuuuugguugc

SEQ ID NO: 1819518 - RNA, 19 nt, Artificial Sequence
  Description of Artificial Sequence: Synthetic oligonucleotide
acaggguccaaucuuaccc

SEQ ID NO: 1819519 - RNA, 19 nt, Artificial Sequence
  Description of Artificial Sequence: Synthetic oligonucleotide
guaaaaucuaccaaaaggc

SEQ ID NO: 1819520 - RNA, 19 nt, Artificial Sequence
  Description of Artificial Sequence: Synthetic oligonucleotide
ugugcaugaagucccaugg

SEQ ID NO: 1819521 - RNA, 19 nt, Artificial Sequence
  Description of Artificial Sequence: Synthetic oligonucleotide
cauuacagugcacagaggg

SEQ ID NO: 1819522 - RNA, 19 nt, Artificial Sequence
  Description of Artificial Sequence: Synthetic oligonucleotide
aguaggacaugguuguucc

SEQ ID NO: 1819523 - RNA, 19 nt, Artificial Sequence
  Description of Artificial Sequence: Synthetic oligonucleotide
aguggcuuaacgcucaagg

SEQ ID NO: 1819524 - RNA, 19 nt, Artificial Sequence
  Description of Artificial Sequence: Synthetic oligonucleotide
aauaaguuauuuuguacau

SEQ ID NO: 1819525 - RNA, 19 nt, Artificial Sequence
  Description of Artificial Sequence: Synthetic oligonucleotide
aauuccaguuaaugucucc

SEQ ID NO: 1819526 - RNA, 19 nt, Artificial Sequence
  Description of Artificial Sequence: Synthetic oligonucleotide
uuuaauuugaguacuucau

SEQ ID NO: 1819527 - RNA, 19 nt, Artificial Sequence
  Description of Artificial Sequence: Synthetic oligonucleotide
aauuugaguacuucauuca

SEQ ID NO: 1819528 - RNA, 19 nt, Artificial Sequence
  Description of Artificial Sequence: Synthetic oligonucleotide
ucuguagacaccuuggagu

SEQ ID NO: 1819529 - RNA, 19 nt, Artificial Sequence
  Description of Artificial Sequence: Synthetic oligonucleotide
ugagguguaaaaucuacca

SEQ ID NO: 1819530 - RNA, 19 nt, Artificial Sequence
  Description of Artificial Sequence: Synthetic oligonucleotide
acugcucggaguuucaugg

SEQ ID NO: 1819531 - RNA, 19 nt, Artificial Sequence
  Description of Artificial Sequence: Synthetic oligonucleotide
ugcacagagggaaagagcu

SEQ ID NO: 1819532 - RNA, 19 nt, Artificial Sequence
  Description of Artificial Sequence: Synthetic oligonucleotide
agaaacaugggugccaggc

SEQ ID NO: 1819533 - RNA, 19 nt, Artificial Sequence
  Description of Artificial Sequence: Synthetic oligonucleotide
uuauuuuguacauuacagu

SEQ ID NO: 1819534 - RNA, 19 nt, Artificial Sequence
  Description of Artificial Sequence: Synthetic oligonucleotide
cucaaggacagguuuaugc

SEQ ID NO: 1819535 - RNA, 19 nt, Artificial Sequence
  Description of Artificial Sequence: Synthetic oligonucleotide
aguuauuuuguacauuaca

SEQ ID NO: 1819536 - RNA, 19 nt, Artificial Sequence
  Description of Artificial Sequence: Synthetic oligonucleotide
cacaaauaugauccgaucc

SEQ ID NO: 1819537 - RNA, 19 nt, Artificial Sequence
  Description of Artificial Sequence: Synthetic oligonucleotide
acggcaaguagccaagacc

SEQ ID NO: 1819538 - RNA, 19 nt, Artificial Sequence
  Description of Artificial Sequence: Synthetic oligonucleotide
caaaguggcaaaauccagg

SEQ ID NO: 1819539 - RNA, 19 nt, Artificial Sequence
  Description of Artificial Sequence: Synthetic oligonucleotide
ccucuuuucacuuaggagg

SEQ ID NO: 1819540 - RNA, 19 nt, Artificial Sequence
  Description of Artificial Sequence: Synthetic oligonucleotide
uacguaauuucccaacuug

SEQ ID NO: 1819541 - RNA, 19 nt, Artificial Sequence
  Description of Artificial Sequence: Synthetic oligonucleotide
ggucuauacagucugaucc

SEQ ID NO: 1819542 - RNA, 19 nt, Artificial Sequence
  Description of Artificial Sequence: Synthetic oligonucleotide
acugagugaacagugggcc

SEQ ID NO: 1819543 - RNA, 19 nt, Artificial Sequence
  Description of Artificial Sequence: Synthetic oligonucleotide
ugaguaacaacuuuugguu

SEQ ID NO: 1819544 - RNA, 19 nt, Artificial Sequence
  Description of Artificial Sequence: Synthetic oligonucleotide
uguacuccaacucaaguau

SEQ ID NO: 1819545 - RNA, 19 nt, Artificial Sequence
  Description of Artificial Sequence: Synthetic oligonucleotide
uugaguacuucauucagac

SEQ ID NO: 1819546 - RNA, 19 nt, Artificial Sequence
  Description of Artificial Sequence: Synthetic oligonucleotide
aacuggucuauacagucug

SEQ ID NO: 1819547 - RNA, 19 nt, Artificial Sequence
  Description of Artificial Sequence: Synthetic oligonucleotide
uguacauuacagugcacag

SEQ ID NO: 1819548 - RNA, 19 nt, Artificial Sequence
  Description of Artificial Sequence: Synthetic oligonucleotide
aaggaguuuuggcaucuac

SEQ ID NO: 1819549 - RNA, 19 nt, Artificial Sequence
  Description of Artificial Sequence: Synthetic oligonucleotide
auuugaguacuucauucag

SEQ ID NO: 1819550 - RNA, 19 nt, Artificial Sequence
  Description of Artificial Sequence: Synthetic oligonucleotide
agggcaaucagagaguacg

SEQ ID NO: 1819551 - RNA, 19 nt, Artificial Sequence
  Description of Artificial Sequence: Synthetic oligonucleotide
aguuuuggcaucuacguaa

SEQ ID NO: 1819552 - RNA, 19 nt, Artificial Sequence
  Description of Artificial Sequence: Synthetic oligonucleotide
uguaguggaagcaggaaaa

SEQ ID NO: 1819553 - RNA, 19 nt, Artificial Sequence
  Description of Artificial Sequence: Synthetic oligonucleotide
aaucuuacccugcaucugu

SEQ ID NO: 1819554 - RNA, 19 nt, Artificial Sequence
  Description of Artificial Sequence: Synthetic oligonucleotide
ucaaguaucugaccaucag

SEQ ID NO: 1819555 - RNA, 19 nt, Artificial Sequence
  Description of Artificial Sequence: Synthetic oligonucleotide
aucuacguaauuucccaac

SEQ ID NO: 1819556 - RNA, 19 nt, Artificial Sequence
  Description of Artificial Sequence: Synthetic oligonucleotide
acaugguuguuccggacgc

SEQ ID NO: 1819557 - RNA, 19 nt, Artificial Sequence
  Description of Artificial Sequence: Synthetic oligonucleotide
gaguacuucauucagacgu

SEQ ID NO: 1819558 - RNA, 19 nt, Artificial Sequence
  Description of Artificial Sequence: Synthetic oligonucleotide
ucaaaguggcaaaauccag

SEQ ID NO: 1819559 - RNA, 19 nt, Artificial Sequence
  Description of Artificial Sequence: Synthetic oligonucleotide
uuugaguacuucauucaga

SEQ ID NO: 1819560 - RNA, 19 nt, Artificial Sequence
  Description of Artificial Sequence: Synthetic oligonucleotide
uuccaauaggaauggaccc

SEQ ID NO: 1819561 - RNA, 19 nt, Artificial Sequence
  Description of Artificial Sequence: Synthetic oligonucleotide
accucaauaucaaagacug

SEQ ID NO: 1819562 - RNA, 19 nt, Artificial Sequence
  Description of Artificial Sequence: Synthetic oligonucleotide
uauuucugcaugcauuccu

SEQ ID NO: 1819563 - RNA, 19 nt, Artificial Sequence
  Description of Artificial Sequence: Synthetic oligonucleotide
gacaugguuguuccggacg

SEQ ID NO: 1819564 - RNA, 19 nt, Artificial Sequence
  Description of Artificial Sequence: Synthetic oligonucleotide
aacuuuugguugcugagaa

SEQ ID NO: 1819565 - RNA, 19 nt, Artificial Sequence
  Description of Artificial Sequence: Synthetic oligonucleotide
agacugagugaacaguggg

SEQ ID NO: 1819566 - RNA, 19 nt, Artificial Sequence
  Description of Artificial Sequence: Synthetic oligonucleotide
uuguacauuacagugcaca

SEQ ID NO: 1819567 - RNA, 19 nt, Artificial Sequence
  Description of Artificial Sequence: Synthetic oligonucleotide
ucuacguaauuucccaacu

SEQ ID NO: 1819568 - RNA, 19 nt, Artificial Sequence
  Description of Artificial Sequence: Synthetic oligonucleotide
uggcuuaacgcucaaggac

SEQ ID NO: 1819569 - RNA, 19 nt, Artificial Sequence
  Description of Artificial Sequence: Synthetic oligonucleotide
uugagguguaaaaucuacc

SEQ ID NO: 1819570 - RNA, 19 nt, Artificial Sequence
  Description of Artificial Sequence: Synthetic oligonucleotide
cuucagaacagcaaaacaa

SEQ ID NO: 1819571 - RNA, 19 nt, Artificial Sequence
  Description of Artificial Sequence: Synthetic oligonucleotide
uuaauuugaguacuucauu

SEQ ID NO: 1819572 - RNA, 19 nt, Artificial Sequence
  Description of Artificial Sequence: Synthetic oligonucleotide
ucauggucuucuuugguca

SEQ ID NO: 1819573 - RNA, 19 nt, Artificial Sequence
  Description of Artificial Sequence: Synthetic oligonucleotide
acaacuuuugguugcugag

SEQ ID NO: 1819574 - RNA, 19 nt, Artificial Sequence
  Description of Artificial Sequence: Synthetic oligonucleotide
cacagguguauacacaccc

SEQ ID NO: 1819575 - RNA, 19 nt, Artificial Sequence
  Description of Artificial Sequence: Synthetic oligonucleotide
ucagagaguacguccagca

SEQ ID NO: 1819576 - RNA, 19 nt, Artificial Sequence
  Description of Artificial Sequence: Synthetic oligonucleotide
gacagguuuaugcaggaca

SEQ ID NO: 1819577 - RNA, 19 nt, Artificial Sequence
  Description of Artificial Sequence: Synthetic oligonucleotide
uccaaucuuacccugcauc

SEQ ID NO: 1819578 - RNA, 19 nt, Artificial Sequence
  Description of Artificial Sequence: Synthetic oligonucleotide
cacagaggugaccaaaagg

SEQ ID NO: 1819579 - RNA, 19 nt, Artificial Sequence
  Description of Artificial Sequence: Synthetic oligonucleotide
agagaguacguccagcagu

SEQ ID NO: 1819580 - RNA, 19 nt, Artificial Sequence
  Description of Artificial Sequence: Synthetic oligonucleotide
cucaucuuggggauagagg

SEQ ID NO: 1819581 - RNA, 19 nt, Artificial Sequence
  Description of Artificial Sequence: Synthetic oligonucleotide
agagggaaagagcuuucac

SEQ ID NO: 1819582 - RNA, 19 nt, Artificial Sequence
  Description of Artificial Sequence: Synthetic oligonucleotide
uccugaguaacaacuuuug

SEQ ID NO: 1819583 - RNA, 19 nt, Artificial Sequence
  Description of Artificial Sequence: Synthetic oligonucleotide
aaaucuaccaaaaggcuuu

SEQ ID NO: 1819584 - RNA, 19 nt, Artificial Sequence
  Description of Artificial Sequence: Synthetic oligonucleotide
aaggcuuucucacgauaag

SEQ ID NO: 1819585 - RNA, 19 nt, Artificial Sequence
  Description of Artificial Sequence: Synthetic oligonucleotide
aguguacacggcaaguagc

SEQ ID NO: 1819586 - RNA, 19 nt, Artificial Sequence
  Description of Artificial Sequence: Synthetic oligonucleotide
cauugggcaguaucaaucc

SEQ ID NO: 1819587 - RNA, 19 nt, Artificial Sequence
  Description of Artificial Sequence: Synthetic oligonucleotide
aaaaucuaccaaaaggcuu

SEQ ID NO: 1819588 - RNA, 19 nt, Artificial Sequence
  Description of Artificial Sequence: Synthetic oligonucleotide
gaccguagcggauacacac

SEQ ID NO: 1819589 - RNA, 19 nt, Artificial Sequence
  Description of Artificial Sequence: Synthetic oligonucleotide
aauccgugcuccucauagg

SEQ ID NO: 1819590 - RNA, 19 nt, Artificial Sequence
  Description of Artificial Sequence: Synthetic oligonucleotide
ucacuuaggagggacuggg

SEQ ID NO: 1819591 - RNA, 19 nt, Artificial Sequence
  Description of Artificial Sequence: Synthetic oligonucleotide
uuaacgcucaaggacaggu

SEQ ID NO: 1819592 - RNA, 19 nt, Artificial Sequence
  Description of Artificial Sequence: Synthetic oligonucleotide
cagacguuuccucuguugg

SEQ ID NO: 1819593 - RNA, 19 nt, Artificial Sequence
  Description of Artificial Sequence: Synthetic oligonucleotide
caauccgugcuccucauag

SEQ ID NO: 1819594 - RNA, 19 nt, Artificial Sequence
  Description of Artificial Sequence: Synthetic oligonucleotide
auccgugcuccucauaggg

SEQ ID NO: 1819595 - RNA, 19 nt, Artificial Sequence
  Description of Artificial Sequence: Synthetic oligonucleotide
uccucuuugcuguagugga

SEQ ID NO: 1819596 - RNA, 19 nt, Artificial Sequence
  Description of Artificial Sequence: Synthetic oligonucleotide
agacguuuccucuguuggc

SEQ ID NO: 1819597 - RNA, 19 nt, Artificial Sequence
  Description of Artificial Sequence: Synthetic oligonucleotide
acagguuuaugcaggacac

SEQ ID NO: 1819598 - RNA, 19 nt, Artificial Sequence
  Description of Artificial Sequence: Synthetic oligonucleotide
aucuguagacaccuuggag

SEQ ID NO: 1819599 - RNA, 19 nt, Artificial Sequence
  Description of Artificial Sequence: Synthetic oligonucleotide
gaggcacucagcacgaccg

SEQ ID NO: 1819600 - RNA, 19 nt, Artificial Sequence
  Description of Artificial Sequence: Synthetic oligonucleotide
ugaguacuucauucagacg

SEQ ID NO: 1819601 - RNA, 19 nt, Artificial Sequence
  Description of Artificial Sequence: Synthetic oligonucleotide
gugaccaaaaggcauugug

SEQ ID NO: 1819602 - RNA, 19 nt, Artificial Sequence
  Description of Artificial Sequence: Synthetic oligonucleotide
ucauagggaucauuggggu

SEQ ID NO: 1819603 - RNA, 19 nt, Artificial Sequence
  Description of Artificial Sequence: Synthetic oligonucleotide
agcggauacacaccuucac

SEQ ID NO: 1819604 - RNA, 19 nt, Artificial Sequence
  Description of Artificial Sequence: Synthetic oligonucleotide
agguuuaugcaggacacag

SEQ ID NO: 1819605 - RNA, 19 nt, Artificial Sequence
  Description of Artificial Sequence: Synthetic oligonucleotide
augcauuccugcauggccc

SEQ ID NO: 1819606 - RNA, 19 nt, Artificial Sequence
  Description of Artificial Sequence: Synthetic oligonucleotide
uuuggcaucuacguaauuu

SEQ ID NO: 1819607 - RNA, 19 nt, Artificial Sequence
  Description of Artificial Sequence: Synthetic oligonucleotide
guguaaaaucuaccaaaag

SEQ ID NO: 1819608 - RNA, 19 nt, Artificial Sequence
  Description of Artificial Sequence: Synthetic oligonucleotide
uuuaugcaggacacaggug

SEQ ID NO: 1819609 - RNA, 19 nt, Artificial Sequence
  Description of Artificial Sequence: Synthetic oligonucleotide
caugaagucccauggcaag

SEQ ID NO: 1819610 - RNA, 19 nt, Artificial Sequence
  Description of Artificial Sequence: Synthetic oligonucleotide
uuacagugcacagagggaa

SEQ ID NO: 1819611 - RNA, 19 nt, Artificial Sequence
  Description of Artificial Sequence: Synthetic oligonucleotide
caaggacagguuuaugcag

SEQ ID NO: 1819612 - RNA, 19 nt, Artificial Sequence
  Description of Artificial Sequence: Synthetic oligonucleotide
uuucacuuaggagggacug

SEQ ID NO: 1819613 - RNA, 19 nt, Artificial Sequence
  Description of Artificial Sequence: Synthetic oligonucleotide
ggcaauuccaguuaauguc

SEQ ID NO: 1819614 - RNA, 19 nt, Artificial Sequence
  Description of Artificial Sequence: Synthetic oligonucleotide
auaggaauggacccacccu

SEQ ID NO: 1819615 - RNA, 19 nt, Artificial Sequence
  Description of Artificial Sequence: Synthetic oligonucleotide
aacgcucaaggacagguuu

SEQ ID NO: 1819616 - RNA, 19 nt, Artificial Sequence
  Description of Artificial Sequence: Synthetic oligonucleotide
ugggcaauuccaguuaaug

SEQ ID NO: 1819617 - RNA, 19 nt, Artificial Sequence
  Description of Artificial Sequence: Synthetic oligonucleotide
gaacagugggccccaaacc

SEQ ID NO: 1819618 - RNA, 19 nt, Artificial Sequence
  Description of Artificial Sequence: Synthetic oligonucleotide
acgaccguagcggauacac

SEQ ID NO: 1819619 - RNA, 19 nt, Artificial Sequence
  Description of Artificial Sequence: Synthetic oligonucleotide
uacacggcaaguagccaag

SEQ ID NO: 1819620 - RNA, 19 nt, Artificial Sequence
  Description of Artificial Sequence: Synthetic oligonucleotide
gagucuggacugcaaauac

SEQ ID NO: 1819621 - RNA, 19 nt, Artificial Sequence
  Description of Artificial Sequence: Synthetic oligonucleotide
uugugcaugaagucccaug

SEQ ID NO: 1819622 - RNA, 19 nt, Artificial Sequence
  Description of Artificial Sequence: Synthetic oligonucleotide
gcaaucagagaguacgucc

SEQ ID NO: 1819623 - RNA, 19 nt, Artificial Sequence
  Description of Artificial Sequence: Synthetic oligonucleotide
gaaagagcuuucacagagg

SEQ ID NO: 1819624 - RNA, 19 nt, Artificial Sequence
  Description of Artificial Sequence: Synthetic oligonucleotide
guaucugaccaucagccuc

SEQ ID NO: 1819625 - RNA, 19 nt, Artificial Sequence
  Description of Artificial Sequence: Synthetic oligonucleotide
gaguacguccagcaguggc

SEQ ID NO: 1819626 - RNA, 19 nt, Artificial Sequence
  Description of Artificial Sequence: Synthetic oligonucleotide
aagcagcuagguccccacc

SEQ ID NO: 1819627 - RNA, 19 nt, Artificial Sequence
  Description of Artificial Sequence: Synthetic oligonucleotide
aaaggcuuucucacgauaa

SEQ ID NO: 1819628 - RNA, 19 nt, Artificial Sequence
  Description of Artificial Sequence: Synthetic oligonucleotide
acucaaguaucugaccauc

SEQ ID NO: 1819629 - RNA, 19 nt, Artificial Sequence
  Description of Artificial Sequence: Synthetic oligonucleotide
caacucaaguaucugacca

SEQ ID NO: 1819630 - RNA, 19 nt, Artificial Sequence
  Description of Artificial Sequence: Synthetic oligonucleotide
auguacuccaacucaagua

SEQ ID NO: 1819631 - RNA, 19 nt, Artificial Sequence
  Description of Artificial Sequence: Synthetic oligonucleotide
cuguagacaccuuggaguc

SEQ ID NO: 1819632 - RNA, 19 nt, Artificial Sequence
  Description of Artificial Sequence: Synthetic oligonucleotide
cuggacugcaaauacagaa

SEQ ID NO: 1819633 - RNA, 19 nt, Artificial Sequence
  Description of Artificial Sequence: Synthetic oligonucleotide
cacgauaagcuuuccugag

SEQ ID NO: 1819634 - RNA, 19 nt, Artificial Sequence
  Description of Artificial Sequence: Synthetic oligonucleotide
aucagagaguacguccagc

SEQ ID NO: 1819635 - RNA, 19 nt, Artificial Sequence
  Description of Artificial Sequence: Synthetic oligonucleotide
agcuuuccugaguaacaac

SEQ ID NO: 1819636 - RNA, 19 nt, Artificial Sequence
  Description of Artificial Sequence: Synthetic oligonucleotide
gagaguacguccagcagug

SEQ ID NO: 1819637 - RNA, 19 nt, Artificial Sequence
  Description of Artificial Sequence: Synthetic oligonucleotide
uuccugaguaacaacuuuu

SEQ ID NO: 1819638 - RNA, 19 nt, Artificial Sequence
  Description of Artificial Sequence: Synthetic oligonucleotide
ugcauuccugcauggcccg

SEQ ID NO: 1819639 - RNA, 19 nt, Artificial Sequence
  Description of Artificial Sequence: Synthetic oligonucleotide
aaaauccagggcaaucaga

SEQ ID NO: 1819640 - RNA, 19 nt, Artificial Sequence
  Description of Artificial Sequence: Synthetic oligonucleotide
aaucuaccaaaaggcuuuc

SEQ ID NO: 1819641 - RNA, 19 nt, Artificial Sequence
  Description of Artificial Sequence: Synthetic oligonucleotide
ugcugagaaaucucagcac

SEQ ID NO: 1819642 - RNA, 19 nt, Artificial Sequence
  Description of Artificial Sequence: Synthetic oligonucleotide
ucucacgauaagcuuuccu

SEQ ID NO: 1819643 - RNA, 19 nt, Artificial Sequence
  Description of Artificial Sequence: Synthetic oligonucleotide
uccaauaggaauggaccca

SEQ ID NO: 1819644 - RNA, 19 nt, Artificial Sequence
  Description of Artificial Sequence: Synthetic oligonucleotide
uucacuuaggagggacugg

SEQ ID NO: 1819645 - RNA, 19 nt, Artificial Sequence
  Description of Artificial Sequence: Synthetic oligonucleotide
ucuuacccugcaucuguag

SEQ ID NO: 1819646 - RNA, 19 nt, Artificial Sequence
  Description of Artificial Sequence: Synthetic oligonucleotide
ucuuccaccugcuccggug

SEQ ID NO: 1819647 - RNA, 19 nt, Artificial Sequence
  Description of Artificial Sequence: Synthetic oligonucleotide
cugaguaacaacuuuuggu

SEQ ID NO: 1819648 - RNA, 19 nt, Artificial Sequence
  Description of Artificial Sequence: Synthetic oligonucleotide
guagcggauacacaccuuc

SEQ ID NO: 1819649 - RNA, 19 nt, Artificial Sequence
  Description of Artificial Sequence: Synthetic oligonucleotide
acagguguauacacacccc

SEQ ID NO: 1819650 - RNA, 19 nt, Artificial Sequence
  Description of Artificial Sequence: Synthetic oligonucleotide
ucuggacugcaaauacaga

SEQ ID NO: 1819651 - RNA, 19 nt, Artificial Sequence
  Description of Artificial Sequence: Synthetic oligonucleotide
gaacuguuccccacagggg

SEQ ID NO: 1819652 - RNA, 19 nt, Artificial Sequence
  Description of Artificial Sequence: Synthetic oligonucleotide
caguguacacggcaaguag

SEQ ID NO: 1819653 - RNA, 19 nt, Artificial Sequence
  Description of Artificial Sequence: Synthetic oligonucleotide
aguaucugaccaucagccu

SEQ ID NO: 1819654 - RNA, 19 nt, Artificial Sequence
  Description of Artificial Sequence: Synthetic oligonucleotide
guagccaagaccccugauc

SEQ ID NO: 1819655 - RNA, 19 nt, Artificial Sequence
  Description of Artificial Sequence: Synthetic oligonucleotide
uugguugcugagaaaucuc

SEQ ID NO: 1819656 - RNA, 19 nt, Artificial Sequence
  Description of Artificial Sequence: Synthetic oligonucleotide
ucucagcacaguauuucaa

SEQ ID NO: 1819657 - RNA, 19 nt, Artificial Sequence
  Description of Artificial Sequence: Synthetic oligonucleotide
uacuucauucagacguuuc

SEQ ID NO: 1819658 - RNA, 19 nt, Artificial Sequence
  Description of Artificial Sequence: Synthetic oligonucleotide
ucugaucccuugauuuccu

SEQ ID NO: 1819659 - RNA, 19 nt, Artificial Sequence
  Description of Artificial Sequence: Synthetic oligonucleotide
ugcccuggaagcagcuagg

SEQ ID NO: 1819660 - RNA, 19 nt, Artificial Sequence
  Description of Artificial Sequence: Synthetic oligonucleotide
aagaccccugaucauuaaa

SEQ ID NO: 1819661 - RNA, 19 nt, Artificial Sequence
  Description of Artificial Sequence: Synthetic oligonucleotide
cucuuugcuguaguggaag

SEQ ID NO: 1819662 - RNA, 19 nt, Artificial Sequence
  Description of Artificial Sequence: Synthetic oligonucleotide
caguauuucaaaguggcaa

SEQ ID NO: 1819663 - RNA, 19 nt, Artificial Sequence
  Description of Artificial Sequence: Synthetic oligonucleotide
auucagacguuuccucugu

SEQ ID NO: 1819664 - RNA, 19 nt, Artificial Sequence
  Description of Artificial Sequence: Synthetic oligonucleotide
guguacacggcaaguagcc

SEQ ID NO: 1819665 - RNA, 19 nt, Artificial Sequence
  Description of Artificial Sequence: Synthetic oligonucleotide
uccggguauuucugcaugc

SEQ ID NO: 1819666 - RNA, 19 nt, Artificial Sequence
  Description of Artificial Sequence: Synthetic oligonucleotide
acccugcaucuguagacac

SEQ ID NO: 1819667 - RNA, 19 nt, Artificial Sequence
  Description of Artificial Sequence: Synthetic oligonucleotide
acgauaagcuuuccugagu

SEQ ID NO: 1819668 - RNA, 19 nt, Artificial Sequence
  Description of Artificial Sequence: Synthetic oligonucleotide
ugcucggaguuucaugguc

SEQ ID NO: 1819669 - RNA, 19 nt, Artificial Sequence
  Description of Artificial Sequence: Synthetic oligonucleotide
cacgcagugaccucccuuc

SEQ ID NO: 1819670 - RNA, 19 nt, Artificial Sequence
  Description of Artificial Sequence: Synthetic oligonucleotide
aagcuuuccugaguaacaa

SEQ ID NO: 1819671 - RNA, 19 nt, Artificial Sequence
  Description of Artificial Sequence: Synthetic oligonucleotide
ugaaggaguuuuggcaucu

SEQ ID NO: 1819672 - RNA, 19 nt, Artificial Sequence
  Description of Artificial Sequence: Synthetic oligonucleotide
agcagcuagguccccaccu

SEQ ID NO: 1819673 - RNA, 19 nt, Artificial Sequence
  Description of Artificial Sequence: Synthetic oligonucleotide
uucaguguacacggcaagu

SEQ ID NO: 1819674 - RNA, 19 nt, Artificial Sequence
  Description of Artificial Sequence: Synthetic oligonucleotide
auagagguccggguauuuc

SEQ ID NO: 1819675 - RNA, 19 nt, Artificial Sequence
  Description of Artificial Sequence: Synthetic oligonucleotide
cugcccuggaagcagcuag

SEQ ID NO: 1819676 - RNA, 19 nt, Artificial Sequence
  Description of Artificial Sequence: Synthetic oligonucleotide
gcagacuugaacuguuccc

SEQ ID NO: 1819677 - RNA, 19 nt, Artificial Sequence
  Description of Artificial Sequence: Synthetic oligonucleotide
aggcuuuagcagcagcugu

SEQ ID NO: 1819678 - RNA, 19 nt, Artificial Sequence
  Description of Artificial Sequence: Synthetic oligonucleotide
acacagguguauacacacc

SEQ ID NO: 1819679 - RNA, 19 nt, Artificial Sequence
  Description of Artificial Sequence: Synthetic oligonucleotide
uagcggauacacaccuuca

SEQ ID NO: 1819680 - RNA, 19 nt, Artificial Sequence
  Description of Artificial Sequence: Synthetic oligonucleotide
gucuccauugggcaguauc

SEQ ID NO: 1819681 - RNA, 19 nt, Artificial Sequence
  Description of Artificial Sequence: Synthetic oligonucleotide
uuguuccggacgcucucag

SEQ ID NO: 1819682 - RNA, 19 nt, Artificial Sequence
  Description of Artificial Sequence: Synthetic oligonucleotide
aguaucaauccgugcuccu

SEQ ID NO: 1819683 - RNA, 19 nt, Artificial Sequence
  Description of Artificial Sequence: Synthetic oligonucleotide
gucugaucccuugauuucc

SEQ ID NO: 1819684 - RNA, 19 nt, Artificial Sequence
  Description of Artificial Sequence: Synthetic oligonucleotide
ucagcacgaccguagcgga

SEQ ID NO: 1819685 - RNA, 19 nt, Artificial Sequence
  Description of Artificial Sequence: Synthetic oligonucleotide
agcucugcacugcucggag

SEQ ID NO: 1819686 - RNA, 19 nt, Artificial Sequence
  Description of Artificial Sequence: Synthetic oligonucleotide
caggccucuuuucacuuag

SEQ ID NO: 1819687 - RNA, 19 nt, Artificial Sequence
  Description of Artificial Sequence: Synthetic oligonucleotide
acccuugaaggaguuuugg

SEQ ID NO: 1819688 - RNA, 19 nt, Artificial Sequence
  Description of Artificial Sequence: Synthetic oligonucleotide
accguagcggauacacacc

SEQ ID NO: 1819689 - RNA, 19 nt, Artificial Sequence
  Description of Artificial Sequence: Synthetic oligonucleotide
aggcagcagccccauguac

SEQ ID NO: 1819690 - RNA, 19 nt, Artificial Sequence
  Description of Artificial Sequence: Synthetic oligonucleotide
gauaagcuuuccugaguaa

SEQ ID NO: 1819691 - RNA, 19 nt, Artificial Sequence
  Description of Artificial Sequence: Synthetic oligonucleotide
uccggacgcucucagcucu

SEQ ID NO: 1819692 - RNA, 19 nt, Artificial Sequence
  Description of Artificial Sequence: Synthetic oligonucleotide
cauagggaucauugggguc

SEQ ID NO: 1819693 - RNA, 19 nt, Artificial Sequence
  Description of Artificial Sequence: Synthetic oligonucleotide
uccauugggcaguaucaau

SEQ ID NO: 1819694 - RNA, 19 nt, Artificial Sequence
  Description of Artificial Sequence: Synthetic oligonucleotide
ucacaggguccaaucuuac

SEQ ID NO: 1819695 - RNA, 19 nt, Artificial Sequence
  Description of Artificial Sequence: Synthetic oligonucleotide
caguaucaauccgugcucc

SEQ ID NO: 1819696 - RNA, 19 nt, Artificial Sequence
  Description of Artificial Sequence: Synthetic oligonucleotide
ucaguguacacggcaagua

SEQ ID NO: 1819697 - RNA, 19 nt, Artificial Sequence
  Description of Artificial Sequence: Synthetic oligonucleotide
auuacagugcacagaggga

SEQ ID NO: 1819698 - RNA, 19 nt, Artificial Sequence
  Description of Artificial Sequence: Synthetic oligonucleotide
guaggacaugguuguuccg

SEQ ID NO: 1819699 - RNA, 19 nt, Artificial Sequence
  Description of Artificial Sequence: Synthetic oligonucleotide
aguacguccagcaguggcu

SEQ ID NO: 1819700 - RNA, 19 nt, Artificial Sequence
  Description of Artificial Sequence: Synthetic oligonucleotide
augguuguuccggacgcuc

SEQ ID NO: 1819701 - RNA, 19 nt, Artificial Sequence
  Description of Artificial Sequence: Synthetic oligonucleotide
uacagugcacagagggaaa

SEQ ID NO: 1819702 - RNA, 19 nt, Artificial Sequence
  Description of Artificial Sequence: Synthetic oligonucleotide
guggcuuaacgcucaagga

SEQ ID NO: 1819703 - RNA, 19 nt, Artificial Sequence
  Description of Artificial Sequence: Synthetic oligonucleotide
gccucuuccaauaggaaug

SEQ ID NO: 1819704 - RNA, 19 nt, Artificial Sequence
  Description of Artificial Sequence: Synthetic oligonucleotide
cuugaaggaguuuuggcau

SEQ ID NO: 1819705 - RNA, 19 nt, Artificial Sequence
  Description of Artificial Sequence: Synthetic oligonucleotide
guacacggcaaguagccaa

SEQ ID NO: 1819706 - RNA, 19 nt, Artificial Sequence
  Description of Artificial Sequence: Synthetic oligonucleotide
gagguccggguauuucugc

SEQ ID NO: 1819707 - RNA, 19 nt, Artificial Sequence
  Description of Artificial Sequence: Synthetic oligonucleotide
cucagcacaguauuucaaa

SEQ ID NO: 1819708 - RNA, 19 nt, Artificial Sequence
  Description of Artificial Sequence: Synthetic oligonucleotide
gcaucuguagacaccuugg

SEQ ID NO: 1819709 - RNA, 19 nt, Artificial Sequence
  Description of Artificial Sequence: Synthetic oligonucleotide
uggggauagagguccgggu

SEQ ID NO: 1819710 - RNA, 19 nt, Artificial Sequence
  Description of Artificial Sequence: Synthetic oligonucleotide
uccgugcuccucauaggga

SEQ ID NO: 1819711 - RNA, 19 nt, Artificial Sequence
  Description of Artificial Sequence: Synthetic oligonucleotide
uccgauccuucccuuccug

SEQ ID NO: 1819712 - RNA, 19 nt, Artificial Sequence
  Description of Artificial Sequence: Synthetic oligonucleotide
cagagaguacguccagcag

SEQ ID NO: 1819713 - RNA, 19 nt, Artificial Sequence
  Description of Artificial Sequence: Synthetic oligonucleotide
aggacagguuuaugcagga

SEQ ID NO: 1819714 - RNA, 19 nt, Artificial Sequence
  Description of Artificial Sequence: Synthetic oligonucleotide
ccauugggcaguaucaauc

SEQ ID NO: 1819715 - RNA, 19 nt, Artificial Sequence
  Description of Artificial Sequence: Synthetic oligonucleotide
ccuugaaggaguuuuggca

SEQ ID NO: 1819716 - RNA, 19 nt, Artificial Sequence
  Description of Artificial Sequence: Synthetic oligonucleotide
ggaguuuuggcaucuacgu

SEQ ID NO: 1819717 - RNA, 19 nt, Artificial Sequence
  Description of Artificial Sequence: Synthetic oligonucleotide
cucaaguaucugaccauca

SEQ ID NO: 1819718 - RNA, 19 nt, Artificial Sequence
  Description of Artificial Sequence: Synthetic oligonucleotide
cuguaguggaagcaggaaa

SEQ ID NO: 1819719 - RNA, 19 nt, Artificial Sequence
  Description of Artificial Sequence: Synthetic oligonucleotide
gcaucuacguaauuuccca

SEQ ID NO: 1819720 - RNA, 19 nt, Artificial Sequence
  Description of Artificial Sequence: Synthetic oligonucleotide
ugggaggcacucagcacga

SEQ ID NO: 1819721 - RNA, 19 nt, Artificial Sequence
  Description of Artificial Sequence: Synthetic oligonucleotide
cguaauuucccaacuugag

SEQ ID NO: 1819722 - RNA, 19 nt, Artificial Sequence
  Description of Artificial Sequence: Synthetic oligonucleotide
aggguccaaucuuacccug

SEQ ID NO: 1819723 - RNA, 19 nt, Artificial Sequence
  Description of Artificial Sequence: Synthetic oligonucleotide
ccaaaaggcauugugcaug

SEQ ID NO: 1819724 - RNA, 19 nt, Artificial Sequence
  Description of Artificial Sequence: Synthetic oligonucleotide
aaggcagcagccccaugua

SEQ ID NO: 1819725 - RNA, 19 nt, Artificial Sequence
  Description of Artificial Sequence: Synthetic oligonucleotide
gcuucagaacagcaaaaca

SEQ ID NO: 1819726 - RNA, 19 nt, Artificial Sequence
  Description of Artificial Sequence: Synthetic oligonucleotide
uguuccggacgcucucagc

SEQ ID NO: 1819727 - RNA, 19 nt, Artificial Sequence
  Description of Artificial Sequence: Synthetic oligonucleotide
uagacaccuuggagucugg

SEQ ID NO: 1819728 - RNA, 19 nt, Artificial Sequence
  Description of Artificial Sequence: Synthetic oligonucleotide
cuucacgcagugaccuccc

SEQ ID NO: 1819729 - RNA, 19 nt, Artificial Sequence
  Description of Artificial Sequence: Synthetic oligonucleotide
caucuuggggauagagguc

SEQ ID NO: 1819730 - RNA, 19 nt, Artificial Sequence
  Description of Artificial Sequence: Synthetic oligonucleotide
gugguuuugccuccucuuc

SEQ ID NO: 1819731 - RNA, 19 nt, Artificial Sequence
  Description of Artificial Sequence: Synthetic oligonucleotide
acagucugaucccuugauu

SEQ ID NO: 1819732 - RNA, 19 nt, Artificial Sequence
  Description of Artificial Sequence: Synthetic oligonucleotide
uguacacggcaaguagcca

SEQ ID NO: 1819733 - RNA, 19 nt, Artificial Sequence
  Description of Artificial Sequence: Synthetic oligonucleotide
agaccccugaucauuaaaa

SEQ ID NO: 1819734 - RNA, 19 nt, Artificial Sequence
  Description of Artificial Sequence: Synthetic oligonucleotide
ugauccgauccuucccuuc

SEQ ID NO: 1819735 - RNA, 19 nt, Artificial Sequence
  Description of Artificial Sequence: Synthetic oligonucleotide
aggagggacugggagucac

SEQ ID NO: 1819736 - RNA, 19 nt, Artificial Sequence
  Description of Artificial Sequence: Synthetic oligonucleotide
uccuccucaucuuggggau

SEQ ID NO: 1819737 - RNA, 19 nt, Artificial Sequence
  Description of Artificial Sequence: Synthetic oligonucleotide
cagaggugaccaaaaggca

SEQ ID NO: 1819738 - RNA, 19 nt, Artificial Sequence
  Description of Artificial Sequence: Synthetic oligonucleotide
caccucaauaucaaagacu

SEQ ID NO: 1819739 - RNA, 19 nt, Artificial Sequence
  Description of Artificial Sequence: Synthetic oligonucleotide
cacugcucggaguuucaug

SEQ ID NO: 1819740 - RNA, 19 nt, Artificial Sequence
  Description of Artificial Sequence: Synthetic oligonucleotide
caaucuuacccugcaucug

SEQ ID NO: 1819741 - RNA, 19 nt, Artificial Sequence
  Description of Artificial Sequence: Synthetic oligonucleotide
acagagggaaagagcuuuc

SEQ ID NO: 1819742 - RNA, 19 nt, Artificial Sequence
  Description of Artificial Sequence: Synthetic oligonucleotide
ccccaccucaauaucaaag

SEQ ID NO: 1819743 - RNA, 19 nt, Artificial Sequence
  Description of Artificial Sequence: Synthetic oligonucleotide
acgcagugaccucccuucg

SEQ ID NO: 1819744 - RNA, 19 nt, Artificial Sequence
  Description of Artificial Sequence: Synthetic oligonucleotide
gaguuuuggcaucuacgua

SEQ ID NO: 1819745 - RNA, 19 nt, Artificial Sequence
  Description of Artificial Sequence: Synthetic oligonucleotide
ggcuuaacgcucaaggaca

SEQ ID NO: 1819746 - RNA, 19 nt, Artificial Sequence
  Description of Artificial Sequence: Synthetic oligonucleotide
uaacgcucaaggacagguu

SEQ ID NO: 1819747 - RNA, 19 nt, Artificial Sequence
  Description of Artificial Sequence: Synthetic oligonucleotide
cuuaacgcucaaggacagg

SEQ ID NO: 1819748 - RNA, 19 nt, Artificial Sequence
  Description of Artificial Sequence: Synthetic oligonucleotide
ccaacucaaguaucugacc

SEQ ID NO: 1819749 - RNA, 19 nt, Artificial Sequence
  Description of Artificial Sequence: Synthetic oligonucleotide
ugcacugcucggaguuuca

SEQ ID NO: 1819750 - RNA, 19 nt, Artificial Sequence
  Description of Artificial Sequence: Synthetic oligonucleotide
caucagccucuuccaauag

SEQ ID NO: 1819751 - RNA, 19 nt, Artificial Sequence
  Description of Artificial Sequence: Synthetic oligonucleotide
aagcaggaaaaggcagacu

SEQ ID NO: 1819752 - RNA, 19 nt, Artificial Sequence
  Description of Artificial Sequence: Synthetic oligonucleotide
augaagucccauggcaagu

SEQ ID NO: 1819753 - RNA, 19 nt, Artificial Sequence
  Description of Artificial Sequence: Synthetic oligonucleotide
auacacaccuucacgcagu

SEQ ID NO: 1819754 - RNA, 19 nt, Artificial Sequence
  Description of Artificial Sequence: Synthetic oligonucleotide
caguaggacaugguuguuc

SEQ ID NO: 1819755 - RNA, 19 nt, Artificial Sequence
  Description of Artificial Sequence: Synthetic oligonucleotide
accuucacgcagugaccuc

SEQ ID NO: 1819756 - RNA, 19 nt, Artificial Sequence
  Description of Artificial Sequence: Synthetic oligonucleotide
acagugggccccaaaccag

SEQ ID NO: 1819757 - RNA, 19 nt, Artificial Sequence
  Description of Artificial Sequence: Synthetic oligonucleotide
ggagucacaggguccaauc

SEQ ID NO: 1819758 - RNA, 19 nt, Artificial Sequence
  Description of Artificial Sequence: Synthetic oligonucleotide
cacggcaaguagccaagac

SEQ ID NO: 1819759 - RNA, 19 nt, Artificial Sequence
  Description of Artificial Sequence: Synthetic oligonucleotide
ggauacacaccuucacgca

SEQ ID NO: 1819760 - RNA, 19 nt, Artificial Sequence
  Description of Artificial Sequence: Synthetic oligonucleotide
uuggggucaucagccacca

SEQ ID NO: 1819761 - RNA, 19 nt, Artificial Sequence
  Description of Artificial Sequence: Synthetic oligonucleotide
aggugaccaaaaggcauug

SEQ ID NO: 1819762 - RNA, 19 nt, Artificial Sequence
  Description of Artificial Sequence: Synthetic oligonucleotide
cccuugaaggaguuuuggc

SEQ ID NO: 1819763 - RNA, 19 nt, Artificial Sequence
  Description of Artificial Sequence: Synthetic oligonucleotide
cuuugcuguaguggaagca

SEQ ID NO: 1819764 - RNA, 19 nt, Artificial Sequence
  Description of Artificial Sequence: Synthetic oligonucleotide
cauguacuccaacucaagu

SEQ ID NO: 1819765 - RNA, 19 nt, Artificial Sequence
  Description of Artificial Sequence: Synthetic oligonucleotide
agagguccggguauuucug

SEQ ID NO: 1819766 - RNA, 19 nt, Artificial Sequence
  Description of Artificial Sequence: Synthetic oligonucleotide
ggcuucagaacagcaaaac

SEQ ID NO: 1819767 - RNA, 19 nt, Artificial Sequence
  Description of Artificial Sequence: Synthetic oligonucleotide
ccaaaaggcuuucucacga

SEQ ID NO: 1819768 - RNA, 19 nt, Artificial Sequence
  Description of Artificial Sequence: Synthetic oligonucleotide
cagucugaucccuugauuu

SEQ ID NO: 1819769 - RNA, 19 nt, Artificial Sequence
  Description of Artificial Sequence: Synthetic oligonucleotide
caucuacguaauuucccaa

SEQ ID NO: 1819770 - RNA, 19 nt, Artificial Sequence
  Description of Artificial Sequence: Synthetic oligonucleotide
aucaauccgugcuccucau

SEQ ID NO: 1819771 - RNA, 19 nt, Artificial Sequence
  Description of Artificial Sequence: Synthetic oligonucleotide
aguacuucauucagacguu

SEQ ID NO: 1819772 - RNA, 19 nt, Artificial Sequence
  Description of Artificial Sequence: Synthetic oligonucleotide
gagucacaggguccaaucu

SEQ ID NO: 1819773 - RNA, 19 nt, Artificial Sequence
  Description of Artificial Sequence: Synthetic oligonucleotide
aguagccaagaccccugau

SEQ ID NO: 1819774 - RNA, 19 nt, Artificial Sequence
  Description of Artificial Sequence: Synthetic oligonucleotide
uuccccacaggggccacug

SEQ ID NO: 1819775 - RNA, 19 nt, Artificial Sequence
  Description of Artificial Sequence: Synthetic oligonucleotide
gaccccugaucauuaaaau

SEQ ID NO: 1819776 - RNA, 19 nt, Artificial Sequence
  Description of Artificial Sequence: Synthetic oligonucleotide
caugggcaauuccaguuaa

SEQ ID NO: 1819777 - RNA, 19 nt, Artificial Sequence
  Description of Artificial Sequence: Synthetic oligonucleotide
uucuuccaccugcuccggu

SEQ ID NO: 1819778 - RNA, 19 nt, Artificial Sequence
  Description of Artificial Sequence: Synthetic oligonucleotide
agcaguggcuuaacgcuca

SEQ ID NO: 1819779 - RNA, 19 nt, Artificial Sequence
  Description of Artificial Sequence: Synthetic oligonucleotide
cauugugcaugaaguccca

SEQ ID NO: 1819780 - RNA, 19 nt, Artificial Sequence
  Description of Artificial Sequence: Synthetic oligonucleotide
ucaauccgugcuccucaua

SEQ ID NO: 1819781 - RNA, 19 nt, Artificial Sequence
  Description of Artificial Sequence: Synthetic oligonucleotide
gguccaaucuuacccugca

SEQ ID NO: 1819782 - RNA, 19 nt, Artificial Sequence
  Description of Artificial Sequence: Synthetic oligonucleotide
agaguacguccagcagugg

SEQ ID NO: 1819783 - RNA, 19 nt, Artificial Sequence
  Description of Artificial Sequence: Synthetic oligonucleotide
auccgauccuucccuuccu

SEQ ID NO: 1819784 - RNA, 19 nt, Artificial Sequence
  Description of Artificial Sequence: Synthetic oligonucleotide
uuccggacgcucucagcuc

SEQ ID NO: 1819785 - RNA, 19 nt, Artificial Sequence
  Description of Artificial Sequence: Synthetic oligonucleotide
aggcagacuugaacuguuc

SEQ ID NO: 1819786 - RNA, 19 nt, Artificial Sequence
  Description of Artificial Sequence: Synthetic oligonucleotide
gcaggacacagguguauac

SEQ ID NO: 1819787 - RNA, 19 nt, Artificial Sequence
  Description of Artificial Sequence: Synthetic oligonucleotide
ggucacaaauaugauccga

SEQ ID NO: 1819788 - RNA, 19 nt, Artificial Sequence
  Description of Artificial Sequence: Synthetic oligonucleotide
guacuccaacucaaguauc

SEQ ID NO: 1819789 - RNA, 19 nt, Artificial Sequence
  Description of Artificial Sequence: Synthetic oligonucleotide
gcuuuccugaguaacaacu

SEQ ID NO: 1819790 - RNA, 19 nt, Artificial Sequence
  Description of Artificial Sequence: Synthetic oligonucleotide
gcuuaacgcucaaggacag

SEQ ID NO: 1819791 - RNA, 19 nt, Artificial Sequence
  Description of Artificial Sequence: Synthetic oligonucleotide
cuccggugguuuugccucc

SEQ ID NO: 1819792 - RNA, 19 nt, Artificial Sequence
  Description of Artificial Sequence: Synthetic oligonucleotide
ccaauaggaauggacccac

SEQ ID NO: 1819793 - RNA, 19 nt, Artificial Sequence
  Description of Artificial Sequence: Synthetic oligonucleotide
cugaucccuugauuuccuc

SEQ ID NO: 1819794 - RNA, 19 nt, Artificial Sequence
  Description of Artificial Sequence: Synthetic oligonucleotide
cuagguccccaccucaaua

SEQ ID NO: 1819795 - RNA, 19 nt, Artificial Sequence
  Description of Artificial Sequence: Synthetic oligonucleotide
ggagcuugaccccugcucu

SEQ ID NO: 1819796 - RNA, 19 nt, Artificial Sequence
  Description of Artificial Sequence: Synthetic oligonucleotide
gagcuuucacagaggugac

SEQ ID NO: 1819797 - RNA, 19 nt, Artificial Sequence
  Description of Artificial Sequence: Synthetic oligonucleotide
agcacgaccguagcggaua

SEQ ID NO: 1819798 - RNA, 19 nt, Artificial Sequence
  Description of Artificial Sequence: Synthetic oligonucleotide
augauccgauccuucccuu

SEQ ID NO: 1819799 - RNA, 19 nt, Artificial Sequence
  Description of Artificial Sequence: Synthetic oligonucleotide
aucuaccaaaaggcuuucu

SEQ ID NO: 1819800 - RNA, 19 nt, Artificial Sequence
  Description of Artificial Sequence: Synthetic oligonucleotide
acuggucuauacagucuga

SEQ ID NO: 1819801 - RNA, 19 nt, Artificial Sequence
  Description of Artificial Sequence: Synthetic oligonucleotide
ggaauggacccacccuuga

SEQ ID NO: 1819802 - RNA, 19 nt, Artificial Sequence
  Description of Artificial Sequence: Synthetic oligonucleotide
aggcacucagcacgaccgu

SEQ ID NO: 1819803 - RNA, 19 nt, Artificial Sequence
  Description of Artificial Sequence: Synthetic oligonucleotide
guaacaacuuuugguugcu

SEQ ID NO: 1819804 - RNA, 19 nt, Artificial Sequence
  Description of Artificial Sequence: Synthetic oligonucleotide
agccaagaccccugaucau

SEQ ID NO: 1819805 - RNA, 19 nt, Artificial Sequence
  Description of Artificial Sequence: Synthetic oligonucleotide
ggcaaucagagaguacguc

SEQ ID NO: 1819806 - RNA, 19 nt, Artificial Sequence
  Description of Artificial Sequence: Synthetic oligonucleotide
ggacaugguuguuccggac

SEQ ID NO: 1819807 - RNA, 19 nt, Artificial Sequence
  Description of Artificial Sequence: Synthetic oligonucleotide
ggacgcucucagcucuggg

SEQ ID NO: 1819808 - RNA, 19 nt, Artificial Sequence
  Description of Artificial Sequence: Synthetic oligonucleotide
ccccuuuucuucaguguac

SEQ ID NO: 1819809 - RNA, 19 nt, Artificial Sequence
  Description of Artificial Sequence: Synthetic oligonucleotide
ggggauagagguccgggua

SEQ ID NO: 1819810 - RNA, 19 nt, Artificial Sequence
  Description of Artificial Sequence: Synthetic oligonucleotide
caggguccaaucuuacccu

SEQ ID NO: 1819811 - RNA, 19 nt, Artificial Sequence
  Description of Artificial Sequence: Synthetic oligonucleotide
cagagggaaagagcuuuca

SEQ ID NO: 1819812 - RNA, 19 nt, Artificial Sequence
  Description of Artificial Sequence: Synthetic oligonucleotide
cccugcaucuguagacacc

SEQ ID NO: 1819813 - RNA, 19 nt, Artificial Sequence
  Description of Artificial Sequence: Synthetic oligonucleotide
aggccucuuuucacuuagg

SEQ ID NO: 1819814 - RNA, 19 nt, Artificial Sequence
  Description of Artificial Sequence: Synthetic oligonucleotide
ccgauccuucccuuccugc

SEQ ID NO: 1819815 - RNA, 19 nt, Artificial Sequence
  Description of Artificial Sequence: Synthetic oligonucleotide
gagugaacagugggcccca

SEQ ID NO: 1819816 - RNA, 19 nt, Artificial Sequence
  Description of Artificial Sequence: Synthetic oligonucleotide
acguccagcaguggcuuaa

SEQ ID NO: 1819817 - RNA, 19 nt, Artificial Sequence
  Description of Artificial Sequence: Synthetic oligonucleotide
caguggcuuaacgcucaag

SEQ ID NO: 1819818 - RNA, 19 nt, Artificial Sequence
  Description of Artificial Sequence: Synthetic oligonucleotide
cagcuagguccccaccuca

SEQ ID NO: 1819819 - RNA, 19 nt, Artificial Sequence
  Description of Artificial Sequence: Synthetic oligonucleotide
cuacguaauuucccaacuu

SEQ ID NO: 1819820 - RNA, 19 nt, Artificial Sequence
  Description of Artificial Sequence: Synthetic oligonucleotide
gcaugcauuccugcauggc

SEQ ID NO: 1819821 - RNA, 19 nt, Artificial Sequence
  Description of Artificial Sequence: Synthetic oligonucleotide
ggguccaaucuuacccugc

SEQ ID NO: 1819822 - RNA, 19 nt, Artificial Sequence
  Description of Artificial Sequence: Synthetic oligonucleotide
cuccauugggcaguaucaa

SEQ ID NO: 1819823 - RNA, 19 nt, Artificial Sequence
  Description of Artificial Sequence: Synthetic oligonucleotide
uaggagggacugggaguca

SEQ ID NO: 1819824 - RNA, 19 nt, Artificial Sequence
  Description of Artificial Sequence: Synthetic oligonucleotide
uagggaucauuggggucau

SEQ ID NO: 1819825 - RNA, 19 nt, Artificial Sequence
  Description of Artificial Sequence: Synthetic oligonucleotide
caagaccccugaucauuaa

SEQ ID NO: 1819826 - RNA, 19 nt, Artificial Sequence
  Description of Artificial Sequence: Synthetic oligonucleotide
cagccucuuccaauaggaa

SEQ ID NO: 1819827 - RNA, 19 nt, Artificial Sequence
  Description of Artificial Sequence: Synthetic oligonucleotide
acacggcaaguagccaaga

SEQ ID NO: 1819828 - RNA, 19 nt, Artificial Sequence
  Description of Artificial Sequence: Synthetic oligonucleotide
cagguuuaugcaggacaca

SEQ ID NO: 1819829 - RNA, 19 nt, Artificial Sequence
  Description of Artificial Sequence: Synthetic oligonucleotide
cagugcacagagggaaaga

SEQ ID NO: 1819830 - RNA, 19 nt, Artificial Sequence
  Description of Artificial Sequence: Synthetic oligonucleotide
uccucaucuuggggauaga

SEQ ID NO: 1819831 - RNA, 19 nt, Artificial Sequence
  Description of Artificial Sequence: Synthetic oligonucleotide
acgcucaaggacagguuua

SEQ ID NO: 1819832 - RNA, 19 nt, Artificial Sequence
  Description of Artificial Sequence: Synthetic oligonucleotide
caaaaggcuuucucacgau

SEQ ID NO: 1819833 - RNA, 19 nt, Artificial Sequence
  Description of Artificial Sequence: Synthetic oligonucleotide
cagccccauguacuccaac

SEQ ID NO: 1819834 - RNA, 19 nt, Artificial Sequence
  Description of Artificial Sequence: Synthetic oligonucleotide
cgauaagcuuuccugagua

SEQ ID NO: 1819835 - RNA, 19 nt, Artificial Sequence
  Description of Artificial Sequence: Synthetic oligonucleotide
augggcaauuccaguuaau

SEQ ID NO: 1819836 - RNA, 19 nt, Artificial Sequence
  Description of Artificial Sequence: Synthetic oligonucleotide
aucuuacccugcaucugua

SEQ ID NO: 1819837 - RNA, 19 nt, Artificial Sequence
  Description of Artificial Sequence: Synthetic oligonucleotide
caugggugccaggcccaag

SEQ ID NO: 1819838 - RNA, 19 nt, Artificial Sequence
  Description of Artificial Sequence: Synthetic oligonucleotide
uggcccggaacuggucuau

SEQ ID NO: 1819839 - RNA, 19 nt, Artificial Sequence
  Description of Artificial Sequence: Synthetic oligonucleotide
gauagagguccggguauuu

SEQ ID NO: 1819840 - RNA, 19 nt, Artificial Sequence
  Description of Artificial Sequence: Synthetic oligonucleotide
cuguuccccacaggggcca

SEQ ID NO: 1819841 - RNA, 19 nt, Artificial Sequence
  Description of Artificial Sequence: Synthetic oligonucleotide
cuucaggagcuugaccccu

SEQ ID NO: 1819842 - RNA, 19 nt, Artificial Sequence
  Description of Artificial Sequence: Synthetic oligonucleotide
gcucaaggacagguuuaug

SEQ ID NO: 1819843 - RNA, 19 nt, Artificial Sequence
  Description of Artificial Sequence: Synthetic oligonucleotide
agggaucauuggggucauc

SEQ ID NO: 1819844 - RNA, 19 nt, Artificial Sequence
  Description of Artificial Sequence: Synthetic oligonucleotide
cccuggaagcagcuagguc

SEQ ID NO: 1819845 - RNA, 19 nt, Artificial Sequence
  Description of Artificial Sequence: Synthetic oligonucleotide
guccaaucuuacccugcau

SEQ ID NO: 1819846 - RNA, 19 nt, Artificial Sequence
  Description of Artificial Sequence: Synthetic oligonucleotide
guacuucauucagacguuu

SEQ ID NO: 1819847 - RNA, 19 nt, Artificial Sequence
  Description of Artificial Sequence: Synthetic oligonucleotide
gcauuccugcauggcccgg

SEQ ID NO: 1819848 - RNA, 19 nt, Artificial Sequence
  Description of Artificial Sequence: Synthetic oligonucleotide
gagcuugaccccugcucuu

SEQ ID NO: 1819849 - RNA, 19 nt, Artificial Sequence
  Description of Artificial Sequence: Synthetic oligonucleotide
cgcagugaccucccuucgc

SEQ ID NO: 1819850 - RNA, 19 nt, Artificial Sequence
  Description of Artificial Sequence: Synthetic oligonucleotide
agugaacagugggccccaa

SEQ ID NO: 1819851 - RNA, 19 nt, Artificial Sequence
  Description of Artificial Sequence: Synthetic oligonucleotide
guacguccagcaguggcuu

SEQ ID NO: 1819852 - RNA, 19 nt, Artificial Sequence
  Description of Artificial Sequence: Synthetic oligonucleotide
gguccggguauuucugcau

SEQ ID NO: 1819853 - RNA, 19 nt, Artificial Sequence
  Description of Artificial Sequence: Synthetic oligonucleotide
cgugcuccucauagggauc

SEQ ID NO: 1819854 - RNA, 19 nt, Artificial Sequence
  Description of Artificial Sequence: Synthetic oligonucleotide
ccguagcggauacacaccu

SEQ ID NO: 1819855 - RNA, 19 nt, Artificial Sequence
  Description of Artificial Sequence: Synthetic oligonucleotide
caugguuguuccggacgcu

SEQ ID NO: 1819856 - RNA, 19 nt, Artificial Sequence
  Description of Artificial Sequence: Synthetic oligonucleotide
gggcaaucagagaguacgu

SEQ ID NO: 1819857 - RNA, 19 nt, Artificial Sequence
  Description of Artificial Sequence: Synthetic oligonucleotide
ccgugcuccucauagggau

SEQ ID NO: 1819858 - RNA, 19 nt, Artificial Sequence
  Description of Artificial Sequence: Synthetic oligonucleotide
ccggguauuucugcaugca

SEQ ID NO: 1819859 - RNA, 19 nt, Artificial Sequence
  Description of Artificial Sequence: Synthetic oligonucleotide
caggggccacuggccauuc

SEQ ID NO: 1819860 - RNA, 19 nt, Artificial Sequence
  Description of Artificial Sequence: Synthetic oligonucleotide
gcuagguccccaccucaau

SEQ ID NO: 1819861 - RNA, 19 nt, Artificial Sequence
  Description of Artificial Sequence: Synthetic oligonucleotide
acccacccuugaaggaguu

SEQ ID NO: 1819862 - RNA, 19 nt, Artificial Sequence
  Description of Artificial Sequence: Synthetic oligonucleotide
cacgaccguagcggauaca

SEQ ID NO: 1819863 - RNA, 19 nt, Artificial Sequence
  Description of Artificial Sequence: Synthetic oligonucleotide
cacaggggccacuggccau

SEQ ID NO: 1819864 - RNA, 19 nt, Artificial Sequence
  Description of Artificial Sequence: Synthetic oligonucleotide
gcaguggcuuaacgcucaa

SEQ ID NO: 1819865 - RNA, 19 nt, Artificial Sequence
  Description of Artificial Sequence: Synthetic oligonucleotide
cagcucugggaggcacuca

SEQ ID NO: 1819866 - RNA, 19 nt, Artificial Sequence
  Description of Artificial Sequence: Synthetic oligonucleotide
ggcaaguggcagccagggu

SEQ ID NO: 1819867 - RNA, 19 nt, Artificial Sequence
  Description of Artificial Sequence: Synthetic oligonucleotide
ccggacgcucucagcucug

SEQ ID NO: 1819868 - RNA, 19 nt, Artificial Sequence
  Description of Artificial Sequence: Synthetic oligonucleotide
ggauagagguccggguauu

SEQ ID NO: 1819869 - RNA, 19 nt, Artificial Sequence
  Description of Artificial Sequence: Synthetic oligonucleotide
ggacugggagucacagggu

SEQ ID NO: 1819870 - RNA, 19 nt, Artificial Sequence
  Description of Artificial Sequence: Synthetic oligonucleotide
cgaccguagcggauacaca

SEQ ID NO: 1819871 - RNA, 19 nt, Artificial Sequence
  Description of Artificial Sequence: Synthetic oligonucleotide
cagcacgaccguagcggau

SEQ ID NO: 1819872 - RNA, 19 nt, Artificial Sequence
  Description of Artificial Sequence: Synthetic oligonucleotide
gggaggcacucagcacgac

SEQ ID NO: 1819873 - RNA, 19 nt, Artificial Sequence
  Description of Artificial Sequence: Synthetic oligonucleotide
ccggugguuuugccuccuc

SEQ ID NO: 1819874 - RNA, 19 nt, Artificial Sequence
  Description of Artificial Sequence: Synthetic oligonucleotide
gcccuggaagcagcuaggu

SEQ ID NO: 1819875 - RNA, 19 nt, Artificial Sequence
  Description of Artificial Sequence: Synthetic oligonucleotide
cggguauuucugcaugcau

SEQ ID NO: 1819876 - RNA, 19 nt, Artificial Sequence
  Description of Artificial Sequence: Synthetic oligonucleotide
caccugcuccggugguuuu

SEQ ID NO: 1819877 - RNA, 19 nt, Artificial Sequence
  Description of Artificial Sequence: Synthetic oligonucleotide
ggcccggaacuggucuaua

SEQ ID NO: 1819878 - RNA, 19 nt, Artificial Sequence
  Description of Artificial Sequence: Synthetic oligonucleotide
gcaguaggacaugguuguu

SEQ ID NO: 1819879 - RNA, 19 nt, Artificial Sequence
  Description of Artificial Sequence: Synthetic oligonucleotide
cgcucaaggacagguuuau

SEQ ID NO: 1819880 - RNA, 19 nt, Artificial Sequence
  Description of Artificial Sequence: Synthetic oligonucleotide
ccuccucaucuuggggaua

SEQ ID NO: 1819881 - RNA, 19 nt, Artificial Sequence
  Description of Artificial Sequence: Synthetic oligonucleotide
cguagcggauacacaccuu

SEQ ID NO: 1819882 - RNA, 19 nt, Artificial Sequence
  Description of Artificial Sequence: Synthetic oligonucleotide
aacaauauaaguuaaccag

SEQ ID NO: 1819883 - RNA, 19 nt, Artificial Sequence
  Description of Artificial Sequence: Synthetic oligonucleotide
aaugugaggacccucaagc

SEQ ID NO: 1819884 - RNA, 19 nt, Artificial Sequence
  Description of Artificial Sequence: Synthetic oligonucleotide
uaagagacaugacagacgg

SEQ ID NO: 1819885 - RNA, 19 nt, Artificial Sequence
  Description of Artificial Sequence: Synthetic oligonucleotide
auaacaauauaaguuaacc

SEQ ID NO: 1819886 - RNA, 19 nt, Artificial Sequence
  Description of Artificial Sequence: Synthetic oligonucleotide
uauaaguuaaccaggcucc

SEQ ID NO: 1819887 - RNA, 19 nt, Artificial Sequence
  Description of Artificial Sequence: Synthetic oligonucleotide
agcacuaaauucuggaugc

SEQ ID NO: 1819888 - RNA, 19 nt, Artificial Sequence
  Description of Artificial Sequence: Synthetic oligonucleotide
gauagggacacacagcugg

SEQ ID NO: 1819889 - RNA, 19 nt, Artificial Sequence
  Description of Artificial Sequence: Synthetic oligonucleotide
cauaucuucauaaugugag

SEQ ID NO: 1819890 - RNA, 19 nt, Artificial Sequence
  Description of Artificial Sequence: Synthetic oligonucleotide
ucagguuuagaauggaagg

SEQ ID NO: 1819891 - RNA, 19 nt, Artificial Sequence
  Description of Artificial Sequence: Synthetic oligonucleotide
aauagaggucacuuucccc

SEQ ID NO: 1819892 - RNA, 19 nt, Artificial Sequence
  Description of Artificial Sequence: Synthetic oligonucleotide
uaacuuaagagacaugaca

SEQ ID NO: 1819893 - RNA, 19 nt, Artificial Sequence
  Description of Artificial Sequence: Synthetic oligonucleotide
ucugcuaugacaauacccu

SEQ ID NO: 1819894 - RNA, 19 nt, Artificial Sequence
  Description of Artificial Sequence: Synthetic oligonucleotide
uguuucaagcagaaggagg

SEQ ID NO: 1819895 - RNA, 19 nt, Artificial Sequence
  Description of Artificial Sequence: Synthetic oligonucleotide
augucuaucugucaugugg

SEQ ID NO: 1819896 - RNA, 19 nt, Artificial Sequence
  Description of Artificial Sequence: Synthetic oligonucleotide
ucacaauaacuuaagagac

SEQ ID NO: 1819897 - RNA, 19 nt, Artificial Sequence
  Description of Artificial Sequence: Synthetic oligonucleotide
aacuuaagagacaugacag

SEQ ID NO: 1819898 - RNA, 19 nt, Artificial Sequence
  Description of Artificial Sequence: Synthetic oligonucleotide
aacacagcccaucagaagu

SEQ ID NO: 1819899 - RNA, 19 nt, Artificial Sequence
  Description of Artificial Sequence: Synthetic oligonucleotide
  modified_base (14)..(14): a, c, u, g, unknown or other
ugcgcuguaaaggngaggg

SEQ ID NO: 1819900 - RNA, 19 nt, Artificial Sequence
  Description of Artificial Sequence: Synthetic oligonucleotide
uuggcuccagaauagaggg

SEQ ID NO: 1819901 - RNA, 19 nt, Artificial Sequence
  Description of Artificial Sequence: Synthetic oligonucleotide
auaugauagggacacacag

SEQ ID NO: 1819902 - RNA, 19 nt, Artificial Sequence
  Description of Artificial Sequence: Synthetic oligonucleotide
aauacccucauguagggaa

SEQ ID NO: 1819903 - RNA, 19 nt, Artificial Sequence
  Description of Artificial Sequence: Synthetic oligonucleotide
ugacaauacccucauguag

SEQ ID NO: 1819904 - RNA, 19 nt, Artificial Sequence
  Description of Artificial Sequence: Synthetic oligonucleotide
gacaauacccucauguagg

SEQ ID NO: 1819905 - RNA, 19 nt, Artificial Sequence
  Description of Artificial Sequence: Synthetic oligonucleotide
uagaauggaaggacgaacc

SEQ ID NO: 1819906 - RNA, 19 nt, Artificial Sequence
  Description of Artificial Sequence: Synthetic oligonucleotide
ugugcuaucagaccuggca

SEQ ID NO: 1819907 - RNA, 19 nt, Artificial Sequence
  Description of Artificial Sequence: Synthetic oligonucleotide
agaagguucagucuccauc

SEQ ID NO: 1819908 - RNA, 19 nt, Artificial Sequence
  Description of Artificial Sequence: Synthetic oligonucleotide
aucuggaaaauccugagga

SEQ ID NO: 1819909 - RNA, 19 nt, Artificial Sequence
  Description of Artificial Sequence: Synthetic oligonucleotide
ucccauaucuucauaaugu

SEQ ID NO: 1819910 - RNA, 19 nt, Artificial Sequence
  Description of Artificial Sequence: Synthetic oligonucleotide
ugaagggcuaggaagagga

SEQ ID NO: 1819911 - RNA, 19 nt, Artificial Sequence
  Description of Artificial Sequence: Synthetic oligonucleotide
aggaaagaggcuaucaagc

SEQ ID NO: 1819912 - RNA, 19 nt, Artificial Sequence
  Description of Artificial Sequence: Synthetic oligonucleotide
uauaacaauauaaguuaac

SEQ ID NO: 1819913 - RNA, 19 nt, Artificial Sequence
  Description of Artificial Sequence: Synthetic oligonucleotide
uggacuucugcuaugacaa

SEQ ID NO: 1819914 - RNA, 19 nt, Artificial Sequence
  Description of Artificial Sequence: Synthetic oligonucleotide
acaauauaaguuaaccagg

SEQ ID NO: 1819915 - RNA, 19 nt, Artificial Sequence
  Description of Artificial Sequence: Synthetic oligonucleotide
agaauggaaggacgaaccc

SEQ ID NO: 1819916 - RNA, 19 nt, Artificial Sequence
  Description of Artificial Sequence: Synthetic oligonucleotide
aauauaaguuaaccaggcu

SEQ ID NO: 1819917 - RNA, 19 nt, Artificial Sequence
  Description of Artificial Sequence: Synthetic oligonucleotide
aaguuaaccaggcuccuca

SEQ ID NO: 1819918 - RNA, 19 nt, Artificial Sequence
  Description of Artificial Sequence: Synthetic oligonucleotide
aauuccuuaccucugccau

SEQ ID NO: 1819919 - RNA, 19 nt, Artificial Sequence
  Description of Artificial Sequence: Synthetic oligonucleotide
gaacccaaggcacuggaag

SEQ ID NO: 1819920 - RNA, 19 nt, Artificial Sequence
  Description of Artificial Sequence: Synthetic oligonucleotide
auaucuucauaaugugagg

SEQ ID NO: 1819921 - RNA, 19 nt, Artificial Sequence
  Description of Artificial Sequence: Synthetic oligonucleotide
ucuucauaaugugaggacc

SEQ ID NO: 1819922 - RNA, 19 nt, Artificial Sequence
  Description of Artificial Sequence: Synthetic oligonucleotide
aguagggcacuucaaggac

SEQ ID NO: 1819923 - RNA, 19 nt, Artificial Sequence
  Description of Artificial Sequence: Synthetic oligonucleotide
ugucaugugggucaacugu

SEQ ID NO: 1819924 - RNA, 19 nt, Artificial Sequence
  Description of Artificial Sequence: Synthetic oligonucleotide
acucagauugcucuauguc

SEQ ID NO: 1819925 - RNA, 19 nt, Artificial Sequence
  Description of Artificial Sequence: Synthetic oligonucleotide
agacaugacagacggggac

SEQ ID NO: 1819926 - RNA, 19 nt, Artificial Sequence
  Description of Artificial Sequence: Synthetic oligonucleotide
gagcacuaaauucuggaug

SEQ ID NO: 1819927 - RNA, 19 nt, Artificial Sequence
  Description of Artificial Sequence: Synthetic oligonucleotide
cuuaagagacaugacagac

SEQ ID NO: 1819928 - RNA, 19 nt, Artificial Sequence
  Description of Artificial Sequence: Synthetic oligonucleotide
cauugggacagccaguacc

SEQ ID NO: 1819929 - RNA, 19 nt, Artificial Sequence
  Description of Artificial Sequence: Synthetic oligonucleotide
uaggucacaauaacuuaag

SEQ ID NO: 1819930 - RNA, 19 nt, Artificial Sequence
  Description of Artificial Sequence: Synthetic oligonucleotide
caaauagaggucacuuucc

SEQ ID NO: 1819931 - RNA, 19 nt, Artificial Sequence
  Description of Artificial Sequence: Synthetic oligonucleotide
ucugccaugcgcuguaaag

SEQ ID NO: 1819932 - RNA, 19 nt, Artificial Sequence
  Description of Artificial Sequence: Synthetic oligonucleotide
uagagcacuaaauucugga

SEQ ID NO: 1819933 - RNA, 19 nt, Artificial Sequence
  Description of Artificial Sequence: Synthetic oligonucleotide
  modified_base (2)..(2): a, c, u, g, unknown or other
gngagggagggauaggccc

SEQ ID NO: 1819934 - RNA, 19 nt, Artificial Sequence
  Description of Artificial Sequence: Synthetic oligonucleotide
auugggacagccaguaccc

SEQ ID NO: 1819935 - RNA, 19 nt, Artificial Sequence
  Description of Artificial Sequence: Synthetic oligonucleotide
agaccuggcaauuccuuac

SEQ ID NO: 1819936 - RNA, 19 nt, Artificial Sequence
  Description of Artificial Sequence: Synthetic oligonucleotide
ucaagcagaugucugugga

SEQ ID NO: 1819937 - RNA, 19 nt, Artificial Sequence
  Description of Artificial Sequence: Synthetic oligonucleotide
gaaaauccugaggaaagag

SEQ ID NO: 1819938 - RNA, 19 nt, Artificial Sequence
  Description of Artificial Sequence: Synthetic oligonucleotide
gaauagagggauuuguaaa

SEQ ID NO: 1819939 - RNA, 19 nt, Artificial Sequence
  Description of Artificial Sequence: Synthetic oligonucleotide
agaauagagggauuuguaa

SEQ ID NO: 1819940 - RNA, 19 nt, Artificial Sequence
  Description of Artificial Sequence: Synthetic oligonucleotide
auuggggccaagugcuucc

SEQ ID NO: 1819941 - RNA, 19 nt, Artificial Sequence
  Description of Artificial Sequence: Synthetic oligonucleotide
uaaccaggcuccucaaagg

SEQ ID NO: 1819942 - RNA, 19 nt, Artificial Sequence
  Description of Artificial Sequence: Synthetic oligonucleotide
  modified_base (4)..(4): a, c, u, g, unknown or other
aggngagggagggauaggc

SEQ ID NO: 1819943 - RNA, 19 nt, Artificial Sequence
  Description of Artificial Sequence: Synthetic oligonucleotide
ugugggucaacuguccccg

SEQ ID NO: 1819944 - RNA, 19 nt, Artificial Sequence
  Description of Artificial Sequence: Synthetic oligonucleotide
acaauaacuuaagagacau

SEQ ID NO: 1819945 - RNA, 19 nt, Artificial Sequence
  Description of Artificial Sequence: Synthetic oligonucleotide
augugggucaacugucccc

SEQ ID NO: 1819946 - RNA, 19 nt, Artificial Sequence
  Description of Artificial Sequence: Synthetic oligonucleotide
uuuguaaacugggagugga

SEQ ID NO: 1819947 - RNA, 19 nt, Artificial Sequence
  Description of Artificial Sequence: Synthetic oligonucleotide
acauccugauaugauaggg

SEQ ID NO: 1819948 - RNA, 19 nt, Artificial Sequence
  Description of Artificial Sequence: Synthetic oligonucleotide
  modified_base (10)..(10): a, c, u, g, unknown or other
cuguaaaggngagggaggg

SEQ ID NO: 1819949 - RNA, 19 nt, Artificial Sequence
  Description of Artificial Sequence: Synthetic oligonucleotide
ucagauugcucuaugucua

SEQ ID NO: 1819950 - RNA, 19 nt, Artificial Sequence
  Description of Artificial Sequence: Synthetic oligonucleotide
guaaacugggaguggaggc

SEQ ID NO: 1819951 - RNA, 19 nt, Artificial Sequence
  Description of Artificial Sequence: Synthetic oligonucleotide
uuagaauggaaggacgaac

SEQ ID NO: 1819952 - RNA, 19 nt, Artificial Sequence
  Description of Artificial Sequence: Synthetic oligonucleotide
augucuguggacaguaggc

SEQ ID NO: 1819953 - RNA, 19 nt, Artificial Sequence
  Description of Artificial Sequence: Synthetic oligonucleotide
agguucagucuccaucacc

SEQ ID NO: 1819954 - RNA, 19 nt, Artificial Sequence
  Description of Artificial Sequence: Synthetic oligonucleotide
agcaacacagcccaucaga

SEQ ID NO: 1819955 - RNA, 19 nt, Artificial Sequence
  Description of Artificial Sequence: Synthetic oligonucleotide
uuggggaucagguuggcuc

SEQ ID NO: 1819956 - RNA, 19 nt, Artificial Sequence
  Description of Artificial Sequence: Synthetic oligonucleotide
uugguagccacauuccggu

SEQ ID NO: 1819957 - RNA, 19 nt, Artificial Sequence
  Description of Artificial Sequence: Synthetic oligonucleotide
gugcgaauugccucggugg

SEQ ID NO: 1819958 - RNA, 19 nt, Artificial Sequence
  Description of Artificial Sequence: Synthetic oligonucleotide
cagcccaucagaaguaggg

SEQ ID NO: 1819959 - RNA, 19 nt, Artificial Sequence
  Description of Artificial Sequence: Synthetic oligonucleotide
gauagagcacuaaauucug

SEQ ID NO: 1819960 - RNA, 19 nt, Artificial Sequence
  Description of Artificial Sequence: Synthetic oligonucleotide
aacccaaggcacuggaaga

SEQ ID NO: 1819961 - RNA, 19 nt, Artificial Sequence
  Description of Artificial Sequence: Synthetic oligonucleotide
aauggaaggacgaacccaa

SEQ ID NO: 1819962 - RNA, 19 nt, Artificial Sequence
  Description of Artificial Sequence: Synthetic oligonucleotide
aggcuaucaagccucccac

SEQ ID NO: 1819963 - RNA, 19 nt, Artificial Sequence
  Description of Artificial Sequence: Synthetic oligonucleotide
acuuaagagacaugacaga

SEQ ID NO: 1819964 - RNA, 19 nt, Artificial Sequence
  Description of Artificial Sequence: Synthetic oligonucleotide
cuaucugucauguggguca

SEQ ID NO: 1819965 - RNA, 19 nt, Artificial Sequence
  Description of Artificial Sequence: Synthetic oligonucleotide
gacaugacagacggggacg

SEQ ID NO: 1819966 - RNA, 19 nt, Artificial Sequence
  Description of Artificial Sequence: Synthetic oligonucleotide
aacgucuaggccaccuggc

SEQ ID NO: 1819967 - RNA, 19 nt, Artificial Sequence
  Description of Artificial Sequence: Synthetic oligonucleotide
uccccgacucuccugaacc

SEQ ID NO: 1819968 - RNA, 19 nt, Artificial Sequence
  Description of Artificial Sequence: Synthetic oligonucleotide
guuucaagcagaaggagga

SEQ ID NO: 1819969 - RNA, 19 nt, Artificial Sequence
  Description of Artificial Sequence: Synthetic oligonucleotide
uuguaaacugggaguggag

SEQ ID NO: 1819970 - RNA, 19 nt, Artificial Sequence
  Description of Artificial Sequence: Synthetic oligonucleotide
ucugcggcugacugaaugc

SEQ ID NO: 1819971 - RNA, 19 nt, Artificial Sequence
  Description of Artificial Sequence: Synthetic oligonucleotide
aaauacucagauugcucua

SEQ ID NO: 1819972 - RNA, 19 nt, Artificial Sequence
  Description of Artificial Sequence: Synthetic oligonucleotide
ugcgaauugccucgguggc

SEQ ID NO: 1819973 - RNA, 19 nt, Artificial Sequence
  Description of Artificial Sequence: Synthetic oligonucleotide
cucuuauguccccaucugg

SEQ ID NO: 1819974 - RNA, 19 nt, Artificial Sequence
  Description of Artificial Sequence: Synthetic oligonucleotide
uuauguccccaucuggaaa

SEQ ID NO: 1819975 - RNA, 19 nt, Artificial Sequence
  Description of Artificial Sequence: Synthetic oligonucleotide
uccagcuuuuauuggggcc

SEQ ID NO: 1819976 - RNA, 19 nt, Artificial Sequence
  Description of Artificial Sequence: Synthetic oligonucleotide
agcucuuauguccccaucu

SEQ ID NO: 1819977 - RNA, 19 nt, Artificial Sequence
  Description of Artificial Sequence: Synthetic oligonucleotide
  modified_base (19)..(19): a, c, u, g, unknown or other
ugccaugcgcuguaaaggn

SEQ ID NO: 1819978 - RNA, 19 nt, Artificial Sequence
  Description of Artificial Sequence: Synthetic oligonucleotide
aauacucagauugcucuau

SEQ ID NO: 1819979 - RNA, 19 nt, Artificial Sequence
  Description of Artificial Sequence: Synthetic oligonucleotide
uuccuuaccucugccaugc

SEQ ID NO: 1819980 - RNA, 19 nt, Artificial Sequence
  Description of Artificial Sequence: Synthetic oligonucleotide
acggggacgcuauauaaca

SEQ ID NO: 1819981 - RNA, 19 nt, Artificial Sequence
  Description of Artificial Sequence: Synthetic oligonucleotide
gacgcuauauaacaauaua

SEQ ID NO: 1819982 - RNA, 19 nt, Artificial Sequence
  Description of Artificial Sequence: Synthetic oligonucleotide
gucccauaucuucauaaug

SEQ ID NO: 1819983 - RNA, 19 nt, Artificial Sequence
  Description of Artificial Sequence: Synthetic oligonucleotide
caucaccuuggcuucacag

SEQ ID NO: 1819984 - RNA, 19 nt, Artificial Sequence
  Description of Artificial Sequence: Synthetic oligonucleotide
ggaaagaggcuaucaagcc

SEQ ID NO: 1819985 - RNA, 19 nt, Artificial Sequence
  Description of Artificial Sequence: Synthetic oligonucleotide
uuuagaauggaaggacgaa

SEQ ID NO: 1819986 - RNA, 19 nt, Artificial Sequence
  Description of Artificial Sequence: Synthetic oligonucleotide
aggacuuagggugaggaga

SEQ ID NO: 1819987 - RNA, 19 nt, Artificial Sequence
  Description of Artificial Sequence: Synthetic oligonucleotide
ggugggacauucuccagcg

SEQ ID NO: 1819988 - RNA, 19 nt, Artificial Sequence
  Description of Artificial Sequence: Synthetic oligonucleotide
agugcgaauugccucggug

SEQ ID NO: 1819989 - RNA, 19 nt, Artificial Sequence
  Description of Artificial Sequence: Synthetic oligonucleotide
uggaacauccugauaugau

SEQ ID NO: 1819990 - RNA, 19 nt, Artificial Sequence
  Description of Artificial Sequence: Synthetic oligonucleotide
gguuuagaauggaaggacg

SEQ ID NO: 1819991 - RNA, 19 nt, Artificial Sequence
  Description of Artificial Sequence: Synthetic oligonucleotide
cucaagcagaugucugugg

SEQ ID NO: 1819992 - RNA, 19 nt, Artificial Sequence
  Description of Artificial Sequence: Synthetic oligonucleotide
cuuggaacauccugauaug

SEQ ID NO: 1819993 - RNA, 19 nt, Artificial Sequence
  Description of Artificial Sequence: Synthetic oligonucleotide
uacucagauugcucuaugu

SEQ ID NO: 1819994 - RNA, 19 nt, Artificial Sequence
  Description of Artificial Sequence: Synthetic oligonucleotide
agagcacuaaauucuggau

SEQ ID NO: 1819995 - RNA, 19 nt, Artificial Sequence
  Description of Artificial Sequence: Synthetic oligonucleotide
aacauugggacagccagua

SEQ ID NO: 1819996 - RNA, 19 nt, Artificial Sequence
  Description of Artificial Sequence: Synthetic oligonucleotide
  modified_base (16)..(16): a, c, u, g, unknown or other
caugcgcuguaaaggngag

SEQ ID NO: 1819997 - RNA, 19 nt, Artificial Sequence
  Description of Artificial Sequence: Synthetic oligonucleotide
cuucaaggacauguggugc

SEQ ID NO: 1819998 - RNA, 19 nt, Artificial Sequence
  Description of Artificial Sequence: Synthetic oligonucleotide
ugggcaguugugcuaucag

SEQ ID NO: 1819999 - RNA, 19 nt, Artificial Sequence
  Description of Artificial Sequence: Synthetic oligonucleotide
gguagccacauuccggugg

SEQ ID NO: 1820000 - RNA, 19 nt, Artificial Sequence
  Description of Artificial Sequence: Synthetic oligonucleotide
uggggaucagguuggcucc

SEQ ID NO: 1820001 - RNA, 19 nt, Artificial Sequence
  Description of Artificial Sequence: Synthetic oligonucleotide
gucuguggacaguaggcag

SEQ ID NO: 1820002 - RNA, 19 nt, Artificial Sequence
  Description of Artificial Sequence: Synthetic oligonucleotide
agcccaucagaaguagggc

SEQ ID NO: 1820003 - RNA, 19 nt, Artificial Sequence
  Description of Artificial Sequence: Synthetic oligonucleotide
uucugauuccagcuuuuau

SEQ ID NO: 1820004 - RNA, 19 nt, Artificial Sequence
  Description of Artificial Sequence: Synthetic oligonucleotide
agggacagugcgaauugcc

SEQ ID NO: 1820005 - RNA, 19 nt, Artificial Sequence
  Description of Artificial Sequence: Synthetic oligonucleotide
acgcuauauaacaauauaa

SEQ ID NO: 1820006 - RNA, 19 nt, Artificial Sequence
  Description of Artificial Sequence: Synthetic oligonucleotide
auauaacaauauaaguuaa

SEQ ID NO: 1820007 - RNA, 19 nt, Artificial Sequence
  Description of Artificial Sequence: Synthetic oligonucleotide
ucaacgucuaggccaccug

SEQ ID NO: 1820008 - RNA, 19 nt, Artificial Sequence
  Description of Artificial Sequence: Synthetic oligonucleotide
gauaugauagggacacaca

SEQ ID NO: 1820009 - RNA, 19 nt, Artificial Sequence
  Description of Artificial Sequence: Synthetic oligonucleotide
aguguaggucacaauaacu

SEQ ID NO: 1820010 - RNA, 19 nt, Artificial Sequence
  Description of Artificial Sequence: Synthetic oligonucleotide
uggcagauagagcacuaaa

SEQ ID NO: 1820011 - RNA, 19 nt, Artificial Sequence
  Description of Artificial Sequence: Synthetic oligonucleotide
gagggauaggcccaggucu

SEQ ID NO: 1820012 - RNA, 19 nt, Artificial Sequence
  Description of Artificial Sequence: Synthetic oligonucleotide
auagagggauuuguaaacu

SEQ ID NO: 1820013 - RNA, 19 nt, Artificial Sequence
  Description of Artificial Sequence: Synthetic oligonucleotide
aagaggcuaucaagccucc

SEQ ID NO: 1820014 - RNA, 19 nt, Artificial Sequence
  Description of Artificial Sequence: Synthetic oligonucleotide
gcugacugaaugcaggcgc

SEQ ID NO: 1820015 - RNA, 19 nt, Artificial Sequence
  Description of Artificial Sequence: Synthetic oligonucleotide
guuuagaauggaaggacga

SEQ ID NO: 1820016 - RNA, 19 nt, Artificial Sequence
  Description of Artificial Sequence: Synthetic oligonucleotide
gaauggaaggacgaaccca

SEQ ID NO: 1820017 - RNA, 19 nt, Artificial Sequence
  Description of Artificial Sequence: Synthetic oligonucleotide
gcuaucaagccucccacag

SEQ ID NO: 1820018 - RNA, 19 nt, Artificial Sequence
  Description of Artificial Sequence: Synthetic oligonucleotide
  modified_base (7)..(7): a, c, u, g, unknown or other
uaaaggngagggagggaua

SEQ ID NO: 1820019 - RNA, 19 nt, Artificial Sequence
  Description of Artificial Sequence: Synthetic oligonucleotide
augacaauacccucaugua

SEQ ID NO: 1820020 - RNA, 19 nt, Artificial Sequence
  Description of Artificial Sequence: Synthetic oligonucleotide
gauaggcccaggucugagc

SEQ ID NO: 1820021 - RNA, 19 nt, Artificial Sequence
  Description of Artificial Sequence: Synthetic oligonucleotide
cagguuggcuccagaauag

SEQ ID NO: 1820022 - RNA, 19 nt, Artificial Sequence
  Description of Artificial Sequence: Synthetic oligonucleotide
uuucaagcagaaggaggag

SEQ ID NO: 1820023 - RNA, 19 nt, Artificial Sequence
  Description of Artificial Sequence: Synthetic oligonucleotide
auagagcacuaaauucugg

SEQ ID NO: 1820024 - RNA, 19 nt, Artificial Sequence
  Description of Artificial Sequence: Synthetic oligonucleotide
caguguaggucacaauaac

SEQ ID NO: 1820025 - RNA, 19 nt, Artificial Sequence
  Description of Artificial Sequence: Synthetic oligonucleotide
aagggcaaauagaggucac

SEQ ID NO: 1820026 - RNA, 19 nt, Artificial Sequence
  Description of Artificial Sequence: Synthetic oligonucleotide
auuccuuaccucugccaug

SEQ ID NO: 1820027 - RNA, 19 nt, Artificial Sequence
  Description of Artificial Sequence: Synthetic oligonucleotide
uggcaauuccuuaccucug

SEQ ID NO: 1820028 - RNA, 19 nt, Artificial Sequence
  Description of Artificial Sequence: Synthetic oligonucleotide
gggacacacagcuggaugc

SEQ ID NO: 1820029 - RNA, 19 nt, Artificial Sequence
  Description of Artificial Sequence: Synthetic oligonucleotide
aauccugaggaaagaggcu

SEQ ID NO: 1820030 - RNA, 19 nt, Artificial Sequence
  Description of Artificial Sequence: Synthetic oligonucleotide
uaugucuaucugucaugug

SEQ ID NO: 1820031 - RNA, 19 nt, Artificial Sequence
  Description of Artificial Sequence: Synthetic oligonucleotide
ucgagggugggacauucuc

SEQ ID NO: 1820032 - RNA, 19 nt, Artificial Sequence
  Description of Artificial Sequence: Synthetic oligonucleotide
ugcggcugacugaaugcag

SEQ ID NO: 1820033 - RNA, 19 nt, Artificial Sequence
  Description of Artificial Sequence: Synthetic oligonucleotide
aggucacaauaacuuaaga

SEQ ID NO: 1820034 - RNA, 19 nt, Artificial Sequence
  Description of Artificial Sequence: Synthetic oligonucleotide
gacugaaugcaggcgcagg

SEQ ID NO: 1820035 - RNA, 19 nt, Artificial Sequence
  Description of Artificial Sequence: Synthetic oligonucleotide
gaucagguuggcuccagaa

SEQ ID NO: 1820036 - RNA, 19 nt, Artificial Sequence
  Description of Artificial Sequence: Synthetic oligonucleotide
uccagaauagagggauuug

SEQ ID NO: 1820037 - RNA, 19 nt, Artificial Sequence
  Description of Artificial Sequence: Synthetic oligonucleotide
caugugggucaacuguccc

SEQ ID NO: 1820038 - RNA, 19 nt, Artificial Sequence
  Description of Artificial Sequence: Synthetic oligonucleotide
cauccugauaugauaggga

SEQ ID NO: 1820039 - RNA, 19 nt, Artificial Sequence
  Description of Artificial Sequence: Synthetic oligonucleotide
aaccaccucucuccccuag

SEQ ID NO: 1820040 - RNA, 19 nt, Artificial Sequence
  Description of Artificial Sequence: Synthetic oligonucleotide
acauugggacagccaguac

SEQ ID NO: 1820041 - RNA, 19 nt, Artificial Sequence
  Description of Artificial Sequence: Synthetic oligonucleotide
aucagguuggcuccagaau

SEQ ID NO: 1820042 - RNA, 19 nt, Artificial Sequence
  Description of Artificial Sequence: Synthetic oligonucleotide
uucauaaugugaggacccu

SEQ ID NO: 1820043 - RNA, 19 nt, Artificial Sequence
  Description of Artificial Sequence: Synthetic oligonucleotide
uccgguacccaguguaggu

SEQ ID NO: 1820044 - RNA, 19 nt, Artificial Sequence
  Description of Artificial Sequence: Synthetic oligonucleotide
cuguuucaagcagaaggag

SEQ ID NO: 1820045 - RNA, 19 nt, Artificial Sequence
  Description of Artificial Sequence: Synthetic oligonucleotide
gcugcaagagggcugggag

SEQ ID NO: 1820046 - RNA, 19 nt, Artificial Sequence
  Description of Artificial Sequence: Synthetic oligonucleotide
agacggggacgcuauauaa

SEQ ID NO: 1820047 - RNA, 19 nt, Artificial Sequence
  Description of Artificial Sequence: Synthetic oligonucleotide
auggacuugggcaucccag

SEQ ID NO: 1820048 - RNA, 19 nt, Artificial Sequence
  Description of Artificial Sequence: Synthetic oligonucleotide
aucagaaguagggcacuuc

SEQ ID NO: 1820049 - RNA, 19 nt, Artificial Sequence
  Description of Artificial Sequence: Synthetic oligonucleotide
ucaaggacauguggugccc

SEQ ID NO: 1820050 - RNA, 19 nt, Artificial Sequence
  Description of Artificial Sequence: Synthetic oligonucleotide
aggucaacgucuaggccac

SEQ ID NO: 1820051 - RNA, 19 nt, Artificial Sequence
  Description of Artificial Sequence: Synthetic oligonucleotide
acuuuccccaggucaacgu

SEQ ID NO: 1820052 - RNA, 19 nt, Artificial Sequence
  Description of Artificial Sequence: Synthetic oligonucleotide
ucugagcucuuaugucccc

SEQ ID NO: 1820053 - RNA, 19 nt, Artificial Sequence
  Description of Artificial Sequence: Synthetic oligonucleotide
gcacacaacauugggacag

SEQ ID NO: 1820054 - RNA, 19 nt, Artificial Sequence
  Description of Artificial Sequence: Synthetic oligonucleotide
gucugcggcugacugaaug

SEQ ID NO: 1820055 - RNA, 19 nt, Artificial Sequence
  Description of Artificial Sequence: Synthetic oligonucleotide
  modified_base (11)..(11): a, c, u, g, unknown or other
gcuguaaaggngagggagg

SEQ ID NO: 1820056 - RNA, 19 nt, Artificial Sequence
  Description of Artificial Sequence: Synthetic oligonucleotide
ggcaucccaggacuuaggg

SEQ ID NO: 1820057 - RNA, 19 nt, Artificial Sequence
  Description of Artificial Sequence: Synthetic oligonucleotide
  modified_base (9)..(9): a, c, u, g, unknown or other
uguaaaggngagggaggga

SEQ ID NO: 1820058 - RNA, 19 nt, Artificial Sequence
  Description of Artificial Sequence: Synthetic oligonucleotide
gacuugggcaucccaggac

SEQ ID NO: 1820059 - RNA, 19 nt, Artificial Sequence
  Description of Artificial Sequence: Synthetic oligonucleotide
cuuaccucugccaugcgcu

SEQ ID NO: 1820060 - RNA, 19 nt, Artificial Sequence
  Description of Artificial Sequence: Synthetic oligonucleotide
ggauuuguaaacugggagu

SEQ ID NO: 1820061 - RNA, 19 nt, Artificial Sequence
  Description of Artificial Sequence: Synthetic oligonucleotide
ugacagacggggacgcuau

SEQ ID NO: 1820062 - RNA, 19 nt, Artificial Sequence
  Description of Artificial Sequence: Synthetic oligonucleotide
agucgagggugggacauuc

SEQ ID NO: 1820063 - RNA, 19 nt, Artificial Sequence
  Description of Artificial Sequence: Synthetic oligonucleotide
uacccucauguagggaagg

SEQ ID NO: 1820064 - RNA, 19 nt, Artificial Sequence
  Description of Artificial Sequence: Synthetic oligonucleotide
auaaugugaggacccucaa

SEQ ID NO: 1820065 - RNA, 19 nt, Artificial Sequence
  Description of Artificial Sequence: Synthetic oligonucleotide
ugggcaucccaggacuuag

SEQ ID NO: 1820066 - RNA, 19 nt, Artificial Sequence
  Description of Artificial Sequence: Synthetic oligonucleotide
ucauaaugugaggacccuc

SEQ ID NO: 1820067 - RNA, 19 nt, Artificial Sequence
  Description of Artificial Sequence: Synthetic oligonucleotide
acccucauguagggaaggc

SEQ ID NO: 1820068 - RNA, 19 nt, Artificial Sequence
  Description of Artificial Sequence: Synthetic oligonucleotide
uccugaaccuguggggcag

SEQ ID NO: 1820069 - RNA, 19 nt, Artificial Sequence
  Description of Artificial Sequence: Synthetic oligonucleotide
ggaacauccugauaugaua

SEQ ID NO: 1820070 - RNA, 19 nt, Artificial Sequence
  Description of Artificial Sequence: Synthetic oligonucleotide
caauuccuuaccucugcca

SEQ ID NO: 1820071 - RNA, 19 nt, Artificial Sequence
  Description of Artificial Sequence: Synthetic oligonucleotide
cagguuuagaauggaagga

SEQ ID NO: 1820072 - RNA, 19 nt, Artificial Sequence
  Description of Artificial Sequence: Synthetic oligonucleotide
gacggggacgcuauauaac

SEQ ID NO: 1820073 - RNA, 19 nt, Artificial Sequence
  Description of Artificial Sequence: Synthetic oligonucleotide
agaccccugcuugaggguc

SEQ ID NO: 1820074 - RNA, 19 nt, Artificial Sequence
  Description of Artificial Sequence: Synthetic oligonucleotide
cugcuaugacaauacccuc

SEQ ID NO: 1820075 - RNA, 19 nt, Artificial Sequence
  Description of Artificial Sequence: Synthetic oligonucleotide
caagggcaaauagagguca

SEQ ID NO: 1820076 - RNA, 19 nt, Artificial Sequence
  Description of Artificial Sequence: Synthetic oligonucleotide
ugacugaaugcaggcgcag

SEQ ID NO: 1820077 - RNA, 19 nt, Artificial Sequence
  Description of Artificial Sequence: Synthetic oligonucleotide
gacgaacccaaggcacugg

SEQ ID NO: 1820078 - RNA, 19 nt, Artificial Sequence
  Description of Artificial Sequence: Synthetic oligonucleotide
ugggucaacuguccccgac

SEQ ID NO: 1820079 - RNA, 19 nt, Artificial Sequence
  Description of Artificial Sequence: Synthetic oligonucleotide
acgaacccaaggcacugga

SEQ ID NO: 1820080 - RNA, 19 nt, Artificial Sequence
  Description of Artificial Sequence: Synthetic oligonucleotide
ccgagggucuguuucaagc

SEQ ID NO: 1820081 - RNA, 19 nt, Artificial Sequence
  Description of Artificial Sequence: Synthetic oligonucleotide
ugagcucuuauguccccau

SEQ ID NO: 1820082 - RNA, 19 nt, Artificial Sequence
  Description of Artificial Sequence: Synthetic oligonucleotide
gugaggacccucaagcaga

SEQ ID NO: 1820083 - RNA, 19 nt, Artificial Sequence
  Description of Artificial Sequence: Synthetic oligonucleotide
uugccucgguggcaucagg

SEQ ID NO: 1820084 - RNA, 19 nt, Artificial Sequence
  Description of Artificial Sequence: Synthetic oligonucleotide
cagaauagagggauuugua

SEQ ID NO: 1820085 - RNA, 19 nt, Artificial Sequence
  Description of Artificial Sequence: Synthetic oligonucleotide
uaaguuaaccaggcuccuc

SEQ ID NO: 1820086 - RNA, 19 nt, Artificial Sequence
  Description of Artificial Sequence: Synthetic oligonucleotide
uauuggggccaagugcuuc

SEQ ID NO: 1820087 - RNA, 19 nt, Artificial Sequence
  Description of Artificial Sequence: Synthetic oligonucleotide
gggacacugggcuauggac

SEQ ID NO: 1820088 - RNA, 19 nt, Artificial Sequence
  Description of Artificial Sequence: Synthetic oligonucleotide
ugaggacccucaagcagau

SEQ ID NO: 1820089 - RNA, 19 nt, Artificial Sequence
  Description of Artificial Sequence: Synthetic oligonucleotide
caguacccugccugggucc

SEQ ID NO: 1820090 - RNA, 19 nt, Artificial Sequence
  Description of Artificial Sequence: Synthetic oligonucleotide
guagccacauuccggugga

SEQ ID NO: 1820091 - RNA, 19 nt, Artificial Sequence
  Description of Artificial Sequence: Synthetic oligonucleotide
accuggcaauuccuuaccu

SEQ ID NO: 1820092 - RNA, 19 nt, Artificial Sequence
  Description of Artificial Sequence: Synthetic oligonucleotide
ucacagagccauggggucu

SEQ ID NO: 1820093 - RNA, 19 nt, Artificial Sequence
  Description of Artificial Sequence: Synthetic oligonucleotide
agggauuuguaaacuggga

SEQ ID NO: 1820094 - RNA, 19 nt, Artificial Sequence
  Description of Artificial Sequence: Synthetic oligonucleotide
acgucuaggccaccuggcu

SEQ ID NO: 1820095 - RNA, 19 nt, Artificial Sequence
  Description of Artificial Sequence: Synthetic oligonucleotide
auacccucauguagggaag

SEQ ID NO: 1820096 - RNA, 19 nt, Artificial Sequence
  Description of Artificial Sequence: Synthetic oligonucleotide
gacuucugcuaugacaaua

SEQ ID NO: 1820097 - RNA, 19 nt, Artificial Sequence
  Description of Artificial Sequence: Synthetic oligonucleotide
ggggucuuccaagaaauac

SEQ ID NO: 1820098 - RNA, 19 nt, Artificial Sequence
  Description of Artificial Sequence: Synthetic oligonucleotide
uugugcuaucagaccuggc

SEQ ID NO: 1820099 - RNA, 19 nt, Artificial Sequence
  Description of Artificial Sequence: Synthetic oligonucleotide
cauggggucuuccaagaaa

SEQ ID NO: 1820100 - RNA, 19 nt, Artificial Sequence
  Description of Artificial Sequence: Synthetic oligonucleotide
cagcagacaaggccauccc

SEQ ID NO: 1820101 - RNA, 19 nt, Artificial Sequence
  Description of Artificial Sequence: Synthetic oligonucleotide
cuaucagaccuggcaauuc

SEQ ID NO: 1820102 - RNA, 19 nt, Artificial Sequence
  Description of Artificial Sequence: Synthetic oligonucleotide
  modified_base (8)..(8): a, c, u, g, unknown or other
guaaaggngagggagggau

SEQ ID NO: 1820103 - RNA, 19 nt, Artificial Sequence
  Description of Artificial Sequence: Synthetic oligonucleotide
cugaaugcaggcgcaggug

SEQ ID NO: 1820104 - RNA, 19 nt, Artificial Sequence
  Description of Artificial Sequence: Synthetic oligonucleotide
caccuuggcuucacagagc

SEQ ID NO: 1820105 - RNA, 19 nt, Artificial Sequence
  Description of Artificial Sequence: Synthetic oligonucleotide
caguugugcuaucagaccu

SEQ ID NO: 1820106 - RNA, 19 nt, Artificial Sequence
  Description of Artificial Sequence: Synthetic oligonucleotide
gcuaggaagaggaggagca

SEQ ID NO: 1820107 - RNA, 19 nt, Artificial Sequence
  Description of Artificial Sequence: Synthetic oligonucleotide
cugacugaaugcaggcgca

SEQ ID NO: 1820108 - RNA, 19 nt, Artificial Sequence
  Description of Artificial Sequence: Synthetic oligonucleotide
gcucuuauguccccaucug

SEQ ID NO: 1820109 - RNA, 19 nt, Artificial Sequence
  Description of Artificial Sequence: Synthetic oligonucleotide
gguuggcuccagaauagag

SEQ ID NO: 1820110 - RNA, 19 nt, Artificial Sequence
  Description of Artificial Sequence: Synthetic oligonucleotide
cccaucagaaguagggcac

SEQ ID NO: 1820111 - RNA, 19 nt, Artificial Sequence
  Description of Artificial Sequence: Synthetic oligonucleotide
aggcuuggaacauccugau

SEQ ID NO: 1820112 - RNA, 19 nt, Artificial Sequence
  Description of Artificial Sequence: Synthetic oligonucleotide
gagggugaagggcuaggaa

SEQ ID NO: 1820113 - RNA, 19 nt, Artificial Sequence
  Description of Artificial Sequence: Synthetic oligonucleotide
uuccgguggacuucugcua

SEQ ID NO: 1820114 - RNA, 19 nt, Artificial Sequence
  Description of Artificial Sequence: Synthetic oligonucleotide
uccuuaccucugccaugcg

SEQ ID NO: 1820115 - RNA, 19 nt, Artificial Sequence
  Description of Artificial Sequence: Synthetic oligonucleotide
caucagguuuagaauggaa

SEQ ID NO: 1820116 - RNA, 19 nt, Artificial Sequence
  Description of Artificial Sequence: Synthetic oligonucleotide
ggacagugcgaauugccuc

SEQ ID NO: 1820117 - RNA, 19 nt, Artificial Sequence
  Description of Artificial Sequence: Synthetic oligonucleotide
ggaguggaggcugcaagag

SEQ ID NO: 1820118 - RNA, 19 nt, Artificial Sequence
  Description of Artificial Sequence: Synthetic oligonucleotide
gcaauuccuuaccucugcc

SEQ ID NO: 1820119 - RNA, 19 nt, Artificial Sequence
  Description of Artificial Sequence: Synthetic oligonucleotide
cuccgguacccaguguagg

SEQ ID NO: 1820120 - RNA, 19 nt, Artificial Sequence
  Description of Artificial Sequence: Synthetic oligonucleotide
cuaucaagccucccacaga

SEQ ID NO: 1820121 - RNA, 19 nt, Artificial Sequence
  Description of Artificial Sequence: Synthetic oligonucleotide
cuaugacaauacccucaug

SEQ ID NO: 1820122 - RNA, 19 nt, Artificial Sequence
  Description of Artificial Sequence: Synthetic oligonucleotide
acagugcgaauugccucgg

SEQ ID NO: 1820123 - RNA, 19 nt, Artificial Sequence
  Description of Artificial Sequence: Synthetic oligonucleotide
cuuggcuucacagagccau

SEQ ID NO: 1820124 - RNA, 19 nt, Artificial Sequence
  Description of Artificial Sequence: Synthetic oligonucleotide
cucuaugucuaucugucau

SEQ ID NO: 1820125 - RNA, 19 nt, Artificial Sequence
  Description of Artificial Sequence: Synthetic oligonucleotide
cacagcccaucagaaguag

SEQ ID NO: 1820126 - RNA, 19 nt, Artificial Sequence
  Description of Artificial Sequence: Synthetic oligonucleotide
caggucugagcucuuaugu

SEQ ID NO: 1820127 - RNA, 19 nt, Artificial Sequence
  Description of Artificial Sequence: Synthetic oligonucleotide
ccauaucuucauaauguga

SEQ ID NO: 1820128 - RNA, 19 nt, Artificial Sequence
  Description of Artificial Sequence: Synthetic oligonucleotide
gcagauagagcacuaaauu

SEQ ID NO: 1820129 - RNA, 19 nt, Artificial Sequence
  Description of Artificial Sequence: Synthetic oligonucleotide
cuaugucuaucugucaugu

SEQ ID NO: 1820130 - RNA, 19 nt, Artificial Sequence
  Description of Artificial Sequence: Synthetic oligonucleotide
uuccccaggucaacgucua

SEQ ID NO: 1820131 - RNA, 19 nt, Artificial Sequence
  Description of Artificial Sequence: Synthetic oligonucleotide
ugaaccuguggggcagucu

SEQ ID NO: 1820132 - RNA, 19 nt, Artificial Sequence
  Description of Artificial Sequence: Synthetic oligonucleotide
agggauaggcccaggucug

SEQ ID NO: 1820133 - RNA, 19 nt, Artificial Sequence
  Description of Artificial Sequence: Synthetic oligonucleotide
agggcaaauagaggucacu

SEQ ID NO: 1820134 - RNA, 19 nt, Artificial Sequence
  Description of Artificial Sequence: Synthetic oligonucleotide
gccucgguggcaucagggg

SEQ ID NO: 1820135 - RNA, 19 nt, Artificial Sequence
  Description of Artificial Sequence: Synthetic oligonucleotide
acagacggggacgcuauau

SEQ ID NO: 1820136 - RNA, 19 nt, Artificial Sequence
  Description of Artificial Sequence: Synthetic oligonucleotide
ggaaaauccugaggaaaga

SEQ ID NO: 1820137 - RNA, 19 nt, Artificial Sequence
  Description of Artificial Sequence: Synthetic oligonucleotide
cagcuggaugcaaggcaag

SEQ ID NO: 1820138 - RNA, 19 nt, Artificial Sequence
  Description of Artificial Sequence: Synthetic oligonucleotide
gugggacauucuccagcgg

SEQ ID NO: 1820139 - RNA, 19 nt, Artificial Sequence
  Description of Artificial Sequence: Synthetic oligonucleotide
gggacagccaguacccugc

SEQ ID NO: 1820140 - RNA, 19 nt, Artificial Sequence
  Description of Artificial Sequence: Synthetic oligonucleotide
  modified_base (15)..(15): a, c, u, g, unknown or other
augcgcuguaaaggngagg

SEQ ID NO: 1820141 - RNA, 19 nt, Artificial Sequence
  Description of Artificial Sequence: Synthetic oligonucleotide
aggacgaacccaaggcacu

SEQ ID NO: 1820142 - RNA, 19 nt, Artificial Sequence
  Description of Artificial Sequence: Synthetic oligonucleotide
ggcacuucaaggacaugug

SEQ ID NO: 1820143 - RNA, 19 nt, Artificial Sequence
  Description of Artificial Sequence: Synthetic oligonucleotide
cagcaacacagcccaucag

SEQ ID NO: 1820144 - RNA, 19 nt, Artificial Sequence
  Description of Artificial Sequence: Synthetic oligonucleotide
gagcucuuauguccccauc

SEQ ID NO: 1820145 - RNA, 19 nt, Artificial Sequence
  Description of Artificial Sequence: Synthetic oligonucleotide
  modified_base (12)..(12): a, c, u, g, unknown or other
cgcuguaaaggngagggag

SEQ ID NO: 1820146 - RNA, 19 nt, Artificial Sequence
  Description of Artificial Sequence: Synthetic oligonucleotide
gcggcugacugaaugcagg

SEQ ID NO: 1820147 - RNA, 19 nt, Artificial Sequence
  Description of Artificial Sequence: Synthetic oligonucleotide
uaucugucaugugggucaa

SEQ ID NO: 1820148 - RNA, 19 nt, Artificial Sequence
  Description of Artificial Sequence: Synthetic oligonucleotide
ggcugacugaaugcaggcg

SEQ ID NO: 1820149 - RNA, 19 nt, Artificial Sequence
  Description of Artificial Sequence: Synthetic oligonucleotide
gcuugagggucccauaucu

SEQ ID NO: 1820150 - RNA, 19 nt, Artificial Sequence
  Description of Artificial Sequence: Synthetic oligonucleotide
gagauggggccgggagucg

SEQ ID NO: 1820151 - RNA, 19 nt, Artificial Sequence
  Description of Artificial Sequence: Synthetic oligonucleotide
ccuaggcaaggucugcggc

SEQ ID NO: 1820152 - RNA, 19 nt, Artificial Sequence
  Description of Artificial Sequence: Synthetic oligonucleotide
  modified_base (3)..(3): a, c, u, g, unknown or other
ggngagggagggauaggcc

SEQ ID NO: 1820153 - RNA, 19 nt, Artificial Sequence
  Description of Artificial Sequence: Synthetic oligonucleotide
caccuggcuugguagccac

SEQ ID NO: 1820154 - RNA, 19 nt, Artificial Sequence
  Description of Artificial Sequence: Synthetic oligonucleotide
ucccuccagaggaggcagc

SEQ ID NO: 1820155 - RNA, 19 nt, Artificial Sequence
  Description of Artificial Sequence: Synthetic oligonucleotide
auagggacacacagcugga

SEQ ID NO: 1820156 - RNA, 19 nt, Artificial Sequence
  Description of Artificial Sequence: Synthetic oligonucleotide
augacagacggggacgcua

SEQ ID NO: 1820157 - RNA, 19 nt, Artificial Sequence
  Description of Artificial Sequence: Synthetic oligonucleotide
gggccaagugcuucccucc

SEQ ID NO: 1820158 - RNA, 19 nt, Artificial Sequence
  Description of Artificial Sequence: Synthetic oligonucleotide
acccucaagcagaugucug

SEQ ID NO: 1820159 - RNA, 19 nt, Artificial Sequence
  Description of Artificial Sequence: Synthetic oligonucleotide
ggguccacuaaccaccucu

SEQ ID NO: 1820160 - RNA, 19 nt, Artificial Sequence
  Description of Artificial Sequence: Synthetic oligonucleotide
cuaggcaaggucugcggcu

SEQ ID NO: 1820161 - RNA, 19 nt, Artificial Sequence
  Description of Artificial Sequence: Synthetic oligonucleotide
ucccaggacuuagggugag

SEQ ID NO: 1820162 - RNA, 19 nt, Artificial Sequence
  Description of Artificial Sequence: Synthetic oligonucleotide
cuauggacuugggcauccc

SEQ ID NO: 1820163 - RNA, 19 nt, Artificial Sequence
  Description of Artificial Sequence: Synthetic oligonucleotide
uggggccaagugcuucccu

SEQ ID NO: 1820164 - RNA, 19 nt, Artificial Sequence
  Description of Artificial Sequence: Synthetic oligonucleotide
aguacccugccugggucca

SEQ ID NO: 1820165 - RNA, 19 nt, Artificial Sequence
  Description of Artificial Sequence: Synthetic oligonucleotide
ccucgguggcaucaggggc

SEQ ID NO: 1820166 - RNA, 19 nt, Artificial Sequence
  Description of Artificial Sequence: Synthetic oligonucleotide
gacuuagggugaggagaug

SEQ ID NO: 1820167 - RNA, 19 nt, Artificial Sequence
  Description of Artificial Sequence: Synthetic oligonucleotide
uuggggccaagugcuuccc

SEQ ID NO: 1820168 - RNA, 19 nt, Artificial Sequence
  Description of Artificial Sequence: Synthetic oligonucleotide
gaccccugcuugagggucc

SEQ ID NO: 1820169 - RNA, 19 nt, Artificial Sequence
  Description of Artificial Sequence: Synthetic oligonucleotide
gcuauggacuugggcaucc

SEQ ID NO: 1820170 - RNA, 19 nt, Artificial Sequence
  Description of Artificial Sequence: Synthetic oligonucleotide
ccagggacagugcgaauug

SEQ ID NO: 1820171 - RNA, 19 nt, Artificial Sequence
  Description of Artificial Sequence: Synthetic oligonucleotide
cccuaggcaaggucugcgg

SEQ ID NO: 1820172 - RNA, 19 nt, Artificial Sequence
  Description of Artificial Sequence: Synthetic oligonucleotide
uccagcggcccagaggcuu

SEQ ID NO: 1820173 - RNA, 19 nt, Artificial Sequence
  Description of Artificial Sequence: Synthetic oligonucleotide
cagaccuggcaauuccuua

SEQ ID NO: 1820174 - RNA, 19 nt, Artificial Sequence
  Description of Artificial Sequence: Synthetic oligonucleotide
cagaugucuguggacagua

SEQ ID NO: 1820175 - RNA, 19 nt, Artificial Sequence
  Description of Artificial Sequence: Synthetic oligonucleotide
agguuggcuccagaauaga

SEQ ID NO: 1820176 - RNA, 19 nt, Artificial Sequence
  Description of Artificial Sequence: Synthetic oligonucleotide
uugggcaucccaggacuua

SEQ ID NO: 1820177 - RNA, 19 nt, Artificial Sequence
  Description of Artificial Sequence: Synthetic oligonucleotide
gacccucaagcagaugucu

SEQ ID NO: 1820178 - RNA, 19 nt, Artificial Sequence
  Description of Artificial Sequence: Synthetic oligonucleotide
ggaggagcagaggacccug

SEQ ID NO: 1820179 - RNA, 19 nt, Artificial Sequence
  Description of Artificial Sequence: Synthetic oligonucleotide
ccagcuuuuauuggggcca

SEQ ID NO: 1820180 - RNA, 19 nt, Artificial Sequence
  Description of Artificial Sequence: Synthetic oligonucleotide
aucccaggacuuaggguga

SEQ ID NO: 1820181 - RNA, 19 nt, Artificial Sequence
  Description of Artificial Sequence: Synthetic oligonucleotide
guccccgacucuccugaac

SEQ ID NO: 1820182 - RNA, 19 nt, Artificial Sequence
  Description of Artificial Sequence: Synthetic oligonucleotide
gggugaggagauggggccg

SEQ ID NO: 1820183 - RNA, 19 nt, Artificial Sequence
  Description of Artificial Sequence: Synthetic oligonucleotide
gucuaucugucaugugggu

SEQ ID NO: 1820184 - RNA, 19 nt, Artificial Sequence
  Description of Artificial Sequence: Synthetic oligonucleotide
agauggggccgggagucga

SEQ ID NO: 1820185 - RNA, 19 nt, Artificial Sequence
  Description of Artificial Sequence: Synthetic oligonucleotide
caaaggggacacugggcua

SEQ ID NO: 1820186 - RNA, 19 nt, Artificial Sequence
  Description of Artificial Sequence: Synthetic oligonucleotide
ggggccaagugcuucccuc

SEQ ID NO: 1820187 - RNA, 19 nt, Artificial Sequence
  Description of Artificial Sequence: Synthetic oligonucleotide
ggucuguuucaagcagaag

SEQ ID NO: 1820188 - RNA, 19 nt, Artificial Sequence
  Description of Artificial Sequence: Synthetic oligonucleotide
ggauaggcccaggucugag

SEQ ID NO: 1820189 - RNA, 19 nt, Artificial Sequence
  Description of Artificial Sequence: Synthetic oligonucleotide
ccuccgguacccaguguag

SEQ ID NO: 1820190 - RNA, 19 nt, Artificial Sequence
  Description of Artificial Sequence: Synthetic oligonucleotide
ccucaagcagaugucugug

SEQ ID NO: 1820191 - RNA, 19 nt, Artificial Sequence
  Description of Artificial Sequence: Synthetic oligonucleotide
gcacuaaauucuggaugcc

SEQ ID NO: 1820192 - RNA, 19 nt, Artificial Sequence
  Description of Artificial Sequence: Synthetic oligonucleotide
ggaugcaaggcaagggcaa

SEQ ID NO: 1820193 - RNA, 19 nt, Artificial Sequence
  Description of Artificial Sequence: Synthetic oligonucleotide
gggacgcuauauaacaaua

SEQ ID NO: 1820194 - RNA, 19 nt, Artificial Sequence
  Description of Artificial Sequence: Synthetic oligonucleotide
agggucccauaucuucaua

SEQ ID NO: 1820195 - RNA, 19 nt, Artificial Sequence
  Description of Artificial Sequence: Synthetic oligonucleotide
cugagcucuuaugucccca

SEQ ID NO: 1820196 - RNA, 19 nt, Artificial Sequence
  Description of Artificial Sequence: Synthetic oligonucleotide
  modified_base (18)..(18): a, c, u, g, unknown or other
gccaugcgcuguaaaggng

SEQ ID NO: 1820197 - RNA, 19 nt, Artificial Sequence
  Description of Artificial Sequence: Synthetic oligonucleotide
cagacggggacgcuauaua

SEQ ID NO: 1820198 - RNA, 19 nt, Artificial Sequence
  Description of Artificial Sequence: Synthetic oligonucleotide
cugcggcugacugaaugca

SEQ ID NO: 1820199 - RNA, 19 nt, Artificial Sequence
  Description of Artificial Sequence: Synthetic oligonucleotide
caauacccucauguaggga

SEQ ID NO: 1820200 - RNA, 19 nt, Artificial Sequence
  Description of Artificial Sequence: Synthetic oligonucleotide
ggcuccagaauagagggau

SEQ ID NO: 1820201 - RNA, 19 nt, Artificial Sequence
  Description of Artificial Sequence: Synthetic oligonucleotide
ggggacgcuauauaacaau

SEQ ID NO: 1820202 - RNA, 19 nt, Artificial Sequence
  Description of Artificial Sequence: Synthetic oligonucleotide
ggcaaauagaggucacuuu

SEQ ID NO: 1820203 - RNA, 19 nt, Artificial Sequence
  Description of Artificial Sequence: Synthetic oligonucleotide
gcuuuuauuggggccaagu

SEQ ID NO: 1820204 - RNA, 19 nt, Artificial Sequence
  Description of Artificial Sequence: Synthetic oligonucleotide
gguccacuaaccaccucuc

SEQ ID NO: 1820205 - RNA, 19 nt, Artificial Sequence
  Description of Artificial Sequence: Synthetic oligonucleotide
gucaacgucuaggccaccu

SEQ ID NO: 1820206 - RNA, 19 nt, Artificial Sequence
  Description of Artificial Sequence: Synthetic oligonucleotide
ggagggugaagggcuagga

SEQ ID NO: 1820207 - RNA, 19 nt, Artificial Sequence
  Description of Artificial Sequence: Synthetic oligonucleotide
cggcugacugaaugcaggc

SEQ ID NO: 1820208 - RNA, 19 nt, Artificial Sequence
  Description of Artificial Sequence: Synthetic oligonucleotide
cuggcagauagagcacuaa

SEQ ID NO: 1820209 - RNA, 19 nt, Artificial Sequence
  Description of Artificial Sequence: Synthetic oligonucleotide
cacuggaagaagguucagu

SEQ ID NO: 1820210 - RNA, 19 nt, Artificial Sequence
  Description of Artificial Sequence: Synthetic oligonucleotide
cugaaccuguggggcaguc

SEQ ID NO: 1820211 - RNA, 19 nt, Artificial Sequence
  Description of Artificial Sequence: Synthetic oligonucleotide
ccaggacuuagggugagga

SEQ ID NO: 1820212 - RNA, 19 nt, Artificial Sequence
  Description of Artificial Sequence: Synthetic oligonucleotide
gggcaucccaggacuuagg

SEQ ID NO: 1820213 - RNA, 19 nt, Artificial Sequence
  Description of Artificial Sequence: Synthetic oligonucleotide
gggucuguuucaagcagaa

SEQ ID NO: 1820214 - RNA, 19 nt, Artificial Sequence
  Description of Artificial Sequence: Synthetic oligonucleotide
cgagggucuguuucaagca

SEQ ID NO: 1820215 - RNA, 19 nt, Artificial Sequence
  Description of Artificial Sequence: Synthetic oligonucleotide
auguccccaucuggaaaau

SEQ ID NO: 1820216 - RNA, 19 nt, Artificial Sequence
  Description of Artificial Sequence: Synthetic oligonucleotide
ggacgcuauauaacaauau

SEQ ID NO: 1820217 - RNA, 19 nt, Artificial Sequence
  Description of Artificial Sequence: Synthetic oligonucleotide
cuugagggucccauaucuu

SEQ ID NO: 1820218 - RNA, 19 nt, Artificial Sequence
  Description of Artificial Sequence: Synthetic oligonucleotide
ccccuaggcaaggucugcg

SEQ ID NO: 1820219 - RNA, 19 nt, Artificial Sequence
  Description of Artificial Sequence: Synthetic oligonucleotide
cagauugcucuaugucuau

SEQ ID NO: 1820220 - RNA, 19 nt, Artificial Sequence
  Description of Artificial Sequence: Synthetic oligonucleotide
cucugccaugcgcuguaaa

SEQ ID NO: 1820221 - RNA, 19 nt, Artificial Sequence
  Description of Artificial Sequence: Synthetic oligonucleotide
ggacuuagggugaggagau

SEQ ID NO: 1820222 - RNA, 19 nt, Artificial Sequence
  Description of Artificial Sequence: Synthetic oligonucleotide
cacauuccgguggacuucu

SEQ ID NO: 1820223 - RNA, 19 nt, Artificial Sequence
  Description of Artificial Sequence: Synthetic oligonucleotide
cuggguccacuaaccaccu

SEQ ID NO: 1820224 - RNA, 19 nt, Artificial Sequence
  Description of Artificial Sequence: Synthetic oligonucleotide
gggcuauggacuugggcau

SEQ ID NO: 1820225 - RNA, 19 nt, Artificial Sequence
  Description of Artificial Sequence: Synthetic oligonucleotide
gacagacggggacgcuaua

SEQ ID NO: 1820226 - RNA, 19 nt, Artificial Sequence
  Description of Artificial Sequence: Synthetic oligonucleotide
ccacagaccccugcuugag

SEQ ID NO: 1820227 - RNA, 19 nt, Artificial Sequence
  Description of Artificial Sequence: Synthetic oligonucleotide
agggcacuucaaggacaug

SEQ ID NO: 1820228 - RNA, 19 nt, Artificial Sequence
  Description of Artificial Sequence: Synthetic oligonucleotide
ggcuauggacuugggcauc

SEQ ID NO: 1820229 - RNA, 19 nt, Artificial Sequence
  Description of Artificial Sequence: Synthetic oligonucleotide
ggcaaggucugcggcugac

SEQ ID NO: 1820230 - RNA, 19 nt, Artificial Sequence
  Description of Artificial Sequence: Synthetic oligonucleotide
ccagcggcccagaggcuug

SEQ ID NO: 1820231 - RNA, 19 nt, Artificial Sequence
  Description of Artificial Sequence: Synthetic oligonucleotide
cccgacucuccugaaccug

SEQ ID NO: 1820232 - RNA, 19 nt, Artificial Sequence
  Description of Artificial Sequence: Synthetic oligonucleotide
cagcuuuuauuggggccaa

SEQ ID NO: 1820233 - RNA, 19 nt, Artificial Sequence
  Description of Artificial Sequence: Synthetic oligonucleotide
aggcugcaagagggcuggg

SEQ ID NO: 1820234 - RNA, 19 nt, Artificial Sequence
  Description of Artificial Sequence: Synthetic oligonucleotide
ggcuuggaacauccugaua

SEQ ID NO: 1820235 - RNA, 19 nt, Artificial Sequence
  Description of Artificial Sequence: Synthetic oligonucleotide
ccgguacccaguguagguc

SEQ ID NO: 1820236 - RNA, 19 nt, Artificial Sequence
  Description of Artificial Sequence: Synthetic oligonucleotide
gcgaauugccucgguggca

SEQ ID NO: 1820237 - RNA, 19 nt, Artificial Sequence
  Description of Artificial Sequence: Synthetic oligonucleotide
acauuccgguggacuucug

SEQ ID NO: 1820238 - RNA, 19 nt, Artificial Sequence
  Description of Artificial Sequence: Synthetic oligonucleotide
cccucaagcagaugucugu

SEQ ID NO: 1820239 - RNA, 19 nt, Artificial Sequence
  Description of Artificial Sequence: Synthetic oligonucleotide
cccuccgguacccagugua

SEQ ID NO: 1820240 - RNA, 19 nt, Artificial Sequence
  Description of Artificial Sequence: Synthetic oligonucleotide
accuggcuugguagccaca

SEQ ID NO: 1820241 - RNA, 19 nt, Artificial Sequence
  Description of Artificial Sequence: Synthetic oligonucleotide
gccaguacccugccugggu

SEQ ID NO: 1820242 - RNA, 19 nt, Artificial Sequence
  Description of Artificial Sequence: Synthetic oligonucleotide
gcuaucagaccuggcaauu

SEQ ID NO: 1820243 - RNA, 19 nt, Artificial Sequence
  Description of Artificial Sequence: Synthetic oligonucleotide
gggauaggcccaggucuga

SEQ ID NO: 1820244 - RNA, 19 nt, Artificial Sequence
  Description of Artificial Sequence: Synthetic oligonucleotide
caggcgcaggugccuggca

SEQ ID NO: 1820245 - RNA, 19 nt, Artificial Sequence
  Description of Artificial Sequence: Synthetic oligonucleotide
guacccugccuggguccac

SEQ ID NO: 1820246 - RNA, 19 nt, Artificial Sequence
  Description of Artificial Sequence: Synthetic oligonucleotide
  modified_base (13)..(13): a, c, u, g, unknown or other
gcgcuguaaaggngaggga

SEQ ID NO: 1820247 - RNA, 19 nt, Artificial Sequence
  Description of Artificial Sequence: Synthetic oligonucleotide
gcagaugucuguggacagu

SEQ ID NO: 1820248 - RNA, 19 nt, Artificial Sequence
  Description of Artificial Sequence: Synthetic oligonucleotide
cccagaggcuuggaacauc

SEQ ID NO: 1820249 - RNA, 19 nt, Artificial Sequence
  Description of Artificial Sequence: Synthetic oligonucleotide
ccgacucuccugaaccugu

SEQ ID NO: 1820250 - RNA, 19 nt, Artificial Sequence
  Description of Artificial Sequence: Synthetic oligonucleotide
ggggaucagguuggcucca

SEQ ID NO: 1820251 - RNA, 19 nt, Artificial Sequence
  Description of Artificial Sequence: Synthetic oligonucleotide
ggucaacgucuaggccacc

SEQ ID NO: 1820252 - RNA, 19 nt, Artificial Sequence
  Description of Artificial Sequence: Synthetic oligonucleotide
gucgagggugggacauucu

SEQ ID NO: 1820253 - RNA, 19 nt, Artificial Sequence
  Description of Artificial Sequence: Synthetic oligonucleotide
cucccacagaccccugcuu

SEQ ID NO: 1820254 - RNA, 19 nt, Artificial Sequence
  Description of Artificial Sequence: Synthetic oligonucleotide
cggggacgcuauauaacaa

SEQ ID NO: 1820255 - RNA, 19 nt, Artificial Sequence
  Description of Artificial Sequence: Synthetic oligonucleotide
cgaacccaaggcacuggaa

SEQ ID NO: 1820256 - RNA, 19 nt, Artificial Sequence
  Description of Artificial Sequence: Synthetic oligonucleotide
cagugcgaauugccucggu

SEQ ID NO: 1820257 - RNA, 19 nt, Artificial Sequence
  Description of Artificial Sequence: Synthetic oligonucleotide
cccucauguagggaaggcu

SEQ ID NO: 1820258 - RNA, 19 nt, Artificial Sequence
  Description of Artificial Sequence: Synthetic oligonucleotide
gcaaggucugcggcugacu

SEQ ID NO: 1820259 - RNA, 19 nt, Artificial Sequence
  Description of Artificial Sequence: Synthetic oligonucleotide
gagucgagggugggacauu

SEQ ID NO: 1820260 - RNA, 19 nt, Artificial Sequence
  Description of Artificial Sequence: Synthetic oligonucleotide
cuccagcggcccagaggcu

SEQ ID NO: 1820261 - RNA, 19 nt, Artificial Sequence
  Description of Artificial Sequence: Synthetic oligonucleotide
ccccgacucuccugaaccu

SEQ ID NO: 1820262 - RNA, 19 nt, Artificial Sequence
  Description of Artificial Sequence: Synthetic oligonucleotide
cuaggccaccuggcuuggu

SEQ ID NO: 1820263 - RNA, 19 nt, Artificial Sequence
  Description of Artificial Sequence: Synthetic oligonucleotide
gcccagaggcuuggaacau

SEQ ID NO: 1820264 - RNA, 19 nt, Artificial Sequence
  Description of Artificial Sequence: Synthetic oligonucleotide
ggucugcggcugacugaau

SEQ ID NO: 1820265 - RNA, 19 nt, Artificial Sequence
  Description of Artificial Sequence: Synthetic oligonucleotide
aaagcuugugcuuaggccc

SEQ ID NO: 1820266 - RNA, 19 nt, Artificial Sequence
  Description of Artificial Sequence: Synthetic oligonucleotide
uaugagauagaauucauug

SEQ ID NO: 1820267 - RNA, 19 nt, Artificial Sequence
  Description of Artificial Sequence: Synthetic oligonucleotide
ugaaucauagacaagucug

SEQ ID NO: 1820268 - RNA, 19 nt, Artificial Sequence
  Description of Artificial Sequence: Synthetic oligonucleotide
acuuguuucagaguaaagc

SEQ ID NO: 1820269 - RNA, 19 nt, Artificial Sequence
  Description of Artificial Sequence: Synthetic oligonucleotide
ucauagacaagucuggggc

SEQ ID NO: 1820270 - RNA, 19 nt, Artificial Sequence
  Description of Artificial Sequence: Synthetic oligonucleotide
agcauuagcgacuucuugc

SEQ ID NO: 1820271 - RNA, 19 nt, Artificial Sequence
  Description of Artificial Sequence: Synthetic oligonucleotide
agauagaauucauuggugg

SEQ ID NO: 1820272 - RNA, 19 nt, Artificial Sequence
  Description of Artificial Sequence: Synthetic oligonucleotide
ugagauagaauucauuggu

SEQ ID NO: 1820273 - RNA, 19 nt, Artificial Sequence
  Description of Artificial Sequence: Synthetic oligonucleotide
ucucaggcaagucuuaggg

SEQ ID NO: 1820274 - RNA, 19 nt, Artificial Sequence
  Description of Artificial Sequence: Synthetic oligonucleotide
aggucucugaaucauagac

SEQ ID NO: 1820275 - RNA, 19 nt, Artificial Sequence
  Description of Artificial Sequence: Synthetic oligonucleotide
aauucauugguggucacuc

SEQ ID NO: 1820276 - RNA, 19 nt, Artificial Sequence
  Description of Artificial Sequence: Synthetic oligonucleotide
ucuuaaaaggggaagggaa

SEQ ID NO: 1820277 - RNA, 19 nt, Artificial Sequence
  Description of Artificial Sequence: Synthetic oligonucleotide
ugagacuuguuucagagua

SEQ ID NO: 1820278 - RNA, 19 nt, Artificial Sequence
  Description of Artificial Sequence: Synthetic oligonucleotide
uaaagcuaggcucagggaa

SEQ ID NO: 1820279 - RNA, 19 nt, Artificial Sequence
  Description of Artificial Sequence: Synthetic oligonucleotide
ucagaguaaagcuaggcuc

SEQ ID NO: 1820280 - RNA, 19 nt, Artificial Sequence
  Description of Artificial Sequence: Synthetic oligonucleotide
agugucuuuuagcaacucc

SEQ ID NO: 1820281 - RNA, 19 nt, Artificial Sequence
  Description of Artificial Sequence: Synthetic oligonucleotide
uuugcuugaacuuggggac

SEQ ID NO: 1820282 - RNA, 19 nt, Artificial Sequence
  Description of Artificial Sequence: Synthetic oligonucleotide
uccacagugucuuuuagca

SEQ ID NO: 1820283 - RNA, 19 nt, Artificial Sequence
  Description of Artificial Sequence: Synthetic oligonucleotide
uuugcuuccuuuuccaaug

SEQ ID NO: 1820284 - RNA, 19 nt, Artificial Sequence
  Description of Artificial Sequence: Synthetic oligonucleotide
aagucuuaggggaacuugc

SEQ ID NO: 1820285 - RNA, 19 nt, Artificial Sequence
  Description of Artificial Sequence: Synthetic oligonucleotide
agcaucuuuagcauuagcg

SEQ ID NO: 1820286 - RNA, 19 nt, Artificial Sequence
  Description of Artificial Sequence: Synthetic oligonucleotide
gaaagcuugugcuuaggcc

SEQ ID NO: 1820287 - RNA, 19 nt, Artificial Sequence
  Description of Artificial Sequence: Synthetic oligonucleotide
cacaacuucuccaaacucc

SEQ ID NO: 1820288 - RNA, 19 nt, Artificial Sequence
  Description of Artificial Sequence: Synthetic oligonucleotide
ucuagcagcucccaggcca

SEQ ID NO: 1820289 - RNA, 19 nt, Artificial Sequence
  Description of Artificial Sequence: Synthetic oligonucleotide
ucuuaggggaacuugcucu

SEQ ID NO: 1820290 - RNA, 19 nt, Artificial Sequence
  Description of Artificial Sequence: Synthetic oligonucleotide
aaucauagacaagucuggg

SEQ ID NO: 1820291 - RNA, 19 nt, Artificial Sequence
  Description of Artificial Sequence: Synthetic oligonucleotide
aucauagacaagucugggg

SEQ ID NO: 1820292 - RNA, 19 nt, Artificial Sequence
  Description of Artificial Sequence: Synthetic oligonucleotide
uaagugucacuuccugucg

SEQ ID NO: 1820293 - RNA, 19 nt, Artificial Sequence
  Description of Artificial Sequence: Synthetic oligonucleotide
auuagcgacuucuugccag

SEQ ID NO: 1820294 - RNA, 19 nt, Artificial Sequence
  Description of Artificial Sequence: Synthetic oligonucleotide
cuucuuguuacugagcggc

SEQ ID NO: 1820295 - RNA, 19 nt, Artificial Sequence
  Description of Artificial Sequence: Synthetic oligonucleotide
uggauuaagggguugaguu

SEQ ID NO: 1820296 - RNA, 19 nt, Artificial Sequence
  Description of Artificial Sequence: Synthetic oligonucleotide
ugaaagcuugugcuuaggc

SEQ ID NO: 1820297 - RNA, 19 nt, Artificial Sequence
  Description of Artificial Sequence: Synthetic oligonucleotide
cuuugcuugaacuugggga

SEQ ID NO: 1820298 - RNA, 19 nt, Artificial Sequence
  Description of Artificial Sequence: Synthetic oligonucleotide
aagcaucuuuagcauuagc

SEQ ID NO: 1820299 - RNA, 19 nt, Artificial Sequence
  Description of Artificial Sequence: Synthetic oligonucleotide
acccaaaagcaucuuuagc

SEQ ID NO: 1820300 - RNA, 19 nt, Artificial Sequence
  Description of Artificial Sequence: Synthetic oligonucleotide
cacagugucuuuuagcaac

SEQ ID NO: 1820301 - RNA, 19 nt, Artificial Sequence
  Description of Artificial Sequence: Synthetic oligonucleotide
ucuguaugagauagaauuc

SEQ ID NO: 1820302 - RNA, 19 nt, Artificial Sequence
  Description of Artificial Sequence: Synthetic oligonucleotide
aagcaucugcccucguccc

SEQ ID NO: 1820303 - RNA, 19 nt, Artificial Sequence
  Description of Artificial Sequence: Synthetic oligonucleotide
uuuuagcaacuccugcucc

SEQ ID NO: 1820304 - RNA, 19 nt, Artificial Sequence
  Description of Artificial Sequence: Synthetic oligonucleotide
gacuucuccuucuugggag

SEQ ID NO: 1820305 - RNA, 19 nt, Artificial Sequence
  Description of Artificial Sequence: Synthetic oligonucleotide
uguaggccugcacagcccg

SEQ ID NO: 1820306 - RNA, 19 nt, Artificial Sequence
  Description of Artificial Sequence: Synthetic oligonucleotide
aagggguugaguucuuucu

SEQ ID NO: 1820307 - RNA, 19 nt, Artificial Sequence
  Description of Artificial Sequence: Synthetic oligonucleotide
uugaguucuuucuacagua

SEQ ID NO: 1820308 - RNA, 19 nt, Artificial Sequence
  Description of Artificial Sequence: Synthetic oligonucleotide
cucagggaaaacaccagcc

SEQ ID NO: 1820309 - RNA, 19 nt, Artificial Sequence
  Description of Artificial Sequence: Synthetic oligonucleotide
uccgcauaaucucucggag

SEQ ID NO: 1820310 - RNA, 19 nt, Artificial Sequence
  Description of Artificial Sequence: Synthetic oligonucleotide
gauggagucagggacacac

SEQ ID NO: 1820311 - RNA, 19 nt, Artificial Sequence
  Description of Artificial Sequence: Synthetic oligonucleotide
ucuugaaagccaucugggc

SEQ ID NO: 1820312 - RNA, 19 nt, Artificial Sequence
  Description of Artificial Sequence: Synthetic oligonucleotide
cuguguaagugucacuucc

SEQ ID NO: 1820313 - RNA, 19 nt, Artificial Sequence
  Description of Artificial Sequence: Synthetic oligonucleotide
cuugguaaggaacagcaca

SEQ ID NO: 1820314 - RNA, 19 nt, Artificial Sequence
  Description of Artificial Sequence: Synthetic oligonucleotide
aguucuuucuacaguaguc

SEQ ID NO: 1820315 - RNA, 19 nt, Artificial Sequence
  Description of Artificial Sequence: Synthetic oligonucleotide
gguggucacucuuaaaagg

SEQ ID NO: 1820316 - RNA, 19 nt, Artificial Sequence
  Description of Artificial Sequence: Synthetic oligonucleotide
uugaacuuggggacaacga

SEQ ID NO: 1820317 - RNA, 19 nt, Artificial Sequence
  Description of Artificial Sequence: Synthetic oligonucleotide
aacgaugucuggcucuucu

SEQ ID NO: 1820318 - RNA, 19 nt, Artificial Sequence
  Description of Artificial Sequence: Synthetic oligonucleotide
aaaggaauuucuugcucau

SEQ ID NO: 1820319 - RNA, 19 nt, Artificial Sequence
  Description of Artificial Sequence: Synthetic oligonucleotide
ugaacuuggggacaacgau

SEQ ID NO: 1820320 - RNA, 19 nt, Artificial Sequence
  Description of Artificial Sequence: Synthetic oligonucleotide
ugaguucuuucuacaguag

SEQ ID NO: 1820321 - RNA, 19 nt, Artificial Sequence
  Description of Artificial Sequence: Synthetic oligonucleotide
guuuccaggggacuggacc

SEQ ID NO: 1820322 - RNA, 19 nt, Artificial Sequence
  Description of Artificial Sequence: Synthetic oligonucleotide
uuacugagcggcuuucuca

SEQ ID NO: 1820323 - RNA, 19 nt, Artificial Sequence
  Description of Artificial Sequence: Synthetic oligonucleotide
ugguggucacucuuaaaag

SEQ ID NO: 1820324 - RNA, 19 nt, Artificial Sequence
  Description of Artificial Sequence: Synthetic oligonucleotide
caagcaucugcccucgucc

SEQ ID NO: 1820325 - RNA, 19 nt, Artificial Sequence
  Description of Artificial Sequence: Synthetic oligonucleotide
cucuaagccccgcagaccc

SEQ ID NO: 1820326 - RNA, 19 nt, Artificial Sequence
  Description of Artificial Sequence: Synthetic oligonucleotide
uugguaaggaacagcacau

SEQ ID NO: 1820327 - RNA, 19 nt, Artificial Sequence
  Description of Artificial Sequence: Synthetic oligonucleotide
ucgagcgugcgucuguccg

SEQ ID NO: 1820328 - RNA, 19 nt, Artificial Sequence
  Description of Artificial Sequence: Synthetic oligonucleotide
uuucagaguaaagcuaggc

SEQ ID NO: 1820329 - RNA, 19 nt, Artificial Sequence
  Description of Artificial Sequence: Synthetic oligonucleotide
uguaggccacaucagacuc

SEQ ID NO: 1820330 - RNA, 19 nt, Artificial Sequence
  Description of Artificial Sequence: Synthetic oligonucleotide
uuagcgacuucuugccagg

SEQ ID NO: 1820331 - RNA, 19 nt, Artificial Sequence
  Description of Artificial Sequence: Synthetic oligonucleotide
acucuuaaaaggggaaggg

SEQ ID NO: 1820332 - RNA, 19 nt, Artificial Sequence
  Description of Artificial Sequence: Synthetic oligonucleotide
uuuagcaacuccugcucca

SEQ ID NO: 1820333 - RNA, 19 nt, Artificial Sequence
  Description of Artificial Sequence: Synthetic oligonucleotide
cuaggcucagggaaaacac

SEQ ID NO: 1820334 - RNA, 19 nt, Artificial Sequence
  Description of Artificial Sequence: Synthetic oligonucleotide
uggagucagggacacacca

SEQ ID NO: 1820335 - RNA, 19 nt, Artificial Sequence
  Description of Artificial Sequence: Synthetic oligonucleotide
aagucgccgcuuuuggaag

SEQ ID NO: 1820336 - RNA, 19 nt, Artificial Sequence
  Description of Artificial Sequence: Synthetic oligonucleotide
gucucugaaucauagacaa

SEQ ID NO: 1820337 - RNA, 19 nt, Artificial Sequence
  Description of Artificial Sequence: Synthetic oligonucleotide
uuguuucagaguaaagcua

SEQ ID NO: 1820338 - RNA, 19 nt, Artificial Sequence
  Description of Artificial Sequence: Synthetic oligonucleotide
cucuguaugagauagaauu

SEQ ID NO: 1820339 - RNA, 19 nt, Artificial Sequence
  Description of Artificial Sequence: Synthetic oligonucleotide
gaugucuggcucuucuccc

SEQ ID NO: 1820340 - RNA, 19 nt, Artificial Sequence
  Description of Artificial Sequence: Synthetic oligonucleotide
ugugucucaggcaagucuu

SEQ ID NO: 1820341 - RNA, 19 nt, Artificial Sequence
  Description of Artificial Sequence: Synthetic oligonucleotide
cacucuuaaaaggggaagg

SEQ ID NO: 1820342 - RNA, 19 nt, Artificial Sequence
  Description of Artificial Sequence: Synthetic oligonucleotide
agcacaacuucuccaaacu

SEQ ID NO: 1820343 - RNA, 19 nt, Artificial Sequence
  Description of Artificial Sequence: Synthetic oligonucleotide
gguaaggaacagcacaugc

SEQ ID NO: 1820344 - RNA, 19 nt, Artificial Sequence
  Description of Artificial Sequence: Synthetic oligonucleotide
ucacucuuaaaaggggaag

SEQ ID NO: 1820345 - RNA, 19 nt, Artificial Sequence
  Description of Artificial Sequence: Synthetic oligonucleotide
uguguaagugucacuuccu

SEQ ID NO: 1820346 - RNA, 19 nt, Artificial Sequence
  Description of Artificial Sequence: Synthetic oligonucleotide
augcguuggauguaggcca

SEQ ID NO: 1820347 - RNA, 19 nt, Artificial Sequence
  Description of Artificial Sequence: Synthetic oligonucleotide
aacaccagccaucccuucu

SEQ ID NO: 1820348 - RNA, 19 nt, Artificial Sequence
  Description of Artificial Sequence: Synthetic oligonucleotide
uucccugagacuuguuuca

SEQ ID NO: 1820349 - RNA, 19 nt, Artificial Sequence
  Description of Artificial Sequence: Synthetic oligonucleotide
caugcguuggauguaggcc

SEQ ID NO: 1820350 - RNA, 19 nt, Artificial Sequence
  Description of Artificial Sequence: Synthetic oligonucleotide
aucagcuggauuaaggggu

SEQ ID NO: 1820351 - RNA, 19 nt, Artificial Sequence
  Description of Artificial Sequence: Synthetic oligonucleotide
uguccggggccucuaagcc

SEQ ID NO: 1820352 - RNA, 19 nt, Artificial Sequence
  Description of Artificial Sequence: Synthetic oligonucleotide
caaugucuucuugaaagcc

SEQ ID NO: 1820353 - RNA, 19 nt, Artificial Sequence
  Description of Artificial Sequence: Synthetic oligonucleotide
cuuucucaucuccugucgg

SEQ ID NO: 1820354 - RNA, 19 nt, Artificial Sequence
  Description of Artificial Sequence: Synthetic oligonucleotide
gauagaauucauugguggu

SEQ ID NO: 1820355 - RNA, 19 nt, Artificial Sequence
  Description of Artificial Sequence: Synthetic oligonucleotide
gaacuuggggacaacgaug

SEQ ID NO: 1820356 - RNA, 19 nt, Artificial Sequence
  Description of Artificial Sequence: Synthetic oligonucleotide
ucccuuugcuuccuuuucc

SEQ ID NO: 1820357 - RNA, 19 nt, Artificial Sequence
  Description of Artificial Sequence: Synthetic oligonucleotide
gguggauggagucagggac

SEQ ID NO: 1820358 - RNA, 19 nt, Artificial Sequence
  Description of Artificial Sequence: Synthetic oligonucleotide
acaagucuggggcuuucuc

SEQ ID NO: 1820359 - RNA, 19 nt, Artificial Sequence
  Description of Artificial Sequence: Synthetic oligonucleotide
ugucacuuccugucgcugc

SEQ ID NO: 1820360 - RNA, 19 nt, Artificial Sequence
  Description of Artificial Sequence: Synthetic oligonucleotide
ucucugaaucauagacaag

SEQ ID NO: 1820361 - RNA, 19 nt, Artificial Sequence
  Description of Artificial Sequence: Synthetic oligonucleotide
cacccaaaagcaucuuuag

SEQ ID NO: 1820362 - RNA, 19 nt, Artificial Sequence
  Description of Artificial Sequence: Synthetic oligonucleotide
ugguucuugggcuugcaau

SEQ ID NO: 1820363 - RNA, 19 nt, Artificial Sequence
  Description of Artificial Sequence: Synthetic oligonucleotide
uuugccacugcugcgcgcc

SEQ ID NO: 1820364 - RNA, 19 nt, Artificial Sequence
  Description of Artificial Sequence: Synthetic oligonucleotide
agaauucauugguggucac

SEQ ID NO: 1820365 - RNA, 19 nt, Artificial Sequence
  Description of Artificial Sequence: Synthetic oligonucleotide
uccuuugcuugaacuuggg

SEQ ID NO: 1820366 - RNA, 19 nt, Artificial Sequence
  Description of Artificial Sequence: Synthetic oligonucleotide
cuuaggggaacuugcucug

SEQ ID NO: 1820367 - RNA, 19 nt, Artificial Sequence
  Description of Artificial Sequence: Synthetic oligonucleotide
uccggggccucuaagcccc

SEQ ID NO: 1820368 - RNA, 19 nt, Artificial Sequence
  Description of Artificial Sequence: Synthetic oligonucleotide
ucuuuuccgugcugcgccg

SEQ ID NO: 1820369 - RNA, 19 nt, Artificial Sequence
  Description of Artificial Sequence: Synthetic oligonucleotide
ccggaaaggaauuucuugc

SEQ ID NO: 1820370 - RNA, 19 nt, Artificial Sequence
  Description of Artificial Sequence: Synthetic oligonucleotide
agggacaagcaucugcccu

SEQ ID NO: 1820371 - RNA, 19 nt, Artificial Sequence
  Description of Artificial Sequence: Synthetic oligonucleotide
uucauugguggucacucuu

SEQ ID NO: 1820372 - RNA, 19 nt, Artificial Sequence
  Description of Artificial Sequence: Synthetic oligonucleotide
ugucggcuccgcauaaucu

SEQ ID NO: 1820373 - RNA, 19 nt, Artificial Sequence
  Description of Artificial Sequence: Synthetic oligonucleotide
aacuugcucuguaugagau

SEQ ID NO: 1820374 - RNA, 19 nt, Artificial Sequence
  Description of Artificial Sequence: Synthetic oligonucleotide
gauuaagggguugaguucu

SEQ ID NO: 1820375 - RNA, 19 nt, Artificial Sequence
  Description of Artificial Sequence: Synthetic oligonucleotide
aaucucucggagccggaaa

SEQ ID NO: 1820376 - RNA, 19 nt, Artificial Sequence
  Description of Artificial Sequence: Synthetic oligonucleotide
gucucaggcaagucuuagg

SEQ ID NO: 1820377 - RNA, 19 nt, Artificial Sequence
  Description of Artificial Sequence: Synthetic oligonucleotide
gcaucuuuagcauuagcga

SEQ ID NO: 1820378 - RNA, 19 nt, Artificial Sequence
  Description of Artificial Sequence: Synthetic oligonucleotide
ccugagacuuguuucagag

SEQ ID NO: 1820379 - RNA, 19 nt, Artificial Sequence
  Description of Artificial Sequence: Synthetic oligonucleotide
uugggcuugcaauucacuu

SEQ ID NO: 1820380 - RNA, 19 nt, Artificial Sequence
  Description of Artificial Sequence: Synthetic oligonucleotide
cuugccaggugcaucucug

SEQ ID NO: 1820381 - RNA, 19 nt, Artificial Sequence
  Description of Artificial Sequence: Synthetic oligonucleotide
aaagcuaggcucagggaaa

SEQ ID NO: 1820382 - RNA, 19 nt, Artificial Sequence
  Description of Artificial Sequence: Synthetic oligonucleotide
cuguaugagauagaauuca

SEQ ID NO: 1820383 - RNA, 19 nt, Artificial Sequence
  Description of Artificial Sequence: Synthetic oligonucleotide
gaacuugcucuguaugaga

SEQ ID NO: 1820384 - RNA, 19 nt, Artificial Sequence
  Description of Artificial Sequence: Synthetic oligonucleotide
ucauugguggucacucuua

SEQ ID NO: 1820385 - RNA, 19 nt, Artificial Sequence
  Description of Artificial Sequence: Synthetic oligonucleotide
cucugaaucauagacaagu

SEQ ID NO: 1820386 - RNA, 19 nt, Artificial Sequence
  Description of Artificial Sequence: Synthetic oligonucleotide
cuacaguaguccuggcuug

SEQ ID NO: 1820387 - RNA, 19 nt, Artificial Sequence
  Description of Artificial Sequence: Synthetic oligonucleotide
ucuaagccccgcagacccg

SEQ ID NO: 1820388 - RNA, 19 nt, Artificial Sequence
  Description of Artificial Sequence: Synthetic oligonucleotide
gcauuagcgacuucuugcc

SEQ ID NO: 1820389 - RNA, 19 nt, Artificial Sequence
  Description of Artificial Sequence: Synthetic oligonucleotide
uacugagcggcuuucucau

SEQ ID NO: 1820390 - RNA, 19 nt, Artificial Sequence
  Description of Artificial Sequence: Synthetic oligonucleotide
ucuccuucuugggagcugc

SEQ ID NO: 1820391 - RNA, 19 nt, Artificial Sequence
  Description of Artificial Sequence: Synthetic oligonucleotide
cagcacaacuucuccaaac

SEQ ID NO: 1820392 - RNA, 19 nt, Artificial Sequence
  Description of Artificial Sequence: Synthetic oligonucleotide
ugucucaggcaagucuuag

SEQ ID NO: 1820393 - RNA, 19 nt, Artificial Sequence
  Description of Artificial Sequence: Synthetic oligonucleotide
acgaugucuggcucuucuc

SEQ ID NO: 1820394 - RNA, 19 nt, Artificial Sequence
  Description of Artificial Sequence: Synthetic oligonucleotide
ucuguccggggccucuaag

SEQ ID NO: 1820395 - RNA, 19 nt, Artificial Sequence
  Description of Artificial Sequence: Synthetic oligonucleotide
agucgccgcuuuuggaagg

SEQ ID NO: 1820396 - RNA, 19 nt, Artificial Sequence
  Description of Artificial Sequence: Synthetic oligonucleotide
cuuuugccacugcugcgcg

SEQ ID NO: 1820397 - RNA, 19 nt, Artificial Sequence
  Description of Artificial Sequence: Synthetic oligonucleotide
ugggcuugcaauucacuuu

SEQ ID NO: 1820398 - RNA, 19 nt, Artificial Sequence
  Description of Artificial Sequence: Synthetic oligonucleotide
ucggcuccgcauaaucucu

SEQ ID NO: 1820399 - RNA, 19 nt, Artificial Sequence
  Description of Artificial Sequence: Synthetic oligonucleotide
ugcaauucacuuucuucuu

SEQ ID NO: 1820400 - RNA, 19 nt, Artificial Sequence
  Description of Artificial Sequence: Synthetic oligonucleotide
ucucucggagccggaaagg

SEQ ID NO: 1820401 - RNA, 19 nt, Artificial Sequence
  Description of Artificial Sequence: Synthetic oligonucleotide
uccaugcguuggauguagg

SEQ ID NO: 1820402 - RNA, 19 nt, Artificial Sequence
  Description of Artificial Sequence: Synthetic oligonucleotide
gcgacuucuugccaggugc

SEQ ID NO: 1820403 - RNA, 19 nt, Artificial Sequence
  Description of Artificial Sequence: Synthetic oligonucleotide
agacuccccuuuccuuugc

SEQ ID NO: 1820404 - RNA, 19 nt, Artificial Sequence
  Description of Artificial Sequence: Synthetic oligonucleotide
auucauugguggucacucu

SEQ ID NO: 1820405 - RNA, 19 nt, Artificial Sequence
  Description of Artificial Sequence: Synthetic oligonucleotide
uucuuguuacugagcggcu

SEQ ID NO: 1820406 - RNA, 19 nt, Artificial Sequence
  Description of Artificial Sequence: Synthetic oligonucleotide
cgcauaaucucucggagcc

SEQ ID NO: 1820407 - RNA, 19 nt, Artificial Sequence
  Description of Artificial Sequence: Synthetic oligonucleotide
uucuugggagcugcuugcg

SEQ ID NO: 1820408 - RNA, 19 nt, Artificial Sequence
  Description of Artificial Sequence: Synthetic oligonucleotide
uucucaucuccugucggcu

SEQ ID NO: 1820409 - RNA, 19 nt, Artificial Sequence
  Description of Artificial Sequence: Synthetic oligonucleotide
guuacugagcggcuuucuc

SEQ ID NO: 1820410 - RNA, 19 nt, Artificial Sequence
  Description of Artificial Sequence: Synthetic oligonucleotide
ucuccugucggcuccgcau

SEQ ID NO: 1820411 - RNA, 19 nt, Artificial Sequence
  Description of Artificial Sequence: Synthetic oligonucleotide
ugccgaguggccugguucu

SEQ ID NO: 1820412 - RNA, 19 nt, Artificial Sequence
  Description of Artificial Sequence: Synthetic oligonucleotide
ggucuagcagcucccaggc

SEQ ID NO: 1820413 - RNA, 19 nt, Artificial Sequence
  Description of Artificial Sequence: Synthetic oligonucleotide
accuacaucagcagcuuca

SEQ ID NO: 1820414 - RNA, 19 nt, Artificial Sequence
  Description of Artificial Sequence: Synthetic oligonucleotide
gaguaaagcuaggcucagg

SEQ ID NO: 1820415 - RNA, 19 nt, Artificial Sequence
  Description of Artificial Sequence: Synthetic oligonucleotide
agcgcugcuguccccgcgg

SEQ ID NO: 1820416 - RNA, 19 nt, Artificial Sequence
  Description of Artificial Sequence: Synthetic oligonucleotide
ccaaugucuucuugaaagc

SEQ ID NO: 1820417 - RNA, 19 nt, Artificial Sequence
  Description of Artificial Sequence: Synthetic oligonucleotide
gggaaaacaccagccaucc

SEQ ID NO: 1820418 - RNA, 19 nt, Artificial Sequence
  Description of Artificial Sequence: Synthetic oligonucleotide
ggaaaggaauuucuugcuc

SEQ ID NO: 1820419 - RNA, 19 nt, Artificial Sequence
  Description of Artificial Sequence: Synthetic oligonucleotide
ggacacaccaccagcaccc

SEQ ID NO: 1820420 - RNA, 19 nt, Artificial Sequence
  Description of Artificial Sequence: Synthetic oligonucleotide
caagucgccgcuuuuggaa

SEQ ID NO: 1820421 - RNA, 19 nt, Artificial Sequence
  Description of Artificial Sequence: Synthetic oligonucleotide
ugcacagcccguucccucu

SEQ ID NO: 1820422 - RNA, 19 nt, Artificial Sequence
  Description of Artificial Sequence: Synthetic oligonucleotide
ugguaaggaacagcacaug

SEQ ID NO: 1820423 - RNA, 19 nt, Artificial Sequence
  Description of Artificial Sequence: Synthetic oligonucleotide
gucggcuccgcauaaucuc

SEQ ID NO: 1820424 - RNA, 19 nt, Artificial Sequence
  Description of Artificial Sequence: Synthetic oligonucleotide
agaguaaagcuaggcucag

SEQ ID NO: 1820425 - RNA, 19 nt, Artificial Sequence
  Description of Artificial Sequence: Synthetic oligonucleotide
ggauuaagggguugaguuc

SEQ ID NO: 1820426 - RNA, 19 nt, Artificial Sequence
  Description of Artificial Sequence: Synthetic oligonucleotide
agugagguggauggaguca

SEQ ID NO: 1820427 - RNA, 19 nt, Artificial Sequence
  Description of Artificial Sequence: Synthetic oligonucleotide
cugcuugcgccucuggcug

SEQ ID NO: 1820428 - RNA, 19 nt, Artificial Sequence
  Description of Artificial Sequence: Synthetic oligonucleotide
ucuguccacugcucuugcc

SEQ ID NO: 1820429 - RNA, 19 nt, Artificial Sequence
  Description of Artificial Sequence: Synthetic oligonucleotide
cuaagccccgcagacccgg

SEQ ID NO: 1820430 - RNA, 19 nt, Artificial Sequence
  Description of Artificial Sequence: Synthetic oligonucleotide
ugcguuggauguaggccac

SEQ ID NO: 1820431 - RNA, 19 nt, Artificial Sequence
  Description of Artificial Sequence: Synthetic oligonucleotide
uugcucauccugguucuug

SEQ ID NO: 1820432 - RNA, 19 nt, Artificial Sequence
  Description of Artificial Sequence: Synthetic oligonucleotide
cugaaucauagacaagucu

SEQ ID NO: 1820433 - RNA, 19 nt, Artificial Sequence
  Description of Artificial Sequence: Synthetic oligonucleotide
cuucagggcucuguaggcc

SEQ ID NO: 1820434 - RNA, 19 nt, Artificial Sequence
  Description of Artificial Sequence: Synthetic oligonucleotide
gucuuaggggaacuugcuc

SEQ ID NO: 1820435 - RNA, 19 nt, Artificial Sequence
  Description of Artificial Sequence: Synthetic oligonucleotide
aggcaagucuuaggggaac

SEQ ID NO: 1820436 - RNA, 19 nt, Artificial Sequence
  Description of Artificial Sequence: Synthetic oligonucleotide
gugucuuuuagcaacuccu

SEQ ID NO: 1820437 - RNA, 19 nt, Artificial Sequence
  Description of Artificial Sequence: Synthetic oligonucleotide
gagcggcuuucucaucucc

SEQ ID NO: 1820438 - RNA, 19 nt, Artificial Sequence
  Description of Artificial Sequence: Synthetic oligonucleotide
cugaccuacaucagcagcu

SEQ ID NO: 1820439 - RNA, 19 nt, Artificial Sequence
  Description of Artificial Sequence: Synthetic oligonucleotide
agcgacuucuugccaggug

SEQ ID NO: 1820440 - RNA, 19 nt, Artificial Sequence
  Description of Artificial Sequence: Synthetic oligonucleotide
uggccugguucuugguaag

SEQ ID NO: 1820441 - RNA, 19 nt, Artificial Sequence
  Description of Artificial Sequence: Synthetic oligonucleotide
uccagucuguccacugcuc

SEQ ID NO: 1820442 - RNA, 19 nt, Artificial Sequence
  Description of Artificial Sequence: Synthetic oligonucleotide
uuuugccacugcugcgcgc

SEQ ID NO: 1820443 - RNA, 19 nt, Artificial Sequence
  Description of Artificial Sequence: Synthetic oligonucleotide
cuccgcauaaucucucgga

SEQ ID NO: 1820444 - RNA, 19 nt, Artificial Sequence
  Description of Artificial Sequence: Synthetic oligonucleotide
uguuacugagcggcuuucu

SEQ ID NO: 1820445 - RNA, 19 nt, Artificial Sequence
  Description of Artificial Sequence: Synthetic oligonucleotide
ggauguaggccacaucaga

SEQ ID NO: 1820446 - RNA, 19 nt, Artificial Sequence
  Description of Artificial Sequence: Synthetic oligonucleotide
agcacccaaaagcaucuuu

SEQ ID NO: 1820447 - RNA, 19 nt, Artificial Sequence
  Description of Artificial Sequence: Synthetic oligonucleotide
gacaacgaugucuggcucu

SEQ ID NO: 1820448 - RNA, 19 nt, Artificial Sequence
  Description of Artificial Sequence: Synthetic oligonucleotide
uuccgugcugcgccguccc

SEQ ID NO: 1820449 - RNA, 19 nt, Artificial Sequence
  Description of Artificial Sequence: Synthetic oligonucleotide
gcucuguaggccugcacag

SEQ ID NO: 1820450 - RNA, 19 nt, Artificial Sequence
  Description of Artificial Sequence: Synthetic oligonucleotide
agggguugaguucuuucua

SEQ ID NO: 1820451 - RNA, 19 nt, Artificial Sequence
  Description of Artificial Sequence: Synthetic oligonucleotide
cuccaugcguuggauguag

SEQ ID NO: 1820452 - RNA, 19 nt, Artificial Sequence
  Description of Artificial Sequence: Synthetic oligonucleotide
gggguugaguucuuucuac

SEQ ID NO: 1820453 - RNA, 19 nt, Artificial Sequence
  Description of Artificial Sequence: Synthetic oligonucleotide
cagggacaagcaucugccc

SEQ ID NO: 1820454 - RNA, 19 nt, Artificial Sequence
  Description of Artificial Sequence: Synthetic oligonucleotide
uaggggaacuugcucugua

SEQ ID NO: 1820455 - RNA, 19 nt, Artificial Sequence
  Description of Artificial Sequence: Synthetic oligonucleotide
ugccgagcgcugcuguccc

SEQ ID NO: 1820456 - RNA, 19 nt, Artificial Sequence
  Description of Artificial Sequence: Synthetic oligonucleotide
ggcucuguaggccugcaca

SEQ ID NO: 1820457 - RNA, 19 nt, Artificial Sequence
  Description of Artificial Sequence: Synthetic oligonucleotide
gagcgugcgucuguccggg

SEQ ID NO: 1820458 - RNA, 19 nt, Artificial Sequence
  Description of Artificial Sequence: Synthetic oligonucleotide
uggggacaacgaugucugg

SEQ ID NO: 1820459 - RNA, 19 nt, Artificial Sequence
  Description of Artificial Sequence: Synthetic oligonucleotide
uacaguaguccuggcuugu

SEQ ID NO: 1820460 - RNA, 19 nt, Artificial Sequence
  Description of Artificial Sequence: Synthetic oligonucleotide
uugcuugaacuuggggaca

SEQ ID NO: 1820461 - RNA, 19 nt, Artificial Sequence
  Description of Artificial Sequence: Synthetic oligonucleotide
guaaggaacagcacaugcu

SEQ ID NO: 1820462 - RNA, 19 nt, Artificial Sequence
  Description of Artificial Sequence: Synthetic oligonucleotide
agucuuaggggaacuugcu

SEQ ID NO: 1820463 - RNA, 19 nt, Artificial Sequence
  Description of Artificial Sequence: Synthetic oligonucleotide
gggacacaccaccagcacc

SEQ ID NO: 1820464 - RNA, 19 nt, Artificial Sequence
  Description of Artificial Sequence: Synthetic oligonucleotide
ucuuguuacugagcggcuu

SEQ ID NO: 1820465 - RNA, 19 nt, Artificial Sequence
  Description of Artificial Sequence: Synthetic oligonucleotide
auagacaagucuggggcuu

SEQ ID NO: 1820466 - RNA, 19 nt, Artificial Sequence
  Description of Artificial Sequence: Synthetic oligonucleotide
aggggaacuugcucuguau

SEQ ID NO: 1820467 - RNA, 19 nt, Artificial Sequence
  Description of Artificial Sequence: Synthetic oligonucleotide
cagacuccccuuuccuuug

SEQ ID NO: 1820468 - RNA, 19 nt, Artificial Sequence
  Description of Artificial Sequence: Synthetic oligonucleotide
uaaucucucggagccggaa

SEQ ID NO: 1820469 - RNA, 19 nt, Artificial Sequence
  Description of Artificial Sequence: Synthetic oligonucleotide
cugucggcuccgcauaauc

SEQ ID NO: 1820470 - RNA, 19 nt, Artificial Sequence
  Description of Artificial Sequence: Synthetic oligonucleotide
uuuuccgugcugcgccguc

SEQ ID NO: 1820471 - RNA, 19 nt, Artificial Sequence
  Description of Artificial Sequence: Synthetic oligonucleotide
agcuggauuaagggguuga

SEQ ID NO: 1820472 - RNA, 19 nt, Artificial Sequence
  Description of Artificial Sequence: Synthetic oligonucleotide
cauccagggacaagcaucu

SEQ ID NO: 1820473 - RNA, 19 nt, Artificial Sequence
  Description of Artificial Sequence: Synthetic oligonucleotide
aagcuaggcucagggaaaa

SEQ ID NO: 1820474 - RNA, 19 nt, Artificial Sequence
  Description of Artificial Sequence: Synthetic oligonucleotide
ccuuugcuugaacuugggg

SEQ ID NO: 1820475 - RNA, 19 nt, Artificial Sequence
  Description of Artificial Sequence: Synthetic oligonucleotide
uuuccgugcugcgccgucc

SEQ ID NO: 1820476 - RNA, 19 nt, Artificial Sequence
  Description of Artificial Sequence: Synthetic oligonucleotide
guaggccacaucagacucc

SEQ ID NO: 1820477 - RNA, 19 nt, Artificial Sequence
  Description of Artificial Sequence: Synthetic oligonucleotide
uuaggggaacuugcucugu

SEQ ID NO: 1820478 - RNA, 19 nt, Artificial Sequence
  Description of Artificial Sequence: Synthetic oligonucleotide
aggccaguuuccaggggac

SEQ ID NO: 1820479 - RNA, 19 nt, Artificial Sequence
  Description of Artificial Sequence: Synthetic oligonucleotide
guuggauguaggccacauc

SEQ ID NO: 1820480 - RNA, 19 nt, Artificial Sequence
  Description of Artificial Sequence: Synthetic oligonucleotide
ggucucugaaucauagaca

SEQ ID NO: 1820481 - RNA, 19 nt, Artificial Sequence
  Description of Artificial Sequence: Synthetic oligonucleotide
cagacccggcuuuugccac

SEQ ID NO: 1820482 - RNA, 19 nt, Artificial Sequence
  Description of Artificial Sequence: Synthetic oligonucleotide
ggcuccgcauaaucucucg

SEQ ID NO: 1820483 - RNA, 19 nt, Artificial Sequence
  Description of Artificial Sequence: Synthetic oligonucleotide
gggacaagcaucugcccuc

SEQ ID NO: 1820484 - RNA, 19 nt, Artificial Sequence
  Description of Artificial Sequence: Synthetic oligonucleotide
ccaugcguuggauguaggc

SEQ ID NO: 1820485 - RNA, 19 nt, Artificial Sequence
  Description of Artificial Sequence: Synthetic oligonucleotide
guucuugggcuugcaauuc

SEQ ID NO: 1820486 - RNA, 19 nt, Artificial Sequence
  Description of Artificial Sequence: Synthetic oligonucleotide
ucggagccggaaaggaauu

SEQ ID NO: 1820487 - RNA, 19 nt, Artificial Sequence
  Description of Artificial Sequence: Synthetic oligonucleotide
gaccuacaucagcagcuuc

SEQ ID NO: 1820488 - RNA, 19 nt, Artificial Sequence
  Description of Artificial Sequence: Synthetic oligonucleotide
ggggacaacgaugucuggc

SEQ ID NO: 1820489 - RNA, 19 nt, Artificial Sequence
  Description of Artificial Sequence: Synthetic oligonucleotide
gcuccgcauaaucucucgg

SEQ ID NO: 1820490 - RNA, 19 nt, Artificial Sequence
  Description of Artificial Sequence: Synthetic oligonucleotide
ugagcggcuuucucaucuc

SEQ ID NO: 1820491 - RNA, 19 nt, Artificial Sequence
  Description of Artificial Sequence: Synthetic oligonucleotide
uuguuacugagcggcuuuc

SEQ ID NO: 1820492 - RNA, 19 nt, Artificial Sequence
  Description of Artificial Sequence: Synthetic oligonucleotide
agacaagucuggggcuuuc

SEQ ID NO: 1820493 - RNA, 19 nt, Artificial Sequence
  Description of Artificial Sequence: Synthetic oligonucleotide
caagucuggggcuuucucu

SEQ ID NO: 1820494 - RNA, 19 nt, Artificial Sequence
  Description of Artificial Sequence: Synthetic oligonucleotide
agcaucugcccucgucccu

SEQ ID NO: 1820495 - RNA, 19 nt, Artificial Sequence
  Description of Artificial Sequence: Synthetic oligonucleotide
cauagacaagucuggggcu

SEQ ID NO: 1820496 - RNA, 19 nt, Artificial Sequence
  Description of Artificial Sequence: Synthetic oligonucleotide
gagacuuguuucagaguaa

SEQ ID NO: 1820497 - RNA, 19 nt, Artificial Sequence
  Description of Artificial Sequence: Synthetic oligonucleotide
ccgcauaaucucucggagc

SEQ ID NO: 1820498 - RNA, 19 nt, Artificial Sequence
  Description of Artificial Sequence: Synthetic oligonucleotide
gggacuggaccccaagguc

SEQ ID NO: 1820499 - RNA, 19 nt, Artificial Sequence
  Description of Artificial Sequence: Synthetic oligonucleotide
gaauucauugguggucacu

SEQ ID NO: 1820500 - RNA, 19 nt, Artificial Sequence
  Description of Artificial Sequence: Synthetic oligonucleotide
uccgugcugcgccgucccg

SEQ ID NO: 1820501 - RNA, 19 nt, Artificial Sequence
  Description of Artificial Sequence: Synthetic oligonucleotide
cauuagcgacuucuugcca

SEQ ID NO: 1820502 - RNA, 19 nt, Artificial Sequence
  Description of Artificial Sequence: Synthetic oligonucleotide
aggugcaucucugccugug

SEQ ID NO: 1820503 - RNA, 19 nt, Artificial Sequence
  Description of Artificial Sequence: Synthetic oligonucleotide
uuccaggggacuggacccc

SEQ ID NO: 1820504 - RNA, 19 nt, Artificial Sequence
  Description of Artificial Sequence: Synthetic oligonucleotide
cauugguggucacucuuaa

SEQ ID NO: 1820505 - RNA, 19 nt, Artificial Sequence
  Description of Artificial Sequence: Synthetic oligonucleotide
agcuaggcucagggaaaac

SEQ ID NO: 1820506 - RNA, 19 nt, Artificial Sequence
  Description of Artificial Sequence: Synthetic oligonucleotide
gagcgcugcuguccccgcg

SEQ ID NO: 1820507 - RNA, 19 nt, Artificial Sequence
  Description of Artificial Sequence: Synthetic oligonucleotide
ucugggccuccuuccuucu

SEQ ID NO: 1820508 - RNA, 19 nt, Artificial Sequence
  Description of Artificial Sequence: Synthetic oligonucleotide
uuaagggguugaguucuuu

SEQ ID NO: 1820509 - RNA, 19 nt, Artificial Sequence
  Description of Artificial Sequence: Synthetic oligonucleotide
gcuaggcucagggaaaaca

SEQ ID NO: 1820510 - RNA, 19 nt, Artificial Sequence
  Description of Artificial Sequence: Synthetic oligonucleotide
cgaugucuggcucuucucc

SEQ ID NO: 1820511 - RNA, 19 nt, Artificial Sequence
  Description of Artificial Sequence: Synthetic oligonucleotide
uccugucggcuccgcauaa

SEQ ID NO: 1820512 - RNA, 19 nt, Artificial Sequence
  Description of Artificial Sequence: Synthetic oligonucleotide
gccucuaagccccgcagac

SEQ ID NO: 1820513 - RNA, 19 nt, Artificial Sequence
  Description of Artificial Sequence: Synthetic oligonucleotide
ggguugaguucuuucuaca

SEQ ID NO: 1820514 - RNA, 19 nt, Artificial Sequence
  Description of Artificial Sequence: Synthetic oligonucleotide
cugccgagcgcugcugucc

SEQ ID NO: 1820515 - RNA, 19 nt, Artificial Sequence
  Description of Artificial Sequence: Synthetic oligonucleotide
cccaggauccgcuggcggg

SEQ ID NO: 1820516 - RNA, 19 nt, Artificial Sequence
  Description of Artificial Sequence: Synthetic oligonucleotide
acaacgaugucuggcucuu

SEQ ID NO: 1820517 - RNA, 19 nt, Artificial Sequence
  Description of Artificial Sequence: Synthetic oligonucleotide
cccauauugaaagcuugug

SEQ ID NO: 1820518 - RNA, 19 nt, Artificial Sequence
  Description of Artificial Sequence: Synthetic oligonucleotide
gccagugagguggauggag

SEQ ID NO: 1820519 - RNA, 19 nt, Artificial Sequence
  Description of Artificial Sequence: Synthetic oligonucleotide
cuggggcuuucucugagaa

SEQ ID NO: 1820520 - RNA, 19 nt, Artificial Sequence
  Description of Artificial Sequence: Synthetic oligonucleotide
gcggcuuucucaucuccug

SEQ ID NO: 1820521 - RNA, 19 nt, Artificial Sequence
  Description of Artificial Sequence: Synthetic oligonucleotide
cucggagccggaaaggaau

SEQ ID NO: 1820522 - RNA, 19 nt, Artificial Sequence
  Description of Artificial Sequence: Synthetic oligonucleotide
gcuccugccgucgagcgug

SEQ ID NO: 1820523 - RNA, 19 nt, Artificial Sequence
  Description of Artificial Sequence: Synthetic oligonucleotide
gggacaacgaugucuggcu

SEQ ID NO: 1820524 - RNA, 19 nt, Artificial Sequence
  Description of Artificial Sequence: Synthetic oligonucleotide
uugcgccucuggcugccga

SEQ ID NO: 1820525 - RNA, 19 nt, Artificial Sequence
  Description of Artificial Sequence: Synthetic oligonucleotide
agcggcuuucucaucuccu

SEQ ID NO: 1820526 - RNA, 19 nt, Artificial Sequence
  Description of Artificial Sequence: Synthetic oligonucleotide
ugggcuggaccgucagguc

SEQ ID NO: 1820527 - RNA, 19 nt, Artificial Sequence
  Description of Artificial Sequence: Synthetic oligonucleotide
gagccggaaaggaauuucu

SEQ ID NO: 1820528 - RNA, 19 nt, Artificial Sequence
  Description of Artificial Sequence: Synthetic oligonucleotide
cagggaaaacaccagccau

SEQ ID NO: 1820529 - RNA, 19 nt, Artificial Sequence
  Description of Artificial Sequence: Synthetic oligonucleotide
ccaguuuccaggggacugg

SEQ ID NO: 1820530 - RNA, 19 nt, Artificial Sequence
  Description of Artificial Sequence: Synthetic oligonucleotide
gucgagcgugcgucugucc

SEQ ID NO: 1820531 - RNA, 19 nt, Artificial Sequence
  Description of Artificial Sequence: Synthetic oligonucleotide
gcagacccggcuuuugcca

SEQ ID NO: 1820532 - RNA, 19 nt, Artificial Sequence
  Description of Artificial Sequence: Synthetic oligonucleotide
ugcugcgcgcccaggucuc

SEQ ID NO: 1820533 - RNA, 19 nt, Artificial Sequence
  Description of Artificial Sequence: Synthetic oligonucleotide
uugccacugcugcgcgccc

SEQ ID NO: 1820534 - RNA, 19 nt, Artificial Sequence
  Description of Artificial Sequence: Synthetic oligonucleotide
uccugucgcugcugcuucu

SEQ ID NO: 1820535 - RNA, 19 nt, Artificial Sequence
  Description of Artificial Sequence: Synthetic oligonucleotide
cucucggagccggaaagga

SEQ ID NO: 1820536 - RNA, 19 nt, Artificial Sequence
  Description of Artificial Sequence: Synthetic oligonucleotide
aggcaucagcuggauuaag

SEQ ID NO: 1820537 - RNA, 19 nt, Artificial Sequence
  Description of Artificial Sequence: Synthetic oligonucleotide
uccaggggacuggacccca

SEQ ID NO: 1820538 - RNA, 19 nt, Artificial Sequence
  Description of Artificial Sequence: Synthetic oligonucleotide
gucgccgcuuuuggaaggc

SEQ ID NO: 1820539 - RNA, 19 nt, Artificial Sequence
  Description of Artificial Sequence: Synthetic oligonucleotide
ggacaacgaugucuggcuc

SEQ ID NO: 1820540 - RNA, 19 nt, Artificial Sequence
  Description of Artificial Sequence: Synthetic oligonucleotide
gacccggcuuuugccacug

SEQ ID NO: 1820541 - RNA, 19 nt, Artificial Sequence
  Description of Artificial Sequence: Synthetic oligonucleotide
uagacaagucuggggcuuu

SEQ ID NO: 1820542 - RNA, 19 nt, Artificial Sequence
  Description of Artificial Sequence: Synthetic oligonucleotide
ggccacaucagacuccccu

SEQ ID NO: 1820543 - RNA, 19 nt, Artificial Sequence
  Description of Artificial Sequence: Synthetic oligonucleotide
cuuguuacugagcggcuuu

SEQ ID NO: 1820544 - RNA, 19 nt, Artificial Sequence
  Description of Artificial Sequence: Synthetic oligonucleotide
ggagucagggacacaccac

SEQ ID NO: 1820545 - RNA, 19 nt, Artificial Sequence
  Description of Artificial Sequence: Synthetic oligonucleotide
uagcgacuucuugccaggu

SEQ ID NO: 1820546 - RNA, 19 nt, Artificial Sequence
  Description of Artificial Sequence: Synthetic oligonucleotide
gcacccaaaagcaucuuua

SEQ ID NO: 1820547 - RNA, 19 nt, Artificial Sequence
  Description of Artificial Sequence: Synthetic oligonucleotide
acacaccaccagcacccaa

SEQ ID NO: 1820548 - RNA, 19 nt, Artificial Sequence
  Description of Artificial Sequence: Synthetic oligonucleotide
uaggccugcacagcccguu

SEQ ID NO: 1820549 - RNA, 19 nt, Artificial Sequence
  Description of Artificial Sequence: Synthetic oligonucleotide
ugccgucgagcgugcgucu

SEQ ID NO: 1820550 - RNA, 19 nt, Artificial Sequence
  Description of Artificial Sequence: Synthetic oligonucleotide
cuggauuaagggguugagu

SEQ ID NO: 1820551 - RNA, 19 nt, Artificial Sequence
  Description of Artificial Sequence: Synthetic oligonucleotide
ggccugguucuugguaagg

SEQ ID NO: 1820552 - RNA, 19 nt, Artificial Sequence
  Description of Artificial Sequence: Synthetic oligonucleotide
gcugcuugcgccucuggcu

SEQ ID NO: 1820553 - RNA, 19 nt, Artificial Sequence
  Description of Artificial Sequence: Synthetic oligonucleotide
ggcuguguaagugucacuu

SEQ ID NO: 1820554 - RNA, 19 nt, Artificial Sequence
  Description of Artificial Sequence: Synthetic oligonucleotide
ggacuggaccccaaggucu

SEQ ID NO: 1820555 - RNA, 19 nt, Artificial Sequence
  Description of Artificial Sequence: Synthetic oligonucleotide
gcgugcgucuguccggggc

SEQ ID NO: 1820556 - RNA, 19 nt, Artificial Sequence
  Description of Artificial Sequence: Synthetic oligonucleotide
agccccgcagacccggcuu

SEQ ID NO: 1820557 - RNA, 19 nt, Artificial Sequence
  Description of Artificial Sequence: Synthetic oligonucleotide
caguaguccuggcuugucu

SEQ ID NO: 1820558 - RNA, 19 nt, Artificial Sequence
  Description of Artificial Sequence: Synthetic oligonucleotide
ccuggcuugucuucccuga

SEQ ID NO: 1820559 - RNA, 19 nt, Artificial Sequence
  Description of Artificial Sequence: Synthetic oligonucleotide
uucuugccaggugcaucuc

SEQ ID NO: 1820560 - RNA, 19 nt, Artificial Sequence
  Description of Artificial Sequence: Synthetic oligonucleotide
auuaagggguugaguucuu

SEQ ID NO: 1820561 - RNA, 19 nt, Artificial Sequence
  Description of Artificial Sequence: Synthetic oligonucleotide
cgcagacccggcuuuugcc

SEQ ID NO: 1820562 - RNA, 19 nt, Artificial Sequence
  Description of Artificial Sequence: Synthetic oligonucleotide
agcacaugcugggccuccu

SEQ ID NO: 1820563 - RNA, 19 nt, Artificial Sequence
  Description of Artificial Sequence: Synthetic oligonucleotide
ggccucuaagccccgcaga

SEQ ID NO: 1820564 - RNA, 19 nt, Artificial Sequence
  Description of Artificial Sequence: Synthetic oligonucleotide
ccucuaagccccgcagacc

SEQ ID NO: 1820565 - RNA, 19 nt, Artificial Sequence
  Description of Artificial Sequence: Synthetic oligonucleotide
caggcaucagcuggauuaa

SEQ ID NO: 1820566 - RNA, 19 nt, Artificial Sequence
  Description of Artificial Sequence: Synthetic oligonucleotide
cuugcgccucuggcugccg

SEQ ID NO: 1820567 - RNA, 19 nt, Artificial Sequence
  Description of Artificial Sequence: Synthetic oligonucleotide
ccaggauccgcuggcgggc

SEQ ID NO: 1820568 - RNA, 19 nt, Artificial Sequence
  Description of Artificial Sequence: Synthetic oligonucleotide
uccugccgucgagcgugcg

SEQ ID NO: 1820569 - RNA, 19 nt, Artificial Sequence
  Description of Artificial Sequence: Synthetic oligonucleotide
cgagcgugcgucuguccgg

SEQ ID NO: 1820570 - RNA, 19 nt, Artificial Sequence
  Description of Artificial Sequence: Synthetic oligonucleotide
aggauccgcuggcgggcca

SEQ ID NO: 1820571 - RNA, 19 nt, Artificial Sequence
  Description of Artificial Sequence: Synthetic oligonucleotide
ucgccgcuuuuggaaggcu

SEQ ID NO: 1820572 - RNA, 19 nt, Artificial Sequence
  Description of Artificial Sequence: Synthetic oligonucleotide
gcaauucacuuucuucuuu

SEQ ID NO: 1820573 - RNA, 19 nt, Artificial Sequence
  Description of Artificial Sequence: Synthetic oligonucleotide
cuccugucggcuccgcaua

SEQ ID NO: 1820574 - RNA, 19 nt, Artificial Sequence
  Description of Artificial Sequence: Synthetic oligonucleotide
caguuuccaggggacugga

SEQ ID NO: 1820575 - RNA, 19 nt, Artificial Sequence
  Description of Artificial Sequence: Synthetic oligonucleotide
cugggccuccuuccuucuc

SEQ ID NO: 1820576 - RNA, 19 nt, Artificial Sequence
  Description of Artificial Sequence: Synthetic oligonucleotide
cuggaccgucaggucuggg

SEQ ID NO: 1820577 - RNA, 19 nt, Artificial Sequence
  Description of Artificial Sequence: Synthetic oligonucleotide
gggcuggaccgucaggucu

SEQ ID NO: 1820578 - RNA, 19 nt, Artificial Sequence
  Description of Artificial Sequence: Synthetic oligonucleotide
ggauccgcuggcgggccag

SEQ ID NO: 1820579 - RNA, 19 nt, Artificial Sequence
  Description of Artificial Sequence: Synthetic oligonucleotide
gcacaugcugggccuccug

SEQ ID NO: 1820580 - RNA, 19 nt, Artificial Sequence
  Description of Artificial Sequence: Synthetic oligonucleotide
cugcugcgcgcccaggucu

SEQ ID NO: 1820581 - RNA, 19 nt, Artificial Sequence
  Description of Artificial Sequence: Synthetic oligonucleotide
caacgaugucuggcucuuc

SEQ ID NO: 1820582 - RNA, 19 nt, Artificial Sequence
  Description of Artificial Sequence: Synthetic oligonucleotide
cauccugguucuugggcuu

SEQ ID NO: 1820583 - RNA, 19 nt, Artificial Sequence
  Description of Artificial Sequence: Synthetic oligonucleotide
gaguggccugguucuuggu

SEQ ID NO: 1820584 - RNA, 19 nt, Artificial Sequence
  Description of Artificial Sequence: Synthetic oligonucleotide
gugucucaggcaagucuua

SEQ ID NO: 1820585 - RNA, 19 nt, Artificial Sequence
  Description of Artificial Sequence: Synthetic oligonucleotide
gcuugcaauucacuuucuu

SEQ ID NO: 1820586 - RNA, 19 nt, Artificial Sequence
  Description of Artificial Sequence: Synthetic oligonucleotide
cuucuccuucuugggagcu

SEQ ID NO: 1820587 - RNA, 19 nt, Artificial Sequence
  Description of Artificial Sequence: Synthetic oligonucleotide
cugcgcgcccaggucucgc

SEQ ID NO: 1820588 - RNA, 19 nt, Artificial Sequence
  Description of Artificial Sequence: Synthetic oligonucleotide
cgugcugcgccgucccggc

SEQ ID NO: 1820589 - RNA, 19 nt, Artificial Sequence
  Description of Artificial Sequence: Synthetic oligonucleotide
ccaaggucucugaaucaua

SEQ ID NO: 1820590 - RNA, 19 nt, Artificial Sequence
  Description of Artificial Sequence: Synthetic oligonucleotide
gcuugcgccucuggcugcc

SEQ ID NO: 1820591 - RNA, 19 nt, Artificial Sequence
  Description of Artificial Sequence: Synthetic oligonucleotide
gugcugcgccgucccggcc

SEQ ID NO: 1820592 - RNA, 19 nt, Artificial Sequence
  Description of Artificial Sequence: Synthetic oligonucleotide
ccgugcugcgccgucccgg

SEQ ID NO: 1820593 - RNA, 19 nt, Artificial Sequence
  Description of Artificial Sequence: Synthetic oligonucleotide
gacaagcaucugcccucgu

SEQ ID NO: 1820594 - RNA, 19 nt, Artificial Sequence
  Description of Artificial Sequence: Synthetic oligonucleotide
cagucuguccacugcucuu

SEQ ID NO: 1820595 - RNA, 19 nt, Artificial Sequence
  Description of Artificial Sequence: Synthetic oligonucleotide
cggaaaggaauuucuugcu

SEQ ID NO: 1820596 - RNA, 19 nt, Artificial Sequence
  Description of Artificial Sequence: Synthetic oligonucleotide
ccccauauugaaagcuugu

SEQ ID NO: 1820597 - RNA, 19 nt, Artificial Sequence
  Description of Artificial Sequence: Synthetic oligonucleotide
caccagcacccaaaagcau

SEQ ID NO: 1820598 - RNA, 19 nt, Artificial Sequence
  Description of Artificial Sequence: Synthetic oligonucleotide
ugcgucuguccggggccuc

SEQ ID NO: 1820599 - RNA, 19 nt, Artificial Sequence
  Description of Artificial Sequence: Synthetic oligonucleotide
ggcaagucuuaggggaacu

SEQ ID NO: 1820600 - RNA, 19 nt, Artificial Sequence
  Description of Artificial Sequence: Synthetic oligonucleotide
ccgcuuuuggaaggcuuuc

SEQ ID NO: 1820601 - RNA, 19 nt, Artificial Sequence
  Description of Artificial Sequence: Synthetic oligonucleotide
ccagucuguccacugcucu

SEQ ID NO: 1820602 - RNA, 19 nt, Artificial Sequence
  Description of Artificial Sequence: Synthetic oligonucleotide
gcuggcgggccagugaggu

SEQ ID NO: 1820603 - RNA, 19 nt, Artificial Sequence
  Description of Artificial Sequence: Synthetic oligonucleotide
ccgaguggccugguucuug

SEQ ID NO: 1820604 - RNA, 19 nt, Artificial Sequence
  Description of Artificial Sequence: Synthetic oligonucleotide
cgacuucuugccaggugca

SEQ ID NO: 1820605 - RNA, 19 nt, Artificial Sequence
  Description of Artificial Sequence: Synthetic oligonucleotide
gcugcgcgcccaggucucg

SEQ ID NO: 1820606 - RNA, 19 nt, Artificial Sequence
  Description of Artificial Sequence: Synthetic oligonucleotide
ccccauccagggacaagca

SEQ ID NO: 1820607 - RNA, 19 nt, Artificial Sequence
  Description of Artificial Sequence: Synthetic oligonucleotide
gccgucgagcgugcgucug

SEQ ID NO: 1820608 - RNA, 19 nt, Artificial Sequence
  Description of Artificial Sequence: Synthetic oligonucleotide
cuucaggcaucagcuggau

SEQ ID NO: 1820609 - RNA, 19 nt, Artificial Sequence
  Description of Artificial Sequence: Synthetic oligonucleotide
guccccgcggcggcuccug

SEQ ID NO: 1820610 - RNA, 19 nt, Artificial Sequence
  Description of Artificial Sequence: Synthetic oligonucleotide
gccgagcgcugcugucccc

SEQ ID NO: 1820611 - RNA, 19 nt, Artificial Sequence
  Description of Artificial Sequence: Synthetic oligonucleotide
gcaagucuuaggggaacuu

SEQ ID NO: 1820612 - RNA, 19 nt, Artificial Sequence
  Description of Artificial Sequence: Synthetic oligonucleotide
guaggccugcacagcccgu

SEQ ID NO: 1820613 - RNA, 19 nt, Artificial Sequence
  Description of Artificial Sequence: Synthetic oligonucleotide
gccgcuuuuggaaggcuuu

SEQ ID NO: 1820614 - RNA, 19 nt, Artificial Sequence
  Description of Artificial Sequence: Synthetic oligonucleotide
cgagcgcugcuguccccgc

SEQ ID NO: 1820615 - RNA, 19 nt, Artificial Sequence
  Description of Artificial Sequence: Synthetic oligonucleotide
gauccgcuggcgggccagu

SEQ ID NO: 1820616 - RNA, 19 nt, Artificial Sequence
  Description of Artificial Sequence: Synthetic oligonucleotide
caggugcaucucugccugu

SEQ ID NO: 1820617 - RNA, 19 nt, Artificial Sequence
  Description of Artificial Sequence: Synthetic oligonucleotide
gugcgucuguccggggccu

SEQ ID NO: 1820618 - RNA, 19 nt, Artificial Sequence
  Description of Artificial Sequence: Synthetic oligonucleotide
cgucgagcgugcgucuguc

SEQ ID NO: 1820619 - RNA, 19 nt, Artificial Sequence
  Description of Artificial Sequence: Synthetic oligonucleotide
ccggggccucuaagccccg

SEQ ID NO: 1820620 - RNA, 19 nt, Artificial Sequence
  Description of Artificial Sequence: Synthetic oligonucleotide
cuugcucauccugguucuu

SEQ ID NO: 1820621 - RNA, 19 nt, Artificial Sequence
  Description of Artificial Sequence: Synthetic oligonucleotide
cccggccaugcugccgagc

SEQ ID NO: 1820622 - RNA, 19 nt, Artificial Sequence
  Description of Artificial Sequence: Synthetic oligonucleotide
ccugccgucgagcgugcgu

SEQ ID NO: 1820623 - RNA, 19 nt, Artificial Sequence
  Description of Artificial Sequence: Synthetic oligonucleotide
ggcgggccagugaggugga

SEQ ID NO: 1820624 - RNA, 19 nt, Artificial Sequence
  Description of Artificial Sequence: Synthetic oligonucleotide
ccaggggacuggaccccaa

SEQ ID NO: 1820625 - RNA, 19 nt, Artificial Sequence
  Description of Artificial Sequence: Synthetic oligonucleotide
cguuggauguaggccacau

SEQ ID NO: 1820626 - RNA, 19 nt, Artificial Sequence
  Description of Artificial Sequence: Synthetic oligonucleotide
cugcgccgucccggccaug

SEQ ID NO: 1820627 - RNA, 19 nt, Artificial Sequence
  Description of Artificial Sequence: Synthetic oligonucleotide
cagcacccaaaagcaucuu

SEQ ID NO: 1820628 - RNA, 19 nt, Artificial Sequence
  Description of Artificial Sequence: Synthetic oligonucleotide
gcugcgccgucccggccau

SEQ ID NO: 1820629 - RNA, 19 nt, Artificial Sequence
  Description of Artificial Sequence: Synthetic oligonucleotide
gcgccucuggcugccgagu

SEQ ID NO: 1820630 - RNA, 19 nt, Artificial Sequence
  Description of Artificial Sequence: Synthetic oligonucleotide
ccgucgagcgugcgucugu

SEQ ID NO: 1820631 - RNA, 19 nt, Artificial Sequence
  Description of Artificial Sequence: Synthetic oligonucleotide
gccccgcagacccggcuuu

SEQ ID NO: 1820632 - RNA, 19 nt, Artificial Sequence
  Description of Artificial Sequence: Synthetic oligonucleotide
cggggccucuaagccccgc

SEQ ID NO: 1820633 - RNA, 19 nt, Artificial Sequence
  Description of Artificial Sequence: Synthetic oligonucleotide
ccugucggcuccgcauaau

SEQ ID NO: 1820634 - RNA, 19 nt, Artificial Sequence
  Description of Artificial Sequence: Synthetic oligonucleotide
gccgaguggccugguucuu

SEQ ID NO: 1820635 - RNA, 19 nt, Artificial Sequence
  Description of Artificial Sequence: Synthetic oligonucleotide
cgucuguccggggccucua

SEQ ID NO: 1820636 - RNA, 19 nt, Artificial Sequence
  Description of Artificial Sequence: Synthetic oligonucleotide
cggagccggaaaggaauuu

SEQ ID NO: 1820637 - RNA, 19 nt, Artificial Sequence
  Description of Artificial Sequence: Synthetic oligonucleotide
gcgggccagugagguggau

SEQ ID NO: 1820638 - RNA, 19 nt, Artificial Sequence
  Description of Artificial Sequence: Synthetic oligonucleotide
ccccgcagacccggcuuuu

SEQ ID NO: 1820639 - RNA, 19 nt, Artificial Sequence
  Description of Artificial Sequence: Synthetic oligonucleotide
auguauacaauguaugggc

SEQ ID NO: 1820640 - RNA, 19 nt, Artificial Sequence
  Description of Artificial Sequence: Synthetic oligonucleotide
aaaauguuaguccugugug

SEQ ID NO: 1820641 - RNA, 19 nt, Artificial Sequence
  Description of Artificial Sequence: Synthetic oligonucleotide
uuuucaagguccaaggaug

SEQ ID NO: 1820642 - RNA, 19 nt, Artificial Sequence
  Description of Artificial Sequence: Synthetic oligonucleotide
gaagcugccaucuccagcg

SEQ ID NO: 1820643 - RNA, 19 nt, Artificial Sequence
  Description of Artificial Sequence: Synthetic oligonucleotide
caauguaugggccagaaac

SEQ ID NO: 1820644 - RNA, 19 nt, Artificial Sequence
  Description of Artificial Sequence: Synthetic oligonucleotide
agucuuuagaaucugggag

SEQ ID NO: 1820645 - RNA, 19 nt, Artificial Sequence
  Description of Artificial Sequence: Synthetic oligonucleotide
aggacuaccaggcaacccc

SEQ ID NO: 1820646 - RNA, 19 nt, Artificial Sequence
  Description of Artificial Sequence: Synthetic oligonucleotide
guaaauuccugccaccugg

SEQ ID NO: 1820647 - RNA, 19 nt, Artificial Sequence
  Description of Artificial Sequence: Synthetic oligonucleotide
uggaaaugcagugucaggg

SEQ ID NO: 1820648 - RNA, 19 nt, Artificial Sequence
  Description of Artificial Sequence: Synthetic oligonucleotide
aaacgcagcuggcucaacc

SEQ ID NO: 1820649 - RNA, 19 nt, Artificial Sequence
  Description of Artificial Sequence: Synthetic oligonucleotide
uucacacucauauuuauuc

SEQ ID NO: 1820650 - RNA, 19 nt, Artificial Sequence
  Description of Artificial Sequence: Synthetic oligonucleotide
uccagcgauagcuaggagg

SEQ ID NO: 1820651 - RNA, 19 nt, Artificial Sequence
  Description of Artificial Sequence: Synthetic oligonucleotide
gagugugucauacagcagc

SEQ ID NO: 1820652 - RNA, 19 nt, Artificial Sequence
  Description of Artificial Sequence: Synthetic oligonucleotide
uguauacaauguaugggcc

SEQ ID NO: 1820653 - RNA, 19 nt, Artificial Sequence
  Description of Artificial Sequence: Synthetic oligonucleotide
agacccaacauguucuggc

SEQ ID NO: 1820654 - RNA, 19 nt, Artificial Sequence
  Description of Artificial Sequence: Synthetic oligonucleotide
aauguaugggccagaaacg

SEQ ID NO: 1820655 - RNA, 19 nt, Artificial Sequence
  Description of Artificial Sequence: Synthetic oligonucleotide
gaaucugggaggcagacac

SEQ ID NO: 1820656 - RNA, 19 nt, Artificial Sequence
  Description of Artificial Sequence: Synthetic oligonucleotide
gucuuuagaaucugggagg

SEQ ID NO: 1820657 - RNA, 19 nt, Artificial Sequence
  Description of Artificial Sequence: Synthetic oligonucleotide
aaggaugaguuuuauucca

SEQ ID NO: 1820658 - RNA, 19 nt, Artificial Sequence
  Description of Artificial Sequence: Synthetic oligonucleotide
aaaugcagugucagggucc

SEQ ID NO: 1820659 - RNA, 19 nt, Artificial Sequence
  Description of Artificial Sequence: Synthetic oligonucleotide
uaugcagaucccaaggaga

SEQ ID NO: 1820660 - RNA, 19 nt, Artificial Sequence
  Description of Artificial Sequence: Synthetic oligonucleotide
uauuuauuccugaucacau

SEQ ID NO: 1820661 - RNA, 19 nt, Artificial Sequence
  Description of Artificial Sequence: Synthetic oligonucleotide
uccaaggacccucugagug

SEQ ID NO: 1820662 - RNA, 19 nt, Artificial Sequence
  Description of Artificial Sequence: Synthetic oligonucleotide
uggauucggaucuuuaggc

SEQ ID NO: 1820663 - RNA, 19 nt, Artificial Sequence
  Description of Artificial Sequence: Synthetic oligonucleotide
cauguauacaauguauggg

SEQ ID NO: 1820664 - RNA, 19 nt, Artificial Sequence
  Description of Artificial Sequence: Synthetic oligonucleotide
uaaucuucgucauccaucu

SEQ ID NO: 1820665 - RNA, 19 nt, Artificial Sequence
  Description of Artificial Sequence: Synthetic oligonucleotide
cucacugacacacucacug

SEQ ID NO: 1820666 - RNA, 19 nt, Artificial Sequence
  Description of Artificial Sequence: Synthetic oligonucleotide
uauucuggggcucucucag

SEQ ID NO: 1820667 - RNA, 19 nt, Artificial Sequence
  Description of Artificial Sequence: Synthetic oligonucleotide
aaauguuaguccugugugu

SEQ ID NO: 1820668 - RNA, 19 nt, Artificial Sequence
  Description of Artificial Sequence: Synthetic oligonucleotide
aauguuaguccugugugug

SEQ ID NO: 1820669 - RNA, 19 nt, Artificial Sequence
  Description of Artificial Sequence: Synthetic oligonucleotide
aggagugugucauacagca

SEQ ID NO: 1820670 - RNA, 19 nt, Artificial Sequence
  Description of Artificial Sequence: Synthetic oligonucleotide
aucucacugacacacucac

SEQ ID NO: 1820671 - RNA, 19 nt, Artificial Sequence
  Description of Artificial Sequence: Synthetic oligonucleotide
caaggaugaguuuuauucc

SEQ ID NO: 1820672 - RNA, 19 nt, Artificial Sequence
  Description of Artificial Sequence: Synthetic oligonucleotide
uguaguuugucaucccacc

SEQ ID NO: 1820673 - RNA, 19 nt, Artificial Sequence
  Description of Artificial Sequence: Synthetic oligonucleotide
uucucuuucagcucugaga

SEQ ID NO: 1820674 - RNA, 19 nt, Artificial Sequence
  Description of Artificial Sequence: Synthetic oligonucleotide
uuccugaucacauccagac

SEQ ID NO: 1820675 - RNA, 19 nt, Artificial Sequence
  Description of Artificial Sequence: Synthetic oligonucleotide
aacgagaggugccuucuuc

SEQ ID NO: 1820676 - RNA, 19 nt, Artificial Sequence
  Description of Artificial Sequence: Synthetic oligonucleotide
cagaaugucgaucuccugc

SEQ ID NO: 1820677 - RNA, 19 nt, Artificial Sequence
  Description of Artificial Sequence: Synthetic oligonucleotide
acgagaggugccuucuucc

SEQ ID NO: 1820678 - RNA, 19 nt, Artificial Sequence
  Description of Artificial Sequence: Synthetic oligonucleotide
uuugucaucccaccacuca

SEQ ID NO: 1820679 - RNA, 19 nt, Artificial Sequence
  Description of Artificial Sequence: Synthetic oligonucleotide
ucacacucauauuuauucc

SEQ ID NO: 1820680 - RNA, 19 nt, Artificial Sequence
  Description of Artificial Sequence: Synthetic oligonucleotide
uuuuccagguccagcaucu

SEQ ID NO: 1820681 - RNA, 19 nt, Artificial Sequence
  Description of Artificial Sequence: Synthetic oligonucleotide
cagucguaaacgcagcugg

SEQ ID NO: 1820682 - RNA, 19 nt, Artificial Sequence
  Description of Artificial Sequence: Synthetic oligonucleotide
ccaaggaugaguuuuauuc

SEQ ID NO: 1820683 - RNA, 19 nt, Artificial Sequence
  Description of Artificial Sequence: Synthetic oligonucleotide
cuggauucggaucuuuagg

SEQ ID NO: 1820684 - RNA, 19 nt, Artificial Sequence
  Description of Artificial Sequence: Synthetic oligonucleotide
gacucuacgagagcugucg

SEQ ID NO: 1820685 - RNA, 19 nt, Artificial Sequence
  Description of Artificial Sequence: Synthetic oligonucleotide
agcgauagcuaggaggggc

SEQ ID NO: 1820686 - RNA, 19 nt, Artificial Sequence
  Description of Artificial Sequence: Synthetic oligonucleotide
uguaaauuccugccaccug

SEQ ID NO: 1820687 - RNA, 19 nt, Artificial Sequence
  Description of Artificial Sequence: Synthetic oligonucleotide
agcuaggaggggcaagacc

SEQ ID NO: 1820688 - RNA, 19 nt, Artificial Sequence
  Description of Artificial Sequence: Synthetic oligonucleotide
ucuuuagaaucugggaggc

SEQ ID NO: 1820689 - RNA, 19 nt, Artificial Sequence
  Description of Artificial Sequence: Synthetic oligonucleotide
gauucggaucuuuaggcuc

SEQ ID NO: 1820690 - RNA, 19 nt, Artificial Sequence
  Description of Artificial Sequence: Synthetic oligonucleotide
uguaugggccagaaacgag

SEQ ID NO: 1820691 - RNA, 19 nt, Artificial Sequence
  Description of Artificial Sequence: Synthetic oligonucleotide
cuccauucaccucagcugc

SEQ ID NO: 1820692 - RNA, 19 nt, Artificial Sequence
  Description of Artificial Sequence: Synthetic oligonucleotide
ugcugagucgccuucugcc

SEQ ID NO: 1820693 - RNA, 19 nt, Artificial Sequence
  Description of Artificial Sequence: Synthetic oligonucleotide
agaaacgagaggugccuuc

SEQ ID NO: 1820694 - RNA, 19 nt, Artificial Sequence
  Description of Artificial Sequence: Synthetic oligonucleotide
uaguuugucaucccaccac

SEQ ID NO: 1820695 - RNA, 19 nt, Artificial Sequence
  Description of Artificial Sequence: Synthetic oligonucleotide
cuuguaaauuccugccacc

SEQ ID NO: 1820696 - RNA, 19 nt, Artificial Sequence
  Description of Artificial Sequence: Synthetic oligonucleotide
ucaggggacagcaguaaca

SEQ ID NO: 1820697 - RNA, 19 nt, Artificial Sequence
  Description of Artificial Sequence: Synthetic oligonucleotide
uacgagagcugucggaccc

SEQ ID NO: 1820698 - RNA, 19 nt, Artificial Sequence
  Description of Artificial Sequence: Synthetic oligonucleotide
cuaugcagaucccaaggag

SEQ ID NO: 1820699 - RNA, 19 nt, Artificial Sequence
  Description of Artificial Sequence: Synthetic oligonucleotide
uuauuccugaucacaucca

SEQ ID NO: 1820700 - RNA, 19 nt, Artificial Sequence
  Description of Artificial Sequence: Synthetic oligonucleotide
uccagaaugucgaucuccu

SEQ ID NO: 1820701 - RNA, 19 nt, Artificial Sequence
  Description of Artificial Sequence: Synthetic oligonucleotide
uugauagccguccagucuu

SEQ ID NO: 1820702 - RNA, 19 nt, Artificial Sequence
  Description of Artificial Sequence: Synthetic oligonucleotide
aguggaaaugcagugucag

SEQ ID NO: 1820703 - RNA, 19 nt, Artificial Sequence
  Description of Artificial Sequence: Synthetic oligonucleotide
aggggcaagacccaacaug

SEQ ID NO: 1820704 - RNA, 19 nt, Artificial Sequence
  Description of Artificial Sequence: Synthetic oligonucleotide
cuaggugcuguuuggcucc

SEQ ID NO: 1820705 - RNA, 19 nt, Artificial Sequence
  Description of Artificial Sequence: Synthetic oligonucleotide
uuuaggcucugcugcagcc

SEQ ID NO: 1820706 - RNA, 19 nt, Artificial Sequence
  Description of Artificial Sequence: Synthetic oligonucleotide
aagucugggaagcugccau

SEQ ID NO: 1820707 - RNA, 19 nt, Artificial Sequence
  Description of Artificial Sequence: Synthetic oligonucleotide
aguuugucaucccaccacu

SEQ ID NO: 1820708 - RNA, 19 nt, Artificial Sequence
  Description of Artificial Sequence: Synthetic oligonucleotide
ucuacgagagcugucggac

SEQ ID NO: 1820709 - RNA, 19 nt, Artificial Sequence
  Description of Artificial Sequence: Synthetic oligonucleotide
ccagcgauagcuaggaggg

SEQ ID NO: 1820710 - RNA, 19 nt, Artificial Sequence
  Description of Artificial Sequence: Synthetic oligonucleotide
agcauguauacaauguaug

SEQ ID NO: 1820711 - RNA, 19 nt, Artificial Sequence
  Description of Artificial Sequence: Synthetic oligonucleotide
uuuugauagccguccaguc

SEQ ID NO: 1820712 - RNA, 19 nt, Artificial Sequence
  Description of Artificial Sequence: Synthetic oligonucleotide
ucuggcguguaguuuguca

SEQ ID NO: 1820713 - RNA, 19 nt, Artificial Sequence
  Description of Artificial Sequence: Synthetic oligonucleotide
uuagaaucugggaggcaga

SEQ ID NO: 1820714 - RNA, 19 nt, Artificial Sequence
  Description of Artificial Sequence: Synthetic oligonucleotide
caucccaccacucagagcu

SEQ ID NO: 1820715 - RNA, 19 nt, Artificial Sequence
  Description of Artificial Sequence: Synthetic oligonucleotide
ucaagguccaaggaugagu

SEQ ID NO: 1820716 - RNA, 19 nt, Artificial Sequence
  Description of Artificial Sequence: Synthetic oligonucleotide
uuguaaauuccugccaccu

SEQ ID NO: 1820717 - RNA, 19 nt, Artificial Sequence
  Description of Artificial Sequence: Synthetic oligonucleotide
ucaagaguuccagucuugc

SEQ ID NO: 1820718 - RNA, 19 nt, Artificial Sequence
  Description of Artificial Sequence: Synthetic oligonucleotide
uaaauuccugccaccugga

SEQ ID NO: 1820719 - RNA, 19 nt, Artificial Sequence
  Description of Artificial Sequence: Synthetic oligonucleotide
uggaggacuaccaggcaac

SEQ ID NO: 1820720 - RNA, 19 nt, Artificial Sequence
  Description of Artificial Sequence: Synthetic oligonucleotide
ugacacacucacugcggcg

SEQ ID NO: 1820721 - RNA, 19 nt, Artificial Sequence
  Description of Artificial Sequence: Synthetic oligonucleotide
guauacaauguaugggcca

SEQ ID NO: 1820722 - RNA, 19 nt, Artificial Sequence
  Description of Artificial Sequence: Synthetic oligonucleotide
ugcugcagcccuccuagag

SEQ ID NO: 1820723 - RNA, 19 nt, Artificial Sequence
  Description of Artificial Sequence: Synthetic oligonucleotide
aaugagucccaggucuuug

SEQ ID NO: 1820724 - RNA, 19 nt, Artificial Sequence
  Description of Artificial Sequence: Synthetic oligonucleotide
ugagucccaggucuuugag

SEQ ID NO: 1820725 - RNA, 19 nt, Artificial Sequence
  Description of Artificial Sequence: Synthetic oligonucleotide
acucucuaggugcuguuug

SEQ ID NO: 1820726 - RNA, 19 nt, Artificial Sequence
  Description of Artificial Sequence: Synthetic oligonucleotide
aguaacacuggaggacuac

SEQ ID NO: 1820727 - RNA, 19 nt, Artificial Sequence
  Description of Artificial Sequence: Synthetic oligonucleotide
uuaguccuguguguggugc

SEQ ID NO: 1820728 - RNA, 19 nt, Artificial Sequence
  Description of Artificial Sequence: Synthetic oligonucleotide
ugcggcgccgcucauaauc

SEQ ID NO: 1820729 - RNA, 19 nt, Artificial Sequence
  Description of Artificial Sequence: Synthetic oligonucleotide
cucugacucagucuggcug

SEQ ID NO: 1820730 - RNA, 19 nt, Artificial Sequence
  Description of Artificial Sequence: Synthetic oligonucleotide
aagacccaacauguucugg

SEQ ID NO: 1820731 - RNA, 19 nt, Artificial Sequence
  Description of Artificial Sequence: Synthetic oligonucleotide
ucguaaacgcagcuggcuc

SEQ ID NO: 1820732 - RNA, 19 nt, Artificial Sequence
  Description of Artificial Sequence: Synthetic oligonucleotide
cagucuuccagaaugucga

SEQ ID NO: 1820733 - RNA, 19 nt, Artificial Sequence
  Description of Artificial Sequence: Synthetic oligonucleotide
ugggaagcugccaucucca

SEQ ID NO: 1820734 - RNA, 19 nt, Artificial Sequence
  Description of Artificial Sequence: Synthetic oligonucleotide
aguucacacucauauuuau

SEQ ID NO: 1820735 - RNA, 19 nt, Artificial Sequence
  Description of Artificial Sequence: Synthetic oligonucleotide
gcuaggaggggcaagaccc

SEQ ID NO: 1820736 - RNA, 19 nt, Artificial Sequence
  Description of Artificial Sequence: Synthetic oligonucleotide
gacacacucacugcggcgc

SEQ ID NO: 1820737 - RNA, 19 nt, Artificial Sequence
  Description of Artificial Sequence: Synthetic oligonucleotide
cugcagcccuccuagaggc

SEQ ID NO: 1820738 - RNA, 19 nt, Artificial Sequence
  Description of Artificial Sequence: Synthetic oligonucleotide
agacacugcugcccuggcc

SEQ ID NO: 1820739 - RNA, 19 nt, Artificial Sequence
  Description of Artificial Sequence: Synthetic oligonucleotide
uguuaguccuguguguggu

SEQ ID NO: 1820740 - RNA, 19 nt, Artificial Sequence
  Description of Artificial Sequence: Synthetic oligonucleotide
gacucagucuggcugccgc

SEQ ID NO: 1820741 - RNA, 19 nt, Artificial Sequence
  Description of Artificial Sequence: Synthetic oligonucleotide
ucacgcccgagacucuacg

SEQ ID NO: 1820742 - RNA, 19 nt, Artificial Sequence
  Description of Artificial Sequence: Synthetic oligonucleotide
ccagucuuuagaaucuggg

SEQ ID NO: 1820743 - RNA, 19 nt, Artificial Sequence
  Description of Artificial Sequence: Synthetic oligonucleotide
aguguuggggucaggggac

SEQ ID NO: 1820744 - RNA, 19 nt, Artificial Sequence
  Description of Artificial Sequence: Synthetic oligonucleotide
aaccguucccugaacaacu

SEQ ID NO: 1820745 - RNA, 19 nt, Artificial Sequence
  Description of Artificial Sequence: Synthetic oligonucleotide
cagacaaaagcccuuguaa

SEQ ID NO: 1820746 - RNA, 19 nt, Artificial Sequence
  Description of Artificial Sequence: Synthetic oligonucleotide
auauucuggggcucucuca

SEQ ID NO: 1820747 - RNA, 19 nt, Artificial Sequence
  Description of Artificial Sequence: Synthetic oligonucleotide
accacucagagcugauguc

SEQ ID NO: 1820748 - RNA, 19 nt, Artificial Sequence
  Description of Artificial Sequence: Synthetic oligonucleotide
uccuccagucguaaacgca

SEQ ID NO: 1820749 - RNA, 19 nt, Artificial Sequence
  Description of Artificial Sequence: Synthetic oligonucleotide
ucgccuucugccuccaucu

SEQ ID NO: 1820750 - RNA, 19 nt, Artificial Sequence
  Description of Artificial Sequence: Synthetic oligonucleotide
gcucuguauauucuggggc

SEQ ID NO: 1820751 - RNA, 19 nt, Artificial Sequence
  Description of Artificial Sequence: Synthetic oligonucleotide
ucuccagcgauagcuagga

SEQ ID NO: 1820752 - RNA, 19 nt, Artificial Sequence
  Description of Artificial Sequence: Synthetic oligonucleotide
uguucuggcucaagaguuc

SEQ ID NO: 1820753 - RNA, 19 nt, Artificial Sequence
  Description of Artificial Sequence: Synthetic oligonucleotide
ccagucuuccagaaugucg

SEQ ID NO: 1820754 - RNA, 19 nt, Artificial Sequence
  Description of Artificial Sequence: Synthetic oligonucleotide
acccaacauguucuggcuc

SEQ ID NO: 1820755 - RNA, 19 nt, Artificial Sequence
  Description of Artificial Sequence: Synthetic oligonucleotide
cuggcugccgcuccguucc

SEQ ID NO: 1820756 - RNA, 19 nt, Artificial Sequence
  Description of Artificial Sequence: Synthetic oligonucleotide
acucuacgagagcugucgg

SEQ ID NO: 1820757 - RNA, 19 nt, Artificial Sequence
  Description of Artificial Sequence: Synthetic oligonucleotide
ucccugaacaacuucucuu

SEQ ID NO: 1820758 - RNA, 19 nt, Artificial Sequence
  Description of Artificial Sequence: Synthetic oligonucleotide
uuccuccagucguaaacgc

SEQ ID NO: 1820759 - RNA, 19 nt, Artificial Sequence
  Description of Artificial Sequence: Synthetic oligonucleotide
cugacacacucacugcggc

SEQ ID NO: 1820760 - RNA, 19 nt, Artificial Sequence
  Description of Artificial Sequence: Synthetic oligonucleotide
acaaaagcccuuguaaauu

SEQ ID NO: 1820761 - RNA, 19 nt, Artificial Sequence
  Description of Artificial Sequence: Synthetic oligonucleotide
caucuccagcgauagcuag

SEQ ID NO: 1820762 - RNA, 19 nt, Artificial Sequence
  Description of Artificial Sequence: Synthetic oligonucleotide
auagcuaggaggggcaaga

SEQ ID NO: 1820763 - RNA, 19 nt, Artificial Sequence
  Description of Artificial Sequence: Synthetic oligonucleotide
guaacacuggaggacuacc

SEQ ID NO: 1820764 - RNA, 19 nt, Artificial Sequence
  Description of Artificial Sequence: Synthetic oligonucleotide
agucguaaacgcagcuggc

SEQ ID NO: 1820765 - RNA, 19 nt, Artificial Sequence
  Description of Artificial Sequence: Synthetic oligonucleotide
cucagagcugaugucuagg

SEQ ID NO: 1820766 - RNA, 19 nt, Artificial Sequence
  Description of Artificial Sequence: Synthetic oligonucleotide
guaguuugucaucccacca

SEQ ID NO: 1820767 - RNA, 19 nt, Artificial Sequence
  Description of Artificial Sequence: Synthetic oligonucleotide
auguaugggccagaaacga

SEQ ID NO: 1820768 - RNA, 19 nt, Artificial Sequence
  Description of Artificial Sequence: Synthetic oligonucleotide
gacaaaagcccuuguaaau

SEQ ID NO: 1820769 - RNA, 19 nt, Artificial Sequence
  Description of Artificial Sequence: Synthetic oligonucleotide
ugagucgccuucugccucc

SEQ ID NO: 1820770 - RNA, 19 nt, Artificial Sequence
  Description of Artificial Sequence: Synthetic oligonucleotide
caucugggcucguagggac

SEQ ID NO: 1820771 - RNA, 19 nt, Artificial Sequence
  Description of Artificial Sequence: Synthetic oligonucleotide
uccuagaggcucuguauau

SEQ ID NO: 1820772 - RNA, 19 nt, Artificial Sequence
  Description of Artificial Sequence: Synthetic oligonucleotide
acgcccgagacucuacgag

SEQ ID NO: 1820773 - RNA, 19 nt, Artificial Sequence
  Description of Artificial Sequence: Synthetic oligonucleotide
cagggucacggcuaugcag

SEQ ID NO: 1820774 - RNA, 19 nt, Artificial Sequence
  Description of Artificial Sequence: Synthetic oligonucleotide
cagucuuuagaaucuggga

SEQ ID NO: 1820775 - RNA, 19 nt, Artificial Sequence
  Description of Artificial Sequence: Synthetic oligonucleotide
uacaauguaugggccagaa

SEQ ID NO: 1820776 - RNA, 19 nt, Artificial Sequence
  Description of Artificial Sequence: Synthetic oligonucleotide
gcuguaaacgccaccgccg

SEQ ID NO: 1820777 - RNA, 19 nt, Artificial Sequence
  Description of Artificial Sequence: Synthetic oligonucleotide
augucuaggcucuggcggu

SEQ ID NO: 1820778 - RNA, 19 nt, Artificial Sequence
  Description of Artificial Sequence: Synthetic oligonucleotide
cuggaguucacacucauau

SEQ ID NO: 1820779 - RNA, 19 nt, Artificial Sequence
  Description of Artificial Sequence: Synthetic oligonucleotide
cucaagaguuccagucuug

SEQ ID NO: 1820780 - RNA, 19 nt, Artificial Sequence
  Description of Artificial Sequence: Synthetic oligonucleotide
cuacgagagcugucggacc

SEQ ID NO: 1820781 - RNA, 19 nt, Artificial Sequence
  Description of Artificial Sequence: Synthetic oligonucleotide
ucagggucacggcuaugca

SEQ ID NO: 1820782 - RNA, 19 nt, Artificial Sequence
  Description of Artificial Sequence: Synthetic oligonucleotide
ccuuguaaauuccugccac

SEQ ID NO: 1820783 - RNA, 19 nt, Artificial Sequence
  Description of Artificial Sequence: Synthetic oligonucleotide
uucaagguccaaggaugag

SEQ ID NO: 1820784 - RNA, 19 nt, Artificial Sequence
  Description of Artificial Sequence: Synthetic oligonucleotide
aggaugaguuuuauuccag

SEQ ID NO: 1820785 - RNA, 19 nt, Artificial Sequence
  Description of Artificial Sequence: Synthetic oligonucleotide
uccagacaaaagcccuugu

SEQ ID NO: 1820786 - RNA, 19 nt, Artificial Sequence
  Description of Artificial Sequence: Synthetic oligonucleotide
caggggacagcaguaacac

SEQ ID NO: 1820787 - RNA, 19 nt, Artificial Sequence
  Description of Artificial Sequence: Synthetic oligonucleotide
ccuccagucguaaacgcag

SEQ ID NO: 1820788 - RNA, 19 nt, Artificial Sequence
  Description of Artificial Sequence: Synthetic oligonucleotide
ggcuguaaacgccaccgcc

SEQ ID NO: 1820789 - RNA, 19 nt, Artificial Sequence
  Description of Artificial Sequence: Synthetic oligonucleotide
cuucuuugccuggaggcug

SEQ ID NO: 1820790 - RNA, 19 nt, Artificial Sequence
  Description of Artificial Sequence: Synthetic oligonucleotide
auucggaucuuuaggcucu

SEQ ID NO: 1820791 - RNA, 19 nt, Artificial Sequence
  Description of Artificial Sequence: Synthetic oligonucleotide
ggacccaggcuguaaacgc

SEQ ID NO: 1820792 - RNA, 19 nt, Artificial Sequence
  Description of Artificial Sequence: Synthetic oligonucleotide
ucucacugacacacucacu

SEQ ID NO: 1820793 - RNA, 19 nt, Artificial Sequence
  Description of Artificial Sequence: Synthetic oligonucleotide
uucaccucagcugcugagu

SEQ ID NO: 1820794 - RNA, 19 nt, Artificial Sequence
  Description of Artificial Sequence: Synthetic oligonucleotide
agggucacggcuaugcaga

SEQ ID NO: 1820795 - RNA, 19 nt, Artificial Sequence
  Description of Artificial Sequence: Synthetic oligonucleotide
ugagaaagucugggaagcu

SEQ ID NO: 1820796 - RNA, 19 nt, Artificial Sequence
  Description of Artificial Sequence: Synthetic oligonucleotide
uccaucugguuuucucuuc

SEQ ID NO: 1820797 - RNA, 19 nt, Artificial Sequence
  Description of Artificial Sequence: Synthetic oligonucleotide
gcugcagcccuccuagagg

SEQ ID NO: 1820798 - RNA, 19 nt, Artificial Sequence
  Description of Artificial Sequence: Synthetic oligonucleotide
cuccagucguaaacgcagc

SEQ ID NO: 1820799 - RNA, 19 nt, Artificial Sequence
  Description of Artificial Sequence: Synthetic oligonucleotide
uggcgguccuccuccagcc

SEQ ID NO: 1820800 - RNA, 19 nt, Artificial Sequence
  Description of Artificial Sequence: Synthetic oligonucleotide
acugcggcgccgcucauaa

SEQ ID NO: 1820801 - RNA, 19 nt, Artificial Sequence
  Description of Artificial Sequence: Synthetic oligonucleotide
uaguccuguguguggugcc

SEQ ID NO: 1820802 - RNA, 19 nt, Artificial Sequence
  Description of Artificial Sequence: Synthetic oligonucleotide
ucugggcucguagggacug

SEQ ID NO: 1820803 - RNA, 19 nt, Artificial Sequence
  Description of Artificial Sequence: Synthetic oligonucleotide
uccccaaggagugugucau

SEQ ID NO: 1820804 - RNA, 19 nt, Artificial Sequence
  Description of Artificial Sequence: Synthetic oligonucleotide
auccagacaaaagcccuug

SEQ ID NO: 1820805 - RNA, 19 nt, Artificial Sequence
  Description of Artificial Sequence: Synthetic oligonucleotide
uccaaggaugaguuuuauu

SEQ ID NO: 1820806 - RNA, 19 nt, Artificial Sequence
  Description of Artificial Sequence: Synthetic oligonucleotide
ccuggauucggaucuuuag

SEQ ID NO: 1820807 - RNA, 19 nt, Artificial Sequence
  Description of Artificial Sequence: Synthetic oligonucleotide
auagccguccagucuucca

SEQ ID NO: 1820808 - RNA, 19 nt, Artificial Sequence
  Description of Artificial Sequence: Synthetic oligonucleotide
gcccuuguaaauuccugcc

SEQ ID NO: 1820809 - RNA, 19 nt, Artificial Sequence
  Description of Artificial Sequence: Synthetic oligonucleotide
caaccguucccugaacaac

SEQ ID NO: 1820810 - RNA, 19 nt, Artificial Sequence
  Description of Artificial Sequence: Synthetic oligonucleotide
cacacucauauuuauuccu

SEQ ID NO: 1820811 - RNA, 19 nt, Artificial Sequence
  Description of Artificial Sequence: Synthetic oligonucleotide
auguucuggcucaagaguu

SEQ ID NO: 1820812 - RNA, 19 nt, Artificial Sequence
  Description of Artificial Sequence: Synthetic oligonucleotide
ggcaaugagucccaggucu

SEQ ID NO: 1820813 - RNA, 19 nt, Artificial Sequence
  Description of Artificial Sequence: Synthetic oligonucleotide
gacccaggcuguaaacgcc

SEQ ID NO: 1820814 - RNA, 19 nt, Artificial Sequence
  Description of Artificial Sequence: Synthetic oligonucleotide
cauguucuggcucaagagu

SEQ ID NO: 1820815 - RNA, 19 nt, Artificial Sequence
  Description of Artificial Sequence: Synthetic oligonucleotide
acacucacugcggcgccgc

SEQ ID NO: 1820816 - RNA, 19 nt, Artificial Sequence
  Description of Artificial Sequence: Synthetic oligonucleotide
gguggcaaugagucccagg

SEQ ID NO: 1820817 - RNA, 19 nt, Artificial Sequence
  Description of Artificial Sequence: Synthetic oligonucleotide
ggcguguaguuugucaucc

SEQ ID NO: 1820818 - RNA, 19 nt, Artificial Sequence
  Description of Artificial Sequence: Synthetic oligonucleotide
uggcaaugagucccagguc

SEQ ID NO: 1820819 - RNA, 19 nt, Artificial Sequence
  Description of Artificial Sequence: Synthetic oligonucleotide
ggcucguagggacuggggc

SEQ ID NO: 1820820 - RNA, 19 nt, Artificial Sequence
  Description of Artificial Sequence: Synthetic oligonucleotide
gccucuggcguguaguuug

SEQ ID NO: 1820821 - RNA, 19 nt, Artificial Sequence
  Description of Artificial Sequence: Synthetic oligonucleotide
cucaaccguucccugaaca

SEQ ID NO: 1820822 - RNA, 19 nt, Artificial Sequence
  Description of Artificial Sequence: Synthetic oligonucleotide
uggcucaaccguucccuga

SEQ ID NO: 1820823 - RNA, 19 nt, Artificial Sequence
  Description of Artificial Sequence: Synthetic oligonucleotide
gaggacuaccaggcaaccc

SEQ ID NO: 1820824 - RNA, 19 nt, Artificial Sequence
  Description of Artificial Sequence: Synthetic oligonucleotide
uguauauucuggggcucuc

SEQ ID NO: 1820825 - RNA, 19 nt, Artificial Sequence
  Description of Artificial Sequence: Synthetic oligonucleotide
aaacgagaggugccuucuu

SEQ ID NO: 1820826 - RNA, 19 nt, Artificial Sequence
  Description of Artificial Sequence: Synthetic oligonucleotide
guguggugccagcugcucc

SEQ ID NO: 1820827 - RNA, 19 nt, Artificial Sequence
  Description of Artificial Sequence: Synthetic oligonucleotide
ugggcucguagggacuggg

SEQ ID NO: 1820828 - RNA, 19 nt, Artificial Sequence
  Description of Artificial Sequence: Synthetic oligonucleotide
uggcguguaguuugucauc

SEQ ID NO: 1820829 - RNA, 19 nt, Artificial Sequence
  Description of Artificial Sequence: Synthetic oligonucleotide
cucugaguggaaaugcagu

SEQ ID NO: 1820830 - RNA, 19 nt, Artificial Sequence
  Description of Artificial Sequence: Synthetic oligonucleotide
gauagccguccagucuucc

SEQ ID NO: 1820831 - RNA, 19 nt, Artificial Sequence
  Description of Artificial Sequence: Synthetic oligonucleotide
ucggacccaggcuguaaac

SEQ ID NO: 1820832 - RNA, 19 nt, Artificial Sequence
  Description of Artificial Sequence: Synthetic oligonucleotide
gaguucacacucauauuua

SEQ ID NO: 1820833 - RNA, 19 nt, Artificial Sequence
  Description of Artificial Sequence: Synthetic oligonucleotide
aacuucucuuucagcucug

SEQ ID NO: 1820834 - RNA, 19 nt, Artificial Sequence
  Description of Artificial Sequence: Synthetic oligonucleotide
cagguccagcaucucacug

SEQ ID NO: 1820835 - RNA, 19 nt, Artificial Sequence
  Description of Artificial Sequence: Synthetic oligonucleotide
ucccuggaguucacacuca

SEQ ID NO: 1820836 - RNA, 19 nt, Artificial Sequence
  Description of Artificial Sequence: Synthetic oligonucleotide
uggauccgcuccugcagcu

SEQ ID NO: 1820837 - RNA, 19 nt, Artificial Sequence
  Description of Artificial Sequence: Synthetic oligonucleotide
cucuuucagcucugagaac

SEQ ID NO: 1820838 - RNA, 19 nt, Artificial Sequence
  Description of Artificial Sequence: Synthetic oligonucleotide
ucuaggcucuggcgguccu

SEQ ID NO: 1820839 - RNA, 19 nt, Artificial Sequence
  Description of Artificial Sequence: Synthetic oligonucleotide
ugauagccguccagucuuc

SEQ ID NO: 1820840 - RNA, 19 nt, Artificial Sequence
  Description of Artificial Sequence: Synthetic oligonucleotide
cuggaggacuaccaggcaa

SEQ ID NO: 1820841 - RNA, 19 nt, Artificial Sequence
  Description of Artificial Sequence: Synthetic oligonucleotide
cagaucccaaggagagcag

SEQ ID NO: 1820842 - RNA, 19 nt, Artificial Sequence
  Description of Artificial Sequence: Synthetic oligonucleotide
cucuacgagagcugucgga

SEQ ID NO: 1820843 - RNA, 19 nt, Artificial Sequence
  Description of Artificial Sequence: Synthetic oligonucleotide
ugacucagucuggcugccg

SEQ ID NO: 1820844 - RNA, 19 nt, Artificial Sequence
  Description of Artificial Sequence: Synthetic oligonucleotide
gaaacgagaggugccuucu

SEQ ID NO: 1820845 - RNA, 19 nt, Artificial Sequence
  Description of Artificial Sequence: Synthetic oligonucleotide
cugagucgccuucugccuc

SEQ ID NO: 1820846 - RNA, 19 nt, Artificial Sequence
  Description of Artificial Sequence: Synthetic oligonucleotide
gacccaacauguucuggcu

SEQ ID NO: 1820847 - RNA, 19 nt, Artificial Sequence
  Description of Artificial Sequence: Synthetic oligonucleotide
ggaggggcaagacccaaca

SEQ ID NO: 1820848 - RNA, 19 nt, Artificial Sequence
  Description of Artificial Sequence: Synthetic oligonucleotide
cucacugcggcgccgcuca

SEQ ID NO: 1820849 - RNA, 19 nt, Artificial Sequence
  Description of Artificial Sequence: Synthetic oligonucleotide
ucacggcuaugcagauccc

SEQ ID NO: 1820850 - RNA, 19 nt, Artificial Sequence
  Description of Artificial Sequence: Synthetic oligonucleotide
caagguccaaggaugaguu

SEQ ID NO: 1820851 - RNA, 19 nt, Artificial Sequence
  Description of Artificial Sequence: Synthetic oligonucleotide
gagacucuacgagagcugu

SEQ ID NO: 1820852 - RNA, 19 nt, Artificial Sequence
  Description of Artificial Sequence: Synthetic oligonucleotide
aggaggggcaagacccaac

SEQ ID NO: 1820853 - RNA, 19 nt, Artificial Sequence
  Description of Artificial Sequence: Synthetic oligonucleotide
uccggccucacgcccgaga

SEQ ID NO: 1820854 - RNA, 19 nt, Artificial Sequence
  Description of Artificial Sequence: Synthetic oligonucleotide
cuggcucaaccguucccug

SEQ ID NO: 1820855 - RNA, 19 nt, Artificial Sequence
  Description of Artificial Sequence: Synthetic oligonucleotide
ucccaccacucagagcuga

SEQ ID NO: 1820856 - RNA, 19 nt, Artificial Sequence
  Description of Artificial Sequence: Synthetic oligonucleotide
agacucuacgagagcuguc

SEQ ID NO: 1820857 - RNA, 19 nt, Artificial Sequence
  Description of Artificial Sequence: Synthetic oligonucleotide
cugaucacauccagacaaa

SEQ ID NO: 1820858 - RNA, 19 nt, Artificial Sequence
  Description of Artificial Sequence: Synthetic oligonucleotide
caccacucagagcugaugu

SEQ ID NO: 1820859 - RNA, 19 nt, Artificial Sequence
  Description of Artificial Sequence: Synthetic oligonucleotide
cuccuagaggcucuguaua

SEQ ID NO: 1820860 - RNA, 19 nt, Artificial Sequence
  Description of Artificial Sequence: Synthetic oligonucleotide
gucuuccagaaugucgauc

SEQ ID NO: 1820861 - RNA, 19 nt, Artificial Sequence
  Description of Artificial Sequence: Synthetic oligonucleotide
guuugucaucccaccacuc

SEQ ID NO: 1820862 - RNA, 19 nt, Artificial Sequence
  Description of Artificial Sequence: Synthetic oligonucleotide
auacaauguaugggccaga

SEQ ID NO: 1820863 - RNA, 19 nt, Artificial Sequence
  Description of Artificial Sequence: Synthetic oligonucleotide
guuggggucaggggacagc

SEQ ID NO: 1820864 - RNA, 19 nt, Artificial Sequence
  Description of Artificial Sequence: Synthetic oligonucleotide
acucacugcggcgccgcuc

SEQ ID NO: 1820865 - RNA, 19 nt, Artificial Sequence
  Description of Artificial Sequence: Synthetic oligonucleotide
ggcucccuggaguucacac

SEQ ID NO: 1820866 - RNA, 19 nt, Artificial Sequence
  Description of Artificial Sequence: Synthetic oligonucleotide
cauucaccucagcugcuga

SEQ ID NO: 1820867 - RNA, 19 nt, Artificial Sequence
  Description of Artificial Sequence: Synthetic oligonucleotide
uccugccaccuggauucgg

SEQ ID NO: 1820868 - RNA, 19 nt, Artificial Sequence
  Description of Artificial Sequence: Synthetic oligonucleotide
gccagaaacgagaggugcc

SEQ ID NO: 1820869 - RNA, 19 nt, Artificial Sequence
  Description of Artificial Sequence: Synthetic oligonucleotide
cucacgcccgagacucuac

SEQ ID NO: 1820870 - RNA, 19 nt, Artificial Sequence
  Description of Artificial Sequence: Synthetic oligonucleotide
acggcuaugcagaucccaa

SEQ ID NO: 1820871 - RNA, 19 nt, Artificial Sequence
  Description of Artificial Sequence: Synthetic oligonucleotide
cccaacauguucuggcuca

SEQ ID NO: 1820872 - RNA, 19 nt, Artificial Sequence
  Description of Artificial Sequence: Synthetic oligonucleotide
ggguccaucugguuuucuc

SEQ ID NO: 1820873 - RNA, 19 nt, Artificial Sequence
  Description of Artificial Sequence: Synthetic oligonucleotide
cuggaugggcaucugggcu

SEQ ID NO: 1820874 - RNA, 19 nt, Artificial Sequence
  Description of Artificial Sequence: Synthetic oligonucleotide
cuguuuggcucccuggagu

SEQ ID NO: 1820875 - RNA, 19 nt, Artificial Sequence
  Description of Artificial Sequence: Synthetic oligonucleotide
uagcuaggaggggcaagac

SEQ ID NO: 1820876 - RNA, 19 nt, Artificial Sequence
  Description of Artificial Sequence: Synthetic oligonucleotide
ggauucggaucuuuaggcu

SEQ ID NO: 1820877 - RNA, 19 nt, Artificial Sequence
  Description of Artificial Sequence: Synthetic oligonucleotide
gagcugaugucuaggcucu

SEQ ID NO: 1820878 - RNA, 19 nt, Artificial Sequence
  Description of Artificial Sequence: Synthetic oligonucleotide
acccaggcuguaaacgcca

SEQ ID NO: 1820879 - RNA, 19 nt, Artificial Sequence
  Description of Artificial Sequence: Synthetic oligonucleotide
ggaugaguuuuauuccagu

SEQ ID NO: 1820880 - RNA, 19 nt, Artificial Sequence
  Description of Artificial Sequence: Synthetic oligonucleotide
ucggaucuuuaggcucugc

SEQ ID NO: 1820881 - RNA, 19 nt, Artificial Sequence
  Description of Artificial Sequence: Synthetic oligonucleotide
cuggcguguaguuugucau

SEQ ID NO: 1820882 - RNA, 19 nt, Artificial Sequence
  Description of Artificial Sequence: Synthetic oligonucleotide
gcucucauccgccucucca

SEQ ID NO: 1820883 - RNA, 19 nt, Artificial Sequence
  Description of Artificial Sequence: Synthetic oligonucleotide
gcgccgcucauaaucuucg

SEQ ID NO: 1820884 - RNA, 19 nt, Artificial Sequence
  Description of Artificial Sequence: Synthetic oligonucleotide
gccgcuccguuccuccucg

SEQ ID NO: 1820885 - RNA, 19 nt, Artificial Sequence
  Description of Artificial Sequence: Synthetic oligonucleotide
cacacucacugcggcgccg

SEQ ID NO: 1820886 - RNA, 19 nt, Artificial Sequence
  Description of Artificial Sequence: Synthetic oligonucleotide
guaaacgcagcuggcucaa

SEQ ID NO: 1820887 - RNA, 19 nt, Artificial Sequence
  Description of Artificial Sequence: Synthetic oligonucleotide
cagugucaggguccaucug

SEQ ID NO: 1820888 - RNA, 19 nt, Artificial Sequence
  Description of Artificial Sequence: Synthetic oligonucleotide
cacucagagcugaugucua

SEQ ID NO: 1820889 - RNA, 19 nt, Artificial Sequence
  Description of Artificial Sequence: Synthetic oligonucleotide
gcugccgcuccguuccucc

SEQ ID NO: 1820890 - RNA, 19 nt, Artificial Sequence
  Description of Artificial Sequence: Synthetic oligonucleotide
gcccgagacucuacgagag

SEQ ID NO: 1820891 - RNA, 19 nt, Artificial Sequence
  Description of Artificial Sequence: Synthetic oligonucleotide
aggacccucugaguggaaa

SEQ ID NO: 1820892 - RNA, 19 nt, Artificial Sequence
  Description of Artificial Sequence: Synthetic oligonucleotide
cuuuagaaucugggaggca

SEQ ID NO: 1820893 - RNA, 19 nt, Artificial Sequence
  Description of Artificial Sequence: Synthetic oligonucleotide
ggagugugucauacagcag

SEQ ID NO: 1820894 - RNA, 19 nt, Artificial Sequence
  Description of Artificial Sequence: Synthetic oligonucleotide
ugucuaggcucuggcgguc

SEQ ID NO: 1820895 - RNA, 19 nt, Artificial Sequence
  Description of Artificial Sequence: Synthetic oligonucleotide
uuggcucccuggaguucac

SEQ ID NO: 1820896 - RNA, 19 nt, Artificial Sequence
  Description of Artificial Sequence: Synthetic oligonucleotide
ggucuuugagcugccucug

SEQ ID NO: 1820897 - RNA, 19 nt, Artificial Sequence
  Description of Artificial Sequence: Synthetic oligonucleotide
gucccaggucuuugagcug

SEQ ID NO: 1820898 - RNA, 19 nt, Artificial Sequence
  Description of Artificial Sequence: Synthetic oligonucleotide
gucguaaacgcagcuggcu

SEQ ID NO: 1820899 - RNA, 19 nt, Artificial Sequence
  Description of Artificial Sequence: Synthetic oligonucleotide
ugucggacccaggcuguaa

SEQ ID NO: 1820900 - RNA, 19 nt, Artificial Sequence
  Description of Artificial Sequence: Synthetic oligonucleotide
cagcgauagcuaggagggg

SEQ ID NO: 1820901 - RNA, 19 nt, Artificial Sequence
  Description of Artificial Sequence: Synthetic oligonucleotide
cuccagcgauagcuaggag

SEQ ID NO: 1820902 - RNA, 19 nt, Artificial Sequence
  Description of Artificial Sequence: Synthetic oligonucleotide
gucuaggcucuggcggucc

SEQ ID NO: 1820903 - RNA, 19 nt, Artificial Sequence
  Description of Artificial Sequence: Synthetic oligonucleotide
gccgcucauaaucuucguc

SEQ ID NO: 1820904 - RNA, 19 nt, Artificial Sequence
  Description of Artificial Sequence: Synthetic oligonucleotide
ggaggacuaccaggcaacc

SEQ ID NO: 1820905 - RNA, 19 nt, Artificial Sequence
  Description of Artificial Sequence: Synthetic oligonucleotide
cccugagaaagucugggaa

SEQ ID NO: 1820906 - RNA, 19 nt, Artificial Sequence
  Description of Artificial Sequence: Synthetic oligonucleotide
cuguaaacgccaccgccgu

SEQ ID NO: 1820907 - RNA, 19 nt, Artificial Sequence
  Description of Artificial Sequence: Synthetic oligonucleotide
ccagucguaaacgcagcug

SEQ ID NO: 1820908 - RNA, 19 nt, Artificial Sequence
  Description of Artificial Sequence: Synthetic oligonucleotide
ggcucaaccguucccugaa

SEQ ID NO: 1820909 - RNA, 19 nt, Artificial Sequence
  Description of Artificial Sequence: Synthetic oligonucleotide
agcaucucacugacacacu

SEQ ID NO: 1820910 - RNA, 19 nt, Artificial Sequence
  Description of Artificial Sequence: Synthetic oligonucleotide
uaaacgcagcuggcucaac

SEQ ID NO: 1820911 - RNA, 19 nt, Artificial Sequence
  Description of Artificial Sequence: Synthetic oligonucleotide
cacgcccgagacucuacga

SEQ ID NO: 1820912 - RNA, 19 nt, Artificial Sequence
  Description of Artificial Sequence: Synthetic oligonucleotide
gucauccaucucugagcuc

SEQ ID NO: 1820913 - RNA, 19 nt, Artificial Sequence
  Description of Artificial Sequence: Synthetic oligonucleotide
gcguguaguuugucauccc

SEQ ID NO: 1820914 - RNA, 19 nt, Artificial Sequence
  Description of Artificial Sequence: Synthetic oligonucleotide
ucuuugccuggaggcugga

SEQ ID NO: 1820915 - RNA, 19 nt, Artificial Sequence
  Description of Artificial Sequence: Synthetic oligonucleotide
cccuuguaaauuccugcca

SEQ ID NO: 1820916 - RNA, 19 nt, Artificial Sequence
  Description of Artificial Sequence: Synthetic oligonucleotide
guuuggcucccuggaguuc

SEQ ID NO: 1820917 - RNA, 19 nt, Artificial Sequence
  Description of Artificial Sequence: Synthetic oligonucleotide
cguaaacgcagcuggcuca

SEQ ID NO: 1820918 - RNA, 19 nt, Artificial Sequence
  Description of Artificial Sequence: Synthetic oligonucleotide
guucacacucauauuuauu

SEQ ID NO: 1820919 - RNA, 19 nt, Artificial Sequence
  Description of Artificial Sequence: Synthetic oligonucleotide
caguaacacuggaggacua

SEQ ID NO: 1820920 - RNA, 19 nt, Artificial Sequence
  Description of Artificial Sequence: Synthetic oligonucleotide
cugggcucguagggacugg

SEQ ID NO: 1820921 - RNA, 19 nt, Artificial Sequence
  Description of Artificial Sequence: Synthetic oligonucleotide
ugccucuggcguguaguuu

SEQ ID NO: 1820922 - RNA, 19 nt, Artificial Sequence
  Description of Artificial Sequence: Synthetic oligonucleotide
cgagacucuacgagagcug

SEQ ID NO: 1820923 - RNA, 19 nt, Artificial Sequence
  Description of Artificial Sequence: Synthetic oligonucleotide
accuggauucggaucuuua

SEQ ID NO: 1820924 - RNA, 19 nt, Artificial Sequence
  Description of Artificial Sequence: Synthetic oligonucleotide
acgagagcugucggaccca

SEQ ID NO: 1820925 - RNA, 19 nt, Artificial Sequence
  Description of Artificial Sequence: Synthetic oligonucleotide
cuguauauucuggggcucu

SEQ ID NO: 1820926 - RNA, 19 nt, Artificial Sequence
  Description of Artificial Sequence: Synthetic oligonucleotide
ccagacaaaagcccuugua

SEQ ID NO: 1820927 - RNA, 19 nt, Artificial Sequence
  Description of Artificial Sequence: Synthetic oligonucleotide
gcccugagaaagucuggga

SEQ ID NO: 1820928 - RNA, 19 nt, Artificial Sequence
  Description of Artificial Sequence: Synthetic oligonucleotide
agucuggcugccgcuccgu

SEQ ID NO: 1820929 - RNA, 19 nt, Artificial Sequence
  Description of Artificial Sequence: Synthetic oligonucleotide
cauccagacaaaagcccuu

SEQ ID NO: 1820930 - RNA, 19 nt, Artificial Sequence
  Description of Artificial Sequence: Synthetic oligonucleotide
gaggagcccaggccagugu

SEQ ID NO: 1820931 - RNA, 19 nt, Artificial Sequence
  Description of Artificial Sequence: Synthetic oligonucleotide
gggccagaaacgagaggug

SEQ ID NO: 1820932 - RNA, 19 nt, Artificial Sequence
  Description of Artificial Sequence: Synthetic oligonucleotide
ccauucaccucagcugcug

SEQ ID NO: 1820933 - RNA, 19 nt, Artificial Sequence
  Description of Artificial Sequence: Synthetic oligonucleotide
gggcucguagggacugggg

SEQ ID NO: 1820934 - RNA, 19 nt, Artificial Sequence
  Description of Artificial Sequence: Synthetic oligonucleotide
gaggggcaagacccaacau

SEQ ID NO: 1820935 - RNA, 19 nt, Artificial Sequence
  Description of Artificial Sequence: Synthetic oligonucleotide
gcgauagcuaggaggggca

SEQ ID NO: 1820936 - RNA, 19 nt, Artificial Sequence
  Description of Artificial Sequence: Synthetic oligonucleotide
ggcgccgcucauaaucuuc

SEQ ID NO: 1820937 - RNA, 19 nt, Artificial Sequence
  Description of Artificial Sequence: Synthetic oligonucleotide
gcugagucgccuucugccu

SEQ ID NO: 1820938 - RNA, 19 nt, Artificial Sequence
  Description of Artificial Sequence: Synthetic oligonucleotide
cccgagacucuacgagagc

SEQ ID NO: 1820939 - RNA, 19 nt, Artificial Sequence
  Description of Artificial Sequence: Synthetic oligonucleotide
cacuuccuccagucguaaa

SEQ ID NO: 1820940 - RNA, 19 nt, Artificial Sequence
  Description of Artificial Sequence: Synthetic oligonucleotide
guccagucuuccagaaugu

SEQ ID NO: 1820941 - RNA, 19 nt, Artificial Sequence
  Description of Artificial Sequence: Synthetic oligonucleotide
ccggccucacgcccgagac

SEQ ID NO: 1820942 - RNA, 19 nt, Artificial Sequence
  Description of Artificial Sequence: Synthetic oligonucleotide
gguccaaggaugaguuuua

SEQ ID NO: 1820943 - RNA, 19 nt, Artificial Sequence
  Description of Artificial Sequence: Synthetic oligonucleotide
cguucccugaacaacuucu

SEQ ID NO: 1820944 - RNA, 19 nt, Artificial Sequence
  Description of Artificial Sequence: Synthetic oligonucleotide
accguucccugaacaacuu

SEQ ID NO: 1820945 - RNA, 19 nt, Artificial Sequence
  Description of Artificial Sequence: Synthetic oligonucleotide
gcucaaccguucccugaac

SEQ ID NO: 1820946 - RNA, 19 nt, Artificial Sequence
  Description of Artificial Sequence: Synthetic oligonucleotide
cgccucuccauucaccuca

SEQ ID NO: 1820947 - RNA, 19 nt, Artificial Sequence
  Description of Artificial Sequence: Synthetic oligonucleotide
cuccaaggacccucugagu

SEQ ID NO: 1820948 - RNA, 19 nt, Artificial Sequence
  Description of Artificial Sequence: Synthetic oligonucleotide
gccaggucagcuucagggu

SEQ ID NO: 1820949 - RNA, 19 nt, Artificial Sequence
  Description of Artificial Sequence: Synthetic oligonucleotide
ggucaggggacagcaguaa

SEQ ID NO: 1820950 - RNA, 19 nt, Artificial Sequence
  Description of Artificial Sequence: Synthetic oligonucleotide
cucuggcguguaguuuguc

SEQ ID NO: 1820951 - RNA, 19 nt, Artificial Sequence
  Description of Artificial Sequence: Synthetic oligonucleotide
ggacccucugaguggaaau

SEQ ID NO: 1820952 - RNA, 19 nt, Artificial Sequence
  Description of Artificial Sequence: Synthetic oligonucleotide
augggcaucugggcucgua

SEQ ID NO: 1820953 - RNA, 19 nt, Artificial Sequence
  Description of Artificial Sequence: Synthetic oligonucleotide
aaggacccucugaguggaa

SEQ ID NO: 1820954 - RNA, 19 nt, Artificial Sequence
  Description of Artificial Sequence: Synthetic oligonucleotide
ccguucccugaacaacuuc

SEQ ID NO: 1820955 - RNA, 19 nt, Artificial Sequence
  Description of Artificial Sequence: Synthetic oligonucleotide
gccuccggccucacgcccg

SEQ ID NO: 1820956 - RNA, 19 nt, Artificial Sequence
  Description of Artificial Sequence: Synthetic oligonucleotide
cgucauccaucucugagcu

SEQ ID NO: 1820957 - RNA, 19 nt, Artificial Sequence
  Description of Artificial Sequence: Synthetic oligonucleotide
cccugaacaacuucucuuu

SEQ ID NO: 1820958 - RNA, 19 nt, Artificial Sequence
  Description of Artificial Sequence: Synthetic oligonucleotide
ggaauggcccugagaaagu

SEQ ID NO: 1820959 - RNA, 19 nt, Artificial Sequence
  Description of Artificial Sequence: Synthetic oligonucleotide
gccguccagucuuccagaa

SEQ ID NO: 1820960 - RNA, 19 nt, Artificial Sequence
  Description of Artificial Sequence: Synthetic oligonucleotide
ccaucuccagcgauagcua

SEQ ID NO: 1820961 - RNA, 19 nt, Artificial Sequence
  Description of Artificial Sequence: Synthetic oligonucleotide
gccucuccauucaccucag

SEQ ID NO: 1820962 - RNA, 19 nt, Artificial Sequence
  Description of Artificial Sequence: Synthetic oligonucleotide
ccgagacucuacgagagcu

SEQ ID NO: 1820963 - RNA, 19 nt, Artificial Sequence
  Description of Artificial Sequence: Synthetic oligonucleotide
ggucacggcuaugcagauc

SEQ ID NO: 1820964 - RNA, 19 nt, Artificial Sequence
  Description of Artificial Sequence: Synthetic oligonucleotide
cagucuugcuuggccaggu

SEQ ID NO: 1820965 - RNA, 19 nt, Artificial Sequence
  Description of Artificial Sequence: Synthetic oligonucleotide
guccaaggaugaguuuuau

SEQ ID NO: 1820966 - RNA, 19 nt, Artificial Sequence
  Description of Artificial Sequence: Synthetic oligonucleotide
ggucagcuucagggucacg

SEQ ID NO: 1820967 - RNA, 19 nt, Artificial Sequence
  Description of Artificial Sequence: Synthetic oligonucleotide
cugccaccuggauucggau

SEQ ID NO: 1820968 - RNA, 19 nt, Artificial Sequence
  Description of Artificial Sequence: Synthetic oligonucleotide
ccuggaguucacacucaua

SEQ ID NO: 1820969 - RNA, 19 nt, Artificial Sequence
  Description of Artificial Sequence: Synthetic oligonucleotide
cgcccgagacucuacgaga

SEQ ID NO: 1820970 - RNA, 19 nt, Artificial Sequence
  Description of Artificial Sequence: Synthetic oligonucleotide
cgagagcugucggacccag

SEQ ID NO: 1820971 - RNA, 19 nt, Artificial Sequence
  Description of Artificial Sequence: Synthetic oligonucleotide
cccuccuagaggcucugua

SEQ ID NO: 1820972 - RNA, 19 nt, Artificial Sequence
  Description of Artificial Sequence: Synthetic oligonucleotide
cggaucuuuaggcucugcu

SEQ ID NO: 1820973 - RNA, 19 nt, Artificial Sequence
  Description of Artificial Sequence: Synthetic oligonucleotide
gcaaugagucccaggucuu

SEQ ID NO: 1820974 - RNA, 19 nt, Artificial Sequence
  Description of Artificial Sequence: Synthetic oligonucleotide
augcagugucaggguccau

SEQ ID NO: 1820975 - RNA, 19 nt, Artificial Sequence
  Description of Artificial Sequence: Synthetic oligonucleotide
cguagggacuggggccucc

SEQ ID NO: 1820976 - RNA, 19 nt, Artificial Sequence
  Description of Artificial Sequence: Synthetic oligonucleotide
ccaacauguucuggcucaa

SEQ ID NO: 1820977 - RNA, 19 nt, Artificial Sequence
  Description of Artificial Sequence: Synthetic oligonucleotide
gcggcgccgcucauaaucu

SEQ ID NO: 1820978 - RNA, 19 nt, Artificial Sequence
  Description of Artificial Sequence: Synthetic oligonucleotide
cgcucucauccgccucucc

SEQ ID NO: 1820979 - RNA, 19 nt, Artificial Sequence
  Description of Artificial Sequence: Synthetic oligonucleotide
cugccgcuccguuccuccu

SEQ ID NO: 1820980 - RNA, 19 nt, Artificial Sequence
  Description of Artificial Sequence: Synthetic oligonucleotide
gggucacggcuaugcagau

SEQ ID NO: 1820981 - RNA, 19 nt, Artificial Sequence
  Description of Artificial Sequence: Synthetic oligonucleotide
cugucggacccaggcugua

SEQ ID NO: 1820982 - RNA, 19 nt, Artificial Sequence
  Description of Artificial Sequence: Synthetic oligonucleotide
cuccggccucacgcccgag

SEQ ID NO: 1820983 - RNA, 19 nt, Artificial Sequence
  Description of Artificial Sequence: Synthetic oligonucleotide
cacugcggcgccgcucaua

SEQ ID NO: 1820984 - RNA, 19 nt, Artificial Sequence
  Description of Artificial Sequence: Synthetic oligonucleotide
ccuagaggcucuguauauu

SEQ ID NO: 1820985 - RNA, 19 nt, Artificial Sequence
  Description of Artificial Sequence: Synthetic oligonucleotide
ccacuuccuccagucguaa

SEQ ID NO: 1820986 - RNA, 19 nt, Artificial Sequence
  Description of Artificial Sequence: Synthetic oligonucleotide
gaugggcaucugggcucgu

SEQ ID NO: 1820987 - RNA, 19 nt, Artificial Sequence
  Description of Artificial Sequence: Synthetic oligonucleotide
ccucuggcguguaguuugu

SEQ ID NO: 1820988 - RNA, 19 nt, Artificial Sequence
  Description of Artificial Sequence: Synthetic oligonucleotide
ccgcuccguuccuccucgc

SEQ ID NO: 1820989 - RNA, 19 nt, Artificial Sequence
  Description of Artificial Sequence: Synthetic oligonucleotide
cacucacugcggcgccgcu

SEQ ID NO: 1820990 - RNA, 19 nt, Artificial Sequence
  Description of Artificial Sequence: Synthetic oligonucleotide
gagcugccucuggcgugua

SEQ ID NO: 1820991 - RNA, 19 nt, Artificial Sequence
  Description of Artificial Sequence: Synthetic oligonucleotide
ccuccggccucacgcccga

SEQ ID NO: 1820992 - RNA, 19 nt, Artificial Sequence
  Description of Artificial Sequence: Synthetic oligonucleotide
cgauagcuaggaggggcaa

SEQ ID NO: 1820993 - RNA, 19 nt, Artificial Sequence
  Description of Artificial Sequence: Synthetic oligonucleotide
ccccaaggagugugucaua

SEQ ID NO: 1820994 - RNA, 19 nt, Artificial Sequence
  Description of Artificial Sequence: Synthetic oligonucleotide
ccguuccuccucgcucuca

SEQ ID NO: 1820995 - RNA, 19 nt, Artificial Sequence
  Description of Artificial Sequence: Synthetic oligonucleotide
cccaccacucagagcugau

SEQ ID NO: 1820996 - RNA, 19 nt, Artificial Sequence
  Description of Artificial Sequence: Synthetic oligonucleotide
cugcggcgccgcucauaau

SEQ ID NO: 1820997 - RNA, 19 nt, Artificial Sequence
  Description of Artificial Sequence: Synthetic oligonucleotide
cgcuccguuccuccucgcu

SEQ ID NO: 1820998 - RNA, 19 nt, Artificial Sequence
  Description of Artificial Sequence: Synthetic oligonucleotide
gcccuccuagaggcucugu

SEQ ID NO: 1820999 - RNA, 19 nt, Artificial Sequence
  Description of Artificial Sequence: Synthetic oligonucleotide
cggccucacgcccgagacu

SEQ ID NO: 1821000 - RNA, 19 nt, Artificial Sequence
  Description of Artificial Sequence: Synthetic oligonucleotide
cggcgccgcucauaaucuu

SEQ ID NO: 1821001 - RNA, 19 nt, Artificial Sequence
  Description of Artificial Sequence: Synthetic oligonucleotide
  modified_base (3)..(3): a, c, u, g, unknown or other
aanaaagguguacagacac

SEQ ID NO: 1821002 - RNA, 19 nt, Artificial Sequence
  Description of Artificial Sequence: Synthetic oligonucleotide
ucuaacaauaguaagagca

SEQ ID NO: 1821003 - RNA, 19 nt, Artificial Sequence
  Description of Artificial Sequence: Synthetic oligonucleotide
aauagcggcauucauaggg

SEQ ID NO: 1821004 - RNA, 19 nt, Artificial Sequence
  Description of Artificial Sequence: Synthetic oligonucleotide
  modified_base (5)..(5): a, c, u, g, unknown or other
acaanaaagguguacagac

SEQ ID NO: 1821005 - RNA, 19 nt, Artificial Sequence
  Description of Artificial Sequence: Synthetic oligonucleotide
gaugguauugcccugaacc

SEQ ID NO: 1821006 - RNA, 19 nt, Artificial Sequence
  Description of Artificial Sequence: Synthetic oligonucleotide
aauaguaagagcaagccug

SEQ ID NO: 1821007 - RNA, 19 nt, Artificial Sequence
  Description of Artificial Sequence: Synthetic oligonucleotide
guagaugagauucuggagg

SEQ ID NO: 1821008 - RNA, 19 nt, Artificial Sequence
  Description of Artificial Sequence: Synthetic oligonucleotide
aguacaaaaucuuugggug

SEQ ID NO: 1821009 - RNA, 19 nt, Artificial Sequence
  Description of Artificial Sequence: Synthetic oligonucleotide
aaguacaaaaucuuugggu

SEQ ID NO: 1821010 - RNA, 19 nt, Artificial Sequence
  Description of Artificial Sequence: Synthetic oligonucleotide
aacaauaguaagagcaagc

SEQ ID NO: 1821011 - RNA, 19 nt, Artificial Sequence
  Description of Artificial Sequence: Synthetic oligonucleotide
  modified_base (5)..(5): a, c, u, g, unknown or other
uaaunuccugcuuaucugg

SEQ ID NO: 1821012 - RNA, 19 nt, Artificial Sequence
  Description of Artificial Sequence: Synthetic oligonucleotide
uguaaaagccccaaaguuc

SEQ ID NO: 1821013 - RNA, 19 nt, Artificial Sequence
  Description of Artificial Sequence: Synthetic oligonucleotide
uauaagaacaggagaaggu

SEQ ID NO: 1821014 - RNA, 19 nt, Artificial Sequence
  Description of Artificial Sequence: Synthetic oligonucleotide
acuaccaaccaucacagug

SEQ ID NO: 1821015 - RNA, 19 nt, Artificial Sequence
  Description of Artificial Sequence: Synthetic oligonucleotide
uuugggaccaaguacaaaa

SEQ ID NO: 1821016 - RNA, 19 nt, Artificial Sequence
  Description of Artificial Sequence: Synthetic oligonucleotide
aagugucuagcugugaagg

SEQ ID NO: 1821017 - RNA, 19 nt, Artificial Sequence
  Description of Artificial Sequence: Synthetic oligonucleotide
uucguacucagcaggaggg

SEQ ID NO: 1821018 - RNA, 19 nt, Artificial Sequence
  Description of Artificial Sequence: Synthetic oligonucleotide
  modified_base (6)..(6): a, c, u, g, unknown or other
uuaaunuccugcuuaucug

SEQ ID NO: 1821019 - RNA, 19 nt, Artificial Sequence
  Description of Artificial Sequence: Synthetic oligonucleotide
cuagaauggagcuagcuuc

SEQ ID NO: 1821020 - RNA, 19 nt, Artificial Sequence
  Description of Artificial Sequence: Synthetic oligonucleotide
  modified_base (6)..(6): a, c, u, g, unknown or other
  modified_base (13)..(13): a, c, u, g, unknown or other
ucugcncuuaaunuccugc

SEQ ID NO: 1821021 - RNA, 19 nt, Artificial Sequence
  Description of Artificial Sequence: Synthetic oligonucleotide
ucuguaaaagccccaaagu

SEQ ID NO: 1821022 - RNA, 19 nt, Artificial Sequence
  Description of Artificial Sequence: Synthetic oligonucleotide
  modified_base (4)..(4): a, c, u, g, unknown or other
aaunuccugcuuaucuggc

SEQ ID NO: 1821023 - RNA, 19 nt, Artificial Sequence
  Description of Artificial Sequence: Synthetic oligonucleotide
auagaacuggggcuggagc

SEQ ID NO: 1821024 - RNA, 19 nt, Artificial Sequence
  Description of Artificial Sequence: Synthetic oligonucleotide
aaagugucuagcugugaag

SEQ ID NO: 1821025 - RNA, 19 nt, Artificial Sequence
  Description of Artificial Sequence: Synthetic oligonucleotide
  modified_base (2)..(2): a, c, u, g, unknown or other
anaaagguguacagacacc

SEQ ID NO: 1821026 - RNA, 19 nt, Artificial Sequence
  Description of Artificial Sequence: Synthetic oligonucleotide
ucagagaucacaauagcuu

SEQ ID NO: 1821027 - RNA, 19 nt, Artificial Sequence
  Description of Artificial Sequence: Synthetic oligonucleotide
aaaagugucuagcugugaa

SEQ ID NO: 1821028 - RNA, 19 nt, Artificial Sequence
  Description of Artificial Sequence: Synthetic oligonucleotide
aaaagccccaaaguucccc

SEQ ID NO: 1821029 - RNA, 19 nt, Artificial Sequence
  Description of Artificial Sequence: Synthetic oligonucleotide
aaucuuugggugguccucc

SEQ ID NO: 1821030 - RNA, 19 nt, Artificial Sequence
  Description of Artificial Sequence: Synthetic oligonucleotide
aaagccccaaaguuccccg

SEQ ID NO: 1821031 - RNA, 19 nt, Artificial Sequence
  Description of Artificial Sequence: Synthetic oligonucleotide
guauaagaacaggagaagg

SEQ ID NO: 1821032 - RNA, 19 nt, Artificial Sequence
  Description of Artificial Sequence: Synthetic oligonucleotide
gaaguggucacuuggcccc

SEQ ID NO: 1821033 - RNA, 19 nt, Artificial Sequence
  Description of Artificial Sequence: Synthetic oligonucleotide
uguauaagaacaggagaag

SEQ ID NO: 1821034 - RNA, 19 nt, Artificial Sequence
  Description of Artificial Sequence: Synthetic oligonucleotide
gauagaagccuugcaaagg

SEQ ID NO: 1821035 - RNA, 19 nt, Artificial Sequence
  Description of Artificial Sequence: Synthetic oligonucleotide
ucugguuugcuucguuugg

SEQ ID NO: 1821036 - RNA, 19 nt, Artificial Sequence
  Description of Artificial Sequence: Synthetic oligonucleotide
aucuaacaauaguaagagc

SEQ ID NO: 1821037 - RNA, 19 nt, Artificial Sequence
  Description of Artificial Sequence: Synthetic oligonucleotide
cuaccaaccaucacagugc

SEQ ID NO: 1821038 - RNA, 19 nt, Artificial Sequence
  Description of Artificial Sequence: Synthetic oligonucleotide
guacaaaaucuuugggugg

SEQ ID NO: 1821039 - RNA, 19 nt, Artificial Sequence
  Description of Artificial Sequence: Synthetic oligonucleotide
gugaaaagcugaaagaaug

SEQ ID NO: 1821040 - RNA, 19 nt, Artificial Sequence
  Description of Artificial Sequence: Synthetic oligonucleotide
uagaugagauucuggaggc

SEQ ID NO: 1821041 - RNA, 19 nt, Artificial Sequence
  Description of Artificial Sequence: Synthetic oligonucleotide
cucuguaaaagccccaaag

SEQ ID NO: 1821042 - RNA, 19 nt, Artificial Sequence
  Description of Artificial Sequence: Synthetic oligonucleotide
caaguacaaaaucuuuggg

SEQ ID NO: 1821043 - RNA, 19 nt, Artificial Sequence
  Description of Artificial Sequence: Synthetic oligonucleotide
cauucugccaacccguagg

SEQ ID NO: 1821044 - RNA, 19 nt, Artificial Sequence
  Description of Artificial Sequence: Synthetic oligonucleotide
ucagcaggaggguaaagug

SEQ ID NO: 1821045 - RNA, 19 nt, Artificial Sequence
  Description of Artificial Sequence: Synthetic oligonucleotide
  modified_base (16)..(16): a, c, u, g, unknown or other
uggcaucaguucaugnucc

SEQ ID NO: 1821046 - RNA, 19 nt, Artificial Sequence
  Description of Artificial Sequence: Synthetic oligonucleotide
ugugaaaagcugaaagaau

SEQ ID NO: 1821047 - RNA, 19 nt, Artificial Sequence
  Description of Artificial Sequence: Synthetic oligonucleotide
ucaaaagugucuagcugug

SEQ ID NO: 1821048 - RNA, 19 nt, Artificial Sequence
  Description of Artificial Sequence: Synthetic oligonucleotide
agugucuagcugugaaggc

SEQ ID NO: 1821049 - RNA, 19 nt, Artificial Sequence
  Description of Artificial Sequence: Synthetic oligonucleotide
  modified_base (2)..(2): a, c, u, g, unknown or other
unuccugcuuaucuggcug

SEQ ID NO: 1821050 - RNA, 19 nt, Artificial Sequence
  Description of Artificial Sequence: Synthetic oligonucleotide
  modified_base (8)..(8): a, c, u, g, unknown or other
uggacaanaaagguguaca

SEQ ID NO: 1821051 - RNA, 19 nt, Artificial Sequence
  Description of Artificial Sequence: Synthetic oligonucleotide
gcaauagcggcauucauag

SEQ ID NO: 1821052 - RNA, 19 nt, Artificial Sequence
  Description of Artificial Sequence: Synthetic oligonucleotide
cacaauagcuucuacuuuc

SEQ ID NO: 1821053 - RNA, 19 nt, Artificial Sequence
  Description of Artificial Sequence: Synthetic oligonucleotide
aucccucuuguccaauucc

SEQ ID NO: 1821054 - RNA, 19 nt, Artificial Sequence
  Description of Artificial Sequence: Synthetic oligonucleotide
auacauugcaccuccagau

SEQ ID NO: 1821055 - RNA, 19 nt, Artificial Sequence
  Description of Artificial Sequence: Synthetic oligonucleotide
  modified_base (7)..(7): a, c, u, g, unknown or other
cuuaaunuccugcuuaucu

SEQ ID NO: 1821056 - RNA, 19 nt, Artificial Sequence
  Description of Artificial Sequence: Synthetic oligonucleotide
ugcaguccuagaauggagc

SEQ ID NO: 1821057 - RNA, 19 nt, Artificial Sequence
  Description of Artificial Sequence: Synthetic oligonucleotide
augucuugcagguggggac

SEQ ID NO: 1821058 - RNA, 19 nt, Artificial Sequence
  Description of Artificial Sequence: Synthetic oligonucleotide
gaauggagcuagcuucugg

SEQ ID NO: 1821059 - RNA, 19 nt, Artificial Sequence
  Description of Artificial Sequence: Synthetic oligonucleotide
uccagaugggaacaguccu

SEQ ID NO: 1821060 - RNA, 19 nt, Artificial Sequence
  Description of Artificial Sequence: Synthetic oligonucleotide
ucguaguguauaagaacag

SEQ ID NO: 1821061 - RNA, 19 nt, Artificial Sequence
  Description of Artificial Sequence: Synthetic oligonucleotide
ccaaguacaaaaucuuugg

SEQ ID NO: 1821062 - RNA, 19 nt, Artificial Sequence
  Description of Artificial Sequence: Synthetic oligonucleotide
cuucguacucagcaggagg

SEQ ID NO: 1821063 - RNA, 19 nt, Artificial Sequence
  Description of Artificial Sequence: Synthetic oligonucleotide
agcccgaugggccaagaac

SEQ ID NO: 1821064 - RNA, 19 nt, Artificial Sequence
  Description of Artificial Sequence: Synthetic oligonucleotide
accuucauucugccaaccc

SEQ ID NO: 1821065 - RNA, 19 nt, Artificial Sequence
  Description of Artificial Sequence: Synthetic oligonucleotide
auugugagccuuucggaug

SEQ ID NO: 1821066 - RNA, 19 nt, Artificial Sequence
  Description of Artificial Sequence: Synthetic oligonucleotide
  modified_base (16)..(16): a, c, u, g, unknown or other
uaucuggcuggacaanaaa

SEQ ID NO: 1821067 - RNA, 19 nt, Artificial Sequence
  Description of Artificial Sequence: Synthetic oligonucleotide
uccucaaaagugucuagcu

SEQ ID NO: 1821068 - RNA, 19 nt, Artificial Sequence
  Description of Artificial Sequence: Synthetic oligonucleotide
aguaagagcaagccuggca

SEQ ID NO: 1821069 - RNA, 19 nt, Artificial Sequence
  Description of Artificial Sequence: Synthetic oligonucleotide
uugcaaagguccuacagua

SEQ ID NO: 1821070 - RNA, 19 nt, Artificial Sequence
  Description of Artificial Sequence: Synthetic oligonucleotide
gguaugguagaugagauuc

SEQ ID NO: 1821071 - RNA, 19 nt, Artificial Sequence
  Description of Artificial Sequence: Synthetic oligonucleotide
uguuccucugaaaggucag

SEQ ID NO: 1821072 - RNA, 19 nt, Artificial Sequence
  Description of Artificial Sequence: Synthetic oligonucleotide
cagagaucacaauagcuuc

SEQ ID NO: 1821073 - RNA, 19 nt, Artificial Sequence
  Description of Artificial Sequence: Synthetic oligonucleotide
  modified_base (7)..(7): a, c, u, g, unknown or other
ggacaanaaagguguacag

SEQ ID NO: 1821074 - RNA, 19 nt, Artificial Sequence
  Description of Artificial Sequence: Synthetic oligonucleotide
gucguaguguauaagaaca

SEQ ID NO: 1821075 - RNA, 19 nt, Artificial Sequence
  Description of Artificial Sequence: Synthetic oligonucleotide
aggauagaagccuugcaaa

SEQ ID NO: 1821076 - RNA, 19 nt, Artificial Sequence
  Description of Artificial Sequence: Synthetic oligonucleotide
uagaauggagcuagcuucu

SEQ ID NO: 1821077 - RNA, 19 nt, Artificial Sequence
  Description of Artificial Sequence: Synthetic oligonucleotide
gaggauagaagccuugcaa

SEQ ID NO: 1821078 - RNA, 19 nt, Artificial Sequence
  Description of Artificial Sequence: Synthetic oligonucleotide
gaagaaccuucauucugcc

SEQ ID NO: 1821079 - RNA, 19 nt, Artificial Sequence
  Description of Artificial Sequence: Synthetic oligonucleotide
ugagccuuucggauguggc

SEQ ID NO: 1821080 - RNA, 19 nt, Artificial Sequence
  Description of Artificial Sequence: Synthetic oligonucleotide
  modified_base (6)..(6): a, c, u, g, unknown or other
gacaanaaagguguacaga

SEQ ID NO: 1821081 - RNA, 19 nt, Artificial Sequence
  Description of Artificial Sequence: Synthetic oligonucleotide
caucagagaucacaauagc

SEQ ID NO: 1821082 - RNA, 19 nt, Artificial Sequence
  Description of Artificial Sequence: Synthetic oligonucleotide
aggaggguaaagugggcuc

SEQ ID NO: 1821083 - RNA, 19 nt, Artificial Sequence
  Description of Artificial Sequence: Synthetic oligonucleotide
auaguaagagcaagccugg

SEQ ID NO: 1821084 - RNA, 19 nt, Artificial Sequence
  Description of Artificial Sequence: Synthetic oligonucleotide
accaaguacaaaaucuuug

SEQ ID NO: 1821085 - RNA, 19 nt, Artificial Sequence
  Description of Artificial Sequence: Synthetic oligonucleotide
uacaaaaucuuuggguggu

SEQ ID NO: 1821086 - RNA, 19 nt, Artificial Sequence
  Description of Artificial Sequence: Synthetic oligonucleotide
guaguguauaagaacagga

SEQ ID NO: 1821087 - RNA, 19 nt, Artificial Sequence
  Description of Artificial Sequence: Synthetic oligonucleotide
  modified_base (6)..(6): a, c, u, g, unknown or other
ucaugnuccccagauauua

SEQ ID NO: 1821088 - RNA, 19 nt, Artificial Sequence
  Description of Artificial Sequence: Synthetic oligonucleotide
augguauugcccugaaccu

SEQ ID NO: 1821089 - RNA, 19 nt, Artificial Sequence
  Description of Artificial Sequence: Synthetic oligonucleotide
caaaguuccccggagcugc

SEQ ID NO: 1821090 - RNA, 19 nt, Artificial Sequence
  Description of Artificial Sequence: Synthetic oligonucleotide
guguauaagaacaggagaa

SEQ ID NO: 1821091 - RNA, 19 nt, Artificial Sequence
  Description of Artificial Sequence: Synthetic oligonucleotide
agcugugaaggcugucccc

SEQ ID NO: 1821092 - RNA, 19 nt, Artificial Sequence
  Description of Artificial Sequence: Synthetic oligonucleotide
ucgucguaguguauaagaa

SEQ ID NO: 1821093 - RNA, 19 nt, Artificial Sequence
  Description of Artificial Sequence: Synthetic oligonucleotide
aagggaagggugcccaaga

SEQ ID NO: 1821094 - RNA, 19 nt, Artificial Sequence
  Description of Artificial Sequence: Synthetic oligonucleotide
ucggauguggcgguagagg

SEQ ID NO: 1821095 - RNA, 19 nt, Artificial Sequence
  Description of Artificial Sequence: Synthetic oligonucleotide
uagagguccccugacugcg

SEQ ID NO: 1821096 - RNA, 19 nt, Artificial Sequence
  Description of Artificial Sequence: Synthetic oligonucleotide
  modified_base (12)..(12): a, c, u, g, unknown or other
aucaguucaugnuccccag

SEQ ID NO: 1821097 - RNA, 19 nt, Artificial Sequence
  Description of Artificial Sequence: Synthetic oligonucleotide
aggaaugacgagaugccuc

SEQ ID NO: 1821098 - RNA, 19 nt, Artificial Sequence
  Description of Artificial Sequence: Synthetic oligonucleotide
cugacuguguucugggaac

SEQ ID NO: 1821099 - RNA, 19 nt, Artificial Sequence
  Description of Artificial Sequence: Synthetic oligonucleotide
cuagcugugaaggcugucc

SEQ ID NO: 1821100 - RNA, 19 nt, Artificial Sequence
  Description of Artificial Sequence: Synthetic oligonucleotide
gcuucguuuggccaggucc

SEQ ID NO: 1821101 - RNA, 19 nt, Artificial Sequence
  Description of Artificial Sequence: Synthetic oligonucleotide
gguagaugagauucuggag

SEQ ID NO: 1821102 - RNA, 19 nt, Artificial Sequence
  Description of Artificial Sequence: Synthetic oligonucleotide
  modified_base (3)..(3): a, c, u, g, unknown or other
ugnuccccagauauuaauu

SEQ ID NO: 1821103 - RNA, 19 nt, Artificial Sequence
  Description of Artificial Sequence: Synthetic oligonucleotide
  modified_base (4)..(4): a, c, u, g, unknown or other
caanaaagguguacagaca

SEQ ID NO: 1821104 - RNA, 19 nt, Artificial Sequence
  Description of Artificial Sequence: Synthetic oligonucleotide
  modified_base (17)..(17): a, c, u, g, unknown or other
uuaucuggcuggacaanaa

SEQ ID NO: 1821105 - RNA, 19 nt, Artificial Sequence
  Description of Artificial Sequence: Synthetic oligonucleotide
guaggaaugacgagaugcc

SEQ ID NO: 1821106 - RNA, 19 nt, Artificial Sequence
  Description of Artificial Sequence: Synthetic oligonucleotide
uagcugugaaggcuguccc

SEQ ID NO: 1821107 - RNA, 19 nt, Artificial Sequence
  Description of Artificial Sequence: Synthetic oligonucleotide
uccaauucccguuccuugu

SEQ ID NO: 1821108 - RNA, 19 nt, Artificial Sequence
  Description of Artificial Sequence: Synthetic oligonucleotide
ggaaugacgagaugccucc

SEQ ID NO: 1821109 - RNA, 19 nt, Artificial Sequence
  Description of Artificial Sequence: Synthetic oligonucleotide
ugcccaagaaaguucccca

SEQ ID NO: 1821110 - RNA, 19 nt, Artificial Sequence
  Description of Artificial Sequence: Synthetic oligonucleotide
uccucugaaaggucagucu

SEQ ID NO: 1821111 - RNA, 19 nt, Artificial Sequence
  Description of Artificial Sequence: Synthetic oligonucleotide
ugggaccaaguacaaaauc

SEQ ID NO: 1821112 - RNA, 19 nt, Artificial Sequence
  Description of Artificial Sequence: Synthetic oligonucleotide
agccuuucggauguggcgg

SEQ ID NO: 1821113 - RNA, 19 nt, Artificial Sequence
  Description of Artificial Sequence: Synthetic oligonucleotide
cugcuucguacucagcagg

SEQ ID NO: 1821114 - RNA, 19 nt, Artificial Sequence
  Description of Artificial Sequence: Synthetic oligonucleotide
aacccguaggaaugacgag

SEQ ID NO: 1821115 - RNA, 19 nt, Artificial Sequence
  Description of Artificial Sequence: Synthetic oligonucleotide
aucagagaucacaauagcu

SEQ ID NO: 1821116 - RNA, 19 nt, Artificial Sequence
  Description of Artificial Sequence: Synthetic oligonucleotide
aguuccccaacaguggcuc

SEQ ID NO: 1821117 - RNA, 19 nt, Artificial Sequence
  Description of Artificial Sequence: Synthetic oligonucleotide
cuugcagguggggacaucc

SEQ ID NO: 1821118 - RNA, 19 nt, Artificial Sequence
  Description of Artificial Sequence: Synthetic oligonucleotide
caacccguaggaaugacga

SEQ ID NO: 1821119 - RNA, 19 nt, Artificial Sequence
  Description of Artificial Sequence: Synthetic oligonucleotide
uguggccaucuaacaauag

SEQ ID NO: 1821120 - RNA, 19 nt, Artificial Sequence
  Description of Artificial Sequence: Synthetic oligonucleotide
uaccaaccaucacagugca

SEQ ID NO: 1821121 - RNA, 19 nt, Artificial Sequence
  Description of Artificial Sequence: Synthetic oligonucleotide
  modified_base (7)..(7): a, c, u, g, unknown or other
  modified_base (14)..(14): a, c, u, g, unknown or other
cucugcncuuaaunuccug

SEQ ID NO: 1821122 - RNA, 19 nt, Artificial Sequence
  Description of Artificial Sequence: Synthetic oligonucleotide
ugggaacuccauagcaccc

SEQ ID NO: 1821123 - RNA, 19 nt, Artificial Sequence
  Description of Artificial Sequence: Synthetic oligonucleotide
cugggcacuaccaaccauc

SEQ ID NO: 1821124 - RNA, 19 nt, Artificial Sequence
  Description of Artificial Sequence: Synthetic oligonucleotide
  modified_base (15)..(15): a, c, u, g, unknown or other
aucuggcuggacaanaaag

SEQ ID NO: 1821125 - RNA, 19 nt, Artificial Sequence
  Description of Artificial Sequence: Synthetic oligonucleotide
cauacauugcaccuccaga

SEQ ID NO: 1821126 - RNA, 19 nt, Artificial Sequence
  Description of Artificial Sequence: Synthetic oligonucleotide
gauagaacuggggcuggag

SEQ ID NO: 1821127 - RNA, 19 nt, Artificial Sequence
  Description of Artificial Sequence: Synthetic oligonucleotide
gagaccguugcucccgcag

SEQ ID NO: 1821128 - RNA, 19 nt, Artificial Sequence
  Description of Artificial Sequence: Synthetic oligonucleotide
ugcuucguacucagcagga

SEQ ID NO: 1821129 - RNA, 19 nt, Artificial Sequence
  Description of Artificial Sequence: Synthetic oligonucleotide
ugugcacuguggcgugucg

SEQ ID NO: 1821130 - RNA, 19 nt, Artificial Sequence
  Description of Artificial Sequence: Synthetic oligonucleotide
  modified_base (4)..(4): a, c, u, g, unknown or other
augnuccccagauauuaau

SEQ ID NO: 1821131 - RNA, 19 nt, Artificial Sequence
  Description of Artificial Sequence: Synthetic oligonucleotide
uccuacaguaucccuuggu

SEQ ID NO: 1821132 - RNA, 19 nt, Artificial Sequence
  Description of Artificial Sequence: Synthetic oligonucleotide
aacugggcacuaccaacca

SEQ ID NO: 1821133 - RNA, 19 nt, Artificial Sequence
  Description of Artificial Sequence: Synthetic oligonucleotide
  modified_base (4)..(4): a, c, u, g, unknown or other
  modified_base (11)..(11): a, c, u, g, unknown or other
ugcncuuaaunuccugcuu

SEQ ID NO: 1821134 - RNA, 19 nt, Artificial Sequence
  Description of Artificial Sequence: Synthetic oligonucleotide
gguauugcccugaaccugg

SEQ ID NO: 1821135 - RNA, 19 nt, Artificial Sequence
  Description of Artificial Sequence: Synthetic oligonucleotide
aguuccccggagcugcuuc

SEQ ID NO: 1821136 - RNA, 19 nt, Artificial Sequence
  Description of Artificial Sequence: Synthetic oligonucleotide
  modified_base (8)..(8): a, c, u, g, unknown or other
guucaugnuccccagauau

SEQ ID NO: 1821137 - RNA, 19 nt, Artificial Sequence
  Description of Artificial Sequence: Synthetic oligonucleotide
ugggcacuaccaaccauca

SEQ ID NO: 1821138 - RNA, 19 nt, Artificial Sequence
  Description of Artificial Sequence: Synthetic oligonucleotide
  modified_base (3)..(3): a, c, u, g, unknown or other
aunuccugcuuaucuggcu

SEQ ID NO: 1821139 - RNA, 19 nt, Artificial Sequence
  Description of Artificial Sequence: Synthetic oligonucleotide
ggaaguggucacuuggccc

SEQ ID NO: 1821140 - RNA, 19 nt, Artificial Sequence
  Description of Artificial Sequence: Synthetic oligonucleotide
agaccguugcucccgcagg

SEQ ID NO: 1821141 - RNA, 19 nt, Artificial Sequence
  Description of Artificial Sequence: Synthetic oligonucleotide
ugcgcaggcaauagcggca

SEQ ID NO: 1821142 - RNA, 19 nt, Artificial Sequence
  Description of Artificial Sequence: Synthetic oligonucleotide
aagguccuacaguaucccu

SEQ ID NO: 1821143 - RNA, 19 nt, Artificial Sequence
  Description of Artificial Sequence: Synthetic oligonucleotide
  modified_base (7)..(7): a, c, u, g, unknown or other
uucaugnuccccagauauu

SEQ ID NO: 1821144 - RNA, 19 nt, Artificial Sequence
  Description of Artificial Sequence: Synthetic oligonucleotide
ccugggauagaacuggggc

SEQ ID NO: 1821145 - RNA, 19 nt, Artificial Sequence
  Description of Artificial Sequence: Synthetic oligonucleotide
uaaaagccccaaaguuccc

SEQ ID NO: 1821146 - RNA, 19 nt, Artificial Sequence
  Description of Artificial Sequence: Synthetic oligonucleotide
uugggaccaaguacaaaau

SEQ ID NO: 1821147 - RNA, 19 nt, Artificial Sequence
  Description of Artificial Sequence: Synthetic oligonucleotide
uucccguuccuugugaaaa

SEQ ID NO: 1821148 - RNA, 19 nt, Artificial Sequence
  Description of Artificial Sequence: Synthetic oligonucleotide
guagagguccccugacugc

SEQ ID NO: 1821149 - RNA, 19 nt, Artificial Sequence
  Description of Artificial Sequence: Synthetic oligonucleotide
ccaucuaacaauaguaaga

SEQ ID NO: 1821150 - RNA, 19 nt, Artificial Sequence
  Description of Artificial Sequence: Synthetic oligonucleotide
uccuguugccccuggcucc

SEQ ID NO: 1821151 - RNA, 19 nt, Artificial Sequence
  Description of Artificial Sequence: Synthetic oligonucleotide
uccucuaguccuguugccc

SEQ ID NO: 1821152 - RNA, 19 nt, Artificial Sequence
  Description of Artificial Sequence: Synthetic oligonucleotide
cugccaacccguaggaaug

SEQ ID NO: 1821153 - RNA, 19 nt, Artificial Sequence
  Description of Artificial Sequence: Synthetic oligonucleotide
cguaggaaugacgagaugc

SEQ ID NO: 1821154 - RNA, 19 nt, Artificial Sequence
  Description of Artificial Sequence: Synthetic oligonucleotide
  modified_base (11)..(11): a, c, u, g, unknown or other
ucaguucaugnuccccaga

SEQ ID NO: 1821155 - RNA, 19 nt, Artificial Sequence
  Description of Artificial Sequence: Synthetic oligonucleotide
  modified_base (9)..(9): a, c, u, g, unknown or other
cuggacaanaaagguguac

SEQ ID NO: 1821156 - RNA, 19 nt, Artificial Sequence
  Description of Artificial Sequence: Synthetic oligonucleotide
gggaagaaccuucauucug

SEQ ID NO: 1821157 - RNA, 19 nt, Artificial Sequence
  Description of Artificial Sequence: Synthetic oligonucleotide
acuccauagcaccccaaga

SEQ ID NO: 1821158 - RNA, 19 nt, Artificial Sequence
  Description of Artificial Sequence: Synthetic oligonucleotide
cugcugacuguguucuggg

SEQ ID NO: 1821159 - RNA, 19 nt, Artificial Sequence
  Description of Artificial Sequence: Synthetic oligonucleotide
gaaccuucauucugccaac

SEQ ID NO: 1821160 - RNA, 19 nt, Artificial Sequence
  Description of Artificial Sequence: Synthetic oligonucleotide
guaagagcaagccuggcau

SEQ ID NO: 1821161 - RNA, 19 nt, Artificial Sequence
  Description of Artificial Sequence: Synthetic oligonucleotide
aagggugcccaagaaaguu

SEQ ID NO: 1821162 - RNA, 19 nt, Artificial Sequence
  Description of Artificial Sequence: Synthetic oligonucleotide
cugcgcaggcaauagcggc

SEQ ID NO: 1821163 - RNA, 19 nt, Artificial Sequence
  Description of Artificial Sequence: Synthetic oligonucleotide
cuuguccaauucccguucc

SEQ ID NO: 1821164 - RNA, 19 nt, Artificial Sequence
  Description of Artificial Sequence: Synthetic oligonucleotide
gaucccucuuguccaauuc

SEQ ID NO: 1821165 - RNA, 19 nt, Artificial Sequence
  Description of Artificial Sequence: Synthetic oligonucleotide
cacagugcagucacaagga

SEQ ID NO: 1821166 - RNA, 19 nt, Artificial Sequence
  Description of Artificial Sequence: Synthetic oligonucleotide
ugcaaagguccuacaguau

SEQ ID NO: 1821167 - RNA, 19 nt, Artificial Sequence
  Description of Artificial Sequence: Synthetic oligonucleotide
uccuagaauggagcuagcu

SEQ ID NO: 1821168 - RNA, 19 nt, Artificial Sequence
  Description of Artificial Sequence: Synthetic oligonucleotide
  modified_base (14)..(14): a, c, u, g, unknown or other
ugaccugcucugcncuuaa

SEQ ID NO: 1821169 - RNA, 19 nt, Artificial Sequence
  Description of Artificial Sequence: Synthetic oligonucleotide
gguccuacaguaucccuug

SEQ ID NO: 1821170 - RNA, 19 nt, Artificial Sequence
  Description of Artificial Sequence: Synthetic oligonucleotide
uaggaaugacgagaugccu

SEQ ID NO: 1821171 - RNA, 19 nt, Artificial Sequence
  Description of Artificial Sequence: Synthetic oligonucleotide
uaagagcaagccuggcauc

SEQ ID NO: 1821172 - RNA, 19 nt, Artificial Sequence
  Description of Artificial Sequence: Synthetic oligonucleotide
agccucgaugguauugccc

SEQ ID NO: 1821173 - RNA, 19 nt, Artificial Sequence
  Description of Artificial Sequence: Synthetic oligonucleotide
  modified_base (3)..(3): a, c, u, g, unknown or other
  modified_base (10)..(10): a, c, u, g, unknown or other
gcncuuaaunuccugcuua

SEQ ID NO: 1821174 - RNA, 19 nt, Artificial Sequence
  Description of Artificial Sequence: Synthetic oligonucleotide
acccguaggaaugacgaga

SEQ ID NO: 1821175 - RNA, 19 nt, Artificial Sequence
  Description of Artificial Sequence: Synthetic oligonucleotide
gcaaagguccuacaguauc

SEQ ID NO: 1821176 - RNA, 19 nt, Artificial Sequence
  Description of Artificial Sequence: Synthetic oligonucleotide
agagaucacaauagcuucu

SEQ ID NO: 1821177 - RNA, 19 nt, Artificial Sequence
  Description of Artificial Sequence: Synthetic oligonucleotide
  modified_base (12)..(12): a, c, u, g, unknown or other
  modified_base (19)..(19): a, c, u, g, unknown or other
accugcucugcncuuaaun

SEQ ID NO: 1821178 - RNA, 19 nt, Artificial Sequence
  Description of Artificial Sequence: Synthetic oligonucleotide
  modified_base (2)..(2): a, c, u, g, unknown or other
gnuccccagauauuaauuu

SEQ ID NO: 1821179 - RNA, 19 nt, Artificial Sequence
  Description of Artificial Sequence: Synthetic oligonucleotide
uguggcgugucgucguagu

SEQ ID NO: 1821180 - RNA, 19 nt, Artificial Sequence
  Description of Artificial Sequence: Synthetic oligonucleotide
uuguccaauucccguuccu

SEQ ID NO: 1821181 - RNA, 19 nt, Artificial Sequence
  Description of Artificial Sequence: Synthetic oligonucleotide
ugucgucguaguguauaag

SEQ ID NO: 1821182 - RNA, 19 nt, Artificial Sequence
  Description of Artificial Sequence: Synthetic oligonucleotide
gaccguugcucccgcaggc

SEQ ID NO: 1821183 - RNA, 19 nt, Artificial Sequence
  Description of Artificial Sequence: Synthetic oligonucleotide
caauagcggcauucauagg

SEQ ID NO: 1821184 - RNA, 19 nt, Artificial Sequence
  Description of Artificial Sequence: Synthetic oligonucleotide
cuugcaaagguccuacagu

SEQ ID NO: 1821185 - RNA, 19 nt, Artificial Sequence
  Description of Artificial Sequence: Synthetic oligonucleotide
uggucacuuggccccaccu

SEQ ID NO: 1821186 - RNA, 19 nt, Artificial Sequence
  Description of Artificial Sequence: Synthetic oligonucleotide
guagcugcgcaggcaauag

SEQ ID NO: 1821187 - RNA, 19 nt, Artificial Sequence
  Description of Artificial Sequence: Synthetic oligonucleotide
  modified_base (9)..(9): a, c, u, g, unknown or other
aguucaugnuccccagaua

SEQ ID NO: 1821188 - RNA, 19 nt, Artificial Sequence
  Description of Artificial Sequence: Synthetic oligonucleotide
guaucccuugguuccacca

SEQ ID NO: 1821189 - RNA, 19 nt, Artificial Sequence
  Description of Artificial Sequence: Synthetic oligonucleotide
augguaugguagaugagau

SEQ ID NO: 1821190 - RNA, 19 nt, Artificial Sequence
  Description of Artificial Sequence: Synthetic oligonucleotide
uucauucugccaacccgua

SEQ ID NO: 1821191 - RNA, 19 nt, Artificial Sequence
  Description of Artificial Sequence: Synthetic oligonucleotide
ccuugcaaagguccuacag

SEQ ID NO: 1821192 - RNA, 19 nt, Artificial Sequence
  Description of Artificial Sequence: Synthetic oligonucleotide
cuucauucugccaacccgu

SEQ ID NO: 1821193 - RNA, 19 nt, Artificial Sequence
  Description of Artificial Sequence: Synthetic oligonucleotide
uggcgugucgucguagugu

SEQ ID NO: 1821194 - RNA, 19 nt, Artificial Sequence
  Description of Artificial Sequence: Synthetic oligonucleotide
gcugcuucguacucagcag

SEQ ID NO: 1821195 - RNA, 19 nt, Artificial Sequence
  Description of Artificial Sequence: Synthetic oligonucleotide
uuuugggaccaaguacaaa

SEQ ID NO: 1821196 - RNA, 19 nt, Artificial Sequence
  Description of Artificial Sequence: Synthetic oligonucleotide
acgagaugccuccagccuu

SEQ ID NO: 1821197 - RNA, 19 nt, Artificial Sequence
  Description of Artificial Sequence: Synthetic oligonucleotide
ucacuuggccccaccuccu

SEQ ID NO: 1821198 - RNA, 19 nt, Artificial Sequence
  Description of Artificial Sequence: Synthetic oligonucleotide
guuccccggagcugcuucg

SEQ ID NO: 1821199 - RNA, 19 nt, Artificial Sequence
  Description of Artificial Sequence: Synthetic oligonucleotide
ugguaugguagaugagauu

SEQ ID NO: 1821200 - RNA, 19 nt, Artificial Sequence
  Description of Artificial Sequence: Synthetic oligonucleotide
acagugcagucacaaggaa

SEQ ID NO: 1821201 - RNA, 19 nt, Artificial Sequence
  Description of Artificial Sequence: Synthetic oligonucleotide
cuguaaaagccccaaaguu

SEQ ID NO: 1821202 - RNA, 19 nt, Artificial Sequence
  Description of Artificial Sequence: Synthetic oligonucleotide
acaugucuugcaggugggg

SEQ ID NO: 1821203 - RNA, 19 nt, Artificial Sequence
  Description of Artificial Sequence: Synthetic oligonucleotide
ugacuguguucugggaacu

SEQ ID NO: 1821204 - RNA, 19 nt, Artificial Sequence
  Description of Artificial Sequence: Synthetic oligonucleotide
uccccugacugcguguagc

SEQ ID NO: 1821205 - RNA, 19 nt, Artificial Sequence
  Description of Artificial Sequence: Synthetic oligonucleotide
cuccucuaguccuguugcc

SEQ ID NO: 1821206 - RNA, 19 nt, Artificial Sequence
  Description of Artificial Sequence: Synthetic oligonucleotide
  modified_base (18)..(18): a, c, u, g, unknown or other
cuuaucuggcuggacaana

SEQ ID NO: 1821207 - RNA, 19 nt, Artificial Sequence
  Description of Artificial Sequence: Synthetic oligonucleotide
uaguaagagcaagccuggc

SEQ ID NO: 1821208 - RNA, 19 nt, Artificial Sequence
  Description of Artificial Sequence: Synthetic oligonucleotide
ccuccucuaguccuguugc

SEQ ID NO: 1821209 - RNA, 19 nt, Artificial Sequence
  Description of Artificial Sequence: Synthetic oligonucleotide
aaguuccccaacaguggcu

SEQ ID NO: 1821210 - RNA, 19 nt, Artificial Sequence
  Description of Artificial Sequence: Synthetic oligonucleotide
ccucaaaagugucuagcug

SEQ ID NO: 1821211 - RNA, 19 nt, Artificial Sequence
  Description of Artificial Sequence: Synthetic oligonucleotide
agaugguaugguagaugag

SEQ ID NO: 1821212 - RNA, 19 nt, Artificial Sequence
  Description of Artificial Sequence: Synthetic oligonucleotide
uauugcccugaaccuggaa

SEQ ID NO: 1821213 - RNA, 19 nt, Artificial Sequence
  Description of Artificial Sequence: Synthetic oligonucleotide
auucccguuccuugugaaa

SEQ ID NO: 1821214 - RNA, 19 nt, Artificial Sequence
  Description of Artificial Sequence: Synthetic oligonucleotide
ccaacccguaggaaugacg

SEQ ID NO: 1821215 - RNA, 19 nt, Artificial Sequence
  Description of Artificial Sequence: Synthetic oligonucleotide
ccucuaguccuguugcccc

SEQ ID NO: 1821216 - RNA, 19 nt, Artificial Sequence
  Description of Artificial Sequence: Synthetic oligonucleotide
guggccaucuaacaauagu

SEQ ID NO: 1821217 - RNA, 19 nt, Artificial Sequence
  Description of Artificial Sequence: Synthetic oligonucleotide
  modified_base (11)..(11): a, c, u, g, unknown or other
ggcuggacaanaaaggugu

SEQ ID NO: 1821218 - RNA, 19 nt, Artificial Sequence
  Description of Artificial Sequence: Synthetic oligonucleotide
ucgaugguauugcccugaa

SEQ ID NO: 1821219 - RNA, 19 nt, Artificial Sequence
  Description of Artificial Sequence: Synthetic oligonucleotide
  modified_base (10)..(10): a, c, u, g, unknown or other
caguucaugnuccccagau

SEQ ID NO: 1821220 - RNA, 19 nt, Artificial Sequence
  Description of Artificial Sequence: Synthetic oligonucleotide
gagguccccugacugcgug

SEQ ID NO: 1821221 - RNA, 19 nt, Artificial Sequence
  Description of Artificial Sequence: Synthetic oligonucleotide
gacgagaugccuccagccu

SEQ ID NO: 1821222 - RNA, 19 nt, Artificial Sequence
  Description of Artificial Sequence: Synthetic oligonucleotide
guccuacaguaucccuugg

SEQ ID NO: 1821223 - RNA, 19 nt, Artificial Sequence
  Description of Artificial Sequence: Synthetic oligonucleotide
auugcaccuccagauggga

SEQ ID NO: 1821224 - RNA, 19 nt, Artificial Sequence
  Description of Artificial Sequence: Synthetic oligonucleotide
ucuaguccuguugccccug

SEQ ID NO: 1821225 - RNA, 19 nt, Artificial Sequence
  Description of Artificial Sequence: Synthetic oligonucleotide
uaguccuguugccccuggc

SEQ ID NO: 1821226 - RNA, 19 nt, Artificial Sequence
  Description of Artificial Sequence: Synthetic oligonucleotide
gggaccaaguacaaaaucu

SEQ ID NO: 1821227 - RNA, 19 nt, Artificial Sequence
  Description of Artificial Sequence: Synthetic oligonucleotide
cugggauagaacuggggcu

SEQ ID NO: 1821228 - RNA, 19 nt, Artificial Sequence
  Description of Artificial Sequence: Synthetic oligonucleotide
uugcagguggggacauccu

SEQ ID NO: 1821229 - RNA, 19 nt, Artificial Sequence
  Description of Artificial Sequence: Synthetic oligonucleotide
aaagguguacagacaccuu

SEQ ID NO: 1821230 - RNA, 19 nt, Artificial Sequence
  Description of Artificial Sequence: Synthetic oligonucleotide
  modified_base (5)..(5): a, c, u, g, unknown or other
caugnuccccagauauuaa

SEQ ID NO: 1821231 - RNA, 19 nt, Artificial Sequence
  Description of Artificial Sequence: Synthetic oligonucleotide
gguuugcuucguuuggcca

SEQ ID NO: 1821232 - RNA, 19 nt, Artificial Sequence
  Description of Artificial Sequence: Synthetic oligonucleotide
cuucguuuggccagguccu

SEQ ID NO: 1821233 - RNA, 19 nt, Artificial Sequence
  Description of Artificial Sequence: Synthetic oligonucleotide
cgucguaguguauaagaac

SEQ ID NO: 1821234 - RNA, 19 nt, Artificial Sequence
  Description of Artificial Sequence: Synthetic oligonucleotide
agaauggagcuagcuucug

SEQ ID NO: 1821235 - RNA, 19 nt, Artificial Sequence
  Description of Artificial Sequence: Synthetic oligonucleotide
cuugggaagaaccuucauu

SEQ ID NO: 1821236 - RNA, 19 nt, Artificial Sequence
  Description of Artificial Sequence: Synthetic oligonucleotide
  modified_base (5)..(5): a, c, u, g, unknown or other
  modified_base (12)..(12): a, c, u, g, unknown or other
cugcncuuaaunuccugcu

SEQ ID NO: 1821237 - RNA, 19 nt, Artificial Sequence
  Description of Artificial Sequence: Synthetic oligonucleotide
agaucccucuuguccaauu

SEQ ID NO: 1821238 - RNA, 19 nt, Artificial Sequence
  Description of Artificial Sequence: Synthetic oligonucleotide
ggaggauagaagccuugca

SEQ ID NO: 1821239 - RNA, 19 nt, Artificial Sequence
  Description of Artificial Sequence: Synthetic oligonucleotide
aucuuugggugguccucca

SEQ ID NO: 1821240 - RNA, 19 nt, Artificial Sequence
  Description of Artificial Sequence: Synthetic oligonucleotide
agagcaagccuggcaucag

SEQ ID NO: 1821241 - RNA, 19 nt, Artificial Sequence
  Description of Artificial Sequence: Synthetic oligonucleotide
gggugcccaagaaaguucc

SEQ ID NO: 1821242 - RNA, 19 nt, Artificial Sequence
  Description of Artificial Sequence: Synthetic oligonucleotide
aggcaauagcggcauucau

SEQ ID NO: 1821243 - RNA, 19 nt, Artificial Sequence
  Description of Artificial Sequence: Synthetic oligonucleotide
uccucauugugagccuuuc

SEQ ID NO: 1821244 - RNA, 19 nt, Artificial Sequence
  Description of Artificial Sequence: Synthetic oligonucleotide
ucguuuggccagguccuca

SEQ ID NO: 1821245 - RNA, 19 nt, Artificial Sequence
  Description of Artificial Sequence: Synthetic oligonucleotide
caauucccguuccuuguga

SEQ ID NO: 1821246 - RNA, 19 nt, Artificial Sequence
  Description of Artificial Sequence: Synthetic oligonucleotide
cccucuuguccaauucccg

SEQ ID NO: 1821247 - RNA, 19 nt, Artificial Sequence
  Description of Artificial Sequence: Synthetic oligonucleotide
  modified_base (2)..(2): a, c, u, g, unknown or other
  modified_base (9)..(9): a, c, u, g, unknown or other
cncuuaaunuccugcuuau

SEQ ID NO: 1821248 - RNA, 19 nt, Artificial Sequence
  Description of Artificial Sequence: Synthetic oligonucleotide
cagccucgaugguauugcc

SEQ ID NO: 1821249 - RNA, 19 nt, Artificial Sequence
  Description of Artificial Sequence: Synthetic oligonucleotide
gcugacuguguucugggaa

SEQ ID NO: 1821250 - RNA, 19 nt, Artificial Sequence
  Description of Artificial Sequence: Synthetic oligonucleotide
ucguacucagcaggagggu

SEQ ID NO: 1821251 - RNA, 19 nt, Artificial Sequence
  Description of Artificial Sequence: Synthetic oligonucleotide
gcagaugguaugguagaug

SEQ ID NO: 1821252 - RNA, 19 nt, Artificial Sequence
  Description of Artificial Sequence: Synthetic oligonucleotide
aagccuggcaucaguucau

SEQ ID NO: 1821253 - RNA, 19 nt, Artificial Sequence
  Description of Artificial Sequence: Synthetic oligonucleotide
acaguaucccuugguucca

SEQ ID NO: 1821254 - RNA, 19 nt, Artificial Sequence
  Description of Artificial Sequence: Synthetic oligonucleotide
ggagccugggauagaacug

SEQ ID NO: 1821255 - RNA, 19 nt, Artificial Sequence
  Description of Artificial Sequence: Synthetic oligonucleotide
agguccuacaguaucccuu

SEQ ID NO: 1821256 - RNA, 19 nt, Artificial Sequence
  Description of Artificial Sequence: Synthetic oligonucleotide
ugccaacccguaggaauga

SEQ ID NO: 1821257 - RNA, 19 nt, Artificial Sequence
  Description of Artificial Sequence: Synthetic oligonucleotide
gcuccucaaaagugucuag

SEQ ID NO: 1821258 - RNA, 19 nt, Artificial Sequence
  Description of Artificial Sequence: Synthetic oligonucleotide
cugagaccguugcucccgc

SEQ ID NO: 1821259 - RNA, 19 nt, Artificial Sequence
  Description of Artificial Sequence: Synthetic oligonucleotide
guacucagcaggaggguaa

SEQ ID NO: 1821260 - RNA, 19 nt, Artificial Sequence
  Description of Artificial Sequence: Synthetic oligonucleotide
aggguaaagugggcucaag

SEQ ID NO: 1821261 - RNA, 19 nt, Artificial Sequence
  Description of Artificial Sequence: Synthetic oligonucleotide
aagccuugcaaagguccua

SEQ ID NO: 1821262 - RNA, 19 nt, Artificial Sequence
  Description of Artificial Sequence: Synthetic oligonucleotide
guggcgugucgucguagug

SEQ ID NO: 1821263 - RNA, 19 nt, Artificial Sequence
  Description of Artificial Sequence: Synthetic oligonucleotide
gugucgucguaguguauaa

SEQ ID NO: 1821264 - RNA, 19 nt, Artificial Sequence
  Description of Artificial Sequence: Synthetic oligonucleotide
ugcuucguuuggccagguc

SEQ ID NO: 1821265 - RNA, 19 nt, Artificial Sequence
  Description of Artificial Sequence: Synthetic oligonucleotide
gugcagucacaaggaaacc

SEQ ID NO: 1821266 - RNA, 19 nt, Artificial Sequence
  Description of Artificial Sequence: Synthetic oligonucleotide
ucuagcugugaaggcuguc

SEQ ID NO: 1821267 - RNA, 19 nt, Artificial Sequence
  Description of Artificial Sequence: Synthetic oligonucleotide
cuguggccaucuaacaaua

SEQ ID NO: 1821268 - RNA, 19 nt, Artificial Sequence
  Description of Artificial Sequence: Synthetic oligonucleotide
ccucauugugagccuuucg

SEQ ID NO: 1821269 - RNA, 19 nt, Artificial Sequence
  Description of Artificial Sequence: Synthetic oligonucleotide
ugagaccguugcucccgca

SEQ ID NO: 1821270 - RNA, 19 nt, Artificial Sequence
  Description of Artificial Sequence: Synthetic oligonucleotide
gcugcgcaggcaauagcgg

SEQ ID NO: 1821271 - RNA, 19 nt, Artificial Sequence
  Description of Artificial Sequence: Synthetic oligonucleotide
caggcaauagcggcauuca

SEQ ID NO: 1821272 - RNA, 19 nt, Artificial Sequence
  Description of Artificial Sequence: Synthetic oligonucleotide
ugggcucaagcagggcgug

SEQ ID NO: 1821273 - RNA, 19 nt, Artificial Sequence
  Description of Artificial Sequence: Synthetic oligonucleotide
agaacaggagaaggucuuu

SEQ ID NO: 1821274 - RNA, 19 nt, Artificial Sequence
  Description of Artificial Sequence: Synthetic oligonucleotide
gacuguguucugggaacuc

SEQ ID NO: 1821275 - RNA, 19 nt, Artificial Sequence
  Description of Artificial Sequence: Synthetic oligonucleotide
acccucagacucucccaga

SEQ ID NO: 1821276 - RNA, 19 nt, Artificial Sequence
  Description of Artificial Sequence: Synthetic oligonucleotide
gccucgaugguauugcccu

SEQ ID NO: 1821277 - RNA, 19 nt, Artificial Sequence
  Description of Artificial Sequence: Synthetic oligonucleotide
ggcaauagcggcauucaua

SEQ ID NO: 1821278 - RNA, 19 nt, Artificial Sequence
  Description of Artificial Sequence: Synthetic oligonucleotide
gguggggacauccucugua

SEQ ID NO: 1821279 - RNA, 19 nt, Artificial Sequence
  Description of Artificial Sequence: Synthetic oligonucleotide
cucgaugguauugcccuga

SEQ ID NO: 1821280 - RNA, 19 nt, Artificial Sequence
  Description of Artificial Sequence: Synthetic oligonucleotide
caaaagugucuagcuguga

SEQ ID NO: 1821281 - RNA, 19 nt, Artificial Sequence
  Description of Artificial Sequence: Synthetic oligonucleotide
cucccagaucccucuuguc

SEQ ID NO: 1821282 - RNA, 19 nt, Artificial Sequence
  Description of Artificial Sequence: Synthetic oligonucleotide
ccuugguuccaccacccuc

SEQ ID NO: 1821283 - RNA, 19 nt, Artificial Sequence
  Description of Artificial Sequence: Synthetic oligonucleotide
gggauagaacuggggcugg

SEQ ID NO: 1821284 - RNA, 19 nt, Artificial Sequence
  Description of Artificial Sequence: Synthetic oligonucleotide
guguucugggaacuccaua

SEQ ID NO: 1821285 - RNA, 19 nt, Artificial Sequence
  Description of Artificial Sequence: Synthetic oligonucleotide
gcaggcaauagcggcauuc

SEQ ID NO: 1821286 - RNA, 19 nt, Artificial Sequence
  Description of Artificial Sequence: Synthetic oligonucleotide
guaugguagaugagauucu

SEQ ID NO: 1821287 - RNA, 19 nt, Artificial Sequence
  Description of Artificial Sequence: Synthetic oligonucleotide
ccaauucccguuccuugug

SEQ ID NO: 1821288 - RNA, 19 nt, Artificial Sequence
  Description of Artificial Sequence: Synthetic oligonucleotide
gaugccagcacagcccgau

SEQ ID NO: 1821289 - RNA, 19 nt, Artificial Sequence
  Description of Artificial Sequence: Synthetic oligonucleotide
gcuucguacucagcaggag

SEQ ID NO: 1821290 - RNA, 19 nt, Artificial Sequence
  Description of Artificial Sequence: Synthetic oligonucleotide
uggccccaccuccucuagu

SEQ ID NO: 1821291 - RNA, 19 nt, Artificial Sequence
  Description of Artificial Sequence: Synthetic oligonucleotide
gagcaagccuggcaucagu

SEQ ID NO: 1821292 - RNA, 19 nt, Artificial Sequence
  Description of Artificial Sequence: Synthetic oligonucleotide
guacagacaccuucagcuu

SEQ ID NO: 1821293 - RNA, 19 nt, Artificial Sequence
  Description of Artificial Sequence: Synthetic oligonucleotide
gccugggauagaacugggg

SEQ ID NO: 1821294 - RNA, 19 nt, Artificial Sequence
  Description of Artificial Sequence: Synthetic oligonucleotide
ggcgguagagguccccuga

SEQ ID NO: 1821295 - RNA, 19 nt, Artificial Sequence
  Description of Artificial Sequence: Synthetic oligonucleotide
acuguggcgugucgucgua

SEQ ID NO: 1821296 - RNA, 19 nt, Artificial Sequence
  Description of Artificial Sequence: Synthetic oligonucleotide
gaggguaaagugggcucaa

SEQ ID NO: 1821297 - RNA, 19 nt, Artificial Sequence
  Description of Artificial Sequence: Synthetic oligonucleotide
gcagucacaaggaaacccu

SEQ ID NO: 1821298 - RNA, 19 nt, Artificial Sequence
  Description of Artificial Sequence: Synthetic oligonucleotide
ugggucugguuugcuucgu

SEQ ID NO: 1821299 - RNA, 19 nt, Artificial Sequence
  Description of Artificial Sequence: Synthetic oligonucleotide
cuguggcgugucgucguag

SEQ ID NO: 1821300 - RNA, 19 nt, Artificial Sequence
  Description of Artificial Sequence: Synthetic oligonucleotide
aggcagggugaggucacca

SEQ ID NO: 1821301 - RNA, 19 nt, Artificial Sequence
  Description of Artificial Sequence: Synthetic oligonucleotide
accaaccaucacagugcag

SEQ ID NO: 1821302 - RNA, 19 nt, Artificial Sequence
  Description of Artificial Sequence: Synthetic oligonucleotide
cuuggccccaccuccucua

SEQ ID NO: 1821303 - RNA, 19 nt, Artificial Sequence
  Description of Artificial Sequence: Synthetic oligonucleotide
cccguuccuugugaaaagc

SEQ ID NO: 1821304 - RNA, 19 nt, Artificial Sequence
  Description of Artificial Sequence: Synthetic oligonucleotide
cccgaugggccaagaacug

SEQ ID NO: 1821305 - RNA, 19 nt, Artificial Sequence
  Description of Artificial Sequence: Synthetic oligonucleotide
ggcgugucgucguagugua

SEQ ID NO: 1821306 - RNA, 19 nt, Artificial Sequence
  Description of Artificial Sequence: Synthetic oligonucleotide
aggaaacccugagaccguu

SEQ ID NO: 1821307 - RNA, 19 nt, Artificial Sequence
  Description of Artificial Sequence: Synthetic oligonucleotide
auguggcgguagagguccc

SEQ ID NO: 1821308 - RNA, 19 nt, Artificial Sequence
  Description of Artificial Sequence: Synthetic oligonucleotide
accuucagcuugggaagaa

SEQ ID NO: 1821309 - RNA, 19 nt, Artificial Sequence
  Description of Artificial Sequence: Synthetic oligonucleotide
accguugcucccgcaggcu

SEQ ID NO: 1821310 - RNA, 19 nt, Artificial Sequence
  Description of Artificial Sequence: Synthetic oligonucleotide
ccgaugggccaagaacugg

SEQ ID NO: 1821311 - RNA, 19 nt, Artificial Sequence
  Description of Artificial Sequence: Synthetic oligonucleotide
uccccggagcugcuucgua

SEQ ID NO: 1821312 - RNA, 19 nt, Artificial Sequence
  Description of Artificial Sequence: Synthetic oligonucleotide
uuccccggagcugcuucgu

SEQ ID NO: 1821313 - RNA, 19 nt, Artificial Sequence
  Description of Artificial Sequence: Synthetic oligonucleotide
ucuugcagguggggacauc

SEQ ID NO: 1821314 - RNA, 19 nt, Artificial Sequence
  Description of Artificial Sequence: Synthetic oligonucleotide
guccuagaauggagcuagc

SEQ ID NO: 1821315 - RNA, 19 nt, Artificial Sequence
  Description of Artificial Sequence: Synthetic oligonucleotide
caccacccucagacucucc

SEQ ID NO: 1821316 - RNA, 19 nt, Artificial Sequence
  Description of Artificial Sequence: Synthetic oligonucleotide
gcccgaugggccaagaacu

SEQ ID NO: 1821317 - RNA, 19 nt, Artificial Sequence
  Description of Artificial Sequence: Synthetic oligonucleotide
  modified_base (18)..(18): a, c, u, g, unknown or other
ccuggcaucaguucaugnu

SEQ ID NO: 1821318 - RNA, 19 nt, Artificial Sequence
  Description of Artificial Sequence: Synthetic oligonucleotide
gcgguagagguccccugac

SEQ ID NO: 1821319 - RNA, 19 nt, Artificial Sequence
  Description of Artificial Sequence: Synthetic oligonucleotide
uugcuucguuuggccaggu

SEQ ID NO: 1821320 - RNA, 19 nt, Artificial Sequence
  Description of Artificial Sequence: Synthetic oligonucleotide
guugccccuggcuccucaa

SEQ ID NO: 1821321 - RNA, 19 nt, Artificial Sequence
  Description of Artificial Sequence: Synthetic oligonucleotide
gugggcucaagcagggcgu

SEQ ID NO: 1821322 - RNA, 19 nt, Artificial Sequence
  Description of Artificial Sequence: Synthetic oligonucleotide
cucuaguccuguugccccu

SEQ ID NO: 1821323 - RNA, 19 nt, Artificial Sequence
  Description of Artificial Sequence: Synthetic oligonucleotide
ccuagaauggagcuagcuu

SEQ ID NO: 1821324 - RNA, 19 nt, Artificial Sequence
  Description of Artificial Sequence: Synthetic oligonucleotide
guauugcccugaaccugga

SEQ ID NO: 1821325 - RNA, 19 nt, Artificial Sequence
  Description of Artificial Sequence: Synthetic oligonucleotide
cagacucucccagaucccu

SEQ ID NO: 1821326 - RNA, 19 nt, Artificial Sequence
  Description of Artificial Sequence: Synthetic oligonucleotide
agagguccccugacugcgu

SEQ ID NO: 1821327 - RNA, 19 nt, Artificial Sequence
  Description of Artificial Sequence: Synthetic oligonucleotide
  modified_base (19)..(19): a, c, u, g, unknown or other
gccuggcaucaguucaugn

SEQ ID NO: 1821328 - RNA, 19 nt, Artificial Sequence
  Description of Artificial Sequence: Synthetic oligonucleotide
gggcacuaccaaccaucac

SEQ ID NO: 1821329 - RNA, 19 nt, Artificial Sequence
  Description of Artificial Sequence: Synthetic oligonucleotide
cacagcccgaugggccaag

SEQ ID NO: 1821330 - RNA, 19 nt, Artificial Sequence
  Description of Artificial Sequence: Synthetic oligonucleotide
ggucugguuugcuucguuu

SEQ ID NO: 1821331 - RNA, 19 nt, Artificial Sequence
  Description of Artificial Sequence: Synthetic oligonucleotide
  modified_base (17)..(17): a, c, u, g, unknown or other
ggcugaccugcucugcncu

SEQ ID NO: 1821332 - RNA, 19 nt, Artificial Sequence
  Description of Artificial Sequence: Synthetic oligonucleotide
gccaagaacugggcacuac

SEQ ID NO: 1821333 - RNA, 19 nt, Artificial Sequence
  Description of Artificial Sequence: Synthetic oligonucleotide
  modified_base (19)..(19): a, c, u, g, unknown or other
gcuuaucuggcuggacaan

SEQ ID NO: 1821334 - RNA, 19 nt, Artificial Sequence
  Description of Artificial Sequence: Synthetic oligonucleotide
ccucuuguccaauucccgu

SEQ ID NO: 1821335 - RNA, 19 nt, Artificial Sequence
  Description of Artificial Sequence: Synthetic oligonucleotide
gccgcucucgugugugcac

SEQ ID NO: 1821336 - RNA, 19 nt, Artificial Sequence
  Description of Artificial Sequence: Synthetic oligonucleotide
  modified_base (15)..(15): a, c, u, g, unknown or other
cugaccugcucugcncuua

SEQ ID NO: 1821337 - RNA, 19 nt, Artificial Sequence
  Description of Artificial Sequence: Synthetic oligonucleotide
acagcccgaugggccaaga

SEQ ID NO: 1821338 - RNA, 19 nt, Artificial Sequence
  Description of Artificial Sequence: Synthetic oligonucleotide
ccugcuuaucuggcuggac

SEQ ID NO: 1821339 - RNA, 19 nt, Artificial Sequence
  Description of Artificial Sequence: Synthetic oligonucleotide
ccguugcucccgcaggcuc

SEQ ID NO: 1821340 - RNA, 19 nt, Artificial Sequence
  Description of Artificial Sequence: Synthetic oligonucleotide
ccguaggaaugacgagaug

SEQ ID NO: 1821341 - RNA, 19 nt, Artificial Sequence
  Description of Artificial Sequence: Synthetic oligonucleotide
cccguaggaaugacgagau

SEQ ID NO: 1821342 - RNA, 19 nt, Artificial Sequence
  Description of Artificial Sequence: Synthetic oligonucleotide
cacuaccaaccaucacagu

SEQ ID NO: 1821343 - RNA, 19 nt, Artificial Sequence
  Description of Artificial Sequence: Synthetic oligonucleotide
gucuagcugugaaggcugu

SEQ ID NO: 1821344 - RNA, 19 nt, Artificial Sequence
  Description of Artificial Sequence: Synthetic oligonucleotide
gugcacuguggcgugucgu

SEQ ID NO: 1821345 - RNA, 19 nt, Artificial Sequence
  Description of Artificial Sequence: Synthetic oligonucleotide
cagcccgaugggccaagaa

SEQ ID NO: 1821346 - RNA, 19 nt, Artificial Sequence
  Description of Artificial Sequence: Synthetic oligonucleotide
cucuguugucugggagcca

SEQ ID NO: 1821347 - RNA, 19 nt, Artificial Sequence
  Description of Artificial Sequence: Synthetic oligonucleotide
gccaacccguaggaaugac

SEQ ID NO: 1821348 - RNA, 19 nt, Artificial Sequence
  Description of Artificial Sequence: Synthetic oligonucleotide
gguccccugacugcgugua

SEQ ID NO: 1821349 - RNA, 19 nt, Artificial Sequence
  Description of Artificial Sequence: Synthetic oligonucleotide
ccggagcugcuucguacuc

SEQ ID NO: 1821350 - RNA, 19 nt, Artificial Sequence
  Description of Artificial Sequence: Synthetic oligonucleotide
guuuggccagguccucauu

SEQ ID NO: 1821351 - RNA, 19 nt, Artificial Sequence
  Description of Artificial Sequence: Synthetic oligonucleotide
ccagaucccucuuguccaa

SEQ ID NO: 1821352 - RNA, 19 nt, Artificial Sequence
  Description of Artificial Sequence: Synthetic oligonucleotide
cgugucgucguaguguaua

SEQ ID NO: 1821353 - RNA, 19 nt, Artificial Sequence
  Description of Artificial Sequence: Synthetic oligonucleotide
cgcucucgugugugcacug

SEQ ID NO: 1821354 - RNA, 19 nt, Artificial Sequence
  Description of Artificial Sequence: Synthetic oligonucleotide
ccaccagugcucugucucu

SEQ ID NO: 1821355 - RNA, 19 nt, Artificial Sequence
  Description of Artificial Sequence: Synthetic oligonucleotide
  modified_base (13)..(13): a, c, u, g, unknown or other
gaccugcucugcncuuaau

SEQ ID NO: 1821356 - RNA, 19 nt, Artificial Sequence
  Description of Artificial Sequence: Synthetic oligonucleotide
  modified_base (8)..(8): a, c, u, g, unknown or other
  modified_base (15)..(15): a, c, u, g, unknown or other
gcucugcncuuaaunuccu

SEQ ID NO: 1821357 - RNA, 19 nt, Artificial Sequence
  Description of Artificial Sequence: Synthetic oligonucleotide
ggaugccagcacagcccga

SEQ ID NO: 1821358 - RNA, 19 nt, Artificial Sequence
  Description of Artificial Sequence: Synthetic oligonucleotide
cagaucccucuuguccaau

SEQ ID NO: 1821359 - RNA, 19 nt, Artificial Sequence
  Description of Artificial Sequence: Synthetic oligonucleotide
gcgcaggcaauagcggcau

SEQ ID NO: 1821360 - RNA, 19 nt, Artificial Sequence
  Description of Artificial Sequence: Synthetic oligonucleotide
cgguagagguccccugacu

SEQ ID NO: 1821361 - RNA, 19 nt, Artificial Sequence
  Description of Artificial Sequence: Synthetic oligonucleotide
ccuuucggauguggcggua

SEQ ID NO: 1821362 - RNA, 19 nt, Artificial Sequence
  Description of Artificial Sequence: Synthetic oligonucleotide
ccgcucucgugugugcacu

SEQ ID NO: 1821363 - RNA, 19 nt, Artificial Sequence
  Description of Artificial Sequence: Synthetic oligonucleotide
gcgugucgucguaguguau

SEQ ID NO: 1821364 - RNA, 19 nt, Artificial Sequence
  Description of Artificial Sequence: Synthetic oligonucleotide
cgcaggcaauagcggcauu

SEQ ID NO: 1821365 - RNA, 19 nt, Artificial Sequence
  Description of Artificial Sequence: Synthetic oligonucleotide
  modified_base (1)..(1): a, c, u, g, unknown or other
naaagguguacagacaccu

SEQ ID NO: 1821366 - RNA, 19 nt, Artificial Sequence
  Description of Artificial Sequence: Synthetic oligonucleotide
  modified_base (1)..(1): a, c, u, g, unknown or other
  modified_base (8)..(8): a, c, u, g, unknown or other
ncuuaaunuccugcuuauc

SEQ ID NO: 1821367 - RNA, 19 nt, Artificial Sequence
  Description of Artificial Sequence: Synthetic oligonucleotide
ucuuuuaauaaauaaagag

SEQ ID NO: 1821368 - RNA, 19 nt, Artificial Sequence
  Description of Artificial Sequence: Synthetic oligonucleotide
gauaaggaaaacuagaccc

SEQ ID NO: 1821369 - RNA, 19 nt, Artificial Sequence
  Description of Artificial Sequence: Synthetic oligonucleotide
aauaaagaguaguuguggc

SEQ ID NO: 1821370 - RNA, 19 nt, Artificial Sequence
  Description of Artificial Sequence: Synthetic oligonucleotide
uaucagaacagaaagauga

SEQ ID NO: 1821371 - RNA, 19 nt, Artificial Sequence
  Description of Artificial Sequence: Synthetic oligonucleotide
gaaaacuagacccagggag

SEQ ID NO: 1821372 - RNA, 19 nt, Artificial Sequence
  Description of Artificial Sequence: Synthetic oligonucleotide
aaccuuuaucuuucgaucc

SEQ ID NO: 1821373 - RNA, 19 nt, Artificial Sequence
  Description of Artificial Sequence: Synthetic oligonucleotide
aaaccuuuaucuuucgauc

SEQ ID NO: 1821374 - RNA, 19 nt, Artificial Sequence
  Description of Artificial Sequence: Synthetic oligonucleotide
agauaaggaaaacuagacc

SEQ ID NO: 1821375 - RNA, 19 nt, Artificial Sequence
  Description of Artificial Sequence: Synthetic oligonucleotide
aaaucuuguuuucugcaac

SEQ ID NO: 1821376 - RNA, 19 nt, Artificial Sequence
  Description of Artificial Sequence: Synthetic oligonucleotide
aaauaaagaguaguugugg

SEQ ID NO: 1821377 - RNA, 19 nt, Artificial Sequence
  Description of Artificial Sequence: Synthetic oligonucleotide
aacagaaagaugaagccac

SEQ ID NO: 1821378 - RNA, 19 nt, Artificial Sequence
  Description of Artificial Sequence: Synthetic oligonucleotide
auagauuucaacuccacca

SEQ ID NO: 1821379 - RNA, 19 nt, Artificial Sequence
  Description of Artificial Sequence: Synthetic oligonucleotide
uuuggguuugcacaaggcg

SEQ ID NO: 1821380 - RNA, 19 nt, Artificial Sequence
  Description of Artificial Sequence: Synthetic oligonucleotide
uuaauaaauaaagaguagu

SEQ ID NO: 1821381 - RNA, 19 nt, Artificial Sequence
  Description of Artificial Sequence: Synthetic oligonucleotide
cuuucgauccccauuauag

SEQ ID NO: 1821382 - RNA, 19 nt, Artificial Sequence
  Description of Artificial Sequence: Synthetic oligonucleotide
guugacauugggcugaggg

SEQ ID NO: 1821383 - RNA, 19 nt, Artificial Sequence
  Description of Artificial Sequence: Synthetic oligonucleotide
aauguugaacucuucuucu

SEQ ID NO: 1821384 - RNA, 19 nt, Artificial Sequence
  Description of Artificial Sequence: Synthetic oligonucleotide
uaguauuccauaaucuuca

SEQ ID NO: 1821385 - RNA, 19 nt, Artificial Sequence
  Description of Artificial Sequence: Synthetic oligonucleotide
ucuuguucaaugaaagcca

SEQ ID NO: 1821386 - RNA, 19 nt, Artificial Sequence
  Description of Artificial Sequence: Synthetic oligonucleotide
uuugguggcgauuuuauac

SEQ ID NO: 1821387 - RNA, 19 nt, Artificial Sequence
  Description of Artificial Sequence: Synthetic oligonucleotide
uccagaaacuuccuauugg

SEQ ID NO: 1821388 - RNA, 19 nt, Artificial Sequence
  Description of Artificial Sequence: Synthetic oligonucleotide
uguucaaugaaagccauca

SEQ ID NO: 1821389 - RNA, 19 nt, Artificial Sequence
  Description of Artificial Sequence: Synthetic oligonucleotide
uuuaccaccuugcugaguc

SEQ ID NO: 1821390 - RNA, 19 nt, Artificial Sequence
  Description of Artificial Sequence: Synthetic oligonucleotide
uauagauuucaacuccacc

SEQ ID NO: 1821391 - RNA, 19 nt, Artificial Sequence
  Description of Artificial Sequence: Synthetic oligonucleotide
ucauaguauuccauaaucu

SEQ ID NO: 1821392 - RNA, 19 nt, Artificial Sequence
  Description of Artificial Sequence: Synthetic oligonucleotide
aagaugaagccacacagau

SEQ ID NO: 1821393 - RNA, 19 nt, Artificial Sequence
  Description of Artificial Sequence: Synthetic oligonucleotide
ucaauuugaacaucaacau

SEQ ID NO: 1821394 - RNA, 19 nt, Artificial Sequence
  Description of Artificial Sequence: Synthetic oligonucleotide
aaaucacauuuacagauaa

SEQ ID NO: 1821395 - RNA, 19 nt, Artificial Sequence
  Description of Artificial Sequence: Synthetic oligonucleotide
cuuaaucugcuucugcacg

SEQ ID NO: 1821396 - RNA, 19 nt, Artificial Sequence
  Description of Artificial Sequence: Synthetic oligonucleotide
uggcuuagauuuuaaauca

SEQ ID NO: 1821397 - RNA, 19 nt, Artificial Sequence
  Description of Artificial Sequence: Synthetic oligonucleotide
ucacauuuacagauaagga

SEQ ID NO: 1821398 - RNA, 19 nt, Artificial Sequence
  Description of Artificial Sequence: Synthetic oligonucleotide
ucauuuagcagcucaguga

SEQ ID NO: 1821399 - RNA, 19 nt, Artificial Sequence
  Description of Artificial Sequence: Synthetic oligonucleotide
gucaauuugaacaucaaca

SEQ ID NO: 1821400 - RNA, 19 nt, Artificial Sequence
  Description of Artificial Sequence: Synthetic oligonucleotide
aaggcgaccuuucucaaug

SEQ ID NO: 1821401 - RNA, 19 nt, Artificial Sequence
  Description of Artificial Sequence: Synthetic oligonucleotide
uuuagcagcucagugauga

SEQ ID NO: 1821402 - RNA, 19 nt, Artificial Sequence
  Description of Artificial Sequence: Synthetic oligonucleotide
auuaucagaacagaaagau

SEQ ID NO: 1821403 - RNA, 19 nt, Artificial Sequence
  Description of Artificial Sequence: Synthetic oligonucleotide
agaaacuuccuauuggcgu

SEQ ID NO: 1821404 - RNA, 19 nt, Artificial Sequence
  Description of Artificial Sequence: Synthetic oligonucleotide
guggcgauuuuauacauag

SEQ ID NO: 1821405 - RNA, 19 nt, Artificial Sequence
  Description of Artificial Sequence: Synthetic oligonucleotide
auaguauuccauaaucuuc

SEQ ID NO: 1821406 - RNA, 19 nt, Artificial Sequence
  Description of Artificial Sequence: Synthetic oligonucleotide
uuuauacauaggaauugcu

SEQ ID NO: 1821407 - RNA, 19 nt, Artificial Sequence
  Description of Artificial Sequence: Synthetic oligonucleotide
acgcaguaccaucugaccc

SEQ ID NO: 1821408 - RNA, 19 nt, Artificial Sequence
  Description of Artificial Sequence: Synthetic oligonucleotide
auuugaauuuucuucugcu

SEQ ID NO: 1821409 - RNA, 19 nt, Artificial Sequence
  Description of Artificial Sequence: Synthetic oligonucleotide
aaaaucuuguuuucugcaa

SEQ ID NO: 1821410 - RNA, 19 nt, Artificial Sequence
  Description of Artificial Sequence: Synthetic oligonucleotide
cagauaaggaaaacuagac

SEQ ID NO: 1821411 - RNA, 19 nt, Artificial Sequence
  Description of Artificial Sequence: Synthetic oligonucleotide
caucuguugggcuaugagg

SEQ ID NO: 1821412 - RNA, 19 nt, Artificial Sequence
  Description of Artificial Sequence: Synthetic oligonucleotide
uguugaacucuucuucugc

SEQ ID NO: 1821413 - RNA, 19 nt, Artificial Sequence
  Description of Artificial Sequence: Synthetic oligonucleotide
ugggcuaugagguccagcc

SEQ ID NO: 1821414 - RNA, 19 nt, Artificial Sequence
  Description of Artificial Sequence: Synthetic oligonucleotide
accuuuaucuuucgauccc

SEQ ID NO: 1821415 - RNA, 19 nt, Artificial Sequence
  Description of Artificial Sequence: Synthetic oligonucleotide
agauuucaacuccaccagc

SEQ ID NO: 1821416 - RNA, 19 nt, Artificial Sequence
  Description of Artificial Sequence: Synthetic oligonucleotide
uaucuuucgauccccauua

SEQ ID NO: 1821417 - RNA, 19 nt, Artificial Sequence
  Description of Artificial Sequence: Synthetic oligonucleotide
gaaaaucuuguuuucugca

SEQ ID NO: 1821418 - RNA, 19 nt, Artificial Sequence
  Description of Artificial Sequence: Synthetic oligonucleotide
uaacaguaaagccagugua

SEQ ID NO: 1821419 - RNA, 19 nt, Artificial Sequence
  Description of Artificial Sequence: Synthetic oligonucleotide
aaagccaucaugugcuuaa

SEQ ID NO: 1821420 - RNA, 19 nt, Artificial Sequence
  Description of Artificial Sequence: Synthetic oligonucleotide
gguuguaucuuuuaccacc

SEQ ID NO: 1821421 - RNA, 19 nt, Artificial Sequence
  Description of Artificial Sequence: Synthetic oligonucleotide
aucugguuguaucuuuuac

SEQ ID NO: 1821422 - RNA, 19 nt, Artificial Sequence
  Description of Artificial Sequence: Synthetic oligonucleotide
cuugcccacaccaaguggc

SEQ ID NO: 1821423 - RNA, 19 nt, Artificial Sequence
  Description of Artificial Sequence: Synthetic oligonucleotide
gcacuugacacccagagag

SEQ ID NO: 1821424 - RNA, 19 nt, Artificial Sequence
  Description of Artificial Sequence: Synthetic oligonucleotide
aucgcugagggccauggcg

SEQ ID NO: 1821425 - RNA, 19 nt, Artificial Sequence
  Description of Artificial Sequence: Synthetic oligonucleotide
cucacucuagacuagagga

SEQ ID NO: 1821426 - RNA, 19 nt, Artificial Sequence
  Description of Artificial Sequence: Synthetic oligonucleotide
agcacuugguaucugguug

SEQ ID NO: 1821427 - RNA, 19 nt, Artificial Sequence
  Description of Artificial Sequence: Synthetic oligonucleotide
ucaucuguugggcuaugag

SEQ ID NO: 1821428 - RNA, 19 nt, Artificial Sequence
  Description of Artificial Sequence: Synthetic oligonucleotide
uccggcaucaucuguuggg

SEQ ID NO: 1821429 - RNA, 19 nt, Artificial Sequence
  Description of Artificial Sequence: Synthetic oligonucleotide
ucuucugcuuucucauugg

SEQ ID NO: 1821430 - RNA, 19 nt, Artificial Sequence
  Description of Artificial Sequence: Synthetic oligonucleotide
cuugguaucugguuguauc

SEQ ID NO: 1821431 - RNA, 19 nt, Artificial Sequence
  Description of Artificial Sequence: Synthetic oligonucleotide
aguaaagccaguguagcug

SEQ ID NO: 1821432 - RNA, 19 nt, Artificial Sequence
  Description of Artificial Sequence: Synthetic oligonucleotide
ucugcaacgcacaaucauc

SEQ ID NO: 1821433 - RNA, 19 nt, Artificial Sequence
  Description of Artificial Sequence: Synthetic oligonucleotide
acgucugcaucgcugaggg

SEQ ID NO: 1821434 - RNA, 19 nt, Artificial Sequence
  Description of Artificial Sequence: Synthetic oligonucleotide
uuauagauuucaacuccac

SEQ ID NO: 1821435 - RNA, 19 nt, Artificial Sequence
  Description of Artificial Sequence: Synthetic oligonucleotide
caauguugaacucuucuuc

SEQ ID NO: 1821436 - RNA, 19 nt, Artificial Sequence
  Description of Artificial Sequence: Synthetic oligonucleotide
uccuauuggcguuugcacc

SEQ ID NO: 1821437 - RNA, 19 nt, Artificial Sequence
  Description of Artificial Sequence: Synthetic oligonucleotide
acgcacaaucauccgaggc

SEQ ID NO: 1821438 - RNA, 19 nt, Artificial Sequence
  Description of Artificial Sequence: Synthetic oligonucleotide
uuugccucauuuagcagcu

SEQ ID NO: 1821439 - RNA, 19 nt, Artificial Sequence
  Description of Artificial Sequence: Synthetic oligonucleotide
cuccuggucaauuugaaca

SEQ ID NO: 1821440 - RNA, 19 nt, Artificial Sequence
  Description of Artificial Sequence: Synthetic oligonucleotide
uguagcuggaggaaugcaa

SEQ ID NO: 1821441 - RNA, 19 nt, Artificial Sequence
  Description of Artificial Sequence: Synthetic oligonucleotide
uugguggcgauuuuauaca

SEQ ID NO: 1821442 - RNA, 19 nt, Artificial Sequence
  Description of Artificial Sequence: Synthetic oligonucleotide
guagcuguggugucagacg

SEQ ID NO: 1821443 - RNA, 19 nt, Artificial Sequence
  Description of Artificial Sequence: Synthetic oligonucleotide
ucuugcccacaccaagugg

SEQ ID NO: 1821444 - RNA, 19 nt, Artificial Sequence
  Description of Artificial Sequence: Synthetic oligonucleotide
aguaacaguaaagccagug

SEQ ID NO: 1821445 - RNA, 19 nt, Artificial Sequence
  Description of Artificial Sequence: Synthetic oligonucleotide
cugcaacgcacaaucaucc

SEQ ID NO: 1821446 - RNA, 19 nt, Artificial Sequence
  Description of Artificial Sequence: Synthetic oligonucleotide
ggcgauuuuauacauagga

SEQ ID NO: 1821447 - RNA, 19 nt, Artificial Sequence
  Description of Artificial Sequence: Synthetic oligonucleotide
uuguuuucugcaacgcaca

SEQ ID NO: 1821448 - RNA, 19 nt, Artificial Sequence
  Description of Artificial Sequence: Synthetic oligonucleotide
aucuuuuaccaccuugcug

SEQ ID NO: 1821449 - RNA, 19 nt, Artificial Sequence
  Description of Artificial Sequence: Synthetic oligonucleotide
uuaaucugcuucugcacgu

SEQ ID NO: 1821450 - RNA, 19 nt, Artificial Sequence
  Description of Artificial Sequence: Synthetic oligonucleotide
agcuggaggaaugcaagcc

SEQ ID NO: 1821451 - RNA, 19 nt, Artificial Sequence
  Description of Artificial Sequence: Synthetic oligonucleotide
uuugagccuugcuugauuc

SEQ ID NO: 1821452 - RNA, 19 nt, Artificial Sequence
  Description of Artificial Sequence: Synthetic oligonucleotide
acagauaaggaaaacuaga

SEQ ID NO: 1821453 - RNA, 19 nt, Artificial Sequence
  Description of Artificial Sequence: Synthetic oligonucleotide
augaaagccaucaugugcu

SEQ ID NO: 1821454 - RNA, 19 nt, Artificial Sequence
  Description of Artificial Sequence: Synthetic oligonucleotide
ucuagacuagaggaggagc

SEQ ID NO: 1821455 - RNA, 19 nt, Artificial Sequence
  Description of Artificial Sequence: Synthetic oligonucleotide
uuucaacuccaccagcuau

SEQ ID NO: 1821456 - RNA, 19 nt, Artificial Sequence
  Description of Artificial Sequence: Synthetic oligonucleotide
cucauuuagcagcucagug

SEQ ID NO: 1821457 - RNA, 19 nt, Artificial Sequence
  Description of Artificial Sequence: Synthetic oligonucleotide
aacgcacaaucauccgagg

SEQ ID NO: 1821458 - RNA, 19 nt, Artificial Sequence
  Description of Artificial Sequence: Synthetic oligonucleotide
agauuggacauuugaauuu

SEQ ID NO: 1821459 - RNA, 19 nt, Artificial Sequence
  Description of Artificial Sequence: Synthetic oligonucleotide
augcacacucacucuagac

SEQ ID NO: 1821460 - RNA, 19 nt, Artificial Sequence
  Description of Artificial Sequence: Synthetic oligonucleotide
uuggcguuugcaccaaaca

SEQ ID NO: 1821461 - RNA, 19 nt, Artificial Sequence
  Description of Artificial Sequence: Synthetic oligonucleotide
cuuggugagggccacgcag

SEQ ID NO: 1821462 - RNA, 19 nt, Artificial Sequence
  Description of Artificial Sequence: Synthetic oligonucleotide
uucgauccccauuauagau

SEQ ID NO: 1821463 - RNA, 19 nt, Artificial Sequence
  Description of Artificial Sequence: Synthetic oligonucleotide
ggaguaacaguaaagccag

SEQ ID NO: 1821464 - RNA, 19 nt, Artificial Sequence
  Description of Artificial Sequence: Synthetic oligonucleotide
aguguagcuggaggaaugc

SEQ ID NO: 1821465 - RNA, 19 nt, Artificial Sequence
  Description of Artificial Sequence: Synthetic oligonucleotide
uuucgauccccauuauaga

SEQ ID NO: 1821466 - RNA, 19 nt, Artificial Sequence
  Description of Artificial Sequence: Synthetic oligonucleotide
aaacaaggcuccccggacu

SEQ ID NO: 1821467 - RNA, 19 nt, Artificial Sequence
  Description of Artificial Sequence: Synthetic oligonucleotide
augcaagccccacaugcac

SEQ ID NO: 1821468 - RNA, 19 nt, Artificial Sequence
  Description of Artificial Sequence: Synthetic oligonucleotide
ugucagacgagcugagcug

SEQ ID NO: 1821469 - RNA, 19 nt, Artificial Sequence
  Description of Artificial Sequence: Synthetic oligonucleotide
agaaccaauguagcugugg

SEQ ID NO: 1821470 - RNA, 19 nt, Artificial Sequence
  Description of Artificial Sequence: Synthetic oligonucleotide
gaaaccuuuaucuuucgau

SEQ ID NO: 1821471 - RNA, 19 nt, Artificial Sequence
  Description of Artificial Sequence: Synthetic oligonucleotide
uuccuauuggcguuugcac

SEQ ID NO: 1821472 - RNA, 19 nt, Artificial Sequence
  Description of Artificial Sequence: Synthetic oligonucleotide
uggcguuugcaccaaacaa

SEQ ID NO: 1821473 - RNA, 19 nt, Artificial Sequence
  Description of Artificial Sequence: Synthetic oligonucleotide
cugauuaucagaacagaaa

SEQ ID NO: 1821474 - RNA, 19 nt, Artificial Sequence
  Description of Artificial Sequence: Synthetic oligonucleotide
acuagacccagggaguaac

SEQ ID NO: 1821475 - RNA, 19 nt, Artificial Sequence
  Description of Artificial Sequence: Synthetic oligonucleotide
ugaugaggucaucucuugc

SEQ ID NO: 1821476 - RNA, 19 nt, Artificial Sequence
  Description of Artificial Sequence: Synthetic oligonucleotide
gagucugggcuucuagcgg

SEQ ID NO: 1821477 - RNA, 19 nt, Artificial Sequence
  Description of Artificial Sequence: Synthetic oligonucleotide
caauuugaacaucaacauc

SEQ ID NO: 1821478 - RNA, 19 nt, Artificial Sequence
  Description of Artificial Sequence: Synthetic oligonucleotide
uugcacugcagccuucacc

SEQ ID NO: 1821479 - RNA, 19 nt, Artificial Sequence
  Description of Artificial Sequence: Synthetic oligonucleotide
auacauaggaauugcuuuu

SEQ ID NO: 1821480 - RNA, 19 nt, Artificial Sequence
  Description of Artificial Sequence: Synthetic oligonucleotide
gaggauggguccuugguga

SEQ ID NO: 1821481 - RNA, 19 nt, Artificial Sequence
  Description of Artificial Sequence: Synthetic oligonucleotide
gaacagaaagaugaagcca

SEQ ID NO: 1821482 - RNA, 19 nt, Artificial Sequence
  Description of Artificial Sequence: Synthetic oligonucleotide
cuguuuugccucauuuagc

SEQ ID NO: 1821483 - RNA, 19 nt, Artificial Sequence
  Description of Artificial Sequence: Synthetic oligonucleotide
aguauuccauaaucuucag

SEQ ID NO: 1821484 - RNA, 19 nt, Artificial Sequence
  Description of Artificial Sequence: Synthetic oligonucleotide
uaccaucugaccccuugag

SEQ ID NO: 1821485 - RNA, 19 nt, Artificial Sequence
  Description of Artificial Sequence: Synthetic oligonucleotide
uggguuugcacaaggcgac

SEQ ID NO: 1821486 - RNA, 19 nt, Artificial Sequence
  Description of Artificial Sequence: Synthetic oligonucleotide
gauucaucagauuggacau

SEQ ID NO: 1821487 - RNA, 19 nt, Artificial Sequence
  Description of Artificial Sequence: Synthetic oligonucleotide
caccaaacaaggcuccccg

SEQ ID NO: 1821488 - RNA, 19 nt, Artificial Sequence
  Description of Artificial Sequence: Synthetic oligonucleotide
uagagaguacagccucagg

SEQ ID NO: 1821489 - RNA, 19 nt, Artificial Sequence
  Description of Artificial Sequence: Synthetic oligonucleotide
aggaaugcaagccccacau

SEQ ID NO: 1821490 - RNA, 19 nt, Artificial Sequence
  Description of Artificial Sequence: Synthetic oligonucleotide
cuagacuagaggaggagca

SEQ ID NO: 1821491 - RNA, 19 nt, Artificial Sequence
  Description of Artificial Sequence: Synthetic oligonucleotide
cacacagauaucugcugcc

SEQ ID NO: 1821492 - RNA, 19 nt, Artificial Sequence
  Description of Artificial Sequence: Synthetic oligonucleotide
cuggaggaaugcaagcccc

SEQ ID NO: 1821493 - RNA, 19 nt, Artificial Sequence
  Description of Artificial Sequence: Synthetic oligonucleotide
ugcaacgcacaaucauccg

SEQ ID NO: 1821494 - RNA, 19 nt, Artificial Sequence
  Description of Artificial Sequence: Synthetic oligonucleotide
guauuccauaaucuucagc

SEQ ID NO: 1821495 - RNA, 19 nt, Artificial Sequence
  Description of Artificial Sequence: Synthetic oligonucleotide
gugagggccacgcaguacc

SEQ ID NO: 1821496 - RNA, 19 nt, Artificial Sequence
  Description of Artificial Sequence: Synthetic oligonucleotide
aguaguuguggcuuagauu

SEQ ID NO: 1821497 - RNA, 19 nt, Artificial Sequence
  Description of Artificial Sequence: Synthetic oligonucleotide
gauccacugauuaucagaa

SEQ ID NO: 1821498 - RNA, 19 nt, Artificial Sequence
  Description of Artificial Sequence: Synthetic oligonucleotide
uucuguugacauugggcug

SEQ ID NO: 1821499 - RNA, 19 nt, Artificial Sequence
  Description of Artificial Sequence: Synthetic oligonucleotide
ugcagccuucaccaaagga

SEQ ID NO: 1821500 - RNA, 19 nt, Artificial Sequence
  Description of Artificial Sequence: Synthetic oligonucleotide
cuucuguugacauugggcu

SEQ ID NO: 1821501 - RNA, 19 nt, Artificial Sequence
  Description of Artificial Sequence: Synthetic oligonucleotide
uguagcuguggugucagac

SEQ ID NO: 1821502 - RNA, 19 nt, Artificial Sequence
  Description of Artificial Sequence: Synthetic oligonucleotide
uggcgauuuuauacauagg

SEQ ID NO: 1821503 - RNA, 19 nt, Artificial Sequence
  Description of Artificial Sequence: Synthetic oligonucleotide
accgccucgagucugggcu

SEQ ID NO: 1821504 - RNA, 19 nt, Artificial Sequence
  Description of Artificial Sequence: Synthetic oligonucleotide
cacaaggcgaccuuucuca

SEQ ID NO: 1821505 - RNA, 19 nt, Artificial Sequence
  Description of Artificial Sequence: Synthetic oligonucleotide
auguugaacucuucuucug

SEQ ID NO: 1821506 - RNA, 19 nt, Artificial Sequence
  Description of Artificial Sequence: Synthetic oligonucleotide
ugaggucaucucuugcucu

SEQ ID NO: 1821507 - RNA, 19 nt, Artificial Sequence
  Description of Artificial Sequence: Synthetic oligonucleotide
agacuagaggaggagcagg

SEQ ID NO: 1821508 - RNA, 19 nt, Artificial Sequence
  Description of Artificial Sequence: Synthetic oligonucleotide
ccagaaacuuccuauuggc

SEQ ID NO: 1821509 - RNA, 19 nt, Artificial Sequence
  Description of Artificial Sequence: Synthetic oligonucleotide
uccuggucaauuugaacau

SEQ ID NO: 1821510 - RNA, 19 nt, Artificial Sequence
  Description of Artificial Sequence: Synthetic oligonucleotide
ucgcugagggccauggcga

SEQ ID NO: 1821511 - RNA, 19 nt, Artificial Sequence
  Description of Artificial Sequence: Synthetic oligonucleotide
uuugaacaucaacaucuuu

SEQ ID NO: 1821512 - RNA, 19 nt, Artificial Sequence
  Description of Artificial Sequence: Synthetic oligonucleotide
auccccauuauagauuuca

SEQ ID NO: 1821513 - RNA, 19 nt, Artificial Sequence
  Description of Artificial Sequence: Synthetic oligonucleotide
ugcacgucugcaucgcuga

SEQ ID NO: 1821514 - RNA, 19 nt, Artificial Sequence
  Description of Artificial Sequence: Synthetic oligonucleotide
caucagauuggacauuuga

SEQ ID NO: 1821515 - RNA, 19 nt, Artificial Sequence
  Description of Artificial Sequence: Synthetic oligonucleotide
auuuccucaggcagguagg

SEQ ID NO: 1821516 - RNA, 19 nt, Artificial Sequence
  Description of Artificial Sequence: Synthetic oligonucleotide
uugcagaggggauccacug

SEQ ID NO: 1821517 - RNA, 19 nt, Artificial Sequence
  Description of Artificial Sequence: Synthetic oligonucleotide
uuucugcaacgcacaauca

SEQ ID NO: 1821518 - RNA, 19 nt, Artificial Sequence
  Description of Artificial Sequence: Synthetic oligonucleotide
guccagaaacuuccuauug

SEQ ID NO: 1821519 - RNA, 19 nt, Artificial Sequence
  Description of Artificial Sequence: Synthetic oligonucleotide
cucccuucuguugacauug

SEQ ID NO: 1821520 - RNA, 19 nt, Artificial Sequence
  Description of Artificial Sequence: Synthetic oligonucleotide
acuuccuauuggcguuugc

SEQ ID NO: 1821521 - RNA, 19 nt, Artificial Sequence
  Description of Artificial Sequence: Synthetic oligonucleotide
uuuaucuuucgauccccau

SEQ ID NO: 1821522 - RNA, 19 nt, Artificial Sequence
  Description of Artificial Sequence: Synthetic oligonucleotide
uacagccucaggugaacug

SEQ ID NO: 1821523 - RNA, 19 nt, Artificial Sequence
  Description of Artificial Sequence: Synthetic oligonucleotide
gcuugauucaucagauugg

SEQ ID NO: 1821524 - RNA, 19 nt, Artificial Sequence
  Description of Artificial Sequence: Synthetic oligonucleotide
auccacugauuaucagaac

SEQ ID NO: 1821525 - RNA, 19 nt, Artificial Sequence
  Description of Artificial Sequence: Synthetic oligonucleotide
caacagcugguacaagccc

SEQ ID NO: 1821526 - RNA, 19 nt, Artificial Sequence
  Description of Artificial Sequence: Synthetic oligonucleotide
ccuucuguugacauugggc

SEQ ID NO: 1821527 - RNA, 19 nt, Artificial Sequence
  Description of Artificial Sequence: Synthetic oligonucleotide
ugcacuugacacccagaga

SEQ ID NO: 1821528 - RNA, 19 nt, Artificial Sequence
  Description of Artificial Sequence: Synthetic oligonucleotide
acugauuaucagaacagaa

SEQ ID NO: 1821529 - RNA, 19 nt, Artificial Sequence
  Description of Artificial Sequence: Synthetic oligonucleotide
ggucaauuugaacaucaac

SEQ ID NO: 1821530 - RNA, 19 nt, Artificial Sequence
  Description of Artificial Sequence: Synthetic oligonucleotide
aagaguaguuguggcuuag

SEQ ID NO: 1821531 - RNA, 19 nt, Artificial Sequence
  Description of Artificial Sequence: Synthetic oligonucleotide
uugauucaucagauuggac

SEQ ID NO: 1821532 - RNA, 19 nt, Artificial Sequence
  Description of Artificial Sequence: Synthetic oligonucleotide
ucugcaucgcugagggcca

SEQ ID NO: 1821533 - RNA, 19 nt, Artificial Sequence
  Description of Artificial Sequence: Synthetic oligonucleotide
gucagacgagcugagcugg

SEQ ID NO: 1821534 - RNA, 19 nt, Artificial Sequence
  Description of Artificial Sequence: Synthetic oligonucleotide
uuggugagggccacgcagu

SEQ ID NO: 1821535 - RNA, 19 nt, Artificial Sequence
  Description of Artificial Sequence: Synthetic oligonucleotide
uucaucagauuggacauuu

SEQ ID NO: 1821536 - RNA, 19 nt, Artificial Sequence
  Description of Artificial Sequence: Synthetic oligonucleotide
ucuuucgauccccauuaua

SEQ ID NO: 1821537 - RNA, 19 nt, Artificial Sequence
  Description of Artificial Sequence: Synthetic oligonucleotide
cacgcaguaccaucugacc

SEQ ID NO: 1821538 - RNA, 19 nt, Artificial Sequence
  Description of Artificial Sequence: Synthetic oligonucleotide
aacaaggcuccccggacuu

SEQ ID NO: 1821539 - RNA, 19 nt, Artificial Sequence
  Description of Artificial Sequence: Synthetic oligonucleotide
uguugggcuaugaggucca

SEQ ID NO: 1821540 - RNA, 19 nt, Artificial Sequence
  Description of Artificial Sequence: Synthetic oligonucleotide
accaaacaaggcuccccgg

SEQ ID NO: 1821541 - RNA, 19 nt, Artificial Sequence
  Description of Artificial Sequence: Synthetic oligonucleotide
agggccacgcaguaccauc

SEQ ID NO: 1821542 - RNA, 19 nt, Artificial Sequence
  Description of Artificial Sequence: Synthetic oligonucleotide
gacgagcugagcugggcug

SEQ ID NO: 1821543 - RNA, 19 nt, Artificial Sequence
  Description of Artificial Sequence: Synthetic oligonucleotide
cacgggaccgccucgaguc

SEQ ID NO: 1821544 - RNA, 19 nt, Artificial Sequence
  Description of Artificial Sequence: Synthetic oligonucleotide
uuccggcaucaucuguugg

SEQ ID NO: 1821545 - RNA, 19 nt, Artificial Sequence
  Description of Artificial Sequence: Synthetic oligonucleotide
agaggggauccacugauua

SEQ ID NO: 1821546 - RNA, 19 nt, Artificial Sequence
  Description of Artificial Sequence: Synthetic oligonucleotide
gaagccacacagauaucug

SEQ ID NO: 1821547 - RNA, 19 nt, Artificial Sequence
  Description of Artificial Sequence: Synthetic oligonucleotide
caaacaaggcuccccggac

SEQ ID NO: 1821548 - RNA, 19 nt, Artificial Sequence
  Description of Artificial Sequence: Synthetic oligonucleotide
ugcacaaggcgaccuuucu

SEQ ID NO: 1821549 - RNA, 19 nt, Artificial Sequence
  Description of Artificial Sequence: Synthetic oligonucleotide
ggcguuugcaccaaacaag

SEQ ID NO: 1821550 - RNA, 19 nt, Artificial Sequence
  Description of Artificial Sequence: Synthetic oligonucleotide
cuugauucaucagauugga

SEQ ID NO: 1821551 - RNA, 19 nt, Artificial Sequence
  Description of Artificial Sequence: Synthetic oligonucleotide
uagacccagggaguaacag

SEQ ID NO: 1821552 - RNA, 19 nt, Artificial Sequence
  Description of Artificial Sequence: Synthetic oligonucleotide
ucagacgagcugagcuggg

SEQ ID NO: 1821553 - RNA, 19 nt, Artificial Sequence
  Description of Artificial Sequence: Synthetic oligonucleotide
uuuugcacugcagccuuca

SEQ ID NO: 1821554 - RNA, 19 nt, Artificial Sequence
  Description of Artificial Sequence: Synthetic oligonucleotide
aagccccacaugcacuuga

SEQ ID NO: 1821555 - RNA, 19 nt, Artificial Sequence
  Description of Artificial Sequence: Synthetic oligonucleotide
guaacaguaaagccagugu

SEQ ID NO: 1821556 - RNA, 19 nt, Artificial Sequence
  Description of Artificial Sequence: Synthetic oligonucleotide
ccaucugaccccuugaguc

SEQ ID NO: 1821557 - RNA, 19 nt, Artificial Sequence
  Description of Artificial Sequence: Synthetic oligonucleotide
agggcauugguugcagagg

SEQ ID NO: 1821558 - RNA, 19 nt, Artificial Sequence
  Description of Artificial Sequence: Synthetic oligonucleotide
gguguuggaaaccuuuauc

SEQ ID NO: 1821559 - RNA, 19 nt, Artificial Sequence
  Description of Artificial Sequence: Synthetic oligonucleotide
cauccgaggcuccaacagc

SEQ ID NO: 1821560 - RNA, 19 nt, Artificial Sequence
  Description of Artificial Sequence: Synthetic oligonucleotide
gaaccaauguagcuguggu

SEQ ID NO: 1821561 - RNA, 19 nt, Artificial Sequence
  Description of Artificial Sequence: Synthetic oligonucleotide
ggauccacugauuaucaga

SEQ ID NO: 1821562 - RNA, 19 nt, Artificial Sequence
  Description of Artificial Sequence: Synthetic oligonucleotide
gcguuugcaccaaacaagg

SEQ ID NO: 1821563 - RNA, 19 nt, Artificial Sequence
  Description of Artificial Sequence: Synthetic oligonucleotide
ccaggcucaguccagaaac

SEQ ID NO: 1821564 - RNA, 19 nt, Artificial Sequence
  Description of Artificial Sequence: Synthetic oligonucleotide
caggaguagagaguacagc

SEQ ID NO: 1821565 - RNA, 19 nt, Artificial Sequence
  Description of Artificial Sequence: Synthetic oligonucleotide
ccaacagcugguacaagcc

SEQ ID NO: 1821566 - RNA, 19 nt, Artificial Sequence
  Description of Artificial Sequence: Synthetic oligonucleotide
cccauuauagauuucaacu

SEQ ID NO: 1821567 - RNA, 19 nt, Artificial Sequence
  Description of Artificial Sequence: Synthetic oligonucleotide
uccccauuauagauuucaa

SEQ ID NO: 1821568 - RNA, 19 nt, Artificial Sequence
  Description of Artificial Sequence: Synthetic oligonucleotide
cauaguauuccauaaucuu

SEQ ID NO: 1821569 - RNA, 19 nt, Artificial Sequence
  Description of Artificial Sequence: Synthetic oligonucleotide
auuggacauuugaauuuuc

SEQ ID NO: 1821570 - RNA, 19 nt, Artificial Sequence
  Description of Artificial Sequence: Synthetic oligonucleotide
auuucaacuccaccagcua

SEQ ID NO: 1821571 - RNA, 19 nt, Artificial Sequence
  Description of Artificial Sequence: Synthetic oligonucleotide
uugagccuugcuugauuca

SEQ ID NO: 1821572 - RNA, 19 nt, Artificial Sequence
  Description of Artificial Sequence: Synthetic oligonucleotide
uacaagcccuggaggacca

SEQ ID NO: 1821573 - RNA, 19 nt, Artificial Sequence
  Description of Artificial Sequence: Synthetic oligonucleotide
agacgagcugagcugggcu

SEQ ID NO: 1821574 - RNA, 19 nt, Artificial Sequence
  Description of Artificial Sequence: Synthetic oligonucleotide
guacaagcccuggaggacc

SEQ ID NO: 1821575 - RNA, 19 nt, Artificial Sequence
  Description of Artificial Sequence: Synthetic oligonucleotide
gagcagggaggaugggucc

SEQ ID NO: 1821576 - RNA, 19 nt, Artificial Sequence
  Description of Artificial Sequence: Synthetic oligonucleotide
ucucaauguugaacucuuc

SEQ ID NO: 1821577 - RNA, 19 nt, Artificial Sequence
  Description of Artificial Sequence: Synthetic oligonucleotide
cucuugcccacaccaagug

SEQ ID NO: 1821578 - RNA, 19 nt, Artificial Sequence
  Description of Artificial Sequence: Synthetic oligonucleotide
aagcucggccacgggaccg

SEQ ID NO: 1821579 - RNA, 19 nt, Artificial Sequence
  Description of Artificial Sequence: Synthetic oligonucleotide
cuuccuauuggcguuugca

SEQ ID NO: 1821580 - RNA, 19 nt, Artificial Sequence
  Description of Artificial Sequence: Synthetic oligonucleotide
aaguggcccucccuucugu

SEQ ID NO: 1821581 - RNA, 19 nt, Artificial Sequence
  Description of Artificial Sequence: Synthetic oligonucleotide
cuuccggcaucaucuguug

SEQ ID NO: 1821582 - RNA, 19 nt, Artificial Sequence
  Description of Artificial Sequence: Synthetic oligonucleotide
gaagcucggccacgggacc

SEQ ID NO: 1821583 - RNA, 19 nt, Artificial Sequence
  Description of Artificial Sequence: Synthetic oligonucleotide
cauuuagcagcucagugau

SEQ ID NO: 1821584 - RNA, 19 nt, Artificial Sequence
  Description of Artificial Sequence: Synthetic oligonucleotide
uugcacaaggcgaccuuuc

SEQ ID NO: 1821585 - RNA, 19 nt, Artificial Sequence
  Description of Artificial Sequence: Synthetic oligonucleotide
ggaggauggguccuuggug

SEQ ID NO: 1821586 - RNA, 19 nt, Artificial Sequence
  Description of Artificial Sequence: Synthetic oligonucleotide
cacaaucauccgaggcucc

SEQ ID NO: 1821587 - RNA, 19 nt, Artificial Sequence
  Description of Artificial Sequence: Synthetic oligonucleotide
aggauggguccuuggugag

SEQ ID NO: 1821588 - RNA, 19 nt, Artificial Sequence
  Description of Artificial Sequence: Synthetic oligonucleotide
uuugcacugcagccuucac

SEQ ID NO: 1821589 - RNA, 19 nt, Artificial Sequence
  Description of Artificial Sequence: Synthetic oligonucleotide
ugguggcgauuuuauacau

SEQ ID NO: 1821590 - RNA, 19 nt, Artificial Sequence
  Description of Artificial Sequence: Synthetic oligonucleotide
uuugcacaaggcgaccuuu

SEQ ID NO: 1821591 - RNA, 19 nt, Artificial Sequence
  Description of Artificial Sequence: Synthetic oligonucleotide
cuugaguccugcugcagaa

SEQ ID NO: 1821592 - RNA, 19 nt, Artificial Sequence
  Description of Artificial Sequence: Synthetic oligonucleotide
cacgucugcaucgcugagg

SEQ ID NO: 1821593 - RNA, 19 nt, Artificial Sequence
  Description of Artificial Sequence: Synthetic oligonucleotide
gcuuagauuuuaaaucaca

SEQ ID NO: 1821594 - RNA, 19 nt, Artificial Sequence
  Description of Artificial Sequence: Synthetic oligonucleotide
acgagcugagcugggcugg

SEQ ID NO: 1821595 - RNA, 19 nt, Artificial Sequence
  Description of Artificial Sequence: Synthetic oligonucleotide
cagauuggacauuugaauu

SEQ ID NO: 1821596 - RNA, 19 nt, Artificial Sequence
  Description of Artificial Sequence: Synthetic oligonucleotide
guggugucagacgagcuga

SEQ ID NO: 1821597 - RNA, 19 nt, Artificial Sequence
  Description of Artificial Sequence: Synthetic oligonucleotide
caaggcuccccggacuucc

SEQ ID NO: 1821598 - RNA, 19 nt, Artificial Sequence
  Description of Artificial Sequence: Synthetic oligonucleotide
cgagucugggcuucuagcg

SEQ ID NO: 1821599 - RNA, 19 nt, Artificial Sequence
  Description of Artificial Sequence: Synthetic oligonucleotide
auccgaggcuccaacagcu

SEQ ID NO: 1821600 - RNA, 19 nt, Artificial Sequence
  Description of Artificial Sequence: Synthetic oligonucleotide
aacuuccuauuggcguuug

SEQ ID NO: 1821601 - RNA, 19 nt, Artificial Sequence
  Description of Artificial Sequence: Synthetic oligonucleotide
uucugcacgucugcaucgc

SEQ ID NO: 1821602 - RNA, 19 nt, Artificial Sequence
  Description of Artificial Sequence: Synthetic oligonucleotide
uccgaggcuccaacagcug

SEQ ID NO: 1821603 - RNA, 19 nt, Artificial Sequence
  Description of Artificial Sequence: Synthetic oligonucleotide
ccccauuauagauuucaac

SEQ ID NO: 1821604 - RNA, 19 nt, Artificial Sequence
  Description of Artificial Sequence: Synthetic oligonucleotide
ccuuuggguuugcacaagg

SEQ ID NO: 1821605 - RNA, 19 nt, Artificial Sequence
  Description of Artificial Sequence: Synthetic oligonucleotide
ugagggcauugguugcaga

SEQ ID NO: 1821606 - RNA, 19 nt, Artificial Sequence
  Description of Artificial Sequence: Synthetic oligonucleotide
ggcuccaacagcugguaca

SEQ ID NO: 1821607 - RNA, 19 nt, Artificial Sequence
  Description of Artificial Sequence: Synthetic oligonucleotide
cuucuagcggcggcggagc

SEQ ID NO: 1821608 - RNA, 19 nt, Artificial Sequence
  Description of Artificial Sequence: Synthetic oligonucleotide
guaccaucugaccccuuga

SEQ ID NO: 1821609 - RNA, 19 nt, Artificial Sequence
  Description of Artificial Sequence: Synthetic oligonucleotide
cagguaggccuccugguca

SEQ ID NO: 1821610 - RNA, 19 nt, Artificial Sequence
  Description of Artificial Sequence: Synthetic oligonucleotide
uuaccaccuugcugagucu

SEQ ID NO: 1821611 - RNA, 19 nt, Artificial Sequence
  Description of Artificial Sequence: Synthetic oligonucleotide
gcacacucacucuagacua

SEQ ID NO: 1821612 - RNA, 19 nt, Artificial Sequence
  Description of Artificial Sequence: Synthetic oligonucleotide
cacugauuaucagaacaga

SEQ ID NO: 1821613 - RNA, 19 nt, Artificial Sequence
  Description of Artificial Sequence: Synthetic oligonucleotide
gcaacgcacaaucauccga

SEQ ID NO: 1821614 - RNA, 19 nt, Artificial Sequence
  Description of Artificial Sequence: Synthetic oligonucleotide
gagggcgaagcucggccac

SEQ ID NO: 1821615 - RNA, 19 nt, Artificial Sequence
  Description of Artificial Sequence: Synthetic oligonucleotide
guuguaucuuuuaccaccu

SEQ ID NO: 1821616 - RNA, 19 nt, Artificial Sequence
  Description of Artificial Sequence: Synthetic oligonucleotide
uugggcuaugagguccagc

SEQ ID NO: 1821617 - RNA, 19 nt, Artificial Sequence
  Description of Artificial Sequence: Synthetic oligonucleotide
accuugcugagucucuguu

SEQ ID NO: 1821618 - RNA, 19 nt, Artificial Sequence
  Description of Artificial Sequence: Synthetic oligonucleotide
ccuauuggcguuugcacca

SEQ ID NO: 1821619 - RNA, 19 nt, Artificial Sequence
  Description of Artificial Sequence: Synthetic oligonucleotide
aacuagacccagggaguaa

SEQ ID NO: 1821620 - RNA, 19 nt, Artificial Sequence
  Description of Artificial Sequence: Synthetic oligonucleotide
gcgaccuuucucaauguug

SEQ ID NO: 1821621 - RNA, 19 nt, Artificial Sequence
  Description of Artificial Sequence: Synthetic oligonucleotide
cgcaguaccaucugacccc

SEQ ID NO: 1821622 - RNA, 19 nt, Artificial Sequence
  Description of Artificial Sequence: Synthetic oligonucleotide
uugcuugauucaucagauu

SEQ ID NO: 1821623 - RNA, 19 nt, Artificial Sequence
  Description of Artificial Sequence: Synthetic oligonucleotide
cugaggacuuugagccuug

SEQ ID NO: 1821624 - RNA, 19 nt, Artificial Sequence
  Description of Artificial Sequence: Synthetic oligonucleotide
uucuagcggcggcggagca

SEQ ID NO: 1821625 - RNA, 19 nt, Artificial Sequence
  Description of Artificial Sequence: Synthetic oligonucleotide
ugguaucugguuguaucuu

SEQ ID NO: 1821626 - RNA, 19 nt, Artificial Sequence
  Description of Artificial Sequence: Synthetic oligonucleotide
uauuggcguuugcaccaaa

SEQ ID NO: 1821627 - RNA, 19 nt, Artificial Sequence
  Description of Artificial Sequence: Synthetic oligonucleotide
cuuguucaaugaaagccau

SEQ ID NO: 1821628 - RNA, 19 nt, Artificial Sequence
  Description of Artificial Sequence: Synthetic oligonucleotide
ccuuuaucuuucgaucccc

SEQ ID NO: 1821629 - RNA, 19 nt, Artificial Sequence
  Description of Artificial Sequence: Synthetic oligonucleotide
uguugacauugggcugagg

SEQ ID NO: 1821630 - RNA, 19 nt, Artificial Sequence
  Description of Artificial Sequence: Synthetic oligonucleotide
acuuccggcaucaucuguu

SEQ ID NO: 1821631 - RNA, 19 nt, Artificial Sequence
  Description of Artificial Sequence: Synthetic oligonucleotide
ggaaaccuuuaucuuucga

SEQ ID NO: 1821632 - RNA, 19 nt, Artificial Sequence
  Description of Artificial Sequence: Synthetic oligonucleotide
caugcacacucacucuaga

SEQ ID NO: 1821633 - RNA, 19 nt, Artificial Sequence
  Description of Artificial Sequence: Synthetic oligonucleotide
agaguaguuguggcuuaga

SEQ ID NO: 1821634 - RNA, 19 nt, Artificial Sequence
  Description of Artificial Sequence: Synthetic oligonucleotide
gcgauuuuauacauaggaa

SEQ ID NO: 1821635 - RNA, 19 nt, Artificial Sequence
  Description of Artificial Sequence: Synthetic oligonucleotide
ggcuuagauuuuaaaucac

SEQ ID NO: 1821636 - RNA, 19 nt, Artificial Sequence
  Description of Artificial Sequence: Synthetic oligonucleotide
gccucaggugaacugcacc

SEQ ID NO: 1821637 - RNA, 19 nt, Artificial Sequence
  Description of Artificial Sequence: Synthetic oligonucleotide
gggauccacugauuaucag

SEQ ID NO: 1821638 - RNA, 19 nt, Artificial Sequence
  Description of Artificial Sequence: Synthetic oligonucleotide
aggcuccccggacuuccgg

SEQ ID NO: 1821639 - RNA, 19 nt, Artificial Sequence
  Description of Artificial Sequence: Synthetic oligonucleotide
cuagacccagggaguaaca

SEQ ID NO: 1821640 - RNA, 19 nt, Artificial Sequence
  Description of Artificial Sequence: Synthetic oligonucleotide
cucaggugaacugcaccuc

SEQ ID NO: 1821641 - RNA, 19 nt, Artificial Sequence
  Description of Artificial Sequence: Synthetic oligonucleotide
ccacgcaguaccaucugac

SEQ ID NO: 1821642 - RNA, 19 nt, Artificial Sequence
  Description of Artificial Sequence: Synthetic oligonucleotide
gcauugguugcagagggga

SEQ ID NO: 1821643 - RNA, 19 nt, Artificial Sequence
  Description of Artificial Sequence: Synthetic oligonucleotide
ccagcuauuuccucaggca

SEQ ID NO: 1821644 - RNA, 19 nt, Artificial Sequence
  Description of Artificial Sequence: Synthetic oligonucleotide
caauguagcugugguguca

SEQ ID NO: 1821645 - RNA, 19 nt, Artificial Sequence
  Description of Artificial Sequence: Synthetic oligonucleotide
caccagcuauuuccucagg

SEQ ID NO: 1821646 - RNA, 19 nt, Artificial Sequence
  Description of Artificial Sequence: Synthetic oligonucleotide
aucaucuguugggcuauga

SEQ ID NO: 1821647 - RNA, 19 nt, Artificial Sequence
  Description of Artificial Sequence: Synthetic oligonucleotide
agguaggccuccuggucaa

SEQ ID NO: 1821648 - RNA, 19 nt, Artificial Sequence
  Description of Artificial Sequence: Synthetic oligonucleotide
cgauuuuauacauaggaau

SEQ ID NO: 1821649 - RNA, 19 nt, Artificial Sequence
  Description of Artificial Sequence: Synthetic oligonucleotide
aucuuucgauccccauuau

SEQ ID NO: 1821650 - RNA, 19 nt, Artificial Sequence
  Description of Artificial Sequence: Synthetic oligonucleotide
aaggcuccccggacuuccg

SEQ ID NO: 1821651 - RNA, 19 nt, Artificial Sequence
  Description of Artificial Sequence: Synthetic oligonucleotide
agccccacaugcacuugac

SEQ ID NO: 1821652 - RNA, 19 nt, Artificial Sequence
  Description of Artificial Sequence: Synthetic oligonucleotide
auuuagcagcucagugaug

SEQ ID NO: 1821653 - RNA, 19 nt, Artificial Sequence
  Description of Artificial Sequence: Synthetic oligonucleotide
ggaaugcaagccccacaug

SEQ ID NO: 1821654 - RNA, 19 nt, Artificial Sequence
  Description of Artificial Sequence: Synthetic oligonucleotide
gcacaaucauccgaggcuc

SEQ ID NO: 1821655 - RNA, 19 nt, Artificial Sequence
  Description of Artificial Sequence: Synthetic oligonucleotide
cagacgagcugagcugggc

SEQ ID NO: 1821656 - RNA, 19 nt, Artificial Sequence
  Description of Artificial Sequence: Synthetic oligonucleotide
cauugggcugagggcauug

SEQ ID NO: 1821657 - RNA, 19 nt, Artificial Sequence
  Description of Artificial Sequence: Synthetic oligonucleotide
ccaccagcuauuuccucag

SEQ ID NO: 1821658 - RNA, 19 nt, Artificial Sequence
  Description of Artificial Sequence: Synthetic oligonucleotide
acaaggcuccccggacuuc

SEQ ID NO: 1821659 - RNA, 19 nt, Artificial Sequence
  Description of Artificial Sequence: Synthetic oligonucleotide
agccucaggugaacugcac

SEQ ID NO: 1821660 - RNA, 19 nt, Artificial Sequence
  Description of Artificial Sequence: Synthetic oligonucleotide
aagccaucaugugcuuaau

SEQ ID NO: 1821661 - RNA, 19 nt, Artificial Sequence
  Description of Artificial Sequence: Synthetic oligonucleotide
cgaccuuucucaauguuga

SEQ ID NO: 1821662 - RNA, 19 nt, Artificial Sequence
  Description of Artificial Sequence: Synthetic oligonucleotide
gaccgccucgagucugggc

SEQ ID NO: 1821663 - RNA, 19 nt, Artificial Sequence
  Description of Artificial Sequence: Synthetic oligonucleotide
agaugaagccacacagaua

SEQ ID NO: 1821664 - RNA, 19 nt, Artificial Sequence
  Description of Artificial Sequence: Synthetic oligonucleotide
gcgagggcgaagcucggcc

SEQ ID NO: 1821665 - RNA, 19 nt, Artificial Sequence
  Description of Artificial Sequence: Synthetic oligonucleotide
gccucauuuagcagcucag

SEQ ID NO: 1821666 - RNA, 19 nt, Artificial Sequence
  Description of Artificial Sequence: Synthetic oligonucleotide
caucgcugagggccauggc

SEQ ID NO: 1821667 - RNA, 19 nt, Artificial Sequence
  Description of Artificial Sequence: Synthetic oligonucleotide
auucaucagauuggacauu

SEQ ID NO: 1821668 - RNA, 19 nt, Artificial Sequence
  Description of Artificial Sequence: Synthetic oligonucleotide
gcaugcacacucacucuag

SEQ ID NO: 1821669 - RNA, 19 nt, Artificial Sequence
  Description of Artificial Sequence: Synthetic oligonucleotide
gaggggauccacugauuau

SEQ ID NO: 1821670 - RNA, 19 nt, Artificial Sequence
  Description of Artificial Sequence: Synthetic oligonucleotide
guuguggcuuagauuuuaa

SEQ ID NO: 1821671 - RNA, 19 nt, Artificial Sequence
  Description of Artificial Sequence: Synthetic oligonucleotide
gcuucuagcggcggcggag

SEQ ID NO: 1821672 - RNA, 19 nt, Artificial Sequence
  Description of Artificial Sequence: Synthetic oligonucleotide
ggacuuccggcaucaucug

SEQ ID NO: 1821673 - RNA, 19 nt, Artificial Sequence
  Description of Artificial Sequence: Synthetic oligonucleotide
cgaagcucggccacgggac

SEQ ID NO: 1821674 - RNA, 19 nt, Artificial Sequence
  Description of Artificial Sequence: Synthetic oligonucleotide
gcaccaaacaaggcucccc

SEQ ID NO: 1821675 - RNA, 19 nt, Artificial Sequence
  Description of Artificial Sequence: Synthetic oligonucleotide
ccaaacaaggcuccccgga

SEQ ID NO: 1821676 - RNA, 19 nt, Artificial Sequence
  Description of Artificial Sequence: Synthetic oligonucleotide
ucuagcggcggcggagcaa

SEQ ID NO: 1821677 - RNA, 19 nt, Artificial Sequence
  Description of Artificial Sequence: Synthetic oligonucleotide
gcacaaggcgaccuuucuc

SEQ ID NO: 1821678 - RNA, 19 nt, Artificial Sequence
  Description of Artificial Sequence: Synthetic oligonucleotide
auguagcuguggugucaga

SEQ ID NO: 1821679 - RNA, 19 nt, Artificial Sequence
  Description of Artificial Sequence: Synthetic oligonucleotide
gacuuccggcaucaucugu

SEQ ID NO: 1821680 - RNA, 19 nt, Artificial Sequence
  Description of Artificial Sequence: Synthetic oligonucleotide
uccccggacuuccggcauc

SEQ ID NO: 1821681 - RNA, 19 nt, Artificial Sequence
  Description of Artificial Sequence: Synthetic oligonucleotide
aggguguuggaaaccuuua

SEQ ID NO: 1821682 - RNA, 19 nt, Artificial Sequence
  Description of Artificial Sequence: Synthetic oligonucleotide
guguagcuggaggaaugca

SEQ ID NO: 1821683 - RNA, 19 nt, Artificial Sequence
  Description of Artificial Sequence: Synthetic oligonucleotide
ccaauguagcugugguguc

SEQ ID NO: 1821684 - RNA, 19 nt, Artificial Sequence
  Description of Artificial Sequence: Synthetic oligonucleotide
ggugucagacgagcugagc

SEQ ID NO: 1821685 - RNA, 19 nt, Artificial Sequence
  Description of Artificial Sequence: Synthetic oligonucleotide
cuagcggcggcggagcaaa

SEQ ID NO: 1821686 - RNA, 19 nt, Artificial Sequence
  Description of Artificial Sequence: Synthetic oligonucleotide
ggggauccacugauuauca

SEQ ID NO: 1821687 - RNA, 19 nt, Artificial Sequence
  Description of Artificial Sequence: Synthetic oligonucleotide
ugcaucgcugagggccaug

SEQ ID NO: 1821688 - RNA, 19 nt, Artificial Sequence
  Description of Artificial Sequence: Synthetic oligonucleotide
gcgaagcucggccacggga

SEQ ID NO: 1821689 - RNA, 19 nt, Artificial Sequence
  Description of Artificial Sequence: Synthetic oligonucleotide
ccggcaucaucuguugggc

SEQ ID NO: 1821690 - RNA, 19 nt, Artificial Sequence
  Description of Artificial Sequence: Synthetic oligonucleotide
gauccccauuauagauuuc

SEQ ID NO: 1821691 - RNA, 19 nt, Artificial Sequence
  Description of Artificial Sequence: Synthetic oligonucleotide
acgggaccgccucgagucu

SEQ ID NO: 1821692 - RNA, 19 nt, Artificial Sequence
  Description of Artificial Sequence: Synthetic oligonucleotide
cugcugcagaaccaaugua

SEQ ID NO: 1821693 - RNA, 19 nt, Artificial Sequence
  Description of Artificial Sequence: Synthetic oligonucleotide
guuuucugcaacgcacaau

SEQ ID NO: 1821694 - RNA, 19 nt, Artificial Sequence
  Description of Artificial Sequence: Synthetic oligonucleotide
guugggcuaugagguccag

SEQ ID NO: 1821695 - RNA, 19 nt, Artificial Sequence
  Description of Artificial Sequence: Synthetic oligonucleotide
cagcccauccagcagcacu

SEQ ID NO: 1821696 - RNA, 19 nt, Artificial Sequence
  Description of Artificial Sequence: Synthetic oligonucleotide
gcuccaacagcugguacaa

SEQ ID NO: 1821697 - RNA, 19 nt, Artificial Sequence
  Description of Artificial Sequence: Synthetic oligonucleotide
ccuugaguccugcugcaga

SEQ ID NO: 1821698 - RNA, 19 nt, Artificial Sequence
  Description of Artificial Sequence: Synthetic oligonucleotide
gcuauuuccucaggcaggu

SEQ ID NO: 1821699 - RNA, 19 nt, Artificial Sequence
  Description of Artificial Sequence: Synthetic oligonucleotide
cauugguugcagaggggau

SEQ ID NO: 1821700 - RNA, 19 nt, Artificial Sequence
  Description of Artificial Sequence: Synthetic oligonucleotide
cccaggaguagagaguaca

SEQ ID NO: 1821701 - RNA, 19 nt, Artificial Sequence
  Description of Artificial Sequence: Synthetic oligonucleotide
cugcaccuccccaggcuca

SEQ ID NO: 1821702 - RNA, 19 nt, Artificial Sequence
  Description of Artificial Sequence: Synthetic oligonucleotide
guuugcacaaggcgaccuu

SEQ ID NO: 1821703 - RNA, 19 nt, Artificial Sequence
  Description of Artificial Sequence: Synthetic oligonucleotide
ccucaggugaacugcaccu

SEQ ID NO: 1821704 - RNA, 19 nt, Artificial Sequence
  Description of Artificial Sequence: Synthetic oligonucleotide
cuuugagccuugcuugauu

SEQ ID NO: 1821705 - RNA, 19 nt, Artificial Sequence
  Description of Artificial Sequence: Synthetic oligonucleotide
ggcgaagcucggccacggg

SEQ ID NO: 1821706 - RNA, 19 nt, Artificial Sequence
  Description of Artificial Sequence: Synthetic oligonucleotide
gccacgcaguaccaucuga

SEQ ID NO: 1821707 - RNA, 19 nt, Artificial Sequence
  Description of Artificial Sequence: Synthetic oligonucleotide
ggguuugcacaaggcgacc

SEQ ID NO: 1821708 - RNA, 19 nt, Artificial Sequence
  Description of Artificial Sequence: Synthetic oligonucleotide
gggcgaagcucggccacgg

SEQ ID NO: 1821709 - RNA, 19 nt, Artificial Sequence
  Description of Artificial Sequence: Synthetic oligonucleotide
ggccacgcaguaccaucug

SEQ ID NO: 1821710 - RNA, 19 nt, Artificial Sequence
  Description of Artificial Sequence: Synthetic oligonucleotide
gggaggauggguccuuggu

SEQ ID NO: 1821711 - RNA, 19 nt, Artificial Sequence
  Description of Artificial Sequence: Synthetic oligonucleotide
gggcuucuagcggcggcgg

SEQ ID NO: 1821712 - RNA, 19 nt, Artificial Sequence
  Description of Artificial Sequence: Synthetic oligonucleotide
gcacgucugcaucgcugag

SEQ ID NO: 1821713 - RNA, 19 nt, Artificial Sequence
  Description of Artificial Sequence: Synthetic oligonucleotide
ggugagggccacgcaguac

SEQ ID NO: 1821714 - RNA, 19 nt, Artificial Sequence
  Description of Artificial Sequence: Synthetic oligonucleotide
gggcagcaugcacacucac

SEQ ID NO: 1821715 - RNA, 19 nt, Artificial Sequence
  Description of Artificial Sequence: Synthetic oligonucleotide
ggccuccuggucaauuuga

SEQ ID NO: 1821716 - RNA, 19 nt, Artificial Sequence
  Description of Artificial Sequence: Synthetic oligonucleotide
cuauuggcguuugcaccaa

SEQ ID NO: 1821717 - RNA, 19 nt, Artificial Sequence
  Description of Artificial Sequence: Synthetic oligonucleotide
gguuugcacaaggcgaccu

SEQ ID NO: 1821718 - RNA, 19 nt, Artificial Sequence
  Description of Artificial Sequence: Synthetic oligonucleotide
gacauugggcugagggcau

SEQ ID NO: 1821719 - RNA, 19 nt, Artificial Sequence
  Description of Artificial Sequence: Synthetic oligonucleotide
ggguguuggaaaccuuuau

SEQ ID NO: 1821720 - RNA, 19 nt, Artificial Sequence
  Description of Artificial Sequence: Synthetic oligonucleotide
gccuuuggguuugcacaag

SEQ ID NO: 1821721 - RNA, 19 nt, Artificial Sequence
  Description of Artificial Sequence: Synthetic oligonucleotide
cagcacuugguaucugguu

SEQ ID NO: 1821722 - RNA, 19 nt, Artificial Sequence
  Description of Artificial Sequence: Synthetic oligonucleotide
caaggcgaccuuucucaau

SEQ ID NO: 1821723 - RNA, 19 nt, Artificial Sequence
  Description of Artificial Sequence: Synthetic oligonucleotide
gguggcgauuuuauacaua

SEQ ID NO: 1821724 - RNA, 19 nt, Artificial Sequence
  Description of Artificial Sequence: Synthetic oligonucleotide
uagcggcggcggagcaaac

SEQ ID NO: 1821725 - RNA, 19 nt, Artificial Sequence
  Description of Artificial Sequence: Synthetic oligonucleotide
gaguaacaguaaagccagu

SEQ ID NO: 1821726 - RNA, 19 nt, Artificial Sequence
  Description of Artificial Sequence: Synthetic oligonucleotide
gcaagccccacaugcacuu

SEQ ID NO: 1821727 - RNA, 19 nt, Artificial Sequence
  Description of Artificial Sequence: Synthetic oligonucleotide
ggcagcaugcacacucacu

SEQ ID NO: 1821728 - RNA, 19 nt, Artificial Sequence
  Description of Artificial Sequence: Synthetic oligonucleotide
cacuugguaucugguugua

SEQ ID NO: 1821729 - RNA, 19 nt, Artificial Sequence
  Description of Artificial Sequence: Synthetic oligonucleotide
ggcgagggcgaagcucggc

SEQ ID NO: 1821730 - RNA, 19 nt, Artificial Sequence
  Description of Artificial Sequence: Synthetic oligonucleotide
gccacgggaccgccucgag

SEQ ID NO: 1821731 - RNA, 19 nt, Artificial Sequence
  Description of Artificial Sequence: Synthetic oligonucleotide
ggaccgccucgagucuggg

SEQ ID NO: 1821732 - RNA, 19 nt, Artificial Sequence
  Description of Artificial Sequence: Synthetic oligonucleotide
ggcuucuagcggcggcgga

SEQ ID NO: 1821733 - RNA, 19 nt, Artificial Sequence
  Description of Artificial Sequence: Synthetic oligonucleotide
cgcugagggccauggcgag

SEQ ID NO: 1821734 - RNA, 19 nt, Artificial Sequence
  Description of Artificial Sequence: Synthetic oligonucleotide
cuaugagguccagccggcu

SEQ ID NO: 1821735 - RNA, 19 nt, Artificial Sequence
  Description of Artificial Sequence: Synthetic oligonucleotide
gcaguaccaucugaccccu

SEQ ID NO: 1821736 - RNA, 19 nt, Artificial Sequence
  Description of Artificial Sequence: Synthetic oligonucleotide
cuauuuccucaggcaggua

SEQ ID NO: 1821737 - RNA, 19 nt, Artificial Sequence
  Description of Artificial Sequence: Synthetic oligonucleotide
ccucauuuagcagcucagu

SEQ ID NO: 1821738 - RNA, 19 nt, Artificial Sequence
  Description of Artificial Sequence: Synthetic oligonucleotide
cccaggcucaguccagaaa

SEQ ID NO: 1821739 - RNA, 19 nt, Artificial Sequence
  Description of Artificial Sequence: Synthetic oligonucleotide
gagggccacgcaguaccau

SEQ ID NO: 1821740 - RNA, 19 nt, Artificial Sequence
  Description of Artificial Sequence: Synthetic oligonucleotide
gggccacgcaguaccaucu

SEQ ID NO: 1821741 - RNA, 19 nt, Artificial Sequence
  Description of Artificial Sequence: Synthetic oligonucleotide
ccccuugaguccugcugca

SEQ ID NO: 1821742 - RNA, 19 nt, Artificial Sequence
  Description of Artificial Sequence: Synthetic oligonucleotide
cgagggcgaagcucggcca

SEQ ID NO: 1821743 - RNA, 19 nt, Artificial Sequence
  Description of Artificial Sequence: Synthetic oligonucleotide
ggccacgggaccgccucga

SEQ ID NO: 1821744 - RNA, 19 nt, Artificial Sequence
  Description of Artificial Sequence: Synthetic oligonucleotide
cggccacgggaccgccucg

SEQ ID NO: 1821745 - RNA, 19 nt, Artificial Sequence
  Description of Artificial Sequence: Synthetic oligonucleotide
ccacgggaccgccucgagu

SEQ ID NO: 1821746 - RNA, 19 nt, Artificial Sequence
  Description of Artificial Sequence: Synthetic oligonucleotide
ccaggguguuggaaaccuu

SEQ ID NO: 1821747 - RNA, 19 nt, Artificial Sequence
  Description of Artificial Sequence: Synthetic oligonucleotide
cucuugcucugaggacuuu

SEQ ID NO: 1821748 - RNA, 19 nt, Artificial Sequence
  Description of Artificial Sequence: Synthetic oligonucleotide
caguaccaucugaccccuu

SEQ ID NO: 1821749 - RNA, 19 nt, Artificial Sequence
  Description of Artificial Sequence: Synthetic oligonucleotide
ccauggcgagggcgaagcu

SEQ ID NO: 1821750 - RNA, 19 nt, Artificial Sequence
  Description of Artificial Sequence: Synthetic oligonucleotide
cugcaucgcugagggccau

SEQ ID NO: 1821751 - RNA, 19 nt, Artificial Sequence
  Description of Artificial Sequence: Synthetic oligonucleotide
ccucgagucugggcuucua

SEQ ID NO: 1821752 - RNA, 19 nt, Artificial Sequence
  Description of Artificial Sequence: Synthetic oligonucleotide
gccucgagucugggcuucu

SEQ ID NO: 1821753 - RNA, 19 nt, Artificial Sequence
  Description of Artificial Sequence: Synthetic oligonucleotide
gcaccuccccaggcucagu

SEQ ID NO: 1821754 - RNA, 19 nt, Artificial Sequence
  Description of Artificial Sequence: Synthetic oligonucleotide
ccgccucgagucugggcuu

SEQ ID NO: 1821755 - RNA, 19 nt, Artificial Sequence
  Description of Artificial Sequence: Synthetic oligonucleotide
cccggacuuccggcaucau

SEQ ID NO: 1821756 - RNA, 19 nt, Artificial Sequence
  Description of Artificial Sequence: Synthetic oligonucleotide
uuuaaaauagacuaaacac

SEQ ID NO: 1821757 - RNA, 19 nt, Artificial Sequence
  Description of Artificial Sequence: Synthetic oligonucleotide
cuuuuaagaaaauagcugg

SEQ ID NO: 1821758 - RNA, 19 nt, Artificial Sequence
  Description of Artificial Sequence: Synthetic oligonucleotide
aauuuuagaaaguucaccu

SEQ ID NO: 1821759 - RNA, 19 nt, Artificial Sequence
  Description of Artificial Sequence: Synthetic oligonucleotide
aaauagacuaaacacaacu

SEQ ID NO: 1821760 - RNA, 19 nt, Artificial Sequence
  Description of Artificial Sequence: Synthetic oligonucleotide
aaauaucugguccagugac

SEQ ID NO: 1821761 - RNA, 19 nt, Artificial Sequence
  Description of Artificial Sequence: Synthetic oligonucleotide
aguguagagacucauuacc

SEQ ID NO: 1821762 - RNA, 19 nt, Artificial Sequence
  Description of Artificial Sequence: Synthetic oligonucleotide
ucuuaagacaaaauguugc

SEQ ID NO: 1821763 - RNA, 19 nt, Artificial Sequence
  Description of Artificial Sequence: Synthetic oligonucleotide
auuguaauuauuuagguua

SEQ ID NO: 1821764 - RNA, 19 nt, Artificial Sequence
  Description of Artificial Sequence: Synthetic oligonucleotide
ggcauuuacacauaaauag

SEQ ID NO: 1821765 - RNA, 19 nt, Artificial Sequence
  Description of Artificial Sequence: Synthetic oligonucleotide
uguguuggcaauaaggacu

SEQ ID NO: 1821766 - RNA, 19 nt, Artificial Sequence
  Description of Artificial Sequence: Synthetic oligonucleotide
accaauuguaauuauuuag

SEQ ID NO: 1821767 - RNA, 19 nt, Artificial Sequence
  Description of Artificial Sequence: Synthetic oligonucleotide
auagucucuauuuaaaccu

SEQ ID NO: 1821768 - RNA, 19 nt, Artificial Sequence
  Description of Artificial Sequence: Synthetic oligonucleotide
acuaaacacaacucuggcc

SEQ ID NO: 1821769 - RNA, 19 nt, Artificial Sequence
  Description of Artificial Sequence: Synthetic oligonucleotide
aaauguuucuaauguagca

SEQ ID NO: 1821770 - RNA, 19 nt, Artificial Sequence
  Description of Artificial Sequence: Synthetic oligonucleotide
uggcaauaaggacugagcg

SEQ ID NO: 1821771 - RNA, 19 nt, Artificial Sequence
  Description of Artificial Sequence: Synthetic oligonucleotide
aauagacuaaacacaacuc

SEQ ID NO: 1821772 - RNA, 19 nt, Artificial Sequence
  Description of Artificial Sequence: Synthetic oligonucleotide
auuauuuagguuauaaaug

SEQ ID NO: 1821773 - RNA, 19 nt, Artificial Sequence
  Description of Artificial Sequence: Synthetic oligonucleotide
aaugacacacaccaauugu

SEQ ID NO: 1821774 - RNA, 19 nt, Artificial Sequence
  Description of Artificial Sequence: Synthetic oligonucleotide
agaaaguucaccuaccuaa

SEQ ID NO: 1821775 - RNA, 19 nt, Artificial Sequence
  Description of Artificial Sequence: Synthetic oligonucleotide
cagaaucucuacuacaugg

SEQ ID NO: 1821776 - RNA, 19 nt, Artificial Sequence
  Description of Artificial Sequence: Synthetic oligonucleotide
auaaauaaaaccaucugca

SEQ ID NO: 1821777 - RNA, 19 nt, Artificial Sequence
  Description of Artificial Sequence: Synthetic oligonucleotide
ucaaauaucugguccagug

SEQ ID NO: 1821778 - RNA, 19 nt, Artificial Sequence
  Description of Artificial Sequence: Synthetic oligonucleotide
auaggcauaaauaaaacca

SEQ ID NO: 1821779 - RNA, 19 nt, Artificial Sequence
  Description of Artificial Sequence: Synthetic oligonucleotide
uuuagguuauaaauguuuc

SEQ ID NO: 1821780 - RNA, 19 nt, Artificial Sequence
  Description of Artificial Sequence: Synthetic oligonucleotide
ugacuuuggaacaagugcu

SEQ ID NO: 1821781 - RNA, 19 nt, Artificial Sequence
  Description of Artificial Sequence: Synthetic oligonucleotide
aacaagugcuugucugucc

SEQ ID NO: 1821782 - RNA, 19 nt, Artificial Sequence
  Description of Artificial Sequence: Synthetic oligonucleotide
agugacuucugaaagcucc

SEQ ID NO: 1821783 - RNA, 19 nt, Artificial Sequence
  Description of Artificial Sequence: Synthetic oligonucleotide
uaucuuaagacaaaauguu

SEQ ID NO: 1821784 - RNA, 19 nt, Artificial Sequence
  Description of Artificial Sequence: Synthetic oligonucleotide
uagacuaaacacaacucug

SEQ ID NO: 1821785 - RNA, 19 nt, Artificial Sequence
  Description of Artificial Sequence: Synthetic oligonucleotide
uaccuaauuuaaaauagac

SEQ ID NO: 1821786 - RNA, 19 nt, Artificial Sequence
  Description of Artificial Sequence: Synthetic oligonucleotide
aauuguaauuauuuagguu

SEQ ID NO: 1821787 - RNA, 19 nt, Artificial Sequence
  Description of Artificial Sequence: Synthetic oligonucleotide
cuauugggagcucagaagc

SEQ ID NO: 1821788 - RNA, 19 nt, Artificial Sequence
  Description of Artificial Sequence: Synthetic oligonucleotide
uucaguggcauuuacacau

SEQ ID NO: 1821789 - RNA, 19 nt, Artificial Sequence
  Description of Artificial Sequence: Synthetic oligonucleotide
uaauuuuagaaaguucacc

SEQ ID NO: 1821790 - RNA, 19 nt, Artificial Sequence
  Description of Artificial Sequence: Synthetic oligonucleotide
uuuacacauaaauaggcau

SEQ ID NO: 1821791 - RNA, 19 nt, Artificial Sequence
  Description of Artificial Sequence: Synthetic oligonucleotide
acaagugcuugucuguccc

SEQ ID NO: 1821792 - RNA, 19 nt, Artificial Sequence
  Description of Artificial Sequence: Synthetic oligonucleotide
uugcccaaaacauauaaaa

SEQ ID NO: 1821793 - RNA, 19 nt, Artificial Sequence
  Description of Artificial Sequence: Synthetic oligonucleotide
gacuguguuggcaauaagg

SEQ ID NO: 1821794 - RNA, 19 nt, Artificial Sequence
  Description of Artificial Sequence: Synthetic oligonucleotide
caucauuccuguuagcacc

SEQ ID NO: 1821795 - RNA, 19 nt, Artificial Sequence
  Description of Artificial Sequence: Synthetic oligonucleotide
ucuaauguagcagcagagg

SEQ ID NO: 1821796 - RNA, 19 nt, Artificial Sequence
  Description of Artificial Sequence: Synthetic oligonucleotide
uucuaauguagcagcagag

SEQ ID NO: 1821797 - RNA, 19 nt, Artificial Sequence
  Description of Artificial Sequence: Synthetic oligonucleotide
gacuuuagccuucaguggc

SEQ ID NO: 1821798 - RNA, 19 nt, Artificial Sequence
  Description of Artificial Sequence: Synthetic oligonucleotide
acuuuuaagaaaauagcug

SEQ ID NO: 1821799 - RNA, 19 nt, Artificial Sequence
  Description of Artificial Sequence: Synthetic oligonucleotide
ccaauuguaauuauuuagg

SEQ ID NO: 1821800 - RNA, 19 nt, Artificial Sequence
  Description of Artificial Sequence: Synthetic oligonucleotide
ucauaguaggaacugucca

SEQ ID NO: 1821801 - RNA, 19 nt, Artificial Sequence
  Description of Artificial Sequence: Synthetic oligonucleotide
ucucuguggagacuaggcg

SEQ ID NO: 1821802 - RNA, 19 nt, Artificial Sequence
  Description of Artificial Sequence: Synthetic oligonucleotide
acaaaauguugcccaaaac

SEQ ID NO: 1821803 - RNA, 19 nt, Artificial Sequence
  Description of Artificial Sequence: Synthetic oligonucleotide
agcagcaaagcucucgagg

SEQ ID NO: 1821804 - RNA, 19 nt, Artificial Sequence
  Description of Artificial Sequence: Synthetic oligonucleotide
aaaauagacuaaacacaac

SEQ ID NO: 1821805 - RNA, 19 nt, Artificial Sequence
  Description of Artificial Sequence: Synthetic oligonucleotide
aauguugcccaaaacauau

SEQ ID NO: 1821806 - RNA, 19 nt, Artificial Sequence
  Description of Artificial Sequence: Synthetic oligonucleotide
acuauugggagcucagaag

SEQ ID NO: 1821807 - RNA, 19 nt, Artificial Sequence
  Description of Artificial Sequence: Synthetic oligonucleotide
uguugcccaaaacauauaa

SEQ ID NO: 1821808 - RNA, 19 nt, Artificial Sequence
  Description of Artificial Sequence: Synthetic oligonucleotide
ucaccuaccuaauuuaaaa

SEQ ID NO: 1821809 - RNA, 19 nt, Artificial Sequence
  Description of Artificial Sequence: Synthetic oligonucleotide
ugaacuggggcuuuuguuc

SEQ ID NO: 1821810 - RNA, 19 nt, Artificial Sequence
  Description of Artificial Sequence: Synthetic oligonucleotide
uacauuuacaccguugccu

SEQ ID NO: 1821811 - RNA, 19 nt, Artificial Sequence
  Description of Artificial Sequence: Synthetic oligonucleotide
ucuacuacaugguccagcu

SEQ ID NO: 1821812 - RNA, 19 nt, Artificial Sequence
  Description of Artificial Sequence: Synthetic oligonucleotide
uaauguagcagcagaggac

SEQ ID NO: 1821813 - RNA, 19 nt, Artificial Sequence
  Description of Artificial Sequence: Synthetic oligonucleotide
ccuaauuuaaaauagacua

SEQ ID NO: 1821814 - RNA, 19 nt, Artificial Sequence
  Description of Artificial Sequence: Synthetic oligonucleotide
acaacucuggcccaccauc

SEQ ID NO: 1821815 - RNA, 19 nt, Artificial Sequence
  Description of Artificial Sequence: Synthetic oligonucleotide
cagggucucaaauaucugg

SEQ ID NO: 1821816 - RNA, 19 nt, Artificial Sequence
  Description of Artificial Sequence: Synthetic oligonucleotide
cucuauuuaaaccuuaaaa

SEQ ID NO: 1821817 - RNA, 19 nt, Artificial Sequence
  Description of Artificial Sequence: Synthetic oligonucleotide
aaguucaccuaccuaauuu

SEQ ID NO: 1821818 - RNA, 19 nt, Artificial Sequence
  Description of Artificial Sequence: Synthetic oligonucleotide
uguggaaacaccuggccgu

SEQ ID NO: 1821819 - RNA, 19 nt, Artificial Sequence
  Description of Artificial Sequence: Synthetic oligonucleotide
gccgucuacauuuacaccg

SEQ ID NO: 1821820 - RNA, 19 nt, Artificial Sequence
  Description of Artificial Sequence: Synthetic oligonucleotide
uacaugguccagcucagcc

SEQ ID NO: 1821821 - RNA, 19 nt, Artificial Sequence
  Description of Artificial Sequence: Synthetic oligonucleotide
uggaacaagugcuugucug

SEQ ID NO: 1821822 - RNA, 19 nt, Artificial Sequence
  Description of Artificial Sequence: Synthetic oligonucleotide
gacuaaacacaacucuggc

SEQ ID NO: 1821823 - RNA, 19 nt, Artificial Sequence
  Description of Artificial Sequence: Synthetic oligonucleotide
agacuaggcggucaauugg

SEQ ID NO: 1821824 - RNA, 19 nt, Artificial Sequence
  Description of Artificial Sequence: Synthetic oligonucleotide
cucccucgaauguagaccg

SEQ ID NO: 1821825 - RNA, 19 nt, Artificial Sequence
  Description of Artificial Sequence: Synthetic oligonucleotide
uguuucuaauguagcagca

SEQ ID NO: 1821826 - RNA, 19 nt, Artificial Sequence
  Description of Artificial Sequence: Synthetic oligonucleotide
agacuaaacacaacucugg

SEQ ID NO: 1821827 - RNA, 19 nt, Artificial Sequence
  Description of Artificial Sequence: Synthetic oligonucleotide
aucucuacuacauggucca

SEQ ID NO: 1821828 - RNA, 19 nt, Artificial Sequence
  Description of Artificial Sequence: Synthetic oligonucleotide
aaaccaucugcacacugaa

SEQ ID NO: 1821829 - RNA, 19 nt, Artificial Sequence
  Description of Artificial Sequence: Synthetic oligonucleotide
ucgaauguagaccgaggug

SEQ ID NO: 1821830 - RNA, 19 nt, Artificial Sequence
  Description of Artificial Sequence: Synthetic oligonucleotide
aauaaggacugagcggcag

SEQ ID NO: 1821831 - RNA, 19 nt, Artificial Sequence
  Description of Artificial Sequence: Synthetic oligonucleotide
cucguguggaaacaccugg

SEQ ID NO: 1821832 - RNA, 19 nt, Artificial Sequence
  Description of Artificial Sequence: Synthetic oligonucleotide
caugccacacaccaucccg

SEQ ID NO: 1821833 - RNA, 19 nt, Artificial Sequence
  Description of Artificial Sequence: Synthetic oligonucleotide
ugcccguucuacauucugg

SEQ ID NO: 1821834 - RNA, 19 nt, Artificial Sequence
  Description of Artificial Sequence: Synthetic oligonucleotide
aaacuuaauuuuagaaagu

SEQ ID NO: 1821835 - RNA, 19 nt, Artificial Sequence
  Description of Artificial Sequence: Synthetic oligonucleotide
auuuacaccguugccuugg

SEQ ID NO: 1821836 - RNA, 19 nt, Artificial Sequence
  Description of Artificial Sequence: Synthetic oligonucleotide
uggcauuuacacauaaaua

SEQ ID NO: 1821837 - RNA, 19 nt, Artificial Sequence
  Description of Artificial Sequence: Synthetic oligonucleotide
uaggcggucaauuggugcc

SEQ ID NO: 1821838 - RNA, 19 nt, Artificial Sequence
  Description of Artificial Sequence: Synthetic oligonucleotide
cagagacugggcuuggucc

SEQ ID NO: 1821839 - RNA, 19 nt, Artificial Sequence
  Description of Artificial Sequence: Synthetic oligonucleotide
uuccaguucaggagugggg

SEQ ID NO: 1821840 - RNA, 19 nt, Artificial Sequence
  Description of Artificial Sequence: Synthetic oligonucleotide
acaggaucucuguggagac

SEQ ID NO: 1821841 - RNA, 19 nt, Artificial Sequence
  Description of Artificial Sequence: Synthetic oligonucleotide
agagcaguggagcugugug

SEQ ID NO: 1821842 - RNA, 19 nt, Artificial Sequence
  Description of Artificial Sequence: Synthetic oligonucleotide
gagacuaggcggucaauug

SEQ ID NO: 1821843 - RNA, 19 nt, Artificial Sequence
  Description of Artificial Sequence: Synthetic oligonucleotide
guguggaaacaccuggccg

SEQ ID NO: 1821844 - RNA, 19 nt, Artificial Sequence
  Description of Artificial Sequence: Synthetic oligonucleotide
accuaccuaauuuaaaaua

SEQ ID NO: 1821845 - RNA, 19 nt, Artificial Sequence
  Description of Artificial Sequence: Synthetic oligonucleotide
uacacauaaauaggcauaa

SEQ ID NO: 1821846 - RNA, 19 nt, Artificial Sequence
  Description of Artificial Sequence: Synthetic oligonucleotide
uccagugacuucugaaagc

SEQ ID NO: 1821847 - RNA, 19 nt, Artificial Sequence
  Description of Artificial Sequence: Synthetic oligonucleotide
cuaauguagcagcagagga

SEQ ID NO: 1821848 - RNA, 19 nt, Artificial Sequence
  Description of Artificial Sequence: Synthetic oligonucleotide
uguagagacucauuaccaa

SEQ ID NO: 1821849 - RNA, 19 nt, Artificial Sequence
  Description of Artificial Sequence: Synthetic oligonucleotide
acauucuggggugccaucc

SEQ ID NO: 1821850 - RNA, 19 nt, Artificial Sequence
  Description of Artificial Sequence: Synthetic oligonucleotide
acuguguuggcaauaagga

SEQ ID NO: 1821851 - RNA, 19 nt, Artificial Sequence
  Description of Artificial Sequence: Synthetic oligonucleotide
gcaauaaggacugagcggc

SEQ ID NO: 1821852 - RNA, 19 nt, Artificial Sequence
  Description of Artificial Sequence: Synthetic oligonucleotide
ggcaauaaggacugagcgg

SEQ ID NO: 1821853 - RNA, 19 nt, Artificial Sequence
  Description of Artificial Sequence: Synthetic oligonucleotide
aauuggugcccguucuaca

SEQ ID NO: 1821854 - RNA, 19 nt, Artificial Sequence
  Description of Artificial Sequence: Synthetic oligonucleotide
cagaagcugagcuuugcag

SEQ ID NO: 1821855 - RNA, 19 nt, Artificial Sequence
  Description of Artificial Sequence: Synthetic oligonucleotide
gaaucucuacuacaugguc

SEQ ID NO: 1821856 - RNA, 19 nt, Artificial Sequence
  Description of Artificial Sequence: Synthetic oligonucleotide
uccuccacagugacuuugg

SEQ ID NO: 1821857 - RNA, 19 nt, Artificial Sequence
  Description of Artificial Sequence: Synthetic oligonucleotide
gaagccuaggaagacagca

SEQ ID NO: 1821858 - RNA, 19 nt, Artificial Sequence
  Description of Artificial Sequence: Synthetic oligonucleotide
accuaauuuaaaauagacu

SEQ ID NO: 1821859 - RNA, 19 nt, Artificial Sequence
  Description of Artificial Sequence: Synthetic oligonucleotide
uggccgucuacauuuacac

SEQ ID NO: 1821860 - RNA, 19 nt, Artificial Sequence
  Description of Artificial Sequence: Synthetic oligonucleotide
uauuuagguuauaaauguu

SEQ ID NO: 1821861 - RNA, 19 nt, Artificial Sequence
  Description of Artificial Sequence: Synthetic oligonucleotide
aaaaugacacacaccaauu

SEQ ID NO: 1821862 - RNA, 19 nt, Artificial Sequence
  Description of Artificial Sequence: Synthetic oligonucleotide
aaacacaacucuggcccac

SEQ ID NO: 1821863 - RNA, 19 nt, Artificial Sequence
  Description of Artificial Sequence: Synthetic oligonucleotide
ugugcugggcugacuauug

SEQ ID NO: 1821864 - RNA, 19 nt, Artificial Sequence
  Description of Artificial Sequence: Synthetic oligonucleotide
uccaggucauaguaggaac

SEQ ID NO: 1821865 - RNA, 19 nt, Artificial Sequence
  Description of Artificial Sequence: Synthetic oligonucleotide
aucuuaagacaaaauguug

SEQ ID NO: 1821866 - RNA, 19 nt, Artificial Sequence
  Description of Artificial Sequence: Synthetic oligonucleotide
aagccuaggaagacagcac

SEQ ID NO: 1821867 - RNA, 19 nt, Artificial Sequence
  Description of Artificial Sequence: Synthetic oligonucleotide
gaguguagagacucauuac

SEQ ID NO: 1821868 - RNA, 19 nt, Artificial Sequence
  Description of Artificial Sequence: Synthetic oligonucleotide
acacacaccaauuguaauu

SEQ ID NO: 1821869 - RNA, 19 nt, Artificial Sequence
  Description of Artificial Sequence: Synthetic oligonucleotide
uucaccuaccuaauuuaaa

SEQ ID NO: 1821870 - RNA, 19 nt, Artificial Sequence
  Description of Artificial Sequence: Synthetic oligonucleotide
uuuacaccguugccuuggg

SEQ ID NO: 1821871 - RNA, 19 nt, Artificial Sequence
  Description of Artificial Sequence: Synthetic oligonucleotide
ugaagagcaguggagcugu

SEQ ID NO: 1821872 - RNA, 19 nt, Artificial Sequence
  Description of Artificial Sequence: Synthetic oligonucleotide
cuaggcggucaauuggugc

SEQ ID NO: 1821873 - RNA, 19 nt, Artificial Sequence
  Description of Artificial Sequence: Synthetic oligonucleotide
aguucaccuaccuaauuua

SEQ ID NO: 1821874 - RNA, 19 nt, Artificial Sequence
  Description of Artificial Sequence: Synthetic oligonucleotide
uauugggagcucagaagcu

SEQ ID NO: 1821875 - RNA, 19 nt, Artificial Sequence
  Description of Artificial Sequence: Synthetic oligonucleotide
agagcuccuccacugaacu

SEQ ID NO: 1821876 - RNA, 19 nt, Artificial Sequence
  Description of Artificial Sequence: Synthetic oligonucleotide
cuacauuuacaccguugcc

SEQ ID NO: 1821877 - RNA, 19 nt, Artificial Sequence
  Description of Artificial Sequence: Synthetic oligonucleotide
guuggcaauaaggacugag

SEQ ID NO: 1821878 - RNA, 19 nt, Artificial Sequence
  Description of Artificial Sequence: Synthetic oligonucleotide
ucucaaauaucugguccag

SEQ ID NO: 1821879 - RNA, 19 nt, Artificial Sequence
  Description of Artificial Sequence: Synthetic oligonucleotide
cuugggaguguagagacuc

SEQ ID NO: 1821880 - RNA, 19 nt, Artificial Sequence
  Description of Artificial Sequence: Synthetic oligonucleotide
gacugagcggcagagguug

SEQ ID NO: 1821881 - RNA, 19 nt, Artificial Sequence
  Description of Artificial Sequence: Synthetic oligonucleotide
auaguaggaacuguccaca

SEQ ID NO: 1821882 - RNA, 19 nt, Artificial Sequence
  Description of Artificial Sequence: Synthetic oligonucleotide
gaacuguccacaucugaga

SEQ ID NO: 1821883 - RNA, 19 nt, Artificial Sequence
  Description of Artificial Sequence: Synthetic oligonucleotide
aaaguucaccuaccuaauu

SEQ ID NO: 1821884 - RNA, 19 nt, Artificial Sequence
  Description of Artificial Sequence: Synthetic oligonucleotide
uaaggacugagcggcagag

SEQ ID NO: 1821885 - RNA, 19 nt, Artificial Sequence
  Description of Artificial Sequence: Synthetic oligonucleotide
acuugcagagcagacccgg

SEQ ID NO: 1821886 - RNA, 19 nt, Artificial Sequence
  Description of Artificial Sequence: Synthetic oligonucleotide
cuguguuggcaauaaggac

SEQ ID NO: 1821887 - RNA, 19 nt, Artificial Sequence
  Description of Artificial Sequence: Synthetic oligonucleotide
guuucuaauguagcagcag

SEQ ID NO: 1821888 - RNA, 19 nt, Artificial Sequence
  Description of Artificial Sequence: Synthetic oligonucleotide
uguccaggagugacugccg

SEQ ID NO: 1821889 - RNA, 19 nt, Artificial Sequence
  Description of Artificial Sequence: Synthetic oligonucleotide
gacuauugggagcucagaa

SEQ ID NO: 1821890 - RNA, 19 nt, Artificial Sequence
  Description of Artificial Sequence: Synthetic oligonucleotide
cuaccuaauuuaaaauaga

SEQ ID NO: 1821891 - RNA, 19 nt, Artificial Sequence
  Description of Artificial Sequence: Synthetic oligonucleotide
uggcucucaucucaggcac

SEQ ID NO: 1821892 - RNA, 19 nt, Artificial Sequence
  Description of Artificial Sequence: Synthetic oligonucleotide
ucguguggaaacaccuggc

SEQ ID NO: 1821893 - RNA, 19 nt, Artificial Sequence
  Description of Artificial Sequence: Synthetic oligonucleotide
gucauaguaggaacugucc

SEQ ID NO: 1821894 - RNA, 19 nt, Artificial Sequence
  Description of Artificial Sequence: Synthetic oligonucleotide
uagaaaguucaccuaccua

SEQ ID NO: 1821895 - RNA, 19 nt, Artificial Sequence
  Description of Artificial Sequence: Synthetic oligonucleotide
agccuaggaagacagcacu

SEQ ID NO: 1821896 - RNA, 19 nt, Artificial Sequence
  Description of Artificial Sequence: Synthetic oligonucleotide
aauguagaccgagguggag

SEQ ID NO: 1821897 - RNA, 19 nt, Artificial Sequence
  Description of Artificial Sequence: Synthetic oligonucleotide
uggguuguccagcucccag

SEQ ID NO: 1821898 - RNA, 19 nt, Artificial Sequence
  Description of Artificial Sequence: Synthetic oligonucleotide
uugggagcucagaagcuga

SEQ ID NO: 1821899 - RNA, 19 nt, Artificial Sequence
  Description of Artificial Sequence: Synthetic oligonucleotide
uggggugccaucccaugcc

SEQ ID NO: 1821900 - RNA, 19 nt, Artificial Sequence
  Description of Artificial Sequence: Synthetic oligonucleotide
uccuguuagcaccgugucc

SEQ ID NO: 1821901 - RNA, 19 nt, Artificial Sequence
  Description of Artificial Sequence: Synthetic oligonucleotide
aauaucugguccagugacu

SEQ ID NO: 1821902 - RNA, 19 nt, Artificial Sequence
  Description of Artificial Sequence: Synthetic oligonucleotide
acaccaauuguaauuauuu

SEQ ID NO: 1821903 - RNA, 19 nt, Artificial Sequence
  Description of Artificial Sequence: Synthetic oligonucleotide
agugcuugucugucccugg

SEQ ID NO: 1821904 - RNA, 19 nt, Artificial Sequence
  Description of Artificial Sequence: Synthetic oligonucleotide
auuggugcccguucuacau

SEQ ID NO: 1821905 - RNA, 19 nt, Artificial Sequence
  Description of Artificial Sequence: Synthetic oligonucleotide
agcagacccggugaagagc

SEQ ID NO: 1821906 - RNA, 19 nt, Artificial Sequence
  Description of Artificial Sequence: Synthetic oligonucleotide
cugacuauugggagcucag

SEQ ID NO: 1821907 - RNA, 19 nt, Artificial Sequence
  Description of Artificial Sequence: Synthetic oligonucleotide
aaauguugcccaaaacaua

SEQ ID NO: 1821908 - RNA, 19 nt, Artificial Sequence
  Description of Artificial Sequence: Synthetic oligonucleotide
cacccaucauuccuguuag

SEQ ID NO: 1821909 - RNA, 19 nt, Artificial Sequence
  Description of Artificial Sequence: Synthetic oligonucleotide
ggggcuuuuguucuccagg

SEQ ID NO: 1821910 - RNA, 19 nt, Artificial Sequence
  Description of Artificial Sequence: Synthetic oligonucleotide
agcagaggacguuuguaga

SEQ ID NO: 1821911 - RNA, 19 nt, Artificial Sequence
  Description of Artificial Sequence: Synthetic oligonucleotide
gggcuuuuguucuccaggg

SEQ ID NO: 1821912 - RNA, 19 nt, Artificial Sequence
  Description of Artificial Sequence: Synthetic oligonucleotide
acugcagagacugggcuug

SEQ ID NO: 1821913 - RNA, 19 nt, Artificial Sequence
  Description of Artificial Sequence: Synthetic oligonucleotide
cugggcugacuauugggag

SEQ ID NO: 1821914 - RNA, 19 nt, Artificial Sequence
  Description of Artificial Sequence: Synthetic oligonucleotide
ggaacuguccacaucugag

SEQ ID NO: 1821915 - RNA, 19 nt, Artificial Sequence
  Description of Artificial Sequence: Synthetic oligonucleotide
cuuccaguucaggaguggg

SEQ ID NO: 1821916 - RNA, 19 nt, Artificial Sequence
  Description of Artificial Sequence: Synthetic oligonucleotide
agcggcagagguugggcuc

SEQ ID NO: 1821917 - RNA, 19 nt, Artificial Sequence
  Description of Artificial Sequence: Synthetic oligonucleotide
caauuguaauuauuuaggu

SEQ ID NO: 1821918 - RNA, 19 nt, Artificial Sequence
  Description of Artificial Sequence: Synthetic oligonucleotide
acugaacuggggcuuuugu

SEQ ID NO: 1821919 - RNA, 19 nt, Artificial Sequence
  Description of Artificial Sequence: Synthetic oligonucleotide
uuccuguuagcaccguguc

SEQ ID NO: 1821920 - RNA, 19 nt, Artificial Sequence
  Description of Artificial Sequence: Synthetic oligonucleotide
ugaagccuaggaagacagc

SEQ ID NO: 1821921 - RNA, 19 nt, Artificial Sequence
  Description of Artificial Sequence: Synthetic oligonucleotide
agaaucucuacuacauggu

SEQ ID NO: 1821922 - RNA, 19 nt, Artificial Sequence
  Description of Artificial Sequence: Synthetic oligonucleotide
uagucucuauuuaaaccuu

SEQ ID NO: 1821923 - RNA, 19 nt, Artificial Sequence
  Description of Artificial Sequence: Synthetic oligonucleotide
caaauaucugguccaguga

SEQ ID NO: 1821924 - RNA, 19 nt, Artificial Sequence
  Description of Artificial Sequence: Synthetic oligonucleotide
acuuuggaacaagugcuug

SEQ ID NO: 1821925 - RNA, 19 nt, Artificial Sequence
  Description of Artificial Sequence: Synthetic oligonucleotide
cucuacuacaugguccagc

SEQ ID NO: 1821926 - RNA, 19 nt, Artificial Sequence
  Description of Artificial Sequence: Synthetic oligonucleotide
agagcagacccggugaaga

SEQ ID NO: 1821927 - RNA, 19 nt, Artificial Sequence
  Description of Artificial Sequence: Synthetic oligonucleotide
ucugcacacugaagccuag

SEQ ID NO: 1821928 - RNA, 19 nt, Artificial Sequence
  Description of Artificial Sequence: Synthetic oligonucleotide
agaggacguuuguagaaaa

SEQ ID NO: 1821929 - RNA, 19 nt, Artificial Sequence
  Description of Artificial Sequence: Synthetic oligonucleotide
uagcaccguguccagguca

SEQ ID NO: 1821930 - RNA, 19 nt, Artificial Sequence
  Description of Artificial Sequence: Synthetic oligonucleotide
ugggagcucagaagcugag

SEQ ID NO: 1821931 - RNA, 19 nt, Artificial Sequence
  Description of Artificial Sequence: Synthetic oligonucleotide
ggcuguacggcacaggauc

SEQ ID NO: 1821932 - RNA, 19 nt, Artificial Sequence
  Description of Artificial Sequence: Synthetic oligonucleotide
uacggcacaggaucucugu

SEQ ID NO: 1821933 - RNA, 19 nt, Artificial Sequence
  Description of Artificial Sequence: Synthetic oligonucleotide
uguuagcaccguguccagg

SEQ ID NO: 1821934 - RNA, 19 nt, Artificial Sequence
  Description of Artificial Sequence: Synthetic oligonucleotide
acaccaucccgacucauuu

SEQ ID NO: 1821935 - RNA, 19 nt, Artificial Sequence
  Description of Artificial Sequence: Synthetic oligonucleotide
gagcagacccggugaagag

SEQ ID NO: 1821936 - RNA, 19 nt, Artificial Sequence
  Description of Artificial Sequence: Synthetic oligonucleotide
ggaguguagagacucauua

SEQ ID NO: 1821937 - RNA, 19 nt, Artificial Sequence
  Description of Artificial Sequence: Synthetic oligonucleotide
agaagagcuccuccacuga

SEQ ID NO: 1821938 - RNA, 19 nt, Artificial Sequence
  Description of Artificial Sequence: Synthetic oligonucleotide
uguacggcacaggaucucu

SEQ ID NO: 1821939 - RNA, 19 nt, Artificial Sequence
  Description of Artificial Sequence: Synthetic oligonucleotide
ucuacauucuggggugcca

SEQ ID NO: 1821940 - RNA, 19 nt, Artificial Sequence
  Description of Artificial Sequence: Synthetic oligonucleotide
caguucaggaguggggugc

SEQ ID NO: 1821941 - RNA, 19 nt, Artificial Sequence
  Description of Artificial Sequence: Synthetic oligonucleotide
guguagagacucauuacca

SEQ ID NO: 1821942 - RNA, 19 nt, Artificial Sequence
  Description of Artificial Sequence: Synthetic oligonucleotide
ucuggggugccaucccaug

SEQ ID NO: 1821943 - RNA, 19 nt, Artificial Sequence
  Description of Artificial Sequence: Synthetic oligonucleotide
agggucucaaauaucuggu

SEQ ID NO: 1821944 - RNA, 19 nt, Artificial Sequence
  Description of Artificial Sequence: Synthetic oligonucleotide
uggagccucguguggaaac

SEQ ID NO: 1821945 - RNA, 19 nt, Artificial Sequence
  Description of Artificial Sequence: Synthetic oligonucleotide
uggugcccguucuacauuc

SEQ ID NO: 1821946 - RNA, 19 nt, Artificial Sequence
  Description of Artificial Sequence: Synthetic oligonucleotide
acagugacuuuggaacaag

SEQ ID NO: 1821947 - RNA, 19 nt, Artificial Sequence
  Description of Artificial Sequence: Synthetic oligonucleotide
auaucugguccagugacuu

SEQ ID NO: 1821948 - RNA, 19 nt, Artificial Sequence
  Description of Artificial Sequence: Synthetic oligonucleotide
guugccuugggaguguaga

SEQ ID NO: 1821949 - RNA, 19 nt, Artificial Sequence
  Description of Artificial Sequence: Synthetic oligonucleotide
guuagcaccguguccaggu

SEQ ID NO: 1821950 - RNA, 19 nt, Artificial Sequence
  Description of Artificial Sequence: Synthetic oligonucleotide
uucuacauucuggggugcc

SEQ ID NO: 1821951 - RNA, 19 nt, Artificial Sequence
  Description of Artificial Sequence: Synthetic oligonucleotide
acccaucauuccuguuagc

SEQ ID NO: 1821952 - RNA, 19 nt, Artificial Sequence
  Description of Artificial Sequence: Synthetic oligonucleotide
aaccaucugcacacugaag

SEQ ID NO: 1821953 - RNA, 19 nt, Artificial Sequence
  Description of Artificial Sequence: Synthetic oligonucleotide
uguaauuauuuagguuaua

SEQ ID NO: 1821954 - RNA, 19 nt, Artificial Sequence
  Description of Artificial Sequence: Synthetic oligonucleotide
cauucuggggugccauccc

SEQ ID NO: 1821955 - RNA, 19 nt, Artificial Sequence
  Description of Artificial Sequence: Synthetic oligonucleotide
uguggagacuaggcgguca

SEQ ID NO: 1821956 - RNA, 19 nt, Artificial Sequence
  Description of Artificial Sequence: Synthetic oligonucleotide
ugagcggcagagguugggc

SEQ ID NO: 1821957 - RNA, 19 nt, Artificial Sequence
  Description of Artificial Sequence: Synthetic oligonucleotide
gaaacaccuggccgucuac

SEQ ID NO: 1821958 - RNA, 19 nt, Artificial Sequence
  Description of Artificial Sequence: Synthetic oligonucleotide
ugacuauugggagcucaga

SEQ ID NO: 1821959 - RNA, 19 nt, Artificial Sequence
  Description of Artificial Sequence: Synthetic oligonucleotide
cacucccucgaauguagac

SEQ ID NO: 1821960 - RNA, 19 nt, Artificial Sequence
  Description of Artificial Sequence: Synthetic oligonucleotide
agcucagaagcugagcuuu

SEQ ID NO: 1821961 - RNA, 19 nt, Artificial Sequence
  Description of Artificial Sequence: Synthetic oligonucleotide
cuggcuguacggcacagga

SEQ ID NO: 1821962 - RNA, 19 nt, Artificial Sequence
  Description of Artificial Sequence: Synthetic oligonucleotide
cuggggugccaucccaugc

SEQ ID NO: 1821963 - RNA, 19 nt, Artificial Sequence
  Description of Artificial Sequence: Synthetic oligonucleotide
cauuccuguuagcaccgug

SEQ ID NO: 1821964 - RNA, 19 nt, Artificial Sequence
  Description of Artificial Sequence: Synthetic oligonucleotide
caucccgacucauuuccuc

SEQ ID NO: 1821965 - RNA, 19 nt, Artificial Sequence
  Description of Artificial Sequence: Synthetic oligonucleotide
agccucguguggaaacacc

SEQ ID NO: 1821966 - RNA, 19 nt, Artificial Sequence
  Description of Artificial Sequence: Synthetic oligonucleotide
acuacaugguccagcucag

SEQ ID NO: 1821967 - RNA, 19 nt, Artificial Sequence
  Description of Artificial Sequence: Synthetic oligonucleotide
aggcggucaauuggugccc

SEQ ID NO: 1821968 - RNA, 19 nt, Artificial Sequence
  Description of Artificial Sequence: Synthetic oligonucleotide
gaacuggggcuuuuguucu

SEQ ID NO: 1821969 - RNA, 19 nt, Artificial Sequence
  Description of Artificial Sequence: Synthetic oligonucleotide
ggcauaaauaaaaccaucu

SEQ ID NO: 1821970 - RNA, 19 nt, Artificial Sequence
  Description of Artificial Sequence: Synthetic oligonucleotide
gaauguagaccgaggugga

SEQ ID NO: 1821971 - RNA, 19 nt, Artificial Sequence
  Description of Artificial Sequence: Synthetic oligonucleotide
ugccggacuguguuggcaa

SEQ ID NO: 1821972 - RNA, 19 nt, Artificial Sequence
  Description of Artificial Sequence: Synthetic oligonucleotide
acggcacaggaucucugug

SEQ ID NO: 1821973 - RNA, 19 nt, Artificial Sequence
  Description of Artificial Sequence: Synthetic oligonucleotide
uuacaccguugccuuggga

SEQ ID NO: 1821974 - RNA, 19 nt, Artificial Sequence
  Description of Artificial Sequence: Synthetic oligonucleotide
gacccggugaagagcagug

SEQ ID NO: 1821975 - RNA, 19 nt, Artificial Sequence
  Description of Artificial Sequence: Synthetic oligonucleotide
ggugcuccucgucagcugc

SEQ ID NO: 1821976 - RNA, 19 nt, Artificial Sequence
  Description of Artificial Sequence: Synthetic oligonucleotide
ucccgacucauuuccuccu

SEQ ID NO: 1821977 - RNA, 19 nt, Artificial Sequence
  Description of Artificial Sequence: Synthetic oligonucleotide
cagacuugcagguggagcu

SEQ ID NO: 1821978 - RNA, 19 nt, Artificial Sequence
  Description of Artificial Sequence: Synthetic oligonucleotide
uuagcaccguguccagguc

SEQ ID NO: 1821979 - RNA, 19 nt, Artificial Sequence
  Description of Artificial Sequence: Synthetic oligonucleotide
gccuugggaguguagagac

SEQ ID NO: 1821980 - RNA, 19 nt, Artificial Sequence
  Description of Artificial Sequence: Synthetic oligonucleotide
uccaggagugacugccgcu

SEQ ID NO: 1821981 - RNA, 19 nt, Artificial Sequence
  Description of Artificial Sequence: Synthetic oligonucleotide
ugucugucccuggaucaug

SEQ ID NO: 1821982 - RNA, 19 nt, Artificial Sequence
  Description of Artificial Sequence: Synthetic oligonucleotide
caccaauuguaauuauuua

SEQ ID NO: 1821983 - RNA, 19 nt, Artificial Sequence
  Description of Artificial Sequence: Synthetic oligonucleotide
gaggcggggcagcagcagc

SEQ ID NO: 1821984 - RNA, 19 nt, Artificial Sequence
  Description of Artificial Sequence: Synthetic oligonucleotide
gugcugggcugacuauugg

SEQ ID NO: 1821985 - RNA, 19 nt, Artificial Sequence
  Description of Artificial Sequence: Synthetic oligonucleotide
ugcuugucugucccuggau

SEQ ID NO: 1821986 - RNA, 19 nt, Artificial Sequence
  Description of Artificial Sequence: Synthetic oligonucleotide
cuggccgucuacauuuaca

SEQ ID NO: 1821987 - RNA, 19 nt, Artificial Sequence
  Description of Artificial Sequence: Synthetic oligonucleotide
cacacaccaauuguaauua

SEQ ID NO: 1821988 - RNA, 19 nt, Artificial Sequence
  Description of Artificial Sequence: Synthetic oligonucleotide
ugccacacaccaucccgac

SEQ ID NO: 1821989 - RNA, 19 nt, Artificial Sequence
  Description of Artificial Sequence: Synthetic oligonucleotide
cucgaauguagaccgaggu

SEQ ID NO: 1821990 - RNA, 19 nt, Artificial Sequence
  Description of Artificial Sequence: Synthetic oligonucleotide
caggucuccaccagaaucu

SEQ ID NO: 1821991 - RNA, 19 nt, Artificial Sequence
  Description of Artificial Sequence: Synthetic oligonucleotide
acacaccaauuguaauuau

SEQ ID NO: 1821992 - RNA, 19 nt, Artificial Sequence
  Description of Artificial Sequence: Synthetic oligonucleotide
acacaacucuggcccacca

SEQ ID NO: 1821993 - RNA, 19 nt, Artificial Sequence
  Description of Artificial Sequence: Synthetic oligonucleotide
ugggaguguagagacucau

SEQ ID NO: 1821994 - RNA, 19 nt, Artificial Sequence
  Description of Artificial Sequence: Synthetic oligonucleotide
guugcccaaaacauauaaa

SEQ ID NO: 1821995 - RNA, 19 nt, Artificial Sequence
  Description of Artificial Sequence: Synthetic oligonucleotide
acuuuagccuucaguggca

SEQ ID NO: 1821996 - RNA, 19 nt, Artificial Sequence
  Description of Artificial Sequence: Synthetic oligonucleotide
uggucccacccaucauucc

SEQ ID NO: 1821997 - RNA, 19 nt, Artificial Sequence
  Description of Artificial Sequence: Synthetic oligonucleotide
cguucuacauucuggggug

SEQ ID NO: 1821998 - RNA, 19 nt, Artificial Sequence
  Description of Artificial Sequence: Synthetic oligonucleotide
ucugccggacuguguuggc

SEQ ID NO: 1821999 - RNA, 19 nt, Artificial Sequence
  Description of Artificial Sequence: Synthetic oligonucleotide
cuguuagcaccguguccag

SEQ ID NO: 1822000 - RNA, 19 nt, Artificial Sequence
  Description of Artificial Sequence: Synthetic oligonucleotide
aggagugacugccgcugca

SEQ ID NO: 1822001 - RNA, 19 nt, Artificial Sequence
  Description of Artificial Sequence: Synthetic oligonucleotide
ccuguuagcaccgugucca

SEQ ID NO: 1822002 - RNA, 19 nt, Artificial Sequence
  Description of Artificial Sequence: Synthetic oligonucleotide
ccucgaauguagaccgagg

SEQ ID NO: 1822003 - RNA, 19 nt, Artificial Sequence
  Description of Artificial Sequence: Synthetic oligonucleotide
ucucuacuacaugguccag

SEQ ID NO: 1822004 - RNA, 19 nt, Artificial Sequence
  Description of Artificial Sequence: Synthetic oligonucleotide
cagcagcaaagcucucgag

SEQ ID NO: 1822005 - RNA, 19 nt, Artificial Sequence
  Description of Artificial Sequence: Synthetic oligonucleotide
cacugaagccuaggaagac

SEQ ID NO: 1822006 - RNA, 19 nt, Artificial Sequence
  Description of Artificial Sequence: Synthetic oligonucleotide
uuggugcccguucuacauu

SEQ ID NO: 1822007 - RNA, 19 nt, Artificial Sequence
  Description of Artificial Sequence: Synthetic oligonucleotide
cucucgaggccacugcaga

SEQ ID NO: 1822008 - RNA, 19 nt, Artificial Sequence
  Description of Artificial Sequence: Synthetic oligonucleotide
ggucaauuggugcccguuc

SEQ ID NO: 1822009 - RNA, 19 nt, Artificial Sequence
  Description of Artificial Sequence: Synthetic oligonucleotide
uggcuguacggcacaggau

SEQ ID NO: 1822010 - RNA, 19 nt, Artificial Sequence
  Description of Artificial Sequence: Synthetic oligonucleotide
guucaccuaccuaauuuaa

SEQ ID NO: 1822011 - RNA, 19 nt, Artificial Sequence
  Description of Artificial Sequence: Synthetic oligonucleotide
ucccacccaucauuccugu

SEQ ID NO: 1822012 - RNA, 19 nt, Artificial Sequence
  Description of Artificial Sequence: Synthetic oligonucleotide
ggacauguccaggagugac

SEQ ID NO: 1822013 - RNA, 19 nt, Artificial Sequence
  Description of Artificial Sequence: Synthetic oligonucleotide
gaaaguucaccuaccuaau

SEQ ID NO: 1822014 - RNA, 19 nt, Artificial Sequence
  Description of Artificial Sequence: Synthetic oligonucleotide
caggagugacugccgcugc

SEQ ID NO: 1822015 - RNA, 19 nt, Artificial Sequence
  Description of Artificial Sequence: Synthetic oligonucleotide
gacuaggcggucaauuggu

SEQ ID NO: 1822016 - RNA, 19 nt, Artificial Sequence
  Description of Artificial Sequence: Synthetic oligonucleotide
ggcacucccucgaauguag

SEQ ID NO: 1822017 - RNA, 19 nt, Artificial Sequence
  Description of Artificial Sequence: Synthetic oligonucleotide
acccggugaagagcagugg

SEQ ID NO: 1822018 - RNA, 19 nt, Artificial Sequence
  Description of Artificial Sequence: Synthetic oligonucleotide
aguggcauuuacacauaaa

SEQ ID NO: 1822019 - RNA, 19 nt, Artificial Sequence
  Description of Artificial Sequence: Synthetic oligonucleotide
ugagcuccguggggugugg

SEQ ID NO: 1822020 - RNA, 19 nt, Artificial Sequence
  Description of Artificial Sequence: Synthetic oligonucleotide
cugcacacugaagccuagg

SEQ ID NO: 1822021 - RNA, 19 nt, Artificial Sequence
  Description of Artificial Sequence: Synthetic oligonucleotide
acuaggcggucaauuggug

SEQ ID NO: 1822022 - RNA, 19 nt, Artificial Sequence
  Description of Artificial Sequence: Synthetic oligonucleotide
uuuagccuucaguggcauu

SEQ ID NO: 1822023 - RNA, 19 nt, Artificial Sequence
  Description of Artificial Sequence: Synthetic oligonucleotide
aggugagcuccguggggug

SEQ ID NO: 1822024 - RNA, 19 nt, Artificial Sequence
  Description of Artificial Sequence: Synthetic oligonucleotide
ccuaggaagacagcacuug

SEQ ID NO: 1822025 - RNA, 19 nt, Artificial Sequence
  Description of Artificial Sequence: Synthetic oligonucleotide
gucccacccaucauuccug

SEQ ID NO: 1822026 - RNA, 19 nt, Artificial Sequence
  Description of Artificial Sequence: Synthetic oligonucleotide
ggaacaagugcuugucugu

SEQ ID NO: 1822027 - RNA, 19 nt, Artificial Sequence
  Description of Artificial Sequence: Synthetic oligonucleotide
cugagcggcagagguuggg

SEQ ID NO: 1822028 - RNA, 19 nt, Artificial Sequence
  Description of Artificial Sequence: Synthetic oligonucleotide
agacccggugaagagcagu

SEQ ID NO: 1822029 - RNA, 19 nt, Artificial Sequence
  Description of Artificial Sequence: Synthetic oligonucleotide
caauaaggacugagcggca

SEQ ID NO: 1822030 - RNA, 19 nt, Artificial Sequence
  Description of Artificial Sequence: Synthetic oligonucleotide
ccagaaucucuacuacaug

SEQ ID NO: 1822031 - RNA, 19 nt, Artificial Sequence
  Description of Artificial Sequence: Synthetic oligonucleotide
ccggugaagagcaguggag

SEQ ID NO: 1822032 - RNA, 19 nt, Artificial Sequence
  Description of Artificial Sequence: Synthetic oligonucleotide
ggccgucuacauuuacacc

SEQ ID NO: 1822033 - RNA, 19 nt, Artificial Sequence
  Description of Artificial Sequence: Synthetic oligonucleotide
aguucaggaguggggugcu

SEQ ID NO: 1822034 - RNA, 19 nt, Artificial Sequence
  Description of Artificial Sequence: Synthetic oligonucleotide
ucccucgaauguagaccga

SEQ ID NO: 1822035 - RNA, 19 nt, Artificial Sequence
  Description of Artificial Sequence: Synthetic oligonucleotide
ggugaagagcaguggagcu

SEQ ID NO: 1822036 - RNA, 19 nt, Artificial Sequence
  Description of Artificial Sequence: Synthetic oligonucleotide
ggcuuggucccacccauca

SEQ ID NO: 1822037 - RNA, 19 nt, Artificial Sequence
  Description of Artificial Sequence: Synthetic oligonucleotide
cccguucuacauucugggg

SEQ ID NO: 1822038 - RNA, 19 nt, Artificial Sequence
  Description of Artificial Sequence: Synthetic oligonucleotide
cuggaucugccggacugug

SEQ ID NO: 1822039 - RNA, 19 nt, Artificial Sequence
  Description of Artificial Sequence: Synthetic oligonucleotide
aucugcacacugaagccua

SEQ ID NO: 1822040 - RNA, 19 nt, Artificial Sequence
  Description of Artificial Sequence: Synthetic oligonucleotide
ggacuguguuggcaauaag

SEQ ID NO: 1822041 - RNA, 19 nt, Artificial Sequence
  Description of Artificial Sequence: Synthetic oligonucleotide
caccuaccuaauuuaaaau

SEQ ID NO: 1822042 - RNA, 19 nt, Artificial Sequence
  Description of Artificial Sequence: Synthetic oligonucleotide
caccguugccuugggagug

SEQ ID NO: 1822043 - RNA, 19 nt, Artificial Sequence
  Description of Artificial Sequence: Synthetic oligonucleotide
gagccucguguggaaacac

SEQ ID NO: 1822044 - RNA, 19 nt, Artificial Sequence
  Description of Artificial Sequence: Synthetic oligonucleotide
gacugggcuuggucccacc

SEQ ID NO: 1822045 - RNA, 19 nt, Artificial Sequence
  Description of Artificial Sequence: Synthetic oligonucleotide
gcagagacugggcuugguc

SEQ ID NO: 1822046 - RNA, 19 nt, Artificial Sequence
  Description of Artificial Sequence: Synthetic oligonucleotide
cggcacaggaucucugugg

SEQ ID NO: 1822047 - RNA, 19 nt, Artificial Sequence
  Description of Artificial Sequence: Synthetic oligonucleotide
cucucaggucuccaccaga

SEQ ID NO: 1822048 - RNA, 19 nt, Artificial Sequence
  Description of Artificial Sequence: Synthetic oligonucleotide
guggagacuaggcggucaa

SEQ ID NO: 1822049 - RNA, 19 nt, Artificial Sequence
  Description of Artificial Sequence: Synthetic oligonucleotide
gugcuugucugucccugga

SEQ ID NO: 1822050 - RNA, 19 nt, Artificial Sequence
  Description of Artificial Sequence: Synthetic oligonucleotide
gcagacccggugaagagca

SEQ ID NO: 1822051 - RNA, 19 nt, Artificial Sequence
  Description of Artificial Sequence: Synthetic oligonucleotide
cccaucauuccuguuagca

SEQ ID NO: 1822052 - RNA, 19 nt, Artificial Sequence
  Description of Artificial Sequence: Synthetic oligonucleotide
augguacaggugagcuccg

SEQ ID NO: 1822053 - RNA, 19 nt, Artificial Sequence
  Description of Artificial Sequence: Synthetic oligonucleotide
guacggcacaggaucucug

SEQ ID NO: 1822054 - RNA, 19 nt, Artificial Sequence
  Description of Artificial Sequence: Synthetic oligonucleotide
caguggcauuuacacauaa

SEQ ID NO: 1822055 - RNA, 19 nt, Artificial Sequence
  Description of Artificial Sequence: Synthetic oligonucleotide
caggucagacuugcaggug

SEQ ID NO: 1822056 - RNA, 19 nt, Artificial Sequence
  Description of Artificial Sequence: Synthetic oligonucleotide
gggcuccacuagcaugugg

SEQ ID NO: 1822057 - RNA, 19 nt, Artificial Sequence
  Description of Artificial Sequence: Synthetic oligonucleotide
acugagcggcagagguugg

SEQ ID NO: 1822058 - RNA, 19 nt, Artificial Sequence
  Description of Artificial Sequence: Synthetic oligonucleotide
ggguuguccagcucccaga

SEQ ID NO: 1822059 - RNA, 19 nt, Artificial Sequence
  Description of Artificial Sequence: Synthetic oligonucleotide
cacagugacuuuggaacaa

SEQ ID NO: 1822060 - RNA, 19 nt, Artificial Sequence
  Description of Artificial Sequence: Synthetic oligonucleotide
gaguggggugcuccucguc

SEQ ID NO: 1822061 - RNA, 19 nt, Artificial Sequence
  Description of Artificial Sequence: Synthetic oligonucleotide
caccuggccgucuacauuu

SEQ ID NO: 1822062 - RNA, 19 nt, Artificial Sequence
  Description of Artificial Sequence: Synthetic oligonucleotide
ccucguguggaaacaccug

SEQ ID NO: 1822063 - RNA, 19 nt, Artificial Sequence
  Description of Artificial Sequence: Synthetic oligonucleotide
guggaaacaccuggccguc

SEQ ID NO: 1822064 - RNA, 19 nt, Artificial Sequence
  Description of Artificial Sequence: Synthetic oligonucleotide
uccacugaacuggggcuuu

SEQ ID NO: 1822065 - RNA, 19 nt, Artificial Sequence
  Description of Artificial Sequence: Synthetic oligonucleotide
ugcagagacugggcuuggu

SEQ ID NO: 1822066 - RNA, 19 nt, Artificial Sequence
  Description of Artificial Sequence: Synthetic oligonucleotide
gguggagcugggaggcggg

SEQ ID NO: 1822067 - RNA, 19 nt, Artificial Sequence
  Description of Artificial Sequence: Synthetic oligonucleotide
cuguacggcacaggaucuc

SEQ ID NO: 1822068 - RNA, 19 nt, Artificial Sequence
  Description of Artificial Sequence: Synthetic oligonucleotide
gcugacuauugggagcuca

SEQ ID NO: 1822069 - RNA, 19 nt, Artificial Sequence
  Description of Artificial Sequence: Synthetic oligonucleotide
gagcggcagagguugggcu

SEQ ID NO: 1822070 - RNA, 19 nt, Artificial Sequence
  Description of Artificial Sequence: Synthetic oligonucleotide
ggucccacccaucauuccu

SEQ ID NO: 1822071 - RNA, 19 nt, Artificial Sequence
  Description of Artificial Sequence: Synthetic oligonucleotide
cagugacuuuggaacaagu

SEQ ID NO: 1822072 - RNA, 19 nt, Artificial Sequence
  Description of Artificial Sequence: Synthetic oligonucleotide
ugccccugugcugggcuga

SEQ ID NO: 1822073 - RNA, 19 nt, Artificial Sequence
  Description of Artificial Sequence: Synthetic oligonucleotide
cggugaagagcaguggagc

SEQ ID NO: 1822074 - RNA, 19 nt, Artificial Sequence
  Description of Artificial Sequence: Synthetic oligonucleotide
cccucgaauguagaccgag

SEQ ID NO: 1822075 - RNA, 19 nt, Artificial Sequence
  Description of Artificial Sequence: Synthetic oligonucleotide
ggaaacaccuggccgucua

SEQ ID NO: 1822076 - RNA, 19 nt, Artificial Sequence
  Description of Artificial Sequence: Synthetic oligonucleotide
caucugcacacugaagccu

SEQ ID NO: 1822077 - RNA, 19 nt, Artificial Sequence
  Description of Artificial Sequence: Synthetic oligonucleotide
auguagcagcagaggacgu

SEQ ID NO: 1822078 - RNA, 19 nt, Artificial Sequence
  Description of Artificial Sequence: Synthetic oligonucleotide
gagcucagaagcugagcuu

SEQ ID NO: 1822079 - RNA, 19 nt, Artificial Sequence
  Description of Artificial Sequence: Synthetic oligonucleotide
cugcagagacugggcuugg

SEQ ID NO: 1822080 - RNA, 19 nt, Artificial Sequence
  Description of Artificial Sequence: Synthetic oligonucleotide
cacacaccaucccgacuca

SEQ ID NO: 1822081 - RNA, 19 nt, Artificial Sequence
  Description of Artificial Sequence: Synthetic oligonucleotide
ggaucucuguggagacuag

SEQ ID NO: 1822082 - RNA, 19 nt, Artificial Sequence
  Description of Artificial Sequence: Synthetic oligonucleotide
gcucucgaggccacugcag

SEQ ID NO: 1822083 - RNA, 19 nt, Artificial Sequence
  Description of Artificial Sequence: Synthetic oligonucleotide
cuugcagguggagcuggga

SEQ ID NO: 1822084 - RNA, 19 nt, Artificial Sequence
  Description of Artificial Sequence: Synthetic oligonucleotide
uggagacuaggcggucaau

SEQ ID NO: 1822085 - RNA, 19 nt, Artificial Sequence
  Description of Artificial Sequence: Synthetic oligonucleotide
gcucucaucucaggcacuc

SEQ ID NO: 1822086 - RNA, 19 nt, Artificial Sequence
  Description of Artificial Sequence: Synthetic oligonucleotide
ccguucuacauucuggggu

SEQ ID NO: 1822087 - RNA, 19 nt, Artificial Sequence
  Description of Artificial Sequence: Synthetic oligonucleotide
accguugccuugggagugu

SEQ ID NO: 1822088 - RNA, 19 nt, Artificial Sequence
  Description of Artificial Sequence: Synthetic oligonucleotide
ccaucccaugccacacacc

SEQ ID NO: 1822089 - RNA, 19 nt, Artificial Sequence
  Description of Artificial Sequence: Synthetic oligonucleotide
aggcacucccucgaaugua

SEQ ID NO: 1822090 - RNA, 19 nt, Artificial Sequence
  Description of Artificial Sequence: Synthetic oligonucleotide
ggagccucguguggaaaca

SEQ ID NO: 1822091 - RNA, 19 nt, Artificial Sequence
  Description of Artificial Sequence: Synthetic oligonucleotide
uccgugggguguggccuug

SEQ ID NO: 1822092 - RNA, 19 nt, Artificial Sequence
  Description of Artificial Sequence: Synthetic oligonucleotide
cacuagcauguggcagagc

SEQ ID NO: 1822093 - RNA, 19 nt, Artificial Sequence
  Description of Artificial Sequence: Synthetic oligonucleotide
auguugcccaaaacauaua

SEQ ID NO: 1822094 - RNA, 19 nt, Artificial Sequence
  Description of Artificial Sequence: Synthetic oligonucleotide
cuggggcuuuuguucucca

SEQ ID NO: 1822095 - RNA, 19 nt, Artificial Sequence
  Description of Artificial Sequence: Synthetic oligonucleotide
gccuucaguggcauuuaca

SEQ ID NO: 1822096 - RNA, 19 nt, Artificial Sequence
  Description of Artificial Sequence: Synthetic oligonucleotide
gugcuccucgucagcugcc

SEQ ID NO: 1822097 - RNA, 19 nt, Artificial Sequence
  Description of Artificial Sequence: Synthetic oligonucleotide
gcggcagagguugggcucc

SEQ ID NO: 1822098 - RNA, 19 nt, Artificial Sequence
  Description of Artificial Sequence: Synthetic oligonucleotide
ccaggucauaguaggaacu

SEQ ID NO: 1822099 - RNA, 19 nt, Artificial Sequence
  Description of Artificial Sequence: Synthetic oligonucleotide
ggggugccaucccaugcca

SEQ ID NO: 1822100 - RNA, 19 nt, Artificial Sequence
  Description of Artificial Sequence: Synthetic oligonucleotide
gguggagccucguguggaa

SEQ ID NO: 1822101 - RNA, 19 nt, Artificial Sequence
  Description of Artificial Sequence: Synthetic oligonucleotide
caggaguggggugcuccuc

SEQ ID NO: 1822102 - RNA, 19 nt, Artificial Sequence
  Description of Artificial Sequence: Synthetic oligonucleotide
gagcuccgugggguguggc

SEQ ID NO: 1822103 - RNA, 19 nt, Artificial Sequence
  Description of Artificial Sequence: Synthetic oligonucleotide
cuacauucuggggugccau

SEQ ID NO: 1822104 - RNA, 19 nt, Artificial Sequence
  Description of Artificial Sequence: Synthetic oligonucleotide
gggcugacuauugggagcu

SEQ ID NO: 1822105 - RNA, 19 nt, Artificial Sequence
  Description of Artificial Sequence: Synthetic oligonucleotide
cugccggacuguguuggca

SEQ ID NO: 1822106 - RNA, 19 nt, Artificial Sequence
  Description of Artificial Sequence: Synthetic oligonucleotide
ggagacuaggcggucaauu

SEQ ID NO: 1822107 - RNA, 19 nt, Artificial Sequence
  Description of Artificial Sequence: Synthetic oligonucleotide
gcagcagaggacguuugua

SEQ ID NO: 1822108 - RNA, 19 nt, Artificial Sequence
  Description of Artificial Sequence: Synthetic oligonucleotide
cccgacucauuuccuccug

SEQ ID NO: 1822109 - RNA, 19 nt, Artificial Sequence
  Description of Artificial Sequence: Synthetic oligonucleotide
cucgucagcugcccuggcu

SEQ ID NO: 1822110 - RNA, 19 nt, Artificial Sequence
  Description of Artificial Sequence: Synthetic oligonucleotide
ccuggccgucuacauuuac

SEQ ID NO: 1822111 - RNA, 19 nt, Artificial Sequence
  Description of Artificial Sequence: Synthetic oligonucleotide
cuuuagccuucaguggcau

SEQ ID NO: 1822112 - RNA, 19 nt, Artificial Sequence
  Description of Artificial Sequence: Synthetic oligonucleotide
guggguuguccagcuccca

SEQ ID NO: 1822113 - RNA, 19 nt, Artificial Sequence
  Description of Artificial Sequence: Synthetic oligonucleotide
gccucguguggaaacaccu

SEQ ID NO: 1822114 - RNA, 19 nt, Artificial Sequence
  Description of Artificial Sequence: Synthetic oligonucleotide
ccguguccaggucauagua

SEQ ID NO: 1822115 - RNA, 19 nt, Artificial Sequence
  Description of Artificial Sequence: Synthetic oligonucleotide
guggagccucguguggaaa

SEQ ID NO: 1822116 - RNA, 19 nt, Artificial Sequence
  Description of Artificial Sequence: Synthetic oligonucleotide
guucaggaguggggugcuc

SEQ ID NO: 1822117 - RNA, 19 nt, Artificial Sequence
  Description of Artificial Sequence: Synthetic oligonucleotide
gguugggcuccacuagcau

SEQ ID NO: 1822118 - RNA, 19 nt, Artificial Sequence
  Description of Artificial Sequence: Synthetic oligonucleotide
gcuguacggcacaggaucu

SEQ ID NO: 1822119 - RNA, 19 nt, Artificial Sequence
  Description of Artificial Sequence: Synthetic oligonucleotide
cguugccuugggaguguag

SEQ ID NO: 1822120 - RNA, 19 nt, Artificial Sequence
  Description of Artificial Sequence: Synthetic oligonucleotide
gggugccaucccaugccac

SEQ ID NO: 1822121 - RNA, 19 nt, Artificial Sequence
  Description of Artificial Sequence: Synthetic oligonucleotide
caggggccuccucucaggu

SEQ ID NO: 1822122 - RNA, 19 nt, Artificial Sequence
  Description of Artificial Sequence: Synthetic oligonucleotide
ccgagguggagccucgugu

SEQ ID NO: 1822123 - RNA, 19 nt, Artificial Sequence
  Description of Artificial Sequence: Synthetic oligonucleotide
ccgucuacauuuacaccgu

SEQ ID NO: 1822124 - RNA, 19 nt, Artificial Sequence
  Description of Artificial Sequence: Synthetic oligonucleotide
guagaccgagguggagccu

SEQ ID NO: 1822125 - RNA, 19 nt, Artificial Sequence
  Description of Artificial Sequence: Synthetic oligonucleotide
gucagcugcccuggcugua

SEQ ID NO: 1822126 - RNA, 19 nt, Artificial Sequence
  Description of Artificial Sequence: Synthetic oligonucleotide
gcuccgugggguguggccu

SEQ ID NO: 1822127 - RNA, 19 nt, Artificial Sequence
  Description of Artificial Sequence: Synthetic oligonucleotide
gcacucccucgaauguaga

SEQ ID NO: 1822128 - RNA, 19 nt, Artificial Sequence
  Description of Artificial Sequence: Synthetic oligonucleotide
gcccuggcuguacggcaca

SEQ ID NO: 1822129 - RNA, 19 nt, Artificial Sequence
  Description of Artificial Sequence: Synthetic oligonucleotide
gggcuccuuugccccugug

SEQ ID NO: 1822130 - RNA, 19 nt, Artificial Sequence
  Description of Artificial Sequence: Synthetic oligonucleotide
caaagcucucgaggccacu

SEQ ID NO: 1822131 - RNA, 19 nt, Artificial Sequence
  Description of Artificial Sequence: Synthetic oligonucleotide
ccucgucagcugcccuggc

SEQ ID NO: 1822132 - RNA, 19 nt, Artificial Sequence
  Description of Artificial Sequence: Synthetic oligonucleotide
cggacuguguuggcaauaa

SEQ ID NO: 1822133 - RNA, 19 nt, Artificial Sequence
  Description of Artificial Sequence: Synthetic oligonucleotide
ggcagagguugggcuccac

SEQ ID NO: 1822134 - RNA, 19 nt, Artificial Sequence
  Description of Artificial Sequence: Synthetic oligonucleotide
gcggggcagcagcagcaaa

SEQ ID NO: 1822135 - RNA, 19 nt, Artificial Sequence
  Description of Artificial Sequence: Synthetic oligonucleotide
ggcugacuauugggagcuc

SEQ ID NO: 1822136 - RNA, 19 nt, Artificial Sequence
  Description of Artificial Sequence: Synthetic oligonucleotide
ccaucccgacucauuuccu

SEQ ID NO: 1822137 - RNA, 19 nt, Artificial Sequence
  Description of Artificial Sequence: Synthetic oligonucleotide
gcuccucgucagcugcccu

SEQ ID NO: 1822138 - RNA, 19 nt, Artificial Sequence
  Description of Artificial Sequence: Synthetic oligonucleotide
ggacugagcggcagagguu

SEQ ID NO: 1822139 - RNA, 19 nt, Artificial Sequence
  Description of Artificial Sequence: Synthetic oligonucleotide
cccgguuuucuuguggguu

SEQ ID NO: 1822140 - RNA, 19 nt, Artificial Sequence
  Description of Artificial Sequence: Synthetic oligonucleotide
ggcucucaucucaggcacu

SEQ ID NO: 1822141 - RNA, 19 nt, Artificial Sequence
  Description of Artificial Sequence: Synthetic oligonucleotide
gccggacuguguuggcaau

SEQ ID NO: 1822142 - RNA, 19 nt, Artificial Sequence
  Description of Artificial Sequence: Synthetic oligonucleotide
gcggucaauuggugcccgu

SEQ ID NO: 1822143 - RNA, 19 nt, Artificial Sequence
  Description of Artificial Sequence: Synthetic oligonucleotide
ccggacuguguuggcaaua

SEQ ID NO: 1822144 - RNA, 19 nt, Artificial Sequence
  Description of Artificial Sequence: Synthetic oligonucleotide
cgucagcugcccuggcugu

SEQ ID NO: 1822145 - RNA, 19 nt, Artificial Sequence
  Description of Artificial Sequence: Synthetic oligonucleotide
gcccaccauccuccacagu

SEQ ID NO: 1822146 - RNA, 19 nt, Artificial Sequence
  Description of Artificial Sequence: Synthetic oligonucleotide
ccguugccuugggagugua

SEQ ID NO: 1822147 - RNA, 19 nt, Artificial Sequence
  Description of Artificial Sequence: Synthetic oligonucleotide
cccacccaucauuccuguu

SEQ ID NO: 1822148 - RNA, 19 nt, Artificial Sequence
  Description of Artificial Sequence: Synthetic oligonucleotide
ccacugaacuggggcuuuu

SEQ ID NO: 1822149 - RNA, 19 nt, Artificial Sequence
  Description of Artificial Sequence: Synthetic oligonucleotide
ccgugggguguggccuugu

SEQ ID NO: 1822150 - RNA, 19 nt, Artificial Sequence
  Description of Artificial Sequence: Synthetic oligonucleotide
aaauauuacauucagaguu

SEQ ID NO: 1822151 - RNA, 19 nt, Artificial Sequence
  Description of Artificial Sequence: Synthetic oligonucleotide
aggacuuccaucuugaccc

SEQ ID NO: 1822152 - RNA, 19 nt, Artificial Sequence
  Description of Artificial Sequence: Synthetic oligonucleotide
acuaaagcaagcaagaugc

SEQ ID NO: 1822153 - RNA, 19 nt, Artificial Sequence
  Description of Artificial Sequence: Synthetic oligonucleotide
acuacuuccacucuaauuc

SEQ ID NO: 1822154 - RNA, 19 nt, Artificial Sequence
  Description of Artificial Sequence: Synthetic oligonucleotide
uaaaguagaaaucaccagc

SEQ ID NO: 1822155 - RNA, 19 nt, Artificial Sequence
  Description of Artificial Sequence: Synthetic oligonucleotide
ugaauucuaauuaagaaau

SEQ ID NO: 1822156 - RNA, 19 nt, Artificial Sequence
  Description of Artificial Sequence: Synthetic oligonucleotide
aaaguagaaaucaccagcc

SEQ ID NO: 1822157 - RNA, 19 nt, Artificial Sequence
  Description of Artificial Sequence: Synthetic oligonucleotide
uaaaagaggagacaggcca

SEQ ID NO: 1822158 - RNA, 19 nt, Artificial Sequence
  Description of Artificial Sequence: Synthetic oligonucleotide
auuacauucagaguuauag

SEQ ID NO: 1822159 - RNA, 19 nt, Artificial Sequence
  Description of Artificial Sequence: Synthetic oligonucleotide
auaguggugauuuucagag

SEQ ID NO: 1822160 - RNA, 19 nt, Artificial Sequence
  Description of Artificial Sequence: Synthetic oligonucleotide
aauaaaguagaaaucacca

SEQ ID NO: 1822161 - RNA, 19 nt, Artificial Sequence
  Description of Artificial Sequence: Synthetic oligonucleotide
aguggugauuuucagagac

SEQ ID NO: 1822162 - RNA, 19 nt, Artificial Sequence
  Description of Artificial Sequence: Synthetic oligonucleotide
uucuacuaaagcaagcaag

SEQ ID NO: 1822163 - RNA, 19 nt, Artificial Sequence
  Description of Artificial Sequence: Synthetic oligonucleotide
uguauucuuaaauaaguga

SEQ ID NO: 1822164 - RNA, 19 nt, Artificial Sequence
  Description of Artificial Sequence: Synthetic oligonucleotide
aauaagugacuacuuccac

SEQ ID NO: 1822165 - RNA, 19 nt, Artificial Sequence
  Description of Artificial Sequence: Synthetic oligonucleotide
cacagauuaacuacaaggg

SEQ ID NO: 1822166 - RNA, 19 nt, Artificial Sequence
  Description of Artificial Sequence: Synthetic oligonucleotide
ucuaugaauucuaauuaag

SEQ ID NO: 1822167 - RNA, 19 nt, Artificial Sequence
  Description of Artificial Sequence: Synthetic oligonucleotide
cuuacauuccaacacauac

SEQ ID NO: 1822168 - RNA, 19 nt, Artificial Sequence
  Description of Artificial Sequence: Synthetic oligonucleotide
gaaaucaccagccacacuc

SEQ ID NO: 1822169 - RNA, 19 nt, Artificial Sequence
  Description of Artificial Sequence: Synthetic oligonucleotide
aauguauucuuaaauaagu

SEQ ID NO: 1822170 - RNA, 19 nt, Artificial Sequence
  Description of Artificial Sequence: Synthetic oligonucleotide
ucuacuaaagcaagcaaga

SEQ ID NO: 1822171 - RNA, 19 nt, Artificial Sequence
  Description of Artificial Sequence: Synthetic oligonucleotide
agaguuauagcacgcauag

SEQ ID NO: 1822172 - RNA, 19 nt, Artificial Sequence
  Description of Artificial Sequence: Synthetic oligonucleotide
uugcauuugguuaaaauaa

SEQ ID NO: 1822173 - RNA, 19 nt, Artificial Sequence
  Description of Artificial Sequence: Synthetic oligonucleotide
guucauuuggaucagcugc

SEQ ID NO: 1822174 - RNA, 19 nt, Artificial Sequence
  Description of Artificial Sequence: Synthetic oligonucleotide
ucuguuacaggcuagcgac

SEQ ID NO: 1822175 - RNA, 19 nt, Artificial Sequence
  Description of Artificial Sequence: Synthetic oligonucleotide
acagauuaacuacaagggg

SEQ ID NO: 1822176 - RNA, 19 nt, Artificial Sequence
  Description of Artificial Sequence: Synthetic oligonucleotide
uacuaaagcaagcaagaug

SEQ ID NO: 1822177 - RNA, 19 nt, Artificial Sequence
  Description of Artificial Sequence: Synthetic oligonucleotide
aacucuuucucgucaucgc

SEQ ID NO: 1822178 - RNA, 19 nt, Artificial Sequence
  Description of Artificial Sequence: Synthetic oligonucleotide
uguaacagcuucuuggcca

SEQ ID NO: 1822179 - RNA, 19 nt, Artificial Sequence
  Description of Artificial Sequence: Synthetic oligonucleotide
augaauucuaauuaagaaa

SEQ ID NO: 1822180 - RNA, 19 nt, Artificial Sequence
  Description of Artificial Sequence: Synthetic oligonucleotide
uauucuuaaauaagugacu

SEQ ID NO: 1822181 - RNA, 19 nt, Artificial Sequence
  Description of Artificial Sequence: Synthetic oligonucleotide
uaaagcaccuuccugagau

SEQ ID NO: 1822182 - RNA, 19 nt, Artificial Sequence
  Description of Artificial Sequence: Synthetic oligonucleotide
uuucuuacauuccaacaca

SEQ ID NO: 1822183 - RNA, 19 nt, Artificial Sequence
  Description of Artificial Sequence: Synthetic oligonucleotide
uccacucuaauucuccuag

SEQ ID NO: 1822184 - RNA, 19 nt, Artificial Sequence
  Description of Artificial Sequence: Synthetic oligonucleotide
aaccccaagucuuagggug

SEQ ID NO: 1822185 - RNA, 19 nt, Artificial Sequence
  Description of Artificial Sequence: Synthetic oligonucleotide
cuucuuggccacuugaggg

SEQ ID NO: 1822186 - RNA, 19 nt, Artificial Sequence
  Description of Artificial Sequence: Synthetic oligonucleotide
auuuggaucagcugcagcu

SEQ ID NO: 1822187 - RNA, 19 nt, Artificial Sequence
  Description of Artificial Sequence: Synthetic oligonucleotide
uucagagacuguaacagcu

SEQ ID NO: 1822188 - RNA, 19 nt, Artificial Sequence
  Description of Artificial Sequence: Synthetic oligonucleotide
aaagcaagcaagaugcucu

SEQ ID NO: 1822189 - RNA, 19 nt, Artificial Sequence
  Description of Artificial Sequence: Synthetic oligonucleotide
aacacgaagguucggguug

SEQ ID NO: 1822190 - RNA, 19 nt, Artificial Sequence
  Description of Artificial Sequence: Synthetic oligonucleotide
uuggaggucuguuacaggc

SEQ ID NO: 1822191 - RNA, 19 nt, Artificial Sequence
  Description of Artificial Sequence: Synthetic oligonucleotide
guacuuuucuacuaaagca

SEQ ID NO: 1822192 - RNA, 19 nt, Artificial Sequence
  Description of Artificial Sequence: Synthetic oligonucleotide
agaguuguacucgugggcc

SEQ ID NO: 1822193 - RNA, 19 nt, Artificial Sequence
  Description of Artificial Sequence: Synthetic oligonucleotide
uauuuggccgguuuaauaa

SEQ ID NO: 1822194 - RNA, 19 nt, Artificial Sequence
  Description of Artificial Sequence: Synthetic oligonucleotide
aauuucguuguuuugcauu

SEQ ID NO: 1822195 - RNA, 19 nt, Artificial Sequence
  Description of Artificial Sequence: Synthetic oligonucleotide
uugauguucucccagcacu

SEQ ID NO: 1822196 - RNA, 19 nt, Artificial Sequence
  Description of Artificial Sequence: Synthetic oligonucleotide
uaagugacuacuuccacuc

SEQ ID NO: 1822197 - RNA, 19 nt, Artificial Sequence
  Description of Artificial Sequence: Synthetic oligonucleotide
gaaagggccgguuaaaaga

SEQ ID NO: 1822198 - RNA, 19 nt, Artificial Sequence
  Description of Artificial Sequence: Synthetic oligonucleotide
ucuaucugcuggauuuugg

SEQ ID NO: 1822199 - RNA, 19 nt, Artificial Sequence
  Description of Artificial Sequence: Synthetic oligonucleotide
aacacagauuaacuacaag

SEQ ID NO: 1822200 - RNA, 19 nt, Artificial Sequence
  Description of Artificial Sequence: Synthetic oligonucleotide
acauacuggaaaauggacg

SEQ ID NO: 1822201 - RNA, 19 nt, Artificial Sequence
  Description of Artificial Sequence: Synthetic oligonucleotide
aaauaagugacuacuucca

SEQ ID NO: 1822202 - RNA, 19 nt, Artificial Sequence
  Description of Artificial Sequence: Synthetic oligonucleotide
uuacauucagaguuauagc

SEQ ID NO: 1822203 - RNA, 19 nt, Artificial Sequence
  Description of Artificial Sequence: Synthetic oligonucleotide
ucacauacuggaaaaugga

SEQ ID NO: 1822204 - RNA, 19 nt, Artificial Sequence
  Description of Artificial Sequence: Synthetic oligonucleotide
aaaggauucuuggacagcu

SEQ ID NO: 1822205 - RNA, 19 nt, Artificial Sequence
  Description of Artificial Sequence: Synthetic oligonucleotide
accucguucauuuggauca

SEQ ID NO: 1822206 - RNA, 19 nt, Artificial Sequence
  Description of Artificial Sequence: Synthetic oligonucleotide
ugacggcugaacacgaagg

SEQ ID NO: 1822207 - RNA, 19 nt, Artificial Sequence
  Description of Artificial Sequence: Synthetic oligonucleotide
uggaaaauggacgaacucu

SEQ ID NO: 1822208 - RNA, 19 nt, Artificial Sequence
  Description of Artificial Sequence: Synthetic oligonucleotide
gaagguucggguugugagg

SEQ ID NO: 1822209 - RNA, 19 nt, Artificial Sequence
  Description of Artificial Sequence: Synthetic oligonucleotide
cacuccuuuaucaucacac

SEQ ID NO: 1822210 - RNA, 19 nt, Artificial Sequence
  Description of Artificial Sequence: Synthetic oligonucleotide
auaauuucguuguuuugca

SEQ ID NO: 1822211 - RNA, 19 nt, Artificial Sequence
  Description of Artificial Sequence: Synthetic oligonucleotide
uucuaugaauucuaauuaa

SEQ ID NO: 1822212 - RNA, 19 nt, Artificial Sequence
  Description of Artificial Sequence: Synthetic oligonucleotide
guuauagcacgcauagugg

SEQ ID NO: 1822213 - RNA, 19 nt, Artificial Sequence
  Description of Artificial Sequence: Synthetic oligonucleotide
cugagaaguauuuggccgg

SEQ ID NO: 1822214 - RNA, 19 nt, Artificial Sequence
  Description of Artificial Sequence: Synthetic oligonucleotide
guuguuuugcauuuuccac

SEQ ID NO: 1822215 - RNA, 19 nt, Artificial Sequence
  Description of Artificial Sequence: Synthetic oligonucleotide
uuauagcacgcauaguggu

SEQ ID NO: 1822216 - RNA, 19 nt, Artificial Sequence
  Description of Artificial Sequence: Synthetic oligonucleotide
cuaugaauucuaauuaaga

SEQ ID NO: 1822217 - RNA, 19 nt, Artificial Sequence
  Description of Artificial Sequence: Synthetic oligonucleotide
uccugagauguuuugcucc

SEQ ID NO: 1822218 - RNA, 19 nt, Artificial Sequence
  Description of Artificial Sequence: Synthetic oligonucleotide
uguuacaggcuagcgaccg

SEQ ID NO: 1822219 - RNA, 19 nt, Artificial Sequence
  Description of Artificial Sequence: Synthetic oligonucleotide
uuuaauaauuucguuguuu

SEQ ID NO: 1822220 - RNA, 19 nt, Artificial Sequence
  Description of Artificial Sequence: Synthetic oligonucleotide
aaaucaccagccacacucc

SEQ ID NO: 1822221 - RNA, 19 nt, Artificial Sequence
  Description of Artificial Sequence: Synthetic oligonucleotide
ucaucacacuugcauuugg

SEQ ID NO: 1822222 - RNA, 19 nt, Artificial Sequence
  Description of Artificial Sequence: Synthetic oligonucleotide
cugagaguuguacucgugg

SEQ ID NO: 1822223 - RNA, 19 nt, Artificial Sequence
  Description of Artificial Sequence: Synthetic oligonucleotide
aguucucuauuugaaacag

SEQ ID NO: 1822224 - RNA, 19 nt, Artificial Sequence
  Description of Artificial Sequence: Synthetic oligonucleotide
uauagcacgcauaguggug

SEQ ID NO: 1822225 - RNA, 19 nt, Artificial Sequence
  Description of Artificial Sequence: Synthetic oligonucleotide
gugagguucccucacauac

SEQ ID NO: 1822226 - RNA, 19 nt, Artificial Sequence
  Description of Artificial Sequence: Synthetic oligonucleotide
ucacacaugguucuucuau

SEQ ID NO: 1822227 - RNA, 19 nt, Artificial Sequence
  Description of Artificial Sequence: Synthetic oligonucleotide
cuaucugcuggauuuuggc

SEQ ID NO: 1822228 - RNA, 19 nt, Artificial Sequence
  Description of Artificial Sequence: Synthetic oligonucleotide
uugaaacaggaaaggauuc

SEQ ID NO: 1822229 - RNA, 19 nt, Artificial Sequence
  Description of Artificial Sequence: Synthetic oligonucleotide
cuaguuggaggucuguuac

SEQ ID NO: 1822230 - RNA, 19 nt, Artificial Sequence
  Description of Artificial Sequence: Synthetic oligonucleotide
caggaaaggauucuuggac

SEQ ID NO: 1822231 - RNA, 19 nt, Artificial Sequence
  Description of Artificial Sequence: Synthetic oligonucleotide
cuugccaacacagauuaac

SEQ ID NO: 1822232 - RNA, 19 nt, Artificial Sequence
  Description of Artificial Sequence: Synthetic oligonucleotide
cuugguaaaaguuugcagu

SEQ ID NO: 1822233 - RNA, 19 nt, Artificial Sequence
  Description of Artificial Sequence: Synthetic oligonucleotide
aaguagaaaucaccagcca

SEQ ID NO: 1822234 - RNA, 19 nt, Artificial Sequence
  Description of Artificial Sequence: Synthetic oligonucleotide
ugcauuugguuaaaauaaa

SEQ ID NO: 1822235 - RNA, 19 nt, Artificial Sequence
  Description of Artificial Sequence: Synthetic oligonucleotide
uuaucaucacacuugcauu

SEQ ID NO: 1822236 - RNA, 19 nt, Artificial Sequence
  Description of Artificial Sequence: Synthetic oligonucleotide
aauauuacauucagaguua

SEQ ID NO: 1822237 - RNA, 19 nt, Artificial Sequence
  Description of Artificial Sequence: Synthetic oligonucleotide
ucacacuugcauuugguua

SEQ ID NO: 1822238 - RNA, 19 nt, Artificial Sequence
  Description of Artificial Sequence: Synthetic oligonucleotide
ucguuguuuugcauuuucc

SEQ ID NO: 1822239 - RNA, 19 nt, Artificial Sequence
  Description of Artificial Sequence: Synthetic oligonucleotide
uuacucugacggcugaaca

SEQ ID NO: 1822240 - RNA, 19 nt, Artificial Sequence
  Description of Artificial Sequence: Synthetic oligonucleotide
ucguucauuuggaucagcu

SEQ ID NO: 1822241 - RNA, 19 nt, Artificial Sequence
  Description of Artificial Sequence: Synthetic oligonucleotide
auuuuggccacgugcaccu

SEQ ID NO: 1822242 - RNA, 19 nt, Artificial Sequence
  Description of Artificial Sequence: Synthetic oligonucleotide
uuuuguugaggacuuccau

SEQ ID NO: 1822243 - RNA, 19 nt, Artificial Sequence
  Description of Artificial Sequence: Synthetic oligonucleotide
uuugcauuuuccacucuau

SEQ ID NO: 1822244 - RNA, 19 nt, Artificial Sequence
  Description of Artificial Sequence: Synthetic oligonucleotide
uggacgaacucuuucucgu

SEQ ID NO: 1822245 - RNA, 19 nt, Artificial Sequence
  Description of Artificial Sequence: Synthetic oligonucleotide
ucagaguuauagcacgcau

SEQ ID NO: 1822246 - RNA, 19 nt, Artificial Sequence
  Description of Artificial Sequence: Synthetic oligonucleotide
gagguucccucacauacug

SEQ ID NO: 1822247 - RNA, 19 nt, Artificial Sequence
  Description of Artificial Sequence: Synthetic oligonucleotide
ugcuugagggcaauaguuc

SEQ ID NO: 1822248 - RNA, 19 nt, Artificial Sequence
  Description of Artificial Sequence: Synthetic oligonucleotide
auuucguuguuuugcauuu

SEQ ID NO: 1822249 - RNA, 19 nt, Artificial Sequence
  Description of Artificial Sequence: Synthetic oligonucleotide
auucagaguuauagcacgc

SEQ ID NO: 1822250 - RNA, 19 nt, Artificial Sequence
  Description of Artificial Sequence: Synthetic oligonucleotide
guacucgugggccagugcc

SEQ ID NO: 1822251 - RNA, 19 nt, Artificial Sequence
  Description of Artificial Sequence: Synthetic oligonucleotide
acucugacggcugaacacg

SEQ ID NO: 1822252 - RNA, 19 nt, Artificial Sequence
  Description of Artificial Sequence: Synthetic oligonucleotide
aguuggaggucuguuacag

SEQ ID NO: 1822253 - RNA, 19 nt, Artificial Sequence
  Description of Artificial Sequence: Synthetic oligonucleotide
acuuguacuuuucuacuaa

SEQ ID NO: 1822254 - RNA, 19 nt, Artificial Sequence
  Description of Artificial Sequence: Synthetic oligonucleotide
uucguuguuuugcauuuuc

SEQ ID NO: 1822255 - RNA, 19 nt, Artificial Sequence
  Description of Artificial Sequence: Synthetic oligonucleotide
uccggcagcgauauugcug

SEQ ID NO: 1822256 - RNA, 19 nt, Artificial Sequence
  Description of Artificial Sequence: Synthetic oligonucleotide
augguucuucuaugaauuc

SEQ ID NO: 1822257 - RNA, 19 nt, Artificial Sequence
  Description of Artificial Sequence: Synthetic oligonucleotide
cugaacacgaagguucggg

SEQ ID NO: 1822258 - RNA, 19 nt, Artificial Sequence
  Description of Artificial Sequence: Synthetic oligonucleotide
uucuuacauuccaacacau

SEQ ID NO: 1822259 - RNA, 19 nt, Artificial Sequence
  Description of Artificial Sequence: Synthetic oligonucleotide
ggaaaggauucuuggacag

SEQ ID NO: 1822260 - RNA, 19 nt, Artificial Sequence
  Description of Artificial Sequence: Synthetic oligonucleotide
uuacucagaagugggcucc

SEQ ID NO: 1822261 - RNA, 19 nt, Artificial Sequence
  Description of Artificial Sequence: Synthetic oligonucleotide
ugcuccggcagcgauauug

SEQ ID NO: 1822262 - RNA, 19 nt, Artificial Sequence
  Description of Artificial Sequence: Synthetic oligonucleotide
ugaacacgaagguucgggu

SEQ ID NO: 1822263 - RNA, 19 nt, Artificial Sequence
  Description of Artificial Sequence: Synthetic oligonucleotide
guagaaaucaccagccaca

SEQ ID NO: 1822264 - RNA, 19 nt, Artificial Sequence
  Description of Artificial Sequence: Synthetic oligonucleotide
ucgugcaucgcuuuucuua

SEQ ID NO: 1822265 - RNA, 19 nt, Artificial Sequence
  Description of Artificial Sequence: Synthetic oligonucleotide
gcuugagggcaauaguucg

SEQ ID NO: 1822266 - RNA, 19 nt, Artificial Sequence
  Description of Artificial Sequence: Synthetic oligonucleotide
ugaaaucccgcagcgacac

SEQ ID NO: 1822267 - RNA, 19 nt, Artificial Sequence
  Description of Artificial Sequence: Synthetic oligonucleotide
acacucccgcucuaucugc

SEQ ID NO: 1822268 - RNA, 19 nt, Artificial Sequence
  Description of Artificial Sequence: Synthetic oligonucleotide
aauaguucgugcaucgcuu

SEQ ID NO: 1822269 - RNA, 19 nt, Artificial Sequence
  Description of Artificial Sequence: Synthetic oligonucleotide
ugguuacucagaagugggc

SEQ ID NO: 1822270 - RNA, 19 nt, Artificial Sequence
  Description of Artificial Sequence: Synthetic oligonucleotide
cuaauucuccuaguuggag

SEQ ID NO: 1822271 - RNA, 19 nt, Artificial Sequence
  Description of Artificial Sequence: Synthetic oligonucleotide
acacaugguucuucuauga

SEQ ID NO: 1822272 - RNA, 19 nt, Artificial Sequence
  Description of Artificial Sequence: Synthetic oligonucleotide
uccuugguaaaaguuugca

SEQ ID NO: 1822273 - RNA, 19 nt, Artificial Sequence
  Description of Artificial Sequence: Synthetic oligonucleotide
uugagggguacauggggug

SEQ ID NO: 1822274 - RNA, 19 nt, Artificial Sequence
  Description of Artificial Sequence: Synthetic oligonucleotide
ucuuagggugaguugggaa

SEQ ID NO: 1822275 - RNA, 19 nt, Artificial Sequence
  Description of Artificial Sequence: Synthetic oligonucleotide
uauucggggcuccuccuca

SEQ ID NO: 1822276 - RNA, 19 nt, Artificial Sequence
  Description of Artificial Sequence: Synthetic oligonucleotide
ucuuucccaguacaucuuc

SEQ ID NO: 1822277 - RNA, 19 nt, Artificial Sequence
  Description of Artificial Sequence: Synthetic oligonucleotide
gagggcaauaguucgugca

SEQ ID NO: 1822278 - RNA, 19 nt, Artificial Sequence
  Description of Artificial Sequence: Synthetic oligonucleotide
uuacaggcuagcgaccgcc

SEQ ID NO: 1822279 - RNA, 19 nt, Artificial Sequence
  Description of Artificial Sequence: Synthetic oligonucleotide
cauccugguggguauucgg

SEQ ID NO: 1822280 - RNA, 19 nt, Artificial Sequence
  Description of Artificial Sequence: Synthetic oligonucleotide
agaaguauuuggccgguuu

SEQ ID NO: 1822281 - RNA, 19 nt, Artificial Sequence
  Description of Artificial Sequence: Synthetic oligonucleotide
gaccgccaaggucacaucc

SEQ ID NO: 1822282 - RNA, 19 nt, Artificial Sequence
  Description of Artificial Sequence: Synthetic oligonucleotide
ucccgcagcgacacgcugg

SEQ ID NO: 1822283 - RNA, 19 nt, Artificial Sequence
  Description of Artificial Sequence: Synthetic oligonucleotide
ugagguucccucacauacu

SEQ ID NO: 1822284 - RNA, 19 nt, Artificial Sequence
  Description of Artificial Sequence: Synthetic oligonucleotide
aggucuguuacaggcuagc

SEQ ID NO: 1822285 - RNA, 19 nt, Artificial Sequence
  Description of Artificial Sequence: Synthetic oligonucleotide
cauaguggugauuuucaga

SEQ ID NO: 1822286 - RNA, 19 nt, Artificial Sequence
  Description of Artificial Sequence: Synthetic oligonucleotide
cuuagggugaguugggaaa

SEQ ID NO: 1822287 - RNA, 19 nt, Artificial Sequence
  Description of Artificial Sequence: Synthetic oligonucleotide
gacgaacucuuucucguca

SEQ ID NO: 1822288 - RNA, 19 nt, Artificial Sequence
  Description of Artificial Sequence: Synthetic oligonucleotide
aaguauuuggccgguuuaa

SEQ ID NO: 1822289 - RNA, 19 nt, Artificial Sequence
  Description of Artificial Sequence: Synthetic oligonucleotide
uagaaaucaccagccacac

SEQ ID NO: 1822290 - RNA, 19 nt, Artificial Sequence
  Description of Artificial Sequence: Synthetic oligonucleotide
guuggcuguuacucugacg

SEQ ID NO: 1822291 - RNA, 19 nt, Artificial Sequence
  Description of Artificial Sequence: Synthetic oligonucleotide
uucucgucaucgcacaguu

SEQ ID NO: 1822292 - RNA, 19 nt, Artificial Sequence
  Description of Artificial Sequence: Synthetic oligonucleotide
ugccaacacagauuaacua

SEQ ID NO: 1822293 - RNA, 19 nt, Artificial Sequence
  Description of Artificial Sequence: Synthetic oligonucleotide
uucagaguuauagcacgca

SEQ ID NO: 1822294 - RNA, 19 nt, Artificial Sequence
  Description of Artificial Sequence: Synthetic oligonucleotide
ucgcacaguucucuauuug

SEQ ID NO: 1822295 - RNA, 19 nt, Artificial Sequence
  Description of Artificial Sequence: Synthetic oligonucleotide
guuacucagaagugggcuc

SEQ ID NO: 1822296 - RNA, 19 nt, Artificial Sequence
  Description of Artificial Sequence: Synthetic oligonucleotide
uuuggccgguuuaauaauu

SEQ ID NO: 1822297 - RNA, 19 nt, Artificial Sequence
  Description of Artificial Sequence: Synthetic oligonucleotide
aguucgugcaucgcuuuuc

SEQ ID NO: 1822298 - RNA, 19 nt, Artificial Sequence
  Description of Artificial Sequence: Synthetic oligonucleotide
cugacggcugaacacgaag

SEQ ID NO: 1822299 - RNA, 19 nt, Artificial Sequence
  Description of Artificial Sequence: Synthetic oligonucleotide
gguuaaaagaggagacagg

SEQ ID NO: 1822300 - RNA, 19 nt, Artificial Sequence
  Description of Artificial Sequence: Synthetic oligonucleotide
auagcacgcauagugguga

SEQ ID NO: 1822301 - RNA, 19 nt, Artificial Sequence
  Description of Artificial Sequence: Synthetic oligonucleotide
ucucaugggccauaauuuu

SEQ ID NO: 1822302 - RNA, 19 nt, Artificial Sequence
  Description of Artificial Sequence: Synthetic oligonucleotide
agcgauauugcugaucuuu

SEQ ID NO: 1822303 - RNA, 19 nt, Artificial Sequence
  Description of Artificial Sequence: Synthetic oligonucleotide
gugaguugggaaagggccg

SEQ ID NO: 1822304 - RNA, 19 nt, Artificial Sequence
  Description of Artificial Sequence: Synthetic oligonucleotide
cacuugagggguacauggg

SEQ ID NO: 1822305 - RNA, 19 nt, Artificial Sequence
  Description of Artificial Sequence: Synthetic oligonucleotide
acgcauaguggugauuuuc

SEQ ID NO: 1822306 - RNA, 19 nt, Artificial Sequence
  Description of Artificial Sequence: Synthetic oligonucleotide
ggaaagggccgguuaaaag

SEQ ID NO: 1822307 - RNA, 19 nt, Artificial Sequence
  Description of Artificial Sequence: Synthetic oligonucleotide
cacacuugcauuugguuaa

SEQ ID NO: 1822308 - RNA, 19 nt, Artificial Sequence
  Description of Artificial Sequence: Synthetic oligonucleotide
agugacuacuuccacucua

SEQ ID NO: 1822309 - RNA, 19 nt, Artificial Sequence
  Description of Artificial Sequence: Synthetic oligonucleotide
ggccgguuuaauaauuucg

SEQ ID NO: 1822310 - RNA, 19 nt, Artificial Sequence
  Description of Artificial Sequence: Synthetic oligonucleotide
uucuccuaguuggaggucu

SEQ ID NO: 1822311 - RNA, 19 nt, Artificial Sequence
  Description of Artificial Sequence: Synthetic oligonucleotide
cauuuggaucagcugcagc

SEQ ID NO: 1822312 - RNA, 19 nt, Artificial Sequence
  Description of Artificial Sequence: Synthetic oligonucleotide
caggugcgcugcuugaggg

SEQ ID NO: 1822313 - RNA, 19 nt, Artificial Sequence
  Description of Artificial Sequence: Synthetic oligonucleotide
ccaaccccaagucuuaggg

SEQ ID NO: 1822314 - RNA, 19 nt, Artificial Sequence
  Description of Artificial Sequence: Synthetic oligonucleotide
aagugacuacuuccacucu

SEQ ID NO: 1822315 - RNA, 19 nt, Artificial Sequence
  Description of Artificial Sequence: Synthetic oligonucleotide
aggugcgcugcuugagggc

SEQ ID NO: 1822316 - RNA, 19 nt, Artificial Sequence
  Description of Artificial Sequence: Synthetic oligonucleotide
auggacauuugcugguggu

SEQ ID NO: 1822317 - RNA, 19 nt, Artificial Sequence
  Description of Artificial Sequence: Synthetic oligonucleotide
ugcugaucuuuuccuugcc

SEQ ID NO: 1822318 - RNA, 19 nt, Artificial Sequence
  Description of Artificial Sequence: Synthetic oligonucleotide
gaaaggauucuuggacagc

SEQ ID NO: 1822319 - RNA, 19 nt, Artificial Sequence
  Description of Artificial Sequence: Synthetic oligonucleotide
ucuuccucgugcaucuuuu

SEQ ID NO: 1822320 - RNA, 19 nt, Artificial Sequence
  Description of Artificial Sequence: Synthetic oligonucleotide
uugugagguucccucacau

SEQ ID NO: 1822321 - RNA, 19 nt, Artificial Sequence
  Description of Artificial Sequence: Synthetic oligonucleotide
auuuggccgguuuaauaau

SEQ ID NO: 1822322 - RNA, 19 nt, Artificial Sequence
  Description of Artificial Sequence: Synthetic oligonucleotide
aucacacuugcauuugguu

SEQ ID NO: 1822323 - RNA, 19 nt, Artificial Sequence
  Description of Artificial Sequence: Synthetic oligonucleotide
uucccugaauguauucuua

SEQ ID NO: 1822324 - RNA, 19 nt, Artificial Sequence
  Description of Artificial Sequence: Synthetic oligonucleotide
uaauuucguuguuuugcau

SEQ ID NO: 1822325 - RNA, 19 nt, Artificial Sequence
  Description of Artificial Sequence: Synthetic oligonucleotide
uggaggucuguuacaggcu

SEQ ID NO: 1822326 - RNA, 19 nt, Artificial Sequence
  Description of Artificial Sequence: Synthetic oligonucleotide
uguuucccugaauguauuc

SEQ ID NO: 1822327 - RNA, 19 nt, Artificial Sequence
  Description of Artificial Sequence: Synthetic oligonucleotide
gucuguuacaggcuagcga

SEQ ID NO: 1822328 - RNA, 19 nt, Artificial Sequence
  Description of Artificial Sequence: Synthetic oligonucleotide
ugagggcaauaguucgugc

SEQ ID NO: 1822329 - RNA, 19 nt, Artificial Sequence
  Description of Artificial Sequence: Synthetic oligonucleotide
ggaaguacagcugcuccgg

SEQ ID NO: 1822330 - RNA, 19 nt, Artificial Sequence
  Description of Artificial Sequence: Synthetic oligonucleotide
agacuguaacagcuucuug

SEQ ID NO: 1822331 - RNA, 19 nt, Artificial Sequence
  Description of Artificial Sequence: Synthetic oligonucleotide
gaagugggcucccgcugcg

SEQ ID NO: 1822332 - RNA, 19 nt, Artificial Sequence
  Description of Artificial Sequence: Synthetic oligonucleotide
uacuuccacucuaauucuc

SEQ ID NO: 1822333 - RNA, 19 nt, Artificial Sequence
  Description of Artificial Sequence: Synthetic oligonucleotide
cucgucaucgcacaguucu

SEQ ID NO: 1822334 - RNA, 19 nt, Artificial Sequence
  Description of Artificial Sequence: Synthetic oligonucleotide
agggcaauaguucgugcau

SEQ ID NO: 1822335 - RNA, 19 nt, Artificial Sequence
  Description of Artificial Sequence: Synthetic oligonucleotide
aggcuagcgaccgccaagg

SEQ ID NO: 1822336 - RNA, 19 nt, Artificial Sequence
  Description of Artificial Sequence: Synthetic oligonucleotide
uuggccgguuuaauaauuu

SEQ ID NO: 1822337 - RNA, 19 nt, Artificial Sequence
  Description of Artificial Sequence: Synthetic oligonucleotide
uuucucgucaucgcacagu

SEQ ID NO: 1822338 - RNA, 19 nt, Artificial Sequence
  Description of Artificial Sequence: Synthetic oligonucleotide
ucuccuaguuggaggucug

SEQ ID NO: 1822339 - RNA, 19 nt, Artificial Sequence
  Description of Artificial Sequence: Synthetic oligonucleotide
cucagaagugggcucccgc

SEQ ID NO: 1822340 - RNA, 19 nt, Artificial Sequence
  Description of Artificial Sequence: Synthetic oligonucleotide
aagcaagcaagaugcucuu

SEQ ID NO: 1822341 - RNA, 19 nt, Artificial Sequence
  Description of Artificial Sequence: Synthetic oligonucleotide
uaguuggaggucuguuaca

SEQ ID NO: 1822342 - RNA, 19 nt, Artificial Sequence
  Description of Artificial Sequence: Synthetic oligonucleotide
ugcgcuucaccuucucccu

SEQ ID NO: 1822343 - RNA, 19 nt, Artificial Sequence
  Description of Artificial Sequence: Synthetic oligonucleotide
ugagggguacauggggugc

SEQ ID NO: 1822344 - RNA, 19 nt, Artificial Sequence
  Description of Artificial Sequence: Synthetic oligonucleotide
uguuuugcuccuguaguuu

SEQ ID NO: 1822345 - RNA, 19 nt, Artificial Sequence
  Description of Artificial Sequence: Synthetic oligonucleotide
auccugguggguauucggg

SEQ ID NO: 1822346 - RNA, 19 nt, Artificial Sequence
  Description of Artificial Sequence: Synthetic oligonucleotide
cuguuacaggcuagcgacc

SEQ ID NO: 1822347 - RNA, 19 nt, Artificial Sequence
  Description of Artificial Sequence: Synthetic oligonucleotide
ucaucgcacaguucucuau

SEQ ID NO: 1822348 - RNA, 19 nt, Artificial Sequence
  Description of Artificial Sequence: Synthetic oligonucleotide
uaguggugauuuucagaga

SEQ ID NO: 1822349 - RNA, 19 nt, Artificial Sequence
  Description of Artificial Sequence: Synthetic oligonucleotide
acgugcaccucguucauuu

SEQ ID NO: 1822350 - RNA, 19 nt, Artificial Sequence
  Description of Artificial Sequence: Synthetic oligonucleotide
aucaucacacuugcauuug

SEQ ID NO: 1822351 - RNA, 19 nt, Artificial Sequence
  Description of Artificial Sequence: Synthetic oligonucleotide
guauuuggccgguuuaaua

SEQ ID NO: 1822352 - RNA, 19 nt, Artificial Sequence
  Description of Artificial Sequence: Synthetic oligonucleotide
uuuugguccgagccuugau

SEQ ID NO: 1822353 - RNA, 19 nt, Artificial Sequence
  Description of Artificial Sequence: Synthetic oligonucleotide
acaggccacuccuugguaa

SEQ ID NO: 1822354 - RNA, 19 nt, Artificial Sequence
  Description of Artificial Sequence: Synthetic oligonucleotide
caguuuucuuucccaguac

SEQ ID NO: 1822355 - RNA, 19 nt, Artificial Sequence
  Description of Artificial Sequence: Synthetic oligonucleotide
cuuguacuuuucuacuaaa

SEQ ID NO: 1822356 - RNA, 19 nt, Artificial Sequence
  Description of Artificial Sequence: Synthetic oligonucleotide
agucuuagggugaguuggg

SEQ ID NO: 1822357 - RNA, 19 nt, Artificial Sequence
  Description of Artificial Sequence: Synthetic oligonucleotide
guuacucugacggcugaac

SEQ ID NO: 1822358 - RNA, 19 nt, Artificial Sequence
  Description of Artificial Sequence: Synthetic oligonucleotide
cauggggugcagcuguuuc

SEQ ID NO: 1822359 - RNA, 19 nt, Artificial Sequence
  Description of Artificial Sequence: Synthetic oligonucleotide
uggccgguuuaauaauuuc

SEQ ID NO: 1822360 - RNA, 19 nt, Artificial Sequence
  Description of Artificial Sequence: Synthetic oligonucleotide
accuuccugagauguuuug

SEQ ID NO: 1822361 - RNA, 19 nt, Artificial Sequence
  Description of Artificial Sequence: Synthetic oligonucleotide
uucggggcuccuccucagg

SEQ ID NO: 1822362 - RNA, 19 nt, Artificial Sequence
  Description of Artificial Sequence: Synthetic oligonucleotide
uacucgugggccagugccu

SEQ ID NO: 1822363 - RNA, 19 nt, Artificial Sequence
  Description of Artificial Sequence: Synthetic oligonucleotide
gaaaucccgcagcgacacg

SEQ ID NO: 1822364 - RNA, 19 nt, Artificial Sequence
  Description of Artificial Sequence: Synthetic oligonucleotide
acacuccuuuaucaucaca

SEQ ID NO: 1822365 - RNA, 19 nt, Artificial Sequence
  Description of Artificial Sequence: Synthetic oligonucleotide
agaaaucaccagccacacu

SEQ ID NO: 1822366 - RNA, 19 nt, Artificial Sequence
  Description of Artificial Sequence: Synthetic oligonucleotide
ugugagguucccucacaua

SEQ ID NO: 1822367 - RNA, 19 nt, Artificial Sequence
  Description of Artificial Sequence: Synthetic oligonucleotide
auaguucgugcaucgcuuu

SEQ ID NO: 1822368 - RNA, 19 nt, Artificial Sequence
  Description of Artificial Sequence: Synthetic oligonucleotide
uacaggcuagcgaccgcca

SEQ ID NO: 1822369 - RNA, 19 nt, Artificial Sequence
  Description of Artificial Sequence: Synthetic oligonucleotide
gcauaguggugauuuucag

SEQ ID NO: 1822370 - RNA, 19 nt, Artificial Sequence
  Description of Artificial Sequence: Synthetic oligonucleotide
cuuccugagauguuuugcu

SEQ ID NO: 1822371 - RNA, 19 nt, Artificial Sequence
  Description of Artificial Sequence: Synthetic oligonucleotide
ugacuacuuccacucuaau

SEQ ID NO: 1822372 - RNA, 19 nt, Artificial Sequence
  Description of Artificial Sequence: Synthetic oligonucleotide
ugaggacuuccaucuugac

SEQ ID NO: 1822373 - RNA, 19 nt, Artificial Sequence
  Description of Artificial Sequence: Synthetic oligonucleotide
gcaagaugcucuucuccag

SEQ ID NO: 1822374 - RNA, 19 nt, Artificial Sequence
  Description of Artificial Sequence: Synthetic oligonucleotide
aguauuuggccgguuuaau

SEQ ID NO: 1822375 - RNA, 19 nt, Artificial Sequence
  Description of Artificial Sequence: Synthetic oligonucleotide
uggcuguuacucugacggc

SEQ ID NO: 1822376 - RNA, 19 nt, Artificial Sequence
  Description of Artificial Sequence: Synthetic oligonucleotide
acgaacucuuucucgucau

SEQ ID NO: 1822377 - RNA, 19 nt, Artificial Sequence
  Description of Artificial Sequence: Synthetic oligonucleotide
cagaagugggcucccgcug

SEQ ID NO: 1822378 - RNA, 19 nt, Artificial Sequence
  Description of Artificial Sequence: Synthetic oligonucleotide
cagaguuauagcacgcaua

SEQ ID NO: 1822379 - RNA, 19 nt, Artificial Sequence
  Description of Artificial Sequence: Synthetic oligonucleotide
gcagcgauauugcugaucu

SEQ ID NO: 1822380 - RNA, 19 nt, Artificial Sequence
  Description of Artificial Sequence: Synthetic oligonucleotide
caggcuagcgaccgccaag

SEQ ID NO: 1822381 - RNA, 19 nt, Artificial Sequence
  Description of Artificial Sequence: Synthetic oligonucleotide
guuacaggcuagcgaccgc

SEQ ID NO: 1822382 - RNA, 19 nt, Artificial Sequence
  Description of Artificial Sequence: Synthetic oligonucleotide
ucugacggcugaacacgaa

SEQ ID NO: 1822383 - RNA, 19 nt, Artificial Sequence
  Description of Artificial Sequence: Synthetic oligonucleotide
cugccaucucacacucccg

SEQ ID NO: 1822384 - RNA, 19 nt, Artificial Sequence
  Description of Artificial Sequence: Synthetic oligonucleotide
acacgcugggcugagaguu

SEQ ID NO: 1822385 - RNA, 19 nt, Artificial Sequence
  Description of Artificial Sequence: Synthetic oligonucleotide
gacuacuuccacucuaauu

SEQ ID NO: 1822386 - RNA, 19 nt, Artificial Sequence
  Description of Artificial Sequence: Synthetic oligonucleotide
auucggggcuccuccucag

SEQ ID NO: 1822387 - RNA, 19 nt, Artificial Sequence
  Description of Artificial Sequence: Synthetic oligonucleotide
aucgcacaguucucuauuu

SEQ ID NO: 1822388 - RNA, 19 nt, Artificial Sequence
  Description of Artificial Sequence: Synthetic oligonucleotide
auucuccuaguuggagguc

SEQ ID NO: 1822389 - RNA, 19 nt, Artificial Sequence
  Description of Artificial Sequence: Synthetic oligonucleotide
guugugagguucccucaca

SEQ ID NO: 1822390 - RNA, 19 nt, Artificial Sequence
  Description of Artificial Sequence: Synthetic oligonucleotide
agcaagcaagaugcucuuc

SEQ ID NO: 1822391 - RNA, 19 nt, Artificial Sequence
  Description of Artificial Sequence: Synthetic oligonucleotide
agcuguuucccugaaugua

SEQ ID NO: 1822392 - RNA, 19 nt, Artificial Sequence
  Description of Artificial Sequence: Synthetic oligonucleotide
cuuuaucaucacacuugca

SEQ ID NO: 1822393 - RNA, 19 nt, Artificial Sequence
  Description of Artificial Sequence: Synthetic oligonucleotide
uuguacucgugggccagug

SEQ ID NO: 1822394 - RNA, 19 nt, Artificial Sequence
  Description of Artificial Sequence: Synthetic oligonucleotide
cucucaugggccauaauuu

SEQ ID NO: 1822395 - RNA, 19 nt, Artificial Sequence
  Description of Artificial Sequence: Synthetic oligonucleotide
ggcugaacacgaagguucg

SEQ ID NO: 1822396 - RNA, 19 nt, Artificial Sequence
  Description of Artificial Sequence: Synthetic oligonucleotide
ucgucaucgcacaguucuc

SEQ ID NO: 1822397 - RNA, 19 nt, Artificial Sequence
  Description of Artificial Sequence: Synthetic oligonucleotide
ggucuguuacaggcuagcg

SEQ ID NO: 1822398 - RNA, 19 nt, Artificial Sequence
  Description of Artificial Sequence: Synthetic oligonucleotide
gagauguuuugcuccugua

SEQ ID NO: 1822399 - RNA, 19 nt, Artificial Sequence
  Description of Artificial Sequence: Synthetic oligonucleotide
ucccgcucuaucugcugga

SEQ ID NO: 1822400 - RNA, 19 nt, Artificial Sequence
  Description of Artificial Sequence: Synthetic oligonucleotide
gguugugagguucccucac

SEQ ID NO: 1822401 - RNA, 19 nt, Artificial Sequence
  Description of Artificial Sequence: Synthetic oligonucleotide
uaguucgugcaucgcuuuu

SEQ ID NO: 1822402 - RNA, 19 nt, Artificial Sequence
  Description of Artificial Sequence: Synthetic oligonucleotide
ccucacauacuggaaaaug

SEQ ID NO: 1822403 - RNA, 19 nt, Artificial Sequence
  Description of Artificial Sequence: Synthetic oligonucleotide
cacacuccuuuaucaucac

SEQ ID NO: 1822404 - RNA, 19 nt, Artificial Sequence
  Description of Artificial Sequence: Synthetic oligonucleotide
caaggucacaucccaaacu

SEQ ID NO: 1822405 - RNA, 19 nt, Artificial Sequence
  Description of Artificial Sequence: Synthetic oligonucleotide
gccgguuaaaagaggagac

SEQ ID NO: 1822406 - RNA, 19 nt, Artificial Sequence
  Description of Artificial Sequence: Synthetic oligonucleotide
aaucccgcagcgacacgcu

SEQ ID NO: 1822407 - RNA, 19 nt, Artificial Sequence
  Description of Artificial Sequence: Synthetic oligonucleotide
acucagaagugggcucccg

SEQ ID NO: 1822408 - RNA, 19 nt, Artificial Sequence
  Description of Artificial Sequence: Synthetic oligonucleotide
cucacacucccgcucuauc

SEQ ID NO: 1822409 - RNA, 19 nt, Artificial Sequence
  Description of Artificial Sequence: Synthetic oligonucleotide
aggcgggcucugcaggaag

SEQ ID NO: 1822410 - RNA, 19 nt, Artificial Sequence
  Description of Artificial Sequence: Synthetic oligonucleotide
ugacccugugcuccuccuc

SEQ ID NO: 1822411 - RNA, 19 nt, Artificial Sequence
  Description of Artificial Sequence: Synthetic oligonucleotide
cgugcaucgcuuuucuuac

SEQ ID NO: 1822412 - RNA, 19 nt, Artificial Sequence
  Description of Artificial Sequence: Synthetic oligonucleotide
guauucggggcuccuccuc

SEQ ID NO: 1822413 - RNA, 19 nt, Artificial Sequence
  Description of Artificial Sequence: Synthetic oligonucleotide
ugguggugcucuuccucgu

SEQ ID NO: 1822414 - RNA, 19 nt, Artificial Sequence
  Description of Artificial Sequence: Synthetic oligonucleotide
ucucgucaucgcacaguuc

SEQ ID NO: 1822415 - RNA, 19 nt, Artificial Sequence
  Description of Artificial Sequence: Synthetic oligonucleotide
gugacuacuuccacucuaa

SEQ ID NO: 1822416 - RNA, 19 nt, Artificial Sequence
  Description of Artificial Sequence: Synthetic oligonucleotide
gaacacgaagguucggguu

SEQ ID NO: 1822417 - RNA, 19 nt, Artificial Sequence
  Description of Artificial Sequence: Synthetic oligonucleotide
ggccgguuaaaagaggaga

SEQ ID NO: 1822418 - RNA, 19 nt, Artificial Sequence
  Description of Artificial Sequence: Synthetic oligonucleotide
cacaugguucuucuaugaa

SEQ ID NO: 1822419 - RNA, 19 nt, Artificial Sequence
  Description of Artificial Sequence: Synthetic oligonucleotide
ugggaaagggccgguuaaa

SEQ ID NO: 1822420 - RNA, 19 nt, Artificial Sequence
  Description of Artificial Sequence: Synthetic oligonucleotide
uccuaguuggaggucuguu

SEQ ID NO: 1822421 - RNA, 19 nt, Artificial Sequence
  Description of Artificial Sequence: Synthetic oligonucleotide
aggucacaucccaaacuug

SEQ ID NO: 1822422 - RNA, 19 nt, Artificial Sequence
  Description of Artificial Sequence: Synthetic oligonucleotide
auacuggaaaauggacgaa

SEQ ID NO: 1822423 - RNA, 19 nt, Artificial Sequence
  Description of Artificial Sequence: Synthetic oligonucleotide
gguacauggggugcagcug

SEQ ID NO: 1822424 - RNA, 19 nt, Artificial Sequence
  Description of Artificial Sequence: Synthetic oligonucleotide
gccaaccccaagucuuagg

SEQ ID NO: 1822425 - RNA, 19 nt, Artificial Sequence
  Description of Artificial Sequence: Synthetic oligonucleotide
cucguucauuuggaucagc

SEQ ID NO: 1822426 - RNA, 19 nt, Artificial Sequence
  Description of Artificial Sequence: Synthetic oligonucleotide
gccacacuccuuuaucauc

SEQ ID NO: 1822427 - RNA, 19 nt, Artificial Sequence
  Description of Artificial Sequence: Synthetic oligonucleotide
agguucccucacauacugg

SEQ ID NO: 1822428 - RNA, 19 nt, Artificial Sequence
  Description of Artificial Sequence: Synthetic oligonucleotide
ugcauccugguggguauuc

SEQ ID NO: 1822429 - RNA, 19 nt, Artificial Sequence
  Description of Artificial Sequence: Synthetic oligonucleotide
ggacgugguuacucagaag

SEQ ID NO: 1822430 - RNA, 19 nt, Artificial Sequence
  Description of Artificial Sequence: Synthetic oligonucleotide
acgaagguucggguuguga

SEQ ID NO: 1822431 - RNA, 19 nt, Artificial Sequence
  Description of Artificial Sequence: Synthetic oligonucleotide
gcuagcgaccgccaagguc

SEQ ID NO: 1822432 - RNA, 19 nt, Artificial Sequence
  Description of Artificial Sequence: Synthetic oligonucleotide
caucacacuugcauuuggu

SEQ ID NO: 1822433 - RNA, 19 nt, Artificial Sequence
  Description of Artificial Sequence: Synthetic oligonucleotide
ccggcagcgauauugcuga

SEQ ID NO: 1822434 - RNA, 19 nt, Artificial Sequence
  Description of Artificial Sequence: Synthetic oligonucleotide
gguuacucagaagugggcu

SEQ ID NO: 1822435 - RNA, 19 nt, Artificial Sequence
  Description of Artificial Sequence: Synthetic oligonucleotide
cucugacggcugaacacga

SEQ ID NO: 1822436 - RNA, 19 nt, Artificial Sequence
  Description of Artificial Sequence: Synthetic oligonucleotide
ucggguugugagguucccu

SEQ ID NO: 1822437 - RNA, 19 nt, Artificial Sequence
  Description of Artificial Sequence: Synthetic oligonucleotide
ucucacacucccgcucuau

SEQ ID NO: 1822438 - RNA, 19 nt, Artificial Sequence
  Description of Artificial Sequence: Synthetic oligonucleotide
aucccgcagcgacacgcug

SEQ ID NO: 1822439 - RNA, 19 nt, Artificial Sequence
  Description of Artificial Sequence: Synthetic oligonucleotide
cacgcugggcugagaguug

SEQ ID NO: 1822440 - RNA, 19 nt, Artificial Sequence
  Description of Artificial Sequence: Synthetic oligonucleotide
ccaggugcgcugcuugagg

SEQ ID NO: 1822441 - RNA, 19 nt, Artificial Sequence
  Description of Artificial Sequence: Synthetic oligonucleotide
acggcugaacacgaagguu

SEQ ID NO: 1822442 - RNA, 19 nt, Artificial Sequence
  Description of Artificial Sequence: Synthetic oligonucleotide
uacauggggugcagcuguu

SEQ ID NO: 1822443 - RNA, 19 nt, Artificial Sequence
  Description of Artificial Sequence: Synthetic oligonucleotide
cuaaagcaagcaagaugcu

SEQ ID NO: 1822444 - RNA, 19 nt, Artificial Sequence
  Description of Artificial Sequence: Synthetic oligonucleotide
uagcacgcauaguggugau

SEQ ID NO: 1822445 - RNA, 19 nt, Artificial Sequence
  Description of Artificial Sequence: Synthetic oligonucleotide
gaaaauggacgaacucuuu

SEQ ID NO: 1822446 - RNA, 19 nt, Artificial Sequence
  Description of Artificial Sequence: Synthetic oligonucleotide
gucaucgcacaguucucua

SEQ ID NO: 1822447 - RNA, 19 nt, Artificial Sequence
  Description of Artificial Sequence: Synthetic oligonucleotide
cucgugggccagugccugc

SEQ ID NO: 1822448 - RNA, 19 nt, Artificial Sequence
  Description of Artificial Sequence: Synthetic oligonucleotide
uucgugcaucgcuuuucuu

SEQ ID NO: 1822449 - RNA, 19 nt, Artificial Sequence
  Description of Artificial Sequence: Synthetic oligonucleotide
ggaaaauggacgaacucuu

SEQ ID NO: 1822450 - RNA, 19 nt, Artificial Sequence
  Description of Artificial Sequence: Synthetic oligonucleotide
cacucuaauucuccuaguu

SEQ ID NO: 1822451 - RNA, 19 nt, Artificial Sequence
  Description of Artificial Sequence: Synthetic oligonucleotide
gcaauaguucgugcaucgc

SEQ ID NO: 1822452 - RNA, 19 nt, Artificial Sequence
  Description of Artificial Sequence: Synthetic oligonucleotide
ggacgaacucuuucucguc

SEQ ID NO: 1822453 - RNA, 19 nt, Artificial Sequence
  Description of Artificial Sequence: Synthetic oligonucleotide
gucuuagggugaguuggga

SEQ ID NO: 1822454 - RNA, 19 nt, Artificial Sequence
  Description of Artificial Sequence: Synthetic oligonucleotide
gacaggccacuccuuggua

SEQ ID NO: 1822455 - RNA, 19 nt, Artificial Sequence
  Description of Artificial Sequence: Synthetic oligonucleotide
caucucacacucccgcucu

SEQ ID NO: 1822456 - RNA, 19 nt, Artificial Sequence
  Description of Artificial Sequence: Synthetic oligonucleotide
ugguggguauucggggcuc

SEQ ID NO: 1822457 - RNA, 19 nt, Artificial Sequence
  Description of Artificial Sequence: Synthetic oligonucleotide
gcugggcugagaguuguac

SEQ ID NO: 1822458 - RNA, 19 nt, Artificial Sequence
  Description of Artificial Sequence: Synthetic oligonucleotide
gacacgcugggcugagagu

SEQ ID NO: 1822459 - RNA, 19 nt, Artificial Sequence
  Description of Artificial Sequence: Synthetic oligonucleotide
cuugcccaggacgugguua

SEQ ID NO: 1822460 - RNA, 19 nt, Artificial Sequence
  Description of Artificial Sequence: Synthetic oligonucleotide
gccgguuuaauaauuucgu

SEQ ID NO: 1822461 - RNA, 19 nt, Artificial Sequence
  Description of Artificial Sequence: Synthetic oligonucleotide
ggugcgcugcuugagggca

SEQ ID NO: 1822462 - RNA, 19 nt, Artificial Sequence
  Description of Artificial Sequence: Synthetic oligonucleotide
uccucucaugggccauaau

SEQ ID NO: 1822463 - RNA, 19 nt, Artificial Sequence
  Description of Artificial Sequence: Synthetic oligonucleotide
gcugaacacgaagguucgg

SEQ ID NO: 1822464 - RNA, 19 nt, Artificial Sequence
  Description of Artificial Sequence: Synthetic oligonucleotide
cgcauaguggugauuuuca

SEQ ID NO: 1822465 - RNA, 19 nt, Artificial Sequence
  Description of Artificial Sequence: Synthetic oligonucleotide
gugcaucgcuuuucuuaca

SEQ ID NO: 1822466 - RNA, 19 nt, Artificial Sequence
  Description of Artificial Sequence: Synthetic oligonucleotide
cgcacaguucucuauuuga

SEQ ID NO: 1822467 - RNA, 19 nt, Artificial Sequence
  Description of Artificial Sequence: Synthetic oligonucleotide
gcacaguucucuauuugaa

SEQ ID NO: 1822468 - RNA, 19 nt, Artificial Sequence
  Description of Artificial Sequence: Synthetic oligonucleotide
cgacacgcugggcugagag

SEQ ID NO: 1822469 - RNA, 19 nt, Artificial Sequence
  Description of Artificial Sequence: Synthetic oligonucleotide
cuacuaaagcaagcaagau

SEQ ID NO: 1822470 - RNA, 19 nt, Artificial Sequence
  Description of Artificial Sequence: Synthetic oligonucleotide
ccuaguuggaggucuguua

SEQ ID NO: 1822471 - RNA, 19 nt, Artificial Sequence
  Description of Artificial Sequence: Synthetic oligonucleotide
cccgcagcgacacgcuggg

SEQ ID NO: 1822472 - RNA, 19 nt, Artificial Sequence
  Description of Artificial Sequence: Synthetic oligonucleotide
agcgacacgcugggcugag

SEQ ID NO: 1822473 - RNA, 19 nt, Artificial Sequence
  Description of Artificial Sequence: Synthetic oligonucleotide
caaccccaagucuuagggu

SEQ ID NO: 1822474 - RNA, 19 nt, Artificial Sequence
  Description of Artificial Sequence: Synthetic oligonucleotide
gcuccggcagcgauauugc

SEQ ID NO: 1822475 - RNA, 19 nt, Artificial Sequence
  Description of Artificial Sequence: Synthetic oligonucleotide
gcugagaguuguacucgug

SEQ ID NO: 1822476 - RNA, 19 nt, Artificial Sequence
  Description of Artificial Sequence: Synthetic oligonucleotide
ugccugccaggugcgcugc

SEQ ID NO: 1822477 - RNA, 19 nt, Artificial Sequence
  Description of Artificial Sequence: Synthetic oligonucleotide
gggcaauaguucgugcauc

SEQ ID NO: 1822478 - RNA, 19 nt, Artificial Sequence
  Description of Artificial Sequence: Synthetic oligonucleotide
gccacuugagggguacaug

SEQ ID NO: 1822479 - RNA, 19 nt, Artificial Sequence
  Description of Artificial Sequence: Synthetic oligonucleotide
caucgcacaguucucuauu

SEQ ID NO: 1822480 - RNA, 19 nt, Artificial Sequence
  Description of Artificial Sequence: Synthetic oligonucleotide
ucccgcugcgcuucaccuu

SEQ ID NO: 1822481 - RNA, 19 nt, Artificial Sequence
  Description of Artificial Sequence: Synthetic oligonucleotide
aucucacacucccgcucua

SEQ ID NO: 1822482 - RNA, 19 nt, Artificial Sequence
  Description of Artificial Sequence: Synthetic oligonucleotide
cccgcugcgcuucaccuuc

SEQ ID NO: 1822483 - RNA, 19 nt, Artificial Sequence
  Description of Artificial Sequence: Synthetic oligonucleotide
ggcagcgauauugcugauc

SEQ ID NO: 1822484 - RNA, 19 nt, Artificial Sequence
  Description of Artificial Sequence: Synthetic oligonucleotide
ugcgcugcuugagggcaau

SEQ ID NO: 1822485 - RNA, 19 nt, Artificial Sequence
  Description of Artificial Sequence: Synthetic oligonucleotide
ccucucaugggccauaauu

SEQ ID NO: 1822486 - RNA, 19 nt, Artificial Sequence
  Description of Artificial Sequence: Synthetic oligonucleotide
uccgagccuugauguucuc

SEQ ID NO: 1822487 - RNA, 19 nt, Artificial Sequence
  Description of Artificial Sequence: Synthetic oligonucleotide
uggccacuugagggguaca

SEQ ID NO: 1822488 - RNA, 19 nt, Artificial Sequence
  Description of Artificial Sequence: Synthetic oligonucleotide
gcuugaaaucccgcagcga

SEQ ID NO: 1822489 - RNA, 19 nt, Artificial Sequence
  Description of Artificial Sequence: Synthetic oligonucleotide
cgcugcuugagggcaauag

SEQ ID NO: 1822490 - RNA, 19 nt, Artificial Sequence
  Description of Artificial Sequence: Synthetic oligonucleotide
acauggggugcagcuguuu

SEQ ID NO: 1822491 - RNA, 19 nt, Artificial Sequence
  Description of Artificial Sequence: Synthetic oligonucleotide
ccgagccuugauguucucc

SEQ ID NO: 1822492 - RNA, 19 nt, Artificial Sequence
  Description of Artificial Sequence: Synthetic oligonucleotide
gguauucggggcuccuccu

SEQ ID NO: 1822493 - RNA, 19 nt, Artificial Sequence
  Description of Artificial Sequence: Synthetic oligonucleotide
agguucggguugugagguu

SEQ ID NO: 1822494 - RNA, 19 nt, Artificial Sequence
  Description of Artificial Sequence: Synthetic oligonucleotide
ggccaaccccaagucuuag

SEQ ID NO: 1822495 - RNA, 19 nt, Artificial Sequence
  Description of Artificial Sequence: Synthetic oligonucleotide
gccaggugcgcugcuugag

SEQ ID NO: 1822496 - RNA, 19 nt, Artificial Sequence
  Description of Artificial Sequence: Synthetic oligonucleotide
gcacgcauaguggugauuu

SEQ ID NO: 1822497 - RNA, 19 nt, Artificial Sequence
  Description of Artificial Sequence: Synthetic oligonucleotide
ggcugagaguuguacucgu

SEQ ID NO: 1822498 - RNA, 19 nt, Artificial Sequence
  Description of Artificial Sequence: Synthetic oligonucleotide
ugcccaggacgugguuacu

SEQ ID NO: 1822499 - RNA, 19 nt, Artificial Sequence
  Description of Artificial Sequence: Synthetic oligonucleotide
agcacgcauaguggugauu

SEQ ID NO: 1822500 - RNA, 19 nt, Artificial Sequence
  Description of Artificial Sequence: Synthetic oligonucleotide
ccucguucauuuggaucag

SEQ ID NO: 1822501 - RNA, 19 nt, Artificial Sequence
  Description of Artificial Sequence: Synthetic oligonucleotide
cacgaagguucggguugug

SEQ ID NO: 1822502 - RNA, 19 nt, Artificial Sequence
  Description of Artificial Sequence: Synthetic oligonucleotide
cacucccgcucuaucugcu

SEQ ID NO: 1822503 - RNA, 19 nt, Artificial Sequence
  Description of Artificial Sequence: Synthetic oligonucleotide
cgaacucuuucucgucauc

SEQ ID NO: 1822504 - RNA, 19 nt, Artificial Sequence
  Description of Artificial Sequence: Synthetic oligonucleotide
ccgccaaggucacauccca

SEQ ID NO: 1822505 - RNA, 19 nt, Artificial Sequence
  Description of Artificial Sequence: Synthetic oligonucleotide
gagaaguauuuggccgguu

SEQ ID NO: 1822506 - RNA, 19 nt, Artificial Sequence
  Description of Artificial Sequence: Synthetic oligonucleotide
ggggccaaccccaagucuu

SEQ ID NO: 1822507 - RNA, 19 nt, Artificial Sequence
  Description of Artificial Sequence: Synthetic oligonucleotide
ccaagucuuagggugaguu

SEQ ID NO: 1822508 - RNA, 19 nt, Artificial Sequence
  Description of Artificial Sequence: Synthetic oligonucleotide
gcugcuccggcagcgauau

SEQ ID NO: 1822509 - RNA, 19 nt, Artificial Sequence
  Description of Artificial Sequence: Synthetic oligonucleotide
gcgauauugcugaucuuuu

SEQ ID NO: 1822510 - RNA, 19 nt, Artificial Sequence
  Description of Artificial Sequence: Synthetic oligonucleotide
cacgcauaguggugauuuu

SEQ ID NO: 1822511 - RNA, 19 nt, Artificial Sequence
  Description of Artificial Sequence: Synthetic oligonucleotide
cagcgacacgcugggcuga

SEQ ID NO: 1822512 - RNA, 19 nt, Artificial Sequence
  Description of Artificial Sequence: Synthetic oligonucleotide
gcgaccgccaaggucacau

SEQ ID NO: 1822513 - RNA, 19 nt, Artificial Sequence
  Description of Artificial Sequence: Synthetic oligonucleotide
ggugcucuuccucgugcau

SEQ ID NO: 1822514 - RNA, 19 nt, Artificial Sequence
  Description of Artificial Sequence: Synthetic oligonucleotide
caccagccacacuccuuua

SEQ ID NO: 1822515 - RNA, 19 nt, Artificial Sequence
  Description of Artificial Sequence: Synthetic oligonucleotide
agcgaccgccaaggucaca

SEQ ID NO: 1822516 - RNA, 19 nt, Artificial Sequence
  Description of Artificial Sequence: Synthetic oligonucleotide
cuccuaguuggaggucugu

SEQ ID NO: 1822517 - RNA, 19 nt, Artificial Sequence
  Description of Artificial Sequence: Synthetic oligonucleotide
cgcagcgacacgcugggcu

SEQ ID NO: 1822518 - RNA, 19 nt, Artificial Sequence
  Description of Artificial Sequence: Synthetic oligonucleotide
cgggcucugcaggaaguac

SEQ ID NO: 1822519 - RNA, 19 nt, Artificial Sequence
  Description of Artificial Sequence: Synthetic oligonucleotide
ccacucuaauucuccuagu

SEQ ID NO: 1822520 - RNA, 19 nt, Artificial Sequence
  Description of Artificial Sequence: Synthetic oligonucleotide
caggcgggcucugcaggaa

SEQ ID NO: 1822521 - RNA, 19 nt, Artificial Sequence
  Description of Artificial Sequence: Synthetic oligonucleotide
gggccaaccccaagucuua

SEQ ID NO: 1822522 - RNA, 19 nt, Artificial Sequence
  Description of Artificial Sequence: Synthetic oligonucleotide
gugcgcugcuugagggcaa

SEQ ID NO: 1822523 - RNA, 19 nt, Artificial Sequence
  Description of Artificial Sequence: Synthetic oligonucleotide
ggccacuugagggguacau

SEQ ID NO: 1822524 - RNA, 19 nt, Artificial Sequence
  Description of Artificial Sequence: Synthetic oligonucleotide
cagcgauauugcugaucuu

SEQ ID NO: 1822525 - RNA, 19 nt, Artificial Sequence
  Description of Artificial Sequence: Synthetic oligonucleotide
ggcgggcucugcaggaagu

SEQ ID NO: 1822526 - RNA, 19 nt, Artificial Sequence
  Description of Artificial Sequence: Synthetic oligonucleotide
ggcuagcgaccgccaaggu

SEQ ID NO: 1822527 - RNA, 19 nt, Artificial Sequence
  Description of Artificial Sequence: Synthetic oligonucleotide
cgaccgccaaggucacauc

SEQ ID NO: 1822528 - RNA, 19 nt, Artificial Sequence
  Description of Artificial Sequence: Synthetic oligonucleotide
cccucacauacuggaaaau

SEQ ID NO: 1822529 - RNA, 19 nt, Artificial Sequence
  Description of Artificial Sequence: Synthetic oligonucleotide
cacgugcaccucguucauu

SEQ ID NO: 1822530 - RNA, 19 nt, Artificial Sequence
  Description of Artificial Sequence: Synthetic oligonucleotide
cugcauccugguggguauu

SEQ ID NO: 1822531 - RNA, 19 nt, Artificial Sequence
  Description of Artificial Sequence: Synthetic oligonucleotide
gcgacacgcugggcugaga

SEQ ID NO: 1822532 - RNA, 19 nt, Artificial Sequence
  Description of Artificial Sequence: Synthetic oligonucleotide
gggcucccgcugcgcuuca

SEQ ID NO: 1822533 - RNA, 19 nt, Artificial Sequence
  Description of Artificial Sequence: Synthetic oligonucleotide
ccuccucucaugggccaua

SEQ ID NO: 1822534 - RNA, 19 nt, Artificial Sequence
  Description of Artificial Sequence: Synthetic oligonucleotide
ccgcagcgacacgcugggc

SEQ ID NO: 1822535 - RNA, 19 nt, Artificial Sequence
  Description of Artificial Sequence: Synthetic oligonucleotide
ccacgugcaccucguucau

SEQ ID NO: 1822536 - RNA, 19 nt, Artificial Sequence
  Description of Artificial Sequence: Synthetic oligonucleotide
cccaagucuuagggugagu

SEQ ID NO: 1822537 - RNA, 19 nt, Artificial Sequence
  Description of Artificial Sequence: Synthetic oligonucleotide
gcgcugcuugagggcaaua

SEQ ID NO: 1822538 - RNA, 19 nt, Artificial Sequence
  Description of Artificial Sequence: Synthetic oligonucleotide
cccgcucuaucugcuggau

SEQ ID NO: 1822539 - RNA, 19 nt, Artificial Sequence
  Description of Artificial Sequence: Synthetic oligonucleotide
cugcuccggcagcgauauu

SEQ ID NO: 1822540 - RNA, 19 nt, Artificial Sequence
  Description of Artificial Sequence: Synthetic oligonucleotide
cggcagcgauauugcugau

SEQ ID NO: 1822541 - RNA, 19 nt, Artificial Sequence
  Description of Artificial Sequence: Synthetic oligonucleotide
aaauggagcgaauauagac

SEQ ID NO: 1822542 - RNA, 19 nt, Artificial Sequence
  Description of Artificial Sequence: Synthetic oligonucleotide
aaugaguccaauuugucuc

SEQ ID NO: 1822543 - RNA, 19 nt, Artificial Sequence
  Description of Artificial Sequence: Synthetic oligonucleotide
caaaguaagaaauggagcg

SEQ ID NO: 1822544 - RNA, 19 nt, Artificial Sequence
  Description of Artificial Sequence: Synthetic oligonucleotide
guauaaaccaauuuguccc

SEQ ID NO: 1822545 - RNA, 19 nt, Artificial Sequence
  Description of Artificial Sequence: Synthetic oligonucleotide
  modified_base (10)..(10): a, c, u, g, unknown or other
uuuaucuacncccuuacaa

SEQ ID NO: 1822546 - RNA, 19 nt, Artificial Sequence
  Description of Artificial Sequence: Synthetic oligonucleotide
gacacugcaauguagaagc

SEQ ID NO: 1822547 - RNA, 19 nt, Artificial Sequence
  Description of Artificial Sequence: Synthetic oligonucleotide
aaugaaugaguccaauuug

SEQ ID NO: 1822548 - RNA, 19 nt, Artificial Sequence
  Description of Artificial Sequence: Synthetic oligonucleotide
uuugcuauaggucuccaug

SEQ ID NO: 1822549 - RNA, 19 nt, Artificial Sequence
  Description of Artificial Sequence: Synthetic oligonucleotide
uuugguuacacauaccaga

SEQ ID NO: 1822550 - RNA, 19 nt, Artificial Sequence
  Description of Artificial Sequence: Synthetic oligonucleotide
aaaucagggaaacuaauaa

SEQ ID NO: 1822551 - RNA, 19 nt, Artificial Sequence
  Description of Artificial Sequence: Synthetic oligonucleotide
  modified_base (9)..(9): a, c, u, g, unknown or other
uuaucuacncccuuacaag

SEQ ID NO: 1822552 - RNA, 19 nt, Artificial Sequence
  Description of Artificial Sequence: Synthetic oligonucleotide
uuguauagucccauguacg

SEQ ID NO: 1822553 - RNA, 19 nt, Artificial Sequence
  Description of Artificial Sequence: Synthetic oligonucleotide
aaucggaauauucgaaaag

SEQ ID NO: 1822554 - RNA, 19 nt, Artificial Sequence
  Description of Artificial Sequence: Synthetic oligonucleotide
uauagacaaauauuugcag

SEQ ID NO: 1822555 - RNA, 19 nt, Artificial Sequence
  Description of Artificial Sequence: Synthetic oligonucleotide
agggaguucaguuugucac

SEQ ID NO: 1822556 - RNA, 19 nt, Artificial Sequence
  Description of Artificial Sequence: Synthetic oligonucleotide
gaauauucgaaaagagucg

SEQ ID NO: 1822557 - RNA, 19 nt, Artificial Sequence
  Description of Artificial Sequence: Synthetic oligonucleotide
uuuguauagucccauguac

SEQ ID NO: 1822558 - RNA, 19 nt, Artificial Sequence
  Description of Artificial Sequence: Synthetic oligonucleotide
aaccccaauaaucaagcag

SEQ ID NO: 1822559 - RNA, 19 nt, Artificial Sequence
  Description of Artificial Sequence: Synthetic oligonucleotide
  modified_base (8)..(8): a, c, u, g, unknown or other
uaucuacncccuuacaagg

SEQ ID NO: 1822560 - RNA, 19 nt, Artificial Sequence
  Description of Artificial Sequence: Synthetic oligonucleotide
uagacaaauauuugcagac

SEQ ID NO: 1822561 - RNA, 19 nt, Artificial Sequence
  Description of Artificial Sequence: Synthetic oligonucleotide
aauuugucccuuuuagaga

SEQ ID NO: 1822562 - RNA, 19 nt, Artificial Sequence
  Description of Artificial Sequence: Synthetic oligonucleotide
accgauuuaucacuucagc

SEQ ID NO: 1822563 - RNA, 19 nt, Artificial Sequence
  Description of Artificial Sequence: Synthetic oligonucleotide
uauuuguauagucccaugu

SEQ ID NO: 1822564 - RNA, 19 nt, Artificial Sequence
  Description of Artificial Sequence: Synthetic oligonucleotide
ugaaucaccgagcacuacc

SEQ ID NO: 1822565 - RNA, 19 nt, Artificial Sequence
  Description of Artificial Sequence: Synthetic oligonucleotide
uguauagucccauguacgc

SEQ ID NO: 1822566 - RNA, 19 nt, Artificial Sequence
  Description of Artificial Sequence: Synthetic oligonucleotide
auagacaaauauuugcaga

SEQ ID NO: 1822567 - RNA, 19 nt, Artificial Sequence
  Description of Artificial Sequence: Synthetic oligonucleotide
agaaauggagcgaauauag

SEQ ID NO: 1822568 - RNA, 19 nt, Artificial Sequence
  Description of Artificial Sequence: Synthetic oligonucleotide
aauauucgaaaagagucga

SEQ ID NO: 1822569 - RNA, 19 nt, Artificial Sequence
  Description of Artificial Sequence: Synthetic oligonucleotide
aagguauaaaccaauuugu

SEQ ID NO: 1822570 - RNA, 19 nt, Artificial Sequence
  Description of Artificial Sequence: Synthetic oligonucleotide
ucggaauauucgaaaagag

SEQ ID NO: 1822571 - RNA, 19 nt, Artificial Sequence
  Description of Artificial Sequence: Synthetic oligonucleotide
agggaaacuaauaaauugg

SEQ ID NO: 1822572 - RNA, 19 nt, Artificial Sequence
  Description of Artificial Sequence: Synthetic oligonucleotide
uuuagagacacugcaaugu

SEQ ID NO: 1822573 - RNA, 19 nt, Artificial Sequence
  Description of Artificial Sequence: Synthetic oligonucleotide
uugcuauaggucuccaugg

SEQ ID NO: 1822574 - RNA, 19 nt, Artificial Sequence
  Description of Artificial Sequence: Synthetic oligonucleotide
cagggaaacuaauaaauug

SEQ ID NO: 1822575 - RNA, 19 nt, Artificial Sequence
  Description of Artificial Sequence: Synthetic oligonucleotide
aaucagggaaacuaauaaa

SEQ ID NO: 1822576 - RNA, 19 nt, Artificial Sequence
  Description of Artificial Sequence: Synthetic oligonucleotide
agcgaauauagacaaauau

SEQ ID NO: 1822577 - RNA, 19 nt, Artificial Sequence
  Description of Artificial Sequence: Synthetic oligonucleotide
cuuacaaggacgacccagg

SEQ ID NO: 1822578 - RNA, 19 nt, Artificial Sequence
  Description of Artificial Sequence: Synthetic oligonucleotide
aauggagcgaauauagaca

SEQ ID NO: 1822579 - RNA, 19 nt, Artificial Sequence
  Description of Artificial Sequence: Synthetic oligonucleotide
uguagaagcgaaauuguuu

SEQ ID NO: 1822580 - RNA, 19 nt, Artificial Sequence
  Description of Artificial Sequence: Synthetic oligonucleotide
auucaacccuuuuaaauca

SEQ ID NO: 1822581 - RNA, 19 nt, Artificial Sequence
  Description of Artificial Sequence: Synthetic oligonucleotide
aacccuuuuaaaucaggga

SEQ ID NO: 1822582 - RNA, 19 nt, Artificial Sequence
  Description of Artificial Sequence: Synthetic oligonucleotide
  modified_base (12)..(12): a, c, u, g, unknown or other
uguuuaucuacncccuuac

SEQ ID NO: 1822583 - RNA, 19 nt, Artificial Sequence
  Description of Artificial Sequence: Synthetic oligonucleotide
ggaauauucgaaaagaguc

SEQ ID NO: 1822584 - RNA, 19 nt, Artificial Sequence
  Description of Artificial Sequence: Synthetic oligonucleotide
cucaaaucuggacagguac

SEQ ID NO: 1822585 - RNA, 19 nt, Artificial Sequence
  Description of Artificial Sequence: Synthetic oligonucleotide
acccuuuuaaaucagggaa

SEQ ID NO: 1822586 - RNA, 19 nt, Artificial Sequence
  Description of Artificial Sequence: Synthetic oligonucleotide
aagcucugacgccaagagc

SEQ ID NO: 1822587 - RNA, 19 nt, Artificial Sequence
  Description of Artificial Sequence: Synthetic oligonucleotide
gacgccaagagcaagaaga

SEQ ID NO: 1822588 - RNA, 19 nt, Artificial Sequence
  Description of Artificial Sequence: Synthetic oligonucleotide
auauuugcagacgaaagcu

SEQ ID NO: 1822589 - RNA, 19 nt, Artificial Sequence
  Description of Artificial Sequence: Synthetic oligonucleotide
ucgaaaagagucgaauucc

SEQ ID NO: 1822590 - RNA, 19 nt, Artificial Sequence
  Description of Artificial Sequence: Synthetic oligonucleotide
uaucacuucagcaggaauu

SEQ ID NO: 1822591 - RNA, 19 nt, Artificial Sequence
  Description of Artificial Sequence: Synthetic oligonucleotide
auauagacaaauauuugca

SEQ ID NO: 1822592 - RNA, 19 nt, Artificial Sequence
  Description of Artificial Sequence: Synthetic oligonucleotide
cuucugaaccccaauaauc

SEQ ID NO: 1822593 - RNA, 19 nt, Artificial Sequence
  Description of Artificial Sequence: Synthetic oligonucleotide
aauauuuguauagucccau

SEQ ID NO: 1822594 - RNA, 19 nt, Artificial Sequence
  Description of Artificial Sequence: Synthetic oligonucleotide
aauguagaagcgaaauugu

SEQ ID NO: 1822595 - RNA, 19 nt, Artificial Sequence
  Description of Artificial Sequence: Synthetic oligonucleotide
acaccaucguuacuacugc

SEQ ID NO: 1822596 - RNA, 19 nt, Artificial Sequence
  Description of Artificial Sequence: Synthetic oligonucleotide
agcgaaauuguuuucacuu

SEQ ID NO: 1822597 - RNA, 19 nt, Artificial Sequence
  Description of Artificial Sequence: Synthetic oligonucleotide
uauagucccauguacgcaa

SEQ ID NO: 1822598 - RNA, 19 nt, Artificial Sequence
  Description of Artificial Sequence: Synthetic oligonucleotide
auguacgcaaguugcaaag

SEQ ID NO: 1822599 - RNA, 19 nt, Artificial Sequence
  Description of Artificial Sequence: Synthetic oligonucleotide
aguuaggggaagguaagac

SEQ ID NO: 1822600 - RNA, 19 nt, Artificial Sequence
  Description of Artificial Sequence: Synthetic oligonucleotide
uccauggaccgauuuauca

SEQ ID NO: 1822601 - RNA, 19 nt, Artificial Sequence
  Description of Artificial Sequence: Synthetic oligonucleotide
ucaucgcuuccucaaaucu

SEQ ID NO: 1822602 - RNA, 19 nt, Artificial Sequence
  Description of Artificial Sequence: Synthetic oligonucleotide
  modified_base (4)..(4): a, c, u, g, unknown or other
uacncccuuacaaggacga

SEQ ID NO: 1822603 - RNA, 19 nt, Artificial Sequence
  Description of Artificial Sequence: Synthetic oligonucleotide
ucaaaucuggacagguacu

SEQ ID NO: 1822604 - RNA, 19 nt, Artificial Sequence
  Description of Artificial Sequence: Synthetic oligonucleotide
caguuugucacuguccugg

SEQ ID NO: 1822605 - RNA, 19 nt, Artificial Sequence
  Description of Artificial Sequence: Synthetic oligonucleotide
cuguaaaagugaaagaaaa

SEQ ID NO: 1822606 - RNA, 19 nt, Artificial Sequence
  Description of Artificial Sequence: Synthetic oligonucleotide
uggugagaagcccucuggg

SEQ ID NO: 1822607 - RNA, 19 nt, Artificial Sequence
  Description of Artificial Sequence: Synthetic oligonucleotide
ucacccauuuugcuauagg

SEQ ID NO: 1822608 - RNA, 19 nt, Artificial Sequence
  Description of Artificial Sequence: Synthetic oligonucleotide
uuacaaaucucagaaguua

SEQ ID NO: 1822609 - RNA, 19 nt, Artificial Sequence
  Description of Artificial Sequence: Synthetic oligonucleotide
  modified_base (6)..(6): a, c, u, g, unknown or other
ucuacncccuuacaaggac

SEQ ID NO: 1822610 - RNA, 19 nt, Artificial Sequence
  Description of Artificial Sequence: Synthetic oligonucleotide
aaauauuuguauaguccca

SEQ ID NO: 1822611 - RNA, 19 nt, Artificial Sequence
  Description of Artificial Sequence: Synthetic oligonucleotide
ugaaagcccaugaugcggu

SEQ ID NO: 1822612 - RNA, 19 nt, Artificial Sequence
  Description of Artificial Sequence: Synthetic oligonucleotide
uuacacauaccagaacuga

SEQ ID NO: 1822613 - RNA, 19 nt, Artificial Sequence
  Description of Artificial Sequence: Synthetic oligonucleotide
agacaaauauuugcagacg

SEQ ID NO: 1822614 - RNA, 19 nt, Artificial Sequence
  Description of Artificial Sequence: Synthetic oligonucleotide
uauuugcagacgaaagcuc

SEQ ID NO: 1822615 - RNA, 19 nt, Artificial Sequence
  Description of Artificial Sequence: Synthetic oligonucleotide
uguuaauaacauuguuccu

SEQ ID NO: 1822616 - RNA, 19 nt, Artificial Sequence
  Description of Artificial Sequence: Synthetic oligonucleotide
aagggaguucaguuuguca

SEQ ID NO: 1822617 - RNA, 19 nt, Artificial Sequence
  Description of Artificial Sequence: Synthetic oligonucleotide
uucaacccuuuuaaaucag

SEQ ID NO: 1822618 - RNA, 19 nt, Artificial Sequence
  Description of Artificial Sequence: Synthetic oligonucleotide
uaccagaacugauacaaau

SEQ ID NO: 1822619 - RNA, 19 nt, Artificial Sequence
  Description of Artificial Sequence: Synthetic oligonucleotide
auaacauuguuccucuauu

SEQ ID NO: 1822620 - RNA, 19 nt, Artificial Sequence
  Description of Artificial Sequence: Synthetic oligonucleotide
ucggcggacaccgucaccg

SEQ ID NO: 1822621 - RNA, 19 nt, Artificial Sequence
  Description of Artificial Sequence: Synthetic oligonucleotide
uuugcagacgaaagcucug

SEQ ID NO: 1822622 - RNA, 19 nt, Artificial Sequence
  Description of Artificial Sequence: Synthetic oligonucleotide
auggagcgaauauagacaa

SEQ ID NO: 1822623 - RNA, 19 nt, Artificial Sequence
  Description of Artificial Sequence: Synthetic oligonucleotide
aucaccgagcacuacccuc

SEQ ID NO: 1822624 - RNA, 19 nt, Artificial Sequence
  Description of Artificial Sequence: Synthetic oligonucleotide
uacgcaaguugcaaaguaa

SEQ ID NO: 1822625 - RNA, 19 nt, Artificial Sequence
  Description of Artificial Sequence: Synthetic oligonucleotide
  modified_base (5)..(5): a, c, u, g, unknown or other
cuacncccuuacaaggacg

SEQ ID NO: 1822626 - RNA, 19 nt, Artificial Sequence
  Description of Artificial Sequence: Synthetic oligonucleotide
agguauaaaccaauuuguc

SEQ ID NO: 1822627 - RNA, 19 nt, Artificial Sequence
  Description of Artificial Sequence: Synthetic oligonucleotide
ugcaauguagaagcgaaau

SEQ ID NO: 1822628 - RNA, 19 nt, Artificial Sequence
  Description of Artificial Sequence: Synthetic oligonucleotide
gaucucuaauuaaacaaga

SEQ ID NO: 1822629 - RNA, 19 nt, Artificial Sequence
  Description of Artificial Sequence: Synthetic oligonucleotide
ccaauaaucaagcaguuca

SEQ ID NO: 1822630 - RNA, 19 nt, Artificial Sequence
  Description of Artificial Sequence: Synthetic oligonucleotide
agugaaagaaaagguauaa

SEQ ID NO: 1822631 - RNA, 19 nt, Artificial Sequence
  Description of Artificial Sequence: Synthetic oligonucleotide
auauuuguauagucccaug

SEQ ID NO: 1822632 - RNA, 19 nt, Artificial Sequence
  Description of Artificial Sequence: Synthetic oligonucleotide
aagagucgaauuccucugu

SEQ ID NO: 1822633 - RNA, 19 nt, Artificial Sequence
  Description of Artificial Sequence: Synthetic oligonucleotide
uccucuauuugguuacaca

SEQ ID NO: 1822634 - RNA, 19 nt, Artificial Sequence
  Description of Artificial Sequence: Synthetic oligonucleotide
accccaauaaucaagcagu

SEQ ID NO: 1822635 - RNA, 19 nt, Artificial Sequence
  Description of Artificial Sequence: Synthetic oligonucleotide
uuagagacacugcaaugua

SEQ ID NO: 1822636 - RNA, 19 nt, Artificial Sequence
  Description of Artificial Sequence: Synthetic oligonucleotide
uacccuuaacuucugccac

SEQ ID NO: 1822637 - RNA, 19 nt, Artificial Sequence
  Description of Artificial Sequence: Synthetic oligonucleotide
agaacugauacaaauucaa

SEQ ID NO: 1822638 - RNA, 19 nt, Artificial Sequence
  Description of Artificial Sequence: Synthetic oligonucleotide
agaagcgaaauuguuuuca

SEQ ID NO: 1822639 - RNA, 19 nt, Artificial Sequence
  Description of Artificial Sequence: Synthetic oligonucleotide
gaaucaccgagcacuaccc

SEQ ID NO: 1822640 - RNA, 19 nt, Artificial Sequence
  Description of Artificial Sequence: Synthetic oligonucleotide
gucccuuuuagagacacug

SEQ ID NO: 1822641 - RNA, 19 nt, Artificial Sequence
  Description of Artificial Sequence: Synthetic oligonucleotide
  modified_base (19)..(19): a, c, u, g, unknown or other
gagaucauguuuaucuacn

SEQ ID NO: 1822642 - RNA, 19 nt, Artificial Sequence
  Description of Artificial Sequence: Synthetic oligonucleotide
ucaccgagcacuacccucu

SEQ ID NO: 1822643 - RNA, 19 nt, Artificial Sequence
  Description of Artificial Sequence: Synthetic oligonucleotide
ggaucucuaauuaaacaag

SEQ ID NO: 1822644 - RNA, 19 nt, Artificial Sequence
  Description of Artificial Sequence: Synthetic oligonucleotide
gaaugaguccaauuugucu

SEQ ID NO: 1822645 - RNA, 19 nt, Artificial Sequence
  Description of Artificial Sequence: Synthetic oligonucleotide
gguuacaaaucucagaagu

SEQ ID NO: 1822646 - RNA, 19 nt, Artificial Sequence
  Description of Artificial Sequence: Synthetic oligonucleotide
cgauuuaucacuucagcag

SEQ ID NO: 1822647 - RNA, 19 nt, Artificial Sequence
  Description of Artificial Sequence: Synthetic oligonucleotide
acccauuuugcuauagguc

SEQ ID NO: 1822648 - RNA, 19 nt, Artificial Sequence
  Description of Artificial Sequence: Synthetic oligonucleotide
gacugaaucaccgagcacu

SEQ ID NO: 1822649 - RNA, 19 nt, Artificial Sequence
  Description of Artificial Sequence: Synthetic oligonucleotide
uuaucacuucagcaggaau

SEQ ID NO: 1822650 - RNA, 19 nt, Artificial Sequence
  Description of Artificial Sequence: Synthetic oligonucleotide
augaaugaguccaauuugu

SEQ ID NO: 1822651 - RNA, 19 nt, Artificial Sequence
  Description of Artificial Sequence: Synthetic oligonucleotide
ucccuuuuagagacacugc

SEQ ID NO: 1822652 - RNA, 19 nt, Artificial Sequence
  Description of Artificial Sequence: Synthetic oligonucleotide
ccaccaaucggaauauucg

SEQ ID NO: 1822653 - RNA, 19 nt, Artificial Sequence
  Description of Artificial Sequence: Synthetic oligonucleotide
gaacugauacaaauucaac

SEQ ID NO: 1822654 - RNA, 19 nt, Artificial Sequence
  Description of Artificial Sequence: Synthetic oligonucleotide
accaucguuacuacugcac

SEQ ID NO: 1822655 - RNA, 19 nt, Artificial Sequence
  Description of Artificial Sequence: Synthetic oligonucleotide
guugaugcgcugcucggag

SEQ ID NO: 1822656 - RNA, 19 nt, Artificial Sequence
  Description of Artificial Sequence: Synthetic oligonucleotide
uguuccaccgcugacugaa

SEQ ID NO: 1822657 - RNA, 19 nt, Artificial Sequence
  Description of Artificial Sequence: Synthetic oligonucleotide
guacccuuaacuucugcca

SEQ ID NO: 1822658 - RNA, 19 nt, Artificial Sequence
  Description of Artificial Sequence: Synthetic oligonucleotide
gagucgaauuccucuguug

SEQ ID NO: 1822659 - RNA, 19 nt, Artificial Sequence
  Description of Artificial Sequence: Synthetic oligonucleotide
gaggguuacaaaucucaga

SEQ ID NO: 1822660 - RNA, 19 nt, Artificial Sequence
  Description of Artificial Sequence: Synthetic oligonucleotide
aggccgacaggcccgaggg

SEQ ID NO: 1822661 - RNA, 19 nt, Artificial Sequence
  Description of Artificial Sequence: Synthetic oligonucleotide
uccaccgcugacugaauca

SEQ ID NO: 1822662 - RNA, 19 nt, Artificial Sequence
  Description of Artificial Sequence: Synthetic oligonucleotide
accggcuccaugcugucuc

SEQ ID NO: 1822663 - RNA, 19 nt, Artificial Sequence
  Description of Artificial Sequence: Synthetic oligonucleotide
gguacccuuaacuucugcc

SEQ ID NO: 1822664 - RNA, 19 nt, Artificial Sequence
  Description of Artificial Sequence: Synthetic oligonucleotide
aguuugucacuguccuggg

SEQ ID NO: 1822665 - RNA, 19 nt, Artificial Sequence
  Description of Artificial Sequence: Synthetic oligonucleotide
uuguaaacuuguucucagu

SEQ ID NO: 1822666 - RNA, 19 nt, Artificial Sequence
  Description of Artificial Sequence: Synthetic oligonucleotide
auuugcagacgaaagcucu

SEQ ID NO: 1822667 - RNA, 19 nt, Artificial Sequence
  Description of Artificial Sequence: Synthetic oligonucleotide
cuggaucucuaauuaaaca

SEQ ID NO: 1822668 - RNA, 19 nt, Artificial Sequence
  Description of Artificial Sequence: Synthetic oligonucleotide
accgcugacugaaucaccg

SEQ ID NO: 1822669 - RNA, 19 nt, Artificial Sequence
  Description of Artificial Sequence: Synthetic oligonucleotide
agcacaccccaccaaucgg

SEQ ID NO: 1822670 - RNA, 19 nt, Artificial Sequence
  Description of Artificial Sequence: Synthetic oligonucleotide
caucgcuuccucaaaucug

SEQ ID NO: 1822671 - RNA, 19 nt, Artificial Sequence
  Description of Artificial Sequence: Synthetic oligonucleotide
ccagaacugauacaaauuc

SEQ ID NO: 1822672 - RNA, 19 nt, Artificial Sequence
  Description of Artificial Sequence: Synthetic oligonucleotide
ucugaaccccaauaaucaa

SEQ ID NO: 1822673 - RNA, 19 nt, Artificial Sequence
  Description of Artificial Sequence: Synthetic oligonucleotide
ucuccauggaccgauuuau

SEQ ID NO: 1822674 - RNA, 19 nt, Artificial Sequence
  Description of Artificial Sequence: Synthetic oligonucleotide
aaucaccgagcacuacccu

SEQ ID NO: 1822675 - RNA, 19 nt, Artificial Sequence
  Description of Artificial Sequence: Synthetic oligonucleotide
guuacuacugcacucuggu

SEQ ID NO: 1822676 - RNA, 19 nt, Artificial Sequence
  Description of Artificial Sequence: Synthetic oligonucleotide
  modified_base (2)..(2): a, c, u, g, unknown or other
cncccuuacaaggacgacc

SEQ ID NO: 1822677 - RNA, 19 nt, Artificial Sequence
  Description of Artificial Sequence: Synthetic oligonucleotide
uucaucgcuuccucaaauc

SEQ ID NO: 1822678 - RNA, 19 nt, Artificial Sequence
  Description of Artificial Sequence: Synthetic oligonucleotide
aagugaaagaaaagguaua

SEQ ID NO: 1822679 - RNA, 19 nt, Artificial Sequence
  Description of Artificial Sequence: Synthetic oligonucleotide
guagaagcgaaauuguuuu

SEQ ID NO: 1822680 - RNA, 19 nt, Artificial Sequence
  Description of Artificial Sequence: Synthetic oligonucleotide
cuaggccauggugagaagc

SEQ ID NO: 1822681 - RNA, 19 nt, Artificial Sequence
  Description of Artificial Sequence: Synthetic oligonucleotide
aucguuacuacugcacucu

SEQ ID NO: 1822682 - RNA, 19 nt, Artificial Sequence
  Description of Artificial Sequence: Synthetic oligonucleotide
aggaggguuacaaaucuca

SEQ ID NO: 1822683 - RNA, 19 nt, Artificial Sequence
  Description of Artificial Sequence: Synthetic oligonucleotide
acgcaaguugcaaaguaag

SEQ ID NO: 1822684 - RNA, 19 nt, Artificial Sequence
  Description of Artificial Sequence: Synthetic oligonucleotide
gucccauguacgcaaguug

SEQ ID NO: 1822685 - RNA, 19 nt, Artificial Sequence
  Description of Artificial Sequence: Synthetic oligonucleotide
uccucaaaucuggacaggu

SEQ ID NO: 1822686 - RNA, 19 nt, Artificial Sequence
  Description of Artificial Sequence: Synthetic oligonucleotide
caucguuacuacugcacuc

SEQ ID NO: 1822687 - RNA, 19 nt, Artificial Sequence
  Description of Artificial Sequence: Synthetic oligonucleotide
uuacuacugcacucuggug

SEQ ID NO: 1822688 - RNA, 19 nt, Artificial Sequence
  Description of Artificial Sequence: Synthetic oligonucleotide
cagauagcaacagcgcagc

SEQ ID NO: 1822689 - RNA, 19 nt, Artificial Sequence
  Description of Artificial Sequence: Synthetic oligonucleotide
ugguuacacauaccagaac

SEQ ID NO: 1822690 - RNA, 19 nt, Artificial Sequence
  Description of Artificial Sequence: Synthetic oligonucleotide
ugacgccaagagcaagaag

SEQ ID NO: 1822691 - RNA, 19 nt, Artificial Sequence
  Description of Artificial Sequence: Synthetic oligonucleotide
ugucgggucaccucugcuc

SEQ ID NO: 1822692 - RNA, 19 nt, Artificial Sequence
  Description of Artificial Sequence: Synthetic oligonucleotide
guacuguucuaggccaugg

SEQ ID NO: 1822693 - RNA, 19 nt, Artificial Sequence
  Description of Artificial Sequence: Synthetic oligonucleotide
caaucggaauauucgaaaa

SEQ ID NO: 1822694 - RNA, 19 nt, Artificial Sequence
  Description of Artificial Sequence: Synthetic oligonucleotide
aaguuaggggaagguaaga

SEQ ID NO: 1822695 - RNA, 19 nt, Artificial Sequence
  Description of Artificial Sequence: Synthetic oligonucleotide
ucguuacuacugcacucug

SEQ ID NO: 1822696 - RNA, 19 nt, Artificial Sequence
  Description of Artificial Sequence: Synthetic oligonucleotide
  modified_base (7)..(7): a, c, u, g, unknown or other
aucuacncccuuacaagga

SEQ ID NO: 1822697 - RNA, 19 nt, Artificial Sequence
  Description of Artificial Sequence: Synthetic oligonucleotide
uguacgcaaguugcaaagu

SEQ ID NO: 1822698 - RNA, 19 nt, Artificial Sequence
  Description of Artificial Sequence: Synthetic oligonucleotide
agcaggaauuccagauagc

SEQ ID NO: 1822699 - RNA, 19 nt, Artificial Sequence
  Description of Artificial Sequence: Synthetic oligonucleotide
agcuggguacccuuaacuu

SEQ ID NO: 1822700 - RNA, 19 nt, Artificial Sequence
  Description of Artificial Sequence: Synthetic oligonucleotide
uucacccauuuugcuauag

SEQ ID NO: 1822701 - RNA, 19 nt, Artificial Sequence
  Description of Artificial Sequence: Synthetic oligonucleotide
ugcgcaguuucaucgcuuc

SEQ ID NO: 1822702 - RNA, 19 nt, Artificial Sequence
  Description of Artificial Sequence: Synthetic oligonucleotide
cugcucggaguucaugagc

SEQ ID NO: 1822703 - RNA, 19 nt, Artificial Sequence
  Description of Artificial Sequence: Synthetic oligonucleotide
caagaagagcacaccccac

SEQ ID NO: 1822704 - RNA, 19 nt, Artificial Sequence
  Description of Artificial Sequence: Synthetic oligonucleotide
gacgacccaggucccacag

SEQ ID NO: 1822705 - RNA, 19 nt, Artificial Sequence
  Description of Artificial Sequence: Synthetic oligonucleotide
gaaagcucugacgccaaga

SEQ ID NO: 1822706 - RNA, 19 nt, Artificial Sequence
  Description of Artificial Sequence: Synthetic oligonucleotide
caccaaucggaauauucga

SEQ ID NO: 1822707 - RNA, 19 nt, Artificial Sequence
  Description of Artificial Sequence: Synthetic oligonucleotide
uccacaccaucguuacuac

SEQ ID NO: 1822708 - RNA, 19 nt, Artificial Sequence
  Description of Artificial Sequence: Synthetic oligonucleotide
  modified_base (11)..(11): a, c, u, g, unknown or other
guuuaucuacncccuuaca

SEQ ID NO: 1822709 - RNA, 19 nt, Artificial Sequence
  Description of Artificial Sequence: Synthetic oligonucleotide
uugcagacgaaagcucuga

SEQ ID NO: 1822710 - RNA, 19 nt, Artificial Sequence
  Description of Artificial Sequence: Synthetic oligonucleotide
acaaauauuugcagacgaa

SEQ ID NO: 1822711 - RNA, 19 nt, Artificial Sequence
  Description of Artificial Sequence: Synthetic oligonucleotide
ugacugaaucaccgagcac

SEQ ID NO: 1822712 - RNA, 19 nt, Artificial Sequence
  Description of Artificial Sequence: Synthetic oligonucleotide
ggaagguaagacuggaucu

SEQ ID NO: 1822713 - RNA, 19 nt, Artificial Sequence
  Description of Artificial Sequence: Synthetic oligonucleotide
guuucaggguacuucugaa

SEQ ID NO: 1822714 - RNA, 19 nt, Artificial Sequence
  Description of Artificial Sequence: Synthetic oligonucleotide
acccuugggaaaauauuug

SEQ ID NO: 1822715 - RNA, 19 nt, Artificial Sequence
  Description of Artificial Sequence: Synthetic oligonucleotide
cacagagaucagugaagac

SEQ ID NO: 1822716 - RNA, 19 nt, Artificial Sequence
  Description of Artificial Sequence: Synthetic oligonucleotide
uuccaccgcugacugaauc

SEQ ID NO: 1822717 - RNA, 19 nt, Artificial Sequence
  Description of Artificial Sequence: Synthetic oligonucleotide
ggaccgauuuaucacuuca

SEQ ID NO: 1822718 - RNA, 19 nt, Artificial Sequence
  Description of Artificial Sequence: Synthetic oligonucleotide
cauguacgcaaguugcaaa

SEQ ID NO: 1822719 - RNA, 19 nt, Artificial Sequence
  Description of Artificial Sequence: Synthetic oligonucleotide
gcgguugaugcgcugcucg

SEQ ID NO: 1822720 - RNA, 19 nt, Artificial Sequence
  Description of Artificial Sequence: Synthetic oligonucleotide
ugaguccaauuugucuccc

SEQ ID NO: 1822721 - RNA, 19 nt, Artificial Sequence
  Description of Artificial Sequence: Synthetic oligonucleotide
guacgcaaguugcaaagua

SEQ ID NO: 1822722 - RNA, 19 nt, Artificial Sequence
  Description of Artificial Sequence: Synthetic oligonucleotide
  modified_base (13)..(13): a, c, u, g, unknown or other
auguuuaucuacncccuua

SEQ ID NO: 1822723 - RNA, 19 nt, Artificial Sequence
  Description of Artificial Sequence: Synthetic oligonucleotide
aggacgacccaggucccac

SEQ ID NO: 1822724 - RNA, 19 nt, Artificial Sequence
  Description of Artificial Sequence: Synthetic oligonucleotide
gcaacagcgcagcugucag

SEQ ID NO: 1822725 - RNA, 19 nt, Artificial Sequence
  Description of Artificial Sequence: Synthetic oligonucleotide
guauagucccauguacgca

SEQ ID NO: 1822726 - RNA, 19 nt, Artificial Sequence
  Description of Artificial Sequence: Synthetic oligonucleotide
ucuaggccauggugagaag

SEQ ID NO: 1822727 - RNA, 19 nt, Artificial Sequence
  Description of Artificial Sequence: Synthetic oligonucleotide
gaaaagguauaaaccaauu

SEQ ID NO: 1822728 - RNA, 19 nt, Artificial Sequence
  Description of Artificial Sequence: Synthetic oligonucleotide
ugucccuuuuagagacacu

SEQ ID NO: 1822729 - RNA, 19 nt, Artificial Sequence
  Description of Artificial Sequence: Synthetic oligonucleotide
accaaucggaauauucgaa

SEQ ID NO: 1822730 - RNA, 19 nt, Artificial Sequence
  Description of Artificial Sequence: Synthetic oligonucleotide
ggaggguuacaaaucucag

SEQ ID NO: 1822731 - RNA, 19 nt, Artificial Sequence
  Description of Artificial Sequence: Synthetic oligonucleotide
gaagagcacaccccaccaa

SEQ ID NO: 1822732 - RNA, 19 nt, Artificial Sequence
  Description of Artificial Sequence: Synthetic oligonucleotide
ccgauuuaucacuucagca

SEQ ID NO: 1822733 - RNA, 19 nt, Artificial Sequence
  Description of Artificial Sequence: Synthetic oligonucleotide
gguaagacuggaucucuaa

SEQ ID NO: 1822734 - RNA, 19 nt, Artificial Sequence
  Description of Artificial Sequence: Synthetic oligonucleotide
uggagcgaauauagacaaa

SEQ ID NO: 1822735 - RNA, 19 nt, Artificial Sequence
  Description of Artificial Sequence: Synthetic oligonucleotide
uagucccauguacgcaagu

SEQ ID NO: 1822736 - RNA, 19 nt, Artificial Sequence
  Description of Artificial Sequence: Synthetic oligonucleotide
ccuuacaaggacgacccag

SEQ ID NO: 1822737 - RNA, 19 nt, Artificial Sequence
  Description of Artificial Sequence: Synthetic oligonucleotide
uggaccgauuuaucacuuc

SEQ ID NO: 1822738 - RNA, 19 nt, Artificial Sequence
  Description of Artificial Sequence: Synthetic oligonucleotide
  modified_base (3)..(3): a, c, u, g, unknown or other
acncccuuacaaggacgac

SEQ ID NO: 1822739 - RNA, 19 nt, Artificial Sequence
  Description of Artificial Sequence: Synthetic oligonucleotide
cuccgcucggcgcugggag

SEQ ID NO: 1822740 - RNA, 19 nt, Artificial Sequence
  Description of Artificial Sequence: Synthetic oligonucleotide
ggcgcugggaggccgacag

SEQ ID NO: 1822741 - RNA, 19 nt, Artificial Sequence
  Description of Artificial Sequence: Synthetic oligonucleotide
acagcgcagcugucagcac

SEQ ID NO: 1822742 - RNA, 19 nt, Artificial Sequence
  Description of Artificial Sequence: Synthetic oligonucleotide
caaggacgacccagguccc

SEQ ID NO: 1822743 - RNA, 19 nt, Artificial Sequence
  Description of Artificial Sequence: Synthetic oligonucleotide
caggaggguuacaaaucuc

SEQ ID NO: 1822744 - RNA, 19 nt, Artificial Sequence
  Description of Artificial Sequence: Synthetic oligonucleotide
guuucaucgcuuccucaaa

SEQ ID NO: 1822745 - RNA, 19 nt, Artificial Sequence
  Description of Artificial Sequence: Synthetic oligonucleotide
aucucagaaguuaggggaa

SEQ ID NO: 1822746 - RNA, 19 nt, Artificial Sequence
  Description of Artificial Sequence: Synthetic oligonucleotide
caccgcugacugaaucacc

SEQ ID NO: 1822747 - RNA, 19 nt, Artificial Sequence
  Description of Artificial Sequence: Synthetic oligonucleotide
cuccauggaccgauuuauc

SEQ ID NO: 1822748 - RNA, 19 nt, Artificial Sequence
  Description of Artificial Sequence: Synthetic oligonucleotide
ccgagcacuacccucuuug

SEQ ID NO: 1822749 - RNA, 19 nt, Artificial Sequence
  Description of Artificial Sequence: Synthetic oligonucleotide
auagucccauguacgcaag

SEQ ID NO: 1822750 - RNA, 19 nt, Artificial Sequence
  Description of Artificial Sequence: Synthetic oligonucleotide
caccccaccaaucggaaua

SEQ ID NO: 1822751 - RNA, 19 nt, Artificial Sequence
  Description of Artificial Sequence: Synthetic oligonucleotide
agucccauguacgcaaguu

SEQ ID NO: 1822752 - RNA, 19 nt, Artificial Sequence
  Description of Artificial Sequence: Synthetic oligonucleotide
auauucgaaaagagucgaa

SEQ ID NO: 1822753 - RNA, 19 nt, Artificial Sequence
  Description of Artificial Sequence: Synthetic oligonucleotide
uugcgcaguuucaucgcuu

SEQ ID NO: 1822754 - RNA, 19 nt, Artificial Sequence
  Description of Artificial Sequence: Synthetic oligonucleotide
acccucuuugaaacugaag

SEQ ID NO: 1822755 - RNA, 19 nt, Artificial Sequence
  Description of Artificial Sequence: Synthetic oligonucleotide
ggagcgaauauagacaaau

SEQ ID NO: 1822756 - RNA, 19 nt, Artificial Sequence
  Description of Artificial Sequence: Synthetic oligonucleotide
gucgaauuccucuguugua

SEQ ID NO: 1822757 - RNA, 19 nt, Artificial Sequence
  Description of Artificial Sequence: Synthetic oligonucleotide
gagcgaauauagacaaaua

SEQ ID NO: 1822758 - RNA, 19 nt, Artificial Sequence
  Description of Artificial Sequence: Synthetic oligonucleotide
ccaaucggaauauucgaaa

SEQ ID NO: 1822759 - RNA, 19 nt, Artificial Sequence
  Description of Artificial Sequence: Synthetic oligonucleotide
gucagauguuccaccgcug

SEQ ID NO: 1822760 - RNA, 19 nt, Artificial Sequence
  Description of Artificial Sequence: Synthetic oligonucleotide
caagggaguucaguuuguc

SEQ ID NO: 1822761 - RNA, 19 nt, Artificial Sequence
  Description of Artificial Sequence: Synthetic oligonucleotide
cucugacgccaagagcaag

SEQ ID NO: 1822762 - RNA, 19 nt, Artificial Sequence
  Description of Artificial Sequence: Synthetic oligonucleotide
gggaaacuaauaaauuggu

SEQ ID NO: 1822763 - RNA, 19 nt, Artificial Sequence
  Description of Artificial Sequence: Synthetic oligonucleotide
aaggacgacccagguccca

SEQ ID NO: 1822764 - RNA, 19 nt, Artificial Sequence
  Description of Artificial Sequence: Synthetic oligonucleotide
cccuuuuaaaucagggaaa

SEQ ID NO: 1822765 - RNA, 19 nt, Artificial Sequence
  Description of Artificial Sequence: Synthetic oligonucleotide
gcgaauauagacaaauauu

SEQ ID NO: 1822766 - RNA, 19 nt, Artificial Sequence
  Description of Artificial Sequence: Synthetic oligonucleotide
agugaagacuucacccauu

SEQ ID NO: 1822767 - RNA, 19 nt, Artificial Sequence
  Description of Artificial Sequence: Synthetic oligonucleotide
ccggagcuccacaccaucg

SEQ ID NO: 1822768 - RNA, 19 nt, Artificial Sequence
  Description of Artificial Sequence: Synthetic oligonucleotide
cucccgggccugugaaagc

SEQ ID NO: 1822769 - RNA, 19 nt, Artificial Sequence
  Description of Artificial Sequence: Synthetic oligonucleotide
gcucccgggccugugaaag

SEQ ID NO: 1822770 - RNA, 19 nt, Artificial Sequence
  Description of Artificial Sequence: Synthetic oligonucleotide
caccaucguuacuacugca

SEQ ID NO: 1822771 - RNA, 19 nt, Artificial Sequence
  Description of Artificial Sequence: Synthetic oligonucleotide
gguacuguucuaggccaug

SEQ ID NO: 1822772 - RNA, 19 nt, Artificial Sequence
  Description of Artificial Sequence: Synthetic oligonucleotide
ucucacccuugggaaaaua

SEQ ID NO: 1822773 - RNA, 19 nt, Artificial Sequence
  Description of Artificial Sequence: Synthetic oligonucleotide
cagcuggguacccuuaacu

SEQ ID NO: 1822774 - RNA, 19 nt, Artificial Sequence
  Description of Artificial Sequence: Synthetic oligonucleotide
auggaccgauuuaucacuu

SEQ ID NO: 1822775 - RNA, 19 nt, Artificial Sequence
  Description of Artificial Sequence: Synthetic oligonucleotide
ggguacccuuaacuucugc

SEQ ID NO: 1822776 - RNA, 19 nt, Artificial Sequence
  Description of Artificial Sequence: Synthetic oligonucleotide
gguggcugaaugaaugagu

SEQ ID NO: 1822777 - RNA, 19 nt, Artificial Sequence
  Description of Artificial Sequence: Synthetic oligonucleotide
gcucggaguucaugagcag

SEQ ID NO: 1822778 - RNA, 19 nt, Artificial Sequence
  Description of Artificial Sequence: Synthetic oligonucleotide
cacaccccaccaaucggaa

SEQ ID NO: 1822779 - RNA, 19 nt, Artificial Sequence
  Description of Artificial Sequence: Synthetic oligonucleotide
gucaccggcuccaugcugu

SEQ ID NO: 1822780 - RNA, 19 nt, Artificial Sequence
  Description of Artificial Sequence: Synthetic oligonucleotide
accccaccaaucggaauau

SEQ ID NO: 1822781 - RNA, 19 nt, Artificial Sequence
  Description of Artificial Sequence: Synthetic oligonucleotide
cccaauaaucaagcaguuc

SEQ ID NO: 1822782 - RNA, 19 nt, Artificial Sequence
  Description of Artificial Sequence: Synthetic oligonucleotide
cccuuaacuucugccacac

SEQ ID NO: 1822783 - RNA, 19 nt, Artificial Sequence
  Description of Artificial Sequence: Synthetic oligonucleotide
uucucacccuugggaaaau

SEQ ID NO: 1822784 - RNA, 19 nt, Artificial Sequence
  Description of Artificial Sequence: Synthetic oligonucleotide
gacaggcccgagggcgcgg

SEQ ID NO: 1822785 - RNA, 19 nt, Artificial Sequence
  Description of Artificial Sequence: Synthetic oligonucleotide
gcaauguagaagcgaaauu

SEQ ID NO: 1822786 - RNA, 19 nt, Artificial Sequence
  Description of Artificial Sequence: Synthetic oligonucleotide
cggaauauucgaaaagagu

SEQ ID NO: 1822787 - RNA, 19 nt, Artificial Sequence
  Description of Artificial Sequence: Synthetic oligonucleotide
agguaagacuggaucucua

SEQ ID NO: 1822788 - RNA, 19 nt, Artificial Sequence
  Description of Artificial Sequence: Synthetic oligonucleotide
gucggcggacaccgucacc

SEQ ID NO: 1822789 - RNA, 19 nt, Artificial Sequence
  Description of Artificial Sequence: Synthetic oligonucleotide
gggccugugaaagcccaug

SEQ ID NO: 1822790 - RNA, 19 nt, Artificial Sequence
  Description of Artificial Sequence: Synthetic oligonucleotide
cugacgccaagagcaagaa

SEQ ID NO: 1822791 - RNA, 19 nt, Artificial Sequence
  Description of Artificial Sequence: Synthetic oligonucleotide
gguugaugcgcugcucgga

SEQ ID NO: 1822792 - RNA, 19 nt, Artificial Sequence
  Description of Artificial Sequence: Synthetic oligonucleotide
gcacaccccaccaaucgga

SEQ ID NO: 1822793 - RNA, 19 nt, Artificial Sequence
  Description of Artificial Sequence: Synthetic oligonucleotide
gcgcaguuucaucgcuucc

SEQ ID NO: 1822794 - RNA, 19 nt, Artificial Sequence
  Description of Artificial Sequence: Synthetic oligonucleotide
acgaaagcucugacgccaa

SEQ ID NO: 1822795 - RNA, 19 nt, Artificial Sequence
  Description of Artificial Sequence: Synthetic oligonucleotide
cccuugggaaaauauuugu

SEQ ID NO: 1822796 - RNA, 19 nt, Artificial Sequence
  Description of Artificial Sequence: Synthetic oligonucleotide
gcgaaauuguuuucacuuu

SEQ ID NO: 1822797 - RNA, 19 nt, Artificial Sequence
  Description of Artificial Sequence: Synthetic oligonucleotide
cccauguacgcaaguugca

SEQ ID NO: 1822798 - RNA, 19 nt, Artificial Sequence
  Description of Artificial Sequence: Synthetic oligonucleotide
ggccugucgccgccgucgg

SEQ ID NO: 1822799 - RNA, 19 nt, Artificial Sequence
  Description of Artificial Sequence: Synthetic oligonucleotide
ccaucguuacuacugcacu

SEQ ID NO: 1822800 - RNA, 19 nt, Artificial Sequence
  Description of Artificial Sequence: Synthetic oligonucleotide
ccgccgucggcggacaccg

SEQ ID NO: 1822801 - RNA, 19 nt, Artificial Sequence
  Description of Artificial Sequence: Synthetic oligonucleotide
cgaaaagagucgaauuccu

SEQ ID NO: 1822802 - RNA, 19 nt, Artificial Sequence
  Description of Artificial Sequence: Synthetic oligonucleotide
caccgucaccggcuccaug

SEQ ID NO: 1822803 - RNA, 19 nt, Artificial Sequence
  Description of Artificial Sequence: Synthetic oligonucleotide
cuucacccauuuugcuaua

SEQ ID NO: 1822804 - RNA, 19 nt, Artificial Sequence
  Description of Artificial Sequence: Synthetic oligonucleotide
ccauguacgcaaguugcaa

SEQ ID NO: 1822805 - RNA, 19 nt, Artificial Sequence
  Description of Artificial Sequence: Synthetic oligonucleotide
ggacaccgucaccggcucc

SEQ ID NO: 1822806 - RNA, 19 nt, Artificial Sequence
  Description of Artificial Sequence: Synthetic oligonucleotide
cucggcgcugggaggccga

SEQ ID NO: 1822807 - RNA, 19 nt, Artificial Sequence
  Description of Artificial Sequence: Synthetic oligonucleotide
cgaaagcucugacgccaag

SEQ ID NO: 1822808 - RNA, 19 nt, Artificial Sequence
  Description of Artificial Sequence: Synthetic oligonucleotide
gcgcugggaggccgacagg

SEQ ID NO: 1822809 - RNA, 19 nt, Artificial Sequence
  Description of Artificial Sequence: Synthetic oligonucleotide
cugucgggucaccucugcu

SEQ ID NO: 1822810 - RNA, 19 nt, Artificial Sequence
  Description of Artificial Sequence: Synthetic oligonucleotide
cagcuccgcucggcgcugg

SEQ ID NO: 1822811 - RNA, 19 nt, Artificial Sequence
  Description of Artificial Sequence: Synthetic oligonucleotide
gccgccgucggcggacacc

SEQ ID NO: 1822812 - RNA, 19 nt, Artificial Sequence
  Description of Artificial Sequence: Synthetic oligonucleotide
ccaagggaguucaguuugu

SEQ ID NO: 1822813 - RNA, 19 nt, Artificial Sequence
  Description of Artificial Sequence: Synthetic oligonucleotide
gcgcugcucggaguucaug

SEQ ID NO: 1822814 - RNA, 19 nt, Artificial Sequence
  Description of Artificial Sequence: Synthetic oligonucleotide
cggcggacaccgucaccgg

SEQ ID NO: 1822815 - RNA, 19 nt, Artificial Sequence
  Description of Artificial Sequence: Synthetic oligonucleotide
ggggaagguaagacuggau

SEQ ID NO: 1822816 - RNA, 19 nt, Artificial Sequence
  Description of Artificial Sequence: Synthetic oligonucleotide
cgucggcggacaccgucac

SEQ ID NO: 1822817 - RNA, 19 nt, Artificial Sequence
  Description of Artificial Sequence: Synthetic oligonucleotide
cugcuccgcugccggagcu

SEQ ID NO: 1822818 - RNA, 19 nt, Artificial Sequence
  Description of Artificial Sequence: Synthetic oligonucleotide
ccccaauaaucaagcaguu

SEQ ID NO: 1822819 - RNA, 19 nt, Artificial Sequence
  Description of Artificial Sequence: Synthetic oligonucleotide
ccacaccaucguuacuacu

SEQ ID NO: 1822820 - RNA, 19 nt, Artificial Sequence
  Description of Artificial Sequence: Synthetic oligonucleotide
cgacaggcccgagggcgcg

SEQ ID NO: 1822821 - RNA, 19 nt, Artificial Sequence
  Description of Artificial Sequence: Synthetic oligonucleotide
guuccaccgcugacugaau

SEQ ID NO: 1822822 - RNA, 19 nt, Artificial Sequence
  Description of Artificial Sequence: Synthetic oligonucleotide
gggaggccgacaggcccga

SEQ ID NO: 1822823 - RNA, 19 nt, Artificial Sequence
  Description of Artificial Sequence: Synthetic oligonucleotide
gcuccgcucggcgcuggga

SEQ ID NO: 1822824 - RNA, 19 nt, Artificial Sequence
  Description of Artificial Sequence: Synthetic oligonucleotide
ggaggccgacaggcccgag

SEQ ID NO: 1822825 - RNA, 19 nt, Artificial Sequence
  Description of Artificial Sequence: Synthetic oligonucleotide
cggagcuccacaccaucgu

SEQ ID NO: 1822826 - RNA, 19 nt, Artificial Sequence
  Description of Artificial Sequence: Synthetic oligonucleotide
caccggcuccaugcugucu

SEQ ID NO: 1822827 - RNA, 19 nt, Artificial Sequence
  Description of Artificial Sequence: Synthetic oligonucleotide
caccgagcacuacccucuu

SEQ ID NO: 1822828 - RNA, 19 nt, Artificial Sequence
  Description of Artificial Sequence: Synthetic oligonucleotide
gccugcugucgggucaccu

SEQ ID NO: 1822829 - RNA, 19 nt, Artificial Sequence
  Description of Artificial Sequence: Synthetic oligonucleotide
cgggccugucgccgccguc

SEQ ID NO: 1822830 - RNA, 19 nt, Artificial Sequence
  Description of Artificial Sequence: Synthetic oligonucleotide
ccgagggcgcggcgggccu

SEQ ID NO: 1822831 - RNA, 19 nt, Artificial Sequence
  Description of Artificial Sequence: Synthetic oligonucleotide
cgccgccgucggcggacac

SEQ ID NO: 1822832 - RNA, 19 nt, Artificial Sequence
  Description of Artificial Sequence: Synthetic oligonucleotide
cgggccugugaaagcccau

SEQ ID NO: 1822833 - RNA, 19 nt, Artificial Sequence
  Description of Artificial Sequence: Synthetic oligonucleotide
ccccaccaaucggaauauu

SEQ ID NO: 1822834 - RNA, 19 nt, Artificial Sequence
  Description of Artificial Sequence: Synthetic oligonucleotide
cgccgucggcggacaccgu

SEQ ID NO: 1822835 - RNA, 19 nt, Artificial Sequence
  Description of Artificial Sequence: Synthetic oligonucleotide
ucaucuaacaccaagaggc

SEQ ID NO: 1822836 - RNA, 19 nt, Artificial Sequence
  Description of Artificial Sequence: Synthetic oligonucleotide
aaaggaauguccaagauag

SEQ ID NO: 1822837 - RNA, 19 nt, Artificial Sequence
  Description of Artificial Sequence: Synthetic oligonucleotide
uccaagauagcacagauca

SEQ ID NO: 1822838 - RNA, 19 nt, Artificial Sequence
  Description of Artificial Sequence: Synthetic oligonucleotide
aaucucuagacgcucaucg

SEQ ID NO: 1822839 - RNA, 19 nt, Artificial Sequence
  Description of Artificial Sequence: Synthetic oligonucleotide
aaugaaagguuucaguuug

SEQ ID NO: 1822840 - RNA, 19 nt, Artificial Sequence
  Description of Artificial Sequence: Synthetic oligonucleotide
aaaaucaggaaugaaaggu

SEQ ID NO: 1822841 - RNA, 19 nt, Artificial Sequence
  Description of Artificial Sequence: Synthetic oligonucleotide
uucucaacaauuuuggucu

SEQ ID NO: 1822842 - RNA, 19 nt, Artificial Sequence
  Description of Artificial Sequence: Synthetic oligonucleotide
uuuggaaagaaccccagcc

SEQ ID NO: 1822843 - RNA, 19 nt, Artificial Sequence
  Description of Artificial Sequence: Synthetic oligonucleotide
gaaaagaguagguggaggg

SEQ ID NO: 1822844 - RNA, 19 nt, Artificial Sequence
  Description of Artificial Sequence: Synthetic oligonucleotide
aagaggagggacuugaugu

SEQ ID NO: 1822845 - RNA, 19 nt, Artificial Sequence
  Description of Artificial Sequence: Synthetic oligonucleotide
ugggauaaaaucaggaaug

SEQ ID NO: 1822846 - RNA, 19 nt, Artificial Sequence
  Description of Artificial Sequence: Synthetic oligonucleotide
caguuugugguccagaucg

SEQ ID NO: 1822847 - RNA, 19 nt, Artificial Sequence
  Description of Artificial Sequence: Synthetic oligonucleotide
gagggaaaagaguaggugg

SEQ ID NO: 1822848 - RNA, 19 nt, Artificial Sequence
  Description of Artificial Sequence: Synthetic oligonucleotide
ucagccauaggcuugcuag

SEQ ID NO: 1822849 - RNA, 19 nt, Artificial Sequence
  Description of Artificial Sequence: Synthetic oligonucleotide
ugguucucaacaauuuugg

SEQ ID NO: 1822850 - RNA, 19 nt, Artificial Sequence
  Description of Artificial Sequence: Synthetic oligonucleotide
auagcgagagcacaguagg

SEQ ID NO: 1822851 - RNA, 19 nt, Artificial Sequence
  Description of Artificial Sequence: Synthetic oligonucleotide
aaagaguagguggagggac

SEQ ID NO: 1822852 - RNA, 19 nt, Artificial Sequence
  Description of Artificial Sequence: Synthetic oligonucleotide
gcuguuaucagccauaggc

SEQ ID NO: 1822853 - RNA, 19 nt, Artificial Sequence
  Description of Artificial Sequence: Synthetic oligonucleotide
gucguuaaucucuagacgc

SEQ ID NO: 1822854 - RNA, 19 nt, Artificial Sequence
  Description of Artificial Sequence: Synthetic oligonucleotide
gauagcacagaucauguca

SEQ ID NO: 1822855 - RNA, 19 nt, Artificial Sequence
  Description of Artificial Sequence: Synthetic oligonucleotide
gcugcaaucaaucucaacc

SEQ ID NO: 1822856 - RNA, 19 nt, Artificial Sequence
  Description of Artificial Sequence: Synthetic oligonucleotide
ucuauuuggaaagaacccc

SEQ ID NO: 1822857 - RNA, 19 nt, Artificial Sequence
  Description of Artificial Sequence: Synthetic oligonucleotide
agcgguguaacucagagau

SEQ ID NO: 1822858 - RNA, 19 nt, Artificial Sequence
  Description of Artificial Sequence: Synthetic oligonucleotide
aucguuuucacugaaaccu

SEQ ID NO: 1822859 - RNA, 19 nt, Artificial Sequence
  Description of Artificial Sequence: Synthetic oligonucleotide
ucaucguuuucacugaaac

SEQ ID NO: 1822860 - RNA, 19 nt, Artificial Sequence
  Description of Artificial Sequence: Synthetic oligonucleotide
ucucuguuaaccauagcga

SEQ ID NO: 1822861 - RNA, 19 nt, Artificial Sequence
  Description of Artificial Sequence: Synthetic oligonucleotide
agacgagucaucaucaucg

SEQ ID NO: 1822862 - RNA, 19 nt, Artificial Sequence
  Description of Artificial Sequence: Synthetic oligonucleotide
caaucaaucucaaccgugg

SEQ ID NO: 1822863 - RNA, 19 nt, Artificial Sequence
  Description of Artificial Sequence: Synthetic oligonucleotide
aaucaaucucaaccguggg

SEQ ID NO: 1822864 - RNA, 19 nt, Artificial Sequence
  Description of Artificial Sequence: Synthetic oligonucleotide
agcgagagcuuuaaaaugc

SEQ ID NO: 1822865 - RNA, 19 nt, Artificial Sequence
  Description of Artificial Sequence: Synthetic oligonucleotide
cucuauuuggaaagaaccc

SEQ ID NO: 1822866 - RNA, 19 nt, Artificial Sequence
  Description of Artificial Sequence: Synthetic oligonucleotide
auuuggaaagaaccccagc

SEQ ID NO: 1822867 - RNA, 19 nt, Artificial Sequence
  Description of Artificial Sequence: Synthetic oligonucleotide
augcuuucaauccaggugu

SEQ ID NO: 1822868 - RNA, 19 nt, Artificial Sequence
  Description of Artificial Sequence: Synthetic oligonucleotide
uguuaagcugccagcaaag

SEQ ID NO: 1822869 - RNA, 19 nt, Artificial Sequence
  Description of Artificial Sequence: Synthetic oligonucleotide
agucguuaaucucuagacg

SEQ ID NO: 1822870 - RNA, 19 nt, Artificial Sequence
  Description of Artificial Sequence: Synthetic oligonucleotide
gucaaugucaggcaugggc

SEQ ID NO: 1822871 - RNA, 19 nt, Artificial Sequence
  Description of Artificial Sequence: Synthetic oligonucleotide
aacaccaagaggccaaggu

SEQ ID NO: 1822872 - RNA, 19 nt, Artificial Sequence
  Description of Artificial Sequence: Synthetic oligonucleotide
ugcaucgccagccugggag

SEQ ID NO: 1822873 - RNA, 19 nt, Artificial Sequence
  Description of Artificial Sequence: Synthetic oligonucleotide
uuugaaacacagcccuagg

SEQ ID NO: 1822874 - RNA, 19 nt, Artificial Sequence
  Description of Artificial Sequence: Synthetic oligonucleotide
gagucguuaaucucuagac

SEQ ID NO: 1822875 - RNA, 19 nt, Artificial Sequence
  Description of Artificial Sequence: Synthetic oligonucleotide
aaacucuggggaccacucc

SEQ ID NO: 1822876 - RNA, 19 nt, Artificial Sequence
  Description of Artificial Sequence: Synthetic oligonucleotide
uucagcgagagcuuuaaaa

SEQ ID NO: 1822877 - RNA, 19 nt, Artificial Sequence
  Description of Artificial Sequence: Synthetic oligonucleotide
uauuuggaaagaaccccag

SEQ ID NO: 1822878 - RNA, 19 nt, Artificial Sequence
  Description of Artificial Sequence: Synthetic oligonucleotide
gaugguucaucuaacacca

SEQ ID NO: 1822879 - RNA, 19 nt, Artificial Sequence
  Description of Artificial Sequence: Synthetic oligonucleotide
ucagcgagagcuuuaaaau

SEQ ID NO: 1822880 - RNA, 19 nt, Artificial Sequence
  Description of Artificial Sequence: Synthetic oligonucleotide
uuaagcugccagcaaagac

SEQ ID NO: 1822881 - RNA, 19 nt, Artificial Sequence
  Description of Artificial Sequence: Synthetic oligonucleotide
ugaauucugaguagaggga

SEQ ID NO: 1822882 - RNA, 19 nt, Artificial Sequence
  Description of Artificial Sequence: Synthetic oligonucleotide
cucaucguaagucugguuc

SEQ ID NO: 1822883 - RNA, 19 nt, Artificial Sequence
  Description of Artificial Sequence: Synthetic oligonucleotide
guucucaacaauuuugguc

SEQ ID NO: 1822884 - RNA, 19 nt, Artificial Sequence
  Description of Artificial Sequence: Synthetic oligonucleotide
uguugcgugauguugugcu

SEQ ID NO: 1822885 - RNA, 19 nt, Artificial Sequence
  Description of Artificial Sequence: Synthetic oligonucleotide
cucuguuaaccauagcgag

SEQ ID NO: 1822886 - RNA, 19 nt, Artificial Sequence
  Description of Artificial Sequence: Synthetic oligonucleotide
ugguguagugcacagucgc

SEQ ID NO: 1822887 - RNA, 19 nt, Artificial Sequence
  Description of Artificial Sequence: Synthetic oligonucleotide
uuaaccauagcgagagcac

SEQ ID NO: 1822888 - RNA, 19 nt, Artificial Sequence
  Description of Artificial Sequence: Synthetic oligonucleotide
agaucgaucagcugaggug

SEQ ID NO: 1822889 - RNA, 19 nt, Artificial Sequence
  Description of Artificial Sequence: Synthetic oligonucleotide
ucucagacgagucaucauc

SEQ ID NO: 1822890 - RNA, 19 nt, Artificial Sequence
  Description of Artificial Sequence: Synthetic oligonucleotide
uagaugguucaucuaacac

SEQ ID NO: 1822891 - RNA, 19 nt, Artificial Sequence
  Description of Artificial Sequence: Synthetic oligonucleotide
agagcgguguaacucagag

SEQ ID NO: 1822892 - RNA, 19 nt, Artificial Sequence
  Description of Artificial Sequence: Synthetic oligonucleotide
cugaauccgacucuuguag

SEQ ID NO: 1822893 - RNA, 19 nt, Artificial Sequence
  Description of Artificial Sequence: Synthetic oligonucleotide
ucuguuaaccauagcgaga

SEQ ID NO: 1822894 - RNA, 19 nt, Artificial Sequence
  Description of Artificial Sequence: Synthetic oligonucleotide
agguuagugucucugcauc

SEQ ID NO: 1822895 - RNA, 19 nt, Artificial Sequence
  Description of Artificial Sequence: Synthetic oligonucleotide
caagauagcacagaucaug

SEQ ID NO: 1822896 - RNA, 19 nt, Artificial Sequence
  Description of Artificial Sequence: Synthetic oligonucleotide
ucuaacaccaagaggccaa

SEQ ID NO: 1822897 - RNA, 19 nt, Artificial Sequence
  Description of Artificial Sequence: Synthetic oligonucleotide
uuggaaagaaccccagccu

SEQ ID NO: 1822898 - RNA, 19 nt, Artificial Sequence
  Description of Artificial Sequence: Synthetic oligonucleotide
gaucauaggccccuuccag

SEQ ID NO: 1822899 - RNA, 19 nt, Artificial Sequence
  Description of Artificial Sequence: Synthetic oligonucleotide
cuguuaaccauagcgagag

SEQ ID NO: 1822900 - RNA, 19 nt, Artificial Sequence
  Description of Artificial Sequence: Synthetic oligonucleotide
uuucauauguugcgugaug

SEQ ID NO: 1822901 - RNA, 19 nt, Artificial Sequence
  Description of Artificial Sequence: Synthetic oligonucleotide
cagugugucaaugucaggc

SEQ ID NO: 1822902 - RNA, 19 nt, Artificial Sequence
  Description of Artificial Sequence: Synthetic oligonucleotide
auagucugcaggaucauag

SEQ ID NO: 1822903 - RNA, 19 nt, Artificial Sequence
  Description of Artificial Sequence: Synthetic oligonucleotide
ucauaggccccuuccagag

SEQ ID NO: 1822904 - RNA, 19 nt, Artificial Sequence
  Description of Artificial Sequence: Synthetic oligonucleotide
uccucuauuuggaaagaac

SEQ ID NO: 1822905 - RNA, 19 nt, Artificial Sequence
  Description of Artificial Sequence: Synthetic oligonucleotide
cauagcgagagcacaguag

SEQ ID NO: 1822906 - RNA, 19 nt, Artificial Sequence
  Description of Artificial Sequence: Synthetic oligonucleotide
uccagaucgaucagcugag

SEQ ID NO: 1822907 - RNA, 19 nt, Artificial Sequence
  Description of Artificial Sequence: Synthetic oligonucleotide
aggaaugaaagguuucagu

SEQ ID NO: 1822908 - RNA, 19 nt, Artificial Sequence
  Description of Artificial Sequence: Synthetic oligonucleotide
ugaagguuagugucucugc

SEQ ID NO: 1822909 - RNA, 19 nt, Artificial Sequence
  Description of Artificial Sequence: Synthetic oligonucleotide
uuuucacugaaaccucgcu

SEQ ID NO: 1822910 - RNA, 19 nt, Artificial Sequence
  Description of Artificial Sequence: Synthetic oligonucleotide
agaaccccagccuaggacu

SEQ ID NO: 1822911 - RNA, 19 nt, Artificial Sequence
  Description of Artificial Sequence: Synthetic oligonucleotide
agugaaugcuuucuugccu

SEQ ID NO: 1822912 - RNA, 19 nt, Artificial Sequence
  Description of Artificial Sequence: Synthetic oligonucleotide
uccguuuccucuauuugga

SEQ ID NO: 1822913 - RNA, 19 nt, Artificial Sequence
  Description of Artificial Sequence: Synthetic oligonucleotide
caucguuuucacugaaacc

SEQ ID NO: 1822914 - RNA, 19 nt, Artificial Sequence
  Description of Artificial Sequence: Synthetic oligonucleotide
uggagugcuaauacuggca

SEQ ID NO: 1822915 - RNA, 19 nt, Artificial Sequence
  Description of Artificial Sequence: Synthetic oligonucleotide
ucuucaaacucuggggacc

SEQ ID NO: 1822916 - RNA, 19 nt, Artificial Sequence
  Description of Artificial Sequence: Synthetic oligonucleotide
aagauagcacagaucaugu

SEQ ID NO: 1822917 - RNA, 19 nt, Artificial Sequence
  Description of Artificial Sequence: Synthetic oligonucleotide
aacucagagaugcuuucaa

SEQ ID NO: 1822918 - RNA, 19 nt, Artificial Sequence
  Description of Artificial Sequence: Synthetic oligonucleotide
uccgacucuuguagaaagg

SEQ ID NO: 1822919 - RNA, 19 nt, Artificial Sequence
  Description of Artificial Sequence: Synthetic oligonucleotide
ucaucguaagucugguucu

SEQ ID NO: 1822920 - RNA, 19 nt, Artificial Sequence
  Description of Artificial Sequence: Synthetic oligonucleotide
auccgacucuuguagaaag

SEQ ID NO: 1822921 - RNA, 19 nt, Artificial Sequence
  Description of Artificial Sequence: Synthetic oligonucleotide
acuuucauauguugcguga

SEQ ID NO: 1822922 - RNA, 19 nt, Artificial Sequence
  Description of Artificial Sequence: Synthetic oligonucleotide
gaagacuggcagaaagagg

SEQ ID NO: 1822923 - RNA, 19 nt, Artificial Sequence
  Description of Artificial Sequence: Synthetic oligonucleotide
uuggagugcuaauacuggc

SEQ ID NO: 1822924 - RNA, 19 nt, Artificial Sequence
  Description of Artificial Sequence: Synthetic oligonucleotide
ucuuguagaaaggaauguc

SEQ ID NO: 1822925 - RNA, 19 nt, Artificial Sequence
  Description of Artificial Sequence: Synthetic oligonucleotide
guuaaccauagcgagagca

SEQ ID NO: 1822926 - RNA, 19 nt, Artificial Sequence
  Description of Artificial Sequence: Synthetic oligonucleotide
ucacugaaaccucgcugcg

SEQ ID NO: 1822927 - RNA, 19 nt, Artificial Sequence
  Description of Artificial Sequence: Synthetic oligonucleotide
agggacuugauguccuggg

SEQ ID NO: 1822928 - RNA, 19 nt, Artificial Sequence
  Description of Artificial Sequence: Synthetic oligonucleotide
aaucagucucagacgaguc

SEQ ID NO: 1822929 - RNA, 19 nt, Artificial Sequence
  Description of Artificial Sequence: Synthetic oligonucleotide
ugcaaucaaucucaaccgu

SEQ ID NO: 1822930 - RNA, 19 nt, Artificial Sequence
  Description of Artificial Sequence: Synthetic oligonucleotide
ucaucaucguuuucacuga

SEQ ID NO: 1822931 - RNA, 19 nt, Artificial Sequence
  Description of Artificial Sequence: Synthetic oligonucleotide
gacuggcagaugcucauag

SEQ ID NO: 1822932 - RNA, 19 nt, Artificial Sequence
  Description of Artificial Sequence: Synthetic oligonucleotide
guccagaucgaucagcuga

SEQ ID NO: 1822933 - RNA, 19 nt, Artificial Sequence
  Description of Artificial Sequence: Synthetic oligonucleotide
uguuaucagccauaggcuu

SEQ ID NO: 1822934 - RNA, 19 nt, Artificial Sequence
  Description of Artificial Sequence: Synthetic oligonucleotide
acagcugggauaaaaucag

SEQ ID NO: 1822935 - RNA, 19 nt, Artificial Sequence
  Description of Artificial Sequence: Synthetic oligonucleotide
aaaucaggaaugaaagguu

SEQ ID NO: 1822936 - RNA, 19 nt, Artificial Sequence
  Description of Artificial Sequence: Synthetic oligonucleotide
cuauuuggaaagaacccca

SEQ ID NO: 1822937 - RNA, 19 nt, Artificial Sequence
  Description of Artificial Sequence: Synthetic oligonucleotide
ucguuaaucucuagacgcu

SEQ ID NO: 1822938 - RNA, 19 nt, Artificial Sequence
  Description of Artificial Sequence: Synthetic oligonucleotide
uuagagcgguguaacucag

SEQ ID NO: 1822939 - RNA, 19 nt, Artificial Sequence
  Description of Artificial Sequence: Synthetic oligonucleotide
agauagcacagaucauguc

SEQ ID NO: 1822940 - RNA, 19 nt, Artificial Sequence
  Description of Artificial Sequence: Synthetic oligonucleotide
ucgucaucagacuuugaaa

SEQ ID NO: 1822941 - RNA, 19 nt, Artificial Sequence
  Description of Artificial Sequence: Synthetic oligonucleotide
agcuccuugaucucagcug

SEQ ID NO: 1822942 - RNA, 19 nt, Artificial Sequence
  Description of Artificial Sequence: Synthetic oligonucleotide
guagugcacagucgcaggg

SEQ ID NO: 1822943 - RNA, 19 nt, Artificial Sequence
  Description of Artificial Sequence: Synthetic oligonucleotide
agcugagguguguaccggc

SEQ ID NO: 1822944 - RNA, 19 nt, Artificial Sequence
  Description of Artificial Sequence: Synthetic oligonucleotide
ucucuagacgcucaucgua

SEQ ID NO: 1822945 - RNA, 19 nt, Artificial Sequence
  Description of Artificial Sequence: Synthetic oligonucleotide
ugagguguguaccggcuga

SEQ ID NO: 1822946 - RNA, 19 nt, Artificial Sequence
  Description of Artificial Sequence: Synthetic oligonucleotide
ucaaccgugggcagacuca

SEQ ID NO: 1822947 - RNA, 19 nt, Artificial Sequence
  Description of Artificial Sequence: Synthetic oligonucleotide
agagggaaaagaguaggug

SEQ ID NO: 1822948 - RNA, 19 nt, Artificial Sequence
  Description of Artificial Sequence: Synthetic oligonucleotide
cuuagagcgguguaacuca

SEQ ID NO: 1822949 - RNA, 19 nt, Artificial Sequence
  Description of Artificial Sequence: Synthetic oligonucleotide
augucaauguagucggcca

SEQ ID NO: 1822950 - RNA, 19 nt, Artificial Sequence
  Description of Artificial Sequence: Synthetic oligonucleotide
auaggccccuuccagaggu

SEQ ID NO: 1822951 - RNA, 19 nt, Artificial Sequence
  Description of Artificial Sequence: Synthetic oligonucleotide
aaagaaccccagccuagga

SEQ ID NO: 1822952 - RNA, 19 nt, Artificial Sequence
  Description of Artificial Sequence: Synthetic oligonucleotide
aaccauagcgagagcacag

SEQ ID NO: 1822953 - RNA, 19 nt, Artificial Sequence
  Description of Artificial Sequence: Synthetic oligonucleotide
uagcgagagcacaguaggg

SEQ ID NO: 1822954 - RNA, 19 nt, Artificial Sequence
  Description of Artificial Sequence: Synthetic oligonucleotide
uauguugcgugauguugug

SEQ ID NO: 1822955 - RNA, 19 nt, Artificial Sequence
  Description of Artificial Sequence: Synthetic oligonucleotide
uucccaagagcucuucaaa

SEQ ID NO: 1822956 - RNA, 19 nt, Artificial Sequence
  Description of Artificial Sequence: Synthetic oligonucleotide
gugauguugugcugcuugg

SEQ ID NO: 1822957 - RNA, 19 nt, Artificial Sequence
  Description of Artificial Sequence: Synthetic oligonucleotide
ucuagacgcucaucguaag

SEQ ID NO: 1822958 - RNA, 19 nt, Artificial Sequence
  Description of Artificial Sequence: Synthetic oligonucleotide
uuaaucucuagacgcucau

SEQ ID NO: 1822959 - RNA, 19 nt, Artificial Sequence
  Description of Artificial Sequence: Synthetic oligonucleotide
aaggaauguccaagauagc

SEQ ID NO: 1822960 - RNA, 19 nt, Artificial Sequence
  Description of Artificial Sequence: Synthetic oligonucleotide
cagaaucagucucagacga

SEQ ID NO: 1822961 - RNA, 19 nt, Artificial Sequence
  Description of Artificial Sequence: Synthetic oligonucleotide
gagggacugaauccgacuc

SEQ ID NO: 1822962 - RNA, 19 nt, Artificial Sequence
  Description of Artificial Sequence: Synthetic oligonucleotide
uuggacggaggagugaaug

SEQ ID NO: 1822963 - RNA, 19 nt, Artificial Sequence
  Description of Artificial Sequence: Synthetic oligonucleotide
ugaauccgacucuuguaga

SEQ ID NO: 1822964 - RNA, 19 nt, Artificial Sequence
  Description of Artificial Sequence: Synthetic oligonucleotide
auaggcuugcuaggaagac

SEQ ID NO: 1822965 - RNA, 19 nt, Artificial Sequence
  Description of Artificial Sequence: Synthetic oligonucleotide
uggacggaggagugaaugc

SEQ ID NO: 1822966 - RNA, 19 nt, Artificial Sequence
  Description of Artificial Sequence: Synthetic oligonucleotide
cagcgagagcuuuaaaaug

SEQ ID NO: 1822967 - RNA, 19 nt, Artificial Sequence
  Description of Artificial Sequence: Synthetic oligonucleotide
uaaccauagcgagagcaca

SEQ ID NO: 1822968 - RNA, 19 nt, Artificial Sequence
  Description of Artificial Sequence: Synthetic oligonucleotide
caacaauuuuggucuguag

SEQ ID NO: 1822969 - RNA, 19 nt, Artificial Sequence
  Description of Artificial Sequence: Synthetic oligonucleotide
uagacgcucaucguaaguc

SEQ ID NO: 1822970 - RNA, 19 nt, Artificial Sequence
  Description of Artificial Sequence: Synthetic oligonucleotide
aagaggccaagguggucag

SEQ ID NO: 1822971 - RNA, 19 nt, Artificial Sequence
  Description of Artificial Sequence: Synthetic oligonucleotide
aacacagcccuaggaggcg

SEQ ID NO: 1822972 - RNA, 19 nt, Artificial Sequence
  Description of Artificial Sequence: Synthetic oligonucleotide
gguuagugucucugcaucg

SEQ ID NO: 1822973 - RNA, 19 nt, Artificial Sequence
  Description of Artificial Sequence: Synthetic oligonucleotide
cacuuucauauguugcgug

SEQ ID NO: 1822974 - RNA, 19 nt, Artificial Sequence
  Description of Artificial Sequence: Synthetic oligonucleotide
guagaugguucaucuaaca

SEQ ID NO: 1822975 - RNA, 19 nt, Artificial Sequence
  Description of Artificial Sequence: Synthetic oligonucleotide
auauguugcgugauguugu

SEQ ID NO: 1822976 - RNA, 19 nt, Artificial Sequence
  Description of Artificial Sequence: Synthetic oligonucleotide
augaagguuagugucucug

SEQ ID NO: 1822977 - RNA, 19 nt, Artificial Sequence
  Description of Artificial Sequence: Synthetic oligonucleotide
aucucaaccgugggcagac

SEQ ID NO: 1822978 - RNA, 19 nt, Artificial Sequence
  Description of Artificial Sequence: Synthetic oligonucleotide
agacucaccuuucccaaga

SEQ ID NO: 1822979 - RNA, 19 nt, Artificial Sequence
  Description of Artificial Sequence: Synthetic oligonucleotide
aucauaggccccuuccaga

SEQ ID NO: 1822980 - RNA, 19 nt, Artificial Sequence
  Description of Artificial Sequence: Synthetic oligonucleotide
uguaccggcugauguauuc

SEQ ID NO: 1822981 - RNA, 19 nt, Artificial Sequence
  Description of Artificial Sequence: Synthetic oligonucleotide
gcggugucaacugugaggg

SEQ ID NO: 1822982 - RNA, 19 nt, Artificial Sequence
  Description of Artificial Sequence: Synthetic oligonucleotide
gguuggagugcuaauacug

SEQ ID NO: 1822983 - RNA, 19 nt, Artificial Sequence
  Description of Artificial Sequence: Synthetic oligonucleotide
cugguguagugcacagucg

SEQ ID NO: 1822984 - RNA, 19 nt, Artificial Sequence
  Description of Artificial Sequence: Synthetic oligonucleotide
ucguuuucacugaaaccuc

SEQ ID NO: 1822985 - RNA, 19 nt, Artificial Sequence
  Description of Artificial Sequence: Synthetic oligonucleotide
agacgcucaucguaagucu

SEQ ID NO: 1822986 - RNA, 19 nt, Artificial Sequence
  Description of Artificial Sequence: Synthetic oligonucleotide
ugaaaccucgcugcggugu

SEQ ID NO: 1822987 - RNA, 19 nt, Artificial Sequence
  Description of Artificial Sequence: Synthetic oligonucleotide
uuuguagaugguucaucua

SEQ ID NO: 1822988 - RNA, 19 nt, Artificial Sequence
  Description of Artificial Sequence: Synthetic oligonucleotide
gaauccgacucuuguagaa

SEQ ID NO: 1822989 - RNA, 19 nt, Artificial Sequence
  Description of Artificial Sequence: Synthetic oligonucleotide
ugaucucagcugagacugg

SEQ ID NO: 1822990 - RNA, 19 nt, Artificial Sequence
  Description of Artificial Sequence: Synthetic oligonucleotide
ucacuuucauauguugcgu

SEQ ID NO: 1822991 - RNA, 19 nt, Artificial Sequence
  Description of Artificial Sequence: Synthetic oligonucleotide
ugcuguuaucagccauagg

SEQ ID NO: 1822992 - RNA, 19 nt, Artificial Sequence
  Description of Artificial Sequence: Synthetic oligonucleotide
ggaguucuugaauucugag

SEQ ID NO: 1822993 - RNA, 19 nt, Artificial Sequence
  Description of Artificial Sequence: Synthetic oligonucleotide
caucagugugucaauguca

SEQ ID NO: 1822994 - RNA, 19 nt, Artificial Sequence
  Description of Artificial Sequence: Synthetic oligonucleotide
gguggagggacugaauccg

SEQ ID NO: 1822995 - RNA, 19 nt, Artificial Sequence
  Description of Artificial Sequence: Synthetic oligonucleotide
guaacucagagaugcuuuc

SEQ ID NO: 1822996 - RNA, 19 nt, Artificial Sequence
  Description of Artificial Sequence: Synthetic oligonucleotide
uugcgugauguugugcugc

SEQ ID NO: 1822997 - RNA, 19 nt, Artificial Sequence
  Description of Artificial Sequence: Synthetic oligonucleotide
uugggauucuuuucugcau

SEQ ID NO: 1822998 - RNA, 19 nt, Artificial Sequence
  Description of Artificial Sequence: Synthetic oligonucleotide
ugggcagacucaccuuucc

SEQ ID NO: 1822999 - RNA, 19 nt, Artificial Sequence
  Description of Artificial Sequence: Synthetic oligonucleotide
caaacucuggggaccacuc

SEQ ID NO: 1823000 - RNA, 19 nt, Artificial Sequence
  Description of Artificial Sequence: Synthetic oligonucleotide
agcacaguagggucugacu

SEQ ID NO: 1823001 - RNA, 19 nt, Artificial Sequence
  Description of Artificial Sequence: Synthetic oligonucleotide
uaauacuggcaaccucuuc

SEQ ID NO: 1823002 - RNA, 19 nt, Artificial Sequence
  Description of Artificial Sequence: Synthetic oligonucleotide
ucaacaauuuuggucugua

SEQ ID NO: 1823003 - RNA, 19 nt, Artificial Sequence
  Description of Artificial Sequence: Synthetic oligonucleotide
agggaaaagaguaggugga

SEQ ID NO: 1823004 - RNA, 19 nt, Artificial Sequence
  Description of Artificial Sequence: Synthetic oligonucleotide
gaucgaucagcugaggugu

SEQ ID NO: 1823005 - RNA, 19 nt, Artificial Sequence
  Description of Artificial Sequence: Synthetic oligonucleotide
cauaggcuugcuaggaaga

SEQ ID NO: 1823006 - RNA, 19 nt, Artificial Sequence
  Description of Artificial Sequence: Synthetic oligonucleotide
gcucagaugaagguuagug

SEQ ID NO: 1823007 - RNA, 19 nt, Artificial Sequence
  Description of Artificial Sequence: Synthetic oligonucleotide
auacucaucacugcuguua

SEQ ID NO: 1823008 - RNA, 19 nt, Artificial Sequence
  Description of Artificial Sequence: Synthetic oligonucleotide
uguguaccggcugauguau

SEQ ID NO: 1823009 - RNA, 19 nt, Artificial Sequence
  Description of Artificial Sequence: Synthetic oligonucleotide
aauucugaguagagggaaa

SEQ ID NO: 1823010 - RNA, 19 nt, Artificial Sequence
  Description of Artificial Sequence: Synthetic oligonucleotide
gauguuaagcugccagcaa

SEQ ID NO: 1823011 - RNA, 19 nt, Artificial Sequence
  Description of Artificial Sequence: Synthetic oligonucleotide
uguuaaccauagcgagagc

SEQ ID NO: 1823012 - RNA, 19 nt, Artificial Sequence
  Description of Artificial Sequence: Synthetic oligonucleotide
aauccgacucuuguagaaa

SEQ ID NO: 1823013 - RNA, 19 nt, Artificial Sequence
  Description of Artificial Sequence: Synthetic oligonucleotide
uccccaacagcugggauaa

SEQ ID NO: 1823014 - RNA, 19 nt, Artificial Sequence
  Description of Artificial Sequence: Synthetic oligonucleotide
gagggacuugauguccugg

SEQ ID NO: 1823015 - RNA, 19 nt, Artificial Sequence
  Description of Artificial Sequence: Synthetic oligonucleotide
gccgauguuaagcugccag

SEQ ID NO: 1823016 - RNA, 19 nt, Artificial Sequence
  Description of Artificial Sequence: Synthetic oligonucleotide
gaucagcugagguguguac

SEQ ID NO: 1823017 - RNA, 19 nt, Artificial Sequence
  Description of Artificial Sequence: Synthetic oligonucleotide
guuuucacugaaaccucgc

SEQ ID NO: 1823018 - RNA, 19 nt, Artificial Sequence
  Description of Artificial Sequence: Synthetic oligonucleotide
cagccauaggcuugcuagg

SEQ ID NO: 1823019 - RNA, 19 nt, Artificial Sequence
  Description of Artificial Sequence: Synthetic oligonucleotide
cuuccgagucguuaaucuc

SEQ ID NO: 1823020 - RNA, 19 nt, Artificial Sequence
  Description of Artificial Sequence: Synthetic oligonucleotide
agcgagagcacaguagggu

SEQ ID NO: 1823021 - RNA, 19 nt, Artificial Sequence
  Description of Artificial Sequence: Synthetic oligonucleotide
agcugggauaaaaucagga

SEQ ID NO: 1823022 - RNA, 19 nt, Artificial Sequence
  Description of Artificial Sequence: Synthetic oligonucleotide
auguugcgugauguugugc

SEQ ID NO: 1823023 - RNA, 19 nt, Artificial Sequence
  Description of Artificial Sequence: Synthetic oligonucleotide
ucguaagucugguucucaa

SEQ ID NO: 1823024 - RNA, 19 nt, Artificial Sequence
  Description of Artificial Sequence: Synthetic oligonucleotide
uagucggccaggcugcaau

SEQ ID NO: 1823025 - RNA, 19 nt, Artificial Sequence
  Description of Artificial Sequence: Synthetic oligonucleotide
cucgcugcggugucaacug

SEQ ID NO: 1823026 - RNA, 19 nt, Artificial Sequence
  Description of Artificial Sequence: Synthetic oligonucleotide
aaucucaaccgugggcaga

SEQ ID NO: 1823027 - RNA, 19 nt, Artificial Sequence
  Description of Artificial Sequence: Synthetic oligonucleotide
aucucuagacgcucaucgu

SEQ ID NO: 1823028 - RNA, 19 nt, Artificial Sequence
  Description of Artificial Sequence: Synthetic oligonucleotide
ggaauguccaagauagcac

SEQ ID NO: 1823029 - RNA, 19 nt, Artificial Sequence
  Description of Artificial Sequence: Synthetic oligonucleotide
aagaguagguggagggacu

SEQ ID NO: 1823030 - RNA, 19 nt, Artificial Sequence
  Description of Artificial Sequence: Synthetic oligonucleotide
uaacaccaagaggccaagg

SEQ ID NO: 1823031 - RNA, 19 nt, Artificial Sequence
  Description of Artificial Sequence: Synthetic oligonucleotide
gacugaauccgacucuugu

SEQ ID NO: 1823032 - RNA, 19 nt, Artificial Sequence
  Description of Artificial Sequence: Synthetic oligonucleotide
ugcaggaucauaggccccu

SEQ ID NO: 1823033 - RNA, 19 nt, Artificial Sequence
  Description of Artificial Sequence: Synthetic oligonucleotide
ggaaugaaagguuucaguu

SEQ ID NO: 1823034 - RNA, 19 nt, Artificial Sequence
  Description of Artificial Sequence: Synthetic oligonucleotide
cugggauaaaaucaggaau

SEQ ID NO: 1823035 - RNA, 19 nt, Artificial Sequence
  Description of Artificial Sequence: Synthetic oligonucleotide
accucuuccgagucguuaa

SEQ ID NO: 1823036 - RNA, 19 nt, Artificial Sequence
  Description of Artificial Sequence: Synthetic oligonucleotide
gucaauggcuuugggauuc

SEQ ID NO: 1823037 - RNA, 19 nt, Artificial Sequence
  Description of Artificial Sequence: Synthetic oligonucleotide
gacucuuguagaaaggaau

SEQ ID NO: 1823038 - RNA, 19 nt, Artificial Sequence
  Description of Artificial Sequence: Synthetic oligonucleotide
guuaaucucuagacgcuca

SEQ ID NO: 1823039 - RNA, 19 nt, Artificial Sequence
  Description of Artificial Sequence: Synthetic oligonucleotide
guagggucugacugcuuug

SEQ ID NO: 1823040 - RNA, 19 nt, Artificial Sequence
  Description of Artificial Sequence: Synthetic oligonucleotide
augucgucaucagacuuug

SEQ ID NO: 1823041 - RNA, 19 nt, Artificial Sequence
  Description of Artificial Sequence: Synthetic oligonucleotide
gaaucagucucagacgagu

SEQ ID NO: 1823042 - RNA, 19 nt, Artificial Sequence
  Description of Artificial Sequence: Synthetic oligonucleotide
auccccaacagcugggaua

SEQ ID NO: 1823043 - RNA, 19 nt, Artificial Sequence
  Description of Artificial Sequence: Synthetic oligonucleotide
guugcgugauguugugcug

SEQ ID NO: 1823044 - RNA, 19 nt, Artificial Sequence
  Description of Artificial Sequence: Synthetic oligonucleotide
uucuccuuguuguuuucuu

SEQ ID NO: 1823045 - RNA, 19 nt, Artificial Sequence
  Description of Artificial Sequence: Synthetic oligonucleotide
aguuggacggaggagugaa

SEQ ID NO: 1823046 - RNA, 19 nt, Artificial Sequence
  Description of Artificial Sequence: Synthetic oligonucleotide
cucuagacgcucaucguaa

SEQ ID NO: 1823047 - RNA, 19 nt, Artificial Sequence
  Description of Artificial Sequence: Synthetic oligonucleotide
ccggcugauguauucaaag

SEQ ID NO: 1823048 - RNA, 19 nt, Artificial Sequence
  Description of Artificial Sequence: Synthetic oligonucleotide
aggugucaauggcuuuggg

SEQ ID NO: 1823049 - RNA, 19 nt, Artificial Sequence
  Description of Artificial Sequence: Synthetic oligonucleotide
uccgagucguuaaucucua

SEQ ID NO: 1823050 - RNA, 19 nt, Artificial Sequence
  Description of Artificial Sequence: Synthetic oligonucleotide
agucggccaggcugcaauc

SEQ ID NO: 1823051 - RNA, 19 nt, Artificial Sequence
  Description of Artificial Sequence: Synthetic oligonucleotide
cuguuaucagccauaggcu

SEQ ID NO: 1823052 - RNA, 19 nt, Artificial Sequence
  Description of Artificial Sequence: Synthetic oligonucleotide
cuuucaauccaggugucaa

SEQ ID NO: 1823053 - RNA, 19 nt, Artificial Sequence
  Description of Artificial Sequence: Synthetic oligonucleotide
cucaaccgugggcagacuc

SEQ ID NO: 1823054 - RNA, 19 nt, Artificial Sequence
  Description of Artificial Sequence: Synthetic oligonucleotide
ggaaagaaccccagccuag

SEQ ID NO: 1823055 - RNA, 19 nt, Artificial Sequence
  Description of Artificial Sequence: Synthetic oligonucleotide
cauaggccccuuccagagg

SEQ ID NO: 1823056 - RNA, 19 nt, Artificial Sequence
  Description of Artificial Sequence: Synthetic oligonucleotide
cgguguaacucagagaugc

SEQ ID NO: 1823057 - RNA, 19 nt, Artificial Sequence
  Description of Artificial Sequence: Synthetic oligonucleotide
ugcgugauguugugcugcu

SEQ ID NO: 1823058 - RNA, 19 nt, Artificial Sequence
  Description of Artificial Sequence: Synthetic oligonucleotide
gaaaccucgcugcgguguc

SEQ ID NO: 1823059 - RNA, 19 nt, Artificial Sequence
  Description of Artificial Sequence: Synthetic oligonucleotide
uagagcgguguaacucaga

SEQ ID NO: 1823060 - RNA, 19 nt, Artificial Sequence
  Description of Artificial Sequence: Synthetic oligonucleotide
uucuugccuucagcgagag

SEQ ID NO: 1823061 - RNA, 19 nt, Artificial Sequence
  Description of Artificial Sequence: Synthetic oligonucleotide
uagggucugacugcuuugu

SEQ ID NO: 1823062 - RNA, 19 nt, Artificial Sequence
  Description of Artificial Sequence: Synthetic oligonucleotide
ucaggcccggccacuucag

SEQ ID NO: 1823063 - RNA, 19 nt, Artificial Sequence
  Description of Artificial Sequence: Synthetic oligonucleotide
aggccccuuccagaggugc

SEQ ID NO: 1823064 - RNA, 19 nt, Artificial Sequence
  Description of Artificial Sequence: Synthetic oligonucleotide
cagacucaccuuucccaag

SEQ ID NO: 1823065 - RNA, 19 nt, Artificial Sequence
  Description of Artificial Sequence: Synthetic oligonucleotide
cugcuuuguagaugguuca

SEQ ID NO: 1823066 - RNA, 19 nt, Artificial Sequence
  Description of Artificial Sequence: Synthetic oligonucleotide
uuccucuauuuggaaagaa

SEQ ID NO: 1823067 - RNA, 19 nt, Artificial Sequence
  Description of Artificial Sequence: Synthetic oligonucleotide
cacugaaaccucgcugcgg

SEQ ID NO: 1823068 - RNA, 19 nt, Artificial Sequence
  Description of Artificial Sequence: Synthetic oligonucleotide
uaaucucuagacgcucauc

SEQ ID NO: 1823069 - RNA, 19 nt, Artificial Sequence
  Description of Artificial Sequence: Synthetic oligonucleotide
uaccggcugauguauucaa

SEQ ID NO: 1823070 - RNA, 19 nt, Artificial Sequence
  Description of Artificial Sequence: Synthetic oligonucleotide
cuaacaccaagaggccaag

SEQ ID NO: 1823071 - RNA, 19 nt, Artificial Sequence
  Description of Artificial Sequence: Synthetic oligonucleotide
caggugucaauggcuuugg

SEQ ID NO: 1823072 - RNA, 19 nt, Artificial Sequence
  Description of Artificial Sequence: Synthetic oligonucleotide
aguagguggagggacugaa

SEQ ID NO: 1823073 - RNA, 19 nt, Artificial Sequence
  Description of Artificial Sequence: Synthetic oligonucleotide
ugggguuggagugcuaaua

SEQ ID NO: 1823074 - RNA, 19 nt, Artificial Sequence
  Description of Artificial Sequence: Synthetic oligonucleotide
aaccccagccuaggacugg

SEQ ID NO: 1823075 - RNA, 19 nt, Artificial Sequence
  Description of Artificial Sequence: Synthetic oligonucleotide
agaguuggacggaggagug

SEQ ID NO: 1823076 - RNA, 19 nt, Artificial Sequence
  Description of Artificial Sequence: Synthetic oligonucleotide
aggccgauguuaagcugcc

SEQ ID NO: 1823077 - RNA, 19 nt, Artificial Sequence
  Description of Artificial Sequence: Synthetic oligonucleotide
acuugauguccugggguug

SEQ ID NO: 1823078 - RNA, 19 nt, Artificial Sequence
  Description of Artificial Sequence: Synthetic oligonucleotide
ugucaaugucaggcauggg

SEQ ID NO: 1823079 - RNA, 19 nt, Artificial Sequence
  Description of Artificial Sequence: Synthetic oligonucleotide
ggagugcuaauacuggcaa

SEQ ID NO: 1823080 - RNA, 19 nt, Artificial Sequence
  Description of Artificial Sequence: Synthetic oligonucleotide
cugagacuggcagaugcuc

SEQ ID NO: 1823081 - RNA, 19 nt, Artificial Sequence
  Description of Artificial Sequence: Synthetic oligonucleotide
aucaggacgcggcaccuuu

SEQ ID NO: 1823082 - RNA, 19 nt, Artificial Sequence
  Description of Artificial Sequence: Synthetic oligonucleotide
ccgauguuaagcugccagc

SEQ ID NO: 1823083 - RNA, 19 nt, Artificial Sequence
  Description of Artificial Sequence: Synthetic oligonucleotide
aaccucuuccgagucguua

SEQ ID NO: 1823084 - RNA, 19 nt, Artificial Sequence
  Description of Artificial Sequence: Synthetic oligonucleotide
gcuuagagcgguguaacuc

SEQ ID NO: 1823085 - RNA, 19 nt, Artificial Sequence
  Description of Artificial Sequence: Synthetic oligonucleotide
ggacgcggcaccuuuaaaa

SEQ ID NO: 1823086 - RNA, 19 nt, Artificial Sequence
  Description of Artificial Sequence: Synthetic oligonucleotide
ugcuuuguagaugguucau

SEQ ID NO: 1823087 - RNA, 19 nt, Artificial Sequence
  Description of Artificial Sequence: Synthetic oligonucleotide
gaaccccagccuaggacug

SEQ ID NO: 1823088 - RNA, 19 nt, Artificial Sequence
  Description of Artificial Sequence: Synthetic oligonucleotide
guuaagcugccagcaaaga

SEQ ID NO: 1823089 - RNA, 19 nt, Artificial Sequence
  Description of Artificial Sequence: Synthetic oligonucleotide
cuuuaaaaugcugggaguu

SEQ ID NO: 1823090 - RNA, 19 nt, Artificial Sequence
  Description of Artificial Sequence: Synthetic oligonucleotide
uggcaaccucuuccgaguc

SEQ ID NO: 1823091 - RNA, 19 nt, Artificial Sequence
  Description of Artificial Sequence: Synthetic oligonucleotide
ggcaaccucuuccgagucg

SEQ ID NO: 1823092 - RNA, 19 nt, Artificial Sequence
  Description of Artificial Sequence: Synthetic oligonucleotide
gggauaaaaucaggaauga

SEQ ID NO: 1823093 - RNA, 19 nt, Artificial Sequence
  Description of Artificial Sequence: Synthetic oligonucleotide
gagcgguguaacucagaga

SEQ ID NO: 1823094 - RNA, 19 nt, Artificial Sequence
  Description of Artificial Sequence: Synthetic oligonucleotide
gggaaaagaguagguggag

SEQ ID NO: 1823095 - RNA, 19 nt, Artificial Sequence
  Description of Artificial Sequence: Synthetic oligonucleotide
auuuuggucuguagccccu

SEQ ID NO: 1823096 - RNA, 19 nt, Artificial Sequence
  Description of Artificial Sequence: Synthetic oligonucleotide
aucguaagucugguucuca

SEQ ID NO: 1823097 - RNA, 19 nt, Artificial Sequence
  Description of Artificial Sequence: Synthetic oligonucleotide
cugcaggaucauaggcccc

SEQ ID NO: 1823098 - RNA, 19 nt, Artificial Sequence
  Description of Artificial Sequence: Synthetic oligonucleotide
ucuugccuucagcgagagc

SEQ ID NO: 1823099 - RNA, 19 nt, Artificial Sequence
  Description of Artificial Sequence: Synthetic oligonucleotide
ugucgucaucagacuuuga

SEQ ID NO: 1823100 - RNA, 19 nt, Artificial Sequence
  Description of Artificial Sequence: Synthetic oligonucleotide
acugcuguuaucagccaua

SEQ ID NO: 1823101 - RNA, 19 nt, Artificial Sequence
  Description of Artificial Sequence: Synthetic oligonucleotide
cuucaaacucuggggacca

SEQ ID NO: 1823102 - RNA, 19 nt, Artificial Sequence
  Description of Artificial Sequence: Synthetic oligonucleotide
ugcucauagucugcaggau

SEQ ID NO: 1823103 - RNA, 19 nt, Artificial Sequence
  Description of Artificial Sequence: Synthetic oligonucleotide
caaccgugggcagacucac

SEQ ID NO: 1823104 - RNA, 19 nt, Artificial Sequence
  Description of Artificial Sequence: Synthetic oligonucleotide
cugcggugucaacugugag

SEQ ID NO: 1823105 - RNA, 19 nt, Artificial Sequence
  Description of Artificial Sequence: Synthetic oligonucleotide
ucgaucagcugaggugugu

SEQ ID NO: 1823106 - RNA, 19 nt, Artificial Sequence
  Description of Artificial Sequence: Synthetic oligonucleotide
cagcaaagaccaugucguc

SEQ ID NO: 1823107 - RNA, 19 nt, Artificial Sequence
  Description of Artificial Sequence: Synthetic oligonucleotide
gguguguaccggcugaugu

SEQ ID NO: 1823108 - RNA, 19 nt, Artificial Sequence
  Description of Artificial Sequence: Synthetic oligonucleotide
gcuuucuugccuucagcga

SEQ ID NO: 1823109 - RNA, 19 nt, Artificial Sequence
  Description of Artificial Sequence: Synthetic oligonucleotide
caucguaagucugguucuc

SEQ ID NO: 1823110 - RNA, 19 nt, Artificial Sequence
  Description of Artificial Sequence: Synthetic oligonucleotide
cucuuccgagucguuaauc

SEQ ID NO: 1823111 - RNA, 19 nt, Artificial Sequence
  Description of Artificial Sequence: Synthetic oligonucleotide
augaaagguuucaguuugu

SEQ ID NO: 1823112 - RNA, 19 nt, Artificial Sequence
  Description of Artificial Sequence: Synthetic oligonucleotide
cugaaaccucgcugcggug

SEQ ID NO: 1823113 - RNA, 19 nt, Artificial Sequence
  Description of Artificial Sequence: Synthetic oligonucleotide
cagaguuggacggaggagu

SEQ ID NO: 1823114 - RNA, 19 nt, Artificial Sequence
  Description of Artificial Sequence: Synthetic oligonucleotide
gcgagagcacaguaggguc

SEQ ID NO: 1823115 - RNA, 19 nt, Artificial Sequence
  Description of Artificial Sequence: Synthetic oligonucleotide
ucaggacgcggcaccuuua

SEQ ID NO: 1823116 - RNA, 19 nt, Artificial Sequence
  Description of Artificial Sequence: Synthetic oligonucleotide
accccagccuaggacuggg

SEQ ID NO: 1823117 - RNA, 19 nt, Artificial Sequence
  Description of Artificial Sequence: Synthetic oligonucleotide
gacgagucaucaucaucgu

SEQ ID NO: 1823118 - RNA, 19 nt, Artificial Sequence
  Description of Artificial Sequence: Synthetic oligonucleotide
ggugucaacugugagggcu

SEQ ID NO: 1823119 - RNA, 19 nt, Artificial Sequence
  Description of Artificial Sequence: Synthetic oligonucleotide
aucaucguuuucacugaaa

SEQ ID NO: 1823120 - RNA, 19 nt, Artificial Sequence
  Description of Artificial Sequence: Synthetic oligonucleotide
cagaggugcuccaugcucu

SEQ ID NO: 1823121 - RNA, 19 nt, Artificial Sequence
  Description of Artificial Sequence: Synthetic oligonucleotide
guguguaccggcugaugua

SEQ ID NO: 1823122 - RNA, 19 nt, Artificial Sequence
  Description of Artificial Sequence: Synthetic oligonucleotide
aaaccucgcugcgguguca

SEQ ID NO: 1823123 - RNA, 19 nt, Artificial Sequence
  Description of Artificial Sequence: Synthetic oligonucleotide
ggucucacucucaggcccg

SEQ ID NO: 1823124 - RNA, 19 nt, Artificial Sequence
  Description of Artificial Sequence: Synthetic oligonucleotide
guaccggcugauguauuca

SEQ ID NO: 1823125 - RNA, 19 nt, Artificial Sequence
  Description of Artificial Sequence: Synthetic oligonucleotide
aaccucgcugcggugucaa

SEQ ID NO: 1823126 - RNA, 19 nt, Artificial Sequence
  Description of Artificial Sequence: Synthetic oligonucleotide
cuguggagcaggccgaugu

SEQ ID NO: 1823127 - RNA, 19 nt, Artificial Sequence
  Description of Artificial Sequence: Synthetic oligonucleotide
ggagcaggccgauguuaag

SEQ ID NO: 1823128 - RNA, 19 nt, Artificial Sequence
  Description of Artificial Sequence: Synthetic oligonucleotide
uaggccccuuccagaggug

SEQ ID NO: 1823129 - RNA, 19 nt, Artificial Sequence
  Description of Artificial Sequence: Synthetic oligonucleotide
ucgcugcggugucaacugu

SEQ ID NO: 1823130 - RNA, 19 nt, Artificial Sequence
  Description of Artificial Sequence: Synthetic oligonucleotide
cucuuguagaaaggaaugu

SEQ ID NO: 1823131 - RNA, 19 nt, Artificial Sequence
  Description of Artificial Sequence: Synthetic oligonucleotide
aguuugugguccagaucga

SEQ ID NO: 1823132 - RNA, 19 nt, Artificial Sequence
  Description of Artificial Sequence: Synthetic oligonucleotide
cagaucgaucagcugaggu

SEQ ID NO: 1823133 - RNA, 19 nt, Artificial Sequence
  Description of Artificial Sequence: Synthetic oligonucleotide
cuggcaaccucuuccgagu

SEQ ID NO: 1823134 - RNA, 19 nt, Artificial Sequence
  Description of Artificial Sequence: Synthetic oligonucleotide
gcagacucaccuuucccaa

SEQ ID NO: 1823135 - RNA, 19 nt, Artificial Sequence
  Description of Artificial Sequence: Synthetic oligonucleotide
caucaucguuuucacugaa

SEQ ID NO: 1823136 - RNA, 19 nt, Artificial Sequence
  Description of Artificial Sequence: Synthetic oligonucleotide
agguguguaccggcugaug

SEQ ID NO: 1823137 - RNA, 19 nt, Artificial Sequence
  Description of Artificial Sequence: Synthetic oligonucleotide
ccagccuaggacugggguc

SEQ ID NO: 1823138 - RNA, 19 nt, Artificial Sequence
  Description of Artificial Sequence: Synthetic oligonucleotide
ggucuguagccccucugga

SEQ ID NO: 1823139 - RNA, 19 nt, Artificial Sequence
  Description of Artificial Sequence: Synthetic oligonucleotide
gaguuggacggaggaguga

SEQ ID NO: 1823140 - RNA, 19 nt, Artificial Sequence
  Description of Artificial Sequence: Synthetic oligonucleotide
uggauccguuuccucuauu

SEQ ID NO: 1823141 - RNA, 19 nt, Artificial Sequence
  Description of Artificial Sequence: Synthetic oligonucleotide
gggaguucuugaauucuga

SEQ ID NO: 1823142 - RNA, 19 nt, Artificial Sequence
  Description of Artificial Sequence: Synthetic oligonucleotide
caggcccggccacuucagg

SEQ ID NO: 1823143 - RNA, 19 nt, Artificial Sequence
  Description of Artificial Sequence: Synthetic oligonucleotide
gguggucaggcuucccauc

SEQ ID NO: 1823144 - RNA, 19 nt, Artificial Sequence
  Description of Artificial Sequence: Synthetic oligonucleotide
gaguagguggagggacuga

SEQ ID NO: 1823145 - RNA, 19 nt, Artificial Sequence
  Description of Artificial Sequence: Synthetic oligonucleotide
gggcuuagagcgguguaac

SEQ ID NO: 1823146 - RNA, 19 nt, Artificial Sequence
  Description of Artificial Sequence: Synthetic oligonucleotide
ggcugcaaucaaucucaac

SEQ ID NO: 1823147 - RNA, 19 nt, Artificial Sequence
  Description of Artificial Sequence: Synthetic oligonucleotide
cuagacgcucaucguaagu

SEQ ID NO: 1823148 - RNA, 19 nt, Artificial Sequence
  Description of Artificial Sequence: Synthetic oligonucleotide
agggucugacugcuuugua

SEQ ID NO: 1823149 - RNA, 19 nt, Artificial Sequence
  Description of Artificial Sequence: Synthetic oligonucleotide
acggaggagugaaugcuuu

SEQ ID NO: 1823150 - RNA, 19 nt, Artificial Sequence
  Description of Artificial Sequence: Synthetic oligonucleotide
cuuucauauguugcgugau

SEQ ID NO: 1823151 - RNA, 19 nt, Artificial Sequence
  Description of Artificial Sequence: Synthetic oligonucleotide
aucgaucagcugaggugug

SEQ ID NO: 1823152 - RNA, 19 nt, Artificial Sequence
  Description of Artificial Sequence: Synthetic oligonucleotide
aggacgcggcaccuuuaaa

SEQ ID NO: 1823153 - RNA, 19 nt, Artificial Sequence
  Description of Artificial Sequence: Synthetic oligonucleotide
caggcaugggccuggugua

SEQ ID NO: 1823154 - RNA, 19 nt, Artificial Sequence
  Description of Artificial Sequence: Synthetic oligonucleotide
ggaggagugaaugcuuucu

SEQ ID NO: 1823155 - RNA, 19 nt, Artificial Sequence
  Description of Artificial Sequence: Synthetic oligonucleotide
agccccucuggauccguuu

SEQ ID NO: 1823156 - RNA, 19 nt, Artificial Sequence
  Description of Artificial Sequence: Synthetic oligonucleotide
gguguagugcacagucgca

SEQ ID NO: 1823157 - RNA, 19 nt, Artificial Sequence
  Description of Artificial Sequence: Synthetic oligonucleotide
cgagucguuaaucucuaga

SEQ ID NO: 1823158 - RNA, 19 nt, Artificial Sequence
  Description of Artificial Sequence: Synthetic oligonucleotide
ggauccguuuccucuauuu

SEQ ID NO: 1823159 - RNA, 19 nt, Artificial Sequence
  Description of Artificial Sequence: Synthetic oligonucleotide
ggagggacugaauccgacu

SEQ ID NO: 1823160 - RNA, 19 nt, Artificial Sequence
  Description of Artificial Sequence: Synthetic oligonucleotide
cugggaguucuugaauucu

SEQ ID NO: 1823161 - RNA, 19 nt, Artificial Sequence
  Description of Artificial Sequence: Synthetic oligonucleotide
gucaggcaugggccuggug

SEQ ID NO: 1823162 - RNA, 19 nt, Artificial Sequence
  Description of Artificial Sequence: Synthetic oligonucleotide
ccgacucuuguagaaagga

SEQ ID NO: 1823163 - RNA, 19 nt, Artificial Sequence
  Description of Artificial Sequence: Synthetic oligonucleotide
acagcccuaggaggcggcu

SEQ ID NO: 1823164 - RNA, 19 nt, Artificial Sequence
  Description of Artificial Sequence: Synthetic oligonucleotide
accggcugauguauucaaa

SEQ ID NO: 1823165 - RNA, 19 nt, Artificial Sequence
  Description of Artificial Sequence: Synthetic oligonucleotide
ucucaaccgugggcagacu

SEQ ID NO: 1823166 - RNA, 19 nt, Artificial Sequence
  Description of Artificial Sequence: Synthetic oligonucleotide
caggacgcggcaccuuuaa

SEQ ID NO: 1823167 - RNA, 19 nt, Artificial Sequence
  Description of Artificial Sequence: Synthetic oligonucleotide
ggguuggagugcuaauacu

SEQ ID NO: 1823168 - RNA, 19 nt, Artificial Sequence
  Description of Artificial Sequence: Synthetic oligonucleotide
gcuuucaauccagguguca

SEQ ID NO: 1823169 - RNA, 19 nt, Artificial Sequence
  Description of Artificial Sequence: Synthetic oligonucleotide
uagccccucuggauccguu

SEQ ID NO: 1823170 - RNA, 19 nt, Artificial Sequence
  Description of Artificial Sequence: Synthetic oligonucleotide
guuugugguccagaucgau

SEQ ID NO: 1823171 - RNA, 19 nt, Artificial Sequence
  Description of Artificial Sequence: Synthetic oligonucleotide
gcugcggugucaacuguga

SEQ ID NO: 1823172 - RNA, 19 nt, Artificial Sequence
  Description of Artificial Sequence: Synthetic oligonucleotide
agccuaggacuggggucuc

SEQ ID NO: 1823173 - RNA, 19 nt, Artificial Sequence
  Description of Artificial Sequence: Synthetic oligonucleotide
cgauguuaagcugccagca

SEQ ID NO: 1823174 - RNA, 19 nt, Artificial Sequence
  Description of Artificial Sequence: Synthetic oligonucleotide
ggacggaggagugaaugcu

SEQ ID NO: 1823175 - RNA, 19 nt, Artificial Sequence
  Description of Artificial Sequence: Synthetic oligonucleotide
agacuggcagaugcucaua

SEQ ID NO: 1823176 - RNA, 19 nt, Artificial Sequence
  Description of Artificial Sequence: Synthetic oligonucleotide
gucucagacgagucaucau

SEQ ID NO: 1823177 - RNA, 19 nt, Artificial Sequence
  Description of Artificial Sequence: Synthetic oligonucleotide
gacggaggagugaaugcuu

SEQ ID NO: 1823178 - RNA, 19 nt, Artificial Sequence
  Description of Artificial Sequence: Synthetic oligonucleotide
gcuucccaucaggacgcgg

SEQ ID NO: 1823179 - RNA, 19 nt, Artificial Sequence
  Description of Artificial Sequence: Synthetic oligonucleotide
ggggcuuagagcgguguaa

SEQ ID NO: 1823180 - RNA, 19 nt, Artificial Sequence
  Description of Artificial Sequence: Synthetic oligonucleotide
caauguagucggccaggcu

SEQ ID NO: 1823181 - RNA, 19 nt, Artificial Sequence
  Description of Artificial Sequence: Synthetic oligonucleotide
gcaaccucuuccgagucgu

SEQ ID NO: 1823182 - RNA, 19 nt, Artificial Sequence
  Description of Artificial Sequence: Synthetic oligonucleotide
ccgagucguuaaucucuag

SEQ ID NO: 1823183 - RNA, 19 nt, Artificial Sequence
  Description of Artificial Sequence: Synthetic oligonucleotide
ggcuuagagcgguguaacu

SEQ ID NO: 1823184 - RNA, 19 nt, Artificial Sequence
  Description of Artificial Sequence: Synthetic oligonucleotide
cagcccuaggaggcggcuc

SEQ ID NO: 1823185 - RNA, 19 nt, Artificial Sequence
  Description of Artificial Sequence: Synthetic oligonucleotide
augguucaucuaacaccaa

SEQ ID NO: 1823186 - RNA, 19 nt, Artificial Sequence
  Description of Artificial Sequence: Synthetic oligonucleotide
gcgguguaacucagagaug

SEQ ID NO: 1823187 - RNA, 19 nt, Artificial Sequence
  Description of Artificial Sequence: Synthetic oligonucleotide
cgacucuuguagaaaggaa

SEQ ID NO: 1823188 - RNA, 19 nt, Artificial Sequence
  Description of Artificial Sequence: Synthetic oligonucleotide
cgcugcggugucaacugug

SEQ ID NO: 1823189 - RNA, 19 nt, Artificial Sequence
  Description of Artificial Sequence: Synthetic oligonucleotide
aggcugcaaucaaucucaa

SEQ ID NO: 1823190 - RNA, 19 nt, Artificial Sequence
  Description of Artificial Sequence: Synthetic oligonucleotide
ccauagcgagagcacagua

SEQ ID NO: 1823191 - RNA, 19 nt, Artificial Sequence
  Description of Artificial Sequence: Synthetic oligonucleotide
gagguguguaccggcugau

SEQ ID NO: 1823192 - RNA, 19 nt, Artificial Sequence
  Description of Artificial Sequence: Synthetic oligonucleotide
gcgagagcuuuaaaaugcu

SEQ ID NO: 1823193 - RNA, 19 nt, Artificial Sequence
  Description of Artificial Sequence: Synthetic oligonucleotide
cggaggagugaaugcuuuc

SEQ ID NO: 1823194 - RNA, 19 nt, Artificial Sequence
  Description of Artificial Sequence: Synthetic oligonucleotide
ccuucagcgagagcuuuaa

SEQ ID NO: 1823195 - RNA, 19 nt, Artificial Sequence
  Description of Artificial Sequence: Synthetic oligonucleotide
ggcuucccaucaggacgcg

SEQ ID NO: 1823196 - RNA, 19 nt, Artificial Sequence
  Description of Artificial Sequence: Synthetic oligonucleotide
gucaacugugagggcuucu

SEQ ID NO: 1823197 - RNA, 19 nt, Artificial Sequence
  Description of Artificial Sequence: Synthetic oligonucleotide
cugggguuggagugcuaau

SEQ ID NO: 1823198 - RNA, 19 nt, Artificial Sequence
  Description of Artificial Sequence: Synthetic oligonucleotide
ccccagccuaggacugggg

SEQ ID NO: 1823199 - RNA, 19 nt, Artificial Sequence
  Description of Artificial Sequence: Synthetic oligonucleotide
ccugggguuggagugcuaa

SEQ ID NO: 1823200 - RNA, 19 nt, Artificial Sequence
  Description of Artificial Sequence: Synthetic oligonucleotide
gcuguggagcaggccgaug

SEQ ID NO: 1823201 - RNA, 19 nt, Artificial Sequence
  Description of Artificial Sequence: Synthetic oligonucleotide
gggacugaauccgacucuu

SEQ ID NO: 1823202 - RNA, 19 nt, Artificial Sequence
  Description of Artificial Sequence: Synthetic oligonucleotide
cuggauccguuuccucuau

SEQ ID NO: 1823203 - RNA, 19 nt, Artificial Sequence
  Description of Artificial Sequence: Synthetic oligonucleotide
ccaagaggccaaggugguc

SEQ ID NO: 1823204 - RNA, 19 nt, Artificial Sequence
  Description of Artificial Sequence: Synthetic oligonucleotide
cugcaucgccagccuggga

SEQ ID NO: 1823205 - RNA, 19 nt, Artificial Sequence
  Description of Artificial Sequence: Synthetic oligonucleotide
ccuaggaggcggcucagau

SEQ ID NO: 1823206 - RNA, 19 nt, Artificial Sequence
  Description of Artificial Sequence: Synthetic oligonucleotide
guuggacggaggagugaau

SEQ ID NO: 1823207 - RNA, 19 nt, Artificial Sequence
  Description of Artificial Sequence: Synthetic oligonucleotide
ccaagauagcacagaucau

SEQ ID NO: 1823208 - RNA, 19 nt, Artificial Sequence
  Description of Artificial Sequence: Synthetic oligonucleotide
cccagccuaggacuggggu

SEQ ID NO: 1823209 - RNA, 19 nt, Artificial Sequence
  Description of Artificial Sequence: Synthetic oligonucleotide
gcucaucguaagucugguu

SEQ ID NO: 1823210 - RNA, 19 nt, Artificial Sequence
  Description of Artificial Sequence: Synthetic oligonucleotide
ccucgcugcggugucaacu

SEQ ID NO: 1823211 - RNA, 19 nt, Artificial Sequence
  Description of Artificial Sequence: Synthetic oligonucleotide
ggcucagaugaagguuagu

SEQ ID NO: 1823212 - RNA, 19 nt, Artificial Sequence
  Description of Artificial Sequence: Synthetic oligonucleotide
caaccucuuccgagucguu

SEQ ID NO: 1823213 - RNA, 19 nt, Artificial Sequence
  Description of Artificial Sequence: Synthetic oligonucleotide
gccuaggacuggggucuca

SEQ ID NO: 1823214 - RNA, 19 nt, Artificial Sequence
  Description of Artificial Sequence: Synthetic oligonucleotide
cggccacuucaggaauccc

SEQ ID NO: 1823215 - RNA, 19 nt, Artificial Sequence
  Description of Artificial Sequence: Synthetic oligonucleotide
ccucuuccgagucguuaau

SEQ ID NO: 1823216 - RNA, 19 nt, Artificial Sequence
  Description of Artificial Sequence: Synthetic oligonucleotide
gccugguguagugcacagu

SEQ ID NO: 1823217 - RNA, 19 nt, Artificial Sequence
  Description of Artificial Sequence: Synthetic oligonucleotide
cccuaggaggcggcucaga

SEQ ID NO: 1823218 - RNA, 19 nt, Artificial Sequence
  Description of Artificial Sequence: Synthetic oligonucleotide
aaauggacuagacagauag

SEQ ID NO: 1823219 - RNA, 19 nt, Artificial Sequence
  Description of Artificial Sequence: Synthetic oligonucleotide
ucaguuaaauuuaagaggc

SEQ ID NO: 1823220 - RNA, 19 nt, Artificial Sequence
  Description of Artificial Sequence: Synthetic oligonucleotide
ucauucauaauuuugacca

SEQ ID NO: 1823221 - RNA, 19 nt, Artificial Sequence
  Description of Artificial Sequence: Synthetic oligonucleotide
agacacauggaacagaacc

SEQ ID NO: 1823222 - RNA, 19 nt, Artificial Sequence
  Description of Artificial Sequence: Synthetic oligonucleotide
aaauauguaaaugugucac

SEQ ID NO: 1823223 - RNA, 19 nt, Artificial Sequence
  Description of Artificial Sequence: Synthetic oligonucleotide
aaauuuaagaggcuuauga

SEQ ID NO: 1823224 - RNA, 19 nt, Artificial Sequence
  Description of Artificial Sequence: Synthetic oligonucleotide
uuucaguuaaauuuaagag

SEQ ID NO: 1823225 - RNA, 19 nt, Artificial Sequence
  Description of Artificial Sequence: Synthetic oligonucleotide
aacaucacaguucucaggg

SEQ ID NO: 1823226 - RNA, 19 nt, Artificial Sequence
  Description of Artificial Sequence: Synthetic oligonucleotide
uaaucauuaucugagaugg

SEQ ID NO: 1823227 - RNA, 19 nt, Artificial Sequence
  Description of Artificial Sequence: Synthetic oligonucleotide
ucuggaauuaacaucacag

SEQ ID NO: 1823228 - RNA, 19 nt, Artificial Sequence
  Description of Artificial Sequence: Synthetic oligonucleotide
aauauucacuuccucgucc

SEQ ID NO: 1823229 - RNA, 19 nt, Artificial Sequence
  Description of Artificial Sequence: Synthetic oligonucleotide
aauaugguucuguugaauc

SEQ ID NO: 1823230 - RNA, 19 nt, Artificial Sequence
  Description of Artificial Sequence: Synthetic oligonucleotide
uuuauuaaguucuuaaagu

SEQ ID NO: 1823231 - RNA, 19 nt, Artificial Sequence
  Description of Artificial Sequence: Synthetic oligonucleotide
ucaucuggaauuaacauca

SEQ ID NO: 1823232 - RNA, 19 nt, Artificial Sequence
  Description of Artificial Sequence: Synthetic oligonucleotide
uugguaauuacacauaaac

SEQ ID NO: 1823233 - RNA, 19 nt, Artificial Sequence
  Description of Artificial Sequence: Synthetic oligonucleotide
uuacacauaaacaagccca

SEQ ID NO: 1823234 - RNA, 19 nt, Artificial Sequence
  Description of Artificial Sequence: Synthetic oligonucleotide
uucaauauucacuuccucg

SEQ ID NO: 1823235 - RNA, 19 nt, Artificial Sequence
  Description of Artificial Sequence: Synthetic oligonucleotide
gaaucuuucacuuagcaga

SEQ ID NO: 1823236 - RNA, 19 nt, Artificial Sequence
  Description of Artificial Sequence: Synthetic oligonucleotide
uaaugaaucuuucacuuag

SEQ ID NO: 1823237 - RNA, 19 nt, Artificial Sequence
  Description of Artificial Sequence: Synthetic oligonucleotide
auuacacauaaacaagccc

SEQ ID NO: 1823238 - RNA, 19 nt, Artificial Sequence
  Description of Artificial Sequence: Synthetic oligonucleotide
aaucaagagaucuguuagc

SEQ ID NO: 1823239 - RNA, 19 nt, Artificial Sequence
  Description of Artificial Sequence: Synthetic oligonucleotide
aucauucauaauuuugacc

SEQ ID NO: 1823240 - RNA, 19 nt, Artificial Sequence
  Description of Artificial Sequence: Synthetic oligonucleotide
aaaugucuuacuaaucagc

SEQ ID NO: 1823241 - RNA, 19 nt, Artificial Sequence
  Description of Artificial Sequence: Synthetic oligonucleotide
caugauuucacucaucuug

SEQ ID NO: 1823242 - RNA, 19 nt, Artificial Sequence
  Description of Artificial Sequence: Synthetic oligonucleotide
gaaucaagagaucuguuag

SEQ ID NO: 1823243 - RNA, 19 nt, Artificial Sequence
  Description of Artificial Sequence: Synthetic oligonucleotide
aguagcacuucccacaugg

SEQ ID NO: 1823244 - RNA, 19 nt, Artificial Sequence
  Description of Artificial Sequence: Synthetic oligonucleotide
auuaaguucuuaaaguuac

SEQ ID NO: 1823245 - RNA, 19 nt, Artificial Sequence
  Description of Artificial Sequence: Synthetic oligonucleotide
guaaaugugucacagacac

SEQ ID NO: 1823246 - RNA, 19 nt, Artificial Sequence
  Description of Artificial Sequence: Synthetic oligonucleotide
ugucuuacuaaucagcaga

SEQ ID NO: 1823247 - RNA, 19 nt, Artificial Sequence
  Description of Artificial Sequence: Synthetic oligonucleotide
agauuuucaguuucucucc

SEQ ID NO: 1823248 - RNA, 19 nt, Artificial Sequence
  Description of Artificial Sequence: Synthetic oligonucleotide
uccgccauaaucauuaucu

SEQ ID NO: 1823249 - RNA, 19 nt, Artificial Sequence
  Description of Artificial Sequence: Synthetic oligonucleotide
ucugcauuugcgaacauca

SEQ ID NO: 1823250 - RNA, 19 nt, Artificial Sequence
  Description of Artificial Sequence: Synthetic oligonucleotide
aaucacacucccaauaugg

SEQ ID NO: 1823251 - RNA, 19 nt, Artificial Sequence
  Description of Artificial Sequence: Synthetic oligonucleotide
ucaucaaaggaccaucugc

SEQ ID NO: 1823252 - RNA, 19 nt, Artificial Sequence
  Description of Artificial Sequence: Synthetic oligonucleotide
ggacuagacagauagaugg

SEQ ID NO: 1823253 - RNA, 19 nt, Artificial Sequence
  Description of Artificial Sequence: Synthetic oligonucleotide
uguggaggaacauuaauga

SEQ ID NO: 1823254 - RNA, 19 nt, Artificial Sequence
  Description of Artificial Sequence: Synthetic oligonucleotide
ugcaguaacuucuugauuc

SEQ ID NO: 1823255 - RNA, 19 nt, Artificial Sequence
  Description of Artificial Sequence: Synthetic oligonucleotide
aaucugaauaaaauaauga

SEQ ID NO: 1823256 - RNA, 19 nt, Artificial Sequence
  Description of Artificial Sequence: Synthetic oligonucleotide
auaagcuucaaauucaaua

SEQ ID NO: 1823257 - RNA, 19 nt, Artificial Sequence
  Description of Artificial Sequence: Synthetic oligonucleotide
auaaucauuaucugagaug

SEQ ID NO: 1823258 - RNA, 19 nt, Artificial Sequence
  Description of Artificial Sequence: Synthetic oligonucleotide
uuucacuuagcagaaagcc

SEQ ID NO: 1823259 - RNA, 19 nt, Artificial Sequence
  Description of Artificial Sequence: Synthetic oligonucleotide
ucaauauucacuuccucgu

SEQ ID NO: 1823260 - RNA, 19 nt, Artificial Sequence
  Description of Artificial Sequence: Synthetic oligonucleotide
aaacaagcccaucacuguc

SEQ ID NO: 1823261 - RNA, 19 nt, Artificial Sequence
  Description of Artificial Sequence: Synthetic oligonucleotide
auuaacaucacaguucuca

SEQ ID NO: 1823262 - RNA, 19 nt, Artificial Sequence
  Description of Artificial Sequence: Synthetic oligonucleotide
auuuguucagcacacugag

SEQ ID NO: 1823263 - RNA, 19 nt, Artificial Sequence
  Description of Artificial Sequence: Synthetic oligonucleotide
gagauuuucaguuucucuc

SEQ ID NO: 1823264 - RNA, 19 nt, Artificial Sequence
  Description of Artificial Sequence: Synthetic oligonucleotide
cuugauuccgccauaauca

SEQ ID NO: 1823265 - RNA, 19 nt, Artificial Sequence
  Description of Artificial Sequence: Synthetic oligonucleotide
agugcuuccugcugaaggc

SEQ ID NO: 1823266 - RNA, 19 nt, Artificial Sequence
  Description of Artificial Sequence: Synthetic oligonucleotide
aauauguaaaugugucaca

SEQ ID NO: 1823267 - RNA, 19 nt, Artificial Sequence
  Description of Artificial Sequence: Synthetic oligonucleotide
uccaugauuucacucaucu

SEQ ID NO: 1823268 - RNA, 19 nt, Artificial Sequence
  Description of Artificial Sequence: Synthetic oligonucleotide
ugaaucuuucacuuagcag

SEQ ID NO: 1823269 - RNA, 19 nt, Artificial Sequence
  Description of Artificial Sequence: Synthetic oligonucleotide
cuuucaguuaaauuuaaga

SEQ ID NO: 1823270 - RNA, 19 nt, Artificial Sequence
  Description of Artificial Sequence: Synthetic oligonucleotide
caucaaaggaccaucugcc

SEQ ID NO: 1823271 - RNA, 19 nt, Artificial Sequence
  Description of Artificial Sequence: Synthetic oligonucleotide
uuguucagcacacugagua

SEQ ID NO: 1823272 - RNA, 19 nt, Artificial Sequence
  Description of Artificial Sequence: Synthetic oligonucleotide
ucuugauuccgccauaauc

SEQ ID NO: 1823273 - RNA, 19 nt, Artificial Sequence
  Description of Artificial Sequence: Synthetic oligonucleotide
uuucaguuucucuccaagg

SEQ ID NO: 1823274 - RNA, 19 nt, Artificial Sequence
  Description of Artificial Sequence: Synthetic oligonucleotide
aaaguuacuauuccauuuu

SEQ ID NO: 1823275 - RNA, 19 nt, Artificial Sequence
  Description of Artificial Sequence: Synthetic oligonucleotide
aaugucuuacuaaucagca

SEQ ID NO: 1823276 - RNA, 19 nt, Artificial Sequence
  Description of Artificial Sequence: Synthetic oligonucleotide
uuaggaaaagcuguugcag

SEQ ID NO: 1823277 - RNA, 19 nt, Artificial Sequence
  Description of Artificial Sequence: Synthetic oligonucleotide
gauggaauaagcuucaaau

SEQ ID NO: 1823278 - RNA, 19 nt, Artificial Sequence
  Description of Artificial Sequence: Synthetic oligonucleotide
uucacuuagcagaaagccc

SEQ ID NO: 1823279 - RNA, 19 nt, Artificial Sequence
  Description of Artificial Sequence: Synthetic oligonucleotide
uuguagaggacuugaaucu

SEQ ID NO: 1823280 - RNA, 19 nt, Artificial Sequence
  Description of Artificial Sequence: Synthetic oligonucleotide
uuaacaucacaguucucag

SEQ ID NO: 1823281 - RNA, 19 nt, Artificial Sequence
  Description of Artificial Sequence: Synthetic oligonucleotide
aaugaaucuuucacuuagc

SEQ ID NO: 1823282 - RNA, 19 nt, Artificial Sequence
  Description of Artificial Sequence: Synthetic oligonucleotide
aaguucuuaaaguuacuau

SEQ ID NO: 1823283 - RNA, 19 nt, Artificial Sequence
  Description of Artificial Sequence: Synthetic oligonucleotide
guucacaggagcuuuuagg

SEQ ID NO: 1823284 - RNA, 19 nt, Artificial Sequence
  Description of Artificial Sequence: Synthetic oligonucleotide
uaucugagauggaauaagc

SEQ ID NO: 1823285 - RNA, 19 nt, Artificial Sequence
  Description of Artificial Sequence: Synthetic oligonucleotide
uggaggaacauuaaugaau

SEQ ID NO: 1823286 - RNA, 19 nt, Artificial Sequence
  Description of Artificial Sequence: Synthetic oligonucleotide
uuuaaccaaucauucauaa

SEQ ID NO: 1823287 - RNA, 19 nt, Artificial Sequence
  Description of Artificial Sequence: Synthetic oligonucleotide
ucuugguaauuacacauaa

SEQ ID NO: 1823288 - RNA, 19 nt, Artificial Sequence
  Description of Artificial Sequence: Synthetic oligonucleotide
auauguaaaugugucacag

SEQ ID NO: 1823289 - RNA, 19 nt, Artificial Sequence
  Description of Artificial Sequence: Synthetic oligonucleotide
aguucuuaaaguuacuauu

SEQ ID NO: 1823290 - RNA, 19 nt, Artificial Sequence
  Description of Artificial Sequence: Synthetic oligonucleotide
cugagauggaauaagcuuc

SEQ ID NO: 1823291 - RNA, 19 nt, Artificial Sequence
  Description of Artificial Sequence: Synthetic oligonucleotide
uguugaaucaagagaucug

SEQ ID NO: 1823292 - RNA, 19 nt, Artificial Sequence
  Description of Artificial Sequence: Synthetic oligonucleotide
cacgaucucgucuucaucc

SEQ ID NO: 1823293 - RNA, 19 nt, Artificial Sequence
  Description of Artificial Sequence: Synthetic oligonucleotide
acugaguacccuuucuuuc

SEQ ID NO: 1823294 - RNA, 19 nt, Artificial Sequence
  Description of Artificial Sequence: Synthetic oligonucleotide
aauauccguuugcuuaauc

SEQ ID NO: 1823295 - RNA, 19 nt, Artificial Sequence
  Description of Artificial Sequence: Synthetic oligonucleotide
agcagauagaaguagcacu

SEQ ID NO: 1823296 - RNA, 19 nt, Artificial Sequence
  Description of Artificial Sequence: Synthetic oligonucleotide
gcuggugucauucaaaagc

SEQ ID NO: 1823297 - RNA, 19 nt, Artificial Sequence
  Description of Artificial Sequence: Synthetic oligonucleotide
uguugcaguaacuucuuga

SEQ ID NO: 1823298 - RNA, 19 nt, Artificial Sequence
  Description of Artificial Sequence: Synthetic oligonucleotide
cuucaaauucaauauucac

SEQ ID NO: 1823299 - RNA, 19 nt, Artificial Sequence
  Description of Artificial Sequence: Synthetic oligonucleotide
uuaaucacacucccaauau

SEQ ID NO: 1823300 - RNA, 19 nt, Artificial Sequence
  Description of Artificial Sequence: Synthetic oligonucleotide
uguaccgaguagcugaacu

SEQ ID NO: 1823301 - RNA, 19 nt, Artificial Sequence
  Description of Artificial Sequence: Synthetic oligonucleotide
auauccguuugcuuaauca

SEQ ID NO: 1823302 - RNA, 19 nt, Artificial Sequence
  Description of Artificial Sequence: Synthetic oligonucleotide
uaaaguuacuauuccauuu

SEQ ID NO: 1823303 - RNA, 19 nt, Artificial Sequence
  Description of Artificial Sequence: Synthetic oligonucleotide
ucugagauggaauaagcuu

SEQ ID NO: 1823304 - RNA, 19 nt, Artificial Sequence
  Description of Artificial Sequence: Synthetic oligonucleotide
auaaacaagcccaucacug

SEQ ID NO: 1823305 - RNA, 19 nt, Artificial Sequence
  Description of Artificial Sequence: Synthetic oligonucleotide
ucuacuucaucaucgcugu

SEQ ID NO: 1823306 - RNA, 19 nt, Artificial Sequence
  Description of Artificial Sequence: Synthetic oligonucleotide
uguaaaugugucacagaca

SEQ ID NO: 1823307 - RNA, 19 nt, Artificial Sequence
  Description of Artificial Sequence: Synthetic oligonucleotide
ucccacauggcuuauuggc

SEQ ID NO: 1823308 - RNA, 19 nt, Artificial Sequence
  Description of Artificial Sequence: Synthetic oligonucleotide
uuaagaggcuuaugaagcc

SEQ ID NO: 1823309 - RNA, 19 nt, Artificial Sequence
  Description of Artificial Sequence: Synthetic oligonucleotide
uuuuguagaggacuugaau

SEQ ID NO: 1823310 - RNA, 19 nt, Artificial Sequence
  Description of Artificial Sequence: Synthetic oligonucleotide
auagaaguagcacuuccca

SEQ ID NO: 1823311 - RNA, 19 nt, Artificial Sequence
  Description of Artificial Sequence: Synthetic oligonucleotide
uguucaaccgugcucuucu

SEQ ID NO: 1823312 - RNA, 19 nt, Artificial Sequence
  Description of Artificial Sequence: Synthetic oligonucleotide
caaaggaccaucugccucc

SEQ ID NO: 1823313 - RNA, 19 nt, Artificial Sequence
  Description of Artificial Sequence: Synthetic oligonucleotide
ugaaucaagagaucuguua

SEQ ID NO: 1823314 - RNA, 19 nt, Artificial Sequence
  Description of Artificial Sequence: Synthetic oligonucleotide
uacccuuucuuucaguuaa

SEQ ID NO: 1823315 - RNA, 19 nt, Artificial Sequence
  Description of Artificial Sequence: Synthetic oligonucleotide
accagauuuuccugcuucc

SEQ ID NO: 1823316 - RNA, 19 nt, Artificial Sequence
  Description of Artificial Sequence: Synthetic oligonucleotide
cuguggaggaacauuaaug

SEQ ID NO: 1823317 - RNA, 19 nt, Artificial Sequence
  Description of Artificial Sequence: Synthetic oligonucleotide
uauccguuugcuuaaucac

SEQ ID NO: 1823318 - RNA, 19 nt, Artificial Sequence
  Description of Artificial Sequence: Synthetic oligonucleotide
ucuuuaauuuguucagcac

SEQ ID NO: 1823319 - RNA, 19 nt, Artificial Sequence
  Description of Artificial Sequence: Synthetic oligonucleotide
aauuuguucagcacacuga

SEQ ID NO: 1823320 - RNA, 19 nt, Artificial Sequence
  Description of Artificial Sequence: Synthetic oligonucleotide
agaucuguuagcucuccag

SEQ ID NO: 1823321 - RNA, 19 nt, Artificial Sequence
  Description of Artificial Sequence: Synthetic oligonucleotide
ugcauuugcgaacaucagu

SEQ ID NO: 1823322 - RNA, 19 nt, Artificial Sequence
  Description of Artificial Sequence: Synthetic oligonucleotide
aacuucuugauuccgccau

SEQ ID NO: 1823323 - RNA, 19 nt, Artificial Sequence
  Description of Artificial Sequence: Synthetic oligonucleotide
cuuucacuuagcagaaagc

SEQ ID NO: 1823324 - RNA, 19 nt, Artificial Sequence
  Description of Artificial Sequence: Synthetic oligonucleotide
ugucuucugaaauauccgu

SEQ ID NO: 1823325 - RNA, 19 nt, Artificial Sequence
  Description of Artificial Sequence: Synthetic oligonucleotide
cuuagcagaaagcccacag

SEQ ID NO: 1823326 - RNA, 19 nt, Artificial Sequence
  Description of Artificial Sequence: Synthetic oligonucleotide
uuuuaaccaaucauucaua

SEQ ID NO: 1823327 - RNA, 19 nt, Artificial Sequence
  Description of Artificial Sequence: Synthetic oligonucleotide
uacuaaucagcagauagaa

SEQ ID NO: 1823328 - RNA, 19 nt, Artificial Sequence
  Description of Artificial Sequence: Synthetic oligonucleotide
guucuguugaaucaagaga

SEQ ID NO: 1823329 - RNA, 19 nt, Artificial Sequence
  Description of Artificial Sequence: Synthetic oligonucleotide
ucuguuagcucuccagugu

SEQ ID NO: 1823330 - RNA, 19 nt, Artificial Sequence
  Description of Artificial Sequence: Synthetic oligonucleotide
aaccgugcucuucucacag

SEQ ID NO: 1823331 - RNA, 19 nt, Artificial Sequence
  Description of Artificial Sequence: Synthetic oligonucleotide
gucacagacacauggaaca

SEQ ID NO: 1823332 - RNA, 19 nt, Artificial Sequence
  Description of Artificial Sequence: Synthetic oligonucleotide
cuugucaucuggaauuaac

SEQ ID NO: 1823333 - RNA, 19 nt, Artificial Sequence
  Description of Artificial Sequence: Synthetic oligonucleotide
augaaucuuucacuuagca

SEQ ID NO: 1823334 - RNA, 19 nt, Artificial Sequence
  Description of Artificial Sequence: Synthetic oligonucleotide
uuaaaguuacuauuccauu

SEQ ID NO: 1823335 - RNA, 19 nt, Artificial Sequence
  Description of Artificial Sequence: Synthetic oligonucleotide
gacacauggaacagaaccc

SEQ ID NO: 1823336 - RNA, 19 nt, Artificial Sequence
  Description of Artificial Sequence: Synthetic oligonucleotide
cuuaugaagccgaagaucu

SEQ ID NO: 1823337 - RNA, 19 nt, Artificial Sequence
  Description of Artificial Sequence: Synthetic oligonucleotide
uccguuugcuuaaucacac

SEQ ID NO: 1823338 - RNA, 19 nt, Artificial Sequence
  Description of Artificial Sequence: Synthetic oligonucleotide
ucauuaucugagauggaau

SEQ ID NO: 1823339 - RNA, 19 nt, Artificial Sequence
  Description of Artificial Sequence: Synthetic oligonucleotide
aggaccaacucuuuaauuu

SEQ ID NO: 1823340 - RNA, 19 nt, Artificial Sequence
  Description of Artificial Sequence: Synthetic oligonucleotide
uggacuagacagauagaug

SEQ ID NO: 1823341 - RNA, 19 nt, Artificial Sequence
  Description of Artificial Sequence: Synthetic oligonucleotide
gaguagcugaacuucagga

SEQ ID NO: 1823342 - RNA, 19 nt, Artificial Sequence
  Description of Artificial Sequence: Synthetic oligonucleotide
ugucaucuggaauuaacau

SEQ ID NO: 1823343 - RNA, 19 nt, Artificial Sequence
  Description of Artificial Sequence: Synthetic oligonucleotide
aaagcuguugcaguaacuu

SEQ ID NO: 1823344 - RNA, 19 nt, Artificial Sequence
  Description of Artificial Sequence: Synthetic oligonucleotide
auuugcgaacaucagugcu

SEQ ID NO: 1823345 - RNA, 19 nt, Artificial Sequence
  Description of Artificial Sequence: Synthetic oligonucleotide
gucauucaaaagcuugucc

SEQ ID NO: 1823346 - RNA, 19 nt, Artificial Sequence
  Description of Artificial Sequence: Synthetic oligonucleotide
ugaaccccguuucccaacg

SEQ ID NO: 1823347 - RNA, 19 nt, Artificial Sequence
  Description of Artificial Sequence: Synthetic oligonucleotide
aggagcuuuuaggaaaagc

SEQ ID NO: 1823348 - RNA, 19 nt, Artificial Sequence
  Description of Artificial Sequence: Synthetic oligonucleotide
acuagacagauagaugguc

SEQ ID NO: 1823349 - RNA, 19 nt, Artificial Sequence
  Description of Artificial Sequence: Synthetic oligonucleotide
ucaaaggaccaucugccuc

SEQ ID NO: 1823350 - RNA, 19 nt, Artificial Sequence
  Description of Artificial Sequence: Synthetic oligonucleotide
agauuuuccugcuuccaca

SEQ ID NO: 1823351 - RNA, 19 nt, Artificial Sequence
  Description of Artificial Sequence: Synthetic oligonucleotide
gguucuguugaaucaagag

SEQ ID NO: 1823352 - RNA, 19 nt, Artificial Sequence
  Description of Artificial Sequence: Synthetic oligonucleotide
uguucacaggagcuuuuag

SEQ ID NO: 1823353 - RNA, 19 nt, Artificial Sequence
  Description of Artificial Sequence: Synthetic oligonucleotide
uccaguguucacaggagcu

SEQ ID NO: 1823354 - RNA, 19 nt, Artificial Sequence
  Description of Artificial Sequence: Synthetic oligonucleotide
agggcuucuugguaauuac

SEQ ID NO: 1823355 - RNA, 19 nt, Artificial Sequence
  Description of Artificial Sequence: Synthetic oligonucleotide
cuucauuggcacaucauca

SEQ ID NO: 1823356 - RNA, 19 nt, Artificial Sequence
  Description of Artificial Sequence: Synthetic oligonucleotide
gaaauauccguuugcuuaa

SEQ ID NO: 1823357 - RNA, 19 nt, Artificial Sequence
  Description of Artificial Sequence: Synthetic oligonucleotide
gccauaaucauuaucugag

SEQ ID NO: 1823358 - RNA, 19 nt, Artificial Sequence
  Description of Artificial Sequence: Synthetic oligonucleotide
uuugcgaacaucagugcuu

SEQ ID NO: 1823359 - RNA, 19 nt, Artificial Sequence
  Description of Artificial Sequence: Synthetic oligonucleotide
gagcuuuuaggaaaagcug

SEQ ID NO: 1823360 - RNA, 19 nt, Artificial Sequence
  Description of Artificial Sequence: Synthetic oligonucleotide
augucuuacuaaucagcag

SEQ ID NO: 1823361 - RNA, 19 nt, Artificial Sequence
  Description of Artificial Sequence: Synthetic oligonucleotide
ucaaaagcuuguccagcug

SEQ ID NO: 1823362 - RNA, 19 nt, Artificial Sequence
  Description of Artificial Sequence: Synthetic oligonucleotide
aucuguuagcucuccagug

SEQ ID NO: 1823363 - RNA, 19 nt, Artificial Sequence
  Description of Artificial Sequence: Synthetic oligonucleotide
aucaagagaucuguuagcu

SEQ ID NO: 1823364 - RNA, 19 nt, Artificial Sequence
  Description of Artificial Sequence: Synthetic oligonucleotide
ugaguacccuuucuuucag

SEQ ID NO: 1823365 - RNA, 19 nt, Artificial Sequence
  Description of Artificial Sequence: Synthetic oligonucleotide
agccgaagaucucaucuuc

SEQ ID NO: 1823366 - RNA, 19 nt, Artificial Sequence
  Description of Artificial Sequence: Synthetic oligonucleotide
aguuaaauuuaagaggcuu

SEQ ID NO: 1823367 - RNA, 19 nt, Artificial Sequence
  Description of Artificial Sequence: Synthetic oligonucleotide
auggaauaagcuucaaauu

SEQ ID NO: 1823368 - RNA, 19 nt, Artificial Sequence
  Description of Artificial Sequence: Synthetic oligonucleotide
ucaaccgugcucuucucac

SEQ ID NO: 1823369 - RNA, 19 nt, Artificial Sequence
  Description of Artificial Sequence: Synthetic oligonucleotide
uuccacaaaugucuuacua

SEQ ID NO: 1823370 - RNA, 19 nt, Artificial Sequence
  Description of Artificial Sequence: Synthetic oligonucleotide
uuaaugaaucuuucacuua

SEQ ID NO: 1823371 - RNA, 19 nt, Artificial Sequence
  Description of Artificial Sequence: Synthetic oligonucleotide
aaucuguggaggaacauua

SEQ ID NO: 1823372 - RNA, 19 nt, Artificial Sequence
  Description of Artificial Sequence: Synthetic oligonucleotide
agcuuuuaggaaaagcugu

SEQ ID NO: 1823373 - RNA, 19 nt, Artificial Sequence
  Description of Artificial Sequence: Synthetic oligonucleotide
gauuccgccauaaucauua

SEQ ID NO: 1823374 - RNA, 19 nt, Artificial Sequence
  Description of Artificial Sequence: Synthetic oligonucleotide
aucauuaucugagauggaa

SEQ ID NO: 1823375 - RNA, 19 nt, Artificial Sequence
  Description of Artificial Sequence: Synthetic oligonucleotide
acuugaaucugaauaaaau

SEQ ID NO: 1823376 - RNA, 19 nt, Artificial Sequence
  Description of Artificial Sequence: Synthetic oligonucleotide
ucuguggaggaacauuaau

SEQ ID NO: 1823377 - RNA, 19 nt, Artificial Sequence
  Description of Artificial Sequence: Synthetic oligonucleotide
gaagccgaagaucucaucu

SEQ ID NO: 1823378 - RNA, 19 nt, Artificial Sequence
  Description of Artificial Sequence: Synthetic oligonucleotide
auggacuagacagauagau

SEQ ID NO: 1823379 - RNA, 19 nt, Artificial Sequence
  Description of Artificial Sequence: Synthetic oligonucleotide
gaacaucagugcuuccugc

SEQ ID NO: 1823380 - RNA, 19 nt, Artificial Sequence
  Description of Artificial Sequence: Synthetic oligonucleotide
caagagaucuguuagcucu

SEQ ID NO: 1823381 - RNA, 19 nt, Artificial Sequence
  Description of Artificial Sequence: Synthetic oligonucleotide
cauuugcgaacaucagugc

SEQ ID NO: 1823382 - RNA, 19 nt, Artificial Sequence
  Description of Artificial Sequence: Synthetic oligonucleotide
cuuaaaguuacuauuccau

SEQ ID NO: 1823383 - RNA, 19 nt, Artificial Sequence
  Description of Artificial Sequence: Synthetic oligonucleotide
cuucugaaauauccguuug

SEQ ID NO: 1823384 - RNA, 19 nt, Artificial Sequence
  Description of Artificial Sequence: Synthetic oligonucleotide
agcuguucaaccgugcucu

SEQ ID NO: 1823385 - RNA, 19 nt, Artificial Sequence
  Description of Artificial Sequence: Synthetic oligonucleotide
aaccaaucauucauaauuu

SEQ ID NO: 1823386 - RNA, 19 nt, Artificial Sequence
  Description of Artificial Sequence: Synthetic oligonucleotide
uucccacauggcuuauugg

SEQ ID NO: 1823387 - RNA, 19 nt, Artificial Sequence
  Description of Artificial Sequence: Synthetic oligonucleotide
uucuugguaauuacacaua

SEQ ID NO: 1823388 - RNA, 19 nt, Artificial Sequence
  Description of Artificial Sequence: Synthetic oligonucleotide
ccaaucauucauaauuuug

SEQ ID NO: 1823389 - RNA, 19 nt, Artificial Sequence
  Description of Artificial Sequence: Synthetic oligonucleotide
caggacugccuucucauag

SEQ ID NO: 1823390 - RNA, 19 nt, Artificial Sequence
  Description of Artificial Sequence: Synthetic oligonucleotide
gauagauggucuuucaguu

SEQ ID NO: 1823391 - RNA, 19 nt, Artificial Sequence
  Description of Artificial Sequence: Synthetic oligonucleotide
gcauuugcgaacaucagug

SEQ ID NO: 1823392 - RNA, 19 nt, Artificial Sequence
  Description of Artificial Sequence: Synthetic oligonucleotide
aaaggaccaucugccuccc

SEQ ID NO: 1823393 - RNA, 19 nt, Artificial Sequence
  Description of Artificial Sequence: Synthetic oligonucleotide
aguacccuuucuuucaguu

SEQ ID NO: 1823394 - RNA, 19 nt, Artificial Sequence
  Description of Artificial Sequence: Synthetic oligonucleotide
cagauagauggucuuucag

SEQ ID NO: 1823395 - RNA, 19 nt, Artificial Sequence
  Description of Artificial Sequence: Synthetic oligonucleotide
aagagaucuguuagcucuc

SEQ ID NO: 1823396 - RNA, 19 nt, Artificial Sequence
  Description of Artificial Sequence: Synthetic oligonucleotide
aaucuuucacuuagcagaa

SEQ ID NO: 1823397 - RNA, 19 nt, Artificial Sequence
  Description of Artificial Sequence: Synthetic oligonucleotide
cauuaucugagauggaaua

SEQ ID NO: 1823398 - RNA, 19 nt, Artificial Sequence
  Description of Artificial Sequence: Synthetic oligonucleotide
agagaucuguuagcucucc

SEQ ID NO: 1823399 - RNA, 19 nt, Artificial Sequence
  Description of Artificial Sequence: Synthetic oligonucleotide
uucaaccgugcucuucuca

SEQ ID NO: 1823400 - RNA, 19 nt, Artificial Sequence
  Description of Artificial Sequence: Synthetic oligonucleotide
cuuaaucacacucccaaua

SEQ ID NO: 1823401 - RNA, 19 nt, Artificial Sequence
  Description of Artificial Sequence: Synthetic oligonucleotide
acagauagauggucuuuca

SEQ ID NO: 1823402 - RNA, 19 nt, Artificial Sequence
  Description of Artificial Sequence: Synthetic oligonucleotide
aucuggaauuaacaucaca

SEQ ID NO: 1823403 - RNA, 19 nt, Artificial Sequence
  Description of Artificial Sequence: Synthetic oligonucleotide
aggaacauuaaugaaucuu

SEQ ID NO: 1823404 - RNA, 19 nt, Artificial Sequence
  Description of Artificial Sequence: Synthetic oligonucleotide
uccugcuuccacaaauguc

SEQ ID NO: 1823405 - RNA, 19 nt, Artificial Sequence
  Description of Artificial Sequence: Synthetic oligonucleotide
uuccugcuuccacaaaugu

SEQ ID NO: 1823406 - RNA, 19 nt, Artificial Sequence
  Description of Artificial Sequence: Synthetic oligonucleotide
uaaaugugucacagacaca

SEQ ID NO: 1823407 - RNA, 19 nt, Artificial Sequence
  Description of Artificial Sequence: Synthetic oligonucleotide
uuuguucagcacacugagu

SEQ ID NO: 1823408 - RNA, 19 nt, Artificial Sequence
  Description of Artificial Sequence: Synthetic oligonucleotide
aagaucucaucuucaucua

SEQ ID NO: 1823409 - RNA, 19 nt, Artificial Sequence
  Description of Artificial Sequence: Synthetic oligonucleotide
aggggaaauggacuagaca

SEQ ID NO: 1823410 - RNA, 19 nt, Artificial Sequence
  Description of Artificial Sequence: Synthetic oligonucleotide
ggaccaacucuuuaauuug

SEQ ID NO: 1823411 - RNA, 19 nt, Artificial Sequence
  Description of Artificial Sequence: Synthetic oligonucleotide
ucaagagaucuguuagcuc

SEQ ID NO: 1823412 - RNA, 19 nt, Artificial Sequence
  Description of Artificial Sequence: Synthetic oligonucleotide
auuaucugagauggaauaa

SEQ ID NO: 1823413 - RNA, 19 nt, Artificial Sequence
  Description of Artificial Sequence: Synthetic oligonucleotide
agaggccuaggaccaacuc

SEQ ID NO: 1823414 - RNA, 19 nt, Artificial Sequence
  Description of Artificial Sequence: Synthetic oligonucleotide
aagaggcuuaugaagccga

SEQ ID NO: 1823415 - RNA, 19 nt, Artificial Sequence
  Description of Artificial Sequence: Synthetic oligonucleotide
ucgcucucuuccuguaccg

SEQ ID NO: 1823416 - RNA, 19 nt, Artificial Sequence
  Description of Artificial Sequence: Synthetic oligonucleotide
ggaggaacauuaaugaauc

SEQ ID NO: 1823417 - RNA, 19 nt, Artificial Sequence
  Description of Artificial Sequence: Synthetic oligonucleotide
aagccgaagaucucaucuu

SEQ ID NO: 1823418 - RNA, 19 nt, Artificial Sequence
  Description of Artificial Sequence: Synthetic oligonucleotide
aauuaacaucacaguucuc

SEQ ID NO: 1823419 - RNA, 19 nt, Artificial Sequence
  Description of Artificial Sequence: Synthetic oligonucleotide
uccucugcauuugcgaaca

SEQ ID NO: 1823420 - RNA, 19 nt, Artificial Sequence
  Description of Artificial Sequence: Synthetic oligonucleotide
ugcaucggcagugcaaucu

SEQ ID NO: 1823421 - RNA, 19 nt, Artificial Sequence
  Description of Artificial Sequence: Synthetic oligonucleotide
ggaauaagcuucaaauuca

SEQ ID NO: 1823422 - RNA, 19 nt, Artificial Sequence
  Description of Artificial Sequence: Synthetic oligonucleotide
cuucuugguaauuacacau

SEQ ID NO: 1823423 - RNA, 19 nt, Artificial Sequence
  Description of Artificial Sequence: Synthetic oligonucleotide
uugauuccgccauaaucau

SEQ ID NO: 1823424 - RNA, 19 nt, Artificial Sequence
  Description of Artificial Sequence: Synthetic oligonucleotide
agcccaucacuguccaggg

SEQ ID NO: 1823425 - RNA, 19 nt, Artificial Sequence
  Description of Artificial Sequence: Synthetic oligonucleotide
acacauggaacagaacccu

SEQ ID NO: 1823426 - RNA, 19 nt, Artificial Sequence
  Description of Artificial Sequence: Synthetic oligonucleotide
uuaauuuguucagcacacu

SEQ ID NO: 1823427 - RNA, 19 nt, Artificial Sequence
  Description of Artificial Sequence: Synthetic oligonucleotide
acuuccucguccacgaucu

SEQ ID NO: 1823428 - RNA, 19 nt, Artificial Sequence
  Description of Artificial Sequence: Synthetic oligonucleotide
gaugccaugcugccggcca

SEQ ID NO: 1823429 - RNA, 19 nt, Artificial Sequence
  Description of Artificial Sequence: Synthetic oligonucleotide
uugaaucaagagaucuguu

SEQ ID NO: 1823430 - RNA, 19 nt, Artificial Sequence
  Description of Artificial Sequence: Synthetic oligonucleotide
caauauucacuuccucguc

SEQ ID NO: 1823431 - RNA, 19 nt, Artificial Sequence
  Description of Artificial Sequence: Synthetic oligonucleotide
acuaaucagcagauagaag

SEQ ID NO: 1823432 - RNA, 19 nt, Artificial Sequence
  Description of Artificial Sequence: Synthetic oligonucleotide
uuaugaagccgaagaucuc

SEQ ID NO: 1823433 - RNA, 19 nt, Artificial Sequence
  Description of Artificial Sequence: Synthetic oligonucleotide
guugaaucaagagaucugu

SEQ ID NO: 1823434 - RNA, 19 nt, Artificial Sequence
  Description of Artificial Sequence: Synthetic oligonucleotide
uagacagauagauggucuu

SEQ ID NO: 1823435 - RNA, 19 nt, Artificial Sequence
  Description of Artificial Sequence: Synthetic oligonucleotide
cccaauaugguucuguuga

SEQ ID NO: 1823436 - RNA, 19 nt, Artificial Sequence
  Description of Artificial Sequence: Synthetic oligonucleotide
gaucuguuagcucuccagu

SEQ ID NO: 1823437 - RNA, 19 nt, Artificial Sequence
  Description of Artificial Sequence: Synthetic oligonucleotide
aucgcugucuucugaaaua

SEQ ID NO: 1823438 - RNA, 19 nt, Artificial Sequence
  Description of Artificial Sequence: Synthetic oligonucleotide
uguuagcucuccaguguuc

SEQ ID NO: 1823439 - RNA, 19 nt, Artificial Sequence
  Description of Artificial Sequence: Synthetic oligonucleotide
accaaucauucauaauuuu

SEQ ID NO: 1823440 - RNA, 19 nt, Artificial Sequence
  Description of Artificial Sequence: Synthetic oligonucleotide
ucucuuccuguaccgagua

SEQ ID NO: 1823441 - RNA, 19 nt, Artificial Sequence
  Description of Artificial Sequence: Synthetic oligonucleotide
auagauggucuuucaguuu

SEQ ID NO: 1823442 - RNA, 19 nt, Artificial Sequence
  Description of Artificial Sequence: Synthetic oligonucleotide
ucguccacgaucucgucuu

SEQ ID NO: 1823443 - RNA, 19 nt, Artificial Sequence
  Description of Artificial Sequence: Synthetic oligonucleotide
cacuguccaggggaaaugg

SEQ ID NO: 1823444 - RNA, 19 nt, Artificial Sequence
  Description of Artificial Sequence: Synthetic oligonucleotide
aauggacuagacagauaga

SEQ ID NO: 1823445 - RNA, 19 nt, Artificial Sequence
  Description of Artificial Sequence: Synthetic oligonucleotide
uaccgaguagcugaacuuc

SEQ ID NO: 1823446 - RNA, 19 nt, Artificial Sequence
  Description of Artificial Sequence: Synthetic oligonucleotide
ucgcuucuuagcuuuggau

SEQ ID NO: 1823447 - RNA, 19 nt, Artificial Sequence
  Description of Artificial Sequence: Synthetic oligonucleotide
cugcauuugcgaacaucag

SEQ ID NO: 1823448 - RNA, 19 nt, Artificial Sequence
  Description of Artificial Sequence: Synthetic oligonucleotide
cuagacagauagauggucu

SEQ ID NO: 1823449 - RNA, 19 nt, Artificial Sequence
  Description of Artificial Sequence: Synthetic oligonucleotide
agcugaacuucaggacugc

SEQ ID NO: 1823450 - RNA, 19 nt, Artificial Sequence
  Description of Artificial Sequence: Synthetic oligonucleotide
cauaaucauuaucugagau

SEQ ID NO: 1823451 - RNA, 19 nt, Artificial Sequence
  Description of Artificial Sequence: Synthetic oligonucleotide
auggaacagaacccuacuu

SEQ ID NO: 1823452 - RNA, 19 nt, Artificial Sequence
  Description of Artificial Sequence: Synthetic oligonucleotide
aggacugccuucucauaga

SEQ ID NO: 1823453 - RNA, 19 nt, Artificial Sequence
  Description of Artificial Sequence: Synthetic oligonucleotide
aacgcucgcuucuuagcuu

SEQ ID NO: 1823454 - RNA, 19 nt, Artificial Sequence
  Description of Artificial Sequence: Synthetic oligonucleotide
uugcgaacaucagugcuuc

SEQ ID NO: 1823455 - RNA, 19 nt, Artificial Sequence
  Description of Artificial Sequence: Synthetic oligonucleotide
acacucccaauaugguucu

SEQ ID NO: 1823456 - RNA, 19 nt, Artificial Sequence
  Description of Artificial Sequence: Synthetic oligonucleotide
aaguagcacuucccacaug

SEQ ID NO: 1823457 - RNA, 19 nt, Artificial Sequence
  Description of Artificial Sequence: Synthetic oligonucleotide
cuucuuagcuuuggaugcc

SEQ ID NO: 1823458 - RNA, 19 nt, Artificial Sequence
  Description of Artificial Sequence: Synthetic oligonucleotide
uggugcaucggcagugcaa

SEQ ID NO: 1823459 - RNA, 19 nt, Artificial Sequence
  Description of Artificial Sequence: Synthetic oligonucleotide
ggagcuuuuaggaaaagcu

SEQ ID NO: 1823460 - RNA, 19 nt, Artificial Sequence
  Description of Artificial Sequence: Synthetic oligonucleotide
uuccgccauaaucauuauc

SEQ ID NO: 1823461 - RNA, 19 nt, Artificial Sequence
  Description of Artificial Sequence: Synthetic oligonucleotide
uucuuagcuuuggaugcca

SEQ ID NO: 1823462 - RNA, 19 nt, Artificial Sequence
  Description of Artificial Sequence: Synthetic oligonucleotide
uaggaccaacucuuuaauu

SEQ ID NO: 1823463 - RNA, 19 nt, Artificial Sequence
  Description of Artificial Sequence: Synthetic oligonucleotide
auccguuugcuuaaucaca

SEQ ID NO: 1823464 - RNA, 19 nt, Artificial Sequence
  Description of Artificial Sequence: Synthetic oligonucleotide
cagcagauagaaguagcac

SEQ ID NO: 1823465 - RNA, 19 nt, Artificial Sequence
  Description of Artificial Sequence: Synthetic oligonucleotide
acgaucucgucuucauccu

SEQ ID NO: 1823466 - RNA, 19 nt, Artificial Sequence
  Description of Artificial Sequence: Synthetic oligonucleotide
uccaggggaaauggacuag

SEQ ID NO: 1823467 - RNA, 19 nt, Artificial Sequence
  Description of Artificial Sequence: Synthetic oligonucleotide
aaaagcuuguccagcuguu

SEQ ID NO: 1823468 - RNA, 19 nt, Artificial Sequence
  Description of Artificial Sequence: Synthetic oligonucleotide
aaucauuaucugagaugga

SEQ ID NO: 1823469 - RNA, 19 nt, Artificial Sequence
  Description of Artificial Sequence: Synthetic oligonucleotide
uuuugugccucagccaguu

SEQ ID NO: 1823470 - RNA, 19 nt, Artificial Sequence
  Description of Artificial Sequence: Synthetic oligonucleotide
cauaaacaagcccaucacu

SEQ ID NO: 1823471 - RNA, 19 nt, Artificial Sequence
  Description of Artificial Sequence: Synthetic oligonucleotide
ugucgcucucuuccuguac

SEQ ID NO: 1823472 - RNA, 19 nt, Artificial Sequence
  Description of Artificial Sequence: Synthetic oligonucleotide
caggggaaauggacuagac

SEQ ID NO: 1823473 - RNA, 19 nt, Artificial Sequence
  Description of Artificial Sequence: Synthetic oligonucleotide
gaggccuaggaccaacucu

SEQ ID NO: 1823474 - RNA, 19 nt, Artificial Sequence
  Description of Artificial Sequence: Synthetic oligonucleotide
uucuugauuccgccauaau

SEQ ID NO: 1823475 - RNA, 19 nt, Artificial Sequence
  Description of Artificial Sequence: Synthetic oligonucleotide
aaggccaucccgccucuuu

SEQ ID NO: 1823476 - RNA, 19 nt, Artificial Sequence
  Description of Artificial Sequence: Synthetic oligonucleotide
aaauauccguuugcuuaau

SEQ ID NO: 1823477 - RNA, 19 nt, Artificial Sequence
  Description of Artificial Sequence: Synthetic oligonucleotide
ugaagccgaagaucucauc

SEQ ID NO: 1823478 - RNA, 19 nt, Artificial Sequence
  Description of Artificial Sequence: Synthetic oligonucleotide
augccaugcugccggccac

SEQ ID NO: 1823479 - RNA, 19 nt, Artificial Sequence
  Description of Artificial Sequence: Synthetic oligonucleotide
ucgcugucuucugaaauau

SEQ ID NO: 1823480 - RNA, 19 nt, Artificial Sequence
  Description of Artificial Sequence: Synthetic oligonucleotide
caaaagcuuguccagcugu

SEQ ID NO: 1823481 - RNA, 19 nt, Artificial Sequence
  Description of Artificial Sequence: Synthetic oligonucleotide
ugauuccgccauaaucauu

SEQ ID NO: 1823482 - RNA, 19 nt, Artificial Sequence
  Description of Artificial Sequence: Synthetic oligonucleotide
gcuuaugaagccgaagauc

SEQ ID NO: 1823483 - RNA, 19 nt, Artificial Sequence
  Description of Artificial Sequence: Synthetic oligonucleotide
caucuggaauuaacaucac

SEQ ID NO: 1823484 - RNA, 19 nt, Artificial Sequence
  Description of Artificial Sequence: Synthetic oligonucleotide
cgcuucuuagcuuuggaug

SEQ ID NO: 1823485 - RNA, 19 nt, Artificial Sequence
  Description of Artificial Sequence: Synthetic oligonucleotide
agcacuucccacauggcuu

SEQ ID NO: 1823486 - RNA, 19 nt, Artificial Sequence
  Description of Artificial Sequence: Synthetic oligonucleotide
ucuuacuaaucagcagaua

SEQ ID NO: 1823487 - RNA, 19 nt, Artificial Sequence
  Description of Artificial Sequence: Synthetic oligonucleotide
aucacacucccaauauggu

SEQ ID NO: 1823488 - RNA, 19 nt, Artificial Sequence
  Description of Artificial Sequence: Synthetic oligonucleotide
uuccuguaccgaguagcug

SEQ ID NO: 1823489 - RNA, 19 nt, Artificial Sequence
  Description of Artificial Sequence: Synthetic oligonucleotide
cagacacauggaacagaac

SEQ ID NO: 1823490 - RNA, 19 nt, Artificial Sequence
  Description of Artificial Sequence: Synthetic oligonucleotide
accccguuucccaacgcuc

SEQ ID NO: 1823491 - RNA, 19 nt, Artificial Sequence
  Description of Artificial Sequence: Synthetic oligonucleotide
ugaaggccaucccgccucu

SEQ ID NO: 1823492 - RNA, 19 nt, Artificial Sequence
  Description of Artificial Sequence: Synthetic oligonucleotide
aucugccucccagacaagu

SEQ ID NO: 1823493 - RNA, 19 nt, Artificial Sequence
  Description of Artificial Sequence: Synthetic oligonucleotide
cucugcauuugcgaacauc

SEQ ID NO: 1823494 - RNA, 19 nt, Artificial Sequence
  Description of Artificial Sequence: Synthetic oligonucleotide
cguuugcuuaaucacacuc

SEQ ID NO: 1823495 - RNA, 19 nt, Artificial Sequence
  Description of Artificial Sequence: Synthetic oligonucleotide
aggccuaggaccaacucuu

SEQ ID NO: 1823496 - RNA, 19 nt, Artificial Sequence
  Description of Artificial Sequence: Synthetic oligonucleotide
cagauagaaguagcacuuc

SEQ ID NO: 1823497 - RNA, 19 nt, Artificial Sequence
  Description of Artificial Sequence: Synthetic oligonucleotide
aggggcuucauuggcacau

SEQ ID NO: 1823498 - RNA, 19 nt, Artificial Sequence
  Description of Artificial Sequence: Synthetic oligonucleotide
acgcucgcuucuuagcuuu

SEQ ID NO: 1823499 - RNA, 19 nt, Artificial Sequence
  Description of Artificial Sequence: Synthetic oligonucleotide
gaggaacauuaaugaaucu

SEQ ID NO: 1823500 - RNA, 19 nt, Artificial Sequence
  Description of Artificial Sequence: Synthetic oligonucleotide
acaggagcuuuuaggaaaa

SEQ ID NO: 1823501 - RNA, 19 nt, Artificial Sequence
  Description of Artificial Sequence: Synthetic oligonucleotide
gaaccccguuucccaacgc

SEQ ID NO: 1823502 - RNA, 19 nt, Artificial Sequence
  Description of Artificial Sequence: Synthetic oligonucleotide
cagaggccgcugaaccccg

SEQ ID NO: 1823503 - RNA, 19 nt, Artificial Sequence
  Description of Artificial Sequence: Synthetic oligonucleotide
agacagauagauggucuuu

SEQ ID NO: 1823504 - RNA, 19 nt, Artificial Sequence
  Description of Artificial Sequence: Synthetic oligonucleotide
ugcgaacaucagugcuucc

SEQ ID NO: 1823505 - RNA, 19 nt, Artificial Sequence
  Description of Artificial Sequence: Synthetic oligonucleotide
accgaguagcugaacuuca

SEQ ID NO: 1823506 - RNA, 19 nt, Artificial Sequence
  Description of Artificial Sequence: Synthetic oligonucleotide
ccaucugccucccagacaa

SEQ ID NO: 1823507 - RNA, 19 nt, Artificial Sequence
  Description of Artificial Sequence: Synthetic oligonucleotide
cagugcaaucuguggagga

SEQ ID NO: 1823508 - RNA, 19 nt, Artificial Sequence
  Description of Artificial Sequence: Synthetic oligonucleotide
acuuagcagaaagcccaca

SEQ ID NO: 1823509 - RNA, 19 nt, Artificial Sequence
  Description of Artificial Sequence: Synthetic oligonucleotide
ccaacgcucgcuucuuagc

SEQ ID NO: 1823510 - RNA, 19 nt, Artificial Sequence
  Description of Artificial Sequence: Synthetic oligonucleotide
ccccguuucccaacgcucg

SEQ ID NO: 1823511 - RNA, 19 nt, Artificial Sequence
  Description of Artificial Sequence: Synthetic oligonucleotide
ccuaggaccaacucuuuaa

SEQ ID NO: 1823512 - RNA, 19 nt, Artificial Sequence
  Description of Artificial Sequence: Synthetic oligonucleotide
guacccuuucuuucaguua

SEQ ID NO: 1823513 - RNA, 19 nt, Artificial Sequence
  Description of Artificial Sequence: Synthetic oligonucleotide
guagcacuucccacauggc

SEQ ID NO: 1823514 - RNA, 19 nt, Artificial Sequence
  Description of Artificial Sequence: Synthetic oligonucleotide
gaccaacucuuuaauuugu

SEQ ID NO: 1823515 - RNA, 19 nt, Artificial Sequence
  Description of Artificial Sequence: Synthetic oligonucleotide
gcaucggcagugcaaucug

SEQ ID NO: 1823516 - RNA, 19 nt, Artificial Sequence
  Description of Artificial Sequence: Synthetic oligonucleotide
ggaacagaacccuacuuuu

SEQ ID NO: 1823517 - RNA, 19 nt, Artificial Sequence
  Description of Artificial Sequence: Synthetic oligonucleotide
cgaguagcugaacuucagg

SEQ ID NO: 1823518 - RNA, 19 nt, Artificial Sequence
  Description of Artificial Sequence: Synthetic oligonucleotide
cuuccuguaccgaguagcu

SEQ ID NO: 1823519 - RNA, 19 nt, Artificial Sequence
  Description of Artificial Sequence: Synthetic oligonucleotide
cucgcuucuuagcuuugga

SEQ ID NO: 1823520 - RNA, 19 nt, Artificial Sequence
  Description of Artificial Sequence: Synthetic oligonucleotide
gaaauggacuagacagaua

SEQ ID NO: 1823521 - RNA, 19 nt, Artificial Sequence
  Description of Artificial Sequence: Synthetic oligonucleotide
caucaucgcugucuucuga

SEQ ID NO: 1823522 - RNA, 19 nt, Artificial Sequence
  Description of Artificial Sequence: Synthetic oligonucleotide
cuucuugauuccgccauaa

SEQ ID NO: 1823523 - RNA, 19 nt, Artificial Sequence
  Description of Artificial Sequence: Synthetic oligonucleotide
auuccgccauaaucauuau

SEQ ID NO: 1823524 - RNA, 19 nt, Artificial Sequence
  Description of Artificial Sequence: Synthetic oligonucleotide
cuaggaccaacucuuuaau

SEQ ID NO: 1823525 - RNA, 19 nt, Artificial Sequence
  Description of Artificial Sequence: Synthetic oligonucleotide
caacgcucgcuucuuagcu

SEQ ID NO: 1823526 - RNA, 19 nt, Artificial Sequence
  Description of Artificial Sequence: Synthetic oligonucleotide
accaacucuuuaauuuguu

SEQ ID NO: 1823527 - RNA, 19 nt, Artificial Sequence
  Description of Artificial Sequence: Synthetic oligonucleotide
aaggaccaucugccuccca

SEQ ID NO: 1823528 - RNA, 19 nt, Artificial Sequence
  Description of Artificial Sequence: Synthetic oligonucleotide
agcacacugaguacccuuu

SEQ ID NO: 1823529 - RNA, 19 nt, Artificial Sequence
  Description of Artificial Sequence: Synthetic oligonucleotide
cuguucaaccgugcucuuc

SEQ ID NO: 1823530 - RNA, 19 nt, Artificial Sequence
  Description of Artificial Sequence: Synthetic oligonucleotide
cccaacgcucgcuucuuag

SEQ ID NO: 1823531 - RNA, 19 nt, Artificial Sequence
  Description of Artificial Sequence: Synthetic oligonucleotide
caaccgugcucuucucaca

SEQ ID NO: 1823532 - RNA, 19 nt, Artificial Sequence
  Description of Artificial Sequence: Synthetic oligonucleotide
accgugcucuucucacagu

SEQ ID NO: 1823533 - RNA, 19 nt, Artificial Sequence
  Description of Artificial Sequence: Synthetic oligonucleotide
ccagaggccgcugaacccc

SEQ ID NO: 1823534 - RNA, 19 nt, Artificial Sequence
  Description of Artificial Sequence: Synthetic oligonucleotide
cgaacaucagugcuuccug

SEQ ID NO: 1823535 - RNA, 19 nt, Artificial Sequence
  Description of Artificial Sequence: Synthetic oligonucleotide
caguuaaauuuaagaggcu

SEQ ID NO: 1823536 - RNA, 19 nt, Artificial Sequence
  Description of Artificial Sequence: Synthetic oligonucleotide
guucaaccgugcucuucuc

SEQ ID NO: 1823537 - RNA, 19 nt, Artificial Sequence
  Description of Artificial Sequence: Synthetic oligonucleotide
cacauggaacagaacccua

SEQ ID NO: 1823538 - RNA, 19 nt, Artificial Sequence
  Description of Artificial Sequence: Synthetic oligonucleotide
guaccgaguagcugaacuu

SEQ ID NO: 1823539 - RNA, 19 nt, Artificial Sequence
  Description of Artificial Sequence: Synthetic oligonucleotide
caggagcuuuuaggaaaag

SEQ ID NO: 1823540 - RNA, 19 nt, Artificial Sequence
  Description of Artificial Sequence: Synthetic oligonucleotide
gucuuacuaaucagcagau

SEQ ID NO: 1823541 - RNA, 19 nt, Artificial Sequence
  Description of Artificial Sequence: Synthetic oligonucleotide
aucuguggaggaacauuaa

SEQ ID NO: 1823542 - RNA, 19 nt, Artificial Sequence
  Description of Artificial Sequence: Synthetic oligonucleotide
ccgccauaaucauuaucug

SEQ ID NO: 1823543 - RNA, 19 nt, Artificial Sequence
  Description of Artificial Sequence: Synthetic oligonucleotide
ggacuugaaucugaauaaa

SEQ ID NO: 1823544 - RNA, 19 nt, Artificial Sequence
  Description of Artificial Sequence: Synthetic oligonucleotide
gcagaaagcccacaggcuu

SEQ ID NO: 1823545 - RNA, 19 nt, Artificial Sequence
  Description of Artificial Sequence: Synthetic oligonucleotide
cuacuucaucaucgcuguc

SEQ ID NO: 1823546 - RNA, 19 nt, Artificial Sequence
  Description of Artificial Sequence: Synthetic oligonucleotide
ccacaaaugucuuacuaau

SEQ ID NO: 1823547 - RNA, 19 nt, Artificial Sequence
  Description of Artificial Sequence: Synthetic oligonucleotide
gaguacccuuucuuucagu

SEQ ID NO: 1823548 - RNA, 19 nt, Artificial Sequence
  Description of Artificial Sequence: Synthetic oligonucleotide
gagauggaauaagcuucaa

SEQ ID NO: 1823549 - RNA, 19 nt, Artificial Sequence
  Description of Artificial Sequence: Synthetic oligonucleotide
ucccaacgcucgcuucuua

SEQ ID NO: 1823550 - RNA, 19 nt, Artificial Sequence
  Description of Artificial Sequence: Synthetic oligonucleotide
ggacugccuucucauagaa

SEQ ID NO: 1823551 - RNA, 19 nt, Artificial Sequence
  Description of Artificial Sequence: Synthetic oligonucleotide
cuuccacaaaugucuuacu

SEQ ID NO: 1823552 - RNA, 19 nt, Artificial Sequence
  Description of Artificial Sequence: Synthetic oligonucleotide
cgccauaaucauuaucuga

SEQ ID NO: 1823553 - RNA, 19 nt, Artificial Sequence
  Description of Artificial Sequence: Synthetic oligonucleotide
gccgcugaaccccguuucc

SEQ ID NO: 1823554 - RNA, 19 nt, Artificial Sequence
  Description of Artificial Sequence: Synthetic oligonucleotide
gcagauagaaguagcacuu

SEQ ID NO: 1823555 - RNA, 19 nt, Artificial Sequence
  Description of Artificial Sequence: Synthetic oligonucleotide
caagugucgcucucuuccu

SEQ ID NO: 1823556 - RNA, 19 nt, Artificial Sequence
  Description of Artificial Sequence: Synthetic oligonucleotide
aggccgcugaaccccguuu

SEQ ID NO: 1823557 - RNA, 19 nt, Artificial Sequence
  Description of Artificial Sequence: Synthetic oligonucleotide
cucguccacgaucucgucu

SEQ ID NO: 1823558 - RNA, 19 nt, Artificial Sequence
  Description of Artificial Sequence: Synthetic oligonucleotide
ggccgcugaaccccguuuc

SEQ ID NO: 1823559 - RNA, 19 nt, Artificial Sequence
  Description of Artificial Sequence: Synthetic oligonucleotide
ccucccagacaagugucgc

SEQ ID NO: 1823560 - RNA, 19 nt, Artificial Sequence
  Description of Artificial Sequence: Synthetic oligonucleotide
caauaugguucuguugaau

SEQ ID NO: 1823561 - RNA, 19 nt, Artificial Sequence
  Description of Artificial Sequence: Synthetic oligonucleotide
cuccaagggcuucuuggua

SEQ ID NO: 1823562 - RNA, 19 nt, Artificial Sequence
  Description of Artificial Sequence: Synthetic oligonucleotide
gaaccagauuuuccugcuu

SEQ ID NO: 1823563 - RNA, 19 nt, Artificial Sequence
  Description of Artificial Sequence: Synthetic oligonucleotide
uucccaacgcucgcuucuu

SEQ ID NO: 1823564 - RNA, 19 nt, Artificial Sequence
  Description of Artificial Sequence: Synthetic oligonucleotide
acauggcuuauuggcuuuu

SEQ ID NO: 1823565 - RNA, 19 nt, Artificial Sequence
  Description of Artificial Sequence: Synthetic oligonucleotide
gcccaucacuguccagggg

SEQ ID NO: 1823566 - RNA, 19 nt, Artificial Sequence
  Description of Artificial Sequence: Synthetic oligonucleotide
cucgcgcugguccugcugu

SEQ ID NO: 1823567 - RNA, 19 nt, Artificial Sequence
  Description of Artificial Sequence: Synthetic oligonucleotide
cucccaauaugguucuguu

SEQ ID NO: 1823568 - RNA, 19 nt, Artificial Sequence
  Description of Artificial Sequence: Synthetic oligonucleotide
guguucacaggagcuuuua

SEQ ID NO: 1823569 - RNA, 19 nt, Artificial Sequence
  Description of Artificial Sequence: Synthetic oligonucleotide
cuguaccgaguagcugaac

SEQ ID NO: 1823570 - RNA, 19 nt, Artificial Sequence
  Description of Artificial Sequence: Synthetic oligonucleotide
gccgaagaucucaucuuca

SEQ ID NO: 1823571 - RNA, 19 nt, Artificial Sequence
  Description of Artificial Sequence: Synthetic oligonucleotide
gugcaucggcagugcaauc

SEQ ID NO: 1823572 - RNA, 19 nt, Artificial Sequence
  Description of Artificial Sequence: Synthetic oligonucleotide
ggugcaucggcagugcaau

SEQ ID NO: 1823573 - RNA, 19 nt, Artificial Sequence
  Description of Artificial Sequence: Synthetic oligonucleotide
gcugaaccccguuucccaa

SEQ ID NO: 1823574 - RNA, 19 nt, Artificial Sequence
  Description of Artificial Sequence: Synthetic oligonucleotide
ccagacaagugucgcucuc

SEQ ID NO: 1823575 - RNA, 19 nt, Artificial Sequence
  Description of Artificial Sequence: Synthetic oligonucleotide
ccaauaugguucuguugaa

SEQ ID NO: 1823576 - RNA, 19 nt, Artificial Sequence
  Description of Artificial Sequence: Synthetic oligonucleotide
gcgaacaucagugcuuccu

SEQ ID NO: 1823577 - RNA, 19 nt, Artificial Sequence
  Description of Artificial Sequence: Synthetic oligonucleotide
ucgcgcugguccugcuguc

SEQ ID NO: 1823578 - RNA, 19 nt, Artificial Sequence
  Description of Artificial Sequence: Synthetic oligonucleotide
caucggcagugcaaucugu

SEQ ID NO: 1823579 - RNA, 19 nt, Artificial Sequence
  Description of Artificial Sequence: Synthetic oligonucleotide
gugucgcucucuuccugua

SEQ ID NO: 1823580 - RNA, 19 nt, Artificial Sequence
  Description of Artificial Sequence: Synthetic oligonucleotide
gcacaucaucaaaggacca

SEQ ID NO: 1823581 - RNA, 19 nt, Artificial Sequence
  Description of Artificial Sequence: Synthetic oligonucleotide
cagacaagugucgcucucu

SEQ ID NO: 1823582 - RNA, 19 nt, Artificial Sequence
  Description of Artificial Sequence: Synthetic oligonucleotide
cacaggcuugcugguguca

SEQ ID NO: 1823583 - RNA, 19 nt, Artificial Sequence
  Description of Artificial Sequence: Synthetic oligonucleotide
acccuuucuuucaguuaaa

SEQ ID NO: 1823584 - RNA, 19 nt, Artificial Sequence
  Description of Artificial Sequence: Synthetic oligonucleotide
cgugcucuucucacaguuc

SEQ ID NO: 1823585 - RNA, 19 nt, Artificial Sequence
  Description of Artificial Sequence: Synthetic oligonucleotide
gccuaggaccaacucuuua

SEQ ID NO: 1823586 - RNA, 19 nt, Artificial Sequence
  Description of Artificial Sequence: Synthetic oligonucleotide
cacucccaauaugguucug

SEQ ID NO: 1823587 - RNA, 19 nt, Artificial Sequence
  Description of Artificial Sequence: Synthetic oligonucleotide
cagcacacugaguacccuu

SEQ ID NO: 1823588 - RNA, 19 nt, Artificial Sequence
  Description of Artificial Sequence: Synthetic oligonucleotide
ccaggggaaauggacuaga

SEQ ID NO: 1823589 - RNA, 19 nt, Artificial Sequence
  Description of Artificial Sequence: Synthetic oligonucleotide
caguguucacaggagcuuu

SEQ ID NO: 1823590 - RNA, 19 nt, Artificial Sequence
  Description of Artificial Sequence: Synthetic oligonucleotide
gaaagcccacaggcuugcu

SEQ ID NO: 1823591 - RNA, 19 nt, Artificial Sequence
  Description of Artificial Sequence: Synthetic oligonucleotide
agaggccgcugaaccccgu

SEQ ID NO: 1823592 - RNA, 19 nt, Artificial Sequence
  Description of Artificial Sequence: Synthetic oligonucleotide
gcaaucuguggaggaacau

SEQ ID NO: 1823593 - RNA, 19 nt, Artificial Sequence
  Description of Artificial Sequence: Synthetic oligonucleotide
cccagacaagugucgcucu

SEQ ID NO: 1823594 - RNA, 19 nt, Artificial Sequence
  Description of Artificial Sequence: Synthetic oligonucleotide
ccgugcucuucucacaguu

SEQ ID NO: 1823595 - RNA, 19 nt, Artificial Sequence
  Description of Artificial Sequence: Synthetic oligonucleotide
ccguuugcuuaaucacacu

SEQ ID NO: 1823596 - RNA, 19 nt, Artificial Sequence
  Description of Artificial Sequence: Synthetic oligonucleotide
cgcucgcuucuuagcuuug

SEQ ID NO: 1823597 - RNA, 19 nt, Artificial Sequence
  Description of Artificial Sequence: Synthetic oligonucleotide
cccuuucuuucaguuaaau

SEQ ID NO: 1823598 - RNA, 19 nt, Artificial Sequence
  Description of Artificial Sequence: Synthetic oligonucleotide
cguccacgaucucgucuuc

SEQ ID NO: 1823599 - RNA, 19 nt, Artificial Sequence
  Description of Artificial Sequence: Synthetic oligonucleotide
gcuguucaaccgugcucuu

SEQ ID NO: 1823600 - RNA, 19 nt, Artificial Sequence
  Description of Artificial Sequence: Synthetic oligonucleotide
gaaggccaucccgccucuu

SEQ ID NO: 1823601 - RNA, 19 nt, Artificial Sequence
  Description of Artificial Sequence: Synthetic oligonucleotide
cguuucccaacgcucgcuu

SEQ ID NO: 1823602 - RNA, 19 nt, Artificial Sequence
  Description of Artificial Sequence: Synthetic oligonucleotide
ccguuucccaacgcucgcu

SEQ ID NO: 1823603 - RNA, 19 nt, Artificial Sequence
  Description of Artificial Sequence: Synthetic oligonucleotide
ggccuaggaccaacucuuu

SEQ ID NO: 1823604 - RNA, 19 nt, Artificial Sequence
  Description of Artificial Sequence: Synthetic oligonucleotide
ccucugcauuugcgaacau

SEQ ID NO: 1823605 - RNA, 19 nt, Artificial Sequence
  Description of Artificial Sequence: Synthetic oligonucleotide
uuuauuauaacaaaagcuc

SEQ ID NO: 1823606 - RNA, 19 nt, Artificial Sequence
  Description of Artificial Sequence: Synthetic oligonucleotide
uuugcuaacaugaccagag

SEQ ID NO: 1823607 - RNA, 19 nt, Artificial Sequence
  Description of Artificial Sequence: Synthetic oligonucleotide
aaccgauuggguaugagcc

SEQ ID NO: 1823608 - RNA, 19 nt, Artificial Sequence
  Description of Artificial Sequence: Synthetic oligonucleotide
gacauggcaaaucacacag

SEQ ID NO: 1823609 - RNA, 19 nt, Artificial Sequence
  Description of Artificial Sequence: Synthetic oligonucleotide
uaugauaccacuucugggu

SEQ ID NO: 1823610 - RNA, 19 nt, Artificial Sequence
  Description of Artificial Sequence: Synthetic oligonucleotide
cuaaccagcuccaacacag

SEQ ID NO: 1823611 - RNA, 19 nt, Artificial Sequence
  Description of Artificial Sequence: Synthetic oligonucleotide
cauuguggcagucugaaag

SEQ ID NO: 1823612 - RNA, 19 nt, Artificial Sequence
  Description of Artificial Sequence: Synthetic oligonucleotide
uuauaacaaaagcucaaac

SEQ ID NO: 1823613 - RNA, 19 nt, Artificial Sequence
  Description of Artificial Sequence: Synthetic oligonucleotide
uuggguaugagccacucca

SEQ ID NO: 1823614 - RNA, 19 nt, Artificial Sequence
  Description of Artificial Sequence: Synthetic oligonucleotide
uaagauugcccuuggaagc

SEQ ID NO: 1823615 - RNA, 19 nt, Artificial Sequence
  Description of Artificial Sequence: Synthetic oligonucleotide
agccaaaucagauucagga

SEQ ID NO: 1823616 - RNA, 19 nt, Artificial Sequence
  Description of Artificial Sequence: Synthetic oligonucleotide
uuaaguugagggaacacaa

SEQ ID NO: 1823617 - RNA, 19 nt, Artificial Sequence
  Description of Artificial Sequence: Synthetic oligonucleotide
ugccagagaaaacagcuag

SEQ ID NO: 1823618 - RNA, 19 nt, Artificial Sequence
  Description of Artificial Sequence: Synthetic oligonucleotide
aacaugaccagagugucag

SEQ ID NO: 1823619 - RNA, 19 nt, Artificial Sequence
  Description of Artificial Sequence: Synthetic oligonucleotide
agccguagcaccuguagcc

SEQ ID NO: 1823620 - RNA, 19 nt, Artificial Sequence
  Description of Artificial Sequence: Synthetic oligonucleotide
ugagauuuccaguggauga

SEQ ID NO: 1823621 - RNA, 19 nt, Artificial Sequence
  Description of Artificial Sequence: Synthetic oligonucleotide
caaaguugcaggaggagcc

SEQ ID NO: 1823622 - RNA, 19 nt, Artificial Sequence
  Description of Artificial Sequence: Synthetic oligonucleotide
caaaucagauucaggagcc

SEQ ID NO: 1823623 - RNA, 19 nt, Artificial Sequence
  Description of Artificial Sequence: Synthetic oligonucleotide
uuucuaguuaaguggagga

SEQ ID NO: 1823624 - RNA, 19 nt, Artificial Sequence
  Description of Artificial Sequence: Synthetic oligonucleotide
guagguuucuaguuaagug

SEQ ID NO: 1823625 - RNA, 19 nt, Artificial Sequence
  Description of Artificial Sequence: Synthetic oligonucleotide
aguuaaguggaggagagug

SEQ ID NO: 1823626 - RNA, 19 nt, Artificial Sequence
  Description of Artificial Sequence: Synthetic oligonucleotide
uaaguagcugcucuagaca

SEQ ID NO: 1823627 - RNA, 19 nt, Artificial Sequence
  Description of Artificial Sequence: Synthetic oligonucleotide
gaaagcuugaggaagguga

SEQ ID NO: 1823628 - RNA, 19 nt, Artificial Sequence
  Description of Artificial Sequence: Synthetic oligonucleotide
aguugugagaaccgauugg

SEQ ID NO: 1823629 - RNA, 19 nt, Artificial Sequence
  Description of Artificial Sequence: Synthetic oligonucleotide
cuugguguaacucggguac

SEQ ID NO: 1823630 - RNA, 19 nt, Artificial Sequence
  Description of Artificial Sequence: Synthetic oligonucleotide
ucuggaguugugagaaccg

SEQ ID NO: 1823631 - RNA, 19 nt, Artificial Sequence
  Description of Artificial Sequence: Synthetic oligonucleotide
auugagauacagcagcccu

SEQ ID NO: 1823632 - RNA, 19 nt, Artificial Sequence
  Description of Artificial Sequence: Synthetic oligonucleotide
agaagcaaggagcuucuuc

SEQ ID NO: 1823633 - RNA, 19 nt, Artificial Sequence
  Description of Artificial Sequence: Synthetic oligonucleotide
cuaguuaaguggaggagag

SEQ ID NO: 1823634 - RNA, 19 nt, Artificial Sequence
  Description of Artificial Sequence: Synthetic oligonucleotide
guugugagaaccgauuggg

SEQ ID NO: 1823635 - RNA, 19 nt, Artificial Sequence
  Description of Artificial Sequence: Synthetic oligonucleotide
cuuagccagaguuaauccc

SEQ ID NO: 1823636 - RNA, 19 nt, Artificial Sequence
  Description of Artificial Sequence: Synthetic oligonucleotide
guaugauaccacuucuggg

SEQ ID NO: 1823637 - RNA, 19 nt, Artificial Sequence
  Description of Artificial Sequence: Synthetic oligonucleotide
guacuugagauuuccagug

SEQ ID NO: 1823638 - RNA, 19 nt, Artificial Sequence
  Description of Artificial Sequence: Synthetic oligonucleotide
gguaugauaccacuucugg

SEQ ID NO: 1823639 - RNA, 19 nt, Artificial Sequence
  Description of Artificial Sequence: Synthetic oligonucleotide
ucuaguuaaguggaggaga

SEQ ID NO: 1823640 - RNA, 19 nt, Artificial Sequence
  Description of Artificial Sequence: Synthetic oligonucleotide
ucuuagccagaguuaaucc

SEQ ID NO: 1823641 - RNA, 19 nt, Artificial Sequence
  Description of Artificial Sequence: Synthetic oligonucleotide
ucggguaccccuuaaguug

SEQ ID NO: 1823642 - RNA, 19 nt, Artificial Sequence
  Description of Artificial Sequence: Synthetic oligonucleotide
aguugagggaacacaaggc

SEQ ID NO: 1823643 - RNA, 19 nt, Artificial Sequence
  Description of Artificial Sequence: Synthetic oligonucleotide
uugacauggcaaaucacac

SEQ ID NO: 1823644 - RNA, 19 nt, Artificial Sequence
  Description of Artificial Sequence: Synthetic oligonucleotide
cucagauaugccauacagg

SEQ ID NO: 1823645 - RNA, 19 nt, Artificial Sequence
  Description of Artificial Sequence: Synthetic oligonucleotide
gaguuaaucccucagauau

SEQ ID NO: 1823646 - RNA, 19 nt, Artificial Sequence
  Description of Artificial Sequence: Synthetic oligonucleotide
guugucugggaacuguagg

SEQ ID NO: 1823647 - RNA, 19 nt, Artificial Sequence
  Description of Artificial Sequence: Synthetic oligonucleotide
gaaccgauuggguaugagc

SEQ ID NO: 1823648 - RNA, 19 nt, Artificial Sequence
  Description of Artificial Sequence: Synthetic oligonucleotide
ugggcaacugcuaaucaca

SEQ ID NO: 1823649 - RNA, 19 nt, Artificial Sequence
  Description of Artificial Sequence: Synthetic oligonucleotide
ugcaguucaugccagugcu

SEQ ID NO: 1823650 - RNA, 19 nt, Artificial Sequence
  Description of Artificial Sequence: Synthetic oligonucleotide
ugagggucaaccucuggag

SEQ ID NO: 1823651 - RNA, 19 nt, Artificial Sequence
  Description of Artificial Sequence: Synthetic oligonucleotide
ugagccacuccagagaagc

SEQ ID NO: 1823652 - RNA, 19 nt, Artificial Sequence
  Description of Artificial Sequence: Synthetic oligonucleotide
uggaugagggucaaccucu

SEQ ID NO: 1823653 - RNA, 19 nt, Artificial Sequence
  Description of Artificial Sequence: Synthetic oligonucleotide
guaaguagcugcucuagac

SEQ ID NO: 1823654 - RNA, 19 nt, Artificial Sequence
  Description of Artificial Sequence: Synthetic oligonucleotide
acagcuuccgcauucggga

SEQ ID NO: 1823655 - RNA, 19 nt, Artificial Sequence
  Description of Artificial Sequence: Synthetic oligonucleotide
gaccucuaggacuuggagc

SEQ ID NO: 1823656 - RNA, 19 nt, Artificial Sequence
  Description of Artificial Sequence: Synthetic oligonucleotide
cucauugcucacaaaguug

SEQ ID NO: 1823657 - RNA, 19 nt, Artificial Sequence
  Description of Artificial Sequence: Synthetic oligonucleotide
ugugagaaccgauugggua

SEQ ID NO: 1823658 - RNA, 19 nt, Artificial Sequence
  Description of Artificial Sequence: Synthetic oligonucleotide
gaguugugagaaccgauug

SEQ ID NO: 1823659 - RNA, 19 nt, Artificial Sequence
  Description of Artificial Sequence: Synthetic oligonucleotide
augauaccacuucuggguc

SEQ ID NO: 1823660 - RNA, 19 nt, Artificial Sequence
  Description of Artificial Sequence: Synthetic oligonucleotide
gaagccaaaucagauucag

SEQ ID NO: 1823661 - RNA, 19 nt, Artificial Sequence
  Description of Artificial Sequence: Synthetic oligonucleotide
auuggguaugagccacucc

SEQ ID NO: 1823662 - RNA, 19 nt, Artificial Sequence
  Description of Artificial Sequence: Synthetic oligonucleotide
uucuucucugccuuaagau

SEQ ID NO: 1823663 - RNA, 19 nt, Artificial Sequence
  Description of Artificial Sequence: Synthetic oligonucleotide
agaggugccagagaaaaca

SEQ ID NO: 1823664 - RNA, 19 nt, Artificial Sequence
  Description of Artificial Sequence: Synthetic oligonucleotide
ucacaaaguugcaggagga

SEQ ID NO: 1823665 - RNA, 19 nt, Artificial Sequence
  Description of Artificial Sequence: Synthetic oligonucleotide
ucuaccauggaauggugua

SEQ ID NO: 1823666 - RNA, 19 nt, Artificial Sequence
  Description of Artificial Sequence: Synthetic oligonucleotide
cagugcuugguguaacucg

SEQ ID NO: 1823667 - RNA, 19 nt, Artificial Sequence
  Description of Artificial Sequence: Synthetic oligonucleotide
agauucaggagccguagca

SEQ ID NO: 1823668 - RNA, 19 nt, Artificial Sequence
  Description of Artificial Sequence: Synthetic oligonucleotide
uugagauacagcagcccug

SEQ ID NO: 1823669 - RNA, 19 nt, Artificial Sequence
  Description of Artificial Sequence: Synthetic oligonucleotide
cuggacuuccuccaggccc

SEQ ID NO: 1823670 - RNA, 19 nt, Artificial Sequence
  Description of Artificial Sequence: Synthetic oligonucleotide
ugaccucuaggacuuggag

SEQ ID NO: 1823671 - RNA, 19 nt, Artificial Sequence
  Description of Artificial Sequence: Synthetic oligonucleotide
gaagcaaggagcuucuucu

SEQ ID NO: 1823672 - RNA, 19 nt, Artificial Sequence
  Description of Artificial Sequence: Synthetic oligonucleotide
guaggcacgcuucaguccc

SEQ ID NO: 1823673 - RNA, 19 nt, Artificial Sequence
  Description of Artificial Sequence: Synthetic oligonucleotide
ucugggaacuguaggucag

SEQ ID NO: 1823674 - RNA, 19 nt, Artificial Sequence
  Description of Artificial Sequence: Synthetic oligonucleotide
ugcucuagacaccacugga

SEQ ID NO: 1823675 - RNA, 19 nt, Artificial Sequence
  Description of Artificial Sequence: Synthetic oligonucleotide
aagauggcuguugucuggg

SEQ ID NO: 1823676 - RNA, 19 nt, Artificial Sequence
  Description of Artificial Sequence: Synthetic oligonucleotide
cuuaagauugcccuuggaa

SEQ ID NO: 1823677 - RNA, 19 nt, Artificial Sequence
  Description of Artificial Sequence: Synthetic oligonucleotide
uggacucuaccauggaaug

SEQ ID NO: 1823678 - RNA, 19 nt, Artificial Sequence
  Description of Artificial Sequence: Synthetic oligonucleotide
uugggaagccaaaucagau

SEQ ID NO: 1823679 - RNA, 19 nt, Artificial Sequence
  Description of Artificial Sequence: Synthetic oligonucleotide
uucuaguuaaguggaggag

SEQ ID NO: 1823680 - RNA, 19 nt, Artificial Sequence
  Description of Artificial Sequence: Synthetic oligonucleotide
gugugauccgagcacagcc

SEQ ID NO: 1823681 - RNA, 19 nt, Artificial Sequence
  Description of Artificial Sequence: Synthetic oligonucleotide
uucuuagccagaguuaauc

SEQ ID NO: 1823682 - RNA, 19 nt, Artificial Sequence
  Description of Artificial Sequence: Synthetic oligonucleotide
aacugguagguuucuaguu

SEQ ID NO: 1823683 - RNA, 19 nt, Artificial Sequence
  Description of Artificial Sequence: Synthetic oligonucleotide
aaaucagauucaggagccg

SEQ ID NO: 1823684 - RNA, 19 nt, Artificial Sequence
  Description of Artificial Sequence: Synthetic oligonucleotide
ugugauccgagcacagcca

SEQ ID NO: 1823685 - RNA, 19 nt, Artificial Sequence
  Description of Artificial Sequence: Synthetic oligonucleotide
aacuguaggucagccacag

SEQ ID NO: 1823686 - RNA, 19 nt, Artificial Sequence
  Description of Artificial Sequence: Synthetic oligonucleotide
ugacauggcaaaucacaca

SEQ ID NO: 1823687 - RNA, 19 nt, Artificial Sequence
  Description of Artificial Sequence: Synthetic oligonucleotide
aggagagugggcucguaag

SEQ ID NO: 1823688 - RNA, 19 nt, Artificial Sequence
  Description of Artificial Sequence: Synthetic oligonucleotide
agugcuugguguaacucgg

SEQ ID NO: 1823689 - RNA, 19 nt, Artificial Sequence
  Description of Artificial Sequence: Synthetic oligonucleotide
aacucggguaccccuuaag

SEQ ID NO: 1823690 - RNA, 19 nt, Artificial Sequence
  Description of Artificial Sequence: Synthetic oligonucleotide
cucccucaggguaugauac

SEQ ID NO: 1823691 - RNA, 19 nt, Artificial Sequence
  Description of Artificial Sequence: Synthetic oligonucleotide
gagauuuccaguggaugag

SEQ ID NO: 1823692 - RNA, 19 nt, Artificial Sequence
  Description of Artificial Sequence: Synthetic oligonucleotide
uguggacucuaccauggaa

SEQ ID NO: 1823693 - RNA, 19 nt, Artificial Sequence
  Description of Artificial Sequence: Synthetic oligonucleotide
gauugagauacagcagccc

SEQ ID NO: 1823694 - RNA, 19 nt, Artificial Sequence
  Description of Artificial Sequence: Synthetic oligonucleotide
ugggcucguaaguagcugc

SEQ ID NO: 1823695 - RNA, 19 nt, Artificial Sequence
  Description of Artificial Sequence: Synthetic oligonucleotide
ugcccuuggaagcucggcc

SEQ ID NO: 1823696 - RNA, 19 nt, Artificial Sequence
  Description of Artificial Sequence: Synthetic oligonucleotide
agcuuccgcauucgggacc

SEQ ID NO: 1823697 - RNA, 19 nt, Artificial Sequence
  Description of Artificial Sequence: Synthetic oligonucleotide
ucuugacauggcaaaucac

SEQ ID NO: 1823698 - RNA, 19 nt, Artificial Sequence
  Description of Artificial Sequence: Synthetic oligonucleotide
aagauugcccuuggaagcu

SEQ ID NO: 1823699 - RNA, 19 nt, Artificial Sequence
  Description of Artificial Sequence: Synthetic oligonucleotide
uaaccagcuccaacacagg

SEQ ID NO: 1823700 - RNA, 19 nt, Artificial Sequence
  Description of Artificial Sequence: Synthetic oligonucleotide
cuuaaguugagggaacaca

SEQ ID NO: 1823701 - RNA, 19 nt, Artificial Sequence
  Description of Artificial Sequence: Synthetic oligonucleotide
cuaacaugaccagaguguc

SEQ ID NO: 1823702 - RNA, 19 nt, Artificial Sequence
  Description of Artificial Sequence: Synthetic oligonucleotide
caaccucuggaguugugag

SEQ ID NO: 1823703 - RNA, 19 nt, Artificial Sequence
  Description of Artificial Sequence: Synthetic oligonucleotide
acugguagguuucuaguua

SEQ ID NO: 1823704 - RNA, 19 nt, Artificial Sequence
  Description of Artificial Sequence: Synthetic oligonucleotide
uaccccuuaaguugaggga

SEQ ID NO: 1823705 - RNA, 19 nt, Artificial Sequence
  Description of Artificial Sequence: Synthetic oligonucleotide
uaacaugaccagaguguca

SEQ ID NO: 1823706 - RNA, 19 nt, Artificial Sequence
  Description of Artificial Sequence: Synthetic oligonucleotide
ugauccgagcacagccacg

SEQ ID NO: 1823707 - RNA, 19 nt, Artificial Sequence
  Description of Artificial Sequence: Synthetic oligonucleotide
aagccaaaucagauucagg

SEQ ID NO: 1823708 - RNA, 19 nt, Artificial Sequence
  Description of Artificial Sequence: Synthetic oligonucleotide
uccaagucuuucucgcuga

SEQ ID NO: 1823709 - RNA, 19 nt, Artificial Sequence
  Description of Artificial Sequence: Synthetic oligonucleotide
aggguaugauaccacuucu

SEQ ID NO: 1823710 - RNA, 19 nt, Artificial Sequence
  Description of Artificial Sequence: Synthetic oligonucleotide
aaccucuggaguugugaga

SEQ ID NO: 1823711 - RNA, 19 nt, Artificial Sequence
  Description of Artificial Sequence: Synthetic oligonucleotide
ucguaaguagcugcucuag

SEQ ID NO: 1823712 - RNA, 19 nt, Artificial Sequence
  Description of Artificial Sequence: Synthetic oligonucleotide
aguggaugagggucaaccu

SEQ ID NO: 1823713 - RNA, 19 nt, Artificial Sequence
  Description of Artificial Sequence: Synthetic oligonucleotide
gggaacacaaggcugggug

SEQ ID NO: 1823714 - RNA, 19 nt, Artificial Sequence
  Description of Artificial Sequence: Synthetic oligonucleotide
uuccaguggaugaggguca

SEQ ID NO: 1823715 - RNA, 19 nt, Artificial Sequence
  Description of Artificial Sequence: Synthetic oligonucleotide
ugcuaaccagcuccaacac

SEQ ID NO: 1823716 - RNA, 19 nt, Artificial Sequence
  Description of Artificial Sequence: Synthetic oligonucleotide
ugccuuaagauugcccuug

SEQ ID NO: 1823717 - RNA, 19 nt, Artificial Sequence
  Description of Artificial Sequence: Synthetic oligonucleotide
ugcuugguguaacucgggu

SEQ ID NO: 1823718 - RNA, 19 nt, Artificial Sequence
  Description of Artificial Sequence: Synthetic oligonucleotide
agcuccucaagguugggaa

SEQ ID NO: 1823719 - RNA, 19 nt, Artificial Sequence
  Description of Artificial Sequence: Synthetic oligonucleotide
ugaaagcuugaggaaggug

SEQ ID NO: 1823720 - RNA, 19 nt, Artificial Sequence
  Description of Artificial Sequence: Synthetic oligonucleotide
ugguagguuucuaguuaag

SEQ ID NO: 1823721 - RNA, 19 nt, Artificial Sequence
  Description of Artificial Sequence: Synthetic oligonucleotide
cugggcaacugcuaaucac

SEQ ID NO: 1823722 - RNA, 19 nt, Artificial Sequence
  Description of Artificial Sequence: Synthetic oligonucleotide
cacuggacuuccuccaggc

SEQ ID NO: 1823723 - RNA, 19 nt, Artificial Sequence
  Description of Artificial Sequence: Synthetic oligonucleotide
acuccagauugagauacag

SEQ ID NO: 1823724 - RNA, 19 nt, Artificial Sequence
  Description of Artificial Sequence: Synthetic oligonucleotide
cucuugacauggcaaauca

SEQ ID NO: 1823725 - RNA, 19 nt, Artificial Sequence
  Description of Artificial Sequence: Synthetic oligonucleotide
cugcuaaucacagaacuga

SEQ ID NO: 1823726 - RNA, 19 nt, Artificial Sequence
  Description of Artificial Sequence: Synthetic oligonucleotide
agaguuaaucccucagaua

SEQ ID NO: 1823727 - RNA, 19 nt, Artificial Sequence
  Description of Artificial Sequence: Synthetic oligonucleotide
guaugagccacuccagaga

SEQ ID NO: 1823728 - RNA, 19 nt, Artificial Sequence
  Description of Artificial Sequence: Synthetic oligonucleotide
uccgcauucgggacccugc

SEQ ID NO: 1823729 - RNA, 19 nt, Artificial Sequence
  Description of Artificial Sequence: Synthetic oligonucleotide
cugcucuagacaccacugg

SEQ ID NO: 1823730 - RNA, 19 nt, Artificial Sequence
  Description of Artificial Sequence: Synthetic oligonucleotide
gauugcccuuggaagcucg

SEQ ID NO: 1823731 - RNA, 19 nt, Artificial Sequence
  Description of Artificial Sequence: Synthetic oligonucleotide
agcuguggacucuaccaug

SEQ ID NO: 1823732 - RNA, 19 nt, Artificial Sequence
  Description of Artificial Sequence: Synthetic oligonucleotide
uggagcaagcgucccagaa

SEQ ID NO: 1823733 - RNA, 19 nt, Artificial Sequence
  Description of Artificial Sequence: Synthetic oligonucleotide
guugagggaacacaaggcu

SEQ ID NO: 1823734 - RNA, 19 nt, Artificial Sequence
  Description of Artificial Sequence: Synthetic oligonucleotide
uguaacucggguaccccuu

SEQ ID NO: 1823735 - RNA, 19 nt, Artificial Sequence
  Description of Artificial Sequence: Synthetic oligonucleotide
agcugcucuagacaccacu

SEQ ID NO: 1823736 - RNA, 19 nt, Artificial Sequence
  Description of Artificial Sequence: Synthetic oligonucleotide
uggaguugugagaaccgau

SEQ ID NO: 1823737 - RNA, 19 nt, Artificial Sequence
  Description of Artificial Sequence: Synthetic oligonucleotide
ucggccaaccagcaugggu

SEQ ID NO: 1823738 - RNA, 19 nt, Artificial Sequence
  Description of Artificial Sequence: Synthetic oligonucleotide
ugagaaccgauuggguaug

SEQ ID NO: 1823739 - RNA, 19 nt, Artificial Sequence
  Description of Artificial Sequence: Synthetic oligonucleotide
uacaggcccagguacaguu

SEQ ID NO: 1823740 - RNA, 19 nt, Artificial Sequence
  Description of Artificial Sequence: Synthetic oligonucleotide
aacacaggguguacuugag

SEQ ID NO: 1823741 - RNA, 19 nt, Artificial Sequence
  Description of Artificial Sequence: Synthetic oligonucleotide
ucuagacaccacuggacuu

SEQ ID NO: 1823742 - RNA, 19 nt, Artificial Sequence
  Description of Artificial Sequence: Synthetic oligonucleotide
uugcuaacaugaccagagu

SEQ ID NO: 1823743 - RNA, 19 nt, Artificial Sequence
  Description of Artificial Sequence: Synthetic oligonucleotide
augccauacaggcccaggu

SEQ ID NO: 1823744 - RNA, 19 nt, Artificial Sequence
  Description of Artificial Sequence: Synthetic oligonucleotide
cacgcuucaguccccuggg

SEQ ID NO: 1823745 - RNA, 19 nt, Artificial Sequence
  Description of Artificial Sequence: Synthetic oligonucleotide
gagccguagcaccuguagc

SEQ ID NO: 1823746 - RNA, 19 nt, Artificial Sequence
  Description of Artificial Sequence: Synthetic oligonucleotide
aguugcaggggugugcugu

SEQ ID NO: 1823747 - RNA, 19 nt, Artificial Sequence
  Description of Artificial Sequence: Synthetic oligonucleotide
cuaccauggaaugguguag

SEQ ID NO: 1823748 - RNA, 19 nt, Artificial Sequence
  Description of Artificial Sequence: Synthetic oligonucleotide
guggaugagggucaaccuc

SEQ ID NO: 1823749 - RNA, 19 nt, Artificial Sequence
  Description of Artificial Sequence: Synthetic oligonucleotide
ugggaagccaaaucagauu

SEQ ID NO: 1823750 - RNA, 19 nt, Artificial Sequence
  Description of Artificial Sequence: Synthetic oligonucleotide
cuuggaagcucggccaacc

SEQ ID NO: 1823751 - RNA, 19 nt, Artificial Sequence
  Description of Artificial Sequence: Synthetic oligonucleotide
aguugcaggaggagccagc

SEQ ID NO: 1823752 - RNA, 19 nt, Artificial Sequence
  Description of Artificial Sequence: Synthetic oligonucleotide
gagggcagccuuucugcag

SEQ ID NO: 1823753 - RNA, 19 nt, Artificial Sequence
  Description of Artificial Sequence: Synthetic oligonucleotide
guugcaguucaugccagug

SEQ ID NO: 1823754 - RNA, 19 nt, Artificial Sequence
  Description of Artificial Sequence: Synthetic oligonucleotide
uggagcucggagcaggcuu

SEQ ID NO: 1823755 - RNA, 19 nt, Artificial Sequence
  Description of Artificial Sequence: Synthetic oligonucleotide
aaggcuugggaagccaaau

SEQ ID NO: 1823756 - RNA, 19 nt, Artificial Sequence
  Description of Artificial Sequence: Synthetic oligonucleotide
gauccgagcacagccacga

SEQ ID NO: 1823757 - RNA, 19 nt, Artificial Sequence
  Description of Artificial Sequence: Synthetic oligonucleotide
ugguguaacucggguaccc

SEQ ID NO: 1823758 - RNA, 19 nt, Artificial Sequence
  Description of Artificial Sequence: Synthetic oligonucleotide
aggggugugcuguugcagu

SEQ ID NO: 1823759 - RNA, 19 nt, Artificial Sequence
  Description of Artificial Sequence: Synthetic oligonucleotide
uuggccacugaaguccagc

SEQ ID NO: 1823760 - RNA, 19 nt, Artificial Sequence
  Description of Artificial Sequence: Synthetic oligonucleotide
accgauuggguaugagcca

SEQ ID NO: 1823761 - RNA, 19 nt, Artificial Sequence
  Description of Artificial Sequence: Synthetic oligonucleotide
gcuguugcaguucaugcca

SEQ ID NO: 1823762 - RNA, 19 nt, Artificial Sequence
  Description of Artificial Sequence: Synthetic oligonucleotide
guacaguugcuccagcucu

SEQ ID NO: 1823763 - RNA, 19 nt, Artificial Sequence
  Description of Artificial Sequence: Synthetic oligonucleotide
ggacuccagauugagauac

SEQ ID NO: 1823764 - RNA, 19 nt, Artificial Sequence
  Description of Artificial Sequence: Synthetic oligonucleotide
gaaguccagcucccucagg

SEQ ID NO: 1823765 - RNA, 19 nt, Artificial Sequence
  Description of Artificial Sequence: Synthetic oligonucleotide
cagaacugacagugcuugg

SEQ ID NO: 1823766 - RNA, 19 nt, Artificial Sequence
  Description of Artificial Sequence: Synthetic oligonucleotide
ugccauacaggcccaggua

SEQ ID NO: 1823767 - RNA, 19 nt, Artificial Sequence
  Description of Artificial Sequence: Synthetic oligonucleotide
cuguugcaguucaugccag

SEQ ID NO: 1823768 - RNA, 19 nt, Artificial Sequence
  Description of Artificial Sequence: Synthetic oligonucleotide
aagccuggucccuggggca

SEQ ID NO: 1823769 - RNA, 19 nt, Artificial Sequence
  Description of Artificial Sequence: Synthetic oligonucleotide
gcaccccucguccacaagg

SEQ ID NO: 1823770 - RNA, 19 nt, Artificial Sequence
  Description of Artificial Sequence: Synthetic oligonucleotide
cagagugucagcagucaca

SEQ ID NO: 1823771 - RNA, 19 nt, Artificial Sequence
  Description of Artificial Sequence: Synthetic oligonucleotide
gacucuaccauggaauggu

SEQ ID NO: 1823772 - RNA, 19 nt, Artificial Sequence
  Description of Artificial Sequence: Synthetic oligonucleotide
ggagccguagcaccuguag

SEQ ID NO: 1823773 - RNA, 19 nt, Artificial Sequence
  Description of Artificial Sequence: Synthetic oligonucleotide
agauccagcaggcgcaguu

SEQ ID NO: 1823774 - RNA, 19 nt, Artificial Sequence
  Description of Artificial Sequence: Synthetic oligonucleotide
gagugggcucguaaguagc

SEQ ID NO: 1823775 - RNA, 19 nt, Artificial Sequence
  Description of Artificial Sequence: Synthetic oligonucleotide
agccacgaagauccagcag

SEQ ID NO: 1823776 - RNA, 19 nt, Artificial Sequence
  Description of Artificial Sequence: Synthetic oligonucleotide
aguuaaucccucagauaug

SEQ ID NO: 1823777 - RNA, 19 nt, Artificial Sequence
  Description of Artificial Sequence: Synthetic oligonucleotide
cauucgggacccugccucc

SEQ ID NO: 1823778 - RNA, 19 nt, Artificial Sequence
  Description of Artificial Sequence: Synthetic oligonucleotide
aacuugcuaaccagcucca

SEQ ID NO: 1823779 - RNA, 19 nt, Artificial Sequence
  Description of Artificial Sequence: Synthetic oligonucleotide
uguugcaguucaugccagu

SEQ ID NO: 1823780 - RNA, 19 nt, Artificial Sequence
  Description of Artificial Sequence: Synthetic oligonucleotide
gagauacagcagcccuggg

SEQ ID NO: 1823781 - RNA, 19 nt, Artificial Sequence
  Description of Artificial Sequence: Synthetic oligonucleotide
caccccucguccacaaggc

SEQ ID NO: 1823782 - RNA, 19 nt, Artificial Sequence
  Description of Artificial Sequence: Synthetic oligonucleotide
acacaggguguacuugaga

SEQ ID NO: 1823783 - RNA, 19 nt, Artificial Sequence
  Description of Artificial Sequence: Synthetic oligonucleotide
aaaacagcuagggccuguu

SEQ ID NO: 1823784 - RNA, 19 nt, Artificial Sequence
  Description of Artificial Sequence: Synthetic oligonucleotide
gccauacaggcccagguac

SEQ ID NO: 1823785 - RNA, 19 nt, Artificial Sequence
  Description of Artificial Sequence: Synthetic oligonucleotide
gugauccgagcacagccac

SEQ ID NO: 1823786 - RNA, 19 nt, Artificial Sequence
  Description of Artificial Sequence: Synthetic oligonucleotide
cugguagguuucuaguuaa

SEQ ID NO: 1823787 - RNA, 19 nt, Artificial Sequence
  Description of Artificial Sequence: Synthetic oligonucleotide
gauuggguaugagccacuc

SEQ ID NO: 1823788 - RNA, 19 nt, Artificial Sequence
  Description of Artificial Sequence: Synthetic oligonucleotide
caagcgucccagaaccuca

SEQ ID NO: 1823789 - RNA, 19 nt, Artificial Sequence
  Description of Artificial Sequence: Synthetic oligonucleotide
gcacgcuucaguccccugg

SEQ ID NO: 1823790 - RNA, 19 nt, Artificial Sequence
  Description of Artificial Sequence: Synthetic oligonucleotide
uugguguaacucggguacc

SEQ ID NO: 1823791 - RNA, 19 nt, Artificial Sequence
  Description of Artificial Sequence: Synthetic oligonucleotide
acaggguguacuugagauu

SEQ ID NO: 1823792 - RNA, 19 nt, Artificial Sequence
  Description of Artificial Sequence: Synthetic oligonucleotide
uggaaugguguagguccag

SEQ ID NO: 1823793 - RNA, 19 nt, Artificial Sequence
  Description of Artificial Sequence: Synthetic oligonucleotide
cagcaggcgcaguuugggg

SEQ ID NO: 1823794 - RNA, 19 nt, Artificial Sequence
  Description of Artificial Sequence: Synthetic oligonucleotide
cacugggugugauccgagc

SEQ ID NO: 1823795 - RNA, 19 nt, Artificial Sequence
  Description of Artificial Sequence: Synthetic oligonucleotide
cacaggguguacuugagau

SEQ ID NO: 1823796 - RNA, 19 nt, Artificial Sequence
  Description of Artificial Sequence: Synthetic oligonucleotide
agaaccgauuggguaugag

SEQ ID NO: 1823797 - RNA, 19 nt, Artificial Sequence
  Description of Artificial Sequence: Synthetic oligonucleotide
ucccucagauaugccauac

SEQ ID NO: 1823798 - RNA, 19 nt, Artificial Sequence
  Description of Artificial Sequence: Synthetic oligonucleotide
cagugcugaccucuaggac

SEQ ID NO: 1823799 - RNA, 19 nt, Artificial Sequence
  Description of Artificial Sequence: Synthetic oligonucleotide
ggaaugguguagguccagg

SEQ ID NO: 1823800 - RNA, 19 nt, Artificial Sequence
  Description of Artificial Sequence: Synthetic oligonucleotide
gggagcaauggagcaagcg

SEQ ID NO: 1823801 - RNA, 19 nt, Artificial Sequence
  Description of Artificial Sequence: Synthetic oligonucleotide
ucggagcaggcuuuugcua

SEQ ID NO: 1823802 - RNA, 19 nt, Artificial Sequence
  Description of Artificial Sequence: Synthetic oligonucleotide
gaaguucaccacagcugug

SEQ ID NO: 1823803 - RNA, 19 nt, Artificial Sequence
  Description of Artificial Sequence: Synthetic oligonucleotide
uguagccgagggcagccuu

SEQ ID NO: 1823804 - RNA, 19 nt, Artificial Sequence
  Description of Artificial Sequence: Synthetic oligonucleotide
uucaguccccuggggaggc

SEQ ID NO: 1823805 - RNA, 19 nt, Artificial Sequence
  Description of Artificial Sequence: Synthetic oligonucleotide
agcgcacccaagauggcug

SEQ ID NO: 1823806 - RNA, 19 nt, Artificial Sequence
  Description of Artificial Sequence: Synthetic oligonucleotide
agauugcccuuggaagcuc

SEQ ID NO: 1823807 - RNA, 19 nt, Artificial Sequence
  Description of Artificial Sequence: Synthetic oligonucleotide
cucuagacaccacuggacu

SEQ ID NO: 1823808 - RNA, 19 nt, Artificial Sequence
  Description of Artificial Sequence: Synthetic oligonucleotide
uaguuaaguggaggagagu

SEQ ID NO: 1823809 - RNA, 19 nt, Artificial Sequence
  Description of Artificial Sequence: Synthetic oligonucleotide
uaacucggguaccccuuaa

SEQ ID NO: 1823810 - RNA, 19 nt, Artificial Sequence
  Description of Artificial Sequence: Synthetic oligonucleotide
cagcagcgcacccaagaug

SEQ ID NO: 1823811 - RNA, 19 nt, Artificial Sequence
  Description of Artificial Sequence: Synthetic oligonucleotide
cacgaagauccagcaggcg

SEQ ID NO: 1823812 - RNA, 19 nt, Artificial Sequence
  Description of Artificial Sequence: Synthetic oligonucleotide
agccagaguuaaucccuca

SEQ ID NO: 1823813 - RNA, 19 nt, Artificial Sequence
  Description of Artificial Sequence: Synthetic oligonucleotide
cacauuguggcagucugaa

SEQ ID NO: 1823814 - RNA, 19 nt, Artificial Sequence
  Description of Artificial Sequence: Synthetic oligonucleotide
gguuucuaguuaaguggag

SEQ ID NO: 1823815 - RNA, 19 nt, Artificial Sequence
  Description of Artificial Sequence: Synthetic oligonucleotide
agcaggcuuuugcuaacau

SEQ ID NO: 1823816 - RNA, 19 nt, Artificial Sequence
  Description of Artificial Sequence: Synthetic oligonucleotide
gagcacagccacgaagauc

SEQ ID NO: 1823817 - RNA, 19 nt, Artificial Sequence
  Description of Artificial Sequence: Synthetic oligonucleotide
gcucggagcaggcuuuugc

SEQ ID NO: 1823818 - RNA, 19 nt, Artificial Sequence
  Description of Artificial Sequence: Synthetic oligonucleotide
ccggcaggacuccagauug

SEQ ID NO: 1823819 - RNA, 19 nt, Artificial Sequence
  Description of Artificial Sequence: Synthetic oligonucleotide
accggcaggacuccagauu

SEQ ID NO: 1823820 - RNA, 19 nt, Artificial Sequence
  Description of Artificial Sequence: Synthetic oligonucleotide
agugggcucguaaguagcu

SEQ ID NO: 1823821 - RNA, 19 nt, Artificial Sequence
  Description of Artificial Sequence: Synthetic oligonucleotide
cuagggccuguuccaaguc

SEQ ID NO: 1823822 - RNA, 19 nt, Artificial Sequence
  Description of Artificial Sequence: Synthetic oligonucleotide
gagagugggcucguaagua

SEQ ID NO: 1823823 - RNA, 19 nt, Artificial Sequence
  Description of Artificial Sequence: Synthetic oligonucleotide
aggacuccagauugagaua

SEQ ID NO: 1823824 - RNA, 19 nt, Artificial Sequence
  Description of Artificial Sequence: Synthetic oligonucleotide
ggguaugauaccacuucug

SEQ ID NO: 1823825 - RNA, 19 nt, Artificial Sequence
  Description of Artificial Sequence: Synthetic oligonucleotide
gaacacaaggcugggugua

SEQ ID NO: 1823826 - RNA, 19 nt, Artificial Sequence
  Description of Artificial Sequence: Synthetic oligonucleotide
gaacuguaggucagccaca

SEQ ID NO: 1823827 - RNA, 19 nt, Artificial Sequence
  Description of Artificial Sequence: Synthetic oligonucleotide
acauuguggcagucugaaa

SEQ ID NO: 1823828 - RNA, 19 nt, Artificial Sequence
  Description of Artificial Sequence: Synthetic oligonucleotide
gcaccuguagccgagggca

SEQ ID NO: 1823829 - RNA, 19 nt, Artificial Sequence
  Description of Artificial Sequence: Synthetic oligonucleotide
auugcccuuggaagcucgg

SEQ ID NO: 1823830 - RNA, 19 nt, Artificial Sequence
  Description of Artificial Sequence: Synthetic oligonucleotide
gcugcucuagacaccacug

SEQ ID NO: 1823831 - RNA, 19 nt, Artificial Sequence
  Description of Artificial Sequence: Synthetic oligonucleotide
gccuuaagauugcccuugg

SEQ ID NO: 1823832 - RNA, 19 nt, Artificial Sequence
  Description of Artificial Sequence: Synthetic oligonucleotide
cucaggguaugauaccacu

SEQ ID NO: 1823833 - RNA, 19 nt, Artificial Sequence
  Description of Artificial Sequence: Synthetic oligonucleotide
gagggucaaccucuggagu

SEQ ID NO: 1823834 - RNA, 19 nt, Artificial Sequence
  Description of Artificial Sequence: Synthetic oligonucleotide
gacagugcuugguguaacu

SEQ ID NO: 1823835 - RNA, 19 nt, Artificial Sequence
  Description of Artificial Sequence: Synthetic oligonucleotide
ccagggcaaaacugguagg

SEQ ID NO: 1823836 - RNA, 19 nt, Artificial Sequence
  Description of Artificial Sequence: Synthetic oligonucleotide
gcuaaucacagaacugaca

SEQ ID NO: 1823837 - RNA, 19 nt, Artificial Sequence
  Description of Artificial Sequence: Synthetic oligonucleotide
uggggcaccccucguccac

SEQ ID NO: 1823838 - RNA, 19 nt, Artificial Sequence
  Description of Artificial Sequence: Synthetic oligonucleotide
caccacuggacuuccucca

SEQ ID NO: 1823839 - RNA, 19 nt, Artificial Sequence
  Description of Artificial Sequence: Synthetic oligonucleotide
agcugcccagcagcgcacc

SEQ ID NO: 1823840 - RNA, 19 nt, Artificial Sequence
  Description of Artificial Sequence: Synthetic oligonucleotide
uuccgcauucgggacccug

SEQ ID NO: 1823841 - RNA, 19 nt, Artificial Sequence
  Description of Artificial Sequence: Synthetic oligonucleotide
auaugccauacaggcccag

SEQ ID NO: 1823842 - RNA, 19 nt, Artificial Sequence
  Description of Artificial Sequence: Synthetic oligonucleotide
acucuaccauggaauggug

SEQ ID NO: 1823843 - RNA, 19 nt, Artificial Sequence
  Description of Artificial Sequence: Synthetic oligonucleotide
caccuguagccgagggcag

SEQ ID NO: 1823844 - RNA, 19 nt, Artificial Sequence
  Description of Artificial Sequence: Synthetic oligonucleotide
aucagauucaggagccgua

SEQ ID NO: 1823845 - RNA, 19 nt, Artificial Sequence
  Description of Artificial Sequence: Synthetic oligonucleotide
gcucuagacaccacuggac

SEQ ID NO: 1823846 - RNA, 19 nt, Artificial Sequence
  Description of Artificial Sequence: Synthetic oligonucleotide
cucguaaguagcugcucua

SEQ ID NO: 1823847 - RNA, 19 nt, Artificial Sequence
  Description of Artificial Sequence: Synthetic oligonucleotide
gguguaacucggguacccc

SEQ ID NO: 1823848 - RNA, 19 nt, Artificial Sequence
  Description of Artificial Sequence: Synthetic oligonucleotide
aggguguacuugagauuuc

SEQ ID NO: 1823849 - RNA, 19 nt, Artificial Sequence
  Description of Artificial Sequence: Synthetic oligonucleotide
aagcucggccaaccagcau

SEQ ID NO: 1823850 - RNA, 19 nt, Artificial Sequence
  Description of Artificial Sequence: Synthetic oligonucleotide
cccucguccacaaggcuug

SEQ ID NO: 1823851 - RNA, 19 nt, Artificial Sequence
  Description of Artificial Sequence: Synthetic oligonucleotide
cuggaguugugagaaccga

SEQ ID NO: 1823852 - RNA, 19 nt, Artificial Sequence
  Description of Artificial Sequence: Synthetic oligonucleotide
gugggcucguaaguagcug

SEQ ID NO: 1823853 - RNA, 19 nt, Artificial Sequence
  Description of Artificial Sequence: Synthetic oligonucleotide
guguaacucggguaccccu

SEQ ID NO: 1823854 - RNA, 19 nt, Artificial Sequence
  Description of Artificial Sequence: Synthetic oligonucleotide
gcuaaccagcuccaacaca

SEQ ID NO: 1823855 - RNA, 19 nt, Artificial Sequence
  Description of Artificial Sequence: Synthetic oligonucleotide
cagccacgaagauccagca

SEQ ID NO: 1823856 - RNA, 19 nt, Artificial Sequence
  Description of Artificial Sequence: Synthetic oligonucleotide
caggguguacuugagauuu

SEQ ID NO: 1823857 - RNA, 19 nt, Artificial Sequence
  Description of Artificial Sequence: Synthetic oligonucleotide
ggguaugagccacuccaga

SEQ ID NO: 1823858 - RNA, 19 nt, Artificial Sequence
  Description of Artificial Sequence: Synthetic oligonucleotide
gcucggccaaccagcaugg

SEQ ID NO: 1823859 - RNA, 19 nt, Artificial Sequence
  Description of Artificial Sequence: Synthetic oligonucleotide
cucuaccauggaauggugu

SEQ ID NO: 1823860 - RNA, 19 nt, Artificial Sequence
  Description of Artificial Sequence: Synthetic oligonucleotide
gguagguuucuaguuaagu

SEQ ID NO: 1823861 - RNA, 19 nt, Artificial Sequence
  Description of Artificial Sequence: Synthetic oligonucleotide
accccucguccacaaggcu

SEQ ID NO: 1823862 - RNA, 19 nt, Artificial Sequence
  Description of Artificial Sequence: Synthetic oligonucleotide
cucggagcaggcuuuugcu

SEQ ID NO: 1823863 - RNA, 19 nt, Artificial Sequence
  Description of Artificial Sequence: Synthetic oligonucleotide
acagcagcccugggcaacu

SEQ ID NO: 1823864 - RNA, 19 nt, Artificial Sequence
  Description of Artificial Sequence: Synthetic oligonucleotide
agggcaaaacugguagguu

SEQ ID NO: 1823865 - RNA, 19 nt, Artificial Sequence
  Description of Artificial Sequence: Synthetic oligonucleotide
guaacucggguaccccuua

SEQ ID NO: 1823866 - RNA, 19 nt, Artificial Sequence
  Description of Artificial Sequence: Synthetic oligonucleotide
cagaaccucauugcucaca

SEQ ID NO: 1823867 - RNA, 19 nt, Artificial Sequence
  Description of Artificial Sequence: Synthetic oligonucleotide
gagcaggcuuuugcuaaca

SEQ ID NO: 1823868 - RNA, 19 nt, Artificial Sequence
  Description of Artificial Sequence: Synthetic oligonucleotide
gcucuugacauggcaaauc

SEQ ID NO: 1823869 - RNA, 19 nt, Artificial Sequence
  Description of Artificial Sequence: Synthetic oligonucleotide
uccaguggaugagggucaa

SEQ ID NO: 1823870 - RNA, 19 nt, Artificial Sequence
  Description of Artificial Sequence: Synthetic oligonucleotide
gggucaaccucuggaguug

SEQ ID NO: 1823871 - RNA, 19 nt, Artificial Sequence
  Description of Artificial Sequence: Synthetic oligonucleotide
cucggguaccccuuaaguu

SEQ ID NO: 1823872 - RNA, 19 nt, Artificial Sequence
  Description of Artificial Sequence: Synthetic oligonucleotide
gaaaacagcuagggccugu

SEQ ID NO: 1823873 - RNA, 19 nt, Artificial Sequence
  Description of Artificial Sequence: Synthetic oligonucleotide
ccucaagguugggaaagcc

SEQ ID NO: 1823874 - RNA, 19 nt, Artificial Sequence
  Description of Artificial Sequence: Synthetic oligonucleotide
gcucguaaguagcugcucu

SEQ ID NO: 1823875 - RNA, 19 nt, Artificial Sequence
  Description of Artificial Sequence: Synthetic oligonucleotide
cagggcaaaacugguaggu

SEQ ID NO: 1823876 - RNA, 19 nt, Artificial Sequence
  Description of Artificial Sequence: Synthetic oligonucleotide
gguguacuugagauuucca

SEQ ID NO: 1823877 - RNA, 19 nt, Artificial Sequence
  Description of Artificial Sequence: Synthetic oligonucleotide
ccgauuggguaugagccac

SEQ ID NO: 1823878 - RNA, 19 nt, Artificial Sequence
  Description of Artificial Sequence: Synthetic oligonucleotide
ccucaggguaugauaccac

SEQ ID NO: 1823879 - RNA, 19 nt, Artificial Sequence
  Description of Artificial Sequence: Synthetic oligonucleotide
gcaauggagcaagcguccc

SEQ ID NO: 1823880 - RNA, 19 nt, Artificial Sequence
  Description of Artificial Sequence: Synthetic oligonucleotide
aagcgucccagaaccucau

SEQ ID NO: 1823881 - RNA, 19 nt, Artificial Sequence
  Description of Artificial Sequence: Synthetic oligonucleotide
cacacaggccacugggugu

SEQ ID NO: 1823882 - RNA, 19 nt, Artificial Sequence
  Description of Artificial Sequence: Synthetic oligonucleotide
acuugcuaaccagcuccaa

SEQ ID NO: 1823883 - RNA, 19 nt, Artificial Sequence
  Description of Artificial Sequence: Synthetic oligonucleotide
cugacagugcuugguguaa

SEQ ID NO: 1823884 - RNA, 19 nt, Artificial Sequence
  Description of Artificial Sequence: Synthetic oligonucleotide
gagaaccgauuggguauga

SEQ ID NO: 1823885 - RNA, 19 nt, Artificial Sequence
  Description of Artificial Sequence: Synthetic oligonucleotide
agggccuguuccaagucuu

SEQ ID NO: 1823886 - RNA, 19 nt, Artificial Sequence
  Description of Artificial Sequence: Synthetic oligonucleotide
auucgggacccugccuccu

SEQ ID NO: 1823887 - RNA, 19 nt, Artificial Sequence
  Description of Artificial Sequence: Synthetic oligonucleotide
agcucccucaggguaugau

SEQ ID NO: 1823888 - RNA, 19 nt, Artificial Sequence
  Description of Artificial Sequence: Synthetic oligonucleotide
cacaaggcuugggaagcca

SEQ ID NO: 1823889 - RNA, 19 nt, Artificial Sequence
  Description of Artificial Sequence: Synthetic oligonucleotide
gagccacuccagagaagca

SEQ ID NO: 1823890 - RNA, 19 nt, Artificial Sequence
  Description of Artificial Sequence: Synthetic oligonucleotide
gucaaccucuggaguugug

SEQ ID NO: 1823891 - RNA, 19 nt, Artificial Sequence
  Description of Artificial Sequence: Synthetic oligonucleotide
caguugcaggggugugcug

SEQ ID NO: 1823892 - RNA, 19 nt, Artificial Sequence
  Description of Artificial Sequence: Synthetic oligonucleotide
agcaagcgucccagaaccu

SEQ ID NO: 1823893 - RNA, 19 nt, Artificial Sequence
  Description of Artificial Sequence: Synthetic oligonucleotide
ggugacagggucacagugu

SEQ ID NO: 1823894 - RNA, 19 nt, Artificial Sequence
  Description of Artificial Sequence: Synthetic oligonucleotide
gcucccucaggguaugaua

SEQ ID NO: 1823895 - RNA, 19 nt, Artificial Sequence
  Description of Artificial Sequence: Synthetic oligonucleotide
ggaguugugagaaccgauu

SEQ ID NO: 1823896 - RNA, 19 nt, Artificial Sequence
  Description of Artificial Sequence: Synthetic oligonucleotide
gcuccucaagguugggaaa

SEQ ID NO: 1823897 - RNA, 19 nt, Artificial Sequence
  Description of Artificial Sequence: Synthetic oligonucleotide
auccgagcacagccacgaa

SEQ ID NO: 1823898 - RNA, 19 nt, Artificial Sequence
  Description of Artificial Sequence: Synthetic oligonucleotide
ggcaccggcaggacuccag

SEQ ID NO: 1823899 - RNA, 19 nt, Artificial Sequence
  Description of Artificial Sequence: Synthetic oligonucleotide
ccccagaggugccagagaa

SEQ ID NO: 1823900 - RNA, 19 nt, Artificial Sequence
  Description of Artificial Sequence: Synthetic oligonucleotide
ggugagccgaggacagaac

SEQ ID NO: 1823901 - RNA, 19 nt, Artificial Sequence
  Description of Artificial Sequence: Synthetic oligonucleotide
ccgcauucgggacccugcc

SEQ ID NO: 1823902 - RNA, 19 nt, Artificial Sequence
  Description of Artificial Sequence: Synthetic oligonucleotide
agcgucccagaaccucauu

SEQ ID NO: 1823903 - RNA, 19 nt, Artificial Sequence
  Description of Artificial Sequence: Synthetic oligonucleotide
cugaaagcuugaggaaggu

SEQ ID NO: 1823904 - RNA, 19 nt, Artificial Sequence
  Description of Artificial Sequence: Synthetic oligonucleotide
cccugggcaacugcuaauc

SEQ ID NO: 1823905 - RNA, 19 nt, Artificial Sequence
  Description of Artificial Sequence: Synthetic oligonucleotide
ccucauugcucacaaaguu

SEQ ID NO: 1823906 - RNA, 19 nt, Artificial Sequence
  Description of Artificial Sequence: Synthetic oligonucleotide
cagcuguggacucuaccau

SEQ ID NO: 1823907 - RNA, 19 nt, Artificial Sequence
  Description of Artificial Sequence: Synthetic oligonucleotide
gcuguugucugggaacugu

SEQ ID NO: 1823908 - RNA, 19 nt, Artificial Sequence
  Description of Artificial Sequence: Synthetic oligonucleotide
cccucaggguaugauacca

SEQ ID NO: 1823909 - RNA, 19 nt, Artificial Sequence
  Description of Artificial Sequence: Synthetic oligonucleotide
cguaaguagcugcucuaga

SEQ ID NO: 1823910 - RNA, 19 nt, Artificial Sequence
  Description of Artificial Sequence: Synthetic oligonucleotide
gcaccggcaggacuccaga

SEQ ID NO: 1823911 - RNA, 19 nt, Artificial Sequence
  Description of Artificial Sequence: Synthetic oligonucleotide
ccuuaagauugcccuugga

SEQ ID NO: 1823912 - RNA, 19 nt, Artificial Sequence
  Description of Artificial Sequence: Synthetic oligonucleotide
ggcucguaaguagcugcuc

SEQ ID NO: 1823913 - RNA, 19 nt, Artificial Sequence
  Description of Artificial Sequence: Synthetic oligonucleotide
gcaggacuccagauugaga

SEQ ID NO: 1823914 - RNA, 19 nt, Artificial Sequence
  Description of Artificial Sequence: Synthetic oligonucleotide
cuccaacacaggguguacu

SEQ ID NO: 1823915 - RNA, 19 nt, Artificial Sequence
  Description of Artificial Sequence: Synthetic oligonucleotide
cugccuuaagauugcccuu

SEQ ID NO: 1823916 - RNA, 19 nt, Artificial Sequence
  Description of Artificial Sequence: Synthetic oligonucleotide
cggguaccccuuaaguuga

SEQ ID NO: 1823917 - RNA, 19 nt, Artificial Sequence
  Description of Artificial Sequence: Synthetic oligonucleotide
ggcacgcuucaguccccug

SEQ ID NO: 1823918 - RNA, 19 nt, Artificial Sequence
  Description of Artificial Sequence: Synthetic oligonucleotide
gcaaaacugguagguuucu

SEQ ID NO: 1823919 - RNA, 19 nt, Artificial Sequence
  Description of Artificial Sequence: Synthetic oligonucleotide
agacaccacuggacuuccu

SEQ ID NO: 1823920 - RNA, 19 nt, Artificial Sequence
  Description of Artificial Sequence: Synthetic oligonucleotide
ggguaccccuuaaguugag

SEQ ID NO: 1823921 - RNA, 19 nt, Artificial Sequence
  Description of Artificial Sequence: Synthetic oligonucleotide
ggggagcaauggagcaagc

SEQ ID NO: 1823922 - RNA, 19 nt, Artificial Sequence
  Description of Artificial Sequence: Synthetic oligonucleotide
cccucagauaugccauaca

SEQ ID NO: 1823923 - RNA, 19 nt, Artificial Sequence
  Description of Artificial Sequence: Synthetic oligonucleotide
cagcgcacccaagauggcu

SEQ ID NO: 1823924 - RNA, 19 nt, Artificial Sequence
  Description of Artificial Sequence: Synthetic oligonucleotide
ccuuggaagcucggccaac

SEQ ID NO: 1823925 - RNA, 19 nt, Artificial Sequence
  Description of Artificial Sequence: Synthetic oligonucleotide
caugggugacagggucaca

SEQ ID NO: 1823926 - RNA, 19 nt, Artificial Sequence
  Description of Artificial Sequence: Synthetic oligonucleotide
cacgggcaguugcaggggu

SEQ ID NO: 1823927 - RNA, 19 nt, Artificial Sequence
  Description of Artificial Sequence: Synthetic oligonucleotide
gccuccacgggcaguugca

SEQ ID NO: 1823928 - RNA, 19 nt, Artificial Sequence
  Description of Artificial Sequence: Synthetic oligonucleotide
ccguagcaccuguagccga

SEQ ID NO: 1823929 - RNA, 19 nt, Artificial Sequence
  Description of Artificial Sequence: Synthetic oligonucleotide
caggagccguagcaccugu

SEQ ID NO: 1823930 - RNA, 19 nt, Artificial Sequence
  Description of Artificial Sequence: Synthetic oligonucleotide
gccccgguaggcacgcuuc

SEQ ID NO: 1823931 - RNA, 19 nt, Artificial Sequence
  Description of Artificial Sequence: Synthetic oligonucleotide
gcagcgcacccaagauggc

SEQ ID NO: 1823932 - RNA, 19 nt, Artificial Sequence
  Description of Artificial Sequence: Synthetic oligonucleotide
ccaagucuuucucgcugaa

SEQ ID NO: 1823933 - RNA, 19 nt, Artificial Sequence
  Description of Artificial Sequence: Synthetic oligonucleotide
guagccgagggcagccuuu

SEQ ID NO: 1823934 - RNA, 19 nt, Artificial Sequence
  Description of Artificial Sequence: Synthetic oligonucleotide
ccucuaggacuuggagcug

SEQ ID NO: 1823935 - RNA, 19 nt, Artificial Sequence
  Description of Artificial Sequence: Synthetic oligonucleotide
ggucaaccucuggaguugu

SEQ ID NO: 1823936 - RNA, 19 nt, Artificial Sequence
  Description of Artificial Sequence: Synthetic oligonucleotide
gggcucguaaguagcugcu

SEQ ID NO: 1823937 - RNA, 19 nt, Artificial Sequence
  Description of Artificial Sequence: Synthetic oligonucleotide
cccuuggaagcucggccaa

SEQ ID NO: 1823938 - RNA, 19 nt, Artificial Sequence
  Description of Artificial Sequence: Synthetic oligonucleotide
ccaguggaugagggucaac

SEQ ID NO: 1823939 - RNA, 19 nt, Artificial Sequence
  Description of Artificial Sequence: Synthetic oligonucleotide
gggcaccccucguccacaa

SEQ ID NO: 1823940 - RNA, 19 nt, Artificial Sequence
  Description of Artificial Sequence: Synthetic oligonucleotide
gcgcacccaagauggcugu

SEQ ID NO: 1823941 - RNA, 19 nt, Artificial Sequence
  Description of Artificial Sequence: Synthetic oligonucleotide
ccccucguccacaaggcuu

SEQ ID NO: 1823942 - RNA, 19 nt, Artificial Sequence
  Description of Artificial Sequence: Synthetic oligonucleotide
cuguagccgagggcagccu

SEQ ID NO: 1823943 - RNA, 19 nt, Artificial Sequence
  Description of Artificial Sequence: Synthetic oligonucleotide
gagcucggagcaggcuuuu

SEQ ID NO: 1823944 - RNA, 19 nt, Artificial Sequence
  Description of Artificial Sequence: Synthetic oligonucleotide
ggaggagagugggcucgua

SEQ ID NO: 1823945 - RNA, 19 nt, Artificial Sequence
  Description of Artificial Sequence: Synthetic oligonucleotide
ggccccgguaggcacgcuu

SEQ ID NO: 1823946 - RNA, 19 nt, Artificial Sequence
  Description of Artificial Sequence: Synthetic oligonucleotide
cgauuggguaugagccacu

SEQ ID NO: 1823947 - RNA, 19 nt, Artificial Sequence
  Description of Artificial Sequence: Synthetic oligonucleotide
cgcauucgggacccugccu

SEQ ID NO: 1823948 - RNA, 19 nt, Artificial Sequence
  Description of Artificial Sequence: Synthetic oligonucleotide
cuuccgcauucgggacccu

SEQ ID NO: 1823949 - RNA, 19 nt, Artificial Sequence
  Description of Artificial Sequence: Synthetic oligonucleotide
cgcacccaagauggcuguu

SEQ ID NO: 1823950 - RNA, 19 nt, Artificial Sequence
  Description of Artificial Sequence: Synthetic oligonucleotide
acuaauuaaaauuaaaugc

SEQ ID NO: 1823951 - RNA, 19 nt, Artificial Sequence
  Description of Artificial Sequence: Synthetic oligonucleotide
uauuauaggaaucacaaug

SEQ ID NO: 1823952 - RNA, 19 nt, Artificial Sequence
  Description of Artificial Sequence: Synthetic oligonucleotide
uaagauauggaauugaacu

SEQ ID NO: 1823953 - RNA, 19 nt, Artificial Sequence
  Description of Artificial Sequence: Synthetic oligonucleotide
aaaagagagagagagagag

SEQ ID NO: 1823954 - RNA, 19 nt, Artificial Sequence
  Description of Artificial Sequence: Synthetic oligonucleotide
uuaucuacaucacagaacu

SEQ ID NO: 1823955 - RNA, 19 nt, Artificial Sequence
  Description of Artificial Sequence: Synthetic oligonucleotide
gacuaauuaaaauuaaaug

SEQ ID NO: 1823956 - RNA, 19 nt, Artificial Sequence
  Description of Artificial Sequence: Synthetic oligonucleotide
aauucuucguaacacguuc

SEQ ID NO: 1823957 - RNA, 19 nt, Artificial Sequence
  Description of Artificial Sequence: Synthetic oligonucleotide
uuugaagcgauuuagcuga

SEQ ID NO: 1823958 - RNA, 19 nt, Artificial Sequence
  Description of Artificial Sequence: Synthetic oligonucleotide
ucuaguaagagcuauggga

SEQ ID NO: 1823959 - RNA, 19 nt, Artificial Sequence
  Description of Artificial Sequence: Synthetic oligonucleotide
aaccaaaagagagagagag

SEQ ID NO: 1823960 - RNA, 19 nt, Artificial Sequence
  Description of Artificial Sequence: Synthetic oligonucleotide
ucauaucuaaggcagaaug

SEQ ID NO: 1823961 - RNA, 19 nt, Artificial Sequence
  Description of Artificial Sequence: Synthetic oligonucleotide
ucaaagacuaauuaaaauu

SEQ ID NO: 1823962 - RNA, 19 nt, Artificial Sequence
  Description of Artificial Sequence: Synthetic oligonucleotide
uauucuccaaacaaugugc

SEQ ID NO: 1823963 - RNA, 19 nt, Artificial Sequence
  Description of Artificial Sequence: Synthetic oligonucleotide
uacacuuauguuuuccucg

SEQ ID NO: 1823964 - RNA, 19 nt, Artificial Sequence
  Description of Artificial Sequence: Synthetic oligonucleotide
aagagagagagagagagag

SEQ ID NO: 1823965 - RNA, 19 nt, Artificial Sequence
  Description of Artificial Sequence: Synthetic oligonucleotide
aagauauggaauugaacug

SEQ ID NO: 1823966 - RNA, 19 nt, Artificial Sequence
  Description of Artificial Sequence: Synthetic oligonucleotide
aauucucacaaugauacug

SEQ ID NO: 1823967 - RNA, 19 nt, Artificial Sequence
  Description of Artificial Sequence: Synthetic oligonucleotide
uagcugaugaucuucauug

SEQ ID NO: 1823968 - RNA, 19 nt, Artificial Sequence
  Description of Artificial Sequence: Synthetic oligonucleotide
uuuccucgaagauucaugg

SEQ ID NO: 1823969 - RNA, 19 nt, Artificial Sequence
  Description of Artificial Sequence: Synthetic oligonucleotide
uauuggacaauucugccga

SEQ ID NO: 1823970 - RNA, 19 nt, Artificial Sequence
  Description of Artificial Sequence: Synthetic oligonucleotide
aaugcauacacaguggaca

SEQ ID NO: 1823971 - RNA, 19 nt, Artificial Sequence
  Description of Artificial Sequence: Synthetic oligonucleotide
aaagcuugucacaacaagg

SEQ ID NO: 1823972 - RNA, 19 nt, Artificial Sequence
  Description of Artificial Sequence: Synthetic oligonucleotide
ugaaugugacuauaucugg

SEQ ID NO: 1823973 - RNA, 19 nt, Artificial Sequence
  Description of Artificial Sequence: Synthetic oligonucleotide
uuacacuucaagcagugga

SEQ ID NO: 1823974 - RNA, 19 nt, Artificial Sequence
  Description of Artificial Sequence: Synthetic oligonucleotide
uguggaucguucauuacag

SEQ ID NO: 1823975 - RNA, 19 nt, Artificial Sequence
  Description of Artificial Sequence: Synthetic oligonucleotide
agagccgacaaguauaaag

SEQ ID NO: 1823976 - RNA, 19 nt, Artificial Sequence
  Description of Artificial Sequence: Synthetic oligonucleotide
cauucugguauuccgaugg

SEQ ID NO: 1823977 - RNA, 19 nt, Artificial Sequence
  Description of Artificial Sequence: Synthetic oligonucleotide
auuuucgauacacuuaugu

SEQ ID NO: 1823978 - RNA, 19 nt, Artificial Sequence
  Description of Artificial Sequence: Synthetic oligonucleotide
acuaaaggaauuuccgauc

SEQ ID NO: 1823979 - RNA, 19 nt, Artificial Sequence
  Description of Artificial Sequence: Synthetic oligonucleotide
aagcauauuggacaauucu

SEQ ID NO: 1823980 - RNA, 19 nt, Artificial Sequence
  Description of Artificial Sequence: Synthetic oligonucleotide
ucuuuuaacaauucuucgu

SEQ ID NO: 1823981 - RNA, 19 nt, Artificial Sequence
  Description of Artificial Sequence: Synthetic oligonucleotide
aggaauuuccgaucaacac

SEQ ID NO: 1823982 - RNA, 19 nt, Artificial Sequence
  Description of Artificial Sequence: Synthetic oligonucleotide
uaaggcagaaugcauacac

SEQ ID NO: 1823983 - RNA, 19 nt, Artificial Sequence
  Description of Artificial Sequence: Synthetic oligonucleotide
gacaugagcaacaacgcgg

SEQ ID NO: 1823984 - RNA, 19 nt, Artificial Sequence
  Description of Artificial Sequence: Synthetic oligonucleotide
aacacguucuauguaagag

SEQ ID NO: 1823985 - RNA, 19 nt, Artificial Sequence
  Description of Artificial Sequence: Synthetic oligonucleotide
cucacaaugauacugcuuc

SEQ ID NO: 1823986 - RNA, 19 nt, Artificial Sequence
  Description of Artificial Sequence: Synthetic oligonucleotide
gacacuaaaggaauuuccg

SEQ ID NO: 1823987 - RNA, 19 nt, Artificial Sequence
  Description of Artificial Sequence: Synthetic oligonucleotide
gagagagagagagagagag

SEQ ID NO: 1823988 - RNA, 19 nt, Artificial Sequence
  Description of Artificial Sequence: Synthetic oligonucleotide
accgacucauaucuaaggc

SEQ ID NO: 1823989 - RNA, 19 nt, Artificial Sequence
  Description of Artificial Sequence: Synthetic oligonucleotide
ugugcuacauucuucacaa

SEQ ID NO: 1823990 - RNA, 19 nt, Artificial Sequence
  Description of Artificial Sequence: Synthetic oligonucleotide
ucgaaaccaaaagagagag

SEQ ID NO: 1823991 - RNA, 19 nt, Artificial Sequence
  Description of Artificial Sequence: Synthetic oligonucleotide
ugacacuaaaggaauuucc

SEQ ID NO: 1823992 - RNA, 19 nt, Artificial Sequence
  Description of Artificial Sequence: Synthetic oligonucleotide
uuucgauacacuuauguuu

SEQ ID NO: 1823993 - RNA, 19 nt, Artificial Sequence
  Description of Artificial Sequence: Synthetic oligonucleotide
cuuccuuuacuuugaagcg

SEQ ID NO: 1823994 - RNA, 19 nt, Artificial Sequence
  Description of Artificial Sequence: Synthetic oligonucleotide
uuuaacaauucuucguaac

SEQ ID NO: 1823995 - RNA, 19 nt, Artificial Sequence
  Description of Artificial Sequence: Synthetic oligonucleotide
cauaguaucacuuaaaguu

SEQ ID NO: 1823996 - RNA, 19 nt, Artificial Sequence
  Description of Artificial Sequence: Synthetic oligonucleotide
cauaucuaaggcagaaugc

SEQ ID NO: 1823997 - RNA, 19 nt, Artificial Sequence
  Description of Artificial Sequence: Synthetic oligonucleotide
uauuccgauggcaugggag

SEQ ID NO: 1823998 - RNA, 19 nt, Artificial Sequence
  Description of Artificial Sequence: Synthetic oligonucleotide
acaacaaggugccuugagg

SEQ ID NO: 1823999 - RNA, 19 nt, Artificial Sequence
  Description of Artificial Sequence: Synthetic oligonucleotide
ucauugacuucaaaacuug

SEQ ID NO: 1824000 - RNA, 19 nt, Artificial Sequence
  Description of Artificial Sequence: Synthetic oligonucleotide
aguauuauaggaaucacaa

SEQ ID NO: 1824001 - RNA, 19 nt, Artificial Sequence
  Description of Artificial Sequence: Synthetic oligonucleotide
ucaacacaucugaagaggc

SEQ ID NO: 1824002 - RNA, 19 nt, Artificial Sequence
  Description of Artificial Sequence: Synthetic oligonucleotide
auuguugucaugacagagc

SEQ ID NO: 1824003 - RNA, 19 nt, Artificial Sequence
  Description of Artificial Sequence: Synthetic oligonucleotide
uuuccgaucaacacaucug

SEQ ID NO: 1824004 - RNA, 19 nt, Artificial Sequence
  Description of Artificial Sequence: Synthetic oligonucleotide
ucguucauuacagucauug

SEQ ID NO: 1824005 - RNA, 19 nt, Artificial Sequence
  Description of Artificial Sequence: Synthetic oligonucleotide
ugugcuaccucauuaucca

SEQ ID NO: 1824006 - RNA, 19 nt, Artificial Sequence
  Description of Artificial Sequence: Synthetic oligonucleotide
cuuugaagcgauuuagcug

SEQ ID NO: 1824007 - RNA, 19 nt, Artificial Sequence
  Description of Artificial Sequence: Synthetic oligonucleotide
gaucaacacaucugaagag

SEQ ID NO: 1824008 - RNA, 19 nt, Artificial Sequence
  Description of Artificial Sequence: Synthetic oligonucleotide
aucuugagcaguauuauag

SEQ ID NO: 1824009 - RNA, 19 nt, Artificial Sequence
  Description of Artificial Sequence: Synthetic oligonucleotide
acuuauguuuuccucgaag

SEQ ID NO: 1824010 - RNA, 19 nt, Artificial Sequence
  Description of Artificial Sequence: Synthetic oligonucleotide
auaguaucacuuaaaguuc

SEQ ID NO: 1824011 - RNA, 19 nt, Artificial Sequence
  Description of Artificial Sequence: Synthetic oligonucleotide
gaagcgauuuagcugauga

SEQ ID NO: 1824012 - RNA, 19 nt, Artificial Sequence
  Description of Artificial Sequence: Synthetic oligonucleotide
acuuugaagcgauuuagcu

SEQ ID NO: 1824013 - RNA, 19 nt, Artificial Sequence
  Description of Artificial Sequence: Synthetic oligonucleotide
ucuccaaacaaugugcuac

SEQ ID NO: 1824014 - RNA, 19 nt, Artificial Sequence
  Description of Artificial Sequence: Synthetic oligonucleotide
aacaaggugccuugaggag

SEQ ID NO: 1824015 - RNA, 19 nt, Artificial Sequence
  Description of Artificial Sequence: Synthetic oligonucleotide
uuauaggaaucacaaugcu

SEQ ID NO: 1824016 - RNA, 19 nt, Artificial Sequence
  Description of Artificial Sequence: Synthetic oligonucleotide
ugugacuauaucuggggca

SEQ ID NO: 1824017 - RNA, 19 nt, Artificial Sequence
  Description of Artificial Sequence: Synthetic oligonucleotide
cauauuggacaauucugcc

SEQ ID NO: 1824018 - RNA, 19 nt, Artificial Sequence
  Description of Artificial Sequence: Synthetic oligonucleotide
cugaugaucuucauuguug

SEQ ID NO: 1824019 - RNA, 19 nt, Artificial Sequence
  Description of Artificial Sequence: Synthetic oligonucleotide
agcgauuuagcugaugauc

SEQ ID NO: 1824020 - RNA, 19 nt, Artificial Sequence
  Description of Artificial Sequence: Synthetic oligonucleotide
uucgauacacuuauguuuu

SEQ ID NO: 1824021 - RNA, 19 nt, Artificial Sequence
  Description of Artificial Sequence: Synthetic oligonucleotide
ugugcauaguaucacuuaa

SEQ ID NO: 1824022 - RNA, 19 nt, Artificial Sequence
  Description of Artificial Sequence: Synthetic oligonucleotide
uggaaguauaaaauauuuc

SEQ ID NO: 1824023 - RNA, 19 nt, Artificial Sequence
  Description of Artificial Sequence: Synthetic oligonucleotide
cuauguaagagauggccac

SEQ ID NO: 1824024 - RNA, 19 nt, Artificial Sequence
  Description of Artificial Sequence: Synthetic oligonucleotide
gaaugugacuauaucuggg

SEQ ID NO: 1824025 - RNA, 19 nt, Artificial Sequence
  Description of Artificial Sequence: Synthetic oligonucleotide
augaaugugacuauaucug

SEQ ID NO: 1824026 - RNA, 19 nt, Artificial Sequence
  Description of Artificial Sequence: Synthetic oligonucleotide
aauauucuccaaacaaugu

SEQ ID NO: 1824027 - RNA, 19 nt, Artificial Sequence
  Description of Artificial Sequence: Synthetic oligonucleotide
cagagaaccgucucgaaac

SEQ ID NO: 1824028 - RNA, 19 nt, Artificial Sequence
  Description of Artificial Sequence: Synthetic oligonucleotide
aacaaugugcuacauucuu

SEQ ID NO: 1824029 - RNA, 19 nt, Artificial Sequence
  Description of Artificial Sequence: Synthetic oligonucleotide
gcauaaauuacacuucaag

SEQ ID NO: 1824030 - RNA, 19 nt, Artificial Sequence
  Description of Artificial Sequence: Synthetic oligonucleotide
agacaugagcaacaacgcg

SEQ ID NO: 1824031 - RNA, 19 nt, Artificial Sequence
  Description of Artificial Sequence: Synthetic oligonucleotide
ucugccgagaaacauuuuc

SEQ ID NO: 1824032 - RNA, 19 nt, Artificial Sequence
  Description of Artificial Sequence: Synthetic oligonucleotide
uugagcaguauuauaggaa

SEQ ID NO: 1824033 - RNA, 19 nt, Artificial Sequence
  Description of Artificial Sequence: Synthetic oligonucleotide
uucguaacacguucuaugu

SEQ ID NO: 1824034 - RNA, 19 nt, Artificial Sequence
  Description of Artificial Sequence: Synthetic oligonucleotide
uacuuugaagcgauuuagc

SEQ ID NO: 1824035 - RNA, 19 nt, Artificial Sequence
  Description of Artificial Sequence: Synthetic oligonucleotide
uaccgacucauaucuaagg

SEQ ID NO: 1824036 - RNA, 19 nt, Artificial Sequence
  Description of Artificial Sequence: Synthetic oligonucleotide
agagaaccgucucgaaacc

SEQ ID NO: 1824037 - RNA, 19 nt, Artificial Sequence
  Description of Artificial Sequence: Synthetic oligonucleotide
auaggaaucacaaugcuua

SEQ ID NO: 1824038 - RNA, 19 nt, Artificial Sequence
  Description of Artificial Sequence: Synthetic oligonucleotide
cugccgagaaacauuuucg

SEQ ID NO: 1824039 - RNA, 19 nt, Artificial Sequence
  Description of Artificial Sequence: Synthetic oligonucleotide
augauacugcuucuuaucu

SEQ ID NO: 1824040 - RNA, 19 nt, Artificial Sequence
  Description of Artificial Sequence: Synthetic oligonucleotide
auaucuggggcaaacauca

SEQ ID NO: 1824041 - RNA, 19 nt, Artificial Sequence
  Description of Artificial Sequence: Synthetic oligonucleotide
cugugcuaccucauuaucc

SEQ ID NO: 1824042 - RNA, 19 nt, Artificial Sequence
  Description of Artificial Sequence: Synthetic oligonucleotide
uccaucuugagcaguauua

SEQ ID NO: 1824043 - RNA, 19 nt, Artificial Sequence
  Description of Artificial Sequence: Synthetic oligonucleotide
uuuuaacaauucuucguaa

SEQ ID NO: 1824044 - RNA, 19 nt, Artificial Sequence
  Description of Artificial Sequence: Synthetic oligonucleotide
aucuaguaagagcuauggg

SEQ ID NO: 1824045 - RNA, 19 nt, Artificial Sequence
  Description of Artificial Sequence: Synthetic oligonucleotide
acuuaaaguuccauggaag

SEQ ID NO: 1824046 - RNA, 19 nt, Artificial Sequence
  Description of Artificial Sequence: Synthetic oligonucleotide
uggaucguucauuacaguc

SEQ ID NO: 1824047 - RNA, 19 nt, Artificial Sequence
  Description of Artificial Sequence: Synthetic oligonucleotide
uuuucgauacacuuauguu

SEQ ID NO: 1824048 - RNA, 19 nt, Artificial Sequence
  Description of Artificial Sequence: Synthetic oligonucleotide
ucauagugcucgcagcccc

SEQ ID NO: 1824049 - RNA, 19 nt, Artificial Sequence
  Description of Artificial Sequence: Synthetic oligonucleotide
agauauggaauugaacugu

SEQ ID NO: 1824050 - RNA, 19 nt, Artificial Sequence
  Description of Artificial Sequence: Synthetic oligonucleotide
aaagacuaauuaaaauuaa

SEQ ID NO: 1824051 - RNA, 19 nt, Artificial Sequence
  Description of Artificial Sequence: Synthetic oligonucleotide
ucacauucugguauuccga

SEQ ID NO: 1824052 - RNA, 19 nt, Artificial Sequence
  Description of Artificial Sequence: Synthetic oligonucleotide
uacacuucaagcaguggaa

SEQ ID NO: 1824053 - RNA, 19 nt, Artificial Sequence
  Description of Artificial Sequence: Synthetic oligonucleotide
agcuaugggaucuuuuaca

SEQ ID NO: 1824054 - RNA, 19 nt, Artificial Sequence
  Description of Artificial Sequence: Synthetic oligonucleotide
uaggcauaaauuacacuuc

SEQ ID NO: 1824055 - RNA, 19 nt, Artificial Sequence
  Description of Artificial Sequence: Synthetic oligonucleotide
cauuacagucauugcagag

SEQ ID NO: 1824056 - RNA, 19 nt, Artificial Sequence
  Description of Artificial Sequence: Synthetic oligonucleotide
acacuaaaggaauuuccga

SEQ ID NO: 1824057 - RNA, 19 nt, Artificial Sequence
  Description of Artificial Sequence: Synthetic oligonucleotide
auuacagucauugcagaga

SEQ ID NO: 1824058 - RNA, 19 nt, Artificial Sequence
  Description of Artificial Sequence: Synthetic oligonucleotide
acaguugaugcacugcacu

SEQ ID NO: 1824059 - RNA, 19 nt, Artificial Sequence
  Description of Artificial Sequence: Synthetic oligonucleotide
ccaaaagagagagagagag

SEQ ID NO: 1824060 - RNA, 19 nt, Artificial Sequence
  Description of Artificial Sequence: Synthetic oligonucleotide
augaacucugugugcauag

SEQ ID NO: 1824061 - RNA, 19 nt, Artificial Sequence
  Description of Artificial Sequence: Synthetic oligonucleotide
aaauuacacuucaagcagu

SEQ ID NO: 1824062 - RNA, 19 nt, Artificial Sequence
  Description of Artificial Sequence: Synthetic oligonucleotide
auggcaugggagucugugc

SEQ ID NO: 1824063 - RNA, 19 nt, Artificial Sequence
  Description of Artificial Sequence: Synthetic oligonucleotide
cuaaaggaauuuccgauca

SEQ ID NO: 1824064 - RNA, 19 nt, Artificial Sequence
  Description of Artificial Sequence: Synthetic oligonucleotide
cugaagaggcuucaucuag

SEQ ID NO: 1824065 - RNA, 19 nt, Artificial Sequence
  Description of Artificial Sequence: Synthetic oligonucleotide
gagagagagagagaaaaga

SEQ ID NO: 1824066 - RNA, 19 nt, Artificial Sequence
  Description of Artificial Sequence: Synthetic oligonucleotide
acaucuguagccuucuuuu

SEQ ID NO: 1824067 - RNA, 19 nt, Artificial Sequence
  Description of Artificial Sequence: Synthetic oligonucleotide
agcauauuggacaauucug

SEQ ID NO: 1824068 - RNA, 19 nt, Artificial Sequence
  Description of Artificial Sequence: Synthetic oligonucleotide
accgucucgaaaccaaaag

SEQ ID NO: 1824069 - RNA, 19 nt, Artificial Sequence
  Description of Artificial Sequence: Synthetic oligonucleotide
uacacaguggacaucugua

SEQ ID NO: 1824070 - RNA, 19 nt, Artificial Sequence
  Description of Artificial Sequence: Synthetic oligonucleotide
aguaccgacucauaucuaa

SEQ ID NO: 1824071 - RNA, 19 nt, Artificial Sequence
  Description of Artificial Sequence: Synthetic oligonucleotide
uggacaauucugccgagaa

SEQ ID NO: 1824072 - RNA, 19 nt, Artificial Sequence
  Description of Artificial Sequence: Synthetic oligonucleotide
gagagagagagagagaaaa

SEQ ID NO: 1824073 - RNA, 19 nt, Artificial Sequence
  Description of Artificial Sequence: Synthetic oligonucleotide
augccuaagauauggaauu

SEQ ID NO: 1824074 - RNA, 19 nt, Artificial Sequence
  Description of Artificial Sequence: Synthetic oligonucleotide
gagagagagagagagagaa

SEQ ID NO: 1824075 - RNA, 19 nt, Artificial Sequence
  Description of Artificial Sequence: Synthetic oligonucleotide
aacuguggaucguucauua

SEQ ID NO: 1824076 - RNA, 19 nt, Artificial Sequence
  Description of Artificial Sequence: Synthetic oligonucleotide
auuccgauggcaugggagu

SEQ ID NO: 1824077 - RNA, 19 nt, Artificial Sequence
  Description of Artificial Sequence: Synthetic oligonucleotide
aacuguucuccagccaagg

SEQ ID NO: 1824078 - RNA, 19 nt, Artificial Sequence
  Description of Artificial Sequence: Synthetic oligonucleotide
agagcuuuaucuacaucac

SEQ ID NO: 1824079 - RNA, 19 nt, Artificial Sequence
  Description of Artificial Sequence: Synthetic oligonucleotide
agucacauucugguauucc

SEQ ID NO: 1824080 - RNA, 19 nt, Artificial Sequence
  Description of Artificial Sequence: Synthetic oligonucleotide
auggaauugaacuguggau

SEQ ID NO: 1824081 - RNA, 19 nt, Artificial Sequence
  Description of Artificial Sequence: Synthetic oligonucleotide
uuccuuuggaccaauccua

SEQ ID NO: 1824082 - RNA, 19 nt, Artificial Sequence
  Description of Artificial Sequence: Synthetic oligonucleotide
ugcuaccucauuauccaac

SEQ ID NO: 1824083 - RNA, 19 nt, Artificial Sequence
  Description of Artificial Sequence: Synthetic oligonucleotide
uccuccaagcauauuggac

SEQ ID NO: 1824084 - RNA, 19 nt, Artificial Sequence
  Description of Artificial Sequence: Synthetic oligonucleotide
cuaugaaugugacuauauc

SEQ ID NO: 1824085 - RNA, 19 nt, Artificial Sequence
  Description of Artificial Sequence: Synthetic oligonucleotide
ugaagaggcuucaucuagu

SEQ ID NO: 1824086 - RNA, 19 nt, Artificial Sequence
  Description of Artificial Sequence: Synthetic oligonucleotide
caaugugcuacauucuuca

SEQ ID NO: 1824087 - RNA, 19 nt, Artificial Sequence
  Description of Artificial Sequence: Synthetic oligonucleotide
uuacacagagcuuuaucua

SEQ ID NO: 1824088 - RNA, 19 nt, Artificial Sequence
  Description of Artificial Sequence: Synthetic oligonucleotide
gaagauucauggcuaggca

SEQ ID NO: 1824089 - RNA, 19 nt, Artificial Sequence
  Description of Artificial Sequence: Synthetic oligonucleotide
gaccaauccuacaaauucc

SEQ ID NO: 1824090 - RNA, 19 nt, Artificial Sequence
  Description of Artificial Sequence: Synthetic oligonucleotide
caauccuacaaauuccaca

SEQ ID NO: 1824091 - RNA, 19 nt, Artificial Sequence
  Description of Artificial Sequence: Synthetic oligonucleotide
uccuuuacuuugaagcgau

SEQ ID NO: 1824092 - RNA, 19 nt, Artificial Sequence
  Description of Artificial Sequence: Synthetic oligonucleotide
uggcaugggagucugugcu

SEQ ID NO: 1824093 - RNA, 19 nt, Artificial Sequence
  Description of Artificial Sequence: Synthetic oligonucleotide
uaucaaacagauggcauau

SEQ ID NO: 1824094 - RNA, 19 nt, Artificial Sequence
  Description of Artificial Sequence: Synthetic oligonucleotide
ggaccaauccuacaaauuc

SEQ ID NO: 1824095 - RNA, 19 nt, Artificial Sequence
  Description of Artificial Sequence: Synthetic oligonucleotide
acaugagcaacaacgcggg

SEQ ID NO: 1824096 - RNA, 19 nt, Artificial Sequence
  Description of Artificial Sequence: Synthetic oligonucleotide
cauggcuaggcauaaauua

SEQ ID NO: 1824097 - RNA, 19 nt, Artificial Sequence
  Description of Artificial Sequence: Synthetic oligonucleotide
uggcauaugcugcaguaau

SEQ ID NO: 1824098 - RNA, 19 nt, Artificial Sequence
  Description of Artificial Sequence: Synthetic oligonucleotide
agagcuaugggaucuuuua

SEQ ID NO: 1824099 - RNA, 19 nt, Artificial Sequence
  Description of Artificial Sequence: Synthetic oligonucleotide
ugccgagaaacauuuucga

SEQ ID NO: 1824100 - RNA, 19 nt, Artificial Sequence
  Description of Artificial Sequence: Synthetic oligonucleotide
ggaggugugaauauccucc

SEQ ID NO: 1824101 - RNA, 19 nt, Artificial Sequence
  Description of Artificial Sequence: Synthetic oligonucleotide
cuugagcaguauuauagga

SEQ ID NO: 1824102 - RNA, 19 nt, Artificial Sequence
  Description of Artificial Sequence: Synthetic oligonucleotide
uggggcaaacaucauugac

SEQ ID NO: 1824103 - RNA, 19 nt, Artificial Sequence
  Description of Artificial Sequence: Synthetic oligonucleotide
acuguggaucguucauuac

SEQ ID NO: 1824104 - RNA, 19 nt, Artificial Sequence
  Description of Artificial Sequence: Synthetic oligonucleotide
acaaugugcuacauucuuc

SEQ ID NO: 1824105 - RNA, 19 nt, Artificial Sequence
  Description of Artificial Sequence: Synthetic oligonucleotide
gauggcaugggagucugug

SEQ ID NO: 1824106 - RNA, 19 nt, Artificial Sequence
  Description of Artificial Sequence: Synthetic oligonucleotide
caagaacuagaaaugaacu

SEQ ID NO: 1824107 - RNA, 19 nt, Artificial Sequence
  Description of Artificial Sequence: Synthetic oligonucleotide
acaauucuucguaacacgu

SEQ ID NO: 1824108 - RNA, 19 nt, Artificial Sequence
  Description of Artificial Sequence: Synthetic oligonucleotide
ucauuguugucaugacaga

SEQ ID NO: 1824109 - RNA, 19 nt, Artificial Sequence
  Description of Artificial Sequence: Synthetic oligonucleotide
ccgacaaguauaaagcuug

SEQ ID NO: 1824110 - RNA, 19 nt, Artificial Sequence
  Description of Artificial Sequence: Synthetic oligonucleotide
caguauuauaggaaucaca

SEQ ID NO: 1824111 - RNA, 19 nt, Artificial Sequence
  Description of Artificial Sequence: Synthetic oligonucleotide
auggaaguauaaaauauuu

SEQ ID NO: 1824112 - RNA, 19 nt, Artificial Sequence
  Description of Artificial Sequence: Synthetic oligonucleotide
uuggaccaauccuacaaau

SEQ ID NO: 1824113 - RNA, 19 nt, Artificial Sequence
  Description of Artificial Sequence: Synthetic oligonucleotide
gcauauuggacaauucugc

SEQ ID NO: 1824114 - RNA, 19 nt, Artificial Sequence
  Description of Artificial Sequence: Synthetic oligonucleotide
agagagagagagaaaagaa

SEQ ID NO: 1824115 - RNA, 19 nt, Artificial Sequence
  Description of Artificial Sequence: Synthetic oligonucleotide
uugacacuaaaggaauuuc

SEQ ID NO: 1824116 - RNA, 19 nt, Artificial Sequence
  Description of Artificial Sequence: Synthetic oligonucleotide
gagagagagagaaaagaaa

SEQ ID NO: 1824117 - RNA, 19 nt, Artificial Sequence
  Description of Artificial Sequence: Synthetic oligonucleotide
auauggaauugaacugugg

SEQ ID NO: 1824118 - RNA, 19 nt, Artificial Sequence
  Description of Artificial Sequence: Synthetic oligonucleotide
cuuaaaguuccauggaagu

SEQ ID NO: 1824119 - RNA, 19 nt, Artificial Sequence
  Description of Artificial Sequence: Synthetic oligonucleotide
cagagaauauccacaguca

SEQ ID NO: 1824120 - RNA, 19 nt, Artificial Sequence
  Description of Artificial Sequence: Synthetic oligonucleotide
aagcgauuuagcugaugau

SEQ ID NO: 1824121 - RNA, 19 nt, Artificial Sequence
  Description of Artificial Sequence: Synthetic oligonucleotide
gcuugucacaacaaggugc

SEQ ID NO: 1824122 - RNA, 19 nt, Artificial Sequence
  Description of Artificial Sequence: Synthetic oligonucleotide
cucgaaaccaaaagagaga

SEQ ID NO: 1824123 - RNA, 19 nt, Artificial Sequence
  Description of Artificial Sequence: Synthetic oligonucleotide
agccgacaaguauaaagcu

SEQ ID NO: 1824124 - RNA, 19 nt, Artificial Sequence
  Description of Artificial Sequence: Synthetic oligonucleotide
ucaugacagagccgacaag

SEQ ID NO: 1824125 - RNA, 19 nt, Artificial Sequence
  Description of Artificial Sequence: Synthetic oligonucleotide
cuuacauuucaugccuaag

SEQ ID NO: 1824126 - RNA, 19 nt, Artificial Sequence
  Description of Artificial Sequence: Synthetic oligonucleotide
cuaguaagagcuaugggau

SEQ ID NO: 1824127 - RNA, 19 nt, Artificial Sequence
  Description of Artificial Sequence: Synthetic oligonucleotide
cgagaaacauuuucgauac

SEQ ID NO: 1824128 - RNA, 19 nt, Artificial Sequence
  Description of Artificial Sequence: Synthetic oligonucleotide
caagcauauuggacaauuc

SEQ ID NO: 1824129 - RNA, 19 nt, Artificial Sequence
  Description of Artificial Sequence: Synthetic oligonucleotide
ugucaugacagagccgaca

SEQ ID NO: 1824130 - RNA, 19 nt, Artificial Sequence
  Description of Artificial Sequence: Synthetic oligonucleotide
cuguggaucguucauuaca

SEQ ID NO: 1824131 - RNA, 19 nt, Artificial Sequence
  Description of Artificial Sequence: Synthetic oligonucleotide
gcuaugggaucuuuuacac

SEQ ID NO: 1824132 - RNA, 19 nt, Artificial Sequence
  Description of Artificial Sequence: Synthetic oligonucleotide
guaacacguucuauguaag

SEQ ID NO: 1824133 - RNA, 19 nt, Artificial Sequence
  Description of Artificial Sequence: Synthetic oligonucleotide
acauucugguauuccgaug

SEQ ID NO: 1824134 - RNA, 19 nt, Artificial Sequence
  Description of Artificial Sequence: Synthetic oligonucleotide
agagagagagagagaaaag

SEQ ID NO: 1824135 - RNA, 19 nt, Artificial Sequence
  Description of Artificial Sequence: Synthetic oligonucleotide
cgucucgaaaccaaaagag

SEQ ID NO: 1824136 - RNA, 19 nt, Artificial Sequence
  Description of Artificial Sequence: Synthetic oligonucleotide
gacuauaucuggggcaaac

SEQ ID NO: 1824137 - RNA, 19 nt, Artificial Sequence
  Description of Artificial Sequence: Synthetic oligonucleotide
aaagagagagagagagaga

SEQ ID NO: 1824138 - RNA, 19 nt, Artificial Sequence
  Description of Artificial Sequence: Synthetic oligonucleotide
augcauacacaguggacau

SEQ ID NO: 1824139 - RNA, 19 nt, Artificial Sequence
  Description of Artificial Sequence: Synthetic oligonucleotide
uucuucguaacacguucua

SEQ ID NO: 1824140 - RNA, 19 nt, Artificial Sequence
  Description of Artificial Sequence: Synthetic oligonucleotide
ucucacaaugauacugcuu

SEQ ID NO: 1824141 - RNA, 19 nt, Artificial Sequence
  Description of Artificial Sequence: Synthetic oligonucleotide
uaguaagagcuaugggauc

SEQ ID NO: 1824142 - RNA, 19 nt, Artificial Sequence
  Description of Artificial Sequence: Synthetic oligonucleotide
cauagugcucgcagccccg

SEQ ID NO: 1824143 - RNA, 19 nt, Artificial Sequence
  Description of Artificial Sequence: Synthetic oligonucleotide
ugucacaacaaggugccuu

SEQ ID NO: 1824144 - RNA, 19 nt, Artificial Sequence
  Description of Artificial Sequence: Synthetic oligonucleotide
ugccuaagauauggaauug

SEQ ID NO: 1824145 - RNA, 19 nt, Artificial Sequence
  Description of Artificial Sequence: Synthetic oligonucleotide
auuggacaauucugccgag

SEQ ID NO: 1824146 - RNA, 19 nt, Artificial Sequence
  Description of Artificial Sequence: Synthetic oligonucleotide
ccgaucaacacaucugaag

SEQ ID NO: 1824147 - RNA, 19 nt, Artificial Sequence
  Description of Artificial Sequence: Synthetic oligonucleotide
aacgcgggaggugugaaua

SEQ ID NO: 1824148 - RNA, 19 nt, Artificial Sequence
  Description of Artificial Sequence: Synthetic oligonucleotide
acuguucuccagccaagga

SEQ ID NO: 1824149 - RNA, 19 nt, Artificial Sequence
  Description of Artificial Sequence: Synthetic oligonucleotide
gacagagccgacaaguaua

SEQ ID NO: 1824150 - RNA, 19 nt, Artificial Sequence
  Description of Artificial Sequence: Synthetic oligonucleotide
aaaucuuccuuuggaccaa

SEQ ID NO: 1824151 - RNA, 19 nt, Artificial Sequence
  Description of Artificial Sequence: Synthetic oligonucleotide
aauuuccgaucaacacauc

SEQ ID NO: 1824152 - RNA, 19 nt, Artificial Sequence
  Description of Artificial Sequence: Synthetic oligonucleotide
uccgaucaacacaucugaa

SEQ ID NO: 1824153 - RNA, 19 nt, Artificial Sequence
  Description of Artificial Sequence: Synthetic oligonucleotide
ucguaacacguucuaugua

SEQ ID NO: 1824154 - RNA, 19 nt, Artificial Sequence
  Description of Artificial Sequence: Synthetic oligonucleotide
gaagaggcuucaucuagua

SEQ ID NO: 1824155 - RNA, 19 nt, Artificial Sequence
  Description of Artificial Sequence: Synthetic oligonucleotide
caaaagagagagagagaga

SEQ ID NO: 1824156 - RNA, 19 nt, Artificial Sequence
  Description of Artificial Sequence: Synthetic oligonucleotide
gaucguucauuacagucau

SEQ ID NO: 1824157 - RNA, 19 nt, Artificial Sequence
  Description of Artificial Sequence: Synthetic oligonucleotide
guaccgacucauaucuaag

SEQ ID NO: 1824158 - RNA, 19 nt, Artificial Sequence
  Description of Artificial Sequence: Synthetic oligonucleotide
ucuucguaacacguucuau

SEQ ID NO: 1824159 - RNA, 19 nt, Artificial Sequence
  Description of Artificial Sequence: Synthetic oligonucleotide
caugccuaagauauggaau

SEQ ID NO: 1824160 - RNA, 19 nt, Artificial Sequence
  Description of Artificial Sequence: Synthetic oligonucleotide
cauuuucgauacacuuaug

SEQ ID NO: 1824161 - RNA, 19 nt, Artificial Sequence
  Description of Artificial Sequence: Synthetic oligonucleotide
aacaacgcgggagguguga

SEQ ID NO: 1824162 - RNA, 19 nt, Artificial Sequence
  Description of Artificial Sequence: Synthetic oligonucleotide
cacuaaaggaauuuccgau

SEQ ID NO: 1824163 - RNA, 19 nt, Artificial Sequence
  Description of Artificial Sequence: Synthetic oligonucleotide
agauucauggcuaggcaua

SEQ ID NO: 1824164 - RNA, 19 nt, Artificial Sequence
  Description of Artificial Sequence: Synthetic oligonucleotide
cugucuccaguaccgacuc

SEQ ID NO: 1824165 - RNA, 19 nt, Artificial Sequence
  Description of Artificial Sequence: Synthetic oligonucleotide
uuggacaauucugccgaga

SEQ ID NO: 1824166 - RNA, 19 nt, Artificial Sequence
  Description of Artificial Sequence: Synthetic oligonucleotide
ugcuuacauuucaugccua

SEQ ID NO: 1824167 - RNA, 19 nt, Artificial Sequence
  Description of Artificial Sequence: Synthetic oligonucleotide
aggaaucacaaugcuuaca

SEQ ID NO: 1824168 - RNA, 19 nt, Artificial Sequence
  Description of Artificial Sequence: Synthetic oligonucleotide
auucuucguaacacguucu

SEQ ID NO: 1824169 - RNA, 19 nt, Artificial Sequence
  Description of Artificial Sequence: Synthetic oligonucleotide
gugacuauaucuggggcaa

SEQ ID NO: 1824170 - RNA, 19 nt, Artificial Sequence
  Description of Artificial Sequence: Synthetic oligonucleotide
augcacugcacuuccuuua

SEQ ID NO: 1824171 - RNA, 19 nt, Artificial Sequence
  Description of Artificial Sequence: Synthetic oligonucleotide
guucuauguaagagauggc

SEQ ID NO: 1824172 - RNA, 19 nt, Artificial Sequence
  Description of Artificial Sequence: Synthetic oligonucleotide
gauucauggcuaggcauaa

SEQ ID NO: 1824173 - RNA, 19 nt, Artificial Sequence
  Description of Artificial Sequence: Synthetic oligonucleotide
ugaacucugugugcauagu

SEQ ID NO: 1824174 - RNA, 19 nt, Artificial Sequence
  Description of Artificial Sequence: Synthetic oligonucleotide
agaaccgucucgaaaccaa

SEQ ID NO: 1824175 - RNA, 19 nt, Artificial Sequence
  Description of Artificial Sequence: Synthetic oligonucleotide
ucgauacacuuauguuuuc

SEQ ID NO: 1824176 - RNA, 19 nt, Artificial Sequence
  Description of Artificial Sequence: Synthetic oligonucleotide
cgaucaacacaucugaaga

SEQ ID NO: 1824177 - RNA, 19 nt, Artificial Sequence
  Description of Artificial Sequence: Synthetic oligonucleotide
guauuauaggaaucacaau

SEQ ID NO: 1824178 - RNA, 19 nt, Artificial Sequence
  Description of Artificial Sequence: Synthetic oligonucleotide
agcaacaacgcgggaggug

SEQ ID NO: 1824179 - RNA, 19 nt, Artificial Sequence
  Description of Artificial Sequence: Synthetic oligonucleotide
accaaaagagagagagaga

SEQ ID NO: 1824180 - RNA, 19 nt, Artificial Sequence
  Description of Artificial Sequence: Synthetic oligonucleotide
gugugcauaguaucacuua

SEQ ID NO: 1824181 - RNA, 19 nt, Artificial Sequence
  Description of Artificial Sequence: Synthetic oligonucleotide
cacuucaagcaguggaaaa

SEQ ID NO: 1824182 - RNA, 19 nt, Artificial Sequence
  Description of Artificial Sequence: Synthetic oligonucleotide
gguauuccgauggcauggg

SEQ ID NO: 1824183 - RNA, 19 nt, Artificial Sequence
  Description of Artificial Sequence: Synthetic oligonucleotide
ucuccaguaccgacucaua

SEQ ID NO: 1824184 - RNA, 19 nt, Artificial Sequence
  Description of Artificial Sequence: Synthetic oligonucleotide
gccuugaggagacagccuc

SEQ ID NO: 1824185 - RNA, 19 nt, Artificial Sequence
  Description of Artificial Sequence: Synthetic oligonucleotide
ccuaagauauggaauugaa

SEQ ID NO: 1824186 - RNA, 19 nt, Artificial Sequence
  Description of Artificial Sequence: Synthetic oligonucleotide
cguaacacguucuauguaa

SEQ ID NO: 1824187 - RNA, 19 nt, Artificial Sequence
  Description of Artificial Sequence: Synthetic oligonucleotide
ggcuaggcauaaauuacac

SEQ ID NO: 1824188 - RNA, 19 nt, Artificial Sequence
  Description of Artificial Sequence: Synthetic oligonucleotide
agagagagagagagagaga

SEQ ID NO: 1824189 - RNA, 19 nt, Artificial Sequence
  Description of Artificial Sequence: Synthetic oligonucleotide
uagugcucgcagccccgcc

SEQ ID NO: 1824190 - RNA, 19 nt, Artificial Sequence
  Description of Artificial Sequence: Synthetic oligonucleotide
aggugugaauauccuccaa

SEQ ID NO: 1824191 - RNA, 19 nt, Artificial Sequence
  Description of Artificial Sequence: Synthetic oligonucleotide
ccaucuuccgucgccgucg

SEQ ID NO: 1824192 - RNA, 19 nt, Artificial Sequence
  Description of Artificial Sequence: Synthetic oligonucleotide
cguucauuacagucauugc

SEQ ID NO: 1824193 - RNA, 19 nt, Artificial Sequence
  Description of Artificial Sequence: Synthetic oligonucleotide
uaagagcuaugggaucuuu

SEQ ID NO: 1824194 - RNA, 19 nt, Artificial Sequence
  Description of Artificial Sequence: Synthetic oligonucleotide
uuccgauggcaugggaguc

SEQ ID NO: 1824195 - RNA, 19 nt, Artificial Sequence
  Description of Artificial Sequence: Synthetic oligonucleotide
uugaagcgauuuagcugau

SEQ ID NO: 1824196 - RNA, 19 nt, Artificial Sequence
  Description of Artificial Sequence: Synthetic oligonucleotide
ggggcaaacaucauugacu

SEQ ID NO: 1824197 - RNA, 19 nt, Artificial Sequence
  Description of Artificial Sequence: Synthetic oligonucleotide
ccgacucauaucuaaggca

SEQ ID NO: 1824198 - RNA, 19 nt, Artificial Sequence
  Description of Artificial Sequence: Synthetic oligonucleotide
caucuuccgucgccgucgc

SEQ ID NO: 1824199 - RNA, 19 nt, Artificial Sequence
  Description of Artificial Sequence: Synthetic oligonucleotide
ccaauccuacaaauuccac

SEQ ID NO: 1824200 - RNA, 19 nt, Artificial Sequence
  Description of Artificial Sequence: Synthetic oligonucleotide
aucuuccgucgccgucgcc

SEQ ID NO: 1824201 - RNA, 19 nt, Artificial Sequence
  Description of Artificial Sequence: Synthetic oligonucleotide
gugcauaguaucacuuaaa

SEQ ID NO: 1824202 - RNA, 19 nt, Artificial Sequence
  Description of Artificial Sequence: Synthetic oligonucleotide
gcuuacauuucaugccuaa

SEQ ID NO: 1824203 - RNA, 19 nt, Artificial Sequence
  Description of Artificial Sequence: Synthetic oligonucleotide
guauuccgauggcauggga

SEQ ID NO: 1824204 - RNA, 19 nt, Artificial Sequence
  Description of Artificial Sequence: Synthetic oligonucleotide
ccaguaccgacucauaucu

SEQ ID NO: 1824205 - RNA, 19 nt, Artificial Sequence
  Description of Artificial Sequence: Synthetic oligonucleotide
cuugacacuaaaggaauuu

SEQ ID NO: 1824206 - RNA, 19 nt, Artificial Sequence
  Description of Artificial Sequence: Synthetic oligonucleotide
gcgggaggugugaauaucc

SEQ ID NO: 1824207 - RNA, 19 nt, Artificial Sequence
  Description of Artificial Sequence: Synthetic oligonucleotide
gcuaccucauuauccaacu

SEQ ID NO: 1824208 - RNA, 19 nt, Artificial Sequence
  Description of Artificial Sequence: Synthetic oligonucleotide
acguucuauguaagagaug

SEQ ID NO: 1824209 - RNA, 19 nt, Artificial Sequence
  Description of Artificial Sequence: Synthetic oligonucleotide
agagagagagagagagaaa

SEQ ID NO: 1824210 - RNA, 19 nt, Artificial Sequence
  Description of Artificial Sequence: Synthetic oligonucleotide
cgauacacuuauguuuucc

SEQ ID NO: 1824211 - RNA, 19 nt, Artificial Sequence
  Description of Artificial Sequence: Synthetic oligonucleotide
gaaccgucucgaaaccaaa

SEQ ID NO: 1824212 - RNA, 19 nt, Artificial Sequence
  Description of Artificial Sequence: Synthetic oligonucleotide
cuaaggcagaaugcauaca

SEQ ID NO: 1824213 - RNA, 19 nt, Artificial Sequence
  Description of Artificial Sequence: Synthetic oligonucleotide
acuugacacuaaaggaauu

SEQ ID NO: 1824214 - RNA, 19 nt, Artificial Sequence
  Description of Artificial Sequence: Synthetic oligonucleotide
cacauucugguauuccgau

SEQ ID NO: 1824215 - RNA, 19 nt, Artificial Sequence
  Description of Artificial Sequence: Synthetic oligonucleotide
caacacaucugaagaggcu

SEQ ID NO: 1824216 - RNA, 19 nt, Artificial Sequence
  Description of Artificial Sequence: Synthetic oligonucleotide
gugcucgcagccccgccgc

SEQ ID NO: 1824217 - RNA, 19 nt, Artificial Sequence
  Description of Artificial Sequence: Synthetic oligonucleotide
caacaacgcgggaggugug

SEQ ID NO: 1824218 - RNA, 19 nt, Artificial Sequence
  Description of Artificial Sequence: Synthetic oligonucleotide
cucgcuccgggcugcggac

SEQ ID NO: 1824219 - RNA, 19 nt, Artificial Sequence
  Description of Artificial Sequence: Synthetic oligonucleotide
cugugugcauaguaucacu

SEQ ID NO: 1824220 - RNA, 19 nt, Artificial Sequence
  Description of Artificial Sequence: Synthetic oligonucleotide
ccgucucgaaaccaaaaga

SEQ ID NO: 1824221 - RNA, 19 nt, Artificial Sequence
  Description of Artificial Sequence: Synthetic oligonucleotide
uucugccgagaaacauuuu

SEQ ID NO: 1824222 - RNA, 19 nt, Artificial Sequence
  Description of Artificial Sequence: Synthetic oligonucleotide
gccuaagauauggaauuga

SEQ ID NO: 1824223 - RNA, 19 nt, Artificial Sequence
  Description of Artificial Sequence: Synthetic oligonucleotide
gaucuuuuacacagagcuu

SEQ ID NO: 1824224 - RNA, 19 nt, Artificial Sequence
  Description of Artificial Sequence: Synthetic oligonucleotide
ucgcuccgggcugcggacg

SEQ ID NO: 1824225 - RNA, 19 nt, Artificial Sequence
  Description of Artificial Sequence: Synthetic oligonucleotide
caauucucacaaugauacu

SEQ ID NO: 1824226 - RNA, 19 nt, Artificial Sequence
  Description of Artificial Sequence: Synthetic oligonucleotide
uugucacaacaaggugccu

SEQ ID NO: 1824227 - RNA, 19 nt, Artificial Sequence
  Description of Artificial Sequence: Synthetic oligonucleotide
ggacaauucugccgagaaa

SEQ ID NO: 1824228 - RNA, 19 nt, Artificial Sequence
  Description of Artificial Sequence: Synthetic oligonucleotide
gcuaggcauaaauuacacu

SEQ ID NO: 1824229 - RNA, 19 nt, Artificial Sequence
  Description of Artificial Sequence: Synthetic oligonucleotide
cuccaguaccgacucauau

SEQ ID NO: 1824230 - RNA, 19 nt, Artificial Sequence
  Description of Artificial Sequence: Synthetic oligonucleotide
gugcuaccucauuauccaa

SEQ ID NO: 1824231 - RNA, 19 nt, Artificial Sequence
  Description of Artificial Sequence: Synthetic oligonucleotide
gcaacaacgcgggaggugu

SEQ ID NO: 1824232 - RNA, 19 nt, Artificial Sequence
  Description of Artificial Sequence: Synthetic oligonucleotide
acaacgcgggaggugugaa

SEQ ID NO: 1824233 - RNA, 19 nt, Artificial Sequence
  Description of Artificial Sequence: Synthetic oligonucleotide
ggcauaaauuacacuucaa

SEQ ID NO: 1824234 - RNA, 19 nt, Artificial Sequence
  Description of Artificial Sequence: Synthetic oligonucleotide
ggcaagacaugagcaacaa

SEQ ID NO: 1824235 - RNA, 19 nt, Artificial Sequence
  Description of Artificial Sequence: Synthetic oligonucleotide
caugagcaacaacgcggga

SEQ ID NO: 1824236 - RNA, 19 nt, Artificial Sequence
  Description of Artificial Sequence: Synthetic oligonucleotide
guggaucguucauuacagu

SEQ ID NO: 1824237 - RNA, 19 nt, Artificial Sequence
  Description of Artificial Sequence: Synthetic oligonucleotide
aaggugccuugaggagaca

SEQ ID NO: 1824238 - RNA, 19 nt, Artificial Sequence
  Description of Artificial Sequence: Synthetic oligonucleotide
gccgagaaacauuuucgau

SEQ ID NO: 1824239 - RNA, 19 nt, Artificial Sequence
  Description of Artificial Sequence: Synthetic oligonucleotide
ggcagaaugcauacacagu

SEQ ID NO: 1824240 - RNA, 19 nt, Artificial Sequence
  Description of Artificial Sequence: Synthetic oligonucleotide
cacaaugauacugcuucuu

SEQ ID NO: 1824241 - RNA, 19 nt, Artificial Sequence
  Description of Artificial Sequence: Synthetic oligonucleotide
cucggucauagugcucgca

SEQ ID NO: 1824242 - RNA, 19 nt, Artificial Sequence
  Description of Artificial Sequence: Synthetic oligonucleotide
cggacgccaucuuccgucg

SEQ ID NO: 1824243 - RNA, 19 nt, Artificial Sequence
  Description of Artificial Sequence: Synthetic oligonucleotide
caguaccgacucauaucua

SEQ ID NO: 1824244 - RNA, 19 nt, Artificial Sequence
  Description of Artificial Sequence: Synthetic oligonucleotide
gagcaacaacgcgggaggu

SEQ ID NO: 1824245 - RNA, 19 nt, Artificial Sequence
  Description of Artificial Sequence: Synthetic oligonucleotide
cgaaaccaaaagagagaga

SEQ ID NO: 1824246 - RNA, 19 nt, Artificial Sequence
  Description of Artificial Sequence: Synthetic oligonucleotide
ccucggucauagugcucgc

SEQ ID NO: 1824247 - RNA, 19 nt, Artificial Sequence
  Description of Artificial Sequence: Synthetic oligonucleotide
ccgauggcaugggagucug

SEQ ID NO: 1824248 - RNA, 19 nt, Artificial Sequence
  Description of Artificial Sequence: Synthetic oligonucleotide
aucguucauuacagucauu

SEQ ID NO: 1824249 - RNA, 19 nt, Artificial Sequence
  Description of Artificial Sequence: Synthetic oligonucleotide
gccgacaaguauaaagcuu

SEQ ID NO: 1824250 - RNA, 19 nt, Artificial Sequence
  Description of Artificial Sequence: Synthetic oligonucleotide
guaagagcuaugggaucuu

SEQ ID NO: 1824251 - RNA, 19 nt, Artificial Sequence
  Description of Artificial Sequence: Synthetic oligonucleotide
cagccaaggacaggcugcu

SEQ ID NO: 1824252 - RNA, 19 nt, Artificial Sequence
  Description of Artificial Sequence: Synthetic oligonucleotide
ccucgcuccgggcugcgga

SEQ ID NO: 1824253 - RNA, 19 nt, Artificial Sequence
  Description of Artificial Sequence: Synthetic oligonucleotide
gcucgcagccccgccgccc

SEQ ID NO: 1824254 - RNA, 19 nt, Artificial Sequence
  Description of Artificial Sequence: Synthetic oligonucleotide
caacgcgggaggugugaau

SEQ ID NO: 1824255 - RNA, 19 nt, Artificial Sequence
  Description of Artificial Sequence: Synthetic oligonucleotide
cagagccgacaaguauaaa

SEQ ID NO: 1824256 - RNA, 19 nt, Artificial Sequence
  Description of Artificial Sequence: Synthetic oligonucleotide
ggagucugugcuaccucau

SEQ ID NO: 1824257 - RNA, 19 nt, Artificial Sequence
  Description of Artificial Sequence: Synthetic oligonucleotide
ggccuccaucuugagcagu

SEQ ID NO: 1824258 - RNA, 19 nt, Artificial Sequence
  Description of Artificial Sequence: Synthetic oligonucleotide
cgcccucgcuccgggcugc

SEQ ID NO: 1824259 - RNA, 19 nt, Artificial Sequence
  Description of Artificial Sequence: Synthetic oligonucleotide
aaauguuacauucaaaagg

SEQ ID NO: 1824260 - RNA, 19 nt, Artificial Sequence
  Description of Artificial Sequence: Synthetic oligonucleotide
aauugcugaacccucggcc

SEQ ID NO: 1824261 - RNA, 19 nt, Artificial Sequence
  Description of Artificial Sequence: Synthetic oligonucleotide
acagcuauaaggcuuuucc

SEQ ID NO: 1824262 - RNA, 19 nt, Artificial Sequence
  Description of Artificial Sequence: Synthetic oligonucleotide
aaaacugucccucagaguu

SEQ ID NO: 1824263 - RNA, 19 nt, Artificial Sequence
  Description of Artificial Sequence: Synthetic oligonucleotide
agaacuuuccacugggugc

SEQ ID NO: 1824264 - RNA, 19 nt, Artificial Sequence
  Description of Artificial Sequence: Synthetic oligonucleotide
agcuauaaggcuuuucccc

SEQ ID NO: 1824265 - RNA, 19 nt, Artificial Sequence
  Description of Artificial Sequence: Synthetic oligonucleotide
uuuguguagcuccagauug

SEQ ID NO: 1824266 - RNA, 19 nt, Artificial Sequence
  Description of Artificial Sequence: Synthetic oligonucleotide
aaguguuucccacaaaugu

SEQ ID NO: 1824267 - RNA, 19 nt, Artificial Sequence
  Description of Artificial Sequence: Synthetic oligonucleotide
aaauugcugaaauugcuga

SEQ ID NO: 1824268 - RNA, 19 nt, Artificial Sequence
  Description of Artificial Sequence: Synthetic oligonucleotide
uacaguaggagccaguaca

SEQ ID NO: 1824269 - RNA, 19 nt, Artificial Sequence
  Description of Artificial Sequence: Synthetic oligonucleotide
cuuagcaggauccaggccc

SEQ ID NO: 1824270 - RNA, 19 nt, Artificial Sequence
  Description of Artificial Sequence: Synthetic oligonucleotide
uucuguacgucaccgaagg

SEQ ID NO: 1824271 - RNA, 19 nt, Artificial Sequence
  Description of Artificial Sequence: Synthetic oligonucleotide
uucaaauugcugaaauugc

SEQ ID NO: 1824272 - RNA, 19 nt, Artificial Sequence
  Description of Artificial Sequence: Synthetic oligonucleotide
agauguacggcuucucccc

SEQ ID NO: 1824273 - RNA, 19 nt, Artificial Sequence
  Description of Artificial Sequence: Synthetic oligonucleotide
agaccguuuguguagcucc

SEQ ID NO: 1824274 - RNA, 19 nt, Artificial Sequence
  Description of Artificial Sequence: Synthetic oligonucleotide
uguacgucaccgaaggugc

SEQ ID NO: 1824275 - RNA, 19 nt, Artificial Sequence
  Description of Artificial Sequence: Synthetic oligonucleotide
aguaagcauagguaugugg

SEQ ID NO: 1824276 - RNA, 19 nt, Artificial Sequence
  Description of Artificial Sequence: Synthetic oligonucleotide
ucugaguaagcauagguau

SEQ ID NO: 1824277 - RNA, 19 nt, Artificial Sequence
  Description of Artificial Sequence: Synthetic oligonucleotide
ugaaauugcugaacccucg

SEQ ID NO: 1824278 - RNA, 19 nt, Artificial Sequence
  Description of Artificial Sequence: Synthetic oligonucleotide
caaauguuacauucaaaag

SEQ ID NO: 1824279 - RNA, 19 nt, Artificial Sequence
  Description of Artificial Sequence: Synthetic oligonucleotide
auagguauguggcuggcuc

SEQ ID NO: 1824280 - RNA, 19 nt, Artificial Sequence
  Description of Artificial Sequence: Synthetic oligonucleotide
ucauguucauucugcaggg

SEQ ID NO: 1824281 - RNA, 19 nt, Artificial Sequence
  Description of Artificial Sequence: Synthetic oligonucleotide
guaguuuacaguaggagcc

SEQ ID NO: 1824282 - RNA, 19 nt, Artificial Sequence
  Description of Artificial Sequence: Synthetic oligonucleotide
cagugugacagacacaucc

SEQ ID NO: 1824283 - RNA, 19 nt, Artificial Sequence
  Description of Artificial Sequence: Synthetic oligonucleotide
ugcuuggguguuuaaaagg

SEQ ID NO: 1824284 - RNA, 19 nt, Artificial Sequence
  Description of Artificial Sequence: Synthetic oligonucleotide
acagauguacggcuucucc

SEQ ID NO: 1824285 - RNA, 19 nt, Artificial Sequence
  Description of Artificial Sequence: Synthetic oligonucleotide
ucuccagagugaaugauga

SEQ ID NO: 1824286 - RNA, 19 nt, Artificial Sequence
  Description of Artificial Sequence: Synthetic oligonucleotide
uucaaaugcugccacagaa

SEQ ID NO: 1824287 - RNA, 19 nt, Artificial Sequence
  Description of Artificial Sequence: Synthetic oligonucleotide
agcucugagaccuauccag

SEQ ID NO: 1824288 - RNA, 19 nt, Artificial Sequence
  Description of Artificial Sequence: Synthetic oligonucleotide
uaagugagucugaagguug

SEQ ID NO: 1824289 - RNA, 19 nt, Artificial Sequence
  Description of Artificial Sequence: Synthetic oligonucleotide
agagugaaugaugaugugg

SEQ ID NO: 1824290 - RNA, 19 nt, Artificial Sequence
  Description of Artificial Sequence: Synthetic oligonucleotide
ggaagaacgggucacagcc

SEQ ID NO: 1824291 - RNA, 19 nt, Artificial Sequence
  Description of Artificial Sequence: Synthetic oligonucleotide
uuuaaaaggcuucccacua

SEQ ID NO: 1824292 - RNA, 19 nt, Artificial Sequence
  Description of Artificial Sequence: Synthetic oligonucleotide
gcguaagugagucugaagg

SEQ ID NO: 1824293 - RNA, 19 nt, Artificial Sequence
  Description of Artificial Sequence: Synthetic oligonucleotide
uugcugaaauugcugaacc

SEQ ID NO: 1824294 - RNA, 19 nt, Artificial Sequence
  Description of Artificial Sequence: Synthetic oligonucleotide
aguaggagccaguacagug

SEQ ID NO: 1824295 - RNA, 19 nt, Artificial Sequence
  Description of Artificial Sequence: Synthetic oligonucleotide
gagugaaugaugauguggc

SEQ ID NO: 1824296 - RNA, 19 nt, Artificial Sequence
  Description of Artificial Sequence: Synthetic oligonucleotide
auuucacaugcauacuguc

SEQ ID NO: 1824297 - RNA, 19 nt, Artificial Sequence
  Description of Artificial Sequence: Synthetic oligonucleotide
gaaauugcugaacccucgg

SEQ ID NO: 1824298 - RNA, 19 nt, Artificial Sequence
  Description of Artificial Sequence: Synthetic oligonucleotide
auguucauucugcaggguc

SEQ ID NO: 1824299 - RNA, 19 nt, Artificial Sequence
  Description of Artificial Sequence: Synthetic oligonucleotide
ugagguguccgcaucugag

SEQ ID NO: 1824300 - RNA, 19 nt, Artificial Sequence
  Description of Artificial Sequence: Synthetic oligonucleotide
ucagaguuucuguacguca

SEQ ID NO: 1824301 - RNA, 19 nt, Artificial Sequence
  Description of Artificial Sequence: Synthetic oligonucleotide
uguaugagaccguuugugu

SEQ ID NO: 1824302 - RNA, 19 nt, Artificial Sequence
  Description of Artificial Sequence: Synthetic oligonucleotide
ucaucacaagugaacaccu

SEQ ID NO: 1824303 - RNA, 19 nt, Artificial Sequence
  Description of Artificial Sequence: Synthetic oligonucleotide
cucaucacaagugaacacc

SEQ ID NO: 1824304 - RNA, 19 nt, Artificial Sequence
  Description of Artificial Sequence: Synthetic oligonucleotide
uugcuuggguguuuaaaag

SEQ ID NO: 1824305 - RNA, 19 nt, Artificial Sequence
  Description of Artificial Sequence: Synthetic oligonucleotide
guuaugagauggcacauca

SEQ ID NO: 1824306 - RNA, 19 nt, Artificial Sequence
  Description of Artificial Sequence: Synthetic oligonucleotide
agugaaugaugauguggcg

SEQ ID NO: 1824307 - RNA, 19 nt, Artificial Sequence
  Description of Artificial Sequence: Synthetic oligonucleotide
uggagcguaguuuacagua

SEQ ID NO: 1824308 - RNA, 19 nt, Artificial Sequence
  Description of Artificial Sequence: Synthetic oligonucleotide
uuucuguacgucaccgaag

SEQ ID NO: 1824309 - RNA, 19 nt, Artificial Sequence
  Description of Artificial Sequence: Synthetic oligonucleotide
gagcguaguuuacaguagg

SEQ ID NO: 1824310 - RNA, 19 nt, Artificial Sequence
  Description of Artificial Sequence: Synthetic oligonucleotide
ugaguaagcauagguaugu

SEQ ID NO: 1824311 - RNA, 19 nt, Artificial Sequence
  Description of Artificial Sequence: Synthetic oligonucleotide
ugaacaccuuaucagcugu

SEQ ID NO: 1824312 - RNA, 19 nt, Artificial Sequence
  Description of Artificial Sequence: Synthetic oligonucleotide
agagucauacuagagaaaa

SEQ ID NO: 1824313 - RNA, 19 nt, Artificial Sequence
  Description of Artificial Sequence: Synthetic oligonucleotide
accuauccaggucagaggu

SEQ ID NO: 1824314 - RNA, 19 nt, Artificial Sequence
  Description of Artificial Sequence: Synthetic oligonucleotide
agcauagguauguggcugg

SEQ ID NO: 1824315 - RNA, 19 nt, Artificial Sequence
  Description of Artificial Sequence: Synthetic oligonucleotide
cauggagcguaguuuacag

SEQ ID NO: 1824316 - RNA, 19 nt, Artificial Sequence
  Description of Artificial Sequence: Synthetic oligonucleotide
aggaggguggaacauggag

SEQ ID NO: 1824317 - RNA, 19 nt, Artificial Sequence
  Description of Artificial Sequence: Synthetic oligonucleotide
gagcgugugaagcacuugc

SEQ ID NO: 1824318 - RNA, 19 nt, Artificial Sequence
  Description of Artificial Sequence: Synthetic oligonucleotide
acaugcauacugucucugg

SEQ ID NO: 1824319 - RNA, 19 nt, Artificial Sequence
  Description of Artificial Sequence: Synthetic oligonucleotide
ucacaagugaacaccuuau

SEQ ID NO: 1824320 - RNA, 19 nt, Artificial Sequence
  Description of Artificial Sequence: Synthetic oligonucleotide
ugcccaguggcucugggca

SEQ ID NO: 1824321 - RNA, 19 nt, Artificial Sequence
  Description of Artificial Sequence: Synthetic oligonucleotide
cccacuacauuucacaugc

SEQ ID NO: 1824322 - RNA, 19 nt, Artificial Sequence
  Description of Artificial Sequence: Synthetic oligonucleotide
cucuagcucauguucauuc

SEQ ID NO: 1824323 - RNA, 19 nt, Artificial Sequence
  Description of Artificial Sequence: Synthetic oligonucleotide
caugcaucuucuugugccg

SEQ ID NO: 1824324 - RNA, 19 nt, Artificial Sequence
  Description of Artificial Sequence: Synthetic oligonucleotide
ugugucacacaaguguggc

SEQ ID NO: 1824325 - RNA, 19 nt, Artificial Sequence
  Description of Artificial Sequence: Synthetic oligonucleotide
cagauguacggcuucuccc

SEQ ID NO: 1824326 - RNA, 19 nt, Artificial Sequence
  Description of Artificial Sequence: Synthetic oligonucleotide
ucugaagguugccugccug

SEQ ID NO: 1824327 - RNA, 19 nt, Artificial Sequence
  Description of Artificial Sequence: Synthetic oligonucleotide
aagaacgggucacagccau

SEQ ID NO: 1824328 - RNA, 19 nt, Artificial Sequence
  Description of Artificial Sequence: Synthetic oligonucleotide
gugaccuucaaaugcugcc

SEQ ID NO: 1824329 - RNA, 19 nt, Artificial Sequence
  Description of Artificial Sequence: Synthetic oligonucleotide
agaccuauccaggucagag

SEQ ID NO: 1824330 - RNA, 19 nt, Artificial Sequence
  Description of Artificial Sequence: Synthetic oligonucleotide
cugugagucaaggucagcc

SEQ ID NO: 1824331 - RNA, 19 nt, Artificial Sequence
  Description of Artificial Sequence: Synthetic oligonucleotide
agugaccuucaaaugcugc

SEQ ID NO: 1824332 - RNA, 19 nt, Artificial Sequence
  Description of Artificial Sequence: Synthetic oligonucleotide
uuguguagcuccagauugc

SEQ ID NO: 1824333 - RNA, 19 nt, Artificial Sequence
  Description of Artificial Sequence: Synthetic oligonucleotide
gaaguguuucccacaaaug

SEQ ID NO: 1824334 - RNA, 19 nt, Artificial Sequence
  Description of Artificial Sequence: Synthetic oligonucleotide
cagcuuagcaggauccagg

SEQ ID NO: 1824335 - RNA, 19 nt, Artificial Sequence
  Description of Artificial Sequence: Synthetic oligonucleotide
gugaaugaugauguggcgc

SEQ ID NO: 1824336 - RNA, 19 nt, Artificial Sequence
  Description of Artificial Sequence: Synthetic oligonucleotide
uuggguguuuaaaaggcuu

SEQ ID NO: 1824337 - RNA, 19 nt, Artificial Sequence
  Description of Artificial Sequence: Synthetic oligonucleotide
aacgggucacagccaugcc

SEQ ID NO: 1824338 - RNA, 19 nt, Artificial Sequence
  Description of Artificial Sequence: Synthetic oligonucleotide
uuuacaguaggagccagua

SEQ ID NO: 1824339 - RNA, 19 nt, Artificial Sequence
  Description of Artificial Sequence: Synthetic oligonucleotide
ugugagucaaggucagccu

SEQ ID NO: 1824340 - RNA, 19 nt, Artificial Sequence
  Description of Artificial Sequence: Synthetic oligonucleotide
caugcuaggaggguggaac

SEQ ID NO: 1824341 - RNA, 19 nt, Artificial Sequence
  Description of Artificial Sequence: Synthetic oligonucleotide
cagaacuuuccacugggug

SEQ ID NO: 1824342 - RNA, 19 nt, Artificial Sequence
  Description of Artificial Sequence: Synthetic oligonucleotide
ucuagcucauguucauucu

SEQ ID NO: 1824343 - RNA, 19 nt, Artificial Sequence
  Description of Artificial Sequence: Synthetic oligonucleotide
uguggcgcuggacaucacc

SEQ ID NO: 1824344 - RNA, 19 nt, Artificial Sequence
  Description of Artificial Sequence: Synthetic oligonucleotide
cugaaauugcugaacccuc

SEQ ID NO: 1824345 - RNA, 19 nt, Artificial Sequence
  Description of Artificial Sequence: Synthetic oligonucleotide
cagcuauaaggcuuuuccc

SEQ ID NO: 1824346 - RNA, 19 nt, Artificial Sequence
  Description of Artificial Sequence: Synthetic oligonucleotide
ugugcuccuucaaauugcu

SEQ ID NO: 1824347 - RNA, 19 nt, Artificial Sequence
  Description of Artificial Sequence: Synthetic oligonucleotide
gaacgggucacagccaugc

SEQ ID NO: 1824348 - RNA, 19 nt, Artificial Sequence
  Description of Artificial Sequence: Synthetic oligonucleotide
aucacaagugaacaccuua

SEQ ID NO: 1824349 - RNA, 19 nt, Artificial Sequence
  Description of Artificial Sequence: Synthetic oligonucleotide
uggguguuuaaaaggcuuc

SEQ ID NO: 1824350 - RNA, 19 nt, Artificial Sequence
  Description of Artificial Sequence: Synthetic oligonucleotide
aaguguggcuucucuccag

SEQ ID NO: 1824351 - RNA, 19 nt, Artificial Sequence
  Description of Artificial Sequence: Synthetic oligonucleotide
gaacauggagcguaguuua

SEQ ID NO: 1824352 - RNA, 19 nt, Artificial Sequence
  Description of Artificial Sequence: Synthetic oligonucleotide
ucaaaagguuucucaccug

SEQ ID NO: 1824353 - RNA, 19 nt, Artificial Sequence
  Description of Artificial Sequence: Synthetic oligonucleotide
ugagaccuauccaggucag

SEQ ID NO: 1824354 - RNA, 19 nt, Artificial Sequence
  Description of Artificial Sequence: Synthetic oligonucleotide
uuuugugcuccuucaaauu

SEQ ID NO: 1824355 - RNA, 19 nt, Artificial Sequence
  Description of Artificial Sequence: Synthetic oligonucleotide
uggcacaucacugcucuag

SEQ ID NO: 1824356 - RNA, 19 nt, Artificial Sequence
  Description of Artificial Sequence: Synthetic oligonucleotide
caguguuaugagauggcac

SEQ ID NO: 1824357 - RNA, 19 nt, Artificial Sequence
  Description of Artificial Sequence: Synthetic oligonucleotide
gggagcuugacagacacag

SEQ ID NO: 1824358 - RNA, 19 nt, Artificial Sequence
  Description of Artificial Sequence: Synthetic oligonucleotide
uuagcaggauccaggccca

SEQ ID NO: 1824359 - RNA, 19 nt, Artificial Sequence
  Description of Artificial Sequence: Synthetic oligonucleotide
aacauggagcguaguuuac

SEQ ID NO: 1824360 - RNA, 19 nt, Artificial Sequence
  Description of Artificial Sequence: Synthetic oligonucleotide
ugaacccucggccgcaugu

SEQ ID NO: 1824361 - RNA, 19 nt, Artificial Sequence
  Description of Artificial Sequence: Synthetic oligonucleotide
agugcggacgugccugcgc

SEQ ID NO: 1824362 - RNA, 19 nt, Artificial Sequence
  Description of Artificial Sequence: Synthetic oligonucleotide
cguaguuuacaguaggagc

SEQ ID NO: 1824363 - RNA, 19 nt, Artificial Sequence
  Description of Artificial Sequence: Synthetic oligonucleotide
uuacaguaggagccaguac

SEQ ID NO: 1824364 - RNA, 19 nt, Artificial Sequence
  Description of Artificial Sequence: Synthetic oligonucleotide
aacaccuuaucagcugugu

SEQ ID NO: 1824365 - RNA, 19 nt, Artificial Sequence
  Description of Artificial Sequence: Synthetic oligonucleotide
ugaccuucaaaugcugcca

SEQ ID NO: 1824366 - RNA, 19 nt, Artificial Sequence
  Description of Artificial Sequence: Synthetic oligonucleotide
agccaguacagugaccuuc

SEQ ID NO: 1824367 - RNA, 19 nt, Artificial Sequence
  Description of Artificial Sequence: Synthetic oligonucleotide
cagagagucauacuagaga

SEQ ID NO: 1824368 - RNA, 19 nt, Artificial Sequence
  Description of Artificial Sequence: Synthetic oligonucleotide
uuaucagcugugugugucu

SEQ ID NO: 1824369 - RNA, 19 nt, Artificial Sequence
  Description of Artificial Sequence: Synthetic oligonucleotide
uggaacauggagcguaguu

SEQ ID NO: 1824370 - RNA, 19 nt, Artificial Sequence
  Description of Artificial Sequence: Synthetic oligonucleotide
gcuugacagacacaggcag

SEQ ID NO: 1824371 - RNA, 19 nt, Artificial Sequence
  Description of Artificial Sequence: Synthetic oligonucleotide
augagaccguuuguguagc

SEQ ID NO: 1824372 - RNA, 19 nt, Artificial Sequence
  Description of Artificial Sequence: Synthetic oligonucleotide
uaggagccaguacagugac

SEQ ID NO: 1824373 - RNA, 19 nt, Artificial Sequence
  Description of Artificial Sequence: Synthetic oligonucleotide
ggcuuggucagcuuagcag

SEQ ID NO: 1824374 - RNA, 19 nt, Artificial Sequence
  Description of Artificial Sequence: Synthetic oligonucleotide
gugaacaccuuaucagcug

SEQ ID NO: 1824375 - RNA, 19 nt, Artificial Sequence
  Description of Artificial Sequence: Synthetic oligonucleotide
cuuaucagcuguguguguc

SEQ ID NO: 1824376 - RNA, 19 nt, Artificial Sequence
  Description of Artificial Sequence: Synthetic oligonucleotide
accuuaucagcugugugug

SEQ ID NO: 1824377 - RNA, 19 nt, Artificial Sequence
  Description of Artificial Sequence: Synthetic oligonucleotide
uuucacagauguacggcuu

SEQ ID NO: 1824378 - RNA, 19 nt, Artificial Sequence
  Description of Artificial Sequence: Synthetic oligonucleotide
ugcgcaggucucccgagcc

SEQ ID NO: 1824379 - RNA, 19 nt, Artificial Sequence
  Description of Artificial Sequence: Synthetic oligonucleotide
cugagaccuauccagguca

SEQ ID NO: 1824380 - RNA, 19 nt, Artificial Sequence
  Description of Artificial Sequence: Synthetic oligonucleotide
ucacaugcauacugucucu

SEQ ID NO: 1824381 - RNA, 19 nt, Artificial Sequence
  Description of Artificial Sequence: Synthetic oligonucleotide
uucccacuacauuucacau

SEQ ID NO: 1824382 - RNA, 19 nt, Artificial Sequence
  Description of Artificial Sequence: Synthetic oligonucleotide
uaguuuacaguaggagcca

SEQ ID NO: 1824383 - RNA, 19 nt, Artificial Sequence
  Description of Artificial Sequence: Synthetic oligonucleotide
acagugaccuucaaaugcu

SEQ ID NO: 1824384 - RNA, 19 nt, Artificial Sequence
  Description of Artificial Sequence: Synthetic oligonucleotide
ucuucuugugccgccgcag

SEQ ID NO: 1824385 - RNA, 19 nt, Artificial Sequence
  Description of Artificial Sequence: Synthetic oligonucleotide
ugcaucuucuugugccgcc

SEQ ID NO: 1824386 - RNA, 19 nt, Artificial Sequence
  Description of Artificial Sequence: Synthetic oligonucleotide
acggugcuucaccagcuuc

SEQ ID NO: 1824387 - RNA, 19 nt, Artificial Sequence
  Description of Artificial Sequence: Synthetic oligonucleotide
uagguauguggcuggcucu

SEQ ID NO: 1824388 - RNA, 19 nt, Artificial Sequence
  Description of Artificial Sequence: Synthetic oligonucleotide
ccugugacugcucagcagc

SEQ ID NO: 1824389 - RNA, 19 nt, Artificial Sequence
  Description of Artificial Sequence: Synthetic oligonucleotide
uccgcaucugaguaagcau

SEQ ID NO: 1824390 - RNA, 19 nt, Artificial Sequence
  Description of Artificial Sequence: Synthetic oligonucleotide
agagugccggcguaaguga

SEQ ID NO: 1824391 - RNA, 19 nt, Artificial Sequence
  Description of Artificial Sequence: Synthetic oligonucleotide
acugggugcacugggagcu

SEQ ID NO: 1824392 - RNA, 19 nt, Artificial Sequence
  Description of Artificial Sequence: Synthetic oligonucleotide
gcuuggguguuuaaaaggc

SEQ ID NO: 1824393 - RNA, 19 nt, Artificial Sequence
  Description of Artificial Sequence: Synthetic oligonucleotide
aguuucuguacgucaccga

SEQ ID NO: 1824394 - RNA, 19 nt, Artificial Sequence
  Description of Artificial Sequence: Synthetic oligonucleotide
agugguuguccaggguggc

SEQ ID NO: 1824395 - RNA, 19 nt, Artificial Sequence
  Description of Artificial Sequence: Synthetic oligonucleotide
augugucacacaagugugg

SEQ ID NO: 1824396 - RNA, 19 nt, Artificial Sequence
  Description of Artificial Sequence: Synthetic oligonucleotide
ugccaugcaucuucuugug

SEQ ID NO: 1824397 - RNA, 19 nt, Artificial Sequence
  Description of Artificial Sequence: Synthetic oligonucleotide
gauguggcgcuggacauca

SEQ ID NO: 1824398 - RNA, 19 nt, Artificial Sequence
  Description of Artificial Sequence: Synthetic oligonucleotide
gcagugguuguccagggug

SEQ ID NO: 1824399 - RNA, 19 nt, Artificial Sequence
  Description of Artificial Sequence: Synthetic oligonucleotide
cagagugccggcguaagug

SEQ ID NO: 1824400 - RNA, 19 nt, Artificial Sequence
  Description of Artificial Sequence: Synthetic oligonucleotide
acgggucacagccaugcca

SEQ ID NO: 1824401 - RNA, 19 nt, Artificial Sequence
  Description of Artificial Sequence: Synthetic oligonucleotide
uguuaugagauggcacauc

SEQ ID NO: 1824402 - RNA, 19 nt, Artificial Sequence
  Description of Artificial Sequence: Synthetic oligonucleotide
cacaagugaacaccuuauc

SEQ ID NO: 1824403 - RNA, 19 nt, Artificial Sequence
  Description of Artificial Sequence: Synthetic oligonucleotide
ggaggguggaacauggagc

SEQ ID NO: 1824404 - RNA, 19 nt, Artificial Sequence
  Description of Artificial Sequence: Synthetic oligonucleotide
gcuauaaggcuuuucccca

SEQ ID NO: 1824405 - RNA, 19 nt, Artificial Sequence
  Description of Artificial Sequence: Synthetic oligonucleotide
cacaaguguggcuucucuc

SEQ ID NO: 1824406 - RNA, 19 nt, Artificial Sequence
  Description of Artificial Sequence: Synthetic oligonucleotide
guaugagaccguuugugua

SEQ ID NO: 1824407 - RNA, 19 nt, Artificial Sequence
  Description of Artificial Sequence: Synthetic oligonucleotide
aucugaguaagcauaggua

SEQ ID NO: 1824408 - RNA, 19 nt, Artificial Sequence
  Description of Artificial Sequence: Synthetic oligonucleotide
gaggucucgauggucuggc

SEQ ID NO: 1824409 - RNA, 19 nt, Artificial Sequence
  Description of Artificial Sequence: Synthetic oligonucleotide
gagucaaggucagccuggg

SEQ ID NO: 1824410 - RNA, 19 nt, Artificial Sequence
  Description of Artificial Sequence: Synthetic oligonucleotide
gcccgugugccucacacgg

SEQ ID NO: 1824411 - RNA, 19 nt, Artificial Sequence
  Description of Artificial Sequence: Synthetic oligonucleotide
aguguuucccacaaauguu

SEQ ID NO: 1824412 - RNA, 19 nt, Artificial Sequence
  Description of Artificial Sequence: Synthetic oligonucleotide
ucgcccgugugccucacac

SEQ ID NO: 1824413 - RNA, 19 nt, Artificial Sequence
  Description of Artificial Sequence: Synthetic oligonucleotide
accucuuuccacagauuuc

SEQ ID NO: 1824414 - RNA, 19 nt, Artificial Sequence
  Description of Artificial Sequence: Synthetic oligonucleotide
cugccacagaacuuuccac

SEQ ID NO: 1824415 - RNA, 19 nt, Artificial Sequence
  Description of Artificial Sequence: Synthetic oligonucleotide
cacucaucacaagugaaca

SEQ ID NO: 1824416 - RNA, 19 nt, Artificial Sequence
  Description of Artificial Sequence: Synthetic oligonucleotide
augccaucagccugugacu

SEQ ID NO: 1824417 - RNA, 19 nt, Artificial Sequence
  Description of Artificial Sequence: Synthetic oligonucleotide
guaggagccaguacaguga

SEQ ID NO: 1824418 - RNA, 19 nt, Artificial Sequence
  Description of Artificial Sequence: Synthetic oligonucleotide
augcuaggaggguggaaca

SEQ ID NO: 1824419 - RNA, 19 nt, Artificial Sequence
  Description of Artificial Sequence: Synthetic oligonucleotide
ucaccgaaggugcccggcu

SEQ ID NO: 1824420 - RNA, 19 nt, Artificial Sequence
  Description of Artificial Sequence: Synthetic oligonucleotide
auggagcguaguuuacagu

SEQ ID NO: 1824421 - RNA, 19 nt, Artificial Sequence
  Description of Artificial Sequence: Synthetic oligonucleotide
uacgucaccgaaggugccc

SEQ ID NO: 1824422 - RNA, 19 nt, Artificial Sequence
  Description of Artificial Sequence: Synthetic oligonucleotide
agucaaggucagccugggg

SEQ ID NO: 1824423 - RNA, 19 nt, Artificial Sequence
  Description of Artificial Sequence: Synthetic oligonucleotide
ucuguacgucaccgaaggu

SEQ ID NO: 1824424 - RNA, 19 nt, Artificial Sequence
  Description of Artificial Sequence: Synthetic oligonucleotide
cacugggugcacugggagc

SEQ ID NO: 1824425 - RNA, 19 nt, Artificial Sequence
  Description of Artificial Sequence: Synthetic oligonucleotide
caucugaguaagcauaggu

SEQ ID NO: 1824426 - RNA, 19 nt, Artificial Sequence
  Description of Artificial Sequence: Synthetic oligonucleotide
aacccucggccgcaugugu

SEQ ID NO: 1824427 - RNA, 19 nt, Artificial Sequence
  Description of Artificial Sequence: Synthetic oligonucleotide
acauggagcguaguuuaca

SEQ ID NO: 1824428 - RNA, 19 nt, Artificial Sequence
  Description of Artificial Sequence: Synthetic oligonucleotide
gguguuuaaaaggcuuccc

SEQ ID NO: 1824429 - RNA, 19 nt, Artificial Sequence
  Description of Artificial Sequence: Synthetic oligonucleotide
cauuucacaugcauacugu

SEQ ID NO: 1824430 - RNA, 19 nt, Artificial Sequence
  Description of Artificial Sequence: Synthetic oligonucleotide
uggcgcuggacaucaccag

SEQ ID NO: 1824431 - RNA, 19 nt, Artificial Sequence
  Description of Artificial Sequence: Synthetic oligonucleotide
ugcucuagcucauguucau

SEQ ID NO: 1824432 - RNA, 19 nt, Artificial Sequence
  Description of Artificial Sequence: Synthetic oligonucleotide
gauguacggcuucucccca

SEQ ID NO: 1824433 - RNA, 19 nt, Artificial Sequence
  Description of Artificial Sequence: Synthetic oligonucleotide
ucacagauguacggcuucu

SEQ ID NO: 1824434 - RNA, 19 nt, Artificial Sequence
  Description of Artificial Sequence: Synthetic oligonucleotide
cagccaugccaucagccug

SEQ ID NO: 1824435 - RNA, 19 nt, Artificial Sequence
  Description of Artificial Sequence: Synthetic oligonucleotide
accuucaaaugcugccaca

SEQ ID NO: 1824436 - RNA, 19 nt, Artificial Sequence
  Description of Artificial Sequence: Synthetic oligonucleotide
agguguccgcaucugagua

SEQ ID NO: 1824437 - RNA, 19 nt, Artificial Sequence
  Description of Artificial Sequence: Synthetic oligonucleotide
gcguaguuuacaguaggag

SEQ ID NO: 1824438 - RNA, 19 nt, Artificial Sequence
  Description of Artificial Sequence: Synthetic oligonucleotide
ccagagagucauacuagag

SEQ ID NO: 1824439 - RNA, 19 nt, Artificial Sequence
  Description of Artificial Sequence: Synthetic oligonucleotide
acgucaccgaaggugcccg

SEQ ID NO: 1824440 - RNA, 19 nt, Artificial Sequence
  Description of Artificial Sequence: Synthetic oligonucleotide
cugcucuagcucauguuca

SEQ ID NO: 1824441 - RNA, 19 nt, Artificial Sequence
  Description of Artificial Sequence: Synthetic oligonucleotide
ugagugcggacgugccugc

SEQ ID NO: 1824442 - RNA, 19 nt, Artificial Sequence
  Description of Artificial Sequence: Synthetic oligonucleotide
caccuuaucagcugugugu

SEQ ID NO: 1824443 - RNA, 19 nt, Artificial Sequence
  Description of Artificial Sequence: Synthetic oligonucleotide
cucacacggugcuucacca

SEQ ID NO: 1824444 - RNA, 19 nt, Artificial Sequence
  Description of Artificial Sequence: Synthetic oligonucleotide
cagugaccuucaaaugcug

SEQ ID NO: 1824445 - RNA, 19 nt, Artificial Sequence
  Description of Artificial Sequence: Synthetic oligonucleotide
guguuucccacaaauguua

SEQ ID NO: 1824446 - RNA, 19 nt, Artificial Sequence
  Description of Artificial Sequence: Synthetic oligonucleotide
ugugccgccgcagcacugc

SEQ ID NO: 1824447 - RNA, 19 nt, Artificial Sequence
  Description of Artificial Sequence: Synthetic oligonucleotide
gaagguugccugccugaga

SEQ ID NO: 1824448 - RNA, 19 nt, Artificial Sequence
  Description of Artificial Sequence: Synthetic oligonucleotide
uaggaggguggaacaugga

SEQ ID NO: 1824449 - RNA, 19 nt, Artificial Sequence
  Description of Artificial Sequence: Synthetic oligonucleotide
ggguguuuaaaaggcuucc

SEQ ID NO: 1824450 - RNA, 19 nt, Artificial Sequence
  Description of Artificial Sequence: Synthetic oligonucleotide
agcuugacagacacaggca

SEQ ID NO: 1824451 - RNA, 19 nt, Artificial Sequence
  Description of Artificial Sequence: Synthetic oligonucleotide
cuucaaaugcugccacaga

SEQ ID NO: 1824452 - RNA, 19 nt, Artificial Sequence
  Description of Artificial Sequence: Synthetic oligonucleotide
agguauguggcuggcucug

SEQ ID NO: 1824453 - RNA, 19 nt, Artificial Sequence
  Description of Artificial Sequence: Synthetic oligonucleotide
gagaccguuuguguagcuc

SEQ ID NO: 1824454 - RNA, 19 nt, Artificial Sequence
  Description of Artificial Sequence: Synthetic oligonucleotide
agcguaguuuacaguagga

SEQ ID NO: 1824455 - RNA, 19 nt, Artificial Sequence
  Description of Artificial Sequence: Synthetic oligonucleotide
cacaugcauacugucucug

SEQ ID NO: 1824456 - RNA, 19 nt, Artificial Sequence
  Description of Artificial Sequence: Synthetic oligonucleotide
ggcguaagugagucugaag

SEQ ID NO: 1824457 - RNA, 19 nt, Artificial Sequence
  Description of Artificial Sequence: Synthetic oligonucleotide
ggagcguaguuuacaguag

SEQ ID NO: 1824458 - RNA, 19 nt, Artificial Sequence
  Description of Artificial Sequence: Synthetic oligonucleotide
gagggcuugggaugggucu

SEQ ID NO: 1824459 - RNA, 19 nt, Artificial Sequence
  Description of Artificial Sequence: Synthetic oligonucleotide
ucggccgcaugugucacac

SEQ ID NO: 1824460 - RNA, 19 nt, Artificial Sequence
  Description of Artificial Sequence: Synthetic oligonucleotide
ucagagcucugagaccuau

SEQ ID NO: 1824461 - RNA, 19 nt, Artificial Sequence
  Description of Artificial Sequence: Synthetic oligonucleotide
ucacucaugcuaggagggu

SEQ ID NO: 1824462 - RNA, 19 nt, Artificial Sequence
  Description of Artificial Sequence: Synthetic oligonucleotide
uguccgcaucugaguaagc

SEQ ID NO: 1824463 - RNA, 19 nt, Artificial Sequence
  Description of Artificial Sequence: Synthetic oligonucleotide
cuauccaggucagaggucu

SEQ ID NO: 1824464 - RNA, 19 nt, Artificial Sequence
  Description of Artificial Sequence: Synthetic oligonucleotide
ugagaccguuuguguagcu

SEQ ID NO: 1824465 - RNA, 19 nt, Artificial Sequence
  Description of Artificial Sequence: Synthetic oligonucleotide
gaucucugugagucaaggu

SEQ ID NO: 1824466 - RNA, 19 nt, Artificial Sequence
  Description of Artificial Sequence: Synthetic oligonucleotide
gagugccggcguaagugag

SEQ ID NO: 1824467 - RNA, 19 nt, Artificial Sequence
  Description of Artificial Sequence: Synthetic oligonucleotide
guauguggcuggcucugca

SEQ ID NO: 1824468 - RNA, 19 nt, Artificial Sequence
  Description of Artificial Sequence: Synthetic oligonucleotide
gucacacaaguguggcuuc

SEQ ID NO: 1824469 - RNA, 19 nt, Artificial Sequence
  Description of Artificial Sequence: Synthetic oligonucleotide
gcgugugaagcacuugcug

SEQ ID NO: 1824470 - RNA, 19 nt, Artificial Sequence
  Description of Artificial Sequence: Synthetic oligonucleotide
gaagaacgggucacagcca

SEQ ID NO: 1824471 - RNA, 19 nt, Artificial Sequence
  Description of Artificial Sequence: Synthetic oligonucleotide
cuccagauugcuugggugu

SEQ ID NO: 1824472 - RNA, 19 nt, Artificial Sequence
  Description of Artificial Sequence: Synthetic oligonucleotide
cuuggguguuuaaaaggcu

SEQ ID NO: 1824473 - RNA, 19 nt, Artificial Sequence
  Description of Artificial Sequence: Synthetic oligonucleotide
cugccaugcaucuucuugu

SEQ ID NO: 1824474 - RNA, 19 nt, Artificial Sequence
  Description of Artificial Sequence: Synthetic oligonucleotide
gagagucauacuagagaaa

SEQ ID NO: 1824475 - RNA, 19 nt, Artificial Sequence
  Description of Artificial Sequence: Synthetic oligonucleotide
gaacccucggccgcaugug

SEQ ID NO: 1824476 - RNA, 19 nt, Artificial Sequence
  Description of Artificial Sequence: Synthetic oligonucleotide
gagguguccgcaucugagu

SEQ ID NO: 1824477 - RNA, 19 nt, Artificial Sequence
  Description of Artificial Sequence: Synthetic oligonucleotide
ccccagagagucauacuag

SEQ ID NO: 1824478 - RNA, 19 nt, Artificial Sequence
  Description of Artificial Sequence: Synthetic oligonucleotide
ugauguggcgcuggacauc

SEQ ID NO: 1824479 - RNA, 19 nt, Artificial Sequence
  Description of Artificial Sequence: Synthetic oligonucleotide
agggugcuuccucaguguu

SEQ ID NO: 1824480 - RNA, 19 nt, Artificial Sequence
  Description of Artificial Sequence: Synthetic oligonucleotide
gccugagagaaguguuucc

SEQ ID NO: 1824481 - RNA, 19 nt, Artificial Sequence
  Description of Artificial Sequence: Synthetic oligonucleotide
guggcgcuggacaucacca

SEQ ID NO: 1824482 - RNA, 19 nt, Artificial Sequence
  Description of Artificial Sequence: Synthetic oligonucleotide
ccucuuuccacagauuuca

SEQ ID NO: 1824483 - RNA, 19 nt, Artificial Sequence
  Description of Artificial Sequence: Synthetic oligonucleotide
agagcgugugaagcacuug

SEQ ID NO: 1824484 - RNA, 19 nt, Artificial Sequence
  Description of Artificial Sequence: Synthetic oligonucleotide
aucacugcucuagcucaug

SEQ ID NO: 1824485 - RNA, 19 nt, Artificial Sequence
  Description of Artificial Sequence: Synthetic oligonucleotide
uaucagcugugugugucuu

SEQ ID NO: 1824486 - RNA, 19 nt, Artificial Sequence
  Description of Artificial Sequence: Synthetic oligonucleotide
cacuugcugcagaucucac

SEQ ID NO: 1824487 - RNA, 19 nt, Artificial Sequence
  Description of Artificial Sequence: Synthetic oligonucleotide
accguuuguguagcuccag

SEQ ID NO: 1824488 - RNA, 19 nt, Artificial Sequence
  Description of Artificial Sequence: Synthetic oligonucleotide
caguacagugaccuucaaa

SEQ ID NO: 1824489 - RNA, 19 nt, Artificial Sequence
  Description of Artificial Sequence: Synthetic oligonucleotide
ccucacacggugcuucacc

SEQ ID NO: 1824490 - RNA, 19 nt, Artificial Sequence
  Description of Artificial Sequence: Synthetic oligonucleotide
gccggcguaagugagucug

SEQ ID NO: 1824491 - RNA, 19 nt, Artificial Sequence
  Description of Artificial Sequence: Synthetic oligonucleotide
gguggaacauggagcguag

SEQ ID NO: 1824492 - RNA, 19 nt, Artificial Sequence
  Description of Artificial Sequence: Synthetic oligonucleotide
guaagugagucugaagguu

SEQ ID NO: 1824493 - RNA, 19 nt, Artificial Sequence
  Description of Artificial Sequence: Synthetic oligonucleotide
agcgugugaagcacuugcu

SEQ ID NO: 1824494 - RNA, 19 nt, Artificial Sequence
  Description of Artificial Sequence: Synthetic oligonucleotide
ugccgccgcagcacugcag

SEQ ID NO: 1824495 - RNA, 19 nt, Artificial Sequence
  Description of Artificial Sequence: Synthetic oligonucleotide
uugugccgccgcagcacug

SEQ ID NO: 1824496 - RNA, 19 nt, Artificial Sequence
  Description of Artificial Sequence: Synthetic oligonucleotide
ugcggacgugccugcgcag

SEQ ID NO: 1824497 - RNA, 19 nt, Artificial Sequence
  Description of Artificial Sequence: Synthetic oligonucleotide
cacagcuauaaggcuuuuc

SEQ ID NO: 1824498 - RNA, 19 nt, Artificial Sequence
  Description of Artificial Sequence: Synthetic oligonucleotide
gcuuagcaggauccaggcc

SEQ ID NO: 1824499 - RNA, 19 nt, Artificial Sequence
  Description of Artificial Sequence: Synthetic oligonucleotide
ggagcuugacagacacagg

SEQ ID NO: 1824500 - RNA, 19 nt, Artificial Sequence
  Description of Artificial Sequence: Synthetic oligonucleotide
ggccgcaugugucacacaa

SEQ ID NO: 1824501 - RNA, 19 nt, Artificial Sequence
  Description of Artificial Sequence: Synthetic oligonucleotide
guugccugccugagagaag

SEQ ID NO: 1824502 - RNA, 19 nt, Artificial Sequence
  Description of Artificial Sequence: Synthetic oligonucleotide
ccaaggaagaacgggucac

SEQ ID NO: 1824503 - RNA, 19 nt, Artificial Sequence
  Description of Artificial Sequence: Synthetic oligonucleotide
ugcugaacccucggccgca

SEQ ID NO: 1824504 - RNA, 19 nt, Artificial Sequence
  Description of Artificial Sequence: Synthetic oligonucleotide
ugggugcacugggagcuug

SEQ ID NO: 1824505 - RNA, 19 nt, Artificial Sequence
  Description of Artificial Sequence: Synthetic oligonucleotide
gugcacugggagcuugaca

SEQ ID NO: 1824506 - RNA, 19 nt, Artificial Sequence
  Description of Artificial Sequence: Synthetic oligonucleotide
caccgaaggugcccggcug

SEQ ID NO: 1824507 - RNA, 19 nt, Artificial Sequence
  Description of Artificial Sequence: Synthetic oligonucleotide
uggcaucagcucugccaug

SEQ ID NO: 1824508 - RNA, 19 nt, Artificial Sequence
  Description of Artificial Sequence: Synthetic oligonucleotide
gugcggacgugccugcgca

SEQ ID NO: 1824509 - RNA, 19 nt, Artificial Sequence
  Description of Artificial Sequence: Synthetic oligonucleotide
gacgugccugcgcaggucu

SEQ ID NO: 1824510 - RNA, 19 nt, Artificial Sequence
  Description of Artificial Sequence: Synthetic oligonucleotide
gaccguuuguguagcucca

SEQ ID NO: 1824511 - RNA, 19 nt, Artificial Sequence
  Description of Artificial Sequence: Synthetic oligonucleotide
gucaccgaaggugcccggc

SEQ ID NO: 1824512 - RNA, 19 nt, Artificial Sequence
  Description of Artificial Sequence: Synthetic oligonucleotide
gggucuucauugccagccc

SEQ ID NO: 1824513 - RNA, 19 nt, Artificial Sequence
  Description of Artificial Sequence: Synthetic oligonucleotide
gccugugacugcucagcag

SEQ ID NO: 1824514 - RNA, 19 nt, Artificial Sequence
  Description of Artificial Sequence: Synthetic oligonucleotide
uucauucugcagggucuuc

SEQ ID NO: 1824515 - RNA, 19 nt, Artificial Sequence
  Description of Artificial Sequence: Synthetic oligonucleotide
cugagguguccgcaucuga

SEQ ID NO: 1824516 - RNA, 19 nt, Artificial Sequence
  Description of Artificial Sequence: Synthetic oligonucleotide
aucagcugugugugucuuu

SEQ ID NO: 1824517 - RNA, 19 nt, Artificial Sequence
  Description of Artificial Sequence: Synthetic oligonucleotide
acuuuccacugggugcacu

SEQ ID NO: 1824518 - RNA, 19 nt, Artificial Sequence
  Description of Artificial Sequence: Synthetic oligonucleotide
gagugcggacgugccugcg

SEQ ID NO: 1824519 - RNA, 19 nt, Artificial Sequence
  Description of Artificial Sequence: Synthetic oligonucleotide
gugccggcguaagugaguc

SEQ ID NO: 1824520 - RNA, 19 nt, Artificial Sequence
  Description of Artificial Sequence: Synthetic oligonucleotide
gugcccggcugcccagugg

SEQ ID NO: 1824521 - RNA, 19 nt, Artificial Sequence
  Description of Artificial Sequence: Synthetic oligonucleotide
agugccggcguaagugagu

SEQ ID NO: 1824522 - RNA, 19 nt, Artificial Sequence
  Description of Artificial Sequence: Synthetic oligonucleotide
agguugccugccugagaga

SEQ ID NO: 1824523 - RNA, 19 nt, Artificial Sequence
  Description of Artificial Sequence: Synthetic oligonucleotide
guacgucaccgaaggugcc

SEQ ID NO: 1824524 - RNA, 19 nt, Artificial Sequence
  Description of Artificial Sequence: Synthetic oligonucleotide
ccacugggugcacugggag

SEQ ID NO: 1824525 - RNA, 19 nt, Artificial Sequence
  Description of Artificial Sequence: Synthetic oligonucleotide
ccuggucacucaugcuagg

SEQ ID NO: 1824526 - RNA, 19 nt, Artificial Sequence
  Description of Artificial Sequence: Synthetic oligonucleotide
cccagagagucauacuaga

SEQ ID NO: 1824527 - RNA, 19 nt, Artificial Sequence
  Description of Artificial Sequence: Synthetic oligonucleotide
aggucucgauggucuggcu

SEQ ID NO: 1824528 - RNA, 19 nt, Artificial Sequence
  Description of Artificial Sequence: Synthetic oligonucleotide
uccccagagugccggcgua

SEQ ID NO: 1824529 - RNA, 19 nt, Artificial Sequence
  Description of Artificial Sequence: Synthetic oligonucleotide
agaacgggucacagccaug

SEQ ID NO: 1824530 - RNA, 19 nt, Artificial Sequence
  Description of Artificial Sequence: Synthetic oligonucleotide
ggaacauggagcguaguuu

SEQ ID NO: 1824531 - RNA, 19 nt, Artificial Sequence
  Description of Artificial Sequence: Synthetic oligonucleotide
ugugccucacacggugcuu

SEQ ID NO: 1824532 - RNA, 19 nt, Artificial Sequence
  Description of Artificial Sequence: Synthetic oligonucleotide
gagaccuauccaggucaga

SEQ ID NO: 1824533 - RNA, 19 nt, Artificial Sequence
  Description of Artificial Sequence: Synthetic oligonucleotide
ggagaaggagucagagcuc

SEQ ID NO: 1824534 - RNA, 19 nt, Artificial Sequence
  Description of Artificial Sequence: Synthetic oligonucleotide
caccagaggcugcaaaccu

SEQ ID NO: 1824535 - RNA, 19 nt, Artificial Sequence
  Description of Artificial Sequence: Synthetic oligonucleotide
guuuacaguaggagccagu

SEQ ID NO: 1824536 - RNA, 19 nt, Artificial Sequence
  Description of Artificial Sequence: Synthetic oligonucleotide
acacauccugggagaagga

SEQ ID NO: 1824537 - RNA, 19 nt, Artificial Sequence
  Description of Artificial Sequence: Synthetic oligonucleotide
gcuugggaugggucuuccc

SEQ ID NO: 1824538 - RNA, 19 nt, Artificial Sequence
  Description of Artificial Sequence: Synthetic oligonucleotide
ggcuucccacuacauuuca

SEQ ID NO: 1824539 - RNA, 19 nt, Artificial Sequence
  Description of Artificial Sequence: Synthetic oligonucleotide
gccaguacagugaccuuca

SEQ ID NO: 1824540 - RNA, 19 nt, Artificial Sequence
  Description of Artificial Sequence: Synthetic oligonucleotide
gccggcuugggcaggcagg

SEQ ID NO: 1824541 - RNA, 19 nt, Artificial Sequence
  Description of Artificial Sequence: Synthetic oligonucleotide
ggguggaacauggagcgua

SEQ ID NO: 1824542 - RNA, 19 nt, Artificial Sequence
  Description of Artificial Sequence: Synthetic oligonucleotide
ugccggcguaagugagucu

SEQ ID NO: 1824543 - RNA, 19 nt, Artificial Sequence
  Description of Artificial Sequence: Synthetic oligonucleotide
gggcuuggucagcuuagca

SEQ ID NO: 1824544 - RNA, 19 nt, Artificial Sequence
  Description of Artificial Sequence: Synthetic oligonucleotide
cagcugggcuccuggcauc

SEQ ID NO: 1824545 - RNA, 19 nt, Artificial Sequence
  Description of Artificial Sequence: Synthetic oligonucleotide
gcauagguauguggcuggc

SEQ ID NO: 1824546 - RNA, 19 nt, Artificial Sequence
  Description of Artificial Sequence: Synthetic oligonucleotide
ccgcaucugaguaagcaua

SEQ ID NO: 1824547 - RNA, 19 nt, Artificial Sequence
  Description of Artificial Sequence: Synthetic oligonucleotide
gccgccgcagcacugcaga

SEQ ID NO: 1824548 - RNA, 19 nt, Artificial Sequence
  Description of Artificial Sequence: Synthetic oligonucleotide
gcggacgugccugcgcagg

SEQ ID NO: 1824549 - RNA, 19 nt, Artificial Sequence
  Description of Artificial Sequence: Synthetic oligonucleotide
ccggcuugggcaggcaggg

SEQ ID NO: 1824550 - RNA, 19 nt, Artificial Sequence
  Description of Artificial Sequence: Synthetic oligonucleotide
aggguggaacauggagcgu

SEQ ID NO: 1824551 - RNA, 19 nt, Artificial Sequence
  Description of Artificial Sequence: Synthetic oligonucleotide
cucaugcuaggagggugga

SEQ ID NO: 1824552 - RNA, 19 nt, Artificial Sequence
  Description of Artificial Sequence: Synthetic oligonucleotide
cugugacugcucagcagcu

SEQ ID NO: 1824553 - RNA, 19 nt, Artificial Sequence
  Description of Artificial Sequence: Synthetic oligonucleotide
ggacaucaccagaggcugc

SEQ ID NO: 1824554 - RNA, 19 nt, Artificial Sequence
  Description of Artificial Sequence: Synthetic oligonucleotide
cuugugccgccgcagcacu

SEQ ID NO: 1824555 - RNA, 19 nt, Artificial Sequence
  Description of Artificial Sequence: Synthetic oligonucleotide
gccgcaugugucacacaag

SEQ ID NO: 1824556 - RNA, 19 nt, Artificial Sequence
  Description of Artificial Sequence: Synthetic oligonucleotide
cgcuggacaucaccagagg

SEQ ID NO: 1824557 - RNA, 19 nt, Artificial Sequence
  Description of Artificial Sequence: Synthetic oligonucleotide
caucagcucugccaugcau

SEQ ID NO: 1824558 - RNA, 19 nt, Artificial Sequence
  Description of Artificial Sequence: Synthetic oligonucleotide
ggugcacugggagcuugac

SEQ ID NO: 1824559 - RNA, 19 nt, Artificial Sequence
  Description of Artificial Sequence: Synthetic oligonucleotide
acgugccugcgcaggucuc

SEQ ID NO: 1824560 - RNA, 19 nt, Artificial Sequence
  Description of Artificial Sequence: Synthetic oligonucleotide
cguaagugagucugaaggu

SEQ ID NO: 1824561 - RNA, 19 nt, Artificial Sequence
  Description of Artificial Sequence: Synthetic oligonucleotide
caucacaagugaacaccuu

SEQ ID NO: 1824562 - RNA, 19 nt, Artificial Sequence
  Description of Artificial Sequence: Synthetic oligonucleotide
cgugugccucacacggugc

SEQ ID NO: 1824563 - RNA, 19 nt, Artificial Sequence
  Description of Artificial Sequence: Synthetic oligonucleotide
cauagguauguggcuggcu

SEQ ID NO: 1824564 - RNA, 19 nt, Artificial Sequence
  Description of Artificial Sequence: Synthetic oligonucleotide
guucauucugcagggucuu

SEQ ID NO: 1824565 - RNA, 19 nt, Artificial Sequence
  Description of Artificial Sequence: Synthetic oligonucleotide
gcgcaggucucccgagccc

SEQ ID NO: 1824566 - RNA, 19 nt, Artificial Sequence
  Description of Artificial Sequence: Synthetic oligonucleotide
gguuguccaggguggccaa

SEQ ID NO: 1824567 - RNA, 19 nt, Artificial Sequence
  Description of Artificial Sequence: Synthetic oligonucleotide
cucggccgcaugugucaca

SEQ ID NO: 1824568 - RNA, 19 nt, Artificial Sequence
  Description of Artificial Sequence: Synthetic oligonucleotide
auguggcgcuggacaucac

SEQ ID NO: 1824569 - RNA, 19 nt, Artificial Sequence
  Description of Artificial Sequence: Synthetic oligonucleotide
ccguuuguguagcuccaga

SEQ ID NO: 1824570 - RNA, 19 nt, Artificial Sequence
  Description of Artificial Sequence: Synthetic oligonucleotide
cagagcgugugaagcacuu

SEQ ID NO: 1824571 - RNA, 19 nt, Artificial Sequence
  Description of Artificial Sequence: Synthetic oligonucleotide
auggucuggcucagcucau

SEQ ID NO: 1824572 - RNA, 19 nt, Artificial Sequence
  Description of Artificial Sequence: Synthetic oligonucleotide
cccagagugccggcguaag

SEQ ID NO: 1824573 - RNA, 19 nt, Artificial Sequence
  Description of Artificial Sequence: Synthetic oligonucleotide
gugccgccgcagcacugca

SEQ ID NO: 1824574 - RNA, 19 nt, Artificial Sequence
  Description of Artificial Sequence: Synthetic oligonucleotide
caguaggagccaguacagu

SEQ ID NO: 1824575 - RNA, 19 nt, Artificial Sequence
  Description of Artificial Sequence: Synthetic oligonucleotide
ccgaaggugcccggcugcc

SEQ ID NO: 1824576 - RNA, 19 nt, Artificial Sequence
  Description of Artificial Sequence: Synthetic oligonucleotide
gagccaguacagugaccuu

SEQ ID NO: 1824577 - RNA, 19 nt, Artificial Sequence
  Description of Artificial Sequence: Synthetic oligonucleotide
ccucagaguuucuguacgu

SEQ ID NO: 1824578 - RNA, 19 nt, Artificial Sequence
  Description of Artificial Sequence: Synthetic oligonucleotide
cguuuguguagcuccagau

SEQ ID NO: 1824579 - RNA, 19 nt, Artificial Sequence
  Description of Artificial Sequence: Synthetic oligonucleotide
cgcccgugugccucacacg

SEQ ID NO: 1824580 - RNA, 19 nt, Artificial Sequence
  Description of Artificial Sequence: Synthetic oligonucleotide
cgugccugcgcaggucucc

SEQ ID NO: 1824581 - RNA, 19 nt, Artificial Sequence
  Description of Artificial Sequence: Synthetic oligonucleotide
guggaacauggagcguagu

SEQ ID NO: 1824582 - RNA, 19 nt, Artificial Sequence
  Description of Artificial Sequence: Synthetic oligonucleotide
caggucucccgagcccaca

SEQ ID NO: 1824583 - RNA, 19 nt, Artificial Sequence
  Description of Artificial Sequence: Synthetic oligonucleotide
ggacgugccugcgcagguc

SEQ ID NO: 1824584 - RNA, 19 nt, Artificial Sequence
  Description of Artificial Sequence: Synthetic oligonucleotide
gcagugugacagacacauc

SEQ ID NO: 1824585 - RNA, 19 nt, Artificial Sequence
  Description of Artificial Sequence: Synthetic oligonucleotide
cgucaccgaaggugcccgg

SEQ ID NO: 1824586 - RNA, 19 nt, Artificial Sequence
  Description of Artificial Sequence: Synthetic oligonucleotide
ccacuacauuucacaugca

SEQ ID NO: 1824587 - RNA, 19 nt, Artificial Sequence
  Description of Artificial Sequence: Synthetic oligonucleotide
cuugggcaggcagggugcu

SEQ ID NO: 1824588 - RNA, 19 nt, Artificial Sequence
  Description of Artificial Sequence: Synthetic oligonucleotide
ccggcguaagugagucuga

SEQ ID NO: 1824589 - RNA, 19 nt, Artificial Sequence
  Description of Artificial Sequence: Synthetic oligonucleotide
gggugcacugggagcuuga

SEQ ID NO: 1824590 - RNA, 19 nt, Artificial Sequence
  Description of Artificial Sequence: Synthetic oligonucleotide
gcagagcgugugaagcacu

SEQ ID NO: 1824591 - RNA, 19 nt, Artificial Sequence
  Description of Artificial Sequence: Synthetic oligonucleotide
gccucacacggugcuucac

SEQ ID NO: 1824592 - RNA, 19 nt, Artificial Sequence
  Description of Artificial Sequence: Synthetic oligonucleotide
cccggcugcccaguggcuc

SEQ ID NO: 1824593 - RNA, 19 nt, Artificial Sequence
  Description of Artificial Sequence: Synthetic oligonucleotide
cucgcccgugugccucaca

SEQ ID NO: 1824594 - RNA, 19 nt, Artificial Sequence
  Description of Artificial Sequence: Synthetic oligonucleotide
ccucggccgcaugugucac

SEQ ID NO: 1824595 - RNA, 19 nt, Artificial Sequence
  Description of Artificial Sequence: Synthetic oligonucleotide
cucugggacuggagggcuu

SEQ ID NO: 1824596 - RNA, 19 nt, Artificial Sequence
  Description of Artificial Sequence: Synthetic oligonucleotide
gcucugccaugcaucuucu

SEQ ID NO: 1824597 - RNA, 19 nt, Artificial Sequence
  Description of Artificial Sequence: Synthetic oligonucleotide
ccagagugccggcguaagu

SEQ ID NO: 1824598 - RNA, 19 nt, Artificial Sequence
  Description of Artificial Sequence: Synthetic oligonucleotide
ccaugccaucagccuguga

SEQ ID NO: 1824599 - RNA, 19 nt, Artificial Sequence
  Description of Artificial Sequence: Synthetic oligonucleotide
ccaguuuguccuggucacu

SEQ ID NO: 1824600 - RNA, 19 nt, Artificial Sequence
  Description of Artificial Sequence: Synthetic oligonucleotide
cggcguaagugagucugaa

SEQ ID NO: 1824601 - RNA, 19 nt, Artificial Sequence
  Description of Artificial Sequence: Synthetic oligonucleotide
cccgugugccucacacggu

SEQ ID NO: 1824602 - RNA, 19 nt, Artificial Sequence
  Description of Artificial Sequence: Synthetic oligonucleotide
ccccagagugccggcguaa

SEQ ID NO: 1824603 - RNA, 19 nt, Artificial Sequence
  Description of Artificial Sequence: Synthetic oligonucleotide
cugggugcacugggagcuu

SEQ ID NO: 1824604 - RNA, 19 nt, Artificial Sequence
  Description of Artificial Sequence: Synthetic oligonucleotide
ccagauugcuuggguguuu

SEQ ID NO: 1824605 - RNA, 19 nt, Artificial Sequence
  Description of Artificial Sequence: Synthetic oligonucleotide
gcugaacccucggccgcau

SEQ ID NO: 1824606 - RNA, 19 nt, Artificial Sequence
  Description of Artificial Sequence: Synthetic oligonucleotide
cgcucgcccgugugccuca

SEQ ID NO: 1824607 - RNA, 19 nt, Artificial Sequence
  Description of Artificial Sequence: Synthetic oligonucleotide
cggccgcaugugucacaca

SEQ ID NO: 1824608 - RNA, 19 nt, Artificial Sequence
  Description of Artificial Sequence: Synthetic oligonucleotide
ccgcagcacugcagagcgu

SEQ ID NO: 1824609 - RNA, 19 nt, Artificial Sequence
  Description of Artificial Sequence: Synthetic oligonucleotide
aauaacacaacagacuucc

SEQ ID NO: 1824610 - RNA, 19 nt, Artificial Sequence
  Description of Artificial Sequence: Synthetic oligonucleotide
agaauaugugguuuggggc

SEQ ID NO: 1824611 - RNA, 19 nt, Artificial Sequence
  Description of Artificial Sequence: Synthetic oligonucleotide
aauggaguuuaguuuauuc

SEQ ID NO: 1824612 - RNA, 19 nt, Artificial Sequence
  Description of Artificial Sequence: Synthetic oligonucleotide
auuauuguagucuagacua

SEQ ID NO: 1824613 - RNA, 19 nt, Artificial Sequence
  Description of Artificial Sequence: Synthetic oligonucleotide
guuuagacagaauaugugg

SEQ ID NO: 1824614 - RNA, 19 nt, Artificial Sequence
  Description of Artificial Sequence: Synthetic oligonucleotide
ugaaauuggaacaaauaac

SEQ ID NO: 1824615 - RNA, 19 nt, Artificial Sequence
  Description of Artificial Sequence: Synthetic oligonucleotide
uuuacaaaccuucacauuu

SEQ ID NO: 1824616 - RNA, 19 nt, Artificial Sequence
  Description of Artificial Sequence: Synthetic oligonucleotide
auagcgaucaguccagccc

SEQ ID NO: 1824617 - RNA, 19 nt, Artificial Sequence
  Description of Artificial Sequence: Synthetic oligonucleotide
ucaagugggaacaagcggc

SEQ ID NO: 1824618 - RNA, 19 nt, Artificial Sequence
  Description of Artificial Sequence: Synthetic oligonucleotide
aaccacuuauuguucagac

SEQ ID NO: 1824619 - RNA, 19 nt, Artificial Sequence
  Description of Artificial Sequence: Synthetic oligonucleotide
gaugaaaucauagcgauca

SEQ ID NO: 1824620 - RNA, 19 nt, Artificial Sequence
  Description of Artificial Sequence: Synthetic oligonucleotide
gaaauuggaacaaauaaca

SEQ ID NO: 1824621 - RNA, 19 nt, Artificial Sequence
  Description of Artificial Sequence: Synthetic oligonucleotide
uuauuuaauggccaguaaa

SEQ ID NO: 1824622 - RNA, 19 nt, Artificial Sequence
  Description of Artificial Sequence: Synthetic oligonucleotide
uauuauuguagucuagacu

SEQ ID NO: 1824623 - RNA, 19 nt, Artificial Sequence
  Description of Artificial Sequence: Synthetic oligonucleotide
aguacuuucccuuaacuga

SEQ ID NO: 1824624 - RNA, 19 nt, Artificial Sequence
  Description of Artificial Sequence: Synthetic oligonucleotide
agugcuguagcuuuuagga

SEQ ID NO: 1824625 - RNA, 19 nt, Artificial Sequence
  Description of Artificial Sequence: Synthetic oligonucleotide
gauacuguaggagaagggg

SEQ ID NO: 1824626 - RNA, 19 nt, Artificial Sequence
  Description of Artificial Sequence: Synthetic oligonucleotide
uuauuguucagaccaacca

SEQ ID NO: 1824627 - RNA, 19 nt, Artificial Sequence
  Description of Artificial Sequence: Synthetic oligonucleotide
accaauaccaguuaacacu

SEQ ID NO: 1824628 - RNA, 19 nt, Artificial Sequence
  Description of Artificial Sequence: Synthetic oligonucleotide
ugaguuacucaccacuggg

SEQ ID NO: 1824629 - RNA, 19 nt, Artificial Sequence
  Description of Artificial Sequence: Synthetic oligonucleotide
uuuagacagaauauguggu

SEQ ID NO: 1824630 - RNA, 19 nt, Artificial Sequence
  Description of Artificial Sequence: Synthetic oligonucleotide
ucugucccaacuauuauug

SEQ ID NO: 1824631 - RNA, 19 nt, Artificial Sequence
  Description of Artificial Sequence: Synthetic oligonucleotide
uucaagugggaacaagcgg

SEQ ID NO: 1824632 - RNA, 19 nt, Artificial Sequence
  Description of Artificial Sequence: Synthetic oligonucleotide
auagcuauuggcaccagcc

SEQ ID NO: 1824633 - RNA, 19 nt, Artificial Sequence
  Description of Artificial Sequence: Synthetic oligonucleotide
uuaacugacccugaagggg

SEQ ID NO: 1824634 - RNA, 19 nt, Artificial Sequence
  Description of Artificial Sequence: Synthetic oligonucleotide
gucuagacuauuuacaaac

SEQ ID NO: 1824635 - RNA, 19 nt, Artificial Sequence
  Description of Artificial Sequence: Synthetic oligonucleotide
ucuuuugacccuuaccaag

SEQ ID NO: 1824636 - RNA, 19 nt, Artificial Sequence
  Description of Artificial Sequence: Synthetic oligonucleotide
ugcuguagcuuuuaggaag

SEQ ID NO: 1824637 - RNA, 19 nt, Artificial Sequence
  Description of Artificial Sequence: Synthetic oligonucleotide
gaaucgagguagcaaacgg

SEQ ID NO: 1824638 - RNA, 19 nt, Artificial Sequence
  Description of Artificial Sequence: Synthetic oligonucleotide
ucucuaaauagaaaccaga

SEQ ID NO: 1824639 - RNA, 19 nt, Artificial Sequence
  Description of Artificial Sequence: Synthetic oligonucleotide
caaguaacuaggaaccagg

SEQ ID NO: 1824640 - RNA, 19 nt, Artificial Sequence
  Description of Artificial Sequence: Synthetic oligonucleotide
uugacccuuaccaaggagc

SEQ ID NO: 1824641 - RNA, 19 nt, Artificial Sequence
  Description of Artificial Sequence: Synthetic oligonucleotide
uguagucuagacuauuuac

SEQ ID NO: 1824642 - RNA, 19 nt, Artificial Sequence
  Description of Artificial Sequence: Synthetic oligonucleotide
aguuuauucaggguugugg

SEQ ID NO: 1824643 - RNA, 19 nt, Artificial Sequence
  Description of Artificial Sequence: Synthetic oligonucleotide
uuuucccuucuuuugaccc

SEQ ID NO: 1824644 - RNA, 19 nt, Artificial Sequence
  Description of Artificial Sequence: Synthetic oligonucleotide
uccaauacaggaggaaucg

SEQ ID NO: 1824645 - RNA, 19 nt, Artificial Sequence
  Description of Artificial Sequence: Synthetic oligonucleotide
aaaccuucacauuuuaauu

SEQ ID NO: 1824646 - RNA, 19 nt, Artificial Sequence
  Description of Artificial Sequence: Synthetic oligonucleotide
cuuuugacccuuaccaagg

SEQ ID NO: 1824647 - RNA, 19 nt, Artificial Sequence
  Description of Artificial Sequence: Synthetic oligonucleotide
aaucgagguagcaaacggc

SEQ ID NO: 1824648 - RNA, 19 nt, Artificial Sequence
  Description of Artificial Sequence: Synthetic oligonucleotide
ucuagacuauuuacaaacc

SEQ ID NO: 1824649 - RNA, 19 nt, Artificial Sequence
  Description of Artificial Sequence: Synthetic oligonucleotide
guucagaccaaccaauacc

SEQ ID NO: 1824650 - RNA, 19 nt, Artificial Sequence
  Description of Artificial Sequence: Synthetic oligonucleotide
cuuaacugacccugaaggg

SEQ ID NO: 1824651 - RNA, 19 nt, Artificial Sequence
  Description of Artificial Sequence: Synthetic oligonucleotide
ugcuaauucugccauuagc

SEQ ID NO: 1824652 - RNA, 19 nt, Artificial Sequence
  Description of Artificial Sequence: Synthetic oligonucleotide
cuuauuguucagaccaacc

SEQ ID NO: 1824653 - RNA, 19 nt, Artificial Sequence
  Description of Artificial Sequence: Synthetic oligonucleotide
uuaacacugagagacggcc

SEQ ID NO: 1824654 - RNA, 19 nt, Artificial Sequence
  Description of Artificial Sequence: Synthetic oligonucleotide
caggcaaguaacuaggaac

SEQ ID NO: 1824655 - RNA, 19 nt, Artificial Sequence
  Description of Artificial Sequence: Synthetic oligonucleotide
cuaauucugccauuagccc

SEQ ID NO: 1824656 - RNA, 19 nt, Artificial Sequence
  Description of Artificial Sequence: Synthetic oligonucleotide
uagcuuuuaggaaggcugg

SEQ ID NO: 1824657 - RNA, 19 nt, Artificial Sequence
  Description of Artificial Sequence: Synthetic oligonucleotide
aaguaacuaggaaccaggc

SEQ ID NO: 1824658 - RNA, 19 nt, Artificial Sequence
  Description of Artificial Sequence: Synthetic oligonucleotide
ugaagauacuguaggagaa

SEQ ID NO: 1824659 - RNA, 19 nt, Artificial Sequence
  Description of Artificial Sequence: Synthetic oligonucleotide
accacuuauuguucagacc

SEQ ID NO: 1824660 - RNA, 19 nt, Artificial Sequence
  Description of Artificial Sequence: Synthetic oligonucleotide
cuuuuaggaaggcugggcc

SEQ ID NO: 1824661 - RNA, 19 nt, Artificial Sequence
  Description of Artificial Sequence: Synthetic oligonucleotide
ugagagacggcccuuuuac

SEQ ID NO: 1824662 - RNA, 19 nt, Artificial Sequence
  Description of Artificial Sequence: Synthetic oligonucleotide
auucuuauuuaauggccag

SEQ ID NO: 1824663 - RNA, 19 nt, Artificial Sequence
  Description of Artificial Sequence: Synthetic oligonucleotide
auccuagaagcccagagcu

SEQ ID NO: 1824664 - RNA, 19 nt, Artificial Sequence
  Description of Artificial Sequence: Synthetic oligonucleotide
acccucucaacuuggaagg

SEQ ID NO: 1824665 - RNA, 19 nt, Artificial Sequence
  Description of Artificial Sequence: Synthetic oligonucleotide
acugguacaaagacaaggg

SEQ ID NO: 1824666 - RNA, 19 nt, Artificial Sequence
  Description of Artificial Sequence: Synthetic oligonucleotide
caauacaggaggaaucgag

SEQ ID NO: 1824667 - RNA, 19 nt, Artificial Sequence
  Description of Artificial Sequence: Synthetic oligonucleotide
uagaugaaaucauagcgau

SEQ ID NO: 1824668 - RNA, 19 nt, Artificial Sequence
  Description of Artificial Sequence: Synthetic oligonucleotide
gaagguucugggccaaugg

SEQ ID NO: 1824669 - RNA, 19 nt, Artificial Sequence
  Description of Artificial Sequence: Synthetic oligonucleotide
guagcuuuuaggaaggcug

SEQ ID NO: 1824670 - RNA, 19 nt, Artificial Sequence
  Description of Artificial Sequence: Synthetic oligonucleotide
gaaaggagaagccuuccac

SEQ ID NO: 1824671 - RNA, 19 nt, Artificial Sequence
  Description of Artificial Sequence: Synthetic oligonucleotide
uguaaagugcuguagcuuu

SEQ ID NO: 1824672 - RNA, 19 nt, Artificial Sequence
  Description of Artificial Sequence: Synthetic oligonucleotide
cuagaugaaaucauagcga

SEQ ID NO: 1824673 - RNA, 19 nt, Artificial Sequence
  Description of Artificial Sequence: Synthetic oligonucleotide
cuauuauuguagucuagac

SEQ ID NO: 1824674 - RNA, 19 nt, Artificial Sequence
  Description of Artificial Sequence: Synthetic oligonucleotide
aacacugagagacggcccu

SEQ ID NO: 1824675 - RNA, 19 nt, Artificial Sequence
  Description of Artificial Sequence: Synthetic oligonucleotide
uacgacugaagguucuggg

SEQ ID NO: 1824676 - RNA, 19 nt, Artificial Sequence
  Description of Artificial Sequence: Synthetic oligonucleotide
aguuacucaccacugggug

SEQ ID NO: 1824677 - RNA, 19 nt, Artificial Sequence
  Description of Artificial Sequence: Synthetic oligonucleotide
ccuuaacugacccugaagg

SEQ ID NO: 1824678 - RNA, 19 nt, Artificial Sequence
  Description of Artificial Sequence: Synthetic oligonucleotide
ccaguuaacacugagagac

SEQ ID NO: 1824679 - RNA, 19 nt, Artificial Sequence
  Description of Artificial Sequence: Synthetic oligonucleotide
agggaguuuagacagaaua

SEQ ID NO: 1824680 - RNA, 19 nt, Artificial Sequence
  Description of Artificial Sequence: Synthetic oligonucleotide
uguucagaccaaccaauac

SEQ ID NO: 1824681 - RNA, 19 nt, Artificial Sequence
  Description of Artificial Sequence: Synthetic oligonucleotide
cuguccacuuucaaguggg

SEQ ID NO: 1824682 - RNA, 19 nt, Artificial Sequence
  Description of Artificial Sequence: Synthetic oligonucleotide
guuacucaccacugggugg

SEQ ID NO: 1824683 - RNA, 19 nt, Artificial Sequence
  Description of Artificial Sequence: Synthetic oligonucleotide
agccccgugaguuacucac

SEQ ID NO: 1824684 - RNA, 19 nt, Artificial Sequence
  Description of Artificial Sequence: Synthetic oligonucleotide
ucacacuucauagaggauc

SEQ ID NO: 1824685 - RNA, 19 nt, Artificial Sequence
  Description of Artificial Sequence: Synthetic oligonucleotide
acuauuauuguagucuaga

SEQ ID NO: 1824686 - RNA, 19 nt, Artificial Sequence
  Description of Artificial Sequence: Synthetic oligonucleotide
agacaagggaguuuagaca

SEQ ID NO: 1824687 - RNA, 19 nt, Artificial Sequence
  Description of Artificial Sequence: Synthetic oligonucleotide
uuuauucaggguuguggca

SEQ ID NO: 1824688 - RNA, 19 nt, Artificial Sequence
  Description of Artificial Sequence: Synthetic oligonucleotide
uagggguaagggaagugag

SEQ ID NO: 1824689 - RNA, 19 nt, Artificial Sequence
  Description of Artificial Sequence: Synthetic oligonucleotide
uuauucaggguuguggcac

SEQ ID NO: 1824690 - RNA, 19 nt, Artificial Sequence
  Description of Artificial Sequence: Synthetic oligonucleotide
uaacugacccugaaggggu

SEQ ID NO: 1824691 - RNA, 19 nt, Artificial Sequence
  Description of Artificial Sequence: Synthetic oligonucleotide
guaacuaggaaccaggcau

SEQ ID NO: 1824692 - RNA, 19 nt, Artificial Sequence
  Description of Artificial Sequence: Synthetic oligonucleotide
gccaucucuaaauagaaac

SEQ ID NO: 1824693 - RNA, 19 nt, Artificial Sequence
  Description of Artificial Sequence: Synthetic oligonucleotide
ucuauccaauacaggagga

SEQ ID NO: 1824694 - RNA, 19 nt, Artificial Sequence
  Description of Artificial Sequence: Synthetic oligonucleotide
acggcugaaaugcucugac

SEQ ID NO: 1824695 - RNA, 19 nt, Artificial Sequence
  Description of Artificial Sequence: Synthetic oligonucleotide
acuuauuguucagaccaac

SEQ ID NO: 1824696 - RNA, 19 nt, Artificial Sequence
  Description of Artificial Sequence: Synthetic oligonucleotide
uuuuacgacugaagguucu

SEQ ID NO: 1824697 - RNA, 19 nt, Artificial Sequence
  Description of Artificial Sequence: Synthetic oligonucleotide
aguaacuaggaaccaggca

SEQ ID NO: 1824698 - RNA, 19 nt, Artificial Sequence
  Description of Artificial Sequence: Synthetic oligonucleotide
aguuuagacagaauaugug

SEQ ID NO: 1824699 - RNA, 19 nt, Artificial Sequence
  Description of Artificial Sequence: Synthetic oligonucleotide
ggggugaagauacuguagg

SEQ ID NO: 1824700 - RNA, 19 nt, Artificial Sequence
  Description of Artificial Sequence: Synthetic oligonucleotide
ugacccuuaccaaggagcu

SEQ ID NO: 1824701 - RNA, 19 nt, Artificial Sequence
  Description of Artificial Sequence: Synthetic oligonucleotide
gguacaggcuuccacagcc

SEQ ID NO: 1824702 - RNA, 19 nt, Artificial Sequence
  Description of Artificial Sequence: Synthetic oligonucleotide
agagacggcccuuuuacga

SEQ ID NO: 1824703 - RNA, 19 nt, Artificial Sequence
  Description of Artificial Sequence: Synthetic oligonucleotide
gaggaaucgagguagcaaa

SEQ ID NO: 1824704 - RNA, 19 nt, Artificial Sequence
  Description of Artificial Sequence: Synthetic oligonucleotide
gaagauacuguaggagaag

SEQ ID NO: 1824705 - RNA, 19 nt, Artificial Sequence
  Description of Artificial Sequence: Synthetic oligonucleotide
agacucugcuuguaaagug

SEQ ID NO: 1824706 - RNA, 19 nt, Artificial Sequence
  Description of Artificial Sequence: Synthetic oligonucleotide
uuagacagaauaugugguu

SEQ ID NO: 1824707 - RNA, 19 nt, Artificial Sequence
  Description of Artificial Sequence: Synthetic oligonucleotide
gaaccaggcauuccugacc

SEQ ID NO: 1824708 - RNA, 19 nt, Artificial Sequence
  Description of Artificial Sequence: Synthetic oligonucleotide
acgaacuccucauagcuau

SEQ ID NO: 1824709 - RNA, 19 nt, Artificial Sequence
  Description of Artificial Sequence: Synthetic oligonucleotide
ucaggcaaguaacuaggaa

SEQ ID NO: 1824710 - RNA, 19 nt, Artificial Sequence
  Description of Artificial Sequence: Synthetic oligonucleotide
gaaguggcugggguaaacg

SEQ ID NO: 1824711 - RNA, 19 nt, Artificial Sequence
  Description of Artificial Sequence: Synthetic oligonucleotide
uuacgacugaagguucugg

SEQ ID NO: 1824712 - RNA, 19 nt, Artificial Sequence
  Description of Artificial Sequence: Synthetic oligonucleotide
uagcgaucaguccagcccu

SEQ ID NO: 1824713 - RNA, 19 nt, Artificial Sequence
  Description of Artificial Sequence: Synthetic oligonucleotide
uaacacugagagacggccc

SEQ ID NO: 1824714 - RNA, 19 nt, Artificial Sequence
  Description of Artificial Sequence: Synthetic oligonucleotide
aacuauuauuguagucuag

SEQ ID NO: 1824715 - RNA, 19 nt, Artificial Sequence
  Description of Artificial Sequence: Synthetic oligonucleotide
ccauucuuauuuaauggcc

SEQ ID NO: 1824716 - RNA, 19 nt, Artificial Sequence
  Description of Artificial Sequence: Synthetic oligonucleotide
ggugacgaacuccucauag

SEQ ID NO: 1824717 - RNA, 19 nt, Artificial Sequence
  Description of Artificial Sequence: Synthetic oligonucleotide
uauccaauacaggaggaau

SEQ ID NO: 1824718 - RNA, 19 nt, Artificial Sequence
  Description of Artificial Sequence: Synthetic oligonucleotide
uuuugacccuuaccaagga

SEQ ID NO: 1824719 - RNA, 19 nt, Artificial Sequence
  Description of Artificial Sequence: Synthetic oligonucleotide
auccaauacaggaggaauc

SEQ ID NO: 1824720 - RNA, 19 nt, Artificial Sequence
  Description of Artificial Sequence: Synthetic oligonucleotide
guagucuagacuauuuaca

SEQ ID NO: 1824721 - RNA, 19 nt, Artificial Sequence
  Description of Artificial Sequence: Synthetic oligonucleotide
aaggaaguucccacuuggg

SEQ ID NO: 1824722 - RNA, 19 nt, Artificial Sequence
  Description of Artificial Sequence: Synthetic oligonucleotide
gcccuuuuacgacugaagg

SEQ ID NO: 1824723 - RNA, 19 nt, Artificial Sequence
  Description of Artificial Sequence: Synthetic oligonucleotide
caucucuaaauagaaacca

SEQ ID NO: 1824724 - RNA, 19 nt, Artificial Sequence
  Description of Artificial Sequence: Synthetic oligonucleotide
ggaguuuagacagaauaug

SEQ ID NO: 1824725 - RNA, 19 nt, Artificial Sequence
  Description of Artificial Sequence: Synthetic oligonucleotide
gagagacggcccuuuuacg

SEQ ID NO: 1824726 - RNA, 19 nt, Artificial Sequence
  Description of Artificial Sequence: Synthetic oligonucleotide
auauguccugccaugcuuc

SEQ ID NO: 1824727 - RNA, 19 nt, Artificial Sequence
  Description of Artificial Sequence: Synthetic oligonucleotide
uuauuguagucuagacuau

SEQ ID NO: 1824728 - RNA, 19 nt, Artificial Sequence
  Description of Artificial Sequence: Synthetic oligonucleotide
aauggaagcuacaccuuga

SEQ ID NO: 1824729 - RNA, 19 nt, Artificial Sequence
  Description of Artificial Sequence: Synthetic oligonucleotide
aaacggcugaaaugcucug

SEQ ID NO: 1824730 - RNA, 19 nt, Artificial Sequence
  Description of Artificial Sequence: Synthetic oligonucleotide
acuaggaaccaggcauucc

SEQ ID NO: 1824731 - RNA, 19 nt, Artificial Sequence
  Description of Artificial Sequence: Synthetic oligonucleotide
cuuuuacgacugaagguuc

SEQ ID NO: 1824732 - RNA, 19 nt, Artificial Sequence
  Description of Artificial Sequence: Synthetic oligonucleotide
auuuacaaaccuucacauu

SEQ ID NO: 1824733 - RNA, 19 nt, Artificial Sequence
  Description of Artificial Sequence: Synthetic oligonucleotide
ggguacagccccuacagcc

SEQ ID NO: 1824734 - RNA, 19 nt, Artificial Sequence
  Description of Artificial Sequence: Synthetic oligonucleotide
cauagcgaucaguccagcc

SEQ ID NO: 1824735 - RNA, 19 nt, Artificial Sequence
  Description of Artificial Sequence: Synthetic oligonucleotide
agauacuguaggagaaggg

SEQ ID NO: 1824736 - RNA, 19 nt, Artificial Sequence
  Description of Artificial Sequence: Synthetic oligonucleotide
uguagcuuuuaggaaggcu

SEQ ID NO: 1824737 - RNA, 19 nt, Artificial Sequence
  Description of Artificial Sequence: Synthetic oligonucleotide
cccauucuuauuuaauggc

SEQ ID NO: 1824738 - RNA, 19 nt, Artificial Sequence
  Description of Artificial Sequence: Synthetic oligonucleotide
uauucaggguuguggcacc

SEQ ID NO: 1824739 - RNA, 19 nt, Artificial Sequence
  Description of Artificial Sequence: Synthetic oligonucleotide
agccuggacuccugaaugg

SEQ ID NO: 1824740 - RNA, 19 nt, Artificial Sequence
  Description of Artificial Sequence: Synthetic oligonucleotide
ccacuuauuguucagacca

SEQ ID NO: 1824741 - RNA, 19 nt, Artificial Sequence
  Description of Artificial Sequence: Synthetic oligonucleotide
guaaacgggcugcuaauuc

SEQ ID NO: 1824742 - RNA, 19 nt, Artificial Sequence
  Description of Artificial Sequence: Synthetic oligonucleotide
agugggugcuugugucugc

SEQ ID NO: 1824743 - RNA, 19 nt, Artificial Sequence
  Description of Artificial Sequence: Synthetic oligonucleotide
agucuagacuauuuacaaa

SEQ ID NO: 1824744 - RNA, 19 nt, Artificial Sequence
  Description of Artificial Sequence: Synthetic oligonucleotide
cacacuucauagaggauca

SEQ ID NO: 1824745 - RNA, 19 nt, Artificial Sequence
  Description of Artificial Sequence: Synthetic oligonucleotide
uuuacgacugaagguucug

SEQ ID NO: 1824746 - RNA, 19 nt, Artificial Sequence
  Description of Artificial Sequence: Synthetic oligonucleotide
augaaaucauagcgaucag

SEQ ID NO: 1824747 - RNA, 19 nt, Artificial Sequence
  Description of Artificial Sequence: Synthetic oligonucleotide
ucgagguagcaaacggcug

SEQ ID NO: 1824748 - RNA, 19 nt, Artificial Sequence
  Description of Artificial Sequence: Synthetic oligonucleotide
uucuuauuuaauggccagu

SEQ ID NO: 1824749 - RNA, 19 nt, Artificial Sequence
  Description of Artificial Sequence: Synthetic oligonucleotide
cucaccacugggugguagg

SEQ ID NO: 1824750 - RNA, 19 nt, Artificial Sequence
  Description of Artificial Sequence: Synthetic oligonucleotide
ggucaggcaaguaacuagg

SEQ ID NO: 1824751 - RNA, 19 nt, Artificial Sequence
  Description of Artificial Sequence: Synthetic oligonucleotide
uaacuaggaaccaggcauu

SEQ ID NO: 1824752 - RNA, 19 nt, Artificial Sequence
  Description of Artificial Sequence: Synthetic oligonucleotide
ugaauggaagcuacaccuu

SEQ ID NO: 1824753 - RNA, 19 nt, Artificial Sequence
  Description of Artificial Sequence: Synthetic oligonucleotide
gagacggcccuuuuacgac

SEQ ID NO: 1824754 - RNA, 19 nt, Artificial Sequence
  Description of Artificial Sequence: Synthetic oligonucleotide
aucgagguagcaaacggcu

SEQ ID NO: 1824755 - RNA, 19 nt, Artificial Sequence
  Description of Artificial Sequence: Synthetic oligonucleotide
ugugucugccaugccacag

SEQ ID NO: 1824756 - RNA, 19 nt, Artificial Sequence
  Description of Artificial Sequence: Synthetic oligonucleotide
acuuucaagugggaacaag

SEQ ID NO: 1824757 - RNA, 19 nt, Artificial Sequence
  Description of Artificial Sequence: Synthetic oligonucleotide
gaguuuagacagaauaugu

SEQ ID NO: 1824758 - RNA, 19 nt, Artificial Sequence
  Description of Artificial Sequence: Synthetic oligonucleotide
cagguacaggcuuccacag

SEQ ID NO: 1824759 - RNA, 19 nt, Artificial Sequence
  Description of Artificial Sequence: Synthetic oligonucleotide
aggggugacgaacuccuca

SEQ ID NO: 1824760 - RNA, 19 nt, Artificial Sequence
  Description of Artificial Sequence: Synthetic oligonucleotide
aucauagcgaucaguccag

SEQ ID NO: 1824761 - RNA, 19 nt, Artificial Sequence
  Description of Artificial Sequence: Synthetic oligonucleotide
agccccuacagcccagggg

SEQ ID NO: 1824762 - RNA, 19 nt, Artificial Sequence
  Description of Artificial Sequence: Synthetic oligonucleotide
gaagcuacaccuugagccu

SEQ ID NO: 1824763 - RNA, 19 nt, Artificial Sequence
  Description of Artificial Sequence: Synthetic oligonucleotide
agaccaaccaauaccaguu

SEQ ID NO: 1824764 - RNA, 19 nt, Artificial Sequence
  Description of Artificial Sequence: Synthetic oligonucleotide
aggaaucgagguagcaaac

SEQ ID NO: 1824765 - RNA, 19 nt, Artificial Sequence
  Description of Artificial Sequence: Synthetic oligonucleotide
ugaccagcauauguccugc

SEQ ID NO: 1824766 - RNA, 19 nt, Artificial Sequence
  Description of Artificial Sequence: Synthetic oligonucleotide
accagcauauguccugcca

SEQ ID NO: 1824767 - RNA, 19 nt, Artificial Sequence
  Description of Artificial Sequence: Synthetic oligonucleotide
ucugacuagguagggguaa

SEQ ID NO: 1824768 - RNA, 19 nt, Artificial Sequence
  Description of Artificial Sequence: Synthetic oligonucleotide
ggaacaagcggcaggcagg

SEQ ID NO: 1824769 - RNA, 19 nt, Artificial Sequence
  Description of Artificial Sequence: Synthetic oligonucleotide
cuagacuauuuacaaaccu

SEQ ID NO: 1824770 - RNA, 19 nt, Artificial Sequence
  Description of Artificial Sequence: Synthetic oligonucleotide
guuaacacugagagacggc

SEQ ID NO: 1824771 - RNA, 19 nt, Artificial Sequence
  Description of Artificial Sequence: Synthetic oligonucleotide
cacagguacaggcuuccac

SEQ ID NO: 1824772 - RNA, 19 nt, Artificial Sequence
  Description of Artificial Sequence: Synthetic oligonucleotide
uuguaaagugcuguagcuu

SEQ ID NO: 1824773 - RNA, 19 nt, Artificial Sequence
  Description of Artificial Sequence: Synthetic oligonucleotide
caacuauuauuguagucua

SEQ ID NO: 1824774 - RNA, 19 nt, Artificial Sequence
  Description of Artificial Sequence: Synthetic oligonucleotide
aacggcugaaaugcucuga

SEQ ID NO: 1824775 - RNA, 19 nt, Artificial Sequence
  Description of Artificial Sequence: Synthetic oligonucleotide
cagcauauguccugccaug

SEQ ID NO: 1824776 - RNA, 19 nt, Artificial Sequence
  Description of Artificial Sequence: Synthetic oligonucleotide
uauuguagucuagacuauu

SEQ ID NO: 1824777 - RNA, 19 nt, Artificial Sequence
  Description of Artificial Sequence: Synthetic oligonucleotide
ggaugggugggacugguac

SEQ ID NO: 1824778 - RNA, 19 nt, Artificial Sequence
  Description of Artificial Sequence: Synthetic oligonucleotide
agccaccaaccacuuauug

SEQ ID NO: 1824779 - RNA, 19 nt, Artificial Sequence
  Description of Artificial Sequence: Synthetic oligonucleotide
uggcacuauccccagucuc

SEQ ID NO: 1824780 - RNA, 19 nt, Artificial Sequence
  Description of Artificial Sequence: Synthetic oligonucleotide
aguaaacuguccacuuuca

SEQ ID NO: 1824781 - RNA, 19 nt, Artificial Sequence
  Description of Artificial Sequence: Synthetic oligonucleotide
cuuauuuaauggccaguaa

SEQ ID NO: 1824782 - RNA, 19 nt, Artificial Sequence
  Description of Artificial Sequence: Synthetic oligonucleotide
uucccuuaacugacccuga

SEQ ID NO: 1824783 - RNA, 19 nt, Artificial Sequence
  Description of Artificial Sequence: Synthetic oligonucleotide
auuguagucuagacuauuu

SEQ ID NO: 1824784 - RNA, 19 nt, Artificial Sequence
  Description of Artificial Sequence: Synthetic oligonucleotide
gcaaguaacuaggaaccag

SEQ ID NO: 1824785 - RNA, 19 nt, Artificial Sequence
  Description of Artificial Sequence: Synthetic oligonucleotide
gggucuacaaauaauuuua

SEQ ID NO: 1824786 - RNA, 19 nt, Artificial Sequence
  Description of Artificial Sequence: Synthetic oligonucleotide
ccaaccaauaccaguuaac

SEQ ID NO: 1824787 - RNA, 19 nt, Artificial Sequence
  Description of Artificial Sequence: Synthetic oligonucleotide
ugauccccauucuuauuua

SEQ ID NO: 1824788 - RNA, 19 nt, Artificial Sequence
  Description of Artificial Sequence: Synthetic oligonucleotide
caaacggcugaaaugcucu

SEQ ID NO: 1824789 - RNA, 19 nt, Artificial Sequence
  Description of Artificial Sequence: Synthetic oligonucleotide
gauccccauucuuauuuaa

SEQ ID NO: 1824790 - RNA, 19 nt, Artificial Sequence
  Description of Artificial Sequence: Synthetic oligonucleotide
ccucauagcuauuggcacc

SEQ ID NO: 1824791 - RNA, 19 nt, Artificial Sequence
  Description of Artificial Sequence: Synthetic oligonucleotide
ggaaggaaguucccacuug

SEQ ID NO: 1824792 - RNA, 19 nt, Artificial Sequence
  Description of Artificial Sequence: Synthetic oligonucleotide
ggggcaacuagaugaaauc

SEQ ID NO: 1824793 - RNA, 19 nt, Artificial Sequence
  Description of Artificial Sequence: Synthetic oligonucleotide
agaagccuuccacacugau

SEQ ID NO: 1824794 - RNA, 19 nt, Artificial Sequence
  Description of Artificial Sequence: Synthetic oligonucleotide
uaggcaagcuuggaagaaa

SEQ ID NO: 1824795 - RNA, 19 nt, Artificial Sequence
  Description of Artificial Sequence: Synthetic oligonucleotide
auuacuccuuuuauguauu

SEQ ID NO: 1824796 - RNA, 19 nt, Artificial Sequence
  Description of Artificial Sequence: Synthetic oligonucleotide
agacggcccuuuuacgacu

SEQ ID NO: 1824797 - RNA, 19 nt, Artificial Sequence
  Description of Artificial Sequence: Synthetic oligonucleotide
cugcacccucucaacuugg

SEQ ID NO: 1824798 - RNA, 19 nt, Artificial Sequence
  Description of Artificial Sequence: Synthetic oligonucleotide
gugguaggcagcccucccc

SEQ ID NO: 1824799 - RNA, 19 nt, Artificial Sequence
  Description of Artificial Sequence: Synthetic oligonucleotide
uccuagaagcccagagcuu

SEQ ID NO: 1824800 - RNA, 19 nt, Artificial Sequence
  Description of Artificial Sequence: Synthetic oligonucleotide
aagccauuucccacauccu

SEQ ID NO: 1824801 - RNA, 19 nt, Artificial Sequence
  Description of Artificial Sequence: Synthetic oligonucleotide
ucauagcgaucaguccagc

SEQ ID NO: 1824802 - RNA, 19 nt, Artificial Sequence
  Description of Artificial Sequence: Synthetic oligonucleotide
cacugggugguaggcagcc

SEQ ID NO: 1824803 - RNA, 19 nt, Artificial Sequence
  Description of Artificial Sequence: Synthetic oligonucleotide
cagaccaaccaauaccagu

SEQ ID NO: 1824804 - RNA, 19 nt, Artificial Sequence
  Description of Artificial Sequence: Synthetic oligonucleotide
acugggugguaggcagccc

SEQ ID NO: 1824805 - RNA, 19 nt, Artificial Sequence
  Description of Artificial Sequence: Synthetic oligonucleotide
caggcucacacuucauaga

SEQ ID NO: 1824806 - RNA, 19 nt, Artificial Sequence
  Description of Artificial Sequence: Synthetic oligonucleotide
augcucugacuagguaggg

SEQ ID NO: 1824807 - RNA, 19 nt, Artificial Sequence
  Description of Artificial Sequence: Synthetic oligonucleotide
aaggggugacgaacuccuc

SEQ ID NO: 1824808 - RNA, 19 nt, Artificial Sequence
  Description of Artificial Sequence: Synthetic oligonucleotide
acccugaaggggugaagau

SEQ ID NO: 1824809 - RNA, 19 nt, Artificial Sequence
  Description of Artificial Sequence: Synthetic oligonucleotide
gggcaacuagaugaaauca

SEQ ID NO: 1824810 - RNA, 19 nt, Artificial Sequence
  Description of Artificial Sequence: Synthetic oligonucleotide
cuauccaauacaggaggaa

SEQ ID NO: 1824811 - RNA, 19 nt, Artificial Sequence
  Description of Artificial Sequence: Synthetic oligonucleotide
acucaccacugggugguag

SEQ ID NO: 1824812 - RNA, 19 nt, Artificial Sequence
  Description of Artificial Sequence: Synthetic oligonucleotide
cgugaguuacucaccacug

SEQ ID NO: 1824813 - RNA, 19 nt, Artificial Sequence
  Description of Artificial Sequence: Synthetic oligonucleotide
gacggcccuuuuacgacug

SEQ ID NO: 1824814 - RNA, 19 nt, Artificial Sequence
  Description of Artificial Sequence: Synthetic oligonucleotide
ggcccuuuuacgacugaag

SEQ ID NO: 1824815 - RNA, 19 nt, Artificial Sequence
  Description of Artificial Sequence: Synthetic oligonucleotide
ccagucucuauccaauaca

SEQ ID NO: 1824816 - RNA, 19 nt, Artificial Sequence
  Description of Artificial Sequence: Synthetic oligonucleotide
cugauccccauucuuauuu

SEQ ID NO: 1824817 - RNA, 19 nt, Artificial Sequence
  Description of Artificial Sequence: Synthetic oligonucleotide
agcccugggugaaaggaga

SEQ ID NO: 1824818 - RNA, 19 nt, Artificial Sequence
  Description of Artificial Sequence: Synthetic oligonucleotide
gaguuacucaccacugggu

SEQ ID NO: 1824819 - RNA, 19 nt, Artificial Sequence
  Description of Artificial Sequence: Synthetic oligonucleotide
acccuccccaagccauuuc

SEQ ID NO: 1824820 - RNA, 19 nt, Artificial Sequence
  Description of Artificial Sequence: Synthetic oligonucleotide
cuguagcuuuuaggaaggc

SEQ ID NO: 1824821 - RNA, 19 nt, Artificial Sequence
  Description of Artificial Sequence: Synthetic oligonucleotide
aagggaguuuagacagaau

SEQ ID NO: 1824822 - RNA, 19 nt, Artificial Sequence
  Description of Artificial Sequence: Synthetic oligonucleotide
cccuuaacugacccugaag

SEQ ID NO: 1824823 - RNA, 19 nt, Artificial Sequence
  Description of Artificial Sequence: Synthetic oligonucleotide
ccucucaacuuggaagggg

SEQ ID NO: 1824824 - RNA, 19 nt, Artificial Sequence
  Description of Artificial Sequence: Synthetic oligonucleotide
aaguucccacuuggguaca

SEQ ID NO: 1824825 - RNA, 19 nt, Artificial Sequence
  Description of Artificial Sequence: Synthetic oligonucleotide
gcaacuagaugaaaucaua

SEQ ID NO: 1824826 - RNA, 19 nt, Artificial Sequence
  Description of Artificial Sequence: Synthetic oligonucleotide
gucaggcaaguaacuagga

SEQ ID NO: 1824827 - RNA, 19 nt, Artificial Sequence
  Description of Artificial Sequence: Synthetic oligonucleotide
cuaggcaagcuuggaagaa

SEQ ID NO: 1824828 - RNA, 19 nt, Artificial Sequence
  Description of Artificial Sequence: Synthetic oligonucleotide
gguagggguaagggaagug

SEQ ID NO: 1824829 - RNA, 19 nt, Artificial Sequence
  Description of Artificial Sequence: Synthetic oligonucleotide
ccuaggcaagcuuggaaga

SEQ ID NO: 1824830 - RNA, 19 nt, Artificial Sequence
  Description of Artificial Sequence: Synthetic oligonucleotide
gcaaacggcugaaaugcuc

SEQ ID NO: 1824831 - RNA, 19 nt, Artificial Sequence
  Description of Artificial Sequence: Synthetic oligonucleotide
cucugucccaacuauuauu

SEQ ID NO: 1824832 - RNA, 19 nt, Artificial Sequence
  Description of Artificial Sequence: Synthetic oligonucleotide
acugacccugaagggguga

SEQ ID NO: 1824833 - RNA, 19 nt, Artificial Sequence
  Description of Artificial Sequence: Synthetic oligonucleotide
cagccccuacagcccaggg

SEQ ID NO: 1824834 - RNA, 19 nt, Artificial Sequence
  Description of Artificial Sequence: Synthetic oligonucleotide
gggaguuuagacagaauau

SEQ ID NO: 1824835 - RNA, 19 nt, Artificial Sequence
  Description of Artificial Sequence: Synthetic oligonucleotide
cucugacuagguaggggua

SEQ ID NO: 1824836 - RNA, 19 nt, Artificial Sequence
  Description of Artificial Sequence: Synthetic oligonucleotide
cuggaagaaggcagacucu

SEQ ID NO: 1824837 - RNA, 19 nt, Artificial Sequence
  Description of Artificial Sequence: Synthetic oligonucleotide
cugagagacggcccuuuua

SEQ ID NO: 1824838 - RNA, 19 nt, Artificial Sequence
  Description of Artificial Sequence: Synthetic oligonucleotide
ggcaaguaacuaggaacca

SEQ ID NO: 1824839 - RNA, 19 nt, Artificial Sequence
  Description of Artificial Sequence: Synthetic oligonucleotide
caccagccccgugaguuac

SEQ ID NO: 1824840 - RNA, 19 nt, Artificial Sequence
  Description of Artificial Sequence: Synthetic oligonucleotide
ggacugguacaaagacaag

SEQ ID NO: 1824841 - RNA, 19 nt, Artificial Sequence
  Description of Artificial Sequence: Synthetic oligonucleotide
guacaaagacaagggaguu

SEQ ID NO: 1824842 - RNA, 19 nt, Artificial Sequence
  Description of Artificial Sequence: Synthetic oligonucleotide
ggcaacuagaugaaaucau

SEQ ID NO: 1824843 - RNA, 19 nt, Artificial Sequence
  Description of Artificial Sequence: Synthetic oligonucleotide
cgagguagcaaacggcuga

SEQ ID NO: 1824844 - RNA, 19 nt, Artificial Sequence
  Description of Artificial Sequence: Synthetic oligonucleotide
cugggccaauggaguuuag

SEQ ID NO: 1824845 - RNA, 19 nt, Artificial Sequence
  Description of Artificial Sequence: Synthetic oligonucleotide
ggcacuauccccagucucu

SEQ ID NO: 1824846 - RNA, 19 nt, Artificial Sequence
  Description of Artificial Sequence: Synthetic oligonucleotide
gggcccuaggcaagcuugg

SEQ ID NO: 1824847 - RNA, 19 nt, Artificial Sequence
  Description of Artificial Sequence: Synthetic oligonucleotide
agcgaucaguccagcccug

SEQ ID NO: 1824848 - RNA, 19 nt, Artificial Sequence
  Description of Artificial Sequence: Synthetic oligonucleotide
uggcaccagccccgugagu

SEQ ID NO: 1824849 - RNA, 19 nt, Artificial Sequence
  Description of Artificial Sequence: Synthetic oligonucleotide
acggcccuuuuacgacuga

SEQ ID NO: 1824850 - RNA, 19 nt, Artificial Sequence
  Description of Artificial Sequence: Synthetic oligonucleotide
cccuuuuacgacugaaggu

SEQ ID NO: 1824851 - RNA, 19 nt, Artificial Sequence
  Description of Artificial Sequence: Synthetic oligonucleotide
gcgaucaguccagcccugg

SEQ ID NO: 1824852 - RNA, 19 nt, Artificial Sequence
  Description of Artificial Sequence: Synthetic oligonucleotide
cugucccaacuauuauugu

SEQ ID NO: 1824853 - RNA, 19 nt, Artificial Sequence
  Description of Artificial Sequence: Synthetic oligonucleotide
cgaucaguccagcccuggg

SEQ ID NO: 1824854 - RNA, 19 nt, Artificial Sequence
  Description of Artificial Sequence: Synthetic oligonucleotide
agcggcaggcagguaggaa

SEQ ID NO: 1824855 - RNA, 19 nt, Artificial Sequence
  Description of Artificial Sequence: Synthetic oligonucleotide
cccucucaacuuggaaggg

SEQ ID NO: 1824856 - RNA, 19 nt, Artificial Sequence
  Description of Artificial Sequence: Synthetic oligonucleotide
ccgugaguuacucaccacu

SEQ ID NO: 1824857 - RNA, 19 nt, Artificial Sequence
  Description of Artificial Sequence: Synthetic oligonucleotide
cacauccuagaagcccaga

SEQ ID NO: 1824858 - RNA, 19 nt, Artificial Sequence
  Description of Artificial Sequence: Synthetic oligonucleotide
ccaguacuuucccuuaacu

SEQ ID NO: 1824859 - RNA, 19 nt, Artificial Sequence
  Description of Artificial Sequence: Synthetic oligonucleotide
ggccaguaaacuguccacu

SEQ ID NO: 1824860 - RNA, 19 nt, Artificial Sequence
  Description of Artificial Sequence: Synthetic oligonucleotide
gcccuaggcaagcuuggaa

SEQ ID NO: 1824861 - RNA, 19 nt, Artificial Sequence
  Description of Artificial Sequence: Synthetic oligonucleotide
gccaguaaacuguccacuu

SEQ ID NO: 1824862 - RNA, 19 nt, Artificial Sequence
  Description of Artificial Sequence: Synthetic oligonucleotide
acacugagagacggcccuu

SEQ ID NO: 1824863 - RNA, 19 nt, Artificial Sequence
  Description of Artificial Sequence: Synthetic oligonucleotide
cucacacuucauagaggau

SEQ ID NO: 1824864 - RNA, 19 nt, Artificial Sequence
  Description of Artificial Sequence: Synthetic oligonucleotide
ccccgugaguuacucacca

SEQ ID NO: 1824865 - RNA, 19 nt, Artificial Sequence
  Description of Artificial Sequence: Synthetic oligonucleotide
ggguaaacgggcugcuaau

SEQ ID NO: 1824866 - RNA, 19 nt, Artificial Sequence
  Description of Artificial Sequence: Synthetic oligonucleotide
cccgugaguuacucaccac

SEQ ID NO: 1824867 - RNA, 19 nt, Artificial Sequence
  Description of Artificial Sequence: Synthetic oligonucleotide
ccuggacuccugaauggaa

SEQ ID NO: 1824868 - RNA, 19 nt, Artificial Sequence
  Description of Artificial Sequence: Synthetic oligonucleotide
cugacccugaaggggugaa

SEQ ID NO: 1824869 - RNA, 19 nt, Artificial Sequence
  Description of Artificial Sequence: Synthetic oligonucleotide
gggugcuugugucugccau

SEQ ID NO: 1824870 - RNA, 19 nt, Artificial Sequence
  Description of Artificial Sequence: Synthetic oligonucleotide
ccaauacaggaggaaucga

SEQ ID NO: 1824871 - RNA, 19 nt, Artificial Sequence
  Description of Artificial Sequence: Synthetic oligonucleotide
gcagugggugcuugugucu

SEQ ID NO: 1824872 - RNA, 19 nt, Artificial Sequence
  Description of Artificial Sequence: Synthetic oligonucleotide
ccagcauauguccugccau

SEQ ID NO: 1824873 - RNA, 19 nt, Artificial Sequence
  Description of Artificial Sequence: Synthetic oligonucleotide
cagccccgugaguuacuca

SEQ ID NO: 1824874 - RNA, 19 nt, Artificial Sequence
  Description of Artificial Sequence: Synthetic oligonucleotide
gguaaacgggcugcuaauu

SEQ ID NO: 1824875 - RNA, 19 nt, Artificial Sequence
  Description of Artificial Sequence: Synthetic oligonucleotide
accuugagccugggaguuu

SEQ ID NO: 1824876 - RNA, 19 nt, Artificial Sequence
  Description of Artificial Sequence: Synthetic oligonucleotide
gccccgugaguuacucacc

SEQ ID NO: 1824877 - RNA, 19 nt, Artificial Sequence
  Description of Artificial Sequence: Synthetic oligonucleotide
uacucaccacuggguggua

SEQ ID NO: 1824878 - RNA, 19 nt, Artificial Sequence
  Description of Artificial Sequence: Synthetic oligonucleotide
gggugacgaacuccucaua

SEQ ID NO: 1824879 - RNA, 19 nt, Artificial Sequence
  Description of Artificial Sequence: Synthetic oligonucleotide
guccugaccccggccugca

SEQ ID NO: 1824880 - RNA, 19 nt, Artificial Sequence
  Description of Artificial Sequence: Synthetic oligonucleotide
cuauuggcaccagccccgu

SEQ ID NO: 1824881 - RNA, 19 nt, Artificial Sequence
  Description of Artificial Sequence: Synthetic oligonucleotide
ccaauggaguuuaguuuau

SEQ ID NO: 1824882 - RNA, 19 nt, Artificial Sequence
  Description of Artificial Sequence: Synthetic oligonucleotide
caccuugagccugggaguu

SEQ ID NO: 1824883 - RNA, 19 nt, Artificial Sequence
  Description of Artificial Sequence: Synthetic oligonucleotide
ggcccuaggcaagcuugga

SEQ ID NO: 1824884 - RNA, 19 nt, Artificial Sequence
  Description of Artificial Sequence: Synthetic oligonucleotide
cccuuaccaaggagcucca

SEQ ID NO: 1824885 - RNA, 19 nt, Artificial Sequence
  Description of Artificial Sequence: Synthetic oligonucleotide
cacugagagacggcccuuu

SEQ ID NO: 1824886 - RNA, 19 nt, Artificial Sequence
  Description of Artificial Sequence: Synthetic oligonucleotide
cggcugaaaugcucugacu

SEQ ID NO: 1824887 - RNA, 19 nt, Artificial Sequence
  Description of Artificial Sequence: Synthetic oligonucleotide
cggcccuuuuacgacugaa

SEQ ID NO: 1824888 - RNA, 19 nt, Artificial Sequence
  Description of Artificial Sequence: Synthetic oligonucleotide
uguauuuucuaaaagcucg

SEQ ID NO: 1824889 - RNA, 19 nt, Artificial Sequence
  Description of Artificial Sequence: Synthetic oligonucleotide
aauccaugaaguuggauac

SEQ ID NO: 1824890 - RNA, 19 nt, Artificial Sequence
  Description of Artificial Sequence: Synthetic oligonucleotide
uaaacaaucuguaguaucg

SEQ ID NO: 1824891 - RNA, 19 nt, Artificial Sequence
  Description of Artificial Sequence: Synthetic oligonucleotide
aaugauaaacuccagcuug

SEQ ID NO: 1824892 - RNA, 19 nt, Artificial Sequence
  Description of Artificial Sequence: Synthetic oligonucleotide
aaucuuuucccauuguagg

SEQ ID NO: 1824893 - RNA, 19 nt, Artificial Sequence
  Description of Artificial Sequence: Synthetic oligonucleotide
uguaaaauugaguugacga

SEQ ID NO: 1824894 - RNA, 19 nt, Artificial Sequence
  Description of Artificial Sequence: Synthetic oligonucleotide
uaauuuugacuuaagauca

SEQ ID NO: 1824895 - RNA, 19 nt, Artificial Sequence
  Description of Artificial Sequence: Synthetic oligonucleotide
aaaauaugaacacagggau

SEQ ID NO: 1824896 - RNA, 19 nt, Artificial Sequence
  Description of Artificial Sequence: Synthetic oligonucleotide
uuuacuaaaacaauaucgu

SEQ ID NO: 1824897 - RNA, 19 nt, Artificial Sequence
  Description of Artificial Sequence: Synthetic oligonucleotide
uaguauaccacucuaaucu

SEQ ID NO: 1824898 - RNA, 19 nt, Artificial Sequence
  Description of Artificial Sequence: Synthetic oligonucleotide
auuaguucuccuuugaauc

SEQ ID NO: 1824899 - RNA, 19 nt, Artificial Sequence
  Description of Artificial Sequence: Synthetic oligonucleotide
aaguuuuccaaagaaauuc

SEQ ID NO: 1824900 - RNA, 19 nt, Artificial Sequence
  Description of Artificial Sequence: Synthetic oligonucleotide
aacaauaucguaagagucc

SEQ ID NO: 1824901 - RNA, 19 nt, Artificial Sequence
  Description of Artificial Sequence: Synthetic oligonucleotide
uguauuaauaaguaagagu

SEQ ID NO: 1824902 - RNA, 19 nt, Artificial Sequence
  Description of Artificial Sequence: Synthetic oligonucleotide
guauuaauaaguaagaguc

SEQ ID NO: 1824903 - RNA, 19 nt, Artificial Sequence
  Description of Artificial Sequence: Synthetic oligonucleotide
caaagaaauucucauaucc

SEQ ID NO: 1824904 - RNA, 19 nt, Artificial Sequence
  Description of Artificial Sequence: Synthetic oligonucleotide
uuuaauugcuuaaacaauc

SEQ ID NO: 1824905 - RNA, 19 nt, Artificial Sequence
  Description of Artificial Sequence: Synthetic oligonucleotide
acguauaauuucuucaagc

SEQ ID NO: 1824906 - RNA, 19 nt, Artificial Sequence
  Description of Artificial Sequence: Synthetic oligonucleotide
uauguauuaauaaguaaga

SEQ ID NO: 1824907 - RNA, 19 nt, Artificial Sequence
  Description of Artificial Sequence: Synthetic oligonucleotide
ucuaauuuugacuuaagau

SEQ ID NO: 1824908 - RNA, 19 nt, Artificial Sequence
  Description of Artificial Sequence: Synthetic oligonucleotide
aauugaguugacgaccucc

SEQ ID NO: 1824909 - RNA, 19 nt, Artificial Sequence
  Description of Artificial Sequence: Synthetic oligonucleotide
guauguauuaauaaguaag

SEQ ID NO: 1824910 - RNA, 19 nt, Artificial Sequence
  Description of Artificial Sequence: Synthetic oligonucleotide
uuaaugaggccacagauaa

SEQ ID NO: 1824911 - RNA, 19 nt, Artificial Sequence
  Description of Artificial Sequence: Synthetic oligonucleotide
aaggugaauauguacuggg

SEQ ID NO: 1824912 - RNA, 19 nt, Artificial Sequence
  Description of Artificial Sequence: Synthetic oligonucleotide
aaauccaugaaguuggaua

SEQ ID NO: 1824913 - RNA, 19 nt, Artificial Sequence
  Description of Artificial Sequence: Synthetic oligonucleotide
uucaaggugaauauguacu

SEQ ID NO: 1824914 - RNA, 19 nt, Artificial Sequence
  Description of Artificial Sequence: Synthetic oligonucleotide
auaaguaagagucuuuccu

SEQ ID NO: 1824915 - RNA, 19 nt, Artificial Sequence
  Description of Artificial Sequence: Synthetic oligonucleotide
uccaaagaaauucucauau

SEQ ID NO: 1824916 - RNA, 19 nt, Artificial Sequence
  Description of Artificial Sequence: Synthetic oligonucleotide
accacucuaaucuuuuccc

SEQ ID NO: 1824917 - RNA, 19 nt, Artificial Sequence
  Description of Artificial Sequence: Synthetic oligonucleotide
ugcuuaaacaaucuguagu

SEQ ID NO: 1824918 - RNA, 19 nt, Artificial Sequence
  Description of Artificial Sequence: Synthetic oligonucleotide
uaaaauugaguugacgacc

SEQ ID NO: 1824919 - RNA, 19 nt, Artificial Sequence
  Description of Artificial Sequence: Synthetic oligonucleotide
aauuaguucuccuuugaau

SEQ ID NO: 1824920 - RNA, 19 nt, Artificial Sequence
  Description of Artificial Sequence: Synthetic oligonucleotide
aauugcuuaaacaaucugu

SEQ ID NO: 1824921 - RNA, 19 nt, Artificial Sequence
  Description of Artificial Sequence: Synthetic oligonucleotide
agugcauuucagcuggacc

SEQ ID NO: 1824922 - RNA, 19 nt, Artificial Sequence
  Description of Artificial Sequence: Synthetic oligonucleotide
aaucucuuuaaguuuggcu

SEQ ID NO: 1824923 - RNA, 19 nt, Artificial Sequence
  Description of Artificial Sequence: Synthetic oligonucleotide
aauguguucaacauuggcu

SEQ ID NO: 1824924 - RNA, 19 nt, Artificial Sequence
  Description of Artificial Sequence: Synthetic oligonucleotide
uaggaaaaccuacuuagug

SEQ ID NO: 1824925 - RNA, 19 nt, Artificial Sequence
  Description of Artificial Sequence: Synthetic oligonucleotide
augagcaagagcuaguaug

SEQ ID NO: 1824926 - RNA, 19 nt, Artificial Sequence
  Description of Artificial Sequence: Synthetic oligonucleotide
ugagcaucacaucagaguc

SEQ ID NO: 1824927 - RNA, 19 nt, Artificial Sequence
  Description of Artificial Sequence: Synthetic oligonucleotide
uucaacauuggcuacgcca

SEQ ID NO: 1824928 - RNA, 19 nt, Artificial Sequence
  Description of Artificial Sequence: Synthetic oligonucleotide
ucagauacccaauuuucag

SEQ ID NO: 1824929 - RNA, 19 nt, Artificial Sequence
  Description of Artificial Sequence: Synthetic oligonucleotide
gaaaauaugaacacaggga

SEQ ID NO: 1824930 - RNA, 19 nt, Artificial Sequence
  Description of Artificial Sequence: Synthetic oligonucleotide
aagcacaucaccgauacca

SEQ ID NO: 1824931 - RNA, 19 nt, Artificial Sequence
  Description of Artificial Sequence: Synthetic oligonucleotide
uacuuugacauuugaauga

SEQ ID NO: 1824932 - RNA, 19 nt, Artificial Sequence
  Description of Artificial Sequence: Synthetic oligonucleotide
uuagugucauaucaaaguc

SEQ ID NO: 1824933 - RNA, 19 nt, Artificial Sequence
  Description of Artificial Sequence: Synthetic oligonucleotide
auacccaauuuucagaaug

SEQ ID NO: 1824934 - RNA, 19 nt, Artificial Sequence
  Description of Artificial Sequence: Synthetic oligonucleotide
uuucuucuacucuuguagg

SEQ ID NO: 1824935 - RNA, 19 nt, Artificial Sequence
  Description of Artificial Sequence: Synthetic oligonucleotide
aauaucguaagaguccaug

SEQ ID NO: 1824936 - RNA, 19 nt, Artificial Sequence
  Description of Artificial Sequence: Synthetic oligonucleotide
uuuugguaugccuuguuca

SEQ ID NO: 1824937 - RNA, 19 nt, Artificial Sequence
  Description of Artificial Sequence: Synthetic oligonucleotide
uccauguauuuucuaaaag

SEQ ID NO: 1824938 - RNA, 19 nt, Artificial Sequence
  Description of Artificial Sequence: Synthetic oligonucleotide
uugacguauaauuucuuca

SEQ ID NO: 1824939 - RNA, 19 nt, Artificial Sequence
  Description of Artificial Sequence: Synthetic oligonucleotide
ucuguuauuaucugaaguu

SEQ ID NO: 1824940 - RNA, 19 nt, Artificial Sequence
  Description of Artificial Sequence: Synthetic oligonucleotide
uauuaauaaguaagagucu

SEQ ID NO: 1824941 - RNA, 19 nt, Artificial Sequence
  Description of Artificial Sequence: Synthetic oligonucleotide
gaugaucuuggucuugcgg

SEQ ID NO: 1824942 - RNA, 19 nt, Artificial Sequence
  Description of Artificial Sequence: Synthetic oligonucleotide
aguuggauacuacuuugac

SEQ ID NO: 1824943 - RNA, 19 nt, Artificial Sequence
  Description of Artificial Sequence: Synthetic oligonucleotide
aguaucgugauggaggcgg

SEQ ID NO: 1824944 - RNA, 19 nt, Artificial Sequence
  Description of Artificial Sequence: Synthetic oligonucleotide
aaguaagagucuuuccuca

SEQ ID NO: 1824945 - RNA, 19 nt, Artificial Sequence
  Description of Artificial Sequence: Synthetic oligonucleotide
ugagcaagagcuaguaugu

SEQ ID NO: 1824946 - RNA, 19 nt, Artificial Sequence
  Description of Artificial Sequence: Synthetic oligonucleotide
gaaguuggauacuacuuug

SEQ ID NO: 1824947 - RNA, 19 nt, Artificial Sequence
  Description of Artificial Sequence: Synthetic oligonucleotide
aacaaucuguaguaucgug

SEQ ID NO: 1824948 - RNA, 19 nt, Artificial Sequence
  Description of Artificial Sequence: Synthetic oligonucleotide
uucuucuacucuuguaggg

SEQ ID NO: 1824949 - RNA, 19 nt, Artificial Sequence
  Description of Artificial Sequence: Synthetic oligonucleotide
ucauauccuuccuugagca

SEQ ID NO: 1824950 - RNA, 19 nt, Artificial Sequence
  Description of Artificial Sequence: Synthetic oligonucleotide
guaaaauugaguugacgac

SEQ ID NO: 1824951 - RNA, 19 nt, Artificial Sequence
  Description of Artificial Sequence: Synthetic oligonucleotide
uaaaagcucgucuacucug

SEQ ID NO: 1824952 - RNA, 19 nt, Artificial Sequence
  Description of Artificial Sequence: Synthetic oligonucleotide
uguuuauaaugucuuuugu

SEQ ID NO: 1824953 - RNA, 19 nt, Artificial Sequence
  Description of Artificial Sequence: Synthetic oligonucleotide
ucauaucaaagucuguuau

SEQ ID NO: 1824954 - RNA, 19 nt, Artificial Sequence
  Description of Artificial Sequence: Synthetic oligonucleotide
gcuaguauguauuaauaag

SEQ ID NO: 1824955 - RNA, 19 nt, Artificial Sequence
  Description of Artificial Sequence: Synthetic oligonucleotide
gaguugacgaccuccaaug

SEQ ID NO: 1824956 - RNA, 19 nt, Artificial Sequence
  Description of Artificial Sequence: Synthetic oligonucleotide
cuuuuguaaaauugaguug

SEQ ID NO: 1824957 - RNA, 19 nt, Artificial Sequence
  Description of Artificial Sequence: Synthetic oligonucleotide
aaccaugggacuuaguaua

SEQ ID NO: 1824958 - RNA, 19 nt, Artificial Sequence
  Description of Artificial Sequence: Synthetic oligonucleotide
uaauugcuuaaacaaucug

SEQ ID NO: 1824959 - RNA, 19 nt, Artificial Sequence
  Description of Artificial Sequence: Synthetic oligonucleotide
aguucgcugaaauagucug

SEQ ID NO: 1824960 - RNA, 19 nt, Artificial Sequence
  Description of Artificial Sequence: Synthetic oligonucleotide
ucaaggugaauauguacug

SEQ ID NO: 1824961 - RNA, 19 nt, Artificial Sequence
  Description of Artificial Sequence: Synthetic oligonucleotide
uucagauacccaauuuuca

SEQ ID NO: 1824962 - RNA, 19 nt, Artificial Sequence
  Description of Artificial Sequence: Synthetic oligonucleotide
uguugaacacaugaauuag

SEQ ID NO: 1824963 - RNA, 19 nt, Artificial Sequence
  Description of Artificial Sequence: Synthetic oligonucleotide
aggaaaaccuacuuagugu

SEQ ID NO: 1824964 - RNA, 19 nt, Artificial Sequence
  Description of Artificial Sequence: Synthetic oligonucleotide
uaguauguauuaauaagua

SEQ ID NO: 1824965 - RNA, 19 nt, Artificial Sequence
  Description of Artificial Sequence: Synthetic oligonucleotide
ucuucucucaaacuguuua

SEQ ID NO: 1824966 - RNA, 19 nt, Artificial Sequence
  Description of Artificial Sequence: Synthetic oligonucleotide
agaaugauguugcuguugu

SEQ ID NO: 1824967 - RNA, 19 nt, Artificial Sequence
  Description of Artificial Sequence: Synthetic oligonucleotide
gaauguguucaacauuggc

SEQ ID NO: 1824968 - RNA, 19 nt, Artificial Sequence
  Description of Artificial Sequence: Synthetic oligonucleotide
ucuucaaggcaccaucgug

SEQ ID NO: 1824969 - RNA, 19 nt, Artificial Sequence
  Description of Artificial Sequence: Synthetic oligonucleotide
aaaccaugggacuuaguau

SEQ ID NO: 1824970 - RNA, 19 nt, Artificial Sequence
  Description of Artificial Sequence: Synthetic oligonucleotide
ugaauuaguucuccuuuga

SEQ ID NO: 1824971 - RNA, 19 nt, Artificial Sequence
  Description of Artificial Sequence: Synthetic oligonucleotide
uuuaaugaggccacagaua

SEQ ID NO: 1824972 - RNA, 19 nt, Artificial Sequence
  Description of Artificial Sequence: Synthetic oligonucleotide
auaggaagggaaagggucc

SEQ ID NO: 1824973 - RNA, 19 nt, Artificial Sequence
  Description of Artificial Sequence: Synthetic oligonucleotide
acagauaauuucuucuacu

SEQ ID NO: 1824974 - RNA, 19 nt, Artificial Sequence
  Description of Artificial Sequence: Synthetic oligonucleotide
uuucuaaaagcucgucuac

SEQ ID NO: 1824975 - RNA, 19 nt, Artificial Sequence
  Description of Artificial Sequence: Synthetic oligonucleotide
ucuucaagcacaucaccga

SEQ ID NO: 1824976 - RNA, 19 nt, Artificial Sequence
  Description of Artificial Sequence: Synthetic oligonucleotide
uuguaaaauugaguugacg

SEQ ID NO: 1824977 - RNA, 19 nt, Artificial Sequence
  Description of Artificial Sequence: Synthetic oligonucleotide
uuaguauaccacucuaauc

SEQ ID NO: 1824978 - RNA, 19 nt, Artificial Sequence
  Description of Artificial Sequence: Synthetic oligonucleotide
ugaaguuggauacuacuuu

SEQ ID NO: 1824979 - RNA, 19 nt, Artificial Sequence
  Description of Artificial Sequence: Synthetic oligonucleotide
uaauaaguaagagucuuuc

SEQ ID NO: 1824980 - RNA, 19 nt, Artificial Sequence
  Description of Artificial Sequence: Synthetic oligonucleotide
auggccagugcauuucagc

SEQ ID NO: 1824981 - RNA, 19 nt, Artificial Sequence
  Description of Artificial Sequence: Synthetic oligonucleotide
ccauguauuuucuaaaagc

SEQ ID NO: 1824982 - RNA, 19 nt, Artificial Sequence
  Description of Artificial Sequence: Synthetic oligonucleotide
uuguugaacacaugaauua

SEQ ID NO: 1824983 - RNA, 19 nt, Artificial Sequence
  Description of Artificial Sequence: Synthetic oligonucleotide
ugacguauaauuucuucaa

SEQ ID NO: 1824984 - RNA, 19 nt, Artificial Sequence
  Description of Artificial Sequence: Synthetic oligonucleotide
ucuaaaagcucgucuacuc

SEQ ID NO: 1824985 - RNA, 19 nt, Artificial Sequence
  Description of Artificial Sequence: Synthetic oligonucleotide
gacguauaauuucuucaag

SEQ ID NO: 1824986 - RNA, 19 nt, Artificial Sequence
  Description of Artificial Sequence: Synthetic oligonucleotide
uugauuugaacugagcuuu

SEQ ID NO: 1824987 - RNA, 19 nt, Artificial Sequence
  Description of Artificial Sequence: Synthetic oligonucleotide
aggguucuugauuugaacu

SEQ ID NO: 1824988 - RNA, 19 nt, Artificial Sequence
  Description of Artificial Sequence: Synthetic oligonucleotide
auuggcuacgccaucugcc

SEQ ID NO: 1824989 - RNA, 19 nt, Artificial Sequence
  Description of Artificial Sequence: Synthetic oligonucleotide
ucccauuguaggaaaaccu

SEQ ID NO: 1824990 - RNA, 19 nt, Artificial Sequence
  Description of Artificial Sequence: Synthetic oligonucleotide
gucgucuucucucaaacug

SEQ ID NO: 1824991 - RNA, 19 nt, Artificial Sequence
  Description of Artificial Sequence: Synthetic oligonucleotide
cagauaauuucuucuacuc

SEQ ID NO: 1824992 - RNA, 19 nt, Artificial Sequence
  Description of Artificial Sequence: Synthetic oligonucleotide
uugcuuaaacaaucuguag

SEQ ID NO: 1824993 - RNA, 19 nt, Artificial Sequence
  Description of Artificial Sequence: Synthetic oligonucleotide
guaguaucgugauggaggc

SEQ ID NO: 1824994 - RNA, 19 nt, Artificial Sequence
  Description of Artificial Sequence: Synthetic oligonucleotide
uuacuaaaacaauaucgua

SEQ ID NO: 1824995 - RNA, 19 nt, Artificial Sequence
  Description of Artificial Sequence: Synthetic oligonucleotide
auguguucaacauuggcua

SEQ ID NO: 1824996 - RNA, 19 nt, Artificial Sequence
  Description of Artificial Sequence: Synthetic oligonucleotide
accagccgaaaauaugaac

SEQ ID NO: 1824997 - RNA, 19 nt, Artificial Sequence
  Description of Artificial Sequence: Synthetic oligonucleotide
cagaggacgccauaggaag

SEQ ID NO: 1824998 - RNA, 19 nt, Artificial Sequence
  Description of Artificial Sequence: Synthetic oligonucleotide
augaauuaguucuccuuug

SEQ ID NO: 1824999 - RNA, 19 nt, Artificial Sequence
  Description of Artificial Sequence: Synthetic oligonucleotide
ucuuucaguucgcugaaau

SEQ ID NO: 1825000 - RNA, 19 nt, Artificial Sequence
  Description of Artificial Sequence: Synthetic oligonucleotide
aacacagggauaccaugcu

SEQ ID NO: 1825001 - RNA, 19 nt, Artificial Sequence
  Description of Artificial Sequence: Synthetic oligonucleotide
auaucguaagaguccaugu

SEQ ID NO: 1825002 - RNA, 19 nt, Artificial Sequence
  Description of Artificial Sequence: Synthetic oligonucleotide
cucauauccuuccuugagc

SEQ ID NO: 1825003 - RNA, 19 nt, Artificial Sequence
  Description of Artificial Sequence: Synthetic oligonucleotide
aucguaagaguccauguau

SEQ ID NO: 1825004 - RNA, 19 nt, Artificial Sequence
  Description of Artificial Sequence: Synthetic oligonucleotide
acacaugaauuaguucucc

SEQ ID NO: 1825005 - RNA, 19 nt, Artificial Sequence
  Description of Artificial Sequence: Synthetic oligonucleotide
ggugaauauguacugggcc

SEQ ID NO: 1825006 - RNA, 19 nt, Artificial Sequence
  Description of Artificial Sequence: Synthetic oligonucleotide
aaagggaguucuuugucua

SEQ ID NO: 1825007 - RNA, 19 nt, Artificial Sequence
  Description of Artificial Sequence: Synthetic oligonucleotide
guuuacagguccaacacac

SEQ ID NO: 1825008 - RNA, 19 nt, Artificial Sequence
  Description of Artificial Sequence: Synthetic oligonucleotide
agcuaguauguauuaauaa

SEQ ID NO: 1825009 - RNA, 19 nt, Artificial Sequence
  Description of Artificial Sequence: Synthetic oligonucleotide
ucugucauucagauaccca

SEQ ID NO: 1825010 - RNA, 19 nt, Artificial Sequence
  Description of Artificial Sequence: Synthetic oligonucleotide
ugucuaauuuugacuuaag

SEQ ID NO: 1825011 - RNA, 19 nt, Artificial Sequence
  Description of Artificial Sequence: Synthetic oligonucleotide
gaacacagggauaccaugc

SEQ ID NO: 1825012 - RNA, 19 nt, Artificial Sequence
  Description of Artificial Sequence: Synthetic oligonucleotide
uuaauaaguaagagucuuu

SEQ ID NO: 1825013 - RNA, 19 nt, Artificial Sequence
  Description of Artificial Sequence: Synthetic oligonucleotide
uacuuagugucauaucaaa

SEQ ID NO: 1825014 - RNA, 19 nt, Artificial Sequence
  Description of Artificial Sequence: Synthetic oligonucleotide
uuugguaugccuuguucaa

SEQ ID NO: 1825015 - RNA, 19 nt, Artificial Sequence
  Description of Artificial Sequence: Synthetic oligonucleotide
ugugguagucgucuucucu

SEQ ID NO: 1825016 - RNA, 19 nt, Artificial Sequence
  Description of Artificial Sequence: Synthetic oligonucleotide
ucguguuuguugaacacau

SEQ ID NO: 1825017 - RNA, 19 nt, Artificial Sequence
  Description of Artificial Sequence: Synthetic oligonucleotide
cuuagugucauaucaaagu

SEQ ID NO: 1825018 - RNA, 19 nt, Artificial Sequence
  Description of Artificial Sequence: Synthetic oligonucleotide
accgcgcacacacuggcgc

SEQ ID NO: 1825019 - RNA, 19 nt, Artificial Sequence
  Description of Artificial Sequence: Synthetic oligonucleotide
uauaccacucuaaucuuuu

SEQ ID NO: 1825020 - RNA, 19 nt, Artificial Sequence
  Description of Artificial Sequence: Synthetic oligonucleotide
aaucuguaguaucgugaug

SEQ ID NO: 1825021 - RNA, 19 nt, Artificial Sequence
  Description of Artificial Sequence: Synthetic oligonucleotide
uuuacagguccaacacacc

SEQ ID NO: 1825022 - RNA, 19 nt, Artificial Sequence
  Description of Artificial Sequence: Synthetic oligonucleotide
aaaaccuacuuagugucau

SEQ ID NO: 1825023 - RNA, 19 nt, Artificial Sequence
  Description of Artificial Sequence: Synthetic oligonucleotide
uugacgaccuccaaugauu

SEQ ID NO: 1825024 - RNA, 19 nt, Artificial Sequence
  Description of Artificial Sequence: Synthetic oligonucleotide
uaucguaagaguccaugua

SEQ ID NO: 1825025 - RNA, 19 nt, Artificial Sequence
  Description of Artificial Sequence: Synthetic oligonucleotide
ugaguugacgaccuccaau

SEQ ID NO: 1825026 - RNA, 19 nt, Artificial Sequence
  Description of Artificial Sequence: Synthetic oligonucleotide
agguccaacacaccuggag

SEQ ID NO: 1825027 - RNA, 19 nt, Artificial Sequence
  Description of Artificial Sequence: Synthetic oligonucleotide
guuggauacuacuuugaca

SEQ ID NO: 1825028 - RNA, 19 nt, Artificial Sequence
  Description of Artificial Sequence: Synthetic oligonucleotide
uucgcugaaauagucugug

SEQ ID NO: 1825029 - RNA, 19 nt, Artificial Sequence
  Description of Artificial Sequence: Synthetic oligonucleotide
agucuguuauuaucugaag

SEQ ID NO: 1825030 - RNA, 19 nt, Artificial Sequence
  Description of Artificial Sequence: Synthetic oligonucleotide
guaagagucuuuccucaag

SEQ ID NO: 1825031 - RNA, 19 nt, Artificial Sequence
  Description of Artificial Sequence: Synthetic oligonucleotide
caguuuacagguccaacac

SEQ ID NO: 1825032 - RNA, 19 nt, Artificial Sequence
  Description of Artificial Sequence: Synthetic oligonucleotide
acaauaucguaagagucca

SEQ ID NO: 1825033 - RNA, 19 nt, Artificial Sequence
  Description of Artificial Sequence: Synthetic oligonucleotide
aucagaggacgccauagga

SEQ ID NO: 1825034 - RNA, 19 nt, Artificial Sequence
  Description of Artificial Sequence: Synthetic oligonucleotide
gaagggcugcaguuuacag

SEQ ID NO: 1825035 - RNA, 19 nt, Artificial Sequence
  Description of Artificial Sequence: Synthetic oligonucleotide
ucuaaucuuuucccauugu

SEQ ID NO: 1825036 - RNA, 19 nt, Artificial Sequence
  Description of Artificial Sequence: Synthetic oligonucleotide
gauacuacuuugacauuug

SEQ ID NO: 1825037 - RNA, 19 nt, Artificial Sequence
  Description of Artificial Sequence: Synthetic oligonucleotide
gucuaauuuugacuuaaga

SEQ ID NO: 1825038 - RNA, 19 nt, Artificial Sequence
  Description of Artificial Sequence: Synthetic oligonucleotide
ugccacaaucucuuuaagu

SEQ ID NO: 1825039 - RNA, 19 nt, Artificial Sequence
  Description of Artificial Sequence: Synthetic oligonucleotide
acaucaccgauaccagccg

SEQ ID NO: 1825040 - RNA, 19 nt, Artificial Sequence
  Description of Artificial Sequence: Synthetic oligonucleotide
aguuuacagguccaacaca

SEQ ID NO: 1825041 - RNA, 19 nt, Artificial Sequence
  Description of Artificial Sequence: Synthetic oligonucleotide
uguucaacauuggcuacgc

SEQ ID NO: 1825042 - RNA, 19 nt, Artificial Sequence
  Description of Artificial Sequence: Synthetic oligonucleotide
aaacaaucuguaguaucgu

SEQ ID NO: 1825043 - RNA, 19 nt, Artificial Sequence
  Description of Artificial Sequence: Synthetic oligonucleotide
auugcuuaaacaaucugua

SEQ ID NO: 1825044 - RNA, 19 nt, Artificial Sequence
  Description of Artificial Sequence: Synthetic oligonucleotide
caaaccaugggacuuagua

SEQ ID NO: 1825045 - RNA, 19 nt, Artificial Sequence
  Description of Artificial Sequence: Synthetic oligonucleotide
aauccuuucagaacuccau

SEQ ID NO: 1825046 - RNA, 19 nt, Artificial Sequence
  Description of Artificial Sequence: Synthetic oligonucleotide
uguaggguucuugauuuga

SEQ ID NO: 1825047 - RNA, 19 nt, Artificial Sequence
  Description of Artificial Sequence: Synthetic oligonucleotide
agcaagagcuaguauguau

SEQ ID NO: 1825048 - RNA, 19 nt, Artificial Sequence
  Description of Artificial Sequence: Synthetic oligonucleotide
acaugaauuaguucuccuu

SEQ ID NO: 1825049 - RNA, 19 nt, Artificial Sequence
  Description of Artificial Sequence: Synthetic oligonucleotide
gaaccggcagcuacgagcc

SEQ ID NO: 1825050 - RNA, 19 nt, Artificial Sequence
  Description of Artificial Sequence: Synthetic oligonucleotide
caacaagcaaaccauggga

SEQ ID NO: 1825051 - RNA, 19 nt, Artificial Sequence
  Description of Artificial Sequence: Synthetic oligonucleotide
cucuaaucuuuucccauug

SEQ ID NO: 1825052 - RNA, 19 nt, Artificial Sequence
  Description of Artificial Sequence: Synthetic oligonucleotide
acaaucuguaguaucguga

SEQ ID NO: 1825053 - RNA, 19 nt, Artificial Sequence
  Description of Artificial Sequence: Synthetic oligonucleotide
gccgaaaauaugaacacag

SEQ ID NO: 1825054 - RNA, 19 nt, Artificial Sequence
  Description of Artificial Sequence: Synthetic oligonucleotide
guucuucaaggcaccaucg

SEQ ID NO: 1825055 - RNA, 19 nt, Artificial Sequence
  Description of Artificial Sequence: Synthetic oligonucleotide
accuacuuagugucauauc

SEQ ID NO: 1825056 - RNA, 19 nt, Artificial Sequence
  Description of Artificial Sequence: Synthetic oligonucleotide
aaaggguccaugagcaaga

SEQ ID NO: 1825057 - RNA, 19 nt, Artificial Sequence
  Description of Artificial Sequence: Synthetic oligonucleotide
cagccgaaaauaugaacac

SEQ ID NO: 1825058 - RNA, 19 nt, Artificial Sequence
  Description of Artificial Sequence: Synthetic oligonucleotide
aaccuacuuagugucauau

SEQ ID NO: 1825059 - RNA, 19 nt, Artificial Sequence
  Description of Artificial Sequence: Synthetic oligonucleotide
accaucguguuuguugaac

SEQ ID NO: 1825060 - RNA, 19 nt, Artificial Sequence
  Description of Artificial Sequence: Synthetic oligonucleotide
uuggcuacgccaucugcca

SEQ ID NO: 1825061 - RNA, 19 nt, Artificial Sequence
  Description of Artificial Sequence: Synthetic oligonucleotide
ucuuuucccauuguaggaa

SEQ ID NO: 1825062 - RNA, 19 nt, Artificial Sequence
  Description of Artificial Sequence: Synthetic oligonucleotide
aagcucgucuacucuguca

SEQ ID NO: 1825063 - RNA, 19 nt, Artificial Sequence
  Description of Artificial Sequence: Synthetic oligonucleotide
uucuaaaagcucgucuacu

SEQ ID NO: 1825064 - RNA, 19 nt, Artificial Sequence
  Description of Artificial Sequence: Synthetic oligonucleotide
gccagugcauuucagcugg

SEQ ID NO: 1825065 - RNA, 19 nt, Artificial Sequence
  Description of Artificial Sequence: Synthetic oligonucleotide
caugggacuuaguauacca

SEQ ID NO: 1825066 - RNA, 19 nt, Artificial Sequence
  Description of Artificial Sequence: Synthetic oligonucleotide
uguguucaacauuggcuac

SEQ ID NO: 1825067 - RNA, 19 nt, Artificial Sequence
  Description of Artificial Sequence: Synthetic oligonucleotide
uaucaaagucuguuauuau

SEQ ID NO: 1825068 - RNA, 19 nt, Artificial Sequence
  Description of Artificial Sequence: Synthetic oligonucleotide
guaugccuuguucaacaag

SEQ ID NO: 1825069 - RNA, 19 nt, Artificial Sequence
  Description of Artificial Sequence: Synthetic oligonucleotide
uaggguucuugauuugaac

SEQ ID NO: 1825070 - RNA, 19 nt, Artificial Sequence
  Description of Artificial Sequence: Synthetic oligonucleotide
auaugaacacagggauacc

SEQ ID NO: 1825071 - RNA, 19 nt, Artificial Sequence
  Description of Artificial Sequence: Synthetic oligonucleotide
gaauuaguucuccuuugaa

SEQ ID NO: 1825072 - RNA, 19 nt, Artificial Sequence
  Description of Artificial Sequence: Synthetic oligonucleotide
aaaagcucgucuacucugu

SEQ ID NO: 1825073 - RNA, 19 nt, Artificial Sequence
  Description of Artificial Sequence: Synthetic oligonucleotide
ggguucuugauuugaacug

SEQ ID NO: 1825074 - RNA, 19 nt, Artificial Sequence
  Description of Artificial Sequence: Synthetic oligonucleotide
ugacgaccuccaaugauuc

SEQ ID NO: 1825075 - RNA, 19 nt, Artificial Sequence
  Description of Artificial Sequence: Synthetic oligonucleotide
ucuguaguaucgugaugga

SEQ ID NO: 1825076 - RNA, 19 nt, Artificial Sequence
  Description of Artificial Sequence: Synthetic oligonucleotide
ucguaagaguccauguauu

SEQ ID NO: 1825077 - RNA, 19 nt, Artificial Sequence
  Description of Artificial Sequence: Synthetic oligonucleotide
cauccucaagucuccuugg

SEQ ID NO: 1825078 - RNA, 19 nt, Artificial Sequence
  Description of Artificial Sequence: Synthetic oligonucleotide
agcucgucuacucugucau

SEQ ID NO: 1825079 - RNA, 19 nt, Artificial Sequence
  Description of Artificial Sequence: Synthetic oligonucleotide
guguucaacauuggcuacg

SEQ ID NO: 1825080 - RNA, 19 nt, Artificial Sequence
  Description of Artificial Sequence: Synthetic oligonucleotide
caucguguuuguugaacac

SEQ ID NO: 1825081 - RNA, 19 nt, Artificial Sequence
  Description of Artificial Sequence: Synthetic oligonucleotide
ucgugauggaggcgggaag

SEQ ID NO: 1825082 - RNA, 19 nt, Artificial Sequence
  Description of Artificial Sequence: Synthetic oligonucleotide
ccuacuuagugucauauca

SEQ ID NO: 1825083 - RNA, 19 nt, Artificial Sequence
  Description of Artificial Sequence: Synthetic oligonucleotide
aaguuggauacuacuuuga

SEQ ID NO: 1825084 - RNA, 19 nt, Artificial Sequence
  Description of Artificial Sequence: Synthetic oligonucleotide
aagaagggcugcaguuuac

SEQ ID NO: 1825085 - RNA, 19 nt, Artificial Sequence
  Description of Artificial Sequence: Synthetic oligonucleotide
auacuacuuugacauuuga

SEQ ID NO: 1825086 - RNA, 19 nt, Artificial Sequence
  Description of Artificial Sequence: Synthetic oligonucleotide
gugcauuucagcuggaccu

SEQ ID NO: 1825087 - RNA, 19 nt, Artificial Sequence
  Description of Artificial Sequence: Synthetic oligonucleotide
uacucuuguaggguucuug

SEQ ID NO: 1825088 - RNA, 19 nt, Artificial Sequence
  Description of Artificial Sequence: Synthetic oligonucleotide
aguauaccacucuaaucuu

SEQ ID NO: 1825089 - RNA, 19 nt, Artificial Sequence
  Description of Artificial Sequence: Synthetic oligonucleotide
gcuuaaacaaucuguagua

SEQ ID NO: 1825090 - RNA, 19 nt, Artificial Sequence
  Description of Artificial Sequence: Synthetic oligonucleotide
gugguagucgucuucucuc

SEQ ID NO: 1825091 - RNA, 19 nt, Artificial Sequence
  Description of Artificial Sequence: Synthetic oligonucleotide
ucucuucaaggugaauaug

SEQ ID NO: 1825092 - RNA, 19 nt, Artificial Sequence
  Description of Artificial Sequence: Synthetic oligonucleotide
agaauguguucaacauugg

SEQ ID NO: 1825093 - RNA, 19 nt, Artificial Sequence
  Description of Artificial Sequence: Synthetic oligonucleotide
uucaagcacaucaccgaua

SEQ ID NO: 1825094 - RNA, 19 nt, Artificial Sequence
  Description of Artificial Sequence: Synthetic oligonucleotide
uccaugaaguuggauacua

SEQ ID NO: 1825095 - RNA, 19 nt, Artificial Sequence
  Description of Artificial Sequence: Synthetic oligonucleotide
uggagaucagaggacgcca

SEQ ID NO: 1825096 - RNA, 19 nt, Artificial Sequence
  Description of Artificial Sequence: Synthetic oligonucleotide
cauuggcuacgccaucugc

SEQ ID NO: 1825097 - RNA, 19 nt, Artificial Sequence
  Description of Artificial Sequence: Synthetic oligonucleotide
agcuugacguauaauuucu

SEQ ID NO: 1825098 - RNA, 19 nt, Artificial Sequence
  Description of Artificial Sequence: Synthetic oligonucleotide
auugaguugacgaccucca

SEQ ID NO: 1825099 - RNA, 19 nt, Artificial Sequence
  Description of Artificial Sequence: Synthetic oligonucleotide
ucuacucuuguaggguucu

SEQ ID NO: 1825100 - RNA, 19 nt, Artificial Sequence
  Description of Artificial Sequence: Synthetic oligonucleotide
gacuuaguauaccacucua

SEQ ID NO: 1825101 - RNA, 19 nt, Artificial Sequence
  Description of Artificial Sequence: Synthetic oligonucleotide
acucuaaucuuuucccauu

SEQ ID NO: 1825102 - RNA, 19 nt, Artificial Sequence
  Description of Artificial Sequence: Synthetic oligonucleotide
acuggcgcucgccaccgcg

SEQ ID NO: 1825103 - RNA, 19 nt, Artificial Sequence
  Description of Artificial Sequence: Synthetic oligonucleotide
caugaaguuggauacuacu

SEQ ID NO: 1825104 - RNA, 19 nt, Artificial Sequence
  Description of Artificial Sequence: Synthetic oligonucleotide
cuaaucuuuucccauugua

SEQ ID NO: 1825105 - RNA, 19 nt, Artificial Sequence
  Description of Artificial Sequence: Synthetic oligonucleotide
guugcuguugucuuucagu

SEQ ID NO: 1825106 - RNA, 19 nt, Artificial Sequence
  Description of Artificial Sequence: Synthetic oligonucleotide
cucgucuacucugucauuc

SEQ ID NO: 1825107 - RNA, 19 nt, Artificial Sequence
  Description of Artificial Sequence: Synthetic oligonucleotide
accaugggacuuaguauac

SEQ ID NO: 1825108 - RNA, 19 nt, Artificial Sequence
  Description of Artificial Sequence: Synthetic oligonucleotide
auggacaggcccgcgugcc

SEQ ID NO: 1825109 - RNA, 19 nt, Artificial Sequence
  Description of Artificial Sequence: Synthetic oligonucleotide
gcaguuuacagguccaaca

SEQ ID NO: 1825110 - RNA, 19 nt, Artificial Sequence
  Description of Artificial Sequence: Synthetic oligonucleotide
aguugacgaccuccaauga

SEQ ID NO: 1825111 - RNA, 19 nt, Artificial Sequence
  Description of Artificial Sequence: Synthetic oligonucleotide
ccgaaaauaugaacacagg

SEQ ID NO: 1825112 - RNA, 19 nt, Artificial Sequence
  Description of Artificial Sequence: Synthetic oligonucleotide
ugauggaggcgggaagaag

SEQ ID NO: 1825113 - RNA, 19 nt, Artificial Sequence
  Description of Artificial Sequence: Synthetic oligonucleotide
aaaccuacuuagugucaua

SEQ ID NO: 1825114 - RNA, 19 nt, Artificial Sequence
  Description of Artificial Sequence: Synthetic oligonucleotide
cuucaaggcaccaucgugu

SEQ ID NO: 1825115 - RNA, 19 nt, Artificial Sequence
  Description of Artificial Sequence: Synthetic oligonucleotide
cuacuuagugucauaucaa

SEQ ID NO: 1825116 - RNA, 19 nt, Artificial Sequence
  Description of Artificial Sequence: Synthetic oligonucleotide
cuuaguauaccacucuaau

SEQ ID NO: 1825117 - RNA, 19 nt, Artificial Sequence
  Description of Artificial Sequence: Synthetic oligonucleotide
augauaaacuccagcuuga

SEQ ID NO: 1825118 - RNA, 19 nt, Artificial Sequence
  Description of Artificial Sequence: Synthetic oligonucleotide
gaaaaccuacuuaguguca

SEQ ID NO: 1825119 - RNA, 19 nt, Artificial Sequence
  Description of Artificial Sequence: Synthetic oligonucleotide
uucucucaaacuguuuaua

SEQ ID NO: 1825120 - RNA, 19 nt, Artificial Sequence
  Description of Artificial Sequence: Synthetic oligonucleotide
uaccagccgaaaauaugaa

SEQ ID NO: 1825121 - RNA, 19 nt, Artificial Sequence
  Description of Artificial Sequence: Synthetic oligonucleotide
uuguaggguucuugauuug

SEQ ID NO: 1825122 - RNA, 19 nt, Artificial Sequence
  Description of Artificial Sequence: Synthetic oligonucleotide
cagaaugauguugcuguug

SEQ ID NO: 1825123 - RNA, 19 nt, Artificial Sequence
  Description of Artificial Sequence: Synthetic oligonucleotide
cuugauuugaacugagcuu

SEQ ID NO: 1825124 - RNA, 19 nt, Artificial Sequence
  Description of Artificial Sequence: Synthetic oligonucleotide
cucgccaccgcgcccaccc

SEQ ID NO: 1825125 - RNA, 19 nt, Artificial Sequence
  Description of Artificial Sequence: Synthetic oligonucleotide
acuuaguauaccacucuaa

SEQ ID NO: 1825126 - RNA, 19 nt, Artificial Sequence
  Description of Artificial Sequence: Synthetic oligonucleotide
ggguccaugagcaagagcu

SEQ ID NO: 1825127 - RNA, 19 nt, Artificial Sequence
  Description of Artificial Sequence: Synthetic oligonucleotide
cguauaauuucuucaagca

SEQ ID NO: 1825128 - RNA, 19 nt, Artificial Sequence
  Description of Artificial Sequence: Synthetic oligonucleotide
uucaaggcaccaucguguu

SEQ ID NO: 1825129 - RNA, 19 nt, Artificial Sequence
  Description of Artificial Sequence: Synthetic oligonucleotide
uucuggcaucaucucgaug

SEQ ID NO: 1825130 - RNA, 19 nt, Artificial Sequence
  Description of Artificial Sequence: Synthetic oligonucleotide
agaggacgccauaggaagg

SEQ ID NO: 1825131 - RNA, 19 nt, Artificial Sequence
  Description of Artificial Sequence: Synthetic oligonucleotide
agcacaucaccgauaccag

SEQ ID NO: 1825132 - RNA, 19 nt, Artificial Sequence
  Description of Artificial Sequence: Synthetic oligonucleotide
auuuugacuuaagaucauu

SEQ ID NO: 1825133 - RNA, 19 nt, Artificial Sequence
  Description of Artificial Sequence: Synthetic oligonucleotide
gaaugauguugcuguuguc

SEQ ID NO: 1825134 - RNA, 19 nt, Artificial Sequence
  Description of Artificial Sequence: Synthetic oligonucleotide
acgccauaggaagggaaag

SEQ ID NO: 1825135 - RNA, 19 nt, Artificial Sequence
  Description of Artificial Sequence: Synthetic oligonucleotide
caugaauuaguucuccuuu

SEQ ID NO: 1825136 - RNA, 19 nt, Artificial Sequence
  Description of Artificial Sequence: Synthetic oligonucleotide
uaguaucgugauggaggcg

SEQ ID NO: 1825137 - RNA, 19 nt, Artificial Sequence
  Description of Artificial Sequence: Synthetic oligonucleotide
gagcuaguauguauuaaua

SEQ ID NO: 1825138 - RNA, 19 nt, Artificial Sequence
  Description of Artificial Sequence: Synthetic oligonucleotide
cugccauccucaagucucc

SEQ ID NO: 1825139 - RNA, 19 nt, Artificial Sequence
  Description of Artificial Sequence: Synthetic oligonucleotide
agccgaaaauaugaacaca

SEQ ID NO: 1825140 - RNA, 19 nt, Artificial Sequence
  Description of Artificial Sequence: Synthetic oligonucleotide
cauuucagcuggaccugug

SEQ ID NO: 1825141 - RNA, 19 nt, Artificial Sequence
  Description of Artificial Sequence: Synthetic oligonucleotide
cgaaccggcagcuacgagc

SEQ ID NO: 1825142 - RNA, 19 nt, Artificial Sequence
  Description of Artificial Sequence: Synthetic oligonucleotide
ucgcugaaauagucugugu

SEQ ID NO: 1825143 - RNA, 19 nt, Artificial Sequence
  Description of Artificial Sequence: Synthetic oligonucleotide
ccauccucaagucuccuug

SEQ ID NO: 1825144 - RNA, 19 nt, Artificial Sequence
  Description of Artificial Sequence: Synthetic oligonucleotide
agaagggcugcaguuuaca

SEQ ID NO: 1825145 - RNA, 19 nt, Artificial Sequence
  Description of Artificial Sequence: Synthetic oligonucleotide
acgaccuccaaugauucuu

SEQ ID NO: 1825146 - RNA, 19 nt, Artificial Sequence
  Description of Artificial Sequence: Synthetic oligonucleotide
cuuucaguucgcugaaaua

SEQ ID NO: 1825147 - RNA, 19 nt, Artificial Sequence
  Description of Artificial Sequence: Synthetic oligonucleotide
cuguugucuuucaguucgc

SEQ ID NO: 1825148 - RNA, 19 nt, Artificial Sequence
  Description of Artificial Sequence: Synthetic oligonucleotide
aucugaaguuuagcagcuc

SEQ ID NO: 1825149 - RNA, 19 nt, Artificial Sequence
  Description of Artificial Sequence: Synthetic oligonucleotide
agcaaaccaugggacuuag

SEQ ID NO: 1825150 - RNA, 19 nt, Artificial Sequence
  Description of Artificial Sequence: Synthetic oligonucleotide
ucaucucgaugaucuuggu

SEQ ID NO: 1825151 - RNA, 19 nt, Artificial Sequence
  Description of Artificial Sequence: Synthetic oligonucleotide
cuaaaagcucgucuacucu

SEQ ID NO: 1825152 - RNA, 19 nt, Artificial Sequence
  Description of Artificial Sequence: Synthetic oligonucleotide
gacgccauaggaagggaaa

SEQ ID NO: 1825153 - RNA, 19 nt, Artificial Sequence
  Description of Artificial Sequence: Synthetic oligonucleotide
caccuggagaucagaggac

SEQ ID NO: 1825154 - RNA, 19 nt, Artificial Sequence
  Description of Artificial Sequence: Synthetic oligonucleotide
cugaaauagucuguguucu

SEQ ID NO: 1825155 - RNA, 19 nt, Artificial Sequence
  Description of Artificial Sequence: Synthetic oligonucleotide
caagagcuaguauguauua

SEQ ID NO: 1825156 - RNA, 19 nt, Artificial Sequence
  Description of Artificial Sequence: Synthetic oligonucleotide
caaucuguaguaucgugau

SEQ ID NO: 1825157 - RNA, 19 nt, Artificial Sequence
  Description of Artificial Sequence: Synthetic oligonucleotide
aagcaaaccaugggacuua

SEQ ID NO: 1825158 - RNA, 19 nt, Artificial Sequence
  Description of Artificial Sequence: Synthetic oligonucleotide
agcuacgagcccaggggcg

SEQ ID NO: 1825159 - RNA, 19 nt, Artificial Sequence
  Description of Artificial Sequence: Synthetic oligonucleotide
cuugcggcccgucuuucuc

SEQ ID NO: 1825160 - RNA, 19 nt, Artificial Sequence
  Description of Artificial Sequence: Synthetic oligonucleotide
gguucuugauuugaacuga

SEQ ID NO: 1825161 - RNA, 19 nt, Artificial Sequence
  Description of Artificial Sequence: Synthetic oligonucleotide
ggaaaagggaguucuuugu

SEQ ID NO: 1825162 - RNA, 19 nt, Artificial Sequence
  Description of Artificial Sequence: Synthetic oligonucleotide
guucaacauuggcuacgcc

SEQ ID NO: 1825163 - RNA, 19 nt, Artificial Sequence
  Description of Artificial Sequence: Synthetic oligonucleotide
guagucgucuucucucaaa

SEQ ID NO: 1825164 - RNA, 19 nt, Artificial Sequence
  Description of Artificial Sequence: Synthetic oligonucleotide
guaucgugauggaggcggg

SEQ ID NO: 1825165 - RNA, 19 nt, Artificial Sequence
  Description of Artificial Sequence: Synthetic oligonucleotide
gcaccaucguguuuguuga

SEQ ID NO: 1825166 - RNA, 19 nt, Artificial Sequence
  Description of Artificial Sequence: Synthetic oligonucleotide
ucuugcggcccgucuuucu

SEQ ID NO: 1825167 - RNA, 19 nt, Artificial Sequence
  Description of Artificial Sequence: Synthetic oligonucleotide
uggacaggcccgcgugccc

SEQ ID NO: 1825168 - RNA, 19 nt, Artificial Sequence
  Description of Artificial Sequence: Synthetic oligonucleotide
gccuuguucaacaagcaaa

SEQ ID NO: 1825169 - RNA, 19 nt, Artificial Sequence
  Description of Artificial Sequence: Synthetic oligonucleotide
caccaccgcgcacacacug

SEQ ID NO: 1825170 - RNA, 19 nt, Artificial Sequence
  Description of Artificial Sequence: Synthetic oligonucleotide
uugcggcccgucuuucucu

SEQ ID NO: 1825171 - RNA, 19 nt, Artificial Sequence
  Description of Artificial Sequence: Synthetic oligonucleotide
uggaccugugguagucguc

SEQ ID NO: 1825172 - RNA, 19 nt, Artificial Sequence
  Description of Artificial Sequence: Synthetic oligonucleotide
acacuggcgcucgccaccg

SEQ ID NO: 1825173 - RNA, 19 nt, Artificial Sequence
  Description of Artificial Sequence: Synthetic oligonucleotide
ucaccgauaccagccgaaa

SEQ ID NO: 1825174 - RNA, 19 nt, Artificial Sequence
  Description of Artificial Sequence: Synthetic oligonucleotide
gggacuuaguauaccacuc

SEQ ID NO: 1825175 - RNA, 19 nt, Artificial Sequence
  Description of Artificial Sequence: Synthetic oligonucleotide
uggauacuacuuugacauu

SEQ ID NO: 1825176 - RNA, 19 nt, Artificial Sequence
  Description of Artificial Sequence: Synthetic oligonucleotide
uaucgugauggaggcggga

SEQ ID NO: 1825177 - RNA, 19 nt, Artificial Sequence
  Description of Artificial Sequence: Synthetic oligonucleotide
agggaguucuuugucuaau

SEQ ID NO: 1825178 - RNA, 19 nt, Artificial Sequence
  Description of Artificial Sequence: Synthetic oligonucleotide
aucgugauggaggcgggaa

SEQ ID NO: 1825179 - RNA, 19 nt, Artificial Sequence
  Description of Artificial Sequence: Synthetic oligonucleotide
ggccagugcauuucagcug

SEQ ID NO: 1825180 - RNA, 19 nt, Artificial Sequence
  Description of Artificial Sequence: Synthetic oligonucleotide
ucaaggcaccaucguguuu

SEQ ID NO: 1825181 - RNA, 19 nt, Artificial Sequence
  Description of Artificial Sequence: Synthetic oligonucleotide
uagcagcuccuccuuuaau

SEQ ID NO: 1825182 - RNA, 19 nt, Artificial Sequence
  Description of Artificial Sequence: Synthetic oligonucleotide
cuggcgcucgccaccgcgc

SEQ ID NO: 1825183 - RNA, 19 nt, Artificial Sequence
  Description of Artificial Sequence: Synthetic oligonucleotide
cauaucaaagucuguuauu

SEQ ID NO: 1825184 - RNA, 19 nt, Artificial Sequence
  Description of Artificial Sequence: Synthetic oligonucleotide
guugacgaccuccaaugau

SEQ ID NO: 1825185 - RNA, 19 nt, Artificial Sequence
  Description of Artificial Sequence: Synthetic oligonucleotide
auccaugaaguuggauacu

SEQ ID NO: 1825186 - RNA, 19 nt, Artificial Sequence
  Description of Artificial Sequence: Synthetic oligonucleotide
uuuccucaagauggccagu

SEQ ID NO: 1825187 - RNA, 19 nt, Artificial Sequence
  Description of Artificial Sequence: Synthetic oligonucleotide
caccgcgcacacacuggcg

SEQ ID NO: 1825188 - RNA, 19 nt, Artificial Sequence
  Description of Artificial Sequence: Synthetic oligonucleotide
guaggguucuugauuugaa

SEQ ID NO: 1825189 - RNA, 19 nt, Artificial Sequence
  Description of Artificial Sequence: Synthetic oligonucleotide
cacacacuggcgcucgcca

SEQ ID NO: 1825190 - RNA, 19 nt, Artificial Sequence
  Description of Artificial Sequence: Synthetic oligonucleotide
ccuggagaucagaggacgc

SEQ ID NO: 1825191 - RNA, 19 nt, Artificial Sequence
  Description of Artificial Sequence: Synthetic oligonucleotide
caacauuggcuacgccauc

SEQ ID NO: 1825192 - RNA, 19 nt, Artificial Sequence
  Description of Artificial Sequence: Synthetic oligonucleotide
ccaugaaguuggauacuac

SEQ ID NO: 1825193 - RNA, 19 nt, Artificial Sequence
  Description of Artificial Sequence: Synthetic oligonucleotide
cuucucucaaacuguuuau

SEQ ID NO: 1825194 - RNA, 19 nt, Artificial Sequence
  Description of Artificial Sequence: Synthetic oligonucleotide
gucugccacaaucucuuua

SEQ ID NO: 1825195 - RNA, 19 nt, Artificial Sequence
  Description of Artificial Sequence: Synthetic oligonucleotide
acgccaucugccauccuca

SEQ ID NO: 1825196 - RNA, 19 nt, Artificial Sequence
  Description of Artificial Sequence: Synthetic oligonucleotide
cacaugaauuaguucuccu

SEQ ID NO: 1825197 - RNA, 19 nt, Artificial Sequence
  Description of Artificial Sequence: Synthetic oligonucleotide
aacuccagcuugacguaua

SEQ ID NO: 1825198 - RNA, 19 nt, Artificial Sequence
  Description of Artificial Sequence: Synthetic oligonucleotide
cagugcauuucagcuggac

SEQ ID NO: 1825199 - RNA, 19 nt, Artificial Sequence
  Description of Artificial Sequence: Synthetic oligonucleotide
cucgaugaucuuggucuug

SEQ ID NO: 1825200 - RNA, 19 nt, Artificial Sequence
  Description of Artificial Sequence: Synthetic oligonucleotide
cacucuaaucuuuucccau

SEQ ID NO: 1825201 - RNA, 19 nt, Artificial Sequence
  Description of Artificial Sequence: Synthetic oligonucleotide
caguucgcugaaauagucu

SEQ ID NO: 1825202 - RNA, 19 nt, Artificial Sequence
  Description of Artificial Sequence: Synthetic oligonucleotide
cuguuauuaucugaaguuu

SEQ ID NO: 1825203 - RNA, 19 nt, Artificial Sequence
  Description of Artificial Sequence: Synthetic oligonucleotide
caucaccgauaccagccga

SEQ ID NO: 1825204 - RNA, 19 nt, Artificial Sequence
  Description of Artificial Sequence: Synthetic oligonucleotide
ggacuuaguauaccacucu

SEQ ID NO: 1825205 - RNA, 19 nt, Artificial Sequence
  Description of Artificial Sequence: Synthetic oligonucleotide
aucaccgauaccagccgaa

SEQ ID NO: 1825206 - RNA, 19 nt, Artificial Sequence
  Description of Artificial Sequence: Synthetic oligonucleotide
ggauacuacuuugacauuu

SEQ ID NO: 1825207 - RNA, 19 nt, Artificial Sequence
  Description of Artificial Sequence: Synthetic oligonucleotide
cccauuguaggaaaaccua

SEQ ID NO: 1825208 - RNA, 19 nt, Artificial Sequence
  Description of Artificial Sequence: Synthetic oligonucleotide
gcuacgccaucugccaucc

SEQ ID NO: 1825209 - RNA, 19 nt, Artificial Sequence
  Description of Artificial Sequence: Synthetic oligonucleotide
ggcggcgcgguccauggac

SEQ ID NO: 1825210 - RNA, 19 nt, Artificial Sequence
  Description of Artificial Sequence: Synthetic oligonucleotide
cuacgagcccaggggcgcg

SEQ ID NO: 1825211 - RNA, 19 nt, Artificial Sequence
  Description of Artificial Sequence: Synthetic oligonucleotide
gguaugccuuguucaacaa

SEQ ID NO: 1825212 - RNA, 19 nt, Artificial Sequence
  Description of Artificial Sequence: Synthetic oligonucleotide
ggcuacgccaucugccauc

SEQ ID NO: 1825213 - RNA, 19 nt, Artificial Sequence
  Description of Artificial Sequence: Synthetic oligonucleotide
gccaucugccauccucaag

SEQ ID NO: 1825214 - RNA, 19 nt, Artificial Sequence
  Description of Artificial Sequence: Synthetic oligonucleotide
gcuggaccugugguagucg

SEQ ID NO: 1825215 - RNA, 19 nt, Artificial Sequence
  Description of Artificial Sequence: Synthetic oligonucleotide
ccauggacaggcccgcgug

SEQ ID NO: 1825216 - RNA, 19 nt, Artificial Sequence
  Description of Artificial Sequence: Synthetic oligonucleotide
gacgaccuccaaugauucu

SEQ ID NO: 1825217 - RNA, 19 nt, Artificial Sequence
  Description of Artificial Sequence: Synthetic oligonucleotide
caccgauaccagccgaaaa

SEQ ID NO: 1825218 - RNA, 19 nt, Artificial Sequence
  Description of Artificial Sequence: Synthetic oligonucleotide
caagcaaaccaugggacuu

SEQ ID NO: 1825219 - RNA, 19 nt, Artificial Sequence
  Description of Artificial Sequence: Synthetic oligonucleotide
aggacgccauaggaaggga

SEQ ID NO: 1825220 - RNA, 19 nt, Artificial Sequence
  Description of Artificial Sequence: Synthetic oligonucleotide
guauaccacucuaaucuuu

SEQ ID NO: 1825221 - RNA, 19 nt, Artificial Sequence
  Description of Artificial Sequence: Synthetic oligonucleotide
ugcggcccgucuuucucuu

SEQ ID NO: 1825222 - RNA, 19 nt, Artificial Sequence
  Description of Artificial Sequence: Synthetic oligonucleotide
cgucuacucugucauucag

SEQ ID NO: 1825223 - RNA, 19 nt, Artificial Sequence
  Description of Artificial Sequence: Synthetic oligonucleotide
cuacucugucauucagaua

SEQ ID NO: 1825224 - RNA, 19 nt, Artificial Sequence
  Description of Artificial Sequence: Synthetic oligonucleotide
ugccauccucaagucuccu

SEQ ID NO: 1825225 - RNA, 19 nt, Artificial Sequence
  Description of Artificial Sequence: Synthetic oligonucleotide
gguccauggacaggcccgc

SEQ ID NO: 1825226 - RNA, 19 nt, Artificial Sequence
  Description of Artificial Sequence: Synthetic oligonucleotide
ccaugggacuuaguauacc

SEQ ID NO: 1825227 - RNA, 19 nt, Artificial Sequence
  Description of Artificial Sequence: Synthetic oligonucleotide
caugagcaagagcuaguau

SEQ ID NO: 1825228 - RNA, 19 nt, Artificial Sequence
  Description of Artificial Sequence: Synthetic oligonucleotide
cucuuguaggguucuugau

SEQ ID NO: 1825229 - RNA, 19 nt, Artificial Sequence
  Description of Artificial Sequence: Synthetic oligonucleotide
ccgucuuucucuucaaggu

SEQ ID NO: 1825230 - RNA, 19 nt, Artificial Sequence
  Description of Artificial Sequence: Synthetic oligonucleotide
cuggaccugugguagucgu

SEQ ID NO: 1825231 - RNA, 19 nt, Artificial Sequence
  Description of Artificial Sequence: Synthetic oligonucleotide
ccagcuugacguauaauuu

SEQ ID NO: 1825232 - RNA, 19 nt, Artificial Sequence
  Description of Artificial Sequence: Synthetic oligonucleotide
cgaccuccaaugauucuuc

SEQ ID NO: 1825233 - RNA, 19 nt, Artificial Sequence
  Description of Artificial Sequence: Synthetic oligonucleotide
gcgggaagaagggcugcag

SEQ ID NO: 1825234 - RNA, 19 nt, Artificial Sequence
  Description of Artificial Sequence: Synthetic oligonucleotide
ccauaggaagggaaagggu

SEQ ID NO: 1825235 - RNA, 19 nt, Artificial Sequence
  Description of Artificial Sequence: Synthetic oligonucleotide
ggcgcgguccauggacagg

SEQ ID NO: 1825236 - RNA, 19 nt, Artificial Sequence
  Description of Artificial Sequence: Synthetic oligonucleotide
gcgcacacacuggcgcucg

SEQ ID NO: 1825237 - RNA, 19 nt, Artificial Sequence
  Description of Artificial Sequence: Synthetic oligonucleotide
caauaucguaagaguccau

SEQ ID NO: 1825238 - RNA, 19 nt, Artificial Sequence
  Description of Artificial Sequence: Synthetic oligonucleotide
gucuuucaguucgcugaaa

SEQ ID NO: 1825239 - RNA, 19 nt, Artificial Sequence
  Description of Artificial Sequence: Synthetic oligonucleotide
cacggcggcgcgguccaug

SEQ ID NO: 1825240 - RNA, 19 nt, Artificial Sequence
  Description of Artificial Sequence: Synthetic oligonucleotide
ggacgccauaggaagggaa

SEQ ID NO: 1825241 - RNA, 19 nt, Artificial Sequence
  Description of Artificial Sequence: Synthetic oligonucleotide
caccaucguguuuguugaa

SEQ ID NO: 1825242 - RNA, 19 nt, Artificial Sequence
  Description of Artificial Sequence: Synthetic oligonucleotide
gucuugcggcccgucuuuc

SEQ ID NO: 1825243 - RNA, 19 nt, Artificial Sequence
  Description of Artificial Sequence: Synthetic oligonucleotide
gcgcccacccgcgccacgg

SEQ ID NO: 1825244 - RNA, 19 nt, Artificial Sequence
  Description of Artificial Sequence: Synthetic oligonucleotide
gguccaugagcaagagcua

SEQ ID NO: 1825245 - RNA, 19 nt, Artificial Sequence
  Description of Artificial Sequence: Synthetic oligonucleotide
cacuggcgcucgccaccgc

SEQ ID NO: 1825246 - RNA, 19 nt, Artificial Sequence
  Description of Artificial Sequence: Synthetic oligonucleotide
gcaucacaucagagucugc

SEQ ID NO: 1825247 - RNA, 19 nt, Artificial Sequence
  Description of Artificial Sequence: Synthetic oligonucleotide
cguaagaguccauguauuu

SEQ ID NO: 1825248 - RNA, 19 nt, Artificial Sequence
  Description of Artificial Sequence: Synthetic oligonucleotide
ccgaaccggcagcuacgag

SEQ ID NO: 1825249 - RNA, 19 nt, Artificial Sequence
  Description of Artificial Sequence: Synthetic oligonucleotide
cgcugaaauagucuguguu

SEQ ID NO: 1825250 - RNA, 19 nt, Artificial Sequence
  Description of Artificial Sequence: Synthetic oligonucleotide
ggcuuuugguaugccuugu

SEQ ID NO: 1825251 - RNA, 19 nt, Artificial Sequence
  Description of Artificial Sequence: Synthetic oligonucleotide
ggucuugcggcccgucuuu

SEQ ID NO: 1825252 - RNA, 19 nt, Artificial Sequence
  Description of Artificial Sequence: Synthetic oligonucleotide
ggcccgucuuucucuucaa

SEQ ID NO: 1825253 - RNA, 19 nt, Artificial Sequence
  Description of Artificial Sequence: Synthetic oligonucleotide
gcauuucagcuggaccugu

SEQ ID NO: 1825254 - RNA, 19 nt, Artificial Sequence
  Description of Artificial Sequence: Synthetic oligonucleotide
cagcuggaccugugguagu

SEQ ID NO: 1825255 - RNA, 19 nt, Artificial Sequence
  Description of Artificial Sequence: Synthetic oligonucleotide
cacccgcgccacggcggcg

SEQ ID NO: 1825256 - RNA, 19 nt, Artificial Sequence
  Description of Artificial Sequence: Synthetic oligonucleotide
gcggcgcgguccauggaca

SEQ ID NO: 1825257 - RNA, 19 nt, Artificial Sequence
  Description of Artificial Sequence: Synthetic oligonucleotide
cggcccgucuuucucuuca

SEQ ID NO: 1825258 - RNA, 19 nt, Artificial Sequence
  Description of Artificial Sequence: Synthetic oligonucleotide
gccauccucaagucuccuu

SEQ ID NO: 1825259 - RNA, 19 nt, Artificial Sequence
  Description of Artificial Sequence: Synthetic oligonucleotide
cccgaaccggcagcuacga

SEQ ID NO: 1825260 - RNA, 19 nt, Artificial Sequence
  Description of Artificial Sequence: Synthetic oligonucleotide
agccccgaaccggcagcua

SEQ ID NO: 1825261 - RNA, 19 nt, Artificial Sequence
  Description of Artificial Sequence: Synthetic oligonucleotide
gcggcccgucuuucucuuc

SEQ ID NO: 1825262 - RNA, 19 nt, Artificial Sequence
  Description of Artificial Sequence: Synthetic oligonucleotide
gcaaaccaugggacuuagu

SEQ ID NO: 1825263 - RNA, 19 nt, Artificial Sequence
  Description of Artificial Sequence: Synthetic oligonucleotide
cgcacacacuggcgcucgc

SEQ ID NO: 1825264 - RNA, 19 nt, Artificial Sequence
  Description of Artificial Sequence: Synthetic oligonucleotide
gcucgucuacucugucauu

SEQ ID NO: 1825265 - RNA, 19 nt, Artificial Sequence
  Description of Artificial Sequence: Synthetic oligonucleotide
cccgcgccacggcggcgcg

SEQ ID NO: 1825266 - RNA, 19 nt, Artificial Sequence
  Description of Artificial Sequence: Synthetic oligonucleotide
ccgcgcacacacuggcgcu

SEQ ID NO: 1825267 - RNA, 19 nt, Artificial Sequence
  Description of Artificial Sequence: Synthetic oligonucleotide
ccccggcgccacagccccg

SEQ ID NO: 1825268 - RNA, 19 nt, Artificial Sequence
  Description of Artificial Sequence: Synthetic oligonucleotide
cccggcgccacagccccga

SEQ ID NO: 1825269 - RNA, 19 nt, Artificial Sequence
  Description of Artificial Sequence: Synthetic oligonucleotide
ccgcgccacggcggcgcgg

SEQ ID NO: 1825270 - RNA, 19 nt, Artificial Sequence
  Description of Artificial Sequence: Synthetic oligonucleotide
gcgcggcggcacgcggcac

SEQ ID NO: 1825271 - RNA, 19 nt, Artificial Sequence
  Description of Artificial Sequence: Synthetic oligonucleotide
gcgccacggcggcgcgguc

SEQ ID NO: 1825272 - RNA, 19 nt, Artificial Sequence
  Description of Artificial Sequence: Synthetic oligonucleotide
cgcgccacggcggcgcggu

SEQ ID NO: 1825273 - RNA, 19 nt, Artificial Sequence
  Description of Artificial Sequence: Synthetic oligonucleotide
ccacggcggcgcgguccau

SEQ ID NO: 1825274 - RNA, 19 nt, Artificial Sequence
  Description of Artificial Sequence: Synthetic oligonucleotide
aaagauguacaccacgacc

SEQ ID NO: 1825275 - RNA, 19 nt, Artificial Sequence
  Description of Artificial Sequence: Synthetic oligonucleotide
aaagcuagcggccaggagg

SEQ ID NO: 1825276 - RNA, 19 nt, Artificial Sequence
  Description of Artificial Sequence: Synthetic oligonucleotide
aaagagagcucccugcucc

SEQ ID NO: 1825277 - RNA, 19 nt, Artificial Sequence
  Description of Artificial Sequence: Synthetic oligonucleotide
uucaugaaguuuuagagug

SEQ ID NO: 1825278 - RNA, 19 nt, Artificial Sequence
  Description of Artificial Sequence: Synthetic oligonucleotide
aaaagggauuggcauaacc

SEQ ID NO: 1825279 - RNA, 19 nt, Artificial Sequence
  Description of Artificial Sequence: Synthetic oligonucleotide
aaagggauuggcauaaccc

SEQ ID NO: 1825280 - RNA, 19 nt, Artificial Sequence
  Description of Artificial Sequence: Synthetic oligonucleotide
aagcuauucacacaggcca

SEQ ID NO: 1825281 - RNA, 19 nt, Artificial Sequence
  Description of Artificial Sequence: Synthetic oligonucleotide
ucuggcuagaucaggaacg

SEQ ID NO: 1825282 - RNA, 19 nt, Artificial Sequence
  Description of Artificial Sequence: Synthetic oligonucleotide
aaaagcaacccauacccug

SEQ ID NO: 1825283 - RNA, 19 nt, Artificial Sequence
  Description of Artificial Sequence: Synthetic oligonucleotide
aaacugcuggaauucaggg

SEQ ID NO: 1825284 - RNA, 19 nt, Artificial Sequence
  Description of Artificial Sequence: Synthetic oligonucleotide
gaaguuuuagaguggcugg

SEQ ID NO: 1825285 - RNA, 19 nt, Artificial Sequence
  Description of Artificial Sequence: Synthetic oligonucleotide
aagacuaccaugcccagga

SEQ ID NO: 1825286 - RNA, 19 nt, Artificial Sequence
  Description of Artificial Sequence: Synthetic oligonucleotide
agguguagugaccaaagac

SEQ ID NO: 1825287 - RNA, 19 nt, Artificial Sequence
  Description of Artificial Sequence: Synthetic oligonucleotide
gacccaaucagaauggccg

SEQ ID NO: 1825288 - RNA, 19 nt, Artificial Sequence
  Description of Artificial Sequence: Synthetic oligonucleotide
aaaagucccaccagaaacg

SEQ ID NO: 1825289 - RNA, 19 nt, Artificial Sequence
  Description of Artificial Sequence: Synthetic oligonucleotide
ugaaguuuuagaguggcug

SEQ ID NO: 1825290 - RNA, 19 nt, Artificial Sequence
  Description of Artificial Sequence: Synthetic oligonucleotide
agcgugaaaagccuggcgg

SEQ ID NO: 1825291 - RNA, 19 nt, Artificial Sequence
  Description of Artificial Sequence: Synthetic oligonucleotide
ugcgacugcauacagguug

SEQ ID NO: 1825292 - RNA, 19 nt, Artificial Sequence
  Description of Artificial Sequence: Synthetic oligonucleotide
auagccaacaagcuuggag

SEQ ID NO: 1825293 - RNA, 19 nt, Artificial Sequence
  Description of Artificial Sequence: Synthetic oligonucleotide
aagggauuggcauaacccu

SEQ ID NO: 1825294 - RNA, 19 nt, Artificial Sequence
  Description of Artificial Sequence: Synthetic oligonucleotide
agcgcuauaugcuuccugg

SEQ ID NO: 1825295 - RNA, 19 nt, Artificial Sequence
  Description of Artificial Sequence: Synthetic oligonucleotide
agaaacgccucccaaguuc

SEQ ID NO: 1825296 - RNA, 19 nt, Artificial Sequence
  Description of Artificial Sequence: Synthetic oligonucleotide
aacgaagauggccaaugag

SEQ ID NO: 1825297 - RNA, 19 nt, Artificial Sequence
  Description of Artificial Sequence: Synthetic oligonucleotide
ugucuugagccccaaagug

SEQ ID NO: 1825298 - RNA, 19 nt, Artificial Sequence
  Description of Artificial Sequence: Synthetic oligonucleotide
auggccaagcuauucacac

SEQ ID NO: 1825299 - RNA, 19 nt, Artificial Sequence
  Description of Artificial Sequence: Synthetic oligonucleotide
uuuuaggcccaccaggcug

SEQ ID NO: 1825300 - RNA, 19 nt, Artificial Sequence
  Description of Artificial Sequence: Synthetic oligonucleotide
uuuuagaguggcuggguag

SEQ ID NO: 1825301 - RNA, 19 nt, Artificial Sequence
  Description of Artificial Sequence: Synthetic oligonucleotide
aaagucccaccagaaacgc

SEQ ID NO: 1825302 - RNA, 19 nt, Artificial Sequence
  Description of Artificial Sequence: Synthetic oligonucleotide
aagauguacaccacgaccu

SEQ ID NO: 1825303 - RNA, 19 nt, Artificial Sequence
  Description of Artificial Sequence: Synthetic oligonucleotide
uuuaggcccaccaggcugg

SEQ ID NO: 1825304 - RNA, 19 nt, Artificial Sequence
  Description of Artificial Sequence: Synthetic oligonucleotide
agagccauacggaaggugc

SEQ ID NO: 1825305 - RNA, 19 nt, Artificial Sequence
  Description of Artificial Sequence: Synthetic oligonucleotide
ugaaggauaggccaaucuc

SEQ ID NO: 1825306 - RNA, 19 nt, Artificial Sequence
  Description of Artificial Sequence: Synthetic oligonucleotide
ugaguacagcgcuauaugc

SEQ ID NO: 1825307 - RNA, 19 nt, Artificial Sequence
  Description of Artificial Sequence: Synthetic oligonucleotide
gaauucaggguguggauug

SEQ ID NO: 1825308 - RNA, 19 nt, Artificial Sequence
  Description of Artificial Sequence: Synthetic oligonucleotide
aaguucauguagagggucc

SEQ ID NO: 1825309 - RNA, 19 nt, Artificial Sequence
  Description of Artificial Sequence: Synthetic oligonucleotide
aagauggccaaugaguaca

SEQ ID NO: 1825310 - RNA, 19 nt, Artificial Sequence
  Description of Artificial Sequence: Synthetic oligonucleotide
accaaugcacgcuuccagc

SEQ ID NO: 1825311 - RNA, 19 nt, Artificial Sequence
  Description of Artificial Sequence: Synthetic oligonucleotide
uagccaacaagcuuggagu

SEQ ID NO: 1825312 - RNA, 19 nt, Artificial Sequence
  Description of Artificial Sequence: Synthetic oligonucleotide
ggauauuugaaggauaggc

SEQ ID NO: 1825313 - RNA, 19 nt, Artificial Sequence
  Description of Artificial Sequence: Synthetic oligonucleotide
gaaacugcuggaauucagg

SEQ ID NO: 1825314 - RNA, 19 nt, Artificial Sequence
  Description of Artificial Sequence: Synthetic oligonucleotide
ugacauccgccacagaggc

SEQ ID NO: 1825315 - RNA, 19 nt, Artificial Sequence
  Description of Artificial Sequence: Synthetic oligonucleotide
agagaguugaagaugccgg

SEQ ID NO: 1825316 - RNA, 19 nt, Artificial Sequence
  Description of Artificial Sequence: Synthetic oligonucleotide
ggugagguagguuaggugc

SEQ ID NO: 1825317 - RNA, 19 nt, Artificial Sequence
  Description of Artificial Sequence: Synthetic oligonucleotide
auucacacaggccaccgag

SEQ ID NO: 1825318 - RNA, 19 nt, Artificial Sequence
  Description of Artificial Sequence: Synthetic oligonucleotide
agcugcaccacaaagaugu

SEQ ID NO: 1825319 - RNA, 19 nt, Artificial Sequence
  Description of Artificial Sequence: Synthetic oligonucleotide
gugcacagugaucacaacg

SEQ ID NO: 1825320 - RNA, 19 nt, Artificial Sequence
  Description of Artificial Sequence: Synthetic oligonucleotide
auaacccugggcccggagc

SEQ ID NO: 1825321 - RNA, 19 nt, Artificial Sequence
  Description of Artificial Sequence: Synthetic oligonucleotide
gaucacaacgaagauggcc

SEQ ID NO: 1825322 - RNA, 19 nt, Artificial Sequence
  Description of Artificial Sequence: Synthetic oligonucleotide
aaguuuuagaguggcuggg

SEQ ID NO: 1825323 - RNA, 19 nt, Artificial Sequence
  Description of Artificial Sequence: Synthetic oligonucleotide
gagagaguugaagaugccg

SEQ ID NO: 1825324 - RNA, 19 nt, Artificial Sequence
  Description of Artificial Sequence: Synthetic oligonucleotide
caagcuauucacacaggcc

SEQ ID NO: 1825325 - RNA, 19 nt, Artificial Sequence
  Description of Artificial Sequence: Synthetic oligonucleotide
gaggacucggccaagcacg

SEQ ID NO: 1825326 - RNA, 19 nt, Artificial Sequence
  Description of Artificial Sequence: Synthetic oligonucleotide
aagcuagcggccaggaggc

SEQ ID NO: 1825327 - RNA, 19 nt, Artificial Sequence
  Description of Artificial Sequence: Synthetic oligonucleotide
uggagcgugaaaagccugg

SEQ ID NO: 1825328 - RNA, 19 nt, Artificial Sequence
  Description of Artificial Sequence: Synthetic oligonucleotide
ggugguagcaaaugcaaag

SEQ ID NO: 1825329 - RNA, 19 nt, Artificial Sequence
  Description of Artificial Sequence: Synthetic oligonucleotide
auacccugugaacaugagg

SEQ ID NO: 1825330 - RNA, 19 nt, Artificial Sequence
  Description of Artificial Sequence: Synthetic oligonucleotide
gaugguggagcgugaaaag

SEQ ID NO: 1825331 - RNA, 19 nt, Artificial Sequence
  Description of Artificial Sequence: Synthetic oligonucleotide
uugaaggauaggccaaucu

SEQ ID NO: 1825332 - RNA, 19 nt, Artificial Sequence
  Description of Artificial Sequence: Synthetic oligonucleotide
augaguacagcgcuauaug

SEQ ID NO: 1825333 - RNA, 19 nt, Artificial Sequence
  Description of Artificial Sequence: Synthetic oligonucleotide
augcccaggauauuugaag

SEQ ID NO: 1825334 - RNA, 19 nt, Artificial Sequence
  Description of Artificial Sequence: Synthetic oligonucleotide
aacccauacccugugaaca

SEQ ID NO: 1825335 - RNA, 19 nt, Artificial Sequence
  Description of Artificial Sequence: Synthetic oligonucleotide
caugaaguuuuagaguggc

SEQ ID NO: 1825336 - RNA, 19 nt, Artificial Sequence
  Description of Artificial Sequence: Synthetic oligonucleotide
ucugccaggcaguauuugc

SEQ ID NO: 1825337 - RNA, 19 nt, Artificial Sequence
  Description of Artificial Sequence: Synthetic oligonucleotide
uagagugucaggaugucuu

SEQ ID NO: 1825338 - RNA, 19 nt, Artificial Sequence
  Description of Artificial Sequence: Synthetic oligonucleotide
uuagagcugacauccgcca

SEQ ID NO: 1825339 - RNA, 19 nt, Artificial Sequence
  Description of Artificial Sequence: Synthetic oligonucleotide
auuguagccgagcucggug

SEQ ID NO: 1825340 - RNA, 19 nt, Artificial Sequence
  Description of Artificial Sequence: Synthetic oligonucleotide
ugcauacagguugacaaug

SEQ ID NO: 1825341 - RNA, 19 nt, Artificial Sequence
  Description of Artificial Sequence: Synthetic oligonucleotide
accagaaacgccucccaag

SEQ ID NO: 1825342 - RNA, 19 nt, Artificial Sequence
  Description of Artificial Sequence: Synthetic oligonucleotide
gacucggccaagcacgaag

SEQ ID NO: 1825343 - RNA, 19 nt, Artificial Sequence
  Description of Artificial Sequence: Synthetic oligonucleotide
uuuagaguggcuggguaga

SEQ ID NO: 1825344 - RNA, 19 nt, Artificial Sequence
  Description of Artificial Sequence: Synthetic oligonucleotide
ugggcggcgacccacgcag

SEQ ID NO: 1825345 - RNA, 19 nt, Artificial Sequence
  Description of Artificial Sequence: Synthetic oligonucleotide
aauggccgggaugaagagg

SEQ ID NO: 1825346 - RNA, 19 nt, Artificial Sequence
  Description of Artificial Sequence: Synthetic oligonucleotide
ugaggaaacugcuggaauu

SEQ ID NO: 1825347 - RNA, 19 nt, Artificial Sequence
  Description of Artificial Sequence: Synthetic oligonucleotide
aggauaggccaaucucagc

SEQ ID NO: 1825348 - RNA, 19 nt, Artificial Sequence
  Description of Artificial Sequence: Synthetic oligonucleotide
ggaaaagagagcucccugc

SEQ ID NO: 1825349 - RNA, 19 nt, Artificial Sequence
  Description of Artificial Sequence: Synthetic oligonucleotide
acgaagauggccaaugagu

SEQ ID NO: 1825350 - RNA, 19 nt, Artificial Sequence
  Description of Artificial Sequence: Synthetic oligonucleotide
aauucaggguguggauugg

SEQ ID NO: 1825351 - RNA, 19 nt, Artificial Sequence
  Description of Artificial Sequence: Synthetic oligonucleotide
aaagcaacccauacccugu

SEQ ID NO: 1825352 - RNA, 19 nt, Artificial Sequence
  Description of Artificial Sequence: Synthetic oligonucleotide
aaaagccuggcggacuuug

SEQ ID NO: 1825353 - RNA, 19 nt, Artificial Sequence
  Description of Artificial Sequence: Synthetic oligonucleotide
aguacagcgcuauaugcuu

SEQ ID NO: 1825354 - RNA, 19 nt, Artificial Sequence
  Description of Artificial Sequence: Synthetic oligonucleotide
caggaaaagcaacccauac

SEQ ID NO: 1825355 - RNA, 19 nt, Artificial Sequence
  Description of Artificial Sequence: Synthetic oligonucleotide
ggccaagcuauucacacag

SEQ ID NO: 1825356 - RNA, 19 nt, Artificial Sequence
  Description of Artificial Sequence: Synthetic oligonucleotide
uuguagccgagcucggugc

SEQ ID NO: 1825357 - RNA, 19 nt, Artificial Sequence
  Description of Artificial Sequence: Synthetic oligonucleotide
ccggaggccaucaacaugg

SEQ ID NO: 1825358 - RNA, 19 nt, Artificial Sequence
  Description of Artificial Sequence: Synthetic oligonucleotide
cacagaggcaaagcuagcg

SEQ ID NO: 1825359 - RNA, 19 nt, Artificial Sequence
  Description of Artificial Sequence: Synthetic oligonucleotide
acccaaaagggauuggcau

SEQ ID NO: 1825360 - RNA, 19 nt, Artificial Sequence
  Description of Artificial Sequence: Synthetic oligonucleotide
acccaaucagaauggccgg

SEQ ID NO: 1825361 - RNA, 19 nt, Artificial Sequence
  Description of Artificial Sequence: Synthetic oligonucleotide
gaacgucugaggaaacugc

SEQ ID NO: 1825362 - RNA, 19 nt, Artificial Sequence
  Description of Artificial Sequence: Synthetic oligonucleotide
gagcgugaaaagccuggcg

SEQ ID NO: 1825363 - RNA, 19 nt, Artificial Sequence
  Description of Artificial Sequence: Synthetic oligonucleotide
aagucgagggucuccacuu

SEQ ID NO: 1825364 - RNA, 19 nt, Artificial Sequence
  Description of Artificial Sequence: Synthetic oligonucleotide
cacgaagaagccgacgugc

SEQ ID NO: 1825365 - RNA, 19 nt, Artificial Sequence
  Description of Artificial Sequence: Synthetic oligonucleotide
guuagagcugacauccgcc

SEQ ID NO: 1825366 - RNA, 19 nt, Artificial Sequence
  Description of Artificial Sequence: Synthetic oligonucleotide
acuaccaugcccaggauau

SEQ ID NO: 1825367 - RNA, 19 nt, Artificial Sequence
  Description of Artificial Sequence: Synthetic oligonucleotide
gaaggugcgacugugguua

SEQ ID NO: 1825368 - RNA, 19 nt, Artificial Sequence
  Description of Artificial Sequence: Synthetic oligonucleotide
cuuccuggacuucucuggg

SEQ ID NO: 1825369 - RNA, 19 nt, Artificial Sequence
  Description of Artificial Sequence: Synthetic oligonucleotide
uguggguccaccuguuccu

SEQ ID NO: 1825370 - RNA, 19 nt, Artificial Sequence
  Description of Artificial Sequence: Synthetic oligonucleotide
ugagccccaaagugcacag

SEQ ID NO: 1825371 - RNA, 19 nt, Artificial Sequence
  Description of Artificial Sequence: Synthetic oligonucleotide
acgaccuggagcagcaggc

SEQ ID NO: 1825372 - RNA, 19 nt, Artificial Sequence
  Description of Artificial Sequence: Synthetic oligonucleotide
agagcugacauccgccaca

SEQ ID NO: 1825373 - RNA, 19 nt, Artificial Sequence
  Description of Artificial Sequence: Synthetic oligonucleotide
gauaggccaaucucagcca

SEQ ID NO: 1825374 - RNA, 19 nt, Artificial Sequence
  Description of Artificial Sequence: Synthetic oligonucleotide
cauacggaaggugcgacug

SEQ ID NO: 1825375 - RNA, 19 nt, Artificial Sequence
  Description of Artificial Sequence: Synthetic oligonucleotide
ugaaaagccuggcggacuu

SEQ ID NO: 1825376 - RNA, 19 nt, Artificial Sequence
  Description of Artificial Sequence: Synthetic oligonucleotide
gaugacagguguagugacc

SEQ ID NO: 1825377 - RNA, 19 nt, Artificial Sequence
  Description of Artificial Sequence: Synthetic oligonucleotide
agagugucaggaugucuug

SEQ ID NO: 1825378 - RNA, 19 nt, Artificial Sequence
  Description of Artificial Sequence: Synthetic oligonucleotide
gaauggccgggaugaagag

SEQ ID NO: 1825379 - RNA, 19 nt, Artificial Sequence
  Description of Artificial Sequence: Synthetic oligonucleotide
acagguguagugaccaaag

SEQ ID NO: 1825380 - RNA, 19 nt, Artificial Sequence
  Description of Artificial Sequence: Synthetic oligonucleotide
cuauucacacaggccaccg

SEQ ID NO: 1825381 - RNA, 19 nt, Artificial Sequence
  Description of Artificial Sequence: Synthetic oligonucleotide
aacgucugaggaaacugcu

SEQ ID NO: 1825382 - RNA, 19 nt, Artificial Sequence
  Description of Artificial Sequence: Synthetic oligonucleotide
aagucccaccagaaacgcc

SEQ ID NO: 1825383 - RNA, 19 nt, Artificial Sequence
  Description of Artificial Sequence: Synthetic oligonucleotide
uggugagguagguuaggug

SEQ ID NO: 1825384 - RNA, 19 nt, Artificial Sequence
  Description of Artificial Sequence: Synthetic oligonucleotide
auacagguugacaauggcu

SEQ ID NO: 1825385 - RNA, 19 nt, Artificial Sequence
  Description of Artificial Sequence: Synthetic oligonucleotide
gucuugagccccaaagugc

SEQ ID NO: 1825386 - RNA, 19 nt, Artificial Sequence
  Description of Artificial Sequence: Synthetic oligonucleotide
aagcaacccauacccugug

SEQ ID NO: 1825387 - RNA, 19 nt, Artificial Sequence
  Description of Artificial Sequence: Synthetic oligonucleotide
gacgugcaguuguagcugc

SEQ ID NO: 1825388 - RNA, 19 nt, Artificial Sequence
  Description of Artificial Sequence: Synthetic oligonucleotide
uggaccagaaaagucccac

SEQ ID NO: 1825389 - RNA, 19 nt, Artificial Sequence
  Description of Artificial Sequence: Synthetic oligonucleotide
ccuagaagggcacagagga

SEQ ID NO: 1825390 - RNA, 19 nt, Artificial Sequence
  Description of Artificial Sequence: Synthetic oligonucleotide
gaggaaacugcuggaauuc

SEQ ID NO: 1825391 - RNA, 19 nt, Artificial Sequence
  Description of Artificial Sequence: Synthetic oligonucleotide
agguagguuaggugcuggg

SEQ ID NO: 1825392 - RNA, 19 nt, Artificial Sequence
  Description of Artificial Sequence: Synthetic oligonucleotide
auucaggguguggauuggc

SEQ ID NO: 1825393 - RNA, 19 nt, Artificial Sequence
  Description of Artificial Sequence: Synthetic oligonucleotide
gagaguugaagaugccgga

SEQ ID NO: 1825394 - RNA, 19 nt, Artificial Sequence
  Description of Artificial Sequence: Synthetic oligonucleotide
aagaagccgacgugcaguu

SEQ ID NO: 1825395 - RNA, 19 nt, Artificial Sequence
  Description of Artificial Sequence: Synthetic oligonucleotide
uauucacacaggccaccga

SEQ ID NO: 1825396 - RNA, 19 nt, Artificial Sequence
  Description of Artificial Sequence: Synthetic oligonucleotide
guggcggugccauuguagc

SEQ ID NO: 1825397 - RNA, 19 nt, Artificial Sequence
  Description of Artificial Sequence: Synthetic oligonucleotide
guacaccacgaccuggagc

SEQ ID NO: 1825398 - RNA, 19 nt, Artificial Sequence
  Description of Artificial Sequence: Synthetic oligonucleotide
cacaccaaugcacgcuucc

SEQ ID NO: 1825399 - RNA, 19 nt, Artificial Sequence
  Description of Artificial Sequence: Synthetic oligonucleotide
ggccauugaagucuccuag

SEQ ID NO: 1825400 - RNA, 19 nt, Artificial Sequence
  Description of Artificial Sequence: Synthetic oligonucleotide
cucccaaguucauguagag

SEQ ID NO: 1825401 - RNA, 19 nt, Artificial Sequence
  Description of Artificial Sequence: Synthetic oligonucleotide
uggcauaacccugggcccg

SEQ ID NO: 1825402 - RNA, 19 nt, Artificial Sequence
  Description of Artificial Sequence: Synthetic oligonucleotide
uccucauggccucuggcua

SEQ ID NO: 1825403 - RNA, 19 nt, Artificial Sequence
  Description of Artificial Sequence: Synthetic oligonucleotide
agcuauucacacaggccac

SEQ ID NO: 1825404 - RNA, 19 nt, Artificial Sequence
  Description of Artificial Sequence: Synthetic oligonucleotide
caacccauacccugugaac

SEQ ID NO: 1825405 - RNA, 19 nt, Artificial Sequence
  Description of Artificial Sequence: Synthetic oligonucleotide
uggugguagcaaaugcaaa

SEQ ID NO: 1825406 - RNA, 19 nt, Artificial Sequence
  Description of Artificial Sequence: Synthetic oligonucleotide
gcgugcucagcucauagag

SEQ ID NO: 1825407 - RNA, 19 nt, Artificial Sequence
  Description of Artificial Sequence: Synthetic oligonucleotide
gguuagagcugacauccgc

SEQ ID NO: 1825408 - RNA, 19 nt, Artificial Sequence
  Description of Artificial Sequence: Synthetic oligonucleotide
auggccgggaugaagagga

SEQ ID NO: 1825409 - RNA, 19 nt, Artificial Sequence
  Description of Artificial Sequence: Synthetic oligonucleotide
agagagaguugaagaugcc

SEQ ID NO: 1825410 - RNA, 19 nt, Artificial Sequence
  Description of Artificial Sequence: Synthetic oligonucleotide
caccacaaagauguacacc

SEQ ID NO: 1825411 - RNA, 19 nt, Artificial Sequence
  Description of Artificial Sequence: Synthetic oligonucleotide
ggguagagagaguugaaga

SEQ ID NO: 1825412 - RNA, 19 nt, Artificial Sequence
  Description of Artificial Sequence: Synthetic oligonucleotide
aggacccaaucagaauggc

SEQ ID NO: 1825413 - RNA, 19 nt, Artificial Sequence
  Description of Artificial Sequence: Synthetic oligonucleotide
auagaugggauccgcgcuu

SEQ ID NO: 1825414 - RNA, 19 nt, Artificial Sequence
  Description of Artificial Sequence: Synthetic oligonucleotide
gaaacgccucccaaguuca

SEQ ID NO: 1825415 - RNA, 19 nt, Artificial Sequence
  Description of Artificial Sequence: Synthetic oligonucleotide
cuugcucaccagcuuggag

SEQ ID NO: 1825416 - RNA, 19 nt, Artificial Sequence
  Description of Artificial Sequence: Synthetic oligonucleotide
uuuggcuccuucacccaaa

SEQ ID NO: 1825417 - RNA, 19 nt, Artificial Sequence
  Description of Artificial Sequence: Synthetic oligonucleotide
caagagaggacagcaccag

SEQ ID NO: 1825418 - RNA, 19 nt, Artificial Sequence
  Description of Artificial Sequence: Synthetic oligonucleotide
uggaauucaggguguggau

SEQ ID NO: 1825419 - RNA, 19 nt, Artificial Sequence
  Description of Artificial Sequence: Synthetic oligonucleotide
uugagccccaaagugcaca

SEQ ID NO: 1825420 - RNA, 19 nt, Artificial Sequence
  Description of Artificial Sequence: Synthetic oligonucleotide
caaugcacgcuuccagcag

SEQ ID NO: 1825421 - RNA, 19 nt, Artificial Sequence
  Description of Artificial Sequence: Synthetic oligonucleotide
guggauuggccuucuccag

SEQ ID NO: 1825422 - RNA, 19 nt, Artificial Sequence
  Description of Artificial Sequence: Synthetic oligonucleotide
ggaaagccccuucaugaag

SEQ ID NO: 1825423 - RNA, 19 nt, Artificial Sequence
  Description of Artificial Sequence: Synthetic oligonucleotide
aaagccuggcggacuuugg

SEQ ID NO: 1825424 - RNA, 19 nt, Artificial Sequence
  Description of Artificial Sequence: Synthetic oligonucleotide
caaagacuaccaugcccag

SEQ ID NO: 1825425 - RNA, 19 nt, Artificial Sequence
  Description of Artificial Sequence: Synthetic oligonucleotide
gcauagaugggauccgcgc

SEQ ID NO: 1825426 - RNA, 19 nt, Artificial Sequence
  Description of Artificial Sequence: Synthetic oligonucleotide
gaagccgacgugcaguugu

SEQ ID NO: 1825427 - RNA, 19 nt, Artificial Sequence
  Description of Artificial Sequence: Synthetic oligonucleotide
agguuaggugcugggcugc

SEQ ID NO: 1825428 - RNA, 19 nt, Artificial Sequence
  Description of Artificial Sequence: Synthetic oligonucleotide
cuucacccaaaagggauug

SEQ ID NO: 1825429 - RNA, 19 nt, Artificial Sequence
  Description of Artificial Sequence: Synthetic oligonucleotide
cauacccugugaacaugag

SEQ ID NO: 1825430 - RNA, 19 nt, Artificial Sequence
  Description of Artificial Sequence: Synthetic oligonucleotide
ugaucacaacgaagauggc

SEQ ID NO: 1825431 - RNA, 19 nt, Artificial Sequence
  Description of Artificial Sequence: Synthetic oligonucleotide
uagagcugacauccgccac

SEQ ID NO: 1825432 - RNA, 19 nt, Artificial Sequence
  Description of Artificial Sequence: Synthetic oligonucleotide
uucacccaaaagggauugg

SEQ ID NO: 1825433 - RNA, 19 nt, Artificial Sequence
  Description of Artificial Sequence: Synthetic oligonucleotide
uggggcugcgacugcauac

SEQ ID NO: 1825434 - RNA, 19 nt, Artificial Sequence
  Description of Artificial Sequence: Synthetic oligonucleotide
agucgagggucuccacuuc

SEQ ID NO: 1825435 - RNA, 19 nt, Artificial Sequence
  Description of Artificial Sequence: Synthetic oligonucleotide
aacgccucccaaguucaug

SEQ ID NO: 1825436 - RNA, 19 nt, Artificial Sequence
  Description of Artificial Sequence: Synthetic oligonucleotide
augggauccgcgcuuuggu

SEQ ID NO: 1825437 - RNA, 19 nt, Artificial Sequence
  Description of Artificial Sequence: Synthetic oligonucleotide
guagguuaggugcugggcu

SEQ ID NO: 1825438 - RNA, 19 nt, Artificial Sequence
  Description of Artificial Sequence: Synthetic oligonucleotide
cagagccauagccaacaag

SEQ ID NO: 1825439 - RNA, 19 nt, Artificial Sequence
  Description of Artificial Sequence: Synthetic oligonucleotide
gcacgcuuccagcagagcc

SEQ ID NO: 1825440 - RNA, 19 nt, Artificial Sequence
  Description of Artificial Sequence: Synthetic oligonucleotide
ccgaggaaaagagagcucc

SEQ ID NO: 1825441 - RNA, 19 nt, Artificial Sequence
  Description of Artificial Sequence: Synthetic oligonucleotide
cuggaauucagggugugga

SEQ ID NO: 1825442 - RNA, 19 nt, Artificial Sequence
  Description of Artificial Sequence: Synthetic oligonucleotide
aguuuuagaguggcugggu

SEQ ID NO: 1825443 - RNA, 19 nt, Artificial Sequence
  Description of Artificial Sequence: Synthetic oligonucleotide
gggauuggcauaacccugg

SEQ ID NO: 1825444 - RNA, 19 nt, Artificial Sequence
  Description of Artificial Sequence: Synthetic oligonucleotide
agaggggcgugcucagcuc

SEQ ID NO: 1825445 - RNA, 19 nt, Artificial Sequence
  Description of Artificial Sequence: Synthetic oligonucleotide
auagagugucaggaugucu

SEQ ID NO: 1825446 - RNA, 19 nt, Artificial Sequence
  Description of Artificial Sequence: Synthetic oligonucleotide
uggcccggaugacaggugu

SEQ ID NO: 1825447 - RNA, 19 nt, Artificial Sequence
  Description of Artificial Sequence: Synthetic oligonucleotide
ggugcgacugugguuagag

SEQ ID NO: 1825448 - RNA, 19 nt, Artificial Sequence
  Description of Artificial Sequence: Synthetic oligonucleotide
uccgccacagaggcaaagc

SEQ ID NO: 1825449 - RNA, 19 nt, Artificial Sequence
  Description of Artificial Sequence: Synthetic oligonucleotide
agggauuggcauaacccug

SEQ ID NO: 1825450 - RNA, 19 nt, Artificial Sequence
  Description of Artificial Sequence: Synthetic oligonucleotide
aaggugcgacugugguuag

SEQ ID NO: 1825451 - RNA, 19 nt, Artificial Sequence
  Description of Artificial Sequence: Synthetic oligonucleotide
ugagguagguuaggugcug

SEQ ID NO: 1825452 - RNA, 19 nt, Artificial Sequence
  Description of Artificial Sequence: Synthetic oligonucleotide
uggccucuggcuagaucag

SEQ ID NO: 1825453 - RNA, 19 nt, Artificial Sequence
  Description of Artificial Sequence: Synthetic oligonucleotide
gcauacagguugacaaugg

SEQ ID NO: 1825454 - RNA, 19 nt, Artificial Sequence
  Description of Artificial Sequence: Synthetic oligonucleotide
agugggcggcgacccacgc

SEQ ID NO: 1825455 - RNA, 19 nt, Artificial Sequence
  Description of Artificial Sequence: Synthetic oligonucleotide
agccuggcggacuuuggcu

SEQ ID NO: 1825456 - RNA, 19 nt, Artificial Sequence
  Description of Artificial Sequence: Synthetic oligonucleotide
cuccgacuugcucaccagc

SEQ ID NO: 1825457 - RNA, 19 nt, Artificial Sequence
  Description of Artificial Sequence: Synthetic oligonucleotide
accagcagugggcggcgac

SEQ ID NO: 1825458 - RNA, 19 nt, Artificial Sequence
  Description of Artificial Sequence: Synthetic oligonucleotide
gaaagccccuucaugaagu

SEQ ID NO: 1825459 - RNA, 19 nt, Artificial Sequence
  Description of Artificial Sequence: Synthetic oligonucleotide
uagugaccaaagacaggaa

SEQ ID NO: 1825460 - RNA, 19 nt, Artificial Sequence
  Description of Artificial Sequence: Synthetic oligonucleotide
cacccaaaagggauuggca

SEQ ID NO: 1825461 - RNA, 19 nt, Artificial Sequence
  Description of Artificial Sequence: Synthetic oligonucleotide
acugugguuagagcugaca

SEQ ID NO: 1825462 - RNA, 19 nt, Artificial Sequence
  Description of Artificial Sequence: Synthetic oligonucleotide
gucuccuagaagggcacag

SEQ ID NO: 1825463 - RNA, 19 nt, Artificial Sequence
  Description of Artificial Sequence: Synthetic oligonucleotide
agcuuggcccggaugacag

SEQ ID NO: 1825464 - RNA, 19 nt, Artificial Sequence
  Description of Artificial Sequence: Synthetic oligonucleotide
gguggaccagaaaaguccc

SEQ ID NO: 1825465 - RNA, 19 nt, Artificial Sequence
  Description of Artificial Sequence: Synthetic oligonucleotide
cucggugcugaccggugcc

SEQ ID NO: 1825466 - RNA, 19 nt, Artificial Sequence
  Description of Artificial Sequence: Synthetic oligonucleotide
gguucccgcacguuccccg

SEQ ID NO: 1825467 - RNA, 19 nt, Artificial Sequence
  Description of Artificial Sequence: Synthetic oligonucleotide
augagggguguggugguag

SEQ ID NO: 1825468 - RNA, 19 nt, Artificial Sequence
  Description of Artificial Sequence: Synthetic oligonucleotide
gacuaccaugcccaggaua

SEQ ID NO: 1825469 - RNA, 19 nt, Artificial Sequence
  Description of Artificial Sequence: Synthetic oligonucleotide
caaagcuagcggccaggag

SEQ ID NO: 1825470 - RNA, 19 nt, Artificial Sequence
  Description of Artificial Sequence: Synthetic oligonucleotide
uuggcuccuucacccaaaa

SEQ ID NO: 1825471 - RNA, 19 nt, Artificial Sequence
  Description of Artificial Sequence: Synthetic oligonucleotide
ggaccagaaaagucccacc

SEQ ID NO: 1825472 - RNA, 19 nt, Artificial Sequence
  Description of Artificial Sequence: Synthetic oligonucleotide
acccauacccugugaacau

SEQ ID NO: 1825473 - RNA, 19 nt, Artificial Sequence
  Description of Artificial Sequence: Synthetic oligonucleotide
auacggaaggugcgacugu

SEQ ID NO: 1825474 - RNA, 19 nt, Artificial Sequence
  Description of Artificial Sequence: Synthetic oligonucleotide
ccaaagacaggaaaagcaa

SEQ ID NO: 1825475 - RNA, 19 nt, Artificial Sequence
  Description of Artificial Sequence: Synthetic oligonucleotide
guucccgcacguuccccgg

SEQ ID NO: 1825476 - RNA, 19 nt, Artificial Sequence
  Description of Artificial Sequence: Synthetic oligonucleotide
caagcacgaagaagccgac

SEQ ID NO: 1825477 - RNA, 19 nt, Artificial Sequence
  Description of Artificial Sequence: Synthetic oligonucleotide
gcugcgacugcauacaggu

SEQ ID NO: 1825478 - RNA, 19 nt, Artificial Sequence
  Description of Artificial Sequence: Synthetic oligonucleotide
gacccacgcagucacucca

SEQ ID NO: 1825479 - RNA, 19 nt, Artificial Sequence
  Description of Artificial Sequence: Synthetic oligonucleotide
gguagagagaguugaagau

SEQ ID NO: 1825480 - RNA, 19 nt, Artificial Sequence
  Description of Artificial Sequence: Synthetic oligonucleotide
gacagguguagugaccaaa

SEQ ID NO: 1825481 - RNA, 19 nt, Artificial Sequence
  Description of Artificial Sequence: Synthetic oligonucleotide
ugacaauggcuuggugaug

SEQ ID NO: 1825482 - RNA, 19 nt, Artificial Sequence
  Description of Artificial Sequence: Synthetic oligonucleotide
gguagguuaggugcugggc

SEQ ID NO: 1825483 - RNA, 19 nt, Artificial Sequence
  Description of Artificial Sequence: Synthetic oligonucleotide
ggauccgcgcuuugguucc

SEQ ID NO: 1825484 - RNA, 19 nt, Artificial Sequence
  Description of Artificial Sequence: Synthetic oligonucleotide
caggcaguauuugcauuag

SEQ ID NO: 1825485 - RNA, 19 nt, Artificial Sequence
  Description of Artificial Sequence: Synthetic oligonucleotide
aggaacgucugaggaaacu

SEQ ID NO: 1825486 - RNA, 19 nt, Artificial Sequence
  Description of Artificial Sequence: Synthetic oligonucleotide
caacauggccaagcuauuc

SEQ ID NO: 1825487 - RNA, 19 nt, Artificial Sequence
  Description of Artificial Sequence: Synthetic oligonucleotide
accgaggaaaagagagcuc

SEQ ID NO: 1825488 - RNA, 19 nt, Artificial Sequence
  Description of Artificial Sequence: Synthetic oligonucleotide
ugucugccaggcaguauuu

SEQ ID NO: 1825489 - RNA, 19 nt, Artificial Sequence
  Description of Artificial Sequence: Synthetic oligonucleotide
gcuauaugcuuccuggacu

SEQ ID NO: 1825490 - RNA, 19 nt, Artificial Sequence
  Description of Artificial Sequence: Synthetic oligonucleotide
gcuagaucaggaacgucug

SEQ ID NO: 1825491 - RNA, 19 nt, Artificial Sequence
  Description of Artificial Sequence: Synthetic oligonucleotide
agcaacccauacccuguga

SEQ ID NO: 1825492 - RNA, 19 nt, Artificial Sequence
  Description of Artificial Sequence: Synthetic oligonucleotide
gccgggaugaagaggaggc

SEQ ID NO: 1825493 - RNA, 19 nt, Artificial Sequence
  Description of Artificial Sequence: Synthetic oligonucleotide
gcuggguagagagaguuga

SEQ ID NO: 1825494 - RNA, 19 nt, Artificial Sequence
  Description of Artificial Sequence: Synthetic oligonucleotide
gccucccaaguucauguag

SEQ ID NO: 1825495 - RNA, 19 nt, Artificial Sequence
  Description of Artificial Sequence: Synthetic oligonucleotide
ucccgcacguuccccggug

SEQ ID NO: 1825496 - RNA, 19 nt, Artificial Sequence
  Description of Artificial Sequence: Synthetic oligonucleotide
cauagaugggauccgcgcu

SEQ ID NO: 1825497 - RNA, 19 nt, Artificial Sequence
  Description of Artificial Sequence: Synthetic oligonucleotide
cuauaugcuuccuggacuu

SEQ ID NO: 1825498 - RNA, 19 nt, Artificial Sequence
  Description of Artificial Sequence: Synthetic oligonucleotide
cuagaucaggaacgucuga

SEQ ID NO: 1825499 - RNA, 19 nt, Artificial Sequence
  Description of Artificial Sequence: Synthetic oligonucleotide
caacgaagauggccaauga

SEQ ID NO: 1825500 - RNA, 19 nt, Artificial Sequence
  Description of Artificial Sequence: Synthetic oligonucleotide
cuccuucacccaaaaggga

SEQ ID NO: 1825501 - RNA, 19 nt, Artificial Sequence
  Description of Artificial Sequence: Synthetic oligonucleotide
gguggcggugccauuguag

SEQ ID NO: 1825502 - RNA, 19 nt, Artificial Sequence
  Description of Artificial Sequence: Synthetic oligonucleotide
acgucugaggaaacugcug

SEQ ID NO: 1825503 - RNA, 19 nt, Artificial Sequence
  Description of Artificial Sequence: Synthetic oligonucleotide
ggcuagaucaggaacgucu

SEQ ID NO: 1825504 - RNA, 19 nt, Artificial Sequence
  Description of Artificial Sequence: Synthetic oligonucleotide
gggauccgcgcuuugguuc

SEQ ID NO: 1825505 - RNA, 19 nt, Artificial Sequence
  Description of Artificial Sequence: Synthetic oligonucleotide
cauaacccugggcccggag

SEQ ID NO: 1825506 - RNA, 19 nt, Artificial Sequence
  Description of Artificial Sequence: Synthetic oligonucleotide
acggaaggugcgacugugg

SEQ ID NO: 1825507 - RNA, 19 nt, Artificial Sequence
  Description of Artificial Sequence: Synthetic oligonucleotide
ccggaugacagguguagug

SEQ ID NO: 1825508 - RNA, 19 nt, Artificial Sequence
  Description of Artificial Sequence: Synthetic oligonucleotide
uagccgagcucggugcuga

SEQ ID NO: 1825509 - RNA, 19 nt, Artificial Sequence
  Description of Artificial Sequence: Synthetic oligonucleotide
ggacccaaucagaauggcc

SEQ ID NO: 1825510 - RNA, 19 nt, Artificial Sequence
  Description of Artificial Sequence: Synthetic oligonucleotide
ugacagguguagugaccaa

SEQ ID NO: 1825511 - RNA, 19 nt, Artificial Sequence
  Description of Artificial Sequence: Synthetic oligonucleotide
ucuggggcugcgacugcau

SEQ ID NO: 1825512 - RNA, 19 nt, Artificial Sequence
  Description of Artificial Sequence: Synthetic oligonucleotide
cccgagaaggcuugccagg

SEQ ID NO: 1825513 - RNA, 19 nt, Artificial Sequence
  Description of Artificial Sequence: Synthetic oligonucleotide
ugggauccgcgcuuugguu

SEQ ID NO: 1825514 - RNA, 19 nt, Artificial Sequence
  Description of Artificial Sequence: Synthetic oligonucleotide
gccgacgugcaguuguagc

SEQ ID NO: 1825515 - RNA, 19 nt, Artificial Sequence
  Description of Artificial Sequence: Synthetic oligonucleotide
acucggccaagcacgaaga

SEQ ID NO: 1825516 - RNA, 19 nt, Artificial Sequence
  Description of Artificial Sequence: Synthetic oligonucleotide
gccaagcacgaagaagccg

SEQ ID NO: 1825517 - RNA, 19 nt, Artificial Sequence
  Description of Artificial Sequence: Synthetic oligonucleotide
ggagucccagcagaggggc

SEQ ID NO: 1825518 - RNA, 19 nt, Artificial Sequence
  Description of Artificial Sequence: Synthetic oligonucleotide
cagcaggccaagagaggac

SEQ ID NO: 1825519 - RNA, 19 nt, Artificial Sequence
  Description of Artificial Sequence: Synthetic oligonucleotide
cagugggcggcgacccacg

SEQ ID NO: 1825520 - RNA, 19 nt, Artificial Sequence
  Description of Artificial Sequence: Synthetic oligonucleotide
guggagcgugaaaagccug

SEQ ID NO: 1825521 - RNA, 19 nt, Artificial Sequence
  Description of Artificial Sequence: Synthetic oligonucleotide
cacgcagucacuccaggcu

SEQ ID NO: 1825522 - RNA, 19 nt, Artificial Sequence
  Description of Artificial Sequence: Synthetic oligonucleotide
gccauugaagucuccuaga

SEQ ID NO: 1825523 - RNA, 19 nt, Artificial Sequence
  Description of Artificial Sequence: Synthetic oligonucleotide
gguugacaauggcuuggug

SEQ ID NO: 1825524 - RNA, 19 nt, Artificial Sequence
  Description of Artificial Sequence: Synthetic oligonucleotide
gcagcaggccaagagagga

SEQ ID NO: 1825525 - RNA, 19 nt, Artificial Sequence
  Description of Artificial Sequence: Synthetic oligonucleotide
gcaacccauacccugugaa

SEQ ID NO: 1825526 - RNA, 19 nt, Artificial Sequence
  Description of Artificial Sequence: Synthetic oligonucleotide
guuaggugcugggcugcag

SEQ ID NO: 1825527 - RNA, 19 nt, Artificial Sequence
  Description of Artificial Sequence: Synthetic oligonucleotide
guacagcgcuauaugcuuc

SEQ ID NO: 1825528 - RNA, 19 nt, Artificial Sequence
  Description of Artificial Sequence: Synthetic oligonucleotide
uccgcgcuuugguucccgc

SEQ ID NO: 1825529 - RNA, 19 nt, Artificial Sequence
  Description of Artificial Sequence: Synthetic oligonucleotide
cuuuggcuccuucacccaa

SEQ ID NO: 1825530 - RNA, 19 nt, Artificial Sequence
  Description of Artificial Sequence: Synthetic oligonucleotide
caguuguagcugcaccaca

SEQ ID NO: 1825531 - RNA, 19 nt, Artificial Sequence
  Description of Artificial Sequence: Synthetic oligonucleotide
gugccauuguagccgagcu

SEQ ID NO: 1825532 - RNA, 19 nt, Artificial Sequence
  Description of Artificial Sequence: Synthetic oligonucleotide
gagucccagcagaggggcg

SEQ ID NO: 1825533 - RNA, 19 nt, Artificial Sequence
  Description of Artificial Sequence: Synthetic oligonucleotide
gcacgaagaagccgacgug

SEQ ID NO: 1825534 - RNA, 19 nt, Artificial Sequence
  Description of Artificial Sequence: Synthetic oligonucleotide
gcgugaaaagccuggcgga

SEQ ID NO: 1825535 - RNA, 19 nt, Artificial Sequence
  Description of Artificial Sequence: Synthetic oligonucleotide
ggccgggaugaagaggagg

SEQ ID NO: 1825536 - RNA, 19 nt, Artificial Sequence
  Description of Artificial Sequence: Synthetic oligonucleotide
ccucauggccucuggcuag

SEQ ID NO: 1825537 - RNA, 19 nt, Artificial Sequence
  Description of Artificial Sequence: Synthetic oligonucleotide
ggagcgugaaaagccuggc

SEQ ID NO: 1825538 - RNA, 19 nt, Artificial Sequence
  Description of Artificial Sequence: Synthetic oligonucleotide
gcucagcucauagaguguc

SEQ ID NO: 1825539 - RNA, 19 nt, Artificial Sequence
  Description of Artificial Sequence: Synthetic oligonucleotide
gcgacugugguuagagcug

SEQ ID NO: 1825540 - RNA, 19 nt, Artificial Sequence
  Description of Artificial Sequence: Synthetic oligonucleotide
agggguguggugguagcaa

SEQ ID NO: 1825541 - RNA, 19 nt, Artificial Sequence
  Description of Artificial Sequence: Synthetic oligonucleotide
caucaacauggccaagcua

SEQ ID NO: 1825542 - RNA, 19 nt, Artificial Sequence
  Description of Artificial Sequence: Synthetic oligonucleotide
ccucccaaguucauguaga

SEQ ID NO: 1825543 - RNA, 19 nt, Artificial Sequence
  Description of Artificial Sequence: Synthetic oligonucleotide
gcgcuuugguucccgcacg

SEQ ID NO: 1825544 - RNA, 19 nt, Artificial Sequence
  Description of Artificial Sequence: Synthetic oligonucleotide
ccacaaagauguacaccac

SEQ ID NO: 1825545 - RNA, 19 nt, Artificial Sequence
  Description of Artificial Sequence: Synthetic oligonucleotide
ccaaugcacgcuuccagca

SEQ ID NO: 1825546 - RNA, 19 nt, Artificial Sequence
  Description of Artificial Sequence: Synthetic oligonucleotide
gcccaggauauuugaagga

SEQ ID NO: 1825547 - RNA, 19 nt, Artificial Sequence
  Description of Artificial Sequence: Synthetic oligonucleotide
gcacguuccccgguggcgg

SEQ ID NO: 1825548 - RNA, 19 nt, Artificial Sequence
  Description of Artificial Sequence: Synthetic oligonucleotide
ggcugcgacugcauacagg

SEQ ID NO: 1825549 - RNA, 19 nt, Artificial Sequence
  Description of Artificial Sequence: Synthetic oligonucleotide
cgcuauaugcuuccuggac

SEQ ID NO: 1825550 - RNA, 19 nt, Artificial Sequence
  Description of Artificial Sequence: Synthetic oligonucleotide
guagaggguccagugggaa

SEQ ID NO: 1825551 - RNA, 19 nt, Artificial Sequence
  Description of Artificial Sequence: Synthetic oligonucleotide
ccccgagaaggcuugccag

SEQ ID NO: 1825552 - RNA, 19 nt, Artificial Sequence
  Description of Artificial Sequence: Synthetic oligonucleotide
uucccgcacguuccccggu

SEQ ID NO: 1825553 - RNA, 19 nt, Artificial Sequence
  Description of Artificial Sequence: Synthetic oligonucleotide
agcucccugcuccgacuug

SEQ ID NO: 1825554 - RNA, 19 nt, Artificial Sequence
  Description of Artificial Sequence: Synthetic oligonucleotide
ccgagaaggcuugccaggg

SEQ ID NO: 1825555 - RNA, 19 nt, Artificial Sequence
  Description of Artificial Sequence: Synthetic oligonucleotide
cgaggaaaagagagcuccc

SEQ ID NO: 1825556 - RNA, 19 nt, Artificial Sequence
  Description of Artificial Sequence: Synthetic oligonucleotide
ccauacccugugaacauga

SEQ ID NO: 1825557 - RNA, 19 nt, Artificial Sequence
  Description of Artificial Sequence: Synthetic oligonucleotide
agacuaccaugcccaggau

SEQ ID NO: 1825558 - RNA, 19 nt, Artificial Sequence
  Description of Artificial Sequence: Synthetic oligonucleotide
ggccaaugaguacagcgcu

SEQ ID NO: 1825559 - RNA, 19 nt, Artificial Sequence
  Description of Artificial Sequence: Synthetic oligonucleotide
cgaagauggccaaugagua

SEQ ID NO: 1825560 - RNA, 19 nt, Artificial Sequence
  Description of Artificial Sequence: Synthetic oligonucleotide
ccauugaagucuccuagaa

SEQ ID NO: 1825561 - RNA, 19 nt, Artificial Sequence
  Description of Artificial Sequence: Synthetic oligonucleotide
ugguucccgcacguucccc

SEQ ID NO: 1825562 - RNA, 19 nt, Artificial Sequence
  Description of Artificial Sequence: Synthetic oligonucleotide
agccgacgugcaguuguag

SEQ ID NO: 1825563 - RNA, 19 nt, Artificial Sequence
  Description of Artificial Sequence: Synthetic oligonucleotide
gggaaagccccuucaugaa

SEQ ID NO: 1825564 - RNA, 19 nt, Artificial Sequence
  Description of Artificial Sequence: Synthetic oligonucleotide
ccaaaagggauuggcauaa

SEQ ID NO: 1825565 - RNA, 19 nt, Artificial Sequence
  Description of Artificial Sequence: Synthetic oligonucleotide
agcuagcggccaggaggcc

SEQ ID NO: 1825566 - RNA, 19 nt, Artificial Sequence
  Description of Artificial Sequence: Synthetic oligonucleotide
gcuccgacuugcucaccag

SEQ ID NO: 1825567 - RNA, 19 nt, Artificial Sequence
  Description of Artificial Sequence: Synthetic oligonucleotide
gccggaggccaucaacaug

SEQ ID NO: 1825568 - RNA, 19 nt, Artificial Sequence
  Description of Artificial Sequence: Synthetic oligonucleotide
cggacuuuggcuccuucac

SEQ ID NO: 1825569 - RNA, 19 nt, Artificial Sequence
  Description of Artificial Sequence: Synthetic oligonucleotide
agaagccgacgugcaguug

SEQ ID NO: 1825570 - RNA, 19 nt, Artificial Sequence
  Description of Artificial Sequence: Synthetic oligonucleotide
gcccggaugacagguguag

SEQ ID NO: 1825571 - RNA, 19 nt, Artificial Sequence
  Description of Artificial Sequence: Synthetic oligonucleotide
guagccgagcucggugcug

SEQ ID NO: 1825572 - RNA, 19 nt, Artificial Sequence
  Description of Artificial Sequence: Synthetic oligonucleotide
uggcuagaucaggaacguc

SEQ ID NO: 1825573 - RNA, 19 nt, Artificial Sequence
  Description of Artificial Sequence: Synthetic oligonucleotide
cccaaucagaauggccggg

SEQ ID NO: 1825574 - RNA, 19 nt, Artificial Sequence
  Description of Artificial Sequence: Synthetic oligonucleotide
ggcauaacccugggcccgg

SEQ ID NO: 1825575 - RNA, 19 nt, Artificial Sequence
  Description of Artificial Sequence: Synthetic oligonucleotide
gccuggcggacuuuggcuc

SEQ ID NO: 1825576 - RNA, 19 nt, Artificial Sequence
  Description of Artificial Sequence: Synthetic oligonucleotide
auccgcgcuuugguucccg

SEQ ID NO: 1825577 - RNA, 19 nt, Artificial Sequence
  Description of Artificial Sequence: Synthetic oligonucleotide
gcggacuuuggcuccuuca

SEQ ID NO: 1825578 - RNA, 19 nt, Artificial Sequence
  Description of Artificial Sequence: Synthetic oligonucleotide
caccagaaacgccucccaa

SEQ ID NO: 1825579 - RNA, 19 nt, Artificial Sequence
  Description of Artificial Sequence: Synthetic oligonucleotide
cccaccagaaacgccuccc

SEQ ID NO: 1825580 - RNA, 19 nt, Artificial Sequence
  Description of Artificial Sequence: Synthetic oligonucleotide
ggccucuggcuagaucagg

SEQ ID NO: 1825581 - RNA, 19 nt, Artificial Sequence
  Description of Artificial Sequence: Synthetic oligonucleotide
aggacucggccaagcacga

SEQ ID NO: 1825582 - RNA, 19 nt, Artificial Sequence
  Description of Artificial Sequence: Synthetic oligonucleotide
gugaaaagccuggcggacu

SEQ ID NO: 1825583 - RNA, 19 nt, Artificial Sequence
  Description of Artificial Sequence: Synthetic oligonucleotide
gacugugguuagagcugac

SEQ ID NO: 1825584 - RNA, 19 nt, Artificial Sequence
  Description of Artificial Sequence: Synthetic oligonucleotide
uccccgguggcggugccau

SEQ ID NO: 1825585 - RNA, 19 nt, Artificial Sequence
  Description of Artificial Sequence: Synthetic oligonucleotide
aaacgccucccaaguucau

SEQ ID NO: 1825586 - RNA, 19 nt, Artificial Sequence
  Description of Artificial Sequence: Synthetic oligonucleotide
ggcccggagccaauggccc

SEQ ID NO: 1825587 - RNA, 19 nt, Artificial Sequence
  Description of Artificial Sequence: Synthetic oligonucleotide
aagccgacgugcaguugua

SEQ ID NO: 1825588 - RNA, 19 nt, Artificial Sequence
  Description of Artificial Sequence: Synthetic oligonucleotide
gauccgcgcuuugguuccc

SEQ ID NO: 1825589 - RNA, 19 nt, Artificial Sequence
  Description of Artificial Sequence: Synthetic oligonucleotide
agcggccaggaggccauug

SEQ ID NO: 1825590 - RNA, 19 nt, Artificial Sequence
  Description of Artificial Sequence: Synthetic oligonucleotide
cuucucuggggcugcgacu

SEQ ID NO: 1825591 - RNA, 19 nt, Artificial Sequence
  Description of Artificial Sequence: Synthetic oligonucleotide
gcgcuauaugcuuccugga

SEQ ID NO: 1825592 - RNA, 19 nt, Artificial Sequence
  Description of Artificial Sequence: Synthetic oligonucleotide
cccacgcagucacuccagg

SEQ ID NO: 1825593 - RNA, 19 nt, Artificial Sequence
  Description of Artificial Sequence: Synthetic oligonucleotide
ccagaaacgccucccaagu

SEQ ID NO: 1825594 - RNA, 19 nt, Artificial Sequence
  Description of Artificial Sequence: Synthetic oligonucleotide
caaugaguacagcgcuaua

SEQ ID NO: 1825595 - RNA, 19 nt, Artificial Sequence
  Description of Artificial Sequence: Synthetic oligonucleotide
gccauacggaaggugcgac

SEQ ID NO: 1825596 - RNA, 19 nt, Artificial Sequence
  Description of Artificial Sequence: Synthetic oligonucleotide
ggcuggguagagagaguug

SEQ ID NO: 1825597 - RNA, 19 nt, Artificial Sequence
  Description of Artificial Sequence: Synthetic oligonucleotide
gguggagcgugaaaagccu

SEQ ID NO: 1825598 - RNA, 19 nt, Artificial Sequence
  Description of Artificial Sequence: Synthetic oligonucleotide
cagaaggguggaccagaaa

SEQ ID NO: 1825599 - RNA, 19 nt, Artificial Sequence
  Description of Artificial Sequence: Synthetic oligonucleotide
gcgacugcauacagguuga

SEQ ID NO: 1825600 - RNA, 19 nt, Artificial Sequence
  Description of Artificial Sequence: Synthetic oligonucleotide
ggggcugcgacugcauaca

SEQ ID NO: 1825601 - RNA, 19 nt, Artificial Sequence
  Description of Artificial Sequence: Synthetic oligonucleotide
gcaaagcuagcggccagga

SEQ ID NO: 1825602 - RNA, 19 nt, Artificial Sequence
  Description of Artificial Sequence: Synthetic oligonucleotide
cuggcuagaucaggaacgu

SEQ ID NO: 1825603 - RNA, 19 nt, Artificial Sequence
  Description of Artificial Sequence: Synthetic oligonucleotide
caaucagaauggccgggau

SEQ ID NO: 1825604 - RNA, 19 nt, Artificial Sequence
  Description of Artificial Sequence: Synthetic oligonucleotide
ccagcagugggcggcgacc

SEQ ID NO: 1825605 - RNA, 19 nt, Artificial Sequence
  Description of Artificial Sequence: Synthetic oligonucleotide
cucggccaagcacgaagaa

SEQ ID NO: 1825606 - RNA, 19 nt, Artificial Sequence
  Description of Artificial Sequence: Synthetic oligonucleotide
ggaauucaggguguggauu

SEQ ID NO: 1825607 - RNA, 19 nt, Artificial Sequence
  Description of Artificial Sequence: Synthetic oligonucleotide
cgugaaaagccuggcggac

SEQ ID NO: 1825608 - RNA, 19 nt, Artificial Sequence
  Description of Artificial Sequence: Synthetic oligonucleotide
caggguguggauuggccuu

SEQ ID NO: 1825609 - RNA, 19 nt, Artificial Sequence
  Description of Artificial Sequence: Synthetic oligonucleotide
gugggcggcgacccacgca

SEQ ID NO: 1825610 - RNA, 19 nt, Artificial Sequence
  Description of Artificial Sequence: Synthetic oligonucleotide
cugugaacaugaggggugu

SEQ ID NO: 1825611 - RNA, 19 nt, Artificial Sequence
  Description of Artificial Sequence: Synthetic oligonucleotide
gcucauagagugucaggau

SEQ ID NO: 1825612 - RNA, 19 nt, Artificial Sequence
  Description of Artificial Sequence: Synthetic oligonucleotide
cucauggccucuggcuaga

SEQ ID NO: 1825613 - RNA, 19 nt, Artificial Sequence
  Description of Artificial Sequence: Synthetic oligonucleotide
cuagcggccaggaggccau

SEQ ID NO: 1825614 - RNA, 19 nt, Artificial Sequence
  Description of Artificial Sequence: Synthetic oligonucleotide
gcuagcggccaggaggcca

SEQ ID NO: 1825615 - RNA, 19 nt, Artificial Sequence
  Description of Artificial Sequence: Synthetic oligonucleotide
ccaaucagaauggccggga

SEQ ID NO: 1825616 - RNA, 19 nt, Artificial Sequence
  Description of Artificial Sequence: Synthetic oligonucleotide
cauagccaacaagcuugga

SEQ ID NO: 1825617 - RNA, 19 nt, Artificial Sequence
  Description of Artificial Sequence: Synthetic oligonucleotide
guuccccgguggcggugcc

SEQ ID NO: 1825618 - RNA, 19 nt, Artificial Sequence
  Description of Artificial Sequence: Synthetic oligonucleotide
aggaugucuugagccccaa

SEQ ID NO: 1825619 - RNA, 19 nt, Artificial Sequence
  Description of Artificial Sequence: Synthetic oligonucleotide
ccgacgugcaguuguagcu

SEQ ID NO: 1825620 - RNA, 19 nt, Artificial Sequence
  Description of Artificial Sequence: Synthetic oligonucleotide
uuccccgguggcggugcca

SEQ ID NO: 1825621 - RNA, 19 nt, Artificial Sequence
  Description of Artificial Sequence: Synthetic oligonucleotide
aggugcgacugugguuaga

SEQ ID NO: 1825622 - RNA, 19 nt, Artificial Sequence
  Description of Artificial Sequence: Synthetic oligonucleotide
gcgacccacgcagucacuc

SEQ ID NO: 1825623 - RNA, 19 nt, Artificial Sequence
  Description of Artificial Sequence: Synthetic oligonucleotide
cccauacccugugaacaug

SEQ ID NO: 1825624 - RNA, 19 nt, Artificial Sequence
  Description of Artificial Sequence: Synthetic oligonucleotide
cgacccacgcagucacucc

SEQ ID NO: 1825625 - RNA, 19 nt, Artificial Sequence
  Description of Artificial Sequence: Synthetic oligonucleotide
cauuguagccgagcucggu

SEQ ID NO: 1825626 - RNA, 19 nt, Artificial Sequence
  Description of Artificial Sequence: Synthetic oligonucleotide
cggaugacagguguaguga

SEQ ID NO: 1825627 - RNA, 19 nt, Artificial Sequence
  Description of Artificial Sequence: Synthetic oligonucleotide
ggcggcgacccacgcaguc

SEQ ID NO: 1825628 - RNA, 19 nt, Artificial Sequence
  Description of Artificial Sequence: Synthetic oligonucleotide
gcggccaggaggccauuga

SEQ ID NO: 1825629 - RNA, 19 nt, Artificial Sequence
  Description of Artificial Sequence: Synthetic oligonucleotide
ggaugucuugagccccaaa

SEQ ID NO: 1825630 - RNA, 19 nt, Artificial Sequence
  Description of Artificial Sequence: Synthetic oligonucleotide
cccgcacguuccccggugg

SEQ ID NO: 1825631 - RNA, 19 nt, Artificial Sequence
  Description of Artificial Sequence: Synthetic oligonucleotide
ccacaccaaugcacgcuuc

SEQ ID NO: 1825632 - RNA, 19 nt, Artificial Sequence
  Description of Artificial Sequence: Synthetic oligonucleotide
cccgguggcggugccauug

SEQ ID NO: 1825633 - RNA, 19 nt, Artificial Sequence
  Description of Artificial Sequence: Synthetic oligonucleotide
cuggggcugcgacugcaua

SEQ ID NO: 1825634 - RNA, 19 nt, Artificial Sequence
  Description of Artificial Sequence: Synthetic oligonucleotide
cgcacguuccccgguggcg

SEQ ID NO: 1825635 - RNA, 19 nt, Artificial Sequence
  Description of Artificial Sequence: Synthetic oligonucleotide
gguuaggugcugggcugca

SEQ ID NO: 1825636 - RNA, 19 nt, Artificial Sequence
  Description of Artificial Sequence: Synthetic oligonucleotide
cugcuccgacuugcucacc

SEQ ID NO: 1825637 - RNA, 19 nt, Artificial Sequence
  Description of Artificial Sequence: Synthetic oligonucleotide
cagaaacgccucccaaguu

SEQ ID NO: 1825638 - RNA, 19 nt, Artificial Sequence
  Description of Artificial Sequence: Synthetic oligonucleotide
gccaaugaguacagcgcua

SEQ ID NO: 1825639 - RNA, 19 nt, Artificial Sequence
  Description of Artificial Sequence: Synthetic oligonucleotide
ggccaccgaggaaaagaga

SEQ ID NO: 1825640 - RNA, 19 nt, Artificial Sequence
  Description of Artificial Sequence: Synthetic oligonucleotide
ccgcacguuccccgguggc

SEQ ID NO: 1825641 - RNA, 19 nt, Artificial Sequence
  Description of Artificial Sequence: Synthetic oligonucleotide
gaaaagccuggcggacuuu

SEQ ID NO: 1825642 - RNA, 19 nt, Artificial Sequence
  Description of Artificial Sequence: Synthetic oligonucleotide
ccaaugaguacagcgcuau

SEQ ID NO: 1825643 - RNA, 19 nt, Artificial Sequence
  Description of Artificial Sequence: Synthetic oligonucleotide
aggggcgugcucagcucau

SEQ ID NO: 1825644 - RNA, 19 nt, Artificial Sequence
  Description of Artificial Sequence: Synthetic oligonucleotide
caugaggggugugguggua

SEQ ID NO: 1825645 - RNA, 19 nt, Artificial Sequence
  Description of Artificial Sequence: Synthetic oligonucleotide
ggccaaucucagccaccca

SEQ ID NO: 1825646 - RNA, 19 nt, Artificial Sequence
  Description of Artificial Sequence: Synthetic oligonucleotide
cauccgccacagaggcaaa

SEQ ID NO: 1825647 - RNA, 19 nt, Artificial Sequence
  Description of Artificial Sequence: Synthetic oligonucleotide
cggcgacccacgcagucac

SEQ ID NO: 1825648 - RNA, 19 nt, Artificial Sequence
  Description of Artificial Sequence: Synthetic oligonucleotide
gagccccaaagugcacagu

SEQ ID NO: 1825649 - RNA, 19 nt, Artificial Sequence
  Description of Artificial Sequence: Synthetic oligonucleotide
cccugugaacaugaggggu

SEQ ID NO: 1825650 - RNA, 19 nt, Artificial Sequence
  Description of Artificial Sequence: Synthetic oligonucleotide
ccuucacccaaaagggauu

SEQ ID NO: 1825651 - RNA, 19 nt, Artificial Sequence
  Description of Artificial Sequence: Synthetic oligonucleotide
gcggcgacccacgcaguca

SEQ ID NO: 1825652 - RNA, 19 nt, Artificial Sequence
  Description of Artificial Sequence: Synthetic oligonucleotide
ccauacggaaggugcgacu

SEQ ID NO: 1825653 - RNA, 19 nt, Artificial Sequence
  Description of Artificial Sequence: Synthetic oligonucleotide
cgacugugguuagagcuga

SEQ ID NO: 1825654 - RNA, 19 nt, Artificial Sequence
  Description of Artificial Sequence: Synthetic oligonucleotide
uggcggacuuuggcuccuu

SEQ ID NO: 1825655 - RNA, 19 nt, Artificial Sequence
  Description of Artificial Sequence: Synthetic oligonucleotide
cacguuccccgguggcggu

SEQ ID NO: 1825656 - RNA, 19 nt, Artificial Sequence
  Description of Artificial Sequence: Synthetic oligonucleotide
ccgcgcuuugguucccgca

SEQ ID NO: 1825657 - RNA, 19 nt, Artificial Sequence
  Description of Artificial Sequence: Synthetic oligonucleotide
cugcgacugcauacagguu

SEQ ID NO: 1825658 - RNA, 19 nt, Artificial Sequence
  Description of Artificial Sequence: Synthetic oligonucleotide
gccccuucaugaaguuuua

SEQ ID NO: 1825659 - RNA, 19 nt, Artificial Sequence
  Description of Artificial Sequence: Synthetic oligonucleotide
cuggcggacuuuggcuccu

SEQ ID NO: 1825660 - RNA, 19 nt, Artificial Sequence
  Description of Artificial Sequence: Synthetic oligonucleotide
cuaccaugcccaggauauu

SEQ ID NO: 1825661 - RNA, 19 nt, Artificial Sequence
  Description of Artificial Sequence: Synthetic oligonucleotide
gcauaacccugggcccgga

SEQ ID NO: 1825662 - RNA, 19 nt, Artificial Sequence
  Description of Artificial Sequence: Synthetic oligonucleotide
uagcggccaggaggccauu

SEQ ID NO: 1825663 - RNA, 19 nt, Artificial Sequence
  Description of Artificial Sequence: Synthetic oligonucleotide
ggacucggccaagcacgaa

SEQ ID NO: 1825664 - RNA, 19 nt, Artificial Sequence
  Description of Artificial Sequence: Synthetic oligonucleotide
cggugccauuguagccgag

SEQ ID NO: 1825665 - RNA, 19 nt, Artificial Sequence
  Description of Artificial Sequence: Synthetic oligonucleotide
ggguguggauuggccuucu

SEQ ID NO: 1825666 - RNA, 19 nt, Artificial Sequence
  Description of Artificial Sequence: Synthetic oligonucleotide
ggggcgugcucagcucaua

SEQ ID NO: 1825667 - RNA, 19 nt, Artificial Sequence
  Description of Artificial Sequence: Synthetic oligonucleotide
ccgguggcggugccauugu

SEQ ID NO: 1825668 - RNA, 19 nt, Artificial Sequence
  Description of Artificial Sequence: Synthetic oligonucleotide
ggcgacccacgcagucacu

SEQ ID NO: 1825669 - RNA, 19 nt, Artificial Sequence
  Description of Artificial Sequence: Synthetic oligonucleotide
gggcggcgacccacgcagu

SEQ ID NO: 1825670 - RNA, 19 nt, Artificial Sequence
  Description of Artificial Sequence: Synthetic oligonucleotide
ccccgguggcggugccauu

SEQ ID NO: 1825671 - RNA, 19 nt, Artificial Sequence
  Description of Artificial Sequence: Synthetic oligonucleotide
aagucaaugaccuugguug

SEQ ID NO: 1825672 - RNA, 19 nt, Artificial Sequence
  Description of Artificial Sequence: Synthetic oligonucleotide
aaacuugcgaaccaacugg

SEQ ID NO: 1825673 - RNA, 19 nt, Artificial Sequence
  Description of Artificial Sequence: Synthetic oligonucleotide
uuuggcaauacacugcacg

SEQ ID NO: 1825674 - RNA, 19 nt, Artificial Sequence
  Description of Artificial Sequence: Synthetic oligonucleotide
acucgaaacagcuggaccc

SEQ ID NO: 1825675 - RNA, 19 nt, Artificial Sequence
  Description of Artificial Sequence: Synthetic oligonucleotide
gaacaaguaaucuucacac

SEQ ID NO: 1825676 - RNA, 19 nt, Artificial Sequence
  Description of Artificial Sequence: Synthetic oligonucleotide
gacaauuuagcccuugaag

SEQ ID NO: 1825677 - RNA, 19 nt, Artificial Sequence
  Description of Artificial Sequence: Synthetic oligonucleotide
ugguacucgaaacagcugg

SEQ ID NO: 1825678 - RNA, 19 nt, Artificial Sequence
  Description of Artificial Sequence: Synthetic oligonucleotide
uauacuaccacugguuucg

SEQ ID NO: 1825679 - RNA, 19 nt, Artificial Sequence
  Description of Artificial Sequence: Synthetic oligonucleotide
aacgagacuggauauaugu

SEQ ID NO: 1825680 - RNA, 19 nt, Artificial Sequence
  Description of Artificial Sequence: Synthetic oligonucleotide
aaaacauauccaucaauga

SEQ ID NO: 1825681 - RNA, 19 nt, Artificial Sequence
  Description of Artificial Sequence: Synthetic oligonucleotide
uuaaugagcucauacaggu

SEQ ID NO: 1825682 - RNA, 19 nt, Artificial Sequence
  Description of Artificial Sequence: Synthetic oligonucleotide
acaauuuagcccuugaaga

SEQ ID NO: 1825683 - RNA, 19 nt, Artificial Sequence
  Description of Artificial Sequence: Synthetic oligonucleotide
auauccaucaaugaauggg

SEQ ID NO: 1825684 - RNA, 19 nt, Artificial Sequence
  Description of Artificial Sequence: Synthetic oligonucleotide
uguaggauuaacuauccgu

SEQ ID NO: 1825685 - RNA, 19 nt, Artificial Sequence
  Description of Artificial Sequence: Synthetic oligonucleotide
gaagaguucuuuuauaguc

SEQ ID NO: 1825686 - RNA, 19 nt, Artificial Sequence
  Description of Artificial Sequence: Synthetic oligonucleotide
gaaggugaaacuuucuagc

SEQ ID NO: 1825687 - RNA, 19 nt, Artificial Sequence
  Description of Artificial Sequence: Synthetic oligonucleotide
uacauuuaauguauacucc

SEQ ID NO: 1825688 - RNA, 19 nt, Artificial Sequence
  Description of Artificial Sequence: Synthetic oligonucleotide
augcuuagcaauucaaagg

SEQ ID NO: 1825689 - RNA, 19 nt, Artificial Sequence
  Description of Artificial Sequence: Synthetic oligonucleotide
uauuccaacgaccggaggc

SEQ ID NO: 1825690 - RNA, 19 nt, Artificial Sequence
  Description of Artificial Sequence: Synthetic oligonucleotide
acuaccacugguuucggac

SEQ ID NO: 1825691 - RNA, 19 nt, Artificial Sequence
  Description of Artificial Sequence: Synthetic oligonucleotide
acugguuucggacauuagg

SEQ ID NO: 1825692 - RNA, 19 nt, Artificial Sequence
  Description of Artificial Sequence: Synthetic oligonucleotide
gaugucuuaaugcuugagc

SEQ ID NO: 1825693 - RNA, 19 nt, Artificial Sequence
  Description of Artificial Sequence: Synthetic oligonucleotide
accgaaacuccauaugucg

SEQ ID NO: 1825694 - RNA, 19 nt, Artificial Sequence
  Description of Artificial Sequence: Synthetic oligonucleotide
uagcuaaucagcuuuggca

SEQ ID NO: 1825695 - RNA, 19 nt, Artificial Sequence
  Description of Artificial Sequence: Synthetic oligonucleotide
acauaugcaucuccaagcg

SEQ ID NO: 1825696 - RNA, 19 nt, Artificial Sequence
  Description of Artificial Sequence: Synthetic oligonucleotide
ugguuagacaauuuagccc

SEQ ID NO: 1825697 - RNA, 19 nt, Artificial Sequence
  Description of Artificial Sequence: Synthetic oligonucleotide
cugguuagacaauuuagcc

SEQ ID NO: 1825698 - RNA, 19 nt, Artificial Sequence
  Description of Artificial Sequence: Synthetic oligonucleotide
aguuguaggauuaacuauc

SEQ ID NO: 1825699 - RNA, 19 nt, Artificial Sequence
  Description of Artificial Sequence: Synthetic oligonucleotide
auuggcgugcuguagcggc

SEQ ID NO: 1825700 - RNA, 19 nt, Artificial Sequence
  Description of Artificial Sequence: Synthetic oligonucleotide
aauguauacuccagauggc

SEQ ID NO: 1825701 - RNA, 19 nt, Artificial Sequence
  Description of Artificial Sequence: Synthetic oligonucleotide
aacuccauaugucgauugg

SEQ ID NO: 1825702 - RNA, 19 nt, Artificial Sequence
  Description of Artificial Sequence: Synthetic oligonucleotide
aggacugcaagauggauug

SEQ ID NO: 1825703 - RNA, 19 nt, Artificial Sequence
  Description of Artificial Sequence: Synthetic oligonucleotide
cuugcgaaccaacuggacg

SEQ ID NO: 1825704 - RNA, 19 nt, Artificial Sequence
  Description of Artificial Sequence: Synthetic oligonucleotide
ucuaugaacaaguaaucuu

SEQ ID NO: 1825705 - RNA, 19 nt, Artificial Sequence
  Description of Artificial Sequence: Synthetic oligonucleotide
auguauacuccagauggcc

SEQ ID NO: 1825706 - RNA, 19 nt, Artificial Sequence
  Description of Artificial Sequence: Synthetic oligonucleotide
uugcgaaccaacuggacgc

SEQ ID NO: 1825707 - RNA, 19 nt, Artificial Sequence
  Description of Artificial Sequence: Synthetic oligonucleotide
uuuuaccccugcgagagcg

SEQ ID NO: 1825708 - RNA, 19 nt, Artificial Sequence
  Description of Artificial Sequence: Synthetic oligonucleotide
gauauauguguaaagcuuc

SEQ ID NO: 1825709 - RNA, 19 nt, Artificial Sequence
  Description of Artificial Sequence: Synthetic oligonucleotide
uacaggucuaugcuuagca

SEQ ID NO: 1825710 - RNA, 19 nt, Artificial Sequence
  Description of Artificial Sequence: Synthetic oligonucleotide
auacaagcugguuagacaa

SEQ ID NO: 1825711 - RNA, 19 nt, Artificial Sequence
  Description of Artificial Sequence: Synthetic oligonucleotide
uaagcuuacuggcuauucc

SEQ ID NO: 1825712 - RNA, 19 nt, Artificial Sequence
  Description of Artificial Sequence: Synthetic oligonucleotide
uuagcuaaucagcuuuggc

SEQ ID NO: 1825713 - RNA, 19 nt, Artificial Sequence
  Description of Artificial Sequence: Synthetic oligonucleotide
gauggauugggcaaacuug

SEQ ID NO: 1825714 - RNA, 19 nt, Artificial Sequence
  Description of Artificial Sequence: Synthetic oligonucleotide
cuggauauauguguaaagc

SEQ ID NO: 1825715 - RNA, 19 nt, Artificial Sequence
  Description of Artificial Sequence: Synthetic oligonucleotide
auggauugggcaaacuugc

SEQ ID NO: 1825716 - RNA, 19 nt, Artificial Sequence
  Description of Artificial Sequence: Synthetic oligonucleotide
aaagucaaugaccuugguu

SEQ ID NO: 1825717 - RNA, 19 nt, Artificial Sequence
  Description of Artificial Sequence: Synthetic oligonucleotide
cuccauaugucgauuggcg

SEQ ID NO: 1825718 - RNA, 19 nt, Artificial Sequence
  Description of Artificial Sequence: Synthetic oligonucleotide
augaacaaguaaucuucac

SEQ ID NO: 1825719 - RNA, 19 nt, Artificial Sequence
  Description of Artificial Sequence: Synthetic oligonucleotide
uagguuagcuuuaagcuua

SEQ ID NO: 1825720 - RNA, 19 nt, Artificial Sequence
  Description of Artificial Sequence: Synthetic oligonucleotide
accggaggcagcuuggaac

SEQ ID NO: 1825721 - RNA, 19 nt, Artificial Sequence
  Description of Artificial Sequence: Synthetic oligonucleotide
caucaugcaggccaacugg

SEQ ID NO: 1825722 - RNA, 19 nt, Artificial Sequence
  Description of Artificial Sequence: Synthetic oligonucleotide
caauucaaaggccaugcac

SEQ ID NO: 1825723 - RNA, 19 nt, Artificial Sequence
  Description of Artificial Sequence: Synthetic oligonucleotide
ugccugaguagucauggag

SEQ ID NO: 1825724 - RNA, 19 nt, Artificial Sequence
  Description of Artificial Sequence: Synthetic oligonucleotide
aagcccuuggaguuaauaa

SEQ ID NO: 1825725 - RNA, 19 nt, Artificial Sequence
  Description of Artificial Sequence: Synthetic oligonucleotide
uccuauuuugcauguuugc

SEQ ID NO: 1825726 - RNA, 19 nt, Artificial Sequence
  Description of Artificial Sequence: Synthetic oligonucleotide
uuguaggauuaacuauccg

SEQ ID NO: 1825727 - RNA, 19 nt, Artificial Sequence
  Description of Artificial Sequence: Synthetic oligonucleotide
cagacuugcuaauccaagg

SEQ ID NO: 1825728 - RNA, 19 nt, Artificial Sequence
  Description of Artificial Sequence: Synthetic oligonucleotide
uguccugucaaaaguucug

SEQ ID NO: 1825729 - RNA, 19 nt, Artificial Sequence
  Description of Artificial Sequence: Synthetic oligonucleotide
agcuaaucagcuuuggcaa

SEQ ID NO: 1825730 - RNA, 19 nt, Artificial Sequence
  Description of Artificial Sequence: Synthetic oligonucleotide
aagcacaacccucccaucu

SEQ ID NO: 1825731 - RNA, 19 nt, Artificial Sequence
  Description of Artificial Sequence: Synthetic oligonucleotide
cuauccguuucccugacac

SEQ ID NO: 1825732 - RNA, 19 nt, Artificial Sequence
  Description of Artificial Sequence: Synthetic oligonucleotide
ugaguagucauggagcagu

SEQ ID NO: 1825733 - RNA, 19 nt, Artificial Sequence
  Description of Artificial Sequence: Synthetic oligonucleotide
uuacuggcuauuccaacga

SEQ ID NO: 1825734 - RNA, 19 nt, Artificial Sequence
  Description of Artificial Sequence: Synthetic oligonucleotide
ugcacggagguauacuacc

SEQ ID NO: 1825735 - RNA, 19 nt, Artificial Sequence
  Description of Artificial Sequence: Synthetic oligonucleotide
guagaaacgagacuggaua

SEQ ID NO: 1825736 - RNA, 19 nt, Artificial Sequence
  Description of Artificial Sequence: Synthetic oligonucleotide
ggaaggugaaacuuucuag

SEQ ID NO: 1825737 - RNA, 19 nt, Artificial Sequence
  Description of Artificial Sequence: Synthetic oligonucleotide
uuaaugcuugagcuggggu

SEQ ID NO: 1825738 - RNA, 19 nt, Artificial Sequence
  Description of Artificial Sequence: Synthetic oligonucleotide
acuccauaugucgauuggc

SEQ ID NO: 1825739 - RNA, 19 nt, Artificial Sequence
  Description of Artificial Sequence: Synthetic oligonucleotide
ugcuguagcggcaucccag

SEQ ID NO: 1825740 - RNA, 19 nt, Artificial Sequence
  Description of Artificial Sequence: Synthetic oligonucleotide
aacuauccguuucccugac

SEQ ID NO: 1825741 - RNA, 19 nt, Artificial Sequence
  Description of Artificial Sequence: Synthetic oligonucleotide
agaggggucccacugaaga

SEQ ID NO: 1825742 - RNA, 19 nt, Artificial Sequence
  Description of Artificial Sequence: Synthetic oligonucleotide
uucacacccuuucagugcu

SEQ ID NO: 1825743 - RNA, 19 nt, Artificial Sequence
  Description of Artificial Sequence: Synthetic oligonucleotide
ucgauuggcgugcuguagc

SEQ ID NO: 1825744 - RNA, 19 nt, Artificial Sequence
  Description of Artificial Sequence: Synthetic oligonucleotide
agacuugcuaauccaagga

SEQ ID NO: 1825745 - RNA, 19 nt, Artificial Sequence
  Description of Artificial Sequence: Synthetic oligonucleotide
auuaacuauccguuucccu

SEQ ID NO: 1825746 - RNA, 19 nt, Artificial Sequence
  Description of Artificial Sequence: Synthetic oligonucleotide
gccaauacaagcugguuag

SEQ ID NO: 1825747 - RNA, 19 nt, Artificial Sequence
  Description of Artificial Sequence: Synthetic oligonucleotide
aaccgaaacuccauauguc

SEQ ID NO: 1825748 - RNA, 19 nt, Artificial Sequence
  Description of Artificial Sequence: Synthetic oligonucleotide
uaucgaggcaagcccuugg

SEQ ID NO: 1825749 - RNA, 19 nt, Artificial Sequence
  Description of Artificial Sequence: Synthetic oligonucleotide
uaacuauccguuucccuga

SEQ ID NO: 1825750 - RNA, 19 nt, Artificial Sequence
  Description of Artificial Sequence: Synthetic oligonucleotide
uggauugggcaaacuugcg

SEQ ID NO: 1825751 - RNA, 19 nt, Artificial Sequence
  Description of Artificial Sequence: Synthetic oligonucleotide
cuugguugcacugcgcccg

SEQ ID NO: 1825752 - RNA, 19 nt, Artificial Sequence
  Description of Artificial Sequence: Synthetic oligonucleotide
aacgaccggaggcagcuug

SEQ ID NO: 1825753 - RNA, 19 nt, Artificial Sequence
  Description of Artificial Sequence: Synthetic oligonucleotide
acauucaugcuuccagucu

SEQ ID NO: 1825754 - RNA, 19 nt, Artificial Sequence
  Description of Artificial Sequence: Synthetic oligonucleotide
guuucggacauuagguuag

SEQ ID NO: 1825755 - RNA, 19 nt, Artificial Sequence
  Description of Artificial Sequence: Synthetic oligonucleotide
uucugguacucgaaacagc

SEQ ID NO: 1825756 - RNA, 19 nt, Artificial Sequence
  Description of Artificial Sequence: Synthetic oligonucleotide
gacaucuuuucagaaacuc

SEQ ID NO: 1825757 - RNA, 19 nt, Artificial Sequence
  Description of Artificial Sequence: Synthetic oligonucleotide
uagacaauuuagcccuuga

SEQ ID NO: 1825758 - RNA, 19 nt, Artificial Sequence
  Description of Artificial Sequence: Synthetic oligonucleotide
gauuaacuauccguuuccc

SEQ ID NO: 1825759 - RNA, 19 nt, Artificial Sequence
  Description of Artificial Sequence: Synthetic oligonucleotide
gguuagacaauuuagcccu

SEQ ID NO: 1825760 - RNA, 19 nt, Artificial Sequence
  Description of Artificial Sequence: Synthetic oligonucleotide
uccauaugucgauuggcgu

SEQ ID NO: 1825761 - RNA, 19 nt, Artificial Sequence
  Description of Artificial Sequence: Synthetic oligonucleotide
uguggauaacauucaugcu

SEQ ID NO: 1825762 - RNA, 19 nt, Artificial Sequence
  Description of Artificial Sequence: Synthetic oligonucleotide
auuagcuaaucagcuuugg

SEQ ID NO: 1825763 - RNA, 19 nt, Artificial Sequence
  Description of Artificial Sequence: Synthetic oligonucleotide
aagcugguuagacaauuua

SEQ ID NO: 1825764 - RNA, 19 nt, Artificial Sequence
  Description of Artificial Sequence: Synthetic oligonucleotide
auccaaggaugucuuaaug

SEQ ID NO: 1825765 - RNA, 19 nt, Artificial Sequence
  Description of Artificial Sequence: Synthetic oligonucleotide
agauggauugggcaaacuu

SEQ ID NO: 1825766 - RNA, 19 nt, Artificial Sequence
  Description of Artificial Sequence: Synthetic oligonucleotide
guagcggcaucccaggaug

SEQ ID NO: 1825767 - RNA, 19 nt, Artificial Sequence
  Description of Artificial Sequence: Synthetic oligonucleotide
uagaaacgagacuggauau

SEQ ID NO: 1825768 - RNA, 19 nt, Artificial Sequence
  Description of Artificial Sequence: Synthetic oligonucleotide
uccugucaaaaguucugcc

SEQ ID NO: 1825769 - RNA, 19 nt, Artificial Sequence
  Description of Artificial Sequence: Synthetic oligonucleotide
guuguaggauuaacuaucc

SEQ ID NO: 1825770 - RNA, 19 nt, Artificial Sequence
  Description of Artificial Sequence: Synthetic oligonucleotide
ggauuaacuauccguuucc

SEQ ID NO: 1825771 - RNA, 19 nt, Artificial Sequence
  Description of Artificial Sequence: Synthetic oligonucleotide
uguuugcaagguaacuaaa

SEQ ID NO: 1825772 - RNA, 19 nt, Artificial Sequence
  Description of Artificial Sequence: Synthetic oligonucleotide
caucuuuucagaaacucua

SEQ ID NO: 1825773 - RNA, 19 nt, Artificial Sequence
  Description of Artificial Sequence: Synthetic oligonucleotide
agcugguuagacaauuuag

SEQ ID NO: 1825774 - RNA, 19 nt, Artificial Sequence
  Description of Artificial Sequence: Synthetic oligonucleotide
aagagcguccaaggacugc

SEQ ID NO: 1825775 - RNA, 19 nt, Artificial Sequence
  Description of Artificial Sequence: Synthetic oligonucleotide
ggagguauacuaccacugg

SEQ ID NO: 1825776 - RNA, 19 nt, Artificial Sequence
  Description of Artificial Sequence: Synthetic oligonucleotide
ggcaauacacugcacggag

SEQ ID NO: 1825777 - RNA, 19 nt, Artificial Sequence
  Description of Artificial Sequence: Synthetic oligonucleotide
ugcagacuugcuaauccaa

SEQ ID NO: 1825778 - RNA, 19 nt, Artificial Sequence
  Description of Artificial Sequence: Synthetic oligonucleotide
caauacaagcugguuagac

SEQ ID NO: 1825779 - RNA, 19 nt, Artificial Sequence
  Description of Artificial Sequence: Synthetic oligonucleotide
uccaagcgguccauuagcu

SEQ ID NO: 1825780 - RNA, 19 nt, Artificial Sequence
  Description of Artificial Sequence: Synthetic oligonucleotide
auguguaaagcuucuggua

SEQ ID NO: 1825781 - RNA, 19 nt, Artificial Sequence
  Description of Artificial Sequence: Synthetic oligonucleotide
ucaaugaaugggcuucauu

SEQ ID NO: 1825782 - RNA, 19 nt, Artificial Sequence
  Description of Artificial Sequence: Synthetic oligonucleotide
uccggaaggugaaacuuuc

SEQ ID NO: 1825783 - RNA, 19 nt, Artificial Sequence
  Description of Artificial Sequence: Synthetic oligonucleotide
auacaggucuaugcuuagc

SEQ ID NO: 1825784 - RNA, 19 nt, Artificial Sequence
  Description of Artificial Sequence: Synthetic oligonucleotide
ugcaaccgaaacuccauau

SEQ ID NO: 1825785 - RNA, 19 nt, Artificial Sequence
  Description of Artificial Sequence: Synthetic oligonucleotide
ucggacauuagguuagcuu

SEQ ID NO: 1825786 - RNA, 19 nt, Artificial Sequence
  Description of Artificial Sequence: Synthetic oligonucleotide
acggagguauacuaccacu

SEQ ID NO: 1825787 - RNA, 19 nt, Artificial Sequence
  Description of Artificial Sequence: Synthetic oligonucleotide
uuaagcuuacuggcuauuc

SEQ ID NO: 1825788 - RNA, 19 nt, Artificial Sequence
  Description of Artificial Sequence: Synthetic oligonucleotide
agacaauuuagcccuugaa

SEQ ID NO: 1825789 - RNA, 19 nt, Artificial Sequence
  Description of Artificial Sequence: Synthetic oligonucleotide
auccguuucccugacaccu

SEQ ID NO: 1825790 - RNA, 19 nt, Artificial Sequence
  Description of Artificial Sequence: Synthetic oligonucleotide
uguagcggcaucccaggau

SEQ ID NO: 1825791 - RNA, 19 nt, Artificial Sequence
  Description of Artificial Sequence: Synthetic oligonucleotide
ucaaugaccuugguugcac

SEQ ID NO: 1825792 - RNA, 19 nt, Artificial Sequence
  Description of Artificial Sequence: Synthetic oligonucleotide
uuagacaauuuagcccuug

SEQ ID NO: 1825793 - RNA, 19 nt, Artificial Sequence
  Description of Artificial Sequence: Synthetic oligonucleotide
guauacuaccacugguuuc

SEQ ID NO: 1825794 - RNA, 19 nt, Artificial Sequence
  Description of Artificial Sequence: Synthetic oligonucleotide
aggugaaacuuucuagcau

SEQ ID NO: 1825795 - RNA, 19 nt, Artificial Sequence
  Description of Artificial Sequence: Synthetic oligonucleotide
uccggggcccuguagaaac

SEQ ID NO: 1825796 - RNA, 19 nt, Artificial Sequence
  Description of Artificial Sequence: Synthetic oligonucleotide
caagcgguccauuagcuaa

SEQ ID NO: 1825797 - RNA, 19 nt, Artificial Sequence
  Description of Artificial Sequence: Synthetic oligonucleotide
cuugcuaauccaaggaugu

SEQ ID NO: 1825798 - RNA, 19 nt, Artificial Sequence
  Description of Artificial Sequence: Synthetic oligonucleotide
uggcuauuccaacgaccgg

SEQ ID NO: 1825799 - RNA, 19 nt, Artificial Sequence
  Description of Artificial Sequence: Synthetic oligonucleotide
guggauaacauucaugcuu

SEQ ID NO: 1825800 - RNA, 19 nt, Artificial Sequence
  Description of Artificial Sequence: Synthetic oligonucleotide
gcaguaucgaggcaagccc

SEQ ID NO: 1825801 - RNA, 19 nt, Artificial Sequence
  Description of Artificial Sequence: Synthetic oligonucleotide
cauacaggucuaugcuuag

SEQ ID NO: 1825802 - RNA, 19 nt, Artificial Sequence
  Description of Artificial Sequence: Synthetic oligonucleotide
gcugguuagacaauuuagc

SEQ ID NO: 1825803 - RNA, 19 nt, Artificial Sequence
  Description of Artificial Sequence: Synthetic oligonucleotide
auacacugcacggagguau

SEQ ID NO: 1825804 - RNA, 19 nt, Artificial Sequence
  Description of Artificial Sequence: Synthetic oligonucleotide
uauccguuucccugacacc

SEQ ID NO: 1825805 - RNA, 19 nt, Artificial Sequence
  Description of Artificial Sequence: Synthetic oligonucleotide
uaaaguacuuggcccguuu

SEQ ID NO: 1825806 - RNA, 19 nt, Artificial Sequence
  Description of Artificial Sequence: Synthetic oligonucleotide
acugcacggagguauacua

SEQ ID NO: 1825807 - RNA, 19 nt, Artificial Sequence
  Description of Artificial Sequence: Synthetic oligonucleotide
uaugcaucuccaagcgguc

SEQ ID NO: 1825808 - RNA, 19 nt, Artificial Sequence
  Description of Artificial Sequence: Synthetic oligonucleotide
aacuugcgaaccaacugga

SEQ ID NO: 1825809 - RNA, 19 nt, Artificial Sequence
  Description of Artificial Sequence: Synthetic oligonucleotide
uaggauuaacuauccguuu

SEQ ID NO: 1825810 - RNA, 19 nt, Artificial Sequence
  Description of Artificial Sequence: Synthetic oligonucleotide
agcacaacccucccaucug

SEQ ID NO: 1825811 - RNA, 19 nt, Artificial Sequence
  Description of Artificial Sequence: Synthetic oligonucleotide
caacuggacgcugaagccc

SEQ ID NO: 1825812 - RNA, 19 nt, Artificial Sequence
  Description of Artificial Sequence: Synthetic oligonucleotide
aacuggacgcugaagcccu

SEQ ID NO: 1825813 - RNA, 19 nt, Artificial Sequence
  Description of Artificial Sequence: Synthetic oligonucleotide
guauacuccagauggccaa

SEQ ID NO: 1825814 - RNA, 19 nt, Artificial Sequence
  Description of Artificial Sequence: Synthetic oligonucleotide
auuccaacgaccggaggca

SEQ ID NO: 1825815 - RNA, 19 nt, Artificial Sequence
  Description of Artificial Sequence: Synthetic oligonucleotide
cagaaguuuuggugguggc

SEQ ID NO: 1825816 - RNA, 19 nt, Artificial Sequence
  Description of Artificial Sequence: Synthetic oligonucleotide
aaagcaguuguaggauuaa

SEQ ID NO: 1825817 - RNA, 19 nt, Artificial Sequence
  Description of Artificial Sequence: Synthetic oligonucleotide
augucgauuggcgugcugu

SEQ ID NO: 1825818 - RNA, 19 nt, Artificial Sequence
  Description of Artificial Sequence: Synthetic oligonucleotide
cccuguagaaacgagacug

SEQ ID NO: 1825819 - RNA, 19 nt, Artificial Sequence
  Description of Artificial Sequence: Synthetic oligonucleotide
uacuggcuauuccaacgac

SEQ ID NO: 1825820 - RNA, 19 nt, Artificial Sequence
  Description of Artificial Sequence: Synthetic oligonucleotide
cagugaaugaucuuguuuu

SEQ ID NO: 1825821 - RNA, 19 nt, Artificial Sequence
  Description of Artificial Sequence: Synthetic oligonucleotide
cugguuucggacauuaggu

SEQ ID NO: 1825822 - RNA, 19 nt, Artificial Sequence
  Description of Artificial Sequence: Synthetic oligonucleotide
aaacgagacuggauauaug

SEQ ID NO: 1825823 - RNA, 19 nt, Artificial Sequence
  Description of Artificial Sequence: Synthetic oligonucleotide
ugguuucggacauuagguu

SEQ ID NO: 1825824 - RNA, 19 nt, Artificial Sequence
  Description of Artificial Sequence: Synthetic oligonucleotide
acaggucuaugcuuagcaa

SEQ ID NO: 1825825 - RNA, 19 nt, Artificial Sequence
  Description of Artificial Sequence: Synthetic oligonucleotide
agagcguccaaggacugca

SEQ ID NO: 1825826 - RNA, 19 nt, Artificial Sequence
  Description of Artificial Sequence: Synthetic oligonucleotide
gaaagcaguuguaggauua

SEQ ID NO: 1825827 - RNA, 19 nt, Artificial Sequence
  Description of Artificial Sequence: Synthetic oligonucleotide
uuccggaaggugaaacuuu

SEQ ID NO: 1825828 - RNA, 19 nt, Artificial Sequence
  Description of Artificial Sequence: Synthetic oligonucleotide
guuugcaagguaacuaaaa

SEQ ID NO: 1825829 - RNA, 19 nt, Artificial Sequence
  Description of Artificial Sequence: Synthetic oligonucleotide
ccauaugucgauuggcgug

SEQ ID NO: 1825830 - RNA, 19 nt, Artificial Sequence
  Description of Artificial Sequence: Synthetic oligonucleotide
gauuggcgugcuguagcgg

SEQ ID NO: 1825831 - RNA, 19 nt, Artificial Sequence
  Description of Artificial Sequence: Synthetic oligonucleotide
ucaugcaggccaacugguc

SEQ ID NO: 1825832 - RNA, 19 nt, Artificial Sequence
  Description of Artificial Sequence: Synthetic oligonucleotide
cugcaagauggauugggca

SEQ ID NO: 1825833 - RNA, 19 nt, Artificial Sequence
  Description of Artificial Sequence: Synthetic oligonucleotide
guccugucaaaaguucugc

SEQ ID NO: 1825834 - RNA, 19 nt, Artificial Sequence
  Description of Artificial Sequence: Synthetic oligonucleotide
gagguauacuaccacuggu

SEQ ID NO: 1825835 - RNA, 19 nt, Artificial Sequence
  Description of Artificial Sequence: Synthetic oligonucleotide
aucgaggcaagcccuugga

SEQ ID NO: 1825836 - RNA, 19 nt, Artificial Sequence
  Description of Artificial Sequence: Synthetic oligonucleotide
gaaacgagacuggauauau

SEQ ID NO: 1825837 - RNA, 19 nt, Artificial Sequence
  Description of Artificial Sequence: Synthetic oligonucleotide
gcaaccgaaacuccauaug

SEQ ID NO: 1825838 - RNA, 19 nt, Artificial Sequence
  Description of Artificial Sequence: Synthetic oligonucleotide
ugcuguugcccagucuuug

SEQ ID NO: 1825839 - RNA, 19 nt, Artificial Sequence
  Description of Artificial Sequence: Synthetic oligonucleotide
acuugcgaaccaacuggac

SEQ ID NO: 1825840 - RNA, 19 nt, Artificial Sequence
  Description of Artificial Sequence: Synthetic oligonucleotide
uacaagcugguuagacaau

SEQ ID NO: 1825841 - RNA, 19 nt, Artificial Sequence
  Description of Artificial Sequence: Synthetic oligonucleotide
uuuaccccugcgagagcga

SEQ ID NO: 1825842 - RNA, 19 nt, Artificial Sequence
  Description of Artificial Sequence: Synthetic oligonucleotide
uccaacgaccggaggcagc

SEQ ID NO: 1825843 - RNA, 19 nt, Artificial Sequence
  Description of Artificial Sequence: Synthetic oligonucleotide
uaugucgauuggcgugcug

SEQ ID NO: 1825844 - RNA, 19 nt, Artificial Sequence
  Description of Artificial Sequence: Synthetic oligonucleotide
cugcacggagguauacuac

SEQ ID NO: 1825845 - RNA, 19 nt, Artificial Sequence
  Description of Artificial Sequence: Synthetic oligonucleotide
cacggagguauacuaccac

SEQ ID NO: 1825846 - RNA, 19 nt, Artificial Sequence
  Description of Artificial Sequence: Synthetic oligonucleotide
gagacuggauauaugugua

SEQ ID NO: 1825847 - RNA, 19 nt, Artificial Sequence
  Description of Artificial Sequence: Synthetic oligonucleotide
cuaccacugguuucggaca

SEQ ID NO: 1825848 - RNA, 19 nt, Artificial Sequence
  Description of Artificial Sequence: Synthetic oligonucleotide
uugcacugcgcccguggug

SEQ ID NO: 1825849 - RNA, 19 nt, Artificial Sequence
  Description of Artificial Sequence: Synthetic oligonucleotide
aagauggauugggcaaacu

SEQ ID NO: 1825850 - RNA, 19 nt, Artificial Sequence
  Description of Artificial Sequence: Synthetic oligonucleotide
gcccuuggaguuaauaaag

SEQ ID NO: 1825851 - RNA, 19 nt, Artificial Sequence
  Description of Artificial Sequence: Synthetic oligonucleotide
gacuugcuaauccaaggau

SEQ ID NO: 1825852 - RNA, 19 nt, Artificial Sequence
  Description of Artificial Sequence: Synthetic oligonucleotide
ugguuccggaaggugaaac

SEQ ID NO: 1825853 - RNA, 19 nt, Artificial Sequence
  Description of Artificial Sequence: Synthetic oligonucleotide
agucauggagcaguaucga

SEQ ID NO: 1825854 - RNA, 19 nt, Artificial Sequence
  Description of Artificial Sequence: Synthetic oligonucleotide
uuuaagcuuacuggcuauu

SEQ ID NO: 1825855 - RNA, 19 nt, Artificial Sequence
  Description of Artificial Sequence: Synthetic oligonucleotide
gguugcacugcgcccgugg

SEQ ID NO: 1825856 - RNA, 19 nt, Artificial Sequence
  Description of Artificial Sequence: Synthetic oligonucleotide
agguauacuaccacugguu

SEQ ID NO: 1825857 - RNA, 19 nt, Artificial Sequence
  Description of Artificial Sequence: Synthetic oligonucleotide
guaggauuaacuauccguu

SEQ ID NO: 1825858 - RNA, 19 nt, Artificial Sequence
  Description of Artificial Sequence: Synthetic oligonucleotide
acgagacuggauauaugug

SEQ ID NO: 1825859 - RNA, 19 nt, Artificial Sequence
  Description of Artificial Sequence: Synthetic oligonucleotide
caauacacugcacggaggu

SEQ ID NO: 1825860 - RNA, 19 nt, Artificial Sequence
  Description of Artificial Sequence: Synthetic oligonucleotide
ucccaucugccugaguagu

SEQ ID NO: 1825861 - RNA, 19 nt, Artificial Sequence
  Description of Artificial Sequence: Synthetic oligonucleotide
gguuucggacauuagguua

SEQ ID NO: 1825862 - RNA, 19 nt, Artificial Sequence
  Description of Artificial Sequence: Synthetic oligonucleotide
ccaacuggacgcugaagcc

SEQ ID NO: 1825863 - RNA, 19 nt, Artificial Sequence
  Description of Artificial Sequence: Synthetic oligonucleotide
uuggcgugcuguagcggca

SEQ ID NO: 1825864 - RNA, 19 nt, Artificial Sequence
  Description of Artificial Sequence: Synthetic oligonucleotide
gugcagacuugcuaaucca

SEQ ID NO: 1825865 - RNA, 19 nt, Artificial Sequence
  Description of Artificial Sequence: Synthetic oligonucleotide
uacuaccacugguuucgga

SEQ ID NO: 1825866 - RNA, 19 nt, Artificial Sequence
  Description of Artificial Sequence: Synthetic oligonucleotide
uacacugcacggagguaua

SEQ ID NO: 1825867 - RNA, 19 nt, Artificial Sequence
  Description of Artificial Sequence: Synthetic oligonucleotide
gaagcacaacccucccauc

SEQ ID NO: 1825868 - RNA, 19 nt, Artificial Sequence
  Description of Artificial Sequence: Synthetic oligonucleotide
ugucgauuggcgugcugua

SEQ ID NO: 1825869 - RNA, 19 nt, Artificial Sequence
  Description of Artificial Sequence: Synthetic oligonucleotide
gaagagcguccaaggacug

SEQ ID NO: 1825870 - RNA, 19 nt, Artificial Sequence
  Description of Artificial Sequence: Synthetic oligonucleotide
cccugaagcacaacccucc

SEQ ID NO: 1825871 - RNA, 19 nt, Artificial Sequence
  Description of Artificial Sequence: Synthetic oligonucleotide
gacauuagguuagcuuuaa

SEQ ID NO: 1825872 - RNA, 19 nt, Artificial Sequence
  Description of Artificial Sequence: Synthetic oligonucleotide
ggcuauuccaacgaccgga

SEQ ID NO: 1825873 - RNA, 19 nt, Artificial Sequence
  Description of Artificial Sequence: Synthetic oligonucleotide
acacugcacggagguauac

SEQ ID NO: 1825874 - RNA, 19 nt, Artificial Sequence
  Description of Artificial Sequence: Synthetic oligonucleotide
acugcgcccgugguguuuc

SEQ ID NO: 1825875 - RNA, 19 nt, Artificial Sequence
  Description of Artificial Sequence: Synthetic oligonucleotide
caucccuagcaacuccauc

SEQ ID NO: 1825876 - RNA, 19 nt, Artificial Sequence
  Description of Artificial Sequence: Synthetic oligonucleotide
uuccaacgaccggaggcag

SEQ ID NO: 1825877 - RNA, 19 nt, Artificial Sequence
  Description of Artificial Sequence: Synthetic oligonucleotide
gucgauuggcgugcuguag

SEQ ID NO: 1825878 - RNA, 19 nt, Artificial Sequence
  Description of Artificial Sequence: Synthetic oligonucleotide
guacucgaaacagcuggac

SEQ ID NO: 1825879 - RNA, 19 nt, Artificial Sequence
  Description of Artificial Sequence: Synthetic oligonucleotide
uauacuccagauggccaau

SEQ ID NO: 1825880 - RNA, 19 nt, Artificial Sequence
  Description of Artificial Sequence: Synthetic oligonucleotide
cucuaugaacaaguaaucu

SEQ ID NO: 1825881 - RNA, 19 nt, Artificial Sequence
  Description of Artificial Sequence: Synthetic oligonucleotide
uuucuagcauguggauaac

SEQ ID NO: 1825882 - RNA, 19 nt, Artificial Sequence
  Description of Artificial Sequence: Synthetic oligonucleotide
cugaguagucauggagcag

SEQ ID NO: 1825883 - RNA, 19 nt, Artificial Sequence
  Description of Artificial Sequence: Synthetic oligonucleotide
gcuuuaagcuuacuggcua

SEQ ID NO: 1825884 - RNA, 19 nt, Artificial Sequence
  Description of Artificial Sequence: Synthetic oligonucleotide
agacaucuuuucagaaacu

SEQ ID NO: 1825885 - RNA, 19 nt, Artificial Sequence
  Description of Artificial Sequence: Synthetic oligonucleotide
uuaccccugcgagagcgac

SEQ ID NO: 1825886 - RNA, 19 nt, Artificial Sequence
  Description of Artificial Sequence: Synthetic oligonucleotide
auacuaccacugguuucgg

SEQ ID NO: 1825887 - RNA, 19 nt, Artificial Sequence
  Description of Artificial Sequence: Synthetic oligonucleotide
uucggacauuagguuagcu

SEQ ID NO: 1825888 - RNA, 19 nt, Artificial Sequence
  Description of Artificial Sequence: Synthetic oligonucleotide
gcaauacacugcacggagg

SEQ ID NO: 1825889 - RNA, 19 nt, Artificial Sequence
  Description of Artificial Sequence: Synthetic oligonucleotide
ggccaauacaagcugguua

SEQ ID NO: 1825890 - RNA, 19 nt, Artificial Sequence
  Description of Artificial Sequence: Synthetic oligonucleotide
uggacgcugaagcccugaa

SEQ ID NO: 1825891 - RNA, 19 nt, Artificial Sequence
  Description of Artificial Sequence: Synthetic oligonucleotide
ggcccuguagaaacgagac

SEQ ID NO: 1825892 - RNA, 19 nt, Artificial Sequence
  Description of Artificial Sequence: Synthetic oligonucleotide
gcuuagcaauucaaaggcc

SEQ ID NO: 1825893 - RNA, 19 nt, Artificial Sequence
  Description of Artificial Sequence: Synthetic oligonucleotide
gcuuacuggcuauuccaac

SEQ ID NO: 1825894 - RNA, 19 nt, Artificial Sequence
  Description of Artificial Sequence: Synthetic oligonucleotide
gcuauuccaacgaccggag

SEQ ID NO: 1825895 - RNA, 19 nt, Artificial Sequence
  Description of Artificial Sequence: Synthetic oligonucleotide
augcaaccgaaacuccaua

SEQ ID NO: 1825896 - RNA, 19 nt, Artificial Sequence
  Description of Artificial Sequence: Synthetic oligonucleotide
caguuguaggauuaacuau

SEQ ID NO: 1825897 - RNA, 19 nt, Artificial Sequence
  Description of Artificial Sequence: Synthetic oligonucleotide
caugcaggccaacuggucu

SEQ ID NO: 1825898 - RNA, 19 nt, Artificial Sequence
  Description of Artificial Sequence: Synthetic oligonucleotide
acuauccguuucccugaca

SEQ ID NO: 1825899 - RNA, 19 nt, Artificial Sequence
  Description of Artificial Sequence: Synthetic oligonucleotide
uugcuaauccaaggauguc

SEQ ID NO: 1825900 - RNA, 19 nt, Artificial Sequence
  Description of Artificial Sequence: Synthetic oligonucleotide
agcgguccauuagcuaauc

SEQ ID NO: 1825901 - RNA, 19 nt, Artificial Sequence
  Description of Artificial Sequence: Synthetic oligonucleotide
ugagcucauacaggucuau

SEQ ID NO: 1825902 - RNA, 19 nt, Artificial Sequence
  Description of Artificial Sequence: Synthetic oligonucleotide
ugcgaaccaacuggacgcu

SEQ ID NO: 1825903 - RNA, 19 nt, Artificial Sequence
  Description of Artificial Sequence: Synthetic oligonucleotide
caggucuaugcuuagcaau

SEQ ID NO: 1825904 - RNA, 19 nt, Artificial Sequence
  Description of Artificial Sequence: Synthetic oligonucleotide
uugguugcacugcgcccgu

SEQ ID NO: 1825905 - RNA, 19 nt, Artificial Sequence
  Description of Artificial Sequence: Synthetic oligonucleotide
guaucgaggcaagcccuug

SEQ ID NO: 1825906 - RNA, 19 nt, Artificial Sequence
  Description of Artificial Sequence: Synthetic oligonucleotide
aagcgguccauuagcuaau

SEQ ID NO: 1825907 - RNA, 19 nt, Artificial Sequence
  Description of Artificial Sequence: Synthetic oligonucleotide
cuaaucagcuuuggcaaua

SEQ ID NO: 1825908 - RNA, 19 nt, Artificial Sequence
  Description of Artificial Sequence: Synthetic oligonucleotide
cauggugagaggucugggu

SEQ ID NO: 1825909 - RNA, 19 nt, Artificial Sequence
  Description of Artificial Sequence: Synthetic oligonucleotide
cauucaugcuuccagucuu

SEQ ID NO: 1825910 - RNA, 19 nt, Artificial Sequence
  Description of Artificial Sequence: Synthetic oligonucleotide
cggagguauacuaccacug

SEQ ID NO: 1825911 - RNA, 19 nt, Artificial Sequence
  Description of Artificial Sequence: Synthetic oligonucleotide
uccguuucccugacaccuu

SEQ ID NO: 1825912 - RNA, 19 nt, Artificial Sequence
  Description of Artificial Sequence: Synthetic oligonucleotide
cucgaaacagcuggaccca

SEQ ID NO: 1825913 - RNA, 19 nt, Artificial Sequence
  Description of Artificial Sequence: Synthetic oligonucleotide
aguagucauggagcaguau

SEQ ID NO: 1825914 - RNA, 19 nt, Artificial Sequence
  Description of Artificial Sequence: Synthetic oligonucleotide
gguauacuaccacugguuu

SEQ ID NO: 1825915 - RNA, 19 nt, Artificial Sequence
  Description of Artificial Sequence: Synthetic oligonucleotide
acgaccggaggcagcuugg

SEQ ID NO: 1825916 - RNA, 19 nt, Artificial Sequence
  Description of Artificial Sequence: Synthetic oligonucleotide
cuagcauguggauaacauu

SEQ ID NO: 1825917 - RNA, 19 nt, Artificial Sequence
  Description of Artificial Sequence: Synthetic oligonucleotide
cgauuggcgugcuguagcg

SEQ ID NO: 1825918 - RNA, 19 nt, Artificial Sequence
  Description of Artificial Sequence: Synthetic oligonucleotide
ccuuggaguuaauaaagua

SEQ ID NO: 1825919 - RNA, 19 nt, Artificial Sequence
  Description of Artificial Sequence: Synthetic oligonucleotide
caguaucgaggcaagcccu

SEQ ID NO: 1825920 - RNA, 19 nt, Artificial Sequence
  Description of Artificial Sequence: Synthetic oligonucleotide
auaaaguacuuggcccguu

SEQ ID NO: 1825921 - RNA, 19 nt, Artificial Sequence
  Description of Artificial Sequence: Synthetic oligonucleotide
ggccaugcacacaugguuc

SEQ ID NO: 1825922 - RNA, 19 nt, Artificial Sequence
  Description of Artificial Sequence: Synthetic oligonucleotide
ucgaaacagcuggacccaa

SEQ ID NO: 1825923 - RNA, 19 nt, Artificial Sequence
  Description of Artificial Sequence: Synthetic oligonucleotide
cauuguuguuuuccuauuu

SEQ ID NO: 1825924 - RNA, 19 nt, Artificial Sequence
  Description of Artificial Sequence: Synthetic oligonucleotide
gaaacuccauaugucgauu

SEQ ID NO: 1825925 - RNA, 19 nt, Artificial Sequence
  Description of Artificial Sequence: Synthetic oligonucleotide
ggucugggugcagacuugc

SEQ ID NO: 1825926 - RNA, 19 nt, Artificial Sequence
  Description of Artificial Sequence: Synthetic oligonucleotide
aguaucgaggcaagcccuu

SEQ ID NO: 1825927 - RNA, 19 nt, Artificial Sequence
  Description of Artificial Sequence: Synthetic oligonucleotide
ccgaaacuccauaugucga

SEQ ID NO: 1825928 - RNA, 19 nt, Artificial Sequence
  Description of Artificial Sequence: Synthetic oligonucleotide
auaugucgauuggcgugcu

SEQ ID NO: 1825929 - RNA, 19 nt, Artificial Sequence
  Description of Artificial Sequence: Synthetic oligonucleotide
gguacucgaaacagcugga

SEQ ID NO: 1825930 - RNA, 19 nt, Artificial Sequence
  Description of Artificial Sequence: Synthetic oligonucleotide
ccucccaucugccugagua

SEQ ID NO: 1825931 - RNA, 19 nt, Artificial Sequence
  Description of Artificial Sequence: Synthetic oligonucleotide
ugcgcccgugguguuucag

SEQ ID NO: 1825932 - RNA, 19 nt, Artificial Sequence
  Description of Artificial Sequence: Synthetic oligonucleotide
gguuccggaaggugaaacu

SEQ ID NO: 1825933 - RNA, 19 nt, Artificial Sequence
  Description of Artificial Sequence: Synthetic oligonucleotide
gaccggaggcagcuuggaa

SEQ ID NO: 1825934 - RNA, 19 nt, Artificial Sequence
  Description of Artificial Sequence: Synthetic oligonucleotide
cuuggcccguuuggauugc

SEQ ID NO: 1825935 - RNA, 19 nt, Artificial Sequence
  Description of Artificial Sequence: Synthetic oligonucleotide
guacuuggcccguuuggau

SEQ ID NO: 1825936 - RNA, 19 nt, Artificial Sequence
  Description of Artificial Sequence: Synthetic oligonucleotide
gugcuguagcggcauccca

SEQ ID NO: 1825937 - RNA, 19 nt, Artificial Sequence
  Description of Artificial Sequence: Synthetic oligonucleotide
gaguagucauggagcagua

SEQ ID NO: 1825938 - RNA, 19 nt, Artificial Sequence
  Description of Artificial Sequence: Synthetic oligonucleotide
gcaagauggauugggcaaa

SEQ ID NO: 1825939 - RNA, 19 nt, Artificial Sequence
  Description of Artificial Sequence: Synthetic oligonucleotide
uuccggggcccuguagaaa

SEQ ID NO: 1825940 - RNA, 19 nt, Artificial Sequence
  Description of Artificial Sequence: Synthetic oligonucleotide
caagcccuuggaguuaaua

SEQ ID NO: 1825941 - RNA, 19 nt, Artificial Sequence
  Description of Artificial Sequence: Synthetic oligonucleotide
aggucugggugcagacuug

SEQ ID NO: 1825942 - RNA, 19 nt, Artificial Sequence
  Description of Artificial Sequence: Synthetic oligonucleotide
ggcaucccuagcaacucca

SEQ ID NO: 1825943 - RNA, 19 nt, Artificial Sequence
  Description of Artificial Sequence: Synthetic oligonucleotide
guugcacugcgcccguggu

SEQ ID NO: 1825944 - RNA, 19 nt, Artificial Sequence
  Description of Artificial Sequence: Synthetic oligonucleotide
ggacauuagguuagcuuua

SEQ ID NO: 1825945 - RNA, 19 nt, Artificial Sequence
  Description of Artificial Sequence: Synthetic oligonucleotide
ggaaagcaguuguaggauu

SEQ ID NO: 1825946 - RNA, 19 nt, Artificial Sequence
  Description of Artificial Sequence: Synthetic oligonucleotide
gcccguuuggauugcucca

SEQ ID NO: 1825947 - RNA, 19 nt, Artificial Sequence
  Description of Artificial Sequence: Synthetic oligonucleotide
caagcugguuagacaauuu

SEQ ID NO: 1825948 - RNA, 19 nt, Artificial Sequence
  Description of Artificial Sequence: Synthetic oligonucleotide
uuggcccguuuggauugcu

SEQ ID NO: 1825949 - RNA, 19 nt, Artificial Sequence
  Description of Artificial Sequence: Synthetic oligonucleotide
gggcccuguagaaacgaga

SEQ ID NO: 1825950 - RNA, 19 nt, Artificial Sequence
  Description of Artificial Sequence: Synthetic oligonucleotide
gcauguuugcaagguaacu

SEQ ID NO: 1825951 - RNA, 19 nt, Artificial Sequence
  Description of Artificial Sequence: Synthetic oligonucleotide
ggggcccuguagaaacgag

SEQ ID NO: 1825952 - RNA, 19 nt, Artificial Sequence
  Description of Artificial Sequence: Synthetic oligonucleotide
cccuuucagugcuguugcc

SEQ ID NO: 1825953 - RNA, 19 nt, Artificial Sequence
  Description of Artificial Sequence: Synthetic oligonucleotide
agcuggacccaaagucaau

SEQ ID NO: 1825954 - RNA, 19 nt, Artificial Sequence
  Description of Artificial Sequence: Synthetic oligonucleotide
cccaucugccugaguaguc

SEQ ID NO: 1825955 - RNA, 19 nt, Artificial Sequence
  Description of Artificial Sequence: Synthetic oligonucleotide
gggugcagacuugcuaauc

SEQ ID NO: 1825956 - RNA, 19 nt, Artificial Sequence
  Description of Artificial Sequence: Synthetic oligonucleotide
gcgguccauuagcuaauca

SEQ ID NO: 1825957 - RNA, 19 nt, Artificial Sequence
  Description of Artificial Sequence: Synthetic oligonucleotide
ugguugcacugcgcccgug

SEQ ID NO: 1825958 - RNA, 19 nt, Artificial Sequence
  Description of Artificial Sequence: Synthetic oligonucleotide
caucugccugaguagucau

SEQ ID NO: 1825959 - RNA, 19 nt, Artificial Sequence
  Description of Artificial Sequence: Synthetic oligonucleotide
ccggggcccuguagaaacg

SEQ ID NO: 1825960 - RNA, 19 nt, Artificial Sequence
  Description of Artificial Sequence: Synthetic oligonucleotide
cccuuggaguuaauaaagu

SEQ ID NO: 1825961 - RNA, 19 nt, Artificial Sequence
  Description of Artificial Sequence: Synthetic oligonucleotide
cuggacgcugaagcccuga

SEQ ID NO: 1825962 - RNA, 19 nt, Artificial Sequence
  Description of Artificial Sequence: Synthetic oligonucleotide
aggcaagcccuuggaguua

SEQ ID NO: 1825963 - RNA, 19 nt, Artificial Sequence
  Description of Artificial Sequence: Synthetic oligonucleotide
cacugcacggagguauacu

SEQ ID NO: 1825964 - RNA, 19 nt, Artificial Sequence
  Description of Artificial Sequence: Synthetic oligonucleotide
acccucccaucugccugag

SEQ ID NO: 1825965 - RNA, 19 nt, Artificial Sequence
  Description of Artificial Sequence: Synthetic oligonucleotide
gcgaaccaacuggacgcug

SEQ ID NO: 1825966 - RNA, 19 nt, Artificial Sequence
  Description of Artificial Sequence: Synthetic oligonucleotide
guuagacaauuuagcccuu

SEQ ID NO: 1825967 - RNA, 19 nt, Artificial Sequence
  Description of Artificial Sequence: Synthetic oligonucleotide
ccaagcgguccauuagcua

SEQ ID NO: 1825968 - RNA, 19 nt, Artificial Sequence
  Description of Artificial Sequence: Synthetic oligonucleotide
ccaauacaagcugguuaga

SEQ ID NO: 1825969 - RNA, 19 nt, Artificial Sequence
  Description of Artificial Sequence: Synthetic oligonucleotide
cgcccgugguguuucagga

SEQ ID NO: 1825970 - RNA, 19 nt, Artificial Sequence
  Description of Artificial Sequence: Synthetic oligonucleotide
ccaacgaccggaggcagcu

SEQ ID NO: 1825971 - RNA, 19 nt, Artificial Sequence
  Description of Artificial Sequence: Synthetic oligonucleotide
cccugacaccuuguccaug

SEQ ID NO: 1825972 - RNA, 19 nt, Artificial Sequence
  Description of Artificial Sequence: Synthetic oligonucleotide
gcgggcagaggggucccac

SEQ ID NO: 1825973 - RNA, 19 nt, Artificial Sequence
  Description of Artificial Sequence: Synthetic oligonucleotide
ccggaaggugaaacuuucu

SEQ ID NO: 1825974 - RNA, 19 nt, Artificial Sequence
  Description of Artificial Sequence: Synthetic oligonucleotide
gugcuguugcccagucuuu

SEQ ID NO: 1825975 - RNA, 19 nt, Artificial Sequence
  Description of Artificial Sequence: Synthetic oligonucleotide
cugcgcccgugguguuuca

SEQ ID NO: 1825976 - RNA, 19 nt, Artificial Sequence
  Description of Artificial Sequence: Synthetic oligonucleotide
gcaucccuagcaacuccau

SEQ ID NO: 1825977 - RNA, 19 nt, Artificial Sequence
  Description of Artificial Sequence: Synthetic oligonucleotide
gcggcaucccaggaugauu

SEQ ID NO: 1825978 - RNA, 19 nt, Artificial Sequence
  Description of Artificial Sequence: Synthetic oligonucleotide
cggggcccuguagaaacga

SEQ ID NO: 1825979 - RNA, 19 nt, Artificial Sequence
  Description of Artificial Sequence: Synthetic oligonucleotide
ccccugcgagagcgacccc

SEQ ID NO: 1825980 - RNA, 19 nt, Artificial Sequence
  Description of Artificial Sequence: Synthetic oligonucleotide
cacugcgcccgugguguuu

SEQ ID NO: 1825981 - RNA, 19 nt, Artificial Sequence
  Description of Artificial Sequence: Synthetic oligonucleotide
cgaccggaggcagcuugga

SEQ ID NO: 1825982 - RNA, 19 nt, Artificial Sequence
  Description of Artificial Sequence: Synthetic oligonucleotide
caacgaccggaggcagcuu

SEQ ID NO: 1825983 - RNA, 19 nt, Artificial Sequence
  Description of Artificial Sequence: Synthetic oligonucleotide
gcacugcgcccgugguguu

SEQ ID NO: 1825984 - RNA, 19 nt, Artificial Sequence
  Description of Artificial Sequence: Synthetic oligonucleotide
cccucccaucugccugagu

SEQ ID NO: 1825985 - RNA, 19 nt, Artificial Sequence
  Description of Artificial Sequence: Synthetic oligonucleotide
aaaugaauguuccagcagc

SEQ ID NO: 1825986 - RNA, 19 nt, Artificial Sequence
  Description of Artificial Sequence: Synthetic oligonucleotide
caauauuuagcaaagaagg

SEQ ID NO: 1825987 - RNA, 19 nt, Artificial Sequence
  Description of Artificial Sequence: Synthetic oligonucleotide
auugacagcagccacaucc

SEQ ID NO: 1825988 - RNA, 19 nt, Artificial Sequence
  Description of Artificial Sequence: Synthetic oligonucleotide
aaagaaggacuucugcucc

SEQ ID NO: 1825989 - RNA, 19 nt, Artificial Sequence
  Description of Artificial Sequence: Synthetic oligonucleotide
ucuauguucaugcaauagg

SEQ ID NO: 1825990 - RNA, 19 nt, Artificial Sequence
  Description of Artificial Sequence: Synthetic oligonucleotide
uuaaucaacagccacacaa

SEQ ID NO: 1825991 - RNA, 19 nt, Artificial Sequence
  Description of Artificial Sequence: Synthetic oligonucleotide
uguacauccaauauuuagc

SEQ ID NO: 1825992 - RNA, 19 nt, Artificial Sequence
  Description of Artificial Sequence: Synthetic oligonucleotide
uucugaaccaucaaguacc

SEQ ID NO: 1825993 - RNA, 19 nt, Artificial Sequence
  Description of Artificial Sequence: Synthetic oligonucleotide
agcaaagggacacagugcc

SEQ ID NO: 1825994 - RNA, 19 nt, Artificial Sequence
  Description of Artificial Sequence: Synthetic oligonucleotide
cuaagugugauagugaggg

SEQ ID NO: 1825995 - RNA, 19 nt, Artificial Sequence
  Description of Artificial Sequence: Synthetic oligonucleotide
acuauuuacaaccacagaa

SEQ ID NO: 1825996 - RNA, 19 nt, Artificial Sequence
  Description of Artificial Sequence: Synthetic oligonucleotide
uauuuagcaaagaaggacu

SEQ ID NO: 1825997 - RNA, 19 nt, Artificial Sequence
  Description of Artificial Sequence: Synthetic oligonucleotide
auauuuagcaaagaaggac

SEQ ID NO: 1825998 - RNA, 19 nt, Artificial Sequence
  Description of Artificial Sequence: Synthetic oligonucleotide
aauagggagauggaggaac

SEQ ID NO: 1825999 - RNA, 19 nt, Artificial Sequence
  Description of Artificial Sequence: Synthetic oligonucleotide
cuauguucaugcaauaggg

SEQ ID NO: 1826000 - RNA, 19 nt, Artificial Sequence
  Description of Artificial Sequence: Synthetic oligonucleotide
cuagaguguacauucaagg

SEQ ID NO: 1826001 - RNA, 19 nt, Artificial Sequence
  Description of Artificial Sequence: Synthetic oligonucleotide
ucuguaacauguccuaagg

SEQ ID NO: 1826002 - RNA, 19 nt, Artificial Sequence
  Description of Artificial Sequence: Synthetic oligonucleotide
ucaugcaauagggagaugg

SEQ ID NO: 1826003 - RNA, 19 nt, Artificial Sequence
  Description of Artificial Sequence: Synthetic oligonucleotide
aaaucaagccaaugacagc

SEQ ID NO: 1826004 - RNA, 19 nt, Artificial Sequence
  Description of Artificial Sequence: Synthetic oligonucleotide
aaucaagccaaugacagca

SEQ ID NO: 1826005 - RNA, 19 nt, Artificial Sequence
  Description of Artificial Sequence: Synthetic oligonucleotide
uguauugaagagcuccagg

SEQ ID NO: 1826006 - RNA, 19 nt, Artificial Sequence
  Description of Artificial Sequence: Synthetic oligonucleotide
uaugcagcaaucuccgugg

SEQ ID NO: 1826007 - RNA, 19 nt, Artificial Sequence
  Description of Artificial Sequence: Synthetic oligonucleotide
cauaaaucaagccaaugac

SEQ ID NO: 1826008 - RNA, 19 nt, Artificial Sequence
  Description of Artificial Sequence: Synthetic oligonucleotide
uccgggacuauuuacaacc

SEQ ID NO: 1826009 - RNA, 19 nt, Artificial Sequence
  Description of Artificial Sequence: Synthetic oligonucleotide
aacugcaugauggaguggg

SEQ ID NO: 1826010 - RNA, 19 nt, Artificial Sequence
  Description of Artificial Sequence: Synthetic oligonucleotide
cacacaaauugcuagagug

SEQ ID NO: 1826011 - RNA, 19 nt, Artificial Sequence
  Description of Artificial Sequence: Synthetic oligonucleotide
aagacacguagccaccagc

SEQ ID NO: 1826012 - RNA, 19 nt, Artificial Sequence
  Description of Artificial Sequence: Synthetic oligonucleotide
auguacauccaauauuuag

SEQ ID NO: 1826013 - RNA, 19 nt, Artificial Sequence
  Description of Artificial Sequence: Synthetic oligonucleotide
gacuaagugugauagugag

SEQ ID NO: 1826014 - RNA, 19 nt, Artificial Sequence
  Description of Artificial Sequence: Synthetic oligonucleotide
ucuaggcgcucaaugaagg

SEQ ID NO: 1826015 - RNA, 19 nt, Artificial Sequence
  Description of Artificial Sequence: Synthetic oligonucleotide
ugcaaguaagugcacaaca

SEQ ID NO: 1826016 - RNA, 19 nt, Artificial Sequence
  Description of Artificial Sequence: Synthetic oligonucleotide
cacguugccagccacaucc

SEQ ID NO: 1826017 - RNA, 19 nt, Artificial Sequence
  Description of Artificial Sequence: Synthetic oligonucleotide
agaguguacauucaaggcu

SEQ ID NO: 1826018 - RNA, 19 nt, Artificial Sequence
  Description of Artificial Sequence: Synthetic oligonucleotide
uguucaugcaauagggaga

SEQ ID NO: 1826019 - RNA, 19 nt, Artificial Sequence
  Description of Artificial Sequence: Synthetic oligonucleotide
acauccaauauuuagcaaa

SEQ ID NO: 1826020 - RNA, 19 nt, Artificial Sequence
  Description of Artificial Sequence: Synthetic oligonucleotide
aaggccauugacagcagcc

SEQ ID NO: 1826021 - RNA, 19 nt, Artificial Sequence
  Description of Artificial Sequence: Synthetic oligonucleotide
auucaaggcugauccagcc

SEQ ID NO: 1826022 - RNA, 19 nt, Artificial Sequence
  Description of Artificial Sequence: Synthetic oligonucleotide
uggccaaguggcuauaggg

SEQ ID NO: 1826023 - RNA, 19 nt, Artificial Sequence
  Description of Artificial Sequence: Synthetic oligonucleotide
aaucaacagccacacaaca

SEQ ID NO: 1826024 - RNA, 19 nt, Artificial Sequence
  Description of Artificial Sequence: Synthetic oligonucleotide
caugcacacaaauugcuag

SEQ ID NO: 1826025 - RNA, 19 nt, Artificial Sequence
  Description of Artificial Sequence: Synthetic oligonucleotide
gagacuaagugugauagug

SEQ ID NO: 1826026 - RNA, 19 nt, Artificial Sequence
  Description of Artificial Sequence: Synthetic oligonucleotide
uagaguguacauucaaggc

SEQ ID NO: 1826027 - RNA, 19 nt, Artificial Sequence
  Description of Artificial Sequence: Synthetic oligonucleotide
aggucaguuggucugagag

SEQ ID NO: 1826028 - RNA, 19 nt, Artificial Sequence
  Description of Artificial Sequence: Synthetic oligonucleotide
aacauguccuaaggaagcc

SEQ ID NO: 1826029 - RNA, 19 nt, Artificial Sequence
  Description of Artificial Sequence: Synthetic oligonucleotide
aauauuuagcaaagaagga

SEQ ID NO: 1826030 - RNA, 19 nt, Artificial Sequence
  Description of Artificial Sequence: Synthetic oligonucleotide
aagcagguugaaugguggc

SEQ ID NO: 1826031 - RNA, 19 nt, Artificial Sequence
  Description of Artificial Sequence: Synthetic oligonucleotide
auauccuuggcaaggagac

SEQ ID NO: 1826032 - RNA, 19 nt, Artificial Sequence
  Description of Artificial Sequence: Synthetic oligonucleotide
cucaaacauaaaucaagcc

SEQ ID NO: 1826033 - RNA, 19 nt, Artificial Sequence
  Description of Artificial Sequence: Synthetic oligonucleotide
cauccaauauuuagcaaag

SEQ ID NO: 1826034 - RNA, 19 nt, Artificial Sequence
  Description of Artificial Sequence: Synthetic oligonucleotide
aagccacucaaacauaaau

SEQ ID NO: 1826035 - RNA, 19 nt, Artificial Sequence
  Description of Artificial Sequence: Synthetic oligonucleotide
guggcuauaggguuguugc

SEQ ID NO: 1826036 - RNA, 19 nt, Artificial Sequence
  Description of Artificial Sequence: Synthetic oligonucleotide
ucaccaaucucaaaugaau

SEQ ID NO: 1826037 - RNA, 19 nt, Artificial Sequence
  Description of Artificial Sequence: Synthetic oligonucleotide
ugauccagccaccagcagc

SEQ ID NO: 1826038 - RNA, 19 nt, Artificial Sequence
  Description of Artificial Sequence: Synthetic oligonucleotide
uaaucaacagccacacaac

SEQ ID NO: 1826039 - RNA, 19 nt, Artificial Sequence
  Description of Artificial Sequence: Synthetic oligonucleotide
aggagacuaagugugauag

SEQ ID NO: 1826040 - RNA, 19 nt, Artificial Sequence
  Description of Artificial Sequence: Synthetic oligonucleotide
gaagggacagccuucuaug

SEQ ID NO: 1826041 - RNA, 19 nt, Artificial Sequence
  Description of Artificial Sequence: Synthetic oligonucleotide
guaacauguccuaaggaag

SEQ ID NO: 1826042 - RNA, 19 nt, Artificial Sequence
  Description of Artificial Sequence: Synthetic oligonucleotide
acacguagccaccagcuuc

SEQ ID NO: 1826043 - RNA, 19 nt, Artificial Sequence
  Description of Artificial Sequence: Synthetic oligonucleotide
acagauguauugaagagcu

SEQ ID NO: 1826044 - RNA, 19 nt, Artificial Sequence
  Description of Artificial Sequence: Synthetic oligonucleotide
caaagaaggacuucugcuc

SEQ ID NO: 1826045 - RNA, 19 nt, Artificial Sequence
  Description of Artificial Sequence: Synthetic oligonucleotide
guaaaggccauugacagca

SEQ ID NO: 1826046 - RNA, 19 nt, Artificial Sequence
  Description of Artificial Sequence: Synthetic oligonucleotide
cuugggcugcucuaggugg

SEQ ID NO: 1826047 - RNA, 19 nt, Artificial Sequence
  Description of Artificial Sequence: Synthetic oligonucleotide
guuguugcaaguaagugca

SEQ ID NO: 1826048 - RNA, 19 nt, Artificial Sequence
  Description of Artificial Sequence: Synthetic oligonucleotide
aacauaaaucaagccaaug

SEQ ID NO: 1826049 - RNA, 19 nt, Artificial Sequence
  Description of Artificial Sequence: Synthetic oligonucleotide
gguuguugcaaguaagugc

SEQ ID NO: 1826050 - RNA, 19 nt, Artificial Sequence
  Description of Artificial Sequence: Synthetic oligonucleotide
gagauggaggaacaggaac

SEQ ID NO: 1826051 - RNA, 19 nt, Artificial Sequence
  Description of Artificial Sequence: Synthetic oligonucleotide
caaacugcaugauggagug

SEQ ID NO: 1826052 - RNA, 19 nt, Artificial Sequence
  Description of Artificial Sequence: Synthetic oligonucleotide
ugcaaggucaguuggucug

SEQ ID NO: 1826053 - RNA, 19 nt, Artificial Sequence
  Description of Artificial Sequence: Synthetic oligonucleotide
uacaaccacagaaggcagg

SEQ ID NO: 1826054 - RNA, 19 nt, Artificial Sequence
  Description of Artificial Sequence: Synthetic oligonucleotide
guacauccaauauuuagca

SEQ ID NO: 1826055 - RNA, 19 nt, Artificial Sequence
  Description of Artificial Sequence: Synthetic oligonucleotide
caaugagccacgcuucugg

SEQ ID NO: 1826056 - RNA, 19 nt, Artificial Sequence
  Description of Artificial Sequence: Synthetic oligonucleotide
gaacagcacaacuggaaug

SEQ ID NO: 1826057 - RNA, 19 nt, Artificial Sequence
  Description of Artificial Sequence: Synthetic oligonucleotide
uuacaaccacagaaggcag

SEQ ID NO: 1826058 - RNA, 19 nt, Artificial Sequence
  Description of Artificial Sequence: Synthetic oligonucleotide
uagggaacaguuuaaucaa

SEQ ID NO: 1826059 - RNA, 19 nt, Artificial Sequence
  Description of Artificial Sequence: Synthetic oligonucleotide
uucuauguucaugcaauag

SEQ ID NO: 1826060 - RNA, 19 nt, Artificial Sequence
  Description of Artificial Sequence: Synthetic oligonucleotide
caaucucaaaugaauguuc

SEQ ID NO: 1826061 - RNA, 19 nt, Artificial Sequence
  Description of Artificial Sequence: Synthetic oligonucleotide
agcacaacuggaaugaugu

SEQ ID NO: 1826062 - RNA, 19 nt, Artificial Sequence
  Description of Artificial Sequence: Synthetic oligonucleotide
ugcacaacagcugucgagc

SEQ ID NO: 1826063 - RNA, 19 nt, Artificial Sequence
  Description of Artificial Sequence: Synthetic oligonucleotide
uacgcgaccacugacaguc

SEQ ID NO: 1826064 - RNA, 19 nt, Artificial Sequence
  Description of Artificial Sequence: Synthetic oligonucleotide
ugagcugccguuguguugc

SEQ ID NO: 1826065 - RNA, 19 nt, Artificial Sequence
  Description of Artificial Sequence: Synthetic oligonucleotide
ugguucuguagcaaaggga

SEQ ID NO: 1826066 - RNA, 19 nt, Artificial Sequence
  Description of Artificial Sequence: Synthetic oligonucleotide
caaaugaauguuccagcag

SEQ ID NO: 1826067 - RNA, 19 nt, Artificial Sequence
  Description of Artificial Sequence: Synthetic oligonucleotide
ugcucuagguggcacagcu

SEQ ID NO: 1826068 - RNA, 19 nt, Artificial Sequence
  Description of Artificial Sequence: Synthetic oligonucleotide
uggaaugauguacauccaa

SEQ ID NO: 1826069 - RNA, 19 nt, Artificial Sequence
  Description of Artificial Sequence: Synthetic oligonucleotide
acccggacucuguaaaggc

SEQ ID NO: 1826070 - RNA, 19 nt, Artificial Sequence
  Description of Artificial Sequence: Synthetic oligonucleotide
agccacucaaacauaaauc

SEQ ID NO: 1826071 - RNA, 19 nt, Artificial Sequence
  Description of Artificial Sequence: Synthetic oligonucleotide
accacugacagucccacca

SEQ ID NO: 1826072 - RNA, 19 nt, Artificial Sequence
  Description of Artificial Sequence: Synthetic oligonucleotide
ugggacuccaccagggagc

SEQ ID NO: 1826073 - RNA, 19 nt, Artificial Sequence
  Description of Artificial Sequence: Synthetic oligonucleotide
ugaaugguggcugcuuagg

SEQ ID NO: 1826074 - RNA, 19 nt, Artificial Sequence
  Description of Artificial Sequence: Synthetic oligonucleotide
cacaugcaaggucaguugg

SEQ ID NO: 1826075 - RNA, 19 nt, Artificial Sequence
  Description of Artificial Sequence: Synthetic oligonucleotide
aacccggacucuguaaagg

SEQ ID NO: 1826076 - RNA, 19 nt, Artificial Sequence
  Description of Artificial Sequence: Synthetic oligonucleotide
cucuguaacauguccuaag

SEQ ID NO: 1826077 - RNA, 19 nt, Artificial Sequence
  Description of Artificial Sequence: Synthetic oligonucleotide
uugacagcagccacauccc

SEQ ID NO: 1826078 - RNA, 19 nt, Artificial Sequence
  Description of Artificial Sequence: Synthetic oligonucleotide
uagcaaagggacacagugc

SEQ ID NO: 1826079 - RNA, 19 nt, Artificial Sequence
  Description of Artificial Sequence: Synthetic oligonucleotide
augauguacauccaauauu

SEQ ID NO: 1826080 - RNA, 19 nt, Artificial Sequence
  Description of Artificial Sequence: Synthetic oligonucleotide
cucgucuuccaccucagag

SEQ ID NO: 1826081 - RNA, 19 nt, Artificial Sequence
  Description of Artificial Sequence: Synthetic oligonucleotide
uccagagcaaugagccacg

SEQ ID NO: 1826082 - RNA, 19 nt, Artificial Sequence
  Description of Artificial Sequence: Synthetic oligonucleotide
uuguguugcagacaagguu

SEQ ID NO: 1826083 - RNA, 19 nt, Artificial Sequence
  Description of Artificial Sequence: Synthetic oligonucleotide
ucuugggcugcucuaggug

SEQ ID NO: 1826084 - RNA, 19 nt, Artificial Sequence
  Description of Artificial Sequence: Synthetic oligonucleotide
caccaaucucaaaugaaug

SEQ ID NO: 1826085 - RNA, 19 nt, Artificial Sequence
  Description of Artificial Sequence: Synthetic oligonucleotide
aaugaauguuccagcagca

SEQ ID NO: 1826086 - RNA, 19 nt, Artificial Sequence
  Description of Artificial Sequence: Synthetic oligonucleotide
caguuuaaucaacagccac

SEQ ID NO: 1826087 - RNA, 19 nt, Artificial Sequence
  Description of Artificial Sequence: Synthetic oligonucleotide
cacaacuggaaugauguac

SEQ ID NO: 1826088 - RNA, 19 nt, Artificial Sequence
  Description of Artificial Sequence: Synthetic oligonucleotide
cauguccuaaggaagccac

SEQ ID NO: 1826089 - RNA, 19 nt, Artificial Sequence
  Description of Artificial Sequence: Synthetic oligonucleotide
cacagauguauugaagagc

SEQ ID NO: 1826090 - RNA, 19 nt, Artificial Sequence
  Description of Artificial Sequence: Synthetic oligonucleotide
ugcacacaaauugcuagag

SEQ ID NO: 1826091 - RNA, 19 nt, Artificial Sequence
  Description of Artificial Sequence: Synthetic oligonucleotide
gcagcaaucccacaguacc

SEQ ID NO: 1826092 - RNA, 19 nt, Artificial Sequence
  Description of Artificial Sequence: Synthetic oligonucleotide
aucucuaggcgcucaauga

SEQ ID NO: 1826093 - RNA, 19 nt, Artificial Sequence
  Description of Artificial Sequence: Synthetic oligonucleotide
uuagugguucuguagcaaa

SEQ ID NO: 1826094 - RNA, 19 nt, Artificial Sequence
  Description of Artificial Sequence: Synthetic oligonucleotide
gaaugauguacauccaaua

SEQ ID NO: 1826095 - RNA, 19 nt, Artificial Sequence
  Description of Artificial Sequence: Synthetic oligonucleotide
aaauugcuagaguguacau

SEQ ID NO: 1826096 - RNA, 19 nt, Artificial Sequence
  Description of Artificial Sequence: Synthetic oligonucleotide
cauucaaggcugauccagc

SEQ ID NO: 1826097 - RNA, 19 nt, Artificial Sequence
  Description of Artificial Sequence: Synthetic oligonucleotide
gguucuguagcaaagggac

SEQ ID NO: 1826098 - RNA, 19 nt, Artificial Sequence
  Description of Artificial Sequence: Synthetic oligonucleotide
uguacauucaaggcugauc

SEQ ID NO: 1826099 - RNA, 19 nt, Artificial Sequence
  Description of Artificial Sequence: Synthetic oligonucleotide
uaagugugauagugagggg

SEQ ID NO: 1826100 - RNA, 19 nt, Artificial Sequence
  Description of Artificial Sequence: Synthetic oligonucleotide
caaucccacaguaccacag

SEQ ID NO: 1826101 - RNA, 19 nt, Artificial Sequence
  Description of Artificial Sequence: Synthetic oligonucleotide
acaacuggaaugauguaca

SEQ ID NO: 1826102 - RNA, 19 nt, Artificial Sequence
  Description of Artificial Sequence: Synthetic oligonucleotide
uguugcaaguaagugcaca

SEQ ID NO: 1826103 - RNA, 19 nt, Artificial Sequence
  Description of Artificial Sequence: Synthetic oligonucleotide
aaugagccacgcuucugga

SEQ ID NO: 1826104 - RNA, 19 nt, Artificial Sequence
  Description of Artificial Sequence: Synthetic oligonucleotide
gccacucaaacauaaauca

SEQ ID NO: 1826105 - RNA, 19 nt, Artificial Sequence
  Description of Artificial Sequence: Synthetic oligonucleotide
aagggacagccuucuaugu

SEQ ID NO: 1826106 - RNA, 19 nt, Artificial Sequence
  Description of Artificial Sequence: Synthetic oligonucleotide
uuuaaucaacagccacaca

SEQ ID NO: 1826107 - RNA, 19 nt, Artificial Sequence
  Description of Artificial Sequence: Synthetic oligonucleotide
uguagcaaagggacacagu

SEQ ID NO: 1826108 - RNA, 19 nt, Artificial Sequence
  Description of Artificial Sequence: Synthetic oligonucleotide
gaaccaucaaguaccccag

SEQ ID NO: 1826109 - RNA, 19 nt, Artificial Sequence
  Description of Artificial Sequence: Synthetic oligonucleotide
acaaauugcuagaguguac

SEQ ID NO: 1826110 - RNA, 19 nt, Artificial Sequence
  Description of Artificial Sequence: Synthetic oligonucleotide
aagaaggacuucugcuccu

SEQ ID NO: 1826111 - RNA, 19 nt, Artificial Sequence
  Description of Artificial Sequence: Synthetic oligonucleotide
guauugaagagcuccaggu

SEQ ID NO: 1826112 - RNA, 19 nt, Artificial Sequence
  Description of Artificial Sequence: Synthetic oligonucleotide
aguaagugcacaacagcug

SEQ ID NO: 1826113 - RNA, 19 nt, Artificial Sequence
  Description of Artificial Sequence: Synthetic oligonucleotide
ugcuagaguguacauucaa

SEQ ID NO: 1826114 - RNA, 19 nt, Artificial Sequence
  Description of Artificial Sequence: Synthetic oligonucleotide
auaggguuguugcaaguaa

SEQ ID NO: 1826115 - RNA, 19 nt, Artificial Sequence
  Description of Artificial Sequence: Synthetic oligonucleotide
caucaugaggaacagcaca

SEQ ID NO: 1826116 - RNA, 19 nt, Artificial Sequence
  Description of Artificial Sequence: Synthetic oligonucleotide
gaggcuaugcagcaaucuc

SEQ ID NO: 1826117 - RNA, 19 nt, Artificial Sequence
  Description of Artificial Sequence: Synthetic oligonucleotide
uggagcuccugacaucaug

SEQ ID NO: 1826118 - RNA, 19 nt, Artificial Sequence
  Description of Artificial Sequence: Synthetic oligonucleotide
caucucuaggcgcucaaug

SEQ ID NO: 1826119 - RNA, 19 nt, Artificial Sequence
  Description of Artificial Sequence: Synthetic oligonucleotide
ucccacaguaccacagccc

SEQ ID NO: 1826120 - RNA, 19 nt, Artificial Sequence
  Description of Artificial Sequence: Synthetic oligonucleotide
agcacgcugggacaaagga

SEQ ID NO: 1826121 - RNA, 19 nt, Artificial Sequence
  Description of Artificial Sequence: Synthetic oligonucleotide
guagccaccagcuucugaa

SEQ ID NO: 1826122 - RNA, 19 nt, Artificial Sequence
  Description of Artificial Sequence: Synthetic oligonucleotide
acaagguuccuuccugcug

SEQ ID NO: 1826123 - RNA, 19 nt, Artificial Sequence
  Description of Artificial Sequence: Synthetic oligonucleotide
aucaaguaccccaggccgc

SEQ ID NO: 1826124 - RNA, 19 nt, Artificial Sequence
  Description of Artificial Sequence: Synthetic oligonucleotide
caguuggucugagaggugg

SEQ ID NO: 1826125 - RNA, 19 nt, Artificial Sequence
  Description of Artificial Sequence: Synthetic oligonucleotide
acuaagugugauagugagg

SEQ ID NO: 1826126 - RNA, 19 nt, Artificial Sequence
  Description of Artificial Sequence: Synthetic oligonucleotide
caaauugcuagaguguaca

SEQ ID NO: 1826127 - RNA, 19 nt, Artificial Sequence
  Description of Artificial Sequence: Synthetic oligonucleotide
gaagacacguagccaccag

SEQ ID NO: 1826128 - RNA, 19 nt, Artificial Sequence
  Description of Artificial Sequence: Synthetic oligonucleotide
gacuauuuacaaccacaga

SEQ ID NO: 1826129 - RNA, 19 nt, Artificial Sequence
  Description of Artificial Sequence: Synthetic oligonucleotide
augcaauagggagauggag

SEQ ID NO: 1826130 - RNA, 19 nt, Artificial Sequence
  Description of Artificial Sequence: Synthetic oligonucleotide
auguuccagcagcaauccc

SEQ ID NO: 1826131 - RNA, 19 nt, Artificial Sequence
  Description of Artificial Sequence: Synthetic oligonucleotide
guugcaaguaagugcacaa

SEQ ID NO: 1826132 - RNA, 19 nt, Artificial Sequence
  Description of Artificial Sequence: Synthetic oligonucleotide
gaacccggacucuguaaag

SEQ ID NO: 1826133 - RNA, 19 nt, Artificial Sequence
  Description of Artificial Sequence: Synthetic oligonucleotide
cucaaaccuggcucaaaac

SEQ ID NO: 1826134 - RNA, 19 nt, Artificial Sequence
  Description of Artificial Sequence: Synthetic oligonucleotide
uguccuaaggaagccacuc

SEQ ID NO: 1826135 - RNA, 19 nt, Artificial Sequence
  Description of Artificial Sequence: Synthetic oligonucleotide
cuagcucaaaccuggcuca

SEQ ID NO: 1826136 - RNA, 19 nt, Artificial Sequence
  Description of Artificial Sequence: Synthetic oligonucleotide
gcacagauguauugaagag

SEQ ID NO: 1826137 - RNA, 19 nt, Artificial Sequence
  Description of Artificial Sequence: Synthetic oligonucleotide
ugcuuagggaacaguuuaa

SEQ ID NO: 1826138 - RNA, 19 nt, Artificial Sequence
  Description of Artificial Sequence: Synthetic oligonucleotide
uauaggguuguugcaagua

SEQ ID NO: 1826139 - RNA, 19 nt, Artificial Sequence
  Description of Artificial Sequence: Synthetic oligonucleotide
acaucaugaggaacagcac

SEQ ID NO: 1826140 - RNA, 19 nt, Artificial Sequence
  Description of Artificial Sequence: Synthetic oligonucleotide
caaugaaggcugcagucuc

SEQ ID NO: 1826141 - RNA, 19 nt, Artificial Sequence
  Description of Artificial Sequence: Synthetic oligonucleotide
cuggcucaaaacaugcaca

SEQ ID NO: 1826142 - RNA, 19 nt, Artificial Sequence
  Description of Artificial Sequence: Synthetic oligonucleotide
cuggagagagcuuggcaug

SEQ ID NO: 1826143 - RNA, 19 nt, Artificial Sequence
  Description of Artificial Sequence: Synthetic oligonucleotide
ugaggcuaugcagcaaucu

SEQ ID NO: 1826144 - RNA, 19 nt, Artificial Sequence
  Description of Artificial Sequence: Synthetic oligonucleotide
uccacaugcaaggucaguu

SEQ ID NO: 1826145 - RNA, 19 nt, Artificial Sequence
  Description of Artificial Sequence: Synthetic oligonucleotide
acacaaauugcuagagugu

SEQ ID NO: 1826146 - RNA, 19 nt, Artificial Sequence
  Description of Artificial Sequence: Synthetic oligonucleotide
uaggcgcucaaugaaggcu

SEQ ID NO: 1826147 - RNA, 19 nt, Artificial Sequence
  Description of Artificial Sequence: Synthetic oligonucleotide
ugcugguuccagagcaaug

SEQ ID NO: 1826148 - RNA, 19 nt, Artificial Sequence
  Description of Artificial Sequence: Synthetic oligonucleotide
agccacauccacaugcaag

SEQ ID NO: 1826149 - RNA, 19 nt, Artificial Sequence
  Description of Artificial Sequence: Synthetic oligonucleotide
ucaaguaccccaggccgcc

SEQ ID NO: 1826150 - RNA, 19 nt, Artificial Sequence
  Description of Artificial Sequence: Synthetic oligonucleotide
gauggaggaacaggaacuc

SEQ ID NO: 1826151 - RNA, 19 nt, Artificial Sequence
  Description of Artificial Sequence: Synthetic oligonucleotide
acaucccggagccggcccc

SEQ ID NO: 1826152 - RNA, 19 nt, Artificial Sequence
  Description of Artificial Sequence: Synthetic oligonucleotide
auguauugaagagcuccag

SEQ ID NO: 1826153 - RNA, 19 nt, Artificial Sequence
  Description of Artificial Sequence: Synthetic oligonucleotide
gcaauagggagauggagga

SEQ ID NO: 1826154 - RNA, 19 nt, Artificial Sequence
  Description of Artificial Sequence: Synthetic oligonucleotide
cacaguugcagaagggaca

SEQ ID NO: 1826155 - RNA, 19 nt, Artificial Sequence
  Description of Artificial Sequence: Synthetic oligonucleotide
gcaaguaagugcacaacag

SEQ ID NO: 1826156 - RNA, 19 nt, Artificial Sequence
  Description of Artificial Sequence: Synthetic oligonucleotide
augcagcaaucuccguggc

SEQ ID NO: 1826157 - RNA, 19 nt, Artificial Sequence
  Description of Artificial Sequence: Synthetic oligonucleotide
aguggcuauaggguuguug

SEQ ID NO: 1826158 - RNA, 19 nt, Artificial Sequence
  Description of Artificial Sequence: Synthetic oligonucleotide
uaaaggccauugacagcag

SEQ ID NO: 1826159 - RNA, 19 nt, Artificial Sequence
  Description of Artificial Sequence: Synthetic oligonucleotide
gagcuccugacaucaugag

SEQ ID NO: 1826160 - RNA, 19 nt, Artificial Sequence
  Description of Artificial Sequence: Synthetic oligonucleotide
agcagcaaucccacaguac

SEQ ID NO: 1826161 - RNA, 19 nt, Artificial Sequence
  Description of Artificial Sequence: Synthetic oligonucleotide
guggccaaguggcuauagg

SEQ ID NO: 1826162 - RNA, 19 nt, Artificial Sequence
  Description of Artificial Sequence: Synthetic oligonucleotide
ucccaaacugcaugaugga

SEQ ID NO: 1826163 - RNA, 19 nt, Artificial Sequence
  Description of Artificial Sequence: Synthetic oligonucleotide
gguacgcgaccacugacag

SEQ ID NO: 1826164 - RNA, 19 nt, Artificial Sequence
  Description of Artificial Sequence: Synthetic oligonucleotide
aucaugaggaacagcacaa

SEQ ID NO: 1826165 - RNA, 19 nt, Artificial Sequence
  Description of Artificial Sequence: Synthetic oligonucleotide
gccagccacauccacaugc

SEQ ID NO: 1826166 - RNA, 19 nt, Artificial Sequence
  Description of Artificial Sequence: Synthetic oligonucleotide
agcaaugagccacgcuucu

SEQ ID NO: 1826167 - RNA, 19 nt, Artificial Sequence
  Description of Artificial Sequence: Synthetic oligonucleotide
cagcacaacuggaaugaug

SEQ ID NO: 1826168 - RNA, 19 nt, Artificial Sequence
  Description of Artificial Sequence: Synthetic oligonucleotide
ggcugauccagccaccagc

SEQ ID NO: 1826169 - RNA, 19 nt, Artificial Sequence
  Description of Artificial Sequence: Synthetic oligonucleotide
cuguagcaaagggacacag

SEQ ID NO: 1826170 - RNA, 19 nt, Artificial Sequence
  Description of Artificial Sequence: Synthetic oligonucleotide
acucuguaaaggccauuga

SEQ ID NO: 1826171 - RNA, 19 nt, Artificial Sequence
  Description of Artificial Sequence: Synthetic oligonucleotide
cacagugccacauggcaga

SEQ ID NO: 1826172 - RNA, 19 nt, Artificial Sequence
  Description of Artificial Sequence: Synthetic oligonucleotide
aaggucaguuggucugaga

SEQ ID NO: 1826173 - RNA, 19 nt, Artificial Sequence
  Description of Artificial Sequence: Synthetic oligonucleotide
agcuagcucaaaccuggcu

SEQ ID NO: 1826174 - RNA, 19 nt, Artificial Sequence
  Description of Artificial Sequence: Synthetic oligonucleotide
caugcaauagggagaugga

SEQ ID NO: 1826175 - RNA, 19 nt, Artificial Sequence
  Description of Artificial Sequence: Synthetic oligonucleotide
caugcaaggucaguugguc

SEQ ID NO: 1826176 - RNA, 19 nt, Artificial Sequence
  Description of Artificial Sequence: Synthetic oligonucleotide
acaguuuaaucaacagcca

SEQ ID NO: 1826177 - RNA, 19 nt, Artificial Sequence
  Description of Artificial Sequence: Synthetic oligonucleotide
gagcacaguugcagaaggg

SEQ ID NO: 1826178 - RNA, 19 nt, Artificial Sequence
  Description of Artificial Sequence: Synthetic oligonucleotide
uggcuauaggguuguugca

SEQ ID NO: 1826179 - RNA, 19 nt, Artificial Sequence
  Description of Artificial Sequence: Synthetic oligonucleotide
gcuagaguguacauucaag

SEQ ID NO: 1826180 - RNA, 19 nt, Artificial Sequence
  Description of Artificial Sequence: Synthetic oligonucleotide
ucuguagcaaagggacaca

SEQ ID NO: 1826181 - RNA, 19 nt, Artificial Sequence
  Description of Artificial Sequence: Synthetic oligonucleotide
agacacguagccaccagcu

SEQ ID NO: 1826182 - RNA, 19 nt, Artificial Sequence
  Description of Artificial Sequence: Synthetic oligonucleotide
uggaguuagugguucugua

SEQ ID NO: 1826183 - RNA, 19 nt, Artificial Sequence
  Description of Artificial Sequence: Synthetic oligonucleotide
aaggcugauccagccacca

SEQ ID NO: 1826184 - RNA, 19 nt, Artificial Sequence
  Description of Artificial Sequence: Synthetic oligonucleotide
cacaacagcugucgagcag

SEQ ID NO: 1826185 - RNA, 19 nt, Artificial Sequence
  Description of Artificial Sequence: Synthetic oligonucleotide
agacuaagugugauaguga

SEQ ID NO: 1826186 - RNA, 19 nt, Artificial Sequence
  Description of Artificial Sequence: Synthetic oligonucleotide
auccuuggcaaggagacua

SEQ ID NO: 1826187 - RNA, 19 nt, Artificial Sequence
  Description of Artificial Sequence: Synthetic oligonucleotide
agugcacaacagcugucga

SEQ ID NO: 1826188 - RNA, 19 nt, Artificial Sequence
  Description of Artificial Sequence: Synthetic oligonucleotide
uggcacagcugcucaccgg

SEQ ID NO: 1826189 - RNA, 19 nt, Artificial Sequence
  Description of Artificial Sequence: Synthetic oligonucleotide
cacgcuucuggaaguuggc

SEQ ID NO: 1826190 - RNA, 19 nt, Artificial Sequence
  Description of Artificial Sequence: Synthetic oligonucleotide
gggacagccuucuauguuc

SEQ ID NO: 1826191 - RNA, 19 nt, Artificial Sequence
  Description of Artificial Sequence: Synthetic oligonucleotide
cguuguguugcagacaagg

SEQ ID NO: 1826192 - RNA, 19 nt, Artificial Sequence
  Description of Artificial Sequence: Synthetic oligonucleotide
agcugcacagauguauuga

SEQ ID NO: 1826193 - RNA, 19 nt, Artificial Sequence
  Description of Artificial Sequence: Synthetic oligonucleotide
gagcagcuagcucaaaccu

SEQ ID NO: 1826194 - RNA, 19 nt, Artificial Sequence
  Description of Artificial Sequence: Synthetic oligonucleotide
cacaacacagcugaggcua

SEQ ID NO: 1826195 - RNA, 19 nt, Artificial Sequence
  Description of Artificial Sequence: Synthetic oligonucleotide
ugucgagcagcuagcucaa

SEQ ID NO: 1826196 - RNA, 19 nt, Artificial Sequence
  Description of Artificial Sequence: Synthetic oligonucleotide
cugccguuguguugcagac

SEQ ID NO: 1826197 - RNA, 19 nt, Artificial Sequence
  Description of Artificial Sequence: Synthetic oligonucleotide
aggguuguugcaaguaagu

SEQ ID NO: 1826198 - RNA, 19 nt, Artificial Sequence
  Description of Artificial Sequence: Synthetic oligonucleotide
aggaacagcacaacuggaa

SEQ ID NO: 1826199 - RNA, 19 nt, Artificial Sequence
  Description of Artificial Sequence: Synthetic oligonucleotide
caaggcugauccagccacc

SEQ ID NO: 1826200 - RNA, 19 nt, Artificial Sequence
  Description of Artificial Sequence: Synthetic oligonucleotide
uggagagagcuuggcaugu

SEQ ID NO: 1826201 - RNA, 19 nt, Artificial Sequence
  Description of Artificial Sequence: Synthetic oligonucleotide
cauccacaugcaaggucag

SEQ ID NO: 1826202 - RNA, 19 nt, Artificial Sequence
  Description of Artificial Sequence: Synthetic oligonucleotide
caaaccuggcucaaaacau

SEQ ID NO: 1826203 - RNA, 19 nt, Artificial Sequence
  Description of Artificial Sequence: Synthetic oligonucleotide
uuguugcaaguaagugcac

SEQ ID NO: 1826204 - RNA, 19 nt, Artificial Sequence
  Description of Artificial Sequence: Synthetic oligonucleotide
aguuggucugagagguggg

SEQ ID NO: 1826205 - RNA, 19 nt, Artificial Sequence
  Description of Artificial Sequence: Synthetic oligonucleotide
aggcgcucaaugaaggcug

SEQ ID NO: 1826206 - RNA, 19 nt, Artificial Sequence
  Description of Artificial Sequence: Synthetic oligonucleotide
aguuggcucugucaccaau

SEQ ID NO: 1826207 - RNA, 19 nt, Artificial Sequence
  Description of Artificial Sequence: Synthetic oligonucleotide
agcagcuagcucaaaccug

SEQ ID NO: 1826208 - RNA, 19 nt, Artificial Sequence
  Description of Artificial Sequence: Synthetic oligonucleotide
cacaaauugcuagagugua

SEQ ID NO: 1826209 - RNA, 19 nt, Artificial Sequence
  Description of Artificial Sequence: Synthetic oligonucleotide
uggaggacaaaggcacaga

SEQ ID NO: 1826210 - RNA, 19 nt, Artificial Sequence
  Description of Artificial Sequence: Synthetic oligonucleotide
acauguccuaaggaagcca

SEQ ID NO: 1826211 - RNA, 19 nt, Artificial Sequence
  Description of Artificial Sequence: Synthetic oligonucleotide
uggaacccggacucuguaa

SEQ ID NO: 1826212 - RNA, 19 nt, Artificial Sequence
  Description of Artificial Sequence: Synthetic oligonucleotide
auagggagauggaggaaca

SEQ ID NO: 1826213 - RNA, 19 nt, Artificial Sequence
  Description of Artificial Sequence: Synthetic oligonucleotide
gagcaaugagccacgcuuc

SEQ ID NO: 1826214 - RNA, 19 nt, Artificial Sequence
  Description of Artificial Sequence: Synthetic oligonucleotide
cgagcagcuagcucaaacc

SEQ ID NO: 1826215 - RNA, 19 nt, Artificial Sequence
  Description of Artificial Sequence: Synthetic oligonucleotide
uccguggccaaguggcuau

SEQ ID NO: 1826216 - RNA, 19 nt, Artificial Sequence
  Description of Artificial Sequence: Synthetic oligonucleotide
acugacagucccaccacgu

SEQ ID NO: 1826217 - RNA, 19 nt, Artificial Sequence
  Description of Artificial Sequence: Synthetic oligonucleotide
cagcugucgagcagcuagc

SEQ ID NO: 1826218 - RNA, 19 nt, Artificial Sequence
  Description of Artificial Sequence: Synthetic oligonucleotide
auccaauauuuagcaaaga

SEQ ID NO: 1826219 - RNA, 19 nt, Artificial Sequence
  Description of Artificial Sequence: Synthetic oligonucleotide
uccaucucuaggcgcucaa

SEQ ID NO: 1826220 - RNA, 19 nt, Artificial Sequence
  Description of Artificial Sequence: Synthetic oligonucleotide
gccacauauccuuggcaag

SEQ ID NO: 1826221 - RNA, 19 nt, Artificial Sequence
  Description of Artificial Sequence: Synthetic oligonucleotide
acugagcugccguuguguu

SEQ ID NO: 1826222 - RNA, 19 nt, Artificial Sequence
  Description of Artificial Sequence: Synthetic oligonucleotide
aguaccccaggccgccuug

SEQ ID NO: 1826223 - RNA, 19 nt, Artificial Sequence
  Description of Artificial Sequence: Synthetic oligonucleotide
cuagguggcacagcugcuc

SEQ ID NO: 1826224 - RNA, 19 nt, Artificial Sequence
  Description of Artificial Sequence: Synthetic oligonucleotide
ggguuguugcaaguaagug

SEQ ID NO: 1826225 - RNA, 19 nt, Artificial Sequence
  Description of Artificial Sequence: Synthetic oligonucleotide
ccaaguggcuauaggguug

SEQ ID NO: 1826226 - RNA, 19 nt, Artificial Sequence
  Description of Artificial Sequence: Synthetic oligonucleotide
aggccauugacagcagcca

SEQ ID NO: 1826227 - RNA, 19 nt, Artificial Sequence
  Description of Artificial Sequence: Synthetic oligonucleotide
caaucuccguggccaagug

SEQ ID NO: 1826228 - RNA, 19 nt, Artificial Sequence
  Description of Artificial Sequence: Synthetic oligonucleotide
guuagugguucuguagcaa

SEQ ID NO: 1826229 - RNA, 19 nt, Artificial Sequence
  Description of Artificial Sequence: Synthetic oligonucleotide
uauccuuggcaaggagacu

SEQ ID NO: 1826230 - RNA, 19 nt, Artificial Sequence
  Description of Artificial Sequence: Synthetic oligonucleotide
cagauguauugaagagcuc

SEQ ID NO: 1826231 - RNA, 19 nt, Artificial Sequence
  Description of Artificial Sequence: Synthetic oligonucleotide
cagccacacaacacagcug

SEQ ID NO: 1826232 - RNA, 19 nt, Artificial Sequence
  Description of Artificial Sequence: Synthetic oligonucleotide
augagccacgcuucuggaa

SEQ ID NO: 1826233 - RNA, 19 nt, Artificial Sequence
  Description of Artificial Sequence: Synthetic oligonucleotide
gccguuguguugcagacaa

SEQ ID NO: 1826234 - RNA, 19 nt, Artificial Sequence
  Description of Artificial Sequence: Synthetic oligonucleotide
cugaggcuaugcagcaauc

SEQ ID NO: 1826235 - RNA, 19 nt, Artificial Sequence
  Description of Artificial Sequence: Synthetic oligonucleotide
acaugcaaggucaguuggu

SEQ ID NO: 1826236 - RNA, 19 nt, Artificial Sequence
  Description of Artificial Sequence: Synthetic oligonucleotide
aggccuccuugccacauau

SEQ ID NO: 1826237 - RNA, 19 nt, Artificial Sequence
  Description of Artificial Sequence: Synthetic oligonucleotide
augaauguuccagcagcaa

SEQ ID NO: 1826238 - RNA, 19 nt, Artificial Sequence
  Description of Artificial Sequence: Synthetic oligonucleotide
gauguacauccaauauuua

SEQ ID NO: 1826239 - RNA, 19 nt, Artificial Sequence
  Description of Artificial Sequence: Synthetic oligonucleotide
caaugacagcagccauccg

SEQ ID NO: 1826240 - RNA, 19 nt, Artificial Sequence
  Description of Artificial Sequence: Synthetic oligonucleotide
gaccacugacagucccacc

SEQ ID NO: 1826241 - RNA, 19 nt, Artificial Sequence
  Description of Artificial Sequence: Synthetic oligonucleotide
ugaggguucuuggccuucu

SEQ ID NO: 1826242 - RNA, 19 nt, Artificial Sequence
  Description of Artificial Sequence: Synthetic oligonucleotide
ugggguggaguuagugguu

SEQ ID NO: 1826243 - RNA, 19 nt, Artificial Sequence
  Description of Artificial Sequence: Synthetic oligonucleotide
ggaacccggacucuguaaa

SEQ ID NO: 1826244 - RNA, 19 nt, Artificial Sequence
  Description of Artificial Sequence: Synthetic oligonucleotide
ggagcuccugacaucauga

SEQ ID NO: 1826245 - RNA, 19 nt, Artificial Sequence
  Description of Artificial Sequence: Synthetic oligonucleotide
cuucuauguucaugcaaua

SEQ ID NO: 1826246 - RNA, 19 nt, Artificial Sequence
  Description of Artificial Sequence: Synthetic oligonucleotide
ccacaugcaaggucaguug

SEQ ID NO: 1826247 - RNA, 19 nt, Artificial Sequence
  Description of Artificial Sequence: Synthetic oligonucleotide
cagcagaggccuccuugcc

SEQ ID NO: 1826248 - RNA, 19 nt, Artificial Sequence
  Description of Artificial Sequence: Synthetic oligonucleotide
aaguuggcucugucaccaa

SEQ ID NO: 1826249 - RNA, 19 nt, Artificial Sequence
  Description of Artificial Sequence: Synthetic oligonucleotide
gcucaaaccuggcucaaaa

SEQ ID NO: 1826250 - RNA, 19 nt, Artificial Sequence
  Description of Artificial Sequence: Synthetic oligonucleotide
cugcucaccggccgcugcc

SEQ ID NO: 1826251 - RNA, 19 nt, Artificial Sequence
  Description of Artificial Sequence: Synthetic oligonucleotide
uccucacugagcugccguu

SEQ ID NO: 1826252 - RNA, 19 nt, Artificial Sequence
  Description of Artificial Sequence: Synthetic oligonucleotide
ggaagccacucaaacauaa

SEQ ID NO: 1826253 - RNA, 19 nt, Artificial Sequence
  Description of Artificial Sequence: Synthetic oligonucleotide
cugaaccaucaaguacccc

SEQ ID NO: 1826254 - RNA, 19 nt, Artificial Sequence
  Description of Artificial Sequence: Synthetic oligonucleotide
agcaaucuccguggccaag

SEQ ID NO: 1826255 - RNA, 19 nt, Artificial Sequence
  Description of Artificial Sequence: Synthetic oligonucleotide
gcacaguugcagaagggac

SEQ ID NO: 1826256 - RNA, 19 nt, Artificial Sequence
  Description of Artificial Sequence: Synthetic oligonucleotide
gcugccguuguguugcaga

SEQ ID NO: 1826257 - RNA, 19 nt, Artificial Sequence
  Description of Artificial Sequence: Synthetic oligonucleotide
aguguacauucaaggcuga

SEQ ID NO: 1826258 - RNA, 19 nt, Artificial Sequence
  Description of Artificial Sequence: Synthetic oligonucleotide
cugauccagccaccagcag

SEQ ID NO: 1826259 - RNA, 19 nt, Artificial Sequence
  Description of Artificial Sequence: Synthetic oligonucleotide
augauggaguggggugggg

SEQ ID NO: 1826260 - RNA, 19 nt, Artificial Sequence
  Description of Artificial Sequence: Synthetic oligonucleotide
cccggacucuguaaaggcc

SEQ ID NO: 1826261 - RNA, 19 nt, Artificial Sequence
  Description of Artificial Sequence: Synthetic oligonucleotide
guuggucugagagguggga

SEQ ID NO: 1826262 - RNA, 19 nt, Artificial Sequence
  Description of Artificial Sequence: Synthetic oligonucleotide
caaggucaguuggucugag

SEQ ID NO: 1826263 - RNA, 19 nt, Artificial Sequence
  Description of Artificial Sequence: Synthetic oligonucleotide
ggcagagcacaguugcaga

SEQ ID NO: 1826264 - RNA, 19 nt, Artificial Sequence
  Description of Artificial Sequence: Synthetic oligonucleotide
gguggcacagcugcucacc

SEQ ID NO: 1826265 - RNA, 19 nt, Artificial Sequence
  Description of Artificial Sequence: Synthetic oligonucleotide
guuguguugcagacaaggu

SEQ ID NO: 1826266 - RNA, 19 nt, Artificial Sequence
  Description of Artificial Sequence: Synthetic oligonucleotide
gccgcagcugcacagaugu

SEQ ID NO: 1826267 - RNA, 19 nt, Artificial Sequence
  Description of Artificial Sequence: Synthetic oligonucleotide
ccaaacugcaugauggagu

SEQ ID NO: 1826268 - RNA, 19 nt, Artificial Sequence
  Description of Artificial Sequence: Synthetic oligonucleotide
gcugcucuagguggcacag

SEQ ID NO: 1826269 - RNA, 19 nt, Artificial Sequence
  Description of Artificial Sequence: Synthetic oligonucleotide
ggcuauaggguuguugcaa

SEQ ID NO: 1826270 - RNA, 19 nt, Artificial Sequence
  Description of Artificial Sequence: Synthetic oligonucleotide
caggccgccuuggaacccg

SEQ ID NO: 1826271 - RNA, 19 nt, Artificial Sequence
  Description of Artificial Sequence: Synthetic oligonucleotide
cccaaacugcaugauggag

SEQ ID NO: 1826272 - RNA, 19 nt, Artificial Sequence
  Description of Artificial Sequence: Synthetic oligonucleotide
cuauaggguuguugcaagu

SEQ ID NO: 1826273 - RNA, 19 nt, Artificial Sequence
  Description of Artificial Sequence: Synthetic oligonucleotide
uucaugcaauagggagaug

SEQ ID NO: 1826274 - RNA, 19 nt, Artificial Sequence
  Description of Artificial Sequence: Synthetic oligonucleotide
cuuccaccucagagccccg

SEQ ID NO: 1826275 - RNA, 19 nt, Artificial Sequence
  Description of Artificial Sequence: Synthetic oligonucleotide
ugcucaccggccgcugccc

SEQ ID NO: 1826276 - RNA, 19 nt, Artificial Sequence
  Description of Artificial Sequence: Synthetic oligonucleotide
auguccuaaggaagccacu

SEQ ID NO: 1826277 - RNA, 19 nt, Artificial Sequence
  Description of Artificial Sequence: Synthetic oligonucleotide
ccggacucuguaaaggcca

SEQ ID NO: 1826278 - RNA, 19 nt, Artificial Sequence
  Description of Artificial Sequence: Synthetic oligonucleotide
gcagagcacaguugcagaa

SEQ ID NO: 1826279 - RNA, 19 nt, Artificial Sequence
  Description of Artificial Sequence: Synthetic oligonucleotide
ggccugcuccaucucuagg

SEQ ID NO: 1826280 - RNA, 19 nt, Artificial Sequence
  Description of Artificial Sequence: Synthetic oligonucleotide
ggcgucuggagcuccugac

SEQ ID NO: 1826281 - RNA, 19 nt, Artificial Sequence
  Description of Artificial Sequence: Synthetic oligonucleotide
ggagcacgcugggacaaag

SEQ ID NO: 1826282 - RNA, 19 nt, Artificial Sequence
  Description of Artificial Sequence: Synthetic oligonucleotide
auccacaugcaaggucagu

SEQ ID NO: 1826283 - RNA, 19 nt, Artificial Sequence
  Description of Artificial Sequence: Synthetic oligonucleotide
gcugauccagccaccagca

SEQ ID NO: 1826284 - RNA, 19 nt, Artificial Sequence
  Description of Artificial Sequence: Synthetic oligonucleotide
cucagagccccggcagccc

SEQ ID NO: 1826285 - RNA, 19 nt, Artificial Sequence
  Description of Artificial Sequence: Synthetic oligonucleotide
guaccccaggccgccuugg

SEQ ID NO: 1826286 - RNA, 19 nt, Artificial Sequence
  Description of Artificial Sequence: Synthetic oligonucleotide
ccccaggccgccuuggaac

SEQ ID NO: 1826287 - RNA, 19 nt, Artificial Sequence
  Description of Artificial Sequence: Synthetic oligonucleotide
ggcuggagagagcuuggca

SEQ ID NO: 1826288 - RNA, 19 nt, Artificial Sequence
  Description of Artificial Sequence: Synthetic oligonucleotide
cuccugacaucaugaggaa

SEQ ID NO: 1826289 - RNA, 19 nt, Artificial Sequence
  Description of Artificial Sequence: Synthetic oligonucleotide
gcucaaugaaggcugcagu

SEQ ID NO: 1826290 - RNA, 19 nt, Artificial Sequence
  Description of Artificial Sequence: Synthetic oligonucleotide
cagggagcacgcugggaca

SEQ ID NO: 1826291 - RNA, 19 nt, Artificial Sequence
  Description of Artificial Sequence: Synthetic oligonucleotide
cuuggaacccggacucugu

SEQ ID NO: 1826292 - RNA, 19 nt, Artificial Sequence
  Description of Artificial Sequence: Synthetic oligonucleotide
cuggaggccgcagcugcac

SEQ ID NO: 1826293 - RNA, 19 nt, Artificial Sequence
  Description of Artificial Sequence: Synthetic oligonucleotide
ggaagacacguagccacca

SEQ ID NO: 1826294 - RNA, 19 nt, Artificial Sequence
  Description of Artificial Sequence: Synthetic oligonucleotide
acagcacaacuggaaugau

SEQ ID NO: 1826295 - RNA, 19 nt, Artificial Sequence
  Description of Artificial Sequence: Synthetic oligonucleotide
gggguacgcgaccacugac

SEQ ID NO: 1826296 - RNA, 19 nt, Artificial Sequence
  Description of Artificial Sequence: Synthetic oligonucleotide
agggagcacgcugggacaa

SEQ ID NO: 1826297 - RNA, 19 nt, Artificial Sequence
  Description of Artificial Sequence: Synthetic oligonucleotide
cauugacagcagccacauc

SEQ ID NO: 1826298 - RNA, 19 nt, Artificial Sequence
  Description of Artificial Sequence: Synthetic oligonucleotide
caucccggagccggccccg

SEQ ID NO: 1826299 - RNA, 19 nt, Artificial Sequence
  Description of Artificial Sequence: Synthetic oligonucleotide
gcacaacagcugucgagca

SEQ ID NO: 1826300 - RNA, 19 nt, Artificial Sequence
  Description of Artificial Sequence: Synthetic oligonucleotide
cccaggccgccuuggaacc

SEQ ID NO: 1826301 - RNA, 19 nt, Artificial Sequence
  Description of Artificial Sequence: Synthetic oligonucleotide
ggugggacuccaccaggga

SEQ ID NO: 1826302 - RNA, 19 nt, Artificial Sequence
  Description of Artificial Sequence: Synthetic oligonucleotide
caccacguugccagccaca

SEQ ID NO: 1826303 - RNA, 19 nt, Artificial Sequence
  Description of Artificial Sequence: Synthetic oligonucleotide
gcagacaagguuccuuccu

SEQ ID NO: 1826304 - RNA, 19 nt, Artificial Sequence
  Description of Artificial Sequence: Synthetic oligonucleotide
acgcgaccacugacagucc

SEQ ID NO: 1826305 - RNA, 19 nt, Artificial Sequence
  Description of Artificial Sequence: Synthetic oligonucleotide
ggguacgcgaccacugaca

SEQ ID NO: 1826306 - RNA, 19 nt, Artificial Sequence
  Description of Artificial Sequence: Synthetic oligonucleotide
gcaaugagccacgcuucug

SEQ ID NO: 1826307 - RNA, 19 nt, Artificial Sequence
  Description of Artificial Sequence: Synthetic oligonucleotide
gguggcugcuuagggaaca

SEQ ID NO: 1826308 - RNA, 19 nt, Artificial Sequence
  Description of Artificial Sequence: Synthetic oligonucleotide
guugcagaagggacagccu

SEQ ID NO: 1826309 - RNA, 19 nt, Artificial Sequence
  Description of Artificial Sequence: Synthetic oligonucleotide
gaggccgcagcugcacaga

SEQ ID NO: 1826310 - RNA, 19 nt, Artificial Sequence
  Description of Artificial Sequence: Synthetic oligonucleotide
gcugaggcuaugcagcaau

SEQ ID NO: 1826311 - RNA, 19 nt, Artificial Sequence
  Description of Artificial Sequence: Synthetic oligonucleotide
cugcucuagguggcacagc

SEQ ID NO: 1826312 - RNA, 19 nt, Artificial Sequence
  Description of Artificial Sequence: Synthetic oligonucleotide
gccgccuuggaacccggac

SEQ ID NO: 1826313 - RNA, 19 nt, Artificial Sequence
  Description of Artificial Sequence: Synthetic oligonucleotide
gacacguagccaccagcuu

SEQ ID NO: 1826314 - RNA, 19 nt, Artificial Sequence
  Description of Artificial Sequence: Synthetic oligonucleotide
gggguggaguuagugguuc

SEQ ID NO: 1826315 - RNA, 19 nt, Artificial Sequence
  Description of Artificial Sequence: Synthetic oligonucleotide
acgcugggacaaaggaaga

SEQ ID NO: 1826316 - RNA, 19 nt, Artificial Sequence
  Description of Artificial Sequence: Synthetic oligonucleotide
ggacagccuucuauguuca

SEQ ID NO: 1826317 - RNA, 19 nt, Artificial Sequence
  Description of Artificial Sequence: Synthetic oligonucleotide
gcgucuggagcuccugaca

SEQ ID NO: 1826318 - RNA, 19 nt, Artificial Sequence
  Description of Artificial Sequence: Synthetic oligonucleotide
ggagacuaagugugauagu

SEQ ID NO: 1826319 - RNA, 19 nt, Artificial Sequence
  Description of Artificial Sequence: Synthetic oligonucleotide
cucugucaccaaucucaaa

SEQ ID NO: 1826320 - RNA, 19 nt, Artificial Sequence
  Description of Artificial Sequence: Synthetic oligonucleotide
ggccaaguggcuauagggu

SEQ ID NO: 1826321 - RNA, 19 nt, Artificial Sequence
  Description of Artificial Sequence: Synthetic oligonucleotide
caaguggcuauaggguugu

SEQ ID NO: 1826322 - RNA, 19 nt, Artificial Sequence
  Description of Artificial Sequence: Synthetic oligonucleotide
gcacacaaauugcuagagu

SEQ ID NO: 1826323 - RNA, 19 nt, Artificial Sequence
  Description of Artificial Sequence: Synthetic oligonucleotide
gcugcucaccggccgcugc

SEQ ID NO: 1826324 - RNA, 19 nt, Artificial Sequence
  Description of Artificial Sequence: Synthetic oligonucleotide
gccaaguggcuauaggguu

SEQ ID NO: 1826325 - RNA, 19 nt, Artificial Sequence
  Description of Artificial Sequence: Synthetic oligonucleotide
ccgggguacgcgaccacug

SEQ ID NO: 1826326 - RNA, 19 nt, Artificial Sequence
  Description of Artificial Sequence: Synthetic oligonucleotide
gcaaggucaguuggucuga

SEQ ID NO: 1826327 - RNA, 19 nt, Artificial Sequence
  Description of Artificial Sequence: Synthetic oligonucleotide
cgggacuauuuacaaccac

SEQ ID NO: 1826328 - RNA, 19 nt, Artificial Sequence
  Description of Artificial Sequence: Synthetic oligonucleotide
gggcggugccuggaggccg

SEQ ID NO: 1826329 - RNA, 19 nt, Artificial Sequence
  Description of Artificial Sequence: Synthetic oligonucleotide
ccucacugagcugccguug

SEQ ID NO: 1826330 - RNA, 19 nt, Artificial Sequence
  Description of Artificial Sequence: Synthetic oligonucleotide
gcucuagguggcacagcug

SEQ ID NO: 1826331 - RNA, 19 nt, Artificial Sequence
  Description of Artificial Sequence: Synthetic oligonucleotide
cagagcaaugagccacgcu

SEQ ID NO: 1826332 - RNA, 19 nt, Artificial Sequence
  Description of Artificial Sequence: Synthetic oligonucleotide
ccgggacuauuuacaacca

SEQ ID NO: 1826333 - RNA, 19 nt, Artificial Sequence
  Description of Artificial Sequence: Synthetic oligonucleotide
gcacgcugggacaaaggaa

SEQ ID NO: 1826334 - RNA, 19 nt, Artificial Sequence
  Description of Artificial Sequence: Synthetic oligonucleotide
cgcgaccacugacaguccc

SEQ ID NO: 1826335 - RNA, 19 nt, Artificial Sequence
  Description of Artificial Sequence: Synthetic oligonucleotide
ggcugcuuagggaacaguu

SEQ ID NO: 1826336 - RNA, 19 nt, Artificial Sequence
  Description of Artificial Sequence: Synthetic oligonucleotide
guacgcgaccacugacagu

SEQ ID NO: 1826337 - RNA, 19 nt, Artificial Sequence
  Description of Artificial Sequence: Synthetic oligonucleotide
aggcaggaagcagguugaa

SEQ ID NO: 1826338 - RNA, 19 nt, Artificial Sequence
  Description of Artificial Sequence: Synthetic oligonucleotide
agccacgcuucuggaaguu

SEQ ID NO: 1826339 - RNA, 19 nt, Artificial Sequence
  Description of Artificial Sequence: Synthetic oligonucleotide
acguagccaccagcuucug

SEQ ID NO: 1826340 - RNA, 19 nt, Artificial Sequence
  Description of Artificial Sequence: Synthetic oligonucleotide
aaguggcuauaggguuguu

SEQ ID NO: 1826341 - RNA, 19 nt, Artificial Sequence
  Description of Artificial Sequence: Synthetic oligonucleotide
gagcugccguuguguugca

SEQ ID NO: 1826342 - RNA, 19 nt, Artificial Sequence
  Description of Artificial Sequence: Synthetic oligonucleotide
gcucugucaccaaucucaa

SEQ ID NO: 1826343 - RNA, 19 nt, Artificial Sequence
  Description of Artificial Sequence: Synthetic oligonucleotide
caaccacagaaggcaggaa

SEQ ID NO: 1826344 - RNA, 19 nt, Artificial Sequence
  Description of Artificial Sequence: Synthetic oligonucleotide
gcucaccggccgcugcccc

SEQ ID NO: 1826345 - RNA, 19 nt, Artificial Sequence
  Description of Artificial Sequence: Synthetic oligonucleotide
gcacaacuggaaugaugua

SEQ ID NO: 1826346 - RNA, 19 nt, Artificial Sequence
  Description of Artificial Sequence: Synthetic oligonucleotide
aggccgccuuggaacccgg

SEQ ID NO: 1826347 - RNA, 19 nt, Artificial Sequence
  Description of Artificial Sequence: Synthetic oligonucleotide
ccaccacguugccagccac

SEQ ID NO: 1826348 - RNA, 19 nt, Artificial Sequence
  Description of Artificial Sequence: Synthetic oligonucleotide
cucagggccuggggcggug

SEQ ID NO: 1826349 - RNA, 19 nt, Artificial Sequence
  Description of Artificial Sequence: Synthetic oligonucleotide
ggacaaaggcacagaggcu

SEQ ID NO: 1826350 - RNA, 19 nt, Artificial Sequence
  Description of Artificial Sequence: Synthetic oligonucleotide
ccguuguguugcagacaag

SEQ ID NO: 1826351 - RNA, 19 nt, Artificial Sequence
  Description of Artificial Sequence: Synthetic oligonucleotide
ggggcggugccuggaggcc

SEQ ID NO: 1826352 - RNA, 19 nt, Artificial Sequence
  Description of Artificial Sequence: Synthetic oligonucleotide
gcugcuuagggaacaguuu

SEQ ID NO: 1826353 - RNA, 19 nt, Artificial Sequence
  Description of Artificial Sequence: Synthetic oligonucleotide
gguugaaugguggcugcuu

SEQ ID NO: 1826354 - RNA, 19 nt, Artificial Sequence
  Description of Artificial Sequence: Synthetic oligonucleotide
ggcauggggcauggaggac

SEQ ID NO: 1826355 - RNA, 19 nt, Artificial Sequence
  Description of Artificial Sequence: Synthetic oligonucleotide
agguuccuuccugcugguu

SEQ ID NO: 1826356 - RNA, 19 nt, Artificial Sequence
  Description of Artificial Sequence: Synthetic oligonucleotide
ggcggugccuggaggccgc

SEQ ID NO: 1826357 - RNA, 19 nt, Artificial Sequence
  Description of Artificial Sequence: Synthetic oligonucleotide
agccggccccgcuccuccu

SEQ ID NO: 1826358 - RNA, 19 nt, Artificial Sequence
  Description of Artificial Sequence: Synthetic oligonucleotide
ccaccucagagccccggca

SEQ ID NO: 1826359 - RNA, 19 nt, Artificial Sequence
  Description of Artificial Sequence: Synthetic oligonucleotide
gggcugcucuagguggcac

SEQ ID NO: 1826360 - RNA, 19 nt, Artificial Sequence
  Description of Artificial Sequence: Synthetic oligonucleotide
ggcaggaagcagguugaau

SEQ ID NO: 1826361 - RNA, 19 nt, Artificial Sequence
  Description of Artificial Sequence: Synthetic oligonucleotide
ccacguugccagccacauc

SEQ ID NO: 1826362 - RNA, 19 nt, Artificial Sequence
  Description of Artificial Sequence: Synthetic oligonucleotide
ccgccuuggaacccggacu

SEQ ID NO: 1826363 - RNA, 19 nt, Artificial Sequence
  Description of Artificial Sequence: Synthetic oligonucleotide
gcuccaucucuaggcgcuc

SEQ ID NO: 1826364 - RNA, 19 nt, Artificial Sequence
  Description of Artificial Sequence: Synthetic oligonucleotide
gucgagcagcuagcucaaa

SEQ ID NO: 1826365 - RNA, 19 nt, Artificial Sequence
  Description of Artificial Sequence: Synthetic oligonucleotide
auggggcauggaggacaaa

SEQ ID NO: 1826366 - RNA, 19 nt, Artificial Sequence
  Description of Artificial Sequence: Synthetic oligonucleotide
cguagccaccagcuucuga

SEQ ID NO: 1826367 - RNA, 19 nt, Artificial Sequence
  Description of Artificial Sequence: Synthetic oligonucleotide
gcgcucaaugaaggcugca

SEQ ID NO: 1826368 - RNA, 19 nt, Artificial Sequence
  Description of Artificial Sequence: Synthetic oligonucleotide
caaguaccccaggccgccu

SEQ ID NO: 1826369 - RNA, 19 nt, Artificial Sequence
  Description of Artificial Sequence: Synthetic oligonucleotide
cgggguacgcgaccacuga

SEQ ID NO: 1826370 - RNA, 19 nt, Artificial Sequence
  Description of Artificial Sequence: Synthetic oligonucleotide
gggagcacgcugggacaaa

SEQ ID NO: 1826371 - RNA, 19 nt, Artificial Sequence
  Description of Artificial Sequence: Synthetic oligonucleotide
ccggcgucuggagcuccug

SEQ ID NO: 1826372 - RNA, 19 nt, Artificial Sequence
  Description of Artificial Sequence: Synthetic oligonucleotide
ggagagagcuuggcauguu

SEQ ID NO: 1826373 - RNA, 19 nt, Artificial Sequence
  Description of Artificial Sequence: Synthetic oligonucleotide
ggacucuguaaaggccauu

SEQ ID NO: 1826374 - RNA, 19 nt, Artificial Sequence
  Description of Artificial Sequence: Synthetic oligonucleotide
cggcgucuggagcuccuga

SEQ ID NO: 1826375 - RNA, 19 nt, Artificial Sequence
  Description of Artificial Sequence: Synthetic oligonucleotide
ccccgggguacgcgaccac

SEQ ID NO: 1826376 - RNA, 19 nt, Artificial Sequence
  Description of Artificial Sequence: Synthetic oligonucleotide
ggccgccuuggaacccgga

SEQ ID NO: 1826377 - RNA, 19 nt, Artificial Sequence
  Description of Artificial Sequence: Synthetic oligonucleotide
cggacucuguaaaggccau

SEQ ID NO: 1826378 - RNA, 19 nt, Artificial Sequence
  Description of Artificial Sequence: Synthetic oligonucleotide
ccaucucuaggcgcucaau

SEQ ID NO: 1826379 - RNA, 19 nt, Artificial Sequence
  Description of Artificial Sequence: Synthetic oligonucleotide
cccgggguacgcgaccacu

SEQ ID NO: 1826380 - RNA, 19 nt, Artificial Sequence
  Description of Artificial Sequence: Synthetic oligonucleotide
cggugccuggaggccgcag

SEQ ID NO: 1826381 - RNA, 19 nt, Artificial Sequence
  Description of Artificial Sequence: Synthetic oligonucleotide
ccgcagcugcacagaugua

SEQ ID NO: 1826382 - RNA, 19 nt, Artificial Sequence
  Description of Artificial Sequence: Synthetic oligonucleotide
cggccccgcuccuccucac

SEQ ID NO: 1826383 - RNA, 19 nt, Artificial Sequence
  Description of Artificial Sequence: Synthetic oligonucleotide
gcggugccuggaggccgca

SEQ ID NO: 1826384 - RNA, 19 nt, Artificial Sequence
  Description of Artificial Sequence: Synthetic oligonucleotide
ccguggccaaguggcuaua

SEQ ID NO: 1826385 - RNA, 19 nt, Artificial Sequence
  Description of Artificial Sequence: Synthetic oligonucleotide
uuugcaaugaugcagauca

SEQ ID NO: 1826386 - RNA, 19 nt, Artificial Sequence
  Description of Artificial Sequence: Synthetic oligonucleotide
cucgaugugacucagaucc

SEQ ID NO: 1826387 - RNA, 19 nt, Artificial Sequence
  Description of Artificial Sequence: Synthetic oligonucleotide
uguaugagcaauaucguag

SEQ ID NO: 1826388 - RNA, 19 nt, Artificial Sequence
  Description of Artificial Sequence: Synthetic oligonucleotide
aaacagaucaucucguguc

SEQ ID NO: 1826389 - RNA, 19 nt, Artificial Sequence
  Description of Artificial Sequence: Synthetic oligonucleotide
uuuagcauuguucugggcc

SEQ ID NO: 1826390 - RNA, 19 nt, Artificial Sequence
  Description of Artificial Sequence: Synthetic oligonucleotide
agguguaugagcaauaucg

SEQ ID NO: 1826391 - RNA, 19 nt, Artificial Sequence
  Description of Artificial Sequence: Synthetic oligonucleotide
aguaagugcacucugucuc

SEQ ID NO: 1826392 - RNA, 19 nt, Artificial Sequence
  Description of Artificial Sequence: Synthetic oligonucleotide
aaaggagugauuuugccaa

SEQ ID NO: 1826393 - RNA, 19 nt, Artificial Sequence
  Description of Artificial Sequence: Synthetic oligonucleotide
ugucauuaucaauagacca

SEQ ID NO: 1826394 - RNA, 19 nt, Artificial Sequence
  Description of Artificial Sequence: Synthetic oligonucleotide
ucugccacgaauguguucg

SEQ ID NO: 1826395 - RNA, 19 nt, Artificial Sequence
  Description of Artificial Sequence: Synthetic oligonucleotide
agcaauaucguagaggguc

SEQ ID NO: 1826396 - RNA, 19 nt, Artificial Sequence
  Description of Artificial Sequence: Synthetic oligonucleotide
uaaguuagggcgaugcugc

SEQ ID NO: 1826397 - RNA, 19 nt, Artificial Sequence
  Description of Artificial Sequence: Synthetic oligonucleotide
auugacucgagagggaucc

SEQ ID NO: 1826398 - RNA, 19 nt, Artificial Sequence
  Description of Artificial Sequence: Synthetic oligonucleotide
uuagcauuguucugggccg

SEQ ID NO: 1826399 - RNA, 19 nt, Artificial Sequence
  Description of Artificial Sequence: Synthetic oligonucleotide
acaucacaaccuuucaggc

SEQ ID NO: 1826400 - RNA, 19 nt, Artificial Sequence
  Description of Artificial Sequence: Synthetic oligonucleotide
cacaucacaaccuuucagg

SEQ ID NO: 1826401 - RNA, 19 nt, Artificial Sequence
  Description of Artificial Sequence: Synthetic oligonucleotide
ucgagagggauccaaaccc

SEQ ID NO: 1826402 - RNA, 19 nt, Artificial Sequence
  Description of Artificial Sequence: Synthetic oligonucleotide
aagccauggacagaguggc

SEQ ID NO: 1826403 - RNA, 19 nt, Artificial Sequence
  Description of Artificial Sequence: Synthetic oligonucleotide
uugucauuaucaauagacc

SEQ ID NO: 1826404 - RNA, 19 nt, Artificial Sequence
  Description of Artificial Sequence: Synthetic oligonucleotide
caaagcaaaucgaaggccc

SEQ ID NO: 1826405 - RNA, 19 nt, Artificial Sequence
  Description of Artificial Sequence: Synthetic oligonucleotide
gaagcugcggcggagagcg

SEQ ID NO: 1826406 - RNA, 19 nt, Artificial Sequence
  Description of Artificial Sequence: Synthetic oligonucleotide
auaucguagagggucaggc

SEQ ID NO: 1826407 - RNA, 19 nt, Artificial Sequence
  Description of Artificial Sequence: Synthetic oligonucleotide
aagaacacucaacgacacc

SEQ ID NO: 1826408 - RNA, 19 nt, Artificial Sequence
  Description of Artificial Sequence: Synthetic oligonucleotide
aucguagagggucaggcgg

SEQ ID NO: 1826409 - RNA, 19 nt, Artificial Sequence
  Description of Artificial Sequence: Synthetic oligonucleotide
aggacagucugcuuuauug

SEQ ID NO: 1826410 - RNA, 19 nt, Artificial Sequence
  Description of Artificial Sequence: Synthetic oligonucleotide
gaauaaguuagggcgaugc

SEQ ID NO: 1826411 - RNA, 19 nt, Artificial Sequence
  Description of Artificial Sequence: Synthetic oligonucleotide
aacacucaacgacaccuuc

SEQ ID NO: 1826412 - RNA, 19 nt, Artificial Sequence
  Description of Artificial Sequence: Synthetic oligonucleotide
acaaugguagcguuggugu

SEQ ID NO: 1826413 - RNA, 19 nt, Artificial Sequence
  Description of Artificial Sequence: Synthetic oligonucleotide
cuuucaggcagucuggcag

SEQ ID NO: 1826414 - RNA, 19 nt, Artificial Sequence
  Description of Artificial Sequence: Synthetic oligonucleotide
uaaacagaucaucucgugu

SEQ ID NO: 1826415 - RNA, 19 nt, Artificial Sequence
  Description of Artificial Sequence: Synthetic oligonucleotide
gauguggaauaaguuaggg

SEQ ID NO: 1826416 - RNA, 19 nt, Artificial Sequence
  Description of Artificial Sequence: Synthetic oligonucleotide
uuuagcucagggauggccu

SEQ ID NO: 1826417 - RNA, 19 nt, Artificial Sequence
  Description of Artificial Sequence: Synthetic oligonucleotide
uuggggaaagucaaccuug

SEQ ID NO: 1826418 - RNA, 19 nt, Artificial Sequence
  Description of Artificial Sequence: Synthetic oligonucleotide
aauaaguuagggcgaugcu

SEQ ID NO: 1826419 - RNA, 19 nt, Artificial Sequence
  Description of Artificial Sequence: Synthetic oligonucleotide
uccagcguaagccauggac

SEQ ID NO: 1826420 - RNA, 19 nt, Artificial Sequence
  Description of Artificial Sequence: Synthetic oligonucleotide
agaacacucaacgacaccu

SEQ ID NO: 1826421 - RNA, 19 nt, Artificial Sequence
  Description of Artificial Sequence: Synthetic oligonucleotide
gauuuugccaaugcccagg

SEQ ID NO: 1826422 - RNA, 19 nt, Artificial Sequence
  Description of Artificial Sequence: Synthetic oligonucleotide
augucaaggguugucacac

SEQ ID NO: 1826423 - RNA, 19 nt, Artificial Sequence
  Description of Artificial Sequence: Synthetic oligonucleotide
ucaacgacaccuuccuucc

SEQ ID NO: 1826424 - RNA, 19 nt, Artificial Sequence
  Description of Artificial Sequence: Synthetic oligonucleotide
uagcguugguguuaaacag

SEQ ID NO: 1826425 - RNA, 19 nt, Artificial Sequence
  Description of Artificial Sequence: Synthetic oligonucleotide
aggcacauugacucgagag

SEQ ID NO: 1826426 - RNA, 19 nt, Artificial Sequence
  Description of Artificial Sequence: Synthetic oligonucleotide
gauucucccggugagugcg

SEQ ID NO: 1826427 - RNA, 19 nt, Artificial Sequence
  Description of Artificial Sequence: Synthetic oligonucleotide
augagcaauaucguagagg

SEQ ID NO: 1826428 - RNA, 19 nt, Artificial Sequence
  Description of Artificial Sequence: Synthetic oligonucleotide
cagaucauggcuucagggc

SEQ ID NO: 1826429 - RNA, 19 nt, Artificial Sequence
  Description of Artificial Sequence: Synthetic oligonucleotide
aacagaucaucucguguca

SEQ ID NO: 1826430 - RNA, 19 nt, Artificial Sequence
  Description of Artificial Sequence: Synthetic oligonucleotide
aauagaccagccaccauug

SEQ ID NO: 1826431 - RNA, 19 nt, Artificial Sequence
  Description of Artificial Sequence: Synthetic oligonucleotide
ugugacucagauccgccgc

SEQ ID NO: 1826432 - RNA, 19 nt, Artificial Sequence
  Description of Artificial Sequence: Synthetic oligonucleotide
auaaguuagggcgaugcug

SEQ ID NO: 1826433 - RNA, 19 nt, Artificial Sequence
  Description of Artificial Sequence: Synthetic oligonucleotide
gucaaggguugucacaccg

SEQ ID NO: 1826434 - RNA, 19 nt, Artificial Sequence
  Description of Artificial Sequence: Synthetic oligonucleotide
aacgacaccuuccuuccca

SEQ ID NO: 1826435 - RNA, 19 nt, Artificial Sequence
  Description of Artificial Sequence: Synthetic oligonucleotide
ucucgugucauuccuggcu

SEQ ID NO: 1826436 - RNA, 19 nt, Artificial Sequence
  Description of Artificial Sequence: Synthetic oligonucleotide
uaugagcaauaucguagag

SEQ ID NO: 1826437 - RNA, 19 nt, Artificial Sequence
  Description of Artificial Sequence: Synthetic oligonucleotide
guuagggcgaugcugcugc

SEQ ID NO: 1826438 - RNA, 19 nt, Artificial Sequence
  Description of Artificial Sequence: Synthetic oligonucleotide
aauaucguagagggucagg

SEQ ID NO: 1826439 - RNA, 19 nt, Artificial Sequence
  Description of Artificial Sequence: Synthetic oligonucleotide
acucgagagggauccaaac

SEQ ID NO: 1826440 - RNA, 19 nt, Artificial Sequence
  Description of Artificial Sequence: Synthetic oligonucleotide
aggcuuuuagcucagggau

SEQ ID NO: 1826441 - RNA, 19 nt, Artificial Sequence
  Description of Artificial Sequence: Synthetic oligonucleotide
uuuuagcucagggauggcc

SEQ ID NO: 1826442 - RNA, 19 nt, Artificial Sequence
  Description of Artificial Sequence: Synthetic oligonucleotide
ucugacgaugucaaggguu

SEQ ID NO: 1826443 - RNA, 19 nt, Artificial Sequence
  Description of Artificial Sequence: Synthetic oligonucleotide
guagcguugguguuaaaca

SEQ ID NO: 1826444 - RNA, 19 nt, Artificial Sequence
  Description of Artificial Sequence: Synthetic oligonucleotide
caucucgugucauuccugg

SEQ ID NO: 1826445 - RNA, 19 nt, Artificial Sequence
  Description of Artificial Sequence: Synthetic oligonucleotide
guggccaccaaugacaggc

SEQ ID NO: 1826446 - RNA, 19 nt, Artificial Sequence
  Description of Artificial Sequence: Synthetic oligonucleotide
gaacaaaagaacacucaac

SEQ ID NO: 1826447 - RNA, 19 nt, Artificial Sequence
  Description of Artificial Sequence: Synthetic oligonucleotide
ugucacaccgaagaucuug

SEQ ID NO: 1826448 - RNA, 19 nt, Artificial Sequence
  Description of Artificial Sequence: Synthetic oligonucleotide
auuguucugggccgaagug

SEQ ID NO: 1826449 - RNA, 19 nt, Artificial Sequence
  Description of Artificial Sequence: Synthetic oligonucleotide
gggaugguggaguuaaccg

SEQ ID NO: 1826450 - RNA, 19 nt, Artificial Sequence
  Description of Artificial Sequence: Synthetic oligonucleotide
auuugcucuggucucgaug

SEQ ID NO: 1826451 - RNA, 19 nt, Artificial Sequence
  Description of Artificial Sequence: Synthetic oligonucleotide
ucauuccuggcuuccuggg

SEQ ID NO: 1826452 - RNA, 19 nt, Artificial Sequence
  Description of Artificial Sequence: Synthetic oligonucleotide
cugacgaugucaaggguug

SEQ ID NO: 1826453 - RNA, 19 nt, Artificial Sequence
  Description of Artificial Sequence: Synthetic oligonucleotide
uucgcucugacgaugucaa

SEQ ID NO: 1826454 - RNA, 19 nt, Artificial Sequence
  Description of Artificial Sequence: Synthetic oligonucleotide
ucaggcggcucacuagggg

SEQ ID NO: 1826455 - RNA, 19 nt, Artificial Sequence
  Description of Artificial Sequence: Synthetic oligonucleotide
ugggguuguacacuccaug

SEQ ID NO: 1826456 - RNA, 19 nt, Artificial Sequence
  Description of Artificial Sequence: Synthetic oligonucleotide
augugacucagauccgccg

SEQ ID NO: 1826457 - RNA, 19 nt, Artificial Sequence
  Description of Artificial Sequence: Synthetic oligonucleotide
cucgagagggauccaaacc

SEQ ID NO: 1826458 - RNA, 19 nt, Artificial Sequence
  Description of Artificial Sequence: Synthetic oligonucleotide
uucaaccucucacuucaug

SEQ ID NO: 1826459 - RNA, 19 nt, Artificial Sequence
  Description of Artificial Sequence: Synthetic oligonucleotide
gaggcuuuuagcucaggga

SEQ ID NO: 1826460 - RNA, 19 nt, Artificial Sequence
  Description of Artificial Sequence: Synthetic oligonucleotide
ugauuuugccaaugcccag

SEQ ID NO: 1826461 - RNA, 19 nt, Artificial Sequence
  Description of Artificial Sequence: Synthetic oligonucleotide
guaugagcaauaucguaga

SEQ ID NO: 1826462 - RNA, 19 nt, Artificial Sequence
  Description of Artificial Sequence: Synthetic oligonucleotide
uucacgacuuccgugccag

SEQ ID NO: 1826463 - RNA, 19 nt, Artificial Sequence
  Description of Artificial Sequence: Synthetic oligonucleotide
acacucaacgacaccuucc

SEQ ID NO: 1826464 - RNA, 19 nt, Artificial Sequence
  Description of Artificial Sequence: Synthetic oligonucleotide
aacgggcuccagcguaagc

SEQ ID NO: 1826465 - RNA, 19 nt, Artificial Sequence
  Description of Artificial Sequence: Synthetic oligonucleotide
gacagucugcuuuauuguc

SEQ ID NO: 1826466 - RNA, 19 nt, Artificial Sequence
  Description of Artificial Sequence: Synthetic oligonucleotide
ugguguuaaacagaucauc

SEQ ID NO: 1826467 - RNA, 19 nt, Artificial Sequence
  Description of Artificial Sequence: Synthetic oligonucleotide
aguuaaccggguuugcaau

SEQ ID NO: 1826468 - RNA, 19 nt, Artificial Sequence
  Description of Artificial Sequence: Synthetic oligonucleotide
agugcacucugucucuuug

SEQ ID NO: 1826469 - RNA, 19 nt, Artificial Sequence
  Description of Artificial Sequence: Synthetic oligonucleotide
uugguguuaaacagaucau

SEQ ID NO: 1826470 - RNA, 19 nt, Artificial Sequence
  Description of Artificial Sequence: Synthetic oligonucleotide
guguuaaacagaucaucuc

SEQ ID NO: 1826471 - RNA, 19 nt, Artificial Sequence
  Description of Artificial Sequence: Synthetic oligonucleotide
cagcguaagccauggacag

SEQ ID NO: 1826472 - RNA, 19 nt, Artificial Sequence
  Description of Artificial Sequence: Synthetic oligonucleotide
ucaaggguugucacaccga

SEQ ID NO: 1826473 - RNA, 19 nt, Artificial Sequence
  Description of Artificial Sequence: Synthetic oligonucleotide
uggauucucccggugagug

SEQ ID NO: 1826474 - RNA, 19 nt, Artificial Sequence
  Description of Artificial Sequence: Synthetic oligonucleotide
guuaaccggguuugcaaug

SEQ ID NO: 1826475 - RNA, 19 nt, Artificial Sequence
  Description of Artificial Sequence: Synthetic oligonucleotide
agcaaaucgaaggcccugg

SEQ ID NO: 1826476 - RNA, 19 nt, Artificial Sequence
  Description of Artificial Sequence: Synthetic oligonucleotide
gcucugacgaugucaaggg

SEQ ID NO: 1826477 - RNA, 19 nt, Artificial Sequence
  Description of Artificial Sequence: Synthetic oligonucleotide
ucgaugugacucagauccg

SEQ ID NO: 1826478 - RNA, 19 nt, Artificial Sequence
  Description of Artificial Sequence: Synthetic oligonucleotide
uccuggauucucccgguga

SEQ ID NO: 1826479 - RNA, 19 nt, Artificial Sequence
  Description of Artificial Sequence: Synthetic oligonucleotide
gcuuuuagcucagggaugg

SEQ ID NO: 1826480 - RNA, 19 nt, Artificial Sequence
  Description of Artificial Sequence: Synthetic oligonucleotide
ucguagagggucaggcggc

SEQ ID NO: 1826481 - RNA, 19 nt, Artificial Sequence
  Description of Artificial Sequence: Synthetic oligonucleotide
augccgguacaacacccac

SEQ ID NO: 1826482 - RNA, 19 nt, Artificial Sequence
  Description of Artificial Sequence: Synthetic oligonucleotide
agaugcuccgagcacggcu

SEQ ID NO: 1826483 - RNA, 19 nt, Artificial Sequence
  Description of Artificial Sequence: Synthetic oligonucleotide
aaagcaaaucgaaggcccu

SEQ ID NO: 1826484 - RNA, 19 nt, Artificial Sequence
  Description of Artificial Sequence: Synthetic oligonucleotide
ggaggcuuuuagcucaggg

SEQ ID NO: 1826485 - RNA, 19 nt, Artificial Sequence
  Description of Artificial Sequence: Synthetic oligonucleotide
auuuugccaaugcccaggu

SEQ ID NO: 1826486 - RNA, 19 nt, Artificial Sequence
  Description of Artificial Sequence: Synthetic oligonucleotide
cucggcaaucaucuucucc

SEQ ID NO: 1826487 - RNA, 19 nt, Artificial Sequence
  Description of Artificial Sequence: Synthetic oligonucleotide
gaguuaaccggguuugcaa

SEQ ID NO: 1826488 - RNA, 19 nt, Artificial Sequence
  Description of Artificial Sequence: Synthetic oligonucleotide
gaugugacucagauccgcc

SEQ ID NO: 1826489 - RNA, 19 nt, Artificial Sequence
  Description of Artificial Sequence: Synthetic oligonucleotide
gucuuggggaaagucaacc

SEQ ID NO: 1826490 - RNA, 19 nt, Artificial Sequence
  Description of Artificial Sequence: Synthetic oligonucleotide
aaugguagcguugguguua

SEQ ID NO: 1826491 - RNA, 19 nt, Artificial Sequence
  Description of Artificial Sequence: Synthetic oligonucleotide
auagaccagccaccauugg

SEQ ID NO: 1826492 - RNA, 19 nt, Artificial Sequence
  Description of Artificial Sequence: Synthetic oligonucleotide
aagcaaaucgaaggcccug

SEQ ID NO: 1826493 - RNA, 19 nt, Artificial Sequence
  Description of Artificial Sequence: Synthetic oligonucleotide
agcucugccacgaaugugu

SEQ ID NO: 1826494 - RNA, 19 nt, Artificial Sequence
  Description of Artificial Sequence: Synthetic oligonucleotide
aagacaaaacgggcuccag

SEQ ID NO: 1826495 - RNA, 19 nt, Artificial Sequence
  Description of Artificial Sequence: Synthetic oligonucleotide
uguguucgcucugacgaug

SEQ ID NO: 1826496 - RNA, 19 nt, Artificial Sequence
  Description of Artificial Sequence: Synthetic oligonucleotide
ggagugauuuugccaaugc

SEQ ID NO: 1826497 - RNA, 19 nt, Artificial Sequence
  Description of Artificial Sequence: Synthetic oligonucleotide
gggguuguacacuccaugc

SEQ ID NO: 1826498 - RNA, 19 nt, Artificial Sequence
  Description of Artificial Sequence: Synthetic oligonucleotide
ugccgguacaacacccacc

SEQ ID NO: 1826499 - RNA, 19 nt, Artificial Sequence
  Description of Artificial Sequence: Synthetic oligonucleotide
guggaguuaaccggguuug

SEQ ID NO: 1826500 - RNA, 19 nt, Artificial Sequence
  Description of Artificial Sequence: Synthetic oligonucleotide
acaaaguccucgccuuucu

SEQ ID NO: 1826501 - RNA, 19 nt, Artificial Sequence
  Description of Artificial Sequence: Synthetic oligonucleotide
agaaguaagugcacucugu

SEQ ID NO: 1826502 - RNA, 19 nt, Artificial Sequence
  Description of Artificial Sequence: Synthetic oligonucleotide
accgaagaucuuguugggg

SEQ ID NO: 1826503 - RNA, 19 nt, Artificial Sequence
  Description of Artificial Sequence: Synthetic oligonucleotide
cacggcuacuuuagcauug

SEQ ID NO: 1826504 - RNA, 19 nt, Artificial Sequence
  Description of Artificial Sequence: Synthetic oligonucleotide
ucagguccgagguagccuu

SEQ ID NO: 1826505 - RNA, 19 nt, Artificial Sequence
  Description of Artificial Sequence: Synthetic oligonucleotide
gauccgccgccacaccagg

SEQ ID NO: 1826506 - RNA, 19 nt, Artificial Sequence
  Description of Artificial Sequence: Synthetic oligonucleotide
agcguggccaccaaugaca

SEQ ID NO: 1826507 - RNA, 19 nt, Artificial Sequence
  Description of Artificial Sequence: Synthetic oligonucleotide
caccgaagaucuuguuggg

SEQ ID NO: 1826508 - RNA, 19 nt, Artificial Sequence
  Description of Artificial Sequence: Synthetic oligonucleotide
aaguuagggcgaugcugcu

SEQ ID NO: 1826509 - RNA, 19 nt, Artificial Sequence
  Description of Artificial Sequence: Synthetic oligonucleotide
aaggagugauuuugccaau

SEQ ID NO: 1826510 - RNA, 19 nt, Artificial Sequence
  Description of Artificial Sequence: Synthetic oligonucleotide
acaaaacgggcuccagcgu

SEQ ID NO: 1826511 - RNA, 19 nt, Artificial Sequence
  Description of Artificial Sequence: Synthetic oligonucleotide
acgaugucaaggguuguca

SEQ ID NO: 1826512 - RNA, 19 nt, Artificial Sequence
  Description of Artificial Sequence: Synthetic oligonucleotide
caucacaaccuuucaggca

SEQ ID NO: 1826513 - RNA, 19 nt, Artificial Sequence
  Description of Artificial Sequence: Synthetic oligonucleotide
gguagccuuucacauuugc

SEQ ID NO: 1826514 - RNA, 19 nt, Artificial Sequence
  Description of Artificial Sequence: Synthetic oligonucleotide
ugucaaggguugucacacc

SEQ ID NO: 1826515 - RNA, 19 nt, Artificial Sequence
  Description of Artificial Sequence: Synthetic oligonucleotide
aaccggguuugcaaugaug

SEQ ID NO: 1826516 - RNA, 19 nt, Artificial Sequence
  Description of Artificial Sequence: Synthetic oligonucleotide
ucaauagaccagccaccau

SEQ ID NO: 1826517 - RNA, 19 nt, Artificial Sequence
  Description of Artificial Sequence: Synthetic oligonucleotide
cucagauccgccgccacac

SEQ ID NO: 1826518 - RNA, 19 nt, Artificial Sequence
  Description of Artificial Sequence: Synthetic oligonucleotide
gguagcguugguguuaaac

SEQ ID NO: 1826519 - RNA, 19 nt, Artificial Sequence
  Description of Artificial Sequence: Synthetic oligonucleotide
gagguagccuuucacauuu

SEQ ID NO: 1826520 - RNA, 19 nt, Artificial Sequence
  Description of Artificial Sequence: Synthetic oligonucleotide
accauuggggagagaugcc

SEQ ID NO: 1826521 - RNA, 19 nt, Artificial Sequence
  Description of Artificial Sequence: Synthetic oligonucleotide
aaggguugucacaccgaag

SEQ ID NO: 1826522 - RNA, 19 nt, Artificial Sequence
  Description of Artificial Sequence: Synthetic oligonucleotide
caccaucaaagcaaaucga

SEQ ID NO: 1826523 - RNA, 19 nt, Artificial Sequence
  Description of Artificial Sequence: Synthetic oligonucleotide
augcagaucauggcuucag

SEQ ID NO: 1826524 - RNA, 19 nt, Artificial Sequence
  Description of Artificial Sequence: Synthetic oligonucleotide
cuuuauugucauuaucaau

SEQ ID NO: 1826525 - RNA, 19 nt, Artificial Sequence
  Description of Artificial Sequence: Synthetic oligonucleotide
cauugacucgagagggauc

SEQ ID NO: 1826526 - RNA, 19 nt, Artificial Sequence
  Description of Artificial Sequence: Synthetic oligonucleotide
cacgacuuccgugccagcc

SEQ ID NO: 1826527 - RNA, 19 nt, Artificial Sequence
  Description of Artificial Sequence: Synthetic oligonucleotide
acgacuuccgugccagccu

SEQ ID NO: 1826528 - RNA, 19 nt, Artificial Sequence
  Description of Artificial Sequence: Synthetic oligonucleotide
auggacagaguggcagaac

SEQ ID NO: 1826529 - RNA, 19 nt, Artificial Sequence
  Description of Artificial Sequence: Synthetic oligonucleotide
guguaugagcaauaucgua

SEQ ID NO: 1826530 - RNA, 19 nt, Artificial Sequence
  Description of Artificial Sequence: Synthetic oligonucleotide
ucauggcguccacaaggga

SEQ ID NO: 1826531 - RNA, 19 nt, Artificial Sequence
  Description of Artificial Sequence: Synthetic oligonucleotide
gggagaagacaaaacgggc

SEQ ID NO: 1826532 - RNA, 19 nt, Artificial Sequence
  Description of Artificial Sequence: Synthetic oligonucleotide
aggagugauuuugccaaug

SEQ ID NO: 1826533 - RNA, 19 nt, Artificial Sequence
  Description of Artificial Sequence: Synthetic oligonucleotide
gaaccugcuccagccuugg

SEQ ID NO: 1826534 - RNA, 19 nt, Artificial Sequence
  Description of Artificial Sequence: Synthetic oligonucleotide
gauggccucggcaaucauc

SEQ ID NO: 1826535 - RNA, 19 nt, Artificial Sequence
  Description of Artificial Sequence: Synthetic oligonucleotide
gacaaaguccucgccuuuc

SEQ ID NO: 1826536 - RNA, 19 nt, Artificial Sequence
  Description of Artificial Sequence: Synthetic oligonucleotide
aaaacgggcuccagcguaa

SEQ ID NO: 1826537 - RNA, 19 nt, Artificial Sequence
  Description of Artificial Sequence: Synthetic oligonucleotide
ggcuacuuuagcauuguuc

SEQ ID NO: 1826538 - RNA, 19 nt, Artificial Sequence
  Description of Artificial Sequence: Synthetic oligonucleotide
ucagauccgccgccacacc

SEQ ID NO: 1826539 - RNA, 19 nt, Artificial Sequence
  Description of Artificial Sequence: Synthetic oligonucleotide
gacaggcacauugacucga

SEQ ID NO: 1826540 - RNA, 19 nt, Artificial Sequence
  Description of Artificial Sequence: Synthetic oligonucleotide
augccgaugccgguacaac

SEQ ID NO: 1826541 - RNA, 19 nt, Artificial Sequence
  Description of Artificial Sequence: Synthetic oligonucleotide
gacgaugucaaggguuguc

SEQ ID NO: 1826542 - RNA, 19 nt, Artificial Sequence
  Description of Artificial Sequence: Synthetic oligonucleotide
ugacaaaguccucgccuuu

SEQ ID NO: 1826543 - RNA, 19 nt, Artificial Sequence
  Description of Artificial Sequence: Synthetic oligonucleotide
cagguguaugagcaauauc

SEQ ID NO: 1826544 - RNA, 19 nt, Artificial Sequence
  Description of Artificial Sequence: Synthetic oligonucleotide
aaacgggcuccagcguaag

SEQ ID NO: 1826545 - RNA, 19 nt, Artificial Sequence
  Description of Artificial Sequence: Synthetic oligonucleotide
caauaucguagagggucag

SEQ ID NO: 1826546 - RNA, 19 nt, Artificial Sequence
  Description of Artificial Sequence: Synthetic oligonucleotide
acgaauguguucgcucuga

SEQ ID NO: 1826547 - RNA, 19 nt, Artificial Sequence
  Description of Artificial Sequence: Synthetic oligonucleotide
guuugcaaugaugcagauc

SEQ ID NO: 1826548 - RNA, 19 nt, Artificial Sequence
  Description of Artificial Sequence: Synthetic oligonucleotide
aguuagggcgaugcugcug

SEQ ID NO: 1826549 - RNA, 19 nt, Artificial Sequence
  Description of Artificial Sequence: Synthetic oligonucleotide
caaggguugucacaccgaa

SEQ ID NO: 1826550 - RNA, 19 nt, Artificial Sequence
  Description of Artificial Sequence: Synthetic oligonucleotide
cauuggggagagaugccga

SEQ ID NO: 1826551 - RNA, 19 nt, Artificial Sequence
  Description of Artificial Sequence: Synthetic oligonucleotide
aagugcacucugucucuuu

SEQ ID NO: 1826552 - RNA, 19 nt, Artificial Sequence
  Description of Artificial Sequence: Synthetic oligonucleotide
caauagaccagccaccauu

SEQ ID NO: 1826553 - RNA, 19 nt, Artificial Sequence
  Description of Artificial Sequence: Synthetic oligonucleotide
ugacucgagagggauccaa

SEQ ID NO: 1826554 - RNA, 19 nt, Artificial Sequence
  Description of Artificial Sequence: Synthetic oligonucleotide
ucacaaccuuucaggcagu

SEQ ID NO: 1826555 - RNA, 19 nt, Artificial Sequence
  Description of Artificial Sequence: Synthetic oligonucleotide
agcugggaucaccaccaca

SEQ ID NO: 1826556 - RNA, 19 nt, Artificial Sequence
  Description of Artificial Sequence: Synthetic oligonucleotide
gaugccgguacaacaccca

SEQ ID NO: 1826557 - RNA, 19 nt, Artificial Sequence
  Description of Artificial Sequence: Synthetic oligonucleotide
aaaggacagucugcuuuau

SEQ ID NO: 1826558 - RNA, 19 nt, Artificial Sequence
  Description of Artificial Sequence: Synthetic oligonucleotide
augcuccgagcacggcuac

SEQ ID NO: 1826559 - RNA, 19 nt, Artificial Sequence
  Description of Artificial Sequence: Synthetic oligonucleotide
caaaacgggcuccagcgua

SEQ ID NO: 1826560 - RNA, 19 nt, Artificial Sequence
  Description of Artificial Sequence: Synthetic oligonucleotide
uaaccggguuugcaaugau

SEQ ID NO: 1826561 - RNA, 19 nt, Artificial Sequence
  Description of Artificial Sequence: Synthetic oligonucleotide
ccagcguaagccauggaca

SEQ ID NO: 1826562 - RNA, 19 nt, Artificial Sequence
  Description of Artificial Sequence: Synthetic oligonucleotide
guaagugcacucugucucu

SEQ ID NO: 1826563 - RNA, 19 nt, Artificial Sequence
  Description of Artificial Sequence: Synthetic oligonucleotide
acaaccuuucaggcagucu

SEQ ID NO: 1826564 - RNA, 19 nt, Artificial Sequence
  Description of Artificial Sequence: Synthetic oligonucleotide
cacgaauguguucgcucug

SEQ ID NO: 1826565 - RNA, 19 nt, Artificial Sequence
  Description of Artificial Sequence: Synthetic oligonucleotide
auguguucgcucugacgau

SEQ ID NO: 1826566 - RNA, 19 nt, Artificial Sequence
  Description of Artificial Sequence: Synthetic oligonucleotide
agauccgccgccacaccag

SEQ ID NO: 1826567 - RNA, 19 nt, Artificial Sequence
  Description of Artificial Sequence: Synthetic oligonucleotide
ugcggucagcuggucuugg

SEQ ID NO: 1826568 - RNA, 19 nt, Artificial Sequence
  Description of Artificial Sequence: Synthetic oligonucleotide
guccgagguagccuuucac

SEQ ID NO: 1826569 - RNA, 19 nt, Artificial Sequence
  Description of Artificial Sequence: Synthetic oligonucleotide
cuggucucgaugugacuca

SEQ ID NO: 1826570 - RNA, 19 nt, Artificial Sequence
  Description of Artificial Sequence: Synthetic oligonucleotide
uuagggcgaugcugcugcc

SEQ ID NO: 1826571 - RNA, 19 nt, Artificial Sequence
  Description of Artificial Sequence: Synthetic oligonucleotide
gcguccacaagggagaaga

SEQ ID NO: 1826572 - RNA, 19 nt, Artificial Sequence
  Description of Artificial Sequence: Synthetic oligonucleotide
uguucgcucugacgauguc

SEQ ID NO: 1826573 - RNA, 19 nt, Artificial Sequence
  Description of Artificial Sequence: Synthetic oligonucleotide
ccuggauucucccggugag

SEQ ID NO: 1826574 - RNA, 19 nt, Artificial Sequence
  Description of Artificial Sequence: Synthetic oligonucleotide
cauuguucugggccgaagu

SEQ ID NO: 1826575 - RNA, 19 nt, Artificial Sequence
  Description of Artificial Sequence: Synthetic oligonucleotide
gaugccgaugccgguacaa

SEQ ID NO: 1826576 - RNA, 19 nt, Artificial Sequence
  Description of Artificial Sequence: Synthetic oligonucleotide
cagcguggccaccaaugac

SEQ ID NO: 1826577 - RNA, 19 nt, Artificial Sequence
  Description of Artificial Sequence: Synthetic oligonucleotide
ucgugucauuccuggcuuc

SEQ ID NO: 1826578 - RNA, 19 nt, Artificial Sequence
  Description of Artificial Sequence: Synthetic oligonucleotide
gcagugcugagcacaggcg

SEQ ID NO: 1826579 - RNA, 19 nt, Artificial Sequence
  Description of Artificial Sequence: Synthetic oligonucleotide
ucgcucugacgaugucaag

SEQ ID NO: 1826580 - RNA, 19 nt, Artificial Sequence
  Description of Artificial Sequence: Synthetic oligonucleotide
uagcauuguucugggccga

SEQ ID NO: 1826581 - RNA, 19 nt, Artificial Sequence
  Description of Artificial Sequence: Synthetic oligonucleotide
acagaucaucucgugucau

SEQ ID NO: 1826582 - RNA, 19 nt, Artificial Sequence
  Description of Artificial Sequence: Synthetic oligonucleotide
acgacaccuuccuucccau

SEQ ID NO: 1826583 - RNA, 19 nt, Artificial Sequence
  Description of Artificial Sequence: Synthetic oligonucleotide
cuuuuagcucagggauggc

SEQ ID NO: 1826584 - RNA, 19 nt, Artificial Sequence
  Description of Artificial Sequence: Synthetic oligonucleotide
caacgacaccuuccuuccc

SEQ ID NO: 1826585 - RNA, 19 nt, Artificial Sequence
  Description of Artificial Sequence: Synthetic oligonucleotide
acauuugcucuggucucga

SEQ ID NO: 1826586 - RNA, 19 nt, Artificial Sequence
  Description of Artificial Sequence: Synthetic oligonucleotide
gucaggcggcucacuaggg

SEQ ID NO: 1826587 - RNA, 19 nt, Artificial Sequence
  Description of Artificial Sequence: Synthetic oligonucleotide
cacucaacgacaccuuccu

SEQ ID NO: 1826588 - RNA, 19 nt, Artificial Sequence
  Description of Artificial Sequence: Synthetic oligonucleotide
uccgugccagccuccugga

SEQ ID NO: 1826589 - RNA, 19 nt, Artificial Sequence
  Description of Artificial Sequence: Synthetic oligonucleotide
ugccacgaauguguucgcu

SEQ ID NO: 1826590 - RNA, 19 nt, Artificial Sequence
  Description of Artificial Sequence: Synthetic oligonucleotide
gccacgaauguguucgcuc

SEQ ID NO: 1826591 - RNA, 19 nt, Artificial Sequence
  Description of Artificial Sequence: Synthetic oligonucleotide
acggcuacuuuagcauugu

SEQ ID NO: 1826592 - RNA, 19 nt, Artificial Sequence
  Description of Artificial Sequence: Synthetic oligonucleotide
ugacgaugucaaggguugu

SEQ ID NO: 1826593 - RNA, 19 nt, Artificial Sequence
  Description of Artificial Sequence: Synthetic oligonucleotide
ggacagucugcuuuauugu

SEQ ID NO: 1826594 - RNA, 19 nt, Artificial Sequence
  Description of Artificial Sequence: Synthetic oligonucleotide
gacucgagagggauccaaa

SEQ ID NO: 1826595 - RNA, 19 nt, Artificial Sequence
  Description of Artificial Sequence: Synthetic oligonucleotide
gggguacacugagagauca

SEQ ID NO: 1826596 - RNA, 19 nt, Artificial Sequence
  Description of Artificial Sequence: Synthetic oligonucleotide
ggaguuaaccggguuugca

SEQ ID NO: 1826597 - RNA, 19 nt, Artificial Sequence
  Description of Artificial Sequence: Synthetic oligonucleotide
cugccacgaauguguucgc

SEQ ID NO: 1826598 - RNA, 19 nt, Artificial Sequence
  Description of Artificial Sequence: Synthetic oligonucleotide
gcaauaucguagaggguca

SEQ ID NO: 1826599 - RNA, 19 nt, Artificial Sequence
  Description of Artificial Sequence: Synthetic oligonucleotide
cagauccgccgccacacca

SEQ ID NO: 1826600 - RNA, 19 nt, Artificial Sequence
  Description of Artificial Sequence: Synthetic oligonucleotide
gcgagggcggacagcaugg

SEQ ID NO: 1826601 - RNA, 19 nt, Artificial Sequence
  Description of Artificial Sequence: Synthetic oligonucleotide
cuucacgacuuccgugcca

SEQ ID NO: 1826602 - RNA, 19 nt, Artificial Sequence
  Description of Artificial Sequence: Synthetic oligonucleotide
uagggcgaugcugcugccu

SEQ ID NO: 1826603 - RNA, 19 nt, Artificial Sequence
  Description of Artificial Sequence: Synthetic oligonucleotide
acucaacgacaccuuccuu

SEQ ID NO: 1826604 - RNA, 19 nt, Artificial Sequence
  Description of Artificial Sequence: Synthetic oligonucleotide
ggcgaugcugcugccuggg

SEQ ID NO: 1826605 - RNA, 19 nt, Artificial Sequence
  Description of Artificial Sequence: Synthetic oligonucleotide
caaggguguggagaaguaa

SEQ ID NO: 1826606 - RNA, 19 nt, Artificial Sequence
  Description of Artificial Sequence: Synthetic oligonucleotide
agcguaagccauggacaga

SEQ ID NO: 1826607 - RNA, 19 nt, Artificial Sequence
  Description of Artificial Sequence: Synthetic oligonucleotide
gccgaugccgguacaacac

SEQ ID NO: 1826608 - RNA, 19 nt, Artificial Sequence
  Description of Artificial Sequence: Synthetic oligonucleotide
gguguaugagcaauaucgu

SEQ ID NO: 1826609 - RNA, 19 nt, Artificial Sequence
  Description of Artificial Sequence: Synthetic oligonucleotide
cacaaccuuucaggcaguc

SEQ ID NO: 1826610 - RNA, 19 nt, Artificial Sequence
  Description of Artificial Sequence: Synthetic oligonucleotide
uugacucgagagggaucca

SEQ ID NO: 1826611 - RNA, 19 nt, Artificial Sequence
  Description of Artificial Sequence: Synthetic oligonucleotide
auucucccggugagugcgg

SEQ ID NO: 1826612 - RNA, 19 nt, Artificial Sequence
  Description of Artificial Sequence: Synthetic oligonucleotide
cgaugccgguacaacaccc

SEQ ID NO: 1826613 - RNA, 19 nt, Artificial Sequence
  Description of Artificial Sequence: Synthetic oligonucleotide
gguggaguuaaccggguuu

SEQ ID NO: 1826614 - RNA, 19 nt, Artificial Sequence
  Description of Artificial Sequence: Synthetic oligonucleotide
cuucccagcguggccacca

SEQ ID NO: 1826615 - RNA, 19 nt, Artificial Sequence
  Description of Artificial Sequence: Synthetic oligonucleotide
gcggacagcauggcugggg

SEQ ID NO: 1826616 - RNA, 19 nt, Artificial Sequence
  Description of Artificial Sequence: Synthetic oligonucleotide
ccgaagugcugaagcugcg

SEQ ID NO: 1826617 - RNA, 19 nt, Artificial Sequence
  Description of Artificial Sequence: Synthetic oligonucleotide
ccgaugccgguacaacacc

SEQ ID NO: 1826618 - RNA, 19 nt, Artificial Sequence
  Description of Artificial Sequence: Synthetic oligonucleotide
gucuucccagcguggccac

SEQ ID NO: 1826619 - RNA, 19 nt, Artificial Sequence
  Description of Artificial Sequence: Synthetic oligonucleotide
gagugcggucagcuggucu

SEQ ID NO: 1826620 - RNA, 19 nt, Artificial Sequence
  Description of Artificial Sequence: Synthetic oligonucleotide
gguacacugagagaucaau

SEQ ID NO: 1826621 - RNA, 19 nt, Artificial Sequence
  Description of Artificial Sequence: Synthetic oligonucleotide
accagguguaugagcaaua

SEQ ID NO: 1826622 - RNA, 19 nt, Artificial Sequence
  Description of Artificial Sequence: Synthetic oligonucleotide
cgaugugacucagauccgc

SEQ ID NO: 1826623 - RNA, 19 nt, Artificial Sequence
  Description of Artificial Sequence: Synthetic oligonucleotide
ggguuguacacuccaugcu

SEQ ID NO: 1826624 - RNA, 19 nt, Artificial Sequence
  Description of Artificial Sequence: Synthetic oligonucleotide
ccaccauuggggagagaug

SEQ ID NO: 1826625 - RNA, 19 nt, Artificial Sequence
  Description of Artificial Sequence: Synthetic oligonucleotide
gcguggccaccaaugacag

SEQ ID NO: 1826626 - RNA, 19 nt, Artificial Sequence
  Description of Artificial Sequence: Synthetic oligonucleotide
ccuucacgacuuccgugcc

SEQ ID NO: 1826627 - RNA, 19 nt, Artificial Sequence
  Description of Artificial Sequence: Synthetic oligonucleotide
guacaacacccaccaucaa

SEQ ID NO: 1826628 - RNA, 19 nt, Artificial Sequence
  Description of Artificial Sequence: Synthetic oligonucleotide
cugggccgaagugcugaag

SEQ ID NO: 1826629 - RNA, 19 nt, Artificial Sequence
  Description of Artificial Sequence: Synthetic oligonucleotide
gcucagguccgagguagcc

SEQ ID NO: 1826630 - RNA, 19 nt, Artificial Sequence
  Description of Artificial Sequence: Synthetic oligonucleotide
caggcacauugacucgaga

SEQ ID NO: 1826631 - RNA, 19 nt, Artificial Sequence
  Description of Artificial Sequence: Synthetic oligonucleotide
gaacacucaacgacaccuu

SEQ ID NO: 1826632 - RNA, 19 nt, Artificial Sequence
  Description of Artificial Sequence: Synthetic oligonucleotide
uggcguccacaagggagaa

SEQ ID NO: 1826633 - RNA, 19 nt, Artificial Sequence
  Description of Artificial Sequence: Synthetic oligonucleotide
ggucuuggggaaagucaac

SEQ ID NO: 1826634 - RNA, 19 nt, Artificial Sequence
  Description of Artificial Sequence: Synthetic oligonucleotide
cucgugucauuccuggcuu

SEQ ID NO: 1826635 - RNA, 19 nt, Artificial Sequence
  Description of Artificial Sequence: Synthetic oligonucleotide
gugcggucagcuggucuug

SEQ ID NO: 1826636 - RNA, 19 nt, Artificial Sequence
  Description of Artificial Sequence: Synthetic oligonucleotide
agcauuguucugggccgaa

SEQ ID NO: 1826637 - RNA, 19 nt, Artificial Sequence
  Description of Artificial Sequence: Synthetic oligonucleotide
gagcacaggcggccgucaa

SEQ ID NO: 1826638 - RNA, 19 nt, Artificial Sequence
  Description of Artificial Sequence: Synthetic oligonucleotide
gagcaauaucguagagggu

SEQ ID NO: 1826639 - RNA, 19 nt, Artificial Sequence
  Description of Artificial Sequence: Synthetic oligonucleotide
gguccgagguagccuuuca

SEQ ID NO: 1826640 - RNA, 19 nt, Artificial Sequence
  Description of Artificial Sequence: Synthetic oligonucleotide
cucugacgaugucaagggu

SEQ ID NO: 1826641 - RNA, 19 nt, Artificial Sequence
  Description of Artificial Sequence: Synthetic oligonucleotide
ccacgaauguguucgcucu

SEQ ID NO: 1826642 - RNA, 19 nt, Artificial Sequence
  Description of Artificial Sequence: Synthetic oligonucleotide
guguucgcucugacgaugu

SEQ ID NO: 1826643 - RNA, 19 nt, Artificial Sequence
  Description of Artificial Sequence: Synthetic oligonucleotide
caaugguagcguugguguu

SEQ ID NO: 1826644 - RNA, 19 nt, Artificial Sequence
  Description of Artificial Sequence: Synthetic oligonucleotide
gagagggauccaaacccuu

SEQ ID NO: 1826645 - RNA, 19 nt, Artificial Sequence
  Description of Artificial Sequence: Synthetic oligonucleotide
aagcugcggcggagagcgg

SEQ ID NO: 1826646 - RNA, 19 nt, Artificial Sequence
  Description of Artificial Sequence: Synthetic oligonucleotide
gugagugcggucagcuggu

SEQ ID NO: 1826647 - RNA, 19 nt, Artificial Sequence
  Description of Artificial Sequence: Synthetic oligonucleotide
gcguugguguuaaacagau

SEQ ID NO: 1826648 - RNA, 19 nt, Artificial Sequence
  Description of Artificial Sequence: Synthetic oligonucleotide
cagagacaugauguggaau

SEQ ID NO: 1826649 - RNA, 19 nt, Artificial Sequence
  Description of Artificial Sequence: Synthetic oligonucleotide
caccagguguaugagcaau

SEQ ID NO: 1826650 - RNA, 19 nt, Artificial Sequence
  Description of Artificial Sequence: Synthetic oligonucleotide
cugcggcggagagcggcgc

SEQ ID NO: 1826651 - RNA, 19 nt, Artificial Sequence
  Description of Artificial Sequence: Synthetic oligonucleotide
ccggguuugcaaugaugca

SEQ ID NO: 1826652 - RNA, 19 nt, Artificial Sequence
  Description of Artificial Sequence: Synthetic oligonucleotide
ugguagcguugguguuaaa

SEQ ID NO: 1826653 - RNA, 19 nt, Artificial Sequence
  Description of Artificial Sequence: Synthetic oligonucleotide
cgagcacggcuacuuuagc

SEQ ID NO: 1826654 - RNA, 19 nt, Artificial Sequence
  Description of Artificial Sequence: Synthetic oligonucleotide
gcaaaucgaaggcccuggu

SEQ ID NO: 1826655 - RNA, 19 nt, Artificial Sequence
  Description of Artificial Sequence: Synthetic oligonucleotide
ggcguccacaagggagaag

SEQ ID NO: 1826656 - RNA, 19 nt, Artificial Sequence
  Description of Artificial Sequence: Synthetic oligonucleotide
cguugguguuaaacagauc

SEQ ID NO: 1826657 - RNA, 19 nt, Artificial Sequence
  Description of Artificial Sequence: Synthetic oligonucleotide
gcggagagcggcgccggcc

SEQ ID NO: 1826658 - RNA, 19 nt, Artificial Sequence
  Description of Artificial Sequence: Synthetic oligonucleotide
ggguugucacaccgaagau

SEQ ID NO: 1826659 - RNA, 19 nt, Artificial Sequence
  Description of Artificial Sequence: Synthetic oligonucleotide
cauuugcucuggucucgau

SEQ ID NO: 1826660 - RNA, 19 nt, Artificial Sequence
  Description of Artificial Sequence: Synthetic oligonucleotide
auccgccgccacaccaggu

SEQ ID NO: 1826661 - RNA, 19 nt, Artificial Sequence
  Description of Artificial Sequence: Synthetic oligonucleotide
ggguacacugagagaucaa

SEQ ID NO: 1826662 - RNA, 19 nt, Artificial Sequence
  Description of Artificial Sequence: Synthetic oligonucleotide
gcacggcuacuuuagcauu

SEQ ID NO: 1826663 - RNA, 19 nt, Artificial Sequence
  Description of Artificial Sequence: Synthetic oligonucleotide
cacaggcggccgucaaggu

SEQ ID NO: 1826664 - RNA, 19 nt, Artificial Sequence
  Description of Artificial Sequence: Synthetic oligonucleotide
cgagagggauccaaacccu

SEQ ID NO: 1826665 - RNA, 19 nt, Artificial Sequence
  Description of Artificial Sequence: Synthetic oligonucleotide
cggccgucaagguggccac

SEQ ID NO: 1826666 - RNA, 19 nt, Artificial Sequence
  Description of Artificial Sequence: Synthetic oligonucleotide
ccagguguaugagcaauau

SEQ ID NO: 1826667 - RNA, 19 nt, Artificial Sequence
  Description of Artificial Sequence: Synthetic oligonucleotide
cuccgagcacggcuacuuu

SEQ ID NO: 1826668 - RNA, 19 nt, Artificial Sequence
  Description of Artificial Sequence: Synthetic oligonucleotide
agccaccauuggggagaga

SEQ ID NO: 1826669 - RNA, 19 nt, Artificial Sequence
  Description of Artificial Sequence: Synthetic oligonucleotide
ccggugagugcggucagcu

SEQ ID NO: 1826670 - RNA, 19 nt, Artificial Sequence
  Description of Artificial Sequence: Synthetic oligonucleotide
ccgccacaccagguguaug

SEQ ID NO: 1826671 - RNA, 19 nt, Artificial Sequence
  Description of Artificial Sequence: Synthetic oligonucleotide
cagguccgagguagccuuu

SEQ ID NO: 1826672 - RNA, 19 nt, Artificial Sequence
  Description of Artificial Sequence: Synthetic oligonucleotide
cgagguagccuuucacauu

SEQ ID NO: 1826673 - RNA, 19 nt, Artificial Sequence
  Description of Artificial Sequence: Synthetic oligonucleotide
ggccgucaagguggccaca

SEQ ID NO: 1826674 - RNA, 19 nt, Artificial Sequence
  Description of Artificial Sequence: Synthetic oligonucleotide
gccgccacaccagguguau

SEQ ID NO: 1826675 - RNA, 19 nt, Artificial Sequence
  Description of Artificial Sequence: Synthetic oligonucleotide
cgccgccacaccaggugua

SEQ ID NO: 1826676 - RNA, 19 nt, Artificial Sequence
  Description of Artificial Sequence: Synthetic oligonucleotide
cggcuacuuuagcauuguu

SEQ ID NO: 1826677 - RNA, 19 nt, Artificial Sequence
  Description of Artificial Sequence: Synthetic oligonucleotide
aaaguuaagacucuccucc

SEQ ID NO: 1826678 - RNA, 19 nt, Artificial Sequence
  Description of Artificial Sequence: Synthetic oligonucleotide
aauauuaugaaccuugucu

SEQ ID NO: 1826679 - RNA, 19 nt, Artificial Sequence
  Description of Artificial Sequence: Synthetic oligonucleotide
auagccaauauauagaggc

SEQ ID NO: 1826680 - RNA, 19 nt, Artificial Sequence
  Description of Artificial Sequence: Synthetic oligonucleotide
aaaacaucaacauuuuggg

SEQ ID NO: 1826681 - RNA, 19 nt, Artificial Sequence
  Description of Artificial Sequence: Synthetic oligonucleotide
aaauuuauuagcuaaagua

SEQ ID NO: 1826682 - RNA, 19 nt, Artificial Sequence
  Description of Artificial Sequence: Synthetic oligonucleotide
ugaauuagaucuaaaaugc

SEQ ID NO: 1826683 - RNA, 19 nt, Artificial Sequence
  Description of Artificial Sequence: Synthetic oligonucleotide
uguaauagccaauauauag

SEQ ID NO: 1826684 - RNA, 19 nt, Artificial Sequence
  Description of Artificial Sequence: Synthetic oligonucleotide
uaaacuaaggaaaagguca

SEQ ID NO: 1826685 - RNA, 19 nt, Artificial Sequence
  Description of Artificial Sequence: Synthetic oligonucleotide
uaucaagcaaaacagaaag

SEQ ID NO: 1826686 - RNA, 19 nt, Artificial Sequence
  Description of Artificial Sequence: Synthetic oligonucleotide
caaaacaucaacauuuugg

SEQ ID NO: 1826687 - RNA, 19 nt, Artificial Sequence
  Description of Artificial Sequence: Synthetic oligonucleotide
uguaucuucacuauagggc

SEQ ID NO: 1826688 - RNA, 19 nt, Artificial Sequence
  Description of Artificial Sequence: Synthetic oligonucleotide
aauauaguguugcauaaug

SEQ ID NO: 1826689 - RNA, 19 nt, Artificial Sequence
  Description of Artificial Sequence: Synthetic oligonucleotide
augucuauaaaucaguuug

SEQ ID NO: 1826690 - RNA, 19 nt, Artificial Sequence
  Description of Artificial Sequence: Synthetic oligonucleotide
uaggaaauuacaaacauuc

SEQ ID NO: 1826691 - RNA, 19 nt, Artificial Sequence
  Description of Artificial Sequence: Synthetic oligonucleotide
ucuuuaaaaucacugagca

SEQ ID NO: 1826692 - RNA, 19 nt, Artificial Sequence
  Description of Artificial Sequence: Synthetic oligonucleotide
uuuagaaaagucaauuucu

SEQ ID NO: 1826693 - RNA, 19 nt, Artificial Sequence
  Description of Artificial Sequence: Synthetic oligonucleotide
aauauauagaggcaugccu

SEQ ID NO: 1826694 - RNA, 19 nt, Artificial Sequence
  Description of Artificial Sequence: Synthetic oligonucleotide
aauguuuccacaaauaccu

SEQ ID NO: 1826695 - RNA, 19 nt, Artificial Sequence
  Description of Artificial Sequence: Synthetic oligonucleotide
uuagacaccaaauggaaag

SEQ ID NO: 1826696 - RNA, 19 nt, Artificial Sequence
  Description of Artificial Sequence: Synthetic oligonucleotide
ucuuuaaauaacaauugug

SEQ ID NO: 1826697 - RNA, 19 nt, Artificial Sequence
  Description of Artificial Sequence: Synthetic oligonucleotide
aagagcaaaguuaagacuc

SEQ ID NO: 1826698 - RNA, 19 nt, Artificial Sequence
  Description of Artificial Sequence: Synthetic oligonucleotide
uuuacuauuuuauuuaaaa

SEQ ID NO: 1826699 - RNA, 19 nt, Artificial Sequence
  Description of Artificial Sequence: Synthetic oligonucleotide
ucaugcaauacauacuugg

SEQ ID NO: 1826700 - RNA, 19 nt, Artificial Sequence
  Description of Artificial Sequence: Synthetic oligonucleotide
uucacuauagggcugguag

SEQ ID NO: 1826701 - RNA, 19 nt, Artificial Sequence
  Description of Artificial Sequence: Synthetic oligonucleotide
aaagguacuuuagaagucc

SEQ ID NO: 1826702 - RNA, 19 nt, Artificial Sequence
  Description of Artificial Sequence: Synthetic oligonucleotide
agguuuggcacuuuuauac

SEQ ID NO: 1826703 - RNA, 19 nt, Artificial Sequence
  Description of Artificial Sequence: Synthetic oligonucleotide
aaacuuagaugacuuuccc

SEQ ID NO: 1826704 - RNA, 19 nt, Artificial Sequence
  Description of Artificial Sequence: Synthetic oligonucleotide
ucaguuuguugucagaucc

SEQ ID NO: 1826705 - RNA, 19 nt, Artificial Sequence
  Description of Artificial Sequence: Synthetic oligonucleotide
acuuuagaaguccaguuac

SEQ ID NO: 1826706 - RNA, 19 nt, Artificial Sequence
  Description of Artificial Sequence: Synthetic oligonucleotide
uaauagccaauauauagag

SEQ ID NO: 1826707 - RNA, 19 nt, Artificial Sequence
  Description of Artificial Sequence: Synthetic oligonucleotide
aaaauuuauuagcuaaagu

SEQ ID NO: 1826708 - RNA, 19 nt, Artificial Sequence
  Description of Artificial Sequence: Synthetic oligonucleotide
agauucauauucuuuacag

SEQ ID NO: 1826709 - RNA, 19 nt, Artificial Sequence
  Description of Artificial Sequence: Synthetic oligonucleotide
acauuuaucuaauguuucc

SEQ ID NO: 1826710 - RNA, 19 nt, Artificial Sequence
  Description of Artificial Sequence: Synthetic oligonucleotide
aaagcaacauugaacuucc

SEQ ID NO: 1826711 - RNA, 19 nt, Artificial Sequence
  Description of Artificial Sequence: Synthetic oligonucleotide
cucacuuuuagaaauacug

SEQ ID NO: 1826712 - RNA, 19 nt, Artificial Sequence
  Description of Artificial Sequence: Synthetic oligonucleotide
agaaagguacuuuagaagu

SEQ ID NO: 1826713 - RNA, 19 nt, Artificial Sequence
  Description of Artificial Sequence: Synthetic oligonucleotide
uuuaaauaacaauugugac

SEQ ID NO: 1826714 - RNA, 19 nt, Artificial Sequence
  Description of Artificial Sequence: Synthetic oligonucleotide
ucuacauggaauauuaaau

SEQ ID NO: 1826715 - RNA, 19 nt, Artificial Sequence
  Description of Artificial Sequence: Synthetic oligonucleotide
uacauggaauauuaaaucc

SEQ ID NO: 1826716 - RNA, 19 nt, Artificial Sequence
  Description of Artificial Sequence: Synthetic oligonucleotide
uuccauacugauuuuaugc

SEQ ID NO: 1826717 - RNA, 19 nt, Artificial Sequence
  Description of Artificial Sequence: Synthetic oligonucleotide
auccauacaaaacaucaac

SEQ ID NO: 1826718 - RNA, 19 nt, Artificial Sequence
  Description of Artificial Sequence: Synthetic oligonucleotide
uuagaaauacuguaauagc

SEQ ID NO: 1826719 - RNA, 19 nt, Artificial Sequence
  Description of Artificial Sequence: Synthetic oligonucleotide
uaauguuuccacaaauacc

SEQ ID NO: 1826720 - RNA, 19 nt, Artificial Sequence
  Description of Artificial Sequence: Synthetic oligonucleotide
auuuaucuaauguuuccac

SEQ ID NO: 1826721 - RNA, 19 nt, Artificial Sequence
  Description of Artificial Sequence: Synthetic oligonucleotide
uggaaagucucccugauga

SEQ ID NO: 1826722 - RNA, 19 nt, Artificial Sequence
  Description of Artificial Sequence: Synthetic oligonucleotide
uuuuaugcagcuucuauac

SEQ ID NO: 1826723 - RNA, 19 nt, Artificial Sequence
  Description of Artificial Sequence: Synthetic oligonucleotide
agacaaaauauaguguugc

SEQ ID NO: 1826724 - RNA, 19 nt, Artificial Sequence
  Description of Artificial Sequence: Synthetic oligonucleotide
ugcauaaugucuauaaauc

SEQ ID NO: 1826725 - RNA, 19 nt, Artificial Sequence
  Description of Artificial Sequence: Synthetic oligonucleotide
ugcaauuuagaaaagucaa

SEQ ID NO: 1826726 - RNA, 19 nt, Artificial Sequence
  Description of Artificial Sequence: Synthetic oligonucleotide
uauuagcuaaaguagauau

SEQ ID NO: 1826727 - RNA, 19 nt, Artificial Sequence
  Description of Artificial Sequence: Synthetic oligonucleotide
uaaacuuagaugacuuucc

SEQ ID NO: 1826728 - RNA, 19 nt, Artificial Sequence
  Description of Artificial Sequence: Synthetic oligonucleotide
uuacagcugauacagcacg

SEQ ID NO: 1826729 - RNA, 19 nt, Artificial Sequence
  Description of Artificial Sequence: Synthetic oligonucleotide
gaaauuacaaacauucuca

SEQ ID NO: 1826730 - RNA, 19 nt, Artificial Sequence
  Description of Artificial Sequence: Synthetic oligonucleotide
aauauuaaauccaguucac

SEQ ID NO: 1826731 - RNA, 19 nt, Artificial Sequence
  Description of Artificial Sequence: Synthetic oligonucleotide
uuuuauacugaugucacca

SEQ ID NO: 1826732 - RNA, 19 nt, Artificial Sequence
  Description of Artificial Sequence: Synthetic oligonucleotide
cuugacuuaaauccaagag

SEQ ID NO: 1826733 - RNA, 19 nt, Artificial Sequence
  Description of Artificial Sequence: Synthetic oligonucleotide
augaaccuugucuacaugg

SEQ ID NO: 1826734 - RNA, 19 nt, Artificial Sequence
  Description of Artificial Sequence: Synthetic oligonucleotide
acaauugugacaaacagca

SEQ ID NO: 1826735 - RNA, 19 nt, Artificial Sequence
  Description of Artificial Sequence: Synthetic oligonucleotide
aaaauauaguguugcauaa

SEQ ID NO: 1826736 - RNA, 19 nt, Artificial Sequence
  Description of Artificial Sequence: Synthetic oligonucleotide
ucgcuuagacaccaaaugg

SEQ ID NO: 1826737 - RNA, 19 nt, Artificial Sequence
  Description of Artificial Sequence: Synthetic oligonucleotide
auucucaucucgcuuagac

SEQ ID NO: 1826738 - RNA, 19 nt, Artificial Sequence
  Description of Artificial Sequence: Synthetic oligonucleotide
cuucuaggaaauuacaaac

SEQ ID NO: 1826739 - RNA, 19 nt, Artificial Sequence
  Description of Artificial Sequence: Synthetic oligonucleotide
aauuaauaauccuccuucu

SEQ ID NO: 1826740 - RNA, 19 nt, Artificial Sequence
  Description of Artificial Sequence: Synthetic oligonucleotide
cauaauuaaagaaacaucu

SEQ ID NO: 1826741 - RNA, 19 nt, Artificial Sequence
  Description of Artificial Sequence: Synthetic oligonucleotide
uuaaacuaaggaaaagguc

SEQ ID NO: 1826742 - RNA, 19 nt, Artificial Sequence
  Description of Artificial Sequence: Synthetic oligonucleotide
uauacugaugucaccaaug

SEQ ID NO: 1826743 - RNA, 19 nt, Artificial Sequence
  Description of Artificial Sequence: Synthetic oligonucleotide
uagaaguccaguuaccuug

SEQ ID NO: 1826744 - RNA, 19 nt, Artificial Sequence
  Description of Artificial Sequence: Synthetic oligonucleotide
aauuagaucuaaaaugcca

SEQ ID NO: 1826745 - RNA, 19 nt, Artificial Sequence
  Description of Artificial Sequence: Synthetic oligonucleotide
ucauauucuuuacagcuga

SEQ ID NO: 1826746 - RNA, 19 nt, Artificial Sequence
  Description of Artificial Sequence: Synthetic oligonucleotide
uuaaagaaacaucucacuu

SEQ ID NO: 1826747 - RNA, 19 nt, Artificial Sequence
  Description of Artificial Sequence: Synthetic oligonucleotide
caauuaauaauccuccuuc

SEQ ID NO: 1826748 - RNA, 19 nt, Artificial Sequence
  Description of Artificial Sequence: Synthetic oligonucleotide
uccauacaaaacaucaaca

SEQ ID NO: 1826749 - RNA, 19 nt, Artificial Sequence
  Description of Artificial Sequence: Synthetic oligonucleotide
aaaucacugagcaagaaaa

SEQ ID NO: 1826750 - RNA, 19 nt, Artificial Sequence
  Description of Artificial Sequence: Synthetic oligonucleotide
auuaaagaaacaucucacu

SEQ ID NO: 1826751 - RNA, 19 nt, Artificial Sequence
  Description of Artificial Sequence: Synthetic oligonucleotide
uauaguguugcauaauguc

SEQ ID NO: 1826752 - RNA, 19 nt, Artificial Sequence
  Description of Artificial Sequence: Synthetic oligonucleotide
aaaugccaaguucacuuuc

SEQ ID NO: 1826753 - RNA, 19 nt, Artificial Sequence
  Description of Artificial Sequence: Synthetic oligonucleotide
ugcaugguaaacuuagaug

SEQ ID NO: 1826754 - RNA, 19 nt, Artificial Sequence
  Description of Artificial Sequence: Synthetic oligonucleotide
cuccaauuaauaauccucc

SEQ ID NO: 1826755 - RNA, 19 nt, Artificial Sequence
  Description of Artificial Sequence: Synthetic oligonucleotide
uacaaacauucucaucucg

SEQ ID NO: 1826756 - RNA, 19 nt, Artificial Sequence
  Description of Artificial Sequence: Synthetic oligonucleotide
auuucuugggaucucagga

SEQ ID NO: 1826757 - RNA, 19 nt, Artificial Sequence
  Description of Artificial Sequence: Synthetic oligonucleotide
cauggaauauuaaauccag

SEQ ID NO: 1826758 - RNA, 19 nt, Artificial Sequence
  Description of Artificial Sequence: Synthetic oligonucleotide
uuaucuaauguuuccacaa

SEQ ID NO: 1826759 - RNA, 19 nt, Artificial Sequence
  Description of Artificial Sequence: Synthetic oligonucleotide
agcuaaaguagauaucaag

SEQ ID NO: 1826760 - RNA, 19 nt, Artificial Sequence
  Description of Artificial Sequence: Synthetic oligonucleotide
aaaaucacugagcaagaaa

SEQ ID NO: 1826761 - RNA, 19 nt, Artificial Sequence
  Description of Artificial Sequence: Synthetic oligonucleotide
uuuauuagcuaaaguagau

SEQ ID NO: 1826762 - RNA, 19 nt, Artificial Sequence
  Description of Artificial Sequence: Synthetic oligonucleotide
aacuagagaaugcugcacu

SEQ ID NO: 1826763 - RNA, 19 nt, Artificial Sequence
  Description of Artificial Sequence: Synthetic oligonucleotide
auaggaaugcaauuuagaa

SEQ ID NO: 1826764 - RNA, 19 nt, Artificial Sequence
  Description of Artificial Sequence: Synthetic oligonucleotide
uggaauauuaaauccaguu

SEQ ID NO: 1826765 - RNA, 19 nt, Artificial Sequence
  Description of Artificial Sequence: Synthetic oligonucleotide
uuuaucuaauguuuccaca

SEQ ID NO: 1826766 - RNA, 19 nt, Artificial Sequence
  Description of Artificial Sequence: Synthetic oligonucleotide
aaauuacaaacauucucau

SEQ ID NO: 1826767 - RNA, 19 nt, Artificial Sequence
  Description of Artificial Sequence: Synthetic oligonucleotide
ugggaucucaggaagauuc

SEQ ID NO: 1826768 - RNA, 19 nt, Artificial Sequence
  Description of Artificial Sequence: Synthetic oligonucleotide
aauuuguguaacaaucuca

SEQ ID NO: 1826769 - RNA, 19 nt, Artificial Sequence
  Description of Artificial Sequence: Synthetic oligonucleotide
uuagaucuaaaaugccaag

SEQ ID NO: 1826770 - RNA, 19 nt, Artificial Sequence
  Description of Artificial Sequence: Synthetic oligonucleotide
acuuuuauacugaugucac

SEQ ID NO: 1826771 - RNA, 19 nt, Artificial Sequence
  Description of Artificial Sequence: Synthetic oligonucleotide
guguaucuucacuauaggg

SEQ ID NO: 1826772 - RNA, 19 nt, Artificial Sequence
  Description of Artificial Sequence: Synthetic oligonucleotide
uugugcaucaauuugugua

SEQ ID NO: 1826773 - RNA, 19 nt, Artificial Sequence
  Description of Artificial Sequence: Synthetic oligonucleotide
auauuaugaaccuugucua

SEQ ID NO: 1826774 - RNA, 19 nt, Artificial Sequence
  Description of Artificial Sequence: Synthetic oligonucleotide
uaaagaaacaucucacuuu

SEQ ID NO: 1826775 - RNA, 19 nt, Artificial Sequence
  Description of Artificial Sequence: Synthetic oligonucleotide
cuugugauccauacaaaac

SEQ ID NO: 1826776 - RNA, 19 nt, Artificial Sequence
  Description of Artificial Sequence: Synthetic oligonucleotide
uguuaauauuucuugggau

SEQ ID NO: 1826777 - RNA, 19 nt, Artificial Sequence
  Description of Artificial Sequence: Synthetic oligonucleotide
auaauuaaagaaacaucuc

SEQ ID NO: 1826778 - RNA, 19 nt, Artificial Sequence
  Description of Artificial Sequence: Synthetic oligonucleotide
ucuaauguuuccacaaaua

SEQ ID NO: 1826779 - RNA, 19 nt, Artificial Sequence
  Description of Artificial Sequence: Synthetic oligonucleotide
uccauacugauuuuaugca

SEQ ID NO: 1826780 - RNA, 19 nt, Artificial Sequence
  Description of Artificial Sequence: Synthetic oligonucleotide
uguugagucagaagguugu

SEQ ID NO: 1826781 - RNA, 19 nt, Artificial Sequence
  Description of Artificial Sequence: Synthetic oligonucleotide
aaacauuuaucuaauguuu

SEQ ID NO: 1826782 - RNA, 19 nt, Artificial Sequence
  Description of Artificial Sequence: Synthetic oligonucleotide
uucuugggaucucaggaag

SEQ ID NO: 1826783 - RNA, 19 nt, Artificial Sequence
  Description of Artificial Sequence: Synthetic oligonucleotide
gaucuaaaaugccaaguuc

SEQ ID NO: 1826784 - RNA, 19 nt, Artificial Sequence
  Description of Artificial Sequence: Synthetic oligonucleotide
uccacaaauaccugaauua

SEQ ID NO: 1826785 - RNA, 19 nt, Artificial Sequence
  Description of Artificial Sequence: Synthetic oligonucleotide
auguuaauauuucuuggga

SEQ ID NO: 1826786 - RNA, 19 nt, Artificial Sequence
  Description of Artificial Sequence: Synthetic oligonucleotide
aacauucucaucucgcuua

SEQ ID NO: 1826787 - RNA, 19 nt, Artificial Sequence
  Description of Artificial Sequence: Synthetic oligonucleotide
uaggaaugcaauuuagaaa

SEQ ID NO: 1826788 - RNA, 19 nt, Artificial Sequence
  Description of Artificial Sequence: Synthetic oligonucleotide
uugucuacauggaauauua

SEQ ID NO: 1826789 - RNA, 19 nt, Artificial Sequence
  Description of Artificial Sequence: Synthetic oligonucleotide
aacuuagaugacuuucccu

SEQ ID NO: 1826790 - RNA, 19 nt, Artificial Sequence
  Description of Artificial Sequence: Synthetic oligonucleotide
uauaaaucaguuuguuguc

SEQ ID NO: 1826791 - RNA, 19 nt, Artificial Sequence
  Description of Artificial Sequence: Synthetic oligonucleotide
uguuuccacaaauaccuga

SEQ ID NO: 1826792 - RNA, 19 nt, Artificial Sequence
  Description of Artificial Sequence: Synthetic oligonucleotide
uaauccuccuucuaggaaa

SEQ ID NO: 1826793 - RNA, 19 nt, Artificial Sequence
  Description of Artificial Sequence: Synthetic oligonucleotide
aaacaucaacauuuugggu

SEQ ID NO: 1826794 - RNA, 19 nt, Artificial Sequence
  Description of Artificial Sequence: Synthetic oligonucleotide
uuuuggguuguacauaauu

SEQ ID NO: 1826795 - RNA, 19 nt, Artificial Sequence
  Description of Artificial Sequence: Synthetic oligonucleotide
aacaucucacuuuuagaaa

SEQ ID NO: 1826796 - RNA, 19 nt, Artificial Sequence
  Description of Artificial Sequence: Synthetic oligonucleotide
gcugguagaacuuggagag

SEQ ID NO: 1826797 - RNA, 19 nt, Artificial Sequence
  Description of Artificial Sequence: Synthetic oligonucleotide
ugugcaucaauuuguguaa

SEQ ID NO: 1826798 - RNA, 19 nt, Artificial Sequence
  Description of Artificial Sequence: Synthetic oligonucleotide
ggaaauuacaaacauucuc

SEQ ID NO: 1826799 - RNA, 19 nt, Artificial Sequence
  Description of Artificial Sequence: Synthetic oligonucleotide
aauauuucuugggaucuca

SEQ ID NO: 1826800 - RNA, 19 nt, Artificial Sequence
  Description of Artificial Sequence: Synthetic oligonucleotide
acaucucacuuuuagaaau

SEQ ID NO: 1826801 - RNA, 19 nt, Artificial Sequence
  Description of Artificial Sequence: Synthetic oligonucleotide
cuuuacagcugauacagca

SEQ ID NO: 1826802 - RNA, 19 nt, Artificial Sequence
  Description of Artificial Sequence: Synthetic oligonucleotide
uagagaaugcugcacuugu

SEQ ID NO: 1826803 - RNA, 19 nt, Artificial Sequence
  Description of Artificial Sequence: Synthetic oligonucleotide
caaaauauaguguugcaua

SEQ ID NO: 1826804 - RNA, 19 nt, Artificial Sequence
  Description of Artificial Sequence: Synthetic oligonucleotide
aaguccaguuaccuuggag

SEQ ID NO: 1826805 - RNA, 19 nt, Artificial Sequence
  Description of Artificial Sequence: Synthetic oligonucleotide
aaaagagggcagguuuggc

SEQ ID NO: 1826806 - RNA, 19 nt, Artificial Sequence
  Description of Artificial Sequence: Synthetic oligonucleotide
ugucuauaaaucaguuugu

SEQ ID NO: 1826807 - RNA, 19 nt, Artificial Sequence
  Description of Artificial Sequence: Synthetic oligonucleotide
uuggguuguacauaauuaa

SEQ ID NO: 1826808 - RNA, 19 nt, Artificial Sequence
  Description of Artificial Sequence: Synthetic oligonucleotide
uuuacuuuguugagucaga

SEQ ID NO: 1826809 - RNA, 19 nt, Artificial Sequence
  Description of Artificial Sequence: Synthetic oligonucleotide
aucucaggaagauucauau

SEQ ID NO: 1826810 - RNA, 19 nt, Artificial Sequence
  Description of Artificial Sequence: Synthetic oligonucleotide
auuuauuagcuaaaguaga

SEQ ID NO: 1826811 - RNA, 19 nt, Artificial Sequence
  Description of Artificial Sequence: Synthetic oligonucleotide
agaaauacuguaauagcca

SEQ ID NO: 1826812 - RNA, 19 nt, Artificial Sequence
  Description of Artificial Sequence: Synthetic oligonucleotide
uucuauacaguaccuugac

SEQ ID NO: 1826813 - RNA, 19 nt, Artificial Sequence
  Description of Artificial Sequence: Synthetic oligonucleotide
uuguugagucagaagguug

SEQ ID NO: 1826814 - RNA, 19 nt, Artificial Sequence
  Description of Artificial Sequence: Synthetic oligonucleotide
aaggucauguuuucaugca

SEQ ID NO: 1826815 - RNA, 19 nt, Artificial Sequence
  Description of Artificial Sequence: Synthetic oligonucleotide
ugagucagaagguuguaaa

SEQ ID NO: 1826816 - RNA, 19 nt, Artificial Sequence
  Description of Artificial Sequence: Synthetic oligonucleotide
uauuaugaaccuugucuac

SEQ ID NO: 1826817 - RNA, 19 nt, Artificial Sequence
  Description of Artificial Sequence: Synthetic oligonucleotide
agaggcaugccuuuaugug

SEQ ID NO: 1826818 - RNA, 19 nt, Artificial Sequence
  Description of Artificial Sequence: Synthetic oligonucleotide
cuugguucuuuaaauaaca

SEQ ID NO: 1826819 - RNA, 19 nt, Artificial Sequence
  Description of Artificial Sequence: Synthetic oligonucleotide
uaaaagagggcagguuugg

SEQ ID NO: 1826820 - RNA, 19 nt, Artificial Sequence
  Description of Artificial Sequence: Synthetic oligonucleotide
uuaccuuggaguuuauuua

SEQ ID NO: 1826821 - RNA, 19 nt, Artificial Sequence
  Description of Artificial Sequence: Synthetic oligonucleotide
agaucuaaaaugccaaguu

SEQ ID NO: 1826822 - RNA, 19 nt, Artificial Sequence
  Description of Artificial Sequence: Synthetic oligonucleotide
aacauugaacuuccauacu

SEQ ID NO: 1826823 - RNA, 19 nt, Artificial Sequence
  Description of Artificial Sequence: Synthetic oligonucleotide
agcaaaguuaagacucucc

SEQ ID NO: 1826824 - RNA, 19 nt, Artificial Sequence
  Description of Artificial Sequence: Synthetic oligonucleotide
ucaaaacauuuaucuaaug

SEQ ID NO: 1826825 - RNA, 19 nt, Artificial Sequence
  Description of Artificial Sequence: Synthetic oligonucleotide
acuaaggaaaaggucaugu

SEQ ID NO: 1826826 - RNA, 19 nt, Artificial Sequence
  Description of Artificial Sequence: Synthetic oligonucleotide
uccuucuaggaaauuacaa

SEQ ID NO: 1826827 - RNA, 19 nt, Artificial Sequence
  Description of Artificial Sequence: Synthetic oligonucleotide
gaaauacuguaauagccaa

SEQ ID NO: 1826828 - RNA, 19 nt, Artificial Sequence
  Description of Artificial Sequence: Synthetic oligonucleotide
uacagcugauacagcacgg

SEQ ID NO: 1826829 - RNA, 19 nt, Artificial Sequence
  Description of Artificial Sequence: Synthetic oligonucleotide
gaauuagaucuaaaaugcc

SEQ ID NO: 1826830 - RNA, 19 nt, Artificial Sequence
  Description of Artificial Sequence: Synthetic oligonucleotide
uacuuuagaaguccaguua

SEQ ID NO: 1826831 - RNA, 19 nt, Artificial Sequence
  Description of Artificial Sequence: Synthetic oligonucleotide
uugaucauggcugggccgg

SEQ ID NO: 1826832 - RNA, 19 nt, Artificial Sequence
  Description of Artificial Sequence: Synthetic oligonucleotide
acuugugauccauacaaaa

SEQ ID NO: 1826833 - RNA, 19 nt, Artificial Sequence
  Description of Artificial Sequence: Synthetic oligonucleotide
auaacaauugugacaaaca

SEQ ID NO: 1826834 - RNA, 19 nt, Artificial Sequence
  Description of Artificial Sequence: Synthetic oligonucleotide
uaguguugcauaaugucua

SEQ ID NO: 1826835 - RNA, 19 nt, Artificial Sequence
  Description of Artificial Sequence: Synthetic oligonucleotide
ucuauacaguaccuugacu

SEQ ID NO: 1826836 - RNA, 19 nt, Artificial Sequence
  Description of Artificial Sequence: Synthetic oligonucleotide
uaaugucuauaaaucaguu

SEQ ID NO: 1826837 - RNA, 19 nt, Artificial Sequence
  Description of Artificial Sequence: Synthetic oligonucleotide
guaaacuuagaugacuuuc

SEQ ID NO: 1826838 - RNA, 19 nt, Artificial Sequence
  Description of Artificial Sequence: Synthetic oligonucleotide
cucgcuuagacaccaaaug

SEQ ID NO: 1826839 - RNA, 19 nt, Artificial Sequence
  Description of Artificial Sequence: Synthetic oligonucleotide
aguagauaucaagcaaaac

SEQ ID NO: 1826840 - RNA, 19 nt, Artificial Sequence
  Description of Artificial Sequence: Synthetic oligonucleotide
ugaugauuugcuguugugu

SEQ ID NO: 1826841 - RNA, 19 nt, Artificial Sequence
  Description of Artificial Sequence: Synthetic oligonucleotide
uaugcagcuucuauacagu

SEQ ID NO: 1826842 - RNA, 19 nt, Artificial Sequence
  Description of Artificial Sequence: Synthetic oligonucleotide
uggguuguacauaauuaaa

SEQ ID NO: 1826843 - RNA, 19 nt, Artificial Sequence
  Description of Artificial Sequence: Synthetic oligonucleotide
uagaucuaaaaugccaagu

SEQ ID NO: 1826844 - RNA, 19 nt, Artificial Sequence
  Description of Artificial Sequence: Synthetic oligonucleotide
uuuaugcagcuucuauaca

SEQ ID NO: 1826845 - RNA, 19 nt, Artificial Sequence
  Description of Artificial Sequence: Synthetic oligonucleotide
aacagcagaaagaacuaga

SEQ ID NO: 1826846 - RNA, 19 nt, Artificial Sequence
  Description of Artificial Sequence: Synthetic oligonucleotide
auuagaucuaaaaugccaa

SEQ ID NO: 1826847 - RNA, 19 nt, Artificial Sequence
  Description of Artificial Sequence: Synthetic oligonucleotide
ugguaaacuuagaugacuu

SEQ ID NO: 1826848 - RNA, 19 nt, Artificial Sequence
  Description of Artificial Sequence: Synthetic oligonucleotide
uauuuaaaagagggcaggu

SEQ ID NO: 1826849 - RNA, 19 nt, Artificial Sequence
  Description of Artificial Sequence: Synthetic oligonucleotide
auuagcuaaaguagauauc

SEQ ID NO: 1826850 - RNA, 19 nt, Artificial Sequence
  Description of Artificial Sequence: Synthetic oligonucleotide
uaucuaauguuuccacaaa

SEQ ID NO: 1826851 - RNA, 19 nt, Artificial Sequence
  Description of Artificial Sequence: Synthetic oligonucleotide
auacagcacgggcuggagc

SEQ ID NO: 1826852 - RNA, 19 nt, Artificial Sequence
  Description of Artificial Sequence: Synthetic oligonucleotide
uuaugaaccuugucuacau

SEQ ID NO: 1826853 - RNA, 19 nt, Artificial Sequence
  Description of Artificial Sequence: Synthetic oligonucleotide
uuauacugaugucaccaau

SEQ ID NO: 1826854 - RNA, 19 nt, Artificial Sequence
  Description of Artificial Sequence: Synthetic oligonucleotide
acaccaaauggaaagucuc

SEQ ID NO: 1826855 - RNA, 19 nt, Artificial Sequence
  Description of Artificial Sequence: Synthetic oligonucleotide
uuuauacugaugucaccaa

SEQ ID NO: 1826856 - RNA, 19 nt, Artificial Sequence
  Description of Artificial Sequence: Synthetic oligonucleotide
cuugaucauggcugggccg

SEQ ID NO: 1826857 - RNA, 19 nt, Artificial Sequence
  Description of Artificial Sequence: Synthetic oligonucleotide
uauacaguaccuugacuua

SEQ ID NO: 1826858 - RNA, 19 nt, Artificial Sequence
  Description of Artificial Sequence: Synthetic oligonucleotide
ucucacuuuuagaaauacu

SEQ ID NO: 1826859 - RNA, 19 nt, Artificial Sequence
  Description of Artificial Sequence: Synthetic oligonucleotide
caauauauagaggcaugcc

SEQ ID NO: 1826860 - RNA, 19 nt, Artificial Sequence
  Description of Artificial Sequence: Synthetic oligonucleotide
uccaauuaauaauccuccu

SEQ ID NO: 1826861 - RNA, 19 nt, Artificial Sequence
  Description of Artificial Sequence: Synthetic oligonucleotide
uucaugcaauacauacuug

SEQ ID NO: 1826862 - RNA, 19 nt, Artificial Sequence
  Description of Artificial Sequence: Synthetic oligonucleotide
auuaauaauccuccuucua

SEQ ID NO: 1826863 - RNA, 19 nt, Artificial Sequence
  Description of Artificial Sequence: Synthetic oligonucleotide
ucauguuuucaugcaauac

SEQ ID NO: 1826864 - RNA, 19 nt, Artificial Sequence
  Description of Artificial Sequence: Synthetic oligonucleotide
auuuguguaacaaucucau

SEQ ID NO: 1826865 - RNA, 19 nt, Artificial Sequence
  Description of Artificial Sequence: Synthetic oligonucleotide
acugagcaagaaaagcaac

SEQ ID NO: 1826866 - RNA, 19 nt, Artificial Sequence
  Description of Artificial Sequence: Synthetic oligonucleotide
ggcacuuuuauacugaugu

SEQ ID NO: 1826867 - RNA, 19 nt, Artificial Sequence
  Description of Artificial Sequence: Synthetic oligonucleotide
uagggcugguagaacuugg

SEQ ID NO: 1826868 - RNA, 19 nt, Artificial Sequence
  Description of Artificial Sequence: Synthetic oligonucleotide
uucucaucucgcuuagaca

SEQ ID NO: 1826869 - RNA, 19 nt, Artificial Sequence
  Description of Artificial Sequence: Synthetic oligonucleotide
uaccuuggaguuuauuuaa

SEQ ID NO: 1826870 - RNA, 19 nt, Artificial Sequence
  Description of Artificial Sequence: Synthetic oligonucleotide
uagaggcaugccuuuaugu

SEQ ID NO: 1826871 - RNA, 19 nt, Artificial Sequence
  Description of Artificial Sequence: Synthetic oligonucleotide
uguuguguaucuucacuau

SEQ ID NO: 1826872 - RNA, 19 nt, Artificial Sequence
  Description of Artificial Sequence: Synthetic oligonucleotide
cuccaguuuauuuugugca

SEQ ID NO: 1826873 - RNA, 19 nt, Artificial Sequence
  Description of Artificial Sequence: Synthetic oligonucleotide
uccugcuaagccagccucg

SEQ ID NO: 1826874 - RNA, 19 nt, Artificial Sequence
  Description of Artificial Sequence: Synthetic oligonucleotide
uaugaaccuugucuacaug

SEQ ID NO: 1826875 - RNA, 19 nt, Artificial Sequence
  Description of Artificial Sequence: Synthetic oligonucleotide
uccuccaauuaauaauccu

SEQ ID NO: 1826876 - RNA, 19 nt, Artificial Sequence
  Description of Artificial Sequence: Synthetic oligonucleotide
cauaggaaugcaauuuaga

SEQ ID NO: 1826877 - RNA, 19 nt, Artificial Sequence
  Description of Artificial Sequence: Synthetic oligonucleotide
uauagaggcaugccuuuau

SEQ ID NO: 1826878 - RNA, 19 nt, Artificial Sequence
  Description of Artificial Sequence: Synthetic oligonucleotide
aaauauaguguugcauaau

SEQ ID NO: 1826879 - RNA, 19 nt, Artificial Sequence
  Description of Artificial Sequence: Synthetic oligonucleotide
ugcaucaauuuguguaaca

SEQ ID NO: 1826880 - RNA, 19 nt, Artificial Sequence
  Description of Artificial Sequence: Synthetic oligonucleotide
uuauuagcuaaaguagaua

SEQ ID NO: 1826881 - RNA, 19 nt, Artificial Sequence
  Description of Artificial Sequence: Synthetic oligonucleotide
uguugucagauccuccaau

SEQ ID NO: 1826882 - RNA, 19 nt, Artificial Sequence
  Description of Artificial Sequence: Synthetic oligonucleotide
uauauagaggcaugccuuu

SEQ ID NO: 1826883 - RNA, 19 nt, Artificial Sequence
  Description of Artificial Sequence: Synthetic oligonucleotide
ucuugggaucucaggaaga

SEQ ID NO: 1826884 - RNA, 19 nt, Artificial Sequence
  Description of Artificial Sequence: Synthetic oligonucleotide
cugagcaagaaaagcaaca

SEQ ID NO: 1826885 - RNA, 19 nt, Artificial Sequence
  Description of Artificial Sequence: Synthetic oligonucleotide
ucaacauuuuggguuguac

SEQ ID NO: 1826886 - RNA, 19 nt, Artificial Sequence
  Description of Artificial Sequence: Synthetic oligonucleotide
aaacuaaggaaaaggucau

SEQ ID NO: 1826887 - RNA, 19 nt, Artificial Sequence
  Description of Artificial Sequence: Synthetic oligonucleotide
gaaaaggucauguuuucau

SEQ ID NO: 1826888 - RNA, 19 nt, Artificial Sequence
  Description of Artificial Sequence: Synthetic oligonucleotide
auugugacaaacagcagaa

SEQ ID NO: 1826889 - RNA, 19 nt, Artificial Sequence
  Description of Artificial Sequence: Synthetic oligonucleotide
ggguuguacauaauuaaag

SEQ ID NO: 1826890 - RNA, 19 nt, Artificial Sequence
  Description of Artificial Sequence: Synthetic oligonucleotide
auacuugguucuuuaaaua

SEQ ID NO: 1826891 - RNA, 19 nt, Artificial Sequence
  Description of Artificial Sequence: Synthetic oligonucleotide
cacuuuuauacugauguca

SEQ ID NO: 1826892 - RNA, 19 nt, Artificial Sequence
  Description of Artificial Sequence: Synthetic oligonucleotide
cuauacaguaccuugacuu

SEQ ID NO: 1826893 - RNA, 19 nt, Artificial Sequence
  Description of Artificial Sequence: Synthetic oligonucleotide
uagaacuuggagagccgug

SEQ ID NO: 1826894 - RNA, 19 nt, Artificial Sequence
  Description of Artificial Sequence: Synthetic oligonucleotide
cauuuuggguuguacauaa

SEQ ID NO: 1826895 - RNA, 19 nt, Artificial Sequence
  Description of Artificial Sequence: Synthetic oligonucleotide
auccuccaauuaauaaucc

SEQ ID NO: 1826896 - RNA, 19 nt, Artificial Sequence
  Description of Artificial Sequence: Synthetic oligonucleotide
ugauuugcuguuguguauc

SEQ ID NO: 1826897 - RNA, 19 nt, Artificial Sequence
  Description of Artificial Sequence: Synthetic oligonucleotide
cauugaacuuccauacuga

SEQ ID NO: 1826898 - RNA, 19 nt, Artificial Sequence
  Description of Artificial Sequence: Synthetic oligonucleotide
auauaguguugcauaaugu

SEQ ID NO: 1826899 - RNA, 19 nt, Artificial Sequence
  Description of Artificial Sequence: Synthetic oligonucleotide
caccauuucugcaagaaua

SEQ ID NO: 1826900 - RNA, 19 nt, Artificial Sequence
  Description of Artificial Sequence: Synthetic oligonucleotide
uuagaaguccaguuaccuu

SEQ ID NO: 1826901 - RNA, 19 nt, Artificial Sequence
  Description of Artificial Sequence: Synthetic oligonucleotide
auauauagaggcaugccuu

SEQ ID NO: 1826902 - RNA, 19 nt, Artificial Sequence
  Description of Artificial Sequence: Synthetic oligonucleotide
gcauaaugucuauaaauca

SEQ ID NO: 1826903 - RNA, 19 nt, Artificial Sequence
  Description of Artificial Sequence: Synthetic oligonucleotide
augguaaacuuagaugacu

SEQ ID NO: 1826904 - RNA, 19 nt, Artificial Sequence
  Description of Artificial Sequence: Synthetic oligonucleotide
gaaagguacuuuagaaguc

SEQ ID NO: 1826905 - RNA, 19 nt, Artificial Sequence
  Description of Artificial Sequence: Synthetic oligonucleotide
acauucucaucucgcuuag

SEQ ID NO: 1826906 - RNA, 19 nt, Artificial Sequence
  Description of Artificial Sequence: Synthetic oligonucleotide
uaccuugacuuaaauccaa

SEQ ID NO: 1826907 - RNA, 19 nt, Artificial Sequence
  Description of Artificial Sequence: Synthetic oligonucleotide
cuggauuuaccugggagug

SEQ ID NO: 1826908 - RNA, 19 nt, Artificial Sequence
  Description of Artificial Sequence: Synthetic oligonucleotide
uucccgugguuguugaaga

SEQ ID NO: 1826909 - RNA, 19 nt, Artificial Sequence
  Description of Artificial Sequence: Synthetic oligonucleotide
uccaguuuauuuugugcau

SEQ ID NO: 1826910 - RNA, 19 nt, Artificial Sequence
  Description of Artificial Sequence: Synthetic oligonucleotide
gauuuuaugcagcuucuau

SEQ ID NO: 1826911 - RNA, 19 nt, Artificial Sequence
  Description of Artificial Sequence: Synthetic oligonucleotide
agaaugcugcacuugugau

SEQ ID NO: 1826912 - RNA, 19 nt, Artificial Sequence
  Description of Artificial Sequence: Synthetic oligonucleotide
aacuaaggaaaaggucaug

SEQ ID NO: 1826913 - RNA, 19 nt, Artificial Sequence
  Description of Artificial Sequence: Synthetic oligonucleotide
acuauagggcugguagaac

SEQ ID NO: 1826914 - RNA, 19 nt, Artificial Sequence
  Description of Artificial Sequence: Synthetic oligonucleotide
ccuccaauuaauaauccuc

SEQ ID NO: 1826915 - RNA, 19 nt, Artificial Sequence
  Description of Artificial Sequence: Synthetic oligonucleotide
ucggauuucuccaguuuau

SEQ ID NO: 1826916 - RNA, 19 nt, Artificial Sequence
  Description of Artificial Sequence: Synthetic oligonucleotide
auaucaagcaaaacagaaa

SEQ ID NO: 1826917 - RNA, 19 nt, Artificial Sequence
  Description of Artificial Sequence: Synthetic oligonucleotide
acagcugauacagcacggg

SEQ ID NO: 1826918 - RNA, 19 nt, Artificial Sequence
  Description of Artificial Sequence: Synthetic oligonucleotide
agaauauuaugaaccuugu

SEQ ID NO: 1826919 - RNA, 19 nt, Artificial Sequence
  Description of Artificial Sequence: Synthetic oligonucleotide
uacaguaccuugacuuaaa

SEQ ID NO: 1826920 - RNA, 19 nt, Artificial Sequence
  Description of Artificial Sequence: Synthetic oligonucleotide
uauagggcugguagaacuu

SEQ ID NO: 1826921 - RNA, 19 nt, Artificial Sequence
  Description of Artificial Sequence: Synthetic oligonucleotide
accuugucuacauggaaua

SEQ ID NO: 1826922 - RNA, 19 nt, Artificial Sequence
  Description of Artificial Sequence: Synthetic oligonucleotide
agauaucaagcaaaacaga

SEQ ID NO: 1826923 - RNA, 19 nt, Artificial Sequence
  Description of Artificial Sequence: Synthetic oligonucleotide
gaacuuggagagccguggc

SEQ ID NO: 1826924 - RNA, 19 nt, Artificial Sequence
  Description of Artificial Sequence: Synthetic oligonucleotide
uggauuuaccugggagugg

SEQ ID NO: 1826925 - RNA, 19 nt, Artificial Sequence
  Description of Artificial Sequence: Synthetic oligonucleotide
cugcacuugugauccauac

SEQ ID NO: 1826926 - RNA, 19 nt, Artificial Sequence
  Description of Artificial Sequence: Synthetic oligonucleotide
uuuccacaaauaccugaau

SEQ ID NO: 1826927 - RNA, 19 nt, Artificial Sequence
  Description of Artificial Sequence: Synthetic oligonucleotide
cacaaauaccugaauuaga

SEQ ID NO: 1826928 - RNA, 19 nt, Artificial Sequence
  Description of Artificial Sequence: Synthetic oligonucleotide
auacauacuugguucuuua

SEQ ID NO: 1826929 - RNA, 19 nt, Artificial Sequence
  Description of Artificial Sequence: Synthetic oligonucleotide
caauugugacaaacagcag

SEQ ID NO: 1826930 - RNA, 19 nt, Artificial Sequence
  Description of Artificial Sequence: Synthetic oligonucleotide
uaaaaucacugagcaagaa

SEQ ID NO: 1826931 - RNA, 19 nt, Artificial Sequence
  Description of Artificial Sequence: Synthetic oligonucleotide
cauacuugguucuuuaaau

SEQ ID NO: 1826932 - RNA, 19 nt, Artificial Sequence
  Description of Artificial Sequence: Synthetic oligonucleotide
augauuugcuguuguguau

SEQ ID NO: 1826933 - RNA, 19 nt, Artificial Sequence
  Description of Artificial Sequence: Synthetic oligonucleotide
gaacuagagaaugcugcac

SEQ ID NO: 1826934 - RNA, 19 nt, Artificial Sequence
  Description of Artificial Sequence: Synthetic oligonucleotide
uggcacuuuuauacugaug

SEQ ID NO: 1826935 - RNA, 19 nt, Artificial Sequence
  Description of Artificial Sequence: Synthetic oligonucleotide
ugucuacauggaauauuaa

SEQ ID NO: 1826936 - RNA, 19 nt, Artificial Sequence
  Description of Artificial Sequence: Synthetic oligonucleotide
guugcauaaugucuauaaa

SEQ ID NO: 1826937 - RNA, 19 nt, Artificial Sequence
  Description of Artificial Sequence: Synthetic oligonucleotide
uagacaccaaauggaaagu

SEQ ID NO: 1826938 - RNA, 19 nt, Artificial Sequence
  Description of Artificial Sequence: Synthetic oligonucleotide
gcugauacagcacgggcug

SEQ ID NO: 1826939 - RNA, 19 nt, Artificial Sequence
  Description of Artificial Sequence: Synthetic oligonucleotide
guacauaauuaaagaaaca

SEQ ID NO: 1826940 - RNA, 19 nt, Artificial Sequence
  Description of Artificial Sequence: Synthetic oligonucleotide
agccaauauauagaggcau

SEQ ID NO: 1826941 - RNA, 19 nt, Artificial Sequence
  Description of Artificial Sequence: Synthetic oligonucleotide
acuagagaaugcugcacuu

SEQ ID NO: 1826942 - RNA, 19 nt, Artificial Sequence
  Description of Artificial Sequence: Synthetic oligonucleotide
auuuaccugggaguggccu

SEQ ID NO: 1826943 - RNA, 19 nt, Artificial Sequence
  Description of Artificial Sequence: Synthetic oligonucleotide
aguguugcauaaugucuau

SEQ ID NO: 1826944 - RNA, 19 nt, Artificial Sequence
  Description of Artificial Sequence: Synthetic oligonucleotide
cagcugauacagcacgggc

SEQ ID NO: 1826945 - RNA, 19 nt, Artificial Sequence
  Description of Artificial Sequence: Synthetic oligonucleotide
cuagagaaugcugcacuug

SEQ ID NO: 1826946 - RNA, 19 nt, Artificial Sequence
  Description of Artificial Sequence: Synthetic oligonucleotide
auuuaaaagagggcagguu

SEQ ID NO: 1826947 - RNA, 19 nt, Artificial Sequence
  Description of Artificial Sequence: Synthetic oligonucleotide
cuuagacaccaaauggaaa

SEQ ID NO: 1826948 - RNA, 19 nt, Artificial Sequence
  Description of Artificial Sequence: Synthetic oligonucleotide
aggaaauuacaaacauucu

SEQ ID NO: 1826949 - RNA, 19 nt, Artificial Sequence
  Description of Artificial Sequence: Synthetic oligonucleotide
uugagucagaagguuguaa

SEQ ID NO: 1826950 - RNA, 19 nt, Artificial Sequence
  Description of Artificial Sequence: Synthetic oligonucleotide
ugggcauaggaaugcaauu

SEQ ID NO: 1826951 - RNA, 19 nt, Artificial Sequence
  Description of Artificial Sequence: Synthetic oligonucleotide
ggauuuaccugggaguggc

SEQ ID NO: 1826952 - RNA, 19 nt, Artificial Sequence
  Description of Artificial Sequence: Synthetic oligonucleotide
agaugacuuucccucugga

SEQ ID NO: 1826953 - RNA, 19 nt, Artificial Sequence
  Description of Artificial Sequence: Synthetic oligonucleotide
agcugauacagcacgggcu

SEQ ID NO: 1826954 - RNA, 19 nt, Artificial Sequence
  Description of Artificial Sequence: Synthetic oligonucleotide
uuggcacuuuuauacugau

SEQ ID NO: 1826955 - RNA, 19 nt, Artificial Sequence
  Description of Artificial Sequence: Synthetic oligonucleotide
aggucauguuuucaugcaa

SEQ ID NO: 1826956 - RNA, 19 nt, Artificial Sequence
  Description of Artificial Sequence: Synthetic oligonucleotide
cuauagggcugguagaacu

SEQ ID NO: 1826957 - RNA, 19 nt, Artificial Sequence
  Description of Artificial Sequence: Synthetic oligonucleotide
ugccuuuaugugggcauag

SEQ ID NO: 1826958 - RNA, 19 nt, Artificial Sequence
  Description of Artificial Sequence: Synthetic oligonucleotide
ccacaaauaccugaauuag

SEQ ID NO: 1826959 - RNA, 19 nt, Artificial Sequence
  Description of Artificial Sequence: Synthetic oligonucleotide
uaauauuucuugggaucuc

SEQ ID NO: 1826960 - RNA, 19 nt, Artificial Sequence
  Description of Artificial Sequence: Synthetic oligonucleotide
auauucuuuacagcugaua

SEQ ID NO: 1826961 - RNA, 19 nt, Artificial Sequence
  Description of Artificial Sequence: Synthetic oligonucleotide
auagggcugguagaacuug

SEQ ID NO: 1826962 - RNA, 19 nt, Artificial Sequence
  Description of Artificial Sequence: Synthetic oligonucleotide
cagauccuccaauuaauaa

SEQ ID NO: 1826963 - RNA, 19 nt, Artificial Sequence
  Description of Artificial Sequence: Synthetic oligonucleotide
ccuuggaguuuauuuaaac

SEQ ID NO: 1826964 - RNA, 19 nt, Artificial Sequence
  Description of Artificial Sequence: Synthetic oligonucleotide
gucaccaauguuaauauuu

SEQ ID NO: 1826965 - RNA, 19 nt, Artificial Sequence
  Description of Artificial Sequence: Synthetic oligonucleotide
cuuuguugagucagaaggu

SEQ ID NO: 1826966 - RNA, 19 nt, Artificial Sequence
  Description of Artificial Sequence: Synthetic oligonucleotide
guaccuugacuuaaaucca

SEQ ID NO: 1826967 - RNA, 19 nt, Artificial Sequence
  Description of Artificial Sequence: Synthetic oligonucleotide
gacaccaaauggaaagucu

SEQ ID NO: 1826968 - RNA, 19 nt, Artificial Sequence
  Description of Artificial Sequence: Synthetic oligonucleotide
ccuccuucuaggaaauuac

SEQ ID NO: 1826969 - RNA, 19 nt, Artificial Sequence
  Description of Artificial Sequence: Synthetic oligonucleotide
auggaauauuaaauccagu

SEQ ID NO: 1826970 - RNA, 19 nt, Artificial Sequence
  Description of Artificial Sequence: Synthetic oligonucleotide
gcauaggaaugcaauuuag

SEQ ID NO: 1826971 - RNA, 19 nt, Artificial Sequence
  Description of Artificial Sequence: Synthetic oligonucleotide
accuugacuuaaauccaag

SEQ ID NO: 1826972 - RNA, 19 nt, Artificial Sequence
  Description of Artificial Sequence: Synthetic oligonucleotide
ugauuuuaugcagcuucua

SEQ ID NO: 1826973 - RNA, 19 nt, Artificial Sequence
  Description of Artificial Sequence: Synthetic oligonucleotide
cuccuucuaggaaauuaca

SEQ ID NO: 1826974 - RNA, 19 nt, Artificial Sequence
  Description of Artificial Sequence: Synthetic oligonucleotide
cuccugcuaagccagccuc

SEQ ID NO: 1826975 - RNA, 19 nt, Artificial Sequence
  Description of Artificial Sequence: Synthetic oligonucleotide
uccgggagcuugcugccac

SEQ ID NO: 1826976 - RNA, 19 nt, Artificial Sequence
  Description of Artificial Sequence: Synthetic oligonucleotide
guuguguaucuucacuaua

SEQ ID NO: 1826977 - RNA, 19 nt, Artificial Sequence
  Description of Artificial Sequence: Synthetic oligonucleotide
ugucaccaauguuaauauu

SEQ ID NO: 1826978 - RNA, 19 nt, Artificial Sequence
  Description of Artificial Sequence: Synthetic oligonucleotide
gcaaaguuaagacucuccu

SEQ ID NO: 1826979 - RNA, 19 nt, Artificial Sequence
  Description of Artificial Sequence: Synthetic oligonucleotide
cagcagaaagaacuagaga

SEQ ID NO: 1826980 - RNA, 19 nt, Artificial Sequence
  Description of Artificial Sequence: Synthetic oligonucleotide
acauuuuggguuguacaua

SEQ ID NO: 1826981 - RNA, 19 nt, Artificial Sequence
  Description of Artificial Sequence: Synthetic oligonucleotide
guacuuuagaaguccaguu

SEQ ID NO: 1826982 - RNA, 19 nt, Artificial Sequence
  Description of Artificial Sequence: Synthetic oligonucleotide
gugauccauacaaaacauc

SEQ ID NO: 1826983 - RNA, 19 nt, Artificial Sequence
  Description of Artificial Sequence: Synthetic oligonucleotide
cuguaauagccaauauaua

SEQ ID NO: 1826984 - RNA, 19 nt, Artificial Sequence
  Description of Artificial Sequence: Synthetic oligonucleotide
gguagaacuuggagagccg

SEQ ID NO: 1826985 - RNA, 19 nt, Artificial Sequence
  Description of Artificial Sequence: Synthetic oligonucleotide
gggcugguagaacuuggag

SEQ ID NO: 1826986 - RNA, 19 nt, Artificial Sequence
  Description of Artificial Sequence: Synthetic oligonucleotide
gauuuaccugggaguggcc

SEQ ID NO: 1826987 - RNA, 19 nt, Artificial Sequence
  Description of Artificial Sequence: Synthetic oligonucleotide
ugaucauggcugggccggg

SEQ ID NO: 1826988 - RNA, 19 nt, Artificial Sequence
  Description of Artificial Sequence: Synthetic oligonucleotide
cugauuuuaugcagcuucu

SEQ ID NO: 1826989 - RNA, 19 nt, Artificial Sequence
  Description of Artificial Sequence: Synthetic oligonucleotide
gcaucaauuuguguaacaa

SEQ ID NO: 1826990 - RNA, 19 nt, Artificial Sequence
  Description of Artificial Sequence: Synthetic oligonucleotide
cugauacagcacgggcugg

SEQ ID NO: 1826991 - RNA, 19 nt, Artificial Sequence
  Description of Artificial Sequence: Synthetic oligonucleotide
cucccugaugauuugcugu

SEQ ID NO: 1826992 - RNA, 19 nt, Artificial Sequence
  Description of Artificial Sequence: Synthetic oligonucleotide
ggcauaggaaugcaauuua

SEQ ID NO: 1826993 - RNA, 19 nt, Artificial Sequence
  Description of Artificial Sequence: Synthetic oligonucleotide
gguacuuuagaaguccagu

SEQ ID NO: 1826994 - RNA, 19 nt, Artificial Sequence
  Description of Artificial Sequence: Synthetic oligonucleotide
caucucacuuuuagaaaua

SEQ ID NO: 1826995 - RNA, 19 nt, Artificial Sequence
  Description of Artificial Sequence: Synthetic oligonucleotide
gacuuaaauccaagagcaa

SEQ ID NO: 1826996 - RNA, 19 nt, Artificial Sequence
  Description of Artificial Sequence: Synthetic oligonucleotide
cacuauagggcugguagaa

SEQ ID NO: 1826997 - RNA, 19 nt, Artificial Sequence
  Description of Artificial Sequence: Synthetic oligonucleotide
cucgccuccgggagcuugc

SEQ ID NO: 1826998 - RNA, 19 nt, Artificial Sequence
  Description of Artificial Sequence: Synthetic oligonucleotide
acgggcuggagcuccugcu

SEQ ID NO: 1826999 - RNA, 19 nt, Artificial Sequence
  Description of Artificial Sequence: Synthetic oligonucleotide
agcuucuauacaguaccuu

SEQ ID NO: 1827000 - RNA, 19 nt, Artificial Sequence
  Description of Artificial Sequence: Synthetic oligonucleotide
uaagccagccucggauuuc

SEQ ID NO: 1827001 - RNA, 19 nt, Artificial Sequence
  Description of Artificial Sequence: Synthetic oligonucleotide
uccaguuaccuuggaguuu

SEQ ID NO: 1827002 - RNA, 19 nt, Artificial Sequence
  Description of Artificial Sequence: Synthetic oligonucleotide
gaaagucucccugaugauu

SEQ ID NO: 1827003 - RNA, 19 nt, Artificial Sequence
  Description of Artificial Sequence: Synthetic oligonucleotide
gaaguccaguuaccuugga

SEQ ID NO: 1827004 - RNA, 19 nt, Artificial Sequence
  Description of Artificial Sequence: Synthetic oligonucleotide
cuaaaaugccaaguucacu

SEQ ID NO: 1827005 - RNA, 19 nt, Artificial Sequence
  Description of Artificial Sequence: Synthetic oligonucleotide
gcaauacauacuugguucu

SEQ ID NO: 1827006 - RNA, 19 nt, Artificial Sequence
  Description of Artificial Sequence: Synthetic oligonucleotide
gugcaucaauuuguguaac

SEQ ID NO: 1827007 - RNA, 19 nt, Artificial Sequence
  Description of Artificial Sequence: Synthetic oligonucleotide
ccacacagaagacaaaaua

SEQ ID NO: 1827008 - RNA, 19 nt, Artificial Sequence
  Description of Artificial Sequence: Synthetic oligonucleotide
ccauacaaaacaucaacau

SEQ ID NO: 1827009 - RNA, 19 nt, Artificial Sequence
  Description of Artificial Sequence: Synthetic oligonucleotide
gaucauggcugggccgggc

SEQ ID NO: 1827010 - RNA, 19 nt, Artificial Sequence
  Description of Artificial Sequence: Synthetic oligonucleotide
caccaauguuaauauuucu

SEQ ID NO: 1827011 - RNA, 19 nt, Artificial Sequence
  Description of Artificial Sequence: Synthetic oligonucleotide
cagguuuggcacuuuuaua

SEQ ID NO: 1827012 - RNA, 19 nt, Artificial Sequence
  Description of Artificial Sequence: Synthetic oligonucleotide
caugccuuuaugugggcau

SEQ ID NO: 1827013 - RNA, 19 nt, Artificial Sequence
  Description of Artificial Sequence: Synthetic oligonucleotide
uggcuucccgugguuguug

SEQ ID NO: 1827014 - RNA, 19 nt, Artificial Sequence
  Description of Artificial Sequence: Synthetic oligonucleotide
ucccgugguuguugaagau

SEQ ID NO: 1827015 - RNA, 19 nt, Artificial Sequence
  Description of Artificial Sequence: Synthetic oligonucleotide
gaccgggugggcgcugggg

SEQ ID NO: 1827016 - RNA, 19 nt, Artificial Sequence
  Description of Artificial Sequence: Synthetic oligonucleotide
guagaacuuggagagccgu

SEQ ID NO: 1827017 - RNA, 19 nt, Artificial Sequence
  Description of Artificial Sequence: Synthetic oligonucleotide
ccaguuuauuuugugcauc

SEQ ID NO: 1827018 - RNA, 19 nt, Artificial Sequence
  Description of Artificial Sequence: Synthetic oligonucleotide
uugggaucucaggaagauu

SEQ ID NO: 1827019 - RNA, 19 nt, Artificial Sequence
  Description of Artificial Sequence: Synthetic oligonucleotide
cgcuuagacaccaaaugga

SEQ ID NO: 1827020 - RNA, 19 nt, Artificial Sequence
  Description of Artificial Sequence: Synthetic oligonucleotide
caucaccauuucugcaaga

SEQ ID NO: 1827021 - RNA, 19 nt, Artificial Sequence
  Description of Artificial Sequence: Synthetic oligonucleotide
gccuugaucauggcugggc

SEQ ID NO: 1827022 - RNA, 19 nt, Artificial Sequence
  Description of Artificial Sequence: Synthetic oligonucleotide
ggauuucuccaguuuauuu

SEQ ID NO: 1827023 - RNA, 19 nt, Artificial Sequence
  Description of Artificial Sequence: Synthetic oligonucleotide
gccuuuaugugggcauagg

SEQ ID NO: 1827024 - RNA, 19 nt, Artificial Sequence
  Description of Artificial Sequence: Synthetic oligonucleotide
gugggcauaggaaugcaau

SEQ ID NO: 1827025 - RNA, 19 nt, Artificial Sequence
  Description of Artificial Sequence: Synthetic oligonucleotide
gagccucgccuccgggagc

SEQ ID NO: 1827026 - RNA, 19 nt, Artificial Sequence
  Description of Artificial Sequence: Synthetic oligonucleotide
guguaacaaucucauucau

SEQ ID NO: 1827027 - RNA, 19 nt, Artificial Sequence
  Description of Artificial Sequence: Synthetic oligonucleotide
cuugucuacauggaauauu

SEQ ID NO: 1827028 - RNA, 19 nt, Artificial Sequence
  Description of Artificial Sequence: Synthetic oligonucleotide
gguaaacuuagaugacuuu

SEQ ID NO: 1827029 - RNA, 19 nt, Artificial Sequence
  Description of Artificial Sequence: Synthetic oligonucleotide
augccuuuaugugggcaua

SEQ ID NO: 1827030 - RNA, 19 nt, Artificial Sequence
  Description of Artificial Sequence: Synthetic oligonucleotide
guugagucagaagguugua

SEQ ID NO: 1827031 - RNA, 19 nt, Artificial Sequence
  Description of Artificial Sequence: Synthetic oligonucleotide
gggagcuugcugccacggc

SEQ ID NO: 1827032 - RNA, 19 nt, Artificial Sequence
  Description of Artificial Sequence: Synthetic oligonucleotide
ggucauguuuucaugcaau

SEQ ID NO: 1827033 - RNA, 19 nt, Artificial Sequence
  Description of Artificial Sequence: Synthetic oligonucleotide
cagcuucuauacaguaccu

SEQ ID NO: 1827034 - RNA, 19 nt, Artificial Sequence
  Description of Artificial Sequence: Synthetic oligonucleotide
ccaauuaauaauccuccuu

SEQ ID NO: 1827035 - RNA, 19 nt, Artificial Sequence
  Description of Artificial Sequence: Synthetic oligonucleotide
cuaagccagccucggauuu

SEQ ID NO: 1827036 - RNA, 19 nt, Artificial Sequence
  Description of Artificial Sequence: Synthetic oligonucleotide
ccuccgggagcuugcugcc

SEQ ID NO: 1827037 - RNA, 19 nt, Artificial Sequence
  Description of Artificial Sequence: Synthetic oligonucleotide
gggccgaccgggugggcgc

SEQ ID NO: 1827038 - RNA, 19 nt, Artificial Sequence
  Description of Artificial Sequence: Synthetic oligonucleotide
cauucucaucucgcuuaga

SEQ ID NO: 1827039 - RNA, 19 nt, Artificial Sequence
  Description of Artificial Sequence: Synthetic oligonucleotide
cugcuaagccagccucgga

SEQ ID NO: 1827040 - RNA, 19 nt, Artificial Sequence
  Description of Artificial Sequence: Synthetic oligonucleotide
gcuaagccagccucggauu

SEQ ID NO: 1827041 - RNA, 19 nt, Artificial Sequence
  Description of Artificial Sequence: Synthetic oligonucleotide
ccgggagcuugcugccacg

SEQ ID NO: 1827042 - RNA, 19 nt, Artificial Sequence
  Description of Artificial Sequence: Synthetic oligonucleotide
gcgagccucgccuccggga

SEQ ID NO: 1827043 - RNA, 19 nt, Artificial Sequence
  Description of Artificial Sequence: Synthetic oligonucleotide
gcugggccgggccgaccgg

SEQ ID NO: 1827044 - RNA, 19 nt, Artificial Sequence
  Description of Artificial Sequence: Synthetic oligonucleotide
gccgggccgaccggguggg

SEQ ID NO: 1827045 - RNA, 19 nt, Artificial Sequence
  Description of Artificial Sequence: Synthetic oligonucleotide
gcgcgagccucgccuccgg

SEQ ID NO: 1827046 - RNA, 19 nt, Artificial Sequence
  Description of Artificial Sequence: Synthetic oligonucleotide
gcugcacuugugauccaua

SEQ ID NO: 1827047 - RNA, 19 nt, Artificial Sequence
  Description of Artificial Sequence: Synthetic oligonucleotide
ggcgcgcgagccucgccuc

SEQ ID NO: 1827048 - RNA, 19 nt, Artificial Sequence
  Description of Artificial Sequence: Synthetic oligonucleotide
gggccgggccgaccgggug

SEQ ID NO: 1827049 - RNA, 19 nt, Artificial Sequence
  Description of Artificial Sequence: Synthetic oligonucleotide
cuccgggagcuugcugcca

SEQ ID NO: 1827050 - RNA, 19 nt, Artificial Sequence
  Description of Artificial Sequence: Synthetic oligonucleotide
gggcgcgcgagccucgccu

SEQ ID NO: 1827051 - RNA, 19 nt, Artificial Sequence
  Description of Artificial Sequence: Synthetic oligonucleotide
ccucuggauuuaccuggga

SEQ ID NO: 1827052 - RNA, 19 nt, Artificial Sequence
  Description of Artificial Sequence: Synthetic oligonucleotide
gcgcgcgagccucgccucc

SEQ ID NO: 1827053 - RNA, 19 nt, Artificial Sequence
  Description of Artificial Sequence: Synthetic oligonucleotide
ccucgccuccgggagcuug

SEQ ID NO: 1827054 - RNA, 19 nt, Artificial Sequence
  Description of Artificial Sequence: Synthetic oligonucleotide
ccgaccgggugggcgcugg

SEQ ID NO: 1827055 - RNA, 19 nt, Artificial Sequence
  Description of Artificial Sequence: Synthetic oligonucleotide
gccucggauuucuccaguu

SEQ ID NO: 1827056 - RNA, 19 nt, Artificial Sequence
  Description of Artificial Sequence: Synthetic oligonucleotide
cgggccgaccgggugggcg

SEQ ID NO: 1827057 - RNA, 19 nt, Artificial Sequence
  Description of Artificial Sequence: Synthetic oligonucleotide
ggcgggcgcgcgagccucg

SEQ ID NO: 1827058 - RNA, 19 nt, Artificial Sequence
  Description of Artificial Sequence: Synthetic oligonucleotide
cgcgagccucgccuccggg

SEQ ID NO: 1827059 - RNA, 19 nt, Artificial Sequence
  Description of Artificial Sequence: Synthetic oligonucleotide
guggcuucccgugguuguu

SEQ ID NO: 1827060 - RNA, 19 nt, Artificial Sequence
  Description of Artificial Sequence: Synthetic oligonucleotide
ccuugucuacauggaauau

SEQ ID NO: 1827061 - RNA, 19 nt, Artificial Sequence
  Description of Artificial Sequence: Synthetic oligonucleotide
cguggcuucccgugguugu

SEQ ID NO: 1827062 - RNA, 19 nt, Artificial Sequence
  Description of Artificial Sequence: Synthetic oligonucleotide
caguuaccuuggaguuuau

SEQ ID NO: 1827063 - RNA, 19 nt, Artificial Sequence
  Description of Artificial Sequence: Synthetic oligonucleotide
cgcgcgagccucgccuccg

SEQ ID NO: 1827064 - RNA, 19 nt, Artificial Sequence
  Description of Artificial Sequence: Synthetic oligonucleotide
ccauuucugcaagaauauu

SEQ ID NO: 1827065 - RNA, 19 nt, Artificial Sequence
  Description of Artificial Sequence: Synthetic oligonucleotide
cgaccgggugggcgcuggg

SEQ ID NO: 1827066 - RNA, 19 nt, Artificial Sequence
  Description of Artificial Sequence: Synthetic oligonucleotide
gcgggcgcgcgagccucgc

SEQ ID NO: 1827067 - RNA, 19 nt, Artificial Sequence
  Description of Artificial Sequence: Synthetic oligonucleotide
gccgaccgggugggcgcug

SEQ ID NO: 1827068 - RNA, 19 nt, Artificial Sequence
  Description of Artificial Sequence: Synthetic oligonucleotide
cgggcgcgcgagccucgcc

SEQ ID NO: 1827069 - RNA, 19 nt, Artificial Sequence
  Description of Artificial Sequence: Synthetic oligonucleotide
gccguggcuucccgugguu

SEQ ID NO: 1827070 - RNA, 19 nt, Artificial Sequence
  Description of Artificial Sequence: Synthetic oligonucleotide
ggccgaccgggugggcgcu

SEQ ID NO: 1827071 - RNA, 19 nt, Artificial Sequence
  Description of Artificial Sequence: Synthetic oligonucleotide
ccgggccgaccgggugggc

SEQ ID NO: 1827072 - RNA, 19 nt, Artificial Sequence
  Description of Artificial Sequence: Synthetic oligonucleotide
gccucgccuccgggagcuu

SEQ ID NO: 1827073 - RNA, 19 nt, Artificial Sequence
  Description of Artificial Sequence: Synthetic oligonucleotide
ugcaguauaagauagagcc

SEQ ID NO: 1827074 - RNA, 19 nt, Artificial Sequence
  Description of Artificial Sequence: Synthetic oligonucleotide
aauuuagucgaauuuuagc

SEQ ID NO: 1827075 - RNA, 19 nt, Artificial Sequence
  Description of Artificial Sequence: Synthetic oligonucleotide
uuacuuucaggucagaucg

SEQ ID NO: 1827076 - RNA, 19 nt, Artificial Sequence
  Description of Artificial Sequence: Synthetic oligonucleotide
aauuuuagcaacuuuggga

SEQ ID NO: 1827077 - RNA, 19 nt, Artificial Sequence
  Description of Artificial Sequence: Synthetic oligonucleotide
aaugcucuuuauuucaugg

SEQ ID NO: 1827078 - RNA, 19 nt, Artificial Sequence
  Description of Artificial Sequence: Synthetic oligonucleotide
aguacaauauggcuaacgc

SEQ ID NO: 1827079 - RNA, 19 nt, Artificial Sequence
  Description of Artificial Sequence: Synthetic oligonucleotide
uacaauauggcuaacgcug

SEQ ID NO: 1827080 - RNA, 19 nt, Artificial Sequence
  Description of Artificial Sequence: Synthetic oligonucleotide
uaauauuacuuucagguca

SEQ ID NO: 1827081 - RNA, 19 nt, Artificial Sequence
  Description of Artificial Sequence: Synthetic oligonucleotide
aacaucugacuguagauuc

SEQ ID NO: 1827082 - RNA, 19 nt, Artificial Sequence
  Description of Artificial Sequence: Synthetic oligonucleotide
acuuaggaugaauagaaac

SEQ ID NO: 1827083 - RNA, 19 nt, Artificial Sequence
  Description of Artificial Sequence: Synthetic oligonucleotide
ugaacuuagugauagguag

SEQ ID NO: 1827084 - RNA, 19 nt, Artificial Sequence
  Description of Artificial Sequence: Synthetic oligonucleotide
uguguuugaagacagaaaa

SEQ ID NO: 1827085 - RNA, 19 nt, Artificial Sequence
  Description of Artificial Sequence: Synthetic oligonucleotide
acuuaaaauuaucuagagc

SEQ ID NO: 1827086 - RNA, 19 nt, Artificial Sequence
  Description of Artificial Sequence: Synthetic oligonucleotide
aguacuauuaccauugccg

SEQ ID NO: 1827087 - RNA, 19 nt, Artificial Sequence
  Description of Artificial Sequence: Synthetic oligonucleotide
cuuaggaugaauagaaacc

SEQ ID NO: 1827088 - RNA, 19 nt, Artificial Sequence
  Description of Artificial Sequence: Synthetic oligonucleotide
aaugcagcaaaauacaguu

SEQ ID NO: 1827089 - RNA, 19 nt, Artificial Sequence
  Description of Artificial Sequence: Synthetic oligonucleotide
uauauuagcuuuuggaucu

SEQ ID NO: 1827090 - RNA, 19 nt, Artificial Sequence
  Description of Artificial Sequence: Synthetic oligonucleotide
gauucuaugcauccgacag

SEQ ID NO: 1827091 - RNA, 19 nt, Artificial Sequence
  Description of Artificial Sequence: Synthetic oligonucleotide
aacccuagaaaacaaacca

SEQ ID NO: 1827092 - RNA, 19 nt, Artificial Sequence
  Description of Artificial Sequence: Synthetic oligonucleotide
auuuacuuagucuggguac

SEQ ID NO: 1827093 - RNA, 19 nt, Artificial Sequence
  Description of Artificial Sequence: Synthetic oligonucleotide
uuuauauuagcuuuuggau

SEQ ID NO: 1827094 - RNA, 19 nt, Artificial Sequence
  Description of Artificial Sequence: Synthetic oligonucleotide
uguaucauaggacagucac

SEQ ID NO: 1827095 - RNA, 19 nt, Artificial Sequence
  Description of Artificial Sequence: Synthetic oligonucleotide
uuagcugagauuuacacau

SEQ ID NO: 1827096 - RNA, 19 nt, Artificial Sequence
  Description of Artificial Sequence: Synthetic oligonucleotide
aguuagcugagauuuacac

SEQ ID NO: 1827097 - RNA, 19 nt, Artificial Sequence
  Description of Artificial Sequence: Synthetic oligonucleotide
auuacuuucaggucagauc

SEQ ID NO: 1827098 - RNA, 19 nt, Artificial Sequence
  Description of Artificial Sequence: Synthetic oligonucleotide
uccaguacuauuaccauug

SEQ ID NO: 1827099 - RNA, 19 nt, Artificial Sequence
  Description of Artificial Sequence: Synthetic oligonucleotide
aggucaguuaauuaggaag

SEQ ID NO: 1827100 - RNA, 19 nt, Artificial Sequence
  Description of Artificial Sequence: Synthetic oligonucleotide
uacaguugcaauuaauuga

SEQ ID NO: 1827101 - RNA, 19 nt, Artificial Sequence
  Description of Artificial Sequence: Synthetic oligonucleotide
acaaacgcgagucugacug

SEQ ID NO: 1827102 - RNA, 19 nt, Artificial Sequence
  Description of Artificial Sequence: Synthetic oligonucleotide
cauaucugaaaccacgccg

SEQ ID NO: 1827103 - RNA, 19 nt, Artificial Sequence
  Description of Artificial Sequence: Synthetic oligonucleotide
aagauagagcccuguuucc

SEQ ID NO: 1827104 - RNA, 19 nt, Artificial Sequence
  Description of Artificial Sequence: Synthetic oligonucleotide
uuuacccaaauuuagucga

SEQ ID NO: 1827105 - RNA, 19 nt, Artificial Sequence
  Description of Artificial Sequence: Synthetic oligonucleotide
uuaucuagagcuuuuguuc

SEQ ID NO: 1827106 - RNA, 19 nt, Artificial Sequence
  Description of Artificial Sequence: Synthetic oligonucleotide
agguauauguaucauagga

SEQ ID NO: 1827107 - RNA, 19 nt, Artificial Sequence
  Description of Artificial Sequence: Synthetic oligonucleotide
aguaaguuggcaaaagaac

SEQ ID NO: 1827108 - RNA, 19 nt, Artificial Sequence
  Description of Artificial Sequence: Synthetic oligonucleotide
uaccaaugcagcaaaauac

SEQ ID NO: 1827109 - RNA, 19 nt, Artificial Sequence
  Description of Artificial Sequence: Synthetic oligonucleotide
uuauauuagcuuuuggauc

SEQ ID NO: 1827110 - RNA, 19 nt, Artificial Sequence
  Description of Artificial Sequence: Synthetic oligonucleotide
aaccacgccgcuuagcuuc

SEQ ID NO: 1827111 - RNA, 19 nt, Artificial Sequence
  Description of Artificial Sequence: Synthetic oligonucleotide
acuaagugaacuuagugau

SEQ ID NO: 1827112 - RNA, 19 nt, Artificial Sequence
  Description of Artificial Sequence: Synthetic oligonucleotide
aauuaggaagguauccuac

SEQ ID NO: 1827113 - RNA, 19 nt, Artificial Sequence
  Description of Artificial Sequence: Synthetic oligonucleotide
aauugacuuaaaauuaucu

SEQ ID NO: 1827114 - RNA, 19 nt, Artificial Sequence
  Description of Artificial Sequence: Synthetic oligonucleotide
aaauccagcuccaagaaga

SEQ ID NO: 1827115 - RNA, 19 nt, Artificial Sequence
  Description of Artificial Sequence: Synthetic oligonucleotide
guauauguaucauaggaca

SEQ ID NO: 1827116 - RNA, 19 nt, Artificial Sequence
  Description of Artificial Sequence: Synthetic oligonucleotide
aaugggcuuuauuauaaca

SEQ ID NO: 1827117 - RNA, 19 nt, Artificial Sequence
  Description of Artificial Sequence: Synthetic oligonucleotide
uuaggaugaauagaaacca

SEQ ID NO: 1827118 - RNA, 19 nt, Artificial Sequence
  Description of Artificial Sequence: Synthetic oligonucleotide
cuacgcauguacuuaaugc

SEQ ID NO: 1827119 - RNA, 19 nt, Artificial Sequence
  Description of Artificial Sequence: Synthetic oligonucleotide
aaaguagcaacuaagugaa

SEQ ID NO: 1827120 - RNA, 19 nt, Artificial Sequence
  Description of Artificial Sequence: Synthetic oligonucleotide
auacaguugcaauuaauug

SEQ ID NO: 1827121 - RNA, 19 nt, Artificial Sequence
  Description of Artificial Sequence: Synthetic oligonucleotide
auuaggaagguauccuacg

SEQ ID NO: 1827122 - RNA, 19 nt, Artificial Sequence
  Description of Artificial Sequence: Synthetic oligonucleotide
aauaaugggcuuuauuaua

SEQ ID NO: 1827123 - RNA, 19 nt, Artificial Sequence
  Description of Artificial Sequence: Synthetic oligonucleotide
ugugcgguccuuuacacgc

SEQ ID NO: 1827124 - RNA, 19 nt, Artificial Sequence
  Description of Artificial Sequence: Synthetic oligonucleotide
auuaccauugccgcaagac

SEQ ID NO: 1827125 - RNA, 19 nt, Artificial Sequence
  Description of Artificial Sequence: Synthetic oligonucleotide
uccuuuacacgcauuagca

SEQ ID NO: 1827126 - RNA, 19 nt, Artificial Sequence
  Description of Artificial Sequence: Synthetic oligonucleotide
acaguugcaauuaauugac

SEQ ID NO: 1827127 - RNA, 19 nt, Artificial Sequence
  Description of Artificial Sequence: Synthetic oligonucleotide
agcuuuuggaucuuuagga

SEQ ID NO: 1827128 - RNA, 19 nt, Artificial Sequence
  Description of Artificial Sequence: Synthetic oligonucleotide
cuuuacacgcauuagcaug

SEQ ID NO: 1827129 - RNA, 19 nt, Artificial Sequence
  Description of Artificial Sequence: Synthetic oligonucleotide
uaucuagagcuuuuguucc

SEQ ID NO: 1827130 - RNA, 19 nt, Artificial Sequence
  Description of Artificial Sequence: Synthetic oligonucleotide
uaugcauccgacaguagug

SEQ ID NO: 1827131 - RNA, 19 nt, Artificial Sequence
  Description of Artificial Sequence: Synthetic oligonucleotide
auaucugaaaccacgccgc

SEQ ID NO: 1827132 - RNA, 19 nt, Artificial Sequence
  Description of Artificial Sequence: Synthetic oligonucleotide
uucauaucugaaaccacgc

SEQ ID NO: 1827133 - RNA, 19 nt, Artificial Sequence
  Description of Artificial Sequence: Synthetic oligonucleotide
aauauuacuuucaggucag

SEQ ID NO: 1827134 - RNA, 19 nt, Artificial Sequence
  Description of Artificial Sequence: Synthetic oligonucleotide
auaauggucauuaaaacau

SEQ ID NO: 1827135 - RNA, 19 nt, Artificial Sequence
  Description of Artificial Sequence: Synthetic oligonucleotide
aguugcuacauugugcuac

SEQ ID NO: 1827136 - RNA, 19 nt, Artificial Sequence
  Description of Artificial Sequence: Synthetic oligonucleotide
aauauggcuaacgcuggac

SEQ ID NO: 1827137 - RNA, 19 nt, Artificial Sequence
  Description of Artificial Sequence: Synthetic oligonucleotide
cauugacagacuuaggaug

SEQ ID NO: 1827138 - RNA, 19 nt, Artificial Sequence
  Description of Artificial Sequence: Synthetic oligonucleotide
uaaguuggcaaaagaacac

SEQ ID NO: 1827139 - RNA, 19 nt, Artificial Sequence
  Description of Artificial Sequence: Synthetic oligonucleotide
uuuacacgcauuagcaugu

SEQ ID NO: 1827140 - RNA, 19 nt, Artificial Sequence
  Description of Artificial Sequence: Synthetic oligonucleotide
aauacaguugcaauuaauu

SEQ ID NO: 1827141 - RNA, 19 nt, Artificial Sequence
  Description of Artificial Sequence: Synthetic oligonucleotide
cauguuaugcagcaucugc

SEQ ID NO: 1827142 - RNA, 19 nt, Artificial Sequence
  Description of Artificial Sequence: Synthetic oligonucleotide
ugcucuuuauuucauggac

SEQ ID NO: 1827143 - RNA, 19 nt, Artificial Sequence
  Description of Artificial Sequence: Synthetic oligonucleotide
uuagucgaauuuuagcaac

SEQ ID NO: 1827144 - RNA, 19 nt, Artificial Sequence
  Description of Artificial Sequence: Synthetic oligonucleotide
acuuagucuggguacacag

SEQ ID NO: 1827145 - RNA, 19 nt, Artificial Sequence
  Description of Artificial Sequence: Synthetic oligonucleotide
guuaauuaggaagguaucc

SEQ ID NO: 1827146 - RNA, 19 nt, Artificial Sequence
  Description of Artificial Sequence: Synthetic oligonucleotide
uucucagcauucaauguug

SEQ ID NO: 1827147 - RNA, 19 nt, Artificial Sequence
  Description of Artificial Sequence: Synthetic oligonucleotide
auagguagaacccuagaaa

SEQ ID NO: 1827148 - RNA, 19 nt, Artificial Sequence
  Description of Artificial Sequence: Synthetic oligonucleotide
aauagaaaccagaccauca

SEQ ID NO: 1827149 - RNA, 19 nt, Artificial Sequence
  Description of Artificial Sequence: Synthetic oligonucleotide
uuuagucgaauuuuagcaa

SEQ ID NO: 1827150 - RNA, 19 nt, Artificial Sequence
  Description of Artificial Sequence: Synthetic oligonucleotide
uuaauuaggaagguauccu

SEQ ID NO: 1827151 - RNA, 19 nt, Artificial Sequence
  Description of Artificial Sequence: Synthetic oligonucleotide
aucgaaaaugagaagaucu

SEQ ID NO: 1827152 - RNA, 19 nt, Artificial Sequence
  Description of Artificial Sequence: Synthetic oligonucleotide
cuaacgcuggacaaacgcg

SEQ ID NO: 1827153 - RNA, 19 nt, Artificial Sequence
  Description of Artificial Sequence: Synthetic oligonucleotide
uacgcauguacuuaaugcu

SEQ ID NO: 1827154 - RNA, 19 nt, Artificial Sequence
  Description of Artificial Sequence: Synthetic oligonucleotide
caaaaguagcaacuaagug

SEQ ID NO: 1827155 - RNA, 19 nt, Artificial Sequence
  Description of Artificial Sequence: Synthetic oligonucleotide
auuaucuagagcuuuuguu

SEQ ID NO: 1827156 - RNA, 19 nt, Artificial Sequence
  Description of Artificial Sequence: Synthetic oligonucleotide
auuagcaugucuauuccuc

SEQ ID NO: 1827157 - RNA, 19 nt, Artificial Sequence
  Description of Artificial Sequence: Synthetic oligonucleotide
guagcaaagucuaugugag

SEQ ID NO: 1827158 - RNA, 19 nt, Artificial Sequence
  Description of Artificial Sequence: Synthetic oligonucleotide
aauaugccaucauuuacuu

SEQ ID NO: 1827159 - RNA, 19 nt, Artificial Sequence
  Description of Artificial Sequence: Synthetic oligonucleotide
uaaggaaaagagucugagc

SEQ ID NO: 1827160 - RNA, 19 nt, Artificial Sequence
  Description of Artificial Sequence: Synthetic oligonucleotide
uucauguuaugcagcaucu

SEQ ID NO: 1827161 - RNA, 19 nt, Artificial Sequence
  Description of Artificial Sequence: Synthetic oligonucleotide
guacuauuaccauugccgc

SEQ ID NO: 1827162 - RNA, 19 nt, Artificial Sequence
  Description of Artificial Sequence: Synthetic oligonucleotide
ugaauuuauauuagcuuuu

SEQ ID NO: 1827163 - RNA, 19 nt, Artificial Sequence
  Description of Artificial Sequence: Synthetic oligonucleotide
uaauugacuuaaaauuauc

SEQ ID NO: 1827164 - RNA, 19 nt, Artificial Sequence
  Description of Artificial Sequence: Synthetic oligonucleotide
cagacaugugcucaguugc

SEQ ID NO: 1827165 - RNA, 19 nt, Artificial Sequence
  Description of Artificial Sequence: Synthetic oligonucleotide
caucauuuacuuagucugg

SEQ ID NO: 1827166 - RNA, 19 nt, Artificial Sequence
  Description of Artificial Sequence: Synthetic oligonucleotide
uaggaugaauagaaaccag

SEQ ID NO: 1827167 - RNA, 19 nt, Artificial Sequence
  Description of Artificial Sequence: Synthetic oligonucleotide
aguagcaacuaagugaacu

SEQ ID NO: 1827168 - RNA, 19 nt, Artificial Sequence
  Description of Artificial Sequence: Synthetic oligonucleotide
cucaguugcuacauugugc

SEQ ID NO: 1827169 - RNA, 19 nt, Artificial Sequence
  Description of Artificial Sequence: Synthetic oligonucleotide
ugucuauuccucacaaccu

SEQ ID NO: 1827170 - RNA, 19 nt, Artificial Sequence
  Description of Artificial Sequence: Synthetic oligonucleotide
gauagguagaacccuagaa

SEQ ID NO: 1827171 - RNA, 19 nt, Artificial Sequence
  Description of Artificial Sequence: Synthetic oligonucleotide
agauaaggaaaagagucug

SEQ ID NO: 1827172 - RNA, 19 nt, Artificial Sequence
  Description of Artificial Sequence: Synthetic oligonucleotide
uaacgcuggacaaacgcga

SEQ ID NO: 1827173 - RNA, 19 nt, Artificial Sequence
  Description of Artificial Sequence: Synthetic oligonucleotide
guaaguuggcaaaagaaca

SEQ ID NO: 1827174 - RNA, 19 nt, Artificial Sequence
  Description of Artificial Sequence: Synthetic oligonucleotide
uaaaccggcacagaugaca

SEQ ID NO: 1827175 - RNA, 19 nt, Artificial Sequence
  Description of Artificial Sequence: Synthetic oligonucleotide
uuggcaaccgacucuggag

SEQ ID NO: 1827176 - RNA, 19 nt, Artificial Sequence
  Description of Artificial Sequence: Synthetic oligonucleotide
uaccauugccgcaagacuc

SEQ ID NO: 1827177 - RNA, 19 nt, Artificial Sequence
  Description of Artificial Sequence: Synthetic oligonucleotide
agcaaaauacaguugcaau

SEQ ID NO: 1827178 - RNA, 19 nt, Artificial Sequence
  Description of Artificial Sequence: Synthetic oligonucleotide
ggucaguuaauuaggaagg

SEQ ID NO: 1827179 - RNA, 19 nt, Artificial Sequence
  Description of Artificial Sequence: Synthetic oligonucleotide
uuauaacauugacagacuu

SEQ ID NO: 1827180 - RNA, 19 nt, Artificial Sequence
  Description of Artificial Sequence: Synthetic oligonucleotide
uguugugcaguauaagaua

SEQ ID NO: 1827181 - RNA, 19 nt, Artificial Sequence
  Description of Artificial Sequence: Synthetic oligonucleotide
uugcaauuaauugacuuaa

SEQ ID NO: 1827182 - RNA, 19 nt, Artificial Sequence
  Description of Artificial Sequence: Synthetic oligonucleotide
agugaacuuagugauaggu

SEQ ID NO: 1827183 - RNA, 19 nt, Artificial Sequence
  Description of Artificial Sequence: Synthetic oligonucleotide
ugaauagaaaccagaccau

SEQ ID NO: 1827184 - RNA, 19 nt, Artificial Sequence
  Description of Artificial Sequence: Synthetic oligonucleotide
agugugcgguccuuuacac

SEQ ID NO: 1827185 - RNA, 19 nt, Artificial Sequence
  Description of Artificial Sequence: Synthetic oligonucleotide
agacgaaucugguauccag

SEQ ID NO: 1827186 - RNA, 19 nt, Artificial Sequence
  Description of Artificial Sequence: Synthetic oligonucleotide
aguuaauuaggaagguauc

SEQ ID NO: 1827187 - RNA, 19 nt, Artificial Sequence
  Description of Artificial Sequence: Synthetic oligonucleotide
acgaaacaaacaaaaguag

SEQ ID NO: 1827188 - RNA, 19 nt, Artificial Sequence
  Description of Artificial Sequence: Synthetic oligonucleotide
aaaccagaccaucaguauu

SEQ ID NO: 1827189 - RNA, 19 nt, Artificial Sequence
  Description of Artificial Sequence: Synthetic oligonucleotide
uuagcaugucuauuccuca

SEQ ID NO: 1827190 - RNA, 19 nt, Artificial Sequence
  Description of Artificial Sequence: Synthetic oligonucleotide
ggaaaagagucugagcugg

SEQ ID NO: 1827191 - RNA, 19 nt, Artificial Sequence
  Description of Artificial Sequence: Synthetic oligonucleotide
aagugaacuuagugauagg

SEQ ID NO: 1827192 - RNA, 19 nt, Artificial Sequence
  Description of Artificial Sequence: Synthetic oligonucleotide
guauccaguacuauuacca

SEQ ID NO: 1827193 - RNA, 19 nt, Artificial Sequence
  Description of Artificial Sequence: Synthetic oligonucleotide
uuuacuuagucuggguaca

SEQ ID NO: 1827194 - RNA, 19 nt, Artificial Sequence
  Description of Artificial Sequence: Synthetic oligonucleotide
agcugagauuuacacauug

SEQ ID NO: 1827195 - RNA, 19 nt, Artificial Sequence
  Description of Artificial Sequence: Synthetic oligonucleotide
uguagauuccuuucaugaa

SEQ ID NO: 1827196 - RNA, 19 nt, Artificial Sequence
  Description of Artificial Sequence: Synthetic oligonucleotide
aucugaauuuauauuagcu

SEQ ID NO: 1827197 - RNA, 19 nt, Artificial Sequence
  Description of Artificial Sequence: Synthetic oligonucleotide
uauguaucauaggacaguc

SEQ ID NO: 1827198 - RNA, 19 nt, Artificial Sequence
  Description of Artificial Sequence: Synthetic oligonucleotide
uaauggucauuaaaacauc

SEQ ID NO: 1827199 - RNA, 19 nt, Artificial Sequence
  Description of Artificial Sequence: Synthetic oligonucleotide
uacugcuuacaaauccagc

SEQ ID NO: 1827200 - RNA, 19 nt, Artificial Sequence
  Description of Artificial Sequence: Synthetic oligonucleotide
gauauaaaccggcacagau

SEQ ID NO: 1827201 - RNA, 19 nt, Artificial Sequence
  Description of Artificial Sequence: Synthetic oligonucleotide
uaauuaggaagguauccua

SEQ ID NO: 1827202 - RNA, 19 nt, Artificial Sequence
  Description of Artificial Sequence: Synthetic oligonucleotide
auaagauagagcccuguuu

SEQ ID NO: 1827203 - RNA, 19 nt, Artificial Sequence
  Description of Artificial Sequence: Synthetic oligonucleotide
ugugaggauucuaugcauc

SEQ ID NO: 1827204 - RNA, 19 nt, Artificial Sequence
  Description of Artificial Sequence: Synthetic oligonucleotide
auauggcuaacgcuggaca

SEQ ID NO: 1827205 - RNA, 19 nt, Artificial Sequence
  Description of Artificial Sequence: Synthetic oligonucleotide
gucagaucgaaaaugagaa

SEQ ID NO: 1827206 - RNA, 19 nt, Artificial Sequence
  Description of Artificial Sequence: Synthetic oligonucleotide
guccuuuacacgcauuagc

SEQ ID NO: 1827207 - RNA, 19 nt, Artificial Sequence
  Description of Artificial Sequence: Synthetic oligonucleotide
ucgaaaaugagaagaucuu

SEQ ID NO: 1827208 - RNA, 19 nt, Artificial Sequence
  Description of Artificial Sequence: Synthetic oligonucleotide
ucaccaaaauaauucugaa

SEQ ID NO: 1827209 - RNA, 19 nt, Artificial Sequence
  Description of Artificial Sequence: Synthetic oligonucleotide
gugaggauucuaugcaucc

SEQ ID NO: 1827210 - RNA, 19 nt, Artificial Sequence
  Description of Artificial Sequence: Synthetic oligonucleotide
gaaaaugagaagaucuuua

SEQ ID NO: 1827211 - RNA, 19 nt, Artificial Sequence
  Description of Artificial Sequence: Synthetic oligonucleotide
acgcgagucugacuggagc

SEQ ID NO: 1827212 - RNA, 19 nt, Artificial Sequence
  Description of Artificial Sequence: Synthetic oligonucleotide
aaaccggcacagaugacag

SEQ ID NO: 1827213 - RNA, 19 nt, Artificial Sequence
  Description of Artificial Sequence: Synthetic oligonucleotide
ugauagguagaacccuaga

SEQ ID NO: 1827214 - RNA, 19 nt, Artificial Sequence
  Description of Artificial Sequence: Synthetic oligonucleotide
cagaucgaaaaugagaaga

SEQ ID NO: 1827215 - RNA, 19 nt, Artificial Sequence
  Description of Artificial Sequence: Synthetic oligonucleotide
uuuaccaaugcagcaaaau

SEQ ID NO: 1827216 - RNA, 19 nt, Artificial Sequence
  Description of Artificial Sequence: Synthetic oligonucleotide
cuacugcuuacaaauccag

SEQ ID NO: 1827217 - RNA, 19 nt, Artificial Sequence
  Description of Artificial Sequence: Synthetic oligonucleotide
ugaggauucuaugcauccg

SEQ ID NO: 1827218 - RNA, 19 nt, Artificial Sequence
  Description of Artificial Sequence: Synthetic oligonucleotide
uagugugcgguccuuuaca

SEQ ID NO: 1827219 - RNA, 19 nt, Artificial Sequence
  Description of Artificial Sequence: Synthetic oligonucleotide
aaaauuaucuagagcuuuu

SEQ ID NO: 1827220 - RNA, 19 nt, Artificial Sequence
  Description of Artificial Sequence: Synthetic oligonucleotide
auugacagacuuaggauga

SEQ ID NO: 1827221 - RNA, 19 nt, Artificial Sequence
  Description of Artificial Sequence: Synthetic oligonucleotide
ucauuuacuuagucugggu

SEQ ID NO: 1827222 - RNA, 19 nt, Artificial Sequence
  Description of Artificial Sequence: Synthetic oligonucleotide
uacuauuaccauugccgca

SEQ ID NO: 1827223 - RNA, 19 nt, Artificial Sequence
  Description of Artificial Sequence: Synthetic oligonucleotide
uggcaaccgacucuggaga

SEQ ID NO: 1827224 - RNA, 19 nt, Artificial Sequence
  Description of Artificial Sequence: Synthetic oligonucleotide
acuauuaccauugccgcaa

SEQ ID NO: 1827225 - RNA, 19 nt, Artificial Sequence
  Description of Artificial Sequence: Synthetic oligonucleotide
uggacaaacgcgagucuga

SEQ ID NO: 1827226 - RNA, 19 nt, Artificial Sequence
  Description of Artificial Sequence: Synthetic oligonucleotide
acaauauggcuaacgcugg

SEQ ID NO: 1827227 - RNA, 19 nt, Artificial Sequence
  Description of Artificial Sequence: Synthetic oligonucleotide
uauggcuaacgcuggacaa

SEQ ID NO: 1827228 - RNA, 19 nt, Artificial Sequence
  Description of Artificial Sequence: Synthetic oligonucleotide
cauccgacaguagugugcg

SEQ ID NO: 1827229 - RNA, 19 nt, Artificial Sequence
  Description of Artificial Sequence: Synthetic oligonucleotide
aguguguuugaagacagaa

SEQ ID NO: 1827230 - RNA, 19 nt, Artificial Sequence
  Description of Artificial Sequence: Synthetic oligonucleotide
agcaacuaagugaacuuag

SEQ ID NO: 1827231 - RNA, 19 nt, Artificial Sequence
  Description of Artificial Sequence: Synthetic oligonucleotide
aaauacaguugcaauuaau

SEQ ID NO: 1827232 - RNA, 19 nt, Artificial Sequence
  Description of Artificial Sequence: Synthetic oligonucleotide
uggcaaaagaacacuuuua

SEQ ID NO: 1827233 - RNA, 19 nt, Artificial Sequence
  Description of Artificial Sequence: Synthetic oligonucleotide
acgccgcuuagcuucuucc

SEQ ID NO: 1827234 - RNA, 19 nt, Artificial Sequence
  Description of Artificial Sequence: Synthetic oligonucleotide
acaucugacuguagauucc

SEQ ID NO: 1827235 - RNA, 19 nt, Artificial Sequence
  Description of Artificial Sequence: Synthetic oligonucleotide
ucugacuguagauuccuuu

SEQ ID NO: 1827236 - RNA, 19 nt, Artificial Sequence
  Description of Artificial Sequence: Synthetic oligonucleotide
ggaucuuuaggacuucuac

SEQ ID NO: 1827237 - RNA, 19 nt, Artificial Sequence
  Description of Artificial Sequence: Synthetic oligonucleotide
uggacaacaguagcaaagu

SEQ ID NO: 1827238 - RNA, 19 nt, Artificial Sequence
  Description of Artificial Sequence: Synthetic oligonucleotide
agguagaacccuagaaaac

SEQ ID NO: 1827239 - RNA, 19 nt, Artificial Sequence
  Description of Artificial Sequence: Synthetic oligonucleotide
ugguauccaguacuauuac

SEQ ID NO: 1827240 - RNA, 19 nt, Artificial Sequence
  Description of Artificial Sequence: Synthetic oligonucleotide
caguacuauuaccauugcc

SEQ ID NO: 1827241 - RNA, 19 nt, Artificial Sequence
  Description of Artificial Sequence: Synthetic oligonucleotide
auaaugggcuuuauuauaa

SEQ ID NO: 1827242 - RNA, 19 nt, Artificial Sequence
  Description of Artificial Sequence: Synthetic oligonucleotide
uauccaguacuauuaccau

SEQ ID NO: 1827243 - RNA, 19 nt, Artificial Sequence
  Description of Artificial Sequence: Synthetic oligonucleotide
cgaauuuuagcaacuuugg

SEQ ID NO: 1827244 - RNA, 19 nt, Artificial Sequence
  Description of Artificial Sequence: Synthetic oligonucleotide
gcuaacgcuggacaaacgc

SEQ ID NO: 1827245 - RNA, 19 nt, Artificial Sequence
  Description of Artificial Sequence: Synthetic oligonucleotide
uauuacuuucaggucagau

SEQ ID NO: 1827246 - RNA, 19 nt, Artificial Sequence
  Description of Artificial Sequence: Synthetic oligonucleotide
caaauuuagucgaauuuua

SEQ ID NO: 1827247 - RNA, 19 nt, Artificial Sequence
  Description of Artificial Sequence: Synthetic oligonucleotide
cugaauuuauauuagcuuu

SEQ ID NO: 1827248 - RNA, 19 nt, Artificial Sequence
  Description of Artificial Sequence: Synthetic oligonucleotide
gaaaccacgccgcuuagcu

SEQ ID NO: 1827249 - RNA, 19 nt, Artificial Sequence
  Description of Artificial Sequence: Synthetic oligonucleotide
accaaugcagcaaaauaca

SEQ ID NO: 1827250 - RNA, 19 nt, Artificial Sequence
  Description of Artificial Sequence: Synthetic oligonucleotide
agcaaacugucccuucaug

SEQ ID NO: 1827251 - RNA, 19 nt, Artificial Sequence
  Description of Artificial Sequence: Synthetic oligonucleotide
auuauaacauugacagacu

SEQ ID NO: 1827252 - RNA, 19 nt, Artificial Sequence
  Description of Artificial Sequence: Synthetic oligonucleotide
ugcaauuaauugacuuaaa

SEQ ID NO: 1827253 - RNA, 19 nt, Artificial Sequence
  Description of Artificial Sequence: Synthetic oligonucleotide
accuuuaccuguccuucag

SEQ ID NO: 1827254 - RNA, 19 nt, Artificial Sequence
  Description of Artificial Sequence: Synthetic oligonucleotide
auucuaugcauccgacagu

SEQ ID NO: 1827255 - RNA, 19 nt, Artificial Sequence
  Description of Artificial Sequence: Synthetic oligonucleotide
aagucuaugugaggauucu

SEQ ID NO: 1827256 - RNA, 19 nt, Artificial Sequence
  Description of Artificial Sequence: Synthetic oligonucleotide
uugugcaguauaagauaga

SEQ ID NO: 1827257 - RNA, 19 nt, Artificial Sequence
  Description of Artificial Sequence: Synthetic oligonucleotide
aaccagaccaucaguauuu

SEQ ID NO: 1827258 - RNA, 19 nt, Artificial Sequence
  Description of Artificial Sequence: Synthetic oligonucleotide
acuuagugauagguagaac

SEQ ID NO: 1827259 - RNA, 19 nt, Artificial Sequence
  Description of Artificial Sequence: Synthetic oligonucleotide
ucccaaaccaagguauaug

SEQ ID NO: 1827260 - RNA, 19 nt, Artificial Sequence
  Description of Artificial Sequence: Synthetic oligonucleotide
ugugaacuuuuaccuauuu

SEQ ID NO: 1827261 - RNA, 19 nt, Artificial Sequence
  Description of Artificial Sequence: Synthetic oligonucleotide
gaucgaaaaugagaagauc

SEQ ID NO: 1827262 - RNA, 19 nt, Artificial Sequence
  Description of Artificial Sequence: Synthetic oligonucleotide
acgcauguacuuaaugcuc

SEQ ID NO: 1827263 - RNA, 19 nt, Artificial Sequence
  Description of Artificial Sequence: Synthetic oligonucleotide
agcaugucuauuccucaca

SEQ ID NO: 1827264 - RNA, 19 nt, Artificial Sequence
  Description of Artificial Sequence: Synthetic oligonucleotide
cucacaaccuuuaccuguc

SEQ ID NO: 1827265 - RNA, 19 nt, Artificial Sequence
  Description of Artificial Sequence: Synthetic oligonucleotide
caguuaauuaggaagguau

SEQ ID NO: 1827266 - RNA, 19 nt, Artificial Sequence
  Description of Artificial Sequence: Synthetic oligonucleotide
cugagauuuacacauugua

SEQ ID NO: 1827267 - RNA, 19 nt, Artificial Sequence
  Description of Artificial Sequence: Synthetic oligonucleotide
ucuaugcauccgacaguag

SEQ ID NO: 1827268 - RNA, 19 nt, Artificial Sequence
  Description of Artificial Sequence: Synthetic oligonucleotide
acaaccuuuaccuguccuu

SEQ ID NO: 1827269 - RNA, 19 nt, Artificial Sequence
  Description of Artificial Sequence: Synthetic oligonucleotide
agaaaccagaccaucagua

SEQ ID NO: 1827270 - RNA, 19 nt, Artificial Sequence
  Description of Artificial Sequence: Synthetic oligonucleotide
uuacccaaauuuagucgaa

SEQ ID NO: 1827271 - RNA, 19 nt, Artificial Sequence
  Description of Artificial Sequence: Synthetic oligonucleotide
uagugauagguagaacccu

SEQ ID NO: 1827272 - RNA, 19 nt, Artificial Sequence
  Description of Artificial Sequence: Synthetic oligonucleotide
agggcaguaaguuggcaaa

SEQ ID NO: 1827273 - RNA, 19 nt, Artificial Sequence
  Description of Artificial Sequence: Synthetic oligonucleotide
gguauccaguacuauuacc

SEQ ID NO: 1827274 - RNA, 19 nt, Artificial Sequence
  Description of Artificial Sequence: Synthetic oligonucleotide
aggauucuaugcauccgac

SEQ ID NO: 1827275 - RNA, 19 nt, Artificial Sequence
  Description of Artificial Sequence: Synthetic oligonucleotide
uccgacaguagugugcggu

SEQ ID NO: 1827276 - RNA, 19 nt, Artificial Sequence
  Description of Artificial Sequence: Synthetic oligonucleotide
uaucugaaaccacgccgcu

SEQ ID NO: 1827277 - RNA, 19 nt, Artificial Sequence
  Description of Artificial Sequence: Synthetic oligonucleotide
auguuaugcagcaucugca

SEQ ID NO: 1827278 - RNA, 19 nt, Artificial Sequence
  Description of Artificial Sequence: Synthetic oligonucleotide
uagucuggguacacagaca

SEQ ID NO: 1827279 - RNA, 19 nt, Artificial Sequence
  Description of Artificial Sequence: Synthetic oligonucleotide
uguuccaggucaguuaauu

SEQ ID NO: 1827280 - RNA, 19 nt, Artificial Sequence
  Description of Artificial Sequence: Synthetic oligonucleotide
uauccuacgcauguacuua

SEQ ID NO: 1827281 - RNA, 19 nt, Artificial Sequence
  Description of Artificial Sequence: Synthetic oligonucleotide
cauuuacuuagucugggua

SEQ ID NO: 1827282 - RNA, 19 nt, Artificial Sequence
  Description of Artificial Sequence: Synthetic oligonucleotide
acgaaucugguauccagua

SEQ ID NO: 1827283 - RNA, 19 nt, Artificial Sequence
  Description of Artificial Sequence: Synthetic oligonucleotide
agaucgaaaaugagaagau

SEQ ID NO: 1827284 - RNA, 19 nt, Artificial Sequence
  Description of Artificial Sequence: Synthetic oligonucleotide
ucauguuaugcagcaucug

SEQ ID NO: 1827285 - RNA, 19 nt, Artificial Sequence
  Description of Artificial Sequence: Synthetic oligonucleotide
gaacuuagugauagguaga

SEQ ID NO: 1827286 - RNA, 19 nt, Artificial Sequence
  Description of Artificial Sequence: Synthetic oligonucleotide
caaacgcgagucugacugg

SEQ ID NO: 1827287 - RNA, 19 nt, Artificial Sequence
  Description of Artificial Sequence: Synthetic oligonucleotide
aucuagagcuuuuguucca

SEQ ID NO: 1827288 - RNA, 19 nt, Artificial Sequence
  Description of Artificial Sequence: Synthetic oligonucleotide
agacacugaaauaauuuua

SEQ ID NO: 1827289 - RNA, 19 nt, Artificial Sequence
  Description of Artificial Sequence: Synthetic oligonucleotide
aaacgcgagucugacugga

SEQ ID NO: 1827290 - RNA, 19 nt, Artificial Sequence
  Description of Artificial Sequence: Synthetic oligonucleotide
accuguccuucagauaagg

SEQ ID NO: 1827291 - RNA, 19 nt, Artificial Sequence
  Description of Artificial Sequence: Synthetic oligonucleotide
ugcauccgacaguagugug

SEQ ID NO: 1827292 - RNA, 19 nt, Artificial Sequence
  Description of Artificial Sequence: Synthetic oligonucleotide
agcccuguuuccuuggcaa

SEQ ID NO: 1827293 - RNA, 19 nt, Artificial Sequence
  Description of Artificial Sequence: Synthetic oligonucleotide
agauagagcccuguuuccu

SEQ ID NO: 1827294 - RNA, 19 nt, Artificial Sequence
  Description of Artificial Sequence: Synthetic oligonucleotide
caaccuuuaccuguccuuc

SEQ ID NO: 1827295 - RNA, 19 nt, Artificial Sequence
  Description of Artificial Sequence: Synthetic oligonucleotide
guugcuacauugugcuaca

SEQ ID NO: 1827296 - RNA, 19 nt, Artificial Sequence
  Description of Artificial Sequence: Synthetic oligonucleotide
gacuucuacugcuuacaaa

SEQ ID NO: 1827297 - RNA, 19 nt, Artificial Sequence
  Description of Artificial Sequence: Synthetic oligonucleotide
cuggacaaacgcgagucug

SEQ ID NO: 1827298 - RNA, 19 nt, Artificial Sequence
  Description of Artificial Sequence: Synthetic oligonucleotide
uggcuaacgcuggacaaac

SEQ ID NO: 1827299 - RNA, 19 nt, Artificial Sequence
  Description of Artificial Sequence: Synthetic oligonucleotide
gugauagguagaacccuag

SEQ ID NO: 1827300 - RNA, 19 nt, Artificial Sequence
  Description of Artificial Sequence: Synthetic oligonucleotide
aaguagcaacuaagugaac

SEQ ID NO: 1827301 - RNA, 19 nt, Artificial Sequence
  Description of Artificial Sequence: Synthetic oligonucleotide
aaucugguauccaguacua

SEQ ID NO: 1827302 - RNA, 19 nt, Artificial Sequence
  Description of Artificial Sequence: Synthetic oligonucleotide
gugcaguauaagauagagc

SEQ ID NO: 1827303 - RNA, 19 nt, Artificial Sequence
  Description of Artificial Sequence: Synthetic oligonucleotide
guagugugcgguccuuuac

SEQ ID NO: 1827304 - RNA, 19 nt, Artificial Sequence
  Description of Artificial Sequence: Synthetic oligonucleotide
cuggagacgaaucugguau

SEQ ID NO: 1827305 - RNA, 19 nt, Artificial Sequence
  Description of Artificial Sequence: Synthetic oligonucleotide
auauucccagcaguagucu

SEQ ID NO: 1827306 - RNA, 19 nt, Artificial Sequence
  Description of Artificial Sequence: Synthetic oligonucleotide
caauguugcacucauuaau

SEQ ID NO: 1827307 - RNA, 19 nt, Artificial Sequence
  Description of Artificial Sequence: Synthetic oligonucleotide
uacuuagucuggguacaca

SEQ ID NO: 1827308 - RNA, 19 nt, Artificial Sequence
  Description of Artificial Sequence: Synthetic oligonucleotide
gaaaccagaccaucaguau

SEQ ID NO: 1827309 - RNA, 19 nt, Artificial Sequence
  Description of Artificial Sequence: Synthetic oligonucleotide
uggagacgaaucugguauc

SEQ ID NO: 1827310 - RNA, 19 nt, Artificial Sequence
  Description of Artificial Sequence: Synthetic oligonucleotide
ugaaaccacgccgcuuagc

SEQ ID NO: 1827311 - RNA, 19 nt, Artificial Sequence
  Description of Artificial Sequence: Synthetic oligonucleotide
cuaugcauccgacaguagu

SEQ ID NO: 1827312 - RNA, 19 nt, Artificial Sequence
  Description of Artificial Sequence: Synthetic oligonucleotide
ccuguugugcaguauaaga

SEQ ID NO: 1827313 - RNA, 19 nt, Artificial Sequence
  Description of Artificial Sequence: Synthetic oligonucleotide
aguagugugcgguccuuua

SEQ ID NO: 1827314 - RNA, 19 nt, Artificial Sequence
  Description of Artificial Sequence: Synthetic oligonucleotide
ggcuuuauuauaacauuga

SEQ ID NO: 1827315 - RNA, 19 nt, Artificial Sequence
  Description of Artificial Sequence: Synthetic oligonucleotide
auccuacgcauguacuuaa

SEQ ID NO: 1827316 - RNA, 19 nt, Artificial Sequence
  Description of Artificial Sequence: Synthetic oligonucleotide
uccagacaugugcucaguu

SEQ ID NO: 1827317 - RNA, 19 nt, Artificial Sequence
  Description of Artificial Sequence: Synthetic oligonucleotide
agauuccuuucaugaauuu

SEQ ID NO: 1827318 - RNA, 19 nt, Artificial Sequence
  Description of Artificial Sequence: Synthetic oligonucleotide
aaaccacgccgcuuagcuu

SEQ ID NO: 1827319 - RNA, 19 nt, Artificial Sequence
  Description of Artificial Sequence: Synthetic oligonucleotide
cuguugugcaguauaagau

SEQ ID NO: 1827320 - RNA, 19 nt, Artificial Sequence
  Description of Artificial Sequence: Synthetic oligonucleotide
acacgcauuagcaugucua

SEQ ID NO: 1827321 - RNA, 19 nt, Artificial Sequence
  Description of Artificial Sequence: Synthetic oligonucleotide
aggucagaucgaaaaugag

SEQ ID NO: 1827322 - RNA, 19 nt, Artificial Sequence
  Description of Artificial Sequence: Synthetic oligonucleotide
ccuagaaaacaaaccaaga

SEQ ID NO: 1827323 - RNA, 19 nt, Artificial Sequence
  Description of Artificial Sequence: Synthetic oligonucleotide
auugugcuacacagggcag

SEQ ID NO: 1827324 - RNA, 19 nt, Artificial Sequence
  Description of Artificial Sequence: Synthetic oligonucleotide
augcauccgacaguagugu

SEQ ID NO: 1827325 - RNA, 19 nt, Artificial Sequence
  Description of Artificial Sequence: Synthetic oligonucleotide
agugauagguagaacccua

SEQ ID NO: 1827326 - RNA, 19 nt, Artificial Sequence
  Description of Artificial Sequence: Synthetic oligonucleotide
aguuggcaaaagaacacuu

SEQ ID NO: 1827327 - RNA, 19 nt, Artificial Sequence
  Description of Artificial Sequence: Synthetic oligonucleotide
cagcauucaauguugcacu

SEQ ID NO: 1827328 - RNA, 19 nt, Artificial Sequence
  Description of Artificial Sequence: Synthetic oligonucleotide
agucugacuggagccacug

SEQ ID NO: 1827329 - RNA, 19 nt, Artificial Sequence
  Description of Artificial Sequence: Synthetic oligonucleotide
guagcaacuaagugaacuu

SEQ ID NO: 1827330 - RNA, 19 nt, Artificial Sequence
  Description of Artificial Sequence: Synthetic oligonucleotide
ccagacaugugcucaguug

SEQ ID NO: 1827331 - RNA, 19 nt, Artificial Sequence
  Description of Artificial Sequence: Synthetic oligonucleotide
acccuagaaaacaaaccaa

SEQ ID NO: 1827332 - RNA, 19 nt, Artificial Sequence
  Description of Artificial Sequence: Synthetic oligonucleotide
cuuuaccuguccuucagau

SEQ ID NO: 1827333 - RNA, 19 nt, Artificial Sequence
  Description of Artificial Sequence: Synthetic oligonucleotide
ggagacgaaucugguaucc

SEQ ID NO: 1827334 - RNA, 19 nt, Artificial Sequence
  Description of Artificial Sequence: Synthetic oligonucleotide
gcaguauaagauagagccc

SEQ ID NO: 1827335 - RNA, 19 nt, Artificial Sequence
  Description of Artificial Sequence: Synthetic oligonucleotide
auaaaccggcacagaugac

SEQ ID NO: 1827336 - RNA, 19 nt, Artificial Sequence
  Description of Artificial Sequence: Synthetic oligonucleotide
gugaacuuagugauaggua

SEQ ID NO: 1827337 - RNA, 19 nt, Artificial Sequence
  Description of Artificial Sequence: Synthetic oligonucleotide
aacgcgagucugacuggag

SEQ ID NO: 1827338 - RNA, 19 nt, Artificial Sequence
  Description of Artificial Sequence: Synthetic oligonucleotide
accaagguauauguaucau

SEQ ID NO: 1827339 - RNA, 19 nt, Artificial Sequence
  Description of Artificial Sequence: Synthetic oligonucleotide
uuuggaucuuuaggacuuc

SEQ ID NO: 1827340 - RNA, 19 nt, Artificial Sequence
  Description of Artificial Sequence: Synthetic oligonucleotide
agcuuuuguuccaggucag

SEQ ID NO: 1827341 - RNA, 19 nt, Artificial Sequence
  Description of Artificial Sequence: Synthetic oligonucleotide
uccuacgcauguacuuaau

SEQ ID NO: 1827342 - RNA, 19 nt, Artificial Sequence
  Description of Artificial Sequence: Synthetic oligonucleotide
ggauucuaugcauccgaca

SEQ ID NO: 1827343 - RNA, 19 nt, Artificial Sequence
  Description of Artificial Sequence: Synthetic oligonucleotide
accauugccgcaagacucu

SEQ ID NO: 1827344 - RNA, 19 nt, Artificial Sequence
  Description of Artificial Sequence: Synthetic oligonucleotide
gacuguagauuccuuucau

SEQ ID NO: 1827345 - RNA, 19 nt, Artificial Sequence
  Description of Artificial Sequence: Synthetic oligonucleotide
gacuuaggaugaauagaaa

SEQ ID NO: 1827346 - RNA, 19 nt, Artificial Sequence
  Description of Artificial Sequence: Synthetic oligonucleotide
agcaacuuugggauauaaa

SEQ ID NO: 1827347 - RNA, 19 nt, Artificial Sequence
  Description of Artificial Sequence: Synthetic oligonucleotide
guuaugcagcaucugcagu

SEQ ID NO: 1827348 - RNA, 19 nt, Artificial Sequence
  Description of Artificial Sequence: Synthetic oligonucleotide
ccuacgcauguacuuaaug

SEQ ID NO: 1827349 - RNA, 19 nt, Artificial Sequence
  Description of Artificial Sequence: Synthetic oligonucleotide
gacgaaucugguauccagu

SEQ ID NO: 1827350 - RNA, 19 nt, Artificial Sequence
  Description of Artificial Sequence: Synthetic oligonucleotide
cugaaaccacgccgcuuag

SEQ ID NO: 1827351 - RNA, 19 nt, Artificial Sequence
  Description of Artificial Sequence: Synthetic oligonucleotide
auguaucauaggacaguca

SEQ ID NO: 1827352 - RNA, 19 nt, Artificial Sequence
  Description of Artificial Sequence: Synthetic oligonucleotide
auggcuaacgcuggacaaa

SEQ ID NO: 1827353 - RNA, 19 nt, Artificial Sequence
  Description of Artificial Sequence: Synthetic oligonucleotide
gagacgaaucugguaucca

SEQ ID NO: 1827354 - RNA, 19 nt, Artificial Sequence
  Description of Artificial Sequence: Synthetic oligonucleotide
guauccuacgcauguacuu

SEQ ID NO: 1827355 - RNA, 19 nt, Artificial Sequence
  Description of Artificial Sequence: Synthetic oligonucleotide
caaccgacucuggagacga

SEQ ID NO: 1827356 - RNA, 19 nt, Artificial Sequence
  Description of Artificial Sequence: Synthetic oligonucleotide
agacaugugcucaguugcu

SEQ ID NO: 1827357 - RNA, 19 nt, Artificial Sequence
  Description of Artificial Sequence: Synthetic oligonucleotide
caggucaguuaauuaggaa

SEQ ID NO: 1827358 - RNA, 19 nt, Artificial Sequence
  Description of Artificial Sequence: Synthetic oligonucleotide
gcauccgacaguagugugc

SEQ ID NO: 1827359 - RNA, 19 nt, Artificial Sequence
  Description of Artificial Sequence: Synthetic oligonucleotide
uagcugagauuuacacauu

SEQ ID NO: 1827360 - RNA, 19 nt, Artificial Sequence
  Description of Artificial Sequence: Synthetic oligonucleotide
gacaguagugugcgguccu

SEQ ID NO: 1827361 - RNA, 19 nt, Artificial Sequence
  Description of Artificial Sequence: Synthetic oligonucleotide
acgcuggacaaacgcgagu

SEQ ID NO: 1827362 - RNA, 19 nt, Artificial Sequence
  Description of Artificial Sequence: Synthetic oligonucleotide
caauauggcuaacgcugga

SEQ ID NO: 1827363 - RNA, 19 nt, Artificial Sequence
  Description of Artificial Sequence: Synthetic oligonucleotide
guuuccuuggcaaccgacu

SEQ ID NO: 1827364 - RNA, 19 nt, Artificial Sequence
  Description of Artificial Sequence: Synthetic oligonucleotide
gcaugucuauuccucacaa

SEQ ID NO: 1827365 - RNA, 19 nt, Artificial Sequence
  Description of Artificial Sequence: Synthetic oligonucleotide
auccgacaguagugugcgg

SEQ ID NO: 1827366 - RNA, 19 nt, Artificial Sequence
  Description of Artificial Sequence: Synthetic oligonucleotide
caagaaguuagcugagauu

SEQ ID NO: 1827367 - RNA, 19 nt, Artificial Sequence
  Description of Artificial Sequence: Synthetic oligonucleotide
uuagcaacuuugggauaua

SEQ ID NO: 1827368 - RNA, 19 nt, Artificial Sequence
  Description of Artificial Sequence: Synthetic oligonucleotide
uuacacgcauuagcauguc

SEQ ID NO: 1827369 - RNA, 19 nt, Artificial Sequence
  Description of Artificial Sequence: Synthetic oligonucleotide
auauuacuuucaggucaga

SEQ ID NO: 1827370 - RNA, 19 nt, Artificial Sequence
  Description of Artificial Sequence: Synthetic oligonucleotide
gcaaccgacucuggagacg

SEQ ID NO: 1827371 - RNA, 19 nt, Artificial Sequence
  Description of Artificial Sequence: Synthetic oligonucleotide
cgcgagucugacuggagcc

SEQ ID NO: 1827372 - RNA, 19 nt, Artificial Sequence
  Description of Artificial Sequence: Synthetic oligonucleotide
gacaaacgcgagucugacu

SEQ ID NO: 1827373 - RNA, 19 nt, Artificial Sequence
  Description of Artificial Sequence: Synthetic oligonucleotide
agaaguuagcugagauuua

SEQ ID NO: 1827374 - RNA, 19 nt, Artificial Sequence
  Description of Artificial Sequence: Synthetic oligonucleotide
ggcaaccgacucuggagac

SEQ ID NO: 1827375 - RNA, 19 nt, Artificial Sequence
  Description of Artificial Sequence: Synthetic oligonucleotide
ccaguacuauuaccauugc

SEQ ID NO: 1827376 - RNA, 19 nt, Artificial Sequence
  Description of Artificial Sequence: Synthetic oligonucleotide
uugcuacauugugcuacac

SEQ ID NO: 1827377 - RNA, 19 nt, Artificial Sequence
  Description of Artificial Sequence: Synthetic oligonucleotide
ggacaaacgcgagucugac

SEQ ID NO: 1827378 - RNA, 19 nt, Artificial Sequence
  Description of Artificial Sequence: Synthetic oligonucleotide
ggacuucuacugcuuacaa

SEQ ID NO: 1827379 - RNA, 19 nt, Artificial Sequence
  Description of Artificial Sequence: Synthetic oligonucleotide
guguuugaagacagaaaau

SEQ ID NO: 1827380 - RNA, 19 nt, Artificial Sequence
  Description of Artificial Sequence: Synthetic oligonucleotide
gccgcuuagcuucuuccca

SEQ ID NO: 1827381 - RNA, 19 nt, Artificial Sequence
  Description of Artificial Sequence: Synthetic oligonucleotide
auccagacaugugcucagu

SEQ ID NO: 1827382 - RNA, 19 nt, Artificial Sequence
  Description of Artificial Sequence: Synthetic oligonucleotide
ggauauaaaccggcacaga

SEQ ID NO: 1827383 - RNA, 19 nt, Artificial Sequence
  Description of Artificial Sequence: Synthetic oligonucleotide
gccuguugugcaguauaag

SEQ ID NO: 1827384 - RNA, 19 nt, Artificial Sequence
  Description of Artificial Sequence: Synthetic oligonucleotide
acgcauuagcaugucuauu

SEQ ID NO: 1827385 - RNA, 19 nt, Artificial Sequence
  Description of Artificial Sequence: Synthetic oligonucleotide
auauuagcuuuuggaucuu

SEQ ID NO: 1827386 - RNA, 19 nt, Artificial Sequence
  Description of Artificial Sequence: Synthetic oligonucleotide
cacgccgcuuagcuucuuc

SEQ ID NO: 1827387 - RNA, 19 nt, Artificial Sequence
  Description of Artificial Sequence: Synthetic oligonucleotide
caucugacuguagauuccu

SEQ ID NO: 1827388 - RNA, 19 nt, Artificial Sequence
  Description of Artificial Sequence: Synthetic oligonucleotide
ggcuaacgcuggacaaacg

SEQ ID NO: 1827389 - RNA, 19 nt, Artificial Sequence
  Description of Artificial Sequence: Synthetic oligonucleotide
cuacacagggcaguaaguu

SEQ ID NO: 1827390 - RNA, 19 nt, Artificial Sequence
  Description of Artificial Sequence: Synthetic oligonucleotide
accagaccaucaguauuuu

SEQ ID NO: 1827391 - RNA, 19 nt, Artificial Sequence
  Description of Artificial Sequence: Synthetic oligonucleotide
gguauccuacgcauguacu

SEQ ID NO: 1827392 - RNA, 19 nt, Artificial Sequence
  Description of Artificial Sequence: Synthetic oligonucleotide
ccgacaguagugugcgguc

SEQ ID NO: 1827393 - RNA, 19 nt, Artificial Sequence
  Description of Artificial Sequence: Synthetic oligonucleotide
acaguagugugcgguccuu

SEQ ID NO: 1827394 - RNA, 19 nt, Artificial Sequence
  Description of Artificial Sequence: Synthetic oligonucleotide
gcaacuaagugaacuuagu

SEQ ID NO: 1827395 - RNA, 19 nt, Artificial Sequence
  Description of Artificial Sequence: Synthetic oligonucleotide
gcaaagucuaugugaggau

SEQ ID NO: 1827396 - RNA, 19 nt, Artificial Sequence
  Description of Artificial Sequence: Synthetic oligonucleotide
cgcuggacaaacgcgaguc

SEQ ID NO: 1827397 - RNA, 19 nt, Artificial Sequence
  Description of Artificial Sequence: Synthetic oligonucleotide
ccaaaccaagguauaugua

SEQ ID NO: 1827398 - RNA, 19 nt, Artificial Sequence
  Description of Artificial Sequence: Synthetic oligonucleotide
ccuuuaccuguccuucaga

SEQ ID NO: 1827399 - RNA, 19 nt, Artificial Sequence
  Description of Artificial Sequence: Synthetic oligonucleotide
cgacaguagugugcggucc

SEQ ID NO: 1827400 - RNA, 19 nt, Artificial Sequence
  Description of Artificial Sequence: Synthetic oligonucleotide
gcgagucugacuggagcca

SEQ ID NO: 1827401 - RNA, 19 nt, Artificial Sequence
  Description of Artificial Sequence: Synthetic oligonucleotide
ccuuuacacgcauuagcau

SEQ ID NO: 1827402 - RNA, 19 nt, Artificial Sequence
  Description of Artificial Sequence: Synthetic oligonucleotide
gcuggacaaacgcgagucu

SEQ ID NO: 1827403 - RNA, 19 nt, Artificial Sequence
  Description of Artificial Sequence: Synthetic oligonucleotide
ccgcuuagcuucuucccaa

SEQ ID NO: 1827404 - RNA, 19 nt, Artificial Sequence
  Description of Artificial Sequence: Synthetic oligonucleotide
ccauugccgcaagacucug

SEQ ID NO: 1827405 - RNA, 19 nt, Artificial Sequence
  Description of Artificial Sequence: Synthetic oligonucleotide
caguagugugcgguccuuu

SEQ ID NO: 1827406 - RNA, 19 nt, Artificial Sequence
  Description of Artificial Sequence: Synthetic oligonucleotide
gccgcaagacucugcccuu

SEQ ID NO: 1827407 - RNA, 19 nt, Artificial Sequence
  Description of Artificial Sequence: Synthetic oligonucleotide
ccgcaagacucugcccuuu

SEQ ID NO: 1827408 - RNA, 19 nt, Artificial Sequence
  Description of Artificial Sequence: Synthetic oligonucleotide
ccacgccgcuuagcuucuu

SEQ ID NO: 1827409 - RNA, 19 nt, Artificial Sequence
  Description of Artificial Sequence: Synthetic oligonucleotide
uuuguauuagcccacauag

SEQ ID NO: 1827410 - RNA, 19 nt, Artificial Sequence
  Description of Artificial Sequence: Synthetic oligonucleotide
uuugcuucgacuauaagag

SEQ ID NO: 1827411 - RNA, 19 nt, Artificial Sequence
  Description of Artificial Sequence: Synthetic oligonucleotide
uguauuagcccacauagcu

SEQ ID NO: 1827412 - RNA, 19 nt, Artificial Sequence
  Description of Artificial Sequence: Synthetic oligonucleotide
uaaaaugccaaccaucacu

SEQ ID NO: 1827413 - RNA, 19 nt, Artificial Sequence
  Description of Artificial Sequence: Synthetic oligonucleotide
acgacuacaauccugcugg

SEQ ID NO: 1827414 - RNA, 19 nt, Artificial Sequence
  Description of Artificial Sequence: Synthetic oligonucleotide
ugaaaagaauguuagccag

SEQ ID NO: 1827415 - RNA, 19 nt, Artificial Sequence
  Description of Artificial Sequence: Synthetic oligonucleotide
aaaguuuggaagaaacgac

SEQ ID NO: 1827416 - RNA, 19 nt, Artificial Sequence
  Description of Artificial Sequence: Synthetic oligonucleotide
agaaggcucgcacagaacg

SEQ ID NO: 1827417 - RNA, 19 nt, Artificial Sequence
  Description of Artificial Sequence: Synthetic oligonucleotide
aagauuggugaguaggaag

SEQ ID NO: 1827418 - RNA, 19 nt, Artificial Sequence
  Description of Artificial Sequence: Synthetic oligonucleotide
aaaaccgccguguugcuag

SEQ ID NO: 1827419 - RNA, 19 nt, Artificial Sequence
  Description of Artificial Sequence: Synthetic oligonucleotide
uaaaguuuggaagaaacga

SEQ ID NO: 1827420 - RNA, 19 nt, Artificial Sequence
  Description of Artificial Sequence: Synthetic oligonucleotide
aaauauacauguguccuuc

SEQ ID NO: 1827421 - RNA, 19 nt, Artificial Sequence
  Description of Artificial Sequence: Synthetic oligonucleotide
uagauuacugucaaucuga

SEQ ID NO: 1827422 - RNA, 19 nt, Artificial Sequence
  Description of Artificial Sequence: Synthetic oligonucleotide
auguuagccaguuugcuuc

SEQ ID NO: 1827423 - RNA, 19 nt, Artificial Sequence
  Description of Artificial Sequence: Synthetic oligonucleotide
aacguagagaggcaagguc

SEQ ID NO: 1827424 - RNA, 19 nt, Artificial Sequence
  Description of Artificial Sequence: Synthetic oligonucleotide
ggaugcaacacauugacag

SEQ ID NO: 1827425 - RNA, 19 nt, Artificial Sequence
  Description of Artificial Sequence: Synthetic oligonucleotide
acuacaauccugcugggag

SEQ ID NO: 1827426 - RNA, 19 nt, Artificial Sequence
  Description of Artificial Sequence: Synthetic oligonucleotide
aaauugaaaaguggucugg

SEQ ID NO: 1827427 - RNA, 19 nt, Artificial Sequence
  Description of Artificial Sequence: Synthetic oligonucleotide
uccgucuucauauaugggc

SEQ ID NO: 1827428 - RNA, 19 nt, Artificial Sequence
  Description of Artificial Sequence: Synthetic oligonucleotide
uuuguccucacaauaccag

SEQ ID NO: 1827429 - RNA, 19 nt, Artificial Sequence
  Description of Artificial Sequence: Synthetic oligonucleotide
agaugguucacuccgaacu

SEQ ID NO: 1827430 - RNA, 19 nt, Artificial Sequence
  Description of Artificial Sequence: Synthetic oligonucleotide
uaagcgacgggcuaguucu

SEQ ID NO: 1827431 - RNA, 19 nt, Artificial Sequence
  Description of Artificial Sequence: Synthetic oligonucleotide
cauauaugggcacuggaag

SEQ ID NO: 1827432 - RNA, 19 nt, Artificial Sequence
  Description of Artificial Sequence: Synthetic oligonucleotide
acuguucaagucuucaaag

SEQ ID NO: 1827433 - RNA, 19 nt, Artificial Sequence
  Description of Artificial Sequence: Synthetic oligonucleotide
cacaauaccaggaugcaac

SEQ ID NO: 1827434 - RNA, 19 nt, Artificial Sequence
  Description of Artificial Sequence: Synthetic oligonucleotide
guuugcuucgacuauaaga

SEQ ID NO: 1827435 - RNA, 19 nt, Artificial Sequence
  Description of Artificial Sequence: Synthetic oligonucleotide
uaucccacaguuuucuugc

SEQ ID NO: 1827436 - RNA, 19 nt, Artificial Sequence
  Description of Artificial Sequence: Synthetic oligonucleotide
ucuagauuacugucaaucu

SEQ ID NO: 1827437 - RNA, 19 nt, Artificial Sequence
  Description of Artificial Sequence: Synthetic oligonucleotide
aacgacuacaauccugcug

SEQ ID NO: 1827438 - RNA, 19 nt, Artificial Sequence
  Description of Artificial Sequence: Synthetic oligonucleotide
caaaguaccuuccggauac

SEQ ID NO: 1827439 - RNA, 19 nt, Artificial Sequence
  Description of Artificial Sequence: Synthetic oligonucleotide
ggaagaaacgacuacaauc

SEQ ID NO: 1827440 - RNA, 19 nt, Artificial Sequence
  Description of Artificial Sequence: Synthetic oligonucleotide
uccuucucagucuagauua

SEQ ID NO: 1827441 - RNA, 19 nt, Artificial Sequence
  Description of Artificial Sequence: Synthetic oligonucleotide
ugacagucacauuuguucc

SEQ ID NO: 1827442 - RNA, 19 nt, Artificial Sequence
  Description of Artificial Sequence: Synthetic oligonucleotide
uuuucaaguagcacaugcu

SEQ ID NO: 1827443 - RNA, 19 nt, Artificial Sequence
  Description of Artificial Sequence: Synthetic oligonucleotide
acguagagaggcaaggucc

SEQ ID NO: 1827444 - RNA, 19 nt, Artificial Sequence
  Description of Artificial Sequence: Synthetic oligonucleotide
uccggauacuccuucaacc

SEQ ID NO: 1827445 - RNA, 19 nt, Artificial Sequence
  Description of Artificial Sequence: Synthetic oligonucleotide
uguuccuucuaagcgacgg

SEQ ID NO: 1827446 - RNA, 19 nt, Artificial Sequence
  Description of Artificial Sequence: Synthetic oligonucleotide
uaugggcacuggaagaucc

SEQ ID NO: 1827447 - RNA, 19 nt, Artificial Sequence
  Description of Artificial Sequence: Synthetic oligonucleotide
uacuccuucaaccucgggu

SEQ ID NO: 1827448 - RNA, 19 nt, Artificial Sequence
  Description of Artificial Sequence: Synthetic oligonucleotide
ugcuucgacuauaagagaa

SEQ ID NO: 1827449 - RNA, 19 nt, Artificial Sequence
  Description of Artificial Sequence: Synthetic oligonucleotide
uaaugggucaccuuauaaa

SEQ ID NO: 1827450 - RNA, 19 nt, Artificial Sequence
  Description of Artificial Sequence: Synthetic oligonucleotide
auaagagaagcuuuuguua

SEQ ID NO: 1827451 - RNA, 19 nt, Artificial Sequence
  Description of Artificial Sequence: Synthetic oligonucleotide
ucaaccucgggugaagagg

SEQ ID NO: 1827452 - RNA, 19 nt, Artificial Sequence
  Description of Artificial Sequence: Synthetic oligonucleotide
uuuguuccuucuaagcgac

SEQ ID NO: 1827453 - RNA, 19 nt, Artificial Sequence
  Description of Artificial Sequence: Synthetic oligonucleotide
cagaagauuggugaguagg

SEQ ID NO: 1827454 - RNA, 19 nt, Artificial Sequence
  Description of Artificial Sequence: Synthetic oligonucleotide
caaauugaaaaguggucug

SEQ ID NO: 1827455 - RNA, 19 nt, Artificial Sequence
  Description of Artificial Sequence: Synthetic oligonucleotide
cuagauuacugucaaucug

SEQ ID NO: 1827456 - RNA, 19 nt, Artificial Sequence
  Description of Artificial Sequence: Synthetic oligonucleotide
uauugaucaggacgucuag

SEQ ID NO: 1827457 - RNA, 19 nt, Artificial Sequence
  Description of Artificial Sequence: Synthetic oligonucleotide
uuauugaucaggacgucua

SEQ ID NO: 1827458 - RNA, 19 nt, Artificial Sequence
  Description of Artificial Sequence: Synthetic oligonucleotide
uucauauaugggcacugga

SEQ ID NO: 1827459 - RNA, 19 nt, Artificial Sequence
  Description of Artificial Sequence: Synthetic oligonucleotide
aucucaaacccaucuuccg

SEQ ID NO: 1827460 - RNA, 19 nt, Artificial Sequence
  Description of Artificial Sequence: Synthetic oligonucleotide
auucgcuggccccugggcc

SEQ ID NO: 1827461 - RNA, 19 nt, Artificial Sequence
  Description of Artificial Sequence: Synthetic oligonucleotide
gaguccaagcagaagauug

SEQ ID NO: 1827462 - RNA, 19 nt, Artificial Sequence
  Description of Artificial Sequence: Synthetic oligonucleotide
aagguuuguccucacaaua

SEQ ID NO: 1827463 - RNA, 19 nt, Artificial Sequence
  Description of Artificial Sequence: Synthetic oligonucleotide
uguccucacaauaccagga

SEQ ID NO: 1827464 - RNA, 19 nt, Artificial Sequence
  Description of Artificial Sequence: Synthetic oligonucleotide
auauaugggcacuggaaga

SEQ ID NO: 1827465 - RNA, 19 nt, Artificial Sequence
  Description of Artificial Sequence: Synthetic oligonucleotide
gggagcagaacuuuugagg

SEQ ID NO: 1827466 - RNA, 19 nt, Artificial Sequence
  Description of Artificial Sequence: Synthetic oligonucleotide
guguaugugccucccaagg

SEQ ID NO: 1827467 - RNA, 19 nt, Artificial Sequence
  Description of Artificial Sequence: Synthetic oligonucleotide
aguaccuuccggauacucc

SEQ ID NO: 1827468 - RNA, 19 nt, Artificial Sequence
  Description of Artificial Sequence: Synthetic oligonucleotide
agaacguagagaggcaagg

SEQ ID NO: 1827469 - RNA, 19 nt, Artificial Sequence
  Description of Artificial Sequence: Synthetic oligonucleotide
ucucagucuagauuacugu

SEQ ID NO: 1827470 - RNA, 19 nt, Artificial Sequence
  Description of Artificial Sequence: Synthetic oligonucleotide
uuguauuagcccacauagc

SEQ ID NO: 1827471 - RNA, 19 nt, Artificial Sequence
  Description of Artificial Sequence: Synthetic oligonucleotide
ucgacuauaagagaagcuu

SEQ ID NO: 1827472 - RNA, 19 nt, Artificial Sequence
  Description of Artificial Sequence: Synthetic oligonucleotide
accaaauugaaaagugguc

SEQ ID NO: 1827473 - RNA, 19 nt, Artificial Sequence
  Description of Artificial Sequence: Synthetic oligonucleotide
uucgacuauaagagaagcu

SEQ ID NO: 1827474 - RNA, 19 nt, Artificial Sequence
  Description of Artificial Sequence: Synthetic oligonucleotide
caggaugcaacacauugac

SEQ ID NO: 1827475 - RNA, 19 nt, Artificial Sequence
  Description of Artificial Sequence: Synthetic oligonucleotide
gaugguucacuccgaacug

SEQ ID NO: 1827476 - RNA, 19 nt, Artificial Sequence
  Description of Artificial Sequence: Synthetic oligonucleotide
uuugccccagugaucagca

SEQ ID NO: 1827477 - RNA, 19 nt, Artificial Sequence
  Description of Artificial Sequence: Synthetic oligonucleotide
auuugccccagugaucagc

SEQ ID NO: 1827478 - RNA, 19 nt, Artificial Sequence
  Description of Artificial Sequence: Synthetic oligonucleotide
ugggcaauaggucuuccuc

SEQ ID NO: 1827479 - RNA, 19 nt, Artificial Sequence
  Description of Artificial Sequence: Synthetic oligonucleotide
auaaugggucaccuuauaa

SEQ ID NO: 1827480 - RNA, 19 nt, Artificial Sequence
  Description of Artificial Sequence: Synthetic oligonucleotide
ugauaucccacaguuuucu

SEQ ID NO: 1827481 - RNA, 19 nt, Artificial Sequence
  Description of Artificial Sequence: Synthetic oligonucleotide
cucagucuagauuacuguc

SEQ ID NO: 1827482 - RNA, 19 nt, Artificial Sequence
  Description of Artificial Sequence: Synthetic oligonucleotide
agcccaugacaccaaauug

SEQ ID NO: 1827483 - RNA, 19 nt, Artificial Sequence
  Description of Artificial Sequence: Synthetic oligonucleotide
cuucgacuauaagagaagc

SEQ ID NO: 1827484 - RNA, 19 nt, Artificial Sequence
  Description of Artificial Sequence: Synthetic oligonucleotide
caaccucgggugaagaggc

SEQ ID NO: 1827485 - RNA, 19 nt, Artificial Sequence
  Description of Artificial Sequence: Synthetic oligonucleotide
aguugaugucuccauauuu

SEQ ID NO: 1827486 - RNA, 19 nt, Artificial Sequence
  Description of Artificial Sequence: Synthetic oligonucleotide
uaaauagcccucuuaucuu

SEQ ID NO: 1827487 - RNA, 19 nt, Artificial Sequence
  Description of Artificial Sequence: Synthetic oligonucleotide
uuccgucuucauauauggg

SEQ ID NO: 1827488 - RNA, 19 nt, Artificial Sequence
  Description of Artificial Sequence: Synthetic oligonucleotide
uucaaccucgggugaagag

SEQ ID NO: 1827489 - RNA, 19 nt, Artificial Sequence
  Description of Artificial Sequence: Synthetic oligonucleotide
ccucacaauaccaggaugc

SEQ ID NO: 1827490 - RNA, 19 nt, Artificial Sequence
  Description of Artificial Sequence: Synthetic oligonucleotide
cuacaauccugcugggagc

SEQ ID NO: 1827491 - RNA, 19 nt, Artificial Sequence
  Description of Artificial Sequence: Synthetic oligonucleotide
cacaugcucacacaugcug

SEQ ID NO: 1827492 - RNA, 19 nt, Artificial Sequence
  Description of Artificial Sequence: Synthetic oligonucleotide
aggcuaaguagauggaggu

SEQ ID NO: 1827493 - RNA, 19 nt, Artificial Sequence
  Description of Artificial Sequence: Synthetic oligonucleotide
gcuacugauucauccauag

SEQ ID NO: 1827494 - RNA, 19 nt, Artificial Sequence
  Description of Artificial Sequence: Synthetic oligonucleotide
aagguauaaugggucaccu

SEQ ID NO: 1827495 - RNA, 19 nt, Artificial Sequence
  Description of Artificial Sequence: Synthetic oligonucleotide
gggugaagaggcuaaguag

SEQ ID NO: 1827496 - RNA, 19 nt, Artificial Sequence
  Description of Artificial Sequence: Synthetic oligonucleotide
aaguaccuuccggauacuc

SEQ ID NO: 1827497 - RNA, 19 nt, Artificial Sequence
  Description of Artificial Sequence: Synthetic oligonucleotide
uggcguugggcucuugacc

SEQ ID NO: 1827498 - RNA, 19 nt, Artificial Sequence
  Description of Artificial Sequence: Synthetic oligonucleotide
acaauaccaggaugcaaca

SEQ ID NO: 1827499 - RNA, 19 nt, Artificial Sequence
  Description of Artificial Sequence: Synthetic oligonucleotide
caucccaugaugacccgag

SEQ ID NO: 1827500 - RNA, 19 nt, Artificial Sequence
  Description of Artificial Sequence: Synthetic oligonucleotide
uauaaugggucaccuuaua

SEQ ID NO: 1827501 - RNA, 19 nt, Artificial Sequence
  Description of Artificial Sequence: Synthetic oligonucleotide
augcaccgggccuagagug

SEQ ID NO: 1827502 - RNA, 19 nt, Artificial Sequence
  Description of Artificial Sequence: Synthetic oligonucleotide
agaaacgacuacaauccug

SEQ ID NO: 1827503 - RNA, 19 nt, Artificial Sequence
  Description of Artificial Sequence: Synthetic oligonucleotide
aaaccgccguguugcuagc

SEQ ID NO: 1827504 - RNA, 19 nt, Artificial Sequence
  Description of Artificial Sequence: Synthetic oligonucleotide
ggauacuccuucaaccucg

SEQ ID NO: 1827505 - RNA, 19 nt, Artificial Sequence
  Description of Artificial Sequence: Synthetic oligonucleotide
ucuggcuagcaaugggaug

SEQ ID NO: 1827506 - RNA, 19 nt, Artificial Sequence
  Description of Artificial Sequence: Synthetic oligonucleotide
cuugcuacugauucaucca

SEQ ID NO: 1827507 - RNA, 19 nt, Artificial Sequence
  Description of Artificial Sequence: Synthetic oligonucleotide
agcagaacuuuugaggagu

SEQ ID NO: 1827508 - RNA, 19 nt, Artificial Sequence
  Description of Artificial Sequence: Synthetic oligonucleotide
cuaaguagauggaggucug

SEQ ID NO: 1827509 - RNA, 19 nt, Artificial Sequence
  Description of Artificial Sequence: Synthetic oligonucleotide
uccaaaguaccuuccggau

SEQ ID NO: 1827510 - RNA, 19 nt, Artificial Sequence
  Description of Artificial Sequence: Synthetic oligonucleotide
cguguugcuagccacagcg

SEQ ID NO: 1827511 - RNA, 19 nt, Artificial Sequence
  Description of Artificial Sequence: Synthetic oligonucleotide
uuccggguuggaugcaccg

SEQ ID NO: 1827512 - RNA, 19 nt, Artificial Sequence
  Description of Artificial Sequence: Synthetic oligonucleotide
uggccuuccggguuggaug

SEQ ID NO: 1827513 - RNA, 19 nt, Artificial Sequence
  Description of Artificial Sequence: Synthetic oligonucleotide
cuucauauaugggcacugg

SEQ ID NO: 1827514 - RNA, 19 nt, Artificial Sequence
  Description of Artificial Sequence: Synthetic oligonucleotide
ugaagaggcuaaguagaug

SEQ ID NO: 1827515 - RNA, 19 nt, Artificial Sequence
  Description of Artificial Sequence: Synthetic oligonucleotide
guuccuucuaagcgacggg

SEQ ID NO: 1827516 - RNA, 19 nt, Artificial Sequence
  Description of Artificial Sequence: Synthetic oligonucleotide
uuagccaguuugcuucgac

SEQ ID NO: 1827517 - RNA, 19 nt, Artificial Sequence
  Description of Artificial Sequence: Synthetic oligonucleotide
ucaaacccaucuuccgucu

SEQ ID NO: 1827518 - RNA, 19 nt, Artificial Sequence
  Description of Artificial Sequence: Synthetic oligonucleotide
uacaauccugcugggagca

SEQ ID NO: 1827519 - RNA, 19 nt, Artificial Sequence
  Description of Artificial Sequence: Synthetic oligonucleotide
ugguucacuccgaacugca

SEQ ID NO: 1827520 - RNA, 19 nt, Artificial Sequence
  Description of Artificial Sequence: Synthetic oligonucleotide
ugaugucuccauauuuaua

SEQ ID NO: 1827521 - RNA, 19 nt, Artificial Sequence
  Description of Artificial Sequence: Synthetic oligonucleotide
uccuucuaagcgacgggcu

SEQ ID NO: 1827522 - RNA, 19 nt, Artificial Sequence
  Description of Artificial Sequence: Synthetic oligonucleotide
agaagauuggugaguagga

SEQ ID NO: 1827523 - RNA, 19 nt, Artificial Sequence
  Description of Artificial Sequence: Synthetic oligonucleotide
ucccgacaucccaugauga

SEQ ID NO: 1827524 - RNA, 19 nt, Artificial Sequence
  Description of Artificial Sequence: Synthetic oligonucleotide
cuacugauucauccauagc

SEQ ID NO: 1827525 - RNA, 19 nt, Artificial Sequence
  Description of Artificial Sequence: Synthetic oligonucleotide
aagcagaagauuggugagu

SEQ ID NO: 1827526 - RNA, 19 nt, Artificial Sequence
  Description of Artificial Sequence: Synthetic oligonucleotide
cagaacguagagaggcaag

SEQ ID NO: 1827527 - RNA, 19 nt, Artificial Sequence
  Description of Artificial Sequence: Synthetic oligonucleotide
uccuuacaaucuccaaagu

SEQ ID NO: 1827528 - RNA, 19 nt, Artificial Sequence
  Description of Artificial Sequence: Synthetic oligonucleotide
aaaaguggucuggcuagca

SEQ ID NO: 1827529 - RNA, 19 nt, Artificial Sequence
  Description of Artificial Sequence: Synthetic oligonucleotide
ggcguugggcucuugaccc

SEQ ID NO: 1827530 - RNA, 19 nt, Artificial Sequence
  Description of Artificial Sequence: Synthetic oligonucleotide
uucccgugcaugaggcucc

SEQ ID NO: 1827531 - RNA, 19 nt, Artificial Sequence
  Description of Artificial Sequence: Synthetic oligonucleotide
cuccaaaguaccuuccgga

SEQ ID NO: 1827532 - RNA, 19 nt, Artificial Sequence
  Description of Artificial Sequence: Synthetic oligonucleotide
aacuuuguauuagcccaca

SEQ ID NO: 1827533 - RNA, 19 nt, Artificial Sequence
  Description of Artificial Sequence: Synthetic oligonucleotide
ccgaacugcaucucaaacc

SEQ ID NO: 1827534 - RNA, 19 nt, Artificial Sequence
  Description of Artificial Sequence: Synthetic oligonucleotide
uuguuccuucuaagcgacg

SEQ ID NO: 1827535 - RNA, 19 nt, Artificial Sequence
  Description of Artificial Sequence: Synthetic oligonucleotide
gcccagaugguucacuccg

SEQ ID NO: 1827536 - RNA, 19 nt, Artificial Sequence
  Description of Artificial Sequence: Synthetic oligonucleotide
aggucuuccuccuuacaau

SEQ ID NO: 1827537 - RNA, 19 nt, Artificial Sequence
  Description of Artificial Sequence: Synthetic oligonucleotide
cuaagcgacgggcuaguuc

SEQ ID NO: 1827538 - RNA, 19 nt, Artificial Sequence
  Description of Artificial Sequence: Synthetic oligonucleotide
agccaguuugcuucgacua

SEQ ID NO: 1827539 - RNA, 19 nt, Artificial Sequence
  Description of Artificial Sequence: Synthetic oligonucleotide
cuucuaagcgacgggcuag

SEQ ID NO: 1827540 - RNA, 19 nt, Artificial Sequence
  Description of Artificial Sequence: Synthetic oligonucleotide
ugaguaggaaguggcccag

SEQ ID NO: 1827541 - RNA, 19 nt, Artificial Sequence
  Description of Artificial Sequence: Synthetic oligonucleotide
guugaugucuccauauuua

SEQ ID NO: 1827542 - RNA, 19 nt, Artificial Sequence
  Description of Artificial Sequence: Synthetic oligonucleotide
ugggccccgaaaaccgccg

SEQ ID NO: 1827543 - RNA, 19 nt, Artificial Sequence
  Description of Artificial Sequence: Synthetic oligonucleotide
gucccgacaucccaugaug

SEQ ID NO: 1827544 - RNA, 19 nt, Artificial Sequence
  Description of Artificial Sequence: Synthetic oligonucleotide
uacugucaaucugaagcug

SEQ ID NO: 1827545 - RNA, 19 nt, Artificial Sequence
  Description of Artificial Sequence: Synthetic oligonucleotide
gugcccuucaaauauacau

SEQ ID NO: 1827546 - RNA, 19 nt, Artificial Sequence
  Description of Artificial Sequence: Synthetic oligonucleotide
caccaaauugaaaaguggu

SEQ ID NO: 1827547 - RNA, 19 nt, Artificial Sequence
  Description of Artificial Sequence: Synthetic oligonucleotide
ugggauguguaugugccuc

SEQ ID NO: 1827548 - RNA, 19 nt, Artificial Sequence
  Description of Artificial Sequence: Synthetic oligonucleotide
uugcuucgacuauaagaga

SEQ ID NO: 1827549 - RNA, 19 nt, Artificial Sequence
  Description of Artificial Sequence: Synthetic oligonucleotide
uugggcaauaggucuuccu

SEQ ID NO: 1827550 - RNA, 19 nt, Artificial Sequence
  Description of Artificial Sequence: Synthetic oligonucleotide
caugaggcuccggucaccg

SEQ ID NO: 1827551 - RNA, 19 nt, Artificial Sequence
  Description of Artificial Sequence: Synthetic oligonucleotide
gggcaauaggucuuccucc

SEQ ID NO: 1827552 - RNA, 19 nt, Artificial Sequence
  Description of Artificial Sequence: Synthetic oligonucleotide
cuauaagagaagcuuuugu

SEQ ID NO: 1827553 - RNA, 19 nt, Artificial Sequence
  Description of Artificial Sequence: Synthetic oligonucleotide
cuagccacagcgccccacc

SEQ ID NO: 1827554 - RNA, 19 nt, Artificial Sequence
  Description of Artificial Sequence: Synthetic oligonucleotide
auaugggcacuggaagauc

SEQ ID NO: 1827555 - RNA, 19 nt, Artificial Sequence
  Description of Artificial Sequence: Synthetic oligonucleotide
ugcaugaggcuccggucac

SEQ ID NO: 1827556 - RNA, 19 nt, Artificial Sequence
  Description of Artificial Sequence: Synthetic oligonucleotide
gaugcaacacauugacagu

SEQ ID NO: 1827557 - RNA, 19 nt, Artificial Sequence
  Description of Artificial Sequence: Synthetic oligonucleotide
accuuauaaauagcccucu

SEQ ID NO: 1827558 - RNA, 19 nt, Artificial Sequence
  Description of Artificial Sequence: Synthetic oligonucleotide
gacaucccaugaugacccg

SEQ ID NO: 1827559 - RNA, 19 nt, Artificial Sequence
  Description of Artificial Sequence: Synthetic oligonucleotide
agcaccgucuucccgugca

SEQ ID NO: 1827560 - RNA, 19 nt, Artificial Sequence
  Description of Artificial Sequence: Synthetic oligonucleotide
ugcuacugauucauccaua

SEQ ID NO: 1827561 - RNA, 19 nt, Artificial Sequence
  Description of Artificial Sequence: Synthetic oligonucleotide
accgucuucccgugcauga

SEQ ID NO: 1827562 - RNA, 19 nt, Artificial Sequence
  Description of Artificial Sequence: Synthetic oligonucleotide
guugcuagccacagcgccc

SEQ ID NO: 1827563 - RNA, 19 nt, Artificial Sequence
  Description of Artificial Sequence: Synthetic oligonucleotide
gaagauuggugaguaggaa

SEQ ID NO: 1827564 - RNA, 19 nt, Artificial Sequence
  Description of Artificial Sequence: Synthetic oligonucleotide
gcucuugacccgcagcccg

SEQ ID NO: 1827565 - RNA, 19 nt, Artificial Sequence
  Description of Artificial Sequence: Synthetic oligonucleotide
ccgaaaaccgccguguugc

SEQ ID NO: 1827566 - RNA, 19 nt, Artificial Sequence
  Description of Artificial Sequence: Synthetic oligonucleotide
cccacauagcuccagugcc

SEQ ID NO: 1827567 - RNA, 19 nt, Artificial Sequence
  Description of Artificial Sequence: Synthetic oligonucleotide
cagaugguucacuccgaac

SEQ ID NO: 1827568 - RNA, 19 nt, Artificial Sequence
  Description of Artificial Sequence: Synthetic oligonucleotide
guaccuuccggauacuccu

SEQ ID NO: 1827569 - RNA, 19 nt, Artificial Sequence
  Description of Artificial Sequence: Synthetic oligonucleotide
cauucgcuggccccugggc

SEQ ID NO: 1827570 - RNA, 19 nt, Artificial Sequence
  Description of Artificial Sequence: Synthetic oligonucleotide
uccggguuggaugcaccgg

SEQ ID NO: 1827571 - RNA, 19 nt, Artificial Sequence
  Description of Artificial Sequence: Synthetic oligonucleotide
ugcauucgcuggccccugg

SEQ ID NO: 1827572 - RNA, 19 nt, Artificial Sequence
  Description of Artificial Sequence: Synthetic oligonucleotide
cgacaucccaugaugaccc

SEQ ID NO: 1827573 - RNA, 19 nt, Artificial Sequence
  Description of Artificial Sequence: Synthetic oligonucleotide
cuuccggguuggaugcacc

SEQ ID NO: 1827574 - RNA, 19 nt, Artificial Sequence
  Description of Artificial Sequence: Synthetic oligonucleotide
uggccuucgguggcguugg

SEQ ID NO: 1827575 - RNA, 19 nt, Artificial Sequence
  Description of Artificial Sequence: Synthetic oligonucleotide
acagaacguagagaggcaa

SEQ ID NO: 1827576 - RNA, 19 nt, Artificial Sequence
  Description of Artificial Sequence: Synthetic oligonucleotide
uucuugcuacugauucauc

SEQ ID NO: 1827577 - RNA, 19 nt, Artificial Sequence
  Description of Artificial Sequence: Synthetic oligonucleotide
aaggcucgcacagaacgua

SEQ ID NO: 1827578 - RNA, 19 nt, Artificial Sequence
  Description of Artificial Sequence: Synthetic oligonucleotide
agcuccagugcccuucaaa

SEQ ID NO: 1827579 - RNA, 19 nt, Artificial Sequence
  Description of Artificial Sequence: Synthetic oligonucleotide
cagucuagauuacugucaa

SEQ ID NO: 1827580 - RNA, 19 nt, Artificial Sequence
  Description of Artificial Sequence: Synthetic oligonucleotide
gcuucgacuauaagagaag

SEQ ID NO: 1827581 - RNA, 19 nt, Artificial Sequence
  Description of Artificial Sequence: Synthetic oligonucleotide
guagcacaugcucacacau

SEQ ID NO: 1827582 - RNA, 19 nt, Artificial Sequence
  Description of Artificial Sequence: Synthetic oligonucleotide
guggcguugggcucuugac

SEQ ID NO: 1827583 - RNA, 19 nt, Artificial Sequence
  Description of Artificial Sequence: Synthetic oligonucleotide
gcuaaguagauggaggucu

SEQ ID NO: 1827584 - RNA, 19 nt, Artificial Sequence
  Description of Artificial Sequence: Synthetic oligonucleotide
acgggcuaguucucuggug

SEQ ID NO: 1827585 - RNA, 19 nt, Artificial Sequence
  Description of Artificial Sequence: Synthetic oligonucleotide
uucuaagcgacgggcuagu

SEQ ID NO: 1827586 - RNA, 19 nt, Artificial Sequence
  Description of Artificial Sequence: Synthetic oligonucleotide
gccgcuauuugccccagug

SEQ ID NO: 1827587 - RNA, 19 nt, Artificial Sequence
  Description of Artificial Sequence: Synthetic oligonucleotide
uucgguggcguugggcucu

SEQ ID NO: 1827588 - RNA, 19 nt, Artificial Sequence
  Description of Artificial Sequence: Synthetic oligonucleotide
agauuacugucaaucugaa

SEQ ID NO: 1827589 - RNA, 19 nt, Artificial Sequence
  Description of Artificial Sequence: Synthetic oligonucleotide
agucuagauuacugucaau

SEQ ID NO: 1827590 - RNA, 19 nt, Artificial Sequence
  Description of Artificial Sequence: Synthetic oligonucleotide
aaaguaccuuccggauacu

SEQ ID NO: 1827591 - RNA, 19 nt, Artificial Sequence
  Description of Artificial Sequence: Synthetic oligonucleotide
cccgaccaaagguauaaug

SEQ ID NO: 1827592 - RNA, 19 nt, Artificial Sequence
  Description of Artificial Sequence: Synthetic oligonucleotide
cacagcgccccacccagug

SEQ ID NO: 1827593 - RNA, 19 nt, Artificial Sequence
  Description of Artificial Sequence: Synthetic oligonucleotide
cagaaggcucgcacagaac

SEQ ID NO: 1827594 - RNA, 19 nt, Artificial Sequence
  Description of Artificial Sequence: Synthetic oligonucleotide
gacuacaauccugcuggga

SEQ ID NO: 1827595 - RNA, 19 nt, Artificial Sequence
  Description of Artificial Sequence: Synthetic oligonucleotide
cucacacaugcugcucccg

SEQ ID NO: 1827596 - RNA, 19 nt, Artificial Sequence
  Description of Artificial Sequence: Synthetic oligonucleotide
cacagaacguagagaggca

SEQ ID NO: 1827597 - RNA, 19 nt, Artificial Sequence
  Description of Artificial Sequence: Synthetic oligonucleotide
uggcgcggucccgacaucc

SEQ ID NO: 1827598 - RNA, 19 nt, Artificial Sequence
  Description of Artificial Sequence: Synthetic oligonucleotide
gggauguguaugugccucc

SEQ ID NO: 1827599 - RNA, 19 nt, Artificial Sequence
  Description of Artificial Sequence: Synthetic oligonucleotide
aguuuucuugcuacugauu

SEQ ID NO: 1827600 - RNA, 19 nt, Artificial Sequence
  Description of Artificial Sequence: Synthetic oligonucleotide
ccgucuucauauaugggca

SEQ ID NO: 1827601 - RNA, 19 nt, Artificial Sequence
  Description of Artificial Sequence: Synthetic oligonucleotide
gcagaagauuggugaguag

SEQ ID NO: 1827602 - RNA, 19 nt, Artificial Sequence
  Description of Artificial Sequence: Synthetic oligonucleotide
caguuugcuucgacuauaa

SEQ ID NO: 1827603 - RNA, 19 nt, Artificial Sequence
  Description of Artificial Sequence: Synthetic oligonucleotide
ugccauggccuuccggguu

SEQ ID NO: 1827604 - RNA, 19 nt, Artificial Sequence
  Description of Artificial Sequence: Synthetic oligonucleotide
aggaguccaagcagaagau

SEQ ID NO: 1827605 - RNA, 19 nt, Artificial Sequence
  Description of Artificial Sequence: Synthetic oligonucleotide
uccuucaaccucgggugaa

SEQ ID NO: 1827606 - RNA, 19 nt, Artificial Sequence
  Description of Artificial Sequence: Synthetic oligonucleotide
ccggguuggaugcaccggg

SEQ ID NO: 1827607 - RNA, 19 nt, Artificial Sequence
  Description of Artificial Sequence: Synthetic oligonucleotide
cuucgguggcguugggcuc

SEQ ID NO: 1827608 - RNA, 19 nt, Artificial Sequence
  Description of Artificial Sequence: Synthetic oligonucleotide
gcagaaggcucgcacagaa

SEQ ID NO: 1827609 - RNA, 19 nt, Artificial Sequence
  Description of Artificial Sequence: Synthetic oligonucleotide
agugcccuucaaauauaca

SEQ ID NO: 1827610 - RNA, 19 nt, Artificial Sequence
  Description of Artificial Sequence: Synthetic oligonucleotide
aggaugcaacacauugaca

SEQ ID NO: 1827611 - RNA, 19 nt, Artificial Sequence
  Description of Artificial Sequence: Synthetic oligonucleotide
gaacguagagaggcaaggu

SEQ ID NO: 1827612 - RNA, 19 nt, Artificial Sequence
  Description of Artificial Sequence: Synthetic oligonucleotide
acaucccaugaugacccga

SEQ ID NO: 1827613 - RNA, 19 nt, Artificial Sequence
  Description of Artificial Sequence: Synthetic oligonucleotide
ggguuggaugcaccgggcc

SEQ ID NO: 1827614 - RNA, 19 nt, Artificial Sequence
  Description of Artificial Sequence: Synthetic oligonucleotide
uaccaggaugcaacacauu

SEQ ID NO: 1827615 - RNA, 19 nt, Artificial Sequence
  Description of Artificial Sequence: Synthetic oligonucleotide
aggcucgcacagaacguag

SEQ ID NO: 1827616 - RNA, 19 nt, Artificial Sequence
  Description of Artificial Sequence: Synthetic oligonucleotide
cuggccuucgguggcguug

SEQ ID NO: 1827617 - RNA, 19 nt, Artificial Sequence
  Description of Artificial Sequence: Synthetic oligonucleotide
cuugacgaccagcuggccu

SEQ ID NO: 1827618 - RNA, 19 nt, Artificial Sequence
  Description of Artificial Sequence: Synthetic oligonucleotide
cucgcacagaacguagaga

SEQ ID NO: 1827619 - RNA, 19 nt, Artificial Sequence
  Description of Artificial Sequence: Synthetic oligonucleotide
ggauguguaugugccuccc

SEQ ID NO: 1827620 - RNA, 19 nt, Artificial Sequence
  Description of Artificial Sequence: Synthetic oligonucleotide
uggcuagcaaugggaugug

SEQ ID NO: 1827621 - RNA, 19 nt, Artificial Sequence
  Description of Artificial Sequence: Synthetic oligonucleotide
cuugacccgcagcccggcc

SEQ ID NO: 1827622 - RNA, 19 nt, Artificial Sequence
  Description of Artificial Sequence: Synthetic oligonucleotide
gucgccacugccauggccu

SEQ ID NO: 1827623 - RNA, 19 nt, Artificial Sequence
  Description of Artificial Sequence: Synthetic oligonucleotide
ucaccgccucccugcauuc

SEQ ID NO: 1827624 - RNA, 19 nt, Artificial Sequence
  Description of Artificial Sequence: Synthetic oligonucleotide
ccuccuuacaaucuccaaa

SEQ ID NO: 1827625 - RNA, 19 nt, Artificial Sequence
  Description of Artificial Sequence: Synthetic oligonucleotide
cucccgaccaaagguauaa

SEQ ID NO: 1827626 - RNA, 19 nt, Artificial Sequence
  Description of Artificial Sequence: Synthetic oligonucleotide
cugauucauccauagcuuu

SEQ ID NO: 1827627 - RNA, 19 nt, Artificial Sequence
  Description of Artificial Sequence: Synthetic oligonucleotide
uaccuuccggauacuccuu

SEQ ID NO: 1827628 - RNA, 19 nt, Artificial Sequence
  Description of Artificial Sequence: Synthetic oligonucleotide
gcauucgcuggccccuggg

SEQ ID NO: 1827629 - RNA, 19 nt, Artificial Sequence
  Description of Artificial Sequence: Synthetic oligonucleotide
gaaggcucgcacagaacgu

SEQ ID NO: 1827630 - RNA, 19 nt, Artificial Sequence
  Description of Artificial Sequence: Synthetic oligonucleotide
guauaaugggucaccuuau

SEQ ID NO: 1827631 - RNA, 19 nt, Artificial Sequence
  Description of Artificial Sequence: Synthetic oligonucleotide
gacgggcuaguucucuggu

SEQ ID NO: 1827632 - RNA, 19 nt, Artificial Sequence
  Description of Artificial Sequence: Synthetic oligonucleotide
cagcucggaggccguggcg

SEQ ID NO: 1827633 - RNA, 19 nt, Artificial Sequence
  Description of Artificial Sequence: Synthetic oligonucleotide
ucccgugcaugaggcuccg

SEQ ID NO: 1827634 - RNA, 19 nt, Artificial Sequence
  Description of Artificial Sequence: Synthetic oligonucleotide
ggacgucuagccugggcuc

SEQ ID NO: 1827635 - RNA, 19 nt, Artificial Sequence
  Description of Artificial Sequence: Synthetic oligonucleotide
acaauccugcugggagcag

SEQ ID NO: 1827636 - RNA, 19 nt, Artificial Sequence
  Description of Artificial Sequence: Synthetic oligonucleotide
cacagucgccacugccaug

SEQ ID NO: 1827637 - RNA, 19 nt, Artificial Sequence
  Description of Artificial Sequence: Synthetic oligonucleotide
ccagugaucagcaccgucu

SEQ ID NO: 1827638 - RNA, 19 nt, Artificial Sequence
  Description of Artificial Sequence: Synthetic oligonucleotide
cuucaaccucgggugaaga

SEQ ID NO: 1827639 - RNA, 19 nt, Artificial Sequence
  Description of Artificial Sequence: Synthetic oligonucleotide
caugcugcucccgaccaaa

SEQ ID NO: 1827640 - RNA, 19 nt, Artificial Sequence
  Description of Artificial Sequence: Synthetic oligonucleotide
caaguagcacaugcucaca

SEQ ID NO: 1827641 - RNA, 19 nt, Artificial Sequence
  Description of Artificial Sequence: Synthetic oligonucleotide
caaccaucacuucacugau

SEQ ID NO: 1827642 - RNA, 19 nt, Artificial Sequence
  Description of Artificial Sequence: Synthetic oligonucleotide
gacgaccagcuggccuucg

SEQ ID NO: 1827643 - RNA, 19 nt, Artificial Sequence
  Description of Artificial Sequence: Synthetic oligonucleotide
gcaaugggauguguaugug

SEQ ID NO: 1827644 - RNA, 19 nt, Artificial Sequence
  Description of Artificial Sequence: Synthetic oligonucleotide
ccuucucagucuagauuac

SEQ ID NO: 1827645 - RNA, 19 nt, Artificial Sequence
  Description of Artificial Sequence: Synthetic oligonucleotide
gcuauuugccccagugauc

SEQ ID NO: 1827646 - RNA, 19 nt, Artificial Sequence
  Description of Artificial Sequence: Synthetic oligonucleotide
caggccgcuauuugcccca

SEQ ID NO: 1827647 - RNA, 19 nt, Artificial Sequence
  Description of Artificial Sequence: Synthetic oligonucleotide
gaaaaccgccguguugcua

SEQ ID NO: 1827648 - RNA, 19 nt, Artificial Sequence
  Description of Artificial Sequence: Synthetic oligonucleotide
cccaugacaccaaauugaa

SEQ ID NO: 1827649 - RNA, 19 nt, Artificial Sequence
  Description of Artificial Sequence: Synthetic oligonucleotide
cccgacaucccaugaugac

SEQ ID NO: 1827650 - RNA, 19 nt, Artificial Sequence
  Description of Artificial Sequence: Synthetic oligonucleotide
guccucacaauaccaggau

SEQ ID NO: 1827651 - RNA, 19 nt, Artificial Sequence
  Description of Artificial Sequence: Synthetic oligonucleotide
ccaggccgcuauuugcccc

SEQ ID NO: 1827652 - RNA, 19 nt, Artificial Sequence
  Description of Artificial Sequence: Synthetic oligonucleotide
ggcuaaguagauggagguc

SEQ ID NO: 1827653 - RNA, 19 nt, Artificial Sequence
  Description of Artificial Sequence: Synthetic oligonucleotide
uugccccagugaucagcac

SEQ ID NO: 1827654 - RNA, 19 nt, Artificial Sequence
  Description of Artificial Sequence: Synthetic oligonucleotide
aaccucgggugaagaggcu

SEQ ID NO: 1827655 - RNA, 19 nt, Artificial Sequence
  Description of Artificial Sequence: Synthetic oligonucleotide
accucgggugaagaggcua

SEQ ID NO: 1827656 - RNA, 19 nt, Artificial Sequence
  Description of Artificial Sequence: Synthetic oligonucleotide
gguuggaugcaccgggccu

SEQ ID NO: 1827657 - RNA, 19 nt, Artificial Sequence
  Description of Artificial Sequence: Synthetic oligonucleotide
cgucuucauauaugggcac

SEQ ID NO: 1827658 - RNA, 19 nt, Artificial Sequence
  Description of Artificial Sequence: Synthetic oligonucleotide
gcucggaggccguggcgcg

SEQ ID NO: 1827659 - RNA, 19 nt, Artificial Sequence
  Description of Artificial Sequence: Synthetic oligonucleotide
gcguugggcucuugacccg

SEQ ID NO: 1827660 - RNA, 19 nt, Artificial Sequence
  Description of Artificial Sequence: Synthetic oligonucleotide
gccguguugcuagccacag

SEQ ID NO: 1827661 - RNA, 19 nt, Artificial Sequence
  Description of Artificial Sequence: Synthetic oligonucleotide
gcuagcaaugggaugugua

SEQ ID NO: 1827662 - RNA, 19 nt, Artificial Sequence
  Description of Artificial Sequence: Synthetic oligonucleotide
cccugcauucgcuggcccc

SEQ ID NO: 1827663 - RNA, 19 nt, Artificial Sequence
  Description of Artificial Sequence: Synthetic oligonucleotide
ucuaagcgacgggcuaguu

SEQ ID NO: 1827664 - RNA, 19 nt, Artificial Sequence
  Description of Artificial Sequence: Synthetic oligonucleotide
gugaagaggcuaaguagau

SEQ ID NO: 1827665 - RNA, 19 nt, Artificial Sequence
  Description of Artificial Sequence: Synthetic oligonucleotide
ucccgaccaaagguauaau

SEQ ID NO: 1827666 - RNA, 19 nt, Artificial Sequence
  Description of Artificial Sequence: Synthetic oligonucleotide
cgacgggcuaguucucugg

SEQ ID NO: 1827667 - RNA, 19 nt, Artificial Sequence
  Description of Artificial Sequence: Synthetic oligonucleotide
caucuuccgucuucauaua

SEQ ID NO: 1827668 - RNA, 19 nt, Artificial Sequence
  Description of Artificial Sequence: Synthetic oligonucleotide
ggagcugacccgccgccuc

SEQ ID NO: 1827669 - RNA, 19 nt, Artificial Sequence
  Description of Artificial Sequence: Synthetic oligonucleotide
gucaccgccucccugcauu

SEQ ID NO: 1827670 - RNA, 19 nt, Artificial Sequence
  Description of Artificial Sequence: Synthetic oligonucleotide
ggccuagagugcagguucc

SEQ ID NO: 1827671 - RNA, 19 nt, Artificial Sequence
  Description of Artificial Sequence: Synthetic oligonucleotide
gcagaacuuuugaggaguc

SEQ ID NO: 1827672 - RNA, 19 nt, Artificial Sequence
  Description of Artificial Sequence: Synthetic oligonucleotide
gccuagagugcagguuccg

SEQ ID NO: 1827673 - RNA, 19 nt, Artificial Sequence
  Description of Artificial Sequence: Synthetic oligonucleotide
gcuccggucaccgccuccc

SEQ ID NO: 1827674 - RNA, 19 nt, Artificial Sequence
  Description of Artificial Sequence: Synthetic oligonucleotide
ugacgaccagcuggccuuc

SEQ ID NO: 1827675 - RNA, 19 nt, Artificial Sequence
  Description of Artificial Sequence: Synthetic oligonucleotide
uggccccugggccccgaaa

SEQ ID NO: 1827676 - RNA, 19 nt, Artificial Sequence
  Description of Artificial Sequence: Synthetic oligonucleotide
ggcucuugacccgcagccc

SEQ ID NO: 1827677 - RNA, 19 nt, Artificial Sequence
  Description of Artificial Sequence: Synthetic oligonucleotide
caccgggccuagagugcag

SEQ ID NO: 1827678 - RNA, 19 nt, Artificial Sequence
  Description of Artificial Sequence: Synthetic oligonucleotide
ccuucgguggcguugggcu

SEQ ID NO: 1827679 - RNA, 19 nt, Artificial Sequence
  Description of Artificial Sequence: Synthetic oligonucleotide
ccaaaguaccuuccggaua

SEQ ID NO: 1827680 - RNA, 19 nt, Artificial Sequence
  Description of Artificial Sequence: Synthetic oligonucleotide
ggccccgaaaaccgccgug

SEQ ID NO: 1827681 - RNA, 19 nt, Artificial Sequence
  Description of Artificial Sequence: Synthetic oligonucleotide
ccugggccccgaaaaccgc

SEQ ID NO: 1827682 - RNA, 19 nt, Artificial Sequence
  Description of Artificial Sequence: Synthetic oligonucleotide
acgucuagccugggcuccu

SEQ ID NO: 1827683 - RNA, 19 nt, Artificial Sequence
  Description of Artificial Sequence: Synthetic oligonucleotide
cccagugaucagcaccguc

SEQ ID NO: 1827684 - RNA, 19 nt, Artificial Sequence
  Description of Artificial Sequence: Synthetic oligonucleotide
cugcauucgcuggccccug

SEQ ID NO: 1827685 - RNA, 19 nt, Artificial Sequence
  Description of Artificial Sequence: Synthetic oligonucleotide
cgacuacaauccugcuggg

SEQ ID NO: 1827686 - RNA, 19 nt, Artificial Sequence
  Description of Artificial Sequence: Synthetic oligonucleotide
ccaugacaccaaauugaaa

SEQ ID NO: 1827687 - RNA, 19 nt, Artificial Sequence
  Description of Artificial Sequence: Synthetic oligonucleotide
ccuuccggauacuccuuca

SEQ ID NO: 1827688 - RNA, 19 nt, Artificial Sequence
  Description of Artificial Sequence: Synthetic oligonucleotide
ccuucuaagcgacgggcua

SEQ ID NO: 1827689 - RNA, 19 nt, Artificial Sequence
  Description of Artificial Sequence: Synthetic oligonucleotide
agcugacccgccgccuccu

SEQ ID NO: 1827690 - RNA, 19 nt, Artificial Sequence
  Description of Artificial Sequence: Synthetic oligonucleotide
cagugaucagcaccgucuu

SEQ ID NO: 1827691 - RNA, 19 nt, Artificial Sequence
  Description of Artificial Sequence: Synthetic oligonucleotide
ggcuaguucucuggugaaa

SEQ ID NO: 1827692 - RNA, 19 nt, Artificial Sequence
  Description of Artificial Sequence: Synthetic oligonucleotide
agcuggccuucgguggcgu

SEQ ID NO: 1827693 - RNA, 19 nt, Artificial Sequence
  Description of Artificial Sequence: Synthetic oligonucleotide
gcaugaggcuccggucacc

SEQ ID NO: 1827694 - RNA, 19 nt, Artificial Sequence
  Description of Artificial Sequence: Synthetic oligonucleotide
gccccugggccccgaaaac

SEQ ID NO: 1827695 - RNA, 19 nt, Artificial Sequence
  Description of Artificial Sequence: Synthetic oligonucleotide
ccucgggugaagaggcuaa

SEQ ID NO: 1827696 - RNA, 19 nt, Artificial Sequence
  Description of Artificial Sequence: Synthetic oligonucleotide
ccguguugcuagccacagc

SEQ ID NO: 1827697 - RNA, 19 nt, Artificial Sequence
  Description of Artificial Sequence: Synthetic oligonucleotide
ggucccgacaucccaugau

SEQ ID NO: 1827698 - RNA, 19 nt, Artificial Sequence
  Description of Artificial Sequence: Synthetic oligonucleotide
ggcuccggucaccgccucc

SEQ ID NO: 1827699 - RNA, 19 nt, Artificial Sequence
  Description of Artificial Sequence: Synthetic oligonucleotide
gcuagccacagcgccccac

SEQ ID NO: 1827700 - RNA, 19 nt, Artificial Sequence
  Description of Artificial Sequence: Synthetic oligonucleotide
ccaguuugcuucgacuaua

SEQ ID NO: 1827701 - RNA, 19 nt, Artificial Sequence
  Description of Artificial Sequence: Synthetic oligonucleotide
ccgucuucccgugcaugag

SEQ ID NO: 1827702 - RNA, 19 nt, Artificial Sequence
  Description of Artificial Sequence: Synthetic oligonucleotide
ggcgcggucccgacauccc

SEQ ID NO: 1827703 - RNA, 19 nt, Artificial Sequence
  Description of Artificial Sequence: Synthetic oligonucleotide
cccagaugguucacuccga

SEQ ID NO: 1827704 - RNA, 19 nt, Artificial Sequence
  Description of Artificial Sequence: Synthetic oligonucleotide
cgacuauaagagaagcuuu

SEQ ID NO: 1827705 - RNA, 19 nt, Artificial Sequence
  Description of Artificial Sequence: Synthetic oligonucleotide
cguugggcucuugacccgc

SEQ ID NO: 1827706 - RNA, 19 nt, Artificial Sequence
  Description of Artificial Sequence: Synthetic oligonucleotide
gacccgcagcccggccgag

SEQ ID NO: 1827707 - RNA, 19 nt, Artificial Sequence
  Description of Artificial Sequence: Synthetic oligonucleotide
gcgcggucccgacauccca

SEQ ID NO: 1827708 - RNA, 19 nt, Artificial Sequence
  Description of Artificial Sequence: Synthetic oligonucleotide
ggccuucgguggcguuggg

SEQ ID NO: 1827709 - RNA, 19 nt, Artificial Sequence
  Description of Artificial Sequence: Synthetic oligonucleotide
gcccggccgagcuccuggc

SEQ ID NO: 1827710 - RNA, 19 nt, Artificial Sequence
  Description of Artificial Sequence: Synthetic oligonucleotide
ccacaguuuucuugcuacu

SEQ ID NO: 1827711 - RNA, 19 nt, Artificial Sequence
  Description of Artificial Sequence: Synthetic oligonucleotide
ccgugcaugaggcuccggu

SEQ ID NO: 1827712 - RNA, 19 nt, Artificial Sequence
  Description of Artificial Sequence: Synthetic oligonucleotide
ggccguggcgcggcccagg

SEQ ID NO: 1827713 - RNA, 19 nt, Artificial Sequence
  Description of Artificial Sequence: Synthetic oligonucleotide
gccccgaaaaccgccgugu

SEQ ID NO: 1827714 - RNA, 19 nt, Artificial Sequence
  Description of Artificial Sequence: Synthetic oligonucleotide
gcaauaggucuuccuccuu

SEQ ID NO: 1827715 - RNA, 19 nt, Artificial Sequence
  Description of Artificial Sequence: Synthetic oligonucleotide
aggcaagguccagcuccuu

SEQ ID NO: 1827716 - RNA, 19 nt, Artificial Sequence
  Description of Artificial Sequence: Synthetic oligonucleotide
ucgguggcguugggcucuu

SEQ ID NO: 1827717 - RNA, 19 nt, Artificial Sequence
  Description of Artificial Sequence: Synthetic oligonucleotide
cgccucccugcauucgcug

SEQ ID NO: 1827718 - RNA, 19 nt, Artificial Sequence
  Description of Artificial Sequence: Synthetic oligonucleotide
cauggccuuccggguugga

SEQ ID NO: 1827719 - RNA, 19 nt, Artificial Sequence
  Description of Artificial Sequence: Synthetic oligonucleotide
ggcuagcaaugggaugugu

SEQ ID NO: 1827720 - RNA, 19 nt, Artificial Sequence
  Description of Artificial Sequence: Synthetic oligonucleotide
gcugacccgccgccuccuc

SEQ ID NO: 1827721 - RNA, 19 nt, Artificial Sequence
  Description of Artificial Sequence: Synthetic oligonucleotide
cgccguguugcuagccaca

SEQ ID NO: 1827722 - RNA, 19 nt, Artificial Sequence
  Description of Artificial Sequence: Synthetic oligonucleotide
gcucccgaccaaagguaua

SEQ ID NO: 1827723 - RNA, 19 nt, Artificial Sequence
  Description of Artificial Sequence: Synthetic oligonucleotide
ccacccagugcggccagga

SEQ ID NO: 1827724 - RNA, 19 nt, Artificial Sequence
  Description of Artificial Sequence: Synthetic oligonucleotide
ccguggcgcggcccaggcc

SEQ ID NO: 1827725 - RNA, 19 nt, Artificial Sequence
  Description of Artificial Sequence: Synthetic oligonucleotide
cccgugcaugaggcuccgg

SEQ ID NO: 1827726 - RNA, 19 nt, Artificial Sequence
  Description of Artificial Sequence: Synthetic oligonucleotide
cggucccgacaucccauga

SEQ ID NO: 1827727 - RNA, 19 nt, Artificial Sequence
  Description of Artificial Sequence: Synthetic oligonucleotide
ccuccgcucuggcgcgguc

SEQ ID NO: 1827728 - RNA, 19 nt, Artificial Sequence
  Description of Artificial Sequence: Synthetic oligonucleotide
cgaaaaccgccguguugcu

SEQ ID NO: 1827729 - RNA, 19 nt, Artificial Sequence
  Description of Artificial Sequence: Synthetic oligonucleotide
ccgcucuggcgcggucccg

SEQ ID NO: 1827730 - RNA, 19 nt, Artificial Sequence
  Description of Artificial Sequence: Synthetic oligonucleotide
ggucaccgccucccugcau

SEQ ID NO: 1827731 - RNA, 19 nt, Artificial Sequence
  Description of Artificial Sequence: Synthetic oligonucleotide
ccgggccuagagugcaggu

SEQ ID NO: 1827732 - RNA, 19 nt, Artificial Sequence
  Description of Artificial Sequence: Synthetic oligonucleotide
ggagcgccgcagccacagu

SEQ ID NO: 1827733 - RNA, 19 nt, Artificial Sequence
  Description of Artificial Sequence: Synthetic oligonucleotide
ggccgcuauuugccccagu

SEQ ID NO: 1827734 - RNA, 19 nt, Artificial Sequence
  Description of Artificial Sequence: Synthetic oligonucleotide
ccgccucccugcauucgcu

SEQ ID NO: 1827735 - RNA, 19 nt, Artificial Sequence
  Description of Artificial Sequence: Synthetic oligonucleotide
cgucuagccugggcuccuc

SEQ ID NO: 1827736 - RNA, 19 nt, Artificial Sequence
  Description of Artificial Sequence: Synthetic oligonucleotide
gcggcccaggccgcuauuu

SEQ ID NO: 1827737 - RNA, 19 nt, Artificial Sequence
  Description of Artificial Sequence: Synthetic oligonucleotide
cgcggucccgacaucccau

SEQ ID NO: 1827738 - RNA, 19 nt, Artificial Sequence
  Description of Artificial Sequence: Synthetic oligonucleotide
ccccgaaaaccgccguguu

SEQ ID NO: 1827739 - RNA, 19 nt, Artificial Sequence
  Description of Artificial Sequence: Synthetic oligonucleotide
uuagcuuugagguagaagg

SEQ ID NO: 1827740 - RNA, 19 nt, Artificial Sequence
  Description of Artificial Sequence: Synthetic oligonucleotide
uuuacaauuagcuuugagg

SEQ ID NO: 1827741 - RNA, 19 nt, Artificial Sequence
  Description of Artificial Sequence: Synthetic oligonucleotide
ucuacagacagaaugaagg

SEQ ID NO: 1827742 - RNA, 19 nt, Artificial Sequence
  Description of Artificial Sequence: Synthetic oligonucleotide
aacaaacugauacagcgac

SEQ ID NO: 1827743 - RNA, 19 nt, Artificial Sequence
  Description of Artificial Sequence: Synthetic oligonucleotide
aaaucaggguucuacagac

SEQ ID NO: 1827744 - RNA, 19 nt, Artificial Sequence
  Description of Artificial Sequence: Synthetic oligonucleotide
ucuuguauugguaagugag

SEQ ID NO: 1827745 - RNA, 19 nt, Artificial Sequence
  Description of Artificial Sequence: Synthetic oligonucleotide
guaagugaggcuuugaucc

SEQ ID NO: 1827746 - RNA, 19 nt, Artificial Sequence
  Description of Artificial Sequence: Synthetic oligonucleotide
ugccacaauauuauaaugg

SEQ ID NO: 1827747 - RNA, 19 nt, Artificial Sequence
  Description of Artificial Sequence: Synthetic oligonucleotide
aauauuauaauggcugaag

SEQ ID NO: 1827748 - RNA, 19 nt, Artificial Sequence
  Description of Artificial Sequence: Synthetic oligonucleotide
acuaaggccauucagcagg

SEQ ID NO: 1827749 - RNA, 19 nt, Artificial Sequence
  Description of Artificial Sequence: Synthetic oligonucleotide
uucaauucgcagcagacag

SEQ ID NO: 1827750 - RNA, 19 nt, Artificial Sequence
  Description of Artificial Sequence: Synthetic oligonucleotide
ugagcauggaagaagaugu

SEQ ID NO: 1827751 - RNA, 19 nt, Artificial Sequence
  Description of Artificial Sequence: Synthetic oligonucleotide
aagguuauugaguuccggg

SEQ ID NO: 1827752 - RNA, 19 nt, Artificial Sequence
  Description of Artificial Sequence: Synthetic oligonucleotide
gaagugaugcacaagaaag

SEQ ID NO: 1827753 - RNA, 19 nt, Artificial Sequence
  Description of Artificial Sequence: Synthetic oligonucleotide
ugagacugaagucaccugg

SEQ ID NO: 1827754 - RNA, 19 nt, Artificial Sequence
  Description of Artificial Sequence: Synthetic oligonucleotide
uucacuuuaccacaguggc

SEQ ID NO: 1827755 - RNA, 19 nt, Artificial Sequence
  Description of Artificial Sequence: Synthetic oligonucleotide
auucgcagcagacaguggc

SEQ ID NO: 1827756 - RNA, 19 nt, Artificial Sequence
  Description of Artificial Sequence: Synthetic oligonucleotide
gaugccauucuccuuaucc

SEQ ID NO: 1827757 - RNA, 19 nt, Artificial Sequence
  Description of Artificial Sequence: Synthetic oligonucleotide
uauuauaauggcugaagga

SEQ ID NO: 1827758 - RNA, 19 nt, Artificial Sequence
  Description of Artificial Sequence: Synthetic oligonucleotide
cuaguugucagccaggaug

SEQ ID NO: 1827759 - RNA, 19 nt, Artificial Sequence
  Description of Artificial Sequence: Synthetic oligonucleotide
uugaguuccgggaacauug

SEQ ID NO: 1827760 - RNA, 19 nt, Artificial Sequence
  Description of Artificial Sequence: Synthetic oligonucleotide
gauagcaggagacauuccc

SEQ ID NO: 1827761 - RNA, 19 nt, Artificial Sequence
  Description of Artificial Sequence: Synthetic oligonucleotide
acagaaugaaggccgaacg

SEQ ID NO: 1827762 - RNA, 19 nt, Artificial Sequence
  Description of Artificial Sequence: Synthetic oligonucleotide
acaauuagcuuugagguag

SEQ ID NO: 1827763 - RNA, 19 nt, Artificial Sequence
  Description of Artificial Sequence: Synthetic oligonucleotide
uauaauggcugaaggacug

SEQ ID NO: 1827764 - RNA, 19 nt, Artificial Sequence
  Description of Artificial Sequence: Synthetic oligonucleotide
agcucgaaggaccaggugg

SEQ ID NO: 1827765 - RNA, 19 nt, Artificial Sequence
  Description of Artificial Sequence: Synthetic oligonucleotide
aaagcugccaucugucuug

SEQ ID NO: 1827766 - RNA, 19 nt, Artificial Sequence
  Description of Artificial Sequence: Synthetic oligonucleotide
guugucaugcacaagggcg

SEQ ID NO: 1827767 - RNA, 19 nt, Artificial Sequence
  Description of Artificial Sequence: Synthetic oligonucleotide
uccagcgugaccaaaguca

SEQ ID NO: 1827768 - RNA, 19 nt, Artificial Sequence
  Description of Artificial Sequence: Synthetic oligonucleotide
aguagagucaguuuccccu

SEQ ID NO: 1827769 - RNA, 19 nt, Artificial Sequence
  Description of Artificial Sequence: Synthetic oligonucleotide
gagaagguuauugaguucc

SEQ ID NO: 1827770 - RNA, 19 nt, Artificial Sequence
  Description of Artificial Sequence: Synthetic oligonucleotide
agacuuuacaauuagcuuu

SEQ ID NO: 1827771 - RNA, 19 nt, Artificial Sequence
  Description of Artificial Sequence: Synthetic oligonucleotide
gaugacuaaggccauucag

SEQ ID NO: 1827772 - RNA, 19 nt, Artificial Sequence
  Description of Artificial Sequence: Synthetic oligonucleotide
uguaucuuguauugguaag

SEQ ID NO: 1827773 - RNA, 19 nt, Artificial Sequence
  Description of Artificial Sequence: Synthetic oligonucleotide
agcaacugccuccaggccc

SEQ ID NO: 1827774 - RNA, 19 nt, Artificial Sequence
  Description of Artificial Sequence: Synthetic oligonucleotide
uuauaauggcugaaggacu

SEQ ID NO: 1827775 - RNA, 19 nt, Artificial Sequence
  Description of Artificial Sequence: Synthetic oligonucleotide
cacauuucccuucaauucg

SEQ ID NO: 1827776 - RNA, 19 nt, Artificial Sequence
  Description of Artificial Sequence: Synthetic oligonucleotide
cuuguauugguaagugagg

SEQ ID NO: 1827777 - RNA, 19 nt, Artificial Sequence
  Description of Artificial Sequence: Synthetic oligonucleotide
acagacagaaugaaggccg

SEQ ID NO: 1827778 - RNA, 19 nt, Artificial Sequence
  Description of Artificial Sequence: Synthetic oligonucleotide
gaaggagaggaagugaugc

SEQ ID NO: 1827779 - RNA, 19 nt, Artificial Sequence
  Description of Artificial Sequence: Synthetic oligonucleotide
aucaggguucuacagacag

SEQ ID NO: 1827780 - RNA, 19 nt, Artificial Sequence
  Description of Artificial Sequence: Synthetic oligonucleotide
acugagguuguccaccaac

SEQ ID NO: 1827781 - RNA, 19 nt, Artificial Sequence
  Description of Artificial Sequence: Synthetic oligonucleotide
acuuccacgggguuucccc

SEQ ID NO: 1827782 - RNA, 19 nt, Artificial Sequence
  Description of Artificial Sequence: Synthetic oligonucleotide
guugcaaccuccuccagag

SEQ ID NO: 1827783 - RNA, 19 nt, Artificial Sequence
  Description of Artificial Sequence: Synthetic oligonucleotide
uguccuguaucuuguauug

SEQ ID NO: 1827784 - RNA, 19 nt, Artificial Sequence
  Description of Artificial Sequence: Synthetic oligonucleotide
acugggaacuuccacgggg

SEQ ID NO: 1827785 - RNA, 19 nt, Artificial Sequence
  Description of Artificial Sequence: Synthetic oligonucleotide
acaauauuauaauggcuga

SEQ ID NO: 1827786 - RNA, 19 nt, Artificial Sequence
  Description of Artificial Sequence: Synthetic oligonucleotide
gucccgaacaaacugauac

SEQ ID NO: 1827787 - RNA, 19 nt, Artificial Sequence
  Description of Artificial Sequence: Synthetic oligonucleotide
agcauggaagaagaugucc

SEQ ID NO: 1827788 - RNA, 19 nt, Artificial Sequence
  Description of Artificial Sequence: Synthetic oligonucleotide
uacugcaugaaguccagca

SEQ ID NO: 1827789 - RNA, 19 nt, Artificial Sequence
  Description of Artificial Sequence: Synthetic oligonucleotide
uuguauugguaagugaggc

SEQ ID NO: 1827790 - RNA, 19 nt, Artificial Sequence
  Description of Artificial Sequence: Synthetic oligonucleotide
ugugccacaauauuauaau

SEQ ID NO: 1827791 - RNA, 19 nt, Artificial Sequence
  Description of Artificial Sequence: Synthetic oligonucleotide
acuguccuaguugucagcc

SEQ ID NO: 1827792 - RNA, 19 nt, Artificial Sequence
  Description of Artificial Sequence: Synthetic oligonucleotide
uccgggaacauugggaacg

SEQ ID NO: 1827793 - RNA, 19 nt, Artificial Sequence
  Description of Artificial Sequence: Synthetic oligonucleotide
cucuuaaaggcacagccac

SEQ ID NO: 1827794 - RNA, 19 nt, Artificial Sequence
  Description of Artificial Sequence: Synthetic oligonucleotide
uucccuucaauucgcagca

SEQ ID NO: 1827795 - RNA, 19 nt, Artificial Sequence
  Description of Artificial Sequence: Synthetic oligonucleotide
cuacagacagaaugaaggc

SEQ ID NO: 1827796 - RNA, 19 nt, Artificial Sequence
  Description of Artificial Sequence: Synthetic oligonucleotide
uugggaacggggaugagaa

SEQ ID NO: 1827797 - RNA, 19 nt, Artificial Sequence
  Description of Artificial Sequence: Synthetic oligonucleotide
uguugucaugcacaagggc

SEQ ID NO: 1827798 - RNA, 19 nt, Artificial Sequence
  Description of Artificial Sequence: Synthetic oligonucleotide
agaaugaaggccgaacgag

SEQ ID NO: 1827799 - RNA, 19 nt, Artificial Sequence
  Description of Artificial Sequence: Synthetic oligonucleotide
ugaggcuuugaucccgccg

SEQ ID NO: 1827800 - RNA, 19 nt, Artificial Sequence
  Description of Artificial Sequence: Synthetic oligonucleotide
uucugugccacaauauuau

SEQ ID NO: 1827801 - RNA, 19 nt, Artificial Sequence
  Description of Artificial Sequence: Synthetic oligonucleotide
ugauacagcgacuguaggu

SEQ ID NO: 1827802 - RNA, 19 nt, Artificial Sequence
  Description of Artificial Sequence: Synthetic oligonucleotide
acugcuucacuuuaccaca

SEQ ID NO: 1827803 - RNA, 19 nt, Artificial Sequence
  Description of Artificial Sequence: Synthetic oligonucleotide
gaaaucaggguucuacaga

SEQ ID NO: 1827804 - RNA, 19 nt, Artificial Sequence
  Description of Artificial Sequence: Synthetic oligonucleotide
uagaaggagaggaagugau

SEQ ID NO: 1827805 - RNA, 19 nt, Artificial Sequence
  Description of Artificial Sequence: Synthetic oligonucleotide
uguagaguccucacugugu

SEQ ID NO: 1827806 - RNA, 19 nt, Artificial Sequence
  Description of Artificial Sequence: Synthetic oligonucleotide
cuuauccucagcaucucug

SEQ ID NO: 1827807 - RNA, 19 nt, Artificial Sequence
  Description of Artificial Sequence: Synthetic oligonucleotide
aggacaacuugcugacugc

SEQ ID NO: 1827808 - RNA, 19 nt, Artificial Sequence
  Description of Artificial Sequence: Synthetic oligonucleotide
caaacugauacagcgacug

SEQ ID NO: 1827809 - RNA, 19 nt, Artificial Sequence
  Description of Artificial Sequence: Synthetic oligonucleotide
cuccaauccaggucaaagg

SEQ ID NO: 1827810 - RNA, 19 nt, Artificial Sequence
  Description of Artificial Sequence: Synthetic oligonucleotide
uccaugcacauccuugcag

SEQ ID NO: 1827811 - RNA, 19 nt, Artificial Sequence
  Description of Artificial Sequence: Synthetic oligonucleotide
gaaggacuggacaagugcc

SEQ ID NO: 1827812 - RNA, 19 nt, Artificial Sequence
  Description of Artificial Sequence: Synthetic oligonucleotide
uugucaugcacaagggcga

SEQ ID NO: 1827813 - RNA, 19 nt, Artificial Sequence
  Description of Artificial Sequence: Synthetic oligonucleotide
uguccaugcacauccuugc

SEQ ID NO: 1827814 - RNA, 19 nt, Artificial Sequence
  Description of Artificial Sequence: Synthetic oligonucleotide
uguguuuacagagcagagc

SEQ ID NO: 1827815 - RNA, 19 nt, Artificial Sequence
  Description of Artificial Sequence: Synthetic oligonucleotide
uccugagcauggaagaaga

SEQ ID NO: 1827816 - RNA, 19 nt, Artificial Sequence
  Description of Artificial Sequence: Synthetic oligonucleotide
uaucuuguauugguaagug

SEQ ID NO: 1827817 - RNA, 19 nt, Artificial Sequence
  Description of Artificial Sequence: Synthetic oligonucleotide
uccuguaucuuguauuggu

SEQ ID NO: 1827818 - RNA, 19 nt, Artificial Sequence
  Description of Artificial Sequence: Synthetic oligonucleotide
uucaggacaacuugcugac

SEQ ID NO: 1827819 - RNA, 19 nt, Artificial Sequence
  Description of Artificial Sequence: Synthetic oligonucleotide
ucuuaaaggcacagccacc

SEQ ID NO: 1827820 - RNA, 19 nt, Artificial Sequence
  Description of Artificial Sequence: Synthetic oligonucleotide
aacauugggaacggggaug

SEQ ID NO: 1827821 - RNA, 19 nt, Artificial Sequence
  Description of Artificial Sequence: Synthetic oligonucleotide
agaguagagucaguuuccc

SEQ ID NO: 1827822 - RNA, 19 nt, Artificial Sequence
  Description of Artificial Sequence: Synthetic oligonucleotide
uguauugguaagugaggcu

SEQ ID NO: 1827823 - RNA, 19 nt, Artificial Sequence
  Description of Artificial Sequence: Synthetic oligonucleotide
cagcuguccaugcacaucc

SEQ ID NO: 1827824 - RNA, 19 nt, Artificial Sequence
  Description of Artificial Sequence: Synthetic oligonucleotide
agcaccauuccacccuccc

SEQ ID NO: 1827825 - RNA, 19 nt, Artificial Sequence
  Description of Artificial Sequence: Synthetic oligonucleotide
aaugaaggccgaacgagca

SEQ ID NO: 1827826 - RNA, 19 nt, Artificial Sequence
  Description of Artificial Sequence: Synthetic oligonucleotide
ugaguuccgggaacauugg

SEQ ID NO: 1827827 - RNA, 19 nt, Artificial Sequence
  Description of Artificial Sequence: Synthetic oligonucleotide
aggccgaacgagcaacacc

SEQ ID NO: 1827828 - RNA, 19 nt, Artificial Sequence
  Description of Artificial Sequence: Synthetic oligonucleotide
guuuacagagcagagccug

SEQ ID NO: 1827829 - RNA, 19 nt, Artificial Sequence
  Description of Artificial Sequence: Synthetic oligonucleotide
ugccgagaagguuauugag

SEQ ID NO: 1827830 - RNA, 19 nt, Artificial Sequence
  Description of Artificial Sequence: Synthetic oligonucleotide
cacuuuaccacaguggcuc

SEQ ID NO: 1827831 - RNA, 19 nt, Artificial Sequence
  Description of Artificial Sequence: Synthetic oligonucleotide
gacaagugccacaaagcag

SEQ ID NO: 1827832 - RNA, 19 nt, Artificial Sequence
  Description of Artificial Sequence: Synthetic oligonucleotide
gagaaaucaggguucuaca

SEQ ID NO: 1827833 - RNA, 19 nt, Artificial Sequence
  Description of Artificial Sequence: Synthetic oligonucleotide
aagugaggcuuugaucccg

SEQ ID NO: 1827834 - RNA, 19 nt, Artificial Sequence
  Description of Artificial Sequence: Synthetic oligonucleotide
uccuugcagaaucccgugg

SEQ ID NO: 1827835 - RNA, 19 nt, Artificial Sequence
  Description of Artificial Sequence: Synthetic oligonucleotide
acaaagcagacuuuacaau

SEQ ID NO: 1827836 - RNA, 19 nt, Artificial Sequence
  Description of Artificial Sequence: Synthetic oligonucleotide
uuggcaucacagaguagag

SEQ ID NO: 1827837 - RNA, 19 nt, Artificial Sequence
  Description of Artificial Sequence: Synthetic oligonucleotide
cucacagcaccauuccacc

SEQ ID NO: 1827838 - RNA, 19 nt, Artificial Sequence
  Description of Artificial Sequence: Synthetic oligonucleotide
aauccaggucaaaggauag

SEQ ID NO: 1827839 - RNA, 19 nt, Artificial Sequence
  Description of Artificial Sequence: Synthetic oligonucleotide
uuccccacuguccacgggc

SEQ ID NO: 1827840 - RNA, 19 nt, Artificial Sequence
  Description of Artificial Sequence: Synthetic oligonucleotide
gucaguuuccccugcuccg

SEQ ID NO: 1827841 - RNA, 19 nt, Artificial Sequence
  Description of Artificial Sequence: Synthetic oligonucleotide
gaaugaaggccgaacgagc

SEQ ID NO: 1827842 - RNA, 19 nt, Artificial Sequence
  Description of Artificial Sequence: Synthetic oligonucleotide
acauuucccuucaauucgc

SEQ ID NO: 1827843 - RNA, 19 nt, Artificial Sequence
  Description of Artificial Sequence: Synthetic oligonucleotide
guggguugcaaccuccucc

SEQ ID NO: 1827844 - RNA, 19 nt, Artificial Sequence
  Description of Artificial Sequence: Synthetic oligonucleotide
aagucaccugggaugcucc

SEQ ID NO: 1827845 - RNA, 19 nt, Artificial Sequence
  Description of Artificial Sequence: Synthetic oligonucleotide
guuauugaguuccgggaac

SEQ ID NO: 1827846 - RNA, 19 nt, Artificial Sequence
  Description of Artificial Sequence: Synthetic oligonucleotide
acugauacagcgacuguag

SEQ ID NO: 1827847 - RNA, 19 nt, Artificial Sequence
  Description of Artificial Sequence: Synthetic oligonucleotide
gaagguuauugaguuccgg

SEQ ID NO: 1827848 - RNA, 19 nt, Artificial Sequence
  Description of Artificial Sequence: Synthetic oligonucleotide
gagacugaagucaccuggg

SEQ ID NO: 1827849 - RNA, 19 nt, Artificial Sequence
  Description of Artificial Sequence: Synthetic oligonucleotide
agggcgaccacauuucccu

SEQ ID NO: 1827850 - RNA, 19 nt, Artificial Sequence
  Description of Artificial Sequence: Synthetic oligonucleotide
auccucagcaucucuguug

SEQ ID NO: 1827851 - RNA, 19 nt, Artificial Sequence
  Description of Artificial Sequence: Synthetic oligonucleotide
agaggauccucagcugucc

SEQ ID NO: 1827852 - RNA, 19 nt, Artificial Sequence
  Description of Artificial Sequence: Synthetic oligonucleotide
auacagcgacuguagguuc

SEQ ID NO: 1827853 - RNA, 19 nt, Artificial Sequence
  Description of Artificial Sequence: Synthetic oligonucleotide
uaagugaggcuuugauccc

SEQ ID NO: 1827854 - RNA, 19 nt, Artificial Sequence
  Description of Artificial Sequence: Synthetic oligonucleotide
uacagcgacuguagguucc

SEQ ID NO: 1827855 - RNA, 19 nt, Artificial Sequence
  Description of Artificial Sequence: Synthetic oligonucleotide
caauucgcagcagacagug

SEQ ID NO: 1827856 - RNA, 19 nt, Artificial Sequence
  Description of Artificial Sequence: Synthetic oligonucleotide
ugguaagugaggcuuugau

SEQ ID NO: 1827857 - RNA, 19 nt, Artificial Sequence
  Description of Artificial Sequence: Synthetic oligonucleotide
caucacagaguagagucag

SEQ ID NO: 1827858 - RNA, 19 nt, Artificial Sequence
  Description of Artificial Sequence: Synthetic oligonucleotide
agcuuugagguagaaggag

SEQ ID NO: 1827859 - RNA, 19 nt, Artificial Sequence
  Description of Artificial Sequence: Synthetic oligonucleotide
gacuaaggccauucagcag

SEQ ID NO: 1827860 - RNA, 19 nt, Artificial Sequence
  Description of Artificial Sequence: Synthetic oligonucleotide
cugagcauggaagaagaug

SEQ ID NO: 1827861 - RNA, 19 nt, Artificial Sequence
  Description of Artificial Sequence: Synthetic oligonucleotide
agcagacuuuacaauuagc

SEQ ID NO: 1827862 - RNA, 19 nt, Artificial Sequence
  Description of Artificial Sequence: Synthetic oligonucleotide
aacugauacagcgacugua

SEQ ID NO: 1827863 - RNA, 19 nt, Artificial Sequence
  Description of Artificial Sequence: Synthetic oligonucleotide
aguggagcugcaguccagc

SEQ ID NO: 1827864 - RNA, 19 nt, Artificial Sequence
  Description of Artificial Sequence: Synthetic oligonucleotide
uacaauuagcuuugaggua

SEQ ID NO: 1827865 - RNA, 19 nt, Artificial Sequence
  Description of Artificial Sequence: Synthetic oligonucleotide
cuguguuuacagagcagag

SEQ ID NO: 1827866 - RNA, 19 nt, Artificial Sequence
  Description of Artificial Sequence: Synthetic oligonucleotide
cugacugcuucacuuuacc

SEQ ID NO: 1827867 - RNA, 19 nt, Artificial Sequence
  Description of Artificial Sequence: Synthetic oligonucleotide
aguugucuccaauccaggu

SEQ ID NO: 1827868 - RNA, 19 nt, Artificial Sequence
  Description of Artificial Sequence: Synthetic oligonucleotide
gaucccgccgggcuguggg

SEQ ID NO: 1827869 - RNA, 19 nt, Artificial Sequence
  Description of Artificial Sequence: Synthetic oligonucleotide
cugaagucaccugggaugc

SEQ ID NO: 1827870 - RNA, 19 nt, Artificial Sequence
  Description of Artificial Sequence: Synthetic oligonucleotide
uuguccuguaucuuguauu

SEQ ID NO: 1827871 - RNA, 19 nt, Artificial Sequence
  Description of Artificial Sequence: Synthetic oligonucleotide
agccgcucucagcagaagg

SEQ ID NO: 1827872 - RNA, 19 nt, Artificial Sequence
  Description of Artificial Sequence: Synthetic oligonucleotide
gacagaaugaaggccgaac

SEQ ID NO: 1827873 - RNA, 19 nt, Artificial Sequence
  Description of Artificial Sequence: Synthetic oligonucleotide
aucuuguauugguaaguga

SEQ ID NO: 1827874 - RNA, 19 nt, Artificial Sequence
  Description of Artificial Sequence: Synthetic oligonucleotide
ucacuuuaccacaguggcu

SEQ ID NO: 1827875 - RNA, 19 nt, Artificial Sequence
  Description of Artificial Sequence: Synthetic oligonucleotide
uugaugacuaaggccauuc

SEQ ID NO: 1827876 - RNA, 19 nt, Artificial Sequence
  Description of Artificial Sequence: Synthetic oligonucleotide
ucaauucgcagcagacagu

SEQ ID NO: 1827877 - RNA, 19 nt, Artificial Sequence
  Description of Artificial Sequence: Synthetic oligonucleotide
aggagacauucccuuggcg

SEQ ID NO: 1827878 - RNA, 19 nt, Artificial Sequence
  Description of Artificial Sequence: Synthetic oligonucleotide
acauccuugcagaaucccg

SEQ ID NO: 1827879 - RNA, 19 nt, Artificial Sequence
  Description of Artificial Sequence: Synthetic oligonucleotide
gaaucccguggccaggccc

SEQ ID NO: 1827880 - RNA, 19 nt, Artificial Sequence
  Description of Artificial Sequence: Synthetic oligonucleotide
cugauacagcgacuguagg

SEQ ID NO: 1827881 - RNA, 19 nt, Artificial Sequence
  Description of Artificial Sequence: Synthetic oligonucleotide
ucucuguugucaugcacaa

SEQ ID NO: 1827882 - RNA, 19 nt, Artificial Sequence
  Description of Artificial Sequence: Synthetic oligonucleotide
caccauuccacccucccug

SEQ ID NO: 1827883 - RNA, 19 nt, Artificial Sequence
  Description of Artificial Sequence: Synthetic oligonucleotide
auuccacccucccugguca

SEQ ID NO: 1827884 - RNA, 19 nt, Artificial Sequence
  Description of Artificial Sequence: Synthetic oligonucleotide
gaguuccgggaacauuggg

SEQ ID NO: 1827885 - RNA, 19 nt, Artificial Sequence
  Description of Artificial Sequence: Synthetic oligonucleotide
ugaaggccgaacgagcaac

SEQ ID NO: 1827886 - RNA, 19 nt, Artificial Sequence
  Description of Artificial Sequence: Synthetic oligonucleotide
ucagcucgaaggaccaggu

SEQ ID NO: 1827887 - RNA, 19 nt, Artificial Sequence
  Description of Artificial Sequence: Synthetic oligonucleotide
gacacccagcuucugugcc

SEQ ID NO: 1827888 - RNA, 19 nt, Artificial Sequence
  Description of Artificial Sequence: Synthetic oligonucleotide
aucucuguugucaugcaca

SEQ ID NO: 1827889 - RNA, 19 nt, Artificial Sequence
  Description of Artificial Sequence: Synthetic oligonucleotide
gagacauucccuuggcgaa

SEQ ID NO: 1827890 - RNA, 19 nt, Artificial Sequence
  Description of Artificial Sequence: Synthetic oligonucleotide
cacgagcugcccuugcucc

SEQ ID NO: 1827891 - RNA, 19 nt, Artificial Sequence
  Description of Artificial Sequence: Synthetic oligonucleotide
cacauucuuguccuguauc

SEQ ID NO: 1827892 - RNA, 19 nt, Artificial Sequence
  Description of Artificial Sequence: Synthetic oligonucleotide
aaggccgaacgagcaacac

SEQ ID NO: 1827893 - RNA, 19 nt, Artificial Sequence
  Description of Artificial Sequence: Synthetic oligonucleotide
ggagacauucccuuggcga

SEQ ID NO: 1827894 - RNA, 19 nt, Artificial Sequence
  Description of Artificial Sequence: Synthetic oligonucleotide
cucagcucgaaggaccagg

SEQ ID NO: 1827895 - RNA, 19 nt, Artificial Sequence
  Description of Artificial Sequence: Synthetic oligonucleotide
acaagaaagcugccaucug

SEQ ID NO: 1827896 - RNA, 19 nt, Artificial Sequence
  Description of Artificial Sequence: Synthetic oligonucleotide
gucacuuuaguugucucca

SEQ ID NO: 1827897 - RNA, 19 nt, Artificial Sequence
  Description of Artificial Sequence: Synthetic oligonucleotide
uucgcagcagacaguggcu

SEQ ID NO: 1827898 - RNA, 19 nt, Artificial Sequence
  Description of Artificial Sequence: Synthetic oligonucleotide
gggaacauugggaacgggg

SEQ ID NO: 1827899 - RNA, 19 nt, Artificial Sequence
  Description of Artificial Sequence: Synthetic oligonucleotide
ugcuccaagggaccauucu

SEQ ID NO: 1827900 - RNA, 19 nt, Artificial Sequence
  Description of Artificial Sequence: Synthetic oligonucleotide
uccaagggaccauucugcu

SEQ ID NO: 1827901 - RNA, 19 nt, Artificial Sequence
  Description of Artificial Sequence: Synthetic oligonucleotide
guuccgggaacauugggaa

SEQ ID NO: 1827902 - RNA, 19 nt, Artificial Sequence
  Description of Artificial Sequence: Synthetic oligonucleotide
agagccuggggaacaaagg

SEQ ID NO: 1827903 - RNA, 19 nt, Artificial Sequence
  Description of Artificial Sequence: Synthetic oligonucleotide
auaauggcugaaggacugg

SEQ ID NO: 1827904 - RNA, 19 nt, Artificial Sequence
  Description of Artificial Sequence: Synthetic oligonucleotide
ccucacuguguuuacagag

SEQ ID NO: 1827905 - RNA, 19 nt, Artificial Sequence
  Description of Artificial Sequence: Synthetic oligonucleotide
ugacacccagcuucugugc

SEQ ID NO: 1827906 - RNA, 19 nt, Artificial Sequence
  Description of Artificial Sequence: Synthetic oligonucleotide
uauugguaagugaggcuuu

SEQ ID NO: 1827907 - RNA, 19 nt, Artificial Sequence
  Description of Artificial Sequence: Synthetic oligonucleotide
uguccaccaacagcacugg

SEQ ID NO: 1827908 - RNA, 19 nt, Artificial Sequence
  Description of Artificial Sequence: Synthetic oligonucleotide
ggccgaacgagcaacaccc

SEQ ID NO: 1827909 - RNA, 19 nt, Artificial Sequence
  Description of Artificial Sequence: Synthetic oligonucleotide
gcugccgucaggcugacac

SEQ ID NO: 1827910 - RNA, 19 nt, Artificial Sequence
  Description of Artificial Sequence: Synthetic oligonucleotide
aacggggaugagaaaucag

SEQ ID NO: 1827911 - RNA, 19 nt, Artificial Sequence
  Description of Artificial Sequence: Synthetic oligonucleotide
caguccagcgugaccaaag

SEQ ID NO: 1827912 - RNA, 19 nt, Artificial Sequence
  Description of Artificial Sequence: Synthetic oligonucleotide
caauccaggucaaaggaua

SEQ ID NO: 1827913 - RNA, 19 nt, Artificial Sequence
  Description of Artificial Sequence: Synthetic oligonucleotide
ugaggacuugagacccucc

SEQ ID NO: 1827914 - RNA, 19 nt, Artificial Sequence
  Description of Artificial Sequence: Synthetic oligonucleotide
gguagaaggagaggaagug

SEQ ID NO: 1827915 - RNA, 19 nt, Artificial Sequence
  Description of Artificial Sequence: Synthetic oligonucleotide
agcaggagacauucccuug

SEQ ID NO: 1827916 - RNA, 19 nt, Artificial Sequence
  Description of Artificial Sequence: Synthetic oligonucleotide
uccucacuguguuuacaga

SEQ ID NO: 1827917 - RNA, 19 nt, Artificial Sequence
  Description of Artificial Sequence: Synthetic oligonucleotide
agaaucccguggccaggcc

SEQ ID NO: 1827918 - RNA, 19 nt, Artificial Sequence
  Description of Artificial Sequence: Synthetic oligonucleotide
aguuccgggaacauuggga

SEQ ID NO: 1827919 - RNA, 19 nt, Artificial Sequence
  Description of Artificial Sequence: Synthetic oligonucleotide
aauucgcagcagacagugg

SEQ ID NO: 1827920 - RNA, 19 nt, Artificial Sequence
  Description of Artificial Sequence: Synthetic oligonucleotide
acagcgacuguagguuccc

SEQ ID NO: 1827921 - RNA, 19 nt, Artificial Sequence
  Description of Artificial Sequence: Synthetic oligonucleotide
cugcaugaaguccagcaca

SEQ ID NO: 1827922 - RNA, 19 nt, Artificial Sequence
  Description of Artificial Sequence: Synthetic oligonucleotide
gcuucacuuuaccacagug

SEQ ID NO: 1827923 - RNA, 19 nt, Artificial Sequence
  Description of Artificial Sequence: Synthetic oligonucleotide
cugugccacaauauuauaa

SEQ ID NO: 1827924 - RNA, 19 nt, Artificial Sequence
  Description of Artificial Sequence: Synthetic oligonucleotide
uccuaguugucagccagga

SEQ ID NO: 1827925 - RNA, 19 nt, Artificial Sequence
  Description of Artificial Sequence: Synthetic oligonucleotide
gacuguagguucccugcac

SEQ ID NO: 1827926 - RNA, 19 nt, Artificial Sequence
  Description of Artificial Sequence: Synthetic oligonucleotide
agaagguuauugaguuccg

SEQ ID NO: 1827927 - RNA, 19 nt, Artificial Sequence
  Description of Artificial Sequence: Synthetic oligonucleotide
agcgacuguagguucccug

SEQ ID NO: 1827928 - RNA, 19 nt, Artificial Sequence
  Description of Artificial Sequence: Synthetic oligonucleotide
agcgugaccaaagucacuu

SEQ ID NO: 1827929 - RNA, 19 nt, Artificial Sequence
  Description of Artificial Sequence: Synthetic oligonucleotide
gucuuggcaucacagagua

SEQ ID NO: 1827930 - RNA, 19 nt, Artificial Sequence
  Description of Artificial Sequence: Synthetic oligonucleotide
guuuccccacuguccacgg

SEQ ID NO: 1827931 - RNA, 19 nt, Artificial Sequence
  Description of Artificial Sequence: Synthetic oligonucleotide
auccuugcagaaucccgug

SEQ ID NO: 1827932 - RNA, 19 nt, Artificial Sequence
  Description of Artificial Sequence: Synthetic oligonucleotide
caguggcucuuaaaggcac

SEQ ID NO: 1827933 - RNA, 19 nt, Artificial Sequence
  Description of Artificial Sequence: Synthetic oligonucleotide
auagcaggagacauucccu

SEQ ID NO: 1827934 - RNA, 19 nt, Artificial Sequence
  Description of Artificial Sequence: Synthetic oligonucleotide
auugguaagugaggcuuug

SEQ ID NO: 1827935 - RNA, 19 nt, Artificial Sequence
  Description of Artificial Sequence: Synthetic oligonucleotide
uuuccccacuguccacggg

SEQ ID NO: 1827936 - RNA, 19 nt, Artificial Sequence
  Description of Artificial Sequence: Synthetic oligonucleotide
ugccgucaggcugacaccc

SEQ ID NO: 1827937 - RNA, 19 nt, Artificial Sequence
  Description of Artificial Sequence: Synthetic oligonucleotide
ucuuggcaucacagaguag

SEQ ID NO: 1827938 - RNA, 19 nt, Artificial Sequence
  Description of Artificial Sequence: Synthetic oligonucleotide
gaugcacaagaaagcugcc

SEQ ID NO: 1827939 - RNA, 19 nt, Artificial Sequence
  Description of Artificial Sequence: Synthetic oligonucleotide
cuuugaucccgccgggcug

SEQ ID NO: 1827940 - RNA, 19 nt, Artificial Sequence
  Description of Artificial Sequence: Synthetic oligonucleotide
ccagccaucacuguccuag

SEQ ID NO: 1827941 - RNA, 19 nt, Artificial Sequence
  Description of Artificial Sequence: Synthetic oligonucleotide
uugcaaccuccuccagagg

SEQ ID NO: 1827942 - RNA, 19 nt, Artificial Sequence
  Description of Artificial Sequence: Synthetic oligonucleotide
uuauuccagccaucacugu

SEQ ID NO: 1827943 - RNA, 19 nt, Artificial Sequence
  Description of Artificial Sequence: Synthetic oligonucleotide
gauacagcgacuguagguu

SEQ ID NO: 1827944 - RNA, 19 nt, Artificial Sequence
  Description of Artificial Sequence: Synthetic oligonucleotide
aaucccguggccaggcccu

SEQ ID NO: 1827945 - RNA, 19 nt, Artificial Sequence
  Description of Artificial Sequence: Synthetic oligonucleotide
aguccagcgugaccaaagu

SEQ ID NO: 1827946 - RNA, 19 nt, Artificial Sequence
  Description of Artificial Sequence: Synthetic oligonucleotide
uagguucccugcacuggcc

SEQ ID NO: 1827947 - RNA, 19 nt, Artificial Sequence
  Description of Artificial Sequence: Synthetic oligonucleotide
uuugaucccgccgggcugu

SEQ ID NO: 1827948 - RNA, 19 nt, Artificial Sequence
  Description of Artificial Sequence: Synthetic oligonucleotide
cugcuucacuuuaccacag

SEQ ID NO: 1827949 - RNA, 19 nt, Artificial Sequence
  Description of Artificial Sequence: Synthetic oligonucleotide
uagcaggagacauucccuu

SEQ ID NO: 1827950 - RNA, 19 nt, Artificial Sequence
  Description of Artificial Sequence: Synthetic oligonucleotide
uuuaccacaguggcucuua

SEQ ID NO: 1827951 - RNA, 19 nt, Artificial Sequence
  Description of Artificial Sequence: Synthetic oligonucleotide
uuuccccugcuccgucccg

SEQ ID NO: 1827952 - RNA, 19 nt, Artificial Sequence
  Description of Artificial Sequence: Synthetic oligonucleotide
ugcugacugcuucacuuua

SEQ ID NO: 1827953 - RNA, 19 nt, Artificial Sequence
  Description of Artificial Sequence: Synthetic oligonucleotide
gguggcuuugaugacuaag

SEQ ID NO: 1827954 - RNA, 19 nt, Artificial Sequence
  Description of Artificial Sequence: Synthetic oligonucleotide
uguggguugcaaccuccuc

SEQ ID NO: 1827955 - RNA, 19 nt, Artificial Sequence
  Description of Artificial Sequence: Synthetic oligonucleotide
cacccucacagcaccauuc

SEQ ID NO: 1827956 - RNA, 19 nt, Artificial Sequence
  Description of Artificial Sequence: Synthetic oligonucleotide
gguuauugaguuccgggaa

SEQ ID NO: 1827957 - RNA, 19 nt, Artificial Sequence
  Description of Artificial Sequence: Synthetic oligonucleotide
gugagacugaagucaccug

SEQ ID NO: 1827958 - RNA, 19 nt, Artificial Sequence
  Description of Artificial Sequence: Synthetic oligonucleotide
ucccgugcugccgucaggc

SEQ ID NO: 1827959 - RNA, 19 nt, Artificial Sequence
  Description of Artificial Sequence: Synthetic oligonucleotide
gagacccuccaggaacacg

SEQ ID NO: 1827960 - RNA, 19 nt, Artificial Sequence
  Description of Artificial Sequence: Synthetic oligonucleotide
ugcuucacuuuaccacagu

SEQ ID NO: 1827961 - RNA, 19 nt, Artificial Sequence
  Description of Artificial Sequence: Synthetic oligonucleotide
gaacggggaugagaaauca

SEQ ID NO: 1827962 - RNA, 19 nt, Artificial Sequence
  Description of Artificial Sequence: Synthetic oligonucleotide
aggaacacgagcugcccuu

SEQ ID NO: 1827963 - RNA, 19 nt, Artificial Sequence
  Description of Artificial Sequence: Synthetic oligonucleotide
ucaccaugcagccgcucuc

SEQ ID NO: 1827964 - RNA, 19 nt, Artificial Sequence
  Description of Artificial Sequence: Synthetic oligonucleotide
ucacuuuaguugucuccaa

SEQ ID NO: 1827965 - RNA, 19 nt, Artificial Sequence
  Description of Artificial Sequence: Synthetic oligonucleotide
caggguucuacagacagaa

SEQ ID NO: 1827966 - RNA, 19 nt, Artificial Sequence
  Description of Artificial Sequence: Synthetic oligonucleotide
gcuccaagggaccauucug

SEQ ID NO: 1827967 - RNA, 19 nt, Artificial Sequence
  Description of Artificial Sequence: Synthetic oligonucleotide
cauuccacccucccugguc

SEQ ID NO: 1827968 - RNA, 19 nt, Artificial Sequence
  Description of Artificial Sequence: Synthetic oligonucleotide
ccucacagcaccauuccac

SEQ ID NO: 1827969 - RNA, 19 nt, Artificial Sequence
  Description of Artificial Sequence: Synthetic oligonucleotide
gacuggacaagugccacaa

SEQ ID NO: 1827970 - RNA, 19 nt, Artificial Sequence
  Description of Artificial Sequence: Synthetic oligonucleotide
uccacgggcuucagggagu

SEQ ID NO: 1827971 - RNA, 19 nt, Artificial Sequence
  Description of Artificial Sequence: Synthetic oligonucleotide
caccugggaugcuccaagg

SEQ ID NO: 1827972 - RNA, 19 nt, Artificial Sequence
  Description of Artificial Sequence: Synthetic oligonucleotide
ucaguuuccccugcuccgu

SEQ ID NO: 1827973 - RNA, 19 nt, Artificial Sequence
  Description of Artificial Sequence: Synthetic oligonucleotide
gacacauucuuguccugua

SEQ ID NO: 1827974 - RNA, 19 nt, Artificial Sequence
  Description of Artificial Sequence: Synthetic oligonucleotide
acuugcugacugcuucacu

SEQ ID NO: 1827975 - RNA, 19 nt, Artificial Sequence
  Description of Artificial Sequence: Synthetic oligonucleotide
cuucaauucgcagcagaca

SEQ ID NO: 1827976 - RNA, 19 nt, Artificial Sequence
  Description of Artificial Sequence: Synthetic oligonucleotide
cacuguccuaguugucagc

SEQ ID NO: 1827977 - RNA, 19 nt, Artificial Sequence
  Description of Artificial Sequence: Synthetic oligonucleotide
agcacagcaacugccucca

SEQ ID NO: 1827978 - RNA, 19 nt, Artificial Sequence
  Description of Artificial Sequence: Synthetic oligonucleotide
ccuugcagaaucccguggc

SEQ ID NO: 1827979 - RNA, 19 nt, Artificial Sequence
  Description of Artificial Sequence: Synthetic oligonucleotide
aaggauagcaggagacauu

SEQ ID NO: 1827980 - RNA, 19 nt, Artificial Sequence
  Description of Artificial Sequence: Synthetic oligonucleotide
guauugguaagugaggcuu

SEQ ID NO: 1827981 - RNA, 19 nt, Artificial Sequence
  Description of Artificial Sequence: Synthetic oligonucleotide
aagggaccauucugcugca

SEQ ID NO: 1827982 - RNA, 19 nt, Artificial Sequence
  Description of Artificial Sequence: Synthetic oligonucleotide
cccgaacaaacugauacag

SEQ ID NO: 1827983 - RNA, 19 nt, Artificial Sequence
  Description of Artificial Sequence: Synthetic oligonucleotide
gaacacgagcugcccuugc

SEQ ID NO: 1827984 - RNA, 19 nt, Artificial Sequence
  Description of Artificial Sequence: Synthetic oligonucleotide
gaccaaagucacuuuaguu

SEQ ID NO: 1827985 - RNA, 19 nt, Artificial Sequence
  Description of Artificial Sequence: Synthetic oligonucleotide
gacaguggcucugcaguac

SEQ ID NO: 1827986 - RNA, 19 nt, Artificial Sequence
  Description of Artificial Sequence: Synthetic oligonucleotide
uuccgggaacauugggaac

SEQ ID NO: 1827987 - RNA, 19 nt, Artificial Sequence
  Description of Artificial Sequence: Synthetic oligonucleotide
augcacaagggcgaccaca

SEQ ID NO: 1827988 - RNA, 19 nt, Artificial Sequence
  Description of Artificial Sequence: Synthetic oligonucleotide
ccacugaggacuugagacc

SEQ ID NO: 1827989 - RNA, 19 nt, Artificial Sequence
  Description of Artificial Sequence: Synthetic oligonucleotide
uugguaagugaggcuuuga

SEQ ID NO: 1827990 - RNA, 19 nt, Artificial Sequence
  Description of Artificial Sequence: Synthetic oligonucleotide
caauauuauaauggcugaa

SEQ ID NO: 1827991 - RNA, 19 nt, Artificial Sequence
  Description of Artificial Sequence: Synthetic oligonucleotide
guaucuuguauugguaagu

SEQ ID NO: 1827992 - RNA, 19 nt, Artificial Sequence
  Description of Artificial Sequence: Synthetic oligonucleotide
augaaggccgaacgagcaa

SEQ ID NO: 1827993 - RNA, 19 nt, Artificial Sequence
  Description of Artificial Sequence: Synthetic oligonucleotide
aggugagacugaagucacc

SEQ ID NO: 1827994 - RNA, 19 nt, Artificial Sequence
  Description of Artificial Sequence: Synthetic oligonucleotide
ugaggcuccuccugagcau

SEQ ID NO: 1827995 - RNA, 19 nt, Artificial Sequence
  Description of Artificial Sequence: Synthetic oligonucleotide
acaaacugauacagcgacu

SEQ ID NO: 1827996 - RNA, 19 nt, Artificial Sequence
  Description of Artificial Sequence: Synthetic oligonucleotide
uauugaguuccgggaacau

SEQ ID NO: 1827997 - RNA, 19 nt, Artificial Sequence
  Description of Artificial Sequence: Synthetic oligonucleotide
ccgaacaaacugauacagc

SEQ ID NO: 1827998 - RNA, 19 nt, Artificial Sequence
  Description of Artificial Sequence: Synthetic oligonucleotide
ugucaugcacaagggcgac

SEQ ID NO: 1827999 - RNA, 19 nt, Artificial Sequence
  Description of Artificial Sequence: Synthetic oligonucleotide
ucagggagucccgaacaaa

SEQ ID NO: 1828000 - RNA, 19 nt, Artificial Sequence
  Description of Artificial Sequence: Synthetic oligonucleotide
cauccuugcagaaucccgu

SEQ ID NO: 1828001 - RNA, 19 nt, Artificial Sequence
  Description of Artificial Sequence: Synthetic oligonucleotide
auugaguuccgggaacauu

SEQ ID NO: 1828002 - RNA, 19 nt, Artificial Sequence
  Description of Artificial Sequence: Synthetic oligonucleotide
cugcaguacugcaugaagu

SEQ ID NO: 1828003 - RNA, 19 nt, Artificial Sequence
  Description of Artificial Sequence: Synthetic oligonucleotide
cucagcagaaggguguaga

SEQ ID NO: 1828004 - RNA, 19 nt, Artificial Sequence
  Description of Artificial Sequence: Synthetic oligonucleotide
uuugaugacuaaggccauu

SEQ ID NO: 1828005 - RNA, 19 nt, Artificial Sequence
  Description of Artificial Sequence: Synthetic oligonucleotide
guccuaguugucagccagg

SEQ ID NO: 1828006 - RNA, 19 nt, Artificial Sequence
  Description of Artificial Sequence: Synthetic oligonucleotide
gcaguacugcaugaagucc

SEQ ID NO: 1828007 - RNA, 19 nt, Artificial Sequence
  Description of Artificial Sequence: Synthetic oligonucleotide
gaacauugggaacggggau

SEQ ID NO: 1828008 - RNA, 19 nt, Artificial Sequence
  Description of Artificial Sequence: Synthetic oligonucleotide
cagaaucccguggccaggc

SEQ ID NO: 1828009 - RNA, 19 nt, Artificial Sequence
  Description of Artificial Sequence: Synthetic oligonucleotide
aggacacauucuuguccug

SEQ ID NO: 1828010 - RNA, 19 nt, Artificial Sequence
  Description of Artificial Sequence: Synthetic oligonucleotide
cagacuuuacaauuagcuu

SEQ ID NO: 1828011 - RNA, 19 nt, Artificial Sequence
  Description of Artificial Sequence: Synthetic oligonucleotide
ccagcgugaccaaagucac

SEQ ID NO: 1828012 - RNA, 19 nt, Artificial Sequence
  Description of Artificial Sequence: Synthetic oligonucleotide
uccacgggguuuccccacu

SEQ ID NO: 1828013 - RNA, 19 nt, Artificial Sequence
  Description of Artificial Sequence: Synthetic oligonucleotide
agacaguggcucugcagua

SEQ ID NO: 1828014 - RNA, 19 nt, Artificial Sequence
  Description of Artificial Sequence: Synthetic oligonucleotide
uuccacgggguuuccccac

SEQ ID NO: 1828015 - RNA, 19 nt, Artificial Sequence
  Description of Artificial Sequence: Synthetic oligonucleotide
guccaccaacagcacuggg

SEQ ID NO: 1828016 - RNA, 19 nt, Artificial Sequence
  Description of Artificial Sequence: Synthetic oligonucleotide
gccgcucucagcagaaggg

SEQ ID NO: 1828017 - RNA, 19 nt, Artificial Sequence
  Description of Artificial Sequence: Synthetic oligonucleotide
cugccgucaggcugacacc

SEQ ID NO: 1828018 - RNA, 19 nt, Artificial Sequence
  Description of Artificial Sequence: Synthetic oligonucleotide
cauuucccuucaauucgca

SEQ ID NO: 1828019 - RNA, 19 nt, Artificial Sequence
  Description of Artificial Sequence: Synthetic oligonucleotide
gagcauggaagaagauguc

SEQ ID NO: 1828020 - RNA, 19 nt, Artificial Sequence
  Description of Artificial Sequence: Synthetic oligonucleotide
cagcaacugccuccaggcc

SEQ ID NO: 1828021 - RNA, 19 nt, Artificial Sequence
  Description of Artificial Sequence: Synthetic oligonucleotide
guccagcgugaccaaaguc

SEQ ID NO: 1828022 - RNA, 19 nt, Artificial Sequence
  Description of Artificial Sequence: Synthetic oligonucleotide
guagaguccucacuguguu

SEQ ID NO: 1828023 - RNA, 19 nt, Artificial Sequence
  Description of Artificial Sequence: Synthetic oligonucleotide
uccgucccgucuggggugg

SEQ ID NO: 1828024 - RNA, 19 nt, Artificial Sequence
  Description of Artificial Sequence: Synthetic oligonucleotide
ggcaggugagacugaaguc

SEQ ID NO: 1828025 - RNA, 19 nt, Artificial Sequence
  Description of Artificial Sequence: Synthetic oligonucleotide
gaccacauuucccuucaau

SEQ ID NO: 1828026 - RNA, 19 nt, Artificial Sequence
  Description of Artificial Sequence: Synthetic oligonucleotide
agggagucccgaacaaacu

SEQ ID NO: 1828027 - RNA, 19 nt, Artificial Sequence
  Description of Artificial Sequence: Synthetic oligonucleotide
ccaugcacauccuugcaga

SEQ ID NO: 1828028 - RNA, 19 nt, Artificial Sequence
  Description of Artificial Sequence: Synthetic oligonucleotide
caugcacauccuugcagaa

SEQ ID NO: 1828029 - RNA, 19 nt, Artificial Sequence
  Description of Artificial Sequence: Synthetic oligonucleotide
ggagucccgaacaaacuga

SEQ ID NO: 1828030 - RNA, 19 nt, Artificial Sequence
  Description of Artificial Sequence: Synthetic oligonucleotide
gacauucccuuggcgaaaa

SEQ ID NO: 1828031 - RNA, 19 nt, Artificial Sequence
  Description of Artificial Sequence: Synthetic oligonucleotide
ggugaggcuccuccugagc

SEQ ID NO: 1828032 - RNA, 19 nt, Artificial Sequence
  Description of Artificial Sequence: Synthetic oligonucleotide
uccuuauccucagcaucuc

SEQ ID NO: 1828033 - RNA, 19 nt, Artificial Sequence
  Description of Artificial Sequence: Synthetic oligonucleotide
gguggugccgagaagguua

SEQ ID NO: 1828034 - RNA, 19 nt, Artificial Sequence
  Description of Artificial Sequence: Synthetic oligonucleotide
ccuagugugaguaaccuuu

SEQ ID NO: 1828035 - RNA, 19 nt, Artificial Sequence
  Description of Artificial Sequence: Synthetic oligonucleotide
cuccgucccgucuggggug

SEQ ID NO: 1828036 - RNA, 19 nt, Artificial Sequence
  Description of Artificial Sequence: Synthetic oligonucleotide
ucgaaggaccagguggcuu

SEQ ID NO: 1828037 - RNA, 19 nt, Artificial Sequence
  Description of Artificial Sequence: Synthetic oligonucleotide
gugaggcuuugaucccgcc

SEQ ID NO: 1828038 - RNA, 19 nt, Artificial Sequence
  Description of Artificial Sequence: Synthetic oligonucleotide
aggaugccauucuccuuau

SEQ ID NO: 1828039 - RNA, 19 nt, Artificial Sequence
  Description of Artificial Sequence: Synthetic oligonucleotide
ugcaguccagcgugaccaa

SEQ ID NO: 1828040 - RNA, 19 nt, Artificial Sequence
  Description of Artificial Sequence: Synthetic oligonucleotide
agccaucacuguccuaguu

SEQ ID NO: 1828041 - RNA, 19 nt, Artificial Sequence
  Description of Artificial Sequence: Synthetic oligonucleotide
augcagccgcucucagcag

SEQ ID NO: 1828042 - RNA, 19 nt, Artificial Sequence
  Description of Artificial Sequence: Synthetic oligonucleotide
agacauucccuuggcgaaa

SEQ ID NO: 1828043 - RNA, 19 nt, Artificial Sequence
  Description of Artificial Sequence: Synthetic oligonucleotide
gucccgucugggguggugc

SEQ ID NO: 1828044 - RNA, 19 nt, Artificial Sequence
  Description of Artificial Sequence: Synthetic oligonucleotide
cuguccuaguugucagcca

SEQ ID NO: 1828045 - RNA, 19 nt, Artificial Sequence
  Description of Artificial Sequence: Synthetic oligonucleotide
cagcuucugugccacaaua

SEQ ID NO: 1828046 - RNA, 19 nt, Artificial Sequence
  Description of Artificial Sequence: Synthetic oligonucleotide
guugucagccaggauggcu

SEQ ID NO: 1828047 - RNA, 19 nt, Artificial Sequence
  Description of Artificial Sequence: Synthetic oligonucleotide
cagcucgaaggaccaggug

SEQ ID NO: 1828048 - RNA, 19 nt, Artificial Sequence
  Description of Artificial Sequence: Synthetic oligonucleotide
caugcacaagggcgaccac

SEQ ID NO: 1828049 - RNA, 19 nt, Artificial Sequence
  Description of Artificial Sequence: Synthetic oligonucleotide
aucacagaguagagucagu

SEQ ID NO: 1828050 - RNA, 19 nt, Artificial Sequence
  Description of Artificial Sequence: Synthetic oligonucleotide
cagcaccauuccacccucc

SEQ ID NO: 1828051 - RNA, 19 nt, Artificial Sequence
  Description of Artificial Sequence: Synthetic oligonucleotide
ggcgaccacauuucccuuc

SEQ ID NO: 1828052 - RNA, 19 nt, Artificial Sequence
  Description of Artificial Sequence: Synthetic oligonucleotide
uuccccugcuccgucccgu

SEQ ID NO: 1828053 - RNA, 19 nt, Artificial Sequence
  Description of Artificial Sequence: Synthetic oligonucleotide
gcagaaucccguggccagg

SEQ ID NO: 1828054 - RNA, 19 nt, Artificial Sequence
  Description of Artificial Sequence: Synthetic oligonucleotide
gguguagaguccucacugu

SEQ ID NO: 1828055 - RNA, 19 nt, Artificial Sequence
  Description of Artificial Sequence: Synthetic oligonucleotide
ccacaauauuauaauggcu

SEQ ID NO: 1828056 - RNA, 19 nt, Artificial Sequence
  Description of Artificial Sequence: Synthetic oligonucleotide
cuuugaugacuaaggccau

SEQ ID NO: 1828057 - RNA, 19 nt, Artificial Sequence
  Description of Artificial Sequence: Synthetic oligonucleotide
ggauagcaggagacauucc

SEQ ID NO: 1828058 - RNA, 19 nt, Artificial Sequence
  Description of Artificial Sequence: Synthetic oligonucleotide
cuugcucccgugcugccgu

SEQ ID NO: 1828059 - RNA, 19 nt, Artificial Sequence
  Description of Artificial Sequence: Synthetic oligonucleotide
ggaacacgagcugcccuug

SEQ ID NO: 1828060 - RNA, 19 nt, Artificial Sequence
  Description of Artificial Sequence: Synthetic oligonucleotide
gggaacggggaugagaaau

SEQ ID NO: 1828061 - RNA, 19 nt, Artificial Sequence
  Description of Artificial Sequence: Synthetic oligonucleotide
cacagaguagagucaguuu

SEQ ID NO: 1828062 - RNA, 19 nt, Artificial Sequence
  Description of Artificial Sequence: Synthetic oligonucleotide
ccuguaucuuguauuggua

SEQ ID NO: 1828063 - RNA, 19 nt, Artificial Sequence
  Description of Artificial Sequence: Synthetic oligonucleotide
cacuuuaguugucuccaau

SEQ ID NO: 1828064 - RNA, 19 nt, Artificial Sequence
  Description of Artificial Sequence: Synthetic oligonucleotide
gagucccgaacaaacugau

SEQ ID NO: 1828065 - RNA, 19 nt, Artificial Sequence
  Description of Artificial Sequence: Synthetic oligonucleotide
cuagugugaguaaccuuuu

SEQ ID NO: 1828066 - RNA, 19 nt, Artificial Sequence
  Description of Artificial Sequence: Synthetic oligonucleotide
gcugccauucaggacaacu

SEQ ID NO: 1828067 - RNA, 19 nt, Artificial Sequence
  Description of Artificial Sequence: Synthetic oligonucleotide
cucugcaguacugcaugaa

SEQ ID NO: 1828068 - RNA, 19 nt, Artificial Sequence
  Description of Artificial Sequence: Synthetic oligonucleotide
ugcucccgugcugccguca

SEQ ID NO: 1828069 - RNA, 19 nt, Artificial Sequence
  Description of Artificial Sequence: Synthetic oligonucleotide
gccgagaagguuauugagu

SEQ ID NO: 1828070 - RNA, 19 nt, Artificial Sequence
  Description of Artificial Sequence: Synthetic oligonucleotide
ccgagaagguuauugaguu

SEQ ID NO: 1828071 - RNA, 19 nt, Artificial Sequence
  Description of Artificial Sequence: Synthetic oligonucleotide
ccugcuccgucccgucugg

SEQ ID NO: 1828072 - RNA, 19 nt, Artificial Sequence
  Description of Artificial Sequence: Synthetic oligonucleotide
ccgugcugccgucaggcug

SEQ ID NO: 1828073 - RNA, 19 nt, Artificial Sequence
  Description of Artificial Sequence: Synthetic oligonucleotide
cccuucaauucgcagcaga

SEQ ID NO: 1828074 - RNA, 19 nt, Artificial Sequence
  Description of Artificial Sequence: Synthetic oligonucleotide
augagaaaucaggguucua

SEQ ID NO: 1828075 - RNA, 19 nt, Artificial Sequence
  Description of Artificial Sequence: Synthetic oligonucleotide
uccccugcuccgucccguc

SEQ ID NO: 1828076 - RNA, 19 nt, Artificial Sequence
  Description of Artificial Sequence: Synthetic oligonucleotide
aucccgccgggcugugggu

SEQ ID NO: 1828077 - RNA, 19 nt, Artificial Sequence
  Description of Artificial Sequence: Synthetic oligonucleotide
agguggcuuugaugacuaa

SEQ ID NO: 1828078 - RNA, 19 nt, Artificial Sequence
  Description of Artificial Sequence: Synthetic oligonucleotide
ggcuuugaucccgccgggc

SEQ ID NO: 1828079 - RNA, 19 nt, Artificial Sequence
  Description of Artificial Sequence: Synthetic oligonucleotide
agucccgaacaaacugaua

SEQ ID NO: 1828080 - RNA, 19 nt, Artificial Sequence
  Description of Artificial Sequence: Synthetic oligonucleotide
ccgggaacauugggaacgg

SEQ ID NO: 1828081 - RNA, 19 nt, Artificial Sequence
  Description of Artificial Sequence: Synthetic oligonucleotide
cauucagcaggaugccauu

SEQ ID NO: 1828082 - RNA, 19 nt, Artificial Sequence
  Description of Artificial Sequence: Synthetic oligonucleotide
gcccuugcucccgugcugc

SEQ ID NO: 1828083 - RNA, 19 nt, Artificial Sequence
  Description of Artificial Sequence: Synthetic oligonucleotide
ggguugcaaccuccuccag

SEQ ID NO: 1828084 - RNA, 19 nt, Artificial Sequence
  Description of Artificial Sequence: Synthetic oligonucleotide
cgcucucagcagaagggug

SEQ ID NO: 1828085 - RNA, 19 nt, Artificial Sequence
  Description of Artificial Sequence: Synthetic oligonucleotide
ccuggggaacaaaggcauc

SEQ ID NO: 1828086 - RNA, 19 nt, Artificial Sequence
  Description of Artificial Sequence: Synthetic oligonucleotide
ccugcacuggccucccuga

SEQ ID NO: 1828087 - RNA, 19 nt, Artificial Sequence
  Description of Artificial Sequence: Synthetic oligonucleotide
aggguucuacagacagaau

SEQ ID NO: 1828088 - RNA, 19 nt, Artificial Sequence
  Description of Artificial Sequence: Synthetic oligonucleotide
gcucucagcagaagggugu

SEQ ID NO: 1828089 - RNA, 19 nt, Artificial Sequence
  Description of Artificial Sequence: Synthetic oligonucleotide
aucccguggccaggcccuc

SEQ ID NO: 1828090 - RNA, 19 nt, Artificial Sequence
  Description of Artificial Sequence: Synthetic oligonucleotide
cugcuccgucccgucuggg

SEQ ID NO: 1828091 - RNA, 19 nt, Artificial Sequence
  Description of Artificial Sequence: Synthetic oligonucleotide
ccgggcuguggguugcaac

SEQ ID NO: 1828092 - RNA, 19 nt, Artificial Sequence
  Description of Artificial Sequence: Synthetic oligonucleotide
cgugaccaaagucacuuua

SEQ ID NO: 1828093 - RNA, 19 nt, Artificial Sequence
  Description of Artificial Sequence: Synthetic oligonucleotide
ggaugccauucuccuuauc

SEQ ID NO: 1828094 - RNA, 19 nt, Artificial Sequence
  Description of Artificial Sequence: Synthetic oligonucleotide
uugcucccgugcugccguc

SEQ ID NO: 1828095 - RNA, 19 nt, Artificial Sequence
  Description of Artificial Sequence: Synthetic oligonucleotide
gccauucagcaggaugcca

SEQ ID NO: 1828096 - RNA, 19 nt, Artificial Sequence
  Description of Artificial Sequence: Synthetic oligonucleotide
cccguggccaggcccucag

SEQ ID NO: 1828097 - RNA, 19 nt, Artificial Sequence
  Description of Artificial Sequence: Synthetic oligonucleotide
cagcgugaccaaagucacu

SEQ ID NO: 1828098 - RNA, 19 nt, Artificial Sequence
  Description of Artificial Sequence: Synthetic oligonucleotide
cacgggguuuccccacugu

SEQ ID NO: 1828099 - RNA, 19 nt, Artificial Sequence
  Description of Artificial Sequence: Synthetic oligonucleotide
cagccaucacuguccuagu

SEQ ID NO: 1828100 - RNA, 19 nt, Artificial Sequence
  Description of Artificial Sequence: Synthetic oligonucleotide
ccuuauccucagcaucucu

SEQ ID NO: 1828101 - RNA, 19 nt, Artificial Sequence
  Description of Artificial Sequence: Synthetic oligonucleotide
gggaacuuccacgggguuu

SEQ ID NO: 1828102 - RNA, 19 nt, Artificial Sequence
  Description of Artificial Sequence: Synthetic oligonucleotide
cucgaaggaccagguggcu

SEQ ID NO: 1828103 - RNA, 19 nt, Artificial Sequence
  Description of Artificial Sequence: Synthetic oligonucleotide
cacuggccucccugaggaa

SEQ ID NO: 1828104 - RNA, 19 nt, Artificial Sequence
  Description of Artificial Sequence: Synthetic oligonucleotide
cccgccgggcuguggguug

SEQ ID NO: 1828105 - RNA, 19 nt, Artificial Sequence
  Description of Artificial Sequence: Synthetic oligonucleotide
cacacccucacagcaccau

SEQ ID NO: 1828106 - RNA, 19 nt, Artificial Sequence
  Description of Artificial Sequence: Synthetic oligonucleotide
uggugccgagaagguuauu

SEQ ID NO: 1828107 - RNA, 19 nt, Artificial Sequence
  Description of Artificial Sequence: Synthetic oligonucleotide
gccgucaggcugacaccca

SEQ ID NO: 1828108 - RNA, 19 nt, Artificial Sequence
  Description of Artificial Sequence: Synthetic oligonucleotide
cgucugggguggugccgag

SEQ ID NO: 1828109 - RNA, 19 nt, Artificial Sequence
  Description of Artificial Sequence: Synthetic oligonucleotide
gcgugaccaaagucacuuu

SEQ ID NO: 1828110 - RNA, 19 nt, Artificial Sequence
  Description of Artificial Sequence: Synthetic oligonucleotide
ccuaguugucagccaggau

SEQ ID NO: 1828111 - RNA, 19 nt, Artificial Sequence
  Description of Artificial Sequence: Synthetic oligonucleotide
cacccucccuggucacagu

SEQ ID NO: 1828112 - RNA, 19 nt, Artificial Sequence
  Description of Artificial Sequence: Synthetic oligonucleotide
ccgcucucagcagaagggu

SEQ ID NO: 1828113 - RNA, 19 nt, Artificial Sequence
  Description of Artificial Sequence: Synthetic oligonucleotide
ccgccgggcuguggguugc

SEQ ID NO: 1828114 - RNA, 19 nt, Artificial Sequence
  Description of Artificial Sequence: Synthetic oligonucleotide
cagcgacuguagguucccu

SEQ ID NO: 1828115 - RNA, 19 nt, Artificial Sequence
  Description of Artificial Sequence: Synthetic oligonucleotide
gggcgaccacauuucccuu

SEQ ID NO: 1828116 - RNA, 19 nt, Artificial Sequence
  Description of Artificial Sequence: Synthetic oligonucleotide
ggguggugccgagaagguu

SEQ ID NO: 1828117 - RNA, 19 nt, Artificial Sequence
  Description of Artificial Sequence: Synthetic oligonucleotide
gcacaagggcgaccacauu

SEQ ID NO: 1828118 - RNA, 19 nt, Artificial Sequence
  Description of Artificial Sequence: Synthetic oligonucleotide
cgucccgucugggguggug

SEQ ID NO: 1828119 - RNA, 19 nt, Artificial Sequence
  Description of Artificial Sequence: Synthetic oligonucleotide
gccgggcuguggguugcaa

SEQ ID NO: 1828120 - RNA, 19 nt, Artificial Sequence
  Description of Artificial Sequence: Synthetic oligonucleotide
cgaccacauuucccuucaa

SEQ ID NO: 1828121 - RNA, 19 nt, Artificial Sequence
  Description of Artificial Sequence: Synthetic oligonucleotide
ccgucccgucugggguggu

SEQ ID NO: 1828122 - RNA, 19 nt, Artificial Sequence
  Description of Artificial Sequence: Synthetic oligonucleotide
aauacguagaaucagaggc

SEQ ID NO: 1828123 - RNA, 19 nt, Artificial Sequence
  Description of Artificial Sequence: Synthetic oligonucleotide
aaugccaaaucuuauaccc

SEQ ID NO: 1828124 - RNA, 19 nt, Artificial Sequence
  Description of Artificial Sequence: Synthetic oligonucleotide
auuauuaacacguaaaucu

SEQ ID NO: 1828125 - RNA, 19 nt, Artificial Sequence
  Description of Artificial Sequence: Synthetic oligonucleotide
aacagauuugcuuagacug

SEQ ID NO: 1828126 - RNA, 19 nt, Artificial Sequence
  Description of Artificial Sequence: Synthetic oligonucleotide
aacacuaugggacuaacag

SEQ ID NO: 1828127 - RNA, 19 nt, Artificial Sequence
  Description of Artificial Sequence: Synthetic oligonucleotide
ucauacuuaugcaagagag

SEQ ID NO: 1828128 - RNA, 19 nt, Artificial Sequence
  Description of Artificial Sequence: Synthetic oligonucleotide
acuuaugcaagagagagcc

SEQ ID NO: 1828129 - RNA, 19 nt, Artificial Sequence
  Description of Artificial Sequence: Synthetic oligonucleotide
ugguuuagaaauaaguuug

SEQ ID NO: 1828130 - RNA, 19 nt, Artificial Sequence
  Description of Artificial Sequence: Synthetic oligonucleotide
uccaaagucaaacacagga

SEQ ID NO: 1828131 - RNA, 19 nt, Artificial Sequence
  Description of Artificial Sequence: Synthetic oligonucleotide
uuaauagacaucauuaaau

SEQ ID NO: 1828132 - RNA, 19 nt, Artificial Sequence
  Description of Artificial Sequence: Synthetic oligonucleotide
uaaaagucaacuuaauaga

SEQ ID NO: 1828133 - RNA, 19 nt, Artificial Sequence
  Description of Artificial Sequence: Synthetic oligonucleotide
aacaaauuugcuuucugug

SEQ ID NO: 1828134 - RNA, 19 nt, Artificial Sequence
  Description of Artificial Sequence: Synthetic oligonucleotide
aaauacguagaaucagagg

SEQ ID NO: 1828135 - RNA, 19 nt, Artificial Sequence
  Description of Artificial Sequence: Synthetic oligonucleotide
aggcaaaauacguagaauc

SEQ ID NO: 1828136 - RNA, 19 nt, Artificial Sequence
  Description of Artificial Sequence: Synthetic oligonucleotide
aaagugggcauguggagac

SEQ ID NO: 1828137 - RNA, 19 nt, Artificial Sequence
  Description of Artificial Sequence: Synthetic oligonucleotide
acaaauuugcuuucugugg

SEQ ID NO: 1828138 - RNA, 19 nt, Artificial Sequence
  Description of Artificial Sequence: Synthetic oligonucleotide
cucuuuaucacauacugac

SEQ ID NO: 1828139 - RNA, 19 nt, Artificial Sequence
  Description of Artificial Sequence: Synthetic oligonucleotide
uggcacaucauacuuaugc

SEQ ID NO: 1828140 - RNA, 19 nt, Artificial Sequence
  Description of Artificial Sequence: Synthetic oligonucleotide
uuugauaauggcuugucac

SEQ ID NO: 1828141 - RNA, 19 nt, Artificial Sequence
  Description of Artificial Sequence: Synthetic oligonucleotide
aaaugugcucaccaucugg

SEQ ID NO: 1828142 - RNA, 19 nt, Artificial Sequence
  Description of Artificial Sequence: Synthetic oligonucleotide
auacugacaugauacaggg

SEQ ID NO: 1828143 - RNA, 19 nt, Artificial Sequence
  Description of Artificial Sequence: Synthetic oligonucleotide
aagucaacuuaauagacau

SEQ ID NO: 1828144 - RNA, 19 nt, Artificial Sequence
  Description of Artificial Sequence: Synthetic oligonucleotide
uuauuaacacguaaaucug

SEQ ID NO: 1828145 - RNA, 19 nt, Artificial Sequence
  Description of Artificial Sequence: Synthetic oligonucleotide
uguuaaaaugugcucacca

SEQ ID NO: 1828146 - RNA, 19 nt, Artificial Sequence
  Description of Artificial Sequence: Synthetic oligonucleotide
uccaaauccagccaguacu

SEQ ID NO: 1828147 - RNA, 19 nt, Artificial Sequence
  Description of Artificial Sequence: Synthetic oligonucleotide
auaauggcuugucacuucc

SEQ ID NO: 1828148 - RNA, 19 nt, Artificial Sequence
  Description of Artificial Sequence: Synthetic oligonucleotide
auacuuaugcaagagagag

SEQ ID NO: 1828149 - RNA, 19 nt, Artificial Sequence
  Description of Artificial Sequence: Synthetic oligonucleotide
cauacugacaugauacagg

SEQ ID NO: 1828150 - RNA, 19 nt, Artificial Sequence
  Description of Artificial Sequence: Synthetic oligonucleotide
gaucaccugaaacagacug

SEQ ID NO: 1828151 - RNA, 19 nt, Artificial Sequence
  Description of Artificial Sequence: Synthetic oligonucleotide
uguggagacuccaugaaca

SEQ ID NO: 1828152 - RNA, 19 nt, Artificial Sequence
  Description of Artificial Sequence: Synthetic oligonucleotide
aaaauacagacugauguga

SEQ ID NO: 1828153 - RNA, 19 nt, Artificial Sequence
  Description of Artificial Sequence: Synthetic oligonucleotide
acaaaugucugucaauuug

SEQ ID NO: 1828154 - RNA, 19 nt, Artificial Sequence
  Description of Artificial Sequence: Synthetic oligonucleotide
acuaauauauguccaugag

SEQ ID NO: 1828155 - RNA, 19 nt, Artificial Sequence
  Description of Artificial Sequence: Synthetic oligonucleotide
uaaaucugggagcacaugu

SEQ ID NO: 1828156 - RNA, 19 nt, Artificial Sequence
  Description of Artificial Sequence: Synthetic oligonucleotide
aaacuguugcuuucgcagg

SEQ ID NO: 1828157 - RNA, 19 nt, Artificial Sequence
  Description of Artificial Sequence: Synthetic oligonucleotide
auaggaaauacuguuaucu

SEQ ID NO: 1828158 - RNA, 19 nt, Artificial Sequence
  Description of Artificial Sequence: Synthetic oligonucleotide
aaaauacguagaaucagag

SEQ ID NO: 1828159 - RNA, 19 nt, Artificial Sequence
  Description of Artificial Sequence: Synthetic oligonucleotide
aagccgaaucacuucuugc

SEQ ID NO: 1828160 - RNA, 19 nt, Artificial Sequence
  Description of Artificial Sequence: Synthetic oligonucleotide
uguuuauauaggaaauacu

SEQ ID NO: 1828161 - RNA, 19 nt, Artificial Sequence
  Description of Artificial Sequence: Synthetic oligonucleotide
uuaaaaugugcucaccauc

SEQ ID NO: 1828162 - RNA, 19 nt, Artificial Sequence
  Description of Artificial Sequence: Synthetic oligonucleotide
aacuuaauagacaucauua

SEQ ID NO: 1828163 - RNA, 19 nt, Artificial Sequence
  Description of Artificial Sequence: Synthetic oligonucleotide
ugcagcuuagaauugguga

SEQ ID NO: 1828164 - RNA, 19 nt, Artificial Sequence
  Description of Artificial Sequence: Synthetic oligonucleotide
uucagguugaaaacuguug

SEQ ID NO: 1828165 - RNA, 19 nt, Artificial Sequence
  Description of Artificial Sequence: Synthetic oligonucleotide
uaauagacaucauuaaaua

SEQ ID NO: 1828166 - RNA, 19 nt, Artificial Sequence
  Description of Artificial Sequence: Synthetic oligonucleotide
auuccaaaucuucaagcuc

SEQ ID NO: 1828167 - RNA, 19 nt, Artificial Sequence
  Description of Artificial Sequence: Synthetic oligonucleotide
uucuaauuuaaaaugucuu

SEQ ID NO: 1828168 - RNA, 19 nt, Artificial Sequence
  Description of Artificial Sequence: Synthetic oligonucleotide
uccaugagggcuauagaag

SEQ ID NO: 1828169 - RNA, 19 nt, Artificial Sequence
  Description of Artificial Sequence: Synthetic oligonucleotide
caggcauaaaaccauaaac

SEQ ID NO: 1828170 - RNA, 19 nt, Artificial Sequence
  Description of Artificial Sequence: Synthetic oligonucleotide
agagagccaguauaaugcc

SEQ ID NO: 1828171 - RNA, 19 nt, Artificial Sequence
  Description of Artificial Sequence: Synthetic oligonucleotide
uuaucacauacugacauga

SEQ ID NO: 1828172 - RNA, 19 nt, Artificial Sequence
  Description of Artificial Sequence: Synthetic oligonucleotide
ucgaggaccaguuccaaag

SEQ ID NO: 1828173 - RNA, 19 nt, Artificial Sequence
  Description of Artificial Sequence: Synthetic oligonucleotide
uuucgcaggcauaaaacca

SEQ ID NO: 1828174 - RNA, 19 nt, Artificial Sequence
  Description of Artificial Sequence: Synthetic oligonucleotide
uauauaggaaauacuguua

SEQ ID NO: 1828175 - RNA, 19 nt, Artificial Sequence
  Description of Artificial Sequence: Synthetic oligonucleotide
uuugcuuagacugguuccg

SEQ ID NO: 1828176 - RNA, 19 nt, Artificial Sequence
  Description of Artificial Sequence: Synthetic oligonucleotide
cugguuuauuucuuaaggc

SEQ ID NO: 1828177 - RNA, 19 nt, Artificial Sequence
  Description of Artificial Sequence: Synthetic oligonucleotide
cuuucgcaggcauaaaacc

SEQ ID NO: 1828178 - RNA, 19 nt, Artificial Sequence
  Description of Artificial Sequence: Synthetic oligonucleotide
gaaacagacugggugauag

SEQ ID NO: 1828179 - RNA, 19 nt, Artificial Sequence
  Description of Artificial Sequence: Synthetic oligonucleotide
aauggcuugucacuuccug

SEQ ID NO: 1828180 - RNA, 19 nt, Artificial Sequence
  Description of Artificial Sequence: Synthetic oligonucleotide
aggaucacacuucagguug

SEQ ID NO: 1828181 - RNA, 19 nt, Artificial Sequence
  Description of Artificial Sequence: Synthetic oligonucleotide
aaagucaaacacaggauca

SEQ ID NO: 1828182 - RNA, 19 nt, Artificial Sequence
  Description of Artificial Sequence: Synthetic oligonucleotide
uuuugauaauggcuuguca

SEQ ID NO: 1828183 - RNA, 19 nt, Artificial Sequence
  Description of Artificial Sequence: Synthetic oligonucleotide
guuuauuucuuaaggcugg

SEQ ID NO: 1828184 - RNA, 19 nt, Artificial Sequence
  Description of Artificial Sequence: Synthetic oligonucleotide
gucaacuuaauagacauca

SEQ ID NO: 1828185 - RNA, 19 nt, Artificial Sequence
  Description of Artificial Sequence: Synthetic oligonucleotide
agagagagccaguauaaug

SEQ ID NO: 1828186 - RNA, 19 nt, Artificial Sequence
  Description of Artificial Sequence: Synthetic oligonucleotide
uauaaugccaaaucuuaua

SEQ ID NO: 1828187 - RNA, 19 nt, Artificial Sequence
  Description of Artificial Sequence: Synthetic oligonucleotide
acaucauuaaauaaucaca

SEQ ID NO: 1828188 - RNA, 19 nt, Artificial Sequence
  Description of Artificial Sequence: Synthetic oligonucleotide
gauacaggguagcagacca

SEQ ID NO: 1828189 - RNA, 19 nt, Artificial Sequence
  Description of Artificial Sequence: Synthetic oligonucleotide
auacccauuauuaacacgu

SEQ ID NO: 1828190 - RNA, 19 nt, Artificial Sequence
  Description of Artificial Sequence: Synthetic oligonucleotide
uugauaauggcuugucacu

SEQ ID NO: 1828191 - RNA, 19 nt, Artificial Sequence
  Description of Artificial Sequence: Synthetic oligonucleotide
aacuuuagguuccucacua

SEQ ID NO: 1828192 - RNA, 19 nt, Artificial Sequence
  Description of Artificial Sequence: Synthetic oligonucleotide
gggagguucaucuucaugc

SEQ ID NO: 1828193 - RNA, 19 nt, Artificial Sequence
  Description of Artificial Sequence: Synthetic oligonucleotide
gaugugguuucauauucug

SEQ ID NO: 1828194 - RNA, 19 nt, Artificial Sequence
  Description of Artificial Sequence: Synthetic oligonucleotide
gaaggcugcauuucgagga

SEQ ID NO: 1828195 - RNA, 19 nt, Artificial Sequence
  Description of Artificial Sequence: Synthetic oligonucleotide
uaugggacuaacagauuug

SEQ ID NO: 1828196 - RNA, 19 nt, Artificial Sequence
  Description of Artificial Sequence: Synthetic oligonucleotide
uuuaucacauacugacaug

SEQ ID NO: 1828197 - RNA, 19 nt, Artificial Sequence
  Description of Artificial Sequence: Synthetic oligonucleotide
uguuccgugguacacucug

SEQ ID NO: 1828198 - RNA, 19 nt, Artificial Sequence
  Description of Artificial Sequence: Synthetic oligonucleotide
aaauaaucacacauaugca

SEQ ID NO: 1828199 - RNA, 19 nt, Artificial Sequence
  Description of Artificial Sequence: Synthetic oligonucleotide
aacagacugggugauagug

SEQ ID NO: 1828200 - RNA, 19 nt, Artificial Sequence
  Description of Artificial Sequence: Synthetic oligonucleotide
uccauuggauggcacauca

SEQ ID NO: 1828201 - RNA, 19 nt, Artificial Sequence
  Description of Artificial Sequence: Synthetic oligonucleotide
uguuaagcuuuucuggaaa

SEQ ID NO: 1828202 - RNA, 19 nt, Artificial Sequence
  Description of Artificial Sequence: Synthetic oligonucleotide
acuuaauagacaucauuaa

SEQ ID NO: 1828203 - RNA, 19 nt, Artificial Sequence
  Description of Artificial Sequence: Synthetic oligonucleotide
uggaugugguuucauauuc

SEQ ID NO: 1828204 - RNA, 19 nt, Artificial Sequence
  Description of Artificial Sequence: Synthetic oligonucleotide
auacguagaaucagaggcc

SEQ ID NO: 1828205 - RNA, 19 nt, Artificial Sequence
  Description of Artificial Sequence: Synthetic oligonucleotide
ucuuuaucacauacugaca

SEQ ID NO: 1828206 - RNA, 19 nt, Artificial Sequence
  Description of Artificial Sequence: Synthetic oligonucleotide
uguggcuguuaaaaugugc

SEQ ID NO: 1828207 - RNA, 19 nt, Artificial Sequence
  Description of Artificial Sequence: Synthetic oligonucleotide
augggacuaacagauuugc

SEQ ID NO: 1828208 - RNA, 19 nt, Artificial Sequence
  Description of Artificial Sequence: Synthetic oligonucleotide
uaacagauuugcuuagacu

SEQ ID NO: 1828209 - RNA, 19 nt, Artificial Sequence
  Description of Artificial Sequence: Synthetic oligonucleotide
uacagacugaugugaaaag

SEQ ID NO: 1828210 - RNA, 19 nt, Artificial Sequence
  Description of Artificial Sequence: Synthetic oligonucleotide
aaggcugcauuucgaggac

SEQ ID NO: 1828211 - RNA, 19 nt, Artificial Sequence
  Description of Artificial Sequence: Synthetic oligonucleotide
uagaagccgaaucacuucu

SEQ ID NO: 1828212 - RNA, 19 nt, Artificial Sequence
  Description of Artificial Sequence: Synthetic oligonucleotide
aaaaccaaucaucucucuu

SEQ ID NO: 1828213 - RNA, 19 nt, Artificial Sequence
  Description of Artificial Sequence: Synthetic oligonucleotide
gauuugcuuagacugguuc

SEQ ID NO: 1828214 - RNA, 19 nt, Artificial Sequence
  Description of Artificial Sequence: Synthetic oligonucleotide
cagacugaugugaaaagug

SEQ ID NO: 1828215 - RNA, 19 nt, Artificial Sequence
  Description of Artificial Sequence: Synthetic oligonucleotide
caugauacaggguagcaga

SEQ ID NO: 1828216 - RNA, 19 nt, Artificial Sequence
  Description of Artificial Sequence: Synthetic oligonucleotide
cauacuuccauuuguccuc

SEQ ID NO: 1828217 - RNA, 19 nt, Artificial Sequence
  Description of Artificial Sequence: Synthetic oligonucleotide
aaaaugugcucaccaucug

SEQ ID NO: 1828218 - RNA, 19 nt, Artificial Sequence
  Description of Artificial Sequence: Synthetic oligonucleotide
ucucuuuaucacauacuga

SEQ ID NO: 1828219 - RNA, 19 nt, Artificial Sequence
  Description of Artificial Sequence: Synthetic oligonucleotide
aagcuguagcaacuuuagg

SEQ ID NO: 1828220 - RNA, 19 nt, Artificial Sequence
  Description of Artificial Sequence: Synthetic oligonucleotide
uagaaauaaguuuguaguu

SEQ ID NO: 1828221 - RNA, 19 nt, Artificial Sequence
  Description of Artificial Sequence: Synthetic oligonucleotide
aguguuccgugguacacuc

SEQ ID NO: 1828222 - RNA, 19 nt, Artificial Sequence
  Description of Artificial Sequence: Synthetic oligonucleotide
aaucagaggccacugguuu

SEQ ID NO: 1828223 - RNA, 19 nt, Artificial Sequence
  Description of Artificial Sequence: Synthetic oligonucleotide
acauaugcagccuuggaua

SEQ ID NO: 1828224 - RNA, 19 nt, Artificial Sequence
  Description of Artificial Sequence: Synthetic oligonucleotide
aauacagacugaugugaaa

SEQ ID NO: 1828225 - RNA, 19 nt, Artificial Sequence
  Description of Artificial Sequence: Synthetic oligonucleotide
aaaagugggcauguggaga

SEQ ID NO: 1828226 - RNA, 19 nt, Artificial Sequence
  Description of Artificial Sequence: Synthetic oligonucleotide
agaaggcugcauuucgagg

SEQ ID NO: 1828227 - RNA, 19 nt, Artificial Sequence
  Description of Artificial Sequence: Synthetic oligonucleotide
agcaacuuuagguuccuca

SEQ ID NO: 1828228 - RNA, 19 nt, Artificial Sequence
  Description of Artificial Sequence: Synthetic oligonucleotide
ucaugcagcuuagaauugg

SEQ ID NO: 1828229 - RNA, 19 nt, Artificial Sequence
  Description of Artificial Sequence: Synthetic oligonucleotide
aaauccagccaguacuaau

SEQ ID NO: 1828230 - RNA, 19 nt, Artificial Sequence
  Description of Artificial Sequence: Synthetic oligonucleotide
agccaguacuaauauaugu

SEQ ID NO: 1828231 - RNA, 19 nt, Artificial Sequence
  Description of Artificial Sequence: Synthetic oligonucleotide
caccaggcaaaauacguag

SEQ ID NO: 1828232 - RNA, 19 nt, Artificial Sequence
  Description of Artificial Sequence: Synthetic oligonucleotide
cuaacagauuugcuuagac

SEQ ID NO: 1828233 - RNA, 19 nt, Artificial Sequence
  Description of Artificial Sequence: Synthetic oligonucleotide
caaaauacguagaaucaga

SEQ ID NO: 1828234 - RNA, 19 nt, Artificial Sequence
  Description of Artificial Sequence: Synthetic oligonucleotide
cauuauuaacacguaaauc

SEQ ID NO: 1828235 - RNA, 19 nt, Artificial Sequence
  Description of Artificial Sequence: Synthetic oligonucleotide
auucuggggagguucaucu

SEQ ID NO: 1828236 - RNA, 19 nt, Artificial Sequence
  Description of Artificial Sequence: Synthetic oligonucleotide
uauauguccaugagggcua

SEQ ID NO: 1828237 - RNA, 19 nt, Artificial Sequence
  Description of Artificial Sequence: Synthetic oligonucleotide
uccucgaagauuuccaaau

SEQ ID NO: 1828238 - RNA, 19 nt, Artificial Sequence
  Description of Artificial Sequence: Synthetic oligonucleotide
ucccaauuccaaaucuuca

SEQ ID NO: 1828239 - RNA, 19 nt, Artificial Sequence
  Description of Artificial Sequence: Synthetic oligonucleotide
uucccaauuccaaaucuuc

SEQ ID NO: 1828240 - RNA, 19 nt, Artificial Sequence
  Description of Artificial Sequence: Synthetic oligonucleotide
gacuaacagauuugcuuag

SEQ ID NO: 1828241 - RNA, 19 nt, Artificial Sequence
  Description of Artificial Sequence: Synthetic oligonucleotide
uagaauuggugacugguuu

SEQ ID NO: 1828242 - RNA, 19 nt, Artificial Sequence
  Description of Artificial Sequence: Synthetic oligonucleotide
cuuaauagacaucauuaaa

SEQ ID NO: 1828243 - RNA, 19 nt, Artificial Sequence
  Description of Artificial Sequence: Synthetic oligonucleotide
gaugacgggaguagaagcc

SEQ ID NO: 1828244 - RNA, 19 nt, Artificial Sequence
  Description of Artificial Sequence: Synthetic oligonucleotide
ccaguacuaauauaugucc

SEQ ID NO: 1828245 - RNA, 19 nt, Artificial Sequence
  Description of Artificial Sequence: Synthetic oligonucleotide
uacuuaugcaagagagagc

SEQ ID NO: 1828246 - RNA, 19 nt, Artificial Sequence
  Description of Artificial Sequence: Synthetic oligonucleotide
uuagguuccucacuaggua

SEQ ID NO: 1828247 - RNA, 19 nt, Artificial Sequence
  Description of Artificial Sequence: Synthetic oligonucleotide
gugguuucauauucugggg

SEQ ID NO: 1828248 - RNA, 19 nt, Artificial Sequence
  Description of Artificial Sequence: Synthetic oligonucleotide
uuaacacguaaaucuggga

SEQ ID NO: 1828249 - RNA, 19 nt, Artificial Sequence
  Description of Artificial Sequence: Synthetic oligonucleotide
ucuagcuguuucccagagg

SEQ ID NO: 1828250 - RNA, 19 nt, Artificial Sequence
  Description of Artificial Sequence: Synthetic oligonucleotide
acugcuugguacauuauug

SEQ ID NO: 1828251 - RNA, 19 nt, Artificial Sequence
  Description of Artificial Sequence: Synthetic oligonucleotide
aguauaaugccaaaucuua

SEQ ID NO: 1828252 - RNA, 19 nt, Artificial Sequence
  Description of Artificial Sequence: Synthetic oligonucleotide
agaaauaaguuuguaguuu

SEQ ID NO: 1828253 - RNA, 19 nt, Artificial Sequence
  Description of Artificial Sequence: Synthetic oligonucleotide
gaagccgaaucacuucuug

SEQ ID NO: 1828254 - RNA, 19 nt, Artificial Sequence
  Description of Artificial Sequence: Synthetic oligonucleotide
uucgcaggcauaaaaccau

SEQ ID NO: 1828255 - RNA, 19 nt, Artificial Sequence
  Description of Artificial Sequence: Synthetic oligonucleotide
ugggugauaguguuccgug

SEQ ID NO: 1828256 - RNA, 19 nt, Artificial Sequence
  Description of Artificial Sequence: Synthetic oligonucleotide
aaaucugggagcacaugug

SEQ ID NO: 1828257 - RNA, 19 nt, Artificial Sequence
  Description of Artificial Sequence: Synthetic oligonucleotide
aucacuucuugcuuccugu

SEQ ID NO: 1828258 - RNA, 19 nt, Artificial Sequence
  Description of Artificial Sequence: Synthetic oligonucleotide
auuggugacugguuuauuu

SEQ ID NO: 1828259 - RNA, 19 nt, Artificial Sequence
  Description of Artificial Sequence: Synthetic oligonucleotide
gguuucauauucuggggag

SEQ ID NO: 1828260 - RNA, 19 nt, Artificial Sequence
  Description of Artificial Sequence: Synthetic oligonucleotide
uuagaauuggugacugguu

SEQ ID NO: 1828261 - RNA, 19 nt, Artificial Sequence
  Description of Artificial Sequence: Synthetic oligonucleotide
agccgaaucacuucuugcu

SEQ ID NO: 1828262 - RNA, 19 nt, Artificial Sequence
  Description of Artificial Sequence: Synthetic oligonucleotide
caaauuugcuuucugugga

SEQ ID NO: 1828263 - RNA, 19 nt, Artificial Sequence
  Description of Artificial Sequence: Synthetic oligonucleotide
aggguagcagaccauaaaa

SEQ ID NO: 1828264 - RNA, 19 nt, Artificial Sequence
  Description of Artificial Sequence: Synthetic oligonucleotide
ugcauuucgaggaccaguu

SEQ ID NO: 1828265 - RNA, 19 nt, Artificial Sequence
  Description of Artificial Sequence: Synthetic oligonucleotide
auaguguuccgugguacac

SEQ ID NO: 1828266 - RNA, 19 nt, Artificial Sequence
  Description of Artificial Sequence: Synthetic oligonucleotide
gguuuauuucuuaaggcug

SEQ ID NO: 1828267 - RNA, 19 nt, Artificial Sequence
  Description of Artificial Sequence: Synthetic oligonucleotide
acagauuugcuuagacugg

SEQ ID NO: 1828268 - RNA, 19 nt, Artificial Sequence
  Description of Artificial Sequence: Synthetic oligonucleotide
acacuaugggacuaacaga

SEQ ID NO: 1828269 - RNA, 19 nt, Artificial Sequence
  Description of Artificial Sequence: Synthetic oligonucleotide
uacguagaaucagaggcca

SEQ ID NO: 1828270 - RNA, 19 nt, Artificial Sequence
  Description of Artificial Sequence: Synthetic oligonucleotide
ugaugugaaaagugggcau

SEQ ID NO: 1828271 - RNA, 19 nt, Artificial Sequence
  Description of Artificial Sequence: Synthetic oligonucleotide
ucacacauaugcagccuug

SEQ ID NO: 1828272 - RNA, 19 nt, Artificial Sequence
  Description of Artificial Sequence: Synthetic oligonucleotide
ugagggcuauagaaggcug

SEQ ID NO: 1828273 - RNA, 19 nt, Artificial Sequence
  Description of Artificial Sequence: Synthetic oligonucleotide
uuaagcuuuucuggaaaac

SEQ ID NO: 1828274 - RNA, 19 nt, Artificial Sequence
  Description of Artificial Sequence: Synthetic oligonucleotide
caugagggcuauagaaggc

SEQ ID NO: 1828275 - RNA, 19 nt, Artificial Sequence
  Description of Artificial Sequence: Synthetic oligonucleotide
ugcuuucgcaggcauaaaa

SEQ ID NO: 1828276 - RNA, 19 nt, Artificial Sequence
  Description of Artificial Sequence: Synthetic oligonucleotide
uagguuccucacuagguac

SEQ ID NO: 1828277 - RNA, 19 nt, Artificial Sequence
  Description of Artificial Sequence: Synthetic oligonucleotide
uuccggccaacaaauuugc

SEQ ID NO: 1828278 - RNA, 19 nt, Artificial Sequence
  Description of Artificial Sequence: Synthetic oligonucleotide
uggcuugucacuuccugga

SEQ ID NO: 1828279 - RNA, 19 nt, Artificial Sequence
  Description of Artificial Sequence: Synthetic oligonucleotide
uaggaaauacuguuaucua

SEQ ID NO: 1828280 - RNA, 19 nt, Artificial Sequence
  Description of Artificial Sequence: Synthetic oligonucleotide
caucauacuuaugcaagag

SEQ ID NO: 1828281 - RNA, 19 nt, Artificial Sequence
  Description of Artificial Sequence: Synthetic oligonucleotide
gauaauggcuugucacuuc

SEQ ID NO: 1828282 - RNA, 19 nt, Artificial Sequence
  Description of Artificial Sequence: Synthetic oligonucleotide
guugcucuauugcuuuuag

SEQ ID NO: 1828283 - RNA, 19 nt, Artificial Sequence
  Description of Artificial Sequence: Synthetic oligonucleotide
gugcucaccaucuggacac

SEQ ID NO: 1828284 - RNA, 19 nt, Artificial Sequence
  Description of Artificial Sequence: Synthetic oligonucleotide
aaauacagacugaugugaa

SEQ ID NO: 1828285 - RNA, 19 nt, Artificial Sequence
  Description of Artificial Sequence: Synthetic oligonucleotide
uggauggcacaucauacuu

SEQ ID NO: 1828286 - RNA, 19 nt, Artificial Sequence
  Description of Artificial Sequence: Synthetic oligonucleotide
acaugauacaggguagcag

SEQ ID NO: 1828287 - RNA, 19 nt, Artificial Sequence
  Description of Artificial Sequence: Synthetic oligonucleotide
guuucauauucuggggagg

SEQ ID NO: 1828288 - RNA, 19 nt, Artificial Sequence
  Description of Artificial Sequence: Synthetic oligonucleotide
uuccgugguacacucugug

SEQ ID NO: 1828289 - RNA, 19 nt, Artificial Sequence
  Description of Artificial Sequence: Synthetic oligonucleotide
uuccaaauccagccaguac

SEQ ID NO: 1828290 - RNA, 19 nt, Artificial Sequence
  Description of Artificial Sequence: Synthetic oligonucleotide
guacuaauauauguccaug

SEQ ID NO: 1828291 - RNA, 19 nt, Artificial Sequence
  Description of Artificial Sequence: Synthetic oligonucleotide
aucacauacugacaugaua

SEQ ID NO: 1828292 - RNA, 19 nt, Artificial Sequence
  Description of Artificial Sequence: Synthetic oligonucleotide
uuguuaagcuuuucuggaa

SEQ ID NO: 1828293 - RNA, 19 nt, Artificial Sequence
  Description of Artificial Sequence: Synthetic oligonucleotide
agaccauaaaagucaacuu

SEQ ID NO: 1828294 - RNA, 19 nt, Artificial Sequence
  Description of Artificial Sequence: Synthetic oligonucleotide
guuccggccaacaaauuug

SEQ ID NO: 1828295 - RNA, 19 nt, Artificial Sequence
  Description of Artificial Sequence: Synthetic oligonucleotide
aucccauacuuccauuugu

SEQ ID NO: 1828296 - RNA, 19 nt, Artificial Sequence
  Description of Artificial Sequence: Synthetic oligonucleotide
acugguuccggccaacaaa

SEQ ID NO: 1828297 - RNA, 19 nt, Artificial Sequence
  Description of Artificial Sequence: Synthetic oligonucleotide
ugacaugauacaggguagc

SEQ ID NO: 1828298 - RNA, 19 nt, Artificial Sequence
  Description of Artificial Sequence: Synthetic oligonucleotide
ugauaguguuccgugguac

SEQ ID NO: 1828299 - RNA, 19 nt, Artificial Sequence
  Description of Artificial Sequence: Synthetic oligonucleotide
cauacuuaugcaagagaga

SEQ ID NO: 1828300 - RNA, 19 nt, Artificial Sequence
  Description of Artificial Sequence: Synthetic oligonucleotide
augacgggaguagaagccg

SEQ ID NO: 1828301 - RNA, 19 nt, Artificial Sequence
  Description of Artificial Sequence: Synthetic oligonucleotide
gcaaaauacguagaaucag

SEQ ID NO: 1828302 - RNA, 19 nt, Artificial Sequence
  Description of Artificial Sequence: Synthetic oligonucleotide
guccaugagggcuauagaa

SEQ ID NO: 1828303 - RNA, 19 nt, Artificial Sequence
  Description of Artificial Sequence: Synthetic oligonucleotide
aaacagacugggugauagu

SEQ ID NO: 1828304 - RNA, 19 nt, Artificial Sequence
  Description of Artificial Sequence: Synthetic oligonucleotide
cuuuaucacauacugacau

SEQ ID NO: 1828305 - RNA, 19 nt, Artificial Sequence
  Description of Artificial Sequence: Synthetic oligonucleotide
cuguagcaacuuuagguuc

SEQ ID NO: 1828306 - RNA, 19 nt, Artificial Sequence
  Description of Artificial Sequence: Synthetic oligonucleotide
uuucccagaggcugccugc

SEQ ID NO: 1828307 - RNA, 19 nt, Artificial Sequence
  Description of Artificial Sequence: Synthetic oligonucleotide
ugacugguuuauuucuuaa

SEQ ID NO: 1828308 - RNA, 19 nt, Artificial Sequence
  Description of Artificial Sequence: Synthetic oligonucleotide
uccauuuguccucgaagau

SEQ ID NO: 1828309 - RNA, 19 nt, Artificial Sequence
  Description of Artificial Sequence: Synthetic oligonucleotide
agaauuggugacugguuua

SEQ ID NO: 1828310 - RNA, 19 nt, Artificial Sequence
  Description of Artificial Sequence: Synthetic oligonucleotide
augauacaggguagcagac

SEQ ID NO: 1828311 - RNA, 19 nt, Artificial Sequence
  Description of Artificial Sequence: Synthetic oligonucleotide
uguaagcuguagcaacuuu

SEQ ID NO: 1828312 - RNA, 19 nt, Artificial Sequence
  Description of Artificial Sequence: Synthetic oligonucleotide
ggaugacgggaguagaagc

SEQ ID NO: 1828313 - RNA, 19 nt, Artificial Sequence
  Description of Artificial Sequence: Synthetic oligonucleotide
ucuuaaggcuggaggucug

SEQ ID NO: 1828314 - RNA, 19 nt, Artificial Sequence
  Description of Artificial Sequence: Synthetic oligonucleotide
caagcucucggagaagggc

SEQ ID NO: 1828315 - RNA, 19 nt, Artificial Sequence
  Description of Artificial Sequence: Synthetic oligonucleotide
auacuuccauuuguccucg

SEQ ID NO: 1828316 - RNA, 19 nt, Artificial Sequence
  Description of Artificial Sequence: Synthetic oligonucleotide
ugcuuagacugguuccggc

SEQ ID NO: 1828317 - RNA, 19 nt, Artificial Sequence
  Description of Artificial Sequence: Synthetic oligonucleotide
uggcugccaagaaaccugc

SEQ ID NO: 1828318 - RNA, 19 nt, Artificial Sequence
  Description of Artificial Sequence: Synthetic oligonucleotide
agcuuagaauuggugacug

SEQ ID NO: 1828319 - RNA, 19 nt, Artificial Sequence
  Description of Artificial Sequence: Synthetic oligonucleotide
cacuaugggacuaacagau

SEQ ID NO: 1828320 - RNA, 19 nt, Artificial Sequence
  Description of Artificial Sequence: Synthetic oligonucleotide
ugggacuaacagauuugcu

SEQ ID NO: 1828321 - RNA, 19 nt, Artificial Sequence
  Description of Artificial Sequence: Synthetic oligonucleotide
acccauuauuaacacguaa

SEQ ID NO: 1828322 - RNA, 19 nt, Artificial Sequence
  Description of Artificial Sequence: Synthetic oligonucleotide
acguaaaucugggagcaca

SEQ ID NO: 1828323 - RNA, 19 nt, Artificial Sequence
  Description of Artificial Sequence: Synthetic oligonucleotide
gccaguauaaugccaaauc

SEQ ID NO: 1828324 - RNA, 19 nt, Artificial Sequence
  Description of Artificial Sequence: Synthetic oligonucleotide
caucccauacuuccauuug

SEQ ID NO: 1828325 - RNA, 19 nt, Artificial Sequence
  Description of Artificial Sequence: Synthetic oligonucleotide
ugcaagagagagccaguau

SEQ ID NO: 1828326 - RNA, 19 nt, Artificial Sequence
  Description of Artificial Sequence: Synthetic oligonucleotide
guagaaucagaggccacug

SEQ ID NO: 1828327 - RNA, 19 nt, Artificial Sequence
  Description of Artificial Sequence: Synthetic oligonucleotide
ugacgggaguagaagccga

SEQ ID NO: 1828328 - RNA, 19 nt, Artificial Sequence
  Description of Artificial Sequence: Synthetic oligonucleotide
cuauagaaggcugcauuuc

SEQ ID NO: 1828329 - RNA, 19 nt, Artificial Sequence
  Description of Artificial Sequence: Synthetic oligonucleotide
ugggaugacgggaguagaa

SEQ ID NO: 1828330 - RNA, 19 nt, Artificial Sequence
  Description of Artificial Sequence: Synthetic oligonucleotide
gcaacuuuagguuccucac

SEQ ID NO: 1828331 - RNA, 19 nt, Artificial Sequence
  Description of Artificial Sequence: Synthetic oligonucleotide
cuggaaaaccaaucaucuc

SEQ ID NO: 1828332 - RNA, 19 nt, Artificial Sequence
  Description of Artificial Sequence: Synthetic oligonucleotide
gggaguagaagccgaauca

SEQ ID NO: 1828333 - RNA, 19 nt, Artificial Sequence
  Description of Artificial Sequence: Synthetic oligonucleotide
uugcuuagacugguuccgg

SEQ ID NO: 1828334 - RNA, 19 nt, Artificial Sequence
  Description of Artificial Sequence: Synthetic oligonucleotide
cacacauaugcagccuugg

SEQ ID NO: 1828335 - RNA, 19 nt, Artificial Sequence
  Description of Artificial Sequence: Synthetic oligonucleotide
uggcuguuaaaaugugcuc

SEQ ID NO: 1828336 - RNA, 19 nt, Artificial Sequence
  Description of Artificial Sequence: Synthetic oligonucleotide
guugcuuucgcaggcauaa

SEQ ID NO: 1828337 - RNA, 19 nt, Artificial Sequence
  Description of Artificial Sequence: Synthetic oligonucleotide
ggacuaacagauuugcuua

SEQ ID NO: 1828338 - RNA, 19 nt, Artificial Sequence
  Description of Artificial Sequence: Synthetic oligonucleotide
augagggcuauagaaggcu

SEQ ID NO: 1828339 - RNA, 19 nt, Artificial Sequence
  Description of Artificial Sequence: Synthetic oligonucleotide
cauuggauggcacaucaua

SEQ ID NO: 1828340 - RNA, 19 nt, Artificial Sequence
  Description of Artificial Sequence: Synthetic oligonucleotide
cuuagacugguuccggcca

SEQ ID NO: 1828341 - RNA, 19 nt, Artificial Sequence
  Description of Artificial Sequence: Synthetic oligonucleotide
ggcaaaauacguagaauca

SEQ ID NO: 1828342 - RNA, 19 nt, Artificial Sequence
  Description of Artificial Sequence: Synthetic oligonucleotide
guuaaaaugugcucaccau

SEQ ID NO: 1828343 - RNA, 19 nt, Artificial Sequence
  Description of Artificial Sequence: Synthetic oligonucleotide
ucuccauuggauggcacau

SEQ ID NO: 1828344 - RNA, 19 nt, Artificial Sequence
  Description of Artificial Sequence: Synthetic oligonucleotide
cauauucuggggagguuca

SEQ ID NO: 1828345 - RNA, 19 nt, Artificial Sequence
  Description of Artificial Sequence: Synthetic oligonucleotide
aggaccaguuccaaaguca

SEQ ID NO: 1828346 - RNA, 19 nt, Artificial Sequence
  Description of Artificial Sequence: Synthetic oligonucleotide
gagggcuauagaaggcugc

SEQ ID NO: 1828347 - RNA, 19 nt, Artificial Sequence
  Description of Artificial Sequence: Synthetic oligonucleotide
uaauggcuugucacuuccu

SEQ ID NO: 1828348 - RNA, 19 nt, Artificial Sequence
  Description of Artificial Sequence: Synthetic oligonucleotide
cucuagcuguuucccagag

SEQ ID NO: 1828349 - RNA, 19 nt, Artificial Sequence
  Description of Artificial Sequence: Synthetic oligonucleotide
cuguuaaaaugugcucacc

SEQ ID NO: 1828350 - RNA, 19 nt, Artificial Sequence
  Description of Artificial Sequence: Synthetic oligonucleotide
acugggugauaguguuccg

SEQ ID NO: 1828351 - RNA, 19 nt, Artificial Sequence
  Description of Artificial Sequence: Synthetic oligonucleotide
cagccaguacuaauauaug

SEQ ID NO: 1828352 - RNA, 19 nt, Artificial Sequence
  Description of Artificial Sequence: Synthetic oligonucleotide
uugcucuauugcuuuuagu

SEQ ID NO: 1828353 - RNA, 19 nt, Artificial Sequence
  Description of Artificial Sequence: Synthetic oligonucleotide
ccaaucaucucucuuuauc

SEQ ID NO: 1828354 - RNA, 19 nt, Artificial Sequence
  Description of Artificial Sequence: Synthetic oligonucleotide
cauaugcagccuuggauaa

SEQ ID NO: 1828355 - RNA, 19 nt, Artificial Sequence
  Description of Artificial Sequence: Synthetic oligonucleotide
ucacuuggaacugcuuggu

SEQ ID NO: 1828356 - RNA, 19 nt, Artificial Sequence
  Description of Artificial Sequence: Synthetic oligonucleotide
gcuuagacugguuccggcc

SEQ ID NO: 1828357 - RNA, 19 nt, Artificial Sequence
  Description of Artificial Sequence: Synthetic oligonucleotide
uccucacuagguacuucac

SEQ ID NO: 1828358 - RNA, 19 nt, Artificial Sequence
  Description of Artificial Sequence: Synthetic oligonucleotide
caagaaaccugccauaauu

SEQ ID NO: 1828359 - RNA, 19 nt, Artificial Sequence
  Description of Artificial Sequence: Synthetic oligonucleotide
cacauacugacaugauaca

SEQ ID NO: 1828360 - RNA, 19 nt, Artificial Sequence
  Description of Artificial Sequence: Synthetic oligonucleotide
acuaacagauuugcuuaga

SEQ ID NO: 1828361 - RNA, 19 nt, Artificial Sequence
  Description of Artificial Sequence: Synthetic oligonucleotide
augugaaaagugggcaugu

SEQ ID NO: 1828362 - RNA, 19 nt, Artificial Sequence
  Description of Artificial Sequence: Synthetic oligonucleotide
gggugauaguguuccgugg

SEQ ID NO: 1828363 - RNA, 19 nt, Artificial Sequence
  Description of Artificial Sequence: Synthetic oligonucleotide
uacaggguagcagaccaua

SEQ ID NO: 1828364 - RNA, 19 nt, Artificial Sequence
  Description of Artificial Sequence: Synthetic oligonucleotide
gguacuucacuuggaacug

SEQ ID NO: 1828365 - RNA, 19 nt, Artificial Sequence
  Description of Artificial Sequence: Synthetic oligonucleotide
uauucuggggagguucauc

SEQ ID NO: 1828366 - RNA, 19 nt, Artificial Sequence
  Description of Artificial Sequence: Synthetic oligonucleotide
ggcacaucauacuuaugca

SEQ ID NO: 1828367 - RNA, 19 nt, Artificial Sequence
  Description of Artificial Sequence: Synthetic oligonucleotide
guaagcuguagcaacuuua

SEQ ID NO: 1828368 - RNA, 19 nt, Artificial Sequence
  Description of Artificial Sequence: Synthetic oligonucleotide
auagaaggcugcauuucga

SEQ ID NO: 1828369 - RNA, 19 nt, Artificial Sequence
  Description of Artificial Sequence: Synthetic oligonucleotide
uguugcuuucgcaggcaua

SEQ ID NO: 1828370 - RNA, 19 nt, Artificial Sequence
  Description of Artificial Sequence: Synthetic oligonucleotide
gccauaauucuccauugga

SEQ ID NO: 1828371 - RNA, 19 nt, Artificial Sequence
  Description of Artificial Sequence: Synthetic oligonucleotide
uacccauuauuaacacgua

SEQ ID NO: 1828372 - RNA, 19 nt, Artificial Sequence
  Description of Artificial Sequence: Synthetic oligonucleotide
ggaacugcuugguacauua

SEQ ID NO: 1828373 - RNA, 19 nt, Artificial Sequence
  Description of Artificial Sequence: Synthetic oligonucleotide
uaguguuccgugguacacu

SEQ ID NO: 1828374 - RNA, 19 nt, Artificial Sequence
  Description of Artificial Sequence: Synthetic oligonucleotide
uucgaggaccaguuccaaa

SEQ ID NO: 1828375 - RNA, 19 nt, Artificial Sequence
  Description of Artificial Sequence: Synthetic oligonucleotide
gcaagagagagccaguaua

SEQ ID NO: 1828376 - RNA, 19 nt, Artificial Sequence
  Description of Artificial Sequence: Synthetic oligonucleotide
ggcauguggagacuccaug

SEQ ID NO: 1828377 - RNA, 19 nt, Artificial Sequence
  Description of Artificial Sequence: Synthetic oligonucleotide
acagacugggugauagugu

SEQ ID NO: 1828378 - RNA, 19 nt, Artificial Sequence
  Description of Artificial Sequence: Synthetic oligonucleotide
gccaguacuaauauauguc

SEQ ID NO: 1828379 - RNA, 19 nt, Artificial Sequence
  Description of Artificial Sequence: Synthetic oligonucleotide
gcuuagaauuggugacugg

SEQ ID NO: 1828380 - RNA, 19 nt, Artificial Sequence
  Description of Artificial Sequence: Synthetic oligonucleotide
ggaguagaagccgaaucac

SEQ ID NO: 1828381 - RNA, 19 nt, Artificial Sequence
  Description of Artificial Sequence: Synthetic oligonucleotide
gcuuucgcaggcauaaaac

SEQ ID NO: 1828382 - RNA, 19 nt, Artificial Sequence
  Description of Artificial Sequence: Synthetic oligonucleotide
agggcuauagaaggcugca

SEQ ID NO: 1828383 - RNA, 19 nt, Artificial Sequence
  Description of Artificial Sequence: Synthetic oligonucleotide
ugggcauguggagacucca

SEQ ID NO: 1828384 - RNA, 19 nt, Artificial Sequence
  Description of Artificial Sequence: Synthetic oligonucleotide
ggacaccaggcaaaauacg

SEQ ID NO: 1828385 - RNA, 19 nt, Artificial Sequence
  Description of Artificial Sequence: Synthetic oligonucleotide
uccagccaguacuaauaua

SEQ ID NO: 1828386 - RNA, 19 nt, Artificial Sequence
  Description of Artificial Sequence: Synthetic oligonucleotide
caguauaaugccaaaucuu

SEQ ID NO: 1828387 - RNA, 19 nt, Artificial Sequence
  Description of Artificial Sequence: Synthetic oligonucleotide
ucgcaggcauaaaaccaua

SEQ ID NO: 1828388 - RNA, 19 nt, Artificial Sequence
  Description of Artificial Sequence: Synthetic oligonucleotide
gggaugacgggaguagaag

SEQ ID NO: 1828389 - RNA, 19 nt, Artificial Sequence
  Description of Artificial Sequence: Synthetic oligonucleotide
gagagccaguauaaugcca

SEQ ID NO: 1828390 - RNA, 19 nt, Artificial Sequence
  Description of Artificial Sequence: Synthetic oligonucleotide
caacuuaauagacaucauu

SEQ ID NO: 1828391 - RNA, 19 nt, Artificial Sequence
  Description of Artificial Sequence: Synthetic oligonucleotide
gggacuaacagauuugcuu

SEQ ID NO: 1828392 - RNA, 19 nt, Artificial Sequence
  Description of Artificial Sequence: Synthetic oligonucleotide
ggagguucaucuucaugca

SEQ ID NO: 1828393 - RNA, 19 nt, Artificial Sequence
  Description of Artificial Sequence: Synthetic oligonucleotide
agcacauguggcuguuaaa

SEQ ID NO: 1828394 - RNA, 19 nt, Artificial Sequence
  Description of Artificial Sequence: Synthetic oligonucleotide
ccaacaaauuugcuuucug

SEQ ID NO: 1828395 - RNA, 19 nt, Artificial Sequence
  Description of Artificial Sequence: Synthetic oligonucleotide
uccggccaacaaauuugcu

SEQ ID NO: 1828396 - RNA, 19 nt, Artificial Sequence
  Description of Artificial Sequence: Synthetic oligonucleotide
augcagcuuagaauuggug

SEQ ID NO: 1828397 - RNA, 19 nt, Artificial Sequence
  Description of Artificial Sequence: Synthetic oligonucleotide
guacuucacuuggaacugc

SEQ ID NO: 1828398 - RNA, 19 nt, Artificial Sequence
  Description of Artificial Sequence: Synthetic oligonucleotide
accaaucaucucucuuuau

SEQ ID NO: 1828399 - RNA, 19 nt, Artificial Sequence
  Description of Artificial Sequence: Synthetic oligonucleotide
aauuggugacugguuuauu

SEQ ID NO: 1828400 - RNA, 19 nt, Artificial Sequence
  Description of Artificial Sequence: Synthetic oligonucleotide
agccaguauaaugccaaau

SEQ ID NO: 1828401 - RNA, 19 nt, Artificial Sequence
  Description of Artificial Sequence: Synthetic oligonucleotide
acguagaaucagaggccac

SEQ ID NO: 1828402 - RNA, 19 nt, Artificial Sequence
  Description of Artificial Sequence: Synthetic oligonucleotide
cacauaugcagccuuggau

SEQ ID NO: 1828403 - RNA, 19 nt, Artificial Sequence
  Description of Artificial Sequence: Synthetic oligonucleotide
cuuaugcaagagagagcca

SEQ ID NO: 1828404 - RNA, 19 nt, Artificial Sequence
  Description of Artificial Sequence: Synthetic oligonucleotide
ccagccaguacuaauauau

SEQ ID NO: 1828405 - RNA, 19 nt, Artificial Sequence
  Description of Artificial Sequence: Synthetic oligonucleotide
agguuccucacuagguacu

SEQ ID NO: 1828406 - RNA, 19 nt, Artificial Sequence
  Description of Artificial Sequence: Synthetic oligonucleotide
gaauuggugacugguuuau

SEQ ID NO: 1828407 - RNA, 19 nt, Artificial Sequence
  Description of Artificial Sequence: Synthetic oligonucleotide
guccucgaagauuuccaaa

SEQ ID NO: 1828408 - RNA, 19 nt, Artificial Sequence
  Description of Artificial Sequence: Synthetic oligonucleotide
uuaaggcuggaggucugua

SEQ ID NO: 1828409 - RNA, 19 nt, Artificial Sequence
  Description of Artificial Sequence: Synthetic oligonucleotide
ccgaaucacuucuugcuuc

SEQ ID NO: 1828410 - RNA, 19 nt, Artificial Sequence
  Description of Artificial Sequence: Synthetic oligonucleotide
ucggagaagggcggucucu

SEQ ID NO: 1828411 - RNA, 19 nt, Artificial Sequence
  Description of Artificial Sequence: Synthetic oligonucleotide
cugcuugguacauuauugu

SEQ ID NO: 1828412 - RNA, 19 nt, Artificial Sequence
  Description of Artificial Sequence: Synthetic oligonucleotide
auguggcuguuaaaaugug

SEQ ID NO: 1828413 - RNA, 19 nt, Artificial Sequence
  Description of Artificial Sequence: Synthetic oligonucleotide
gcaggcauaaaaccauaaa

SEQ ID NO: 1828414 - RNA, 19 nt, Artificial Sequence
  Description of Artificial Sequence: Synthetic oligonucleotide
ggugauaguguuccguggu

SEQ ID NO: 1828415 - RNA, 19 nt, Artificial Sequence
  Description of Artificial Sequence: Synthetic oligonucleotide
ggaucuucaaauucccaau

SEQ ID NO: 1828416 - RNA, 19 nt, Artificial Sequence
  Description of Artificial Sequence: Synthetic oligonucleotide
accaggcaaaauacguaga

SEQ ID NO: 1828417 - RNA, 19 nt, Artificial Sequence
  Description of Artificial Sequence: Synthetic oligonucleotide
agcagaccauaaaagucaa

SEQ ID NO: 1828418 - RNA, 19 nt, Artificial Sequence
  Description of Artificial Sequence: Synthetic oligonucleotide
cagguugaaaacuguugcu

SEQ ID NO: 1828419 - RNA, 19 nt, Artificial Sequence
  Description of Artificial Sequence: Synthetic oligonucleotide
gacugguuccggccaacaa

SEQ ID NO: 1828420 - RNA, 19 nt, Artificial Sequence
  Description of Artificial Sequence: Synthetic oligonucleotide
augcaagagagagccagua

SEQ ID NO: 1828421 - RNA, 19 nt, Artificial Sequence
  Description of Artificial Sequence: Synthetic oligonucleotide
guauaaugccaaaucuuau

SEQ ID NO: 1828422 - RNA, 19 nt, Artificial Sequence
  Description of Artificial Sequence: Synthetic oligonucleotide
cuucaagcucucggagaag

SEQ ID NO: 1828423 - RNA, 19 nt, Artificial Sequence
  Description of Artificial Sequence: Synthetic oligonucleotide
cugguuccggccaacaaau

SEQ ID NO: 1828424 - RNA, 19 nt, Artificial Sequence
  Description of Artificial Sequence: Synthetic oligonucleotide
ggggagguucaucuucaug

SEQ ID NO: 1828425 - RNA, 19 nt, Artificial Sequence
  Description of Artificial Sequence: Synthetic oligonucleotide
gugauaguguuccguggua

SEQ ID NO: 1828426 - RNA, 19 nt, Artificial Sequence
  Description of Artificial Sequence: Synthetic oligonucleotide
aagugggcauguggagacu

SEQ ID NO: 1828427 - RNA, 19 nt, Artificial Sequence
  Description of Artificial Sequence: Synthetic oligonucleotide
agccuuggauaaaugguua

SEQ ID NO: 1828428 - RNA, 19 nt, Artificial Sequence
  Description of Artificial Sequence: Synthetic oligonucleotide
caugcagcuuagaauuggu

SEQ ID NO: 1828429 - RNA, 19 nt, Artificial Sequence
  Description of Artificial Sequence: Synthetic oligonucleotide
ccacugguuuagaaauaag

SEQ ID NO: 1828430 - RNA, 19 nt, Artificial Sequence
  Description of Artificial Sequence: Synthetic oligonucleotide
gagaagggcggucucuuuu

SEQ ID NO: 1828431 - RNA, 19 nt, Artificial Sequence
  Description of Artificial Sequence: Synthetic oligonucleotide
uucuggggagguucaucuu

SEQ ID NO: 1828432 - RNA, 19 nt, Artificial Sequence
  Description of Artificial Sequence: Synthetic oligonucleotide
aucuggacaccaggcaaaa

SEQ ID NO: 1828433 - RNA, 19 nt, Artificial Sequence
  Description of Artificial Sequence: Synthetic oligonucleotide
caacuuuagguuccucacu

SEQ ID NO: 1828434 - RNA, 19 nt, Artificial Sequence
  Description of Artificial Sequence: Synthetic oligonucleotide
gcuguuucccagaggcugc

SEQ ID NO: 1828435 - RNA, 19 nt, Artificial Sequence
  Description of Artificial Sequence: Synthetic oligonucleotide
uagacugguuccggccaac

SEQ ID NO: 1828436 - RNA, 19 nt, Artificial Sequence
  Description of Artificial Sequence: Synthetic oligonucleotide
gugggcauguggagacucc

SEQ ID NO: 1828437 - RNA, 19 nt, Artificial Sequence
  Description of Artificial Sequence: Synthetic oligonucleotide
uacuuccauuuguccucga

SEQ ID NO: 1828438 - RNA, 19 nt, Artificial Sequence
  Description of Artificial Sequence: Synthetic oligonucleotide
auaugcagccuuggauaaa

SEQ ID NO: 1828439 - RNA, 19 nt, Artificial Sequence
  Description of Artificial Sequence: Synthetic oligonucleotide
agacugguuccggccaaca

SEQ ID NO: 1828440 - RNA, 19 nt, Artificial Sequence
  Description of Artificial Sequence: Synthetic oligonucleotide
ugguuccggccaacaaauu

SEQ ID NO: 1828441 - RNA, 19 nt, Artificial Sequence
  Description of Artificial Sequence: Synthetic oligonucleotide
ucuggacaccaggcaaaau

SEQ ID NO: 1828442 - RNA, 19 nt, Artificial Sequence
  Description of Artificial Sequence: Synthetic oligonucleotide
ugcucaccaucuggacacc

SEQ ID NO: 1828443 - RNA, 19 nt, Artificial Sequence
  Description of Artificial Sequence: Synthetic oligonucleotide
ggaccaguuccaaagucaa

SEQ ID NO: 1828444 - RNA, 19 nt, Artificial Sequence
  Description of Artificial Sequence: Synthetic oligonucleotide
ggccaacaaauuugcuuuc

SEQ ID NO: 1828445 - RNA, 19 nt, Artificial Sequence
  Description of Artificial Sequence: Synthetic oligonucleotide
ggcuauagaaggcugcauu

SEQ ID NO: 1828446 - RNA, 19 nt, Artificial Sequence
  Description of Artificial Sequence: Synthetic oligonucleotide
cagacugggugauaguguu

SEQ ID NO: 1828447 - RNA, 19 nt, Artificial Sequence
  Description of Artificial Sequence: Synthetic oligonucleotide
cuccauuggauggcacauc

SEQ ID NO: 1828448 - RNA, 19 nt, Artificial Sequence
  Description of Artificial Sequence: Synthetic oligonucleotide
auauucuggggagguucau

SEQ ID NO: 1828449 - RNA, 19 nt, Artificial Sequence
  Description of Artificial Sequence: Synthetic oligonucleotide
cuggaugugguuucauauu

SEQ ID NO: 1828450 - RNA, 19 nt, Artificial Sequence
  Description of Artificial Sequence: Synthetic oligonucleotide
auauguccaugagggcuau

SEQ ID NO: 1828451 - RNA, 19 nt, Artificial Sequence
  Description of Artificial Sequence: Synthetic oligonucleotide
cacguaaaucugggagcac

SEQ ID NO: 1828452 - RNA, 19 nt, Artificial Sequence
  Description of Artificial Sequence: Synthetic oligonucleotide
gccacugguuuagaaauaa

SEQ ID NO: 1828453 - RNA, 19 nt, Artificial Sequence
  Description of Artificial Sequence: Synthetic oligonucleotide
acuaugggacuaacagauu

SEQ ID NO: 1828454 - RNA, 19 nt, Artificial Sequence
  Description of Artificial Sequence: Synthetic oligonucleotide
gccuuggauaaaugguuaa

SEQ ID NO: 1828455 - RNA, 19 nt, Artificial Sequence
  Description of Artificial Sequence: Synthetic oligonucleotide
acgggaguagaagccgaau

SEQ ID NO: 1828456 - RNA, 19 nt, Artificial Sequence
  Description of Artificial Sequence: Synthetic oligonucleotide
gacgggaguagaagccgaa

SEQ ID NO: 1828457 - RNA, 19 nt, Artificial Sequence
  Description of Artificial Sequence: Synthetic oligonucleotide
uugcuuucgcaggcauaaa

SEQ ID NO: 1828458 - RNA, 19 nt, Artificial Sequence
  Description of Artificial Sequence: Synthetic oligonucleotide
cgggaguagaagccgaauc

SEQ ID NO: 1828459 - RNA, 19 nt, Artificial Sequence
  Description of Artificial Sequence: Synthetic oligonucleotide
auacaggguagcagaccau

SEQ ID NO: 1828460 - RNA, 19 nt, Artificial Sequence
  Description of Artificial Sequence: Synthetic oligonucleotide
ccaaauccagccaguacua

SEQ ID NO: 1828461 - RNA, 19 nt, Artificial Sequence
  Description of Artificial Sequence: Synthetic oligonucleotide
uagcaacuuuagguuccuc

SEQ ID NO: 1828462 - RNA, 19 nt, Artificial Sequence
  Description of Artificial Sequence: Synthetic oligonucleotide
caucucucuuuaucacaua

SEQ ID NO: 1828463 - RNA, 19 nt, Artificial Sequence
  Description of Artificial Sequence: Synthetic oligonucleotide
guacacucugugggaugac

SEQ ID NO: 1828464 - RNA, 19 nt, Artificial Sequence
  Description of Artificial Sequence: Synthetic oligonucleotide
ggauggcacaucauacuua

SEQ ID NO: 1828465 - RNA, 19 nt, Artificial Sequence
  Description of Artificial Sequence: Synthetic oligonucleotide
gcugcauuucgaggaccag

SEQ ID NO: 1828466 - RNA, 19 nt, Artificial Sequence
  Description of Artificial Sequence: Synthetic oligonucleotide
cagcuuagaauuggugacu

SEQ ID NO: 1828467 - RNA, 19 nt, Artificial Sequence
  Description of Artificial Sequence: Synthetic oligonucleotide
ggaucacacuucagguuga

SEQ ID NO: 1828468 - RNA, 19 nt, Artificial Sequence
  Description of Artificial Sequence: Synthetic oligonucleotide
guagcaacuuuagguuccu

SEQ ID NO: 1828469 - RNA, 19 nt, Artificial Sequence
  Description of Artificial Sequence: Synthetic oligonucleotide
cugggugauaguguuccgu

SEQ ID NO: 1828470 - RNA, 19 nt, Artificial Sequence
  Description of Artificial Sequence: Synthetic oligonucleotide
ggaugugguuucauauucu

SEQ ID NO: 1828471 - RNA, 19 nt, Artificial Sequence
  Description of Artificial Sequence: Synthetic oligonucleotide
cgugguacacucuguggga

SEQ ID NO: 1828472 - RNA, 19 nt, Artificial Sequence
  Description of Artificial Sequence: Synthetic oligonucleotide
gcagaccauaaaagucaac

SEQ ID NO: 1828473 - RNA, 19 nt, Artificial Sequence
  Description of Artificial Sequence: Synthetic oligonucleotide
cuuaaggcuggaggucugu

SEQ ID NO: 1828474 - RNA, 19 nt, Artificial Sequence
  Description of Artificial Sequence: Synthetic oligonucleotide
gaacugcuugguacauuau

SEQ ID NO: 1828475 - RNA, 19 nt, Artificial Sequence
  Description of Artificial Sequence: Synthetic oligonucleotide
gccaacaaauuugcuuucu

SEQ ID NO: 1828476 - RNA, 19 nt, Artificial Sequence
  Description of Artificial Sequence: Synthetic oligonucleotide
guuccgugguacacucugu

SEQ ID NO: 1828477 - RNA, 19 nt, Artificial Sequence
  Description of Artificial Sequence: Synthetic oligonucleotide
ccggccaacaaauuugcuu

SEQ ID NO: 1828478 - RNA, 19 nt, Artificial Sequence
  Description of Artificial Sequence: Synthetic oligonucleotide
gccgaaucacuucuugcuu

SEQ ID NO: 1828479 - RNA, 19 nt, Artificial Sequence
  Description of Artificial Sequence: Synthetic oligonucleotide
cggccaacaaauuugcuuu

SEQ ID NO: 1828480 - RNA, 19 nt, Artificial Sequence
  Description of Artificial Sequence: Synthetic oligonucleotide
ccucacuagguacuucacu

SEQ ID NO: 1828481 - RNA, 19 nt, Artificial Sequence
  Description of Artificial Sequence: Synthetic oligonucleotide
gcucaccaucuggacacca

SEQ ID NO: 1828482 - RNA, 19 nt, Artificial Sequence
  Description of Artificial Sequence: Synthetic oligonucleotide
cgcaggcauaaaaccauaa

SEQ ID NO: 1828483 - RNA, 19 nt, Artificial Sequence
  Description of Artificial Sequence: Synthetic oligonucleotide
cguagaaucagaggccacu

SEQ ID NO: 1828484 - RNA, 19 nt, Artificial Sequence
  Description of Artificial Sequence: Synthetic oligonucleotide
ggaucaccugaaacagacu

SEQ ID NO: 1828485 - RNA, 19 nt, Artificial Sequence
  Description of Artificial Sequence: Synthetic oligonucleotide
cguaaaucugggagcacau

SEQ ID NO: 1828486 - RNA, 19 nt, Artificial Sequence
  Description of Artificial Sequence: Synthetic oligonucleotide
ccauuuguccucgaagauu

SEQ ID NO: 1828487 - RNA, 19 nt, Artificial Sequence
  Description of Artificial Sequence: Synthetic oligonucleotide
ggccacugguuuagaaaua

SEQ ID NO: 1828488 - RNA, 19 nt, Artificial Sequence
  Description of Artificial Sequence: Synthetic oligonucleotide
ggagcacauguggcuguua

SEQ ID NO: 1828489 - RNA, 19 nt, Artificial Sequence
  Description of Artificial Sequence: Synthetic oligonucleotide
gggcuauagaaggcugcau

SEQ ID NO: 1828490 - RNA, 19 nt, Artificial Sequence
  Description of Artificial Sequence: Synthetic oligonucleotide
gggcauguggagacuccau

SEQ ID NO: 1828491 - RNA, 19 nt, Artificial Sequence
  Description of Artificial Sequence: Synthetic oligonucleotide
gcucucggagaagggcggu

SEQ ID NO: 1828492 - RNA, 19 nt, Artificial Sequence
  Description of Artificial Sequence: Synthetic oligonucleotide
gggagcacauguggcuguu

SEQ ID NO: 1828493 - RNA, 19 nt, Artificial Sequence
  Description of Artificial Sequence: Synthetic oligonucleotide
aauguuuuguuccugaacc

SEQ ID NO: 1828494 - RNA, 19 nt, Artificial Sequence
  Description of Artificial Sequence: Synthetic oligonucleotide
aauggauacagucaaauuc

SEQ ID NO: 1828495 - RNA, 19 nt, Artificial Sequence
  Description of Artificial Sequence: Synthetic oligonucleotide
agaaaauuaaauuacaaug

SEQ ID NO: 1828496 - RNA, 19 nt, Artificial Sequence
  Description of Artificial Sequence: Synthetic oligonucleotide
uucauuuugucucagaagg

SEQ ID NO: 1828497 - RNA, 19 nt, Artificial Sequence
  Description of Artificial Sequence: Synthetic oligonucleotide
uuuacuauaccaaagacac

SEQ ID NO: 1828498 - RNA, 19 nt, Artificial Sequence
  Description of Artificial Sequence: Synthetic oligonucleotide
aacaguguaaagcaccucc

SEQ ID NO: 1828499 - RNA, 19 nt, Artificial Sequence
  Description of Artificial Sequence: Synthetic oligonucleotide
auaagcauggaauuguugc

SEQ ID NO: 1828500 - RNA, 19 nt, Artificial Sequence
  Description of Artificial Sequence: Synthetic oligonucleotide
uucagaauaaaucuaaugu

SEQ ID NO: 1828501 - RNA, 19 nt, Artificial Sequence
  Description of Artificial Sequence: Synthetic oligonucleotide
aauuguuuugcauacaccu

SEQ ID NO: 1828502 - RNA, 19 nt, Artificial Sequence
  Description of Artificial Sequence: Synthetic oligonucleotide
aaaguaacaguguaaagca

SEQ ID NO: 1828503 - RNA, 19 nt, Artificial Sequence
  Description of Artificial Sequence: Synthetic oligonucleotide
aaauaacagacauugagga

SEQ ID NO: 1828504 - RNA, 19 nt, Artificial Sequence
  Description of Artificial Sequence: Synthetic oligonucleotide
acuuaguuguaucaaaggc

SEQ ID NO: 1828505 - RNA, 19 nt, Artificial Sequence
  Description of Artificial Sequence: Synthetic oligonucleotide
aagaguuuuaacuuaguug

SEQ ID NO: 1828506 - RNA, 19 nt, Artificial Sequence
  Description of Artificial Sequence: Synthetic oligonucleotide
gauacagucaaauuccucc

SEQ ID NO: 1828507 - RNA, 19 nt, Artificial Sequence
  Description of Artificial Sequence: Synthetic oligonucleotide
aaaagcaucacagcuaagg

SEQ ID NO: 1828508 - RNA, 19 nt, Artificial Sequence
  Description of Artificial Sequence: Synthetic oligonucleotide
uuuauaaugaguccuuggc

SEQ ID NO: 1828509 - RNA, 19 nt, Artificial Sequence
  Description of Artificial Sequence: Synthetic oligonucleotide
aauuacaaugcaugaagag

SEQ ID NO: 1828510 - RNA, 19 nt, Artificial Sequence
  Description of Artificial Sequence: Synthetic oligonucleotide
gaugacuuaguuuauuucc

SEQ ID NO: 1828511 - RNA, 19 nt, Artificial Sequence
  Description of Artificial Sequence: Synthetic oligonucleotide
auauacaacauguuagcac

SEQ ID NO: 1828512 - RNA, 19 nt, Artificial Sequence
  Description of Artificial Sequence: Synthetic oligonucleotide
uauuuaacugguuaggucu

SEQ ID NO: 1828513 - RNA, 19 nt, Artificial Sequence
  Description of Artificial Sequence: Synthetic oligonucleotide
acuagcauaagccaguaag

SEQ ID NO: 1828514 - RNA, 19 nt, Artificial Sequence
  Description of Artificial Sequence: Synthetic oligonucleotide
auuacaaugcaugaagagc

SEQ ID NO: 1828515 - RNA, 19 nt, Artificial Sequence
  Description of Artificial Sequence: Synthetic oligonucleotide
caaauaacagacauugagg

SEQ ID NO: 1828516 - RNA, 19 nt, Artificial Sequence
  Description of Artificial Sequence: Synthetic oligonucleotide
aucaaguagaaguacuggc

SEQ ID NO: 1828517 - RNA, 19 nt, Artificial Sequence
  Description of Artificial Sequence: Synthetic oligonucleotide
acuacaaccacauuccaag

SEQ ID NO: 1828518 - RNA, 19 nt, Artificial Sequence
  Description of Artificial Sequence: Synthetic oligonucleotide
aacuuaguuguaucaaagg

SEQ ID NO: 1828519 - RNA, 19 nt, Artificial Sequence
  Description of Artificial Sequence: Synthetic oligonucleotide
uauaaauauucauauuggc

SEQ ID NO: 1828520 - RNA, 19 nt, Artificial Sequence
  Description of Artificial Sequence: Synthetic oligonucleotide
uaggaugcaaugaaggcgg

SEQ ID NO: 1828521 - RNA, 19 nt, Artificial Sequence
  Description of Artificial Sequence: Synthetic oligonucleotide
uuauauuguauuuucacaa

SEQ ID NO: 1828522 - RNA, 19 nt, Artificial Sequence
  Description of Artificial Sequence: Synthetic oligonucleotide
uauacaacauguuagcacu

SEQ ID NO: 1828523 - RNA, 19 nt, Artificial Sequence
  Description of Artificial Sequence: Synthetic oligonucleotide
uuuuauauuguauuuucac

SEQ ID NO: 1828524 - RNA, 19 nt, Artificial Sequence
  Description of Artificial Sequence: Synthetic oligonucleotide
uuuauauuguauuuucaca

SEQ ID NO: 1828525 - RNA, 19 nt, Artificial Sequence
  Description of Artificial Sequence: Synthetic oligonucleotide
ucccuuaucaaguagaagu

SEQ ID NO: 1828526 - RNA, 19 nt, Artificial Sequence
  Description of Artificial Sequence: Synthetic oligonucleotide
cuuaugucaacauuugggc

SEQ ID NO: 1828527 - RNA, 19 nt, Artificial Sequence
  Description of Artificial Sequence: Synthetic oligonucleotide
aacauguuagcacucaaga

SEQ ID NO: 1828528 - RNA, 19 nt, Artificial Sequence
  Description of Artificial Sequence: Synthetic oligonucleotide
uuucugaugacuuaguuua

SEQ ID NO: 1828529 - RNA, 19 nt, Artificial Sequence
  Description of Artificial Sequence: Synthetic oligonucleotide
auaacagacauugaggauc

SEQ ID NO: 1828530 - RNA, 19 nt, Artificial Sequence
  Description of Artificial Sequence: Synthetic oligonucleotide
uccaugacuagcauaagcc

SEQ ID NO: 1828531 - RNA, 19 nt, Artificial Sequence
  Description of Artificial Sequence: Synthetic oligonucleotide
ugaaaagaaaaguugccug

SEQ ID NO: 1828532 - RNA, 19 nt, Artificial Sequence
  Description of Artificial Sequence: Synthetic oligonucleotide
uugcuuuaaaauaagcuac

SEQ ID NO: 1828533 - RNA, 19 nt, Artificial Sequence
  Description of Artificial Sequence: Synthetic oligonucleotide
uccugguaaaguuagcugg

SEQ ID NO: 1828534 - RNA, 19 nt, Artificial Sequence
  Description of Artificial Sequence: Synthetic oligonucleotide
uaagcuaccagcaaaccac

SEQ ID NO: 1828535 - RNA, 19 nt, Artificial Sequence
  Description of Artificial Sequence: Synthetic oligonucleotide
aauuuuaaguugcacccug

SEQ ID NO: 1828536 - RNA, 19 nt, Artificial Sequence
  Description of Artificial Sequence: Synthetic oligonucleotide
aagacuuuuauauuguauu

SEQ ID NO: 1828537 - RNA, 19 nt, Artificial Sequence
  Description of Artificial Sequence: Synthetic oligonucleotide
uacuauaccaaagacacug

SEQ ID NO: 1828538 - RNA, 19 nt, Artificial Sequence
  Description of Artificial Sequence: Synthetic oligonucleotide
uguacuuaugucaacauuu

SEQ ID NO: 1828539 - RNA, 19 nt, Artificial Sequence
  Description of Artificial Sequence: Synthetic oligonucleotide
cucuaaaauguuuuguucc

SEQ ID NO: 1828540 - RNA, 19 nt, Artificial Sequence
  Description of Artificial Sequence: Synthetic oligonucleotide
uuucuauuuaacugguuag

SEQ ID NO: 1828541 - RNA, 19 nt, Artificial Sequence
  Description of Artificial Sequence: Synthetic oligonucleotide
aagaaaaguugccugacga

SEQ ID NO: 1828542 - RNA, 19 nt, Artificial Sequence
  Description of Artificial Sequence: Synthetic oligonucleotide
uuauaaugaguccuuggcc

SEQ ID NO: 1828543 - RNA, 19 nt, Artificial Sequence
  Description of Artificial Sequence: Synthetic oligonucleotide
  modified_base (10)..(10): a, c, u, g, unknown or other
gacgaguucncuuugcuac

SEQ ID NO: 1828544 - RNA, 19 nt, Artificial Sequence
  Description of Artificial Sequence: Synthetic oligonucleotide
aacuuucauuuugugaugc

SEQ ID NO: 1828545 - RNA, 19 nt, Artificial Sequence
  Description of Artificial Sequence: Synthetic oligonucleotide
aauaaaucuaauguaacuu

SEQ ID NO: 1828546 - RNA, 19 nt, Artificial Sequence
  Description of Artificial Sequence: Synthetic oligonucleotide
acgaguaucuuucugauga

SEQ ID NO: 1828547 - RNA, 19 nt, Artificial Sequence
  Description of Artificial Sequence: Synthetic oligonucleotide
uaacuuaguuguaucaaag

SEQ ID NO: 1828548 - RNA, 19 nt, Artificial Sequence
  Description of Artificial Sequence: Synthetic oligonucleotide
agaguuuauuuucaaguuc

SEQ ID NO: 1828549 - RNA, 19 nt, Artificial Sequence
  Description of Artificial Sequence: Synthetic oligonucleotide
gacaauggagucuaggaug

SEQ ID NO: 1828550 - RNA, 19 nt, Artificial Sequence
  Description of Artificial Sequence: Synthetic oligonucleotide
aagggaauuuuccuucaac

SEQ ID NO: 1828551 - RNA, 19 nt, Artificial Sequence
  Description of Artificial Sequence: Synthetic oligonucleotide
ucaaauuccuccauuugug

SEQ ID NO: 1828552 - RNA, 19 nt, Artificial Sequence
  Description of Artificial Sequence: Synthetic oligonucleotide
uggcaaauaacagacauug

SEQ ID NO: 1828553 - RNA, 19 nt, Artificial Sequence
  Description of Artificial Sequence: Synthetic oligonucleotide
uguuacauuuuauuuguca

SEQ ID NO: 1828554 - RNA, 19 nt, Artificial Sequence
  Description of Artificial Sequence: Synthetic oligonucleotide
ugauuuuccaugacuagca

SEQ ID NO: 1828555 - RNA, 19 nt, Artificial Sequence
  Description of Artificial Sequence: Synthetic oligonucleotide
ucaaguagaaguacuggca

SEQ ID NO: 1828556 - RNA, 19 nt, Artificial Sequence
  Description of Artificial Sequence: Synthetic oligonucleotide
acuuaugucaacauuuggg

SEQ ID NO: 1828557 - RNA, 19 nt, Artificial Sequence
  Description of Artificial Sequence: Synthetic oligonucleotide
ugugaaaccuguuacauuu

SEQ ID NO: 1828558 - RNA, 19 nt, Artificial Sequence
  Description of Artificial Sequence: Synthetic oligonucleotide
augacuacaaccacauucc

SEQ ID NO: 1828559 - RNA, 19 nt, Artificial Sequence
  Description of Artificial Sequence: Synthetic oligonucleotide
uccugaaccaaauauaaau

SEQ ID NO: 1828560 - RNA, 19 nt, Artificial Sequence
  Description of Artificial Sequence: Synthetic oligonucleotide
ucuucugaaaagaaaaguu

SEQ ID NO: 1828561 - RNA, 19 nt, Artificial Sequence
  Description of Artificial Sequence: Synthetic oligonucleotide
ucagauuuggaucuuuggu

SEQ ID NO: 1828562 - RNA, 19 nt, Artificial Sequence
  Description of Artificial Sequence: Synthetic oligonucleotide
aagcauauuguuuuguuua

SEQ ID NO: 1828563 - RNA, 19 nt, Artificial Sequence
  Description of Artificial Sequence: Synthetic oligonucleotide
  modified_base (3)..(3): a, c, u, g, unknown or other
ucncuuugcuaccacauca

SEQ ID NO: 1828564 - RNA, 19 nt, Artificial Sequence
  Description of Artificial Sequence: Synthetic oligonucleotide
ucagaauaaaucuaaugua

SEQ ID NO: 1828565 - RNA, 19 nt, Artificial Sequence
  Description of Artificial Sequence: Synthetic oligonucleotide
aguacuggcaaauaacaga

SEQ ID NO: 1828566 - RNA, 19 nt, Artificial Sequence
  Description of Artificial Sequence: Synthetic oligonucleotide
uuguacuucauuuugucuc

SEQ ID NO: 1828567 - RNA, 19 nt, Artificial Sequence
  Description of Artificial Sequence: Synthetic oligonucleotide
aaagcaucacagcuaagga

SEQ ID NO: 1828568 - RNA, 19 nt, Artificial Sequence
  Description of Artificial Sequence: Synthetic oligonucleotide
uuugugaugcacugcauca

SEQ ID NO: 1828569 - RNA, 19 nt, Artificial Sequence
  Description of Artificial Sequence: Synthetic oligonucleotide
ucaaguucuaugauuggcu

SEQ ID NO: 1828570 - RNA, 19 nt, Artificial Sequence
  Description of Artificial Sequence: Synthetic oligonucleotide
aaguucuaugauuggcuuc

SEQ ID NO: 1828571 - RNA, 19 nt, Artificial Sequence
  Description of Artificial Sequence: Synthetic oligonucleotide
ugcuuuaaaauaagcuacc

SEQ ID NO: 1828572 - RNA, 19 nt, Artificial Sequence
  Description of Artificial Sequence: Synthetic oligonucleotide
ucuaggaugcaaugaaggc

SEQ ID NO: 1828573 - RNA, 19 nt, Artificial Sequence
  Description of Artificial Sequence: Synthetic oligonucleotide
guaagaaauucaaagagca

SEQ ID NO: 1828574 - RNA, 19 nt, Artificial Sequence
  Description of Artificial Sequence: Synthetic oligonucleotide
auaaauauucauauuggca

SEQ ID NO: 1828575 - RNA, 19 nt, Artificial Sequence
  Description of Artificial Sequence: Synthetic oligonucleotide
ugucaauggauacagucaa

SEQ ID NO: 1828576 - RNA, 19 nt, Artificial Sequence
  Description of Artificial Sequence: Synthetic oligonucleotide
agaaguacuggcaaauaac

SEQ ID NO: 1828577 - RNA, 19 nt, Artificial Sequence
  Description of Artificial Sequence: Synthetic oligonucleotide
acuagaguuuauuuucaag

SEQ ID NO: 1828578 - RNA, 19 nt, Artificial Sequence
  Description of Artificial Sequence: Synthetic oligonucleotide
aaaccuguuacauuuuauu

SEQ ID NO: 1828579 - RNA, 19 nt, Artificial Sequence
  Description of Artificial Sequence: Synthetic oligonucleotide
cuucagaauaaaucuaaug

SEQ ID NO: 1828580 - RNA, 19 nt, Artificial Sequence
  Description of Artificial Sequence: Synthetic oligonucleotide
uucauuuugugaugcacug

SEQ ID NO: 1828581 - RNA, 19 nt, Artificial Sequence
  Description of Artificial Sequence: Synthetic oligonucleotide
cuuaguuguaucaaaggca

SEQ ID NO: 1828582 - RNA, 19 nt, Artificial Sequence
  Description of Artificial Sequence: Synthetic oligonucleotide
aaaauagaacagcuucaga

SEQ ID NO: 1828583 - RNA, 19 nt, Artificial Sequence
  Description of Artificial Sequence: Synthetic oligonucleotide
uugaggaucagauuuggau

SEQ ID NO: 1828584 - RNA, 19 nt, Artificial Sequence
  Description of Artificial Sequence: Synthetic oligonucleotide
caugacuagcauaagccag

SEQ ID NO: 1828585 - RNA, 19 nt, Artificial Sequence
  Description of Artificial Sequence: Synthetic oligonucleotide
cuaggaugcaaugaaggcg

SEQ ID NO: 1828586 - RNA, 19 nt, Artificial Sequence
  Description of Artificial Sequence: Synthetic oligonucleotide
cuccucacuaaauacaaac

SEQ ID NO: 1828587 - RNA, 19 nt, Artificial Sequence
  Description of Artificial Sequence: Synthetic oligonucleotide
ugaggaucagauuuggauc

SEQ ID NO: 1828588 - RNA, 19 nt, Artificial Sequence
  Description of Artificial Sequence: Synthetic oligonucleotide
guugucaauggauacaguc

SEQ ID NO: 1828589 - RNA, 19 nt, Artificial Sequence
  Description of Artificial Sequence: Synthetic oligonucleotide
uaaaauaagcuaccagcaa

SEQ ID NO: 1828590 - RNA, 19 nt, Artificial Sequence
  Description of Artificial Sequence: Synthetic oligonucleotide
aucagauuuggaucuuugg

SEQ ID NO: 1828591 - RNA, 19 nt, Artificial Sequence
  Description of Artificial Sequence: Synthetic oligonucleotide
aacugguuuccuuuguacu

SEQ ID NO: 1828592 - RNA, 19 nt, Artificial Sequence
  Description of Artificial Sequence: Synthetic oligonucleotide
aauaacagacauugaggau

SEQ ID NO: 1828593 - RNA, 19 nt, Artificial Sequence
  Description of Artificial Sequence: Synthetic oligonucleotide
ccaaagauaguguucaugc

SEQ ID NO: 1828594 - RNA, 19 nt, Artificial Sequence
  Description of Artificial Sequence: Synthetic oligonucleotide
ucuaugauuggcuuccaaa

SEQ ID NO: 1828595 - RNA, 19 nt, Artificial Sequence
  Description of Artificial Sequence: Synthetic oligonucleotide
uaauaccucuguauaauaa

SEQ ID NO: 1828596 - RNA, 19 nt, Artificial Sequence
  Description of Artificial Sequence: Synthetic oligonucleotide
auaccaaagacacuguuuu

SEQ ID NO: 1828597 - RNA, 19 nt, Artificial Sequence
  Description of Artificial Sequence: Synthetic oligonucleotide
acauguuagcacucaagag

SEQ ID NO: 1828598 - RNA, 19 nt, Artificial Sequence
  Description of Artificial Sequence: Synthetic oligonucleotide
uuaaauuacaaugcaugaa

SEQ ID NO: 1828599 - RNA, 19 nt, Artificial Sequence
  Description of Artificial Sequence: Synthetic oligonucleotide
agggaauuuuccuucaaca

SEQ ID NO: 1828600 - RNA, 19 nt, Artificial Sequence
  Description of Artificial Sequence: Synthetic oligonucleotide
aaccuguuacauuuuauuu

SEQ ID NO: 1828601 - RNA, 19 nt, Artificial Sequence
  Description of Artificial Sequence: Synthetic oligonucleotide
uaaaucuaauguaacuuuu

SEQ ID NO: 1828602 - RNA, 19 nt, Artificial Sequence
  Description of Artificial Sequence: Synthetic oligonucleotide
guuuauauacaacauguua

SEQ ID NO: 1828603 - RNA, 19 nt, Artificial Sequence
  Description of Artificial Sequence: Synthetic oligonucleotide
auuuacuauaccaaagaca

SEQ ID NO: 1828604 - RNA, 19 nt, Artificial Sequence
  Description of Artificial Sequence: Synthetic oligonucleotide
accggaauuacuaauaccu

SEQ ID NO: 1828605 - RNA, 19 nt, Artificial Sequence
  Description of Artificial Sequence: Synthetic oligonucleotide
ugaaccaaauauaaauauu

SEQ ID NO: 1828606 - RNA, 19 nt, Artificial Sequence
  Description of Artificial Sequence: Synthetic oligonucleotide
aagauaguguucaugcuca

SEQ ID NO: 1828607 - RNA, 19 nt, Artificial Sequence
  Description of Artificial Sequence: Synthetic oligonucleotide
uguacuucauuuugucuca

SEQ ID NO: 1828608 - RNA, 19 nt, Artificial Sequence
  Description of Artificial Sequence: Synthetic oligonucleotide
ucucuugagaacugcaacu

SEQ ID NO: 1828609 - RNA, 19 nt, Artificial Sequence
  Description of Artificial Sequence: Synthetic oligonucleotide
agaaaaguugccugacgag

SEQ ID NO: 1828610 - RNA, 19 nt, Artificial Sequence
  Description of Artificial Sequence: Synthetic oligonucleotide
caaauuccuccauuugugg

SEQ ID NO: 1828611 - RNA, 19 nt, Artificial Sequence
  Description of Artificial Sequence: Synthetic oligonucleotide
cucaagaguuuuaacuuag

SEQ ID NO: 1828612 - RNA, 19 nt, Artificial Sequence
  Description of Artificial Sequence: Synthetic oligonucleotide
auaagcuaccagcaaacca

SEQ ID NO: 1828613 - RNA, 19 nt, Artificial Sequence
  Description of Artificial Sequence: Synthetic oligonucleotide
uuucaaguucuaugauugg

SEQ ID NO: 1828614 - RNA, 19 nt, Artificial Sequence
  Description of Artificial Sequence: Synthetic oligonucleotide
auaguguucaugcucaguu

SEQ ID NO: 1828615 - RNA, 19 nt, Artificial Sequence
  Description of Artificial Sequence: Synthetic oligonucleotide
aaugaaggcggguugucaa

SEQ ID NO: 1828616 - RNA, 19 nt, Artificial Sequence
  Description of Artificial Sequence: Synthetic oligonucleotide
uauaccaaagacacuguuu

SEQ ID NO: 1828617 - RNA, 19 nt, Artificial Sequence
  Description of Artificial Sequence: Synthetic oligonucleotide
uguuccugaaccaaauaua

SEQ ID NO: 1828618 - RNA, 19 nt, Artificial Sequence
  Description of Artificial Sequence: Synthetic oligonucleotide
agauuuggaucuuugguau

SEQ ID NO: 1828619 - RNA, 19 nt, Artificial Sequence
  Description of Artificial Sequence: Synthetic oligonucleotide
ucauuuugucucagaaggc

SEQ ID NO: 1828620 - RNA, 19 nt, Artificial Sequence
  Description of Artificial Sequence: Synthetic oligonucleotide
uccucacuaaauacaaacu

SEQ ID NO: 1828621 - RNA, 19 nt, Artificial Sequence
  Description of Artificial Sequence: Synthetic oligonucleotide
aguguaaagcaccuccuca

SEQ ID NO: 1828622 - RNA, 19 nt, Artificial Sequence
  Description of Artificial Sequence: Synthetic oligonucleotide
gucuaggaugcaaugaagg

SEQ ID NO: 1828623 - RNA, 19 nt, Artificial Sequence
  Description of Artificial Sequence: Synthetic oligonucleotide
aaaauguuuuguuccugaa

SEQ ID NO: 1828624 - RNA, 19 nt, Artificial Sequence
  Description of Artificial Sequence: Synthetic oligonucleotide
ugcugauuuuccaugacua

SEQ ID NO: 1828625 - RNA, 19 nt, Artificial Sequence
  Description of Artificial Sequence: Synthetic oligonucleotide
cuauuuaacugguuagguc

SEQ ID NO: 1828626 - RNA, 19 nt, Artificial Sequence
  Description of Artificial Sequence: Synthetic oligonucleotide
agcaaacauuuacuauacc

SEQ ID NO: 1828627 - RNA, 19 nt, Artificial Sequence
  Description of Artificial Sequence: Synthetic oligonucleotide
aguguucaugcucaguugu

SEQ ID NO: 1828628 - RNA, 19 nt, Artificial Sequence
  Description of Artificial Sequence: Synthetic oligonucleotide
gaucuuugguauaagcaug

SEQ ID NO: 1828629 - RNA, 19 nt, Artificial Sequence
  Description of Artificial Sequence: Synthetic oligonucleotide
uuauuuccacuccugguaa

SEQ ID NO: 1828630 - RNA, 19 nt, Artificial Sequence
  Description of Artificial Sequence: Synthetic oligonucleotide
  modified_base (9)..(9): a, c, u, g, unknown or other
acgaguucncuuugcuacc

SEQ ID NO: 1828631 - RNA, 19 nt, Artificial Sequence
  Description of Artificial Sequence: Synthetic oligonucleotide
guggaaguagccauugacg

SEQ ID NO: 1828632 - RNA, 19 nt, Artificial Sequence
  Description of Artificial Sequence: Synthetic oligonucleotide
aaagacuuuuauauuguau

SEQ ID NO: 1828633 - RNA, 19 nt, Artificial Sequence
  Description of Artificial Sequence: Synthetic oligonucleotide
uaagcauggaauuguugcu

SEQ ID NO: 1828634 - RNA, 19 nt, Artificial Sequence
  Description of Artificial Sequence: Synthetic oligonucleotide
aaguaacaguguaaagcac

SEQ ID NO: 1828635 - RNA, 19 nt, Artificial Sequence
  Description of Artificial Sequence: Synthetic oligonucleotide
gacauugaggaucagauuu

SEQ ID NO: 1828636 - RNA, 19 nt, Artificial Sequence
  Description of Artificial Sequence: Synthetic oligonucleotide
ccuucaacaaagcauauug

SEQ ID NO: 1828637 - RNA, 19 nt, Artificial Sequence
  Description of Artificial Sequence: Synthetic oligonucleotide
aaauuuuaaguugcacccu

SEQ ID NO: 1828638 - RNA, 19 nt, Artificial Sequence
  Description of Artificial Sequence: Synthetic oligonucleotide
ucaacauuugggcaauuuu

SEQ ID NO: 1828639 - RNA, 19 nt, Artificial Sequence
  Description of Artificial Sequence: Synthetic oligonucleotide
guaucaaaggcaaaauuca

SEQ ID NO: 1828640 - RNA, 19 nt, Artificial Sequence
  Description of Artificial Sequence: Synthetic oligonucleotide
cuagaguuuauuuucaagu

SEQ ID NO: 1828641 - RNA, 19 nt, Artificial Sequence
  Description of Artificial Sequence: Synthetic oligonucleotide
aaguacuggcaaauaacag

SEQ ID NO: 1828642 - RNA, 19 nt, Artificial Sequence
  Description of Artificial Sequence: Synthetic oligonucleotide
acagcuaaggagaaacuag

SEQ ID NO: 1828643 - RNA, 19 nt, Artificial Sequence
  Description of Artificial Sequence: Synthetic oligonucleotide
ugaugacuuaguuuauuuc

SEQ ID NO: 1828644 - RNA, 19 nt, Artificial Sequence
  Description of Artificial Sequence: Synthetic oligonucleotide
acaacaggaaacaaagacu

SEQ ID NO: 1828645 - RNA, 19 nt, Artificial Sequence
  Description of Artificial Sequence: Synthetic oligonucleotide
auagaacagcuucagaaua

SEQ ID NO: 1828646 - RNA, 19 nt, Artificial Sequence
  Description of Artificial Sequence: Synthetic oligonucleotide
uguugcugauuuuccauga

SEQ ID NO: 1828647 - RNA, 19 nt, Artificial Sequence
  Description of Artificial Sequence: Synthetic oligonucleotide
uguuuugcauacaccuuga

SEQ ID NO: 1828648 - RNA, 19 nt, Artificial Sequence
  Description of Artificial Sequence: Synthetic oligonucleotide
cugauuuuccaugacuagc

SEQ ID NO: 1828649 - RNA, 19 nt, Artificial Sequence
  Description of Artificial Sequence: Synthetic oligonucleotide
cuaaggagaaacuagaguu

SEQ ID NO: 1828650 - RNA, 19 nt, Artificial Sequence
  Description of Artificial Sequence: Synthetic oligonucleotide
uuguugcugauuuuccaug

SEQ ID NO: 1828651 - RNA, 19 nt, Artificial Sequence
  Description of Artificial Sequence: Synthetic oligonucleotide
uuuaaguugcacccuguuu

SEQ ID NO: 1828652 - RNA, 19 nt, Artificial Sequence
  Description of Artificial Sequence: Synthetic oligonucleotide
uacuaauaccucuguauaa

SEQ ID NO: 1828653 - RNA, 19 nt, Artificial Sequence
  Description of Artificial Sequence: Synthetic oligonucleotide
ucaauggauacagucaaau

SEQ ID NO: 1828654 - RNA, 19 nt, Artificial Sequence
  Description of Artificial Sequence: Synthetic oligonucleotide
auuugugguggaaguagcc

SEQ ID NO: 1828655 - RNA, 19 nt, Artificial Sequence
  Description of Artificial Sequence: Synthetic oligonucleotide
uaagaaauucaaagagcau

SEQ ID NO: 1828656 - RNA, 19 nt, Artificial Sequence
  Description of Artificial Sequence: Synthetic oligonucleotide
acaaccacauuccaagaaa

SEQ ID NO: 1828657 - RNA, 19 nt, Artificial Sequence
  Description of Artificial Sequence: Synthetic oligonucleotide
uguaaagcaccuccucacu

SEQ ID NO: 1828658 - RNA, 19 nt, Artificial Sequence
  Description of Artificial Sequence: Synthetic oligonucleotide
uugcugauuuuccaugacu

SEQ ID NO: 1828659 - RNA, 19 nt, Artificial Sequence
  Description of Artificial Sequence: Synthetic oligonucleotide
aagcauggaauuguugcug

SEQ ID NO: 1828660 - RNA, 19 nt, Artificial Sequence
  Description of Artificial Sequence: Synthetic oligonucleotide
uucaacugggccugaaccu

SEQ ID NO: 1828661 - RNA, 19 nt, Artificial Sequence
  Description of Artificial Sequence: Synthetic oligonucleotide
auuguugcugauuuuccau

SEQ ID NO: 1828662 - RNA, 19 nt, Artificial Sequence
  Description of Artificial Sequence: Synthetic oligonucleotide
aucuuugguauaagcaugg

SEQ ID NO: 1828663 - RNA, 19 nt, Artificial Sequence
  Description of Artificial Sequence: Synthetic oligonucleotide
caacauguuagcacucaag

SEQ ID NO: 1828664 - RNA, 19 nt, Artificial Sequence
  Description of Artificial Sequence: Synthetic oligonucleotide
aaacuagaguuuauuuuca

SEQ ID NO: 1828665 - RNA, 19 nt, Artificial Sequence
  Description of Artificial Sequence: Synthetic oligonucleotide
aaaaccggaauuacuaaua

SEQ ID NO: 1828666 - RNA, 19 nt, Artificial Sequence
  Description of Artificial Sequence: Synthetic oligonucleotide
acccuguuuaaauuaaaau

SEQ ID NO: 1828667 - RNA, 19 nt, Artificial Sequence
  Description of Artificial Sequence: Synthetic oligonucleotide
aacuagaguuuauuuucaa

SEQ ID NO: 1828668 - RNA, 19 nt, Artificial Sequence
  Description of Artificial Sequence: Synthetic oligonucleotide
ugguauaagcauggaauug

SEQ ID NO: 1828669 - RNA, 19 nt, Artificial Sequence
  Description of Artificial Sequence: Synthetic oligonucleotide
  modified_base (13)..(13): a, c, u, g, unknown or other
auugacgaguucncuuugc

SEQ ID NO: 1828670 - RNA, 19 nt, Artificial Sequence
  Description of Artificial Sequence: Synthetic oligonucleotide
gaaggcggguugucaaugg

SEQ ID NO: 1828671 - RNA, 19 nt, Artificial Sequence
  Description of Artificial Sequence: Synthetic oligonucleotide
ugacuuaguuuauuuccac

SEQ ID NO: 1828672 - RNA, 19 nt, Artificial Sequence
  Description of Artificial Sequence: Synthetic oligonucleotide
aaaguuagcuggaauguua

SEQ ID NO: 1828673 - RNA, 19 nt, Artificial Sequence
  Description of Artificial Sequence: Synthetic oligonucleotide
uaccucuguauaauaacau

SEQ ID NO: 1828674 - RNA, 19 nt, Artificial Sequence
  Description of Artificial Sequence: Synthetic oligonucleotide
cuaugauuggcuuccaaaa

SEQ ID NO: 1828675 - RNA, 19 nt, Artificial Sequence
  Description of Artificial Sequence: Synthetic oligonucleotide
  modified_base (12)..(12): a, c, u, g, unknown or other
uugacgaguucncuuugcu

SEQ ID NO: 1828676 - RNA, 19 nt, Artificial Sequence
  Description of Artificial Sequence: Synthetic oligonucleotide
cauguuagcacucaagagu

SEQ ID NO: 1828677 - RNA, 19 nt, Artificial Sequence
  Description of Artificial Sequence: Synthetic oligonucleotide
aguuuuaacuuaguuguau

SEQ ID NO: 1828678 - RNA, 19 nt, Artificial Sequence
  Description of Artificial Sequence: Synthetic oligonucleotide
aguugcacccuguuuaaau

SEQ ID NO: 1828679 - RNA, 19 nt, Artificial Sequence
  Description of Artificial Sequence: Synthetic oligonucleotide
ugccugacgaguaucuuuc

SEQ ID NO: 1828680 - RNA, 19 nt, Artificial Sequence
  Description of Artificial Sequence: Synthetic oligonucleotide
ucaagaguuuuaacuuagu

SEQ ID NO: 1828681 - RNA, 19 nt, Artificial Sequence
  Description of Artificial Sequence: Synthetic oligonucleotide
cuagcauaagccaguaaga

SEQ ID NO: 1828682 - RNA, 19 nt, Artificial Sequence
  Description of Artificial Sequence: Synthetic oligonucleotide
aaaguugccugacgaguau

SEQ ID NO: 1828683 - RNA, 19 nt, Artificial Sequence
  Description of Artificial Sequence: Synthetic oligonucleotide
ugguuaggucucuugagaa

SEQ ID NO: 1828684 - RNA, 19 nt, Artificial Sequence
  Description of Artificial Sequence: Synthetic oligonucleotide
  modified_base (4)..(4): a, c, u, g, unknown or other
uucncuuugcuaccacauc

SEQ ID NO: 1828685 - RNA, 19 nt, Artificial Sequence
  Description of Artificial Sequence: Synthetic oligonucleotide
ugagaacugcaacugguuu

SEQ ID NO: 1828686 - RNA, 19 nt, Artificial Sequence
  Description of Artificial Sequence: Synthetic oligonucleotide
uuuuaaguugcacccuguu

SEQ ID NO: 1828687 - RNA, 19 nt, Artificial Sequence
  Description of Artificial Sequence: Synthetic oligonucleotide
ugcacugcaucaauuguuu

SEQ ID NO: 1828688 - RNA, 19 nt, Artificial Sequence
  Description of Artificial Sequence: Synthetic oligonucleotide
uaguguucaugcucaguug

SEQ ID NO: 1828689 - RNA, 19 nt, Artificial Sequence
  Description of Artificial Sequence: Synthetic oligonucleotide
cauugaggaucagauuugg

SEQ ID NO: 1828690 - RNA, 19 nt, Artificial Sequence
  Description of Artificial Sequence: Synthetic oligonucleotide
cacuuugaaagaaaauuaa

SEQ ID NO: 1828691 - RNA, 19 nt, Artificial Sequence
  Description of Artificial Sequence: Synthetic oligonucleotide
gagucuaggaugcaaugaa

SEQ ID NO: 1828692 - RNA, 19 nt, Artificial Sequence
  Description of Artificial Sequence: Synthetic oligonucleotide
aaggagaaacuagaguuua

SEQ ID NO: 1828693 - RNA, 19 nt, Artificial Sequence
  Description of Artificial Sequence: Synthetic oligonucleotide
auuuaacugguuaggucuc

SEQ ID NO: 1828694 - RNA, 19 nt, Artificial Sequence
  Description of Artificial Sequence: Synthetic oligonucleotide
gaggaucagauuuggaucu

SEQ ID NO: 1828695 - RNA, 19 nt, Artificial Sequence
  Description of Artificial Sequence: Synthetic oligonucleotide
  modified_base (6)..(6): a, c, u, g, unknown or other
aguucncuuugcuaccaca

SEQ ID NO: 1828696 - RNA, 19 nt, Artificial Sequence
  Description of Artificial Sequence: Synthetic oligonucleotide
ucaauguacuuaugucaac

SEQ ID NO: 1828697 - RNA, 19 nt, Artificial Sequence
  Description of Artificial Sequence: Synthetic oligonucleotide
caacugguuuccuuuguac

SEQ ID NO: 1828698 - RNA, 19 nt, Artificial Sequence
  Description of Artificial Sequence: Synthetic oligonucleotide
auaccucuguauaauaaca

SEQ ID NO: 1828699 - RNA, 19 nt, Artificial Sequence
  Description of Artificial Sequence: Synthetic oligonucleotide
acaaagacuuuuauauugu

SEQ ID NO: 1828700 - RNA, 19 nt, Artificial Sequence
  Description of Artificial Sequence: Synthetic oligonucleotide
uguucaacugggccugaac

SEQ ID NO: 1828701 - RNA, 19 nt, Artificial Sequence
  Description of Artificial Sequence: Synthetic oligonucleotide
uagcauaagccaguaagaa

SEQ ID NO: 1828702 - RNA, 19 nt, Artificial Sequence
  Description of Artificial Sequence: Synthetic oligonucleotide
uguuuuguuccugaaccaa

SEQ ID NO: 1828703 - RNA, 19 nt, Artificial Sequence
  Description of Artificial Sequence: Synthetic oligonucleotide
aaagggaauuuuccuucaa

SEQ ID NO: 1828704 - RNA, 19 nt, Artificial Sequence
  Description of Artificial Sequence: Synthetic oligonucleotide
uaacugguuaggucucuug

SEQ ID NO: 1828705 - RNA, 19 nt, Artificial Sequence
  Description of Artificial Sequence: Synthetic oligonucleotide
gaucagauuuggaucuuug

SEQ ID NO: 1828706 - RNA, 19 nt, Artificial Sequence
  Description of Artificial Sequence: Synthetic oligonucleotide
ggaauuacuaauaccucug

SEQ ID NO: 1828707 - RNA, 19 nt, Artificial Sequence
  Description of Artificial Sequence: Synthetic oligonucleotide
acucaagaguuuuaacuua

SEQ ID NO: 1828708 - RNA, 19 nt, Artificial Sequence
  Description of Artificial Sequence: Synthetic oligonucleotide
cuuaucaaguagaaguacu

SEQ ID NO: 1828709 - RNA, 19 nt, Artificial Sequence
  Description of Artificial Sequence: Synthetic oligonucleotide
agcauggaauuguugcuga

SEQ ID NO: 1828710 - RNA, 19 nt, Artificial Sequence
  Description of Artificial Sequence: Synthetic oligonucleotide
auguuuuguuccugaacca

SEQ ID NO: 1828711 - RNA, 19 nt, Artificial Sequence
  Description of Artificial Sequence: Synthetic oligonucleotide
aaaaguugccugacgagua

SEQ ID NO: 1828712 - RNA, 19 nt, Artificial Sequence
  Description of Artificial Sequence: Synthetic oligonucleotide
uacaacauguuagcacuca

SEQ ID NO: 1828713 - RNA, 19 nt, Artificial Sequence
  Description of Artificial Sequence: Synthetic oligonucleotide
cacauuccaagaaagggaa

SEQ ID NO: 1828714 - RNA, 19 nt, Artificial Sequence
  Description of Artificial Sequence: Synthetic oligonucleotide
aaguugccugacgaguauc

SEQ ID NO: 1828715 - RNA, 19 nt, Artificial Sequence
  Description of Artificial Sequence: Synthetic oligonucleotide
ugcacccuguuuaaauuaa

SEQ ID NO: 1828716 - RNA, 19 nt, Artificial Sequence
  Description of Artificial Sequence: Synthetic oligonucleotide
agcauauuguuuuguuuau

SEQ ID NO: 1828717 - RNA, 19 nt, Artificial Sequence
  Description of Artificial Sequence: Synthetic oligonucleotide
auuguuccaaagauagugu

SEQ ID NO: 1828718 - RNA, 19 nt, Artificial Sequence
  Description of Artificial Sequence: Synthetic oligonucleotide
ugacgaguaucuuucugau

SEQ ID NO: 1828719 - RNA, 19 nt, Artificial Sequence
  Description of Artificial Sequence: Synthetic oligonucleotide
ugguaaaguuagcuggaau

SEQ ID NO: 1828720 - RNA, 19 nt, Artificial Sequence
  Description of Artificial Sequence: Synthetic oligonucleotide
auuuccacuccugguaaag

SEQ ID NO: 1828721 - RNA, 19 nt, Artificial Sequence
  Description of Artificial Sequence: Synthetic oligonucleotide
  modified_base (14)..(14): a, c, u, g, unknown or other
cauugacgaguucncuuug

SEQ ID NO: 1828722 - RNA, 19 nt, Artificial Sequence
  Description of Artificial Sequence: Synthetic oligonucleotide
ugacuacaaccacauucca

SEQ ID NO: 1828723 - RNA, 19 nt, Artificial Sequence
  Description of Artificial Sequence: Synthetic oligonucleotide
uucaggccucuucugaaaa

SEQ ID NO: 1828724 - RNA, 19 nt, Artificial Sequence
  Description of Artificial Sequence: Synthetic oligonucleotide
cagauuuggaucuuuggua

SEQ ID NO: 1828725 - RNA, 19 nt, Artificial Sequence
  Description of Artificial Sequence: Synthetic oligonucleotide
gucaaauuccuccauuugu

SEQ ID NO: 1828726 - RNA, 19 nt, Artificial Sequence
  Description of Artificial Sequence: Synthetic oligonucleotide
cacuaaauacaaacuuuca

SEQ ID NO: 1828727 - RNA, 19 nt, Artificial Sequence
  Description of Artificial Sequence: Synthetic oligonucleotide
aaccacucuaaaauguuuu

SEQ ID NO: 1828728 - RNA, 19 nt, Artificial Sequence
  Description of Artificial Sequence: Synthetic oligonucleotide
uacaaugcaugaagagcaa

SEQ ID NO: 1828729 - RNA, 19 nt, Artificial Sequence
  Description of Artificial Sequence: Synthetic oligonucleotide
augacuuaguuuauuucca

SEQ ID NO: 1828730 - RNA, 19 nt, Artificial Sequence
  Description of Artificial Sequence: Synthetic oligonucleotide
guuccugaaccaaauauaa

SEQ ID NO: 1828731 - RNA, 19 nt, Artificial Sequence
  Description of Artificial Sequence: Synthetic oligonucleotide
gaaguagccauugacgagu

SEQ ID NO: 1828732 - RNA, 19 nt, Artificial Sequence
  Description of Artificial Sequence: Synthetic oligonucleotide
auguacuuaugucaacauu

SEQ ID NO: 1828733 - RNA, 19 nt, Artificial Sequence
  Description of Artificial Sequence: Synthetic oligonucleotide
caaggaugacuacaaccac

SEQ ID NO: 1828734 - RNA, 19 nt, Artificial Sequence
  Description of Artificial Sequence: Synthetic oligonucleotide
augcaaugaaggcggguug

SEQ ID NO: 1828735 - RNA, 19 nt, Artificial Sequence
  Description of Artificial Sequence: Synthetic oligonucleotide
agcaccuccucacuaaaua

SEQ ID NO: 1828736 - RNA, 19 nt, Artificial Sequence
  Description of Artificial Sequence: Synthetic oligonucleotide
caaguagaaguacuggcaa

SEQ ID NO: 1828737 - RNA, 19 nt, Artificial Sequence
  Description of Artificial Sequence: Synthetic oligonucleotide
agcuaaggagaaacuagag

SEQ ID NO: 1828738 - RNA, 19 nt, Artificial Sequence
  Description of Artificial Sequence: Synthetic oligonucleotide
ggaaacaaagacuuuuaua

SEQ ID NO: 1828739 - RNA, 19 nt, Artificial Sequence
  Description of Artificial Sequence: Synthetic oligonucleotide
agcuucagaauaaaucuaa

SEQ ID NO: 1828740 - RNA, 19 nt, Artificial Sequence
  Description of Artificial Sequence: Synthetic oligonucleotide
uugcacccuguuuaaauua

SEQ ID NO: 1828741 - RNA, 19 nt, Artificial Sequence
  Description of Artificial Sequence: Synthetic oligonucleotide
ugaaggcggguugucaaug

SEQ ID NO: 1828742 - RNA, 19 nt, Artificial Sequence
  Description of Artificial Sequence: Synthetic oligonucleotide
acaaauuguuccaaagaua

SEQ ID NO: 1828743 - RNA, 19 nt, Artificial Sequence
  Description of Artificial Sequence: Synthetic oligonucleotide
aaggcggguugucaaugga

SEQ ID NO: 1828744 - RNA, 19 nt, Artificial Sequence
  Description of Artificial Sequence: Synthetic oligonucleotide
acauugaggaucagauuug

SEQ ID NO: 1828745 - RNA, 19 nt, Artificial Sequence
  Description of Artificial Sequence: Synthetic oligonucleotide
aaaccacucuaaaauguuu

SEQ ID NO: 1828746 - RNA, 19 nt, Artificial Sequence
  Description of Artificial Sequence: Synthetic oligonucleotide
agucuaggaugcaaugaag

SEQ ID NO: 1828747 - RNA, 19 nt, Artificial Sequence
  Description of Artificial Sequence: Synthetic oligonucleotide
auguuagcacucaagaguu

SEQ ID NO: 1828748 - RNA, 19 nt, Artificial Sequence
  Description of Artificial Sequence: Synthetic oligonucleotide
gaauuacuaauaccucugu

SEQ ID NO: 1828749 - RNA, 19 nt, Artificial Sequence
  Description of Artificial Sequence: Synthetic oligonucleotide
ugcaaugaaggcggguugu

SEQ ID NO: 1828750 - RNA, 19 nt, Artificial Sequence
  Description of Artificial Sequence: Synthetic oligonucleotide
ggaaaauuuuaaguugcac

SEQ ID NO: 1828751 - RNA, 19 nt, Artificial Sequence
  Description of Artificial Sequence: Synthetic oligonucleotide
acagucaaauuccuccauu

SEQ ID NO: 1828752 - RNA, 19 nt, Artificial Sequence
  Description of Artificial Sequence: Synthetic oligonucleotide
uucuaugauuggcuuccaa

SEQ ID NO: 1828753 - RNA, 19 nt, Artificial Sequence
  Description of Artificial Sequence: Synthetic oligonucleotide
uaaaguuagcuggaauguu

SEQ ID NO: 1828754 - RNA, 19 nt, Artificial Sequence
  Description of Artificial Sequence: Synthetic oligonucleotide
  modified_base (11)..(11): a, c, u, g, unknown or other
ugacgaguucncuuugcua

SEQ ID NO: 1828755 - RNA, 19 nt, Artificial Sequence
  Description of Artificial Sequence: Synthetic oligonucleotide
uuccacuccugguaaaguu

SEQ ID NO: 1828756 - RNA, 19 nt, Artificial Sequence
  Description of Artificial Sequence: Synthetic oligonucleotide
guaaaguuagcuggaaugu

SEQ ID NO: 1828757 - RNA, 19 nt, Artificial Sequence
  Description of Artificial Sequence: Synthetic oligonucleotide
cccuguuuaaauuaaaaua

SEQ ID NO: 1828758 - RNA, 19 nt, Artificial Sequence
  Description of Artificial Sequence: Synthetic oligonucleotide
acaacauguuagcacucaa

SEQ ID NO: 1828759 - RNA, 19 nt, Artificial Sequence
  Description of Artificial Sequence: Synthetic oligonucleotide
agcaguuguucuguguuca

SEQ ID NO: 1828760 - RNA, 19 nt, Artificial Sequence
  Description of Artificial Sequence: Synthetic oligonucleotide
uuuaacugguuaggucucu

SEQ ID NO: 1828761 - RNA, 19 nt, Artificial Sequence
  Description of Artificial Sequence: Synthetic oligonucleotide
gacuuaguuuauuuccacu

SEQ ID NO: 1828762 - RNA, 19 nt, Artificial Sequence
  Description of Artificial Sequence: Synthetic oligonucleotide
gaugcacugcaucaauugu

SEQ ID NO: 1828763 - RNA, 19 nt, Artificial Sequence
  Description of Artificial Sequence: Synthetic oligonucleotide
augacuagcauaagccagu

SEQ ID NO: 1828764 - RNA, 19 nt, Artificial Sequence
  Description of Artificial Sequence: Synthetic oligonucleotide
ugguuuccuuuguacuuca

SEQ ID NO: 1828765 - RNA, 19 nt, Artificial Sequence
  Description of Artificial Sequence: Synthetic oligonucleotide
ggguugucaauggauacag

SEQ ID NO: 1828766 - RNA, 19 nt, Artificial Sequence
  Description of Artificial Sequence: Synthetic oligonucleotide
auacaacauguuagcacuc

SEQ ID NO: 1828767 - RNA, 19 nt, Artificial Sequence
  Description of Artificial Sequence: Synthetic oligonucleotide
  modified_base (7)..(7): a, c, u, g, unknown or other
gaguucncuuugcuaccac

SEQ ID NO: 1828768 - RNA, 19 nt, Artificial Sequence
  Description of Artificial Sequence: Synthetic oligonucleotide
uaaugaguccuuggccuca

SEQ ID NO: 1828769 - RNA, 19 nt, Artificial Sequence
  Description of Artificial Sequence: Synthetic oligonucleotide
guuaggucucuugagaacu

SEQ ID NO: 1828770 - RNA, 19 nt, Artificial Sequence
  Description of Artificial Sequence: Synthetic oligonucleotide
cuugagaacugcaacuggu

SEQ ID NO: 1828771 - RNA, 19 nt, Artificial Sequence
  Description of Artificial Sequence: Synthetic oligonucleotide
aggaaaauuuuaaguugca

SEQ ID NO: 1828772 - RNA, 19 nt, Artificial Sequence
  Description of Artificial Sequence: Synthetic oligonucleotide
ucuuugguauaagcaugga

SEQ ID NO: 1828773 - RNA, 19 nt, Artificial Sequence
  Description of Artificial Sequence: Synthetic oligonucleotide
cuaauaccucuguauaaua

SEQ ID NO: 1828774 - RNA, 19 nt, Artificial Sequence
  Description of Artificial Sequence: Synthetic oligonucleotide
augugaaaccuguuacauu

SEQ ID NO: 1828775 - RNA, 19 nt, Artificial Sequence
  Description of Artificial Sequence: Synthetic oligonucleotide
aucccuuaucaaguagaag

SEQ ID NO: 1828776 - RNA, 19 nt, Artificial Sequence
  Description of Artificial Sequence: Synthetic oligonucleotide
guaucuuucugaugacuua

SEQ ID NO: 1828777 - RNA, 19 nt, Artificial Sequence
  Description of Artificial Sequence: Synthetic oligonucleotide
caguguaaagcaccuccuc

SEQ ID NO: 1828778 - RNA, 19 nt, Artificial Sequence
  Description of Artificial Sequence: Synthetic oligonucleotide
cugaaaagaaaaguugccu

SEQ ID NO: 1828779 - RNA, 19 nt, Artificial Sequence
  Description of Artificial Sequence: Synthetic oligonucleotide
caccuccucacuaaauaca

SEQ ID NO: 1828780 - RNA, 19 nt, Artificial Sequence
  Description of Artificial Sequence: Synthetic oligonucleotide
aagcuaccagcaaaccacu

SEQ ID NO: 1828781 - RNA, 19 nt, Artificial Sequence
  Description of Artificial Sequence: Synthetic oligonucleotide
uuccuucaacaaagcauau

SEQ ID NO: 1828782 - RNA, 19 nt, Artificial Sequence
  Description of Artificial Sequence: Synthetic oligonucleotide
gguuaggucucuugagaac

SEQ ID NO: 1828783 - RNA, 19 nt, Artificial Sequence
  Description of Artificial Sequence: Synthetic oligonucleotide
uaccagcaaaccacucuaa

SEQ ID NO: 1828784 - RNA, 19 nt, Artificial Sequence
  Description of Artificial Sequence: Synthetic oligonucleotide
cacccuguuuaaauuaaaa

SEQ ID NO: 1828785 - RNA, 19 nt, Artificial Sequence
  Description of Artificial Sequence: Synthetic oligonucleotide
cugguuuccuuuguacuuc

SEQ ID NO: 1828786 - RNA, 19 nt, Artificial Sequence
  Description of Artificial Sequence: Synthetic oligonucleotide
gacuacaaccacauuccaa

SEQ ID NO: 1828787 - RNA, 19 nt, Artificial Sequence
  Description of Artificial Sequence: Synthetic oligonucleotide
guaaagcaccuccucacua

SEQ ID NO: 1828788 - RNA, 19 nt, Artificial Sequence
  Description of Artificial Sequence: Synthetic oligonucleotide
aguugccugacgaguaucu

SEQ ID NO: 1828789 - RNA, 19 nt, Artificial Sequence
  Description of Artificial Sequence: Synthetic oligonucleotide
cuucaacaaagcauauugu

SEQ ID NO: 1828790 - RNA, 19 nt, Artificial Sequence
  Description of Artificial Sequence: Synthetic oligonucleotide
cugcaacugguuuccuuug

SEQ ID NO: 1828791 - RNA, 19 nt, Artificial Sequence
  Description of Artificial Sequence: Synthetic oligonucleotide
ugcauacaccuugaugcaa

SEQ ID NO: 1828792 - RNA, 19 nt, Artificial Sequence
  Description of Artificial Sequence: Synthetic oligonucleotide
cuaccagcaaaccacucua

SEQ ID NO: 1828793 - RNA, 19 nt, Artificial Sequence
  Description of Artificial Sequence: Synthetic oligonucleotide
acuauaccaaagacacugu

SEQ ID NO: 1828794 - RNA, 19 nt, Artificial Sequence
  Description of Artificial Sequence: Synthetic oligonucleotide
cacucaagaguuuuaacuu

SEQ ID NO: 1828795 - RNA, 19 nt, Artificial Sequence
  Description of Artificial Sequence: Synthetic oligonucleotide
gaugcaaugaaggcggguu

SEQ ID NO: 1828796 - RNA, 19 nt, Artificial Sequence
  Description of Artificial Sequence: Synthetic oligonucleotide
gguauaagcauggaauugu

SEQ ID NO: 1828797 - RNA, 19 nt, Artificial Sequence
  Description of Artificial Sequence: Synthetic oligonucleotide
uccauuugugguggaagua

SEQ ID NO: 1828798 - RNA, 19 nt, Artificial Sequence
  Description of Artificial Sequence: Synthetic oligonucleotide
cauuuugucucagaaggcu

SEQ ID NO: 1828799 - RNA, 19 nt, Artificial Sequence
  Description of Artificial Sequence: Synthetic oligonucleotide
caccuugaugcaaaaggaa

SEQ ID NO: 1828800 - RNA, 19 nt, Artificial Sequence
  Description of Artificial Sequence: Synthetic oligonucleotide
ccacuccugguaaaguuag

SEQ ID NO: 1828801 - RNA, 19 nt, Artificial Sequence
  Description of Artificial Sequence: Synthetic oligonucleotide
accuccucacuaaauacaa

SEQ ID NO: 1828802 - RNA, 19 nt, Artificial Sequence
  Description of Artificial Sequence: Synthetic oligonucleotide
augaaggcggguugucaau

SEQ ID NO: 1828803 - RNA, 19 nt, Artificial Sequence
  Description of Artificial Sequence: Synthetic oligonucleotide
gcuaaggagaaacuagagu

SEQ ID NO: 1828804 - RNA, 19 nt, Artificial Sequence
  Description of Artificial Sequence: Synthetic oligonucleotide
uccuucaacaaagcauauu

SEQ ID NO: 1828805 - RNA, 19 nt, Artificial Sequence
  Description of Artificial Sequence: Synthetic oligonucleotide
gcaccuccucacuaaauac

SEQ ID NO: 1828806 - RNA, 19 nt, Artificial Sequence
  Description of Artificial Sequence: Synthetic oligonucleotide
auugaggaucagauuugga

SEQ ID NO: 1828807 - RNA, 19 nt, Artificial Sequence
  Description of Artificial Sequence: Synthetic oligonucleotide
aguuagcuggaauguuauu

SEQ ID NO: 1828808 - RNA, 19 nt, Artificial Sequence
  Description of Artificial Sequence: Synthetic oligonucleotide
cacuccugguaaaguuagc

SEQ ID NO: 1828809 - RNA, 19 nt, Artificial Sequence
  Description of Artificial Sequence: Synthetic oligonucleotide
ccugaaccaaauauaaaua

SEQ ID NO: 1828810 - RNA, 19 nt, Artificial Sequence
  Description of Artificial Sequence: Synthetic oligonucleotide
aaugaguccuuggccucaa

SEQ ID NO: 1828811 - RNA, 19 nt, Artificial Sequence
  Description of Artificial Sequence: Synthetic oligonucleotide
caaagauaguguucaugcu

SEQ ID NO: 1828812 - RNA, 19 nt, Artificial Sequence
  Description of Artificial Sequence: Synthetic oligonucleotide
ccuugaugcaaaaggaaaa

SEQ ID NO: 1828813 - RNA, 19 nt, Artificial Sequence
  Description of Artificial Sequence: Synthetic oligonucleotide
caagaguuuuaacuuaguu

SEQ ID NO: 1828814 - RNA, 19 nt, Artificial Sequence
  Description of Artificial Sequence: Synthetic oligonucleotide
gauuuuccaugacuagcau

SEQ ID NO: 1828815 - RNA, 19 nt, Artificial Sequence
  Description of Artificial Sequence: Synthetic oligonucleotide
ugacuagcauaagccagua

SEQ ID NO: 1828816 - RNA, 19 nt, Artificial Sequence
  Description of Artificial Sequence: Synthetic oligonucleotide
uuaacugguuaggucucuu

SEQ ID NO: 1828817 - RNA, 19 nt, Artificial Sequence
  Description of Artificial Sequence: Synthetic oligonucleotide
augcacugcaucaauuguu

SEQ ID NO: 1828818 - RNA, 19 nt, Artificial Sequence
  Description of Artificial Sequence: Synthetic oligonucleotide
ggagucuaggaugcaauga

SEQ ID NO: 1828819 - RNA, 19 nt, Artificial Sequence
  Description of Artificial Sequence: Synthetic oligonucleotide
cagcuucagaauaaaucua

SEQ ID NO: 1828820 - RNA, 19 nt, Artificial Sequence
  Description of Artificial Sequence: Synthetic oligonucleotide
cacagcuaaggagaaacua

SEQ ID NO: 1828821 - RNA, 19 nt, Artificial Sequence
  Description of Artificial Sequence: Synthetic oligonucleotide
cauacaccuugaugcaaaa

SEQ ID NO: 1828822 - RNA, 19 nt, Artificial Sequence
  Description of Artificial Sequence: Synthetic oligonucleotide
gauaguguucaugcucagu

SEQ ID NO: 1828823 - RNA, 19 nt, Artificial Sequence
  Description of Artificial Sequence: Synthetic oligonucleotide
aaguugcacccuguuuaaa

SEQ ID NO: 1828824 - RNA, 19 nt, Artificial Sequence
  Description of Artificial Sequence: Synthetic oligonucleotide
aacugggccugaaccuuca

SEQ ID NO: 1828825 - RNA, 19 nt, Artificial Sequence
  Description of Artificial Sequence: Synthetic oligonucleotide
agcuaccagcaaaccacuc

SEQ ID NO: 1828826 - RNA, 19 nt, Artificial Sequence
  Description of Artificial Sequence: Synthetic oligonucleotide
ccaugacuagcauaagcca

SEQ ID NO: 1828827 - RNA, 19 nt, Artificial Sequence
  Description of Artificial Sequence: Synthetic oligonucleotide
aggucucuugagaacugca

SEQ ID NO: 1828828 - RNA, 19 nt, Artificial Sequence
  Description of Artificial Sequence: Synthetic oligonucleotide
cauuccaagaaagggaauu

SEQ ID NO: 1828829 - RNA, 19 nt, Artificial Sequence
  Description of Artificial Sequence: Synthetic oligonucleotide
  modified_base (5)..(5): a, c, u, g, unknown or other
guucncuuugcuaccacau

SEQ ID NO: 1828830 - RNA, 19 nt, Artificial Sequence
  Description of Artificial Sequence: Synthetic oligonucleotide
caaugaaggcggguuguca

SEQ ID NO: 1828831 - RNA, 19 nt, Artificial Sequence
  Description of Artificial Sequence: Synthetic oligonucleotide
auuuugugaugcacugcau

SEQ ID NO: 1828832 - RNA, 19 nt, Artificial Sequence
  Description of Artificial Sequence: Synthetic oligonucleotide
aagcaccuccucacuaaau

SEQ ID NO: 1828833 - RNA, 19 nt, Artificial Sequence
  Description of Artificial Sequence: Synthetic oligonucleotide
guagaaguacuggcaaaua

SEQ ID NO: 1828834 - RNA, 19 nt, Artificial Sequence
  Description of Artificial Sequence: Synthetic oligonucleotide
gcggguugucaauggauac

SEQ ID NO: 1828835 - RNA, 19 nt, Artificial Sequence
  Description of Artificial Sequence: Synthetic oligonucleotide
ccugacgaguaucuuucug

SEQ ID NO: 1828836 - RNA, 19 nt, Artificial Sequence
  Description of Artificial Sequence: Synthetic oligonucleotide
gcaugaagagcaaacauuu

SEQ ID NO: 1828837 - RNA, 19 nt, Artificial Sequence
  Description of Artificial Sequence: Synthetic oligonucleotide
gcuaccagcaaaccacucu

SEQ ID NO: 1828838 - RNA, 19 nt, Artificial Sequence
  Description of Artificial Sequence: Synthetic oligonucleotide
cugcaucaauuguuuugca

SEQ ID NO: 1828839 - RNA, 19 nt, Artificial Sequence
  Description of Artificial Sequence: Synthetic oligonucleotide
caauggauacagucaaauu

SEQ ID NO: 1828840 - RNA, 19 nt, Artificial Sequence
  Description of Artificial Sequence: Synthetic oligonucleotide
ggauacagucaaauuccuc

SEQ ID NO: 1828841 - RNA, 19 nt, Artificial Sequence
  Description of Artificial Sequence: Synthetic oligonucleotide
aggagaaacuagaguuuau

SEQ ID NO: 1828842 - RNA, 19 nt, Artificial Sequence
  Description of Artificial Sequence: Synthetic oligonucleotide
ccucuguauaauaacauuu

SEQ ID NO: 1828843 - RNA, 19 nt, Artificial Sequence
  Description of Artificial Sequence: Synthetic oligonucleotide
acauuccaagaaagggaau

SEQ ID NO: 1828844 - RNA, 19 nt, Artificial Sequence
  Description of Artificial Sequence: Synthetic oligonucleotide
guccuuggccucaaugaaa

SEQ ID NO: 1828845 - RNA, 19 nt, Artificial Sequence
  Description of Artificial Sequence: Synthetic oligonucleotide
  modified_base (2)..(2): a, c, u, g, unknown or other
cncuuugcuaccacaucau

SEQ ID NO: 1828846 - RNA, 19 nt, Artificial Sequence
  Description of Artificial Sequence: Synthetic oligonucleotide
aggcggguugucaauggau

SEQ ID NO: 1828847 - RNA, 19 nt, Artificial Sequence
  Description of Artificial Sequence: Synthetic oligonucleotide
cccuuaucaaguagaagua

SEQ ID NO: 1828848 - RNA, 19 nt, Artificial Sequence
  Description of Artificial Sequence: Synthetic oligonucleotide
ggcaaauaacagacauuga

SEQ ID NO: 1828849 - RNA, 19 nt, Artificial Sequence
  Description of Artificial Sequence: Synthetic oligonucleotide
gcauacaccuugaugcaaa

SEQ ID NO: 1828850 - RNA, 19 nt, Artificial Sequence
  Description of Artificial Sequence: Synthetic oligonucleotide
ccucacuaaauacaaacuu

SEQ ID NO: 1828851 - RNA, 19 nt, Artificial Sequence
  Description of Artificial Sequence: Synthetic oligonucleotide
guuuugcauacaccuugau

SEQ ID NO: 1828852 - RNA, 19 nt, Artificial Sequence
  Description of Artificial Sequence: Synthetic oligonucleotide
ggagaaacuagaguuuauu

SEQ ID NO: 1828853 - RNA, 19 nt, Artificial Sequence
  Description of Artificial Sequence: Synthetic oligonucleotide
cggaauuacuaauaccucu

SEQ ID NO: 1828854 - RNA, 19 nt, Artificial Sequence
  Description of Artificial Sequence: Synthetic oligonucleotide
ccuuuguacuucauuuugu

SEQ ID NO: 1828855 - RNA, 19 nt, Artificial Sequence
  Description of Artificial Sequence: Synthetic oligonucleotide
aggaucagauuuggaucuu

SEQ ID NO: 1828856 - RNA, 19 nt, Artificial Sequence
  Description of Artificial Sequence: Synthetic oligonucleotide
ccuuggccucaaugaaaag

SEQ ID NO: 1828857 - RNA, 19 nt, Artificial Sequence
  Description of Artificial Sequence: Synthetic oligonucleotide
gucaacauuugggcaauuu

SEQ ID NO: 1828858 - RNA, 19 nt, Artificial Sequence
  Description of Artificial Sequence: Synthetic oligonucleotide
ugucaacauuugggcaauu

SEQ ID NO: 1828859 - RNA, 19 nt, Artificial Sequence
  Description of Artificial Sequence: Synthetic oligonucleotide
ggcggguugucaauggaua

SEQ ID NO: 1828860 - RNA, 19 nt, Artificial Sequence
  Description of Artificial Sequence: Synthetic oligonucleotide
gcaaugaaggcggguuguc

SEQ ID NO: 1828861 - RNA, 19 nt, Artificial Sequence
  Description of Artificial Sequence: Synthetic oligonucleotide
  modified_base (15)..(15): a, c, u, g, unknown or other
ccauugacgaguucncuuu

SEQ ID NO: 1828862 - RNA, 19 nt, Artificial Sequence
  Description of Artificial Sequence: Synthetic oligonucleotide
gugaugcacugcaucaauu

SEQ ID NO: 1828863 - RNA, 19 nt, Artificial Sequence
  Description of Artificial Sequence: Synthetic oligonucleotide
ccacucuaaaauguuuugu

SEQ ID NO: 1828864 - RNA, 19 nt, Artificial Sequence
  Description of Artificial Sequence: Synthetic oligonucleotide
ccuccucacuaaauacaaa

SEQ ID NO: 1828865 - RNA, 19 nt, Artificial Sequence
  Description of Artificial Sequence: Synthetic oligonucleotide
guugccugacgaguaucuu

SEQ ID NO: 1828866 - RNA, 19 nt, Artificial Sequence
  Description of Artificial Sequence: Synthetic oligonucleotide
cggguugucaauggauaca

SEQ ID NO: 1828867 - RNA, 19 nt, Artificial Sequence
  Description of Artificial Sequence: Synthetic oligonucleotide
  modified_base (8)..(8): a, c, u, g, unknown or other
cgaguucncuuugcuacca

SEQ ID NO: 1828868 - RNA, 19 nt, Artificial Sequence
  Description of Artificial Sequence: Synthetic oligonucleotide
gccugacgaguaucuuucu

SEQ ID NO: 1828869 - RNA, 19 nt, Artificial Sequence
  Description of Artificial Sequence: Synthetic oligonucleotide
ggaugacuacaaccacauu

SEQ ID NO: 1828870 - RNA, 19 nt, Artificial Sequence
  Description of Artificial Sequence: Synthetic oligonucleotide
gguuuccuuuguacuucau

SEQ ID NO: 1828871 - RNA, 19 nt, Artificial Sequence
  Description of Artificial Sequence: Synthetic oligonucleotide
cugaaccuucaggccucuu

SEQ ID NO: 1828872 - RNA, 19 nt, Artificial Sequence
  Description of Artificial Sequence: Synthetic oligonucleotide
ccugaaccuucaggccucu

SEQ ID NO: 1828873 - RNA, 19 nt, Artificial Sequence
  Description of Artificial Sequence: Synthetic oligonucleotide
aucauaauaauauaucucc

SEQ ID NO: 1828874 - RNA, 19 nt, Artificial Sequence
  Description of Artificial Sequence: Synthetic oligonucleotide
aauacucuuauguauggcc

SEQ ID NO: 1828875 - RNA, 19 nt, Artificial Sequence
  Description of Artificial Sequence: Synthetic oligonucleotide
gaaccaauaauauuaauag

SEQ ID NO: 1828876 - RNA, 19 nt, Artificial Sequence
  Description of Artificial Sequence: Synthetic oligonucleotide
ugaaauuuucucaagaugu

SEQ ID NO: 1828877 - RNA, 19 nt, Artificial Sequence
  Description of Artificial Sequence: Synthetic oligonucleotide
uuuuacgagauaaauuucg

SEQ ID NO: 1828878 - RNA, 19 nt, Artificial Sequence
  Description of Artificial Sequence: Synthetic oligonucleotide
uuuuaagucaguaucgaag

SEQ ID NO: 1828879 - RNA, 19 nt, Artificial Sequence
  Description of Artificial Sequence: Synthetic oligonucleotide
uguaguauaaccauccaug

SEQ ID NO: 1828880 - RNA, 19 nt, Artificial Sequence
  Description of Artificial Sequence: Synthetic oligonucleotide
aagaguugaagcuuucuac

SEQ ID NO: 1828881 - RNA, 19 nt, Artificial Sequence
  Description of Artificial Sequence: Synthetic oligonucleotide
auauugaggaauuacuugg

SEQ ID NO: 1828882 - RNA, 19 nt, Artificial Sequence
  Description of Artificial Sequence: Synthetic oligonucleotide
aauacaucacguucaaauc

SEQ ID NO: 1828883 - RNA, 19 nt, Artificial Sequence
  Description of Artificial Sequence: Synthetic oligonucleotide
uuuuaaguuagaaauacuc

SEQ ID NO: 1828884 - RNA, 19 nt, Artificial Sequence
  Description of Artificial Sequence: Synthetic oligonucleotide
auacaucacguucaaaucc

SEQ ID NO: 1828885 - RNA, 19 nt, Artificial Sequence
  Description of Artificial Sequence: Synthetic oligonucleotide
uuugcuaggcauuucauag

SEQ ID NO: 1828886 - RNA, 19 nt, Artificial Sequence
  Description of Artificial Sequence: Synthetic oligonucleotide
uuguagauaauauauugag

SEQ ID NO: 1828887 - RNA, 19 nt, Artificial Sequence
  Description of Artificial Sequence: Synthetic oligonucleotide
uguagauaauauauugagg

SEQ ID NO: 1828888 - RNA, 19 nt, Artificial Sequence
  Description of Artificial Sequence: Synthetic oligonucleotide
uguuguagauaauauauug

SEQ ID NO: 1828889 - RNA, 19 nt, Artificial Sequence
  Description of Artificial Sequence: Synthetic oligonucleotide
aauaaucugcaauuguucu

SEQ ID NO: 1828890 - RNA, 19 nt, Artificial Sequence
  Description of Artificial Sequence: Synthetic oligonucleotide
uuuacuucuaacaaugcuc

SEQ ID NO: 1828891 - RNA, 19 nt, Artificial Sequence
  Description of Artificial Sequence: Synthetic oligonucleotide
auaauauucaaauguaagu

SEQ ID NO: 1828892 - RNA, 19 nt, Artificial Sequence
  Description of Artificial Sequence: Synthetic oligonucleotide
uuuaaguuagaaauacucu

SEQ ID NO: 1828893 - RNA, 19 nt, Artificial Sequence
  Description of Artificial Sequence: Synthetic oligonucleotide
aauaaguggguacuugaag

SEQ ID NO: 1828894 - RNA, 19 nt, Artificial Sequence
  Description of Artificial Sequence: Synthetic oligonucleotide
aguuuuacgagauaaauuu

SEQ ID NO: 1828895 - RNA, 19 nt, Artificial Sequence
  Description of Artificial Sequence: Synthetic oligonucleotide
cauaagguccuuuuaaggg

SEQ ID NO: 1828896 - RNA, 19 nt, Artificial Sequence
  Description of Artificial Sequence: Synthetic oligonucleotide
uguauggccacauuuacug

SEQ ID NO: 1828897 - RNA, 19 nt, Artificial Sequence
  Description of Artificial Sequence: Synthetic oligonucleotide
uuuaagggaaccaauaaua

SEQ ID NO: 1828898 - RNA, 19 nt, Artificial Sequence
  Description of Artificial Sequence: Synthetic oligonucleotide
uuaggaaagaaaccaaucu

SEQ ID NO: 1828899 - RNA, 19 nt, Artificial Sequence
  Description of Artificial Sequence: Synthetic oligonucleotide
aauauuaauagacuucauu

SEQ ID NO: 1828900 - RNA, 19 nt, Artificial Sequence
  Description of Artificial Sequence: Synthetic oligonucleotide
uuugucuuguaguauaacc

SEQ ID NO: 1828901 - RNA, 19 nt, Artificial Sequence
  Description of Artificial Sequence: Synthetic oligonucleotide
uauauugaggaauuacuug

SEQ ID NO: 1828902 - RNA, 19 nt, Artificial Sequence
  Description of Artificial Sequence: Synthetic oligonucleotide
uauucaaauguaaguagag

SEQ ID NO: 1828903 - RNA, 19 nt, Artificial Sequence
  Description of Artificial Sequence: Synthetic oligonucleotide
agaucuagaaaauaaucug

SEQ ID NO: 1828904 - RNA, 19 nt, Artificial Sequence
  Description of Artificial Sequence: Synthetic oligonucleotide
aacugucucaguuuucuuc

SEQ ID NO: 1828905 - RNA, 19 nt, Artificial Sequence
  Description of Artificial Sequence: Synthetic oligonucleotide
agcacaacacaacacacac

SEQ ID NO: 1828906 - RNA, 19 nt, Artificial Sequence
  Description of Artificial Sequence: Synthetic oligonucleotide
agaucauaauaauauaucu

SEQ ID NO: 1828907 - RNA, 19 nt, Artificial Sequence
  Description of Artificial Sequence: Synthetic oligonucleotide
ucugcaauuguucugaaua

SEQ ID NO: 1828908 - RNA, 19 nt, Artificial Sequence
  Description of Artificial Sequence: Synthetic oligonucleotide
uacucuuuggccaauuugc

SEQ ID NO: 1828909 - RNA, 19 nt, Artificial Sequence
  Description of Artificial Sequence: Synthetic oligonucleotide
ucugaauacaucacguuca

SEQ ID NO: 1828910 - RNA, 19 nt, Artificial Sequence
  Description of Artificial Sequence: Synthetic oligonucleotide
uauauuaagggguauuccu

SEQ ID NO: 1828911 - RNA, 19 nt, Artificial Sequence
  Description of Artificial Sequence: Synthetic oligonucleotide
uguaauuuuccugagagaa

SEQ ID NO: 1828912 - RNA, 19 nt, Artificial Sequence
  Description of Artificial Sequence: Synthetic oligonucleotide
ucauaagguccuuuuaagg

SEQ ID NO: 1828913 - RNA, 19 nt, Artificial Sequence
  Description of Artificial Sequence: Synthetic oligonucleotide
aaugagguugcagcaaacc

SEQ ID NO: 1828914 - RNA, 19 nt, Artificial Sequence
  Description of Artificial Sequence: Synthetic oligonucleotide
auagacuucauuuuaaguu

SEQ ID NO: 1828915 - RNA, 19 nt, Artificial Sequence
  Description of Artificial Sequence: Synthetic oligonucleotide
agaguugaagcuuucuacg

SEQ ID NO: 1828916 - RNA, 19 nt, Artificial Sequence
  Description of Artificial Sequence: Synthetic oligonucleotide
auugauuauucucucauga

SEQ ID NO: 1828917 - RNA, 19 nt, Artificial Sequence
  Description of Artificial Sequence: Synthetic oligonucleotide
ugauuauucucucaugacu

SEQ ID NO: 1828918 - RNA, 19 nt, Artificial Sequence
  Description of Artificial Sequence: Synthetic oligonucleotide
uacguaucaucaaugaucu

SEQ ID NO: 1828919 - RNA, 19 nt, Artificial Sequence
  Description of Artificial Sequence: Synthetic oligonucleotide
aacaaugcucuccaaaagu

SEQ ID NO: 1828920 - RNA, 19 nt, Artificial Sequence
  Description of Artificial Sequence: Synthetic oligonucleotide
acaacauaacuguagagca

SEQ ID NO: 1828921 - RNA, 19 nt, Artificial Sequence
  Description of Artificial Sequence: Synthetic oligonucleotide
cuuucuacgauuugauggg

SEQ ID NO: 1828922 - RNA, 19 nt, Artificial Sequence
  Description of Artificial Sequence: Synthetic oligonucleotide
uacgagauaaauuucguaa

SEQ ID NO: 1828923 - RNA, 19 nt, Artificial Sequence
  Description of Artificial Sequence: Synthetic oligonucleotide
auaauauuaauagacuuca

SEQ ID NO: 1828924 - RNA, 19 nt, Artificial Sequence
  Description of Artificial Sequence: Synthetic oligonucleotide
uucagggagaucuagaaaa

SEQ ID NO: 1828925 - RNA, 19 nt, Artificial Sequence
  Description of Artificial Sequence: Synthetic oligonucleotide
ugaggaauuacuuggcuug

SEQ ID NO: 1828926 - RNA, 19 nt, Artificial Sequence
  Description of Artificial Sequence: Synthetic oligonucleotide
aaguuuuaagucaguaucg

SEQ ID NO: 1828927 - RNA, 19 nt, Artificial Sequence
  Description of Artificial Sequence: Synthetic oligonucleotide
uuagagacaagcuuuuacu

SEQ ID NO: 1828928 - RNA, 19 nt, Artificial Sequence
  Description of Artificial Sequence: Synthetic oligonucleotide
acuucuaacaaugcucucc

SEQ ID NO: 1828929 - RNA, 19 nt, Artificial Sequence
  Description of Artificial Sequence: Synthetic oligonucleotide
uugucuuguaguauaacca

SEQ ID NO: 1828930 - RNA, 19 nt, Artificial Sequence
  Description of Artificial Sequence: Synthetic oligonucleotide
uuacuucuaacaaugcucu

SEQ ID NO: 1828931 - RNA, 19 nt, Artificial Sequence
  Description of Artificial Sequence: Synthetic oligonucleotide
uuuagagacaagcuuuuac

SEQ ID NO: 1828932 - RNA, 19 nt, Artificial Sequence
  Description of Artificial Sequence: Synthetic oligonucleotide
augagguugcagcaaaccc

SEQ ID NO: 1828933 - RNA, 19 nt, Artificial Sequence
  Description of Artificial Sequence: Synthetic oligonucleotide
uccaacauaaguuggauua

SEQ ID NO: 1828934 - RNA, 19 nt, Artificial Sequence
  Description of Artificial Sequence: Synthetic oligonucleotide
uagaucauaauaauauauc

SEQ ID NO: 1828935 - RNA, 19 nt, Artificial Sequence
  Description of Artificial Sequence: Synthetic oligonucleotide
gcuuucuacgauuugaugg

SEQ ID NO: 1828936 - RNA, 19 nt, Artificial Sequence
  Description of Artificial Sequence: Synthetic oligonucleotide
aaacaacauaacuguagag

SEQ ID NO: 1828937 - RNA, 19 nt, Artificial Sequence
  Description of Artificial Sequence: Synthetic oligonucleotide
uguaccuauuucuucauga

SEQ ID NO: 1828938 - RNA, 19 nt, Artificial Sequence
  Description of Artificial Sequence: Synthetic oligonucleotide
uuggacauguuguagauaa

SEQ ID NO: 1828939 - RNA, 19 nt, Artificial Sequence
  Description of Artificial Sequence: Synthetic oligonucleotide
acaauugcaacuugagaag

SEQ ID NO: 1828940 - RNA, 19 nt, Artificial Sequence
  Description of Artificial Sequence: Synthetic oligonucleotide
gaucuagaaaauaaucugc

SEQ ID NO: 1828941 - RNA, 19 nt, Artificial Sequence
  Description of Artificial Sequence: Synthetic oligonucleotide
auauauuaagggguauucc

SEQ ID NO: 1828942 - RNA, 19 nt, Artificial Sequence
  Description of Artificial Sequence: Synthetic oligonucleotide
ugcagcaaacccaaaaugu

SEQ ID NO: 1828943 - RNA, 19 nt, Artificial Sequence
  Description of Artificial Sequence: Synthetic oligonucleotide
ucuuguaccuauuucuuca

SEQ ID NO: 1828944 - RNA, 19 nt, Artificial Sequence
  Description of Artificial Sequence: Synthetic oligonucleotide
uuucauaagguccuuuuaa

SEQ ID NO: 1828945 - RNA, 19 nt, Artificial Sequence
  Description of Artificial Sequence: Synthetic oligonucleotide
aauuacuuggcuuggguuu

SEQ ID NO: 1828946 - RNA, 19 nt, Artificial Sequence
  Description of Artificial Sequence: Synthetic oligonucleotide
uaauccacgcuucuuagga

SEQ ID NO: 1828947 - RNA, 19 nt, Artificial Sequence
  Description of Artificial Sequence: Synthetic oligonucleotide
uucauaagguccuuuuaag

SEQ ID NO: 1828948 - RNA, 19 nt, Artificial Sequence
  Description of Artificial Sequence: Synthetic oligonucleotide
uaaauaaguggguacuuga

SEQ ID NO: 1828949 - RNA, 19 nt, Artificial Sequence
  Description of Artificial Sequence: Synthetic oligonucleotide
uucauaauauucaaaugua

SEQ ID NO: 1828950 - RNA, 19 nt, Artificial Sequence
  Description of Artificial Sequence: Synthetic oligonucleotide
cuuacaauugcaacuugag

SEQ ID NO: 1828951 - RNA, 19 nt, Artificial Sequence
  Description of Artificial Sequence: Synthetic oligonucleotide
guuagaaauacucuuaugu

SEQ ID NO: 1828952 - RNA, 19 nt, Artificial Sequence
  Description of Artificial Sequence: Synthetic oligonucleotide
agaaaaguaauccacgcuu

SEQ ID NO: 1828953 - RNA, 19 nt, Artificial Sequence
  Description of Artificial Sequence: Synthetic oligonucleotide
uuuuaagggaaccaauaau

SEQ ID NO: 1828954 - RNA, 19 nt, Artificial Sequence
  Description of Artificial Sequence: Synthetic oligonucleotide
aagggaaccaauaauauua

SEQ ID NO: 1828955 - RNA, 19 nt, Artificial Sequence
  Description of Artificial Sequence: Synthetic oligonucleotide
uuaauagacuucauuuuaa

SEQ ID NO: 1828956 - RNA, 19 nt, Artificial Sequence
  Description of Artificial Sequence: Synthetic oligonucleotide
aucacguucaaauccaaca

SEQ ID NO: 1828957 - RNA, 19 nt, Artificial Sequence
  Description of Artificial Sequence: Synthetic oligonucleotide
ucuguaaauaaguggguac

SEQ ID NO: 1828958 - RNA, 19 nt, Artificial Sequence
  Description of Artificial Sequence: Synthetic oligonucleotide
ucuuacaauugcaacuuga

SEQ ID NO: 1828959 - RNA, 19 nt, Artificial Sequence
  Description of Artificial Sequence: Synthetic oligonucleotide
uucugaauacaucacguuc

SEQ ID NO: 1828960 - RNA, 19 nt, Artificial Sequence
  Description of Artificial Sequence: Synthetic oligonucleotide
guaucgaagacugugaaac

SEQ ID NO: 1828961 - RNA, 19 nt, Artificial Sequence
  Description of Artificial Sequence: Synthetic oligonucleotide
uaacuguagagcauugaug

SEQ ID NO: 1828962 - RNA, 19 nt, Artificial Sequence
  Description of Artificial Sequence: Synthetic oligonucleotide
auaaguuggauuauuguug

SEQ ID NO: 1828963 - RNA, 19 nt, Artificial Sequence
  Description of Artificial Sequence: Synthetic oligonucleotide
caaauccaacauaaguugg

SEQ ID NO: 1828964 - RNA, 19 nt, Artificial Sequence
  Description of Artificial Sequence: Synthetic oligonucleotide
uuagaaauacucuuaugua

SEQ ID NO: 1828965 - RNA, 19 nt, Artificial Sequence
  Description of Artificial Sequence: Synthetic oligonucleotide
uuauuguugucauuacucu

SEQ ID NO: 1828966 - RNA, 19 nt, Artificial Sequence
  Description of Artificial Sequence: Synthetic oligonucleotide
uugucauuacucuuuggcc

SEQ ID NO: 1828967 - RNA, 19 nt, Artificial Sequence
  Description of Artificial Sequence: Synthetic oligonucleotide
agguuugccauccaaaagu

SEQ ID NO: 1828968 - RNA, 19 nt, Artificial Sequence
  Description of Artificial Sequence: Synthetic oligonucleotide
aaguacguaucaucaauga

SEQ ID NO: 1828969 - RNA, 19 nt, Artificial Sequence
  Description of Artificial Sequence: Synthetic oligonucleotide
cuauggagcagguagauca

SEQ ID NO: 1828970 - RNA, 19 nt, Artificial Sequence
  Description of Artificial Sequence: Synthetic oligonucleotide
ugcacauuaagaguugaag

SEQ ID NO: 1828971 - RNA, 19 nt, Artificial Sequence
  Description of Artificial Sequence: Synthetic oligonucleotide
uuuaucucucuguugucag

SEQ ID NO: 1828972 - RNA, 19 nt, Artificial Sequence
  Description of Artificial Sequence: Synthetic oligonucleotide
gaaacuuugcauuucuuaa

SEQ ID NO: 1828973 - RNA, 19 nt, Artificial Sequence
  Description of Artificial Sequence: Synthetic oligonucleotide
uuaagggaaccaauaauau

SEQ ID NO: 1828974 - RNA, 19 nt, Artificial Sequence
  Description of Artificial Sequence: Synthetic oligonucleotide
agugguuggaaaucuuuuc

SEQ ID NO: 1828975 - RNA, 19 nt, Artificial Sequence
  Description of Artificial Sequence: Synthetic oligonucleotide
cuucuuaggaguuuuacga

SEQ ID NO: 1828976 - RNA, 19 nt, Artificial Sequence
  Description of Artificial Sequence: Synthetic oligonucleotide
cauucgagaaaucaugcac

SEQ ID NO: 1828977 - RNA, 19 nt, Artificial Sequence
  Description of Artificial Sequence: Synthetic oligonucleotide
ucuaacaaugcucuccaaa

SEQ ID NO: 1828978 - RNA, 19 nt, Artificial Sequence
  Description of Artificial Sequence: Synthetic oligonucleotide
aaaaguaauccacgcuucu

SEQ ID NO: 1828979 - RNA, 19 nt, Artificial Sequence
  Description of Artificial Sequence: Synthetic oligonucleotide
aagacuauuuugccaucuc

SEQ ID NO: 1828980 - RNA, 19 nt, Artificial Sequence
  Description of Artificial Sequence: Synthetic oligonucleotide
uauuaauagacuucauuuu

SEQ ID NO: 1828981 - RNA, 19 nt, Artificial Sequence
  Description of Artificial Sequence: Synthetic oligonucleotide
ucuuauauauuaaggggua

SEQ ID NO: 1828982 - RNA, 19 nt, Artificial Sequence
  Description of Artificial Sequence: Synthetic oligonucleotide
uuuacgagauaaauuucgu

SEQ ID NO: 1828983 - RNA, 19 nt, Artificial Sequence
  Description of Artificial Sequence: Synthetic oligonucleotide
augaucuuguaccuauuuc

SEQ ID NO: 1828984 - RNA, 19 nt, Artificial Sequence
  Description of Artificial Sequence: Synthetic oligonucleotide
aaguugaaauuuucucaag

SEQ ID NO: 1828985 - RNA, 19 nt, Artificial Sequence
  Description of Artificial Sequence: Synthetic oligonucleotide
uauguauggccacauuuac

SEQ ID NO: 1828986 - RNA, 19 nt, Artificial Sequence
  Description of Artificial Sequence: Synthetic oligonucleotide
ugugaaacuuugcauuucu

SEQ ID NO: 1828987 - RNA, 19 nt, Artificial Sequence
  Description of Artificial Sequence: Synthetic oligonucleotide
uacaucacguucaaaucca

SEQ ID NO: 1828988 - RNA, 19 nt, Artificial Sequence
  Description of Artificial Sequence: Synthetic oligonucleotide
cagauaauacccagugugg

SEQ ID NO: 1828989 - RNA, 19 nt, Artificial Sequence
  Description of Artificial Sequence: Synthetic oligonucleotide
gaaguugaaauuuucucaa

SEQ ID NO: 1828990 - RNA, 19 nt, Artificial Sequence
  Description of Artificial Sequence: Synthetic oligonucleotide
uauauauuaagggguauuc

SEQ ID NO: 1828991 - RNA, 19 nt, Artificial Sequence
  Description of Artificial Sequence: Synthetic oligonucleotide
ucaaauguaaguagagguu

SEQ ID NO: 1828992 - RNA, 19 nt, Artificial Sequence
  Description of Artificial Sequence: Synthetic oligonucleotide
auaagguccuuuuaaggga

SEQ ID NO: 1828993 - RNA, 19 nt, Artificial Sequence
  Description of Artificial Sequence: Synthetic oligonucleotide
cucauucgagaaaucaugc

SEQ ID NO: 1828994 - RNA, 19 nt, Artificial Sequence
  Description of Artificial Sequence: Synthetic oligonucleotide
uggaaaucuuuucuuauau

SEQ ID NO: 1828995 - RNA, 19 nt, Artificial Sequence
  Description of Artificial Sequence: Synthetic oligonucleotide
gaucauaauaauauaucuc

SEQ ID NO: 1828996 - RNA, 19 nt, Artificial Sequence
  Description of Artificial Sequence: Synthetic oligonucleotide
uuauguauggccacauuua

SEQ ID NO: 1828997 - RNA, 19 nt, Artificial Sequence
  Description of Artificial Sequence: Synthetic oligonucleotide
caacacaacacacaccgag

SEQ ID NO: 1828998 - RNA, 19 nt, Artificial Sequence
  Description of Artificial Sequence: Synthetic oligonucleotide
acaaauaauucauaauauu

SEQ ID NO: 1828999 - RNA, 19 nt, Artificial Sequence
  Description of Artificial Sequence: Synthetic oligonucleotide
uaaucugcaauuguucuga

SEQ ID NO: 1829000 - RNA, 19 nt, Artificial Sequence
  Description of Artificial Sequence: Synthetic oligonucleotide
ugaaacuuugcauuucuua

SEQ ID NO: 1829001 - RNA, 19 nt, Artificial Sequence
  Description of Artificial Sequence: Synthetic oligonucleotide
aacauaaguuggauuauug

SEQ ID NO: 1829002 - RNA, 19 nt, Artificial Sequence
  Description of Artificial Sequence: Synthetic oligonucleotide
ucuuaggaguuuuacgaga

SEQ ID NO: 1829003 - RNA, 19 nt, Artificial Sequence
  Description of Artificial Sequence: Synthetic oligonucleotide
uagacuucauuuuaaguua

SEQ ID NO: 1829004 - RNA, 19 nt, Artificial Sequence
  Description of Artificial Sequence: Synthetic oligonucleotide
uucuuaggaguuuuacgag

SEQ ID NO: 1829005 - RNA, 19 nt, Artificial Sequence
  Description of Artificial Sequence: Synthetic oligonucleotide
aaaguacguaucaucaaug

SEQ ID NO: 1829006 - RNA, 19 nt, Artificial Sequence
  Description of Artificial Sequence: Synthetic oligonucleotide
ucaaugaucuuguaccuau

SEQ ID NO: 1829007 - RNA, 19 nt, Artificial Sequence
  Description of Artificial Sequence: Synthetic oligonucleotide
ugcuaggcauuucauagca

SEQ ID NO: 1829008 - RNA, 19 nt, Artificial Sequence
  Description of Artificial Sequence: Synthetic oligonucleotide
ugaaguuuuaagucaguau

SEQ ID NO: 1829009 - RNA, 19 nt, Artificial Sequence
  Description of Artificial Sequence: Synthetic oligonucleotide
gaagaauuuccugaugaug

SEQ ID NO: 1829010 - RNA, 19 nt, Artificial Sequence
  Description of Artificial Sequence: Synthetic oligonucleotide
agaaaauaaucugcaauug

SEQ ID NO: 1829011 - RNA, 19 nt, Artificial Sequence
  Description of Artificial Sequence: Synthetic oligonucleotide
auaaucugcaauuguucug

SEQ ID NO: 1829012 - RNA, 19 nt, Artificial Sequence
  Description of Artificial Sequence: Synthetic oligonucleotide
ucaguaucgaagacuguga

SEQ ID NO: 1829013 - RNA, 19 nt, Artificial Sequence
  Description of Artificial Sequence: Synthetic oligonucleotide
auaacuguagagcauugau

SEQ ID NO: 1829014 - RNA, 19 nt, Artificial Sequence
  Description of Artificial Sequence: Synthetic oligonucleotide
ucuccuuuagagacaagcu

SEQ ID NO: 1829015 - RNA, 19 nt, Artificial Sequence
  Description of Artificial Sequence: Synthetic oligonucleotide
aacuugagaaguugaaauu

SEQ ID NO: 1829016 - RNA, 19 nt, Artificial Sequence
  Description of Artificial Sequence: Synthetic oligonucleotide
uuugacucauucgagaaau

SEQ ID NO: 1829017 - RNA, 19 nt, Artificial Sequence
  Description of Artificial Sequence: Synthetic oligonucleotide
cuuggcuuggguuuaugag

SEQ ID NO: 1829018 - RNA, 19 nt, Artificial Sequence
  Description of Artificial Sequence: Synthetic oligonucleotide
aguaauccacgcuucuuag

SEQ ID NO: 1829019 - RNA, 19 nt, Artificial Sequence
  Description of Artificial Sequence: Synthetic oligonucleotide
uauuccuucugaaacuguc

SEQ ID NO: 1829020 - RNA, 19 nt, Artificial Sequence
  Description of Artificial Sequence: Synthetic oligonucleotide
uaaaugagguugcagcaaa

SEQ ID NO: 1829021 - RNA, 19 nt, Artificial Sequence
  Description of Artificial Sequence: Synthetic oligonucleotide
uuaugaguucuucuaugga

SEQ ID NO: 1829022 - RNA, 19 nt, Artificial Sequence
  Description of Artificial Sequence: Synthetic oligonucleotide
guacguaucaucaaugauc

SEQ ID NO: 1829023 - RNA, 19 nt, Artificial Sequence
  Description of Artificial Sequence: Synthetic oligonucleotide
auuuugacucauucgagaa

SEQ ID NO: 1829024 - RNA, 19 nt, Artificial Sequence
  Description of Artificial Sequence: Synthetic oligonucleotide
uauuaagggguauuccuuc

SEQ ID NO: 1829025 - RNA, 19 nt, Artificial Sequence
  Description of Artificial Sequence: Synthetic oligonucleotide
gauuguagguuugccaucc

SEQ ID NO: 1829026 - RNA, 19 nt, Artificial Sequence
  Description of Artificial Sequence: Synthetic oligonucleotide
agauaaauuucguaauuua

SEQ ID NO: 1829027 - RNA, 19 nt, Artificial Sequence
  Description of Artificial Sequence: Synthetic oligonucleotide
aguuggauuauuguuguca

SEQ ID NO: 1829028 - RNA, 19 nt, Artificial Sequence
  Description of Artificial Sequence: Synthetic oligonucleotide
ugauuugucuuguaguaua

SEQ ID NO: 1829029 - RNA, 19 nt, Artificial Sequence
  Description of Artificial Sequence: Synthetic oligonucleotide
uaagaguugaagcuuucua

SEQ ID NO: 1829030 - RNA, 19 nt, Artificial Sequence
  Description of Artificial Sequence: Synthetic oligonucleotide
agguagaucauaauaauau

SEQ ID NO: 1829031 - RNA, 19 nt, Artificial Sequence
  Description of Artificial Sequence: Synthetic oligonucleotide
aauguaaguagagguucag

SEQ ID NO: 1829032 - RNA, 19 nt, Artificial Sequence
  Description of Artificial Sequence: Synthetic oligonucleotide
ucuagaaaauaaucugcaa

SEQ ID NO: 1829033 - RNA, 19 nt, Artificial Sequence
  Description of Artificial Sequence: Synthetic oligonucleotide
ugacuuauguuuucuguaa

SEQ ID NO: 1829034 - RNA, 19 nt, Artificial Sequence
  Description of Artificial Sequence: Synthetic oligonucleotide
cuuuuacuucuaacaaugc

SEQ ID NO: 1829035 - RNA, 19 nt, Artificial Sequence
  Description of Artificial Sequence: Synthetic oligonucleotide
ugucuuguaguauaaccau

SEQ ID NO: 1829036 - RNA, 19 nt, Artificial Sequence
  Description of Artificial Sequence: Synthetic oligonucleotide
aauccacgcuucuuaggag

SEQ ID NO: 1829037 - RNA, 19 nt, Artificial Sequence
  Description of Artificial Sequence: Synthetic oligonucleotide
ucacguucaaauccaacau

SEQ ID NO: 1829038 - RNA, 19 nt, Artificial Sequence
  Description of Artificial Sequence: Synthetic oligonucleotide
aacucucucuaaaugaggu

SEQ ID NO: 1829039 - RNA, 19 nt, Artificial Sequence
  Description of Artificial Sequence: Synthetic oligonucleotide
auaucaacauuuugacuca

SEQ ID NO: 1829040 - RNA, 19 nt, Artificial Sequence
  Description of Artificial Sequence: Synthetic oligonucleotide
uuguaguauaaccauccau

SEQ ID NO: 1829041 - RNA, 19 nt, Artificial Sequence
  Description of Artificial Sequence: Synthetic oligonucleotide
auuguucugaauacaucac

SEQ ID NO: 1829042 - RNA, 19 nt, Artificial Sequence
  Description of Artificial Sequence: Synthetic oligonucleotide
agagcauugauggcaacuc

SEQ ID NO: 1829043 - RNA, 19 nt, Artificial Sequence
  Description of Artificial Sequence: Synthetic oligonucleotide
auucucucaugacuuaugu

SEQ ID NO: 1829044 - RNA, 19 nt, Artificial Sequence
  Description of Artificial Sequence: Synthetic oligonucleotide
aaagacuauuuugccaucu

SEQ ID NO: 1829045 - RNA, 19 nt, Artificial Sequence
  Description of Artificial Sequence: Synthetic oligonucleotide
uguagagcauugauggcaa

SEQ ID NO: 1829046 - RNA, 19 nt, Artificial Sequence
  Description of Artificial Sequence: Synthetic oligonucleotide
uugagaaguugaaauuuuc

SEQ ID NO: 1829047 - RNA, 19 nt, Artificial Sequence
  Description of Artificial Sequence: Synthetic oligonucleotide
cauaauaauauaucuccaa

SEQ ID NO: 1829048 - RNA, 19 nt, Artificial Sequence
  Description of Artificial Sequence: Synthetic oligonucleotide
aaauacucugugcuuguuu

SEQ ID NO: 1829049 - RNA, 19 nt, Artificial Sequence
  Description of Artificial Sequence: Synthetic oligonucleotide
uaggaguuuuacgagauaa

SEQ ID NO: 1829050 - RNA, 19 nt, Artificial Sequence
  Description of Artificial Sequence: Synthetic oligonucleotide
uuaagucaguaucgaagac

SEQ ID NO: 1829051 - RNA, 19 nt, Artificial Sequence
  Description of Artificial Sequence: Synthetic oligonucleotide
aaauccaacauaaguugga

SEQ ID NO: 1829052 - RNA, 19 nt, Artificial Sequence
  Description of Artificial Sequence: Synthetic oligonucleotide
ucauucgagaaaucaugca

SEQ ID NO: 1829053 - RNA, 19 nt, Artificial Sequence
  Description of Artificial Sequence: Synthetic oligonucleotide
uuacuuguguuggacaugu

SEQ ID NO: 1829054 - RNA, 19 nt, Artificial Sequence
  Description of Artificial Sequence: Synthetic oligonucleotide
ucuuccuggcuuuaucucu

SEQ ID NO: 1829055 - RNA, 19 nt, Artificial Sequence
  Description of Artificial Sequence: Synthetic oligonucleotide
uuguugucauuacucuuug

SEQ ID NO: 1829056 - RNA, 19 nt, Artificial Sequence
  Description of Artificial Sequence: Synthetic oligonucleotide
ugaguucuucuauggagca

SEQ ID NO: 1829057 - RNA, 19 nt, Artificial Sequence
  Description of Artificial Sequence: Synthetic oligonucleotide
gucaguaucgaagacugug

SEQ ID NO: 1829058 - RNA, 19 nt, Artificial Sequence
  Description of Artificial Sequence: Synthetic oligonucleotide
ucuguugucagcugaguuu

SEQ ID NO: 1829059 - RNA, 19 nt, Artificial Sequence
  Description of Artificial Sequence: Synthetic oligonucleotide
gagaucuagaaaauaaucu

SEQ ID NO: 1829060 - RNA, 19 nt, Artificial Sequence
  Description of Artificial Sequence: Synthetic oligonucleotide
uuaagggguauuccuucug

SEQ ID NO: 1829061 - RNA, 19 nt, Artificial Sequence
  Description of Artificial Sequence: Synthetic oligonucleotide
ugggcauaucaacauuuug

SEQ ID NO: 1829062 - RNA, 19 nt, Artificial Sequence
  Description of Artificial Sequence: Synthetic oligonucleotide
uggaagauccucugauuug

SEQ ID NO: 1829063 - RNA, 19 nt, Artificial Sequence
  Description of Artificial Sequence: Synthetic oligonucleotide
ucaugacuuauguuuucug

SEQ ID NO: 1829064 - RNA, 19 nt, Artificial Sequence
  Description of Artificial Sequence: Synthetic oligonucleotide
auugcaacuugagaaguug

SEQ ID NO: 1829065 - RNA, 19 nt, Artificial Sequence
  Description of Artificial Sequence: Synthetic oligonucleotide
uuuugacucauucgagaaa

SEQ ID NO: 1829066 - RNA, 19 nt, Artificial Sequence
  Description of Artificial Sequence: Synthetic oligonucleotide
aaguuugggcauaucaaca

SEQ ID NO: 1829067 - RNA, 19 nt, Artificial Sequence
  Description of Artificial Sequence: Synthetic oligonucleotide
agacuauuuugccaucucu

SEQ ID NO: 1829068 - RNA, 19 nt, Artificial Sequence
  Description of Artificial Sequence: Synthetic oligonucleotide
caacucucucuaaaugagg

SEQ ID NO: 1829069 - RNA, 19 nt, Artificial Sequence
  Description of Artificial Sequence: Synthetic oligonucleotide
gaugaugauccauuaggaa

SEQ ID NO: 1829070 - RNA, 19 nt, Artificial Sequence
  Description of Artificial Sequence: Synthetic oligonucleotide
ucaugcacauuaagaguug

SEQ ID NO: 1829071 - RNA, 19 nt, Artificial Sequence
  Description of Artificial Sequence: Synthetic oligonucleotide
uggcaacucucucuaaaug

SEQ ID NO: 1829072 - RNA, 19 nt, Artificial Sequence
  Description of Artificial Sequence: Synthetic oligonucleotide
acgagauaaauuucguaau

SEQ ID NO: 1829073 - RNA, 19 nt, Artificial Sequence
  Description of Artificial Sequence: Synthetic oligonucleotide
aaaugagguugcagcaaac

SEQ ID NO: 1829074 - RNA, 19 nt, Artificial Sequence
  Description of Artificial Sequence: Synthetic oligonucleotide
aaguuggauuauuguuguc

SEQ ID NO: 1829075 - RNA, 19 nt, Artificial Sequence
  Description of Artificial Sequence: Synthetic oligonucleotide
acucauucgagaaaucaug

SEQ ID NO: 1829076 - RNA, 19 nt, Artificial Sequence
  Description of Artificial Sequence: Synthetic oligonucleotide
ggcauaucaacauuuugac

SEQ ID NO: 1829077 - RNA, 19 nt, Artificial Sequence
  Description of Artificial Sequence: Synthetic oligonucleotide
guaauccacgcuucuuagg

SEQ ID NO: 1829078 - RNA, 19 nt, Artificial Sequence
  Description of Artificial Sequence: Synthetic oligonucleotide
gcuucuuaggaguuuuacg

SEQ ID NO: 1829079 - RNA, 19 nt, Artificial Sequence
  Description of Artificial Sequence: Synthetic oligonucleotide
guuguagauaauauauuga

SEQ ID NO: 1829080 - RNA, 19 nt, Artificial Sequence
  Description of Artificial Sequence: Synthetic oligonucleotide
ucuuucauaagguccuuuu

SEQ ID NO: 1829081 - RNA, 19 nt, Artificial Sequence
  Description of Artificial Sequence: Synthetic oligonucleotide
uccugagagaaaaguaauc

SEQ ID NO: 1829082 - RNA, 19 nt, Artificial Sequence
  Description of Artificial Sequence: Synthetic oligonucleotide
uucuucucuccuuuagaga

SEQ ID NO: 1829083 - RNA, 19 nt, Artificial Sequence
  Description of Artificial Sequence: Synthetic oligonucleotide
gauaauacccaguguggaa

SEQ ID NO: 1829084 - RNA, 19 nt, Artificial Sequence
  Description of Artificial Sequence: Synthetic oligonucleotide
auuugucuuguaguauaac

SEQ ID NO: 1829085 - RNA, 19 nt, Artificial Sequence
  Description of Artificial Sequence: Synthetic oligonucleotide
cugcaauuguucugaauac

SEQ ID NO: 1829086 - RNA, 19 nt, Artificial Sequence
  Description of Artificial Sequence: Synthetic oligonucleotide
gaaaaguaauccacgcuuc

SEQ ID NO: 1829087 - RNA, 19 nt, Artificial Sequence
  Description of Artificial Sequence: Synthetic oligonucleotide
auuaagggguauuccuucu

SEQ ID NO: 1829088 - RNA, 19 nt, Artificial Sequence
  Description of Artificial Sequence: Synthetic oligonucleotide
uuacgagauaaauuucgua

SEQ ID NO: 1829089 - RNA, 19 nt, Artificial Sequence
  Description of Artificial Sequence: Synthetic oligonucleotide
augacuuauguuuucugua

SEQ ID NO: 1829090 - RNA, 19 nt, Artificial Sequence
  Description of Artificial Sequence: Synthetic oligonucleotide
gaaagaaaccaaucuugaa

SEQ ID NO: 1829091 - RNA, 19 nt, Artificial Sequence
  Description of Artificial Sequence: Synthetic oligonucleotide
auucgagaaaucaugcaca

SEQ ID NO: 1829092 - RNA, 19 nt, Artificial Sequence
  Description of Artificial Sequence: Synthetic oligonucleotide
uuucuacgauuugaugggg

SEQ ID NO: 1829093 - RNA, 19 nt, Artificial Sequence
  Description of Artificial Sequence: Synthetic oligonucleotide
uccaugcuuacuuguguug

SEQ ID NO: 1829094 - RNA, 19 nt, Artificial Sequence
  Description of Artificial Sequence: Synthetic oligonucleotide
cauuuugacucauucgaga

SEQ ID NO: 1829095 - RNA, 19 nt, Artificial Sequence
  Description of Artificial Sequence: Synthetic oligonucleotide
aguacguaucaucaaugau

SEQ ID NO: 1829096 - RNA, 19 nt, Artificial Sequence
  Description of Artificial Sequence: Synthetic oligonucleotide
uugccauccaaaagugcug

SEQ ID NO: 1829097 - RNA, 19 nt, Artificial Sequence
  Description of Artificial Sequence: Synthetic oligonucleotide
ugaagcuuucuacgauuug

SEQ ID NO: 1829098 - RNA, 19 nt, Artificial Sequence
  Description of Artificial Sequence: Synthetic oligonucleotide
cacauuaagaguugaagcu

SEQ ID NO: 1829099 - RNA, 19 nt, Artificial Sequence
  Description of Artificial Sequence: Synthetic oligonucleotide
auauauugaggaauuacuu

SEQ ID NO: 1829100 - RNA, 19 nt, Artificial Sequence
  Description of Artificial Sequence: Synthetic oligonucleotide
gaaaccaaucuugaagcga

SEQ ID NO: 1829101 - RNA, 19 nt, Artificial Sequence
  Description of Artificial Sequence: Synthetic oligonucleotide
ggaaguaacaaacaacaua

SEQ ID NO: 1829102 - RNA, 19 nt, Artificial Sequence
  Description of Artificial Sequence: Synthetic oligonucleotide
gaguugaagcuuucuacga

SEQ ID NO: 1829103 - RNA, 19 nt, Artificial Sequence
  Description of Artificial Sequence: Synthetic oligonucleotide
uggccaauuugcuaggcau

SEQ ID NO: 1829104 - RNA, 19 nt, Artificial Sequence
  Description of Artificial Sequence: Synthetic oligonucleotide
uguuggacauguuguagau

SEQ ID NO: 1829105 - RNA, 19 nt, Artificial Sequence
  Description of Artificial Sequence: Synthetic oligonucleotide
ugcuuacuuguguuggaca

SEQ ID NO: 1829106 - RNA, 19 nt, Artificial Sequence
  Description of Artificial Sequence: Synthetic oligonucleotide
uucgagaaaucaugcacau

SEQ ID NO: 1829107 - RNA, 19 nt, Artificial Sequence
  Description of Artificial Sequence: Synthetic oligonucleotide
gggguauuccuucugaaac

SEQ ID NO: 1829108 - RNA, 19 nt, Artificial Sequence
  Description of Artificial Sequence: Synthetic oligonucleotide
uuaagaguugaagcuuucu

SEQ ID NO: 1829109 - RNA, 19 nt, Artificial Sequence
  Description of Artificial Sequence: Synthetic oligonucleotide
uugcuaggcauuucauagc

SEQ ID NO: 1829110 - RNA, 19 nt, Artificial Sequence
  Description of Artificial Sequence: Synthetic oligonucleotide
cuuuuaagggaaccaauaa

SEQ ID NO: 1829111 - RNA, 19 nt, Artificial Sequence
  Description of Artificial Sequence: Synthetic oligonucleotide
uacucuuauguauggccac

SEQ ID NO: 1829112 - RNA, 19 nt, Artificial Sequence
  Description of Artificial Sequence: Synthetic oligonucleotide
aucaugcacauuaagaguu

SEQ ID NO: 1829113 - RNA, 19 nt, Artificial Sequence
  Description of Artificial Sequence: Synthetic oligonucleotide
agauaauacccagugugga

SEQ ID NO: 1829114 - RNA, 19 nt, Artificial Sequence
  Description of Artificial Sequence: Synthetic oligonucleotide
aguugaagcuuucuacgau

SEQ ID NO: 1829115 - RNA, 19 nt, Artificial Sequence
  Description of Artificial Sequence: Synthetic oligonucleotide
agcaaacccaaaauguuca

SEQ ID NO: 1829116 - RNA, 19 nt, Artificial Sequence
  Description of Artificial Sequence: Synthetic oligonucleotide
ggggaaguaacaaacaaca

SEQ ID NO: 1829117 - RNA, 19 nt, Artificial Sequence
  Description of Artificial Sequence: Synthetic oligonucleotide
auugguugcuugauuguag

SEQ ID NO: 1829118 - RNA, 19 nt, Artificial Sequence
  Description of Artificial Sequence: Synthetic oligonucleotide
auuugcuaggcauuucaua

SEQ ID NO: 1829119 - RNA, 19 nt, Artificial Sequence
  Description of Artificial Sequence: Synthetic oligonucleotide
caaugcucuccaaaaguuc

SEQ ID NO: 1829120 - RNA, 19 nt, Artificial Sequence
  Description of Artificial Sequence: Synthetic oligonucleotide
gauaauauauugaggaauu

SEQ ID NO: 1829121 - RNA, 19 nt, Artificial Sequence
  Description of Artificial Sequence: Synthetic oligonucleotide
cuuuggccaauuugcuagg

SEQ ID NO: 1829122 - RNA, 19 nt, Artificial Sequence
  Description of Artificial Sequence: Synthetic oligonucleotide
caauuugcuaggcauuuca

SEQ ID NO: 1829123 - RNA, 19 nt, Artificial Sequence
  Description of Artificial Sequence: Synthetic oligonucleotide
uaucgaagacugugaaacu

SEQ ID NO: 1829124 - RNA, 19 nt, Artificial Sequence
  Description of Artificial Sequence: Synthetic oligonucleotide
cuucuaacaaugcucucca

SEQ ID NO: 1829125 - RNA, 19 nt, Artificial Sequence
  Description of Artificial Sequence: Synthetic oligonucleotide
agcuuucuacgauuugaug

SEQ ID NO: 1829126 - RNA, 19 nt, Artificial Sequence
  Description of Artificial Sequence: Synthetic oligonucleotide
acauuuugacucauucgag

SEQ ID NO: 1829127 - RNA, 19 nt, Artificial Sequence
  Description of Artificial Sequence: Synthetic oligonucleotide
aaacucagcauugguugcu

SEQ ID NO: 1829128 - RNA, 19 nt, Artificial Sequence
  Description of Artificial Sequence: Synthetic oligonucleotide
augcuuacuuguguuggac

SEQ ID NO: 1829129 - RNA, 19 nt, Artificial Sequence
  Description of Artificial Sequence: Synthetic oligonucleotide
cuuguguuggacauguugu

SEQ ID NO: 1829130 - RNA, 19 nt, Artificial Sequence
  Description of Artificial Sequence: Synthetic oligonucleotide
auacucuuauguauggcca

SEQ ID NO: 1829131 - RNA, 19 nt, Artificial Sequence
  Description of Artificial Sequence: Synthetic oligonucleotide
agauguuucuccacugcag

SEQ ID NO: 1829132 - RNA, 19 nt, Artificial Sequence
  Description of Artificial Sequence: Synthetic oligonucleotide
guagguuugccauccaaaa

SEQ ID NO: 1829133 - RNA, 19 nt, Artificial Sequence
  Description of Artificial Sequence: Synthetic oligonucleotide
auccacgcuucuuaggagu

SEQ ID NO: 1829134 - RNA, 19 nt, Artificial Sequence
  Description of Artificial Sequence: Synthetic oligonucleotide
aguaucgaagacugugaaa

SEQ ID NO: 1829135 - RNA, 19 nt, Artificial Sequence
  Description of Artificial Sequence: Synthetic oligonucleotide
uggcuuggguuuaugaguu

SEQ ID NO: 1829136 - RNA, 19 nt, Artificial Sequence
  Description of Artificial Sequence: Synthetic oligonucleotide
ucucaagauguuucuccac

SEQ ID NO: 1829137 - RNA, 19 nt, Artificial Sequence
  Description of Artificial Sequence: Synthetic oligonucleotide
acguucaaauccaacauaa

SEQ ID NO: 1829138 - RNA, 19 nt, Artificial Sequence
  Description of Artificial Sequence: Synthetic oligonucleotide
ugccauccaaaagugcugc

SEQ ID NO: 1829139 - RNA, 19 nt, Artificial Sequence
  Description of Artificial Sequence: Synthetic oligonucleotide
ggaaccaauaauauuaaua

SEQ ID NO: 1829140 - RNA, 19 nt, Artificial Sequence
  Description of Artificial Sequence: Synthetic oligonucleotide
aaaguaauccacgcuucuu

SEQ ID NO: 1829141 - RNA, 19 nt, Artificial Sequence
  Description of Artificial Sequence: Synthetic oligonucleotide
aguguggaagauccucuga

SEQ ID NO: 1829142 - RNA, 19 nt, Artificial Sequence
  Description of Artificial Sequence: Synthetic oligonucleotide
accauccaugcuuacuugu

SEQ ID NO: 1829143 - RNA, 19 nt, Artificial Sequence
  Description of Artificial Sequence: Synthetic oligonucleotide
uguaaauaaguggguacuu

SEQ ID NO: 1829144 - RNA, 19 nt, Artificial Sequence
  Description of Artificial Sequence: Synthetic oligonucleotide
auaaccauccaugcuuacu

SEQ ID NO: 1829145 - RNA, 19 nt, Artificial Sequence
  Description of Artificial Sequence: Synthetic oligonucleotide
ggguacuugaagaauuucc

SEQ ID NO: 1829146 - RNA, 19 nt, Artificial Sequence
  Description of Artificial Sequence: Synthetic oligonucleotide
ggcaacucucucuaaauga

SEQ ID NO: 1829147 - RNA, 19 nt, Artificial Sequence
  Description of Artificial Sequence: Synthetic oligonucleotide
gagaaaaguaauccacgcu

SEQ ID NO: 1829148 - RNA, 19 nt, Artificial Sequence
  Description of Artificial Sequence: Synthetic oligonucleotide
gaaacugucucaguuuucu

SEQ ID NO: 1829149 - RNA, 19 nt, Artificial Sequence
  Description of Artificial Sequence: Synthetic oligonucleotide
auggcaacucucucuaaau

SEQ ID NO: 1829150 - RNA, 19 nt, Artificial Sequence
  Description of Artificial Sequence: Synthetic oligonucleotide
cuucacucucagugguugg

SEQ ID NO: 1829151 - RNA, 19 nt, Artificial Sequence
  Description of Artificial Sequence: Synthetic oligonucleotide
guguuggacauguuguaga

SEQ ID NO: 1829152 - RNA, 19 nt, Artificial Sequence
  Description of Artificial Sequence: Synthetic oligonucleotide
cauaaguuggauuauuguu

SEQ ID NO: 1829153 - RNA, 19 nt, Artificial Sequence
  Description of Artificial Sequence: Synthetic oligonucleotide
aauuugcuaggcauuucau

SEQ ID NO: 1829154 - RNA, 19 nt, Artificial Sequence
  Description of Artificial Sequence: Synthetic oligonucleotide
cucucuguugucagcugag

SEQ ID NO: 1829155 - RNA, 19 nt, Artificial Sequence
  Description of Artificial Sequence: Synthetic oligonucleotide
ucucaugacuuauguuuuc

SEQ ID NO: 1829156 - RNA, 19 nt, Artificial Sequence
  Description of Artificial Sequence: Synthetic oligonucleotide
ugaaacugucucaguuuuc

SEQ ID NO: 1829157 - RNA, 19 nt, Artificial Sequence
  Description of Artificial Sequence: Synthetic oligonucleotide
caucacguucaaauccaac

SEQ ID NO: 1829158 - RNA, 19 nt, Artificial Sequence
  Description of Artificial Sequence: Synthetic oligonucleotide
guuuuacgagauaaauuuc

SEQ ID NO: 1829159 - RNA, 19 nt, Artificial Sequence
  Description of Artificial Sequence: Synthetic oligonucleotide
uauaaccauccaugcuuac

SEQ ID NO: 1829160 - RNA, 19 nt, Artificial Sequence
  Description of Artificial Sequence: Synthetic oligonucleotide
agcgagaagcucaucaaga

SEQ ID NO: 1829161 - RNA, 19 nt, Artificial Sequence
  Description of Artificial Sequence: Synthetic oligonucleotide
uauggagcagguagaucau

SEQ ID NO: 1829162 - RNA, 19 nt, Artificial Sequence
  Description of Artificial Sequence: Synthetic oligonucleotide
aagcuuucuacgauuugau

SEQ ID NO: 1829163 - RNA, 19 nt, Artificial Sequence
  Description of Artificial Sequence: Synthetic oligonucleotide
auacccaguguggaagauc

SEQ ID NO: 1829164 - RNA, 19 nt, Artificial Sequence
  Description of Artificial Sequence: Synthetic oligonucleotide
aauugcaacuugagaaguu

SEQ ID NO: 1829165 - RNA, 19 nt, Artificial Sequence
  Description of Artificial Sequence: Synthetic oligonucleotide
uugggcauaucaacauuuu

SEQ ID NO: 1829166 - RNA, 19 nt, Artificial Sequence
  Description of Artificial Sequence: Synthetic oligonucleotide
gguauuccuucugaaacug

SEQ ID NO: 1829167 - RNA, 19 nt, Artificial Sequence
  Description of Artificial Sequence: Synthetic oligonucleotide
aggaauuacuuggcuuggg

SEQ ID NO: 1829168 - RNA, 19 nt, Artificial Sequence
  Description of Artificial Sequence: Synthetic oligonucleotide
uuaggaguuuuacgagaua

SEQ ID NO: 1829169 - RNA, 19 nt, Artificial Sequence
  Description of Artificial Sequence: Synthetic oligonucleotide
ugcuugauuguagguuugc

SEQ ID NO: 1829170 - RNA, 19 nt, Artificial Sequence
  Description of Artificial Sequence: Synthetic oligonucleotide
caugacuuauguuuucugu

SEQ ID NO: 1829171 - RNA, 19 nt, Artificial Sequence
  Description of Artificial Sequence: Synthetic oligonucleotide
cuucuauggagcagguaga

SEQ ID NO: 1829172 - RNA, 19 nt, Artificial Sequence
  Description of Artificial Sequence: Synthetic oligonucleotide
cuuauguauggccacauuu

SEQ ID NO: 1829173 - RNA, 19 nt, Artificial Sequence
  Description of Artificial Sequence: Synthetic oligonucleotide
auauuaagggguauuccuu

SEQ ID NO: 1829174 - RNA, 19 nt, Artificial Sequence
  Description of Artificial Sequence: Synthetic oligonucleotide
caucaagauccacuucuuc

SEQ ID NO: 1829175 - RNA, 19 nt, Artificial Sequence
  Description of Artificial Sequence: Synthetic oligonucleotide
aaucugcaauuguucugaa

SEQ ID NO: 1829176 - RNA, 19 nt, Artificial Sequence
  Description of Artificial Sequence: Synthetic oligonucleotide
auaauauauugaggaauua

SEQ ID NO: 1829177 - RNA, 19 nt, Artificial Sequence
  Description of Artificial Sequence: Synthetic oligonucleotide
uuuggccaauuugcuaggc

SEQ ID NO: 1829178 - RNA, 19 nt, Artificial Sequence
  Description of Artificial Sequence: Synthetic oligonucleotide
ucuuauguauggccacauu

SEQ ID NO: 1829179 - RNA, 19 nt, Artificial Sequence
  Description of Artificial Sequence: Synthetic oligonucleotide
acaaugcucuccaaaaguu

SEQ ID NO: 1829180 - RNA, 19 nt, Artificial Sequence
  Description of Artificial Sequence: Synthetic oligonucleotide
aguggguacuugaagaauu

SEQ ID NO: 1829181 - RNA, 19 nt, Artificial Sequence
  Description of Artificial Sequence: Synthetic oligonucleotide
uccugaugaugauccauua

SEQ ID NO: 1829182 - RNA, 19 nt, Artificial Sequence
  Description of Artificial Sequence: Synthetic oligonucleotide
aucgaagacugugaaacuu

SEQ ID NO: 1829183 - RNA, 19 nt, Artificial Sequence
  Description of Artificial Sequence: Synthetic oligonucleotide
gauuugucuuguaguauaa

SEQ ID NO: 1829184 - RNA, 19 nt, Artificial Sequence
  Description of Artificial Sequence: Synthetic oligonucleotide
gugguuggaaaucuuuucu

SEQ ID NO: 1829185 - RNA, 19 nt, Artificial Sequence
  Description of Artificial Sequence: Synthetic oligonucleotide
auccaugcuuacuuguguu

SEQ ID NO: 1829186 - RNA, 19 nt, Artificial Sequence
  Description of Artificial Sequence: Synthetic oligonucleotide
gguagaucauaauaauaua

SEQ ID NO: 1829187 - RNA, 19 nt, Artificial Sequence
  Description of Artificial Sequence: Synthetic oligonucleotide
ggauuauuguugucauuac

SEQ ID NO: 1829188 - RNA, 19 nt, Artificial Sequence
  Description of Artificial Sequence: Synthetic oligonucleotide
uugacucauucgagaaauc

SEQ ID NO: 1829189 - RNA, 19 nt, Artificial Sequence
  Description of Artificial Sequence: Synthetic oligonucleotide
cuuguaguauaaccaucca

SEQ ID NO: 1829190 - RNA, 19 nt, Artificial Sequence
  Description of Artificial Sequence: Synthetic oligonucleotide
gaauuacuuggcuuggguu

SEQ ID NO: 1829191 - RNA, 19 nt, Artificial Sequence
  Description of Artificial Sequence: Synthetic oligonucleotide
uucuauggagcagguagau

SEQ ID NO: 1829192 - RNA, 19 nt, Artificial Sequence
  Description of Artificial Sequence: Synthetic oligonucleotide
caguguggaagauccucug

SEQ ID NO: 1829193 - RNA, 19 nt, Artificial Sequence
  Description of Artificial Sequence: Synthetic oligonucleotide
guuggauuauuguugucau

SEQ ID NO: 1829194 - RNA, 19 nt, Artificial Sequence
  Description of Artificial Sequence: Synthetic oligonucleotide
aaaauacucugugcuuguu

SEQ ID NO: 1829195 - RNA, 19 nt, Artificial Sequence
  Description of Artificial Sequence: Synthetic oligonucleotide
cgagaaaucaugcacauua

SEQ ID NO: 1829196 - RNA, 19 nt, Artificial Sequence
  Description of Artificial Sequence: Synthetic oligonucleotide
gguucagggagaucuagaa

SEQ ID NO: 1829197 - RNA, 19 nt, Artificial Sequence
  Description of Artificial Sequence: Synthetic oligonucleotide
ucuauggagcagguagauc

SEQ ID NO: 1829198 - RNA, 19 nt, Artificial Sequence
  Description of Artificial Sequence: Synthetic oligonucleotide
acucuuauguauggccaca

SEQ ID NO: 1829199 - RNA, 19 nt, Artificial Sequence
  Description of Artificial Sequence: Synthetic oligonucleotide
auguuguagauaauauauu

SEQ ID NO: 1829200 - RNA, 19 nt, Artificial Sequence
  Description of Artificial Sequence: Synthetic oligonucleotide
auuacuuggcuuggguuua

SEQ ID NO: 1829201 - RNA, 19 nt, Artificial Sequence
  Description of Artificial Sequence: Synthetic oligonucleotide
guucagggagaucuagaaa

SEQ ID NO: 1829202 - RNA, 19 nt, Artificial Sequence
  Description of Artificial Sequence: Synthetic oligonucleotide
auguauggccacauuuacu

SEQ ID NO: 1829203 - RNA, 19 nt, Artificial Sequence
  Description of Artificial Sequence: Synthetic oligonucleotide
uggguacuugaagaauuuc

SEQ ID NO: 1829204 - RNA, 19 nt, Artificial Sequence
  Description of Artificial Sequence: Synthetic oligonucleotide
uccacgcuucuuaggaguu

SEQ ID NO: 1829205 - RNA, 19 nt, Artificial Sequence
  Description of Artificial Sequence: Synthetic oligonucleotide
gaguuuuacgagauaaauu

SEQ ID NO: 1829206 - RNA, 19 nt, Artificial Sequence
  Description of Artificial Sequence: Synthetic oligonucleotide
gucuguaaauaagugggua

SEQ ID NO: 1829207 - RNA, 19 nt, Artificial Sequence
  Description of Artificial Sequence: Synthetic oligonucleotide
caugcuuacuuguguugga

SEQ ID NO: 1829208 - RNA, 19 nt, Artificial Sequence
  Description of Artificial Sequence: Synthetic oligonucleotide
uucuaacaaugcucuccaa

SEQ ID NO: 1829209 - RNA, 19 nt, Artificial Sequence
  Description of Artificial Sequence: Synthetic oligonucleotide
guggaagauccucugauuu

SEQ ID NO: 1829210 - RNA, 19 nt, Artificial Sequence
  Description of Artificial Sequence: Synthetic oligonucleotide
gacuuauguuuucuguaau

SEQ ID NO: 1829211 - RNA, 19 nt, Artificial Sequence
  Description of Artificial Sequence: Synthetic oligonucleotide
cugaauacaucacguucaa

SEQ ID NO: 1829212 - RNA, 19 nt, Artificial Sequence
  Description of Artificial Sequence: Synthetic oligonucleotide
caucaaugaucuuguaccu

SEQ ID NO: 1829213 - RNA, 19 nt, Artificial Sequence
  Description of Artificial Sequence: Synthetic oligonucleotide
guucuuacaauugcaacuu

SEQ ID NO: 1829214 - RNA, 19 nt, Artificial Sequence
  Description of Artificial Sequence: Synthetic oligonucleotide
ucaugaaguuugggcauau

SEQ ID NO: 1829215 - RNA, 19 nt, Artificial Sequence
  Description of Artificial Sequence: Synthetic oligonucleotide
guauaaccauccaugcuua

SEQ ID NO: 1829216 - RNA, 19 nt, Artificial Sequence
  Description of Artificial Sequence: Synthetic oligonucleotide
aucaaugaucuuguaccua

SEQ ID NO: 1829217 - RNA, 19 nt, Artificial Sequence
  Description of Artificial Sequence: Synthetic oligonucleotide
cugugaaacuuugcauuuc

SEQ ID NO: 1829218 - RNA, 19 nt, Artificial Sequence
  Description of Artificial Sequence: Synthetic oligonucleotide
caguaucgaagacugugaa

SEQ ID NO: 1829219 - RNA, 19 nt, Artificial Sequence
  Description of Artificial Sequence: Synthetic oligonucleotide
gaagauccucugauuuguc

SEQ ID NO: 1829220 - RNA, 19 nt, Artificial Sequence
  Description of Artificial Sequence: Synthetic oligonucleotide
uuccuggcuuuaucucucu

SEQ ID NO: 1829221 - RNA, 19 nt, Artificial Sequence
  Description of Artificial Sequence: Synthetic oligonucleotide
aggcauuucauagcagaua

SEQ ID NO: 1829222 - RNA, 19 nt, Artificial Sequence
  Description of Artificial Sequence: Synthetic oligonucleotide
aggaguuuuacgagauaaa

SEQ ID NO: 1829223 - RNA, 19 nt, Artificial Sequence
  Description of Artificial Sequence: Synthetic oligonucleotide
ugauggcaacucucucuaa

SEQ ID NO: 1829224 - RNA, 19 nt, Artificial Sequence
  Description of Artificial Sequence: Synthetic oligonucleotide
agaagcucaucaagaucca

SEQ ID NO: 1829225 - RNA, 19 nt, Artificial Sequence
  Description of Artificial Sequence: Synthetic oligonucleotide
ccauccaugcuuacuugug

SEQ ID NO: 1829226 - RNA, 19 nt, Artificial Sequence
  Description of Artificial Sequence: Synthetic oligonucleotide
gagcauugauggcaacucu

SEQ ID NO: 1829227 - RNA, 19 nt, Artificial Sequence
  Description of Artificial Sequence: Synthetic oligonucleotide
ccuuuuaagggaaccaaua

SEQ ID NO: 1829228 - RNA, 19 nt, Artificial Sequence
  Description of Artificial Sequence: Synthetic oligonucleotide
ggaauuacuuggcuugggu

SEQ ID NO: 1829229 - RNA, 19 nt, Artificial Sequence
  Description of Artificial Sequence: Synthetic oligonucleotide
guagagcauugauggcaac

SEQ ID NO: 1829230 - RNA, 19 nt, Artificial Sequence
  Description of Artificial Sequence: Synthetic oligonucleotide
ggaguuuuacgagauaaau

SEQ ID NO: 1829231 - RNA, 19 nt, Artificial Sequence
  Description of Artificial Sequence: Synthetic oligonucleotide
cccaaaauguucacaaaua

SEQ ID NO: 1829232 - RNA, 19 nt, Artificial Sequence
  Description of Artificial Sequence: Synthetic oligonucleotide
agguucagggagaucuaga

SEQ ID NO: 1829233 - RNA, 19 nt, Artificial Sequence
  Description of Artificial Sequence: Synthetic oligonucleotide
uacuuggcuuggguuuaug

SEQ ID NO: 1829234 - RNA, 19 nt, Artificial Sequence
  Description of Artificial Sequence: Synthetic oligonucleotide
cauugguugcuugauugua

SEQ ID NO: 1829235 - RNA, 19 nt, Artificial Sequence
  Description of Artificial Sequence: Synthetic oligonucleotide
ggaagauccucugauuugu

SEQ ID NO: 1829236 - RNA, 19 nt, Artificial Sequence
  Description of Artificial Sequence: Synthetic oligonucleotide
cucucaugacuuauguuuu

SEQ ID NO: 1829237 - RNA, 19 nt, Artificial Sequence
  Description of Artificial Sequence: Synthetic oligonucleotide
auauaucuccaaacuucuu

SEQ ID NO: 1829238 - RNA, 19 nt, Artificial Sequence
  Description of Artificial Sequence: Synthetic oligonucleotide
gcuuacuuguguuggacau

SEQ ID NO: 1829239 - RNA, 19 nt, Artificial Sequence
  Description of Artificial Sequence: Synthetic oligonucleotide
ucgagaaaucaugcacauu

SEQ ID NO: 1829240 - RNA, 19 nt, Artificial Sequence
  Description of Artificial Sequence: Synthetic oligonucleotide
gcauaucaacauuuugacu

SEQ ID NO: 1829241 - RNA, 19 nt, Artificial Sequence
  Description of Artificial Sequence: Synthetic oligonucleotide
acaacacaacacacaccga

SEQ ID NO: 1829242 - RNA, 19 nt, Artificial Sequence
  Description of Artificial Sequence: Synthetic oligonucleotide
cacucucagugguuggaaa

SEQ ID NO: 1829243 - RNA, 19 nt, Artificial Sequence
  Description of Artificial Sequence: Synthetic oligonucleotide
cucucuaaaugagguugca

SEQ ID NO: 1829244 - RNA, 19 nt, Artificial Sequence
  Description of Artificial Sequence: Synthetic oligonucleotide
gcuuuaucucucuguuguc

SEQ ID NO: 1829245 - RNA, 19 nt, Artificial Sequence
  Description of Artificial Sequence: Synthetic oligonucleotide
cuuguaccuauuucuucau

SEQ ID NO: 1829246 - RNA, 19 nt, Artificial Sequence
  Description of Artificial Sequence: Synthetic oligonucleotide
acaucacguucaaauccaa

SEQ ID NO: 1829247 - RNA, 19 nt, Artificial Sequence
  Description of Artificial Sequence: Synthetic oligonucleotide
uuacuuggcuuggguuuau

SEQ ID NO: 1829248 - RNA, 19 nt, Artificial Sequence
  Description of Artificial Sequence: Synthetic oligonucleotide
agucaguaucgaagacugu

SEQ ID NO: 1829249 - RNA, 19 nt, Artificial Sequence
  Description of Artificial Sequence: Synthetic oligonucleotide
uugaagcgagaagcucauc

SEQ ID NO: 1829250 - RNA, 19 nt, Artificial Sequence
  Description of Artificial Sequence: Synthetic oligonucleotide
gguugcuugauuguagguu

SEQ ID NO: 1829251 - RNA, 19 nt, Artificial Sequence
  Description of Artificial Sequence: Synthetic oligonucleotide
cugauuugucuuguaguau

SEQ ID NO: 1829252 - RNA, 19 nt, Artificial Sequence
  Description of Artificial Sequence: Synthetic oligonucleotide
cucuguugucagcugaguu

SEQ ID NO: 1829253 - RNA, 19 nt, Artificial Sequence
  Description of Artificial Sequence: Synthetic oligonucleotide
acguaucaucaaugaucuu

SEQ ID NO: 1829254 - RNA, 19 nt, Artificial Sequence
  Description of Artificial Sequence: Synthetic oligonucleotide
agacaagcuuuuacuucua

SEQ ID NO: 1829255 - RNA, 19 nt, Artificial Sequence
  Description of Artificial Sequence: Synthetic oligonucleotide
gcuuggguuuaugaguucu

SEQ ID NO: 1829256 - RNA, 19 nt, Artificial Sequence
  Description of Artificial Sequence: Synthetic oligonucleotide
cuuggguuuaugaguucuu

SEQ ID NO: 1829257 - RNA, 19 nt, Artificial Sequence
  Description of Artificial Sequence: Synthetic oligonucleotide
cgcuucuuaggaguuuuac

SEQ ID NO: 1829258 - RNA, 19 nt, Artificial Sequence
  Description of Artificial Sequence: Synthetic oligonucleotide
guucuucuauggagcaggu

SEQ ID NO: 1829259 - RNA, 19 nt, Artificial Sequence
  Description of Artificial Sequence: Synthetic oligonucleotide
gggaaccaauaauauuaau

SEQ ID NO: 1829260 - RNA, 19 nt, Artificial Sequence
  Description of Artificial Sequence: Synthetic oligonucleotide
gcagcaaacccaaaauguu

SEQ ID NO: 1829261 - RNA, 19 nt, Artificial Sequence
  Description of Artificial Sequence: Synthetic oligonucleotide
guggguacuugaagaauuu

SEQ ID NO: 1829262 - RNA, 19 nt, Artificial Sequence
  Description of Artificial Sequence: Synthetic oligonucleotide
cuucaacaucuuccuggcu

SEQ ID NO: 1829263 - RNA, 19 nt, Artificial Sequence
  Description of Artificial Sequence: Synthetic oligonucleotide
cucuuauguauggccacau

SEQ ID NO: 1829264 - RNA, 19 nt, Artificial Sequence
  Description of Artificial Sequence: Synthetic oligonucleotide
gggaaguaacaaacaacau

SEQ ID NO: 1829265 - RNA, 19 nt, Artificial Sequence
  Description of Artificial Sequence: Synthetic oligonucleotide
cucagugguuggaaaucuu

SEQ ID NO: 1829266 - RNA, 19 nt, Artificial Sequence
  Description of Artificial Sequence: Synthetic oligonucleotide
cacgcuucuuaggaguuuu

SEQ ID NO: 1829267 - RNA, 19 nt, Artificial Sequence
  Description of Artificial Sequence: Synthetic oligonucleotide
gccaauuugcuaggcauuu

SEQ ID NO: 1829268 - RNA, 19 nt, Artificial Sequence
  Description of Artificial Sequence: Synthetic oligonucleotide
cgagauaaauuucguaauu

SEQ ID NO: 1829269 - RNA, 19 nt, Artificial Sequence
  Description of Artificial Sequence: Synthetic oligonucleotide
acgcuucuuaggaguuuua

SEQ ID NO: 1829270 - RNA, 19 nt, Artificial Sequence
  Description of Artificial Sequence: Synthetic oligonucleotide
ccaacauaaguuggauuau

SEQ ID NO: 1829271 - RNA, 19 nt, Artificial Sequence
  Description of Artificial Sequence: Synthetic oligonucleotide
ggccaauuugcuaggcauu

SEQ ID NO: 1829272 - RNA, 19 nt, Artificial Sequence
  Description of Artificial Sequence: Synthetic oligonucleotide
aaaacaucggaauucagcc

SEQ ID NO: 1829273 - RNA, 19 nt, Artificial Sequence
  Description of Artificial Sequence: Synthetic oligonucleotide
auuaaagucaaucagccac

SEQ ID NO: 1829274 - RNA, 19 nt, Artificial Sequence
  Description of Artificial Sequence: Synthetic oligonucleotide
uuuagaaauaugaucauag

SEQ ID NO: 1829275 - RNA, 19 nt, Artificial Sequence
  Description of Artificial Sequence: Synthetic oligonucleotide
uuaagaaaaucuaugagcu

SEQ ID NO: 1829276 - RNA, 19 nt, Artificial Sequence
  Description of Artificial Sequence: Synthetic oligonucleotide
aacaucggaauucagcccc

SEQ ID NO: 1829277 - RNA, 19 nt, Artificial Sequence
  Description of Artificial Sequence: Synthetic oligonucleotide
uuaauucacaccauuuucg

SEQ ID NO: 1829278 - RNA, 19 nt, Artificial Sequence
  Description of Artificial Sequence: Synthetic oligonucleotide
aagucuugaaugcaucugc

SEQ ID NO: 1829279 - RNA, 19 nt, Artificial Sequence
  Description of Artificial Sequence: Synthetic oligonucleotide
aauggauuaaagucaauca

SEQ ID NO: 1829280 - RNA, 19 nt, Artificial Sequence
  Description of Artificial Sequence: Synthetic oligonucleotide
uuuucggaggacaagcucg

SEQ ID NO: 1829281 - RNA, 19 nt, Artificial Sequence
  Description of Artificial Sequence: Synthetic oligonucleotide
agaaauaccaauaagcuug

SEQ ID NO: 1829282 - RNA, 19 nt, Artificial Sequence
  Description of Artificial Sequence: Synthetic oligonucleotide
aauccugccccugagaagc

SEQ ID NO: 1829283 - RNA, 19 nt, Artificial Sequence
  Description of Artificial Sequence: Synthetic oligonucleotide
auauaucgaacacaaaguc

SEQ ID NO: 1829284 - RNA, 19 nt, Artificial Sequence
  Description of Artificial Sequence: Synthetic oligonucleotide
acuccaauuaagcuuaggg

SEQ ID NO: 1829285 - RNA, 19 nt, Artificial Sequence
  Description of Artificial Sequence: Synthetic oligonucleotide
uggauuaaagucaaucagc

SEQ ID NO: 1829286 - RNA, 19 nt, Artificial Sequence
  Description of Artificial Sequence: Synthetic oligonucleotide
uuagguuguucucagaugu

SEQ ID NO: 1829287 - RNA, 19 nt, Artificial Sequence
  Description of Artificial Sequence: Synthetic oligonucleotide
aagaacuuauacuggaugu

SEQ ID NO: 1829288 - RNA, 19 nt, Artificial Sequence
  Description of Artificial Sequence: Synthetic oligonucleotide
aaacaucggaauucagccc

SEQ ID NO: 1829289 - RNA, 19 nt, Artificial Sequence
  Description of Artificial Sequence: Synthetic oligonucleotide
ucaucuaagaacuuauacu

SEQ ID NO: 1829290 - RNA, 19 nt, Artificial Sequence
  Description of Artificial Sequence: Synthetic oligonucleotide
auucacaccauuuucggag

SEQ ID NO: 1829291 - RNA, 19 nt, Artificial Sequence
  Description of Artificial Sequence: Synthetic oligonucleotide
gaugguaaggcuucggaag

SEQ ID NO: 1829292 - RNA, 19 nt, Artificial Sequence
  Description of Artificial Sequence: Synthetic oligonucleotide
uccaauuaagcuuagggaa

SEQ ID NO: 1829293 - RNA, 19 nt, Artificial Sequence
  Description of Artificial Sequence: Synthetic oligonucleotide
auggauuaaagucaaucag

SEQ ID NO: 1829294 - RNA, 19 nt, Artificial Sequence
  Description of Artificial Sequence: Synthetic oligonucleotide
caaaacaucggaauucagc

SEQ ID NO: 1829295 - RNA, 19 nt, Artificial Sequence
  Description of Artificial Sequence: Synthetic oligonucleotide
uuagggaagacacuacccc

SEQ ID NO: 1829296 - RNA, 19 nt, Artificial Sequence
  Description of Artificial Sequence: Synthetic oligonucleotide
aauaccaauaagcuuguuu

SEQ ID NO: 1829297 - RNA, 19 nt, Artificial Sequence
  Description of Artificial Sequence: Synthetic oligonucleotide
uauaucgaacacaaagucu

SEQ ID NO: 1829298 - RNA, 19 nt, Artificial Sequence
  Description of Artificial Sequence: Synthetic oligonucleotide
agaaauaugaucauaguau

SEQ ID NO: 1829299 - RNA, 19 nt, Artificial Sequence
  Description of Artificial Sequence: Synthetic oligonucleotide
auaguauugcguguagucc

SEQ ID NO: 1829300 - RNA, 19 nt, Artificial Sequence
  Description of Artificial Sequence: Synthetic oligonucleotide
gaacuauucauugcuaucc

SEQ ID NO: 1829301 - RNA, 19 nt, Artificial Sequence
  Description of Artificial Sequence: Synthetic oligonucleotide
gaugaaaucagaacucuug

SEQ ID NO: 1829302 - RNA, 19 nt, Artificial Sequence
  Description of Artificial Sequence: Synthetic oligonucleotide
cuugugaacgucuuccccg

SEQ ID NO: 1829303 - RNA, 19 nt, Artificial Sequence
  Description of Artificial Sequence: Synthetic oligonucleotide
agcuggagaauccugcccc

SEQ ID NO: 1829304 - RNA, 19 nt, Artificial Sequence
  Description of Artificial Sequence: Synthetic oligonucleotide
uuaaagucaaucagccaca

SEQ ID NO: 1829305 - RNA, 19 nt, Artificial Sequence
  Description of Artificial Sequence: Synthetic oligonucleotide
cagucgguagcucagauag

SEQ ID NO: 1829306 - RNA, 19 nt, Artificial Sequence
  Description of Artificial Sequence: Synthetic oligonucleotide
uucuauagaaggaucugga

SEQ ID NO: 1829307 - RNA, 19 nt, Artificial Sequence
  Description of Artificial Sequence: Synthetic oligonucleotide
gaaaucagaacucuugaaa

SEQ ID NO: 1829308 - RNA, 19 nt, Artificial Sequence
  Description of Artificial Sequence: Synthetic oligonucleotide
uaguauugcguguaguccc

SEQ ID NO: 1829309 - RNA, 19 nt, Artificial Sequence
  Description of Artificial Sequence: Synthetic oligonucleotide
cuuccugaaaccaccagag

SEQ ID NO: 1829310 - RNA, 19 nt, Artificial Sequence
  Description of Artificial Sequence: Synthetic oligonucleotide
uacaauggaugaauggcug

SEQ ID NO: 1829311 - RNA, 19 nt, Artificial Sequence
  Description of Artificial Sequence: Synthetic oligonucleotide
caggaauuaauucacacca

SEQ ID NO: 1829312 - RNA, 19 nt, Artificial Sequence
  Description of Artificial Sequence: Synthetic oligonucleotide
uccuugacaaaacaucgga

SEQ ID NO: 1829313 - RNA, 19 nt, Artificial Sequence
  Description of Artificial Sequence: Synthetic oligonucleotide
ugaacgucuuccccggugg

SEQ ID NO: 1829314 - RNA, 19 nt, Artificial Sequence
  Description of Artificial Sequence: Synthetic oligonucleotide
ucggaauucagccccagga

SEQ ID NO: 1829315 - RNA, 19 nt, Artificial Sequence
  Description of Artificial Sequence: Synthetic oligonucleotide
ugugaagucacgagugaug

SEQ ID NO: 1829316 - RNA, 19 nt, Artificial Sequence
  Description of Artificial Sequence: Synthetic oligonucleotide
cuuagggaagacacuaccc

SEQ ID NO: 1829317 - RNA, 19 nt, Artificial Sequence
  Description of Artificial Sequence: Synthetic oligonucleotide
uuccuugacaaaacaucgg

SEQ ID NO: 1829318 - RNA, 19 nt, Artificial Sequence
  Description of Artificial Sequence: Synthetic oligonucleotide
accgaagucaccucuuagg

SEQ ID NO: 1829319 - RNA, 19 nt, Artificial Sequence
  Description of Artificial Sequence: Synthetic oligonucleotide
cuuauacuggauguguucc

SEQ ID NO: 1829320 - RNA, 19 nt, Artificial Sequence
  Description of Artificial Sequence: Synthetic oligonucleotide
cauaguauugcguguaguc

SEQ ID NO: 1829321 - RNA, 19 nt, Artificial Sequence
  Description of Artificial Sequence: Synthetic oligonucleotide
ucuggugccguaagugugg

SEQ ID NO: 1829322 - RNA, 19 nt, Artificial Sequence
  Description of Artificial Sequence: Synthetic oligonucleotide
ucuguauauaucgaacaca

SEQ ID NO: 1829323 - RNA, 19 nt, Artificial Sequence
  Description of Artificial Sequence: Synthetic oligonucleotide
agaacucuugaaaagcagg

SEQ ID NO: 1829324 - RNA, 19 nt, Artificial Sequence
  Description of Artificial Sequence: Synthetic oligonucleotide
ucaguacaauggaugaaug

SEQ ID NO: 1829325 - RNA, 19 nt, Artificial Sequence
  Description of Artificial Sequence: Synthetic oligonucleotide
aauuaagcuuagggaagac

SEQ ID NO: 1829326 - RNA, 19 nt, Artificial Sequence
  Description of Artificial Sequence: Synthetic oligonucleotide
aacuauucauugcuaucca

SEQ ID NO: 1829327 - RNA, 19 nt, Artificial Sequence
  Description of Artificial Sequence: Synthetic oligonucleotide
ucacauucugaggaagugg

SEQ ID NO: 1829328 - RNA, 19 nt, Artificial Sequence
  Description of Artificial Sequence: Synthetic oligonucleotide
uugcuauccaguaugcauc

SEQ ID NO: 1829329 - RNA, 19 nt, Artificial Sequence
  Description of Artificial Sequence: Synthetic oligonucleotide
uugaugguaaggcuucgga

SEQ ID NO: 1829330 - RNA, 19 nt, Artificial Sequence
  Description of Artificial Sequence: Synthetic oligonucleotide
cuaccugccgcgucaaucg

SEQ ID NO: 1829331 - RNA, 19 nt, Artificial Sequence
  Description of Artificial Sequence: Synthetic oligonucleotide
acuauucauugcuauccag

SEQ ID NO: 1829332 - RNA, 19 nt, Artificial Sequence
  Description of Artificial Sequence: Synthetic oligonucleotide
cagcuuaagaaaaucuaug

SEQ ID NO: 1829333 - RNA, 19 nt, Artificial Sequence
  Description of Artificial Sequence: Synthetic oligonucleotide
aucggaaagcuggagaauc

SEQ ID NO: 1829334 - RNA, 19 nt, Artificial Sequence
  Description of Artificial Sequence: Synthetic oligonucleotide
ugacaaaacaucggaauuc

SEQ ID NO: 1829335 - RNA, 19 nt, Artificial Sequence
  Description of Artificial Sequence: Synthetic oligonucleotide
gaucuucccuuccugaaac

SEQ ID NO: 1829336 - RNA, 19 nt, Artificial Sequence
  Description of Artificial Sequence: Synthetic oligonucleotide
ugcaucggaaagcuggaga

SEQ ID NO: 1829337 - RNA, 19 nt, Artificial Sequence
  Description of Artificial Sequence: Synthetic oligonucleotide
cuguauauaucgaacacaa

SEQ ID NO: 1829338 - RNA, 19 nt, Artificial Sequence
  Description of Artificial Sequence: Synthetic oligonucleotide
ucauugcuauccaguaugc

SEQ ID NO: 1829339 - RNA, 19 nt, Artificial Sequence
  Description of Artificial Sequence: Synthetic oligonucleotide
uguagucccgcugagaaau

SEQ ID NO: 1829340 - RNA, 19 nt, Artificial Sequence
  Description of Artificial Sequence: Synthetic oligonucleotide
ggauuaaagucaaucagcc

SEQ ID NO: 1829341 - RNA, 19 nt, Artificial Sequence
  Description of Artificial Sequence: Synthetic oligonucleotide
agucccaucguccaguaaa

SEQ ID NO: 1829342 - RNA, 19 nt, Artificial Sequence
  Description of Artificial Sequence: Synthetic oligonucleotide
uggggcacuccaauuaagc

SEQ ID NO: 1829343 - RNA, 19 nt, Artificial Sequence
  Description of Artificial Sequence: Synthetic oligonucleotide
auaagcuuguuuuccuuga

SEQ ID NO: 1829344 - RNA, 19 nt, Artificial Sequence
  Description of Artificial Sequence: Synthetic oligonucleotide
aacucuggugccguaagug

SEQ ID NO: 1829345 - RNA, 19 nt, Artificial Sequence
  Description of Artificial Sequence: Synthetic oligonucleotide
auaucgaacacaaagucuu

SEQ ID NO: 1829346 - RNA, 19 nt, Artificial Sequence
  Description of Artificial Sequence: Synthetic oligonucleotide
guaacaugcuccuucuuca

SEQ ID NO: 1829347 - RNA, 19 nt, Artificial Sequence
  Description of Artificial Sequence: Synthetic oligonucleotide
ugaguaacaugcuccuucu

SEQ ID NO: 1829348 - RNA, 19 nt, Artificial Sequence
  Description of Artificial Sequence: Synthetic oligonucleotide
cuguuugugcaucggaaag

SEQ ID NO: 1829349 - RNA, 19 nt, Artificial Sequence
  Description of Artificial Sequence: Synthetic oligonucleotide
ugcuauccaguaugcaucc

SEQ ID NO: 1829350 - RNA, 19 nt, Artificial Sequence
  Description of Artificial Sequence: Synthetic oligonucleotide
uguuugugcaucggaaagc

SEQ ID NO: 1829351 - RNA, 19 nt, Artificial Sequence
  Description of Artificial Sequence: Synthetic oligonucleotide
ugaucauaguauugcgugu

SEQ ID NO: 1829352 - RNA, 19 nt, Artificial Sequence
  Description of Artificial Sequence: Synthetic oligonucleotide
gauuaaagucaaucagcca

SEQ ID NO: 1829353 - RNA, 19 nt, Artificial Sequence
  Description of Artificial Sequence: Synthetic oligonucleotide
caucagaccacuguguuuc

SEQ ID NO: 1829354 - RNA, 19 nt, Artificial Sequence
  Description of Artificial Sequence: Synthetic oligonucleotide
cuccaauuaagcuuaggga

SEQ ID NO: 1829355 - RNA, 19 nt, Artificial Sequence
  Description of Artificial Sequence: Synthetic oligonucleotide
ugucucuguauauaucgaa

SEQ ID NO: 1829356 - RNA, 19 nt, Artificial Sequence
  Description of Artificial Sequence: Synthetic oligonucleotide
ucuaugagcuugugaacgu

SEQ ID NO: 1829357 - RNA, 19 nt, Artificial Sequence
  Description of Artificial Sequence: Synthetic oligonucleotide
ugugaccucacuguuugug

SEQ ID NO: 1829358 - RNA, 19 nt, Artificial Sequence
  Description of Artificial Sequence: Synthetic oligonucleotide
ugaugguaaggcuucggaa

SEQ ID NO: 1829359 - RNA, 19 nt, Artificial Sequence
  Description of Artificial Sequence: Synthetic oligonucleotide
gaagucacgagugaugaaa

SEQ ID NO: 1829360 - RNA, 19 nt, Artificial Sequence
  Description of Artificial Sequence: Synthetic oligonucleotide
cauuaucacugucuggcug

SEQ ID NO: 1829361 - RNA, 19 nt, Artificial Sequence
  Description of Artificial Sequence: Synthetic oligonucleotide
agaacuuauacuggaugug

SEQ ID NO: 1829362 - RNA, 19 nt, Artificial Sequence
  Description of Artificial Sequence: Synthetic oligonucleotide
uguauauaucgaacacaaa

SEQ ID NO: 1829363 - RNA, 19 nt, Artificial Sequence
  Description of Artificial Sequence: Synthetic oligonucleotide
augguaaggcuucggaaga

SEQ ID NO: 1829364 - RNA, 19 nt, Artificial Sequence
  Description of Artificial Sequence: Synthetic oligonucleotide
ucguauucuauagaaggau

SEQ ID NO: 1829365 - RNA, 19 nt, Artificial Sequence
  Description of Artificial Sequence: Synthetic oligonucleotide
gaacucuugaaaagcagga

SEQ ID NO: 1829366 - RNA, 19 nt, Artificial Sequence
  Description of Artificial Sequence: Synthetic oligonucleotide
uggaugaauggcuguguga

SEQ ID NO: 1829367 - RNA, 19 nt, Artificial Sequence
  Description of Artificial Sequence: Synthetic oligonucleotide
aagcuuagggaagacacua

SEQ ID NO: 1829368 - RNA, 19 nt, Artificial Sequence
  Description of Artificial Sequence: Synthetic oligonucleotide
cgaauugauagcuuccugg

SEQ ID NO: 1829369 - RNA, 19 nt, Artificial Sequence
  Description of Artificial Sequence: Synthetic oligonucleotide
auggaugaauggcugugug

SEQ ID NO: 1829370 - RNA, 19 nt, Artificial Sequence
  Description of Artificial Sequence: Synthetic oligonucleotide
acuguuugugcaucggaaa

SEQ ID NO: 1829371 - RNA, 19 nt, Artificial Sequence
  Description of Artificial Sequence: Synthetic oligonucleotide
ugaccucacuguuugugca

SEQ ID NO: 1829372 - RNA, 19 nt, Artificial Sequence
  Description of Artificial Sequence: Synthetic oligonucleotide
cuuguugguggaucuuccc

SEQ ID NO: 1829373 - RNA, 19 nt, Artificial Sequence
  Description of Artificial Sequence: Synthetic oligonucleotide
cucuugaugguaaggcuuc

SEQ ID NO: 1829374 - RNA, 19 nt, Artificial Sequence
  Description of Artificial Sequence: Synthetic oligonucleotide
gauccacgaaguccuuggg

SEQ ID NO: 1829375 - RNA, 19 nt, Artificial Sequence
  Description of Artificial Sequence: Synthetic oligonucleotide
uugcguguagucccgcuga

SEQ ID NO: 1829376 - RNA, 19 nt, Artificial Sequence
  Description of Artificial Sequence: Synthetic oligonucleotide
gaauccugccccugagaag

SEQ ID NO: 1829377 - RNA, 19 nt, Artificial Sequence
  Description of Artificial Sequence: Synthetic oligonucleotide
guaugcaucccuuggggca

SEQ ID NO: 1829378 - RNA, 19 nt, Artificial Sequence
  Description of Artificial Sequence: Synthetic oligonucleotide
ccaggaauuaauucacacc

SEQ ID NO: 1829379 - RNA, 19 nt, Artificial Sequence
  Description of Artificial Sequence: Synthetic oligonucleotide
ucauuaucacugucuggcu

SEQ ID NO: 1829380 - RNA, 19 nt, Artificial Sequence
  Description of Artificial Sequence: Synthetic oligonucleotide
ccaauuaagcuuagggaag

SEQ ID NO: 1829381 - RNA, 19 nt, Artificial Sequence
  Description of Artificial Sequence: Synthetic oligonucleotide
ugaugaaaucagaacucuu

SEQ ID NO: 1829382 - RNA, 19 nt, Artificial Sequence
  Description of Artificial Sequence: Synthetic oligonucleotide
auugcguguagucccgcug

SEQ ID NO: 1829383 - RNA, 19 nt, Artificial Sequence
  Description of Artificial Sequence: Synthetic oligonucleotide
gugaccucacuguuugugc

SEQ ID NO: 1829384 - RNA, 19 nt, Artificial Sequence
  Description of Artificial Sequence: Synthetic oligonucleotide
uuucggaggacaagcucgu

SEQ ID NO: 1829385 - RNA, 19 nt, Artificial Sequence
  Description of Artificial Sequence: Synthetic oligonucleotide
cucguauucuauagaagga

SEQ ID NO: 1829386 - RNA, 19 nt, Artificial Sequence
  Description of Artificial Sequence: Synthetic oligonucleotide
uuggggcacuccaauuaag

SEQ ID NO: 1829387 - RNA, 19 nt, Artificial Sequence
  Description of Artificial Sequence: Synthetic oligonucleotide
uggagaauccugccccuga

SEQ ID NO: 1829388 - RNA, 19 nt, Artificial Sequence
  Description of Artificial Sequence: Synthetic oligonucleotide
auucauugcuauccaguau

SEQ ID NO: 1829389 - RNA, 19 nt, Artificial Sequence
  Description of Artificial Sequence: Synthetic oligonucleotide
aggcggagaacugacagug

SEQ ID NO: 1829390 - RNA, 19 nt, Artificial Sequence
  Description of Artificial Sequence: Synthetic oligonucleotide
uaucgaacacaaagucuuc

SEQ ID NO: 1829391 - RNA, 19 nt, Artificial Sequence
  Description of Artificial Sequence: Synthetic oligonucleotide
aguauugcguguagucccg

SEQ ID NO: 1829392 - RNA, 19 nt, Artificial Sequence
  Description of Artificial Sequence: Synthetic oligonucleotide
ucggaggacaagcucguau

SEQ ID NO: 1829393 - RNA, 19 nt, Artificial Sequence
  Description of Artificial Sequence: Synthetic oligonucleotide
ugggcagucgguagcucag

SEQ ID NO: 1829394 - RNA, 19 nt, Artificial Sequence
  Description of Artificial Sequence: Synthetic oligonucleotide
augucacugaggguuuuac

SEQ ID NO: 1829395 - RNA, 19 nt, Artificial Sequence
  Description of Artificial Sequence: Synthetic oligonucleotide
ugaauggcugugugaaguc

SEQ ID NO: 1829396 - RNA, 19 nt, Artificial Sequence
  Description of Artificial Sequence: Synthetic oligonucleotide
aucaucagaccacuguguu

SEQ ID NO: 1829397 - RNA, 19 nt, Artificial Sequence
  Description of Artificial Sequence: Synthetic oligonucleotide
ugacacucuugaugguaag

SEQ ID NO: 1829398 - RNA, 19 nt, Artificial Sequence
  Description of Artificial Sequence: Synthetic oligonucleotide
uugggcagucgguagcuca

SEQ ID NO: 1829399 - RNA, 19 nt, Artificial Sequence
  Description of Artificial Sequence: Synthetic oligonucleotide
gucucuguauauaucgaac

SEQ ID NO: 1829400 - RNA, 19 nt, Artificial Sequence
  Description of Artificial Sequence: Synthetic oligonucleotide
ucauaguauugcguguagu

SEQ ID NO: 1829401 - RNA, 19 nt, Artificial Sequence
  Description of Artificial Sequence: Synthetic oligonucleotide
agucccgcugagaaauacc

SEQ ID NO: 1829402 - RNA, 19 nt, Artificial Sequence
  Description of Artificial Sequence: Synthetic oligonucleotide
cuauucauugcuauccagu

SEQ ID NO: 1829403 - RNA, 19 nt, Artificial Sequence
  Description of Artificial Sequence: Synthetic oligonucleotide
aauucagccccaggaauua

SEQ ID NO: 1829404 - RNA, 19 nt, Artificial Sequence
  Description of Artificial Sequence: Synthetic oligonucleotide
ccaguaaauagucuuucac

SEQ ID NO: 1829405 - RNA, 19 nt, Artificial Sequence
  Description of Artificial Sequence: Synthetic oligonucleotide
uggaucuucccuuccugaa

SEQ ID NO: 1829406 - RNA, 19 nt, Artificial Sequence
  Description of Artificial Sequence: Synthetic oligonucleotide
ugucuggcugggaacuugu

SEQ ID NO: 1829407 - RNA, 19 nt, Artificial Sequence
  Description of Artificial Sequence: Synthetic oligonucleotide
ucuaccugccgcgucaauc

SEQ ID NO: 1829408 - RNA, 19 nt, Artificial Sequence
  Description of Artificial Sequence: Synthetic oligonucleotide
uugaaugcaucugcaaauu

SEQ ID NO: 1829409 - RNA, 19 nt, Artificial Sequence
  Description of Artificial Sequence: Synthetic oligonucleotide
accucuuagguuguucuca

SEQ ID NO: 1829410 - RNA, 19 nt, Artificial Sequence
  Description of Artificial Sequence: Synthetic oligonucleotide
uaugcaucccuuggggcac

SEQ ID NO: 1829411 - RNA, 19 nt, Artificial Sequence
  Description of Artificial Sequence: Synthetic oligonucleotide
aggacaagcucguauucua

SEQ ID NO: 1829412 - RNA, 19 nt, Artificial Sequence
  Description of Artificial Sequence: Synthetic oligonucleotide
ggugccguaaguguggcug

SEQ ID NO: 1829413 - RNA, 19 nt, Artificial Sequence
  Description of Artificial Sequence: Synthetic oligonucleotide
aucgaacacaaagucuuca

SEQ ID NO: 1829414 - RNA, 19 nt, Artificial Sequence
  Description of Artificial Sequence: Synthetic oligonucleotide
uucagccccaggaauuaau

SEQ ID NO: 1829415 - RNA, 19 nt, Artificial Sequence
  Description of Artificial Sequence: Synthetic oligonucleotide
aacuuauacuggauguguu

SEQ ID NO: 1829416 - RNA, 19 nt, Artificial Sequence
  Description of Artificial Sequence: Synthetic oligonucleotide
uuccugaaaccaccagagu

SEQ ID NO: 1829417 - RNA, 19 nt, Artificial Sequence
  Description of Artificial Sequence: Synthetic oligonucleotide
aagucacgagugaugaaau

SEQ ID NO: 1829418 - RNA, 19 nt, Artificial Sequence
  Description of Artificial Sequence: Synthetic oligonucleotide
cuucggaagagcggguacc

SEQ ID NO: 1829419 - RNA, 19 nt, Artificial Sequence
  Description of Artificial Sequence: Synthetic oligonucleotide
ugccgcgucaaucgcugcc

SEQ ID NO: 1829420 - RNA, 19 nt, Artificial Sequence
  Description of Artificial Sequence: Synthetic oligonucleotide
agaugucaggucuucccaa

SEQ ID NO: 1829421 - RNA, 19 nt, Artificial Sequence
  Description of Artificial Sequence: Synthetic oligonucleotide
uauugcguguagucccgcu

SEQ ID NO: 1829422 - RNA, 19 nt, Artificial Sequence
  Description of Artificial Sequence: Synthetic oligonucleotide
ugacuuccccaaauggauu

SEQ ID NO: 1829423 - RNA, 19 nt, Artificial Sequence
  Description of Artificial Sequence: Synthetic oligonucleotide
agcuuagggaagacacuac

SEQ ID NO: 1829424 - RNA, 19 nt, Artificial Sequence
  Description of Artificial Sequence: Synthetic oligonucleotide
agcucguauucuauagaag

SEQ ID NO: 1829425 - RNA, 19 nt, Artificial Sequence
  Description of Artificial Sequence: Synthetic oligonucleotide
ugcguguagucccgcugag

SEQ ID NO: 1829426 - RNA, 19 nt, Artificial Sequence
  Description of Artificial Sequence: Synthetic oligonucleotide
ccauuuucggaggacaagc

SEQ ID NO: 1829427 - RNA, 19 nt, Artificial Sequence
  Description of Artificial Sequence: Synthetic oligonucleotide
acgagugaugaaaucagaa

SEQ ID NO: 1829428 - RNA, 19 nt, Artificial Sequence
  Description of Artificial Sequence: Synthetic oligonucleotide
guuuagaaauaugaucaua

SEQ ID NO: 1829429 - RNA, 19 nt, Artificial Sequence
  Description of Artificial Sequence: Synthetic oligonucleotide
gugaacgucuuccccggug

SEQ ID NO: 1829430 - RNA, 19 nt, Artificial Sequence
  Description of Artificial Sequence: Synthetic oligonucleotide
uaacaugcuccuucuucau

SEQ ID NO: 1829431 - RNA, 19 nt, Artificial Sequence
  Description of Artificial Sequence: Synthetic oligonucleotide
caauuaagcuuagggaaga

SEQ ID NO: 1829432 - RNA, 19 nt, Artificial Sequence
  Description of Artificial Sequence: Synthetic oligonucleotide
gcggagaacugacagugag

SEQ ID NO: 1829433 - RNA, 19 nt, Artificial Sequence
  Description of Artificial Sequence: Synthetic oligonucleotide
cugccguucuccucucccg

SEQ ID NO: 1829434 - RNA, 19 nt, Artificial Sequence
  Description of Artificial Sequence: Synthetic oligonucleotide
uucggaagagcggguacca

SEQ ID NO: 1829435 - RNA, 19 nt, Artificial Sequence
  Description of Artificial Sequence: Synthetic oligonucleotide
guugguggaucuucccuuc

SEQ ID NO: 1829436 - RNA, 19 nt, Artificial Sequence
  Description of Artificial Sequence: Synthetic oligonucleotide
ucuuccccgguggagagau

SEQ ID NO: 1829437 - RNA, 19 nt, Artificial Sequence
  Description of Artificial Sequence: Synthetic oligonucleotide
ggcugugugaagucacgag

SEQ ID NO: 1829438 - RNA, 19 nt, Artificial Sequence
  Description of Artificial Sequence: Synthetic oligonucleotide
cuggacuugaguggugaac

SEQ ID NO: 1829439 - RNA, 19 nt, Artificial Sequence
  Description of Artificial Sequence: Synthetic oligonucleotide
cacuguuugugcaucggaa

SEQ ID NO: 1829440 - RNA, 19 nt, Artificial Sequence
  Description of Artificial Sequence: Synthetic oligonucleotide
caccgaagucaccucuuag

SEQ ID NO: 1829441 - RNA, 19 nt, Artificial Sequence
  Description of Artificial Sequence: Synthetic oligonucleotide
guacaauggaugaauggcu

SEQ ID NO: 1829442 - RNA, 19 nt, Artificial Sequence
  Description of Artificial Sequence: Synthetic oligonucleotide
agugggagaaugacacucu

SEQ ID NO: 1829443 - RNA, 19 nt, Artificial Sequence
  Description of Artificial Sequence: Synthetic oligonucleotide
gcuugugaacgucuucccc

SEQ ID NO: 1829444 - RNA, 19 nt, Artificial Sequence
  Description of Artificial Sequence: Synthetic oligonucleotide
gaaauaccaauaagcuugu

SEQ ID NO: 1829445 - RNA, 19 nt, Artificial Sequence
  Description of Artificial Sequence: Synthetic oligonucleotide
cuaugagcuugugaacguc

SEQ ID NO: 1829446 - RNA, 19 nt, Artificial Sequence
  Description of Artificial Sequence: Synthetic oligonucleotide
augacacucuugaugguaa

SEQ ID NO: 1829447 - RNA, 19 nt, Artificial Sequence
  Description of Artificial Sequence: Synthetic oligonucleotide
cguauucuauagaaggauc

SEQ ID NO: 1829448 - RNA, 19 nt, Artificial Sequence
  Description of Artificial Sequence: Synthetic oligonucleotide
guuugugcaucggaaagcu

SEQ ID NO: 1829449 - RNA, 19 nt, Artificial Sequence
  Description of Artificial Sequence: Synthetic oligonucleotide
uagucccgcugagaaauac

SEQ ID NO: 1829450 - RNA, 19 nt, Artificial Sequence
  Description of Artificial Sequence: Synthetic oligonucleotide
ucccgcugagaaauaccaa

SEQ ID NO: 1829451 - RNA, 19 nt, Artificial Sequence
  Description of Artificial Sequence: Synthetic oligonucleotide
cuauccaguaugcaucccu

SEQ ID NO: 1829452 - RNA, 19 nt, Artificial Sequence
  Description of Artificial Sequence: Synthetic oligonucleotide
auggugcuucucaaagcag

SEQ ID NO: 1829453 - RNA, 19 nt, Artificial Sequence
  Description of Artificial Sequence: Synthetic oligonucleotide
cacuccaauuaagcuuagg

SEQ ID NO: 1829454 - RNA, 19 nt, Artificial Sequence
  Description of Artificial Sequence: Synthetic oligonucleotide
ugugaacgucuuccccggu

SEQ ID NO: 1829455 - RNA, 19 nt, Artificial Sequence
  Description of Artificial Sequence: Synthetic oligonucleotide
aggaauuaauucacaccau

SEQ ID NO: 1829456 - RNA, 19 nt, Artificial Sequence
  Description of Artificial Sequence: Synthetic oligonucleotide
cuuggggcacuccaauuaa

SEQ ID NO: 1829457 - RNA, 19 nt, Artificial Sequence
  Description of Artificial Sequence: Synthetic oligonucleotide
caccucuuagguuguucuc

SEQ ID NO: 1829458 - RNA, 19 nt, Artificial Sequence
  Description of Artificial Sequence: Synthetic oligonucleotide
caucccuuggggcacucca

SEQ ID NO: 1829459 - RNA, 19 nt, Artificial Sequence
  Description of Artificial Sequence: Synthetic oligonucleotide
gagaagccccuucaccgaa

SEQ ID NO: 1829460 - RNA, 19 nt, Artificial Sequence
  Description of Artificial Sequence: Synthetic oligonucleotide
ggcacuccaauuaagcuua

SEQ ID NO: 1829461 - RNA, 19 nt, Artificial Sequence
  Description of Artificial Sequence: Synthetic oligonucleotide
gcgaauugauagcuuccug

SEQ ID NO: 1829462 - RNA, 19 nt, Artificial Sequence
  Description of Artificial Sequence: Synthetic oligonucleotide
auuguggcaugcagguaga

SEQ ID NO: 1829463 - RNA, 19 nt, Artificial Sequence
  Description of Artificial Sequence: Synthetic oligonucleotide
cgagcgaauugauagcuuc

SEQ ID NO: 1829464 - RNA, 19 nt, Artificial Sequence
  Description of Artificial Sequence: Synthetic oligonucleotide
agucgguagcucagauagg

SEQ ID NO: 1829465 - RNA, 19 nt, Artificial Sequence
  Description of Artificial Sequence: Synthetic oligonucleotide
aaauaccaauaagcuuguu

SEQ ID NO: 1829466 - RNA, 19 nt, Artificial Sequence
  Description of Artificial Sequence: Synthetic oligonucleotide
caccauuuucggaggacaa

SEQ ID NO: 1829467 - RNA, 19 nt, Artificial Sequence
  Description of Artificial Sequence: Synthetic oligonucleotide
gaacgucuuccccggugga

SEQ ID NO: 1829468 - RNA, 19 nt, Artificial Sequence
  Description of Artificial Sequence: Synthetic oligonucleotide
gaaugacacucuugauggu

SEQ ID NO: 1829469 - RNA, 19 nt, Artificial Sequence
  Description of Artificial Sequence: Synthetic oligonucleotide
uccccgguggagagaucca

SEQ ID NO: 1829470 - RNA, 19 nt, Artificial Sequence
  Description of Artificial Sequence: Synthetic oligonucleotide
gcauucagucauccucuug

SEQ ID NO: 1829471 - RNA, 19 nt, Artificial Sequence
  Description of Artificial Sequence: Synthetic oligonucleotide
gaaggaucuggagaaucau

SEQ ID NO: 1829472 - RNA, 19 nt, Artificial Sequence
  Description of Artificial Sequence: Synthetic oligonucleotide
gaagccccuucaccgaagu

SEQ ID NO: 1829473 - RNA, 19 nt, Artificial Sequence
  Description of Artificial Sequence: Synthetic oligonucleotide
ggaucuucccuuccugaaa

SEQ ID NO: 1829474 - RNA, 19 nt, Artificial Sequence
  Description of Artificial Sequence: Synthetic oligonucleotide
ggugaacucaggaaacucu

SEQ ID NO: 1829475 - RNA, 19 nt, Artificial Sequence
  Description of Artificial Sequence: Synthetic oligonucleotide
cuucaccgaagucaccucu

SEQ ID NO: 1829476 - RNA, 19 nt, Artificial Sequence
  Description of Artificial Sequence: Synthetic oligonucleotide
gggaacuuguugguggauc

SEQ ID NO: 1829477 - RNA, 19 nt, Artificial Sequence
  Description of Artificial Sequence: Synthetic oligonucleotide
cuggugccguaaguguggc

SEQ ID NO: 1829478 - RNA, 19 nt, Artificial Sequence
  Description of Artificial Sequence: Synthetic oligonucleotide
gugcaucggaaagcuggag

SEQ ID NO: 1829479 - RNA, 19 nt, Artificial Sequence
  Description of Artificial Sequence: Synthetic oligonucleotide
guauugcguguagucccgc

SEQ ID NO: 1829480 - RNA, 19 nt, Artificial Sequence
  Description of Artificial Sequence: Synthetic oligonucleotide
caucggaauucagccccag

SEQ ID NO: 1829481 - RNA, 19 nt, Artificial Sequence
  Description of Artificial Sequence: Synthetic oligonucleotide
caucaguacaauggaugaa

SEQ ID NO: 1829482 - RNA, 19 nt, Artificial Sequence
  Description of Artificial Sequence: Synthetic oligonucleotide
uuguggcaugcagguagac

SEQ ID NO: 1829483 - RNA, 19 nt, Artificial Sequence
  Description of Artificial Sequence: Synthetic oligonucleotide
uaucacugucuggcuggga

SEQ ID NO: 1829484 - RNA, 19 nt, Artificial Sequence
  Description of Artificial Sequence: Synthetic oligonucleotide
ggacuugaguggugaacuc

SEQ ID NO: 1829485 - RNA, 19 nt, Artificial Sequence
  Description of Artificial Sequence: Synthetic oligonucleotide
cccgguggagagauccacg

SEQ ID NO: 1829486 - RNA, 19 nt, Artificial Sequence
  Description of Artificial Sequence: Synthetic oligonucleotide
ccuugacaaaacaucggaa

SEQ ID NO: 1829487 - RNA, 19 nt, Artificial Sequence
  Description of Artificial Sequence: Synthetic oligonucleotide
agugaguaacaugcuccuu

SEQ ID NO: 1829488 - RNA, 19 nt, Artificial Sequence
  Description of Artificial Sequence: Synthetic oligonucleotide
augagcuugugaacgucuu

SEQ ID NO: 1829489 - RNA, 19 nt, Artificial Sequence
  Description of Artificial Sequence: Synthetic oligonucleotide
ccugccgcgucaaucgcug

SEQ ID NO: 1829490 - RNA, 19 nt, Artificial Sequence
  Description of Artificial Sequence: Synthetic oligonucleotide
gcggguaccaggcggagaa

SEQ ID NO: 1829491 - RNA, 19 nt, Artificial Sequence
  Description of Artificial Sequence: Synthetic oligonucleotide
gccgcgucaaucgcugccg

SEQ ID NO: 1829492 - RNA, 19 nt, Artificial Sequence
  Description of Artificial Sequence: Synthetic oligonucleotide
gauaggggcugggcugcac

SEQ ID NO: 1829493 - RNA, 19 nt, Artificial Sequence
  Description of Artificial Sequence: Synthetic oligonucleotide
gucugugacuuccccaaau

SEQ ID NO: 1829494 - RNA, 19 nt, Artificial Sequence
  Description of Artificial Sequence: Synthetic oligonucleotide
acaucggaauucagcccca

SEQ ID NO: 1829495 - RNA, 19 nt, Artificial Sequence
  Description of Artificial Sequence: Synthetic oligonucleotide
uggugccguaaguguggcu

SEQ ID NO: 1829496 - RNA, 19 nt, Artificial Sequence
  Description of Artificial Sequence: Synthetic oligonucleotide
ggggcacuccaauuaagcu

SEQ ID NO: 1829497 - RNA, 19 nt, Artificial Sequence
  Description of Artificial Sequence: Synthetic oligonucleotide
gcgucaaucgcugccguuc

SEQ ID NO: 1829498 - RNA, 19 nt, Artificial Sequence
  Description of Artificial Sequence: Synthetic oligonucleotide
ucccaucguccaguaaaua

SEQ ID NO: 1829499 - RNA, 19 nt, Artificial Sequence
  Description of Artificial Sequence: Synthetic oligonucleotide
aggaaacucuggugccgua

SEQ ID NO: 1829500 - RNA, 19 nt, Artificial Sequence
  Description of Artificial Sequence: Synthetic oligonucleotide
ccccgagcgaauugauagc

SEQ ID NO: 1829501 - RNA, 19 nt, Artificial Sequence
  Description of Artificial Sequence: Synthetic oligonucleotide
auucagccccaggaauuaa

SEQ ID NO: 1829502 - RNA, 19 nt, Artificial Sequence
  Description of Artificial Sequence: Synthetic oligonucleotide
gucaaucgcugccguucuc

SEQ ID NO: 1829503 - RNA, 19 nt, Artificial Sequence
  Description of Artificial Sequence: Synthetic oligonucleotide
cguguagucccgcugagaa

SEQ ID NO: 1829504 - RNA, 19 nt, Artificial Sequence
  Description of Artificial Sequence: Synthetic oligonucleotide
gagcggguaccaggcggag

SEQ ID NO: 1829505 - RNA, 19 nt, Artificial Sequence
  Description of Artificial Sequence: Synthetic oligonucleotide
ggaaacucuggugccguaa

SEQ ID NO: 1829506 - RNA, 19 nt, Artificial Sequence
  Description of Artificial Sequence: Synthetic oligonucleotide
cugccgcgucaaucgcugc

SEQ ID NO: 1829507 - RNA, 19 nt, Artificial Sequence
  Description of Artificial Sequence: Synthetic oligonucleotide
gugugaagucacgagugau

SEQ ID NO: 1829508 - RNA, 19 nt, Artificial Sequence
  Description of Artificial Sequence: Synthetic oligonucleotide
gagucccaucguccaguaa

SEQ ID NO: 1829509 - RNA, 19 nt, Artificial Sequence
  Description of Artificial Sequence: Synthetic oligonucleotide
ccgguggagagauccacga

SEQ ID NO: 1829510 - RNA, 19 nt, Artificial Sequence
  Description of Artificial Sequence: Synthetic oligonucleotide
ggagaaugacacucuugau

SEQ ID NO: 1829511 - RNA, 19 nt, Artificial Sequence
  Description of Artificial Sequence: Synthetic oligonucleotide
ccuucaccgaagucaccuc

SEQ ID NO: 1829512 - RNA, 19 nt, Artificial Sequence
  Description of Artificial Sequence: Synthetic oligonucleotide
uucggaggacaagcucgua

SEQ ID NO: 1829513 - RNA, 19 nt, Artificial Sequence
  Description of Artificial Sequence: Synthetic oligonucleotide
agcggguaccaggcggaga

SEQ ID NO: 1829514 - RNA, 19 nt, Artificial Sequence
  Description of Artificial Sequence: Synthetic oligonucleotide
cguaaguguggcugugcuc

SEQ ID NO: 1829515 - RNA, 19 nt, Artificial Sequence
  Description of Artificial Sequence: Synthetic oligonucleotide
caaucgcugccguucuccu

SEQ ID NO: 1829516 - RNA, 19 nt, Artificial Sequence
  Description of Artificial Sequence: Synthetic oligonucleotide
caggcggagaacugacagu

SEQ ID NO: 1829517 - RNA, 19 nt, Artificial Sequence
  Description of Artificial Sequence: Synthetic oligonucleotide
ccgaagucaccucuuaggu

SEQ ID NO: 1829518 - RNA, 19 nt, Artificial Sequence
  Description of Artificial Sequence: Synthetic oligonucleotide
gcagucgguagcucagaua

SEQ ID NO: 1829519 - RNA, 19 nt, Artificial Sequence
  Description of Artificial Sequence: Synthetic oligonucleotide
agauaggggcugggcugca

SEQ ID NO: 1829520 - RNA, 19 nt, Artificial Sequence
  Description of Artificial Sequence: Synthetic oligonucleotide
caggaaacucuggugccgu

SEQ ID NO: 1829521 - RNA, 19 nt, Artificial Sequence
  Description of Artificial Sequence: Synthetic oligonucleotide
cgucuuccccgguggagag

SEQ ID NO: 1829522 - RNA, 19 nt, Artificial Sequence
  Description of Artificial Sequence: Synthetic oligonucleotide
ucgcugccguucuccucuc

SEQ ID NO: 1829523 - RNA, 19 nt, Artificial Sequence
  Description of Artificial Sequence: Synthetic oligonucleotide
gucccaucguccaguaaau

SEQ ID NO: 1829524 - RNA, 19 nt, Artificial Sequence
  Description of Artificial Sequence: Synthetic oligonucleotide
ugcaucccuuggggcacuc

SEQ ID NO: 1829525 - RNA, 19 nt, Artificial Sequence
  Description of Artificial Sequence: Synthetic oligonucleotide
augcaucccuuggggcacu

SEQ ID NO: 1829526 - RNA, 19 nt, Artificial Sequence
  Description of Artificial Sequence: Synthetic oligonucleotide
cggaauucagccccaggaa

SEQ ID NO: 1829527 - RNA, 19 nt, Artificial Sequence
  Description of Artificial Sequence: Synthetic oligonucleotide
caucggaaagcuggagaau

SEQ ID NO: 1829528 - RNA, 19 nt, Artificial Sequence
  Description of Artificial Sequence: Synthetic oligonucleotide
guagucccgcugagaaaua

SEQ ID NO: 1829529 - RNA, 19 nt, Artificial Sequence
  Description of Artificial Sequence: Synthetic oligonucleotide
ggacaagcucguauucuau

SEQ ID NO: 1829530 - RNA, 19 nt, Artificial Sequence
  Description of Artificial Sequence: Synthetic oligonucleotide
ggcagucgguagcucagau

SEQ ID NO: 1829531 - RNA, 19 nt, Artificial Sequence
  Description of Artificial Sequence: Synthetic oligonucleotide
ccccgguggagagauccac

SEQ ID NO: 1829532 - RNA, 19 nt, Artificial Sequence
  Description of Artificial Sequence: Synthetic oligonucleotide
cugugaccucacuguuugu

SEQ ID NO: 1829533 - RNA, 19 nt, Artificial Sequence
  Description of Artificial Sequence: Synthetic oligonucleotide
cauccucuaccugccgcgu

SEQ ID NO: 1829534 - RNA, 19 nt, Artificial Sequence
  Description of Artificial Sequence: Synthetic oligonucleotide
cccgagcgaauugauagcu

SEQ ID NO: 1829535 - RNA, 19 nt, Artificial Sequence
  Description of Artificial Sequence: Synthetic oligonucleotide
gcguguagucccgcugaga

SEQ ID NO: 1829536 - RNA, 19 nt, Artificial Sequence
  Description of Artificial Sequence: Synthetic oligonucleotide
gcauuguggcaugcaggua

SEQ ID NO: 1829537 - RNA, 19 nt, Artificial Sequence
  Description of Artificial Sequence: Synthetic oligonucleotide
cggaggacaagcucguauu

SEQ ID NO: 1829538 - RNA, 19 nt, Artificial Sequence
  Description of Artificial Sequence: Synthetic oligonucleotide
cgucaaucgcugccguucu

SEQ ID NO: 1829539 - RNA, 19 nt, Artificial Sequence
  Description of Artificial Sequence: Synthetic oligonucleotide
cucuaccugccgcgucaau

SEQ ID NO: 1829540 - RNA, 19 nt, Artificial Sequence
  Description of Artificial Sequence: Synthetic oligonucleotide
cgguggagagauccacgaa

SEQ ID NO: 1829541 - RNA, 19 nt, Artificial Sequence
  Description of Artificial Sequence: Synthetic oligonucleotide
ccgagcgaauugauagcuu

SEQ ID NO: 1829542 - RNA, 19 nt, Artificial Sequence
  Description of Artificial Sequence: Synthetic oligonucleotide
ccucuaccugccgcgucaa

SEQ ID NO: 1829543 - RNA, 19 nt, Artificial Sequence
  Description of Artificial Sequence: Synthetic oligonucleotide
cccuuggggcacuccaauu

SEQ ID NO: 1829544 - RNA, 19 nt, Artificial Sequence
  Description of Artificial Sequence: Synthetic oligonucleotide
ccgcgucaaucgcugccgu

SEQ ID NO: 1829545 - RNA, 19 nt, Artificial Sequence
  Description of Artificial Sequence: Synthetic oligonucleotide
cgcgucaaucgcugccguu

SEQ ID NO: 1829546 - RNA, 19 nt, Artificial Sequence
  Description of Artificial Sequence: Synthetic oligonucleotide
agaaacaucagacagaaga

SEQ ID NO: 1829547 - RNA, 19 nt, Artificial Sequence
  Description of Artificial Sequence: Synthetic oligonucleotide
aauguugaggcccaggguc

SEQ ID NO: 1829548 - RNA, 19 nt, Artificial Sequence
  Description of Artificial Sequence: Synthetic oligonucleotide
ucuuuugucacaaauggcc

SEQ ID NO: 1829549 - RNA, 19 nt, Artificial Sequence
  Description of Artificial Sequence: Synthetic oligonucleotide
aaauggacaagacugggag

SEQ ID NO: 1829550 - RNA, 19 nt, Artificial Sequence
  Description of Artificial Sequence: Synthetic oligonucleotide
aguuuauucaucuuuuguc

SEQ ID NO: 1829551 - RNA, 19 nt, Artificial Sequence
  Description of Artificial Sequence: Synthetic oligonucleotide
aagacugggaguccuaccc

SEQ ID NO: 1829552 - RNA, 19 nt, Artificial Sequence
  Description of Artificial Sequence: Synthetic oligonucleotide
caacauagaaaauaggacc

SEQ ID NO: 1829553 - RNA, 19 nt, Artificial Sequence
  Description of Artificial Sequence: Synthetic oligonucleotide
gaaaauaggaccaagggac

SEQ ID NO: 1829554 - RNA, 19 nt, Artificial Sequence
  Description of Artificial Sequence: Synthetic oligonucleotide
aaugcugcgaaggugaacg

SEQ ID NO: 1829555 - RNA, 19 nt, Artificial Sequence
  Description of Artificial Sequence: Synthetic oligonucleotide
aacaucagacagaagaggc

SEQ ID NO: 1829556 - RNA, 19 nt, Artificial Sequence
  Description of Artificial Sequence: Synthetic oligonucleotide
uaauagaagaaggagagca

SEQ ID NO: 1829557 - RNA, 19 nt, Artificial Sequence
  Description of Artificial Sequence: Synthetic oligonucleotide
caucuuuugucacaaaugg

SEQ ID NO: 1829558 - RNA, 19 nt, Artificial Sequence
  Description of Artificial Sequence: Synthetic oligonucleotide
caacguauaaaccauacug

SEQ ID NO: 1829559 - RNA, 19 nt, Artificial Sequence
  Description of Artificial Sequence: Synthetic oligonucleotide
aauuuccaagaucaagguc

SEQ ID NO: 1829560 - RNA, 19 nt, Artificial Sequence
  Description of Artificial Sequence: Synthetic oligonucleotide
uaaaccauacuguacaggu

SEQ ID NO: 1829561 - RNA, 19 nt, Artificial Sequence
  Description of Artificial Sequence: Synthetic oligonucleotide
aaggugaacgccauggccc

SEQ ID NO: 1829562 - RNA, 19 nt, Artificial Sequence
  Description of Artificial Sequence: Synthetic oligonucleotide
gauagaauauuccgggacc

SEQ ID NO: 1829563 - RNA, 19 nt, Artificial Sequence
  Description of Artificial Sequence: Synthetic oligonucleotide
uacuguacagguaauagaa

SEQ ID NO: 1829564 - RNA, 19 nt, Artificial Sequence
  Description of Artificial Sequence: Synthetic oligonucleotide
agaaaauaggaccaaggga

SEQ ID NO: 1829565 - RNA, 19 nt, Artificial Sequence
  Description of Artificial Sequence: Synthetic oligonucleotide
guggauagaauauuccggg

SEQ ID NO: 1829566 - RNA, 19 nt, Artificial Sequence
  Description of Artificial Sequence: Synthetic oligonucleotide
auaaguagagacuggguug

SEQ ID NO: 1829567 - RNA, 19 nt, Artificial Sequence
  Description of Artificial Sequence: Synthetic oligonucleotide
aaacaucagacagaagagg

SEQ ID NO: 1829568 - RNA, 19 nt, Artificial Sequence
  Description of Artificial Sequence: Synthetic oligonucleotide
guauaaaccauacuguaca

SEQ ID NO: 1829569 - RNA, 19 nt, Artificial Sequence
  Description of Artificial Sequence: Synthetic oligonucleotide
aacauagaaaauaggacca

SEQ ID NO: 1829570 - RNA, 19 nt, Artificial Sequence
  Description of Artificial Sequence: Synthetic oligonucleotide
uagaaggcgaguuugcacc

SEQ ID NO: 1829571 - RNA, 19 nt, Artificial Sequence
  Description of Artificial Sequence: Synthetic oligonucleotide
uuugggauaaguagagacu

SEQ ID NO: 1829572 - RNA, 19 nt, Artificial Sequence
  Description of Artificial Sequence: Synthetic oligonucleotide
ccugaaauggacaagacug

SEQ ID NO: 1829573 - RNA, 19 nt, Artificial Sequence
  Description of Artificial Sequence: Synthetic oligonucleotide
guuugggauaaguagagac

SEQ ID NO: 1829574 - RNA, 19 nt, Artificial Sequence
  Description of Artificial Sequence: Synthetic oligonucleotide
uaaguagagacuggguugg

SEQ ID NO: 1829575 - RNA, 19 nt, Artificial Sequence
  Description of Artificial Sequence: Synthetic oligonucleotide
auagaaaauaggaccaagg

SEQ ID NO: 1829576 - RNA, 19 nt, Artificial Sequence
  Description of Artificial Sequence: Synthetic oligonucleotide
aguaguugaggaugucagc

SEQ ID NO: 1829577 - RNA, 19 nt, Artificial Sequence
  Description of Artificial Sequence: Synthetic oligonucleotide
gguaauagaagaaggagag

SEQ ID NO: 1829578 - RNA, 19 nt, Artificial Sequence
  Description of Artificial Sequence: Synthetic oligonucleotide
ucaugauagagacugcauc

SEQ ID NO: 1829579 - RNA, 19 nt, Artificial Sequence
  Description of Artificial Sequence: Synthetic oligonucleotide
auagaagaaggagagcagg

SEQ ID NO: 1829580 - RNA, 19 nt, Artificial Sequence
  Description of Artificial Sequence: Synthetic oligonucleotide
aacguauaaaccauacugu

SEQ ID NO: 1829581 - RNA, 19 nt, Artificial Sequence
  Description of Artificial Sequence: Synthetic oligonucleotide
caggcaacauagaaaauag

SEQ ID NO: 1829582 - RNA, 19 nt, Artificial Sequence
  Description of Artificial Sequence: Synthetic oligonucleotide
uacccuuagaagcucacca

SEQ ID NO: 1829583 - RNA, 19 nt, Artificial Sequence
  Description of Artificial Sequence: Synthetic oligonucleotide
uuuauucaucuuuugucac

SEQ ID NO: 1829584 - RNA, 19 nt, Artificial Sequence
  Description of Artificial Sequence: Synthetic oligonucleotide
agaauauuccgggaccacc

SEQ ID NO: 1829585 - RNA, 19 nt, Artificial Sequence
  Description of Artificial Sequence: Synthetic oligonucleotide
ugaaauggacaagacuggg

SEQ ID NO: 1829586 - RNA, 19 nt, Artificial Sequence
  Description of Artificial Sequence: Synthetic oligonucleotide
uguagcagaaugcugcgaa

SEQ ID NO: 1829587 - RNA, 19 nt, Artificial Sequence
  Description of Artificial Sequence: Synthetic oligonucleotide
cuggguuggaaagagagcc

SEQ ID NO: 1829588 - RNA, 19 nt, Artificial Sequence
  Description of Artificial Sequence: Synthetic oligonucleotide
cugaaauggacaagacugg

SEQ ID NO: 1829589 - RNA, 19 nt, Artificial Sequence
  Description of Artificial Sequence: Synthetic oligonucleotide
cucaccaacguauaaacca

SEQ ID NO: 1829590 - RNA, 19 nt, Artificial Sequence
  Description of Artificial Sequence: Synthetic oligonucleotide
cagcauucaugauagagac

SEQ ID NO: 1829591 - RNA, 19 nt, Artificial Sequence
  Description of Artificial Sequence: Synthetic oligonucleotide
uuugucacaaauggccggg

SEQ ID NO: 1829592 - RNA, 19 nt, Artificial Sequence
  Description of Artificial Sequence: Synthetic oligonucleotide
uucaccccuguuuagagcu

SEQ ID NO: 1829593 - RNA, 19 nt, Artificial Sequence
  Description of Artificial Sequence: Synthetic oligonucleotide
cauacuguacagguaauag

SEQ ID NO: 1829594 - RNA, 19 nt, Artificial Sequence
  Description of Artificial Sequence: Synthetic oligonucleotide
auggacaagacugggaguc

SEQ ID NO: 1829595 - RNA, 19 nt, Artificial Sequence
  Description of Artificial Sequence: Synthetic oligonucleotide
uauuccgggaccaccagcu

SEQ ID NO: 1829596 - RNA, 19 nt, Artificial Sequence
  Description of Artificial Sequence: Synthetic oligonucleotide
aauauuccgggaccaccag

SEQ ID NO: 1829597 - RNA, 19 nt, Artificial Sequence
  Description of Artificial Sequence: Synthetic oligonucleotide
ucacaaauggccggggagg

SEQ ID NO: 1829598 - RNA, 19 nt, Artificial Sequence
  Description of Artificial Sequence: Synthetic oligonucleotide
uccaagaucaaggucugcc

SEQ ID NO: 1829599 - RNA, 19 nt, Artificial Sequence
  Description of Artificial Sequence: Synthetic oligonucleotide
auauugagccugcucguuc

SEQ ID NO: 1829600 - RNA, 19 nt, Artificial Sequence
  Description of Artificial Sequence: Synthetic oligonucleotide
uccgcagcucaucaaaggc

SEQ ID NO: 1829601 - RNA, 19 nt, Artificial Sequence
  Description of Artificial Sequence: Synthetic oligonucleotide
auauuccgggaccaccagc

SEQ ID NO: 1829602 - RNA, 19 nt, Artificial Sequence
  Description of Artificial Sequence: Synthetic oligonucleotide
uccaggacaacugccaugc

SEQ ID NO: 1829603 - RNA, 19 nt, Artificial Sequence
  Description of Artificial Sequence: Synthetic oligonucleotide
uauugagccugcucguucc

SEQ ID NO: 1829604 - RNA, 19 nt, Artificial Sequence
  Description of Artificial Sequence: Synthetic oligonucleotide
gaggaugucagcauucaug

SEQ ID NO: 1829605 - RNA, 19 nt, Artificial Sequence
  Description of Artificial Sequence: Synthetic oligonucleotide
auaaaccauacuguacagg

SEQ ID NO: 1829606 - RNA, 19 nt, Artificial Sequence
  Description of Artificial Sequence: Synthetic oligonucleotide
aauggacaagacugggagu

SEQ ID NO: 1829607 - RNA, 19 nt, Artificial Sequence
  Description of Artificial Sequence: Synthetic oligonucleotide
uuagagcuuugccuggccc

SEQ ID NO: 1829608 - RNA, 19 nt, Artificial Sequence
  Description of Artificial Sequence: Synthetic oligonucleotide
uugaagucaguccgcagcu

SEQ ID NO: 1829609 - RNA, 19 nt, Artificial Sequence
  Description of Artificial Sequence: Synthetic oligonucleotide
agagccaucggcaggacgg

SEQ ID NO: 1829610 - RNA, 19 nt, Artificial Sequence
  Description of Artificial Sequence: Synthetic oligonucleotide
uagcagaaugcugcgaagg

SEQ ID NO: 1829611 - RNA, 19 nt, Artificial Sequence
  Description of Artificial Sequence: Synthetic oligonucleotide
aaggcgaguuugcaccagg

SEQ ID NO: 1829612 - RNA, 19 nt, Artificial Sequence
  Description of Artificial Sequence: Synthetic oligonucleotide
gguggaaguaccuccagag

SEQ ID NO: 1829613 - RNA, 19 nt, Artificial Sequence
  Description of Artificial Sequence: Synthetic oligonucleotide
gaguccuaccccuuccagg

SEQ ID NO: 1829614 - RNA, 19 nt, Artificial Sequence
  Description of Artificial Sequence: Synthetic oligonucleotide
ucgaugggguucuugaagu

SEQ ID NO: 1829615 - RNA, 19 nt, Artificial Sequence
  Description of Artificial Sequence: Synthetic oligonucleotide
aguccuaccccuuccagga

SEQ ID NO: 1829616 - RNA, 19 nt, Artificial Sequence
  Description of Artificial Sequence: Synthetic oligonucleotide
aggugaacgccauggcccc

SEQ ID NO: 1829617 - RNA, 19 nt, Artificial Sequence
  Description of Artificial Sequence: Synthetic oligonucleotide
gaaguaccuccagaggugg

SEQ ID NO: 1829618 - RNA, 19 nt, Artificial Sequence
  Description of Artificial Sequence: Synthetic oligonucleotide
uagagacugcaucauacau

SEQ ID NO: 1829619 - RNA, 19 nt, Artificial Sequence
  Description of Artificial Sequence: Synthetic oligonucleotide
ugcaccaggacuccuucug

SEQ ID NO: 1829620 - RNA, 19 nt, Artificial Sequence
  Description of Artificial Sequence: Synthetic oligonucleotide
agacugggaguccuacccc

SEQ ID NO: 1829621 - RNA, 19 nt, Artificial Sequence
  Description of Artificial Sequence: Synthetic oligonucleotide
gauaaguagagacuggguu

SEQ ID NO: 1829622 - RNA, 19 nt, Artificial Sequence
  Description of Artificial Sequence: Synthetic oligonucleotide
auagagacugcaucauaca

SEQ ID NO: 1829623 - RNA, 19 nt, Artificial Sequence
  Description of Artificial Sequence: Synthetic oligonucleotide
uuuagagcuuugccuggcc

SEQ ID NO: 1829624 - RNA, 19 nt, Artificial Sequence
  Description of Artificial Sequence: Synthetic oligonucleotide
aaaauaggaccaagggaca

SEQ ID NO: 1829625 - RNA, 19 nt, Artificial Sequence
  Description of Artificial Sequence: Synthetic oligonucleotide
caugaccucagagccaucg

SEQ ID NO: 1829626 - RNA, 19 nt, Artificial Sequence
  Description of Artificial Sequence: Synthetic oligonucleotide
gaacucgagggacacgggc

SEQ ID NO: 1829627 - RNA, 19 nt, Artificial Sequence
  Description of Artificial Sequence: Synthetic oligonucleotide
cagaagaggccguggauag

SEQ ID NO: 1829628 - RNA, 19 nt, Artificial Sequence
  Description of Artificial Sequence: Synthetic oligonucleotide
gucacaaauggccggggag

SEQ ID NO: 1829629 - RNA, 19 nt, Artificial Sequence
  Description of Artificial Sequence: Synthetic oligonucleotide
gucgaugggguucuugaag

SEQ ID NO: 1829630 - RNA, 19 nt, Artificial Sequence
  Description of Artificial Sequence: Synthetic oligonucleotide
caaagaagaugagggaggc

SEQ ID NO: 1829631 - RNA, 19 nt, Artificial Sequence
  Description of Artificial Sequence: Synthetic oligonucleotide
uuagaagcucaccaacgua

SEQ ID NO: 1829632 - RNA, 19 nt, Artificial Sequence
  Description of Artificial Sequence: Synthetic oligonucleotide
acguauaaaccauacugua

SEQ ID NO: 1829633 - RNA, 19 nt, Artificial Sequence
  Description of Artificial Sequence: Synthetic oligonucleotide
ucguuccuggugcaggugc

SEQ ID NO: 1829634 - RNA, 19 nt, Artificial Sequence
  Description of Artificial Sequence: Synthetic oligonucleotide
uggauagaauauuccggga

SEQ ID NO: 1829635 - RNA, 19 nt, Artificial Sequence
  Description of Artificial Sequence: Synthetic oligonucleotide
guaguugaggaugucagca

SEQ ID NO: 1829636 - RNA, 19 nt, Artificial Sequence
  Description of Artificial Sequence: Synthetic oligonucleotide
ucaaacgcucgcgugcccg

SEQ ID NO: 1829637 - RNA, 19 nt, Artificial Sequence
  Description of Artificial Sequence: Synthetic oligonucleotide
ggauagaauauuccgggac

SEQ ID NO: 1829638 - RNA, 19 nt, Artificial Sequence
  Description of Artificial Sequence: Synthetic oligonucleotide
uggucgaugggguucuuga

SEQ ID NO: 1829639 - RNA, 19 nt, Artificial Sequence
  Description of Artificial Sequence: Synthetic oligonucleotide
guggaaguaccuccagagg

SEQ ID NO: 1829640 - RNA, 19 nt, Artificial Sequence
  Description of Artificial Sequence: Synthetic oligonucleotide
uuucaaacgcucgcgugcc

SEQ ID NO: 1829641 - RNA, 19 nt, Artificial Sequence
  Description of Artificial Sequence: Synthetic oligonucleotide
uuuacccuuagaagcucac

SEQ ID NO: 1829642 - RNA, 19 nt, Artificial Sequence
  Description of Artificial Sequence: Synthetic oligonucleotide
auagaauauuccgggacca

SEQ ID NO: 1829643 - RNA, 19 nt, Artificial Sequence
  Description of Artificial Sequence: Synthetic oligonucleotide
acucgagggacacgggcgg

SEQ ID NO: 1829644 - RNA, 19 nt, Artificial Sequence
  Description of Artificial Sequence: Synthetic oligonucleotide
guagaaggcgaguuugcac

SEQ ID NO: 1829645 - RNA, 19 nt, Artificial Sequence
  Description of Artificial Sequence: Synthetic oligonucleotide
gaauuuccaagaucaaggu

SEQ ID NO: 1829646 - RNA, 19 nt, Artificial Sequence
  Description of Artificial Sequence: Synthetic oligonucleotide
gcauguagcagaaugcugc

SEQ ID NO: 1829647 - RNA, 19 nt, Artificial Sequence
  Description of Artificial Sequence: Synthetic oligonucleotide
cuagcagaggagcauucac

SEQ ID NO: 1829648 - RNA, 19 nt, Artificial Sequence
  Description of Artificial Sequence: Synthetic oligonucleotide
acaagacugggaguccuac

SEQ ID NO: 1829649 - RNA, 19 nt, Artificial Sequence
  Description of Artificial Sequence: Synthetic oligonucleotide
aaggcggggauccccgcag

SEQ ID NO: 1829650 - RNA, 19 nt, Artificial Sequence
  Description of Artificial Sequence: Synthetic oligonucleotide
aaguuccccugaaauggac

SEQ ID NO: 1829651 - RNA, 19 nt, Artificial Sequence
  Description of Artificial Sequence: Synthetic oligonucleotide
gaggcagcagaugcguucg

SEQ ID NO: 1829652 - RNA, 19 nt, Artificial Sequence
  Description of Artificial Sequence: Synthetic oligonucleotide
ucuugaagucaguccgcag

SEQ ID NO: 1829653 - RNA, 19 nt, Artificial Sequence
  Description of Artificial Sequence: Synthetic oligonucleotide
uuugcaccaggacuccuuc

SEQ ID NO: 1829654 - RNA, 19 nt, Artificial Sequence
  Description of Artificial Sequence: Synthetic oligonucleotide
acaggcguccgguccauuc

SEQ ID NO: 1829655 - RNA, 19 nt, Artificial Sequence
  Description of Artificial Sequence: Synthetic oligonucleotide
cacacuuagggccggccgg

SEQ ID NO: 1829656 - RNA, 19 nt, Artificial Sequence
  Description of Artificial Sequence: Synthetic oligonucleotide
ugucacaaauggccgggga

SEQ ID NO: 1829657 - RNA, 19 nt, Artificial Sequence
  Description of Artificial Sequence: Synthetic oligonucleotide
ccuuagaagcucaccaacg

SEQ ID NO: 1829658 - RNA, 19 nt, Artificial Sequence
  Description of Artificial Sequence: Synthetic oligonucleotide
ugauagagacugcaucaua

SEQ ID NO: 1829659 - RNA, 19 nt, Artificial Sequence
  Description of Artificial Sequence: Synthetic oligonucleotide
uagagcuuugccuggcccu

SEQ ID NO: 1829660 - RNA, 19 nt, Artificial Sequence
  Description of Artificial Sequence: Synthetic oligonucleotide
gggauaaguagagacuggg

SEQ ID NO: 1829661 - RNA, 19 nt, Artificial Sequence
  Description of Artificial Sequence: Synthetic oligonucleotide
aacgcucgcgugcccgcgc

SEQ ID NO: 1829662 - RNA, 19 nt, Artificial Sequence
  Description of Artificial Sequence: Synthetic oligonucleotide
agcagaaugcugcgaaggu

SEQ ID NO: 1829663 - RNA, 19 nt, Artificial Sequence
  Description of Artificial Sequence: Synthetic oligonucleotide
guaauagaagaaggagagc

SEQ ID NO: 1829664 - RNA, 19 nt, Artificial Sequence
  Description of Artificial Sequence: Synthetic oligonucleotide
caggggaauguugaggccc

SEQ ID NO: 1829665 - RNA, 19 nt, Artificial Sequence
  Description of Artificial Sequence: Synthetic oligonucleotide
cguggauagaauauuccgg

SEQ ID NO: 1829666 - RNA, 19 nt, Artificial Sequence
  Description of Artificial Sequence: Synthetic oligonucleotide
cauucaugauagagacugc

SEQ ID NO: 1829667 - RNA, 19 nt, Artificial Sequence
  Description of Artificial Sequence: Synthetic oligonucleotide
ccguggauagaauauuccg

SEQ ID NO: 1829668 - RNA, 19 nt, Artificial Sequence
  Description of Artificial Sequence: Synthetic oligonucleotide
guagagacuggguuggaaa

SEQ ID NO: 1829669 - RNA, 19 nt, Artificial Sequence
  Description of Artificial Sequence: Synthetic oligonucleotide
cugaaggcggggauccccg

SEQ ID NO: 1829670 - RNA, 19 nt, Artificial Sequence
  Description of Artificial Sequence: Synthetic oligonucleotide
guccgcagcucaucaaagg

SEQ ID NO: 1829671 - RNA, 19 nt, Artificial Sequence
  Description of Artificial Sequence: Synthetic oligonucleotide
aucggcaggacgguggaag

SEQ ID NO: 1829672 - RNA, 19 nt, Artificial Sequence
  Description of Artificial Sequence: Synthetic oligonucleotide
ugcucguuccuggugcagg

SEQ ID NO: 1829673 - RNA, 19 nt, Artificial Sequence
  Description of Artificial Sequence: Synthetic oligonucleotide
ucacccacucugcugcaca

SEQ ID NO: 1829674 - RNA, 19 nt, Artificial Sequence
  Description of Artificial Sequence: Synthetic oligonucleotide
aguugaggaugucagcauu

SEQ ID NO: 1829675 - RNA, 19 nt, Artificial Sequence
  Description of Artificial Sequence: Synthetic oligonucleotide
gugguagaagagcagggga

SEQ ID NO: 1829676 - RNA, 19 nt, Artificial Sequence
  Description of Artificial Sequence: Synthetic oligonucleotide
agacuagggauggggcugc

SEQ ID NO: 1829677 - RNA, 19 nt, Artificial Sequence
  Description of Artificial Sequence: Synthetic oligonucleotide
uuacccuuagaagcucacc

SEQ ID NO: 1829678 - RNA, 19 nt, Artificial Sequence
  Description of Artificial Sequence: Synthetic oligonucleotide
agcauucaccccuguuuag

SEQ ID NO: 1829679 - RNA, 19 nt, Artificial Sequence
  Description of Artificial Sequence: Synthetic oligonucleotide
uugaggaugucagcauuca

SEQ ID NO: 1829680 - RNA, 19 nt, Artificial Sequence
  Description of Artificial Sequence: Synthetic oligonucleotide
gaugggguucuugaaguca

SEQ ID NO: 1829681 - RNA, 19 nt, Artificial Sequence
  Description of Artificial Sequence: Synthetic oligonucleotide
caagacugggaguccuacc

SEQ ID NO: 1829682 - RNA, 19 nt, Artificial Sequence
  Description of Artificial Sequence: Synthetic oligonucleotide
augcugcgaaggugaacgc

SEQ ID NO: 1829683 - RNA, 19 nt, Artificial Sequence
  Description of Artificial Sequence: Synthetic oligonucleotide
uggguuggaaagagagccu

SEQ ID NO: 1829684 - RNA, 19 nt, Artificial Sequence
  Description of Artificial Sequence: Synthetic oligonucleotide
gaggcgcacagcaccaggg

SEQ ID NO: 1829685 - RNA, 19 nt, Artificial Sequence
  Description of Artificial Sequence: Synthetic oligonucleotide
gaagaggccguggauagaa

SEQ ID NO: 1829686 - RNA, 19 nt, Artificial Sequence
  Description of Artificial Sequence: Synthetic oligonucleotide
agaaggcgaguuugcacca

SEQ ID NO: 1829687 - RNA, 19 nt, Artificial Sequence
  Description of Artificial Sequence: Synthetic oligonucleotide
aggcaacauagaaaauagg

SEQ ID NO: 1829688 - RNA, 19 nt, Artificial Sequence
  Description of Artificial Sequence: Synthetic oligonucleotide
aggacgguggaaguaccuc

SEQ ID NO: 1829689 - RNA, 19 nt, Artificial Sequence
  Description of Artificial Sequence: Synthetic oligonucleotide
aagaugagggaggcgcaca

SEQ ID NO: 1829690 - RNA, 19 nt, Artificial Sequence
  Description of Artificial Sequence: Synthetic oligonucleotide
uuccgggaccaccagcuuc

SEQ ID NO: 1829691 - RNA, 19 nt, Artificial Sequence
  Description of Artificial Sequence: Synthetic oligonucleotide
uugucacaaauggccgggg

SEQ ID NO: 1829692 - RNA, 19 nt, Artificial Sequence
  Description of Artificial Sequence: Synthetic oligonucleotide
caccaggacuccuucuggc

SEQ ID NO: 1829693 - RNA, 19 nt, Artificial Sequence
  Description of Artificial Sequence: Synthetic oligonucleotide
ugaggaugucagcauucau

SEQ ID NO: 1829694 - RNA, 19 nt, Artificial Sequence
  Description of Artificial Sequence: Synthetic oligonucleotide
ugcugcgaaggugaacgcc

SEQ ID NO: 1829695 - RNA, 19 nt, Artificial Sequence
  Description of Artificial Sequence: Synthetic oligonucleotide
guuccccuggucgaugggg

SEQ ID NO: 1829696 - RNA, 19 nt, Artificial Sequence
  Description of Artificial Sequence: Synthetic oligonucleotide
agaggccguggauagaaua

SEQ ID NO: 1829697 - RNA, 19 nt, Artificial Sequence
  Description of Artificial Sequence: Synthetic oligonucleotide
ugcccagaauuuccaagau

SEQ ID NO: 1829698 - RNA, 19 nt, Artificial Sequence
  Description of Artificial Sequence: Synthetic oligonucleotide
uccccgcagcagcaguugg

SEQ ID NO: 1829699 - RNA, 19 nt, Artificial Sequence
  Description of Artificial Sequence: Synthetic oligonucleotide
gggucacccacucugcugc

SEQ ID NO: 1829700 - RNA, 19 nt, Artificial Sequence
  Description of Artificial Sequence: Synthetic oligonucleotide
ggacgguggaaguaccucc

SEQ ID NO: 1829701 - RNA, 19 nt, Artificial Sequence
  Description of Artificial Sequence: Synthetic oligonucleotide
aggucugccugguggcagg

SEQ ID NO: 1829702 - RNA, 19 nt, Artificial Sequence
  Description of Artificial Sequence: Synthetic oligonucleotide
uuccccuggucgauggggu

SEQ ID NO: 1829703 - RNA, 19 nt, Artificial Sequence
  Description of Artificial Sequence: Synthetic oligonucleotide
ggcccucggaacucgaggg

SEQ ID NO: 1829704 - RNA, 19 nt, Artificial Sequence
  Description of Artificial Sequence: Synthetic oligonucleotide
acccuuagaagcucaccaa

SEQ ID NO: 1829705 - RNA, 19 nt, Artificial Sequence
  Description of Artificial Sequence: Synthetic oligonucleotide
guuuagagcuuugccuggc

SEQ ID NO: 1829706 - RNA, 19 nt, Artificial Sequence
  Description of Artificial Sequence: Synthetic oligonucleotide
cagacuagggauggggcug

SEQ ID NO: 1829707 - RNA, 19 nt, Artificial Sequence
  Description of Artificial Sequence: Synthetic oligonucleotide
ugagggaggcgcacagcac

SEQ ID NO: 1829708 - RNA, 19 nt, Artificial Sequence
  Description of Artificial Sequence: Synthetic oligonucleotide
gaagaugagggaggcgcac

SEQ ID NO: 1829709 - RNA, 19 nt, Artificial Sequence
  Description of Artificial Sequence: Synthetic oligonucleotide
acuagggauggggcugccc

SEQ ID NO: 1829710 - RNA, 19 nt, Artificial Sequence
  Description of Artificial Sequence: Synthetic oligonucleotide
cuuagaagcucaccaacgu

SEQ ID NO: 1829711 - RNA, 19 nt, Artificial Sequence
  Description of Artificial Sequence: Synthetic oligonucleotide
uucaaacgcucgcgugccc

SEQ ID NO: 1829712 - RNA, 19 nt, Artificial Sequence
  Description of Artificial Sequence: Synthetic oligonucleotide
guaccuccagaggugguag

SEQ ID NO: 1829713 - RNA, 19 nt, Artificial Sequence
  Description of Artificial Sequence: Synthetic oligonucleotide
aaacgcucgcgugcccgcg

SEQ ID NO: 1829714 - RNA, 19 nt, Artificial Sequence
  Description of Artificial Sequence: Synthetic oligonucleotide
ggguuugggauaaguagag

SEQ ID NO: 1829715 - RNA, 19 nt, Artificial Sequence
  Description of Artificial Sequence: Synthetic oligonucleotide
acacuuagggccggccggg

SEQ ID NO: 1829716 - RNA, 19 nt, Artificial Sequence
  Description of Artificial Sequence: Synthetic oligonucleotide
ucgagggacacgggcggcg

SEQ ID NO: 1829717 - RNA, 19 nt, Artificial Sequence
  Description of Artificial Sequence: Synthetic oligonucleotide
uaggggugcacaggcgucc

SEQ ID NO: 1829718 - RNA, 19 nt, Artificial Sequence
  Description of Artificial Sequence: Synthetic oligonucleotide
agggcuaggggugcacagg

SEQ ID NO: 1829719 - RNA, 19 nt, Artificial Sequence
  Description of Artificial Sequence: Synthetic oligonucleotide
gucaguccgcagcucauca

SEQ ID NO: 1829720 - RNA, 19 nt, Artificial Sequence
  Description of Artificial Sequence: Synthetic oligonucleotide
caaacgcucgcgugcccgc

SEQ ID NO: 1829721 - RNA, 19 nt, Artificial Sequence
  Description of Artificial Sequence: Synthetic oligonucleotide
gaauguugaggcccagggu

SEQ ID NO: 1829722 - RNA, 19 nt, Artificial Sequence
  Description of Artificial Sequence: Synthetic oligonucleotide
acgguggaaguaccuccag

SEQ ID NO: 1829723 - RNA, 19 nt, Artificial Sequence
  Description of Artificial Sequence: Synthetic oligonucleotide
gaucaaggucugccuggug

SEQ ID NO: 1829724 - RNA, 19 nt, Artificial Sequence
  Description of Artificial Sequence: Synthetic oligonucleotide
gacaggaugggcuggguuu

SEQ ID NO: 1829725 - RNA, 19 nt, Artificial Sequence
  Description of Artificial Sequence: Synthetic oligonucleotide
caucauacaugaccucaga

SEQ ID NO: 1829726 - RNA, 19 nt, Artificial Sequence
  Description of Artificial Sequence: Synthetic oligonucleotide
acaaauggccggggagggg

SEQ ID NO: 1829727 - RNA, 19 nt, Artificial Sequence
  Description of Artificial Sequence: Synthetic oligonucleotide
aguccgcagcucaucaaag

SEQ ID NO: 1829728 - RNA, 19 nt, Artificial Sequence
  Description of Artificial Sequence: Synthetic oligonucleotide
caccagggugagcauguag

SEQ ID NO: 1829729 - RNA, 19 nt, Artificial Sequence
  Description of Artificial Sequence: Synthetic oligonucleotide
gcagcagaugcguucgaug

SEQ ID NO: 1829730 - RNA, 19 nt, Artificial Sequence
  Description of Artificial Sequence: Synthetic oligonucleotide
ucggcaggacgguggaagu

SEQ ID NO: 1829731 - RNA, 19 nt, Artificial Sequence
  Description of Artificial Sequence: Synthetic oligonucleotide
ggagagggcagacuaggga

SEQ ID NO: 1829732 - RNA, 19 nt, Artificial Sequence
  Description of Artificial Sequence: Synthetic oligonucleotide
cccaaguuccccugaaaug

SEQ ID NO: 1829733 - RNA, 19 nt, Artificial Sequence
  Description of Artificial Sequence: Synthetic oligonucleotide
ugggcuggguuugggauaa

SEQ ID NO: 1829734 - RNA, 19 nt, Artificial Sequence
  Description of Artificial Sequence: Synthetic oligonucleotide
ucaguccgcagcucaucaa

SEQ ID NO: 1829735 - RNA, 19 nt, Artificial Sequence
  Description of Artificial Sequence: Synthetic oligonucleotide
agagggcagacuagggaug

SEQ ID NO: 1829736 - RNA, 19 nt, Artificial Sequence
  Description of Artificial Sequence: Synthetic oligonucleotide
agcagguagaaggcgaguu

SEQ ID NO: 1829737 - RNA, 19 nt, Artificial Sequence
  Description of Artificial Sequence: Synthetic oligonucleotide
cagaggagcauucaccccu

SEQ ID NO: 1829738 - RNA, 19 nt, Artificial Sequence
  Description of Artificial Sequence: Synthetic oligonucleotide
gcaucauacaugaccucag

SEQ ID NO: 1829739 - RNA, 19 nt, Artificial Sequence
  Description of Artificial Sequence: Synthetic oligonucleotide
gaaugcugcgaaggugaac

SEQ ID NO: 1829740 - RNA, 19 nt, Artificial Sequence
  Description of Artificial Sequence: Synthetic oligonucleotide
ggugccggacuccuccagg

SEQ ID NO: 1829741 - RNA, 19 nt, Artificial Sequence
  Description of Artificial Sequence: Synthetic oligonucleotide
gacgguggaaguaccucca

SEQ ID NO: 1829742 - RNA, 19 nt, Artificial Sequence
  Description of Artificial Sequence: Synthetic oligonucleotide
cagcagaugcguucgaugu

SEQ ID NO: 1829743 - RNA, 19 nt, Artificial Sequence
  Description of Artificial Sequence: Synthetic oligonucleotide
ggguuggaaagagagccug

SEQ ID NO: 1829744 - RNA, 19 nt, Artificial Sequence
  Description of Artificial Sequence: Synthetic oligonucleotide
aggcggggauccccgcagc

SEQ ID NO: 1829745 - RNA, 19 nt, Artificial Sequence
  Description of Artificial Sequence: Synthetic oligonucleotide
ugaaggcggggauccccgc

SEQ ID NO: 1829746 - RNA, 19 nt, Artificial Sequence
  Description of Artificial Sequence: Synthetic oligonucleotide
gccggcuuuacccuuagaa

SEQ ID NO: 1829747 - RNA, 19 nt, Artificial Sequence
  Description of Artificial Sequence: Synthetic oligonucleotide
gcaccaggacuccuucugg

SEQ ID NO: 1829748 - RNA, 19 nt, Artificial Sequence
  Description of Artificial Sequence: Synthetic oligonucleotide
ugccggacuccuccaggca

SEQ ID NO: 1829749 - RNA, 19 nt, Artificial Sequence
  Description of Artificial Sequence: Synthetic oligonucleotide
aguaccuccagagguggua

SEQ ID NO: 1829750 - RNA, 19 nt, Artificial Sequence
  Description of Artificial Sequence: Synthetic oligonucleotide
cucggaacucgagggacac

SEQ ID NO: 1829751 - RNA, 19 nt, Artificial Sequence
  Description of Artificial Sequence: Synthetic oligonucleotide
gagggacacgggcggcgcg

SEQ ID NO: 1829752 - RNA, 19 nt, Artificial Sequence
  Description of Artificial Sequence: Synthetic oligonucleotide
cccuuagaagcucaccaac

SEQ ID NO: 1829753 - RNA, 19 nt, Artificial Sequence
  Description of Artificial Sequence: Synthetic oligonucleotide
ggaguccuaccccuuccag

SEQ ID NO: 1829754 - RNA, 19 nt, Artificial Sequence
  Description of Artificial Sequence: Synthetic oligonucleotide
cagcugcaggcuagcagag

SEQ ID NO: 1829755 - RNA, 19 nt, Artificial Sequence
  Description of Artificial Sequence: Synthetic oligonucleotide
ggaggcgcacagcaccagg

SEQ ID NO: 1829756 - RNA, 19 nt, Artificial Sequence
  Description of Artificial Sequence: Synthetic oligonucleotide
ucggaacucgagggacacg

SEQ ID NO: 1829757 - RNA, 19 nt, Artificial Sequence
  Description of Artificial Sequence: Synthetic oligonucleotide
agcagaugcguucgauguu

SEQ ID NO: 1829758 - RNA, 19 nt, Artificial Sequence
  Description of Artificial Sequence: Synthetic oligonucleotide
gccugcucguuccuggugc

SEQ ID NO: 1829759 - RNA, 19 nt, Artificial Sequence
  Description of Artificial Sequence: Synthetic oligonucleotide
gggcuaggggugcacaggc

SEQ ID NO: 1829760 - RNA, 19 nt, Artificial Sequence
  Description of Artificial Sequence: Synthetic oligonucleotide
gacugggaguccuaccccu

SEQ ID NO: 1829761 - RNA, 19 nt, Artificial Sequence
  Description of Artificial Sequence: Synthetic oligonucleotide
ugucagcauucaugauaga

SEQ ID NO: 1829762 - RNA, 19 nt, Artificial Sequence
  Description of Artificial Sequence: Synthetic oligonucleotide
gcagaaugcugcgaaggug

SEQ ID NO: 1829763 - RNA, 19 nt, Artificial Sequence
  Description of Artificial Sequence: Synthetic oligonucleotide
gcgaguuugcaccaggacu

SEQ ID NO: 1829764 - RNA, 19 nt, Artificial Sequence
  Description of Artificial Sequence: Synthetic oligonucleotide
uggccggcuuuacccuuag

SEQ ID NO: 1829765 - RNA, 19 nt, Artificial Sequence
  Description of Artificial Sequence: Synthetic oligonucleotide
aggcgcacagcaccagggu

SEQ ID NO: 1829766 - RNA, 19 nt, Artificial Sequence
  Description of Artificial Sequence: Synthetic oligonucleotide
uguugaggcccagggucac

SEQ ID NO: 1829767 - RNA, 19 nt, Artificial Sequence
  Description of Artificial Sequence: Synthetic oligonucleotide
agcauucaugauagagacu

SEQ ID NO: 1829768 - RNA, 19 nt, Artificial Sequence
  Description of Artificial Sequence: Synthetic oligonucleotide
cggaacucgagggacacgg

SEQ ID NO: 1829769 - RNA, 19 nt, Artificial Sequence
  Description of Artificial Sequence: Synthetic oligonucleotide
cacccacucugcugcacac

SEQ ID NO: 1829770 - RNA, 19 nt, Artificial Sequence
  Description of Artificial Sequence: Synthetic oligonucleotide
agccugcucguuccuggug

SEQ ID NO: 1829771 - RNA, 19 nt, Artificial Sequence
  Description of Artificial Sequence: Synthetic oligonucleotide
ggcgcacagcaccagggug

SEQ ID NO: 1829772 - RNA, 19 nt, Artificial Sequence
  Description of Artificial Sequence: Synthetic oligonucleotide
auguagcagaaugcugcga

SEQ ID NO: 1829773 - RNA, 19 nt, Artificial Sequence
  Description of Artificial Sequence: Synthetic oligonucleotide
aagucaguccgcagcucau

SEQ ID NO: 1829774 - RNA, 19 nt, Artificial Sequence
  Description of Artificial Sequence: Synthetic oligonucleotide
cugggaguccuaccccuuc

SEQ ID NO: 1829775 - RNA, 19 nt, Artificial Sequence
  Description of Artificial Sequence: Synthetic oligonucleotide
agaggagcauucaccccug

SEQ ID NO: 1829776 - RNA, 19 nt, Artificial Sequence
  Description of Artificial Sequence: Synthetic oligonucleotide
gcagaggagcauucacccc

SEQ ID NO: 1829777 - RNA, 19 nt, Artificial Sequence
  Description of Artificial Sequence: Synthetic oligonucleotide
gccaucggcaggacggugg

SEQ ID NO: 1829778 - RNA, 19 nt, Artificial Sequence
  Description of Artificial Sequence: Synthetic oligonucleotide
ggcgaguuugcaccaggac

SEQ ID NO: 1829779 - RNA, 19 nt, Artificial Sequence
  Description of Artificial Sequence: Synthetic oligonucleotide
ggcaggacgguggaaguac

SEQ ID NO: 1829780 - RNA, 19 nt, Artificial Sequence
  Description of Artificial Sequence: Synthetic oligonucleotide
caguccgcagcucaucaaa

SEQ ID NO: 1829781 - RNA, 19 nt, Artificial Sequence
  Description of Artificial Sequence: Synthetic oligonucleotide
gguagaaggcgaguuugca

SEQ ID NO: 1829782 - RNA, 19 nt, Artificial Sequence
  Description of Artificial Sequence: Synthetic oligonucleotide
ggagcauucaccccuguuu

SEQ ID NO: 1829783 - RNA, 19 nt, Artificial Sequence
  Description of Artificial Sequence: Synthetic oligonucleotide
gcucaccaacguauaaacc

SEQ ID NO: 1829784 - RNA, 19 nt, Artificial Sequence
  Description of Artificial Sequence: Synthetic oligonucleotide
aaguaccuccagagguggu

SEQ ID NO: 1829785 - RNA, 19 nt, Artificial Sequence
  Description of Artificial Sequence: Synthetic oligonucleotide
gcugcgaaggugaacgcca

SEQ ID NO: 1829786 - RNA, 19 nt, Artificial Sequence
  Description of Artificial Sequence: Synthetic oligonucleotide
ggggcugcccagaauuucc

SEQ ID NO: 1829787 - RNA, 19 nt, Artificial Sequence
  Description of Artificial Sequence: Synthetic oligonucleotide
uuagggccggccgggcaug

SEQ ID NO: 1829788 - RNA, 19 nt, Artificial Sequence
  Description of Artificial Sequence: Synthetic oligonucleotide
gaggccguggauagaauau

SEQ ID NO: 1829789 - RNA, 19 nt, Artificial Sequence
  Description of Artificial Sequence: Synthetic oligonucleotide
cuggcccuaguuggagggg

SEQ ID NO: 1829790 - RNA, 19 nt, Artificial Sequence
  Description of Artificial Sequence: Synthetic oligonucleotide
aguuugcaccaggacuccu

SEQ ID NO: 1829791 - RNA, 19 nt, Artificial Sequence
  Description of Artificial Sequence: Synthetic oligonucleotide
acgggcggcgcguccagga

SEQ ID NO: 1829792 - RNA, 19 nt, Artificial Sequence
  Description of Artificial Sequence: Synthetic oligonucleotide
cccuuccaggacaacugcc

SEQ ID NO: 1829793 - RNA, 19 nt, Artificial Sequence
  Description of Artificial Sequence: Synthetic oligonucleotide
gucugggcgcaaggggacg

SEQ ID NO: 1829794 - RNA, 19 nt, Artificial Sequence
  Description of Artificial Sequence: Synthetic oligonucleotide
gcaggggaauguugaggcc

SEQ ID NO: 1829795 - RNA, 19 nt, Artificial Sequence
  Description of Artificial Sequence: Synthetic oligonucleotide
ggagagcucugaaggcggg

SEQ ID NO: 1829796 - RNA, 19 nt, Artificial Sequence
  Description of Artificial Sequence: Synthetic oligonucleotide
uggguuccccuggucgaug

SEQ ID NO: 1829797 - RNA, 19 nt, Artificial Sequence
  Description of Artificial Sequence: Synthetic oligonucleotide
agggcagacuagggauggg

SEQ ID NO: 1829798 - RNA, 19 nt, Artificial Sequence
  Description of Artificial Sequence: Synthetic oligonucleotide
ugggcgcaaggggacgccc

SEQ ID NO: 1829799 - RNA, 19 nt, Artificial Sequence
  Description of Artificial Sequence: Synthetic oligonucleotide
ucaccccuguuuagagcuu

SEQ ID NO: 1829800 - RNA, 19 nt, Artificial Sequence
  Description of Artificial Sequence: Synthetic oligonucleotide
cuggucgaugggguucuug

SEQ ID NO: 1829801 - RNA, 19 nt, Artificial Sequence
  Description of Artificial Sequence: Synthetic oligonucleotide
auccccgcagcagcaguug

SEQ ID NO: 1829802 - RNA, 19 nt, Artificial Sequence
  Description of Artificial Sequence: Synthetic oligonucleotide
ggaacucgagggacacggg

SEQ ID NO: 1829803 - RNA, 19 nt, Artificial Sequence
  Description of Artificial Sequence: Synthetic oligonucleotide
uccgguccauucugggcuu

SEQ ID NO: 1829804 - RNA, 19 nt, Artificial Sequence
  Description of Artificial Sequence: Synthetic oligonucleotide
aagaggccguggauagaau

SEQ ID NO: 1829805 - RNA, 19 nt, Artificial Sequence
  Description of Artificial Sequence: Synthetic oligonucleotide
gcguccgguccauucuggg

SEQ ID NO: 1829806 - RNA, 19 nt, Artificial Sequence
  Description of Artificial Sequence: Synthetic oligonucleotide
gcauucaccccuguuuaga

SEQ ID NO: 1829807 - RNA, 19 nt, Artificial Sequence
  Description of Artificial Sequence: Synthetic oligonucleotide
gccuggcccuaguuggagg

SEQ ID NO: 1829808 - RNA, 19 nt, Artificial Sequence
  Description of Artificial Sequence: Synthetic oligonucleotide
caccaacguauaaaccaua

SEQ ID NO: 1829809 - RNA, 19 nt, Artificial Sequence
  Description of Artificial Sequence: Synthetic oligonucleotide
cgcuggguuccccuggucg

SEQ ID NO: 1829810 - RNA, 19 nt, Artificial Sequence
  Description of Artificial Sequence: Synthetic oligonucleotide
aggccguggauagaauauu

SEQ ID NO: 1829811 - RNA, 19 nt, Artificial Sequence
  Description of Artificial Sequence: Synthetic oligonucleotide
agaaugcugcgaaggugaa

SEQ ID NO: 1829812 - RNA, 19 nt, Artificial Sequence
  Description of Artificial Sequence: Synthetic oligonucleotide
ggccguggauagaauauuc

SEQ ID NO: 1829813 - RNA, 19 nt, Artificial Sequence
  Description of Artificial Sequence: Synthetic oligonucleotide
agacuggguuggaaagaga

SEQ ID NO: 1829814 - RNA, 19 nt, Artificial Sequence
  Description of Artificial Sequence: Synthetic oligonucleotide
gacacgggcggcgcgucca

SEQ ID NO: 1829815 - RNA, 19 nt, Artificial Sequence
  Description of Artificial Sequence: Synthetic oligonucleotide
aggcgaguuugcaccagga

SEQ ID NO: 1829816 - RNA, 19 nt, Artificial Sequence
  Description of Artificial Sequence: Synthetic oligonucleotide
auggcccucggaacucgag

SEQ ID NO: 1829817 - RNA, 19 nt, Artificial Sequence
  Description of Artificial Sequence: Synthetic oligonucleotide
acacgggcggcgcguccag

SEQ ID NO: 1829818 - RNA, 19 nt, Artificial Sequence
  Description of Artificial Sequence: Synthetic oligonucleotide
cccgcagcagcaguugggg

SEQ ID NO: 1829819 - RNA, 19 nt, Artificial Sequence
  Description of Artificial Sequence: Synthetic oligonucleotide
auuccgggaccaccagcuu

SEQ ID NO: 1829820 - RNA, 19 nt, Artificial Sequence
  Description of Artificial Sequence: Synthetic oligonucleotide
aggcuagcagaggagcauu

SEQ ID NO: 1829821 - RNA, 19 nt, Artificial Sequence
  Description of Artificial Sequence: Synthetic oligonucleotide
cucgcgugcccgcgcuggg

SEQ ID NO: 1829822 - RNA, 19 nt, Artificial Sequence
  Description of Artificial Sequence: Synthetic oligonucleotide
cucgagggacacgggcggc

SEQ ID NO: 1829823 - RNA, 19 nt, Artificial Sequence
  Description of Artificial Sequence: Synthetic oligonucleotide
cucguuccuggugcaggug

SEQ ID NO: 1829824 - RNA, 19 nt, Artificial Sequence
  Description of Artificial Sequence: Synthetic oligonucleotide
ccccuuccaggacaacugc

SEQ ID NO: 1829825 - RNA, 19 nt, Artificial Sequence
  Description of Artificial Sequence: Synthetic oligonucleotide
agggacacgggcggcgcgu

SEQ ID NO: 1829826 - RNA, 19 nt, Artificial Sequence
  Description of Artificial Sequence: Synthetic oligonucleotide
ggauaaguagagacugggu

SEQ ID NO: 1829827 - RNA, 19 nt, Artificial Sequence
  Description of Artificial Sequence: Synthetic oligonucleotide
ggcuaggggugcacaggcg

SEQ ID NO: 1829828 - RNA, 19 nt, Artificial Sequence
  Description of Artificial Sequence: Synthetic oligonucleotide
uagggccggccgggcaugg

SEQ ID NO: 1829829 - RNA, 19 nt, Artificial Sequence
  Description of Artificial Sequence: Synthetic oligonucleotide
ccccugaaauggacaagac

SEQ ID NO: 1829830 - RNA, 19 nt, Artificial Sequence
  Description of Artificial Sequence: Synthetic oligonucleotide
gcuuuacccuuagaagcuc

SEQ ID NO: 1829831 - RNA, 19 nt, Artificial Sequence
  Description of Artificial Sequence: Synthetic oligonucleotide
ggcguccgguccauucugg

SEQ ID NO: 1829832 - RNA, 19 nt, Artificial Sequence
  Description of Artificial Sequence: Synthetic oligonucleotide
gggaguccuaccccuucca

SEQ ID NO: 1829833 - RNA, 19 nt, Artificial Sequence
  Description of Artificial Sequence: Synthetic oligonucleotide
gacuagggauggggcugcc

SEQ ID NO: 1829834 - RNA, 19 nt, Artificial Sequence
  Description of Artificial Sequence: Synthetic oligonucleotide
cugcucguuccuggugcag

SEQ ID NO: 1829835 - RNA, 19 nt, Artificial Sequence
  Description of Artificial Sequence: Synthetic oligonucleotide
acgcucgcgugcccgcgcu

SEQ ID NO: 1829836 - RNA, 19 nt, Artificial Sequence
  Description of Artificial Sequence: Synthetic oligonucleotide
gcauggcccucggaacucg

SEQ ID NO: 1829837 - RNA, 19 nt, Artificial Sequence
  Description of Artificial Sequence: Synthetic oligonucleotide
aggcagcagaugcguucga

SEQ ID NO: 1829838 - RNA, 19 nt, Artificial Sequence
  Description of Artificial Sequence: Synthetic oligonucleotide
cugggcgcaaggggacgcc

SEQ ID NO: 1829839 - RNA, 19 nt, Artificial Sequence
  Description of Artificial Sequence: Synthetic oligonucleotide
cacuuagggccggccgggc

SEQ ID NO: 1829840 - RNA, 19 nt, Artificial Sequence
  Description of Artificial Sequence: Synthetic oligonucleotide
gguagaagagcaggggaau

SEQ ID NO: 1829841 - RNA, 19 nt, Artificial Sequence
  Description of Artificial Sequence: Synthetic oligonucleotide
agccaucggcaggacggug

SEQ ID NO: 1829842 - RNA, 19 nt, Artificial Sequence
  Description of Artificial Sequence: Synthetic oligonucleotide
gggcggcgcguccaggacc

SEQ ID NO: 1829843 - RNA, 19 nt, Artificial Sequence
  Description of Artificial Sequence: Synthetic oligonucleotide
gcaggacgguggaaguacc

SEQ ID NO: 1829844 - RNA, 19 nt, Artificial Sequence
  Description of Artificial Sequence: Synthetic oligonucleotide
caaggucugccugguggca

SEQ ID NO: 1829845 - RNA, 19 nt, Artificial Sequence
  Description of Artificial Sequence: Synthetic oligonucleotide
cuucagggugagggccaag

SEQ ID NO: 1829846 - RNA, 19 nt, Artificial Sequence
  Description of Artificial Sequence: Synthetic oligonucleotide
gcggggucugggcgcaagg

SEQ ID NO: 1829847 - RNA, 19 nt, Artificial Sequence
  Description of Artificial Sequence: Synthetic oligonucleotide
gggccggccgggcauggcc

SEQ ID NO: 1829848 - RNA, 19 nt, Artificial Sequence
  Description of Artificial Sequence: Synthetic oligonucleotide
cauggcccucggaacucga

SEQ ID NO: 1829849 - RNA, 19 nt, Artificial Sequence
  Description of Artificial Sequence: Synthetic oligonucleotide
gcucgcgugcccgcgcugg

SEQ ID NO: 1829850 - RNA, 19 nt, Artificial Sequence
  Description of Artificial Sequence: Synthetic oligonucleotide
ccggacuccuccaggcaac

SEQ ID NO: 1829851 - RNA, 19 nt, Artificial Sequence
  Description of Artificial Sequence: Synthetic oligonucleotide
cccucggaacucgagggac

SEQ ID NO: 1829852 - RNA, 19 nt, Artificial Sequence
  Description of Artificial Sequence: Synthetic oligonucleotide
gcaggcuagcagaggagca

SEQ ID NO: 1829853 - RNA, 19 nt, Artificial Sequence
  Description of Artificial Sequence: Synthetic oligonucleotide
caggaggcagcagaugcgu

SEQ ID NO: 1829854 - RNA, 19 nt, Artificial Sequence
  Description of Artificial Sequence: Synthetic oligonucleotide
gccggacuccuccaggcaa

SEQ ID NO: 1829855 - RNA, 19 nt, Artificial Sequence
  Description of Artificial Sequence: Synthetic oligonucleotide
cggcccacacuuagggccg

SEQ ID NO: 1829856 - RNA, 19 nt, Artificial Sequence
  Description of Artificial Sequence: Synthetic oligonucleotide
ccccuguuuagagcuuugc

SEQ ID NO: 1829857 - RNA, 19 nt, Artificial Sequence
  Description of Artificial Sequence: Synthetic oligonucleotide
agggccggccgggcauggc

SEQ ID NO: 1829858 - RNA, 19 nt, Artificial Sequence
  Description of Artificial Sequence: Synthetic oligonucleotide
ggggugcacaggcguccgg

SEQ ID NO: 1829859 - RNA, 19 nt, Artificial Sequence
  Description of Artificial Sequence: Synthetic oligonucleotide
ggcuagcagaggagcauuc

SEQ ID NO: 1829860 - RNA, 19 nt, Artificial Sequence
  Description of Artificial Sequence: Synthetic oligonucleotide
guuugcaccaggacuccuu

SEQ ID NO: 1829861 - RNA, 19 nt, Artificial Sequence
  Description of Artificial Sequence: Synthetic oligonucleotide
ccaacguauaaaccauacu

SEQ ID NO: 1829862 - RNA, 19 nt, Artificial Sequence
  Description of Artificial Sequence: Synthetic oligonucleotide
acugggaguccuaccccuu

SEQ ID NO: 1829863 - RNA, 19 nt, Artificial Sequence
  Description of Artificial Sequence: Synthetic oligonucleotide
cccugaaauggacaagacu

SEQ ID NO: 1829864 - RNA, 19 nt, Artificial Sequence
  Description of Artificial Sequence: Synthetic oligonucleotide
gucugccugguggcagggc

SEQ ID NO: 1829865 - RNA, 19 nt, Artificial Sequence
  Description of Artificial Sequence: Synthetic oligonucleotide
cauauugagccugcucguu

SEQ ID NO: 1829866 - RNA, 19 nt, Artificial Sequence
  Description of Artificial Sequence: Synthetic oligonucleotide
gagcagguagaaggcgagu

SEQ ID NO: 1829867 - RNA, 19 nt, Artificial Sequence
  Description of Artificial Sequence: Synthetic oligonucleotide
ucgcgugcccgcgcugggu

SEQ ID NO: 1829868 - RNA, 19 nt, Artificial Sequence
  Description of Artificial Sequence: Synthetic oligonucleotide
caggcguccgguccauucu

SEQ ID NO: 1829869 - RNA, 19 nt, Artificial Sequence
  Description of Artificial Sequence: Synthetic oligonucleotide
gaggagcauucaccccugu

SEQ ID NO: 1829870 - RNA, 19 nt, Artificial Sequence
  Description of Artificial Sequence: Synthetic oligonucleotide
ccauauugagccugcucgu

SEQ ID NO: 1829871 - RNA, 19 nt, Artificial Sequence
  Description of Artificial Sequence: Synthetic oligonucleotide
agcgcggggucugggcgca

SEQ ID NO: 1829872 - RNA, 19 nt, Artificial Sequence
  Description of Artificial Sequence: Synthetic oligonucleotide
cuggccggcuuuacccuua

SEQ ID NO: 1829873 - RNA, 19 nt, Artificial Sequence
  Description of Artificial Sequence: Synthetic oligonucleotide
gcagaugcguucgauguuu

SEQ ID NO: 1829874 - RNA, 19 nt, Artificial Sequence
  Description of Artificial Sequence: Synthetic oligonucleotide
ccgggcauggcccucggaa

SEQ ID NO: 1829875 - RNA, 19 nt, Artificial Sequence
  Description of Artificial Sequence: Synthetic oligonucleotide
ccucggaacucgagggaca

SEQ ID NO: 1829876 - RNA, 19 nt, Artificial Sequence
  Description of Artificial Sequence: Synthetic oligonucleotide
cgggcauggcccucggaac

SEQ ID NO: 1829877 - RNA, 19 nt, Artificial Sequence
  Description of Artificial Sequence: Synthetic oligonucleotide
cuaccccuuccaggacaac

SEQ ID NO: 1829878 - RNA, 19 nt, Artificial Sequence
  Description of Artificial Sequence: Synthetic oligonucleotide
ccuaccccuuccaggacaa

SEQ ID NO: 1829879 - RNA, 19 nt, Artificial Sequence
  Description of Artificial Sequence: Synthetic oligonucleotide
ggacacgggcggcgcgucc

SEQ ID NO: 1829880 - RNA, 19 nt, Artificial Sequence
  Description of Artificial Sequence: Synthetic oligonucleotide
aggaggcagcagaugcguu

SEQ ID NO: 1829881 - RNA, 19 nt, Artificial Sequence
  Description of Artificial Sequence: Synthetic oligonucleotide
ggcccaaguuccccugaaa

SEQ ID NO: 1829882 - RNA, 19 nt, Artificial Sequence
  Description of Artificial Sequence: Synthetic oligonucleotide
gcccucggaacucgaggga

SEQ ID NO: 1829883 - RNA, 19 nt, Artificial Sequence
  Description of Artificial Sequence: Synthetic oligonucleotide
ccauacuguacagguaaua

SEQ ID NO: 1829884 - RNA, 19 nt, Artificial Sequence
  Description of Artificial Sequence: Synthetic oligonucleotide
cacgggcggcgcguccagg

SEQ ID NO: 1829885 - RNA, 19 nt, Artificial Sequence
  Description of Artificial Sequence: Synthetic oligonucleotide
gggcgcaaggggacgcccc

SEQ ID NO: 1829886 - RNA, 19 nt, Artificial Sequence
  Description of Artificial Sequence: Synthetic oligonucleotide
gagccaucggcaggacggu

SEQ ID NO: 1829887 - RNA, 19 nt, Artificial Sequence
  Description of Artificial Sequence: Synthetic oligonucleotide
cugcgaaggugaacgccau

SEQ ID NO: 1829888 - RNA, 19 nt, Artificial Sequence
  Description of Artificial Sequence: Synthetic oligonucleotide
ccgcgcuggguuccccugg

SEQ ID NO: 1829889 - RNA, 19 nt, Artificial Sequence
  Description of Artificial Sequence: Synthetic oligonucleotide
ggccggccgggcauggccc

SEQ ID NO: 1829890 - RNA, 19 nt, Artificial Sequence
  Description of Artificial Sequence: Synthetic oligonucleotide
ggauccccgcagcagcagu

SEQ ID NO: 1829891 - RNA, 19 nt, Artificial Sequence
  Description of Artificial Sequence: Synthetic oligonucleotide
ccaucggcaggacggugga

SEQ ID NO: 1829892 - RNA, 19 nt, Artificial Sequence
  Description of Artificial Sequence: Synthetic oligonucleotide
ggcccacacuuagggccgg

SEQ ID NO: 1829893 - RNA, 19 nt, Artificial Sequence
  Description of Artificial Sequence: Synthetic oligonucleotide
ccugcucguuccuggugca

SEQ ID NO: 1829894 - RNA, 19 nt, Artificial Sequence
  Description of Artificial Sequence: Synthetic oligonucleotide
ggacaggaugggcuggguu

SEQ ID NO: 1829895 - RNA, 19 nt, Artificial Sequence
  Description of Artificial Sequence: Synthetic oligonucleotide
cagaugcguucgauguuuu

SEQ ID NO: 1829896 - RNA, 19 nt, Artificial Sequence
  Description of Artificial Sequence: Synthetic oligonucleotide
ggggugccggacuccucca

SEQ ID NO: 1829897 - RNA, 19 nt, Artificial Sequence
  Description of Artificial Sequence: Synthetic oligonucleotide
ugcccgcgcuggguucccc

SEQ ID NO: 1829898 - RNA, 19 nt, Artificial Sequence
  Description of Artificial Sequence: Synthetic oligonucleotide
gggcccaaguuccccugaa

SEQ ID NO: 1829899 - RNA, 19 nt, Artificial Sequence
  Description of Artificial Sequence: Synthetic oligonucleotide
ggccgggcauggcccucgg

SEQ ID NO: 1829900 - RNA, 19 nt, Artificial Sequence
  Description of Artificial Sequence: Synthetic oligonucleotide
cccgcgcuggguuccccug

SEQ ID NO: 1829901 - RNA, 19 nt, Artificial Sequence
  Description of Artificial Sequence: Synthetic oligonucleotide
cgguggaaguaccuccaga

SEQ ID NO: 1829902 - RNA, 19 nt, Artificial Sequence
  Description of Artificial Sequence: Synthetic oligonucleotide
ggcuugcucccuggccggc

SEQ ID NO: 1829903 - RNA, 19 nt, Artificial Sequence
  Description of Artificial Sequence: Synthetic oligonucleotide
cuugcucccuggccggcuu

SEQ ID NO: 1829904 - RNA, 19 nt, Artificial Sequence
  Description of Artificial Sequence: Synthetic oligonucleotide
gugcccgcgcuggguuccc

SEQ ID NO: 1829905 - RNA, 19 nt, Artificial Sequence
  Description of Artificial Sequence: Synthetic oligonucleotide
caucggcaggacgguggaa

SEQ ID NO: 1829906 - RNA, 19 nt, Artificial Sequence
  Description of Artificial Sequence: Synthetic oligonucleotide
caccccuguuuagagcuuu

SEQ ID NO: 1829907 - RNA, 19 nt, Artificial Sequence
  Description of Artificial Sequence: Synthetic oligonucleotide
ggggcgccagcgcgggguc

SEQ ID NO: 1829908 - RNA, 19 nt, Artificial Sequence
  Description of Artificial Sequence: Synthetic oligonucleotide
gcucccuggccggcuuuac

SEQ ID NO: 1829909 - RNA, 19 nt, Artificial Sequence
  Description of Artificial Sequence: Synthetic oligonucleotide
cgguccauucugggcuugc

SEQ ID NO: 1829910 - RNA, 19 nt, Artificial Sequence
  Description of Artificial Sequence: Synthetic oligonucleotide
ggccggcuuuacccuuaga

SEQ ID NO: 1829911 - RNA, 19 nt, Artificial Sequence
  Description of Artificial Sequence: Synthetic oligonucleotide
gggacacgggcggcgcguc

SEQ ID NO: 1829912 - RNA, 19 nt, Artificial Sequence
  Description of Artificial Sequence: Synthetic oligonucleotide
gcgccagcgcggggucugg

SEQ ID NO: 1829913 - RNA, 19 nt, Artificial Sequence
  Description of Artificial Sequence: Synthetic oligonucleotide
ccgguccauucugggcuug

SEQ ID NO: 1829914 - RNA, 19 nt, Artificial Sequence
  Description of Artificial Sequence: Synthetic oligonucleotide
gggcuggguuugggauaag

SEQ ID NO: 1829915 - RNA, 19 nt, Artificial Sequence
  Description of Artificial Sequence: Synthetic oligonucleotide
cgggcggcgcguccaggac

SEQ ID NO: 1829916 - RNA, 19 nt, Artificial Sequence
  Description of Artificial Sequence: Synthetic oligonucleotide
cgcggggucugggcgcaag

SEQ ID NO: 1829917 - RNA, 19 nt, Artificial Sequence
  Description of Artificial Sequence: Synthetic oligonucleotide
gcccgcgcuggguuccccu

SEQ ID NO: 1829918 - RNA, 19 nt, Artificial Sequence
  Description of Artificial Sequence: Synthetic oligonucleotide
gcccagggucacccacucu

SEQ ID NO: 1829919 - RNA, 19 nt, Artificial Sequence
  Description of Artificial Sequence: Synthetic oligonucleotide
cggacuccuccaggcaaca

SEQ ID NO: 1829920 - RNA, 19 nt, Artificial Sequence
  Description of Artificial Sequence: Synthetic oligonucleotide
ccuggccggcuuuacccuu

SEQ ID NO: 1829921 - RNA, 19 nt, Artificial Sequence
  Description of Artificial Sequence: Synthetic oligonucleotide
gccggccgggcauggcccu

SEQ ID NO: 1829922 - RNA, 19 nt, Artificial Sequence
  Description of Artificial Sequence: Synthetic oligonucleotide
cgccagcgcggggucuggg

SEQ ID NO: 1829923 - RNA, 19 nt, Artificial Sequence
  Description of Artificial Sequence: Synthetic oligonucleotide
cgcucgcgugcccgcgcug

SEQ ID NO: 1829924 - RNA, 19 nt, Artificial Sequence
  Description of Artificial Sequence: Synthetic oligonucleotide
cggcaggacgguggaagua

SEQ ID NO: 1829925 - RNA, 19 nt, Artificial Sequence
  Description of Artificial Sequence: Synthetic oligonucleotide
ccggccgggcauggcccuc

SEQ ID NO: 1829926 - RNA, 19 nt, Artificial Sequence
  Description of Artificial Sequence: Synthetic oligonucleotide
cacaggcguccgguccauu

SEQ ID NO: 1829927 - RNA, 19 nt, Artificial Sequence
  Description of Artificial Sequence: Synthetic oligonucleotide
gggcgccagcgcggggucu

SEQ ID NO: 1829928 - RNA, 19 nt, Artificial Sequence
  Description of Artificial Sequence: Synthetic oligonucleotide
cgcgugcccgcgcuggguu

SEQ ID NO: 1829929 - RNA, 19 nt, Artificial Sequence
  Description of Artificial Sequence: Synthetic oligonucleotide
gcgcggggucugggcgcaa

SEQ ID NO: 1829930 - RNA, 19 nt, Artificial Sequence
  Description of Artificial Sequence: Synthetic oligonucleotide
aaauauuucaaauggaauc

SEQ ID NO: 1829931 - RNA, 19 nt, Artificial Sequence
  Description of Artificial Sequence: Synthetic oligonucleotide
uuuauauagacuaacuugg

SEQ ID NO: 1829932 - RNA, 19 nt, Artificial Sequence
  Description of Artificial Sequence: Synthetic oligonucleotide
uauagguauauuaagaaca

SEQ ID NO: 1829933 - RNA, 19 nt, Artificial Sequence
  Description of Artificial Sequence: Synthetic oligonucleotide
aacgcuacaaucucugugc

SEQ ID NO: 1829934 - RNA, 19 nt, Artificial Sequence
  Description of Artificial Sequence: Synthetic oligonucleotide
auauacucgaguuuuaggg

SEQ ID NO: 1829935 - RNA, 19 nt, Artificial Sequence
  Description of Artificial Sequence: Synthetic oligonucleotide
aaaugaucaacauuucuca

SEQ ID NO: 1829936 - RNA, 19 nt, Artificial Sequence
  Description of Artificial Sequence: Synthetic oligonucleotide
aagcaguugauucuuuggc

SEQ ID NO: 1829937 - RNA, 19 nt, Artificial Sequence
  Description of Artificial Sequence: Synthetic oligonucleotide
aaucauugauaguauguuc

SEQ ID NO: 1829938 - RNA, 19 nt, Artificial Sequence
  Description of Artificial Sequence: Synthetic oligonucleotide
gacagauccuuuuauauag

SEQ ID NO: 1829939 - RNA, 19 nt, Artificial Sequence
  Description of Artificial Sequence: Synthetic oligonucleotide
gauggauuaggcuugcagg

SEQ ID NO: 1829940 - RNA, 19 nt, Artificial Sequence
  Description of Artificial Sequence: Synthetic oligonucleotide
auauagguauauuaagaac

SEQ ID NO: 1829941 - RNA, 19 nt, Artificial Sequence
  Description of Artificial Sequence: Synthetic oligonucleotide
aaauggaaucucuccaugg

SEQ ID NO: 1829942 - RNA, 19 nt, Artificial Sequence
  Description of Artificial Sequence: Synthetic oligonucleotide
aauggaaucucuccauggg

SEQ ID NO: 1829943 - RNA, 19 nt, Artificial Sequence
  Description of Artificial Sequence: Synthetic oligonucleotide
ucuucaaacgcuacaaucu

SEQ ID NO: 1829944 - RNA, 19 nt, Artificial Sequence
  Description of Artificial Sequence: Synthetic oligonucleotide
aguuuuaggguaucaauag

SEQ ID NO: 1829945 - RNA, 19 nt, Artificial Sequence
  Description of Artificial Sequence: Synthetic oligonucleotide
guaacuuccauuuauuuca

SEQ ID NO: 1829946 - RNA, 19 nt, Artificial Sequence
  Description of Artificial Sequence: Synthetic oligonucleotide
aacuuaauugcccaggcau

SEQ ID NO: 1829947 - RNA, 19 nt, Artificial Sequence
  Description of Artificial Sequence: Synthetic oligonucleotide
uguaugauggauuaggcuu

SEQ ID NO: 1829948 - RNA, 19 nt, Artificial Sequence
  Description of Artificial Sequence: Synthetic oligonucleotide
uuaggguaucaauagcugg

SEQ ID NO: 1829949 - RNA, 19 nt, Artificial Sequence
  Description of Artificial Sequence: Synthetic oligonucleotide
aaugaucaacauuucucag

SEQ ID NO: 1829950 - RNA, 19 nt, Artificial Sequence
  Description of Artificial Sequence: Synthetic oligonucleotide
gauauacucgaguuuuagg

SEQ ID NO: 1829951 - RNA, 19 nt, Artificial Sequence
  Description of Artificial Sequence: Synthetic oligonucleotide
auugauaguauguucagaa

SEQ ID NO: 1829952 - RNA, 19 nt, Artificial Sequence
  Description of Artificial Sequence: Synthetic oligonucleotide
uucagaaacuuaauugccc

SEQ ID NO: 1829953 - RNA, 19 nt, Artificial Sequence
  Description of Artificial Sequence: Synthetic oligonucleotide
auauagacuaacuuggaaa

SEQ ID NO: 1829954 - RNA, 19 nt, Artificial Sequence
  Description of Artificial Sequence: Synthetic oligonucleotide
aauagcugggagaucagac

SEQ ID NO: 1829955 - RNA, 19 nt, Artificial Sequence
  Description of Artificial Sequence: Synthetic oligonucleotide
uuugcuagguggaugcuag

SEQ ID NO: 1829956 - RNA, 19 nt, Artificial Sequence
  Description of Artificial Sequence: Synthetic oligonucleotide
agguccgacauuuccaugc

SEQ ID NO: 1829957 - RNA, 19 nt, Artificial Sequence
  Description of Artificial Sequence: Synthetic oligonucleotide
uuuguaugauggauuaggc

SEQ ID NO: 1829958 - RNA, 19 nt, Artificial Sequence
  Description of Artificial Sequence: Synthetic oligonucleotide
aaaacggcugccuucucag

SEQ ID NO: 1829959 - RNA, 19 nt, Artificial Sequence
  Description of Artificial Sequence: Synthetic oligonucleotide
uagacuaacuuggaaauag

SEQ ID NO: 1829960 - RNA, 19 nt, Artificial Sequence
  Description of Artificial Sequence: Synthetic oligonucleotide
caugccucagcacugaagg

SEQ ID NO: 1829961 - RNA, 19 nt, Artificial Sequence
  Description of Artificial Sequence: Synthetic oligonucleotide
uauagacuaacuuggaaau

SEQ ID NO: 1829962 - RNA, 19 nt, Artificial Sequence
  Description of Artificial Sequence: Synthetic oligonucleotide
gaagcaguugauucuuugg

SEQ ID NO: 1829963 - RNA, 19 nt, Artificial Sequence
  Description of Artificial Sequence: Synthetic oligonucleotide
agugcaacucaucaaucac

SEQ ID NO: 1829964 - RNA, 19 nt, Artificial Sequence
  Description of Artificial Sequence: Synthetic oligonucleotide
aaggucaugaaguucuagu

SEQ ID NO: 1829965 - RNA, 19 nt, Artificial Sequence
  Description of Artificial Sequence: Synthetic oligonucleotide
aaacgcuacaaucucugug

SEQ ID NO: 1829966 - RNA, 19 nt, Artificial Sequence
  Description of Artificial Sequence: Synthetic oligonucleotide
aaccaguuccaugaggucg

SEQ ID NO: 1829967 - RNA, 19 nt, Artificial Sequence
  Description of Artificial Sequence: Synthetic oligonucleotide
agaaacucgaccaacuccg

SEQ ID NO: 1829968 - RNA, 19 nt, Artificial Sequence
  Description of Artificial Sequence: Synthetic oligonucleotide
acacaauuuuguaugaugg

SEQ ID NO: 1829969 - RNA, 19 nt, Artificial Sequence
  Description of Artificial Sequence: Synthetic oligonucleotide
agagaagccuccuugucgg

SEQ ID NO: 1829970 - RNA, 19 nt, Artificial Sequence
  Description of Artificial Sequence: Synthetic oligonucleotide
cuuuccauacaccauuugc

SEQ ID NO: 1829971 - RNA, 19 nt, Artificial Sequence
  Description of Artificial Sequence: Synthetic oligonucleotide
ugauggauuaggcuugcag

SEQ ID NO: 1829972 - RNA, 19 nt, Artificial Sequence
  Description of Artificial Sequence: Synthetic oligonucleotide
uguaacuuccauuuauuuc

SEQ ID NO: 1829973 - RNA, 19 nt, Artificial Sequence
  Description of Artificial Sequence: Synthetic oligonucleotide
ucaaacgcuacaaucucug

SEQ ID NO: 1829974 - RNA, 19 nt, Artificial Sequence
  Description of Artificial Sequence: Synthetic oligonucleotide
uugucuagacacaauuuug

SEQ ID NO: 1829975 - RNA, 19 nt, Artificial Sequence
  Description of Artificial Sequence: Synthetic oligonucleotide
ucagaaacuuaauugccca

SEQ ID NO: 1829976 - RNA, 19 nt, Artificial Sequence
  Description of Artificial Sequence: Synthetic oligonucleotide
ucuugauggauauacucga

SEQ ID NO: 1829977 - RNA, 19 nt, Artificial Sequence
  Description of Artificial Sequence: Synthetic oligonucleotide
ugucuagacacaauuuugu

SEQ ID NO: 1829978 - RNA, 19 nt, Artificial Sequence
  Description of Artificial Sequence: Synthetic oligonucleotide
gaaaaccaguuccaugagg

SEQ ID NO: 1829979 - RNA, 19 nt, Artificial Sequence
  Description of Artificial Sequence: Synthetic oligonucleotide
ucacucaagucugagaacc

SEQ ID NO: 1829980 - RNA, 19 nt, Artificial Sequence
  Description of Artificial Sequence: Synthetic oligonucleotide
ugauccaugaaagccaagc

SEQ ID NO: 1829981 - RNA, 19 nt, Artificial Sequence
  Description of Artificial Sequence: Synthetic oligonucleotide
agaaaugaucaacauuucu

SEQ ID NO: 1829982 - RNA, 19 nt, Artificial Sequence
  Description of Artificial Sequence: Synthetic oligonucleotide
gaugcuagcaccagugucc

SEQ ID NO: 1829983 - RNA, 19 nt, Artificial Sequence
  Description of Artificial Sequence: Synthetic oligonucleotide
ucauugauaguauguucag

SEQ ID NO: 1829984 - RNA, 19 nt, Artificial Sequence
  Description of Artificial Sequence: Synthetic oligonucleotide
agaaacuuaauugcccagg

SEQ ID NO: 1829985 - RNA, 19 nt, Artificial Sequence
  Description of Artificial Sequence: Synthetic oligonucleotide
uuauauagacuaacuugga

SEQ ID NO: 1829986 - RNA, 19 nt, Artificial Sequence
  Description of Artificial Sequence: Synthetic oligonucleotide
agugacauauaaauauuuc

SEQ ID NO: 1829987 - RNA, 19 nt, Artificial Sequence
  Description of Artificial Sequence: Synthetic oligonucleotide
aacucgaccaacuccgagu

SEQ ID NO: 1829988 - RNA, 19 nt, Artificial Sequence
  Description of Artificial Sequence: Synthetic oligonucleotide
cuugaguucggcgagcucc

SEQ ID NO: 1829989 - RNA, 19 nt, Artificial Sequence
  Description of Artificial Sequence: Synthetic oligonucleotide
ugaugcgcccuucugacug

SEQ ID NO: 1829990 - RNA, 19 nt, Artificial Sequence
  Description of Artificial Sequence: Synthetic oligonucleotide
uauacucgaguuuuagggu

SEQ ID NO: 1829991 - RNA, 19 nt, Artificial Sequence
  Description of Artificial Sequence: Synthetic oligonucleotide
guaagagacaagaaaacca

SEQ ID NO: 1829992 - RNA, 19 nt, Artificial Sequence
  Description of Artificial Sequence: Synthetic oligonucleotide
aaucucugugcccaauaca

SEQ ID NO: 1829993 - RNA, 19 nt, Artificial Sequence
  Description of Artificial Sequence: Synthetic oligonucleotide
uccaugggcgacaagacau

SEQ ID NO: 1829994 - RNA, 19 nt, Artificial Sequence
  Description of Artificial Sequence: Synthetic oligonucleotide
auagguauauuaagaacag

SEQ ID NO: 1829995 - RNA, 19 nt, Artificial Sequence
  Description of Artificial Sequence: Synthetic oligonucleotide
agguauauuaagaacagaa

SEQ ID NO: 1829996 - RNA, 19 nt, Artificial Sequence
  Description of Artificial Sequence: Synthetic oligonucleotide
uucgcagaugucugcauag

SEQ ID NO: 1829997 - RNA, 19 nt, Artificial Sequence
  Description of Artificial Sequence: Synthetic oligonucleotide
uucacaccaguucugagua

SEQ ID NO: 1829998 - RNA, 19 nt, Artificial Sequence
  Description of Artificial Sequence: Synthetic oligonucleotide
uuguaugauggauuaggcu

SEQ ID NO: 1829999 - RNA, 19 nt, Artificial Sequence
  Description of Artificial Sequence: Synthetic oligonucleotide
auggauuaggcuugcagga

SEQ ID NO: 1830000 - RNA, 19 nt, Artificial Sequence
  Description of Artificial Sequence: Synthetic oligonucleotide
gaaagccaagcugagagac

SEQ ID NO: 1830001 - RNA, 19 nt, Artificial Sequence
  Description of Artificial Sequence: Synthetic oligonucleotide
uagugcaacucaucaauca

SEQ ID NO: 1830002 - RNA, 19 nt, Artificial Sequence
  Description of Artificial Sequence: Synthetic oligonucleotide
auaaugcugcaccuugcuc

SEQ ID NO: 1830003 - RNA, 19 nt, Artificial Sequence
  Description of Artificial Sequence: Synthetic oligonucleotide
aaacucgaccaacuccgag

SEQ ID NO: 1830004 - RNA, 19 nt, Artificial Sequence
  Description of Artificial Sequence: Synthetic oligonucleotide
guuuuaggguaucaauagc

SEQ ID NO: 1830005 - RNA, 19 nt, Artificial Sequence
  Description of Artificial Sequence: Synthetic oligonucleotide
aacaccuuggggaucucgg

SEQ ID NO: 1830006 - RNA, 19 nt, Artificial Sequence
  Description of Artificial Sequence: Synthetic oligonucleotide
uccgagucacucaagucug

SEQ ID NO: 1830007 - RNA, 19 nt, Artificial Sequence
  Description of Artificial Sequence: Synthetic oligonucleotide
uugccaucccuucccaggg

SEQ ID NO: 1830008 - RNA, 19 nt, Artificial Sequence
  Description of Artificial Sequence: Synthetic oligonucleotide
uucaaacgcuacaaucucu

SEQ ID NO: 1830009 - RNA, 19 nt, Artificial Sequence
  Description of Artificial Sequence: Synthetic oligonucleotide
ucaacauuucucaguguaa

SEQ ID NO: 1830010 - RNA, 19 nt, Artificial Sequence
  Description of Artificial Sequence: Synthetic oligonucleotide
gauuucacagagaagccuc

SEQ ID NO: 1830011 - RNA, 19 nt, Artificial Sequence
  Description of Artificial Sequence: Synthetic oligonucleotide
acaauuuuguaugauggau

SEQ ID NO: 1830012 - RNA, 19 nt, Artificial Sequence
  Description of Artificial Sequence: Synthetic oligonucleotide
uaccauggcaucaaagaua

SEQ ID NO: 1830013 - RNA, 19 nt, Artificial Sequence
  Description of Artificial Sequence: Synthetic oligonucleotide
ggguaggaaucauugauag

SEQ ID NO: 1830014 - RNA, 19 nt, Artificial Sequence
  Description of Artificial Sequence: Synthetic oligonucleotide
ugaggucgcucaaagauuu

SEQ ID NO: 1830015 - RNA, 19 nt, Artificial Sequence
  Description of Artificial Sequence: Synthetic oligonucleotide
gacagcguaagagacaaga

SEQ ID NO: 1830016 - RNA, 19 nt, Artificial Sequence
  Description of Artificial Sequence: Synthetic oligonucleotide
gcgacaagacaucugaucc

SEQ ID NO: 1830017 - RNA, 19 nt, Artificial Sequence
  Description of Artificial Sequence: Synthetic oligonucleotide
ucgggcaugccucagcacu

SEQ ID NO: 1830018 - RNA, 19 nt, Artificial Sequence
  Description of Artificial Sequence: Synthetic oligonucleotide
auagcugggagaucagaca

SEQ ID NO: 1830019 - RNA, 19 nt, Artificial Sequence
  Description of Artificial Sequence: Synthetic oligonucleotide
aggaaucauugauaguaug

SEQ ID NO: 1830020 - RNA, 19 nt, Artificial Sequence
  Description of Artificial Sequence: Synthetic oligonucleotide
agcguaagagacaagaaaa

SEQ ID NO: 1830021 - RNA, 19 nt, Artificial Sequence
  Description of Artificial Sequence: Synthetic oligonucleotide
uuuccaugccucuucuaca

SEQ ID NO: 1830022 - RNA, 19 nt, Artificial Sequence
  Description of Artificial Sequence: Synthetic oligonucleotide
gucacuuucccuuguacca

SEQ ID NO: 1830023 - RNA, 19 nt, Artificial Sequence
  Description of Artificial Sequence: Synthetic oligonucleotide
cuugauggauauacucgag

SEQ ID NO: 1830024 - RNA, 19 nt, Artificial Sequence
  Description of Artificial Sequence: Synthetic oligonucleotide
uagacacaauuuuguauga

SEQ ID NO: 1830025 - RNA, 19 nt, Artificial Sequence
  Description of Artificial Sequence: Synthetic oligonucleotide
uugauaguauguucagaaa

SEQ ID NO: 1830026 - RNA, 19 nt, Artificial Sequence
  Description of Artificial Sequence: Synthetic oligonucleotide
gacauuuccaugccucuuc

SEQ ID NO: 1830027 - RNA, 19 nt, Artificial Sequence
  Description of Artificial Sequence: Synthetic oligonucleotide
gugcccaauacagaggcgg

SEQ ID NO: 1830028 - RNA, 19 nt, Artificial Sequence
  Description of Artificial Sequence: Synthetic oligonucleotide
ucgugucuugaguucggcg

SEQ ID NO: 1830029 - RNA, 19 nt, Artificial Sequence
  Description of Artificial Sequence: Synthetic oligonucleotide
uaggaaucauugauaguau

SEQ ID NO: 1830030 - RNA, 19 nt, Artificial Sequence
  Description of Artificial Sequence: Synthetic oligonucleotide
acuuaauugcccaggcauc

SEQ ID NO: 1830031 - RNA, 19 nt, Artificial Sequence
  Description of Artificial Sequence: Synthetic oligonucleotide
aaacggcugccuucucagg

SEQ ID NO: 1830032 - RNA, 19 nt, Artificial Sequence
  Description of Artificial Sequence: Synthetic oligonucleotide
ugaaagccaagcugagaga

SEQ ID NO: 1830033 - RNA, 19 nt, Artificial Sequence
  Description of Artificial Sequence: Synthetic oligonucleotide
uuuaguggugauggggaca

SEQ ID NO: 1830034 - RNA, 19 nt, Artificial Sequence
  Description of Artificial Sequence: Synthetic oligonucleotide
auacucgaguuuuagggua

SEQ ID NO: 1830035 - RNA, 19 nt, Artificial Sequence
  Description of Artificial Sequence: Synthetic oligonucleotide
cagaaacuuaauugcccag

SEQ ID NO: 1830036 - RNA, 19 nt, Artificial Sequence
  Description of Artificial Sequence: Synthetic oligonucleotide
ugucgggcaugccucagca

SEQ ID NO: 1830037 - RNA, 19 nt, Artificial Sequence
  Description of Artificial Sequence: Synthetic oligonucleotide
agacagauccuuuuauaua

SEQ ID NO: 1830038 - RNA, 19 nt, Artificial Sequence
  Description of Artificial Sequence: Synthetic oligonucleotide
agauuucacagagaagccu

SEQ ID NO: 1830039 - RNA, 19 nt, Artificial Sequence
  Description of Artificial Sequence: Synthetic oligonucleotide
uucuuuugcuagguggaug

SEQ ID NO: 1830040 - RNA, 19 nt, Artificial Sequence
  Description of Artificial Sequence: Synthetic oligonucleotide
ucgaccaacuccgagucac

SEQ ID NO: 1830041 - RNA, 19 nt, Artificial Sequence
  Description of Artificial Sequence: Synthetic oligonucleotide
aggucaugaaguucuaguu

SEQ ID NO: 1830042 - RNA, 19 nt, Artificial Sequence
  Description of Artificial Sequence: Synthetic oligonucleotide
uuauuucaguugucugucu

SEQ ID NO: 1830043 - RNA, 19 nt, Artificial Sequence
  Description of Artificial Sequence: Synthetic oligonucleotide
cuuuaguggugauggggac

SEQ ID NO: 1830044 - RNA, 19 nt, Artificial Sequence
  Description of Artificial Sequence: Synthetic oligonucleotide
uccauucgcagaugucugc

SEQ ID NO: 1830045 - RNA, 19 nt, Artificial Sequence
  Description of Artificial Sequence: Synthetic oligonucleotide
agaagaagggccaggcuug

SEQ ID NO: 1830046 - RNA, 19 nt, Artificial Sequence
  Description of Artificial Sequence: Synthetic oligonucleotide
acauuucucaguguaacuu

SEQ ID NO: 1830047 - RNA, 19 nt, Artificial Sequence
  Description of Artificial Sequence: Synthetic oligonucleotide
ugaugcugucuccucuccc

SEQ ID NO: 1830048 - RNA, 19 nt, Artificial Sequence
  Description of Artificial Sequence: Synthetic oligonucleotide
gagacagauccuuuuauau

SEQ ID NO: 1830049 - RNA, 19 nt, Artificial Sequence
  Description of Artificial Sequence: Synthetic oligonucleotide
uggauuaggcuugcaggag

SEQ ID NO: 1830050 - RNA, 19 nt, Artificial Sequence
  Description of Artificial Sequence: Synthetic oligonucleotide
ucucugugcccaauacaga

SEQ ID NO: 1830051 - RNA, 19 nt, Artificial Sequence
  Description of Artificial Sequence: Synthetic oligonucleotide
uuccaugccucuucuacau

SEQ ID NO: 1830052 - RNA, 19 nt, Artificial Sequence
  Description of Artificial Sequence: Synthetic oligonucleotide
uugggcuccagugucgagc

SEQ ID NO: 1830053 - RNA, 19 nt, Artificial Sequence
  Description of Artificial Sequence: Synthetic oligonucleotide
ucucuucaaacgcuacaau

SEQ ID NO: 1830054 - RNA, 19 nt, Artificial Sequence
  Description of Artificial Sequence: Synthetic oligonucleotide
ugcuagguggaugcuagca

SEQ ID NO: 1830055 - RNA, 19 nt, Artificial Sequence
  Description of Artificial Sequence: Synthetic oligonucleotide
uccuugucgggcaugccuc

SEQ ID NO: 1830056 - RNA, 19 nt, Artificial Sequence
  Description of Artificial Sequence: Synthetic oligonucleotide
uugaguucggcgagcucca

SEQ ID NO: 1830057 - RNA, 19 nt, Artificial Sequence
  Description of Artificial Sequence: Synthetic oligonucleotide
gugucuugaguucggcgag

SEQ ID NO: 1830058 - RNA, 19 nt, Artificial Sequence
  Description of Artificial Sequence: Synthetic oligonucleotide
gagucacuuucccuuguac

SEQ ID NO: 1830059 - RNA, 19 nt, Artificial Sequence
  Description of Artificial Sequence: Synthetic oligonucleotide
ccaguaggccacauaaugc

SEQ ID NO: 1830060 - RNA, 19 nt, Artificial Sequence
  Description of Artificial Sequence: Synthetic oligonucleotide
aggcaucuucuuuaguggu

SEQ ID NO: 1830061 - RNA, 19 nt, Artificial Sequence
  Description of Artificial Sequence: Synthetic oligonucleotide
cagaaaugaucaacauuuc

SEQ ID NO: 1830062 - RNA, 19 nt, Artificial Sequence
  Description of Artificial Sequence: Synthetic oligonucleotide
aguguccaaaacggcugcc

SEQ ID NO: 1830063 - RNA, 19 nt, Artificial Sequence
  Description of Artificial Sequence: Synthetic oligonucleotide
acagguccgacauuuccau

SEQ ID NO: 1830064 - RNA, 19 nt, Artificial Sequence
  Description of Artificial Sequence: Synthetic oligonucleotide
ucugaguacacaggucagu

SEQ ID NO: 1830065 - RNA, 19 nt, Artificial Sequence
  Description of Artificial Sequence: Synthetic oligonucleotide
caugaggucgcucaaagau

SEQ ID NO: 1830066 - RNA, 19 nt, Artificial Sequence
  Description of Artificial Sequence: Synthetic oligonucleotide
cuccauucgcagaugucug

SEQ ID NO: 1830067 - RNA, 19 nt, Artificial Sequence
  Description of Artificial Sequence: Synthetic oligonucleotide
uacucgaguuuuaggguau

SEQ ID NO: 1830068 - RNA, 19 nt, Artificial Sequence
  Description of Artificial Sequence: Synthetic oligonucleotide
ucaguguaacuuccauuua

SEQ ID NO: 1830069 - RNA, 19 nt, Artificial Sequence
  Description of Artificial Sequence: Synthetic oligonucleotide
caguugauucuuuggcuuc

SEQ ID NO: 1830070 - RNA, 19 nt, Artificial Sequence
  Description of Artificial Sequence: Synthetic oligonucleotide
uguccaaaacggcugccuu

SEQ ID NO: 1830071 - RNA, 19 nt, Artificial Sequence
  Description of Artificial Sequence: Synthetic oligonucleotide
ucgaguuuuaggguaucaa

SEQ ID NO: 1830072 - RNA, 19 nt, Artificial Sequence
  Description of Artificial Sequence: Synthetic oligonucleotide
ggauauacucgaguuuuag

SEQ ID NO: 1830073 - RNA, 19 nt, Artificial Sequence
  Description of Artificial Sequence: Synthetic oligonucleotide
gauuaggcuugcaggaguc

SEQ ID NO: 1830074 - RNA, 19 nt, Artificial Sequence
  Description of Artificial Sequence: Synthetic oligonucleotide
gucgcucaaagauuucaca

SEQ ID NO: 1830075 - RNA, 19 nt, Artificial Sequence
  Description of Artificial Sequence: Synthetic oligonucleotide
uaggccacauaaugcugca

SEQ ID NO: 1830076 - RNA, 19 nt, Artificial Sequence
  Description of Artificial Sequence: Synthetic oligonucleotide
guaucaauagcugggagau

SEQ ID NO: 1830077 - RNA, 19 nt, Artificial Sequence
  Description of Artificial Sequence: Synthetic oligonucleotide
uggcccguccaguaggcca

SEQ ID NO: 1830078 - RNA, 19 nt, Artificial Sequence
  Description of Artificial Sequence: Synthetic oligonucleotide
gaaucauugauaguauguu

SEQ ID NO: 1830079 - RNA, 19 nt, Artificial Sequence
  Description of Artificial Sequence: Synthetic oligonucleotide
gcuugcaggagucacuuuc

SEQ ID NO: 1830080 - RNA, 19 nt, Artificial Sequence
  Description of Artificial Sequence: Synthetic oligonucleotide
uggauauacucgaguuuua

SEQ ID NO: 1830081 - RNA, 19 nt, Artificial Sequence
  Description of Artificial Sequence: Synthetic oligonucleotide
agaagggccaggcuugcua

SEQ ID NO: 1830082 - RNA, 19 nt, Artificial Sequence
  Description of Artificial Sequence: Synthetic oligonucleotide
cagcguaagagacaagaaa

SEQ ID NO: 1830083 - RNA, 19 nt, Artificial Sequence
  Description of Artificial Sequence: Synthetic oligonucleotide
ugcccaauacagaggcggu

SEQ ID NO: 1830084 - RNA, 19 nt, Artificial Sequence
  Description of Artificial Sequence: Synthetic oligonucleotide
auucgcagaugucugcaua

SEQ ID NO: 1830085 - RNA, 19 nt, Artificial Sequence
  Description of Artificial Sequence: Synthetic oligonucleotide
uugucgggcaugccucagc

SEQ ID NO: 1830086 - RNA, 19 nt, Artificial Sequence
  Description of Artificial Sequence: Synthetic oligonucleotide
uggauguguagugcaacuc

SEQ ID NO: 1830087 - RNA, 19 nt, Artificial Sequence
  Description of Artificial Sequence: Synthetic oligonucleotide
cauacaccauuugcaauuc

SEQ ID NO: 1830088 - RNA, 19 nt, Artificial Sequence
  Description of Artificial Sequence: Synthetic oligonucleotide
gggaguucagaagaagggc

SEQ ID NO: 1830089 - RNA, 19 nt, Artificial Sequence
  Description of Artificial Sequence: Synthetic oligonucleotide
aucucgguggcccguccag

SEQ ID NO: 1830090 - RNA, 19 nt, Artificial Sequence
  Description of Artificial Sequence: Synthetic oligonucleotide
gaagggccaggcuugcuaa

SEQ ID NO: 1830091 - RNA, 19 nt, Artificial Sequence
  Description of Artificial Sequence: Synthetic oligonucleotide
cacagguccgacauuucca

SEQ ID NO: 1830092 - RNA, 19 nt, Artificial Sequence
  Description of Artificial Sequence: Synthetic oligonucleotide
aguguaacuuccauuuauu

SEQ ID NO: 1830093 - RNA, 19 nt, Artificial Sequence
  Description of Artificial Sequence: Synthetic oligonucleotide
ccaacaagaaauaugcccu

SEQ ID NO: 1830094 - RNA, 19 nt, Artificial Sequence
  Description of Artificial Sequence: Synthetic oligonucleotide
gaguucggcgagcuccagc

SEQ ID NO: 1830095 - RNA, 19 nt, Artificial Sequence
  Description of Artificial Sequence: Synthetic oligonucleotide
caaaacggcugccuucuca

SEQ ID NO: 1830096 - RNA, 19 nt, Artificial Sequence
  Description of Artificial Sequence: Synthetic oligonucleotide
ggcgacaagacaucugauc

SEQ ID NO: 1830097 - RNA, 19 nt, Artificial Sequence
  Description of Artificial Sequence: Synthetic oligonucleotide
caauuuuguaugauggauu

SEQ ID NO: 1830098 - RNA, 19 nt, Artificial Sequence
  Description of Artificial Sequence: Synthetic oligonucleotide
cagacagcguaagagacaa

SEQ ID NO: 1830099 - RNA, 19 nt, Artificial Sequence
  Description of Artificial Sequence: Synthetic oligonucleotide
ugucuugaguucggcgagc

SEQ ID NO: 1830100 - RNA, 19 nt, Artificial Sequence
  Description of Artificial Sequence: Synthetic oligonucleotide
aacucucugaugcgcccuu

SEQ ID NO: 1830101 - RNA, 19 nt, Artificial Sequence
  Description of Artificial Sequence: Synthetic oligonucleotide
agacuaacuuggaaauagu

SEQ ID NO: 1830102 - RNA, 19 nt, Artificial Sequence
  Description of Artificial Sequence: Synthetic oligonucleotide
gaaucucuccaugggcgac

SEQ ID NO: 1830103 - RNA, 19 nt, Artificial Sequence
  Description of Artificial Sequence: Synthetic oligonucleotide
cauugauaguauguucaga

SEQ ID NO: 1830104 - RNA, 19 nt, Artificial Sequence
  Description of Artificial Sequence: Synthetic oligonucleotide
ucggcgagcuccagcuccc

SEQ ID NO: 1830105 - RNA, 19 nt, Artificial Sequence
  Description of Artificial Sequence: Synthetic oligonucleotide
guagugcaacucaucaauc

SEQ ID NO: 1830106 - RNA, 19 nt, Artificial Sequence
  Description of Artificial Sequence: Synthetic oligonucleotide
guaccauggcaucaaagau

SEQ ID NO: 1830107 - RNA, 19 nt, Artificial Sequence
  Description of Artificial Sequence: Synthetic oligonucleotide
ggguaucaauagcugggag

SEQ ID NO: 1830108 - RNA, 19 nt, Artificial Sequence
  Description of Artificial Sequence: Synthetic oligonucleotide
ccagugucgagcugggcgc

SEQ ID NO: 1830109 - RNA, 19 nt, Artificial Sequence
  Description of Artificial Sequence: Synthetic oligonucleotide
agacacaauuuuguaugau

SEQ ID NO: 1830110 - RNA, 19 nt, Artificial Sequence
  Description of Artificial Sequence: Synthetic oligonucleotide
acucgaguuuuaggguauc

SEQ ID NO: 1830111 - RNA, 19 nt, Artificial Sequence
  Description of Artificial Sequence: Synthetic oligonucleotide
uugcuagguggaugcuagc

SEQ ID NO: 1830112 - RNA, 19 nt, Artificial Sequence
  Description of Artificial Sequence: Synthetic oligonucleotide
ggcuugcuaagugaagcag

SEQ ID NO: 1830113 - RNA, 19 nt, Artificial Sequence
  Description of Artificial Sequence: Synthetic oligonucleotide
ucuugaguucggcgagcuc

SEQ ID NO: 1830114 - RNA, 19 nt, Artificial Sequence
  Description of Artificial Sequence: Synthetic oligonucleotide
ccuucgugucuugaguucg

SEQ ID NO: 1830115 - RNA, 19 nt, Artificial Sequence
  Description of Artificial Sequence: Synthetic oligonucleotide
auuaggcuugcaggaguca

SEQ ID NO: 1830116 - RNA, 19 nt, Artificial Sequence
  Description of Artificial Sequence: Synthetic oligonucleotide
cugauccaugaaagccaag

SEQ ID NO: 1830117 - RNA, 19 nt, Artificial Sequence
  Description of Artificial Sequence: Synthetic oligonucleotide
gcguaagagacaagaaaac

SEQ ID NO: 1830118 - RNA, 19 nt, Artificial Sequence
  Description of Artificial Sequence: Synthetic oligonucleotide
ugcgcccuucugacuguag

SEQ ID NO: 1830119 - RNA, 19 nt, Artificial Sequence
  Description of Artificial Sequence: Synthetic oligonucleotide
aguggcuugucuagacaca

SEQ ID NO: 1830120 - RNA, 19 nt, Artificial Sequence
  Description of Artificial Sequence: Synthetic oligonucleotide
cuugcuaagugaagcaguu

SEQ ID NO: 1830121 - RNA, 19 nt, Artificial Sequence
  Description of Artificial Sequence: Synthetic oligonucleotide
gauguguagugcaacucau

SEQ ID NO: 1830122 - RNA, 19 nt, Artificial Sequence
  Description of Artificial Sequence: Synthetic oligonucleotide
uggcuugucuagacacaau

SEQ ID NO: 1830123 - RNA, 19 nt, Artificial Sequence
  Description of Artificial Sequence: Synthetic oligonucleotide
gaucucgguggcccgucca

SEQ ID NO: 1830124 - RNA, 19 nt, Artificial Sequence
  Description of Artificial Sequence: Synthetic oligonucleotide
gaccaacuccgagucacuc

SEQ ID NO: 1830125 - RNA, 19 nt, Artificial Sequence
  Description of Artificial Sequence: Synthetic oligonucleotide
uuaauugcccaggcaucuu

SEQ ID NO: 1830126 - RNA, 19 nt, Artificial Sequence
  Description of Artificial Sequence: Synthetic oligonucleotide
caguguaacuuccauuuau

SEQ ID NO: 1830127 - RNA, 19 nt, Artificial Sequence
  Description of Artificial Sequence: Synthetic oligonucleotide
gcaauucacaccaguucug

SEQ ID NO: 1830128 - RNA, 19 nt, Artificial Sequence
  Description of Artificial Sequence: Synthetic oligonucleotide
ccaugccucuucuacauca

SEQ ID NO: 1830129 - RNA, 19 nt, Artificial Sequence
  Description of Artificial Sequence: Synthetic oligonucleotide
augaggucgcucaaagauu

SEQ ID NO: 1830130 - RNA, 19 nt, Artificial Sequence
  Description of Artificial Sequence: Synthetic oligonucleotide
gaaacucgaccaacuccga

SEQ ID NO: 1830131 - RNA, 19 nt, Artificial Sequence
  Description of Artificial Sequence: Synthetic oligonucleotide
caacuccgagucacucaag

SEQ ID NO: 1830132 - RNA, 19 nt, Artificial Sequence
  Description of Artificial Sequence: Synthetic oligonucleotide
uucugacuguaggguagga

SEQ ID NO: 1830133 - RNA, 19 nt, Artificial Sequence
  Description of Artificial Sequence: Synthetic oligonucleotide
ggcgccuucgugucuugag

SEQ ID NO: 1830134 - RNA, 19 nt, Artificial Sequence
  Description of Artificial Sequence: Synthetic oligonucleotide
cuccaugggcgacaagaca

SEQ ID NO: 1830135 - RNA, 19 nt, Artificial Sequence
  Description of Artificial Sequence: Synthetic oligonucleotide
guggcuugucuagacacaa

SEQ ID NO: 1830136 - RNA, 19 nt, Artificial Sequence
  Description of Artificial Sequence: Synthetic oligonucleotide
caauagcugggagaucaga

SEQ ID NO: 1830137 - RNA, 19 nt, Artificial Sequence
  Description of Artificial Sequence: Synthetic oligonucleotide
ugucgagcugggcgcucca

SEQ ID NO: 1830138 - RNA, 19 nt, Artificial Sequence
  Description of Artificial Sequence: Synthetic oligonucleotide
cacugggcgccuucguguc

SEQ ID NO: 1830139 - RNA, 19 nt, Artificial Sequence
  Description of Artificial Sequence: Synthetic oligonucleotide
acuguaggguaggaaucau

SEQ ID NO: 1830140 - RNA, 19 nt, Artificial Sequence
  Description of Artificial Sequence: Synthetic oligonucleotide
aucccuucccagggaguuc

SEQ ID NO: 1830141 - RNA, 19 nt, Artificial Sequence
  Description of Artificial Sequence: Synthetic oligonucleotide
ucucuccaugggcgacaag

SEQ ID NO: 1830142 - RNA, 19 nt, Artificial Sequence
  Description of Artificial Sequence: Synthetic oligonucleotide
cacagagaagccuccuugu

SEQ ID NO: 1830143 - RNA, 19 nt, Artificial Sequence
  Description of Artificial Sequence: Synthetic oligonucleotide
gcuagcaccaguguccaaa

SEQ ID NO: 1830144 - RNA, 19 nt, Artificial Sequence
  Description of Artificial Sequence: Synthetic oligonucleotide
ugcccucuacuuccccaaa

SEQ ID NO: 1830145 - RNA, 19 nt, Artificial Sequence
  Description of Artificial Sequence: Synthetic oligonucleotide
cuugucgggcaugccucag

SEQ ID NO: 1830146 - RNA, 19 nt, Artificial Sequence
  Description of Artificial Sequence: Synthetic oligonucleotide
ggauuaggcuugcaggagu

SEQ ID NO: 1830147 - RNA, 19 nt, Artificial Sequence
  Description of Artificial Sequence: Synthetic oligonucleotide
ugaguucggcgagcuccag

SEQ ID NO: 1830148 - RNA, 19 nt, Artificial Sequence
  Description of Artificial Sequence: Synthetic oligonucleotide
cucgaguuuuaggguauca

SEQ ID NO: 1830149 - RNA, 19 nt, Artificial Sequence
  Description of Artificial Sequence: Synthetic oligonucleotide
ccaggcuugcuaagugaag

SEQ ID NO: 1830150 - RNA, 19 nt, Artificial Sequence
  Description of Artificial Sequence: Synthetic oligonucleotide
agugucgagcugggcgcuc

SEQ ID NO: 1830151 - RNA, 19 nt, Artificial Sequence
  Description of Artificial Sequence: Synthetic oligonucleotide
ggcuugucuagacacaauu

SEQ ID NO: 1830152 - RNA, 19 nt, Artificial Sequence
  Description of Artificial Sequence: Synthetic oligonucleotide
cuuugggcuccagugucga

SEQ ID NO: 1830153 - RNA, 19 nt, Artificial Sequence
  Description of Artificial Sequence: Synthetic oligonucleotide
ucucgguggcccguccagu

SEQ ID NO: 1830154 - RNA, 19 nt, Artificial Sequence
  Description of Artificial Sequence: Synthetic oligonucleotide
guauguucagaaacuuaau

SEQ ID NO: 1830155 - RNA, 19 nt, Artificial Sequence
  Description of Artificial Sequence: Synthetic oligonucleotide
gcaugccucagcacugaag

SEQ ID NO: 1830156 - RNA, 19 nt, Artificial Sequence
  Description of Artificial Sequence: Synthetic oligonucleotide
cuccuugucgggcaugccu

SEQ ID NO: 1830157 - RNA, 19 nt, Artificial Sequence
  Description of Artificial Sequence: Synthetic oligonucleotide
acugggcgccuucgugucu

SEQ ID NO: 1830158 - RNA, 19 nt, Artificial Sequence
  Description of Artificial Sequence: Synthetic oligonucleotide
cguccaguaggccacauaa

SEQ ID NO: 1830159 - RNA, 19 nt, Artificial Sequence
  Description of Artificial Sequence: Synthetic oligonucleotide
caaacgcuacaaucucugu

SEQ ID NO: 1830160 - RNA, 19 nt, Artificial Sequence
  Description of Artificial Sequence: Synthetic oligonucleotide
ccuuuccauacaccauuug

SEQ ID NO: 1830161 - RNA, 19 nt, Artificial Sequence
  Description of Artificial Sequence: Synthetic oligonucleotide
ccaacuccgagucacucaa

SEQ ID NO: 1830162 - RNA, 19 nt, Artificial Sequence
  Description of Artificial Sequence: Synthetic oligonucleotide
gaaggucccaguggcuugu

SEQ ID NO: 1830163 - RNA, 19 nt, Artificial Sequence
  Description of Artificial Sequence: Synthetic oligonucleotide
gaugcgcccuucugacugu

SEQ ID NO: 1830164 - RNA, 19 nt, Artificial Sequence
  Description of Artificial Sequence: Synthetic oligonucleotide
ccaagcugagagacagauc

SEQ ID NO: 1830165 - RNA, 19 nt, Artificial Sequence
  Description of Artificial Sequence: Synthetic oligonucleotide
gaggucgcucaaagauuuc

SEQ ID NO: 1830166 - RNA, 19 nt, Artificial Sequence
  Description of Artificial Sequence: Synthetic oligonucleotide
gcccucuacuuccccaaac

SEQ ID NO: 1830167 - RNA, 19 nt, Artificial Sequence
  Description of Artificial Sequence: Synthetic oligonucleotide
guguccaaaacggcugccu

SEQ ID NO: 1830168 - RNA, 19 nt, Artificial Sequence
  Description of Artificial Sequence: Synthetic oligonucleotide
ggaucucgguggcccgucc

SEQ ID NO: 1830169 - RNA, 19 nt, Artificial Sequence
  Description of Artificial Sequence: Synthetic oligonucleotide
gcuccagugucgagcuggg

SEQ ID NO: 1830170 - RNA, 19 nt, Artificial Sequence
  Description of Artificial Sequence: Synthetic oligonucleotide
ugcuagcaccaguguccaa

SEQ ID NO: 1830171 - RNA, 19 nt, Artificial Sequence
  Description of Artificial Sequence: Synthetic oligonucleotide
cuccuccauucgcagaugu

SEQ ID NO: 1830172 - RNA, 19 nt, Artificial Sequence
  Description of Artificial Sequence: Synthetic oligonucleotide
gguggaugcuagcaccagu

SEQ ID NO: 1830173 - RNA, 19 nt, Artificial Sequence
  Description of Artificial Sequence: Synthetic oligonucleotide
guucggcgagcuccagcuc

SEQ ID NO: 1830174 - RNA, 19 nt, Artificial Sequence
  Description of Artificial Sequence: Synthetic oligonucleotide
ugggcgccuucgugucuug

SEQ ID NO: 1830175 - RNA, 19 nt, Artificial Sequence
  Description of Artificial Sequence: Synthetic oligonucleotide
cucgguggcccguccagua

SEQ ID NO: 1830176 - RNA, 19 nt, Artificial Sequence
  Description of Artificial Sequence: Synthetic oligonucleotide
cucgaccaacuccgaguca

SEQ ID NO: 1830177 - RNA, 19 nt, Artificial Sequence
  Description of Artificial Sequence: Synthetic oligonucleotide
gucuugaguucggcgagcu

SEQ ID NO: 1830178 - RNA, 19 nt, Artificial Sequence
  Description of Artificial Sequence: Synthetic oligonucleotide
ggagucacuuucccuugua

SEQ ID NO: 1830179 - RNA, 19 nt, Artificial Sequence
  Description of Artificial Sequence: Synthetic oligonucleotide
gguggcccguccaguaggc

SEQ ID NO: 1830180 - RNA, 19 nt, Artificial Sequence
  Description of Artificial Sequence: Synthetic oligonucleotide
gggacagucacaaggucau

SEQ ID NO: 1830181 - RNA, 19 nt, Artificial Sequence
  Description of Artificial Sequence: Synthetic oligonucleotide
cuguaggguaggaaucauu

SEQ ID NO: 1830182 - RNA, 19 nt, Artificial Sequence
  Description of Artificial Sequence: Synthetic oligonucleotide
ccuccauucgcagaugucu

SEQ ID NO: 1830183 - RNA, 19 nt, Artificial Sequence
  Description of Artificial Sequence: Synthetic oligonucleotide
ccuuggauguguagugcaa

SEQ ID NO: 1830184 - RNA, 19 nt, Artificial Sequence
  Description of Artificial Sequence: Synthetic oligonucleotide
ccccuuggauguguagugc

SEQ ID NO: 1830185 - RNA, 19 nt, Artificial Sequence
  Description of Artificial Sequence: Synthetic oligonucleotide
cucucugaugcgcccuucu

SEQ ID NO: 1830186 - RNA, 19 nt, Artificial Sequence
  Description of Artificial Sequence: Synthetic oligonucleotide
guccgacauuuccaugccu

SEQ ID NO: 1830187 - RNA, 19 nt, Artificial Sequence
  Description of Artificial Sequence: Synthetic oligonucleotide
gcacugggcgccuucgugu

SEQ ID NO: 1830188 - RNA, 19 nt, Artificial Sequence
  Description of Artificial Sequence: Synthetic oligonucleotide
ggcccguccaguaggccac

SEQ ID NO: 1830189 - RNA, 19 nt, Artificial Sequence
  Description of Artificial Sequence: Synthetic oligonucleotide
guggcccguccaguaggcc

SEQ ID NO: 1830190 - RNA, 19 nt, Artificial Sequence
  Description of Artificial Sequence: Synthetic oligonucleotide
ccauucgcagaugucugca

SEQ ID NO: 1830191 - RNA, 19 nt, Artificial Sequence
  Description of Artificial Sequence: Synthetic oligonucleotide
gucgagcugggcgcuccac

SEQ ID NO: 1830192 - RNA, 19 nt, Artificial Sequence
  Description of Artificial Sequence: Synthetic oligonucleotide
gcccaauacagaggcgguc

SEQ ID NO: 1830193 - RNA, 19 nt, Artificial Sequence
  Description of Artificial Sequence: Synthetic oligonucleotide
ggcgcuccacagccccucc

SEQ ID NO: 1830194 - RNA, 19 nt, Artificial Sequence
  Description of Artificial Sequence: Synthetic oligonucleotide
caucccuucccagggaguu

SEQ ID NO: 1830195 - RNA, 19 nt, Artificial Sequence
  Description of Artificial Sequence: Synthetic oligonucleotide
cgggcaugccucagcacug

SEQ ID NO: 1830196 - RNA, 19 nt, Artificial Sequence
  Description of Artificial Sequence: Synthetic oligonucleotide
cccaauacagaggcggucu

SEQ ID NO: 1830197 - RNA, 19 nt, Artificial Sequence
  Description of Artificial Sequence: Synthetic oligonucleotide
gcggucucuugauggauau

SEQ ID NO: 1830198 - RNA, 19 nt, Artificial Sequence
  Description of Artificial Sequence: Synthetic oligonucleotide
guccaguaggccacauaau

SEQ ID NO: 1830199 - RNA, 19 nt, Artificial Sequence
  Description of Artificial Sequence: Synthetic oligonucleotide
ccuugucgggcaugccuca

SEQ ID NO: 1830200 - RNA, 19 nt, Artificial Sequence
  Description of Artificial Sequence: Synthetic oligonucleotide
gcgccuucgugucuugagu

SEQ ID NO: 1830201 - RNA, 19 nt, Artificial Sequence
  Description of Artificial Sequence: Synthetic oligonucleotide
cugggagaucagacagcgu

SEQ ID NO: 1830202 - RNA, 19 nt, Artificial Sequence
  Description of Artificial Sequence: Synthetic oligonucleotide
augcgcccuucugacugua

SEQ ID NO: 1830203 - RNA, 19 nt, Artificial Sequence
  Description of Artificial Sequence: Synthetic oligonucleotide
gggaucucgguggcccguc

SEQ ID NO: 1830204 - RNA, 19 nt, Artificial Sequence
  Description of Artificial Sequence: Synthetic oligonucleotide
cugggcgccuucgugucuu

SEQ ID NO: 1830205 - RNA, 19 nt, Artificial Sequence
  Description of Artificial Sequence: Synthetic oligonucleotide
ccaucccuucccagggagu

SEQ ID NO: 1830206 - RNA, 19 nt, Artificial Sequence
  Description of Artificial Sequence: Synthetic oligonucleotide
gggcgccuucgugucuuga

SEQ ID NO: 1830207 - RNA, 19 nt, Artificial Sequence
  Description of Artificial Sequence: Synthetic oligonucleotide
gggcgacaagacaucugau

SEQ ID NO: 1830208 - RNA, 19 nt, Artificial Sequence
  Description of Artificial Sequence: Synthetic oligonucleotide
ccacauaaugcugcaccuu

SEQ ID NO: 1830209 - RNA, 19 nt, Artificial Sequence
  Description of Artificial Sequence: Synthetic oligonucleotide
ccguccaguaggccacaua

SEQ ID NO: 1830210 - RNA, 19 nt, Artificial Sequence
  Description of Artificial Sequence: Synthetic oligonucleotide
cgccuucgugucuugaguu

SEQ ID NO: 1830211 - RNA, 19 nt, Artificial Sequence
  Description of Artificial Sequence: Synthetic oligonucleotide
cgaccaacuccgagucacu

SEQ ID NO: 1830212 - RNA, 19 nt, Artificial Sequence
  Description of Artificial Sequence: Synthetic oligonucleotide
gcccguccaguaggccaca

SEQ ID NO: 1830213 - RNA, 19 nt, Artificial Sequence
  Description of Artificial Sequence: Synthetic oligonucleotide
cccguccaguaggccacau

SEQ ID NO: 1830214 - RNA, 19 nt, Artificial Sequence
  Description of Artificial Sequence: Synthetic oligonucleotide
aacuuuaauaauuaagucc

SEQ ID NO: 1830215 - RNA, 19 nt, Artificial Sequence
  Description of Artificial Sequence: Synthetic oligonucleotide
aaauccuugauguuuagcc

SEQ ID NO: 1830216 - RNA, 19 nt, Artificial Sequence
  Description of Artificial Sequence: Synthetic oligonucleotide
aucacuaagaauuaaaagg

SEQ ID NO: 1830217 - RNA, 19 nt, Artificial Sequence
  Description of Artificial Sequence: Synthetic oligonucleotide
uaauagaucaacuauaaag

SEQ ID NO: 1830218 - RNA, 19 nt, Artificial Sequence
  Description of Artificial Sequence: Synthetic oligonucleotide
ugauauuacacauagacca

SEQ ID NO: 1830219 - RNA, 19 nt, Artificial Sequence
  Description of Artificial Sequence: Synthetic oligonucleotide
auaaagaacugcuaaauac

SEQ ID NO: 1830220 - RNA, 19 nt, Artificial Sequence
  Description of Artificial Sequence: Synthetic oligonucleotide
uuuguaauaaauaaggcau

SEQ ID NO: 1830221 - RNA, 19 nt, Artificial Sequence
  Description of Artificial Sequence: Synthetic oligonucleotide
agaauuacucauuaguagc

SEQ ID NO: 1830222 - RNA, 19 nt, Artificial Sequence
  Description of Artificial Sequence: Synthetic oligonucleotide
uauuugauauuacacauag

SEQ ID NO: 1830223 - RNA, 19 nt, Artificial Sequence
  Description of Artificial Sequence: Synthetic oligonucleotide
uaauaauuaaguccaaucc

SEQ ID NO: 1830224 - RNA, 19 nt, Artificial Sequence
  Description of Artificial Sequence: Synthetic oligonucleotide
agugaaugcaaacugaaac

SEQ ID NO: 1830225 - RNA, 19 nt, Artificial Sequence
  Description of Artificial Sequence: Synthetic oligonucleotide
ucuuagaucacuaagaauu

SEQ ID NO: 1830226 - RNA, 19 nt, Artificial Sequence
  Description of Artificial Sequence: Synthetic oligonucleotide
auuugguccagucuuaugc

SEQ ID NO: 1830227 - RNA, 19 nt, Artificial Sequence
  Description of Artificial Sequence: Synthetic oligonucleotide
aauaauuaaguccaauccu

SEQ ID NO: 1830228 - RNA, 19 nt, Artificial Sequence
  Description of Artificial Sequence: Synthetic oligonucleotide
ucaaguuuuacuuaaucag

SEQ ID NO: 1830229 - RNA, 19 nt, Artificial Sequence
  Description of Artificial Sequence: Synthetic oligonucleotide
acaauuuagucuuagauca

SEQ ID NO: 1830230 - RNA, 19 nt, Artificial Sequence
  Description of Artificial Sequence: Synthetic oligonucleotide
aguauuuuaacuuaauaga

SEQ ID NO: 1830231 - RNA, 19 nt, Artificial Sequence
  Description of Artificial Sequence: Synthetic oligonucleotide
gaagugauaguauuuaugc

SEQ ID NO: 1830232 - RNA, 19 nt, Artificial Sequence
  Description of Artificial Sequence: Synthetic oligonucleotide
uuuuacuuaaucaggacug

SEQ ID NO: 1830233 - RNA, 19 nt, Artificial Sequence
  Description of Artificial Sequence: Synthetic oligonucleotide
guauaaaccauucaauagg

SEQ ID NO: 1830234 - RNA, 19 nt, Artificial Sequence
  Description of Artificial Sequence: Synthetic oligonucleotide
ucugaaugggcuuuuaagg

SEQ ID NO: 1830235 - RNA, 19 nt, Artificial Sequence
  Description of Artificial Sequence: Synthetic oligonucleotide
aaaggaaggucuaaguugc

SEQ ID NO: 1830236 - RNA, 19 nt, Artificial Sequence
  Description of Artificial Sequence: Synthetic oligonucleotide
aauagaucaacuauaaaga

SEQ ID NO: 1830237 - RNA, 19 nt, Artificial Sequence
  Description of Artificial Sequence: Synthetic oligonucleotide
uuuacuacaagucaaguuu

SEQ ID NO: 1830238 - RNA, 19 nt, Artificial Sequence
  Description of Artificial Sequence: Synthetic oligonucleotide
uuuguuuuguaauaaauaa

SEQ ID NO: 1830239 - RNA, 19 nt, Artificial Sequence
  Description of Artificial Sequence: Synthetic oligonucleotide
aauacucuuuauuugauau

SEQ ID NO: 1830240 - RNA, 19 nt, Artificial Sequence
  Description of Artificial Sequence: Synthetic oligonucleotide
uccaaauacuccaucaggg

SEQ ID NO: 1830241 - RNA, 19 nt, Artificial Sequence
  Description of Artificial Sequence: Synthetic oligonucleotide
uuaaacauacucauaugcc

SEQ ID NO: 1830242 - RNA, 19 nt, Artificial Sequence
  Description of Artificial Sequence: Synthetic oligonucleotide
ugaauuacaauuuagucuu

SEQ ID NO: 1830243 - RNA, 19 nt, Artificial Sequence
  Description of Artificial Sequence: Synthetic oligonucleotide
uguacgagaauccagcagc

SEQ ID NO: 1830244 - RNA, 19 nt, Artificial Sequence
  Description of Artificial Sequence: Synthetic oligonucleotide
auagguuuaggugacaccc

SEQ ID NO: 1830245 - RNA, 19 nt, Artificial Sequence
  Description of Artificial Sequence: Synthetic oligonucleotide
aauagguuuaggugacacc

SEQ ID NO: 1830246 - RNA, 19 nt, Artificial Sequence
  Description of Artificial Sequence: Synthetic oligonucleotide
uuaaggacaauucugaauu

SEQ ID NO: 1830247 - RNA, 19 nt, Artificial Sequence
  Description of Artificial Sequence: Synthetic oligonucleotide
acauuaaaagucaugagac

SEQ ID NO: 1830248 - RNA, 19 nt, Artificial Sequence
  Description of Artificial Sequence: Synthetic oligonucleotide
aagaauuaaaaggaagguc

SEQ ID NO: 1830249 - RNA, 19 nt, Artificial Sequence
  Description of Artificial Sequence: Synthetic oligonucleotide
aagguaagcuauuaggucu

SEQ ID NO: 1830250 - RNA, 19 nt, Artificial Sequence
  Description of Artificial Sequence: Synthetic oligonucleotide
aauuaaauuauaauacaca

SEQ ID NO: 1830251 - RNA, 19 nt, Artificial Sequence
  Description of Artificial Sequence: Synthetic oligonucleotide
aucguauccacuuuacuac

SEQ ID NO: 1830252 - RNA, 19 nt, Artificial Sequence
  Description of Artificial Sequence: Synthetic oligonucleotide
uuaagguaagcuauuaggu

SEQ ID NO: 1830253 - RNA, 19 nt, Artificial Sequence
  Description of Artificial Sequence: Synthetic oligonucleotide
uuagucuuagaucacuaag

SEQ ID NO: 1830254 - RNA, 19 nt, Artificial Sequence
  Description of Artificial Sequence: Synthetic oligonucleotide
aacuuaauagaucaacuau

SEQ ID NO: 1830255 - RNA, 19 nt, Artificial Sequence
  Description of Artificial Sequence: Synthetic oligonucleotide
uuuuaauucgcucccaggu

SEQ ID NO: 1830256 - RNA, 19 nt, Artificial Sequence
  Description of Artificial Sequence: Synthetic oligonucleotide
gaucacuaagaauuaaaag

SEQ ID NO: 1830257 - RNA, 19 nt, Artificial Sequence
  Description of Artificial Sequence: Synthetic oligonucleotide
ugggauuaaaggaaguucc

SEQ ID NO: 1830258 - RNA, 19 nt, Artificial Sequence
  Description of Artificial Sequence: Synthetic oligonucleotide
uaauacacauuaaaaguca

SEQ ID NO: 1830259 - RNA, 19 nt, Artificial Sequence
  Description of Artificial Sequence: Synthetic oligonucleotide
auuaaguccaauccuaucu

SEQ ID NO: 1830260 - RNA, 19 nt, Artificial Sequence
  Description of Artificial Sequence: Synthetic oligonucleotide
auucaauagguuuagguga

SEQ ID NO: 1830261 - RNA, 19 nt, Artificial Sequence
  Description of Artificial Sequence: Synthetic oligonucleotide
aauaaggcaucagaauuac

SEQ ID NO: 1830262 - RNA, 19 nt, Artificial Sequence
  Description of Artificial Sequence: Synthetic oligonucleotide
aauuaaguccaauccuauc

SEQ ID NO: 1830263 - RNA, 19 nt, Artificial Sequence
  Description of Artificial Sequence: Synthetic oligonucleotide
agaacuuuaauaauuaagu

SEQ ID NO: 1830264 - RNA, 19 nt, Artificial Sequence
  Description of Artificial Sequence: Synthetic oligonucleotide
agaauuaaaaggaaggucu

SEQ ID NO: 1830265 - RNA, 19 nt, Artificial Sequence
  Description of Artificial Sequence: Synthetic oligonucleotide
uauaaaccauucaauaggu

SEQ ID NO: 1830266 - RNA, 19 nt, Artificial Sequence
  Description of Artificial Sequence: Synthetic oligonucleotide
aucagaauuacucauuagu

SEQ ID NO: 1830267 - RNA, 19 nt, Artificial Sequence
  Description of Artificial Sequence: Synthetic oligonucleotide
ucugaauuacaauuuaguc

SEQ ID NO: 1830268 - RNA, 19 nt, Artificial Sequence
  Description of Artificial Sequence: Synthetic oligonucleotide
cauucaauagguuuaggug

SEQ ID NO: 1830269 - RNA, 19 nt, Artificial Sequence
  Description of Artificial Sequence: Synthetic oligonucleotide
uacaauuuagucuuagauc

SEQ ID NO: 1830270 - RNA, 19 nt, Artificial Sequence
  Description of Artificial Sequence: Synthetic oligonucleotide
aacauuguuagccauucau

SEQ ID NO: 1830271 - RNA, 19 nt, Artificial Sequence
  Description of Artificial Sequence: Synthetic oligonucleotide
aaagaacugcuaaauacuc

SEQ ID NO: 1830272 - RNA, 19 nt, Artificial Sequence
  Description of Artificial Sequence: Synthetic oligonucleotide
uacuuaaucaggacugucc

SEQ ID NO: 1830273 - RNA, 19 nt, Artificial Sequence
  Description of Artificial Sequence: Synthetic oligonucleotide
uccacuuuacuacaaguca

SEQ ID NO: 1830274 - RNA, 19 nt, Artificial Sequence
  Description of Artificial Sequence: Synthetic oligonucleotide
uaaguauaaaccauucaau

SEQ ID NO: 1830275 - RNA, 19 nt, Artificial Sequence
  Description of Artificial Sequence: Synthetic oligonucleotide
aaaauccuugauguuuagc

SEQ ID NO: 1830276 - RNA, 19 nt, Artificial Sequence
  Description of Artificial Sequence: Synthetic oligonucleotide
uucugaaugggcuuuuaag

SEQ ID NO: 1830277 - RNA, 19 nt, Artificial Sequence
  Description of Artificial Sequence: Synthetic oligonucleotide
uagucuuagaucacuaaga

SEQ ID NO: 1830278 - RNA, 19 nt, Artificial Sequence
  Description of Artificial Sequence: Synthetic oligonucleotide
uaagcuauuaggucugccc

SEQ ID NO: 1830279 - RNA, 19 nt, Artificial Sequence
  Description of Artificial Sequence: Synthetic oligonucleotide
aguuuuacuuaaucaggac

SEQ ID NO: 1830280 - RNA, 19 nt, Artificial Sequence
  Description of Artificial Sequence: Synthetic oligonucleotide
uuaauucgcucccagguga

SEQ ID NO: 1830281 - RNA, 19 nt, Artificial Sequence
  Description of Artificial Sequence: Synthetic oligonucleotide
uuucagugguaaaaggcag

SEQ ID NO: 1830282 - RNA, 19 nt, Artificial Sequence
  Description of Artificial Sequence: Synthetic oligonucleotide
cuucuucuuaauuccagcg

SEQ ID NO: 1830283 - RNA, 19 nt, Artificial Sequence
  Description of Artificial Sequence: Synthetic oligonucleotide
caugaucugaauuuuggug

SEQ ID NO: 1830284 - RNA, 19 nt, Artificial Sequence
  Description of Artificial Sequence: Synthetic oligonucleotide
cagaauuacucauuaguag

SEQ ID NO: 1830285 - RNA, 19 nt, Artificial Sequence
  Description of Artificial Sequence: Synthetic oligonucleotide
uguaacagaccagugaaug

SEQ ID NO: 1830286 - RNA, 19 nt, Artificial Sequence
  Description of Artificial Sequence: Synthetic oligonucleotide
auagaccacaguaagugcc

SEQ ID NO: 1830287 - RNA, 19 nt, Artificial Sequence
  Description of Artificial Sequence: Synthetic oligonucleotide
uuaaaaggaaggucuaagu

SEQ ID NO: 1830288 - RNA, 19 nt, Artificial Sequence
  Description of Artificial Sequence: Synthetic oligonucleotide
aaggacaauucugaauuac

SEQ ID NO: 1830289 - RNA, 19 nt, Artificial Sequence
  Description of Artificial Sequence: Synthetic oligonucleotide
uaguauuuaugcaacugga

SEQ ID NO: 1830290 - RNA, 19 nt, Artificial Sequence
  Description of Artificial Sequence: Synthetic oligonucleotide
agcaucuuuugacuuaggg

SEQ ID NO: 1830291 - RNA, 19 nt, Artificial Sequence
  Description of Artificial Sequence: Synthetic oligonucleotide
aauccuaucuugagaaagg

SEQ ID NO: 1830292 - RNA, 19 nt, Artificial Sequence
  Description of Artificial Sequence: Synthetic oligonucleotide
aauuacaauuuagucuuag

SEQ ID NO: 1830293 - RNA, 19 nt, Artificial Sequence
  Description of Artificial Sequence: Synthetic oligonucleotide
uuuaauucgcucccaggug

SEQ ID NO: 1830294 - RNA, 19 nt, Artificial Sequence
  Description of Artificial Sequence: Synthetic oligonucleotide
aaggcaucagaauuacuca

SEQ ID NO: 1830295 - RNA, 19 nt, Artificial Sequence
  Description of Artificial Sequence: Synthetic oligonucleotide
caucuuuugacuuagggaa

SEQ ID NO: 1830296 - RNA, 19 nt, Artificial Sequence
  Description of Artificial Sequence: Synthetic oligonucleotide
gaugccuuuguucuuguug

SEQ ID NO: 1830297 - RNA, 19 nt, Artificial Sequence
  Description of Artificial Sequence: Synthetic oligonucleotide
uccaauccuaucuugagaa

SEQ ID NO: 1830298 - RNA, 19 nt, Artificial Sequence
  Description of Artificial Sequence: Synthetic oligonucleotide
aauccuugauguuuagcca

SEQ ID NO: 1830299 - RNA, 19 nt, Artificial Sequence
  Description of Artificial Sequence: Synthetic oligonucleotide
gaccauggagauuuggucc

SEQ ID NO: 1830300 - RNA, 19 nt, Artificial Sequence
  Description of Artificial Sequence: Synthetic oligonucleotide
auuaaaaggaaggucuaag

SEQ ID NO: 1830301 - RNA, 19 nt, Artificial Sequence
  Description of Artificial Sequence: Synthetic oligonucleotide
acacauagaccacaguaag

SEQ ID NO: 1830302 - RNA, 19 nt, Artificial Sequence
  Description of Artificial Sequence: Synthetic oligonucleotide
auuuaugcaacuggaauug

SEQ ID NO: 1830303 - RNA, 19 nt, Artificial Sequence
  Description of Artificial Sequence: Synthetic oligonucleotide
uauagacuaggccuggccu

SEQ ID NO: 1830304 - RNA, 19 nt, Artificial Sequence
  Description of Artificial Sequence: Synthetic oligonucleotide
acauagaccacaguaagug

SEQ ID NO: 1830305 - RNA, 19 nt, Artificial Sequence
  Description of Artificial Sequence: Synthetic oligonucleotide
uuuaaggacaauucugaau

SEQ ID NO: 1830306 - RNA, 19 nt, Artificial Sequence
  Description of Artificial Sequence: Synthetic oligonucleotide
aagcuauuaggucugcccu

SEQ ID NO: 1830307 - RNA, 19 nt, Artificial Sequence
  Description of Artificial Sequence: Synthetic oligonucleotide
cuuaauuccagcgaagauc

SEQ ID NO: 1830308 - RNA, 19 nt, Artificial Sequence
  Description of Artificial Sequence: Synthetic oligonucleotide
auuaaaagucaugagacau

SEQ ID NO: 1830309 - RNA, 19 nt, Artificial Sequence
  Description of Artificial Sequence: Synthetic oligonucleotide
aguaagugccuuucagugg

SEQ ID NO: 1830310 - RNA, 19 nt, Artificial Sequence
  Description of Artificial Sequence: Synthetic oligonucleotide
gaauuacucauuaguagcc

SEQ ID NO: 1830311 - RNA, 19 nt, Artificial Sequence
  Description of Artificial Sequence: Synthetic oligonucleotide
ucuguguacgagaauccag

SEQ ID NO: 1830312 - RNA, 19 nt, Artificial Sequence
  Description of Artificial Sequence: Synthetic oligonucleotide
aagugauaguauuuaugca

SEQ ID NO: 1830313 - RNA, 19 nt, Artificial Sequence
  Description of Artificial Sequence: Synthetic oligonucleotide
cuuuuaaggacaauucuga

SEQ ID NO: 1830314 - RNA, 19 nt, Artificial Sequence
  Description of Artificial Sequence: Synthetic oligonucleotide
agaccauggagauuugguc

SEQ ID NO: 1830315 - RNA, 19 nt, Artificial Sequence
  Description of Artificial Sequence: Synthetic oligonucleotide
acuuagggaauuuuaauua

SEQ ID NO: 1830316 - RNA, 19 nt, Artificial Sequence
  Description of Artificial Sequence: Synthetic oligonucleotide
acugaaacacaggugaguc

SEQ ID NO: 1830317 - RNA, 19 nt, Artificial Sequence
  Description of Artificial Sequence: Synthetic oligonucleotide
ugagacauuuguuuuguaa

SEQ ID NO: 1830318 - RNA, 19 nt, Artificial Sequence
  Description of Artificial Sequence: Synthetic oligonucleotide
ccuaucuugagaaagggag

SEQ ID NO: 1830319 - RNA, 19 nt, Artificial Sequence
  Description of Artificial Sequence: Synthetic oligonucleotide
uuugacuuagggaauuuua

SEQ ID NO: 1830320 - RNA, 19 nt, Artificial Sequence
  Description of Artificial Sequence: Synthetic oligonucleotide
ugaaugcaaacugaaacac

SEQ ID NO: 1830321 - RNA, 19 nt, Artificial Sequence
  Description of Artificial Sequence: Synthetic oligonucleotide
uaacuuaauagaucaacua

SEQ ID NO: 1830322 - RNA, 19 nt, Artificial Sequence
  Description of Artificial Sequence: Synthetic oligonucleotide
ugagaaagggagagaagug

SEQ ID NO: 1830323 - RNA, 19 nt, Artificial Sequence
  Description of Artificial Sequence: Synthetic oligonucleotide
uaugcaacuggaauuguua

SEQ ID NO: 1830324 - RNA, 19 nt, Artificial Sequence
  Description of Artificial Sequence: Synthetic oligonucleotide
aaguuuuacuuaaucagga

SEQ ID NO: 1830325 - RNA, 19 nt, Artificial Sequence
  Description of Artificial Sequence: Synthetic oligonucleotide
uuaaucaggacuguccaac

SEQ ID NO: 1830326 - RNA, 19 nt, Artificial Sequence
  Description of Artificial Sequence: Synthetic oligonucleotide
uaagguaagcuauuagguc

SEQ ID NO: 1830327 - RNA, 19 nt, Artificial Sequence
  Description of Artificial Sequence: Synthetic oligonucleotide
acuuaaucaggacugucca

SEQ ID NO: 1830328 - RNA, 19 nt, Artificial Sequence
  Description of Artificial Sequence: Synthetic oligonucleotide
uuucccaguguuuaaacau

SEQ ID NO: 1830329 - RNA, 19 nt, Artificial Sequence
  Description of Artificial Sequence: Synthetic oligonucleotide
uucaauagguuuaggugac

SEQ ID NO: 1830330 - RNA, 19 nt, Artificial Sequence
  Description of Artificial Sequence: Synthetic oligonucleotide
cuguguacgagaauccagc

SEQ ID NO: 1830331 - RNA, 19 nt, Artificial Sequence
  Description of Artificial Sequence: Synthetic oligonucleotide
aaggcagcaucuuuugacu

SEQ ID NO: 1830332 - RNA, 19 nt, Artificial Sequence
  Description of Artificial Sequence: Synthetic oligonucleotide
acuauaaagaacugcuaaa

SEQ ID NO: 1830333 - RNA, 19 nt, Artificial Sequence
  Description of Artificial Sequence: Synthetic oligonucleotide
auuaggucugcccucucuc

SEQ ID NO: 1830334 - RNA, 19 nt, Artificial Sequence
  Description of Artificial Sequence: Synthetic oligonucleotide
auagaucaacuauaaagaa

SEQ ID NO: 1830335 - RNA, 19 nt, Artificial Sequence
  Description of Artificial Sequence: Synthetic oligonucleotide
caggugaucagcuccacag

SEQ ID NO: 1830336 - RNA, 19 nt, Artificial Sequence
  Description of Artificial Sequence: Synthetic oligonucleotide
cuuaauagaucaacuauaa

SEQ ID NO: 1830337 - RNA, 19 nt, Artificial Sequence
  Description of Artificial Sequence: Synthetic oligonucleotide
ucucccuucuucuuaauuc

SEQ ID NO: 1830338 - RNA, 19 nt, Artificial Sequence
  Description of Artificial Sequence: Synthetic oligonucleotide
aaacauacucauaugccca

SEQ ID NO: 1830339 - RNA, 19 nt, Artificial Sequence
  Description of Artificial Sequence: Synthetic oligonucleotide
ucccgaacagaccauggag

SEQ ID NO: 1830340 - RNA, 19 nt, Artificial Sequence
  Description of Artificial Sequence: Synthetic oligonucleotide
caguaagugccuuucagug

SEQ ID NO: 1830341 - RNA, 19 nt, Artificial Sequence
  Description of Artificial Sequence: Synthetic oligonucleotide
cuccaaauacuccaucagg

SEQ ID NO: 1830342 - RNA, 19 nt, Artificial Sequence
  Description of Artificial Sequence: Synthetic oligonucleotide
uuggugugaauuaaauuau

SEQ ID NO: 1830343 - RNA, 19 nt, Artificial Sequence
  Description of Artificial Sequence: Synthetic oligonucleotide
aaagaucguauccacuuua

SEQ ID NO: 1830344 - RNA, 19 nt, Artificial Sequence
  Description of Artificial Sequence: Synthetic oligonucleotide
ugaaugggcuuuuaaggac

SEQ ID NO: 1830345 - RNA, 19 nt, Artificial Sequence
  Description of Artificial Sequence: Synthetic oligonucleotide
uuagggaauuuuaauuaaa

SEQ ID NO: 1830346 - RNA, 19 nt, Artificial Sequence
  Description of Artificial Sequence: Synthetic oligonucleotide
gaucguauccacuuuacua

SEQ ID NO: 1830347 - RNA, 19 nt, Artificial Sequence
  Description of Artificial Sequence: Synthetic oligonucleotide
agucaugagacauuuguuu

SEQ ID NO: 1830348 - RNA, 19 nt, Artificial Sequence
  Description of Artificial Sequence: Synthetic oligonucleotide
ugggauucuccaaauacuc

SEQ ID NO: 1830349 - RNA, 19 nt, Artificial Sequence
  Description of Artificial Sequence: Synthetic oligonucleotide
cuuucagugguaaaaggca

SEQ ID NO: 1830350 - RNA, 19 nt, Artificial Sequence
  Description of Artificial Sequence: Synthetic oligonucleotide
cauuguuagccauucauga

SEQ ID NO: 1830351 - RNA, 19 nt, Artificial Sequence
  Description of Artificial Sequence: Synthetic oligonucleotide
ugcccaguuauauaaauuu

SEQ ID NO: 1830352 - RNA, 19 nt, Artificial Sequence
  Description of Artificial Sequence: Synthetic oligonucleotide
cugaauuacaauuuagucu

SEQ ID NO: 1830353 - RNA, 19 nt, Artificial Sequence
  Description of Artificial Sequence: Synthetic oligonucleotide
aaauacuccaucaggguau

SEQ ID NO: 1830354 - RNA, 19 nt, Artificial Sequence
  Description of Artificial Sequence: Synthetic oligonucleotide
aagaucguauccacuuuac

SEQ ID NO: 1830355 - RNA, 19 nt, Artificial Sequence
  Description of Artificial Sequence: Synthetic oligonucleotide
auuacaauuuagucuuaga

SEQ ID NO: 1830356 - RNA, 19 nt, Artificial Sequence
  Description of Artificial Sequence: Synthetic oligonucleotide
uaauuaaguccaauccuau

SEQ ID NO: 1830357 - RNA, 19 nt, Artificial Sequence
  Description of Artificial Sequence: Synthetic oligonucleotide
uuucugagacaauaacaga

SEQ ID NO: 1830358 - RNA, 19 nt, Artificial Sequence
  Description of Artificial Sequence: Synthetic oligonucleotide
agucuuagaucacuaagaa

SEQ ID NO: 1830359 - RNA, 19 nt, Artificial Sequence
  Description of Artificial Sequence: Synthetic oligonucleotide
uaaguugccgguuucuaaa

SEQ ID NO: 1830360 - RNA, 19 nt, Artificial Sequence
  Description of Artificial Sequence: Synthetic oligonucleotide
acuacaagucaaguuuuac

SEQ ID NO: 1830361 - RNA, 19 nt, Artificial Sequence
  Description of Artificial Sequence: Synthetic oligonucleotide
cauaugcccaguuauauaa

SEQ ID NO: 1830362 - RNA, 19 nt, Artificial Sequence
  Description of Artificial Sequence: Synthetic oligonucleotide
ugaucugaauuuuggugug

SEQ ID NO: 1830363 - RNA, 19 nt, Artificial Sequence
  Description of Artificial Sequence: Synthetic oligonucleotide
aacugcuaaauacucuuua

SEQ ID NO: 1830364 - RNA, 19 nt, Artificial Sequence
  Description of Artificial Sequence: Synthetic oligonucleotide
uggaaaguagaacuuuaau

SEQ ID NO: 1830365 - RNA, 19 nt, Artificial Sequence
  Description of Artificial Sequence: Synthetic oligonucleotide
aauuacucauuaguagccu

SEQ ID NO: 1830366 - RNA, 19 nt, Artificial Sequence
  Description of Artificial Sequence: Synthetic oligonucleotide
uuuguggaaaguagaacuu

SEQ ID NO: 1830367 - RNA, 19 nt, Artificial Sequence
  Description of Artificial Sequence: Synthetic oligonucleotide
aaauaaggcaucagaauua

SEQ ID NO: 1830368 - RNA, 19 nt, Artificial Sequence
  Description of Artificial Sequence: Synthetic oligonucleotide
uuuagucuuagaucacuaa

SEQ ID NO: 1830369 - RNA, 19 nt, Artificial Sequence
  Description of Artificial Sequence: Synthetic oligonucleotide
uuuuaaggacaauucugaa

SEQ ID NO: 1830370 - RNA, 19 nt, Artificial Sequence
  Description of Artificial Sequence: Synthetic oligonucleotide
guaacagaccagugaaugc

SEQ ID NO: 1830371 - RNA, 19 nt, Artificial Sequence
  Description of Artificial Sequence: Synthetic oligonucleotide
aguccaauccuaucuugag

SEQ ID NO: 1830372 - RNA, 19 nt, Artificial Sequence
  Description of Artificial Sequence: Synthetic oligonucleotide
uguggaaaguagaacuuua

SEQ ID NO: 1830373 - RNA, 19 nt, Artificial Sequence
  Description of Artificial Sequence: Synthetic oligonucleotide
gauuaaaggaaguuccggu

SEQ ID NO: 1830374 - RNA, 19 nt, Artificial Sequence
  Description of Artificial Sequence: Synthetic oligonucleotide
aacuggaauuguuauuuua

SEQ ID NO: 1830375 - RNA, 19 nt, Artificial Sequence
  Description of Artificial Sequence: Synthetic oligonucleotide
acgagaauccagcagccug

SEQ ID NO: 1830376 - RNA, 19 nt, Artificial Sequence
  Description of Artificial Sequence: Synthetic oligonucleotide
aaccauucaauagguuuag

SEQ ID NO: 1830377 - RNA, 19 nt, Artificial Sequence
  Description of Artificial Sequence: Synthetic oligonucleotide
cacuuuacuacaagucaag

SEQ ID NO: 1830378 - RNA, 19 nt, Artificial Sequence
  Description of Artificial Sequence: Synthetic oligonucleotide
ggaaggucuaaguugccgg

SEQ ID NO: 1830379 - RNA, 19 nt, Artificial Sequence
  Description of Artificial Sequence: Synthetic oligonucleotide
uuaaguccaauccuaucuu

SEQ ID NO: 1830380 - RNA, 19 nt, Artificial Sequence
  Description of Artificial Sequence: Synthetic oligonucleotide
auggagauuugguccaguc

SEQ ID NO: 1830381 - RNA, 19 nt, Artificial Sequence
  Description of Artificial Sequence: Synthetic oligonucleotide
ggaaaguagaacuuuaaua

SEQ ID NO: 1830382 - RNA, 19 nt, Artificial Sequence
  Description of Artificial Sequence: Synthetic oligonucleotide
agucuuaugcuugccuccc

SEQ ID NO: 1830383 - RNA, 19 nt, Artificial Sequence
  Description of Artificial Sequence: Synthetic oligonucleotide
ugauaguauuuaugcaacu

SEQ ID NO: 1830384 - RNA, 19 nt, Artificial Sequence
  Description of Artificial Sequence: Synthetic oligonucleotide
uuugguccagucuuaugcu

SEQ ID NO: 1830385 - RNA, 19 nt, Artificial Sequence
  Description of Artificial Sequence: Synthetic oligonucleotide
cauguaacagaccagugaa

SEQ ID NO: 1830386 - RNA, 19 nt, Artificial Sequence
  Description of Artificial Sequence: Synthetic oligonucleotide
ugacuuagggaauuuuaau

SEQ ID NO: 1830387 - RNA, 19 nt, Artificial Sequence
  Description of Artificial Sequence: Synthetic oligonucleotide
guuuuacuuaaucaggacu

SEQ ID NO: 1830388 - RNA, 19 nt, Artificial Sequence
  Description of Artificial Sequence: Synthetic oligonucleotide
uggagauuugguccagucu

SEQ ID NO: 1830389 - RNA, 19 nt, Artificial Sequence
  Description of Artificial Sequence: Synthetic oligonucleotide
auaauuaaguccaauccua

SEQ ID NO: 1830390 - RNA, 19 nt, Artificial Sequence
  Description of Artificial Sequence: Synthetic oligonucleotide
cuauagacuaggccuggcc

SEQ ID NO: 1830391 - RNA, 19 nt, Artificial Sequence
  Description of Artificial Sequence: Synthetic oligonucleotide
ucagugguaaaaggcagca

SEQ ID NO: 1830392 - RNA, 19 nt, Artificial Sequence
  Description of Artificial Sequence: Synthetic oligonucleotide
caucuguguacgagaaucc

SEQ ID NO: 1830393 - RNA, 19 nt, Artificial Sequence
  Description of Artificial Sequence: Synthetic oligonucleotide
agcuauuaggucugcccuc

SEQ ID NO: 1830394 - RNA, 19 nt, Artificial Sequence
  Description of Artificial Sequence: Synthetic oligonucleotide
uauccucuccccaagugau

SEQ ID NO: 1830395 - RNA, 19 nt, Artificial Sequence
  Description of Artificial Sequence: Synthetic oligonucleotide
uaugcccaguuauauaaau

SEQ ID NO: 1830396 - RNA, 19 nt, Artificial Sequence
  Description of Artificial Sequence: Synthetic oligonucleotide
uauuaggucugcccucucu

SEQ ID NO: 1830397 - RNA, 19 nt, Artificial Sequence
  Description of Artificial Sequence: Synthetic oligonucleotide
uagccauucaugaucugaa

SEQ ID NO: 1830398 - RNA, 19 nt, Artificial Sequence
  Description of Artificial Sequence: Synthetic oligonucleotide
ccuuucagugguaaaaggc

SEQ ID NO: 1830399 - RNA, 19 nt, Artificial Sequence
  Description of Artificial Sequence: Synthetic oligonucleotide
aauacacauuaaaagucau

SEQ ID NO: 1830400 - RNA, 19 nt, Artificial Sequence
  Description of Artificial Sequence: Synthetic oligonucleotide
ugcauguaacagaccagug

SEQ ID NO: 1830401 - RNA, 19 nt, Artificial Sequence
  Description of Artificial Sequence: Synthetic oligonucleotide
uguguacgagaauccagca

SEQ ID NO: 1830402 - RNA, 19 nt, Artificial Sequence
  Description of Artificial Sequence: Synthetic oligonucleotide
auaacagaguuuucccagu

SEQ ID NO: 1830403 - RNA, 19 nt, Artificial Sequence
  Description of Artificial Sequence: Synthetic oligonucleotide
cugaaugggcuuuuaagga

SEQ ID NO: 1830404 - RNA, 19 nt, Artificial Sequence
  Description of Artificial Sequence: Synthetic oligonucleotide
acuuaauagaucaacuaua

SEQ ID NO: 1830405 - RNA, 19 nt, Artificial Sequence
  Description of Artificial Sequence: Synthetic oligonucleotide
aguagaacuuuaauaauua

SEQ ID NO: 1830406 - RNA, 19 nt, Artificial Sequence
  Description of Artificial Sequence: Synthetic oligonucleotide
uaaucaggacuguccaaca

SEQ ID NO: 1830407 - RNA, 19 nt, Artificial Sequence
  Description of Artificial Sequence: Synthetic oligonucleotide
aaauuauaauacacauuaa

SEQ ID NO: 1830408 - RNA, 19 nt, Artificial Sequence
  Description of Artificial Sequence: Synthetic oligonucleotide
agacauuuguuuuguaaua

SEQ ID NO: 1830409 - RNA, 19 nt, Artificial Sequence
  Description of Artificial Sequence: Synthetic oligonucleotide
aagaacugcuaaauacucu

SEQ ID NO: 1830410 - RNA, 19 nt, Artificial Sequence
  Description of Artificial Sequence: Synthetic oligonucleotide
uuuacuuaaucaggacugu

SEQ ID NO: 1830411 - RNA, 19 nt, Artificial Sequence
  Description of Artificial Sequence: Synthetic oligonucleotide
uagaccacaguaagugccu

SEQ ID NO: 1830412 - RNA, 19 nt, Artificial Sequence
  Description of Artificial Sequence: Synthetic oligonucleotide
agccauugcauguaacaga

SEQ ID NO: 1830413 - RNA, 19 nt, Artificial Sequence
  Description of Artificial Sequence: Synthetic oligonucleotide
uuacucauuaguagccuuu

SEQ ID NO: 1830414 - RNA, 19 nt, Artificial Sequence
  Description of Artificial Sequence: Synthetic oligonucleotide
gugauaguauuuaugcaac

SEQ ID NO: 1830415 - RNA, 19 nt, Artificial Sequence
  Description of Artificial Sequence: Synthetic oligonucleotide
uccagucuuaugcuugccu

SEQ ID NO: 1830416 - RNA, 19 nt, Artificial Sequence
  Description of Artificial Sequence: Synthetic oligonucleotide
caucagaauuacucauuag

SEQ ID NO: 1830417 - RNA, 19 nt, Artificial Sequence
  Description of Artificial Sequence: Synthetic oligonucleotide
ugccuuucagugguaaaag

SEQ ID NO: 1830418 - RNA, 19 nt, Artificial Sequence
  Description of Artificial Sequence: Synthetic oligonucleotide
cuugauguuuagccauugc

SEQ ID NO: 1830419 - RNA, 19 nt, Artificial Sequence
  Description of Artificial Sequence: Synthetic oligonucleotide
aaacauuguuagccauuca

SEQ ID NO: 1830420 - RNA, 19 nt, Artificial Sequence
  Description of Artificial Sequence: Synthetic oligonucleotide
uuaggucugcccucucucc

SEQ ID NO: 1830421 - RNA, 19 nt, Artificial Sequence
  Description of Artificial Sequence: Synthetic oligonucleotide
acauuguuagccauucaug

SEQ ID NO: 1830422 - RNA, 19 nt, Artificial Sequence
  Description of Artificial Sequence: Synthetic oligonucleotide
acagaguuuucccaguguu

SEQ ID NO: 1830423 - RNA, 19 nt, Artificial Sequence
  Description of Artificial Sequence: Synthetic oligonucleotide
uuaugcaacuggaauuguu

SEQ ID NO: 1830424 - RNA, 19 nt, Artificial Sequence
  Description of Artificial Sequence: Synthetic oligonucleotide
ggauuaaaggaaguuccgg

SEQ ID NO: 1830425 - RNA, 19 nt, Artificial Sequence
  Description of Artificial Sequence: Synthetic oligonucleotide
aggugagucuucucauuuc

SEQ ID NO: 1830426 - RNA, 19 nt, Artificial Sequence
  Description of Artificial Sequence: Synthetic oligonucleotide
caagucaaguuuuacuuaa

SEQ ID NO: 1830427 - RNA, 19 nt, Artificial Sequence
  Description of Artificial Sequence: Synthetic oligonucleotide
uugccgguuucuaaaagua

SEQ ID NO: 1830428 - RNA, 19 nt, Artificial Sequence
  Description of Artificial Sequence: Synthetic oligonucleotide
cagucuuaugcuugccucc

SEQ ID NO: 1830429 - RNA, 19 nt, Artificial Sequence
  Description of Artificial Sequence: Synthetic oligonucleotide
aguugccgguuucuaaaag

SEQ ID NO: 1830430 - RNA, 19 nt, Artificial Sequence
  Description of Artificial Sequence: Synthetic oligonucleotide
guauuuaugcaacuggaau

SEQ ID NO: 1830431 - RNA, 19 nt, Artificial Sequence
  Description of Artificial Sequence: Synthetic oligonucleotide
acuaggccuggccuugaac

SEQ ID NO: 1830432 - RNA, 19 nt, Artificial Sequence
  Description of Artificial Sequence: Synthetic oligonucleotide
ucguauccacuuuacuaca

SEQ ID NO: 1830433 - RNA, 19 nt, Artificial Sequence
  Description of Artificial Sequence: Synthetic oligonucleotide
uguguuucugaaugggcuu

SEQ ID NO: 1830434 - RNA, 19 nt, Artificial Sequence
  Description of Artificial Sequence: Synthetic oligonucleotide
aaguccaauccuaucuuga

SEQ ID NO: 1830435 - RNA, 19 nt, Artificial Sequence
  Description of Artificial Sequence: Synthetic oligonucleotide
guguacgagaauccagcag

SEQ ID NO: 1830436 - RNA, 19 nt, Artificial Sequence
  Description of Artificial Sequence: Synthetic oligonucleotide
uaugcuugccucccuuuuc

SEQ ID NO: 1830437 - RNA, 19 nt, Artificial Sequence
  Description of Artificial Sequence: Synthetic oligonucleotide
cugggauuaaaggaaguuc

SEQ ID NO: 1830438 - RNA, 19 nt, Artificial Sequence
  Description of Artificial Sequence: Synthetic oligonucleotide
uuuugggauucuccaaaua

SEQ ID NO: 1830439 - RNA, 19 nt, Artificial Sequence
  Description of Artificial Sequence: Synthetic oligonucleotide
caauagguuuaggugacac

SEQ ID NO: 1830440 - RNA, 19 nt, Artificial Sequence
  Description of Artificial Sequence: Synthetic oligonucleotide
uuagaucacuaagaauuaa

SEQ ID NO: 1830441 - RNA, 19 nt, Artificial Sequence
  Description of Artificial Sequence: Synthetic oligonucleotide
auuacucauuaguagccuu

SEQ ID NO: 1830442 - RNA, 19 nt, Artificial Sequence
  Description of Artificial Sequence: Synthetic oligonucleotide
uaggucugcccucucuccc

SEQ ID NO: 1830443 - RNA, 19 nt, Artificial Sequence
  Description of Artificial Sequence: Synthetic oligonucleotide
cuuccucccgaacagacca

SEQ ID NO: 1830444 - RNA, 19 nt, Artificial Sequence
  Description of Artificial Sequence: Synthetic oligonucleotide
uucccaguguuuaaacaua

SEQ ID NO: 1830445 - RNA, 19 nt, Artificial Sequence
  Description of Artificial Sequence: Synthetic oligonucleotide
gaaugggcuuuuaaggaca

SEQ ID NO: 1830446 - RNA, 19 nt, Artificial Sequence
  Description of Artificial Sequence: Synthetic oligonucleotide
aaguugccgguuucuaaaa

SEQ ID NO: 1830447 - RNA, 19 nt, Artificial Sequence
  Description of Artificial Sequence: Synthetic oligonucleotide
uccucuccccaagugaugc

SEQ ID NO: 1830448 - RNA, 19 nt, Artificial Sequence
  Description of Artificial Sequence: Synthetic oligonucleotide
cuuuuccacaguguggcac

SEQ ID NO: 1830449 - RNA, 19 nt, Artificial Sequence
  Description of Artificial Sequence: Synthetic oligonucleotide
uggugugaauuaaauuaua

SEQ ID NO: 1830450 - RNA, 19 nt, Artificial Sequence
  Description of Artificial Sequence: Synthetic oligonucleotide
agaucguauccacuuuacu

SEQ ID NO: 1830451 - RNA, 19 nt, Artificial Sequence
  Description of Artificial Sequence: Synthetic oligonucleotide
ccaucuuuguggaaaguag

SEQ ID NO: 1830452 - RNA, 19 nt, Artificial Sequence
  Description of Artificial Sequence: Synthetic oligonucleotide
agaguuuucccaguguuua

SEQ ID NO: 1830453 - RNA, 19 nt, Artificial Sequence
  Description of Artificial Sequence: Synthetic oligonucleotide
guaagugccuuucaguggu

SEQ ID NO: 1830454 - RNA, 19 nt, Artificial Sequence
  Description of Artificial Sequence: Synthetic oligonucleotide
acucuauagacuaggccug

SEQ ID NO: 1830455 - RNA, 19 nt, Artificial Sequence
  Description of Artificial Sequence: Synthetic oligonucleotide
agggagagaagugauagua

SEQ ID NO: 1830456 - RNA, 19 nt, Artificial Sequence
  Description of Artificial Sequence: Synthetic oligonucleotide
auugcauguaacagaccag

SEQ ID NO: 1830457 - RNA, 19 nt, Artificial Sequence
  Description of Artificial Sequence: Synthetic oligonucleotide
gaacagaccauggagauuu

SEQ ID NO: 1830458 - RNA, 19 nt, Artificial Sequence
  Description of Artificial Sequence: Synthetic oligonucleotide
uggcacugggcacacuucu

SEQ ID NO: 1830459 - RNA, 19 nt, Artificial Sequence
  Description of Artificial Sequence: Synthetic oligonucleotide
gcaucuuuugacuuaggga

SEQ ID NO: 1830460 - RNA, 19 nt, Artificial Sequence
  Description of Artificial Sequence: Synthetic oligonucleotide
acuuuacuacaagucaagu

SEQ ID NO: 1830461 - RNA, 19 nt, Artificial Sequence
  Description of Artificial Sequence: Synthetic oligonucleotide
aguauuuaugcaacuggaa

SEQ ID NO: 1830462 - RNA, 19 nt, Artificial Sequence
  Description of Artificial Sequence: Synthetic oligonucleotide
cuuagaucacuaagaauua

SEQ ID NO: 1830463 - RNA, 19 nt, Artificial Sequence
  Description of Artificial Sequence: Synthetic oligonucleotide
uacuacaagucaaguuuua

SEQ ID NO: 1830464 - RNA, 19 nt, Artificial Sequence
  Description of Artificial Sequence: Synthetic oligonucleotide
uuaugcuugccucccuuuu

SEQ ID NO: 1830465 - RNA, 19 nt, Artificial Sequence
  Description of Artificial Sequence: Synthetic oligonucleotide
uggcaucuguguacgagaa

SEQ ID NO: 1830466 - RNA, 19 nt, Artificial Sequence
  Description of Artificial Sequence: Synthetic oligonucleotide
uuacuuaaucaggacuguc

SEQ ID NO: 1830467 - RNA, 19 nt, Artificial Sequence
  Description of Artificial Sequence: Synthetic oligonucleotide
auagacuaggccuggccuu

SEQ ID NO: 1830468 - RNA, 19 nt, Artificial Sequence
  Description of Artificial Sequence: Synthetic oligonucleotide
caaauacuccaucagggua

SEQ ID NO: 1830469 - RNA, 19 nt, Artificial Sequence
  Description of Artificial Sequence: Synthetic oligonucleotide
auuccagcgaagaucauuu

SEQ ID NO: 1830470 - RNA, 19 nt, Artificial Sequence
  Description of Artificial Sequence: Synthetic oligonucleotide
aggacaauucugaauuaca

SEQ ID NO: 1830471 - RNA, 19 nt, Artificial Sequence
  Description of Artificial Sequence: Synthetic oligonucleotide
acagaccauggagauuugg

SEQ ID NO: 1830472 - RNA, 19 nt, Artificial Sequence
  Description of Artificial Sequence: Synthetic oligonucleotide
gugugaauuaaauuauaau

SEQ ID NO: 1830473 - RNA, 19 nt, Artificial Sequence
  Description of Artificial Sequence: Synthetic oligonucleotide
uuuaugcaacuggaauugu

SEQ ID NO: 1830474 - RNA, 19 nt, Artificial Sequence
  Description of Artificial Sequence: Synthetic oligonucleotide
gggauuaaaggaaguuccg

SEQ ID NO: 1830475 - RNA, 19 nt, Artificial Sequence
  Description of Artificial Sequence: Synthetic oligonucleotide
uguuuagccauugcaugua

SEQ ID NO: 1830476 - RNA, 19 nt, Artificial Sequence
  Description of Artificial Sequence: Synthetic oligonucleotide
ugccgguuucuaaaaguau

SEQ ID NO: 1830477 - RNA, 19 nt, Artificial Sequence
  Description of Artificial Sequence: Synthetic oligonucleotide
uggccugucuuccucccga

SEQ ID NO: 1830478 - RNA, 19 nt, Artificial Sequence
  Description of Artificial Sequence: Synthetic oligonucleotide
ugcgacccggagacggacg

SEQ ID NO: 1830479 - RNA, 19 nt, Artificial Sequence
  Description of Artificial Sequence: Synthetic oligonucleotide
aagucaugagacauuuguu

SEQ ID NO: 1830480 - RNA, 19 nt, Artificial Sequence
  Description of Artificial Sequence: Synthetic oligonucleotide
gugcgcugggauuaaagga

SEQ ID NO: 1830481 - RNA, 19 nt, Artificial Sequence
  Description of Artificial Sequence: Synthetic oligonucleotide
ucuauagacuaggccuggc

SEQ ID NO: 1830482 - RNA, 19 nt, Artificial Sequence
  Description of Artificial Sequence: Synthetic oligonucleotide
auucgcucccaggugauca

SEQ ID NO: 1830483 - RNA, 19 nt, Artificial Sequence
  Description of Artificial Sequence: Synthetic oligonucleotide
agaaagggagagaagugau

SEQ ID NO: 1830484 - RNA, 19 nt, Artificial Sequence
  Description of Artificial Sequence: Synthetic oligonucleotide
ccaagugaugccuuuguuc

SEQ ID NO: 1830485 - RNA, 19 nt, Artificial Sequence
  Description of Artificial Sequence: Synthetic oligonucleotide
gccuuucagugguaaaagg

SEQ ID NO: 1830486 - RNA, 19 nt, Artificial Sequence
  Description of Artificial Sequence: Synthetic oligonucleotide
gcauguaacagaccaguga

SEQ ID NO: 1830487 - RNA, 19 nt, Artificial Sequence
  Description of Artificial Sequence: Synthetic oligonucleotide
uucgcucccaggugaucag

SEQ ID NO: 1830488 - RNA, 19 nt, Artificial Sequence
  Description of Artificial Sequence: Synthetic oligonucleotide
accagugaaugcaaacuga

SEQ ID NO: 1830489 - RNA, 19 nt, Artificial Sequence
  Description of Artificial Sequence: Synthetic oligonucleotide
aguuuucccaguguuuaaa

SEQ ID NO: 1830490 - RNA, 19 nt, Artificial Sequence
  Description of Artificial Sequence: Synthetic oligonucleotide
cuaggccuggccuugaacu

SEQ ID NO: 1830491 - RNA, 19 nt, Artificial Sequence
  Description of Artificial Sequence: Synthetic oligonucleotide
guacgagaauccagcagcc

SEQ ID NO: 1830492 - RNA, 19 nt, Artificial Sequence
  Description of Artificial Sequence: Synthetic oligonucleotide
gguauccucuccccaagug

SEQ ID NO: 1830493 - RNA, 19 nt, Artificial Sequence
  Description of Artificial Sequence: Synthetic oligonucleotide
aucuguguacgagaaucca

SEQ ID NO: 1830494 - RNA, 19 nt, Artificial Sequence
  Description of Artificial Sequence: Synthetic oligonucleotide
guugccgguuucuaaaagu

SEQ ID NO: 1830495 - RNA, 19 nt, Artificial Sequence
  Description of Artificial Sequence: Synthetic oligonucleotide
ggugugaauuaaauuauaa

SEQ ID NO: 1830496 - RNA, 19 nt, Artificial Sequence
  Description of Artificial Sequence: Synthetic oligonucleotide
accauucaauagguuuagg

SEQ ID NO: 1830497 - RNA, 19 nt, Artificial Sequence
  Description of Artificial Sequence: Synthetic oligonucleotide
uuucucaacaucgcccauu

SEQ ID NO: 1830498 - RNA, 19 nt, Artificial Sequence
  Description of Artificial Sequence: Synthetic oligonucleotide
cuuuacuacaagucaaguu

SEQ ID NO: 1830499 - RNA, 19 nt, Artificial Sequence
  Description of Artificial Sequence: Synthetic oligonucleotide
auuuagucuuagaucacua

SEQ ID NO: 1830500 - RNA, 19 nt, Artificial Sequence
  Description of Artificial Sequence: Synthetic oligonucleotide
aaugggcuuuuaaggacaa

SEQ ID NO: 1830501 - RNA, 19 nt, Artificial Sequence
  Description of Artificial Sequence: Synthetic oligonucleotide
aggucuaaguugccgguuu

SEQ ID NO: 1830502 - RNA, 19 nt, Artificial Sequence
  Description of Artificial Sequence: Synthetic oligonucleotide
ucaauagguuuaggugaca

SEQ ID NO: 1830503 - RNA, 19 nt, Artificial Sequence
  Description of Artificial Sequence: Synthetic oligonucleotide
auuugauauuacacauaga

SEQ ID NO: 1830504 - RNA, 19 nt, Artificial Sequence
  Description of Artificial Sequence: Synthetic oligonucleotide
cccuuuuccacaguguggc

SEQ ID NO: 1830505 - RNA, 19 nt, Artificial Sequence
  Description of Artificial Sequence: Synthetic oligonucleotide
caacuauaaagaacugcua

SEQ ID NO: 1830506 - RNA, 19 nt, Artificial Sequence
  Description of Artificial Sequence: Synthetic oligonucleotide
gaaggucuaaguugccggu

SEQ ID NO: 1830507 - RNA, 19 nt, Artificial Sequence
  Description of Artificial Sequence: Synthetic oligonucleotide
uugguccagucuuaugcuu

SEQ ID NO: 1830508 - RNA, 19 nt, Artificial Sequence
  Description of Artificial Sequence: Synthetic oligonucleotide
aagucaaguuuuacuuaau

SEQ ID NO: 1830509 - RNA, 19 nt, Artificial Sequence
  Description of Artificial Sequence: Synthetic oligonucleotide
agacggacgucccgcucuc

SEQ ID NO: 1830510 - RNA, 19 nt, Artificial Sequence
  Description of Artificial Sequence: Synthetic oligonucleotide
gucaugagacauuuguuuu

SEQ ID NO: 1830511 - RNA, 19 nt, Artificial Sequence
  Description of Artificial Sequence: Synthetic oligonucleotide
aagugccuuucagugguaa

SEQ ID NO: 1830512 - RNA, 19 nt, Artificial Sequence
  Description of Artificial Sequence: Synthetic oligonucleotide
auacuccaucaggguaucc

SEQ ID NO: 1830513 - RNA, 19 nt, Artificial Sequence
  Description of Artificial Sequence: Synthetic oligonucleotide
cccaguuauauaaauuuaa

SEQ ID NO: 1830514 - RNA, 19 nt, Artificial Sequence
  Description of Artificial Sequence: Synthetic oligonucleotide
cgugcgcugggauuaaagg

SEQ ID NO: 1830515 - RNA, 19 nt, Artificial Sequence
  Description of Artificial Sequence: Synthetic oligonucleotide
ccagucuuaugcuugccuc

SEQ ID NO: 1830516 - RNA, 19 nt, Artificial Sequence
  Description of Artificial Sequence: Synthetic oligonucleotide
gggauucuccaaauacucc

SEQ ID NO: 1830517 - RNA, 19 nt, Artificial Sequence
  Description of Artificial Sequence: Synthetic oligonucleotide
uccucccgaacagaccaug

SEQ ID NO: 1830518 - RNA, 19 nt, Artificial Sequence
  Description of Artificial Sequence: Synthetic oligonucleotide
gaaagggagagaagugaua

SEQ ID NO: 1830519 - RNA, 19 nt, Artificial Sequence
  Description of Artificial Sequence: Synthetic oligonucleotide
gaguuuucccaguguuuaa

SEQ ID NO: 1830520 - RNA, 19 nt, Artificial Sequence
  Description of Artificial Sequence: Synthetic oligonucleotide
aaggucuaaguugccgguu

SEQ ID NO: 1830521 - RNA, 19 nt, Artificial Sequence
  Description of Artificial Sequence: Synthetic oligonucleotide
uacgagaauccagcagccu

SEQ ID NO: 1830522 - RNA, 19 nt, Artificial Sequence
  Description of Artificial Sequence: Synthetic oligonucleotide
uguuccggggauguacuuu

SEQ ID NO: 1830523 - RNA, 19 nt, Artificial Sequence
  Description of Artificial Sequence: Synthetic oligonucleotide
cagugaaugcaaacugaaa

SEQ ID NO: 1830524 - RNA, 19 nt, Artificial Sequence
  Description of Artificial Sequence: Synthetic oligonucleotide
cagaccauggagauuuggu

SEQ ID NO: 1830525 - RNA, 19 nt, Artificial Sequence
  Description of Artificial Sequence: Synthetic oligonucleotide
gccgcugcgacccggagac

SEQ ID NO: 1830526 - RNA, 19 nt, Artificial Sequence
  Description of Artificial Sequence: Synthetic oligonucleotide
agauuugguccagucuuau

SEQ ID NO: 1830527 - RNA, 19 nt, Artificial Sequence
  Description of Artificial Sequence: Synthetic oligonucleotide
cccuucuucuuaauuccag

SEQ ID NO: 1830528 - RNA, 19 nt, Artificial Sequence
  Description of Artificial Sequence: Synthetic oligonucleotide
aucuugagaaagggagaga

SEQ ID NO: 1830529 - RNA, 19 nt, Artificial Sequence
  Description of Artificial Sequence: Synthetic oligonucleotide
aucuuuugacuuagggaau

SEQ ID NO: 1830530 - RNA, 19 nt, Artificial Sequence
  Description of Artificial Sequence: Synthetic oligonucleotide
gagacggacgucccgcucu

SEQ ID NO: 1830531 - RNA, 19 nt, Artificial Sequence
  Description of Artificial Sequence: Synthetic oligonucleotide
aggcagcaucuuuugacuu

SEQ ID NO: 1830532 - RNA, 19 nt, Artificial Sequence
  Description of Artificial Sequence: Synthetic oligonucleotide
gucuuagaucacuaagaau

SEQ ID NO: 1830533 - RNA, 19 nt, Artificial Sequence
  Description of Artificial Sequence: Synthetic oligonucleotide
ggugagucuucucauuucu

SEQ ID NO: 1830534 - RNA, 19 nt, Artificial Sequence
  Description of Artificial Sequence: Synthetic oligonucleotide
acucauaugcccaguuaua

SEQ ID NO: 1830535 - RNA, 19 nt, Artificial Sequence
  Description of Artificial Sequence: Synthetic oligonucleotide
uguuucugaaugggcuuuu

SEQ ID NO: 1830536 - RNA, 19 nt, Artificial Sequence
  Description of Artificial Sequence: Synthetic oligonucleotide
ccauucaauagguuuaggu

SEQ ID NO: 1830537 - RNA, 19 nt, Artificial Sequence
  Description of Artificial Sequence: Synthetic oligonucleotide
aacagaccauggagauuug

SEQ ID NO: 1830538 - RNA, 19 nt, Artificial Sequence
  Description of Artificial Sequence: Synthetic oligonucleotide
auaugcccaguuauauaaa

SEQ ID NO: 1830539 - RNA, 19 nt, Artificial Sequence
  Description of Artificial Sequence: Synthetic oligonucleotide
auguaacagaccagugaau

SEQ ID NO: 1830540 - RNA, 19 nt, Artificial Sequence
  Description of Artificial Sequence: Synthetic oligonucleotide
gauucuccaaauacuccau

SEQ ID NO: 1830541 - RNA, 19 nt, Artificial Sequence
  Description of Artificial Sequence: Synthetic oligonucleotide
uaagugccuuucaguggua

SEQ ID NO: 1830542 - RNA, 19 nt, Artificial Sequence
  Description of Artificial Sequence: Synthetic oligonucleotide
caggguauccucuccccaa

SEQ ID NO: 1830543 - RNA, 19 nt, Artificial Sequence
  Description of Artificial Sequence: Synthetic oligonucleotide
cucccgaacagaccaugga

SEQ ID NO: 1830544 - RNA, 19 nt, Artificial Sequence
  Description of Artificial Sequence: Synthetic oligonucleotide
augcccaguuauauaaauu

SEQ ID NO: 1830545 - RNA, 19 nt, Artificial Sequence
  Description of Artificial Sequence: Synthetic oligonucleotide
cugagacaauaacagaguu

SEQ ID NO: 1830546 - RNA, 19 nt, Artificial Sequence
  Description of Artificial Sequence: Synthetic oligonucleotide
ccagugaaugcaaacugaa

SEQ ID NO: 1830547 - RNA, 19 nt, Artificial Sequence
  Description of Artificial Sequence: Synthetic oligonucleotide
cucauaugcccaguuauau

SEQ ID NO: 1830548 - RNA, 19 nt, Artificial Sequence
  Description of Artificial Sequence: Synthetic oligonucleotide
agccgcugcgacccggaga

SEQ ID NO: 1830549 - RNA, 19 nt, Artificial Sequence
  Description of Artificial Sequence: Synthetic oligonucleotide
cccgaacagaccauggaga

SEQ ID NO: 1830550 - RNA, 19 nt, Artificial Sequence
  Description of Artificial Sequence: Synthetic oligonucleotide
cugaaacacaggugagucu

SEQ ID NO: 1830551 - RNA, 19 nt, Artificial Sequence
  Description of Artificial Sequence: Synthetic oligonucleotide
uuguuccggggauguacuu

SEQ ID NO: 1830552 - RNA, 19 nt, Artificial Sequence
  Description of Artificial Sequence: Synthetic oligonucleotide
uuccucccgaacagaccau

SEQ ID NO: 1830553 - RNA, 19 nt, Artificial Sequence
  Description of Artificial Sequence: Synthetic oligonucleotide
ggucuaaguugccgguuuc

SEQ ID NO: 1830554 - RNA, 19 nt, Artificial Sequence
  Description of Artificial Sequence: Synthetic oligonucleotide
cuauuaggucugcccucuc

SEQ ID NO: 1830555 - RNA, 19 nt, Artificial Sequence
  Description of Artificial Sequence: Synthetic oligonucleotide
guuccggggauguacuuuu

SEQ ID NO: 1830556 - RNA, 19 nt, Artificial Sequence
  Description of Artificial Sequence: Synthetic oligonucleotide
ccauugcauguaacagacc

SEQ ID NO: 1830557 - RNA, 19 nt, Artificial Sequence
  Description of Artificial Sequence: Synthetic oligonucleotide
acccggagacggacguccc

SEQ ID NO: 1830558 - RNA, 19 nt, Artificial Sequence
  Description of Artificial Sequence: Synthetic oligonucleotide
cacugggcacacuucugaa

SEQ ID NO: 1830559 - RNA, 19 nt, Artificial Sequence
  Description of Artificial Sequence: Synthetic oligonucleotide
ccgugcgcugggauuaaag

SEQ ID NO: 1830560 - RNA, 19 nt, Artificial Sequence
  Description of Artificial Sequence: Synthetic oligonucleotide
guccagucuuaugcuugcc

SEQ ID NO: 1830561 - RNA, 19 nt, Artificial Sequence
  Description of Artificial Sequence: Synthetic oligonucleotide
gcgcugggauuaaaggaag

SEQ ID NO: 1830562 - RNA, 19 nt, Artificial Sequence
  Description of Artificial Sequence: Synthetic oligonucleotide
ccaaauacuccaucagggu

SEQ ID NO: 1830563 - RNA, 19 nt, Artificial Sequence
  Description of Artificial Sequence: Synthetic oligonucleotide
gaacugcuaaauacucuuu

SEQ ID NO: 1830564 - RNA, 19 nt, Artificial Sequence
  Description of Artificial Sequence: Synthetic oligonucleotide
cuuaugcuugccucccuuu

SEQ ID NO: 1830565 - RNA, 19 nt, Artificial Sequence
  Description of Artificial Sequence: Synthetic oligonucleotide
gacuaggccuggccuugaa

SEQ ID NO: 1830566 - RNA, 19 nt, Artificial Sequence
  Description of Artificial Sequence: Synthetic oligonucleotide
gucuaaguugccgguuucu

SEQ ID NO: 1830567 - RNA, 19 nt, Artificial Sequence
  Description of Artificial Sequence: Synthetic oligonucleotide
cugcgacccggagacggac

SEQ ID NO: 1830568 - RNA, 19 nt, Artificial Sequence
  Description of Artificial Sequence: Synthetic oligonucleotide
gaccacaguaagugccuuu

SEQ ID NO: 1830569 - RNA, 19 nt, Artificial Sequence
  Description of Artificial Sequence: Synthetic oligonucleotide
gcuauuaggucugcccucu

SEQ ID NO: 1830570 - RNA, 19 nt, Artificial Sequence
  Description of Artificial Sequence: Synthetic oligonucleotide
ccggagacggacgucccgc

SEQ ID NO: 1830571 - RNA, 19 nt, Artificial Sequence
  Description of Artificial Sequence: Synthetic oligonucleotide
ugucucccgugcgcuggga

SEQ ID NO: 1830572 - RNA, 19 nt, Artificial Sequence
  Description of Artificial Sequence: Synthetic oligonucleotide
cucuccccaagugaugccu

SEQ ID NO: 1830573 - RNA, 19 nt, Artificial Sequence
  Description of Artificial Sequence: Synthetic oligonucleotide
cucccgugcgcugggauua

SEQ ID NO: 1830574 - RNA, 19 nt, Artificial Sequence
  Description of Artificial Sequence: Synthetic oligonucleotide
cgcugcgacccggagacgg

SEQ ID NO: 1830575 - RNA, 19 nt, Artificial Sequence
  Description of Artificial Sequence: Synthetic oligonucleotide
ccaauccuaucuugagaaa

SEQ ID NO: 1830576 - RNA, 19 nt, Artificial Sequence
  Description of Artificial Sequence: Synthetic oligonucleotide
cuuuugacuuagggaauuu

SEQ ID NO: 1830577 - RNA, 19 nt, Artificial Sequence
  Description of Artificial Sequence: Synthetic oligonucleotide
cccggagacggacgucccg

SEQ ID NO: 1830578 - RNA, 19 nt, Artificial Sequence
  Description of Artificial Sequence: Synthetic oligonucleotide
gccgguuucuaaaaguauu

SEQ ID NO: 1830579 - RNA, 19 nt, Artificial Sequence
  Description of Artificial Sequence: Synthetic oligonucleotide
ccgguuucuaaaaguauuu

SEQ ID NO: 1830580 - RNA, 19 nt, Artificial Sequence
  Description of Artificial Sequence: Synthetic oligonucleotide
cguauccacuuuacuacaa

SEQ ID NO: 1830581 - RNA, 19 nt, Artificial Sequence
  Description of Artificial Sequence: Synthetic oligonucleotide
ccgaacagaccauggagau

SEQ ID NO: 1830582 - RNA, 19 nt, Artificial Sequence
  Description of Artificial Sequence: Synthetic oligonucleotide
cuuucucaacaucgcccau

SEQ ID NO: 1830583 - RNA, 19 nt, Artificial Sequence
  Description of Artificial Sequence: Synthetic oligonucleotide
ucccgugcgcugggauuaa

SEQ ID NO: 1830584 - RNA, 19 nt, Artificial Sequence
  Description of Artificial Sequence: Synthetic oligonucleotide
ccucucucccuucuucuua

SEQ ID NO: 1830585 - RNA, 19 nt, Artificial Sequence
  Description of Artificial Sequence: Synthetic oligonucleotide
gucucccgugcgcugggau

SEQ ID NO: 1830586 - RNA, 19 nt, Artificial Sequence
  Description of Artificial Sequence: Synthetic oligonucleotide
ggcaucuguguacgagaau

SEQ ID NO: 1830587 - RNA, 19 nt, Artificial Sequence
  Description of Artificial Sequence: Synthetic oligonucleotide
ccucccuuuuccacagugu

SEQ ID NO: 1830588 - RNA, 19 nt, Artificial Sequence
  Description of Artificial Sequence: Synthetic oligonucleotide
gcgacccggagacggacgu

SEQ ID NO: 1830589 - RNA, 19 nt, Artificial Sequence
  Description of Artificial Sequence: Synthetic oligonucleotide
gcugcgacccggagacgga

SEQ ID NO: 1830590 - RNA, 19 nt, Artificial Sequence
  Description of Artificial Sequence: Synthetic oligonucleotide
ccccaagugaugccuuugu

SEQ ID NO: 1830591 - RNA, 19 nt, Artificial Sequence
  Description of Artificial Sequence: Synthetic oligonucleotide
gacggacgucccgcucucu

SEQ ID NO: 1830592 - RNA, 19 nt, Artificial Sequence
  Description of Artificial Sequence: Synthetic oligonucleotide
ggucugcccucucucccuu

SEQ ID NO: 1830593 - RNA, 19 nt, Artificial Sequence
  Description of Artificial Sequence: Synthetic oligonucleotide
cccaagugaugccuuuguu

SEQ ID NO: 1830594 - RNA, 19 nt, Artificial Sequence
  Description of Artificial Sequence: Synthetic oligonucleotide
ccgcugcgacccggagacg

SEQ ID NO: 1830595 - RNA, 19 nt, Artificial Sequence
  Description of Artificial Sequence: Synthetic oligonucleotide
cgaacagaccauggagauu

SEQ ID NO: 1830596 - RNA, 19 nt, Artificial Sequence
  Description of Artificial Sequence: Synthetic oligonucleotide
cggagacggacgucccgcu

SEQ ID NO: 1830597 - RNA, 19 nt, Artificial Sequence
  Description of Artificial Sequence: Synthetic oligonucleotide
cccgugcgcugggauuaaa

SEQ ID NO: 1830598 - RNA, 19 nt, Artificial Sequence
  Description of Artificial Sequence: Synthetic oligonucleotide
aagaauaccagguucacgc

SEQ ID NO: 1830599 - RNA, 19 nt, Artificial Sequence
  Description of Artificial Sequence: Synthetic oligonucleotide
uuugugaagaugcagauca

SEQ ID NO: 1830600 - RNA, 19 nt, Artificial Sequence
  Description of Artificial Sequence: Synthetic oligonucleotide
uacugaauuagaaagacug

SEQ ID NO: 1830601 - RNA, 19 nt, Artificial Sequence
  Description of Artificial Sequence: Synthetic oligonucleotide
uagacuugcagaaagaaug

SEQ ID NO: 1830602 - RNA, 19 nt, Artificial Sequence
  Description of Artificial Sequence: Synthetic oligonucleotide
aucaauguaaguuuccugg

SEQ ID NO: 1830603 - RNA, 19 nt, Artificial Sequence
  Description of Artificial Sequence: Synthetic oligonucleotide
caauuguucacccaaaugc

SEQ ID NO: 1830604 - RNA, 19 nt, Artificial Sequence
  Description of Artificial Sequence: Synthetic oligonucleotide
cucagaauggcuauggugg

SEQ ID NO: 1830605 - RNA, 19 nt, Artificial Sequence
  Description of Artificial Sequence: Synthetic oligonucleotide
agugucaagagguagauga

SEQ ID NO: 1830606 - RNA, 19 nt, Artificial Sequence
  Description of Artificial Sequence: Synthetic oligonucleotide
uucagcauaaacuagcccu

SEQ ID NO: 1830607 - RNA, 19 nt, Artificial Sequence
  Description of Artificial Sequence: Synthetic oligonucleotide
auucagacaacacuuccgc

SEQ ID NO: 1830608 - RNA, 19 nt, Artificial Sequence
  Description of Artificial Sequence: Synthetic oligonucleotide
ugugggauuaugcaggagc

SEQ ID NO: 1830609 - RNA, 19 nt, Artificial Sequence
  Description of Artificial Sequence: Synthetic oligonucleotide
cacaucaucgaaucgauag

SEQ ID NO: 1830610 - RNA, 19 nt, Artificial Sequence
  Description of Artificial Sequence: Synthetic oligonucleotide
ucuggaacgcgcaaagacg

SEQ ID NO: 1830611 - RNA, 19 nt, Artificial Sequence
  Description of Artificial Sequence: Synthetic oligonucleotide
uauaccauucauuuguggu

SEQ ID NO: 1830612 - RNA, 19 nt, Artificial Sequence
  Description of Artificial Sequence: Synthetic oligonucleotide
auaaacuagcccuugcaag

SEQ ID NO: 1830613 - RNA, 19 nt, Artificial Sequence
  Description of Artificial Sequence: Synthetic oligonucleotide
ucgauagacuugcagaaag

SEQ ID NO: 1830614 - RNA, 19 nt, Artificial Sequence
  Description of Artificial Sequence: Synthetic oligonucleotide
ugaauuagaaagacugugu

SEQ ID NO: 1830615 - RNA, 19 nt, Artificial Sequence
  Description of Artificial Sequence: Synthetic oligonucleotide
uuuccuuaagccacaagug

SEQ ID NO: 1830616 - RNA, 19 nt, Artificial Sequence
  Description of Artificial Sequence: Synthetic oligonucleotide
gaagguaacaggucuuccg

SEQ ID NO: 1830617 - RNA, 19 nt, Artificial Sequence
  Description of Artificial Sequence: Synthetic oligonucleotide
aucgaaucgauagacuugc

SEQ ID NO: 1830618 - RNA, 19 nt, Artificial Sequence
  Description of Artificial Sequence: Synthetic oligonucleotide
agguguauucagcauaaac

SEQ ID NO: 1830619 - RNA, 19 nt, Artificial Sequence
  Description of Artificial Sequence: Synthetic oligonucleotide
cacuaguuggaccagaaag

SEQ ID NO: 1830620 - RNA, 19 nt, Artificial Sequence
  Description of Artificial Sequence: Synthetic oligonucleotide
auaccauucauuugugguc

SEQ ID NO: 1830621 - RNA, 19 nt, Artificial Sequence
  Description of Artificial Sequence: Synthetic oligonucleotide
gaagguugcuccaaaaucc

SEQ ID NO: 1830622 - RNA, 19 nt, Artificial Sequence
  Description of Artificial Sequence: Synthetic oligonucleotide
aaucgauagacuugcagaa

SEQ ID NO: 1830623 - RNA, 19 nt, Artificial Sequence
  Description of Artificial Sequence: Synthetic oligonucleotide
gaaucgauagacuugcaga

SEQ ID NO: 1830624 - RNA, 19 nt, Artificial Sequence
  Description of Artificial Sequence: Synthetic oligonucleotide
uaaacuagcccuugcaaga

SEQ ID NO: 1830625 - RNA, 19 nt, Artificial Sequence
  Description of Artificial Sequence: Synthetic oligonucleotide
aguaccugguguuccaggc

SEQ ID NO: 1830626 - RNA, 19 nt, Artificial Sequence
  Description of Artificial Sequence: Synthetic oligonucleotide
aguaccaugacaaagccca

SEQ ID NO: 1830627 - RNA, 19 nt, Artificial Sequence
  Description of Artificial Sequence: Synthetic oligonucleotide
cucaguaccaugacaaagc

SEQ ID NO: 1830628 - RNA, 19 nt, Artificial Sequence
  Description of Artificial Sequence: Synthetic oligonucleotide
ugcuccaaaauccauggga

SEQ ID NO: 1830629 - RNA, 19 nt, Artificial Sequence
  Description of Artificial Sequence: Synthetic oligonucleotide
aggaccaggcuuuucaaac

SEQ ID NO: 1830630 - RNA, 19 nt, Artificial Sequence
  Description of Artificial Sequence: Synthetic oligonucleotide
cauggcaacaccaaucaac

SEQ ID NO: 1830631 - RNA, 19 nt, Artificial Sequence
  Description of Artificial Sequence: Synthetic oligonucleotide
aaacggugcacacaguggu

SEQ ID NO: 1830632 - RNA, 19 nt, Artificial Sequence
  Description of Artificial Sequence: Synthetic oligonucleotide
aagacggugacaugguugu

SEQ ID NO: 1830633 - RNA, 19 nt, Artificial Sequence
  Description of Artificial Sequence: Synthetic oligonucleotide
uuauaccauucauuugugg

SEQ ID NO: 1830634 - RNA, 19 nt, Artificial Sequence
  Description of Artificial Sequence: Synthetic oligonucleotide
guagaaagaucucucgaag

SEQ ID NO: 1830635 - RNA, 19 nt, Artificial Sequence
  Description of Artificial Sequence: Synthetic oligonucleotide
uuccuuaagccacaaguga

SEQ ID NO: 1830636 - RNA, 19 nt, Artificial Sequence
  Description of Artificial Sequence: Synthetic oligonucleotide
uucuggaacgcgcaaagac

SEQ ID NO: 1830637 - RNA, 19 nt, Artificial Sequence
  Description of Artificial Sequence: Synthetic oligonucleotide
acuaguuggaccagaaagg

SEQ ID NO: 1830638 - RNA, 19 nt, Artificial Sequence
  Description of Artificial Sequence: Synthetic oligonucleotide
ucaguaccaugacaaagcc

SEQ ID NO: 1830639 - RNA, 19 nt, Artificial Sequence
  Description of Artificial Sequence: Synthetic oligonucleotide
aggcagauagaacuccagc

SEQ ID NO: 1830640 - RNA, 19 nt, Artificial Sequence
  Description of Artificial Sequence: Synthetic oligonucleotide
uaaguuuccugguacagau

SEQ ID NO: 1830641 - RNA, 19 nt, Artificial Sequence
  Description of Artificial Sequence: Synthetic oligonucleotide
ugaugaucaaaacggugca

SEQ ID NO: 1830642 - RNA, 19 nt, Artificial Sequence
  Description of Artificial Sequence: Synthetic oligonucleotide
cuggaacgcgcaaagacgg

SEQ ID NO: 1830643 - RNA, 19 nt, Artificial Sequence
  Description of Artificial Sequence: Synthetic oligonucleotide
acggugacaugguuguucc

SEQ ID NO: 1830644 - RNA, 19 nt, Artificial Sequence
  Description of Artificial Sequence: Synthetic oligonucleotide
agcauaaacuagcccuugc

SEQ ID NO: 1830645 - RNA, 19 nt, Artificial Sequence
  Description of Artificial Sequence: Synthetic oligonucleotide
aggaagaugauccuuggaa

SEQ ID NO: 1830646 - RNA, 19 nt, Artificial Sequence
  Description of Artificial Sequence: Synthetic oligonucleotide
aggucuuccgccuacauau

SEQ ID NO: 1830647 - RNA, 19 nt, Artificial Sequence
  Description of Artificial Sequence: Synthetic oligonucleotide
uccaaaauccaugggagug

SEQ ID NO: 1830648 - RNA, 19 nt, Artificial Sequence
  Description of Artificial Sequence: Synthetic oligonucleotide
ggagugaauguucugacag

SEQ ID NO: 1830649 - RNA, 19 nt, Artificial Sequence
  Description of Artificial Sequence: Synthetic oligonucleotide
aaaacggugcacacagugg

SEQ ID NO: 1830650 - RNA, 19 nt, Artificial Sequence
  Description of Artificial Sequence: Synthetic oligonucleotide
aacuagcccuugcaagagc

SEQ ID NO: 1830651 - RNA, 19 nt, Artificial Sequence
  Description of Artificial Sequence: Synthetic oligonucleotide
auccacggagaauucagac

SEQ ID NO: 1830652 - RNA, 19 nt, Artificial Sequence
  Description of Artificial Sequence: Synthetic oligonucleotide
gguccagucaccuuuauac

SEQ ID NO: 1830653 - RNA, 19 nt, Artificial Sequence
  Description of Artificial Sequence: Synthetic oligonucleotide
aacaggggauggcagguag

SEQ ID NO: 1830654 - RNA, 19 nt, Artificial Sequence
  Description of Artificial Sequence: Synthetic oligonucleotide
ucacccaaaugcaaugaug

SEQ ID NO: 1830655 - RNA, 19 nt, Artificial Sequence
  Description of Artificial Sequence: Synthetic oligonucleotide
aauccaugggagugaaugu

SEQ ID NO: 1830656 - RNA, 19 nt, Artificial Sequence
  Description of Artificial Sequence: Synthetic oligonucleotide
uuauugaugaugccuggau

SEQ ID NO: 1830657 - RNA, 19 nt, Artificial Sequence
  Description of Artificial Sequence: Synthetic oligonucleotide
cuuggaaaagccaggaaca

SEQ ID NO: 1830658 - RNA, 19 nt, Artificial Sequence
  Description of Artificial Sequence: Synthetic oligonucleotide
acucagaauggcuauggug

SEQ ID NO: 1830659 - RNA, 19 nt, Artificial Sequence
  Description of Artificial Sequence: Synthetic oligonucleotide
aaagacggugacaugguug

SEQ ID NO: 1830660 - RNA, 19 nt, Artificial Sequence
  Description of Artificial Sequence: Synthetic oligonucleotide
ucaucgaaucgauagacuu

SEQ ID NO: 1830661 - RNA, 19 nt, Artificial Sequence
  Description of Artificial Sequence: Synthetic oligonucleotide
cugaauuagaaagacugug

SEQ ID NO: 1830662 - RNA, 19 nt, Artificial Sequence
  Description of Artificial Sequence: Synthetic oligonucleotide
uguucacccaaaugcaaug

SEQ ID NO: 1830663 - RNA, 19 nt, Artificial Sequence
  Description of Artificial Sequence: Synthetic oligonucleotide
caaaacggugcacacagug

SEQ ID NO: 1830664 - RNA, 19 nt, Artificial Sequence
  Description of Artificial Sequence: Synthetic oligonucleotide
agguaacaggucuuccgcc

SEQ ID NO: 1830665 - RNA, 19 nt, Artificial Sequence
  Description of Artificial Sequence: Synthetic oligonucleotide
ugaggcucagcugaugggg

SEQ ID NO: 1830666 - RNA, 19 nt, Artificial Sequence
  Description of Artificial Sequence: Synthetic oligonucleotide
gaauaccagguucacgccc

SEQ ID NO: 1830667 - RNA, 19 nt, Artificial Sequence
  Description of Artificial Sequence: Synthetic oligonucleotide
uuguggucugguuaguggc

SEQ ID NO: 1830668 - RNA, 19 nt, Artificial Sequence
  Description of Artificial Sequence: Synthetic oligonucleotide
uguaaguuuccugguacag

SEQ ID NO: 1830669 - RNA, 19 nt, Artificial Sequence
  Description of Artificial Sequence: Synthetic oligonucleotide
aacaagucagcgugaagaa

SEQ ID NO: 1830670 - RNA, 19 nt, Artificial Sequence
  Description of Artificial Sequence: Synthetic oligonucleotide
uggcaguagccaaauaucu

SEQ ID NO: 1830671 - RNA, 19 nt, Artificial Sequence
  Description of Artificial Sequence: Synthetic oligonucleotide
uccuuaagccacaagugaa

SEQ ID NO: 1830672 - RNA, 19 nt, Artificial Sequence
  Description of Artificial Sequence: Synthetic oligonucleotide
acaagugaagcaccuggag

SEQ ID NO: 1830673 - RNA, 19 nt, Artificial Sequence
  Description of Artificial Sequence: Synthetic oligonucleotide
uccgccuacauauuucucu

SEQ ID NO: 1830674 - RNA, 19 nt, Artificial Sequence
  Description of Artificial Sequence: Synthetic oligonucleotide
uuaugcaggagcacaccug

SEQ ID NO: 1830675 - RNA, 19 nt, Artificial Sequence
  Description of Artificial Sequence: Synthetic oligonucleotide
cagguagaaagaucucucg

SEQ ID NO: 1830676 - RNA, 19 nt, Artificial Sequence
  Description of Artificial Sequence: Synthetic oligonucleotide
ucaauguaaguuuccuggu

SEQ ID NO: 1830677 - RNA, 19 nt, Artificial Sequence
  Description of Artificial Sequence: Synthetic oligonucleotide
uacagaucagacacugcca

SEQ ID NO: 1830678 - RNA, 19 nt, Artificial Sequence
  Description of Artificial Sequence: Synthetic oligonucleotide
uucucauaacaggggaugg

SEQ ID NO: 1830679 - RNA, 19 nt, Artificial Sequence
  Description of Artificial Sequence: Synthetic oligonucleotide
aacgcgcaaagacggugac

SEQ ID NO: 1830680 - RNA, 19 nt, Artificial Sequence
  Description of Artificial Sequence: Synthetic oligonucleotide
uuuucucauaacaggggau

SEQ ID NO: 1830681 - RNA, 19 nt, Artificial Sequence
  Description of Artificial Sequence: Synthetic oligonucleotide
cauagggcaguucuggcac

SEQ ID NO: 1830682 - RNA, 19 nt, Artificial Sequence
  Description of Artificial Sequence: Synthetic oligonucleotide
aagucagcgugaagaauac

SEQ ID NO: 1830683 - RNA, 19 nt, Artificial Sequence
  Description of Artificial Sequence: Synthetic oligonucleotide
auggcagguagaaagaucu

SEQ ID NO: 1830684 - RNA, 19 nt, Artificial Sequence
  Description of Artificial Sequence: Synthetic oligonucleotide
ugcagaaagaaugacucau

SEQ ID NO: 1830685 - RNA, 19 nt, Artificial Sequence
  Description of Artificial Sequence: Synthetic oligonucleotide
agccaaauaucuccaaggu

SEQ ID NO: 1830686 - RNA, 19 nt, Artificial Sequence
  Description of Artificial Sequence: Synthetic oligonucleotide
aaacuagcccuugcaagag

SEQ ID NO: 1830687 - RNA, 19 nt, Artificial Sequence
  Description of Artificial Sequence: Synthetic oligonucleotide
ugcagaucauggcaacacc

SEQ ID NO: 1830688 - RNA, 19 nt, Artificial Sequence
  Description of Artificial Sequence: Synthetic oligonucleotide
gauuggcggaacaagucag

SEQ ID NO: 1830689 - RNA, 19 nt, Artificial Sequence
  Description of Artificial Sequence: Synthetic oligonucleotide
aacaagaaggccagguaga

SEQ ID NO: 1830690 - RNA, 19 nt, Artificial Sequence
  Description of Artificial Sequence: Synthetic oligonucleotide
caucgaaucgauagacuug

SEQ ID NO: 1830691 - RNA, 19 nt, Artificial Sequence
  Description of Artificial Sequence: Synthetic oligonucleotide
ugaucaaaacggugcacac

SEQ ID NO: 1830692 - RNA, 19 nt, Artificial Sequence
  Description of Artificial Sequence: Synthetic oligonucleotide
caggcuuuucaaacgcugg

SEQ ID NO: 1830693 - RNA, 19 nt, Artificial Sequence
  Description of Artificial Sequence: Synthetic oligonucleotide
aggacgaugaaggaggggu

SEQ ID NO: 1830694 - RNA, 19 nt, Artificial Sequence
  Description of Artificial Sequence: Synthetic oligonucleotide
gauccuuggaaaagccagg

SEQ ID NO: 1830695 - RNA, 19 nt, Artificial Sequence
  Description of Artificial Sequence: Synthetic oligonucleotide
uugugcuucuggaacgcgc

SEQ ID NO: 1830696 - RNA, 19 nt, Artificial Sequence
  Description of Artificial Sequence: Synthetic oligonucleotide
ucaacaagaaggccaggua

SEQ ID NO: 1830697 - RNA, 19 nt, Artificial Sequence
  Description of Artificial Sequence: Synthetic oligonucleotide
uagcauucgcuccucuuug

SEQ ID NO: 1830698 - RNA, 19 nt, Artificial Sequence
  Description of Artificial Sequence: Synthetic oligonucleotide
uuuauugaugaugccugga

SEQ ID NO: 1830699 - RNA, 19 nt, Artificial Sequence
  Description of Artificial Sequence: Synthetic oligonucleotide
uuguucacccaaaugcaau

SEQ ID NO: 1830700 - RNA, 19 nt, Artificial Sequence
  Description of Artificial Sequence: Synthetic oligonucleotide
gaccaggcuuuucaaacgc

SEQ ID NO: 1830701 - RNA, 19 nt, Artificial Sequence
  Description of Artificial Sequence: Synthetic oligonucleotide
agguagaaagaucucucga

SEQ ID NO: 1830702 - RNA, 19 nt, Artificial Sequence
  Description of Artificial Sequence: Synthetic oligonucleotide
uuggcggaacaagucagcg

SEQ ID NO: 1830703 - RNA, 19 nt, Artificial Sequence
  Description of Artificial Sequence: Synthetic oligonucleotide
caucaucgaaucgauagac

SEQ ID NO: 1830704 - RNA, 19 nt, Artificial Sequence
  Description of Artificial Sequence: Synthetic oligonucleotide
acaucaucgaaucgauaga

SEQ ID NO: 1830705 - RNA, 19 nt, Artificial Sequence
  Description of Artificial Sequence: Synthetic oligonucleotide
ucgaagguugcuccaaaau

SEQ ID NO: 1830706 - RNA, 19 nt, Artificial Sequence
  Description of Artificial Sequence: Synthetic oligonucleotide
uggucacacacccugcagu

SEQ ID NO: 1830707 - RNA, 19 nt, Artificial Sequence
  Description of Artificial Sequence: Synthetic oligonucleotide
uggagaugcccaaagucau

SEQ ID NO: 1830708 - RNA, 19 nt, Artificial Sequence
  Description of Artificial Sequence: Synthetic oligonucleotide
ggcggaacaagucagcgug

SEQ ID NO: 1830709 - RNA, 19 nt, Artificial Sequence
  Description of Artificial Sequence: Synthetic oligonucleotide
ucuuccgccuacauauuuc

SEQ ID NO: 1830710 - RNA, 19 nt, Artificial Sequence
  Description of Artificial Sequence: Synthetic oligonucleotide
uggauuggcggaacaaguc

SEQ ID NO: 1830711 - RNA, 19 nt, Artificial Sequence
  Description of Artificial Sequence: Synthetic oligonucleotide
ucagcauaaacuagcccuu

SEQ ID NO: 1830712 - RNA, 19 nt, Artificial Sequence
  Description of Artificial Sequence: Synthetic oligonucleotide
agugcuuggaccgggcggg

SEQ ID NO: 1830713 - RNA, 19 nt, Artificial Sequence
  Description of Artificial Sequence: Synthetic oligonucleotide
agcacaccugugcuccucc

SEQ ID NO: 1830714 - RNA, 19 nt, Artificial Sequence
  Description of Artificial Sequence: Synthetic oligonucleotide
gccuacauauuucucuugg

SEQ ID NO: 1830715 - RNA, 19 nt, Artificial Sequence
  Description of Artificial Sequence: Synthetic oligonucleotide
cugugcggcccucugaagg

SEQ ID NO: 1830716 - RNA, 19 nt, Artificial Sequence
  Description of Artificial Sequence: Synthetic oligonucleotide
cuuggucggacacuguuuc

SEQ ID NO: 1830717 - RNA, 19 nt, Artificial Sequence
  Description of Artificial Sequence: Synthetic oligonucleotide
uucucuuggucggacacug

SEQ ID NO: 1830718 - RNA, 19 nt, Artificial Sequence
  Description of Artificial Sequence: Synthetic oligonucleotide
gguacugaauuagaaagac

SEQ ID NO: 1830719 - RNA, 19 nt, Artificial Sequence
  Description of Artificial Sequence: Synthetic oligonucleotide
auagggcaguucuggcacc

SEQ ID NO: 1830720 - RNA, 19 nt, Artificial Sequence
  Description of Artificial Sequence: Synthetic oligonucleotide
aaagaaugacucauugguu

SEQ ID NO: 1830721 - RNA, 19 nt, Artificial Sequence
  Description of Artificial Sequence: Synthetic oligonucleotide
guuucagcggcaccucuag

SEQ ID NO: 1830722 - RNA, 19 nt, Artificial Sequence
  Description of Artificial Sequence: Synthetic oligonucleotide
gucagcgugaagaauacca

SEQ ID NO: 1830723 - RNA, 19 nt, Artificial Sequence
  Description of Artificial Sequence: Synthetic oligonucleotide
aagaugcagaucauggcaa

SEQ ID NO: 1830724 - RNA, 19 nt, Artificial Sequence
  Description of Artificial Sequence: Synthetic oligonucleotide
ccuuggaaaagccaggaac

SEQ ID NO: 1830725 - RNA, 19 nt, Artificial Sequence
  Description of Artificial Sequence: Synthetic oligonucleotide
gauuaugcaggagcacacc

SEQ ID NO: 1830726 - RNA, 19 nt, Artificial Sequence
  Description of Artificial Sequence: Synthetic oligonucleotide
auguaaguuuccugguaca

SEQ ID NO: 1830727 - RNA, 19 nt, Artificial Sequence
  Description of Artificial Sequence: Synthetic oligonucleotide
ugugcggcccucugaaggc

SEQ ID NO: 1830728 - RNA, 19 nt, Artificial Sequence
  Description of Artificial Sequence: Synthetic oligonucleotide
auuggcggaacaagucagc

SEQ ID NO: 1830729 - RNA, 19 nt, Artificial Sequence
  Description of Artificial Sequence: Synthetic oligonucleotide
ucucauaacaggggauggc

SEQ ID NO: 1830730 - RNA, 19 nt, Artificial Sequence
  Description of Artificial Sequence: Synthetic oligonucleotide
uggucggacacuguuucag

SEQ ID NO: 1830731 - RNA, 19 nt, Artificial Sequence
  Description of Artificial Sequence: Synthetic oligonucleotide
uucacccaaaugcaaugau

SEQ ID NO: 1830732 - RNA, 19 nt, Artificial Sequence
  Description of Artificial Sequence: Synthetic oligonucleotide
agcgugaagaauaccaggu

SEQ ID NO: 1830733 - RNA, 19 nt, Artificial Sequence
  Description of Artificial Sequence: Synthetic oligonucleotide
aaugacucauugguuuuau

SEQ ID NO: 1830734 - RNA, 19 nt, Artificial Sequence
  Description of Artificial Sequence: Synthetic oligonucleotide
agaaugacucauugguuuu

SEQ ID NO: 1830735 - RNA, 19 nt, Artificial Sequence
  Description of Artificial Sequence: Synthetic oligonucleotide
acacuguuucagcggcacc

SEQ ID NO: 1830736 - RNA, 19 nt, Artificial Sequence
  Description of Artificial Sequence: Synthetic oligonucleotide
gagaauucagacaacacuu

SEQ ID NO: 1830737 - RNA, 19 nt, Artificial Sequence
  Description of Artificial Sequence: Synthetic oligonucleotide
acauccacggagaauucag

SEQ ID NO: 1830738 - RNA, 19 nt, Artificial Sequence
  Description of Artificial Sequence: Synthetic oligonucleotide
augggagugaauguucuga

SEQ ID NO: 1830739 - RNA, 19 nt, Artificial Sequence
  Description of Artificial Sequence: Synthetic oligonucleotide
ugguuuuauugaugaugcc

SEQ ID NO: 1830740 - RNA, 19 nt, Artificial Sequence
  Description of Artificial Sequence: Synthetic oligonucleotide
aaggcagauagaacuccag

SEQ ID NO: 1830741 - RNA, 19 nt, Artificial Sequence
  Description of Artificial Sequence: Synthetic oligonucleotide
caguaccaugacaaagccc

SEQ ID NO: 1830742 - RNA, 19 nt, Artificial Sequence
  Description of Artificial Sequence: Synthetic oligonucleotide
uuuugugaagaugcagauc

SEQ ID NO: 1830743 - RNA, 19 nt, Artificial Sequence
  Description of Artificial Sequence: Synthetic oligonucleotide
ggugacaugguuguuccag

SEQ ID NO: 1830744 - RNA, 19 nt, Artificial Sequence
  Description of Artificial Sequence: Synthetic oligonucleotide
gcaauuguucacccaaaug

SEQ ID NO: 1830745 - RNA, 19 nt, Artificial Sequence
  Description of Artificial Sequence: Synthetic oligonucleotide
acggagaauucagacaaca

SEQ ID NO: 1830746 - RNA, 19 nt, Artificial Sequence
  Description of Artificial Sequence: Synthetic oligonucleotide
ggagaauucagacaacacu

SEQ ID NO: 1830747 - RNA, 19 nt, Artificial Sequence
  Description of Artificial Sequence: Synthetic oligonucleotide
cugguuaguggcagccagg

SEQ ID NO: 1830748 - RNA, 19 nt, Artificial Sequence
  Description of Artificial Sequence: Synthetic oligonucleotide
gucaccauagggcaguucu

SEQ ID NO: 1830749 - RNA, 19 nt, Artificial Sequence
  Description of Artificial Sequence: Synthetic oligonucleotide
gagugaauguucugacaga

SEQ ID NO: 1830750 - RNA, 19 nt, Artificial Sequence
  Description of Artificial Sequence: Synthetic oligonucleotide
gcugauggggaccagguca

SEQ ID NO: 1830751 - RNA, 19 nt, Artificial Sequence
  Description of Artificial Sequence: Synthetic oligonucleotide
gaagcacagguagccagcc

SEQ ID NO: 1830752 - RNA, 19 nt, Artificial Sequence
  Description of Artificial Sequence: Synthetic oligonucleotide
uccaagguguauucagcau

SEQ ID NO: 1830753 - RNA, 19 nt, Artificial Sequence
  Description of Artificial Sequence: Synthetic oligonucleotide
ucuuggucggacacuguuu

SEQ ID NO: 1830754 - RNA, 19 nt, Artificial Sequence
  Description of Artificial Sequence: Synthetic oligonucleotide
gguacagaaggaagcacag

SEQ ID NO: 1830755 - RNA, 19 nt, Artificial Sequence
  Description of Artificial Sequence: Synthetic oligonucleotide
cagugcuuggaccgggcgg

SEQ ID NO: 1830756 - RNA, 19 nt, Artificial Sequence
  Description of Artificial Sequence: Synthetic oligonucleotide
ucagcggcaccucuagcau

SEQ ID NO: 1830757 - RNA, 19 nt, Artificial Sequence
  Description of Artificial Sequence: Synthetic oligonucleotide
caccucuagcauucgcucc

SEQ ID NO: 1830758 - RNA, 19 nt, Artificial Sequence
  Description of Artificial Sequence: Synthetic oligonucleotide
gauggcagguagaaagauc

SEQ ID NO: 1830759 - RNA, 19 nt, Artificial Sequence
  Description of Artificial Sequence: Synthetic oligonucleotide
gaucaaaacggugcacaca

SEQ ID NO: 1830760 - RNA, 19 nt, Artificial Sequence
  Description of Artificial Sequence: Synthetic oligonucleotide
uucacgcccagcagcagau

SEQ ID NO: 1830761 - RNA, 19 nt, Artificial Sequence
  Description of Artificial Sequence: Synthetic oligonucleotide
aacggugcacacagugguc

SEQ ID NO: 1830762 - RNA, 19 nt, Artificial Sequence
  Description of Artificial Sequence: Synthetic oligonucleotide
agucagcgugaagaauacc

SEQ ID NO: 1830763 - RNA, 19 nt, Artificial Sequence
  Description of Artificial Sequence: Synthetic oligonucleotide
agacuugcagaaagaauga

SEQ ID NO: 1830764 - RNA, 19 nt, Artificial Sequence
  Description of Artificial Sequence: Synthetic oligonucleotide
gaaguaccugguguuccag

SEQ ID NO: 1830765 - RNA, 19 nt, Artificial Sequence
  Description of Artificial Sequence: Synthetic oligonucleotide
acuagcccuugcaagagca

SEQ ID NO: 1830766 - RNA, 19 nt, Artificial Sequence
  Description of Artificial Sequence: Synthetic oligonucleotide
agcggcaccucuagcauuc

SEQ ID NO: 1830767 - RNA, 19 nt, Artificial Sequence
  Description of Artificial Sequence: Synthetic oligonucleotide
ggccagguagaacaagaag

SEQ ID NO: 1830768 - RNA, 19 nt, Artificial Sequence
  Description of Artificial Sequence: Synthetic oligonucleotide
gacuugcagaaagaaugac

SEQ ID NO: 1830769 - RNA, 19 nt, Artificial Sequence
  Description of Artificial Sequence: Synthetic oligonucleotide
ucaaaacggugcacacagu

SEQ ID NO: 1830770 - RNA, 19 nt, Artificial Sequence
  Description of Artificial Sequence: Synthetic oligonucleotide
ucucgaagguugcuccaaa

SEQ ID NO: 1830771 - RNA, 19 nt, Artificial Sequence
  Description of Artificial Sequence: Synthetic oligonucleotide
ggauuggcggaacaaguca

SEQ ID NO: 1830772 - RNA, 19 nt, Artificial Sequence
  Description of Artificial Sequence: Synthetic oligonucleotide
uggaguucucuggaaacau

SEQ ID NO: 1830773 - RNA, 19 nt, Artificial Sequence
  Description of Artificial Sequence: Synthetic oligonucleotide
caugggagugaauguucug

SEQ ID NO: 1830774 - RNA, 19 nt, Artificial Sequence
  Description of Artificial Sequence: Synthetic oligonucleotide
gaaggagggguugcgugug

SEQ ID NO: 1830775 - RNA, 19 nt, Artificial Sequence
  Description of Artificial Sequence: Synthetic oligonucleotide
guaaguuuccugguacaga

SEQ ID NO: 1830776 - RNA, 19 nt, Artificial Sequence
  Description of Artificial Sequence: Synthetic oligonucleotide
aguccaugccggaggaagg

SEQ ID NO: 1830777 - RNA, 19 nt, Artificial Sequence
  Description of Artificial Sequence: Synthetic oligonucleotide
ugacagaugugaggcucag

SEQ ID NO: 1830778 - RNA, 19 nt, Artificial Sequence
  Description of Artificial Sequence: Synthetic oligonucleotide
uggcggaacaagucagcgu

SEQ ID NO: 1830779 - RNA, 19 nt, Artificial Sequence
  Description of Artificial Sequence: Synthetic oligonucleotide
caugccggaggaagguaac

SEQ ID NO: 1830780 - RNA, 19 nt, Artificial Sequence
  Description of Artificial Sequence: Synthetic oligonucleotide
cacaagugaagcaccugga

SEQ ID NO: 1830781 - RNA, 19 nt, Artificial Sequence
  Description of Artificial Sequence: Synthetic oligonucleotide
gugggauuaugcaggagca

SEQ ID NO: 1830782 - RNA, 19 nt, Artificial Sequence
  Description of Artificial Sequence: Synthetic oligonucleotide
aucacaucaucgaaucgau

SEQ ID NO: 1830783 - RNA, 19 nt, Artificial Sequence
  Description of Artificial Sequence: Synthetic oligonucleotide
ccuuuauaccauucauuug

SEQ ID NO: 1830784 - RNA, 19 nt, Artificial Sequence
  Description of Artificial Sequence: Synthetic oligonucleotide
aaggcacugugggauuaug

SEQ ID NO: 1830785 - RNA, 19 nt, Artificial Sequence
  Description of Artificial Sequence: Synthetic oligonucleotide
aucaucgaaucgauagacu

SEQ ID NO: 1830786 - RNA, 19 nt, Artificial Sequence
  Description of Artificial Sequence: Synthetic oligonucleotide
gccggaggaagguaacagg

SEQ ID NO: 1830787 - RNA, 19 nt, Artificial Sequence
  Description of Artificial Sequence: Synthetic oligonucleotide
cauucgcuccucuuugcca

SEQ ID NO: 1830788 - RNA, 19 nt, Artificial Sequence
  Description of Artificial Sequence: Synthetic oligonucleotide
ucacaucaucgaaucgaua

SEQ ID NO: 1830789 - RNA, 19 nt, Artificial Sequence
  Description of Artificial Sequence: Synthetic oligonucleotide
ucgaaucgauagacuugca

SEQ ID NO: 1830790 - RNA, 19 nt, Artificial Sequence
  Description of Artificial Sequence: Synthetic oligonucleotide
acaagaaggccagguagaa

SEQ ID NO: 1830791 - RNA, 19 nt, Artificial Sequence
  Description of Artificial Sequence: Synthetic oligonucleotide
gaacgcgcaaagacgguga

SEQ ID NO: 1830792 - RNA, 19 nt, Artificial Sequence
  Description of Artificial Sequence: Synthetic oligonucleotide
caaugaugaucaaaacggu

SEQ ID NO: 1830793 - RNA, 19 nt, Artificial Sequence
  Description of Artificial Sequence: Synthetic oligonucleotide
gggauuaugcaggagcaca

SEQ ID NO: 1830794 - RNA, 19 nt, Artificial Sequence
  Description of Artificial Sequence: Synthetic oligonucleotide
ugggauuaugcaggagcac

SEQ ID NO: 1830795 - RNA, 19 nt, Artificial Sequence
  Description of Artificial Sequence: Synthetic oligonucleotide
uggaacgcgcaaagacggu

SEQ ID NO: 1830796 - RNA, 19 nt, Artificial Sequence
  Description of Artificial Sequence: Synthetic oligonucleotide
uggucugguuaguggcagc

SEQ ID NO: 1830797 - RNA, 19 nt, Artificial Sequence
  Description of Artificial Sequence: Synthetic oligonucleotide
guucacgcccagcagcaga

SEQ ID NO: 1830798 - RNA, 19 nt, Artificial Sequence
  Description of Artificial Sequence: Synthetic oligonucleotide
ggaacaagucagcgugaag

SEQ ID NO: 1830799 - RNA, 19 nt, Artificial Sequence
  Description of Artificial Sequence: Synthetic oligonucleotide
gggcggguuuccuuaagcc

SEQ ID NO: 1830800 - RNA, 19 nt, Artificial Sequence
  Description of Artificial Sequence: Synthetic oligonucleotide
cgaagguugcuccaaaauc

SEQ ID NO: 1830801 - RNA, 19 nt, Artificial Sequence
  Description of Artificial Sequence: Synthetic oligonucleotide
accauucauuuguggucug

SEQ ID NO: 1830802 - RNA, 19 nt, Artificial Sequence
  Description of Artificial Sequence: Synthetic oligonucleotide
ccaggagcaagcucaguac

SEQ ID NO: 1830803 - RNA, 19 nt, Artificial Sequence
  Description of Artificial Sequence: Synthetic oligonucleotide
agcucaguaccaugacaaa

SEQ ID NO: 1830804 - RNA, 19 nt, Artificial Sequence
  Description of Artificial Sequence: Synthetic oligonucleotide
ggauuaugcaggagcacac

SEQ ID NO: 1830805 - RNA, 19 nt, Artificial Sequence
  Description of Artificial Sequence: Synthetic oligonucleotide
ccaggcuuuucaaacgcug

SEQ ID NO: 1830806 - RNA, 19 nt, Artificial Sequence
  Description of Artificial Sequence: Synthetic oligonucleotide
cgaaucgauagacuugcag

SEQ ID NO: 1830807 - RNA, 19 nt, Artificial Sequence
  Description of Artificial Sequence: Synthetic oligonucleotide
ccacggagaauucagacaa

SEQ ID NO: 1830808 - RNA, 19 nt, Artificial Sequence
  Description of Artificial Sequence: Synthetic oligonucleotide
uuccgccuacauauuucuc

SEQ ID NO: 1830809 - RNA, 19 nt, Artificial Sequence
  Description of Artificial Sequence: Synthetic oligonucleotide
ugccuggauuggcggaaca

SEQ ID NO: 1830810 - RNA, 19 nt, Artificial Sequence
  Description of Artificial Sequence: Synthetic oligonucleotide
aucgauagacuugcagaaa

SEQ ID NO: 1830811 - RNA, 19 nt, Artificial Sequence
  Description of Artificial Sequence: Synthetic oligonucleotide
uuccgccuggguagcguug

SEQ ID NO: 1830812 - RNA, 19 nt, Artificial Sequence
  Description of Artificial Sequence: Synthetic oligonucleotide
cauccacggagaauucaga

SEQ ID NO: 1830813 - RNA, 19 nt, Artificial Sequence
  Description of Artificial Sequence: Synthetic oligonucleotide
cacggagaauucagacaac

SEQ ID NO: 1830814 - RNA, 19 nt, Artificial Sequence
  Description of Artificial Sequence: Synthetic oligonucleotide
gcagaagccucugugcggc

SEQ ID NO: 1830815 - RNA, 19 nt, Artificial Sequence
  Description of Artificial Sequence: Synthetic oligonucleotide
ggucggacacuguuucagc

SEQ ID NO: 1830816 - RNA, 19 nt, Artificial Sequence
  Description of Artificial Sequence: Synthetic oligonucleotide
caacacuuccgccugggua

SEQ ID NO: 1830817 - RNA, 19 nt, Artificial Sequence
  Description of Artificial Sequence: Synthetic oligonucleotide
cuggauuggcggaacaagu

SEQ ID NO: 1830818 - RNA, 19 nt, Artificial Sequence
  Description of Artificial Sequence: Synthetic oligonucleotide
ggcggguuuccuuaagcca

SEQ ID NO: 1830819 - RNA, 19 nt, Artificial Sequence
  Description of Artificial Sequence: Synthetic oligonucleotide
ggaagguaacaggucuucc

SEQ ID NO: 1830820 - RNA, 19 nt, Artificial Sequence
  Description of Artificial Sequence: Synthetic oligonucleotide
gcauucgcuccucuuugcc

SEQ ID NO: 1830821 - RNA, 19 nt, Artificial Sequence
  Description of Artificial Sequence: Synthetic oligonucleotide
ggaacgcgcaaagacggug

SEQ ID NO: 1830822 - RNA, 19 nt, Artificial Sequence
  Description of Artificial Sequence: Synthetic oligonucleotide
agguucacgcccagcagca

SEQ ID NO: 1830823 - RNA, 19 nt, Artificial Sequence
  Description of Artificial Sequence: Synthetic oligonucleotide
gcagguagaaagaucucuc

SEQ ID NO: 1830824 - RNA, 19 nt, Artificial Sequence
  Description of Artificial Sequence: Synthetic oligonucleotide
gcggguuuccuuaagccac

SEQ ID NO: 1830825 - RNA, 19 nt, Artificial Sequence
  Description of Artificial Sequence: Synthetic oligonucleotide
gggguugcguguguggaag

SEQ ID NO: 1830826 - RNA, 19 nt, Artificial Sequence
  Description of Artificial Sequence: Synthetic oligonucleotide
gccccgaugcaauuguuca

SEQ ID NO: 1830827 - RNA, 19 nt, Artificial Sequence
  Description of Artificial Sequence: Synthetic oligonucleotide
agcccuugcaagagcaggu

SEQ ID NO: 1830828 - RNA, 19 nt, Artificial Sequence
  Description of Artificial Sequence: Synthetic oligonucleotide
ccuggauuggcggaacaag

SEQ ID NO: 1830829 - RNA, 19 nt, Artificial Sequence
  Description of Artificial Sequence: Synthetic oligonucleotide
aagguguauucagcauaaa

SEQ ID NO: 1830830 - RNA, 19 nt, Artificial Sequence
  Description of Artificial Sequence: Synthetic oligonucleotide
acgcccagcagcagauagg

SEQ ID NO: 1830831 - RNA, 19 nt, Artificial Sequence
  Description of Artificial Sequence: Synthetic oligonucleotide
ugccacuaguuggaccaga

SEQ ID NO: 1830832 - RNA, 19 nt, Artificial Sequence
  Description of Artificial Sequence: Synthetic oligonucleotide
guaccaugacaaagcccag

SEQ ID NO: 1830833 - RNA, 19 nt, Artificial Sequence
  Description of Artificial Sequence: Synthetic oligonucleotide
gggagugaauguucugaca

SEQ ID NO: 1830834 - RNA, 19 nt, Artificial Sequence
  Description of Artificial Sequence: Synthetic oligonucleotide
agguccagucaccuuuaua

SEQ ID NO: 1830835 - RNA, 19 nt, Artificial Sequence
  Description of Artificial Sequence: Synthetic oligonucleotide
ccgaugcaauuguucaccc

SEQ ID NO: 1830836 - RNA, 19 nt, Artificial Sequence
  Description of Artificial Sequence: Synthetic oligonucleotide
caggacgaugaaggagggg

SEQ ID NO: 1830837 - RNA, 19 nt, Artificial Sequence
  Description of Artificial Sequence: Synthetic oligonucleotide
cucgaagguugcuccaaaa

SEQ ID NO: 1830838 - RNA, 19 nt, Artificial Sequence
  Description of Artificial Sequence: Synthetic oligonucleotide
ccuugcaagagcaggugca

SEQ ID NO: 1830839 - RNA, 19 nt, Artificial Sequence
  Description of Artificial Sequence: Synthetic oligonucleotide
cuguguccacugacuggag

SEQ ID NO: 1830840 - RNA, 19 nt, Artificial Sequence
  Description of Artificial Sequence: Synthetic oligonucleotide
uccgccuggguagcguugu

SEQ ID NO: 1830841 - RNA, 19 nt, Artificial Sequence
  Description of Artificial Sequence: Synthetic oligonucleotide
agccacaagugaagcaccu

SEQ ID NO: 1830842 - RNA, 19 nt, Artificial Sequence
  Description of Artificial Sequence: Synthetic oligonucleotide
ggcaguagccaaauaucuc

SEQ ID NO: 1830843 - RNA, 19 nt, Artificial Sequence
  Description of Artificial Sequence: Synthetic oligonucleotide
cuagcauucgcuccucuuu

SEQ ID NO: 1830844 - RNA, 19 nt, Artificial Sequence
  Description of Artificial Sequence: Synthetic oligonucleotide
accaggcuuuucaaacgcu

SEQ ID NO: 1830845 - RNA, 19 nt, Artificial Sequence
  Description of Artificial Sequence: Synthetic oligonucleotide
gcguguguggaagagcuga

SEQ ID NO: 1830846 - RNA, 19 nt, Artificial Sequence
  Description of Artificial Sequence: Synthetic oligonucleotide
cccuugcaagagcaggugc

SEQ ID NO: 1830847 - RNA, 19 nt, Artificial Sequence
  Description of Artificial Sequence: Synthetic oligonucleotide
gaccgggcggguuuccuua

SEQ ID NO: 1830848 - RNA, 19 nt, Artificial Sequence
  Description of Artificial Sequence: Synthetic oligonucleotide
ccaagguguauucagcaua

SEQ ID NO: 1830849 - RNA, 19 nt, Artificial Sequence
  Description of Artificial Sequence: Synthetic oligonucleotide
uaacaggggauggcaggua

SEQ ID NO: 1830850 - RNA, 19 nt, Artificial Sequence
  Description of Artificial Sequence: Synthetic oligonucleotide
cauucauuuguggucuggu

SEQ ID NO: 1830851 - RNA, 19 nt, Artificial Sequence
  Description of Artificial Sequence: Synthetic oligonucleotide
augccggaggaagguaaca

SEQ ID NO: 1830852 - RNA, 19 nt, Artificial Sequence
  Description of Artificial Sequence: Synthetic oligonucleotide
cagaagccucugugcggcc

SEQ ID NO: 1830853 - RNA, 19 nt, Artificial Sequence
  Description of Artificial Sequence: Synthetic oligonucleotide
ggcagguagaaagaucucu

SEQ ID NO: 1830854 - RNA, 19 nt, Artificial Sequence
  Description of Artificial Sequence: Synthetic oligonucleotide
cugugggauuaugcaggag

SEQ ID NO: 1830855 - RNA, 19 nt, Artificial Sequence
  Description of Artificial Sequence: Synthetic oligonucleotide
uccaugccggaggaaggua

SEQ ID NO: 1830856 - RNA, 19 nt, Artificial Sequence
  Description of Artificial Sequence: Synthetic oligonucleotide
ccauagggcaguucuggca

SEQ ID NO: 1830857 - RNA, 19 nt, Artificial Sequence
  Description of Artificial Sequence: Synthetic oligonucleotide
cuuggaccgggcggguuuc

SEQ ID NO: 1830858 - RNA, 19 nt, Artificial Sequence
  Description of Artificial Sequence: Synthetic oligonucleotide
gucugguuaguggcagcca

SEQ ID NO: 1830859 - RNA, 19 nt, Artificial Sequence
  Description of Artificial Sequence: Synthetic oligonucleotide
acgcgcaaagacggugaca

SEQ ID NO: 1830860 - RNA, 19 nt, Artificial Sequence
  Description of Artificial Sequence: Synthetic oligonucleotide
cugccacuaguuggaccag

SEQ ID NO: 1830861 - RNA, 19 nt, Artificial Sequence
  Description of Artificial Sequence: Synthetic oligonucleotide
ccccgaugcaauuguucac

SEQ ID NO: 1830862 - RNA, 19 nt, Artificial Sequence
  Description of Artificial Sequence: Synthetic oligonucleotide
uggaccgggcggguuuccu

SEQ ID NO: 1830863 - RNA, 19 nt, Artificial Sequence
  Description of Artificial Sequence: Synthetic oligonucleotide
uuggaccgggcggguuucc

SEQ ID NO: 1830864 - RNA, 19 nt, Artificial Sequence
  Description of Artificial Sequence: Synthetic oligonucleotide
gucuuccgccuacauauuu

SEQ ID NO: 1830865 - RNA, 19 nt, Artificial Sequence
  Description of Artificial Sequence: Synthetic oligonucleotide
cucucgaagguugcuccaa

SEQ ID NO: 1830866 - RNA, 19 nt, Artificial Sequence
  Description of Artificial Sequence: Synthetic oligonucleotide
ccggaggaagguaacaggu

SEQ ID NO: 1830867 - RNA, 19 nt, Artificial Sequence
  Description of Artificial Sequence: Synthetic oligonucleotide
cgauagacuugcagaaaga

SEQ ID NO: 1830868 - RNA, 19 nt, Artificial Sequence
  Description of Artificial Sequence: Synthetic oligonucleotide
accgggcggguuuccuuaa

SEQ ID NO: 1830869 - RNA, 19 nt, Artificial Sequence
  Description of Artificial Sequence: Synthetic oligonucleotide
gugcuucuggaacgcgcaa

SEQ ID NO: 1830870 - RNA, 19 nt, Artificial Sequence
  Description of Artificial Sequence: Synthetic oligonucleotide
gccuggguagcguugugcu

SEQ ID NO: 1830871 - RNA, 19 nt, Artificial Sequence
  Description of Artificial Sequence: Synthetic oligonucleotide
ggccccgaugcaauuguuc

SEQ ID NO: 1830872 - RNA, 19 nt, Artificial Sequence
  Description of Artificial Sequence: Synthetic oligonucleotide
ccaugccggaggaagguaa

SEQ ID NO: 1830873 - RNA, 19 nt, Artificial Sequence
  Description of Artificial Sequence: Synthetic oligonucleotide
caaagacggugacaugguu

SEQ ID NO: 1830874 - RNA, 19 nt, Artificial Sequence
  Description of Artificial Sequence: Synthetic oligonucleotide
gguucacgcccagcagcag

SEQ ID NO: 1830875 - RNA, 19 nt, Artificial Sequence
  Description of Artificial Sequence: Synthetic oligonucleotide
caggccccgaugcaauugu

SEQ ID NO: 1830876 - RNA, 19 nt, Artificial Sequence
  Description of Artificial Sequence: Synthetic oligonucleotide
cgggcggguuuccuuaagc

SEQ ID NO: 1830877 - RNA, 19 nt, Artificial Sequence
  Description of Artificial Sequence: Synthetic oligonucleotide
ccaugggagugaauguucu

SEQ ID NO: 1830878 - RNA, 19 nt, Artificial Sequence
  Description of Artificial Sequence: Synthetic oligonucleotide
gccacuaguuggaccagaa

SEQ ID NO: 1830879 - RNA, 19 nt, Artificial Sequence
  Description of Artificial Sequence: Synthetic oligonucleotide
gcgcaaagacggugacaug

SEQ ID NO: 1830880 - RNA, 19 nt, Artificial Sequence
  Description of Artificial Sequence: Synthetic oligonucleotide
ggguugcguguguggaaga

SEQ ID NO: 1830881 - RNA, 19 nt, Artificial Sequence
  Description of Artificial Sequence: Synthetic oligonucleotide
cgccuacauauuucucuug

SEQ ID NO: 1830882 - RNA, 19 nt, Artificial Sequence
  Description of Artificial Sequence: Synthetic oligonucleotide
gugcggcccucugaaggca

SEQ ID NO: 1830883 - RNA, 19 nt, Artificial Sequence
  Description of Artificial Sequence: Synthetic oligonucleotide
cauuuguggucugguuagu

SEQ ID NO: 1830884 - RNA, 19 nt, Artificial Sequence
  Description of Artificial Sequence: Synthetic oligonucleotide
cgaugcaauuguucaccca

SEQ ID NO: 1830885 - RNA, 19 nt, Artificial Sequence
  Description of Artificial Sequence: Synthetic oligonucleotide
agacggugacaugguuguu

SEQ ID NO: 1830886 - RNA, 19 nt, Artificial Sequence
  Description of Artificial Sequence: Synthetic oligonucleotide
gccuggauuggcggaacaa

SEQ ID NO: 1830887 - RNA, 19 nt, Artificial Sequence
  Description of Artificial Sequence: Synthetic oligonucleotide
ccacuaguuggaccagaaa

SEQ ID NO: 1830888 - RNA, 19 nt, Artificial Sequence
  Description of Artificial Sequence: Synthetic oligonucleotide
gcggaacaagucagcguga

SEQ ID NO: 1830889 - RNA, 19 nt, Artificial Sequence
  Description of Artificial Sequence: Synthetic oligonucleotide
cuuccgccuggguagcguu

SEQ ID NO: 1830890 - RNA, 19 nt, Artificial Sequence
  Description of Artificial Sequence: Synthetic oligonucleotide
gcggcaccucuagcauucg

SEQ ID NO: 1830891 - RNA, 19 nt, Artificial Sequence
  Description of Artificial Sequence: Synthetic oligonucleotide
cgcgcaaagacggugacau

SEQ ID NO: 1830892 - RNA, 19 nt, Artificial Sequence
  Description of Artificial Sequence: Synthetic oligonucleotide
cggugcacacaguggucac

SEQ ID NO: 1830893 - RNA, 19 nt, Artificial Sequence
  Description of Artificial Sequence: Synthetic oligonucleotide
gcuuggaccgggcggguuu

SEQ ID NO: 1830894 - RNA, 19 nt, Artificial Sequence
  Description of Artificial Sequence: Synthetic oligonucleotide
ggguuuccuuaagccacaa

SEQ ID NO: 1830895 - RNA, 19 nt, Artificial Sequence
  Description of Artificial Sequence: Synthetic oligonucleotide
ccgggcggguuuccuuaag

SEQ ID NO: 1830896 - RNA, 19 nt, Artificial Sequence
  Description of Artificial Sequence: Synthetic oligonucleotide
cggcaccucuagcauucgc

SEQ ID NO: 1830897 - RNA, 19 nt, Artificial Sequence
  Description of Artificial Sequence: Synthetic oligonucleotide
aggccccgaugcaauuguu

SEQ ID NO: 1830898 - RNA, 19 nt, Artificial Sequence
  Description of Artificial Sequence: Synthetic oligonucleotide
ccagugucaagagguagau

SEQ ID NO: 1830899 - RNA, 19 nt, Artificial Sequence
  Description of Artificial Sequence: Synthetic oligonucleotide
ccgccuacauauuucucuu

SEQ ID NO: 1830900 - RNA, 19 nt, Artificial Sequence
  Description of Artificial Sequence: Synthetic oligonucleotide
cagcggcaccucuagcauu

SEQ ID NO: 1830901 - RNA, 19 nt, Artificial Sequence
  Description of Artificial Sequence: Synthetic oligonucleotide
cggaacaagucagcgugaa

SEQ ID NO: 1830902 - RNA, 19 nt, Artificial Sequence
  Description of Artificial Sequence: Synthetic oligonucleotide
ggguagcguugugcuucug

SEQ ID NO: 1830903 - RNA, 19 nt, Artificial Sequence
  Description of Artificial Sequence: Synthetic oligonucleotide
ggaccgggcggguuuccuu

SEQ ID NO: 1830904 - RNA, 19 nt, Artificial Sequence
  Description of Artificial Sequence: Synthetic oligonucleotide
ggcccucugaaggcacugu

SEQ ID NO: 1830905 - RNA, 19 nt, Artificial Sequence
  Description of Artificial Sequence: Synthetic oligonucleotide
cggugacaugguuguucca

SEQ ID NO: 1830906 - RNA, 19 nt, Artificial Sequence
  Description of Artificial Sequence: Synthetic oligonucleotide
ccuggguagcguugugcuu

SEQ ID NO: 1830907 - RNA, 19 nt, Artificial Sequence
  Description of Artificial Sequence: Synthetic oligonucleotide
ucaauaugaggcaugaugc

SEQ ID NO: 1830908 - RNA, 19 nt, Artificial Sequence
  Description of Artificial Sequence: Synthetic oligonucleotide
cauaugugcauguagaccg

SEQ ID NO: 1830909 - RNA, 19 nt, Artificial Sequence
  Description of Artificial Sequence: Synthetic oligonucleotide
ugaccaaagauucuuaugc

SEQ ID NO: 1830910 - RNA, 19 nt, Artificial Sequence
  Description of Artificial Sequence: Synthetic oligonucleotide
aguucuccgacuuaauucc

SEQ ID NO: 1830911 - RNA, 19 nt, Artificial Sequence
  Description of Artificial Sequence: Synthetic oligonucleotide
gaagauuggauucacuugc

SEQ ID NO: 1830912 - RNA, 19 nt, Artificial Sequence
  Description of Artificial Sequence: Synthetic oligonucleotide
ugaauauuucuucauggcc

SEQ ID NO: 1830913 - RNA, 19 nt, Artificial Sequence
  Description of Artificial Sequence: Synthetic oligonucleotide
aacaggacauccuugaagu

SEQ ID NO: 1830914 - RNA, 19 nt, Artificial Sequence
  Description of Artificial Sequence: Synthetic oligonucleotide
gauuggauucacuugcugg

SEQ ID NO: 1830915 - RNA, 19 nt, Artificial Sequence
  Description of Artificial Sequence: Synthetic oligonucleotide
auuucaaaaguccccacgg

SEQ ID NO: 1830916 - RNA, 19 nt, Artificial Sequence
  Description of Artificial Sequence: Synthetic oligonucleotide
gauucuuaugcuuagcaac

SEQ ID NO: 1830917 - RNA, 19 nt, Artificial Sequence
  Description of Artificial Sequence: Synthetic oligonucleotide
auaaagguaguucuccgac

SEQ ID NO: 1830918 - RNA, 19 nt, Artificial Sequence
  Description of Artificial Sequence: Synthetic oligonucleotide
uaugcuuagcaacuagccg

SEQ ID NO: 1830919 - RNA, 19 nt, Artificial Sequence
  Description of Artificial Sequence: Synthetic oligonucleotide
aucacgaauaguauguucc

SEQ ID NO: 1830920 - RNA, 19 nt, Artificial Sequence
  Description of Artificial Sequence: Synthetic oligonucleotide
uuaaagggaacuucuacug

SEQ ID NO: 1830921 - RNA, 19 nt, Artificial Sequence
  Description of Artificial Sequence: Synthetic oligonucleotide
cucacuucgagacuuaagg

SEQ ID NO: 1830922 - RNA, 19 nt, Artificial Sequence
  Description of Artificial Sequence: Synthetic oligonucleotide
auuggauucacuugcuggg

SEQ ID NO: 1830923 - RNA, 19 nt, Artificial Sequence
  Description of Artificial Sequence: Synthetic oligonucleotide
agacuucucagguuuaucg

SEQ ID NO: 1830924 - RNA, 19 nt, Artificial Sequence
  Description of Artificial Sequence: Synthetic oligonucleotide
uuaugcuuagcaacuagcc

SEQ ID NO: 1830925 - RNA, 19 nt, Artificial Sequence
  Description of Artificial Sequence: Synthetic oligonucleotide
aaaugauauggccuuugag

SEQ ID NO: 1830926 - RNA, 19 nt, Artificial Sequence
  Description of Artificial Sequence: Synthetic oligonucleotide
uuuuacuuggggaauggca

SEQ ID NO: 1830927 - RNA, 19 nt, Artificial Sequence
  Description of Artificial Sequence: Synthetic oligonucleotide
aaaauguucagaguagcca

SEQ ID NO: 1830928 - RNA, 19 nt, Artificial Sequence
  Description of Artificial Sequence: Synthetic oligonucleotide
aaauguucagaguagccau

SEQ ID NO: 1830929 - RNA, 19 nt, Artificial Sequence
  Description of Artificial Sequence: Synthetic oligonucleotide
uugaagucuaguuucacgu

SEQ ID NO: 1830930 - RNA, 19 nt, Artificial Sequence
  Description of Artificial Sequence: Synthetic oligonucleotide
aucgcugaagauuggauuc

SEQ ID NO: 1830931 - RNA, 19 nt, Artificial Sequence
  Description of Artificial Sequence: Synthetic oligonucleotide
gaacucauuccauagaaga

SEQ ID NO: 1830932 - RNA, 19 nt, Artificial Sequence
  Description of Artificial Sequence: Synthetic oligonucleotide
uuagcaacuagccgcgcgg

SEQ ID NO: 1830933 - RNA, 19 nt, Artificial Sequence
  Description of Artificial Sequence: Synthetic oligonucleotide
uuuacuuggggaauggcau

SEQ ID NO: 1830934 - RNA, 19 nt, Artificial Sequence
  Description of Artificial Sequence: Synthetic oligonucleotide
cucguaugagucuucaggg

SEQ ID NO: 1830935 - RNA, 19 nt, Artificial Sequence
  Description of Artificial Sequence: Synthetic oligonucleotide
acgguauccauauuggcag

SEQ ID NO: 1830936 - RNA, 19 nt, Artificial Sequence
  Description of Artificial Sequence: Synthetic oligonucleotide
ucuaguuucacgucauugu

SEQ ID NO: 1830937 - RNA, 19 nt, Artificial Sequence
  Description of Artificial Sequence: Synthetic oligonucleotide
agaugcucaagacagucag

SEQ ID NO: 1830938 - RNA, 19 nt, Artificial Sequence
  Description of Artificial Sequence: Synthetic oligonucleotide
aacaaaauguucagaguag

SEQ ID NO: 1830939 - RNA, 19 nt, Artificial Sequence
  Description of Artificial Sequence: Synthetic oligonucleotide
acauaugugcauguagacc

SEQ ID NO: 1830940 - RNA, 19 nt, Artificial Sequence
  Description of Artificial Sequence: Synthetic oligonucleotide
cuugaagucuaguuucacg

SEQ ID NO: 1830941 - RNA, 19 nt, Artificial Sequence
  Description of Artificial Sequence: Synthetic oligonucleotide
uguuuugaguuccggaaug

SEQ ID NO: 1830942 - RNA, 19 nt, Artificial Sequence
  Description of Artificial Sequence: Synthetic oligonucleotide
uuccgaguuguacaaacag

SEQ ID NO: 1830943 - RNA, 19 nt, Artificial Sequence
  Description of Artificial Sequence: Synthetic oligonucleotide
uccggaaugagaaggaccu

SEQ ID NO: 1830944 - RNA, 19 nt, Artificial Sequence
  Description of Artificial Sequence: Synthetic oligonucleotide
ucacuucgagacuuaaggg

SEQ ID NO: 1830945 - RNA, 19 nt, Artificial Sequence
  Description of Artificial Sequence: Synthetic oligonucleotide
cuuaugcuuagcaacuagc

SEQ ID NO: 1830946 - RNA, 19 nt, Artificial Sequence
  Description of Artificial Sequence: Synthetic oligonucleotide
ucuuaugcuuagcaacuag

SEQ ID NO: 1830947 - RNA, 19 nt, Artificial Sequence
  Description of Artificial Sequence: Synthetic oligonucleotide
cugaauauuucuucauggc

SEQ ID NO: 1830948 - RNA, 19 nt, Artificial Sequence
  Description of Artificial Sequence: Synthetic oligonucleotide
agaucuaccucacuucgag

SEQ ID NO: 1830949 - RNA, 19 nt, Artificial Sequence
  Description of Artificial Sequence: Synthetic oligonucleotide
ugugagaucuaccucacuu

SEQ ID NO: 1830950 - RNA, 19 nt, Artificial Sequence
  Description of Artificial Sequence: Synthetic oligonucleotide
gaggauaucacgaauagua

SEQ ID NO: 1830951 - RNA, 19 nt, Artificial Sequence
  Description of Artificial Sequence: Synthetic oligonucleotide
uaguauguuccacaucccc

SEQ ID NO: 1830952 - RNA, 19 nt, Artificial Sequence
  Description of Artificial Sequence: Synthetic oligonucleotide
uccgacuuaauuccuucag

SEQ ID NO: 1830953 - RNA, 19 nt, Artificial Sequence
  Description of Artificial Sequence: Synthetic oligonucleotide
aaagguaguucuccgacuu

SEQ ID NO: 1830954 - RNA, 19 nt, Artificial Sequence
  Description of Artificial Sequence: Synthetic oligonucleotide
auauuggcagcgauaaugg

SEQ ID NO: 1830955 - RNA, 19 nt, Artificial Sequence
  Description of Artificial Sequence: Synthetic oligonucleotide
ggaaaguagacuucucagg

SEQ ID NO: 1830956 - RNA, 19 nt, Artificial Sequence
  Description of Artificial Sequence: Synthetic oligonucleotide
acucgaauaaagguaguuc

SEQ ID NO: 1830957 - RNA, 19 nt, Artificial Sequence
  Description of Artificial Sequence: Synthetic oligonucleotide
auguagaccggaugccucc

SEQ ID NO: 1830958 - RNA, 19 nt, Artificial Sequence
  Description of Artificial Sequence: Synthetic oligonucleotide
gaggauuagcucuucuacc

SEQ ID NO: 1830959 - RNA, 19 nt, Artificial Sequence
  Description of Artificial Sequence: Synthetic oligonucleotide
ugugcauguagaccggaug

SEQ ID NO: 1830960 - RNA, 19 nt, Artificial Sequence
  Description of Artificial Sequence: Synthetic oligonucleotide
gaguuccggaaugagaagg

SEQ ID NO: 1830961 - RNA, 19 nt, Artificial Sequence
  Description of Artificial Sequence: Synthetic oligonucleotide
uuauggacggcagugaaaa

SEQ ID NO: 1830962 - RNA, 19 nt, Artificial Sequence
  Description of Artificial Sequence: Synthetic oligonucleotide
aggauuagcucuucuacca

SEQ ID NO: 1830963 - RNA, 19 nt, Artificial Sequence
  Description of Artificial Sequence: Synthetic oligonucleotide
gaugcaggguuccuguugc

SEQ ID NO: 1830964 - RNA, 19 nt, Artificial Sequence
  Description of Artificial Sequence: Synthetic oligonucleotide
gaagucuaguuucacguca

SEQ ID NO: 1830965 - RNA, 19 nt, Artificial Sequence
  Description of Artificial Sequence: Synthetic oligonucleotide
uucgccaccugauucacug

SEQ ID NO: 1830966 - RNA, 19 nt, Artificial Sequence
  Description of Artificial Sequence: Synthetic oligonucleotide
ucagguuuaucgggaaucg

SEQ ID NO: 1830967 - RNA, 19 nt, Artificial Sequence
  Description of Artificial Sequence: Synthetic oligonucleotide
cagaguagccauuagccac

SEQ ID NO: 1830968 - RNA, 19 nt, Artificial Sequence
  Description of Artificial Sequence: Synthetic oligonucleotide
acgaauaguauguuccaca

SEQ ID NO: 1830969 - RNA, 19 nt, Artificial Sequence
  Description of Artificial Sequence: Synthetic oligonucleotide
uuccggaaugagaaggacc

SEQ ID NO: 1830970 - RNA, 19 nt, Artificial Sequence
  Description of Artificial Sequence: Synthetic oligonucleotide
gaaaguagacuucucaggu

SEQ ID NO: 1830971 - RNA, 19 nt, Artificial Sequence
  Description of Artificial Sequence: Synthetic oligonucleotide
gaagcgcuuccguacaucc

SEQ ID NO: 1830972 - RNA, 19 nt, Artificial Sequence
  Description of Artificial Sequence: Synthetic oligonucleotide
uuccguacauccuuuacaa

SEQ ID NO: 1830973 - RNA, 19 nt, Artificial Sequence
  Description of Artificial Sequence: Synthetic oligonucleotide
ucuuccgaguuguacaaac

SEQ ID NO: 1830974 - RNA, 19 nt, Artificial Sequence
  Description of Artificial Sequence: Synthetic oligonucleotide
gugacucgaauaaagguag

SEQ ID NO: 1830975 - RNA, 19 nt, Artificial Sequence
  Description of Artificial Sequence: Synthetic oligonucleotide
uacauaugugcauguagac

SEQ ID NO: 1830976 - RNA, 19 nt, Artificial Sequence
  Description of Artificial Sequence: Synthetic oligonucleotide
cauuucagaacucauucca

SEQ ID NO: 1830977 - RNA, 19 nt, Artificial Sequence
  Description of Artificial Sequence: Synthetic oligonucleotide
gauucuggcuagcaaacuc

SEQ ID NO: 1830978 - RNA, 19 nt, Artificial Sequence
  Description of Artificial Sequence: Synthetic oligonucleotide
gauaucacgaauaguaugu

SEQ ID NO: 1830979 - RNA, 19 nt, Artificial Sequence
  Description of Artificial Sequence: Synthetic oligonucleotide
gagacuuaagggugcugcg

SEQ ID NO: 1830980 - RNA, 19 nt, Artificial Sequence
  Description of Artificial Sequence: Synthetic oligonucleotide
gcucguaugagucuucagg

SEQ ID NO: 1830981 - RNA, 19 nt, Artificial Sequence
  Description of Artificial Sequence: Synthetic oligonucleotide
cugggugacucgaauaaag

SEQ ID NO: 1830982 - RNA, 19 nt, Artificial Sequence
  Description of Artificial Sequence: Synthetic oligonucleotide
aaugggaaugccauuguau

SEQ ID NO: 1830983 - RNA, 19 nt, Artificial Sequence
  Description of Artificial Sequence: Synthetic oligonucleotide
aguuucacgucauugucaa

SEQ ID NO: 1830984 - RNA, 19 nt, Artificial Sequence
  Description of Artificial Sequence: Synthetic oligonucleotide
uuaagggugcugcguuugg

SEQ ID NO: 1830985 - RNA, 19 nt, Artificial Sequence
  Description of Artificial Sequence: Synthetic oligonucleotide
ucgaauaaagguaguucuc

SEQ ID NO: 1830986 - RNA, 19 nt, Artificial Sequence
  Description of Artificial Sequence: Synthetic oligonucleotide
auuuuacuuggggaauggc

SEQ ID NO: 1830987 - RNA, 19 nt, Artificial Sequence
  Description of Artificial Sequence: Synthetic oligonucleotide
ugaugcaggguuccuguug

SEQ ID NO: 1830988 - RNA, 19 nt, Artificial Sequence
  Description of Artificial Sequence: Synthetic oligonucleotide
agggugcugcguuugggcc

SEQ ID NO: 1830989 - RNA, 19 nt, Artificial Sequence
  Description of Artificial Sequence: Synthetic oligonucleotide
aggaccaauucccacuuug

SEQ ID NO: 1830990 - RNA, 19 nt, Artificial Sequence
  Description of Artificial Sequence: Synthetic oligonucleotide
agccauuucaaaagucccc

SEQ ID NO: 1830991 - RNA, 19 nt, Artificial Sequence
  Description of Artificial Sequence: Synthetic oligonucleotide
ugauauggccuuugaggcc

SEQ ID NO: 1830992 - RNA, 19 nt, Artificial Sequence
  Description of Artificial Sequence: Synthetic oligonucleotide
auuagccacauccaagcau

SEQ ID NO: 1830993 - RNA, 19 nt, Artificial Sequence
  Description of Artificial Sequence: Synthetic oligonucleotide
uguggauaccccacuccag

SEQ ID NO: 1830994 - RNA, 19 nt, Artificial Sequence
  Description of Artificial Sequence: Synthetic oligonucleotide
aaaguagacuucucagguu

SEQ ID NO: 1830995 - RNA, 19 nt, Artificial Sequence
  Description of Artificial Sequence: Synthetic oligonucleotide
ugagcuguggauaccccac

SEQ ID NO: 1830996 - RNA, 19 nt, Artificial Sequence
  Description of Artificial Sequence: Synthetic oligonucleotide
ucacgaauaguauguucca

SEQ ID NO: 1830997 - RNA, 19 nt, Artificial Sequence
  Description of Artificial Sequence: Synthetic oligonucleotide
uuuaucgggaaucgcugaa

SEQ ID NO: 1830998 - RNA, 19 nt, Artificial Sequence
  Description of Artificial Sequence: Synthetic oligonucleotide
ugugcgagcuguucaaagu

SEQ ID NO: 1830999 - RNA, 19 nt, Artificial Sequence
  Description of Artificial Sequence: Synthetic oligonucleotide
agauucuuaugcuuagcaa

SEQ ID NO: 1831000 - RNA, 19 nt, Artificial Sequence
  Description of Artificial Sequence: Synthetic oligonucleotide
ugcugggugacucgaauaa

SEQ ID NO: 1831001 - RNA, 19 nt, Artificial Sequence
  Description of Artificial Sequence: Synthetic oligonucleotide
cuuagccauuucaaaaguc

SEQ ID NO: 1831002 - RNA, 19 nt, Artificial Sequence
  Description of Artificial Sequence: Synthetic oligonucleotide
ugccaugaugguguguugg

SEQ ID NO: 1831003 - RNA, 19 nt, Artificial Sequence
  Description of Artificial Sequence: Synthetic oligonucleotide
uaaagguaguucuccgacu

SEQ ID NO: 1831004 - RNA, 19 nt, Artificial Sequence
  Description of Artificial Sequence: Synthetic oligonucleotide
gaugccuccgaggauauca

SEQ ID NO: 1831005 - RNA, 19 nt, Artificial Sequence
  Description of Artificial Sequence: Synthetic oligonucleotide
ucguaugagucuucagggc

SEQ ID NO: 1831006 - RNA, 19 nt, Artificial Sequence
  Description of Artificial Sequence: Synthetic oligonucleotide
uuucuuccgaguuguacaa

SEQ ID NO: 1831007 - RNA, 19 nt, Artificial Sequence
  Description of Artificial Sequence: Synthetic oligonucleotide
uagaugcucaagacaguca

SEQ ID NO: 1831008 - RNA, 19 nt, Artificial Sequence
  Description of Artificial Sequence: Synthetic oligonucleotide
ccgaguuguacaaacagag

SEQ ID NO: 1831009 - RNA, 19 nt, Artificial Sequence
  Description of Artificial Sequence: Synthetic oligonucleotide
gaaaugauauggccuuuga

SEQ ID NO: 1831010 - RNA, 19 nt, Artificial Sequence
  Description of Artificial Sequence: Synthetic oligonucleotide
aggaccuugugagaucuac

SEQ ID NO: 1831011 - RNA, 19 nt, Artificial Sequence
  Description of Artificial Sequence: Synthetic oligonucleotide
cuccuguuaccacauuucc

SEQ ID NO: 1831012 - RNA, 19 nt, Artificial Sequence
  Description of Artificial Sequence: Synthetic oligonucleotide
auaguauguuccacauccc

SEQ ID NO: 1831013 - RNA, 19 nt, Artificial Sequence
  Description of Artificial Sequence: Synthetic oligonucleotide
agaacuuacagagaaccuu

SEQ ID NO: 1831014 - RNA, 19 nt, Artificial Sequence
  Description of Artificial Sequence: Synthetic oligonucleotide
ucuaccucacuucgagacu

SEQ ID NO: 1831015 - RNA, 19 nt, Artificial Sequence
  Description of Artificial Sequence: Synthetic oligonucleotide
cuucgagacuuaagggugc

SEQ ID NO: 1831016 - RNA, 19 nt, Artificial Sequence
  Description of Artificial Sequence: Synthetic oligonucleotide
uuugggccucaacaggaca

SEQ ID NO: 1831017 - RNA, 19 nt, Artificial Sequence
  Description of Artificial Sequence: Synthetic oligonucleotide
ugaguuccggaaugagaag

SEQ ID NO: 1831018 - RNA, 19 nt, Artificial Sequence
  Description of Artificial Sequence: Synthetic oligonucleotide
ugaagucuaguuucacguc

SEQ ID NO: 1831019 - RNA, 19 nt, Artificial Sequence
  Description of Artificial Sequence: Synthetic oligonucleotide
cacgguauccauauuggca

SEQ ID NO: 1831020 - RNA, 19 nt, Artificial Sequence
  Description of Artificial Sequence: Synthetic oligonucleotide
cucgaauaaagguaguucu

SEQ ID NO: 1831021 - RNA, 19 nt, Artificial Sequence
  Description of Artificial Sequence: Synthetic oligonucleotide
gugaaaagggagaacuuac

SEQ ID NO: 1831022 - RNA, 19 nt, Artificial Sequence
  Description of Artificial Sequence: Synthetic oligonucleotide
uggcuagcaaacucuugcc

SEQ ID NO: 1831023 - RNA, 19 nt, Artificial Sequence
  Description of Artificial Sequence: Synthetic oligonucleotide
aacuuacagagaaccuuag

SEQ ID NO: 1831024 - RNA, 19 nt, Artificial Sequence
  Description of Artificial Sequence: Synthetic oligonucleotide
uauccauauuggcagcgau

SEQ ID NO: 1831025 - RNA, 19 nt, Artificial Sequence
  Description of Artificial Sequence: Synthetic oligonucleotide
cuagaugcucaagacaguc

SEQ ID NO: 1831026 - RNA, 19 nt, Artificial Sequence
  Description of Artificial Sequence: Synthetic oligonucleotide
cagcaugccacccagcauc

SEQ ID NO: 1831027 - RNA, 19 nt, Artificial Sequence
  Description of Artificial Sequence: Synthetic oligonucleotide
uacuuggggaauggcaucc

SEQ ID NO: 1831028 - RNA, 19 nt, Artificial Sequence
  Description of Artificial Sequence: Synthetic oligonucleotide
auuagcucuucuaccaucu

SEQ ID NO: 1831029 - RNA, 19 nt, Artificial Sequence
  Description of Artificial Sequence: Synthetic oligonucleotide
uucacgucauugucaauau

SEQ ID NO: 1831030 - RNA, 19 nt, Artificial Sequence
  Description of Artificial Sequence: Synthetic oligonucleotide
gaauaguauguuccacauc

SEQ ID NO: 1831031 - RNA, 19 nt, Artificial Sequence
  Description of Artificial Sequence: Synthetic oligonucleotide
uguacucagccacgccucc

SEQ ID NO: 1831032 - RNA, 19 nt, Artificial Sequence
  Description of Artificial Sequence: Synthetic oligonucleotide
cuugugagaucuaccucac

SEQ ID NO: 1831033 - RNA, 19 nt, Artificial Sequence
  Description of Artificial Sequence: Synthetic oligonucleotide
uaaugggaaugccauugua

SEQ ID NO: 1831034 - RNA, 19 nt, Artificial Sequence
  Description of Artificial Sequence: Synthetic oligonucleotide
aguauguuccacauccccu

SEQ ID NO: 1831035 - RNA, 19 nt, Artificial Sequence
  Description of Artificial Sequence: Synthetic oligonucleotide
gaaccuuagccauuucaaa

SEQ ID NO: 1831036 - RNA, 19 nt, Artificial Sequence
  Description of Artificial Sequence: Synthetic oligonucleotide
auugucaauaugaggcaug

SEQ ID NO: 1831037 - RNA, 19 nt, Artificial Sequence
  Description of Artificial Sequence: Synthetic oligonucleotide
guagaguugcugccuuggg

SEQ ID NO: 1831038 - RNA, 19 nt, Artificial Sequence
  Description of Artificial Sequence: Synthetic oligonucleotide
uagaccggaugccuccgag

SEQ ID NO: 1831039 - RNA, 19 nt, Artificial Sequence
  Description of Artificial Sequence: Synthetic oligonucleotide
agguuuaucgggaaucgcu

SEQ ID NO: 1831040 - RNA, 19 nt, Artificial Sequence
  Description of Artificial Sequence: Synthetic oligonucleotide
agaaccuuagccauuucaa

SEQ ID NO: 1831041 - RNA, 19 nt, Artificial Sequence
  Description of Artificial Sequence: Synthetic oligonucleotide
ucuccgacuuaauuccuuc

SEQ ID NO: 1831042 - RNA, 19 nt, Artificial Sequence
  Description of Artificial Sequence: Synthetic oligonucleotide
ccuacauaugugcauguag

SEQ ID NO: 1831043 - RNA, 19 nt, Artificial Sequence
  Description of Artificial Sequence: Synthetic oligonucleotide
gaccuugugagaucuaccu

SEQ ID NO: 1831044 - RNA, 19 nt, Artificial Sequence
  Description of Artificial Sequence: Synthetic oligonucleotide
aagggaacuucuacugucu

SEQ ID NO: 1831045 - RNA, 19 nt, Artificial Sequence
  Description of Artificial Sequence: Synthetic oligonucleotide
uccuguugcuuugacucag

SEQ ID NO: 1831046 - RNA, 19 nt, Artificial Sequence
  Description of Artificial Sequence: Synthetic oligonucleotide
guauaucuguuuugaguuc

SEQ ID NO: 1831047 - RNA, 19 nt, Artificial Sequence
  Description of Artificial Sequence: Synthetic oligonucleotide
cucagguuuaucgggaauc

SEQ ID NO: 1831048 - RNA, 19 nt, Artificial Sequence
  Description of Artificial Sequence: Synthetic oligonucleotide
ucaaugaguucgccaccug

SEQ ID NO: 1831049 - RNA, 19 nt, Artificial Sequence
  Description of Artificial Sequence: Synthetic oligonucleotide
ucgggaaucgcugaagauu

SEQ ID NO: 1831050 - RNA, 19 nt, Artificial Sequence
  Description of Artificial Sequence: Synthetic oligonucleotide
gaacuuacagagaaccuua

SEQ ID NO: 1831051 - RNA, 19 nt, Artificial Sequence
  Description of Artificial Sequence: Synthetic oligonucleotide
agaccggaugccuccgagg

SEQ ID NO: 1831052 - RNA, 19 nt, Artificial Sequence
  Description of Artificial Sequence: Synthetic oligonucleotide
uuacuuggggaauggcauc

SEQ ID NO: 1831053 - RNA, 19 nt, Artificial Sequence
  Description of Artificial Sequence: Synthetic oligonucleotide
cugugcgagcuguucaaag

SEQ ID NO: 1831054 - RNA, 19 nt, Artificial Sequence
  Description of Artificial Sequence: Synthetic oligonucleotide
ggcaguugaccaaagauuc

SEQ ID NO: 1831055 - RNA, 19 nt, Artificial Sequence
  Description of Artificial Sequence: Synthetic oligonucleotide
caauaugaggcaugaugca

SEQ ID NO: 1831056 - RNA, 19 nt, Artificial Sequence
  Description of Artificial Sequence: Synthetic oligonucleotide
ccacauccccuuuaaaggg

SEQ ID NO: 1831057 - RNA, 19 nt, Artificial Sequence
  Description of Artificial Sequence: Synthetic oligonucleotide
gaguucgccaccugauuca

SEQ ID NO: 1831058 - RNA, 19 nt, Artificial Sequence
  Description of Artificial Sequence: Synthetic oligonucleotide
agcgauaaugggaaugcca

SEQ ID NO: 1831059 - RNA, 19 nt, Artificial Sequence
  Description of Artificial Sequence: Synthetic oligonucleotide
uguagaccggaugccuccg

SEQ ID NO: 1831060 - RNA, 19 nt, Artificial Sequence
  Description of Artificial Sequence: Synthetic oligonucleotide
aggcaugaugcaggguucc

SEQ ID NO: 1831061 - RNA, 19 nt, Artificial Sequence
  Description of Artificial Sequence: Synthetic oligonucleotide
gaccggaugccuccgagga

SEQ ID NO: 1831062 - RNA, 19 nt, Artificial Sequence
  Description of Artificial Sequence: Synthetic oligonucleotide
guuuaucgggaaucgcuga

SEQ ID NO: 1831063 - RNA, 19 nt, Artificial Sequence
  Description of Artificial Sequence: Synthetic oligonucleotide
auaucuguuuugaguuccg

SEQ ID NO: 1831064 - RNA, 19 nt, Artificial Sequence
  Description of Artificial Sequence: Synthetic oligonucleotide
caggauucuggcuagcaaa

SEQ ID NO: 1831065 - RNA, 19 nt, Artificial Sequence
  Description of Artificial Sequence: Synthetic oligonucleotide
gagaggauuagcucuucua

SEQ ID NO: 1831066 - RNA, 19 nt, Artificial Sequence
  Description of Artificial Sequence: Synthetic oligonucleotide
agagaggauuagcucuucu

SEQ ID NO: 1831067 - RNA, 19 nt, Artificial Sequence
  Description of Artificial Sequence: Synthetic oligonucleotide
agcuuagcagccccuacau

SEQ ID NO: 1831068 - RNA, 19 nt, Artificial Sequence
  Description of Artificial Sequence: Synthetic oligonucleotide
aaggccccgugguagaguu

SEQ ID NO: 1831069 - RNA, 19 nt, Artificial Sequence
  Description of Artificial Sequence: Synthetic oligonucleotide
cuuaagggugcugcguuug

SEQ ID NO: 1831070 - RNA, 19 nt, Artificial Sequence
  Description of Artificial Sequence: Synthetic oligonucleotide
cugcguuugggccucaaca

SEQ ID NO: 1831071 - RNA, 19 nt, Artificial Sequence
  Description of Artificial Sequence: Synthetic oligonucleotide
ugccauuguauaucuguuu

SEQ ID NO: 1831072 - RNA, 19 nt, Artificial Sequence
  Description of Artificial Sequence: Synthetic oligonucleotide
auaugugcauguagaccgg

SEQ ID NO: 1831073 - RNA, 19 nt, Artificial Sequence
  Description of Artificial Sequence: Synthetic oligonucleotide
cucagguggcaguugacca

SEQ ID NO: 1831074 - RNA, 19 nt, Artificial Sequence
  Description of Artificial Sequence: Synthetic oligonucleotide
acuagccgcgcggagcucg

SEQ ID NO: 1831075 - RNA, 19 nt, Artificial Sequence
  Description of Artificial Sequence: Synthetic oligonucleotide
aguucgccaccugauucac

SEQ ID NO: 1831076 - RNA, 19 nt, Artificial Sequence
  Description of Artificial Sequence: Synthetic oligonucleotide
gugcgagcuguucaaaguc

SEQ ID NO: 1831077 - RNA, 19 nt, Artificial Sequence
  Description of Artificial Sequence: Synthetic oligonucleotide
gguuuaucgggaaucgcug

SEQ ID NO: 1831078 - RNA, 19 nt, Artificial Sequence
  Description of Artificial Sequence: Synthetic oligonucleotide
uucucagguuuaucgggaa

SEQ ID NO: 1831079 - RNA, 19 nt, Artificial Sequence
  Description of Artificial Sequence: Synthetic oligonucleotide
acugagcuguggauacccc

SEQ ID NO: 1831080 - RNA, 19 nt, Artificial Sequence
  Description of Artificial Sequence: Synthetic oligonucleotide
cccacgguauccauauugg

SEQ ID NO: 1831081 - RNA, 19 nt, Artificial Sequence
  Description of Artificial Sequence: Synthetic oligonucleotide
uugggaaaguagacuucuc

SEQ ID NO: 1831082 - RNA, 19 nt, Artificial Sequence
  Description of Artificial Sequence: Synthetic oligonucleotide
uaugugcauguagaccgga

SEQ ID NO: 1831083 - RNA, 19 nt, Artificial Sequence
  Description of Artificial Sequence: Synthetic oligonucleotide
aagucuaguuucacgucau

SEQ ID NO: 1831084 - RNA, 19 nt, Artificial Sequence
  Description of Artificial Sequence: Synthetic oligonucleotide
gaucuaccucacuucgaga

SEQ ID NO: 1831085 - RNA, 19 nt, Artificial Sequence
  Description of Artificial Sequence: Synthetic oligonucleotide
cacgaauaguauguuccac

SEQ ID NO: 1831086 - RNA, 19 nt, Artificial Sequence
  Description of Artificial Sequence: Synthetic oligonucleotide
gcagcgauaaugggaaugc

SEQ ID NO: 1831087 - RNA, 19 nt, Artificial Sequence
  Description of Artificial Sequence: Synthetic oligonucleotide
caaugaguucgccaccuga

SEQ ID NO: 1831088 - RNA, 19 nt, Artificial Sequence
  Description of Artificial Sequence: Synthetic oligonucleotide
cgaauaaagguaguucucc

SEQ ID NO: 1831089 - RNA, 19 nt, Artificial Sequence
  Description of Artificial Sequence: Synthetic oligonucleotide
aagguaguucuccgacuua

SEQ ID NO: 1831090 - RNA, 19 nt, Artificial Sequence
  Description of Artificial Sequence: Synthetic oligonucleotide
agcucguaugagucuucag

SEQ ID NO: 1831091 - RNA, 19 nt, Artificial Sequence
  Description of Artificial Sequence: Synthetic oligonucleotide
cuguggauaccccacucca

SEQ ID NO: 1831092 - RNA, 19 nt, Artificial Sequence
  Description of Artificial Sequence: Synthetic oligonucleotide
agacuuaagggugcugcgu

SEQ ID NO: 1831093 - RNA, 19 nt, Artificial Sequence
  Description of Artificial Sequence: Synthetic oligonucleotide
aggauaucacgaauaguau

SEQ ID NO: 1831094 - RNA, 19 nt, Artificial Sequence
  Description of Artificial Sequence: Synthetic oligonucleotide
agcaacuagccgcgcggag

SEQ ID NO: 1831095 - RNA, 19 nt, Artificial Sequence
  Description of Artificial Sequence: Synthetic oligonucleotide
cuuccgaguuguacaaaca

SEQ ID NO: 1831096 - RNA, 19 nt, Artificial Sequence
  Description of Artificial Sequence: Synthetic oligonucleotide
uauguuccacauccccuuu

SEQ ID NO: 1831097 - RNA, 19 nt, Artificial Sequence
  Description of Artificial Sequence: Synthetic oligonucleotide
ggugacucgaauaaaggua

SEQ ID NO: 1831098 - RNA, 19 nt, Artificial Sequence
  Description of Artificial Sequence: Synthetic oligonucleotide
acgccuccugaauauuucu

SEQ ID NO: 1831099 - RNA, 19 nt, Artificial Sequence
  Description of Artificial Sequence: Synthetic oligonucleotide
agguaguucuccgacuuaa

SEQ ID NO: 1831100 - RNA, 19 nt, Artificial Sequence
  Description of Artificial Sequence: Synthetic oligonucleotide
uugugagaucuaccucacu

SEQ ID NO: 1831101 - RNA, 19 nt, Artificial Sequence
  Description of Artificial Sequence: Synthetic oligonucleotide
gaaggaccuugugagaucu

SEQ ID NO: 1831102 - RNA, 19 nt, Artificial Sequence
  Description of Artificial Sequence: Synthetic oligonucleotide
aguuccggaaugagaagga

SEQ ID NO: 1831103 - RNA, 19 nt, Artificial Sequence
  Description of Artificial Sequence: Synthetic oligonucleotide
uucuuaugcuuagcaacua

SEQ ID NO: 1831104 - RNA, 19 nt, Artificial Sequence
  Description of Artificial Sequence: Synthetic oligonucleotide
gggaaugccauuguauauc

SEQ ID NO: 1831105 - RNA, 19 nt, Artificial Sequence
  Description of Artificial Sequence: Synthetic oligonucleotide
uccguacauccuuuacaaa

SEQ ID NO: 1831106 - RNA, 19 nt, Artificial Sequence
  Description of Artificial Sequence: Synthetic oligonucleotide
gcguuugggccucaacagg

SEQ ID NO: 1831107 - RNA, 19 nt, Artificial Sequence
  Description of Artificial Sequence: Synthetic oligonucleotide
ccgacuuaauuccuucagc

SEQ ID NO: 1831108 - RNA, 19 nt, Artificial Sequence
  Description of Artificial Sequence: Synthetic oligonucleotide
ugacagcuagaugcucaag

SEQ ID NO: 1831109 - RNA, 19 nt, Artificial Sequence
  Description of Artificial Sequence: Synthetic oligonucleotide
gaaugccauuguauaucug

SEQ ID NO: 1831110 - RNA, 19 nt, Artificial Sequence
  Description of Artificial Sequence: Synthetic oligonucleotide
uucgagacuuaagggugcu

SEQ ID NO: 1831111 - RNA, 19 nt, Artificial Sequence
  Description of Artificial Sequence: Synthetic oligonucleotide
acuuaagggugcugcguuu

SEQ ID NO: 1831112 - RNA, 19 nt, Artificial Sequence
  Description of Artificial Sequence: Synthetic oligonucleotide
augaguucgccaccugauu
